United States Patent Application Publication US 2022/0096574 A1 - sequence listing, part 9

SEQ ID NO: 40609 - protein, 620 aa, Paracoccus yeei
  misc_feature (1)..(620): tr|A0A2D2C2M1|A0A2D2C2M1_9RHOB 7-cyano-7-deazaguanine s ynthase OS=Paracoccus yeei OX=147645 GN=PYTT13_13795 PE =3 SV=1
MKQHLIECGVTAASCEEAIAMNVHGPSKNVNLRIDYISRTMLSNLPDLLIDLLEVAAYVYCADQRLVRGSEQLSKFGENWRRSLRFSIPVRELEVWQDPEVQDALIDTLGFLSDDSYTFDFRQADTPVQPKELYFKDLIDPADEHDGVALFSGGVDSFAGAVTDLVVNGRSLTLVGHYSSTKVRSVQEGLIAELKRKGFDRHLSYVPVWVSNEGVRAREFTQRTRSFLFACLGFVVARMSGKDSFSFYENGVVSINLPLAGDVVGGRATRTTHPRVLRGLEHLFSLLLDRQIQIHTPLQWLTKTEVTEKIAAAGMPDLLSRTVSCTRPRKWTEGQKHCGVCSQCIDRRFGILAAGLGEHDPSARYMHDLLLDDRSGGDDLRMALAYVSLFKKILATPKARFLVDFPEIVSAVGHFPGVPTSEAGDRLYDLFQRHAKSVEEVIASAVKEHSTALFRNELPAASLLAACYNRSHIEVAPPSNYDADAKAFMDRLSAPMLEFAFDDDRKRVNFRGDLALEGANFKLVAALIEAFRTAKKRQTDVPYLPAPDLAQRIGVSDQSMRQQLKRLREALEPLNVSMGIPMDQDSFVQTKERAGYRLNPQCREISVADIVDGIPSGSAN

SEQ ID NO: 40610 - protein, 234 aa, Paracraurococcus sp.
  misc_feature (1)..(234): tr|A0A4R4DTR1|A0A4R4DTR1_9PROT 7-cyano-7-deazaguanine s ynthase OS=Paracraurococcus sp. NE82 OX=2527868 GN=queC PE=3 SV=1
MNPDSALVLFSGGQDSATCLAWALQRFAHVETIGFDYGQRHRVELEVRDAFRARLARDFPAWAAKLGEDHLLTLDALRAVSDTALTRETTIAMQADGLPNTFVPGRNLIFLTFAAALAYRRGLKHLVAGMCETDYSGYPDCRDDALKALQVAINLGMERRFVLHTPLMWRDKRATWELADQLGGAPLVEAIRADTHSCYLGDRAHQHDWGFGCGTCPACELRRRGWEAWRAAHV

SEQ ID NO: 40611 - protein, 221 aa, Parageobacillus caldoxylosilyticus; identical to SEQ ID NO: 38415
  misc_feature (1)..(221): tr|A0A023DCJ3|A0A023DCJ3_9BACI 7-cyano-7-deazaguanine s ynthase OS=Parageobacillus caldoxylosilyticus NBRC 1077 62 OX=1220594 GN=queC PE=3 SV=1

SEQ ID NO: 40612 - protein, 221 aa, Parageobacillus caldoxylosilyticus; identical to SEQ ID NO: 38415
  misc_feature (1)..(221): tr|A0A150L507|A0A150L507_9BACI 7-cyano-7-deazaguanine s ynthase OS=Parageobacillus caldoxylosilyticus OX=81408 GN=queC PE=3 SV=1

SEQ ID NO: 40613 - protein, 221 aa, Parageobacillus genomosp.
  misc_feature (1)..(221): tr|A0A023CT53|A0A023CT53_9BACI 7-cyano-7-deazaguanine s ynthase OS=Parageobacillus genomosp. 1 OX=1295642 GN=qu eC PE=3 SV=1
MKKEKAVVVFSGGQDSTTCLFWALKQFAEVEAVTFDYGQRHRLEIEVASAIAKELHVPHTVLDMSLLHQLAPNALTRSEIAIEQKEGQLPSTFVDGRNLLFLSFAAVLAKQKGARHLVTGVCETDFSGYPDCRDIFIKSLNVTLNLAMDYQFVIHTPLMWLSKADTWKLADELGAFEFVRTKTLTCYNGIIADGCGECPACVLRKRGLEQYLQEKEGVGRR

SEQ ID NO: 40614 - protein, 221 aa, Parageobacillus thermantarcticus
  misc_feature (1)..(221): tr|A0A1I0TBE5|A0A1I0TBE5_9BACI 7-cyano-7-deazaguanine s ynthase OS=Parageobacillus thermantarcticus OX=186116 G N=queC PE=3 SV=1
MKKEKAVVVFSGGQDSTTCLFWALKQFDEVEAVTFDYGQRHRLEIEVAASIAKELGISHTVLDMSLLNQLAPNALTRSDIAIEQKEGQLPSTFVDGRNLLFLSFAAVLAKQKGARHLVTGVCETDFSGYPDCRDIFIKSLNVTLNLAMDYQFVIHTPLMWLTKAQTWKLADELGAFEFVRTKTLTCYNGIIADGCGECPACVLRRRGLEEYMKEKEGANQL

SEQ ID NO: 40615 - protein, 222 aa, Parageobacillus thermoglucosidasius
  misc_feature (1)..(222): tr|A0A178TXF5|A0A178TXF5_PARTM 7-cyano-7-deazaguanine s ynthase OS=Parageobacillus thermoglucosidasius OX=1426 GN=queC PE=3 SV=1
MGKKEKAVVVFSGGQDSTTCLFWALKQFDEVEAVTFDYGQRHRLEIEVAASIAKELGISHTVLDMSLLNQLAPNALTRSDIAIEQKDGQLPSTFVDGRNLLFLSFAAVLAKQKGARHLVTGVCETDFSGYPDCRDIFIKSLNVTLNLAMDYQFVIHTPLMWLTKAQTWKLADELGAFEFVRTKTLTCYNGIIADGCGECPACVLRRRGLEEYMKEKEGANQL

SEQ ID NO: 40616 - protein, 222 aa, Parageobacillus thermoglucosidasius
  misc_feature (1)..(222): tr|A0A1B7KU06|A0A1B7KU06_PARTM 7-cyano-7-deazaguanine s ynthase OS=Parageobacillus thermoglucosidasius OX=1426 GN=queC PE=3 SV=1
MMKKEKAMVVFSGGQDSTTCLFWALKQFDEVEAVTFDYGQRHRLEIEVAASIAKELGIPHTVLDMSLLNQLAPNALTRSDIAIEQKEGQLPSTFVDGRNLLFLSFAAVLAKQKGARHLVTGVCETDFSGYPDCRDIFIKSLNVTLNLAMDYQFVIHTPLMWLTKAQTWKLADELGAFEFVRTKTLTCYNGIIADGCGECPACVLRRRGLEEYMKEKEGANQL

SEQ ID NO: 40617 - protein, 221 aa, Parageobacillus toebii; identical to SEQ ID NO: 38409
  misc_feature (1)..(221): tr|A0A3D8LXU1|A0A3D8LXU1_9BACI 7-cyano-7-deazaguanine s ynthase OS=Parageobacillus toebii OX=153151 GN=queC PE= 3 SV=1

SEQ ID NO: 40618 - protein, 221 aa, Parageobacillus toebii; identical to SEQ ID NO: 38409
  misc_feature (1)..(221): tr|A0A3M0F538|A0A3M0F538_9BACI 7-cyano-7-deazaguanine s ynthase OS=Parageobacillus toebii NBRC 107807 OX=122350 3 GN=queC PE=3 SV=1

SEQ ID NO: 40619 - protein, 218 aa, Paraglaciecola agarilytica
  misc_feature (1)..(218): tr|K6XH62|K6XH62_9ALTE 7-cyano-7-deazaguanine synthase OS=Paraglaciecola agarilytica NO2 OX=1125747 GN=queC1 P E=3 SV=1
MVQKVVVIFSGGMDSFTVLNMAVKDGYEVHALSFNYGQRHSKELDYASRACKILGVAHKIIDISAINELIGGSSLTSDVDIPEGHYAEESMKSTVVPNRNMILLSMAVGYAVSLDANKVYYGAHSGDHDIYPDCRPEFVERMNDVCAIANYEKIEIVSPFLYQSKIDILTAGLNMRLDYGLTWTCYNGREKACGKCGACQERLEAFEKNDCIDPLSYE

SEQ ID NO: 40620 - protein, 219 aa, Paraglaciecola arctica
  misc_feature (1)..(219): tr|K6Z4V3|K6Z4V3_9ALTE 7-cyano-7-deazaguanine synthase OS=Paraglaciecola arctica BSs20135 OX=493475 GN=queC1 P E=3 SV=1
MSQKVVVIFSGGMDSFTVLNLAVKQGLEVFSLSFDYGQRHKKELDYADRACKTLNVHHKIVDISAINQLIGGSSLTSDIDVAEGHYEEQSMKSTVVPNRNMILLSMAVGYAVSIEANQVYYGAHSGDHAIYPDCRPEFVHKMNDVCAIANYEAVEIVTPYLEVSKTAILTAGLAMGLDYNQTWTCYNGREKACGKCGACQERLEAFSENGVSDPLDYEG

SEQ ID NO: 40621 - protein, 219 aa, Paraglaciecola hydrolytica
  misc_feature (1)..(219): tr|A0A136A0I0|A0A136A0I0_9ALTE 7-cyano-7-deazaguanine s ynthase OS=Paraglaciecola hydrolytica OX=1799789 GN=que C PE=3 SV=1
MTAAKAVVIFSGGMDSFTVLNMAVNQGYEVYALSFNYGQRHKKELDYAARACANLQVQHKIIDISAINELIGGSSLTSDIDVAEGHYEQESMLTTVVPNRNMILLSMAVGYAVSLKASKVFYGAHSGDHAIYPDCRPEFVIKMNDVCAIANYEAVEIVTPFLYDSKIAILKTGLNIGLDYGQTWTCYNGRAKACGKCGACQERLEAFAENGVNDPLEYE

SEQ ID NO: 40622 - protein, 218 aa, Paraglaciecola mesophila
  misc_feature (1)..(218): tr|K6Z927|K6Z927_9ALTE 7-cyano-7-deazaguanine synthase OS=Paraglaciecola mesophila KMM 241 OX=1128912 GN=queC1 PE=3 SV=1
MVQKVVVIFSGGMDSFTVLNMAVKEGYEVHALSFNYGQRHSKELDYASRACKTLGVAHKIIDISAINELIGGSSLTSDVDIPEGHYAEESMKSTVVPNRNMILLSMAVGYAVSLDANKVYYGAHSGDHDIYPDCRPEFVERMNDVCAIANYEKVEIVSPFLYQSKIDILTAGLNMGLDYNLTWTCYNGREKACGKCGACQERLEAFEKNNAKDPLEYE

SEQ ID NO: 40623 - protein, 218 aa, Paraglaciecola polaris
  misc_feature (1)..(218): tr|K7AJI2|K7AJI2_9ALTE 7-cyano-7-deazaguanine synthase OS=Paraglaciecola polaris LMG 21857 OX=1129793 GN=queC PE=3 SV=1
MVQKVVVIFSGGMDSFTVLNMAANDGYEVYALSFNYGQRHSKELDYASRACQNLGVSHKIIDISAINELIGGSSLTSDIDIPEGHYAEESMKQTVVPNRNMILLSMAVGYAVSLDASKVYYGAHSGDHAIYPDCRPEFVERMNDVCAIANYEKVEIVSPFLYQSKIDILTAGLKMGLDYNLTWTCYNGREKACGKCGACQERLEAFEKNNTQDPLTYE

SEQ ID NO: 40624 - protein, 219 aa, Paraglaciecola psychrophila
  misc_feature (1)..(219): tr|K6Z686|K6Z686_9ALTE 7-cyano-7-deazaguanine synthase OS=Paraglaciecola psychrophila 170 OX=1129794 GN=queC P E=3 SV=1
MSQKVVVIFSGGMDSFTVLNLAVKQGLEVFALSFNYGQKHKKELDYAARACQELSVHHKIVDISAINQLIGGSSLTSDIEVAEGHYEEESMKSTVVPNRNMILLSMAVGYAVSIDANKVYFGAHSGDHAIYPDCRPEFVHKMNDVCAIANYEAVEIVTPYLEVSKTAILTAGLKMGLDYNLSWTCYNGREKACGKCGACQERLEAFTENGVTDPLEYEG

SEQ ID NO: 40625 - protein, 219 aa, Paraglaciecola sp.
  misc_feature (1)..(219): tr|A0A2N1DG95|A0A2N1DG95_9ALTE 7-cyano-7-deazaguanine s ynthase OS=Paraglaciecola sp. MB-3u-78 OX=2058332 GN=qu eC PE=3 SV=1
MSQKVVVIFSGGMDSFTVLNLAVKQGLEVFALSFDYGQRHKKELDYAARACKALHVHHKIVDISAINQLIGGSSLTSDIDVAEGHYAENSMKSTVVPNRNMILLSMAVGYAVSMHANKVYFGAHSGDHAIYPDCRPEFVHKMNDVCAIANYEAVEIVTPYLAVSKTAILTAGLKMELDYNLTWTCYNGREKSCGKCGACQERLEAFTENGVSDPLEYEG

SEQ ID NO: 40626 - protein, 227 aa, Parahaliea aestuarii
  misc_feature (1)..(227): tr|A0A5C9A3U9|A0A5C9A3U9_9GAMM 7-cyano-7-deazaguanine s ynthase OS=Parahaliea aestuarii OX=1852021 GN=queC PE=3 SV=1
MESEKRAVILVSGGLDSTTVLAMARSEGYQCYTLSFDYGQRHRAELLAAERVSEALGDVEHKVVKLNLDSIGGSALTDTRIAVPEEETSGIPVTYVPARNTVFLSIALGWAEVLGASDIFIGVNAVDYSGYPDCRPEYVAAFETMANLATRAGVEGSKLTIHAPLMNMGKDEIIATGLALGVDYALTVSCYQATEAGLACGKCDSCRLRKEGFSGAGVADPTRYLDS

SEQ ID NO: 40627 - protein, 225 aa, Parahaliea aestuarii
  misc_feature (1)..(225): tr|A0A5C9A922|A0A5C9A922_9GAMM 7-cyano-7-deazaguanine s ynthase OS=Parahaliea aestuarii OX=1852021 GN=queC PE=3 SV=1
MNNKRAVILVSGGLDSTTVLAMARSEGYQCYTLSFDYGQRHRAELVAADRVSEALGDVEHKVVKLNLDSIGGSALTDTSIDVPEEETGGIPITYVPARNTVFLSIALGWAEVLGANDIFIGVNAVDYSGYPDCRPEYVAAFEAMANLATRAGVEGNKLTIHAPLMDMGKDEIITAGVALGVDYSLTVSCYQATEEGLACGRCDSCRLRREGFVAAGVEDPTRYLP

SEQ ID NO: 40628 - protein, 235 aa, Paralcaligenes ureilyticus
  misc_feature (1)..(235): tr|A0A4R3MA63|A0A4R3MA63_9BURK 7-cyano-7-deazaguanine s ynthase OS=Paralcaligenes ureilyticus OX=627131 GN=queC PE=3 SV=1
MHTKALVLFSGGQDSTTCLAWALKHYAHVETVGFDYGQRHSVELECRRTILSKIRTDYPEWASRLADDHLIDLHVLGDISDTALTREAGIAFEKNGLPNTFVPGRNLLFFTFAATIAYRRDLSVLVGGMCETDYSGYPDCRDTTLKSLQASLNLGMDKPLVIETPLMWLDKRQTWLMAEQLGGKEFVGLICEDTHTCYLGDRSTRHAWGYGCGICPACELRANGFKAYAAEPAPD

SEQ ID NO: 40629 - protein, 217 aa, Paraliobacillus ryukyuensis
  misc_feature (1)..(217): tr|A0A366E191|A0A366E191_9BACI 7-cyano-7-deazaguanine s ynthase OS=Paraliobacillus ryukyuensis OX=200904 GN=que C PE=3 SV=1
MQNNKAIVVFSGGQDSTTCLFWALERFEHVEVVTFDYQQRHQEEIEVAQRIAEKLSVKQTILDMSLLNQLAPNALTRSDQAIEEGKGGELPSTFVPGRNLLFLSFATILGRQIDAKHIVTGVCETDFSGYPDCRDIFIKSLNVSLNLSMDDQFVIHTPLMWLNKAETWELADELDAFEFVREETLTCYNGIKGDGCGECPACKLRKRGLEQYLAKRT

SEQ ID NO: 40630 - protein, 218 aa, Paraliobacillus sp.
  misc_feature (1)..(218): tr|A0A0U1KQV6|A0A0U1KQV6_9BACI 7-cyano-7-deazaguanine s ynthase OS=Paraliobacillus sp. PM-2 OX=1462524 GN=queC PE=3 SV=1
MKNNKAIVVFSGGQDSTTCLFWALERFNEVEVVTFDYQQRHDKEIEIAKHIAEKLEVKQTILDMSLLNQLAPNALTRSNQAITDGENGELPSTFVPGRNLLFLSFATILGRQIGAKHIITGVSETDFSGYPDCRDIFIKSLNVSLNLSMEDQFVIHTPLMWLDKAETWELADQLGAFDFIREETLTCYNGIQADGCGECPACKLRKNGLEQFLATRSQ

SEQ ID NO: 40631 - protein, 225 aa, Paramaledivibacter caminithermalis
  misc_feature (1)..(225): tr|A0A1M6QZB3|A0A1M6QZB3_9CLOT 7-cyano-7-deazaguanine s ynthase OS=Paramaledivibacter caminithermalis DSM 15212 OX=1121301 GN=queC PE=3 SV=1
MRKAIVIFSGGQDSTTCLFWAIKKFDFVKAVTFDYDQRHIKEVEVAKSITEKLKVPHQIIKLPEIKNIITTSSLTNIDIPIGKIHEKEYPNSFVPGRNLLFITYASIVAYQENIGDLVLGASEADYSGYPDCRESFIKNSQETLKKAMDRNFKIHVPLIHLDKSEVWELAYDLGAYDFVIENTLTCYNGIMSDGCGTCPACKLRNKGLLEFEKRRYRYEIKKSSV

SEQ ID NO: 40632 - protein, 236 aa, Paramesorhizobium deserti
  misc_feature (1)..(236): tr|A0A135HZ57|A0A135HZ57_9RHIZ 7-cyano-7-deazaguanine s ynthase OS=Paramesorhizobium deserti OX=1494590 GN=queC PE=3 SV=1
MKTLVICSGGLDSVSLAHKVAAEHELVGLLSFDYGQRHKKELDFAAACAKRLKVPHRIIDIGAIGRALSGSALTDNVDVPDGHYAEETMRITVVPNRNAIMLAIAFGVAAAENADAVAVAVHGGDHFIYPDCRPGFIDAFQTMQQHALDGYADIKLLAPYVNISKADIVTDGAKHGTPFAETWSCYKGGERHCGRCGTCVERREAFHLAGIEDPTVYEDHDYWLEAVRKGPGPQGG

SEQ ID NO: 40633 - protein, 214 aa, Paramuribaculum intestinale
  misc_feature (1)..(214): tr|A0A2V1ISN4|A0A2V1ISN4_9BACT 7-cyano-7-deazaguanine s ynthase OS=Paramuribaculum intestinale OX=2094151 GN=qu eC PE=3 SV=1
MEKDTLLIYSGGLDSTTLLWEYAPRIALAVNFSYGANQNEREAECARWQCRKAGIELIEIPLAFMKQYFKSSLLEGPDAVPDGQYAGDNMSSTVVPFRNGIMLSIAAGIAESRGLHHVMMANHSGDHEVYPDCRPQFVEAINAAISAGTYAGITLTAPYTGLTKNEIALRGMRLGVDYDHTYSCYRGTPQHCGSCATCRERQQALRYAREALED

SEQ ID NO: 40634 - protein, 222 aa, Paraperlucidibaca baekdonensis
  misc_feature (1)..(222): tr|A0A3E0H101|A0A3E0H101_9GAMM 7-cyano-7-deazaguanine s ynthase OS=Paraperlucidibaca baekdonensis OX=748120 GN= queC PE=3 SV=1
MSHAVVLLSGGLDSVTCLALAQSQGYTITALSFDYGQRHNAELNAARAIATHYGVKDHRVLRIDLGAMGGSALTDAALAVPESHSEGIPITYVPARNTVFLAFALGVAEVTGAEAIFIGVNAVDYSGYPDCRPAFIDAFQTLANLATKTGVEGVSVRIETPLIALPKSEIIHTGLALGVDYGLTVSCYQADTHGHACGRCDACRLRRDGFQVAGVTDPTRYQ

SEQ ID NO: 40635 - protein, 278 aa, Paraphotobacterium marinum
  misc_feature (1)..(278): tr|A0A220VHH7|A0A220VHH7_9GAMM 7-cyano-7-deazaguanine s ynthase OS=Paraphotobacterium marinum OX=1755811 GN=CF3 86_10105 PE=3 SV=1
MKKFAVLSFSGGMDSSSLLLKLLAQGFHVTTISIDYGQKHKIELEKASQLIQLLQSKNLNVEHQNITISGISELLESSLVEGGDEIPTGHYSEENMKSTVVPNRNKIFSSIIQSIALSISLKTDSEVLIAMGAHAGDHDTYPDCRPIFRDKDYEAFITGNYNEAKKVKYYLPYIELDKSQVLKDGLNSCNILALDFKEVYNLTHTSYSTVKINNELISDYSSSASVSRIEAFINNHIQDPIPYADPLTNKILDWDNVSQKVQKIIHDFEMRNNISKND

SEQ ID NO: 40636 - protein, 231 aa, Paraprevotella clara
  misc_feature (1)..(231): tr|G5SQF8|G5SQF8_9BACT 7-cyano-7-deazaguanine synthase OS=Paraprevotella clara YIT 11840 OX=762968 GN=queC PE= 3 SV=1
MTMNKETALVVFSGGQDSTTCLFWAKKHFKKVVALSFVYGQKHVKEVELAKAIASRADVDWDCMDVSFVGSLGRNSLTDATMQMDEEKPEGHCPNTFVPGRNLFFISIAAVYARERGINHIVTGVSQTDFSGYPDCRDAFIKSLNVTLNLAMDEQFVLHTPLMWIDKCQTWALADELGVLDLVRHDTLTCYNGVQGDGCGHCPACKLRNEGLHKYLAEKECKSHVEENIEP

SEQ ID NO: 40637 - protein, 231 aa, Paraprevotella clara
  misc_feature (1)..(231): tr|R5NV65|R5NV65_9BACT 7-cyano-7-deazaguanine synthase OS=Paraprevotella clara CAG:116 OX=1263095 GN=queC PE=3 SV=1
MTMNKETALVVFSGGQDSTTCLFWAKKHFKKVVALSFVYGQKHVKEVELAKAIASRADVDWDCMDVSFVGSLGRNSLTDATMQMDEEKPEGHCPNTFVPGRNLFFISIAAVYARERGINHIVTGVSQTDFSGYPDCRDAFIKSLNVTLNLAMDEQFVLHTPLMWIDKCQTWALADELGVLDLVRHDTLTCYNGVQGDGCGHCPACKLRNEGLHKYLAEKECKSHVKENTEP

SEQ ID NO: 40638 - protein, 231 aa, Paraprevotella xylaniphila
  misc_feature (1)..(231): tr|F3QSJ5|F3QSJ5_9BACT 7-cyano-7-deazaguanine synthase OS=Paraprevotella xylaniphila YIT 11841 OX=762982 GN=qu eC PE=3 SV=1
MTMNKETALVVFSGGQDSTTCLFWAKKHFKKVVALSFVYGQKHVKEVELAKAIASRAGVDWDCMDVSFVGSLGRNSLTDSTMQMDEEKPEGSCPNTFVPGRNLFFISIAAVYARERGVNHIVTGVSQTDFSGYPDCRDAFIKSLNVTLNLAMDEQFVLHTPLMWIDKCQTWALADELGVLDLVRHDTLTCYNGVQGDGCGHCPACKLRNEGLHKYLAEKECKLHVEENIEP

SEQ ID NO: 40639 - protein, 225 aa, Pararheinheimera mesophila
  misc_feature (1)..(225): tr|A0A3P3QRW0|A0A3P3QRW0_9GAMM 7-cyano-7-deazaguanine s ynthase OS=Pararheinheimera mesophila OX=1547515 GN=que C PE=3 SV=1
MPQKVVVIYSGGMDSFTVLHKAIAEGHHVYALSFNYGQRHVKELICAKSVCEELGISHKVVDISAINQLLAGSSLMAPDSTHEDIQVPEGHYAADNMKSTVVPNRNMILLSLAVGYAVSLNARAVYYGAHSGDHFIYPDCRPEFVHKMNDVCQVANYEPVDIVSPYLSQTKIEILRDGLAMGLDYSKTWTCYNGREKACGKCGSCQERLEAFELNNATDPLIYEG

SEQ ID NO: 40640 - protein, 225 aa, Pararheinheimera tangshanensis
  misc_feature (1)..(225): tr|A0A5C8LUP7|A0A5C8LUP7_9GAMM 7-cyano-7-deazaguanine s ynthase OS=Pararheinheimera tangshanensis OX=400153 GN= queC PE=3 SV=1
MPQKVVVIYSGGMDSFTVLHKAIADGHEVYALSFNYGQRHVKELLCAKNVCEELGVPHKVVDISAINQLLAGSSLMAPDSTHEDIQIPEGHYAADTMKSTVVPNRNMILLSLAVGYAVSLNARAVYYGAHSGDHFIYPDCRPEFVHKMNDVCQVANYEPVDIVSPYLSQTKIEILRDGLAMGLDYSKTWTCYNGREKACGKCGSCQERLEAFELNQATDPLAYEG

SEQ ID NO: 40641 - protein, 236 aa, Pararhizobium polonicum
  misc_feature (1)..(236): tr|A0A1C7P043|A0A1C7P043_9RHIZ 7-cyano-7-deazaguanine s ynthase OS=Pararhizobium polonicum OX=1612624 GN=queC P E=3 SV=1
MKTIVICSGGLDSVSLAHKVAAEHQLIGLLSFDYGQRHRKELDYAAACAKRLGVAHQIIDISAIGSHLTGSALTDDIEVPDGHYAEETMKATVVPNRNAIMLAIAFGLAAAQQADAVAVAVHGGDHFIYPDCRPGFIDAFQAMQNQALDGYANVLLLAPYVTISKADIVTDGVKYGTPFAETWSCYKGGARHCGRCGTCVERREAFHLAGVDDPTDYDDPDFWVGATTGFSAAEVK

SEQ ID NO: 40642 - protein, 246 aa, Parasaccharibacter apium
  misc_feature (1)..(246): tr|A0A2S4PDC2|A0A2S4PDC2_9PROT 7-cyano-7-deazaguanine s ynthase OS=Parasaccharibacter apium OX=1510841 GN=queC PE=3 SV=1
MTTPASPSASHQAARNRRALVLFSGGQDSATCLAWALHHFDHVETVGFAYGQRHAVELECRTTLRQSISAQNPAWAEKLGEDHTIDLASLGALSDTALTRDAEISMGENGLPNTFVPGRNLIFLTFAAALAFRRSIRHIITGVCETDYSGYPDCRDDTIKALQVALNLGMEQRFVLHTPLMWINKAQTWRLCHDLGGADLTETIRHESHSCYKGDRTHEHAWGFGCGDCPACALRAEGWRQYQEGA

SEQ ID NO: 40643 - protein, 245 aa, Parasaccharibacter apium
  misc_feature (1)..(245): tr|A0A2C6J3R7|A0A2C6J3R7_9PROT 7-cyano-7-deazaguanine s ynthase OS=Parasaccharibacter apium OX=1510841 GN=queC PE=3 SV=1
MPNAPLSASHQAAQNRRALVLFSGGQDSATCLAWALQHFEHVETVGFAYGQRHAIELECRNTLRHGLTEQNPLWAKKLGEDHMIDLASLGALSDTALTRDAEISMGENGLPNTFVPGRNLIFLTFAAALAFRRSLRHIVTGVCETDYSGYPDCRDDTIKALQVALNLGMEQRFVLHTPLMWINKAQTWQLCHELGGDSLVDIIRHESHSCYKGERSHEHPWGFGCGDCPACALRAEGWRHYQEGL

SEQ ID NO: 40644 - protein, 235 aa, Parashewanella curva
  misc_feature (1)..(235): tr|A0A3L8PU64|A0A3L8PU64_9GAMM 7-cyano-7-deazaguanine s ynthase OS=Parashewanella curva OX=2338552 GN=queC PE=3 SV=1
MSSISKAVIVFSGGQDSTTCLFQAMAHYDEVHAITFDYGQRHKQEINQAQFLAKKLNVASHKIMDVSLLNELAISALTRDSIPVSHTLMENGLPNTFVPGRNILFLTLAGIYAYQLGAETVITGVCETDFSGYPDCRNDFVKAMNSALVQGMDYKLNIVTPLMWLDKAETWALADKYQALETVRNDSLTCYNGIVGDGCGDCPACDLRLKGLYHYLHNKEEVMHSLEEKIRAEMA

SEQ ID NO: 40645 - protein, 233 aa, Parashewanella spongiae
  misc_feature (1)..(233): tr|A0A3A6UIX3|A0A3A6UIX3_9GAMM 7-cyano-7-deazaguanine s ynthase OS=Parashewanella spongiae OX=342950 GN=queC PE =3 SV=1
MSKALVVFSGGQDSTTCLIQALTQYDEVHAITFDYGQRHDEEIERAKALAKQFNIASHKVMDVTLLNELAISALTRDSIPVSHTLMDNGLPNTFVPGRNILFLTLAGIYAYQLGADSVITGVCETDFSGYPDCRNDFVKAMESALVQGMDRKLDIVTPLMWLNKAETWALADKYDSLDVVRNQTLTCYNGIIGDGCGDCPACDLRSKGLHDYLENKQKVMHSLDEKNRAKNIN

SEQ ID NO: 40646 - protein, 230 aa, Parasphingopyxis lamellibrachiae
  misc_feature (1)..(230): tr|A0A3D9FDW2|A0A3D9FDW2_9SPHN 7-cyano-7-deazaguanine s ynthase OS=Parasphingopyxis lamellibrachiae OX=680125 G N=queC PE=3 SV=1
MAHDTSKFAVLLLSGGLDSMVTGGLAREAGYRLFALTIDYNQRHRIELEAAANVAAALEVERHIVMPLDLSKFGGSALTADIDVPKTGVGDDIPVTYVPARNTIFLSLCLGWAEAADARDIFIGVNALDYSGYPDCRPDFIASFEAMANLATKAGVEGDGFTVHTPLLDMSKADIAAEAVRLGLDAGISWSCYDPTPDHKHCGLCDSCRLRSKGFAEAGLTDPTIYATAP

SEQ ID NO: 40647 - protein, 231 aa, Parasutterella excrementihominis
  misc_feature (1)..(231): tr|R5DY44|R5DY44_9BURK 7-cyano-7-deazaguanine synthase OS=Parasutterella excrementihominis CAG:233 OX=1263099 GN=queC PE=3 SV=1
MKAIVLSSGGVDSTTCLAMAVHELGKENVVTLSFEYGQRHCKELESAQKVADYYGVRHVVFNLTQIFSFSNCSLLSTSTEKPVHESYAEQISKNGEGKVSTYVPFRNGLMLSAGAALAQSLFPEEKCEIWIGAHADDAAGNAYADCSVGFNNAMNEAINIGTYGLVSLRAPLNRWNKAQVVAKGLELKVPYELTWSCYDGGEKACGECGTCIDRKAAFEANGVKDPIEYLK

SEQ ID NO: 40648 - protein, 231 aa, Parasutterella excrementihominis
  misc_feature (1)..(231): tr|F3QLC4|F3QLC4_9BURK 7-cyano-7-deazaguanine synthase OS=Parasutterella excrementihominis YIT 11859 OX=762966 GN=queC PE=3 SV=1
MKAIVLSSGGVDSTTCLAMAVHELGKENVVTLSFEYGQRHCKELESAQKVADYYGVRHVVFNLTQIFSFSNCSLLSTSTEKPVHESYAEQISKNGEGKVSTYVPFRNGLMLSAGAALAQSLFPEEKCEIWIGAHADDAAGNAYADCSVGFNNAMDQAINIGTYGLVSLRAPLNRWNKAQVVAKGLELKVPYELTWSCYDGGEKACGECGTCIDRKAAFEANGVKDPIEYVK

SEQ ID NO: 40649 - protein, 282 aa, Parcubacteria bacterium
  misc_feature (1)..(282): tr|A0A101G4E2|A0A101G4E2_9BACT 7-cyano-7-deazaguanine s ynthase OS=Parcubacteria bacterium 33_209 OX=1635290 GN =XD75_0201 PE=3 SV=1
MRKPVKIMGNWDELSAKKKVNEDLLLLKIIEDLFIKKRGYIVKMPKPGNSVVACLSGGQDSVANIGILLKDFKLNVYPFFINRGQSNYKYEKKAVNYFNNFYKKKFPSIYHDCKEIKINTPGLEYKNLLRETQKNANKTFLERNIAYPARGSVIFLTGMEYGYSLKCKGIKIKTLFASNMSSDPAFHCSQTWIRIMNLLFCQTLNDWSWQFISIPIEKEFKNCYDKDVFIKWAYENDIPLHKARTCMKSFNLECGTCFACQCRRNGYARAGIKDPTKYISKI

SEQ ID NO: 40650 - protein, 305 aa, Parcubacteria group
  misc_feature (1)..(305): tr|A0A2D6FNP3|A0A2D6FNP3_9BACT 7-cyano-7-deazaguanine s ynthase OS=Parcubacteria group bacterium OX=2026774 GN= CMI54_08930 PE=3 SV=1
MTIKKPQLTNSHQLSPTFTNSHQLSPTLTNSHQLSPKMSDKKRIPVLSLSGGMDSSALLLHSIAGFGEEPVYSLSFDYGQKHKIELEKLQSNLVLLRSKGFQIRHAVVDLSVLGTLFHSSLTTGSWSSPEGHYAEDSMKETVVPNRNAIFSSIIYGYALSLAKENECETSICLGVHSGDHAIYPDCRPEFYSAISQAFRVGNWDNELVDFYLPYLDGDKESILRDAMNCCLQLGVDFDEYFANTNTSYSPDEQGRASGKTGSDIERILAFDALGKKDPVEYQEPWEVVVQRARELEKKQAEVEDE

SEQ ID NO: 40651 - protein, 223 aa, Parcubacteria group; identical to SEQ ID NO: 37290
  misc_feature (1)..(223): tr|A0A0G0T3G9|A0A0G0T3G9_9BACT Uncharacterized protein OS=Parcubacteria group bacterium GW2011_GWF2_39_8b OX=1 618963 GN=UT65_C0002G0028 PE=4 SV=1

SEQ ID NO: 40652 - protein, 235 aa, Parendozoicomonas haliclonae
  misc_feature (1)..(235): tr|A0A1X7AJX6|A0A1X7AJX6_9GAMM 7-cyano-7-deazaguanine s ynthase OS=Parendozoicomonas haliclonae OX=1960125 GN=q ueC PE=3 SV=1
MTNKETGSSKKAVVIYSGGMDSFTVLHKARQQGYELFALSFNYGQRHSKELEYAARVCEQLQIPHKVVDITAINQLVGGSALTSDEIAVPEGHYAEENMKATVVPNRNMILLSLATGYALSIGADKVFYGAHSGDHTIYPDCRPEFVEAVNKVTQICDWTPVTIEAPYLYASKIEILRDGLAMGLDYGQTWTCYNGREHACGKCGSCAERLEAFTLNNATDPLAYETREAQGESA

SEQ ID NO: 40653 - protein, 230 aa, Parvibacter caecicola
  misc_feature (1)..(230): tr|A0A3N0ACS8|A0A3N0ACS8_9ACTN 7-cyano-7-deazaguanine s ynthase OS=Parvibacter caecicola OX=747645 GN=queC PE=3 SV=1
MDSEKALVLCSGGVDSTTLLAMAVRQFGAANVVTLSISYGQRHSREIEAAKAVAAHYGVQQRFLDLAAIFAESDCSLLAHSTQAVPESSYAQQRSEADGAPVGTYVPFRNGLFLSSAASMALSLGCSAVYYGAHHDDWAGDAYPDCSQAFVDAMGAAIAEGTGGQLQLRAPFVQMTKADIVRTGLELEVPYELTWSCYEGGEAPCGKCATCIDRIAAFRANGTEDPLIMA

SEQ ID NO: 40654 - protein, 216 aa, Parvibacter caecicola
  misc_feature (1)..(216): tr|A0A3N0AAL9|A0A3N0AAL9_9ACTN ExsB family transcriptio nal regulator OS=Parvibacter caecicola OX=747645 GN=DMP 11_04470 PE=4 SV=1
MAADGPDTGPGQQLEAEPLDQFLARERRFAVAFSGGTDSALLLAAAKQAGCTVAAYMVKTAFQPQFELEDARTVAQALEVPLAVVEADVLAQADICANPQDRCYLCKRFIFQTVANAAAADGFALVADGTNGTDNPARRPGFKALAEAGVVSPLRRAGLSKAEVRRRLREQERTRGLAPNALKSAKPSFPCLAVFVPEGCQINEASLAAAREARGL

SEQ ID NO: 40655 - protein, 197 aa, Parvibaculum lavamentivorans
  misc_feature (1)..(197): tr|A7HPX5|A7HPX5_PARL1 7-cyano-7-deazaguanine synthase OS=Parvibaculum lavamentivorans (strain DS-1 / DSM 1302 3 / NCIMB 13966) OX=402881 GN=Plav_0335 PE=3 SV=1
MKALLLSGGIDSSALAHWTRPDICVTLDYGQQAALGEAAASRAICSELHLEHKLISVDLSSLGSGSMAGRETALGGAAPEFWPYRNQMLVTLAAMLLQPIGLRELMIGTVATDLHADGSVRFIQTLNALMRLQEGCVTVTAPAQNLTSTELLKLSSFPRELIGVTFSCHLHRYACGQCSGCIKHREVVDEAFPQGTS

SEQ ID NO: 40656 - protein, 236 aa, Parvibaculum lavamentivorans
  misc_feature (1)..(236): sp|A7HXX1|QUEC_PARL1 7-cyano-7-deazaguanine synthase OS =Parvibaculum lavamentivorans (strain DS-1 / DSM 13023 / NCIMB 13966) OX=402881 GN=queC PE=3 SV=1
MATTEKTKALVLFSGGQDSTVCLASVLARYDEVETVGFDYGQAHAVELGCRAKLRDALTRFPGWGAKLGPDHMIALPELGRISETALTRDVEIEMGENGLPTTFVPGRNLLFFTYAAALGYRRGASVIVGGMCETDYSGYPDCRADTIAALERAICLGMDRAFTLETPLMRIDKAATWALAHELGGDALVDLIIEETHSCYRGDRSKRHDWGYGCGTCPACELRARGYTAYLAGKA

SEQ ID NO: 40657 - protein, 242 aa, Parvibaculum sp.
  misc_feature (1)..(242): tr|A0A2D4VFS1|A0A2D4VFS1_9RHIZ 7-cyano-7-deazaguanine s ynthase OS=Parvibaculum sp. OX=2024848 GN=queC PE=3 SV= 1
MAQTPQKPDKALVLFSGGQDSTVCLAWALARYEKVETIGFDYGQSHKVELECRERVRERLCELFPDWAARLGPDHMLDLTTLGAISDTALTREAEIEMGEDGLPTTFVPGRNLLFLTYAAALGYRRGAFTLVGGMCETDYSGYPDCRDETMRSLQQSLSLGMAKPYTIETPLMWIDKAATWALAEELGGKALVELIIEDTHTCYRGNRRQRHDWGYGCGTCPACELRASGYEKWRAAQAAGR

SEQ ID NO: 40658 - protein, 239 aa, Parvibaculum sp.
  misc_feature (1)..(239): tr|A0A2D8XBS0|A0A2D8XBS0_9RHIZ 7-cyano-7-deazaguanine s ynthase OS=Parvibaculum sp. OX=2024848 GN=queC PE=3 SV= 1
MKSTDTAMVLFSGGQDSTVCLAWALDRFTAVETIGFDYGQSHKIELDCRLSIRSKLIEAFPQWKDRLGPDHLLHLNALGEISETGLTRDQEIVMGNNGLPTSFVPGRNLLFLTYAAAVGYRRGASHLVGGMCETDFSGYPDCRDDTLKALTHAISLGMDRPFMLHTPLMWIDKQETWAMADRLGGQALVDLVIEETHTCYKGDRTHRHPWGYGCDDCPACELRATGFNNWTQRASGAAD

SEQ ID NO: 40659 - protein, 236 aa, Parvibium lacunae
  misc_feature (1)..(236): tr|A0A368L3E6|A0A368L3E6_9BURK 7-cyano-7-deazaguanine s ynthase OS=Parvibium lacunae OX=1888893 GN=queC PE=3 SV =1
MNAAPSSPQRAVVLLSGGLDSTTVLAIARAAGYDCACLSFDYGQRHRAELQAAKRIANALGAYRHQVVQLDLRPFAGFGGSALTDESIAVPTAGLSSGIPVTYVPARNTIMLAIALGFAEVNQAQHIFFGANAVDYSGYPDCRPAYVQAFSAMANLATKAAIEGQLLEIHTPIIHATKAEIIQQGHALGVDYGLTVSCYQANDAGEACGVCDSCRLRKIGFQQAGLADPTRYQSAQ

SEQ ID NO: 40660 - protein, 243 aa, Parvularcula bermudensis
  misc_feature (1)..(243): tr|E0TC97|E0TC97_PARBH 7-cyano-7-deazaguanine synthase OS=Parvularcula bermudensis (strain ATCC BAA-594 / HTCC 2503 / KCTC 12087) OX=314260 GN=queC PE=3 SV=1
MKTKNADRPAIKPVDAGALVLLSGGQDSATCLAWALGRYRVVETLGFDYGQRHRVELDARERVRAWWADRPEGGALGADHRLPVPAFGEIGDTAMTAEVEIEMAANGLPTTFVPGRNLAFLVFAGALALRRGLSVVVGGMCQTDAAGYPDCRWETIKAQADALSLGIDPSLSVATPLMFRSKAETWALAQELGGDDLVSMIVEDTHTCYRGDREHRHPWGYGCGDCPACHERARGWATWQESR

SEQ ID NO: 40661 - protein, 456 aa, Parvularcula sp.
  misc_feature (1)..(456): tr|A0A2E1XGA4|A0A2E1XGA4_9PROT ATPase OS=Parvularcula s p. OX=1979207 GN=CMI63_14130 PE=4 SV=1
MRKTPYICALDVQVMHPEDNVLGNATPCIIGRHITFDADGLQTYYTDGWRPIIYDAMLVAAAVEACDHSRARASMDWGRQFRVTVPVHDPQLWSSRRVQETLVRALKMLTGDNWTFQFTKTSAPQLGPVQGHFGFPAQADAVMPFSDGLDSRAVSAVVEETTKDQLIRVRVGSNKITRVKSGDPRQPFANVPFRVTKIKNGNGEASGRSRGFKFAMLSGIAAYLIGAKRIIVPESGQGALGPVLVNLGQSYFDRRTHPQYTSLMSDFFEALFGVRIAFDHPVLWNTKGESLTACRALKHGDEIWRETRSCWKDARHASLNGDHRQCGVCAACMLRRSSLHAAKYQEDPAMYIWENLSASDFWEGAHKDHTNRANAQRDYAVAGVLHMDHLAALARADDRDILISRQALILANVLGISFEDAAARIVRLLKAHAEEWSSFVQSLSKSSFIRDWAQAA

SEQ ID NO: 40662 - protein, 238 aa, Parvularcula sp.
  misc_feature (1)..(238): tr|A0A2E1XFI6|A0A2E1XFI6_9PROT 7-cyano-7-deazaguanine s ynthase OS=Parvularcula sp. OX=1979207 GN=queC PE=3 SV= 1
MRKLDHKRALVLFSGGQDSSISLAWALDRYAHVETVGFIYGQRHSVELGARLSVRKAMTDAFPRWAGKLGEDTLVDARGLKDLGETAMTHETAIVLGNDGLPTTFVPGRNLVFLSLSGGLAYRRNLGVLVAGMCEADYSGYPDCRETALAAQTEALRLGMDANFMLETPLMHIDKAESWRLAERTGGEKLVALINEHSHTCYRGVRAARHDWGYGCGECPACELRARGWAGYRGREAS

SEQ ID NO: 40663 - protein, 241 aa, Parvularculaceae bacterium
  misc_feature (1)..(241): tr|A0A520R8L6|A0A520R8L6_9PROT 7-cyano-7-deazaguanine s ynthase OS=Parvularculaceae bacterium OX=2510335 GN=que C PE=3 SV=1
MRQLNRNRALVLFSGGQDSSIALAWALQQFDSVETIGFAYGQRHKVELDARQNVRQILIQHDPDWKQRLGPDHIVDLAGFGEISETALTRDTEIVMTEAGLPNTFVPGRNLVFLSVAAGLAYRRDIAVLVAGMCEEDATGYPDCRADTLKAQLGALRLGLDADMRLETPVLHITKAQSWAFAQTLGGTRLVDAIRIHSHTCYKGVRDVHAWGAGCGACPACQLRAEGWQAYVSALSPMDLD

SEQ ID NO: 40664 - protein, 230 aa, Pasteurella aerogenes
  misc_feature (1)..(230): tr|A0A448K5B5|A0A448K5B5_PASAE 7-cyano-7-deazaguanine s ynthase OS=Pasteurella aerogenes OX=749 GN=queC PE=3 SV =1
MQISKILNPNNNRKAVVIFSGGQDSTTCLLLAIQEYGLENVHAMTFQYGQRHHIELQKAQWICQDLGVKQHILDMTAMQIFAPNAMMSETDIVKNEKGVPNTVVDGRNALFLLYAAIYAKSKGMTDIITGVCETDFSGYPDCRDVFIKSMNVTLNLSMDYHFNIRTPLMYLTKAQTWQLADELDRLDYVREHTHTCYLGVEGGCGKCPSCILREKGLAEYLAQKSAVENV

SEQ ID NO: 40665 - protein, 438 aa, Pasteurella bettyae
  misc_feature (1)..(438): tr|I3DH90|I3DH90_9PAST 7-cyano-7-deazaguanine synthase OS=Pasteurella bettyae CCUG 2042 OX=1095749 GN=HMPREF10 52_1844 PE=3 SV=1
MTQLVFHHDIEQLKNLPNGVIPVHLYGVGNKKLQIANIGNKVLDEVKRLGIEPSDVVMDFLTIALAVTAADTFVLRKDAANGWCRSLSITLPLCQPDIWQANKTHLEQILHFLSGDIWQFNFQAGGKLPPQPHKLNSRAKLVDLRNKDCICLFSGGLDSAIGAVDLLEQGYSPVLVSHSYKGDKSRQQMIIEKFNQSRYANQFSQFNAIAQPHLNNGRTTEITMRTRSLNFLAFAVVSAYALQEVVQEEIDIFVPENGVISINAPLTPRRVGTLSTRTTHPYFIQELQKLFTAVNIPFTLKNPYQFKTKGQMIAECANLPLLQQIIPDTVSCSHWKRKNQQCGVCVPCLIRRASLHYAGITNDAEYEFNDIRQILTHQDRKDDLFALMSAIGQKKHRNINQWVLQSGSLPAQQLNQFADVFRNGLNEVEQLLIVNQIL

SEQ ID NO: 40666 - protein, 222 aa, Pasteurella bettyae
  misc_feature (1)..(222): tr|I3D698|I3D698_9PAST 7-cyano-7-deazaguanine synthase OS=Pasteurella bettyae CCUG 2042 OX=1095749 GN=queC PE= 3 SV=1
MNILNPNDNRKAVVIFSGGQDSTTCLIKAIADYGVANVEVITFQYGQRHAIELEKAQWIAEDLGVKQTLIDTSVIKAITTNAMMENIEITKDKNNMPNTFVDGRNAIFLLYAAIYAKGQGITDIITGVCETDFSGYPDCRDVFVKSMNVTLNLAMDYQFNIITPLMYLTKAQTWQLADELGALDYIREHTHTCYLGVEGGCGSCPSCLLRENGLNEYLSSKQ

SEQ ID NO: 40667 - protein, 228 aa, Pasteurella caecimuris
  misc_feature (1)..(228): tr|A0A4S2E549|A0A4S2E549_9PAST 7-cyano-7-deazaguanine s ynthase OS=Pasteurella caecimuris OX=1796644 GN=queC PE =3 SV=1
MNISNPNHNRKAVVIFSGGQDSTTCLFQAIADYGKENVETITFQYGQRHAVELEKAQWIAQDLGIKQTLVDTSVIKAITHNALIDQQTKIEQKNHELPNTFVDGRNALFLLYAAIYAKGQGIQDIITGVCETDFSGYPDCRDVFVKSMNVTLNLAMDYQFNIKTPLMYLTKAQTWQLADELGVLDYVQQHSHTCYEGVEGGCGNCPSCELRNKGLQQYLRQKGGEKNV

SEQ ID NO: 40668 - protein, 224 aa, Pasteurella canis
  misc_feature (1)..(224): tr|A0A379EUY3|A0A379EUY3_9PAST 7-cyano-7-deazaguanine s ynthase OS=Pasteurella canis OX=753 GN=queC PE=3 SV=1
MNITNPNNNRKAVVIFSGGQDSTTCLIQAIQEYGVENVETITFQYGQRHTIELEKAQWIAQDLGIKQTLIDTSVIKAITQNALMDDNAKIEQQGHTPNTFVDGRNALFLLYAAIYAKGQGIQDIITGVCETDFSGYPDCRDIFIKSMNVTLNLAMDYQFNLKTPLMYLTKTQTWQLADELGALDYIRQHTHTCYIGVEQGCGECPSCILREKGLQEYLSMKSAV

SEQ ID NO: 40669 - protein, 224 aa, Pasteurella dagmatis
  misc_feature (1)..(224): tr|C9PRY4|C9PRY4_9PAST 7-cyano-7-deazaguanine synthase OS=Pasteurella dagmatis ATCC 43325 OX=667128 GN=exsB PE =3 SV=1
MNITNPNGNRKAVVIFSGGQDSTTCLIQAIQEYGAENVEAVTFQYGQRHAIELEKAQWIAKDLGVKQILIDTSVIKAITQNALMDKNATIEQQGSTPNTFVDGRNALFLLYAAIYAKGQGITDIITGVCETDFSGYPDCRDVFIKSMNVTLNLAMDYSFNIKTPLMYLTKAHTWQLADELGALDYIRQHTHTCYMGVEKGCGECPSCILRENGLTEYLAIKRAV

SEQ ID NO: 40670 - protein, 227 aa, Pasteurella langaaensis
  misc_feature (1)..(227): tr|A0A2U0SKH8|A0A2U0SKH8_9PAST 7-cyano-7-deazaguanine s ynthase OS=Pasteurella langaaensis DSM 22999 OX=1122935 GN=queC PE=3 SV=1
MKISNPNHDRKAIVIFSGGQDSTTCLIQAIQEYGVSNVEAVTFQYGQRHAIELEKAQWIARDLGIKQTLIDTSVMKSITTNGMMSETEIKPNENGMPNTFVDGRNALFLLYAAIYAKGQGATDIITGVCETDFSGYPDCRDVFIKSMNVTLNLAMDYQFNIRTPLMYLTKAQTWQLADELGALDYVREHTHTCYMGVEGGCGECLSCLLREKGLKEYLQQKSAVKNV

SEQ ID NO: 40671 - protein, 230 aa, [Pasteurella] mairii
  misc_feature (1)..(230): tr|A0A379B6Q9|A0A379B6Q9_9PAST 7-cyano-7-deazaguanine s ynthase OS=[Pasteurella] mairii OX=757 GN=queC PE=3 SV= 1
MQISKILNPNNDRKAVVIFSGGQDSTTCLLLAIQEYGVENVHAMTFQYGQRHHIELQKAKWICQDLGVKQHILDMTAMQVFAPNAMMSETDIVKNEKGVPNTVVDGRNALFLLHAAIYAKSQGMTDIITGVCETDFSGYPDCRDVFIKSMNVTLNLSMDYNFNIRTPLMYLTKAQTWQLADDLGRLDYVREHTHTCYMGVEGGCGECPSCILREKGLAEYLAQKSAVKNV

SEQ ID NO: 40672 - protein, 70 aa, Pasteurella multocida
  misc_feature (1)..(70): tr|J4SPR6|J4SPR6_PASMD 7-cyano-7-deazaguanine synthase (Fragment) OS=Pasteurella multocida subsp. multocida st r. Anand1_buffalo OX=1032868 GN=AAUPMB_01899 PE=3 SV=1
FHLKTPLMYLTKAQTWQLADELGVLDYIRQHTHTCYMGVEQGCGECPSCVLREKGLREYLSSKSEGEIDV

SEQ ID NO: 40673 - protein, 228 aa, Pasteurella multocida
  misc_feature (1)..(228): sp|Q9CP69|QUEC_PASMU 7-cyano-7-deazaguanine synthase OS =Pasteurella multocida (strain Pm70) OX=272843 GN=queC PE=3 SV=1
MQLTNPNRDRKAVVIFSGGQDSTTCLFQAIQDYGVENVEVVTFQYGQRHAIELEKAKWIAQDLGVKQTLIDTSVIKAITQNALMDEQARIEQHGSTPNTFVDGRNALFLLYTAIYAKGQGIQDIITGVCETDFSGYPDCRDVFIKSMNVTLNLAMDYQFHLKTPLMYLTKAQTWQLADELGVLDYIRQHTHTCYMGVEQGCGECPSCVLREKGLREYLSSKSEAEIDV

SEQ ID NO: 40674 - protein, 223 aa, Pasteurella skyensis
  misc_feature (1)..(223): tr|A0A1H7UGZ2|A0A1H7UGZ2_9PAST 7-cyano-7-deazaguanine s ynthase OS=Pasteurella skyensis OX=97481 GN=queC PE=3 S V=1
MLQEPQKAVVIFSGGQDSTTCLFLAIREFGLKNVEVVTFQYGQRHSIELKKAEWIAQDLGIKQTVIDTSVIKAITTNALMDNAAKIELDGDKPNTFVDGRNALFLLYTAIYAKGQGIKTLYTGVCETDFSGYPDCRDVFIKSMNVTLNLAMDYNFNIRTPLMYLDKKQTWALADELGAFDYIREHTYTCYIGVEGGCGKCPSCELRERGLMQYLAERSSLSSN

SEQ ID NO: 40675 - protein, 228 aa, Pasteurella sp.
  misc_feature (1)..(228): tr|A0A4Y9GUP2|A0A4Y9GUP2_9PAST 7-cyano-7-deazaguanine s ynthase OS=Pasteurella sp. WM03 OX=2558280 GN=queC PE=3 SV=1
MNISNPNHNRKAVVIFSGGQDSTTCLFQAISDYGKENVETITFQYGQRHAIELEKAQWIAQDLGIKQTLVDTSVIKAITHNALIDQQTKIEQKNNELPNTFVDGRNALFLLYAAIYAKGQGIQDIITGVCETDFSSYPDCRDVFVKSMNVTLNLAMDYQFNIKTPLMYLTKAQTWQLADELGVLDYVQQHSHTCYEGVEGGCGGCPSCELRNKGLQQYLRQKCGEKNV

SEQ ID NO: 40676 - protein, 221 aa, Pasteurella testudinis
  misc_feature (1)..(221): tr|A0A1W1UM55|A0A1W1UM55_9PAST 7-cyano-7-deazaguanine s ynthase OS=Pasteurella testudinis DSM 23072 OX=1122938 GN=queC PE=3 SV=1
MQQTPKALVIFSGGQDSTTCLLQAIQHYGKENVEVVTFQYGQRHAIELEKAQWIARDLGVKQTLIDTSVIKAITTNALMDQSAVIEENDDMPNTFVDGRNALFLLYAAIYAKGQGIRNIVTGVCETDFSGYPDCRDVFVKSMNVTLNLAMDYNFNIQTPLMYLDKKQTWALADQLGGLDYVRQHTHTCYLGVEGGCHECPSCKLREKGLNEYLAEKEAHHV

SEQ ID NO: 40677 - protein, 223 aa, Pasteurellaceae bacterium
  misc_feature (1)..(223): tr|A0A5C4QR94|A0A5C4QR94_9PAST 7-cyano-7-deazaguanine s ynthase OS=Pasteurellaceae bacterium BK431 OX=2585026 G N=queC PE=3 SV=1
MQNNTKKALVIFSGGQDSTTCLLQAIHYYGRENVEAVTFQYGQRHAIELEKAQWIAQDLGVKQTLIDTSVIKAITTNALMDQSAVISQNADEMPNTFVDGRNALFLLYAAIYAKGQGIHDIITGVCETDFSGYPDCRDVFIKSMNVTLNLAMDYNFNIQTPLMYLDKKQTWALADQLDGLDYVQRHTHTCYLGVEGGCHKCPSCKLREKGLNEYLAEKEAQNV

SEQ ID NO: 40678 - protein, 222 aa, Pasteurellaceae bacterium; identical to SEQ ID NO: 39450
  misc_feature (1)..(222): tr|A0A3Q8GIL0|A0A3Q8GIL0_9PAST 7-cyano-7-deazaguanine s ynthase OS=Pasteurellaceae bacterium 12565 OX=2093222 G N=queC PE=3 SV=1

SEQ ID NO: 40679 - protein, 266 aa, Patescibacteria group
  misc_feature (1)..(266): tr|A0A5C7JAU7|A0A5C7JAU7_9BACT 7-cyano-7-deazaguanine s ynthase OS=Patescibacteria group bacterium OX=2052139 G N=E6P97_01235 PE=3 SV=1
MENKLIVPTNNDEQPYVLEDLDRLLARRRGYTFHTPTPDDSVVFIISGGLDSTIALHRVLNEIRCTVYPLYIKRGARSEDSELNAIKHYMSLYSELFPEKLRPLTIIASEVPPKILKTNITKDRLSTIGHPMRNAVLQSISIQFAVAKSHEDQAEIKTVFTAISPDDMLPHCSLVALRAQTLLACIDNGDWAWQITSPNLEPELWGDISKSDSIKYATQHKIPLDMTYTCTQGPTTACGICPECHLRIEAFQQAGVPDPTEYGHTS

SEQ ID NO: 40680 - protein, 251 aa, Patescibacteria group
  misc_feature (1)..(251): tr|A0A5C7J8R8|A0A5C7J8R8_9BACT 7-cyano-7-deazaguanine s ynthase OS=Patescibacteria group bacterium OX=2052139 G N=E6P97_01245 PE=3 SV=1
MINTYEKILLDKRGYVSKFPENKKAVMIISGGLDSVVTSARLMHEHDIELFPLHVERGQTNFEAEKRSVEHFEKLFKKQYLGKFHTPEYIKLNVPPKEVKQDLLPYTKSHGHPLRDTMLQMAAVQYAASLLSKGHDIDTIFCAVMPEDYFPHSNMESIRATTIAICQNMGNWKWVVSSPNTDPNLTPSPITKKDEITWAMTHQIPVGATVSCNVATKDTSLLNCGTCSSCGRRKDAFREAGFDDPTQYFSP

SEQ ID NO: 40681 - protein, 245 aa, Paucibacter aquatile
  misc_feature (1)..(245): tr|A0A2N8KY87|A0A2N8KY87_9BURK 7-cyano-7-deazaguanine s ynthase OS=Paucibacter aquatile OX=2070761 GN=queC PE=3 SV=1
MNLPTPPQAHTERKALVLFSGGQDSTACLAWALNRYAAVETLGFDYGQRHRVELECRQTVRRELAAQFPAWAAKLGEDHVLDLSLLSQISSTALTEDRAIEMQANGLPNTFVPGRNLLFLTFAATLAYRRGASVLVGGMCETDYSGYPDCRDNTLKALQVALSLGLDTPMTLETPLMFITKAQTWALTESLGGAALNELVVEHTHTCYLGERSQRHAWGYGCGSCPACELRARGHDEFLALKAGA

SEQ ID NO: 40682 - protein, 245 aa, Paucibacter sp.
  misc_feature (1)..(245): tr|A0A3N7BPZ8|A0A3N7BPZ8_9BURK 7-cyano-7-deazaguanine s ynthase OS=Paucibacter sp. KBW04 OX=2153361 GN=queC PE= 3 SV=1
MSSPNTVPPQANSQRRALVLFSGGQDSTACLAWALDRFASVETLGFDYGQRHRVELECRQTVRRELQAQFPQWAAKLGEDHMLDLSLLGQISDTALTESRAIEMQANGLPNTFVPGRNLLFLSFAATLAYRRGASVLVGGMCETDYSGYPDCRDNTLKSLQVALSLGLDTPMTVETPLMFLTKAQTWALSERLGGAALNELIIEHTHTCYLGERMQRHAWGYGCGTCPACELRARGHAEFVAGVL

SEQ ID NO: 40683 - protein, 245 aa, Paucibacter sp.
  misc_feature (1)..(245): tr|A0A0U3F104|A0A0U3F104_9BURK 7-cyano-7-deazaguanine s ynthase OS=Paucibacter sp. KCTC 42545 OX=1768242 GN=que C PE=3 SV=1
MTMPPPQANSQRKALVLFSGGQDSTACLAWALDRFAQVETLGFDYGQRHRVELDCRQVVRRELMAQFPQWAAKLGEDHLLDLSLLGQISDTALTESRAIEMQANGLPNTFVPGRNLLFLSFAATLAYRRGASVLVGGMCETDYSGYPDCRDNTLKSLQVALSLGLDTPMTIETPLMFLTKAQTWALSEQLGGAALNELIVDHTHTCYLGERTQRHAWGYGCGSCPACELRARGHAEFIGSGSAGA

SEQ ID NO: 40684 - protein, 244 aa, Paucibacter toxinivorans
  misc_feature (1)..(244): tr|A0A4R6QP85|A0A4R6QP85_9BURK 7-cyano-7-deazaguanine s ynthase OS=Paucibacter toxinivorans OX=270368 GN=queC P E=3 SV=1
MKPNPEANSNRRALVLFSGGQDSTACLAWALERYAEVETVGFDYGQRHRIELACRQTVRREIAAQFPAWAAKLGEDHLLDLRLLGQISDTALTESRAIEMQANGLPNTFVPGRNLLFLGFAATLAYRRGASVLVGGMCETDYSGYPDCRDNTLKAMQVALSLGLDTAMTIETPLMFITKAETWSLSEQLGGPALNELIIEHTHTCYLGDRGLRHAWGYGCGSCPACELRRKGHDEYLAAKATCA

SEQ ID NO: 40685 - protein, 233 aa, Paucimonas lemoignei
  misc_feature (1)..(233): tr|A0A2X4CU27|A0A2X4CU27_PAULE 7-cyano-7-deazaguanine s ynthase OS=Paucimonas lemoignei OX=29443 GN=queC_2 PE=3 SV=1
MHTKALVLFSGGQDSTTCLAWALERYEHVETIGFDYGQRHRIELECRLNILQEVRNRFPNWTQRLGEDHVLDLKLLGQISDTAMTAEKTIEFEKNGLPNTFVPGRNLLFLTFAATIAYRRGLTVLVGGMCETDYSGYPDCRDNTLKATQVALSLGMDTPVIIETPLMWLDKAQTWRLAENLGGQDFVSLIQEESHTCYLGTRQQKHEWGYGCGTCPACELRKTGYEQYFQERD

SEQ ID NO: 40686 - protein, 224 aa, Paucimonas lemoignei
  misc_feature (1)..(224): tr|A0A2X4ARD5|A0A2X4ARD5_PAULE 7-cyano-7-deazaguanine s ynthase OS=Paucimonas lemoignei OX=29443 GN=queC_1 PE=3 SV=1
MTEKKAVILLSGGLDSATVVAMAREQGYACYTMSFDYGQRHRAELEAAARVARDLGAVEHKVIGLDLNGIGGSALTDSSIDVPETPGEGIPVTYVPARNTVFLSLALGWAEVLGARDIFIGVNAVDYSGYPDCRPEFIESFERMANLATKAGVEGNGFTIQAPLQNLSKADIVKAGVRLGVDYSLTVSCYQADDQGRACAKCDSCRLRAEGFAAAGISDPTRYF

SEQ ID NO: 40687 - protein, 223 aa, Pectinatus cerevisiiphilus
  misc_feature (1)..(223): tr|A0A4R3K2E6|A0A4R3K2E6_9FIRM 7-cyano-7-deazaguanine s ynthase OS=Pectinatus cerevisiiphilus OX=86956 GN=queC PE=3 SV=1
MKAVILLSGGLDSTACMAVAKSKNYDLYPISFNYQQRHSIELSSAKKVAKFYGVKKHLIIDTNMNSIGGSALTDKNIDVPDRDPDGTDVPVTYVPARNLIFLSYALGYAEVLGAAYVYIGVNAVDYSGYPDCRPEFIEKFQDLADYATKATAAEHKKIEIVAPLQNLSKKDIVLLGTKLGAPFALTRSCYNGGEKACGHCDSCKLRLRGFAEAGLKDPIEYME

SEQ ID NO: 40688 - protein, 231 aa, Pectobacterium actinidiae
  misc_feature (1)..(231): tr|A0A1V2R7B5|A0A1V2R7B5_9GAMM 7-cyano-7-deazaguanine s ynthase OS=Pectobacterium actinidiae OX=1507808 GN=queC PE=3 SV=1
MKRAVVVFSGGQDSTTCLIQALQDYDDVHCITFDYGQRHRAEIDVARELSQRLGATAHKVLDVGLLNELATSSLTRDNIPVPDYDANSQGIPNTFVPGRNILFLTLASIYAYQVGAEAVITGVCETDFSGYPDCRDEFVKALNQAIVLGIARDIRFETPLMWLNKAETWALADYYQQLDTVRYHTLTCYNGIKGDGCGQCAACHLRANGLAQYQNDAAAVMALLKQKTGLR

SEQ ID NO: 40689 - protein, 231 aa, Pectobacterium aquaticum
  misc_feature (1)..(231): tr|A0A426IQP1|A0A426IQP1_9GAMM 7-cyano-7-deazaguanine s ynthase OS=Pectobacterium aquaticum OX=2204145 GN=queC PE=3 SV=1
MKRAVVVFSGGQDSTTCLIQALQDYDDVHCITFDYGQRHRAEIDVARELSQKLGATAHKVLDAGLLNELATSSLTRDSIPVPDYDANAQGIPNTFVPGRNILFLTLAAIYAYQVGAEAVITGVCETDFSGYPDCRDEFVKALNQAIVLGIARDIRFETPLMWLNKAETWALADYYQQLDTVRYHTLTCYNGIKGDGCGQCAACHLRANGLAQYQHDSVAVMASLKQKAGLR

SEQ ID NO: 40690 - protein, 231 aa, Pectobacterium atrosepticum
  misc_feature (1)..(231): sp|Q6D820|QUEC_PECAS 7-cyano-7-deazaguanine synthase OS =Pectobacterium atrosepticum (strain SCRI 1043 / ATCC B AA-672) OX=218491 GN=queC PE=1 SV=1
MKRAVVVFSGGQDSTTCLIQALQDYDDVHCITFDYGQRHRAEIEVAQELSQKLGAAAHKVLDVGLLNELATSSLTRDSIPVPDYDANAQGIPNTFVPGRNILFLTLASIYAYQVGAEAVITGVCETDFSGYPDCRDEFVKALNQAIVLGIARDIRFETPLMWLNKAETWALADYYQQLDTVRYHTLTCYNGIKGDGCGQCAACHLRANGLAQYQKDAATVMASLKQKVGLR

SEQ ID NO: 40691 - protein, 231 aa, Pectobacterium betavasculorum
  misc_feature (1)..(231): tr|A0A093SZ55|A0A093SZ55_9GAMM 7-cyano-7-deazaguanine s ynthase OS=Pectobacterium betavasculorum OX=55207 GN=qu eC PE=3 SV=1
MKRAVVVFSGGQDSTTCLIQALQHYDDVHCITFDYGQRHRAEIDVAQELSQKLGATAHKVLDVGLLNELATSSLTRDSIPVPDYDANAQGIPNTFVPGRNILFLTLASIYAYQVGAEAVITGVCETDFSGYPDCRDEFVKALNQAIVLGIARDIRFETPLMWLNKAETWALADYYQQLDTVRYHTLTCYNGIKGDGCGQCAACHLRANGLEQYQKDAAAVMASLKLKVGLR

SEQ ID NO: 40692 - protein, 231 aa, Pectobacterium brasiliense
  misc_feature (1)..(231): tr|A0A086F0B6|A0A086F0B6_9GAMM 7-cyano-7-deazaguanine s ynthase OS=Pectobacterium brasiliense OX=180957 GN=queC PE=3 SV=1
MKRAVVVFSGGQDSTTCLIQALQDYDDVHCITFDYGQRHRAEIDVAQELSQKLGATAHKVLDVGLLNELATSSLTRDNIPVPDYDANAQGIPNTFVPGRNILFLTLASIYAYQVGAETVITGVCETDFSGYPDCRDEFVKALNQAIVLGIARDIRFETPLMWLNKAETWALADHYQQLDTVRYHTLTCYNGIKGDGCGQCAACHLRANGLAQYQNDSVAIMASLKQKAELR

SEQ ID NO: 40693 - protein, 231 aa, Pectobacterium brasiliense
  misc_feature (1)..(231): tr|A0A0M2F6E1|A0A0M2F6E1_9GAMM 7-cyano-7-deazaguanine s ynthase OS=Pectobacterium brasiliense OX=180957 GN=queC PE=3 SV=1
MKRAVVVFSGGQDSTTCLIQALQDYDDVHCITFDYGQRHRAEIDVARELSQKLGATAHKVLDVGLLNELATSSLTRDSIPVPDYDANAQGIPNTFVPGRNILFLTLAAIYAYQVGAEAVITGVCETDFSGYPDCRDEFVKALNQAIVLGIARDIRFETPLMWLNKAETWALADHYQQLDTVRYHTLTCYNGIKGDGCGQCAACHLRANGLAQYQNDSVAIMASLKQKAGLR

SEQ ID NO: 40694 - protein, 231 aa, Pectobacterium carotovorum
  misc_feature (1)..(231): sp|C6DB62|QUEC_PECCP 7-cyano-7-deazaguanine synthase OS =Pectobacterium carotovorum subsp. carotovorum (strain PC1) OX=561230 GN=queC PE=3 SV=1
MKRAVVVFSGGQDSTTCLIQALQHYDDVHCITFDYGQRHRAEIDIARELSLKLGATAHKVLDVGLLNELATSSLTRDSIPVPDYDANAQGIPNTFVPGRNILFLTLASIYAYQVGAEAVITGVCETDFSGYPDCRDEFVKALNQAIVLGIARDIRFETPLMWLNKAETWALADYYQQLDTVRYHTLTCYNGIKGDGCGQCAACHLRANGLAQYQNDSAAVMASLKQKAGLR

SEQ ID NO: 40695 - protein, 231 aa, Pectobacterium carotovorum
  misc_feature (1)..(231): tr|A0A518VMU2|A0A518VMU2_PECCC 7-cyano-7-deazaguanine s ynthase OS=Pectobacterium carotovorum subsp. carotovoru m OX=555 GN=queC PE=3 SV=1
MKRAVVVFSGGQDSTTCLIQALQHYDDVHCITFDYGQRHRAEIDVARELSQKLGATAHKVLDVGLLNELATSSLTRDSIPVPDYDANAQGIPNTFVPGRNILFLTLASIYAYQVGAEAVITGVCETDFSGYPDCRDEFVKALNQAIVLGIARDIRFETPLMWLNKAETWALADYYQQLDTVRYHTLTCYNGIKGDGCGQCAACHLRANGLAQYQNDAAAVMALLKQKTGLR

SEQ ID NO: 40696 - protein, 231 aa, Pectobacterium odoriferum
  misc_feature (1)..(231): tr|A0A094RZ93|A0A094RZ93_9GAMM 7-cyano-7-deazaguanine s ynthase OS=Pectobacterium odoriferum OX=78398 GN=queC P E=3 SV=1
MKRAVVVFSGGQDSTTCLIQALQDYDDVHCITFDYGQRHRAEIDVARELSQKLGATAHKVLDVGLLNELATSSLTRDSIPVPDYDANAQGIPNTFVPGRNILFLTLASIYAYQVGAEAVITGVCETDFSGYPDCRDEFVKALNQAIVLGIARDIRFETPLMWLNKAETWALADYYQQLDTVRYHTLTCYNGIKGDGCGQCAACHLRANGLAQYQNDSAAITASLKQKTGLR

SEQ ID NO: 40697 - protein, 231 aa, Pectobacterium parmentieri
  misc_feature (1)..(231): tr|A0A0H3IBL7|A0A0H3IBL7_PECPM 7-cyano-7-deazaguanine s ynthase OS=Pectobacterium parmentieri OX=1905730 GN=que C PE=3 SV=1
MKRAVVVFSGGQDSTTCLIQALQHYDDVHCITFDYGQRHRAEIEVAQELSQKLGATAHKILDVGLLNELATSSLTRDSIPVPDYDANAQGIPNTFVPGRNILFLTLASIYAYQVGAEAVITGVCETDFSGYPDCRDEFVKALNQAIVLGIARNIRFETPLMWLNKAETWALADYYQQLDTVRYHTLTCYNGIQGDGCGQCAACHLRANGLAQYQNDAEIVMASLKQKVGLR

SEQ ID NO: 40698 - protein, 231 aa, Pectobacterium peruviense
  misc_feature (1)..(231): tr|A0A0J5XPH0|A0A0J5XPH0_9GAMM 7-cyano-7-deazaguanine s ynthase OS=Pectobacterium peruviense OX=2066479 GN=queC PE=3 SV=1
MKRAVVVFSGGQDSTTCLIQALQHYDDVHCITFDYGQRHRAEIDVAQELSQKLGATAHKVLDVGLLNELATSSLTRDSIPVPDYDANAQGIPNTFVPGRNILFLTLASIYGYQVGAEAVITGVCETDFSGYPDCRDEFVKALNQAIVLGIARDIRFETPLMWLNKAETWALADYYQQLDTVRYHTLTCYNGIKGDGCGQCAACHLRANGLEQYQKDAVAVMASLKQKVGLR

SEQ ID NO: 40699 - protein, 231 aa, Pectobacterium polaris
  misc_feature (1)..(231): tr|A0A093SBJ7|A0A093SBJ7_9GAMM 7-cyano-7-deazaguanine s ynthase OS=Pectobacterium polaris OX=2042057 GN=queC PE =3 SV=1
MKRAVVVFSGGQDSTTCLIQALQDYDDVHCITFDYGQRHRAEIDVARELSQKLGATAHKVLDVGLLNELATSSLTRDSIPVPDYDANAQGIPNTFVPGRNILFLTLAAIYAYQVGAEAVITGVCETDFSGYPDCRDEFVKALNQAIVLGIARDIRFETPLMWLNKAETWALADHYQQLDTVRYHTLTCYNGIKGDGCGQCAACHLRANGLAQYQNDSVAVMASLKQKAGLR

SEQ ID NO: 40700 - protein, 231 aa, Pectobacterium polonicum
  misc_feature (1)..(231): tr|A0A4U7KJP0|A0A4U7KJP0_9GAMM 7-cyano-7-deazaguanine s ynthase OS=Pectobacterium polonicum OX=2485124 GN=queC PE=3 SV=1
MKRAVVVFSGGQDSTTCLIQALQHYDDVHCITFDYGQRHRAEIDVARELSQKLGTTAHKVLDVGLLNELATSSLTRDSIPVPDYDANAQGIPNTFVPGRNILFLTLASIYAYQVGAEAVITGVCETDFSGYPDCRDEFVKSLNQAIVLGIARNIRFETPLMWLNKAETWALADYYQQLDTVRYHTLTCYNGIKGDGCGQCAACHLRANGLAQYQEDPVAVMASLKQKVGLR

SEQ ID NO: 40701 - protein, 219 aa, Pectobacterium polonicum
  misc_feature (1)..(219): tr|A0A4U7KGC0|A0A4U7KGC0_9GAMM Uncharacterized protein (Fragment) OS=Pectobacterium polonicum OX=2485124 GN=ED I29_09655 PE=4 SV=1
RGRSLIFISYGILAATTLNKDKSIDLFIPENGFISLNIPLNEGRFGSLSTKTTHPVFLGILQEIFDAVKIKVSIKRPYQGFTKGQMIKNCKNKETLATFIGNTTSCGRFGYYNYKHCGRCVPCLVRRAAFLSAGINDSTEKQYVFEDLGNSKSAREKGANDIGAVARACLLFRKNGINDVIGGALAFSNQTIEGRKFYADVVENGLIELESLLKKYKVL

SEQ ID NO: 40702 - protein, 231 aa, Pectobacterium punjabense
  misc_feature (1)..(231): tr|A0A2T3VV57|A0A2T3VV57_9GAMM 7-cyano-7-deazaguanine s ynthase OS=Pectobacterium punjabense OX=2108399 GN=queC PE=3 SV=1
MKRAVVVFSGGQDSTTCLIQALQHYDDVHCITFDYGQRHRAEIDVARELSLKLGATAHKVLDVGLLNELATSSLTRDSIPVPDYDANAQGIPNTFVPGRNILFLTLASIYAYQVGAEAVITGVCETDFSGYPDCRDEFVKSLNQAIVLGIARDIRFETPLMWLNKAETWALADYYQQLDTVRYHTLTCYNGIKGDGCGQCAACHLRANGLTQYQNDSAAVMASLKQKAGLR

SEQ ID NO: 40703 - protein, 231 aa, Pectobacterium wasabiae
  misc_feature (1)..(231): tr|A0A1D7Z3I1|A0A1D7Z3I1_9GAMM 7-cyano-7-deazaguanine s ynthase OS=Pectobacterium wasabiae CFBP 3304 OX=1175631 GN=queC PE=3 SV=1
MKRAVVVFSGGQDSTTCLIQALQHYDDVHCITFDYGQRHRAEIDVARELSQKLGATAHKVLDVGLLNELATSSLTRDSIPVPDYDANAHGIPNTFVPGRNILFLTLASIYAYQVGAEAIITGVCETDFSGYPDCRDEFVKALNQAIVLGIARNIRFETPLMWLNKAETWALADYYQQLNTVRYHTLTCYNGIKGDGCGQCAACHLRANGLAQYQNDAETVMASLKQKVGLR

SEQ ID NO: 40704 - protein, 627 aa, Pedobacter africanus
  misc_feature (1)..(627): tr|A0A1W2B6F4|A0A1W2B6F4_9SPHI Queuosine biosynthesis p rotein QueC OS=Pedobacter africanus OX=151894 GN=SAMN04 488524_1918 PE=4 SV=1
MINSNSHIVLCGGVSPSPHKTKKYASNHIHRLIIDPSNPGHNINLELPHFIQLVNCHFPDRIKDLLEIAGYVYAADRMIGRGANNSLEYHSWSRQLNFIIRVRDVSFWSNPEITKRLSDALTFVSGDQGYSFIFKDGGADIGQKSLYDHEAIQLQKRENSIIGLFSGGLDSLAGALEILTTTDKNLILVSHRSNTTGVSKIQKGIHRLLETDFPGRIQYFAFYCNLHGERAVEETQRTRIFLYTAIAYSLSTLASEKEIHVFENGVTSLNFSKRADLVNARASRTTHPQTLKLLENFYSAVGEEQRPIVHPFLYNTKTDIFNKIKAAGKVNYINSTISCTKTFLSFENNSQATHCGGCSQCVDRRLAAFASDLQDFDAIYDIDIAKDPITSPESRTHLNDYIRAIVKYNNFTEMNFQYEMLAALTDIIPYLEGQRPSEKAMRIYDLLKTHTSQVLNAIRNIQLLQDPLKPKIANTLNAYIDERMHLKPPIECLIETIKAKLTIAIPQAFEHEKPKHENALNDVIHALIQGESIDYGREYPTIKFSIARVIPDHSFLEIYDLLIEAKYLRGNTSKAAITDQIGADITKYPKEKYKLFIIYDPERKIANDVNFSKDIEKQPNCKVFIIR

SEQ ID NO: 40705 - protein, 367 aa, Pedobacter luteus
  misc_feature (1)..(367): tr|A0A1T5FB11|A0A1T5FB11_9SPHI N-acetyl sugar amidotran sferase OS=Pedobacter luteus OX=572036 GN=SAMN05661099_ 3563 PE=4 SV=1
MKNSSAAYQQCNRCVMDTSDPLIEFDEIGNCNHCNKYIEQLPNTIIRGPEGLAELDKLLERARQSGQGKKYDVIMGVSGGMDSSYVAYRAKHFGLRILAVHLDNGWNSELSVKNIENCIKYAGADLFTHVIDWEEFKSMQVAYLKAGVIDIEALTDHAIRSIIYKLTDKYKIEYNLSGSNYTTEGILPNSWVYNKLDYKNIRSISRRFGARRHRTFPGMSLGKYIYYRAFAKIKPIDVLNLIDYKVDTAIQDMENDMGWKYYGGKHHESIFTKFYQGYILPEKFGVDKRKAHYSTLICSGNMTREDALLKLRSDIYTANELDNDMEYVLKKLGITESAFKKIMQEPVRSHLDYPNNNALFQFFKRFS

SEQ ID NO: 40706 - protein, 447 aa, Pedobacter nutrimenti
  misc_feature (1)..(447): tr|A0A318U813|A0A318U813_9SPHI 7-cyano-7-deazaguanine s ynthase in queuosine biosynthesis OS=Pedobacter nutrime nti OX=1241337 GN=B0O44_1089 PE=4 SV=1
MGKIALIALVGNEDTGVNLPEGTYLRQANLSLFRNYDQYDVSLHAFLKSLKKLKLEPSELSMDLLVIAAVMYGADTRINRKDFAEDGWTRIIDLFIPVSDVSVWNNQKENLERIFKFLTGDIWTVIFRPRAGTDLQLSPRGKLKRYKMPYETDTVCLFSGGMDSFIGAIDLLESNVRPLLVGHKKSGDVSKFQKICGDALVAAYPLLSPQQISTHIAIPKTNLFDSQEDTERGRSFLFLTLGAICASVLNANSTLVVPENGMISLNIPLTPLRTGSHSTRTTHPFYFSKMQQLFNALNLGVKISNPYQYQTKGEMLTNCKNKSLVVNTETMSCSHPSGRYEGLGNLHCGYCVPCIIRKAAFLASEQQDKYPYRTEIIGHQGLSIAKAEGADILAFKFMVEKVKKNPNFLTAAIRLTGPLGEDVLPFIDLYSRSLIEVNNLIKQVKLI

SEQ ID NO: 40707 - protein, 199 aa, Pedobacter sp.
  misc_feature (1)..(199): tr|A0A0Q4LSE4|A0A0Q4LSE4_9SPHI 7-cyano-7-deazaguanine s ynthase OS=Pedobacter sp. Leaf41 OX=1736218 GN=ASE92_06 560 PE=3 SV=1
MEFVKKATLLSGGVDSICLTYGLMPDIAYTIDYGQTVAEREIYVSKYICELLNIEHKVIQINCRSLGTGTLADSDNLSFAPSEEWWPYRNQLLITFAAMIGIKDGVSDIYLASVKSDKFHKDGTEEFYKLINDTVSYQEGRLKVHCPTLNYYSHELVSKYNVPIDMLTIAHSCHISNLACGKCSGCLKQLKVRYELKIE

SEQ ID NO: 40708 - protein, 371 aa, Pedobacter sp.
  misc_feature (1)..(371): tr|A0A520CYQ1|A0A520CYQ1_9SPHI N-acetyl sugar amidotran sferase OS=Pedobacter sp. OX=1411316 GN=EOP00_04730 PE= 4 SV=1
MYKEKKCQQCIECVMDTTDSEIVFDTNGVCNYCLEAKPLIKNYKFAPDQEKNNLDKLKNLISKGKIGKYDCVVGLSGGVDSSYVAYMAKKMGLNPLCVHFDNGWNSEIAVSNIKKIVDKCGFDLETYVIDWPEFKDLQRSFFKAGVVDIEMLSDHAIMATMFKLRKQHNIKYILSGSNYVTEHGMPLTWLWRKQDLTNIKDIQKKFGSKKLKNFPTLNSIQYQISRIFGLGGVYIELLNNINYSKNEAMKVLEREFDWKYYGGKHYESVFTKFYQAYYLPEKFNIDKRKVHLSAQIRNKEITKEDALKELEKPLYSEMEIKNDLEYVLKKLSFSANEFEAIMKEKPKKHLDYASDEWIFNLWRRGRKLITK

SEQ ID NO: 40709 - protein, 199 aa, Pedobacter suwonensis
  misc_feature (1)..(199): tr|A0A1I0U1A0|A0A1I0U1A0_9SPHI 7-cyano-7-deazaguanine s ynthase OS=Pedobacter suwonensis OX=332999 GN=SAMN04488 511_1188 PE=3 SV=1
MEFVKKATLLSGGVDSICLTYGLMPDIAYTIDYGQTVAEREIYVSKYICELLNIEHKIIQINCRSLGAGTLAGADNLRFAPSEEWWPYRNQLLITFAAMMGIKDGVSDLHLASVKSDKFHKDGTEEFYKLINDTVSYQEGSLKVHCPTLNYYSHELVSKYNVPIDMLTIAHSCHISNLACGKCSGCLKQLKVRHELKID

SEQ ID NO: 40710 - protein, 233 aa, Pelagibaca sp.
  misc_feature (1)..(233): tr|A0A2D6BA81|A0A2D6BA81_9RHOB 7-cyano-7-deazaguanine s ynthase OS=Pelagibaca sp. OX=1979400 GN=queC PE=3 SV=1
MKTLLICSGGLDSVSLAHITAEEHQLTRLVSFDYGQRHRKELDYAAAAARRLGVPHHLIDMRPIGAALTGSALTDDIDVPDGHYAEETMRITVVPNRNAIMLSIGFGVAAANGDDAVATAVHGGDHFIYPDCRPAFTQAFDAMQRMALDGYADVQLYTPFVNRTKADIVAEGAKYHAPFAETWSCYKGGEVHCGRCGTCVERREAFHLAGVADPTTYADPDFWAGAVAEREAR

SEQ ID NO: 40711 - protein, 228 aa, Pelagibacteraceae bacterium
  misc_feature (1)..(228): tr|A0A424KCK7|A0A424KCK7_9PROT 7-cyano-7-deazaguanine s ynthase OS=Pelagibacteraceae bacterium TMED195 OX=19866 31 GN=queC PE=3 SV=1
MKKRTKKCVILLSGGLDSSVVLSICNQLKYEIYAISFNYKQRHAKELDLAKWQAKKHNVKSHKIFNIDLYGGSALTDDIKVPENKDVTSIPKIIPVTYVAGRNLVFLSIAAGYAESLDINDIYIGVNSVDYSGYPDCRKEFIVSFEKLINKCTKKGLEGRSFRIKTPLINLSKGEIVSVGKKNNVDFSKTSSCYNPKNSKSCGLCDSCLLRKKGFKDAKVKDPLVYDV

SEQ ID NO: 40712 - protein, 228 aa, Pelagibacteraceae bacterium
  misc_feature (1)..(228): tr|A0A1Z8V108|A0A1Z8V108_9PROT 7-cyano-7-deazaguanine s ynthase OS=Pelagibacteraceae bacterium TMED65 OX=198664 4 GN=queC PE=3 SV=1
MTNKSNKALVLLSGGLDSSVVLSICHKKGYKIDAISFDYGQRHKIELENAKWQAKHFNCNKHKIFKIDFYGGSALTDNIEVPVNRSVECIPEKIPITYVPSRNLVFLSYACGYAEVNDIDHIFLGVNALDYSGYPDCRKEFINGFENLINLSTKKGLEGVKFKICTPLIDMTKKEIVMLGKKNNVNFSMTLSCYNPKNSVVCGKCDSCLLRRKGFEEASLIDPLMKSF

SEQ ID NO: 40713 - protein, 231 aa, Pelagibacterales bacterium
  misc_feature (1)..(231): tr|A0A2D7ALI0|A0A2D7ALI0_9PROT 7-cyano-7-deazaguanine s ynthase OS=Pelagibacterales bacterium OX=2026776 GN=que C PE=3 SV=1
MNKVLLLFSGGQDSTTVLGWCLKKFDEVHLIIFDYGQKHLVEVTAAKQIIQELNYNFEDWKGKIKSDYLYKINNINNFNKNSLTSNIAFKKKKGLPNTFVPGRNILFYTLSAAYAYDKKIENIASGVCQTDYSGYPDCRNKTIKSLEKSINLGMEKNYKFQTPLMWKDKSEIWKMAKNIGGEKYLNFIIKNTHTCYKGDRINFHEWGYGCGKCPACILRAKGWKKFKRDNE

SEQ ID NO: 40714 - protein, 235 aa, Pelagibacterales bacterium
  misc_feature (1)..(235): tr|A0A2E1BWY1|A0A2E1BWY1_9PROT 7-cyano-7-deazaguanine s ynthase OS=Pelagibacterales bacterium OX=2026776 GN=que C PE=3 SV=1
  misc_feature (61)..(61): Xaa can be any naturally occurring amino acid
  misc_feature (147)..(147): Xaa can be any naturally occurring amino acid
  misc_feature (192)..(192): Xaa can be any naturally occurring amino acid
  misc_feature (200)..(200): Xaa can be any naturally occurring amino acid
MAKKSALVLFSGGQDSTVSLLWACENFDYIETIGFNYNQRHIIEMNCRDIVLKKIKSISDXWHDIIGKDHIIDIPALGKISETSLTRDSKIFVEDNGLPNTFVPGRNLLFFNYASALGWRRNIFDLVGGMCDTDYSGYPDCRRETIXSLKKTISLGLDKKVQIHTPLMDKNKADIWRLSYDLGGDKFHKIVXEDTHTCYXGDRSNLNDWGYGCGVCPACILRREGYNEWIKQNDI

SEQ ID NO: 40715 - protein, 232 aa, Pelagibacterium luteolum
  misc_feature (1)..(232): tr|A0A1G7W210|A0A1G7W210_9RHIZ 7-cyano-7-deazaguanine s ynthase OS=Pelagibacterium luteolum OX=440168 GN=queC P E=3 SV=1
MKTIVICSGGLDSVSLAHKVAAEQTLTGLVSFDYGQRHSKELGFAAACAQRLGVPHQIIDIRDIGRQLSGSALTDDVAVPDGHYAEESMRITVVPNRNAIMLTIAFGVAAARHDEAVGVAVHGGDHFIYPDCRPDFIDAFQAMQNHALDGYADVRLYAPFVNISKADIVTEGARHLTPFDQTWSCYKGGDVHCGRCGTCVERREAFDLARLQDPTEYADSDFWRAAVQARHA

SEQ ID NO: 40716 - protein, 458 aa, Pelagibacterium luteolum
  misc_feature (1)..(458): tr|A0A1G7Y2I4|A0A1G7Y2I4_9RHIZ Queuosine biosynthesis p rotein QueC OS=Pelagibacterium luteolum OX=440168 GN=SA MN04487974_11216 PE=4 SV=1
MNVHNHSSPTTKTLVVLESGERPPARLHGREELAEIGQQIRFDAGILDSFDVAGCLSRHFDLLVVCAAIELADRRWGRPRAWSRNFNLRIPVIDLERWQKPAVAHGLRRALGFLTGDNWQFTFVRAKNGSPIGMRQIPLGFDKTKKFAIAYSDGLDSRAVTSLSGGEDEALCIRVAGTHQRRQKGDSPFERIPFDTRDYRQNESSFRSRSFKFAAITAMAAQLYQVSRIVVPESGQGALGPAILPLHNIYADYRNHPAFFRRMEQFLHALLDWSVKFEQPRLWYTKGQTLRDFRLLPGKTNLDLTQTHSCWQTRRIVNDGYRRQCGLCAACLLRRQSLHAAGIKEDSGTYVVRDLNEASIAAALTTAVADKADRDIMIAYGSAGARHLQHLADLADQPDKTLHTHASQIAIATGETCDETTRRLSVMLSVHAEEWRAFRSDLGGNSFLNSWMDGGRNG

SEQ ID NO: 40717 - protein, 218 aa, Pelagibaculum spongiae
  misc_feature (1)..(218): tr|A0A2V1GVA1|A0A2V1GVA1_9GAMM 7-cyano-7-deazaguanine s ynthase OS=Pelagibaculum spongiae OX=2080658 GN=queC PE =3 SV=1
MKKAVVIYSGGMDSFTLLHRVIKQGYQPFALSFNYGQRHSKELVVAAEVCQALGVEHKVVDITAINQLLQGSSLTSSDIDVAEGHYEEDNMKSTVVPNRNMILLSLATGYAISLKADEVFYGAHGGDHAIYPDCRPEFVKAVSDVTRICDYHPVEIRAPYLDVSKGQILAEGLEMGLDYGQSWTCYNGREKACGKCGSCVERLEAFSQNQKIDPLTYE

SEQ ID NO: 40718 - protein, 251 aa, Pelagicola litorisediminis
  misc_feature (1)..(251): tr|A0A1Y5RBZ3|A0A1Y5RBZ3_9RHOB 7-cyano-7-deazaguanine s ynthase OS=Pelagicola litorisediminis OX=1312363 GN=que C PE=3 SV=1
MVRLAVAAYPPIAKTRTGKLNTIVICSGGLDSVSLAHKVAAENTLKGLLSFNYGQRHSKELDYAAACAARLGVPFKAVDIQAVGAALTGSALTDNINVPDGHYAEETMKLTIVPNRNAIMLAIAFGMAAAEKADAVATAVHGGDHFIYPDCRPAFISAFQAMQDQALDGYATVRLYTPYVDGSKADIVIDGARHNTPFAQTWSCYKGGERHCGRCGTCVERREAFHLAGVNDPTEYDDPDFWLTAVNKAGV

SEQ ID NO: 40719 - protein, 236 aa, Pelagicola sp.
  misc_feature (1)..(236): tr|A0A2U2CUM1|A0A2U2CUM1_9RHOB 7-cyano-7-deazaguanine s ynthase OS=Pelagicola sp. LXJ1103 OX=2175247 GN=queC PE =3 SV=1
MKTMVICSGGMDSVALAHKVAAEQTLAGLITFDYGQRHAKEITFAAAAATRLGVAHHVIDIRTIGAALTGSALTDDIDVPDGHYAEDTMKLTIVPNRNAIMLTIAFGLAAAQKADAVATAVHGGDHFIYPDCRPGFIDAFAKMQAEALDGYADITLYTPYVHGSKADIALDGAAHGAPFAETWSCYKGGDVHCGRCGTCVERREAFHIAGLPDPTIYADPDFWKAAIATADKKGAS

SEQ ID NO: 40720 - protein, 227 aa, Pelagirhabdus alkalitolerans
  misc_feature (1)..(227): tr|A0A1G6JNJ1|A0A1G6JNJ1_9BACI 7-cyano-7-deazaguanine s ynthase OS=Pelagirhabdus alkalitolerans OX=1612202 GN=q ueC PE=3 SV=1
MRNEKAVVVFSGGQDSTTCLFWALKQFQDVSVVTFDYNQRHKKEIEIATSIAKELGITQKIMDMSLLSQLAPNALTRDSIDVKDGEGGKLPSTFVPGRNLLFLSFAGVYAQQIGAKHLITGVSQTDFSGYPDCRNDFIQSMNTTLNLAMDQTFTIHTPLMWLDKAQTWALSHQLGVLDFIRYNTLTCYEGMIGEGCQVCPACKLRQAGLDTYLNNPNDKAYQTLEES

SEQ ID NO: 40721 - protein, 196 aa, Pelagivirga sediminicola
  misc_feature (1)..(196): tr|A0A2T7G3S2|A0A2T7G3S2_9RHOB 7-cyano-7-deazaguanine s ynthase OS=Pelagivirga sediminicola OX=2170575 GN=DC366 _16075 PE=3 SV=1
MSVVTLVSGGLDSSLVALLAKEEGLEQFPLFVDYGQRARDKELDACRRVLARLDLPAPEVAGLGGFGSLIRSGLTDPTLRVLEDAFTPGRNMLFLLVAASYAFQRDADAVSIGLLHEDASLFPDQTDAFLKDAEAIIGRCMGREIRVLAPLSAFHKIDVVALAQAKGIIGTYSCHLGLDDACGACIACNEFNFEEA

SEQ ID NO: 40722 - protein, 230 aa, Pelagivirga sediminicola
  misc_feature (1)..(230): tr|A0A2T7G7V3|A0A2T7G7V3_9RHOB 7-cyano-7-deazaguanine s ynthase OS=Pelagivirga sediminicola OX=2170575 GN=queC PE=3 SV=1
MKVIVICSGGMDSVSLAYRYAAAGDLHALLSFDYGQRHAKELEFAALCARRLGVAHHVIDISGVGVALSGSALTDDIDVPDGHYAEDTMKLTVVPNRNAIMLAIAFGMAAAQKVDAVATAVHGGDHFIYPDCRPEFIDAFQAMEDRALDGYADVRLLTPYVTGSKADIAVDGARHGTPFAETWSCYKGGDLHCGRCGTCVERREAFHLAGVDDPTVYADPDFWQGATAKD

SEQ ID NO: 40723 - protein, 217 aa, Pelistega indica
  misc_feature (1)..(217): tr|V8FY06|V8FY06_9BURK 7-cyano-7-deazaguanine synthase OS=Pelistega indica OX=1414851 GN=queC PE=3 SV=1
MTIQEKALVIFSGGQDSTTCLLQAIATYGQQNVQVITFAYGQRHAIELEKAKWIAQDLGVRQTVLDLSLMKQITHNALMDEQADIEQTDQGMPNTFVDGRNALFLLYAAIYAKSQEIKHIIVGVCETDFSGYPDCRDVFIKSMNVSLNLAMDYPFQIHTPLMYLTKAQTWALADQLGGLQYVREHTHTCYMGVEGGCGECPSCLLRNKGLAEYLESK

SEQ ID NO: 40724 - protein, 230 aa, Pelobacter acetylenicus
  misc_feature (1)..(230): tr|A0A1L3GG31|A0A1L3GG31_PELAE 7-cyano-7-deazaguanine s ynthase OS=Pelobacter acetylenicus OX=29542 GN=queC PE= 3 SV=1
MNKKAVVLYSGGLDSTTCLAEARAAGFSPYALSFHYGQRHTVELEKARLYAPRVGAVDHMVIDFDLRRIGGSALTSDQEVPKGRAIDDAIPVTYVPARNTIFLSFALGWAEVLGSFDIFIGVNALDYSGYPDCRPEFVRAFEQLANLATRAGVEGQGKYRVHAPLLHLTKAQIIRRGLDLGVDYALTHSCYDPSPEGLACGLCDSCQLRLKGFAEAGIPDPAAYVREVRR

SEQ ID NO: 40725 - protein, 230 aa, Pelobacter carbinolicus
  misc_feature (1)..(230): sp|Q3A090|QUEC_PELCD 7-cyano-7-deazaguanine synthase OS =Pelobacter carbinolicus (strain DSM 2380 / NBRC 103641 / GraBd1) OX=338963 GN=queC PE=3 SV=1
MSKKAVVLYSGGLDSTTCLAEARAAGFTPYALSFHYGQRHTVELEKARLYAPQVGAADHMVIDFDLRRIGGSALTSDEEVPKGREIDDAIPVTYVPARNTIFLSFALGWAEVLGSFDIFIGVNALDYSGYPDCRPEFISAFEQLANLATKAGVEGQGQYRVHAPLLHLTKAQIIKRGLELGVDYSLTHSCYDPTPEGLACGLCDSCQLRLKGFAEAGISDPAAYAREVQR

SEQ ID NO: 40726 - protein, 226 aa, Pelobacter propionicus
  misc_feature (1)..(226): sp|A1ANI8|QUEC_PELPD 7-cyano-7-deazaguanine synthase OS =Pelobacter propionicus (strain DSM 2379 / NBRC 103807 / OttBd1) OX=338966 GN=queC PE=3 SV=1
MEKRAVVLYSGGLDSTTCLAMAKADGFAPYAMSFSYGQRHGFELEVAKANARPLGAVEHLVVDFDLRRMGGSALTDDISVPKEGVGSDIPVTYVPARNTIFLSFALGWAEVLGAFDIYIGVNSLDYSGYPDCRPEFVSAFEALANLATKSGVEGQGHFSIRTPLINMTKAEIIKAGVALGVDYSWTHSCYDPESDGTSCGRCDSCRLRLKGFAEAGLVDPLTYSGR

SEQ ID NO: 40727 - protein, 228 aa, Pelobacter sp.
  misc_feature (1)..(228): tr|A0A1L3GPZ3|A0A1L3GPZ3_9DELT 7-cyano-7-deazaguanine s ynthase OS=Pelobacter sp. SFB93 OX=1842532 GN=queC PE=3 SV=1
MSKKAIILYSGGLDSTTCLAIAQSEGFAPYTMSFDYGQRHTVELAKAAQYAPQLGAVEHQLVNIDLRRIGGSALTSDLDVPKNIVDDGIPVTYVPARNTIFLSFALAWAEVLGAFDIFIGVNALDYSGYPDCRPEYIAAYETMANLATKAGVEGEGRYRIHTPLIDLTKAEIIRRGLDLGVDYALTHSCYDPTPDGQACGACDSCRLRLKGFREAGIEDPVPYVQKEQ

SEQ ID NO: 40728 - protein, 227 aa, Pelodictyon luteolum
  misc_feature (1)..(227): sp|Q3B5F4|QUEC_PELLD 7-cyano-7-deazaguanine synthase OS =Pelodictyon luteolum (strain DSM 273 / 2530) OX=319225 GN=queC PE=3 SV=1
MKAVLLLSGGMDSLVTTAIAHREGYELAAMHVNYGQRTWQKELQSFRSIADHYSITERLEVNADFLGRIGGSSLTDHSMPVAGADLRGSGIPTSYVPFRNACFLSMAVSWSEVIGAERLFIGAVEEDSSGYPDCRRVFYDAFNRVIELGTRPETGITILTPLIAMQKAQIVRNGMELGAPFEHSWSCYRSEGRACGVCDSCARRLRAFELQGIRDPIDYEVRPQYID

SEQ ID NO: 40729 - protein, 227 aa, Pelodictyon luteolum
  misc_feature (1)..(227): tr|A0A165MDQ5|A0A165MDQ5_PELLU 7-cyano-7-deazaguanine s ynthase OS=Pelodictyon luteolum OX=1100 GN=queC PE=3 SV =1
MKAVLLLSGGMDSLVTTAIAHREGHDLAAMHVNYGQRTWQKELASFRSIADHYAITERLEVNADFLGLIGGSSLTDHSMPVAGADLRGSGIPTSYVPFRNACFLSMAVSWSEVIGADRIFIGAVEEDSSGYPDCRRVFYDAFNRVIELGTKPETGITILTPLIAMQKAEIVMKGMELGAPFEHSWSCYRSEGRACGVCDSCARRLRAFELQGIRDPIDYEVRPQYID

SEQ ID NO: 40730 - protein, 258 aa, Pelodictyon phaeoclathratiforme
  misc_feature (1)..(258): tr|B4SEN5|B4SEN5_PELPB 7-cyano-7-deazaguanine synthase OS=Pelodictyon phaeoclathratiforme (strain DSM 5477 / B U-1) OX=324925 GN=queC PE=3 SV=1
MSRFVSTTQPKAVVLLSGGMDSLVTTAMAHAAGFELAAMHVNYGQRTWQKELESFRSICSHYNIEQRLEVNADFLAQIGGSSLTDFSMPVGGADLQGSSIPTSYVPFRNAGFLSMAVSWSEVIGASKIFIGAVEEDSSGYPDCRKVFYDAFNTVIVLGTKPETDIAILTPLIEMQKSEIVRKGIELQVPFELSWSCYKSEGKACGLCDSCARRLRAFEMMGITDPIDYEARPLYIQQKSAEHSRHTSSIHPSINTLQS

SEQ ID NO: 40731 - protein, 237 aa, Pelomonas puraquae
  misc_feature (1)..(237): tr|A0A254N4A5|A0A254N4A5_9BURK 7-cyano-7-deazaguanine s ynthase OS=Pelomonas puraquae OX=431059 GN=queC PE=3 SV =1
MTDTRKALVLFSGGQDSTTCLAWALDRYAEVETLAFDYGQRHRVELDCRTTVRERIAAQFPAWAGKLGADHLLDLSLLGQISDTALTSERAIELQANGLPNTFVPGRNLLFLTFAATLAYRRGASVLVGGMCETDFSGYPDCRDNTMKALQVALSLGLDAPMTLETPLMFIDKAATWRLAEQLGGEALVKLIVEDTHTCYLGERGALHAWGHGCGHCPACELRAKGYAGYAAARARA

SEQ ID NO: 40732 - protein, 74 aa, Pelomonas puraquae
  misc_feature (1)..(74): tr|A0A254MXM6|A0A254MXM6_9BURK Uncharacterized protein OS=Pelomonas puraquae OX=431059 GN=CDO81_26865 PE=4 SV= 1
MDERFCRPSLNKQETWHLSHTLGGPGLLELVRRETHTCYLGDHTTWHEWGYGCGTCPACELRSKGYDAYMRGQP

SEQ ID NO: 40733 - protein, 234 aa, Pelomonas saccharophila
  misc_feature (1)..(234): tr|A0A4R3UIN5|A0A4R3UIN5_PELSC 7-cyano-7-deazaguanine s ynthase OS=Pelomonas saccharophila OX=304 GN=queC PE=3 SV=1
MQDTRKALVLFSGGQDSTTCLAWALDRYAEVETLAFDYGQRHRVELDCRNTVRARIAAQFPHWAGKLGADHLLDLSLLGQISDTALTSERAIELQANGLPNTFVPGRNLLFLTFAATLAYRRGASVLVGGMCETDFAGYPDCRDNTMKALQVALSLGLDAPMTLETPLMFIDKAATWRLAESLGGAALVKLIVEETHTCYLGERGELHDWGHGCGHCPACELRAKGFAAYRAVA

SEQ ID NO: 40734 - protein, 234 aa, Pelomonas sp.
  misc_feature (1)..(234): tr|A0A397S1S0|A0A397S1S0_9BURK 7-cyano-7-deazaguanine s ynthase OS=Pelomonas sp. BT06 OX=2135721 GN=queC PE=3 S V=1
MQDTRKALVLFSGGQDSTTCLAWALDRFAEVETLAFDYGQRHRIELDCRNTVRAGIARQFPQWAGKLGADHLLDLSLLGQISDTALTSERAIELQANGLPNTFVPGRNLLFLTFAATLAYRRGASVLVGGMCETDFSGYPDCRDNTMKALQVALSLGLDAPMTLDTPLMFIDKAATWRLAESLGGAALVKLIVEDTHTCYLGERGELHDWGHGCGRCPACELRASGFARYKAGQ

SEQ ID NO: 40735 - protein, 237 aa, Pelomonas sp.
  misc_feature (1)..(237): tr|A0A2R7TBE1|A0A2R7TBE1_9BURK 7-cyano-7-deazaguanine s ynthase OS=Pelomonas sp. HMWF004 OX=2056841 GN=queC PE= 3 SV=1
MTDTRDTRKALVLFSGGQDSTTCLAWALDRYAEVETLAFDYGQRHRIELDCRNTVRAEIVRQFPHWAGKLGADHLLDLSLLGQISDTALTSERAIELQANGLPNTFVPGRNLLFLTFAATLAYRRSASVLVGGMCETDFSGYPDCRDNTLKAAQVALSLGLDAPMTIETPLMFIDKAATWRLAEGLGGEALVKLIVEETHTCYLGERGQLHDWGHGCGHCPACALRAKGFAAYRDAA

SEQ ID NO: 40736 - protein, 226 aa, Pelosinus fermentans
  misc_feature (1)..(226): tr|I9NRP2|I9NRP2_9FIRM 7-cyano-7-deazaguanine synthase OS=Pelosinus fermentans JBW45 OX=1192197 GN=queC PE=3 S V=1
MKAVVLLSGGLDSTVCMAVAHSKGYELFPISFNYNQRHARELESAESVAQYYNVTKHIIIETNMNVIGGSALTDEQLTVPTGNIDSHQIPVTYVPARNLIFLSYALGYAEVMGADKIFIGVNALDYSGYPDCRPEFINLFQQVADYSTKAGVQDHRKIVIETPLLQLTKKDIVLLGKNLDAPLQFTTSCYNGESVACGECDSCLLRLKGFAEAGTIDPIIYRTRSE

SEQ ID NO: 40737 - protein, 226 aa, Pelosinus fermentans
  misc_feature (1)..(226): tr|I9LDT2|I9LDT2_9FIRM 7-cyano-7-deazaguanine synthase OS=Pelosinus fermentans B4 OX=1149862 GN=queC PE=3 SV=1
MKAVVLLSGGLDSTVCMAVAHSKGYELFPISFNYNQRHARELESAESVAQYYNVTKHIIIETNMNVIGGSALTDGQLTVPTGNIDSHQIPVTYVPARNLIFLSYALGYAEVTGADKIFIGVNALDYSGYPDCRPEFINLFQQVADYSTKAGVQDHRKIVIETPLLQLTKKDIVLLGKNLDAPLQFTTSCYNGEPVACGECDSCLLRLKGFAEAGTIDPIIYRTRSE

SEQ ID NO: 40738 - protein, 226 aa, Pelosinus propionicus
  misc_feature (1)..(226): tr|A0A1I4H7Y4|A0A1I4H7Y4_9FIRM 7-cyano-7-deazaguanine s ynthase OS=Pelosinus propionicus DSM 13327 OX=1123291 G N=queC PE=3 SV=1
MKAVVLLSGGLDSTVCMAVARSKGYELFPISFNYNQRHARELECAKKVSQYYNVTKHIVIETNMNAIGGSALTDEQLAVPTGNLDSRQIPVTYVPARNLIFLSYALGYAEVAGADKIFIGVNALDYSGYPDCRPEFINLFQQVADYSTKAGVQEHRKIVIETPLLQLTKKDIVMLGNSLDAPLQLTTSCYNGEPVACGECDSCLLRLRGFAEAGTIDPIMYRTRSE

SEQ ID NO: 40739 - protein, 226 aa, Pelosinus sp.
  misc_feature (1)..(226): tr|A0A075KCA7|A0A075KCA7_9FIRM 7-cyano-7-deazaguanine s ynthase OS=Pelosinus sp. UFO1 OX=484770 GN=queC PE=3 SV =1
MKAVVLLSGGLDSTVCMAVAHSQGYELFPISFNYNQRHSRELESATTVAQYYKVTKHIVIETNMNAIGGSALTDEHLEVPSGSNATHDIPITYVPARNLIFLSYALGYAEVTGADKIFIGVNALDYSGYPDCRPEFIDLFQEVADYSTKAGVQDQRKIRIETPLLHLTKKDIVILGHSLNAPLELTTSCYKGESAACGECDSCLLRLKGFSEANITDPILYKTRSE

SEQ ID NO: 40740 - protein, 233 aa, Pelotomaculum propionicicum
  misc_feature (1)..(233): tr|A0A4Y7RLW4|A0A4Y7RLW4_9FIRM 7-cyano-7-deazaguanine s ynthase OS=Pelotomaculum propionicicum OX=258475 GN=que C_1 PE=3 SV=1
MKSIVLLSGGLDSSVALAQALRETDVALCLTFDYGQKSAAKEKKAAAALAAYYKTNHRVLELNFLKEITTSALVAGESVPEPGLFDLDDRAKSGASAVMVWVPNRNGLFVNIAASFAEAYQCDIIVAGFNREEAATFPDNSREYVSAANLAMSFSTLRRVRLVSYTQQLDKAEIVKLGLALGLPFQYVWSCYRGGEKMCGRCESCMRLKRAVEAAGLELERLQSRDDGDRTFY

SEQ ID NO: 40741 - protein, 628 aa, Pelotomaculum propionicicum
  misc_feature (1)..(628): tr|A0A4Y7RK30|A0A4Y7RK30_9FIRM 7-cyano-7-deazaguanine s ynthase OS=Pelotomaculum propionicicum OX=258475 GN=que C_3 PE=4 SV=1
MNSQPSKPNEAIIVYCDELCKSSICNSQELNLLNRDIDGLDANITIEFNKFVRDPENLSPRILDLLRIAAYVYCTDRLINRGERDSLNNTAWSRAFEFHIPVSDIAFWSDGKISTKMGEALAFMTGDRRFNFSFTKASLSPVNTDNQQLSLFSTEYITLDEAEKTDVMLFSGGLDSLAGAIQRLNDHNDRKLCLVSHKANNCTIRTQNATAKHLRDKYSNRAIQYGFECHNKKAAPSREETQRSRMFLFSAIAFAICNCYEKKEFFVHENGITSINLPKQSDTFNARMSRTTHPKTIGLLREFFRLFDKDFNIITPYYNKTKSDILDIFKQYGEENIITSSVSCSSTRNKPKNSATHCGCCSQCIDRIFAIYASGLEDYDVTYADDIIKEIPGKKTAQHLYNTLRLACAESSRTKDELFRSYTDEITDVINYWPNDNPDDSLDEIFQLYGRFGDSVMKAIKSIQLKFEDPRVPVNKNSLLGIVAEREYLNTPVQIRVNEMDTILRKAIPMSFQREKPKDENDMNDKVQALLSTQGEFTREYPALQFGETAYKADHAKDGLIIESKFPRGKTAKSTVSEGIAADITKIPSSVAGILFVVYDPERKITDDDLFISTFEATRQNCFVRIYR

SEQ ID NO: 40742 - protein, 225 aa, Pelotomaculum schinkii
  misc_feature (1)..(225): tr|A0A4Y7RF16|A0A4Y7RF16_9FIRM 7-cyano-7-deazaguanine s ynthase OS=Pelotomaculum schinkii OX=78350 GN=queC PE=3 SV=1
MKSVVLLSGGLDSTVSFAHALRESEVALCLTFDYGQRAANQEKKAAAALAAHYRVEHLVVELPFLRDITSTALVRGDLDLPEPDRTGLDDFAASTASAAAVWVPNRNGVFINIAAAFAESRQCGLVVTGFNREEAVTFPDNSTDFVAAAGHALSFSTMNKVKVVSYTQRLDKVEIIKFGLRLGIPFRHIWSCYRGYEKMCGSCESCQRFKRASEQAGLDTTAFFV

SEQ ID NO: 40743 - protein, 229 aa, Pelotomaculum sp.
  misc_feature (1)..(229): tr|A0A1V4VMH5|A0A1V4VMH5_9FIRM 7-cyano-7-deazaguanine s ynthase OS=Pelotomaculum sp. PtaB.Bin104 OX=1811693 GN= queC_3 PE=3 SV=1
MPRSAVLLSGGLDSAVSLAHALRESEVALCLTFNYGQHAAQKEIEAAANLTAYYHLPHQVVELPFLGEITGTALVKNEASLPEPELALLDDPVAATASAVQVWVPNRNGLFINIAAAFAEACGAGLVVCGFNREEAATFPDNGADFVRAANSALSYSTLNDVKVVSYTQLLSKADIIKLGLRHHVPFQYIWSCYRGGEKMCGRCESCLRFKRAAQEADLDLEQIAFQEV

SEQ ID NO: 40744 - protein, 623 aa, Pelotomaculum sp.
  misc_feature (1)..(623): tr|A0A1V5BN16|A0A1V5BN16_9FIRM 7-cyano-7-deazaguanine s ynthase OS=Pelotomaculum sp. PtaU1.Bin065 OX=1811696 GN =queC_3 PE=4 SV=1
MNLQPSVVNVFCGELSVAPENKEEKSLKLSYFDLENFDANINIGFNKFINDIESLPPRIIDLLEIAAYVFCADRAVDRGERNSINNNSWARSFQFYIPVRDNLFWSNPKVSAAISSAMEFMTGDRKYSFQFEKYEQIPNIVPNHQLSLFNNEYITISEAKNTEVMLFSGGLDSLAGVIEYLNTFKSKELCLVSHKANNSVTHTQNSIIGYLQKRYNHRIKHYNFECHFKKNTPSKEETQRSRMFLYSAIAFAICNCYEKQEFYVYENGITSINLPKQADTFNARASRTTHPKAIALLQKFYRYFSEEFSLLTPYSNKTKADILQIFKNNNEQNIISSSVSCSSTRNKPGIAAHCGCCSQCIDRRFAVFATELEEYDAEYADDFIRHIPNSETRQRLYNTLRLAAMEGMKSKQDFIEKYMDEIADIIDYTPGSNPDDKMDDLYKLFCRFGQSVLFAAKRIQAQCEDLSAKNPKDSLLEMLATREHLATPTLSRVNEIDQYPKVAIPLMFQREPPANENDFNDKVQALLVSKGDFEREYPVLQFGITSYKADHSQDMLLIESKYIRSNTSPSVATNGIASDITLVPNEFGLYFVVYDPERRIGSDMKFISNLESKRESCFVRIYR

SEQ ID NO: 40745 - protein, 221 aa, Pelotomaculum thermopropionicum
  misc_feature (1)..(221): sp|A5D2E1|QUEC_PELTS 7-cyano-7-deazaguanine synthase OS =Pelotomaculum thermopropionicum (strain DSM 13744 / JC M 10971 / SI) OX=370438 GN=queC PE=3 SV=1
MRSIVLLSGGLDSAVSLACSLQGGEVCLCLTFDYGQKAAEREKKAAAALAAHYKLRHRVIELPFLKEITSTALVSETSELPAAEEEELDENEASRSSAALVWVPNRNGVFINIAAAFAEAYRCDLVVTGFNREEAASFPDNSPEFVVAANASLSYSTLNKVRVASYTQGLNKTEIVKLGMNMGVPFDLIWSCYGGAEKMCRRCESCLRFIRAAKTAGLQLE

SEQ ID NO: 40746 - protein, 225 aa, Pelotomaculum thermopropionicum
  misc_feature (1)..(225): tr|A0A101HV72|A0A101HV72_9FIRM 7-cyano-7-deazaguanine s ynthase OS=Pelotomaculum thermopropionicum OX=110500 GN =queC PE=3 SV=1
MKSIVLLSGGLDSTVSLAFAMKDTVVSLCLTFDYGQKAAENENIAAAALAEHYRVRHKIINLPFLQELTSSSLVARDKKIPEPESNHLDDYTSATATAKSVWVPNRNGIFINIASSLAEALQCSFVITGFNREEAVTFPDNSAEFVSAANRALSYSTLNRVKVISYTQRLSKVEIIKLGMRLRVPFHLIWCCYQGETKMCGRCESCLRLLQAANKAGLDLQKLFS

SEQ ID NO: 40747 - protein, 218 aa, Peptoclostridium acidaminophilum
  misc_feature (1)..(218): tr|W8TIE6|W8TIE6_PEPAC 7-cyano-7-deazaguanine synthase OS=Peptoclostridium acidaminophilum DSM 3953 OX=1286171 GN=queC PE=3 SV=1
MENEKALIVFSGGQDSTTCLFWAKERFADVIALSFDYGQKHVLELDCAKAICKKYGVEHHTMNLGLLGEITSNSLTRLDMDVDKEVEEGSLPNSFVDGRNMLFFTFAAIFAKQKGIKHIVTGVSQSDYSGYPDCRDIFVKSLNVTANLAMEYDFVIHTPLMWLDKAQTWGLADRIGVLDIIKNETLTCYNGIIGDGCGECPACNLRRNGYEKYVESKA

SEQ ID NO: 40748 - protein, 221 aa, Peptoclostridium litorale
  misc_feature (1)..(221): tr|A0A069REV9|A0A069REV9_PEPLI 7-cyano-7-deazaguanine s ynthase OS=Peptoclostridium litorale DSM 5388 OX=112132 4 GN=queC PE=3 SV=1
MNHEKAIVVFSGGQDSTTCLFWAKERFNEVIAVSFDYNQKHKLELECAGDICKKYGVEHHTLDLGLLNQLAPNSLTRTDISVDTDSPEEGVPNSFVDGRNMLFLAFVAVFAKQRGINHIITGVSQSDFSGYPDCRDVFIKSLNVTLNLSMDYQFEIHTPLMWIDKAQTWKMANDLGVLDVIKEETLTCYNAIKGNGCGDCPACKLRKNGYLEFKKFYMHGA

SEQ ID NO: 40749 - protein, 225 aa, Peptococcaceae bacterium
  misc_feature (1)..(225): tr|A0A419G6Z1|A0A419G6Z1_9FIRM 7-cyano-7-deazaguanine s ynthase OS=Peptococcaceae bacterium OX=2052179 GN=queC PE=3 SV=1
MRSVVLLSGGLDSTVSMAHALREVEVSLSLTFDYGQRAAAREISAAERIAAYYGICHQVLELPFLKEVTGTALVGKDRAVPEPSVSDLDDYERARFNAKRVWVPNRNGLFINIAATIAEARQCGIIVTGFNREEAETFPDNSFAFVRAANNALAYSTLNQVKVVSYTQQLDKEEIVQLGRQLKAPLEYIWSCYLGGQEMCGRCESCRRLSRALQPPGHRGGEAKK

SEQ ID NO: 40750 - protein, 230 aa, Peptococcaceae bacterium
  misc_feature (1)..(230): tr|A0A0J1F6U5|A0A0J1F6U5_9FIRM 7-cyano-7-deazaguanine s ynthase OS=Peptococcaceae bacterium CEB3 OX=999898 GN=q ueC PE=3 SV=1
MRKAVILLSGGMDSSTVLYIAKSEGFELHAVSFDYGQRHVRELECAKAVAQEAGVKEHIVVRTNMDAWGGSALTDKGIDVPENEPHKDRIPITYVPARNMIFLSFAASYAEAIGSQDIFIGVSEVDYSGYVDCRQEFIDAMESAINAGTVCAVQDGRKIKIHTPLIHMTKAAEIKLGLKLGVDYELTWTCYKGEELACGTCDSCTLRLKAFREAGYEDPIPYQAASRGES

SEQ ID NO: 40751 - protein, 218 aa, Peptoniphilus asaccharolyticus
  misc_feature (1)..(218): tr|A0A1W1UPX7|A0A1W1UPX7_PEPAS 7-cyano-7-deazaguanine s ynthase OS=Peptoniphilus asaccharolyticus DSM 20463 OX= 573058 GN=queC PE=3 SV=1
MKMVLFSGGVDSTTCLAMAKEKDEDVIAISFDYGQRHSEQELNAAKKVAKYYNVKQIFIDLKDVFKHGNSSLTDLDLEVSEGDYAEQENANTEVEFRNGIFISVLASLAMQYKADEIYFGAHKDDSGVIYPDCSPEFVKAMEEAIKVGSRDTVALKVPFLNKTKTELVAYGKTIGVPYNLTYSCYNGTNPPCHKCGTCIDREKAFIANGLDRDGNYAR

SEQ ID NO: 40752 - protein, 219 aa, Peptoniphilus indolicus
  misc_feature (1)..(219): tr|G4D608|G4D608_9FIRM 7-cyano-7-deazaguanine synthase OS=Peptoniphilus indolicus ATCC 29427 OX=997350 GN=exsB PE=3 SV=1
MKMVLFSGGVDSSTCLAMAKETGDSVMTVSFDYGQRHNEQELEAAKKVAKYYDVEQINIDLKDIFKHGNSSLTDLSLEVSEGDYAEQENANTEVEFRNGIFISVLASLAMQYKVDEIYFGAHKDDSGVIYPDCSPEFVKAMGEAINVGSRGKVSLQVPFLNKTKTELVAYGKSIGVPYHLTYSCYNGTNPPCGKCGTCIDREKAFLANGLDREGHYAED

SEQ ID NO: 40753 - protein, 259 aa, Peptoniphilus indolicus
  misc_feature (1)..(259): tr|G4D1E3|G4D1E3_9FIRM PP-loop family protein OS=Pepton iphilus indolicus ATCC 29427 OX=997350 GN=HMPREF9129_02 23 PE=4 SV=1
MLFICEEQRMNLKEFFSKNKKVAIAFSGGVDSVFLLQQALKNKAEVRAYYVKSDFQPEFEFKEAKYFAHELGADLKILEVDVLKDVRIEKNDKDRCYFCKQKIFGTIIEAAKIDGFDVLLDGTNASDEYEDRPGMRAKEEMKVLSPLRECNLTKSEIRELSKKEGLASWRKPSYSCLATRIKTGMNITKEDLAVIEKAEAFLMNLGFKNFRVRKIDDVAKIEVTGKDFEKIISFRKEIVDEFKKFYREVTLNLEVRDEE

SEQ ID NO: 40754 - protein, 430 aa, Peptostreptococcus anaerobius
  misc_feature (1)..(430): tr|A0A135YTT6|A0A135YTT6_9FIRM 7-cyano-7-deazaguanine s ynthase OS=Peptostreptococcus anaerobius OX=1261 GN=HMP REF3195_01017 PE=3 SV=1
MRIYCTNESIDNIPEGFDEKLDITNKKDIGFNFWDNYIKLEKEFSKLAIDLLYLSIFVFVADRIVKRDTQNDCWTRTIKLNVPVSDIDFWNSQKVLVTDMLNFLSGDNWTFEFRPKTVYQEQIYYSSKKYKELDKRSYDKICMFSGGLDSFIGAIDLLEDSTSSILLVSHYGGGKGTKSYQDDIFKAVKNKYKLDDRDQVQSYVVARNGKEDTTRTRSFMFFSHAIVYASAFGRKTKLYIPENGYISLNVPLSGSRFGSSSTRTTHPYYMKKLQTLINNMNLDIKIINPYQFKTKGEMVKECKNSSFLKEQYVNTMSCSHPDNGRYKKEKTSKHCGDCIPCIVRKAAIISAYGKDETEYRHKNLEKSEAGILNRNAFLQMLEKHNPKRAVFEIQKSGPLTDNLFEFAGVYNRSIEELNKVFNEGDLNEVD

SEQ ID NO: 40755 - protein, 239 aa, Peredibacter sp.
  misc_feature (1)..(239): tr|A0A2E5CAZ2|A0A2E5CAZ2_9PROT 7-cyano-7-deazaguanine s ynthase OS=Peredibacter sp. OX=2024850 GN=queC PE=3 SV= 1
MTDKKIQKQAVVVHSGGMDSSICLALAVEKHGAENVLSMTFTYGQRHTEEIKQAQKICSDWGVDQIIVNLDCLQQITESSLIGHSLEIQHKEGEVPNTMVVGRNGLMARVASIHADFLGANSIYMGVIELEEANSGYRDCSRKYMDIVQAALRLDFANPGFEIKTPLVFMSKKQTLDAAYQMGKLEYLLENTISCYEGQKGYGCGECPACELRNEGIQDFLDQNSDIQFSYKNKYRLSN

SEQ ID NO: 40756 - protein, 225 aa, Peredibacter sp.
  misc_feature (1)..(225): tr|A0A2E5CAY8|A0A2E5CAY8_9PROT 7-cyano-7-deazaguanine s ynthase OS=Peredibacter sp. OX=2024850 GN=queC PE=3 SV= 1
MSSDIGLVLVSGGMDSLVCAAIANEKHEQLAFLHLSYGQKTSAKEKLCYDKIADFYKVSPGLRKTVDMSFLSQIGGSSLTDNKLEVTDFEGDSDEIPSSYVPFRNAHIISMAVSWAEVIGAKKIYIGANYEDSPGYPDCRPEYYEAFNKLIKAGTAAGDIEVVTPVLMDKKKDIVMKAKNFNAPLELTWSCYKNEDIACGVCDSCALRLRGFREANLKDPLPYKN

SEQ ID NO: 40757 - protein, 225 aa, Perlucidibaca sp.
  misc_feature (1)..(225): tr|A0A2P6AV02|A0A2P6AV02_9GAMM 7-cyano-7-deazaguanine s ynthase OS=Perlucidibaca sp. HR-E OX=2094561 GN=queC PE =3 SV=1
MNMPHAVVLLSGGLDSATCLAIAREQGYSISALSFDYGQRHNAELAAARRIAKALQVEDHRVMRLDLGLIGGSALTDAGIAVPEEESEGIPVTYVPARNTVFLSFALGLAEVTGAQDIFIGVNAVDYSGYPDCRPEYIAAFTRVANLATKAGVEGGLMHIRTPLIDLSKADIIRTGLRLGLDYGLTVSCYQADDDGSACGRCDACRLRRKGFSDAGVADPTRYAP

SEQ ID NO: 40758 - protein, 235 aa, Permianibacter aggregans
  misc_feature (1)..(235): tr|A0A4R6US68|A0A4R6US68_9GAMM 7-cyano-7-deazaguanine s ynthase OS=Permianibacter aggregans OX=1510150 GN=queC PE=3 SV=1
MFPVIESSVMSNVRCAVVLLSGGLDSTTCLAMAKAAGFACYALSFRYGQRSAQEIVFAERIARANGVMEHKVIDLDLSQIGGSALTDHRIAVPESPTSGIPVTYVPARNTVFLSIALGWAEVLGADAIYTGVNAVDYSGYPDCRPDYIAAFEKMANLATRAGVEGHRLRIETPLIQLSKAQIIQAGLTLGVDYSLTVSCYQANDAGQACGRCDACRLRRQGFTDAGITDPTLYRT

SEQ ID NO: 40759 - protein, 228 aa, Persephonella hydrogeniphila
  misc_feature (1)..(228): tr|A0A285N9Z6|A0A285N9Z6_9AQUI 7-cyano-7-deazaguanine s ynthase OS=Persephonella hydrogeniphila OX=198703 GN=qu eC PE=3 SV=1
MKQESKIIVLVSGGMDSATLLWLAKEKFSKVYAISFDYGQKHKIELDFAKQLTEEAGVEKHFIVDVPHLKGIEGSALTDEKIEVPSEEYPEGPPITTVPMRNLNFLAIAASFADVYEIENIGIGIHSVDSPYPDCRAEFASSAEAAINASSVMVAKKKNRITVWTPFLGMTKAEVLKTGLRLGVPYEKTYSCYRGTIPPCGECATCRQREEAFKEAGIEDPTKKLEGR

SEQ ID NO: 40760 - protein, 227 aa, Persephonella marina
  misc_feature (1)..(227): sp|C0QST3|QUEC_PERMH 7-cyano-7-deazaguanine synthase OS =Persephonella marina (strain DSM 14350 / EX-H1) OX=123 214 GN=queC PE=3 SV=1
MKQSSSIIILVSGGMDSAALLWLAKKEFDKVYAVSFDYGQKHRVELDFAKKLTEEAGVEEHFIAEVPHLKGIKGSALTDRSVEIPSEEYPEGPPVTTVPMRNLNFLSIAASFADIYEIENIGIGVHSVDSPYPDCRAEFVSAAEAAINASSVMVAKKKNRITVYTPFLGMTKTDVLRIGLELGVPYEKTYSCYRGTIPPCGECATCRQRIEAFRSVGLEDPWFKKER

SEQ ID NO: 40761 - protein, 227 aa, Persephonella sp.
  misc_feature (1)..(227): tr|A0A432S3M3|A0A432S3M3_9AQUI 7-cyano-7-deazaguanine s ynthase OS=Persephonella sp. OX=2060922 GN=queC PE=3 SV =1
MKEDIIVLVSGGMDSATLLWLAKNNFRNVYAISFKYGQKHSIELDFARRLVERAGIKKHFIIEIPHLKELKGSALTDEDIDVPAEEYPKNEPPITTVPMRNLTFLSIAASFCDIYEIENIGIGIHSVDSPYPDCRGEFASSVEAAINASSIMVAKKKNRIKVYTPFLGMTKTDVLKLGLELNVPYELTYSCYRGSLPPCGTCATCIQREEAFKSLGIEDPLKKQINH

SEQ ID NO: 40762 - protein, 224 aa, Petrimonas mucosa
  misc_feature (1)..(224): tr|A0A1G4G7C7|A0A1G4G7C7_9PORP 7-cyano-7-deazaguanine s ynthase OS=Petrimonas mucosa OX=1642646 GN=queC PE=3 SV =1
MTNYKNEDAVVLFSGGQDSTTCLFWAKQTFRNVEALCFSYGQRHSLEIEVARNIAKIAEVSFRLLDASVISQLSPNSLTDSSIVMDEEQPAGSYPNTFVPGRNMLFITFAAAIAYAKNIRHLVTGVSEADYSGYPDCRDTFIHSLNATVNLAMDKHFIIHTPLMHKDKVKVWAFADELGVFDIVRNETLTCYNGIKAEGCGHCPACKLRNRGLQEYLDQRSKSI

SEQ ID NO: 40763 - protein, 221 aa, Petrimonas sp.
  misc_feature (1)..(221): tr|A0A3G9DUT4|A0A3G9DUT4_9PORP 7-cyano-7-deazaguanine s ynthase OS=Petrimonas sp. IBARAKI OX=1978337 GN=queC PE =3 SV=1
MTDYKNEDALVLFSGGQDSTTCLFWAKQTFRNVEALCFSYGQRHSLEVEVARNIAEIAGVSFQLLDASVISHLSPNSLTDASIVMDEEQPAGSYPNTFVPGRNMLFITFAAAVAYAKNIKHLVTGVSEADYSGYPDCRDTFIHSLNATINLAMDKHFVIHTPLMHRDKAKVWALADDLGVFDIVKNETLTCYNGIKAGGCGHCPACKLRNRGLQEYLADRK

SEQ ID NO: 40764 - protein, 232 aa, Phaeobacter gallaeciensis
  misc_feature (1)..(232): tr|V9WKH7|V9WKH7_9RHOB 7-cyano-7-deazaguanine synthase OS=Phaeobacter gallaeciensis DSM 26640 OX=1423144 GN=qu eC PE=3 SV=1
MKTLVICSGGLDSVSLAHILAAQGQLSRLVSFDYGQRHRKELDYAAACGQRLGVPHEIIDMRSIGAALSGSALTDDIDVPDGHYAEETMKVTVVPNRNAIMLTIAYGIAAAKGDTAVATAVHGGDHFIYPDCRPAFTDAFDAMQRMALDGYADVSLVTPFVHRSKGDIVAEGAAVNTPFAETWSCYKGGEHHCGRCGTCVERREAFDLAGVEDPTVYTDPDFWRTAVQEGAA

SEQ ID NO: 40765 - protein, 220 aa, Phaeobacter gallaeciensis
  misc_feature (1)..(220): tr|A0A1B0ZN23|A0A1B0ZN23_9RHOB 7-cyano-7-deazaguanine s ynthase OS=Phaeobacter gallaeciensis OX=60890 GN=queC P E=3 SV=1
MSLAHIVAAERQLTRLVSFDYGQRHRKELDFAAAAAQRLNVPHHLIDMRPIGAALTGSALTDDIDVPDGHYAEETMRITVVPNRNAIMLAIGFGVAAANGDEAVATAVHGGDHFIYPDCRPGFTRAFETMQKAALDGYADVELYTPFVERSKADIVADGARHGTPFAETWSCYKGGDLHCGRCGTCVERREAFHLAGVADPTAYTDPDYWLSAIAGKEGH

SEQ ID NO: 40766 - protein, 232 aa, Phaeobacter inhibens
  misc_feature (1)..(232): tr|A0A135IHS9|A0A135IHS9_9RHOB 7-cyano-7-deazaguanine s ynthase OS=Phaeobacter inhibens OX=221822 GN=queC PE=3 SV=1
MKTLVICSGGLDSVSLAHVLAAQGQLSRLVSFDYGQRHRKELDYAAACGQRLGVPHEIIDMRLIGAALSGSALTDDIDVPDGHYAEETMKVTVVPNRNAIMLTIAYGIAAAKGDTAVATAVHGGDHFIYPDCRPAFTDAFDVMQRMALDGYADVSLVTPFVHRSKGDIVAEGAAVNTPFAETWSCYKGGEHHCGRCGTCVERREAFDLAGVEDPTVYADPDFWRTAIKEGVA

SEQ ID NO: 40767 - protein, 232 aa, Phaeobacter inhibens
  misc_feature (1)..(232): tr|I7EWS6|I7EWS6_PHAIB 7-cyano-7-deazaguanine synthase OS=Phaeobacter inhibens (strain ATCC 700781 / DSM 17395 / CIP 105210 / JCM 21319 / NBRC 16654 / NCIMB 13546 / BS107) OX=391619 GN=queC PE=3 SV=1
MKTLVICSGGLDSVSLAHVLAAKGQLSRLVSFDYGQRHRKELDYAAACGQRLGVPHEIIDMRSIGAALSGSALTDDIDVPDGHYAEETMKVTVVPNRNAIMLTIAYGIAAAKGDTAVATAVHGGDHFIYPDCRPAFTDAFDVMQRMALDGYADVALVTPFVHRSKGDIVAAGAAVKTPFAETWSCYKGGEHHCGRCGTCVERREAFDLAGVEDPTVYADPDFWRTAIKEGAA

SEQ ID NO: 40768 - protein, 232 aa, Phaeobacter italicus
  misc_feature (1)..(232): tr|A0A0H5DFN8|A0A0H5DFN8_9RHOB 7-cyano-7-deazaguanine s ynthase OS=Phaeobacter italicus OX=481446 GN=queC PE=3 SV=1
MKTLVICSGGLDSVSLAHVLAAQGQLSRLVSFDYGQRHRKELDYAAACGQRLGVPHEIIDMRSIGAALSGSALTDDIDVPDGHYAEETMKVTVVPNRNAIMLTIAYGIAAAKGDTAVATAVHGGDHFIYPDCRPAFTDAFDAMQRMALDGYADVSLVTPFVHRSKGDIVAAGAAVNTPFAETWSCYKGGEHHCGRCGTCVERREAFDLAGVEDPTVYADPDFWRTAIKDGGA

SEQ ID NO: 40769 - protein, 232 aa, Phaeobacter piscinae
  misc_feature (1)..(232): tr|A0A291FKM8|A0A291FKM8_9RHOB 7-cyano-7-deazaguanine s ynthase OS=Phaeobacter piscinae OX=1580596 GN=queC PE=3 SV=1
MKTLVICSGGLDSVSLAHILAAQGQLSRLVSFDYGQRHRKELDYAAACGQRLGVPHEIIDMRSIGVALSGSALTDDIDVPDGHYAEETMKVTVVPNRNAIMLTIAYGIAAAKGDTAVATAVHGGDHFIYPDCRPAFTDAFDAMQRMALDGYADVSLVTPFVHRSKGDIVADGAAVNTPFAETWSCYKGGEHHCGRCGTCVERREAFDLAGVMDPTVYADPDFWRTAVQEGGA

SEQ ID NO: 40770 - protein, 232 aa, Phaeobacter piscinae
  misc_feature (1)..(232): tr|A0A291FWV5|A0A291FWV5_9RHOB 7-cyano-7-deazaguanine s ynthase OS=Phaeobacter piscinae OX=1580596 GN=queC PE=3 SV=1
MKTLVICSGGLDSVSLAHILAAEGQLSRLVSFDYGQRHRKELDYAAACGQRLGVPHEIIDMRSIGAALSGSALTDDIDVPDGHYAEETMKVTVVPNRNAIMLTIAYGIAAAKGDTAVATAVHGGDHFIYPDCRPAFTDAFDAMQRMALDGYADVSLVTPFVHRSKGDIVADGAAVNTPFAETWSCYKGGEHHCGRCGTCVERREAFDLAGVVDPTVYADPDFWRTAIKEGGA

SEQ ID NO: 40771 - protein, 232 aa, Phaeobacter porticola
  misc_feature (1)..(232): tr|A0A1L3I835|A0A1L3I835_9RHOB 7-cyano-7-deazaguanine s ynthase OS=Phaeobacter porticola OX=1844006 GN=queC PE= 3 SV=1
MKTLVICSGGLDSVSLAHVLAAQGQLSRLVSFDYGQRHRKELDYAAACGQRLGVPHDIIDMRSVGAALSGSALTDDIDVPDGHYAEETMKVTVVPNRNAIMLTIAYGIAASKGDTAVATAVHGGDHFIYPDCRPAFTKAFDQMQRQALDGYADVALVTPFVDRSKGDIVLEGARVNTPFAETWSCYKGGAHHCGRCGTCVERREAFHLAGVTDPTIYDDPEFWLTATKEGAA

SEQ ID NO: 40772 - protein, 232 aa, Phaeobacter sp.
  misc_feature (1)..(232): tr|A0A384FPJ3|A0A384FPJ3_9RHOB 7-cyano-7-deazaguanine s ynthase OS=Phaeobacter sp. S60 OX=1569353 GN=queC PE=3 SV=1
MKTLVICSGGLDSVSLAHILAAQGQLSRLVSFDYGQRHRKELDYAAACGQRLGVPHEIIDMRSIGAALSGSALTDDIDVPDGHYAEETMKVTVVPNRNAIMLTIAYGIAAAKGDTAVATAVHGGDHFIYPDCRPAFTDAFDAMQRMALDGYADVSLVTPFVHRSKGDIVAEGAAVNTPFAETWSCYKGGEHHCGRCGTCVERREAFDLAGVVDPTVYADPDFWRTAIKEGGA

SEQ ID NO: 40773 - protein, 233 aa, Phaeobacter sp.
  misc_feature (1)..(233): tr|A0A0P6RMH0|A0A0P6RMH0_9RHOB 7-cyano-7-deazaguanine s ynthase OS=Phaeobacter sp. 11ANDIMAR09 OX=1225647 GN=qu eC PE=3 SV=1
MKTLVICSGGLDSVSLAHITANEHQLTRLVSFDYGQRHRKEIYFAEAAAKRLGVPFHLIDMRGIGASLTGSALTDDIDVPDGHYEEDTMRVTVVPNRNAIMLSIGFGIAAAKGDEAVATAVHGGDHFIYPDCRPSFTRAFDAMQQAALDGYANVSLHTPFVEHSKAEIVRQGAKHDTPFAQTWSCYKGNKVHCGRCGTCVERREAFHLAGVSDPTVYADPDYWTVALATQGAS

SEQ ID NO: 40774 - protein, 229 aa, Phaeospirillum fulvum
  misc_feature (1)..(229): tr|A0A1H6HIW1|A0A1H6HIW1_PHAFV 7-cyano-7-deazaguanine s ynthase OS=Phaeospirillum fulvum OX=1082 GN=queC PE=3 S V=1
MSERPAIVLLSGGLDSSTVLAIARAQGFRPAALTFRYGQRHAVEIEAARRVAAAQGVADHRIADIDLRVFGGSALTADIAVPKGRAEAEMADGHIPVTYVPARNTIMLSFALAFAEVIDAADIFVGVNAVDYSGYPDCRPDYIQAFETMANLATKAAVEGRRLTLHTPLIDLTKADIIRRGLELGVDYAITSTCYDPDPQGRACGQCDSCRLRLKGFADAGLSDPAPYV

SEQ ID NO: 40775 - protein, 229 aa, Phaeospirillum fulvum
  misc_feature (1)..(229): tr|S9TFG1|S9TFG1_PHAFV 7-cyano-7-deazaguanine synthase OS=Phaeospirillum fulvum MGU-K5 OX=1316936 GN=queC PE=3 SV=1
MSNRPAIVLLSGGLDSTTVLAIARAQGFRPAALTFRYGQRHAVEIEASRRVAAAQGVTDHRIADIDLRVFGGSALTADIAVPKGRDEAEMSDGHIPVTYVPARNTIMLSFALAFAEVIDAADIFLGVNAVDYSGYPDCRPDYIQSFETMANLATRAGVEGRRLTLHTPLIDLTKADIIRRGLELGVDYSITSTCYDPDPQGRACGQCDSCRLRLKGFADAGLTDPAPYV

SEQ ID NO: 40776 - protein, 229 aa, Phaeospirillum molischianum
  misc_feature (1)..(229): tr|H8FMX5|H8FMX5_PHAMO 7-cyano-7-deazaguanine synthase OS=Phaeospirillum molischianum DSM 120 OX=1150626 GN=qu eC PE=3 SV=1
MSDRPAIVLLSGGLDSSTVLAIARAQGFRPAALTFRYGQRHAVEIDAARRVAASQGVADHRIADIDLRVFGGSALTADIDVPKGRDEDEMSDGQIPVTYVPARNTIMLSFALAFAEVIDAADIFLGVNAVDYSGYPDCRPDYIQAFETMANLATRAAVEGRRLTLHTPLIDLSKADIIRQGLALGVDYSITSTCYDPDPQGRACGQCDSCRLRLKGFADAGLSDPAPYM

SEQ ID NO: 40777 - protein, 225 aa, Phascolarctobacterium faecium
  misc_feature (1)..(225): tr|A0A3G9GR13|A0A3G9GR13_9FIRM 7-cyano-7-deazaguanine s ynthase OS=Phascolarctobacterium faecium OX=33025 GN=qu eC PE=3 SV=1
MKKVVLLSGGIDSTTCLAQAVQVCGAENVTALCVFYGQKHSREMAAARKVAAYYGVRLLEQDIAGIMSYSNCSLLAASSEAIEHKSYAQQLAEHGEGTVATYVPFRNGLLISAAAAIAISLGADAICYGAHADDAAGRAYPDCTPEFYAAMDTAIYEGSGKLCHLEAPLLNKNKAQIVELGLNLGAPYQYTWSCYEGGDRPCGECGTCIDRANAFKANGVDDPAL

SEQ ID NO: 40778 - protein, 225 aa, Phascolarctobacterium sp.; identical to SEQ ID NO: 40777
  misc_feature (1)..(225): tr|R6I421|R6I421_9FIRM 7-cyano-7-deazaguanine synthase OS=Phascolarctobacterium sp. CAG:207 OX=1262914 GN=queC PE=3 SV=1

SEQ ID NO: 40779 - protein, 226 aa, Phascolarctobacterium sp.
  misc_feature (1)..(226): tr|A0A316S697|A0A316S697_9FIRM 7-cyano-7-deazaguanine s ynthase OS=Phascolarctobacterium sp. OX=2049039 GN=queC PE=3 SV=1
MKALVLLSGGVDSTTCLALAKEKYNDVIALAMYYGQKHSKELESAQKIADYYGVELLKLDLTPVFSYSNCSLLKQSDEAVPQKSYAEQVAECHGDTVSTYVPFRNGVFLSVAASIALAQGCSVVYYGAHADDATGNAYPDCSVDFNNKMNEGIYIGSGRKLQLEAPFVNCSKKDIVKTGLALNVPYELTWSCYCGGDKPCGRCGTCIDRKNAFLANGVTDPLEYER

SEQ ID NO: 40780 - protein, 245 aa, Phascolarctobacterium succinatutens
  misc_feature (1)..(245): tr|E8LF22|E8LF22_9FIRM 7-cyano-7-deazaguanine synthase OS=Phascolarctobacterium succinatutens YIT 12067 OX=626 939 GN=queC PE=3 SV=1
MTESFYILWTLPARYREEKMKVLVLLSGGVDSSTCLALAKEKYGDNVLALSMSYGQKHAKELAAAQAIADYYHVELLHMDLSKIFAHSKCSLLQGSEESVPHASYAEQLKESKGEPVSTYVPFRNGLFLSAAASIALEYECNEIYYGPHADDAAGNAYPDCSVEFNESMNLAVYLGSGRKVRLVAPFVDKTKKDIVAEGLRLGVPYELTWSCYDGDEKPCHKCGTCIDREAAFAANGVVDPLAEV

SEQ ID NO: 40781 - protein, 226 aa, Phascolarctobacterium succinatutens
  misc_feature (1)..(226): tr|R6Y0M4|R6Y0M4_9FIRM 7-cyano-7-deazaguanine synthase OS=Phascolarctobacterium succinatutens CAG:287 OX=12631 01 GN=queC PE=3 SV=1
MKVLVLLSGGVDSSTCLALAKEKYGDNVLALSMSYGQKHAKELAAAQAIADYYHVELLHMDLSKIFAHSKCSLLQGSETSVPHASYAEQLKESKGEPVSTYVPFRNGLFLSAAASIALEYECNEIYYGPHADDAAGNAYPDCSVEFNESMNLAVYLGSGRKVRLVAPFVDKTKKDIVAEGLRLGVPYELTWSCYDGGEKPCHKCGTCIDREAAFAANGVVDPLAEV

SEQ ID NO: 40782 - protein, 240 aa, Phenylobacterium deserti
  misc_feature (1)..(240): tr|A0A328AUQ6|A0A328AUQ6_9CAUL 7-cyano-7-deazaguanine s ynthase OS=Phenylobacterium deserti OX=1914756 GN=queC PE=3 SV=1
MSDTSGALVLFSGGQDSTVCLAWALSRFEHVETVGFDYGQKHAVELRARDEVRRNITARFPQWADRLGEDHMLEMRGFGAVAQSALTADRAIEMTEKGLPSTFVPGRNLVFFVYAAALADRRGLKTMIGGMCETDFSGYPDCRRDTLDAVQTALNLGMEQDFIIETPLMRLTKAETWGLAKSLGGEDLVDLVVRDSHTCYQGDREHFHDWGYGCETCPACELRAKGWNEWVAEGRPTLAA

SEQ ID NO: 40783 - protein, 248 aa, Phenylobacterium hankyongense
  misc_feature (1)..(248): tr|A0A328AYQ0|A0A328AYQ0_9CAUL 7-cyano-7-deazaguanine s ynthase OS=Phenylobacterium hankyongense OX=1813876 GN= queC PE=3 SV=1
MGPMIDTSGALVLFSGGQDSTVCLAWALDRYARVETVGFDYGQRHSVELQARAGVRARVSERFPDWAPRLGEDHVLEMRGFGAVAQSALTAERAIEMTSKGLPSTFVPGRNLAFLVYAAALADRRGLQVLVGGMCETDFSGYPDCRRDTLDAMQSALNLGMAQDFRVETPLMWLTKAQTWSLAKALGGESLVDVILEDSHTCYLGDREHRHPWGYGCGTCPACELRARGWADWVAEGRPVLHAEVVEP

SEQ ID NO: 40784 - protein, 241 aa, Phenylobacterium kunshanense
  misc_feature (1)..(241): tr|A0A328BC63|A0A328BC63_9CAUL 7-cyano-7-deazaguanine s ynthase OS=Phenylobacterium kunshanense OX=1445034 GN=q ueC PE=3 SV=1
MGPMNNGALVLFSGGQDSTACLAWALSRYDRVETVGFDYGQRHAVELEARQAVRARIVREFPDWSPRLGDDHMLDIRSFGALAETAMTSEREIEITEKGLPSTFVPGRNLVFLVYAAALADRRLLGALVGGMCETDFSGYPDCRRDTLDAMQQALNLGMEQTFRIETPLMRLTKAETWALAKGLGGEALVELTVQDSHTCYLGERGVLHAWGHGCGTCPACELRRRGFEQWDADGRPALAS

SEQ ID NO: 40785 - protein, 243 aa, Phenylobacterium sp.
  misc_feature (1)..(243): tr|A0A0Q7ETJ0|A0A0Q7ETJ0_9CAUL 7-cyano-7-deazaguanine s ynthase OS=Phenylobacterium sp. Root1290 OX=1736445 GN= queC PE=3 SV=1
MSEASPQSRALVLFSGGQDSSVCLAWALARYDHVETVGFDYGQRHAVEMEQRSLVREAIRARFPQWAGRLGEDHVLDLTGFGAVGETAMTQERAFEITEKGLPNTYVPGRNLVFLTYAAALADRRKLKFLVGGMCETDFSGYPDCRRETLDALERALNLGMAQDFVVETPLMWLTKAQTWALAKQLGGEDLIEIIVRDSHTCYRGTRGELHDWGHGCGDCPACDLRARGWNEWVGAGRLELEA

SEQ ID NO: 40786 - protein, 241 aa, Phenylobacterium sp.
  misc_feature (1)..(241): tr|A0A1E4GN01|A0A1E4GN01_9CAUL 7-cyano-7-deazaguanine s ynthase OS=Phenylobacterium sp. SCN 70-31 OX=1660129 GN =queC PE=3 SV=1
MGPMTDQALVLFSGGQDSTACLAWALARYGRVETLGFDYGQRHAVELAARQAVRARIAATFPAWAARLGEDHMLDIRSFGDIAETAMTAERAIEITEKGLPSTFVPGRNLVFLTYAAALADRRGLNVLVGGMCETDYSGYPDCRRETLDAVERALNLGMAQAFRIETPLMRLTKAQTWALAKGLGGEPLVAITVEDSHTCYLGERGTVQPWGHGCGTCPACELRRRGYEAWDAEGRPELLP

SEQ ID NO: 40787 - protein, 241 aa, Phenylobacterium zucineum
  misc_feature (1)..(241): tr|B4RHW2|B4RHW2_PHEZH 7-cyano-7-deazaguanine synthase OS=Phenylobacterium zucineum (strain HLK1) OX=450851 GN =queC PE=3 SV=1
MGPMTDAALVLFSGGQDSSVCLAWALDRYDRVETVGFDYGQRHAVELQARQAVRSRLAAGFPRWAGRLGEDHFIEMRGFGAIGGTAMTQERAFEITEKGLPSTYVPGRNLAFLTYAAALADRRGIPVLVGGMCETDYSGYPDCRRDAIDAMERALNLGMAQDFRIETPLMRLTKAQTWGLASRLGGEPLVDLIVRESHTCYRGERGELHAWGHGCGDCPACELRARGWEEWVAGGRPELAA

SEQ ID NO: 40788 - protein, 241 aa, Phenylobacterium zucineum
  misc_feature (1)..(241): tr|A0A2W5R900|A0A2W5R900_9CAUL 7-cyano-7-deazaguanine s ynthase OS=Phenylobacterium zucineum OX=284016 GN=queC PE=3 SV=1
MGPMNDGALVLFSGGQDSTACLAWALARYPRVETVGFDYGQRHAVELEARQAVRARIAAGFPEWAGRLGDDHMLDIRSFGAIGETAMTMERAIEVTDKGLPSTFVPGRNLIFLTYAAALADRRGLKALVGGMCETDFSGYPDCRRDTLDAMQDALNLGMAQDFRIETPLMRLTKAETWALAKGLGGEPLVAITVEESHTCYLGERGELHPWGHGCGTCPACDLRQRGFECWVSDGRPELAA

SEQ ID NO: 40789 - protein, 235 aa, Phorcysia thermohydrogeniphila
  misc_feature (1)..(235): tr|A0A4V2PCW6|A0A4V2PCW6_9BACT 7-cyano-7-deazaguanine s ynthase OS=Phorcysia thermohydrogeniphila OX=936138 GN= queC PE=3 SV=1
MTSAVVIFSGGLDSTTALYWAKREFDEVYAITFYYGQRHSLEVEMAKITAKNAKVKEHLLFEVDLSKVGASALTDKSIEVPETKSVEEIKERGIPVTYVPFRNGVFISIAAAYAESLGTTHLVGGWNAVDYSGYPDCRPEFLRAMEETLNRGTKLGAEGRKWQIHAPLLYLTKGEIIKLGLELGADYSYSLSCYRGSEVPCMKCDSCVLRAKGWAEVGVTDHLIERLKREGKIVE

SEQ ID NO: 40790 - protein, 242 aa, Phormidesmis priestleyi
  misc_feature (1)..(242): tr|A0A0P7Z152|A0A0P7Z152_9CYAN 7-cyano-7-deazaguanine s ynthase OS=Phormidesmis priestleyi Ana OX=1666911 GN=qu eC PE=3 SV=1
MTALSSNRFNHDNEMPKAIVLLSGGLDSATCAAQAIADGFQVTALSLDYGQRHNRELVAAKAVVQALGISDHRIISVNLAQWGGSSLTDQTMAIPTEGVKPNEIPSTYVPGRNTVFIAIALSLAEAQSAKAIYVGINAVDYSGYPDCRPEYLAAFQHLATLSSKAGLEGCAPELVAPLAMDSKADIVQRSLRLGVPIEKTWSCYEGGTEPCGLCDSCRIRDAALIQAGRSDLATKVARSAVS

SEQ ID NO: 40791 - protein, 237 aa, Phormidesmis priestleyi
  misc_feature (1)..(237): tr|A0A2W4X8Z3|A0A2W4X8Z3_9CYAN 7-cyano-7-deazaguanine s ynthase OS=Phormidesmis priestleyi OX=268141 GN=queC PE =3 SV=1
MSNQKKEQPKAVVLLSGGLDSATCCAQALVDGFSVTAISFDYGQRHQRELTAAEDIAQTLGITDHHVVEINLAQWGGSSLTSEAMSVPTDGLKSDEIPSTYVPGRNTVFIAIALSLAEAQGATAIYLGINAIDYSGYPDCRPEYLSAFQHLAKLSSKAGLEGHAPDLVAPLVMDSKADIVRRALKLGVPIEKTWSCYQGESLPCGVCDACRIRDQALISVGRPDLATAIGQQKSQSA

SEQ ID NO: 40792 - protein, 271 aa, Phormidium ambiguum
  misc_feature (1)..(271): tr|A0A1U7ILG9|A0A1U7ILG9_9CYAN Uncharacterized protein OS=Phormidium ambiguum IAM M-71 OX=454136 GN=NIES2119_1 0865 PE=4 SV=1
MTYQKNFKLEILQSELETFINTPREEGANLDAVVAFSGGKDSAAALLWAKNKLNLEVVAVLVQNGFIPEQVIDNGRKLCDKLGVELVVLNIELAPFVKDMMDKNFTNGYPCYKCGEMFHKEIQKYCGIKRINRVILGRNWWRWIEPEVRSVRWVKDEASGLNMQFFSLPFALQLTEKDVYKMLDDIGWKTVKIHGNSTNCVIPGLIEYPIYQRLGYHPELNLLSREVISGFLDKEEAKEQLADIKDNTGILRKMVNKKLQEIESDQGEKTQ

SEQ ID NO: 40793 - protein, 225 aa, Phormidium ambiguum
  misc_feature (1)..(225): tr|A0A1U7IG65|A0A1U7IG65_9CYAN 7-cyano-7-deazaguanine s ynthase OS=Phormidium ambiguum IAM M-71 OX=454136 GN=qu eC PE=3 SV=1
MKAVILLSGGLDSSTVLYQARADGYDCYALSFDYQQRHRRELEAARDIARFVGVREHQVVSFDLRLWGGSALTDNQIDLPSDRSLTEMGQTIPITYVPARNTIFLSFALGYAEAIGAAKVYIGVNALDYSGYPDCRPDYIQAMQEVFRLGTKQGLEGESIEIVAPLINLKKTEIIQLGNSLGVPWEKTWSCYAGEEKACGVCDSCRLRLAAFQALELEDPLPYAS

SEQ ID NO: 40794 - protein, 227 aa, Phormidium sp.
  misc_feature (1)..(227): tr|A0A522XBN5|A0A522XBN5_9CYAN 7-cyano-7-deazaguanine s ynthase OS=Phormidium sp. SL48-SHIP OX=2518363 GN=queC PE=3 SV=1
MAKTAIVLLSGGLDSSTVLYQAQADGYTCHAISFDYQQRHRRELDAAHAIAQAAGVRTHQVVQFDLSQWGGSALTDSRLDLPGDRSLADMAQDIPITYVPARNTIFLSFALALAEVQQAERIYIGVNALDYSGYPDCRPDYIQAMQEAFRLGTKQGREGTPIIIQTPLINLKKTEIIQLGNQLGVPWEKTWSCYAGGEVACGVCDSCQLRRAAFDSLNLTDPIPYAQ

SEQ ID NO: 40795 - protein, 417 aa, Phormidium sp.
  misc_feature (1)..(417): tr|A0A522XFT7|A0A522XFT7_9CYAN Uncharacterized protein OS=Phormidium sp. SL48-SHIP OX=2518363 GN=EYR95_08810 P E=4 SV=1
MPDGDIVHSKIKGFYRNPYRILCEQSADEEPCTRELLKALKKDLQGKGDQPITLVCSLEKLLSNELSPNRCNKSVDWGALSDRVTKLINQSDMHHYCGGLDALAGLYTRLTSNNKKSFMLFGTGANLIVSKRQHKGFKELQREFINRVSLSQLTFSLEHKEKRSSKKKMLRTRGVVFTLLGSAYAYLMDCNVLNLYENGIGAINLPYTESTVGLDHSRSTHPLTLLKVSNLVSDIFGEIFKIRNPFLFSTKAQMCQSLTRNKKADLSALTQSCDRPHRRKPVQCGYCSSCILRRQAILASNLNDKNHYIVPHAKQATNEDCIYLDNMWIQVNTLREIFKESKTRQSQWMSLTKNFPVLDDIVDQTATMEGITEEEFRINLIKLFQAYINEWGHVEFHLWRDFSRNPIGSHKTRDIVP

SEQ ID NO: 40796 - protein, 234 aa, Phormidium tenue
  misc_feature (1)..(234): tr|A0A1U7J3N0|A0A1U7J3N0_9CYAN 7-cyano-7-deazaguanine s ynthase OS=Phormidium tenue NIES-30 OX=549789 GN=queC P E=3 SV=1
MSQSSLSPKAIVLLSGGLDSATAAAQAIADGYDLTALSFNYGQRHQRELEAAKAVAKHLAIADHRFIDVNLAQWGASSLTDLAQPLPQDDPQTGIAAGIPSTYVPGRNTVFIALALALAEAKEAEAIYLGINAVDYSGYPDCRPEYLAAFQQLAQLSSKAGLEGHAPALVAPLVMDSKVDIVRRAVALGVPIEQTWSCYQGGAAPCGRCDSCRIRDRALVEAGYPQLASTTGQG

SEQ ID NO: 40797 - protein, 480 aa, Phormidium tenue
  misc_feature (1)..(480): tr|A0A1U7J666|A0A1U7J666_9CYAN Uncharacterized protein OS=Phormidium tenue NIES-30 OX=549789 GN=NIES30_09760 P E=4 SV=1
MSYKVSTHDHQADDSDYTLHFGPILNGGGIVRFIDHARKSTSDVGISISDQDFQYRIYQHFPSVIADLVDLAVAIHASDRLAFQHLHKRQSRLHVVLPVRHPELLGIPSFMNKLEKLLSWVTGSKWSFNFQALVASGRMVENQGVLPVALPTGCEVALWSGGLDALAGLYTRLKTEPDQPFLLFGAGSNDNAYARQAEVFNSLIPSFPSRLNLCRVPIRFTESGRHRKNKISRARGIVFTMLGAASAYLMGQRVLYLYENGVGAINLPYRASAVGLDHSRSVHPLTLLMVSELVTELIGEEFKIHNPFLLWTKAEMCQSLKEDSRTDLPPLTMSCDSPHRQKPVQCGYCPSCLLRRQALATSGLLDKTQYVILNGKAPASDPSVYLRHMLEQVSTLRQLLHASTNTKVKWEAIAREFPVLDDIVDRGASTEELTYIQMRTRLIKLYQNYIAEWDNIGSQLSIGLFNHSSEQAAAMPLAAT

SEQ ID NO: 40798 - protein, 227 aa, Phormidium willei
  misc_feature (1)..(227): tr|A0A166SK10|A0A166SK10_9CYAN 7-cyano-7-deazaguanine s ynthase OS=Phormidium willei BDU 130791 OX=399101 GN=qu eC PE=3 SV=1
MAKTAIVLLSGGLDSSTVLYQAQADGYTCHAISFDYQQRHRRELDAARAIAQGAGVRTHQVVQFDLSQWGGSALTDTSLDLPGDRSLADMAQDIPITYVPARNTIFLSFALALAEVRQAERIYIGVNALDYSGYPDCRPDYIQALQEAFRLGTKQGREGTPIIIQTPLINLKKTEIIQLGNQLGVPWENTWSCYAGGDIACGVCDSCQLRRAAFDALNLTDPIPYVQ

SEQ ID NO: 40799 - protein, 231 aa, Photobacterium angustum
  misc_feature (1)..(231): tr|Q1ZPB3|Q1ZPB3_PHOAS 7-cyano-7-deazaguanine synthase OS=Photobacterium angustum (strain S14 / CCUG 15956) OX =314292 GN=queC PE=3 SV=1
MSKAVVVFSGGQDSTTCLIQALAHYDEVHCITFDYGQRHKLEIEVAEAIAKDLGVTAHKVMDVGLLNELAISSLTRDNIAVSHELQENGLPNSFVPGRNILFLTLAGIYAYQIGAETVITGVCETDFSGYPDCRDEFVKSLNQSLILGMDRPLTIATPLMWLNKAETWALADQYQKLDYVREKTLTCYNGIIGDGCGDCPSCDLRRAGLNDYLDHKTTVMNALKEKQAQQA

SEQ ID NO: 40800 - protein, 231 aa, Photobacterium angustum
  misc_feature (1)..(231): tr|A0A2T3M2E4|A0A2T3M2E4_PHOAN 7-cyano-7-deazaguanine s ynthase OS=Photobacterium angustum OX=661 GN=queC PE=3 SV=1
MSKAVVVFSGGQDSTTCLIQALAHYDEVHCITFDYGQRHKLEIEVAEAIAKDLGVTAHKVMDVGLLNELAISSLTRDNIAVSHELQENGLPNSFVPGRNILFLTLAGIYAYQIGAETVITGVCETDFSGYPDCRDEFVKSLNQSLVLGMDRPLTIATPLMWLNKAETWALADQYQKLDYVREKTLTCYNGIIGDGCGDCPSCDLRRAGLNDYLDHKTTVMNALKEKQAQQA

SEQ ID NO: 40801 - protein, 232 aa, Photobacterium aphoticum
  misc_feature (1)..(232): tr|A0A090RDC1|A0A090RDC1_9GAMM 7-cyano-7-deazaguanine s ynthase OS=Photobacterium aphoticum OX=754436 GN=queC P E=3 SV=1
MRKAVVVFSGGQDSTTCLIQALAQYDEVHCITFDYGQRHKLEIEVAEALCKQLGVAAHKVMDVGLLNELAISSLTRDNIPVSHELQENGLPNSFVPGRNILFLTLAGIYAYQIGADAVITGVCETDFSGYPDCRDAFVKSLNQSLVLGMDREMTIETPLMWLNKAETWALADQCGKLDVVREQTLTCYNGIIGDGCGDCPSCDLRKAGLDDYLANRDAIMAELVRKQQAGQA

SEQ ID NO: 40802 - protein, 232 aa, Photobacterium aphoticum
  misc_feature (1)..(232): tr|A0A0J1GKJ3|A0A0J1GKJ3_9GAMM 7-cyano-7-deazaguanine s ynthase OS=Photobacterium aphoticum OX=754436 GN=queC P E=3 SV=1
MRKAVVVFSGGQDSTTCLIQALAQYDEVHCITFDYGQRHKLEIEVAEALCKQLGVAAHKVMDVGLLNELAISSLTRDNIPVSHELQENGLPNSFVPGRNILFLTLAGIYAYQIGADAVITGVCETDFSGYPDCRDAFVKSLNQSLVLGMDREMRIDTPLMWLNKAETWALADQCGKLDVVREQTLTCYNGIIGDGCGDCPSCDLRKAGLDDYLANRNAIMAELVRKQQAGQA

SEQ ID NO: 40803 - protein, 232 aa, Photobacterium aquae
  misc_feature (1)..(232): tr|A0A0J1HC65|A0A0J1HC65_9GAMM 7-cyano-7-deazaguanine s ynthase OS=Photobacterium aquae OX=1195763 GN=queC PE=3 SV=1
MRKAVVVFSGGQDSTTCLIQAMAHYDEVHCITFDYGQRHKLEIEVAESICQELGVAAHKVMDVGLLNELAISSLTRDNIPVSHELQENGLPNSFVPGRNILFLTLAGIYAYQIGAEAVITGVCETDFSGYPDCRDEFVKSLNQSLVLGMDRPLRIDTPLMWLNKAETWALADQYGKLDFVREKTLTCYNGVIGDGCGDCPSCDLRKAGLDSYLANRTTIMAELESKQQAGKA

SEQ ID NO: 40804 - protein, 232 aa, Photobacterium aquimaris
  misc_feature (1)..(232): tr|A0A2T3I2T7|A0A2T3I2T7_9GAMM 7-cyano-7-deazaguanine s ynthase OS=Photobacterium aquimaris OX=512643 GN=queC P E=3 SV=1
MTKAVVVFSGGQDSTTCLIQALAHYDEVHCITFDYGQRHKLEIEIAEHIAKDLGVAAHKVMDVSLLGELAISSLTRDSIAVSHELQANGLPNSFVPGRNILFLTLAGIYTYQIGAETVITGVCETDFSGYPDCRDEFVRSLNQSLVLGMDRPFTIATPLMWLNKAETWALADQYGKLDYVRNQTLTCYNGIVGDGCGDCPSCDLRRAGLEDYLQHQPIVMAALKEKQAQHKA

SEQ ID NO: 40805 - protein, 232 aa, Photobacterium aquimaris
  misc_feature (1)..(232): tr|A0A2T3IMX4|A0A2T3IMX4_9GAMM 7-cyano-7-deazaguanine s ynthase OS=Photobacterium aquimaris OX=512643 GN=queC P E=3 SV=1
MTKAVVVFSGGQDSTTCLIQALAHYDEVHCITFDYGQRHKLEIEIAEHIAKDLGVTAHKVMDVSLLGELAISSLTRDNIAVSHELQANGLPNSFVPGRNILFLTLAGIYAYQIGAETVITGVCETDFSGYPDCRDEFVRSLNQSLVLGMDRPFTIATPLMWLNKAETWALADQYGKLDYVREQTLTCYNGVVGDGCGDCPSCDLRRVGLEDYLQHQSTVMAALKEKQAQQKA

SEQ ID NO: 40806 - protein, 232 aa, Photobacterium carnosum
  misc_feature (1)..(232): tr|A0A2N4UXN3|A0A2N4UXN3_9GAMM 7-cyano-7-deazaguanine s ynthase OS=Photobacterium carnosum OX=2023717 GN=queC P E=3 SV=1
MAKAVVVFSGGQDSTTCLIQALAHYDEVHCITFDYGQRHKLEVEIAEHIAKDLGVAAHKIMDVSLLGELAISSLTRDSIPVSHELQANGLPNSFVPGRNILFLTLAGIYAYQIGAEAVITGVCETDFSGYPDCRDEFVRSLNHSLVLGMDRQFTIETPLMWLNKAETWALADQYEKLDYIREQTLTCYNGIVGDGCGDCPSCNLRRAGLDDYLQHQATVMASLKQKQAQHKA

SEQ ID NO: 40807 - protein, 234 aa, Photobacterium damsela
  misc_feature (1)..(234): tr|A0A1Q9H6B0|A0A1Q9H6B0_PHODP 7-cyano-7-deazaguanine s ynthase OS=Photobacterium damsela subsp. piscicida OX=3 8294 GN=queC PE=3 SV=1
MRKAVVVFSGGQDSTTCLIQALAHYDEVHCITFDYGQRHKLEIEVAQAITQELGVAAHKVMDVGLLNELAISSLTRDNIAVSHELQENGLPNSFVPGRNILFLTLAGIYAYQIGAEAVITGVCETDFSGYPDCRYEFVKSLNQSLVLGMDRPLRIETPLMWLNKAETWALADQYGKLDYVREKTLTCYNGIIGDGCGDCPSCDLRRAGLEDYLQHQESVMASLQDKQAHGQAER

SEQ ID NO: 40808 - protein, 234 aa, Photobacterium damselae
  misc_feature (1)..(234): tr|D0YZ46|D0YZ46_PHODD 7-cyano-7-deazaguanine synthase OS=Photobacterium damselae subsp. damselae CIP 102761 O X=675817 GN=queC PE=3 SV=1
MRKAVVVFSGGQDSTTCLIQALAHYDEVHCITFDYGQRHKLEIEVAQAITQELGVAAHKVMDVGLLNELAISSLTRDNIAVSHELQENGLPNSFVPGRNILFLTLAGIYAYQIGAEAVITGVCETDFSGYPDCRDEFVKSLNQSLVLGMDRPLRIETPLMWLNKAETWALADQYGKLDYVREKTLTCYNGIIGDGCGDCPSCDLRRAGLEDYLQHQESVMASLQDKQAHGQAER

SEQ ID NO: 40809 - protein, 234 aa, Photobacterium damselae; identical to SEQ ID NO: 40808
  misc_feature (1)..(234): tr|A0A2T3QQ76|A0A2T3QQ76_9GAMM 7-cyano-7-deazaguanine s ynthase OS=Photobacterium damselae OX=38293 GN=queC PE= 3 SV=1

SEQ ID NO: 40810 - protein, 232 aa, Photobacterium frigidiphilum
  misc_feature (1)..(232): tr|A0A2T3JRF6|A0A2T3JRF6_9GAMM 7-cyano-7-deazaguanine s ynthase OS=Photobacterium frigidiphilum OX=264736 GN=qu eC PE=3 SV=1
MRKAVVVFSGGQDSTTCLIQAIENYDEVHCITFDYGQRHKLEIEVAQSITKELGITAHKVMDVGLLNELAISSLTRDNIDVSHELQANGLPNSFVPGRNILFLTLSGIYAYQIGAEAVITGVCETDFSGYPDCRDEFVKSLNQSLVLGMDRALKIETPLMWLNKAETWALADQYKQLDFVREKTLTCYNGIIGDGCGNCPSCDLRRAGLEDYLTNKEAIMADLVVKQAKGQA

SEQ ID NO: 40811 - protein, 232 aa, Photobacterium gaetbulicola
  misc_feature (1)..(232): tr|A0A0B9GXG0|A0A0B9GXG0_9GAMM 7-cyano-7-deazaguanine s ynthase OS=Photobacterium gaetbulicola OX=1295392 GN=qu eC PE=3 SV=1
MRKAVVVFSGGQDSTTCLIQAMAHYDEVHCITFDYGQRHKLEIEVAESICKELGVAAHKVMDVGLLNELAISSLTRDNIPVSHELQENGLPNSFVPGRNILFLTLSGIYAYQIGAEAVITGVCETDFSGYPDCRDEFVKSLNQSLVLGMDRPLNIETPLMWLNKAETWALADQYGKLNFVREKTLTCYNGVIGDGCGDCPSCDLRKAGLDDYLANQSDIMAELKAKQQTGKA

SEQ ID NO: 40812 - protein, 232 aa, Photobacterium gaetbulicola
  misc_feature (1)..(232): tr|A0A0C5WRZ5|A0A0C5WRZ5_9GAMM 7-cyano-7-deazaguanine s ynthase OS=Photobacterium gaetbulicola Gung47 OX=658445 GN=queC PE=3 SV=1
MRKAVVVFSGGQDSTTCLIQAMAHYDEVHCITFDYGQRHKLEIEVAESICKELGVAAHKVMDVGLLNELAISSLTRDNIPVSHELQENGLPNSFVPGRNILFLTLSGIYAYQIGAEAVITGVCETDFSGYPDCRDEFVKSLNQSLVLGMDRPLKIETPLMWLNKAETWALADQYSKLNFVREKTLTCYNGVIGDGCGDCPSCDLRKAGLDDYLANQSDIMAELEAKQQAGKA

SEQ ID NO: 40813 - protein, 232 aa, Photobacterium galatheae
  misc_feature (1)..(232): tr|A0A066RZL3|A0A066RZL3_9GAMM 7-cyano-7-deazaguanine s ynthase OS=Photobacterium galatheae OX=1654360 GN=queC PE=3 SV=1
MRKAVVVFSGGQDSTTCLIQAMARYDEVHCITFDYGQRHKLEIEVAEAICKDLGVAAHKVMDVGLLNELAISSLTRDNIPVSHELQDNGLPNSFVPGRNILFLTLAGIYAYQIGAEAVITGVCETDFSGYPDCRDAFVKSLNQSLVLGMDRPLNIETPLMWLNKAETWALADQHGKLDYIRNHTLTCYNGIIGDGCGNCPSCDLRREGLESYLTDKDAVMNSLTGKQADNRA

SEQ ID NO: 40814 - protein, 232 aa, Photobacterium ganghwense
  misc_feature (1)..(232): tr|A0A0J1H0C8|A0A0J1H0C8_9GAMM 7-cyano-7-deazaguanine s ynthase OS=Photobacterium ganghwense OX=320778 GN=queC PE=3 SV=1
MRKAVVVFSGGQDSTTCLIQAMAQYDEVHCLTFDYGQRHKLEIEVAESVCRELGVTAHKVMDVGLLNELAISSLTRDNIPVSHELQANGLPNSFVPGRNILFLTLAGIYAYQIGAEAVITGVCETDFSGYPDCRDEFVKSLNQSLVLGMDRPLRIETPLMWLNKAETWALADQYSQLNFVREKTLTCYNGIIGDGCGQCPSCDLRKAGLDEYQTNQAAIMAELERKQSSGQA

SEQ ID NO: 40815 - protein, 232 aa, Photobacterium halotolerans
  misc_feature (1)..(232): tr|A0A0F5VGR8|A0A0F5VGR8_9GAMM 7-cyano-7-deazaguanine s ynthase OS=Photobacterium halotolerans OX=265726 GN=que C PE=3 SV=1
MRKAVVVFSGGQDSTTCLIQAMANYDEVHCITFDYGQRHKLEIEVAEAIAKDLGVAAHKVMDVGLLNELAISSLTRDNIPVSHELQDNGLPNSFVPGRNILFLTLAGIYAYQIGAEAVITGVCETDFSGYPDCRDAFVQSLNQSLVLGMDRPLRIETPLMWLNKAETWALADQHGKLDYIRNQTLTCYNGVIGDGCGNCPSCDLRREGLESYLNDKDAVMKALTDKQAANQA

SEQ ID NO: 40816 - protein, 232 aa, Photobacterium iliopiscarium
  misc_feature (1)..(232): tr|A0A0D8PZV2|A0A0D8PZV2_9GAMM 7-cyano-7-deazaguanine s ynthase OS=Photobacterium iliopiscarium OX=56192 GN=que C PE=3 SV=1
MAKAVVVFSGGQDSTTCLIQALAHYDEVHCITFDYGQRHKLEVEIAEHIAKDLGVAAHKVMDVSLLGELAISSLTRDSIPVSHELQANGLPNSFVPGRNILFLTLAGIYAYQIGAETVITGVCETDFSGYPDCRDEFVRSLNQSLVLGMDRQFTISTPLMWLNKAETWALADQYGKLDYIREQTLTCYNGIVGDGCGDCPSCDLRRAGLEDYLQHQATVMAALKAKQAQHKA

SEQ ID NO: 40817 - protein, 232 aa, Photobacterium indicum
  misc_feature (1)..(232): tr|A0A2T3LBF9|A0A2T3LBF9_9GAMM 7-cyano-7-deazaguanine s ynthase OS=Photobacterium indicum OX=81447 GN=queC PE=3 SV=1
MRKAVVVFSGGQDSTTCLIQAIENYDEVHCITFDYGQRHKLEIEVAQSITKELGITAHKVMDVGLLNELAISSLTRDNIEVSHELQANGLPNSFVPGRNILFLTLSGIYAYQIGAEAVITGVCETDFSGYPDCRDEFVKSLNQSLVLGMDRALKIETPLMWLNKAETWALADQYKQLDFVREKTLTCYNGIIGDGCGNCPSCDLRRAGLEDYLTNKDAIMADLVAKQAEGQA

SEQ ID NO: 40818 - protein, 232 aa, Photobacterium jeanii
  misc_feature (1)..(232): tr|A0A178KNL3|A0A178KNL3_9GAMM 7-cyano-7-deazaguanine s ynthase OS=Photobacterium jeanii OX=858640 GN=queC PE=3 SV=1
MRKAVVVFSGGQDSTTCLIQAIAQYDEVHCITFDYGQRHKLEIEIAEAICKKLNVAAHKVMDVGLLNELAISSLTRDNIAVSHELQENGLPNSFVPGRNILFLTLAGIYAYQIGAEAVITGVCETDFSGYPDCRDEFVKSLNQSLVLGMDRALKIETPLMWLNKAETWALADQYQELQFVREHTLTCYNGVVGDGCGDCPSCDLRRAGLEEYLADQAEIMAELERKQAQGKA

SEQ ID NO: 40819 - protein, 204 aa, Photobacterium jeanii
  misc_feature (1)..(204): tr|A0A178KAS5|A0A178KAS5_9GAMM 7-cyano-7-deazaguanine s ynthase OS=Photobacterium jeanii OX=858640 GN=A3K86_116 50 PE=3 SV=1
MKKAIVLTSGGLDSTTVVYQLLEDKVDVYPIFFDYGQHCVEMEWARLNEVLPKECNPPERLNISSIFNGSKSRLIDEANLWEDDIVDEDLYIPYRTMLFFAAAAARAQTIGILDVFTGFINSNHAKEIDCTSEFMNKLDGLTESIGPVRFHSPFRFSSKSDVAESAVKLKVPIGRTYSCQASSNFPCGACPNCVERLNALEKLN

SEQ ID NO: 40820 - protein, 232 aa, Photobacterium kishitanii
  misc_feature (1)..(232): tr|A0A2T3KNH8|A0A2T3KNH8_9GAMM 7-cyano-7-deazaguanine s ynthase OS=Photobacterium kishitanii OX=318456 GN=queC PE=3 SV=1
MTKAVVVFSGGQDSTTCLIQALAHYDEVHCITFDYGQRHKLEIEIAEHIAKDLGVAAHKVMDVSLLGELAISSLTRDSIPVSHELQANGLPNSFVPGRNILFLTLAGIYAYQIGAETVITGVCETDFSGYPDCRDEFVRSLNQSLVLGMDRQFTIATPLMWLNKAETWALADQYGKLDYVREQTLTCYNGVVGDGCGDCPSCDLRRAGLEDYLQHQATVMTALKTKQAQHKA

SEQ ID NO: 40821 - protein, 232 aa, Photobacterium kishitanii
  misc_feature (1)..(232): tr|A0A2T3R3D3|A0A2T3R3D3_9GAMM 7-cyano-7-deazaguanine s ynthase OS=Photobacterium kishitanii OX=318456 GN=queC PE=3 SV=1
MTKAVVVFSGGQDSTTCLIQALAHYDEVHCITFDYGQRHKLEIEIAEHIAKDLGVAAHKVMDVSLLGELAISSLTRDSIPVSHELQANGLPNSFVPGRNILFLTLAGIYAYQIGAETVITGVCETDFSGYPDCRDEFVRSLNHSLVLGMDRQFTIATPLMWLNKAETWALADQYGKLDYVREQTLTCYNGVVGDGCGDCPSCDLRRAGLEDYLQHQPTVMAALKEKQAQHKA

SEQ ID NO: 40822 - protein, 232 aa, Photobacterium leiognathi
  misc_feature (1)..(232): tr|A0A0U1P7C7|A0A0U1P7C7_PHOLE 7-cyano-7-deazaguanine s ynthase OS=Photobacterium leiognathi lrivu.4.1 OX=12482 32 GN=queC PE=3 SV=1
MSKAVVVFSGGQDSTTCLIQALAHYDEVHCITFDYGQRHKLEIEVAEAIAKDLGVTAHKVMDVGLLNELAISSLTRDNIAVSHELQANGLPNSFVPGRNILFLTLAGIYAYQIGAETVITGVCETDFSGYPDCRDEFVKSLNQSLVLGMDRQLKIDTPLMWLNKAETWALADQYGKLDYVREKTLTCYNGVIGDGCGNCPSCDLRRAGLNDYLDHKETVMNALKEKQATHQA

SEQ ID NO: 40823 - protein, 232 aa, Photobacterium leiognathi
  misc_feature (1)..(232): tr|A0A2G4WMP8|A0A2G4WMP8_PHOLE 7-cyano-7-deazaguanine s ynthase OS=Photobacterium leiognathi OX=553611 GN=queC PE=3 SV=1
MSKAVVVFSGGQDSTTCLIQALAHYDEVHCITFDYGQRHKLEIEVAEAIAKDLGVTAHKVMDVGLLNELAISSLTRDNIAVSHELQANGLPNSFVPGRNILFLTLAGIYAYQIGAETVITGVCETDFSGYPDCRDEFVKSLNQSLELGMDRQLKIDTPLMWLNKAETWALADQYGKLDYVREKTLTCYNGIIGDGCGNCPSCDLRRAGLNDYLDHKETVMNALKEKQATHQA

SEQ ID NO: 40824 - protein, 232 aa, Photobacterium lipolyticum
  misc_feature (1)..(232): tr|A0A2T3N555|A0A2T3N555_9GAMM 7-cyano-7-deazaguanine s ynthase OS=Photobacterium lipolyticum OX=266810 GN=queC PE=3 SV=1
MRKAVVVFSGGQDSTTCLIQAIANYDEVHCITFDYGQRHKLEIEVAQSITKELGITAHKVMDVGLLNELAISSLTRDNIEVSHELQANGLPNSFVPGRNILFLTLAGIYAYQIGAEAVITGVCETDFSGYPDCRDEFVKSLNQSLVLGMDRQLNIDTPLMWLNKAETWALADQYGKLDFVREKTLTCYNGVIGDGCGDCPSCDLRRAGLEDYLNHKETVMAELKAKQEKGDA

SEQ ID NO: 40825 - protein, 232 aa, Photobacterium lutimaris
  misc_feature (1)..(232): tr|A0A2T3IJJ8|A0A2T3IJJ8_9GAMM 7-cyano-7-deazaguanine s ynthase OS=Photobacterium lutimaris OX=388278 GN=queC P E=3 SV=1
MRKAVVVFSGGQDSTTCLIQAMSHYDEVHCITFDYGQRHKLEIEVAESICKDLGVTAHKVMDVGLLNELAISSLTRDNIPVSHELQENGLPNSFVPGRNILFLTLAGIYAYQIGADAVITGVCETDFSGYPDCRDEFVKSLNQSLVLGMDRALKIETPLMWLNKAETWALADQYGKLNFVREKTLTCYNGIIGDGCGDCPSCDLRKAGLDDYLANQSDIMAELKSKQQAGNV

SEQ ID NO: 40826 - protein, 232 aa, Photobacterium marinum
  misc_feature (1)..(232): tr|L8J870|L8J870_9GAMM 7-cyano-7-deazaguanine synthase OS=Photobacterium marinum OX=1056511 GN=queC PE=3 SV=1
MRKAVVVFSGGQDSTTCLIQAIANYDEVHCITFDYGQRHKLEIEVAESIAKEQGVAAHKVMDVGLLNELAISSLTRDNIPVSHELQDNGLPNSFVPGRNILFLTLAGIYAYQIGAESVITGVCETDFSGYPDCRDEFVKSINQSLVLGMDRPLNIETPLMWLNKAETWALADQYSKLNFVRERTLTCYNGVIGDGCGDCPSCDLRRAGLEDYLNHQETVMAALKAKQAEGNA

SEQ ID NO: 40827 - protein, 232 aa, Photobacterium phosphoreum
  misc_feature (1)..(232): tr|A0A2T3JXK9|A0A2T3JXK9_PHOPO 7-cyano-7-deazaguanine s ynthase OS=Photobacterium phosphoreum OX=659 GN=queC PE =3 SV=1
MAKAVVVFSGGQDSTTCLIQALAHYDEVHCITFDYGQRHKLEIEIAEHIAKDLGVAAHKVMDVSLLSELAISSLTRDSIPVSHELQANGLPNSFVPGRNILFLTLAGIYAYQIGAETVITGVCETDFSGYPDCRDEFVRSLNQSLVLGMDRQFTIATPLMWLNKAETWALADQYGKLDYVREKTLTCYNGVVGDGCGDCPSCDLRRAGLDDYLQHQATVMAALKEKQAQHKA

SEQ ID NO: 40828 - protein, 232 aa, Photobacterium phosphoreum
  misc_feature (1)..(232): tr|A0A2T3PRT3|A0A2T3PRT3_PHOPO 7-cyano-7-deazaguanine s ynthase OS=Photobacterium phosphoreum OX=659 GN=queC PE =3 SV=1
MAKAVVVFSGGQDSTTCLIQALAHYDEVHCITFDYGQRHKLEIEIAEHIAKDLGVAAHKVMDVCLLSELAISSLTRDSIPVSHELQANGLPNSFVPGRNILFLTLAGIYAYQIGAETVITGVCETDFSGYPDCRDEFVRSLNQSLVLGMDRQFTIATPLMWLNKAETWALADQYGKLDYVREKTLTCYNGVVGDGCGDCPSCDLRRAGLDDYLQHQATVMAALKEKQAQHKA

SEQ ID NO: 40829 - protein, 232 aa, Photobacterium piscicola
  misc_feature (1)..(232): tr|A0A1T5HZB0|A0A1T5HZB0_9GAMM 7-cyano-7-deazaguanine s ynthase OS=Photobacterium piscicola OX=1378299 GN=queC PE=3 SV=1
MAKAVVVFSGGQDSTTCLIQALAHYDEVHCITFDYGQRHKLEVEIAEHIAKDLGVAAHKVMDVSLIGELAISSLTRDSIPVSHELQANGLPNSFVPGRNILFLTLAGIYAYQIGAEAVITGVCETDFSGYPDCRDEFVRSLNHSLVLGMDRQFTIETPLMWLNKAETWALADQYGKLDYIREQTLTCYNGIVGDGCGDCPSCDLRRAGLEDYLQHQATVMAALKAKQAQHKA

SEQ ID NO: 40830 - protein, 232 aa, Photobacterium profundum
  misc_feature (1)..(232): tr|Q1YWK7|Q1YWK7_9GAMM 7-cyano-7-deazaguanine synthase OS=Photobacterium profundum 3TCK OX=314280 GN=queC PE=3 SV=1
MRKAVVVFSGGQDSTTCLIQAIENYDEVHCITFDYGQRHKLEIEVAQSITKELGITAHKVMDVGLLNELAISSLTRDNIAVSHELQANGLPNSFVPGRNILFLTLSGIYAYQIGAEAVITGVCETDFSGYPDCRDEFVKSLNQSLVLGMDRALKIETPLMWLNKAETWALADQYKQLDFVREKTLTCYNGIIGDGCGDCPSCDLRRAGLEDYLTNKDTIMADLVAKQAEGQA

SEQ ID NO: 40831 - protein, 232 aa, Photobacterium profundum
  misc_feature (1)..(232): sp|Q6LTJ7|QUEC_PHOPR 7-cyano-7-deazaguanine synthase OS =Photobacterium profundum (strain SS9) OX=298386 GN=que C PE=3 SV=1
MRKAVVVFSGGQDSTTCLIQAIKNYDEVHCITFDYGQRHKLEIEVAQSITKELGITAHKVMDVGLLNELAISSLTRDNIEVSHELQANGLPNSFVPGRNILFLTLSGIYAYQIGAEAVITGVCETDFSGYPDCRDEFVKSLNQSLVLGMDRALKIETPLMWLNKAETWALADQYKQLDFVREKTLTCYNGIIGDGCGNCPSCDLRRAGLEDYLTNKDAIMADLVAKQAEGQA

SEQ ID NO: 40832 - protein, 232 aa, Photobacterium proteolyticum
  misc_feature (1)..(232): tr|A0A1Q9H1B6|A0A1Q9H1B6_9GAMM 7-cyano-7-deazaguanine s ynthase OS=Photobacterium proteolyticum OX=1903952 GN=q ueC PE=3 SV=1
MRKAVVVFSGGQDSTTCLIQALANYDEVHCITFDYGQRHKLEIEVAQSVAKDLGVAAHKVMDVGLLNELAISSLTRDNIAVSHELQENGLPNSFVPGRNILFLTLAGIYAYQIGAEAVITGVCETDFSGYPDCRDEFVKSINQSLVLGMDRPLAIETPLMWLNKAETWALADQYSKLDYVRQQTLTCYNGIIGDGCGDCPSCDLRRAGLEDYLSNKKSVMAELEAKQAKGNA

SEQ ID NO: 40833 - protein, 232 aa, Photobacterium rosenbergii
  misc_feature (1)..(232): tr|A0A2T3N6F1|A0A2T3N6F1_9GAMM 7-cyano-7-deazaguanine s ynthase OS=Photobacterium rosenbergii OX=294936 GN=queC PE=3 SV=1
MRKAVVVFSGGQDSTTCLIQAMAHYDEVHCITFDYGQRHKLEIEVAESVCKELGVAAHKVMDVGLLNELAISSLTRDNIPVSHELQENGLPNSFVPGRNILFLTLAGIYAYQIGAEAVITGVCETDFSGYPDCRDEFVKSINQSLVLGMDRALKIETPLMWLNKAETWALADQYGKLDFVREKTLTCYNGIIGDGCGDCPSCDLRKAGLDDYLANQAAIMAELKAKQQAGNA

SEQ ID NO: 40834 - protein, 232 aa, Photobacterium sanctipauli
  misc_feature (1)..(232): tr|A0A2T3NRA9|A0A2T3NRA9_9GAMM 7-cyano-7-deazaguanine s ynthase OS=Photobacterium sanctipauli OX=1342794 GN=que C PE=3 SV=1
MRKAVVVFSGGQDSTTCLIQAMANYDEVHCITFDYGQRHKLEIEVAESICKELNVAAHKVMDVGLLNELAISSLTRDNIEVSHELQANGLPNSFVPGRNILFLTLAGIYAYQIGAEAVITGVCETDFSGYPDCRDEFVKSLNQSLVLGMDRPLNIETPLMWLNKAETWALADQYSKLDFVREKTLTCYNGIIGDGCGDCPSCDLRKAGLDDYQGNKEAIMAELTSKQSAGQA

SEQ ID NO: 40835 - protein, 228 aa, Photobacterium sanguinicancri
  misc_feature (1)..(228): tr|A0A264TDS5|A0A264TDS5_9GAMM 7-cyano-7-deazaguanine s ynthase OS=Photobacterium sanguinicancri OX=875932 GN=q ueC PE=3 SV=1
MRKAVVVFSGGQDSTTCLIQAIAQYDEVHCITFDYGQRHKLEIEVAESICKELNITAHKVMDVGLLNELAISSLTRDSIEVSHELQANGLPNSFVPGRNILFLTLAGIYAYQIGAESVITGVCETDFSGYPDCRDEFVKSLNQSLVLGMDRTFTIETPLMWLNKAETWALADQKHQLDFVREKTLTCYNGIIGDGCGDCPSCDLRRAGLKDYLDNRAEVMASLVSKQQ

SEQ ID NO: 40836 - protein, 230 aa, Photobacterium sanguinicancri
  misc_feature (1)..(230): tr|A0A135ZN92|A0A135ZN92_9GAMM 7-cyano-7-deazaguanine s ynthase OS=Photobacterium sanguinicancri OX=875932 GN=q ueC PE=3 SV=1
MRKAVVVFSGGQDSTTCLIQAIAQYDEVHCITFDYGQRHKLEIEVAESICKELNITAHKVMDVGLLNELAISSLTRDSIEVSHELQANGLPNSFVPGRNILFLTLAGIYAYQIGAESVITGVCETDFSGYPDCRDEFVKSLNQSLVLGMDRTFTIETPLMWLNKAETWALADQKHQLDFVREKTLTCYNGIIGDGCGDCPSCDLRRAGLTDYLDNRAEVMASLVTKQQEA

SEQ ID NO: 40837 - protein, 231 aa, Photobacterium sp.
  misc_feature (1)..(231): tr|A0A2T3LRX2|A0A2T3LRX2_9GAMM 7-cyano-7-deazaguanine s ynthase OS=Photobacterium sp. GB-1 OX=2022111 GN=queC P E=3 SV=1
MSKAVVVFSGGQDSTTCLIQALAHYDEVHCITFDYGQRHKLEIEVAEAIAKDLGVTAHKVMDVGLLNELAISSLTRDNIAVSHELQENGLPNSFVPGRNILFLTLAGIYAYQIGAETVITGVCETDFSGYPDCRDEFVKSLNQSLVLGMDRPLTIATPLMWLNKAETWALADQYQKLDYVREKTLTCYNGIIGDGCGDCPSCDLRRAGLTDYLDHKTTVMNALKAKQAQQA

SEQ ID NO: 40838 - protein, 232 aa, Photobacterium sp.
  misc_feature (1)..(232): tr|A0A1Y6M961|A0A1Y6M961_9GAMM 7-cyano-7-deazaguanine s ynthase OS=Photobacterium sp. CECT 9190 OX=2006084 GN=q ueC PE=3 SV=1
MTKAVVVFSGGQDSTTCLIQALAHYDEVHCITFDYGQRHKLEIEIAEHIAKDLGVAAHKVMDVSLLGELAISSLTRDNIAVSHELQANGLPNSFVPGRNILFLTLAGIYAYQIGAETVITGVCETDFSGYPDCRDEFVRSLNQSLVLGMDRQFTIATPLMWLNKAETWALADQYGKLDYVREQTLTCYNGVVGDGCGDCPSCDLRRIGLEDYLQHQSTVMAALKEKQAQHKA

SEQ ID NO: 40839 - protein, 228 aa, Photobacterium swingsii
  misc_feature (1)..(228): tr|A0A0J8VDM7|A0A0J8VDM7_9GAMM 7-cyano-7-deazaguanine s ynthase OS=Photobacterium swingsii OX=680026 GN=queC PE =3 SV=1
MRKAVVVFSGGQDSTTCLIQAIAQYDEVHCITFDYGQRHKLEIEVAEAICKELNVTAHKVMDVGLLNELAISSLTRDSIEVSHELQANGLPNSFVPGRNILFLTLAGIYAYQIGAESVITGVCETDFSGYPDCRDEFVKSLNQSLVLGMDRNFTIETPLMWLNKAETWALADQSEQLTFVREKTLTCYNGIIGDGCGDCPSCDLRRAGLKDYLDNRAEVMASLVSKQG

SEQ ID NO: 40840 - protein, 232 aa, Photobacterium toruni
  misc_feature (1)..(232): tr|A0A1T4KAJ2|A0A1T4KAJ2_9GAMM 7-cyano-7-deazaguanine s ynthase OS=Photobacterium toruni OX=1935446 GN=queC PE= 3 SV=1
MAKAVVVFSGGQDSTTCLIQALAHYDEVHCITFDYGQRHKLEVEIAEHIAKDLGVAAHKVMDVSLLGELAISSLTRDSIPVSHELQANGLPNSFVPGRNILFLTLAGIYAYQIGAETVITGVCETDFSGYPDCRDEFVRSLNHSLVLGMDRQFKIETPLMWLNKAETWALADQYGKLDYVREQTLTCYNGIVGDGCGDCPSCDLRRAGLDDYLQHQATVMAALKQKQAQHKA

SEQ ID NO: 40841 - protein, 232 aa, Photorhabdus asymbiotica
  misc_feature (1)..(232): tr|C7BJH3|C7BJH3_PHOAA 7-cyano-7-deazaguanine synthase OS=Photorhabdus asymbiotica subsp. asymbiotica (strain ATCC 43949 / 3105-77) OX=553480 GN=queC PE=3 SV=1
MRRAVVVFSGGQDSTTCLIQAINQYDEVHCITFDYGQRHCAEIDVARNISRSLGVVAHKVLDITLLNELALSSLTRNNIPIPNYNESEKSTIPNTFVPGRNILFLTLAAIYAYQVEAETVITGVCETDFSGYPDCRDEFVKAMNKAVSLGIARDIRFETPLMWLNKAETWALSDYYQHLDFVRSQTLTCYNGIQGNGCGTCAACHLRTSGLEQYLDAPEKIMTEMKAKTHLA

SEQ ID NO: 40842 - protein, 232 aa, Photorhabdus australis
  misc_feature (1)..(232): tr|A0A1C0U3N7|A0A1C0U3N7_9GAMM 7-cyano-7-deazaguanine s ynthase OS=Photorhabdus australis OX=286156 GN=queC PE= 3 SV=1
MRRAIVVFSGGQDSTTCLIQAINQYDEVHCITFDYGQRHHAEIDVARNISHSLGVVAHKILDVTLLNELALSSLTRNNIPVPNYNESEKSIIPNTFVPGRNILFLTLAAIYAYQVEAETVITGVCETDFSGYPDCRDEFVKALNKAVSLGIARDIRFETPLMWLSKAETWALSDYYQHLDFVRSQTLTCYNGIQGNGCGTCAACHLRTSGLEQYLDAPEKIMTEMKAKTHLA

SEQ ID NO: 40843 - protein, 232 aa, Photorhabdus bodei
  misc_feature (1)..(232): tr|A0A329XFB3|A0A329XFB3_9GAMM 7-cyano-7-deazaguanine s ynthase OS=Photorhabdus bodei OX=2029681 GN=queC PE=3 S V=1
MRQAVVVFSGGQDSTTCLIQAINQYDEVHCVTFDYGQRHRAEIDVARNISHSLGAVAHKVLDVTLLNELALSSLTRNNIPVPDYNESEKSAIPSTFVPGRNILFLTLAAIYAYQVEAEAVITGVCETDFSGYPDCRDEFVKALNKAVSLGIARNIRFETPLMWLNKAETWALSDYYQHLDFVRSQTLTCYNGIQGNGCGTCAACHLRANGLEQYLNAPEKIMTEMKAKTHLV

SEQ ID NO: 40844 - protein, 232 aa, Photorhabdus heterorhabditis
  misc_feature (1)..(232): tr|A0A0N0CN38|A0A0N0CN38_9GAMM 7-cyano-7-deazaguanine s ynthase OS=Photorhabdus heterorhabditis OX=880156 GN=qu eC PE=3 SV=1
MRRAVVVFSGGQDSTTCLIQAINQYDEVHCVTFDYGQRHRAEIDVARYISHSLNVVAHKVLDVTLLNELALSSLTRDNIPVPDYNESEKSTIPNTFVPGRNILFLTLAAIYAYQVEAEAVITGVCETDFSGYPDCRDEFVKALNKAVNLGIARDIRFETPLMWLNKAETWALSDYYQHLDFVRSQTLTCYNGVQGNGCGTCAACHLRANGLEQYLDAPEKIMTEMKAKTHLA

SEQ ID NO: 40845 - protein, 232 aa, Photorhabdus khanii
  misc_feature (1)..(232): tr|W3VBE8|W3VBE8_9GAMM 7-cyano-7-deazaguanine synthase OS=Photorhabdus khanii NC19 OX=1004151 GN=queC PE=3 SV= 1
MRRTVVVFSGGQDSTTCLIQAINQYDEVHCVTFDYGQRHRAEIDVARNISHSLGAVAHKVIDVTLLNELALSSLTRDNIPVPNYSESKKSTLPSTFVPGRNILFLTLAAIYAYQVEAETVITGVCETDFSGYPDCRDEFVKALNKAVSLGIARDIRFETPLMWLNKAETWALSDYYQHLDFIRSQTLTCYNGIQGNGCGTCAACHLRASGLEQYLNAPEKIMTEMKAKTHLS

SEQ ID NO: 40846 - protein, 232 aa, Photorhabdus laumondii
  misc_feature (1)..(232): tr|A0A329VL71|A0A329VL71_9GAMM 7-cyano-7-deazaguanine s ynthase OS=Photorhabdus laumondii subsp. clarkei OX=202 9685 GN=queC PE=3 SV=1
MRRAVVVFSGGQDSTTCLIQAINQYDEVHCVTFDYGQRHRAEIDVARNVSHFLGVVAHKVLDVTLLNELALSSLTRDNIPVPDHSESEKSAIPSTFVPGRNILFLTLAAIYAYQVEAEAVITGVCETDFSGYPDCRDEFVKALNKAVSLGIARDIRFETPLMWLNKAETWALSDYYQHLDFVRSQTLTCYNSIQGNGCGTCAACHLRANGLEQYLNAPEKIMTEMKAKTHLV

SEQ ID NO: 40847 - protein, 232 aa, Photorhabdus laumondii
  misc_feature (1)..(232): sp|Q7N0M0|QUEC_PHOLL 7-cyano-7-deazaguanine synthase OS =Photorhabdus laumondii subsp. laumondii (strain DSM 15 139 / CIP 105565 / TT01) OX=243265 GN=queC PE=3 SV=1
MRRAVVVFSGGQDSTTCLIQAINQYDEVHCVTFDYGQRHRAEIDVARNVSHFLGVVAHKVLDVTLLNELALSSLTRDNIPVPDHSESEKSAIPSTFVPGRNILFLTLAAIYAYQVEAEAVITGVCETDFSGYPDCRDEFVKALNKAVSLGIARDIRFETPLMWLNKAETWALSDYYQHLDFVRSQTLTCYNGIQGNGCGTCAACHLRANGLEQYLNAPEKIMTEMKAKTHLV

SEQ ID NO: 40848 - protein, 232 aa, Photorhabdus luminescens
  misc_feature (1)..(232): tr|A0A5C4RMC1|A0A5C4RMC1_PHOLU 7-cyano-7-deazaguanine s ynthase OS=Photorhabdus luminescens subsp. sonorensis O X=1173677 GN=queC PE=3 SV=1
MRRAVVVFSGGQDSTTCLIQAINQYDEVHCVTFDYGQRHRAEIDVARNISHSLGVVAHKVLDVTLLSELALSSLTRDNIPIPDYSESAKSAIPSTFVPGRNILFLTLAAIYAYQVEAEAIITGACETDFSGYPDSRDEFVKALNKAVTLGIARDIRFETPLMWLNKAETWALSDYYQHLDFVRSQTLTCYNGIQGNGCGKCAACHLRANGLEQYLNAPEKIMTEMKAKTHLV

SEQ ID NO: 40849 - protein, 232 aa, Photorhabdus luminescens
  misc_feature (1)..(232): tr|A0A0A0CRZ2|A0A0A0CRZ2_PHOLU 7-cyano-7-deazaguanine s ynthase OS=Photorhabdus luminescens OX=29488 GN=queC PE =3 SV=1
MRRAVVVFSGGQDSTTCLIKAINQYDEVHCVTFDYGQRHRAEIDVARNVSHSLGVVAHKVLDVTLLNELALSSLTRDNIPVPDYSESEKSAIPSTFVPGRNILFLTLAAIYAYQVEAEAVITGVCETDFSGYPDCRDEFVKALNKAVSLGIARDIRFETPLMWLNKAETWALSDYYQHLDFVRSQTLTCYNGIQGNGCGTCAACHLRANGLEQYLNAPDKIMAEMKAKTHLV

SEQ ID NO: 40850 - protein, 232 aa, Photorhabdus namnaonensis
  misc_feature (1)..(232): tr|A0A1B8YMK8|A0A1B8YMK8_9GAMM 7-cyano-7-deazaguanine s ynthase OS=Photorhabdus namnaonensis OX=1851568 GN=queC PE=3 SV=1
MRRAVVVFSGGQDSTTCLIQAINQYDEVHCVTFDYGQRHRAEIDVARNINHSLGVVAHKVLDVTLLSELALSSLTRDNIPIPDYNESKKSAIPSTFVPGRNILFLTLAAIYAYQVEAEAVITGVCETDFSGYPDSRDEFIKAMNKAVSLGIARDIRFETPLMWLNKAETWALSDYYQHLDFVRSQTLTCYNGIQGNGCGKCAACHLRANGLEQYLNAPEKIMTEMKAKTHLV

SEQ ID NO: 40851 - protein, 232 aa, Photorhabdus sp.
  misc_feature (1)..(232): tr|A0A329W1U9|A0A329W1U9_9GAMM 7-cyano-7-deazaguanine s ynthase OS=Photorhabdus sp. S9-53 OX=2029683 GN=queC PE =3 SV=1
MRRAVVVFSGGQDSTTCLIQAINQYDEVHCVTFDYGQRHRAEIDVARNISHSLGAVAHKVLDVTLLNELALSSLTRDNIPVPDYNESEKSAIPSTFVPGRNILFLTLAAIYAYQVEAEAVITGVCETDFSGYPDCRDEFVKALNKAVSLGIARNIRFETPLMWLNKAETWALSDYYQHLDFIRSQTLTCYNGIQGNGCGTCAACHLRANGLEQYLNAPEKIMTEMKAKTHLV

SEQ ID NO: 40852 - protein, 232 aa, Photorhabdus sp.; identical to SEQ ID NO: 40851
  misc_feature (1)..(232): tr|A0A329W1M0|A0A329W1M0_9GAMM 7-cyano-7-deazaguanine s ynthase OS=Photorhabdus sp. S10-54 OX=2029684 GN=queC P E=3 SV=1

SEQ ID NO: 40853 - protein, 232 aa, Photorhabdus temperata
  misc_feature (1)..(232): tr|A0A081S225|A0A081S225_PHOTE 7-cyano-7-deazaguanine s ynthase OS=Photorhabdus temperata subsp. temperata Meg1 OX=1393735 GN=queC PE=3 SV=1
MRRTVVVFSGGQDSTTCLIQAINQYDEVHCVTFDYGQRHRAEIDVACDISHSLGVIAHKVIDVTLLNELALSSLTRDNIPIPNYSESEKSTLPSTFVPGRNILFLTLAAIYAYQVEAETVITGVCETDFSGYPDCRDEFVKALNKAVNLGVARDIHFETPLMWLNKAETWALSDYYQHLDFVRSQTLTCYNGIQGNGCGTCAACHLRANGLEQYLNAPEKIMTEMKAKTHLS

SEQ ID NO: 40854 - protein, 232 aa, Photorhabdus temperata
  misc_feature (1)..(232): tr|A0A4V3F5I2|A0A4V3F5I2_PHOTE 7-cyano-7-deazaguanine s ynthase OS=Photorhabdus temperata OX=574560 GN=queC PE= 3 SV=1
MKRAVVVFSGGQDSTTCLIQAINQYDEIHCVTFDYGQRHRAEIDVACNISHSLGVIAHKIIDVTLLNELALSSLTRDNIPVPNYSESKKSTLPSTFVPGRNILFLTLAAIYAYQVEAETVITGVCETDFSGYPDCRDEFVKALNKAVSLGVARDIHFETPLMWLNKAETWALSDYYQHLDFVRSQTLTCYNGIQGNGCGTCAACHLRASGLEQYLNAPEKIMTEMKAKTHLA

SEQ ID NO: 40855 - protein, 232 aa, Photorhabdus thracensis
  misc_feature (1)..(232): tr|A0A0F7LK20|A0A0F7LK20_9GAMM 7-cyano-7-deazaguanine s ynthase OS=Photorhabdus thracensis OX=230089 GN=queC PE =3 SV=1
MRRAVVVFSGGQDSTTCLIQAINQYDEVHCVTFDYGQRHRAEIDVACDISHSLGVIAHKVIDVTLLNELALSSLTRDNIPVPNYSESEKSTLPSTFVPGRNILFLTLAAIYAYQVEAETVITGVCETDFSGYPDCRDEFVKALNKAVSLGVARDIHFETPLMWLNKAETWALSDYYQHLDFVRSQTLTCYNGIQGNGCGTCAACYLRTSGLEKYLNAPEKIMTEMKAKTHLP

SEQ ID NO: 40856 - protein, 231 aa, Phreatobacter cathodiphilus
  misc_feature (1)..(231): tr|A0A2S0NI28|A0A2S0NI28_9PROT 7-cyano-7-deazaguanine s ynthase OS=Phreatobacter cathodiphilus OX=1868589 GN=qu eC PE=3 SV=1
MADDGALVLFSGGQDSATCLAWALDRFAHVETLGFDYGQRHQVELACRAGIRDGLGRVNSGWAARLGPDHTLGLAALGEVSDTALTREVAIEMTDQDLPNTFVPGRNLVFLTFAAALAYRRGLKHIVAGMCETDYSGYPDCRDDTIKALQVALNLGMEKRFVLHTPLMFIDKADTWRMAERLGGEALVELIRTDSHSCYLGVRTELHAWGHGCGTCPACHLRAAGWRRYRE

SEQ ID NO: 40857 - protein, 232 aa, Phreatobacter oligotrophus
  misc_feature (1)..(232): tr|A0A2T4Z0Z4|A0A2T4Z0Z4_9PROT 7-cyano-7-deazaguanine s ynthase OS=Phreatobacter oligotrophus OX=1122261 GN=que C PE=3 SV=1
MDDSGALVLFSGGQDSATCLAWALDRFNHVETLGFDYGQRHAVELECRATVRDGLATVNADWGVRLGPDHTLGLAALGEVSDTALTRSVEIAMTDQGLPNTFVPGRNLVFLTFAAALAYRRGLKHIVAGMCETDYSGYPDCRDDTIKALQVALNLGMESRFVLHTPLMFIDKAETWRLAERLGGEPLVELIRAESHSCYLGDREHLHDWGHGCGTCPACHLRAAGWRRYRGG

SEQ ID NO: 40858 - protein, 236 aa, Phreatobacter sp.
  misc_feature (1)..(236): tr|A0A4D7QSQ3|A0A4D7QSQ3_9PROT 7-cyano-7-deazaguanine s ynthase OS=Phreatobacter sp. NMCR1094 OX=2570229 GN=que C PE=3 SV=1
MAEAGGALVLFSGGQDSATCLAWALDRFDHVETLGFDYGQRHLVELACRAAIRDGLPTIRHGWEQRLGPDHTLNLAALGEVSNTALTRDMAIEMGESGLPNTFVPGRNIVFLTFAAALAYRRGLKHIVAGMCETDYSGYPDCRDDTIKALQVALNLGMDKRFVLHTPLMWIDKAATWRLAEDLGGKPLVDLIVEQSHSCYLGDRAHHHDWGFGCGTCPACQLRADGWRRYVAEPVA

SEQ ID NO: 40859 - protein, 245 aa, Phreatobacter stygius
  misc_feature (1)..(245): tr|A0A4D7AZS7|A0A4D7AZS7_9PROT 7-cyano-7-deazaguanine s ynthase OS=Phreatobacter stygius OX=1940610 GN=queC PE= 3 SV=1
MADIESEQAAAAAGSGALVLFSGGQDSSTCLAWALERFGTVETLGFDYGQRHRVELECRDALRQGLTDLNAGWAARLGPDHTVNLAALGEISNTALTRDVAIAMSEGGLPNTFVPGRNLIFLTFAATLAYRRGLKHIVAGMCETDYSGYPDCRDDTIKALQVALNLGMDRRFVLHTPLMWIDKAETWALTARLGGEPLVALIREQSHSCYLGDRSHHHEWGFGCGTCPACQLRAEGYRRFVAAAV

SEQ ID NO: 40860 - protein, 187 aa, Phycicoccus sp.
  misc_feature (1)..(187): tr|A0A444BRC0|A0A444BRC0_9MICO 7-cyano-7-deazaguanine s ynthase OS=Phycicoccus sp. CMS6Z-2 OX=2502783 GN=EPD83_ 02925 PE=3 SV=1
MAMTYAGSCAVLLSGGIDSAVVAHALRSQGWDIAALFVDYGQPAREAERTASTRVAAHYDLPWQEVGLTGMSVPQSGEIPGRNDMLIALARATLPGRSIAVGIHGGTEYADCSPAWTTAWQQLIDAQSGGVARILAPLLHRRKDEIISHARYSQVPIHLTHSCERANDPCGQCLSCQDWERARVGAK

SEQ ID NO: 40861 - protein, 202 aa, Phycisphaera mikurensis
  misc_feature (1)..(202): tr|I0IH11|I0IH11_PHYMF Uncharacterized protein OS=Phyci sphaera mikurensis (strain NBRC 102666 / KCTC 22515 / F YK2301M01) OX=1142394 GN=PSMK_23900 PE=4 SV=1
MPPAPRPLLLAAGDLPSLVVLALRHRDRKPMPRLLFVHDGRDASAARLRRLREQMDRYGLGTLEELHAVHLRAERGPGGEAAHPPLADAQLLLAACQAAGRRGSTPVIWATARGDAAGDATAAVPARLAAHETCLLVRRLQEAAGVEPVPVETPLVELHLEQVMALGRRASVDPGLAWACAFRGPAPCGSCDGCRRLRAAVG

SEQ ID NO: 40862 - protein, 247 aa, Phycisphaera mikurensis
  misc_feature (1)..(247): tr|I0IDJ2|I0IDJ2_PHYMF 7-cyano-7-deazaguanine synthase OS=Phycisphaera mikurensis (strain NBRC 102666 / KCTC 2 2515 / FYK2301M01) OX=1142394 GN=queC PE=3 SV=1
MEADTAPAPSGTPTPPIRRAVVLLSGGLDSATVLAIAKREGFRVTALSFRYGQRHGDELAAAARVADAAGVADHRVVDLDLSAFGGSALTDAAIEVPQRDGQQPPDPGIPPTYVPARNTVFLSVALALAEATGARDLFIGVNAVDYSGYPDCRPAFVEAFERLANLATRAGVEASPTGGFRVHAPLIRLSKAEIIRRGTALGVDYGDTLSCYAPAASGRACGRCDACHLRAAGFREAGLTDPAASTP

SEQ ID NO: 40863 - protein, 226 aa, Phycisphaera sp.
  misc_feature (1)..(226): tr|A0A3M8FZB1|A0A3M8FZB1_9BACT 7-cyano-7-deazaguanine s ynthase OS=Phycisphaera sp. OX=2030824 GN=queC PE=3 SV= 1
MQPMAVVLLSGGLDSATCLAIARRDGFNATCLAVDYGQRHRCELDAARQVAASFDAELRTVRVDLRAFGGSALTDDLDVPKGRSEQDISGSIPVTYVPARNLVFLSLAVAQAEVLGAQYLYIGVNQLDYSGYPDCRGEFIESFRVASNLATKAGVEGKPLRISTPLIDLTKAEIVTLGTSLGVDYALTVSCYDPTEDGLACGSCDSCQLRRRGFDQANLRDPTRYA

SEQ ID NO: 40864 - protein, 223 aa, Phycisphaera sp.
  misc_feature (1)..(223): tr|A0A424KJB8|A0A424KJB8_9BACT 7-cyano-7-deazaguanine s ynthase OS=Phycisphaera sp. TMED9 OX=1986611 GN=queC PE =3 SV=1
MKAVVLLSGGLDSSTVLAWARAEGRECYALSFDYGQRHRIELERAAEIAERIGAVEHRVLSIDLRAFGGSALTDDIEVPKDRVDGHGRSSASDGEDAIPVTYVPARNTIFLSFAMAYAEVRDAGEIWLGINAIDYSGYPDCRPEYLAAFQRMSDLATKAGVEGHGPRFISPLAELGKVDIVRKATALGVPIDRTFSCYDPGDDGTPCGRCDSCILRRAAIAEA

SEQ ID NO: 40865 - protein, 223 aa, Phycisphaeraceae bacterium
  misc_feature (1)..(223): tr|A0A1Z9Q829|A0A1Z9Q829_9BACT 7-cyano-7-deazaguanine s ynthase OS=Phycisphaeraceae bacterium TMED231 OX=198683 1 GN=queC PE=3 SV=1
MKAVVLLSGGLDSATVLAWARAEGRECFALSFDYGQRHRIELERAAELADQLGACEHRVLSIDLRAFGGSALTDDIAVPKDRVDGHGRSAGESAEASIPVTYVPARNTIFLSFAMAYAEVRAAEEIWLGINAIDYSGYPDCRPEYLAAFQRMSDLATKAGVEGHGPRFVSPLAELGKVDIVRKAVALGVPVDRTFSCYDPDDEGTPCGRCDSCVLRQAAIAEA

SEQ ID NO: 40866 - protein, 229 aa, Phycisphaeraceae bacterium
  misc_feature (1)..(229): tr|A0A520QCU4|A0A520QCU4_9BACT 7-cyano-7-deazaguanine s ynthase OS=Phycisphaeraceae bacterium OX=2026777 GN=que C PE=3 SV=1
MGTSDPAVVLLSGGLDSATVLAIARDEGYAVHALVVDYGQRHRHELEAAKKLSEEAGIPFRVMPLDLRVFGGSALTDDIDVPHGRDESEMQQDIPVTYVPARNLIFLSLASGFAETIGAKDLFLGVNAVDYSGYPDCRPEFLTAFEACANLATKAGVQGQAFTIHAPLVNLTKAEIIQRGLKLGVDYSKTHSCYDPDPQGRACGTCDSCVLRRRGFEAAGVPDPTRYSA

SEQ ID NO: 40867 - protein, 231 aa, Phycisphaerae bacterium
  misc_feature (1)..(231): tr|A0A0S8KS78|A0A0S8KS78_9BACT 7-cyano-7-deazaguanine s ynthase OS=Phycisphaerae bacterium SM1_79 OX=1703410 GN =queC PE=3 SV=1
MADKKAVVLLSGGIDSATTLAIARSEGFQCYALTFRYGQRHQREIEAAKKIAHSLAVAEHRVIDIDLAQFGGSALTDLSIEVPKDRTKLDNPNQIPQTYVPARNTIFLSYALAWAEVLGAFDIFIGVNTTDYSGYPDCRAEFIAAFEKTANIATANAVQGKGRYRINTPIIDMTKAQIILTGTKLGVDYSLTHSCYDPDEQGRSCSRCDSCRLRLKGFAEAGMEDPIEYAK

SEQ ID NO: 40868 - protein, 235 aa, Phycisphaerae bacterium
  misc_feature (1)..(235): tr|A0A2E0XW95|A0A2E0XW95_9BACT 7-cyano-7-deazaguanine s ynthase OS=Phycisphaerae bacterium OX=2026778 GN=queC P E=3 SV=1
MTAQRHAVVLLSGGLDSATVLAIAGDDGFTLHALTFDYGQRHRHELDCAATVAKASGAVHHVLKLDHAAFRGSALTDGPEVPVDRSEDAMSDGIPVTYVPARNTIMLSHALGYAEHVGSRDIFVGVNAVDYSGYPDCRPAFIEAFQSLANLATKAGVEGDSFRVHAPLQHMNKSEIIQRGCALGVDYGLTSTCYQPAADGTPCMRCDACALRARGFREAGVIDPLIGHQTAGEQD

SEQ ID NO: 40869 - protein, 231 aa, Phycisphaerales bacterium
  misc_feature (1)..(231): tr|A0A3C0YQM2|A0A3C0YQM2_9BACT 7-cyano-7-deazaguanine s ynthase OS=Phycisphaerales bacterium OX=2052180 GN=queC PE=3 SV=1
MKRALKKAVILLSGGLDSTTTLAIAKSRGFDCFALTFRYGQRHSIEQKSAKKIAKFFGGKQLVVDVNPAVFQHSALTDKSIKVPMGRKIDSSKIPVTYVPARNTLFLSYALALAESIGAFDIFIGVNSTDYSGYPDCRPEYIKAYEKMANLATAASVQKKGKYKIHTPIIKMTKSQIIKTGVKLGVNYSLTHSCYNPDKKGIACGKCDSCQLRLKGFAEAKLKDPVKYANK

SEQ ID NO: 40870 - protein, 231 aa, Phycisphaerales bacterium
  misc_feature (1)..(231): tr|A0A3D3URR4|A0A3D3URR4_9BACT 7-cyano-7-deazaguanine s ynthase OS=Phycisphaerales bacterium OX=2052180 GN=queC PE=3 SV=1
MAGKKAVILLSGGLDSATTLAIARSEGFLCYALTFRYGQRHKREIEAAKKVAESVGAAEHRIIDIDLAAFGGSALTDASIDVPKDRAGLGEATQIPPTYVPARNTIFLSYALAWAEVLGAFDIYIGVNSTDYSGYPDCRAEFITAFEKTANLATAAAVEQKGRYRIHTPIIEMTKAGIILAGTKLGVDYSMTHSCYDPDEQGRSCGRCDSCRLRLKGFAEAGIKDPIDYMT

SEQ ID NO: 40871 - protein, 236 aa, Phyllobacterium bourgognense
  misc_feature (1)..(236): tr|A0A368YXN2|A0A368YXN2_9RHIZ 7-cyano-7-deazaguanine s ynthase OS=Phyllobacterium bourgognense OX=314236 GN=qu eC PE=3 SV=1
MARSSDGALVLFSGGQDSATCLAWALSRFDRVETVGFDYGQRHRIELEMRGRFRSALAGKFPDWTARLGDDHMLDASIIGELGSTAMTQDIAIEMAENGLPNTFVPGRNLLFFTLAAALAYRRGLRTIVGGMCETDYSGYPDCRDDTLKAQQVALSLGLDRRITIETPLMWLDKAETFELAQDLGGEALLDLVVEHTHTCYLGDRSQRHEWGYGCNSCPACELRAKGWQKFKAEFA

SEQ ID NO: 40872 - protein, 236 aa, Phyllobacterium brassicacearum
  misc_feature (1)..(236): tr|A0A2P7BJG7|A0A2P7BJG7_9RHIZ 7-cyano-7-deazaguanine s ynthase OS=Phyllobacterium brassicacearum OX=314235 GN= queC PE=3 SV=1
MARNSDGALVLFSGGQDSATCLAWALANFDRVETVGFDYGQRHRIELEVRHQFREAITATFPQWAARLGDDHMLDAGIVGQLGASAMTNDIAIEMADNGLPNTFVPGRNLLFFTLAGALAYRRGLRVIVGGMCETDYSGYPDCRDDTLKAQQVALSLGLDRRVTIETPLMWLDKAETFALAQDLGGEALLNLIVENTHTCYLGDRSNRHAWGYGCGTCPACELRSAGWQKFKAEAA

SEQ ID NO: 40873 - protein, 233 aa, Phyllobacterium endophyticum
  misc_feature (1)..(233): tr|A0A2P7ASH4|A0A2P7ASH4_9RHIZ 7-cyano-7-deazaguanine s ynthase OS=Phyllobacterium endophyticum OX=1149773 GN=q ueC PE=3 SV=1
MSTTALVLFSGGQDSTTCLAWALDRFERVETVGFDYGQRHRIELACRDTLRAELSALNPVWADRLGDDHTISLAALGEISDTALTSGMQIEMSESGLPNTFVPGRNLIFLTFAAALAYRRGLKHIVGGMCETDYSGYPDCRDDTIKALQVALNIGMEKRFVLDTPLMWIDKAQTWQLAKDLGGRALVDIIVKDSHTCYLGERGEFHDWGYGCGTCPACDLRAKGHEKFVAEEE

SEQ ID NO: 40874 - protein, 236 aa, Phyllobacterium endophyticum
  misc_feature (1)..(236): tr|A0A2P7AYZ9|A0A2P7AYZ9_9RHIZ 7-cyano-7-deazaguanine s ynthase OS=Phyllobacterium endophyticum OX=1149773 GN=q ueC PE=3 SV=1
MARSTDGALVLFSGGQDSATCLAWALSRFDRVETVGFDYGQRHRIELEVRSQFRGALRRTFSEWAERLGDDHLLDAGIIGQLGSTAMTQDIAIEMADNGLSNTFVPGRNLLFFTLAGALAYRRGLRVIVGGMCETDYSGYPDCRDDTLKAQQVALSLGLDRRMTIETPLMWLDKAETFALARDLGGQSLLNLIMEHTHTCYLGDRTQRHNWGYGCGTCPACELRANGWRKFKAEAA

SEQ ID NO: 40875 - protein, 236 aa, Phyllobacterium leguminum
  misc_feature (1)..(236): tr|A0A318T7Y4|A0A318T7Y4_9RHIZ 7-cyano-7-deazaguanine s ynthase OS=Phyllobacterium leguminum OX=314237 GN=queC PE=3 SV=1
MKTLVVCSGGLDSVSLAHKVAAEHELTGLISFDYGQRHLREIDFAASCAKRLGVAHHVIDIRPIGAHLTGSALTDDVDVPDGHYAEETMKTTIVPNRNAIMLAIAFGLAAAQKADAVAVAVHGGDHFIYPDCRPGFIEAFQAMQDEALDGYAKVRLFAPYVEISKAEIVSDGARHGTPFAESWSCYKGGENHCGRCGTCVERREAFHLAGIEDPTRYEDPDFWKTAVSQHAVREER

SEQ ID NO: 40876 - protein, 236 aa, Phyllobacterium myrsinacearum
  misc_feature (1)..(236): tr|A0A2S9JJD4|A0A2S9JJD4_9RHIZ 7-cyano-7-deazaguanine s ynthase OS=Phyllobacterium myrsinacearum OX=28101 GN=qu eC PE=3 SV=1
MARNADGALVLFSGGQDSATCLAWALSRFDRVETVGFDYGQRHRVELDVRNDFRAEVIRRFPDWAKRLGDDHRLDAGVIGQLGATAMTGDIAIEMAENGLPNTFVPGRNLLFFTLAAALAYRRGLRVIVGGMCETDYSGYPDCRDDTLKAQQVALSLGLDRRITIETPLMWLDKAETFALARDIGGEPLLDMIIENTHTCYLGDRSARHAWGYGCGTCPACTLRSGGWSKFKAEAA

SEQ ID NO: 40877 - protein, 232 aa, Phyllobacterium salinisoli
  misc_feature (1)..(232): tr|A0A368K252|A0A368K252_9RHIZ 7-cyano-7-deazaguanine s ynthase OS=Phyllobacterium salinisoli OX=1899321 GN=que C PE=3 SV=1
MKTLVICSGGLDSVSLAHKVAAEQELSGLLSFDYGQRHKKELDFAAACAARLKVLHQVIDINAIGRSLSGSALTDDLDVPDGHYAEETMRVTVVPNRNAIMLAIAFGVAASQKADAVATAVHGGDHFIYPDCRPGFIDAFQTMQLHALEGYADIRLYAPYVNISKADIVTDGVKHHTPFAETWSCYKGGERHCGRCGTCVERREAFHLAEIEDPTDYEDREYWREAIRNAGR

SEQ ID NO: 40878 - protein, 236 aa, Phyllobacterium sophorae
  misc_feature (1)..(236): tr|A0A2P7BKQ1|A0A2P7BKQ1_9RHIZ 7-cyano-7-deazaguanine s ynthase OS=Phyllobacterium sophorae OX=1520277 GN=queC PE=3 SV=1
MARNSDGALVLFSGGQDSATCLAWALSRFDRVETVGFDYGQRHRIELEVRGEFRSAITRQFPQWAARLGDDHLLDAGIVGQLGASAMTDDIAIEMADNGLPNTFVPGRNLLFFTLAGALAYRRGLRVIVGGMCETDYSGYPDCRDDTLKAQQVALSLGLDRRITIETPLMWLDKSETFALARELGGGPLLDLIVEHTHTCYLGDRSKRHAWGYGCGTCPACELRSAGWEKFRAEAV

SEQ ID NO: 40879 - protein, 213 aa, Phyllobacterium sp.
  misc_feature (1)..(213): tr|A0A2S9IIY6|A0A2S9IIY6_9RHIZ 7-cyano-7-deazaguanine s ynthase OS=Phyllobacterium sp. 1N-3 OX=2100534 GN=C5748 _26770 PE=3 SV=1
MNSAVLLASGGLDSTTVAYGLAAAGIDVFPLFFDYGQHCADTEWDRVNEVLPRDMRRPERCDISDIFKGSSSRLIKEANLWEDKVADNDLYVPYRTMLFFAAAAARAQTLGILDVYTGFINSNHAKEIDCTEEFMNSMDGLIDNIGPVRFTSPFRFSSKTAVVEEALRRGVPIGRTFSCQAASDFPCGACPNCVERLHALQDAALVIPQAKVD

SEQ ID NO: 40880 - protein, 120 aa, Phyllobacterium sp.
  misc_feature (1)..(120): tr|J3HMG5|J3HMG5_9RHIZ 7-cyano-7-deazaguanine synthase (Fragment) OS=Phyllobacterium sp. YR531 OX=1144343 GN=P MI41_03704 PE=3 SV=1
APLAYRRGLRVIIGGMCETDYSGYPDCRDDTLKAQQVALSLGLDRRITIETPLMWLDKAETFALAKELGGKPLLELIVENSHTCYLGDRSKRHDWGYGCGKCPACDLRSAGWQKFKAEAA

SEQ ID NO: 40881 - protein, 236 aa, Phyllobacterium zundukense
  misc_feature (1)..(236): tr|A0A2N9VWS2|A0A2N9VWS2_9RHIZ 7-cyano-7-deazaguanine s ynthase OS=Phyllobacterium zundukense OX=1867719 GN=que C PE=3 SV=1
MARNSDGALVLFSGGQDSATCLAWALSRFDRVETVGFDYGQRHRIELEVRGGFRNALAKQFPHWAARLGDDHMLDAGVVGQLGASAMTNDIAIEMAENGLPNTFVPGRNLLFFTLAGALAYRRGLRVIVGGMCETDYSGYPDCRDDTLKAQQVALSLGLDRRVTIETPLMWLDKAETFALAQDLGGEPLLDLIVENTHTCYLGDRSKRHAWGYGCGTCPACELRSAGWQKFKAEAL

SEQ ID NO: 40882 - protein, 231 aa, Phytobacter diazotrophicus
  misc_feature (1)..(231): tr|A0A4R4B3N6|A0A4R4B3N6_9GAMM 7-cyano-7-deazaguanine s ynthase OS=Phytobacter diazotrophicus OX=395631 GN=queC PE=3 SV=1
MKRAVVVFSGGQDSTTCLVQALQQYDEVHCVTFDYGQRHRAEIDVARELALQLGARAHKVLDVTLLNELAVSSLTRDSIPVPDYQPDASGIPNTFVPGRNILFLTLAAIYAYQVQAEAVITGVCETDFSGYPDCRDEFVKALNHAVTLGMAKDIRFETPLMWIDKAETWALADYWGKLELVRNETLTCYNGIKGDGCGQCAACNLRANGLSHYLADKTAVMATMKKKTGLK

SEQ ID NO: 40883 - protein, 231 aa, Phytobacter ursingii
  misc_feature (1)..(231): tr|A0A0G3QFB5|A0A0G3QFB5_9GAMM 7-cyano-7-deazaguanine s ynthase OS=Phytobacter ursingii OX=1972431 GN=queC PE=3 SV=1
MKRAVVVFSGGQDSTTCLIQALQQYDEVHCVTFDYGQRHRAEIDVARELVLQSGARAHKVLDVTLLNELAVSSLTRDSIPVPDYQPDASGIPNTFVPGRNILFLTLTAIYAYQVQAEAVITGVCETDFSGYPDCRDEFVKALNHAVNLGMAKDIRFETPLMWIDKAETWALADYWGKLELVRNETLTCYNGIKGDGCGHCAACNLRANGLRHYLADKAGVMAAMKKKTGLK

SEQ ID NO: 40884 - protein, 231 aa, Phytobacter ursingii; identical to SEQ ID NO: 38969
  misc_feature (1)..(231): tr|A0A508UD22|A0A508UD22_9GAMM 7-cyano-7-deazaguanine s ynthase OS=Phytobacter ursingii OX=1972431 GN=queC PE=3 SV=1

SEQ ID NO: 40885 - protein, 242 aa, Pigmentiphaga aceris
  misc_feature (1)..(242): tr|A0A5C0B1U8|A0A5C0B1U8_9BURK 7-cyano-7-deazaguanine s ynthase OS=Pigmentiphaga aceris OX=1940612 GN=queC PE=3 SV=1
MAEQNRHALVLFSGGQDSTTCLAWALERYDRVETIGFDYGQRHRVELDQRKVVLAQVRAQFPAWADRLGEDHMIDLAVLGQISDTALTSDAEIRMNADGLPNTFVPGRNLLFLTLAAALAYRRELNVLVGGMCETDFSGYPDCRDDTIKAMQVAISLGMGKRYTFETPLMWIDKHETWQLAQDLGGDALVEVIVEHSHTCYTGDRSERHDWGYGCGKCPACVLRRNGFAQWRAEQANLEAAQ

SEQ ID NO: 40886 - protein, 236 aa, Pigmentiphaga kullae
  misc_feature (1)..(236): tr|A0A4Q7NJG0|A0A4Q7NJG0_9BURK 7-cyano-7-deazaguanine s ynthase OS=Pigmentiphaga kullae OX=151784 GN=queC PE=3 SV=1
MDARKALVLFSGGQDSTTCLAWALDRYALVETVGFDYGQRHRVELDARRNVLREIRARFPDWSPRLGEDHAIDLSVLGALSDTALTRDTEIKLTDAGLPNTFVPGRNLVFLTMAAALAYRRGLEIVVGGMCETDFSGYPDCRDDTVKALQVAVSLGMGQRFTFETPLMWLDKAQTWQLAEDLGGDALVEVVAEHSHTCYLGDRSKRFDWGYGCGTCPACELRAAGYGRWRQAPGGE

SEQ ID NO: 40887 - protein, 236 aa, Pigmentiphaga sp.
  misc_feature (1)..(236): tr|A0A208Y9I9|A0A208Y9I9_9BURK 7-cyano-7-deazaguanine s ynthase OS=Pigmentiphaga sp. NML080357 OX=2008675 GN=qu eC PE=3 SV=1
MDSRKALVLFSGGQDSTTCLAWALDRYAAVETVGFDYGQRHRVELEARRNVLREMRARFPAWASRLGEDHAVDLSVLGAISDTALTRETEIRLTDAGLPNTFVPGRNLVFLTMASALAYRRGLDVVVGGMCETDFSGYPDCRDDTVKALQVAVSLGMGQRFTFETPLMWLDKAQTWQLAFDLGGGALVDIVAEHSHTCYLGDRSKRFEWGYGCGACPACELRAAGYGRWRQAPGGM

SEQ ID NO: 40888 - protein, 236 aa, Pigmentiphaga sp.
  misc_feature (1)..(236): tr|A0A3G8GGR4|A0A3G8GGR4_9BURK 7-cyano-7-deazaguanine s ynthase OS=Pigmentiphaga sp. H8 OX=2488560 GN=queC PE=3 SV=1
MDARKALVLFSGGQDSTTCLAWALDRYARVETVGFDYGQRHRVELDARRNVLREVHARFPDWSPRLGEDHAIDLSVLGALSDTALTRDTEIRLTDAGLPNTFVPGRNLVFLTMAAALAYRRGLEVVVGGMCETDFSGYPDCRDDTVKALQVAVSLGMGQRFTFETPLMWLDKAQTWQLAQDLGGDALVEVVAEHSHTCYLGDRSKRFDWGYGCGTCPACELRAAGHARWRQVPGSV

SEQ ID NO: 40889 - protein, 232 aa, Pirellula sp.
  misc_feature (1)..(232): tr|A0A142XV23|A0A142XV23_9PLAN 7-cyano-7-deazaguanine s ynthase OS=Pirellula sp. SH-Sr6A OX=1632865 GN=queC PE= 3 SV=1
MKNLKKPAVVLLSGGLDSATCMALAREQGFSLYAISFRYGQRHRVELEKAQAVASAFQAEKHVILDIDLGKLGGSALTDVSIDVPKHESVDEIGEDIPLTYVPARNTVFLSYALAWAEVLQSNDIFVGVNALDYSGYPDCRPEYIQAFETMANLATKRAVEGDRLTIHAPLIHWSKEEIVRKGLELGVDYSLTSSCYDPLPGGFACGHCDSCLLRERGFRLNGMQDPARQPL

SEQ ID NO: 40890 - protein, 236 aa, Pirellula staleyi
  misc_feature (1)..(236): tr|D2R400|D2R400_PIRSD 7-cyano-7-deazaguanine synthase OS=Pirellula staleyi (strain ATCC 27377 / DSM 6068 / IC PB 4128) OX=530564 GN=Psta_4201 PE=3 SV=1
MISQHSSTEIAVLMSGGLDSSILVGKFLREGRTVHPIYIRTGLFWQSGELPAVQAFLAAIATANLRPLKILELPLDDLYTDHWSLTGSGTPADDTPDEAVYLPGRNALLLVKAAVYCQLHGIGQLACAPLGSSPFEDASSEFFTEYQSAMNRGSSSPVVLLRPFGELHKEEVMRLGVGLPLELTFSCIHPVDGTHCGTCNKCFERKEAFRITGIEDKTVYTASRRTAVQVATKSTP

SEQ ID NO: 40891 - protein, 229 aa, Pirellula staleyi
  misc_feature (1)..(229): tr|D2R8A5|D2R8A5_PIRSD 7-cyano-7-deazaguanine synthase OS=Pirellula staleyi (strain ATCC 27377 / DSM 6068 / IC PB 4128) OX=530564 GN=queC PE=3 SV=1
MKTVAIFSGGLDSTVLAHELLAAGDEVLLLSIDYGQRHRKELVFAENFAKKQGLVWKLADLKSIAGLLGGNSQTSSAVAVPHGHYAEENMKLTVVPNRNMIMLAVAGGWAVSEKADRLAYGAHAGDHTIYPDCRPEFVRAMAAALELCDWHKLAMFTPFVSRSKADIVRRGAELGVDFAATWSCYEGGEIHCGQCGTCYERREAFERAGVADPTHYAVRAKYAEPPNFS

SEQ ID NO: 40892 - protein, 172 aa, Piscirickettsia litoralis
  misc_feature (1)..(172): tr|A0A1E3GB73|A0A1E3GB73_9GAMM 7-cyano-7-deazaguanine s ynthase OS=Piscirickettsia litoralis OX=1891921 GN=BGC0 7_03985 PE=3 SV=1
MQRKAVVLLSGGVHSSLCLHLARSQGYMPYALSLDIPKRSFQLESAQQVAQEVVVAEHQVVAMNENSLSESKELTYYSSLLSFAVNWAQTLSAQDIFIGIHPGEAHSLEFMMEWLQSYQELVNLTATTGIRIQTPLLFMSDKKRAQTAKQFDLTLPMSIQPKKKKFMERIFS

SEQ ID NO: 40893 - protein, 225 aa, Piscirickettsia litoralis
  misc_feature (1)..(225): tr|A0A1E3GE02|A0A1E3GE02_9GAMM 7-cyano-7-deazaguanine s ynthase OS=Piscirickettsia litoralis OX=1891921 GN=queC PE=3 SV=1
MTKKAVVLASGGLDSTTCIALAKSQGFEVYAMSFDYGQQHNAELDAVKRIVKKMAVKQHEIIKFSMDGIAQGSALTNSEIEVPDYQGDGEIPVTYVPARNTIFLSMALGWAEVLGAQDIFIGVSEVDYSGYPDCRPEYIEAFANMANLATKAGVEGNKLNIHAPLSHLSKAETIQLGLKLGVDYRLTVSCYRADHEGRACGQCDSCAYRKKGFIEAGVEDPTPYY

SEQ ID NO: 40894 - protein, 176 aa, Piscirickettsia salmonis
  misc_feature (1)..(176): tr|A0A0K2L2F8|A0A0K2L2F8_PISSA 7-cyano-7-deazaguanine s ynthase OS=Piscirickettsia salmonis OX=1238 GN=KU39_107 9 PE=3 SV=1
MQRKAIVLLSGGGYSSLCLYLARSQGYLPYALSLDIPKRHFQLDSAQQFARDVGVAEHQVIAMNENSLSDSKALTYYSSLLSFAVNWAQELSAQDIFIGLHPSAEHTLEYMVEWLQSYQELINLSSTTAIRIQTPLLFMSDKKREQTAEQFNLKLPEPVSKLKSKKKKFIQRIFSE

SEQ ID NO: 40895 - protein, 228 aa, Piscirickettsia salmonis
  misc_feature (1)..(228): tr|A0A0K2DXS1|A0A0K2DXS1_PISSA 7-cyano-7-deazaguanine s ynthase OS=Piscirickettsia salmonis OX=1238 GN=queC PE= 3 SV=1
MTNSVKKAVVLASGGLDSTTCIALAQSQGFDVYAMSFDYGQQHTAELDAVKRLVGAMGVKQHEVVKLTMGGVAKGSALTNHNIDVPDYKGDGEIPVTYVPARNTIFLSMALGWAEVLGSQDIFIGVSEVDYSGYPDCRPEYIEAFAKMANLATKVGTQGNKLNIHAPLSHLSKAQTIHAGLKLGVDYSLTVSCYRADHTGRACGQCDSCTYRKKGFIEAGVTDPTLYY

SEQ ID NO: 40896 - protein, 155 aa, Piscirickettsiaceae bacterium
  misc_feature (1)..(155): tr|A0A2A4SHQ3|A0A2A4SHQ3_9GAMM 7-cyano-7-deazaguanine s ynthase (Fragment) OS=Piscirickettsiaceae bacterium OX= 2030828 GN=queC PE=3 SV=1
MTSKIAVVLVSGGLDSVTVLAIAKQQGYQCYALSFDYGQRHSSELEAASKLAKYYDVVEHKTIKLGMGEFGGSALTDTLIDVPIEKTQGIPVTYVPARNTVFLSIALGWAEIVGAKDIFIGVNAVDYSGYPDCRPEFISAFEALANLATKVGVEE

SEQ ID NO: 40897 - protein, 224 aa, Piscirickettsiaceae bacterium
  misc_feature (1)..(224): tr|A0A2A4PM23|A0A2A4PM23_9GAMM 7-cyano-7-deazaguanine s ynthase OS=Piscirickettsiaceae bacterium OX=2030828 GN= queC PE=3 SV=1
MTTKRAVVLVSGGLDSATVLAMANTQGYECYALSFDYGQRHSSELEAASKLVKQSNVAEHKTIILGMGEFGGSALTDDNIDVPTEKSQGIPITYVPARNTVFLSIALGWAEVIEAKDIFIGVNAVDYSGYPDCRPEFISAFEKLANLATKVGVEEGGIRIHTPLIHLTKAQIIQKGHALNVDYSQTVSCYQANAKGEACGECESCQLRQQGFTKAKIADPTIYQ

SEQ ID NO: 40898 - protein, 235 aa, Planctomicrobium piriforme
  misc_feature (1)..(235): tr|A0A1I3D986|A0A1I3D986_9PLAN 7-cyano-7-deazaguanine s ynthase OS=Planctomicrobium piriforme OX=1576369 GN=que C PE=3 SV=1
MSSNLETTPRAVVLVSGGLDSATTLAIARHSGFDCYALSFDYGQRHRHELEAAKRVCSTIGVSEHAVVPLDLRQFGGSALTSEIAVPKDRDEKTMSAGIPVTYVPARNTVFLSIALAWAEVLGAFDLFIGVNAVDYSGYPDCRPEFIDRFERLANVATKAGVEGAGLFQIHTPLILLKKTEIIAKGIELGVDFGLTHSCYDPFPDGTPCGHCDSCKLRLAGFAEAGLADPLVYAS

SEQ ID NO: 40899 - protein, 396 aa, Planctomyces bekefii
  misc_feature (1)..(396): tr|A0A5C6M5P1|A0A5C6M5P1_9PLAN 7-cyano-7-deazaguanine s ynthase OS=Planctomyces bekefii OX=1653850 GN=E3A20_133 40 PE=3 SV=1
MCSILGGTKFNKKALEIYNNAKSRGKDFSGLIEYKGNWICNHRATPTNEIQYAESNQPFSYNGNIIVHNGTISNDKELGNKDGEIDSKIIAKIVETESLEKFRDSLLKLKGSYAIGCITSKGEIFLACNYKPLFYKKHKGEYYFSSLKEHLGKCKRVKPYSCINLKTNEKLEIKRYQPNNALIVCSGGLDSTSLIGYALKNHNKVTLLHFDYGCKATTKEIEAIKKIAEKLKIPYIIQKLNYNSMQGESPLFKEEKITNGIDGVEYAIEWVYARNLIMLSNAVGYAEANDYGYVYLGNNLEESGAYPDNEEQFILDFNKVLWGAVNNGYKVEIKMPLGNLMKKEIVQFGIDNNSPIELSWSCYNNEKHHCGECAPCYMRKKAFERSSNIDKTKYLK

SEQ ID NO: 40900 - protein, 225 aa, Planctomyces sp.
  misc_feature (1)..(225): tr|A0A142YGX9|A0A142YGX9_9PLAN 7-cyano-7-deazaguanine s ynthase OS=Planctomyces sp. SH-PL62 OX=1636152 GN=queC_ 2 PE=3 SV=1
MREDDTRTAAVLISGGIESAVLCATMLDEHPRVQPIYIRCGLRWEEVELASARAFLAAVARPGLARLVVLDEPIRDVYGPHWSTDGPEVPGAETPDEAVYLPGRNLLLTVKSALWCRLRGVATLTLGSLGSNPFPDSTDEFFRDLESVVGRALSGSPRLIRPFARLHKADVIRRGAGLPLHLTFSCIRPVAGLHCGLCNKCAERRDGFRDAEVPDRTRYAEPDRA

SEQ ID NO: 40901 - protein, 230 aa, Planctomyces sp.
  misc_feature (1)..(230): tr|A0A2E3GXM1|A0A2E3GXM1_9PLAN 7-cyano-7-deazaguanine s ynthase OS=Planctomyces sp. OX=37635 GN=queC PE=3 SV=1
MNAPRKAVVLLSGGLDSSTTLAIAREQGFELWAISFDYGQKHRFELDAARRLAQAFDVKKHVIVKIDLGAFGGSALTSDIEVPKDRSTDQMEAAIPITYVPARNTVFLSTALGWAETLDCSDLFIGVNAVDYSGYPDCRPEFVEAFARLANLATKTGVEGTADWKVHAPLIDLTKAEIIRKGTALGVDYAMTHTCYDPNEAGLACGHCDACQLRLQGFEQAGLSDPAAYQ

SEQ ID NO: 40902 - protein, 246 aa, Planctomycetaceae bacterium
  misc_feature (1)..(246): tr|A0A2E3X5D7|A0A2E3X5D7_9PLAN 7-cyano-7-deazaguanine s ynthase OS=Planctomycetaceae bacterium OX=2026779 GN=qu eC PE=3 SV=1
MNKASRKGEAIVLLSGGLDSATAAAWAVAEGYSVTAISFDYGQRHRIELQAAQAVANALGISDHVNLTIDLATFGGSALVDQSIAVPKNRSDDVISNGIPVTYVPARNTVFLSLALALAETRNASSLILGVNSIDYSGYPDCRPEFLHAFESLANLATKSGVEGTRFTIQAPLVSLTKPEIIRLGLSLNVDYGLTTSCYDPQDNGRPCGECDSCLIRAAGFAAVNIPDPRVTAFMAPKETNCGSDC

SEQ ID NO: 40903 - protein, 232 aa, Planctomycetaceae bacterium
  misc_feature (1)..(232): tr|A0A177PZN3|A0A177PZN3_9PLAN 7-cyano-7-deazaguanine s ynthase OS=Planctomycetaceae bacterium SCGC AG-212-D15 OX=1799653 GN=AYO40_04245 PE=3 SV=1
MLKREANSTSAAPLAVLVSGGLDSAILLGEAIQQRPAVFPLYVRSGMAWESVEFEHLQRYLQALACPVLRPLHALELPVTDVYDREHWSLSGAGVPDAHTKDEAVFLPGRNVLLLSKALIWCHLRGVPELAMAPLGSNPFPDATPAFFASFVEVVNRAVDGDVRLWLPYASLHKAEVMQRGRGLPLEMTFSCIRPRGGRHCGECNKCAERRQAFADAGMQDPTPYAEAPPEP

SEQ ID NO: 40904 - protein, 252 aa, Planctomycetales bacterium
  misc_feature (1)..(252): tr|A0A1V4QQU1|A0A1V4QQU1_9BACT 7-cyano-7-deazaguanine s ynthase OS=Planctomycetales bacterium 4484_123 OX=19561 62 GN=queC PE=3 SV=1
MQAETTRLAVVLLSGGVDSATTLAVAQDRGFACHALTFDYGQRHRFELDAARRVAEALGVVEHRIVRIDLSADGGFGRSALTDDIAVPKDRPGLPDGADDSADARSARRGERPAIPPTYVPARNTIFLSIALGYAEVIGSFDIFIGVNAIDYSGYPDCRGQFVEAFQRLANLATAAAVEGRGVFCIHAPLIDMTKGQIIRTGLALGVDYSLTHSCYDPAGDGSACGRCDACRLRLAGFAEAGAEDPARYQEG

SEQ ID NO: 40905 - protein, 233 aa, Planctomycetales bacterium
  misc_feature (1)..(233): tr|A0A354GU90|A0A354GU90_9BACT 7-cyano-7-deazaguanine s ynthase OS=Planctomycetales bacterium OX=2053591 GN=que C PE=3 SV=1
MDKSSLPAVVLLSGGLDSAVALAVARRDGFRCHALTIAYGQRHAVELDAARRVAAALGAVEQRVFSLDLRAFGGSALTADLDVPRDRNAEEMNSGIPITYVPARNTVFLSLALAWAETLGAFDLYIGVNAVDYSGYPDCRPEFTFAFEQLANLATKAGVEKQGRFHIHTPLVHLSKGEIIHLGLTLGVDFGLTHSCYDPAPDGAACGRCDSCRIRRDGFVAAGVPDPTRYALG

SEQ ID NO: 40906 - protein, 231 aa, Planctomycetes bacterium; identical to SEQ ID NO: 40869
  misc_feature (1)..(231): tr|A0A1G2Y7K2|A0A1G2Y7K2_9BACT 7-cyano-7-deazaguanine s ynthase OS=Planctomycetes bacterium GWF2_42_9 OX=180195 8 GN=queC PE=3 SV=1

SEQ ID NO: 40907 - protein, 249 aa, Planctomycetes bacterium
  misc_feature (1)..(249): tr|A0A518CH59|A0A518CH59_9BACT 7-cyano-7-deazaguanine s ynthase OS=Planctomycetes bacterium Pla110 OX=2528007 G N=queC PE=3 SV=1
MLANSLAPHLLLASFPMAASDKRAVVLVSGGLDSATVLAIARSQGYELFALSFRYGQRHSYELEAATNICSQFEVVRHETLDLDLRAFGGSALTAEIDVPKDRSEDEMSGGIPITYVPARNTIFLSIALGWAEVLKANDIFIGVNAVDYSGYPDCRPEFIKSFQQTANLATKTGVEGTDPFQIHTPLIDLTKAEIIHTGTKLGVDYSQTLSCYDPAPGGLACGHCDSCQLRRKGFADAGLPDPTKYVTA

SEQ ID NO: 40908 - protein, 227 aa, Planctomycetia bacterium
  misc_feature (1)..(227): tr|A0A257T8I1|A0A257T8I1_9BACT 7-cyano-7-deazaguanine s ynthase (Fragment) OS=Planctomycetia bacterium 21-64-5 OX=1970542 GN=B7Z73_17825 PE=3 SV=1
MSCNGRPSTIGVLASGGLDSSVLVAHLLDQGRRVQPIYIRFGSTWQEAEAAALRRFLAAVHGPLLQPLIVLEMPIGDLYGDHWSTTGRDVPGAETPDEAVYLPGRNLLLIVKAALWCQLNGIGQLALAPLRSNPFADATPAFFAEFEAVLNRAEGTGLSLLRPFAELGKRQVMQLGRAYPLHLTFSCIAPRRGLHCGACNKCAERQQAFRLIDQNDRTKYERPGVRR

SEQ ID NO: 40909 - protein, 228 aa, Planctomycetia bacterium
  misc_feature (1)..(228): tr|A0A3D3KM36|A0A3D3KM36_9BACT 7-cyano-7-deazaguanine s ynthase OS=Planctomycetia bacterium OX=2052181 GN=queC PE=3 SV=1
MKAGLAVVLLSGGMDSCVTAAIANESFELACLHVNYKQRTEARELRAFNDIASYYGVPKEKRLIIDMAYLGAIGGSSLTDTRIAVPTSTATANKVPSTYVPFRNTHLLMAAVSWAEVIGAEKVFIGAVEDDRIGYPDCRKEYYDIFNALVDAGTKPDTHITVETPLINMKKSDIVRMGMSLGAPFSLSWSCYQEKDRACGRCQSCLLRREAFNEAGYTDPIPYRTNSP

SEQ ID NO: 40910 - protein, 243 aa, Planctopirus ephydatiae
  misc_feature (1)..(243): tr|A0A518GQF6|A0A518GQF6_9PLAN 7-cyano-7-deazaguanine s ynthase OS=Planctopirus ephydatiae OX=2528019 GN=queC P E=3 SV=1
MALGNQEASAAPPQRMSPPCVVLVSGGLDSATILAMAKAQGFSPFAISFDYGQRHRFELEAAKRVCEAQGVARHVIIPLDLRSIGGSALTANIDVPKDRTDAELTSGIPITYVPARNTVFLSIALGWAEVIGAQDLFVGVNAVDYSGYPDCRPEFVAAFEKLANLATQTGVEGQPWKIHAPLIHLTKAEIIRQGVALGVDYSLTHSCYDPTSTGLSCGHCDSCLIRKKGFLEAHVPDPTRYAD

SEQ ID NO: 40911 - protein, 243 aa, Planctopirus hydrillae
  misc_feature (1)..(243): tr|A0A1C3EHP7|A0A1C3EHP7_9PLAN 7-cyano-7-deazaguanine s ynthase OS=Planctopirus hydrillae OX=1841610 GN=queC PE =3 SV=1
MVLGNQEATTSSPQKISPPCVVLVSGGLDSATILAMAKAQGFSPFAISFDYGQRHRFELEAAKKVCEAQGVARHVIIPLDLRSIGGSALTANIDVPKDRTDAELTSGIPITYVPARNTVFLSIALGWAEVIGAQDLFVGVNAVDYSGYPDCRPEFVAAFEKLANLATQTGVEGQPWKIHAPLIHLTKAEIIRQGVALGVDYSLTHSCYDPTSTGLSCGHCDSCLIRKKGFLEAHIPDPTRYAD

SEQ ID NO: 40912 - protein, 244 aa, Planctopirus limnophila
  misc_feature (1)..(244): tr|D5SXT5|D5SXT5_PLAL2 7-cyano-7-deazaguanine synthase OS=Planctopirus limnophila (strain ATCC 43296 / DSM 377 6 / IFAM 1008 / 290) OX=521674 GN=queC PE=3 SV=1
MALDHQKASTAPPQKKISPPCVVLVSGGLDSATILAMAKAQGFSPFAISFDYGQRHRFELEAAEKVCQAQGVARHVVIPLDMRSIGGSALTANIDVPKDRSEAELTSGIPITYVPARNTVFLSIALGWAEVIGAQDLFVGVNAVDYSGYPDCRPEFVAAFEKLANLATQTGVEGQPWKIHAPLIHLTKAEIIRQGVALGVDYSLTHSCYDPTPTGLSCGHCDSCLIRKKGFLEAHIPDPTRYAD

SEQ ID NO: 40913 - protein, 230 aa, Planifilum fimeticola
  misc_feature (1)..(230): tr|A0A2T0LII4|A0A2T0LII4_9BACL 7-cyano-7-deazaguanine s ynthase OS=Planifilum fimeticola OX=201975 GN=queC PE=3 SV=1
MSDKAVVILSGGLDSTTCMAVAADEGFEIYALTFDYGQRHRREVDCARRVAEHFGAREHRIVQLDLLQHIGGSSLTDSRMEIPSGETGEEIPNTYVPGRNLIFLSLAASFAEVVGARAIFIGVSAVDYSGYPDCRPEFIEAVNRVLRVGTRAGTRSEPIEIRTPLIRLSKAETVKLGHRLGAPYHLTTSCYRGGERACGVCDSCRLRLKGFREAGIIDPIPYEERPADLS

SEQ ID NO: 40914 - protein, 230 aa, Planifilum fulgidum
  misc_feature (1)..(230): tr|A0A1I2M5P2|A0A1I2M5P2_9BACL 7-cyano-7-deazaguanine s ynthase OS=Planifilum fulgidum OX=201973 GN=queC PE=3 S V=1
MPDKAVVILSGGLDSTTCMAVAADEGFDIYALTFDYGQRHRREVDCARRVAAHFGAREHRIVNLDFLKQIGGSSLTDSRMDIPSGGAGDDIPNTYVPGRNLIFLSLAASFAEVIGARAIFIGVSAVDYSGYPDCRPQFIEAVNRVLRVGTRAGDRSEPIEIRTPLIHLSKAETIKLGHRLGAPYHLTTSCYRGGERACGECDSCRLRLKGFREAGIIDPIPYEKRPGDPS

SEQ ID NO: 40915 - protein, 224 aa, Planktothricoides sp.
  misc_feature (1)..(224): tr|A0A0M1JWN3|A0A0M1JWN3_9CYAN 7-cyano-7-deazaguanine s ynthase OS=Planktothricoides sp. SR001 OX=1705388 GN=qu eC PE=3 SV=1
MKAVILLSGGLDSSTVLYQAKADGCECYAISFDYQQRHRRELDSAAAIARVAGVVAHQVITFDLRQWGGSALTDDGIDLPEGRSLSEMASQIPVTYVPARNTIFLSFALAYAEAIAAERVYIGVNALDYSGYPDCRPDYIQAMQEVFRLGTKQGREGQAIAIISPLLELHKTEIIQLGNKLGVPWQHTWSCYAGEEKACGVCDSCQLRLAAFAELGLSDPLPYR

SEQ ID NO: 40916 - protein, 228 aa, Planktothrix agardhii
  misc_feature (1)..(228): tr|A0A2Z6CDV5|A0A2Z6CDV5_PLAAG 7-cyano-7-deazaguanine s ynthase OS=Planktothrix agardhii NIES-204 OX=282423 GN= queC PE=3 SV=1
MKAVILLSGGLDSSTVLYQAKADGCECYAISFDYQQRHSKELESARKIAEFAGVVEHQVVTFDLSLWGGSALTDNRLDLPQDRSTEIMAGSIPITYVPARNTIFLSFALAYAEAIAARKVYIGVNALDYSGYPDCRPDYIQAIEEVFRLGTKQGREGDPITIESPLIHLAKTEIIKLGNRLGVPWEFTWSCYAGEEKACGVCDSCRLRLAAFAELELIDPIAYIAGNR

SEQ ID NO: 40917 - protein, 228 aa, Planktothrix agardhii; identical to SEQ ID NO: 40916
  misc_feature (1)..(228): tr|A0A073CNH5|A0A073CNH5_PLAAG 7-cyano-7-deazaguanine s ynthase OS=Planktothrix agardhii NIVA-CYA 126/8 OX=3884 67 GN=exsB PE=3 SV=1

SEQ ID NO: 40918 - protein, 228 aa, Planktothrix rubescens
  misc_feature (1)..(228): tr|A0A1J1L5X7|A0A1J1L5X7_PLARU 7-cyano-7-deazaguanine s ynthase OS=Planktothrix rubescens OX=59512 GN=queC PE=3 SV=1
MKAVILLSGGLDSSTVLYQAKADGCECYAISFDYQQRHRKELESARKIAEFAGVVEHQVVTFDLSLWGGSALTDNRLDLPQDRSPETMAGSIPITYVPARNTIFLSFALAYAEAIAARKVYIGVNVLDYSGYPDCRPDYIQAIEEVFRLGTKQGREGDPITIESPLIHLAKTEIIKLGNRLGVPWEFTWSCYAGEEQACGVCDSCRLRLAAFAELELIDPIAYIAGNG

SEQ ID NO: 40919 - protein, 478 aa, Planktothrix rubescens
  misc_feature (1)..(478): tr|A0A1J1L4B3|A0A1J1L4B3_PLARU Uncharacterized protein OS=Planktothrix rubescens OX=59512 GN=PLAN41139 PE=4 SV =1
MKKHYTYDSDYTLHFDSILNSNGKVRFIDHSSGKESTIGITVDDQDFKYRVWQEFPSIIADLIDLAVAIQASDRLVLQHLHQEQRHIFVVLPVRHPELLNTSIFHAKLENLLEWTTGSRWSFDFQKRTTLDRTIEKQQILPIVPEGCEVALWSGGLDALAGLYTRLQASDTEPFMLFGTGSNHNTHDLQQKVFKALNPYFPNRLNLCRVPIHFSDSKQHRKNKISRARGVVFTLLGSACAYLMGQKELFVYENGIGAINLPYRKSAVGLDHTRSVHPLTLIMVSDIVSELLGQEFRIKNPFLFWTKAQMCKALAEDDRNNLVSLTVSCDSPHRKKQIFQCGYCSSCLLRRQAIAASNMNDQTRYVVLHGEKPAGDPSLYLQNMLEQVTMLKKLLNNSTNPNLQWQNLTKRFLELEDIVDQSSESENLLPFQMQQRLIQLYQTYLSEWDAVEPQISVGMLDQENNHQISDQRLVTVQSS

SEQ ID NO: 40920 - protein, 226 aa, Planktothrix sp.
  misc_feature (1)..(226): tr|A0A3C1RPQ0|A0A3C1RPQ0_9CYAN 7-cyano-7-deazaguanine s ynthase OS=Planktothrix sp. UBA8407 OX=2055758 GN=queC PE=3 SV=1
MKAVILLSGGLDSSTVLYQAKADGCECYAISFDYQQRHRNELESARQIAESAGVVEHQIVSFDLSLWGGSALTDNRLDLPQNRTIEKMDESIPITYVPARNTIFLSFALAYAETIAASKIYLGVNALDYSGYPDCRPDYIQAMEEVFRLGTKQGREGDPITIESPLIHLKKTEIIKLGNRLGVPWGLTWSCYAGEEKACGICDSCRLRLTAFAELELTDPISYIDR

SEQ ID NO: 40921 - protein, 226 aa, Planktothrix sp.; identical to SEQ ID NO: 40920
  misc_feature (1)..(226): tr|A0A354WDL0|A0A354WDL0_9CYAN 7-cyano-7-deazaguanine s ynthase OS=Planktothrix sp. UBA10369 OX=2055760 GN=queC PE=3 SV=1

SEQ ID NO: 40922 - protein, 226 aa, Planktothrix tepida
  misc_feature (1)..(226): tr|A0A1J1LLA3|A0A1J1LLA3_9CYAN 7-cyano-7-deazaguanine s ynthase OS=Planktothrix tepida PCC 9214 OX=671072 GN=qu eC PE=3 SV=1
MKAVILLSGGLDSSTVLYQAKADGCECYAISFDYQQRHRKELESARKIAECAGVIERQVVTFDLTLWGGSALTDNHLDLPQDRSIEKMAESIPVTYVPARNTIFLSFALAYAEAIVASRVYIGVNALDYSGYPDCRPDYIQSMEEVFRLGTKQGREGNPITIESPLIHLKKTEIIQLGNHLGVPWEFTWSCYAGQTKACGTCDSCRLRLAAFSELGLTDPIPYIKS

SEQ ID NO: 40923 - protein, 221 aa, Planococcus antarcticus
  misc_feature (1)..(221): tr|A0A1C7DIT2|A0A1C7DIT2_9BACL 7-cyano-7-deazaguanine s ynthase OS=Planococcus antarcticus DSM 14505 OX=1185653 GN=queC PE=3 SV=1
MKNEKAVVVFSGGQDSTTCLFWAIMNFKEVATVTFDYGQRHSAEIECARKIAEELGVSFKVLDMSLINQLSANALTRDDIAITAEEDGLPSTFVPGRNHLFLSFAAVYADAIGSRHLITGVSQTDFSGYPDCRDTFIRSLNVTLNLAMDKQFIIHTPLMWLDKADVWELSDTLGALDFVQEKTLTCYNGIPSTGCGECPACKLRNEGLARYKSKKMAGAVE

SEQ ID NO: 40924 - protein, 220 aa, Planococcus citreus
  misc_feature (1)..(220): tr|A0A497YJA6|A0A497YJA6_9BACL 7-cyano-7-deazaguanine s ynthase OS=Planococcus citreus OX=1373 GN=queC PE=3 SV= 1
MKNEKAVVVFSGGQDSTTCLFWALEQFSEVLAVTFDYGQRHAQEIDHAKRIAETLGVTLQVLDMGLINQLSANALTRDSIEVEEQKDGPPSTFVPGRNLLFLSFAAIYADAFGARHLVTGVSETDFSGYPDCRDTFIRSLNVTLNLSMDKQFVIHTPLMWLDKAGVWELSDELGAFEFVQTETLTCYHGIPAAGCGTCPSCVLRNQGLQTYLSKKEGAKF

SEQ ID NO: 40925 - protein, 221 aa, Planococcus donghaensis
  misc_feature (1)..(221): tr|A0A1C7EJ83|A0A1C7EJ83_9BACL 7-cyano-7-deazaguanine s ynthase OS=Planococcus donghaensis OX=414778 GN=queC PE =3 SV=1
MKNEKAVVVFSGGQDSTTCLFWAIKNFKEVATVTFDYGQRHSAEIECARKIADELGVLFKVLDMTLINQLSANALTRDDIDVTAEEGELPSTFVPGRNLLFLSFAAVFADAIGSRHLITGVSQTDFSGYPDCRDTFIRSLNVTLNLAMDKQFIIHTPLMWLDKADVWELSDTLGALDFVQEKTLTCYNGIPSTGCGECPACQLRNEGLARYQAKKSAGAMT

SEQ ID NO: 40926 - protein, 221 aa, Planococcus donghaensis
  misc_feature (1)..(221): tr|E7RE93|E7RE93_9BACL 7-cyano-7-deazaguanine synthase OS=Planococcus donghaensis MPA1U2 OX=933115 GN=queC PE= 3 SV=1
MKNEKAVVVFSGGQDSTTCLFWAIKNFKEVATVTFDYGQRHSAEIECARKIADELGVLFKVLDMTLINQLSANALTRDDIEVTAEEGELPSTFVPGRNLLFLSFAAVYADAIGSRHLITGVSQTDFSGYPDCRDTFIRSLNVTLNLSMDKQFIIHTPLMWLDKADVWELSDTLGALDFVQEKTLTCYNGIPSTGCGECPACQLRNEGLARYQAKKSAGAMT

SEQ ID NO: 40927 - protein, 221 aa, Planococcus halocryophilus
  misc_feature (1)..(221): tr|A0A1C7DMI5|A0A1C7DMI5_9BACL 7-cyano-7-deazaguanine s ynthase OS=Planococcus halocryophilus OX=1215089 GN=que C PE=3 SV=1
MKNEKAVVVFSGGQDSTTCLFWAIKNFKEVATVTFDYGQRHSAEIECARKIADELGVLFKVLDMTLINQLSANALTRDDIEVTAEEGELPSTFVPGRNLLFLSFAAVYADAIGSRHLITGVSQTDFSGYPDCRDTFIRSLNVTLNLAMDKQFIIHTPLMWLDKADVWELSDTLGALDFVQEKTLTCYNGIPSTGCGECPACQLRTDGLARYQAKKMAGANT

SEQ ID NO: 40928 - protein, 221 aa, Planococcus halotolerans
  misc_feature (1)..(221): tr|A0A365L6N8|A0A365L6N8_9BACL 7-cyano-7-deazaguanine s ynthase OS=Planococcus halotolerans OX=2233542 GN=queC PE=3 SV=1
MKNEKAVVVFSGGQDSTTCLFWALSKFKEVTTITFDYGQRHAVEIEHAQKIAEELNVPFKVLDMQLINQLSANALTRNEIPINEEEGELPSTFVPGRNHLFLSFAAVYAQTIGAQHIITGVSETDFSGYPDCRDTFIKSLNVTLNLAMDAQFVLHTPLMWRDKKQVWELADRFGALEFVQEKTVTCYNGVPSSGCGECPACQLRNDGLEAYLAAKSGGAVK

SEQ ID NO: 40929 - protein, 221 aa, Planococcus kocurii
  misc_feature (1)..(221): tr|A0A0U2NBN1|A0A0U2NBN1_9BACL 7-cyano-7-deazaguanine s ynthase OS=Planococcus kocurii OX=1374 GN=queC PE=3 SV= 1
MKKEKAVVVFSGGQDSTTCLFWAIKNFKEVATVTFDYGQRHSAEIECARKIAEELGVSFKVLDMTLINQLSANALTRDDIDVTAEDGELPSTFVPGRNHLFLSFAAVYADAIGCQHLITGVSQTDFSGYPDCRDTFIRSLNVTLNLAMDKQFIIHTPLMWLDKTEVWELSDTLGAFEFIQDKTLTCYNGIPSTGCGECPACKLRNDGLARYQDKKMAGVRA

SEQ ID NO: 40930 - protein, 220 aa, Planococcus maitriensis
  misc_feature (1)..(220): tr|A0A365K2H9|A0A365K2H9_9BACL 7-cyano-7-deazaguanine s ynthase OS=Planococcus maitriensis OX=221799 GN=queC PE =3 SV=1
MKNEKAVVVFSGGQDSTTCLFWALGEFSEVLAVTFDYGQRHAQEIGHARRIAETLGVSLQVLDMGLINQLSANALTRKSIDVEEQEDGPPSTFVPGRNLLFLSFAAIYADAFGARHLVTGVSETDFSGYPDCRDTFIRSLNVTLNLSMDKQFVIHTPLMWLDKAGVWELSDKLGAFEFVQNETLTCYHGIPAAGCGTCPACALRNEGLQTYLSKKEGAKS

SEQ ID NO: 40931 - protein, 220 aa, Planococcus maritimus
  misc_feature (1)..(220): tr|A0A150W5E9|A0A150W5E9_PLAMR 7-cyano-7-deazaguanine s ynthase OS=Planococcus maritimus OX=192421 GN=queC PE=3 SV=1
MKNEKAVVVFSGGQDSTTCLFWALEQFSEVLAVTFDYGQRHVQEIEHAKHIAETLGVTLQVLDMGLINQLSANALTRDSIEVKEQSDGLPSTFVPGRNLLFLSFAAIYADAFGARHLVTGVSETDFSGYPDCRDTFIRSLNVTLNLSMDKQFVIHTPLMWLDKAGVWELSDQLGAFDFVQKETLTCYHGIPAEGCGTCPSCKLRNEGLQTYLSQKAGAKS

SEQ ID NO: 40932 - protein, 220 aa, Planococcus maritimus
  misc_feature (1)..(220): tr|A0A1C7DZL8|A0A1C7DZL8_PLAMR 7-cyano-7-deazaguanine s ynthase OS=Planococcus maritimus OX=192421 GN=queC PE=3 SV=1
MKNEKAVVVFSGGQDSTTCLFWALEQFSEVLAVTFDYGQRHVQEIEHAKHIAETLGVTLQVLDMGLINQLSANALTRDSIEVEEQSDGLPSTFVPGRNLLFLSFAAIYADAFGARHLITGVSETDFSGYPDCRDTFIRSLNVTLNLSMDKQFVIHTPLMWLDKAGVWELSDQLGAFDFVQKETLTCYHGIPAEGCGTCPSCRLRNEGLQTYLSQKAGAKS

SEQ ID NO: 40933 - protein, 220 aa, Planococcus plakortidis
  misc_feature (1)..(220): tr|A0A1C7E5U4|A0A1C7E5U4_9BACL 7-cyano-7-deazaguanine s ynthase OS=Planococcus plakortidis OX=1038856 GN=queC P E=3 SV=1
MKNEKAVVVFSGGQDSTTCLFWALEQFSEVLAVTFDYGQRHAQEIDHAKRIAEKLGVSLQVLDMGLINQLSANALTRDSIKVEEQQDGPPSTFVPGRNLLFLSFAAIYADAFGARHLVTGVSETDFSGYPDCRDTFIRSLNVSLNLSMDKQFVIHTPLMWLDKAGVWALSDELGAFDFVQDETLTCYHGIPASGCGTCPSCVLRNEGLQTYLSQKAGANS

SEQ ID NO: 40934 - protein, 220 aa, Planococcus rifietoensis
  misc_feature (1)..(220): tr|A0A0U2P9A9|A0A0U2P9A9_9BACL 7-cyano-7-deazaguanine s ynthase OS=Planococcus rifietoensis OX=200991 GN=queC P E=3 SV=1
MKNEKAVVVFSGGQDSTTCLFWALEQFSEVLAVTFDYGQRHSQEIDHAKRIAETLGVTLQVLDMGLINQLSANALTRDSIEVEEQKDGPPSTFVPGRNLLFLSFAAIYADAFGARHLVTGVSETDFSGYPDCRDTFIRSLNVTLNLSMDKQFVIHTPLMWLDKAGVWELSDELGAFEFVQTETLTCYHGIPAAGCGTCPSCVLRNQGLQTYLAKKEGAKS

SEQ ID NO: 40935 - protein, 221 aa, Planococcus salinus
  misc_feature (1)..(221): tr|A0A3M8PCE7|A0A3M8PCE7_9BACL 7-cyano-7-deazaguanine s ynthase OS=Planococcus salinus OX=1848460 GN=queC PE=3 SV=1
MKNEKAVVVFSGGQDSTTCLFWALENFGEVRAVTFDYGQRHSKEIECARKIAVELNVPFKVLDMTLINQLSANALTRDHIEVKTEEGGLPSTFVPGRNLLFLSFAAVYADAFGARHLITGVSETDFSGYPDCRDTFIKSLNVSLNLAMDKQFAIHTPLMWRDKAQVWELSDELGALDFVQEKTLTCYNGIPSTGCGECPACTLRNEGLAKYLTGKSAGAAK

SEQ ID NO: 40936 - protein, 221 aa, Planococcus sp.
  misc_feature (1)..(221): tr|A0A5C5T5A1|A0A5C5T5A1_9BACL 7-cyano-7-deazaguanine s ynthase OS=Planococcus sp. CPCC 101016 OX=2599617 GN=qu eC PE=3 SV=1
MKNEKAVVVFSGGQDSTTCLFWAIKNFKEVATVTFDYGQRHSAEIECARKIADELGVSFKVLDMTLINQLSANALTRDDIEVTAEEGALPSTFVPGRNHLFLSFAAVYADAIGSRHLITGVSQTDFSGYPDCRDTFIRSLNVTLNLAMDKQFIIHTPLMWLDKADVWELSDTLGALDFVQEKTLTCYNGIPSTGCGECPACLLRNEGLARYKAKKLAGAVE

SEQ ID NO: 40937 - protein, 221 aa, Planococcus sp.; identical to SEQ ID NO: 40929
  misc_feature (1)..(221): tr|A0A5B0CW67|A0A5B0CW67_9BACL 7-cyano-7-deazaguanine s ynthase OS=Planococcus sp. ANT_H30 OX=2597347 GN=queC P E=3 SV=1

SEQ ID NO: 40938 - protein, 362 aa, Planomicrobium glaciei; identical to SEQ ID NO: 24083
  misc_feature (1)..(362): tr|A0A518XPQ4|A0A518XPQ4_9BACL 7-cyano-7-deazaguanine s ynthase OS=Planomicrobium glaciei OX=459472 GN=queC PE= 3 SV=1

SEQ ID NO: 40939 - protein, 221 aa, Planomicrobium glaciei
  misc_feature (1)..(221): tr|A0A1G8GVY5|A0A1G8GVY5_9BACL 7-cyano-7-deazaguanine s ynthase OS=Planomicrobium glaciei OX=459472 GN=queC PE= 3 SV=1
MKNEKAVVVFSGGQDSTTCLFWALKNFKEVATVTFDYGQRHSAEIECARKIAEELGVSFKVLDMTLINQLSANALTRDDIEVTATEGELPSTFVPGRNHLFLSFAAVYADAIGARHLITGVSETDFSGYPDCRDTFIKSLNVSLNLAMDKQFVIHTPLMWLDKSEVWELSDQLDALDFVQEKTLTCYNGIPSSGCGECPSCILRNEGLSAYKAKKAAGAHL

SEQ ID NO: 40940 - protein, 221 aa, Planomicrobium soli
  misc_feature (1)..(221): tr|A0A2P8GAP5|A0A2P8GAP5_9BACL 7-cyano-7-deazaguanine s ynthase OS=Planomicrobium soli OX=1176648 GN=queC PE=3 SV=1
MKNEKAVVVFSGGQDSTTCLFWALQNFGEVATVTFDYGQRHSAEIEVARKIADELGVKFKVLDMTLINQLSANALTRADIDITAKEGELPSTFVPGRNLLFLSFAAVYADAIGSRHLITGVSETDFSGYPDCRDTFIRSLNVSLNLAMDKQFIIHTPLMWLDKAGVWELSDGLGALEFVQEKTLTCYEGIPSTGCGECPSCKLRNEGLKTYLVQKAAGAVE

SEQ ID NO: 40941 - protein, 221 aa, Planomicrobium sp.
  misc_feature (1)..(221): tr|A0A3L7JHT5|A0A3L7JHT5_9BACL 7-cyano-7-deazaguanine s ynthase OS=Planomicrobium sp. Y74 OX=2478977 GN=queC PE =3 SV=1
MKNEKAVVVFSGGQDSTTCLFWALSKFKEVSTITFDYGQRHAVEIEHAQKIAEELDVPFKVLDMQLINQLSANALTREEIPINEEEGELPSTFVPGRNHLFLSFAAVYAQTVGAQHIVTGVSETDFSGYPDCRDTFIKSLNVSLNLAMDAQFVIHTPLMWRDKKQVWELADRFGALEFVQEKTVTCYNGVPSSGCGECPACQLRNDGLEAYLAAKSGGAVK

SEQ ID NO: 40942 - protein, 221 aa, Planomicrobium sp.
  misc_feature (1)..(221): tr|A0A5C5ULA8|A0A5C5ULA8_9BACL 7-cyano-7-deazaguanine s ynthase OS=Planomicrobium sp. CPCC 101110 OX=2599619 GN =queC PE=3 SV=1
MKNEKAVVVFSGGQDSTTCLFWALQNFGEVATVTFDYGQRHSAEIEVARKIADELGVKFKVLDMTLINQLSANALTRDDIDITAEEGELPSTFVPGRNLLFLSFAAVYADAIGSRHLITGVSETDFSGYPDCRDTFIRSLNVSLNLAMDKQFIIHTPLMWLDKAGVWELSDELGALEFVQEKTLTCYEGIPSTGCGECPSCKLRNEGLKTYLEQKTAGAVE

SEQ ID NO: 40943 - protein, 219 aa, Planomonospora sphaerica
  misc_feature (1)..(219): tr|A0A171DIQ7|A0A171DIQ7_9ACTN 7-cyano-7-deazaguanine s ynthase OS=Planomonospora sphaerica OX=161355 GN=PS9374 _04436 PE=3 SV=1
MTTENRAVALLSGGPDSVVAAALARESGYRIYGLYINYGQRTGKRDFRQAERTAQWLGVEELRVAYCPFLGKVGGSPLTDLSLRLGDDNRSSEYVPFRNTVFCSLAVAWAEILGAQKVVIGSIGGPWITPDNKPSYFAALNALIQEGSRSEIQAWAPLGAMSKAEVVSVGTRLGVPFGLTWSCQNDEEEPCGECNNCRDRAVGFAGNNLADPLLARTPR

SEQ ID NO: 40944 - protein, 212 aa, Plantibacter flavus
  misc_feature (1)..(212): tr|A0A4U3FP36|A0A4U3FP36_9MICO 7-cyano-7-deazaguanine s ynthase OS=Plantibacter flavus OX=150123 GN=PlfCFBP1351 3_17100 PE=3 SV=1
MVHAERSVLLFSGGLDSTALAAIYRPALLLFIDYGQRPADLERRSARRVAEVLSLPLAEESLGIQAFGSGLLQTESGAQLDAAPSPEWWPYRNQFLATAGAAVALREELSAVLLGSVAPDGERHLDGTPEFYRRLNALMHFQEGAVEVLAPAINRTTEELLDSSGLEEDVLGWTASCHRSNLSCGQCPGCWKRMRVLAARGISGYEWGSGHE

SEQ ID NO: 40945 - protein, 230 aa, Plasticicumulans acidivorans
  misc_feature (1)..(230): tr|A0A317MYP0|A0A317MYP0_9GAMM 7-cyano-7-deazaguanine s ynthase OS=Plasticicumulans acidivorans OX=886464 GN=qu eC PE=3 SV=1
MPNRSRALVVLSGGQDSTTCLYWALAQFGAEAVEAVSFDYGQRHRIELECAAHIAAMAGVPHTVLPINTFAALGGNALTAGDIAVQPGVQANGLPNTFVPGRNLVFLSFAAALAYQRQCSELVTGVAQTDYSGYPDCRWQTIQALQAALRLGMEFELTIHTPLMFKSKADTVRMAQEFGALSALAWSHTCYNGQQPPCGVCPACELRANGFAEAGIPDPLIERLRAEGRL

SEQ ID NO: 40946 - protein, 226 aa, Plasticicumulans lactativorans
  misc_feature (1)..(226): tr|A0A4R2L6S3|A0A4R2L6S3_9GAMM 7-cyano-7-deazaguanine s ynthase OS=Plasticicumulans lactativorans OX=1133106 GN =queC PE=3 SV=1
MPRCLVVLSGGQDSTTCLYWSLARFGAANVDTVTFDYGQRHRIELDCARAIAALAGVPHTVLPIDTFAALGGNALTESAIAVQAGVEADGLPNTFVPGRNLIFLTFAAALAYRRGITELVTGVAQTDYSGYPDCREATIRALQQALRLGMEWEGTLHTPLMFLSKADTVRLARDLGALPALALSHTCYNGVQPPCGVCPACRLRAQGFTEAGIPDPLLERFGGAAA

SEQ ID NO: 40947 - protein, 231 aa, Plautia stali
  misc_feature (1)..(231): tr|U3U5X5|U3U5X5_9ENTR 7-cyano-7-deazaguanine synthase OS=Plautia stali symbiont OX=891974 GN=queC PE=3 SV=1
MKRAVVVFSGGQDSTTCLIQALQQYDEVHCVTFDYGQRHREEISVAAQLAHQLGARAHKVLDVTLLNELAVSSLTRDSIPVPAYNPQASGLPSTFVPGRNILFLTLASIYAYQVEAEAVITGVCETDFSGYPDCRDEFVKALNNAVSLGMAREVRFETPLMWLNKAETWALADYWQQLPLVRSETLTCYNGVKGDGCGECAACHLRARGLADYRANAASVMAAMKQKSGLR

SEQ ID NO: 40948 - protein, 223 aa, Pleionea mediterranea
  misc_feature (1)..(223): tr|A0A316G2U2|A0A316G2U2_9GAMM 7-cyano-7-deazaguanine s ynthase OS=Pleionea mediterranea OX=523701 GN=queC PE=3 SV=1
MKKAIVLLSGGLDSTTCLAIAKDAGYACYGLSFSYGQRHSAELEAAKRIAKQANVASHRIIPIDLGGFGGSALTDDNIDVPESEADGIPVTYVPARNTVFLSIGLAWAEVLQADAIYAGVNAVDYSGYPDCRPEYIDAFQKMADLATKAGIEGQGAKLETPLIDKTKVEIIQWGNRLSVDYSKTVSCYQADSNGRACGRCDSCRIRAEAFKQAKLPDPTVYID

SEQ ID NO: 40949 - protein, 239 aa, Plesiocystis pacifica
  misc_feature (1)..(239): tr|A6GH14|A6GH14_9DELT 7-cyano-7-deazaguanine synthase OS=Plesiocystis pacifica SIR-1 OX=391625 GN=queC PE=3 S V=1
MVLLSGGLDSTTVLAIAAREAGQRVHALSFAYGQRHALELGCAARQARRFDAAAHEVVDLSHLGRLVAPATSLVAASELAVPDAEARQRQLERGEAEAIPSTYVPARNTLFLSYALAWAEVVGARDIWLGVNAVDYSGYPDCRPEFVAAFEAMARLATKATDVRVRAPLIDLEKGAIIERGLGLGVDYGDTTSCYDPSSVGEPGSADERPLACGRCESCMLRRQGFAAAGVEDPTRYAD

SEQ ID NO: 40950 - protein, 230 aa, Plesiomonas shigelloides
  misc_feature (1)..(230): tr|A0A2P1VL51|A0A2P1VL51_PLESH 7-cyano-7-deazaguanine s ynthase OS=Plesiomonas shigelloides OX=703 GN=queC PE=3 SV=1
MSTTVVIFSGGQDSTTCLVQALTQYEHVHCITFDYGQRHRAEIDVARKLAQKLGVTAHKVMDVTLLNELAISSLTRDNIPVPTECSEGVPNTFVPGRNILFLTLAAIYAYQIGAESIITGVCETDFSGYPDCRDEFVKALHHAVNLGMARDIRFDTPLMWLDKAETWALADYYDALETVRHETLTCYNAVQGDGCGECPACHLRARGLHTYLADKDAITLSMLQKTGLSA

SEQ ID NO: 40951 - protein, 230 aa, Plesiomonas shigelloides
  misc_feature (1)..(230): tr|R8AP32|R8AP32_PLESH 7-cyano-7-deazaguanine synthase OS=Plesiomonas shigelloides 302-73 OX=1315976 GN=queC P E=3 SV=1
MSTTVVIFSGGQDSTTCLVQALTQYEHVHCITFDYGQRHRAEIDVARKLAQKLGVTAHKVMDVTLLNELAISSLTRDNIPVPTECSEGVPNTFVPGRNILFLTLAAIYAYQIGAESIITGVCETDFSGYPDCRDEFVKALHHAVNLGMARDIRFDTPLMWLDKAETWALADYYGALETVRHETLTCYNAVQGDGCGECPACHLRARGLHTYLADKDAITRSMLQKTGLRA

SEQ ID NO: 40952 - protein, 230 aa, Pleurocapsa sp.
  misc_feature (1)..(230): tr|A0A2T1CS65|A0A2T1CS65_9CYAN 7-cyano-7-deazaguanine s ynthase OS=Pleurocapsa sp. CCALA 161 OX=2107688 GN=queC PE=3 SV=1
MNKAVVLLSGGLDSATTAAIAIAQGYQVIALSFRYGQRHAKELAAAKKIAEALGITEHFITDIDLSQWGGSSLTDQSMAIPQGGLQPDIIPSTYVPGRNTVFLAIALSLAEAKNAQAIYLGINAIDYSGYPDCRPEYLAAYQKLANLSSKAGVEGNAPQLVAPLVEDSKVDIVRRALELNVPIADTWSCYQGVVNPCGLCDSCRIRDRALIEAGRSDLTSDQVNERSFKL

SEQ ID NO: 40953 - protein, 248 aa, Pleurocapsa sp.
  misc_feature (1)..(248): tr|K9T7Q9|K9T7Q9_9CYAN 7-cyano-7-deazaguanine synthase OS=Pleurocapsa sp. PCC 7327 OX=118163 GN=queC PE=3 SV=1
MPVERSIEEESLTVVSKAVVLLSGGLDSATTAAIAIADGYEVIALSFRYGQRHERELAAATKIAKTLGIKEHYTVDVNLSQWGGSALTDVSLEVPKDGVRADIIPATYVPGRNTVFIAIALSLAEAKGAEAIYLGINAVDYSGYPDCRPEYLEAYQQLANLSSKIGVEGKAPRLVAPLVKDSKVEIVRRALRLGVPIQDTWSCYQGGEDPCGVCDSCRIRDRALIEADVAELATPTGRELYYAEEMKG

SEQ ID NO: 40954 - protein, 231 aa, Pluralibacter gergoviae
  misc_feature (1)..(231): tr|A0A1Y4XYF4|A0A1Y4XYF4_PLUGE 7-cyano-7-deazaguanine s ynthase OS=Pluralibacter gergoviae OX=61647 GN=queC PE= 3 SV=1
MKRAVVVFSGGQDSTTCLIQALQQYDEVHCVTFDYGQRHRAEIDVARELAKKLGARAHKVLDVNLLGELAVSSLTRDSIPVPDYAPDASGIPNTFVPGRNILFLTLTAIYAYQVQAEAVITGVCETDFSGYPDCRDEFVKALNHAVNLGMAKEVRFETPLMWLDKAETWALADYWGQLDLVRHETLTCYNGIKGDGCGQCAACNLRANGLNHYLADKTGVTAAMKEKAGLQ

SEQ ID NO: 40955 - protein, 231 aa, Pluralibacter gergoviae
  misc_feature (1)..(231): tr|A0A0J5MDR8|A0A0J5MDR8_PLUGE 7-cyano-7-deazaguanine s ynthase OS=Pluralibacter gergoviae OX=61647 GN=queC PE= 3 SV=1
MKRAVVVFSGGQDSTTCLIQALQQYDEVHCVTFDYGQRHRAEIDVARQLAKKLGARAHKVLDVNLLGELAVSSLTRDSIPVPDYAPDASGIPNTFVPGRNILFLTLTAIYAYQVQAEAVITGVCETDFSGYPDCRDEFVKALNHAVNLGMAKEVRFETPLMWLDKAETWALADYWGQLDLVRHETLTCYNGIKGDGCGQCAACNLRANGLNHYLADKTGVTAAMKEKAGLQ

SEQ ID NO: 40956 - protein, 220 aa, Pokkaliibacter plantistimulans
  misc_feature (1)..(220): tr|A0A318C941|A0A318C941_9GAMM 7-cyano-7-deazaguanine s ynthase OS=Pokkaliibacter plantistimulans OX=1635171 GN =queC PE=3 SV=1
MKDKVVVIYSGGMDSFTVLHRALRDGYEVYPLSFNYGQRHARELLVAEEVCNSLSLSHKVVDIRAINSLLAGSSLTDDIDIPEGHYAADNMKSTVVPNRNMILLSLAIGYAVSIGARKVMYGAHSGDHTIYPDCRPEFVEKMNDVAQIANFESVQVVSPYLYKNKIDILADGLRMGLDYSKTWTCYNGRELSCGKCGSCQERLEAFQLNGVKDPLDYEQA

SEQ ID NO: 40957 - protein, 534 aa, Polaribacter dokdonensis
  misc_feature (1)..(534): tr|A0A0N0UN79|A0A0N0UN79_9FLAO Asparagine synthetase re lated protein OS=Polaribacter dokdonensis DSW-5 OX=1300 348 GN=I602_484 PE=4 SV=1
MLTNKNIYLKFNLGFKWYSSKSIAVKGYFYVDDVFYEKEEALNYLDKNLTHNNRKDIFERLNGVFTILISEGDHLEMVCDVTRLFPLFYTIKNDILFVSDDIQLLKSKIKTNQFDKLSKLEFKASNHTHCNKTLLKNIFQLEASKYLIFNKINILNNQFLFHYSIKKESSNSFKKLKSEAIQTIESTFLRFLKSINNKTILLPLSGGFDSRLLAVFLKKHNYKNVICFTYGRKQNFEVENSKKTAKQLGYKWFFIEYSTELIANFLETNEFLEYAHFAGKYSSMPYLQEYFAVKYLKEELNVPNDSIVVPGFAGDFLGGSEYNKVSTNLKTEKIADAILNIKLNNFKVSNSEKSKLKEVMENNVLKIDKRYETKIPSTVFEDYVLKERIAKYIFNSASYYLYFGFEVRFPYWDLELLNFFKELPIQYKKMKKFYDDVLTSEYFEKHKVNFENEIQPKSSDLVKQRIKDKIKPLLTDSLKAKILKKHDWNNYEPITKQMLLQIKQNGLNVNRSYKDYNEIISQWYIYFCENKLQN

SEQ ID NO: 40958 - protein, 530 aa, Polaribacter filamentus
  misc_feature (1)..(530): tr|A0A2S7L1G2|A0A2S7L1G2_9FLAO Asparagine synthase OS=P olaribacter filamentus OX=53483 GN=BST83_02400 PE=4 SV= 1
MNITLKHNKGFQWFKNDSLFFKGYFYVDAVFYEKENAFNYLSSISNRYGFKEILKKLNGVFTILIVDDHSLYVASDLTRSFPIFYTFQNYKIFLSDDIFHLKDTFELDDFDPLSEIEFKACNHTHGKKTLLKNVFQVQASEYVIIENNEIIESDFFYSYAIKKESSDTYQTLKDNAVFAFENTFNRFIDSLQNRTVVIPLSGGFDSRLIAVMLKKYNYKNVLCYTYGRKNSFEIENSKKTAEQLNFKWIFIEYDTQLIDGYLKTTEFKEYAQFAGKLSSMPNLQEYFAVKYLKEKNLIPEDSIFIPGYAGDLLGGSQFLKVIPENLKHTEIADLIIKQKFTNYPLSASDKKILKSEVEKKLVRFDKNYLEKIPSSVFEDYDLKEKIAKYIFNSANFYTYFGFEHRFPFWDKELLDFFKKVSVKNKLMKTFFDDVLINNYFVPNNIYFESELQPSEKTIHTQKIKEKIKPILPTFIKQKFLLKNDWNNYKPITDKMLDSISVNELKVYQLCKNYNEIITQWYLYFSKNKIK

SEQ ID NO: 40959 - protein, 239 aa, Polaromonas naphthalenivorans
  misc_feature (1)..(239): sp|A1VJX7|QUEC_POLNA 7-cyano-7-deazaguanine synthase OS =Polaromonas naphthalenivorans (strain CJ2) OX=365044 G N=queC PE=3 SV=2
MPAPVSRAHTSALVLFSGGQDSTTCLAQALAKYERVETIAFDYGQRHKVELQARLNVLRELKSQFPQWAAKLGEDHLLDLAVLGQVSDCSLTRDVAFKMESSGLPNTFVPGRNLLFLTLAAALAYRRDLQVLVTGVCETDFSGYPDCRDDTMKAMQLALSLGMDKRFLIETPLMWIDKADTWALAESLGGQPLVELIIEHTHTCYLGDRIHRHAWGYGCGQCPACELRARGYARYAEAA

SEQ ID NO: 40960 - protein, 235 aa, Polaromonas sp.
  misc_feature (1)..(235): tr|A0A1S8FKV6|A0A1S8FKV6_9BURK 7-cyano-7-deazaguanine s ynthase OS=Polaromonas sp. A23 OX=1944133 GN=queC PE=3 SV=1
MHTTALVLFSGGQDSTTCLAQALSKYERVETVGFDYGQRHSVELQARLVVLREIRAQFPQWAHKLGEDHFLDLAVLGQVSETSLTRDTAFKMESSGLPNTFVPGRNLLFLTLAAALAYRRDLQVLVTGVCETDFSGYPDCRDDTMKAMQLALSLGMDKRFLIDTPLMWIDKAATWALAESLGGRELVDLIIEHTHTCYLGDREHRHAWGYGCGQCPACELRLRGYAAYAAALSKP

SEQ ID NO: 40961 - protein, 235 aa, Polaromonas sp.
  misc_feature (1)..(235): sp|Q12FK2|QUEC_POLSJ 7-cyano-7-deazaguanine synthase OS =Polaromonas sp. (strain JS666 / ATCC BAA-500) OX=29659 1 GN=queC PE=3 SV=1
MHTSALVLFSGGQDSTTCLAQALSKYERVETVAFDYGQRHKVELDARLNVLREIKSRFPHWAPKLGEDHLLDLAVLGQVSDTSLTRDVAFKMENSGLPNTFVPGRNLLFLTLAAALAYRRDLQVLVTGVCETDFSGYPDCRDDTIKAMQLALSLGMDKRFLIETPLMWIDKADTWRLAHALGGQALVDLIIEHTHTCYLGDRTHRQAWGYGCGACPACELRARGYERYAAALSKP

SEQ ID NO: 40962 - protein, 229 aa, [Polyangium] brachysporum
  misc_feature (1)..(229): tr|A0A0G3BCI7|A0A0G3BCI7_9BURK 7-cyano-7-deazaguanine s ynthase OS=[Polyangium] brachysporum OX=413882 GN=queC PE=3 SV=1
MLFSGGQDSTACLAWALQRYAQVETVGFDYGQRHRIELDCRPRVLNELRARFPKWAARLGPDHLLDLSLLGQISDTALTSQRAIEMADSGLPNTFVPGRNLLFLSFAATLAYRRGAAVLVGGMCETDYSGYPDCRDNTLKALQVALSLGMDRPLVIETPLMWLDKAQTWALSHTLGGDALNELIVEHTHTCYLGERGQRHPWGHGCGSCPACELRRRGYEGYLARDANP

SEQ ID NO: 40963 - protein, 229 aa, Polycyclovorans sp.
  misc_feature (1)..(229): tr|A0A2E2JB63|A0A2E2JB63_9GAMM 7-cyano-7-deazaguanine s ynthase OS=Polycyclovorans sp. OX=2024852 GN=queC PE=3 SV=1
MTAVQGERRAVVLLSGGLDSATVLAEVVHQGYRAYALSVAYGQRHSAELAASEAIAAHFGAAAHQVLTVDVGRFGGSALTDQRIAVPENGADEGIPVTYVPARNTLFLSLALGWAEVLDAEAIFIGVNAVDYSGYPDCRPAFIEAFSALAAVATKSGVEGHGPRIEAPLLTLSKAQIITRGTALGVPWPLTVSCYQADSQGRACGRCDSCRLRREGFLAAGQVDPTRYQ

SEQ ID NO: 40964 - protein, 223 aa, Polymorphobacter sp.
  misc_feature (1)..(223): tr|A0A4Y9ESE2|A0A4Y9ESE2_9SPHN 7-cyano-7-deazaguanine s ynthase OS=Polymorphobacter sp. DJ1R-1 OX=2511025 GN=qu eC PE=3 SV=1
MTAPLAVVLLSGGLDSTTVAAIARERGYRILALTIDYNQRHRIELQAAASVAAALGAERHIVLPLDLRGFGGSALTADIDVPKLGVEPGIPVTYVPARNTIFLSVALGWAEAAGAFDLFIGVNALDYSGYPDCRPEFIAAFENLANTATKAGVEGTGHFTVHAPLAAMTKADIVREAVRLGVDLSHTWSCYDPTPEGRPCGQCDSCRLRAKGFADAGVTDPAL

SEQ ID NO: 40965 - protein, 246 aa, Polynucleobacter aenigmaticus
  misc_feature (1)..(246): tr|A0A254PUV6|A0A254PUV6_9BURK 7-cyano-7-deazaguanine s ynthase OS=Polynucleobacter aenigmaticus OX=1743164 GN= queC PE=3 SV=1
MSLLSAAFQNIAPRKPNAPAVILFSGGLDSSTILALAKDLGYAPYVLSVGYGQRHSSELAAAKHIAKKIGVIRHEVVNLDLTRFGGSALTDSSIDIPVTPGNDQEIPVTYVPARNTILLSLALGWAESLGGLDIFYGANAVDYSGYPDCRPEYVASFETMANLATKAGVEAQNNENRFRVHAPIISMSKADIIQLGTTLGIDYSQTVSCYQANDLGEACGECESCRLRKVGFKQANLSDPTRYQKK

SEQ ID NO: 40966 - protein, 246 aa, Polynucleobacter asymbioticus
  misc_feature (1)..(246): sp|A4SVH9|QUEC_POLAQ 7-cyano-7-deazaguanine synthase OS =Polynucleobacter asymbioticus (strain DSM 18221 / CIP 109841 / QLW-P1DMWA-1) OX=312153 GN=queC PE=3 SV=1
MSSLSAAYQNLAPRKDGAPAVILFSGGLDSTTVLALAKDLGYTPYALSVGYGQRHSSELAAAKHIAKQIGVARHEVVNLDLTRFGGSALTDSSIAVPTTPGKDQEIPVTYVPARNTILLSLALGWAESLGGLDVFYGANSVDYSGYPDCRPEYVASFETMANLATKAGVEAINNENRFRVHAPIISLTKAEIIQLGSTLGVDYSQTVSCYQANDLGEACGECESCRLRQIGFKQANVIDPTRYQKK

SEQ ID NO: 40967 - protein, 246 aa, Polynucleobacter asymbioticus
  misc_feature (1)..(246): tr|A0A1J0D9T6|A0A1J0D9T6_9BURK 7-cyano-7-deazaguanine s ynthase OS=Polynucleobacter asymbioticus OX=576611 GN=q ueC PE=3 SV=1
MSSLSAAYQNLAPRKDGAPAVILFSGGLDSTTVLALAKDLGYTPYALSVGYGQRHSSELAAAKHIAKQIGVARHEVVNLDLTRFGGSALTDSSIAVPTTPGKDQEIPVTYVPARNTILLSLALGWAESLGGLDVFYGANSVDYSGYPDCRPEYVASFETMANLATKAGVEAINNENRFRVHAPIISLTKAEIIQLGSTLGVDYSQTVSCYQANDLGEACGECESCRLRQIGFKQANAIDPTRYQKK

SEQ ID NO: 40968 - protein, 246 aa, Polynucleobacter campilacus
  misc_feature (1)..(246): tr|A0A254Q082|A0A254Q082_9BURK 7-cyano-7-deazaguanine s ynthase OS=Polynucleobacter campilacus OX=1743163 GN=qu eC PE=3 SV=1
MSKLSAAFENLAPRKPGAPAVILFSGGLDSTTVLALAKDLGYSPYALSVAYGQRHSSELAAAKHIAKQIGVIRHEVVNLDLTRFGGSALTDSSIAVPTTLGKDQEIPITYVPARNTILLSLALGWAESLGGLDVFYGANAVDYSGYPDCRPEYVASFEHMANLATKAGVEAINDENRFRVHAPIINLTKAQIIELGSTMGVDYSQTVSCYQANDLGEACGECESCRLRQAGFKQANVSDPTRYLKN

SEQ ID NO: 40969 - protein, 235 aa, Polynucleobacter cosmopolitanus
  misc_feature (1)..(235): tr|A0A229FWC0|A0A229FWC0_9BURK 7-cyano-7-deazaguanine s ynthase OS=Polynucleobacter cosmopolitanus OX=351345 GN =queC PE=3 SV=1
MHARKPNAPAVVLLSGGLDSATVLAIAKKLGYAVHALSFRYGQRHSSELDAATRVAKSLGAVEHQIIDLDLRRFVGGSALTDDAYDVPTSPGANNEIPITYVPARNTIMLSVALGWAEALGGLDIFFGANAVDYSGYPDCRPDYVKSFEATANLATKVGVESHQESTRFRVHAPIIQMSKAQIIQAGMSLGVDFSQTVSCYQANAEGLACGQCESCRLRKEGFQSAGIPDPTHYL

SEQ ID NO: 40970 - protein, 246 aa, Polynucleobacter duraquae
  misc_feature (1)..(246): tr|A0A0E3ZL01|A0A0E3ZL01_9BURK 7-cyano-7-deazaguanine s ynthase OS=Polynucleobacter duraquae OX=1835254 GN=queC PE=3 SV=1
MSKLSAAFQNIAPRKPNAQAVILFSGGLDSSTILALAKDLGYAPYVLSVGYGQRHSSELAAAKHIAKKMGVVRHEVVNLDLTRFGGSALTDSSIDIPITPGKELEIPVTYVPARNTILLSLALGWAESLGGLDIFYGANAVDYSGYPDCRPEYVASFETMANLATKAGVEAINNENRFRVHAPIISMSKAEIIQLGTTLGVDYSQTVSCYQANDLGEACGECESCRLRQIGFKQANLSDPTRYQKK

SEQ ID NO: 40971 - protein, 247 aa, Polynucleobacter hirudinilacicola
  misc_feature (1)..(247): tr|A0A210RYU9|A0A210RYU9_9BURK 7-cyano-7-deazaguanine s ynthase OS=Polynucleobacter hirudinilacicola OX=1743166 GN=queC PE=3 SV=1
MSKLSAAFQNLAPRKPGAPAVILFSGGLDSTTVLALAKDLGYSPYALSVGYGQRHSSELAAAKHIAKQIGVIRHEVVNLDLTRFGGSALTDSSIAVPTTPGKDQEIPITYVPARNTILLSLALGWAESLGGLDVFYGANAVDYSGYPDCRPEYVASFEHMANLATKAGVEAINDQNRFRVHAPIIDLTKAQIIELGSTMGVDYSQTVSCYQANDLGEACGECESCRLRQAGFKQANVSDPTRYRKNK

SEQ ID NO: 40972 - protein, 245 aa, Polynucleobacter meluiroseus
  misc_feature (1)..(245): tr|A0A240E1H6|A0A240E1H6_9BURK 7-cyano-7-deazaguanine s ynthase OS=Polynucleobacter meluiroseus OX=1938814 GN=q ueC PE=3 SV=1
MTPLSAEFTQFSPRKPNAPAVILFSGGLDSTTILALAKDLGYAPYVLSVGYGQRHSSELAAAKHIAKKMGVKRHEVINLDLTRFGGSALTDASIELPTSPGGEHEIPITYVPARNTILLSLALGWAESLGGLDIFYGANAVDYSGYPDCRPEYVASFETMANLATKAGVEAVNNDNRFRVHAPIISMSKAEIIALGNTLGVDYSQTVSCYQANDLGEACGECESCRLRQVGFKNAKLVDPTRYRK

SEQ ID NO: 40973 - protein, 208 aa, Polynucleobacter necessarius
  misc_feature (1)..(208): tr|B1XTB6|B1XTB6_POLNS 7-cyano-7-deazaguanine synthase OS=Polynucleobacter necessarius subsp. necessarius (str ain STIR1) OX=452638 GN=Pnec_0300 PE=3 SV=1
MRSSSSLAQNKLTVSAQACLSIDSTTVLALAKDSDYTPYALSVGYGQRHSSELAAAKHIAKQIGVARHEVVNLDLTRFGGSALTDTKIAVPTSPGKDHEIPVTYVPARNTILLSLALGWTESLGGLDIFYGANSVDYSGYPDCRPECVASFEHMANLATKAGVEAINNKNRFRVHAPIVSLTKAQIIQLGSTMGVDYSQTVHAIKPKI

SEQ ID NO: 40974 - protein, 246 aa, Polynucleobacter paneuropaeus
  misc_feature (1)..(246): tr|A0A2Z4JKF4|A0A2Z4JKF4_9BURK 7-cyano-7-deazaguanine s ynthase OS=Polynucleobacter paneuropaeus OX=2527775 GN= queC PE=3 SV=1
MSSLSAAFDHLAPRTPHAPAVILFSGGLDSTTILALAKDLGYAPYALSVSYGQRHSSEVAAAKLIAKQMGVLAHEVVQLDLTRFGGSALTDASIALPLTPSKADEIPVTYVPARNTILLSLALSWAEALGGLDIFYGANAVDYSGYPDCRPEYVAAFEGMANLATKAGVEASNHANRFRVHAPIIQMSKAEIIHLGTTLGVDYSQTVSCYQADAEGHACGICESCRLRQAGFAQAKVTDPTRYQNQ

SEQ ID NO: 40975 - protein, 246 aa, Polynucleobacter paneuropaeus
  misc_feature (1)..(246): tr|A0A2Z4JQL5|A0A2Z4JQL5_9BURK 7-cyano-7-deazaguanine s ynthase OS=Polynucleobacter paneuropaeus OX=2527775 GN= queC PE=3 SV=1
MSSLSAAFDHLAPRTPHAPAVILFSGGLDSTTILALAKDLGYAPYVLSVSYGQRHSSEVAAAKLIAKQMGVLAHEVVQLDLTRFGGSALTDASIALPLTPSKADEIPVTYVPARNTILLSLALSWAEALGGLDIFYGANAVDYSGYPDCRPEYVAAFESMANLATKAGVEASNHANRFRVHAPIIQMSKAEIIHLGTTLGVDYSQTVSCYQADAEGHACGICESCRLRQAGFAQAKVTDPTRYQNK

SEQ ID NO: 40976 - protein, 246 aa, Polynucleobacter sp.
  misc_feature (1)..(246): tr|A0A258X7E5|A0A258X7E5_9BURK 7-cyano-7-deazaguanine s ynthase OS=Polynucleobacter sp. 16-46-70 OX=1970421 GN= queC PE=3 SV=1
MSSLSAAFANLAPRKPNAPAVILFSGGLDSSTILALAKDLGYAPYVLSVSYGQRHSSELAAAKHIAKKMGVIQHEIVNLDLTRFGGSALTDSAIDVPTIPSKDQEIPVTYVPARNTILLSLALGWAESLGGLDIFYGANAVDYSGYPDCRPEYVASFEAMANLATKAGVEAINHDNRFRVHAPIIHMSKAQIIQLGSTLGVDYSQTVSCYQANDLGEACGECESCRLRQAGFKQADLIDPTRYQKK

SEQ ID NO: 40977 - protein, 246 aa, Polynucleobacter sp.; identical to SEQ ID NO: 40976
  misc_feature (1)..(246): tr|A0A259PF25|A0A259PF25_9BURK 7-cyano-7-deazaguanine s ynthase OS=Polynucleobacter sp. 39-45-136 OX=1970427 GN =queC PE=3 SV=1

SEQ ID NO: 40978 - protein, 246 aa, Polynucleobacter sphagniphilus
  misc_feature (1)..(246): tr|A0A1R0HBV3|A0A1R0HBV3_9BURK 7-cyano-7-deazaguanine s ynthase OS=Polynucleobacter sphagniphilus OX=1743169 GN =queC PE=3 SV=1
MSQLSAAFENLAPRIPNAPAVILFSGGLDSTTILALAKDLGYAPYVLSVGYGQRHSSELAAAKHIAKKMGVVRHEVVNLDLTRFGGSALTDSSIDVPITPGNDQEIPVTYVPARNTILLSLALGWAESLGGLDIFYGANAVDYSGYPDCRPEYVASFETMANLATKAGVEALNNENRFRVHAPIISMSKAQIIALGSTLGVDYSQTVSCYQANDLGEACGECESCRLRQAGFLQAKLSDPTRYQKK

SEQ ID NO: 40979 - protein, 243 aa, Polynucleobacter victoriensis
  misc_feature (1)..(243): tr|A0A212T7Y4|A0A212T7Y4_9BURK 7-cyano-7-deazaguanine s ynthase OS=Polynucleobacter victoriensis OX=2049319 GN= queC PE=3 SV=1
MSVDFQSMHARQPNAPAVVLLSGGLDSATVLAIAKKLGYAPYALSFRYGQRHSSELDAAVRVARSIGAVRHEIIDLDLRRFVGGSALTDDAYAVPTSPGPQDEIPITYVPARNTIMLSVALGWAEALGGLDIFFGANAVDYSGYPDCRPDYVKSFEATANLATKVGVESHEESTRFRVHAPIIKMSKAEIIKTGIELGVDFSQTVSCYQANSEGLACGQCESCRLRREGFKSAGISDPTHYAK

SEQ ID NO: 40980 - protein, 247 aa, Polynucleobacter wuianus
  misc_feature (1)..(247): tr|A0A191UDB3|A0A191UDB3_9BURK 7-cyano-7-deazaguanine s ynthase OS=Polynucleobacter wuianus OX=1743168 GN=queC PE=3 SV=1
MSKLSAAFENLAPRIPGAPAVILFSGGLDSTTVLALAKDLGYTPYALSVGYGQRHSSELAAAKHIAKQVGVARHEVVNLDLTRFGGSALTDSSIAIPIVPSNDQEIPVTYVPARNTILLSLALGWAEALGGLDIFYGANSVDYSGYPDCRPEYVASFEAMANLATKAGVEAINNENRFRVHAPIISLTKAEIIQLGSTLGVDYSQTVSCYQANDLGEACGECESCRLRQAGFKQANVSDPTRYRKNQ

SEQ ID NO: 40981 - protein, 221 aa, Pontibacillus chungwhensis
  misc_feature (1)..(221): tr|A0A0A2USU0|A0A0A2USU0_9BACI 7-cyano-7-deazaguanine s ynthase OS=Pontibacillus chungwhensis BH030062 OX=13855 13 GN=queC PE=3 SV=1
MDNKKALVVFSGGQDSTTCLFWAMKHFDEVEAVTFDYNQRHDEEIEVAKEIAEDLGVKHTILDMSLLSQLAPNALTRDDIEVKDGENGDLPSTFVPGRNLLFLSFASIMGKQIGAQHIVTGVCETDFSGYPDCRDVFIKSLNVTLNLSMDDQFVVHTPLMWLDKAQTWELADDLNALTYVKERTLTCYHGVRGSGCGECPSCKLRQNGLDTYINQKEGANA

SEQ ID NO: 40982 - protein, 246 aa, Pontibacillus halophilus
  misc_feature (1)..(246): tr|A0A0A5IE28|A0A0A5IE28_9BACI Uncharacterized protein OS=Pontibacillus halophilus JSM 076056 = DSM 19796 OX=1 385510 GN=N781_01595 PE=4 SV=1
MIYNVLWTGGWDSTYRVLNLVLDQGATIQPYYVNDPVRPSTEMEKKTIEKIKRLVVELDPSKEGHIKETIEIRKEDIPQNEEITALYHKLANSKWRLGDQYDWLPRYVHSSGIEKLELSIHNGDKAREIIIQDVVKVEDGNDSYYVLKEAVSMQEFKIFKDFRFPLLDITKLQMEENAKQRGYAHIMEETWFCHTPRKDGKSCGLCNPCKYAMEEGLGRRVTTPSTIDKLQYKAFKVRRKLKKIFN

SEQ ID NO: 40983 - protein, 223 aa, Pontibacillus halophilus
  misc_feature (1)..(223): tr|A0A0A5GS25|A0A0A5GS25_9BACI 7-cyano-7-deazaguanine s ynthase OS=Pontibacillus halophilus JSM 076056 = DSM 19 796 OX=1385510 GN=queC PE=3 SV=1
MNKEKCIVVFSGGQDSTTCLFWALRRFKEVETVTFNYNQRHAEEIEVAEEIAAELGVKHTVLDMSLLNQLAPNALTRDDIAVEDGEDGGLPSTFVPGRNLIFLSFATIMGYQIDAKHIVTGVCETDFSGYPDCRDDFVKSLNVTLNLSMDEKFVIHTPLMWLDKAETWELADELGGFDYVREKTLTCYNGVRGSGCGECPACQLRQRGLQAYLEKREEVRADV

SEQ ID NO: 40984 - protein, 222 aa, Pontibacillus marinus
  misc_feature (1)..(222): tr|A0A0A5I121|A0A0A5I121_9BACI 7-cyano-7-deazaguanine s ynthase OS=Pontibacillus marinus BH030004 = DSM 16465 O X=1385511 GN=queC PE=3 SV=1
MMNKKAVVVFSGGQDSTTCLFWAMKHFDEVEVVTFNYNQRHALEIECAKNIAEEVNVKHHILDMALLNQLAPNALTRDDIEVKDGEDGGLPSTFVPGRNLLFLSFAGVLASQVGAKHIITGVCETDFSGYPDCRDAFVKSLNVTLNLSMDQDFVIHTPLMWLDKKETWALADELDALEFVREKTLTCYNGVIADGCGECPACELRRAGLDEYLASVEEEAKS

SEQ ID NO: 40985 - protein, 434 aa, Pontibacillus marinus
  misc_feature (1)..(434): tr|A0A0A5FZR2|A0A0A5FZR2_9BACI ATPase OS=Pontibacillus marinus BH030004 = DSM 16465 OX=1385511 GN=N783_17780 P E=4 SV=1
MRKAIFNCKYTEESDYELSKNAFEYNINDSNVFSYTFLKETKTTLPAFYSNTGLDLFYLSLFVYGADRIIKRSSFKDGWTRSFKLNLPVLEKDIWDVNKNHVEKMLSFLTGDKWEINFFSRNLTKDELSVKKKIEDDPENIIIEEFCMFSGGLDSFIGAIDLIEENKQKNKQSGIHFISHYAGGKGTKEFQDILRNKLKSKFGLEGNNFSSYYAVARNGIEDTTRSRSLMFFGHAIALASCMREKVELIIPENGMISLNVPLTNSRLGTSSTRTTHPHYINMLQELLSNLGLKISITNPYQFKTKGEMIKECKNIDFLYENIVNTMSCSHPDIGRMKKEKESCHCGYCLPCVIRRAAVKRAGLEDPTTYRDVNFNSGPTAKLNYSSYSLGLKKQNKNYSFLRIQNSGPIYKDVDYYAFLYKRGLKELSEFLEDL

SEQ ID NO: 40986 - protein, 222 aa, Pontibacillus yanchengensis
  misc_feature (1)..(222): tr|A0A0A2T897|A0A0A2T897_9BACI 7-cyano-7-deazaguanine s ynthase OS=Pontibacillus yanchengensis Y32 OX=1385514 G N=queC PE=3 SV=1
MQKNNKAIVVFSGGQDSTTCLFWAMKHFDEVEAVTFHYNQRHSEEVEVAKEIVDDLNIKHTNLDMSLLSQLAPNALTRDDIEVNDGEEGGLPSTFVPGRNLLFLSFATILGYQIDAKHIITGVCETDFSGYPDCRDMFVKSLNVTLNLSMDSEFVIHTPLMWLDKAQTWELADDLGAFDYVREKTLTCYHGVRGDGCGECPSCILRKNGLNTYLAQREGANA

SEQ ID NO: 40987 - protein, 210 aa, Pontibacter korlensis
  misc_feature (1)..(210): tr|A0A0E3UYD1|A0A0E3UYD1_9BACT 7-cyano-7-deazaguanine s ynthase OS=Pontibacter korlensis OX=400092 GN=PKOR_1632 5 PE=3 SV=1
MSNKDGVLLASGGLDSTTLAYWLLNEGIDFVPLFIKYGQHCAKTELETLKKVLPVSHANKIEIIDIQSVYQKSTSRFIKPANLWEEEVNADDLYIPYRNVLLLTIGATFAQTLGYSNVYSAFINSNHAKEIDCSNEFFQKMEDMLVDYGSVKIHMPFRYFSKYEVAKIGINLGAQIGYTFSCQASPEIPCGACPNCVDRLEALRKIETEA

SEQ ID NO: 40988 - protein, 227 aa, Pontibacter sp.
  misc_feature (1)..(227): tr|A0A4P8RII7|A0A4P8RII7_9BACT 7-cyano-7-deazaguanine s ynthase OS=Pontibacter sp. SGAir0037 OX=2571030 GN=queC PE=3 SV=1
MSNFSESALVLFSGGQDSTTCLFWAKEQFKHVEALGFKYGQKHEVELKQAQIIAEKAQVSFRVIDISGMLQGSALTEHDKDVSAQHELNANLPAAFVPGRNAVFLSIAISHAFTRNITDIVGGMCQADYSGYPDCRRVFIDSLQTSMSLALDKDIRIHTPLMYKSKAEAWKLAKELKVLDIVRDLSHTDYNGDRTTYNEWGYGKLDNPASVLRAKGYEEAKAKGWLD

SEQ ID NO: 40989 - protein, 242 aa, Ponticaulis sp.
  misc_feature (1)..(242): tr|A0A2E0U5N5|A0A2E0U5N5_9RHOB 7-cyano-7-deazaguanine s ynthase OS=Ponticaulis sp. OX=2020902 GN=queC PE=3 SV=1
MTSQNALVLFSGGQDSTVCLAWALARYNRVTTVGFDYAQRHSVELNCRQNVLEAFRKSSVVRTDHLGDDVMLDLSILGQIAETSLTRDAEIRMTEDGLPSTFVPARNLIFFSLSGTIAYRQAANILVGGMCETDYSGYPDCRRATLDAQEQTLSLGLDRDIVIETPLMHKTKADTFALAKSLGGEELVEIVVEHTHTCYLGDRSTRHDWGYGCGTCPACELRAKGWNDWQEAGCPKDPTGLA

SEQ ID NO: 40990 - protein, 239 aa, Ponticaulis sp.
  misc_feature (1)..(239): tr|A0A2D7IX79|A0A2D7IX79_9RHOB 7-cyano-7-deazaguanine s ynthase OS=Ponticaulis sp. OX=2020902 GN=queC PE=3 SV=1
MSGTSALVLFSGGQDSTVCLAWALARYDQVSTVGFDYGQRHSIELTCRQNVLKAFRESSLNTDGLGEDALLDLSVLGQISETSLTREAEITMSEQGLPSTFVPGRNLIFLTLASAVAYRRAATVMVGGMCETDFSGYPDCRRNTLDAQEQAISLGLDREMVIETPLMHKTKADTFAMAKGLGGDELVEIVVEHTHTCYLGDRSKRHDWGYGCGTCPACDLRANGWDDWQAAGCPTDPAG

SEQ ID NO: 40991 - protein, 425 aa, Ponticoccus gilvus
  misc_feature (1)..(425): tr|A0A4R6LWA5|A0A4R6LWA5_9ACTN 7-cyano-7-deazaguanine s ynthase in queuosine biosynthesis OS=Ponticoccus gilvus OX=519423 GN=C8D81_0139 PE=4 SV=1
MRYVSGPTSALTKVDDTSTPVVLFGRATSDDVASAGGSAALTVRRQKLVPDSAAWDLLAIALSVVVADGATKRDTSPDGWTRELELNVALHDSARWEPSASSFSSALAFLTTDRWQVEFRGGGAIPKPPRTPRYPDEDAVVLLSGGLDSLIGAIDLASNGRQLFAVSQTVRGDADKQDRFARIIGGGIEHLQVNHNASTRRGLKETSQRSRSLIFLAFAVLAATSTERYRSGESVPLYVCENGFIAINPPLTIARIGSLSTRTAHPHFLGQMQEILDGVGLRVRIINPYAEKTKGEMLRECLDQALLSAEASVSTSCGRFQRFNYRHCGRCVPCQIRRAAFIAWGRDDPTDYVYADLGRPDEDHAAFDDVRSVALARLVVAEEGFDRWLGPTLSSPRITSRTALREMLQRGLDELGALHGEHGLA

SEQ ID NO: 40992 - protein, 454 aa, Pontimonas salivibrio
  misc_feature (1)..(454): tr|A0A2L2BS04|A0A2L2BS04_9MICO QueC queuosine biosynthe sis protein-like protein OS=Pontimonas salivibrio OX=11 59327 GN=C3B54_111518 PE=4 SV=1
MAFDPTAYTTFSYREYRFSDSRFEATFHYQLAGGSVTPLDFTETVQFTPGIADRVDTPRLESLLALLGAVLGLSYYKLAAPDEYVIEQPGLTREAEEYLALLISEGMAEFAYRNGFSVPLQPAIINKAAGVASAWPEASWREHTGDPIVPIGGGKDSVVSVELLHHHRLHPIQFAVNANPTIHRVARASGHPLVTAKRTIDPRLLELNTEGGLNGHVPVTAMNSLIALCQSRILDGGPVVMSNESSASDSTLEVDGWSINHQWSKSWEAEKALHDVLGPQAGLRPEHYFSLLRPFSELRIAGAYANYSQYHRVATSCNRAYRLDAGDVSWCGECDKCRFVYLVLSAYLSPQALRGIFGRDLLDEPEQIPGYEELLGLARHKPFECVGTEAESLVALSVAARRQDWSQHRVVAHFDQVIPGLSDVHDDLEHQVWAASENSATLPAGYREAQGALR

SEQ ID NO: 40993 - protein, 232 aa, Porphyrobacter dokdonensis
  misc_feature (1)..(232): tr|A0A1A7BEL6|A0A1A7BEL6_9SPHN 7-cyano-7-deazaguanine s ynthase OS=Porphyrobacter dokdonensis DSW-74 OX=1300349 GN=queC PE=3 SV=1
MTAPEQASSAPIAVVLLSGGLDSMVTASLAKEQGFAVHALSVDYGQRHRLELSSARRIAQRLSLVRHAEIALDLRTFGGSALTDAIDVPKAGLGEDIPVTYVPARNLVFLALTTACAEAAGARDVFIGVNALDYSGYPDCRPEFIASFAETARLGTKAGVEGAPFTIHTPLQYMTKADIARECARLGLDPSWSWSCYDPTPEGLACGLCDSCRLRKKGFAEAGIADSTRYRD

SEQ ID NO: 40994 - protein, 229 aa, Porphyrobacter mercurialis
  misc_feature (1)..(229): tr|A0A0B2BSX0|A0A0B2BSX0_9SPHN 7-cyano-7-deazaguanine s ynthase OS=Porphyrobacter mercurialis OX=1572751 GN=que C PE=3 SV=1
MSDMPKAVVLLSGGLDSMVAAGLARQGGYAVHALTVDYNQRHRVELSAAARIAQELQVAAHVVLPLDLSQFGGSALTSDIAVPKTGASGVDDDIPVTYVPARNMIFLSLAMGWAEALGARDIFIGVNALDYSGYPDCRPEFISSFVATANLATKAGVEGHGVTIHTPLQHWGKARIAQEAAALGLDPGMSWSCYDPTPDGIACGTCDSCRLRRKGFADAQLIDPTPYAA

SEQ ID NO: 40995 - protein, 230 aa, Porphyrobacter neustonensis
  misc_feature (1)..(230): tr|A0A192D253|A0A192D253_9SPHN 7-cyano-7-deazaguanine s ynthase OS=Porphyrobacter neustonensis OX=1112 GN=queC PE=3 SV=1
MLDRENGKPLAVVLLSGGLDSMVTAALAQEAGFAVHALTVDYGQRHKLELQSAAAIVERLGLAAHTQIALDLRAFGGSALTDSIDVPKGGVGQDIPVTYVPARNLVFLALTTACAEAAGARDVFIGVNALDYSGYPDCRPEFIASFSETARLGTKAGVEGAPFRVHTPLQHLTKADIARESARLGLDPAWSWSCYDPTPEGLACGLCDSCRLRKKGFAEAGIVDSTRYNA

SEQ ID NO: 40996 - protein, 232 aa, Porphyrobacter sanguineus
  misc_feature (1)..(232): tr|A0A1M7SGT4|A0A1M7SGT4_9SPHN 7-cyano-7-deazaguanine s ynthase OS=Porphyrobacter sanguineus OX=198312 GN=queC PE=3 SV=1
MNAAYPLSPAPIAVVLLSGGLDSMVTAALAKEQGFAVHALSVDYGQRHRLELESARRIAKQLDVANHTEIKLDLRAFGGSALTDAIDVPKDGLGENIPITYVPARNLVFLALTTACAEAAGAHDVFIGVNALDYSGYPDCRPEFIASFAETARLGTKAGVEGAPFTIHAPLQHMTKADIACECARLELDPVWSWSCYDPTPEGMACGLCDSCRLRKKGFAEAGIIDSTRYNA

SEQ ID NO: 40997 - protein, 232 aa, Porphyrobacter sp.
  misc_feature (1)..(232): tr|A0A0N0JPZ5|A0A0N0JPZ5_9SPHN 7-cyano-7-deazaguanine s ynthase OS=Porphyrobacter sp. AAP60 OX=1523423 GN=queC PE=3 SV=1
MTGSEHNASLPIAVVLLSGGLDSMVTAALAQERGFAVHALTVDYGQRHRLELQSAERIAHQLGLARQTSIALDLRAFGGSALTDAIDVPKSGVGDDIPVTYVPARNLVFLALTTACAEAAGARDVFIGVNALDYSGYPDCRPEFIASFAETARLGTKAGVERAPFTIHAPLQHMTKADIARECARLGLDPAWSWSCYDPTPDGLACGLCDSCRLRKKGFAEAGIVDSTRYHA

SEQ ID NO: 40998 - protein, 209 aa, Porphyrobacter sp.
  misc_feature (1)..(209): tr|A0A1D7NHA1|A0A1D7NHA1_9SPHN 7-cyano-7-deazaguanine s ynthase OS=Porphyrobacter sp. LM 6 OX=1896196 GN=queC P E=3 SV=1
MVTAALAQERGFSVHALTVDYGQRHRLELESAARIAGQLGLAKHTSIALDLRAFGGSALTDAIDVPKTGVGDDIPVTYVPARNLVFLALTTACAEAAGARDVFIGVNALDYSGYPDCRPGFIASFAETARLGTKAGVEGAPFTIHAPLQHMTKADIARECARLGLDPSWSWSCYDPTVEGTACGLCDSCRLRKKGFAEAGIVDSTRYNA

SEQ ID NO: 40999 - protein, 221 aa, Porphyromonadaceae bacterium
  misc_feature (1)..(221): tr|A0A354X742|A0A354X742_9PORP 7-cyano-7-deazaguanine s ynthase OS=Porphyromonadaceae bacterium OX=2049046 GN=q ueC PE=3 SV=1
MNDFKQEDALVLFSGGQDSTTCLYWAKKQFRNVQTLCFSYGQRHSQEVENARRIAQMAGVPFRVIDTSVISQLAPNSLTDASIKMDEEKPADSYPNTFVPGRNMLFLTFAAAIAYAQDIRHLVTGVSEADYSGYPDCRDTFIHSLNASLNLAMDKHFLIHTPLMWRNKKEVWRLSDELGVFDLVRNETLTCYNGIIADGCGHCPACKLRNKGLQEYLEVRG

SEQ ID NO: 41000 - protein, 224 aa, Porphyromonadaceae bacterium; identical to SEQ ID NO: 40762
  misc_feature (1)..(224): tr|A0A1I7GUC8|A0A1I7GUC8_9PORP 7-cyano-7-deazaguanine s ynthase OS=Porphyromonadaceae bacterium KHP3R9 OX=18553 98 GN=queC PE=3 SV=1

SEQ ID NO: 41001 - protein, 217 aa, Porphyromonas asaccharolytica
  misc_feature (1)..(217): tr|F4KLJ4|F4KLJ4_PORAD 7-cyano-7-deazaguanine synthase OS=Porphyromonas asaccharolytica (strain ATCC 25260 / D SM 20707 / BCRC 10618 / JCM 6326 / LMG 13178 / VPI 4198 ) OX=879243 GN=queC PE=3 SV=1
MRNSLIAHSGGVDSTTLLYEYREEVACAVGFDYGSKHNARELAAAKAICRELDIPYLIIPLAFIEEYFRSDLLLSGGEMQLGDYSEENMRSTVVPFRNGIMLSVLAGLAESRDLQQVLIANHFGDHAIYPDCRESFVKPMGEAITAGTSNGVKLVAPYTALTKAEIVARGTRLGVPYGKTYSCYQGGERHCGRCGTCRERHDAFVANGLEDPTLYEE

SEQ ID NO: 41002 - protein, 223 aa, Porphyromonas cangingivalis
  misc_feature (1)..(223): tr|A0A1T4NS01|A0A1T4NS01_PORCN 7-cyano-7-deazaguanine s ynthase OS=Porphyromonas cangingivalis OX=36874 GN=queC PE=3 SV=1
MNKQTALVVFSGGQDSTTCLFWAKKHFERVHALCFFYGQKHREEVEIARKIAEGAGVPFEVKDVSFIGSLAHNSLTDDSIPMDKEKPEGSVPNTFVPGRNLFFLSIAAVYARELGIHHLVIGVSQTDFSGYPDCRDAFVKSLNVTLNLAMDDTFVIHTPLMWIDKAETWALADELGVLELVRQETLTCYNGIKGDGCGECPACALRSEGLQKYLKEKARPKTK

SEQ ID NO: 41003 - protein, 223 aa, Porphyromonas cangingivalis
  misc_feature (1)..(223): tr|A0A0A2ERS4|A0A0A2ERS4_PORCN 7-cyano-7-deazaguanine s ynthase OS=Porphyromonas cangingivalis OX=36874 GN=queC PE=3 SV=1
MNKQTALVVFSGGQDSTTCLFWAKKHFERVHALCFFYGQKHREEVEIARKIAEGAGVPFEVKDVSFIGSLAHNSLTDDSIPMDKEKPEGSVPNTFVPGRNLFFLSIAAVYARELGIHHLVTGVSQTDFSGYPDCRDAFVKSLNVTLNLAMDDTFVIHTPLMWIDKSETWGLADELGILELVRQETLTCYNGIKGDGCGECPACALRLEGLQKYLKEKARPKTK

SEQ ID NO: 41004 - protein, 221 aa, Porphyromonas catoniae
  misc_feature (1)..(221): tr|L1NBA5|L1NBA5_9PORP 7-cyano-7-deazaguanine synthase OS=Porphyromonas catoniae F0037 OX=1127696 GN=queC PE=3 SV=1
MTNKRGLIVLSGGMDSVTLLYEYQADIALALSFDYGSKHNARELPYARLHCERLGIEHLTIPLSFISQYFQSALLQGGGDIPKGSYDEQNMASTVVPFRNGIMLSIAAGLAESRGLDRVYIANHFGDHAIYPDCRASFIQPMHSAVYEGTNNHVSIEAPYTDISKGAIAAHGKRLGIDYSETWSCYEGGDVQCGTCATCIERREAMQEAGIIDPTIYKENA

SEQ ID NO: 41005 - protein, 221 aa, Porphyromonas catoniae
  misc_feature (1)..(221): tr|Z4WUJ5|Z4WUJ5_9PORP 7-cyano-7-deazaguanine synthase OS=Porphyromonas catoniae ATCC 51270 OX=887901 GN=queC PE=3 SV=1
MTNKRGLIVLSGGMDSVTLLYEHQADIALALSFDYGSKHNARELPYARLHCERLGIEHLTIPLSFISQYFQSALLQGGGDIPKGSYDEQNMASTVVPFRNGIMLSIAAGLAESRRLDRVYIANHFGDHAIYPDCRASFIQPMHSAVYEGTNNHVSIEAPYTDISKGDIATHGKRLGIDYSETWSCYEGGDVQCGTCATCIERREAMQEARIIDPTIYKENA

SEQ ID NO: 41006 - protein, 222 aa, Porphyromonas circumdentaria
  misc_feature (1)..(222): tr|A0A1T4N5U8|A0A1T4N5U8_9PORP 7-cyano-7-deazaguanine s ynthase OS=Porphyromonas circumdentaria OX=29524 GN=que C PE=3 SV=1
MLHNGKKDGLIVLSGGLDSTTLLYDYKEEIALALTFDYGSKHNASEIPCAERHCRLLSIPHITIPLDFMGRYFRSDLLLSGGKIPQGVYTEENMKSTVVPFRNGIMLSIAAGLAESRNLDRIFIANHFGDHAIYPDCRASFIEPMMKSIEEGTSNRIQLCAPYTHLNKDQIVSIGSRIGIDYTDTWSCYEGGAIQCGRCATCQERKEAFIKAGVTDPTVYKE

SEQ ID NO: 41007 - protein, 222 aa, Porphyromonas crevioricanis
  misc_feature (1)..(222): tr|A0A2X4PI00|A0A2X4PI00_9PORP 7-cyano-7-deazaguanine s ynthase OS=Porphyromonas crevioricanis OX=393921 GN=que C PE=3 SV=1
MRLNKKEDQTRKGLIIVSGGMDSVTMLYDFADRIALGVSFDYGAKHNAKEIPFAKEHCERLGIRHIVIPLSFMNQYFRSDLLQSGGEIPEGQYAEDNMASTVVPFRNGIMLSIAAGLAESYGLAEIYIANHFGDHSIYPDCRADFVLPMGEAIAHGTSNAVCLKAPYTGWSKIDIAKRGKTLGIDYRRTWSCYKGEMTPCRKCATCLERIEALRAIGEADFL

SEQ ID NO: 41008 - protein, 225 aa, Porphyromonas crevioricanis
  misc_feature (1)..(225): tr|T1CQZ8|T1CQZ8_9PORP 7-cyano-7-deazaguanine synthase OS=Porphyromonas crevioricanis JCM 15906 OX=1305617 GN= queC PE=3 SV=1
MQEMRLNKKEDQTRKGLIIVSGGMDSVTMLYDFADRIALGVSFDYGAKHNAKEIPFAKEHCERLGIRHIVIPLSFMNQYFRSDLLQSGGEIPEGQYAEDNMASTVVPFRNGIMLSIAAGLAESYGLAEIYIANHFGDHSIYPDCRADFVLPMGEAIAHGTSNAVCLKAPYTGWSKIDIAKRGKTLGIDYRRTWSCYKGEMTPCRKCATCLERIEALRAIGEADFL

SEQ ID NO: 41009 - protein, 225 aa, Porphyromonas endodontalis
  misc_feature (1)..(225): tr|C3JC36|C3JC36_POREA 7-cyano-7-deazaguanine synthase OS=Porphyromonas endodontalis (strain ATCC 35406 / BCRC 14492 / JCM 8526 / NCTC 13058 / HG 370) OX=553175 GN=q ueC PE=3 SV=1
MLTTAHNGARDGLIVLSGGLDSTTLLYDYRDEIALAVTFDYGSKHNQREIPCAQHHCRQLGIEHLIIPLGFMGQYFRSDLLLSGGEIPLGAYNEENMQATVVPFRNGIMLSIAAGLAESRGLKRLFIANHFGDHNIYPDCRATFAEPMAEAILQGTSNSVELAAPYTHLSKSEIVAVGMPLGLDYATTWSCYVGGETQCGECATCRERKEAFALAGVPDPTSYLQ

SEQ ID NO: 41010 - protein, 220 aa, Porphyromonas gingivalis
  misc_feature (1)..(220): sp|B2RJS2|QUEC_PORG3 7-cyano-7-deazaguanine synthase OS =Porphyromonas gingivalis (strain ATCC 33277 / DSM 2070 9 / CIP 103683 / JCM 12257 / NCTC 11834 / 2561) OX=4319 47 GN=queC PE=3 SV=1
MQREKDSLIVVSGGMDSVTLMYEKRASIALALSFDYGSKHNARELSFARLHAERLGVEHLIIPLDFIGQYFQSDLLLSGGDIPEGRYDEENMKSTVVPFRNGIMLAVAAGLAESRGLRRIYIANHFGDHAIYPDCRASFIRPMTEAVRCGTTNGVLIEAPYTDITKTDIARIGASLGIDYAETWSCYKGGVFHCGVCGTCVERKEALHDAGIPDPTEYEG

SEQ ID NO: 41011 - protein, 220 aa, Porphyromonas gingivalis
  misc_feature (1)..(220): tr|A0A254N084|A0A254N084_PORGN 7-cyano-7-deazaguanine s ynthase OS=Porphyromonas gingivalis OX=837 GN=queC PE=3 SV=1
MQREKDSLIVVSGGMDSVTLMYEKRASIALALSFDYGSKHNARELSFARLHAERLGVEHLIIPLDFIGQYFQSDLLLSGGDIPEGRYDEENMKSTVVPFRNGIMLAVAAGLAESRGLRRIYIANHFGDHAIYPDCRASFIRPMTEAVRCGTTNGVLIEAPYTDITKTDIARIGASLGIDYAETWSCYKGGVFHCGVCGTCVERREALHDAGIPDPTEYEG

SEQ ID NO: 41012 - protein, 225 aa, Porphyromonas gingivicanis
  misc_feature (1)..(225): tr|A0A0A2GCQ4|A0A0A2GCQ4_9PORP 7-cyano-7-deazaguanine s ynthase OS=Porphyromonas gingivicanis OX=266762 GN=queC PE=3 SV=1
MQENLHKGHKDGLIVLSGGLDSTTLLYDYKEEIALALTFDYGSKHNASEIPCAEKHCELLAIPHIVVPLDFMARYFQSNLLLSGGAIPKGAYNEENMKSTIVPFRNGIMLSIAAGLAESRGLSRIFIANHFGDHAIYPDCRFAFIEPMMQSIREGTSNRVELCAPYTHINKEQIVAIGSRLSIDYALTWSCYEGGAIQCGRCATCCERKEAFIKAGVEDPTKYQQ

SEQ ID NO: 41013 - protein, 220 aa, Porphyromonas gulae
  misc_feature (1)..(220): tr|A0A0A2FQF4|A0A0A2FQF4_9PORP 7-cyano-7-deazaguanine s ynthase OS=Porphyromonas gulae OX=111105 GN=queC PE=3 S V=1
MQTEKDSLIVVSGGMDSVTLMYEKRASIALALSFDYGSKHNARELPFAHLHAERLGVEHLIVPLDFIGQYFRSDLLLGGGDIPEGRYDEENMKSTVVPFRNGIMLAIAAGLAESRGLRRIYIANHFGDHAIYPDCRASFIRPMTEAVRCGTSNSVLIEAPYTDITKTDIARIGASLGIDYAETWSCYKGGASHCGVCGTCVERREALRDAGIVDPTEYED

SEQ ID NO: 41014 - protein, 220 aa, Porphyromonas gulae
  misc_feature (1)..(220): tr|A0A0A2F9D1|A0A0A2F9D1_9PORP 7-cyano-7-deazaguanine s ynthase OS=Porphyromonas gulae OX=111105 GN=queC PE=3 S V=1
MQTEKDSLIVVSGGMDSVTLMYEKRASIALALSFDYGSKHNARELSFARLHAERLGVEHLIVPLDFIGQYFQSDLLLSGGDIPEGRYDEENMKSTVVPFRNGIMLAVAAGLAESRGLRRIYIANHFGDHAIYPDCRASFIRPMTEAVRCGTSDGVLIEAPYTDITKTDIARIGASLGIDYAETWSCYKGGVSHCGVCATCVERREALRDAGIPDPTEYEG

SEQ ID NO: 41015 - protein, 218 aa, Porphyromonas levii
  misc_feature (1)..(218): tr|A0A4Y8WQW3|A0A4Y8WQW3_9PORP 7-cyano-7-deazaguanine s ynthase OS=Porphyromonas levii OX=28114 GN=queC PE=3 SV =1
MDKKGIIVVSGGVDSITLLYDKREEIALAITFKYGSNHQDKEIPCAVYHCQKLGIPHQVIDLDFVRSMQSSLLQGAEAIPTGQYKEDNMKSTVVPFRNGVMLAIAAAFAEDRGLNKVFIANHFGDHAIYPDCTKAFIDGMNEAMRQGTYNHVEVSAPYTGKSKAEIVAIGTALGVAYEHTWSCYKGQELPCGVCATCRERIEAFEENGLTDPVKYQEL

SEQ ID NO: 41016 - protein, 220 aa, Porphyromonas loveana
  misc_feature (1)..(220): tr|A0A2U1F886|A0A2U1F886_9PORP 7-cyano-7-deazaguanine s ynthase OS=Porphyromonas loveana OX=1884669 GN=queC PE= 3 SV=1
MQAKKDSLIVVSGGMDSVTLMYDKRDSIALALSFDYGSKHNARELAFARLHAERLGVEHLVIPLGFMGEHFHSDLLLSGGSIPEGRYDEENMKSTVVPFRNGIMLAVAAGLAESRGLKRMYIANHFGDHAIYPDCRAAFIRPMAEAIREGTTNAVLTEAPYTSITKTDIARIGVALGIDYAETWSCYKGGEIHCGVCGTCVERKEAMREAGIADPTQYEE

SEQ ID NO: 41017 - protein, 221 aa, Porphyromonas macacae
  misc_feature (1)..(221): tr|A0A379DK74|A0A379DK74_9PORP 7-cyano-7-deazaguanine s ynthase OS=Porphyromonas macacae OX=28115 GN=queC PE=3 SV=1
MDEKKKNGLIVLSGGMDSVTLLYDKQDEIVMAVTFNYGSKHNAREIPFARLHSERLKIPHIVIDLDFMNKYFRSDLLQNGGNIPMGEYNEENMRNTVVPFRNGIMLSIAAGVAESYDLDKLFIANHFGDHAIYPDCRAAFIAPMSKAVTQGTSNGIKIIAPYTNIDKGQIAIIGKRLGLNYAETWSCYCGGEVQCGTCGTCIERREAMQQAGIDDPTTYLH

SEQ ID NO: 41018 - protein, 221 aa, Porphyromonas macacae
  misc_feature (1)..(221): tr|A0A0A2EFF6|A0A0A2EFF6_9PORP 7-cyano-7-deazaguanine s ynthase OS=Porphyromonas macacae OX=28115 GN=queC PE=3 SV=1
MDEKNKNGLIVLSGGMDSVTLLYDKQDEIAMAVTFNYGSKHNAREIPFARLHSERLKIPHIVIDLDFMNKYFRSDLLQNGGNIPMGEYNEENMRNTVVPFRNGIMLSIAAGLAESYDLDKLFIANHFGDHAIYPDCRAAFIAPMSEAVTQGTSNGIKIIAPYTNIDKGQIAIIGKRLGLNYAETWSCYCGSEVQCGTCGTCIERREAMRQAGIDDPTTYLH

SEQ ID NO: 41019 - protein, 219 aa, Porphyromonas somerae
  misc_feature (1)..(219): tr|A0A134B9D5|A0A134B9D5_9PORP 7-cyano-7-deazaguanine s ynthase OS=Porphyromonas somerae OX=322095 GN=queC PE=3 SV=1
MPQQDGLIVLSGGMDSVTLLYEYQANIALAISFDYGSKHNAQEIPYARVHCERLGIEHLTIPLGFMGQYFRSALLQGGGEIPKGSYDEENMAATVVPFRNGIMLSIAAGLAESRGLKRVYIANHFGDHAIYPDCRASFIRPMHEAIAAGTSNGVEVTAPYTDISKGEIARHGKALGINYAETWSCYEGGDVQCGQCGTCIERREAMLEAGIEDPTTYKD

SEQ ID NO: 41020 - protein, 219 aa, Porphyromonas sp.
  misc_feature (1)..(219): tr|J5TVH4|J5TVH4_9PORP 7-cyano-7-deazaguanine synthase OS=Porphyromonas sp. oral taxon 279 str. F0450 OX=11257 23 GN=queC PE=3 SV=1
MPQQDGLIVLSGGMDSVTLLYEYQANIALAISFDYGSKHNAQEIPYARLHCERLGIEHLTIPLGFMGQYFRSALLQGGGDIPKGSYDEENMAATVVPFRNGIMLSIAAGLAESRGLKRVYIANHFGDHAIYPDCRASFIRPMHEAIAAGTSNGVEVTAPYTDINKGEIARHGKALGINYAETWSCYEDGDVQCGQCGTCIERREAMLEAGIEDPTTYKD

SEQ ID NO: 41021 - protein, 210 aa, Porphyromonas sp.
  misc_feature (1)..(210): tr|A0A0A2DW13|A0A0A2DW13_9PORP 7-cyano-7-deazaguanine s ynthase OS=Porphyromonas sp. COT-239 OH1446 OX=1515613 GN=queC PE=3 SV=1
MDSVTLLYEYRERIGLALSFDYGAKHNARELPCARYHCERLGIPHIIIPLGFMGEYFRSSLLLSGGDIPLGQYDEHNIQSTVVPFRNGIMLSIAAGLAESHALGSIYIANHFGDHALYPDCRASFIEPMTRAVREGTTNAVELIAPYTHLDKGQIASIGARLGIDYSHTWSCYQGRELHCGECSTCLERREAMAQAGLEDPTAYESKPIQ

SEQ ID NO: 41022 - protein, 217 aa, Porphyromonas uenonis
  misc_feature (1)..(217): tr|C2MDE8|C2MDE8_9PORP 7-cyano-7-deazaguanine synthase OS=Porphyromonas uenonis 60-3 OX=596327 GN=queC PE=3 SV =1
MRNSLIALSGGVDSTTLLYEYREEIACAVGFDYGSKHNARELAAAKAICRELEIPYLIIPLAFIGEYFRSDLLLSGGEMQLGDYSEENMSSTVVPFRNGIMLSVLAGLAESRDLQQVLIANHFGDHAIYPDCRESFVKPMGEAITAGTSNGVKLVAPYTALTKAEIVARGTRLGVPYSKTYSCYQGGERHCGRCGTCRERHDAFVANGLEDPTLYEE

SEQ ID NO: 41023 - protein, 231 aa, Porticoccaceae bacterium
  misc_feature (1)..(231): tr|A0A2A5GFZ5|A0A2A5GFZ5_9GAMM 7-cyano-7-deazaguanine s ynthase OS=Porticoccaceae bacterium OX=2026782 GN=queC PE=3 SV=1
MTESDKKAVVLISGGLDSTTVLAMAREQGFDCYTLSFDYGQKAHAELKAARQCSELFGACQHKVVELDLRTIGGSALTDDSIDVPEEQTSGIPVTYVPARNTVFLSIALGWAEVLGAQDIFIGVNAVDYSGYPDCRPEYIEAFERMANLATKAGVEGQSIKINTPLIHMTKAEIIREGISIGVDYAQTVSCYQASEEGLACGKCESCRLRKLGFEQAGIVDTTRYISLINT

SEQ ID NO: 41024 - protein, 231 aa, Porticoccaceae bacterium
  misc_feature (1)..(231): tr|A0A352Q436|A0A352Q436_9GAMM 7-cyano-7-deazaguanine s ynthase OS=Porticoccaceae bacterium OX=2026782 GN=queC PE=3 SV=1
MKTAVVLVSGGLDSATALAVAAGNGYACHCLAFDYGQRHRSELAASKKVASTLHAKAHKIVQLDLRSIGGSALTDDNIAVPDAKIVNAGNANADTDIPVTYVPARNTVFLSIALGWAEVLHASDIFIGVNAVDYSGYPDCRPEYIAAFENMANLATRATVQGQRVTIQTPLISMRKEDIIRLGTDLGVDYSLTVSCYRATPEGLACGHCDSCHLRRQGFERAGLADPTRYV

SEQ ID NO: 41025 - protein, 230 aa, Porticoccus sp.
  misc_feature (1)..(230): tr|A0A2G2QS20|A0A2G2QS20_9GAMM 7-cyano-7-deazaguanine s ynthase OS=Porticoccus sp. OX=2024853 GN=queC PE=3 SV=1
MTENENNRAVVLVSGGLDSTTVLALAKNQGFSCYTLSFDYGQRAQAELVAARRCSEQLGAEEHKVIKLDLRAIGGSALTDDRIDVPEEQTSGIPVTYVPARNTVFLSIALGWAEVLGAQDIFIGVNAVDYSGYPDCRPDYIEAFEKMANLATKSGIEGHYLRINKPLINLTKAEIILQGTLAGVDYGETVSCYQANERGFACGRCDSCRLRISGFQEAGLPDPTRYIGTE

SEQ ID NO: 41026 - protein, 230 aa, Porticoccus sp.
  misc_feature (1)..(230): tr|A0A2E2VYR3|A0A2E2VYR3_9GAMM 7-cyano-7-deazaguanine s ynthase OS=Porticoccus sp. OX=2024853 GN=queC PE=3 SV=1
MTVNENNRAVVLVSGGLDSTTVLALAKSQGYSCYTLSFDYGQRAQAELAAARRCSEQLGAEEHKVIKLDLRAIGGSALTDDRIDVPEEQTSGIPVTYVPARNTVFLSIALGWAEVLGAQDIFIGVNAVDYSGYPDCRPDYIEAFEKMANLATKSGIEGHYLRINKPLINLTKAEIILQGTLAGVDYAETVSCYQANERGFACGRCDSCRLRISGFQDAGLPDPTRYIGTE

SEQ ID NO: 41027 - protein, 218 aa, Pradoshia eiseniae
  misc_feature (1)..(218): tr|A0A2S7N017|A0A2S7N017_9BACI 7-cyano-7-deazaguanine s ynthase OS=Pradoshia eiseniae OX=2064768 GN=queC PE=3 S V=1
MTNKAVVIFSGGQDSTTCLFWAMKKFDEVIAVTFDYGQRHRLELECAASITDELGIEHHILDMSLLNQLSPNALTRTEIAITEGESGPPSTFVEGRNMLFLTFAGILAKTKGAKHLITGVCETDFSGYPDCRDIFIKSLNVTMNLAMDYPFVIHTPLMWFDKAETWEMADSFGKLEYIRTNTLTCYNGIIGDGCGSCPSCKLRQNGLNIYQKKKMVKK

SEQ ID NO: 41028 - protein, 223 aa, Pradoshia sp.
  misc_feature (1)..(223): tr|A0A5J6XP05|A0A5J6XP05_9BACI 7-cyano-7-deazaguanine s ynthase QueC OS=Pradoshia sp. D12 OX=2651284 GN=queC PE =4 SV=1
MKQEKALVVFSGGQDSTTCLFWAMKNFGEVEVVTFNYGQRHALEIECAKQIANELNVHQHILDMSLLNQLAPNALTRADIEVKDGAEGELPSTFVPGRNLLFLSFAGVLARQIGAKHIITGVCETDFSGYPDCRDIFIKSFNVTINLSMEEAFVIHTPLMWLNKAETWSLADELGAFDFVKEKTLTCYHGIKADGCGECPACKLRLQGMHTYLHTKQHIGGSI

SEQ ID NO: 41029 - protein, 229 aa, Pragia fontium
  misc_feature (1)..(229): tr|A0A379DRP1|A0A379DRP1_9GAMM 7-cyano-7-deazaguanine s ynthase OS=Pragia fontium OX=82985 GN=queC PE=3 SV=1
MKRAVVVFSGGQDSTTCLIQALTQYDEVHCVTFDYGQRHLAEIEVARNLTKQLNVAAHKVMDVGLLNELAISSLTRDNIPVPKSSDDGIPNTFVPGRNILFLTLAAIYAYQIKAEAVITGVCETDFSGYPDCRDEFVKALNHAVALGMDYPVRFDTPLMWLDKAETWALADYYGKLDLIRNQTLTCYNGIQGDGCGECPSCHLRANGLKSYLANKQQTLQQLKIKLKLS

SEQ ID NO: 41030 - protein, 229 aa, Pragia fontium
  misc_feature (1)..(229): tr|A0A0G3CLD1|A0A0G3CLD1_9GAMM 7-cyano-7-deazaguanine s ynthase OS=Pragia fontium OX=82985 GN=queC PE=3 SV=1
MKRAVVVFSGGQDSTTCLIQALTQYDEVHCVTFDYGQRHLAEIEVARNLTKQLNVAAHKVMDVGLLNELAISSLTRDNIPVPKSSDDGIPNTFVPGRNILFLTLAAIYAYQIKAEAVITGVCETDFSGYPDCRDEFVKALNHAVALGMDYPVRFDTPLMWLDKAETWALADYYGKLDLIRNQTLTCYNGIQGDGCGECPSCHLRANGLKTYLANKQQTLQQLKIKLKLN

SEQ ID NO: 41031 - protein, 229 aa, Pragia sp.
  misc_feature (1)..(229): tr|A0A411WIK6|A0A411WIK6_9GAMM 7-cyano-7-deazaguanine s ynthase OS=Pragia sp. CF-458 OX=2498113 GN=queC PE=3 SV =1
MKRAVVVFSGGQDSTTCLIQALTQYDEVHCVTFDYGQRHQAEIDVARTLAKQLGATAHKVLDTGLLNQLAISSLTRDNIPVPTSVDDGVPNTFVPGRNILFLTLAAIYAYQIKAQTVITGVCETDFSGYPDCRDEFVKALNHAVALGMDSPVKFETPLMWLDKAETWALADYYGKLALIRHQTLTCYNGIQGDGCGECPACHLRANGLKTYQDNRQQVMAQLKGKLTLS

SEQ ID NO: 41032 - protein, 240 aa, Prauserella sp.
  misc_feature (1)..(240): tr|A0A318LBR9|A0A318LBR9_9PSEU 7-cyano-7-deazaguanine s ynthase OS=Prauserella sp. YIM 121212 OX=1477506 GN=que C PE=3 SV=1
MRGVVAVPIEPSPHRHPRHAIVIASGGLDSTVLAYWLAARGAELTLLSFDYGQRHRVELEHAAEIATLLECPHEIVNLSSLGGLLVGSALTDSDVAVPDGYYTDESMRATVVPNRNAIMLDIAVAVAVARKADAVAFGAHAGDHAIYPDCRPEFVERFTRSARTANEGLLVEEFEILAPFLDQSKTDIVRLGSALGVPFERTWSCYRGETVHCGTCGTCTERKEAFEQNDIPDPTSYSRA

SEQ ID NO: 41033 - protein, 234 aa, Prauserella sp.
  misc_feature (1)..(234): tr|A0A365ZET3|A0A365ZET3_9PSEU 7-cyano-7-deazaguanine s ynthase OS=Prauserella sp. PE36 OX=1504709 GN=queC PE=3 SV=1
MPIGTPEHRHPRHAIVIASGGLDSTVLAYWLAARGAELTLLSFDYGQRHRVELEHAADIARLLNCPHETVELAMLGRLLVGSALTDTEVSVPDGHYTDESMRATVVPNRNAIMLDIAVAVAIVHKADVVAFGAHAGDHAIYPDCRPEFVERFTRSARTANEGLLVDEFEILAPFLTQSKTDIVRIGAALNVPFERTWSCYRGEAAHCGTCGTCTERKEAFEQNGITDPTNYRCA

SEQ ID NO: 41034 - protein, 218 aa, Prevotella aff.
  misc_feature (1)..(218): tr|A0A1I0ML40|A0A1I0ML40_9BACT 7-cyano-7-deazaguanine s ynthase OS=Prevotella aff. ruminicola Tc2-24 OX=81582 G N=queC PE=3 SV=1
MKKDTIIILSGGMDSVTLLYDQQERIALAVSFDYGSNHNAREIPFAKLHCERLGIKHVVIPLDFMAHYFRSSLLEGAEAIPEGHYADENMRSTVVPFRNGIMLAIAVGMAESNGLRFVMMANHGGDHTIYPDCTPQFVAAFDEASRAGTFVNVGLLTPFVNWSKGDIARRGKELGLDYAETWSCYKGGEKHCGKCGTCVERKEALADAGIDDPTIYES

SEQ ID NO: 41035 - protein, 217 aa, Prevotella amnii
  misc_feature (1)..(217): tr|A0A096AVX6|A0A096AVX6_9BACT 7-cyano-7-deazaguanine s ynthase OS=Prevotella amnii DNF00058 OX=1401066 GN=queC PE=3 SV=1
MRNSVIIVSGGLDSITLLYEKADDIALAISFDYGQNHSKNELPLAEYHCKKLGIPHITIPLKFMNVYLKSSLLEGSEAIPEGHYEEENMKSTVVPFRNGIMLSIAIGIAESHNLKYVMIANHGGDHTIYPDCRPEFISAINNAACAGTYINVQVVAPYTNISKTEIVKRGVALGIDYNKTWSCYKGGEKHCGKCGTCVERKEAFLKADVNDPTEYVE

SEQ ID NO: 41036 - protein, 234 aa, Prevotella amnii
  misc_feature (1)..(234): tr|A0A134BK20|A0A134BK20_9BACT 7-cyano-7-deazaguanine s ynthase OS=Prevotella amnii OX=419005 GN=queC PE=3 SV=1
MKSYLFFLLFLHYKEKSMRNSVIIVSGGLDSITLLYEKADDIALAISFDYGQNHSKNELPLAEYHCKKLGIPHITIPLKFMNVYLKSSLLEGSEAIPEGHYEEENMKSTVVPFRNGIMLSIAIGIAESHNLKYVMIANHGGDHTIYPDCRPEFISAIDKAACAGTYINVQVVAPYTNISKTEIVKRGVALGIDYNKTWSCYKGGEKHCGKCGTCVERKEAFLKADVNDPTEYVE

SEQ ID NO: 41037 - protein, 217 aa, Prevotella baroniae
  misc_feature (1)..(217): tr|U2QLA7|U2QLA7_9BACT 7-cyano-7-deazaguanine synthase OS=Prevotella baroniae F0067 OX=1115809 GN=queC PE=3 SV =1
MKDSIIIVSGGMDSITLLHDKKDEIALGVSFDYGSNHNRQEIPFAQLHCERLGIKHVTIPLDFMGRHFKSSLLEGADAIPEGHYAEDNMKSTVVPFRNGIMLAIAVGMAESYGLTKVLIANHAGDHTIYPDCRPAFIAAIDRAAQAGTFADVRVEAPYTHLTKGEIAAVGKRLKLDYAETWSCYKGGERHCGKCGTCIERKEALAFAGIADTTDYEE

SEQ ID NO: 41038 - protein, 242 aa, Prevotella bergensis
  misc_feature (1)..(242): tr|D1PYH8|D1PYH8_9BACT 7-cyano-7-deazaguanine synthase OS=Prevotella bergensis DSM 17361 OX=585502 GN=exsB PE= 3 SV=1
MIDNTNQCKSSTPLKGLDVSSSANKRDAIIIVSGGMDSITMLYEFQDRIALGLSFDYGSNHNAREIPYAEMHCKRLGIPHIIIPLDFMSRYFKSSLLEGADAIPEGDYNEVGMKSTVVPFRNGIMLSIAAGMAESQNLKYIMMANHSGDHIIYPDCRPEFIRAMSKATQTGTFPGIKILAPYTDITKGDIACRGKALGLDYTETWSCYKGGERHCGKCGTCLERIAALKDAGIKDLTEYEEE

SEQ ID NO: 41039 - protein, 217 aa, Prevotella bivia
  misc_feature (1)..(217): tr|A0A096CIH0|A0A096CIH0_9BACT 7-cyano-7-deazaguanine s ynthase OS=Prevotella bivia DNF00320 OX=1401068 GN=queC PE=3 SV=1
MKDSVIIVSGGLDSVTLLYEKADEIALAISFDYGQNHSKNELPLAAYHCEKLGIRHIVIPLKFINEYFKSSLLDGGEAIPEGHYEENNMKSTVVPFRNGIMLSIATGIAESHALKRVMIANHGGDHTIYPDCRPAFIQAMNGATATGTYINVQVEAPYTNITKAEIVHRGAALGIDYSKTWSCYKGGEKHCGKCGTCVERKEAFRDAGVVDPTIYIE

SEQ ID NO: 41040 - protein, 217 aa, Prevotella bivia; identical to SEQ ID NO: 41039
  misc_feature (1)..(217): tr|A0A137T013|A0A137T013_9BACT 7-cyano-7-deazaguanine s ynthase OS=Prevotella bivia OX=28125 GN=queC PE=3 SV=1

SEQ ID NO: 41041 - protein, 217 aa, Prevotella bryantii
  misc_feature (1)..(217): tr|D8DY77|D8DY77_PREBR 7-cyano-7-deazaguanine synthase OS=Prevotella bryantii B14 OX=752555 GN=queC PE=3 SV=1
MKDSVIVVSGGLDSITLLYEKQAEIALGISFDYGSNHNSKEIPFAKMHCERLGIKHITINLEFMHQYFKSSLLEGGDAIPEGNYDEENMKSTVVPFRNGIMLSIAVGLAESHGLKRIFIANHGGDHTIYPDCRPEFIQAIDNAAQAGTYENVRIEAPYTNITKADIVKRGSALGIHYEDTWSCYKGGDIHCGKCGTCTERKEAFELAGVQDPTEYIE

SEQ ID NO: 41042 - protein, 217 aa, Prevotella bryantii; identical to SEQ ID NO: 41041
  misc_feature (1)..(217): tr|A0A255SME4|A0A255SME4_PREBR 7-cyano-7-deazaguanine s ynthase OS=Prevotella bryantii OX=77095 GN=queC PE=3 SV =1

SEQ ID NO: 41043 - protein, 217 aa, Prevotella buccae
  misc_feature (1)..(217): tr|E6K8E8|E6K8E8_9BACT 7-cyano-7-deazaguanine synthase OS=Prevotella buccae ATCC 33574 OX=873513 GN=exsB PE=3 SV=1
MKDSAIIVSGGMDSITLLYDKKDEIALGISFDYGSNHNAREIPFAQMHCERLGIKHIVINLDFMHRYFKSSLLDGADAIPEGHYEADNMKSTVVPFRNGIMLSIAIGIAESHNLKKVLIANHGGDHTIYPDCRPEFIHAIDKAARYGTFINVGVSAPYTDITKGQIASIGKRLGIDYRETWSCYKGGVVHCGKCGTCIERKEALAEAGIEDPTVYEG

SEQ ID NO: 41044 - protein, 217 aa, Prevotella buccae
  misc_feature (1)..(217): tr|D3HWB4|D3HWB4_9BACT 7-cyano-7-deazaguanine synthase OS=Prevotella buccae D17 OX=575611 GN=queC PE=3 SV=1
MKDSAIIVSGGMDSITLLYDKKDEIALGISFDYGSNHNAREIPFAQMHCERLGIKHIVINLDFMHRYFKSSLLDGADAIPEGHYEADNMKSTVVPFRNGIMLSIAIGIAESHNLKKVLIANHGGDHTIYPDCRPEFIHAIDKAARYGTFINVGVSAPYTDITKGQIASIGKRLGIDYRETWSCYKGGVVHCGKCGTCIERKEALAEAGIEDPTVYEE

SEQ ID NO: 41045 - protein, 228 aa, Prevotella buccalis
  misc_feature (1)..(228): tr|D1W7N2|D1W7N2_9BACT 7-cyano-7-deazaguanine synthase OS=Prevotella buccalis ATCC 35310 OX=679190 GN=queC PE= 3 SV=1
MGITRMERNKMEKDSLIIVSGGMDSITMLYEYQQRIAIGVSFDYGSNHNQKEIPLAKMHCDRLGIRHIVIPLSFMHDYFKSSLLEGDDAIPEGHYEEENMKSTVVPFRNGIMLAVGCGLAVSNHLKYVMIANHGGDHTIYPDCRPEFIDSFSQAMAAGTFEGITILAPYTQISKGEIALRGKKLGINYAETWSCYKGGDKQCGKCGTCVERKEALAFAGINDDTPYED

SEQ ID NO: 41046 - protein, 218 aa, Prevotella buccalis
  misc_feature (1)..(218): tr|A0A096BT15|A0A096BT15_9BACT 7-cyano-7-deazaguanine s ynthase OS=Prevotella buccalis DNF00853 OX=1401074 GN=q ueC PE=3 SV=1
MEKDSLIIVSGGMDSITMLYEYQQRIAIGVSFDYGSNHNQKEIPLAKMHCERLGIRHIVIPLSFMHDYFKSSLLEGDDAIPEGHYEEENMKSTVVPFRNGIMLAVGCGLAVSNHLKYVMIANHGGDHTIYPDCRPEFIDSFSQAMAAGTFEGITILAPYTQISKGEIALRGKKLGINYAETWSCYKGGDKQCGKCGTCVERKEALAFAGIKDDTPYED

SEQ ID NO: 41047 - protein, 236 aa, Prevotella colorans
  misc_feature (1)..(236): tr|A0A2U0UFV2|A0A2U0UFV2_9BACT 7-cyano-7-deazaguanine s ynthase OS=Prevotella colorans OX=1703337 GN=queC PE=3 SV=1
MTEKKEEVSPRDNSIEKENKADCVLIVSGGMDSITMLYEFKDRIALGISFDYGSKHNAKEIPLAKLHCQRLGIPHLTIPLHFMAQYFRSSLLKGGEDIPEGNYDDDNMRSTVVPFRNGIMLSIATGIAESHDLRYVMMANHSGDHTIYPDCTPQFVQAMSQATEAGTFPGIKILAPYTRINKADIARRGKILKIDYSETWSCYKGEEFHCGVCGTCRERREALAEAGIDDTTIYMD

SEQ ID NO: 41048 - protein, 217 aa, Prevotella copri
  misc_feature (1)..(217): tr|D1P983|D1P983_9BACT 7-cyano-7-deazaguanine synthase OS=Prevotella copri DSM 18205 OX=537011 GN=queC PE=3 SV =1
MKDSVIIVSGGMDSITLLYDKKDEIALGISFNYGSNHNEREIPFAKMHCERLGIKHITIDLGFMHQYFKSSLLEGADAIPEGHYADDNMKSTVVPFRNGIMLSIAIGIAESNNLKKVFIANHGGDHTIYPDCRPEFIKAIDEAAEAGTFVDVRVVAPYTNITKGQIAEIGKKLGIDYAETWSCYKGGEKHCGKCGTCVERKEALAEAGIEDTTEYEE

SEQ ID NO: 41049 - protein, 217 aa, Prevotella copri
  misc_feature (1)..(217): tr|A0A3E5AD90|A0A3E5AD90_9BACT 7-cyano-7-deazaguanine s ynthase OS=Prevotella copri OX=165179 GN=queC PE=3 SV=1
MKDSVIIVSGGMDSITLLYDKKDEIALGISFNYGSNHNEREIPFAKMHCERLGIKHITIDLGFMHQYFKSSLLEGADAIPEGHYAADNMKSTVVPFRNGIMLSIAIGIAESNKLKKVFIANHGGDHTIYPDCRPEFIKAIDEAAEAGTFVDVRVVAPYTNITKGQIAKIGKKLGIDYAETWSCYKGGEKHCGKCGTCVERKEALAEAGIEDTTEYEE

SEQ ID NO: 41050 - protein, 217 aa, Prevotella corporis
  misc_feature (1)..(217): tr|A0A133PZ64|A0A133PZ64_9BACT 7-cyano-7-deazaguanine s ynthase OS=Prevotella corporis OX=28128 GN=queC PE=3 SV =1
MKDSIIIVSGGLDSITLLYDKQETIELAISFDYGQNHAEKEIPFAAYHCNKLGISHIVIPLKFMQSYFKSSLIEGSDKIPDGHYAEDNMKSTVVPFRNGIMLSIAVGIAESHNLNRIYIANHGGDHTIYPDCRPEFISSMNRAATTGTFNNTCIEAAYTNMSKADIVRRGLSLGIDYSKTWSCYKNGEHQCGKCGTCVERREAFKVVGVEDPTTYSL

SEQ ID NO: 41051 - protein, 217 aa, Prevotella dentalis
  misc_feature (1)..(217): tr|F9D0J5|F9D0J5_PREDD 7-cyano-7-deazaguanine synthase OS=Prevotella dentalis (strain ATCC 49559 / DSM 3688 / JCM 13448 / NCTC 12043 / ES 2772) OX=908937 GN=exsB PE= 3 SV=1
MKDSIIIVSGGMDSITMLYEFRNRIALGLSFDYGSNHNAQELPLARMHCRRLGIPHVTIPLDFMSRYFKSSLLEGAAAIPEGDYDEQNMLSTVVPFRNGIMLSIAAGMAESRGLKRVMMANHTGDHTVYPDCRSEFVEAMSAATRAGTWPGIEVWAPYTRLTKAGIARRGKALGLDYAETWSCYKGGERHCGQCGTCRERREALAEAGITDTTPYED

SEQ ID NO: 41052 - protein, 230 aa, Prevotella denticola
  misc_feature (1)..(230): tr|F2KTE0|F2KTE0_PREDF 7-cyano-7-deazaguanine synthase OS=Prevotella denticola (strain F0289) OX=767031 GN=que C PE=3 SV=1
MFFVNLQEKTDQMKDSVIIVSGGLDSITLLYDRAETIALAVSFDYGQNHGAKELPFAAHHCRKLGIPHITIPLSFMHRFFKSSLLDGAEAIPEGHYAEENMKSTVVPFRNGIMLAIATGIAESHGLRRVYIANHGGDHTIYPDCRPDFIQAMDGAATAGTFVNVRIEAPYTNITKADIVRRGTALGVDYSKTWSCYKGSDVHCGKCGTCVERKEAFLEAGVKDPTEYKPG

SEQ ID NO: 41053 - protein, 218 aa, Prevotella denticola
  misc_feature (1)..(218): tr|A0A379ECS8|A0A379ECS8_9BACT 7-cyano-7-deazaguanine s ynthase OS=Prevotella denticola OX=28129 GN=queC PE=3 S V=1
MKDSVIIVSGGLDSITLLYDKAETIALAVSFDYGQNHGAKELPFAAHHCRKLGIPHITIPLSFMHRYFKSSLLDGAEAIPEGHYAEENMKSTVVPFRNGIMLAIATGIAESHGLKRVYIANHGGDHTIYPDCRPDFIQAMDGAAAAGTFVNVRIEAPYTNITKADIVCRGTALGVDYSKTWSCYKGSDVHCGKCGTCVERKEAFLEAGVKDPTEYEPA

SEQ ID NO: 41054 - protein, 217 aa, Prevotella disiens
  misc_feature (1)..(217): tr|U2IY48|U2IY48_9BACT 7-cyano-7-deazaguanine synthase OS=Prevotella disiens JCM 6334 = ATCC 29426 OX=1235811 GN=queC PE=3 SV=1
MKDSIIIVSGGLDSITLLHQKANTIALAISFDYGQNHASKELPFAALHCKRLGIRHIVIPLQFMHEYFKSSLLEGSDKIPEGHYEEDNMKSTVVPFRNGIMLAIAAGIAESHHLNRIYIANHGGDHTIYPDCRPEFIDAMTAATQAGTFNNTRIEAAFTNITKADIVSIGTKLGIDYAETWSCYKDGNHHCGKCGTCVERKEAFQQAGIDDPTEYEA

SEQ ID NO: 41055 - protein, 217 aa, Prevotella disiens
  misc_feature (1)..(217): tr|A0A096ATS2|A0A096ATS2_9BACT 7-cyano-7-deazaguanine s ynthase OS=Prevotella disiens DNF00882 OX=1401075 GN=qu eC PE=3 SV=1
MKDSIIIVSGGLDSITLLHQKANTIALAISFDYGQNHASKELPFAALHCKRLGIRHIVIPLQFMHEYFKSSLLEGSEKIPEGHYEEDNMKSTVVPFRNGIMLAIAAGIAESHHLNRIYIANHGGDHTIYPDCRPEFIDAMTAATQAGTFNNTRIEAAFTNITKADIVSIGTKLGIDYAETWSCYKDGNHHCGKCGTCVERKEAFQQAGIDDPTEYEA

SEQ ID NO: 41056 - protein, 218 aa, Prevotella fusca
  misc_feature (1)..(218): tr|A0A0K1NLQ4|A0A0K1NLQ4_9BACT 7-cyano-7-deazaguanine s ynthase OS=Prevotella fusca JCM 17724 OX=1236517 GN=que C PE=3 SV=1
MKDSVIIVSGGLDSITLLYDKAESIALAISFDYGQNHGAKELPFAAYHCEKLGIPHITIPLSFMHQYFKSSLLDGAEAIPEGHYEEENMKSTVVPFRNGIMLSIATGIAESHELKRVYIANHGGDHTIYPDCRPEFIHAMNGATEAGTFVNVRVEAPYTEVTKAEIVARGAALGIDYSRTWSCYKGSDVHCGKCGTCMERREAFENAGVDDPTTYCKD

SEQ ID NO: 41057 - protein, 217 aa, Prevotella histicola
  misc_feature (1)..(217): tr|G6AGS5|G6AGS5_9BACT 7-cyano-7-deazaguanine synthase OS=Prevotella histicola F0411 OX=857291 GN=queC PE=3 SV =1
MKDSVIIVSGGLDSITLLYDKASTIALAISFDYGQNHGAKELPFAEYHCHKLGIPHITIPLSFMHQYFKSSLLDGAAAIPEGHYEEENMKSTVVPFRNGIMLAIATGIAESHELKRVYIANHGGDHVIYPDCRPEFISAMNGATEAGTFVNVRVEAPYTNITKADIVRRGAALGIDYSKTWSCYKGSDVHCGKCGTCVERKEAFADAGVNDPTVYEE

SEQ ID NO: 41058 - protein, 217 aa, Prevotella histicola
  misc_feature (1)..(217): tr|A0A095YRM9|A0A095YRM9_9BACT 7-cyano-7-deazaguanine s ynthase OS=Prevotella histicola JCM 15637 = DNF00424 OX =1236504 GN=queC PE=3 SV=1
MKDSVIIVSGGLDSITLLYDKASTIALALSFDYGQNHGAKELPFAEYHCHKLGIPHITIPLSFMHQYFKSSLLDGAAAIPEGHYEEENMKSTVVPFRNGIMLAIATGIAESHELKRVYIANHGGDHVIYPDCRPEFISAMNGATEAGTFVNVRVEAPYTNITKADIVRRGAALGIDYSKTWSCYKGSDVHCGKCGTCVERKEAFADAGVNDPTVYEE

SEQ ID NO: 41059 - protein, 217 aa, Prevotella intermedia
  misc_feature (1)..(217): tr|A0A1P8JFQ6|A0A1P8JFQ6_PREIN 7-cyano-7-deazaguanine s ynthase OS=Prevotella intermedia ATCC 25611 = DSM 20706 OX=1122984 GN=queC PE=3 SV=1
MKDSIIIVSGGLDSITLLYDKAETIALAVSFDYGQNHACKELPFAALHCKRLGIRHIVIPLQFMQQYFKSSLLEGSDKIPEGHYEEENMKSTVVPFRNGIMLAIAAGIAESHNLNRIYIANHGGDHTIYPDCRPDFIDAMTAATEAGTFNNTRIEAAFTNITKADIVRIGTKLGINYAETWSCYKAGKHHCGKCGTCIERHEAFGEAGLADPTEYEE

SEQ ID NO: 41060 - protein, 217 aa, Prevotella intermedia
  misc_feature (1)..(217): tr|A0A0D9NEG5|A0A0D9NEG5_PREIN 7-cyano-7-deazaguanine s ynthase OS=Prevotella intermedia ZT OX=1347790 GN=queC PE=3 SV=1
MKDSIIIVSGGLDSITLLYDKAETIALAVSFDYGQNHACKELPFAALHCKRLGIRHIVIPLQFMQQYFKSSLLEGSDKIPEGHYEEENMKSTVVPFRNGIMLAIAAGIAESHNLNRIYIANHGGDHTIYPDCRPDFIDAMTAATEAGTFNNTRIEAAFTNITKADIVRIGTKLGINYAETWSCYKAGKHHCGKCGTCIERHEAFDEAGLADPTEYEE

SEQ ID NO: 41061 - protein, 218 aa, Prevotella jejuni
  misc_feature (1)..(218): tr|A0A2N9Y9K1|A0A2N9Y9K1_9BACT 7-cyano-7-deazaguanine s ynthase OS=Prevotella jejuni OX=1177574 GN=queC PE=3 SV =1
MKDSVIIVSGGLDSITLLYDKAETIALAISFDYGQNHGSKELPYAQYHCEKLGIPHITIPLSFMHEYFKSSLLDGAEAIPEGHYAEENMKSTVVPFRNGIMLAIATGIAESHELKRVYIANHGGDHTIYPDCRPEFINAMNGATEAGTFVKVCVEAPYTEITKAEIVARGAALGIDYAKTWSCYKGSDVHCGKCGTCVERREAFEAAGVKDPTVYSED

SEQ ID NO: 41062 - protein, 217 aa, Prevotella loescheii
  misc_feature (1)..(217): tr|A0A069QK06|A0A069QK06_PRELO 7-cyano-7-deazaguanine s ynthase OS=Prevotella loescheii DSM 19665 = JCM 12249 = ATCC 15930 OX=1122985 GN=queC PE=3 SV=1
MKDSVIVVSGGMDSITLLYEKKDEIALGISFDYGSNHNHNELPLAALHCQRLGIAHVVIPLGFMHQYFKSSLLESGASIPDGSYDEDNMKSTVVPFRNGIMLAVAAGIAESNGLTKVLIANHGGDHTIYPDCRPEFIAAMDAAVEAGTFANVHVVAPYTNISKADIARRGSSLGIDYAETWSCYKGGDVHCGTCGTCVERKEALREAGIEDNTKYER

SEQ ID NO: 41063 - protein, 217 aa, Prevotella maculosa
  misc_feature (1)..(217): tr|H1HJG9|H1HJG9_9BACT 7-cyano-7-deazaguanine synthase OS=Prevotella maculosa OT 289 OX=999422 GN=queC PE=3 SV =1
MKDSVIIVSGGMDSITLLYDKKNEIALGISFNYESNHNAKEIPLAEMHCRRLGIKHITINLDFMGQYFKSSLLEGGEAIPEGNYADENMKSTVVPFRNGIMLSIAIGIAESNNLKKVLIANHGGDHTIYPDCRPEFIKAIDAAAYAGTFVNAHVEAPYTHITKGDIARIGKRLGLNYAETWSCYKGADKHCGRCGTCIERKEALTEAGIDDTTEYEE

SEQ ID NO: 41064 - protein, 218 aa, Prevotella melaninogenica
  misc_feature (1)..(218): tr|A0A250KKI6|A0A250KKI6_9BACT 7-cyano-7-deazaguanine s ynthase OS=Prevotella melaninogenica OX=28132 GN=queC P E=3 SV=1
MKDSVIIVSGGLDSITLLYDKAETIALAISFDYGQNHGAKELPYAQYHCEKLGIPHITIPLSFMHQYFKSSLLDGADAIPEGHYEEENMKSTVVPFRNGIMLSIATGIAESHELKRVYIANHGGDHTIYPDCRPEFIHAMNGAAKAGTFVNVCIEAPYTEVTKAEIVARGAALGIDYSKTWSCYKGADVHCGKCGTCVERMEAFEDAGVDDPTTYCKD

SEQ ID NO: 41065 - protein, 218 aa, Prevotella melaninogenica
  misc_feature (1)..(218): tr|D9RWC8|D9RWC8_PREMB 7-cyano-7-deazaguanine synthase OS=Prevotella melaninogenica (strain ATCC 25845 / DSM 7 089 / JCM 6325 / VPI 2381 / B282) OX=553174 GN=queC PE= 3 SV=1
MKDSVIIVSGGLDSITLLYDKAETIALAISFDYGQNHGAKELPYAQYHCEKLGIPHITIPLSFMHQYFKSSLLDGADAIPEGHYEEENMKSTVVPFRNGIMLAIATGIAESHELKRVYIANHGGDHTIYPDCRPEFIHAMNGATEAGTFVKVRVEAPYTEITKAEIVARGAALGIDYSKTWSCYKGADIHCGKCGTCVERKEAFEAAGVKDPTIYSMD

SEQ ID NO: 41066 - protein, 218 aa, Prevotella multiformis
  misc_feature (1)..(218): tr|F0F8Q5|F0F8Q5_9BACT 7-cyano-7-deazaguanine synthase OS=Prevotella multiformis DSM 16608 OX=888743 GN=exsB P E=3 SV=1
MKDSVIIVSGGLDSVTLLYDKAEEIALAISFDYGQNHGARELPFAEYHCTKLGIPHITIPLSFMHRYFKSSLLDGAEAIPEGHYAEENMKSTVVPFRNGIMLAIATGIAESHGLKRVYIANHGGDHTIYPDCRPDFIRAMDGAATAGTFVNVRIEAPYTNITKADIVRRGTALDIDYSKTWSCYKGADLHCGKCGTCVERKEAFQEAGVNDPTEYEPA

SEQ ID NO: 41067 - protein, 217 aa, Prevotella multisaccharivorax
  misc_feature (1)..(217): tr|F8N5C3|F8N5C3_9BACT 7-cyano-7-deazaguanine synthase OS=Prevotella multisaccharivorax DSM 17128 OX=688246 GN =queC PE=3 SV=1
MKDSIIIVSGGMDSITMLYEYKDRIALGVSFNYGSNHNQREIPFAEMHCKRLGIPYITIDLAFMPQYLKSSLLEGADAIPEGNYDDENMKSTVVPFRNGIMLSIAVGIAESNHLKYVMMANHGGDHAIYPDCRPEFVKAMSAATTAGTYENVEIWAPYTHITKADIARHGKALGIDYSETWSCYKGGERHCGKCGTCRERKDALHKAGIVDTTEYEE

SEQ ID NO: 41068 - protein, 217 aa, Prevotella nigrescens
  misc_feature (1)..(217): tr|A0A246ELR1|A0A246ELR1_9BACT 7-cyano-7-deazaguanine s ynthase OS=Prevotella nigrescens OX=28133 GN=queC PE=3 SV=1
MKDSIIIVSGGLDSITLLYDKAETIALAVSFDYGQNHASRELPFAALHCQRLGIRHIIIPLQFMQQYFKSSLLEGSDKIPEGHYEEENMKSTVVPFRNGIMLAIAAGIAESHNLNRIYIANHGGDHTIYPDCRPEFIKAMTAATQAGTFNNTRIEAAFTNITKADIVRIGTKLGINYAETWSCYKGGDCHCGKCGTCIERKEAFREAGLTDPTKYEE

SEQ ID NO: 41069 - protein, 217 aa, Prevotella nigrescens; identical to SEQ ID NO: 41068
  misc_feature (1)..(217): tr|V8CMR4|V8CMR4_9BACT 7-cyano-7-deazaguanine synthase OS=Prevotella nigrescens CC14M OX=1073366 GN=queC PE=3 SV=1

SEQ ID NO: 41070 - protein, 218 aa, Prevotella oralis
  misc_feature (1)..(218): tr|E7RTB1|E7RTB1_9BACT 7-cyano-7-deazaguanine synthase OS=Prevotella oralis ATCC 33269 OX=873533 GN=exsB PE=3 SV=1
MKDSVIIVSGGMDSVTMLYEYQDRIALGISFDYGSNHNAKEIPYARLHCKRLGIRHIVIDLGFVHQYFKSSLLEGADAIPEGSYNEGNMKSTVVPFRNGIMLSIAVGVAESHHLKYVMMANHGGDHAIYPDCRPDFVAAMSTAATAGTYEKVCVLAPYTGITKTDIARRGQKFGVNFAETWSCYKGGDKHCGHCGTCRERKEALAEAGIEDLTEYEER

SEQ ID NO: 41071 - protein, 218 aa, Prevotella oralis
  misc_feature (1)..(218): tr|V8C431|V8C431_9BACT 7-cyano-7-deazaguanine synthase OS=Prevotella oralis CC98A OX=1073367 GN=queC PE=3 SV=1
MKDSVIIVSGGMDSVTMLYEYQDRIALGISFDYGSNHNAKEIPYARLHCKRLGIRHIVIDLGFVHQYFKSSLLEGADAIPEGSYNEGNMKSTVVPFRNGIMLSIAVGVAESHHLKYVMMANHGGDHAIYPDCRPDFVAAMSTAATAGTYEKVCVLAPYTGITKTDIARRGQKFGVNFAETWSCYKGGDKHCGRCGTCRERKEALAEAGIEDLTEYEER

SEQ ID NO: 41072 - protein, 217 aa, Prevotella oris
  misc_feature (1)..(217): tr|D7NFF4|D7NFF4_9BACT 7-cyano-7-deazaguanine synthase OS=Prevotella oris C735 OX=563008 GN=queC PE=3 SV=1
MKDSVIIVSGGMDSITLLYDKKDEIALGISFDYGSNHNAKEIPFAEMHCRRLGIKHITINLDFMHRYFKSSLLEGAEAIPEGHYADDNMKSTVVPFRNGIMLSIAIGIAESNNLKKVLIANHGGDHTIYPDCRPEFIKAIDAAAYAGTFVNTHVEAPYTNITKGDIARIGKKLGLDYTETWSCYKGGDKHCGKCGTCIERKEALAEAGIKDATEYEE

SEQ ID NO: 41073 - protein, 217 aa, Prevotella oris
  misc_feature (1)..(217): tr|A0A448L509|A0A448L509_9BACT 7-cyano-7-deazaguanine s ynthase OS=Prevotella oris OX=28135 GN=queC PE=3 SV=1
MKDSVIIVSGGMDSITLLYDKKDEIALGISFDYGSNHNAKEIPLAEMHCRRLGIKHITINLDFMHRYFKSSLLEGAEAIPEGHYADDNMKSTVVPFRNGIMLSIAIGIAESNNLKKVLIANHGGDHTIYPDCRPEFIKAIDAAAYAGTFVNAHVEAPYTNITKGDIARIGKKLGLDYTETWSCYKGGDKHCGKCGTCVERKEALAEAGIKDATEYEE

SEQ ID NO: 41074 - protein, 219 aa, Prevotella oulorum
  misc_feature (1)..(219): tr|G1WB53|G1WB53_9BACT 7-cyano-7-deazaguanine synthase OS=Prevotella oulorum F0390 OX=702438 GN=queC PE=3 SV=1
MTKKNSVIIVSGGMDSITLLYDRQDDIALGISFDYGSNHNAREIPLAAMHCKRLGIPHIVINLDFMQRHFESSLLQGADAIPEGHYAADNMQSTVVPFRNGIMLAIAIGVAESHGLTQVFIANHGGDHTLYPDCTPQFIRAIDAAATAGTYVKAHVVAPYTNISKADIARIGKRLGLNYAETWSCYKGGAHHCGKCGTCIERKEALQAAGIDDPTLYDA

SEQ ID NO: 41075 - protein, 219 aa, Prevotella oulorum
  misc_feature (1)..(219): tr|A0A1T4M3X0|A0A1T4M3X0_9BACT 7-cyano-7-deazaguanine s ynthase OS=Prevotella oulorum OX=28136 GN=queC PE=3 SV= 1
MAKKNSVIIVSGGMDSITLLYDRQDDIALGISFDYGSNHNAREIPLAAMHCKRLGIPHIVINLDFMQRHFESSLLQGADAIPEGHYAANNMQSTVVPFRNGIMLAIAIGVAESHGLTQVFIANHGGDHTLYPDCTPQFIRAIDAAATAGTYVKAHVVAPYTNISKADIARIGKRLGLNYAETWSCYKGGAHHCGKCGTCIERKEALQAAGIDDPTLYDA

SEQ ID NO: 41076 - protein, 217 aa, Prevotella pallens
  misc_feature (1)..(217): tr|F9DJF0|F9DJF0_9BACT 7-cyano-7-deazaguanine synthase OS=Prevotella pallens ATCC 700821 OX=997353 GN=exsB PE= 3 SV=1
MKDSIIIVSGGLDSITLLYDKAATIALAVSFDYGQNHASRELPFAALHCKRLGIQHIVIPLQFMQQYFKSSLLDGAENIPEGHYEEENMKSTVVPFRNGIMLAIAAGIAESHNLNRIYIANHGGDHTIYPDCRPEFINAMTAATQAGTFNNTRVEAAFTNITKADIVRIGNKLGINYAETWSCYKGGKCHCGKCGTCIERKEAFQEAGLTDPTEYEA

SEQ ID NO: 41077 - protein, 217 aa, Prevotella pallens; identical to SEQ ID NO: 41076
  misc_feature (1)..(217): tr|A0A379EZ96|A0A379EZ96_9BACT 7-cyano-7-deazaguanine s ynthase OS=Prevotella pallens OX=60133 GN=queC PE=3 SV= 1

SEQ ID NO: 41078 - protein, 217 aa, Prevotella ruminicola
  misc_feature (1)..(217): tr|A0A1H5TC30|A0A1H5TC30_PRERU 7-cyano-7-deazaguanine s ynthase OS=Prevotella ruminicola OX=839 GN=queC PE=3 SV =1
MKKDSILILSGGMDSTTLLYDYQERIALAISFDYGSNHNAKEIPFARWHCEHLGIRHIVIPLEFMSQYFRSSLLEGDAAIPEGHYASENMKSTVVPFRNGIMLAIAAGMAESNELQYIMMANHGGDHTIYPDCRPEFVEAFDAAVHAGTFNGVRLLSPYCNMTKGEIAARGKELGIDYSKTWSCYRGGDKHCGKCGTCVERKEALADAGIPDPTDYE

SEQ ID NO: 41079 - protein, 217 aa, Prevotella ruminicola
  misc_feature (1)..(217): tr|D5EXA0|D5EXA0_PRER2 7-cyano-7-deazaguanine synthase OS=Prevotella ruminicola (strain ATCC 19189 / JCM 8958 / 23) OX=264731 GN=queC PE=3 SV=1
MKDSIIILSGGMDSTTLLYDYQERIALAISFDYGSNHNAKEIPFAKYHCEQLGIKHLVIPLKFMGEYFRSSLLSGDEAIPEGHYASENMKSTVVPFRNGIMLAVATGMAESNDLQYVMMANHGGDHTIYPDCRPEFVDAFDKTAQAGTFNGVRLLSPYCNMTKGQIAARGKELGIDYSKTWSCYRGGDKHCGKCGTCVERKEALADAGIDDPTEYED

SEQ ID NO: 41080 - protein, 225 aa, Prevotella saccharolytica
  misc_feature (1)..(225): tr|L1NGL5|L1NGL5_9BACT 7-cyano-7-deazaguanine synthase OS=Prevotella saccharolytica F0055 OX=1127699 GN=queC P E=3 SV=1
MDKNMKDSVIIVSGGMDSITLLYDKKDTIVLGISFDYGSNHNHNELPLARMHCERLGIPHITIDLTFIHEHFKSSLLRGADTIPDGSYSEENMKSTVVPFRNGIMLSIAAGIAESKGLTKLLIANHGGDHTIYPDCRPDFIHAMDYAVAKGTFAHLHIVAPYTNISKTDIVRRGLALGIDYAETWSCYKGGDTPCGTCSTCIERQQALHEAEALPHLSFPLPDIS

SEQ ID NO: 41081 - protein, 217 aa, Prevotella salivae
  misc_feature (1)..(217): tr|U2L5Z2|U2L5Z2_9BACT 7-cyano-7-deazaguanine synthase OS=Prevotella salivae F0493 OX=1395125 GN=queC PE=3 SV= 1
MKDSVIIVSGGMDSITLLYDKKDEIALGISFDYGSNHNAKEIPFAEMHCKRLGIKHITINLDFMHQYFKSSLLQGAEAIPEGHYADENMKSTVVPFRNGIMLSIAIGIAESNHLKKVLIANHGGDHTIYPDCRPQFIQAIDAAANAGTFVNVRVEAPYTNITKGDIARIGKRLGLDYTETWSCYKGGEKHCGKCGTCIERKEALQEAGIHDATEYEE

SEQ ID NO: 41082 - protein, 217 aa, Prevotella salivae
  misc_feature (1)..(217): tr|E6MT81|E6MT81_9BACT 7-cyano-7-deazaguanine synthase OS=Prevotella salivae DSM 15606 OX=888832 GN=exsB PE=3 SV=1
MKDSVIIVSGGMDSITLLYDKKDEIALGISFDYGSNHNAKEIPFAEMHCKRLGIKHITINLDFMHQYFKSSLLQGAEAIPEGHYADENMKSTVVPFRNGIMLSIAIGIAESNQLKKVLIANHGGDHTIYPDCRPQFIQAIDAAANAGTFVNVRVEAPYTNITKGDIARIGKRLGLDYTETWSCYKGGEKHCGKCGTCIERKEALQEAGIHDATEYEE

SEQ ID NO: 41083 - protein, 218 aa, Prevotella scopos
  misc_feature (1)..(218): tr|A0A1B1IB73|A0A1B1IB73_9BACT 7-cyano-7-deazaguanine s ynthase OS=Prevotella scopos JCM 17725 OX=1236518 GN=qu eC PE=3 SV=1
MKDSVIIVSGGLDSITLLYDKAETIALAISFDYGQNHGAKELPFAQYHCEKLDIPHITIPLSFMHQYFKSSLLDGADAIPEGHYEEENMKSTVVPFRNGIMLAIATGIAESHELKRVYIANHGGDHTIYPDCRPEFIHAMNGAAEAGTFVNVRIEAPYTKITKAEIVARGAALGIDYSKTWSCYKGADVHCGKCGTCVERKEAFEEAGVQDPTIYHKD

SEQ ID NO: 41084 - protein, 217 aa, Prevotella shahii
  misc_feature (1)..(217): tr|A0A318HRZ6|A0A318HRZ6_9BACT 7-cyano-7-deazaguanine s ynthase OS=Prevotella shahii DSM 15611 = JCM 12083 OX=1 122991 GN=queC PE=3 SV=1
MKDSIIVVSGGMDSVTLLYDKKDEIALGLSFDYGSNHNHNELPLAAMHCERLGIPHVVIPLGFMHQYFKSSLLESGESIPDGSYNEENMKSTVVPFRNGVMLAVAAGIAESNGLTKILIANHGGDHTIYPDCRPEFIAAMDAAVNAGTFANVHVVAPYTNWSKADIAKRGEVLGLDYTETWSCYKGGDVHCGTCGTCVERKEALREAGIADNTKYER

SEQ ID NO: 41085 - protein, 217 aa, Prevotella sp.
  misc_feature (1)..(217): tr|A0A3R6HQP2|A0A3R6HQP2_9BACT 7-cyano-7-deazaguanine s ynthase OS=Prevotella sp. AM34-19LB OX=2292364 GN=queC PE=3 SV=1
MKDSVIIVSGGMDSITLLYDKKDEIALGISFNYGSNHNEREIPFAKMHCERLGIKHITIDLGFMHQYFKSSLLEGADAIPEGHYADDNMKSTVVPFRNGIMLSIAIGIAESNNLKKVLIANHGGDHTIYPDCRPEFIKAIDEAAEAGTFVDVRVVAPYTNITKGEIAAIGKKLGIDYAETWSCYKGGEKHCGKCGTCVERKEALAAAGIEDTTEYED

SEQ ID NO: 41086 - protein, 219 aa, Prevotella sp.
  misc_feature (1)..(219): tr|R7HPL3|R7HPL3_9BACT 7-cyano-7-deazaguanine synthase OS=Prevotella sp. CAG:279 OX=1262924 GN=queC PE=3 SV=1
MDEKDSIIVLSGGMDSVTLLYEFRANIALAVTFDYGSNHNRREIEFARMHCERLGIEHIVIPLDFMAKYFKSSLLEGAEAIPEGNYDDENMKSTVVPFRNGIMLAVACGLAESRGLSHVMIANHAGDHAIYPDCRPAFVRAMSSAMSAGTYDGITVMAPYTNVSKTEIARHGARLGLNYAETYSCYKGGEKHCGKCGTCRERIEALHDAGIEDPTEYEE

SEQ ID NO: 41087 - protein, 216 aa, Prevotella stercorea
  misc_feature (1)..(216): tr|G6AWV1|G6AWV1_9BACT 7-cyano-7-deazaguanine synthase OS=Prevotella stercorea DSM 18206 OX=1002367 GN=queC PE =3 SV=1
MKNSAIIVSGGMDSITLLYDHKDEIALGISFDYGSNHNAREIPFAKMHCERLGIKHITINLDFMHQYFKSSLLDGAEAIPEGHYADDNMKSTVVPFRNGIMLAIAIGIAESNNLDQVFIANHGGDHTIYPDCRPEFINAIDAAATAGTYNNVKVIAPYTKITKSDIARIGKRLGIDYAETWSCYKGGEVHCGKCGTCVERKEALAEAGIEDKTIYE

SEQ ID NO: 41088 - protein, 205 aa, Prevotella stercorea
  misc_feature (1)..(205): tr|R7H4Q5|R7H4Q5_9BACT 7-cyano-7-deazaguanine synthase OS=Prevotella stercorea CAG:629 OX=1263103 GN=queC PE=3 SV=1
MDSITLLYDRKDEITLGISFDYGSNHNAREIPFAKMHCERLGIKHITINLDFMHQYFKSSLLDGAEAIPEGHYADDNMKSTVVPFRNGIMLAIAIGIAESNNLDQVFIANHGGDHTIYPDCRPEFINAIDAAATAGTYNNVKVIAPYTKITKSDIARIGKRLGIDYAETWSCYKGGEVHCGKCGTCVERKEALAEAGIEDKTIYE

SEQ ID NO: 41089 - protein, 218 aa, Prevotella timonensis
  misc_feature (1)..(218): tr|A0A2K0XNH7|A0A2K0XNH7_9BACT 7-cyano-7-deazaguanine s ynthase OS=Prevotella timonensis OX=386414 GN=queC PE=3 SV=1
MEKDSLIIVSGGMDSITMLYEYQQRIAIGVSFDYGSNHNQKEIPLAKMHCERLGIRHIVIPLSFIHNYFKSSLLEGDDAIPEGHYEEENMKSTVVPFRNGIMLAVGCGLAVSNHLKYVMIANHGGDHTIYPDCRPEFIDSFSQAMAAGTFEGITILAPYTQLSKGEIALRGKKLGINYAETWSCYKGGDKQCGKCGTCVERKEALAFADIKDDTPYED

SEQ ID NO: 41090 - protein, 218 aa, Prevotella timonensis
  misc_feature (1)..(218): tr|A0A098YQS5|A0A098YQS5_9BACT 7-cyano-7-deazaguanine s ynthase OS=Prevotella timonensis S9-PR14 OX=1401062 GN= queC PE=3 SV=1
MEKDSLIIVSGGMDSITMLYEYQQRIAIGVSFDYGSNHNQKEIPLAKMHCERLGIRHIVIPLSFIHDYFKSSLLEGDDAIPEGHYEEENMKSTVVPFRNGIMLAVGCGLAVSNHLKYVMIANHGGDHTIYPDCRPEFIDSFSQAMTAGTFEGITILAPYTRISKGEIALRGKKLGINYAETWSCYKGGDKQCGKCGTCVERKEALAFAGIKDDTPYED

SEQ ID NO: 41091 - protein, 217 aa, Prevotella veroralis
  misc_feature (1)..(217): tr|C9MSF4|C9MSF4_9BACT 7-cyano-7-deazaguanine synthase OS=Prevotella veroralis F0319 OX=649761 GN=queC PE=3 SV =1
MKDSVIIVSGGLDSITLLYDKAETIALAISFDYGQNHGKKELPYAEYHCQKLGIPHITIPLTFMHQYFKSSLLEGAEAIPEGHYEEENMKSTVVPFRNGIMLAIATGIAESHELKRVYIANHGGDHTIYPDCRPEFIDAMDKATSAGTFVDVRVEAPYTNISKADIVRRGTALGIDYAKTWSCYKGSEIHCGKCGTCVERKEAFADAGVEDPTEYEN

SEQ ID NO: 41092 - protein, 222 aa, Prevotellaceae bacterium
  misc_feature (1)..(222): tr|A0A316NKJ8|A0A316NKJ8_9BACT 7-cyano-7-deazaguanine s ynthase OS=Prevotellaceae bacterium OX=2049047 GN=queC PE=3 SV=1
MIKNDDKALVVLSGGQDSTTCLFWAKEHFAEIWAITFSYGQHHVSEIKAAEEVARIAGAKWELLDVPLVGSLGKNSLTCPDVKMDEEKPAGGPPNTFVPGRNLFFLSIAAVYARERGIRHLVTGVGQTDFSGYPDCRDTFVKSLNVTLNLAMEEQFVIHTPLMWIDKKETWAMADELGVLDIVKEKTVTCYNGVPGDGCGHCPACKLRKHGLESYLNEKKKK

SEQ ID NO: 41093 - protein, 218 aa, Prevotellaceae bacterium
  misc_feature (1)..(218): tr|A0A1K1M6G4|A0A1K1M6G4_9BACT 7-cyano-7-deazaguanine s ynthase OS=Prevotellaceae bacterium HUN156 OX=1520830 G N=queC PE=3 SV=1
MEKDSLLILSGGVDSVTLLYDEQERIALAVSFDYGSNHNAKEIPFARLHCERLGIKHIVIPLDFMSKYFKSSLLEGADAIPEGHYEDKNMKSTVVPFRNGIMLSIAVGIAESHELKYVMMANHGGDHAIYPDCRPEFVSAFDAAAAVGTYVNVHLHSPYTTLTKADIARKGKELGIDYSETWSCYKGGEHHCGKCGTCVERREAFALAGIKDTTIYEE

SEQ ID NO: 41094 - protein, 226 aa, Prochlorococcus marinus
  misc_feature (1)..(226): sp|A2CDY7|QUEC_PROM3 7-cyano-7-deazaguanine synthase OS =Prochlorococcus marinus (strain MIT 9303) OX=59922 GN= queC PE=3 SV=2
MSDSTTIALLSGGLDSATAAALAIEAGQKVIGLSFDYGQRHRKELQAAEELAACMGLTEHHVISVNLGSWGGSSLTDLTQTVPSEGVVDGVIPNTYVPGRNTVFIAIGLSLAEARHANRLVLGVNAMDYSGYPDCRPDYLKAYQSLADLANKAGREGHGIKLWAPLMHWHKKRIVQEALRLGVPIDKTWSCYSGGDHACGICDSCRIRDAALSEAGRSDLCSKPAP

SEQ ID NO: 41095 - protein, 225 aa, Prochlorococcus marinus
  misc_feature (1)..(225): sp|A2C5G1|QUEC_PROM1 7-cyano-7-deazaguanine synthase OS =Prochlorococcus marinus (strain NATL1A) OX=167555 GN=q ueC PE=3 SV=1
MIEQTTIALLSGGIDSATAACIAMEAGQKVIGLSFDYGQRHLKELQAAADLAKNLNLEDHITIKIDLSSWGGSSLTDTSQAIPTKGIQKNTIPNTYVPGRNTIFVAIGLSLAEARGANRIALGINAMDYSGYPDCRPDYLKAYQELANLSSRVGREGKGIKLWAPLLDWEKTKIFEEALRLKIPIEKTWSCYQGESKPCGRCDSCRIRDKALKEIGREDLCSQNI

SEQ ID NO: 41096 - protein, 226 aa, Prochlorococcus sp.
  misc_feature (1)..(226): tr|A0A0A2CKE8|A0A0A2CKE8_9PROC 7-cyano-7-deazaguanine s ynthase OS=Prochlorococcus sp. MIT 0701 OX=1499502 GN=q ueC PE=3 SV=1
MSDSTTIALLSGGLDSATAAALAIEAGQKVIGLSFDYGQRHRKELQAAEALAAHMGLTEHNVINVNLGSWGGSSLTDLKQTVPSGGVIKDVIPSTYVPGRNTVFIAIGLSLGEARKADRLVLGVNAMDYSGYPDCRPDYLAAFQTLADLASKAGREGDGIKLWAPLMHWNKVEIVQEALRLGVPIEQTWSCYSGGDHACGICDSCRIRDAALSKAGRSDLCSQQQL

SEQ ID NO: 41097 - protein, 229 aa, Prochlorococcus sp.
  misc_feature (1)..(229): tr|A0A162BGL5|A0A162BGL5_9PROC 7-cyano-7-deazaguanine s ynthase OS=Prochlorococcus sp. MIT 1306 OX=1799667 GN=q ueC PE=3 SV=1
MASMIHSTTIALLSGGLDSATAAALAVEAGQTVIGLSFDYGQRHRKELQAADALAAHMGLTEHHVISVNLGSWGGSSLTDLTQTVPSEGVVDGVIPNTYVPGRNTVFIAIGLSLAEARNANQLVLGVNAMDYSGYPDCRPDYLKAYQALADLANKAGREGHGIKLWAPLMHWNKKRIVQEALRLKVPIDKTWSCYSGGEHACGICDSCRIRDAALSEAGRSDLCSKPTP

SEQ ID NO: 41098 - protein, 256 aa, Prochlorothrix hollandica
  misc_feature (1)..(256): tr|A0A0M2PZ01|A0A0M2PZ01_PROHO 7-cyano-7-deazaguanine s ynthase OS=Prochlorothrix hollandica PCC 9006 = CALU 10 27 OX=317619 GN=queC PE=3 SV=1
MGGEQSQTPEPKPQNCPKAVVLLSGGLDSATAAAQAIADGYQPIALSLDYGQRHNRELQAAQVIARHLGIQQHYTIAVNLAQWGGSSLTDPRQTLPQDGVQDNQIPSTYVPGRNTVFIALALALAEAQGAVAIYLGINAVDYSGYPDCRPPYLEAFQALAQVSSKVGLEGHAPQLVAPLVLDSKVDIVRRALALGVPIAETWSCYGGGEEPCGTCDSCRIRDRALWDAGQPQLVSNQGRPLGQMVPLGELDHPSVS

SEQ ID NO: 41099 - protein, 245 aa, Prolinoborus fasciculus
  misc_feature (1)..(245): tr|A0A2U3MMW5|A0A2U3MMW5_9NEIS 7-cyano-7-deazaguanine s ynthase OS=Prolinoborus fasciculus OX=1056810 GN=queC_2 PE=4 SV=1
MNNVLWTGGWDSTFRILDLVLIKGREVQPFYVLDNGRNSTSIELETMQNIRQMIKELKPGAEKLIKDHIFIKIDEIPVDDLITEKYQHLLSQSFLGSQYDWLGRYVKSTGLNNLELCVHKDDKAEGFVKDEVHHVVDGNDDFYKLNTNLKNPALSIFENYNFPLLQMTKVEMGEIAKKHNFFHIMEQTWFCFNPTKDRKPCGLCNPCKYTREEGLGRRVPDVPFSKVLYLKVRGILGRIKRLFIN

SEQ ID NO: 41100 - protein, 222 aa, Prolinoborus fasciculus; identical to SEQ ID NO: 35594
  misc_feature (1)..(222): tr|A0A2U3MEE4|A0A2U3MEE4_9NEIS 7-cyano-7-deazaguanine s ynthase OS=Prolinoborus fasciculus OX=1056810 GN=queC_1 PE=3 SV=1

SEQ ID NO: 41101 - protein, 254 aa, Prolixibacter denitrificans
  misc_feature (1)..(254): tr|A0A2P8CG65|A0A2P8CG65_9BACT 7-cyano-7-deazaguanine s ynthase OS=Prolixibacter denitrificans OX=1541063 GN=qu eC PE=3 SV=1
MFGCYLVCLLLFQEYGFSLLMILEISYLYQNMKKAIVLLSGGLDSSVALHLAKSKGFDVYALSFDYGQRHERELQSARETAQSAGVKEHHIVNMRLDLWGGSALTDQSIEVENGDVTRTDIPVTYVPARNMVFLSVAASYAEAIGARDIFIGVSQVDYSGYVDCRQEFIDAMEAAINKGTVCGAEMDDPIHVHAPFIDKTKADEIRLGMELGVDFGLTWSCYRGGEKPCGTCDSCLLRAKAFEEAGYTDPLLEK

SEQ ID NO: 41102 - protein, 219 aa, Prolixibacteraceae bacterium
  misc_feature (1)..(219): tr|A0A399T5C0|A0A399T5C0_9BACT 7-cyano-7-deazaguanine s ynthase OS=Prolixibacteraceae bacterium XSD2 OX=2305463 GN=queC PE=3 SV=1
MIAEKALVVFSGGQDSTTCLFWAQQHFSEVQAIAFDYGQRHKIELEAARSIAEKAGIQLHIFRMDLLGQLTQNALTSQEMEVEEAKPEDRPPNTLVEGRNMLFLTYAAIFAKARGIHHLVTGVGQADFSGYPDCRNDFILSLNSTLNLSMDYDYTIHTPLMWKDKAAIWQLADELGVMEIVQNETVTCYNGVKGKGCGHCPACMLRNRGLENYLNSKKA

SEQ ID NO: 41103 - protein, 219 aa, Prolixibacteraceae bacterium
  misc_feature (1)..(219): tr|A0A355IZ72|A0A355IZ72_9BACT 7-cyano-7-deazaguanine s ynthase OS=Prolixibacteraceae bacterium OX=2053594 GN=q ueC PE=3 SV=1
MIGDKALVVFSGGQDSSTCLFWAKKHFAEVFAIAFNYGQRHKIELEAAKNIAKRAGVQLQIFKIDLLSQLTENALTSQQIEIEKEKPADRPPNTLVEGRNMLFLTYAAIFAKANGINHLVTGVGQADFSGYPDCRNDFILSLNQTLNLSMDIQYTIHTPLMWKNKAEIWQLADELGVFDLVRNETVTCYNGIKGAGCGECPACILRNRGLEMYLKTKNV

SEQ ID NO: 41104 - protein, 226 aa, Propionibacteriaceae bacterium
  misc_feature (1)..(226): tr|A0A2E0EA14|A0A2E0EA14_9ACTN 7-cyano-7-deazaguanine s ynthase OS=Propionibacteriaceae bacterium OX=2021380 GN =queC PE=3 SV=1
MTDSTAIALLSGGLDSATAAALAMKSGFRVIGLSFDYGQRHHRELDAATEIAKALNLAEHHTISVNLASWGGSSLTDCHQELPTGGVQEGVIPNTYVPGRNTVFISIGLSLAEARGADHLVLGVNAVDYSGYPDCRPDYLEAFQVLADLSSRVGREGHGPKLWAPLVVWGKQRIVEEALHLGVPIERTWSCYSGGDVPCGVCDSCRIRNEALLAAGRPDLCSPRCL

SEQ ID NO: 41105 - protein, 438 aa, Propionibacteriaceae bacterium
  misc_feature (1)..(438): tr|A0A359FB62|A0A359FB62_9ACTN Uncharacterized protein OS=Propionibacteriaceae bacterium OX=2021380 GN=DEG88_0 3345 PE=4 SV=1
MIARSEAASYLVRYRSGTESQSRSLQWESDLTVDGRGFRQHLAEAMPPEASDLLILAASAYAVDRMVARPGLRRTRDSGDWHRDLFMDVPVSDPSRWAALAAKTERLLRWLTDDNWNLHFSQRAGYRGPLDPSQQALFSALPARCRPILFSGGLDSGCALQNALSVDDAVAISVHTNSWMQNTQRTVAQGLASLSTHRLAALSFRVNLPAGGTETSQRTRGLLFLASGTMAAIAAGADGLVVAENGVGAINLPYVASQRGTESTRAMHPRTLHMFSDIVSSLRGTEFTVDAPYLMSTKAELIGMTNAVADKALSHTVSCDSGFSARVAHREPCGRCTSCILRRQSLAAAGRPMVDERLPYRHPIPVEFPEFSAMAWQVLRLRRCLREPDPWPQLMCEFPELVHLDGLLDQGRVLSLYDRYVQEFETYLQSLGIEQQWM

SEQ ID NO: 41106 - protein, 222 aa, Propionispira arboris
  misc_feature (1)..(222): tr|A0A1H6W2A4|A0A1H6W2A4_9FIRM 7-cyano-7-deazaguanine s ynthase OS=Propionispira arboris OX=84035 GN=queC PE=3 SV=1
MKAVVLLSGGLDSTVCMAVAKNKGLDVYPISFDYHQRHRIELESAKKVADFFAVKKHLIIDTNMNQIGGSALTDKTIDIPNGDVTRTDIPVTYVPARNLIFLSYALGYAEVLDAPYIYIGVNAVDYSGYPDCRPEFIQKFQDLSDYATKATAADHKKIKIETPLLDLSKKDIVLLGNKLQAPLHLTRSCYNEGENACGICDSCKLRLRGFEEAGIKDPVTYL

SEQ ID NO: 41107 - protein, 227 aa, Propionispora hippei
  misc_feature (1)..(227): tr|A0A1M6A6I0|A0A1M6A6I0_9FIRM 7-cyano-7-deazaguanine s ynthase OS=Propionispora hippei DSM 15287 OX=1123003 GN =queC PE=3 SV=1
MKAVVLLSGGLDSTVCMAVAKEQGFELLPLSFNYHQRHNRELACACNVADYYKVKRHLVIETNMEAIGGSALTDNSMTVPQGDIAREDIPSTYVPARNLIFLSYALGYAEVNRAEKIFIGVNALDYSGYPDCRPEFINLFQQVANYSTKAATQEGQEISVVTPLLHLTKKEIVQLGNRLGAPLELTTSCYQGGDAACGTCDSCLLRLKGFAEAGISDPILYSSTRSE

SEQ ID NO: 41108 - protein, 219 aa, Propionispora sp.
  misc_feature (1)..(219): tr|A0A0K8JC79|A0A0K8JC79_9FIRM 7-cyano-7-deazaguanine s ynthase OS=Propionispora sp. 2/2-37 OX=1677858 GN=queC PE=3 SV=1
MLKSQGAMVVFSGGQDSTTCLFWAREQFGQVEAITFNYNQRHKDEIKFAQKICTDLSIPHSVLDMSLLNQLTANALTRDDIAIAYGENGNPPSTFVDGRNLLFLSFAAIAAKQKGFRHIVTGVCETDFSGYPDCRDVFVKSLNVTLNLAMDYQFVLHTPLMWIDKAATWEMADKMGKLEYIRDNTLTCYNGVIGSGCGDCPACKLRNEGLRKYLERRGR

SEQ ID NO: 41109 - protein, 227 aa, Propionispora vibrioides
  misc_feature (1)..(227): tr|A0A1H8PA81|A0A1H8PA81_9FIRM 7-cyano-7-deazaguanine s ynthase OS=Propionispora vibrioides OX=112903 GN=queC P E=3 SV=1
MKAVVLLSGGLDSTVCMAVAKEQGFELLPLSFNYHQRHNRELACARNVADYYKVKRHLVIETNMEAIGGSALTDNSITVPQGDIARPDIPSTYVPARNLIFLSYALGYAEVNRAEKIFIGVNALDYSGYPDCRPEFINLFQQVANYSTKAATQEGQEISVVTPLLHLTKREIVQLGSRLGAPLELTTSCYQGGDAACGTCDSCLLRLKGFAEAGISDPILYSSTRSE

SEQ ID NO: 41110 - protein, 219 aa, Propionivibrio dicarboxylicus
  misc_feature (1)..(219): tr|A0A1G8LF66|A0A1G8LF66_9RHOO 7-cyano-7-deazaguanine s ynthase OS=Propionivibrio dicarboxylicus OX=83767 GN=qu eC PE=3 SV=1
MLLSGGLDSATTLAIARDRGHACYCLSLDYGQRHGAELNAAKKLASSLGAREHRVMKLDLAAFGGSALTDEHIAVPTEGVGSGIPVTYVPARNTIMLSLALAWAEVLGSRDIYVGVNAVDYSGYPDCRPEFIASFQAMANLATKAAVEGARLTIHAPLISLSKADIIRRGVSLGVDYGMTISCYQADEGGRACGLCDACRLRQEGFAAAGVTDPTVYQD

SEQ ID NO: 41111 - protein, 230 aa, Prosthecobacter debontii
  misc_feature (1)..(230): tr|A0A1T4Y4A8|A0A1T4Y4A8_9BACT 7-cyano-7-deazaguanine s ynthase OS=Prosthecobacter debontii OX=48467 GN=queC PE =3 SV=1
MSKAIILLSGGLDSTVALYWARQHHEVVGAVSFDYGSKHNDKEIVLALWHCSQLDIPHDTVALPFVNDLFQSDLLKSGGSIPEGHYADDNMKRTVVPFRNGIMLAIACGIAESRNVDALVIAAHSGDHAIYPDCREPFMKAIGDAMREGTYARTELMRPFIDKNKTDIVRLGHELGVDFGRTWSCYKGEDLQCGVCGTCVERRESFMRAGVPDPTVYQNEGPLPQPVALT

SEQ ID NO: 41112 - protein, 198 aa, Prosthecobacter debontii
  misc_feature (1)..(198): tr|A0A1T4Z2U0|A0A1T4Z2U0_9BACT 7-cyano-7-deazaguanine s ynthase OS=Prosthecobacter debontii OX=48467 GN=SAMN027 45166_04870 PE=3 SV=1
MTSNGILLSGGIDSVALAFWKRPKYAFTVNYGQTGFLGELRASQKICSELGINHEVVSVDCRALGAGDMAGLPAAKNAPAVEWWPFRNQLLVTLVAMKGYPLGLSELLVGSVLSDGFHSDGTEAFYTKLDSLLSFQEGGVRVSAPAIGHTSVELVRLSGIPLELLAWTHSCHVSEFACGQCRGCHKNQRVWEDLQSGQ

SEQ ID NO: 41113 - protein, 230 aa, Prosthecobacter fusiformis
  misc_feature (1)..(230): tr|A0A4R7RL76|A0A4R7RL76_9BACT 7-cyano-7-deazaguanine s ynthase OS=Prosthecobacter fusiformis OX=48464 GN=queC PE=3 SV=1
MSKAIILLSGGLDSTVALYWARQHHNVVGAVSFDYGSKHNDKEIALAIWHCAQFGIPHDLVSLPFVNDLFNSALLKSGGAIPEGHYSDNNMKRTVVPFRNGIMLAIACGIAESREVDALIIAAHSGDHAIYPDCREPFMQAMGNAMREGTYARIELLRPFIDMNKIAIAKLGHELGVDMGKTWSCYKGEDLQCGICGTCVERREAFILAGLTDPTVYLHEGPLPRKPGEL

SEQ ID NO: 41114 - protein, 226 aa, Prosthecochloris aestuarii
  misc_feature (1)..(226): sp|B4S6H3|QUEC_PROA2 7-cyano-7-deazaguanine synthase OS =Prosthecochloris aestuarii (strain DSM 271 / SK 413) O X=290512 GN=queC PE=3 SV=1
MRAVVLLSGGMDSLVATAEADALGYELAAMHVNYGQRTWHKELMAFRAICDHYGIRHRLEVDADYLSAIGGSSLTDPSIPVEEADLHGATIPTSYVPFRNASFLSMAVAWSEVIGAEKIYIGAVEEDSSGYPDCRKVFYDAFNRVIELGTRPETAIGIETPLIELQKSAIVRRGIALQVPFRLSWSCYKSEGKACGHCDSCARRLRAFSLAGATDPIDYEQRPDYI

SEQ ID NO: 41115 - protein, 226 aa, Prosthecochloris marina
  misc_feature (1)..(226): tr|A0A317T4Q3|A0A317T4Q3_9CHLB 7-cyano-7-deazaguanine s ynthase OS=Prosthecochloris marina OX=2017681 GN=queC P E=3 SV=1
MRAVVLISGGMDSLVVTALADFLGYDIAAMHVNYGQRTWQKELMAFRQICSHYNIERRLEIDTPFLAQIGGSSLTDNTIPVEAADLDGSEVPSSYVPFRNASFLSMAASWSEVIGANKIFIGAVEEDSSGYPDCRKVFYEAFNRVIELGTRPETAIEIQTPLIDLQKSGIVKKGIDLDVPFQYSWSCYKSEGKACGVCDSCARRLRAFQQVGVPDPIDYEERPGYV

SEQ ID NO: 41116 - protein, 226 aa, Prosthecochloris sp.
  misc_feature (1)..(226): tr|A0A1B1Q3I4|A0A1B1Q3I4_9CHLB 7-cyano-7-deazaguanine s ynthase OS=Prosthecochloris sp. CIB 2401 OX=1868325 GN= queC PE=3 SV=1
MKAVVLLSGGMDSLVTTAEANASGYSIAAMHVNYGQRTWQKELESFRAICDHYGVADRLEVDADYLSCIGGSSLTDSSIPVESADLHGTTIPSSYVPFRNASFLSMAASWAEVIGAGKIYIGAVEEDSSGYPDCRKVFYEAFDKVLELGTRPETDISIETPLIELQKSAIVRRGVELEVPFELSWSCYKSEGRACGVCDSCARRLRAFEILGMEDPLEYESRPRYT

SEQ ID NO: 41117 - protein, 242 aa, Prosthecochloris sp.
  misc_feature (1)..(242): tr|A0A1W6HQU5|A0A1W6HQU5_9CHLB Uncharacterized protein OS=Prosthecochloris sp. HL-130-GSB OX=1974213 GN=B9H02_ 01590 PE=4 SV=1
MHEQPVHLLWSGGWDSTFRLCDLLLVRHKSVQPYYIIDHHRKSLAQELRAVRTVHSFLEQRVKLSECRMLPIHTVWRFDIPPDAGVSENYNALVKRFDKFGPQYEWVLRFAKHTGIEDLELSIEANTYQEEAKIWQQLRSMLVEYNGVFILRTDPPDPDFDFFRPFRFPLINITKVQMMDYAREHGFYDIMEKTWFCHSPCKGRPCGVCPPCRNALMEGMAHRVPVSGKLRYMQWKLGLRKR

SEQ ID NO: 41118 - protein, 226 aa, Prosthecochloris vibrioformis; identical to SEQ ID NO: 41116
  misc_feature (1)..(226): tr|A0A5C4RXD8|A0A5C4RXD8_PROVB 7-cyano-7-deazaguanine s ynthase OS=Prosthecochloris vibrioformis OX=1098 GN=que C PE=3 SV=1

SEQ ID NO: 41119 - protein, 221 aa, Proteiniphilum acetatigenes
  misc_feature (1)..(221): tr|A0A124FX63|A0A124FX63_9BACT 7-cyano-7-deazaguanine s ynthase OS=Proteiniphilum acetatigenes OX=294710 GN=que C PE=3 SV=1
MKDYQQEDALVLFSGGQDSTTCLYWARQQFRKVHALCFSYGQRHSQEVENARRLAARADTPFLLLDASIISRLAPNSLTDLSMTMDEKQPKDSYPNTFVPGRNLLFLTFAATRAYAQGIRHLVTGVSEADYSGYPDCRDTFIRSANATLNLAMDKQFVIHTPLMWRNKKEVWQLADELGVFDIIRNETLTCYNGILAEGCGHCPACLLRNKGLEAYLSERG

SEQ ID NO: 41120 - protein, 224 aa, Proteiniphilum saccharofermentans
  misc_feature (1)..(224): tr|A0A1R3SVP8|A0A1R3SVP8_9BACT 7-cyano-7-deazaguanine s ynthase OS=Proteiniphilum saccharofermentans OX=1642647 GN=queC PE=3 SV=1
MKDYQEQDALVLFSGGQDSTTCLYWAKQQFRRTYALCFTYGQRHSQEVENARRIAEMAGTPFQVLDAGIISRLAPNSLTDFSVQMDEEQPAGSYPNTFVPGRNLLFLTFAATLAYAQGVKHLVTGVSEADYSGYPDCRDTFIRSANATLNLAMDNQFVIHTPLMWRNKKEVWRLADELGVFDIVKNETLTCYNGILAEGCGHCPACRLRNKGLQEYLAERENSL

SEQ ID NO: 41121 - protein, 221 aa, Proteiniphilum sp.
  misc_feature (1)..(221): tr|A0A117MJ28|A0A117MJ28_9BACT 7-cyano-7-deazaguanine s ynthase OS=Proteiniphilum sp. 51_7 OX=1641377 GN=queC P E=3 SV=1
MKDYQQEDALVLFSGGQDSTTCLYWARQQFRKVHALCFSYGQRHSQEVENARRLAARADTPFLLLDASIISRLAPNSLTDLSMTMDEKQPKDSYPNTFVPGRNLLFLTFAATLAYAQGIRHLVTGVSEADYSGYPDCRDTFIRSANATLNLAMDKQFVIHTPLMWRNKKEVWQLADELGVFDIIRNETLTCYNGILAEGCGHCPACLLRNKGLEAYLSERG

SEQ ID NO: 41122 - protein, 224 aa, Proteiniphilum sp.
  misc_feature (1)..(224): tr|A0A3M8EIL6|A0A3M8EIL6_9BACT 7-cyano-7-deazaguanine s ynthase OS=Proteiniphilum sp. X52 OX=2382159 GN=queC PE =3 SV=1
MKDYQEQDALVLFSGGQDSTTCLYWAKRQFRNTYALCFIYGQRHSQEVENARRIADMARTPFQVLDAGIISRLAPNSLTDFSVEMDEGKPAGSYPNTFVPGRNLLFLTFAATLAYAQGVKHLVTGVSEADYSGYPDCRDTFIRSANATLNLAMDNQFVIHTPLMWRNKKEVWRLADELDVFDIVKNETLTCYNGILAEGCGHCPACRLRNKGLQEYLAERGNNL

SEQ ID NO: 41123 - protein, 231 aa, Proteobacteria bacterium
  misc_feature (1)..(231): tr|R6A7U4|R6A7U4_9PROT 7-cyano-7-deazaguanine synthase OS=Proteobacteria bacterium CAG:139 OX=1262986 GN=queC PE=3 SV=1
MKAIVLSSGGVDSTTCLAMAVHELGKENVVTLSFEYGQRHSKELDSAQKVADYYGVRHVVFNLTQIFSFSNCSLLSNSTEKPVHESYADQIAKNGEGKVSTYVPFRNGLMLSAGAALAQSLFPEEKCEIWIGAHADDAAGNAYADCSVGFNNAMDQAINIGTYGLVSLRAPLNRWNKAQVVAKGLELKVPYKLTWSCYDGGEKACGECGTCIDRKAAFEANGVKDPIEYFK

SEQ ID NO: 41124 - protein, 238 aa, Proteobacteria bacterium
  misc_feature (1)..(238): tr|A0A1W9HTV4|A0A1W9HTV4_9PROT 7-cyano-7-deazaguanine s ynthase OS=Proteobacteria bacterium SG_bin8 OX=1827387 GN=queC PE=3 SV=1
MISTSGALVLFSGGQDSTTCLAWALARYPRVETLGFDYGQRHVVELACRAILRDKMSALDPLWGERLGEDHTLDLAALGELSQTSLTRDIAIDMAAGGLPNTFVPGRNLLFLTFAAALAYRRGLTVLVTGVCETDYSGYPDCRDDTMKAMQVALNLGMERRFVIETPLMWIDKAASFRLARELGGQGLLDLVIEDTHSCYLGDRKQRHDWGYGCGACPACKLRGDGYRRFTAEESAGA

SEQ ID NO: 41125 - protein, 232 aa, Proteus hauseri
  misc_feature (1)..(232): tr|V6MMX7|V6MMX7_PROHU 7-cyano-7-deazaguanine synthase OS=Proteus hauseri ZMd44 OX=1312367 GN=queC PE=3 SV=1
MKKTVVVFSGGQDSTTCLIQALEKYDEVHCITFNYGQRHKEEIEVAQKVSQLLGATAHKVLDVSLLNELAISSLTRDNIPVPDFKESEESDIPSTFVPGRNILFLTLAAIYAYQIGAESVITGVCETDFSGYPDCRDEFVKALNHAVSLGIARDIKFITPLMWLDKAETWALADHYKKLDFVRHETLTCYNGIQGDGCGECAACHLRQRGLNTYLADKTLIMQTMKQKVGLK

SEQ ID NO: 41126 - protein, 232 aa, Proteus hauseri
  misc_feature (1)..(232): tr|A0A410XAP2|A0A410XAP2_PROHU 7-cyano-7-deazaguanine s ynthase OS=Proteus hauseri OX=183417 GN=queC PE=3 SV=1
MKKTVVVFSGGQDSTTCLIQAIEQYDEVYCITFNYGQRHKEEIEVAQKVSQLLGVVAHKVLDVSLLNELAISSLTRDNIPVPDFKESEESSIPSTFVPGRNILFLTLAAIYAYQIGAESVITGVCETDFSGYPDCRDEFVKALNHAVSLGIARDIKFITPLMWLDKAQTWALADYFHRLDFIRHNTLTCYNGIQGDGCGECAACHLRQRGLMTYLQNKDSILKSMKEKIGLK

SEQ ID NO: 41127 - protein, 232 aa, Proteus mirabilis
  misc_feature (1)..(232): tr|A0A1Z1SYQ8|A0A1Z1SYQ8_PROMI 7-cyano-7-deazaguanine s ynthase OS=Proteus mirabilis OX=584 GN=queC PE=3 SV=1
MKKTVVVFSGGQDSTTCLIQALEQYDEVHCITFNYGQRHKEEIEVAQRVSQLLGATAHKVLDVSLLNELAISSLTRDNIPVPDFKQSEQSDIPSTFVPGRNILFLTLAAIYAYQIGAESVITGVCETDFSGYPDCRDEFVKALNHAVNLGIARDIQFITPLMWLDKAQTWALADYYGKLDFVRHNTLTCYNGIQGDGCGQCAACHLRERGLHGYLQDKNAVMDAMKNKVGLK

SEQ ID NO: 41128 - protein, 232 aa, Proteus mirabilis; identical to SEQ ID NO: 41127
  misc_feature (1)..(232): sp|B4EU60|QUEC_PROMH 7-cyano-7-deazaguanine synthase OS =Proteus mirabilis (strain HI4320) OX=529507 GN=queC PE =3 SV=1

SEQ ID NO: 41129 - protein, 232 aa, Proteus penneri
  misc_feature (1)..(232): tr|A0A379EIF3|A0A379EIF3_9GAMM 7-cyano-7-deazaguanine s ynthase OS=Proteus penneri OX=102862 GN=queC PE=3 SV=1
MKKTVVVFSGGQDSTTCLIQALEKYDEVHCITFNYGQRHKEEIEVAQKVSQLLGATAHKVLDVSLLNELAISSLTRDNIPVPDFKESEESDIPSTFVPGRNILFLTLAAIYAYQIGAESVITGVCETDFSGYPDCRDEFVKALNHAVNLGIARDIKFITPLMWLDKAETWALADYYKKLDFVRHKTLTCYNGIQGDGCGECAACHLRQRGLNTYLADKTLIMQTMKQKVGLK

SEQ ID NO: 41130 - protein, 247 aa, Proteus penneri
  misc_feature (1)..(247): tr|C0AYN3|C0AYN3_9GAMM 7-cyano-7-deazaguanine synthase OS=Proteus penneri ATCC 35198 OX=471881 GN=queC PE=3 SV =1
MRTNPYKISIFRSILMKKTVVVFSGGQDSTTCLIQALEKYDEVHCITFNYGQRHKEEIEVAQKVSQLLGATAHKVLDVSLLNELAISSLTRDNIPVPDFKESEESDIPSTFVPGRNILFLTLAAIYAYQIGAESVITGVCETDFSGYPDCRDEFVKALNHAVNLGIARDIKFITPLMWLDKAETWALADYYKKLDFVRHKTLTCYNGIQGDGCGECAACHLRQRGLNTYLADKTLIMQTMKQKVGLK

SEQ ID NO: 41131 - protein, 232 aa, Proteus sp.; identical to SEQ ID NO: 41126
  misc_feature (1)..(232): tr|A0A3D2BIS1|A0A3D2BIS1_9GAMM 7-cyano-7-deazaguanine s ynthase OS=Proteus sp. OX=229037 GN=queC PE=3 SV=1

SEQ ID NO: 41132 - protein, 232 aa, Proteus sp.
  misc_feature (1)..(232): tr|A0A5J6RR77|A0A5J6RR77_9GAMM 7-cyano-7-deazaguanine s ynthase QueC OS=Proteus sp. CD3 OX=1921565 GN=BTA34_022 90 PE=4 SV=1
MKKTVVVFSGGQDSTTCLIQALEKYDEVHCITFNYGQRHKEEIEVAQKVSQLLGATAHKVLDVSLLNELAISSLTRDNIPVPDFKESEESDIPSTFVPGRNILFLTLAAIYAYQIGAESVITGVCETDFSGYPDCRDEFVKALNHAVSLGIARDIKFITPLMWLDKAETWALADYYKKLDFVRHETLTCYNGIQGDGCGECAACHLRQRGLNTYLADKTPIMQTMKQKVGLK

SEQ ID NO: 41133 - protein, 232 aa, Proteus vulgaris; identical to SEQ ID NO: 41129
  misc_feature (1)..(232): tr|A0A0G4Q824|A0A0G4Q824_PROVU 7-cyano-7-deazaguanine s ynthase OS=Proteus vulgaris OX=585 GN=queC PE=3 SV=1

SEQ ID NO: 41134 - protein, 232 aa, Proteus vulgaris
  misc_feature (1)..(232): tr|A0A0G4Q8Z7|A0A0G4Q8Z7_PROVU 7-cyano-7-deazaguanine s ynthase OS=Proteus vulgaris OX=585 GN=queC PE=3 SV=1
MKKTVVVFSGGQDSTTCLIQAKEKYDEVHCITFNYGQRHKEEIEVAQKVSQLLGATAHKVLDVNLLNELAISSLTRDNIPVPDFKESEESDIPSTFVPGRNILFLTLAAIYAYQIGAESVITGVCETDFSGYPDCRDEFVKALNHAVNLGIARDIKFITPLMWLDKAETWALADYYQKLDFVRHETLTCYNGVQGDGCGECAACHLRQRGLNTYLADKKQIMQAMKQKVGLK

SEQ ID NO: 41135 - protein, 229 aa, Providencia alcalifaciens
  misc_feature (1)..(229): tr|A0A3N1ZKZ3|A0A3N1ZKZ3_9GAMM 7-cyano-7-deazaguanine s ynthase OS=Providencia alcalifaciens OX=126385 GN=queC PE=3 SV=1
MKRAVVVFSGGQDSTTCLIQALQNYDEVHCVTFDYGQRHRFEIEVAQKLSVSLGATAHKVLDVTLLNELAISSLTRDNIPVPDFSESESSTLPSTFVPGRNILFLTLAAIYAYQVKAEAVITGVCETDFSGYPDCRDEFVKALNHAVDLGLAKNIRFETPLMWLNKAQTWALADSYGHLETIRQQTLTCYNGIQGDGCGECAACHLRSKGLNEYLNDKEAIMLSLKQKP

SEQ ID NO: 41136 - protein, 233 aa, Providencia alcalifaciens
  misc_feature (1)..(233): tr|B6XA91|B6XA91_9GAMM 7-cyano-7-deazaguanine synthase OS=Providencia alcalifaciens DSM 30120 OX=520999 GN=que C PE=3 SV=1
MKRAVVVFSGGQDSTTCLIQALKDYDEVHCVTFDYGQRHRLEIEVAQKLSLQLGAKAHKVLDVSLLNELAISSLTRDNIPVPDYEESEASGLPSTFVPGRNILFLTLSAIYAYQVNAEAVITGVCETDFSGYPDCRDEFVKALNHAVNLGLAKDIRFETPLMWLDKAQTWALADYYGHLETIRTQTLTCYNGIQGDGCAECAACHLRSKGLNYYLNNKQTVMDSLLKHLNSIK

SEQ ID NO: 41137 - protein, 232 aa, Providencia burhodogranariea
  misc_feature (1)..(232): tr|K8W1D6|K8W1D6_9GAMM 7-cyano-7-deazaguanine synthase OS=Providencia burhodogranariea DSM 19968 OX=1141662 GN =queC PE=3 SV=1
MKRAVVVFSGGQDSTTCLIQALKDYDEVHCITFDYGQRHRFEIEVAQKLSISLGVAAHKVLDVTLLNELAVSSLTRDNIPVPSFDESEASGLPSTFVPGRNILFLTLAAIYAYQVQAEAVITGVCETDFSGYPDCRDEFVKALNHAVSLGLAKNIRFETPLMWLDKAQTWALADYYGHLQTIREQTLTCYNGIQGDGCGECAACHLRSKGLNHYLNNKDMVLSSLKKFINLN

SEQ ID NO: 41138 - protein, 230 aa, Providencia heimbachae
  misc_feature (1)..(230): tr|A0A4D7J2G9|A0A4D7J2G9_9GAMM 7-cyano-7-deazaguanine s ynthase OS=Providencia heimbachae OX=333962 GN=queC PE= 3 SV=1
MKRAVVVFSGGQDSTTCLIQALKNYDEVHCVTFDYGQRHRFEIEVAQKLSQHLGATAHKTLDVTLLNELAVSSLTRDNIPVPDFNESESSSLPSTFVPGRNILFLTLAAIYAYQVQAEAVITGVCETDFSGYPDCRDEFVKSLNHAVNLGLAKDIRFETPLMWLDKAQTWALADSFGHLQTIREQTLTCYNGIQGDGCGECAACHLRSKGLNYYLSNKEAVMQSLQQLLK

SEQ ID NO: 41139 - protein, 230 aa, Providencia heimbachae; identical to SEQ ID NO: 41138
  misc_feature (1)..(230): tr|A0A1B7JP63|A0A1B7JP63_9GAMM 7-cyano-7-deazaguanine s ynthase OS=Providencia heimbachae ATCC 35613 OX=1354272 GN=queC PE=3 SV=1

SEQ ID NO: 41140 - protein, 229 aa, Providencia rettgeri
  misc_feature (1)..(229): tr|A0A379FME7|A0A379FME7_PRORE 7-cyano-7-deazaguanine s ynthase OS=Providencia rettgeri OX=587 GN=queC PE=3 SV= 1
MKRAVVVFSGGQDSTTCLIQALQNYDEVHCVTFDYGQRHRFEIEVAQKLSVSLGATAHKVLDVTLLNELAISSLTRDNIPVPDFSESESSTLPSTFVPGRNILFLTLAAIYAYQVQAEAVITGVCETDFSGYPDCRDEFVKALNHAVDLGLAKNIRFETPLMWLNKAQTWALADSYGHLETIRQQTLTCYNGIQGDGCGECAACHLRSKGLNEYLNDKEATMLSLKQKL

SEQ ID NO: 41141 - protein, 237 aa, Providencia rettgeri
  misc_feature (1)..(237): tr|D4C193|D4C193_PRORE 7-cyano-7-deazaguanine synthase OS=Providencia rettgeri DSM 1131 OX=521000 GN=queC PE=3 SV=1
MIYHQGVPMKRAVVVFSGGQDSTTCLIQALQNYDEVHCVTFDYGQRHRFEIEVAQKLSVSLGAAAHKVLDVTLLNELAISSLTRDNIPVPDFAESESSALPSTFVPGRNILFLTLAAIYAYQVQAEAVITGVCETDFSGYPDCRDEFVKALNHAVDLGLAKNIRFETPLMWLNKAQTWALADSYGHLETIRQQTLTCYNGIQGDGCGECAACHLRSKGLNEYLSDKEAIMLSLKQKL

SEQ ID NO: 41142 - protein, 231 aa, Providencia rustigianii
  misc_feature (1)..(231): tr|A0A379G0L1|A0A379G0L1_9GAMM 7-cyano-7-deazaguanine s ynthase OS=Providencia rustigianii OX=158850 GN=queC PE =3 SV=1
MKRAVVVFSGGQDSTTCLIQALKHYDEVHCITFDYGQRHRLEIEVAQKLSLQLGAKAHKVLDVTLLSELAISSLTRDNIPVPDFKESEASGLPSTFVPGRNILFLTLAAIYAYQVQAEAVITGVCETDFSGYPDCRDEFVKSLNHAVSLGLAKDIRFETPLMWLDKAQTWALADHYGHLETIRQQTLTCYNGIQGDGCGECAACHLRSKGLNYYLSNKQAVMNSLLEQLKP

SEQ ID NO: 41143 - protein, 231 aa, Providencia rustigianii; identical to SEQ ID NO: 41142
  misc_feature (1)..(231): tr|D1P683|D1P683_9GAMM 7-cyano-7-deazaguanine synthase OS=Providencia rustigianii DSM 4541 OX=500637 GN=queC P E=3 SV=1

SEQ ID NO: 41144 - protein, 421 aa, Providencia sneebia
  misc_feature (1)..(421): tr|K8WED7|K8WED7_9GAMM Uncharacterized protein OS=Provi dencia sneebia DSM 19967 OX=1141660 GN=OO7_12694 PE=4 S V=1
MIKVMCAKAELIPAQVPSDERVFSYFKGAKRAGIGTIANRWHGALKRGGFRPSIEIWDFVQFCLAVCSADLSSPRRTSADGWTRNIQLTVGLCNPDKWLPLKSDLEDMLKVLTGDYWLLNFNNAGMEPPQGDGAFLTNDCVSLLSGGLDSLIGGIDLVAKGRKPLFVSQLAHKDSERQRAYASMLMGNGSHYQWSHGISFKGSREPSTRGRSLAFYAFALLASTKINLPKPTIFIPENGVISINPPLVPGRISSLSTRTTHPMFIDMLQKVLDNLGIHVQLELPYRFKTKGEMMRQCLDQDLLQKWAADSTSCGRFRTYNRQHCGRCVPCLIRRAAFIAWKPEGDTTSYRFESVVGSDKSSAPDDPMAVALAILDVRKRGLDRFLGGSLVFAPINERPMYRRVLQEGIKELETVLIQDKLL

SEQ ID NO: 41145 - protein, 232 aa, Providencia sneebia
  misc_feature (1)..(232): tr|K8VZD0|K8VZD0_9GAMM 7-cyano-7-deazaguanine synthase OS=Providencia sneebia DSM 19967 OX=1141660 GN=queC PE= 3 SV=1
MKRAVVVFSGGQDSTTCLIQALKNYDEVHCITFDYGQRHRFEIEVAKKLSHDLGATAHKVLDVTLLNELAISSLTRDNIPVPNFTESEASGLPSTFVPGRNILFLTLAAIYAYQIQAESVITGVCETDFSGYPDCRDEFVKALNHAVNLGLAKDIRFETPLMWLNKAQTWALADYYGHLATIREQTLTCYNGIQGDGCKDCAACHLRSKGLTEYLTNKQAILASLKKLTGLN

SEQ ID NO: 41146 - protein, 226 aa, Providencia sp.
  misc_feature (1)..(226): tr|A0A345LX08|A0A345LX08_9GAMM 7-cyano-7-deazaguanine s ynthase OS=Providencia sp. WCHPHu000369 OX=2027290 GN=q ueC PE=3 SV=1
MKRAVVVFSGGQDSTTCLIQALQNYDEVHCVTFDYGQRHRFEIEVAQKLSVSLGATAHKVLDVTLLNELAISSLTRDNIPVPDFTESESSGLPSTFVPGRNILFLTLAAIYAYQVQAEAVITGVCETDFSGYPDCRDEFVKALNHAVDLGLAKNIRFETPLMWLNKAQTWALADSYGHLETIRQQTLTCYNGIQGDGCGECAACHLRSRGLAEYLNDKETIMLSLK

SEQ ID NO: 41147 - protein, 229 aa, Providencia sp.
  misc_feature (1)..(229): tr|A0A4S2YKA3|A0A4S2YKA3_9GAMM 7-cyano-7-deazaguanine s ynthase OS=Providencia sp. MGF014 OX=2565573 GN=queC PE =3 SV=1
MKRAVVVFSGGQDSTTCLIQALQNYDEVHCVTFDYGQRHRFEIEVAQKLSVSLGAAAHKVLDVTLLNELAISSLTRDNIPVPDFAESESSALPSTFVPGRNILFLTLAAIYAYQVQAEAVITGVCETDFSGYPDCRDEFVKALNHAVDLGLAKNIRFETPLMWLNKAQTWALADSYGHLETIRQQTLTCYNGIQGDGCGECAACHLRSKGLNEYLSDKEAIMLSLKQKL

SEQ ID NO: 41148 - protein, 232 aa, Providencia stuartii
  misc_feature (1)..(232): tr|A0A140NIB3|A0A140NIB3_PROSM 7-cyano-7-deazaguanine s ynthase OS=Providencia stuartii (strain MRSN 2154) OX=1 157951 GN=queC PE=3 SV=1
MKRAVVVFSGGQDSTTCLIQALKMYDEVHCVTFDYGQRHRLEIEVAQKLSHSLGAAAHKILDVNLLNELAVSSLTRDNIPVPDYNESTANGLPSTFVPGRNILFLTLAAIYAYQVQAEAVITGVCETDFSGYPDCRDEFVKALNHAVNLGLAKDIRFETPLMWLDKAQTWALADYYGHLETIREQTLTCYNGIQGDGCGECAACHLRSKGLDYYLSHKESVLASLKKLANLA

SEQ ID NO: 41149 - protein, 232 aa, Providencia stuartii
  misc_feature (1)..(232): tr|B2Q711|B2Q711_PROST 7-cyano-7-deazaguanine synthase OS=Providencia stuartii ATCC 25827 OX=471874 GN=queC PE =3 SV=1
MKRAVVVFSGGQDSTTCLIQALKMYDEVHCVTFDYGQRHRLEIEVAQKLSHSLGAAAHKILDVNLLNELAVSSLTRDNIPVPDYNESATNGLPSTFVPGRNILFLTLAAIYAYQVQAEAVITGVCETDFSGYPDCRDEFVKALNHAVNLGLAKDIRFETPLMWLDKAQTWALADYYGHLETIREQTLTCYNGIQGDGCGECAACHLRSKGLNYYLSHKESVLASLKKLANLA

SEQ ID NO: 41150 - protein, 241 aa, Unknown
  misc_feature (1)..(241): tr|A0A368DZF8|A0A368DZF8_9PROT 7-cyano-7-deazaguanine s ynthase OS=PS1 clade bacterium OX=2175152 GN=queC PE=3 SV=1
MTDSRTALVLFSGGQDSTVCLAHALATYSHVETVGFDYGQTHRIELECRLDVLAQLRAAFPDWAARLGDDHVLALPALADIGGTALTGDGEIRVLENGLPSTFVPGRNLLFLTYAAAIGYRRGLSVLIGGMCETDYSGYPDCRRDTLDHLAQAISAGMDAPLEIETPLMYLDKATTWAMSETLGGETLVELIREATHSCYRGDRTTRHAWGYGCNDCPACELRSKGYEQWLEENKGTRKKG

SEQ ID NO: 41151 - protein, 241 aa, Pseudacidovorax intermedius
  misc_feature (1)..(241): tr|A0A370FJS2|A0A370FJS2_9BURK 7-cyano-7-deazaguanine s ynthase OS=Pseudacidovorax intermedius OX=433924 GN=que C PE=3 SV=1
MHTTALVLFSGGQDSTTCLAHALNRYERVETLGFDYGQRHRIELEARNHVLTRLRRRFPGWSRRLGEDHLLKLDVLGQIGGSSLTEDIAFAMQATGLPNTFVPGRNLLFLTLAGALAYRRGLQVIVTGVCETDYSGYPDCRDDTMKAMQLALSLGLDQRLLIETPLMWIDKAQTWQLAESLGGQGLVDLIVEDTHTCYEGDRTQRHDWGWGCGHCPACQLRAQGWAGYIEGDVGSGASSTA

SEQ ID NO: 41152 - protein, 243 aa, Pseudacidovorax intermedius
  misc_feature (1)..(243): tr|A0A147GM82|A0A147GM82_9BURK 7-cyano-7-deazaguanine s ynthase OS=Pseudacidovorax intermedius OX=433924 GN=que C PE=3 SV=1
MHTTALVLFSGGQDSTTCLAHALARYERVETLGFDYGQRHRVELEARTQVLARLRERFPGWGRRLGEDHLLQLDVLAQIGGSSLTEDIAFAMQANGLPNTFVPGRNLLFLTLAGALAYRRGLQVIVTGVCETDYSGYPDCRDDTMKAMQLALSLGLDQRLVIETPLMWIDKAQTWQLAETLGGRALVDLIVEDTHTCYEGDRSHRHDWGWGCGRCPACELRAQGWKGYVEAGGEAGSGASSTA

SEQ ID NO: 41153 - protein, 241 aa, Pseudacidovorax sp.
  misc_feature (1)..(241): tr|A0A1N6Z0B7|A0A1N6Z0B7_9BURK 7-cyano-7-deazaguanine s ynthase OS=Pseudacidovorax sp. RU35E OX=1907403 GN=queC PE=3 SV=1
MHNTALVLFSGGQDSTTCLAHALNRYERVETLGFDYGQRHRIELEARTHVLTRLRRRFPGWSRRLGEDHLLKLDVLGQIGGSSLTEDIAFAMQANGLPNTFVPGRNLMFLTLAGALAYRRGLQVIVTGVCETDYSGYPDCRDDTMKAMQLALSLGLDQRLLIETPLMWIDKAQTWQLAESLGGQGLVDLIVEDTHTCYEGDRSQRHDWGWGCGRCPACELRAQGWARYVEGEAGSGASSTA

SEQ ID NO: 41154 - protein, 224 aa, Pseudanabaena biceps
  misc_feature (1)..(224): tr|L8N083|L8N083_9CYAN 7-cyano-7-deazaguanine synthase OS=Pseudanabaena biceps PCC 7429 OX=927668 GN=queC PE=3 SV=1
MASLESPQRKAIILLSGGLDSATSAAQAIADGYEPIALSFRYGQRHERELLAAREVAAALHIREHFIVDVNLSQWGGSALTDGNLEVPTEGVQAGEIPITYVPGRNTVFIAIALSLAEAKGAEVIYLGINAVDYSGYPDCRPSYLKAFQKLAELSSKIGVEGNAPKLVAPLVMDSKTDIVRRAKRLGVPIDLTWSCYQGGEVPCGVCDSCRIRDKAILEANAYS

SEQ ID NO: 41155 - protein, 230 aa, Pseudanabaena frigida
  misc_feature (1)..(230): tr|A0A2W4VZQ9|A0A2W4VZQ9_9CYAN 7-cyano-7-deazaguanine s ynthase OS=Pseudanabaena frigida OX=945775 GN=queC PE=3 SV=1
MIEVENPKDLQQTKKKAVILLSGGLDSATAAAQAIADGYEVIALSFRYGQRHERELVAARQVAAALNISEHFVVDVNLAQWGGSALTDVNIAVPIEGSQADEIPITYVPGRNTVFIAIALSLAESKEAEAIYLGINAVDYSGYPDCRPDYLAAFQKLAALSSKIGIEGHAPQLVAPLVIDSKTDIVRRARRLGVPIEITWSCYQGGEVPCGVCDSCRIRDKAILEAEADI

SEQ ID NO: 41156 - protein, 226 aa, Pseudanabaena sp.
  misc_feature (1)..(226): tr|A0A256BJR0|A0A256BJR0_9CYAN 7-cyano-7-deazaguanine s ynthase OS=Pseudanabaena sp. SR411 OX=1980935 GN=queC P E=3 SV=1
MVDIGTSPKKAIILLSGGLDSSTVAAQAIADGYKAIALSFRYGQRHERELLAARQVAAALNIREHFVVDVNLAQWGGSALTDDNIAVPTEGVQLGEIPITYVPGRNTVFIAIALSLAESKGAEAIYLGINAVDYSGYPDCRPDYLEAFQNLAALSSKVGIEGNAPKLIAPLVMDSKTDIVRRARLLGVPIELTWSCYQGGEVPCGVCDSCRIRDKAILEANGIIAT

SEQ ID NO: 41157 - protein, 220 aa, Pseudanabaena sp.
  misc_feature (1)..(220): tr|A0A2W6ZLI7|A0A2W6ZLI7_9CYAN 7-cyano-7-deazaguanine s ynthase OS=Pseudanabaena sp. OX=1153 GN=queC PE=3 SV=1
MIQGLKKAVILLSGGLDSSTVAAQAIADGYEAIALSFRYGQRHEREILAAKQVASFLKIQEHFIVDVNLGQWGGSALTDANLDIPTGGVQIDEIPITYVPGRNTVFIAIALSLAESKGAEAIYLGINAVDYSGYPDCRPDYLEAFQKLAALSSKAGVEGHAPQLVAPLVMDSKVDIVRRAKRLGVPIELTWSCYQGGEVPCGVCDSCRIRDKAILEAEQQ

SEQ ID NO: 41158 - protein, 231 aa, Pseudescherichia vulneris
  misc_feature (1)..(231): tr|A0A090V5P8|A0A090V5P8_PSEVU 7-cyano-7-deazaguanine s ynthase OS=Pseudescherichia vulneris NBRC 102420 OX=111 5515 GN=queC PE=3 SV=1
MKRAVVVFSGGQDSTTCLVQALHHYDEVHCVTFDYGQRHRAEIDVARELALKLGARAHKVLDVTLLNELAVSSLTRDSIPVPDYEPDASGIPNTFVPGRNILFLTLTAIYAYQVQAEAVITGVCETDFSGYPDCRDEFVKALNHAVSLGMAKDIRFETPLMWLDKAETWALADYWQKLELVREETLTCYNGIKGDGCGQCAACNLRANGLNHYLAEKPAVMATMKRKTGLE

SEQ ID NO: 41159 - protein, 219 aa, Pseudidiomarina sp.
  misc_feature (1)..(219): tr|A0A443YXN9|A0A443YXN9_9GAMM 7-cyano-7-deazaguanine s ynthase OS=Pseudidiomarina sp. R04H25 OX=2487740 GN=que C PE=3 SV=1
MAKVVVIYSGGMDSFTVLHHALKQGHDVYALSFNYGQRHVRELDAAATVCKSLGINHKVVDITAINTLLAGSSLTSDIDIPEGHYEAESMQSTVVPNRNMILLALAIGYAVSIKAEAVYYGAHSGDHAIYPDCRPEFVEKMNAVSLIANYEPIPIEVPFLTNSKAEILAAGLAMGLDYAQTWTCYNGREKACGKCGACVERLEAFAANNCVDPLPYASA

SEQ ID NO: 41160 - protein, 218 aa, Pseudoalteromonadaceae bacterium
  misc_feature (1)..(218): tr|A0A2D6VN56|A0A2D6VN56_9GAMM 7-cyano-7-deazaguanine s ynthase OS=Pseudoalteromonadaceae bacterium OX=2026783 GN=queC PE=3 SV=1
MTQKVVVIYSGGMDSFTVLNKALQQGHEVYALSFDYGQRHVKELKVAAQVCEKLGVSHKIVDISAINQLIGGSSLTDDIEVPEGHYEEESMKSTIVPNRNMILLSLAVGYAVSLKASKVYYGAHSGDHAIYPDCRPEFVQKMDDVCRIANYDAVEIFSPYLHNTKIDILTDGLKMGLDYSQTWTCYNGRDKACGKCGACQERLEAFALNKVTDPIEYE

SEQ ID NO: 41161 - protein, 218 aa, Pseudoalteromonadaceae bacterium
  misc_feature (1)..(218): tr|A0A2D7MVW8|A0A2D7MVW8_9GAMM 7-cyano-7-deazaguanine s ynthase OS=Pseudoalteromonadaceae bacterium OX=2026783 GN=queC PE=3 SV=1
MTQKVVVIYSGGMDSFTVLNKALQQGHDVYALSFDYGQRHVKELEVAANVCEKLNVPHKIVDISAINQLIGGSSLTDDIDVPEGHYEEESMKSTIVPNRNMILLSLAVGYAVSLKASKVYYGAHSGDHAIYPDCRPEFVQKMDDVCRIANYDAVEIFSPYLNNTKIDILTDGIKMGLDYSQTWTCYNGREKACGKCGACQERLEAFSLNNVTDPIEYE

SEQ ID NO: 41162 - protein, 218 aa, Pseudoalteromonas agarivorans; identical to SEQ ID NO: 41161
  misc_feature (1)..(218): tr|A0A290RWK9|A0A290RWK9_9GAMM 7-cyano-7-deazaguanine s ynthase OS=Pseudoalteromonas agarivorans DSM 14585 OX=1 312369 GN=queC PE=3 SV=1

SEQ ID NO: 41163 - protein, 218 aa, Pseudoalteromonas agarivorans; identical to SEQ ID NO: 41161
  misc_feature (1)..(218): tr|N6VVA8|N6VVA8_9GAMM 7-cyano-7-deazaguanine synthase OS=Pseudoalteromonas agarivorans S816 OX=1307437 GN=que C PE=3 SV=1

SEQ ID NO: 41164 - protein, 218 aa, Pseudoalteromonas aliena
  misc_feature (1)..(218): tr|A0A1Q2H2V3|A0A1Q2H2V3_9GAMM 7-cyano-7-deazaguanine s ynthase OS=Pseudoalteromonas aliena OX=247523 GN=queC P E=3 SV=1
MTQKVVVIYSGGMDSFTVLNKALQQGHDVYALSFDYGQRHVKELKVAASVCEKLNVPHKIVDISAINQLIGGSSLTDDIDVPEGHYEEESMKSTIVPNRNMILLSLAVGYAVSLNAGQVYYGAHSGDHAIYPDCRPEFVQKMDDVCRIANYDAVEIFSPYLNNTKIGILTDGIEMGLDYSQTWTCYNGREKACGKCGACQERLEAFALNNITDPLEYE

SEQ ID NO: 41165 - protein, 219 aa, Pseudoalteromonas amylolytica
  misc_feature (1)..(219): tr|A0A1S1MRY8|A0A1S1MRY8_9GAMM 7-cyano-7-deazaguanine s ynthase OS=Pseudoalteromonas amylolytica OX=1859457 GN= queC PE=3 SV=1
MSEKVVVIYSGGMDSYTVLNKAIRAGYEVYALSFNYGQRHVKELQVAEQVCNSLNIAHKIVDISTINQLIGGSSLTDDIDVPEGHYEEESMKSTVVPNRNMILLSLAVGYAVSLKANKVFYGAHSGDHAIYPDCRPEFVKKMDDVCRIANYEEIEIVCPYLNNSKIDILTDGLKMGLDYSETWTCYNGREKACGKCGACQERLEAFALNNAQDPLSYEA

SEQ ID NO: 41166 - protein, 218 aa, Pseudoalteromonas arctica
  misc_feature (1)..(218): tr|A0A290S373|A0A290S373_9GAMM 7-cyano-7-deazaguanine s ynthase OS=Pseudoalteromonas arctica A 37-1-2 OX=111731 3 GN=queC PE=3 SV=1
MTQKVVVIYSGGMDSFTVLNKALQQGHDVYALSFDYGQRHVKELKVAASVCEKLNVPHKIVDISAINQLIGGSSLTDDIDVPEGHYEEESMKSTIVPNRNMILLSLAVGYAVSLKAGQVYYGAHSGDHAIYPDCRPEFVQKMDDVCRIANYDAVEIFSPYLNNTKIGILTDGIEMGLDYSQTWTCYNGREKACGKCGACQERLEAFALNNITDPLEYE

SEQ ID NO: 41167 - protein, 218 aa, Pseudoalteromonas atlantica; identical to SEQ ID NO: 41161
  misc_feature (1)..(218): tr|A0A510ZUC0|A0A510ZUC0_PSEAF 7-cyano-7-deazaguanine s ynthase OS=Pseudoalteromonas atlantica OX=288 GN=queC P E=3 SV=1

SEQ ID NO: 41168 - protein, 218 aa, Pseudoalteromonas atlantica
  misc_feature (1)..(218): sp|Q15RL9|QUEC_PSEA6 7-cyano-7-deazaguanine synthase OS =Pseudoalteromonas atlantica (strain T6c / ATCC BAA-108 7) OX=342610 GN=queC PE=3 SV=1
MVQKVVVIFSGGMDSFTVLNMAVKEGYEVHALSFNYGQRHSKELDYASRACITLGVAHKIIDISAINELIGGSSLTSDVDIPEGHYAEESMKSTVVPNRNMILLSMAVGYAVSLDANKVYYGAHSGDHDIYPDCRPEFVERMNDVCAIANYEKVEIVSPFLYQSKIDILTAGLNMGLDYNLTWTCYNGREKACGKCGACQERLEAFDKNNAQDPLEYE

SEQ ID NO: 41169 - protein, 219 aa, Pseudoalteromonas byunsanensis
  misc_feature (1)..(219): tr|A0A1S1N602|A0A1S1N602_9GAMM 7-cyano-7-deazaguanine s ynthase OS=Pseudoalteromonas byunsanensis OX=327939 GN= queC PE=3 SV=1
MSEKVVVIYSGGMDSYTVLNKAIRAGYEVYALSFNYGQRHVKELEVAEQVCNSLNIAHKIVDISAINQLIGGSSLTDDIDVPEGHYEEESMKSTVVPNRNMILLSLAVGYAVSLKANKVFYGAHSGDHAIYPDCRPEFVKKMDDVCRIANYEEIEIVCPYLNNSKIDILTDGLKMGLDYSHTWTCYNGREKACGKCGACQERLEAFALNNAQDPLSYEA

SEQ ID NO: 41170 - protein, 218 aa, Pseudoalteromonas carrageenovora
  misc_feature (1)..(218): tr|A0A2K4X811|A0A2K4X811_PSEVC 7-cyano-7-deazaguanine s ynthase OS=Pseudoalteromonas carrageenovora IAM 12662 O X=1314868 GN=queC PE=3 SV=1
MTQKVVVIYSGGMDSFTVLNKALQQGHDVYALSFDYGQRHVKELKVAAQVCEKLNVPHKIVDISAINQLIGGSSLTDDIEVPEGHYEEESMKSTIVPNRNMILLSLAVGYAVSLKASQVYYGAHSGDHAIYPDCRPEFVQKMDDVCRIANYDAVEIFSPYLNNTKIDILTDGIKMGLDYSQTWTCYNGREKACGKCGACQERLEAFKLNNVTDPLEYE

SEQ ID NO: 41171 - protein, 218 aa, Pseudoalteromonas citrea
  misc_feature (1)..(218): tr|U1JTG0|U1JTG0_9GAMM 7-cyano-7-deazaguanine synthase OS=Pseudoalteromonas citrea DSM 8771 OX=1117314 GN=queC PE=3 SV=1
MSEKVVVIYSGGMDSYTVLNKAIRSGHDVYALSFNYGQRHVKELEVAAQVCERLNITHKIVDISAINQLIGGSSLTDDIDVPEGHYEEESMKSTIVPNRNMILISLAVGYAVSIKASKVFYGAHSGDHAIYPDCRPEFVKKMDDVCRIANYDAVEIVSPYLNNTKIDILTDGLEMGLDYSQTWTCYNGRQHACGKCGACQERLEAFALNNATDPIPYE

SEQ ID NO: 41172 - protein, 234 aa, Pseudoalteromonas denitrificans
  misc_feature (1)..(234): tr|A0A1I1IPG1|A0A1I1IPG1_9GAMM 7-cyano-7-deazaguanine s ynthase OS=Pseudoalteromonas denitrificans DSM 6059 OX= 1123010 GN=queC PE=3 SV=1
MLRPAKRLLYESLRNMSQKVVVIYSGGMDSYTVLNKAIQDGYEVYALSFDYGQRHVKELDIAAKACKDLDVHHKIVNISAINQIIGGSSLTDDIDVPEGHYEAENMKSTIVPNRNMILLSLAVGYAVSLKACKVYYGAHSGDHAIYPDCRPEFVQKMDDVCRIANYDAVEIVSPYLKNSKIDILTDGLKMGLNYRDTWTCYNGREKACGKCGACQERLEAFKLNNVIDPIEYEI

SEQ ID NO: 41173 - protein, 218 aa, Pseudoalteromonas distincta
  misc_feature (1)..(218): tr|F3BKC0|F3BKC0_9GAMM 7-cyano-7-deazaguanine synthase OS=Pseudoalteromonas distincta OX=77608 GN=queC PE=3 SV =1
MTQKVVVIYSGGMDSFTVLNKALQQGHDVYALSFDYGQRHVKELKVAASVCEKLNVPHKIVDISAINQLIGGSSLTDDIDVPEGHYEEESMKSTIVPNRNMILLSLAVGYAVSLKASQVYYGAHSGDHAIYPDCRPEFVQKMDDVCRIANYDAVEIFSPYLNNTKIGILTDGIEMGLDYSQTWTCYNGREKACGKCGACQERLEAFALNNITDPLEYE

SEQ ID NO: 41174 - protein, 218 aa, Pseudoalteromonas elyakovii; identical to SEQ ID NO: 41173
  misc_feature (1)..(218): tr|A0A558I614|A0A558I614_9GAMM 7-cyano-7-deazaguanine s ynthase OS=Pseudoalteromonas elyakovii OX=81037 GN=queC PE=3 SV=1

SEQ ID NO: 41175 - protein, 218 aa, Pseudoalteromonas espejiana
  misc_feature (1)..(218): tr|A0A510XXT1|A0A510XXT1_9GAMM 7-cyano-7-deazaguanine s ynthase OS=Pseudoalteromonas espejiana OX=28107 GN=queC PE=3 SV=1
MTQKVVVIYSGGMDSFTVLNKALQQGHDVYALSFDYGQRHVKELEVAAQVCEKLNVPHKIVDISAINQLIGGSSLTDDIDVPEGHYEEESMKSTIVPNRNMILLSLAVGYAVSLKASQVYYGAHSGDHAIYPDCRPEFVQKMDDVCRIANYDAVEIFSPYLNNTKIDILTDGIKMGLDYSQTWTCYNGREKACGKCGACQERLEAFKLNNVTDPLEYE

SEQ ID NO: 41176 - protein, 218 aa, Pseudoalteromonas fuliginea
  misc_feature (1)..(218): tr|A0A063KKH8|A0A063KKH8_9GAMM 7-cyano-7-deazaguanine s ynthase OS=Pseudoalteromonas fuliginea OX=1872678 GN=qu eC PE=3 SV=1
MTQKVVVIYSGGMDSFTVLNKALQQGHDVYALSFDYGQRHVKELKVAASVCEKLNVPHKIVDISAINQLIGGSSLTDDIDVPEGHYEEESMKSTIVPNRNMILLSLAVGYAVSLKAGKVYYGAHSGDHAIYPDCRPEFVQKMDDVCRIANYDAVEIFSPYLNNTKIGILTDGIEMGLDYSQTWTCYNGREKACGKCGACQERLEAFALNNITDPLEYE

SEQ ID NO: 41177 - protein, 218 aa, Pseudoalteromonas haloplanktis
  misc_feature (1)..(218): sp|Q3IKE8|QUEC_PSEHT 7-cyano-7-deazaguanine synthase OS =Pseudoalteromonas haloplanktis (strain TAC 125) OX=326 442 GN=queC PE=3 SV=1
MTQKVVVIYSGGMDSFTVLNKALQQGHDVYALSFDYGQRHVKELKVAAQVCKQLNVPHKIVDISAINQIIGGSSLTDDIDVPEGHYEEDSMKSTIVPNRNMILLSLAVGYAVSLKASQVYYGAHSGDHAIYPDCRPEFVQKMDDVCRIANYDAVEIFSPYLNNTKIDILTDGIAMGLDYSQTWTCYNGREKACGKCGACQERLEAFEVNNLTDPLEYE

SEQ ID NO: 41178 - protein, 215 aa, Pseudoalteromonas haloplanktis; identical to SEQ ID NO: 33098
  misc_feature (1)..(215): tr|Q3IKE7|Q3IKE7_PSEHT 7-carboxy-7-deazaguanine synthas e OS=Pseudoalteromonas haloplanktis (strain TAC 125) OX =326442 GN=queC PE=3 SV=1

SEQ ID NO: 41179 - protein, 218 aa, Pseudoalteromonas issachenkonii
  misc_feature (1)..(218): tr|A0A290SKG9|A0A290SKG9_9GAMM 7-cyano-7-deazaguanine s ynthase OS=Pseudoalteromonas issachenkonii OX=152297 GN =queC PE=3 SV=1
MTQKVVVIYSGGMDSFTVLNKALQQGHDVYALSFDYGQRHVKELKVAASVCEKLNVPHKIVDISAINQLIGGSSLTDDIDVPEGHYEEESMKSTIVPNRNMILLSLAVGYAVSLKASKVYYGAHSGDHAIYPDCRPEFVKKMDDVCRIANYDAVEIFSPYLNNTKIDILTDGIKMGLDYSQTWTCYNGRDKACGKCGACQERLEAFELNNVTDPLEYE

SEQ ID NO: 41180 - protein, 218 aa, Pseudoalteromonas lipolytica
  misc_feature (1)..(218): tr|A0A0P7E6E0|A0A0P7E6E0_9GAMM 7-cyano-7-deazaguanine s ynthase OS=Pseudoalteromonas lipolytica OX=570156 GN=qu eC PE=3 SV=1
MTQKVVVIYSGGMDSFTVLNKALQQGHEVYALSFDYGQRHVKELKVAAQVCEKLGVSHKIVDISAINQLIGGSSLTDDIEVPEGHYEEESMKSTIVPNRNMILLSLAVGYAVSLKASKVYYGAHSGDHAIYPDCRPEFVQKMDDVCRIANYDAVEIFSPYLNNTKIDILTDGLKMGLDYSQTWTCYNGRDKACGKCGACQERLEAFALNNVTDPIEYE

SEQ ID NO: 41181 - protein, 218 aa, Pseudoalteromonas lipolytica
  misc_feature (1)..(218): tr|Z5XRX6|Z5XRX6_9GAMM 7-cyano-7-deazaguanine synthase OS=Pseudoalteromonas lipolytica SCSIO 04301 OX=1452721 GN=queC PE=3 SV=1
MTQKVVVIYSGGMDSFTVLNKALQQGHEVYALSFDYGQRHVKELKVAAQVCEKLGVPHKIVDISAINQLIGGSSLTDDIDVPEGHYEEESMKSTIVPNRNMILLSLAVGYAVSLKASKVYYGAHSGDHAIYPDCRPEFVKKMDDVCRIANYDAVEIFSPYLNNTKIDILTDGLKMGLDYSQTWTCYNGRDKACGKCGACQERLEAFTLNNVTDPIEYE

SEQ ID NO: 41182 - protein, 218 aa, Pseudoalteromonas luteoviolacea
  misc_feature (1)..(218): tr|A0A167I4T9|A0A167I4T9_9GAMM 7-cyano-7-deazaguanine s ynthase OS=Pseudoalteromonas luteoviolacea CPMOR-1 OX=1 365248 GN=queC PE=3 SV=1
MSEKVVVIYSGGMDSYTVLNKALQEGHEVYALSFNYGQRHVKELEVAKNVCDSLNVAHKIVDISAINQLLAGSSLTDDIEVPEGHYEEESMKSTIVPNRNMILLSLAVGYAVSLKANKVFYGAHSGDHAIYPDCRPEFVKKMDDVCRIANYDEVAIVCPYLNNTKIDILTDGLKMGLDYSHTWTCYNGREKACGKCGACQERLEAFELNNATDPLLYE

SEQ ID NO: 41183 - protein, 218 aa, Pseudoalteromonas luteoviolacea
  misc_feature (1)..(218): tr|A0A0F6AIA2|A0A0F6AIA2_9GAMM 7-cyano-7-deazaguanine s ynthase OS=Pseudoalteromonas luteoviolacea S4054 OX=112 9367 GN=queC PE=3 SV=1
MSEKVVVIYSGGMDSYTVLNKALQEGHEVYALSFNYGQRHVKELEVAKNVCDSLNVAHKIVDISAINQLLAGSSLTDDIEVPEGHYEEESMKSTIVPNRNMILLSLAVGYAVSLKANKVFYGAHSGDHAIYPDCRPEFVKKMDDVCRIANYDEVAIVCPYLNNTKIDILTDGLKMGLDYSHTWTCYNGREKACGKCGACQERLEAFELNNATDPLPYE

SEQ ID NO: 41184 - protein, 218 aa, Pseudoalteromonas marina
  misc_feature (1)..(218): tr|U1KYB6|U1KYB6_9GAMM 7-cyano-7-deazaguanine synthase OS=Pseudoalteromonas marina DSM 17587 OX=1117316 GN=que C PE=3 SV=1
MTQKVVVIYSGGMDSFTVLNKALQQGHDVYALSFDYGQRHVKELKVAAQVCEKLNVPHKIVDISAINQLIGGSSLTDNIDVPEGHYEEESMKSTIVPNRNMILLSLAVGYAVSLKASQVYYGAHSGDHAIYPDCRPEFVKKMDDVCRIANYDAVEIFSPYLNNTKIDILTDGIKMGLDYSQTWTCYNGREKACGKCGACQERLEAFALNNITDPLEYE

SEQ ID NO: 41185 - protein, 218 aa, Pseudoalteromonas neustonica
  misc_feature (1)..(218): tr|A0A558IJD9|A0A558IJD9_9GAMM 7-cyano-7-deazaguanine s ynthase OS=Pseudoalteromonas neustonica OX=1840331 GN=q ueC PE=3 SV=1
MTQKVVVIYSGGMDSFTVLNKALQQGREVYALSFDYGQRHVKELKVAASVCEKLGVPHKIVDISAINQLIGGSSLTDDIDVPEGHYEAENMKSTIVPNRNMILLSLAVGYAVSLKASQVYYGAHSGDHAIYPDCRPEFVQKMDDLCRIANYDAVEIFSPYLNDTKIDILTDGLKMGLDYSQTWTCYNGREKACGKCGACQERLEAFSLNNITDPIEYE

SEQ ID NO: 41186 - protein, 218 aa, Pseudoalteromonas nigrifaciens; identical to SEQ ID NO: 41177
  misc_feature (1)..(218): tr|A0A379HCD3|A0A379HCD3_9GAMM 7-cyano-7-deazaguanine s ynthase OS=Pseudoalteromonas nigrifaciens OX=28109 GN=q ueC PE=3 SV=1

SEQ ID NO: 41187 - protein, 218 aa, Pseudoalteromonas peptidolytica
  misc_feature (1)..(218): tr|A0A510UA69|A0A510UA69_9GAMM 7-cyano-7-deazaguanine s ynthase OS=Pseudoalteromonas peptidolytica OX=61150 GN= queC PE=3 SV=1
MSEKVVVIYSGGMDSYTVLNKAVNEGHEVYALSFNYGQRHVKELQVAANVCKKLGVAHKVVDISAINQLLAGSSLTDDIEVPEGHYEEESMKSTIVPNRNMILLSLAVGYAVSLQASKVFYGAHSGDHAIYPDCRPEFVKKMDDVCRIANYDAVEIVSPYLNNSKIDILTDGLEMGLDYADTWTCYNGREKACGKCGACQERLEAFELNNATDPLPYE

SEQ ID NO: 41188 - protein, 219 aa, Pseudoalteromonas phenolica
  misc_feature (1)..(219): tr|A0A4Q7IIF5|A0A4Q7IIF5_9GAMM 7-cyano-7-deazaguanine s ynthase OS=Pseudoalteromonas phenolica OX=161398 GN=que C PE=3 SV=1
MSEKVVVIYSGGMDSYTVLNKAIKQGFDVYALSFNYGQRHVKELEVAASVCADLNVHHKVVDISAINQLIGGSSLTDDIEVPEGHYEEESMKSTVVPNRNMILLSLAVGYAVSLKANKVFYGAHSGDHAIYPDCRPEFVEKMSDVCRIANYEEVEIVCPYLNSSKIEILTDGLKMDLDYSNTWTCYNGRERACGKCGACQERLEAFSLNNASDPLPYEA

SEQ ID NO: 41189 - protein, 219 aa, Pseudoalteromonas phenolica
  misc_feature (1)..(219): tr|A0A0S2K1B3|A0A0S2K1B3_9GAMM 7-cyano-7-deazaguanine s ynthase OS=Pseudoalteromonas phenolica OX=161398 GN=que C PE=3 SV=1
MSEKVVVIYSGGMDSYTVLNKAIKSGFDVYALSFNYGQRHVKELEVAANVCADLNVHHKVVDISAINQLIGGSSLTDDIEVPEGHYEEESMKSTVVPNRNMILLSLAVGYAVSLKANKVFYGAHSGDHAIYPDCRPEFVEKMSDVCRIANYEEVEIVCPYLNNSKIEILTDGLKMGLDYSNTWTCYNGREKACGKCGACQERLEAFSLNNASDPLPYEA

SEQ ID NO: 41190 - protein, 220 aa, Pseudoalteromonas piratica
  misc_feature (1)..(220): tr|A0A0A7EGY1|A0A0A7EGY1_9GAMM 7-cyano-7-deazaguanine s ynthase OS=Pseudoalteromonas piratica OX=1348114 GN=que C PE=3 SV=1
MSQKVVVIYSGGMDSYTVLNKAIRQGFEVYALSFDYGQRHVKELKVAASVCAELGISHKVVDISAINQLIGGSSLTDDIDVPEGHYEEESMKSTVVPNRNMILLSLAVGYAVSLKANKVFYGAHSGDHAIYPDCRPEFVKKMDDVCRIANYEEVEIVSPYLNNTKIEILTDGLSMGLDYSKTWTCYNGREKACGKCGACQERLEAFELNKAHDPLAYESN

SEQ ID NO: 41191 - protein, 218 aa, Pseudoalteromonas piscicida
  misc_feature (1)..(218): tr|A0A2A5JP66|A0A2A5JP66_PSEO7 7-cyano-7-deazaguanine s ynthase OS=Pseudoalteromonas piscicida OX=43662 GN=queC PE=3 SV=1
MSEKVVVIYSGGMDSYTVLNKAINEGHEVYALSFNYGQRHVKELQVAANVCEKLGVAHKVVDISAINQLLAGSSLTDDIDVPEGHYEEESMKSTIVPNRNMILLSLAVGYAVSLKANKVFYGAHSGDHAIYPDCRPEFVRKMDDVCRIANYDAVEIVSPYLNNSKIDILTDGLRMGLDYSDTWTCYNGREKACGKCGACQERLEAFELNNATDPLPYE

SEQ ID NO: 41192 - protein, 218 aa, Pseudoalteromonas piscicida
  misc_feature (1)..(218): tr|A0A0F4NV79|A0A0F4NV79_PSEO7 7-cyano-7-deazaguanine s ynthase OS=Pseudoalteromonas piscicida OX=43662 GN=queC PE=3 SV=1
MSEKVVVIYSGGMDSYTVLNKAVREGHEVYALSFNYGQRHVKELQVAADVCAKLGVAHKVVDISAINQLLSGSSLTDDIDVPEGHYEEESMKSTIVPNRNMILLSLAVGYAVSLKANKVFYGAHSGDHAIYPDCRPEFVKKMDDVCRIANYDAVEIVSPYLNNSKIDILTDGLKMGLDYADTWTCYNGREKACGKCGACQERLEAFELNHATDPLPYE

SEQ ID NO: 41193 - protein, 218 aa, Pseudoalteromonas porphyrae
  misc_feature (1)..(218): tr|A0A0N0LYA9|A0A0N0LYA9_9GAMM 7-cyano-7-deazaguanine s ynthase OS=Pseudoalteromonas porphyrae OX=187330 GN=que C PE=3 SV=1
MTQKVVVIYSGGMDSFTVLNKALQQGHDVYALSFDYGQRHVKELKVAANVCEKLNVPHKIVDISAINQLIGGSSLTDDIEVPEGHYEAENMKSTIVPNRNMILLSLAVGYAVSLKASQVYYGAHSGDHAIYPDCRPEFVQKMDDVCRIANYDAVEIFSPYLNNTKIDILTDGIKMGLDYSQTWTCYNGREKACGKCGACQERLEAFTLNNITDPIEYE

SEQ ID NO: 41194 - protein, 218 aa, Pseudoalteromonas profundi
  misc_feature (1)..(218): tr|A0A3A3EZE4|A0A3A3EZE4_9GAMM 7-cyano-7-deazaguanine s ynthase OS=Pseudoalteromonas profundi OX=1774956 GN=que C PE=3 SV=1
MTQKVVVIYSGGMDSFTVLNKALQQGHEVYALSFDYGQRHVKELKVAAQVCEKLGVSHKIVDISAINQLIGGSSLTDDIDVPEGHYEEESMKSTIVPNRNMILLSLAVGYAVSLKASKVYYGAHSGDHAIYPDCRPEFVQKMDDVCRIANYDAVEIFSPYLNNTKIDILTDGLKMGLDYSQTWTCYNGRDKACGKCGACQERLEAFALNNVTDPIEYE

SEQ ID NO: 41195 - protein, 218 aa, Pseudoalteromonas rubra
  misc_feature (1)..(218): tr|A0A0F4QK01|A0A0F4QK01_9GAMM 7-cyano-7-deazaguanine s ynthase OS=Pseudoalteromonas rubra OX=43658 GN=queC PE= 3 SV=1
MSEKVVVIYSGGMDSYTVLNKALKSGYEVYALSFNYGQRHVKELEVARQACDELGVAHKIVDISAINQLIGGSSLTDDIDVPEGHYEEESMKSTVVPNRNMILLSLAVGYAVSLKASKVFYGAHSGDHAIYPDCRPEFVKKMDDVCRIANYEEIEIVCPYLNNTKIGILTDGLKMGLDYSKTWTCYNGREKACGKCGACQERLEAFSLNQANDPLPYE

SEQ ID NO: 41196 - protein, 218 aa, Pseudoalteromonas rubra
  misc_feature (1)..(218): tr|U1K7T4|U1K7T4_9GAMM 7-cyano-7-deazaguanine synthase OS=Pseudoalteromonas rubra DSM 6842 OX=1117318 GN=queC PE=3 SV=1
MSEKVVVIYSGGMDSYTVLNKALKSGYEVYALSFNYGQRHVKELEVARQACDELGVAHKIVDISAINQLIGGSSLTDDIEVPEGHYEEESMKSTVVPNRNMILLSLAVGYAVSLKASKVFYGAHSGDHAIYPDCRPEFVKKMDDVCRIANYEEIEIVCPYLNNSKIEILTDGLKMGLDYSKTWTCYNGREKACGKCGACQERLEAFTLNQASDPLPYE

SEQ ID NO: 41197 - protein, 219 aa, Pseudoalteromonas ruthenica
  misc_feature (1)..(219): tr|A0A0F4PRZ3|A0A0F4PRZ3_9GAMM 7-cyano-7-deazaguanine s ynthase OS=Pseudoalteromonas ruthenica OX=151081 GN=que C PE=3 SV=1
MAEKVVVIYSGGMDSFTVLNKARMQGHEVYALSFNYGQRHVKELEVAKAVCERLGVDHKIVDISAINQLIGGSSLTDDIDVPEGHYEEESMKSTIVPNRNMILLSLAVGYAVSLKANKVYYGAHSGDHAIYPDCRPEFVKKMDDVCRIANYDEVEIVCPYLDSSKIDILRDGLAMDLDYSQTWTCYNGREQACGKCGACQERLEAFAENNATDPLPYES

SEQ ID NO: 41198 - protein, 219 aa, Pseudoalteromonas sp.; identical to SEQ ID NO: 41197
  misc_feature (1)..(219): tr|A0A4Q6Y6U1|A0A4Q6Y6U1_9GAMM 7-cyano-7-deazaguanine s ynthase OS=Pseudoalteromonas sp. CO325X OX=1777262 GN=q ueC PE=3 SV=1

SEQ ID NO: 41199 - protein, 218 aa, Pseudoalteromonas sp.
  misc_feature (1)..(218): tr|A0A4Z0SL39|A0A4Z0SL39_9GAMM 7-cyano-7-deazaguanine s ynthase OS=Pseudoalteromonas sp. KS88 OX=2109918 GN=que C PE=3 SV=1
MTQKVVVIYSGGMDSFTVLNKALQEGHDVYALSFDYGQRHVKELKVAAQVCEKLNVPHKIVDISAINQLIGGSSLTDDIDVPEGHYEEESMKSTIVPNRNMILLSLAVGYAVSLKASQVYYGAHSGDHAIYPDCRPEFVKKMDDLCRIANYDAVEIFSPYLNNTKIDILTDGIKMGLDYSETWTCYNGREKACGKCGACQERLEAFKLNNVTDPLEYE

SEQ ID NO: 41200 - protein, 221 aa, Pseudoalteromonas spongiae
  misc_feature (1)..(221): tr|A0A290T6G7|A0A290T6G7_9GAMM 7-cyano-7-deazaguanine s ynthase OS=Pseudoalteromonas spongiae UST010723-006 OX= 1117319 GN=queC PE=3 SV=1
MSRAVVVFSGGQDSTTCLVQALDLYDEVHAITFDYGQRHKREIEVAKALAAKLNVTSHKVLDVTMFNELAVSALTKEDISVSHELMENGLPNTFVPGRNILFLTLAGVYAYQVEADIVITGVCETDFSGYPDCRDEFVKLMQETLCKGLDRKIVISTPLMWLNKAETWGLADKYQSVELIRNETLTCYNGVIGDGCGDCPSCLLRKRGLEEYLNSKGSTSK

SEQ ID NO: 41201 - protein, 220 aa, Pseudoalteromonas spongiae
  misc_feature (1)..(220): tr|A0A290T367|A0A290T367_9GAMM 7-cyano-7-deazaguanine s ynthase OS=Pseudoalteromonas spongiae UST010723-006 OX= 1117319 GN=queC PE=3 SV=1
MSQKVVVIYSGGMDSYTVLNKAIRQGYEVYALSFDYGQRHVKELKVAADVCAELNISHKVVDISAINQLIGGSSLTDDIDVPEGHYEEESMKSTVVPNRNMILLSLAVGYAVSLKANKVFYGAHSGDHAIYPDCRPEFVQKMDDVCRIANYEEIEIVSPYLNNTKIEILTDGLNMGLDYSKTWTCYNGREKACGKCGACQERLEAFELNQASDPLPYEAN

SEQ ID NO: 41202 - protein, 218 aa, Pseudoalteromonas tetraodonis; identical to SEQ ID NO: 41179
  misc_feature (1)..(218): tr|A0A1E3WXW3|A0A1E3WXW3_9GAMM 7-cyano-7-deazaguanine s ynthase OS=Pseudoalteromonas tetraodonis OX=43659 GN=qu eC PE=3 SV=1

SEQ ID NO: 41203 - protein, 218 aa, Pseudoalteromonas translucida; identical to SEQ ID NO: 41177
  misc_feature (1)..(218): tr|A0A0U2WY43|A0A0U2WY43_9GAMM 7-cyano-7-deazaguanine s ynthase OS=Pseudoalteromonas translucida KMM 520 OX=131 5283 GN=queC PE=3 SV=1

SEQ ID NO: 41204 - protein, 207 aa, Pseudoalteromonas tunicata
  misc_feature (1)..(207): tr|A4CBB2|A4CBB2_9GAMM 7-cyano-7-deazaguanine synthase OS=Pseudoalteromonas tunicata D2 OX=87626 GN=queC PE=3 SV=1
MDSFTVLNKAISEGHEVYALSFDYGQRHVKELKVAAQVCQALNVPHKIVDISAINQLIGGSSLTDDIDVPEGHYQEESMKSTIVPNRNMILLSLAVGYAVSLKASQVYYGAHSGDHAIYPDCRPEFVQKMSDVCKIANYDAVEIVSPYLNNTKIDILTDGLKMGLDYSHTWTCYNGREKACGKCGACQERLEAFRLNDVVDPLPYEA

SEQ ID NO: 41205 - protein, 219 aa, Pseudoalteromonas ulvae
  misc_feature (1)..(219): tr|A0A244CVE5|A0A244CVE5_9GAMM 7-cyano-7-deazaguanine s ynthase OS=Pseudoalteromonas ulvae OX=107327 GN=queC PE =3 SV=1
MPQKVVVIYSGGMDSFTVLNKAINQGHEVYALSFDYGQRHVKELEVAANVCKQLNVPHKIVDISAINQLIGGSSLTDDIDVPEGHYEEESMKSTIVPNRNMILLSLAVGYAVSLKASQVYYGAHSGDHAIYPDCRPEFVKKMDDVCKIANYDAVEIISPYLNNTKIDILTDGLKMGLDYSQTWTCYNGRQKACGKCGACQERLEAFSLNNVSDPLEYEA

SEQ ID NO: 41206 - protein, 227 aa, Pseudoarcobacter caeni
  misc_feature (1)..(227): tr|A0A363D101|A0A363D101_9PROT 7-cyano-7-deazaguanine s ynthase OS=Pseudoarcobacter caeni OX=1912877 GN=queC PE =3 SV=1
MSNIRTKKAICILSGGMDSTLASYMAKNDGYEIIAVHFNYGQRTQDRELKAFRDICNDLKILEKYEVDIPFFTQIGASALTDKNIDVPTGGIEAGVPITYVPFRNGIFLSIAAAIAEKEEATAMYIGVVQEDSSGYPDCTDEFIADMKKAINQGTREDTHINIITPLVHLSKAQIVLEAIKLNVPLEHTWSCYKEENEACGICDSCRLRLNGFKVANQTDPITYKVL

SEQ ID NO: 41207 - protein, 2141 aa, Pseudobacteroides cellulosolvens
  misc_feature (1)..(2141): tr|A0A0L6JGW6|A0A0L6JGW6_9FIRM Amino acid adenylation d omain protein OS=Pseudobacteroides cellulosolvens ATCC 35603 = DSM 2933 OX=398512 GN=Bccel_0221 PE=4 SV=1
MSTSKKLDKQNVEDILALTPVQEGMLFHYLSNPESELYFEQMSFGLLGEIEINLFKKAWSFVVETNEMLRTVYRWEGIEMPVQVVLKKQELLIREYDVSSASEEKRQELLDEIRIKDRKERVDISTEPFRITICKVDKNIYEMIVSSYHIIYDGWSNGILLKEFLKAYNELYFGLQPQKQVKTRYKEYIKWYGKQDKEERAKYWKRYLEGFQSKTILPVDRKKLDKTVIAQNYTKVINKTLSDKVKSFAKSQGITLASLLYCAWGILLKKYNDSYDVVFGTTVSGRTPEVKGIGDIVGLFINTPPIRIQSSPNEAVSNLISKVDTMLRERDDFEYTPLTEIKPLLEIDSMEELFDSIVVIENYPLDSSYNENDSKIKIRLNSIFEMTNYDLTFVISTFDNIGIRIIYDAKIFDHETMERLSDQYIKILKEMLEKPWQSISEIDILTEADKQQILFDFNNTGALYNIDKTMHELFEEQVINSPDRIAAVFENQSITYSELNEKSNQLARLLQKKGVKNETIVGVMVEPSLDMIISVLAVLKAGGAYLPIDLHVPADRITYILEDSGAKVLITTSHAVQNIHYTTLQNFESKDGSNIVVTSPRSHIQEFDALPVPDRSLIDIGSYKGKIGMASVNNCISLQTTRGCPYKCLYCHKVWSKHHVRRSAENIYEEIEYYYKNGVRNFAVIDDCFNLDMKNSAELFKLIVKNDLKIQIFFPNGLRGDILTPEYIDLMVEAGTRGINLSLETASPRLQQLLMKNLDLDKFKNVVDYIATKHSNIILEMATMHGFPTETEEEAMMTLNFIKDIKWLHFPYVHILKIFPNTEMEAFALENGISKADILKSKDRAFHELPETLPFPKSFTRRYQASFMNEYFLSKERLKHVLPVQMRILDEGALIQKYNAYLPVEINSIADIIKFTELNDFILPEDCRETIEIPYSVFDKPKQERKEIIGAKKIMFLDLSQHFSSSNMLYKVAEQPIGQIYLLTYLKKIFGEKIDGRIYKSGNDFDSFEELKNLVNEYKPDMIGIRTLTYFKEFFHETVSLLRQWGINVPIITGGPYASSDYDTILKDRNVNLVVFGEGEYTLAELVSKMLENSFKLPESIVLRNINGIAFAEESQHFTDTSCQIFMIDRIKDILAEEEKENLCLSVSSKNMAYVMYTSGSTGKPKGVMVEHRQVNNCISWMQNEFGLKSSDIIVQRTNLTFDPSVWEIFWPLYSGACVRLITQEQSRDAEFLLNLMSEENGPTMMYCPASLVTGMLYMLNNRAESPKLKMPWLIIGAEPIGIETVRGFYDYYDGKIVNTYGPTECTINNTYYHIDRDDKRSVVPIGKPIANNMIYILSRDKQLLPVKAPGEIYIAGDSVARGYIHNPEKTTECFIENPYGEGRLYKTGDIGRWLRDGNIEIMGRVDEQVKVRGYRIELGEIESALSRHKSIKDCVVVVKGGIKAQTVVKECKSCGITSKYPGIKISEEGLCDICQDSSIYKSYMNKYFKTLDDLNMLLKENSMSQKGKYDCLLLYSGGKGSAYALYRLVEMGYKVLALTYNNGYFTKSDMENIRMITSKLGVDHVVLTHKNTDEILKESLIAAHTVCRGCFHISSSLAGDYAYRNNISLVVGATLSRGQILENKLLMFYKQGISDVSEIERELLNIQKGARQMDKSIFDHMDIESISSGAVYDQVKFVDFYRYCDITNQEMISFLNQKDEYWIGRKNYAIYSTNCPVKQIGDYGHLHERGFHYYGSATSWEKRLNHITIENVKEDLKCYPTEKAFKNFSKRVGYEPVRQEQKIDTSYICAYYVSESEISATELREFLTDKLPGYMIPTYFVEMEKIPFTSNNKIDKKALPEPEENINSGVEYVAPESETEEILTEIWHRILDVDKVGVKDNFFDIGGNSILLIQMHSQVDRRFPGKTMMMDLFAYPTVSKLANFIDSKNEKICKYISVEPVDLPVSYFCGGEKDLKAASYSFTLNKQMSEKAKLMSKTENITTDDIWVAVYSYLFAQMAGKKEIAVQSITGDVNRVVSVKNDFDAMKDFIQLFKNVNRQHRDENQAEAYEIEEIKSIVMNKGNESVIPLIFKKGLTNVKGNLMDIYDISLEYDDGEEEMQFQFEYNGKVLKSDKMKELVNSYYKITKMIIDQYEPKGVVL

SEQ ID NO: 41208 - protein, 244 aa, Pseudobacteroides cellulosolvens
  misc_feature (1)..(244): tr|A0A0L6JNA2|A0A0L6JNA2_9FIRM 7-cyano-7-deazaguanine s ynthase OS=Pseudobacteroides cellulosolvens ATCC 35603 = DSM 2933 OX=398512 GN=queC PE=3 SV=1
MKRAVVLLSGGLDSTTCLSVAIKDGYEVFPISFDYGQRHRRELHCAGLIAKYHKLKTYNVFKLDNVGGSALTDMSINVPEYKGDKFIPITYVPARNIIFLSYAVGYAEVVNAEAIYIGVNAIDYSGYPDCRPEFIEAFQQMVAVGTKSGVEGRGVKIVTPLLNLSKSEIIKLACDKGAPLHLTWSCYKGGDKACGVCDSCVLRLKGFDEAGIEDPIEYSKNDMEIDIAGNQAVNKDVNERNRYE

SEQ ID NO: 41209 - protein, 228 aa, Pseudobutyrivibrio ruminis
  misc_feature (1)..(228): tr|A0A285RDU4|A0A285RDU4_9FIRM 7-cyano-7-deazaguanine s ynthase OS=Pseudobutyrivibrio ruminis DSM 9787 OX=11230 11 GN=queC PE=3 SV=1
MKALVLVSGGLDSTTCLALAVKEYGHENVVGLSIFYGQRHDKEIKAADAVCEYYKVEHITLDLSTMFQFSDCTLLQHSDGEIPEESYDKQLEKTNGKPVSTYVPFRNGLFLSSAAAIALSKGCSKIYYGAHADDAAGNAYPDCSSDFNNAMNTAIYEGSGKQLTIEAPFINKNKAGVVKLGMELGVPYELTWSCYEGHDKACGKCGTCIDRIAAFELNGIKDPIEYEN

SEQ ID NO: 41210 - protein, 228 aa, Pseudobutyrivibrio ruminis
  misc_feature (1)..(228): tr|A0A2G3DYD1|A0A2G3DYD1_9FIRM 7-cyano-7-deazaguanine s ynthase OS=Pseudobutyrivibrio ruminis OX=46206 GN=queC PE=3 SV=1
MKALVLVSGGVDSTTCLGMAVKEYGHENVVGLSIFYGQRHDKEIKAADAVCDFYKVEHITLDLSTMFQFSDCTLLQHSDGEIPEESYAEQLSKTDGKPVSTYVPFRNGLFLSSASAIALSKGCSKIFYGAHSDDAAGNAYPDCSEAFNKAMNTAIYEGSGKQLEIVAPFISLNKSQVVKKGLEIGVPYELTWSCYEGHEKACGKCGTCIDRKAAFELNGVKDPIEYEN

SEQ ID NO: 41211 - protein, 228 aa, Pseudobutyrivibrio sp.; identical to SEQ ID NO: 41209
  misc_feature (1)..(228): tr|A0A1I5D4B4|A0A1I5D4B4_9FIRM 7-cyano-7-deazaguanine s ynthase OS=Pseudobutyrivibrio sp. JW11 OX=1855302 GN=qu eC PE=3 SV=1

SEQ ID NO: 41212 - protein, 228 aa, Pseudobutyrivibrio sp.
  misc_feature (1)..(228): tr|A0A1H3ZY61|A0A1H3ZY61_9FIRM 7-cyano-7-deazaguanine s ynthase OS=Pseudobutyrivibrio sp. ACV-2 OX=1520801 GN=q ueC PE=3 SV=1
MKALVLVSGGVDSTTCLGMAVKEYGNENVVALSIFYGQRHDKEIKAADAVCEHYNVEHITLDLSTMFQFSDCTLLQHSDGEIPEESYAKQLEKTDGKPVSTYVPFRNGLFLSSASAIALSKGCSKIYYGAHSDDAAGSAYPDCSEAFNNAMNTAIYEGSGKQLEIVAPFINLTKSQVVKKGLELGVPYELTWSCYEGHDKACGKCGTCIDRKAAFELNGVSDPIEYEI

SEQ ID NO: 41213 - protein, 228 aa, Pseudobutyrivibrio xylanivorans
  misc_feature (1)..(228): tr|A0A1M6FN48|A0A1M6FN48_PSEXY 7-cyano-7-deazaguanine s ynthase OS=Pseudobutyrivibrio xylanivorans DSM 14809 OX =1123012 GN=queC PE=3 SV=1
MKALVLVSGGVDSTTCLGMAVKEYGNENVVALSIFYGQRHDKEIKAADAVCNHYNVEHITLDLSTMFQFSDCTLLQHSDGEIPEESYAEQLAKTDGKPVSTYVPFRNGLFLSSASAIALSKGCSKIYYGAHSDDAAGNAYPDCSEAFHKAMNTAIYEGSGKQLEIVAPFISLTKSQVVKKGLEIGVPYELTWSCYEGHEKACGKCGTCIDRKAAFELNGVTDPIPYEN

SEQ ID NO: 41214 - protein, 228 aa, Pseudobutyrivibrio xylanivorans
  misc_feature (1)..(228): tr|A0A1G5S325|A0A1G5S325_PSEXY 7-cyano-7-deazaguanine s ynthase OS=Pseudobutyrivibrio xylanivorans OX=185007 GN =queC PE=3 SV=1
MKALVLVSGGVDSTTCLGMAVKEYGSENVVGLSIFYGQRHDKEIKAADAVCEHYNVEHITLDLSTMFQFSDCTLLQHSDGEIPEESYAEQLAKTEGKPVSTYVPYRNGLFLSSASAIALSKGCSKIYYGAHSDDAAGNAYPDCSEAFNNAMNTAIYEGSGKQLQIVAPFISLTKSQVVKKGLEIGVPYELTWSCYEGHEKACGKCGTCIDRKAAFELNGVTDPIPYEN

SEQ ID NO: 41215 - protein, 230 aa, Pseudocitrobacter faecalis
  misc_feature (1)..(230): tr|A0A366F420|A0A366F420_9ENTR 7-cyano-7-deazaguanine s ynthase OS=Pseudocitrobacter faecalis OX=1398493 GN=que C PE=3 SV=1
MKRAVVVFSGGQDSTTCLVQALHQYDEVHCVTFDYGQRHRAEIDVARELALKLGARAHKVLDVTLLNELAVSSLTRDSIPVPDYEPDADGIPNTFVPGRNILFLTLTAIYAYQVQAEAIITGVCETDFSGYPDCRDEFVKALNHAVNLGMAKDIRFETPLMWLDKAETWALADYWGKLDLVRNETLTCYNGIKGDGCGHCASCHLRANGLNHYLADKVGVAAAMKQKTGL

SEQ ID NO: 41216 - protein, 231 aa, Pseudocitrobacter sp.
  misc_feature (1)..(231): tr|A0A5B0KGH8|A0A5B0KGH8_9ENTR 7-cyano-7-deazaguanine s ynthase OS=Pseudocitrobacter sp. 73 OX=2605731 GN=queC PE=3 SV=1
MKRAVVVFSGGQDSTTCLVQALHQYDEVHCVTFDYGQRHRAEINVARELALKLGARAHKVLDVTLLNELAVSSLTRDSIPVPDYEPEADGIPNTFVPGRNILFLTLTAIYAYQVKAEAIITGVCETDFSGYPDCRDEFVKALHHAVSLGMAKDIRFETPLMWLDKAETWALADYWGKLDLVRSETLTCYNGIKGDGCGHCASCHLRANGLNHYLADKVGVAATMKQKTGLK

SEQ ID NO: 41217 - protein, 700 aa, Pseudodesulfovibrio aespoeensis
  misc_feature (1)..(700): tr|E6VX91|E6VX91_PSEA9 Uncharacterized protein OS=Pseud odesulfovibrio aespoeensis (strain ATCC 700646 / DSM 10 631 / Aspo-2) OX=643562 GN=Daes_1584 PE=4 SV=1
MQDKRYIICGNAPTDGIEENPDRDLRLRLWGKDGLDKITLRIEDIHKKMSKDVPDSFQDLLEIATYVYSADQAIPRGADDVDSFGHGWRRDLHFIIPVRKPDFWNGDDIHQALRSTLGFLSDDNYHFEFVKLKEAQAFQGYLKFDDDGRLFGYPEQVVMFSGGLDSLAGAIDEVLNEKHKVVLVTHKSTPKLNTRHRRLEKMIADKAGENAPLHIGVRVNKNKGLNYEYTQRSRSFLYVSIGATIAKMLNLKSVRFYENGVISLNLPVCAQVVGGRATRTTHPRVIRGFQEIISLVAGEPFTIENPYIWKTKAGVIEVITKAGCQDMIAASTTCTHTWEMTNHHTHCGTCSQCIDRRFAMIAAKADQHDPVEAYKADIFTQSRSKDEDKIMAAAYLERANQVRDQDDITQFIARFSEVSRVFRYLNGNPGSVAQKVYDLYKRHAKEVCDAMDTMVGRNITAIRQRTLPGDCLLRTVYESGSVISVPAIPVEQKQPDNYFRKRGGVWAARFNGNAEVLVTGVDKGAEYINFLLARPNKETSVYEIVCGFAIDSCNAVLNSNETDEGFQVTQGVPLGDTGFVADRKAVEQYRETAHELLREIEEARAENNDAEIQRLENEMTQITAAINEAVGLGGKLRKSNDKRKNIRDAFRSAVNRAITYLDKYDKPLAAHLKESIKCGNEPVYRTEEEIVWEVRPIVNE

SEQ ID NO: 41218 - protein, 275 aa, Pseudodesulfovibrio hydrargyri
  misc_feature (1)..(275): tr|A0A1J5N5X7|A0A1J5N5X7_9DELT tRNA(Ile)-lysidine synth ase OS=Pseudodesulfovibrio hydrargyri OX=2125990 GN=til S_1 PE=4 SV=1
MTLTQQQKKRYAALLAEIHGMERVLAAFSGGVDSTLLLHAAQRAVGEGVLAVTFATPYSPKEETACAVEFAKALGVRHMLVELPIPEDIRNNPPERCYLCKRTLFGELVRIAEEEGIRYILDGSNLDDLGDHRPGRKAVKELGVRSPLLDAGLTKQDIRDLSREYGLPTWDKPAGACLLTRLPHGSAVEEAELERIDKGETFLKDLGFAAVRLRSHGEVARIELPSEDIAACLESGVRKRIDDHLKELGYRYVSVDLAGYRMGSLNEPEAAGRKE

SEQ ID NO: 41219 - protein, 264 aa, Pseudodesulfovibrio profundus
  misc_feature (1)..(264): tr|A0A2C8F856|A0A2C8F856_9DELT Uncharacterized protein OS=Pseudodesulfovibrio profundus OX=57320 GN=DPRO_1319 PE=4 SV=1
MTTTTTKLFFTGGWDSTFRLLELLVAEKRPVQPIYVIDPDRWSLREEQKAMADIKTTVVERFPEAANLLKPTMIIDKTDLKPDPAFKACEQKLLETNIFGSQYEWLGRAAKQFGLEGAEVCVEYSEIKVAGCYVTINPLVEQIEDGSYYFAEEHKNTLEYQFFGMYSFPVMRTSKAEMMEKAEKYGFLDILEMSWFCHKPNFLGQACGMCNPCKDAMTMEMTHRVPPFGRFCYHLKRNLNPRTHLQHFPKVYDYLRTLKRKLKG

SEQ ID NO: 41220 - protein, 700 aa, Pseudodesulfovibrio profundus
  misc_feature (1)..(700): tr|A0A2C8F3X9|A0A2C8F3X9_9DELT Uncharacterized protein OS=Pseudodesulfovibrio profundus OX=57320 GN=DPRO_0546 PE=4 SV=1
MQDKRYIICGNAPTSGIEENPDRDLRLRLWGKDGPDKITLRIEDIHKKMSKDVPDSFQDLLEIATYVYSADQAIPRGADDVDSFGHGWRRNLHFIIPVRNPDFWNGEEIQQALCSTLGFLSDDSYHFEFTKLTEAQAFQGYLDFNDDGRLLGYPEQVVMFSGGLDSLAGAIDEVLNEKHRVVLVTHKSTPKLNKRHRRLEKMIADKAGENAPLHIGVRVNKNKGLNYEYTQRSRSFLYVSIGATIAKMINLKSVRFYENGVISLNLPVCAQVVGGRATRTTHPRVIRGFQEIISLVAGEPFTIENPYIWKTKADVVGVITKAGCQEMIAASTTCTHTWEMTNHHTHCGTCSQCIDRRFAVIAAKADQYDPVDAYKADIFTQSRSKDEDKIMAAAYLERANQVRDQDDITQFIARFSEVSRVFRYLNGNPGSVAQKVYDLYKRHAKEVCEAMDTMVARNITAIRQRTLPGDCLLRTVYESGSVISVPAIPVEQKQPDNYFRKRGGVWAARFNGNAEVLVTGVDKGAEYINFLLARPNKETSVYEIVCGFAIDSCNAVLNSNETDEGFQVTQGVPLGDTGFVADRKAVEQYRETAHELLREIEEARAENNDAEIQRLEDEMTQITAAINEAVGLGGKLRKSNDKRKNIRDAFRNAVNRAIKYLEKYDKPLAVHLKESIKCGNEPVYRTEEEIVWEVRPIVNE

SEQ ID NO: 41221 - protein, 250 aa, Pseudoflavonifractor sp.
  misc_feature (1)..(250): tr|A0A1Y4LEQ3|A0A1Y4LEQ3_9FIRM TIGR00268 family protein OS=Pseudoflavonifractor sp. An184 OX=1965576 GN=B5F19_ 09715 PE=4 SV=1
MTLNEFFSLVPKAAVAFSGGTDSAFLLWAARECGCEVRAYYGKTAFQPQFELEDARRLASELEVPMTVVEADILSVPEAAANGPQRCYHCKTALFSRLRQAAREDGYTVLLDGTNASDDAGDRPGMRALRELEVRSPLRECGLTKDEVRRRSREAGLFTWDKPAYACLATRIPTGALITKEDLEKVERAEGALHALGFRDFRVRLFHGAARLQVTEEQLPLVLEQREAISSSLGAAFDGVLLDLKPRGLE

SEQ ID NO: 41222 - protein, 248 aa, Pseudoflavonifractor sp.
  misc_feature (1)..(248): tr|A0A416R6T5|A0A416R6T5_9FIRM ATP-dependent sacrificia l sulfur transferase LarE OS=Pseudoflavonifractor sp. A F19-9AC OX=2292244 GN=larE PE=4 SV=1
MTLGEFFQMYPKVALAFSGGVDSAYLLYAAVSCGAQVRAYYVKSAFQPQFELEDAQRLAKELNADMRVLQVDVLANQHVASNPADRCYYCKRGIFTAILNAAAEDGFSVLIDGTNASDDAGDRPGMRALREMSVRSPLRECGLTKAEVRRLSKEAGLFTWDKPAYACLATRVPAGVEITEEMLQKTEAAEDFLFSQGFSDFRVRMMGNAARLQLPEAQLPLLLEKRQTVVSELKKSYGAVLLDLEVRG

SEQ ID NO: 41223 - protein, 235 aa, Pseudofulvimonas gallinarii
  misc_feature (1)..(235): tr|A0A4S3KX30|A0A4S3KX30_9GAMM 7-cyano-7-deazaguanine s ynthase OS=Pseudofulvimonas gallinarii OX=634155 GN=que C PE=3 SV=1
MNDSRQRKAVVLLSGGMDSAVVVAIAREMGFAVHALSILYGQRHAVELAAARRVAADLGVAEHKVLNLDLRAIGGSALTADIAVPESPSEGIPVTYVPARNTVFLSLALGYAEVIGADDLFVGVNAVDYSGYPDCRPAFVEAFERLANVATRAGVEGHQLRVHAPLMHLGKDEIVREGVRLGVDFAQTVSCYQADEQGLACGRCDACRLRAQGFAEAGVPDPTPYRADAGAAPAR

SEQ ID NO: 41224 - protein, 234 aa, Pseudogulbenkiania ferrooxidans
  misc_feature (1)..(234): tr|U0Z4J0|U0Z4J0_9NEIS 7-cyano-7-deazaguanine synthase OS=Pseudogulbenkiania ferrooxidans EGD-HP2 OX=1388764 G N=queC PE=3 SV=1
MKQKSDEKALVVLSGGQDSTTCLYWALGRFGAGNVEAVTFDYGQRHRVELDCARKIAALAGVRQTVLPIDTFAAIGGNALTDDEITPEEGVRDDDALPNTFVPGRNLVFLTFAAAFAYTRGARHLVTGVAQTDYSGYPDCRENTLKALEVALRLGMDSRVELHTPLMYLSKAETVTLAQQVGALDALAWSHTCYNGEVPPCGHCASCELRAKGFAEAGVPDPLVERCQAEAQGH

SEQ ID NO: 41225 - protein, 230 aa, Pseudogulbenkiania ferrooxidans
  misc_feature (1)..(230): tr|B9Z1F7|B9Z1F7_9NEIS 7-cyano-7-deazaguanine synthase OS=Pseudogulbenkiania ferrooxidans 2002 OX=279714 GN=qu eC PE=3 SV=1
MNSSDKALVVLSGGQDSTTCLYWALQRFGADNVEAVTFDYGQRHRVELDSARTIAALAGVPHTVLPIDTFAAIGGNALTDASITPESGARADDDTALPNTFVPGRNLIFLNFAAAFGYTRGARHLVTGVAQTDYSGYPDCRENTLKALELALRLGLDARVELHTPLMYLSKADTVRLAQQVGAMEAMAFSHTCYNGEQPPCGHCAACELRAKGFAEAGVADPLVERFRQG

SEQ ID NO: 41226 - protein, 230 aa, Pseudogulbenkiania sp.
  misc_feature (1)..(230): tr|G2IYU7|G2IYU7_PSEUL 7-cyano-7-deazaguanine synthase OS=Pseudogulbenkiania sp. (strain NH8B) OX=748280 GN=qu eC PE=3 SV=1
MNSSDKALVVLSGGQDSTTCLYWALQRFGAGQVEAVTFDYGQRHRVELDSARTIAALAGVPHTVLPIDTFAAIGGNALTDASITPESGARADDDTALPNTFVPGRNLIFLNFAAAFGYTRGARHLVTGVAQTDYSGYPDCRENTLKALELALRLGLDARVELHTPLMYLSKADTVRLAQQVGAIAALAFSHTCYNGEQPPCGHCAACELRAKGFAEAGVADPLVERFRQG

SEQ ID NO: 41227 - protein, 230 aa, Pseudogulbenkiania subflava
  misc_feature (1)..(230): tr|A0A1Y6B9X5|A0A1Y6B9X5_9NEIS 7-cyano-7-deazaguanine s ynthase OS=Pseudogulbenkiania subflava DSM 22618 OX=112 3014 GN=queC PE=3 SV=1
MNSSDKALVVLSGGQDSTTCLYWALQRFGADKVEAVTFDYGQRHRVELDSARAIAALAGVPHTVLPIDTFAAIGGNALTDASITPEQGARADDDTELPNTFVPGRNLIFLNFAAAFGYTRGARHLVTGVAQTDYSGYPDCRENTLKALELALRLGLDARVELHTPLMYLSKADTVHLAQQVGAMAALAYSHTCYNGEQPPCGHCAACELRAKGFAEAGVADPLVELFRQG

SEQ ID NO: 41228 - protein, 225 aa, Pseudohaliea rubra
  misc_feature (1)..(225): tr|A0A095VMD3|A0A095VMD3_9GAMM 7-cyano-7-deazaguanine s ynthase OS=Pseudohaliea rubra DSM 19751 OX=1265313 GN=q ueC PE=3 SV=1
MEKRAVILSSGGLDSTTVLAMARAEGYACYTLSFDYGQRHRAELNAAVRVAAALGDVEHKVVSLNLDSIGGSALTDAAIAVPEEASEGIPVTYVPARNTVFLAIALGWAEVLNARDIFIGVNAVDYSGYPDCRPAFIEAFERVANLATRVGVEEGGIRIRAPLMELGKDAIIRRGMELGVDYGLTVSCYQATDEGLACGRCDACRLRREGFAAAGVADPTRYRKG

SEQ ID NO: 41229 - protein, 238 aa, Pseudohongiella acticola
  misc_feature (1)..(238): tr|A0A1E8CGA8|A0A1E8CGA8_9GAMM 7-cyano-7-deazaguanine s ynthase OS=Pseudohongiella acticola OX=1524254 GN=queC PE=3 SV=1
MKESNPDNGGNNTKKAVILVSGGLDSATCLAIARAEGYDCYALSFNYGQRASSELDAAMRLASAFSVRQHQVIPLGIGQLGGSALTDASVAMPESGVVPDQIPVTYVPARNTVFLSYALAWAEVLEADSIFIGVNALDYSGYPDCRPEFILAFEQMANLATRIGVEGRPIRIKTPLIDLGKAQIIAMGHELGVNYGLTVSCYQADSKGRACGRCDSCRLRRKGFDDAGIADPTSYVSR

SEQ ID NO: 41230 - protein, 230 aa, Pseudohongiella sp.
  misc_feature (1)..(230): tr|A0A2D9DQC2|A0A2D9DQC2_9GAMM 7-cyano-7-deazaguanine s ynthase OS=Pseudohongiella sp. OX=1979412 GN=queC PE=3 SV=1
  misc_feature (7)..(7): Xaa can be any naturally occurring amino acid
  misc_feature (32)..(33): Xaa can be any naturally occurring amino acid
  misc_feature (37)..(37): Xaa can be any naturally occurring amino acid
  misc_feature (40)..(41): Xaa can be any naturally occurring amino acid
  misc_feature (47)..(47): Xaa can be any naturally occurring amino acid
  misc_feature (95)..(95): Xaa can be any naturally occurring amino acid
  misc_feature (98)..(98): Xaa can be any naturally occurring amino acid
  misc_feature (100)..(100): Xaa can be any naturally occurring amino acid
  misc_feature (105)..(105): Xaa can be any naturally occurring amino acid
  misc_feature (120)..(120): Xaa can be any naturally occurring amino acid
  misc_feature (122)..(122): Xaa can be any naturally occurring amino acid
  misc_feature (150)..(150): Xaa can be any naturally occurring amino acid
  misc_feature (174)..(174): Xaa can be any naturally occurring amino acid
  misc_feature (179)..(179): Xaa can be any naturally occurring amino acid
  misc_feature (200)..(200): Xaa can be any naturally occurring amino acid
  misc_feature (219)..(219): Xaa can be any naturally occurring amino acid
MEQHPTXKKAVILVSGGLDSATCLALAAEQGXXCYAXSFXXGQRASXELEAARRLAEAAGVARHLVIPIGMGQMGGSALTDHSVAMPEDGVKDNXIPXTXVPARXTIFLSYALGWAEVLXAXAIFIGVNALDYSGYPDCRPEFIAAFEAXANLATRAGVEGQSIKIETPLISLXKAQIXETGNRLGVDYALTVSCYQADXQGRACGRCDSCRLRRKGFXDAGVADPTHYA

SEQ ID NO: 41231 - protein, 230 aa, Pseudohongiella sp.
  misc_feature (1)..(230): tr|A0A355VAM1|A0A355VAM1_9GAMM 7-cyano-7-deazaguanine s ynthase OS=Pseudohongiella sp. OX=1979412 GN=queC PE=3 SV=1
MEQHPTTKKAVILVSGGLDSATCLALAAEQGYECYAMSFDYGQRASSELEAARRLAEAAGVARHLVIPIGMGQMGGSALTDHSVAMPEDGVKDNIIPITYVPARNTIFLSYALGWAEVLEARAIFIGVNALDYSGYPDCRPEFIAAFEALANLATRAGVEGQSIKIETPLISLSKAQIIETGNRLGVDYALTVSCYQADAQGRACGRCDSCRLRRKGFDDAGVADPTHYA

SEQ ID NO: 41232 - protein, 229 aa, Pseudohongiella spirulinae
  misc_feature (1)..(229): tr|A0A0S2KEF7|A0A0S2KEF7_9GAMM 7-cyano-7-deazaguanine s ynthase OS=Pseudohongiella spirulinae OX=1249552 GN=que C PE=3 SV=1
MNTSAIRKAVILVSGGLDSATCLALAKEAGFECYALSFDYGQRASSELLAAQRLADEAGVSRHLVIPIGMGQMGGSALTDSSLTMPEDGVQENVIPITYVPARNTVFLSYALGWAEVLGASDIYIGVNALDYSGYPDCRPEFIKAFETMANLATRVAVEGQPMRIHTPLIHLSKAQIIAEGVRLGVDYGLTVSCYQADAEGRACGRCDSCRLRRKGFADAGVTDPTRYV

SEQ ID NO: 41233 - protein, 237 aa, Pseudolabrys sp.
  misc_feature (1)..(237): tr|A0A0Q7TK81|A0A0Q7TK81_9RHIZ 7-cyano-7-deazaguanine s ynthase OS=Pseudolabrys sp. Root1462 OX=1736466 GN=queC PE=3 SV=1
MTIANDTALVLFSGGQDSTTCLGWALDRFARVETVGFNYGQRHVIELEMRPRLRDLIAGIKPAWRERLGEDHLIALDALSAISETALTRETAIAFADGGLPNTFVPARNLVFFTFAGALAYRRGARHIVAGMCETDYSGYPDCRDDTVKAMQVALSLGLDRRVTIHTPLMWVDKAGTFAMAREIAGQAFLDLIVEETHTCYLGDRSHRHPWGYGCGACPACELRAQGYAKFCADGPA

SEQ ID NO: 41234 - protein, 237 aa, Pseudolabrys sp.
  misc_feature (1)..(237): tr|A0A371BE31|A0A371BE31_9RHIZ 7-cyano-7-deazaguanine s ynthase OS=Pseudolabrys sp. GY_H OX=2292256 GN=queC PE= 3 SV=1
MTIANDAALVLFSGGQDSTTCLGWALERFARVETVGFNYGQRHAVELEVRPRLRDLIAGLKPEWKARLGDDHMVSLDALAAISDTALTRETAIAVADSGLPNTFVPARNLIFFTFAGALAYRRGARHIVAGMCETDYSGYPDCRDDTIKAMQVALSLGLDRKLTIHTPLMWVDKAGTFEMARDIAGQAFLDLVVEHSHTCYLGDRSHRHPWGYGCGTCPACDLRRQGYAKFLVSHPN

SEQ ID NO: 41235 - protein, 239 aa, Pseudolabrys taiwanensis
  misc_feature (1)..(239): tr|A0A345ZTT8|A0A345ZTT8_9RHIZ 7-cyano-7-deazaguanine s ynthase OS=Pseudolabrys taiwanensis OX=331696 GN=queC P E=3 SV=1
MTIGSDTALVLFSGGQDSTVCLAWALERFSRVETVGFDYGQRHAIELSVRNSLREKMAALDPAWAMRLGEDHLVKIDALAAISETALTRDTAIEIADNGLPTTFVPGRNLLFLGFAGAIAYRRGARHLVAGMCETDYSGYPDCRDDTIKAMQLALTLGLDKRVTIHTPLMWIDKAETFALAEELGGEVFLDLVVEESHSCYLGDRSRRHAWGYGCGTCPACQLRAQGFAKFMRERETTK

SEQ ID NO: 41236 - protein, 229 aa, Pseudomonadaceae bacterium
  misc_feature (1)..(229): tr|A0A2E8IHU4|A0A2E8IHU4_9GAMM 7-cyano-7-deazaguanine s ynthase OS=Pseudomonadaceae bacterium OX=1914538 GN=que C PE=3 SV=1
MSDKKAVILLSGGLDSATVVAMAKADGYSCYTMSFDYGQRHRSELQAAERVARQLGVVEHKVIGLNLNGMGGSALTDASIAVPENAAGAAPAPGIPVTYVPARNTVFLSLALGWAEVLGARDIFIGVNAVDYSGYPDCRPEFVEAFERMANLATKAGVEGNGFRIQAPLQNMSKAEIVAAGIALGVDYAQTVSCYQADDDGRACGKCDSCSLRAAGFAAAGVADATRYV

SEQ ID NO: 41237 - protein, 241 aa, Pseudomonadaceae bacterium
  misc_feature (1)..(241): tr|A0A4Q9R507|A0A4Q9R507_9GAMM 7-cyano-7-deazaguanine s ynthase OS=Pseudomonadaceae bacterium P17C OX=2211397 G N=queC PE=3 SV=1
MHKRALVLFSGGQDSTTCLAWALDRYERVETIGFDYGQRHSVELACRQRILQRLRQRYPAWRDRLGDDHFLDLKLLGQISETAMTSEKAIEFEQNGLPNTFVPGRNLLFFTFAAALAYRRGISVLVGGMCETDYSGYPDCRDNTLKALQVSLSLGMDSALLIETPLMWLDKNRTWELAGQLGGNDFVELIREETHTCYLGERGQRHAWGYGCGTCPACQLRKSGYQQYAAGLPTAPQDAPE

SEQ ID NO: 41238 - protein, 225 aa, Pseudomonadales bacterium
  misc_feature (1)..(225): tr|A0A2E3D2E8|A0A2E3D2E8_9GAMM 7-cyano-7-deazaguanine s ynthase OS=Pseudomonadales bacterium OX=1891229 GN=queC PE=3 SV=1
MNESKRAVVLLSGGLDSATCLAIARSQGYECFAISFEYGQRHDSELAAAQRVVDALGAKELKTIHINMGDIGGSALTDRSIDVPESPTEGIPVTYVPARNTVFLSLALGWAEVLNADAIFIGVNAVDYSGYPDCRPEYIAAFENLAKLATKRGVEGNPISIEAPLLMLSKADIIQKGTALGLDYGLTVSCYQADQEGRACGVCDSCRLRKEGFAQAGVLDPTRYR

SEQ ID NO: 41239 - protein, 222 aa, Pseudomonadales bacterium; identical to SEQ ID NO: 35585
  misc_feature (1)..(222): tr|A0A1G3DM57|A0A1G3DM57_9GAMM 7-cyano-7-deazaguanine s ynthase OS=Pseudomonadales bacterium RIFCSPHIGHO2_12_FU LL_40_16 OX=1802006 GN=queC PE=3 SV=1

SEQ ID NO: 41240 - protein, 224 aa, Pseudomonas abietaniphila
  misc_feature (1)..(224): tr|A0A1G8ATD1|A0A1G8ATD1_9PSED 7-cyano-7-deazaguanine s ynthase OS=Pseudomonas abietaniphila OX=89065 GN=queC P E=3 SV=1
MTEKRAVILLSGGLDSATVVAMAKADGFACYTMSFDYGQRHRAELQAAERVAKDLGVVEHKVIGLNLNGIGGSALTDSSIAVPETPGEGIPVTYVPARNTVFLSLALGWAEVLGARDIFIGVNAVDYSGYPDCRPEFVESFERMANLATKAGVEGQGFTIQAPLQMLSKADIVKAGTRLGVDYGLTVSCYQADDQGRACGKCDSCRLRAEGFSAAGVTDPTRYF

SEQ ID NO: 41241 - protein, 235 aa, Pseudomonas abyssi
  misc_feature (1)..(235): tr|A0A2A3MCY2|A0A2A3MCY2_9PSED 7-cyano-7-deazaguanine s ynthase OS=Pseudomonas abyssi OX=170540 GN=queC PE=3 SV =1
MSAKPDSSGRAVVLLSGGLDSATVLAMAQAEGRACYTMSFDYGQRHRVELEAAERVARAAGVVEHKVIGMNLNGIGGSALTDERIAVPESPQEGIPVTYVPARNTLFLALALGWAEVLEARDIYIGVNAVDYSGYPDCRPEFVSAFEQLANLATRAGVEGEGFRIRAPLQQLSKAQIILAGQALGVDYSQTVSCYQADEQGRACGVCDSCRLRAEGFAAAGVADPTRYQGKFAGH

SEQ ID NO: 41242 - protein, 243 aa, Pseudomonas acidophila
  misc_feature (1)..(243): tr|A0A2A4F0Z7|A0A2A4F0Z7_9PSED 7-cyano-7-deazaguanine s ynthase OS=Pseudomonas acidophila OX=1912599 GN=queC PE =3 SV=1
MTRKDAKSSALVLFSGGQDSATCLAWALERYETVETLGFDYGQRHRVELECREGFRQAMVQRFPAWAARLGDDHTIDLSVLGAISETAMTREIQIEATANGLPNTFVPGRNLMFMTIAAAIAYRRGLQVLVGGMCETDFSGYPDCRDDTMKALQVTLNLGMATRLLLETPLMWLDKADTWRLAHTLGGDELVELVRVETHTCYVGERAELHAWGFGCGECPACRLRKRGYEAYLVGEKVTAPA

SEQ ID NO: 41243 - protein, 224 aa, Pseudomonas aeruginosa
  misc_feature (1)..(224): sp|Q9I4Z2|QUEC_PSEAE 7-cyano-7-deazaguanine synthase OS =Pseudomonas aeruginosa (strain ATCC 15692 / DSM 22644 / CIP 104116 / JCM 14847 / LMG 12228 / 1C / PRS 101 / P AO1) OX=208964 GN=queC PE=3 SV=1
MNQKKAVILLSGGLDSATVVAMAKADGYACYTMSFDYGQRHRAELQAAERVARQLGVIEHKVIGLDLNGMGGSALTDESIAVPESPSEGIPVTYVPARNTVFLSLALGWAEVLDARDIFIGVNAVDYSGYPDCRPEFVEAFERMANLATKAGVEGNGFRIQAPLQYLSKAQIIQAGVARGVDYGLTVSCYQADEQGRACGKCDSCRLRADGFAAAGISDPTPYF

SEQ ID NO: 41244 - protein, 224 aa, Pseudomonas aeruginosa; identical to SEQ ID NO: 41243
  misc_feature (1)..(224): sp|Q02ID8|QUEC_PSEAB 7-cyano-7-deazaguanine synthase OS =Pseudomonas aeruginosa (strain UCBPP-PA14) OX=208963 G N=queC PE=3 SV=1

SEQ ID NO: 41245 - protein, 231 aa, Pseudomonas aestusnigri
  misc_feature (1)..(231): tr|A0A1H5ZF99|A0A1H5ZF99_9PSED 7-cyano-7-deazaguanine s ynthase OS=Pseudomonas aestusnigri OX=857252 GN=queC PE =3 SV=1
MSHANPASEAPAAVVLLSGGLDSATVLAMAQAQGLRCYTMSFDYGQRHRAELQAAERVACTAGVVEHKVIGMNLGGIGGSALTDDSIAVPEGPQDGIPVTYVPARNTLFLSLALGWAEVLGAREIFIGVNAVDYSGYPDCRPEFIEAFERLANLATRAGVEGEGFHIRAPLQHMSKAEIVQAGAALGVDYSKTVSCYQADDQGRACGRCDSCRLRAEGFRAAGLADPTRYS

SEQ ID NO: 41246 - protein, 229 aa, Pseudomonas agarici
  misc_feature (1)..(229): tr|A0A0X1T1N3|A0A0X1T1N3_PSEAA 7-cyano-7-deazaguanine s ynthase OS=Pseudomonas agarici OX=46677 GN=queC PE=3 SV =1
MTTQANTEKKAVILLSGGLDSATVVAMARADGYRCYTMSFDYGQRHRAELQAAERVARDQGVIEHKVIGLNLNGIGGSALTDSAIEVPEAPGEGIPVTYVPARNTVFLSLALGWAEVLGARDIFIGVNAVDYSGYPDCRPEFVEAFETLANLATKAGVEGDGFRIRAPLQNLSKADIVQAGVKLGVDYSLTVSCYQADANGFACGKCDSCRLRAEGFSAAGIGDPTRYF

SEQ ID NO: 41247 - protein, 224 aa, Pseudomonas alcaligenes
  misc_feature (1)..(224): tr|A0A1N6S3F6|A0A1N6S3F6_PSEAC 7-cyano-7-deazaguanine s ynthase OS=Pseudomonas alcaligenes OX=43263 GN=queC PE= 3 SV=1
MTDKKAVVLLSGGLDSATILAQAKAAGFACYSMSFDYGQRHRAELQAAERVARQMGVVEHKVIGLNLNGIGGSALTDSSIAVPEAPTEGIPVTYVPARNTVFLSLALGWAEVLGAHDIFIGVNAVDYSGYPDCRPEFIEAFERVANLATREGVEGRGFRIQAPLQNLSKAQIVQIGVQHGVDYGLTVSCYQADDDGRACGKCDSCRLRAAGFAAAGVADPTRYA

SEQ ID NO: 41248 - protein, 224 aa, Pseudomonas alcaligenes
  misc_feature (1)..(224): tr|U2ZM53|U2ZM53_PSEA4 7-cyano-7-deazaguanine synthase OS=Pseudomonas alcaligenes (strain ATCC 14909 / DSM 503 42 / JCM 20561 / NBRC 14159 / NCIMB 9945 / NCTC 10367 / 1577) OX=1215092 GN=queC PE=3 SV=1
MTDRKAVVLLSGGLDSATILAQAKAAGFACYSMSFDYGQRHHAELQAAERVAQQMGVVEHKVIGLNLNGIGGSALTDSSIAVPEAPTEGIPVTYVPARNTVFLSLALGWAEVLGAHDIFIGVNAVDYSGYPDCRPEFIEAFERVANLATREGVEGRGFRIQAPLQNLSKAQIVQIGVQHGVDYGLTVSCYQADDDGRACGKCDSCRLRAAGFAAAGVADPTRYA

SEQ ID NO: 41249 - protein, 224 aa, Pseudomonas alcaliphila
  misc_feature (1)..(224): tr|A0A1G6VM47|A0A1G6VM47_9PSED 7-cyano-7-deazaguanine s ynthase OS=Pseudomonas alcaliphila OX=101564 GN=queC PE =3 SV=1
MNDKKAVILLSGGLDSATVVAMAKAEGYSCYSMSFDYGQRHRAELQAAERVARQLGVVEHKVIGLNLNGIGGSALTDSSIAVPESPTEGIPATYVPARNTVFLALALGWAEVLEARDIFIGVNAVDYSGYPDCRPEFVEAFERMANLATKAGVEGQGFVIRAPLQQMSKGEIIQAGMRLGVDYALTVSCYQADDDGRACGKCDSCRLRAAGFAAAGVPDATRYF

SEQ ID NO: 41250 - protein, 224 aa, Pseudomonas alcaliphila
  misc_feature (1)..(224): tr|A0A1L7FWX9|A0A1L7FWX9_9PSED 7-cyano-7-deazaguanine s ynthase OS=Pseudomonas alcaliphila JAB1 OX=741155 GN=qu eC PE=3 SV=1
MNDKKAVILLSGGLDSATVVAMAKAEGYSCYSMSFDYGQRHRAELQAAERVARQLGVIEHKVIGLNLNGIGGSALTDSSIAVPESPTEGIPATYVPARNTVFLALALGWAEVLGARDIFIGVNAVDYSGYPDCRPEFVDAFERMANLATKAGVEGQGFVIRAPLQQMSKGEIIQAGMRLGVDYALTVSCYQADDHGRACGKCDSCRLRAAGFAAAGVPDATRYF

SEQ ID NO: 41251 - protein, 224 aa, Pseudomonas alkylphenolica
  misc_feature (1)..(224): tr|A0A443ZW54|A0A443ZW54_9PSED 7-cyano-7-deazaguanine s ynthase OS=Pseudomonas alkylphenolica OX=237609 GN=queC PE=3 SV=1
MTEKRAVILLSGGLDSATVVAMAKAEGYKCYTMSFDYGQRHRAELNAAARVARDLGVVEHKVIGLNLDGIGGSALTDSSIDVPEAPTEGIPVTYVPARNTVFLSLALGWAEVLEARDIFIGVNAVDYSGYPDCRPEFVEAFERMANLATKAGVEGQGFRIQAPLQNLSKAQIVQAGMARGVDYSLTVSCYQADDEGRACGKCDSCRLRADGFKAAGVEDPTRYF

SEQ ID NO: 41252 - protein, 224 aa, Pseudomonas alkylphenolica
  misc_feature (1)..(224): tr|A0A077FIY8|A0A077FIY8_9PSED 7-cyano-7-deazaguanine s ynthase OS=Pseudomonas alkylphenolica OX=237609 GN=queC PE=3 SV=1
MTEKRAVILLSGGLDSATVVAMAKAEGYKCYTMSFDYGQRHRAELNAAARVARDLGVVEHKVIGLSLDGIGGSALTDSSIDVPEAPSEGIPVTYVPARNTVFLSLALGWAEVLEARDIFIGVNAVDYSGYPDCRPEFVEAFERMANLATKAGVEGQGFRIQAPLQNLSKAQIVQAGMARGVDYSLTVSCYQADDEGRACGKCDSCRLRADGFKAAGVEDPTRYF

SEQ ID NO: 41253 - protein, 229 aa, Pseudomonas amygdali
  misc_feature (1)..(229): tr|A0A2S4IG33|A0A2S4IG33_PSEA0 7-cyano-7-deazaguanine s ynthase OS=Pseudomonas amygdali pv. morsprunorum OX=129 138 GN=queC PE=3 SV=1
MSELTNTEKRAVILLSGGLDSATVVAMARAEGYACYTMSFDYGQRHRAELDAAARVARDLGAVEHKVIGLNLNGIGGSALTDSSIAVPESPSEGIPVTYVPARNTVFLSLALGWAEVLGARDIFIGVNAVDYSGYPDCRPEFVESFERMANLATKAGVEGQGFTIRAPLQNLSKSDIVKAGTALGVDYALTVSCYQADDEGRACGRCDSCRLRAEGFTAAGMADPTRYF

SEQ ID NO: 41254 - protein, 229 aa, Pseudomonas amygdali
  misc_feature (1)..(229): tr|A0A0P9S4S7|A0A0P9S4S7_PSEA0 7-cyano-7-deazaguanine s ynthase OS=Pseudomonas amygdali pv. hibisci OX=251723 G N=queC PE=3 SV=1
MSELTNTEKRAVILLSGGLDSATVVAMARAEGYACYTMSFDYGQRHRAELDAAARVARDLGAVEHKVIGLNLNGIGGSALTDSSIAVPESPSEGIPITYVPARNTVFLSLALGWAEVLGARDIFIGVNAVDYSGYPDCRPEFVESFERMANLATKAGVEGQGFTIRAPLQNLSKSDIVKAGAALGVDYSLTVSCYQADDQGRACGKCDSCRLRAEGFTAAGMADPTRYF

SEQ ID NO: 41255 - protein, 224 aa, Pseudomonas anguilliseptica
  misc_feature (1)..(224): tr|A0A1H5EMS9|A0A1H5EMS9_PSEAG 7-cyano-7-deazaguanine s ynthase OS=Pseudomonas anguilliseptica OX=53406 GN=queC PE=3 SV=1
MSDKKAVILLSGGLDSATVVALAKADGYSCYTMSFDYGQRHRSELQAAEQVARQLGVVEHKVIGLNLNGMGGSALTDSSIEVPESPVEGIPVTYVPARNTVFLSLALGWAEVLGARDIFIGVNAVDYSGYPDCRPEFVEAFERMANLATKAGVEGQGFCIQAPLQVMSKAEIVQVGVQHGVDYALTVSCYQADDQGRACGKCDSCRLRAAGFATAGLVDPTRYF

SEQ ID NO: 41256 - protein, 233 aa, Pseudomonas antarctica
  misc_feature (1)..(233): tr|A0A1G9XUP4|A0A1G9XUP4_9PSED 7-cyano-7-deazaguanine s ynthase OS=Pseudomonas antarctica OX=219572 GN=queC PE= 3 SV=1
MERRTGALRWLINNLQSSCSLAASIPPRWWPWSAPKATAATPSFDYGQRHRAELEAAARVAHDLGVVEHKVIGLNLNGIGGSALTDSSIDVPEAPSEGIPLTYVPARNTVFLSLALGWAEVLNARDIFIGVNALDYNGYPDCRPEYVEAFERMANLATKAGVEGQGFRIQAPLQSMSKADIVKAGIALGVDYALTVSCYQADNAGRGCGKCDACRLRAEGFQAAGMTDPTRYF

SEQ ID NO: 41257 - protein, 225 aa, Pseudomonas antarctica
  misc_feature (1)..(225): tr|A0A172Z677|A0A172Z677_9PSED 7-cyano-7-deazaguanine s ynthase OS=Pseudomonas antarctica OX=219572 GN=queC PE= 3 SV=1
MTDQKRAVILLSGGLDSATMVAMAQAQGYRCYTMSFDYGQRHRAELDAAARVARDLSVVEHKVIGLNLNGIGGSALTDSSIDVPEAPSEGIPLTYVPARNTVFLSLALGWAEVLNARDIFIGVNALDYNGYPDCRPEYVESFERMANLATKAGVEGQSFRIQAPLQNMSKADIVKAGVGLGVDYALTVSCYQADDAGRACGKCDACRLRAEGFQTAGITDPTRYF

SEQ ID NO: 41258 - protein, 224 aa, Pseudomonas argentinensis
  misc_feature (1)..(224): tr|A0A1I3K6I0|A0A1I3K6I0_9PSED 7-cyano-7-deazaguanine s ynthase OS=Pseudomonas argentinensis OX=289370 GN=queC PE=3 SV=1
MSEKKAVILLSGGLDSATVVAMAKAQGYSCFSMSFDYGQRHRSELQAAERVARQLGVIEHKVIGINLDGIGGSALTDASIDVPQAPTTGIPVTYVPARNTVFLSLALGWAEVLGAQDIFIGVNAVDYSGYPDCRPEFVEAFERMANLATKMGVEGQSIRIQAPLQMMSKAEIVQAGSRLGVDYGLTVSCYLADADGRACGRCDSCRLRAAGFAAAGMVDPTRYQ

SEQ ID NO: 41259 - protein, 234 aa, Pseudomonas argentinensis
  misc_feature (1)..(234): tr|A0A1I3GLA4|A0A1I3GLA4_9PSED 7-cyano-7-deazaguanine s ynthase OS=Pseudomonas argentinensis OX=289370 GN=queC PE=3 SV=1
MHKNALVLFSGGQDSTTCLAWALDRYDHVETIGFDYGQRHNVELECRRQVLQRLRTDYPRWGEKLGDDHFLDLKLLGQISDTAMTSEKEIEFKENGLPNTFVPGRNLLFFTFAAAIAYRRGLSVLVGGMCETDYSGYPDCRDNTLKSLQVSLGLGMDMPLVIETPLMWLDKKETWELAKSLGGSSFVELVQEETHTCYLGDRQRRHDWGYGCNECPACELRRTGFEAFKRDNDA

SEQ ID NO: 41260 - protein, 230 aa, Pseudomonas arsenicoxydans
  misc_feature (1)..(230): tr|A0A1H0SUI9|A0A1H0SUI9_9PSED 7-cyano-7-deazaguanine s ynthase OS=Pseudomonas arsenicoxydans OX=702115 GN=queC PE=3 SV=1
MTEQLNTTEKRAVILLSGGLDSATVVAMARAEGYSCYTMSFDYGQRSHAELHAAERVARDLGVVEHKVIGLNLNGIGGSALTDSSIDVPEVPGEGIPVTYVPARNTVFLSLALGWAEVLGARDIFIGVNAVDYSGYPDCRPEFIESFERMANLATKAGVEGNGFRIQAPLQNLSKAQIVQAGVKLGVDYGLTVSCYQADDNGRACGKCDSCRLRAEGFAAAGVSDPTPYF

SEQ ID NO: 41261 - protein, 230 aa, Pseudomonas arsenicoxydans
  misc_feature (1)..(230): tr|A0A502HYZ4|A0A502HYZ4_9PSED 7-cyano-7-deazaguanine s ynthase OS=Pseudomonas arsenicoxydans OX=702115 GN=queC PE=3 SV=1
MTEQLNTTEKRAVILLSGGLDSATVVAMARAEGYACYTMSFDYGQRSHAELHAAARVARDLGVVEHKVIGLNMNGMGGSALTDSSIDIPEALGEGIPVTYVPARNTVFLSLALGWAEVLGARDIFIGVNAVDYSGYPDCRPEFIESFERMANLATKAGVEGNGFRIQAPLQNLSKAQIVEAGVKLGVNYGLTVSCYQADDDGRACGKCDSCRLRAEGFAAAGISDPTPYF

SEQ ID NO: 41262 - protein, 229 aa, Pseudomonas asplenii
  misc_feature (1)..(229): tr|A0A438LD68|A0A438LD68_9PSED 7-cyano-7-deazaguanine s ynthase OS=Pseudomonas asplenii OX=53407 GN=queC PE=3 S V=1
MTTQASTDKKAVILLSGGLDSATVVAMARAEGYSCYTMSFDYGQRHRAELQAAERVARDLGVIEHKVIGLNLNGIGGSALTDSSIDVPETPSEGIPVTYVPARNTVFLSLALGWAEVLGARDIFIGVNAVDYSGYPDCRPEFVEAFETLANLATKAGVEGNGFRIQAPLQNLSKGDIVQAGIKLGVDYSLTVSCYQADANGFACGKCDSCRLRAEGFAAAGISDPTRYF

SEQ ID NO: 41263 - protein, 229 aa, Pseudomonas asplenii
  misc_feature (1)..(229): tr|A0A1H1VJ21|A0A1H1VJ21_9PSED 7-cyano-7-deazaguanine s ynthase OS=Pseudomonas asplenii OX=53407 GN=queC PE=3 S V=1
MTTQANIEKKAVILLSGGLDSATVVAMARAQGYSCYTMSFDYGQRHRAELQAAERVARDLGAIEHKVIGLNLNGIGGSALTDSSIDVPEAPSEGIPVTYVPARNTVFLSLALGWAEVLGAQDIFIGVNAVDYSGYPDCRPEFVEAFETLANLATKAGVEGEGFRIQAPLQNLSKADIVREGVRLGVDYSLTVSCYQADANGFACGKCDSCRLRAEGFNVAGIDDPTHYF

SEQ ID NO: 41264 - protein, 229 aa, Pseudomonas asturiensis
  misc_feature (1)..(229): tr|A0A1M7LZ79|A0A1M7LZ79_9PSED 7-cyano-7-deazaguanine s ynthase OS=Pseudomonas asturiensis OX=1190415 GN=queC P E=3 SV=1
MTELTMTEKKAVILLSGGLDSATVVAMARAEGYACYTMSFDYGQRHRAELDAAAQVARDLGAIEHKIIGLNLNGIGGSALTDSSIAVPEAPSEGIPVTYVPARNTVFLSLALGWAEVLGARDIFIGVNAVDYSGYPDCRPEFVESFERMANLATKAGVEGQGFTIRAPLQNLSKSDIVKAGTALGVDYALTVSCYQADDQGRACGKCDSCRLRAEGFAAAGVADPTRYF

SEQ ID NO: 41265 - protein, 229 aa, Pseudomonas avellanae; identical to SEQ ID NO: 41253
  misc_feature (1)..(229): tr|A0A2S3TG04|A0A2S3TG04_9PSED 7-cyano-7-deazaguanine s ynthase OS=Pseudomonas avellanae OX=46257 GN=queC PE=3 SV=1

SEQ ID NO: 41266 - protein, 279 aa, Pseudomonas avellanae
  misc_feature (1)..(279): tr|A0A3M5T2V1|A0A3M5T2V1_9PSED 7-cyano-7-deazaguanine s ynthase OS=Pseudomonas avellanae OX=46257 GN=queC PE=3 SV=1
MAVLAKCCSLPAITSLKAATWQTGSWPTICRYACRCSCIKFFGMTSRGADMSELTNTEKRAVILLSGGLDSATVVAMARAEGYACYTMSFDYGQRHRAELDAAARVARDLGAVEHKVIGLNLNGIGGSALTDSSIAVPESPSEGIPVTYVPARNTVFLSLALGWAEVLGARDIFIGVNAVDYSGYPDCRPEFVESFERMANLATKAGVEGQGFTIRAPLQNLSKSDIVKAGTALGVDYALTVSCYQADDQGRACGKCDSCRLRAEGFTAAGMADPTRYF

SEQ ID NO: 41267 - protein, 200 aa, Pseudomonas azotoformans
  misc_feature (1)..(200): tr|A0A4Q0I200|A0A4Q0I200_PSEAZ 7-cyano-7-deazaguanine s ynthase OS=Pseudomonas azotoformans OX=47878 GN=B4O85_0 5925 PE=3 SV=1
MSIVTLVSGGLDSTLVAKLAQEQGLQIFPLFVDYGQRARDRELAACKLAMQKLGLPEPEIAGLSGFGRLIRSGLTDPTLHIIDDAFTPGRNMLFLLTAAAYAHQKNADAISIGLLHESTSLFPDQTSGFLEEAERMITLCMGRNIKVLAPLSSFTKPDVVTLAAEKGISQTYSCHLGEEQPCGNCIACNEFKFEGANDGR

SEQ ID NO: 41268 - protein, 224 aa, Pseudomonas azotoformans
  misc_feature (1)..(224): tr|A0A1V2JUH7|A0A1V2JUH7_PSEAZ 7-cyano-7-deazaguanine s ynthase OS=Pseudomonas azotoformans OX=47878 GN=queC PE =3 SV=1
MDQKRAVILLSGGLDSATVVAMAQAEGYACYTMSFDYGQRHRAELNAAARVARDMGVVEHKVIGLNLDGIGGSALTDSSIDVPETPGEGIPVTYVPARNTVFLSLALGWAEVLNARDIFIGVNAVDYSGYPDCRPEFVESFERMANLATKAGVEGQGFRILAPLQNLSKADIVKAGVGLGVDYSLTVSCYQADDDGRACGKCDSCRLRAEGFQAAGITDPTRYF

SEQ ID NO: 41269 - protein, 230 aa, Pseudomonas baetica
  misc_feature (1)..(230): tr|A0A2N0DIG3|A0A2N0DIG3_9PSED 7-cyano-7-deazaguanine s ynthase OS=Pseudomonas baetica OX=674054 GN=queC PE=3 S V=1
MAEQLNTTEKRAVILLSGGLDSATVVAMARAEGYSCYTMSFDYGQRSHAELHAAARVARDLGVVEHKVIGLNLNGMGGSALTDSSIDIPEEQGEGIPVTYVPARNTVFLSLALGWAEVLGARDIFIGVNAVDYSGYPDCRPEFIASFERMANLATKAGVEGSGFRIQAPLQNLSKAQIVQAGVKLGVDYGLTVSCYQADDEGRACGKCDSCRLRAEGFAAAGVSDPTPYF

SEQ ID NO: 41270 - protein, 232 aa, Pseudomonas baetica
  misc_feature (1)..(232): tr|A0A2N0DIU5|A0A2N0DIU5_9PSED 7-cyano-7-deazaguanine s ynthase OS=Pseudomonas baetica OX=674054 GN=queC PE=3 S V=1
MSNKAVIVFSGGQDSTTCLIHALTHYDEVHCITFDYGQRHHAEIEVAQQLCKQLGVTVHKVMDVSLLNELAISSLTRDNIPVPTVNSSGESLPSTFVPGRNILFLTLASIYAYQVQARTVITGVCETDFSGYPDCRDEFVKALNNALELGMDYKLRLETPLMWLNKAETWALADYHNQLELIRHQTLTCYNGIAGSGCGDCDACNLRAKGLNEFLENKEQVANSLKLKLKLK

SEQ ID NO: 41271 - protein, 224 aa, Pseudomonas balearica
  misc_feature (1)..(224): tr|A0A1G9QGY0|A0A1G9QGY0_9PSED 7-cyano-7-deazaguanine s ynthase OS=Pseudomonas balearica DSM 6083 OX=1123016 GN =queC PE=3 SV=1
MNEKKAVVLLSGGLDSATVVAIARSQGFACYTMSFDYGQRHRAELQAAERVARQLGVAEHKVVGINLNGIGGSALTDTSIDVPEQPGEGVPVTYVPARNTVFLALALGWAEVLQAHDLFIGVNAVDYSGYPDCRPEFIEAFERMANLATKAGVEGNGFRIQAPLQHMSKAEIIRRGTELGVDYATTVSCYQADDDGRACGVCDSCRLRAAGFAQAGLADATRYR

SEQ ID NO: 41272 - protein, 229 aa, Pseudomonas batumici
  misc_feature (1)..(229): tr|A0A0C2IA42|A0A0C2IA42_9PSED 7-cyano-7-deazaguanine s ynthase OS=Pseudomonas batumici OX=226910 GN=queC PE=3 SV=1
MTTQASTEKKAVILLSGGLDSATVVAMARAQGYSCYTMSFDYGQRHRAELQAAERVARDLGVIEHKVIGLNLNGIGGSALTDSSIDVPEAPSEGIPVTYVPARNTVFLSLALGWAEVLGARDIFIGVNAVDYSGYPDCRPEFVEAFETLANLATKAGVEGEGFRIQAPLQNLSKADIVQAGVKLGVDYSLTVSCYQADANGFACGKCDSCRLRAEGFAAAGISDPTRYF

SEQ ID NO: 41273 - protein, 235 aa, Pseudomonas bauzanensis
  misc_feature (1)..(235): tr|A0A4U0YQT3|A0A4U0YQT3_9PSED 7-cyano-7-deazaguanine s ynthase OS=Pseudomonas bauzanensis OX=653930 GN=queC PE =3 SV=1
MNALLICSGGFDSVTLAYRLAAEQSLGTLLTFDYGQRHRKEIDAARLAAERLAVPHLIMDIGHIGRQLSGSALTDDIAVPHGHYSEENMKVTVVPNRNAIMLTIAFGVAATRGHDTVALAVHGGDHFIYPDCRPDFIRLFSEMQTKALDGVAEVALLAPYVATDKTEIARDAARYAVPVGDTWSCYEGGELHCGRCGTCVERIEAMALAGMADPTRYQDKQYWQEAVARVKSCTP

SEQ ID NO: 41274 - protein, 235 aa, Pseudomonas bauzanensis
  misc_feature (1)..(235): tr|A0A1I4P432|A0A1I4P432_9PSED 7-cyano-7-deazaguanine s ynthase OS=Pseudomonas bauzanensis OX=653930 GN=queC PE =3 SV=1
MNALLICSGGFDSVTLAYRLAAEQSLGTLLTFDYGQRHRKEIDAARLAAERLAVPHLIMDIGHIGRQLSGSALTDDIAVPHGHYSEENMKVTVVPNRNAIMLTIAFGVAAARGHDTVALAVHGGDHFIYPDCRPDFIRLFSEMQTKALDGVAEVALLAPYVTTDKTEIARDAARYAVPVGDTWSCYEGGELHCGRCGTCVERIEAMALAGMADPTPYQDKQYWQEAVARVKSCTP

SEQ ID NO: 41275 - protein, 224 aa, Pseudomonas benzenivorans
  misc_feature (1)..(224): tr|A0A1G7WG83|A0A1G7WG83_9PSED 7-cyano-7-deazaguanine s ynthase OS=Pseudomonas benzenivorans OX=556533 GN=queC PE=3 SV=1
MSEKKAVILLSGGLDSATVVALAKAEGYACYSMSFDYGQRHRAELQAAERVARQLGVVEHKVIGLNLNGIGGSALTDSSIAVPESPTEGIPVTYVPARNTVFLSLALGWAEVLGARDIFIGVNAVDYSGYPDCRPEFIEAFERMANLATKAGVEGQGFRIQAPLQNMSKAEIVQAGLRHGVDYALTVSCYQADDDGRACGKCDSCRLRAAGFAGAGVADPTRYR

SEQ ID NO: 41276 - protein, 224 aa, Pseudomonas borbori
  misc_feature (1)..(224): tr|A0A1I5LFZ8|A0A1I5LFZ8_9PSED 7-cyano-7-deazaguanine s ynthase OS=Pseudomonas borbori OX=289003 GN=queC PE=3 S V=1
MSDKKAVILLSGGLDSATVVALAKAEGYSCYSMSFDYGQRHRAELQAAERVARQLGVVEHKVVGLSLDGIGGSALTDSSIAVPESPTEGIPVTYVPARNTVFLALALGWAEVLGARDIFIGVNAVDYSGYPDCRPEFIAAFERMANLATKAGVEGQGFRIQAPLQNMSKAEIVQAGLRHGVDYALTVSCYQADEEGRACGKCDSCRLRAAGFAAAGVADPTRYR

SEQ ID NO: 41277 - protein, 230 aa, Pseudomonas brassicacearum
  misc_feature (1)..(230): tr|A0A423ID66|A0A423ID66_9PSED 7-cyano-7-deazaguanine s ynthase OS=Pseudomonas brassicacearum OX=930166 GN=queC PE=3 SV=1
MTEQLNTAEKRAVILLSGGLDSATVVAMARAEGYSCYTMSFDYGQRSQAELHAAARVARDLGVVEHKVIGLNLNGMGGSALTDSSIDIPEELGEGIPVTYVPARNTVFLSLALGWAEVLGARDIFIGVNAVDYSGYPDCRPEFIESFERMANLATKAGVEGNGFRIQAPLQNLSKAQIVEAGVKLGVDYGLTVSCYQADDNGRACGKCDSCRLRAEGFAAAGISDPTPYF

SEQ ID NO: 41278 - protein, 230 aa, Pseudomonas brassicacearum
  misc_feature (1)..(230): tr|A0A423GM49|A0A423GM49_9PSED 7-cyano-7-deazaguanine s ynthase OS=Pseudomonas brassicacearum OX=930166 GN=queC PE=3 SV=1
MTEQLNTTEKRAVILLSGGLDSATVVAMARADGYSCYTMSFDYGQRHRAELQAAERVARDLGVIEHKVIGLNLNGIGGSALTDSSIDVPEAPSEGIPITYVPARNTVFLSLALGWAEVLGARDIFIGVNAVDYSGYPDCRPEFIEAFERMANLATKAGVEGNGFRIQAPLQNLSKAQIVQAGVKLGVDYGLTVSCYQADDNGRACGKCDSCRLRAEGFLAAGISDPTAYF

SEQ ID NO: 41279 - protein, 229 aa, Pseudomonas brenneri
  misc_feature (1)..(229): tr|A0A176V511|A0A176V511_9PSED 7-cyano-7-deazaguanine s ynthase OS=Pseudomonas brenneri OX=129817 GN=queC PE=3 SV=1
MTEQTTDQKRAVILLSGGLDSATVVAMARAEGYSCYTMSFDYGQRSHAELHAAARVARDLGVVEHKVIGLNLNGIGGSALTDNTIDVPEAPTEGIPVTYVPARNTVFLSLALGWAEVLNARDIFIGVNAVDYSGYPDCRPEFVESFERMANLATKAGVEGHGFRIQAPLQNLSKADIVKAGVRLGVDYSLTVSCYQADNDGRACRKCDSCRLRAEGFQAAGITDPTRYF

SEQ ID NO: 41280 - protein, 229 aa, Pseudomonas brenneri
  misc_feature (1)..(229): tr|A0A5B2UWD9|A0A5B2UWD9_9PSED 7-cyano-7-deazaguanine s ynthase OS=Pseudomonas brenneri OX=129817 GN=queC PE=3 SV=1
MTEQTTDQKRAVILLSGGLDSATVVAMARAEGYSCYTMSFDYGQRSHAELDAAARVARDLGVVEHKVIGLNLNGIGGSALTDSTIDVPEAPTEGIPVTYVPARNTVFLSLALGWAEVLDARDIFIGVNAVDYSGYPDCRPEFVESFERMANLATKAGVEGRGFRIQAPLQNLSKADIVKAGVRLGVDYSLTVSCYQADNDGRACRKCDSCRLRAEGFQAAGITDPTRYF

SEQ ID NO: 41281 - protein, 224 aa, Pseudomonas canadensis
  misc_feature (1)..(224): tr|A0A423EWW7|A0A423EWW7_9PSED 7-cyano-7-deazaguanine s ynthase OS=Pseudomonas canadensis OX=915099 GN=queC PE= 3 SV=1
MDQKRAVILLSGGLDSATVVAMAQAQGYSCYTMSFDYGQRHRAELNAAARVAREMGVVEHKVIGLNLNGIGGSALTDSSIDVPEAPSEGIPVTYVPARNTVFLSLALGWAEVLNARDIFIGVNAVDYSGYPDCRPEFVESFERMANLATKAGVEGQGFRILAPLQNLSKADIVKAGVGLGVDYSLTVSCYQADDDGRACGKCDSCRLRAEGFQAAGITDPTRYF

SEQ ID NO: 41282 - protein, 226 aa, Pseudomonas cannabina
  misc_feature (1)..(226): tr|A0A3M3QF19|A0A3M3QF19_PSECA 7-cyano-7-deazaguanine s ynthase OS=Pseudomonas cannabina OX=86840 GN=queC PE=3 SV=1
MTMTEKRAVILLSGGLDSATVVAMARAEGYACYTMSFDYGQRHRAELDAAARVARDLGAVEHKVIGLNLNGIGGSALTDSSIAVPEAPSEGIPVTYVPARNTVFLSLALGWAEVLGARDIFIGVNAVDYSGYPDCRPEFVESFERTANLATKAGVEGQGFTIRAPLQNLSKSDIVKAGAALGVDYSLTVSCYQADDQGRACGKCDSCRLRAEGFTNADMADPTRYF

SEQ ID NO: 41283 - protein, 229 aa, Pseudomonas cannabina
  misc_feature (1)..(229): tr|A0A0P9LHS6|A0A0P9LHS6_PSECA 7-cyano-7-deazaguanine s ynthase OS=Pseudomonas cannabina OX=86840 GN=queC PE=3 SV=1
MSELTMTEKRAVILLSGGLDSATVVAMARAEGYACYTMSFDYGQRHRAELDAAARVARDLGAVEHKVIGLNLNGIGGSALTDSSIAVPEAPSEGIPVTYVPARNTVFLSLALGWAEVLGARDIFIGVNAVDYSGYPDCRPEFVESFERTANLATKAGVEEQGFTVRAPLQNLSKSDIVKAGAALGVDYSLTVSCYQADDQGRACGKCDSCRLRAEGFTNAGMADPTRYF

SEQ ID NO: 41284 - protein, 224 aa, Pseudomonas capeferrum
  misc_feature (1)..(224): tr|A0A084CJC8|A0A084CJC8_9PSED 7-cyano-7-deazaguanine s ynthase OS=Pseudomonas capeferrum OX=1495066 GN=queC PE =3 SV=1
MTEKRAVILLSGGLDSATVVAMAKAEGYSCYTMSFDYGQRHRAELDAAARVARDLGVVEHKVIGLSLDGIGGSALTDSSIDVPETPGEGIPVTYVPARNTVFLSLALGWAEVLEARDIFIGVNAVDYSGYPDCRPEFVEAFERMANLATKAGVEGQGFRIQAPLQNLSKAQIVQEGIARGVDYSLTVSCYQADEQGRACGKCDSCRLRADGFKAAGVSDPTRYF

SEQ ID NO: 41285 - protein, 229 aa, Pseudomonas caricapapayae
  misc_feature (1)..(229): tr|A0A3M6F3S6|A0A3M6F3S6_9PSED 7-cyano-7-deazaguanine s ynthase OS=Pseudomonas caricapapayae OX=46678 GN=queC P E=3 SV=1
MSEFTNTEKRAVILLSGGLDSATVVAMARAEGYACYTMSFDYGQRHRAELDAAARVARDLGAVEHKVIGLNLNGIGGSALTDSTIAVPESPSEGIPVTYVPARNTVFLSLALGWAEVLGARDIFIGVNAVDYSGYPDCRPEFVESFERMANLATKAGVEGQGFTIRAPLQNLSKSDIVKAGTALGVDYSLTVSCYQADDQGRACGKCDSCRLRADGFTASGMADPTRYF

SEQ ID NO: 41286 - protein, 229 aa, Pseudomonas caricapapayae
  misc_feature (1)..(229): tr|A0A0P9JUR9|A0A0P9JUR9_9PSED 7-cyano-7-deazaguanine s ynthase OS=Pseudomonas caricapapayae OX=46678 GN=queC P E=3 SV=1
MSEFTNTEKRAVILLSGGLDSATVVAMARAEGFACYTMSFDYGQRHRAELDAAARVARDLGAVEHKVIGLNLNGIGGSALTDSTIAVPESPSEGIPVTYVPARNTVFLSLALGWAEVLGARDIFIGVNAVDYSGYPDCRPEFVESFERMANLATKAGVEGQGFTIRAPLQNLSKSDIVKAGTALGVDYSLTVSCYQADDQGRACGKCDSCRLRADGFTASGMADPTRYF

SEQ ID NO: 41287 - protein, 230 aa, Pseudomonas caspiana
  misc_feature (1)..(230): tr|A0A502J2X5|A0A502J2X5_9PSED 7-cyano-7-deazaguanine s ynthase OS=Pseudomonas caspiana OX=1451454 GN=queC PE=3 SV=1
MTEQLNTAEKRAVILLSGGLDSATVVAMARAEGYSCYTMSFDYGQRSHAELHAAARVARDLGVVEHKVIGLNLNGIGGSALTDTSIDVPEEAGEGIPVTYVPARNTVFLSLALGWAEVLGARDIFIGVNAVDYSGYPDCRPEFIESFERMANLATKAGVEGNGFRIQAPLQNLSKAQIVQAGVKLGVDYGLTVSCYQADDNGRACGKCDSCRLRAEGFAAAGISDPTPYF

SEQ ID NO: 41288 - protein, 224 aa, Pseudomonas caspiana
  misc_feature (1)..(224): tr|A0A1Y3NTK6|A0A1Y3NTK6_9PSED 7-cyano-7-deazaguanine s ynthase OS=Pseudomonas caspiana OX=1451454 GN=queC PE=3 SV=1
MTEKRAVILLSGGLDSATVVAMAREQGYTCYTMSFDYGQRHRAELDAAVRVARDLGVVEHKVIGLNLNGIGGSALTDDSIAVPETPGEGIPVTYVPARNTVFLSLALGWAEVLGARDIFIGVNAVDYSGYPDCRPEFIESFERMANLATKAGVEGQGFTIQAPLQNLSKADIVKAGVRLGVDYGLTVSCYQADDQGRACRKCDSCRLRAEGFAAAGISDPTRYF

SEQ ID NO: 41289 - protein, 232 aa, Pseudomonas cedrina
  misc_feature (1)..(232): tr|A0A2S9D7M9|A0A2S9D7M9_PSECE 7-cyano-7-deazaguanine s ynthase OS=Pseudomonas cedrina OX=651740 GN=queC PE=3 S V=1
MSKKAVMVFSGGQDSTTCLIQALPLYDEVHCITFDYGQRHVAEIEVAQKLAKQLGATVHKVMDVSLLNELAISSLTRDNIPVPTVNSSGESLPSTFVPGRNILFLTLAAIYAYQVKAETVITGVCETDFSGYPDCRDEFVKALNQALKLGMEYDVRLDTPLMWLNKAETWALADYHGQLELVREQTLTCYNGIIGTGCGECDACNLRARGLNDYLQNKTNVMQSLKHKLQLK

SEQ ID NO: 41290 - protein, 229 aa, Pseudomonas cedrina
  misc_feature (1)..(229): tr|A0A1V2KI25|A0A1V2KI25_PSECE 7-cyano-7-deazaguanine s ynthase OS=Pseudomonas cedrina subsp. cedrina OX=76762 GN=queC PE=3 SV=1
MTEHTMNQKRAVILLSGGLDSATVVAMAQAEGYSCYTMSFDYGQRHRAELSAAARVARDMGVVEHKVIGLNLNGIGGSALTDSSIDVPQAPSEGIPVTYVPARNTVFLSLALGWAEVLNARDIFIGVNAVDYSGYPDCRPEFVESFERMANLATKAGVEGQGFRILAPLQNLSKADIVKAGVGLGVDYSLTVSCYLADDDGRACGKCDSCRLRAEGFQAAGITDPTRYF

SEQ ID NO: 41291 - protein, 229 aa, Pseudomonas cerasi
  misc_feature (1)..(229): tr|A0A193SLA4|A0A193SLA4_9PSED 7-cyano-7-deazaguanine s ynthase OS=Pseudomonas cerasi OX=1583341 GN=queC PE=3 S V=1
MSELTKTEKRAVILLSGGLDSATVVAMARAEGYTCYTMSFDYGQRHRAELDAAARVAGDLGAVEHKVIGLNLNGIGGSALTDSSIAVPESPSEGIPVTYVPARNTVFLSLALGWAEVLGARDIFIGVNAVDYSGYPDCRPEFVESFERMANLATKAGVEGQGFTIRAPLQNLSKSDIVKAGTALGVDYSLTVSCYQADDQGRACGKCDSCRLRAEGFTAAGIADPTRYF

SEQ ID NO: 41292 - protein, 224 aa, Pseudomonas chengduensis
  misc_feature (1)..(224): tr|A0A1G6MKG6|A0A1G6MKG6_9PSED 7-cyano-7-deazaguanine s ynthase OS=Pseudomonas chengduensis OX=489632 GN=queC P E=3 SV=1
MNDNKAVILLSGGLDSATVVAMAKAEGYACYSMSFDYGQRHRAELQAAERVARQLGVVEHKVIGLNLNGIGGSALTDSSIAVPESPTEGIPATYVPARNTVFLALALGWAEVLGARDIFIGVNAVDYSGYPDCRPEFVAAFERMANLATKAGVEGQGFVIRAPLQQMSKGEIIQAGMRLGVDYALTVSCYQADDDGRACGKCDSCRLRAAGFAAAGVPDATRYC

SEQ ID NO: 41293 - protein, 224 aa, Pseudomonas chloritidismutans
  misc_feature (1)..(224): tr|V4QDV1|V4QDV1_PSECO 7-cyano-7-deazaguanine synthase OS=Pseudomonas chloritidismutans AW-1 OX=1263865 GN=que C PE=3 SV=1
MNEKKAVILLSGGLDSATVVAMARAQGYACYTMSFDYGQRHRAELQAAERVAQQLGVVEHKVIGLDLNGIGGSALTDDSINVPEVPGEGIPVTYVPARNTVFLSLALGWAEVLGARDIFIGVNAVDYSGYPDCRPEFVAAFERMANLATKAGVEGLGFRIQAPLQEMSKARIVQEGTRLGVDYAATVSCYQADTDGRACGKCDSCRLRAAGFAEAGLADPTRYF

SEQ ID NO: 41294 - protein, 233 aa, Pseudomonas chlororaphis
  misc_feature (1)..(233): tr|A0A3G7KBL9|A0A3G7KBL9_9PSED 7-cyano-7-deazaguanine s ynthase OS=Pseudomonas chlororaphis subsp. aurantiaca O X=86192 GN=queC PE=3 SV=1
MTDQAQNQVATEKRAVILLSGGLDSATVVAMARAEGYRCYTMSFDYGQRHRAELQAAERVARDLGVVEHKVIGLNLNGIGGSALTDSSIDVPEAPSEGIPVTYVPARNTVFLSLALGWAEVLGARDIFIGVNAVDYSGYPDCRPEFVEAFERMANLATKAGVEGQGFRIQAPLQNLSKADIVKAGVKLGVDYGLTVSCYQADDQGRACGKCDSCRLRAEGFAAAGISDPTAYF

SEQ ID NO: 41295 - protein, 233 aa, Pseudomonas chlororaphis
  misc_feature (1)..(233): tr|A0A3G7CSW1|A0A3G7CSW1_9PSED 7-cyano-7-deazaguanine s ynthase OS=Pseudomonas chlororaphis subsp. piscium OX=1 513890 GN=queC PE=3 SV=1
MTEQAQNQVATEKRAVILLSGGLDSATVVAMARAEGYRCYTMSFDYGQRHRAELQAAERVARDLGVVEHKVIGLNLNGIGGSALTDSSIDVPEAPSEGIPVTYVPARNTVFLSLALGWAEVLGARDIFIGVNAVDYSGYPDCRPEFVEAFERMANLATKAGVEGQGFRIQAPLQNLSKADIVKTGVKLGVDYGLTVSCYQADDQGRACGKCDSCRLRAEGFAAAGVSDPTAYF

SEQ ID NO: 41296 - protein, 229 aa, Pseudomonas cichorii
  misc_feature (1)..(229): tr|A0A3M3TJ97|A0A3M3TJ97_PSECI 7-cyano-7-deazaguanine s ynthase OS=Pseudomonas cichorii OX=36746 GN=queC PE=3 S V=1
MSELTMTEKRAVILLSGGLDSATVVAMARAEGYACYTMSFDYGQRHRAELNAAARVARDLGVIEHKVIGLNLNGIGGSALTDSSIAVPEAPTEGIPVTYVPARNTVFLSLALGWAEVLEARDIFIGVNAVDYSGYPDCRPEFVESFERMANLATKAGVEGQGFSIRAPLQNLSKSDIVKAGVALGVDYGLTVSCYQADDEGRACGKCDSCRLRAEGFAAAGVADPTRYF

SEQ ID NO: 41297 - protein, 229 aa, Pseudomonas cichorii
  misc_feature (1)..(229): tr|A0A3M4VVQ3|A0A3M4VVQ3_PSECI 7-cyano-7-deazaguanine s ynthase OS=Pseudomonas cichorii OX=36746 GN=queC PE=3 S V=1
MSELTMTEKRAVILLSGGLDSATVVAMARAEGYACYTMSFDYGQRHRAELNAAARVARDLGVIEHKVIGLNLNGIGGSALTDSSIAVPEAPTEGIPVTYVPARNTVFLSLALGWAEVLEARDIFIGVNAVDYSGYPDCRPEFVESFERMANLATKAGVEGQGFTIRAPLQNLSKSDIVKAGVALGVDYGLTVSCYQADDEGRACGKCDSCRLRAEGFAAAGIADPTRYF

SEQ ID NO: 41298 - protein, 224 aa, Pseudomonas citronellolis
  misc_feature (1)..(224): tr|A0A1A9K8X3|A0A1A9K8X3_9PSED 7-cyano-7-deazaguanine s ynthase OS=Pseudomonas citronellolis OX=53408 GN=queC P E=3 SV=1
MTQKKAVILLSGGLDSATVVAMAKAEGYACYSMSFDYGQRHRAELQAAERVARQLGVVEHKVIGLNLDGIGGSALTDSSIAVPEAPSEGIPVTYVPARNTVFLSLALGWAEVLGARDIFIGVNAVDYSGYPDCRPEFVEAFERMANLATKAGVEGDGFRIQAPLQFLSKAQIIQAGVARGVDYALTVSCYQADDAGRACGKCDSCRLRAEGFAAAGISDPTRYF

SEQ ID NO: 41299 - protein, 224 aa, Pseudomonas citronellolis
  misc_feature (1)..(224): tr|A0A4Z0IH39|A0A4Z0IH39_9PSED 7-cyano-7-deazaguanine s ynthase OS=Pseudomonas citronellolis OX=53408 GN=queC P E=3 SV=1
MTQKKAVILLSGGLDSATVVAMAKAEGYACYSMSFDYGQRHRAELQAAERVARQLGVVEHKVIGLNLNGIGGSALTDSSIAVPEAPSEGIPVTYVPARNTVFLSLALGWAEVLGARDIFIGVNAVDYSGYPDCRPEFVEAFERMANLATKAGVEGDGFRIQAPLQFLSKAQIIQAGVARGVDYALTVSCYQADDAGRACGKCDSCRLRAEGFAAAGISDPTRYF

SEQ ID NO: 41300 - protein, 234 aa, Pseudomonas coleopterorum
  misc_feature (1)..(234): tr|A0A1H5DYH2|A0A1H5DYH2_9PSED 7-cyano-7-deazaguanine s ynthase OS=Pseudomonas coleopterorum OX=1605838 GN=queC PE=3 SV=1
MHSKALVLFSGGQDSTTCLAWALERYEHVETIGFDYGQRHEIELECRINVLQEIRNRFPNWAKRLGEDHVLDLKLLGQISDTAMTGGKTIEFEKNGLPNTFVPGRNLLFFTFAAAISYRRGLSVLVGGMCETDYSGYPDCRDNTLKSLQVSLGLGMDMPLVIETPLMWLDKRQTWELAKELGGTSFVEFVKEETHTCYLGDRQHRHNWGYGCNDCPACELRRTGFEAFLRDNNA

SEQ ID NO: 41301 - protein, 229 aa, Pseudomonas coleopterorum
  misc_feature (1)..(229): tr|A0A1H5F3I0|A0A1H5F3I0_9PSED 7-cyano-7-deazaguanine s ynthase OS=Pseudomonas coleopterorum OX=1605838 GN=queC PE=3 SV=1
MNDTTEHQKKAVILLSGGLDSATVVAMAKDQGYACYTMSFDYGQRHRAELNAAARVARDLGVVQHKVIGLNLDGMGGSALTDTSIDVPETLGEGIPVTYVPARNTVFLSLALGWAEVLEARDIFIGVNAVDYSGYPDCRPEFIEAFERLANLATKAGVEGNGFTIQAPLQNLSKAEIVKAGVALGVDYGLTVSCYQADDEGQACGKCDSCRLRAEGFTAAGVSDPTRYF

SEQ ID NO: 41302 - protein, 224 aa, Pseudomonas composti
  misc_feature (1)..(224): tr|A0A1I5NC22|A0A1I5NC22_9PSED 7-cyano-7-deazaguanine s ynthase OS=Pseudomonas composti OX=658457 GN=queC PE=3 SV=1
MSEKNAVILLSGGLDSATVVAMAKAEGYTCYSMSFDYGQRHRAELQAAERVARQLGVVEHKVIGLNLNGIGGSALTDSRIAVPEAPTEGIPATYVPARNTVFLALALGWAEVLEARDIFIGVNAVDYSGYPDCRPEFVEAFERMANLATKAGVEGQGFTIRAPLQQMSKGEIIQAGMRLGVDYALTVSCYQADDDGRACGKCDSCRLRAAGFAAAGVPDVTRYF

SEQ ID NO: 41303 - protein, 229 aa, Pseudomonas congelans
  misc_feature (1)..(229): tr|A0A0P9RFI5|A0A0P9RFI5_9PSED 7-cyano-7-deazaguanine s ynthase OS=Pseudomonas congelans OX=200452 GN=queC PE=3 SV=1
MSELTKTEKRAVILLSGGLDSATVVAMARAEGYVCYTMSFDYGQRHRAELDAAARVAGDLGAVEHKVIGLNLNGIGGSALTDSSIAVPESPSEGIPVTYVPARNTVFLSLALGWAEVLGARDIFIGVNAVDYSGYPDCRPEFVESFERMANLATKAGVEGQGFTIRAPLQNLSKSDIVKAGTALGVDYSLTVSCYQADDQGRACGKCDSCRLRAEGFTAAGIADPTRYF

SEQ ID NO: 41304 - protein, 229 aa, Pseudomonas coronafaciens
  misc_feature (1)..(229): tr|A0A3M3H6U1|A0A3M3H6U1_9PSED 7-cyano-7-deazaguanine s ynthase OS=Pseudomonas coronafaciens pv. striafaciens O X=235276 GN=queC PE=3 SV=1
MNELTNTGKRAVILLSGGLDSATVVAMALAEGYACYTMSFDYGQRHRAELDAAARVARDLGAVEHKVIGLNLNGIGGSALTDSSIAVPESPSEGIPVTYVPARNTVFLSLALGWAEVLGARDIFIGVNAVDYSGYPDCRPEFVESFERMANLATKAGVEGQGFTIRAPLQNLSKSDIVKAGSALGVDYSLTVSCYQADDQGRACGKCDSCRLRAEGFSAAGMTDPTRYF

SEQ ID NO: 41305 - protein, 229 aa, Pseudomonas coronafaciens; identical to SEQ ID NO: 41304
  misc_feature (1)..(229): tr|A0A0Q0H5Q1|A0A0Q0H5Q1_9PSED 7-cyano-7-deazaguanine s ynthase OS=Pseudomonas coronafaciens pv. zizaniae OX=25 1700 GN=queC PE=3 SV=1

SEQ ID NO: 41306 - protein, 230 aa, Pseudomonas corrugata
  misc_feature (1)..(230): tr|A0A3M3EVF1|A0A3M3EVF1_9PSED 7-cyano-7-deazaguanine s ynthase OS=Pseudomonas corrugata OX=47879 GN=queC PE=3 SV=1
MTEQTNTAEKRAVILLSGGLDSATVVAMARAEGYRCYTMSFDYGQRHRAELYAAERVARDLGVVEHKVIGLNLNGIGGSALTDSSIAVPEAPSEGIPVTYVPARNTVFLSLALGWAEVLEARDIFIGVNAVDYSGYPDCRPEFVEAFERMANLATKAGVEGQGFRIQAPLQNLSKADIVRAGVKLGVNYGLTVSCYQADDQGRACGKCDSCRLRAEGFAAAGVSDPTPYF

SEQ ID NO: 41307 - protein, 232 aa, Pseudomonas costantinii
  misc_feature (1)..(232): tr|A0A1S2UU96|A0A1S2UU96_9PSED 7-cyano-7-deazaguanine s ynthase OS=Pseudomonas costantinii OX=168469 GN=queC PE =3 SV=1
MSKKAVMVFSGGQDSTTCLIQALPLYDEVHCITFDYGQRHVAEIEVAQQLAKQLGATVHKVMDVSLLNELAISSLTRDNIPVPTVDSSGDSLPSTFVPGRNILFLTLASIYAYQVKAETVITGVCETDFSGYPDCRDEFVKALNKALELGMEYTLRLETPLMWLNKAETWALADYHNQLELVRHHTLTCYNGIIGSGCGNCDACNLRARGLNDYLQNKADVMKSLKHKLQLS

SEQ ID NO: 41308 - protein, 225 aa, Pseudomonas cremoricolorata
  misc_feature (1)..(225): tr|A0A089WTJ4|A0A089WTJ4_9PSED 7-cyano-7-deazaguanine s ynthase OS=Pseudomonas cremoricolorata OX=157783 GN=que C PE=3 SV=1
MNTEKRAVILLSGGLDSATVVAMAQAQGYSCYTMSFDYGQRHRAELNAAARVARDMGVVEHKVIGLDLNGMGGSALTDNSIDVPEAPTEGIPVTYVPARNTVFLALALGWAEVLQARDIFIGVNAVDYSGYPDCRPEFVEAFETMANLATKAGVEGQGFRIQAPLQNMSKAQIIQAGIERGVNYALTVSCYQADDQGRACGKCDSCRLRAEGFHAVGVADPTPYF

SEQ ID NO: 41309 - protein, 225 aa, Pseudomonas cuatrocienegasensis
  misc_feature (1)..(225): tr|A0A1H9LY47|A0A1H9LY47_9PSED 7-cyano-7-deazaguanine s ynthase OS=Pseudomonas cuatrocienegasensis OX=543360 GN =queC PE=3 SV=1
MMNDKKAVILLSGGLDSATVVAMAKAEGYACYSMSFDYGQRHRAELQAAEQVARQLGVVAHKVIGLDLDGMGGSALTDNAIAVPETPGEGIPVTYVPARNTVFLSLALGWAEVLGARDIFIGVNAVDYSGYPDCRPEFIEAFERLANLATKAGVEGEGFRIQAPLQHMSKADIVQAGVRLGVDYGLTVSCYQADAQGRGCGRCDSCRLRAAGFAAAGVADPTRYC

SEQ ID NO: 41310 - protein, 224 aa, Pseudomonas daroniae
  misc_feature (1)..(224): tr|A0A4Q9QIN2|A0A4Q9QIN2_9PSED 7-cyano-7-deazaguanine s ynthase OS=Pseudomonas daroniae OX=2487519 GN=queC PE=3 SV=1
MSEKKAVILLSGGLDSATVVAMAKEQGYSCYSMSFDYGQRHRSELQAAERVARQLGVVEHKVIGMNLGGIGGSALTDSSIDVPQSPTTGIPVTYVPARNTVFLALALGWAEVLEAQDIFIGVNAVDYSGYPDCRPEFVEAFERVANLATKMGVEGQSIRIQAPLQMMSKAEIVQAGSRLGVDYGLTVSCYLADDDGRACGKCDSCRLRSAGFAAAGVVDPTRYQ

SEQ ID NO: 41311 - protein, 230 aa, Pseudomonas deceptionensis
  misc_feature (1)..(230): tr|A0A0J6G4V0|A0A0J6G4V0_PSEDM 7-cyano-7-deazaguanine s ynthase OS=Pseudomonas deceptionensis OX=882211 GN=queC PE=3 SV=1
MTEQTVVTEKRAVILLSGGLDSATVVAMARAEGYSCYTMSFDYGQRHRSELDAAARVARDLGAIEHKVIGLNLDGIGGSALTDSSIDVPETLGEGIPVTYVPARNTVFLSLALGWAEVLQARDIFIGVNAVDYSGYPDCRPEFVQAFEIMANLATKAGVEGQGFRIKAPLQNLSKAQIVQAGIKLGVDYSLTVSCYQADSQGRACGKCDSCRLRAEGFAAAGITDPTRYF

SEQ ID NO: 41312 - protein, 224 aa, Pseudomonas delhiensis
  misc_feature (1)..(224): tr|A0A239MVU1|A0A239MVU1_9PSED 7-cyano-7-deazaguanine s ynthase OS=Pseudomonas delhiensis OX=366289 GN=queC PE= 3 SV=1
MTQKKAVILLSGGLDSATVVAMAKAEGYACYSMSFDYGQRHRAELQAAERVARQLGVVEHKVIGLNLNGIGGSALTDSSIAVPEAPSEGIPVTYVPARNTVFLSLALGWAEVLGARDIFIGVNAVDYSGYPDCRPEFVEAFERMANLATKAGVEGDGFRIQAPLQFLSKAQIIQAGVARGVDYALTVSCYQADDEGRACGKCDSCRLRSEGFAAAGIPDPTRYF

SEQ ID NO: 41313 - protein, 224 aa, Pseudomonas denitrificans
  misc_feature (1)..(224): tr|A0A5J6RBA8|A0A5J6RBA8_PSEDE 7-cyano-7-deazaguanine s ynthase QueC OS=Pseudomonas denitrificans OX=43306 GN=q ueC PE=4 SV=1
MNGKKAVILLSGGLDSATVVAMAKAEGYDCYTMSFDYGQRHRAELQAAERVARQQGVIEHKVIGLNLNGIGGSALTDSRIDVPEAPGEGIPVTYVPARNTVFLSLALGWAEVLGSRDIFIGVNAVDYSGYPDCRPEFVEAFERMANLATKAGVEGDGFRIQAPLQFLSKAQIIEAGIAQGVDYSLTVSCYQADDDGRACGKCDSCRLRSEGFLAAGISDPTRYF

SEQ ID NO: 41314 - protein, 224 aa, Pseudomonas donghuensis
  misc_feature (1)..(224): tr|A0A2M9VHB0|A0A2M9VHB0_9PSED 7-cyano-7-deazaguanine s ynthase OS=Pseudomonas donghuensis OX=1163398 GN=queC P E=3 SV=1
MTEKRAVILLSGGLDSATVVAMAKAEGYSCYTMSFDYGQRHRAELNAAARVARDLGVVEHKVIGLNLDGIGGSALTDSSIDVPEAPSEGIPVTYVPARNTVFLSLALGWAEVLEARDIFIGVNAVDYSGYPDCRPEFVEAFERMANLATKAGVEGRGFRIQAPLQNLSKAQIVQAGMARGVDYSLTVSCYQADGEGRACGKCDSCRLRAEGFKAAGVEDPTRYF

SEQ ID NO: 41315 - protein, 224 aa, Pseudomonas dryadis
  misc_feature (1)..(224): tr|A0A4Q9QY75|A0A4Q9QY75_9PSED 7-cyano-7-deazaguanine s ynthase OS=Pseudomonas dryadis OX=2487520 GN=queC PE=3 SV=1
MNDNRAVILLSGGLDSATVVAMAKTQGYSCYSMSFDYGQRHRSELQAAERVARQLGVVEHKVIGLDLDGMGGSALTDSRIDVPESPTSGIPVTYVPARNTVFLALALGWAEVLGARDIFIGVNAVDYSGYPDCRPEFIEAFERMANLATKAGVEGQGVRIRAPLQMMSKAEIVQAGVRLGVDYGLTVSCYQADEQGRACGKCDSCRLRAAGFVAAGVTDPTRYR

SEQ ID NO: 41316 - protein, 224 aa, Pseudomonas duriflava
  misc_feature (1)..(224): tr|A0A562QPD3|A0A562QPD3_9PSED 7-cyano-7-deazaguanine s ynthase OS=Pseudomonas duriflava OX=459528 GN=queC PE=3 SV=1
MTQKKAVVLLSGGLDSATVVAMARAEGFACYTMSFDYGQRHRSELAAAQRVAQQLGVIEHKVIGLNLNGIGGSALTDTSIDVPEASTEGIPVTYVPARNTVFLSLALGWAEVLEARHIFIGVNAVDYSGYPDCRPEFVESFERTANLATKAGVEGEGFRIVAPLQYLSKAEIIKAGLAQGVDYSLTVSCYQADEAGRACGRCDSCRLRAEGFRSAGEKDPTRYQ

SEQ ID NO: 41317 - protein, 234 aa, Pseudomonas duriflava
  misc_feature (1)..(234): tr|A0A562PYW7|A0A562PYW7_9PSED 7-cyano-7-deazaguanine s ynthase OS=Pseudomonas duriflava OX=459528 GN=queC PE=3 SV=1
MHKSALVLFSGGQDSTTCLAWALTRYEHVETVGFDYGQRHEVELQCRMHILEKLRDEFPGWKSKLGEDHLLDLKLLSQISDTAMTAEKAIEVEENGLPNTFVPGRNLLFFTFAATLAYRRGLSVLVGGMCETDYSGYPDCRDNTLKALQVSLSLGMDMPLVIETPLMWLDKKQTWDLAKALGGPNFVALIQEHTHTCYLGDRQHRHDWGYGCNQCPACELRRTGFEAFQRDSVA

SEQ ID NO: 41318 - protein, 233 aa, Pseudomonas endophytica
  misc_feature (1)..(233): tr|A0A0Q0SQ59|A0A0Q0SQ59_9PSED 7-cyano-7-deazaguanine s ynthase OS=Pseudomonas endophytica OX=1563157 GN=queC P E=3 SV=1
MTNKAVIVFSGGQDSTTCLLQALPLYDEVHCVTFDYGQRHRAEIDVASALSKKLGATKHTVLDASLLNQLTVSSLTRDDMPVPDASAPVNGLPSTFVPGRNIVFLTLASIYAYQVQAKTVITGVCETDFSGYPDCRDEFVKSLNQAIALGMAYDVHIKTPLMWLNKAEVWALADTHHQLELVRDQTLTCYNGLIGAGCGHCAACSLRSKGLEDYLNDKAGVRQSLRAKQQQNA

SEQ ID NO: 41319 - protein, 230 aa, Pseudomonas endophytica
  misc_feature (1)..(230): tr|A0A0Q0T477|A0A0Q0T477_9PSED 7-cyano-7-deazaguanine s ynthase OS=Pseudomonas endophytica OX=1563157 GN=queC P E=3 SV=1
MTVQTTAAEKRAVILLSGGLDSATVVAMARAEGYSCYAMSFDYGQRHRAELDAAARVARDLGVIEHKVIGLNLNGIGGSALTDIAIDVPEAPSEGIPVTYVPARNTVFLSLALGWAEVLQARDIFIGVNAVDYSGYPDCRPEFVEAFEVMANLATKAGVEGQGLRIKAPLQNMSKAQIVQAGAKLGVDYSLTVSCYQADAQGYACGKCDSCRLRAEGFKAAGVDDPTRYF

SEQ ID NO: 41320 - protein, 224 aa, Pseudomonas entomophila
  misc_feature (1)..(224): sp|Q1I6F8|QUEC_PSEE4 7-cyano-7-deazaguanine synthase OS =Pseudomonas entomophila (strain L48) OX=384676 GN=queC PE=3 SV=1
MTDKRAVILLSGGLDSATVVAMAKAEGYACYTMSFDYGQRHRAELDAAARVARDLGVVEHKVIGLNLNGIGGSALTDNSIDVPEAPGEGIPVTYVPARNTVFLSLALGWAEVLEARDIFIGVNAVDYSGYPDCRPEFVEAFERMANLATKAGVEGQGFRIQAPLQNLSKAQIVQAGIAQGVDYSLTVSCYQADDEGRACGKCDSCRLRADGFKAAGVEDPTRYF

SEQ ID NO: 41321 - protein, 224 aa, Pseudomonas entomophila
  misc_feature (1)..(224): tr|A0A3Q8U2M6|A0A3Q8U2M6_9PSED 7-cyano-7-deazaguanine s ynthase OS=Pseudomonas entomophila OX=312306 GN=queC PE =3 SV=1
MTEKRAVILLSGGLDSATVVAMAKAEGYACYTMSFDYGQRHRAELEAAARVAHDLGVVEHKVIGLNLNGIGGSALTDSSIDVPEAPSEGIPVTYVPARNTVFLSLALGWAEVLQARDIFIGVNAVDYSGYPDCRPEFVEAFERMANLATKAGVEGQGFRIQAPLQNLSKAQIVQAGIARGVDYSLTVSCYQADDDGRACGKCDSCRLRADGFSAAGVADPTRYF

SEQ ID NO: 41322 - protein, 229 aa, Pseudomonas extremaustralis
  misc_feature (1)..(229): tr|A0A5C5QG51|A0A5C5QG51_9PSED 7-cyano-7-deazaguanine s ynthase OS=Pseudomonas extremaustralis OX=359110 GN=que C PE=3 SV=1
MTEQTIDQKRAVILLSGGLDSATVVAMAQAEGYTCYTMSFDYGQRHRAELNAAARVAHDMGVAEHKVIGLNLNGIGGSALTDSSIDVPETPGEGIPVTYVPARNTVFLSLALGWAEVLNARDIFIGVNAVDYSGYPDCRPEFVESFERMANLATKAGVEGHGFRILAPLQNLSKADIVKAGIGLGVDYSLTVSCYQADNDGRACGKCDSCRLRAEGFQAAGIADPTRYF

SEQ ID NO: 41323 - protein, 224 aa, Pseudomonas extremorientalis
  misc_feature (1)..(224): tr|A0A1S2TPF6|A0A1S2TPF6_9PSED 7-cyano-7-deazaguanine s ynthase OS=Pseudomonas extremorientalis OX=169669 GN=qu eC PE=3 SV=1
MDQKRAVILLSGGLDSATVVAMAQAQGYSCYTMSFDYGQRHRAELNAAARVARDMGVVEHKVIGLNLNGIGGSALTDSSIDVPETPGEGIPVTYVPARNTVFLSLALGWAEVLHARDIFIGVNAVDYSGYPDCRPEFVESFERMANLATKAGVEGQGFRILAPLQNLSKADIVKAGVGLGVDYSLTVSCYQADDDGRACGKCDSCRLRAEGFQAAGITDPTRYF

SEQ ID NO: 41324 - protein, 229 aa, Pseudomonas ficuserectae; identical to SEQ ID NO: 41254
  misc_feature (1)..(229): tr|A0A0P9SPU6|A0A0P9SPU6_9PSED 7-cyano-7-deazaguanine s ynthase OS=Pseudomonas ficuserectae OX=53410 GN=queC PE =3 SV=1

SEQ ID NO: 41325 - protein, 201 aa, Pseudomonas ficuserectae
  misc_feature (1)..(201): tr|A0A0P9VWN9|A0A0P9VWN9_9PSED 7-cyano-7-deazaguanine s ynthase OS=Pseudomonas ficuserectae OX=53410 GN=ALO69_1 02532 PE=3 SV=1
MKIGLLLSGGMDSLALAWWKRPDIAFTLNYGQLAAQAEIEASRTICRQLNISHQVIEIDCRQLGSGDMAGTRADDLAPASDWWPYRNQMLVTLTAMKAISFGVTHLWLGTVRSDGFHKDGSPEFMTAISHLLSLQEGGIVVEAPAIGLSTAELVRLSGIPADLLAWAHSCHKSHVACGNCRGCNKYMEVFQEVGYDLDRPG

SEQ ID NO: 41326 - protein, 224 aa, Pseudomonas flavescens
  misc_feature (1)..(224): tr|A0A1G8JE65|A0A1G8JE65_9PSED 7-cyano-7-deazaguanine s ynthase OS=Pseudomonas flavescens OX=29435 GN=queC PE=3 SV=1
MTDKKAVILLSGGLDSATVVAMAREQGYACYSMSFDYGQRHRSELQAAERVARQLGVVEHKVIGMELGGIGGSALTDPSIDVPQSPTTGIPVTYVPARNTVFLALALGWAEVLEAQDIFIGVNAVDYSGYPDCRPEFVEAFERLANLATKMGVEGRGIRIQAPLQMLSKAEIVQAGSRLGVDYGLTVSCYLADDDGRACGKCDSCRLRSAGFAAAGVLDPTRYQ

SEQ ID NO: 41327 - protein, 235 aa, Pseudomonas flexibilis
  misc_feature (1)..(235): tr|A0A0B3C2M0|A0A0B3C2M0_9PSED 7-cyano-7-deazaguanine s ynthase OS=Pseudomonas flexibilis OX=706570 GN=queC PE= 3 SV=1
MNALLICSGGFDSVTLAYRLAAEQSLGALLTFDYGQRHRKEIDAARLAAQRLAVPHLVMDIGQIGRQLSGSALTDDIAVPHGHYSEETMKVTVVPNRNAIMLTIAFGVAASRGLDTVALAVHGGDHFIYPDCRPDFIRLFGEMQARALDGVAEVALLAPYVNTDKTEIARDAARFGVPVADTWSCYEGGDLHCGRCGTCVERIEAMVLAGTPDPTPYKDSQYWRDAVARVNACTP

SEQ ID NO: 41328 - protein, 235 aa, Pseudomonas flexibilis
  misc_feature (1)..(235): tr|A0A1N6RBP8|A0A1N6RBP8_9PSED 7-cyano-7-deazaguanine s ynthase OS=Pseudomonas flexibilis OX=706570 GN=queC PE= 3 SV=1
MNALLICSGGFDSVTLAYRLAAEHALGALLTFDYGQRHRKEIDAARLAAQRLAVPHLVMDIGPIGRQLSGSALTDDIAVPHGHYSEETMKVTVVPNRNAIMLTIAFGVAASRGLDTVALAVHGGDHFIYPDCRPDFIRLFGEMQARALDGVAEVALLAPYVHTDKTEIARDAARFAVPVADTWSCYEGGEIHCGRCGTCVERIEAMALAGTPDPSPYQDAQYWRDAVARVNACTR

SEQ ID NO: 41329 - protein, 229 aa, Pseudomonas floridensis
  misc_feature (1)..(229): tr|A0A1X0MZ71|A0A1X0MZ71_9PSED 7-cyano-7-deazaguanine s ynthase OS=Pseudomonas floridensis OX=1958950 GN=queC P E=3 SV=1
MTELTKTEKRAVILLSGGLDSATVVAMARAEGYACYTMSFDYGQRHRAELDAAAQVARDLGAIEHKVIGLNLNGIGGSALTDSSIAVPEAPSEGIPVTYVPARNTVFLSLALGWAEVLGARDIFIGVNAVDYSGYPDCRPEFVESFERMANLATKAGVEGQGFTIRAPLQNLSKSDIVKAGTTLGVDYALTVSCYQADDQGRACGKCDSCRLRAEGFAAAGVADPTRYF

SEQ ID NO: 41330 - protein, 232 aa, Pseudomonas fluorescens
  misc_feature (1)..(232): sp|Q4K6M3|QUEC2_PSEF5 7-cyano-7-deazaguanine synthase 2 OS=Pseudomonas fluorescens (strain ATCC BAA-477 / NRRL B-23932 / Pf-5) OX=220664 GN=queC2 PE=3 SV=1
MKKTAVIVFSGGQDSTTCLIHALPLYDEVHCITFDYGQRHHAEIETAQRLSKQLGATVHKVLDASLLNELAISSLTRDNIPVPTVNSSGESLPSTFVPGRNILFLTLASIYAYQVKAETVITGVCETDFSGYPDCRDEFVKALNKALELGMEYKLRLETPLMWLNKAETWALADYHNQLELVREQTLTCYNGIMGSGCANCDACNLRAKGLNAYLENKTQVMDSLKSKMGLK

SEQ ID NO: 41331 - protein, 230 aa, Pseudomonas fluorescens
  misc_feature (1)..(230): sp|Q3K7W9|QUEC_PSEPF 7-cyano-7-deazaguanine synthase OS =Pseudomonas fluorescens (strain Pf0-1) OX=205922 GN=qu eC PE=3 SV=1
MTEQLNTSQKRAVILLSGGLDSATVVAMARAEGYACYTMSFDYGQRSHAELHAAARVARDLGVVEHKVIGLNLNGMGGSALTDTSIDIPEELGEGIPVTYVPARNTVFLSLALGWAEVLGARDIFIGVNAVDYSGYPDCRPEFIESFERMANLATKAGVEGNGFRIQAPLQNLSKAQIVQAGVKLGVDYGLTVSCYQADDDGRACGKCDSCRLRAEGFAAAGISDPTRYF

SEQ ID NO: 41332 - protein, 224 aa, Pseudomonas fragi
  misc_feature (1)..(224): tr|A0A267AU69|A0A267AU69_PSEFR 7-cyano-7-deazaguanine s ynthase OS=Pseudomonas fragi OX=296 GN=queC PE=3 SV=1
MTEKRAVILLSGGLDSATVVAMARAEGYSCYTMSFDYGQRHRAELDAAARVARDLGAIEHKVIGLNLDGIGGSALTDSSIDVPEAPSEGIPVTYVPARNTVFLSLALGWAEVLQARDIFIGVNAVDYSGYPDCRPEFVEAFEVMANLATKAGVEGQGFSIKAPLQNLSKAQIVQAGIKLGVDYSLTVSCYQADTQGRACGKCDSCRLRAEGFAAAGISDPTRYF

SEQ ID NO: 41333 - protein, 422 aa, Pseudomonas fragi
  misc_feature (1)..(422): tr|A0A1H2JNP6|A0A1H2JNP6_PSEFR Uncharacterized protein OS=Pseudomonas fragi OX=296 GN=CJU72_22615 PE=4 SV=1
MKFVCGPVGFSVPGAEDAIQVVIYGKAEKGQVSVGGYARELLEKAHLEINPQAWDFLSIALAVVAADFTAIRAKSADAWTRVINLEIAVQDTVFWNSQARALEGALRFLTTDRWTLSFHAGGFGPPAQLQALHPSEDSVVLLSGGLDSLIGAIDLVEQGVKPYAVSQIVRGDGEKQATFAKSLGLNRIGLNHVTKSPGQQEPSQRARSIIFLAFGLAVATSLDRYHRGETVPLYICENGFIAINPPLTMSRLGSLSTRTAHPEYLGRLQQIFDAASINVQIRNPYALMTKGEMLAACRNQELLKEHAVASTSCGRFQRFGYKHCGRCVPCQVRRASFKRWAAIGDDTRYVYDNLSQDDLQHGKFEDVRSVGMALANVAQEGFEHWLGHCLFSPFIQDRAGYNAMLARGLNELGHLHRAYQIT

SEQ ID NO: 41334 - protein, 229 aa, Pseudomonas frederiksbergensis
  misc_feature (1)..(229): tr|A0A1H5GQI6|A0A1H5GQI6_9PSED 7-cyano-7-deazaguanine s ynthase OS=Pseudomonas frederiksbergensis OX=104087 GN= queC PE=3 SV=1
MTRKAVIVFSGGQDSTTCLIHALPLYDEIHCITFDYGQRHRAEIEVAQQLSKQLGVKVHKVLDTSLLNELAISSLTRDHIPIARSTGEGVPDTFVPGRNILFLTLASIYAYQVGAEAVITGVCETDFSGYPDCRDEFVKAMNKAIELGMDYKLRVETPLMWLNKAETWALADYHEKLDLVRYRTLTCYNGIMGSGCGDCDACTLRAKGLSEFLEDRAEVSKSLKTKIKQ

SEQ ID NO: 41335 - protein, 230 aa, Pseudomonas frederiksbergensis
  misc_feature (1)..(230): tr|A0A1H5IDQ6|A0A1H5IDQ6_9PSED 7-cyano-7-deazaguanine s ynthase OS=Pseudomonas frederiksbergensis OX=104087 GN= queC PE=3 SV=1
MTEQLNTAEKRAVILLSGGLDSATVVAMARAEGYSCYTMSFDYGQRSHAELHAAERVARDLGVVEHKVIGLNLNGIGGSALTDTSIDVPEEAGEGIPVTYVPARNTVFLSLALGWAEVLGARDIFIGVNAVDYSGYPDCRPEFIESFERMANLATKAGVEGNGFRIQAPLQNLSKAQIVRAGVKLGVDYGLTVSCYQADDNGRACGKCDSCRLRAEGFAAAGISDPTPYF

SEQ ID NO: 41336 - protein, 230 aa, Pseudomonas fulva
  misc_feature (1)..(230): tr|F6AGX6|F6AGX6_PSEF1 7-cyano-7-deazaguanine synthase OS=Pseudomonas fulva (strain 12-X) OX=743720 GN=queC PE =3 SV=1
MSRGIDMSDKKAVILLSGGLDSATVVAMAREQGYSCYSMSFDYGQRHRSELQAAERVARQLGVVEHKVIGINLDGIGGSALTDASIEVPQSPTTGIPVTYVPARNTVFLSLALGWAEVLEAQDIFIGVNAVDYSGYPDCRPEFVNAFEHMANLATKMGVEGRRIRIQAPLQMLSKAEIVQAGSRLRVDYGLTVSCYLADADGRACGKCDSCRLRAAGFAAAGMPDPTRYQ

SEQ ID NO: 41337 - protein, 224 aa, Pseudomonas fulva
  misc_feature (1)..(224): tr|A0A0D0KW44|A0A0D0KW44_9PSED 7-cyano-7-deazaguanine s ynthase OS=Pseudomonas fulva OX=47880 GN=queC PE=3 SV=1
MSEKKAVILLSGGLDSATVVAMAREQGYSCYSMSFDYGQRHRSELQAAERVARQLGVVEHKVIGMNLGGIGGSALTDSSIDVPQSPTTGIPVTYVPARNTVFLALALGWAEVLEAQDIFIGVNAVDYSGYPDCRPEFVEAFERVANLATRMGVEGQSIRIQAPLQMMSKAEIVQEGSRLGVDYGLTVSCYLADDDGRACGKCDSCRLRSAGFAAAAVPDPTRYQ

SEQ ID NO: 41338 - protein, 224 aa, Pseudomonas furukawaii
  misc_feature (1)..(224): tr|L8MEI9|L8MEI9_PSEFK 7-cyano-7-deazaguanine synthase OS=Pseudomonas furukawaii OX=1149133 GN=queC PE=3 SV=1
MSEKKAVILLSGGLDSATVIALAKAEGYACYSMSFDYGQRHRAELQAANRVARQLGVVEHKVIGLNLNGIGGSALTDTRIAVPESPTEGIPVTYVPARNTVFLSLALGWAEVLGARDIFIGVNAVDYSGYPDCRPEFVEAFERMANLATKAGVEGDGFRIRAPLQNMSKAEIVQAGSRLGVDYGLTVSCYQADDEGHACGKCDSCRLRAAGFLAAGLNDPTRYQ

SEQ ID NO: 41339 - protein, 231 aa, Pseudomonas fuscovaginae
  misc_feature (1)..(231): tr|A0A0N0E1G2|A0A0N0E1G2_9PSED 7-cyano-7-deazaguanine s ynthase OS=Pseudomonas fuscovaginae OX=50340 GN=queC PE =3 SV=1
MTEKAVIVFSGGQDSTTCLIHVRPLYDEIHCITFDYGQRHRAEIEVARQLAKQLGVTTHKVLDTTVLNELAVSSLTRDAIPVPAANSLAGGVPSTFVPGRNILFLTLASIHAHQLGARTVVTGVCETDFSGYPDCRDHFIKALNPAIELGLDYPLRIETPLMWLSKAETWALADHHGELERIRRETLTCYRGVKGDGCAECDACHLRAKGLEQFLGHRREVMGSLKEKLGL

SEQ ID NO: 41340 - protein, 229 aa, Pseudomonas fuscovaginae
  misc_feature (1)..(229): tr|A0A1H6PA23|A0A1H6PA23_9PSED 7-cyano-7-deazaguanine s ynthase OS=Pseudomonas fuscovaginae OX=50340 GN=queC PE =3 SV=1
MTTQANVEKKAVILLSGGLDSATVVAMARAQGYSCYTMSFDYGQRHRAELQAAERVARDLGAIEHKVIGLNLNGIGGSALTDSSIDVPEAPSEGIPVTYVPARNTVFLSLALGWAEVLGAQDIFIGVNAVDYSGYPDCRPEFVEAFETLANLATKAGVEGEGFRIQAPLQNLSKADIVREGVRLGVDYSLTVSCYQADANGFACGKCDSCRLRAEGFNVAGIDDPTHYF

SEQ ID NO: 41341 - protein, 235 aa, Pseudomonas gallaeciensis
  misc_feature (1)..(235): tr|A0A395QX77|A0A395QX77_9PSED 7-cyano-7-deazaguanine s ynthase OS=Pseudomonas gallaeciensis OX=857227 GN=queC PE=3 SV=1
MSAKPDSSGRAVVLLSGGLDSATVLAVAQAEGRACYTMSFDYGQRHRVELEAAERVARAAGVVEHKVIGMNLNGIGGSALTDERIAVPESPQEGIPVTYVPARNTLFLALALGWAEVLEARDIYIGVNAVDYSGYPDCRPEFVSAFEQLANLATRAGVEGEGFRIRAPLQQLSKAQIILAGQALGVDYSQTVSCYQADEQGRACGVCDSCRLRAEGFATAGVADPTRYQGKFAGH

SEQ ID NO: 41342 - protein, 221 aa, [Pseudomonas] geniculata
  misc_feature (1)..(221): tr|A0A0L8A6H4|A0A0L8A6H4_9GAMM 7-cyano-7-deazaguanine s ynthase OS=[Pseudomonas] geniculata N1 OX=1167641 GN=qu eC PE=3 SV=1
MKKAVVLLSGGMDSAAVIAMAQEQGFAVHALSVRYGQRHTSELDAAARVAKAQGVVAHKTVDVDLRSIGGSALTDDIDVPEAGGAGIPVTYVPARNTIMLSLALGWAEVLGANDIFCGVNAVDYSGYPDCRPEFVAAFQALANLATKSGVEGAGIKVHAPLQFLSKGQIVSEGVRLGVDFGLTVSCYNADANGAACGHCDACRLRAQGFAEAGVPDPTLYA

SEQ ID NO: 41343 - protein, 422 aa, Pseudomonas gessardii
  misc_feature (1)..(422): tr|A0A1V2J152|A0A1V2J152_9PSED Uncharacterized protein OS=Pseudomonas gessardii OX=78544 GN=BLL38_20945 PE=4 S V=1
MKFVCGPAGFRVPGDDGAMQVVIYGKAEQGQVSVGGYARELIDRAHLEISPRAWDFLSIALSVVAADFTAIRAKSADGWTRVIELAISVQDPVFWNSQARGLENALRFLTTDKWTLSFHPGGFGPPAQLQALHPTEDSVVLLSGGLDSLIGAIDLVAQGVRPYAVSQIVRGDGEKQDHFAQSLGLSRIGLNHVTRSPDAQKPSQRARSIIFLAFGLAVATSLDRYHRGETVPLYICENGFIAINPPLTSCRLGSLSTRTAHPDYLGRLQEIFNAAGINVRIHNPYALKTKGEMLAECRNQDLLKLHAIASTSCGRFQRFGYKHCGRCVPCQVRRASFKRWAAVKDDTPYVHENLGLRDKQHAWFDDVRSVGIALANVAENGFEEWLGHSLFSPFIQDRAGYRAMLARGLDELGQLHHSYQLT

SEQ ID NO: 41344 - protein, 229 aa, Pseudomonas gessardii
  misc_feature (1)..(229): tr|A0A1V2JLH8|A0A1V2JLH8_9PSED 7-cyano-7-deazaguanine s ynthase OS=Pseudomonas gessardii OX=78544 GN=queC PE=3 SV=1
MTEQITDQKRAVILLSGGLDSATVVAMARAEGYSCYTMSFDYGQRSHAELDAAARVARDLGVVEHKVIGLNLNGIGGSALTDSSIDVPEAPTEGIPVTYVPARNTVFLSLALGWAEVLNARDIFIGVNAVDYSGYPDCRPEFVESFERMANLATKAGVEGHGFRIQAPLQNLSKADIVKAGVRLGVDYSLTVSCYQADNDGRACRKCDSCRLRAEGFQAAGITDPTRYF

SEQ ID NO: 41345 - protein, 229 aa, Pseudomonas gingeri
  misc_feature (1)..(229): tr|A0A2K1F5W9|A0A2K1F5W9_9PSED 7-cyano-7-deazaguanine s ynthase OS=Pseudomonas gingeri NCPPB 3146 = LMG 5327 OX =707248 GN=queC PE=3 SV=1
MTLQASTEKKAVILLSGGLDSATVVAMARAEGYSCYTMSFDYGQRHRAELQAAERVARDQGVIEHKVIGLNLNGIGGSALTDSSIDVPETPGEGIPVTYVPARNTVFLSLALGWAEVLGARDIFIGVNAVDYSGYPDCRPEFVAAFETLANLATKAGVEGDGFRIRAPLQKLSKADIVQAGIKLGVDYSLTVSCYQADANGFACGKCDSCRLRAEGFAAAGISDPTRYF

SEQ ID NO: 41346 - protein, 224 aa, Pseudomonas graminis
  misc_feature (1)..(224): tr|A0A1I0JG87|A0A1I0JG87_9PSED 7-cyano-7-deazaguanine s ynthase OS=Pseudomonas graminis OX=158627 GN=queC PE=3 SV=1
MTEKRAVILLSGGLDSATVVAMAKADGFSCYTMSFDYGQRHRAELQAAERVAADMGVVEHKVIGLNLNGIGGSALTDSSIAVPETQGEGIPVTYVPARNTVFLSLALGWAEVLGARDIFIGVNAVDYSGYPDCRPEFVESFERMANLATKAGVEGQGFTIQAPLQMLSKADIVKAGTRLGVDYGLTVSCYQADEQGRACGKCDSCRLRAEGFAAAGVTDPTRYF

SEQ ID NO: 41347 - protein, 200 aa, Pseudomonas graminis
  misc_feature (1)..(200): tr|A0A1X0VV40|A0A1X0VV40_9PSED 7-cyano-7-deazaguanine s ynthase OS=Pseudomonas graminis OX=158627 GN=BW687_0053 5 PE=3 SV=1
MKRALLLSGGMDSLAIAWWLHPEVGITLNYGQLAAEAEISASSAICKQLQIEHHVISIDCRSVGSGDMAGGRADAHAPASDWWPYRNQMLVTLASMKAISLGVKTLYLGTVKSDGSHRDGTPEFVEAINQLMVIQEGEMTVEAPAIGLSTTELVRVAGVPSSVLAWAHSCHKSNVACGNCRGCNKYFEVWHELEHEQDHS

SEQ ID NO: 41348 - protein, 225 aa, Pseudomonas grimontii
  misc_feature (1)..(225): tr|A0A1H1BGR1|A0A1H1BGR1_9PSED 7-cyano-7-deazaguanine s ynthase OS=Pseudomonas grimontii OX=129847 GN=queC PE=3 SV=1
MTDQQRAVILLSGGLDSATLVAMVRAEGYSCYTMSFDYGQRHRAELEAAVRVARDLGVVEHKVIGLNLDGMGGSALTDSTIDVPEAPTQGIPVTYVPARNTVFLSLALGWAEVLNARDIFIGVNALDYNGYPDCRPAFVESFERMANLATKAGVEGQGVRIQAPLQNLSKADIVKAGVGLGVDYSLTVSCYQADDDGRACGKCDSCRLRAEGFQMAGITDPTRYF

SEQ ID NO: 41349 - protein, 232 aa, Pseudomonas grimontii
  misc_feature (1)..(232): tr|A0A1H1BXZ1|A0A1H1BXZ1_9PSED 7-cyano-7-deazaguanine s ynthase OS=Pseudomonas grimontii OX=129847 GN=queC PE=3 SV=1
MSKKAVMVFSGGQDSTTCLIQALPLYDEVHCITFDYGQRHVAEIEVAQQLARQLGATVHKVMDVSLLNELAISSLTRDNIPVPTLNSSGESLPSTFVPGRNILFLTLAAIYAYQVKAEAVITGVCETDFSGYPDCRDEFVKALNQALKLGMEYDVRLQTPLMWLNKAETWALADYHQQLDLVREQTLTCYNGIIGTGCGECDACNLRARGLNDYLQDKTAVMLSLKHKLQLN

SEQ ID NO: 41350 - protein, 38 aa, Pseudomonas guangdongensis
  misc_feature (1)..(38): tr|A0A1H2IHG0|A0A1H2IHG0_9PSED 7-cyano-7-deazaguanine s ynthase (Fragment) OS=Pseudomonas guangdongensis OX=124 5526 GN=SAMN05216580_3009 PE=4 SV=1
VSCYQADDDGRACGRCDSCRLRAEGFAGAGVADPTRYR

SEQ ID NO: 41351 - protein, 188 aa, Pseudomonas guangdongensis
  misc_feature (1)..(188): tr|A0A1H2DUF6|A0A1H2DUF6_9PSED 7-cyano-7-deazaguanine s ynthase (Fragment) OS=Pseudomonas guangdongensis OX=124 5526 GN=SAMN05216580_0001 PE=3 SV=1
MSEKKAVILLSGGLDSATVLAMARAEGYACYTMSFDYGQRHRAELQAAERVACQLGAVEHKVVGIDLNGIGGSALTDSSIAVPEGESSGAGVPVTYVPARNTLFLSLALGWAEVLQAGDIFIGVNAVDYSGYPDCRPEFVEAFERLANLATRAGTEGEGFRIRAPLQHLSKAAIIHAGLAHGVDYALT

SEQ ID NO: 41352 - protein, 224 aa, Pseudomonas guariconensis
  misc_feature (1)..(224): tr|A0A1G6XKK1|A0A1G6XKK1_9PSED 7-cyano-7-deazaguanine s ynthase OS=Pseudomonas guariconensis OX=1288410 GN=queC PE=3 SV=1
MTDKRAVILLSGGLDSATVVAMAKAEGYSCYTMSFDYGQRHRAELNAAARVARDLGVVEHKVIGLNLNGIGGSALTDTSIDVPETPGEGIPVTYVPARNTVFLSLALGWAEVLGARDIFIGVNAVDYSGYPDCRPEFVEAFERMANLATKAGVEGQGFRIQAPLQNLSKAQIVQAGIARGVDYSLTVSCYQADDEGRACGKCDSCRLRADGFAAAGVADPTRYF

SEQ ID NO: 41353 - protein, 224 aa, Pseudomonas guariconensis
  misc_feature (1)..(224): tr|A0A2N5Q839|A0A2N5Q839_9PSED 7-cyano-7-deazaguanine s ynthase OS=Pseudomonas guariconensis OX=1288410 GN=queC PE=3 SV=1
MTDKRAVILLSGGLDSATVVAMAKAEGYSCYTMSFDYGQRHRAELNAAARVARDLGVVEHKVIGLNLNGIGGSALTDTSIDVPETPGEGIPVTYVPARNTVFLSLALGWAEVLGARDIFIGVNAVDYSGYPDCRPEFVEAFERMANFATKAGVEGQGFRIQAPLQNLSKAQIVQAGIARGVDYSLTVSCYQADDEGRACGKCDSCRLRADGFAAAGVADPTRYF

SEQ ID NO: 41354 - protein, 224 aa, Pseudomonas guguanensis
  misc_feature (1)..(224): tr|A0A1H0XFY4|A0A1H0XFY4_9PSED 7-cyano-7-deazaguanine s ynthase OS=Pseudomonas guguanensis OX=1198456 GN=queC P E=3 SV=1
MSDKKAVILLSGGLDSATVVAMARAEGYACYSMSFDYGQRHRAELQAAERVARQLGVVEHKVIGLNLNGIGGSALTDSSIAVPETLGEGIPVTYVPARNTVFLSLALGWAEVLGARDIFIGVNAVDYSGYPDCRPEFVEAFERMANLATKAGVEGQGFAIRAPLQQMSKGEIIQAGMRLGVDYALTVSCYQADEDGRACGKCDSCRLRAAGFTAAGVPDATRYF

SEQ ID NO: 41355 - protein, 224 aa, Pseudomonas guineae
  misc_feature (1)..(224): tr|A0A1I3CCF3|A0A1I3CCF3_9PSED 7-cyano-7-deazaguanine s ynthase OS=Pseudomonas guineae OX=425504 GN=queC PE=3 S V=1
MSDKKAVILLSGGLDSATVVAMAKADGYSCYTMSFDYGQRHRSELQAAEQVAQQLGVVEHKVIGLNLDGMGGSALTDVSIDVPEVPSEGIPVTYVPARNTVFLSLALGWAEVLGARDIFIGVNAVDYSGYPDCRPEFIESFERMANLATKAGVEGQGFRIQAPLQSMSKAEIAQAGVRLGVDYALTVSCYQADDQGQACGKCDSCRLRAAGFVAAGIVDPTRYF

SEQ ID NO: 41356 - protein, 233 aa, Pseudomonas helleri
  misc_feature (1)..(233): tr|A0A0J6L1X4|A0A0J6L1X4_9PSED 7-cyano-7-deazaguanine s ynthase OS=Pseudomonas helleri OX=1608996 GN=queC PE=3 SV=1
MTNKAVIVFSGGQDSTTCLLQALPLYDEVHCITFDYGQRHRAEIDVARALSKQLGATKHTVLDASLLNQLTVSSLTREDMAVPNASAPENGLPSTFVPGRNIVFLTLASIYAYQVQANTVITGVCETDFSGYPDCRDAFVKSLNQAITLGMAYDVRIKTPLMWLNKAEVWALADEYQQLAVIRDQTLTCYNGIQGAGCTHCAACSLRAKGLAEYLSDTAGVRQRLQAKLLKAA

SEQ ID NO: 41357 - protein, 230 aa, Pseudomonas helleri
  misc_feature (1)..(230): tr|A0A0J6I8A9|A0A0J6I8A9_9PSED 7-cyano-7-deazaguanine s ynthase OS=Pseudomonas helleri OX=1608996 GN=queC PE=3 SV=1
MTEHTAVTEKRAVILLSGGLDSATVVAMARAEGYRCYTMSFDYGQRHRAELDAAARVARDLGAVEHKVIGLNLDGIGGSALTDSSIDVPEAPSEGIPVTYVPARNTVFLSLALGWAEVLQARDIFIGVNAVDYSGYPDCRPEFVEAFEAMANLATKAGVEGQGFSIKAPLQNMSKAQIVQAGIRLGVDYSLTVSCYQADAQGQACGKCDSCRLRAEGFQAAGVSDPTRYF

SEQ ID NO: 41358 - protein, 232 aa, Pseudomonas helmanticensis
  misc_feature (1)..(232): tr|A0A4R7UV59|A0A4R7UV59_9PSED 7-cyano-7-deazaguanine s ynthase OS=Pseudomonas helmanticensis OX=1471381 GN=que C PE=3 SV=1
MTNKAVIVFSGGQDSTTCLIHALTHYDEVHCITFDYGQRHHAEIEVAQQLSKKLGVTVHKTLDVSLLNELAISSLTRDNIPVPTVNSSGESLPSTFVPGRNILFLTLASIYAYQVQAKTVITGVCETDFSGYPDCRDEFVKALNKALELGMDYKLQLDTPLMWLNKAETWALADYHHQLDLVREETLTCYNGIKGTGCSDCDACNLRAKGLNEFLNNKVQVTQRLKEKLGLK

SEQ ID NO: 41359 - protein, 230 aa, Pseudomonas helmanticensis
  misc_feature (1)..(230): tr|A0A4R7V4W0|A0A4R7V4W0_9PSED 7-cyano-7-deazaguanine s ynthase OS=Pseudomonas helmanticensis OX=1471381 GN=que C PE=3 SV=1
MTEQLNTTEKRAVILLSGGLDSATVVAMARAEGYRCYTMSFDYGQRSHAELHAAARVARDLGVVEHKVIGLNLNGMGGSALTDSSIDIPEELGEGIPVTYVPARNTVFLSLALGWAEVLGARDIFIGVNAVDYSGYPDCRPEFIESFERMANLATKAGVEGNGFRIQAPLQNLSKAQIVQAGVKLGVDYGLTVSCYQADDDGRACGKCDSCRLRAEGFAAAGVDDPTPYF

SEQ ID NO: 41360 - protein, 230 aa, Pseudomonas hunanensis
  misc_feature (1)..(230): tr|A0A2I0C7R2|A0A2I0C7R2_9PSED 7-cyano-7-deazaguanine s ynthase OS=Pseudomonas hunanensis OX=1247546 GN=queC PE =3 SV=1
MEEHVHMTEKRAVILLSGGLDSATVVAMAKGEGYSCYTMSFDYGQRHRAELNAAARVARDLGVVEHKVIGLNLDGIGGSALTDSSIDVPEAPGEGIPVTYVPARNTVFLSLALGWAEVLEARDIFIGVNAVDYSGYPDCRPEFVEAFERMANLATKAGVEGQGFRIQAPLQNMSKAQIVQAGMARGVDYSLTVSCYQADDDGRACGKCDSCRLRADGFKAAGIEDPTRYF

SEQ ID NO: 41361 - protein, 225 aa, Pseudomonas hussainii
  misc_feature (1)..(225): tr|A0A1H7PTH2|A0A1H7PTH2_9PSED 7-cyano-7-deazaguanine s ynthase OS=Pseudomonas hussainii OX=1429083 GN=queC PE= 3 SV=1
MSHEKRAVILLSGGLDSATILAMANAEGFACYTMAFDYGQRHRAELVAAERVSQALGAREHKVVGLNLNGIGGSALTDSSLAVPEGPTEGIPITYVPARNTTFLALALGWAEVLEASDIFIGVNAVDYSGYPDCRPEFIEAFERTANLATRAGVEGAGFKIRAPLQNLSKAEIIQAGVQLGVDYALTISCYQANSQGLACGKCDSCRLRAQGFAAAGVADPTPYA

SEQ ID NO: 41362 - protein, 224 aa, Pseudomonas indica
  misc_feature (1)..(224): tr|A0A1G8W2P0|A0A1G8W2P0_9PSED 7-cyano-7-deazaguanine s ynthase OS=Pseudomonas indica OX=137658 GN=queC PE=3 SV =1
MNEKKAVILLSGGLDSATVVALARAQGYACYSMSFDYGQRHRAELKAAERVARQLGVIEHKVVGLNLNGIGGSALTDESIAVPESPTEGIPVTYVPARNTVFLALALGWAEVLGARDIFIGVNAVDYSGYPDCRPEFIEAFERMANLATKAGVEGQGFRIQAPLQNLSKADIIQAGVRHGVDYALTVSCYQADEAGNACGKCDSCRLRAAGFSAAGVADPTRYR

SEQ ID NO: 41363 - protein, 457 aa, Pseudomonas indica
  misc_feature (1)..(457): tr|A0A1G9EK99|A0A1G9EK99_9PSED 7-cyano-7-deazaguanine s ynthase (Queuosine biosynthesis) OS=Pseudomonas indica OX=137658 GN=SAMN05216186_11090 PE=4 SV=1
MKKFSPLKEMAVDVVESGVRPRKGVLPCHLGQNINFDLEALASFSSQKWQPRVYDALVVAAAVEFCDRTLTRSTMNWGRRFVVRIPVHDHEKWSENAVTRALVEALNLLTGDAWHFEFHARKAPAEPPVQDHMQFPSNAEAVIAYSDGMDSRAVAELESKRLGKRLVRVRVGSKQHDISRKERLKIPFTALPYSVKLDERKNTETSARSRGFKFAVVSAMAAYLVDAPATIVPESGQGALAPALLPVGHGYEDYRNHPVFTKLMERFVNALLDYPIQFQFPRLWKTKGETLREFVETCGDGAGWATTRSCWQQSRQTAVLGSRRQCGICAACILRRLSVHAAGLNEAPETYVWESLSATDFEAGAAKDFSRQTQALREYAIAGVLHFEHLSSIRESTQYELIKRLRTNELARALAETPQTVAENFDRLLQQHAIEWSAFTNDLGPESFVRKWIDYAS

SEQ ID NO: 41364 - protein, 224 aa, Pseudomonas indoloxydans
  misc_feature (1)..(224): tr|A0A2T5PH39|A0A2T5PH39_9PSED 7-cyano-7-deazaguanine s ynthase OS=Pseudomonas indoloxydans OX=404407 GN=queC P E=3 SV=1
MNDKKAVILLSGGLDSATVVAMAKAEGYSCYSMSFDYGQRHRAELQAAERVARQLGVVEHKMIGLNLNGIGGSALTDSSIAVPESPTEGIPATYVPARNTVFLALALGWAEVLEARDIFIGVNAVDYSGYPDCRPEFVEAFERMANLATRAGVEGQGFSIRAPLQQMSKGEIIQAGMRLGVDYALTVSCYQADDEGRACGKCDSCRLRAAGFAAAGVPDVTRYC

SEQ ID NO: 41365 - protein, 224 aa, Pseudomonas japonica
  misc_feature (1)..(224): tr|A0A239FI95|A0A239FI95_9PSED 7-cyano-7-deazaguanine s ynthase OS=Pseudomonas japonica OX=256466 GN=queC PE=3 SV=1
MTEKRAVILLSGGLDSATVVAMAKGEGYSCYTMSFDYGQRHRAELNAAARVARDLGVVEHKVIGLNLDGIGGSALTDSSIDVPEAPSEGIPVTYVPARNTVFLSLALGWAEVLEARDIFIGVNAVDYSGYPDCRPEFVEAFERMANLATKAGVEGQGFRIQAPLQNLSKAQIVQAGMARGVDYSLTVSCYQADDDGRACGKCDSCRLRAEGFAAAGVQDPTRYF

SEQ ID NO: 41366 - protein, 232 aa, Pseudomonas jessenii
  misc_feature (1)..(232): tr|A0A5C4L0Q9|A0A5C4L0Q9_9PSED 7-cyano-7-deazaguanine s ynthase OS=Pseudomonas jessenii OX=77298 GN=queC PE=3 S V=1
MSNKAVIVFSGGQDSTTCLIHALSHYDEIHCITFDYGQRHRAEIEVAQQLAKQLGVTVHKVMDVSLLNELAISSLTRDNIPVPTVNSSGESLPSTFVPGRNILFLTLASIYAYQVQARTVITGVCETDFSGYPDCRDEFVKALNKALELGMDYPLKLDTPLMWLNKAETWALADHYHQLDLVRHQTLTCYNGITGSGCANCDACNLRAKGLNEFLENKDEVMNSLKVKLNLQ

SEQ ID NO: 41367 - protein, 422 aa, Pseudomonas jessenii
  misc_feature (1)..(422): tr|A0A370SRG8|A0A370SRG8_9PSED 7-cyano-7-deazaguanine s ynthase in queuosine biosynthesis OS=Pseudomonas jessen ii OX=77298 GN=DEU51_104195 PE=4 SV=1
MKFVCGPAGFRVPGDDGAMQVVIYGKAEQGQVSVGGYARELIDRAHLEISPRAWDFLSIALSVVAADFTAIRAKSADGWTRVIELAISVQDPVFWNSQARGLENALRFLTTDKWTLSFHPGGFGPPAQLQALHPTEDSVVLLSGGLDSLIGAIDLVAQGVRPYAVSQIVRGDGEKQDHFAQSLGLSRIGLNHVTRSPDAQEPSQRARSIIFLAFGLAVATSLDRYHRGETVPLYICENGFIAINPPLTSCRLGSLSTRTAHPDYLGRLQEIFNAAGINVRIHNPYALKTKGEMLAECRNQDLLKLHAIASTSCGRFQRFGYKHCGRCVPCQVRRASFKRWAAVKDDTPYVHENLGLRDKQHAWFDDVRSVGIALANVAENGFEEWLGHSLFSPFIQDRAGYRAMLARGLDELGQLHHSYQLT

SEQ ID NO: 41368 - protein, 225 aa, Pseudomonas jinjuensis
  misc_feature (1)..(225): tr|A0A1H0A719|A0A1H0A719_9PSED 7-cyano-7-deazaguanine s ynthase OS=Pseudomonas jinjuensis OX=198616 GN=queC PE= 3 SV=1
MTEQKKAVILLSGGLDSATVVAMAKAEGYQCYSMGFDYGQRHRAELQAAERVARQLGVVEHKVIGLNLNGIGGSALTDSSIDVPEAPSEGIPVTYVPARNTVFLSLALGWAEVLGARDIFIGVNAVDYSGYPDCRPEFVEAFERLANLATKAGVEGDGFRIQAPLQHLSKAQIIQAGLARGVDYSLTVSCYQADDEGRACGKCDSCRLRAEGFAAAGVADPTRYF

SEQ ID NO: 41369 - protein, 229 aa, Pseudomonas kairouanensis
  misc_feature (1)..(229): tr|A0A4Z0ASH4|A0A4Z0ASH4_9PSED 7-cyano-7-deazaguanine s ynthase OS=Pseudomonas kairouanensis OX=2293832 GN=queC PE=3 SV=1
MTEHTNDQKRAVILLSGGLDSATVVAMAQAEGYSCYTMSFDYGQRHRAELNAAARVARDMGVVEHKVIGLNLNGIGGSALTDSSIDVPETPGEGIPVTYVPARNTVFLSLALGWAEVLNARDIFIGVNAVDYSGYPDCRPEFVESFERMANLATKAGVEGQGFRILAPLQNLSKADIVKAGVGLGVDYSLTVSCYQADDDGRACGKCDSCRLRAEGFQAAGFTDPTRYF

SEQ ID NO: 41370 - protein, 230 aa, Pseudomonas kilonensis
  misc_feature (1)..(230): tr|A0A1H5CSY3|A0A1H5CSY3_9PSED 7-cyano-7-deazaguanine s ynthase OS=Pseudomonas kilonensis OX=132476 GN=queC PE= 3 SV=1
MTEHSNIAEKRAVILLSGGLDSATVVAMAHAEGYRCYTMSFDYGQRHRAELHAAERVARDQGVVEHKVIGLNLNGIGGSALTDSSIDVPEAPGEGIPVTYVPARNTVFLSLALGWAEVLGARDIFIGVNAVDYSGYPDCRPEFVEAFERMANLATKAGVEGLGFRIQAPLQNLSKADIVKAGVKLGVDYGLTVSCYQADDQGRACGKCDSCRLRAEGFAAAGVSDPTRYF

SEQ ID NO: 41371 - protein, 230 aa, Pseudomonas kilonensis
  misc_feature (1)..(230): tr|A0A0F4XV17|A0A0F4XV17_9PSED 7-cyano-7-deazaguanine s ynthase OS=Pseudomonas kilonensis OX=132476 GN=queC PE= 3 SV=1
MTEHSNIAEKRAVILLSGGLDSATVVAMARAEGYRCYTMSFDYGQRHRAELHAAERVARDQGVVEHKVIGLNLNGIGGSALTDSSIDVPETPGEGIPVTYVPARNTVFLSLALGWAEVLGARDIFIGVNAVDYSGYPDCRPEFVEAFERMANLATKAGVEGQGFRIQAPLQNLSKADIVKAGVKLGVDYGLTVSCYQADDQGRACGKCDSCRLRAEGFAAAGVSDPTRYF

SEQ ID NO: 41372 - protein, 224 aa, Pseudomonas knackmussii
  misc_feature (1)..(224): tr|A0A024HDR5|A0A024HDR5_PSEKB 7-cyano-7-deazaguanine s ynthase OS=Pseudomonas knackmussii (strain DSM 6978 / L MG 23759 / B13) OX=1301098 GN=queC PE=3 SV=1
MTQKKAVILLSGGLDSATVVAMAKADGYSCYTMSFDYGQRHRAELQAAERVARQLGVVEHKVIGFNLNGIGGSALTDSSIDVPEAPSEGIPVTYVPARNTVFLSLALGWAEVLGARDIFIGVNAVDYSGYPDCRPEFVEAFERMANLATKAGVEGDGFRIQAPLQYLSKAQIIQAGLARGVDYALTVSCYQADDEGRACGKCDSCRLRAEGFAAAGVQDPTKYF

SEQ ID NO: 41373 - protein, 213 aa, Pseudomonas knackmussii
  misc_feature (1)..(213): tr|A0A024HM59|A0A024HM59_PSEKB 7-cyano-7-deazaguanine s ynthase OS=Pseudomonas knackmussii (strain DSM 6978 / L MG 23759 / B13) OX=1301098 GN=PKB_4409 PE=3 SV=1
MDCDARRKPQAGGYIFMSIVTLVSGGLDSTLVAKLALEKGLRIFPLFVDYGQRARNREFAACQLAMRKLGLPEPEVAALSGFGKLIRSGLTDPSLHIIDDAFTPGRNMLFLLTAAAYAYQKNADAISIGLLHESTSLFPDQTSQFLQQAEQMISLCMGKSIKVLAPLSSFTKQDVVALAEAKGISQTYSCHLGDDEPCGDCIACNEFKFGGAQ

SEQ ID NO: 41374 - protein, 230 aa, Pseudomonas koreensis
  misc_feature (1)..(230): tr|A0A142NGD2|A0A142NGD2_9PSED 7-cyano-7-deazaguanine s ynthase OS=Pseudomonas koreensis OX=198620 GN=queC PE=3 SV=1
MIEQLNTTEKRAVILLSGGLDSATVVAMARAEGYACYTMSFDYGQRSHAELHAAARVARDLGVVEHKVIGLNLNGMGGSALTDTSIDIPEELGEGIPVTYVPARNTVFLSLALGWAEVLGARDIFIGVNAVDYSGYPDCRPEFIESFERMANLATKAGVEGNGFRIQAPLQNLSKAQIVQAGVKLGVDYGLTVSCYQADDDGRACGKCDSCRLRAEGFAAAGVSDPTPYF

SEQ ID NO: 41375 - protein, 230 aa, Pseudomonas koreensis
  misc_feature (1)..(230): tr|A0A4U3EGR8|A0A4U3EGR8_9PSED 7-cyano-7-deazaguanine s ynthase OS=Pseudomonas koreensis OX=198620 GN=queC PE=3 SV=1
MTEQLNTTEKRAVILLSGGLDSATVVAMARAQGYSCYTMSFDYGQRSHAELHAAARVARDLGVVEHKVIGLNLNGMGGSALTDTSIDIPEELGEGIPVTYVPARNTVFLSLALGWAEVLGARDIFIGVNAVDYSGYPDCRPEFIESFERMANLATKAGVEGNGFRIQAPLQNLSKAQIVEAGVKLGVDYGLTVSCYQADDDGRACGKCDSCRLRAEGFAAAGVDDPTPYF

SEQ ID NO: 41376 - protein, 230 aa, Pseudomonas kribbensis
  misc_feature (1)..(230): tr|A0A345RUV7|A0A345RUV7_9PSED 7-cyano-7-deazaguanine s ynthase OS=Pseudomonas kribbensis OX=1628086 GN=queC PE =3 SV=1
MTEQLNTSQKRAVILLSGGLDSATVVAMARAEGYACYTMSFDYGQRSHAELHAAARVARDLGVVEHKVIGLNLNGMGGSALTDTSIEIPEELGEGIPVTYVPARNTVFLSLALGWAEVLGARDIFIGVNAVDYSGYPDCRPEFIESFERMANLATKAGVEGNGFRIQAPLQNLSKAQIVQTGVKLGVDYGLTVSCYQADDEGRACGKCDSCRLRSEGFAAAGVSDPTPYF

SEQ ID NO: 41377 - protein, 230 aa, Pseudomonas kribbensis
  misc_feature (1)..(230): tr|A0A4Y8VAM1|A0A4Y8VAM1_9PSED 7-cyano-7-deazaguanine s ynthase OS=Pseudomonas kribbensis OX=1628086 GN=queC PE =3 SV=1
MTEQLNTNAKRAVILLSGGLDSATVVAMARAEGYACYTMSFDYGQRSHAELHAAARVARDLGVVEHKVIGLNLNGMGGSALTDTSIDIPEELGEGIPVTYVPARNTVFLSLALGWAEVLGARDIFIGVNAVDYSGYPDCRPEFIESFERMANLATKAGVEGNGFRIQAPLQNLSKAQIVQTGVKLGVDYGLTVSCYQADDNGRACGKCDSCRLRAEGFAAAGISDPTPYF

SEQ ID NO: 41378 - protein, 224 aa, Pseudomonas kunmingensis
  misc_feature (1)..(224): tr|A0A2N8SF24|A0A2N8SF24_9PSED 7-cyano-7-deazaguanine s ynthase OS=Pseudomonas kunmingensis OX=1211807 GN=queC PE=3 SV=1
MNEKKAVILLSGGLDSATVVAMARAQGYACYTMSFDYGQRHRAELQAAERVAQQLGVVEHKVICLDLNGIGGSALTDDSIDVPEVPGEGIPVTYVPARNTVFLSLALGWAEVLGARDIFIGVNAVDYSGYPDCRPEFVAAFERMANLATKAGVEGLGFRIQAPLQEMSKARIVQEGTRLGVDYAATVSCYQADTDGRACGKCDSCRLRAAGFAEAGLADPTRYF

SEQ ID NO: 41379 - protein, 224 aa, Pseudomonas kuykendallii
  misc_feature (1)..(224): tr|A0A1H2ZFX2|A0A1H2ZFX2_9PSED 7-cyano-7-deazaguanine s ynthase OS=Pseudomonas kuykendallii OX=1007099 GN=queC PE=3 SV=1
MSDKKAVILLSGGLDSATVVAMAREQGYACYTMSFDYGQRHRTELAAAERVAKRAGVVEHKVIGLNLNGMGGSALTDTSIAVPEEPGEGIPVTYVPARNMLFLSLAVGWAEVVGARDIFIGVNAVDYSGYPDCRPEFIVAFERVANLATRAGIEGFDFRIQTPLQYLSKAQIIAAGLALGVDYALTVSCYQADDDGRACGRCDSCRLRASGFSAAGVADPTRYY

SEQ ID NO: 41380 - protein, 224 aa, Pseudomonas kuykendallii
  misc_feature (1)..(224): tr|A0A2W5D6B1|A0A2W5D6B1_9PSED 7-cyano-7-deazaguanine s ynthase OS=Pseudomonas kuykendallii OX=1007099 GN=queC PE=3 SV=1
MSDKKAVILLSGGLDSATVVAMAREQGYACYTMSFDYGQRHRAELVAAERVAKQAGVVEHKVIGLNLNGMGGSALTDTSIAVPEEPGEGIPVTYVPARNMLFLSLAVGWAEVVGARDIFIGVNAVDYSGYPDCRPEFIVAFERVANLATRAGIEGFDFRIQAPLQYLSKAQIIAAGVALGVDYALTVSCYQADDDGRACGRCDSCRLRASGFSAAGVADPTRYY

SEQ ID NO: 41381 - protein, 232 aa, Pseudomonas lactis
  misc_feature (1)..(232): tr|A0A219A4N4|A0A219A4N4_9PSED 7-cyano-7-deazaguanine s ynthase OS=Pseudomonas lactis OX=1615674 GN=queC PE=3 S V=1
MSKKAVMVFSGGQDSTTCLIQALPLYDEVHCITFDYGQRHVAEIEVAQKLAKQLGATVHKVMDVSLLNELAISSLTRDNIPVPTVNSSGESLPSTFVPGRNILFLTLAAIYAYQVKAETVITGVCETDFSGYPDCRDEFVKALNQALKLGMEYDVRLDTPLMWLNKAETWALADYHGQLELVREQTLTCYNGIIGTGCGECDACNLRARGLNDYLQNKTPVMQSLKHKLQLK

SEQ ID NO: 41382 - protein, 232 aa, Pseudomonas lactis
  misc_feature (1)..(232): tr|I4K962|I4K962_9PSED 7-cyano-7-deazaguanine synthase OS=Pseudomonas lactis OX=1615674 GN=queC PE=3 SV=1
MSKKAVMVFSGGQDSTTCLIQALPLYDEVHCITFDYGQRHVAEIEVAQKLAKQLGATVHKVMDVSLLNELAISSLTRDNIPVPTVNSSGESLPSTFVPGRNILFLTLAAIYAYQVKAETVITGVCETDFSGYPDCRDEFVKALNQALKLGMEYDVRLDTPLMWLNKAETWALADYHGQLELVREQTLTCYNGIIGTGCGECDACNLRARGLNDYLQNQTNVMQSLKHKLQLK

SEQ ID NO: 41383 - protein, 233 aa, Pseudomonas laurylsulfatiphila
  misc_feature (1)..(233): tr|A0A2S6FJK1|A0A2S6FJK1_9PSED 7-cyano-7-deazaguanine s ynthase OS=Pseudomonas laurylsulfatiphila OX=2011015 GN =queC PE=3 SV=1
MHSKALVLFSGGQDSTTCLAWALERYEHVETIGFDYGQRHLIELECRLNILQAVRNRFPNWAKRLGEDHVLDLKLLGQISDTAMTAEKTIEFEKNGLPNTFVPGRNLLFLTFAATIAYRRDLTVLVGGMCETDYSGYPDCRDNTLKATQVALSLGMDAPVIIETPLMWLNKAQTWRLAEELGDLDFVSLIQEESHTCYLGTRQQKHEWGYGCGTCPACELRKTGYEQYIQIRD

SEQ ID NO: 41384 - protein, 230 aa, Pseudomonas laurylsulfatiphila
  misc_feature (1)..(230): tr|A0A2S6FMF9|A0A2S6FMF9_9PSED 7-cyano-7-deazaguanine s ynthase OS=Pseudomonas laurylsulfatiphila OX=2011015 GN =queC PE=3 SV=1
MTEQLNTAEKRAVILLSGGLDSATVVAMARAKGYSCYTMSFDYGQRSHAELHAAERVARDLGVVEHKVIGLNLNGMGGSALTDSSIDIPEELGEGIPVTYVPARNTVFLSLALGWAEVLGARDIFIGVNAVDYSGYPDCRPEFIESFERMANLATKAGVEGNGFRIQAPLQNLSKAQIVQAGVKLGVNYGLTVSCYQADDDGRACGKCDSCRLRAEGFAAAGISDPTPYF

SEQ ID NO: 41385 - protein, 232 aa, Pseudomonas laurylsulfativorans
  misc_feature (1)..(232): tr|A0A2S3VIC9|A0A2S3VIC9_9PSED 7-cyano-7-deazaguanine s ynthase OS=Pseudomonas laurylsulfativorans OX=1943631 G N=queC PE=3 SV=1
MTKKAVIVFSGGQDSTTCLIHALPIYDEIHCITFDYGQRHRAEIEVAQQLSKKLGVTAHKVLDASLLNDLAISSLTRDNIPVPSANSADGGVPNTFVPGRNILFLTLASIYAYQVGAEAVITGVCETDFSGYPDCRNDFVTSLNNAVELGMDYKLRIETPLMYLSKAETWALADHHKQLDLIRDNTLTCYNGVKGNGCGDCDACSLRAKGLCTYFESKTEVLSSLKHKLNFN

SEQ ID NO: 41386 - protein, 230 aa, Pseudomonas laurylsulfativorans
  misc_feature (1)..(230): tr|A0A2S3VGR8|A0A2S3VGR8_9PSED 7-cyano-7-deazaguanine s ynthase OS=Pseudomonas laurylsulfativorans OX=1943631 G N=queC PE=3 SV=1
MTEQLNTAEKRAVILLSGGLDSATVVAMARAEGYNCYTMSFDYGQRSHAELYAAERVARDLGVVEHKVIGLNLNGMGGSALTDRSIDIPEELGEGIPVTYVPARNTVFLSLALGWAEVLGARDIFIGVNAVDYSGYPDCRPEFIESFERMANLATKAGVEGNGFRIQAPLQNLSKAQIVQAGVKLGVNYGLTVSCYQADDEGRACGKCDSCRLRAEGFAAAGISDPTPYF

SEQ ID NO: 41387 - protein, 232 aa, Pseudomonas libanensis
  misc_feature (1)..(232): tr|A0A0R2YDG8|A0A0R2YDG8_9PSED 7-cyano-7-deazaguanine s ynthase OS=Pseudomonas libanensis OX=75588 GN=queC PE=3 SV=1
MSKKAVMVFSGGQDSTTCLIQALPLYDEVHCITFDYGQRHVAEIEVARTLAKQLGATVHKVMDVSLLNELAISSLTRDNIPVPTVSSSGESLPSTFVPGRNILFLTLAAIYAYQVKAEAVITGVCETDFSGYPDCRDEFVKALNQALKLGMEYDVRLDTPLMWLNKAETWALADYHDQLELVREQTLTCYNGIIGTGCGNCDACNLRARGLNEYLQNKADVMQSLKHKLQLM

SEQ ID NO: 41388 - protein, 230 aa, Pseudomonas lini
  misc_feature (1)..(230): tr|A0A0J6HD12|A0A0J6HD12_9PSED 7-cyano-7-deazaguanine s ynthase OS=Pseudomonas lini OX=163011 GN=queC PE=3 SV=1
MTEQTNTAEKRAVILLSGGLDSATVVAMARAEGYSCYTMSFDYGQRSHAELHAAARVAQDLGVVEHKVIGLNLNGIGGSALTDTSIDVPETPGEGIPVTYVPARNTVFLSLALGWAEVLGARDIFIGVNAVDYSGYPDCRPEFIEAFERMANLATKAGVEGQGFRIQAPLQNLSKAQIVQAGVKLGVDYGLTVSCYQADDNGRACGKCDSCRLRAEGFAAAGVTDPTPYF

SEQ ID NO: 41389 - protein, 230 aa, Pseudomonas lini
  misc_feature (1)..(230): tr|A0A423IXH8|A0A423IXH8_9PSED 7-cyano-7-deazaguanine s ynthase OS=Pseudomonas lini OX=163011 GN=queC PE=3 SV=1
MTEQTNTAEKRAVILLSGGLDSATVVAMARAEGYRCYTMSFDYGQRSHAELHAAARVAQDLGVVEHKVIGLNLNGIGGSALTDTSIDVPETPGEGIPVTYVPARNTVFLSLALGWAEVLGARDIFIGVNAVDYSGYPDCRPEFIEAFERMANLATKAGVEGQGFRIQAPLQNLSKAQIVQAGVKLGVDYGLTVSCYQADDNGRACGKCDSCRLRAEGFAAAGVTDPTPYF

SEQ ID NO: 41390 - protein, 224 aa, Pseudomonas linyingensis
  misc_feature (1)..(224): tr|A0A1H7B277|A0A1H7B277_9PSED 7-cyano-7-deazaguanine s ynthase OS=Pseudomonas linyingensis OX=915471 GN=queC P E=3 SV=1
MTDKKAVILLSGGLDSATVLAMALAEGYACYTMSFDYGQRHRAELQAAERVARQLGAVEHKVVGIDLNGIGGSALTDDSIAVPEEPGEGIPVTYVPARNTLFLSLALGWAEVLGARDIFIGVNAVDYSGYPDCRPEFITAFERLANLATKAGVEGEGFRIRAPLQYLSKAQIIEAGLTRGVDFALTVSCYQADADGRACGRCDSCRLRAEGFRAAGVADPTRYV

SEQ ID NO: 41391 - protein, 219 aa, Pseudomonas litoralis
  misc_feature (1)..(219): tr|A0A1H1LNQ7|A0A1H1LNQ7_9PSED 7-cyano-7-deazaguanine s ynthase OS=Pseudomonas litoralis OX=797277 GN=queC PE=3 SV=1
MNALLICSGGFDSVTLAYRLAAENALGALLTFDYGQRHRKEIDAARLAAERLEVPHLVMDIASIGSQLSGSALTDDIAVPHGHYSEANMKLTVVPNRNAIMLTIAFGVASARSFDSVALAVHGGDHFIYPDCRPDFIQLFGQMQAKALDGVAEVALFAPYVNADKTEIARDAARFTVPVADTWSCYEGGRIHCGRCGTCVERIEAMAQACVADPTPYQD

SEQ ID NO: 41392 - protein, 236 aa, Pseudomonas lundensis
  misc_feature (1)..(236): tr|A0A2C8EPN1|A0A2C8EPN1_9PSED 7-cyano-7-deazaguanine s ynthase OS=Pseudomonas lundensis OX=86185 GN=queC PE=3 SV=1
MSRGAEMTEQSVVREKRAVILLSGGLDSATVVAMARAEGYRCYTMSFDYGQRHRAELDAAARVARDLGVIDHKVIGLNLDGIGGSALTDSSIDVPEAPSEGIPVTYVPARNTVFLSLALGWAEVLDAQDIFIGVNAVDYSGYPDCRPEFVEAFEVMANLATKAGVEGKPFSIKAPLQNLSKAQIVQAGIQLGVDYSLTVSCYQADDQGRACGKCDSCRLRADGFAAAGIKDPTRYF

SEQ ID NO: 41393 - protein, 230 aa, Pseudomonas lundensis
  misc_feature (1)..(230): tr|A0A266N5I9|A0A266N5I9_9PSED 7-cyano-7-deazaguanine s ynthase OS=Pseudomonas lundensis OX=86185 GN=queC PE=3 SV=1
MTEQSVVQEKRAVILLSGGLDSATVVAMARAEGYSCYTMSFDYGQRHRAELDAAARVARDLGVIDHKVIGLNLDGIGGSALTDSSIDVPEAPSEGIPVTYVPARNTVFLSLALGWAEVLEAQDIFIGVNAVDYSGYPDCRPEFVEAFEVMANLATKAGVEGKPFSIKAPLQSLSKAQIVQAGAKLGVDYSLTVSCYQADDQGRACGKCDSCRLRADGFAAAGIKDPTRYF

SEQ ID NO: 41394 - protein, 229 aa, Pseudomonas lurida
  misc_feature (1)..(229): tr|A0A2A9DGE8|A0A2A9DGE8_9PSED 7-cyano-7-deazaguanine s ynthase OS=Pseudomonas lurida OX=244566 GN=queC PE=3 SV =1
MTEHTMDQKRAVILLSGGLDSATVVAMAQEQGYSCYTMSFDYGQRHRAELNAAARVARDMGVVEHKVIGLNLNGIGGSALTDSSIDVPETPGEGIPVTYVPARNTVFLSLALGWAEVLNARDIFIGVNAVDYSGYPDCRPEFVESFERMANLATKAGVEGQGFRILAPLQNLSKADIVKAGVGLGVDYSLTVSCYQADDDGRACGKCDSCRLRAEGFQAAGITDPTRYF

SEQ ID NO: 41395 - protein, 224 aa, Pseudomonas lurida
  misc_feature (1)..(224): tr|A0A2R3I473|A0A2R3I473_9PSED 7-cyano-7-deazaguanine s ynthase OS=Pseudomonas lurida OX=244566 GN=queC PE=3 SV =1
MDQKRAVILLSGGLDSATVVAMAQEQGYSCYTMSFDYGQRHRAELNAAARVARDMGVVEHKVIGLNLNGIGGSALTDSSIDVPETPGEGIPVTYVPARNTVFLSLALGWAEVLNARDIFIGVNAVDYSGYPDCRPEFVESFERMANLATKAGVEGQGFRILAPLQNLSKADIVKAGVGLGVDYSLTVSCYQADDDGRACGKCDSCRLRAEGFQAAGITDPTRYF

SEQ ID NO: 41396 - protein, 229 aa, Pseudomonas lutea
  misc_feature (1)..(229): tr|A0A098STM5|A0A098STM5_9PSED 7-cyano-7-deazaguanine s ynthase OS=Pseudomonas lutea OX=243924 GN=queC PE=3 SV= 1
MSEQSMSDKRAVILLSGGLDSATVVAMAKADGFDCYTMSFDYGQRHRAELQAAERVASDMGVIEHKVIGLNLNGIGGSALTDSSIPVPETAGEGIPVTYVPARNTVFLSLALGWAEVLGARDIFIGVNAVDYSGYPDCRPEFVEAFERMANLATKAGVEGQGFTIRAPLQMLSKADIVKAGTRLGVDYGLTVSCYQADEQGRACGKCDSCRLRAEGFAAAGVTDPTRYF

SEQ ID NO: 41397 - protein, 224 aa, Pseudomonas luteola
  misc_feature (1)..(224): tr|A0A3R8Y4R2|A0A3R8Y4R2_PSELU 7-cyano-7-deazaguanine s ynthase OS=Pseudomonas luteola OX=47886 GN=queC PE=3 SV =1
MNQKKAVILLSGGLDSATVVAMARAEGFACYTMSFDYGQRHRAELRAAERVATQLGVLEHKVIGLNLNGIGGSALTDSTIDVPEAPTEGIPVTYVPARNTVFLSLALGWAEVLEAQHIFIGVNAVDYSGYPDCRPEFVESFERMANLATKAGVEGNGFKIIAPLQFMSKAEIIQWGVANGVDYSLTVSCYKADDEGRACGRCDSCRLRAEGFRAAHLEDPTSYF

SEQ ID NO: 41398 - protein, 229 aa, Pseudomonas luteola
  misc_feature (1)..(229): tr|A0A2X2C9T0|A0A2X2C9T0_PSELU 7-cyano-7-deazaguanine s ynthase OS=Pseudomonas luteola OX=47886 GN=queC PE=3 SV =1
MNQKKAVILLSGGLDSATVVAMARAEGFACYTMSFDYGQRHRAELKAAERVATQLGVVEHKVIGLNLNGIGGSALTDSTIDVPEAPTEGIPVTYVPARNTVFLSLALGWAEVLEAQHIFIGVNAVDYSGYPDCRPEFVESFERMANLATKAGVEGNGFKIIAPLQFMSKAEIIQWGVANGVDYSLTVSCYKADDEGRACGRCDSCRLRAEGFRAAHLEDPTRYFLKKLR

SEQ ID NO: 41399 - protein, 230 aa, Pseudomonas mandelii; identical to SEQ ID NO: 41287
  misc_feature (1)..(230): tr|A0A502IJN0|A0A502IJN0_9PSED 7-cyano-7-deazaguanine s ynthase OS=Pseudomonas mandelii OX=75612 GN=queC PE=3 S V=1

SEQ ID NO: 41400 - protein, 332 aa, Pseudomonas mandelii
  misc_feature (1)..(332): tr|A0A4R7XUC6|A0A4R7XUC6_9PSED 7-cyano-7-deazaguanine s ynthase OS=Pseudomonas mandelii OX=75612 GN=queC PE=3 S V=1
MTKGAFRGALFANKLDCHSPAPAWLCDGWFTQDPQSLTNPIRAHRQYAQENEFAISPYWQLIKQEKAEHLISETSHSKTLSFPIGSMIQRPFRDLPRMKNMSTKAVIVFSGGQDSTTCLIHALPNYDEVHCITFDYGQRHRAEIEVALQLSEKFGITVHKILDASLLNELAISSLTRDNIPVPISSSSGDSLPNTFVPGRNILFLTLASIYAYQVGAQAVITGICGADFSDYPDCRNDFINSLNKSVDLGLGYRLRFENPLMWLNKSEIWALAEYYNQLDLIHYDTLSCYNGLKGSGCTSCSACTLRLNGLNDFLANKTNTMNSLKNKLQLK

SEQ ID NO: 41401 - protein, 225 aa, Pseudomonas marginalis
  misc_feature (1)..(225): tr|A0A3M5QE69|A0A3M5QE69_PSEMA 7-cyano-7-deazaguanine s ynthase OS=Pseudomonas marginalis pv. marginalis OX=974 73 GN=queC PE=3 SV=1
MTDQKRAVILLSGGLDSATLVAMVRAQGYSCYTMSFDYGQRHRAELNAAARVARDLGVVEHKVVGLNLGGMGGSALTDSTIDLPEAPSEGIPVTYVPARNTVFLSLALGWAEVLNARDIFIGVNALDYSGYPDCRPEFVESFERMANLATKAGVEGQGFRIQAPLQNMSKADIVKAGVGLGVDYSLTVSCYQADEGGRACGKCDACRLRAEGFKMAGITDPTRYF

SEQ ID NO: 41402 - protein, 229 aa, Pseudomonas marginalis
  misc_feature (1)..(229): tr|A0A0W0LSN9|A0A0W0LSN9_PSEMA 7-cyano-7-deazaguanine s ynthase OS=Pseudomonas marginalis ICMP 11289 OX=1198318 GN=queC PE=3 SV=1
MTELNMTEKRAVILLSGGLDSATVVAMARAEGYACYTMSFDYGQRHRAELDAAAQVARDLGAVEHKVIGLNLNGIGGSALTDSSIAVPEAPSEGIPVTYVPARNTVFLSLALGWAEVLGARDIFIGVNAVDYSGYPDCRPEFVESFERMANLATKAGVEGQGFTIRAPLQNLSKSDIVKAGTALGVDYALTVSCYQADDQGRACGKCDSCRLRAEGFAAAGVADPTRYF

SEQ ID NO: 41403 - protein, 229 aa, Pseudomonas marincola
  misc_feature (1)..(229): tr|A0A1I7E7T8|A0A1I7E7T8_9PSED 7-cyano-7-deazaguanine s ynthase OS=Pseudomonas marincola OX=437900 GN=queC PE=3 SV=1
MSDKKAVILLSGGLDSATVVAMAKADGYSCYTMSFDYGQRHRSELQAAERVARQLGVVEHKVIGLNLNGMGGSALTDASIAVPENVAGAAPAPGIPVTYVPARNTVFLSLALGWAEVLGARDIFIGVNAVDYSGYPDCRPEFVEAFERMANLATKAGVEGNGFRIQAPLQNMSKAEIVAAGIALGVDYAQTVSCYQADDDGRACGKCDSCSLRAAGFAAAGVADATRYV

SEQ ID NO: 41404 - protein, 230 aa, Pseudomonas mediterranea
  misc_feature (1)..(230): tr|A0A0A4GIJ5|A0A0A4GIJ5_9PSED 7-cyano-7-deazaguanine s ynthase OS=Pseudomonas mediterranea CFBP 5447 OX=134805 8 GN=queC PE=3 SV=1
MTEQTNIAEKRAVILLSGGLDSATVVAMARAEGYRCYTMSFDYGQRHRAELHAAERVARDLGVVEHKVIGLNLNGIGGSALTDSTIDVPEAPSEGIPVTYVPARNTVFLSLALGWAEVLEARDIFIGVNAVDYSGYPDCRPEFVEAFERMANLATKAGVEGQGFRIQAPLQNLSKADIVRAGVKLGVNYGLTVSCYQADDQGRACGKCDSCRLRAEGFAAAGVSDPTPYF

SEQ ID NO: 41405 - protein, 236 aa, Pseudomonas meliae
  misc_feature (1)..(236): tr|A0A0N8S241|A0A0N8S241_9PSED 7-cyano-7-deazaguanine s ynthase OS=Pseudomonas meliae OX=86176 GN=queC PE=3 SV= 1
MTSRGADMSELTNTEKRAVILLSGGLDSATVVAMARAEGYACYTMSFDYGQRHRAELDAAARVARDLGAVEHKVIGLNLNGIGGSALTDSSIAVPESPSEGIPITYVPARNTVFLSLALGWAEVLGARDIFIGVNAVDYSGYPDCRPEFVESFERMANLATKAGVEGQGFTIRAPLQNLSKSDIVKAGAALGVDYSLTVSCYQADDQGRACGKCDSCRLRAEGFTAAGMADPTRYF

SEQ ID NO: 41406 - protein, 201 aa, Pseudomonas meliae
  misc_feature (1)..(201): tr|A0A0P9X693|A0A0P9X693_9PSED 7-cyano-7-deazaguanine s ynthase OS=Pseudomonas meliae OX=86176 GN=ALO64_03512 P E=3 SV=1
MKIGLLLSGGMDSLALAWWKRSDIAFTLNYGQLAAQAEIEASRTICRQLNISHQVIEIDCRQLGSGDMAGTRADDLAPASDWWPYRNQMLVTLTAMKAISFGVTHLWLGTVRSDGFHKDGSPEFMTAISHLLSLQEGGIVVEAPAIGLSTAELVRLSGIPADLLAWAHSCHKSHVACGNCRGCNKYMEVFQEVGYDLDRPG

SEQ ID NO: 41407 - protein, 224 aa, Pseudomonas mendocina
  misc_feature (1)..(224): sp|A4XRT0|QUEC_PSEMY 7-cyano-7-deazaguanine synthase OS =Pseudomonas mendocina (strain ymp) OX=399739 GN=queC P E=3 SV=1
MSDKKAVILLSGGLDSATVVAMARAEGYACYSMSFDYGQRHRAELQAAERVARQLGVVEHKVVGLNLNGIGGSALTDSSIAVPETPGEGIPVTYVPARNTVFLSLALGWAEVLGARDIFIGVNAVDYSGYPDCRPEFVEAFERMANLATKAGVEGQGFAIRAPLQQMSKGEIIQAGMRLGVDYALTVSCYQADDDGRACGKCDSCRLRAAGFAAAGVPDATRYF

SEQ ID NO: 41408 - protein, 224 aa, Pseudomonas mendocina
  misc_feature (1)..(224): tr|A0A379IYA0|A0A379IYA0_PSEME 7-cyano-7-deazaguanine s ynthase OS=Pseudomonas mendocina OX=300 GN=queC PE=3 SV =1
MNDKKAVILLSGGLDSATVVAMARAEGYACYSMSFDYGQRHRAELQAAERVARQLGVVEHKVIGLNLNGIGGSALTDSSIAVPEAPTEGIPSTYVPARNTVFLALALGWAEVLEARDIFIGVNAVDYSGYPDCRPEFVEAFERMANLATRAGVQGQSFSIRAPLQQMSKAEIIQVGMSLDVDYALTVSCYQADDDGRACGKCDSCRLRAAGFVAAGVPDATRYF

SEQ ID NO: 41409 - protein, 244 aa, [Pseudomonas] mesoacidophila
  misc_feature (1)..(244): tr|A0A2A4FF47|A0A2A4FF47_9BURK 7-cyano-7-deazaguanine s ynthase OS=[Pseudomonas] mesoacidophila OX=265293 GN=qu eC PE=3 SV=1
MIRTDAKDGALVLFSGGQDSATCVAWALERYQTVETLGFDYGQRHRVELECREGVRDALKRQFPAWAGRLGDDHMIDLSVLGAISDTAMTRAIEIETSANGLPNTFVPGRNLLFMTIAAAIAYRRGLRVLVGGMCETDFSGYPDCRDDTMKALQVALNLGMDTRVVLETPLMWLDKAQTWQLAEQLGGQALVELIRVETHTCYVGERAELHDWGFGCGECPACKLRKRGYEAYLKGERVTEAPL

SEQ ID NO: 41410 - protein, 230 aa, Pseudomonas migulae
  misc_feature (1)..(230): tr|A0A1H5MKM9|A0A1H5MKM9_9PSED 7-cyano-7-deazaguanine s ynthase OS=Pseudomonas migulae OX=78543 GN=queC PE=3 SV =1
MTEQLNTAEKRAVILLSGGLDSATVVAMARAEGYSCYTMSFDYGQRSHAELHAAERVARDLGVVEHKVIGLNLNGIGGSALTDTSIDVPEETGEGIPVTYVPARNTVFLSLALGWAEVLGARDIFIGVNAVDYSGYPDCRPEFIESFERMANLATKAGVEGNGFRIQAPLQNLSKAQIVQAGVKLGVNYGLTVSCYQADDHGRACGKCDSCRLRAEGFAAAGISDPTPYF

SEQ ID NO: 41411 - protein, 230 aa, Pseudomonas mohnii
  misc_feature (1)..(230): tr|A0A1H4RKF9|A0A1H4RKF9_9PSED 7-cyano-7-deazaguanine s ynthase OS=Pseudomonas mohnii OX=395600 GN=queC PE=3 SV =1
MTEQLNTAEKRAVILLSGGLDSATVVAMARADGYSCYTMSFDYGQRHRAELHAAERVARDLGVVEHKVIGLNLNGIGGSALTDSSIDVPEAPSEGIPVTYVPARNTVFLSLALGWAEVLGARDIFIGVNAVDYSGYPDCRPEFVEAFERMANLATKAGVEGQGFRIQAPLQNLSKAQIVQAGVKLGVDYSLTVSCYQADDNGHACGKCDSCRLRAEGFAAAGISDPTPYF

SEQ ID NO: 41412 - protein, 224 aa, Pseudomonas monteilii
  misc_feature (1)..(224): tr|V9V6F5|V9V6F5_9PSED 7-cyano-7-deazaguanine synthase OS=Pseudomonas monteilii SB3101 OX=1435058 GN=queC PE=3 SV=1
MTDKRAVILLSGGLDSATVVAMAKAEGYSCYTMSFDYGQRHRAELNAAARVARDLGVVEHKVIGLNLDGIGGSALTDSSIDVPETPGEGIPVTYVPARNTVFLSLALGWAEVLEARDIFIGVNAVDYSGYPDCRPEFVEAFERMANLATKAGVEGQGFRIQAPLQNMSKAQIVQAGMARGVDYSLTVSCYQADDDGRACGKCDSCRLRADGFKAAGVEDPTRYF

SEQ ID NO: 41413 - protein, 224 aa, Pseudomonas monteilii
  misc_feature (1)..(224): tr|A0A2N1ISD7|A0A2N1ISD7_9PSED 7-cyano-7-deazaguanine s ynthase OS=Pseudomonas monteilii OX=76759 GN=queC PE=3 SV=1
MTEKRAVILLSGGLDSATVVAMAKAEGYSCYTMSFDYGQRHRAELNAAARVARDLGVVEHKVIGLNLDGIGGSALTDSSIDVPEAPSEGIPVTYVPARNTVFLSLALGWAEVLEARDIFIGVNAVDYSGYPDCRPEFVEAFERMANLATKAGVEGQGFRIQAPLQNMSKAQIVQAGMARGVDYSLTVSCYQADDDGRACGKCDSCRLRADGFKAAGIEDPTRYF

SEQ ID NO: 41414 - protein, 230 aa, Pseudomonas moorei
  misc_feature (1)..(230): tr|A0A1H1HKR1|A0A1H1HKR1_9PSED 7-cyano-7-deazaguanine s ynthase OS=Pseudomonas moorei OX=395599 GN=queC PE=3 SV =1
MTEQLNTAEKRAVILLSGGLDSATVVAMARAEGYSCYTMSFDYGQRHRAELHAAERVARDLGVVEHKVIGLNLNGIGGSALTDSSIDVPESPSEGIPVTYVPARNTVFLSLALGWAEVLGARDIFIGVNAVDYSGYPDCRPEFVEAFERMANLATKAGVEGQGFRIQAPLQNLSKAQIVQAGVKLGVDYSLTVSCYQADDNGRACGKCDSCRLRAEGFSAAGISDPTPYF

SEQ ID NO: 41415 - protein, 230 aa, Pseudomonas moorei
  misc_feature (1)..(230): tr|A0A4Q7H991|A0A4Q7H991_9PSED 7-cyano-7-deazaguanine s ynthase OS=Pseudomonas moorei OX=395599 GN=queC PE=3 SV =1
MTEQLNTAEKRAVILLSGGLDSATVVAMARADGYSCYTMSFDYGQRHRAELHAAERVARDLGVVEHKVIGLNLNGIGGSALTDSSIDVPEAPSEGIPVTYVPARNTVFLSLALGWAEVLGARDIFIGVNAVDYSGYPDCRPEFVEAFERMANLATKAGVEGQGFRIQAPLQNLSKAQIVQAGVKLGVDYSLTVSCYQADDNGRACGKCDSCRLRAEGFAAAGISDPTPYF

SEQ ID NO: 41416 - protein, 230 aa, Pseudomonas moraviensis
  misc_feature (1)..(230): tr|V8R531|V8R531_9PSED 7-cyano-7-deazaguanine synthase OS=Pseudomonas moraviensis R28-S OX=1395516 GN=queC PE= 3 SV=1
MTEQLNTTQKRAVILLSGGLDSATVVAMARAEGYACYTMSFDYGQRSHAELHAAARVARDLGVVEHKVIGLNLNGMGGSALTDTSIDIPEELGEGIPVTYVPARNTVFLSLALGWAEVLGARDIFIGVNAVDYSGYPDCRPEFIESFERMANLATKAGVEGNGFRIQAPLQNLSKAQIVQAGVKLGVDYGLTVSCYQADDDGRACGKCDSCRLRAEGFAAAGVDDPTPYF

SEQ ID NO: 41417 - protein, 230 aa, Pseudomonas moraviensis
  misc_feature (1)..(230): tr|A0A1Q3I7Z6|A0A1Q3I7Z6_9PSED 7-cyano-7-deazaguanine s ynthase OS=Pseudomonas moraviensis OX=321662 GN=queC PE =3 SV=1
MIEQLNTTEKRAVILLSGGLDSATVVAMARAEGYACYTMSFDYGQRSHAELHAAARVARDLGVVEHKVIGLNLNGMGGSALTDTSIDIPEELGEGIPVTYVPARNTVFLSLALGWAEVLGARDIFIGVNAVDYSGYPDCRPEFIESFERMANLATKAGVEGNGFRIQAPLQNLSKAQIVQAGVKLGVDYGLTVSCYQADDDGRACGKCDSCRLRAEGFAAAGVDDPTPYF

SEQ ID NO: 41418 - protein, 224 aa, Pseudomonas mosselii
  misc_feature (1)..(224): tr|A0A2V4KYU8|A0A2V4KYU8_9PSED 7-cyano-7-deazaguanine s ynthase OS=Pseudomonas mosselii OX=78327 GN=queC PE=3 S V=1
MTDKRAVILLSGGLDSATVVAMAKADGYQCYTMSFDYGQRHRAELNAAARVARDLGVVEHKVIGLNLDGIGGSALTDSSIDVPEAPSEGIPVTYVPARNTVFLSLALGWAEVLEARDIFIGVNAVDYSGYPDCRPEFVEAFERMANLATKAGVEGQGFRIQAPLQNLSKAQIVQAGIARGVDYSLTVSCYQADDDGRACGKCDSCRLRADGFKAAGVEDPTRYF

SEQ ID NO: 41419 - protein, 224 aa, Pseudomonas mosselii
  misc_feature (1)..(224): tr|A0A1X1NT26|A0A1X1NT26_9PSED 7-cyano-7-deazaguanine s ynthase OS=Pseudomonas mosselii OX=78327 GN=queC PE=3 S V=1
MTDKRAVILLSGGLDSATVVAMAKADGYQCYTMSFDYGQRHRAELNAAARVARDLGVVEHKVIGLNLDGIGGSALTDSSIDVPEAPSEGIPVTYVPARNTVFLSLALGWAEVLEARDIFIGVNAVDYSGYPDCRPEFVEAFERMANLATKAGVQGQGFRIQAPLQNLSKAQIVQAGIARGVDYSLTVSCYQADDDGRACGKCDSCRLRADGFKAAGVEDPTRYF

SEQ ID NO: 41420 - protein, 229 aa, Pseudomonas mucidolens
  misc_feature (1)..(229): tr|A0A1H2LV94|A0A1H2LV94_9PSED 7-cyano-7-deazaguanine s ynthase OS=Pseudomonas mucidolens OX=46679 GN=queC PE=3 SV=1
MTEQTIEQKRAVILLSGGLDSATVVALARAEGYSCYTMSFDYGQRSRAELDAAARVARDLGVVEHKVIGLNLNGIGGSALTDSAIDVPESPTEGIPVTYVPARNTVFLSLALGWAEVINARDIFIGVNAVDYSGYPDCRPEFVESFERMANLATKAGVEGEGFRILAPLQNLSKADIIKAGVGLGVDYSLTVSCYQADADGRACGKCDSCRLRAEGFQAAGIEDPTRYF

SEQ ID NO: 41421 - protein, 231 aa, Pseudomonas mucidolens
  misc_feature (1)..(231): tr|A0A1H2NMU2|A0A1H2NMU2_9PSED 7-cyano-7-deazaguanine s ynthase OS=Pseudomonas mucidolens OX=46679 GN=queC PE=3 SV=1
MNRKAVIVFSGGQDSTTCLIHALPIYDEIHCITFDYGQRHRAEIEISQQLSKKLGVAVHKVLDVSLLNALASSSLTRDHIPAPSISSSTESLPDTFVPGRNILFLTLAAIYAYQVRAETVITGVCETDFSGYPDYRDEFVKTLNNAIELGMDYKLHIETPLMWLNKAETWALADHHNKLDLIREHTLSCYNGIKGNGCANCDACNLRAKGLKTFMENRTQIGLSLKTKLTL

SEQ ID NO: 41422 - protein, 229 aa, Pseudomonas nabeulensis
  misc_feature (1)..(229): tr|A0A4Z0BAJ4|A0A4Z0BAJ4_9PSED 7-cyano-7-deazaguanine s ynthase OS=Pseudomonas nabeulensis OX=2293833 GN=queC P E=3 SV=1
MTEPTNDQKRAVILLSGGLDSATVVAMAQAEGYSCYTMSFDYGQRHRAELNAAARVARDMGVVEHKVIGLNLNGIGGSALTDSSIDVPEAPGEGIPVTYVPARNTVFLSLALGWAEVLNARDIFIGVNAVDYSGYPDCRPEFVESFERMANLATKAGVEGQGFRILAPLQNLSKADIVKAGVGLGVDYSLTVSCYQADDDGRACGKCDSCRLRAEGFQAAGFTDPTRYF

SEQ ID NO: 41423 - protein, 224 aa, Pseudomonas nitroreducens
  misc_feature (1)..(224): tr|A0A246FD48|A0A246FD48_9PSED 7-cyano-7-deazaguanine s ynthase OS=Pseudomonas nitroreducens OX=46680 GN=queC P E=3 SV=1
MNGKKAVILLSGGLDSATVIAMAKADGYDCYTMSFDYGQRHRAELQAAERVARQLGVIEHKVIGLNLNGIGGSALTDTSIEVPEAPSEGIPVTYVPARNTVFLSLALGWAEVLGARDIFIGVNAVDYSGYPDCRPEFVEAFERMANLATKAGVEGDGFRIQAPLQFLSKAQIIEAGIAQGVDYSLTVSCYQADDDGRACGKCDSCRLRSEGFSAAGISDPTRYF

SEQ ID NO: 41424 - protein, 230 aa, Pseudomonas nitroreducens
  misc_feature (1)..(230): tr|A0A239BRH0|A0A239BRH0_9PSED 7-cyano-7-deazaguanine s ynthase OS=Pseudomonas nitroreducens OX=46680 GN=queC P E=3 SV=1
MSDKNAANDKKAVILLSGGLDSATVVAMAKAEGYACYTMSFDYGQRHRAELQAAERVARQLGVVEHKVIGLDLNGIGGSALTDSSIDVPQAPSEGIPVTYVPARNTVFLSLALGWAEVLGARDIFIGVNAVDYSGYPDCRPEFVEAFERMANLATKAGVEGDGFRIQAPLQFLSKAQIIEAGVARGVDYGLTVSCYQADDEGRACRKCDSCRLRSEGFSAAGISDPTRYF

SEQ ID NO: 41425 - protein, 231 aa, Pseudomonas oceani
  misc_feature (1)..(231): tr|A0A2P4EZ97|A0A2P4EZ97_9PSED 7-cyano-7-deazaguanine s ynthase OS=Pseudomonas oceani OX=1708783 GN=queC PE=3 S V=1
MSNANTVSDLPAAVVLLSGGLDSATVLAMAQAQGLRCYTMSFDYGQRHRAELQAAERVARAAEVIEHKVVGMNLNGIGGSALTDDSIAVPEGPQDGIPVTYVPARNTLFLSLALGWAEVLGAREIFIGVNAVDYSGYPDCRPEFVEAFERLANLATRAGVEGDGFRIRAPLQYMSKAEIVQAGVALGVDYSQTVSCYQADADGRACGRCDSCRLRAEGFSAAGLADPTRYR

SEQ ID NO: 41426 - protein, 105 aa, Pseudomonas oleovorans
  misc_feature (1)..(105): tr|A0A0F3GKG8|A0A0F3GKG8_PSEOL 7-cyano-7-deazaguanine s ynthase (Fragment) OS=Pseudomonas oleovorans OX=301 GN= N619_00350 PE=3 SV=1
IGVNAVDYSGYPDCRPEFVEAFERMANLATKAGVEGQGFAIRAPLQQMSKGEIIQAGMRLGVDYALTVSCYQADDDGRACGKCDSCRLRAAGFAAAGVPDATRYC

SEQ ID NO: 41427 - protein, 224 aa, Pseudomonas oleovorans
  misc_feature (1)..(224): tr|A0A3D9EFS2|A0A3D9EFS2_PSEOL 7-cyano-7-deazaguanine s ynthase OS=Pseudomonas oleovorans OX=301 GN=queC PE=3 S V=1
MSQPKAVILLSGGLDSATIVAMAKAQGFACYTMSFDYGQRHRAELQAAERVARQLGVVEHKVIGLDLNGIGGSALTDPDIAVPETPGEGIPVTYVPARNTVFLSLALGWAEVLGARHLFIGVNAVDYSGYPDCRPEFVEAFERLANLATKAGVEGDTFKIEAPLQFLSKAQIVQAGSQLGVDYALTVSCYQADDEGQACGRCDSCRLRAEGFKAAGISDPTRYQ

SEQ ID NO: 41428 - protein, 232 aa, Pseudomonas orientalis
  misc_feature (1)..(232): tr|A0A0R3A587|A0A0R3A587_9PSED 7-cyano-7-deazaguanine s ynthase OS=Pseudomonas orientalis OX=76758 GN=queC PE=3 SV=1
MSKKAVMVFSGGQDSTTCLIQALKQYDEVHCITFDYGQRHVAEIDVARTLAKQLGATVHKVMDVSLLNELAISSLTRDNIPVPTVNSSGESLPSTFVPGRNILFLTLAAIYAYQVKAESVITGVCETDFSGYPDCRDEFVKALNQALKLGMEYDVRLDTPLMWLNKAETWALADYYEQLKLVREQTLTCYNGVIGTGCGNCDACNLRARGLNEYLQNKADVMHSLKHKLQLT

SEQ ID NO: 41429 - protein, 232 aa, Pseudomonas orientalis
  misc_feature (1)..(232): tr|A0A3G7X4V9|A0A3G7X4V9_9PSED 7-cyano-7-deazaguanine s ynthase OS=Pseudomonas orientalis OX=76758 GN=queC PE=3 SV=1
MSKKAVMVFSGGQDSTTCLIQALKRYDEVHCITFDYGQRHVAEIDVARTLARQLGATVHKVMDVSLLNELAISSLTRDNIPVPTVNSSGESLPSTFVPGRNILFLTLAAIYAYQVKAESVITGVCETDFSGYPDCRDEFVKALNQALKLGMEYDVRLDTPLMWLNKAETWALADYYEQLELVREQTLTCYNGVIGTGCGNCDACNLRARGLNEYLQSKADVMHSLKHKLQLK

SEQ ID NO: 41430 - protein, 224 aa, Pseudomonas oryzae
  misc_feature (1)..(224): tr|A0A1H1UQC1|A0A1H1UQC1_9PSED 7-cyano-7-deazaguanine s ynthase OS=Pseudomonas oryzae OX=1392877 GN=queC PE=3 S V=1
MSDKKAVILLSGGLDSATVLAMARAEGYACYTMSFDYGQRHRAELQAAERVARQLGAVEHKVVGIDLNGIGGSALTDSSIAVPETPGEGIPVTYVPARNTLFLSLALGWAEVLGASDIFIGVNAVDYSGYPDCRPEFIDAFERLANLATRAGVEGEGFRIRAPLQYLSKAEIIRAGIDRGVDFALTVSCYQADGEGRACGRCDSCRLRAEGFRAAGVEDPTRYS

SEQ ID NO: 41431 - protein, 224 aa, Pseudomonas oryzihabitans
  misc_feature (1)..(224): tr|A0A2Z5AAK8|A0A2Z5AAK8_9PSED 7-cyano-7-deazaguanine s ynthase OS=Pseudomonas oryzihabitans OX=47885 GN=queC P E=3 SV=1
MNQPKAVILLSGGLDSATIVAMAKAQGFACYTMSFDYGQRHRAELQAAERVARQLGVVEHKVIGLDLNGIGGSALTDPDIAVPETPGEGIPVTYVPARNTVFLSLALGWAEVLGARHLFIGVNAVDYSGYPDCRPEFVEAFERLANLATKAGVEGDSFKIEAPLQFLSKAQIVQAGSQLGVDYGLTVSCYQADDEGKACGRCDSCRLRAEGFKAAGISDPTRYQ

SEQ ID NO: 41432 - protein, 224 aa, Pseudomonas oryzihabitans
  misc_feature (1)..(224): tr|A0A178LDZ0|A0A178LDZ0_9PSED 7-cyano-7-deazaguanine s ynthase OS=Pseudomonas oryzihabitans OX=47885 GN=queC P E=3 SV=1
MSQPKAVILLSGGLDSATIVAMAKAQGFACYTMSFDYGQRHRAELQAAERVARQLGVVEHKVIGLDLNGIGGSALTDPDIAVPETPGEGIPVTYVPARNTVFLSLALGWAEVIGARHLFIGVNAVDYSGYPDCRPEFVEAFERLANLATKAGVEGDTFRIEAPLQYLSKAQIVETGTRLGVDYGLTVSCYQANGEGEACGRCDSCRLRAEGFKAAKISDPTRYQ

SEQ ID NO: 41433 - protein, 224 aa, Pseudomonas otitidis
  misc_feature (1)..(224): tr|A0A1I0UKI9|A0A1I0UKI9_9PSED 7-cyano-7-deazaguanine s ynthase OS=Pseudomonas otitidis OX=319939 GN=queC PE=3 SV=1
MSDKKAVILLSGGLDSATVVALARADGYVCYTMSFDYGQRHRAELQAAERVARQLGVVEHKVIGLNLNGIGGSALTDDSIAVPESPTEGIPVTYVPARNTVFLSLALGWAEVLGARDIFIGVNAVDYSGYPDCRPEFVDAFERMANLATKAGVEGQGFRIQAPLQNLSKAEIIRAGIAQGVDYGLTVSCYQADDQGRACGKCDSCRLRAAGFAAAGVEDPTPYF

SEQ ID NO: 41434 - protein, 230 aa, Pseudomonas pachastrellae
  misc_feature (1)..(230): tr|A0A1S8DFX2|A0A1S8DFX2_9PSED 7-cyano-7-deazaguanine s ynthase OS=Pseudomonas pachastrellae OX=254161 GN=queC PE=3 SV=1
MSAKPDSSARAVVLLSGGLDSATVLAMAQAEGLACYTMSFDYGQRHRAELAAAERVASAAGVIEHKVIDMNLNGIGGSALTDDTIAVPEGPQQGIPVTYVPARNTLFLALALGWAEVLEARDIYIGVNAVDYSGYPDCRPAFVEAFERLANLATRAGVEGEGFRIRAPLQHLSKAQIIQAGQALGVDYSQTVSCYQADEQGRACGVCDSCRLRAAGFAAAGVPDATRYQR

SEQ ID NO: 41435 - protein, 232 aa, Pseudomonas palleroniana
  misc_feature (1)..(232): tr|A0A0X7K5M0|A0A0X7K5M0_9PSED 7-cyano-7-deazaguanine s ynthase OS=Pseudomonas palleroniana OX=191390 GN=queC P E=3 SV=1
MSKKAVVVFSGGQDSTTCLIQALTRYDEVHCITFDYGQRHVAEIEVAQQLAKQLGATVHKVMDVSLLGELAISSLTRDNIPVPTVNSSGESLPSTFVPGRNILFLTLASIYAYQVKAETVITGVCETDFSGYPDCRDEFVKALNKALELGMEYKLHLDTPLMWLNKAETWALADYHNQLELVRHQTLTCYNGIIGTGCGNCDACNLRARGLNDYLQNKAEVMQSLKQKLHLN

SEQ ID NO: 41436 - protein, 232 aa, Pseudomonas palleroniana
  misc_feature (1)..(232): tr|A0A1H5M167|A0A1H5M167_9PSED 7-cyano-7-deazaguanine s ynthase OS=Pseudomonas palleroniana OX=191390 GN=queC P E=3 SV=1
MSKKAVVVFSGGQDSTTCLIQALTRYDEVHCITFDYGQRHVAEIEVAQQLAKQLGATVHKVMDVSLLGELAISSLTRDNIPVPTVNSSGESLPSTFVPGRNILFLTLASIYAYQVKAETVITGVCETDFSGYPDCRDEFVKALNKALELGMEYKLHLDTPLMWLNKAETWALADYHNQLELVRHQTLTCYNGIIGTGCGNCDACNLRARGLNDYLQNKAEVMQSLKQKLQLN

SEQ ID NO: 41437 - protein, 229 aa, Pseudomonas panacis
  misc_feature (1)..(229): tr|A0A1H4IMW4|A0A1H4IMW4_PSEPA 7-cyano-7-deazaguanine s ynthase OS=Pseudomonas panacis OX=307251 GN=queC PE=3 S V=1
MTEQPIDQKRAVILLSGGLDSATVVAMAQAEGYTCYTMSFDYGQRHRAELNAAARVARDMGVAEHKVIGLNLNGIGGSALTDSSIDVPEAPSEGIPITYVPARNTVFLSLALGWAEVLNARDIFIGVNAVDYSGYPDCRPEFIESFERMANLATKAGVEGQGFRILAPLQNLSKADIVKAGVGLGVDYSLTVSCYQADDDGRACGKCDSCRLRAEGFKMAGITDPTRYF

SEQ ID NO: 41438 - protein, 224 aa, Pseudomonas panipatensis
  misc_feature (1)..(224): tr|A0A1G8GNP3|A0A1G8GNP3_9PSED 7-cyano-7-deazaguanine s ynthase OS=Pseudomonas panipatensis OX=428992 GN=queC P E=3 SV=1
MNEKKAVILLSGGLDSATVVAMAKAEGYACYTMSFDYGQRHRAELQAAERVARQLGVVEHKVIGLNLNGIGGSALTDSSIAVPEAPSAGIPVTYVPARNTVFLSLALGWAEVLGARDIFIGVNAVDYSGYPDCRPEFVEAFERMANLATKAGVEGDGFRIQAPLQFLSKAQIIEAGMARGVDYALTVSCYQADDQGQACGKCDSCRLRAEGFAAAGVQDPTRYF

SEQ ID NO: 41439 - protein, 224 aa, Pseudomonas parafulva
  misc_feature (1)..(224): tr|A0A0A7JQD1|A0A0A7JQD1_9PSED 7-cyano-7-deazaguanine s ynthase OS=Pseudomonas parafulva OX=157782 GN=queC PE=3 SV=1
MTDKRAVILLSGGLDSATVVAMAKADGYSCYTMSFDYGQRHRAELNAAARVARDQGVVEHKVIGLNLDGIGGSALTDSSIDVPEAPTEGIPVTYVPARNTVFLSLALGWAEVLQARDIFIGVNAVDYSGYPDCRPEFVEAFERMANLATKAGVEGQGFRIQAPLQNLSKAQIVQAGVARGVDYSLTVSCYQADDDGRACGKCDSCRLRAEGFKAAGVADPTRYF

SEQ ID NO: 41440 - protein, 224 aa, Pseudomonas parafulva
  misc_feature (1)..(224): tr|A0A147GFD8|A0A147GFD8_9PSED 7-cyano-7-deazaguanine s ynthase OS=Pseudomonas parafulva OX=157782 GN=queC PE=3 SV=1
MTDKRAVILLSGGLDSATVVAMAKAQGYACYTMSFDYGQRHRAELNAAARVAQDLGVVEHKVIGLNLDGIGGSALTDSSIDVPETPGEGIPVTYVPARNTVFLSLALGWAEVLQARDIFIGVNAVDYSGYPDCRPEFVEAFERMANLATKAGVEGQGFRIQAPLQNMSKAQIVQAGVAHGVDYSLTVSCYQADDDGRACGKCDSCRLRADGFKAASVADPTRYF

SEQ ID NO: 41441 - protein, 232 aa, Pseudomonas paralactis
  misc_feature (1)..(232): tr|A0A0R3A9T8|A0A0R3A9T8_9PSED 7-cyano-7-deazaguanine s ynthase OS=Pseudomonas paralactis OX=1615673 GN=queC PE =3 SV=1
MSKKAVMVFSGGQDSTTCLIQALKHYDEVHCITFDYGQRHVAEIEVARKLAKQLGATVHKVMDVSLLNELAISSLTRDNIPVPTVNSSGESLPSTFVPGRNILFLTLAAIYAYQVKAEAVITGVCETDFSGYPDCRDEFVKALNQALKLGMEYDVRLDTPLMWLNKAETWALADYHDQLELVREQTLTCYNGVIGTGCGNCDACNLRARGLNDYLQNKTHVMQSLKHKLQLK

SEQ ID NO: 41442 - protein, 240 aa, Pseudomonas pelagia
  misc_feature (1)..(240): tr|A0A2A4AWG2|A0A2A4AWG2_9PSED 7-cyano-7-deazaguanine s ynthase OS=Pseudomonas pelagia OX=553151 GN=queC PE=3 S V=1
MTSQDIDMTDAMKKKAVVLLSGGLDSATVLAMAQADGYSCYTLSFDYGQRHRAELDAAKRLAASAAVVEHKVIGLDLDGMGGSALTDDSLAVPESLQQGIPITYVPARNTVFLALALGWAEVLDAQDIFIGVNAVDYSGYPDCRPAFIEAFERVANLATKAGVEGVGFRILAPLQDMTKGEIVAEGTRLGIDYALTVSCYQADDLGRACGRCDSCRLRSAGFSAAGVADATVYQPSSNTV

SEQ ID NO: 41443 - protein, 224 aa, Pseudomonas peli
  misc_feature (1)..(224): tr|A0A1G4S817|A0A1G4S817_9PSED 7-cyano-7-deazaguanine s ynthase OS=Pseudomonas peli OX=592361 GN=queC PE=3 SV=1
MSDKKAVILLSGGLDSATVVALAKADGYSCYTMSFDYGQRHRSELQAAEQVARQLGVVEHKVIGLNLNGMGGSALTDSSIEVPESPTEGIPVTYVPARNTVFLSLALGWAEVLGARDIFIGVNAVDYSGYPDCRPEFVEAFERMANLATKAGVEGQGFRIQAPLQAMSKAEIVQAGVQQGVDYALTVSCYQADDQGRACGKCDSCRLRAAGFTAAGLVDPTRYF

SEQ ID NO: 41444 - protein, 224 aa, Pseudomonas plecoglossicida
  misc_feature (1)..(224): tr|A0A2R7UNE2|A0A2R7UNE2_9PSED 7-cyano-7-deazaguanine s ynthase OS=Pseudomonas plecoglossicida OX=70775 GN=queC PE=3 SV=1
MTEKRAVILLSGGLDSATVVAMAKAEGYSCYTMSFDYGQRHRAELNAAARVARNLSVVEHKVIGLNLDGIGGSALTDSSIDVPETPGEGIPVTYVPARNTVFLSLALGWAEVLEARDIFIGVNAVDYSGYPDCRPEFVEAFERMANLATKAGVEGQGFRIRAPLQNMSKAQIVQAGMARGVDYSLTVSCYQADDDGRACGKCDSCRLRADGFKAAGVEDPTRYF

SEQ ID NO: 41445 - protein, 224 aa, Pseudomonas plecoglossicida; identical to SEQ ID NO: 41412
  misc_feature (1)..(224): tr|A0A099N5F2|A0A099N5F2_9PSED 7-cyano-7-deazaguanine s ynthase OS=Pseudomonas plecoglossicida OX=70775 GN=queC PE=3 SV=1

SEQ ID NO: 41446 - protein, 229 aa, Pseudomonas poae
  misc_feature (1)..(229): tr|A0A2S9EYF1|A0A2S9EYF1_9PSED 7-cyano-7-deazaguanine s ynthase OS=Pseudomonas poae OX=200451 GN=queC PE=3 SV=1
MTEPTNDQKRAVILLSGGLDSATVVAMAQAEGYSCYTMSFDYGQRHRAELNAAARVARDMGVVEHKVIGLNLNGIGGSALTDSSIDVPETPGEGIPVTYVPARNTVFLSLALGWAEVLNARDIFIGVNAVDYSGYPDCRPEFVESFERMANLATKAGVEGQGFRILAPLQNLSKADIVKAGVGLGVDYSLTVSCYQADDDGRACGKCDSCRLRAEGFQAAGFTDPTRYF

SEQ ID NO: 41447 - protein, 229 aa, Pseudomonas poae
  misc_feature (1)..(229): tr|A0A3S9JTY4|A0A3S9JTY4_9PSED 7-cyano-7-deazaguanine s ynthase OS=Pseudomonas poae OX=200451 GN=queC PE=3 SV=1
MTEQTNDQKRAVILLSGGLDSATVVAMAQAEGYSCYTMSFDYGQRHRAELNAASRVARDMGVVEHKVIGLNLNGIGGSALTDSSIDVPETPGEGIPVTYVPARNTVFLSLALGWAEVLNARDIFIGVNAVDYSGYPDCRPEFVESFERMANLATKAGVEGQGFRILAPLQNLSKADIVKAGVGLGVDYSLTVSCYQADDDGRACGKCDSCRLRAEGFQAAGITDPTRYF

SEQ ID NO: 41448 - protein, 224 aa, Pseudomonas pohangensis
  misc_feature (1)..(224): tr|A0A1H2G3J8|A0A1H2G3J8_9PSED 7-cyano-7-deazaguanine s ynthase OS=Pseudomonas pohangensis OX=364197 GN=queC PE =3 SV=1
MNEKRAVILLSGGLDSATVVAMARADGFSCYSMSFDYGQRHRAELAAAEQIARQLGVIEHKVIGLNLNGIGGSALTDESIAVPETPGEGIPLTYVPARNTVFLALALGWAEVLQAQDIFIGVNAVDYSGYPDCRPEFISAFESMANLATRAGVEGPGFRIQAPLQYLSKAEIIQAGTRLGVDYGLTVSCYQADALGRACGRCDSCRLRAAGFAAAELADPTHYQ

SEQ ID NO: 41449 - protein, 230 aa, Pseudomonas prosekii
  misc_feature (1)..(230): tr|A0A3L8CR07|A0A3L8CR07_9PSED 7-cyano-7-deazaguanine s ynthase OS=Pseudomonas prosekii OX=1148509 GN=queC PE=3 SV=1
MTEQLNTTEKRAVILLSGGLDSATVVAMARAEGYSCYTMSFDYGQRSHAELHAAARVARDLGVVEHKVIGLNLDGMGGSALTDTNIDVPEEAGEGIPVTYVPARNTVFLSLALGWAEVLGARDIFIGVNAVDYSGYPDCRPEFIESFERMANLATKAGVEGNGFRIQAPLQNLSKAQIVQAGVKLGVDYGLTVSCYQADDKGYACGKCDSCRLRSEGFAAAGISDPTPYF

SEQ ID NO: 41450 - protein, 230 aa, Pseudomonas prosekii
  misc_feature (1)..(230): tr|A0A1H1ZYD3|A0A1H1ZYD3_9PSED 7-cyano-7-deazaguanine s ynthase OS=Pseudomonas prosekii OX=1148509 GN=queC PE=3 SV=1
MTEQLNTTEKRAVILLSGGLDSATVVAMARAEGYSCYTMSFDYGQRSHAELHAAARVARDLGVVEHKVIGLNLDGMGGSALTDTSIDVPEEAGEGIPVTYVPARNTVFLSLALGWAEVLGARDIFIGVNAVDYSGYPDCRPEFIESFERMANLATKAGVEGNGFRIQAPLQNLSKAQIVQAGVKLGVDYGLTVSCYQADDKGYACGKCDSCRLRSEGFAAAGISDPTPYF

SEQ ID NO: 41451 - protein, 224 aa, Pseudomonas protegens
  misc_feature (1)..(224): tr|A0A2J7U949|A0A2J7U949_9PSED 7-cyano-7-deazaguanine s ynthase OS=Pseudomonas protegens OX=380021 GN=queC PE=3 SV=1
MTEKRAVILLSGGLDSATVVAMARAEGYRCYTMSFDYGQRHRAELHAAERVARDLGVVEHKVIGLNLNGIGGSALTDSSIDVPETPGEGIPVTYVPARNTVFLSLALGWAEVLEARDIFIGVNAVDYSGYPDCRPEFVEAFERMANLATKAGVEGQGFRIQAPLQNLSKAEIIKAGVRLGVDYGLTVSCYQADDSGHACGKCDSCRLRAEGFNAAGISDPTPYF

SEQ ID NO: 41452 - protein, 233 aa, Pseudomonas protegens
  misc_feature (1)..(233): tr|A0A2T6GJ03|A0A2T6GJ03_9PSED 7-cyano-7-deazaguanine s ynthase OS=Pseudomonas protegens OX=380021 GN=queC PE=3 SV=1
MTEQAQNQSSTEKRAVILLSGGLDSATVVAMARAEGYRCYTMSFDYGQRHRAELHAAERVARDLGVVEHNVIGLNLNGIGGSALTDSSIDVPEAPGEGIPVTYVPARNTVFLSLALGWAEVLQARDIFIGVNAVDYSGYPDCRPEFVEAFERMANLATKAGVEGQGFRIQAPLQNLSKAEIIKAGVGLGVDYGLTVSCYQADDNGRACGKCDSCRLRAEGFDAAGVSDPTVYF

SEQ ID NO: 41453 - protein, 224 aa, Pseudomonas pseudoalcaligenes
  misc_feature (1)..(224): tr|W6QYS5|W6QYS5_PSEP5 7-cyano-7-deazaguanine synthase OS=Pseudomonas pseudoalcaligenes (strain CECT 5344) OX= 1182590 GN=exsB PE=3 SV=1
MNDKKAVILLSGGLDSATVVAMAKAEGYSCYSMSFDYGQRHRAELQAAERVARQLGVVEHKVIGLNLNGIGGSALTDSSIAVPESPTEGIPATYVPARNTVFLALALGWAEVLGARDIFIGVNAVDYSGYPDCRPEFVDAFERMANLATRAGVEGQGFSIRAPLQQMSKGEIIQAGMRLGVDYALTVSCYRADDEGRACGKCDSCRLRAAGFAAAGVPDVTRYY

SEQ ID NO: 41454 - protein, 230 aa, Pseudomonas psychrophila
  misc_feature (1)..(230): tr|A0A3N2AAA1|A0A3N2AAA1_9PSED 7-cyano-7-deazaguanine s ynthase OS=Pseudomonas psychrophila OX=122355 GN=queC P E=3 SV=1
MTEHTAVTEKRAVILLSGGLDSATVVAMARAEGYRCYTMSFDYGQRHRAELDAAARVARDLGAVEHKVIGLNLDGIGGSALTDSSIDVPEAPSEGIPVTYVPARNTVFLSLALGWAEVLQARDIFIGVNAVDYSGYPDCRPEFVEAFEVMANLATKAGVEGEGFRIKAPLQNMSKAQIVQAGIKLGVDYSLTVSCYQADAQGQACGKCDSCRLRAEGFQAAGVSDPTRYF

SEQ ID NO: 41455 - protein, 230 aa, Pseudomonas psychrophila
  misc_feature (1)..(230): tr|S6I5Y4|S6I5Y4_9PSED 7-cyano-7-deazaguanine synthase OS=Pseudomonas psychrophila OX=122355 GN=queC PE=3 SV=1
MTEQTVVTEKRAVILLSGGLDSATVVAMARAEGYSCYTMSFDYGQRHRAELDAAARVARDLGAVEHKVIGLNLDGIGGSALTDSSIDVPEAPSEGIPVTYVPARNTVFLSLALGWAEVLQARDIFIGVNAVDYSGYPDCRPEFVEAFEVMANLATKAGVEGQGFRIQAPLQNMSKAQIVQAGTKLGVDYALTVSCYQADAQGRACGKCDSCRLRAEGFAAAGISDPTRYF

SEQ ID NO: 41456 - protein, 224 aa, Pseudomonas psychrotolerans
  misc_feature (1)..(224): tr|A0A147H635|A0A147H635_9PSED 7-cyano-7-deazaguanine s ynthase OS=Pseudomonas psychrotolerans OX=237610 GN=que C PE=3 SV=1
MSQPKAVILLSGGLDSATVVAMAKAQGFACYTMSFDYGQRHRAELQAAVRVARQLGVIEHKVIGLDLNGIGGSALTDLDIAVPETPGEGIPVTYVPARNTVFLSLALGWAEVLGARHLFIGVNAVDYSGYPDCRPEFVEAFERLANLATKAGVEGDTFKIEAPLQFMSKAQIVETGTQLGVDYGLTVSCYQANAEGAACGRCDSCRLRAEGFKAAGISDPTRYH

SEQ ID NO: 41457 - protein, 233 aa, Pseudomonas psychrotolerans
  misc_feature (1)..(233): tr|A0A4Y5W354|A0A4Y5W354_9PSED 7-cyano-7-deazaguanine s ynthase OS=Pseudomonas psychrotolerans OX=237610 GN=que C PE=3 SV=1
MERRAGTLSMSQPKAVILLSGGLDSATVVALAKAQGFACYTMSFDYGQRHRAELQAAVRVARQLGVIEHKVIGLDLNGIGGSALTDLDIAVPETPGEGIPVTYVPARNTVFLSLALGWAEVLGARHLFIGVNAVDYSGYPDCRPEFVEAFERLANLATKAGVEGDTFKIEAPLQFMSKAQIVETGTQLGVDYGLTVSCYQANAEGEACGRCDSCRLRAEGFKAAGISDPTRYQ

SEQ ID NO: 41458 - protein, 224 aa, Pseudomonas punonensis
  misc_feature (1)..(224): tr|A0A1M7G1A8|A0A1M7G1A8_9PSED 7-cyano-7-deazaguanine s ynthase OS=Pseudomonas punonensis OX=1220495 GN=queC PE =3 SV=1
MSEKKAVILLSGGLDSATVVAMAKEQGYSCYSMSFDYGQRHRSELQAAERVARQLGVVEHKVIGMNLGGIGGSALTDDSIDVPQAPTTGIPVTYVPARNTVFLSLALGWAEVLGAQDIFIGVNAVDYSGYPDCRPEFVEAFERMANLATKMGVEGQSLRIQAPLQMMSKAEIVQAGSRLGVDYGLTVSCYLADADGRACGKCDSCRLRAAGFAAAGMADPTRYQ

SEQ ID NO: 41459 - protein, 224 aa, Pseudomonas putida
  misc_feature (1)..(224): sp|Q88NI3|QUEC_PSEPK 7-cyano-7-deazaguanine synthase OS =Pseudomonas putida (strain ATCC 47054 / DSM 6125 / NCI MB 11950 / KT2440) OX=160488 GN=queC PE=3 SV=1
MTEKRAVILLSGGLDSATVVAMAKAEGYSCYTMSFDYGQRHRAELNAAARVARDLGVVEHKVIGLNLDGIGGSALTDSSIDVPEAPGEGIPVTYVPARNTVFLSLALGWAEVLEARDIFIGVNAVDYSGYPDCRPEFVEAFERMANLATKAGVEGQGFRIQAPLQNMSKAQIVQAGMARGVDYSLTVSCYQADDDGRACGKCDSCRLRADGFKAAGIEDPTRYF

SEQ ID NO: 41460 - protein, 224 aa, Pseudomonas putida
  misc_feature (1)..(224): sp|B1JD61|QUEC_PSEPW 7-cyano-7-deazaguanine synthase OS =Pseudomonas putida (strain W619) OX=390235 GN=queC PE= 3 SV=1
MTEKRAVILLSGGLDSATVVAMAKAEGYSCYTMSFDYGQRHRAELNAAARVARDLGVVEHKVIGLNLDGIGGSALTDSSIDVPETPGEGIPVTYVPARNTVFLSLALGWAEVLQARDIFIGVNAVDYSGYPDCRPEFVEAFERMANLATKAGVEGQGFRIQAPLQNMSKAQIVQAGMARGVDYSLTVSCYQADDEGRACGKCDSCRLRADGFKAAGVEDPTRYF

SEQ ID NO: 41461 - protein, 225 aa, Pseudomonas reidholzensis
  misc_feature (1)..(225): tr|A0A383RX06|A0A383RX06_9PSED 7-cyano-7-deazaguanine s ynthase OS=Pseudomonas reidholzensis OX=1785162 GN=queC PE=3 SV=1
MTDKRAVILLSGGLDSATVVAMAKADGYSCYTMSFDYGQRHRAELDAAARVARDLGVVEHKVIGLNLDGIGGSALTDSSIDVPEAPSEGIPVTYVPARNTVFLSLALGWAEVLEARDIFIGVNAVDYSGYPDCRPEFVEAFERMANLATKAGVEGQGFRIQAPLQNMSKAQIVQAGMARGVDYSLTVSCYQADDQGQACRKCDSCRLRAEGFKAAGVEDPTRYFS

SEQ ID NO: 41462 - protein, 230 aa, Pseudomonas reinekei
  misc_feature (1)..(230): tr|A0A1H0S4H6|A0A1H0S4H6_9PSED 7-cyano-7-deazaguanine s ynthase OS=Pseudomonas reinekei OX=395598 GN=queC PE=3 SV=1
MTEQLNTTDKRAVILLSGGLDSATVVAMARAEGYSCYTMSFDYGQRSHAELYAAERVARDLGVVEHKVIGLNFNGMGGSALTDSSIDIPEELGEGIPVTYVPARNTVFLSLALGWAEVLGARDIFIGVNAVDYSGYPDCRPEFIESFERMANLATKAGVEGNGFRIQAPLQNLSKAQIVQAGTKLGVNYGLTVSCYQADDDGRACGKCDSCRLRAEGFAAAGISDPTPYF

SEQ ID NO: 41463 - protein, 224 aa, Pseudomonas resinovorans
  misc_feature (1)..(224): tr|S6AV98|S6AV98_PSERE 7-cyano-7-deazaguanine synthase OS=Pseudomonas resinovorans NBRC 106553 OX=1245471 GN=q ueC PE=3 SV=1
MSEKKAVILLSGGLDSATVVALARAEGYACYTMSFDYGQRHRAELQAAERVARQLGAVAHKVIGLNLNGIGGSALTDTSIDVPESPTEGIPVTYVPARNTVFLSLALGWAEVLGARDIFIGVNAVDYSGYPDCRPEFVDAFERMANLATKAGVEGQGFRIQAPLQNLSKAEIVQAGMRHGVDYALTVSCYQADDEGRACGKCDSCRLRAAGFAAAGMKDPTRYQ

SEQ ID NO: 41464 - protein, 229 aa, Pseudomonas rhizosphaerae
  misc_feature (1)..(229): tr|A0A089ZQ10|A0A089ZQ10_9PSED 7-cyano-7-deazaguanine s ynthase OS=Pseudomonas rhizosphaerae OX=216142 GN=queC PE=3 SV=1
MNHTIEQQKKAVILLSGGLDSATVVAMAKDQGYACYTMSFDYGQRHRAELNAAARVARDLGVVQHKVIGLNLDGMGGSALTDTSIDVPETLGEGIPVTYVPARNTVFLSLALGWAEVLEARDIFIGVNAVDYSGYPDCRPEFIEAFERLANLATKAGVEGNGFTIQAPLQNMSKAEIVKAGVELGVDYGLTVSCYQANDEGQACGKCDSCRLRAEGFTAAGVSDPTRYF

SEQ ID NO: 41465 - protein, 201 aa, Pseudomonas rhodesiae
  misc_feature (1)..(201): tr|A0A5C5NB80|A0A5C5NB80_9PSED 7-cyano-7-deazaguanine s ynthase OS=Pseudomonas rhodesiae OX=76760 GN=FIV35_2557 0 PE=3 SV=1
MKTGLLLSGGMDSLTIAWWKRPDIAFTLNYGQLAAQAEIEASRTICQLLEIPHHVIEIDCRQLGSGDMAGSQANSLAPASDWWPYRNQMLVTLAAMKAISFGVTHLWLGTVKSDGFHRDGSPEFMSAISHLLSLQEGGMVVEAPAIEFSTAELVRKSGIPASLLAWAHSCHKSHFACGNCRGCNKYMEVFQEVGYDLDRLG

SEQ ID NO: 41466 - protein, 232 aa, Pseudomonas rhodesiae
  misc_feature (1)..(232): tr|A0A5C5NUF2|A0A5C5NUF2_9PSED 7-cyano-7-deazaguanine s ynthase OS=Pseudomonas rhodesiae OX=76760 GN=queC PE=3 SV=1
MSKKAVMVFSGGQDSTTCLIQALALYDEVHCITFDYGQRHVAEIEVARQLAKQLGATVHKVMDVSLLNELAISSLTRDNIPVPTVNSSGESLPSTFVPGRNILFLTLAAIYAYQVKAETVITGVCETDFSGYPDCRDEFVKALNQALKLGMEYDVRLDTPLMWLNKAETWALADYHHQLDLVREHTLTCYNGVIGTGCGECDACNLRARGLNEYLQNKAQVMHSLKHKLQLN

SEQ ID NO: 41467 - protein, 228 aa, Pseudomonas sabulinigri
  misc_feature (1)..(228): tr|A0A1H1XJ59|A0A1H1XJ59_9PSED 7-cyano-7-deazaguanine s ynthase OS=Pseudomonas sabulinigri OX=472181 GN=queC PE =3 SV=1
MNPSPSRGKAVVLLSGGLDSATVLALAQAEGYQCYSMSFDYGQRHRAELDAAKALARAAGVVEHKVIGLDLDGMGGSALTDSTLAVPEQPQPGIPVTYVPARNTVFLALALGWAEVLDAQDIYIGVNAVDYSGYPDCRPEFVSAFEQLANLATRAGVEGRPFRIQAPLQHLSKAQIVQAGSRLGVDYALTVSCYQADDHGQACGCCDSCRLRAEGFAAANMPDPTRYR

SEQ ID NO: 41468 - protein, 224 aa, Pseudomonas sagittaria
  misc_feature (1)..(224): tr|A0A1I5VC81|A0A1I5VC81_9PSED 7-cyano-7-deazaguanine s ynthase OS=Pseudomonas sagittaria OX=1135990 GN=queC PE =3 SV=1
MTDKKAVILLSGGLDSATVLAMARAEGYACYTMSFDYGQRHRAELQAAERVARQLGAREHKVVGIDLNGIGGSALTDSSIAVPEEASEGIPVTYVPARNTLFLSLALGWAEVLGARDIFIGVNAVDYSGYPDCRPEFIEAFERLANLATKAGVEGEGFRIQAPLQYLSKAQIIEAGLARGVDFALTVSCYQADADGRACGRCDSCRLRAEGFHAAGIADPTRYV

SEQ ID NO: 41469 - protein, 233 aa, Pseudomonas salegens
  misc_feature (1)..(233): tr|A0A1H2G202|A0A1H2G202_9PSED 7-cyano-7-deazaguanine s ynthase OS=Pseudomonas salegens OX=1434072 GN=queC PE=3 SV=1
MTSRGIEMTDQKKAVVLLSGGLDSATVLAMAQAQGYICYSMSFDYGQRHRAELVAAEQIARHAGVVEHKVIGLDLNGMGGSALTDSSIAVPETPQEGIPVTYVPARNTVFLSLALGWAEVLGAQDIFIGVNAVDYSGYPDCRPDFIQAFEQVANLATRAGVEGTPFRIQTPLQMLSKADIIIAGINHGVDYSLTVSCYQADAAGRACGRCDSCRLRSQGFAQAGVADPTRYQH

SEQ ID NO: 41470 - protein, 225 aa, Pseudomonas salomonii
  misc_feature (1)..(225): tr|A0A3M4QDV5|A0A3M4QDV5_9PSED 7-cyano-7-deazaguanine s ynthase OS=Pseudomonas salomonii OX=191391 GN=queC PE=3 SV=1
MTEQKRAVILLSGGLDSATLVAMVRAQGYSCYTLSFDYGQRHRAELHAAERVARDLGVVEHKVIGLNLNGIGGSALTDSSIDVPEAPSEGIPLTYVPARNTVLLSLALGWAEVLKARDIFIGVNALDYNGYPDCRPEYVEAFERMANLATKAGVEGQGLRIQAPLQNMSKADIVKAGVGLGVDYALTVSCYQADDSGRACGKCDACRLRAEGFKNAAIADPTRYF

SEQ ID NO: 41471 - protein, 233 aa, Pseudomonas salomonii
  misc_feature (1)..(233): tr|A0A1H3U330|A0A1H3U330_9PSED 7-cyano-7-deazaguanine s ynthase OS=Pseudomonas salomonii OX=191391 GN=queC PE=3 SV=1
MHTKALVLFSGGQDSTTCLAWALERYEHVETIGFDYGQRHRIELECRLNILQEIRNRFPNWAQRLGEDHVLDLKLLGQISDTAMTAEKTIEFEENGLPNTFVPGRNLLFLTFAATIAYRRGLTVLVGGMCETDYSGYPDCRDNALKATQVALSLGMDAPVIIETPLMWLNKAQTWRLAEDLGSQDFVKLIQEESHTCYLGTRQQKHEWGYGCGTCPACELRKTGYEQYIQERD

SEQ ID NO: 41472 - protein, 239 aa, Pseudomonas saponiphila
  misc_feature (1)..(239): tr|A0A1H4KGS1|A0A1H4KGS1_9PSED 7-cyano-7-deazaguanine s ynthase OS=Pseudomonas saponiphila OX=556534 GN=queC PE =3 SV=1
MSRGAEMTEQAQNQSSTEKRAVILLSGGLDSATVVAMARAEGYRCYTMSFDYGQRHRAELHAAERVARDLGVVEHKVIGLNLNGIGGSALTDSSIDVPEAPGEGIPVTYVPARNTVFLSLALGWAEVLQARDIFIGVNAVDYSGYPDCRPEFVEAFERMANLATKAGVEGQGFRIQAPLQNLSKAEIIKAGMGLGVDYGLTVSCYQADDHGRACGKCDSCRLRAEGFDAAGVSDPTAYF

SEQ ID NO: 41473 - protein, 233 aa, Pseudomonas saudimassiliensis
  misc_feature (1)..(233): tr|A0A078M0G2|A0A078M0G2_9PSED 7-cyano-7-deazaguanine s ynthase OS=Pseudomonas saudimassiliensis OX=1461581 GN= queC PE=3 SV=1
MNALLICSGGFDSVTLAYRLAAQQSLGALLTFDYGQRHRKEIDAARRCAERLAVPHLVLDIGHIGRQLSGSALTDDIAVPHGHYTEENMKVTVVPNRNAIMLTIAFGVAAARSLDTVALAVHGGDHFIYPDCRPDFIRLFGEMQAKALEGVAEVALLAPYVDTDKTEIARDAARFAVPVADTWSCYEGGELHCGRCGTCVERIEAMALAGVTDTTAYQDDQYWRDAVARVSSN

SEQ ID NO: 41474 - protein, 224 aa, Pseudomonas saudiphocaensis
  misc_feature (1)..(224): tr|A0A078LRE8|A0A078LRE8_9PSED 7-cyano-7-deazaguanine s ynthase OS=Pseudomonas saudiphocaensis OX=1499686 GN=ex sB PE=3 SV=1
MTEKKAVILLSGGLDSATVVAMAKAQGYACYSMSFDYGQRHRAELHAAERVAKQLGVVEHKVIGMNLNGIGGSALTDSSMDVPEEQVEGIPVTYVPARNTLFLSLALGWAEVLGARDIFIGVNAVDYSGYPDCRPEFVEAFERLANLATKAGVQGQGFRIRAPLQDLSKAQIIQEGIRLGVDYAMTVSCYQADDLGRACGKCDSCRLRAAGFEAAGIEDPTRYH

SEQ ID NO: 41475 - protein, 224 aa, Pseudomonas saudiphocaensis
  misc_feature (1)..(224): tr|A0A3R9B0Z1|A0A3R9B0Z1_9PSED 7-cyano-7-deazaguanine s ynthase OS=Pseudomonas saudiphocaensis OX=1499686 GN=qu eC PE=3 SV=1
MTEKKAVILLSGGLDSATVVAMAKAQGYACYSMSFDYGQRHRAELHAAERVAKQLGVVEHKVIGMNLNGIGGSALTDSSMDVPEEQVEGIPVTYVPARNTLFLSLALGWAEVLGARDIFIGVNAVDYSGYPDCRPEFVEAFERLANLATKAGVEGQGFRIRAPLQDLSKAQIIQEGVRLGVDYAMTVSCYQADDLGRACGKCDSCRLRAAGFEAAGIEDPTRYH

SEQ ID NO: 41476 - protein, 229 aa, Pseudomonas savastanoi
  misc_feature (1)..(229): tr|A0A3M4RGP0|A0A3M4RGP0_PSESG 7-cyano-7-deazaguanine s ynthase OS=Pseudomonas savastanoi pv. glycinea OX=318 G N=queC PE=3 SV=1
MSESTMTEKRAVILLSGGLDSATVVAMAREQGYACYTMSFDYGQRHRAELDAAARVARDLGVIEHKVIGLNLNGIGGSALTDDSIAVPETPGEGIPVTYVPARNTVFLSLALGWAEVLGARDIFIGVNAVDYSGYPDCRPEFIESFERMANLATKAGVEGQGFTIQAPLQNLSKADIVKAGVRLGVDYGLTVSCYQADDQGRACRKCDSCRLRAEGFAAAGISDPTRYF

SEQ ID NO: 41477 - protein, 229 aa, Pseudomonas savastanoi
  misc_feature (1)..(229): sp|Q48FD4|QUEC_PSE14 7-cyano-7-deazaguanine synthase OS =Pseudomonas savastanoi pv. phaseolicola (strain 1448A / Race 6) OX=264730 GN=queC PE=3 SV=1
MSELTNTEKRAVILLSGGLDSATVVAMARAEGYACYTMSFDYGQRHRAELDAAARVARDLGAVEHKVIGLNLNGIGGSALTDSSIAVPESPSEGIPITYVPARNTVFLSLALGWAEVLGARDIFIGVNAVDYSGYPDCRPEFVESFERMANLATKAGVEGQGFTIRAPLQNLSKSDIVKAGAALGVDYSLTVSCYQADDQGRACGKCDSCRLRTEGFTAAGMADPTRYF

SEQ ID NO: 41478 - protein, 224 aa, Pseudomonas segetis
  misc_feature (1)..(224): tr|A0A238ZPP3|A0A238ZPP3_9PSED 7-cyano-7-deazaguanine s ynthase OS=Pseudomonas segetis OX=298908 GN=queC PE=3 S V=1
MSIKRAVILLSGGLDSATVVALAKAEGYACYTMSFDYGQRHRSELQAAERVAQQLGVVEHKVIGLNLNGMGGSALTDSSIDVPEAPSEGIPVTYVPARNTVFLSLALGWAEVLGARDIFIGVNAVDYSGYPDCRPEFVEAFERMANLATKAGVEGNGFRIQAPLQNMSKAQIVQAGVAQGVDYALTVSCYQADDQGRACGKCDSCRLRSEGFAAAGIADPTPYA

SEQ ID NO: 41479 - protein, 231 aa, Pseudomonas seleniipraecipitans
  misc_feature (1)..(231): tr|A0A1G7H7W1|A0A1G7H7W1_9PSED 7-cyano-7-deazaguanine s ynthase OS=Pseudomonas seleniipraecipitans OX=640205 GN =queC PE=3 SV=1
MSEKKAVILLSGGLDSATVVAMAKEQGYTCYSMSFDYGQRHRSELQAAERVARQLGVVEHKVIGMNLGGIGGSALTDSSIDVPQSPTTGIPVTYVPARNTVFLALALGWAEVLEAQDIFIGVNAVDYSGYPDCRPEFVEAFERVANLATRMGVEGQSIRIQAPLQMMSKAEIVQAGSRLGVDYALTVSCYLADDDGRACGRCDSCRLRSAGFAAAGVSDPTRYQEKFSSGC

SEQ ID NO: 41480 - protein, 224 aa, Pseudomonas sihuiensis
  misc_feature (1)..(224): tr|A0A1H2L526|A0A1H2L526_9PSED 7-cyano-7-deazaguanine s ynthase OS=Pseudomonas sihuiensis OX=1274359 GN=queC PE =3 SV=1
MNDKKAVILLSGGLDSATVVAMAKAEGYACYSMSFDYGQRHRAELQAAERVARQLGVVEHKVIGLNLNGIGGSALTDSSIAVPESPTEGIPATYVPARNTVFLALALGWAEVLGARDIFIGVNAVDYSGYPDCRPEFVEAFERMANLATKAGVERQGFVIRAPLQQMSKGEIIQAGMRLGVDYALTVSCYQADDDGRACGKCDSCRLRAAGFVAAGVPDATRYF

SEQ ID NO: 41481 - protein, 231 aa, Pseudomonas silesiensis
  misc_feature (1)..(231): tr|A0A191YMG0|A0A191YMG0_9PSED 7-cyano-7-deazaguanine s ynthase OS=Pseudomonas silesiensis OX=1853130 GN=queC P E=3 SV=1
MTKKAVIVFSGGQDSTTCLIHALPMYDEIHCITFDYGQRHRAEIEVAQQLCKKLGVVVHKVLDTSLLNELAISSLTRDSIPVPSANSAGDTLPSTFVPGRNILFLTLASIYAYQVGAETVITGVCETECSGYPDCRDEFVNTLNKAIKLGMDYTLRIDTPLMWLNKAETWALADYHQQLDLIRYHTLSCYNGIKGSGCSNCDACKLRAKGLNEFLKNRTEIMKGLKIKLEL

SEQ ID NO: 41482 - protein, 230 aa, Pseudomonas silesiensis
  misc_feature (1)..(230): tr|A0A191YYS9|A0A191YYS9_9PSED 7-cyano-7-deazaguanine s ynthase OS=Pseudomonas silesiensis OX=1853130 GN=queC P E=3 SV=1
MTEQLNTTEKRAVILLSGGLDSATVVAMARAEGYSCYTMSFDYGQRSHAELYAAERVARDLGVVEHKVIGLNLNGIGGSALTDSSIDVPEVAGEGIPVTYVPARNTVFLSLALGWAEVLGARDIFIGVNAVDYSGYPDCRPEFIESFERMANLATKAGVEGNGFRIQAPLQNLSKAQIVKAGVKLGVDYGLTVSCYQADDNGRACGKCDSCRLRAEGFAAAGISDPTPYF

SEQ ID NO: 41483 - protein, 224 aa, Pseudomonas simiae
  misc_feature (1)..(224): tr|A0A1N7UMM5|A0A1N7UMM5_9PSED 7-cyano-7-deazaguanine s ynthase OS=Pseudomonas simiae OX=321846 GN=queC PE=3 SV =1
MDQKRAVILLSGGLDSATVVAMAQAQGYSCYTMSFDYGQRHRAELNAAARVAREMGVVEHKVIGLNLNGIGGSALTDSSIDVPETPGEGIPVTYVPARNTVFLSLALGWAEVLNARDIFIGVNAVDYSGYPDCRPEFVESFERMANLATKAGVEGQGFRILAPLQNLSKADIVKAGVGLGVDYSLTVSCYQADDDGRACGKCDSCRLRAEGFQAAGITDPTRYF

SEQ ID NO: 41484 - protein, 229 aa, Pseudomonas simiae
  misc_feature (1)..(229): tr|U1T8P9|U1T8P9_9PSED 7-cyano-7-deazaguanine synthase OS=Pseudomonas simiae OX=321846 GN=queC PE=3 SV=1
MTEQTLDQKRAVILLSGGLDSATVVAMAQAQGYSCYTMSFDYGQRHRAELNAAARVAREMGVVEHKVIGLNLNGIGGSALTDSSIDVPETPGEGIPVTYVPARNTVFLSLALGWAEVLNARDIFIGVNAVDYSGYPDCRPEFVESFERMANLATKAGVEGQGFRILAPLQNLSKADIVKAGVGLGVDYSLTVSCYQADDDGRACGKCDSCRLRAEGFQAAGITDPTRYF

SEQ ID NO: 41485 - protein, 224 aa, Pseudomonas soli; identical to SEQ ID NO: 41418
  misc_feature (1)..(224): tr|A0A1H9A7M6|A0A1H9A7M6_9PSED 7-cyano-7-deazaguanine s ynthase OS=Pseudomonas soli OX=1306993 GN=queC PE=3 SV= 1

SEQ ID NO: 41486 - protein, 224 aa, Pseudomonas songnenensis
  misc_feature (1)..(224): tr|A0A482U5H0|A0A482U5H0_9PSED 7-cyano-7-deazaguanine s ynthase OS=Pseudomonas songnenensis OX=1176259 GN=queC PE=3 SV=1
MSEQKAVILLSGGLDSATVVAMARDQGYACYTMSFDYGQRHRAELQAAERVAAQLGVVEHKVIGLNLNGIGGSALTDERIDVPEVVGEGIPVTYVPARNTVFLALALGWAEVLGARDIFIGVNAVDYSGYPDCRPEFVAAFEHMANLATKAGVEGQGFRIQAPLQQLSKAKIVQEGIRLGVDYAMTVSCYQADADGRACGKCDSCRLRAAGFAEAGVTDPTRYF

SEQ ID NO: 41487 - protein, 230 aa, Pseudomonas sp.
  misc_feature (1)..(230): tr|A0A2S9BCX4|A0A2S9BCX4_9PSED 7-cyano-7-deazaguanine s ynthase OS=Pseudomonas sp. MYb3 OX=1848735 GN=queC PE=3 SV=1
MTEQLNTNEKRAVILLSGGLDSATVVAMARAEGYACYTMSFDYGQRSHAELHAAARVARDLGVVEHKVIGLNLNGMGGSALTDTSIDIPEELGEGIPVTYVPARNTVFLSLALGWAEVLGARDIFIGVNAVDYSGYPDCRPEFIESFERMANLATKAGVEGNGFRIQAPLQNLSKAQIVQAGVKLGVDYGLTVSCYQADDDGRACAKCDSCRLRAEGFAAAGVEDPTPYF

SEQ ID NO: 41488 - protein, 232 aa, Pseudomonas sp.
  misc_feature (1)..(232): tr|A0A3G8D7D1|A0A3G8D7D1_9PSED 7-cyano-7-deazaguanine s ynthase OS=Pseudomonas sp. LBUM920 OX=2126069 GN=queC P E=3 SV=1
MSKKAVIVFSGGQDSTTCLIQALPLYDEVHCITFDYGQRHVAEIEVAQKLAKQLGATVHKVMDVSLLNELAISSLTRDNIPVPTVNSSGDSLPSTFVPGRNILFLTLASIYAYQVKAQTVITGVCETDFSGYPDCRDEFVKALNKALELGMEYTLRLDTPLMWLNKAETWALADYHNQLDLVQHQTLTCYNGVLGSGCGNCDACNLRARGLNDYLQNKADVMHSLKQKLQLN

SEQ ID NO: 41489 - protein, 230 aa, Pseudomonas straminea
  misc_feature (1)..(230): tr|A0A1I1UF38|A0A1I1UF38_PSEOC 7-cyano-7-deazaguanine s ynthase OS=Pseudomonas straminea OX=47882 GN=queC PE=3 SV=1
MSRGIDMSDKKAVILLSGGLDSATVVAMAREQGYSCYSMSFDYGQRHRSELQAAERVARQLGVVEHKVIGINLDGIGGSALTDASIEVPQSPTTGIPVTYVPARNTVFLSLALGWAEVLEAQDIFIGVNAVDYSGYPDCRPEFVSAFEHMANLATKMGVEGRRVRIQAPLQMLSKAEIVQAGSRLGVDYGLTVSCYLADVDGRACGKCDSCRLRAAGFVAAGMPDPTRYQ

SEQ ID NO: 41490 - protein, 224 aa, Pseudomonas stutzeri
  misc_feature (1)..(224): sp|A4VN94|QUEC_PSEU5 7-cyano-7-deazaguanine synthase OS =Pseudomonas stutzeri (strain A1501) OX=379731 GN=queC PE=3 SV=2
MNEKKAVILLSGGLDSATVVAMARDEGYACYTMSFDYGQRHRAELQAAERVAKQLAVVEHKVIGLNLNGIGGSALTDTSIDVPEAPSEGIPVTYVPARNTVFLSLALGWAEVLGARDIFIGVNAVDYSGYPDCRPEFVAAFERMANLATKAGVEGQGFRIQAPLQNLSKAQIVRKGSRLGVDYAMTVSCYQADDDGRACGKCDSCRLRSAGFAEAGLADPTRYF

SEQ ID NO: 41491 - protein, 224 aa, Pseudomonas stutzeri
  misc_feature (1)..(224): tr|I4JI25|I4JI25_PSEST 7-cyano-7-deazaguanine synthase OS=Pseudomonas stutzeri TS44 OX=477228 GN=queC PE=3 SV= 1
MSEKKAVILLSGGLDSATVVAIARDQGYSCYTMSFDYGQRHRAELQAAERVARQLGVVEHKVIGLTLDGIGGSALTDSRIGVPETPGEGIPVTYVPARNTVFLSLALGWAEVLDARDIFIGVNAIDYSGYPDCRPEFVEAFERLANLATKAGVEGQGFHIRAPLQQLSKAQIVREGGRLGVDYAMTVSCYQADDDGRACGKCDSCRLRAAGFAEAGIADPTRYQ

SEQ ID NO: 41492 - protein, 232 aa, Pseudomonas synxantha
  misc_feature (1)..(232): tr|A0A0E3GYG3|A0A0E3GYG3_9PSED 7-cyano-7-deazaguanine s ynthase OS=Pseudomonas synxantha OX=47883 GN=queC PE=3 SV=1
MSKKAVMVFSGGQDSTTCLIQALPLYDEVHCITFDYGQRHVAEIEVARTLAKQLGATVHKVMDVSLLNELAISSLTRDNIPVPTVNSSGESLPSTFVPGRNILFLTLASIYAYQVKAEAVITGVCETDFSGYPDCRDEFVKALNKALELGMEYKLRLDTPLMWLNKAETWALADYHDQLELVREQTLTCYNGIIGTGCGNCDACNLRARGLNEYLQNKADVMHSLKHKLQLK

SEQ ID NO: 41493 - protein, 232 aa, Pseudomonas synxantha
  misc_feature (1)..(232): tr|A0A3G7UD78|A0A3G7UD78_9PSED 7-cyano-7-deazaguanine s ynthase OS=Pseudomonas synxantha OX=47883 GN=queC PE=3 SV=1
MSKKAVMVFSGGQDSTTCLIQALPLYDEVHCITFDYGQRHVAEIEVARKLAKQLGATVHKVMDVSLLNELAISSLTRDNIPVPTVSSSGESLPSTFVPGRNILFLTLASIYAYQVKAEAVITGVCETDFSGYPDCRDEFVKALNQALKLGMEYDVRLDTPLMWLNKAETWALADYHDQLELVREQTLTCYNGVIGTGCGNCDACNLRARGLNEYLQNKADVMQSLKHKLQLK

SEQ ID NO: 41494 - protein, 226 aa, Pseudomonas syringae
  misc_feature (1)..(226): sp|Q87Y44|QUEC_PSESM 7-cyano-7-deazaguanine synthase OS =Pseudomonas syringae pv. tomato (strain ATCC BAA-871 / DC3000) OX=223283 GN=queC PE=3 SV=1
MTNTEKRAVILLSGGLDSATVVAMARAEGYACYTMSFDYGQRHRAELDAAARVARDLGAVEHKVIGLNLSGIGGSALTDSSIAVPESPSEGIPVTYVPARNTVFLSLALGWAEVLGARDIFIGVNAVDYSGYPDCRPEFVESFERMANLATKAGVEGQGFTIRAPLQNLSKSDIVKAGIALGVDYALTVSCYQADDQGRACGKCDSCRLRAEGFTASGMSDPTRYF

SEQ ID NO: 41495 - protein, 251 aa, Pseudomonas syringae
  misc_feature (1)..(251): tr|A0A3M5U2U2|A0A3M5U2U2_9PSED 7-cyano-7-deazaguanine s ynthase OS=Pseudomonas syringae pv. primulae OX=251707 GN=queC PE=3 SV=1
MCRYACRCSCIKFFGMTSRGADMSELTNTEKRAVILLSGGLDSATVVAMARAEGYACYTMSFDYGQRHRAELDAAARVARDLGAVEHKVIGLNLNGIGGSALTDSSIAVPESPSEGIPVTYVPARNTVFLSLALGWAEVLGARDIFIGVNAVDYSGYPDCRPEFVESFERMANLATKAGVEGQGFTIRAPLQNLSKSDIVKAGTALGVDYALTVSCYQADDQGRACGKCDSCRLRTEGFTAAGMADPTRYF

SEQ ID NO: 41496 - protein, 224 aa, Pseudomonas taeanensis
  misc_feature (1)..(224): tr|A0A0A1YIX3|A0A0A1YIX3_9PSED 7-cyano-7-deazaguanine s ynthase OS=Pseudomonas taeanensis MS-3 OX=1395571 GN=qu eC PE=3 SV=1
MSEKKAVILLSGGLDSATVVALAKAEGYACYSMSFDYGQRHRSELQAAERVARQLGVVEHKVIGLNLNGIGGSALTDSSIEVPEGPSEGIPVTYVPARNTVFLSLALGWAEVLGARDVFIGVNAVDYSGYPDCRPEFVEAFQRMANLATKAGVEGQGFRIRAPLQSMSKAEIVQAGMQHGVDYALTVSCYQADDQGRACGKCDSCRLRAEGFVAAGLADPTRYA

SEQ ID NO: 41497 - protein, 233 aa, Pseudomonas taeanensis
  misc_feature (1)..(233): tr|A0A0A1YGJ6|A0A0A1YGJ6_9PSED 7-cyano-7-deazaguanine s ynthase OS=Pseudomonas taeanensis MS-3 OX=1395571 GN=qu eC PE=3 SV=1
MHTKALVLFSGGQDSTTCLAWALEHYEHVETIGFDYGQRHRIELECRLNVLREIRNRFPNWAQRLGEDHVLDLKLLGQISDTAMTAEKTIEFEKNGLPNTFVPGRNLLFLTFAATIAYRRGLTVIVGGMCETDYSGYPDCRDNTLKATQVALSLGMDAPVIIETPLMWLNKAQTWRLAEDLGNRDFVSLIQEESHTCYLGTRQQKHDWGYGCGTCPACELRKTGYEQYIQERD

SEQ ID NO: 41498 - protein, 230 aa, Pseudomonas taetrolens
  misc_feature (1)..(230): tr|A0A0J6GVA1|A0A0J6GVA1_PSETA 7-cyano-7-deazaguanine s ynthase OS=Pseudomonas taetrolens OX=47884 GN=queC PE=3 SV=1
MTEQTVVTEKRAVILLSGGLDSATVVAMARAEGYSCYTMSFDYGQRSRAELDAAAQVARDLGAVEHKVIGLNLNGIGGSALTDDSIDVPESPGEGIPVTYVPARNTVFLSLALGWAEVLQARDIFIGVNAVDYSGYPDCRPEFVEAFEVMANLATKAGVEGQGFRIKAPLQNMSKAQIVQAGVKLGVDYSLTVSCYQADAQGQACGKCDSCRLRAEGFAAAGITDPTRYF

SEQ ID NO: 41499 - protein, 230 aa, Pseudomonas thivervalensis
  misc_feature (1)..(230): tr|A0A176NRP3|A0A176NRP3_9PSED 7-cyano-7-deazaguanine s ynthase OS=Pseudomonas thivervalensis OX=86265 GN=queC PE=3 SV=1
MTEHSNIAEKRAVILLSGGLDSATVVAMAHAEGYRCYTMSFDYGQRHRAELHAAERVARDLGVAEHKVIGLNLNGIGGSALTDSSIDVPEAPGEGIPVTYVPARNTVFLSLALGWAEVLGARDIFIGVNAVDYSGYPDCRPEFVEAFERMANLATKAGVEGQGFRIQAPLQNLSKADIVKAGVKLGVDYGLTVSCYQADDQGRACGKCDSCRLRAEGFAAAGVSDPTRYF

SEQ ID NO: 41500 - protein, 225 aa, Pseudomonas tolaasii
  misc_feature (1)..(225): tr|A0A2N0DZW3|A0A2N0DZW3_PSETO 7-cyano-7-deazaguanine s ynthase OS=Pseudomonas tolaasii NCPPB 2192 OX=564423 GN =queC PE=3 SV=1
MVDQKRAVILLSGGLDSATLVAMVRAEGYSCYTLGFDYGQRHRAELAAAARVAHDLGVVEHKVIGLNLNGIGGSALTDSSIEVPEAPSEGIPLTYVPARNTVFLSLALGWAEVLNARDIFIGVNALDYNGYPDCRPEYIASFERMANLATKAGVEGQGFRIRAPLQNMSKADIVKTGVGLGVDYALTVSCYQADDSGRACGKCDACRLRAEGFKNAAIADPTRYF

SEQ ID NO: 41501 - protein, 232 aa, Pseudomonas tolaasii
  misc_feature (1)..(232): tr|A0A2N0E0G8|A0A2N0E0G8_PSETO 7-cyano-7-deazaguanine s ynthase OS=Pseudomonas tolaasii NCPPB 2192 OX=564423 GN =queC PE=3 SV=1
MTKKAVMVFSGGQDSTTCLIQALPLYDEVHCITFDYGQRHVAEIEVAQKLARQLGATVHKVMDVSLLNELAISSLTRDNIPVPTVDSSGGSLPSTFVPGRNILFLTLASIYAYQVKAETVITGVCETDFSGYPDCRDEFVKALNKALELGMEYTLRLDTPLMWLNKAETWALADYHGKLDLVREQTLTCYNGILGTGCGNCDACNLRARGLNEYLQDKAAVMQSLKQKLQLS

SEQ ID NO: 41502 - protein, 224 aa, Pseudomonas toyotomiensis
  misc_feature (1)..(224): tr|A0A1I5MT68|A0A1I5MT68_9PSED 7-cyano-7-deazaguanine s ynthase OS=Pseudomonas toyotomiensis OX=554344 GN=queC PE=3 SV=1
MNDKKAVILLSGGLDSATVVAMAKAEGYSCYSMSFDYGQRHRAELQAAERVARQLGVVEHKVIGLNLNGIGGSALTDSSIAVPESPTEGIPATYVPARNTVFLALALGWAEVLEARDIFIGVNAVDYSGYPDCRPEFVEAFERMANLATRAGVEGQGFAIRAPLQQMGKGEIIQTGMRLGVDYALTVSCYQADDDGRACGKCDSCRLRAAGFAAAGVPDATRYF

SEQ ID NO: 41503 - protein, 229 aa, Pseudomonas tremae; identical to SEQ ID NO: 41304
  misc_feature (1)..(229): tr|A0A0Q0DBF9|A0A0Q0DBF9_9PSED 7-cyano-7-deazaguanine s ynthase OS=Pseudomonas tremae OX=200454 GN=queC PE=3 SV =1

SEQ ID NO: 41504 - protein, 229 aa, Pseudomonas trivialis
  misc_feature (1)..(229): tr|A0A0H5ABB1|A0A0H5ABB1_9PSED 7-cyano-7-deazaguanine s ynthase OS=Pseudomonas trivialis OX=200450 GN=queC PE=3 SV=1
MTEQTMDQKRAVILLSGGLDSATVVAMAQAQGYSCYTMSFDYGQRHRAELNAAARVARDMGVVEHKVIGLNLNGIGGSALTDSSIDVPEAPSEGIPVTYVPARNTVFLSLALGWAEVLNARDIFIGVNAVDYSGYPDCRPEFVESFERMANLATKAGVEGQGFRILAPLQNLSKADIVKAGVGLGVDYSLTVSCYQADDDGRACGKCDSCRLRAEGFQAAGIADPTRYF

SEQ ID NO: 41505 - protein, 436 aa, Pseudomonas trivialis
  misc_feature (1)..(436): tr|A0A0H5ADJ8|A0A0H5ADJ8_9PSED Uncharacterized protein OS=Pseudomonas trivialis OX=200450 GN=AA957_24310 PE=4 SV=1
MTDLIFHHEFDQLPPRSPNVIPVLMYGSRPLAKGTCSIGGPVRTAVRRLGAPVSRVGFDLLTIAMAVTAADTFVDKAEADDGWARQLRLVIPLADPDLWYAAVPLLQKALHFLSGDIWTIELLPDGPRQSKSQNRGHITVLAGHDCVSLFSGGMDSGIGALDLLGKGRRPILISHSYRGDSEKQILVSSQLPVKVSRFAAVANPTSWLGTTLDVQMRTRSFNFLAYGTLVAATLAQLRVASTPVELFVPENGLIALNPPMTPRRIGALSTRTTHPHFLGLFQQILDTVGLPVVVKNPYALKTKGEMLLGCSDQISLSALATDTVSCGKWKRTHQQCGKCVPCIIRRASFHAAGMKDGTSYNPKGQNLQAVFNDEKARDDLMAMVLSSRRLPKTSVSQWVSNAGPLPLNRRDRDDLLGVAERGMGEVSAYLDSLGLI

SEQ ID NO: 41506 - protein, 232 aa, Pseudomonas umsongensis
  misc_feature (1)..(232): tr|A0A1H2BKE1|A0A1H2BKE1_9PSED 7-cyano-7-deazaguanine s ynthase OS=Pseudomonas umsongensis OX=198618 GN=queC PE =3 SV=1
MTKKAVIVFSGGQDSTTCLIHALPLFDEIHCITFDYGQRHRAEIEVAQQLSKKLGIKVHKVLDTSLLNELAISSLTRDNIPVPSTSNAGHSLPSTFVPGRNILFLTLASIYAYQVQADTVITGVCETDYSGYPDCRHEFVEVLNNAIALGMNYKLHLETPLMWLNKAETWALADHHNSLDLIRDHTLTCYNGMKGSGCGNCDACNLRAKGLNDFLEDKEKTMKTLKSKISLK

SEQ ID NO: 41507 - protein, 230 aa, Pseudomonas umsongensis
  misc_feature (1)..(230): tr|A0A1H2C7E7|A0A1H2C7E7_9PSED 7-cyano-7-deazaguanine s ynthase OS=Pseudomonas umsongensis OX=198618 GN=queC PE =3 SV=1
MTEPLNTAEKRAVILLSGGLDSATVVAMARAEGYSCYTMSFDYGQRSHAELYAAERVARDLGVVEHKVIGLNLNGMGGSALTDTSIDIPEELGEGIPVTYVPARNTVFLSLALGWAEVLGARDIFIGVNAVDYSGYPDCRPEFIESFERMANLATKAGVEGNGFRIQAPLQNLSKAQIVQAGVKLGVNYGLTVSCYQADDNGRACGKCDSCRLRAEGFAAAGISDPTPYF

SEQ ID NO: 41508 - protein, 230 aa, Pseudomonas vancouverensis
  misc_feature (1)..(230): tr|A0A1H2P8A8|A0A1H2P8A8_9PSED 7-cyano-7-deazaguanine s ynthase OS=Pseudomonas vancouverensis OX=95300 GN=queC PE=3 SV=1
MTEQLNNAEKRAVILLSGGLDSATVVAMARAEGYSCYTMSFDYGQRSHAELHAAARVARDLGVVEHKVIGLNLNGMGGSALTDSSIDIPEELGEGIPVTYVPARNTVFLSLALGWAEVLGARDIFIGVNAVDYSGYPDCRPEFIESFERMANLATKAGVEGNGFRIQAPLQNLSKAQIVQAGVKLGVNYGLTVSCYQADDEGRACGKCDSCRLRAEGFVAAGISDPTPYF

SEQ ID NO: 41509 - protein, 229 aa, Pseudomonas veronii; identical to SEQ ID NO: 41437
  misc_feature (1)..(229): tr|A0A1D3K321|A0A1D3K321_9PSED 7-cyano-7-deazaguanine s ynthase OS=Pseudomonas veronii 1YdBTEX2 OX=1295141 GN=q ueC PE=3 SV=1

SEQ ID NO: 41510 - protein, 229 aa, Pseudomonas veronii; identical to SEQ ID NO: 41437
  misc_feature (1)..(229): tr|A0A0R3B181|A0A0R3B181_9PSED 7-cyano-7-deazaguanine s ynthase OS=Pseudomonas veronii OX=76761 GN=queC PE=3 SV =1

SEQ ID NO: 41511 - protein, 230 aa, Pseudomonas versuta
  misc_feature (1)..(230): tr|A0A0M4QH69|A0A0M4QH69_9PSED 7-cyano-7-deazaguanine s ynthase OS=Pseudomonas versuta OX=1788301 GN=queC PE=3 SV=1
MTEHTVVTEKRAVILLSGGLDSATVVAMARAEGYSCYTMSFDYGQRHRSELDAAARVARDLGAIEHKVIGLNLDGIGGSALTDSSIDVPETLGEGIPVTYVPARNTVFLSLALGWAEVLQARDIFIGVNAVDYSGYPDCRPEFVQAFEVMANLATKAGVEGNGFRIQAPLQNLSKAQIVQAGVKLGVDYSLTVSCYQADAQGRACGKCDSCRLRAEGFAAAGITDPTRYF

SEQ ID NO: 41512 - protein, 229 aa, Pseudomonas viridiflava
  misc_feature (1)..(229): tr|A0A1Y6JP16|A0A1Y6JP16_PSEVI 7-cyano-7-deazaguanine s ynthase OS=Pseudomonas viridiflava OX=33069 GN=queC PE= 3 SV=1
MTELNMTEKRAVILLSGGLDSATVVAMARAEGYACYTMSFDYGQRHRAELDAAAQVARDLGAIEHKVIGLNLNGIGGSALTDSSIAVPETPSEGIPVTYVPARNTVFLSLALGWAEVLGARDIFIGVNAVDYSGYPDCRPEFVESFERMANLATKAGVEGQGFTIRAPLQNLSKSDIVKAGTALGVDYALTVSCYQADDQGRACGKCDSCRLRAEGFAAAGVADPTRYF

SEQ ID NO: 41513 - protein, 229 aa, Pseudomonas viridiflava
  misc_feature (1)..(229): tr|A0A3M4JB21|A0A3M4JB21_PSEVI 7-cyano-7-deazaguanine s ynthase OS=Pseudomonas viridiflava OX=33069 GN=queC PE= 3 SV=1
MIELTNTEKRAVILLSGGLDSATVVAMARAEGYACYTMSFDYGQRHRAELDAAARVARDLGAVEHKVIGLNLNGIGGSALTDSSIAVPESPSEGIPVTYVPARNTVFLSLALGWAEVLGARDIFIGVNAVDYSGYPDCRPEFVESFERMANLATKAGVEGQGFTIRAPLQNLSKSDIVKAGAALGVDYSLTVSCYQADDQGRACGKCDSCRLRAEGFTAAGMADPTRYF

SEQ ID NO: 41514 - protein, 234 aa, Pseudomonas vranovensis
  misc_feature (1)..(234): tr|A0A423DU58|A0A423DU58_9PSED 7-cyano-7-deazaguanine s ynthase OS=Pseudomonas vranovensis OX=321661 GN=queC PE =3 SV=1
MHNKALVLFSGGQDSTTCLAWALERYEHVETIGFDYGQRHEIELECRINILQEIRNRFPNWAKRLGEDHVLDLKLLGQISDTAMTVEKTIEFEKNGLPNTFVPGRNLLFFTFAAAIAYRRGLSVLVGGMCETDYSGYPDCRDNTLKSLQVSLGLGMDLPLVIETPLMWLDKKQTWNLAKDLGGPGFVEFVQEETHTCYLGDRQRRHEWGYGCNDCPACELRRTGFEAFQRDNDV

SEQ ID NO: 41515 - protein, 224 aa, Pseudomonas vranovensis
  misc_feature (1)..(224): tr|A0A423DSR2|A0A423DSR2_9PSED 7-cyano-7-deazaguanine s ynthase OS=Pseudomonas vranovensis OX=321661 GN=queC PE =3 SV=1
MTEKRAVILLSGGLDSATVVAMAKAEGYSCYTMSFDYGQRHRAELNAAARVARDLGVVEHKVIGLSLDGIGGSALTDSSIDVPEAPSEGIPVTYVPARNTVFLSLALGWAEVLEARDIFIGVNAVDYSGYPDCRPEFVEAFERMANLATKAGVEGNGFRIQAPLQNLSKAQIVQAGMARGVDYSLTVSCYQADDQGRACGKCDSCRLRADGFKAAGVEDPTRYF

SEQ ID NO: 41516 - protein, 224 aa, Pseudomonas wadenswilerensis
  misc_feature (1)..(224): tr|A0A380T5C7|A0A380T5C7_9PSED 7-cyano-7-deazaguanine s ynthase OS=Pseudomonas wadenswilerensis OX=1785161 GN=q ueC PE=3 SV=1
MTEKRAVILLSGGLDSATVVAMAKAEGYSCYTMSFDYGQRHRAELNAAARVARDLGVVEHKVIGLSLDGIGGSALTDSSIDVPEAPSEGIPVTYVPARNTVFLSLALGWAEVLEARDIFIGVNAVDYSGYPDCRPEFVEAFERMANLATKAGVEGQGFRIQAPLQNLSKAQIVQAGMARGVDYSLTVSCYQADDEGRACGKCDSCRLRADGFKAAGVEDPTRYF

SEQ ID NO: 41517 - protein, 230 aa, Pseudomonas weihenstephanensis
  misc_feature (1)..(230): tr|A0A0J6IKR0|A0A0J6IKR0_9PSED 7-cyano-7-deazaguanine s ynthase OS=Pseudomonas weihenstephanensis OX=1608994 GN =queC PE=3 SV=1
MTEQSLATEKRAVILLSGGLDSATVVAMARAEGYSCYTMSFDYGQRHRAELDAAARVARDLGAIEHKVIGLSLDGIGGSALTDSSIDVPEAPSEGIPVTYVPARNTVFLSLALGWAEVLSARDIFIGVNAVDYSGYPDCRPEFVEAFEVMANLATKAGVEGQGFKIQAPLQNMSKAQIVQAGVKLGVDYSLTVSCYQADGQGRACGKCDSCRLRAEGFAAAGIKDPTRYF

SEQ ID NO: 41518 - protein, 224 aa, Pseudomonas xanthomarina
  misc_feature (1)..(224): tr|A0A098FRL3|A0A098FRL3_9PSED 7-cyano-7-deazaguanine s ynthase OS=Pseudomonas xanthomarina OX=271420 GN=queC P E=3 SV=1
MNEKKAVILLSGGLDSATVVAMARAQGYACYTMSFDYGQRHRAELQAAERVAQQLGVVEHKVIGLDLNGIGGSALTDDSIDVPEVPGEGIPVTYVPARNTVFLSLALGWAEVLGAHDIFIGVNAVDYSGYPDCRPEFVAAFERMANLATKAGVEGLGFRIQAPLQEMSKARIVQEGARLGVDYAATVSCYQADTDGRACGKCDSCRLRAAGFAEAGLADPTRYF

SEQ ID NO: 41519 - protein, 224 aa, Pseudomonas xanthomarina
  misc_feature (1)..(224): tr|A0A1M5P8I0|A0A1M5P8I0_9PSED 7-cyano-7-deazaguanine s ynthase OS=Pseudomonas xanthomarina DSM 18231 OX=140334 6 GN=queC PE=3 SV=1
MTGKKAVILLSGGLDSATVVAMAKADGYACYSMSFDYGQRHRAELQAAERVAQQLGVVEHKVIGMSLNGIGGSALTDSRIAVPESLGEGIPVTYVPARNTLFLSLALGWAEVLDAQDIFIGVNAVDYSGYPDCRPAFIEAFEQLANLATKAGVEGRRFSIRAPLQNLSKSEIVQAGVRLGVDYSMTVSCYQADEDGRACGRCDSCRLRAAGFDEAGVADPTRYM

SEQ ID NO: 41520 - protein, 227 aa, Pseudomonas xinjiangensis
  misc_feature (1)..(227): tr|A0A1H1UGT8|A0A1H1UGT8_9PSED 7-cyano-7-deazaguanine s ynthase OS=Pseudomonas xinjiangensis OX=487184 GN=queC PE=3 SV=1
MTYPDERKAVVLLSGGLDSATILAMAQAEGYVCYTMSFDYGQRHRVELDAAAIIARAAGAADHKVIGLNLDGMGGSALTDPGIAVPESEQAGIPVTYVPARNTVFLSLALGWAEVLGAADIFIGVNAVDYSGYPDCRPEFIEAFERVANLATREGVEGEGFTIRAPLQQMSKGEIIQAGLARGVDYSLTVSCYQADDQGRACGRCDSCRLRSAGFAAAGVVDPTRYA

SEQ ID NO: 41521 - protein, 225 aa, Pseudomonas yamanorum
  misc_feature (1)..(225): tr|A0A1H2I0Z8|A0A1H2I0Z8_9PSED 7-cyano-7-deazaguanine s ynthase OS=Pseudomonas yamanorum OX=515393 GN=queC PE=3 SV=1
MTDQKRAVILLSGGLDSATVVAMARAEGYSCYTLSFDYGQRHRAELNAAARVARDLGVVEHKVIGLNLDGMGGSALTDSSIDVPQGPSEGIPVTYVPARNTVFLSLALGWAEVLEARDIFIGVNALDYAGYPDCRPEYIESFERMANLATKAGVEGPGFRILAPLQNRSKADIVKAGVGLGVDYSLTVSCYQADIDGRACGKCDSCRLRAEGFQAAGITDPTRYF

SEQ ID NO: 41522 - protein, 230 aa, Pseudomonas yamanorum
  misc_feature (1)..(230): tr|A0A143GCX4|A0A143GCX4_9PSED 7-cyano-7-deazaguanine s ynthase OS=Pseudomonas yamanorum OX=515393 GN=queC PE=3 SV=1
MSKKAVIVFSGGQDSTTCLIQALPLYDEVHCITFDYGQRHVAEIEVAQKLSKQLGATVHKVMDVSLLNELAISSLTRDNIPVPTVNSSGESLPSTFVPGRNILFLTLAAIYAYQVKAQTVITGVCETDFSGYPDCRDEFVKALNKALQLGMEYDVRLETPLMWLNKAETWALADYHHQLDLIRNQTLTCYNGIIGTGCGNCDACNLRARGLNDYLENKAAVMQSLKSKLA

SEQ ID NO: 41523 - protein, 225 aa, Pseudomonas yangmingensis
  misc_feature (1)..(225): tr|A0A1I4RJX5|A0A1I4RJX5_9PSED 7-cyano-7-deazaguanine s ynthase OS=Pseudomonas yangmingensis OX=1720063 GN=queC PE=3 SV=1
MKKAVCLLSGGLDSTTTLAIAQAEGFDVHAMSFRYGQRHSVELDRASAFARQRGVAEHIIVDFDLRLIGGSALTADIQVPKHDSADGMGTDIPVTYVPARNTIFLSFALGWAEVLGAEDIFIGVNALDYSGYPDCRPEYIATFETLGNLATRAGVEGRQNLRIHAPLMQMSKAQIICRGLELGVDFAQTSSCYDPGADGRPCARCDSCLLRARGFEALGLTDPLL

SEQ ID NO: 41524 - protein, 229 aa, Pseudomonas zeshuii; identical to SEQ ID NO: 41398
  misc_feature (1)..(229): tr|A0A1M6AHV6|A0A1M6AHV6_9PSED 7-cyano-7-deazaguanine s ynthase OS=Pseudomonas zeshuii OX=1076620 GN=queC PE=3 SV=1

SEQ ID NO: 41525 - protein, 223 aa, Pseudomonas zhaodongensis
  misc_feature (1)..(223): tr|A0A3M2HPT1|A0A3M2HPT1_9PSED 7-cyano-7-deazaguanine s ynthase OS=Pseudomonas zhaodongensis OX=1176257 GN=queC PE=3 SV=1
MNHKKAVILLSGGLDSATVLAIAKEQGYSCYTMSFDYGQRHRAELQAAERVSRQHAVEHKVIGINLDGIGGSALTDSAIAVPEQLGEGIPVTYVPARNTVFLSLALGWAEVLGAQDIFIGVNAVDYSGYPDCRPEFIDAFERMANLATKAGVEGSGFSIRAPLQNLSKAEIVKMGVQLGVDYSSTVSCYQADDDGRACRVCDSCRLRAAGFEAAGVEDPTRYY

SEQ ID NO: 41526 - protein, 224 aa, Pseudomonas zhaodongensis
  misc_feature (1)..(224): tr|A0A365PXP9|A0A365PXP9_9PSED 7-cyano-7-deazaguanine s ynthase OS=Pseudomonas zhaodongensis OX=1176257 GN=queC PE=3 SV=1
MTSKKAVILLSGGLDSATVVAMAKADGYACYSMSFDYGQRHRAELQAAERVAQHLGVVEHKVIGMNLNGIGGSALTDSSIAVPEELGEGIPVTYVPARNTLFLSLALGWAEVLGARDIFIGVNAVDYSGYPDCRPEFVEAFERLANLATKAGVEGRGFSIHAPLQDLSKGEIIQAGERLGVDYSMTVSCYQADEDGRACGKCDSCRLRAAGFSEAGVPDPTRYK

SEQ ID NO: 41527 - protein, 191 aa, Pseudonocardia autotrophica
  misc_feature (1)..(191): tr|A0A1Y2MHE9|A0A1Y2MHE9_PSEAH 7-cyano-7-deazaguanine s ynthase OS=Pseudonocardia autotrophica OX=2074 GN=queC PE=3 SV=1
MIWQGPGVSRVRHPCLLLSGGVDSALVARFLIEAGTPPTGLFVDYGQPAAKAEAHASTAIAAAFGLSRECVTIGGLSVPSSGEIIGRNDLLIAVARAAAPGRDVALGVHGGTGYADCSPEHRDAWQSLLDAQHGGAVRLLAPLLHLTKPEVLALAVDGSIPLGLTHSCEAGDTACGRCRSCLDRAILDARA

SEQ ID NO: 41528 - protein, 440 aa, Pseudopedobacter saltans
  misc_feature (1)..(440): tr|F0SEA6|F0SEA6_PSESL Uncharacterized protein OS=Pseud opedobacter saltans (strain ATCC 51119 / DSM 12145 / JC M 21818 / LMG 10337 / NBRC 100064 / NCIMB 13643) OX=762 903 GN=Pedsa_3496 PE=4 SV=1
MKKIKVEIPKYDSKSGILYTKLTEENGDSSIISTDYKTLLPFAISVNPEIRDFFLMTCSVYGIDRFVNRKENSVDGWSRELNISFPVSEIKVWSNVKNDLEELFSFLTGDYWKIDFYESNFVNPEIDLPIDFKEKYKQVNLFSGGLDSLIGAIDFLSTHPKDKILLASHYDPQMKGPLSDQTVLLDKLEVKYKGQFNYVPSIKVTLSQTTTKRETTFRSRSILFIGIALLISQGKKINEIIVPENGSVSLNYPLSPSRRTSCSTRTTHSFVLEKTNLIISTLKINSNIYNPYEFKTKGEMVDDCEDLEFLRKIIGFSNSCGKRGHRKTWVNRSATHCGVCMPCIYRQASLQNQKDPTIYGSHIDSLIPFKRKKTQDVGICLDFLRKKLTKDDIKTELIVNGIKNINKLNRYVDVVWRTRIELSKWVDLNGNSIIKSKAGL

SEQ ID NO: 41529 - protein, 240 aa, Pseudorhodoferax soli
  misc_feature (1)..(240): tr|A0A368XY81|A0A368XY81_9BURK 7-cyano-7-deazaguanine s ynthase OS=Pseudorhodoferax soli OX=545864 GN=queC PE=3 SV=1
MSLPRNALVLFSGGQDSTTCLAHALEQYARVETIAFDYGQRHRIELDARLEVLRQFRAQFPHWAERLGEDHLLAVPVLGEISETSLTRDIAMEMQEQGLPNSFVPGRNLLFLTLAAALAYRRGLDVLVTGVCETDFSGYPDCRDDTIKAMQIALSLGMDRRILIDTPLMWIDKADTWRLAERLGGSALVGLIVEHTHTCYLGERGALHAWGYGCGDCPACQLRARGWHQYQSPGATPPGG

SEQ ID NO: 41530 - protein, 232 aa, Pseudorhodoferax sp.
  misc_feature (1)..(232): tr|A0A0S9L844|A0A0S9L844_9BURK 7-cyano-7-deazaguanine s ynthase OS=Pseudorhodoferax sp. Leaf265 OX=1736315 GN=q ueC PE=3 SV=1
MSLPRQALVLFSGGQDSTTCLAHALVQYERVETIAFDYGQRHRIELDARLEVLRQFRVQFPHWAARLGEDHLLAVPVLGEISETSLTRDIAMEMQEQGLPNSFVPGRNLLFLTLAAALAYRRGLDVLVTGVCETDFSGYPDCRDDTIKAMQIALSLGMDRRILIDTPLMWIDKADTWRMAERLGGPALVDLIVEHTHTCYLGERGALHAWGYGCATCPACVLRAKGWERYSA

SEQ ID NO: 41531 - protein, 235 aa, Pseudorhodoferax sp.
  misc_feature (1)..(235): tr|A0A0Q4YG68|A0A0Q4YG68_9BURK 7-cyano-7-deazaguanine s ynthase OS=Pseudorhodoferax sp. Leaf267 OX=1736316 GN=q ueC PE=3 SV=1
MPRRALVLFSGGQDSTTCLAHALARYAHVETIAFDYGQRHRIELDARLVVLQQLREQFPAWSPRLGDDHLLAVPVLGEISETALTRDIALKMEDAGLPNTFVPGRNLLFLTLAAALAYRRDLDVLVTGVCETDFSGYPDCRDDTMKAMQLALSLGMDRRILVDTPLMWIDKAATWALAASLGGPALVELIVEHTHTCYLGERGARHRWGYGCGQCPACELRARGHGLYSASRASS

SEQ ID NO: 41532 - protein, 241 aa, Pseudorhodoplanes sinuspersici
  misc_feature (1)..(241): tr|A0A1W6ZVN9|A0A1W6ZVN9_9RHIZ 7-cyano-7-deazaguanine s ynthase OS=Pseudorhodoplanes sinuspersici OX=1235591 GN =queC PE=3 SV=1
MGLSVAASERAIVLFSGGQDSTVCLAWALERFAEVETIGFDYGQRHAVELAVRPVIREKMRSLKPEWGGRLRDDHVIDLSVLGEISETALTRDVAIDMADSGLPTTFVPGRNLMFLTFAGALAYRRGAKNLVAGMCETDYSGYPDCRDDTVKAMQVALTLGMDRRFVVHTPLMWIDKAATFALAYEIGGQALLELVVEDTHSCYLGDRSQRHDWGYGCGECPACQLRAAGFAKWNDECRKS

SEQ ID NO: 41533 - protein, 455 aa, Pseudoroseicyclus aestuarii
  misc_feature (1)..(455): tr|A0A318SN12|A0A318SN12_9RHOB 7-cyano-7-deazaguanine s ynthase in queuosine biosynthesis OS=Pseudoroseicyclus aestuarii OX=1795041 GN=DFP88_1146 PE=4 SV=1
MRRFSLIGRLGSDDKSKINLVQTDSEVFEIDFLDGDLRMGFGIGHALDQLASLGLQPSERGIDLVVLAALVNAGDTRVSRKSNAQDGWTREIDLYVPMSASAAWSANTRSIEAMLRFLTGDRWRVFIRDRTKRTKTLVVAPKRLAIDGLTKVSLLSGGLDSLVGAIDLLSVGERPLFVSHYWDSETAKAQAYVLDRLETRFGQEAFKSLRVRLGFDKHHLTTGETENTQRGRSFLFYSLATLAASAIDGRTTVDIPENGLIALNVPLDPLRFGALSTRTAHPHFIASMQKLLDALALDVELNNPYRHMTKGEMVANCADKILLEKIVANSMSCSSPAKARYKKLSPRHCGYCVPCLIRRASLEVGLDGDDMTPYLVEDLKGHVLASDQPEGEHVRSFQLMAKRIKAKPDLAKILVHKPGPLHDEPDATPDYADVFRRGVLEVAELLKGVRARPGG

SEQ ID NO: 41534 - protein, 203 aa, Pseudoroseicyclus aestuarii
  misc_feature (1)..(203): tr|A0A318SR37|A0A318SR37_9RHOB 7-cyano-7-deazaguanine s ynthase OS=Pseudoroseicyclus aestuarii OX=1795041 GN=qu eC PE=3 SV=1
MKTLVICSGGLDSVTLADKVAAERDLTRLVSFDYGQRHARELDFAREAADRLEVPHHLIDLRAVGAALTGSALTDDLAVPDGHYAEETMRITVVPNRNAIMLAVAFGVAAAQGDAAVAAAVHGGDHFIYPDCRPGFIDAFHRMQAAALEGYADVALHTPFVERTKADIVRDGAALGTPFDRTWSCYKGGAQHCGRCGTCVERR

SEQ ID NO: 41535 - protein, 197 aa, Pseudosphingobacterium domesticum
  misc_feature (1)..(197): tr|A0A1H7GN01|A0A1H7GN01_9SPHI 7-cyano-7-deazaguanine s ynthase OS=Pseudosphingobacterium domesticum OX=407022 GN=SAMN05661044_00139 PE=3 SV=1
MSKGLLLSGGLDSISLAYMVRPEIAFTVDYGQKPAQTEIKISENICKILKIRHEVIVVDCSSLGSGDLTNNPSLNTSPSSEWWPYRNQLLVTLVAMRAISLNVRELLVGSVRSDNFHKDGTIPFYQKLDSLMQYQEGNMKILYPVIDLYTHELIITSGIPLDMILMAHSCHTSNEPCGFCRGCLKYLTVKQKLNIEN

SEQ ID NO: 41536 - protein, 218 aa, Pseudospirillum japonicum
  misc_feature (1)..(218): tr|A0A1H6TVG2|A0A1H6TVG2_9GAMM 7-cyano-7-deazaguanine s ynthase OS=Pseudospirillum japonicum OX=64971 GN=queC P E=3 SV=1
MNARKAVVIYSGGMDSFTLLHQVIQQGYQVYPVSFDYGQRHARELAAAKHVCQMLNLPHQCIDLRSIQPLLDQSALTGQHPVPQGTYAPENLQITLVPNRNMILLSLAIAYAVNLGANECFYGAHGGDHVLYPDCRPEFVTGMDQMAQISNLQPVRIRAPFLHYDKADILRLGQAMHLDYALTWTCYQGAEQPCGTCSACHERAQAFAACGCADPLIG

SEQ ID NO: 41537 - protein, 232 aa, Pseudovibrio axinellae
  misc_feature (1)..(232): tr|A0A165UN91|A0A165UN91_9RHOB 7-cyano-7-deazaguanine s ynthase OS=Pseudovibrio axinellae OX=989403 GN=queC PE= 3 SV=1
MKTIVICSGGLDSVTLAYKVAREHELLGLVSFDYGQRHKKELDYAAHAAKQLGVPHYILNMSQIGTHLSGSALTDDLDVPDGHYAEENMKVTVVPNRNAIMLSIGFGIAAAQQADAVAAAVHGGDHFIYPDCRPEFIKSFEAMQKLALAGYADVSLYTPFVEISKGAIVTEGAKHNVPFEDTWSCYKGGEKHCGRCGTCVERREAFDLAGVDDPTDYADPDYWKSAVERADT

SEQ ID NO: 41538 - protein, 232 aa, Pseudovibrio denitrificans
  misc_feature (1)..(232): tr|A0A1I6XQB5|A0A1I6XQB5_9RHOB 7-cyano-7-deazaguanine s ynthase OS=Pseudovibrio denitrificans OX=258256 GN=queC PE=3 SV=1
MKTIVICSGGLDSVTLAYKVAREHELLGLVSFDYGQRHKKELDYAAHAAKQLGVPHHILDMSQIGAHLSGSALTDDVDVPDGHYAEENMKVTVVPNRNAIMLSIGFGIAAAQQADAVAAAVHGGDHFIYPDCRPGFIKSFEAMQKLALDGYANVSLYTPFVEISKGAIVAEGARINVPFEDTWSCYKGGEKHCGRCGTCVERREAFDLAGVEDPTDYADPDYWKSAVERAEP

SEQ ID NO: 41539 - protein, 232 aa, Pseudovibrio sp.
  misc_feature (1)..(232): tr|A0A1H1FAW0|A0A1H1FAW0_9RHOB 7-cyano-7-deazaguanine s ynthase OS=Pseudovibrio sp. Tun.PSC04-5.I4 OX=1798213 G N=queC PE=3 SV=1
MKTIVICSGGLDSVTLAYKVAHEQTLLGLVSFDYGQRHKIELDYAAHAAKQLGVPYSLLDMSQIGRHLSGSALTDDIDVPDGHYAEENMKVTVVPNRNAIMLSIGFGIAAAQQADAVAAAVHGGDHFIYPDCRPGFIKNFEDMQKLALDGYANVSLYTPFLEIPKSAIVTEGVKHNVPFADTWSCYKGGDTHCGRCGTCVERREAFAIAGVVDPTIYADPDYWKSALERAPL

SEQ ID NO: 41540 - protein, 232 aa, Pseudovibrio sp.
  misc_feature (1)..(232): tr|A0A161XN91|A0A161XN91_9RHOB 7-cyano-7-deazaguanine s ynthase OS=Pseudovibrio sp. WM33 OX=1735585 GN=queC PE= 3 SV=1
MKTIVICSGGLDSVTLAYKVARENELLGLVSFDYGQRHKKELDYAAHAAKQLGVPHHILDMSQIGAHLSGSALTDDVDVPDGHYAEENMKVTVVPNRNAIMLSIGFGIAAAQQADAVAAAVHGGDHFIYPDCRPGFIKSFEAMQKLALDGYANVSLYTPFVEISKGAIVEEGARINVPFEDTWSCYKGGEKHCGRCGTCVERREAFDLAGVEDPTEYADPDYWKSVVERAEP

SEQ ID NO: 41541 - protein, 221 aa, Pseudoxanthomonas composti
  misc_feature (1)..(221): tr|A0A4Q1JTR1|A0A4Q1JTR1_9GAMM 7-cyano-7-deazaguanine s ynthase OS=Pseudoxanthomonas composti OX=2137479 GN=que C PE=3 SV=1
MKKAVVLVSGGMDSAVVLAMAREQGFTPYALSVSYGQRHTSELDAAARVAQTQHAAAHKTVNVDLRSIGGSALTDDIDVPESGGAGIPVTYVPARNTVMLSVALGWAEVLGAADIFCGVNAVDYSGYPDCRPEFIAAFQALANLATKAGVEGAGLRVHAPLQFLSKADIVRQGVRLGVDFAETVSCYSADAQGRACGHCDACTLRRAGFIDAGVADPTRYT

SEQ ID NO: 41542 - protein, 231 aa, Pseudoxanthomonas dokdonensis
  misc_feature (1)..(231): tr|A0A0R0D033|A0A0R0D033_9GAMM 7-cyano-7-deazaguanine s ynthase OS=Pseudoxanthomonas dokdonensis OX=344882 GN=q ueC PE=3 SV=1
MKKAVVLLSGGMDSAVVVAMAREQGFAVHALSVRYGQRHTSELEAADRVATALGAVEHKTVHVDLRSIGGSALTADIDVPLDTQANPDADPGVEHIPVTYVPARNTIMLSVALGWAEVLGATDIFCGVNAVDYSGYPDCRPAFIQAFEQLANLATKAGVEGAGLRIHAPLQMLSKADIVREGVRLGVDFSQTVSCYQADDAGRACGHCDACRLRADGFVQAGVADPTRYVP

SEQ ID NO: 41543 - protein, 221 aa, Pseudoxanthomonas indica
  misc_feature (1)..(221): tr|A0A1T5LH78|A0A1T5LH78_9GAMM 7-cyano-7-deazaguanine s ynthase OS=Pseudoxanthomonas indica OX=428993 GN=queC P E=3 SV=1
MKKAVVLLSGGMDSAVVVAIAREQGYAVHALSVRYGQRHTSELAAAERVAQALGVAAHKTVTVDLRSIGGSALTDDIDVPESGGAGIPVTYVPARNTIMLSMALGWAEVLGAADIFCGVNAVDYSGYPDCRPEFIAAFEQLANLATKAGVEGAGLRIHAPLMRMGKDTIVREGLRLGVDFSRTVSCYQADEQGRACGHCDACRLRAAGFAEAGVADPTRYA

SEQ ID NO: 41544 - protein, 221 aa, Pseudoxanthomonas sp.
  misc_feature (1)..(221): tr|A0A543DBY7|A0A543DBY7_9GAMM 7-cyano-7-deazaguanine s ynthase OS=Pseudoxanthomonas sp. 3HH-4 OX=1690214 GN=qu eC PE=3 SV=1
MKKAVVLLSGGMDSAVVVAIAREQGFAVHALSVRYGQRHTSELDAAARVAATLGAAAHKTVHVDLRSIGGSALTDDIDVPEAGGPGIPVTYVPARNTIMLSVALGWAEVLGANDIFCGVNAVDYSGYPDCRPEFIEAFEKLANLATKAGVEGAGLRIQAPLLHMSKADIVREGVRLGVDFAQTVSCYQADGQGHACGHCDACRLRAAGFADAGVPDPTHYA

SEQ ID NO: 41545 - protein, 221 aa, Pseudoxanthomonas sp.
  misc_feature (1)..(221): tr|A0A4Q8LQ73|A0A4Q8LQ73_9GAMM 7-cyano-7-deazaguanine s ynthase OS=Pseudoxanthomonas sp. NML171202 OX=2480817 G N=queC PE=3 SV=1
MNNAVVLVSGGLDSAVVLAIAREHGFRTYALSVQYGQRHTSELDAAARVSQQLGAAAHKTVHVDLRSIGGSALTDDIEVPQAGGEGIPVTYVPARNTIMLSIALGWAEVLGAADIFCGVNAVDYSGYPDCRPEFISAFQTLANLATKAGVEGAGLRVHAPLQFMSKADIVREGVRLGVDFGATVSCYNADASGAACGRCDACRLRAAGFADAGVPDPTRYA

SEQ ID NO: 41546 - protein, 226 aa, Pseudoxanthomonas spadix
  misc_feature (1)..(226): tr|A0A3M6PU62|A0A3M6PU62_9GAMM 7-cyano-7-deazaguanine s ynthase OS=Pseudoxanthomonas spadix OX=415229 GN=queC P E=3 SV=1
MKNAVVLVSGGMDSAVVLAMARAQGFVPYALSVQYGQRHTSELDAAARMAAALGAAAHKVVNVDLRSIGGSALTDDIQVPVRTGEEPGGEGIPVTYVPARNTIMLSIALGWAEVLGAADIFCGVNAVDYSGYPDCRPEFIAAFQALANLATKAGVEGAGIVVHAPLQFMGKAQIVREGVALGVDFSSTVSCYNADAAGRACGHCDACRLRAAGFAEAGVADPTRYA

SEQ ID NO: 41547 - protein, 226 aa, Pseudoxanthomonas spadix
  misc_feature (1)..(226): tr|G7UPU6|G7UPU6_PSEUP 7-cyano-7-deazaguanine synthase OS=Pseudoxanthomonas spadix (strain BD-a59) OX=1045855 GN=queC PE=3 SV=1
MKNAVVLVSGGMDSAVVLAMARAQGFVPYALSVQYGQRHTSELDAAARMAAALGAAAHKVVNVDLRSIGGSALTDDIQVPVRTGEEPGGEGIPVTYVPARNTIMLSIALGWAEVLGAADIFCGVNAVDYSGYPDCRPEFIAAFQTLANLATKAGVEGAGIVVHAPLQFMGKAQIVREGVALGVDFSSTVSCYNADAAGRACGHCDACRLRAAGFAEAGVADPTRYA

SEQ ID NO: 41548 - protein, 221 aa, Pseudoxanthomonas suwonensis
  misc_feature (1)..(221): tr|A0A0E3Z2C6|A0A0E3Z2C6_9GAMM 7-cyano-7-deazaguanine s ynthase OS=Pseudoxanthomonas suwonensis OX=314722 GN=qu eC PE=3 SV=1
MKNAVVLVSGGMDSAVVLAIAREQGYAVHALSVRYGQRHTSELDAADRVARALGAAAHKTVVVDLRSIGGSALTDDIEVPDAGGEGIPVTYVPARNTIMLSVALGWAEVLGAADIFCGVNAVDYSGYPDCRPEFIEAFERLANLATKAGVEGAGIRVHAPLIRMGKDEIVREGLRLGVDFAQTVSCYRADAEGRACGHCDACRLRAAGFAAAGVADPTRYV

SEQ ID NO: 41549 - protein, 224 aa, Pseudoxanthomonas suwonensis
  misc_feature (1)..(224): tr|E6WQT4|E6WQT4_PSEUU 7-cyano-7-deazaguanine synthase OS=Pseudoxanthomonas suwonensis (strain 11-1) OX=743721 GN=queC PE=3 SV=1
MKKAVALVSGGMDSAVVLAIAREQGFAVHALSVRYGQRHTSELDAAARVASALGAAAHKTVAIDLRSIGGSALTDDIEVPEAGGEGIPVTYVPARNTIMLSAALGWAEVLGAADIFCGVNAVDYSGYPDCRPEFIEAFERLANLATKAGVEGAGIRVHAPLLHMGKDEIVREGLRLGVDFAQTVSCYRADDQGLACGHCDACQLRAAGFATAGVADPTRYITGA

SEQ ID NO: 41550 - protein, 225 aa, Pseudoxanthomonas taiwanensis
  misc_feature (1)..(225): tr|A0A562CX47|A0A562CX47_9GAMM 7-cyano-7-deazaguanine s ynthase OS=Pseudoxanthomonas taiwanensis J19 OX=935569 GN=queC PE=3 SV=1
MKKAVALVSGGMDSAVVLAIAREQGFAVHALSVRYGQRHTSELDAAARVASALGAVEHKTVAIDLRSIGGSALTDDIEVPEAGGEGIPVTYVPARNTIMLSVALGWAEVLGAADIFCGVNAVDYSGYPDCRPEFVAAFERLANLATKAGVEGAGIRVHAPLIRMGKDEIVREGLRLGVDFAQTVSCYRADEQGRACGHCDACQLRAAGFAAAGVADPTRYVAAAG

SEQ ID NO: 41551 - protein, 221 aa, Pseudoxanthomonas wuyuanensis
  misc_feature (1)..(221): tr|A0A286D4M2|A0A286D4M2_9GAMM 7-cyano-7-deazaguanine s ynthase OS=Pseudoxanthomonas wuyuanensis OX=1073196 GN= queC PE=3 SV=1
MKKAVVLLSGGMDSAVVVAIAREQGYAVHALSVRYGQRHTSELEAAVRVADSLGAVAHKTVHVDLRSIGGSALTDDIEVPEAGGGGIPVTYVPARNTIMLSVALGWAEVLGATDIFCGVNAVDYSGYPDCRPEFIDAFEKLANLATKAGVEGAGLRIHAPLLKLSKADIVREGVRLGVDFAQTVSCYRADEQGRACGHCDACQLRAAGFADADVPDPTRYA

SEQ ID NO: 41552 - protein, 1375 aa, Pseudozobellia sp.
  misc_feature (1)..(1375): tr|A0A2E5BK78|A0A2E5BK78_9FLAO Carrier domain-containin g protein OS=Pseudozobellia sp. OX=2024854 GN=CML05_188 95 PE=4 SV=1
MNNSNKTRLPLTQSQLSLWAGQRIHSEVPLHNVVYTFEIQGDIDGVIFKRSFEQLVEETDILRMTFSEIAGEPFQEINSTIPFQFEYLDFTEKSQEEIDQWVRVNTQSPINLAEIVFDSRLLKCDESKFIWFLKIHHLVTDAVTYQLLFHRLSDIYQARLNNNESKNELRVYRSYLEYEREQVADQELNSNKEYWDKKTSKVNSRPALYGEKWSKNSTEAKRIEITLTPTQTEKLNNLCQKTGVRSWTKSATLYNLFVTVFATYLHRTSGLSKFNIGSPAHNRSTLDFSKTAGLFIEVLPLTIKIDDDETFISLLDKIKIEGNSFLKNVHPSMVGCLNGEPPSNILNFINVEFKDFNGWPTQVRWIHNGHIDASHDIRCHVYDFKGEGDYTIAFDINTSVCPQKDYDKVALHFNSILDSLLENLENAIDQKGLEPISQSTILSGTHTPLKDSFLKKFEEFAAKTPNKVAVQSFEQTLTYSNLNKKANQLAGYLAERGIENQSRVAVFLHRSPDYLISILAIMKLGGVFVPIASDQPLERVQYILRKADCSLIITEQKLAVGLDFEKENIVSTSHFSELENQNEFSSFGHDLENLSYILFTSGSTGKPKGVGISNKSLNNYLNWARTAYSIDQNSVFPLFTSIGFDLTLTSVFLPILCGGRIIVYKENPSGPDTSVLNVFSDNLVNKIKLTPSHLDLVKEHDFSPSVLETMILGGEDLKTTSVSKIQSQFSEKLEIFNEYGPTEATVGCIVSKYDAKEHKSFSVPIGLPIDNTQVLLLDTHKNLVPQGVVGEIYLSGACLANGYINDQELTNEKFLENPFSNQSKIYRTGDLGRLNSKGELEYHGRIDSQIKLRGYRIELNDIEANLSEFEGIDSCAVMLVDNKDQKTEEKVFNCTNCGLPSNYPSTDFDENGVCHLCRAFENYEEKVHQYFKRDEELVRLLTSKRDINPNYDCISLLSGGKDSTYVLARLVGMGLRVLAFTMDNGYISEQAKENIDRIVKRLGVDHVYGKTPHMNAIFVDSLQRHHNVCNGCFKTIYTLSTKIAVEKQIPFIVTGLSRGQFFETRLTEELFWDQQLDSEKIDNTILEARKLYHQENDAVKELLDVSMFDSDEVFDQVQFVDFYRFSDVSLEEMLVYLKKQVGWKRPTDTGRSTNCLINQVGIYVHKKDLGYSNYSFPYSWDVRLGHKTRDESLEEINEVIDETEVKRIMNEIGYDPSAQQENDKKLVAYFTGAEGLSIEKLRKFMNQRVPSYMVPTLFHFVAEMPLTNNGKIDRAKLSENKIKPIPTDCPYVAPSNEIEELVQKIWMDVLLLDRIGIKEDFISLGGHSLAAIRVTARINEEIETNFPLNKIFEYPTIESYSKYVEETLIELMNKN

SEQ ID NO: 41553 - protein, 221 aa, Psychrilyobacter sp.
  misc_feature (1)..(221): tr|A0A369XUR6|A0A369XUR6_9FUSO 7-cyano-7-deazaguanine s ynthase OS=Psychrilyobacter sp. S5 OX=2283384 GN=queC P E=3 SV=1
MNKNSCVLVFSGGQDSTTLLFHAKKLYKEVIAISFNYGQKHSLELECAKELCRKNEVEHHILDMGLLNQLAPNALTRSDLEVEKGEVAEDEVPNTFVDGRNMIFLTFAGVFAKQRDINVIMTGVSQSDFSGYPDCRDVFIKSLNTTLNLAMDYTFVLETPLMWLDKAETWNMAYELGVLDIIKNETLTCYNGVVGNGCGDCPACALRKNGYLEFKEKFLKV

SEQ ID NO: 41554 - protein, 219 aa, Psychrobacillus insolitus
  misc_feature (1)..(219): tr|A0A2W7N2P6|A0A2W7N2P6_9BACI 7-cyano-7-deazaguanine s ynthase OS=Psychrobacillus insolitus OX=1461 GN=queC PE =3 SV=1
MKQEKAIIVFSGGQDSTTCLFWAKERFKEIEAVTFDYGQRHSLEIECAKEIAKELGIKHHILDMSLLNQLAPNALTRDDIVVEDGGEGELPSTFVPGRNLLFLSFAGVLASQVGARHIVTGVCETDFSGYPDCRDIFVKSLNVTLNLSMDTSFVIDTPLMWLNKAQTWELADQLGVLEFVRERTLTCYNGVIADGCGECPACKLRKRGLDEYLSFKKGS

SEQ ID NO: 41555 - protein, 557 aa, Psychrobacillus lasiicapitis
  misc_feature (1)..(557): tr|A0A544TE00|A0A544TE00_9BACI Uncharacterized protein OS=Psychrobacillus lasiicapitis OX=1636719 GN=FG382_030 15 PE=4 SV=1
MDCIHDPSIDRSNGQIFCEKKIMGDKDMANKCKLNLRHKEFYPIQGAGYEGFFRGYFYYENQYVTHENFVDIVKEASSEEITKWNGEFALILQTEDETTLVTDKKRTIPLFYSKHETNSWIVQDFIEPKPSMSIRKDSEEELLLAGFVSGDKTLFDGWYQLEVASIVHLKENASKYCYYSYVTEKDQDSLDNFAEELAHILHHIFDDLVERLDGRKIILPLSGGYDSRIVALLLKDKGLSDSIITFTYGRPGNGEATVSKQIADRLGLQWKYFAYDKAMWEELYKSKLWKDYVVYACNGTSVAHLQDFPSTKLLVEEEGLENAVFIPGHSLDFLGGSHLPYEAILDKEFTSQEVVDFIIPKHFRLWQLENGLSHTTSDIGKSVTKDVSSYKTLTNERVTSIIDEWNWKERQAKFIINSVRVYEYFDQDWTLPLWDDRLIYFFSKIPADLKYKKYLYDFALHKMYPDFYPLPPKPGAENSLKNKYGVLYPLLRKVYRKRKLYRQYFEEPMEWYGIYPTYKQYKQSLSFKRNGTKYTHPYNINAFIAKDMIQMMKELAK

SEQ ID NO: 41556 - protein, 219 aa, Psychrobacillus lasiicapitis
  misc_feature (1)..(219): tr|A0A544T6X9|A0A544T6X9_9BACI 7-cyano-7-deazaguanine s ynthase OS=Psychrobacillus lasiicapitis OX=1636719 GN=q ueC PE=3 SV=1
MKQEKAIIVFSGGQDSTTCLFWAKERFREIEAVTFDYGQRHSLEIECAKAITEELGIKHHILDMSLLNQLAPNALTREDIQVDDGEEGGLPSTFVPGRNMLFLSFAGVLASQVGAKHIVTGVCETDFSGYPDCRDIFVKSLNVTLNLAMDDTFVVDTPLMWLNKAQTWELADELGALEFVREKTLTCYNGVMADGCGECPACKLRQRGLDEYLSFKKES

SEQ ID NO: 41557 - protein, 219 aa, Psychrobacillus psychrodurans
  misc_feature (1)..(219): tr|A0A1I4X8P5|A0A1I4X8P5_9BACI 7-cyano-7-deazaguanine s ynthase OS=Psychrobacillus psychrodurans OX=126157 GN=q ueC PE=3 SV=1
MRQEKAIIVFSGGQDSTTCLFWAKERFKEIEAVTFDYGQRHSLEIECAKEITKELGVKHHILDMSLLNQLAPNALTRDDIKVENGEDGGLPSTFVPGRNLLFLSFAGVLASQVGAKHIVTGVCETDFSGYPDCRDIFVKSLNVTLNLSMDTTFVIDTPLMWLNKAQTWELADQLGALDFVREKTLTCYNGVIADGCGECPACKLRNKGLNEYLSFKKGS

SEQ ID NO: 41558 - protein, 224 aa, Psychrobacillus psychrotolerans
  misc_feature (1)..(224): tr|A0A1I5XZG1|A0A1I5XZG1_9BACI 7-cyano-7-deazaguanine s ynthase OS=Psychrobacillus psychrotolerans OX=126156 GN =queC PE=3 SV=1
MKQEKAIIVFSGGQDSTTCLFWAKERFKEIEAVTFDYGQRHSLEIECAMEIAKELGVKHHILDMSLLNQLAPNALTRDDIKVEDGEDGGLPSTFVPGRNLLFLSFAGVLASQVGAKHIVTGVCETDFSGYPDCRDIFVKSLNVTLNLSMDTTFVIDTPLMWLDKAQTWELADQLGALEFVREKTLTCYNGVIADGCGECPACKLRNKGLEDYLTSSKSIEGVTL

SEQ ID NO: 41559 - protein, 219 aa, Psychrobacillus soli
  misc_feature (1)..(219): tr|A0A544TGA8|A0A544TGA8_9BACI 7-cyano-7-deazaguanine s ynthase OS=Psychrobacillus soli OX=1543965 GN=queC PE=3 SV=1
MKQEKAIIVFSGGQDSTTCLFWAKERFREIEAVTFDYGQRHRLEIECAKAITEELGIKHHILDMSLLNQLAPNALTRDDIEVEDGEEGGLPSTFVPGRNLLFLSFAGVLASQVGAKHIVTGVCETDFSGYPDCRDIFVKSLNVTLNLSMDDTFVIDTPLMWLNKAQTWELADQLGALEFVRKRTLTCYNGVIADGCGECPACKLRKRGLDEYLSFKKES

SEQ ID NO: 41560 - protein, 535 aa, Psychrobacillus soli
  misc_feature (1)..(535): tr|A0A544SM31|A0A544SM31_9BACI Uncharacterized protein OS=Psychrobacillus soli OX=1543965 GN=FG383_19025 PE=4 SV=1
MGDKDMANKCKLNLRHKDFYPIKGVGYEGFFRGYFYYENQYVTHENFVDLFKEVSLTEAAAWNGEFALILQTEDEITLVTDKKRTIPLFYSKSETNGWIVQDYIEPKTSMSIREDAEEELLLAGFVTGEKTLFKDWYQLEVATIVHLTEDASKQSYYSYVTEKDHDSIDNFAEELAHILHNIFDELVVRLAGRKIILPLSGGYDSRIMALLLKDKGLSDSIITFTYGRPGNGEATVSKEIADRLDLKWKYFAYDKAMWEDLYKSKLWKDYVVYACNGTSVAHLQDFPSTKLLVEEEELENAVFIPGHSLDFLGGSHLPYEAILDKEFTSSEVVDFIIPKHFRLWQLANGLSHTTSDIGKSVAKDVSAYTALTNERVTSIIDEWNWKERQAKFIINSVRVYEYFDQDWSMPLWDDRLIYFFSKIPADLKYKKYLYDYTLHKMYPDFYPLPQKPGAENSLKNKYGVLYPLLRKVYRKRKLYKQYFDEPMEWYGIYPTYKQYKHSLSFKRNGTKYNNPYNINSFIAKDMIQMMKELTK

SEQ ID NO: 41561 - protein, 530 aa, Psychrobacillus sp.
  misc_feature (1)..(530): tr|A0A1H9QZX8|A0A1H9QZX8_9BACI Asparagine synthase (Glu tamine-hydrolysing) OS=Psychrobacillus sp. OK032 OX=188 4358 GN=SAMN05518872_101529 PE=4 SV=1
MANKCITNLRHKDFYPIRGAGYEGFFRGYFYYENQYVTHENFVDIFKESSLNEVAAWNGEFALILQAEDEVILVTDKKRTIPLFYTKSETNDWIVQDYIEPKASMSIRKEAEEELLLAGFVTGDKTLFDGWYQLEVATIVRLKENASKESYYSYVAEKEQDSIETFAEELAHILHNIFDDLVVRLAGRKIILPLSGGYDSRIIALLLKDKGLSDSIITFTYGRPGNGEATVSKEIADRLGLKWKYFAYDKAMWENLYRSKLWKDYVVYACNGTSVAHLQDFPSTKLLVEEEGLEDAVFIPGHSLDFLGGSHLPYEAILDKEFTSSEVVDFIIPKHFRLWQLANGLSHTTSDIGKAVTKDVSAYKTLTNERVTSIIDEWNWKERQAKFIINSVRVYEYFDQDWSMPLWDDRLIYFFSKIPADLKYKKYLYDYALHKMYPDFYPSPQKPGAENSLKNKYGVLYPLLRKVYRKRKLYRQYFEEPMEWYGIYPTYKQYKQSLSFKRNGTKYTHPYNINAFIAKDMIQMMKELTK

SEQ ID NO: 41562 - protein, 219 aa, Psychrobacillus sp.
  misc_feature (1)..(219): tr|A0A544TMJ1|A0A544TMJ1_9BACI 7-cyano-7-deazaguanine s ynthase OS=Psychrobacillus sp. Z8 OX=2325572 GN=queC PE =3 SV=1
MKQEKAIIVFSGGQDSTTCLFWAKERFKEIEAVTFDYGQRHSLEIECAKEITEELGIKHHILDMSLLNQLAPNALTRDDIEVEEGEEGELPSTFVPGRNLLFLSFAGVLASQVGAKHIVTGVCETDFSGYPDCRDIFVKSLNVTLNLSMDDTFVIDTPLMWLNKAQTWELADQLGALEFVRERTLTCYNGVIADGCGECPACKLRKKGLDEYLSFKKES

SEQ ID NO: 41563 - protein, 259 aa, Psychrobacter alimentarius
  misc_feature (1)..(259): tr|A0A144PNA1|A0A144PNA1_9GAMM 7-cyano-7-deazaguanine s ynthase OS=Psychrobacter alimentarius OX=261164 GN=queC PE=3 SV=1
MTNATTQDTSINPISDANVSDLHKRQNAVVLLSGGLDSVTCLYWAKARYASVTAVSFNYGQRHNSELVAAKAIAEAAEVNHRIIDIDIAQLGGSSLTDHSMIVPDGDADKFPNKKHDEIDNDAIPNTYVPARNTIFLSYALAVAEVTDANHIVIGVSSVDYSGYPDCRPEYIAAFEHMANLATKAGVTGHHLSIQTPLQQLSKAQTIELGLSLGVDYGQTISCYRADASGLACGVCDSCALRRQGFAQAGVADPTHYQA

SEQ ID NO: 41564 - protein, 294 aa, Psychrobacter aquaticus
  misc_feature (1)..(294): tr|U4T6Q5|U4T6Q5_9GAMM 7-cyano-7-deazaguanine synthase OS=Psychrobacter aquaticus CMS 56 OX=1354303 GN=queC PE =3 SV=1
MTLNYKGIFIIAIWFCNGRIFAKITNFRKPIIDITMTNVTTQSTFSNQQSDATLTTLHKSQNAVVLLSGGLDSVTCLYWAKARYASVTAVSFNYGQRHNSELVAAQAIAQAAEVNHRIIDIDIAQLGGSSLTDHSMIVPDGDTDKFPNKKRDEIDNDAIPNTYVPARNTIFLSYALAVAEVTDANHIVIGVSSVDYSGYPDCRPEYIAAFEHMANLATKAGVTGHHLTVQTPLQQLSKAKTIELGLSLGVDYGQTISCYRADVNGLACGVCDSCALRRQGFEQAGVTDPTHYQP

SEQ ID NO: 41565 - protein, 259 aa, Psychrobacter arcticus
  misc_feature (1)..(259): sp|Q4FTN4|QUEC_PSYA2 7-cyano-7-deazaguanine synthase OS =Psychrobacter arcticus (strain DSM 17307 / 273-4) OX=2 59536 GN=queC PE=3 SV=2
MTNTALPTSSADQENDTQLNELHKSQNAVVLLSGGLDSVTCLYWAKARYASVTAVSFDYGQRHNSELIAAKAIAETAGVNHRIIDIDIAQLGGSSLTDHSMIVPDGDTDKFPDKKRDEIDNDAIPNTYVPARNTIFLSYALAVAEVTDSNHIVIGVSSVDYSGYPDCRPEYIAAFQHMANLATKAGVTGHHLSIQTPLQQLSKAKTIELGLSLGVDYGQTISCYQADANGFACGVCDSCALRRQGFAQAGVADPTHYQS

SEQ ID NO: 41566 - protein, 259 aa, Psychrobacter cryohalolentis
  misc_feature (1)..(259): sp|Q1QCP3|QUEC_PSYCK 7-cyano-7-deazaguanine synthase OS =Psychrobacter cryohalolentis (strain K5) OX=335284 GN= queC PE=3 SV=1
MTNTALPTSSADQENDTQLNELHKSQNAVVLLSGGLDSVTCLYWAKARYASVTAVSFDYGQRHNSELVAAKAIAETAGVNHRIIDIDIAQLGGSSLTDHSMIVPDGDTDKFPDKKRDEIDNDAIPNTYVPARNTIFLSYALAVAEVTDSNHIVIGVSSVDYSGYPDCRPEYIAAFQHMANLATKAGVTGHHLSIQTPLQQLSKAKTIELGLSLGVDYGQTISCYQADANGLACGVCDSCALRRQGFAQAGVADPTHYQS

SEQ ID NO: 41567 - protein, 284 aa, Psychrobacter fozii
  misc_feature (1)..(284): tr|A0A2V4VLF6|A0A2V4VLF6_9GAMM 7-cyano-7-deazaguanine s ynthase OS=Psychrobacter fozii OX=198480 GN=queC PE=3 S V=1
MASWFCNGWIFAKITVFRKPIIDTIMTNVTSQSTADNTTLDSELDSLHNYQNAVVLLSGGLDSVTCLYWAKARYASVTAVSFNYGQRHNSELVAAKTIAETAEVNHRIIDIDIAQLGGSSLTDHSMIVPDGDSDKFPNKNRDEIDNDAIPNTYVPARNTIFLSYALAVAEVADANHIVIGVSSVDYSGYPDCRPEYIAAFEHMANLATKAGVTGHHLSIQTPLQQLSKAKTIELGLSLGVDYGQTISCYRADENGLACGVCDSCTLRRQGFEQAGVADPTHYQS

SEQ ID NO: 41568 - protein, 249 aa, Psychrobacter frigidicola
  misc_feature (1)..(249): tr|A0A5C7A3V0|A0A5C7A3V0_9GAMM 7-cyano-7-deazaguanine s ynthase OS=Psychrobacter frigidicola OX=45611 GN=queC P E=3 SV=1
MTNIKLNNPTEKTQNAVVLLSGGLDSVTCLYWAKARYATVTALSFDYGQRHNSELVAAKTIAELAGVNHRIIDIDIAQLGGSSLTDHSMIVPDGDADKFPNKKHDVIDNDAIPNTYVPARNTIFLSYALAVAEVTDANHIVIGVSSVDYSGYPDCRPEYIAAFEHMANLATKAGVTGHHLSIQTPLQQLSKAQTIELGLSLGVDYGQTISCYQADSHGLACGVCDSCALRRQGFAQVGIADPTHYQSQP

SEQ ID NO: 41569 - protein, 259 aa, Psychrobacter immobilis
  misc_feature (1)..(259): tr|A0A2V2AAW4|A0A2V2AAW4_PSYIM 7-cyano-7-deazaguanine s ynthase OS=Psychrobacter immobilis OX=498 GN=queC PE=3 SV=1
MTNVTSQSASNNQAFDTDLNALHKSQNAVVLLSGGLDSVTCLYWAKARYASVTAVSFNYGQRHNSELVAAKAISETAGVNHRIIDIDIAQLGGSSLTDHSMIVPDGDTDKFPNKKRDEIDNDAIPNTYVPARNTIFLSYALAVAEVTDANHIVIGVSSVDYSGYPDCRPEYIAAFEHMANLATKAGVTGHHLSIQTPLQQLSKAKTIELGLSLGVDYGQTISCYQADAQGLACGVCDSCALRRQGFSQAGITDPTHYQS

SEQ ID NO: 41570 - protein, 259 aa, Psychrobacter pacificensis
  misc_feature (1)..(259): tr|A0A1G6UUD0|A0A1G6UUD0_9GAMM 7-cyano-7-deazaguanine s ynthase OS=Psychrobacter pacificensis OX=112002 GN=queC PE=3 SV=1
MTNVTLQNPSMNQASNSNDTPHKNQNAVVLLSGGLDSVTCLYWAKAHYASVTAVSFDYGQRHNSELVAAKRIAETASVNHRIIDIDIAQLGGSSLTDHSMIVPDGDTDKFPNKKRDEIDNDAIPNTYVPARNTIFLSYALAVAEVTDANHIVIGVSSVDYSGYPDCRPEYIEAFEHMANLATKAGVTGHRLSIQTPLQKLSKAQTIELGLSLGVDYGQTISCYRADVNGLACGVCDSCALRRQGFAQAGVTDPTHYQAG

SEQ ID NO: 41571 - protein, 255 aa, Psychrobacter pasteurii
  misc_feature (1)..(255): tr|A0A1R4EG02|A0A1R4EG02_9GAMM 7-cyano-7-deazaguanine s ynthase OS=Psychrobacter pasteurii OX=1945520 GN=queC P E=3 SV=1
MTDALTSTAPTNSSTASDTANENAVVLLSGGLDSVTCLYWAKDRYAKVTAVSFNYGQRHNSELVAAKNIANTAGVDHKIIDIDIAQLGGSSLTDHDMTIPDGDADKFPTHTDSIDNDAIPNTYVPARNTIFLSYALAVAEVTEANHIVIGVSSVDYSGYPDCRPEYIEAFEVMANLATKAGVTGHKLHIQTPLQQLSKAQTIQLGNSLGVDYSQTISCYKADSEGRACGICDSCTLRKRGFSDAGLADPTRYSAG

SEQ ID NO: 41572 - protein, 254 aa, Psychrobacter phenylpyruvicus
  misc_feature (1)..(254): tr|A0A379LKD1|A0A379LKD1_9GAMM 7-cyano-7-deazaguanine s ynthase OS=Psychrobacter phenylpyruvicus OX=29432 GN=qu eC PE=3 SV=1
MTDALTSISPTNHTASDSCNENAVVLLSGGLDSVTCLYWAKDRYAKVTAVSFNYGQRHNSELVAAKNIANQAGVDHKIIDIDIAQLGGSSLTDHDMTVPDGDADKFPSHTDDIDNDAIPNTYVPARNTIFLSYALAVAEVTEANHIVIGVSSVDYSGYPDCRPEYINAFEVMANLATKAGVTGHKLYIQTPLQKLSKAQTIQLGNSLGVDYSQTISCYKADSEGRACGICDSCTLRKRGFSDAGLADPTRYATN

SEQ ID NO: 41573 - protein, 255 aa, Psychrobacter piechaudii
  misc_feature (1)..(255): tr|A0A1R4GG14|A0A1R4GG14_9GAMM 7-cyano-7-deazaguanine s ynthase OS=Psychrobacter piechaudii OX=1945521 GN=queC PE=3 SV=1
MTDALTSPTPSTTHTASDSSNENAVVLLSGGLDSVTCLYWAKDRYAKVTAVSFNYGQRHNSELVAAKNIANQAGVDHKIIDIDIAQLGGSSLTDHDMTIPDGDADKFPTHTDNIDNDAIPNTYVPARNTIFLSYALAVAEVTEANHIVIGVSSVDYSGYPDCRPEYINAFEVMANLATKAGVTGHKLHIQTPLQQLSKAQTIQLGNSLGVDYSQTISCYKADSEGRACGICDSCTLRKRGFSDGGLADPTRYSAN

SEQ ID NO: 41574 - protein, 260 aa, Psychrobacter piscatorii
  misc_feature (1)..(260): tr|A0A0T6DS15|A0A0T6DS15_9GAMM 7-cyano-7-deazaguanine s ynthase OS=Psychrobacter piscatorii OX=554343 GN=queC P E=3 SV=1
MTNVTLHNNSANQASDAELDTLNKNQNAVVLLSGGLDSVTCLYWAKARYASVTAVSFDYGQRHNSELVAAKRIAETAGVNHRIIDIDIAQLGGSSLTDHSMIVPDGDTDKFPNKKRDEIDNDAIPNTYVPARNTIFLSYALAVAEVTDANHIVIGVSSVDYSGYPDCRPEYIEAFEHMANLATKAGVTGHRLSIQTPLQKLSKAQTIELGLSLGVDYGQTISCYRADVNGLACGVCDSCALRRQGFAQAGVTDPTHYQAG

SEQ ID NO: 41575 - protein, 249 aa, Psychrobacter sp.
  misc_feature (1)..(249): tr|A0A1D9CXG0|A0A1D9CXG0_9GAMM 7-cyano-7-deazaguanine s ynthase OS=Psychrobacter sp. AntiMn-1 OX=1720344 GN=que C PE=3 SV=1
MNQASNSNDTPHKNQNAVVLLSGGLDSVTCLYWAKARYASVTAVSFDYGQRHNSELVAAKTIAETAGVNHRIIDIDIAQLGGSSLTDHSMIVPDGDTDKFPSKKHDEIDNDAIPNTYVPARNTIFLSYALAVAEVTDANHIVIGVSSVDYSGYPDCRPEYIEAFEHMANLATKAGVTGHRLSIQTPLQKLSKAQTIELGLSLGVDYGQTISCYRADANGLACGVCDSCALRRQGFAQAGVTDPTHYQAG

SEQ ID NO: 41576 - protein, 256 aa, Psychrobacter sp.
  misc_feature (1)..(256): sp|A5WGB5|QUEC_PSYWF 7-cyano-7-deazaguanine synthase OS =Psychrobacter sp. (strain PRwf-1) OX=349106 GN=queC PE =3 SV=1
MTDASADALTSPSNSGASQDTSQQNAVVLLSGGLDSVTCLYWAKARYAKVTAVSFNYGQRHNSELVAAKSIAGQAGVNHKIIDIDIAQLGGSSLTDHDMTVPDGDADKFPTHTDDIDNQAIPNTYVPARNTIFLSYALAVAEVTDANHIVIGVSSVDYSGYPDCRPEYIEAFEVMANLATKAGVTGHKLHIQTPLQKLSKAQTIQLGNSLGVDYSQTISCYKADSEGRACGICDSCTLRKRGFSDAGLADPTRYAG

SEQ ID NO: 41577 - protein, 252 aa, Psychrobacter urativorans
  misc_feature (1)..(252): tr|A0A0M4TG49|A0A0M4TG49_9GAMM 7-cyano-7-deazaguanine s ynthase OS=Psychrobacter urativorans OX=45610 GN=queC P E=3 SV=1
MTDLTMTNATLTASTDKTQNAVVLLSGGLDSVTCLYWAKSRYASVTALSFNYGQRHNSELIAAKAIAESAGVNHRIIDIDIAQLGGSSLTDHSMIVPDGDADKFPNKKHDEIDNDAIPNTYVPARNTIFLSYALAVAEVTDANHIVIGVSSVDYSGYPDCRPEYIAAFEHMANLATKAGVTGHHLKIQTPLQQLSKAQTIELGLSLGVDYGQTISCYQADSQGHACGVCDSCALRRQGFAQVGIADPTHYQA

SEQ ID NO: 41578 - protein, 221 aa, Psychromonas ingrahamii
  misc_feature (1)..(221): sp|A1STX3|QUEC_PSYIN 7-cyano-7-deazaguanine synthase OS =Psychromonas ingrahamii (strain 37) OX=357804 GN=queC PE=3 SV=1
MSKKVVVIYSGGMDSFTVLHKAMQQGLTPYALTFDYGQRHIKEIEVAREVCEELGVHHKVIDISAINQLIGGSSLTDSSIDVAQGHYQQESMKSTVVPNRNMILLSLAIGYAVSLGAEQVYYGAHSGDHEIYPDCRPIFVEKMNDVAAVANYEKVEIFSPYLNNNKSGILKDGLAMGLDYSKTWTCYNGREKACGKCGSCVERLEAFAANGLKDPIAYEDT

SEQ ID NO: 41579 - protein, 221 aa, Psychromonas sp.
  misc_feature (1)..(221): tr|A0A4Y8A0B0|A0A4Y8A0B0_9GAMM 7-cyano-7-deazaguanine s ynthase OS=Psychromonas sp. RZ22 OX=2555643 GN=queC PE= 3 SV=1
MSKKVVVIYSGGMDSYTVLHKAIEEGLTPFALTFDYGQRHVKEIKVASDVCKELGIHHKVIDITAINQLIGGSSLTDNSIDVALGHYQNDNMKSTVVPNRNMILLSLAIGYAVSIGAEKVYYGAHSGDHEIYPDCRPIFVEKMNEVAAVANYEATEIYSPYLNSNKIGILKDGIRMGLDYSKTWTCYNGREKACGQCGSCVERLEAFEQNGIKDPIAYEIE

SEQ ID NO: 41580 - protein, 220 aa, Psychromonas sp.
  misc_feature (1)..(220): tr|A0A366WAZ8|A0A366WAZ8_9GAMM 7-cyano-7-deazaguanine s ynthase OS=Psychromonas sp. B3M02 OX=2267226 GN=queC PE =3 SV=1
MSKKVVVIYSGGMDSYTVLHKAIEEGLTPFALTFDYGQRHVKEIQVASEVCQSLDINHKIIDITAINQLIGGSSLTDSSIEVATGDYDNNNMVNTVVPNRNMILLSLAIGYAVSIGAEQVYYGAHSGDHEIYPDCRPIFVDKMNEVAAVANYEKTQIHSPYLKSDKVGILKDGLRMGLDYSKTWTCYNGREKACGQCGSCKERLEAFASNGLTDPISYEA

SEQ ID NO: 41581 - protein, 219 aa, Psychrosphaera saromensis
  misc_feature (1)..(219): tr|A0A2S7UY56|A0A2S7UY56_9GAMM 7-cyano-7-deazaguanine s ynthase OS=Psychrosphaera saromensis OX=716813 GN=queC PE=3 SV=1
MFEKVVVIFSGGMDSYTVLNHALKQGYDVHALTFDYGQRHVKEIEYAKNACEELNVHHKIVDISAINSIIAGSSLTDNIDIPEGHYEAETMQSTVVPNRNMILLSLAVGYAVSLKATKVFYGAHSGDHAIYPDCRPEFVKRMQDVCAIANYDAVDIVVPYLHSDKIEILADGLNMKLDYNKTWTCYNGREKACGKCGACQERLEAFEKNNMTDPLEYEA

SEQ ID NO: 41582 - protein, 235 aa, Puniceibacterium antarcticum
  misc_feature (1)..(235): tr|A0A2G8RET3|A0A2G8RET3_9RHOB 7-cyano-7-deazaguanine s ynthase OS=Puniceibacterium antarcticum OX=1206336 GN=q ueC PE=3 SV=1
MKMKTIVICSGGLDSVSLAHMVASEHQLTRLVSFDYGQRHRKELDFAALCAKRLDVAHEVIDLRAIGMALTGSALTDDIDVPDGHYAEESMRITVVPNRNAIMLAVAFGVAAARGDEAVATAVHGGDHFIYPDCRPAFTEAFEAMQKFALDGYADVSLYTPFVNRTKADIVTAGTLHNTPFAETWSCYKGGTQHCGRCGTCVERREAFDLADVVDPTTYEDPDFWIQAVARKAFG

SEQ ID NO: 41583 - protein, 643 aa, Puniceibacterium sp.
  misc_feature (1)..(643): tr|A0A0J5TEQ6|A0A0J5TEQ6_9RHOB Putative PP-loop superfa mily ATPase OS=Puniceibacterium sp. IMCC21224 OX=161820 4 GN=IMCC21224_113480 PE=4 SV=1
MGGAAPLPELVVTCFAPLADREGDEKLRFEIDGKVKSISLRISQMSRQLVTHLPDMAIDLIELAAFVYGIDSSVSRGGLADQQMGAKWHRSFLVEVPVRALDRWSDPDLKRELEETLMFLSGDRFTFRFVQIQGGSSGPTGYFDFGPNSSWKPDSVLMFSGGLDSFAGALEEIIDRRHRVALISHFSSTKIAPIQNALQKHMAQELGTEMLKHIPMRVQLGGGTNAEGTHRSRSFLFAALGMATAVAFGRERVSFYENGVVSLNLPPVGNVLGTRATRTTHPQTLQRFQSLFSRIFDASLRVDNPFFWRTKTDVVETIARLGMADQIAFTRSCADVHNQTKQHPHCGRCSQCIDRRFAIMAADLTAFDPEEAYRIDLMTGRRERVQDKEVALSYVRSAQGYEMMSGTDLVAQYPAILNAVDHLGEPPDTALTRMASLLRRHGRSVSTVMRKELAAQRPDQFSLDSLARMFGDLQRAQVMPAEQIIVSNVDTIERGEPASLVFDRKRKLVVINDAITIKGTAYRLLDCLANEFLAGAGKGLDLLDYPMTDAWKLAKCAGLSDDAALRQAVSRSRKQLGLKFSAAGFEAAEGEALIENIPWSGYRLNPELAKIRMLSAKDNHSKTSKSSSSGSGPRLRKRASRST

SEQ ID NO: 41584 - protein, 218 aa, Puniceicoccaceae bacterium
  misc_feature (1)..(218): tr|A0A2E6TMV5|A0A2E6TMV5_9BACT 7-cyano-7-deazaguanine s ynthase OS=Puniceicoccaceae bacterium OX=2026784 GN=que C PE=3 SV=1
  misc_feature (163)..(163): Xaa can be any naturally occurring amino acid
  misc_feature (170)..(170): Xaa can be any naturally occurring amino acid
  misc_feature (172)..(173): Xaa can be any naturally occurring amino acid
  misc_feature (185)..(185): Xaa can be any naturally occurring amino acid
MKAVVLFSGGLDSTVLAQQLIQQEASVRLLSIDYGQRHEKELQHSSFIAEKLKVPHRILTLPNLADILGGSSLTDPNIELPEGHYAEESMKATVVPNRNMILLALAAGYALAVDFDTIAYAAHAGDHTIYPDCRPAFANAMETALSLADWKNLDLHRPFVNLXKADLVKXGXXLGAPLHLSWSCXAGRKLHCGKCGTCVERKEAFAIAKVPDPTEYEA

SEQ ID NO: 41585 - protein, 240 aa, Puniceicoccaceae bacterium
  misc_feature (1)..(240): tr|A0A2D7F4C2|A0A2D7F4C2_9BACT 7-cyano-7-deazaguanine s ynthase OS=Puniceicoccaceae bacterium OX=2026784 GN=que C PE=3 SV=1
  misc_feature (43)..(43): Xaa can be any naturally occurring amino acid
  misc_feature (169)..(169): Xaa can be any naturally occurring amino acid
MQKQNTILIYSGGMDSTVLLYKLLNDNYTVRCLSIDYGQKHKXELNYAKSLCEQVSVEHKIIDLTSVTELLSNSSLINPEQAIPQGHYEKESMKATVVPNRNMILLSLATAWAINCKASSVSYAAHAGDHTIYPDCRESFANGMNEVMQLCDWHSVKLNRPFVDMTKAXICKLGAQLQVPYEKTWSCYQGNELHCGRCGTCVERREAFYLAGVEDPTEYEAQAPTIEQMLETNWKLNEEY

SEQ ID NO: 41586 - protein, 236 aa, Pusillimonas ginsengisoli
  misc_feature (1)..(236): tr|A0A4U5LIM5|A0A4U5LIM5_9BURK 7-cyano-7-deazaguanine s ynthase OS=Pusillimonas ginsengisoli OX=453575 GN=queC PE=3 SV=1
MSTSWQPHRRALVLFSGGQDSTTCLAWALARYGYVETIGFDYGQRHRVELDCRTTLRLRLAAQRDDWALRLGDDHLLSVDVLGQLGASAMTDDIAIATQADGLPNTFVPGRNLLFFTLAAALAYRRGLDVLVGGMSQTDYSGYPDCRDNTLKALQVALSLGIDRPLTLETPLMWLNKADTWELAQQLGGPALVELVRTETHTCYLNQRDTLHTWGYGCGTCPACVLRAQGHRQWCA

SEQ ID NO: 41587 - protein, 236 aa, Pusillimonas sp.
  misc_feature (1)..(236): tr|A0A4R1LP46|A0A4R1LP46_9BURK 7-cyano-7-deazaguanine s ynthase OS=Pusillimonas sp. YR330 OX=2135726 GN=queC PE =3 SV=1
MSRALVLFSGGQDSTACLAWALARYSHVETVGFDYGQRHMVEMECRLIVRQEMKNQFPEWASRLGDDHVLDLRLLGQLSDCALTAEKEIAFANNGLPNTFVPGRNLLFLTYAAALAYRRDINVLIGGMCETDYSGYPDCRDNTMQALQLALNLGMDQHFRIETPLMWLDKAATWRLAGEVGGQKLIALTQEHTHTCYLGDRSVRHDWGYGCGTCPACELRARGYQEFSADAEASHD

SEQ ID NO: 41588 - protein, 235 aa, Pusillimonas sp.
  misc_feature (1)..(235): tr|A0A2N4U5L3|A0A2N4U5L3_9BURK 7-cyano-7-deazaguanine s ynthase OS=Pusillimonas sp. JR1/69-3-13 OX=2045210 GN=q ueC PE=3 SV=1
MSRALVLFSGGQDSTACLAWALARYTHVETIGFNYGQRHIVEMECRQDVLRELRNQFPEWSGRLGDDHVLDLSLLGQLSDCALTAEKEIAFADNGLPNTFVPGRNLLFLTYAAALAYRRSIDILVGGMCETDYSGYPDCRDNTMQALQLALNLGMDQHFRIETPLMWLDKAATWQFADATGGQKLIALTQEHTHSCYLGDRSIRHDWGYGCGKCPACELRARGYLQFMATASRAE

SEQ ID NO: 41589 - protein, 231 aa, Unknown
  misc_feature (1)..(231): tr|A0A1E4ZJX4|A0A1E4ZJX4_9BACT 7-cyano-7-deazaguanine s ynthase OS=PVC group bacterium (ex Bugula neritina AB1) OX=1868283 GN=queC PE=3 SV=1
MLKKAIILYSGGLDSSTLLALLHYRGYEIYTLTFDYGQKHSVELEKSTLLSKDYSVKDSKVITIDLRSFGGSSLTSNVPVNKHLSENFTTNEIPLTYVPARNILFLSYALAWGEVNEVYDIFIGVSQIDYSGYPDCRKNFIDSFVKMANLGTKAGVSGRSFNVHTPFIYLSKSEIITLGTFLDLNYGKTHSCYDPSSDGNACGFCESCLLRKKGFKEAEVEDPTKYTENLL

SEQ ID NO: 41590 - protein, 249 aa, Pyrinomonas methylaliphatogenes
  misc_feature (1)..(249): tr|A0A0B6X0L5|A0A0B6X0L5_9BACT 7-cyano-7-deazaguanine s ynthase OS=Pyrinomonas methylaliphatogenes OX=454194 GN =queC PE=3 SV=1
MGGSNEIVDQSVTEVGSEFEGSRTTSDPRFAVCLVSGGMDSCVTAAIAREENDRLAFLHVSYGQRTQARERRAFEDLADFYGVEQRLTVSLESLARIGGSSLTDERIPVAEANLASRQIPTSYVPFRNAHLLATAVSWAEVLGAGRIYIGAVAEDSSGYPDCRPEFYAAFQRAIDVGTRPETRIEIRTPVIHMRKSAIVRRGIELGAPFALTWSCYRNEDRACGHCDSCALRLRAFREAGIADPIPYAD

SEQ ID NO: 41591 - protein, 218 aa, Quasibacillus thermotolerans
  misc_feature (1)..(218): tr|A0A0F5I9L6|A0A0F5I9L6_9BACI 7-cyano-7-deazaguanine s ynthase OS=Quasibacillus thermotolerans OX=1221996 GN=q ueC PE=3 SV=1
MKNEKAVVVFSGGQDSTTCLFWAKERFAEVIAVTFDYGQRHRLELECAADIARDLQVPHHILDMSLLNQLAPNALTRSDIEITEKEGQPPSTFVEGRNLLFLSFAAVLAKQYDARHIVTGVCETDFSGYPDCRDVFIKSLNVTLNLSMDTNFVIHTPLMWLDKAETWELADELGAFEYVRERTLTCYNGVKGDGCGECPACKLRQNGLQTYLARKEEK

SEQ ID NO: 41592 - protein, 242 aa, Quisquiliibacterium sp.
  misc_feature (1)..(242): tr|A0A5C8P5K6|A0A5C8P5K6_9BURK 7-cyano-7-deazaguanine s ynthase OS=Quisquiliibacterium sp. CC-CFT501 OX=2498847 GN=queC PE=3 SV=1
MSHERAPGGARAVVLLSGGLDSATVLAIARSRGFDCYALSVDYGQRHRAELDAAVRVAGALGAARHVIADVDLSRFGGSALTDTSIAVPEGADAGAPASASSNPSIPITYVPARNTIMLSIALGWAEVLQADDIFFGANAVDYSGYPDCRPGYVQAFERMANLATKSAVEGRPMRINAPIIDLSKAQIIREGARLGVDFSLTVSCYQADAAGRACGRCDSCRIRREGFAAAGLPDSTRYQTG

SEQ ID NO: 41593 - protein, 232 aa, Rahnella aquatilis
  misc_feature (1)..(232): tr|H2IZI0|H2IZI0_RAHAC 7-cyano-7-deazaguanine synthase OS=Rahnella aquatilis (strain ATCC 33071 / DSM 4594 / J CM 1683 / NBRC 105701 / NCIMB 13365 / CIP 78.65) OX=745 277 GN=queC PE=3 SV=1
MKRAVVVFSGGQDSTTCLIQALKQYDEVHCVTFDYGQRHRAEIEIAQKLSVELGARAHKLLDVGLLNELAVSSLTRDNIPVPSFGDESNGGLPSTFVPGRNILFLTLAAIYAYQIQAEAVITGVCETDFSGYPDCRDEFVKALNTAVSLGLARDIRFETPLMWLNKAETWALADYYQQLDRVRHKTLTCYNGIAGDGCGECAACHLRANGLQQYQQDKAGVMGNMKQKTGLR

SEQ ID NO: 41594 - protein, 232 aa, Rahnella aquatilis
  misc_feature (1)..(232): tr|H8NYK2|H8NYK2_RAHAQ 7-cyano-7-deazaguanine synthase OS=Rahnella aquatilis HX2 OX=1151116 GN=queC PE=3 SV=1
MKRAVVVFSGGQDSTTCLIQALKQYDEVHCVTFDYGQRHRAEIEIAQKLSVELGARAHKVLDVGLLNELAVSSLTRDNIPVPNFGDENNGGLPSTFVPGRNILFLTLAAIYAYQIQAEAVITGVCETDFSGYPDCRDEFVKALNTAVSLGLARDVRFETPLMWLNKAETWALADYYQQLDLVRHKTLTCYNGIAGDGCGECAACHLRANGLQQYQQDKTGVMTSLKKKTGLR

SEQ ID NO: 41595 - protein, 232 aa, Rahnella inusitata
  misc_feature (1)..(232): tr|A0A419MC04|A0A419MC04_9GAMM 7-cyano-7-deazaguanine s ynthase OS=Rahnella inusitata OX=58169 GN=queC PE=3 SV= 1
MKRAVVVFSGGQDSTTCLIQALKEYDEVHCVTFDYGQRHRAEIEIAQKLSVQLGARAHKVLDVGLLNELAVSSLTRDNIPVPGFGEETEGGLPSTFVPGRNILFLTLAAIYAYQIQAEAVITGVCETDFSGYPDCRDEFVKALNHAVSLGLARDVRFETPLMWLNKAETWALADYYQQLDLVRHHTLTCYNGIAGDGCGECAACHLRANGLQQYQQDNAGVMASLKKKTGLK

SEQ ID NO: 41596 - protein, 232 aa, Rahnella sp.
  misc_feature (1)..(232): tr|A0A2N0W8E5|A0A2N0W8E5_9GAMM 7-cyano-7-deazaguanine s ynthase OS=Rahnella sp. AA OX=2057180 GN=queC PE=3 SV=1
MKRAVVVFSGGQDSTTCLIQALKQYDEVHCVTFDYGQRHRAEIEIAQKLSVELGARAHKVLDVGLLNELAVSSLTRDNIPVPNFGDENDGGLPSTFVPGRNILFLTLAAIYAYQIQAEAVITGVCETDFSGYPDCRDEFVKALNTAVSLGLARDVHFETPLMWLNKAETWALADYYQQLDLVRHQTLTCYNGIAGDGCGECAACHLRANGLQQYQQDKSGVIASLKKKTGLR

SEQ ID NO: 41597 - protein, 232 aa, Rahnella sp.
  misc_feature (1)..(232): tr|A0A4R7GJX3|A0A4R7GJX3_9GAMM 7-cyano-7-deazaguanine s ynthase OS=Rahnella sp. BIGb0236 OX=2485117 GN=queC PE= 3 SV=1
MKRAVVVFSGGQDSTTCLIQALKQYDEVHCVTFDYGQRHRAEIDIAQTLSVKLGARAHKVLDVGLLNELAVSSLTRDNIPVPNFGDENNGGLPSTFVPGRNILFLTLAAIYAYQIQAEAVITGVCETDFSGYPDCRDEFVKALNTAVSLGLARDVRFETPLMWLNKAETWALADYYQQLDLVRHQTLTCYNGIAGDGCGECAACHLRANGLQQYQQDKTGVMASLKKKTGLR

SEQ ID NO: 41598 - protein, 232 aa, Rahnella woolbedingensis
  misc_feature (1)..(232): tr|A0A419N6W5|A0A419N6W5_9GAMM 7-cyano-7-deazaguanine s ynthase OS=Rahnella woolbedingensis OX=1510574 GN=queC PE=3 SV=1
MKRAVVVFSGGQDSTTCLIQALKQYDEVHCVTFDYGQRHRAEIEIAQKLSVELSARAHKVLDVGLLNELAVSSLTRDNIPVPNFGDENDGGLPSTFVPGRNILFLTLTAIYAYQIQAEAVITGVCETDFSGYPDCRDEFVKALNTAVSLGLARDIRFETPLMWLNKAETWALADYYQQLDLVRHKTLTCYNGIAGDGCGECAACHLRANGLQQFQQDKVGVMNSLKQKTGLN

SEQ ID NO: 41599 - protein, 224 aa, Ralstonia insidiosa
  misc_feature (1)..(224): tr|A0A191ZU28|A0A191ZU28_9RALS 7-cyano-7-deazaguanine s ynthase OS=Ralstonia insidiosa OX=190721 GN=queC PE=3 S V=1
MKKRAIVLLSGGLDSATVLAMANADGFETYALSMRYGQRHSSELEAAKKVAAALGAVRHEIVDLDLRKFGGSALTDDTLDVPTEGAHDGIPITYVPARNTIMLSLALGWAEAVGARDLFFGANAVDYSGYPDCRPEYVAAYETLANLATKAGVEGERIRVNAPIIAMTKAEIIQAGVRLGVDYGMTVSCYKADDEGRACGVCDSCRIRKAGFEAAGVPDPTRYV

SEQ ID NO: 41600 - protein, 703 aa, Ralstonia mannitolilytica
  misc_feature (1)..(703): tr|A0A160BSS9|A0A160BSS9_9RALS Uncharacterized protein OS=Ralstonia mannitolilytica OX=105219 GN=VZ52_07970 PE =4 SV=1
MQTKKFVICGNASAKGISDDPKNEIRLRLSGVKGEGNVTLRIEDIHSKMFGTVPTKFHDLLEIAAYVYSADQVILRGADDVDSFGDGWRRDLHFVVPVRNPDFWNGEEVKNALTSTLGFLSDDNYAFSFVKLEQDHSFQDYLEFNDAQTLYGKPDQVVMFSGGLDSLAGALDEVLGQRRRVVLVTHKATPKLNTRHKTLQDLLAQKAGDNAPHQISVRVHKKKPLNREYTQRSRSFLFVSIGATIAKMLGLSSVRFYENGVISLNLPVCAQVVGGRATRTTHPKVMKGFQDIITLVAEAPFTVENPYIWKTKAEVVEQIVKLGCADLIKHSMTCTHTWEMTNQHTHCGLCSQCIDRRFAVIAAKADQYDPIEHYKTDVFTQSRNKDDDKIMSASYLERANQVRSLENVGQFLAKYAEVNRVLRFIGGSTAQAAQLVFDLYKRHASEVNAALDEMVRRHATAIRERTMPGDALLRTVHESASVISVPTVSPKEKQPDNFFRKRGGGWEARFNRGNTINIIGVDKGAEYINLLLAHPDREASVYEVVCGYALGVADHANSGLEHDDIEEGFQVTTGAPLGNAGVVVDRKAVEQYRAKYQSLVTEKAEAEQDGDHQRVEEIEDEMAQIADAITAGVGKGGKLRKAGDKRKNVRDAFRNAVNRAIKQIEKWDKPLAEHLKASIKFGNEVVYRPGVPITWDVRPIVNE

SEQ ID NO: 41601 - protein, 224 aa, Ralstonia mannitolilytica
  misc_feature (1)..(224): tr|A0A160BW35|A0A160BW35_9RALS 7-cyano-7-deazaguanine s ynthase OS=Ralstonia mannitolilytica OX=105219 GN=queC PE=3 SV=1
MKKRAIVLLSGGLDSATVLAMANADGFETYALSMRYGQRHSSELEAAKKVAAALGAVRHEIVDLDLRKFGGSALTDDKLDVPTDGAQSGIPITYVPARNTIMLSLALGWAEAVGARDLFFGANAVDYSGYPDCRPEYVAAYETLANLATKAGVEGERIRVNAPIIDMTKAEIIQAGTRLGVDYSLTVSCYQADDAGRACGVCDSCRIRKAGFEAAGVPDPTRYV

SEQ ID NO: 41602 - protein, 224 aa, Ralstonia pickettii
  misc_feature (1)..(224): sp|B2U7H6|QUEC_RALPJ 7-cyano-7-deazaguanine synthase OS =Ralstonia pickettii (strain 12J) OX=402626 GN=queC PE= 3 SV=1
MKKRAIVLLSGGLDSATVLAMANADGFETYALSMRYGQRHSSELEAAKKVAAALGAVRHEIVDLDLRKFGGSALTDDALDVPTDGVQSGIPITYVPARNTIMLSLALGWAEAVGARDLFFGANAVDYSGYPDCRPEYVAAYETLANLATKAGVEGERIRVNAPIINMTKAEIIQAGVRLGVDYGLTVSCYKADDAGRACGVCDSCRIRKAGFEAAGVPDPTRYV

SEQ ID NO: 41603 - protein, 224 aa, Ralstonia pickettii
  misc_feature (1)..(224): tr|C6BE72|C6BE72_RALP1 7-cyano-7-deazaguanine synthase OS=Ralstonia pickettii (strain 12D) OX=428406 GN=queC P E=3 SV=1
MKKRAIVLLSGGLDSATVLAMANADGFETYALSMRYGQRHSSELEAAKKVAAALGAVRHEIVDLDLRKFGGSALTDDALDVPTDGAQTGIPITYVPARNTIMLSLALGWAEAVGARDLFFGANAVDYSGYPDCRPEYVAAYETLANLATKAGVEGERIRVNAPIIDMTKAEIIQAGVRLGVDYGLTVSCYKADDAGRACGVCDSCRIRKAGFEAAGVPDPTRYV

SEQ ID NO: 41604 - protein, 224 aa, Ralstonia pseudosolanacearum
  misc_feature (1)..(224): tr|A0A454TK97|A0A454TK97_9RALS 7-cyano-7-deazaguanine s ynthase OS=Ralstonia pseudosolanacearum OX=1310165 GN=q ueC PE=3 SV=1
MKKRAIVLLSGGLDSATVLAMANAQGFETYALSMRYGQRHSSELEAAKKVAAALGAVRHEIVDLDLRRFGGSALTDDALEVPTTGVQEGIPITYVPARNTIMLSLALGWAEAVGARDLFFGANAVDYSGYPDCRPEYVAAYETLANLATKAGVEGDHIRVNAPIIAMTKAEIIQAGARLGVDYSLTVSCYQADDEGRACGVCDSCRIRRAGFEAAGVPDPTRYR

SEQ ID NO: 41605 - protein, 224 aa, Ralstonia pseudosolanacearum
  misc_feature (1)..(224): tr|A0A223GK04|A0A223GK04_9RALS 7-cyano-7-deazaguanine s ynthase OS=Ralstonia pseudosolanacearum OX=1310165 GN=q ueC PE=3 SV=1
MKKRAIVLLSGGLDSATVLAMANAQGFETYALSMRYGQRHSSELEAAKKVAAALGAVRHEIVDLDLRRFGGSALTDDALEVPTTGVQEGIPITYVPARNTIMLSLALGWAEAVGARDLFFGANAVDYSGYPDCRPEYVAAYETLANLATKAGVEGDHIRVNAPIIAMTKAEIIQAGARLGVDYSLTVSCYQADDEGRACGVCDSCRIRRAGFEAAAVPDPTRYR

SEQ ID NO: 41606 - protein, 224 aa, Ralstonia solanacearum
  misc_feature (1)..(224): tr|F6G4W4|F6G4W4_RALS8 7-cyano-7-deazaguanine synthase OS=Ralstonia solanacearum (strain Po82) OX=1031711 GN=q ueC PE=3 SV=1
MKKRAIVLLSGGLDSATVLAMANAQGFETYALSMRYGQRHSSELEAAKKVAAALGAVRHEIVDLDLRRFGGSALTDDALEVPTTGVKEGIPITYVPARNTIMLSLALGWAEAVGARDLFFGANAVDYSGYPDCRPEFVAAYETLANLATKAGVEGDRIRINAPIIAMTKAEIIQAGARLGVDYSLTVSCYQADDAGRACGVCDSCRIRRAGFEAAGVPDPTRYR

SEQ ID NO: 41607 - protein, 224 aa, Ralstonia solanacearum; identical to SEQ ID NO: 41605
  misc_feature (1)..(224): sp|Q8Y1F2|QUEC_RALSO 7-cyano-7-deazaguanine synthase OS =Ralstonia solanacearum (strain GMI1000) OX=267608 GN=q ueC PE=3 SV=1

SEQ ID NO: 41608 - protein, 224 aa, Ralstonia sp.; identical to SEQ ID NO: 41603
  misc_feature (1)..(224): tr|U3GAT3|U3GAT3_9RALS 7-cyano-7-deazaguanine synthase OS=Ralstonia sp. 5_2_56FAA OX=658080 GN=queC PE=3 SV=1

SEQ ID NO: 41609 - protein, 224 aa, Ralstonia sp.
  misc_feature (1)..(224): tr|A0A0J9GE25|A0A0J9GE25_9RALS 7-cyano-7-deazaguanine s ynthase OS=Ralstonia sp. MD27 OX=1676617 GN=queC PE=3 S V=1
MKKRAIVLLSGGLDSATVLAMANADGFETYALSMRYGQRHSSELEAAKKVAAALGAVRHEIVDLDLRKFGGSALTDDTLDVPTEGAHDGIPITYVPARNTIMLSLALGWAEAVGARDLFFGANAVDYSGYPDCRPEYVAAYETLANLATKAGVEGEHIRVNAPIIAMTKAEIIQAGARLGVDYGMTVSCYKADEEGRACGVCDSCRIRKAGFEAAGVPDPTRYV

SEQ ID NO: 41610 - protein, 194 aa, Ralstonia syzygii
  misc_feature (1)..(194): tr|G3A2B2|G3A2B2_9RALS 7-cyano-7-deazaguanine synthase OS=Ralstonia syzygii R24 OX=907261 GN=RALSY_20147 PE=3 SV=1
MNLVSGGLDSTLVGVMAKEDRIDHYPLFIDYGQRAARKEWETCKAVHKALGLPAPTRMDLSGFGQVIVSGLTSEQLHVKDDAFTPGRNLMFLLMGSSYAYQFGLSSVAIGLLAEQFSIFPDQRPPFLAQAEIAIAAALGRQIKVLTPLIEFGKADVVRLAQARGVTGTYSCHTGNSESCGQCIACLEFLFNKEE

SEQ ID NO: 41611 - protein, 224 aa, Ralstonia syzygii
  misc_feature (1)..(224): tr|G3A5A0|G3A5A0_9RALS 7-cyano-7-deazaguanine synthase OS=Ralstonia syzygii R24 OX=907261 GN=queC PE=3 SV=1
MKKRAIVLLSGGLDSATVLAMANAQGFETYALSMRYGQRHSSELEAAKKVAAALGAVRHEIVDLDLRRFGGSALTDDALEVPTTGVKEGIPITYVPARNTIMLSLALGWAEAVGARDLFFGANAVDYSGYPDCRPEFVAAYETLANLATKAGVEGDRIRVNAPIIAMTKAEIIQAGARLGVDYSLTVSCYQADDEGRACGVCDSCRIRRAGFEAAGVPDPTRYR

SEQ ID NO: 41612 - protein, 236 aa, Ramlibacter rhizophilus
  misc_feature (1)..(236): tr|A0A4Z0BFL1|A0A4Z0BFL1_9BURK 7-cyano-7-deazaguanine s ynthase OS=Ramlibacter rhizophilus OX=1781167 GN=queC P E=3 SV=1
MNTHKAIVLFSGGQDSTTCLAWALERYERVETVGFDYGQKHRIELDCRLAVLARVREAFPHWAPRLGEDHLLEIGVLGQISDTALTRDAQIVLQADGLPNTFVPGRNLLFLTLAAALAYRRGCEVLVGGMCETDYSGYPDCRDATMKAMQAALSLGLARPLAIETPLMWIDKAATWQLAADLGGEALVDLVRKETHTCYLGQREPRHDWGAGCGTCPACALRAAGYRAWQAAQNPS

SEQ ID NO: 41613 - protein, 230 aa, Ramlibacter sp.
  misc_feature (1)..(230): tr|A0A4Y7BKN6|A0A4Y7BKN6_9BURK 7-cyano-7-deazaguanine s ynthase OS=Ramlibacter sp. WS9 OX=1882741 GN=queC PE=3 SV=1
MHTTALVLFSGGQDSTTCLAWALEKYERVETIAFDYGQRHRIELQARLTVLEQLRQQFPQWAMRLGEDHLLDLAVLGQVSETSLTRDMAFSMEQSGLPNTFVPGRNLMFLTLAAALAYRRGLQVLVTGVCETDFSGYPDCRDDTMKAMQLALSLGMDRRFLIETPLMWIDKAATWELALKLGGDALVGLIVEHTHTCYLGERGQRHEWGYGCGTCPACELRQRGWERWRA

SEQ ID NO: 41614 - protein, 238 aa, Ramlibacter tataouinensis
  misc_feature (1)..(238): tr|A0A127JTL2|A0A127JTL2_9BURK 7-cyano-7-deazaguanine s ynthase OS=Ramlibacter tataouinensis OX=94132 GN=queC P E=3 SV=1
MPHLHTRALVLFSGGQDSATCLAWALARYAHVETIGFDYGQRHRVELESRQTFLRKLKAQFPPWVPKLGPDHLLDLGLLGQVSDTALTADKAIAFDTSGLPNTFVPGRNLIFFTFAAALAYRRDISVLVGGMCETDYSGYPDCRDDTLKALQVTLGLGLDTRMVIDTPLMRIDKAATWRLARDLGGDALVELIKEDTHTCYVGDHGTRHEWGYGCGVCPACELRGQGYRSFTAAAIPR

SEQ ID NO: 41615 - protein, 205 aa, Ramlibacter tataouinensis
  misc_feature (1)..(205): tr|F5Y298|F5Y298_RAMTT 7-cyano-7-deazaguanine synthase OS=Ramlibacter tataouinensis (strain ATCC BAA-407 / DSM 14655 / LMG 21543 / TTB310) OX=365046 GN=queC PE=3 SV= 1
METVGFDYGQRHRVELEVRLRFLDQLKARFPHWAVRLGTDHVLQLPTLGQLSDTALTADKAIEFEASGLPNTFVPGRNLLFFTYAAALAYRRGLSVLVGGMCETDYSGYPDCRDDTLKALQVALGLGLDTRLVIETPLMWIDKAATWRLAHELGGGALVHLVRDCTHTCYLGDHATRHDWGYGCGSCPACELRARGWAQFTTAGP

SEQ ID NO: 41616 - protein, 231 aa, Raoultella electrica
  misc_feature (1)..(231): tr|A0A514EVN8|A0A514EVN8_9ENTR 7-cyano-7-deazaguanine s ynthase OS=Raoultella electrica OX=1259973 GN=queC PE=3 SV=1
MKRAVVVFSGGQDSTTCLVQALQQYDEVHCVTFDYGQRHRAEIDVARALALKLGAVAHKVLDVTLLNELAVSSLTRDNIPVPDYEPEASGIPNTFVPGRNILFLTLTAIYAYQVKAEAIITGVCETDFSGYPDCRDEFVKALHHAVSLGMAKDIRFETPLMWLNKAETWALADYWGQLALVRHETLTCYNGIKGDGCGQCAACNLRANGLSQYEADRPGIMAVMKQKTGLQ

SEQ ID NO: 41617 - protein, 201 aa, Raoultella ornithinolytica
  misc_feature (1)..(201): tr|A0A4R2XPY6|A0A4R2XPY6_RAOOR 7-cyano-7-deazaguanine s ynthase OS=Raoultella ornithinolytica OX=54291 GN=EC841 _108214 PE=3 SV=1
MKTALLLSGGMDSIAIAWWKRPDIAITLDYGQRAAEAEIKAASATCSALKIDHHVIKVDCSSLGSGDMAGAEADSNAPSSDWWPYRNQMLISLAAMKAITLGVTRLWIGTVKSDSSHLDGTLDFIYKISELMSFQEGNMIVEAPAIELSTTELVRISGVTPGGLAWAHSCHKANIPCGNCRGCNKYFQVLDEVGYELDRLR

SEQ ID NO: 41618 - protein, 231 aa, Raoultella ornithinolytica
  misc_feature (1)..(231): tr|A0A1Y6GSS0|A0A1Y6GSS0_RAOOR 7-cyano-7-deazaguanine s ynthase OS=Raoultella ornithinolytica OX=54291 GN=queC PE=3 SV=1
MKRAVVVFSGGQDSTTCLVQALQQYDEVHCVTFDYGQRHRAEIDVARSLALKLGAVAHKVLDVTLLNELAVSSLTRDNIPVPDYEPEASGIPNTFVPGRNILFLTLTAIYAYQVKAEAIITGVCETDFSGYPDCRDEFVKALHHAVSLGMAKDIRFETPLMWLNKAETWALADYWGQLALVRHETLTCYNGIKGDGCGQCAACNLRANGLSQYEADRPGIMAVMKQKTGLQ

SEQ ID NO: 41619 - protein, 231 aa, Raoultella planticola
  misc_feature (1)..(231): tr|A0A2X2E584|A0A2X2E584_RAOPL 7-cyano-7-deazaguanine s ynthase OS=Raoultella planticola OX=575 GN=queC PE=3 SV =1
MKRAVVVFSGGQDSTTCLVQALQQYDEVHCVTFDYGQRHRAEIDVARSLALKLGAVAHKVLDVTLLNELAVSSLTRDNIPVPDYEPEASGIPNTFVPGRNILFLTLTAIYAYQVKAEAIITGVCETDFSGYPDCRDEFVKALHHAVSLGMAKDIRFETPLMWLNKAETWALADYWGQLALVRHETLTCYNGIKGDGCGQCAACNLRANGLSQYEADRPGIMAVMKHKTGLQ

SEQ ID NO: 41620 - protein, 191 aa, Raoultella planticola
  misc_feature (1)..(191): tr|A0A0D8NE65|A0A0D8NE65_RAOPL 7-cyano-7-deazaguanine s ynthase OS=Raoultella planticola OX=575 GN=UA70_21580 P E=3 SV=1
MDSIAIAWWKRPDIALTLDYGQQAANAEIKAATATCEALGIEHHIIRIDCRSLGSGDMAGTTMDPNAPSSDWWPYRNQMLISLAAMKAITLGVTHLWIGTVKSDETHLDGTIGFISRISELMSFQEGGMVVEAPAITLSTSELIRISDVTPGGLAWAHSCHKANIPCGNCRGCNKYFQVLDDVGYDLDRSR

SEQ ID NO: 41621 - protein, 231 aa, Raoultella sp.
  misc_feature (1)..(231): tr|A0A509CPH1|A0A509CPH1_9ENTR 7-cyano-7-deazaguanine s ynthase OS=Raoultella sp. NCTC 9189 OX=2583577 GN=queC PE=3 SV=1
MKRAVVVFSGGQDSTTCLVQALKQYDEVHCVTFDYGQRHRAEIDVARELALKLGAVAHKVLDVTLLNELAVSSLTRDSIPVPDYEPDASGIPNTFVPGRNILFLTLTAIYAYQVKAEAIITGVCETDFSGYPDCRDEFVKALNHAVNLGMAKDIRFETPLMWLNKAETWALADYWGQLELIRSETLTCYNGIKGDGCGQCASCNLRANGLNQYQADKVGIMALMKQKTGLR

SEQ ID NO: 41622 - protein, 231 aa, Raoultella sp.
  misc_feature (1)..(231): tr|A0A4R3ZFZ5|A0A4R3ZFZ5_9ENTR 7-cyano-7-deazaguanine s ynthase OS=Raoultella sp. BIGb0138 OX=2485115 GN=queC P E=3 SV=1
MKRAVVVFSGGQDSTTCLVQALKQYDEVHCVTFDYGQRHRAEIDVARELALTLGAVAHKVLDVTLLNELAVSSLTRDNIPVPDYAPDASGIPNTFVPGRNILFLTLAAIYAYQVKAEAIITGVCETDFSGYPDCRDEFVKALHHAVSLGMAKDIRFETPLMWLNKAETWALADYWGQLERVRRETLTCYNGIKGDGCGQCAACNLRANGLHQYLADKVGVMTVMKQKTGLK

SEQ ID NO: 41623 - protein, 231 aa, Raoultella terrigena; identical to SEQ ID NO: 41621
  misc_feature (1)..(231): tr|A0A1V2BSL5|A0A1V2BSL5_RAOTE 7-cyano-7-deazaguanine s ynthase OS=Raoultella terrigena OX=577 GN=queC PE=3 SV= 1

SEQ ID NO: 41624 - protein, 247 aa, Raoultella terrigena
  misc_feature (1)..(247): tr|A0A4U9DAA2|A0A4U9DAA2_RAOTE 7-cyano-7-deazaguanine s ynthase OS=Raoultella terrigena OX=577 GN=queC PE=3 SV= 1
MKRAVVVFSGGQDSTTCLVQALKQYDEVHCVTFDYGQRHRAEIDVARELALKLGAVAHKVLDVTLLNELAVSSLTRDSIPVPDYEPDASGIPNTFVPGRNILFLTLTAIYAYQVKAEAIITGVCETDFSGYPDCRDEFVKALNHAVNLGMAKDIRFETPLMWLNKAETWALADYWGQLELIRSETLTCYNGIKGDGCGQCASCNLRANGLNQYQADKVGNHGPDEAKNGLTLIIAGRFPRPRFAKRG

SEQ ID NO: 41625 - protein, 282 aa, Raphidiopsis brookii
  misc_feature (1)..(282): tr|D4TUG3|D4TUG3_9CYAN 7-cyano-7-deazaguanine synthase OS=Raphidiopsis brookii D9 OX=533247 GN=queC PE=3 SV=1
MLRLLAIILNCQTLSVQNHPNGNIVAQFMKNFKIFQIYVFFYVQFPIYLEVYQKSIMKAVILLSGGLDSSTVLYQARADGYECYVISFDYHQRHRRELQSAISIAQSLEVVEHQLVTFDLRSWGGSALTDNSIPVPQNRPLDQMSGSIPITYVPARNTIFLSFALAYAEAIRAERVYIGVNALDYSGYPDCRPDYIHAMQEVFRLGTKQGREGKRIDIVAPLINLTKSQIIQLGNLLGVPWELTWSCYSGDQQPCGVCDSCQLRWAAFHELGLEDPVKQQGM

SEQ ID NO: 41626 - protein, 222 aa, Raphidiopsis curvata
  misc_feature (1)..(222): tr|A0A1Z4VG07|A0A1Z4VG07_9CYAN 7-cyano-7-deazaguanine s ynthase OS=Raphidiopsis curvata NIES-932 OX=1973482 GN= queC PE=3 SV=1
MKAVILLSGGLDSSTVLYQARADGYECYAISFDYHQRHRRELQSAMSIAQSLGVVEHQLVTFDLRSWGGSALTDNSIPVPQNRLLDQMSESIPITYVPARNSIFLSFALGYAEAIGAERVYIGVNALDYSGYPDCRPDYIHAMQEVFRLGTKQGREGKPIDIIAPLINLTKIQIIQLGNRLGVPWELTWSCYTGGEHPCGVCDSCQLRWAAFHELGLKDPGV

SEQ ID NO: 41627 - protein, 227 aa, Reinekea blandensis
  misc_feature (1)..(227): tr|A4BHW9|A4BHW9_9GAMM 7-cyano-7-deazaguanine synthase OS=Reinekea blandensis MED297 OX=314283 GN=queC PE=3 SV =1
MSENKSKAVVLLSGGLDSTTVLAKAKADGCEVYALSFDYGQRHDSELDAARKIAANAQVAEHKIVPMNLRSIGGSALTDDAIDVPEQESEGIPATYVPARNTVFLSIALGWAEVIDADAIYIGVSAVDYSGYPDCRPEYIEAYETLANLATKRGVEGRRVEIRTPLINLTKADTVKLGQSLGVDYAETVSCYQANANGEACGVCDSCRLRKKGFADAGMTDPTRYAV

SEQ ID NO: 41628 - protein, 231 aa, Reinekea forsetii
  misc_feature (1)..(231): tr|A0A2K8KMY2|A0A2K8KMY2_9GAMM 7-cyano-7-deazaguanine s ynthase OS=Reinekea forsetii OX=1336806 GN=queC PE=3 SV =1
MPLKESPMAQKAVVLLSGGLDSTTVLAQAQMDGYEVYALSFDYGQRHDSELDAARIVAQRAGVVEHKVVPMSLRSIGGSALTDMAMDVPEVASEGIPVTYVPARNTVFLSIALGWAEVIDADAIFIGVSAVDYSGYPDCRPEYIAAFEKMANLATKRGVEGRPVRILTPLIDLTKADTVRLGVRLGVDYAATVSCYQANSLGEACGLCDSCRLRIKGFAEAGVADSTRYVG

SEQ ID NO: 41629 - protein, 224 aa, Reinekea marinisedimentorum
  misc_feature (1)..(224): tr|A0A4R3I966|A0A4R3I966_9GAMM 7-cyano-7-deazaguanine s ynthase OS=Reinekea marinisedimentorum OX=230495 GN=que C PE=3 SV=1
MTKKAIVLLSGGLDSSTVLAKAKKDGYEVYALSFDYGQRHDAELDAARNIARRENVAEHKVVPMNLRTIGGSALTDDTIDVPTEESEGIPATYVPARNTVFLSIALGWAEVVDADAIFIGVSAVDYSGYPDCRPEYIAAYETMANLATKRGVEGRPVKIETPLINLTKAQTVELGLSLGVDYSLTVSCYQANENGEACGQCDSCRLRKKGFEQLGVQDPTRYAV

SEQ ID NO: 41630 - protein, 225 aa, Reinekea sp.
  misc_feature (1)..(225): tr|A0A5C8ZA24|A0A5C8ZA24_9GAMM 7-cyano-7-deazaguanine s ynthase OS=Reinekea sp. SSH23 OX=2593301 GN=queC PE=3 S V=1
MTKKAIVLLSGGLDSSTVLAKAKHDGYQVYALSFDYGQRHDAELDAAKKIAEQAAVAEHKVVPMNLRTIGGSALTDDSIDVPTQESEGIPATYVPARNTVFLSIALGWAEVIEADAIFVGVSAVDYSGYPDCRPEYIAAFETMANLATKRGVEGNPIKIVTPLIDLTKAETVKLGLSLGVDYSLTVSCYQANSQGEACGECDSCRLRKKGFEELAVSDPTRYAAS

SEQ ID NO: 41631 - protein, 209 aa, Reyranella sp.
  misc_feature (1)..(209): tr|A0A521M8N8|A0A521M8N8_9PROT 7-cyano-7-deazaguanine s ynthase OS=Reyranella sp. OX=1929291 GN=queC PE=3 SV=1
MAKRIVVLHSGGMDSTTCLYEAHAAGHEVTSLGFEYGQRLSVELLFAARQCERLGIRRDVVSLSWQKPNRPMPIGRAIEEMPKSVSPAFLPARNVVFLSVACAHAAGVSADEVHIGLNSIDYSGYPDCTPEFLKSFQSMMSLAHPGGPTIVAPLMSMSKAEIATLAKQHGLGEYDTWSCYRPQVANGGVVPCGNCDACRLHSHAWKTIK

SEQ ID NO: 41632 - protein, 241 aa, Reyranella sp.
  misc_feature (1)..(241): tr|A0A521LMZ0|A0A521LMZ0_9PROT 7-cyano-7-deazaguanine s ynthase OS=Reyranella sp. OX=1929291 GN=queC PE=3 SV=1
MNDALNNSGAALVLFSGGQDSTTCLAWALERFAHVETVAFDYRQRHRIELDQRLVVLDEIRRASPQWADRLGEDHFVDMGVLGQISETSLTRNVAFAMEKDGLPNSFVPGRNLLFFTFAAAVAWRRGIRNLIGGMCETDFSGYPDCRDNTIKALQVALNLGMDRSFVLHTPLMWLDKAETWQLARELGGASLVDLILEHTHTCYDSVRGPRNDWGYGCGECPACALRKRGFVAYREGKSSL

SEQ ID NO: 41633 - protein, 218 aa, Rheinheimera nanhaiensis
  misc_feature (1)..(218): tr|I1E1P4|I1E1P4_9GAMM 7-cyano-7-deazaguanine synthase OS=Rheinheimera nanhaiensis E407-8 OX=562729 GN=queC PE =3 SV=1
MPNKVVVIYSGGMDSFTVLHKAVQAGHDVYALSFNYGQRHVKELQCAATVCQQLGIKHKIVDISAINQLLAGSSLTDDIDIPEGHYAADNMKSTVVPNRNMILLSLAVGYAVSIGANQVYYGAHSGDHFIYPDCRPEFVQKMHDVCQIANYEPVDIVSPYLQQTKIEILADGLAMGLDYSQTWTCYNGRDKACGKCGSCQERLEAFALNHTTDPLPYE

SEQ ID NO: 41634 - protein, 222 aa, Rheinheimera pacifica
  misc_feature (1)..(222): tr|A0A1H6NG64|A0A1H6NG64_9GAMM 7-cyano-7-deazaguanine s ynthase OS=Rheinheimera pacifica OX=173990 GN=queC PE=3 SV=1
MPNKVVVIYSGGMDSFTVLHKAVQAGHDVYALSFNYGQRHVKELQCAAQVCQELGIKHKIVDISAINQLLAGSSLTDDIDIPEGHYAADNMKSTVVPNRNMILLSLAVGYAVSLGASQVYYGAHSGDHFIYPDCRPEFVQKMHDVCQIANYEPVDIISPYLAQTKIEILADGLAMGLDYSKTWTCYNGREKACGKCGSCQERLEAFTLNNVTDPLPYEQNLS

SEQ ID NO: 41635 - protein, 219 aa, Rheinheimera salexigens
  misc_feature (1)..(219): tr|A0A1E7Q717|A0A1E7Q717_9GAMM 7-cyano-7-deazaguanine s ynthase OS=Rheinheimera salexigens OX=1628148 GN=queC P E=3 SV=1
MPNKVVVIYSGGMDSFTVLHKALQAGHEVYALSFNYGQRHVKELEFASSVCQELNINHKIVDISAINQLLAGSSLTDDIDIPEGHYAADNMKSTIVPNRNMILLSLAAGYAVSIGADQVYYGAHSGDHFIYPDCRPEFVQKMHDVCQIANYEPIAIVSPYLTQTKIEILADGIKMGLDYNKTWTCYNGREKACGKCGSCQERLEAFSLNNVTDPIAYEV

SEQ ID NO: 41636 - protein, 218 aa, Rheinheimera sp.
  misc_feature (1)..(218): tr|A0A4P6VUE6|A0A4P6VUE6_9GAMM 7-cyano-7-deazaguanine s ynthase OS=Rheinheimera sp. D18 OX=2545632 GN=queC PE=3 SV=1
MPNKVVVIYSGGMDSFTVLHKAIQAGHDVYALSFNYGQRHVKELQCAAQVCAELGINHKIVDISAINQLLAGSSLTDNIDIPEGHYAADNMKSTIVPNRNMILLSLAVAYAVSIGASQVYYGAHSGDHFIYPDCRPEFVQKMHDVCQIANYEAVDIVSPYLSHTKIDILADGIAMGLDYSKTWTCYNGREKACGKCGSCQERLEAFTLNHATDPLPYE

SEQ ID NO: 41637 - protein, 220 aa, Rheinheimera sp.
  misc_feature (1)..(220): tr|A0A1B7UL71|A0A1B7UL71_9GAMM 7-cyano-7-deazaguanine s ynthase OS=Rheinheimera sp. SA_1 OX=1827365 GN=queC PE= 3 SV=1
MPQKVVVIYSGGMDSFTVLHNAIRAGHDVYALSFNYGQRHVKELICAQSVCQELGIHHKIVDISAINQLIGGSSLTDDIEVPEGHYAADNMKSTVVPNRNMILLSLAVGYAVSLDAQAVYYGAHSGDHFIYPDCRPEFVQKMNDVCQIANYEPVDIISPYLQQTKIEILKDGLAMGLDYGKTWTCYNGREQACGKCGSCQERLEAFTLNNTIDPLPYEPQ

SEQ ID NO: 41638 - protein, 218 aa, Rheinheimera tuosuensis
  misc_feature (1)..(218): tr|A0A285IV61|A0A285IV61_9GAMM 7-cyano-7-deazaguanine s ynthase OS=Rheinheimera tuosuensis OX=1323745 GN=queC P E=3 SV=1
MSQKVVVIYSGGMDSFTILHKAVAAGHDVYALSFNYGQRHVKELICAASVCKELNINHKIVDISAINQLISGSSLTSDIDVPEGHYAADNMKSTVVPNRNMILLSLAVGYADSIGARAVYYGAHSGDHFIYPDCRPEFVQKMNDVCQIANYQPVDIVSPYLYQTKIEILADGLAMGLDYSKTWTCYNGREKACGKCGSCQERLEAFALNNATDPLPYE

SEQ ID NO: 41639 - protein, 248 aa, Rhizobacter gummiphilus
  misc_feature (1)..(248): tr|A0A1W6LG91|A0A1W6LG91_9BURK 7-cyano-7-deazaguanine s ynthase OS=Rhizobacter gummiphilus OX=946333 GN=queC PE =3 SV=1
MKPSRRALVLFSGGQDSTACLAWALEHHDHVETIGFDYGQRHSVELQCRTAVRAQIVANFPRWAPRLGDDHLLDLSLLGQISDTALTSERELEMTNSGLPNTFVPGRNLLFFTFAATVAYRRGLNVLVGGMCETDFSGYPDCRDNTLKALQVAISLGMDTKMTVETPLMWLDKAQTWAFSADLGGEALNDLIVEHTHTCYLGDRQQRHEWGYGCGQCPACALRRRGYKGWRESGQPEFADTDRLGLMP

SEQ ID NO: 41640 - protein, 248 aa, Rhizobacter sp.
  misc_feature (1)..(248): tr|A0A0Q6XQ57|A0A0Q6XQ57_9BURK 7-cyano-7-deazaguanine s ynthase OS=Rhizobacter sp. Root1221 OX=1736433 GN=queC PE=3 SV=1
MRPSRRALVLFSGGQDSTACLAWALEHHDHVETIGFDYGQRHAIELECRKAVREHLVAGFPQWARRLGDDHLLDLSLLGQISDTALTSEREIEMTRNGLPNTFVPGRNLLFFTFAATVAYRRGLNVLVGGMCETDFSGYPDCRDNTLKALQVAISLGMDTPMTVETPLMWLDKAQTWAFSAALGGEALNALIVDHTHTCYLGDRSQRHEWGYGCGQCPACALRRRGYKGWRERGQPEFADTDPLGLAP

SEQ ID NO: 41641 - protein, 240 aa, Rhizobacter sp.
  misc_feature (1)..(240): tr|A0A0Q7AEI5|A0A0Q7AEI5_9BURK 7-cyano-7-deazaguanine s ynthase OS=Rhizobacter sp. Root404 OX=1736528 GN=queC P E=3 SV=1
MVAAVDPRRALVLFSGGQDSTACLAWALTRYAHVETIGFDYGQRHRIELDARREVRGALVAAFQHWAARLGDDHLLDLALLGQLSDTALTDTRAIEMTAKGLPNTFVPGRNLLFFNFAAAVAYRRGASVLVGGMCETDYSGYPDCRDNTLRALQVAISLGLDAPMAIETPLMWLDKAQTWALAEQLGGDALVDLTIEHTHTCYLGDRAHRHAWGYGCGECPACVLRRDGHARWVRERAPA

SEQ ID NO: 41642 - protein, 236 aa, Rhizobiaceae bacterium
  misc_feature (1)..(236): tr|A0A4U5ZK48|A0A4U5ZK48_9RHIZ 7-cyano-7-deazaguanine s ynthase OS=Rhizobiaceae bacterium LC148 OX=1120689 GN=q ueC PE=3 SV=1
MKTIVVCSGGLDSVSLAHRIAAEHELIGLISFDYGQRHRKELDYAAACAQRLGVFHEIIDMRGIGSRLTGSALTDDVDVPDGHYAEETMRITVVPNRNAIMLAIAFGVAAAREADAVAIAVHGGDHFIYPDCRPGFIDAFQAMQDHALEGYASVKLLAPYVHGSKAEIVKDGAAHGTPFAETWSCYKGGERHCGRCGTCVERREAFHLAGIADPTEYEDPDFWIAATEGFRAEEVR

SEQ ID NO: 41643 - protein, 284 aa, Rhizobiales bacterium
  misc_feature (1)..(284): tr|A0A431PKP4|A0A431PKP4_9RHIZ 7-cyano-7-deazaguanine s ynthase OS=Rhizobiales bacterium OX=1909294 GN=EKK29_15 460 PE=3 SV=1
MEPAKVSMGLFTGSRVAWSFECSLPLSTARRFFRRRRKPRSFQMARDVLLVLSGGLDSTTMAYVLAEQYSCRAVYVDYGKEISPRELAAAKLVSHMLDMPIDIVGSEGITRMQYGYLPWTHVRSDESDIKGWDGITRVITQEEAEALSKYPAGSPHWYHVSGLHQLVSIATYLAQLIGISDIALAITKEQSIAMPGLGRALIKWSECIELLNPASGKFNVLTPFIDHKKSEIVKTGAATNVPFEITWSCITRTDMHCGKCIRCIERKEAFQDASIPDPTSYAPP

SEQ ID NO: 41644 - protein, 273 aa, Rhizobiales bacterium
  misc_feature (1)..(273): tr|A0A1H4U8Q6|A0A1H4U8Q6_9RHIZ 7-cyano-7-deazaguanine s ynthase OS=Rhizobiales bacterium GAS188 OX=1884351 GN=q ueC PE=3 SV=1
MLDDEKAIVLFSGGQDSTTCLAWALERFKAVETVGFDYGQRHRVELDMRPRLTAALRQGFPAWAARLGEDTLIDLAVLGQISETSLTRDVAFALEANGLPNTFVPGRNLLFMGFAAALAYRRGAKHLVTGVCETDFSGYPDCRDDTMKAMQLALNLGMDARFVIHTPLMWIDKAQSWALADELGGEKLVSLIGARRIPAIRTTGRSCMPGAMAAANARPASYARRASRNGERVSALRSRGRLEAGDPGCAGPPASSRHRGIMHELAQIPAYHS

SEQ ID NO: 41645 - protein, 236 aa, Rhizobium acidisoli
  misc_feature (1)..(236): tr|A0A0N1DQI1|A0A0N1DQI1_9RHIZ 7-cyano-7-deazaguanine s ynthase OS=Rhizobium acidisoli OX=1538158 GN=queC PE=3 SV=1
MKTIVVCSGGLDSVSLAHKIAAEQQLIGLVSFDYGQRHRKELDFAARCAARLAVPHHIIDISAIGGHLSGSALTDDIEVPDGHYAEETMKATVVPNRNAIMLAIAFGLAAAQKADAVAVAVHGGDHFIYPDCRPGFIDAFQRMQNEALDGYANVRLLAPYVDISKAAIVTDGEKHATPFAETWSCYKGGRLHCGRCGTCVERREAFHLAGIPDPTEYEDQDFWKAAVSQYSAAEVR

SEQ ID NO: 41646 - protein, 236 aa, Rhizobium aethiopicum
  misc_feature (1)..(236): tr|A0A1C3YCW8|A0A1C3YCW8_9RHIZ 7-cyano-7-deazaguanine s ynthase OS=Rhizobium aethiopicum OX=1138170 GN=queC PE= 3 SV=1
MKTIVVCSGGLDSVSLAHRMAAEERLIGLVSFDYGQRHRKELDFAARCAARLAVPHHIIDIAAIGGHLSGSALTDDVEVPDGHYAEETMKATVVPNRNAIMLAIAFGLAAAQKADAVAVAVHGGDHFIYPDCRPGFIDAFQRMQNEALDGYASIKLLAPYVEVSKAAIVADGAKHGTPFAETWSCYKGGSLHCGRCGTCVERREAFHLAAVDDPTEYQDRDFWKAAVSQYSASEVR

SEQ ID NO: 41647 - protein, 233 aa, Rhizobium album
  misc_feature (1)..(233): tr|A0A2U2DKI7|A0A2U2DKI7_9RHIZ 7-cyano-7-deazaguanine s ynthase OS=Rhizobium album OX=2182425 GN=queC PE=3 SV=1
MSATALVLFSGGQDSTTCLAWALDRFERVETVGFDYGQRHRIELECRETLRTQLSNLNPSWGERLGDDHTISLAALGEISDTALTSGMQIEMAASGLPNTFVPGRNLIFLTFAAALAYRRGLKHIVGGMCETDYSGYPDCRDDTIKALQVALNIGMEKRFVLDTPLMWIDKAETWRLAKTLGGRALVDIIVKDSHTCYLGERGEFHAWGYGCGTCPACDLRAKGYEKFSAEEV

SEQ ID NO: 41648 - protein, 236 aa, Rhizobium altiplani
  misc_feature (1)..(236): tr|A0A109JB20|A0A109JB20_9RHIZ 7-cyano-7-deazaguanine s ynthase OS=Rhizobium altiplani OX=1864509 GN=queC PE=3 SV=1
MKTIVICSGGLDSISLAHRVAAEHQLISLLSFDYGQRHRKELDFATACAKRLGVPHQIIDIRTIGRHLTGSALTDDVDVPDGHYAEETMKATVVPNRNSIMLAIAFGLAAAQKADAVAVAVHGGDHFIYPDCRPGFIDAFQEMQNQALDGYASVSLLAPYVNVSKADIVTDGAKYGTPFAETWSCYKGGTRHCGRCGTCVERREAFHLAGVADPTEYEDPDFWVAATAGYSAREVK

SEQ ID NO: 41649 - protein, 236 aa, Rhizobium anhuiense
  misc_feature (1)..(236): tr|A0A3S0X879|A0A3S0X879_9RHIZ 7-cyano-7-deazaguanine s ynthase OS=Rhizobium anhuiense OX=1184720 GN=queC PE=3 SV=1
MKTIVVCSGGLDSVSLAHRIAAEKQLIGLISFDYGQRHRKELEFAAKCAARLSVRHHIIDIASIGGHLSGSALTDNVEVPDGHYAEETMKATVVPNRNAIMLAIAFGLAAAQKADAVAVAVHGGDHFIYPDCRPGFIDAFQRMQNEALEGYASVKLLAPYVDVPKAAIVVDGAKHGTPFSETWSCYKGGRLHCGRCGTCVERREAFHLAGVPDPTEYEDRDFWKAAVSQYSATEVH

SEQ ID NO: 41650 - protein, 236 aa, Rhizobium azibense
  misc_feature (1)..(236): tr|A0A4R7ZSG5|A0A4R7ZSG5_9RHIZ 7-cyano-7-deazaguanine s ynthase OS=Rhizobium azibense OX=1136135 GN=queC PE=3 S V=1
MKTIVICSGGLDSVSLAHKVAAEHQLIGLLSFDYGQRHRKELDFAAACAKRLGVPHQIIDITNIGSHLTGSALTDDIDVPDGHYAEETMKATVVPNRNAIMLAIAFGLAAAQKANAVAVAVHGGDHFIYPDCRPGFIQSFQDMQNQALDGYANVSLFAPYVTVSKADIVIDGARNGTRFAETWSCYKGGSRHCGRCGTCVERREAFHLAGIDDPTDYEDADFWVAATAGFAAKEVK

SEQ ID NO: 41651 - protein, 236 aa, Rhizobium azibense
  misc_feature (1)..(236): tr|A0A4R3R9X4|A0A4R3R9X4_9RHIZ 7-cyano-7-deazaguanine s ynthase OS=Rhizobium azibense OX=1136135 GN=queC PE=3 S V=1
MKTIVICSGGLDSVSLAHKVAAEHQLIGLLSFDYGQRHRKELDFAAACAKRLGVVHQIIDIRNIGNHLTGSALTDDIDVPDGHYAEETMKATVVPNRNAIMLAIAFGLAAAQKADAVAVAVHGGDHFIYPDCRPGFIQAFQDMQNQALEGYAKVLLFAPYVTVSKADIVIDGARNGTRFAQTWSCYKGGARHCGRCGTCVERREAFHLAGIDDPTDYEDPNFWVGATAGFAAEEVK

SEQ ID NO: 41652 - protein, 236 aa, Rhizobium esperanzae
  misc_feature (1)..(236): tr|A0A246DL91|A0A246DL91_9RHIZ 7-cyano-7-deazaguanine s ynthase OS=Rhizobium esperanzae OX=1967781 GN=queC PE=3 SV=1
MKTIVVCSGGLDSVSLAHRMAAEEQLIGLVSFDYGQRHRKELDFAAKCAARLAVPHHIIDIAAIGGHLSGSALTDNVDVPDGHYAEETMKATVVPNRNAIMLAIAFGLAAAQKADAVAVAVHGGDHFIYPDCRPGFIDAFQHMQNEALDGYASVRLLAPYVDVPKAAIVADGARHGTPFAETWSCYKGGSLHCGRCGTCVERREAFHLAGVSDPTEYEDRDFWKAAVSQYSAAEVR

SEQ ID NO: 41653 - protein, 236 aa, Rhizobium etli
  misc_feature (1)..(236): tr|S5S7Y5|S5S7Y5_RHIET 7-cyano-7-deazaguanine synthase OS=Rhizobium etli bv. mimosae str. Mim1 OX=1328306 GN=q ueC PE=3 SV=1
MKTIVVCSGGLDSVSLAHRTASEEQLIGLVSFDYGQRHRKELDFAARCAARLAVPHHIIDIAAIGGHLSGSALTDNVEVPDGHYAEETMKATVVPNRNAIMLAIAFGLAAAQKADAVAVAVHGGDHFIYPDCRPGFIDAFQRMQNEALDGYASVKLLAPYVEVSKAAIVADGARHGTPFAETWSCYKGGSLHCGRCGTCVERREAFHLAGVSDPTEYEDRDFWKAAVSQYSAAEAR

SEQ ID NO: 41654 - protein, 236 aa, Rhizobium etli
  misc_feature (1)..(236): sp|B3Q0Y0|QUEC_RHIE6 7-cyano-7-deazaguanine synthase OS =Rhizobium etli (strain CIAT 652) OX=491916 GN=queC PE= 3 SV=1
MKTIVVCSGGLDSVSLAHKMAAEQQLIGLVSFDYGQRHRKELDFAARCAARLAVPHHIIDIAAIGGHLSGSALTDNVEVPDGHYAEETMKATVVPNRNAIMLAIAFGLAAAQKADAVAVAVHGGDHFIYPDCRPGFIDAFQRMQNAALDGYASVRLLAPYVDVSKAAIVADGEKHATPFAETWSCYKGGRLHCGRCGTCVERREAFHLAGISDPTDYEDRDFWKAAVSQYSAKEVR

SEQ ID NO: 41655 - protein, 236 aa, Rhizobium favelukesii
  misc_feature (1)..(236): tr|W6RD30|W6RD30_9RHIZ 7-cyano-7-deazaguanine synthase OS=Rhizobium favelukesii OX=348824 GN=exsB PE=3 SV=1
MKTIVICSGGLDSISLAHRVAAEHQLIGLLSFDYGQRHRKELDFATACAKRLGVPHQIIDIRTIGRHLTGSALTDDVDVPDGHYAEETMKATVVPNRNAIMLAIAFGLAAAQKADAVAVAVHGGDHFIYPDCRPGFIDAFQEMQNQALDGYASVSLHAPYVNISKADIVADGAKYGTPFAETWSCYKGGTRHCGRCGTCVERREAFHLAGVADPTEYEDPDFWVAATSGYSAREVK

SEQ ID NO: 41656 - protein, 236 aa, Rhizobium fredii
  misc_feature (1)..(236): tr|A0A2L0HEG2|A0A2L0HEG2_RHIFR 7-cyano-7-deazaguanine s ynthase OS=Rhizobium fredii OX=380 GN=queC PE=3 SV=1
MKTIVICSGGLDSVSLAHKIATEHELVGLLSFDYGQRHRKELDFAAACARRLGVPHQIIDIREIGRHLTGSALTDDVDVPDGHYAEETMKTTIVPNRNAIMLAIAFGVAAARKADAVAAAVHGGDHFIYPDCRPGFIAAFQTMQNHALEGYADITLHTPYVNVSKADIVADGAKHGTPFAETWSCYKGGARHCGRCGTCVERREAFHLAGVADATEYEDPDFWVAATRAFAAAEVR

SEQ ID NO: 41657 - protein, 236 aa, Rhizobium fredii
  misc_feature (1)..(236): tr|G9AFM5|G9AFM5_RHIFH 7-cyano-7-deazaguanine synthase OS=Rhizobium fredii (strain HH103) OX=1117943 GN=exsB P E=3 SV=1
MKTIVICSGGLDSVSLAHRIAAEHELLGLLSFDYGQRHRKELDFAAACARRLGVPHQVIDIREIGRHLTGSALTDDIDVPDGHYAEETMKTTVVPNRNAIMLAIAFGVAAAGKADAVAAAVHGGDHFIYPDCRPGFIDAFQTMQNHALDGYADVTLHTPYVNVSKADIVADGAKHHTPFAETWSCYKGGARHCGRCGTCVERREAFHLAGVVDPTEYEDPDFWVAATRAFSAEEVK

SEQ ID NO: 41658 - protein, 424 aa, Rhizobium freirei
  misc_feature (1)..(424): tr|N6UYB3|N6UYB3_9RHIZ 7-cyano-7-deazaguanine synthase OS=Rhizobium freirei PRF 81 OX=363754 GN=RHSP_18773 PE= 3 SV=1
MRLVCGPGSFELPLEEGDLRVVLYGQPRIPSEASAGEAVKAELRRKGLNPHRRAWDLLSIALSIITADFSVLRDDSADGWTREIELDVAVSDRAFWNTMANEFRQALAFLTTDRWKLRFHDGGVLPAPPKKISVLKEDCVVLLSGGLDSLVGAIDLTRDGLKPVAVSQNVRGDGLKQRDFAQEIGLTKHLQLNHVATSPTVQETSQRARSLIFLTFGVVVATSLEKYAKGNTAPLYVCENGFIAINPPLTGSRLGSLSTRTAHPVFLTRFQKILDAASLNVKIENPYAQKTKGEMLIECKDQIFLQTEAAHSTSCGRFQRFNYRHCGRCVPCQVRRAAFVAWDAKRDTTDYVYEPLGKDDEDHASFDDVRSVAIALASVKADGLDRWLGHTLSPPDIGDRNGVRGMLDRGLNELGELHRLYGVK

SEQ ID NO: 41659 - protein, 236 aa, Rhizobium freirei
  misc_feature (1)..(236): tr|N6UV40|N6UV40_9RHIZ 7-cyano-7-deazaguanine synthase OS=Rhizobium freirei PRF 81 OX=363754 GN=exbB PE=3 SV=1
MKTIVICSGGLDSVSLAHKVAAEHRLIGLVSFDYGQRHRKELEFAAACAKRLSVPHQIIDITAIGKHLTGSALTDNVDVPDGHYAEETMKATVVPNRNAIMLAIAFGLAAAQKADAVAVAVHGGDHFIYPDCRPGFIAAFQQMQNHALEGYASVSLYAPYVTISKADIVADGAKHRTPFAETWSCYKGGERHCGRCGTCVERREAFHLAGIEDPTEYEDPDFWRSATSGFSAAEVK

SEQ ID NO: 41660 - protein, 236 aa, Rhizobium galegae
  misc_feature (1)..(236): tr|A0A5J5KQJ7|A0A5J5KQJ7_RHIGA 7-cyano-7-deazaguanine s ynthase QueC OS=Rhizobium galegae OX=399 GN=queC PE=4 S V=1
MKTIVVCSGGLDSVSLAHRIAAAQELLGLISFDYGQRHRKELDFAAACAVRLGVFHEIIDMRGIGSRLTGSALTDDLDVPDGHYAEETMRVTVVPNRNAIMLSIAFGVAAARNADAVAIAVHGGDHFIYPDCRPGFIDAFQAMQDHALDGYASVRLIAPYVNGSKADIVVDGARHGTPFAETWSCYKGGARHCGRCGTCVERREAFHLAGIEDPTEYEDPDFWKAATEGFRAEETR

SEQ ID NO: 41661 - protein, 236 aa, Rhizobium gallicum
  misc_feature (1)..(236): tr|A0A1L5NXR1|A0A1L5NXR1_9RHIZ 7-cyano-7-deazaguanine s ynthase OS=Rhizobium gallicum OX=56730 GN=queC PE=3 SV= 1
MKTIVICSGGLDSVSLAHKVAAEHELIGLLSFDYGQRHRKELDFAAACAKRLNVAHQIIDIRNIGSHLTGSALTDDIDVPDGHYAEETMKATVVPNRNAIMLTIAFGLAAAQKADAVAVAVHGGDHFIYPDCRPSFIQSFQDMQNQALDGYASVSLFAPYVTVSKAEIVIDGARNGTPFAETWSCYKGGSRHCGRCGTCVERREAFHLAGIDDPTDYEDPDFWVTATAGFVAEEVK

SEQ ID NO: 41662 - protein, 236 aa, Rhizobium gallicum
  misc_feature (1)..(236): tr|A0A0B4XI10|A0A0B4XI10_9RHIZ 7-cyano-7-deazaguanine s ynthase OS=Rhizobium gallicum bv. gallicum R602 OX=1418 105 GN=queC PE=3 SV=1
MKTIVICSGGLDSVSLAHKVAAEHQLIGLLSFDYGQRHRKELDFAAACAKRLGVPHQIIDITNIGSHLTGSALTDDIDVPDGHYAEETMKATVVPNRNAIMLAIAFGLAAAQKADAVAVAVHGGDHFIYPDCRPGFIQSFQDMQNQALDGYANVSLFAPYVTVSKADIVIDGARNGTRFAETWSCYKGGSRHCGRCGTCVERREAFHLAGIDDPTDYEDADFWVAATAGFAAEEVK

SEQ ID NO: 41663 - protein, 236 aa, Rhizobium grahamii
  misc_feature (1)..(236): tr|A0A370KL34|A0A370KL34_9RHIZ 7-cyano-7-deazaguanine s ynthase OS=Rhizobium grahamii OX=1120045 GN=queC PE=3 S V=1
MKTIVICSGGLDSISLAHRVAAEHQLIGLLSFDYGQRHRKELDFATACAKRLGVPHQIIDIRTIGRHLTGSALTDDVDVPDGHYAEETMKTTVVPNRNAIMLAIAFGLAAAQKADAVAVAVHGGDHFIYPDCRPGFIDAFQEMQNQALDGYASVSLLAPYVNISKADIVTDGAKYGTPFAETWSCYKGGTRHCGRCGTCVERREAFHLAGVADPTEYEDPDFWKAATSGYAAREVK

SEQ ID NO: 41664 - protein, 236 aa, Rhizobium grahamii
  misc_feature (1)..(236): tr|S3H9W4|S3H9W4_9RHIZ 7-cyano-7-deazaguanine synthase OS=Rhizobium grahamii CCGE 502 OX=990285 GN=queC PE=3 S V=1
MKTIVICSGGLDSISLAHRVAAEHQLIGLLSFDYGQRHRKELDFATACAKRLGVPHQIIDIRTIGRHLTGSALTDDVDVPDGHYAEETMKTTVVPNRNAIMLAIAFGLAAAQKADAVAVAVHGGDHFIYPDCRPGFIDAFQEMQNQALDGYASVSLFAPYVTVSKADIVTDGAKYGTPFAETWSCYKGGTRHCGRCGTCVERREAFHLAGVADPTEYEDPDFWKAATSGYAAREVK

SEQ ID NO: 41665 - protein, 233 aa, Rhizobium hainanense
  misc_feature (1)..(233): tr|A0A1C3WCC9|A0A1C3WCC9_9RHIZ 7-cyano-7-deazaguanine s ynthase OS=Rhizobium hainanense OX=52131 GN=queC PE=3 S V=1
MSSTALVLFSGGQDSTTCLAWALDRFEQVETVGFDYGQRHRIELECRDSLRAQMRTLNPLWADRLGEDHTISLAALGKISDTALTSGMQIEMAESGLPNTFVPGRNLIFLTFAAALAYRRGLKHIVGGMCETDYSGYPDCRDDTIKALQVALNIGMEKRFVLDTPLMWIDKAETWQLAKDLGGRALVDIIVKDSHTCYLGERGALHQWGHGCGTCPACELRAKGYEKFVAQEV

SEQ ID NO: 41666 - protein, 236 aa, Rhizobium hainanense
  misc_feature (1)..(236): tr|A0A1C3W2S1|A0A1C3W2S1_9RHIZ 7-cyano-7-deazaguanine s ynthase OS=Rhizobium hainanense OX=52131 GN=queC PE=3 S V=1
MKTIVICSGGLDSVSLAQKVAAEHQLIGLVSFDYGQRHRKELEFAAACAKRLGVPHEIIDITAIGKHLTGSALTDDIEVPDGHYAEETMKATVVPNRNAIMLAIAFGLAAAQKADAVAVAVHGGDHFIYPDCRPGFIDAFQQMQNHALDGYASVSLYAPYVTISKADIVTDGDRHKTPFAETWSCYKGGKSHCGRCGTCVERREAFHLAGIADPTEYEDADFWVAATSGFSAEEVK

SEQ ID NO: 41667 - protein, 236 aa, Rhizobium hidalgonense
  misc_feature (1)..(236): tr|A0A2A6K4D8|A0A2A6K4D8_9RHIZ 7-cyano-7-deazaguanine s ynthase OS=Rhizobium hidalgonense OX=1538159 GN=queC PE =3 SV=1
MKTIVVCSGGLDSVSLAHKIAAEQQLIGLVSFDYGQRHRKELDFAARCAARLAVPHHIIDIATIGGHLGGSALTDNVEVPDGHYAEETMKATVVPNRNAIMLAIAFGLAAAQKADAVAVAVHGGDHFIYPDCRPGFIDAFQHMQNEALDGYASVRLLAPYVDAPKAAIVADGAKHATPFVETWSCYKGGRLHCGRCGTCVERREAFHLAEIPDPTEYEDGDFWKAAVSQYSAAEVR

SEQ ID NO: 41668 - protein, 234 aa, Rhizobium ipomoeae
  misc_feature (1)..(234): tr|A0A4S8NT16|A0A4S8NT16_9RHIZ 7-cyano-7-deazaguanine s ynthase OS=Rhizobium ipomoeae OX=1210932 GN=queC PE=3 S V=1
MSQSKAVVLVSGGLDSATALAIAKHQGFEVYALSFRYGQRHAVELEAAKKVAAEAGVSDHVIASIDLRQFGGSALTQDIEVPKGRAASEMGVGIPVTYVPARNTIFLSFALAWAEVLKASDIFIGVNALDYSGYPDCRPEYIEAYTRMANLATKAGVTGETKLTIHTPLIHMTKAEIIRQGTALNVDYGLTHSCYDPTPEGHACGECDSCLLRLKGFSEAGLKDPVVYAQRGAA

SEQ ID NO: 41669 - protein, 186 aa, Rhizobium ipomoeae
  misc_feature (1)..(186): tr|A0A4S8P4R2|A0A4S8P4R2_9RHIZ 7-cyano-7-deazaguanine s ynthase OS=Rhizobium ipomoeae OX=1210932 GN=FAA97_02445 PE=3 SV=1
MGRGAAMARATVLLSGGVDSTSCIHFLQTRAFEVRAIYVDFGQPAAVIEWAKVVAVSRLFGIPSTKVTCSSDSEFGVGELGGRNAFLLFAAMLLGKCEDGLLVMGIHSGSPYFDCSPEFVDMVARLVSACSSDRLQVHMPFLSWTKADVYAYFRSTGINPQLTYSCEAGTDSPCGDCLSCRDRRLL

SEQ ID NO: 41670 - protein, 236 aa, Rhizobium jaguaris
  misc_feature (1)..(236): tr|A0A387G5Y0|A0A387G5Y0_9RHIZ 7-cyano-7-deazaguanine s ynthase OS=Rhizobium jaguaris OX=1312183 GN=queC PE=3 S V=1
MKTIVICSGGLDSVSLAQKVAAEHQLIGLVSFDYGQRHRKELDFAAACAKRLSVPHHIIDITAIGRHLTGSALTDDVEVPDGHYAEETMKATVVPNRNAIMLAIAFGLAAAQKADAVAVAVHGGDHFIYPDCRPGFIDAFQQMQNHALDGYASVSLYAPYVNVSKADIVTDGVRNGTPFADTWSCYKGGIRHCGRCGTCVERREAFHLAGVEDPTEYDDPDFWVAATAGFSAEEVK

SEQ ID NO: 41671 - protein, 255 aa, Rhizobium jaguaris
  misc_feature (1)..(255): tr|A0A387G7Z5|A0A387G7Z5_9RHIZ 7-cyano-7-deazaguanine s ynthase OS=Rhizobium jaguaris OX=1312183 GN=queC PE=3 S V=1
MAASALVLFSGGQDSTTCLAWALDRFERVETVGFDYGQRHRIELKCRETLRTKVGKINAMWSERLGDDHRIPLAALEDISNSALTSSMAIEMADTGLPNTFVPGRNLIFLTVAAALAHRRELEHIVGGMCETDFSGYPDCRNDTMKALQTALNLGMEKRLVLDTPLMWIDKARTWQLAKDLGGKELVDTIIENSHTCHLGVRGDRHEWGYGCGICPACDLRAKGYRTFLAQEVRNLAKSLPSNHAQDGGSKVDDT

SEQ ID NO: 41672 - protein, 236 aa, Rhizobium laguerreae
  misc_feature (1)..(236): tr|A0A4V2V8B6|A0A4V2V8B6_9RHIZ 7-cyano-7-deazaguanine s ynthase OS=Rhizobium laguerreae OX=1076926 GN=queC PE=3 SV=1
MKTIVVCSGGLDSVSLAHKVAAEKQLIGLVSFDYGQRHRKELDFAASCAVRLSVPHHIIDIASIGGHLSGSALTDNVEVPDGHYAEETMKATVVPNRNAIMLAIAFGLAAAQKADAVAVAVHGGDHFIYPDCRPGFIDAFQRMQNEALDGYASVTLLAPYVDVSKAAIVVDGEKHGTPFSETWSCYKGGELHCGRCGTCVERREAFHLADVPDPTEYEDRDFWKAAVSRYSATEVR

SEQ ID NO: 41673 - protein, 461 aa, Rhizobium laguerreae
  misc_feature (1)..(461): tr|A0A1S9GLZ2|A0A1S9GLZ2_9RHIZ Uncharacterized protein OS=Rhizobium laguerreae OX=1076926 GN=BS630_23435 PE=4 SV=1
MKAEALAEVQQEKLLFAVEKGQAVQCPGFDKTVIAEIGKHIQFVPDILDTFDVKGFAAKHYDLMVLAAAIEFADRRWRRPASWLRNLHVTIPVIDHACWSRPEVQSSLRSAMNFLTGDSWRFTFLKAANASPIGWRQVPLMFEQPKTFAIAYSNGLDSRAVSALSGPPSEALCIRVASTKQRRMDGDSHFTQIPFRVKGFKGKESSFRSRGFQFAAMATIASHLSNISRIIVPESGQGALGPVLVPLYNIYTDYRNFPAFFRKMERFTRALLDCIIKFEQPRLWSTKGETMKAFLGLPGRKHQHLINTRSCWQTRRIVNAEHRRQCGLCAACLLRRMSLHAAEILEPIDTYVVSDLSAAEVDSALASITNDADRAIMVEYGSVGARHLDHLATMSELPDAALRPFASQIAAATGEAYEQTLRNLRIMLMTHAQEWRTFLSAQGEKSFLKNWMDGGRYECSE

SEQ ID NO: 41674 - protein, 234 aa, Rhizobium leguminosarum
  misc_feature (1)..(234): tr|A0A179C1S8|A0A179C1S8_RHILE 7-cyano-7-deazaguanine s ynthase OS=Rhizobium leguminosarum OX=384 GN=queC PE=3 SV=1
MSKSKAVVLLSGGLDSATTLAIAKQQGFDLYALSFRYGQRHVAELEAAKQVAAEAGVRDHMIASIDLRQFGGSALTQDIDVPKGRATSEMSEGIPVTYVPARNTIFLSFALAWAEVLKAPDIFIGVNALDYSGYPDCRPEYIDAYVRMANLATKTGVTGETTLKIHTPLIQMTKAQIIRRGTELGVKYGLTHSCYDPTVEGLSCGECDSCLLRLKGFSEAGLKDPARYAQRGAA

SEQ ID NO: 41675 - protein, 236 aa, Rhizobium leguminosarum
  misc_feature (1)..(236): sp|B5ZR38|QUEC_RHILW 7-cyano-7-deazaguanine synthase OS =Rhizobium leguminosarum bv. trifolii (strain WSM2304) OX=395492 GN=queC PE=3 SV=1
MRTIVVCSGGLDSVSLAHKIAAEQQLIGLVSFDYGQRHRKELDFAARCAARLAVPHHIIDISAIGGHLSGSALTDDIEVPDGHYAEETMKATVVPNRNAIMLAIAFGLAAAQKADAVAVAVHGGDHFIYPDCRPGFIDAFQRMQNEALDGYASVRLLAPYVEVSKAAIVTDGEKHATPFAETWSCYKGGRLHCGRCGTCVERREAFHLAGIPDPTEYEDQDFWKAAVSQYSAAEVR

SEQ ID NO: 41676 - protein, 236 aa, Rhizobium loessense
  misc_feature (1)..(236): tr|A0A1G4U8H3|A0A1G4U8H3_9RHIZ 7-cyano-7-deazaguanine s ynthase OS=Rhizobium loessense OX=158890 GN=queC PE=3 S V=1
MKTIVICSGGLDSVSLAHKVAAEHELIGLLSFDYGQRHRKELDFAAACAKRLNVAHQIIDIRNIGSHLTGSALTDDVDVPDGHYAEETMKATVVPNRNAIMLAIAFGLAAAQKADAVAVAVHGGDHFIYPDCRPGFIQSFQDMQNQALDGYASVSLFAPYVTISKADIVTDGARNGTPFAQTWSCYKGGPRHCGRCGTCVERREAFHLAGIDDPTDYEDPDFWVAATAGFAADEVK

SEQ ID NO: 41677 - protein, 245 aa, Rhizobium loti
  misc_feature (1)..(245): tr|A0A1A5QLI5|A0A1A5QLI5_RHILI 7-cyano-7-deazaguanine s ynthase OS=Rhizobium loti OX=381 GN=queC PE=3 SV=1
MQRDPGTALVLFSGGQDSTTCLAWALENFERVETIGFDYGQRHRIELDVRPYLLGRIRTDFPAWRGRLGEDHMIDMAVLGQISDTALTRDVEIARNANGLPNTFVPGRNLLFLGFAAAIAYRMGAKHLVIGVSEADCSGYPDCRDDAVKAMQLALNLGMETRFVIHTPLIRRDKAQTWALADWLGGEALVKLICEGSHTCYSGDREHRHSWGFGCGTCIECNLRAAGWEQFRSCKEAPVAANEMT

SEQ ID NO: 41678 - protein, 232 aa, Rhizobium loti
  misc_feature (1)..(232): tr|M5AME6|M5AME6_RHILI 7-cyano-7-deazaguanine synthase OS=Rhizobium loti OX=381 GN=exsB PE=3 SV=1
MNALVICSGGLDSVSLAHKVATEQKLIGLLSFDYGQRHKKELGFAAICAKRLGVPHQIVDIRDVGRNLSGSALTDNVDVPDGHYAEDSMRITVVPNRNAIMLAIAFGVAAAQKADAVATAVHGGDHFIYPDCRPAFIDAFQTMQNHALAGYADICLYAPYVNISKADIVSEGAKYATPFEATWSCYKGGARHCGRCGTCVERREAFDLAGITDPTDYEDADFWLHAIQTRSA

SEQ ID NO: 41679 - protein, 236 aa, Rhizobium lusitanum
  misc_feature (1)..(236): tr|A0A1C3WJN9|A0A1C3WJN9_9RHIZ 7-cyano-7-deazaguanine s ynthase OS=Rhizobium lusitanum OX=293958 GN=queC PE=3 S V=1
MKTIVVCSGGLDSVSLAHKVAAEHQLIGLVSFDYGQRHRKEVEFAAACARRLGVPHEIIDITAIGKHLTGSALTDDIDVPDGHYAEETMKATVVPNRNAIMLAIAFGLAAAQKADAVAVAVHGGDHFIYPDCRPGFIDAFQQMQNHALEGYASVSLYAPFVTISKADIVTNGARHQTPFAETWSCYKGGTRHCGRCGTCVERREAFHLAGVEDPTDYEDPDFWEAATTGFSAQEVK

SEQ ID NO: 41680 - protein, 424 aa, Rhizobium lusitanum; identical to SEQ ID NO: 41658
  misc_feature (1)..(424): tr|A0A1C3X6Q2|A0A1C3X6Q2_9RHIZ 7-cyano-7-deazaguanine s ynthase OS=Rhizobium lusitanum OX=293958 GN=GA0061101_1 269 PE=3 SV=1

SEQ ID NO: 41681 - protein, 236 aa, Rhizobium meliloti
  misc_feature (1)..(236): sp|Q92UN9|QUEC_RHIME 7-cyano-7-deazaguanine synthase OS =Rhizobium meliloti (strain 1021) OX=266834 GN=queC PE= 3 SV=1
MKTIVICSGGLDSVSLAHKVAAEQELSGLLSFDYGQRHRKELDFAAACARRLGVPHQIIDIREIGRRLTGSALTDEVDVPDGHYAEETMKATVVPNRNAIMLAIAFGVAAARKADAVATAVHGGDHFIYPDCRPGFIDAFQAMQDHALDGYADVALYAPFVNVSKADIVADGARHDTPFAETWSCYKGGARHCGRCGTCVERREAFHLAGVPDPTEYDDPDFWVAATGSFVAEEVK

SEQ ID NO: 41682 - protein, 236 aa, Rhizobium meliloti
  misc_feature (1)..(236): tr|A0A3S5KXS5|A0A3S5KXS5_RHIML 7-cyano-7-deazaguanine s ynthase OS=Rhizobium meliloti OX=382 GN=queC PE=3 SV=1
MKTIVICSGGLDSVSLAHKVAAEQELFGLLSFDYGQRHRKELDFAAACARHLGVPHQIIDIREIGRHLTGSALTDDVDVPDGHYAEETMKATVVPNRNAIMLAISFGVAAARKADAVATAVHGGDHFIYPDCRPGFIDAFQAMQNHALDSYADVALYAPFVNVSKADIVADGARHDTPFAETWSCYKGGARHCGRCGTCVERREAFHLAGVPDPTEYDDPDFWVTATGSFVAEEVK

SEQ ID NO: 41683 - protein, 236 aa, Rhizobium mesoamericanum
  misc_feature (1)..(236): tr|K0PXK1|K0PXK1_9RHIZ 7-cyano-7-deazaguanine synthase OS=Rhizobium mesoamericanum STM3625 OX=1211777 GN=queC PE=3 SV=1
MKTIVICSGGLDSVSLAHRVAAEHQLISLLSFDYGQRHRKELDFATACAKRLGVPHQIIDIRTIGRHLTGSALTDDVDVPDGHYAEETMKATVVPNRNAIMLAIAFGLAAAQKADAVAVAVHGGDHFIYPDCRPGFIDAFQEMQNQALDGYARVSLLAPYISVSKADIVTDGAKFGTPFAETWSCYKGGTRHCGRCGTCVERREAFHLAGISDPTEYDDPDFWEAATSGYSAREVK

SEQ ID NO: 41684 - protein, 236 aa, Rhizobium miluonense
  misc_feature (1)..(236): tr|A0A1C3VMT7|A0A1C3VMT7_9RHIZ 7-cyano-7-deazaguanine s ynthase OS=Rhizobium miluonense OX=411945 GN=queC PE=3 SV=1
MKTIVVCSGGLDSVSLAHKVAAEHRLIGLVSFDYGQRHRKEVEFAAACAKRLGVPHQIIDITAIGRHLTGSALTDNVDVPDGHYAEETMKATVVPNRNAIMLAIAFGLAAAQKADAVAVAVHGGDHFIYPDCRPGFIDAFQQMQNHALDGYASVSLYAPYVTVSKADIVTDGARHRTPFAETWSCYKGGERHCGRCGTCVERREAFHLAGVEDPTDYEDPDFWVSATSGFSAEEVK

SEQ ID NO: 41685 - protein, 236 aa, Rhizobium mongolense
  misc_feature (1)..(236): tr|A0A559TH41|A0A559TH41_9RHIZ 7-cyano-7-deazaguanine s ynthase OS=Rhizobium mongolense USDA 1844 OX=1079460 GN =queC PE=3 SV=1
MKTIVICSGGLDSVSLAHKVAAEHELIGLLSFDYGQRHRKELDFAAACAKRLNVAHQIIDIRNIGSHLTGSALTDDIDVPDGHYAEETMKATVVPNRNAIMLAIAFGLAAAQKADAVAVAVHGGDHFIYPDCRPGFIQSFQDMQNQALDGYASVSLFAPYVTVSKADIVTDGARNGTPFAQTWSCYKGGSRHCGRCGTCVERREAFHLARIDDPTDYEDPDFWVAATAGFAADEVK

SEQ ID NO: 41686 - protein, 236 aa, Rhizobium multihospitium
  misc_feature (1)..(236): tr|A0A1C3XAD4|A0A1C3XAD4_9RHIZ 7-cyano-7-deazaguanine s ynthase OS=Rhizobium multihospitium OX=410764 GN=queC P E=3 SV=1
MKTIVICSGGLDSVSLAHKVAAEHQLIGLVSFDYGQRHRKELEFASACARRLGVPHEIIDITAIGKHLTGSALTDDIEVPDGHYAEETMKATVVPNRNAIMLAIAFGLAAAQKADAVAVAVHGGDHFIYPDCRPGFIDAFQQMQNHALDGYASVSLYAPYVTISKADIVADGARHETPFAETWSCYKGGERHCGRCGTCVERREAFHLAGAADPTEYEDADFWVAATSRFSAEEVK

SEQ ID NO: 41687 - protein, 236 aa, Rhizobium nepotum
  misc_feature (1)..(236): tr|A0A0D8KHX0|A0A0D8KHX0_9RHIZ 7-cyano-7-deazaguanine s ynthase OS=Rhizobium nepotum 39/7 OX=1368418 GN=queC PE =3 SV=1
MKTIVICSGGLDSVSLAHKIAAEHELLALVSFDYGQRHKKELDFAADCARRFGVPHHVIDIRTIGAHLTGSALTDDIAVPDGHYAEETMRSTVVPNRNAIMLTIAFGLAAAQQADAVAIAVHGGDHFIYPDCRPGFIDSFNAMQAHALEGYADVTLFAPYVTVSKAAIVTDGVKYGTPFGETWSCYKGGLRHCGRCGTCVERREAFHLAGVTDPTDYEDPDFWVAATHAYAAQEVR

SEQ ID NO: 41688 - protein, 236 aa, Rhizobium oryzae
  misc_feature (1)..(236): tr|A0A1X7CYN9|A0A1X7CYN9_9RHIZ 7-cyano-7-deazaguanine s ynthase OS=Rhizobium oryzae OX=464029 GN=queC PE=3 SV=1
MKTIVVCSGGLDSVSLAHKIAAEHELLGLISFDYGQRHRKELDFAGACARRLGVFHQIIDMRSIGRELSGSALTDDVDVPDGHYAEETMRITVVPNRNAIMLSVAFGVAAARQADAVAIAVHGGDHFIYPDCRPGFIDAFQTMQDHALDGYASVRLLAPYVNGSKADIVADGARHGTPFAETWSCYKGGERHCGRCGTCVERREAFHLAGVEDPTDYEDPDFWKTATEGFRATEIR

SEQ ID NO: 41689 - protein, 235 aa, Rhizobium oryzae
  misc_feature (1)..(235): tr|A0A1Q9B101|A0A1Q9B101_9RHIZ 7-cyano-7-deazaguanine s ynthase OS=Rhizobium oryzae OX=464029 GN=queC PE=3 SV=1
MKTIVVCSGGLDSVTLAHRIAATQTLMGLLSFDYGQRHKKELDFAARAAARLGVPHDVIDLSPVGRQLTGSALTDDVDVPDGHYAEETMKATVVPNRNAIMLAVAFGLAAARGAEAVAAAVHGGDHFIYPDCRPAFIDAFQAMQDAALDGYASIQLVTPYVRLSKADIVSDGARYQVPFAETWSCYKGDLRHCGRCGTCVERREAFHLAGIADPTDYADPDFWQAAIKGFRAEEV

SEQ ID NO: 41690 - protein, 235 aa, Rhizobium oryziradicis
  misc_feature (1)..(235): tr|A0A1Q8ZQ40|A0A1Q8ZQ40_9RHIZ 7-cyano-7-deazaguanine s ynthase OS=Rhizobium oryziradicis OX=1867956 GN=queC PE =3 SV=1
MKTLVVCSGGLDSVSLAYKIASEQQLIGLLSFDYGQRHKKELEFAARAAKALGVPHQIIDITTIGKSLTGSALTDDLDVPDGHYAEETMKITVVPNRNAIMLAIAFGVAAAKKADAVAVAVHGGDHFIYPDCRPGFIDAFQTMQNHALEGYADVTLLSPFVTVPKSEIVVQGAKYGTPFADTWSCYKGGARHCGRCGTCVERREAFHLAGVVDPTEYEDPDFWRAATSGFKAEGV

SEQ ID NO: 41691 - protein, 236 aa, Rhizobium phaseoli
  misc_feature (1)..(236): tr|A0A0M3GQA3|A0A0M3GQA3_9RHIZ 7-cyano-7-deazaguanine s ynthase OS=Rhizobium phaseoli Ch24-10 OX=1128399 GN=exs B PE=3 SV=1
MKTIVVCSGGLDSVSLAHKMAAEQQLIGLVSFDYGQRHRKELDFAARCAARLAVPHHIIDIAAIGGHLSGSALTDNVEVPDGHYAEETMKATVVPNRNAIMLAIAFGLAAAQKADAVAVAVHGGDHFIYPDCRPGFIDAFQRMQNEALDGYASVRLLAPYVDVSKAAIVADGEKHATPFAETWSCYKGGRLHCGRCGTCVERREAFHLAGISDPTDYEDRDFWKAAVSQYSAAEVR

SEQ ID NO: 41692 - protein, 236 aa, Rhizobium phaseoli
  misc_feature (1)..(236): tr|A0A2U3CU13|A0A2U3CU13_9RHIZ 7-cyano-7-deazaguanine s ynthase OS=Rhizobium phaseoli OX=396 GN=queC PE=3 SV=1
MKTIVVCSGGLDSVSLAHKMASEQQLIGLVSFDYGQRHRKELDFAARCAARLAVPHHIIDISAIGGHLSGSALTDNVEVPDGHYAEETMKATVVPNRNAIMLAIAFGLAAAQKADAVAVAVHGGDHFIYPDCRPGFIDAFQRMQNEALDGYASVRLLAPYVDVSKAAIVADGEKHATPFAETWSCYKGGRLHCGRCGTCVERREAFHLAGISDPTDYEDRDFWKAAVSQYSAAEVR

SEQ ID NO: 41693 - protein, 236 aa, Rhizobium pisi
  misc_feature (1)..(236): tr|A0A427M665|A0A427M665_9RHIZ 7-cyano-7-deazaguanine s ynthase OS=Rhizobium pisi OX=574561 GN=queC PE=3 SV=1
MKTIVVCSGGLDSVSLAHKIAAEEQLIGLVSFDYGQRHRKELDFAAKCAVRLAVPHHIIDIAAIGGHLSGSALTDDVEVPDGHYAEETMKATVVPNRNAIMLAIAFGLAAAQKADAVAVAVHGGDHFIYPDCRPGFIDAFQRMQNEALEGYASVKLLAPYVDVSKAAIVADGAKHATPFAETWSCYKGGKLHCGRCGTCVERREAFHLAGVTDPTEYEDLDFWKAAVSRYSATEAR

SEQ ID NO: 41694 - protein, 236 aa, Rhizobium pusense
  misc_feature (1)..(236): tr|A0A4U1JYF7|A0A4U1JYF7_9RHIZ 7-cyano-7-deazaguanine s ynthase OS=Rhizobium pusense OX=648995 GN=queC PE=3 SV= 1
MKTIVICSGGLDSVSLAHKIAAEHELLALVSFDYGQRHRKELDFAADCARRLGVPHHVIDIRTIGSHLTGSALTDDVEVPDGHYAEETMRSTVVPNRNAIMLTIAFGLAAAQQAEAVAIAVHGGDHFIYPDCRPGFIDSFNAMQAHALEGYADVKLFAPYVTVSKAAIVTDGAKYGTPFGETWSCYKGGLRHCGRCGTCVERREAFHLAGVTDPTDYEDPDFWAVATHAFAAQEVR

SEQ ID NO: 41695 - protein, 236 aa, Rhizobium pusense; identical to SEQ ID NO: 35763
  misc_feature (1)..(236): tr|A0A1L9CLF5|A0A1L9CLF5_9RHIZ 7-cyano-7-deazaguanine s ynthase OS=Rhizobium pusense OX=648995 GN=queC PE=3 SV= 1

SEQ ID NO: 41696 - protein, 236 aa, Rhizobium radiobacter; identical to SEQ ID NO: 35746
  misc_feature (1)..(236): tr|A0A2L2LG90|A0A2L2LG90_RHIRD 7-cyano-7-deazaguanine s ynthase OS=Rhizobium radiobacter OX=358 GN=exsB PE=3 SV =1

SEQ ID NO: 41697 - protein, 236 aa, Rhizobium radiobacter; identical to SEQ ID NO: 35762
  misc_feature (1)..(236): tr|A0A4V5PRZ0|A0A4V5PRZ0_RHIRD 7-cyano-7-deazaguanine s ynthase OS=Rhizobium radiobacter OX=358 GN=queC PE=3 SV =1

SEQ ID NO: 41698 - protein, 235 aa, Rhizobium rhizosphaerae
  misc_feature (1)..(235): tr|A0A1Q9AK60|A0A1Q9AK60_9RHIZ 7-cyano-7-deazaguanine s ynthase OS=Rhizobium rhizosphaerae OX=1672749 GN=queC P E=3 SV=1
MKTIVVCSGGLDSVTLAHRIAAEATLVGLLSFDYGQRHKKEITFAARAAERLGVPHDVIDLSPVGRHLTGSALTDDVDVPDGHYAEETMKTTVVPNRNAIMLAVAFGLAAARGADAVAAAVHGGDHFIYPDCRPGFIDAFQAMQDRALEGYASVRLVTPYVTRSKADIVADGARLSVPFAQTWSCYKGGARHCGRCGTCVERREAFHLAGIADPTDYEDPDFWQAATSAYAAREV

SEQ ID NO: 41699 - protein, 232 aa, Rhizobium selenitireducens
  misc_feature (1)..(232): tr|A0A376ABD3|A0A376ABD3_9RHIZ 7-cyano-7-deazaguanine s ynthase OS=Rhizobium selenitireducens ATCC BAA-1503 OX= 1336235 GN=queC PE=3 SV=1
MKCFVICSGGLDSVSLAHRVAAEYDIAGLISFDYGQRHRKELDFATACAERLKVPHDIVDIRTVGRNLSDSALTDDVDVPDGHYAEESMRITVVPNRNAIMLAIAFGIAAARKVDAVATAVHGGDHFIYPDCRPGFIDAFQRMQDHALEGYANIRLYAPYVTVPKAEIVKDGARHGTPFALTWSCYKGGEHHCGRCGTCVERREAFHLAGVPDPTDYEDAGFWCEAVARGAL

SEQ ID NO: 41700 - protein, 236 aa, Rhizobium smilacinae
  misc_feature (1)..(236): tr|A0A5C4XH86|A0A5C4XH86_9RHIZ 7-cyano-7-deazaguanine s ynthase OS=Rhizobium smilacinae OX=1395944 GN=queC PE=3 SV=1
MKTLVVCSGGLDSVSLAHNIDAKGDLMGLISFDYGQRHRKELEFAAAAAKRLGVFHQIIDMRAIGSQLTGSALTGDLDVPDGHYAEETMRITVVPNRNAIMLTIAFGVAAARQVDAVAIAVHGGDHFIYPDCRPGFIESFDTMQRHALEGYASVKLLAPYVTGSKADIVTDGAKHHTPFGETWSCYKGGERHCGRCGTCVERREAFHLAGVDDPTDYEDPDFWKSATEGFKAEEVR

SEQ ID NO: 41701 - protein, 236 aa, Rhizobium sophoriradicis
  misc_feature (1)..(236): tr|A0A2A5KJA5|A0A2A5KJA5_9RHIZ 7-cyano-7-deazaguanine s ynthase OS=Rhizobium sophoriradicis OX=1535245 GN=queC PE=3 SV=1
MKTLVVCSGGLDSVSLAHKIAAEQQLIGLVSFDYGQRHRKELDFAARCAARLSVPHHIIDIAAIGGHLSGSALTDNVEVPDGHYAEETMKATVVPNRNAIMLAIAFGLAAAQKADAVAAAVHGGDHFIYPDCRPGFIDAFQRMQNEALDGYASVRLLAPYVDVPKAAIVADGAKHGTPFAETWSCYKGGRLHCGRCGTCVERREAFHLAGISDPTDYEDRDFWKAAVSHYSAAEVR

SEQ ID NO: 41702 - protein, 236 aa, Rhizobium sophoriradicis
  misc_feature (1)..(236): tr|A0A3R9BS54|A0A3R9BS54_9RHIZ 7-cyano-7-deazaguanine s ynthase OS=Rhizobium sophoriradicis OX=1535245 GN=queC PE=3 SV=1
MKTLVVCSGGLDSVSLAHKIAAEQQLIGLVSFDYGQRHRKELGFAARCAARLAVPHHIIDIAAIGGHLSGSALTDNVEVPDGHYAEETMKATVVPNRNAIMLAIAFGLAAAHKADAVAVAVHGGDHFIYPDCRPGFIDAFQRMQNEALDGYANVRLLAPYVDVPKAAIVADGAKHGTPFSETWSCYKGGRLHCGRCGTCVERREAFHLAGISDPTDYEDRDFWKAAVSQYSAAEVR

SEQ ID NO: 41703 - protein, 236 aa, Rhizobium sp.
  misc_feature (1)..(236): tr|A0A246U570|A0A246U570_9RHIZ 7-cyano-7-deazaguanine s ynthase OS=Rhizobium sp. R72 OX=1764278 GN=queC PE=3 SV =1
MKTIVICSGGLDSISLAHRVAAEHQLISLLSFDYGQRHRKELDFATACAKRLGVPHQIIDIRTIGRHLTGSALTDDVDVPDGHYAEETMKATVVPNRNAIMLAIAFGLAAAQKADAVAVAVHGGDHFIYPDCRPGFIDAFQEMQNQALDGYASVSLLAPYVNISKADIVTDGAKYGTPFAETWSCYKGGTRHCGRCGTCVERREAFHLAGISDPTEYEDPDFWEAATSGYSAREVK

SEQ ID NO: 41704 - protein, 198 aa, Rhizobium sp.
  misc_feature (1)..(198): tr|A0A4R1S8R5|A0A4R1S8R5_9RHIZ 7-cyano-7-deazaguanine s ynthase OS=Rhizobium sp. BK251 OX=2512125 GN=EV286_1024 46 PE=3 SV=1
MRRALLLSGGMDSTCLAYWRRPDLAITIDYGHKAAEGEIRAATAICRHLGIEHRIIRCDLSALGSGDMAGKPADPNAPASEWWPYRNQMLATIAAMECIKHGIDVLEVGALRTDGFHVDGRREFVEALSALLSMQEGGLRLEAPAAAYSAEELVKASGTPIEILAWSHSCHTNEYSCGYCRGCQKHYVTMEAIGVGPY

SEQ ID NO: 41705 - protein, 235 aa, Rhizobium straminoryzae
  misc_feature (1)..(235): tr|A0A549SQX4|A0A549SQX4_9RHIZ 7-cyano-7-deazaguanine s ynthase OS=Rhizobium straminoryzae OX=1387186 GN=queC P E=3 SV=1
MKTLVVCSGGLDSVSLAYKVAAEHTLIGLISFDYGQRHRKELEFAALAAKRLGVPHEIIDISNIGRHLSGSALTDDVAVPDGHYAEETMKVTVVPNRNAIMLAIAFGLAAARQAEAVAIAVHGGDHFIYPDCRPGFIDSFQVMQDHALEGYADVVLHSPFVMGSKADIVTEGARVGTPFAETWSCYKGGERHCGRCGTCVERREAFHLAGVEDPTAYDDPDFWKAATAGFRADEV

SEQ ID NO: 41706 - protein, 236 aa, Rhizobium sullae
  misc_feature (1)..(236): tr|A0A4V2VAA9|A0A4V2VAA9_RHISU 7-cyano-7-deazaguanine s ynthase OS=Rhizobium sullae OX=50338 GN=queC PE=3 SV=1
MKTIVICSGGLDSVSLAHKVAAEHELTGLLSFDYGQRHRKELDFAAACAKRLGVPHQIIDIRNIGRHLTGSALTDDIDVPDGHYAEETMKATVVPNRNAIMLSIAFGLAAAQKADAVAVAVHGGDHFIYPDCRPGFIQAFQEMQKQALDGYASVSLFAPYVTVSKADIVTDGARNGTPFAETWSCYKGGARHCGRCGTCVERREAFHLAGIEDPTDYEDPDFWAAATAGFLAKEVK

SEQ ID NO: 41707 - protein, 236 aa, Rhizobium sullae
  misc_feature (1)..(236): tr|A0A2N0DF49|A0A2N0DF49_RHISU 7-cyano-7-deazaguanine s ynthase OS=Rhizobium sullae OX=50338 GN=queC PE=3 SV=1
MKTIVICSGGLDSVSLAHKVAAERELTGLLSFDYGQRHRKELDFAAACAKRLGVPHQIIDIRNIGRHLTGSALTDDIDVPDGHYAEETMKATVVPNRNAIMLSIAFGLAAAQKADAVAVAVHGGDHFIYPDCRPGFIQAFQDMQKQALDGYASVSLFAPYVTVSKADIVTDGARNGTPFAETWSCYKGGVRHCGRCGTCVERREAFHLAGIEDPTDYEDSDFWAAATAGFLAKEVK

SEQ ID NO: 41708 - protein, 235 aa, Rhizobium taibaishanense
  misc_feature (1)..(235): tr|A0A1Q9A4X0|A0A1Q9A4X0_9RHIZ 7-cyano-7-deazaguanine s ynthase OS=Rhizobium taibaishanense OX=887144 GN=queC P E=3 SV=1
MKTLVVCSGGLDSVSLADKIAAQQQLIGLISFDYGQRHKKELDFAARAAKRLGVPHQVIDMTNIGASLTGSALTDDLDVPDGHYAEETMKITVVPNRNAIMLAIAFGVAAAKKADAVALAVHGGDHFIYPDCRPGFIDAFQAMQMQALDGYADVKLLAPFVTISKADIVTEGVKYGTPFAETWSCYKGGEKHCGRCGTCVERREAFHLAGVEDPTEYEDPDFWKAATSGFKATEA

SEQ ID NO: 41709 - protein, 359 aa, Rhizobium tibeticum
  misc_feature (1)..(359): tr|A0A1H8TFY8|A0A1H8TFY8_9RHIZ Uncharacterized protein OS=Rhizobium tibeticum OX=501024 GN=RTCCBAU85039_5190 P E=4 SV=1
MECIAAALKFLTGDEWKLTFTGAKLSADSDFGQQSLFEWGDTGRTITPFSDGLDSRAVSAILGAQGRVDRLIRVRVGSKADDRPVRDRRKVPFLNIPFSVNMKPVGIKESSVRSRGFKFTLLSALAAYLVGTHDVAMPESGQGALGPTLVPTSHGYEDYRNHPRFLCKMEEVFDAIFGYSIHFRLPQLWKTKGQTLAEFAAIESDPEEWNKTRSCWQQSRNSSFDRTRRHCGICAACMLRRLSFHSAGISEPKENYIWEDLRSGSFEDGVVPGFTKVTRAMQRYGIAGALHLDHLAEMRSSPLHRVRLKRHAWQLGERLQMTTTEAEERLLGLLGQHDREWKAFMKDLGPKSFVAQWLA

SEQ ID NO: 41710 - protein, 236 aa, Rhizobium tibeticum
  misc_feature (1)..(236): tr|A0A1H8U190|A0A1H8U190_9RHIZ 7-cyano-7-deazaguanine s ynthase OS=Rhizobium tibeticum OX=501024 GN=queC PE=3 S V=1
MKTIVICSGGLDSISLAHRVAAEHQLIGLLSFDYGQRHRKELDFATACAKRLGVPHQIIDIRTIGRHLTGSALTDDVDVPDGHYAEETMKATVVPNRNAIMLAIAFGLAAAQKADAVAVAVHGGDHFIYPDCRPGFIDAFQEMQNQALDGYASVSLHAPYVNISKADIVTDGAKYGTPFAETWSCYKGGTRHCGRCGTCVERREAFHLAGVADPTEYEDPDFWVAATSGYSAREVK

SEQ ID NO: 41711 - protein, 424 aa, Rhizobium tropici; identical to SEQ ID NO: 41658
  misc_feature (1)..(424): tr|L0LT76|L0LT76_RHITR 7-cyano-7-deazaguanine synthase OS=Rhizobium tropici CIAT 899 OX=698761 GN=RTCIAT899_PB 00130 PE=3 SV=1

SEQ ID NO: 41712 - protein, 236 aa, Rhizobium tropici
  misc_feature (1)..(236): tr|A0A5B0VT93|A0A5B0VT93_RHITR 7-cyano-7-deazaguanine s ynthase OS=Rhizobium tropici OX=398 GN=queC PE=3 SV=1
MKTIVVCSGGLDSVSLAHKVAAEHQLIGLVSFDYGQRHRKELDFAAACATRLGVPHQIIDITGIGRHLTGSALTDDVDVPDGHYAEETMKATVVPNRNAIMLAIAFGLAAAQKADAVAVAVHGGDHFIYPDCRPGFIDAFQQMQNHALDGYASVSLYAPYVTISKADIVTDGARHQTPFAETWSCYKGGERHCGRCGTCVERREAFHIAGIADPTDYEDPDFWVSATSGFVAAEVK

SEQ ID NO: 41713 - protein, 236 aa, Rhizobium tubonense
  misc_feature (1)..(236): tr|A0A2W4CU94|A0A2W4CU94_9RHIZ 7-cyano-7-deazaguanine s ynthase OS=Rhizobium tubonense OX=484088 GN=queC PE=3 S V=1
MKIIVICSGGLDSVSLAYKVAAEHELVGLLSFDYGQRHRKELDFAAACALRLKVPHQIIDIREIGRHLGGSALTDDIEVPDGHYAEESMKITIVPNRNAIMLSIAFGVAAAQKADAVATAVHGGDHFIYPDCRPAFIDAFQLMQNQALDGYADVTLYAPYVNISKADIVSDGAKYNTPFAETWSCYKGGEHQCGRCGTCVERREAFHLAGIDDPTNYEDPHFWAVATGNLCAQEIK

SEQ ID NO: 41714 - protein, 235 aa, Rhizobium tumorigenes
  misc_feature (1)..(235): tr|A0A2W4B6K7|A0A2W4B6K7_9RHIZ 7-cyano-7-deazaguanine s ynthase OS=Rhizobium tumorigenes OX=2041385 GN=queC PE= 3 SV=1
MKTIVVCSGGLDSVSLAYRTAAEGSLLGLLSFDYGQRHRKELDFAAACAQRLGVWHEIIDISGIGRHLTGSALTDNIAVPDGHYAEETMKSTIVPNRNAIMLAIAFGVAAARKADAVAVAVHGGDHFIYPDCRPGFIYSFQRMQAEALDGYADVALLAPYVTVSKADIVTDGVKQGTPFVETWSCYKGGERHCGRCGTCVERREAFSIAGVVDPTDYEDADFWVAATGSFRATEV

SEQ ID NO: 41715 - protein, 236 aa, Rhizobium vallis
  misc_feature (1)..(236): tr|A0A3S0Y0I0|A0A3S0Y0I0_9RHIZ 7-cyano-7-deazaguanine s ynthase OS=Rhizobium vallis OX=634290 GN=queC PE=3 SV=1
MKTIVVCSGGLDSVSLAHRIAAEAQLIGLVSFDYGQRHRKELDFAAKCAARLAVPHHIIDIAAIGGHLSGSALTDDVEVPDGHYAEETMKATVVPNRNAIMLAIAFGLAAAQKADAVAVAVHGGDHFIYPDCRPGFIDAFQRMQNEALDGYASVRLLAPYVEVSKAAIVADGEKHATPFAETWSCYKGGRLHCGRCGTCVERREAFHLAGVTDPTEYEDRDFWKAAVSQYSATEAR

SEQ ID NO: 41716 - protein, 68 aa, Rhizobium yanglingense
  misc_feature (1)..(68): tr|A0A245ZAY0|A0A245ZAY0_9RHIZ Uncharacterized protein OS=Rhizobium yanglingense OX=61013 GN=AJ87_47170 PE=4 S V=1
MLAIAFGLAAAQKADAVAVAVHGGDHFIYPDCRPGFIQSFQDMQNHALDGYASVSLFAPYAPSRRPTS

SEQ ID NO: 41717 - protein, 239 aa, Rhizomicrobium sp.
  misc_feature (1)..(239): tr|A0A177Q9D5|A0A177Q9D5_9PROT 7-cyano-7-deazaguanine s ynthase OS=Rhizomicrobium sp. SCGC AG-212-E05 OX=179965 5 GN=queC PE=3 SV=1
MSALSSALVLFSGGQDSTVCLAWALSRFGRVETVGFDYGQRHAAELAARPRILQKFRERFSGLAAGLGEDHLLPLDVLKAIGGSALTDARKIEMGADGLPTSFVPGRNVMFLTAAAALGYRRGIADLVGGMCETDYSGYPDCRADTIEATARALSLGLARDVRVHTPLMHLDKAATWKLAEDLGGEEMVALIVEDSVTCYEGDRAHRHDWGYGCGACPACELRAAGFKKYIGATNRKPA

SEQ ID NO: 41718 - protein, 230 aa, Rhizorhabdus dicambivorans
  misc_feature (1)..(230): tr|A0A2A4FR99|A0A2A4FR99_9SPHN 7-cyano-7-deazaguanine s ynthase OS=Rhizorhabdus dicambivorans OX=1850238 GN=que C PE=3 SV=1
MSDNLDKQGRRAIVLLSGGLDSMVSGGIAREQGFALAALTIDYNQRHRVELEAAKRVAAALEVDRHVTMPLNLRAFGGSSLTDDIEVPKNGVMPGIPSTYVPARNTIFLSLALGFAEATGARDIFLGVNALDYSGYPDCRPEFIAAFQHLADLATRMGVEGQGFTIHAPLQHMTKADIAREAARLGLDAGMSWSCYDPTPEGRHCGLCDSCRLRAKGFAEAGLPDPTVYA

SEQ ID NO: 41719 - protein, 230 aa, Rhizorhabdus sp.
  misc_feature (1)..(230): tr|A0A521T1K3|A0A521T1K3_9SPHN 7-cyano-7-deazaguanine s ynthase OS=Rhizorhabdus sp. OX=1968843 GN=queC PE=3 SV= 1
MSDNANNQGRRAIVLLSGGLDSMVSGGLAREQGFALAALTIDYNQRHRVELEAAKRIAGMLDVDRHVTLPLNLRAFGGSSLTDDIDVPKDGVMPGIPSTYVPARNTIFLSLALGFAEATGARDIFLGVNALDYSGYPDCRPEFIAAFQHLADLATRMGVEGQGFTIHAPLQHMTKADIAREAARLGLDAGMSWSCYDPTPDGKHCGLCDSCRLRSKGFADAGLADPTMYA

SEQ ID NO: 41720 - protein, 228 aa, Rhodanobacter denitrificans
  misc_feature (1)..(228): tr|M4NJB2|M4NJB2_9GAMM 7-cyano-7-deazaguanine synthase OS=Rhodanobacter denitrificans OX=666685 GN=queC PE=3 S V=1
MSETPPRKAVVLVSGGMDSAVTIAIAREQGYQVHALSVAYGQRHSSELAASDRVAKMLGAIEHKTVGIDLRSIGGSALTADIDVPLDTADSDAIPVTYVPARNTIMLSIALGWAEVLGSSDIWCGVNAVDYSGYPDCRPAFIAAFEQLANVATKAGVEGAGIRIHAPLMRMSKADIAREGQRLGVDFSATVSCYQADSDGRACGHCDACRLRAQGFREAGLADPTRYA

SEQ ID NO: 41721 - protein, 221 aa, Rhodanobacter denitrificans
  misc_feature (1)..(221): tr|A0A2W5KR26|A0A2W5KR26_9GAMM 7-cyano-7-deazaguanine s ynthase OS=Rhodanobacter denitrificans OX=666685 GN=que C PE=3 SV=1
MKHAVVLVSGGMDSAVTLAMARAEGLACHALSVAYGQRHSSELFAAERLAVSLGAVEHKTVHVDLRAIGGSALTADIAVPEQGGAGIPVTYVPARNTIMLSIALGWAEVLGASDIYCGVNAVDYSGYPDCRPAFIDAFQTLANLATKAGVEGRPLRLHAPLIALGKADIVREGLRLGIDFSQTVSCYQADAEGRACGHCDACRLRAEGFAAAGVPDPTRYR

SEQ ID NO: 41722 - protein, 228 aa, Rhodanobacter fulvus
  misc_feature (1)..(228): tr|I4VY03|I4VY03_9GAMM 7-cyano-7-deazaguanine synthase OS=Rhodanobacter fulvus Jip2 OX=1163408 GN=queC PE=3 SV =1
MTDKLSRKAVVLVSGGMDSAVTIAIAREQGYQVHALSVAYGQRHNSELAASERVSQMLGAFEHKTVAVDLRRIGGSALTADIDVPLDAADGDDIPVTYVPARNTIMLSIALGWAEVLGARDIWCGVNAVDYSGYPDCRPAFIEAFESLANVATKAGVEGAGLRIHAPLMKMSKADIAREGKRLGVDFSATVSCYQANGEGRACGHCDACRLREQGFREAGLPDPTRYV

SEQ ID NO: 41723 - protein, 228 aa, Rhodanobacter glycinis
  misc_feature (1)..(228): tr|A0A5B9DWR3|A0A5B9DWR3_9GAMM 7-cyano-7-deazaguanine s ynthase OS=Rhodanobacter glycinis OX=582702 GN=queC PE= 3 SV=1
MSETTPRKAVVLVSGGMDSAVVIAIAREQGYQVHALSVAYGQRHSSELEASERVAHLLGAVEHKVVQVDLRSIGGSALTADIDVPLDAAGQSEIPVTYVPARNTIMLSIALGWAEVLGSTEIWCGVNAVDYSGYPDCRPAFIEAFEKLANLATKAGVEGAGIRIRAPLMAMSKADIAREGARLGVDFAQTVSCYQADAQGRACGHCDACRLRAQGFSEAGLVDPTRYV

SEQ ID NO: 41724 - protein, 228 aa, Rhodanobacter glycinis
  misc_feature (1)..(228): tr|A0A502CJK0|A0A502CJK0_9GAMM 7-cyano-7-deazaguanine s ynthase OS=Rhodanobacter glycinis OX=582702 GN=queC PE= 3 SV=1
MSQSTLRKAVVLVSGGMDSAVTIALAREQGYQVHALSVAYGQRHNSELAASDRVSRMLGAVEHKTVGIDLRSIGGSALTADIDVPLDTLDSGDIPVTYVPARNTIMLSIALGWAEVLGSSDIWCGVNAVDYSGYPDCRPAFIETFETLANVATKAGVEGAGIRIHAPLMRMSKADIAREGQRLGVDFSATVSCYQADGDGQACGHCDACRLRAQGFREAGLADPTRYA

SEQ ID NO: 41725 - protein, 228 aa, Rhodanobacter lindaniclasticus
  misc_feature (1)..(228): tr|A0A4S3K8T9|A0A4S3K8T9_9GAMM 7-cyano-7-deazaguanine s ynthase OS=Rhodanobacter lindaniclasticus OX=75310 GN=q ueC PE=3 SV=1
MSDQHSRKAVVLVSGGMDSAVTIAIAREQGYQVHALSVAYGQRHQSELAASDRVATMLGAVEHKTVAVDLRSIGGSALTAEIDVPLDAGDSADIPVTYVPARNTIMLSIALGWAEVLGSSDIWCGVNAVDYSGYPDCRPAFVAAFEALANVATKAGVEGAGIRVHAPLMHMSKADIAREGQRLGVDFAATVSCYRADDEGRACGHCDACRLRAQGFREAGMADPTRYA

SEQ ID NO: 41726 - protein, 231 aa, Rhodanobacter sp.
  misc_feature (1)..(231): tr|A0A1V3PXV7|A0A1V3PXV7_9GAMM 7-cyano-7-deazaguanine s ynthase OS=Rhodanobacter sp. C03 OX=1945858 GN=queC PE= 3 SV=1
MSQNSLRKAVVLVSGGMDSAVTIALAREQGYQVHALSVAYGQRHNSELAASDRVSKMLGAVEHKTVSIDLRSIGGSALTADIDVPLDDSAHDGDGHIPVTYVPARNTIMLSIALGWAEVLGSSDIWCGVNAVDYSGYPDCRPAFIESFEALANVATKAGVEGAGIRVHAPLMRMSKADIAREGQRLGVDFSATVSCYKADDAGRACGHCDACRLRAQGFREAGLADPTHYV

SEQ ID NO: 41727 - protein, 224 aa, Rhodanobacter sp.
  misc_feature (1)..(224): tr|A0A522NBJ2|A0A522NBJ2_9GAMM 7-cyano-7-deazaguanine s ynthase OS=Rhodanobacter sp. OX=1883446 GN=queC PE=3 SV =1
MRKAVVLVSGGMDSAVTIALAREQGYQVHALSVAYGQRHSSELAASDRVSRMLGAVEHKTVGIDLRSIGGSALTADIDVPVDTRDGGSDIPVTYVPARNTIMLSIALGWAEVLGSSDIWCGVNAVDYSGYPDCRPAFIEAFEILANVATKAGVEGAGIRIHTPLMRMSKADIAREGRRLGVDFSVTVSCYQADAEGRACGHCDACRLRAQGFREAGLPDPTRYA

SEQ ID NO: 41728 - protein, 228 aa, Rhodanobacter spathiphylli
  misc_feature (1)..(228): tr|I4VYN7|I4VYN7_9GAMM 7-cyano-7-deazaguanine synthase OS=Rhodanobacter spathiphylli B39 OX=1163407 GN=queC PE =3 SV=1
MSEHSPRKAVVLVSGGMDSAVVIAMAREQGYQVHALSVSYGQRHHSELAASDRVSSMLGAVEHKTVGIDLRSIGGSALTADIDVPLDAADASAIPVTYVPARNTIMLSIALGWAEVLGSSDIWCGVNAVDYSGYPDCRPAFIDAFEQLANLATKAGVEGAGIRVHAPLMRMSKADIAREGQRLGVDFSATVSCYQADDDGRACGHCDACRLRAQGFREAGLADPTRYA

SEQ ID NO: 41729 - protein, 228 aa, Rhodanobacter thiooxydans
  misc_feature (1)..(228): tr|A0A154QJ95|A0A154QJ95_9GAMM 7-cyano-7-deazaguanine s ynthase OS=Rhodanobacter thiooxydans OX=416169 GN=queC PE=3 SV=1
MSEPLPRKAVVLVSGGMDSAVTIAIAREQGYQVYALSVAYGQRHSSELAASDRVATMLGAVEHKTVGIDLRSIGGSALTADIDVPLDAADSSAIPVTYVPARNTIMLSIALGWAEVLGCSDIWCGVNAVDYSGYPDCRPAFVAAFEKLANVATRAGVEGAGIRIHAPLMRMSKADIAREGQRLGVDFSATVSCYQADQEGRACGHCDACRLRAQGFREAGLSDPTRYV

SEQ ID NO: 41730 - protein, 235 aa, Rhodanobacteraceae bacterium
  misc_feature (1)..(235): tr|A0A522QSF6|A0A522QSF6_9GAMM 7-cyano-7-deazaguanine s ynthase OS=Rhodanobacteraceae bacterium OX=2052182 GN=q ueC PE=3 SV=1
MTTGRSDTARAVVLVSGGMDSAVTLALARERGFTCHALSVDYGQRHASELAASACVAAMLGAVEHKTVSVDLRSIGGSALTADIAVPEHVDSHGEGDIPVTYVPARNTIMLAIALGWAETLGANDLFCGVNAVDYSGYPDCRPAFVEAFERLANLATRAGLEGHALRVHAPLIELSKVEIVREGARLGVDFAATVSCYRADAKGRACGHCDACVLRARGFAEAGVADPTHYVPGA

SEQ ID NO: 41731 - protein, 235 aa, Rhodanobacteraceae bacterium
  misc_feature (1)..(235): tr|A0A522RMB8|A0A522RMB8_9GAMM 7-cyano-7-deazaguanine s ynthase OS=Rhodanobacteraceae bacterium OX=2052182 GN=q ueC PE=3 SV=1
MTTGASGTPRAVVLVSGGMDSAVTLALARERGFACHALSVAYGQRHASELAASDRVTVMLGAVGHKTVAVDLRSIGGSALTADIAVPEHVDAHAENDIPVTYVPARNTIMLAIALGWAEALGANDIFCGVNAVDYSGYPDCRPAFIAAFERLANLATKAGVEGHDLRVHAPLIEMSKADIVREGMRLGVDFAQTVSCYRADAAGRACGHCDACVLRARGFADAGVADPTHYVPGA

SEQ ID NO: 41732 - protein, 207 aa, Rhodobacter sphaeroides
  misc_feature (1)..(207): tr|Q3IW30|Q3IW30_RHOS4 7-cyano-7-deazaguanine synthase OS=Rhodobacter sphaeroides (strain ATCC 17023 / 2.4.1 / NCIB 8253 / DSM 158) OX=272943 GN=exsB PE=3 SV=1
MSFALLMASGGLDSTTVAYWLTERGVQFIPVFFDYGQHCVETEWETLKEVLPASAAHPERNDISDLFRGSKSRLITEADLWNEEVKDEDLYVPYRTLLFYSAAAARAQTLGAFEVYTGFINSNRAKEIDCTAEFMNKLDALTDSVGPVRFLSPFRFWSKSEVAKESIRLGVPIGRTFSCQAASLMPCGACPNCVERLAALRETGLLA

SEQ ID NO: 41733 - protein, 230 aa, Rhodobacteraceae bacterium
  misc_feature (1)..(230): tr|A0A3N9QD31|A0A3N9QD31_9RHOB 7-cyano-7-deazaguanine s ynthase OS=Rhodobacteraceae bacterium CH30 OX=2490538 G N=queC PE=3 SV=1
MSHTPLEPDRALVVLSGGQDSTTCLYWALSRFAHVETVTFDYGQRHRVELECARTIAAMAGVRHTILPIDTFAAMGGNALTDVAIAPEDGVRSDGALPNTFVPGRNLIFLTFAAAHAWQRGIANVVTGVAQTDYSGYPDCRENTLKALELAINLGMDSRITLHAPLMFMSKAQTVHLAEEVGALDALAYSHTCYQGVVPPCGECASCLLRAKGFAEAGVADPLVVRVGGC

SEQ ID NO: 41734 - protein, 232 aa, Rhodobacteraceae bacterium
  misc_feature (1)..(232): tr|B9NVQ7|B9NVQ7_9RHOB 7-cyano-7-deazaguanine synthase OS=Rhodobacteraceae bacterium KLH11 OX=467661 GN=queC P E=3 SV=1
MKTTLVCSGGLDSVSLAHVLANQGDLSRLVSFDYGQRHTKELDFAAACATRLGVPHHVIDLRSVGATLTGSALTDDLDVPDGHYEEETMKVTVVPNRNAIMLTIAYGIAAANKDDAVATAVHGGDHFIYPDCRPDFTDAFDAMQRAALDGYAEVALHVPFVHRAKADIVTEGARVNTPFDQTWSCYKGGDLHCGRCGTCVERREAFDLAGVPDPTLYADPEFWRQAVERKQA

SEQ ID NO: 41735 - protein, 233 aa, Rhodobacterales bacterium
  misc_feature (1)..(233): tr|B6B6Q2|B6B6Q2_9RHOB 7-cyano-7-deazaguanine synthase OS=Rhodobacterales bacterium Y4I OX=439496 GN=queC PE=3 SV=1
MKTIVICSGGLDSVSLAHMVAEEHQLTRLVSFDYGQRHRKELDYAAAAAKRLGVPHDIIDMRGIGAALSGSALTDDIDVPDGHYAEETMKVTVVPNRNAIMLTIAYGIAAANGDDAVATAVHGGDHFIYPDCRPAFTEAFDAMQRAALDGYADVRLYTPFVHRTKGDIVTAGAKHNTPFAETWSCYKGGEKHCGRCGTCVERREAFHLAGVEDPTDYADPDFWKAAIAAKDCA

SEQ ID NO: 41736 - protein, 236 aa, Rhodobacterales bacterium
  misc_feature (1)..(236): tr|A0A2M7GNV1|A0A2M7GNV1_9RHOB 7-cyano-7-deazaguanine s ynthase OS=Rhodobacterales bacterium CG15_BIG_FIL_POST_ REV_8_21_14_020_59_13 OX=1974086 GN=queC PE=3 SV=1
MKSDRTSSTLVLLSGGQDSATALAWALENHARVETIGFAYGQRHEVELEARLRVRKALADLEPAWAEKLGPDQLVDLSGYGALAQSALTAEMEIEWQAGGLPSTFVPGRNLVFLAIASALAYRRGLDCLVGGMCETDYSGYPDCRRETIDAAEQMISLGLDRAMKIETPLMYLTKGEIWALAHELGGGRLVDIIVEDTHTCYLGDRSHRHDWGYGCGICPACELRARGWQDWQDRS

SEQ ID NO: 41737 - protein, 224 aa, Rhodobiaceae bacterium
  misc_feature (1)..(224): tr|A0A2D7FQP0|A0A2D7FQP0_9RHIZ 7-cyano-7-deazaguanine s ynthase OS=Rhodobiaceae bacterium OX=2026785 GN=queC PE =3 SV=1
MLFSGGQDSTACLAYALDKFDHVETLGFDYGQTHKIELACRAALRAEISKLNGWGAKLGDDHTLSLPALAEIGGTALIGDGEIKMMENNLPSTFVPGRNLLFLTYGAALAYRRGLGVLVGGMCETDYSGYPDCRRDTLDALETALNKGMESNISIDTPLMHIDKAATWELAQQLGGDALVALTIEHSHTCYRGDRDTRHAWGYGCNDCPACQLRAAGFEKWNSQ

SEQ ID NO: 41738 - protein, 239 aa, Rhodobiaceae bacterium
  misc_feature (1)..(239): tr|A0A2E1MUJ6|A0A2E1MUJ6_9RHIZ 7-cyano-7-deazaguanine s ynthase OS=Rhodobiaceae bacterium OX=2026785 GN=queC PE =3 SV=1
  misc_feature (46)..(46): Xaa can be any naturally occurring amino acid
  misc_feature (93)..(93): Xaa can be any naturally occurring amino acid
  misc_feature (124)..(124): Xaa can be any naturally occurring amino acid
  misc_feature (128)..(128): Xaa can be any naturally occurring amino acid
  misc_feature (142)..(142): Xaa can be any naturally occurring amino acid
  misc_feature (171)..(171): Xaa can be any naturally occurring amino acid
MLDKNKSIVLFSGGQDSSACLLWALSKFEEVQTIGFDYGQRHNIEXECRINLLKRIQLHSSNFLGKLSNDIVINLEEIKNISESSLLNSENIXMLENGLPNTFVPGRNLIFLNYASIIAYKNKXKNIXGGMCETDFSGYPDXRNETINSMEKSLNLGMDVEFKIQTPLMFXSKAEIWELIYKKGNKELIDIIIEESHTCYKGDRSKRYDWGYGCNSCPACELRSKGWNEFIINYPELKN

SEQ ID NO: 41739 - protein, 230 aa, Rhodoblastus acidophilus
  misc_feature (1)..(230): tr|A0A212S1X1|A0A212S1X1_RHOAC 7-cyano-7-deazaguanine s ynthase OS=Rhodoblastus acidophilus OX=1074 GN=queC PE= 3 SV=1
MALVLFSGGQDSTTCLAWALERFDRVETLAFDYGQRHRIELAQRHEVRRAIREIKPHWAERLGQDHILDLRALGAISDTALTSDKEIELTEKNLPNTFVPGRNLIFLTFAAALAYRRGLSRIVGGMCETDFSGYPDCRDDSVKAMQVALNVGMESRFVLETPLMWIDKAQTWALAQALGGEALVDAIIDHSHTCYLGERGEKHPWGYGCGQCPACVLRAQGYEKWKSSAF

SEQ ID NO: 41740 - protein, 241 aa, Rhodoblastus acidophilus
  misc_feature (1)..(241): tr|A0A212SAW0|A0A212SAW0_RHOAC 7-cyano-7-deazaguanine s ynthase OS=Rhodoblastus acidophilus OX=1074 GN=queC PE= 3 SV=1
MKQTGDSKGALVLFSGGQDSATCLAWALDRFEHVETIGFSYGQRHSVELQVRPRVLDLLGDAFPTWRDRIGEDHLVDLSVLGQISETALTRGVEIEMHSNGLPNTFVPGRNLLFLSFSAAVAFRRGIKYLVTGVCETDYSGYPDCRDDTVKAMQIALNLGMEKRYVIHTPLMRIDKAGTWALAKRLGGDALVKIVRDETHTCYNGDREHRHAWGFGCGTCPACELRAQGWNSFSASSPFQA

SEQ ID NO: 41741 - protein, 230 aa, Rhodoblastus sphagnicola
  misc_feature (1)..(230): tr|A0A2S6N919|A0A2S6N919_9RHIZ 7-cyano-7-deazaguanine s ynthase OS=Rhodoblastus sphagnicola OX=333368 GN=queC P E=3 SV=1
MALVLFSGGQDSTTCLAWALERFERVETIAFDYGQRHRIELEQRHVVRDALIAIKPLWAERLGPDHILDLRALGAISDTALTSDKEIELTEKNLPNTFVPGRNLIFLAFAAALAYRRGLTHIVAGMCETDFSGYPDCRDDAVKAMQVALNIGMESRFVLDTPLMWIDKARTWALAQTLGGDALVRTLIDDSHTCYLGERGEKHPWGHGCGHCPACVLRAQGYEKWKSGAF

SEQ ID NO: 41742 - protein, 223 aa, Rhodococcus qingshengii
  misc_feature (1)..(223): tr|A0A4R5ZVV1|A0A4R5ZVV1_9NOCA 7-cyano-7-deazaguanine s ynthase OS=Rhodococcus qingshengii OX=334542 GN=queC PE =3 SV=1
MLKDEKAIVVFSGGQDSTTCLFWALQQFKEVEAVTFDYNQRHSLEIECAKNIANELGVRHHLLDMSLLNQLAPNALTRSDIEVKDGEDGELPSTFVPGRNLLFLTFAGVLARQVGAKHLVTGVCETDFSGYPDCRDIFIKSLNVTLNLSMDDNFVIHTPLMWLNKAETWELADELNAFEYVRENTLTCYNGVISDGCGECPACVLRKRGLDDFLIGRTKNVRI

SEQ ID NO: 41743 - protein, 234 aa, Rhodococcus sp.
  misc_feature (1)..(234): tr|A0A2S7TVX9|A0A2S7TVX9_9NOCA 7-cyano-7-deazaguanine s ynthase OS=Rhodococcus sp. SAORIC-690 OX=1923970 GN=que C PE=3 SV=1
MNKKALVLFSGGQDSTVCLAWALSKFDHVETIGFDYGQRHRIELECRLTVLDRIREQFPEWAHKLGEDRVIDLSWLGQISDCALTEEREIELNETGLPNTFVPGRNLVFFLISSAVAYRRGLSTLVGGMCQTDFSGYPDCREDTLKALQVATNLGMASSFRFETPLMWIDKTETFQLGEQLGGKKLLEIIVRDTHTCYTGDRSHEHEWGFGCGECPACDLRKRGWKNYISQQNQ

SEQ ID NO: 41744 - protein, 229 aa, Rhodococcus wratislaviensis
  misc_feature (1)..(229): tr|X0PXX8|X0PXX8_9NOCA 7-cyano-7-deazaguanine synthase OS=Rhodococcus wratislaviensis NBRC 100605 OX=1219028 G N=queC PE=3 SV=1
MGTPAVVLLSGGLDSTTVLAMAREQGFTPYALSFRYGQRHSVELEAASRVAETIGVARHVIADIDLRTFGGSALTADIDVPKHADVAEVTEDIPSTYVPARNTIFLSFALAFAETVAAQDIFIGVNALDYSGYPDCRPEFIQAFEDMANLATRAGVEGARLRIHTPLISMSKAEIVTTGLRLGVDYGITSSCYDPDGQGRPCGHCDSCLLRLKGFSEAGHSDPLTYQAV

SEQ ID NO: 41745 - protein, 365 aa, Rhodocyclaceae bacterium
  misc_feature (1)..(365): tr|A0A3S0GH72|A0A3S0GH72_9RHOO N-acetyl sugar amidotran sferase OS=Rhodocyclaceae bacterium OX=1898103 GN=EKK46 _05265 PE=4 SV=1
MNQTCTTCVMDTSAPDITFDASGRCHFCRDFATKLVAVPATGQNAESFIAAVKAAGRSKPYDCIVGLSGGIDSAYVLYTAVRQGLRPLAVHLDNGWNSELATHNIANLVRRLGVDLHTHVIDWEENRDMQLAFFKANVVDIELLMDNAMLALNYQQAARYGLRHILAGTNRATEGMRMPEGWNHLKFDATNIRAIQRRFGTMPIKTHPLISVKGFVFNEFVRRIKWTPFLDYFDYRKDEALKLLAAEVDYKPYPYKHYESVFTRFYQGYILPRKFGIDKRRLHLSTLVISGQMTRAAALVQLEQSPYPDPAQLRDDMAFVLKKLGFSEASFYAYLDAPRVEHATYGSEKWLWDGLLRVYRAVRGA

SEQ ID NO: 41746 - protein, 225 aa, Rhodocyclaceae bacterium
  misc_feature (1)..(225): tr|A0A524B8P7|A0A524B8P7_9RHOO 7-cyano-7-deazaguanine s ynthase OS=Rhodocyclaceae bacterium OX=1898103 GN=queC PE=3 SV=1
MMKPAVVLLSGGLDSATCLAIARSQGFDCYCLSFDYGQRHNAELKAAERVVKALGAKEHRVLNLGLAQFGGSALTDTSIAVPVDGVHPGIPVTYVPARNTIMLSLALAWAEVLGSDDIFVGVNAVDYSGYPDCRPEYIAAFEKMANLATKSGVEGHKLHIHAPLIALSKAEIIRTGAALGVDYGLTVSCYQANELGRACGVCDSCRLRAEGFAAAGVADPTSYRH

SEQ ID NO: 41747 - protein, 229 aa, Rhodocyclales bacterium
  misc_feature (1)..(229): tr|A0A363SL44|A0A363SL44_9RHOO 7-cyano-7-deazaguanine s ynthase OS=Rhodocyclales bacterium OX=2072421 GN=queC P E=3 SV=1
MTAKEKRAVVLLSGGLDSATTLAIARSAGYACHALSVAYGQRHAAELAAAANIAAALGAREHRIVDVDLGQFGGSALTDRNIDVPMHGVQPGIPATYVPARNTVMLSLALAWAEVLGAHDIFVGVNAVDYSGYPDCRPEYIAAFEAMANLATKAAVEGARLSIHAPLIALSKAEIIRRGSLLGVDYGLTVSCYQADASGAACGLCDSCRLRRAGFEAAGLPDPTRYLTA

SEQ ID NO: 41748 - protein, 230 aa, Rhodocyclales bacterium
  misc_feature (1)..(230): tr|A0A1G3H3W7|A0A1G3H3W7_9RHOO 7-cyano-7-deazaguanine s ynthase OS=Rhodocyclales bacterium GWA2_65_20 OX=180201 7 GN=queC PE=3 SV=1
MKPAVVLLSGGLDSATALAIAAADGYACHCLSVDYGQRHVAELAAAARVAAAQGALSHRVVKIDMGQFGGSALTDTAIAVPTGGVQPGIPVTYVPARNTIMLSLALAWAEVLGAQDIFVGVNAVDYSGYPDCRPEYIRAFEAMANLATKAAVEGHPLRLHAPLIELTKADIVRRGTALGVDYGLTVSCYQADPDGRACGACDSCRLRRAGFDAAGIADPTRYASATSGQA

SEQ ID NO: 41749 - protein, 243 aa, Rhodoferax ferrireducens
  misc_feature (1)..(243): sp|Q220R7|QUEC_RHOFT 7-cyano-7-deazaguanine synthase OS =Rhodoferax ferrireducens (strain ATCC BAA-621 / DSM 15 236 / T118) OX=338969 GN=queC PE=3 SV=1
MHTTALVLFSGGQDSTTCLALALSKYQRVETIAFDYRQRHLVELDARLIVLNEIRARFPQWASKLGEDHLLDLAVLGEVSDTSLTRDTAFKMEQSGLPNTFVPGRNLLFLTLAAAVAYRRDLQVMVTGVCETDFSGYPDCRDDTIKAMQLALSLGMDKRFLIETPLMWIDKAATWALAYELGEKSGTPGGGQALVDLIIEHTHTCYLGDRQHRHAWGYGCGSCPACELRARGYERYCAARTAG

SEQ ID NO: 41750 - protein, 244 aa, Rhodoferax koreense
  misc_feature (1)..(244): tr|A0A1P8JYE0|A0A1P8JYE0_9BURK 7-cyano-7-deazaguanine s ynthase OS=Rhodoferax koreense OX=1842727 GN=queC PE=3 SV=1
MHTRALVLFSGGQDSTTCLALALSKYQFVETVAFDYGQRHVIELEARLRVLEQIRLQFPQWAGRLGEDHLLDLAVLGQVSETSLTRDMVFKMEESGLPNTFVPGRNLLFLTLAAALAYRRDLHVIVTGVCETDFSGYPDCRDDTMKAMQLALSLGMDKRFLIETPLMWIDKAQTWQLAHALGGAALVELIVEHTHTCYQGDRTHRHAWGYGCGECPACELRARGHANFVANDAVNSDLPTVDVK

SEQ ID NO: 41751 - protein, 245 aa, Rhodoferax saidenbachensis
  misc_feature (1)..(245): tr|A0A1P8K721|A0A1P8K721_9BURK 7-cyano-7-deazaguanine s ynthase OS=Rhodoferax saidenbachensis OX=1484693 GN=que C PE=3 SV=1
MHTTALVLFSGGQDSTTCLAHALSRYERVETIAFDYRQRHSVELDARLKVLAEIKRQFPQWGAKLGEDHLLDLAVLGEVSETSLTRDTAFELEASGLPNTFVPGRNLLFMTLAAAVAYRRGLQVIVTGVCETDYSGYPDCRDDTMKAMQLALSLGLDKRFLIETPLMWIDKAATWKLAQDLGDASGVAGGGQALVDLIVEHTHTCYLGDRSHRQAWGYGCGTCPACELRARGHAAYVAGCSSVSV

SEQ ID NO: 41752 - protein, 243 aa, Rhodoferax sp.
  misc_feature (1)..(243): tr|A0A5C7SVK3|A0A5C7SVK3_9BURK 7-cyano-7-deazaguanine s ynthase OS=Rhodoferax sp. OX=50421 GN=queC PE=3 SV=1
MHTTALVLFSGGQDSATCLAHALSRYERVETLGFDYGQRHHVELEIRLQALREFRSQFPGWGQKLGEDHVLDLAVLGKVSDTSLTRDIAYKMESSGLPNTFVPGRNLLFLTLAAALAYRRGLQVLVTGVCETDFSGYPDCRDDTMKALQIALNLGMEQRFLIETPLMWIDKAQTWQLAHDLGEAAQPGGGQALVELIQEHTHTCYQGDRVHRHPWGYGCGSCPACELRARGYAGFVDTVNKAP

SEQ ID NO: 41753 - protein, 239 aa, Rhodoferax sp.
  misc_feature (1)..(239): tr|A0A515ESU8|A0A515ESU8_9BURK 7-cyano-7-deazaguanine s ynthase OS=Rhodoferax sp. Gr-4 OX=2527691 GN=queC PE=3 SV=1
MHTTALVLFSGGQDSTTCLAHALARYDRVETIAFDYRQRHSVELEARLQVLQEIRKQFPLWAPKLGEDHILDLAVLGAVSETSLTRDTAFKMEASGLPNTFVPGRNLLFLTLSAAVAYRRDLQVIVTGVCEADYSGYPDCRDDTMKAMQLALSLGMDKRYLIETPLMWIDKADTWRLAHQLGAASGVPDGGQKLVDLIVEHTHTCYLGDREHRHAWGYGCGTCPACELRARGYERFSTN

SEQ ID NO: 41754 - protein, 242 aa, Rhodomicrobium udaipurense
  misc_feature (1)..(242): tr|A0A037UVP2|A0A037UVP2_9RHIZ 7-cyano-7-deazaguanine s ynthase OS=Rhodomicrobium udaipurense JA643 OX=858455 G N=queC PE=3 SV=1
MTGTPESATKSLVLLSGGQDSAVCLAWALTNYAQVETLGFSYGQRHSVELECRPKLREAMAALSPEWAARLGPDHVLDLSILGAVSDTALTSDAEIAFGANGLPNTFVPGRNLLFFTLAAALGYRRGIRDLVGGMCQTDYSGYPDCRDETLQTLASAINLGTDEQFRIVTPLMWRTKAETWAMTHALGGNPLVDIVAEHSHTCYKGDRDHRHEWGYGCGTCPACDLRAKGYYAWRDMVASQQ

SEQ ID NO: 41755 - protein, 242 aa, Rhodomicrobium vannielii
  misc_feature (1)..(242): tr|E3I3N4|E3I3N4_RHOVT 7-cyano-7-deazaguanine synthase OS=Rhodomicrobium vannielii (strain ATCC 17100 / ATH 3. 1.1 / DSM 162 / LMG 4299) OX=648757 GN=queC PE=3 SV=1
MTGTPESATKSLVLLSGGQDSAVCLAWALTNYAQVETLGFSYGQRHSVELECRPKLREALAALSPEWAARLGPDHVLDLSILGAVSDTALTSDAEIAFGANGLPNTFVPGRNLLFFTLAAALGYRRGIRDLVGGMCQTDYSGYPDCRDETLQTLASAINLGTDEQFRIVTPLMWRTKAETWAMTHALGGNPLVDIVAEHSHTCYKGVRDHRHEWGYGCGACPACDLRAKGYKAWRDMVASQQ

SEQ ID NO: 41756 - protein, 245 aa, Rhodopila globiformis
  misc_feature (1)..(245): tr|A0A2S6NLC0|A0A2S6NLC0_RHOGL 7-cyano-7-deazaguanine s ynthase OS=Rhodopila globiformis OX=1071 GN=queC PE=3 S V=1
MTSQHTETEDAALVLFSGGQDSATCLAWALARYPRVETVGFRYGQRHAVELDCRAPIREALACDRLGEDHVVDLAATIGGLGQTAMTADIAIAIGQGGLPNTFVPGRNLLFLTCAAAIAYRRGLRRIVAGMCETDYSGYPDCRDDTIKAMQLALNLGMERRFVLETPLMWRDKAATWALALGLGGQGLVDVILERTHTCYLGNRCDRHAWGYGCGTCPACQLRARGWERWVAASRPPADPLRDIS

SEQ ID NO: 41757 - protein, 245 aa, Rhodopirellula bahusiensis
  misc_feature (1)..(245): tr|A0A2G1W8V8|A0A2G1W8V8_9PLAN 7-cyano-7-deazaguanine s ynthase OS=Rhodopirellula bahusiensis OX=2014065 GN=que C PE=3 SV=1
MNSSSQRQAEFAQENAGRAVVLLSGGLDSATCVAIARDKGFEVHAISFRYGQRHDGELDRAAKQASLMSVASHRVIDIDLAQLGGSALVDSSIAVPKSDHVDKIAGDIPVTYVPARNTIFLSYALAVAETLGSRDIFIGVNALDYSGYPDCRPEFIDAFQTMARLATKAGVEDEHSLTIHTPLLHWTKAEIIQRGIELGVDYSQTLSCYDPQGSGDEMQPCGQCDACLLRAKGFAENEIADPAIG

SEQ ID NO: 41758 - protein, 250 aa, Rhodopirellula baltica
  misc_feature (1)..(250): sp|Q7UFU6|QUEC_RHOBA 7-cyano-7-deazaguanine synthase OS =Rhodopirellula baltica (strain DSM 10527 / NCIMB 13988 / SH1) OX=243090 GN=queC PE=3 SV=1
MERRLVNSTSQSKTESAQQDAGKAVVLLSGGLDSATCVAIARDQGFEVHAISFRYGQRHDGELDRAAKQASLMGVVSHRVIDIDLAQLGGSALVDSSIAVPKSDHVDKIAGDIPVTYVPARNTIFLSYALAVAETLGSRDIFIGVNALDYSGYPDCRPEFIDAFQTMARLATKAGVEDEHSLTIHTPLLHWTKAEIIQRGIELGVDYSQTLSCYDPQGSSDEMRPCGQCDACLLRAKGFAENEIADPAIG

SEQ ID NO: 41759 - protein, 245 aa, Rhodopirellula baltica
  misc_feature (1)..(245): tr|K5CYB3|K5CYB3_RHOBT 7-cyano-7-deazaguanine synthase OS=Rhodopirellula baltica SH28 OX=993517 GN=queC PE=3 S V=1
MNSTSQSKTESAQQDAGKAVVLLSGGLDSATCVAIARDQGFEVHAISFRYGQRHDGELDRAAKQASLMGVVTHRVIDIDLAQLGGSALVDSSIAVPKSDHVDKIAGDIPVTYVPARNTIFLSYALAVAETLGSRDIFIGVNALDYSGYPDCRPEFIDSFQTMARLATKAGVEDEHSLTIHTPLLHWTKAEIIQRGIELGVDYSQTLSCYDPQGSNAEMRPCGQCDACLLRAKGFAENEIADPAIG

SEQ ID NO: 41760 - protein, 245 aa, Rhodopirellula europaea
  misc_feature (1)..(245): tr|M2B049|M2B049_9PLAN 7-cyano-7-deazaguanine synthase OS=Rhodopirellula europaea 6C OX=1263867 GN=queC PE=3 S V=1
MNSTSQPQSNSTSQDAGKAVVLLSGGLDSATCVAIARDKGFEVHAISFRYGQRHDGELDRAAKQASLMGVVSHRVIDIDLAQLGGSALVDSSIAVPKSDHVDKIAGDIPVTYVPARNTIFLSYALAVAETLGSRDIFIGVNALDYSGYPDCRPEFIDAFQTMARLATKAGVEDAHSLTIHTPLLHWTKAEIIQRGIELGVDYSQTLSCYDPQGSSDEMRPCGQCDACLLRAKGFAENEIADPAIG

SEQ ID NO: 41761 - protein, 245 aa, Rhodopirellula europaea
  misc_feature (1)..(245): tr|M5S814|M5S814_9PLAN 7-cyano-7-deazaguanine synthase OS=Rhodopirellula europaea SH398 OX=1263868 GN=queC PE= 3 SV=1
MNSTSQPQSNSTSQDAGKAVVLLSGGLDSATCVAIARDKGFEVHAISFRYGQRHDGELNRAAKQASLMNVASHRVIDIDLAQLGGSALVDSSIAVPKSDHVDKIAGNIPVTYVPARNTIFLSYALAVAETLGSRDIFIGVNALDYSGYPDCRPEFIDAFQTMARLATKAGVEDEHSLTIHTPLLHWTKAEIILRGIELGVDYSQTLSCYDPQGSSNEMRPCGQCDACLLRAKGFAENEIADPAIG

SEQ ID NO: 41762 - protein, 245 aa, Rhodopirellula islandica
  misc_feature (1)..(245): tr|A0A0J1B524|A0A0J1B524_RHOIS 7-cyano-7-deazaguanine s ynthase OS=Rhodopirellula islandica OX=595434 GN=queC P E=3 SV=1
MNSISQPKDESAQANAGRAVVLLSGGLDSATCVAIARDQGFEVHAISFRYGQRHDGELDRAAKQASLMSVASHRVIDIDLAQLGGSALVDSSIAVPKSDHVDKIAGDIPVTYVPARNTIFLSYALAVAETLGSRDIFIGVNALDYSGYPDCRPEFIDAFQTMARLATKAGVEDEHSLTIHTPLLHWTKAEIIQRGIELGVDYSQTLSCYDPQGSGDEARPCGQCDACLLRAKGFSENEIADPAIG

SEQ ID NO: 41763 - protein, 231 aa, Rhodopirellula maiorica
  misc_feature (1)..(231): tr|M5S2D4|M5S2D4_9PLAN 7-cyano-7-deazaguanine synthase OS=Rhodopirellula maiorica SM1 OX=1265738 GN=queC PE=3 SV=1
MTIHPKRSAVVLLSGGLDSATCLAIANAEGFAAHAISFRYGQRHEYELERAEQLARSLGAASHRIVDINLAQFGGSALTDASIGVPKHEAVEEVGESIPVTYVPARNTVFLSLALAFAETIQSTDIYIGVNALDYSGYPDCRPAFITAFENMANLATKAGVEGSSPMRIHTPLLDLTKAQIIAKGISLGVDYSQTLSCYDPGEGGIPCGHCDACLLRNKGFAENEMSDPSL

SEQ ID NO: 41764 - protein, 236 aa, Rhodopirellula sallentina
  misc_feature (1)..(236): tr|M5U9S2|M5U9S2_9PLAN 7-cyano-7-deazaguanine synthase OS=Rhodopirellula sallentina SM41 OX=1263870 GN=queC PE =3 SV=1
MEGLNAVVLLSGGLDSATCLAIAKDHGFAVHAVSFRYGQRHNGELERAKWLAESMSAASHRVIDIDLAQLGGSALVDPNIAVPKADRVEDIGDEIPVTYVPARNTIFLSYALAVAETNNAADIFIGVNALDYSGYPDCRPEFIAAFEAMARLATKAGVGEGPELKIHTPLIDLTKGQIIAEGLRLGVDYSHTLSCYDPVGADDSQSDVHPCGHCDACLLRAKGFAENGIADPAIVG

SEQ ID NO: 41765 - protein, 229 aa, Rhodopirellula sp.
  misc_feature (1)..(229): tr|M5SVY8|M5SVY8_9PLAN 7-cyano-7-deazaguanine synthase OS=Rhodopirellula sp. SWK7 OX=595460 GN=queC PE=3 SV=1
MLLSGGLDSATCLAIARERGFAVHAISFRYGQRHDGELERAKWLADSMGALSHRIIDIDLAQLGGSALIDPNIAVPKADRVEDIGDEIPVTYVPARNTIFLSYALAVAETSGATDIFIGVNSLDYSGYPDCRPEFIAAFQTMARLATKAGVGSGPELEIHTPLIDLTKGQIIAEGLRLGVDYSKTLSCYDPVESGDGEANVQPCGHCDACLLRAKGFAENGMADPAIHG

SEQ ID NO: 41766 - protein, 230 aa, Rhodopirellula sp.
  misc_feature (1)..(230): tr|A0A255R673|A0A255R673_9PLAN 7-cyano-7-deazaguanine s ynthase OS=Rhodopirellula sp. MGV OX=2023130 GN=queC PE =3 SV=1
MSEQRPAVVLLSGGLDSATCLAIAKQDGFDVHAISFRYGQRHEYELQRAQKLAEQFSIASHHIVDINLSQFGGSALTDASIVVPKSDSVDQIGSEIPVTYVPARNTVFLSLALAMAETIHALDIFIGVNALDYSGYPDCRPEYIDAFSKMANLATKAGVEGQALTIHTPLIDLTKAQIIAKGLALGVDYSMTLSCYDPGEGGKPCGNCDACLLRLKGFSENGLTDPSLIG

SEQ ID NO: 41767 - protein, 425 aa, Rhodoplanes elegans
  misc_feature (1)..(425): tr|A0A327KTZ2|A0A327KTZ2_9RHIZ Uncharacterized protein OS=Rhodoplanes elegans OX=29408 GN=CH338_01935 PE=4 SV= 1
MRLVCGPDMGAFSQADDALRVVLYGQAGSAERGSAGDAVKSEIQRRHLVPAARAWDLLSIALSVVTADFAGLRDHSPDGWTREFEIDIAVADPAFWTSQATALSEALGFLTTDRWMLRFQESGLLPAPPRNPVYPAEDCVALLSGGLDSLIGAIDLVAAGRKPFVVSQTVRGDADKQVDFASRIGGGLNHLQLNHNAHSPGIQESSQRARSLVFIAFGVAAATSLQRHHQGHSVPLYVCENGFIAINPPLTGGRLGSLSTRTAHPEYLTRLQHILDAADLRIRIENPYAAKTKGEMLRGCADQDLLKAEAVRSTSCGRFQRFNYHQCGRCVPCQVRRAAFMVWGGVPDTTGYVYEALGKNDDDHAGFDDVRSVAMALAAAAADGLDAWLGNSLGSPMISDRAALRAMVERGLAELACLHQACAVT

SEQ ID NO: 41768 - protein, 237 aa, Rhodoplanes elegans
  misc_feature (1)..(237): tr|A0A327KRW1|A0A327KRW1_9RHIZ 7-cyano-7-deazaguanine s ynthase OS=Rhodoplanes elegans OX=29408 GN=queC PE=3 SV =1
MSLQDETALVLFSGGQDSTVCLAWALSRFSRVETVGFAYGQRHAVELQVRPRIRMQMGALDPGWGARLGSDHLIPLDALGAVSETALTRDVAIEVAEDGLPTTFVPGRNLVFLTFAGALAYRRGARHLVAGMCETDYSGYPDCRDDTVKAMQLALNLGMQRRFVVHTPLMWIDKAQTFALAEELGGAPFVDLLLEETHTCYVGDRSVRHRWGYGCGTCPACRLRAEGFSQWMSARQC

SEQ ID NO: 41769 - protein, 237 aa, Rhodoplanes piscinae
  misc_feature (1)..(237): tr|A0A327K7M2|A0A327K7M2_9RHIZ 7-cyano-7-deazaguanine s ynthase OS=Rhodoplanes piscinae OX=444923 GN=queC PE=3 SV=1
MTETTDGAALVLFSGGQDSTVCLAWALARFPRVETVGFSYGQRHAVELDVRPVVRAKMAALDPAWAARLGDDHMVPLDGLGAIADTALTRETAIEIAADGLPTTFVPGRNLVFLAFAGALAYRRGARHLVAGMCETDYSGYPDCRDDTIKAMQVALNLGMARRFVLHTPLMWIDKAATFALAAEIGGDPLVELLLEDTHTCYLGDRSQRHPWGYGCGTCPACRLRADGYSRWMSASR

SEQ ID NO: 41770 - protein, 237 aa, Rhodoplanes piscinae
  misc_feature (1)..(237): tr|A0A3S4FGK1|A0A3S4FGK1_9RHIZ 7-cyano-7-deazaguanine s ynthase OS=Rhodoplanes piscinae OX=444923 GN=queC PE=3 SV=1
MTETTDGAALVLFSGGQDSTVCLAWALARFPRVETVGFSYGQRHAVELDVRPVVRAKMAALDPAWATRLGDDHMVPLDGLGAIADTALTRETAIEIAADGLPTTFVPGRNLVFLAFAGALASRRGARHLVAGMCETDYSGYPDCRDDTIKAMQVALNLGMARRFVLHTPLMWIDKAATFALAAEIGGDPLVELLLEDTHTCYLGDRSQRHPWGYGCGTCPACRLRADGYSRWMSASR

SEQ ID NO: 41771 - protein, 235 aa, Rhodoplanes roseus
  misc_feature (1)..(235): tr|A0A327KHR8|A0A327KHR8_9RHIZ 7-cyano-7-deazaguanine s ynthase OS=Rhodoplanes roseus OX=29409 GN=queC PE=3 SV= 1
MTVADETALVLFSGGQDSTVCLAWALSRYSRVETIGFAYGQRHAVELSVRPAIRAKMAALDASWAERLGDDHVIPLEALGAVSETALTRDVAIEVAEDGLPTTFVPGRNLVFLTFAGALAYRRGARHLVAGMCETDYSGYPDCRDDTIKAMQLALNLGMQRRFVLHTPLMWIDKAQTFGLADELGGAPFVDLLLEETHTCYVGNRSDRHPWGYGCGTCPACRLRAEGFSKWMSNR

SEQ ID NO: 41772 - protein, 236 aa, Rhodoplanes sp.
  misc_feature (1)..(236): tr|A0A127EZ35|A0A127EZ35_9RHIZ 7-cyano-7-deazaguanine s ynthase OS=Rhodoplanes sp. Z2-YC6860 OX=674703 GN=queC PE=3 SV=1
MDMSPTTALVLFSGGQDSTVCLAWALERFARVETVGFDYGQRHAVELAVRPRIRERLAALNSDWAARLGDDHVVKLDALAAISDTALTRDMQIEMADSGLPNTFVPGRNIIFLTFAAALGYRRGANDLVAGMCETDYSGYPDCRNETMKAMQTVLRLGTERPFVVHTPLMWVDKAATFAMAKTIGGRPLLDLVLEETHSCYLGDRNHRHDWGFGCGTCPACRLRADGYARFIAETT

SEQ ID NO: 41773 - protein, 250 aa, Rhodopseudomonas faecalis
  misc_feature (1)..(250): tr|A0A318TW29|A0A318TW29_9BRAD 7-cyano-7-deazaguanine s ynthase OS=Rhodopseudomonas faecalis OX=99655 GN=queC P E=3 SV=1
MNNREHNETAGSGAEKALVLFSGGQDSATCLAWALQRFTHVETLGFDYGQRHLVELESRQHLIDGIKALQPGWAAKLGEARTLSVPTLASISDTALTRDVAITMGADGLPNTFVPGRNLIFLTFAAALAYRRGIGAIVGGMCETDYSGYPDCRDATIKALQTAINLGMDKNFALHTPLMWRDKAETWALAQELGGDGLVDLIREHSHTCYLGERGARHDWGYGCGECPACRLRARGWQEFAAKQQSSGGH

SEQ ID NO: 41774 - protein, 210 aa, Rhodopseudomonas palustris
  misc_feature (1)..(210): sp|Q2IUE0|QUEC2_RHOP2 7-cyano-7-deazaguanine synthase 2 OS=Rhodopseudomonas palustris (strain HaA2) OX=316058 GN=queC2 PE=3 SV=2
MARKKVLVLHSGGMDSTTCLLQAKAEGHDVASLGIDYGQRLLVEMMFAEGQCEKYSIPRHVINVNWQKAERQIPLNRSVEEMAHSVSPAFLPGRNIVFLGLGHAHAAGIGADELQIGLNCVDFSGYPDCTTQFYDSYCTMLNIGNPGGPKLVAPLLKMSKPEIARLASTLGLQRNDTWSCYRPQIREGSIVACGECDACKLHEFAWQELK

SEQ ID NO: 41775 - protein, 238 aa, Rhodopseudomonas palustris
  misc_feature (1)..(238): sp|Q2IWJ9|QUEC1_RHOP2 7-cyano-7-deazaguanine synthase 1 OS=Rhodopseudomonas palustris (strain HaA2) OX=316058 GN=queC1 PE=3 SV=1
MTEPVSDQTALVLFSGGQDSATCLAWALSRFARVEMIGFDYGQRHAVELDCRAKLLDGFRAISSEWASKLGDSHTLAIPTLSAISDTALTRDVEIAMGADGLPNTFVPGRNLIFLTFAAALAYRRGIADIVGGMCETDYSGYPDCRDDTIKALQGAISLGMARDFELHTPLMWRDKAATWQLAHDLGGAALVDLIREHSHTCYLGERGERHDWGYGCGECPACALRARGWREYRTRTG

SEQ ID NO: 41776 - protein, 237 aa, Rhodopseudomonas pentothenatexigens
  misc_feature (1)..(237): tr|A0A336JM06|A0A336JM06_9BRAD 7-cyano-7-deazaguanine s ynthase OS=Rhodopseudomonas pentothenatexigens OX=99969 9 GN=queC PE=3 SV=1
MTEHASDKTALVLFSGGQDSATCLAWALSRFSRVETIGFDYGQRHLIELECRARLLDGIGAINADWAAKLGDGHTLTIPTLAEISDTALTRDVAIAMGADGLPNTFVPGRNLIFLTFAAALAYRRGIADIVGGMCETDYSGYPDCRNDTIQALQTALTLGMARDITLHTPLMWRDKAATWKLAKDLGGDALVDLIREDSHTCYLGERGARHDWGYGCGECPACRLRARGWSEYAAGV

SEQ ID NO: 41777 - protein, 238 aa, Rhodopseudomonas pseudopalustris
  misc_feature (1)..(238): tr|A0A1H8T4L9|A0A1H8T4L9_9BRAD 7-cyano-7-deazaguanine s ynthase OS=Rhodopseudomonas pseudopalustris OX=1513892 GN=queC PE=3 SV=1
MTEASSDHTALVLFSGGQDSATCLAWALSRFARVEMIGFDYGQRHAVELDCRAKLLDGFRAISPEWAAKLGDSHTLAIPTLSAISDTALTRDVEIAMGADGLPNTFVPGRNLIFLTFAAALAYRRGIADIVGGMCETDYSGYPDCRDDTIRALQSAISLGMARDVKLHTPLMWRDKAATWQLAQDLGGSALVDLIVEHSHTCYLGERGARHDWGYGCGECPACALRAKGWREYSAKAR

SEQ ID NO: 41778 - protein, 238 aa, Rhodopseudomonas sp.
  misc_feature (1)..(238): tr|A0A0N1C3Q2|A0A0N1C3Q2_9BRAD 7-cyano-7-deazaguanine s ynthase OS=Rhodopseudomonas sp. AAP120 OX=1523430 GN=qu eC PE=3 SV=1
MTEHRSDQTALVLFSGGQDSATCLAWALTRFARVETIGFAYGQRHAVELDCRDRLLDGFRAINSEWAARIGDSHTLDIPTLSAISDTALTRDVEIAMGADGLPNTFVPGRNLIFLTFAAALAYRRGIADVVGGMCETDYSGYPDCRDDTIKALQNAVSLGMARDVTLHTPLMWLDKAATWQLAHDLGGTALVDLIREQSHTCYLGERGARHDWGYGCGECPACALRAKGWREYQARAG

SEQ ID NO: 41779 - protein, 240 aa, Rhodospirillaceae bacterium; identical to SEQ ID NO: 39438
  misc_feature (1)..(240): tr|A0A1Z8LLL9|A0A1Z8LLL9_9PROT 7-cyano-7-deazaguanine s ynthase OS=Rhodospirillaceae bacterium TMED8 OX=1986645 GN=queC PE=3 SV=1

SEQ ID NO: 41780 - protein, 242 aa, Rhodospirillaceae bacterium; identical to SEQ ID NO: 39437
  misc_feature (1)..(242): tr|A0A357V1D0|A0A357V1D0_9PROT 7-cyano-7-deazaguanine s ynthase OS=Rhodospirillaceae bacterium OX=1898112 GN=qu eC PE=3 SV=1

SEQ ID NO: 41781 - protein, 230 aa, Rhodospirillales bacterium
  misc_feature (1)..(230): tr|A0A1G3I8G0|A0A1G3I8G0_9PROT 7-cyano-7-deazaguanine s ynthase OS=Rhodospirillales bacterium RIFCSPLOWO2_12_FU LL_58_28 OX=1802022 GN=queC PE=3 SV=1
MREKTKAVVLLSGGLDSATVLAIAMNMGFEAHALTFRYGQRHSLEIEAARAVAAAAGAAEHKIVDIGPEAFHGSALTDGVEAPKGRSDEEMKSGVPVTYVPARNVIFLSYALGWAEVMAADDIFIGVNALDYSGYPDCRPEFIAAFQAMADLATKAAVEGGRKTTIHAPLINLTKGQIIIRGLELGVDYGLTLSCYDPGPRAVPCGECDACRLRRKGFAEAGLADPADTP

SEQ ID NO: 41782 - protein, 425 aa, Rhodospirillales bacterium
  misc_feature (1)..(425): tr|A0A1Q3URK8|A0A1Q3URK8_9PROT Uncharacterized protein OS=Rhodospirillales bacterium 69-11 OX=1895825 GN=BGO51 _16865 PE=4 SV=1
MKLVCGPGTSASIETGDALHVVLYGQAGSPDRGSAGDAVKSEIQRRHLVPAARAWDLLSIALSVVTADFAGLRDHSPDGWTREFEIDVAVADPTFWTGQARALSEALGFLTTDLWTFRFQEGGLLPAPPRNPVYPAEDCVALLSGGLDSLIGAIDLVAAGRKPFVVSQTVRGDADKQVDFASRIGGGLNHLQLNHNAHSPGIQESSQRARSLVFIAFGVAAATSLQRHHQGHSVPLYVCENGFIAINPPLTGGRLGSLSTRTAHPEYLTRLQHILDAADLRIRIENPYIAKTKGEMLRGCADQDLLKAEAVRSTSCGRFQRFNYHQCGRCVPCQVRRAAFMVWGGVPDTTGYVYEALGKNDDDHAGFDDVRSVAMALAAVAADGFEVWLGNSLGSPMISDRAALRAMVERGLAELTRLHQAYGVT

SEQ ID NO: 41783 - protein, 241 aa, Rhodospirillum rubrum
  misc_feature (1)..(241): sp|Q2RSY8|QUEC_RHORT 7-cyano-7-deazaguanine synthase OS =Rhodospirillum rubrum (strain ATCC 11170 / ATH 1.1.1 / DSM 467 / LMG 4362 / NCIB 8255 / S1) OX=269796 GN=queC PE=3 SV=1
MPHSPTQRRAIVLVSGGLDSTTTLAIAQAEGFTVNALSFSYGQRHAVELEAARRVTQAFAVERHVIATIDLRQFGGSALTDSIGVPKQRSLETMGAGIPVTYVPARNTVFLSFALAWAEVLEANDVFIGVNALDYSGYPDCRPEYISAFQTMANLATKRGVEGTGVLTIHTPLIALTKGQIIRRGLDLGVDYALTHSCYDPSAEGEACGTCDSCLLRLKGFAENGLEDPVRYVGARSRAAG

SEQ ID NO: 41784 - protein, 600 aa, Rhodothalassium salexigens
  misc_feature (1)..(600): tr|A0A4R2P847|A0A4R2P847_RHOSA 7-cyano-7-deazaguanine s ynthase OS=Rhodothalassium salexigens DSM 2132 OX=11882 47 GN=EV659_11457 PE=3 SV=1
MDVQGVAKNVNLRIDYISRTMLGNVPELLIDLLEVAAYVYCADQRLVRGSEKLRNFGESWRRSLRFSIPVRHLEVWQDPGVQEVLADTLGFLSDDSYEFDFRIAEAPVQPRELYFPDLLDASAEHDEVALFSGGVDSFAGAVNDIVTLGKSVTLVGHYSSTKVRAVQENLIQGLRQRGLDRRVSYIPVWVSNENERAREFTQRTRSFLFACLGLVVARMSGKDRFSFYENGVVSINPPLAGDVVGGRATRTTHPKVLRGLEALFSLLLGRQIEIQTPLQWLTKKEVTQKIKEAGVADMLGETVSCTRPRKWTEKQKHCGVCSQCIDRRFAVLAAGMGGHEPAENYMRDLLLADRSADDDLRMALSYVSFFQRVAATPKERFLVDFPEVVSALDRFSGLSTQDAGDHVYDLFQRHAKSVEEVITTAVSEHIGPLYRRELPSGSLLATCFSRGHIEAPPPSHYDVQAKAFMDRLVAPVLEFAFDQDDKRVLFQGSHYLEGANFRVVEALIENFREAKRQREDVPFLPATDLADRLGLSDQSMRQQLGRLRKAIEPLTVTLGIPLDQDSFVQTKERAGYRLNPEWREVSVGDIRVDTAVTSQA

SEQ ID NO: 41785 - protein, 278 aa, Rhodothalassium salexigens
  misc_feature (1)..(278): tr|A0A4V2SQA4|A0A4V2SQA4_RHOSA 7-cyano-7-deazaguanine s ynthase OS=Rhodothalassium salexigens DSM 2132 OX=11882 47 GN=queC PE=3 SV=1
MASNRPRTDILRGGIVASSESDAAAGAETAGAEDPDARMPDETPRRPGDRAVVLLSGGLDSATVAAAAKAAGYRVIALSFRYGQRHAVELEAAARVAAHVGVDEHQVLDMDLRAFGGSALTADIDVPKDRDADAIAADDQVPITYVPARNTIFLSYAMGLAEVRGADDLFIGVNAVDYSGYPDCRPGFIGAFEAMANLATRAGVAGDRPLRLHTPLIGLSKAAIVAWGTELGVDYGQTISCYDPDAQGRACGACDSCHLRRQGFVDAGLADPTVYQTD

SEQ ID NO: 41786 - protein, 242 aa, Rhodothermaceae bacterium
  misc_feature (1)..(242): tr|A0A2E3R218|A0A2E3R218_9BACT 7-cyano-7-deazaguanine s ynthase OS=Rhodothermaceae bacterium OX=2026787 GN=queC PE=3 SV=1
MPDSPNALVLFSGGQDSTTSLFWALAPDGGAFDHVEAVAFRYGQRHAVEIEQARAIAEAAGVPLTVLDLTGLLSGSALLADEAADTNDAHALAPDLPASFVPGRNALFLTAAASLGFTRGIADLVGGMCQTDYSGYPDCRLDFVESQAQTLSLALDTDLRIHTPLMHLTKAETWKLAADLGTVRGLDVLETVREMSHTDYHGDRTQRHAWGYGRLDNPASVLRAKGHAEAVAKGWVPDVDLP

SEQ ID NO: 41787 - protein, 221 aa, Rhodothermaeota bacterium
  misc_feature (1)..(221): tr|A0A2A5WZA9|A0A2A5WZA9_9BACT 7-cyano-7-deazaguanine s ynthase OS=Rhodothermaeota bacterium MED-G19 OX=1986240 GN=queC PE=3 SV=1
MSRALILLSGGQDSTTCLYWAKQKFDSIEAVGFNYGQRHLIELDFAKKTCDKENVFLDIISLKKILSNSALTNNKEDFNKNHPSNPNLPNSFVPGRNLLFLSIATSIAYNKGIGNIVIGVCETDFSGYPDCREDFIKSMEKSIYLATEKSIEIHTPLMKLDKAQTWKLAKELGCLDTIIKSTMTDYNGSKNENEWGLGNLDNPASILRHKGYLKAKKNKWI

SEQ ID NO: 41788 - protein, 221 aa, Rhodothermaeota bacterium
  misc_feature (1)..(221): tr|A0A2A5XPW1|A0A2A5XPW1_9BACT 7-cyano-7-deazaguanine s ynthase OS=Rhodothermaeota bacterium MED-G16 OX=1986238 GN=queC PE=3 SV=1
MNKALILLSGGQDSTTCFYWAKKKFNSIQAIGFNYGQRHVIELDFAKKICDKENISYDIISLKEILSNSALINPQEDLNKSHPSNQNLPNSFVPGRNLLFLSIASSIAYNREIENIVIGVCETDFSGYPDCRNEFIKSMKKTIHLATEKSIEIHTPLMNLDKAQTWKLAKDLGCINTIIKSTMTDYNGSQNKNDWGLGNLDNPASILRHKGYIKAKKNKWI

SEQ ID NO: 41789 - protein, 238 aa, Rhodothermus marinus
  misc_feature (1)..(238): tr|G2SH21|G2SH21_RHOMG 7-cyano-7-deazaguanine synthase OS=Rhodothermus marinus (strain SG0.5JP17-172) OX=76257 0 GN=queC PE=3 SV=1
MSAPNLLPTLKPAEHGETALVLLSGGQDSTTCLYWALHYFPKVEAIGFHYGQKHAVELEQARKIAEQAGVPFTVLDLRGLLRGSALTEHDQDVSAAHPLAPHLPASFVPGRNALFLTLAASYGFTRGIHDLVGGMCQTDYSGYPDCRRAFIDAMERALSLALDTTIRIHTPLMYLTKAETWRLARELGILDVIVELTHTDYNGDRSERHAWGYGRLDNPASILRARGYEEAKARGWLD

SEQ ID NO: 41790 - protein, 238 aa, Rhodothermus marinus
  misc_feature (1)..(238): tr|D0MDN1|D0MDN1_RHOM4 7-cyano-7-deazaguanine synthase OS=Rhodothermus marinus (strain ATCC 43812 / DSM 4252 / R-10) OX=518766 GN=queC PE=3 SV=1
MSALNLLPTLKPAEHGETALVLLSGGQDSTTCLYWALHYFPKVEALGFHYGQKHAVELEQARKIADRAGVPFTVLDLRGLLRGSALTEHEQDVSAAHPLAPHLPAAFVPGRNALFLTLAASYGFTRGIHDLVGGMCQTDYSGYPDCRREFIDAMERALSLALDTPIRIHTPLMHLTKAETWRLARELGILDVIVELTHTDYNGDRSERHPWGYGRLDNPASILRARGYEEAKARGWLD

SEQ ID NO: 41791 - protein, 238 aa, Rhodothermus profundi
  misc_feature (1)..(238): tr|A0A1M6VW99|A0A1M6VW99_9BACT 7-cyano-7-deazaguanine s ynthase OS=Rhodothermus profundi OX=633813 GN=queC PE=3 SV=1
MSVPNLLPTLKPTEQGDTALVLLSGGQDSTTCLYWALHYFSRVEAIGFHYGQRHAIELQQAQKIAEQAGVPFTVLDLRGLLRGSALTEHDQDVSAAHPLAPHLPASFVPGRNALFLTLAASYGFTRGIHDLVGGMCQTDYSGYPDCRRAFIDAMEKALSLALDTTLRIHTPLMHLTKAETWRLARELGILDVIIELTHTDYHGNRSERHEWGYGRLDNPASILRARGYEEAKARGWLD

SEQ ID NO: 41792 - protein, 229 aa, Rhodovarius sp.
  misc_feature (1)..(229): tr|A0A437MM41|A0A437MM41_9PROT 7-cyano-7-deazaguanine s ynthase OS=Rhodovarius sp. CCP-6 OX=1979269 GN=queC PE= 3 SV=1
MRDDGALVLLSGGQDSATCLAWALDRFSHVETLGFDYGQRHKVELECRDALRAGMAGPRLGPDHTLSIPTFAEIGGTALTEQVEIAMREDGLPNTFVPGRNIVFLTFAAALATRRGLKHVVAGMCETDYSGYPDCRDDTIKSLQATLNLGMATRLVLHTPLMWRDKKETWDLAEALGGAPLVELIRRESHSCYKGERATLHPWGFGCGTCPACHLRARGWEAYAEAHAN

SEQ ID NO: 41793 - protein, 235 aa, Rhodovulum sp.
  misc_feature (1)..(235): tr|J6IXY2|J6IXY2_9RHOB 7-cyano-7-deazaguanine synthase OS=Rhodovulum sp. PH10 OX=1187851 GN=queC PE=3 SV=1
MISSDTALVLFSGGQDSTVCLAWALSRFSRVETVGFDYGQRHAVELSVRPAIREKMAALDPAWAARLGDDHMVPLEGLSAISDTALTRDVAIEVAEGGLPTTFVPGRNLIFLAFAGALAYRRGARHLVAGMCETDYSGYPDCRDDTLKAMQVALNLGMERRFVLHTPLMWIDKAETFALAEGLGGTPLVGLLLEETHTCYLGDRSVRHPWGYGCGTCPACRLRADGYERWMSGKR

SEQ ID NO: 41794 - protein, 455 aa, Rhodovulum sp.
  misc_feature (1)..(455): tr|A0A366BZA3|A0A366BZA3_9RHOB Uncharacterized protein OS=Rhodovulum sp. BSW8 OX=2259645 GN=DSD19_11275 PE=4 S V=1
MRRFSLIGRLGPDDKGKINLVQSDSDVFEIDFLDGDLRMGFGIGHALDQLAFLGLQPSEKGIDLVVLAALVNAGDTRVSRKLNAQDGWTREIDLYVPVSAVAAWTESTGSIESMLRFLSGDRWRVFFHDRTKRTRTLAVAPKRLAIDGLTKVSLLSGGLDSLIGAVDLLSGSERPLFVSHYWDSETAKAQAYILDRLENRFGKEAFKSLRVRLGFDKHHLTTGETENTQRGRSFLFYSLATLAASAIDGRTTVDIPENGLIALNVPLDPLRFGALSTRTAHPHFIASMQRLIDALTLDVELNNPYRHMTKGEMVANCADKSFLEKIVANSMSCSSPAKARYKKLSPRHCGYCVPCLIRRASLEVGLDGDDETLYMVEDLKGHILASDQPEGEHVRSFQLMAKRIRAKPDLAKILVHKPGPLHDKPDEIPDYADVFRRGVLEVAELLKGVRARPGG

SEQ ID NO: 41795 - protein, 426 aa, Rhodovulum visakhapatnamense
  misc_feature (1)..(426): tr|A0A4R8F7E7|A0A4R8F7E7_9RHOB Queuosine biosynthesis p rotein QueC OS=Rhodovulum visakhapatnamense OX=364297 G N=EV657_1456 PE=4 SV=1
MTSVACLPQDLPDIPDTDIRFDIYTNSRTPGRGRVGDLVPGRLRRLGLFPSGAAWDFMSFAMAVVAADEAVSRVRSPDGWTRKIDLTVAVSDPAFWNSESERLTQALRFLSGDMWSVQFIAGGGMPFPRGPRRPRPEDMICLLSGGMDSLIGAIDAVSEGRQPLLVSQMAKGDTQDQRTFASSVAPRSLHLQLNHHARPPCASERSQRARSIAFLGFGVMAATCLQSHADGEIVELRMPENGFISQNVPLTPLRTGSLSTRTTHPYFLRLIQETLEAADLRVHIRNPYEFQTKGEMLKGCQDPALLAALVDTSTSCGRYSRTGFQHCGRCVPCQVRRAAYVAWGVPDRTVKGYKYEHLGQKDARHAGFDDVRSVAIAIETVSLQGISALIGGSMNVQLLGDPTPYRRVVKNGIAELAALHSKLGVT

SEQ ID NO: 41796 - protein, 162 aa, Richelia intracellularis
  misc_feature (1)..(162): tr|M1WNY2|M1WNY2_9NOST 7-cyano-7-deazaguanine synthase OS=Richelia intracellularis HM01 OX=1165095 GN=RINTHM_8 560 PE=3 SV=1
MRLWGGSALTDNSIDVPKERPLDTIAQNIPVTYVPARNTIFLSFALGYAESIHAERIYIGVNALDYSGYPDCRPDYIQAMQKVFRLGTKQGLEGNPIRICTPLINLRKTEIIQLGNKLSVPWELTWSCYSGGNLACGVCDSCRLRRYAFTELGLVDPITYAQ

SEQ ID NO: 41797 - protein, 227 aa, Richelia intracellularis
  misc_feature (1)..(227): tr|M1WZ52|M1WZ52_9NOST 7-cyano-7-deazaguanine synthase OS=Richelia intracellularis HH01 OX=1165094 GN=queC PE= 3 SV=1
MLMKAVILLSGGVDSTTLIYQALADGCQPYAISFDYGQRHRRELQSALAVANAAGVFEHQIVRFDLRLWGGSALTDNSIDVPKERPFDTIAQNIPVTYVPARNTIFLSFALGYAESIYAERIYIGVNALDYSGYPDCRPDYIQAMQKVFRLGTKQGVEGNPIHIYTPLINLRKTEIIQLGNKLSVPWELTWSCYNGGNLACGVCDSCRLRRSAFTELGLVDPITYAQ

SEQ ID NO: 41798 - protein, 35 aa, Richelia sp.
  misc_feature (1)..(35): tr|A0A3B9F5D1|A0A3B9F5D1_9NOST 7-cyano-7-deazaguanine s ynthase (Fragment) OS=Richelia sp. OX=2053605 GN=DCG18_ 01255 PE=4 SV=1
CYNGGNLACGVCDSCRLRRSAFTELGLVDPITYAQ

SEQ ID NO: 41799 - protein, 228 aa, Rickettsia africae
  misc_feature (1)..(228): sp|C3PLH1|QUEC_RICAE 7-cyano-7-deazaguanine synthase OS =Rickettsia africae (strain ESF-5) OX=347255 GN=queC PE =3 SV=1
MKKKAVILLSGGPDSTTVLEIVSKTDYEIYALSFNYHRRNSLEVQKIQGLIKDYNVKQHRVINIDLQSFIGSALTDDNIDVPKFKNTDQLPSDIPVTYVPARNTIFLSYALGVAEVIGARDIFIGVHTNDYTNYPDCRPEYIKSFEAMANLATRVGVNGEKITIHAPLINMTKEQIIKKGLELGVDYSKTISCYDPTEDGLSCGQCLSCIARLDAFKRNNVQDPIKYV

SEQ ID NO: 41800 - protein, 227 aa, Rickettsia akari
  misc_feature (1)..(227): sp|A8GPK3|QUEC_RICAH 7-cyano-7-deazaguanine synthase OS =Rickettsia akari (strain Hartford) OX=293614 GN=queC P E=3 SV=1
MKKAVMLVSGGADSATVLAMAREIGYEIHSMSFNYGQRNNAELRKVKELIKEYNVKQHKIVDIDLRAFGGSALTDDNIDVPHYHDVNAVPEDVPVTYVPSRNTIFLSYALGYAEVIGAKDIFIGVHTSDSANYPDCRPEYIKSFEKMANLATSIGIQGQKITIHTPLIDMTKEQIIRTGLKLGVDYKNTISCYEPTEDDSSCGNCLACMIRLDAFKKNNIQDPIKYV

SEQ ID NO: 41801 - protein, 228 aa, Rickettsia amblyommatis
  misc_feature (1)..(228): tr|A0A0F3N501|A0A0F3N501_RICAM 7-cyano-7-deazaguanine s ynthase OS=Rickettsia amblyommatis str. Ac/Pa OX=135916 4 GN=queC PE=3 SV=1
MKKKTVILLSGGPDSTTVLEIVSKMDYEIYALSFNYHRRNSPEVQKIQGLIKDYNVKQHRVINIDLQSFIGSALTDDNIDVPKFKNTDQLPSDIPVTYVPARNTIFLSYALGVAEVIGARDIFIGVHTNDYTNYPDCRPEYIKSFEAMANLATRVGVNGEKITIHAPLINMTKEQIIKKGLELGVDYSKTISCYDPTEDGLSCGQCLSCIARLDAFKKNNVQDPIKYV

SEQ ID NO: 41802 - protein, 228 aa, Rickettsia amblyommatis; identical to SEQ ID NO: 41801
  misc_feature (1)..(228): tr|A0A0F3QGZ1|A0A0F3QGZ1_RICAM 7-cyano-7-deazaguanine s ynthase OS=Rickettsia amblyommatis str. Darkwater OX=13 59166 GN=queC PE=3 SV=1

SEQ ID NO: 41803 - protein, 228 aa, Rickettsia argasii
  misc_feature (1)..(228): tr|A0A0F3RG06|A0A0F3RG06_9RICK 7-cyano-7-deazaguanine s ynthase OS=Rickettsia argasii T170-B OX=1268837 GN=queC PE=3 SV=1
MKKKSVILLSGGPDSTTVLEIVSKMDYEIYALSFNYHRRNSPEVQKIQGLIKDYNVKQHRVINIDLQSFIGSALTDDNIDVPKFKNTDQLPSDIPVTYVPARNTIFLSYALGVAEVVGARDIFIGVHTNDYTNYPDCRPEYIKSFEAMANLATRVGVNGEKITIHAPLINMTKEQIIQKGLELGVDYSKTISCYDPTEEGLSCGQCLSCIARLDAFKKNNVQDPIKYV

SEQ ID NO: 41804 - protein, 227 aa, Rickettsia asembonensis
  misc_feature (1)..(227): tr|A0A0C2QWL2|A0A0C2QWL2_9RICK 7-cyano-7-deazaguanine s ynthase OS=Rickettsia asembonensis OX=1068590 GN=queC P E=3 SV=1
MKKAVILVSGGADSTTVLAIAREMGYEIHAMSFNYGQRNNAELRKVKELIKEYNVKQHKIVGIDLRAFGGSALTDNNIDVPHYHDVNELPEDVPVTYVPARNTIFLSYALGYAEVIGAKDIFIGVHTSDSANYPDCRPEYIKSFKKMANLATNMGIQGKKITIHTPLIDMTKEQIIRTGLELGVDYKNTISCYEPTEDDSSCGNCLACMIRLDAFKKNNIQDPIKYV

SEQ ID NO: 41805 - protein, 229 aa, Rickettsia asiatica
  misc_feature (1)..(229): tr|A0A510G8B8|A0A510G8B8_9RICK 7-cyano-7-deazaguanine s ynthase OS=Rickettsia asiatica OX=238800 GN=queC PE=3 S V=1
MKKSVNLVSGGADSATVLAIAREMGYEIHAMSFNYGQRNNAELRKVKELIKEYNVKEHKIVDIDLRVFGGSALTDDNIDVPHYHGVNELPEDVPVTYVPARNTMFLSYALGFAEVIGAKDIFIGVHTSDSANYPDCRPEYIKSFEEMANLATSMGIQGKKITIHTPLIDMTKEQIIRTGLKLGVDYKNTISCYEPTEDDLSCGNCLACMIRLDAFKKNNIQDPIKYVNT

SEQ ID NO: 41806 - protein, 227 aa, Rickettsia australis
  misc_feature (1)..(227): tr|H8K6H3|H8K6H3_RICAC 7-cyano-7-deazaguanine synthase OS=Rickettsia australis (strain Cutlack) OX=1105110 GN= queC PE=3 SV=1
MKKAVILVSGGADSATVLAIAREMGYEIHAISFNYGQRNNAELRKVKELIKEYNVKQHKIVDIDLRAFSGSALTDNNIDVPHYHDVKELPEDVPVTYVPARNTIFLSYALGYAEVIGEKDIFIGVHTSDSANYPDCCPEYIKSFEKMANLATSMGIQGKKITIHTPLIDMTKEQIIRTGLKLGVDYKNTISCYEPTEDASSCGNCLACRIRLDAFKKNNIQDPIKYV

SEQ ID NO: 41807 - protein, 225 aa, Rickettsia bellii
  misc_feature (1)..(225): tr|A0A0F3Q9V6|A0A0F3Q9V6_RICBE 7-cyano-7-deazaguanine s ynthase OS=Rickettsia bellii str. RML An4 OX=1359193 GN =queC PE=3 SV=1
MKKAVILVSGGADSATVLAIMREQGYEIHAISFNYGQRNNAELRKVTELVKEYNVKQHKIVNIDLRAFGGSALTDDDIKVPHYHDTKELPEDVPVTYVPARNTIFLSYALGFAEIIGAKDIFIGVHTSDSANYPDCRPEYIKSFEAMANLATNIGGVTIHTPLINMTKDQIIKTGLRLGVDYKNTISCYDPSEDDLSCGTCLACTIRLDAFKKNNVQDPINYILF

SEQ ID NO: 41808 - protein, 225 aa, Rickettsia bellii; identical to SEQ ID NO: 41807
  misc_feature (1)..(225): sp|A8GVR7|QUEC_RICB8 7-cyano-7-deazaguanine synthase OS =Rickettsia bellii (strain OSU 85-389) OX=391896 GN=que C PE=3 SV=1

SEQ ID NO: 41809 - protein, 227 aa, Rickettsia canadensis
  misc_feature (1)..(227): sp|A8EZR4|QUEC_RICCK 7-cyano-7-deazaguanine synthase OS =Rickettsia canadensis (strain McKiel) OX=293613 GN=que C PE=3 SV=1
MKKLVNLVSGGADSATVLAIAQKMGYEIYAMSFNYGQRNNAELRKVRELVKEYNVKQHKIVNIDLRAFSGSALTDNNISVPHYHDVNELPDDVPVTYVPARNTIFLSYALGFAEVIGAKDIFIGVHTSDSANYPDCRPEYIKSFEEMANLATNMGVQGKKITIHTPLIDMTKEQIIRTGLELGVDYKNTISCYEPTEDDLSCGTCLACMIRLDAFKKNDIQDPIKYV

SEQ ID NO: 41810 - protein, 228 aa, Rickettsia conorii
  misc_feature (1)..(228): sp|Q92GQ2|QUEC_RICCN 7-cyano-7-deazaguanine synthase OS =Rickettsia conorii (strain ATCC VR-613 / Malish 7) OX= 272944 GN=queC PE=3 SV=1
MKKKAVILLSGGPDSTTVLEIVSKTDYEIYALSFNYHRRNSLEVQKIQGLIKDYNVKQHRVINIDLQSFIGSALTDDNIDVPKFQNTDQLPSDIPVTYVPARNTIFLSYALGVAEVIGARDIFIGVHTNDYTNYPDCRPEYIKSFEAMANLATRVGVNGEKITIHAPLINMTKEQIIKKGLELGVDYSKTISCYDPTEDGLSCGQCLSCIARLDAFKKNNVQDPIKYV

SEQ ID NO: 41811 - protein, 232 aa, Rickettsia endosymbiont
  misc_feature (1)..(232): tr|A0A0F3RAA8|A0A0F3RAA8_9RICK 7-cyano-7-deazaguanine s ynthase OS=Rickettsia endosymbiont of Ixodes pacificus OX=1133329 GN=queC PE=3 SV=1
MKEAKKSVNLVSGGADSATVLAIAREMGYEIHAMSFNYGQRNNAELRKVKEFIKEYNVKQHKIVDIDLRASGGSALTDDNIDVPHYHGVNELPGDVPVTYVPARNTIFLSYALGFAEVIGAKDIFIGVHTSDSANYPDCRPEYIKSFEEMANLATSMGIQGKKITIHMPLIDMTKEQIIRTGIELGVDYKNTISCYEPTEDDSSCGNCLACMIRLDAFKKNNIQDPIKYVNT

SEQ ID NO: 41812 - protein, 230 aa, Rickettsia endosymbiont
  misc_feature (1)..(230): tr|A0A162VJN6|A0A162VJN6_9RICK 7-cyano-7-deazaguanine s ynthase OS=Rickettsia endosymbiont of Proechinophthirus fluctus OX=1462733 GN=queC PE=3 SV=1
MKKKAVILLSGGPDSTTVLEIVSKTDYEIYALSFNYHRRNSLEVQKIQGLIKDYNVKQHRVINIDLQSFIGSALTDDNIDVPKFKNTDQLPSDIPVTYVPARNTIFLSYALGVAEIIGARDIFIGVHTNDYTNYPDCRPEYIKSFEAMANLATRVGVNGEKITIHAPLINMTKEQIIKKGLELGVDYSKTISCYDPTEDGLSCGQCLSCIVRLDAFKKNNVQDPIQYVSL

SEQ ID NO: 41813 - protein, 224 aa, Rickettsia felis
  misc_feature (1)..(224): tr|A0A0F3MR88|A0A0F3MR88_RICFI 7-cyano-7-deazaguanine s ynthase OS=Rickettsia felis str. Pedreira OX=1359196 GN =queC PE=3 SV=1
MKKAVILVSGGADSATVLAIAREMGYEIHAMSFNYGQRNNAELRKVKELIKEYNVKQHKIVYIDLRAFGGSALTDNNIDVPHYHDVNELPEDVPVTYVPARNTIFLSYALGYAEVIGAKDIFIGVHTSDSANYPDCRPEYIKSFEEMANLATNIGNRITIHTPLIDMAKEQIIKTGLELGVDYKNTISCYDPTEDDLSCGNCLACMIRLDAFKKNNVQDPINYV

SEQ ID NO: 41814 - protein, 224 aa, Rickettsia felis; identical to SEQ ID NO: 41813
  misc_feature (1)..(224): sp|Q4UMZ0|QUEC_RICFE 7-cyano-7-deazaguanine synthase OS =Rickettsia felis (strain ATCC VR-1525 / URRWXCal2) OX= 315456 GN=queC PE=3 SV=1

SEQ ID NO: 41815 - protein, 228 aa, Rickettsia heilongjiangensis
  misc_feature (1)..(228): tr|G0GZA4|G0GZA4_RICH0 7-cyano-7-deazaguanine synthase OS=Rickettsia heilongjiangensis (strain ATCC VR-1524 / 054) OX=1032845 GN=queC PE=3 SV=1
MKKKSVILLSGGPDSTTVLEIVSKMDYEIYALSFNYHRRNSPEVQKIQGLIKDYNVKQHRVINIDLQSFIGSALTDDNIDVPKFKNTDQLPSDIPVTYVPARNTIFLSYALGVAEVIGARDIFIGVHTNDYTNYPDCRPEYIKSFEAMANLATRVGVNGEKITIHAPLINMTKEQIIQKGLELGVDYSKTISCYDPTEDGLSCGQCLSCIARLDAFKKNNVQDPIKYV

SEQ ID NO: 41816 - protein, 228 aa, Rickettsia japonica; identical to SEQ ID NO: 41815
  misc_feature (1)..(228): tr|A0A3B7DBG9|A0A3B7DBG9_RICJA 7-cyano-7-deazaguanine s ynthase OS=Rickettsia japonica OX=35790 GN=queC PE=3 SV =1

SEQ ID NO: 41817 - protein, 228 aa, Rickettsia japonica; identical to SEQ ID NO: 41815
  misc_feature (1)..(228): tr|G4KLA3|G4KLA3_RICJY 7-cyano-7-deazaguanine synthase OS=Rickettsia japonica (strain ATCC VR-1363 / YH) OX=65 2620 GN=exsB PE=3 SV=1

SEQ ID NO: 41818 - protein, 228 aa, Rickettsia massiliae
  misc_feature (1)..(228): sp|A8F2I5|QUEC_RICM5 7-cyano-7-deazaguanine synthase OS =Rickettsia massiliae (strain Mtu5) OX=416276 GN=queC P E=3 SV=2
MKKKAVILLSGGPDSTTVLEIVSKMDYEIYALSFNYHRRNSPEVQKIQGLIKDYNVKQHRVINIDLQSFIGSALTDDNIDVPKFKHTDQLPSDIPVTYVPARNTIFLSYALGVAEVIGARDIFIGVHTNDYTNYPDCRPEYIKSFEAMANLATRVGVNGEKITIHAPLINMTKEQIIKKGLELGVDYSKTISCYDPTEAGLSCGQCLSCIARLDAFKKNNVQDPIKYV

SEQ ID NO: 41819 - protein, 228 aa, Rickettsia massiliae
  misc_feature (1)..(228): tr|H6QI78|H6QI78_RICMA 7-cyano-7-deazaguanine synthase OS=Rickettsia massiliae str. AZT80 OX=1105112 GN=queC P E=3 SV=1
MKKKAVILLSGGPDSTTVLEIVSKMDYEIYALSFNYHRRNSPEVQKIQGLIKDYNVKQHRVINIDLQSFIGSALTDDNIDVPKFKHTDQLPSDIPVTYVPARNTIFLSYALGVAEVIGARDIFIGVHTNDYTNYPDCRPEYIKSFEAMANLATRVGVNGEKITIHAPLINMTKEQIIKTGLELGVDYSKTISCYDPTEAGLSCGQCLSCIARLDAFKKNNVQDPIKYV

SEQ ID NO: 41820 - protein, 232 aa, Rickettsia monacensis
  misc_feature (1)..(232): tr|A0A0B7IX01|A0A0B7IX01_9RICK 7-cyano-7-deazaguanine s ynthase OS=Rickettsia monacensis OX=109232 GN=queC PE=3 SV=1
MKEAKKSVNLVSGGADSATVLAIAREMGYEIHAISFNYGQRNNVELRKVKEFIKEYNVKQHKIVDIDLRASGGSALTDDNIDVPHYHGVNELPGDVPVTYVPARNTIFLSYALGFAEVIGAKDIFIGVHTSDSANYPDCRPEYIKSFEEMANLATSMGIQGKKITIHTPLIDMTKEQIIRTGIELGVDYKNTISCYEPTEDDSSCGNCLACMIRLDAFKKNNIQDPIKYVNT

SEQ ID NO: 41821 - protein, 228 aa, Rickettsia montanensis
  misc_feature (1)..(228): tr|H8KCG8|H8KCG8_RICMS 7-cyano-7-deazaguanine synthase OS=Rickettsia montanensis (strain OSU 85-930) OX=110511 4 GN=queC PE=3 SV=1
MKKKAVILLSGGPDSTTVLEIVSKMDYEIYALSFNYHRRNGPEVQKIQGLIKDYNVKQHRVINIDLQSFIGSALTDDNIDVPKFKNTDQLPSDIPVTYVPARNTIFLSYALGVAEVIGARDIFIGVHTNDYTNYPDCRPEYIKFFEAMANLATRVGVNGEKITVHAPLINMTKEQIIKKGLELGVDYSKTISCYDPTEDGLSCGQCLSCIARLDAFKKNNVQDPIKYV

SEQ ID NO: 41822 - protein, 228 aa, Rickettsia parkeri
  misc_feature (1)..(228): tr|A0A0F3QPK3|A0A0F3QPK3_RICPA 7-cyano-7-deazaguanine s ynthase OS=Rickettsia parkeri str. Grand Bay OX=1359203 GN=queC PE=3 SV=1
MKKKAVILLSGGPDSTTVLEIVSKTDYEIYALSFNYHRRNSLEVQKIQGLIKDYNVKQHRVINIDLQSFIGSALTDDNIDVPKFKNTDQLPSGIPVTYVPARNTIFLSYALGVAEVIGARDIFIGVHTNDYTNYPDCRPEYIKSFEAMANLATRVGVNGEKITIHAPLINMTKEQIIKKGLELGVDYSKTISCYDPTEDGLSCGQCLSCIARLDAFKKNNVQDPIKYV

SEQ ID NO: 41823 - protein, 228 aa, Rickettsia peacockii
  misc_feature (1)..(228): sp|C4K2L7|QUEC_RICPU 7-cyano-7-deazaguanine synthase OS =Rickettsia peacockii (strain Rustic) OX=562019 GN=queC PE=3 SV=1
MKKKAVILLSGGPDSTTVLEIVSKTDYEIYALSFNYHRRNSLEVQKIQGLIKDYNVKQHRVINIDLQSFIGSALTDDNIDVPKFKNTDQLPSDIPVTYVPARNTIFLSYALGVVEVIGARDIFIGVHTNDYTNYPDCRPEYIKSFEAMANLATRVGVNGEKITIHAPLINMTKEQIIKKGLELGVDYSKTISCYDPTEDGLSCGQCLSCIARLDAFKKNNVQDPIKYV

SEQ ID NO: 41824 - protein, 228 aa, Rickettsia philipii
  misc_feature (1)..(228): tr|H6PUZ0|H6PUZ0_RICP3 7-cyano-7-deazaguanine synthase OS=Rickettsia philipii (strain 364D) OX=481009 GN=queC PE=3 SV=1
MKKKAVILLSGGPDSTTVLEIVSKTDYEIYALSFNYHRRNSLEVQKIQGLIKDYNVKQHRVINIDLQSFIGSALTDDNIDVPKFKNTDQLPSDIPVTYVPARNTIFLSYALGVAEVIGARDIFIGVHTNDYTNYPDCRPEYIKSFEAMANLATRVGVNGEKITIHAPLINMTKEQIIKKGLELGVDYSKTISCYDPTEDGLSCGQCLSCIVRLDAFKKNNVQDPIQYV

SEQ ID NO: 41825 - protein, 227 aa, Rickettsia prowazekii
  misc_feature (1)..(227): sp|Q9ZCM9|QUEC_RICPR 7-cyano-7-deazaguanine synthase OS =Rickettsia prowazekii (strain Madrid E) OX=272947 GN=q ueC PE=3 SV=1
MKKSVNLLSGGTDSATVLAIASEMCYEIYAMSFNYGQRNNAELRKVKELIKKYNVKQHKIVDIDLRAFGGSALTDDNIDVPYYHGINALPEIVPVTYVPARNTIFLSYAVGFAEVIGSQDIFIGVHTSDSANYPDCCPEYIQSFEKMVNLATNMGVQGKKITIHAPLIDMTKEQIIRTGLKLGVDYKNTISCYSPTEDDLSCGNCLACIIRLDAFKKNNIQDPIKYV

SEQ ID NO: 41826 - protein, 236 aa, Rickettsia prowazekii
  misc_feature (1)..(236): tr|D5AXV3|D5AXV3_RICPP 7-cyano-7-deazaguanine synthase OS=Rickettsia prowazekii (strain Rp22) OX=449216 GN=exs B PE=3 SV=1
MCIKLEWSTMKKSVNLLSGGTDSATVLAIASEMCYEIYAMSFNYGQRNNAELRKVKELIKKYNVKQHKIVDIDLRAFGGSALTDDNIDVPYYHGINALPEIVPVTYVPARNTIFLSYAVGFAEVIGSQDIFIGVHTSDSANYPDCCPEYIQSFEKMVNLATNMGVQGKKITIHAPLIDMTKEQIIRTGLKLGVDYKNTISCYSPTEDDLSCGNCLACIIRLDAFKKNNIQDPIKYV

SEQ ID NO: 41827 - protein, 228 aa, Rickettsia raoultii
  misc_feature (1)..(228): tr|A0A126E9D3|A0A126E9D3_9RICK 7-cyano-7-deazaguanine s ynthase OS=Rickettsia raoultii OX=369822 GN=queC PE=3 S V=1
MKKKAVILLSGGPDSTTVLEIVSKMDYEIYALSFNYHRRNSPEVQKIQGLIKDYNVKQHRVINIDLQSFIGSALTDDNIDVPKFKNTDQLPSDIPVTYVPARNTIFLSYALGVAEVIGARDIFIGVHTNDYTNYPDCRPEYIKSFEAMANLATRVGVNGEKITIHAPLINMTKEQIIKKGLELGVDYSKTISCYDPTEDGLSCGQCLSCIARLDAFKKNNVQDPIKYV

SEQ ID NO: 41828 - protein, 228 aa, Rickettsia rhipicephali
  misc_feature (1)..(228): tr|A0A0S2C931|A0A0S2C931_RICRH 7-cyano-7-deazaguanine s ynthase OS=Rickettsia rhipicephali OX=33992 GN=queC PE= 3 SV=1
MKKKAVILLSGGPDSTTVLEIVSKMDYEIYALSFNYHRRNSPEVQKIQGLIKDYNVKQHRVINIDLQSFIGSALTDDNIDVPKFKNTDQLPSDIPVTYVPARNTIFLSYALGVAEVIGARDIFIGVHTNDYTNYPDCRPEYIKSFEAMANLATRVGVNGEKITIHAPLINMTKEQIIKKGLELGVDYSKTISCYDPTEAGLSCGQCLSCIARLDAFKKNNVQDPIKYV

SEQ ID NO: 41829 - protein, 228 aa, Rickettsia rhipicephali; identical to SEQ ID NO: 41819
  misc_feature (1)..(228): tr|A0A0F3PG51|A0A0F3PG51_RICRH 7-cyano-7-deazaguanine s ynthase OS=Rickettsia rhipicephali str. Ect OX=1359199 GN=queC PE=3 SV=1

SEQ ID NO: 41830 - protein, 228 aa, Rickettsia rickettsii; identical to SEQ ID NO: 41824
  misc_feature (1)..(228): sp|A8GTC6|QUEC_RICRS 7-cyano-7-deazaguanine synthase OS =Rickettsia rickettsii (strain Sheila Smith) OX=392021 GN=queC PE=3 SV=1

SEQ ID NO: 41831 - protein, 228 aa, Rickettsia rickettsii; identical to SEQ ID NO: 41824
  misc_feature (1)..(228): sp|B0BUW5|QUEC_RICRO 7-cyano-7-deazaguanine synthase OS =Rickettsia rickettsii (strain Iowa) OX=452659 GN=queC PE=3 SV=1

SEQ ID NO: 41832 - protein, 228 aa, Rickettsia sibirica
  misc_feature (1)..(228): tr|Q7P9I9|Q7P9I9_RICS2 7-cyano-7-deazaguanine synthase OS=Rickettsia sibirica (strain ATCC VR-151 / 246) OX=27 2951 GN=queC PE=3 SV=1
MKKKAVILLSGGPDSTTVLEIVSKTDYEIYALSFNYHRRNSLEVQKIQGLIKDYNVKQHRVINIDLRSFIGSALTDDNIDVPKFKNTDQLPSDIPVTYVPARNTIFLSYALGVAEVIGARDIFIGVHTNDYTNYPDCRPEYIKSFEAMANLATRVGVNGEKITIHAPLINMTKEQIIKKGLELGVDYSKTISCYDPTEDGLSCGQCLSCIARLDAFKKNNVQDPIKYV

SEQ ID NO: 41833 - protein, 228 aa, Rickettsia slovaca
  misc_feature (1)..(228): tr|H8LPQ1|H8LPQ1_RICSL 7-cyano-7-deazaguanine synthase OS=Rickettsia slovaca str. D-CWPP OX=1105109 GN=queC PE =3 SV=1
MKKKAVILLSGGPDSTTVLEIVSKTDYEIYALSFNYHRRNSLEVQKIQGLIKDYNVKQHRVINIDLQSFIGSALTDDNIDVPKFKNTDQLPSDIPVTYVPARNTIFLSYALGVAEVIGARDIFIGVHTNDYTNYPDCRPEYIKSFEAMANLATRVGVNGEKITIHAPLINMTKEQIIKKGLELGVDYSKTISCYDPTEDGLSCGQCLSCIARLDAFKQNNVQDPIKYV

SEQ ID NO: 41834 - protein, 223 aa, Rickettsia sp.
  misc_feature (1)..(223): tr|A0A1C3ET20|A0A1C3ET20_9RICK 7-cyano-7-deazaguanine s ynthase OS=Rickettsia sp. wb OX=1851512 GN=queC PE=3 SV =1
MKKAVILVSGGADSATVLAIMREQGYEIHAISFNYGQRNNAELRKVTELVKEYNVKQHKIVNIDLRAFGGSALTDDNIKVPHYQDGKELPEDIPVTYVPARNTIFLSYALGFAEIIGAKDIFIGVHTSDSANYPDCRPEYIKFFEAMANLATNIGGVTIHTPLINMTKDQIIKTGLRLGVDYKNTISCYDPSEDDLSCGTCLACTIRLDAFKKNNVQDPINYR

SEQ ID NO: 41835 - protein, 223 aa, Rickettsia sp.; identical to SEQ ID NO: 41834
  misc_feature (1)..(223): tr|A0A249E0T2|A0A249E0T2_9RICK 7-cyano-7-deazaguanine s ynthase OS=Rickettsia sp. MEAM1 (Bemisia tabaci) OX=118 2263 GN=queC PE=3 SV=1

SEQ ID NO: 41836 - protein, 227 aa, Rickettsia typhi
  misc_feature (1)..(227): sp|Q68W43|QUEC_RICTY 7-cyano-7-deazaguanine synthase OS =Rickettsia typhi (strain ATCC VR-144 / Wilmington) OX= 257363 GN=queC PE=3 SV=1
MKKSVNLLSGGIDSATVLAIASEMCYEIHAMSFNYGQRNHAELQKVKELIKKYNVKQHKIVDIDLRAFGGSALTDDNIDIPHYHSINELPEIVPVTYVPARNTIFLSYALGFAEVIGAQDIFIGVHTSDSANYPDCRPEYIKSFEKMVNVATNMGIQGKKITIHAPLIDMTKEQIIRTGLKLGVDYKNTISCYTPTEDDLSCGNCLACIIRLDAFKKNNIQDPIKYV

SEQ ID NO: 41837 - protein, 128 aa, Rickettsiales bacterium
  misc_feature (1)..(128): tr|A0A2E3SLS5|A0A2E3SLS5_9RICK 7-cyano-7-deazaguanine s ynthase OS=Rickettsiales bacterium OX=2026788 GN=CMN01_ 07025 PE=3 SV=1
MAFDYGQRHKLELKFARWQANYFRCKSFKIFKIDLYGGSALTDNIKVPNHRDVNEIPNSIPNTYVPSRNIIFLSFASGYAEFLNINHIFIGVNSVDYSGYPDCRIEFIQKFENLINFSTKKGLEKKKI

SEQ ID NO: 41838 - protein, 225 aa, Rickettsiales bacterium
  misc_feature (1)..(225): tr|A0A1Z9MWL6|A0A1Z9MWL6_9RICK 7-cyano-7-deazaguanine s ynthase OS=Rickettsiales bacterium TMED211 OX=1986869 G N=queC PE=3 SV=1
MKKKKSVVLLSGGLDSSVVLSIAVKKFDVHCISFNYGQRHRRELTFAKKQVKLQKAKEHKIFKIDFFGGSSLTDDIDVPENRNVENIPDKIPITYVPARNTIFLSYALGYAEFLECDDIFLGVNAIDYSGYPDCRPNFIKAFENLANIATKKSILGEKFKIHTPLIKMTKEKIILEGIKNNVDFKNTSSCYNPLNKMSCGKCDSCLLRKKGFERALVKDTIKYKY

SEQ ID NO: 41839 - protein, 224 aa, Rickettsiales endosymbiont
  misc_feature (1)..(224): tr|A0A3Q8T8C9|A0A3Q8T8C9_9RICK 7-cyano-7-deazaguanine s ynthase OS=Rickettsiales endosymbiont of Stachyamoeba l ipophora OX=2486578 GN=queC PE=3 SV=1
MTKRGVILISGGLDSSTVLAIVKAQGYETYGISFDYGQRHKAELQAVAAVAKNFALKEHKLIRLNLNEIGGSALTDSDIEVPKNALGEEIPVTYVPARNTIFLSIALGYAERVGASDIFIGVNAIDYSNYPDCRAEYLEAFEKLANLATKQGANEGNFKIHAPLMKMTKAEIITTGIGLGVDYSITHSCYSPNSAGVSCGECDACLLRLRGFKEAGIVDPIEYQ

SEQ ID NO: 41840 - protein, 227 aa, Rickettsiales endosymbiont
  misc_feature (1)..(227): tr|A0A4Q7DGI7|A0A4Q7DGI7_9RICK 7-cyano-7-deazaguanine s ynthase OS=Rickettsiales endosymbiont of Peranema trich ophorum OX=2486577 GN=queC PE=3 SV=1
MKKAVVLFSSGLDSSTVLAIANSEGYQLHCLTFDYGQRHSVEIEIAKKAISKLKFSVHHKIARIDLRVFGGSALTDDIAVPKNCIDDEFQTIPVTYVPARNMIFLSYAIGYAETVGASDVFIGVNQIDYSQYPDCRAEFVEAFQTCANLGTKAGSDGAKFIIHAPLQFMHKRDIIKLGLSLGVDYSNTITCYDPVDDISCGICQACHLRLEAFKAAGIPDPIRYVQA

SEQ ID NO: 41841 - protein, 213 aa, Rikenellaceae bacterium
  misc_feature (1)..(213): tr|A0A3B8X5I6|A0A3B8X5I6_9BACT 7-cyano-7-deazaguanine s ynthase OS=Rikenellaceae bacterium OX=2049048 GN=queC P E=3 SV=1
MKALLIYSGGLDSTTLLYEYKDSIALAVTFDYGSKHNAREIAFAVENCKRLGIKHLVIPLGFIGQYFKSDLLLSGGDIPEGHYADENMKSTVVPFRNGIMLAVAAGLAESYELDAIMLANHSGDHAIYPDCRPEFIDAFSAAVKAGTYNGVQVISPYCNITKRDIALRGKAIGVDYSLTYSCYKGGEKHCGKCGTCVERKEALEGFDPTEYLD

SEQ ID NO: 41842 - protein, 225 aa, Rippkaea orientalis
  misc_feature (1)..(225): tr|B7JYW2|B7JYW2_RIPO1 7-cyano-7-deazaguanine synthase OS=Rippkaea orientalis (strain PCC 8801) OX=41431 GN=qu eC PE=3 SV=1
MIHQSKAVVLLSGGLDSATSAAIALSQGYHLIALSLRYGQRHEKELAAAKNIAKALDITEHYIVEVNLAQWGGSALTDTALTLPQGGINPNIIPSTYVPGRNTVFIAIALSLAEAKGATAIFLGINAVDYSGYPDCRPDYLQAYQRLANLSSKAGIEGHAPQLIAPLINDSKVDIVRRAVSLGVPIEDTWSCYQGGEKPCGLCDSCRIRDRALIEAGYPELATFG

SEQ ID NO: 41843 - protein, 234 aa, Rivibacter subsaxonicus
  misc_feature (1)..(234): tr|A0A4Q7VVD0|A0A4Q7VVD0_9BURK 7-cyano-7-deazaguanine s ynthase OS=Rivibacter subsaxonicus OX=457575 GN=queC PE =3 SV=1
MIDPRGALVLFSGGQDSTACLAWALDRFERVETIGFDYGQRHRVELDCRPRVIEALRSAFPQWSARLGADHLLDLALLGQISDTALTEARAIEMQANGLPNTFVPGRNLLFLSFAATLAYRRGLSVLVGGMCETDYSGYPDCRDNTLKALQVALSLGMATPMTIETPLMWIDKAQTWALAERLGGQALVELTAEQTHTCYLGDRQHRHEWGYGCGSCPACELRAAGWRGWHAGR

SEQ ID NO: 41844 - protein, 238 aa, Rivicola pingtungensis
  misc_feature (1)..(238): tr|A0A318KD73|A0A318KD73_9NEIS 7-cyano-7-deazaguanine s ynthase OS=Rivicola pingtungensis OX=1054498 GN=queC PE =3 SV=1
MMSPATDHSGGRALVVLSGGQDSTTCLYWALRRFDHVEAVTFDYGQRHRVELAAATRIAADAGVRQHLLPINTFSALGGNALTDVAMAPETGLRADGDSELPNTFVPGRNLIFLTFAAALAWQRQLDHLVVGVAQTDYSGYPDCRAPTLAALQQALTLGLDRAIAVHAPLMQLSKADTVRLAADVGALPALAHSHTCYHGAVPPCGECAACQLRARGFAEAGVEDPLVARCREEAACR

SEQ ID NO: 41845 - protein, 226 aa, Rivularia sp.
  misc_feature (1)..(226): tr|K9RGW3|K9RGW3_9CYAN 7-cyano-7-deazaguanine synthase OS=Rivularia sp. PCC 7116 OX=373994 GN=queC PE=3 SV=1
MKAVILLSGGLDSSTVLYKALADGYECYAISFDYQQRHKKELHSAVSVAEKAGVAQHQVIEFDLRQWGGSALTDNSIDLPQERSLKEMSQNIPVTYVPARNTIFLSFASAYAETIAAQRVYIGVNALDYSGYPDCRPDYVQAMQEVFRLGTKQGREGNAINIVTPLIDLKKTEIIKLGNQLGVPWELTWSCYSGGDVACGVCDSCRLRLAAFDELGLTDPVEYAVR

SEQ ID NO: 41846 - protein, 308 aa, Robbsia andropogonis
  misc_feature (1)..(308): tr|A0A0F5K5F6|A0A0F5K5F6_9BURK 7-cyano-7-deazaguanine s ynthase OS=Robbsia andropogonis OX=28092 GN=queC PE=3 S V=1
MALRPVRGTDGLANEGALVLFSGGQDSATCLAWALQRFARVETIGFDYGQRHKIELTCRSAFRAQLLAAGVRETTAGDVEGAAKADAATTTAGGGLDTASASGLNSMTGSNAAASVAPVAMRAFDGWTGRLGVDHMIDLSMLGQISDTAMTRDIAIEARDDGLPNTFVPGRNLLFLTVAATIAYRRGLRVLVGGMCETDYSGYPDCRDDTLKALQIALNLGMDRRMVLQTPLMWLDKAATWALAEQMGGTPLVELVRDHTHTCYVGDRTHFHPWGYGCGNCPACQLRANGYAAYQAERAVSRQDGQGH

SEQ ID NO: 41847 - protein, 244 aa, Robbsia sp.
  misc_feature (1)..(244): tr|A0A494Y7A9|A0A494Y7A9_9BURK 7-cyano-7-deazaguanine s ynthase OS=Robbsia sp. DHC34 OX=2419776 GN=queC PE=3 SV =1
MRESARQGALVLFSGGQDSATCLAWALDRFDHVETLGFDYGQRHRIELECRTQFRERIVEVMPATRARLGDDHVIDLSVLGAISDTAMTRDIEIVTTASGLPNTFVPGRNLMFMTIAAAIAYRRGLRVIVGGMCETDFSGYPDCRDDTLKALQVALNLGMDSRFVLETPLMWLDKADTWRLARSLGGDPLVDLIRMDTHTCYLGERGLLNDWGYGCGECPACKLRKRGYEAYLANEPVGADPTR

SEQ ID NO: 41848 - protein, 1376 aa, Robiginitalea myxolifaciens
  misc_feature (1)..(1376): tr|A0A1I6FXT8|A0A1I6FXT8_9FLAO Amino acid adenylation d omain-containing protein OS=Robiginitalea myxolifaciens OX=400055 GN=SAMN04490243_0883 PE=4 SV=1
MTNPTPTYYPLTPSQKQIWTGQLLFPDSPLYHVPYLFKFNGAINPEVLQNAFQELVNCTDILRIVIGEGNEGLEQQVLPTYTFALERIEMGSADFEKSVEKWALDRSNLPLATNKPLFDAAILENRESGFVLYLNLHHVITDAITASLLFERLSGIYDNLIQGKPALTELELPQYRDCITPLVAQGESHAQDATIRYWQDKQTRLPVFPQLGSPGKPGLDTKTTRVAIPLGSERFKKITELLGQKGFATFTRQMSLTNFFTSVLTAYLYRVSGQRAFTIGTPVHNRYTHQEKKTPGLFIGVYPLINKIDPERSFRELAASNYQELAETLGHCGSGIASTAISRNINCIVNYLPATFTNFGGMPVETKWIHPGYSDPMHYIRLHLTEFAADEPLELSADLSSDVFTAEQINSFPQNFLDILDALVAQPDETLGKISRVNPEMEALFLENFDKTALAPEPKTFLELFQEQVQNQPENTAFTLNDSAVSYAEYQQKANTWAAALKASGCQRGDTVALQLGRTEDYMFALLAIMQLGGIFIPMPSDLPAERRDYILVDSGCSFILSRSTFTTPEGIQVLTPEDLNRAEPNETPEFNSLGTADRAYIIYTSGSTGNPKGVAIQHGALGNYLQWARDRYAIDAQTVMPLFTSLGFDLTLTSTLLPLVAGGRVSLVPEPAIGPDLAALRIWSMEDITAIKLTPSHLRLAGDRNPELPNLKTLIVGGENFQTALAEQATANFGHGVAIYNEYGPTEATIGCIVHRYAPTQSASVPIGSTIAGMGAFILDEHMQLTPPGVPGEIYLSGAGLSTGYINRAELNQERFVFHPESGQRLYRTGDVGIWNTDGVMEYHGRNDEQVKVNGHRVELQEIEAVLAQFPSLEGAAVSLDTINKPLQESEANCRECGLPSEYPSADFDENNVCHLCRSFADYQNEVASYFKTEDDLYQQIRSGTNSDNKYDCLSLLSGGKDSTYVLAKLIDMGFKVLAFTLDNGYISEQAKANIDKIVTALGVDHVYGSTEHMNEIFVDSLERHANVCNGCFKTIYTLSTQIALEHEIPFIVTGLSRGQFFETRLAEETFMDFRDSGKSIDDIILEARKLYHQEDDAIKQLLETEIFNDANNFEKVQFIDFYRYTDVSLSELLRFLKEKIGWERPTDTGRSTNCLINQLGIYVHKKKKGYSNYAFPYSWDVRLGHKTREESLDEINEALDEEEIRKMMGEIGYFEDLEPTDQLVAYVAGDNLPNSQELRAYLAGKLPAYMIPTTFKKVEALPLTPNGKVDKKALQELNPLQLGAATKYVAPRNDLEELLAEHWGEVLQLEKVGIHDNFIDLGGHSLAAIRITGRINRELTLELPLSKIFEHPTVAEYGVYLENKLEELMALDDD

SEQ ID NO: 41849 - protein, 237 aa, Robiginitomaculum sp.
  misc_feature (1)..(237): tr|A0A2G2MTR7|A0A2G2MTR7_9RHOB 7-cyano-7-deazaguanine s ynthase OS=Robiginitomaculum sp. OX=2030823 GN=queC PE= 3 SV=1
MKGQTKALVLFSGGQDSATVLAWALDRYDYVETIGFDYEQRHMVEMQCRQNVLEKIRAAFPDWSKRLGQDHVLDLSVLGKISNTSLTRDIDIVEDGDGPPNTFVPGRNIIFLNFAAALGYRHSIHVLVAGMCEADFSGYPDCRKETLDATMQALSLGMDTEFSLDTPLMFLSKAGAWHLAEKLGGRILVDIINQYSHTCYLGERGERHDWGYGCSTCPACVLRAKGWQVYKSGAFNR

SEQ ID NO: 41850 - protein, 236 aa, Robiginitomaculum sp.
  misc_feature (1)..(236): tr|A0A2G2QYY2|A0A2G2QYY2_9RHOB 7-cyano-7-deazaguanine s ynthase OS=Robiginitomaculum sp. OX=2030823 GN=queC PE= 3 SV=1
  misc_feature (143)..(143): Xaa can be any naturally occurring amino acid
  misc_feature (149)..(149): Xaa can be any naturally occurring amino acid
MTSHTKALVLFSGGQDSATVLAWALDKYDLVETVGFDYEQRHMVEMQCRLDVLAQIRTQFPHWADKLGADRVLDLSVLGEISNTSLTRDIEIVETDDGPPNTFVPGRNIIFLNFAAALGYRYGARDLVAGMCEADFSGYPDCXKDTLDXTMRALSLGMDTEFTLHTPLMFLSKAGAWQLAERLGGRKLVDLINQYSHTCYMGERGTRHDWGYGCGTCPACVLRAKGWAQYTDELST

SEQ ID NO: 41851 - protein, 223 aa, Robinsoniella sp.
  misc_feature (1)..(223): tr|A0A371AXK2|A0A371AXK2_9FIRM 7-cyano-7-deazaguanine s ynthase OS=Robinsoniella sp. MCWD5 OX=1812858 GN=queC P E=3 SV=1
MSVEQESAIVIFSGGQDSTTCLFWAKKKFKDVIAISFDYGQRHKLELECASDICKKYGIEHHILDMGLLNQLAPNSLTRDTIKVDEKAPKEGTPNTFVDGRNLLFLTFGAIFAKQRKIRHLVTGVSQSDYSGYPDCRDIFIKSLNVTLELSMEYPFVIHTPLMWIDKEQTWELAYDLGVFDIIKEETLTCYNGIKGAGCGSCPACTLRKNGLEAFEQNKQREC

SEQ ID NO: 41852 - protein, 227 aa, Rodentibacter genomosp.
  misc_feature (1)..(227): tr|A0A1V3JM18|A0A1V3JM18_9PAST 7-cyano-7-deazaguanine s ynthase OS=Rodentibacter genomosp. 2 OX=1908266 GN=queC PE=3 SV=1
MNISNPNRNRKAIVIFSGGQDSTTCLFQAITDYGKENVEVITFQYGQRHAIELEKAQWIAQDLGIKQTLIDTSVIKAITHNALMDEQAKIEQKNNEIPNTFVDGRNALFLLYAAIYAKGQGIQDIITGVCETDFSGYPDCRDVFIKSMNVTLNLAMDYPFTIKTPLMYLTKAQTWQLADELGVLDYVRHHTHTCYEGVEGGCGQCPSCQLRNQGLWEYLAQKGERNV

SEQ ID NO: 41853 - protein, 228 aa, Rodentibacter genomosp.
  misc_feature (1)..(228): tr|A0A1V3JRD0|A0A1V3JRD0_9PAST 7-cyano-7-deazaguanine s ynthase OS=Rodentibacter genomosp. 2 OX=1908266 GN=queC PE=3 SV=1
MNISNPNHNRKALVIFSGGQDSTTCLFQAIADYGKENVETITFQYGQRHAIELEKAQWIAQDLGIKQTLVDTSVIKAITHNALIDQQTKIEQKNNELPNTFVDGRNALFLLYAAIYAKGQGIQDIITGVCETDFSGYPDCRDVFVKSMNVTLNLAMDYQFNIKTPLMYLTKAQTWQLADELGVLDYVQQHSHTCYEGVEGGCGSCPSCELRNKGLQQYLRQKSGEKNV

SEQ ID NO: 41854 - protein, 227 aa, Rodentibacter heidelbergensis
  misc_feature (1)..(227): tr|A0A1V3IBW4|A0A1V3IBW4_9PAST 7-cyano-7-deazaguanine s ynthase OS=Rodentibacter heidelbergensis OX=1908258 GN= queC PE=3 SV=1
MNISNPNRNRKAVVIFSGGQDSTTCLFQAIADYGKENVEAITFQYGQRHAIELEKARWIAQDLGIKQTLMDTSVINTITHNALMDKQTKIEQKNNELPNTFVDGRNALFLLYAAIYAKGQGIQDIITGVCETDFSGYPDCRDVFIKSMNVTLNLAMDYAFTIKTPLMYLTKAQTWQLADELGVFDYVRTHTHTCYEGIEGGCGQCPSCRLRNQGLSEYLAQKGNGNV

SEQ ID NO: 41855 - protein, 228 aa, Rodentibacter heylii
  misc_feature (1)..(228): tr|A0A1V3KSB1|A0A1V3KSB1_9PAST 7-cyano-7-deazaguanine s ynthase OS=Rodentibacter heylii OX=1906744 GN=queC PE=3 SV=1
MNISNPNHNRKAVVIFSGGQDSTTCLFQAIADYGKENVETITFQYGQRHAIELEKAQWIAQDLGIKQTLVDTSVIKAITHNALIDQQTKIEQKNHELPNTFVDGRNALFLLYAAIYAKGQGIQDIITGVCETDFSGYPDCRDVFVKSMNVTLNLAMDYQFNIKTPLMYLTKAQTWQLADELGVLDYVQQHSHTCYEGVEGGCGNCPSCELRNKGLQQYLRQKGGEKNV

SEQ ID NO: 41856 - protein, 228 aa, Rodentibacter heylii; identical to SEQ ID NO: 40667
  misc_feature (1)..(228): tr|A0A1V3KIW6|A0A1V3KIW6_9PAST 7-cyano-7-deazaguanine s ynthase OS=Rodentibacter heylii OX=1906744 GN=queC PE=3 SV=1

SEQ ID NO: 41857 - protein, 227 aa, Rodentibacter mrazii
  misc_feature (1)..(227): tr|A0A1V3IDT4|A0A1V3IDT4_9PAST 7-cyano-7-deazaguanine s ynthase OS=Rodentibacter mrazii OX=1908257 GN=queC PE=3 SV=1
MNISNPNRNRKAVVIFSGGQDSTTCLFQAIADYGKENVETITFQYGQRHAIELEKAQWITQDLGIKQTLVDTSVIKAITHNALIDQQTKIEQKNNELPNTFVDGRNALFLLYAAIYAKGQGIQDIITGVCETDFSGYPDCRDVFVKSMNVTLNLAMDYQFNIKTPLMYLTKAQTWQLADELGALDYVRDHTHTCYEGVEGGCGKCPSCELRENGLAEYLAQKGGANV

SEQ ID NO: 41858 - protein, 227 aa, Rodentibacter myodis
  misc_feature (1)..(227): tr|A0A1V3JQ93|A0A1V3JQ93_9PAST 7-cyano-7-deazaguanine s ynthase OS=Rodentibacter myodis OX=1907939 GN=queC PE=3 SV=1
MNISNPNHDRKALVIFSGGQDSTTCLFQAIADYGKENVEVITFQYGQRHAIELEKARWIAQDLGIKQTFIDTSVIKAITHNALMDENAKIEQKNNELPNTFVDGRNALFLLYAAIYAKGQGIQDIITGVCETDFSGYPDCRDVFIKSMNVTLNLAMDYQFNLKTPLMYLTKAQTWQLADELGVLDYIRHHTHTCYEGGEGGCGKCPSCVLRDKGLAEYLVQKGGENV

SEQ ID NO: 41859 - protein, 227 aa, Rodentibacter pneumotropicus
  misc_feature (1)..(227): tr|A0A4S2Q1Z2|A0A4S2Q1Z2_9PAST 7-cyano-7-deazaguanine s ynthase OS=Rodentibacter pneumotropicus OX=758 GN=queC PE=3 SV=1
MNISNPNHNRKAVVIFSGGQDSTTCLFQAIADYGKENVEAITFQYGQRHAIELEKAQWIAQDLGIKQTLIDTSVIKAITHNALMDKQAKIEQKNNEIPNTFVDGRNALFLLYAAIYAKGQGIQDIITGVCETDFSGYPDCRDVFIKSMNVTLNLAMDYQFNIKTPLMYLTKAQTWQLADELGVLDYIRTHTHTCYEGIEGGCRQCPSCRLRNQGLWEYLAQKGERNV

SEQ ID NO: 41860 - protein, 80 aa, Rodentibacter pneumotropicus
  misc_feature (1)..(80): tr|A0A448MQM7|A0A448MQM7_9PAST 7-cyano-7-deazaguanine s ynthase OS=Rodentibacter pneumotropicus OX=758 GN=queC_ 2 PE=3 SV=1
MNVTLNLAMDYPFTIKTPLMYLTKAQTWQLADELGVLDYIRTHTHTCYEGIEGGCRQCPSCRLRNQGLWEYLAQKGERNV

SEQ ID NO: 41861 - protein, 227 aa, Rodentibacter rarus
  misc_feature (1)..(227): tr|A0A1V3IJD6|A0A1V3IJD6_9PAST 7-cyano-7-deazaguanine s ynthase OS=Rodentibacter rarus OX=1908260 GN=queC PE=3 SV=1
MNISNPNRNRKAVVIFSGGQDSTTCLFQAIADYGKENVEAITFQYGQRHAIELEKARWIAQDLGIKQTLMDTSVINAITHNALMDKQAKIEQKNNKLPNTFVDGRNALFLLYAAIYAKGQGIQDIITGVCETDFSGYPDCRDVFIKSMNVTLNLAMDYAFTIKTPLMYLTKAQTWQLADELGVLDYVRTHTHTCYEGIEGGCGQCPSCRLRNQGLSEYLAQKGSNNV

SEQ ID NO: 41862 - protein, 227 aa, Rodentibacter ratti
  misc_feature (1)..(227): tr|A0A1V3L8Y8|A0A1V3L8Y8_9PAST 7-cyano-7-deazaguanine s ynthase OS=Rodentibacter ratti OX=1906745 GN=queC PE=3 SV=1
MNISNPNRNRKAIVIFSGGQDSTSCLFQAIADYGKENVEVITFQYGQRHAIELEKAQWIAQDLGIKQTLIDTSVIKAITHNALMDKQAKIEQKNNEIPNTFVDGRNALFLLYAAIYAKGQGIQDIITGVCETDFSGYPDCRDVFIKSMNVTLNLAMDYPFTIKTPLMYLTKAQTWQLADELGVLDYVRHHTHTCYEGVEGGCGQCPSCRLRNQGLSEYLAQKGGNHV

SEQ ID NO: 41863 - protein, 227 aa, Rodentibacter ratti
  misc_feature (1)..(227): tr|A0A1V3LB78|A0A1V3LB78_9PAST 7-cyano-7-deazaguanine s ynthase OS=Rodentibacter ratti OX=1906745 GN=queC PE=3 SV=1
MNISNPNRNRKVVVIFSGGQDSTTCLFQAIADYGKENVEVITFQYGQRHAIELEKAQWIAQDLGIKQTLIDTSVIKAITHNALMDEQAKIEQKNNEIPNTFVDGRNALFLLYAAIYAKGQGIQDIITGVCETDFSGYPDCRDVFIKSMNVTLNLAMDYSFTIKTPLMYLTKAQTWQLADELGVLDYVRHHTHTCYEGVEGGCGQCPSCRLRNQGLSEYFAQKGSNHV

SEQ ID NO: 41864 - protein, 228 aa, Rodentibacter sp.
  misc_feature (1)..(228): tr|A0A1V3JYA5|A0A1V3JYA5_9PAST 7-cyano-7-deazaguanine s ynthase OS=Rodentibacter sp. Ppn85 OX=1908525 GN=queC P E=3 SV=1
MNISNPNRNRKAVVIFSGGQDSTTCLFQAIADYGKENVETITFQYGQRHAIELAKAQWIAQDLDIKQTLVDTSVIKAITHNALIDQQTKIEQKNNELPNTFVDGRNALFLLYAAIYAKGQGIQDIITGVCETDFSGYPDCRDIFIKSMNVTLNLAMDYQFNIKTPLMYLTKAQTWQLADELGVLDYVQQHSHTCYEGVEGGCGCCPSCELRNKGLQQYLRQKYGEKNV

SEQ ID NO: 41865 - protein, 227 aa, Rodentibacter trehalosifermentans; identical to SEQ ID NO: 41861
  misc_feature (1)..(227): tr|A0A1V3INI6|A0A1V3INI6_9PAST 7-cyano-7-deazaguanine s ynthase OS=Rodentibacter trehalosifermentans OX=1908263 GN=queC PE=3 SV=1

SEQ ID NO: 41866 - protein, 256 aa, Roseateles aquatilis
  misc_feature (1)..(256): tr|A0A2D0ALY1|A0A2D0ALY1_9BURK 7-cyano-7-deazaguanine s ynthase OS=Roseateles aquatilis OX=431061 GN=queC PE=3 SV=1
MSNAAASPIPAVHASRRKALVLFSGGQDSTACLAWALDRFAEVETLGFDYGQRHRVELDCRQVVRDQIVTRFPHWAPKLGADHLLDLSLLGQISDTALTQERAIELQANGLPNTFVPGRNLLFLTFAATLAYRRGASVLVGGMCETDFSGYPDCRDNTLKALQVALSLGLDAPMTLETPLMFLTKAQTWALTETLGGEAMNALIVEHTHTCYLGERQTRHDWGWGCGHCPACELRAKGWREFQQARASGAAAPVGA

SEQ ID NO: 41867 - protein, 235 aa, Roseateles depolymerans
  misc_feature (1)..(235): tr|A0A2W5FS57|A0A2W5FS57_9BURK 7-cyano-7-deazaguanine s ynthase OS=Roseateles depolymerans OX=76731 GN=queC PE= 3 SV=1
MNDSRKALVLFSGGQDSTTTLAWALDRYAQVETLGFDYGQRHRIELDCRTVVRERITALRPDWAAKLGEDHLLDLSLLGQISDTALTSERAIELQANGLPNTFVPGRNLLFMTFAATLAYRRGASVLVGGMCETDFSGYPDCRDNTMKALQVALSLGLDAPMTLDTPLMFIDKAATWALAEQLGGEALVQLIVEDTHTCYLGERGQLHSWGHGCGHCPACELRARGYANYRAGAA

SEQ ID NO: 41868 - protein, 256 aa, Roseateles depolymerans
  misc_feature (1)..(256): tr|A0A0U3MX77|A0A0U3MX77_9BURK 7-cyano-7-deazaguanine s ynthase OS=Roseateles depolymerans OX=76731 GN=queC PE= 3 SV=1
MSDHSPASSLPSPLPPAVNASSRKALVLFSGGQDSTACLAWALDRFAEVETLGFDYGQRHRIELDCRQVVRQRIREQFPAWAGKLGEDHLLDLSLLGQISDTALTQERAIELQANGLPNTFVPGRNLLFLTFAATLAYRRGASVLVGGMCETDFSGYPDCRDNTLKALQVALSLGLDTPMTLETPLMFLTKAQTWALTEGLGGAPLNELIIEHTHTCYLGQRETRHAWGWGCGQCPACELRARGYQEFVQARAGGR

SEQ ID NO: 41869 - protein, 251 aa, Roseateles sp.
  misc_feature (1)..(251): tr|A0A1H7P8V0|A0A1H7P8V0_9BURK 7-cyano-7-deazaguanine s ynthase OS=Roseateles sp. YR242 OX=1855305 GN=queC PE=3 SV=1
MSDASLPLTPPNAVIASSRKAVVLFSGGQDSTACLAWALDRFAEVETLGFDYGQRHRIELDCRQTVRQQITAQFPQWAGKLGEDHLLDLSLLGQISDTALTQERAIELQANGLPNTFVPGRNLLFLTFAATLAYRRGASVLVGGMCETDFSGYPDCRDNTLKALQVALSLGLDAPMTVETPLMFITKAQTWALTEALGGTPLNELIIEHTHTCYLGQRETRHAWGWGCGQCPACELRAKGYEAFMQAKARG

SEQ ID NO: 41870 - protein, 214 aa, Roseburia hominis
  misc_feature (1)..(214): tr|A0A395V5F7|A0A395V5F7_9FIRM 7-cyano-7-deazaguanine s ynthase OS=Roseburia hominis OX=301301 GN=DWX93_10745 P E=3 SV=1
MENNFDCLLLASGGMDSTVLAYKLAKENKNVVILFIDYGQHCKDKEYQTLLQVLPEEYVDNVRVIKIGDVYKESNSRMIIEANLWEDNVVAEDMYLPYRNILFISLASAYAQSMGIKDVYTAFINSNHAKEIDCSMEFFTKLESLLYEYGSIRINMPFREMTKTEVAKLGLELNAPIEITYSCQVNSDMPCGACPNCVDRINAINNILEEKING

SEQ ID NO: 41871 - protein, 227 aa, Roseburia sp.
  misc_feature (1)..(227): tr|A0A1Q6U164|A0A1Q6U164_9FIRM 7-cyano-7-deazaguanine s ynthase OS=Roseburia sp. CAG:197_41_10 OX=1897018 GN=qu eC PE=3 SV=1
MKAMVLFSGGIDSTTCLGMAIEKYGAQNVIALSISYGQKHTKEIEASDKIVKYYNVKHIYLDLEKIFQYSDCSLLSHSDKEIPKEAYSEQIKNTNGSPVSTYVPFRNGLFLSSAASIALSLGCSEIYYGAHADDAAGSAYPDCSSAFNNAINEAIYLGSGKQIKIVAPFIASTKDQVVKEGLKLNVPYKYTWSCYEGGEKPCGKCGTCIDRARAFELNGIKDPAMEV

SEQ ID NO: 41872 - protein, 228 aa, Roseburia sp.
  misc_feature (1)..(228): tr|R5TGZ1|R5TGZ1_9FIRM 7-cyano-7-deazaguanine synthase OS=Roseburia sp. CAG:50 OX=1262949 GN=queC PE=3 SV=1
MAEKALVLFSGGVDSTTCLGLAIERYGKENVIALSVSYGQKHEKEIEASKKIAQHYGVEHLYLDLGAIFQYSNCSLLSHSTEEIPEEAYAEQLTKTDGKPVSTYVPFRNGLFLSSAASIALSKDCNVIFYGAHSDDAAGSAYPDCSDAFNQAMKDAIYLGSGNQVTIEAPFVNWTKADVVKKGLELNVPYELTWSCYEGGEKPCGKCGTCIDRAAAFEKNGVKDPALD

SEQ ID NO: 41873 - protein, 73 aa, Roseibaca calidilacus
  misc_feature (1)..(73): tr|A0A0P7WW52|A0A0P7WW52_9RHOB 7-cyano-7-deazaguanine s ynthase OS=Roseibaca calidilacus OX=1666912 GN=queC PE= 3 SV=1
MKTVVICSGGLDSVSLAHILAQDGKLTRLLSFDYGQRHRKELGYAALCAQRLNVPHDIIDLRSIGAALTGSSL

SEQ ID NO: 41874 - protein, 234 aa, Roseibacillus sp.
  misc_feature (1)..(234): tr|A0A2E7AIA8|A0A2E7AIA8_9BACT 7-cyano-7-deazaguanine s ynthase OS=Roseibacillus sp. OX=2024856 GN=queC PE=3 SV =1
MKSGQKVAVLVSGGMDSVVALYEANREHEVVVALSFDYGSKHNHREIPFAREHAESLGVPHEVIDLGFMNEHFRSDLLQSGGEIPEGHYEEETMKATVVPFRNGIMLAIAAGLAESRGAEGLVIAAHSGDHAIYPDCRGEFMEAMGEAIQLGTYETMSLLRPFIALRKEDIAARGAELGVDFSRTWSCYKGGEIHCGKCGTCVERREAFAVAGISDPTEYLEAGALPVKGAGEE

SEQ ID NO: 41875 - protein, 236 aa, Roseibacillus sp.
  misc_feature (1)..(236): tr|A0A2E5D9W0|A0A2E5D9W0_9BACT 7-cyano-7-deazaguanine s ynthase OS=Roseibacillus sp. OX=2024856 GN=queC PE=3 SV =1
MKSGQKVAVLVSGGMDSVVALYEAHREHEVVVALSFDYGSKHNHREIPFAREHAESLGVPHEVIDLGFMNEHFRSDLLQSGGEIPEGHYEEETMKATVVPFRNGIMLAIAAGLAESRGAEGLVIAAHSGDHAIYPDCRGEFMEAMGEAIQQGTYETVNLLRPFIALRKEDIAARGAELGVDFSRTWSCYKGGEIHCGKCGTCVERREAFEIAGLSDVTEYHGTGLLQVKEEGETSC

SEQ ID NO: 41876 - protein, 229 aa, Roseibium hamelinense
  misc_feature (1)..(229): tr|A0A562SLL4|A0A562SLL4_9RHOB 7-cyano-7-deazaguanine s ynthase OS=Roseibium hamelinense OX=150831 GN=queC PE=3 SV=1
MKTLVICSGGMDSVTLAHKVAREHELIGLVSFDYGQRHKKELDFARACADDLETEHVLIDIAHIGAQLTGSALTDDVEVPDGHYAEESMRITVVPNRNAIMLTIAYGIASARGAEAVATAVHGGDHFIYPDCRPAFTESFETMQRHALDGLGEVKLYTPYVHKPKDAIAAEGLKLGVDYRKTWSCYKGGAIHCGRCGTCVERREAFHLAGGIDPTDYADSDFWKAACDV

SEQ ID NO: 41877 - protein, 229 aa, Roseibium sp.
  misc_feature (1)..(229): tr|E2CGX9|E2CGX9_9RHOB 7-cyano-7-deazaguanine synthase OS=Roseibium sp. TrichSKD4 OX=744980 GN=queC PE=3 SV=1
MKTLVVCSGGMDSVTLAHKVQRENQLIALLSFDYGQRHRKELDCAKQCADDLGVEHILIDISGIGAKLSGSALTDDIDVPDGHYAEDTMKITVVPNRNAIMLTIAFGIAAARGANAVAAAVHGGDHFIYPDCRPGFVEAFETMQRHALEGMNDIRLYTPFVHLSKGDIAAESARLGVDHRTSWSCYKGENLHCGRCGTCVERREAFHLAQVPDPTPYEDPDFWKETCNV

SEQ ID NO: 41878 - protein, 247 aa, Roseimaritima ulvae
  misc_feature (1)..(247): tr|A0A5B9QYA4|A0A5B9QYA4_9PLAN 7-cyano-7-deazaguanine s ynthase OS=Roseimaritima ulvae OX=980254 GN=queC PE=3 S V=1
MSAKAERRPAVVLLSGGLDSATCLAIANHEGFAVHAISFRYGQRHQYELDCARTLSQQLGAVSHRVVDINLAQFGGSALTDDAIDVPKSDSVDALAGGIPVTYVPARNTVFLSLALALAETLDCRDLFVGVNALDYSGYPDCRPEFIEAFERMANLATRIGVEQPGAIRIHAPLLHWTKAQIIAKGVELGVDYAATNSCYDPGEQGTPCGRCDACLLRSKGFEENGLVDPGAGDKETRRQGDKETRR

SEQ ID NO: 41879 - protein, 228 aa, Roseimicrobium gellanilyticum
  misc_feature (1)..(228): tr|A0A366HIX5|A0A366HIX5_9BACT 7-cyano-7-deazaguanine s ynthase OS=Roseimicrobium gellanilyticum OX=748857 GN=q ueC PE=3 SV=1
MSTLVLLSGGMDSVTALYWAAKEKGVLAAVSFDYGSKHNAKEIPMAEWHAAQLGVKHDVIHLDFINRHFTSDLLQSGGEIPDGHYEEASMKRTVVPFRNGIMLSIACGLAESHGAEALVIAAHSGDHAIYPDCREPFMQAMADAMRSGTYVGIHLLRPFIDCDKAEIVRRGVKLGIDYAKTWSCYKGGNIHCGTCGTCVERREAFINAGVPDPTEYLSTEALPHRPGG

SEQ ID NO: 41880 - protein, 233 aa, Roseinatronobacter monicus
  misc_feature (1)..(233): tr|A0A543KBD3|A0A543KBD3_9RHOB 7-cyano-7-deazaguanine s ynthase OS=Roseinatronobacter monicus OX=393481 GN=queC PE=3 SV=1
MRTNLICSGGLDSVSLAHILADQGVLKRLTSFDYGQRHRKELDYAQACAERLGVAHHVIDMRSIGAALTGSALTDDIAVPDGHYAEDTMKVTVVPNRNAIMLSIAYGISAAQDDDTVATAVHGGDHFIYPDCRPLFTQAFDAMQRAALDGYADIALHTPFVNRSKADIVREGARVDTPFAQTWSCYKGGAQHCGRCGTCVERREAFHLAGIPDLTAYEDPEFWRQAIGRREAV

SEQ ID NO: 41881 - protein, 233 aa, Roseinatronobacter thiooxidans
  misc_feature (1)..(233): tr|A0A2W7Q128|A0A2W7Q128_9RHOB 7-cyano-7-deazaguanine s ynthase OS=Roseinatronobacter thiooxidans OX=121821 GN= queC PE=3 SV=1
MKTNVICSGGLDSVSLAHILARQGALARLTSFDYGQRHRKELDYAQACATRLCVPHHVIDMRAVGAALTGSALTDDIAVPDGHYAEDTMKITVVPNRNAIMLSIAYGISAAQGDDAVATAVHGGDHFIYPDCRPQFTQAFDAMQRAALDGYAQIALHTPFVHRSKADIVRDGARVDTPFAQTWSCYKGGAQHCGRCGTCVERREAFDLAGIPDPTPYEDPTFWKQAIASREAI

SEQ ID NO: 41882 - protein, 600 aa, Roseisalinus antarcticus
  misc_feature (1)..(600): tr|A0A1Y5TYV0|A0A1Y5TYV0_9RHOB 7-cyano-7-deazaguanine s ynthase OS=Roseisalinus antarcticus OX=254357 GN=queC P E=3 SV=1
MNVHGPSKNVNLRIDYISRTMLSNLPDLLIDLLEVAAYVYCADQRLVRGSEQLSKFGENWRRSLRFSIPVRELEVWQDPEVQDALIDTLGFLSDDSYTFDFRQAETPVQPKELYFQDLIDPADEHDEVALFSGGVDSFAGAVTDLVANGRSLTLVGHYSSTKVRSVQEGLIAELKRKGFDRRLSYVPVWVSNEGVRAREFTQRTRSFLFACLGFVVARMSGKDSFSFYENGVVSINLPLAGDVVGGRATRTTHPKVLRGLEHLFSLLLDRQIQIHTPLQWLTKTEVTEKIAAAGMVDLLSQTVSCTRPRKWTEGQKHCGVCSQCIDRRFGILAAGLGEHEPPARYMHDLLLDDRSGGDDLRMALAYVSLFKRISTTTKARFLVDFPEIVSAVGHFPGVPTAEAGDRLFDLFQRHANSVEDVISSALREYSTALFRNELPAASLLVACNNRGHVEVAPPSTYDADMKAFMDRLSVAPLEFAFDDDQERVYFKGAMALEGANFKLVAALIEAFRTAKKRRSEVPYRSAPDLAQCLGISDQSMRQQLKRLREAIEPLNVSLGIPMDQDSFIQTKERAGYRINPQCCEISVADITGSISSASTD

SEQ ID NO: 41883 - protein, 231 aa, Rosenbergiella nectarea
  misc_feature (1)..(231): tr|A0A1H9IHQ1|A0A1H9IHQ1_9ENTR 7-cyano-7-deazaguanine s ynthase OS=Rosenbergiella nectarea OX=988801 GN=queC PE =3 SV=1
MKKAVVVFSGGQDSTTCLVQAIQHYDEVHCITFDYGQRHQQEIDIAKQLTERLGVAAHKVMDVTLLNELAISSLTQDNIPVPGYQPDATGLPSTFVPGRNILFLTLASIYAYQVEAEAVITGVCETDFSGYPDCRDEFVKALNQAVVLGMAKDVRYETPLMWLNKAETWALADYWGQLPLIKDHTLTCYNGIAGSGCGECAACHLRARGLEEYLNAPEETLQHLKQKNQLS

SEQ ID NO: 41884 - protein, 230 aa, Roseobacter sp.
  misc_feature (1)..(230): tr|A6FW25|A6FW25_9RHOB 7-cyano-7-deazaguanine synthase OS=Roseobacter sp. AzwK-3b OX=351016 GN=queC PE=3 SV=1
MKTIVICSGGLDSVSLAHKVAAEHELAGLLSFDYGQRHAKELDFAARCAERLGVAHRVVDLRAVGAALTGSALTDDLDVPDGHYAEETMKITVVPNRNAIMLAVGFGMAAAQKADAVATAVHGGDHFIYPDCRPDFIAAFQAMEDHALDGVAKVQLYTPFVTGSKADIVTEGARHGTPFEDTWSCYKGGEVHCGRCGTCVERREAFHLAGIADPTVYADADFWRATVGVK

SEQ ID NO: 41885 - protein, 235 aa, Roseobacter sp.
  misc_feature (1)..(235): tr|A0A2E9YTM6|A0A2E9YTM6_9RHOB 7-cyano-7-deazaguanine s ynthase OS=Roseobacter sp. OX=1907202 GN=queC PE=3 SV=1
MKTIVVCSGGLDSVSLAHMVANENQLTRLVSFDYGQRHRKELDFAAACAERLGVPHDIIDLRAIGSALAGSALTDDIDVPDGHYAEESMRVTVVPNRNAIMLTIAFGVAAVHGDQAVATAVHGGDHFIYPDCRPGFVQAFEKMQKAAFEGYAEATLYTPFVTRTKADIVIAGQRHNTPFAETWSCYKGGELHCGRCGTCVERREAFHLAGIDDPTVYEDADFWSEAIAAKDAPHV

SEQ ID NO: 41886 - protein, 235 aa, Roseococcus sp.
  misc_feature (1)..(235): tr|A0A4R0YG24|A0A4R0YG24_9PROT 7-cyano-7-deazaguanine s ynthase OS=Roseococcus sp. SYP-B2431 OX=2496640 GN=queC PE=3 SV=1
MGRGKVAGMTNGALVLLSGGQDSATCLAWALDRFDHVETLGFDYRQRHAVELDCRAALREGMASPRLGPDHTIDLGVLGQISETALTRDTEIALREDGLPNTFIPGRNLIFLTFAAALAYRRGLKHIVGGMCETDYSGYPDCRDDTIKALQAAINLGMNTRLVLHTPLMWLDKAGTWRLAESLGGPRLVELIRTESHSCYKGERSKLRPWGFGCGSCPACELRAAGWAAYAARAA

SEQ ID NO: 41887 - protein, 648 aa, Roseococcus sp.
  misc_feature (1)..(648): tr|A0A4R0Y934|A0A4R0Y934_9PROT Uncharacterized protein OS=Roseococcus sp. SYP-B2431 OX=2496640 GN=EJV46_07840 PE=4 SV=1
MRELRLLCGGARSSGRKGPEMALDIGIRGAGRGAFAMTLHQVSRQMLANLPDRLWDLLSIASYIHLADRMVPRDGPSMPNLGENWRRTLSFVIAVRDPDFWNLPDVRESLRKTIGFLSGDRYQFEFVELAGAPAWQPFLDIAGSGAAPAFQPAEVILFSGGLDSLAGAVDALLVKRRKAALVSYQSAPMVQAIQSRLVEALRSRAGPDRLVHIGLGLTNAGEMVEPTQRTRSFLFAVLGLLVARLHGLREVCFYENGVVSTNLPLASHVLGTRATRTTHPKVLELYGRLFSRVAEADIRIRNPFFWDTKADVVRRIAEGGCGELIQPSFSCGSTRGAAMTKGRHCGVCTQCLDRRFGILAADCGHLEPASNYAVDLMRGPRKPGIEAVTAEAYVLAAHTWRQSTQEHFLGAHGEAFRLLPHLGLRTDEAAARLHRLHVRHGQNVMRIVTETARTDDVLGERLDLPDHSLLAMIQGPLAQDVQIRDPAENEATPERQAADRKIKELPRPITLWLDMHRREARIGNVAVLQRKHFELVRKLLPKFQDGIRAQRGSPGFSFMGTKQLADAMGVTEATTRQLVRALRLKIAEQFHQQLGIAPAPDDVIESVSWAGYRLNPALALVGSHESDQCRSSDLTTPSRASRLSHPAP

SEQ ID NO: 41888 - protein, 229 aa, Roseomonas aestuarii
  misc_feature (1)..(229): tr|A0A2U1V950|A0A2U1V950_9PROT 7-cyano-7-deazaguanine s ynthase OS=Roseomonas aestuarii OX=568898 GN=queC PE=3 SV=1
MDEGALVLFSGGQDSATCLAWALDRFPRVETLGFDYGQRHRVELECRAAFREALPAAWQARLGPDHTLALDALGAVSDTALTRETEIAMQADGLPNTFVPGRNLVFLTFAAALAYRRGLRHIVGGMCETDFSGYPDCRDDTIKAMQVALNLGMQRRFVLHTPLMWLSKAETWELAEKLGGQPLVEDIVERTHTCYRGERGARHPWGHGCAACPACELRARGWAEYQSRR

SEQ ID NO: 41889 - protein, 248 aa, Roseomonas cervicalis
  misc_feature (1)..(248): tr|D5RRW2|D5RRW2_9PROT 7-cyano-7-deazaguanine synthase OS=Roseomonas cervicalis ATCC 49957 OX=525371 GN=exsB P E=3 SV=1
MQDSITPQITPDGLLGRHTAEDGALVLFSGGQDSATCLAWALTRFARVETLGFDYGQRHRIELECRAGFRDGLPEDWQARLGPDHTLRLDALGELSDTALTRETEIAMQADGLPNTFVPGRNLLFLTFAAALAYRRGLRHIVGGMCETDFSGYPDCRDDTLKALQVALNLGMERRFVLHTPLMWLDKGETWELAERLGGQKLVCDIVEKTHTCYRGERGERHPWGHGCAACPACELRARGWAEYRSRR

SEQ ID NO: 41890 - protein, 244 aa, Roseomonas deserti
  misc_feature (1)..(244): tr|A0A1V2GWJ8|A0A1V2GWJ8_9PROT 7-cyano-7-deazaguanine s ynthase OS=Roseomonas deserti OX=1817963 GN=queC PE=3 S V=1
MTEKALVLFSGGQDSATCLAWALSRFDHVETLGFDYGQRHRIELECRDDFRRTLPADWQAKLGPDHTLALDALKEISDTALTRETEIAMREDGLPNTFVPGRNIVFLTFAAALAYRRGLRHVVGGMCETDYSGYPDCRDDTIKALQVALNLGMAQRFVLHTPLMWLDKAQTWELAEQLGGRKLVCDIVEKTHTCYKGERGELHPWGHGCGACPACELRARGWAEYETRAHARMHPPRNGKLADD

SEQ ID NO: 41891 - protein, 239 aa, Roseomonas gilardii
  misc_feature (1)..(239): tr|A0A1L7ADQ3|A0A1L7ADQ3_9PROT 7-cyano-7-deazaguanine s ynthase OS=Roseomonas gilardii OX=257708 GN=queC PE=3 S V=1
MTDNLSGDGALVLFSGGQDSATCLAWALDRFAHVETLGFDYGQRHRVELECRDTFRRLLAERFPHWAAKLGPDHTLPLEALSQVSDTAMTAEIAIRMREDGLPNTFVPGRNLLFVTFAAALAYRRGLRHLVGGMCETDYSGYPDCRDDTLKALQVAINLGMERRFVLHTPLMWRDKPATWRLARDLGGQELVEMILEDSHTCYLGDRTHRHPWGYGCGTCPACELRARGWAGFVAQPVD

SEQ ID NO: 41892 - protein, 239 aa, Roseomonas gilardii
  misc_feature (1)..(239): tr|A0A379NBI7|A0A379NBI7_9PROT 7-cyano-7-deazaguanine s ynthase OS=Roseomonas gilardii subsp. rosea OX=243956 G N=queC PE=3 SV=1
MTDNLSGDGALVLFSGGQDSATCLAWALDRFAHVETLGFDYGQRHRVELECRDTFRRRLAERFPHWAAKLGPDHTLPLEALSQVSDTAMTAEIAIRMREDGLPNTFVPGRNLLFVTFAAALAYRRGLRHLVGGMCETDYSGYPDCRDDTLKALQVAINLGMERRFVLHTPLMWRDKPATWRLARDLGEQALVEMILEDSHTCYLGDRTHRHPWGYGCGTCPACELRARGWEGFVARPAG

SEQ ID NO: 41893 - protein, 239 aa, Roseomonas mucosa
  misc_feature (1)..(239): tr|A0A4Y1MXK7|A0A4Y1MXK7_9PROT 7-cyano-7-deazaguanine s ynthase OS=Roseomonas mucosa OX=207340 GN=queC PE=3 SV= 1
MTDNLSGDGALVLFSGGQDSATCLAWALDRFAHVETLGFDYGQRHRVELECRDTFRRRLAERFPHWAAKLGPDHTLPLEALSQVSDTAMTAEIAIRMREDGLPNTFVPGRNLLFVTFAAALAYRRGLRHLVGGMCETDYSGYPDCRDDTVKALQVAINLGMERRFVLHTPLMWRDKPATWRLAHDLGGQALVEMIVEDSHTCYLGDRTHRHRWGYGCGTCPACELRARGWEGFVAQPLG

SEQ ID NO: 41894 - protein, 239 aa, Roseomonas mucosa
  misc_feature (1)..(239): tr|A0A1S8D684|A0A1S8D684_9PROT 7-cyano-7-deazaguanine s ynthase OS=Roseomonas mucosa OX=207340 GN=queC PE=3 SV= 1
MTDNLSGDGALVLFSGGQDSATCLAWALDRFAHVETLGFDYGQRHRVELECRDTFRRRLAERFPHWAAKLGPDHTLPLEALSQVSDTAMTAEIAIRMREDGLPNTFVPGRNLLFVTFAAALAYRRGLRHLVGGMCETDYSGYPDCRDDTLKALQVAINLGMERRFVLHTPLMWRDKPATWRLAHDLGGQALVEMIVEDSHTCYLGDRTHRHRWGYGCGTCPACELRARGWEGFVAQPLG

SEQ ID NO: 41895 - protein, 244 aa, Roseomonas nepalensis
  misc_feature (1)..(244): tr|A0A502G4I9|A0A502G4I9_9PROT 7-cyano-7-deazaguanine s ynthase OS=Roseomonas nepalensis OX=1854500 GN=queC PE= 3 SV=1
MTDTANDGALVLLSGGQDSTTCLAWALDRFPRVETLGFDYGQRHRVELDRRPALRRGLAALNPAWAARLGEDHSLALDALGALSDTALTRDTEIAMREDGLPNTFVPGRNLLFLTFAAALAYRRGLRHLVGGMCETDFSGYPDCRDDTIKALQVALNLGMDRRFVLHTPLMWIDKAETWRLARRLGGDPLVRLVVEETHTCYRGERGAMHPWGHGCGTCPACELRAAGWRGFVAEGVEEAPRGG

SEQ ID NO: 41896 - protein, 189 aa, Roseomonas nepalensis
  misc_feature (1)..(189): tr|A0A502FIN9|A0A502FIN9_9PROT 7-cyano-7-deazaguanine s ynthase OS=Roseomonas nepalensis OX=1854500 GN=EAH89_21 460 PE=3 SV=1
MSAPPTSAGTAIVLLSGGLDSAACAHLLQQAGHSVTGLFLSYGQQAAGPERYAAQKIARHLGISLCKLTLSSGSRFGAGELTGRNAMFVLAALFFGRIAGGSIVLGIHAGTPYYDCSPAFAGAMDRLVAEHTDGRVRVLTPLLDWSKADVLAYCRDASIPISKTYSCEAGAVPPCGTCASCRDRAILGC

SEQ ID NO: 41897 - protein, 233 aa, Roseomonas oryzae
  misc_feature (1)..(233): tr|A0A5B2TF46|A0A5B2TF46_9PROT 7-cyano-7-deazaguanine s ynthase OS=Roseomonas oryzae OX=1608942 GN=queC PE=3 SV =1
MDDGALVLFSGGQDSATCLAWALNRFGRVETLGFDYGQRHRVELDCRAEFRAGLKPEWQARLGPDHTLALDALGAVSDTALTRETEISMGESGLPNTFVPGRNIVFLTFAAALAYRRGLRHIVGGMCETDYSGYPDCRDDTIKALQVALNLGIDPGEKKRFVLHTPLMWLDKAQTWKLAEDLGGPALVADIAEKTHTCYLGERGTRHEWGHGCGTCPACALRARGWMAYRSGC

SEQ ID NO: 41898 - protein, 229 aa, Roseomonas rhizosphaerae
  misc_feature (1)..(229): tr|A0A2C7ACZ4|A0A2C7ACZ4_9PROT 7-cyano-7-deazaguanine s ynthase OS=Roseomonas rhizosphaerae OX=1335062 GN=queC PE=3 SV=1
MDEGALVLFSGGQDSATCLAWALDRFPHVETLGFDYGQRHRVELECRAAFRATLPAAWQARLGPDHTLALDALGAVSDTALTRETEIAMREDGLPNTFVPGRNIVFLTFAAALAYRRGLRHIVGGMCETDFSGYPDCRDDTIKALQVALNLGMERRFVLHTPLMWLDKAQTWELAERLGGRKLVAEIVEQTHTCYRGERGARHPWGHGCAACPACELRAKGWAEYQSRR

SEQ ID NO: 41899 - protein, 238 aa, Roseomonas rosea
  misc_feature (1)..(238): tr|A0A1M6NVF7|A0A1M6NVF7_9PROT 7-cyano-7-deazaguanine s ynthase OS=Roseomonas rosea OX=198092 GN=queC PE=3 SV=1
MQDEGALVLFSGGQDSTTCLAWALERFGRVETVGFDYGQRHRIELECRRTVAEGLGALKPEWAARLGEDHMVDLASLGAISETSLTRDVAIEMETGGLPNTFVPGRNLLFLTFAAALAYRRGLRHIIAGVCETDYSGYPDCRDDTIKALQVALNLGMERRFVLHTPLMWIDKAETWRLSQRLGGEALVRLIVEDTHTCYRGERGPMHPWGHGCGTCPACELRAEGWRGFAEGGASRPV

SEQ ID NO: 41900 - protein, 239 aa, Roseomonas sp.; identical to SEQ ID NO: 41894
  misc_feature (1)..(239): tr|A0A1Q2YZE2|A0A1Q2YZE2_9PROT 7-cyano-7-deazaguanine s ynthase OS=Roseomonas sp. TAS13 OX=1926319 GN=queC PE=3 SV=1

SEQ ID NO: 41901 - protein, 232 aa, Roseomonas sp.
  misc_feature (1)..(232): tr|A0A3A9JCV1|A0A3A9JCV1_9PROT 7-cyano-7-deazaguanine s ynthase OS=Roseomonas sp. Z24 OX=2382222 GN=queC PE=3 S V=1
MSDGALVLFSGGQDSATCLAWALERFSHVETMGFDYGQRHKVELECRAAFRTDIATHFPHWAPKLGEDHSLKLDALAAVSDTALTRQTEIAMQENGLPNTFVPGRNLIFLTFAAALAYRRGLRHIVTGVCETDFSGYPDCRDDTIKALQVALNLGMEQRFVLHTPLMWIDKAETWRLAEGLGGTVLVDSIVEDTHTCYLGDRAHRHPWGYGCGTCPACELRAKGYREYRACT

SEQ ID NO: 41902 - protein, 270 aa, Roseomonas stagni
  misc_feature (1)..(270): tr|A0A1I4CA94|A0A1I4CA94_9PROT 7-cyano-7-deazaguanine s ynthase OS=Roseomonas stagni DSM 19981 OX=1123062 GN=qu eC PE=3 SV=1
MIPSVAGAASRPPAAGEAANAARRQSGEPSARSARPAIEGERSDKALVLFSGGQDSATCLAWALDRYAAVETLGFDYGQRHVVELETRAAFRAHVAAHPVWGGRLGADHIIKIDALGAISETSLTRDVAIEMETGGLPNTFVPGRNLIFLTFAAALAFRRGLKHIVTGVCETDYSGYPDCRDDTIKALQVALNLGMEKRFVLHTPLMWRDKAATWQLAQELGGDGLVEAIRTITHSCYLGDRTPHEWGAGCGHCPACDLRERGWRKWKAA

SEQ ID NO: 41903 - protein, 230 aa, Roseovarius aestuarii
  misc_feature (1)..(230): tr|A0A1X7BMY5|A0A1X7BMY5_9RHOB 7-cyano-7-deazaguanine s ynthase OS=Roseovarius aestuarii OX=475083 GN=queC PE=3 SV=1
MKTLVICSGGLDSVSLAHLVAAEHTLVGLISFDYGQRHRKEVEFAARAANRLGVPHDLIDMRHIGRHLSGSALTDDLDVPDGHYAEDNMKVTVVPNRNAIMLAIAFGMAAAKGADAVAAAVHGGDHFIYPDCRPDFIDAFQAMQDKALDGYASVQLFTPFVHVPKSAIVTAGAKHGTPFADTWSCYKGGDLHCGRCGTCVERREAFDIAGVKDPTAYADPDFWKSAVEAH

SEQ ID NO: 41904 - protein, 231 aa, Roseovarius albus
  misc_feature (1)..(231): tr|A0A1X6ZH92|A0A1X6ZH92_9RHOB 7-cyano-7-deazaguanine s ynthase OS=Roseovarius albus OX=1247867 GN=queC PE=3 SV =1
MKTIVICSGGLDSVSLAHRVAAEHELCGLLSFDYGQRHAKEVEFAADCAKRLGVPHKVVDIRSIGAALSGSALTDDIDVPDGHYAEETMKITVVPNRNAIMLAIGFGMAAAQQADAVAVAVHGGDHFIYPDCRPGFINAFQAMQTEALDGYADVQLYAPYVNISKAQIVEDGVKHNTPFGATWSCYKGGDRHCGRCGTCVERREAFHLAGVADPTEYADPDFWQTAVEGAQ

SEQ ID NO: 41905 - protein, 230 aa, Roseovarius atlanticus
  misc_feature (1)..(230): tr|A0A0T5NTJ2|A0A0T5NTJ2_9RHOB 7-cyano-7-deazaguanine s ynthase OS=Roseovarius atlanticus OX=1641875 GN=queC PE =3 SV=1
MDTIVICSGGLDSVSLAHKVAGEGTLRGLLSFDYGQRHVKEVEFAAACAKRLGVPHKIVDISGVGAALSGSALTDDVEVPDGHYAEETMKITIVPNRNAIMLTIAFGMAAAEKADAVAAAVHGGDHFIYPDCRPGFVEAFQAMQDKALEGVAEVRLYTPFLTGSKADIVTEGAKWGTPFAETWSCYKGGDVHCGRCGTCVERREAFHLAGVDDPTDYVDAQFWKAATGVA

SEQ ID NO: 41906 - protein, 613 aa, Roseovarius atlanticus
  misc_feature (1)..(613): tr|A0A0T5NXP9|A0A0T5NXP9_9RHOB Uncharacterized protein OS=Roseovarius atlanticus OX=1641875 GN=XM53_06690 PE=4 SV=1
MTPPEHHIRCLAPLTKSGGDEEVRLEIDDKPVGVRLRIGRLNEQLVAGLPDRAFDLLEIAAVVYGADAAVSRGGPVDQQMGRKWHRRFIVDMPVRDRDFWARDDVTRLLEETLMFLSGDRFEFGFSQKRYPEAERSKFFKFDAESSWKADRVLMFSGGLDSFAGALEEIAEQRQRVALVSHFSASKIAPVQRNLHKALIGKFGGDFCRHVPVQVQMKGRSLKEGTHRSRSFLFAVLGAITAQAFEQNRVSFHENGVVSLNLPPVNNVVGTRATRTTHPQTLTRFTGFFAKVFEKGMRIDNPLFWRTKTDVVKAISRLGMNDHIAHTRSCADVHNQTKQHVHCGRCSQCIDRRFAMLAAGLTQFDPEEAYKVALMDDARNGAIDREVALSYVRNAQVFEHMTPEVLERTFPAVLDAVGHLDYPPATALTMIADLLNRHGASVSGVMHNTFDSRDADSFPEGSLPRLYGDVQRQALLAAIPDQAAPPDPPMPHPFILEVDTRRRRITIDDRVTFERNATASLLIELATLWLTGVGQGLPPLDYPFLQAAQLAQHLELASDEALRRRVMRARSYLRQRFASSGLDEALGGELIENNPWQGYRLAPDRVIVRKIEQD

SEQ ID NO: 41907 - protein, 232 aa, Roseovarius azorensis
  misc_feature (1)..(232): tr|A0A1H7WJB0|A0A1H7WJB0_9RHOB 7-cyano-7-deazaguanine s ynthase OS=Roseovarius azorensis OX=1287727 GN=queC PE= 3 SV=1
MKTIVICSGGLDSVSLAHRVAAEHVLMGLLSFDYGQRHAKELEFAAACAQRLGVAHRVVDIRQIGAALSGSALTDDVAVPDGHYAEETMRITVVPNRNAIMLAIAFGMAAAEKADAVATAVHGGDHFIYPDCRPGFIEAFQAMQDRALEGYAEVKLYTPYVEGSKADIVRDGARHGTPFAETWSCYKGGARHCGRCGTCVERREAFHLAGVVDPTVYEDRDFWLTAVAGRGA

SEQ ID NO: 41908 - protein, 232 aa, Roseovarius gaetbuli
  misc_feature (1)..(232): tr|A0A1X6YEY7|A0A1X6YEY7_9RHOB 7-cyano-7-deazaguanine s ynthase OS=Roseovarius gaetbuli OX=1356575 GN=queC PE=3 SV=1
MDTIVICSGGLDSVSLAHKVAAEHTLKGLLSFDYGQRHSKELGFAAACATRLGVPHSVVDIRAIGAALGGSALTDDIAVPDGHYAEETMKATIVPNRNAIMLSIGFGMAAAQKVDAVATAVHGGDHFIYPDCRPGFIDAFQAMQDRALEGYADIRLYTPYVTGSKADIVTDGAAHGTPFGETWSCYKGGANHCGRCGTCVERREAFHLAGVIDPTLYDDPDFWLTALAERGA

SEQ ID NO: 41909 - protein, 230 aa, Roseovarius halotolerans
  misc_feature (1)..(230): tr|A0A1X6YDT8|A0A1X6YDT8_9RHOB 7-cyano-7-deazaguanine s ynthase OS=Roseovarius halotolerans OX=505353 GN=queC P E=3 SV=1
MKTIVICSGGLDSVSLAHKVAAEQDLAGLLSFDYGQRHAKELDFARLCAERLGVMHRVVDLRGVGAALSGSALTDDVDVPDGHYAEETMKVTVVPNRNAIMLAVGFGMAAAEGADAVAVAVHGGDHFIYPDCRPGFIDAFQAMEARALEGVADVTLYAPFVNGSKADIVTEGARHGTPFAQTWSCYKGGEVHCGRCGTCVERREAFHLAGVADPTEYGDPDFWRETVGVA

SEQ ID NO: 41910 - protein, 230 aa, Roseovarius indicus
  misc_feature (1)..(230): tr|A0A0T5P313|A0A0T5P313_9RHOB 7-cyano-7-deazaguanine s ynthase OS=Roseovarius indicus OX=540747 GN=queC PE=3 S V=1
MDTIVICSGGLDSVSLAYKVAAEHRLRGLLSFDYGQRHVKEVEYAAACARKLGVPHKVVDISTVGAALSGSALTDDVDVPDGHYAEETMKITIVPNRNAIMLAIAFGMAAAEKADAVAAAVHGGDHFIYPDCRPGFIDAFQAMQNHALEGVAEVQLYTPFVTISKADIVSEGAKHGTPFAETWSCYKGGAVHCGRCGTCVERREAFDIAGVEDPTVYADPDYWREAVERA

SEQ ID NO: 41911 - protein, 206 aa, Roseovarius indicus
  misc_feature (1)..(206): tr|A0A0T5P4H7|A0A0T5P4H7_9RHOB 7-cyano-7-deazaguanine s ynthase OS=Roseovarius indicus OX=540747 GN=SAMN0448803 1_106104 PE=3 SV=1
MKKAVVMVSGGLDSTTVCYLLINEGTEVHPIFFDYGQHCAETEWAKVQEVLPQEAMPPERLNISDVFKGSPSRMIVEADLWKEAISDDDLYLPYRTMLFFAVAAARAQTLRILDVYSGFINSNHAKEIDCSTEFMNGLEELSRGVGAVRFHAPFREKAKVDVVRRALDLGVPIGRTFSCQASSSFPCGACPNCVERLNALVGAGLA

SEQ ID NO: 41912 - protein, 230 aa, Roseovarius litoreus
  misc_feature (1)..(230): tr|A0A1M7F4B5|A0A1M7F4B5_9RHOB 7-cyano-7-deazaguanine s ynthase OS=Roseovarius litoreus OX=1155722 GN=queC PE=3 SV=1
MKTIVICSGGLDSVSLAHKVAAEHELAGLLSFDYGQRHAKELDFAARCAERLGVAHRVVDLRAVGAALTGSALTDDLDVPDGHYAEETMKITVVPNRNAIMLAVGFGMAAAQKADAVATAVHGGDHFIYPDCRPDFIAAFQAMEDHALDGVAKVQLYTPFVTGSKADIVTEGARHGTPFEDTWSCYKGGEVHCGRCGTCVERREAFHLAGITDPTVYADADFWRATVGVE

SEQ ID NO: 41913 - protein, 232 aa, Roseovarius lutimaris
  misc_feature (1)..(232): tr|A0A1I5FE67|A0A1I5FE67_9RHOB 7-cyano-7-deazaguanine s ynthase OS=Roseovarius lutimaris OX=1005928 GN=queC PE= 3 SV=1
MDTIVICSGGLDSVSLAHKVAAEHTLKGLLSFDYGQRHAKELGFAAACATRLGVPHEVIDIRAIGAALGGSALTDDIAVPDGHYAEESMKVTIVPNRNAIMLTIAFGMAAAQKVDAVATAVHGGDHFIYPDCRPGFIDAFQTMQDRALEGYADIRLYTPYVSGSKADIVTDGAAHGTPFAQTWSCYKGGTNHCGRCGTCVERREAFHSADVIDPTLYDDPDFWLTALAARGA

SEQ ID NO: 41914 - protein, 232 aa, Roseovarius marisflavi
  misc_feature (1)..(232): tr|A0A1M6VP17|A0A1M6VP17_9RHOB 7-cyano-7-deazaguanine s ynthase OS=Roseovarius marisflavi OX=1054996 GN=queC PE =3 SV=1
MDTIVICSGGLDSVSLAHKVAAEHTLKGLLSFDYGQRHSKELGFAAACATRLGVAHSIVDIRAIGAALGGSALTDDIAVPDGHYAEETMKATIVPNRNAIMLSIGFGMAAAQKVDAVATAVHGGDHFIYPDCRPGFIDAFQAMQDRALEGYADIRLYTPYVTGSKADIVTDGAAHGTPFGETWSCYKGGANHCGRCGTCVERREAFHLAGVIDPTLYDDPDFWLTALAERGA

SEQ ID NO: 41915 - protein, 232 aa, Roseovarius mucosus
  misc_feature (1)..(232): tr|A0A1V0RTR6|A0A1V0RTR6_9RHOB 7-cyano-7-deazaguanine s ynthase OS=Roseovarius mucosus OX=215743 GN=queC PE=3 S V=1
MRTIVICSGGLDSVSLAHKVAAEHELAGLLSFDYGQRHVKEVEYAAACARRLGVPHKVVDIRQIGAALSGSALTDDVAVPDGHYAEETMKITIVPNRNAIMLAIAFGMAAAEKADAVATAVHGGDHFIYPDCRPGFINAFQAMQDAALEGYAEVKLYTPYLQGSKGDIVTDGAKHGTPFAETWSCYKGGAKHCGRCGTCVERREAFHLAGVVDPTEYEDRDFWLAAVAGRGA

SEQ ID NO: 41916 - protein, 212 aa, Roseovarius mucosus
  misc_feature (1)..(212): tr|A0A0A0HR04|A0A0A0HR04_9RHOB 7-cyano-7-deazaguanine s ynthase OS=Roseovarius mucosus DSM 17069 OX=1288298 GN= queC PE=3 SV=1
MRTIVICSGGLDSVSLAHKVAAEHELAGLLSFDYGQRHVKEVEYAAACARRLGVPHKVVDIRQIGAALSGSALTDDVAVPDGHYAEETMKITIVPNRNAIMLAIAFGMAAAEKADAVATAVHGGDHFIYPDCRPGFIHAFQAMQDAALEGYAEVTLYTPYLNGSKGDIVADGAKHGTPFAETWSCYKGGARHCGRCGTCVERREAFHLAGGD

SEQ ID NO: 41917 - protein, 231 aa, Roseovarius nanhaiticus
  misc_feature (1)..(231): tr|A0A1N7FP76|A0A1N7FP76_9RHOB 7-cyano-7-deazaguanine s ynthase OS=Roseovarius nanhaiticus OX=573024 GN=queC PE =3 SV=1
MKVIVICSGGMDSVALAHRYAATGDLHALLSFNYGQRHAKELEFAALCAARLGVPHHVIDISAIGAALSGSALTDDIDVPDGHYAEETMKITVVPNRNAIMLTIAFGMAAAQKVDAVATAVHGGDHFIYPDCRPDFIAAFQAMEDRAMEGYADIRLLTPYVQGTKADIAIDGAKHGTPFAETWSCYKGGDLQCGRCGTCVERREAFHLASVEDPTTYADPDFWRNATGQEG

SEQ ID NO: 41918 - protein, 80 aa, Roseovarius nubinhibens
  misc_feature (1)..(80): tr|A0A348WIX7|A0A348WIX7_9RHOB 7-cyano-7-deazaguanine s ynthase (Fragment) OS=Roseovarius nubinhibens OX=314263 GN=DCS45_21830 PE=3 SV=1
VFLYTPFIDAPKSAIVTEGARHHTPFADTWSCYKGGDMHCGRCGTCVERREAFHLAGVADPTAYADPDFWEIAISRKAAC

SEQ ID NO: 41919 - protein, 108 aa, Roseovarius nubinhibens
  misc_feature (1)..(108): tr|A0A348WIX6|A0A348WIX6_9RHOB 7-cyano-7-deazaguanine s ynthase (Fragment) OS=Roseovarius nubinhibens OX=314263 GN=DCS45_21825 PE=3 SV=1
MKTLVICSGGLDSVSLAHKIAAEQTLTRLVSFDYGQRHRKELDFAARAADRLGVPFHLIDMRGIGAVLTGSALTDDVPVPDGHYTEASMAATVVPNRNAIMLSVAFGL

SEQ ID NO: 41920 - protein, 456 aa, Roseovarius pacificus
  misc_feature (1)..(456): tr|A0A1M7IPU8|A0A1M7IPU8_9RHOB Queuosine biosynthesis p rotein QueC OS=Roseovarius pacificus OX=337701 GN=SAMN0 5444398_11632 PE=4 SV=1
MIIDAPNPAISRKLSVEVVESDAKRASADHTLVLGRDIRFSTRDLESYANANWEPVVFDAMVVAAAVEYCDRSLRRSVREWARDFRLRLPVHEPDRWSTPEVLDALHDALGFLTGDRWHFTFVKRVHAEPSPRQQSLDLPPDAKATLAFSDGMDSRAVAGLVGADARQALVRVRLGTKRCDRPRRGQPFTGIPYKLGKSAPNPEPSARNRGFRFALVSGLASYICRAEQIIIPESGQGALGPVLVPVAHAYPDYRNHPAFLRRMERFLGALFGHSVEYTFPRIWHTKGQTLAAYLGLGIDHGEWKRTRSCWKGPQWSSVDGQYRQCGACAACMLRRLSVHAAGQTEAADTYIAADLSAPELEASVPATFRKANRSFREYAIAGVLHLDHLADLTREDGRPVLRRQALVLAEALGMSAVQTEQNLKAMIAEHAGEWRAFVASLGDGSFLHNWVRGSR

SEQ ID NO: 41921 - protein, 230 aa, Roseovarius pacificus
  misc_feature (1)..(230): tr|A0A1M7DG85|A0A1M7DG85_9RHOB 7-cyano-7-deazaguanine s ynthase OS=Roseovarius pacificus OX=337701 GN=queC PE=3 SV=1
MKTIVICSGGLDSVSLAHKVAAERELTGLLSFDYGQRHSKELEFAAACARRLDVPHHVIDLRSVGAALSGSALTDDVDVPDGHYAEDTMKVTVVPNRNAIMLAVGFGMAAAQGADAVAAAVHGGDHFIYPDCRPDFIDAFQTMEDKALDGVAEVDLYTPFVNIPKAGIVTEGARHGTPFGETWSCYKGGDVHCGRCGTCVERREAFHLAGVDDPTDYADPDFWRSATGVA

SEQ ID NO: 41922 - protein, 232 aa, Roseovarius sp.
  misc_feature (1)..(232): tr|A0A365TZF2|A0A365TZF2_9RHOB 7-cyano-7-deazaguanine s ynthase OS=Roseovarius sp. TE539 OX=2249812 GN=queC PE= 3 SV=1
MDTIVICSGGLDSVSLAHKVAAEQRLQAMLSFDYGQRHRKELDFAADCARRLGVTHEIVDISGVGKALSGSALTDDREVPDGHYEEESMKVTVVPNRNAIMLAIAFGIAAAREAEAVGAAVHGGDHFIYPDCRPAFIDAFQTMQDRALEGLTQPRLYTPYVDVSKADIVTDGARNGVPFARTWSCYKGGAIHCGRCGTCVERREAFDLAGLPDPTEYADPDFWRGVTGKADA

SEQ ID NO: 41923 - protein, 232 aa, Roseovarius sp.
  misc_feature (1)..(232): tr|A3W8B0|A3W8B0_9RHOB 7-cyano-7-deazaguanine synthase OS=Roseovarius sp. 217 OX=314264 GN=queC PE=3 SV=1
MRTIVICSGGLDSVSLAHKVAAEHELAGLLSFDYGQRHVKEVEYAAACARRLGVPHKVVDIRQIGAALSGSALTDDVAVPDGHYAEETMKITIVPNRNAIMLAIAFGMAAAEKADAVATAVHGGDHFIYPDCRPGFINAFQAMQDAALEGYAEVKLYTPYLQGSKGDIVTDGAKHGTPFAETWSCYKGGARHCGRCGTCVERREAFHLAGVVDPTDYEDRDFWLAAVAGRGA

SEQ ID NO: 41924 - protein, 232 aa, Roseovarius tolerans
  misc_feature (1)..(232): tr|A0A1H7XT67|A0A1H7XT67_9RHOB 7-cyano-7-deazaguanine s ynthase OS=Roseovarius tolerans OX=74031 GN=queC PE=3 S V=1
MKTIVICSGGLDSVSLAHKTAAEHDLAGLVSFDYGQRHVKEVEYAAACARRLGVPHKVVDIRQIGAALSGSALTDDVDVPDGHYAEDTMKITIVPNRNAIMLAIAFGMAAAEKAEAVAMAVHGGDHFIYPDCRPGFVNAFQAMQDAALEGYANITLYTPYLHGSKADIVTDGARHGTPFAETWSCYKGGARHCGRCGTCVERREAFHLAGVADPTDYADPDYWLTAVAKGGA

SEQ ID NO: 41925 - protein, 232 aa, Roseovarius tolerans
  misc_feature (1)..(232): tr|A0A0L6CUM5|A0A0L6CUM5_9RHOB 7-cyano-7-deazaguanine s ynthase OS=Roseovarius tolerans OX=74031 GN=queC PE=3 S V=1
MKTIVICSGGLDSVSLAHKVAAEHELAGLLSFDYGQRHVKEVECAASCARRLGVPHKVVDIRQIGAALSGSALTDDVDVPDGHYAEDTMKITIVPNRNAIMLTIAFGMAAAEKAEAVAMAVHGGDHFIYPDCRPGFVNAFQTMQDAALEGYADITLYTPYLHGSKADIVTDGARHGMPFAETWSCYKGGARHCGRCGTCVERREAFHLAGVADPTEYADPDYWLTAVAKGGA

SEQ ID NO: 41926 - protein, 232 aa, Rouxiella badensis
  misc_feature (1)..(232): tr|A0A1X0WJC4|A0A1X0WJC4_9GAMM 7-cyano-7-deazaguanine s ynthase OS=Rouxiella badensis OX=1646377 GN=queC PE=3 S V=1
MKRAVVVFSGGQDSTTCLVQALTQYDEVHCITFDYGQRHRAEIDIAQKLSVELGAKAHKVLDVGLLNELAVSSLTRDNIPVPQFGENAENGLPSTFVPGRNILFLTLAAIYAYQVQAEAVITGVCETDFSGYPDCRDEFVKALNHAVTLGIARDIRFETPLMWLNKAETWALADYYGKLPLVRNQTLTCYNGIAGDGCGECAACHLRAKGLEEYQQAPEAINASLKEKTGLV

SEQ ID NO: 41927 - protein, 232 aa, Rouxiella silvae
  misc_feature (1)..(232): tr|A0A1X0W6D3|A0A1X0W6D3_9GAMM 7-cyano-7-deazaguanine s ynthase OS=Rouxiella silvae OX=1646373 GN=queC PE=3 SV= 1
MKRAVVVFSGGQDSTTCLVQALTQYDEVHCITFDYGQRHRAEIEIAQKLSVELGAKAHKVLDVGLLNELAVSSLTRDNIPVPQFGEGAENELPSTFVPGRNILFLTLAAIYAYQIQAEAVITGVCETDFSGYPDCRDEFVKALNHAVSLGIAREIRFETPLMWLNKAETWALADHYGKLPMVRNQTLTCYNGIAGDGCGECAACHLRAKGLAEFQQFPEATKASLREKTGLM

SEQ ID NO: 41928 - protein, 252 aa, Rubellimicrobium roseum
  misc_feature (1)..(252): tr|A0A5C4NJQ5|A0A5C4NJQ5_9RHOB 7-cyano-7-deazaguanine s ynthase OS=Rubellimicrobium roseum OX=687525 GN=queC PE =3 SV=1
MSDIHVGQSSEGALVLFSGGQDSTTCLAWALERFGRVETIGFDYGQRHLVELACRKQVAAEMRQIRPDWARRLGEDHTIGLQSLGEISDTALTRLVSLELDSSGLPNTFVPGRNIIFLTFAAALAYRRGLRHIVGGMCETDFSGYPDCRDDTIKALQVALNLGMDRQFVLHTPLMWIDKAATWELAFSLGGEALVDIILNETHTCYLGERGTRHVWGYGCGQCPACQLRAAGHEKYLSTKNHMSAPQQEHHV

SEQ ID NO: 41929 - protein, 232 aa, Rubellimicrobium roseum
  misc_feature (1)..(232): tr|A0A5C4N6R8|A0A5C4N6R8_9RHOB 7-cyano-7-deazaguanine s ynthase OS=Rubellimicrobium roseum OX=687525 GN=queC PE =3 SV=1
MRTIVVCSGGLDSVSLAHRVAAEHDLLGLLSFDYGQRHRKELEFAALCAERLRIPHQIIDLRDVGRNLTGSALTDELTVPDGHYAEETMRITVVPNRNAIMLAIAFGVASARGADAVATAVHGGDHFIYPDCRPGFIDAFQTMQNHALEGYASITLLTPYVNQPKSAIVVDGARYGTPFAQTWSCYKGGERHCGRCGTCVERREAFDLAGITDPTEYEDPDFWRAAVQRKGA

SEQ ID NO: 41930 - protein, 465 aa, Rubellimicrobium thermophilum
  misc_feature (1)..(465): tr|S9R6S4|S9R6S4_9RHOB Uncharacterized protein OS=Rubel limicrobium thermophilum DSM 16684 OX=1123069 GN=ruthe_ 00246 PE=4 SV=1
MNVSDPGKNVNLRIDSISRSMVGNIPDLLIDLLEIAAYVYCVDQRIKRGTEMLMDYGKDWRRSLTFSIPVRHPEVWNGEEVQELLVETLGFLSDDSYAFRFRKAEAPVQPRDPYFHELLDAFQENDEVALFSGGVDSFAGAVNDIVTLGKSVTLVGHWSVPKVQNVQATLVDALKQRGYGRRLSYVPVWVSNTDIKPAEYTQRTRSFLFACIGLVVARMSGKDGFSFYENGVVSINPPLAGDVVGGRATRTTHPKVLRGLEDLFSTLLDRQIEIRTPLQWLTKKEVTETIAAAGMADMIGSTVSCTRTHSRTRRHTHCGVCSQCIDRRFAVLAAGMADHDPADQYKKDLLLSDRSVDDSLRMAMHYVSFFRKIGSMTKDRFLVDLPEIVSALDHFPDLSADEASAHLFDLFQRHARSVEDVIARAASEHAGPLFRGEVPAGSPWRPVLRVATVSRSPQAQTMISM

SEQ ID NO: 41931 - protein, 239 aa, Rubidibacter lacunae
  misc_feature (1)..(239): tr|U5DQU3|U5DQU3_9CHRO 7-cyano-7-deazaguanine synthase OS=Rubidibacter lacunae KORDI 51-2 OX=582515 GN=queC PE =3 SV=1
MHVRLQVKTAQTAMKAVVLLSGGLDSSTVLYRARADGWDCYTLAFDYHQRHRCELRAAAQIAEAAGVCEHRVVTFDLRSWGGSALTDDAIAVPEARSLDQMSASIPVTYVPARNTIFLSFALGYAEAVGAQCVFLGVNALDYSGYPDCRPDYINAMRAVYRLGTRQGREGEAIAIAAPLIDFKKTEIVRLGNELGVPWELTWSCYKGGDVACGVCDSCRLRLAAFAELGLRDPVLYATE

SEQ ID NO: 41932 - protein, 448 aa, Rubinisphaera brasiliensis
  misc_feature (1)..(448): tr|F0SJ43|F0SJ43_RUBBR Uncharacterized protein OS=Rubin isphaera brasiliensis (strain ATCC 49424 / DSM 5305 / J CM 21570 / NBRC 103401 / IFAM 1448) OX=756272 GN=Plabr_ 0964 PE=4 SV=1
MEASIQISADQATSHEGASTTLFVEGHRRAELYCDYSSLLKAVRSPTERSLDFLNIASTVYSLDKLMPRIAASDGWSREFEVTIPVQDSSVWAIISETLNECVSFLSGDWWRFSFVEREASIIRRKRRKRRRRIPQRFARGNVACLFSGGLDSLAGAVDFLAFEPEKRLSLVGHYDPTPGTVKKDQTQLKSRLSEAYPNRLDAALVCVGSDQESPESSMRSRSLLFVALGICVAEHLGAGVPLLVPENGTIALNVPLTPARRGSCSTRTTHPHYIDLLQQVLTEVGLDHAIKNPLLGKTKGEVVSQCLDPNLIAVVAHESKSCAKPGHKSHWTRKSASQCGQCMPCIYRRAALHTVELDNEVFGNDICTDEVRVDEPSEAANDLRACLSFLRSNHSNESIAKLLIASGPLSIADALHHAQTVGRAMEEIRQLLRDKGNQRVKQLAGLR

SEQ ID NO: 41933 - protein, 230 aa, Rubinisphaera brasiliensis
  misc_feature (1)..(230): tr|F0SME1|F0SME1_RUBBR 7-cyano-7-deazaguanine synthase OS=Rubinisphaera brasiliensis (strain ATCC 49424 / DSM 5305 / JCM 21570 / NBRC 103401 / IFAM 1448) OX=756272 G N=queC PE=3 SV=1
MNAPRKAVVLLSGGLDSSTTLAIAREQGFELWAISFDYGQKHRFELDAARRLAQAFDVKKHVIVKIDLGAFGGSALTSDIEVPKDRSTDQMEAAIPITYVPARNTVFLSTALGWAETLDCSDLFIGVNAVDYSGYPDCRPEFVEAFTRLANLATKTGVEGTADWKVHAPLIDLTKADIIRKGTALGVDYAMTHTCYDPNEAGLACGHCDACQLRLQGFEQAGLSDPAAYQ

SEQ ID NO: 41934 - protein, 230 aa, Rubinisphaera sp.
  misc_feature (1)..(230): tr|A0A2E9VKV7|A0A2E9VKV7_9PLAN 7-cyano-7-deazaguanine s ynthase OS=Rubinisphaera sp. OX=2024857 GN=queC PE=3 SV =1
MSQKAVVLLSGGLDSTTTLAIAADQGFELYALSFDYGQRHQFELEAAKILAEKWNVTQHVIIPLNLAAFGGSALTSEIEVPKHRSQTEMNEGIPVTYVPARNTVFLSVAMGWAESLDASDIFIGVNAVDYSGYPDCRPEFIKSFEQLANLATKSGVEGTRTWKIHAPLIQLTKAEIIRKGTELGVDYGSTHTCYDPDSLGRACGQCDACILRLQGFAEAGLTDTATYQPQ

SEQ ID NO: 41935 - protein, 234 aa, Rubricoccus marinus
  misc_feature (1)..(234): tr|A0A259TZE3|A0A259TZE3_9BACT 7-cyano-7-deazaguanine s ynthase OS=Rubricoccus marinus OX=716817 GN=queC PE=3 S V=1
MTDRAPLGSRALVLFSGGQDSTTCLFWALSRWEHVDALAFDYGQRHAVELEQARAIAEASGVPFHVADMRGLLAGSALTDGGDTNAEHALAPDLPASFVPGRNALFLTLAASRAYLTQTRDLVTGVCQTDYSGYPDCRLDFVASQEATLALALDAPVRIHTPLMHLTKAETWKLARDLGTVRGLDVLETVREMSHTDYNGDRSERHDWGYGKLDNPASVLRARGWEEAREKGWV

SEQ ID NO: 41936 - protein, 437 aa, Rubricoccus marinus
  misc_feature (1)..(437): tr|A0A259TTY4|A0A259TTY4_9BACT Uncharacterized protein OS=Rubricoccus marinus OX=716817 GN=BSZ36_18615 PE=4 SV =1
MSVTHTDHVATVVFDEVGGDGLLLKPGANLKHGLPNFEEQFGAPTSLEEDLLVLASAIFACDLAFKRGEREAITRRIRLTVPVVNTAAFERVRRELQFALWTLSHDAWDVRFTAREGTPEANGAFQAGSPGKALLFSGGLDSFAAAVKFGDAGETVKLVSHVTANRAVSSSQENLLAHLDDRYPGQFERAAFRVSGFDRSSVGLPFPSDSDREETQRTRSFLFLSLAALVARRNRIQDVVMIAENGQMAIHLPLTAARISAFSTHTAHPEFVATMGPIMSKLLGYPIEITNPFLYLTKAEVVSDVVRDHADQLAHAVSCWKASRVRKDYNHCGYCVPCLIRRVSIEAHGTALPEYARDLLTEDVGDLRPDDDGKRNLVELCEFVATIDGRSQAALEDEYPDLINEHIDPVEAIGMYKRFATEAKAVFSSYPNVAKLF

SEQ ID NO: 41937 - protein, 227 aa, Rubripirellula obstinata
  misc_feature (1)..(227): tr|A0A5B1CJB3|A0A5B1CJB3_9PLAN 7-cyano-7-deazaguanine s ynthase OS=Rubripirellula obstinata OX=406547 GN=queC P E=3 SV=1
MTDTRPAIVLLSGGLDSATCFAIAKDQGFDVHAISFRYGQRHQHEIQCAAGLAEKLGAASHRIVGIDLAAFGGSALTDGDIAVPKCDRVEDIGGEIPVTYVPARNTIFLSLSLAMAEVLGARDIFIGVNALDYSGYPDCRAEFIAAFQTMANLATKQGVEDTDQLKIHTPLIDLTKAQIIAKGLSLGIDYSQTISCYDPIEGKAACGHCDACLLRAKGFAELGLDPT

SEQ ID NO: 41938 - protein, 236 aa, Rubrivirga marina
  misc_feature (1)..(236): tr|A0A271IVT2|A0A271IVT2_9BACT 7-cyano-7-deazaguanine s ynthase OS=Rubrivirga marina OX=1196024 GN=queC PE=3 SV =1
MPALVLFSGGQDSTTSLFWALSSSHGAFDRVEALAFRYGQRHAVELEQAHAIAEAAGVPFTVLDLGGLLSGSALLADEAADTNAAHALAPDLPASFVPGRNALFLTAAASHAFTRGIHDLVGGMCQTDYSGYPDCRLGFIESQAETLSLALDAPVQIHTPLMHLTKAETWKLAADLGTVRGLDVLETVREMSHTDYHGDRSERHPWGYGRLDNPASVLRAKGYEEAVANGWIPDAR

SEQ ID NO: 41939 - protein, 242 aa, Rubrivirga sp.
  misc_feature (1)..(242): tr|A0A271JCI6|A0A271JCI6_9BACT 7-cyano-7-deazaguanine s ynthase OS=Rubrivirga sp. SAORIC476 OX=1961794 GN=queC PE=3 SV=1
MPDSSNALVLFSGGQDSTTCLFWALAPDGGAFDHVEAVAFRYGQRHAVEIEQARAIAEAAGVPLTVLDLTGLLSGSALLADEAADTNDAHALAPDLPASFVPGRNALFLTAAASLGFTRGIADLVGGMCQTDYSGYPDCRLDFVESQAQTLSLALDTDLRIHTPLMHLTKAETWKLAADLGTVRGLDVLETVREMSHTDYHGDRTQRHAWGYGRLDNPASVLRAKGHAEAVAKGWVPDVDLP

SEQ ID NO: 41940 - protein, 257 aa, Rubrivivax gelatinosus
  misc_feature (1)..(257): tr|A0A4R2M869|A0A4R2M869_RUBGE 7-cyano-7-deazaguanine s ynthase OS=Rubrivivax gelatinosus OX=28068 GN=queC PE=3 SV=1
MGESQGGKQQSDENPMSQTTQPTSATRHALVLFSGGQDSTACLAWALQRYARVETVGFDYGQRHAIELTQRLVVLDEIRRSFPQWCDRLGEDHLLDLSILGQISSTALTDDRQIELQANGLPNTFVPGRNLLFLTLAASLAYRRDIDVLVGGMCETDFSGYPDCRDDTIKSQQVTLALGLGQRMTIETPLMWLDKAATWALAEALGGPALVALTVQHTHTCYLGERGELHPWGHGCGHCPACDLRRRGFEGYRAKMP

SEQ ID NO: 41941 - protein, 242 aa, Rubrivivax gelatinosus
  misc_feature (1)..(242): tr|I0HK20|I0HK20_RUBGI 7-cyano-7-deazaguanine synthase OS=Rubrivivax gelatinosus (strain NBRC 100245 / IL144) OX=983917 GN=queC PE=3 SV=1
MSQTTPPTSATRRALVLFSGGQDSTACLAWALQRYARVETVGFDYGQRHAIELTQRLVVLAELRRRFPQWCERLGEDHVLDLGILGQISSTALTDDRQFELQANGLPNTFVPGRNLLFLTLAASLAYRRDIDVLVGGMCETDFSGYPDCRDDTIKSQQVTLALGLGQRMTIETPLMWLDKAATWDLAERLGGPALVELTVQHTHTCYLGERGELHPWGHGCGHCPACDLRRRGFEGYSTKQR

SEQ ID NO: 41942 - protein, 234 aa, Rubrivivax sp.
  misc_feature (1)..(234): tr|A0A1E4II55|A0A1E4II55_9BURK 7-cyano-7-deazaguanine s ynthase OS=Rubrivivax sp. SCN 71-131 OX=1660138 GN=queC PE=3 SV=1
MERKALVLFSGGQDSATCLAWALDRYVQVETVGFHYGQRHAVELDCRKVVLDRLKAEFPAWAPRLGADHMLDLALLGQVSDTALTQDREIQFAASGLPTTFVPGRNLLFFTFAAAVAYRRGLSVLVGGMCETDYSGYPDCRDNTLKALQVAISLGLDAPMVVETPLMWLDKAHTWRMAKDLGGAALVELIRTETHTCYLGDHTTLNAWGYGCGQCPACELRRKGYEIFNAAEAA

SEQ ID NO: 41943 - protein, 234 aa, Rubrivivax sp.
  misc_feature (1)..(234): tr|A0A520BKQ5|A0A520BKQ5_9BURK 7-cyano-7-deazaguanine s ynthase OS=Rubrivivax sp. OX=50259 GN=queC PE=3 SV=1
MTDPRKALVLFSGGQDSTTCLAWALDRFAEVETLAFDYGQRHRIELECRNTVRSEMARQFPHWAGRLGADHLLDLSLLGQISDTALTSERAIELQANGLPNTFVPGRNLLFLTFAATLAYRRGATVLVGGMCETDFSGYPDCRDNTLKALQVALSLGLDGPMTLDTPLMFIDKAATWRLAEQLGGAALVKLIVEDTHTCYLGERGELHDWGHGCGHCPACALRARGFAQYREQA

SEQ ID NO: 41944 - protein, 556 aa, Ruegeria atlantica
  misc_feature (1)..(556): tr|A0A0N7LNK0|A0A0N7LNK0_9RHOB Uncharacterized protein OS=Ruegeria atlantica OX=81569 GN=RUM4293_01524 PE=4 SV =1
MGAVAPLPEVEVRWLPPLTKSGGDEVLRLDIAGREVAMTLRIGQLNRQLVEGLQDRALDLLEIAALVYCADAAVSRGGLADQKMGEKWHRRFVATMPVRDLDFWQRESVIQALEETLMFLSGDRFEFSFSIKDEPDAERSRFFKFGRNSSWKPHRVLMFSGGLDSFAGAVEEIVEQKHRVALVSHASSTKIAPVQKRLISALSKRYGPEKCRHIPMTAQLKGRSTAERTHRTRSFLFAVLGSITAKAFGLDRLSFHENGVVSLNLPPVGSVIGTRATRTTHPKALNLLTGFLQLVFENDMRVDNPYFARTKAEVVERISELGMADQIVETRSCADVHNQTNQYFHCGRCSQCIDRRFAMLSIGLERFDPEDAYRVDLMSDARPNGIDREMALSYVRNAVLFENAMPDALIRNFPVVLDAVNHIDNPPDTAMVMIADLLNRHGKAVTSVMRRTLESKSPGEFPEQSLPRLYGAMQSALTLPFVPAASVDKNEKQQLPLSIEIDKASRLVVIGEHVELKKNATADLLVVLAQEWLRSAGEGLEPMDHHCVKSGELVEK

SEQ ID NO: 41945 - protein, 232 aa, Ruegeria atlantica
  misc_feature (1)..(232): tr|A0A0P1EBU2|A0A0P1EBU2_9RHOB 7-cyano-7-deazaguanine s ynthase OS=Ruegeria atlantica OX=81569 GN=queC PE=3 SV= 1
MKTTLVCSGGLDSVSLAHVLAAEGNLSRLVSFDYGQRHTKELTFAALCSERLSVPHHVIDLRSVGASLTGSALTDDVDVPDGHYAEETMKVTVVPNRNAIMLTIAYGVAAAQGDNAVATAVHGGDHFIYPDCRPAFTDAFDTMQRAALDGYADVALHVPFVHRSKADIVREGARVDTPFDQTWSCYKGGDVHCGRCGTCVERREAFDLAGVPDPTQYEDAEFWKSTIARAQA

SEQ ID NO: 41946 - protein, 233 aa, Ruegeria denitrificans
  misc_feature (1)..(233): tr|A0A0P1IJV9|A0A0P1IJV9_9RHOB 7-cyano-7-deazaguanine s ynthase OS=Ruegeria denitrificans OX=1715692 GN=queC PE =3 SV=1
MKTIVICSGGLDSVSLAHMVARDHQLTGLISFDYGQRHRKELDYAALCAKRLGVPHDIIDLRPVGAVLTGSALTDDVDVPDGHYAEDSMRVTVVPNRNAIMLTVAFGAAAASGANAVATAVHGGDHFIYPDCRPEFTQAFETMQKHALDGYADVSLFTPFVHRSKADIVTEGARCETPFSQTWSCYKGGEYHCGRCGTCVERREAFHFANVKDPTIYEDPEFWVVATAHKEPA

SEQ ID NO: 41947 - protein, 230 aa, Ruegeria intermedia
  misc_feature (1)..(230): tr|A0A1M5AW92|A0A1M5AW92_9RHOB 7-cyano-7-deazaguanine s ynthase OS=Ruegeria intermedia OX=996115 GN=queC PE=3 S V=1
MKTIVICSGGLDSVSLAHKVAAENDLIGLISFDYGQRHRKEVEFAARCAERLGVPHDLIDMSHIGKHLSGSALTDDVDVPDGHYAEENMKVTVVPNRNAIMLAIAFGVAAAKQADAVATAVHGGDHFIYPDCRPEFTEAFEAMQAKALDGYANVRLYTPFVHIPKSAIVTEGAKHGTPFADTWSCYKGGETHCGRCGTCVERREAFHIAGVEDPTVYADPEFWKAAVEAH

SEQ ID NO: 41948 - protein, 233 aa, Ruegeria litorea
  misc_feature (1)..(233): tr|A0A1Y5TRV6|A0A1Y5TRV6_9RHOB 7-cyano-7-deazaguanine s ynthase OS=Ruegeria litorea R37 OX=1200284 GN=queC PE=3 SV=1
MKTIVICSGGLDSVSLAHSIAADGNLFRLVSFDYGQRHRKELDYAAACATRLGVPHHIIDMRTIGAALTGSALTDDIDVPDGHYAEDTMKVTVVPNRNAIMLTIAYGIAAANGDEAVATAVHGGDHFIYPDCRPAFTQAFDTMQRAALDGYADVALSTPFVHRSKADIVTEGARVGTPFADTWSCYKGGEHHCGRCGTCVERREAFDLAGVTDPTIYEDPDFWRAAVADKEGA

SEQ ID NO: 41949 - protein, 230 aa, Ruegeria marina
  misc_feature (1)..(230): tr|A0A1G7C0F1|A0A1G7C0F1_9RHOB 7-cyano-7-deazaguanine s ynthase OS=Ruegeria marina OX=639004 GN=queC PE=3 SV=1
MKTLVICSGGLDSVSLAHKVAAEQELIGLISFDYGQRHHKELEFAARCAARLGVPHDLIDMRQIGAHLSGSALTDDVDVPDGHYAEDTMRITVVPNRNAIMLAIAFGIAAAKQADAVATAVHGGDHFIYPDCRPAFTQAFEAMQAQALDGYANVRLYTPFVHVPKSAIVTEGARHNTPFADTWSCYKGGEVHCGRCGTCVERREAFHLAGVTDPTAYADPEFWRAAVEGR

SEQ ID NO: 41950 - protein, 230 aa, Ruegeria marisrubri
  misc_feature (1)..(230): tr|A0A0X3TQV9|A0A0X3TQV9_9RHOB 7-cyano-7-deazaguanine s ynthase OS=Ruegeria marisrubri OX=1685379 GN=queC PE=3 SV=1
MKTIVICSGGLDSVSLAHKVAAENKLIGLISFDYGQRHRKEVEFAARCAERLGVPHDLIDMSHIGKHLSGSALTDDVDVPDGHYAEENMKVTVVPNRNAIMLAIAFGVAAAKQADAVATAVHGGDHFIYPDCRPEFTEAFEAMQAKALDGYANVRLYTPFVHIPKSAIVTEGAKHGTPFADTWSCYKGGESHCGRCGTCVERREAFHIAGVEDPTVYADPDFWKAAVEGH

SEQ ID NO: 41951 - protein, 233 aa, Ruegeria mediterranea
  misc_feature (1)..(233): tr|A0A2R8C6R6|A0A2R8C6R6_9RHOB 7-cyano-7-deazaguanine s ynthase OS=Ruegeria mediterranea M17 OX=1200281 GN=queC PE=3 SV=1
MKTIVICSGGLDSVSLAHSIAAEGNLSRLVSFDYGQRHRKELDYAAACATRLGVPHHIIDMRTIGAALTGSALTDDIDVPDGHYAEDTMKVTVVPNRNAIMLTIAYGIAAANGDEAVATAVHGGDHFIYPDCRPAFTEAFDAMQRAALDGYADVALSTPFVHRSKADIVTEGARVGTPFADTWSCYKGGEHHCGRCGTCVERREAFDLAGVSDPTVYEDPGFWRTAIADKEGV

SEQ ID NO: 41952 - protein, 230 aa, Ruegeria pomeroyi
  misc_feature (1)..(230): sp|Q5LM13|QUEC_RUEPO 7-cyano-7-deazaguanine synthase OS =Ruegeria pomeroyi (strain ATCC 700808 / DSM 15171 / DS S-3) OX=246200 GN=queC PE=3 SV=1
MKTLVICSGGLDSVSLAHKVAAEHDLIGLISFDYGQRHRKELDFAARAATRLGVPHDLIDMRQIGAHLSGSALTDDVDVPDGHYAEDTMKITVVPNRNAIMLAIAFGIAAAKQADAVATAVHGGDHFIYPDCRPGFTQAFEAMQAQALDGYASVRLYTPFVHEPKSAIVTEGERHNTPFADTWSCYKGGEVHCGRCGTCVERREAFHLAGVADPTPYADPEFWRAAVEGR

SEQ ID NO: 41953 - protein, 500 aa, Ruegeria profundi
  misc_feature (1)..(500): tr|A0A0X3U5I0|A0A0X3U5I0_9RHOB Uncharacterized protein OS=Ruegeria profundi OX=1685378 GN=AVO44_03510 PE=4 SV= 1
MFLSGDRFEFSFSTKDEPDAERSRFFKFGRNSSWKPHRVLMFSGGLDSFAGAVEEIVEQKHRVALVSHASSTKIAPVQKRLISALSKRYGPETCRHIPMTAQLKSRSTAERTHRTRSFLFAVLGSITATAFGLDRVSFHENGVVSLNLPPVGNVVGTRATRTTHPKTLKLFTGLLRLVFENDMRVDNPYFARTKAEVVERISQLGMADQIVETRSCADVHNQTHQYFHCGRCSQCIDRRFAMLSKGLERFDPEDAYRVDLMSDARPNGIDREMALSYVRNAVLFENATPDALIRNFPVVLDAVNHFDSPPDTAMSMIADLLNRHGKAVTSVMRRTLESKSPGEFPEQSLPRLYGEMQSALSLPFVPAPSVDKNENEKPPLTIEIDKTSRLVLIGEHIELKKNATADLLIVLAEEWLRAAGKGLEPLEYPCLKSGDLVEKLGVETDEVVRRRILTARRTIAKRFKSAGLSIDKPQELIENLSWHGYRLAPERVVIRVRHRS

SEQ ID NO: 41954 - protein, 233 aa, Ruegeria sp.
  misc_feature (1)..(233): sp|Q1GEY7|QUEC_RUEST 7-cyano-7-deazaguanine synthase OS =Ruegeria sp. (strain TM1040) OX=292414 GN=queC PE=3 SV =1
MKTLVICSGGLDSVSLAHITSQKYQLTRLVSFDYGQRHRKELDFARAAATRLGVPFHLIDMRSIGGALSGSALTDDIDVPDGHYAEDTMRITVVPNRNAIMLAIGFGVAAAQGDEAVATAVHGGDHFIYPDCRPGFTRAFETMQRAALDGYADVRLHTPFVEQSKADIVRAGAAHNTPFAETWSCYKGGDIHCGRCGTCVERREAFHLAEVADPTVYADPDYWSAAIAGREAE

SEQ ID NO: 41955 - protein, 232 aa, Ruegeria sp.
  misc_feature (1)..(232): tr|A0A366XCC7|A0A366XCC7_9RHOB 7-cyano-7-deazaguanine s ynthase OS=Ruegeria sp. A3M17 OX=2267229 GN=queC PE=3 S V=1
MKTTLVCSGGLDSVSLAHVLAAEGNLSRLVSFDYGQRHTKELTFAALCAMRLSVPHHLIDLRSVGASLTGSALTDDVDVPDGHYAEETMKVTVVPNRNAIMLTIAYGVAAAQGDDAVAAAVHGGDHFIYPDCRPAFTDAFDTMQRAALGGYADVALHVPFVHRSKADIVREGARVDTPFDQTWSCYKGCDLHCGRCGTCVERREAFDLAGVPDPTQYEDAEFWKSAIAGAQV

SEQ ID NO: 41956 - protein, 263 aa, Rugamonas rubra
  misc_feature (1)..(263): tr|A0A1I4QDV1|A0A1I4QDV1_9GAMM 7-cyano-7-deazaguanine s ynthase OS=Rugamonas rubra OX=758825 GN=queC PE=3 SV=1
MPRRPPLSFDGQRLPAPPKRKIAMLASDTALVLFSGGQDSTTCLAWALHHYAHVETIGFDYGQRHAVELTVRPTVIDKLRAASPEWDRKLGPDHMIDLSLISAISETAMTHDIAIETQANGLPNTFVPGRNLLFMTVAATVAYRRGLTVLVGGMCETDFSGYPDCRDDTMKALQVALNLGMATRLKLETPLMWRDKKQTWELARELGGQALVDLIRADTHTCYLGERGALHDWGYGCGTCPACALRARGYRQFAGTEPLEPAV

SEQ ID NO: 41957 - protein, 227 aa, Rugosibacter aromaticivorans
  misc_feature (1)..(227): tr|A0A0C5J7Y1|A0A0C5J7Y1_9RHOO 7-cyano-7-deazaguanine s ynthase OS=Rugosibacter aromaticivorans OX=1565605 GN=q ueC PE=3 SV=1
MKTAVILLSGGLDSATVLALASQQGFACYCLSLDYGQRSSSELLAAGRVAKALGAVAHRVLKLDLGQLGGSALTDASIAVPIDGVRPGVPVTYVPARNTIMLSLALSWAEVLGSRDIFVGVNAIDYSGYPDCRPEFIRAFETLANLATKAAVEGAVLTVHAPLISMSKAQIIKKGMQLGVDYGLTVSCYQADEAGRACGVCDSCRLRKEGFYSAQLVDPTSYYEKKP

SEQ ID NO: 41958 - protein, 227 aa, Rugosibacter sp.; identical to SEQ ID NO: 41957
  misc_feature (1)..(227): tr|A0A522YD49|A0A522YD49_9RHOO 7-cyano-7-deazaguanine s ynthase OS=Rugosibacter sp. OX=1914450 GN=queC PE=3 SV= 1

SEQ ID NO: 41959 - protein, 227 aa, Rugosibacter sp.
  misc_feature (1)..(227): tr|A0A522XTZ2|A0A522XTZ2_9RHOO 7-cyano-7-deazaguanine s ynthase OS=Rugosibacter sp. OX=1914450 GN=queC PE=3 SV= 1
MKNAVILLSGGLDSATVLALARQQGFACHCLSLDYGQRSRSELLAAGRVAKAFGAVAHRVLKLDLGQLGGSALTDTSIAVPIAGVQPGVPITYVPARNTIMLSLALAWAEILVSRDLFVGVNAIDYSGYPDCRPEFIRAFEALANLATKAAVEGAVLTVHAPLISMSKAQIITTGMQLGVDYGLTVSCYQADENGGACGVCDACRLRKEGFSSAHLVDPTRYSENKP

SEQ ID NO: 41960 - protein, 1104 aa, Ruminiclostridium cellobioparum
  misc_feature (1)..(1104): tr|S0FM96|S0FM96_RUMCE Non-ribosomal peptide synthetase OS=Ruminiclostridium cellobioparum subsp. termitidis C T1112 OX=1195236 GN=CTER_2676 PE=4 SV=1
MAGEVLKPNDLENWYSIFGDRIQLVNFYGASETTMIKMFYPIKSSDVKRKSIPIGKPIKGAKAVILDKNLNICNQGDIGEIYIRTPYRTLGYYKNPDLNKEKFIINPFNKDPNDLIYRTGDLGRLLESGDIEFLGRIDRQIKIRGIRVELGEIEKELSKFTGIKKCVVDFRNDSKNVEEKAKAEYCKKCGITTRFPEAVLDTVGYCKICNDYETYKSKAQSYFGTMGDLNSIFQNSKKDNKSEYDCILLFSGGKDSTFVLYKLIEMGLKVLAFTFDNGFISKTALNNIQNTVKELNIDHIIGTYDDMNKIFLEGLREESSVCNGCFKVLRILSTRLAYEKGIKYIVTGLSRGQIFELRLYDAFKQGILVSDEIEKRIFDQRVLYHGKDDYVSRVIGSDLLINKSMVQEIGLIDFYRYSDVTKEEIIEFLKSKSSYWNNPSDTGFCSSNCMINDVGIHIQRNERGYDNYTFPNSWDVRLGHTSIAEAKNESEGEVNLQKVQDILEKLGYNDTYRNKTYLKEYLVAYYTSDKQLNTHEIRAFMERSLPSYMIPTYFIEISKIPLNTNGKIAYNELPDPRKNIIKKYIAPRDETEVTLEKIWCEILGIDKVGINEDFLQIGGHSLNIMQLISKVTSEFNVEIPLSEIFKKATIEELGNFIKTTANKSNITINKNEICEYYPATVSQKRMYALSLIKGAGVVQNILFGVRIKGDINKERIQDIFRILIDRHEILRTHFEISNNEVVQVVHDHIDFNVNFVKAEKSEDEVIIDLIKPFNTDDLPLFRVNVIEVQKNEKILLLDMHHTISDGISIGIIAREFINLYKGKELPELRIQYKHYALWQEEGLKTGLFKKQEDYWLNLLGGEIPKISIPTDYPKKWIRSFKGDTITVHVGKELAFYIKNLATESGTTLYMLLLAVYNILLSKYTGQEDIIVGSISSGRHQMDLDNMVGMFLNNIVMRNKPAADKNFNDFLAEVKSNALATYENQDYPFELLVDKLGVKVGLGESPIFNTLFSLQNVPMPTETIDELTFEQVKNIRTNTSRQDISLLAYEQEDGIKLDFEYCSKLFNRVTIERMASDYLEILGQVLQDKNIRIDDIKLTEREVVL

SEQ ID NO: 41961 - protein, 329 aa, Ruminiclostridium cellulolyticum
  misc_feature (1)..(329): tr|B8I986|B8I986_RUMCH Uncharacterized protein OS=Rumin iclostridium cellulolyticum (strain ATCC 35319 / DSM 58 12 / JCM 6584 / H10) OX=394503 GN=Ccel_0984 PE=4 SV=1
MTTQEKKTNNVYREKILNSVLEKYYNPDSKYDYCVLFSGGKDSTYLANIMKQMKGGRVCTLTVDNGFEDEVFLDHVKKVADKIGVDSYIITPPKEDFELLFNYVIKEPKLRAVDSNAICYFCGQYIMKAGIRFAEENNIPVVIHGMSPTQYNLPDKLENEEVSEQAFIRNIELLEMYRNKNIQDVYKLAKTLYRYNNDPQIKEIMDKTFYQSKKVKMIIPFQYLDYNVENIKSIIEKELDWVNMFGYSNSLYISSGCRMFEIFLLMEKKIPGFRVHEHREFAQDFNKGHVTKKAYDYALDVAKTLQDQEEISPTMHSLIKRIGLEEELL

SEQ ID NO: 41962 - protein, 226 aa, Ruminiclostridium papyrosolvens
  misc_feature (1)..(226): tr|F1TE86|F1TE86_9FIRM 7-cyano-7-deazaguanine synthase OS=Ruminiclostridium papyrosolvens DSM 2782 OX=588581 G N=queC PE=3 SV=1
MLKKAVVLLSGGMDSTTALYIAKSQGYEIYAISFNYGQRHFKELECAKIISEKAGVKEHIIVNTNMDAWGGSALTDSSISVPDSNIHNGKIPITYVPARNMIFLSFAASYAEVIGAQDIFIGVSEVDYSGYVDCRQEFIDAMENAINFGTVCAVEEGKKIKIHAPLVCMTKSDEIKLGIKLGVDYSLTWTCYRGEELACGTCDSCSLRLKAFKEAGEKDPLQYTVI

SEQ ID NO: 41963 - protein, 226 aa, Ruminiclostridium papyrosolvens
  misc_feature (1)..(226): tr|U4R2Q4|U4R2Q4_9FIRM 7-cyano-7-deazaguanine synthase OS=Ruminiclostridium papyrosolvens C7 OX=1330534 GN=que C PE=3 SV=1
MLKKAVVLLSGGMDSTTTLYIAKSEGYEVYAISFNYGQRHYKELECAKIISEKAGIKEHIFVNTNMDAWGGSALTDTNISVPDSNINKDKIPITYVPARNMIFLSFAASYAEVIGAQDIFIGVSEVDYSGYVDCRQEFIDAMENAINFGTVCAVEDGKKIKIHAPLVCMTKSDEIKLGIKLGVDYSLTWTCYRGEEFACGTCDSCSLRLKAFKEAGEKDPIKYIGL

SEQ ID NO: 41964 - protein, 219 aa, Ruminiclostridium sp.; identical to SEQ ID NO: 38746
  misc_feature (1)..(219): tr|A0A3B8KQG2|A0A3B8KQG2_9FIRM 7-cyano-7-deazaguanine s ynthase OS=Ruminiclostridium sp. OX=2053608 GN=queC PE= 3 SV=1

SEQ ID NO: 41965 - protein, 225 aa, Ruminiclostridium sufflavum
  misc_feature (1)..(225): tr|A0A318XRW9|A0A318XRW9_9FIRM 7-cyano-7-deazaguanine s ynthase OS=Ruminiclostridium sufflavum DSM 19573 OX=112 1337 GN=queC PE=3 SV=1
MGKAVVLLSGGLDSATALYLAKAEGYEVYALSFEYGQRHKKEISCAEKLAQKAGVKEHIVVNTNMDAWGGSALTDSSIAVPEADLDTGLIPATYVPARNMIFLSYAASYAEAKGAQNIFIGVSEVDYSGYVDCRKEFIDAMENAVNMGTVCSVEYGKRIKIHAPFISMKKAEEIKLGISLGVDYSSTWTCYNGEERACGVCDSCRLRLRAFEEAGAKDPVQYRQL

SEQ ID NO: 41966 - protein, 260 aa, Ruminococcaceae bacterium
  misc_feature (1)..(260): tr|A0A1W6WC64|A0A1W6WC64_9FIRM TIGR00268 family protein OS=Ruminococcaceae bacterium CPB6 OX=1572656 GN=B6259_ 02565 PE=4 SV=1
MIDEQTKTEQDGSRKLQQFFKEHPKCALAYSGGTDSSYLLYAAVQAGAEVHPYFIKTAFQPQFEVDDAERLAQQLNVPLTVLHLDLLSRSEVTDNPKNRCYYCKKSLFTVLKERAKADGCPLLIDGTNASDQVADRPGMKALQELSVCSPLRACGLTKPEIRELSREAGLFTWNKPAYACMATRFPAGRQITAELLRRVEGAENALFKLGFTDFRVRLYADAARLQFPQDQMTRAVQKRADIRRQLNPYFQTVLLDLAGR

SEQ ID NO: 41967 - protein, 227 aa, Ruminococcaceae bacterium
  misc_feature (1)..(227): tr|A0A1G4W4B0|A0A1G4W4B0_9FIRM 7-cyano-7-deazaguanine s ynthase OS=Ruminococcaceae bacterium P7 OX=1200751 GN=q ueC PE=3 SV=1
MKALVLFSGGVDSTTCLAMAIEKYGRDEVLALSVGYGQKHSKELEAAQSIARFYGVSHRTLDLSVLFEGSDCSLLKGSGKEIPKESYAEQLAETGGSPVSTYVPFRNGLFLASAASIALSCGCSEIYYGAHRDDAAGNAYPDCSQDFNEAINRAIYLGSGNQLSVIAPFIGMSKAEVVAVGLRLNVPYELTWSCYEGMDKPCGLCGTCRDRIAAFEANGVKDPAMEV

SEQ ID NO: 41968 - protein, 228 aa, Ruminococcus albus
  misc_feature (1)..(228): tr|A0A011VWI4|A0A011VWI4_RUMAL 7-cyano-7-deazaguanine s ynthase OS=Ruminococcus albus SY3 OX=1341156 GN=queC PE =3 SV=1
MKALVLFSGGLDSATCLALAIKKYGKENVTALSVFYGQKHDKEIQAAKNVAEYYGVPLKTLDLALIFADSDCSLLTQSDKEIPHKSYAEQLTQTNGKPVSTYVPFRNGLFLASAASIAISLDCGVIYYGAHADDAAGNAYPDCSQDFNNAMNSAITIGSGEQVHIEAPFVGLTKADVVKMGTELGVPYELTWSCYEGGEKPCGKCGTCIDRTAAFEANGLIDPLLKGE

SEQ ID NO: 41969 - protein, 228 aa, Ruminococcus albus
  misc_feature (1)..(228): tr|E9S9P3|E9S9P3_RUMAL 7-cyano-7-deazaguanine synthase OS=Ruminococcus albus 8 OX=246199 GN=queC PE=3 SV=1
MKALVLFSGGLDSSTCLGLAVDKYGADNVLALSVYYGQKHDKEIRASEKVAAHYGVKQQTLDLAKIFEGSDCTLLKGSDGDIPKESYAKQIEESAGKPVSTYVPFRNGLFLASAASIALSNGCDVIYYGAHSDDAAGNAYPDCSENFNRAMNEAIYLGSGEQLRIEAPFVSLTKADVVRKGVELGVPFELTWSCYEGGDKPCGICGTCRDRIAAFEANGLIDPLMKGE

SEQ ID NO: 41970 - protein, 228 aa, Ruminococcus callidus
  misc_feature (1)..(228): tr|U2LH44|U2LH44_9FIRM 7-cyano-7-deazaguanine synthase OS=Ruminococcus callidus ATCC 27760 OX=411473 GN=queC P E=3 SV=1
MKAMVLFSGGVDSTTCLGMAVDKYGAEEVLALSVSYGQKHQKEVEAARKIAAYYGVAWKQLDLSVIFADSNCSLLSGSTQEIPKETYAEQLQETNGSPVSTYVPFRNGLFLASAASMALSNGCEVIYYGAHSDDAAGNAYPDCSDAFNEAMNRAIYLGSGEQLRIEAPFVKWTKADVVKKGLELGVPYALTWSCYEGGEKPCGVCGTCRDRAAAFAANGVPDPALGGE

SEQ ID NO: 41971 - protein, 228 aa, Ruminococcus flavefaciens
  misc_feature (1)..(228): tr|A0A1H6L4V5|A0A1H6L4V5_RUMFL 7-cyano-7-deazaguanine s ynthase OS=Ruminococcus flavefaciens OX=1265 GN=queC PE =3 SV=1
MKALVLFSGGVDSTTCLAIAVDKYGADNVLALSLYYGQKHSRELEAARKIASHYGVRHKELDLALIFADSDCTLLKGSSGDIPKESYAEQLEKTDGKPVSTYVPFRNGLFLASAASIALSNGCTEIYYGAHSDDAAGNAYPDCSSDFNDAINRAIYLGSGCELKVVAPFIGINKAQVVAEGLKLGVPYELTWSCYEGGDKPCGVCGTCRDRIAAFEANGIHDPAMKGE

SEQ ID NO: 41972 - protein, 225 aa, Ruminococcus flavefaciens
  misc_feature (1)..(225): tr|A0A1H7LRN9|A0A1H7LRN9_RUMFL 7-cyano-7-deazaguanine s ynthase OS=Ruminococcus flavefaciens OX=1265 GN=queC PE =3 SV=1
MKALVLFSGGVDSSTCLGIAVDKYGAENVLALSIYYGQKHDKEMKAAERTAAYYGVELRTLDLALIFADSDCTLLSGNGDIPQESYAEQLAKTDGKPVSTYVPFRNGLFLSSAASIALSNGCDVIYYGAHSDDAAGNAYPDCSDEFNKAMDRAVFLGSGQQLHIEAPFVNLTKADVVKKGLELNVPYELTWSCYEGGDKPCGVCGTCRDRIAAFEANGVTDPLML

SEQ ID NO: 41973 - protein, 227 aa, Ruminococcus lactaris
  misc_feature (1)..(227): tr|A0A414P695|A0A414P695_9FIRM 7-cyano-7-deazaguanine s ynthase OS=Ruminococcus lactaris OX=46228 GN=queC PE=3 SV=1
MKALVLSSGGVDSTTALALAVSRYGKDNVIALSVSYGQKHDKEIQAAKAVSAFYGVEQLFLDLSKIFQYSNCSLLQQSKEEIPEESYAKQIEKTEGEKPVSTYVPFRNGLFLSSAASIALSKDCSVILYGAHADDSAGFAYPDCSPVFNDAMNQAIFEGSGHQLKVEAPFVNMTKAEVVKMGLELNAPYELTWSCYEGKDEPCGKCGTCIDRAAAFAANGVSDPAIK

SEQ ID NO: 41974 - protein, 227 aa, Ruminococcus lactaris
  misc_feature (1)..(227): tr|V8BK58|V8BK58_9FIRM 7-cyano-7-deazaguanine synthase OS=Ruminococcus lactaris CC59_002D OX=1073376 GN=queC P E=3 SV=1
MKALVLSSGGVDSTTALALAVSRYGKDNVIALSVSYGQKHDKEIQAAKAVSAFYGVEQLFLDLSKIFQYSNCSLLQQSTEEIPEESYAKQIEKTEGEKPVSTYVPFRNGLFLSSAASIALSKDCSVILYGAHADDSAGFAYPDCSPVFNDAMNQAIFEGSGHQLKVEAPFVNMTKAEVVKMGLELNAPYELTWSCYEGKDEPCGKCGTCIDRAAAFAANGVSDPAIK

SEQ ID NO: 41975 - protein, 227 aa, Ruminococcus sp.
  misc_feature (1)..(227): tr|A0A374JLJ2|A0A374JLJ2_9FIRM 7-cyano-7-deazaguanine s ynthase OS=Ruminococcus sp. OM07-7 OX=2293234 GN=queC P E=3 SV=1
MKALVLFSGGIDSTTALGLAIKKYGKDQVIALSVSYGQKHDKEIRAAIAVAEYYGVEHLFLDLSKIFQYSNCSLLQRSTEEIPEESYAEQISKTNGDKPVSTYVPFRNGLFLSSAASIALSKECGVIYYGAHADDSAGFAYPDCSPVFNQAMNEAIWEGSGHQLKIEAPFVNVSKAEVVRIGLELGVPYELTWSCYEGGEKPCGKCGTCIDRAAAFQANHVEDPALR

SEQ ID NO: 41976 - protein, 226 aa, Ruminococcus sp.
  misc_feature (1)..(226): tr|A0A3C0IFY5|A0A3C0IFY5_9FIRM 7-cyano-7-deazaguanine s ynthase OS=Ruminococcus sp. OX=41978 GN=queC PE=3 SV=1
MKAMVLFSGGVDSTTALALAVEKYGASEVLALSIYYGQKHKKELEAAQKVVNYYGVAWKQLDLTTIFADSNCSLLENSTEEIPQESYAEQLEKTNGAPVSTYVPFRNGLFLASAASMALSNGCEVIYYGPHADDAAGNAYPDCSTVFNDAMKTAIYEGSGHELRVEAPFVTWTKKDIVKKGLELHVPYELTWSCYEGGEKPCGVCGTCRDRQAAFLANGVEDPLLK

SEQ ID NO: 41977 - protein, 227 aa, [Ruminococcus] torques
  misc_feature (1)..(227): tr|D4LZK8|D4LZK8_9FIRM 7-cyano-7-deazaguanine synthase OS=[Ruminococcus] torques L2-14 OX=657313 GN=queC PE=3 SV=1
MKALVLFSGGIDSTTALGLAIKKYGKDQVIALSISYGQKHDKEIRAAIAVAEYYGVEHLFLDLSKIFQYSNCSLLQQSTEEIPEESYAEQISKTNGDKPVSTYVPFRNGLFLSSAASIALSKECGVIYYGAHADDSAGFAYPDCSPVFNQAMNEAIWEGSGHQLKIEAPFVNVSKAEVVRIGLELGVPYELTWSCYEGGEKPCGKCGTCIDRAAAFQANHVEDPALR

SEQ ID NO: 41978 - protein, 227 aa, [Ruminococcus] torques
  misc_feature (1)..(227): tr|A0A174Z6J7|A0A174Z6J7_9FIRM 7-cyano-7-deazaguanine s ynthase OS=[Ruminococcus] torques OX=33039 GN=queC PE=3 SV=1
MKALVLFSGGIDSTTALGLAIKKYGKDQVIALSVSYGQKHDKEIRAAIAVTEYYGVEHLFLDLSKIFQYSNCSLLQQSTEEIPEESYAEQISKTNGDKPVSTYVPFRNGLFLSSAASIALSKECGVIYYGAHADDSAGFAYPDCSPVFNQAMNEAIWEGSGHQLKIEAPFVNVSKAEVVRIGLELGVPYELTWSCYEGGEKPCGKCGTCIDRAAAFQANHVEDPALR

SEQ ID NO: 41979 - protein, 217 aa, Rummeliibacillus sp.
  misc_feature (1)..(217): tr|A0A3N5ZR99|A0A3N5ZR99_9BACL 7-cyano-7-deazaguanine s ynthase OS=Rummeliibacillus sp. TYF005 OX=2058214 GN=qu eC PE=3 SV=1
MLKDEKAIVVFSGGQDSTTCLFWALQTFKEVEAVTFNYNQRHVAEIDCAKEIAEELGVKHHILDMSLLNQLAPNALTRDDIEVKAGEDGALPSTFVPGRNLLFLSFAGVLANQVGAKHIITGVCETDFSGYPDCRDDFVKSLNVTLNLAMDEQLVIHTPLMWLDKAETWKMADDMGKLEYVRTKTLTCYNGIKGDGCGTCPACHLRLKGYDQYLKMK

SEQ ID NO: 41980 - protein, 230 aa, Ruthia magnifica
  misc_feature (1)..(230): sp|A1AWK9|QUEC_RUTMC 7-cyano-7-deazaguanine synthase OS =Ruthia magnifica subsp. Calyptogena magnifica OX=41340 4 GN=queC PE=3 SV=1
MSNTRHKIKAVILLSGGLDSTTTLAIAKTKNFECYSLSFDYGQKQKSELKSAENFAKIFGSIKHRVMKISLSNIDFSALTDDKIDIPKFSKSDDIPITYVPARNTIFLSYALSWSEVLDCQHIFIGVNTLDYSGYPDCREIYIKAFEVMANLATKQSIEGKKLTIHTPLIHLNKAQIIKKGLSLGIDYSLTTTCYQADKSGKACGICDACEYRKLGFIEAKVADPTRYQI

SEQ ID NO: 41981 - protein, 221 aa, Saccharibacillus sp.
  misc_feature (1)..(221): tr|A0A254P3G4|A0A254P3G4_9BACL 7-cyano-7-deazaguanine s ynthase OS=Saccharibacillus sp. O23 OX=2009338 GN=queC PE=3 SV=1
MLKNEKAVVVFSGGQDSTTCLFWAKKTFAEVQAVTFDYGQRHKLEIDCARQIAEELGVKHTVLDMSLLNQLAPNALTRDDIEIAHEDGELPSTFVEGRNLLFLSFAAILAKTSGARHIVTGVCETDFSGYPDCRDTFIKSLDVTLNLAMDYPFVIHTPLMWLDKAETWALADELSAFDFVRERTLTCYNGVIGDGCGECPACKLRRAGLDKYLEDRKAAAL

SEQ ID NO: 41982 - protein, 220 aa, Saccharibacillus sp.
  misc_feature (1)..(220): tr|A0A4Y6V1Z9|A0A4Y6V1Z9_9BACL 7-cyano-7-deazaguanine s ynthase OS=Saccharibacillus sp. ATSA2 OX=2583377 GN=que C PE=3 SV=1
MLKNEKAVVVFSGGQDSTTCLFWALRTFAEVQAVTFDYGQRHKLEIDCAREIAAELGVKHTVLDMSLLNQLAPNALTRDDIDITHEEGELPSTFVEGRNLLFLSFAAILAKTSGARHIVTGVCETDFSGYPDCRDTFVKSLDVTLNLAMDYPFVIHTPLMWLDKAETWALADQLDAFDFVRERTLTCYNGVIGDGCGECPACQLRRAGLDKYVGERQATV

SEQ ID NO: 41983 - protein, 246 aa, Saccharibacter sp.; identical to SEQ ID NO: 40642
  misc_feature (1)..(246): tr|A0A060QA93|A0A060QA93_9PROT 7-cyano-7-deazaguanine s ynthase OS=Saccharibacter sp. AM169 OX=1343158 GN=queC PE=3 SV=1

SEQ ID NO: 41984 - protein, 224 aa, Saccharicrinis carchari
  misc_feature (1)..(224): tr|A0A521B8D0|A0A521B8D0_9BACT 7-cyano-7-deazaguanine s ynthase OS=Saccharicrinis carchari OX=1168039 GN=queC P E=3 SV=1
MNKAVVLLSGGLDSAVTLYLAKSKGYDEVHALSFDYGQRHQTELNHAMAIASRAGVTAHKIATLNLGDFGGSSLTDKNMEVEDGDVNRTDIPLTYVPARNMVFLSVAASYAESIQAQHIYIGVSEVDYSGYVDCRQEFIDAMELAINKGTVMGAEGGMPIKIHAPFANKTKAQEITLGMELGVDFSLTWSCYRGGEKPCGTCDSCLLRAKAFAEAGFEDAGVKI

SEQ ID NO: 41985 - protein, 222 aa, Saccharicrinis fermentans
  misc_feature (1)..(222): tr|W7YQB7|W7YQB7_9BACT 7-cyano-7-deazaguanine synthase OS=Saccharicrinis fermentans DSM 9555 = JCM 21142 OX=86 9213 GN=queC PE=3 SV=1
MKAVVLLSGGLDSAVALYLAKSKAYDEVHALSFDYGQRHQTELNHAKAIARKAGVTAHKIVTLNLGDFGGSSLTDKSMEVEDGDVTRTDIPVTYVPARNMVFLSIAASYAESIEAQNIFIGVSQVDYSGYVDCRQTFIDAMEKAINQGTVMGAEGGKPIKIHAPFVNKTKAQEIKLGMELGVDFGLTWSCYRGGEKPCGTCDSCLLRAKAFEEAGFEDAALK

SEQ ID NO: 41986 - protein, 234 aa, Saccharomonospora marina; identical to SEQ ID NO: 35935
  misc_feature (1)..(234): tr|H5WY58|H5WY58_9PSEU 7-cyano-7-deazaguanine synthase OS=Saccharomonospora marina XMU15 OX=882083 GN=queC PE= 3 SV=1

SEQ ID NO: 41987 - protein, 233 aa, Saccharomonospora sp.
  misc_feature (1)..(233): tr|A0A4P7CD08|A0A4P7CD08_9PSEU 7-cyano-7-deazaguanine s ynthase OS=Saccharomonospora sp. 31sw OX=2528243 GN=que C PE=3 SV=1
MVRPAIVLLSGGLDSTTVLAIAKDQGYTPYALSFRYGQRHVVELDAARKVAQALGVADHKTIDIDLRAFGGSALTSDISVPKHDTLDEIDATSIPVTYVPARNTIFLSFALAYAEVVGATDIFTGVTAVDYSGYPDCRPQYIAAYEKMANLATRAGVEGEAPLRLHSPLIEMSKADIIREGLRLRVDYSITSSCYDPDEQARACGRCDTCLLRLKGFSEAGVTDPAPYRNVSV

SEQ ID NO: 41988 - protein, 255 aa, Saccharomonospora sp.
  misc_feature (1)..(255): tr|A0A1Q9UVF4|A0A1Q9UVF4_9PSEU 7-cyano-7-deazaguanine s ynthase OS=Saccharomonospora sp. CUA-673 OX=1904969 GN= queC PE=3 SV=1
MSARIDTSPSHANRIGNVAAPGTPGIHRHPRHAVVIASGGLDSTVLAYWLQARGTQLTLLSFDYGQRHRVELRFAAATAQALRTRHEVVDLSALGRVLQGSALTDSSVGVPEGHYTDETMRATVVPNRNAIMLDIAVALAVTTQADAVAFGAHAGDHPIYPDCRERFTTSFARTAQVANEGFLTDDFQLVVPFLASSKTDIVRLGAALNVPFEQTWSCYRGGTEHCGTCGTCTERREAFHDAGVADRTTYAVGCT

SEQ ID NO: 41989 - protein, 225 aa, Saccharophagus degradans
  misc_feature (1)..(225): sp|Q21HP4|QUEC_SACD2 7-cyano-7-deazaguanine synthase OS =Saccharophagus degradans (strain 2-40 / ATCC 43961 / D SM 17024) OX=203122 GN=queC PE=3 SV=1
MSNKKAVILVSGGLDSTTALAIAQSEGYECYTLSFDYGQRHRVELEAAQRVSDKMHVAQHKVVQLDLKSIGGSALTDDDIAVPEDGPEGIPVTYVPARNTVFLSIALGWAEVLNAEAIFIGVNAVDYSGYPDCRPEYIAAFQKLAMLATKVGVEGKPLQIKTPLIDMTKAEIVQLGMRLGVDYSATVSCYQANVDGEACGRCDSCRLRRKGFEDAQMEDPTRYAN

SEQ ID NO: 41990 - protein, 224 aa, Saccharospirillum sp.
  misc_feature (1)..(224): tr|A0A2T6E6X3|A0A2T6E6X3_9GAMM 7-cyano-7-deazaguanine s ynthase OS=Saccharospirillum sp. MSK14-1 OX=1897632 GN= queC PE=3 SV=1
MTKKAVVLLSGGLDSTTVLAQAKADGYELYALSFDYGQRHDAELDAAKRIAQAMDVVEHKVIPIDLASLGGSALTDHSLEVPTEETDGIPVTYVPARNTVFLSIALGWAEVLEAQNLFIGVSAVDYSGYPDCRPEYIEAYERLANLATRMGVEGRMITIHTPLINLSKAQTVALGSRLGVDYGLTISCYQANESGEACGQCDSCRLRQKGFAEAGLPDPTRYQA

SEQ ID NO: 41991 - protein, 233 aa, Saccharothrix espanaensis
  misc_feature (1)..(233): tr|K0JYS9|K0JYS9_SACES 7-cyano-7-deazaguanine synthase OS=Saccharothrix espanaensis (strain ATCC 51144 / DSM 4 4229 / JCM 9112 / NBRC 15066 / NRRL 15764) OX=1179773 G N=queC PE=3 SV=1
MARRAIVLLSGGLDSCTVLAIAKDQGFESYALSFDYGQRHRTELRSAGLVAAALGATEHRTATIDLRVFGGSALTSDVEVPKHRIVDDIDSNIIPVTYVPARNTIFLAFATAYAEVVGAFDIFTGVTAVDYSGYPDCRPEFMEAFEATANLGTRAGVEQGERLRLHSPLIEMSKADIIREGTRLGVDYSLTSSCYDPDDRGRACGHCDTCLLRLKGFAECGIKDPVAYRGAVA

SEQ ID NO: 41992 - protein, 235 aa, Saccharothrix sp.
  misc_feature (1)..(235): tr|A0A0F0HJT0|A0A0F0HJT0_9PSEU 7-cyano-7-deazaguanine s ynthase OS=Saccharothrix sp. ST-888 OX=1427391 GN=queC PE=3 SV=1
MTGQAPHRAVVIASGGLDSSTVAYWLADRGSQLMLLSFDYGQRHRKELHYAERIAGHLGADHEVVDLSDLGRLLAGSALTDPGVQVPDGHYSEASMRSTVVPNRNAIMLSIAVAAAVSSGADAVAFGAHSGDHAIYPDCRTSFFDLFAAVTREGNEGFLAEGFELLAPFIGLTKAGIVEIGRQVGVPFEDTWSCYKGGEVHCGVCGTCAERREAFQVAGVVDPTVYSTSVPGVAR

SEQ ID NO: 41993 - protein, 234 aa, Saccharothrix sp.
  misc_feature (1)..(234): tr|A0A1Q4XAE5|A0A1Q4XAE5_9PSEU 7-cyano-7-deazaguanine s ynthase OS=Saccharothrix sp. CB00851 OX=1835005 GN=queC PE=3 SV=1
MTIDHPEHRHPEHAVVIASGGLDSTVLAYWLAARHSRLTLVSFDYGQRHRVELDHAAEIARLLLSPHRIIDLTSLGALLTGSALTDTSVAVPDGHYTDESMAATVVPNRNAIMLDIAVAVAIAVRADAVAFGAHAGDHTIYPDCRPEFVERFARSVQAANEGLLVPGFQVLAPFLTLTKTDIVRVGEALAVPFARTWSCYRGREVHCGTCGTCTERQEAFRDNGIADPTVYRAA

SEQ ID NO: 41994 - protein, 233 aa, Saccharothrix variisporea
  misc_feature (1)..(233): tr|A0A495XFT9|A0A495XFT9_9PSEU 7-cyano-7-deazaguanine s ynthase OS=Saccharothrix variisporea OX=543527 GN=queC PE=3 SV=1
MAQPAIVLLSGGLDSTTVLAIAKDQGFEPYALSFSYGQRHSVELEAAKRVAKSLGVARHVITDIDLRVFGGSALTSDIAVPKHDSVDEVDADSVPVTYVPARNTIFLSFALAYAEVVGSTDIFTGVTAVDYSGYPDCRPEYMAAYENMANLATRAGVEGEARLRLHSPLIEMSKADIIREGLRLGVDYSITSSCYDPDDQGRACGRCDTCLLRLKGFAEAGVSDPVAYRNANA

SEQ ID NO: 41995 - protein, 223 aa, Salibacterium halotolerans
  misc_feature (1)..(223): tr|A0A1I5T5E9|A0A1I5T5E9_9BACI 7-cyano-7-deazaguanine s ynthase OS=Salibacterium halotolerans OX=1884432 GN=que C PE=3 SV=1
MSFAQEKAVVVFSGGQDSTTCLFWAHERFQEVTAVTFDYGQRHDNEIETARDIAADLGVEHHVLDMSLLNQLAPNALTRDDMEVKEGEDGELPSTFVEGRNLLFFSFASILASQKGAKHVVTGVCETDYSGYPDCRDVFVKSLNVTLNLAVGKEFVLHTPLMWLDKKETWELADKLGRLTYVKENTLTCYHGIRGSGCGECPACKLRRAGYEQYIQEKERELG

SEQ ID NO: 41996 - protein, 223 aa, Salibacterium qingdaonense
  misc_feature (1)..(223): tr|A0A1I4IFN4|A0A1I4IFN4_9BACI 7-cyano-7-deazaguanine s ynthase OS=Salibacterium qingdaonense OX=266892 GN=queC PE=3 SV=1
MSFAEEKAVVVFSGGQDSTTCLFWALERFQEVTAVTFDYGQRHDNEIQTARDIAADLDVEHHVLDMSLLNQLAPNALTRDDMEVKEGEEGELPSTFVEGRNLLFFSFASILASQKGAKHVVTGVCETDYSGYPDCRDVFVKSLNVTLNLAVGKEFVLHTPLMWLDKKETWELADNLGRLTYVKENTLTCYHGIRGSGCGECPACKLRQAGYEQYIQEKERELG

SEQ ID NO: 41997 - protein, 220 aa, Salilacibacter sp.
  misc_feature (1)..(220): tr|A0A514LM45|A0A514LM45_9ACTN 7-cyano-7-deazaguanine s ynthase OS=Salilacibacter sp. NKC3-5 OX=2502791 GN=queC PE=3 SV=1
MPQGSAVVVFSGGQDSTTCLFWALKRFEKVYAVTFAYGQRHDDEIEVAKEIAAEVGVEHEVLDMGLLNQLAPNALTRKDIDVSEGADGELPSTFVPGRNLLFLSFAAIFGEQRGAKHIVTGVCETDSSGYPDCRDGFVKSLNVTLNLAMDETFVLHAPLMWLDKAGAWKLADDLGQLPYIRDYTLTCYHGIRGNGCSECPACKLRRQGLEMYLNSKDRDA

SEQ ID NO: 41998 - protein, 222 aa, Salimicrobium flavidum
  misc_feature (1)..(222): tr|A0A1N7IR86|A0A1N7IR86_9BACI 7-cyano-7-deazaguanine s ynthase OS=Salimicrobium flavidum OX=570947 GN=queC PE= 3 SV=1
MKQREKAVVVFSGGQDSTTCTFWALKHYEEVELVTFDYNQRHNEELDVAREIADDLGLKHHVLDMSLISQLAPNALTDESIEVKDGEDGELPSTFVPGRNLLFLSFASILAKQIGARHIVTGVCETDFSGYPDCRDVFIKSMNVTLNLSMDETFVVHTPLMWLDKKETWQLADELDAFEYVRDRTLTCYHGVRGYGCGECPSCRLRQNGLDAYLAERQEEHA

SEQ ID NO: 41999 - protein, 222 aa, Salimicrobium halophilum
  misc_feature (1)..(222): tr|A0A1G8T6M9|A0A1G8T6M9_9BACI 7-cyano-7-deazaguanine s ynthase OS=Salimicrobium halophilum OX=86666 GN=queC PE =3 SV=1
MKQSEKAVVVFSGGQDSTTCTFWALKHYDEVELVTFNYNQRHNEELDVAREIAEDLGLKHHVLDMSLISQLAPNALTDESIEVKDGEDGELPSTFVPGRNLLFLSFASILAKQIGARHIVTGVCETDFSGYPDCRDVFIKSLNVTLNLSMDDTFVVHTPLMWLDKKETWQLADELDAFEYVRDRTLTCYHGVHGYGCGECPSCKLRQNGLDAYLAERQEEHA

SEQ ID NO: 42000 - protein, 254 aa, Salimicrobium jeotgali
  misc_feature (1)..(254): tr|K2GA59|K2GA59_9BACI Uncharacterized protein OS=Salim icrobium jeotgali OX=1230341 GN=MJ3_09613 PE=4 SV=1
MQKTHHILWTGGFDSTFRVLDLVLNKKRLVQPHYIIDEERPSTNKELETIHTIIAHVGIMDMKAAERIKPLIIVNKKDITSEQEDKDKFERLVSTSFLGTQYVWLPAYLKQNGIAEIESGAHKDDNIETFIADYVKKIEDNDDYYYMLKNEYADTDLSIFARFQFPLLDYSKLDMERIAKESGFHHLMEMTWFCYRPQKDGQPCGLCNPCKYAKEEGMERRVPRPRIDDFIMFYSLKYLRKAKRNLVNGSGSKK

SEQ ID NO: 42001 - protein, 254 aa, Salimicrobium salexigens
  misc_feature (1)..(254): tr|A0A1N7N8R7|A0A1N7N8R7_9BACI 7-cyano-7-deazaguanine s ynthase (Queuosine biosynthesis) OS=Salimicrobium salex igens OX=908941 GN=SAMN05421758_1123 PE=4 SV=1
MQKTHHILWTGGFDSTFRVLDLVLNKKREVQPHYIIDEERPSTNKELETIHTIIAHIGIMDMKAAERIKPLIIVNKKDITSDQEDKDKFERLISTSFLGTQYVWLPAYLKQNGIAEIESGAHKDDNIETFIADYVKKIEDNDDYYYMLKNEYADTDLSIFARFQFPLLDYSKLDMERIAKESGFNHLMEMTWFCYRPQKDGKPCGLCNPCKYAKEEGMERRVPRPRVDDFIMFYSLKYLRKAKRNLVNGSGSKK

SEQ ID NO: 42002 - protein, 256 aa, Salimicrobium sp.
  misc_feature (1)..(256): tr|A0A2A3A5Q6|A0A2A3A5Q6_9BACI Uncharacterized protein OS=Salimicrobium sp. WN024 OX=2029857 GN=CKW00_11130 PE =4 SV=1
MNMQKTHHILWTGGFDSTFRVLDLVLNKKRQVQPHYIIDEERPSTNKELETIHTIIAHIGIMDMKAAERIKPLIIVNKKDITSDQEDKDKFERLISTSFLGTQYVWLPAYLKQNGITEIESGAHKDDNIETFIADYVEKIEDNDDYYYMLKDEYADTDLSIFSRFQFPLLDYSKLDMERIAKESGFNHLMEMTWFCYRPQKDGKPCGLCNPCKYAKEEGMERRVPRPRVDDFIMFYSLKYLRKAKRNLVNGSGSKK

SEQ ID NO: 42003 - protein, 237 aa, Salinibacter sp.
  misc_feature (1)..(237): tr|A0A2P6C5C7|A0A2P6C5C7_9BACT 7-cyano-7-deazaguanine s ynthase OS=Salinibacter sp. 10B OX=1923971 GN=queC PE=3 SV=1
MDTAPPSPNAPGSDALVLFSGGQDSTTCLFWAKDHFETVRAVGFDYGQKHKVELEQAEHIADRAGIPFTVLDLDGTLEGSALTEPDTEINTAHEKDERLPASFVPGRNALFLSLAASHAYNHDITDLVGGMCQTDYSGYPDCRRVFIDSMETSLSLALDVDVRIHTPLMYLTKAETWKLANDLGVLDIVRRESHTDYNGDRSQFNEWGYGKLDNPASKLRAAGYREAKEKGWLESDE

SEQ ID NO: 42004 - protein, 218 aa, Salinicoccus alkaliphilus
  misc_feature (1)..(218): tr|A0A1M7EZF4|A0A1M7EZF4_9STAP 7-cyano-7-deazaguanine s ynthase OS=Salinicoccus alkaliphilus DSM 16010 OX=11232 31 GN=queC PE=3 SV=1
MNRKKALVVFSGGQDSTTCMFHALKKYDEVELVTFMYGQRHALEINVARKIADEHDLKHHVLDMNLLSQLAPNALTSHDMTIESDDNGLPNTFVPARNMIFLSFAAALAYQIKAGVIITGVSQTDFSGYPDCRNNFIQSMNLTANLAMDTDFEIETPLMWLDKKETWAMADMLGRLDYIKENTLTCYEGVIGDGCGECPACALRNEGLKDHLKERGGR

SEQ ID NO: 42005 - protein, 220 aa, Salinicoccus halodurans
  misc_feature (1)..(220): tr|A0A0F7D3V3|A0A0F7D3V3_9STAP 7-cyano-7-deazaguanine s ynthase OS=Salinicoccus halodurans OX=407035 GN=queC PE =3 SV=1
MNEKKALVVFSGGQDSTTCMFHALENYEEVELVTFEYGQRHSLEIEIAKSIAEEHGLKHHVLDMSLLGQLSPNALTRHDMTIGQDGAARVPNTFVPARNMLFLSFAAALAYQIGAKTIITGVCETDFSGYPDCRDIFVKSMNITANLAMDRDFVIETPLMWLDKKETWALADRYGRLDYIREKTLTCYEGVIGDGCGECPSCRLRNEGLRAYLEERGTDA

SEQ ID NO: 42006 - protein, 224 aa, Salinicoccus kekensis
  misc_feature (1)..(224): tr|A0A285URZ8|A0A285URZ8_9STAP 7-cyano-7-deazaguanine s ynthase OS=Salinicoccus kekensis OX=714307 GN=queC PE=3 SV=1
MNRKKALVVFSGGQDSTTCMFHALKKYDEVELVTFMYGQRHALEIDVARKIADEHGLKHHVLDMDLLSQLAPNALTHDMQIDEDGGMPNTFVPARNMIFLSFASALAYQIKAGVIITGVSQTDFSGYPDCRNNFIQSMNLTANLAMDADFEIETPLMWLDKKETWALADGLGKLEYIRENTLTCYEGVPGDGCGTCPACELRNAGLEAYLKERGNDGVLSNPGS

SEQ ID NO: 42007 - protein, 226 aa, Salinicoccus qingdaonensis
  misc_feature (1)..(226): tr|A0A1G9DK53|A0A1G9DK53_9STAP 7-cyano-7-deazaguanine s ynthase OS=Salinicoccus qingdaonensis OX=576118 GN=queC PE=3 SV=1
MDHKKALVVFSGGQDSTTCMFYAMENYEAVELVTFMYGQRHALEIDVAKKIAEEHKLKHHVLDMELLSQLSPNALTSHDMAIEDDDKGIPNTFVPARNMIFLSFATALAYQIKAGTIMTGVCQTDFSGYPDCRDIFVKSMNITANLAMDEDFIIETPLMWLDKKETWALADELGRLDYVRENTLTCYEGVIGDGCGECPACELRHKGLEEYLNERGDSHDVSDTCS

SEQ ID NO: 42008 - protein, 217 aa, Salinicoccus roseus
  misc_feature (1)..(217): tr|A0A265E6R6|A0A265E6R6_9STAP 7-cyano-7-deazaguanine s ynthase OS=Salinicoccus roseus OX=45670 GN=queC PE=3 SV =1
MDRNKALVVFSGGQDSTTCMFHALANYRTVELVTFDYGQRHSKEIEVAKSIAEEQGLKHHVLDMSLLGQLSPNALTEHGMDITQSEDEGVPNTFVPARNMLFLSFATALGYQTGAGTIITGVCETDFSGYPDCRDIFVKSMNVTANLAMDRNFVIETPLMWLDKKQTWALADEYGQLDYIRNRTLTCYEGVIGDGCGECPACRLRNDGLQAYLNEKE

SEQ ID NO: 42009 - protein, 217 aa, Salinicoccus roseus
  misc_feature (1)..(217): tr|A0A0C2HQE7|A0A0C2HQE7_9STAP 7-cyano-7-deazaguanine s ynthase OS=Salinicoccus roseus OX=45670 GN=queC PE=3 SV =1
MDRNKALVVFSGGQDSTTCMFHALANYSTVELVTFDYGQRHSKEIEVAKSIAEEQGLKHHVLDMSLLGQLSPNALTEHGMDITQSEEESVPNTFVPARNMLFLSFATALGYQTGAGTIITGVCETDFSGYPDCRDIFVKSMNVTANLAMDRNFVIETPLMWLDKKQTWALADEYGQLDYIRNRTLTCYEGVIGDGCGECPACRLRNDGLQAYLNEKE

SEQ ID NO: 42010 - protein, 219 aa, Salinicoccus sediminis
  misc_feature (1)..(219): tr|A0A0M2SPM0|A0A0M2SPM0_9STAP 7-cyano-7-deazaguanine s ynthase OS=Salinicoccus sediminis OX=1432562 GN=queC PE =3 SV=1
MREKKALVVFSGGQDSTTCMFHAMAHYDEVDLVTFEYGQRHSLEIDVAKQIASEHGLRHHVLDMSLLGQLSPNALTRHDMEISGEDTEMPNTFVPARNMLFLSFASALAYQTGAKTIITGVCETDFSGYPDCRDIFVKSMNVTANLAMDGNFVIETPLMWLDKKETWALADRYGKLDYIREKTLTCYEGIIGDGCRECPACRLRSDGLDAYIEEREGDS

SEQ ID NO: 42011 - protein, 219 aa, Salinicoccus sp.
  misc_feature (1)..(219): tr|A0A558AQY6|A0A558AQY6_9STAP 7-cyano-7-deazaguanine s ynthase OS=Salinicoccus sp. CT19 OX=2493691 GN=queC PE= 3 SV=1
MDRQKAIVVFSGGQDSTTCMFHAMAHYDEVELVTFNYGQRHSTEIEVAENIAKEQGLKHRVLDMSLLGQLSPNALTDHDMDIAADEEAGVPNTFVPARNMLFLSFASAIAYQVGAKTIITGVCETDFSGYPDCRDIFIKSMNVTANLAMDRNFVIETPLMWLDKKETWALADKYGKLDYIRNRTLTCYEGVIGDGCGECPACQLRNAGLEAYLDEKEGQ

SEQ ID NO: 42012 - protein, 229 aa, Salinicola socius
  misc_feature (1)..(229): tr|A0A1Q8SPD1|A0A1Q8SPD1_9GAMM 7-cyano-7-deazaguanine s ynthase OS=Salinicola socius OX=404433 GN=queC PE=3 SV= 1
MTPPTPHTTPQPAVVIYSGGMDSYTVLHRAIRQGYDVHALSFHYGQRHARELDVARHVCDELGVSHKVVDIRAIHQLIGNSALTDSDRDMPKADYAADNLADTVVPNRNMILLSLAIGHAVNIDAPICFYGAHGGDHVLYPDCRPAFVDRMNDVAAIANFEAVRIEAPYLHSDKAQILADGLEMGLDYAQTWTCYLGQETACGECGSCRERLNAFASLGMTDPLPYAKP

SEQ ID NO: 42013 - protein, 232 aa, Salinicola sp.
  misc_feature (1)..(232): tr|A0A2D8P052|A0A2D8P052_9GAMM 7-cyano-7-deazaguanine s ynthase OS=Salinicola sp. OX=1978524 GN=queC PE=3 SV=1
MTPSTSHTPSQPAVVIYSGGMDSYTVLHRAIREGYEVHALSFHYGQRHARELDVARRVCEDLGVSHRIVDIRAIHQLIGNSALTDSDRSLPKADYAEDNLAATVVPNRNMILLSLAIGYAVNIEASVCFYGAHGGDHVLYPDCRPAFVDRMNDVAAIANFESVSIEAPYLYSDKAKILSDGIEMGLDYALTWTCYLGGETACGECGSCRERLDAFARVGVKDPIPYALPDRH

SEQ ID NO: 42014 - protein, 229 aa, Salinicola sp.
  misc_feature (1)..(229): tr|A0A1Q8T3K1|A0A1Q8T3K1_9GAMM 7-cyano-7-deazaguanine s ynthase OS=Salinicola sp. MH3R3-1 OX=1928762 GN=queC PE =3 SV=1
MTSSTSSSDSTPVVVIYSGGMDSYTVLHRAIREGYDVHALSFHYGQRHARELDVASRVCADLGLSHRVVDIRAIHELIGNSALTDSGRAMPKADYAEDNLADTVVPNRNMILLSLAIGYAVNIKAPICFYGAHGGDHVLYPDCRPAFVERMNDVSAIANFEAVSIEAPYLHSDKAQILADGIEMGLDYADTWTCYLGQEVACGECGSCRERLNAFAELGMKDPIPYATR

SEQ ID NO: 42015 - protein, 219 aa, Salinimonas sediminis
  misc_feature (1)..(219): tr|A0A346NK28|A0A346NK28_9ALTE 7-cyano-7-deazaguanine s ynthase OS=Salinimonas sediminis OX=2303538 GN=queC PE= 3 SV=1
MTENVVVIYSGGMDSYTVLHKALAQGKQPYALSFDYGQRHKKELDYAASVCKQLNVPHKIVDISAINSIVGGSALTSDIDVPEGHYEEPSMQTTVVPNRNMILLSLAVGYAVSLDATKVYYGAHSGDHAIYPDCRPEFVEKMNQVCHIANYTPVEIVTPYLHESKIAILTDGLKMGLDYRQTWTCYNGREKACGQCGACQERLEAFAENKVKDPLEYEG

SEQ ID NO: 42016 - protein, 221 aa, Salinimonas sp.
  misc_feature (1)..(221): tr|A0A5B7YFT2|A0A5B7YFT2_9ALTE 7-cyano-7-deazaguanine s ynthase OS=Salinimonas sp. KX18D6 OX=2572577 GN=queC PE =3 SV=1
MSENVVVIYSGGMDSYTVLNKAIREGKTPHALSFNYGQRHKKELDYAARVCERLGIPHKVVDISSINSLVGGSALTSDIDVPEGHYEEPSMQTTVVPNRNMILLSLAIGYAVSLEATKVYYGAHSGDHAIYPDCRPEFVEKMNSVSKIANYTPVEIVTPYLLESKTAILADGLFMGLDYSETWTCYNGREKACGKCGACQERLEAFADNGATDPLHYETVN

SEQ ID NO: 42017 - protein, 219 aa, Saliniradius amylolyticus
  misc_feature (1)..(219): tr|A0A2S2E1P3|A0A2S2E1P3_9ALTE 7-cyano-7-deazaguanine s ynthase OS=Saliniradius amylolyticus OX=2183582 GN=queC PE=3 SV=1
MAQKAVVIYSGGMDSFTVLHKALQQGMELYALSFDYGQRHKKELDYAAAVCADLGISHKIVDISAINTLVGGSALTDDIEVPEGHYEEQSMKSTVVPNRNMILLSLAVGYAVSLQANQVYYGAHSGDHAIYPDCRPEFVHKMNDVCAIANYEAVEIVTPYLNVSKTDILTDGLKMGLDYSQTWTCYNGRTLACGKCGACQERQEAFAQNQAADPLEYEN

SEQ ID NO: 42018 - protein, 233 aa, Salinisphaera halophila
  misc_feature (1)..(233): tr|A0A423PM86|A0A423PM86_9GAMM 7-cyano-7-deazaguanine s ynthase OS=Salinisphaera halophila YIM 95161 OX=1051139 GN=queC PE=3 SV=1
MTVAQDRADTPRAVVLFSGGLDSTTCLAEAAADGCECHALSFDYGQRHTAEIEAARRIAAAMPHVADHKCVTIDFDGMGGSALTDPTIDVPETATNGIPPTYVPARNTVFLSIALGWAEILEAEAIYIGVNAVDYSGYPDCRPAFIQAFESLASLATRAAVETGRGVAVRTPLMDLSKAEIVQRGAALGVDYADTVTCYQADAEGRACGRCDACRLRRQGFREAGIADPTRYR

SEQ ID NO: 42019 - protein, 233 aa, Salinisphaera hydrothermalis
  misc_feature (1)..(233): tr|A0A084IKJ5|A0A084IKJ5_SALHC 7-cyano-7-deazaguanine s ynthase OS=Salinisphaera hydrothermalis (strain C41B8) OX=1304275 GN=queC PE=3 SV=1
MSASEQPSAVVLLSGGLDSTTCLAEAAAAGYRCYALSFDYGQRHTAELTAARRIASAAGVVEHKIVKIDFDGMGGSALTDASIDVPESPTEGIPSTYVPARNTLFLSVALGWAEVLGADAIYIGVNAVDYSGYPDCRPEFIEAFERMAALATKVGVEGHPISVKTPLMHRTKAEIIARGHELGVDYSQTVTCYQADDDARACGLCDACRLRRAGFEAAGVPDPTRYQPDAPQS

SEQ ID NO: 42020 - protein, 228 aa, Salinisphaera japonica
  misc_feature (1)..(228): tr|A0A423PLU9|A0A423PLU9_9GAMM 7-cyano-7-deazaguanine s ynthase OS=Salinisphaera japonica YTM-1 OX=1209778 GN=q ueC PE=3 SV=1
MSQPTDKAAVVLLSGGLDSTTCLAEAKAAGHALYAVSFDYGQRHTAELSAARSIAASAGVVEHKVVTIDFDGMGGSALTDASIAVPETPGQGIPSTYVPARNTLFLSVALGWAEILEAGSIYIGVNAVDYSGYPDCRPEFIEAFESLGRLATKTGVEGRPIEIRAPLMHRTKAEIIRRGHELGVDYSQTISCYQADEHGRACGVCDACRLRAAGFAEAGVPDPTRYIG

SEQ ID NO: 42021 - protein, 233 aa, Salinisphaera orenii
  misc_feature (1)..(233): tr|A0A423PJT2|A0A423PJT2_9GAMM 7-cyano-7-deazaguanine s ynthase OS=Salinisphaera orenii MK-B5 OX=856730 GN=queC PE=3 SV=1
MTVAQDTADTPRAVVLFSGGLDSTTCLAEAAADGCECHALSFDYGQRHTAEIEAARRIAAAMPHVADHKCVTIDFDGMGGSALTDPAIDVPETATNGIPPTYVPARNTVFLSIALGWAEILEAEAIYIGVNAVDYSGYPDCRPAFIQAFESLASLATRAAVETGRGVAVRTPLMELSKAEIVQRGAALGVDYADTVTCYQADAEGRACGRCDACRLRRQGFRDAGIADPTRYR

SEQ ID NO: 42022 - protein, 230 aa, Salinisphaera shabanensis
  misc_feature (1)..(230): tr|F7QBJ1|F7QBJ1_9GAMM 7-cyano-7-deazaguanine synthase OS=Salinisphaera shabanensis E1L3A OX=1033802 GN=queC P E=3 SV=1
MTEPTRTPAVVLFSGGLDSTTCLAQARADGYDCYALSFDYGQRHTAELAAAQSYVADHEWIAEHKCVRLDFDGIGGSALTDPDIAVPETPANDIPATYVPARNTVFLSVALGWAEVLGAQAIYIGVNAVDYSGYPDCRPEFIEAFERLARLATKAAVQDGNFVSVQTPLIDLSKADIIRKGLSLGVDYARTVSCYQADMLGRACGRCDACRLRRAGFEQAGVTDPTIYQS

SEQ ID NO: 42023 - protein, 232 aa, Salinisphaera sp.
  misc_feature (1)..(232): tr|A0A2E9AJA8|A0A2E9AJA8_9GAMM 7-cyano-7-deazaguanine s ynthase OS=Salinisphaera sp. OX=1914330 GN=queC PE=3 SV =1
MSQPIRNRAVVLFSGGLDSTTCLAQAHADGHECYALSFDYGQRHTAELAAARAYVSEHDWIAEHKCVRLDFDGMGGSALTDPAINVPDAGGEGIPSTYVPARNTVFLSIALGWAEVLGAQAIYIGVNAVDYSGYPDCRPEFIDAFERMAALATKAAVQDGDRVSIKTPLIDLSKAEIIRQGVALGVDYARTVSCYQADVQGRACGRCDACELRRAGFEQAGVADPTIYQSER

SEQ ID NO: 42024 - protein, 233 aa, Salinisphaera sp.
  misc_feature (1)..(233): tr|A0A2Z3J7G5|A0A2Z3J7G5_9GAMM 7-cyano-7-deazaguanine s ynthase OS=Salinisphaera sp. LB1 OX=2183911 GN=queC PE= 3 SV=1
MSSSDQPLAVVLLSGGLDSTTCLAEAAAAGYRCYALSFDYGQRHTAELTAAKRIAAAAGVAEHKIVTIDFDGMGGSALTDDRIDVPETPSEGIPSTYVPARNTLFLSVALGWAEVLHADAIYIGVNAVDYSGYPDCRPEFIAAFERMAALATKAGVEGYPVALRTPLMHQTKAEIIQRGQALGVDYSQTVTCYQPDADARACGRCDACRLRRAGFEAAGVSDPTRYQPDAPNA

SEQ ID NO: 42025 - protein, 233 aa, Salinisphaeraceae bacterium
  misc_feature (1)..(233): tr|A0A2D4SFX2|A0A2D4SFX2_9GAMM 7-cyano-7-deazaguanine s ynthase OS=Salinisphaeraceae bacterium OX=2026789 GN=qu eC PE=3 SV=1
MSQAAESSGRAVVLLSGGLDSATCLALARAHGFACHTLALSYGQRHDAELRAARRLSGVLGAVEHKQVNIDLDGMGGSALTDASIEVPDEPGEGIPVTYVPARNTLMLSVALGWAEILDADQIFIGVNAVDYSGYPDCRPEYIESFQAMANLATRAAVQQGRRITIQAPLVRLSKAQIIERGLALGVDYAETVSCYRADRQGRACGRCDACRFRRAGFEDAGRPDPTRYQTPA

SEQ ID NO: 42026 - protein, 257 aa, Salinispora arenicola
  misc_feature (1)..(257): tr|A0A542XM38|A0A542XM38_9ACTN 7-cyano-7-deazaguanine s ynthase OS=Salinispora arenicola OX=168697 GN=queC PE=3 SV=1
MTRTPDPTGGDAAGITADLPVSGPDLPHIPAHAVVVCSGGLDSSVLAHWLAHLGSRLTVLAVDYGQRHRVELGFAGITADRLGAPSHVIDLSDVGRLLASALTDAQVQVPDGHYADDSMQVTVVPNRNAILLDLAVGLAVSTGADTVAFGAHAGDHPIYPDCRPEFVDAYRSMARVATEGLTSEPITVCAPFVRMTKTQIVALGTQLQVPLADTWSCYRGQSTHCGTCGTCTERREAFHHAEVPDPTRYAAGRDRVT

SEQ ID NO: 42027 - protein, 231 aa, Salinivibrio kushneri
  misc_feature (1)..(231): tr|A0A1V3GM42|A0A1V3GM42_9GAMM 7-cyano-7-deazaguanine s ynthase OS=Salinivibrio kushneri OX=1908198 GN=queC PE= 3 SV=1
MKKAVVVFSGGQDSTTCLIQAQAEYDEVHCLTFDYNQRHKQEIDVAREIAANRKVSAHKVLDVGLLNELAISSLTRDNIPVSNALNENGLPNSFVPGRNILFLTLAGIYAYQIGAEAVITGVCETDFSGYPDCRNDFIQSMQQALERGMDRQLALVTPLMWLNKAETWALADQYHALDFVRDHTLTCYNGIKGTGCGECPACHLRQRGLDDYLANQTDVQAALQRKQAENA

SEQ ID NO: 42028 - protein, 231 aa, Salinivibrio sharmensis
  misc_feature (1)..(231): tr|A0A1V3H4W0|A0A1V3H4W0_9GAMM 7-cyano-7-deazaguanine s ynthase OS=Salinivibrio sharmensis OX=390883 GN=queC PE =3 SV=1
MKKAVVVFSGGQDSTTCLIQAQAEYDEVHCLTFDYNQRHKQEIDVAREIAANRKVSAHKVLDVGLLNELAISSLTRDNIPVSNALNENGLPNSFVPGRNILFLTLAGIYAYQIGAEAVITGVCETDFSGYPDCRNDFIQSMQQALERGMDRKLALVTPLMWLNKAETWALADQYHALDFVRDHTLTCYNGIKGTGCGECPACHLRQRGLDDYLANQADVQAALRRKQAENA

SEQ ID NO: 42029 - protein, 231 aa, Salinivibrio sp.
  misc_feature (1)..(231): tr|A0A1V3H911|A0A1V3H911_9GAMM 7-cyano-7-deazaguanine s ynthase OS=Salinivibrio sp. MA351 OX=1909453 GN=queC PE =3 SV=1
MKKAVVVFSGGQDSTTCLIQAQAEYDEVHCLTFDYNQRHKQEIDVAREIAANRKVSAHKVLDVGLLNELAISSLTRDNIPVSNALNENGLPNSFVPGRNILFLTLAGIYAYQIGAEAVITGVCETDFSGYPDCRNDFIQSMQQALEQGMDRQLALVTPLMWLNKAETWALADQYHALDFVRDHTLTCYNGIKGTGCGECPACHLRQRGLDDYLANQTDVQAALQRKQAENA

SEQ ID NO: 42030 - protein, 231 aa, Salinivibrio sp.
  misc_feature (1)..(231): tr|A0A1V3I0R6|A0A1V3I0R6_9GAMM 7-cyano-7-deazaguanine s ynthase OS=Salinivibrio sp. IB872 OX=1766123 GN=queC PE =3 SV=1
MKKAVVVFSGGQDSTTCLIQAQAEYDEVHCLTFDYNQRHKQEIDVAREIAANRNVSAHKVLDVGLLNELAISSLTRDNIPVSNALNENGLPNSFVPGRNILFLTLAGIYAYQIGAEAVITGVCETDFSGYPDCRNDFIQSMQQALERGMDRKLALVTPLMWLNKAETWALADQYHALDFVRDHTLTCYNGIKGTGCGECPACHLRQRGLDDYLSNQADVQAALRRKQAENA

SEQ ID NO: 42031 - protein, 251 aa, Salinivirga cyanobacteriivorans
  misc_feature (1)..(251): tr|A0A0S2HW40|A0A0S2HW40_9BACT Uncharacterized protein OS=Salinivirga cyanobacteriivorans OX=1307839 GN=L21SP5 _00611 PE=4 SV=1
MTKTAVNLLWTGGLDSTFRTLEALLIEKRVVKPYYMLDTARFSLRNEIKAMSKIKDLLFEKHPFTKELLLPIQYVDVDDIKTDQTIQKAFKELSSIRHLGIQYRWLAEFCVEHGIKDLELGIIRKGEASDHGEALSESLDPFIEPIDSDEKVYKINTEKTKADGSQKAMLYEKVFENYHLPIITYSKKDMVEMAKKNGWMDFVGLTWYCHRPRKFKYPCGKCNPCKTAKQEGVAKKTPLIRWKYFYKEKYS

SEQ ID NO: 42032 - protein, 218 aa, Salipaludibacillus aurantiacus
  misc_feature (1)..(218): tr|A0A1H9S7N4|A0A1H9S7N4_9BACI 7-cyano-7-deazaguanine s ynthase OS=Salipaludibacillus aurantiacus OX=1601833 GN =queC PE=3 SV=1
MKNEKAIVVFSGGQDSTTCLFWALDNFKEVETVTFNYNQRHRTEIEVAEGIAKELGVKHRVLDMGLLNQLAPNALTRDDISIEEKEGELPSTFVEGRNLLFLTFAAIAGKQSGADHIVTGVCETDFSGYPDCRDVFIKSLNVTLNLSMDHSFVIHTPLMWLDKADTWKLADDLGAFEFVRNKTLTCYNGILSDGCGECPACLLRKKGLEEYLQRKEAR

SEQ ID NO: 42033 - protein, 214 aa, Salipaludibacillus keqinensis
  misc_feature (1)..(214): tr|A0A323TKC9|A0A323TKC9_9BACI 7-cyano-7-deazaguanine s ynthase OS=Salipaludibacillus keqinensis OX=2045207 GN= queC PE=3 SV=1
MKNDKALVVFSGGQDSTTCLFWALNNFKEVETVTFDYNQRHKLEIDVAQTISDELNVKNTVLDMSLLNQLAPSALTRNDIDIKESDGEPPSTFVEGRNLLFLSFASILAKQIGAKHIVTGVCETDFSGYPDCRDVFVKSLNVSLNLSMDHQFVIHTPLMWLDKAETWALADELEAFEFVRNKTLTCYNGIISDGCGECPACILRRRGLETYLQR

SEQ ID NO: 42034 - protein, 217 aa, Salipaludibacillus neizhouensis
  misc_feature (1)..(217): tr|A0A3A9KDG4|A0A3A9KDG4_9BACI 7-cyano-7-deazaguanine s ynthase OS=Salipaludibacillus neizhouensis OX=885475 GN =queC PE=3 SV=1
MKNDKAIVVFSGGQDSTTCLFWALENFKEVETVTFNYNQRHKLEIEVAEGIAKELGVKHTLLDMGLLNQLAPNALTREDIDITQEADELPSTFVEGRNLLFLSFAAILAKQAGAKHLVTGVCETDFSGYPDCRDIFVKSLNVTLNLAMDNQFVIHTPLMWLDKAETWGLADDLHAFEFVREKTLTCYNGVIADGCGECPACELRQKGLDKYLSKDKR

SEQ ID NO: 42035 - protein, 233 aa, Salipiger thiooxidans
  misc_feature (1)..(233): tr|A0A1G7FJ60|A0A1G7FJ60_9RHOB 7-cyano-7-deazaguanine s ynthase OS=Salipiger thiooxidans OX=282683 GN=queC PE=3 SV=1
MKTLVICSGGLDSVSLAHIIADQQQLTRLVSFDYGQRHRKELDFAAAAARRLNVPHHLIDMRGIGASLSGSALTDDIDVPDGHYAEETMRITVVPNRNAIMLAIGFGVAAANGDEAVATAVHGGDHFIYPDCRPAFTQAFDAMQQAALDGYASVRLHTPFVERSKADIVRAGAAHGTPFAETWSCYKGGELHCGRCGTCVERREAFHLAGVGDPTAYADPDYWAQAVAARGTA

SEQ ID NO: 42036 - protein, 221 aa, Salisediminibacterium haloalkalitolerans
  misc_feature (1)..(221): tr|A0A1H9T8B9|A0A1H9T8B9_9BACI 7-cyano-7-deazaguanine s ynthase OS=Salisediminibacterium haloalkalitolerans OX= 1464123 GN=queC PE=3 SV=1
MNEAKEKAVVVFSGGQDSTTCLFWALEHFDEVETVTFDYQQRHRKEIETAAAIAEAQGVRHHLLDMSLLHQLAPNALTRDDIAVEHKEGELPSTFVPGRNLLFLSFATILARQIGAKHVVTGVCQTDFSGYPDCRDMFIKSLNVTLNLSMDDEFVLHTPLMWLDKKETWALADDLGVLETVREQTLTCYNGIPGDGCGECPACELRRRGLEQHLAAKEESR

SEQ ID NO: 42037 - protein, 231 aa, Salmonella abony
  misc_feature (1)..(231): tr|A0A5J0DY30|A0A5J0DY30_SALAB 7-cyano-7-deazaguanine s ynthase QueC OS=Salmonella abony OX=29482 GN=queC PE=4 SV=1
MKRAVVVFSGGQDSTTCLAQARHQYDEVHCVTFDYGQRHRAEIDVARALALKLGARAHKVLDVTLLNELAVSSLTRDSIPVPDYEPNADGIPNTFVPGRNILFLTLAAIYAYQVKAEAVITGVCETDFSGYPDCRDEFVKALNHAVNLGMAKDIRFETPLMWIDKAETWALADYWGQLDLVREETLTCYNGIKGDGCGHCAACNLRANGLNHYLSNKAAVMAAMKQKTGLR

SEQ ID NO: 42038 - protein, 231 aa, Salmonella agona; identical to SEQ ID NO: 42037
  misc_feature (1)..(231): sp|B5EXJ5|QUEC_SALA4 7-cyano-7-deazaguanine synthase OS =Salmonella agona (strain SL483) OX=454166 GN=queC PE=3 SV=1

SEQ ID NO: 42039 - protein, 231 aa, Salmonella anatum; identical to SEQ ID NO: 42037
  misc_feature (1)..(231): tr|A0A3Y5S9X1|A0A3Y5S9X1_SALAN 7-cyano-7-deazaguanine s ynthase OS=Salmonella anatum OX=58712 GN=queC PE=3 SV=1

SEQ ID NO: 42040 - protein, 231 aa, Salmonella anatum
  misc_feature (1)..(231): tr|A0A2T8MNL6|A0A2T8MNL6_SALAN 7-cyano-7-deazaguanine s ynthase OS=Salmonella anatum OX=58712 GN=queC PE=3 SV=1
MKRAVVVFSGGQDSTTCLAQARHQYDEVHCVTFDYGQRHRAEIDVARALALKLGARAHKVLDVTLLNELAVSSLTRDSIPVPDYEPNADGIPNTFVPGRNILFLTLAAIYAYQVKAEAVITGVCETDFSGYPDCRDEFVKALNHAVNLGMAKDIRFETPLMWIDKAETWALADYWGQLDLVREETLTCYNGIKGDGCGHCAACNLRANGLNHYLSNKAAVMTAMKQKTGLR

SEQ ID NO: 42041 - protein, 231 aa, Salmonella arizonae
  misc_feature (1)..(231): sp|A9MM16|QUEC_SALAR 7-cyano-7-deazaguanine synthase OS =Salmonella arizonae (strain ATCC BAA-731 / CDC346-86 / RSK2980) OX=41514 GN=queC PE=3 SV=1
MKRAVVVFSGGQDSTTCLAQALHQYDEVHCVTFDYGQRHRAEIDVARSLALKLGVRAHKMLDVTLLNELAVSSLTRDSIPVPDYEPNADGIPNTFVPGRNILFLTLAAIYAYQVKAEAVITGVCETDFSGYPDCRDEFVKALNRAVNLGMAKDIRFETPLMWLDKAETWALADYWGKLNLVREETLTCYNGIKGDGCGHCAACNLRANGLNHYLADKAAVVTAMKQKTGLQ

SEQ ID NO: 42042 - protein, 231 aa, Salmonella berta; identical to SEQ ID NO: 42037
  misc_feature (1)..(231): tr|A0A3V6R3V2|A0A3V6R3V2_SALBE 7-cyano-7-deazaguanine s ynthase OS=Salmonella berta OX=28142 GN=queC PE=3 SV=1

SEQ ID NO: 42043 - protein, 231 aa, Salmonella berta
  misc_feature (1)..(231): tr|A0A3U8PAH7|A0A3U8PAH7_SALBE 7-cyano-7-deazaguanine s ynthase OS=Salmonella berta OX=28142 GN=queC PE=3 SV=1
MKRAVVVFSGGQDSTTCLAQARHQYDEVHCVTFDYGQRHRAEIDVARALTLKLGARAHKVLDVTLLNELAVSSLTRDSIPVPDYEPNADGIPNTFVPGRNILFLTLAAIYAYQVKAEAVITGVCETDFSGYPDCRDEFVKALNHAVNLGMAKDIRFETPLMWIDKAETWALADYWGQLDLVREETLTCYNGIKGDGCGHCAACNLRANGLNHYLSNKAAVMAAMKQKTGLR

SEQ ID NO: 42044 - protein, 231 aa, Salmonella blockley; identical to SEQ ID NO: 42037
  misc_feature (1)..(231): tr|A0A5H8H7E3|A0A5H8H7E3_SALBL 7-cyano-7-deazaguanine s ynthase QueC OS=Salmonella blockley OX=57741 GN=queC PE =4 SV=1

SEQ ID NO: 42045 - protein, 231 aa, Salmonella bongori
  misc_feature (1)..(231): tr|A0A248KBQ1|A0A248KBQ1_SALBN 7-cyano-7-deazaguanine s ynthase OS=Salmonella bongori serovar 66:z41:- str. SA1 9983605 OX=1243617 GN=queC PE=3 SV=1
MKRAVVVFSGGQDSTTCLAQTLHQYDEVHCVTFDYGQRHRAEIDVARSLALKLGARAHKVLDVTLLNELAVSSLTRDSIPVPDYEPNADGIPNTFVPGRNILFLTLAAIYAYQVKAEAVITGVCETDFSGYPDCRDEFVKALNHAVSLGMAKNIRFETPLMWIDKAETWALADYWGKLDLVREETLTCYNGIKGDGCGHCAACNLRANGLNHYLSDKAAIMAAMKQKTGLK

SEQ ID NO: 42046 - protein, 231 aa, Salmonella bongori; identical to SEQ ID NO: 42045
  misc_feature (1)..(231): tr|A0A5I6MY26|A0A5I6MY26_SALBN 7-cyano-7-deazaguanine s ynthase QueC OS=Salmonella bongori CFSAN000510 OX=12992 82 GN=queC PE=4 SV=1

SEQ ID NO: 42047 - protein, 231 aa, Salmonella choleraesuis
  misc_feature (1)..(231): sp|Q57SA8|QUEC_SALCH 7-cyano-7-deazaguanine synthase OS =Salmonella choleraesuis (strain SC-B67) OX=321314 GN=q ueC PE=3 SV=2
MKRAVVVFSGGQDSTTCLAQARHQYDEVHCVTFDYGQRHRAEIDVARELALKLGARAHKVLDVTLLNELAVSSLTRDSIPVPDYEPNADGIPNTFVPGRNILFLTLAAIYAYQVKAEAVITGVCETDFSGYPDCRDEFVKALNHAVNLGMAKDIRFETPLMWIDKAETWALADYWGQLDLVREETLTCYNGIKGDGCGHCAACNLRANGLNHYLSNKAAVMAAMKQKTGLR

SEQ ID NO: 42048 - protein, 231 aa, Salmonella derby
  misc_feature (1)..(231): tr|A0A3Y7QVX0|A0A3Y7QVX0_SALDE 7-cyano-7-deazaguanine s ynthase OS=Salmonella derby OX=28144 GN=queC PE=3 SV=1
MKRAVVVFSGGQDSTTCLAQARHQYDEVHCVTFDYGQRHRVEIDVARALALKLGARAHKVLDVTLLNELAVSSLTRDSIPVPDYEPNADGIPNTFVPGRNILFLTLAAIYAYQVKAEAVITGVCETDFSGYPDCRDEFVKALNHAVNLGMAKDIRFETPLMWIDKAETWALADYWGQLDLVREETLTCYNGIKGDGCGHCAACNLRANGLNHYLSNKAAVMAAMKQKTGLR

SEQ ID NO: 42049 - protein, 231 aa, Salmonella derby; identical to SEQ ID NO: 42037
  misc_feature (1)..(231): tr|A0A4P5EXW7|A0A4P5EXW7_SALDE 7-cyano-7-deazaguanine s ynthase OS=Salmonella derby OX=28144 GN=queC PE=3 SV=1

SEQ ID NO: 42050 - protein, 65 aa, Salmonella diarizonae
  misc_feature (1)..(65): tr|A0A379U2F6|A0A379U2F6_SALDZ 7-cyano-7-deazaguanine s ynthase OS=Salmonella diarizonae OX=59204 GN=ybaX_1 PE= 3 SV=1
MKRAVVVFSGGQDSTTCLAQARHQYDEVHCVTFDYGQRHRAEIDVARSLALNLARARIKCWMSLC

SEQ ID NO: 42051 - protein, 231 aa, Salmonella diarizonae
  misc_feature (1)..(231): tr|A0A2I5HJV3|A0A2I5HJV3_SALDZ 7-cyano-7-deazaguanine s ynthase OS=Salmonella diarizonae OX=59204 GN=ybaX PE=3 SV=1
MKRAVVVFSGGQDSTTCLAQARHQYDEVHCVTFDYGQRHRAEIDVARSLALKLGARAHKVLDVTLLNELAVSSLTRDSIPVPDYEPNADGIPNTFVPGRNILFLTLAAIYAYQVKAEAVITGVCETDFSGYPDCRDEFVKALNHAVNLGMAKDIRFETPLMWIDKAETWALADYWGKLDLVREETLTCYNGIKGDGCGHCAACNLRANGLNHYLANKATVMAAMKQKTGLR

SEQ ID NO: 42052 - protein, 231 aa, Salmonella dublin; identical to SEQ ID NO: 42037
  misc_feature (1)..(231): tr|A0A3T3IJT8|A0A3T3IJT8_SALDU 7-cyano-7-deazaguanine s ynthase OS=Salmonella dublin OX=98360 GN=queC PE=3 SV=1

SEQ ID NO: 42053 - protein, 231 aa, Salmonella dublin; identical to SEQ ID NO: 42037
  misc_feature (1)..(231): sp|B5FKW0|QUEC_SALDC 7-cyano-7-deazaguanine synthase OS =Salmonella dublin (strain CT_02021853) OX=439851 GN=qu eC PE=3 SV=1

SEQ ID NO: 42054 - protein, 446 aa, Salmonella enterica
  misc_feature (1)..(446): tr|G5QTL1|G5QTL1_SALRU 7-cyano-7-deazaguanine synthase OS=Salmonella enterica subsp. enterica serovar Rubislaw str. A4-653 OX=913081 GN=LTSERUB_6619 PE=3 SV=1
MNIYVEYDHTKLPLADEKTVSVQIYSRDAVVIKNGIKPRDDIATIGKPIFDAIKRLGVSISDEVMDFLTISLAVTAADTFIIRDNCFDGWTRNINLFVSLNNPAIWKKNKPLLEKALQFLSGDVWNFNFKGDGPKPPQPFKAVNGRKLINLEGLDCVSLFSGGLDSAIGVIDFLSSGRKPLLISHSYKGDKTKQDQIAHKIREKGTFSRLRSSANPIGRGMTRDITMRTRSLNFLAFALVGAYAVKQINNHKDLSIFVPENGFISLNAPLTHRRVGSLSTRTTHPYFIEMIQKLFNNLGFGVRLINPYQFMTKGQMVSNCKDAKMLSEIVDLTVSCSHWKRKNQQCGYCVPCMIRRAALMKGTLKESISYHHASYPTLRDFVKNKQDGRDDVIAVSVALDKSKKINLKSWVLKSGKLKFEDLDKYEQVFSDGLLEVEDFLKKEKVI

SEQ ID NO: 42055 - protein, 231 aa, Salmonella enterica; identical to SEQ ID NO: 42041
  misc_feature (1)..(231): tr|A0A379PPY2|A0A379PPY2_SALER 7-cyano-7-deazaguanine s ynthase OS=Salmonella enterica OX=28901 GN=ybaX PE=3 SV =1

SEQ ID NO: 42056 - protein, 159 aa, Salmonella enteritidis
  misc_feature (1)..(159): tr|A0A3E2LU67|A0A3E2LU67_SALEN 7-cyano-7-deazaguanine s ynthase (Fragment) OS=Salmonella enteritidis OX=149539 GN=queC PE=3 SV=1
MKKTVVVFSGGQDSTTCLIQALEQYDEVHCITFNYGQRHKEEIEVAQRVSQLLGATAHKVLDVSLLNELAISSLTRDNIPVPDFKQSEQSDIPSTFVPGRNILFLTLAAIYAYQIGAESVITGVCETDFSGYPDCRDEFVKALNHAVNLGIARDIQFIT

SEQ ID NO: 42057 - protein, 231 aa, Salmonella enteritidis; identical to SEQ ID NO: 42037
  misc_feature (1)..(231): sp|B5QU45|QUEC_SALEP 7-cyano-7-deazaguanine synthase OS =Salmonella enteritidis PT4 (strain P125109) OX=550537 GN=queC PE=3 SV=1

SEQ ID NO: 42058 - protein, 231 aa, Salmonella gallinarum
  misc_feature (1)..(231): tr|A0A3V9NJC8|A0A3V9NJC8_SALGL 7-cyano-7-deazaguanine s ynthase OS=Salmonella gallinarum OX=594 GN=queC PE=3 SV =1
MKRAVVVFSGGQDSTTCLAQARHQYDEVHCVTFDYGQRHRAEIDVARALALKLGTRAHKVLDVTLLNELAVSSLTRDSIPVPDYEPNADGIPNTFVPGRNILFLTLAAIYAYQVKAEAVITGVCETDFSGYPDCRDEFVKALNHAVNLGMAKDIRFETPLMWIDKAETWALADYWGQLDLVREETLTCYNGIKGDGCGHCAACNLRANGLNHYLSNKAAVMAAMKQKTGLR

SEQ ID NO: 42059 - protein, 231 aa, Salmonella gallinarum; identical to SEQ ID NO: 42058
  misc_feature (1)..(231): sp|B5R6V6|QUEC_SALG2 7-cyano-7-deazaguanine synthase OS =Salmonella gallinarum (strain 287/91 / NCTC 13346) OX= 550538 GN=queC PE=3 SV=1

SEQ ID NO: 42060 - protein, 231 aa, Salmonella hadar
  misc_feature (1)..(231): tr|A0A3V2W4L4|A0A3V2W4L4_SALHA 7-cyano-7-deazaguanine s ynthase OS=Salmonella hadar OX=149385 GN=queC PE=3 SV=1
MKRAVVVFSGGQDSTTCLAQARHQYDEVHCVTFDYGQRHRAEIDVARALALKLGARAHKVLDVTLLNELAVSSLTRDSIPVPDYEPNADGIPNTFVPGRNILFLTLAAVYAYQVKAEAVITGVCETDFSGYPDCRDEFVKALNHAVNLGMAKDIRFETPLMWIDKAETWALADYWGQLDLVREETLTCYNGIKGDGCGHCAACNLRANGLNHYLSNKAAVMAAMKQKTGLR

SEQ ID NO: 42061 - protein, 231 aa, Salmonella heidelberg; identical to SEQ ID NO: 42058
  misc_feature (1)..(231): sp|B4T9F0|QUEC_SALHS 7-cyano-7-deazaguanine synthase OS =Salmonella heidelberg (strain SL476) OX=454169 GN=queC PE=3 SV=1

SEQ ID NO: 42062 - protein, 231 aa, Salmonella houtenae
  misc_feature (1)..(231): tr|A0A1J6Z5Q6|A0A1J6Z5Q6_SALHO 7-cyano-7-deazaguanine s ynthase OS=Salmonella houtenae OX=59205 GN=queC PE=3 SV =1
MKRAVVVFSGGQDSTTCLAQARHQYDEVHCVTFDYGQRHRAEIDVARDLALKLGARAHKVLDVTLLNELAVSSLTRDSIPVPDYEPNADGIPNTFVPGRNILFLTLAAIYAYQVKAEAVITGVCETDFSGYPDCRDEFVNALNHAVNLGMAKDIRFETPLMWLDKAETWALADYWGKLDLVREETLTCYNGIKGDGCGHCAACNLRANGLNHYLSNKAAVMAAMKQKTGLR

SEQ ID NO: 42063 - protein, 231 aa, Salmonella infantis; identical to SEQ ID NO: 42037
  misc_feature (1)..(231): tr|A0A3R0DF26|A0A3R0DF26_SALIN 7-cyano-7-deazaguanine s ynthase OS=Salmonella infantis OX=595 GN=queC PE=3 SV=1

SEQ ID NO: 42064 - protein, 231 aa, Salmonella infantis; identical to SEQ ID NO: 42047
  misc_feature (1)..(231): tr|A0A3W0HM37|A0A3W0HM37_SALIN 7-cyano-7-deazaguanine s ynthase OS=Salmonella infantis OX=595 GN=queC PE=3 SV=1

SEQ ID NO: 42065 - protein, 231 aa, Salmonella montevideo
  misc_feature (1)..(231): tr|A0A5H3HL08|A0A5H3HL08_SALMO 7-cyano-7-deazaguanine s ynthase QueC OS=Salmonella montevideo OX=115981 GN=DOA6 2_06985 PE=4 SV=1
MKRAVVVFSGGQDSTTCLAQARHQYDEVHCVTFDYGQRHRAEIDVARALALKLGARAHKVLDVTLLNELAVSSLTRDSIPVPDYEPNADGIPNTFVPGRNILFLTLAAIYAYQVKAEAVITGVCETDFSGYPDCRDEFVKALNHAVNLGMAKDIRFETPLMWIDKAETWALADYWGQLELVREETLTCYNGIKGDGCGHCAACNLRANGLNHYLSNKAAVMAAMKQKTGLR

SEQ ID NO: 42066 - protein, 231 aa, Salmonella montevideo
  misc_feature (1)..(231): tr|A0A3V2EPB2|A0A3V2EPB2_SALMO 7-cyano-7-deazaguanine s ynthase OS=Salmonella montevideo OX=115981 GN=queC PE=3 SV=1
MKRAVVVFSGGQDSTTCLAQARHQYDEVHCVTFDYGQRHRAEIDVARALALQLGARAHKVLDVTLLNELAVSSLTRDSIPVPDYEPNADGIPNTFVPGRNILFLTLAAIYAYQVKAEAVITGVCETDFSGYPDCRDEFVKALNHAVNLGMAKDIRFETPLMWIDKAETWALADYWGQLDLVREETLTCYNGIKGDGCGHCSACNLRANGLNHYLSNKAAVMAAMKQKTGLR

SEQ ID NO: 42067 - protein, 231 aa, Salmonella moscow; identical to SEQ ID NO: 42037
  misc_feature (1)..(231): tr|A0A5H7LI74|A0A5H7LI74_SALMC 7-cyano-7-deazaguanine s ynthase QueC OS=Salmonella moscow OX=28146 GN=queC PE=4 SV=1

SEQ ID NO: 42068 - protein, 231 aa, Salmonella muenchen; identical to SEQ ID NO: 42037
  misc_feature (1)..(231): tr|A0A3T3ETC5|A0A3T3ETC5_SALMU 7-cyano-7-deazaguanine s ynthase OS=Salmonella muenchen OX=596 GN=queC PE=3 SV=1

SEQ ID NO: 42069 - protein, 231 aa, Salmonella muenster
  misc_feature (1)..(231): tr|A0A5J1AUK3|A0A5J1AUK3_SALMS 7-cyano-7-deazaguanine s ynthase QueC OS=Salmonella muenster OX=82689 GN=queC PE =4 SV=1
MKRAVVVFSGGQDSTTCLAQARHQYDEVHCVTFDYGQRHRAEIDVARALALKLGARAHKVLDVTLLNELAVSSLTRDSIPVPDYEPNADGIPNTFVPGRNILFLTLAAIYAYQVKAEAVITGVCETDFSGYPDCRDEFVKALNHAVNLGMAKDIRFETPLMWIDKAETWALADYWGQLDLVREETLTCYNGIKGNGCGHCAACNLRANGLNHYLSNKAAVMAAMKQKTGLR

SEQ ID NO: 42070 - protein, 231 aa, Salmonella muenster; identical to SEQ ID NO: 42037
  misc_feature (1)..(231): tr|A0A5H8VT06|A0A5H8VT06_SALMS 7-cyano-7-deazaguanine s ynthase QueC OS=Salmonella muenster OX=82689 GN=queC PE =3 SV=1

SEQ ID NO: 42071 - protein, 231 aa, Salmonella newport; identical to SEQ ID NO: 42065
  misc_feature (1)..(231): tr|A0A3T3D5C8|A0A3T3D5C8_SALNE 7-cyano-7-deazaguanine s ynthase OS=Salmonella newport OX=108619 GN=queC PE=3 SV =1

SEQ ID NO: 42072 - protein, 231 aa, Salmonella newport
  misc_feature (1)..(231): tr|A0A0R9MP25|A0A0R9MP25_SALNE 7-cyano-7-deazaguanine s ynthase OS=Salmonella newport OX=108619 GN=queC PE=3 SV =1
MKRAVVVFSGGQDSTTCLAQARHQYDEVHCVTFDYGQRHRAEIDVARDLALKLGARAHKVLDVTLLNELAVSSLTRDSIPVPDYEPNADGIPNTFVPGRNILFLTLAAIYAYQVKAEAVITGVCETDFSGYPDCRDEFVKALNHAVNLGMAKDIRFETPLMWIDKAETWALADYWGQLDLVREETLTCYNGIKGDGCGHCAACNLRANGLNHYLSNKAAVMAAMKQKTGLR

SEQ ID NO: 42073 - protein, 231 aa, Salmonella oranienberg; identical to SEQ ID NO: 42037
  misc_feature (1)..(231): tr|A0A3Z0YK71|A0A3Z0YK71_SALON 7-cyano-7-deazaguanine s ynthase OS=Salmonella oranienberg OX=28147 GN=queC PE=3 SV=1

SEQ ID NO: 42074 - protein, 231 aa, Salmonella oranienberg
  misc_feature (1)..(231): tr|A0A5I6FDK6|A0A5I6FDK6_SALON 7-cyano-7-deazaguanine s ynthase QueC OS=Salmonella oranienberg OX=28147 GN=queC PE=4 SV=1
MKRAVVVFSGGQDSTTCLAQARHQYDEVHCVTFDYGQRHRAEIDVARALALKLGARAHKVLDVTLLNELAVSSLTRDSIPVPDYEPNADGIPNTFVPGRNILFLTLAAIYAYQVKAEAVITGVCETDFSGYPDCRDEFVKALNHAVNLGMAKDIRFETPLMWIDKAETWALADYWGQLDLVREETLTCYNGIKGDGCGHCAACNLRAKGLNHYLSNKAAVMAAMKQKTGLR

SEQ ID NO: 42075 - protein, 231 aa, Salmonella paratyphi; identical to SEQ ID NO: 42060
  misc_feature (1)..(231): tr|A0A3Z1EEX2|A0A3Z1EEX2_SALPB 7-cyano-7-deazaguanine s ynthase OS=Salmonella paratyphi B (strain ATCC BAA-1250 / SPB7) OX=1016998 GN=queC PE=3 SV=1

SEQ ID NO: 42076 - protein, 231 aa, Salmonella paratyphi
  misc_feature (1)..(231): sp|B5BD76|QUEC_SALPK 7-cyano-7-deazaguanine synthase OS =Salmonella paratyphi A (strain AKU_12601) OX=554290 GN =queC PE=3 SV=1
MKRAVVVFSGGQDSTTCLAQARHQYDEVHCVTFDYGQRHRAEIDVARALALKLGARAHKVLDVTLLNELAVSSLTRDSIPVPDYEPNADGIPNTFVPGRNILFLTLVAIYAYQVKAEAVITGVCETDFSGYPDCRDEFVKALNHAVNLGMAKDIRFETPLMWIDKAETWALADYWGQLDLVREETLTCYNGIKGDGCGHCAACNLRANGLNHYLSNKSAVMAAMKQKTGLR

SEQ ID NO: 42077 - protein, 231 aa, Salmonella potsdam; identical to SEQ ID NO: 42037
  misc_feature (1)..(231): tr|A0A5H7F0Y3|A0A5H7F0Y3_SALPO 7-cyano-7-deazaguanine s ynthase QueC OS=Salmonella potsdam OX=597 GN=queC PE=4 SV=1

SEQ ID NO: 42078 - protein, 231 aa, Salmonella potsdam
  misc_feature (1)..(231): tr|A0A5I2XCX9|A0A5I2XCX9_SALPO 7-cyano-7-deazaguanine s ynthase QueC OS=Salmonella potsdam OX=597 GN=queC PE=4 SV=1
MKRAVVVFSGGQDSTTCLAQARHQYDEVHCVTFDYGQRHRAEIDVARDLALKLGARAHKVLDVTLLNELAVSSLTRDSIPVPDYEPNANGIPNTFVPGRNILFLTLAAIYAYQVKAEAVITGVCETDFSGYPDCRDEFVKALNHAVNLGMAKDIRFETPLMWIDKAETWALADYWGQLDLVREETLTCYNGIKGDGCGHCAACNLRANGLNHYLSNKAAVMAAMKQKTGLR

SEQ ID NO: 42079 - protein, 231 aa, Salmonella rubislaw; identical to SEQ ID NO: 42074
  misc_feature (1)..(231): tr|A0A3V7IKK6|A0A3V7IKK6_SALRU 7-cyano-7-deazaguanine s ynthase OS=Salmonella rubislaw OX=598 GN=queC PE=3 SV=1

SEQ ID NO: 42080 - protein, 231 aa, Salmonella rubislaw; identical to SEQ ID NO: 42065
  misc_feature (1)..(231): tr|A0A5I8H2A5|A0A5I8H2A5_SALRU 7-cyano-7-deazaguanine s ynthase QueC OS=Salmonella rubislaw OX=598 GN=queC PE=4 SV=1

SEQ ID NO: 42081 - protein, 231 aa, Salmonella schwarzengrund; identical to SEQ ID NO: 42065
  misc_feature (1)..(231): sp|B4TMD3|QUEC_SALSV 7-cyano-7-deazaguanine synthase OS =Salmonella schwarzengrund (strain CVM19633) OX=439843 GN=queC PE=3 SV=1

SEQ ID NO: 42082 - protein, 231 aa, Salmonella senftenberg; identical to SEQ ID NO: 42037
  misc_feature (1)..(231): tr|A0A3R0HJH2|A0A3R0HJH2_SALSE 7-cyano-7-deazaguanine s ynthase OS=Salmonella senftenberg OX=28150 GN=queC PE=3 SV=1

SEQ ID NO: 42083 - protein, 231 aa, Salmonella senftenberg; identical to SEQ ID NO: 42069
  misc_feature (1)..(231): tr|A0A3Y5ZCK2|A0A3Y5ZCK2_SALSE 7-cyano-7-deazaguanine s ynthase OS=Salmonella senftenberg OX=28150 GN=queC PE=3 SV=1

SEQ ID NO: 42084 - protein, 231 aa, Salmonella sp.; identical to SEQ ID NO: 42037
  misc_feature (1)..(231): tr|A0A509CIG1|A0A509CIG1_9ENTR 7-cyano-7-deazaguanine s ynthase OS=Salmonella sp. NCTC 6947 OX=2583581 GN=ybaX PE=3 SV=1

SEQ ID NO: 42085 - protein, 231 aa, Salmonella sp.; identical to SEQ ID NO: 42037
  misc_feature (1)..(231): tr|A0A509C0E4|A0A509C0E4_9ENTR 7-cyano-7-deazaguanine s ynthase OS=Salmonella sp. NCTC 3046 OX=2583580 GN=ybaX PE=3 SV=1

SEQ ID NO: 42086 - protein, 231 aa, Salmonella thompson; identical to SEQ ID NO: 42060
  misc_feature (1)..(231): tr|A0A3Y9ZK09|A0A3Y9ZK09_SALTH 7-cyano-7-deazaguanine s ynthase QueC OS=Salmonella thompson OX=600 GN=queC PE=3 SV=1

SEQ ID NO: 42087 - protein, 231 aa, Salmonella thompson; identical to SEQ ID NO: 42037
  misc_feature (1)..(231): tr|A0A3V3G1U8|A0A3V3G1U8_SALTH 7-cyano-7-deazaguanine s ynthase OS=Salmonella thompson OX=600 GN=queC PE=3 SV=1

SEQ ID NO: 42088 - protein, 231 aa, Salmonella typhi; identical to SEQ ID NO: 42037
  misc_feature (1)..(231): tr|A0A4U8FH64|A0A4U8FH64_SALTI 7-cyano-7-deazaguanine s ynthase OS=Salmonella typhi OX=90370 GN=queC PE=3 SV=1

SEQ ID NO: 42089 - protein, 231 aa, Salmonella typhi; identical to SEQ ID NO: 42037
  misc_feature (1)..(231): sp|Q8XEU3|QUEC_SALTI 7-cyano-7-deazaguanine synthase OS =Salmonella typhi OX=90370 GN=queC PE=3 SV=1

SEQ ID NO: 42090 - protein, 231 aa, Salmonella typhimurium; identical to SEQ ID NO: 42037
  misc_feature (1)..(231): sp|Q7CR22|QUEC_SALTY 7-cyano-7-deazaguanine synthase OS =Salmonella typhimurium (strain LT2 / SGSC1412 / ATCC 7 00720) OX=99287 GN=queC PE=3 SV=1

SEQ ID NO: 42091 - protein, 231 aa, Salmonella typhimurium; identical to SEQ ID NO: 42037
  misc_feature (1)..(231): tr|A0A3Z2EZR1|A0A3Z2EZR1_SALTU 7-cyano-7-deazaguanine s ynthase OS=Salmonella typhimurium (strain ATCC 68169 / UK-1) OX=990282 GN=queC PE=3 SV=1

SEQ ID NO: 42092 - protein, 231 aa, Salmonella virchow
  misc_feature (1)..(231): tr|A0A5I1KIW4|A0A5I1KIW4_SALVI 7-cyano-7-deazaguanine s ynthase QueC OS=Salmonella virchow OX=48409 GN=queC PE= 4 SV=1
MKRAVVVFSGGQDSTTCLAQARHQYDEVHCVTFDYGQRHRAEIDFARALALKLGARAHKVLDVTLLNELAVSSLTRDSIPVPDYEPNADGIPNTFVPGRNILFLTLAAIYAYQVKAEAVITGVCETDFSGYPDCRDEFVKALNHAVNLGMAKDIRFETPLMWIDKAETWALADYWGQLDLVREETLTCYNGIKGDGCGHCAACNLRANGLNHYLSNKAAVMAAMKQKTGLR

SEQ ID NO: 42093 - protein, 231 aa, Salmonella virchow
  misc_feature (1)..(231): tr|A0A5J0U6H8|A0A5J0U6H8_SALVI 7-cyano-7-deazaguanine s ynthase QueC OS=Salmonella virchow OX=48409 GN=queC PE= 4 SV=1
MKRAVVVFSGGQDSTTCLAQARHQYDEVHCVTFDYGQRHRAEIDVARALALKLGARAHKVLDVTLLNELAVSSLTRDSIPVPDYEPNAGGIPNTFVPGRNILFLTLAAIYAYQVKAEAVITGVCETDFSGYPDCRDEFVKALNHAVNLGMAKDIRFETPLMWIDKAETWALADYWGQLDLVREETLTCYNGIKGDGCGHCAACNLRANGLNHYLSNKAAVMTAMKQKTGLR

SEQ ID NO: 42094 - protein, 239 aa, Salsuginibacillus halophilus
  misc_feature (1)..(239): tr|A0A2P8HLC2|A0A2P8HLC2_9BACI 7-cyano-7-deazaguanine s ynthase OS=Salsuginibacillus halophilus OX=517424 GN=qu eC PE=3 SV=1
MACRKEAGRSPEKEERTRIMKNEKAVVVFSGGQDSTTCLFWAIENFQEVYAVTFSYGQRHDTEIEVAKEITKDLGVTHDVLDMSLLNQLAPNALTRSDIDVAEGEEGELPTTFVDGRNMLFFTFASIYGRQRGAKHIVTGVCETDYSGYPDCRDVFTKSLNVTLNLAMDDNFVVHTPLMWLDKAATWKLADELGRLDYVKNETLTCYHGIRGDGCGECPACELRRQGYEQYMEEKRADA

SEQ ID NO: 42095 - protein, 231 aa, Samsonia erythrinae
  misc_feature (1)..(231): tr|A0A4R3VTW0|A0A4R3VTW0_9GAMM 7-cyano-7-deazaguanine s ynthase OS=Samsonia erythrinae OX=160434 GN=queC PE=3 S V=1
MKDAVVVFSGGQDSTTCLIQALQHYDHVHCITFDYGQRHRAEIDIARELSQKLGATAHKVLDVGLLNELATSSLTRDNIPVPDYDADAQGIPNTFVPGRNILFLTLAAIYAYQVGAEAVITGVCETDFSGYPDCRDEFVKALNQAVVLGIARDIRFETPLMWLNKAETWALADYYQQLDTVRYHTLTCYNGIKGDGCGHCAACHLRANGLAQYQNDANTVMTSLKQKTGLS

SEQ ID NO: 42096 - protein, 244 aa, Sandaracinobacter sp.
  misc_feature (1)..(244): tr|A0A501XV41|A0A501XV41_9SPHN 7-cyano-7-deazaguanine s ynthase OS=Sandaracinobacter sp. PAMC 28131 OX=1715348 GN=queC PE=3 SV=1
MTIKQIPLSELAGKPVVLLLSGGLDSATCLAMASNAGAKVLALTIDYNQRHRRELEAADALAARYKVARHIRLPLDLRGFGGSALTDDIEVPKEGVLPGIPVTYVPARNTIFLSVALGWAEASGGSDLLIGVNALDYSGYPDCRPEFVAAFEDMANLATKAGVEGTARYKVHTPLQALTKAGIVQAAVEAGLDMGMTWSCYDPTVDGKHCGQCDSCRLRQKGFQEAGVPDPTLYAEKPPSGGGA

SEQ ID NO: 42097 - protein, 224 aa, Sandarakinorhabdus cyanobacteriorum
  misc_feature (1)..(224): tr|A0A255Y6K9|A0A255Y6K9_9SPHN 7-cyano-7-deazaguanine s ynthase OS=Sandarakinorhabdus cyanobacteriorum OX=19810 98 GN=queC PE=3 SV=1
MNASNRLAVVLLSGGLDSTTVAAITRAQGWRILALTIDYNQRHRIELEHAARVAKALGAERHIVLPLDLTGFGGSALTADIDVPKGGVEPGIPVTYVPARNTIFLSVALGWAEAAGARDLFIGVNALDYSGYPDCRPEFIAAFETMANSATKAGVEGERFRVHTPLMTLDKAGIIAAGQTAGAPLELTWSCYDPTPDGRPCGLCDSCRLRAKGFAEAGMADPAL

SEQ ID NO: 42098 - protein, 285 aa, Sandarakinorhabdus sp.
  misc_feature (1)..(285): tr|A0A552U8Z4|A0A552U8Z4_9SPHN 7-cyano-7-deazaguanine s ynthase OS=Sandarakinorhabdus sp. LB1R16 OX=2593303 GN= queC PE=3 SV=1
MPEPPKQPPDLRGTVVAGLWPGAPVPRPSAPFSPVAALSLAALPTRNKAAGLPGPCRRPIAAAVSVSAPLAVVLLSGGLDSTTVAAIARERGFRILALTIDYNQRHRIELDAAARVAAVYAERHIVLPLDLSGFGGSALTDAIDVPKSGVAPGIPVTYVPARNTIFLSVALGWAEAAGARDLFIGVNALDYSGYPDCRPEFVQAFETMANLATKAGVEGDRFAVNTPLAAMTKADIVREGARLGVDFGLTWSCYDPVDGRPCGSCDSCRLRAKGFAEAGVPDPAL

SEQ ID NO: 42099 - protein, 224 aa, Sanguibacteroides justesenii
  misc_feature (1)..(224): tr|A0A318ND35|A0A318ND35_9PORP 7-cyano-7-deazaguanine s ynthase OS=Sanguibacteroides justesenii OX=1547597 GN=q ueC PE=3 SV=1
MMKKAIVLLSGGLDSTTAVYLAKHRGFDELYAITFLYGQKHDKELLSAKAVAKAVGVKEHKIVELMLNQWDGCSLTDEKIDIADGNIERDDIPATYVPARNMVFLSVAASYADALEITDIFIGVSEVDYSGYVDCREEFIKAMENAINLGTVLGAEKKRRITLHAPFMHMTKAEEVRLGTTLGVDFGLTWSCYRGGDKPCGTCDSCLLRAKAFAEAGIEDPAIE

SEQ ID NO: 42100 - protein, 223 aa, Sanguibacteroides justesenii
  misc_feature (1)..(223): tr|A0A0C3RFJ5|A0A0C3RFJ5_9PORP 7-cyano-7-deazaguanine s ynthase OS=Sanguibacteroides justesenii OX=1547597 GN=q ueC PE=3 SV=1
MKKAIVLLSGGLDSTTAVYLAKHRGFDELYAITFLYGQKHDKELLSAKAVAKAVGVKEHKIVELMLNQWDGCSLTDEKIDIADGNIERDDIPATYVPARNMVFLSVAASYADALEITDIFIGVSEVDYSGYVDCREEFIKAMENAINLGTVLGAEKKRRITLHAPFMHMTKAEEVRLGTTLGVDFGLTWSCYRGGDKPCGTCDSCLLRAKAFAEAGIEDPAIE

SEQ ID NO: 42101 - protein, 238 aa, Sapientia aquatica
  misc_feature (1)..(238): tr|A0A4R5VV76|A0A4R5VV76_9BURK 7-cyano-7-deazaguanine s ynthase OS=Sapientia aquatica OX=1549640 GN=queC PE=3 S V=1
MHKSALVLFSGGQDSTTCLAWALEHFERVETIGFDYGQRHDIELTVRPNLREKIIELQPHWETRLGPDHMIDLSLLSSISETAMTSDIEIVMQENGLPNTFVPGRNLLFLTVAATLAYRRGLDVLVGGMCETDFSGYPDCRDDTLKSLQVTLNLGMNSRLNIATPLMWLDKSQTWELAQTLGGDALIDLIRVGTHTCYLGERGKRHDWGYGCESCPACVLRANGYKQFAAKQEFAAKK

SEQ ID NO: 42102 - protein, 243 aa, Unknown
  misc_feature (1)..(243): tr|A0A2N0LIB6|A0A2N0LIB6_9CHLR 7-cyano-7-deazaguanine s ynthase OS=SAR202 cluster bacterium Io17-Chloro-G5 OX=1 926614 GN=queC PE=3 SV=1
MPSYGVSLLSGGLDSTTVTALAKSKTDHLTALTFHYGQSHSKEVDCAAKVARSLGVTQELLDISFLGKVAWYSALTNPEQFPMPEDRETSRMGNSIPITYVPLRNTIFLSLAAASLESQVLYAIEIEHVLPKDIQAYIYMAPNAIDYSGYPDCRPEFFQKMGESLGYGSKLWTEYHVPLQIEIPIIEMSKPDIVRLAMVLDAPLELTWSCYQGGEIPCERCDSCILRASGFRAAGYPDPAIPD

SEQ ID NO: 42103 - protein, 247 aa, Unknown
  misc_feature (1)..(247): tr|A0A2N0KV93|A0A2N0KV93_9CHLR 7-cyano-7-deazaguanine s ynthase OS=SAR202 cluster bacterium Casp-Chloro-G4 OX=1 926606 GN=queC PE=3 SV=1
MTSFGVTLLSGGLDSTTVTQYAKDKIDHMTALTFHYGQTHSKEVDCAQQIAEMMGIKHKLLDISFLSEVAWYSALTNPDQFPMPTDRSENEIGFGIPITYVPLRNTIFLSLSAAFLESEVLHAIEVGGLSPSDVEAYLYLAPNAIDYSGYPDCRPEYYEKITQALEYGSKLWTQYDIPIKVETPIIEMSKAEIAEMGLRIKAPLEYTWSCYQGGDVPCGGCDSCVLRAKGFEEAGVSDPLLVRLGRT

SEQ ID NO: 42104 - protein, 231 aa, Unknown
  misc_feature (1)..(231): tr|A0A2D6YIW9|A0A2D6YIW9_9DELT 7-cyano-7-deazaguanine s ynthase OS=SAR324 cluster bacterium OX=2024889 GN=queC PE=3 SV=1
  misc_feature (19)..(19): Xaa can be any naturally occurring amino acid
  misc_feature (30)..(30): Xaa can be any naturally occurring amino acid
  misc_feature (32)..(32): Xaa can be any naturally occurring amino acid
  misc_feature (61)..(61): Xaa can be any naturally occurring amino acid
  misc_feature (227)..(227): Xaa can be any naturally occurring amino acid
MNDSLQAKSALVVFSGGQXSTTCLYWAINXFXAVRTLTFDYGQRHRIELECAKQIAELARXPHEVLSIGTFAELGGNALTGNQEVEVQKEKSNRENLPNTFVPGRNLILLSFAAARAWQLEIENIVTGVCQTDYSGYPDCRKNTIEALQLALNLGMERQFVLHTPLMWLDKAQTVMMAKDLGALEALSFSHTCYNGIFPPCGSCQACHLRNKGFYEAGVIDPLIERXKKVT

SEQ ID NO: 42105 - protein, 222 aa, Unknown
  misc_feature (1)..(222): tr|A0A2A4T6U4|A0A2A4T6U4_9DELT 7-cyano-7-deazaguanine s ynthase OS=SAR324 cluster bacterium OX=2024889 GN=queC PE=3 SV=1
MSKALVIFSGGQDSTTCLGWAKNRYDSVQAITFAYGQTHTVEVEQAKKIAAMMDVPLQVVHLDFFGDLVNSALISGGDVNAPHVDNEALPASYVPNRNALFILVAHAFSQKIKADTLIGGMCQTDYSGYPDCREDFINTLKQALNMGSEQNIKVETPLMFLNKAETFELARKEGVLDLVLQHSHTCYNGDPNMNEWGRGCGDCPACGLREKGYYEFKEQFGV

SEQ ID NO: 42106 - protein, 208 aa, Unknown
  misc_feature (1)..(208): tr|A0A0R2PFF1|A0A0R2PFF1_9GAMM 7-cyano-7-deazaguanine s ynthase OS=SAR86 cluster bacterium BACL1 MAG-120507-bin 14 OX=1655567 GN=queC PE=3 SV=1
MDSFTLLHQALNQNYEVDCLTFDYGQRHIKEIECARLACHENHLSNLQIKIANVESIFAASALTSNSIDMPHGSYQAESMQSTIVPNRNMLFISHAIAYAISKNIKQVWYGAHAGDHFIYPDCRPEFLSAMNAVAQICHTFPISVEAPFLNYSKAEIVKIGLDLGIDYSKTWTCYEGQDLACGKCGSCNERLEAFALNNTADPLTYQD

SEQ ID NO: 42107 - protein, 228 aa, Unknown
  misc_feature (1)..(228): tr|A0A2A4WV66|A0A2A4WV66_9GAMM 7-cyano-7-deazaguanine s ynthase OS=SAR86 cluster bacterium OX=2030880 GN=queC P E=3 SV=1
MTALKKNRAVVLVSGGLDSATCLAIARDRGFECYALSFDYGQRSSSEIDAARLVAASGSVSEHKIIELNMAAIGGSALTDTNISVPEQESEGIPVTYVPARNTVFLSYALAWAEVLNADAIFIGVNALDYSGYPDCRPEYIKAFQTLINLATKVGVEGSVISLETPLIDLTKAEIIKTGAGLSVDYGTTVSCYQADPEGRACGQCDSCRFRASGFEKAEVEDPTRYQE

SEQ ID NO: 42108 - protein, 226 aa, Unknown
  misc_feature (1)..(226): tr|A0A0R2W8R4|A0A0R2W8R4_9GAMM 7-cyano-7-deazaguanine s ynthase OS=SAR92 bacterium BACL16 MAG-120619-bin48 OX=1 655625 GN=queC PE=3 SV=1
MSKKAVILVSGGLDSTTVTAMAMKQGYDCYTLSFDYGQRHRSELEAAQRVSELMTVHQHKVVKLDLGSIGGSALTDSAIAVPEEETAGIPVTYVPARNTVFLSIALGWAEVLGADDIFIGVNAVDFSGYPDCRPEYIEAFERMANLATRAGVEGNRLTIHAPLIAMTKAEIIHTGLALGVDYSATVSCYQADTSGAACGKCESCRLRRQGFNQAGVKDPTRYQNNA

SEQ ID NO: 42109 - protein, 226 aa, Unknown
  misc_feature (1)..(226): tr|A0A0R2TW76|A0A0R2TW76_9GAMM 7-cyano-7-deazaguanine s ynthase OS=SAR92 bacterium BACL26 MAG-121220-bin70 OX=1 655626 GN=queC PE=3 SV=1
MYKKAVVLVSGGLDSTTVLAMAISQGYDCYTLSFDYGQRHRSELKAASHVSALMEVAQHKVVNLDLGTIGSSALTDLSIDIPEHETAGIPVTYVPARNTVFLSIALGWAEVLGANKIFLGVNAVDYSGYPDCRPEYISSFEAMANLATRAGVEGNRLSIEAPLIDLTKAQIIKEGLALGVDYSYTVSCYQANAEGRACGKCDSCRLRIQGFNEAGIKDPTEYENSA

SEQ ID NO: 42110 - protein, 226 aa, Unknown
  misc_feature (1)..(226): tr|A0A520MBT0|A0A520MBT0_9GAMM 7-cyano-7-deazaguanine s ynthase OS=SAR92 clade bacterium OX=2315479 GN=queC PE= 3 SV=1
MSDKAVVLVSGGLDSSTVLALALQQGYRCYTLSFDYGQRHRSELEAAMRVSELMKVQEHKIVRLDLGTIGGSALTDTTIDVPEQETAGIPVTYVPARNTVFLSIALGWAEVLEADTIFLGVNAVDYSGYPDCRPEYISSFEAMANLATRAGVEGSKLSIQAPLIDMTKGEIISAGAALGVDYSQTVSCYQASLEGLACGKCDSCRLRIEGFNQAGIPDPTRYKNSA

SEQ ID NO: 42111 - protein, 705 aa, Schlegelella thermodepolymerans
  misc_feature (1)..(705): tr|A0A4R2MQ54|A0A4R2MQ54_9BURK 7-cyano-7-deazaguanine s ynthase in queuosine biosynthesis OS=Schlegelella therm odepolymerans OX=215580 GN=EV676_101120 PE=4 SV=1
MQDKRYVLCGNVSAQGISEDPARDLRLRLSGRPGHGNITLRIEDVHSKLFSSVPSRFHDLLEIATYVYSADQVIRRGADDVDTFGDGWRRDLHFVVPVRDPDFWSSAQVQDTLCSTLGFLSDDQYRFDFVKLDQEHPFQQYLQFDDTQQVYGKPEQVVMFSGGLDSLAGAIDEVVNQKRRVLLVTHKSTSKLNKRHRTLEQMLAEKAGDNVPHRISVRVHKAKELNHEYTQRSRSFLYVSIGATIARMLNLKSVRFYENGVISLNLPVCAQVVGGRATRTTHPRVMKGFQDLLSLVAGEPFTVENPYIWKTKADVVKVITDAGCHDLIKHSMTCTHTWEMTNQHTHCGGCSQCIDRRFAVLAAKADQHDPVEHYKVDVFTQSRDKGEDKIMAAAYLERANQVKNLTDVTQFVSSYPDVGRVLKYLNYSSAGQAAQRVFDLYKRHADEVTGALDELGRRYFTQIRERSLPGDCLLRTVYESASVNSVPAVISMEKQPENFFRKRGAVWETRFQGRNTICLLNVDKGAEYINLLLAFPDREMSVYEIAVGNAVNTIEHPAGSGIAPEDIEDGYQVTQGIPLGDAGDVADRRALNECKQQARELFEEMEEARVRGDHARIEEIEKEMAALVKYIEGGKGLGGRQRRGGDKRKNVRDAFRNAVDRAIRQIEKYDKPLAEHLKASIKYGNEVVYRPGMAITWEVRPIVNG

SEQ ID NO: 42112 - protein, 236 aa, Schlegelella thermodepolymerans
  misc_feature (1)..(236): tr|A0A2S5T3N8|A0A2S5T3N8_9BURK 7-cyano-7-deazaguanine s ynthase OS=Schlegelella thermodepolymerans OX=215580 GN =queC PE=3 SV=1
MVASEDPRAALVLFSGGQDSTVCLAWALQRYARVETIGFDYGQRHRVELECRPRVLQAMRRLDPAWDRKLGDDHLLDVGLLGQISDTALTSERAIEMADSGLPNTFVPGRNLLFLTLAATVAYRRGAQVLVGGMCETDYSGYPDCRDNTLKALQVALSLGMDQPLVIETPLMWLDKAQTWTLAEQLGGQALVDLVAEHTHTCYLGERSQRHAWGYGCGRCPACELRRRGHEAYLSR

SEQ ID NO: 42113 - protein, 266 aa, Schwartzia succinivorans
  misc_feature (1)..(266): tr|A0A1M4T257|A0A1M4T257_9FIRM Uncharacterized protein OS=Schwartzia succinivorans DSM 10502 OX=1123243 GN=SAM N02745190_00335 PE=4 SV=1
MEEKLQKLLDYLSGCGSLVVALSGGVDSSTLLYAAHLALGEKVVAVTAKSEMMSVEELQIAKEMAEKAGVRHIIIDAHDLDDPDVCANTPERCYYCKRGRFQKLVNFAKKEGFAFVADGGNIDDTKDYRPGMRALEELAPTVVSPFMICGWGKSDIRRQAKEWGLSVWDRPSAACLASRIEYGIELTPKRLRQVDAAEEILRSYISGQLRVRHHGKLARVEAEPAAFQILLNQRENITKELRMLGFQYVTLDLLGYRMGSTNEVLD

SEQ ID NO: 42114 - protein, 226 aa, Schwartzia succinivorans
  misc_feature (1)..(226): tr|A0A1M4WEQ2|A0A1M4WEQ2_9FIRM 7-cyano-7-deazaguanine s ynthase OS=Schwartzia succinivorans DSM 10502 OX=112324 3 GN=queC PE=3 SV=1
MEKAVVLLSGGLDSTVCMAVAHSKGMELYPISFNYHQRHNIELESAKKVAKHFGVKRHLIIETNMDAIGGSALTDENIDVPAGNPDREDVPITYVPARNLIFLSYAMGYAEVLGAQHVFIGVNAVDYSGYPDCRPEFIAKFQDLANYATRATAVEHKGITIETPLQDLSKKEIVLLGTKLHAPLEYTHSCYKGGEKACGVCDSCRLRLRGFEEAGVNDPVPYEIQK

SEQ ID NO: 42115 - protein, 225 aa, Scopulibacillus darangshiensis
  misc_feature (1)..(225): tr|A0A4R2P4V5|A0A4R2P4V5_9BACL 7-cyano-7-deazaguanine s ynthase OS=Scopulibacillus darangshiensis OX=442528 GN= queC PE=3 SV=1
MEEKAVIVLSGGLDSTTCMGIAKNEGYELYPITFQYGQRHDREVEQAKKIAEHYDIREHRIVDISFFQQIGGSALTDQSIDVPETMVEGDIPVTYVPARNMIFLSLASAYAEVIGAEAIYIGVSSVDYSGYPDCRPEFIKSMNKTVNLATKVGVSDKGMVINTPLMHLTKAETIIEGIKLNVPYHLTTSCYNGEDKACGTCDSCQLRLKGFLEAGEKDPIPYKDR

SEQ ID NO: 42116 - protein, 230 aa, Scytonema hofmannii
  misc_feature (1)..(230): tr|A0A139XE57|A0A139XE57_9CYAN 7-cyano-7-deazaguanine s ynthase OS=Scytonema hofmannii PCC 7110 OX=128403 GN=qu eC PE=3 SV=1
MKAVILLSGGLDSSTVLYQAMADGCECYALSFNYRQRHQRELLSASAITTRVGVVQHQVVTFDLSQWGGSALTDSSIDLPQKRSLLEMSQNIPITYVPARNTIFLSFALAYAETIAAERVYIGVNALDYSGYPDCRPDYLQAMQEVFCLGTKQGRLGHPINIVAPLIELKKTEIIQLGNQLGVPWELTWSCYAGGEVACGVCDSCRLRLAAFAELELVDPLNYSTRRICT

SEQ ID NO: 42117 - protein, 222 aa, Scytonema millei
  misc_feature (1)..(222): tr|A0A1D2PAM6|A0A1D2PAM6_9CYAN 7-cyano-7-deazaguanine s ynthase (Fragment) OS=Scytonema millei VB511283 OX=1245 923 GN=QH73_025965 PE=3 SV=1
MKAVILLSGGLDSSTVLYQALGDGCECYTICFDYQQRHRRELQSALAIAQKAGVVDHQVVRFDLRQWGGSALTDDAIDLPQKRDLEEMSQSIPVTYVPARNTIFLSFALGYAETIAAERIYIGVNALDYSGYPDCRPDYIQAMQEVFRLGTKQGRSGQPISIVTPLIHLKKTEIIQLGNKLGVPWELTWSCYAGGDVACGVCDSCRLRLAAFAELGLTDPVA

SEQ ID NO: 42118 - protein, 229 aa, Scytonema millei
  misc_feature (1)..(229): tr|A0A4R4ITB1|A0A4R4ITB1_9CYAN 7-cyano-7-deazaguanine s ynthase OS=Scytonema millei VB511283 OX=1245923 GN=queC PE=3 SV=1
MTNNKAVILLSGGLDSSTVLYQARADGYDCYAISFDYQQRHRRELEAAKTIAQSAEVVDHQLISFDLRQWGGSALTDDSINLPQARSLDEMAQNIPVTYVPARNTIFLSFALAYAETLNASRVYIGVNALDYSGYPDCRPDYIQAMQEVFRLGTKQGREGNAIAIVAPLIQLKKTEIIQLGDRLGVPWEKTWSCYAGDELACGVCDSCRLRLAAFAALGMEDPLPYRRE

SEQ ID NO: 42119 - protein, 482 aa, Scytonema sp.
  misc_feature (1)..(482): tr|A0A1Z4IQK2|A0A1Z4IQK2_9CYAN Uncharacterized protein OS=Scytonema sp. HK-05 OX=1137095 GN=SAMD00079811_19040 PE=4 SV=1
MNYRPSLQQKLNESDYSDYTLHFQPVLNSNGSVLFIDHSQDKKLTIGINVDDTEFKYRVQAEFPAIVADLIDLAVAIYTSDRLAPQSLTEKQRRFHVRLPVRHPELLSAEPFLTKLDDLLKWTTDSEWVFDFQKRIAPQRLVEQHQSLQILPQGCEVTLWSGGLDALAGLYTRLMMYPEKQFILFGSGSNNSVYARQKKVYKEIESIFPGRCNLFRVPIRFDDSSEQQKNKLSRVRGVVFTLLGSACAYLMGQQILYLYENGMGAINLPYRESAVGLDHSRSVHPLTLLMVSDVVSELLGKEFQVKNPFLFWTKAEMCKALAKTGREDLPPLTMSCDSPHRQKPVQCGYCSSCLLRRQSLAATNIKDRTRYVVLHGKPPVKDPSLCFLNMQAQVRTLDSLFAVSDEPWKTLTKKFPILDDVVDRTATAENLLPADMRSRLIQLYQNYVSEWNAVESQIVNGLLNKGSYQKAFSKYVVSSQQG

SEQ ID NO: 42120 - protein, 225 aa, Scytonema sp.
  misc_feature (1)..(225): tr|A0A1Z4PZR4|A0A1Z4PZR4_9CYAN 7-cyano-7-deazaguanine s ynthase OS=Scytonema sp. NIES-4073 OX=2005464 GN=queC P E=3 SV=1
MKAVILLSGGLDSSTVLYQAQADGCECYTICFDYQQRHRRELSSALAIAQKANVVDHQVVRFDLRQWGGSALTVNAIDLPQKRELEEMSQTIPVTYVPARNTIFLSFALAYAETIAAQRIYIGVNALDYSGYPDCRPDYIQAMQEVFRLGTKQGRSGQPISIVTPLIHLKKTEIIQLGNKLGVPWELTWSCYAGGDVACGVCDSCRLRLAAFAELGLQDPLAYAV

SEQ ID NO: 42121 - protein, 484 aa, Scytonema tolypothrichoides
  misc_feature (1)..(484): tr|A0A0C2LAP2|A0A0C2LAP2_9CYAN Uncharacterized protein OS=Scytonema tolypothrichoides VB-61278 OX=1233231 GN=S D80_30565 PE=4 SV=1
MNYRPLIQHKPNNSDYSDYTLHFEPIVNSNGSVRFIDHSRCNDLTVGINVDDTEFQYRVKAEFPAIVADLVDLAVAIHTSDRLAPQNLSGRQRRLHVILPVRHPELLSAEAFRTKLDDLLKWATDSEWVFDFQRRIATERLVEHPSLPIAPQGCEVALWSGGLDALAGLYTRLQMYPEKRFLLFGTGSNDSVYARQQRVAMEIESIFPGRSNLLRVPIRFDDSGLQHKNKLSRARGVVFTLLGAACAHLMGQEVLYVYENGIGAINLPYRESAVGLDHSRSVHPLTLLMVGDVVSELLGEEFRVQNPFLFWTKAAMCKALAKDRRNDLPSLTMSCDSPHRQRPVQCGYCSSCLLRRQALAAASIEDRTRYVVLHGELPVKKPSLCFRNMLAQVDILRCLLSISDEPGLQWKTLTGKFPVLDDIVDRSAVAENLVPANMRSRLIQLYQNYVSEWDAVKWQISDGLLNKHSNQQASSRYVVSDQQG

SEQ ID NO: 42122 - protein, 225 aa, Scytonema tolypothrichoides
  misc_feature (1)..(225): tr|A0A0C2QM02|A0A0C2QM02_9CYAN 7-cyano-7-deazaguanine s ynthase OS=Scytonema tolypothrichoides VB-61278 OX=1233 231 GN=queC PE=3 SV=1
MKAVILLSGGLDSSTVLYQAIADGYNCHTISFDYQQRHRRELDSALAIAQKAGVVDQQVVKFDLRQWGGSALTDDAIELPQKRDLEEMSQSIPVTYVPARNTIFLSFALAYAETISAQCVYIGVNALDYSGYPDCRPDYIQAMQEVFRLGTKQGREGQSISIKTPLIQLKKTEIIQLGNKLGVPWELTWSCYQGDDVACGVCDSCRLRLAAFGELGLKDPLAYAK

SEQ ID NO: 42123 - protein, 231 aa, Unknown
  misc_feature (1)..(231): tr|J3YT80|J3YT80_9ENTR 7-cyano-7-deazaguanine synthase OS=secondary endosymbiont of Heteropsylla cubana OX=134 287 GN=queC PE=3 SV=1
MKRAVVVFSGGQDSTTCLIQAITQYDEVHCVTFNYGQRHREEIVVASKLVAKLGITSHKIFDMNILNNMTVSSLIQDKIPLISYENDTSQIPHTFVPGRNILFLTLAAIYSYQIESTVVITGVCETDFSGYPDCRNDFIKALNMAINLGMEYELSFITPLMWLSKAEIWALADYYHQLNLIRYDTLTCYNGVKGDGCAQCQACHLRACGLSRYREDPKRVMNLLKSKINIC

SEQ ID NO: 42124 - protein, 231 aa, Unknown
  misc_feature (1)..(231): tr|J3TFN0|J3TFN0_9ENTR 7-cyano-7-deazaguanine synthase OS=secondary endosymbiont of Ctenarytaina eucalypti OX= 1199245 GN=queC PE=3 SV=1
MKRAIVLFSGGQDSTTCLIQALSQYDEVHCITFDYSQRHRIEITVARELALKLCAKTHEVIDVTTLNALTVSSLTRNYIPVPNYKEQSSGLPSTFVPGRNILFLTLASVYAYQVNASTIITGVCETDFSGYPDCRDDFIKALNNAVNLGLAYELHFVTPLMWLDKTETWALADYYHQLERVRYDTMSCYNGIRGDGCGQCAACHLRARGLESYYAKPDSVMAALKAKTGLR

SEQ ID NO: 42125 - protein, 222 aa, Sedimentibacter sp.
  misc_feature (1)..(222): tr|A0A252CN01|A0A252CN01_9FIRM 7-cyano-7-deazaguanine s ynthase OS=Sedimentibacter sp. SX930 OX=1955060 GN=queC PE=3 SV=1
MENVNGTTQKQALVIFSGGQDSTTCLIQAIQKYGAANTVALSFSYGQRHGIELERAAWIAKNLGVEHHILDAQVMGKVTTNALMDESQTIKEADTEDYPNTFVDGRNALFLLLAGIFAKSKGIRTIILGVCETDFSGYPDCRDVFVKSMNVTLNLAMDYNFNVETPLMYLTKAQTWELADQLGCLAYIEEHTHTCYMGVPGGCGECPSCKLRNAGLAEYLNK

SEQ ID NO: 42126 - protein, 222 aa, Sedimenticola selenatireducens
  misc_feature (1)..(222): tr|A0A558DWY6|A0A558DWY6_9GAMM 7-cyano-7-deazaguanine s ynthase OS=Sedimenticola selenatireducens OX=191960 GN= queC PE=3 SV=1
MKKAVVLLSGGLDSATVLAIARSQGYACYALSLDYGQRHVVELRAASRIATESQVASHKVIPLSLNAFGGSALTDSAIAVPETLEAGIPVTYVPARNTIFLSLALGWAEVLGARDLFLGVNAVDYSGYPDCRPEFIEAFELLANLATKAGVEGERFKIHAPLINMTKAEIIQSGRELGIDYSLTISCYQADAQGRACGVCDSCRLRAQGFREAGVPDPTAYQ

SEQ ID NO: 42127 - protein, 225 aa, Sedimenticola selenatireducens
  misc_feature (1)..(225): tr|A0A2N6CUQ4|A0A2N6CUQ4_9GAMM 7-cyano-7-deazaguanine s ynthase OS=Sedimenticola selenatireducens OX=191960 GN= queC PE=3 SV=1
MKKAVILLSGGLDSATSLAMAREQGYACYALSFAYGQRHAVELEAAGRVADALGVVEHKVIPIALDAFGGSALTDNAIAVPEAEGGDGIPVTYVPARNTVFLSLALGWAEVLGARDLFLGVNAVDYSGYPDCRPEYIEAFERLANLATKAGVEGERFRIHAPLIDMTKAQIIQTGVRLGVNYALTVSCYQADASGVACGRCDSCRLRAQGFREAGVPDPTPYQQK

SEQ ID NO: 42128 - protein, 238 aa, Sedimenticola sp.
  misc_feature (1)..(238): tr|A0A2N6GJB2|A0A2N6GJB2_9GAMM 7-cyano-7-deazaguanine s ynthase OS=Sedimenticola sp. OX=1940285 GN=queC PE=3 SV =1
MCLENRGSVTMKKAVVLLSGGLDSATALAIAVDQGFECYALSMDYGQRHSSELDAARRVARAQRVKQHSIMPIALDMFGGSALTDTEIEVPVESAEGIPVTYVPARNTVFLSLALAWAEVLGARDIFLGVNAVDYSGYPDCRPAFIQAFEKLANLATKAGVEGDEFHIHAPLIDWTKARIIQEGGRLGVDYALTISCYQADAQGRACGVCDSCRLRAQGFRDAGVPDPTSYQQQPTLL

SEQ ID NO: 42129 - protein, 222 aa, Sedimenticola thiotaurini
  misc_feature (1)..(222): tr|A0A558CVC5|A0A558CVC5_9GAMM 7-cyano-7-deazaguanine s ynthase OS=Sedimenticola thiotaurini OX=1543721 GN=queC PE=3 SV=1
MKKAVILLSGGLDSATVLAIARDQGFECYALSLAYGQRHAVELEAACRIATQNRVAAHKVIPLSLDAFGGSALTDSTIAIPETLGEGIPVTYVPARNTVFLSLALGWAEVLGARDLFLGVNAVDYSGYPDCRPEFIKAFEVLANLATKAGVEGEHFKIHAPLIHLSKAEIIQQGKALGVDYSQTISCYQADPTGAACGICDSCRLRAEGFRAAGIPDPTRYR

SEQ ID NO: 42130 - protein, 222 aa, Sedimenticola thiotaurini
  misc_feature (1)..(222): tr|A0A0F7JZM6|A0A0F7JZM6_9GAMM 7-cyano-7-deazaguanine s ynthase OS=Sedimenticola thiotaurini OX=1543721 GN=queC PE=3 SV=1
MKKAVVLLSGGLDSATALAMARQQGYDCYALSLAYGQRHSVELEAAGRVARALGVVEHKVIPIALDAFGGSALTDSAIAVPDAGSEGIPVTYVPARNTVFLSLALGWAEVLGARDLFLGVNAVDYSGYPDCRPDFIEAFERLANLATKAGVEGDRFRIHAPLIDMTKAEIIQAGMGLGVDYGLTVSCYQADDKGAACGRCDSCQLRAEGFRTAGVSDPTLYK

SEQ ID NO: 42131 - protein, 231 aa, Sedimentisphaera cyanobacteriorum
  misc_feature (1)..(231): tr|A0A1Q2HQJ4|A0A1Q2HQJ4_9BACT 7-cyano-7-deazaguanine s ynthase OS=Sedimentisphaera cyanobacteriorum OX=1940790 GN=queC PE=3 SV=1
MHDKNKAVVLLSGGLDSGTTAQIASSGELEIYAMSFSYGQRHTVELEAASKIADFCKAREHRIIDIDLGRLGGSALTDSSIDVPKDRSEGEMASGVPSTYVPVRNLVFLSYALAWAEVLGAFDIFIGVNSLDYSGYPDCRPEFIESFEKTANLASAASAEGGGRFKINAPLMQKTKAEIILEGKRLGFDYSLTHSCYDPDENGLACGKCDSCKLRLKGFREAGLKDPIKYQ

SEQ ID NO: 42132 - protein, 233 aa, Sedimentisphaera salicampi
  misc_feature (1)..(233): tr|A0A1W6LNG7|A0A1W6LNG7_9BACT 7-cyano-7-deazaguanine s ynthase OS=Sedimentisphaera salicampi OX=1941349 GN=que C PE=3 SV=1
MQEKNKAVVLLSGGLDSGTTAQIASSEGLEIYAMSFSYGQRHTVELQAARKIAEFCEAEEHRIIDIDLGKLGGSALTDNAIDVPKDRSESEISSGVPATYVPVRNLVFLSYALAWAEVLGAYHIFIGVNSLDYSGYPDCRPEFIESFEKTANLASAASAEGKGRFKINAPLMHKTKAEIILEGTRLGFDYSLTHSCYDPDENGLACGKCDSCLLRLKGFKEAGLTDPIKYQRY

SEQ ID NO: 42133 - protein, 230 aa, Sedimentitalea sp.
  misc_feature (1)..(230): tr|A0A3T0N8M7|A0A3T0N8M7_9RHOB 7-cyano-7-deazaguanine s ynthase OS=Sedimentitalea sp. W43 OX=2483033 GN=queC PE =3 SV=1
MKTIVICSGGLDSVSLAHKVAAEHELIGLISFDYGQRHSKETDFAARCAKRLGVPFDLIDMRHIGAHLSGSALTDDVDVPDGHYAEETMKVTVVPNRNAIMLAIAFGVAAAKQADAVATAVHGGDHFIYPDCRPDFTEAFEAMQAKALDGYADVKLYTPFVHVPKSAIVTEGAKHDTPFADTWSCYKGGEQHCGRCGTCVERREAFHLAGVTDPTVYADPDYWKSVLENA

SEQ ID NO: 42134 - protein, 221 aa, Sediminibacillus albus
  misc_feature (1)..(221): tr|A0A1G8X2P9|A0A1G8X2P9_9BACI 7-cyano-7-deazaguanine s ynthase OS=Sediminibacillus albus OX=407036 GN=queC PE= 3 SV=1
MEKNKAVVVFSGGQDSTTCLFWALEKFDEVEAITFDYNQRHQQEIEVAKAIATELNVKHTVLDMSLLNQLAPNALTRNDIEVNEGEDGSLPSTFVPGRNLMFLSFASIMAKQIGAKHIVTGVCETDFSGYPDCRDVFVKSLNVTLNLSMDEAFVIHTPLMWLDKAETWELADNLGAFSFVREKTLTCYHGFHADGCGECPACKLRRNGLESYLAKREGADL

SEQ ID NO: 42135 - protein, 221 aa, Sediminibacillus halophilus
  misc_feature (1)..(221): tr|A0A1G9P3G3|A0A1G9P3G3_9BACI 7-cyano-7-deazaguanine s ynthase OS=Sediminibacillus halophilus OX=482461 GN=que C PE=3 SV=1
MEKNKAVVVFSGGQDSTTCLFWAMERFDEVEAVTFDYNQRHQEEIEVAREIAGDLDIKHTVLDMSLLNQLAPNALTRTNIEVTEGEDGGLPSTFVPGRNLLFLSFAAIMAKQIGAKHVVTGVCETDFSGYPDCRDVFVKSLNVTLNLSMDEQFVIHTPLMWLNKAETWELADQLNAFAFVREKTLTCYHGVRADGCGECPACKLRSAGLNAYIAKLEGERA

SEQ ID NO: 42136 - protein, 231 aa, Seinonella peptonophila
  misc_feature (1)..(231): tr|A0A1M4XIY9|A0A1M4XIY9_9BACL 7-cyano-7-deazaguanine s ynthase OS=Seinonella peptonophila OX=112248 GN=queC PE =3 SV=1
MKAVVILSGGLDSTTCMGIAQKDGYQLYPLTFDYGQRHRIELEAAAAVAAHYHVSDQHQIASLDWLGVLGGSALTDQTMDVPSAGEEKGIPSTYVPARNLIFISLATAYAEVVGATAIYLGVSAVDFSGYPDCRPAFIEAVNQTLALATEVGVNDQKESIQVVTPLIHLSKKETIRQGIELEVPYHLTTSCYRGEAKACGKCDSCHLRLKGFAENGVRDPIPYHDSVSVNV

SEQ ID NO: 42137 - protein, 223 aa, Selenihalanaerobacter shriftii
  misc_feature (1)..(223): tr|A0A1T4K6F2|A0A1T4K6F2_9FIRM 7-cyano-7-deazaguanine s ynthase OS=Selenihalanaerobacter shriftii OX=142842 GN= queC PE=3 SV=1
MNKKAIVLSSGGLDSTTCLSIALDEGYEVYPLSFLYGQKHSREIEQSKLIREELGIPKENHLFVRVDNIGESALTNDEVDIPEDETEGIPDTYVPARNMLFLSYAVSLAEGVGAEAVYIGISSIDYSGYPDCRPEFIEAYQKTIDVGTKAGVEGDSVQIKTPLIDKTKVETIEIGLELKAPYNLTTTCYRGEEKACGKCPSCKIRLKAFDKIGVKDPIEYETE

SEQ ID NO: 42138 - protein, 225 aa, Seleniivibrio woodruffii
  misc_feature (1)..(225): tr|A0A4R1KEV7|A0A4R1KEV7_9BACT 7-cyano-7-deazaguanine s ynthase OS=Seleniivibrio woodruffii OX=1078050 GN=queC PE=3 SV=1
METNNAALVVFSGGQDSTTCLGWALKKFEKVHTISFGYGQNHSIELVQAEKIAAKTGVSFKNVDISFFAGLVDSALTTKGADVTERHPRLKNLPASYVPNRNALFLTLAHAYAQLKNCDHLVTGVCETDFSGYPDCRKVFTDAMENALNLGSETELVIHTPLMYLNKAQTFKLAEDCGVLDIVLEDSHTCYNGDRSVRHAWGYGCGDCPACVLRAKGYEEYINAF

SEQ ID NO: 42139 - protein, 228 aa, Selenomonas artemidis
  misc_feature (1)..(228): tr|E7N2X8|E7N2X8_9FIRM 7-cyano-7-deazaguanine synthase OS=Selenomonas artemidis F0399 OX=749551 GN=queC PE=3 S V=1
MREKAVILLSGGLDSCTCMAVAQEAGCELYPVSFVYGQRYDREVDCAKRIAAHFHAAEHLIIETNMDAIGGSAVTDRSIDVPEGDPDRTDIPLTYVPARNLIFLSYGLGFAERVGAAHLYIGVNSVDYSGYPDCRPEFIRQFQAVADMATAAATERGKRIVVETPLQYLSKGEIIALGTRLGAPYEMTTSCYNGGTEACGVCDSCRLRLRGFAEAGRRDPIPYAAGVR

SEQ ID NO: 42140 - protein, 228 aa, Selenomonas flueggei
  misc_feature (1)..(228): tr|C4V0Q0|C4V0Q0_9FIRM 7-cyano-7-deazaguanine synthase OS=Selenomonas flueggei ATCC 43531 OX=638302 GN=queC PE =3 SV=1
MGERAVILLSGGLDSCTCMAIAHAAGQELYPISFNYHQRHSRELDAARSIAAHYHAAEHLIIETNMDAIGGSALTDSAIDVPQGNAERTDIPVTYVPARNLIFLSYALGYAERVGAAHVYIGVNSVDYSGYPDCRPEFIAAFQRAADAATAASAEDGRRIVIETPLQHLSKGEIILRGDELDAPYALTTSCYRGGTVACGVCDSCLLRLRGFAEAGLHDPIPYAEGKN

SEQ ID NO: 42141 - protein, 228 aa, Selenomonas infelix
  misc_feature (1)..(228): tr|G5GS76|G5GS76_9FIRM 7-cyano-7-deazaguanine synthase OS=Selenomonas infelix ATCC 43532 OX=679201 GN=queC PE= 3 SV=1
MGEKAVILLSGGLDSCTCMAVAQAAGYELYPISFNYHQRYDREVDCAKRIAAHFHAAEHLIIETNMDAVGGSAVTDKSIDVPDGDADRTDIPVTYVPARNLIFLSYALGFAERVGAAHLYIGVNSVDYSGYPDCRPEFIAAFQTAADAATAAATERGRRIVVETPLQHLSKGEIIRLGTQLGAPYELTTSCYRGGAEACGVCDSCLLRLRGFAEAGRRDPIPYAAGAR

SEQ ID NO: 42142 - protein, 232 aa, Selenomonas noxia
  misc_feature (1)..(232): tr|D4S6P5|D4S6P5_9FIRM 7-cyano-7-deazaguanine synthase OS=Selenomonas noxia ATCC 43541 OX=585503 GN=exsB PE=3 SV=1
MRGNIMGEKAVVLLSGGLDSCTCMAVADAAGHELYPVSFDYHQRHIRELSCAKKIAVHYHAAEHLIIETNMNAVGGSALTDDTIDVPEGDAQRTDIPATYVPARNLIFLSYALGYAERVGATHLYIGVNSVDYSGYPDCRPAFIAAFQAAADAATAAAERGRRIIVETPLQSLSKGEIIRLGTKLGAPYELTTSCYRGEEEACGVCDSCVLRLRGFAAAGRRDPIPYAAGGQ

SEQ ID NO: 42143 - protein, 228 aa, Selenomonas noxia
  misc_feature (1)..(228): tr|G5H4W6|G5H4W6_9FIRM 7-cyano-7-deazaguanine synthase OS=Selenomonas noxia F0398 OX=702437 GN=queC PE=3 SV=1
MGEKAVVLLSGGLDSCTCMAVADAAGHELYPVSFDYHQRHIRELSCAKKIAVHYHAAEHLIIETNMNAVGGSALTDDTIDVPEGDAQRTDIPATYVPARNLIFLSYALGYAERVGATHLYIGVNSVDYSGYPDCRPAFIAAFQAAADAATAAAAERGGRIIVETPLQSLSKGEIIRLGTKLGAPYELTTSCYRGEEEACGVCDSCVLRLRGFAAVGRRDPIPYAAGGQ

SEQ ID NO: 42144 - protein, 228 aa, Selenomonas ruminantium
  misc_feature (1)..(228): tr|I0GRS3|I0GRS3_SELRL 7-cyano-7-deazaguanine synthase OS=Selenomonas ruminantium subsp. lactilytica (strain N BRC 103574 / TAM6421) OX=927704 GN=queC PE=3 SV=1
MAKEKAVVLLSGGLDSCTCMAVAKEAGYEVYPISFNYHQRHSIELEGAKKIADFYKVPKHLIIETNMEAIGGSALTDSHIDVPEGDVDRKDVPVTYVPARNLIFLSYAMGYAEVVGATHVYIGVNSVDYSGYPDCRPEFIQKFQALADYATTATAVNGTKIKIETPLQDLSKKEIVQLGSKLGAPLQFTHSCYKGGEKACGVCDSCKLRLQGFAEAGVEDPVEYETRN

SEQ ID NO: 42145 - protein, 228 aa, Selenomonas ruminantium
  misc_feature (1)..(228): tr|A0A1K1LT46|A0A1K1LT46_SELRU 7-cyano-7-deazaguanine s ynthase OS=Selenomonas ruminantium OX=971 GN=queC PE=3 SV=1
MAKEKAVVLLSGGLDSCTCMAVAKEAGYEVYPISFNYHQRHSIELEGAKKIAEFYNVPKHLIIETNMEAIGGSALTDSHIDVPEGDVNREDVPITYVPARNLIFLSYAMGYAEVVGATHVYIGVNSVDYSGYPDCRPEFIQKFQELANYATTATAVNGTKITIETPLQDLSKKEIVQLGSKLGAPLQFTHSCYKGGEKACGVCDSCKLRLQGFAEAGVEDPVEYETRN

SEQ ID NO: 42146 - protein, 228 aa, Selenomonas sp.
  misc_feature (1)..(228): tr|E0NY53|E0NY53_9FIRM 7-cyano-7-deazaguanine synthase OS=Selenomonas sp. oral taxon 149 str. 67H29BP OX=86456 3 GN=exsB PE=3 SV=1
MGERAVILLSGGLDSCTCMAIAHAAGQELYPISFNYHQRHSRELDAAKSIAAHYHAAEHLIIETNMDAIGGSALTDSAIDVPQGDAERTDIPVTYVPARNLIFLSYAVGYAERVGAAHVYIGVNSVDYSGYPDCRPAFIAAFQRAADAATAASAENGRRIVIETPLQHLSKGEIIRRGDALDAPYALTTSCYQGGSVACGVCDSCLLRLRGFAEAGLHDPIPYAEGKN

SEQ ID NO: 42147 - protein, 228 aa, Selenomonas sp.
  misc_feature (1)..(228): tr|A0A0X8K961|A0A0X8K961_9FIRM 7-cyano-7-deazaguanine s ynthase OS=Selenomonas sp. oral taxon 136 OX=713030 GN= queC PE=3 SV=1
MGERAVILLSGGLDSCTCMAIAHAAGQELYPISFNYHQRHSRELDAAKSIAAHYHAAEHLIIETNMDAIGGSALTDSAIDVPQGDAERTDIPVTYVPARNLIFLSYAVGYAERVGATHVYIGVNSVDYSGYPDCRPAFIAAFQRAADAATAASAENGRRIVIETPLQHLSKGEIIRRGDALDAPYALTTSCYQGGSVACGVCDSCLLRLRGFAEAGLHDPIPYAEGKN

SEQ ID NO: 42148 - protein, 224 aa, Selenomonas sputigena
  misc_feature (1)..(224): tr|C9LUJ3|C9LUJ3_SELS3 7-cyano-7-deazaguanine synthase OS=Selenomonas sputigena (strain ATCC 35185 / DSM 20758 / VPI D19B-28) OX=546271 GN=queC PE=3 SV=1
MEKAVVLLSGGLDSTTCMAVAKEQGKELYPISFDYHQRHSIELEGAKKIAAFYKVNRHLIIETNMEAIGGSALTDDSIAVPEGDVSRTSVPVTYVPARNLIFLSYALGYAETIGARSVYIGVNSVDYSGYPDCRPEFIRHFQAVADYSTEAASEGKRIEIVTPLQNLSKADIVRLATRLAVPLELTHSCYSGGEKACGVCDSCKLRLQGFAAAGIKDPIEYEKR

SEQ ID NO: 42149 - protein, 279 aa, Senegalimassilia anaerobia
  misc_feature (1)..(279): tr|A0A369LBW9|A0A369LBW9_9ACTN 7-cyano-7-deazaguanine s ynthase OS=Senegalimassilia anaerobia OX=1473216 GN=que C PE=3 SV=1
MGIFEGQAFSSFAAAAANARENLRVRGTLGEDPAPRDENGKVCGENPQKALVLSSGGVDSSTLLALAVKRFGAENVFALSISYGQRHEKEIESAKAVAAHYGVEQRFLDLSAIFADSDCSLLEHSSQDVPEESYAEQIDEADGSPVSTYVPFRNGLFLSSAASMALSLGASVLFYGAHHDDWAGDAYPDCSIEFVNAMNLAITQGTAGQLHMEAPFVSWSKADIVKCGLELDVPYELTWSCYEGGERPCGKCGTCIDRNRAFEANGMRDPLLDKLDAQG

SEQ ID NO: 42150 - protein, 310 aa, Senegalimassilia sp.
  misc_feature (1)..(310): tr|A0A4Q2JZT3|A0A4Q2JZT3_9ACTN 7-cyano-7-deazaguanine s ynthase OS=Senegalimassilia sp. KGMB04484 OX=2509433 GN =queC PE=3 SV=1
MKESNKVFPSLAQAAAAVREGAFGTAAVGEESHNATAASGTAANESPRSFGSFAAAAAAHKAAGPQLGASQEGQKALVLCSGGVDSTTLLAMAVERYGAENVFALSISYGQRHEKEIESAKAVATYYGVEQRFLDLSAIFADSNCSLLAHSTDQVPEESYAEQLDESNGAPVSTYVPFRNGLFLSSAASMALSLGASVLYYGAHHDDWAGNAYPDCSLEFVYAMNLAIMEGTGGELRMEAPFVEWSKADIVKRGLELGVPYELTWSCYEGGNYPCGACGTCIDRNRAFELNGVRDPLLDALDAQRAQAGE

SEQ ID NO: 42151 - protein, 218 aa, Serpentinicella alkaliphila
  misc_feature (1)..(218): tr|A0A4R2TLP6|A0A4R2TLP6_9CLOT 7-cyano-7-deazaguanine s ynthase OS=Serpentinicella alkaliphila OX=1734049 GN=qu eC PE=3 SV=1
MNKDKAIVVFSGGQDSTTCLFWAKKRYKEVIAVSFDYNQKHKLELACAKDICKKHNIEHHILDLNLLNQLAPNSLTRQDISVDKNAPTEGLPNSFVDGRNLLFLTFVGIFAKQRDINAIVTGVSQSDFSGYPDCRDVFIKSLNVTLNLAMAYEFEILTPLMWINKEETWKLADDLGVLDIVKEETLTCYNGIKGNGCGECPACKLRKNGYVDFKNKYK

SEQ ID NO: 42152 - protein, 237 aa, Serpentinomonas mccroryi
  misc_feature (1)..(237): tr|A0A060NXW2|A0A060NXW2_9BURK 7-cyano-7-deazaguanine s ynthase OS=Serpentinomonas mccroryi OX=1458426 GN=queC PE=3 SV=1
MKAALPKAVVLLSGGLDSATVLALARERGFATCALSFDYGQRHAHELDLARAQARAQGAHQHVTLPVDLRAFGGSALTEAALEVPKHRSLAALAQGIPSTYVPARNTVFLSLALAWAETLGSTDIFIGVNALDYSGYPDCRPAFIQAFEAMANLATRAGVEGTQRLRIHAPLQHLGKADIVREALRLGVDVAQTCSCYDPGPQGQPCGACDACLLRAKGFAEAGCPDPLLQRFGAST

SEQ ID NO: 42153 - protein, 241 aa, Serpentinomonas raichei
  misc_feature (1)..(241): tr|A0A060NKT8|A0A060NKT8_9BURK 7-cyano-7-deazaguanine s ynthase OS=Serpentinomonas raichei OX=1458425 GN=queC P E=3 SV=1
MTLMSAAQPTAVVLLSGGLDSATVLALARERGFAACALSFDYGQRHAHELAAARAQAQAQGTRRHITLPVDLRAFGGSALTDQALVVPKQRTLDELAQQGIPLTYVPARNTVFLSLALAWAETLGSCDIFIGVNALDYSGYPDCRPAFIQAFEAMANLATRAGVEGAQRLRIHAPLQHLSKAEIVREALRLGVDLAHTCSCYDPGPLGQPCGACDACLLRAKGFAEVGCPDPLRQRFGLHQ

SEQ ID NO: 42154 - protein, 232 aa, Serratia ficaria
  misc_feature (1)..(232): tr|A0A240BGW3|A0A240BGW3_SERFI 7-cyano-7-deazaguanine s ynthase OS=Serratia ficaria OX=61651 GN=queC PE=3 SV=1
MKRAVVVFSGGQDSTTCLIQALQQYDEVHCVTFDYGQRHRAEIEVAQALSAALGAKAHKVLDVTLLNELAVSSLTRDNIPVPAYDPNQKNALPSTFVPGRNILFLTLAAIYAYQVEAEAVITGVCETDFSGYPDCRDEFVKALNQAVVLGIARDIRFETPLMWLNKAETWALADYYHQLERVRQDTLTCYNGIKGDGCGECAACNLRANGLQQYQGNRAEVMASLKRKAALA

SEQ ID NO: 42155 - protein, 232 aa, Serratia fonticola
  misc_feature (1)..(232): tr|A0A0F7HBI3|A0A0F7HBI3_SERFO 7-cyano-7-deazaguanine s ynthase OS=Serratia fonticola OX=47917 GN=queC PE=3 SV= 1
MKRAVVVFSGGQDSTTCLIQALQQYDEVHCITFDYGQRHRAEIEVAQALCQTLGAKAHKVLDVGLLNELAISSLTRDNIPVPAYDSSQTDALPSTFVPGRNILFLTLAAIYAYQVEAEAVITGVCETDFSGYPDCRDEFVKALNQAIVLGIARDIRFETPLMWLNKAETWALADYYQQLERIRHETLTCYNGVQGDGCGECAACHLRANGLQQYQQDKVGVMASLKRKTGLV

SEQ ID NO: 42156 - protein, 245 aa, Serratia fonticola
  misc_feature (1)..(245): tr|A0A4U9U4N4|A0A4U9U4N4_SERFO 7-cyano-7-deazaguanine s ynthase OS=Serratia fonticola OX=47917 GN=queC PE=3 SV= 1
MCIGNGPSQKVDFMKRAVVVFSGGQDSTTCLIQALQQYDEVHCITFDYGQRHRAEIEVAQALCQTLGAKAHKVLDVGLLNELAISSLTRDNIPVPAYDSSQTDALPSTFVPGRNILFLTLAAIYAYQVEAEAVITGVCETDFSGYPDCRDEFVKALNQAIVLGIARDIRFETPLMWLNKAETWALADYYQQLERIRHETLTCYNGVQGDGCGECAACHLRANGLQQYQQDKVGVMASLKRKTGLV

SEQ ID NO: 42157 - protein, 233 aa, Serratia liquefaciens
  misc_feature (1)..(233): tr|A0A515D5E1|A0A515D5E1_SERLI 7-cyano-7-deazaguanine s ynthase OS=Serratia liquefaciens OX=614 GN=queC PE=3 SV =1
MSGKTAVVVFSGGQDSTTCLVKALAEYDSVHCLTFDYGQRHSEEIKIAEQLAKKLNVSSHKILDVNVINELAISSLTRNEIEVPEHKNSDSDGIPSTFVPGRNIVFLTLAAIYAFQVNAEDVITGVCETDFSGYPDCRDVFVKALNHAVSLGIGRDIRFVTPLMSLNKAETWALADNMGCLELIRDETLTCYNGVKSFGCGKCDACFLRSRGFNEYVQNKEEIKKSLQKKQAI

SEQ ID NO: 42158 - protein, 233 aa, Serratia liquefaciens; identical to SEQ ID NO: 38947
  misc_feature (1)..(233): tr|A0A484YY59|A0A484YY59_SERLI 7-cyano-7-deazaguanine s ynthase OS=Serratia liquefaciens OX=614 GN=queC PE=3 SV =1

SEQ ID NO: 42159 - protein, 232 aa, Serratia marcescens
  misc_feature (1)..(232): tr|A0A5C7CG50|A0A5C7CG50_SERMA 7-cyano-7-deazaguanine s ynthase OS=Serratia marcescens subsp. sakuensis OX=2117 60 GN=queC PE=3 SV=1
MKRAVVVFSGGQDSTTCLIQALQQYDEVHCVTFDYGQRHRAEIEVAQELSVALGAKAHKVLDVTLLNELAVSSLTRDNIPVPAYDPNQKNALPSTFVPGRNILFLTLAAIYAYQVEAEAVITGVCETDFSGYPDCRDEFVKALNKAVTLGIARDIRFETPLMWLSKAETWALADYYHQLDRVRQDTLTCYNGIKGDGCGECAACNLRANGLTQYRANQAEVMAALKQKAGLA

SEQ ID NO: 42160 - protein, 232 aa, Serratia marcescens
  misc_feature (1)..(232): tr|A0A421HVB2|A0A421HVB2_SERMA 7-cyano-7-deazaguanine s ynthase OS=Serratia marcescens OX=615 GN=queC PE=3 SV=1
MKRAVVVFSGGQDSTTCLIQALQQYDEVHCVTFDYGQRHRAEIEVAQELSMALGAKAHKVLDVTLLNELAVSSLTRDNIPVPAYDPNQKNALPSTFVPGRNILFLTLAAIYAYQVEAEAVITGVCETDFSGYPDCRDEFVKALNKAVTLGIARDIRFETPLMWLNKAETWALADYYHQLDRVRQDTLTCYNGIKGDGCGECAACNLRANGLTQYRANQVEVMVALKQKAGLA

SEQ ID NO: 42161 - protein, 232 aa, Serratia nematodiphila
  misc_feature (1)..(232): tr|A0A5C7CXA9|A0A5C7CXA9_9GAMM 7-cyano-7-deazaguanine s ynthase OS=Serratia nematodiphila OX=458197 GN=queC PE= 3 SV=1
MKRAVVVFSGGQDSTTCLIQALQQYDEVHCVTFDYGQRHRAEIEVAQELSVALGAKAHKVLDVTLLNELAVSSLTRDNIPVPAYDPNQKNALPSTFVPGRNILFLTLAAIYAYQVEAEAVITGVCETDFSGYPDCRDEFVKALNKAVTLGIARDIRFETPLMWLNKAETWALADYYHQLDRVRQDTLTCYNGIKGDGCGECAACNLRANGLTQYRANQAEVMAALKQKAGLA

SEQ ID NO: 42162 - protein, 232 aa, Serratia odorifera
  misc_feature (1)..(232): tr|D4DW94|D4DW94_SEROD 7-cyano-7-deazaguanine synthase OS=Serratia odorifera DSM 4582 OX=667129 GN=exsB PE=3 S V=1
MRRAVVVFSGGQDSTTCLIQALQQYDEVHCITFDYGQRHRAEIDVAQELSHSLGAKAHKILDVGLLNELAISSLTRDNIPVPAFGSETEGGLPSTFVPGRNILFLTLAAIYAYQVEAEAVITGVCETDFSGYPDCRDEFVKALNQAIVLGIARDIRFETPLMWLNKAETWALADYYHQLDRIRQDTLTCYNGIKGDGCGECAACHLRANGLTQYQSRQADIMASLKQKTGLI

SEQ ID NO: 42163 - protein, 232 aa, Serratia odorifera; identical to SEQ ID NO: 42162
  misc_feature (1)..(232): tr|A0A447KKR9|A0A447KKR9_SEROD 7-cyano-7-deazaguanine s ynthase OS=Serratia odorifera OX=618 GN=queC_2 PE=3 SV= 1

SEQ ID NO: 42164 - protein, 232 aa, Serratia oryzae
  misc_feature (1)..(232): tr|A0A1S8CM44|A0A1S8CM44_9GAMM 7-cyano-7-deazaguanine s ynthase OS=Serratia oryzae OX=2034155 GN=queC PE=3 SV=1
MKRAVVVFSGGQDSTTCLIQALQQYDEVHCITFDYGQRHRAEIDIAQNLAQRLGAKAHKVLDSRLLNELAISSLTRDNIPVPAFDSTQDDALPSTFVPGRNILFLTLAAIYAYQVEAEALITGVCETDFSGYPDCRDEFVKALNNAVVLGIARDIRFETPLMWLNKAETWALADYYQQLELVRQETLSCYNGVQGDGCGACAACHLRAKGLHQYLQDKSSVMTSLKQKTGLI

SEQ ID NO: 42165 - protein, 232 aa, Serratia plymuthica
  misc_feature (1)..(232): tr|A0A318NW64|A0A318NW64_SERPL 7-cyano-7-deazaguanine s ynthase OS=Serratia plymuthica OX=82996 GN=queC PE=3 SV =1
MKRAVVVFSGGQDSTTCLVQALEQYDEVHCITFDYGQRHRAEIEVARELAVALGVKGHKVLDVTMLNELAISSLTRDNIPVPAFNGTQPGGLPSTFVPGRNILFLTLASIYAYQVEAQAVITGVCETDFSGYPDCRDEFVKALHHGVALGLARDIRFETPLMWLDKAEIWALADYYRQLERVRSDTLTCYNGVKGEGCGECTACHLRAEGLAAYQNDKVGVAARMKRKTQLA

SEQ ID NO: 42166 - protein, 232 aa, Serratia plymuthica
  misc_feature (1)..(232): tr|A0A318NVK3|A0A318NVK3_SERPL 7-cyano-7-deazaguanine s ynthase OS=Serratia plymuthica OX=82996 GN=queC PE=3 SV =1
MKRAVVVFSGGQDSTTCLIQALQQYDEVHCITFDYGQRHRAEIEVAQALSVALGAKAHKVLDVGLLNELAISSLTRDSIPVPAYNNEQEGGLPSTFVPGRNILFLTLAAIYAYQVEAEAVITGVCETDFSGYPDCRDEFVKALNHAVVLGIARDIRFETPLMWLNKAETWALADYYQQLDRVRQDTLTCYNGIQGDGCGECAACHLRANGLKQYQINKAEVMASLKQKTGLA

SEQ ID NO: 42167 - protein, 232 aa, Serratia proteamaculans
  misc_feature (1)..(232): tr|A0A379ZYN5|A0A379ZYN5_9GAMM 7-cyano-7-deazaguanine s ynthase OS=Serratia proteamaculans OX=28151 GN=queC PE= 3 SV=1
MKRAVVVFSGGQDSTTCLIQALQQYDEVHCVTFDYGQRHRAEIEVAQALSVALGAKAHKLLDVGLLNELAISSLTRDNIPVPAYGSTEANGLPSTFVPGRNILFLTLAAIYAYQVEAEAVITGVCETDFSGYPDCRDEFVKALNQAIVLGIARDIRFETPLMWLNKAETWALADYYHQLDLVRQETLTCYSGIKGDGCGECAACHLRANGLTQYQINKAEVMASLKQKTGLV

SEQ ID NO: 42168 - protein, 232 aa, Serratia proteamaculans
  misc_feature (1)..(232): sp|A8GAR6|QUEC_SERP5 7-cyano-7-deazaguanine synthase OS =Serratia proteamaculans (strain 568) OX=399741 GN=queC PE=3 SV=1
MKRAVVVFSGGQDSTTCLIQALKQYDEVHCVTFDYGQRHRAEIEVAQELSVALGAKAHKLLDVGLLNELAISSLTRDNIPVPAYDSTQSNGLPSTFVPGRNILFLTLAAIYAYQVEAEAVITGVCETDFSGYPDCRDEFVKALNQAIVLGIARDIRFETPLMWLNKAETWALADYYHQLELVQQDTLTCYNGIKGNGCGECAACHLRANGLQQYQINKAEVMASLKQKTGLV

SEQ ID NO: 42169 - protein, 232 aa, Serratia quinivorans
  misc_feature (1)..(232): tr|A0A4Q8D3B7|A0A4Q8D3B7_9GAMM 7-cyano-7-deazaguanine s ynthase OS=Serratia quinivorans OX=137545 GN=queC PE=3 SV=1
MKRAVVVFSGGQDSTTCLIQALQQYDEVHCVTFDYGQRHRAEIEVAQELSVALGAKAHKLLDVGLLNELAISSLTRDNIPVPAYNPDEKNALPSTFVPGRNILFLTLAAIYAYQVEAEAVITGVCETDFSGYPDCRDEFVKALNHAIVLGIARDIRFETPLMWLNKAETWALADYYHQLALVQQETLTCYNGIKGNGCGECAACHLRANGLQQYQINKAEVMASLKQKTGLV

SEQ ID NO: 42170 - protein, 157 aa, Serratia quinivorans
  misc_feature (1)..(157): tr|A0A379YWX8|A0A379YWX8_9GAMM 7-cyano-7-deazaguanine s ynthase OS=Serratia quinivorans OX=137545 GN=queC_1 PE= 3 SV=1
MKRAVVVFSGGQDSTTCLIQALKQYDEVHCVTFDYGQRHRAEIEVAQELSVALGAKAHKLLDVGLLNELAISSLTRDNIPVPAYDSTQSNGLPSTFVPGRNILFLTLAAIYAYQVEAEAVITGVCGNRLLRLPRLSRRVCQSAEPGDSTGHRPRYPL

SEQ ID NO: 42171 - protein, 231 aa, Serratia rubidaea
  misc_feature (1)..(231): tr|A0A2X5BTJ4|A0A2X5BTJ4_SERRU 7-cyano-7-deazaguanine s ynthase OS=Serratia rubidaea OX=61652 GN=queC PE=3 SV=1
MKRAVVVFSGGQDSTTCLIQALQQYDEVHCVTFDYGQRHRAEIDIARELSQSLGAKAHKVLDVGLLNELAISSLTRDDIPVPTFSAEQDGLPSTFVPGRNILFLTLAAIYAYQVEAEAVITGVCETDFSGYPDCRDEFVKALNQAVVLGIARDIRFETPLMWLNKAETWALADYYQQLDLVRQHTLTCYNGIKGDGCGECAACHLRGNGLQQYQDNRTAVMAELKRKTGLV

SEQ ID NO: 42172 - protein, 231 aa, Serratia rubidaea
  misc_feature (1)..(231): tr|A0A140F0E1|A0A140F0E1_SERRU 7-cyano-7-deazaguanine s ynthase OS=Serratia rubidaea OX=61652 GN=queC PE=3 SV=1
MKRAVVVFSGGQDSTTCLIQALQQYDEVHCVTFDYGQRHRAEIDIARELSQSLGAKAHKVLDVGLLNELAISSLTRDDIPVPAFSAEQDGLPSTFVPGRNILFLTLAAIYAYQVEAEAVITGVCETDFSGYPDCRDEFVKALNQAVVLGIARDIRFETPLMWLNKAETWALADYYQQLDLVRQQTLTCYNGIKGDGCGECAACHLRANGLQQYQGNRPAVMAELKRKTGLA

SEQ ID NO: 42173 - protein, 232 aa, Serratia sp.
  misc_feature (1)..(232): tr|A0A1B3FK33|A0A1B3FK33_9GAMM 7-cyano-7-deazaguanine s ynthase OS=Serratia sp. YD25 OX=1759437 GN=queC PE=3 SV =1
MKRAVVVFSGGQDSTTCLIQALQQYDEVHCVTFDYGQRHRAEIEVAQELSVALGAKAHKVLDVTLLNELAVSSLTRDNIPVPAYDPNQKNALPSTFVPGRNILFLTLAAIYAYQVEAEAVITGVCETDFSGYPDCRDEFVKALNQAVVLGIARDIRFETPLMWLNKAETWALADYYHQLDRVRQDTLTCYNGIKGDGCGECAACNLRANGLTQYRANQAEVMAALKQKAGLA

SEQ ID NO: 42174 - protein, 231 aa, Serratia sp.; identical to SEQ ID NO: 42171
  misc_feature (1)..(231): tr|A0A2R3GXX4|A0A2R3GXX4_9GAMM 7-cyano-7-deazaguanine s ynthase OS=Serratia sp. MYb239 OX=2033438 GN=queC PE=3 SV=1

SEQ ID NO: 42175 - protein, 149 aa, Serratia symbiotica
  misc_feature (1)..(149): tr|A0A068Z524|A0A068Z524_9GAMM 7-cyano-7-deazaguanine s ynthase OS=Serratia symbiotica OX=138074 GN=SYMBAF_9010 9 PE=3 SV=1
MKRAVVIFSGGQDSTTCLIQALQQYDEVHCVTFDYGQRHHAEIAVAQELSLTLGAKAHKVLDVGLLNELAISSLTRDNIPVPAYVCHECTLWQIRVQCCARDEGRPLGGGVQMQPSNYPELLPLRAVVVSVREKAQSDASCMCCEDERE

SEQ ID NO: 42176 - protein, 230 aa, Serratia symbiotica
  misc_feature (1)..(230): tr|A0A068Z1X0|A0A068Z1X0_9GAMM 7-cyano-7-deazaguanine s ynthase OS=Serratia symbiotica OX=138074 GN=queC PE=3 S V=1
MEKKKAVVVYSGGQDSTTCLIHARHFYDDIHCITFDYGQRHRAEIDVARELALKLGATAHKVLDVGLLNELAISSLTRDNIPIPTQTEEGIPNTFVPGRNILFLTLAAIYAYQVQADVVITGVCETDFSGYPDCRDEFVKALNHAIVLGMAKDVRFETPLMWLNKAETWALADHWQQLSLIRDETLTCYNGIKGAGCGECAACHLRRKGLETYLSNRKNVMQALQRKINI

SEQ ID NO: 42177 - protein, 232 aa, Serratia ureilytica
  misc_feature (1)..(232): tr|A0A5C7BRP6|A0A5C7BRP6_9GAMM 7-cyano-7-deazaguanine s ynthase OS=Serratia ureilytica OX=300181 GN=queC PE=3 S V=1
MKRAVVVFSGGQDSTTCLIQALQQYDEVHCVTFDYGQRHRAEIEVAQELSEALGAKAHKVLDVTLLNELAISSLTRDNIPVPAYDPNQKNALPSTFVPGRNILFLTLAAIYAYQVEAEAVITGVCETDFSGYPDCRDEFVKALNQAVVLGIARDIRFETPLMWLNKAETWALADYYQQLDRVRQDTLTCYNGIKGDGCGECAACNLRANGLTQYRANQAEVMAALKQKAGLA

SEQ ID NO: 42178 - protein, 250 aa, Shewanella algae
  misc_feature (1)..(250): tr|A0A1S2TVT3|A0A1S2TVT3_9GAMM 7-cyano-7-deazaguanine s ynthase OS=Shewanella algae OX=38313 GN=queC PE=3 SV=1
MSSESNAPQTQTAEPPRSTKPTISKAIVVFSGGQDSTTCLIQALAQYDEVHAITFDYGQRHSQEIEVAKQLAQKLGAASHKVLDVTLLNELAISALTRDNIPVSNDLMDNGLPNTFVPGRNILFLTLAGIYAYQIGADAVITGVCETDFSGYPDCRNDFIKAMESALVQGMDRQLRLVTPLMWLNKAETWALADKYQQLPLVRDETLTCYNGILGKGCGTCPACLLRQKGLDEYLATPDSIQAILAAKTA

SEQ ID NO: 42179 - protein, 250 aa, Shewanella algae
  misc_feature (1)..(250): tr|A0A3G4UNK8|A0A3G4UNK8_9GAMM 7-cyano-7-deazaguanine s ynthase OS=Shewanella algae OX=38313 GN=queC PE=3 SV=1
MSSESNAPQTQTAEPPRSTKPAISKAIVVFSGGQDSTTCLIQALAQYDEVHAITFDYGQRHSQEIEVAKQLAQKLGAASHKVLDVTLLNELAISALTRDNIPVSNDLMDNGLPNTFVPGRNILFLTLAGIYAYQIGADAVITGVCETDFSGYPDCRNDFIKAMESALVQGMDRQLRLVTPLMWLNKAETWALADKYQQLPLVRDETLTCYNGILGKGCGTCPACLLRQKGLDEYLATPDSIQAILAAKTA

SEQ ID NO: 42180 - protein, 230 aa, Shewanella amazonensis
  misc_feature (1)..(230): sp|A1S6M5|QUEC_SHEAM 7-cyano-7-deazaguanine synthase OS =Shewanella amazonensis (strain ATCC BAA-1098 / SB2B) O X=326297 GN=queC PE=3 SV=1
MSKAVVVFSGGQDSTTCLVQALSQFDEVHAITFDYGQRHSEEIEVAKALTSELGCASHKIMDVSLLGELAISALTRDAIPVSHELMDNGLPNTFVPGRNILFLTLAGIYAYQLGADTVITGVCETDFSGYPDCRNDFIKAMEQALNLGMDKQLNIHTPLMWLNKAETWALADRYGKLELVRNHTLTCYNGIRGDGCGDCPACHLRKRGLEDYLSNRDAVNAELTKKTGAN

SEQ ID NO: 42181 - protein, 232 aa, Shewanella atlantica
  misc_feature (1)..(232): tr|A0A431WDR5|A0A431WDR5_9GAMM 7-cyano-7-deazaguanine s ynthase OS=Shewanella atlantica OX=271099 GN=queC PE=3 SV=1
MSKVSKAVVVFSGGQDSTTCLIQALNQYDEVHGITFDYGQRHSQEIEVARTLGKRLGLVSHKVLDVSMLNELAISALTRDSIEVSNELMENGLPNTFVPGRNILFLTLAGIYAYQLGANSVITGVCETDFSGYPDCRNDFIKAMESALNQGMDRQCKIVTPLMWLNKAETWALADQYKSLELVRDETLTCYNGIIGNGCGTCPACLLRQKGLEDYCNNKELVQSDLAAKCLK

SEQ ID NO: 42182 - protein, 240 aa, Shewanella baltica
  misc_feature (1)..(240): tr|A0A161UVD9|A0A161UVD9_9GAMM 7-cyano-7-deazaguanine s ynthase OS=Shewanella baltica OX=62322 GN=queC PE=3 SV= 1
MSTSLVSKPLASKAVVVFSGGQDSTTCLIQALTQYDEVHGITFDYGQRHREEIEVAKSLAKRLKITSHKVMDVTLLNELAISALTRDAIPVSHELMENGLPNTFVPGRNILFLTLAGIYAYQLGAEAIITGVCETDFSGYPDCRNDFVKAMESALVQGMDKQLKIITPLMWLNKAQTWALADKYQQLDLVRHHTLTCYNGIIGDGCGDCPACHLRKRGLDDYMQDKTAVMASLDASEPNA

SEQ ID NO: 42183 - protein, 240 aa, Shewanella baltica
  misc_feature (1)..(240): sp|A6WN68|QUEC_SHEB8 7-cyano-7-deazaguanine synthase OS =Shewanella baltica (strain OS185) OX=402882 GN=queC PE =3 SV=1
MSTSLVSKPSASKAVVVFSGGQDSTTCLIQALTQYDEVHGITFDYGQRHREEIEVAKSLAKRLKITSHKVMDVTLLNELAISALTRDAIPVSHELMENGLPNTFVPGRNILFLTLAGIYAYQLGAEAIITGVCETDFSGYPDCRNDFVKAMESALVQGMDKQLKIITPLMWLNKAQTWALADKYQQLDLVRHHTLTCYNGVIGDGCGDCPACHLRKRGLDDYLQDKTTVMASLDASEPNA

SEQ ID NO: 42184 - protein, 231 aa, Shewanella benthica
  misc_feature (1)..(231): tr|A9DGY8|A9DGY8_9GAMM 7-cyano-7-deazaguanine synthase OS=Shewanella benthica KT99 OX=314608 GN=queC PE=3 SV=1
MSKAVIVFSGGQDSTTCLIQALEQYDEVHGITFDYGQRHSQEIEVAKELGKRLDLASHKVLDVTMLNELAISALTRDDIAVSNTLMDNGLPNTFVPGRNILFLTLAGIFAYQLGAEAVITGVCETDYSGYPDCRDDFVKAMASALVQGMDRQLELVTPLMWLNKAETWALADKYNSLDLVRDETLTCYNDIIGSGCGTCPACLLRQTGLDDYLNNKAQVQLDLAAKIAPKP

SEQ ID NO: 42185 - protein, 229 aa, Shewanella benthica
  misc_feature (1)..(229): tr|A0A330M1Y8|A0A330M1Y8_9GAMM 7-cyano-7-deazaguanine s ynthase OS=Shewanella benthica OX=43661 GN=queC PE=3 SV =1
MSKAVIVFSGGQDSTTCLIQALEQYDEVHGITFDYGQRHSQEIEVAKELGKRLGLASHKVLDVTMLNELAISALTRDDIAVSNTLMDNGLPNTFVPGRNILFLTLAGIFAYQLGAEAVITGVCETDYSGYPDCRDDFVKAMASALVQGMDRQLELVTPLMWLNKAETWALADKYNSLDLVRDETLTCYNDIIGSGCGSCPACLLRQTGLDDYLNNKAQVQLDLAAKIAP

SEQ ID NO: 42186 - protein, 239 aa, Shewanella bicestrii
  misc_feature (1)..(239): tr|A0A220ULQ4|A0A220ULQ4_9GAMM 7-cyano-7-deazaguanine s ynthase OS=Shewanella bicestrii OX=2018305 GN=queC PE=3 SV=1
MSAASVSKVVVVFSGGQDSTTCLIQALTQFDEVHGITFDYGQRHREEIEVAKFLAKRLKITSHKVMDVSLLNELAISALTRDAIPVSHELMENGLPNTFVPGRNILFLTLAGIYAYQLGAEAIITGVCETDFSGYPDCRHDFVRAMESALVQGMDKKLEIITPLMWLNKAQTWALADKYQQLDLVRHHTLTCYNGIVGDGCGDCPACHLRKRGLEDYLQNKAEVMASLDKATETGKPQA

SEQ ID NO: 42187 - protein, 232 aa, Shewanella canadensis
  misc_feature (1)..(232): tr|A0A431WQ36|A0A431WQ36_9GAMM 7-cyano-7-deazaguanine s ynthase OS=Shewanella canadensis OX=271096 GN=queC PE=3 SV=1
MSKVSKAVVVFSGGQDSTTCLIQALNQYDEVHGITFDYGQRHSEEIEVARSLGKRLGLVSHKILDVSMLNELAISALTRDSIEVSNELMENGLPNTFVPGRNILFLTLAGIYAYQLGANSVITGVCETDFSGYPDCRNDFVKAMESALNQGMDRQCEIVTPLMWLNKAETWALADQYKSLELVRDETLTCYNGIIGNGCGTCPACLLRQRGLEDYCNNREQVQSDLASKCQK

SEQ ID NO: 42188 - protein, 248 aa, Shewanella chilikensis
  misc_feature (1)..(248): tr|A0A2V4W5E3|A0A2V4W5E3_9GAMM 7-cyano-7-deazaguanine s ynthase OS=Shewanella chilikensis OX=558541 GN=queC PE= 3 SV=1
MSSESNPSQTTEPIQSTKPTISKAIVVFSGGQDSTTCLIQALAQYDEVHAITFDYGQRHSQEIEVAKQLAQKLGAASHKVLDVTLLNELAISALTRDNIPVSNDLMDNGLPNTFVPGRNILFLTLAGIYAYQIGADAVITGVCETDFSGYPDCRNDFIKAMESALVQGMDRQLRLVTPLMWLNKAETWALADKYQQLPLVRDETLTCYNGILGKGCGTCPACLLRQKGLDEYLASPDSIQAILAAKTA

SEQ ID NO: 42189 - protein, 227 aa, Shewanella colwelliana
  misc_feature (1)..(227): tr|A0A1E5IYX1|A0A1E5IYX1_SHECO 7-cyano-7-deazaguanine s ynthase OS=Shewanella colwelliana OX=23 GN=queC PE=3 SV =1
MSKAVVVFSGGQDSTTCLIQALHQYDEVHAITFDYGQRHREEIITAQTLGQQLGVASHKVLDVNVLNELAISALTRDDIAVSNELMENGLPNTFVPGRNILFLTLAGIYAYQLGAEAVITGVCETDFSGYPDCRDQFIKAMQTALEQGMDRPLNLVTPLMWLNKAQTWALADKYDSLTLVRDHTLTCYNGIIGSGCGTCPACLLRSKGLQDYLDNKSAVLAQLDATC

SEQ ID NO: 42190 - protein, 239 aa, Shewanella decolorationis
  misc_feature (1)..(239): tr|A0A5B8QWC4|A0A5B8QWC4_9GAMM 7-cyano-7-deazaguanine s ynthase OS=Shewanella decolorationis OX=256839 GN=queC PE=3 SV=1
MSTASVSKVVVVFSGGQDSTTCLIQALTQFDEVHGITFDYGQRHREEIEVAKSLAKRLKITSHKVMDVSLLNELAISALTRDAIPVSHELMENGLPNTFVPGRNILFLTLAGIYAYQLGAEAIITGVCETDFSGYPDCRHDFVRAMESALVQGMDKKLEIITPLMWLNKAQTWALADKYQQLDLVRHHTLTCYNGIVGDGCGDCPACHLRKRGLEDYLQNKAEVMASLDKATETGKPQA

SEQ ID NO: 42191 - protein, 239 aa, Shewanella decolorationis
  misc_feature (1)..(239): tr|V1DBV2|V1DBV2_9GAMM 7-cyano-7-deazaguanine synthase OS=Shewanella decolorationis S12 OX=1353536 GN=queC PE= 3 SV=1
MSAASVSKVVVVFSGGQDSTTCLIQALTQFDEVHGITFDYGQRHREEIEVAKSLAKRLKITSHKVMDVSLLNELAISALTRDAIPVSHELMENGLPNTFVPGRNILFLTLAGIYAYQLGAEAIITGVCETDFSGYPDCRHDFVRAMESALVQGMDKKLEIITPLMWLNKAQTWALADKYQQLDLVRHHTLTCYNGIVGDGCGDCPACHLRKRGLEDYLQNKAEVMASLDKATETGKPQA

SEQ ID NO: 42192 - protein, 232 aa, Shewanella denitrificans
  misc_feature (1)..(232): sp|Q12MM8|QUEC_SHEDO 7-cyano-7-deazaguanine synthase OS =Shewanella denitrificans (strain OS217 / ATCC BAA-1090 / DSM 15013) OX=318161 GN=queC PE=3 SV=1
MSKAVVVFSGGQDSTTCLIQALTQFDEVHAITFDYGQRHNEEIEVAKALASQLRIASHKVMDVSLLNELAISALTRDDIPVSHELMENGLPNTFVPGRNILFLTLAGIYAYQLGANSVITGVCETDFSGYPDCRDQFVRAMETALCLGMDKQINLLTPLMWLNKAETWALADKYHSLTLVKELTLTCYNGIIGQGCGDCPACHLRQKGLDDYLNHKPSVMASLEQKTHGKSA

SEQ ID NO: 42193 - protein, 705 aa, Shewanella fodinae
  misc_feature (1)..(705): tr|A0A4R2FE28|A0A4R2FE28_9GAMM 7-cyano-7-deazaguanine s ynthase in queuosine biosynthesis OS=Shewanella fodinae OX=552357 GN=EDC91_11320 PE=4 SV=1
MQDKRYIICGNAPTSGIEENPERDLRLRLWGKDGPDKITLRIEDIHKKMSKDVPDSFQDLLEIATYVYCADQAIPRGADDVDSFGHGWRRNLHFIIPVRNPDFWNGEEIQQALCSTLGFLSDDSYHFEFTKLKDAQAFQGYLDFNDDGRLHGYPEQVVMFSGGLDSLAGAIDEVLNEKHRVVLVTHKPTPKLNKRHRRLEKMIADKAGENTPLHIGVRVNKNKKLNKEYTQRSRSFLYVSIGATIAKMLNLNSVRFYENGVISLNLPVCAQVVGGRATRTTHPRVFRGFQEIISLVAGEPFTIENPYIWKTKAEVVEVITKAGCQDMIAASTTCTHTWEMTNDHTHCGTCSQCIDRRFAVIAAKADQYDPVEAYKADIFTQSRSKDEDKIMAAAYLERANQVRDLDGITQFIAQFSEVSRVFRYLDGNPGSAAQKVYDLYKRHATEVCDAMKTMIARNITAILQRTLPGDCLLRTMYESGSVISVPAIELTIEQPANYFRRRGDVWEVRFNKGQPIKLVTANKGSQYLSYLLSHPNQPIPVAELVCGSFYDPSSGIFSAAEIDGDDIEDGYQITQGIPLTDAGVIIDAKAREQYRERISELLQDIDEARDTGNKEKEEELRDEMTVIACALNGSKARGGKPRTLGDKRKNVKDSFRIAVKRAIEKISEYDSPLGQHLDSSIKFGNEPVYRTEEEIVWEVRPIVNE

SEQ ID NO: 42194 - protein, 240 aa, Shewanella fodinae
  misc_feature (1)..(240): tr|A0A4R2F3L2|A0A4R2F3L2_9GAMM 7-cyano-7-deazaguanine s ynthase OS=Shewanella fodinae OX=552357 GN=queC PE=3 SV =1
MNTTQPQSPSLSKAVMVFSGGQDSTTCLIQALTQYDEVHAITFNYGQRHIHEIDIARMLASKLGATSHKVMDVSLLNELAISALTRDSIPVSTELMDNGLPNTFVPGRNILFLTLAGIYAYQLGAEAVITGVCETDYSGYPDCRNDFVKALESALVQGMDRPLRLVTPLMWLNKAETWALADKYGKLELVRDQTLTCYNGIEGRGCGECPACKLRQHGLDEYLANKEVVAQQLAAKSPTA

SEQ ID NO: 42195 - protein, 235 aa, Shewanella frigidimarina
  misc_feature (1)..(235): sp|Q082U2|QUEC_SHEFN 7-cyano-7-deazaguanine synthase OS =Shewanella frigidimarina (strain NCIMB 400) OX=318167 GN=queC PE=3 SV=1
MSDAKQNTPTKALVVFSGGQDSTTCLIQALSQYDEVHGITFDYGQRHRQEIEVAKSLATELKLASHKVMDTTLLNELAISALTRDAIPVSHELMNNGLPNTFVPGRNILFLTLAGIYAYQLGCDAIITGVCETDFSGYPDCRNEFVQSMQNSLALGMDKPLKIITPLMWLNKAETWALADKYQQLALVQHQTLTCYNGIVGKGCGDCPACVLRQRGLDDYLQNSQSVMDSLNSKL

SEQ ID NO: 42196 - protein, 235 aa, Shewanella frigidimarina
  misc_feature (1)..(235): tr|A0A106BZ25|A0A106BZ25_SHEFR 7-cyano-7-deazaguanine s ynthase OS=Shewanella frigidimarina OX=56812 GN=queC PE =3 SV=1
MSDSKQNTPTKALVVFSGGQDSTTCLIQALSQYDEVHGITFDYGQRHRQEIEVAKSLATELKLASHKVMDTTLLNELAISALTRDAIPVSHELMNNGLPNTFVPGRNILFLTLAGIYAYQLGCDAIITGVCETDFSGYPDCRNEFVQSMQNSLALGMDKPLKIITPLMWLNKAETWALADKYQQLALVQHQTLTCYNGIVGKGCGDCPACVLRQRGLEDYLQNSQSVMDSLNSKL

SEQ ID NO: 42197 - protein, 229 aa, Shewanella halifaxensis
  misc_feature (1)..(229): sp|B0TSC0|QUEC_SHEHH 7-cyano-7-deazaguanine synthase OS =Shewanella halifaxensis (strain HAW-EB4) OX=458817 GN= queC PE=3 SV=1
MSKAVVVFSGGQDSTTCLIQALQQFDEVHGITFDYGQRHREEIEIAKELATNLKLASHKVMDVTLLNELAISALTRDSIPVSNELMDNGLPNTFVPGRNILFLTLAGIYAYQLGADTVITGVCETDFSGYPDCRNDFVKAMQAALEQGMDKKLTIQTPLMWLDKAETWALADKFDSLELVRNETLTCYNGIKGDGCGTCPACLLRKRGLEEYLADKEAIQARLSAKCEN

SEQ ID NO: 42198 - protein, 233 aa, Shewanella hanedai
  misc_feature (1)..(233): tr|A0A553JID7|A0A553JID7_SHEHA 7-cyano-7-deazaguanine s ynthase OS=Shewanella hanedai OX=25 GN=queC PE=3 SV=1
MSKAVSKAVIVFSGGQDSTTCLIQALTQYDEVHGITFDYGQRHSQEIEVAEKLGKQLGLTSHKTLDVSMLNELAISALTRDSIEVSNELMDNGLPNTFVPGRNILFLTLSGIFAYQLGADTVITGVCETDFSGYPDCRNDFVKAMQSALEQGMDRPLNLSTPLMWLNKAETWALADKYHSLSLVRDETLTCYNGIIGTGCGTCPACLLRQKGLDDYCSNKPQVQLDLEAKCQS

SEQ ID NO: 42199 - protein, 235 aa, Shewanella livingstonensis
  misc_feature (1)..(235): tr|A0A3G8LX25|A0A3G8LX25_9GAMM 7-cyano-7-deazaguanine s ynthase OS=Shewanella livingstonensis OX=150120 GN=queC PE=3 SV=1
MSDTKPNTTTKALVVFSGGQDSTTCLIQALSQYDEVHGITFDYGQRHRQEIEVAKSLAIELKLASHKVMDTTLLNELAISALTRDAIPVSHELMNNGLPNTFVPGRNILFLTLAGIYAYQLGCNAIITGVCETDFSGYPDCRNDFVQSMQNSLALGMDKPIKIITPLMWLNKAETWALADKYQQLALVQHQTLTCYNGIVGKGCGDCPACVLRQRGLDDYLQNSQSVMASLNSKI

SEQ ID NO: 42200 - protein, 227 aa, Shewanella loihica
  misc_feature (1)..(227): sp|A3QEN0|QUEC_SHELP 7-cyano-7-deazaguanine synthase OS =Shewanella loihica (strain ATCC BAA-1088 / PV-4) OX=32 3850 GN=queC PE=3 SV=1
MSKAVVVFSGGQDSTTCLIQALNQYDEVHAVTFDYGQRHSEEIATAAKLAKDLKVDSHKILDVTVLNELAISALTRDAIPVSNELMDNGLPNTFVPGRNILFLTLAGIYAYQLGAESVITGVCETDFSGYPDCRDSFIKAMQSALEQGMDRELKLVTPLMWLNKAQTWALADKYHSLELVRDQTLTCYNGIVGSGCGTCPACLLRAKGLNDYLDDKAGVMAELDAKC

SEQ ID NO: 42201 - protein, 240 aa, Shewanella mangrovi
  misc_feature (1)..(240): tr|A0A094J9D8|A0A094J9D8_9GAMM 7-cyano-7-deazaguanine s ynthase OS=Shewanella mangrovi OX=1515746 GN=queC PE=3 SV=1
MTLNNNAPTAKRIAIVVFSGGQDSTTCLVQALQQYDEVHAITFDYGQRHKAEIDVAKALASKLGVASHKVLDVGLLNELAISALTRDNIPVSNELMDNGLPNTFVPGRNILFLTLAGIFAYQIGAEAVITGVCETDFSGYPDCRNDFVVALNKALELGMERHLRLVTPLMWLNKAETWALADHYGQLDLVRHHTLTCYNGIQGDGCGECPACKLRHQGLQEYVAHQSQVQQSLQQKLASA

SEQ ID NO: 42202 - protein, 227 aa, Shewanella marisflavi
  misc_feature (1)..(227): tr|A0A4Y6J198|A0A4Y6J198_9GAMM 7-cyano-7-deazaguanine s ynthase OS=Shewanella marisflavi OX=260364 GN=queC PE=3 SV=1
MSKAVVVFSGGQDSTTCLIQALSQYDEVHAVTFDYGQRHSQEIETAKQLGQQLNVASHKILDVTVLNELAISALTRDAIPVSNELMDNGLPNTFVPGRNILFLTLAGIYAYQLGAESVITGVCETDFSGYPDCRDQFIKAMQSALELGMDRELKLVTPLMWLNKAQTWALADKYHQLELVRDQTLTCYNGILGSGCGTCPACLLRAKGLQDYLDDKETVMAQLDASC

SEQ ID NO: 42203 - protein, 260 aa, Shewanella morhuae
  misc_feature (1)..(260): tr|A0A1N6Z6C0|A0A1N6Z6C0_9GAMM 7-cyano-7-deazaguanine s ynthase OS=Shewanella morhuae OX=365591 GN=queC PE=3 SV =1
MASVTLTVYLCVFYGQVKFFMSINSESKKLMSKAVVVFSGGQDSTTCLIQALTQYDEVYGITFDYGQRHREEIEVAKSLAEHLKITSHKVMDVTVLNELAISALTRDAIPVSHELMDNGLPNTFVPGRNILFLTLAGIYAYQLGAEAIITGVCETDFSGYPDCRNDFVKAMESALVQGMDKQLKIITPLMWLNKAQTWAMADKYQQLDLVRHQTLTCYNGIIGDGCGDCPACHLRKRGLEDYLQNKTAVMAELNAYESKA

SEQ ID NO: 42204 - protein, 238 aa, Shewanella oneidensis
  misc_feature (1)..(238): sp|Q8EE85|QUEC_SHEON 7-cyano-7-deazaguanine synthase OS =Shewanella oneidensis (strain MR-1) OX=211586 GN=queC PE=3 SV=1
MSASVSKVVVVFSGGQDSTTCLIQALTQYDEVHGITFDYGQRHREEIDVAKSLAQRLNITSHKVMDVSLLNELAISALTRDAIPVSHELMENGLPNTFVPGRNILFLTLAGIYAYQLGAEAIITGVCETDFSGYPDCRHDFVRAMESALVQGMDKKLNIITPLMWLNKAQTWALADKYQQLDLVRHHTLTCYNGIVGDGCGDCPACHLRQRGLDDYLQNKSAVMASLTQAIETGKPQA

SEQ ID NO: 42205 - protein, 239 aa, Shewanella oneidensis
  misc_feature (1)..(239): tr|A0A2W5F3Y5|A0A2W5F3Y5_SHEOE 7-cyano-7-deazaguanine s ynthase OS=Shewanella oneidensis OX=70863 GN=queC PE=3 SV=1
MSAASVSKVVVVFSGGQDSTTCLIQALTQFDEVHGITFDYGQRHREEIDVAKSLAKRLNITSHKVMDVSLLNELAISALTRDAIPVSHELMENGLPNTFVPGRNILFLTLAGIYAYQLGAEAIITGVCETDFSGYPDCRHDFVRAMESALVQGMDKKLEIITPLMWLNKAQTWALADKYQQLDLVRHHTLTCYNGIVGDGCGDCPACHLRKRGLEDYLQNKAEVMASLDKATETGKPQA

SEQ ID NO: 42206 - protein, 227 aa, Shewanella pealeana
  misc_feature (1)..(227): sp|A8H532|QUEC_SHEPA 7-cyano-7-deazaguanine synthase OS =Shewanella pealeana (strain ATCC 700345 / ANG-SQ1) OX= 398579 GN=queC PE=3 SV=1
MSKAVVVFSGGQDSTTCLIQALQHFDEVHGITFDYGQRHREEIEIAKTLASKLKLASHKVMDVTLLNELAISALTRDSIPVSNDLMDNGLPNTFVPGRNILFLTLAGIYAYQLGADVVITGVCETDFSGYPDCRNDFVKAMQAALEQGMDKKLTIQTPLMWLDKAETWALADKYQSLDLIRDETLTCYNGIKGDGCGTCPACLLRKRGLEEYLADKEAIQARLTAKC

SEQ ID NO: 42207 - protein, 228 aa, Shewanella piezotolerans
  misc_feature (1)..(228): sp|B8CM62|QUEC_SHEPW 7-cyano-7-deazaguanine synthase OS =Shewanella piezotolerans (strain WP3 / JCM 13877) OX=2 25849 GN=queC PE=3 SV=1
MSKAIVVFSGGQDSTTCLIQALTQYDEVHCVTFDYGQRHRQEIEIAKELSSKLGASSHQVLDVGILNDLTVSALTRDIPIEENKDGNAIPNTFVPGRNILFLTLAGIYAYQINADVIITGVCETDFSGYPDCRNEFIKSMQTALMQGMDKQLTISTPLMWLDKAETWALADKYNSLELVRHQTLTCYNGLKGDGCGTCPACILRQRGLDEYLANSTMYQAQLAAKCTE

SEQ ID NO: 42208 - protein, 229 aa, Shewanella psychrophila
  misc_feature (1)..(229): tr|A0A1S6HLC2|A0A1S6HLC2_9GAMM 7-cyano-7-deazaguanine s ynthase OS=Shewanella psychrophila OX=225848 GN=queC PE =3 SV=1
MSKAVIVFSGGQDSTTCLIQALEQYDEVHGITFDYGQRHSQEIEIAKGLGKRLGLTSHKVLDVSMLNELAISALTRDDIAVSNTLMDNGLPNTFVPGRNILFLTLAGIFAYQLGAEAVITGVCETDYSGYPDCRDDFVKAMASALVQGMDRQLDLVTPLMWLNKAETWALADKFNSLALVRDETLTCYNDIVGSGCGTCPACLLRQTGLDDYLNNKAQIQLNLAAKTAQ

SEQ ID NO: 42209 - protein, 240 aa, Shewanella putrefaciens
  misc_feature (1)..(240): sp|A4Y6J4|QUEC_SHEPC 7-cyano-7-deazaguanine synthase OS =Shewanella putrefaciens (strain CN-32 / ATCC BAA-453) OX=319224 GN=queC PE=3 SV=2
MQKTFESKTATSKAVVVFSGGQDSTTCLIQALTQYDEVHGITFDYGQRHREEIEVAKSLAKRLKITSHKVMDVTLLNELAISALTRDAIPVSHELMENGLPNTFVPGRNILFLTLAGIYAYQLGAEAIITGVCETDFSGYPDCRNDFVKAMESALVQGMDKQLKIITPLMWLNKAQTWALADKYQQLDLVRHHTLTCYNGVIGDGCGDCPACHLRKRGLDDYLQNKAAVMAELDASEPKA

SEQ ID NO: 42210 - protein, 240 aa, Shewanella putrefaciens
  misc_feature (1)..(240): tr|A0A380A0Z7|A0A380A0Z7_SHEPU 7-cyano-7-deazaguanine s ynthase OS=Shewanella putrefaciens OX=24 GN=queC PE=3 S V=1
MSINSVSNPLVSKVVVVFSGGQDSTTCIIQALTQYDEVHGITFDYGQRHREEIEVAKSLAKRLQITSHKVMDVTLLNELAISALTRDAIPVSHELMENGLPNTFVPGRNILFLTLAGIYAYQLGAEAIITGVCETDFSGYPDCRNDFVKAMESALVQGMDKQLKIITPLMWLNKAQTWAMADKYQQLDLVRHQTLTCYNGIIGDGCGDCPACHLRKRGLEDYLQNKTAVMAELNAYESKA

SEQ ID NO: 42211 - protein, 232 aa, Shewanella sediminis
  misc_feature (1)..(232): sp|A8FUY4|QUEC_SHESH 7-cyano-7-deazaguanine synthase OS =Shewanella sediminis (strain HAW-EB3) OX=425104 GN=que C PE=3 SV=1
MSKVSKAVVVFSGGQDSTTCLIQALNQYDEVHGITFDYGQRHSQEIEVARSLGQRLGLVSHKILDVSMLNELAISALTRDSIEVSNELMENGLPNTFVPGRNILFLTLAGIYAYQLGADSVITGVCETDFSGYPDCRNDFVKTMESALNQGMDRQCKIVTPLMWLNKAETWALADQYKSLELVRDETLTCYNGIIGNGCGTCPACLLRQSGLEDYSNNREQVQSDLASKCHK

SEQ ID NO: 42212 - protein, 240 aa, Shewanella sp.; identical to SEQ ID NO: 42209
  misc_feature (1)..(240): sp|A1RJY8|QUEC_SHESW 7-cyano-7-deazaguanine synthase OS =Shewanella sp. (strain W3-18-1) OX=351745 GN=queC PE=3 SV=2

SEQ ID NO: 42213 - protein, 239 aa, Shewanella sp.
  misc_feature (1)..(239): sp|Q0HVF0|QUEC_SHESR 7-cyano-7-deazaguanine synthase OS =Shewanella sp. (strain MR-7) OX=60481 GN=queC PE=3 SV= 1
MSAASVSKVVVVFSGGQDSTTCLIQALTQFDEVHGITFDYGQRHREEIEVAKSLAKRLKITSHKVMDVSLLNELAISALTRDAIPVSHELMENGLPNTFVPGRNILFLTLAGIFAYQLGAEAIITGVCETDFSGYPDCRHDFVRAMESALVQGMDKKLEIITPLMWLNKAQTWALADKYQQLDLVRHHTLTCYNGIVGDGCGDCPACHLRKRGLEDYLQNKAEVMASLDKATATGKPQA

SEQ ID NO: 42214 - protein, 228 aa, Shewanella violacea
  misc_feature (1)..(228): tr|D4ZKV3|D4ZKV3_SHEVD 7-cyano-7-deazaguanine synthase OS=Shewanella violacea (strain JCM 10179 / CIP 106290 / LMG 19151 / DSS12) OX=637905 GN=exsB PE=3 SV=1
MSKAVVVFSGGQDSTTCLIQALEQYDEVHGITFDYGQRHSQEIEVAKDLGKRLGLASHKVLDVTMLNELAISALTRDDIPVSNTLMDNGLPNTFVPGRNILFLTLAGIFAYQLGAEAVITGVCETDYSGYPDCRNDFVKAMASALVQGMDIELELVTPLMWLNKAETWALADKYNCLALVRDETLTCYNNILGSGCGTCPACLLRQTGLDDYLSNKTQVQFDLAAKTA

SEQ ID NO: 42215 - protein, 233 aa, Shewanella woodyi
  misc_feature (1)..(233): tr|B1KGW0|B1KGW0_SHEWM 7-cyano-7-deazaguanine synthase OS=Shewanella woodyi (strain ATCC 51908 / MS32) OX=3925 00 GN=queC PE=3 SV=1
MSKAVSKAVVVFSGGQDSTTCLIQALTQYDEVHGITFDYGQRHRQEIEVAETLGQQLGLKSHKTLDVSMLNELAISALTRDSIQVSNELMDNGLPNTFVPGRNILFLTLAGIFAYQLGADTVITGVCETDFSGYPDCRNDFVKAMQSALEQGMDRKLTLSTPLMWLNKAETWALADKYHSLDLVRDETLTCYNGIVGTGCGTCPACLLRQKGLDDYCNNKEQVQQELNTKCQS

SEQ ID NO: 42216 - protein, 238 aa, Shewanella xiamenensis
  misc_feature (1)..(238): tr|A0A073KP65|A0A073KP65_9GAMM 7-cyano-7-deazaguanine s ynthase OS=Shewanella xiamenensis OX=332186 GN=queC PE= 3 SV=1
MSASVSKVVVVFSGGQDSTTCLIQALTQYDEVHGITFDYGQRHREEIDVAKSLAQRLNITSHKVMDVSLLNELAISALTRDAIPVSHELMENGLPNTFVPGRNILFLTLAGIYAYQLGAEAIITGVCETDFSGYPDCRHDFVRAMESALVQGMDKKLEIITPLMWLNKAQTWALADKYQQLDLVRHNTLTCYNGIVGDGCGDCPACHLRKRGLEDYLQNKAEVMTSLDKATETGKPQA

SEQ ID NO: 42217 - protein, 238 aa, Shewanella xiamenensis
  misc_feature (1)..(238): tr|A0A1E3V147|A0A1E3V147_9GAMM 7-cyano-7-deazaguanine s ynthase OS=Shewanella xiamenensis OX=332186 GN=queC PE= 3 SV=1
MSASVSKVVVVFSGGQDSTTCLIQALTQYDEVHGITFDYGQRHREEIDVAKSLAKRLNITSHKVMDVSLLNELAISALTRDAIPVSHELMENGLPNTFVPGRNILFLTLAGIYAYQLGAEAIITGVCETDFSGYPDCRNDFVRAMESALVQGMDKKLEIITPLMWLNKAQTWALADKYQQLDLVRHHTLTCYNGIVGDGCGDCPACHLRKRGLEDYLQNKAEVMVSLDKATATGKPQA

SEQ ID NO: 42218 - protein, 231 aa, Shigella boydii
  misc_feature (1)..(231): tr|F3WEN0|F3WEN0_9ENTR 7-cyano-7-deazaguanine synthase OS=Shigella boydii 5216-82 OX=766141 GN=queC PE=3 SV=1
MKRAVVVFSGGQDSTTCLVQALQQYDEVHCVTFDYGQRHRAEIDVARELALKLGARAHKVLDVTLLNELAVSSLTRDSIPVPDYEPEADGIPNTFVPGRNILFLTLAAIYAYQVKAEAVITGVCETDFSGYPDCRDEFVKALNHAVSLGMAKDIRFETPLMWIDKAETWALADYYGKLDLVRNETLTCYNGIKGDGCGHCAACNLRANGLNHYLADKPTVMAAMKQKTGLK

SEQ ID NO: 42219 - protein, 231 aa, Shigella boydii
  misc_feature (1)..(231): sp|B2U4P9|QUEC_SHIB3 7-cyano-7-deazaguanine synthase OS =Shigella boydii serotype 18 (strain CDC 3083-94 / BS51 2) OX=344609 GN=queC PE=3 SV=1
MKRAVVVFSGGQDSTTCLVQALQQYDEVHCVTFDYGQRHRAEIDVARELALKLGARAHKVLDVTLLNELAVSSLTRDSIPVPDYEPEADGIPNTFVPGRNILFLTLAAIYAYQVKAEAVITGVCETDFSGYPDCRDEFVKALNHAVSLGMAKDIRFETPLMWIDKAETWALADYYGKLDLVRNETLTCYNGIKGDGCGHCAACNLRANGLNHYLADKPTVMAAMKQKTGLR

SEQ ID NO: 42220 - protein, 231 aa, Shigella dysenteriae; identical to SEQ ID NO: 42219
  misc_feature (1)..(231): tr|A0A3P6KJ96|A0A3P6KJ96_SHIDY 7-cyano-7-deazaguanine s ynthase OS=Shigella dysenteriae OX=622 GN=queC PE=3 SV= 1

SEQ ID NO: 42221 - protein, 231 aa, Shigella dysenteriae
  misc_feature (1)..(231): sp|Q32JK2|QUEC_SHIDS 7-cyano-7-deazaguanine synthase OS =Shigella dysenteriae serotype 1 (strain Sd197) OX=3002 67 GN=queC PE=3 SV=1
MKRAVVVFSGGQDSTTCLVQALQQYDEVHCVTFDYGQRHRAEIDVARELALKLGARAHKVLDVTLLNELAVSSLTRDSIPVPDYEPEADGIPNTFVPGRNILFLTLAAIYAYQVKAEAVITGVCETDFSGYPDCRDEFVKALNHAVSLGMAKHIRFETPLMWIDKAETWALADYYGKLDLVRNETLTCYNGIKGDGCGHCAACNLRANGLNHYLADKPTVMAAMKQKTGLK

SEQ ID NO: 42222 - protein, 231 aa, Shigella flexneri
  misc_feature (1)..(231): tr|A0A4P7TP75|A0A4P7TP75_SHIFM 7-cyano-7-deazaguanine s ynthase OS=Shigella flexneri serotype 5a (strain M90T) OX=1086030 GN=queC PE=3 SV=1
MKRAVVVFSGGQDSTTCLVQALQQYDEVHCVTFDYGQQHRAEIDVARELALKLGARAHKVLDVTLLNELAVSSLTRDSIPVPDYEPEADGIPNTFVPGRNILFLTLAAIYAYQVKAEAVITGVCETDFSGYPDCRDEFVKALNHAVSLGMAKDIRFETPLMWIDKAETWALADYYGKLDLVRNETLTCYNGIKGDGCGHCAACNLRANGLNHYLADKPTVMAAMKQKTGLR

SEQ ID NO: 42223 - protein, 231 aa, Shigella flexneri; identical to SEQ ID NO: 42222
  misc_feature (1)..(231): sp|Q0T7D9|QUEC_SHIF8 7-cyano-7-deazaguanine synthase OS =Shigella flexneri serotype 5b (strain 8401) OX=373384 GN=queC PE=3 SV=1

SEQ ID NO: 42224 - protein, 231 aa, Shigella sonnei; identical to SEQ ID NO: 42218
  misc_feature (1)..(231): tr|A0A5F0BSM0|A0A5F0BSM0_SHISO 7-cyano-7-deazaguanine s ynthase OS=Shigella sonnei OX=624 GN=queC PE=3 SV=1

SEQ ID NO: 42225 - protein, 231 aa, Shigella sonnei; identical to SEQ ID NO: 42219
  misc_feature (1)..(231): sp|Q3Z4V4|QUEC_SHISS 7-cyano-7-deazaguanine synthase OS =Shigella sonnei (strain Ss046) OX=300269 GN=queC PE=3 SV=1

SEQ ID NO: 42226 - protein, 232 aa, Shigella sp.
  misc_feature (1)..(232): tr|A0A1D3DGE0|A0A1D3DGE0_9ENTR 7-cyano-7-deazaguanine s ynthase OS=Shigella sp. FC1655 OX=1898038 GN=queC PE=3 SV=1
MKKTVVVFSGGQDSTTCLIQALEKYDEVHCITFNYGQRHKEEIEVAQKVSQLLGATAHKVLDVSLLNELAISSLTRDNIPVPDFKESEESDIPSTFVPGRNILFLTLAAIYAYQIGAESVITGVCETDFSGYPDCRDEFVKALNHAVSLGIARDIKFITPLMWLDKAETWALADYYKKLDFVRHETLTCYNGIQGDGCGECAACHLRQRGLNTYLADKTLIMQTMKRKVGLK

SEQ ID NO: 42227 - protein, 231 aa, Shigella sp.
  misc_feature (1)..(231): tr|A0A1E3MZQ6|A0A1E3MZQ6_9ENTR 7-cyano-7-deazaguanine s ynthase OS=Shigella sp. FC569 OX=1892897 GN=queC PE=3 S V=1
MKRAVVVFSGGQDSTTCLVQALQQYDEVHCVTFDYGQRHRAEIDVARELALKLGARAHKVLDVTLLNELAVSSLTRDSIPVPDYEPEADGIPNTFVPGRNILFLTLAAIYAYQVKAEAVITGVCETDFSGYPDCRDEFVKALNHAVSLGMAKDIRFETPLMWINKAETWALADYYGKLDLVRNETLTCYNGIKGDGCGHCAACNLRANGLNHYLADKPTVMAAMKQKTGLK

SEQ ID NO: 42228 - protein, 496 aa, Shimia abyssi
  misc_feature (1)..(496): tr|A0A2P8F859|A0A2P8F859_9RHOB Queuosine biosynthesis p rotein QueC OS=Shimia abyssi OX=1662395 GN=CLV88_114121 PE=4 SV=1
MGAVAPLSKVEVRWLPPLTKSGGDEVLRLDIAGREVAMTLRIGQLNRQLVEGLQDRALDLLEIAALVYCADAAVSRGGPADQKMGEKWHRRFVATMPVRDLKFWQRESVIQALEETLMFLSGDRFEFSFSTKDEQDAERSRFFKFGRNSSWKPHRVLMFSGGLDSFAGAVEEIVEQKHRVALVSHASSTKIAPVQKRLISVLSERYGPETCRHIPMTAQLKSRSTAERTHRTRSFLFAVLGSITATAFGLDRVSFHENGVVSLNLPPVGNVVGTRATRTTHPKTLKLFTDFLRLVFENDMRVDNPFFARTKADVVERISHLGMADQIVETRSCADVHNQTHQYFHCGRCSQCIDRRFAMLSKGLERFDPEDAYRVDLMSDARPNGTDREMALSYLRNAVFFENATPDALTRSFPVVLDAVNHLDSPPDTAMSMIADLLNRHGKAVTSVMRRTLESKSPGEFPEQSLPRLYGEMQSALPLPFVPAASVDKTRMRNYR

SEQ ID NO: 42229 - protein, 234 aa, Shimia marina
  misc_feature (1)..(234): tr|A0A0P1EQH6|A0A0P1EQH6_9RHOB 7-cyano-7-deazaguanine s ynthase OS=Shimia marina OX=321267 GN=queC PE=3 SV=1
MKTTVVCSGGLDSVSLAHIVATEGNLSRLVSFDYGQRHRKELDSAAACAERLGVPHHIIDLRAVGAALTGSALTEADVDVPDGHYAEETMRITVVPNRNAIMLTIAYGIAAANGDRRVATAVHGGDHFIYPDCRPGFTEAFDTMQQAALEGYADVRLHTPFVHRSKADIVADGAAANTPFALTWSCYKGGAQHCGRCGTCVERREAFDLAGVSDPTPYEDPDFWRTAVAEREAS

SEQ ID NO: 42230 - protein, 231 aa, Shimwellia blattae
  misc_feature (1)..(231): tr|I2BBP4|I2BBP4_SHIBC 7-cyano-7-deazaguanine synthase OS=Shimwellia blattae (strain ATCC 29907 / DSM 4481 / J CM 1650 / NBRC 105725 / CDC 9005-74) OX=630626 GN=queC PE=3 SV=1
MKRAVVVFSGGQDSTTCLIQALHQYDDVHCVTFDYGQRHRAEIDVARELALKLGARAHKVLDVTLLNELAVSSLTRNSIPVPDYEPDADGIPNTFVPGRNILFLTLAAIYAYQVQAQAVITGVCETDFSGYPDCRDEFVRALNHAVSLGMARDIRFETPLMWLNKAETWALADYWGKLDLVRSETLTCYNGIKGDGCGECAACHLRANGIEHYLADKAAVMAQMKRKTGLA

SEQ ID NO: 42231 - protein, 195 aa, Shinella sp.
  misc_feature (1)..(195): tr|A0A1M3BGQ6|A0A1M3BGQ6_9RHIZ 7-cyano-7-deazaguanine s ynthase OS=Shinella sp. 65-6 OX=1895831 GN=BGO06_15255 PE=3 SV=1
MSVVALVSGGLDSTLIAHLAIEEGVKIHPIFINYGQRALDRELAACEGVMRKLGLELTVADLSGYGALIRSGLTDPSLRVLEDAFTPGRNMLFLLVAAAHAYQLGADAISIGLLHEETSLFPDQTSAFLREAEALISRIMGRSIKVLAPLADFHKDEVIALAKQKGVEATYSCHLGQEAPCGKCIACNEFKVEEV

SEQ ID NO: 42232 - protein, 233 aa, Shinella sp.
  misc_feature (1)..(233): tr|A0A372NAA1|A0A372NAA1_9RHIZ 7-cyano-7-deazaguanine s ynthase OS=Shinella sp. WSJ-2 OX=2303749 GN=queC PE=3 S V=1
MTSTALVLFSGGQDSSTCLAWALDRYERVETVGFDYGQRHRIELDCRDTIRRELSAMNPVWAQRIGEDHTISLASLGEISKTALTSEIAIEMEDTGLPNTFVPGRNIIFLTFAAALAYRRGLKHIVGGMCETDYSGYPDCRDDTIKALQVALNLGMEKRFVLDTPLMWLDKADTWRLAENLGGSRLVQTIVKESHTCYLGERGDLHDWGYGCGTCPACDLRANGYQRFVAEQV

SEQ ID NO: 42233 - protein, 231 aa, Siccibacter turicensis
  misc_feature (1)..(231): tr|A0A2P8VP05|A0A2P8VP05_9ENTR 7-cyano-7-deazaguanine s ynthase OS=Siccibacter turicensis OX=357233 GN=queC PE= 3 SV=1
MKRAVVVFSGGQDSTTCLIQALQQYDEVHCVTFDYGQRHRAEIDVARELATALGARAHKVLDVTLLNELAVSSLTRDSIPVPDYQPDASGIPNTFVPGRNILFLTLTAIYAYQVQAEAVITGVCETDFSGYPDCRDEFVKALNHAVNLGMAREVRFETPLMWLDKAETWALADYWGKLDTVREETLTCYNGIKGDGCGQCAACNLRANGLHHYLADKPAVMAAMKQKTGLR

SEQ ID NO: 42234 - protein, 225 aa, Sideroxydans lithotrophicus
  misc_feature (1)..(225): tr|D5CMS8|D5CMS8_SIDLE 7-cyano-7-deazaguanine synthase OS=Sideroxydans lithotrophicus (strain ES-1) OX=580332 GN=queC PE=3 SV=1
MTKRAVVLLSGGLDSATVLAMARTQGFECYALSVDYGQRHHAELAAAQRVAQSLGAREQRVVNIDLTGFGGSALTDANIAVPEQAGSGIPITYVPARNTIMLSLALAWAEVLKAQDIFFGVNAVDYSGYPDCRPEYVAAFERMANLATQAAVEGKPLTLHAPLLHLSKAEIIRQGVRLGVDYGLTVSCYQADDEGRACGRCDSCRLRREGFAAAGVPDSTRYRST

SEQ ID NO: 42235 - protein, 233 aa, Silicibacter sp.
  misc_feature (1)..(233): tr|C9D358|C9D358_9RHOB 7-cyano-7-deazaguanine synthase OS=Silicibacter sp. TrichCH4B OX=644076 GN=queC PE=3 SV =1
MKTLVICSGGLDSVSLAHITANEHQLTRLVSFDYGQRHRKEVDFAEAAAKRLGVPFHLIDMRGIGGALTGSALTDDIDVPDGHYAEETMKITVVPNRNAIMLSIGFGIAAAQGDAAVATAVHGGDHFIYPDCRPGFTRAFDAMQRAALEGYADVRLHTPFVEHSKAEIVRQGAQHGTPFAETWSCYKGGAFHCGRCGTCVERREAFHLAGVNDPTTYADPEYWTTALATRGES

SEQ ID NO: 42236 - protein, 207 aa, Silicibacter sp.
  misc_feature (1)..(207): tr|C9CW67|C9CW67_9RHOB 7-cyano-7-deazaguanine synthase OS=Silicibacter sp. TrichCH4B OX=644076 GN=SCH4B_1733 P E=3 SV=1
MKRVLLLASGGLDSTTVAYQLLEKGCLPKPIFFDYGQHCVETEWGRLLEVMPARAEYPERIDISGVFAGSKSRLLNEADLWSESISDDDLYVPYRTLFFFSAAAARAQSIGISEVYTGFINSNHAKEIDCSADFLNGLDALTENVGPVRFFSPFRHSSKADVALEALRLDVPIGRTFSCQAASKLPCGACPNCVERLAALRATGLLA

SEQ ID NO: 42237 - protein, 224 aa, Simiduia agarivorans
  misc_feature (1)..(224): tr|K4KPI9|K4KPI9_SIMAS 7-cyano-7-deazaguanine synthase OS=Simiduia agarivorans (strain DSM 21679 / JCM 13881 / BCRC 17597 / SA1) OX=1117647 GN=queC PE=3 SV=1
MTKPRAVVLVSGGLDSTTVVAMAQAQGFEVYALSFDYGQRHRAELIAAERTALSLGVAEHKVVSLDLRAIGGSALTDSSIAVPETESEGIPVTYVPARNTVFLSIALGWAEVLDSQAIFVGVNAVDYSGYPDCRPAFIEAFETMANLATKAGVEGRRLRIHTPLIDMSKADIVRRGSELGVDYSQTVSCYQATDEGLACGRCDSCRLRRAGFEAAGLADPTRYI

SEQ ID NO: 42238 - protein, 218 aa, Simonsiella muelleri
  misc_feature (1)..(218): tr|V9HAW9|V9HAW9_9NEIS 7-cyano-7-deazaguanine synthase OS=Simonsiella muelleri ATCC 29453 OX=641147 GN=queC PE =3 SV=1
MTIQKQALVIFSGGQDSTTCLFQAINEFGVGNVQAITFTYGQRHAIELERAQWIAQDLRVKQTVLDLSLIGSITHNALMDNTAAIDTSGSLPNTFVDGRNALFLLYAAIYAKSQNIHTIFVGVCETDFSGYPDCRDVFVKSMNVTLNLAMAYDFDIRTPLMYLTKKETWALADQMGVLDYVREHTHTCYLGVPNGCHECPSCVLRERGLSEYLQDKNQ

SEQ ID NO: 42239 - protein, 241 aa, Simplicispira metamorpha
  misc_feature (1)..(241): tr|A0A4R2NE12|A0A4R2NE12_9BURK 7-cyano-7-deazaguanine s ynthase OS=Simplicispira metamorpha OX=80881 GN=queC PE =3 SV=1
MRPGHALVLFSGGQDSTTCLAWALTHFAHVETIGFDYGQRHDVEMRVRLQVLQSLRAQFPHWAERLGEDHVVDLAVLGQISDTALTRDTAIAMTAAGLPNTFVPGRNLLFFQLAAAVGYRRGLHTLVGGMCETDFSGYPDCRDDTIKALQVAVSLGMGQRFTFETPLMWLDKAQTWALAQQLGGDALVATIVAQSHTCYEGVRDVLHAWGYGCGTCPACELRRVGYERWRAAETGKPIAGA

SEQ ID NO: 42240 - protein, 197 aa, Simplicispira sp.
  misc_feature (1)..(197): tr|A0A2U1CAI1|A0A2U1CAI1_9BURK 7-cyano-7-deazaguanine s ynthase OS=Simplicispira sp. 125 OX=2135643 GN=C8D04_32 29 PE=3 SV=1
MSSLLLLSGGIDSICLAAKYRPKVCLTVDYGQRAAQAEINSSKQVCHSLGLRSTVLNVNIGALGSGQMAGQTTSPVSQHVEFWPFRNQFLVTLAGMLALREQCTQILIGSVSTDQRHSDGSAAFRDLLHQLLRLQEGGLELLAPAADMTSEELIDFSEISLDVLSWAHSCHTGNLACGHCPGCNKHSQVMQSKGLDR

SEQ ID NO: 42241 - protein, 236 aa, Simplicispira sp.
  misc_feature (1)..(236): tr|A0A398C1M3|A0A398C1M3_9BURK 7-cyano-7-deazaguanine s ynthase OS=Simplicispira sp. NY-02 OX=2315688 GN=queC P E=3 SV=1
MRNSHALVLFSGGQDSTTCLAWALENFAHVETIGFDYGQRHRIELDARLRVLAALREHFGQWQGRLGDDHVIDLAVLGQISDCALTQGTAIALGEAGLPNTFVPGRNLLFFQLAAAVGYRRGLRTLVGGMCETDYSGYPDCRDDTLKALQAAISLGMGQSFTIETPLMWLDKAQTWALARTLGGEALVALIVEHTHTCYEGERGVLHAWGYGCGHCPACELRKGGFERWSADLMAA

SEQ ID NO: 42242 - protein, 236 aa, Simplicispira suum
  misc_feature (1)..(236): tr|A0A2S0MYS3|A0A2S0MYS3_9BURK 7-cyano-7-deazaguanine s ynthase OS=Simplicispira suum OX=2109915 GN=queC PE=3 S V=1
MRSGHALVLFSGGQDSTTCLAWALEHFAHVETVGFDYGQRHHVELQARVAVLAQMRERFAHWSERLGQDHMIDLAVLGQISDCALTQDKAIALGEAGLPNTFVPGRNLMFFQIAAALGYRRGLRTLVGGMCETDYSGYPDCRDDTLKALQAALSLGMGQSFTIETPLMWLDKAQTWELADTLGGQALIDIVVEHTHTCYEGIRSERHAWGYGCSTCPACALRRKGFERWSARDGQT

SEQ ID NO: 42243 - protein, 231 aa, Singulisphaera acidiphila
  misc_feature (1)..(231): tr|L0DMW6|L0DMW6_SINAD 7-cyano-7-deazaguanine synthase OS=Singulisphaera acidiphila (strain ATCC BAA-1392 / DS M 18658 / VKM B-2454 / MOB10) OX=886293 GN=queC PE=3 SV =1
MAEGAKKAVVLLSGGLDSATAVAEAKAAGFDVYALTILYGQRHVVERDAARRVAKALGVTRYVEQSIDLRAFGASALTDEIAVPKDRSAEVMASGIPITYVPARNTVFLSLALAWAETLGAFDLFIGVNCVDYSGYPDCRPEYLRAFETLANLATRAGVEGTGRFVIHAPLLTMSKEQIITRGLELGVDFGLTHSCYDPTPEGLACGRCDACALRLAAFAGLGLTDPVRYQ

SEQ ID NO: 42244 - protein, 237 aa, Singulisphaera acidiphila
  misc_feature (1)..(237): tr|L0DMT8|L0DMT8_SINAD 7-cyano-7-deazaguanine synthase OS=Singulisphaera acidiphila (strain ATCC BAA-1392 / DS M 18658 / VKM B-2454 / MOB10) OX=886293 GN=Sinac_5863 P E=3 SV=1
MSDIGAIPQVAVLVSGGLESAILCVDLLRQFGRVHPLYVRFGLRWEEVELAYLRRYLQAVERPGLCPLEILDEPVASVYGRHWSVEGIAVPDASSPDAAVYLPGRNLLFLSKAAVWCRLRNVERLALGCLGTNPFPDSTPTFFEQMEAAVNQAMDGRLRILRPFDRMHKDEVLKRGFDLPLQLTFSCLSPVDGQHCGRCNKCAERRNGFRDACFPDPTNYAAPPPDGSMGMAVGSHF

SEQ ID NO: 42245 - protein, 237 aa, Singulisphaera sp.
  misc_feature (1)..(237): tr|A0A1N6FBD6|A0A1N6FBD6_9BACT 7-cyano-7-deazaguanine s ynthase OS=Singulisphaera sp. GP187 OX=1882752 GN=SAMN0 5444166_1638 PE=3 SV=1
MSELDAIPEVAVLVSGGLESAILCVDLLRQFRRVRPLYFRFGLHWEEVELGCLRRYLQAVEHPGLFPLEILDEPVANVYGRHWSVEGIAVPDATSPDEAVYLPGRNLLFISKAAVWCRLRNVEHLALGSLGTNPFPDSTPTFFEQIEAAVNQAMDGRLRILRPFDRMHKDEVLKRGRDLPLQFTFSCLSPVDGQHCGRCNKCEERRNGFRDARFPDPTNYAATSPDGPNGTAAGTDL

SEQ ID NO: 42246 - protein, 237 aa, Singulisphaera sp.
  misc_feature (1)..(237): tr|A0A1N6L3A6|A0A1N6L3A6_9BACT 7-cyano-7-deazaguanine s ynthase OS=Singulisphaera sp. GP187 OX=1882752 GN=queC PE=3 SV=1
MGHKRPAVVLLSGGLDSTTTLALAHRDGFDLFALSFRYGQRHLAELEAARRVAERLGVVKHIIADIDLRQFGGSALTSDLDVPKGRTPNEMGAGIPVTYVPARNTVFLSFALAWAEVLGSTDIFIGVNALDYSGYPDCRPEFIAAFESMANLATKMGVEGSRPLTIHTPLIALTKAEIIRTGIELGVDYAMTVTCYDPSPGGEACGACDACLLRRKGFEENGLSDPARYVSETAVVP

SEQ ID NO: 42247 - protein, 229 aa, Sinimarinibacterium flocculans
  misc_feature (1)..(229): tr|A0A318EEE3|A0A318EEE3_9GAMM 7-cyano-7-deazaguanine s ynthase OS=Sinimarinibacterium flocculans OX=985250 GN= queC PE=3 SV=1
MGSEARKAVVLFSGGLDSATVLALAREQGFALHALSVAYGQRHDAELAAARRIAERAGVVEHRLIQVNLDAFGGSALTDRRIDVPETPSEGVPVTYVPARNTLFLSLALGWAEVIGARDLFVGVNAVDYSGYPDCRPAFIEAFERLARVATKAGAEGQSFVVHAPLIKMSKADIVRTGTRLGVDYAQTVSCYQADAEGRACGRCDACRLRREGFAAAGLADPTRYVGQR

SEQ ID NO: 42248 - protein, 228 aa, Sinimarinibacterium sp.
  misc_feature (1)..(228): tr|A0A4U0GPT8|A0A4U0GPT8_9GAMM 7-cyano-7-deazaguanine s ynthase OS=Sinimarinibacterium sp. CAU 1509 OX=2562283 GN=queC PE=3 SV=1
MVERKKAVVLVSGGLDSVTVLAMMREQDYEIYALSVAYGQRHDAELRAAAAVAARYGAVRHECIDVQLGAVGGSALTDHSIAVPQEPSTGIPVTYVPARNTLFLALALGWAEVVGAEEIFIGVNAIDYSGYPDCRPPFIEAFEKLAAVATKAGSEGRPLRVRAPLIQMSKAQIIAEGTRLGVDYAQTVSCYQADAQGRACGECDSCRLRKEGFAEAGIADPTRYIANG

SEQ ID NO: 42249 - protein, 408 aa, Sinirhodobacter populi
  misc_feature (1)..(408): tr|A0A443IKP9|A0A443IKP9_9RHOB Uncharacterized protein OS=Sinirhodobacter populi OX=2306993 GN=D2T33_20020 PE= 4 SV=1
MRQATGSVGNQLSAAVASLGVRIDERVFDFLTIALAVIAADTFIDRDQWAANGWSREIELDIPLAQPAIWTPVLPALKKALDFLSGDQWGISLQSGGPRPPNQAAILRKRKKIGIGAADCVSLFSGGLDSLLGVSKLVADGRTPVLVSHSYRGDKSYQRDLVPRIGKQLPWFEANAHPVKTGGGPHDTSMRTRSLGFLAYGVVVASAVASTRGAAQGQIDLFVPENGFIALNAPLTRRRVGSHSTRTTHPYFLNLIQEVLNAVGLPVRLTNEFRHYTKGEMMDEAAQAGRPTDIFSRTVSCGKWKRKNTQCGYCVPCLIRKAAFFKAGIDDHTRYRYDVAEAWRDPKIRDDLLAVVLAARNGTEDSRARAIASGPLPFEIVERDGWFSVNERGLSEVSEYLRSKGITG

SEQ ID NO: 42250 - protein, 222 aa, Sinobaca qinghaiensis
  misc_feature (1)..(222): tr|A0A419V6P4|A0A419V6P4_9BACL 7-cyano-7-deazaguanine s ynthase OS=Sinobaca qinghaiensis OX=342944 GN=queC PE=3 SV=1
MSLKNEKAIIVFSGGQDSTTCLFWALEQFKEVIAVTFDYGQRHSEELKVASDIAEDLNIEHHILDMTLLNQLAPNALTRDSIEVEEGKDGELPSTFVEGRNLLFFSFAAIAASQKGAKHIVTGVCETDYSGYPDCRDAFVKSLNVSLNLGIGKDFVIHTPLMWLDKKETWKLADDLGQLNYVRDYTLTCYHGIRGQGCGECPACKLRRAGLDQYRREKEREL

SEQ ID NO: 42251 - protein, 225 aa, Sinobacteraceae bacterium
  misc_feature (1)..(225): tr|A0A2T5MH97|A0A2T5MH97_9GAMM 7-cyano-7-deazaguanine s ynthase OS=Sinobacteraceae bacterium GT1R17 OX=2029166 GN=queC PE=3 SV=1
MAEVKKAVVLLSGGLDSATVLAMARAQGYECHALSVSYGQRHVAELNAATRVVASLGAAAHQVISVNLDALGGSALTDKNIAVPESPTSGIPVTYVPARNTTFLSLSLGWAEVIGARDIFIGINAVDYSGYPDCRPEFVEAFERLAQVATKAGVEGAGFKIHTPLIRMSKSEIIAEGLRLGVNYTETVSCYQADVDGRACGLCDSCRIRKQGFDDAGISDQTHYK

SEQ ID NO: 42252 - protein, 231 aa, Sinobacteraceae bacterium
  misc_feature (1)..(231): tr|A0A522J6Z6|A0A522J6Z6_9GAMM 7-cyano-7-deazaguanine s ynthase OS=Sinobacteraceae bacterium OX=1969813 GN=queC PE=3 SV=1
MERAAGTQRDAVLLLSGGLDSATVLALMRRDGYRVHALSVSYGQRHGVELASAARVAQSLGAASHLVMHVDMDAIGGSALTDSRIAVPEDAGDMPGIPVTYVPARNTIFLSLALSYAEKLGARDLFVGVNSVDYSGYPDCRPAFIAAFEKVANLGTCAVDDGTHFTVHAPLQALGKGDIIKAGSALGVDYSMTVSCYQADAKGRACGHCDACRLRRDGFREAGVPDPTRYV

SEQ ID NO: 42253 - protein, 218 aa, Sinobacterium caligoides
  misc_feature (1)..(218): tr|A0A3N2DEA5|A0A3N2DEA5_9GAMM 7-cyano-7-deazaguanine s ynthase OS=Sinobacterium caligoides OX=933926 GN=queC P E=3 SV=1
MAKVVVIYSGGMDSYTVLNKALQQGHEVFALSFNYGQKHSRELICAKQVCEDRGVTHKMSDITAIADLLQSSSLVSSDIAVPEGHYEAESMKSTVVPNRNMILISLAIGYAVDIGAEAVWYGAHSGDHTIYPDCRPEFVEKMNEVSRLANFEVVDVYAPYLYKNKTDILRDGLAMDLDYGETWTCYKGLEKACGLCGSCVERLEAFAALERRDPVAYD

SEQ ID NO: 42254 - protein, 245 aa, Sinorhizobium americanum
  misc_feature (1)..(245): tr|A0A1L3LAC3|A0A1L3LAC3_9RHIZ 7-cyano-7-deazaguanine s ynthase OS=Sinorhizobium americanum CCGM7 OX=1408224 GN =queC PE=3 SV=1
MATEHQDGALVLFSGGQDSTTCLAWALDRFPRVETVGFDYGQRHRVELDCRAKLREEFGRVNPDWANRLGDDHTISLEALGEISDTALTQDIEIEMANIGLPNTFVPGRNLIFLTFAAALACRRGLKHIVGGMCETDFSGYPDCRDDTIKALQVALNLGMEKRFVLETPLMWIDKAATWQLAESLGGSLLVDVIIEDTHTCYLGERGQRHDWGFGCGVCPACELRAKGYSKFIAEETGITRISNG

SEQ ID NO: 42255 - protein, 236 aa, Sinorhizobium americanum
  misc_feature (1)..(236): tr|A0A4R2C401|A0A4R2C401_9RHIZ 7-cyano-7-deazaguanine s ynthase OS=Sinorhizobium americanum OX=194963 GN=queC P E=3 SV=1
MKTIVICSGGLDSVSLAHRIAAEHELFGLLSFDYGQRHRKELDFAAACARRLSVPHQIIDIREIGRHLTGSALTDDVEVPDGHYAEETMKTTVVPNRNAIMLAIAFGVAAARKADAVAAAVHGGDHFIYPDCRPGFIDAFQTMQNHALDGYADITLYTPYVNVSKADIVADGAKNGTPFAETWSCYKGGARHCGRCGTCVERREAFHLAGVADPTEYEDRDFWVAATRAFAAEEVR

SEQ ID NO: 42256 - protein, 236 aa, Sinorhizobium fredii
  misc_feature (1)..(236): sp|Q6W2G5|QUEC_SINFN 7-cyano-7-deazaguanine synthase OS =Sinorhizobium fredii (strain NBRC 101917 / NGR234) OX= 394 GN=queC PE=3 SV=1
MKTIVICSGGLDSVSLAHRIAAEHELLGLLSFDYGQRHRKELDFAAACAKRLGVPHQIIDIREIGRHLTGSALTDDVDVPDGHYAEETMKTTVVPNRNAIMLAIAFGVAATRKADAVAAAVHGGDHFIYPDCRPGFIDAFQVMQNHALEGYADVILYTPYVNVSKADIVADGAKHHTPFAETWSCYKGGTRHCGRCGTCVERREAFHLAGVTDPTEYEDPEFWVAATAAYVAEEVK

SEQ ID NO: 42257 - protein, 236 aa, Sinorhizobium fredii
  misc_feature (1)..(236): tr|A0A249Q439|A0A249Q439_RHIFR 7-cyano-7-deazaguanine s ynthase OS=Sinorhizobium fredii CCBAU 83666 OX=1128334 GN=queC PE=3 SV=1
MKTIVICSGGLDSVSLAHRIAAEHELLGLLSFDYGQRHRKELDFAAACARRLGVPHQVIDIREIGRHLTGSALTDDIDVPDGHYAEETMKTTVVPNRNAIMLAIAFGVAAARKADAVAAAVHGGDHFIYPDCRPGFIDAFQTMQNHALDGYADVTLHTPYVNVSKADIVADGAKHHTPFAETWSCYKGGARHCGRCGTCVERREAFHLAGVVDPTEYEDPDFWVAATRAFSAEEVK

SEQ ID NO: 42258 - protein, 236 aa, Sinorhizobium medicae
  misc_feature (1)..(236): tr|A6UJ91|A6UJ91_SINMW 7-cyano-7-deazaguanine synthase OS=Sinorhizobium medicae (strain WSM419) OX=366394 GN=q ueC PE=3 SV=1
MKTIVICSGGLDSVSLAHKVAAEQELVCLLSFDYGQRHRKELDFAAVCARRLGVPHQIIDIREIGRHLTGSALTDEVDVPDGHYAEETMKTTVVPNRNAIMLAIAFGVAAARKADAVATAVHGGDHFIYPDCRPGFIDAFQAMQNHALDGYADVGLYAPYVNVAKAEIVADGSRYGTPFAETWSCYKGGARHCGRCGTCVERREAFHLADVADPTAYDDADFWVTVTGSFVAEEVE

SEQ ID NO: 42259 - protein, 236 aa, Sinorhizobium medicae
  misc_feature (1)..(236): tr|A0A508X474|A0A508X474_9RHIZ 7-cyano-7-deazaguanine s ynthase OS=Sinorhizobium medicae OX=110321 GN=queC PE=3 SV=1
MKTIVICSGGLDSVSLAHKVAAEQELVCLLSFDYGQRHRKELDFAAACARRLGVPHQIIDIREIGRHLTGSALTDEVDVPDGHYAEETMKTTVVPNRNAIMLAIAFGVAAARKADAIATAVHGGDHFIYPDCRPGFIDAFQAMQNHALDGYADVGLYAPYVNVAKADIVADGSRYGTPFAETWSCYKGGARHCGRCGTCVERREAFHLADVADPTAYDDADFWVTVTGSFVAEEVE

SEQ ID NO: 42260 - protein, 236 aa, Sinorhizobium meliloti; identical to SEQ ID NO: 41682
  misc_feature (1)..(236): tr|H0FYF6|H0FYF6_RHIML 7-cyano-7-deazaguanine synthase OS=Sinorhizobium meliloti CCNWSX0020 OX=1107881 GN=queC PE=3 SV=1

SEQ ID NO: 42261 - protein, 236 aa, Sinorhizobium meliloti; identical to SEQ ID NO: 41681
  misc_feature (1)..(236): tr|A0A0E0UMP8|A0A0E0UMP8_SINMB 7-cyano-7-deazaguanine s ynthase OS=Sinorhizobium meliloti (strain BL225C) OX=69 8936 GN=queC PE=3 SV=1

SEQ ID NO: 42262 - protein, 195 aa, Sinorhizobium saheli
  misc_feature (1)..(195): tr|A0A178Y7F7|A0A178Y7F7_SINSA 7-cyano-7-deazaguanine s ynthase OS=Sinorhizobium saheli OX=36856 GN=ATB98_15855 PE=3 SV=1
MSVVALVSGGLDSTLIAYLAIEEGVKIHPIFVNYGQRALDRELAACEGAMRKLGLELTVADLSGYGVLIRSGLTDPSLRVLEDAFTPGRNMLFLLVAAAHAYQVGADAISIGLLHEETSLFPDQTSAFLQEAEALISRIMGRSIKVLAPLADFHKDEVIALAKQKGVESTYSCHLGQETPCGHCIACNEFNVEEV

SEQ ID NO: 42263 - protein, 139 aa, Sinorhizobium saheli
  misc_feature (1)..(139): tr|D1CTG2|D1CTG2_SINSA 7-cyano-7-deazaguanine synthase (Fragment) OS=Sinorhizobium saheli OX=36856 PE=3 SV=1
MSVVALVSGGLDSTLIAYLAIEEGVKIHPIFVNYGQRALDRELAACEGAMRKLGLELTVADLSGYGVLIRSGLTDPSLRVLEDAFTPGRNMLFLLVAAAHAYQVGADAISIGLLHEETSLFPDQTSAFLQEAEALISRI

SEQ ID NO: 42264 - protein, 236 aa, Sinorhizobium sp.
  misc_feature (1)..(236): tr|A0A249P1X0|A0A249P1X0_9RHIZ 7-cyano-7-deazaguanine s ynthase OS=Sinorhizobium sp. CCBAU 05631 OX=794846 GN=q ueC PE=3 SV=1
MKTIVICSGGLDSVSLAHGIAAEHELLGLLSFDYGQRHRKELDFAAACARRLGVPHQIIDIREIGRHLTGSALTDDVDVPDGHYAEETMKTTIVPNRNAIMLAIAFGVAAARKADAVAAAVHGGDHFIYPDCRPGFIAAFQTMQNHALEGYADITLHTPYVNVSKADIVADGAKHGTPFAETWSCYKGGARHCGRCGTCVERREAFHLAGAADPTEYEDPDFWIAATRAFAAEEVR

SEQ ID NO: 42265 - protein, 236 aa, Sinorhizobium sp.; identical to SEQ ID NO: 41656
  misc_feature (1)..(236): tr|A0A2A6MF46|A0A2A6MF46_9RHIZ 7-cyano-7-deazaguanine s ynthase OS=Sinorhizobium sp. NG07B OX=1538174 GN=queC P E=3 SV=1

SEQ ID NO: 42266 - protein, 245 aa, Skermanella aerolata
  misc_feature (1)..(245): tr|A0A512E4I4|A0A512E4I4_9PROT 7-cyano-7-deazaguanine s ynthase OS=Skermanella aerolata OX=393310 GN=queC PE=3 SV=1
MTEQFTDGALVLLSGGQDSTTCLAWALDRFPTVETIGFDYRQRHSVELECRASVREGLAALRPDWAEKLGVDHMLDLATLASLGETAMTHDVEIHMTAANLPNTFVPGRNLLFLTFAAALAYRRGLRHIVTGVCETDYSGYPDCRDDTLKALQVALNLGMEKRFVLHTPLMWIDKAATWQLAEDIGGEPLVDLMAERTHTCYKGDRSHRHAWGYGCGECPACDLRARGWEVYAAKRAHAGAFGNH

SEQ ID NO: 42267 - protein, 245 aa, Skermanella aerolata; identical to SEQ ID NO: 42266
  misc_feature (1)..(245): tr|A0A0D2WB40|A0A0D2WB40_9PROT 7-cyano-7-deazaguanine s ynthase OS=Skermanella aerolata KACC 11604 OX=1385368 G N=queC PE=3 SV=1

SEQ ID NO: 42268 - protein, 233 aa, Skermanella stibiiresistens
  misc_feature (1)..(233): tr|W9GRA7|W9GRA7_9PROT 7-cyano-7-deazaguanine synthase OS=Skermanella stibiiresistens SB22 OX=1385369 GN=queC PE=3 SV=1
MADKALVLFSGGQDSATCLAWALDRFDHVETIGFDYGQRHKVELDCRERFRTNLIQQVPAWASRLGDDHMLDLSVLGEVSDTALTGEAEIRYQENGLPTTFVPGRNLLFFTFASAVAYRRGIRHLVGGMCETDYSGYPDCRDDTLKSLQVTLNLGMDQRFVVDTPLMWIDKAATWVMAEHLGGKALVDLIVEDTHTCYVGDRTNRHAWGYGCGACPACELRSGGWERYQAAVE

SEQ ID NO: 42269 - protein, 268 aa, Slackia exigua
  misc_feature (1)..(268): tr|D0WE35|D0WE35_SLAES 7-cyano-7-deazaguanine synthase OS=Slackia exigua (strain ATCC 700122 / DSM 15923 / CIP 105133 / JCM 11022 / KCTC 5966 / S-7) OX=649764 GN=que C PE=3 SV=1
MSRQSKTTENVPVAASPPASGGMRASSPTCPTRALVLSSGGIDSTTCLALAVERFSTANVSTVSFFYGQRHRKELDAAQAVAERYGVAHYVLDIASVLRYSDNALMAGSTQDVARGTYADQKDAAGRPNTYVPFRNGLMLSAAAALAASLYPDEACAVYLGAHADDAAGDAYPDCSPAFTDAMSDAMRIGTYGNVTLEAPFVNDTKAGVVACGLERGVPYELTWSCYEGGDVACGTCGTCLDRIAAFHANGAEDPIRYSSAPDGASAL

SEQ ID NO: 42270 - protein, 235 aa, Slackia heliotrinireducens
  misc_feature (1)..(235): tr|C7N134|C7N134_SLAHD 7-cyano-7-deazaguanine synthase OS=Slackia heliotrinireducens (strain ATCC 29202 / DSM 20476 / NCTC 11029 / RHS 1) OX=471855 GN=queC PE=3 SV=1
MTSTDQPTRAMVLSSGGVDSTTCLALACEQFGADNVTSVSVFYGQRHNKELACADAVAKHYGVAHHVLDLANILANSNNALMADSTQEIDHRDYATQIAENEDGMVNTYVPFRNGLMLSAVTALAISLNPTEKTAIYLGAHADDAAGGAYPDCTPEFFEAIARAIELGSYGKAVLREPFVNVNKADVVACGLKLGVPYELTWSCYEGGDAPCGTCATCIDRAKAFAANGVADPAL

SEQ ID NO: 42271 - protein, 268 aa, Slackia sp.
  misc_feature (1)..(268): tr|J6IDV4|J6IDV4_9ACTN 7-cyano-7-deazaguanine synthase OS=Slackia sp. CM382 OX=1111137 GN=queC PE=3 SV=1
MSGQSKMTENAPAAASLPVSGGMHASSPTCPTRALVLSSGGIDSTTCLALAVERFGTANVSTVSFFYGQRHRKELDAAQAVAERYGVAHYVLDIASVLRYSDNALMAGSAQDVARGTYADQKDAAGRPNTYVPFRNGLMLSAAAALAASLYPDEVCAVYLGAHADDAAGDAYPDCSPAFTDAMADAMRIGTYGNVMLEAPFVNDTKAGVVACGLERRVPYELTWSCYEGGDVACGTCGTCLDRIAAFHANGAEDPIRYSSAPNGASAL

SEQ ID NO: 42272 - protein, 233 aa, Smithella sp.
  misc_feature (1)..(233): tr|A0A1V5DVR2|A0A1V5DVR2_9DELT 7-cyano-7-deazaguanine s ynthase OS=Smithella sp. PtaU1.Bin162 OX=1811697 GN=que C PE=3 SV=1
MKTERKAVVLLSGGIDSATTLAIAKEMGFDLYALSFNYGQRHKVELQAAEKIAAGVGTVKHITLDIDLRQFGNSALTDDIAVPQGRGIEEMAKEIPVTYVPARNTIFLSFALAWAEVLESSDIFIGVNSLDYSGYPDCRPEYIAAYESMAGLATKAAVEGKQKLKIHVPLIKMTKAQIIRKGWELGVDFASTHSCYNPSAAGEACGGCDSCLLRMKGFKEAGIPDPTVYKLQK

SEQ ID NO: 42273 - protein, 233 aa, Smithella sp.
  misc_feature (1)..(233): tr|A0A354H4C7|A0A354H4C7_9DELT 7-cyano-7-deazaguanine s ynthase OS=Smithella sp. OX=2053614 GN=queC PE=3 SV=1
MKNNLKAVVLLSGGIDSATILAIAKDRGFDVYALSFRYGQRHIVELEAAKRVALCNKVAEHLIIDIDLRRIGGSALTADIAVPKSRNVEQMGEHIPVTYVPARNTIFLSYALAWAEVIGADDIFIGVNALDYSGYPDCRPEYIAAYEQMANLATKAGVESGEKLKINAPLIQMSKSQIIRKGIELGVNYSLTHSCYDPFPSGEACGECDSCLLRLKGFRDAGVKDPVRYKNES

SEQ ID NO: 42274 - protein, 51 aa, Sneathiella sp.
  misc_feature (1)..(51): tr|A0A2G1Z1A5|A0A2G1Z1A5_9PROT Uncharacterized protein OS=Sneathiella sp. OX=1964365 GN=COB93_07900 PE=4 SV=1
MKTVVVCSGGMDSVVLTHLIAKEQDLARLISVSYGQRHVKEIDSAGAKGQG

SEQ ID NO: 42275 - protein, 196 aa, Sneathiella sp.
  misc_feature (1)..(196): tr|A0A2G1Z0Z5|A0A2G1Z0Z5_9PROT 7-cyano-7-deazaguanine s ynthase OS=Sneathiella sp. OX=1964365 GN=COB93_08650 PE =3 SV=1
MRAVVLASGGLDSTLLALLASEEGYEVFPLFVDFGQLAAKTELRHSIAAMEKNNLRKPVIADLNGFGELVPSGLTNSNLHIVDRAFTPGRNSLFLLSAASYAATIDANTIMIGLLDERFHLFPDQTKDYLEKAESFLSLAVGQSISIRAPLMAFSKQEVIAMAEAKNIGQTYSCHVGSDTPCGVCIACKEFDIGGV

SEQ ID NO: 42276 - protein, 220 aa, Snodgrassella alvi
  misc_feature (1)..(220): tr|A0A074VBR2|A0A074VBR2_9NEIS 7-cyano-7-deazaguanine s ynthase OS=Snodgrassella alvi SCGC AB-598-J21 OX=138536 7 GN=queC PE=3 SV=1
MKQYSKALVIFSGGQDSTTCLLQAIAAYGRENVQTITFQYGQRHAVELEKARWIAQDQGVAQTVMDLSLLQSITHNALMDKQQTIEAPAEGLPNTFVDGRNALFLLYAAIFAKGQGIHDVIAGVCETDFSGYPDCRNVFVQSMNVTLNLAMDYEFRLITPLMYLDKAQTWALADELGYLDYVRKHTHTCYDGIEGGCGKCPSCVLRERGLQAYLAQKTGV

SEQ ID NO: 42277 - protein, 220 aa, Snodgrassella alvi
  misc_feature (1)..(220): tr|A0A2N9X495|A0A2N9X495_9NEIS 7-cyano-7-deazaguanine s ynthase OS=Snodgrassella alvi OX=1196083 GN=queC PE=3 S V=1
MKQHAQALVIFSGGQDSTTCLLQAIATYGRENVQTITFQYGQRHAIELKKARWIAQDLGVAQTVMDLSLLQSITHNALMDEQQEIEAPAEGLPNTFVDGRNALFLLYAAIFAKGQNIHDVIAGVCETDFSGYPDCRNVFVQSMNVTLNLAMDYEFRLITPLMYLDKAQTWALADELGYLDYVCEHTHTCYNGVEGGCGECPSCVLRERGLQTYLAQKAVV

SEQ ID NO: 42278 - protein, 220 aa, Snodgrassella sp.
  misc_feature (1)..(220): tr|A0A1C4BLB1|A0A1C4BLB1_9NEIS 7-cyano-7-deazaguanine s ynthase OS=Snodgrassella sp. R-53583 OX=1798181 GN=queC PE=3 SV=1
MKQYAEALVIFSGGQDSTTCLLQAIATYGRENVQTITFQYGQRHAIELEKARWIAQDLGVAQTVIDLSLLQSITHNALMDEQQVVEAPTAGLPNTFVDGRNALFLLYAAIFAKGKGIHDVIAGVCETDFSGYPDCRNVFVQSMNVTLNLAMDYEFRLITPLMYLDKAQTWSLADELGYLDYVRNHTHTCYNGVEGGCGECPSCVLRERGLQTYLAQKTVV

SEQ ID NO: 42279 - protein, 185 aa, Snowella sp.
  misc_feature (1)..(185): tr|A0A2W7BGB7|A0A2W7BGB7_9CYAN 7-cyano-7-deazaguanine s ynthase OS=Snowella sp. OX=2164131 GN=queC PE=3 SV=1
MARIAEVLEISKHYIVDVNLGDWGGSSLTDRTINLPTDGIDPDIIPSTYVPGRNTVFIAIALSLAEAQGASSIYLGINAVDYSGYPDCRPAYLEAYQNLIALSSKVGIEGNSIQLIAPLVRNSKIDIVRQAIALGVPINETWSCYQGDIEPCGVCDSCRLRDEALIAAGYPELATAVGRRLHKLP

SEQ ID NO: 42280 - protein, 470 aa, Snowella sp.
  misc_feature (1)..(470): tr|A0A2W7B1X6|A0A2W7B1X6_9CYAN Uncharacterized protein OS=Snowella sp. OX=2164131 GN=DCF12_19960 PE=4 SV=1
MISTLDKTKTNIYEIDYTFEFSCIANNDGNVQFIDHRKNRKTTVEIIVDDKNFQYRVLQEFPSVVADLTDLAIAIHAADRLAVQPFDQDQKRILIVLPVRHPELLNKNSFKTKLEDLLGWATGSRWFFDFQKRTIPGRIVERQQTFSTHSQECEVTLWSGGLDAFAGLYTRLTTDPVRHFMLFGTGSNNSASALQKKVFKALQPIFPNRLNLCQVPIRFCGGEEHKKNKNTRARGVVFIMLGSACAYLMGKKILHLYENGIGAINLPYRKSAIGLDHSRSVHPLTLLRISELVSELLGEEFHIKNPFLFWTKAQMCEALAQTPMSDVISVTQSCDRRHRQQPTQCGYCSSCILRRQAIAASKIKDKTHYVISHGKPPVSDPKEYFLNMLCQVSTFRDLLNVSEDPKLQWEHLTQKFLLDDIVDRCAKNENLSLVEMRHHLLNLYKTYVAEWSDVESHLSVGLLHKLTNQS

SEQ ID NO: 42281 - protein, 231 aa, Sodalis glossinidius
  misc_feature (1)..(231): tr|A0A193QHM8|A0A193QHM8_SODGM 7-cyano-7-deazaguanine s ynthase OS=Sodalis glossinidius (strain morsitans) OX=3 43509 GN=queC PE=3 SV=1
MKRAVVVFSGGQDSTTCLIQALSQYDEVHCVTFDYGQRHRAEIDVARKLAMQLGARAHKVIDAGLLNALAVSSLTRDNITFPGYEDSAGGLPSTFVPGRNILFLTLAAIYAYQVEASAVITGVCETDFSGYPDCRDNFIKALNAAVNLGMARELSFVTPLMWLDKAETWALADYYHQLDRVRHDTLTCYNGIKGDGCGQCAACHLRTHGLAAYRAQPQAVMASLKAKTGLH

SEQ ID NO: 42282 - protein, 231 aa, Sodalis glossinidius; identical to SEQ ID NO: 42281
  misc_feature (1)..(231): sp|Q2NV74|QUEC_SODGM 7-cyano-7-deazaguanine synthase OS =Sodalis glossinidius (strain morsitans) OX=343509 GN=q ueC PE=3 SV=1

SEQ ID NO: 42283 - protein, 231 aa, Sodalis praecaptivus
  misc_feature (1)..(231): tr|W0I0K9|W0I0K9_9GAMM 7-cyano-7-deazaguanine synthase OS=Sodalis praecaptivus OX=1239307 GN=queC PE=3 SV=1
MKRAVVVFSGGQDSTTCLIQALNQYDEVHCVTFDYGQRHRAEITVARELAIQLGARAHKVIDAGLLNALAVSSLTRDNIPVPGYEDTPDGLPSTFVPGRNILFLTLAAIYAYQVEADAVITGVCETDFSGYPDCRDDFIKALNHAVNLGMARELQFVTPLMWLDKAETWALADYYHQLERVRQDTLTCYNGIKGDGCGQCAACHLRARGLAAYRAQPQAVMASLKAKTGLR

SEQ ID NO: 42284 - protein, 233 aa, Sodalis sp.
  misc_feature (1)..(233): tr|A0A4R1NA04|A0A4R1NA04_9GAMM 7-cyano-7-deazaguanine s ynthase OS=Sodalis sp. 159R OX=2529856 GN=queC PE=3 SV= 1
MKRAVVVFSGGQDSTTCLIQALTLYDEVHCITFDYGQRHRAEIDIARHLAQELGARVHKVIDAGLLNDLAISSLTRDNIPLPHYDDTAGDALPSTFVPGRNILFLTLASIYAYQVGAQTVITGVCETDFSGYPDCRDEFVQALNQAVKLGMARDIEFKTPLMWLNKAETWALADYYHQLDKIRHDTLTCYNGIKGDGCGECAACHLRARGLAEYQQDPERVAAEMKRKTGLMD

SEQ ID NO: 42285 - protein, 208 aa, Unknown
  misc_feature (1)..(208): tr|A0A151UJ76|A0A151UJ76_9GAMM 7-cyano-7-deazaguanine s ynthase (Fragment) OS=Sodalis-like endosymbiont of Proe chinophthirus fluctus OX=1462730 GN=BG74_08685 PE=3 SV= 1
MKRAVVVFSGGQDSTTCLIQALSQYDEVHCVTFDYGQRHRAEITVARELAMQLGARVHKVIDAGLLNTLAVSSLTRDSIPVPGYEEMPDGLPSTFVPGRNILFLTLASIYAYQVEAEAVITGVCETDFSGYPDCRDGFIKALNHAVNLGIARELHFVTPLMWLDKAETWALADYYHQLDRVRNDTQTCYNGIKGDGCGQCAACRLRAR

SEQ ID NO: 42286 - protein, 226 aa, Solemya elarraichensis
  misc_feature (1)..(226): tr|A0A1T2LAG5|A0A1T2LAG5_9GAMM 7-cyano-7-deazaguanine s ynthase OS=Solemya elarraichensis gill symbiont OX=1918 949 GN=queC PE=3 SV=1
MSEHGKKAVVLLSGGLDSATVLAIARHAGYDCYALSFDYGQRHSAELNAARKIAEEFNVRQHLVLPMALDAIGGSALTDEAIDVPETLAEGIPVTYVPARNTVFLSIALGWAEVLGARDIFIGVNAVDYSGYPDCRPEFIEAFEQLANLATKAGVEGDHFTVQAPLIEMSKSDIIHRGIELGVDYSKTVSCYQADEEGRACGVCDSCRLRKAGFERAGAEDSTNYQ

SEQ ID NO: 42287 - protein, 224 aa, Solemya pervernicosa
  misc_feature (1)..(224): tr|A0A1T2L4W4|A0A1T2L4W4_9GAMM 7-cyano-7-deazaguanine s ynthase OS=Solemya pervernicosa gill symbiont OX=642797 GN=queC PE=3 SV=1
MTRRAIVLVSGGLDSVTVLAIARELGYECYALSFDYGQRHEVELESARRVATLFGAVEHRVIRIDMGAIGGSALTDSSIDVPESPTEGIPVTYVPARNTVFLSFALGWAEVVGAHDIFIGVNAVDYSGYPDCRPEFIKAFERLAVLATKAGVEGEQFRVQAPLIDLSKADIIREGIRLGVDYSQTVSCYSADSSGRACGKCDSCRLRAVGFAEAGIEDPTHYRG

SEQ ID NO: 42288 - protein, 226 aa, Solemya velesiana
  misc_feature (1)..(226): tr|A0A1T2KTC7|A0A1T2KTC7_9GAMM 7-cyano-7-deazaguanine s ynthase OS=Solemya velesiana gill symbiont OX=1918948 G N=queC PE=3 SV=1
MNREPKRAVVLLSGGLDSATALAMARAEGYTCYALSMQYGQRHSTELDAARRVAQAQGVAEHIVVPLALDAFGGSALTDLDIDVPEESEEGIPVTYVPARNTIFLSLALGWAEVLGARDIFVGVNAVDYSGYPDCRPEFINAFENLANLATKAGMEGDRFHIHAPLIKMTKGEIIREGVRLGVDYGLTVSCYQADEQGRACGVCDSCRFRAQGFTEAGVEDPTPYQ

SEQ ID NO: 42289 - protein, 226 aa, Solemya velum
  misc_feature (1)..(226): tr|A0A0B0HAF2|A0A0B0HAF2_SOVGS 7-cyano-7-deazaguanine s ynthase OS=Solemya velum gill symbiont OX=2340 GN=queC PE=3 SV=1
MSEQKKRAVILLSGGLDSATVLAIAQHAGYDCYALSFDYGQRHNTELHAAKKIAQQFNVRQHLVLPMALDAIGGSALTDEAIDVPETLAEGIPVTYVPARNTVFLSIALGWAEVLGARDIFIGVNAVDYSGYPDCRPEFIEAFEQLANLATKAGVEGDHFSVQAPLIEMSKSDTIRRGIELGVDYSKTVSCYQADEEGRACGVCDSCRLRKAGFEQAGAGDPTNYQ

SEQ ID NO: 42290 - protein, 226 aa, Solemya velum
  misc_feature (1)..(226): tr|A0A1T2GB70|A0A1T2GB70_SOVGS 7-cyano-7-deazaguanine s ynthase OS=Solemya velum gill symbiont OX=2340 GN=queC PE=3 SV=1
MSEQKKRAVILLSGGLDSATVLAIAQHAGYDCYALSFDYGQRHNTELHAAKKIAQQFNVRQHLVLPMALDAIGGSALTDEAIDVPETLAEGIPVTYVPARNTVFLSIALGWAEVLGARDIFIGVNAVDYSGYPDCRPEFIEAFEQLANLATKAGVEGDHFSVQAPLIEMSKSDIIRRGIELGVDYSKTVSCYQADEEGRACGVCDSCRLRKAGFEQAGAGDPTNYQ

SEQ ID NO: 42291 - protein, 223 aa, Solibacillus sp.
  misc_feature (1)..(223): tr|A0A2D1SYZ1|A0A2D1SYZ1_9BACL 7-cyano-7-deazaguanine s ynthase OS=Solibacillus sp. R5-41 OX=2048654 GN=queC PE =3 SV=1
MIQDKALVVFSGGQDSTTCLFWAIEHFAQVEVVTFDYGQRHRLEIECAKEIANEIGINHHILDMSLLNQLTSNALTREEIKIEENSDGLPSTFVPGRNLLFLSFAGVLASQIGAKHIVTGVCETDFSGYPDCRDIFIKSLNVTLNLSMDRTFVIHTPLMWINKAQTWELADQLGVLEFVRERTLTCYNGIIANGCGECPACKLRKKGLEDYINAKSKFHDENI

SEQ ID NO: 42292 - protein, 223 aa, Solibacter usitatus
  misc_feature (1)..(223): tr|Q02CA1|Q02CA1_SOLUE 7-cyano-7-deazaguanine synthase OS=Solibacter usitatus (strain Ellin6076) OX=234267 GN= queC PE=3 SV=1
MPNAVCLLSGGLDSATCLALARREGYSCYALSFDYGQRHKVELDAAARVAQALGAERHLVVKIGLDVFGGSALTAAIDVPKGRSTGEMGAGIPITYVPARNTIFLSFALAWAEVLGSSDIFIGVNALDYSGYPDCRPEYIEAYERLANLATRAGVEGTTRMKIHTPLLHLSKAGIVKLGRELGLDFGLTFSCYDPGPGGLACGQCDACLLRRKGFDEAGIEDR

SEQ ID NO: 42293 - protein, 238 aa, Solimicrobium silvestre
  misc_feature (1)..(238): tr|A0A2S9H208|A0A2S9H208_9BURK 7-cyano-7-deazaguanine s ynthase OS=Solimicrobium silvestre OX=2099400 GN=queC P E=3 SV=1
MNSSALVLFSGGQDSTTCLAWALENYERVETLGFDYGQRHDIELVMRPILREKIAPLHPHWAERLGPDHLLDLSLISSISETAMTADIDIVMQENGLPNTFVPGRNLLFMTVAAALAYRRGIDVLVGGMCETDFSGYPDCRDDTMKALQVALNLGMNTRINLATPLMWLDKSQTWELAHKLGGTALIDLIRTETHTCYLGERGKKHDWGYGCETCPACLLRAKGYMEFIARNNIFTKK

SEQ ID NO: 42294 - protein, 223 aa, Solimonas aquatica
  misc_feature (1)..(223): tr|A0A1H9HHF0|A0A1H9HHF0_9GAMM 7-cyano-7-deazaguanine s ynthase OS=Solimonas aquatica OX=489703 GN=queC PE=3 SV =1
MNKKAVVLLSGGLDSATVLALAREQGYETYALSVSYGQRHVAELAAAQRVAAALGAVRHQTLHIDLDAVGGSALTDRSIAVPETPVTGIPITYVPARNTLFLSLSLGWAEVLGATDLFIGVNAVDYSGYPDCRPAFIDAFEQLANVATKAGVEGACFRIHAPLLKLSKAEIIREGLRLGLDYGLTVSCYQADEQGRACGRCDSCRLRAAGFAEAGIADPTPYR

SEQ ID NO: 42295 - protein, 223 aa, Solimonas fluminis
  misc_feature (1)..(223): tr|A0A2S5TDT4|A0A2S5TDT4_9GAMM 7-cyano-7-deazaguanine s ynthase OS=Solimonas fluminis OX=2086571 GN=queC PE=3 S V=1
MKKRAVVLLSGGLDSATVLAIAREQGYESYALSVSYGQRHVAELRAAERVVKALGAAGHQTLHVNLDAVGGSSLTDTSMAVPETPTTGIPSTYVPARNTLFLSMALGWAEVLEAQDLFIGVNAVDYSGYPDCRPAFIEAFEKLAGVATKAGVEGRPFRVHAPLLTLSKADIIREGLRLGVDYGLTVSCYQADEAGRACGRCDSCRLRREGFAAAGVPDPTPYR

SEQ ID NO: 42296 - protein, 223 aa, Solimonas sp.
  misc_feature (1)..(223): tr|A0A346N1Y1|A0A346N1Y1_9GAMM 7-cyano-7-deazaguanine s ynthase OS=Solimonas sp. K1W22B-7 OX=2303331 GN=queC PE =3 SV=1
MKKKAVVLLSGGLDSATVLAMAREQGYESYALSVSYGQRHVAELRAADRVVKALGAAGHQTLHVNLDAVGGSSLTDTRIAVPETPTTGIPSTYVPARNTLFLSMALGWAEVLEAQDLFIGVNAVDYSGYPDCRPAFIEAFEKLAGVATRAGVEGKPFRVHAPLLHLSKAEIIREGLRLGVDYGLTVSCYQADEAGRACGRCDSCRLRREGFAATGVADPTPYR

SEQ ID NO: 42297 - protein, 225 aa, Sorangium cellulosum
  misc_feature (1)..(225): tr|A0A2L0F5E4|A0A2L0F5E4_SORCE 7-cyano-7-deazaguanine s ynthase OS=Sorangium cellulosum OX=56 GN=exsB PE=3 SV=1
MQAPTIVLTTGGADSTTLLHVMHTRARVVPVFVDYGQRAAHREHQAAERQCAALGLSLRRFDMGAVGAAFRAEQQAKLHIPLPHRNLIVLSLATSYAAQIEAASIAIAVIRDDVDGYASASLGFLEAYRRLASTLGSVTIETPLIGFDKSAVLAEGVRLGVDFGHTYSCMLGYERHCGRCPQCKKRRAAFVAAGMPENPGFYLDDARAPEGGTAGAEGPPESPQG

SEQ ID NO: 42298 - protein, 237 aa, Sorangium cellulosum
  misc_feature (1)..(237): tr|A0A150QS92|A0A150QS92_SORCE 7-cyano-7-deazaguanine s ynthase OS=Sorangium cellulosum OX=56 GN=queC PE=3 SV=1
MLNKPKAVVLLSGGLDSTTTLAIAQSEGYDTHALTFRYGQRHEGEIEAARRVAQRFGGIQHVVAQIDLRVFGGSALTSDIAVPKGRSLDAIGNGIPVTYVPARNTIFLSFALAWAEVLGASDIFLGVNALDYSGYPDCRPEYIEAFERMANLATKSGVEGRQHLKIHTPLIHLTKAQIIQRGLALGVEYELTLTCYDPSAQGEACGRCDACLLRLKGFAESGLTDPAPYRVDARALA

SEQ ID NO: 42299 - protein, 230 aa, Spartobacteria bacterium
  misc_feature (1)..(230): tr|A0A3C0R465|A0A3C0R465_9BACT 7-cyano-7-deazaguanine s ynthase OS=Spartobacteria bacterium OX=2052183 GN=queC PE=3 SV=1
MKHAVVLLSGGLDSTTTLAIAIAQGYEVYSLSFDYGQRHNLELEAARRVADSLGVKEHRVVKIDMRLFGGSALTADVDVPKKRSEKEMAQGIPITYVPARNTIFLAHALAWAEVIGAGHIFLGVNAIDYSGYPDCRPEFIAMFETLANIGTKAGLEGRRFQIHAPLIKFSKADIIRKARELDVDLSLTHSCYDPTPDGLACGLCDSCQLRLKGFREAGLADPIQYAPVAP

SEQ ID NO: 42300 - protein, 233 aa, Spartobacteria bacterium
  misc_feature (1)..(233): tr|A0A2A2XX26|A0A2A2XX26_9BACT 7-cyano-7-deazaguanine s ynthase OS=Spartobacteria bacterium AMD-G4 OX=1982325 G N=queC PE=3 SV=1
MPKLLRKRVIVLCSGGMDSVVALHDAAEVHEVVAALSFHYGSKHNNREIPFAAYHAGLLQTPHLMIPLDFMERLFESRLLNSGESIPKGHYEEETMKQTVVPFRNGIMLAVAAGLAESRHAGGVVIAAHAGDHAIYPDCREDFMGAMADAIRLGTYADVELLRPFISMTKSEIARRGDELGVDFSKTWSCYVGGETHCGECGTCVERREAFLLARLKDPTKYLSYAPLPSKPL

SEQ ID NO: 42301 - protein, 338 aa, Sphaerisporangium album
  misc_feature (1)..(338): tr|A0A367ENC5|A0A367ENC5_9ACTN Uncharacterized protein OS=Sphaerisporangium album OX=509200 GN=DQ384_38100 PE= 4 SV=1
MDQVQSCARCPNTTRNPTVRILPSGLCAICHWWAESPHASIRRRELQHVRALAGGGRGEVDALVGLSGGKDSTATLVRVLKMGFTPVAITFDTGYYPAHITQRAARVAAQLGVRHEVVDLRPHIQPEDRASYVLTAELYDREETPLLAERFRELYLLGRERYSVKQREPMAYVRTCQLCRRLVVPAYHREAARHGARVFFLGTNEWVGLSQNPGNGRYTFSAVRRLQPPGAHEPVLVVHLPFLLGAGLEDTVSVLREVGWEPPAGERVVESSANSCLLGRVAEAKAARLLGFHPDTVRLAREVTCGFLPREEAERALAAPHEATGSVRQVLTGAGILS

SEQ ID NO: 42302 - protein, 237 aa, Sphaerisporangium sp.
  misc_feature (1)..(237): tr|A0A366LRJ1|A0A366LRJ1_9ACTN 7-cyano-7-deazaguanine s ynthase OS=Sphaerisporangium sp. LHW63015 OX=2248750 GN =queC PE=3 SV=1
MITTQRQAGHAVVVSSGGLDSTTLAYWLQAKGTGRLTLLGIDYGQRHRVELSRLTAFAQALDAECVILDLRGLKPVLSGTALTDDQATVPAGHYTDHSMRATVVPNRNALLLDVAVALAISVKADTVAFGAHAGDHPIYPDCRPSFLYAYRRMAAVASEGLTVSGFQVVAPFMDVTKADIVRLGADLGVPFADTWSCYVGGARHCGRCGTCTERKEAFALARVPDPTDYETRETPCT

SEQ ID NO: 42303 - protein, 236 aa, Sphaerisporangium sp.
  misc_feature (1)..(236): tr|A0A2W2H3K3|A0A2W2H3K3_9ACTN 7-cyano-7-deazaguanine s ynthase OS=Sphaerisporangium sp. 7K107 OX=2070365 GN=qu eC PE=3 SV=1
MTTQRQAGHAIVVSSGGLDSTTLAYWLQANGTGRLTLLGIDYGQRHRVELSRLTTLAQALDAECVILDLRRLRPVLSGTALIDEQATVPAGHYTDGSMRATVVPNRNALLLDIAVALAISVKADTVAFGAHAGDHPIYPDCRPSFLYAYRRMAAVANEGLTVSGFQVIAPFMDMTKADIVRLGADLGVPFADTWSCYAGGARHCGRCGTCTERKEAFVLARVPDPTDYESPETPCT

SEQ ID NO: 42304 - protein, 230 aa, Sphaerobacter thermophilus
  misc_feature (1)..(230): tr|D1C6Z9|D1C6Z9_SPHTD 7-cyano-7-deazaguanine synthase OS=Sphaerobacter thermophilus (strain DSM 20745 / S 602 2) OX=479434 GN=queC PE=3 SV=1
MQAQANERPGAVVLLSGGVDSTTVAYLARASGYAIYALSFDYGQRHRRELDAAAAVARAVEAVEHRVVRIDLAGIGGSSLTGHGEIPTGGVTDGIPSTWVPARNHIFLAVASGYAEVVGARAIYIGVSQVDYSGYPDCRAEFLEAYQRAADLASKQFVEEGRSIPVVAPLLHLSKAGTVRLGLALGVDYGLTWSCYQGGESPCGVCDSCRLRAEAFAAAGAVDPLVGRPR

SEQ ID NO: 42305 - protein, 250 aa, Sphaerochaeta sp.
  misc_feature (1)..(250): tr|A0A3C1LQJ9|A0A3C1LQJ9_9SPIO ATP-dependent sacrificia l sulfur transferase LarE OS=Sphaerochaeta sp. OX=19726 42 GN=larE PE=4 SV=1
MTLNEFFKENPKVAIAFSGGVDSSYLLYEAKKCNAEVIAYYVSSQFQPGFELEDAKRIAQYTDCEMKILEVDVLCDPIVASNPKDRCYHCKRRIFSTILEAAAKDGFTTILDGTNYSDDIADRPGYRALGEMKVLSPLRLCELTKAEIRKRSREAGLFTWNKSAYACLATRIPTGDQITAEKLKMTENAEELLFSMGFDDFRVRYLDGYARIQVRASQLAKLMDYRDKIKQELGKDYKGVLLDLETRDEQ

SEQ ID NO: 42306 - protein, 225 aa, Sphaerospermopsis kisseleviana
  misc_feature (1)..(225): tr|A0A1Z4UVU0|A0A1Z4UVU0_9CYAN 7-cyano-7-deazaguanine s ynthase OS=Sphaerospermopsis kisseleviana NIES-73 OX=19 73480 GN=queC PE=3 SV=1
MMKAVILLSGGLDSSTVLYQARADGCECYAISFDYQQRHRRELQSAMFVAQSVGVVQHQIVNFDLRLWGGSALTDEAIALPQARSLDEMSQSIPVTYVPARNTIFLSFALGYAETICAQRVYIGVNALDYSGYPDCRPDYIQAMQEVFRLGTKQGREGQPIDIIAPLINLKKTEIIQLGNQLDVPWELTWSCYAGGDQACGVCDSCRLRLAAFAQLGLKDPVDYL

SEQ ID NO: 42307 - protein, 225 aa, Sphaerospermopsis reniformis
  misc_feature (1)..(225): tr|A0A479ZWH6|A0A479ZWH6_9CYAN 7-cyano-7-deazaguanine s ynthase OS=Sphaerospermopsis reniformis OX=531300 GN=qu eC PE=3 SV=1
MMKAVILLSGGLDSSTVLYQARADGCECYAISFDYQQRHRRELQSAMFVAQSVGVVQHQIVNFDLRLWGGSALTDEAIALPQARSLDEMSQSIPVTYVPARNTIFLSFALGYAETIGAQRVYIGVNALDYSGYPDCRPDYIQAMQEVFRLGTKQGREGQPIDIIAPLINLKKTEIIQLGNQLDVPWELTWSCYAGGDQACGVCDSCRLRLAAFAQLGLKDPVDYL

SEQ ID NO: 42308 - protein, 240 aa, Sphaerotilus hippei
  misc_feature (1)..(240): tr|A0A318GY31|A0A318GY31_9BURK 7-cyano-7-deazaguanine s ynthase OS=Sphaerotilus hippei OX=744406 GN=queC PE=3 S V=1
MTDPRTALVLFSGGQDSTTCLAWALERHARVETLGFDYGQRHRIELDCRLTVLDELRARFPHWADRLGDDHVLDLSLIGQISDTALTSERAIELQADGLPNTFVPGRNLLFLGFAATLAYRRSASVLVGGMCETDYSGYPDCRDNTLKALQVALSLGLDAPMTVETPLMFLTKAQTWTLAHELGGDALVDLMIEHTHTCYLGERGRRHAWGHGCGHCPACALRASGHATWIGTRPGPAAG

SEQ ID NO: 42309 - protein, 241 aa, Sphaerotilus natans
  misc_feature (1)..(241): tr|A0A059KG37|A0A059KG37_9BURK 7-cyano-7-deazaguanine s ynthase OS=Sphaerotilus natans subsp. natans DSM 6575 O X=1286631 GN=queC PE=3 SV=1
MSALTNAARDPRTALVLFSGGQDSTTCLAWALERFQRVETLGFDYGQRHHIEMDCRLTVREELRAAFPHWAARLGEDHVLDLSLIGQISDTALTTEREIELQANGLPNTFVPGRNLLFLGFAATLAYRRGASVLVGGMCETDYSGYPDCRDNTMKALQVALSLGLDTAMTLETPLMFLTKAQTWDLAEQLGGQTLVELIVEHTHTCYLGERGARHPWGHGCGHCPACELRRSGHAAWLADA

SEQ ID NO: 42310 - protein, 241 aa, Sphaerotilus natans
  misc_feature (1)..(241): tr|A0A5C1Q506|A0A5C1Q506_9BURK 7-cyano-7-deazaguanine s ynthase OS=Sphaerotilus natans subsp. sulfidivorans OX= 639200 GN=queC PE=3 SV=1
MSAVTHAARDPRTALVLFSGGQDSTTCLAWALERFQRVETLGFDYGQRHHIEMDCRLTVREELQAAFPHWAARLGEDHVLDLSLIGQISDTALTTEREIELQANGLPNTFVPGRNLLFLGFAATLAYRRGASVLVGGMCETDYSGYPDCRDNTMKALQVALSLGLDTPMTLETPLMFLTKAQTWDLAEQLGGQTLVELIVEHTHTCYLGERGARHPWGHGCGHCPACELRRAGHAAWLADL

SEQ ID NO: 42311 - protein, 369 aa, Sphingobacteriaceae bacterium
  misc_feature (1)..(369): tr|A0A2A3U8L4|A0A2A3U8L4_9SPHI ExsB family protein OS=S phingobacteriaceae bacterium OX=2021370 GN=CNR22_06945 PE=4 SV=1
MLKCSNCILTSEDSDVFALDEKGICNYCNYYYSSVNKLGDAAQRKKWLDTKVNEIKLAGKGKAYDCILGVSGGVDSSYLAYWTKQQGLRPLMVHFDNGWNSELAVKNIESLCDRLGYELQTHVINWEEFKELQLAYLKAGVVDIEAITDHAIYSTILNIAQKYKIKYTINGFNFATEAIMPKGWAFDKMDWKNIVDIYSKYGSGKPLKTFPHVTFWKKLYYHWFLKLESIQVLNYLNYNKDQAVEVITKEVGWRNYGGKHHESIFTKFYQTYILPQKFKIDKRRAHLATLICSGQVTKEQALLELQKPPYNPEEILKEREYVLKKLGLSEEAFEKIMQEKPRSHFEFKTEKQMWSNYFKFLKILKPWKK

SEQ ID NO: 42312 - protein, 175 aa, Sphingobacteriaceae bacterium
  misc_feature (1)..(175): tr|A0A4Q3E8M1|A0A4Q3E8M1_9SPHI 7-cyano-7-deazaguanine s ynthase (Fragment) OS=Sphingobacteriaceae bacterium OX= 2021370 GN=EOP45_18345 PE=3 SV=1
MSKTAILLSGGIDSIALTYWKKPDVAITVNYGQAPAETEIRTSATIAKALNIPHYIVTADCSKLGSGDLLNQAALSVSPSSEWWPYRNQLLVTLACMKGIALGIGELMLASVKSDGFHKDGTAQFYKLMSQLSAGALDVAICPMNPAAVAEGFQFVPVLPGRNVIACGSHHPLLR

SEQ ID NO: 42313 - protein, 202 aa, Sphingobacterium daejeonense
  misc_feature (1)..(202): tr|A0A4U9JA23|A0A4U9JA23_9SPHI 7-cyano-7-deazaguanine s ynthase OS=Sphingobacterium daejeonense OX=371142 GN=NC TC13534_00240 PE=3 SV=1
MSTGILLSGGIDSIALAYLKRPKYAFTINYGQIPAEAEFLASAAICNELNIIHHRINIDCSSLGSGDLLDQDSIEDSPSSEWWPYRNQLLVTLAVMKAISLGVKELMVGSVKSDGFHKDGTEKFYQLLNDLSSYQEGGVSITSPAIHYTSAELVRASNVPDNLLLWAHSCHKSNSPCGNCRGCNKYLQVMYEIKGGAYESYT

SEQ ID NO: 42314 - protein, 198 aa, Sphingobacterium sp.
  misc_feature (1)..(198): tr|A0A1R4J2H2|A0A1R4J2H2_9SPHI 7-cyano-7-deazaguanine s ynthase OS=Sphingobacterium sp. JB170 OX=1434842 GN=FM1 07_04915 PE=3 SV=1
MEPIKKAILLSGGMDSICLSFGIKPEIAYTINYGQNVAEREIYVSKHVCEFLKIEHKIIEVDCRSLGSGSLANNINHELAPSPEWWPYRNQLLITLALMQGIKDDITELHLALVKSDSFHKDGTEAFYKLINDLTSYQEGSIKVCCESIGYYTHELAKMYKVPVELLSLAHSCHTSNIACGKCSGCKKNLRVRYELNI

SEQ ID NO: 42315 - protein, 225 aa, Sphingobacterium sp.
  misc_feature (1)..(225): tr|A0A349VWE1|A0A349VWE1_9SPHI 7-cyano-7-deazaguanine s ynthase OS=Sphingobacterium sp. OX=341027 GN=queC PE=3 SV=1
MPNSVLNSEKAIVVFSGGQDSTTCLFYAKRHFKEVELVTFNYGQRHNTEIEVASKIAKDQGLKHHILDMSLLSQLTPNALTKHDMKIETGEDGIPNTFVPARNLLFLSFAGALAYQVNAKHIITGVCETDFSGYPDCRDSFIKSMNVTLSLSMDRDFVIHTPLMWLDKTQPWELSDELGVLDYVRHNTLTCYNGIIGDGCGECPACKLRQRGLHQYLEQKGDASL

SEQ ID NO: 42316 - protein, 198 aa, Sphingobacterium spiritivorum
  misc_feature (1)..(198): tr|D7VTP5|D7VTP5_9SPHI 7-cyano-7-deazaguanine synthase OS=Sphingobacterium spiritivorum ATCC 33861 OX=525373 G N=HMPREF0766_14365 PE=3 SV=1
MESLKQGLLLSGGVDSICLAYGLKPDIAYTINYGQIPASREIYVSRYICNLLRIQHKVIEVNCKSLGSGILINEERLDISPSQEWWPYRNQLLITLAAMQAIKDKIGVLHLASVKSDSFHKDGTPQFYDLINELVKYQEGNISIVCESTGYYSHELVKKYNVPLEIIAFAHSCHISNTACGQCPGCKKQIKVRHELSI

SEQ ID NO: 42317 - protein, 230 aa, Sphingobium algicola
  misc_feature (1)..(230): tr|A0A5J5HJT5|A0A5J5HJT5_9SPHN 7-cyano-7-deazaguanine s ynthase QueC OS=Sphingobium algicola OX=2048546 GN=queC PE=4 SV=1
MVANEGKFAVVLLSGGLDSMVAGGLAREAGYRIFALSIDYNQRHRVELRAAARIAESLNAIRHIVLPLDLTAFGGSALTADIAVPKSGVGEEIPVTYVPARNTIFLSLTLGLAEVAGASDIFIGVNALDYSGYPDCRPEFIDAFQTMATLATKAGVEGHPIRIQTPLQYMSKADIAREADRLGLDAGLSWSCYDPTPDNKHCGLCDSCRLRSKGYEEAGLPDPTIYAARP

SEQ ID NO: 42318 - protein, 235 aa, Sphingobium algorifonticola
  misc_feature (1)..(235): tr|A0A437JBL8|A0A437JBL8_9SPHN 7-cyano-7-deazaguanine s ynthase OS=Sphingobium algorifonticola OX=2008318 GN=qu eC PE=3 SV=1
MPSSSRSDTDNSFAVVLLSGGLDSMVAAGLAREAGHRLFALTIDYNQRHRVELQAAARVAKALNVLSHIVLPLDLTAFGGSALTADIAVPKGGVGNDIPVTYVPARNTIFLSLTLGFAEVTGARDIFIGVNALDYSGYPDCRPAFIAAFEAMAALATKAGVEGHAVRINAPLQHMTKADIVREADRLGLDAGMSWSCYDPTPDGLHCGLCDSCRLRAKGFVEAGLPDPTRYAVKP

SEQ ID NO: 42319 - protein, 230 aa, Sphingobium amiense
  misc_feature (1)..(230): tr|A0A494WDH4|A0A494WDH4_9SPHN 7-cyano-7-deazaguanine s ynthase OS=Sphingobium amiense OX=135719 GN=queC PE=3 S V=1
MVAKETKFAVVLLSGGLDSMVAGGLAREAGYRILALSIDYNQRHRVELRAAARVAESLNAMRHIVLPLDLTAFGGSALTADIAVPKGGVGPEIPVTYVPARNTIFLSLTLGLAEVAGASDIFIGVNALDYSGYPDCRPEFIDAFQKMATLATKAGVEGHPIRINTPLQYMSKADIVREANRLGMDAGISWSCYDPTPDGKHCGLCDSCRLRAKGFDEAGLPDPTVYATRP

SEQ ID NO: 42320 - protein, 230 aa, Sphingobium baderi
  misc_feature (1)..(230): tr|T0GN84|T0GN84_9SPHN 7-cyano-7-deazaguanine synthase OS=Sphingobium baderi LL03 OX=1114964 GN=queC PE=3 SV=1
MAENNGKFAVVLLSGGLDSMVAGALAREAGFHLLALTIDYNQRHRVELRAASRIAKALNAMSHIVLPLDLTAFGGSALTADIAVPKGGVGADIPITYVPARNTIFLSLTLGLAEAAGANDIFIGVNALDYSGYPDCRAEFIEAFEKMAALATKAGVEGNPIRIKTPLQHMSKADIVREADRLGLDAGMSWSCYDPTPDGKHCGLCDSCRLRAKGFEEAGLPDPTGYATRP

SEQ ID NO: 42321 - protein, 230 aa, Sphingobium baderi
  misc_feature (1)..(230): tr|A0A0S3EXF9|A0A0S3EXF9_9SPHN 7-cyano-7-deazaguanine s ynthase OS=Sphingobium baderi OX=1332080 GN=queC PE=3 S V=1
MVANKGKFAVVLLSGGLDSMVAGGLAREAGYHVLALTIDYNQRHRVELRAAARIAKALNAMSHIVLPLDLTAFGGSALTADIAVPKGGVGADIPVTYVPARNAIFLSLTLGLAEAAGANDVFIGVNALDYSGYPDCRPEFIDAFQKMATLATKAGVEGKPVRINTPLQHMSKADIVREAHRLGLDAGMSWSCYDPAPNGQHCGLCDSCRLRAKGFQEAGLTDPTHYATRP

SEQ ID NO: 42322 - protein, 230 aa, Sphingobium barthaii
  misc_feature (1)..(230): tr|A0A4R6FIT1|A0A4R6FIT1_9SPHN 7-cyano-7-deazaguanine s ynthase OS=Sphingobium barthaii OX=1054037 GN=queC PE=3 SV=1
MVAHNGKFAVVLLSGGLDSMVAGGLAREAGYRLFALSIDYNQRHRLELQAAVRVASALNAISHIVLPLDLTAFGGSALTADIAVPKGGVGDGIPVTYVPARNTIFLSLTLGLAEVVGANDVFIGVNALDYSGYPDCRPEFIDAFQKMAALATKAGVEGHPIRINAPLQHMSKADIVREADRLGLDAGLSWSCYDPTPDGSHCGLCDSCRLRSKGFVEAGLPDPTIYAKKP

SEQ ID NO: 42323 - protein, 230 aa, Sphingobium chinhatense
  misc_feature (1)..(230): tr|W1KMG3|W1KMG3_9SPHN 7-cyano-7-deazaguanine synthase OS=Sphingobium chinhatense IP26 OX=1346790 GN=queC PE=3 SV=1
MVAHNGKFAVVLLSGGLDSMVAGGLAREAGYRLFALSIDYNQRHRLELQAAGRVATALNAISHIVLPLDLTAFGGSALTADIAVPKGGVGAGIPITYVPARNTIFLSLTLGLAEVAGANDVFIGVNALDYSGYPDCRPEFIDAFQKMAALATKAGVEGHPIRINAPLQHMSKADIVREAYRLGLDTGLSWSCYDPTPDGRHCGLCDSCRLRSKGFVEAGLPDPTVYAVKP

SEQ ID NO: 42324 - protein, 230 aa, Sphingobium chlorophenolicum
  misc_feature (1)..(230): tr|A0A081RGL3|A0A081RGL3_SPHCR 7-cyano-7-deazaguanine s ynthase OS=Sphingobium chlorophenolicum OX=46429 GN=que C PE=3 SV=1
MVANSGKFAVVLLSGGLDSMVAGGLAREAGYRVLALSIDYNQRHRLELRAAGRVAAALNAISHIVLPLDLTAFGGSALTADIAVPKGGVGPGIPVTYVPARNTIFLSLTLGLAEVAGANDVFIGVNALDYSGYPDCRPEFIDAFQKMAALATKAGVEGHPIRINAPLQHMSKADIVREAHRLGLDAGLSWSCYDPTPDGKHCGQCDSCRLRSKGFVEAGLPDPTIYAVKP

SEQ ID NO: 42325 - protein, 237 aa, Sphingobium chlorophenolicum
  misc_feature (1)..(237): tr|F6EUF0|F6EUF0_SPHCR 7-cyano-7-deazaguanine synthase OS=Sphingobium chlorophenolicum L-1 OX=690566 GN=queC P E=3 SV=1
MSNADASALVVFSGGQDSATCLAWALNRFDRVETIGFRYGQRHEIELAVRNPLREGIADAFPNWAPRLGPDRIIDLAVLGEVSESALTSDIDIGMRDDGLPTTFVPGRNLIFLTFAAITAYQRGLKHVVTGVCETDYSGYPDCRDDTIKALQAALNLGMGSHLVLDTPLMWIDKAATWRLAAELGGSALVDIIREHSHSCYLGDRAHRHDWGYGCGSCPACDLRANGWRIFTEGCSA

SEQ ID NO: 42326 - protein, 230 aa, Sphingobium chungbukense
  misc_feature (1)..(230): tr|A0A0M3ATD9|A0A0M3ATD9_9SPHN 7-cyano-7-deazaguanine s ynthase OS=Sphingobium chungbukense OX=56193 GN=queC PE =3 SV=1
MVANSGKFAVVLLSGGLDSMVAGGLAREAGYHVFALSIDYNQRHRLELQAAGRIASALNAISHIVLPLDLTAFGGSALTADIAVPKGGVGPGIPVTYVPARNTIFLSLTLGLAEVSGASDVFIGVNALDYSGYPDCRPEFIEAFQKMAALATKAGVEGHPIRINAPLQHMSKADIVREAHRLGLDAGLSWSCYDPTPDGKHCGQCDSCRLRSKGFVEAGLPDPTIYAVKP

SEQ ID NO: 42327 - protein, 211 aa, Sphingobium cloacae
  misc_feature (1)..(211): tr|A0A1E1F296|A0A1E1F296_9SPHN 7-cyano-7-deazaguanine s ynthase OS=Sphingobium cloacae OX=120107 GN=queC PE=3 S V=1
MVAGGLAREAGYHVLALTIDYNQRHRVELQAAARIARALNAMSHIVLPLDLTAFGGSALTADIAVPKGGVGADIPVTYVPARNTIFLALTLGLAEASGANEVFIGVNALDYSGYPDCRPEFIDAFQKMAALATKAGVEGHPIRINTPLQHMSKADIAREADRLGLDAGMSWSCYDPTPDGRHCGLCDSCRLRAKGFAEAGLPDPTRYATRP

SEQ ID NO: 42328 - protein, 230 aa, Sphingobium cupriresistens
  misc_feature (1)..(230): tr|A0A4Q4JM56|A0A4Q4JM56_9SPHN 7-cyano-7-deazaguanine s ynthase OS=Sphingobium cupriresistens OX=1132417 GN=que C PE=3 SV=1
MVANNGKFAVVLLSGGLDSMVAGGLAREQGYRILALSIDYNQRHRVELRAASRVAEALNAIRHIVLPLDLTAFGGSALTADIAVPKSGVGDQIPVTYVPARNAIFLSLTLGLAEVAGASDIFIGVNALDYSGYPDCRPEFIDAFQKMATLATKAGVEGHPIRIQTPLQYMSKADIAREADRLGLDAGISWSCYDPTPDGKHCGLCDSCRLRSKGYQEAGLPDPTIYAVQP

SEQ ID NO: 42329 - protein, 230 aa, Sphingobium czechense; identical to SEQ ID NO: 42328
  misc_feature (1)..(230): tr|A0A0J7Y015|A0A0J7Y015_9SPHN 7-cyano-7-deazaguanine s ynthase OS=Sphingobium czechense LL01 OX=1420583 GN=que C PE=3 SV=1

SEQ ID NO: 42330 - protein, 211 aa, Sphingobium faniae
  misc_feature (1)..(211): tr|A0A1G4UH82|A0A1G4UH82_9SPHN 7-cyano-7-deazaguanine s ynthase OS=Sphingobium faniae OX=570446 GN=queC PE=3 SV =1
MVAGGLAREAGYEVVALTIDYNQRHRVELDAASRIAKALNAASHIVLPLNLAAFGGSALTADIAVPKGGVGADIPVTYVPARNAIFLALTLGLAEASGANDVFIGVNALDYSGYPDCRPEFIDAFQKMATLATKAGVEGHPIRINTPLQHMSKADIAREADRLGLDAGMSWSCYDPTPDGRHCGLCDSCRLRAKGFAEAGLPDPTRYAIRP

SEQ ID NO: 42331 - protein, 616 aa, Sphingobium faniae
  misc_feature (1)..(616): tr|A0A1G4TIV0|A0A1G4TIV0_9SPHN 7-cyano-7-deazaguanine s ynthase OS=Sphingobium faniae OX=570446 GN=SAMN02927924 _03044 PE=3 SV=1
MQFEFACGGVDFLLPAQGDRRAMDVQGAARNINLRIADISKALVSNIPDVLLDLLEVAAYVYCADQQTRRGSELLTDYGAGWRRRMVFQIPVRSHIIWQREEVREGLENMLGFLSDDHYTFEFVPAKSPLAASEAYFSDLTDRTDQPDEIALFSGGMDSFAGVIEAQAEGKKMVLVGHHAASKIFNIQKQLIEALNQRASGPRMFFVPVNITNTGSDPVEYTQRTRSFLFATLGVVVARMFGKDEITFYENGVVSLNIPIAADVLGARATRTTHPRVIRGFETFFSSILEREINVRTPFQWLTKTDVARKIDEHSGADLLAKTNSCTRPRAMTKKQPHCGVCSQCIDRRFAVLAAGLGEVESADLYRVDLLTGDRTHDRDVRMAAAYVKFFRDFGDVPKDRFLAKYTEIVSAIDQFTDTPRHEAPDRIYDMYLRHHHDVMAVLEGAAQTNRSELIRGTLPPGSLLAMLHNRSRIEVCEPSNYQQDAKEFVDRLSAPVLEFAVDAKAHAIRFRGDVVLDGKNFELFNALVAPFRQGKSEGEDVPFVSAPKLAAELGITEQSVRQQVGRLREAVTEQLVVGQGLPLDRKSLIESQAGNGYRINPQLRELSLGDLLQQE

SEQ ID NO: 42332 - protein, 230 aa, Sphingobium francense
  misc_feature (1)..(230): tr|A0A4Q4J8Z8|A0A4Q4J8Z8_9SPHN 7-cyano-7-deazaguanine s ynthase OS=Sphingobium francense OX=332057 GN=queC PE=3 SV=1
MVAHNGKFAVVLLSGGLDSMVAGGLAREAGYRLFALSIDYNQRHRLELQAAGRVAAALNAISHIVLPLDLTAFGGSALTADIAVPKGGVGAGIPITYVPARNTIFLSLTLGLAEVAGANDVFIGVNALDYSGYPDCRPEFIDAFQKMAALATKAGVEGHPIRINAPLQHMSKADIVREAYRLGLDTGLSWSCYDPTPDGRHCGLCDSCRLRSKGFVEAGLPDPTVYAVKP

SEQ ID NO: 42333 - protein, 237 aa, Sphingobium fuliginis
  misc_feature (1)..(237): tr|A0A4Q4ITB3|A0A4Q4ITB3_SPHSA 7-cyano-7-deazaguanine s ynthase OS=Sphingobium fuliginis (strain ATCC 27551) OX =336203 GN=queC PE=3 SV=1
MSSADGSALVLFSGGQDSATCLAWALDRFNHVETIGFDYGQRHRVELEVRDRLRAGMMELQADWRTKLGTDHMIALAALGQISDTSLTTGVEIAMAASGLPNTFVPGRNLLFLTFAAAVAYRRGIKHIVTGVCETDYSGYPDCRDDTIKALQVALNLGMEQRFVLHTPLMWIDKAATWSLAHALGGPDLVNLVRVESHTCYLGDRGTTHEWGAGCGHCPACELRRAGWQEFSARLDT

SEQ ID NO: 42334 - protein, 230 aa, Sphingobium fuliginis
  misc_feature (1)..(230): tr|A0A292ZJR6|A0A292ZJR6_SPHSA 7-cyano-7-deazaguanine s ynthase OS=Sphingobium fuliginis (strain ATCC 27551) OX =336203 GN=queC PE=3 SV=1
MVAHNGKFAVVLLSGGLDSMVAGGLAREAGYRLFALSIDYNQRHRLELQAAGRVASALNAISHIVLPLDLTAFGGSALTADIAVPKGGVGTGIPVTYVPARNTIFLSLTLGLAEVAGANDVFIGVNALDYSGYPDCRPEFIDAFQKMAALATKAGVEGNPVRINAPLQHMSKADIVREAYRLGLDTGLSWSCYDPTPDGRHCGLCDSCRLRSKGFVEAGLPDPTDYAVKP

SEQ ID NO: 42335 - protein, 230 aa, Sphingobium herbicidovorans
  misc_feature (1)..(230): tr|A0A086P6T4|A0A086P6T4_SPHHM 7-cyano-7-deazaguanine s ynthase OS=Sphingobium herbicidovorans (strain ATCC 700 291 / DSM 11019 / NBRC 16415 / MH) OX=1219045 GN=queC P E=3 SV=1
MAANNGKFAVVLLSGGLDSMVAGGLAREAGYRIFALTIDYNQRHRVELGAAARVASALGALRHIILPLDLTAFGGSALTADISVPKGGVGPGIPNTYVPARNTIFLSLTLGLAEVSGANDVFIGVNALDYSGYPDCRPEFIDAFQKMAALATKAGVEGHPLRINAPLQHMSKADIVREAHRLGLDAGMSWSCYDPAPGDLHCGLCDSCRLRSKGFEEAGLPDPTRYATKP

SEQ ID NO: 42336 - protein, 230 aa, Sphingobium hydrophobicum
  misc_feature (1)..(230): tr|A0A249MQG5|A0A249MQG5_9SPHN 7-cyano-7-deazaguanine s ynthase OS=Sphingobium hydrophobicum OX=1673076 GN=queC PE=3 SV=1
MGSNERKFAVVLLSGGLDSMVAGGLAREAGYHLLALSIDYNQRHRVELRAAGRVAQALNAMRHIVLPLDLTAFGGSALTADIAVPKGGVGDDIPVTYVPARNTIFLSLTLGLAEVAGASDIFIGVNALDYSGYPDCRPEFIDAFQTMAALATKAGVEGHPIRINAPLQHMSKADIVREAHRLGLDAGVSWSCYDPTPDGKHCGLCDSCRLRSKGFEEAGLPDPTIYAARP

SEQ ID NO: 42337 - protein, 230 aa, Sphingobium indicum; identical to SEQ ID NO: 42332
  misc_feature (1)..(230): tr|A0A1L5BR58|A0A1L5BR58_SPHIB 7-cyano-7-deazaguanine s ynthase OS=Sphingobium indicum (strain DSM 16412 / CCM 7286 / MTCC 6364 / B90A) OX=861109 GN=queC PE=3 SV=1

SEQ ID NO: 42338 - protein, 230 aa, Sphingobium japonicum; identical to SEQ ID NO: 42332
  misc_feature (1)..(230): tr|D4Z5L4|D4Z5L4_SPHJU 7-cyano-7-deazaguanine synthase OS=Sphingobium japonicum (strain DSM 16413 / CCM 7287 / MTCC 6362 / UT26 / NBRC 101211 / UT26S) OX=452662 GN=e xsB PE=3 SV=1

SEQ ID NO: 42339 - protein, 237 aa, Sphingobium lactosutens
  misc_feature (1)..(237): tr|T0J4B8|T0J4B8_9SPHN 7-cyano-7-deazaguanine synthase OS=Sphingobium lactosutens DS20 OX=1331060 GN=queC PE=3 SV=1
MSSADGSALVLFSGGQDSATCLAWALDRFNHVETIGFDYGQRHRVELEVRDRLRAGMMELQADWRTKLGTDHMIALAALGQISDTSLTTGVEIAMAASGLPNTFVPGRNLLFLTFAAAVAYRRGIKHIVTGVCETDYSGYPDCRDDTIKALQVALNLGMEQRSVLHTPLMWIDKAATWSLAHALGGPDLVNLVRVESHTCYLGDRGTTHEWGAGCGHCPACELRRAGWQEFSARLDT

SEQ ID NO: 42340 - protein, 233 aa, Sphingobium lactosutens
  misc_feature (1)..(233): tr|T0IFQ5|T0IFQ5_9SPHN 7-cyano-7-deazaguanine synthase OS=Sphingobium lactosutens DS20 OX=1331060 GN=queC PE=3 SV=1
MVAGQDKFAVVLLSGGLDSMVAGALAREAGFRIFALSIDYNQRHRVELRAAARVAQALNAIRHIVLPLDLTAFGGSALTADIAVPKSGVGGDIPVTYVPARNTIFLSLTLGLAEVAGASDIFIGVNALDYSGYPDCRPEFIDAFQKMATLATKAGVEGHPIRINTPLQYMTKADIAREADRLGLDAGISWSCYDPTPDGKHCGLCDSCRLRSKGYQEAGLPDPTIYAVQPPKA

SEQ ID NO: 42341 - protein, 230 aa, Sphingobium limneticum; identical to SEQ ID NO: 42317
  misc_feature (1)..(230): tr|A0A5J5HF73|A0A5J5HF73_9SPHN 7-cyano-7-deazaguanine s ynthase QueC OS=Sphingobium limneticum OX=1007511 GN=qu eC PE=4 SV=1

SEQ ID NO: 42342 - protein, 230 aa, Sphingobium paulinellae; identical to SEQ ID NO: 42317
  misc_feature (1)..(230): tr|A0A5J5I633|A0A5J5I633_9SPHN 7-cyano-7-deazaguanine s ynthase QueC OS=Sphingobium paulinellae OX=2048545 GN=q ueC PE=4 SV=1

SEQ ID NO: 42343 - protein, 230 aa, Sphingobium quisquiliarum
  misc_feature (1)..(230): tr|T0H0L0|T0H0L0_9SPHN 7-cyano-7-deazaguanine synthase OS=Sphingobium quisquiliarum P25 OX=1329909 GN=queC PE= 3 SV=1
MVANKGKFAVVLLSGGLDSMVAGGLAREAGFHVLALTIDYNQRHRVELRAAARVAGALNAMSHIVLPLDLTAFGGSALTADIAVPKGGVGSAIPITYVPARNTIFLSLTLGLAEVSGANDIFIGVNALDYSGYPDCRPEFIEAFQKMAALATKAGVEGQPLRINAPLQHMSKADIVREAHRLGLDAGLSWSCYDPAPDNRHCGLCDSCRLRAKGFQEAGLPDPTDYAAKP

SEQ ID NO: 42344 - protein, 233 aa, Sphingobium sp.
  misc_feature (1)..(233): tr|A0A196MR40|A0A196MR40_9SPHN 7-cyano-7-deazaguanine s ynthase OS=Sphingobium sp. TCM1 OX=453246 GN=queC PE=3 SV=1
MVANQGKFAVVLLSGGLDSMVAGGLARESGYHLLALSIDYNQRHRVELNAAARVAESLGAMRHIVLPLDLTAFGGSALTADIAVPKGGVGGDIPVTYVPARNTIFLSLTLGLAEVAGASDIFIGVNALDYSGYPDCRPEFIDAFQKMATLATKAGVEGHPIRINTPLQYMSKADIAREAHRLGLDAGISWSCYDPTPDGKHCGLCDSCRLRSKGFEEAGLPDPTIYAVQPPKA

SEQ ID NO: 42345 - protein, 230 aa, Sphingobium sp.; identical to SEQ ID NO: 42334
  misc_feature (1)..(230): tr|A0A197BRZ5|A0A197BRZ5_9SPHN 7-cyano-7-deazaguanine s ynthase OS=Sphingobium sp. 20006FA OX=2056888 GN=queC P E=3 SV=1

SEQ ID NO: 42346 - protein, 231 aa, Sphingobium ummariense
  misc_feature (1)..(231): tr|T0IYW4|T0IYW4_9SPHN 7-cyano-7-deazaguanine synthase OS=Sphingobium ummariense RL-3 OX=1346791 GN=queC PE=3 SV=1
MAANNEGKFAVVLLSGGLDSMVAGGLAREAGFRVLALSIDYNQRHRLELRAAGRVATALNAIRHIVLPLDLRAFGGSALTADIAVPKGGVGAEIPITYVPARNTVFLSLTLGLAEVAGAQDIFIGVNALDYSGYPDCRPEFIDAFQKMAALATKAGVEGHPVRINAPLQHMSKADIVREAHRLGLDAGMSWSCYDPTPDGRHCGLCDSCRLRAKGFDEAGLPDPTVYATRP

SEQ ID NO: 42347 - protein, 211 aa, Sphingobium wenxiniae
  misc_feature (1)..(211): tr|A0A562K578|A0A562K578_SPHWJ 7-cyano-7-deazaguanine s ynthase OS=Sphingobium wenxiniae (strain DSM 21828 / JZ -1) OX=595605 GN=queC PE=3 SV=1
MVAGALAREAGFHLLALTIDYNQRHRVELRAASRIAKALNAMSHIVLPLDLTAFGGSALTADIAVPKGGVGADIPITYVPARNTIFLSLTLGLAEAAGANDIFIGVNALDYSGYPDCRAEFIEAFEKMAALATKAGVEGNPIRIKTPLQHMSKADIVREADRLGLDAGMSWSCYDPTPDGKHCGLCDSCRLRAKGFEEAGLPDPTGYATRP

SEQ ID NO: 42348 - protein, 230 aa, Sphingobium xenophagum
  misc_feature (1)..(230): tr|A0A401J587|A0A401J587_SPHXE 7-cyano-7-deazaguanine s ynthase OS=Sphingobium xenophagum OX=121428 GN=queC PE= 3 SV=1
MASNERKFAVVLLSGGLDSMVAGGLAREAGYHLLALSIDYNQRHRVELRAAGRVAQALNAMRHIVLPLDLTAFGGSALTADIAVPKGGVGDDIPVTYVPARNTIFLSLTLGLAEVAGASDIFIGVNALDYSGYPDCRPEFIDAFQTMAALATKAGVEGHPIRINAPLQHMSKADIVREAHRLGLDAGVSWSCYDPTPDGKHCGLCDSCRLRSKGFEEAGLPDPTIYAARP

SEQ ID NO: 42349 - protein, 233 aa, Sphingobium yanoikuyae
  misc_feature (1)..(233): tr|A0A084EQT8|A0A084EQT8_SPHYA 7-cyano-7-deazaguanine s ynthase OS=Sphingobium yanoikuyae OX=13690 GN=queC PE=3 SV=1
MVAQNGKFAVVLLSGGLDSMVAGGLAREAGYRVLALTIDYNQRHRVELRAAAKVATALNAMSHIVLPLDLTAFGGSALTADIEVPKGGVGDEIPVTYVPARNTIFLSLTLGLAEVASASDIYIGVNALDYSGYPDCRPEFIDAFQKMATLATKAGVEGHPIRINTPLQFMTKADIVREAHRLGLDAGLSWSCYDPTPDNKHCGLCDSCRLRSKGFEEAGLPDPTVYATRPGKA

SEQ ID NO: 42350 - protein, 233 aa, Sphingobium yanoikuyae
  misc_feature (1)..(233): tr|A0A0J9CWX7|A0A0J9CWX7_SPHYA 7-cyano-7-deazaguanine s ynthase OS=Sphingobium yanoikuyae OX=13690 GN=queC PE=3 SV=1
MVAQNGEFAVVLLSGGLDSMVAGGLAREAGYRVLALTIDYNQRHRVELRAAAKVATALNAMSHIVLPLDLTAFGGSALTADIEVPKGGVGDEIPVTYVPARNTIFLSLTLGLAEVASASDIYIGVNALDYSGYPDCRPEFIDAFQKMATLATKAGVEGHPIRINTPLQFMTKADIVREAHRLGLDAGLSWSCYDPTPDNKHCGLCDSCRLRSKGFEEAGLPDPTVYATRPGKA

SEQ ID NO: 42351 - protein, 227 aa, Sphingomonadaceae bacterium
  misc_feature (1)..(227): tr|A0A257DP93|A0A257DP93_9SPHN 7-cyano-7-deazaguanine s ynthase OS=Sphingomonadaceae bacterium PASS1 OX=2015579 GN=queC PE=3 SV=1
MTAKSKSAIVLLSGGLDSMVVAGLAREAGYNLIALTIDYNQRHRIELDSAATIAAHLGAIEHIVLPLDLTRFGGSALTADIAVPKEGVEENAIPATYVPARNTIFLSLCLGLAEARGARDLWIGVNALDYSGYPDCRPEFIRAFEGMANLATKAGVEGDHFSVHTPLLHMSKADIATQAARLGLDAGMSWSCYDPTPDNNACGRCDSCRLRAKGFADAGLPDPTIYA

SEQ ID NO: 42352 - protein, 234 aa, Sphingomonadaceae bacterium
  misc_feature (1)..(234): tr|A0A520WWU7|A0A520WWU7_9SPHN 7-cyano-7-deazaguanine s ynthase OS=Sphingomonadaceae bacterium OX=1930536 GN=qu eC PE=3 SV=1
MQSDSPGAAAILLSGGLDSMVTAGLAREQGFVLHALTINYGQRHIVELQAARAIATRLQVARHVELSVDLRALGGSALTDNIDVPKDGIGDDIPVTYVPARNLVFLSLTTAFAEASGAHDIFIGVNALDYSGYPDCRPEFIQSFMETANLATRAGVEEGSPFRIHAPLQHMSKADIARETNRLGLDSALSWSCYDPLPEGDPCGACDSCRLRRKGFADAGLVDGLKYPADAPAV

SEQ ID NO: 42353 - protein, 221 aa, Sphingomonadales bacterium
  misc_feature (1)..(221): tr|A0A258JDT4|A0A258JDT4_9SPHN 7-cyano-7-deazaguanine s ynthase OS=Sphingomonadales bacterium 32-65-25 OX=19705 94 GN=queC PE=3 SV=1
MNRLAVVLLSGGLDSTTVAAIARAQGWRILALTIDYNQRHRIELEHAARVAETLGAERHIVLPLDLTGFGGSALTADIDVPKGGVEPGIPVTYVPARNTIFLSVALGWAEAAGARDLFIGVNALDFSGYPDCRPEFIAAFEAMANTATKAGVEGEGFKVHTPLMTLDKAGIIAAAQAVNAPLHLTWSCYDPTPAGTPCGLCDSCRLRGKGFAEAGIADPAL

SEQ ID NO: 42354 - protein, 239 aa, Sphingomonadales bacterium
  misc_feature (1)..(239): tr|A0A4Q3ACW3|A0A4Q3ACW3_9SPHN 7-cyano-7-deazaguanine s ynthase OS=Sphingomonadales bacterium OX=1978525 GN=que C PE=3 SV=1
MAERIEDAAGSPAVVLLSGGLDSMVVAALAKERGYAVHALSIDYGQRHRRELEAARGIAERLGVSRHVVLPLDLTVFGGSALTADIAVPKDGVEEGIPVTYVPARNLVFLALTTAFAETAGARDLFIGVNAIDYSGYPDCRPEFIASFAETARLGTKAGVEGRPFAIHAPLQHMSKADIAAECARLGLDPAWSWSCYDPTPEGIACGTCDSCRLRRKGFADAGVADSTPHAEDIATRAG

SEQ ID NO: 42355 - protein, 232 aa, Sphingomonas adhaesiva
  misc_feature (1)..(232): tr|A0A2A4I7X4|A0A2A4I7X4_9SPHN 7-cyano-7-deazaguanine s ynthase OS=Sphingomonas adhaesiva OX=28212 GN=queC PE=3 SV=1
MTHPTPAVALISGGLDSMVSAALAREAGYPLLALSIDYNQRHQIELAAARRVARALGAERHVVLPIDLSAFGGSALTDSAIDVPKDGVGDAIPVTYVPARNTIFLSLALGWAEAAGARDLFLGVNALDYSGYPDCRPEFIAAFERLAELATKAGVEGAPFRFHAPLQHMTKADIVREGARLGLDMGLSWSCYDPAPGAKHCGLCDSCRLRHKGFEEAGIADPTVYAVAPPAP

SEQ ID NO: 42356 - protein, 234 aa, Sphingomonas aerolata
  misc_feature (1)..(234): tr|A0A2T4YTJ7|A0A2T4YTJ7_9SPHN 7-cyano-7-deazaguanine s ynthase OS=Sphingomonas aerolata OX=185951 GN=queC PE=3 SV=1
MTSSAPLAVALVSGGLDSMVSAAMLRESGRRLLALSFDYNQRHRVELDAARRVATALGAERHIVLPMDLSAFGGSALTADIDVPKDGVGTDDAGGIPVTYVPARNTIFLSLALGWAEAAGARDIYIGVNALDYSGYPDCRPEFIAAFEGLAELATKAGVEGDPFRIQAPLQHMTKADIVREGTRLGLDLGLSWSCYDPTPDGKHCGECDSCRLRSRGFDEAGIADPTVYAVKPV

SEQ ID NO: 42357 - protein, 235 aa, Sphingomonas aquatilis
  misc_feature (1)..(235): tr|A0A511Q7A4|A0A511Q7A4_9SPHN 7-cyano-7-deazaguanine s ynthase OS=Sphingomonas aquatilis NBRC 16722 OX=1219039 GN=queC PE=3 SV=1
MNQNQAAPLAVVLVSGGLDSMISAASAREQGYRVLALSVDYNQRHRVELAAARRVANMLGAERHIILPLDLSAFGGSALTDDIAVPKDGVGTEEGGGIPVTYVPARNTIFLSLALGWAEAAGARDLFIGVNALDYSGYPDCRPEFIAAFEGLAEIATKAGVEGQRFTIHAPLQHMTKADIVREGQRLGVDMGLSWSCYDPAPGGVHCGTCDSCRLRSKGFEDAGIPDPTVYAVRV

SEQ ID NO: 42358 - protein, 197 aa, Sphingomonas aquatilis
  misc_feature (1)..(197): tr|A0A511Q3R6|A0A511Q3R6_9SPHN 7-cyano-7-deazaguanine s ynthase OS=Sphingomonas aquatilis NBRC 16722 OX=1219039 GN=queC PE=3 SV=1
MKAILLSGGMDSIALAYWLRPAFAFTMDYGQAAAAAEIDASVQIAHDLGIDHEVIRVDCSSLGSGDMAGSTALDVAPASEWWPFRNQLLVTLAGMRAVAMGVTEIMVGSVLSDGVHADGRPAFYGTLDLLMREQEGGLRVTAPAIGMSTVDLIRQSGIPRDLLAWAHSCHTGPLACGSCRGCVKHLETTLALGGVGY

SEQ ID NO: 42359 - protein, 238 aa, Sphingomonas aurantiaca
  misc_feature (1)..(238): tr|A0A2T5GTP8|A0A2T5GTP8_9SPHN 7-cyano-7-deazaguanine s ynthase OS=Sphingomonas aurantiaca OX=185949 GN=queC PE =3 SV=1
MTSPAPYAVALVSGGLDSMVSAALAREAGQRVLALSFDYNQRHRIELDAARRVAQALGAERHIVLPMDLSAFGGSALTADIDVPKDGVGTEDGGGIPVTYVPARNTIFLSLALGWAEASGARDIYIGVNALDYSGYPDCRPEFIAAFEGLAELATKAGVEGDPFRIQAPLQMMTKADIVREGTRLGLDLGLSWSCYDPTPDGKHCGACDSCRLRSKGFEDAGIADPTVYAARPGTEHG

SEQ ID NO: 42360 - protein, 462 aa, Sphingomonas aurantiaca
  misc_feature (1)..(462): tr|A0A2T5GJC2|A0A2T5GJC2_9SPHN 7-cyano-7-deazaguanine s ynthase in queuosine biosynthesis OS=Sphingomonas auran tiaca OX=185949 GN=C8J26_3180 PE=4 SV=1
MTAKAYHVADAVPHRVDAIEPGEVPRDGARIATLGETITLSIEGLKDFFFASWRYDLIDLLVIAAAVEYCDLSIRRPAWGWARAFDMLVAVHEEEKWSTPPVRHALEEALAFLTGDRWSVSFTKRRNSVVKITPRRLDLNTPDKVIMPYSDGLDSRAVAAIVEEQEKGGLVRVRLGSKGVDSAKVPRKKRRFATVPFEVKLGKRQRVESSARSRGFKFAVITGIAAQLAPVDRIVVTESGQGALGPVLASSGQSYPDYRVHPAFTRRIEHLFLALTNKAPTYEYPRIWNTKGETLAMASALANPPTWHDTRSCWQDSRRVSFEGERRQCGVCAACMLRRMSIHSAGIDEPASRYIWEDLGAAEMEDGVVAGFSGMSPAFRDYGLAGILHLDHLAALSGSALHERTVRRVARETADALGIEMAEGERALTGLLERHRAEWLGFLSSLGSQSFVARVAMVSPWH

SEQ ID NO: 42361 - protein, 231 aa, Sphingomonas carotinifaciens
  misc_feature (1)..(231): tr|A0A1G7KIS9|A0A1G7KIS9_9SPHN 7-cyano-7-deazaguanine s ynthase OS=Sphingomonas carotinifaciens OX=1166323 GN=q ueC PE=3 SV=1
MTSTAPLAVALVSGGLDSMISAALARAAGYRLLALSVDYNQRHQVELAAAARIARALGAERHIVLPLDLSAFGGSALTADIAVPKDGVQPGIPVTYVPARNTIFLSLALGWAEAAGARDLFIGVNALDYSGYPDCRPEFIAGFERLAELATKAGVEGEPFKIQAPLQHMTKADIVREGTRLGLDLGMSWSCYDPAPGDLHCGACDSCRLRSKGFADAGIADPTAYAVSPQG

SEQ ID NO: 42362 - protein, 235 aa, Sphingomonas changbaiensis
  misc_feature (1)..(235): tr|A0A0E9MJG5|A0A0E9MJG5_9SPHN 7-cyano-7-deazaguanine s ynthase OS=Sphingomonas changbaiensis NBRC 104936 OX=12 19043 GN=queC PE=3 SV=1
MTLQSEPALVLFSGGQDSATCLAWALDRFARVETVGFDYGQRHRVELDCRASLRDGMGKVWPGKLGEDHLLDLSLLGQISDTALTRDAEIAFDADGLPSTFVPGRNLIFFNLAAAIGYRRGIRHLVGGMCETDYSGYPDCRDDTLKALQVALGLGLDRRIVIHAPLMWRDKAATWALTAELGGDALVELIRTESHSCYLGDRGTLHDWGYGCGTCPACELRMRGWRDYRRSRSSP

SEQ ID NO: 42363 - protein, 228 aa, Sphingomonas desiccabilis
  misc_feature (1)..(228): tr|A0A4Q2IZJ8|A0A4Q2IZJ8_9SPHN 7-cyano-7-deazaguanine s ynthase OS=Sphingomonas desiccabilis OX=429134 GN=queC PE=3 SV=1
MTDQPLAVALVSGGLDSMVSAALAREAGYRLLALSVDYNQRHQIELAAAGRVAAALGAERHVTLSLDLSAFGGSALTADIAVPKDGVAPGIPITYVPARNTIFLSLSLGWAEAAGARDLFIGVNALDYSGYPDCRPEFIAGFEHLAALATKAGVEGEGFKIHAPLQHMTKADIVREGTRLGLDLGISWSCYDPQGDLHCGLCDSCRLRSKGFEEAGVPDPTRYATAAA

SEQ ID NO: 42364 - protein, 214 aa, Sphingomonas dokdonensis
  misc_feature (1)..(214): tr|A0A245ZVS2|A0A245ZVS2_9SPHN 7-cyano-7-deazaguanine s ynthase OS=Sphingomonas dokdonensis OX=344880 GN=queC P E=3 SV=1
MISAAIAREAGYRIFALSIDYNQRHQVELAAARRIAQTLGAVRHVVLPIDLSAFGGSALTADISVPKDGVGTDIPVTYVPARNTVFLSLALAWAEAAGARSLFIGVNALDYSGYPDCRPEFIAGFEHLAELATKAGVEGEAFRIHAPLQHMTKADIVREGTRLGLDLGMSWSCYDPSPAGTHCGLCDSCRLRHKGFEDAGIADPTIYAVAPPAP

SEQ ID NO: 42365 - protein, 229 aa, Sphingomonas edaphi
  misc_feature (1)..(229): tr|A0A418PYS9|A0A418PYS9_9SPHN 7-cyano-7-deazaguanine s ynthase OS=Sphingomonas edaphi OX=2315689 GN=queC PE=3 SV=1
MSTRQAVVLLSGGLDSMVCAALAREEGFSVLALTIDYNQRHRVELEAAKRIATDLADRHIILPLDLTAFGGSALTSDIDVPKDGVGADGDGGIPVTYVPARNTVFLSLALAWAEAAGAHDLFVGVNALDYSGYPDCRPAFIEAFEELANKATRDGVEGRGFTVHAPLQNMTKADIAREAARLGLDAGISHSCYDPAPDGAACGYCDACRLRAKGFEEAGLVDPTRYVAR

SEQ ID NO: 42366 - protein, 227 aa, Sphingomonas elodea
  misc_feature (1)..(227): tr|A0A495F1N8|A0A495F1N8_SPHEL 7-cyano-7-deazaguanine s ynthase OS=Sphingomonas elodea OX=179878 GN=queC PE=3 S V=1
MTQSIAIALVSGGLDSMVSAARAREDGHRLLALSIDYNQRHKVELEAAAKIAAMLGAERHVVLPLDLRAFGGSALTADIDVPKTGVGSDIPVTYVPARNTIFLSLALGWAEAAGARDLYIGVNALDYSGYPDCRPEFIAGFEKLAELATKAGVEGEPFRIQAPLQNMSKADIVREAARLGLDAGLSWSCYDPTPEGLHCGLCDSCRLRSRGFEEAGLPDPTRYATHP

SEQ ID NO: 42367 - protein, 232 aa, Sphingomonas endophytica
  misc_feature (1)..(232): tr|A0A147I8S5|A0A147I8S5_9SPHN 7-cyano-7-deazaguanine s ynthase OS=Sphingomonas endophytica OX=869719 GN=queC P E=3 SV=1
MTSPTPAVALVSGGLDSLVSAALAREAGHPLLALSIDYNQRHQVELAAARRIARALGAVRHVVLPIDLSAFGGSALTDESIAVPKEGVGDAIPVTYVPARNTIFLSLALGWAEAAGARDVFLGVNALDYSGYPDCRPEFISAFEHLAELATKAGVEGAPFRFHAPLQHMTKADIVREGARLGLDMGMSWSCYDPAPGAKHCGLCDSCRLRHKGFEEAGIADPTDYAVIPPLS

SEQ ID NO: 42368 - protein, 234 aa, Sphingomonas faeni
  misc_feature (1)..(234): tr|A0A2T5U4K3|A0A2T5U4K3_9SPHN 7-cyano-7-deazaguanine s ynthase OS=Sphingomonas faeni OX=185950 GN=queC PE=3 SV =1
MTSPAPFAVALVSGGLDSMVSAALAREAGQRVLALSFDYNQRHRIELDAARRVASALGAERHIVLPMDLSAFGGSALTADIDVPKDGAGTEDGGGIPVTYVPARNTIFLSLALGWAEAAGARDIYIGVNALDYSGYPDCRPEFIAAFEGLAELATKAGVEGEPFRIQAPLQMMTKADIVREGTRLGLDLGLSWSCYDPTPAGEHCGECDSCRLRSRGFDEAGIADPTRYAVKPA

SEQ ID NO: 42369 - protein, 230 aa, Sphingomonas fennica
  misc_feature (1)..(230): tr|A0A2T4HQ09|A0A2T4HQ09_9SPHN 7-cyano-7-deazaguanine s ynthase OS=Sphingomonas fennica OX=114404 GN=queC PE=3 SV=1
MSQDRPGAVVLLSGGLDSMVAGGIAREQGFAINALTVNYNQRHSVELAAAARIAAMLGAARHITMPLDLSLFGGSALTDAIDVPKTGVEEDAIPVTYVPARNTIFLSLALGWAEACGARDIFLGVNALDYSGYPDCRPDFIQAFQNLADIATKAGVEGRGFTIHSPLLHMTKADIATEAVRLGLDAGQSWSCYDPTPEGLHCGLCDSCRLRQRGYEDAGIPDPTIYAARP

SEQ ID NO: 42370 - protein, 227 aa, Sphingomonas gei
  misc_feature (1)..(227): tr|A0A4S1X339|A0A4S1X339_9SPHN 7-cyano-7-deazaguanine s ynthase OS=Sphingomonas gei OX=1395960 GN=queC PE=3 SV= 1
MTDSVAVALISGGLDSMVSAALAREAGHRLLALSIDYNQRHHVELAAARRIAQVLGAERHVVLPLDLRAFGGSALTAEIDVPKDGVGDDIPVTYVPARNTIFLSLALGWAEAAGARDLYIGVNALDYSGYPDCRPEFIAGFEKLAELATKAGVEGEPFHIRAPLQDMTKADIVREGMRLGLDLGMSWSCYDPAPGSVHCGLCDSCRLRAKGFEEAGVPDPTGYATAP

SEQ ID NO: 42371 - protein, 232 aa, Sphingomonas ginsenosidimutans
  misc_feature (1)..(232): tr|A0A2A4I0T4|A0A2A4I0T4_9SPHN 7-cyano-7-deazaguanine s ynthase OS=Sphingomonas ginsenosidimutans OX=862134 GN= queC PE=3 SV=1
MTHQTPAVALISGGLDSMVSAALAREAGYPLLALSIDYNQRHQIELAAARRVAHALGAVRHVVLPIDLSAFGGSALTDSAIDVPKDGVGEAIPVTYVPARNTIFLSLALGWAEAAGARDLFLGVNALDYSGYPDCRPEFIAAFERLAELATKAGVEGAPFRFHAPLQHMTKADIVREGARLGLDMGLSWSCYDPAPGAKHCGLCDSCRLRHKGFEEAGIADPTVYAVKPPAP

SEQ ID NO: 42372 - protein, 241 aa, Sphingomonas ginsenosidivorax
  misc_feature (1)..(241): tr|A0A5C6UA56|A0A5C6UA56_9SPHN 7-cyano-7-deazaguanine s ynthase OS=Sphingomonas ginsenosidivorax OX=862135 GN=q ueC PE=3 SV=1
MTSSPIAVALVSGGLDSMVSAAAAREAGYRLLALSVDYNQRHRVELAAARRIADALGAERHIVLPLDLSAFGGSALTADIAVPKDGVGTEDGGGIPVTYVPARNTIFLSLALGWAEAAGARDLFIGVNALDYSGYPDCRPEFIQAFEGLAELATKAGVEGEPFRIRAPLQHMTKADIVREGTRLGLDMGMSWSCYDPAPGGVHCGQCDSCRLRSKGFEDAGIADPTIYATVPGVSAITEGS

SEQ ID NO: 42373 - protein, 236 aa, Sphingomonas glacialis
  misc_feature (1)..(236): tr|A0A502FZX6|A0A502FZX6_9SPHN 7-cyano-7-deazaguanine s ynthase OS=Sphingomonas glacialis OX=658225 GN=queC PE= 3 SV=1
MTNQPVSAAPAGVAPLAVVLVSGGLDSMVAAAFAREAGYRLLALSVDYNQRHRLELASARRIAHVLGAERHVVLPLDLAAFGGSALTADIDVPKDGVQPGIPVTYVPARNTIFLSLALGWAEAAGARDLFIGVNALDYSGYPDCRPEFIAAFEGLAELATKAGVEGSPFRIHAPLQDMTKADIVREAARLNIDPALSWSCYDPAPGGLHCGVCDSCRLRKKGFEEAGLPDPTAYAV

SEQ ID NO: 42374 - protein, 229 aa, Sphingomonas guangdongensis
  misc_feature (1)..(229): tr|A0A285QEL3|A0A285QEL3_9SPHN 7-cyano-7-deazaguanine s ynthase OS=Sphingomonas guangdongensis OX=1141890 GN=qu eC PE=3 SV=1
MNPEHTAAVVLVSGGLDSMVSAARAKEDGHRLFALSIDYNQRHRLELAAARRIAQHLGAERHVVLPLDLSAFGGSALTADIAVPKTGVEPGIPVTYVPARNTIFLSLALGWAEAAGARDLYIGVNALDYSGYPDCRPEFIAAFEGLAELATKAGVEGAPFRIRAPLQHLTKAEIVTEAARLGLDAGMSWSCYDPAPGGVHCGLCDSCRLRAKGFEDAGLPDPTVYAVRP

SEQ ID NO: 42375 - protein, 230 aa, Sphingomonas haloaromaticamans; identical to SEQ ID NO: 42369
  misc_feature (1)..(230): tr|A0A1S1HGC8|A0A1S1HGC8_9SPHN 7-cyano-7-deazaguanine s ynthase OS=Sphingomonas haloaromaticamans OX=653954 GN= queC PE=3 SV=1

SEQ ID NO: 42376 - protein, 197 aa, Sphingomonas hengshuiensis
  misc_feature (1)..(197): tr|A0A2W4Z7M4|A0A2W4Z7M4_9SPHN 7-cyano-7-deazaguanine s ynthase OS=Sphingomonas hengshuiensis OX=1609977 GN=DI6 32_06660 PE=3 SV=1
MRAVLLSGGMDSIALAHWKRPEVAITIDYGQKAAATELAAAAEVARGLAMRHETLRVDCSSLGSGDMVGGAPLAAAPVTEWWPFRNQMLLTLAGMRAVAIGIVELMVGSVASDGSHADGRAEFYAAADRLMSLQEGGIRVTAPAIGMTTAELIRTSGVSREMLGWAHSCHTGPLACGDCRGCHKHFQVTEELYGDAY

SEQ ID NO: 42377 - protein, 233 aa, Sphingomonas hengshuiensis
  misc_feature (1)..(233): tr|A0A2W5BCI5|A0A2W5BCI5_9SPHN 7-cyano-7-deazaguanine s ynthase OS=Sphingomonas hengshuiensis OX=1609977 GN=que C PE=3 SV=1
MTNNPLSVVLVSGGLDSMVSAALAREAGHRLLALSIDYNQRHLVELAAARRIATALGAERHVVLPLDLSAFGGSALTDASIAVPKDGVVEDVIPVTYVPARNTIFLSLALGWAEAAGARDLWIGVNALDYSGYPDCRPEFIAGFERLAELATRAGVEGDPFRIHAPLQTMTKADIAREAARLGIDAGMSWSCYDPVGELHCGQCDSCRLRARGFVEAGLPDPTRYAERPDTGR

SEQ ID NO: 42378 - protein, 230 aa, Sphingomonas histidinilytica
  misc_feature (1)..(230): tr|A0A1T5C4B8|A0A1T5C4B8_9SPHN 7-cyano-7-deazaguanine s ynthase OS=Sphingomonas histidinilytica OX=439228 GN=qu eC PE=3 SV=1
MSDIANKEGRRAIVLLSGGLDSMVSGGIAREQGFALAALTIDYNQRHRVELEAAKRVAAALDVDRHVTLPLNLRAFGGSSLTDDIDVPKDGVMPGIPSTYVPARNTIFLSLALGFAEATGARDIFLGVNALDYSGYPDCRPEFIAAFQHLADLATKMGVEGQGFTIHAPLQHMTKADIAREAARLGLDAGMSWSCYDPTQDGKHCGLCDSCRLRSKGFAEAGLADPTVYA

SEQ ID NO: 42379 - protein, 230 aa, Sphingomonas indica
  misc_feature (1)..(230): tr|A0A1X7FZ19|A0A1X7FZ19_9SPHN 7-cyano-7-deazaguanine s ynthase OS=Sphingomonas indica OX=941907 GN=queC PE=3 S V=1
MTQSQKFAVVLLSGGLDSMVAAAQAREAGYGLFALTVDYNQRHRIELEAAARIATALGAARHVVLPLDLSAFGGSALTADIAVPKGGVAAEGIPITYVPARNTIFLSLALGWAEAAGARDLFIGVNALDYSGYPDCRPEFVEAFEAMAARATKAGVEGDRFVVHTPLMEMTKADIAAEAARLGLDAGMSWSCYDPTTDGRHCGLCDSCRLRAKGFAEAGLADPTVYAARP

SEQ ID NO: 42380 - protein, 230 aa, Sphingomonas jatrophae
  misc_feature (1)..(230): tr|A0A1I6JY90|A0A1I6JY90_9SPHN 7-cyano-7-deazaguanine s ynthase OS=Sphingomonas jatrophae OX=1166337 GN=queC PE =3 SV=1
MTQTSPAAVVLLSGGLDSMTVAALARERGFRLMALTIDYNQRHKVELDAARRLAAALGAERHVILPVDLTAFGGSALTADIDVPKDGLKDDIPVTYVPARNTIFLSLALGWAEATGARDLFLGINALDYSGYPDCRREFIDAFEALAAVATKAGTEGDRFRVHAPLVAMTKADIVREAARLGLDAGMSWSCYDPAPGDLHCGLCDSCRLRSRGFVEAGVVDPTRYAVGPA

SEQ ID NO: 42381 - protein, 232 aa, Sphingomonas jeddahensis
  misc_feature (1)..(232): tr|A0A1V2EUM8|A0A1V2EUM8_9SPHN 7-cyano-7-deazaguanine s ynthase OS=Sphingomonas jeddahensis OX=1915074 GN=queC PE=3 SV=1
MSNDQSSAVVLVSGGLDSMISAALAREAGHTIYALSIDYNQRHQVELAAARRIAKTLGAVRHVVLPIDLSAFGGSALTADIDVPKDGVGSDIPVTYVPARNTVFLSLALAWAEATGSRALYIGVNALDYSGYPDCRPEFIAGFERLAELATKAGVEGHPFRIHAPLQHMTKADIVREGTRLGLDLGLSWSCYDPAPGGLHCGLCDSCRLRHKGFDDARVVDPTAYAVTPPAP

SEQ ID NO: 42382 - protein, 229 aa, Sphingomonas koreensis
  misc_feature (1)..(229): tr|A0A1L6JEX4|A0A1L6JEX4_9SPHN 7-cyano-7-deazaguanine s ynthase OS=Sphingomonas koreensis OX=93064 GN=queC PE=3 SV=1
MTDSQIAVALVSGGLDSFVSAARARADGYRLLALSVDYNQRHHVELAAARRIAQALGAERHVVLPLDLSQFGGSALTADIDVPKDGVGEDIPVTYVPARNTIFLSLALGWAEAAGARDLYIGVNALDYSGYPDCRPEFVEGFEKLAELATKAGVEGAPFRIRAPLQFMSKADIVQEGMRLGLDLGLSWSCYDPAPGGLHCGLCDSCRLRSKGFEEAGVPDPTRYAETAG

SEQ ID NO: 42383 - protein, 229 aa, Sphingomonas koreensis
  misc_feature (1)..(229): tr|A0A2M8WG47|A0A2M8WG47_9SPHN 7-cyano-7-deazaguanine s ynthase OS=Sphingomonas koreensis OX=93064 GN=queC PE=3 SV=1
MTDSQIAVALVSGGLDSFVSAARARADGYRLLALSVDYNQRHHVELAAARRIAQALGAERHVVLPLDLSQFGGSALTADIDVPKDGVGEDIPVTYVPARNTIFLSLALGWAEAAGARDLYIGVNALDYSGYPDCRPEFIEGFEKLAELATKAGVEGAPFRIRAPLQFMSKADIVQEGMRLGLDLGLSWSCYDPAPGGLHCGLCDSCRLRSKGFEEAGVPDPTRYAETAG

SEQ ID NO: 42384 - protein, 229 aa, Sphingomonas laterariae
  misc_feature (1)..(229): tr|A0A239CZQ4|A0A239CZQ4_9SPHN 7-cyano-7-deazaguanine s ynthase OS=Sphingomonas laterariae OX=861865 GN=queC PE =3 SV=1
MNEQKPGAVVLLSGGLDSMVAAGIARERGFAINALTINYNQRHLVELAAARRIAAMLDVARHVTLPLDLTLFGGSALTDDIAVPKTGVGEEIPVTYVPARNTIFLSLALGWAEACGAYDIFLGVNALDYSGYPDCRPEFVEKFQELADLATKAGVEGRRFTIHSPLLHMTKADIAREADRLGLDAGQSWSCYDPAPGGKHCGLCDSCRLRARGYEEAGIPDPTQYATRP

SEQ ID NO: 42385 - protein, 236 aa, Sphingomonas melonis
  misc_feature (1)..(236): tr|A0A175Y0G1|A0A175Y0G1_9SPHN 7-cyano-7-deazaguanine s ynthase OS=Sphingomonas melonis TY OX=621456 GN=queC PE =3 SV=1
MMNQNQAAPLAVVLVSGGLDSMISAASAREQGYRVLALSVDYNQRHRVELAAARRVANVLGAERHIILPLDLSAFGGSALTDDIAVPKDGVGTEEGGGIPVTYVPARNTIFLSLALGWAEAAGARDLFIGVNALDYSGYPDCRPEFIAAFEGLAEIATKAGVEGQRFAIHAPLQHMTKADIVREGQRLGVDMGLSWSCYDPAPGGVHCGTCDSCRLRSKGFEDAGIPDPTVYAVRV

SEQ ID NO: 42386 - protein, 236 aa, Sphingomonas melonis
  misc_feature (1)..(236): tr|A0A0D1K3V0|A0A0D1K3V0_9SPHN 7-cyano-7-deazaguanine s ynthase OS=Sphingomonas melonis OX=152682 GN=queC PE=3 SV=1
MMNQNQAAPLAVVLVSGGLDSMISAASAREQGYRVLALSVDYNQRHRVELAAARRVANVLGAERHIILPLDLSAFGGSALTDDIAVPKDGVGTEEGGGIPVTYVPARNTIFLSLALGWAEAAGARDLFIGVNALDYSGYPDCRPEFIAAFEGLAEIATKAGVEGQRFTIHAPLQHMTKADIVREGQRLGVDMGLSWSCYDPAPGGVHCGTCDSCRLRSKGFEDAGIPDPTVYAVRV

SEQ ID NO: 42387 - protein, 214 aa, Sphingomonas mucosissima
  misc_feature (1)..(214): tr|A0A245ZT27|A0A245ZT27_9SPHN 7-cyano-7-deazaguanine s ynthase OS=Sphingomonas mucosissima OX=370959 GN=queC P E=3 SV=1
MISAALAREAGHQIFALSIDYNQRHQVELAAARRIARALGAVRHVVLPIDLSAFGGSALTAEIDVPKDGVGGDIPVTYVPARNTVFLSLALAWAEAAGARSLYIGVNALDYSGYPDCRPEFIAGFERLAELATKAGVDGEAFRIHAPLQHMTKADIVREGTRLGLDLGLSWSCYDPTPAGTHCGLCDSCRIRHKGFEDAAIADPTIYAVTPPAP

SEQ ID NO: 42388 - protein, 227 aa, Sphingomonas naasensis
  misc_feature (1)..(227): tr|A0A4S1W802|A0A4S1W802_9SPHN 7-cyano-7-deazaguanine s ynthase OS=Sphingomonas naasensis OX=1344951 GN=queC PE =3 SV=1
MTDSVAIALISGGLDSMVSAARARADGHRLLALSIDYNQRHQIELAAARRIAHALGAERHVVLPLDLRAFGGSALTAEIDVPKTGVGDDIPVTYVPARNTIFLSLALGWAEAAGARDIYIGVNALDYSGYPDCRPEFIAGFERLAELATKAGVEGAPFHIRAPLQDMTKADIVREGMRLGLDLGMSWSCYDPAPGGLHCGLCDSCRLRSKGFEEAGVPDPTGYAAAP

SEQ ID NO: 42389 - protein, 232 aa, Sphingomonas olei
  misc_feature (1)..(232): tr|A0A4S4G9N4|A0A4S4G9N4_9SPHN 7-cyano-7-deazaguanine s ynthase OS=Sphingomonas olei OX=1886787 GN=queC PE=3 SV =1
MTNDQPSAVVLVSGGLDSMISAALAREAGYRLYALSIDYNQRHQVELAAARQIARQLGAVRHVVLPIDLSAFGGSALTADIDVPKDGVGEGIPITYVPARNTVFLSLALAWAETVGARALYIGVNALDYSGYPDCRPEFIAGFENLAELATKAGVEGHAFRIQAPLQHMTKADIVREGDRLGLDLGLSWSCYDPAPGGLHCGLCDSCRLRHKGFQDAGIVDPTAYATTPPAP

SEQ ID NO: 42390 - protein, 235 aa, Sphingomonas oleivorans
  misc_feature (1)..(235): tr|A0A2T5FTE9|A0A2T5FTE9_9SPHN 7-cyano-7-deazaguanine s ynthase OS=Sphingomonas oleivorans OX=1735121 GN=queC P E=3 SV=1
MSHIVTNGRKAVVLLSGGLDSMVAAGLAREAGYGLLALTINYNQRHAVELASAARIAEALGVERHIVLPLDLTLFGGSALTSDMAVPKEGLTPGIPTTYVPARNTIFLSLTLGFAEASGARDLFIGVNALDYSGYPDCRPEFIAAFQAMADLATKAGVEGNGFTVHTPLQYMSKADIAREADRLGLDAGMSWSCYDPADGLHCGRCDSCRLRSRGYKEAGLPDPTRYAVRPEEAA

SEQ ID NO: 42391 - protein, 227 aa, Sphingomonas oligophenolica
  misc_feature (1)..(227): tr|A0A502CRV4|A0A502CRV4_9SPHN 7-cyano-7-deazaguanine s ynthase OS=Sphingomonas oligophenolica OX=301154 GN=que C PE=3 SV=1
MTTAPLAVVLVSGGLDSMIAAASAREAGYRLLALSIDYNQRHRIELAAARRVARTLGAERHIVMPMDLSAFGGSALTDDIAVPKDGVQPGIPVTYVPARNTIFLSLALGWAEAAGARDLFIGVNALDYSGYPDCRPEFIAAFESLAELATKAGVEGEPFRIHAPLQDMTKADIVREGTRLGVDMGISWSCYDPAPGGIHCGRCDSCRLRAKGFDEAGIADPTVYAAS

SEQ ID NO: 42392 - protein, 227 aa, Sphingomonas panacis
  misc_feature (1)..(227): tr|A0A1B3Z9C2|A0A1B3Z9C2_9SPHN 7-cyano-7-deazaguanine s ynthase OS=Sphingomonas panacis OX=1560345 GN=queC PE=3 SV=1
MTRGNTLAVALISGGLDSMVSAARAREDGHRLLALSIDYNQRHQIELAAARRIASVLGAERHVVLPLDLSAFGGSALTADIDVPKDGVGDGIPVTYVPARNTIFLSLALGWAEAAGARDLYIGVNALDYSGYPDCRPEFIKAFEDMAEVATKAGVEGAPFRIQAPLQHMTKADIVREAARLGLDAGMSWSCYDPTQEGLHCGRCDSCRLRAKGFIEAGLPDPTAYAA

SEQ ID NO: 42393 - protein, 236 aa, Sphingomonas parapaucimobilis
  misc_feature (1)..(236): tr|A0A0A1W5B7|A0A0A1W5B7_9SPHN 7-cyano-7-deazaguanine s ynthase OS=Sphingomonas parapaucimobilis NBRC 15100 OX= 1219049 GN=queC PE=3 SV=1
MTDERALVLFSGGQDSATCLAWALETFGWVETLGFDYGQRHRVELECREAFRQGVITSNDAWGARLGPDHMLDLSILGQVSETALTRDAEIALRTDGLPNTFVPGRNLIFFTLAAALASRRELRHLVGGMCETDFSGYPDCRDDTLKSLQVTLNLGMGTRSVLHTPLMWLDKAQTWAMAERLGGDPLVTLIRTSTHTCYLGVHDRLHDWGYGCGTCPSCELRIKGWEGFDASRHNA

SEQ ID NO: 42394 - protein, 225 aa, Sphingomonas parapaucimobilis
  misc_feature (1)..(225): tr|A0A0A1W4G6|A0A0A1W4G6_9SPHN 7-cyano-7-deazaguanine s ynthase OS=Sphingomonas parapaucimobilis NBRC 15100 OX= 1219049 GN=queC PE=3 SV=1
MAVVLVSGGLDSMISAASAKAAGYRVLALSVDYNQRHKVELAAAARVAESLGAERHIVLPLDLSAFGGSALTADIDVPKDGVQPGIPVTYVPARNTIFLSLALGWAEAAGARDLFIGVNALDYSGYPDCRPEFIAAFEGLAEIATKAGVEGQPFKIHAPLQHMTKADIVREGTRLGVDMGISWSCYDPTPEGLHCGECDSCRLRSRGFEEAGIPDPTAYAVKPQG

SEQ ID NO: 42395 - protein, 232 aa, Sphingomonas paucimobilis
  misc_feature (1)..(232): tr|A0A411LPF7|A0A411LPF7_SPHPI 7-cyano-7-deazaguanine s ynthase OS=Sphingomonas paucimobilis OX=13689 GN=queC P E=3 SV=1
MMTSSAPMAVVLVSGGLDSMISAASAKAAGYRILALSVDYNQRHKVELAAARRVAVALGAERHIVLPLDLSAFGGSALTADIDVPKDGVQPGIPVTYVPARNTIFLSLALGWAEAAGARDLFIGVNALDYSGYPDCRPEFVAAFEGLAEIATKAGVEGQPFKIHAPLQHMTKADIVREGTRLGVDMGLSWSCYDPAPGGLHCGRCDSCRLRSKGFEEAGIPDPTAYAVKPQG

SEQ ID NO: 42396 - protein, 225 aa, Sphingomonas paucimobilis
  misc_feature (1)..(225): tr|A0A0C9N5R7|A0A0C9N5R7_SPHPI 7-cyano-7-deazaguanine s ynthase OS=Sphingomonas paucimobilis NBRC 13935 OX=1219 050 GN=queC PE=3 SV=1
MAVVLVSGGLDSMISAASAKAAGYRILALSVDYNQRHKVELAAARRVAVALGAERHIVLPLDLSAFGGSALTADIDVPKDGVQPGIPVTYVPARNTIFLSLALGWAEAAGARDLFIGVNALDYSGYPDCRPEFVAAFEGLAEIATKAGVEGQPFKIHAPLQHMTKADIVREGTRLGVDMGLSWSCYDPAPGGLHCGRCDSCRLRSKGFEEAGIPDPTAYAVKPQG

SEQ ID NO: 42397 - protein, 230 aa, Sphingomonas pokkalii
  misc_feature (1)..(230): tr|A0A2U0SE07|A0A2U0SE07_9SPHN 7-cyano-7-deazaguanine s ynthase OS=Sphingomonas pokkalii OX=2175090 GN=queC PE= 3 SV=1
MAPMTQSIAIALVSGGLDSMVSAARAREDGHRLLALSIDYNQRHKIELAAAAKIAATLGAERHIVLPLDLRAFGGSALTADIDVPKTGVGSDIPVTYVPARNTIFLSLALGWAEAAGARDLYIGVNALDYSGYPDCRPEFIAGFEKLAELATKAGVEGHPFRIQAPLQNMTKADIVREAARLGLDAGLSWSCYDPTPEGLHCGLCDSCRLRSRGFEEAGLPDPTRYAVHP

SEQ ID NO: 42398 - protein, 258 aa, Sphingomonas rubra
  misc_feature (1)..(258): tr|A0A1I5UFX3|A0A1I5UFX3_9SPHN 7-cyano-7-deazaguanine s ynthase OS=Sphingomonas rubra OX=634430 GN=queC PE=3 SV =1
MLSPSIKPYGAATLLRPFLFASDRRSARRIMTDQPLAVALVSGGLDSMVSAASAVEAGYRLLALSVDYNQRHRIELAAAARVAETLGAERHIVLPLDLSAFGGSALTADIAVPKDGVQPGIPVTYVPARNTIFLSLALGWAEAAGARDLYIGVNALDYSGYPDCRPEFVAGFEHLAELATKAGAEGERFRIRAPLQHMTKADIVREGTRLGLDLGISWSCYDPVMQGDDALHCGACDSCRLRALGFEEAGIADPTRYA

SEQ ID NO: 42399 - protein, 231 aa, Sphingomonas sanguinis
  misc_feature (1)..(231): tr|A0A147HTS1|A0A147HTS1_9SPHN 7-cyano-7-deazaguanine s ynthase OS=Sphingomonas sanguinis OX=33051 GN=queC PE=3 SV=1
MTSSAPMAVVLVSGGLDSMISAASAKAAGYRILALSVDYNQRHQIELAAARRVAHELGAERHIILPLDLSAFGGSALTADIEVPKDGVQPGIPVTYVPARNTIFLSLALGWAEAAGARDLFIGVNALDYSGYPDCRPEFISAFEGLAEIATKAGVEGQPFKIHAPLQHMTKADIVREGTRLDVDMGLSWSCYDPAPGGLHCGRCDSCRLRSKGFEEAGIPDPTAYAVKPQG

SEQ ID NO: 42400 - protein, 196 aa, Sphingomonas sanguinis
  misc_feature (1)..(196): tr|A0A147JCJ6|A0A147JCJ6_9SPHN 7-cyano-7-deazaguanine s ynthase OS=Sphingomonas sanguinis OX=33051 GN=NS258_024 90 PE=3 SV=1
MSVVTLVSGGLDSSLVALLAKEEGLEQFPLFVDYGQRAKVRELDACRAVMRRMGLPEPAVAELGGFGALIRSGLTDASLHVVDDAFTPGRNMLFLLVASAHAFQRGADAVSIGLLHEDASIFPDQTSAFLADAEAMIRRCMGREIRVLAPLAGFHKVDVVALAQEKGVVGTYSCHLGLEDACGACIACNEFRFGDA

SEQ ID NO: 42401 - protein, 230 aa, Sphingomonas sanxanigenens
  misc_feature (1)..(230): tr|A0A2W5C0H4|A0A2W5C0H4_9SPHN 7-cyano-7-deazaguanine s ynthase OS=Sphingomonas sanxanigenens OX=397260 GN=queC PE=3 SV=1
MSAQPKRAVVLLSGGLDSMVAAGLAREAGFSVLALTVNYNQRHAVEIEAAGRIAAALGAERHIVLPIDLRAFGGSALTDDIDVPKDGVVEGVIPSTYVPARNTIFLSLALGWAEAAGARDLFIGVNALDYSGYPDCRPEFVAGFERLAELATRAGVEGQAFHVQAPLLHMSKADIATEAARLGLDAGMSWSCYDPTPDGRHCGLCDSCRLRHGGFEAAGLPDPTDYATLP

SEQ ID NO: 42402 - protein, 230 aa, Sphingomonas sanxanigenens
  misc_feature (1)..(230): tr|W0A5V0|W0A5V0_9SPHN 7-cyano-7-deazaguanine synthase OS=Sphingomonas sanxanigenens DSM 19645 = NX02 OX=11232 69 GN=queC PE=3 SV=1
MSQSTSPLAVVLLSGGLDSMVSAARAREDGFRLLALTIDYNQRHAVEIASASRIAQALGAERHVRLPMDLRSFGGSALTADIAVPKDGVGDDIPVTYVPARNTIFLSLALGWAEAAGARDLYVGVNALDYSGYPDCRPEFIDAFEALANLATKAGVEGDRFRIRAPLQHMTKAEIVREAARLGLDAGMSWSCYDPAPGGLHCGLCDSCRLRARGFEEAGLPDPTGYAQQP

SEQ ID NO: 42403 - protein, 231 aa, Sphingomonas sp.
  misc_feature (1)..(231): tr|A0A1R1YV18|A0A1R1YV18_9SPHN 7-cyano-7-deazaguanine s ynthase OS=Sphingomonas sp. Sph1(2015) OX=1628084 GN=qu eC PE=3 SV=1
MTSSAPMAVVLVSGGLDSMISAASAKAAGYRVLALSVDYNQRHKVELAAAARVAESLGAERHIVLPLDLSAFGGSALTADIAVPKDGVQPGIPVTYVPARNTIFLSLALGWAEAAGARDLFIGVNALDYSGYPDCRPEFIAAFEGLAEIATKAGVEGQPFKIHAPLQHMTKADIVREGTRLGVDMGISWSCYDPTPEGLHCGECDSCRLRSRGFEEAGIPDPTAYAVKPQG

SEQ ID NO: 42404 - protein, 230 aa, Sphingomonas sp.
  misc_feature (1)..(230): tr|A0A0Q8QIX0|A0A0Q8QIX0_9SPHN 7-cyano-7-deazaguanine s ynthase OS=Sphingomonas sp. Root710 OX=1736594 GN=queC PE=3 SV=1
MASQVNSEGRRAIVLLSGGLDSMVSGGIAREQGFQLAALTIDYNQRHRVELEAARRVAAALGVDRHVTMPLNLRAFGGSSLTDDIDVPKDGVMPGIPSTYVPARNTIFLSLALGFAEATGARDIFLGVNALDYSGYPDCRPEFIAAFQHLADLATKMGVEGQGFTIHAPLQHMTKADIAREADRLGLDAGMSWSCYDPTPDGRHCGLCDSCRLRSKGFAEAGLADPTVYA

SEQ ID NO: 42405 - protein, 228 aa, Sphingomonas spermidinifaciens
  misc_feature (1)..(228): tr|A0A2A4B210|A0A2A4B210_9SPHN 7-cyano-7-deazaguanine s ynthase OS=Sphingomonas spermidinifaciens OX=1141889 GN =queC PE=3 SV=1
MSAAPLAVVLVSGGLDSMVAAGRAREAGFDILALSVDYNQRHQVELAAARRIARALEAKRHVVLPLDLSAFGGSALTAEIEVPKGGVGDDIPVTYVPARNTIFLSLALGWAEAAGARDLFIGVNALDYSGYPDCRPEFIAAFEGLAELATKAGVEGEPFRIHAPLQHMTKADIAREAARLGLDAGMSWSCYDPAPGGMHCGLCDSCRLRSKGFEEAGLPDPTIYAARP

SEQ ID NO: 42406 - protein, 236 aa, Sphingomonas spermidinifaciens
  misc_feature (1)..(236): tr|A0A2A4B2F0|A0A2A4B2F0_9SPHN 7-cyano-7-deazaguanine s ynthase OS=Sphingomonas spermidinifaciens OX=1141889 GN =queC PE=3 SV=1
MTPDTGALVLFSGGQDSATCLAWALDRFETVETVGFDYGQRHRVELECRGDFRARVAELDPEWSDRLGPDHMLDLSVLGQVSETALTREAEIALRDDGLPNTFVPGRNLLFFTLAAALASRRQLRHLVGGMCETDYSGYPDCRDDTLKSLQVTLNLGMGSRAVVHTPLMWLDKAQTWALADRLGGQPLVELIRTGTHTCYRGEHEILHDWGYGCGGCPACELRSKGWEAFASAADR

SEQ ID NO: 42407 - protein, 238 aa, Sphingomonas taxi
  misc_feature (1)..(238): tr|A0A2W4YVZ7|A0A2W4YVZ7_9SPHN 7-cyano-7-deazaguanine s ynthase OS=Sphingomonas taxi OX=1549858 GN=queC PE=3 SV =1
MTSPAPFAVALVSGGLDSMVSAAMAREAGQRLLALSFDYNQRHRVELAAARRIADALGAERHIVLPMDLSAFGGSALTADIDVPKDGVGTEDGGGIPVTYVPARNTIFLSLALGWAEAAGARDIYIGVNALDYSGYPDCRPEFIAAFEGLAELATKAGVEGDPFRIQAPLQNMTKADIVREGTRLGLDLGLSWSCYDPAPGSLHCGECDSCRLRARGFEEAGIADPTRYAVPPASGPA

SEQ ID NO: 42408 - protein, 232 aa, Sphingomonas taxi
  misc_feature (1)..(232): tr|A0A2W5P790|A0A2W5P790_9SPHN 7-cyano-7-deazaguanine s ynthase OS=Sphingomonas taxi OX=1549858 GN=queC PE=3 SV =1
MTSKTPAVALVSGGLDSLVSAALAREAGHPLLALSIDYNQRHQVELAAARRVARALGAVRHVVLPIDLSAFGGSALTDAAIDVPKDGVGAAIPVTYVPARNTIFLSLALGWAEAAGARDVYLGVNALDYSGYPDCRPEFITAFEQMAELATKAGVEGAPFRFRAPLQHMTKADIVREGTRLGLDLGMSWSCYDPAPGAKHCGLCDSCRLRHKGFADAGVADPTDYAVVPPAP

SEQ ID NO: 42409 - protein, 227 aa, Sphingomonas trueperi; identical to SEQ ID NO: 42366
  misc_feature (1)..(227): tr|A0A543M6K5|A0A543M6K5_9SPHN 7-cyano-7-deazaguanine s ynthase OS=Sphingomonas trueperi OX=53317 GN=queC PE=3 SV=1

SEQ ID NO: 42410 - protein, 228 aa, Sphingomonas turrisvirgatae
  misc_feature (1)..(228): tr|A0A1E3LSY4|A0A1E3LSY4_9SPHN 7-cyano-7-deazaguanine s ynthase OS=Sphingomonas turrisvirgatae OX=1888892 GN=qu eC PE=3 SV=1
MTHSKLAVALISGGLDSYVSAACARADGYRLLALSIDYNQRHHVELAAARRIANVLGAERHVVLPLDLSLFGGSALTADIDVPKDGVGDDIPITYVPARNTIFLSLALGWAEAAGARDLYIGVNALDYSGYPDCRPEFVAGFEKLAELATKAGVEGEPFRVRAPLLEMSKADIVRKGTELGLDLGISWSCYDPAPGGVHCGLCDSCRLRSKGFEESGIADPTTYAVTP

SEQ ID NO: 42411 - protein, 230 aa, Sphingomonas wittichii
  misc_feature (1)..(230): tr|A0A1X9UJ23|A0A1X9UJ23_SPHSD 7-cyano-7-deazaguanine s ynthase OS=Sphingomonas wittichii (strain DC-6 / KACC 1 6600) OX=1283312 GN=queC PE=3 SV=1
MSDIANREGRRAIVLLSGGLDSMVSGGIAREQGFALAALTIDYNQRHRVELEAAKRVAAALGVDRHVTLPLNLRAFGGSSLTDDIDVPKDGVMPGIPSTYVPARNTIFLSLALGFAEATGARDIFLGVNALDYSGYPDCRPEFIAAFQHLADLATKMGVEGQGFTIHAPLQHMTKADIAQEAARLGLDAGMSWSCYDPTPDGKHCGLCDSCRLRSKGFADAGLADPTVYA

SEQ ID NO: 42412 - protein, 230 aa, Sphingomonas wittichii
  misc_feature (1)..(230): sp|A5V652|QUEC_SPHWW 7-cyano-7-deazaguanine synthase OS =Sphingomonas wittichii (strain RW1 / DSM 6014 / JCM 10 273) OX=392499 GN=queC PE=3 SV=1
MSDNANREGRRAIVLLSGGLDSMVSGGIAREQGFALAALTIDYNQRHRVELEAAKRVAAALGVDRHVTLPLNLRAFGGSSLTDDIDVPKDGVMPGIPSTYVPARNTIFLSLALGFAEATGARDIFLGVNALDYSGYPDCRPEFIAAFQHLADLATKMGVEGQGFTIHAPLQHMTKADIAQEAARLGLDAGMSWSCYDPTPDGKHCGLCDSCRLRSKGFADAGLADPTVYA

SEQ ID NO: 42413 - protein, 231 aa, Sphingomonas yabuuchiae
  misc_feature (1)..(231): tr|A0A147IJK8|A0A147IJK8_9SPHN 7-cyano-7-deazaguanine s ynthase OS=Sphingomonas yabuuchiae OX=172044 GN=queC PE =3 SV=1
MTSSAPMAVVLVSGGLDSMISAASAKAAGYRVLALSVDYNQRHKVELAAAARVAEALGAERHIVLPLDLSAFGGSALTADIDVPKDGVQPGIPVTYVPARNTIFLSLALGWAEAAGARDLFIGVNALDYSGYPDCRPEFIAAFEGLAEIATKAGVEGQPFKIHAPLQHMTKADIVREGTRLGVDMGISWSCYDPTPEGLHCGECDSCRLRSRGFEEAGIPDPTAYAVKPQG

SEQ ID NO: 42414 - protein, 224 aa, Sphingopyxis alaskensis
  misc_feature (1)..(224): sp|Q1GTF3|QUEC1_SPHAL 7-cyano-7-deazaguanine synthase 1 OS=Sphingopyxis alaskensis (strain DSM 13593 / LMG 188 77 / RB2256) OX=317655 GN=queC1 PE=3 SV=2
MSGKTVIVLLSGGLDSMVCAGLAREAGARIVALTIDYNQRHRVELESAARIAAHVGAAEHIVLPLDLRRFGGSALTADIDVPKDGVGTDIPVTYVPARNLIFLSLTLGLAEARQAADIVIGVNALDYSGYPDCRPAFIQGFEKLAALATRDGDQGVRFHIHAPLQHMTKADIAAEAARLGMDAAMSWSCYDPTPEGLHCGACDSCRLRRKGFADAGLADPTRYA

SEQ ID NO: 42415 - protein, 236 aa, Sphingopyxis alaskensis
  misc_feature (1)..(236): sp|Q1GPS4|QUEC2_SPHAL 7-cyano-7-deazaguanine synthase 2 OS=Sphingopyxis alaskensis (strain DSM 13593 / LMG 188 77 / RB2256) OX=317655 GN=queC2 PE=3 SV=1
MTGDAGALVLFSGGQDSATCLAWALDRFETVETVGFDYGQRHRVELECRDDFRARIVELNPAWAARLGPDHKLDLSVLGQVSETALTRDAEIALRADGLPNTFVPGRNLLFFTLAAALASRRELRHLVGGMCETDYSGYPDCRDDTLKSLQVTLNLGIGSRSVVHTPLMWLDKAQTWGLAKILGGEKLVDLIRTGTHTCYRGDHDRLQDWGYGCGTCPACELRMKGWQEHRSSLDE

SEQ ID NO: 42416 - protein, 230 aa, Sphingopyxis bauzanensis
  misc_feature (1)..(230): tr|A0A246JRF3|A0A246JRF3_9SPHN 7-cyano-7-deazaguanine s ynthase OS=Sphingopyxis bauzanensis OX=651663 GN=queC P E=3 SV=1
MHDVAGKTLIVLLSGGLDSMVCAGLAREAGARIVALTIDYNQRHRVELESAARIAAEVGAAEHIVLPLDLRRFGGSALTADIDVPKNGVGSVVPVTYVPARNLIFLSLTLGLAEARRAQDIVIGVNALDYSGYPDCRPDFIAGFEDLARLATRDGDQGVDFRIHAPLQHMTKADIAAEAARLGMDAGMSWSCYDPTPEGLHCSYCDSCRLRSKGFADAGLADPTRYAVGP

SEQ ID NO: 42417 - protein, 272 aa, Sphingopyxis flava
  misc_feature (1)..(272): tr|A0A1T5D766|A0A1T5D766_9SPHN 7-cyano-7-deazaguanine s ynthase OS=Sphingopyxis flava OX=1507287 GN=queC PE=3 S V=1
MCPSPYGFVPNWAAGTARAAHFLGAVQHPLLRARLAGRIGRGMQDICGKTVIVLLSGGLDSMVCAGLASEAGARIVALTVDYNQRHRVELDSAARIAGHVGAAEHIILPLDLRRFGGSALTADIDVPKDGPLGEASDIPVTYVPARNLIFLSLTLGLAEARRAQDIVIGVNALDYSGYPDCRPEFISGFESLARLATRDGDRGVDFHIHAPLQHMTKADIAAEAARLGLDAGMSWSCYDPTPAGLHCGRCDSCRLRSKGFADAGLADPTRYD

SEQ ID NO: 42418 - protein, 227 aa, Sphingopyxis fribergensis
  misc_feature (1)..(227): tr|A0A0A7PEC5|A0A0A7PEC5_9SPHN 7-cyano-7-deazaguanine s ynthase OS=Sphingopyxis fribergensis OX=1515612 GN=queC 1 PE=3 SV=1
MQDLAGKTLIVLLSGGLDSMVCAGLAREAGARIVALTIDYNQRHRVELESAARIAATVGAAEHIVLPLDLRRFGGSALTADIDVPKDGVGSDVPVTYVPARNLIFLSFTLGLAEARQAQDIVIGVNALDYSGYPDCRPEFIQGFEDLARLATRDGDQGVEFRIHAPLQHMPKADIATEAARLGMDAGMSWSCYDPTPEGLHCGGCDSCRLRSKGFADAGLTDPTRYA

SEQ ID NO: 42419 - protein, 273 aa, Sphingopyxis granuli
  misc_feature (1)..(273): tr|A0A0X8R3E7|A0A0X8R3E7_9SPHN 7-cyano-7-deazaguanine s ynthase OS=Sphingopyxis granuli OX=267128 GN=queC1 PE=3 SV=1
MWFFFLKAFMPNWAVQQRLRGPFPLSARALRGRRRERNGRRMQDLAGKPLVVLLSGGLDSMVCAGLAREAGARIVALTIDYNQRHRVELESAARIAAAVGADEHIVLPLDLRRFGGSALTADIAVPKDGVGEDIPVTYVPARNLIFLSLTLGLAEARRAADIVIGVNALDYSGYPDCRPEFIAGFEALARLATRDGDQGVAFRIHAPLQYMSKADIAAEAARLGLDAGMSWSCYDPAPDGLHCGLCDSCRLRSKGFAEAGLTDPTRYAVKPPA

SEQ ID NO: 42420 - protein, 231 aa, Sphingopyxis indica
  misc_feature (1)..(231): tr|A0A239E9F2|A0A239E9F2_9SPHN 7-cyano-7-deazaguanine s ynthase OS=Sphingopyxis indica OX=436663 GN=queC PE=3 S V=1
MQMMHGKTMIVLLSGGLDSMVCAGLAREAGARIVALTVDYNQRHRVELESAARIAAAVGAAEHIVLPLDLRRFGGSALTDDIAVPKEGVSQDDIPVTYVPARNLIFLSLTLGLAEARLAQDIAIGVNALDYSGYPDCRPEFIAGFEALARLATRDGDKGVDFKIHAPLQHMTKADIAAEAARLGMDAGMSWSCYDPTPEGLHCGQCDSCRLRHKGFVDAGLADPTRYAVAV

SEQ ID NO: 42421 - protein, 227 aa, Sphingopyxis lindanitolerans
  misc_feature (1)..(227): tr|A0A2S8BB82|A0A2S8BB82_9SPHN 7-cyano-7-deazaguanine s ynthase OS=Sphingopyxis lindanitolerans OX=2054227 GN=q ueC PE=3 SV=1
MQQLSGKTVIVLLSGGLDSMVCAGLAREAGARIVALTVDYNQRHRVELESAARIADHIGAAEHIVLPLDLRRFGGSALTADIDVPKDGVGSDVPITYVPARNLIFLSLTLGLAEARQAQDIMIGVNALDYSGYPDCRPDFIAGFEALATLATRDGDRGVAFRIHAPLQHMTKADIAAEAARLGMDAGMSWSCYDPTPEGLHCGACDSCRLRSKGFAEAGLADPTRYA

SEQ ID NO: 42422 - protein, 230 aa, Sphingopyxis macrogoltabida
  misc_feature (1)..(230): tr|A0A2W5L019|A0A2W5L019_SPHMC 7-cyano-7-deazaguanine s ynthase OS=Sphingopyxis macrogoltabida OX=33050 GN=queC PE=3 SV=1
MQDLAGKTLIVLLSGGLDSMVCAGLASEAGARIVALTIDYNQRHRVELESAARIAAAVGAAEHIVLPLDLRRFGGSALTADIDVPKEGVGADIPVTYVPARNLIFLSLTLGLAEARQAQDIVIGVNALDYSGYPDCRPEFIAGFQDLARLATRDGDKGVAFRIHAPLQQMSKADIAAEAARLGMDAGMSWSCYDPAPGGLHCGYCDSCRLRAKGFADAGLTDPTRYAAKA

SEQ ID NO: 42423 - protein, 229 aa, Sphingopyxis macrogoltabida
  misc_feature (1)..(229): tr|A0A0P0DTB2|A0A0P0DTB2_SPHMC 7-cyano-7-deazaguanine s ynthase OS=Sphingopyxis macrogoltabida OX=33050 GN=queC PE=3 SV=1
MQNLAGKTLIVLLSGGLDSMVCAGLAREAGARIVALTIDYNQRHRVELESAARIARDVGAAEHIVLPLDLRRFGGSALTADIDVPKDGVGDDVPITYVPARNLIFLSLTLGLAEARQAQDIVIGVNALDYSGYPDCRPEFIAGFQDLARLATRDGDKGVDFHIHAPLQHMTKADIAAEAARLGMDAGMSWSCYDPTPDHLHCGLCDSCRLRSKGFADAGLPDPTRYTGA

SEQ ID NO: 42424 - protein, 230 aa, Sphingopyxis sp.
  misc_feature (1)..(230): tr|A0A270BKU7|A0A270BKU7_9SPHN 7-cyano-7-deazaguanine s ynthase OS=Sphingopyxis sp. GW247-27LB OX=2012632 GN=qu eC PE=3 SV=1
MHDMHGKTVIVLLSGGLDSMVCAGLAREAGARIVALTVDYNQRHRVELESAAHIADYVGAAEHIVLPLDLRRFGGSALTADIDVPKDGPIGEASDVPVTYVPARNLIFLSLTLGLAEARRAQDIVIGVNALDYSGYPDCRPEFIASFEALARLATRDGDKGVDFHIHAPLQHMTKADIAAEAARLGMDAGMSWSCYDPTPEGLHCGHCDSCRLRSKGFADAGLTDPTRYA

SEQ ID NO: 42425 - protein, 227 aa, Sphingopyxis sp.
  misc_feature (1)..(227): tr|A0A0W1DUV9|A0A0W1DUV9_9SPHN 7-cyano-7-deazaguanine s ynthase OS=Sphingopyxis sp. H050 OX=1759072 GN=queC PE= 3 SV=1
MQQVSGKTVIVLLSGGLDSMVCAGLAREAGARIVALTIDYNQRHRVELESAARIAATIGAGEHIVLPLDLRRFGGSALTDDIDVPKDGVGPDIPVTYVPARNLIFLSLTLGLAEARQARDIVIGVNALDYSGYPDCRPEFIQGFENLAALATRDGDKGVDFHIHAPLQHMTKADIAAEAARLGLDAGMSWSCYDPTPEGLHCGSCDSCRLRSKGFVDAGLPDPTHYA

SEQ ID NO: 42426 - protein, 230 aa, Sphingopyxis terrae
  misc_feature (1)..(230): tr|A0A142W2X6|A0A142W2X6_9SPHN 7-cyano-7-deazaguanine s ynthase OS=Sphingopyxis terrae subsp. terrae NBRC 15098 OX=1219058 GN=queC PE=3 SV=1
MQDLSGKTVIVLLSGGLDSMVCAGLAREAGARIVALTVDYNQRHRVELDSAARIATAVGAAEHIVLPLDLRRFGGSALTADIDVPKDGVCEDIPVTYVPARNLIFLSLTLGLAEARRSQDIFIGVNALDYSGYPDCRPEFIAGFQHLAQLATRDGDKGVDFVIHAPLQHMTKADIAAEAARLGMDAGMSWSCYDPTPEGLHCGLCDSCRLRRKGFADAGLADPTRYAVEA

SEQ ID NO: 42427 - protein, 230 aa, Sphingopyxis terrae
  misc_feature (1)..(230): tr|A0A1Y6EII3|A0A1Y6EII3_9SPHN 7-cyano-7-deazaguanine s ynthase OS=Sphingopyxis terrae subsp. ummariensis OX=42 9001 GN=queC PE=3 SV=1
MQDLSGKTVIVLLSGGLDSMVCAGLAREAGARIVALTVDYNQRHRVELDSAARIATAVGAAEHIVLPLDLRRFGGSALTADIDVPKDGVGEDIPVTYVPARNLIFLSLTLGLAEARRSQDIFIGVNALDYSGYPDCRPEFIAGFQHLAQLATRDGDKGVDFAIHAPLQHMTKADIAAEAARLGMDAGMSWSCYDPTPEGLHCGLCDSCRLRRKGFADAGLADPTRYAVEA

SEQ ID NO: 42428 - protein, 230 aa, Sphingopyxis witflariensis
  misc_feature (1)..(230): tr|A0A246K4R1|A0A246K4R1_9SPHN 7-cyano-7-deazaguanine s ynthase OS=Sphingopyxis witflariensis OX=173675 GN=queC PE=3 SV=1
MQDISGKTLIVLLSGGLDSMVCAGLAREAGARIVALTIDYNQRHRVELESAARIAKSIGAAEHIVLPLDLRRFGGSALTADIDVPKDGMSSDVPITYVPARNLIFLSLTLGLAEARQAQDIVIGVNALDYSGYPDCRPDFIAGFEDLARLATRDGDIGVAFRIHAPLQYMTKADIAVEATRLGMDAGMSWSCYDPTPEGLHCGLCESCRLRSKGFADAGIPDPTRYAAGV

SEQ ID NO: 42429 - protein, 227 aa, Sphingorhabdus contaminans
  misc_feature (1)..(227): tr|A0A553WH46|A0A553WH46_9SPHN 7-cyano-7-deazaguanine s ynthase OS=Sphingorhabdus contaminans OX=1343899 GN=que C PE=3 SV=1
MNANRKSAIVLLSGGLDSMVVAGLAREAGYALVALTIDYNQRHRVELESATHIARHLDAIEHIILPLDLTRFGGSALTADIDVPKEGVEEDAIPVTYVPARNTIFLSLCLGLAEARGARDLWIGVNALDYSGYPDCRPEFIRSFEAMANLATKAGVEGDAFTIHTPLLHMSKAQIATEAARLGLDAGMSWSCYDPTPDHKACGKCDSCRLRAKGFADAGLVDPTIYA

SEQ ID NO: 42430 - protein, 229 aa, Sphingorhabdus marina
  misc_feature (1)..(229): tr|A0A1N6F586|A0A1N6F586_9SPHN 7-cyano-7-deazaguanine s ynthase OS=Sphingorhabdus marina DSM 22363 OX=1123272 G N=queC PE=3 SV=1
MSQVRKTAIILLSGGLDSMVAGAIAREQGYDIVALTVDYNQRHKIELQSALQIAAELGVAEHIVLPLDLSRFGGSALTDDIAVPKSGVTNDIPVTYVPARNLIFLSLTLGLAEARDARDIFIGVNALDYSGYPDCRPEFIEGFERLADLATKAGDEGSGFNIRTPLQFMTKADIAKEAHRLQIDPALSWSCYDPAEGNLHCGRCDSCRLRQKGFEEAGIADPTRYVSST

SEQ ID NO: 42431 - protein, 228 aa, Sphingorhabdus sp.
  misc_feature (1)..(228): tr|A0A220W3Z7|A0A220W3Z7_9SPHN 7-cyano-7-deazaguanine s ynthase OS=Sphingorhabdus sp. SMR4y OX=2584094 GN=queC PE=3 SV=1
MTSESKTAIILLSGGLDSMVSAAIAAEQGYRLIALTVDYNQRHKVELQSARTIAAKLDVAEHIILPLDLSRFGGSALTADIDVPKSGVTDDIPVTYVPARNLIFLSLTLGLAEARDARDIFIGVNALDYSGYPDCRPEFIQGFERLADLATKAGDQGSGFTIRTPLQHMSKADIASEAIRLGLDPAWSWSCYDPTEDGLPCGLCDSCRLRQKGFEEAGIIDPTRYATL

SEQ ID NO: 42432 - protein, 231 aa, Sphingorhabdus sp.
  misc_feature (1)..(231): tr|A0A5C6ULI4|A0A5C6ULI4_9SPHN 7-cyano-7-deazaguanine s ynthase OS=Sphingorhabdus sp. D-2Q-5-6 OX=2601267 GN=qu eC PE=3 SV=1
MNTLDENLAVVLLSGGLDSMVCAALAREAGRDVLALTIDYNQRHRIELESAARIAAHVGALRHVVLPLDLSAFGGSALTADIAVPKSGVGDDIPVTYVPARNTVFLSLCLAWAEAAGAREIYIGVNSMDYSGYPDCRPEFIAAFADLAALATKAGDGGERFAIQTPLQHMTKADIAAEAVRLGLDPAMSWSCYDPTPDLKHCGLCDSCRLRRAGFAAAGLDDPTRYAAAAD

SEQ ID NO: 42433 - protein, 227 aa, Sphingorhabdus wooponensis
  misc_feature (1)..(227): tr|A0A3R8Q9J1|A0A3R8Q9J1_9SPHN 7-cyano-7-deazaguanine s ynthase OS=Sphingorhabdus wooponensis OX=940136 GN=queC PE=3 SV=1
MSIQNTSAIVLLSGGLDSMVVAGLAREAGYDLIALTIDYNQRHRVELDSAARIAMHLGAKEHIVLPLDLTRFGGSALTADIDVPKQGVESGAIPVTYVPARNTIFLSLCLGLAEARDARDLWIGVNALDYSGYPDCRPEFIRAFEATANLATKAGVEGDSFTIHTPLLDMSKADIAREAARLGLDAGMSWSCYDPSPDHKACGQCDACRLRAKGFADAGLLDPTIYA

SEQ ID NO: 42434 - protein, 231 aa, Sphingosinicella ginsenosidimutans
  misc_feature (1)..(231): tr|A0A5C6TQL9|A0A5C6TQL9_9SPHN 7-cyano-7-deazaguanine s ynthase OS=Sphingosinicella ginsenosidimutans OX=117653 9 GN=queC PE=3 SV=1
MAQASKAPLGVVLLSGGMDSMVVAGLAREAGYRLAALTIDYNQRHRVELQAAARIAAHLDAERHVVLPLDLTRFGGSALTADIAVPKGGVGEGIPVTYVPARNTIFLSLCLGWAEAIGARDLFIGVNALDYSGYPDCRPEFVRAFEDMANLATKAGVEGDRFTVHTPLMAMTKADISREAARLGLDAAMSWTCYDPTPAGEHCGACDSCRLRARGFAEAGLPDPTVYAARS

SEQ ID NO: 42435 - protein, 233 aa, Sphingosinicella microcystinivorans
  misc_feature (1)..(233): tr|A0A495RW65|A0A495RW65_SPHMI 7-cyano-7-deazaguanine s ynthase OS=Sphingosinicella microcystinivorans OX=33540 6 GN=queC PE=3 SV=1
MITSQPAIVLLSGGLDSVTCAAIARESGYAVHALTVDYNQRHRVELEAARRAAAMYAVRHIVLPLDLRAFGGSALTDEIAVPKGDGAVDSGVIPPTYVPARNTVFLSVALAWAEAIDARDIFIGVNALDYSGYPDCRPAFIAAFEALAATATKAGSEGERFKVHTPLIDLDKAGIAREATRLGVDIAGTWTCYDPATAADGTPLHCGRCDACRLRHKGFEEAGLPDPTTYAAP

SEQ ID NO: 42436 - protein, 231 aa, Sphingosinicella sp.
  misc_feature (1)..(231): tr|A0A4P6FTK6|A0A4P6FTK6_9SPHN 7-cyano-7-deazaguanine s ynthase OS=Sphingosinicella sp. BN140058 OX=1892855 GN= queC PE=3 SV=1
MTSNARNAVALVSGGLDSMVSAAHAREAGFALFALTIDYGQRHRIELEAAARVAAALGAVRHIVLPLDLTAFGGSALTADIDVPKSGVAAEDEVPVTYVPARNTIFLSLALGWAEAAGARDLFIGVNALDYSGYPDCRPDFIAAFEHVASLGTKAGAEGDRFRIHAPLQHMTKADIAKEAARLGLDAGISWSCYDPTPRGEHCGFCDSCRLRAKGFEEAGLADPTRYAARP

SEQ ID NO: 42437 - protein, 230 aa, Sphingosinicella sp.
  misc_feature (1)..(230): tr|A0A2P7QJ24|A0A2P7QJ24_9SPHN 7-cyano-7-deazaguanine s ynthase OS=Sphingosinicella sp. GL-C-18 OX=2116704 GN=q ueC PE=3 SV=1
MTSASRKAVALVSGGLDSMISAAHARERGFELYALTVDYGQRHRIELEAAGRVAAALGAVRHIVLPLDLTAFGGSALTADIDVPKSGVDEDAVPVTYVPARNTIFLSLALGWAEAAGARDLFIGVNALDYSGYPDCRPDFIAAFERVAALGTKAGSEGDGFKIHAPLQHMTKADIAKEAARLGLDAGISWSCYDPTPQGEHCGFCDSCRLRSKGFEEAGLPDPTVYAARP

SEQ ID NO: 42438 - protein, 241 aa, Spiribacter salinus
  misc_feature (1)..(241): tr|A0A540VRQ3|A0A540VRQ3_9GAMM 7-cyano-7-deazaguanine s ynthase OS=Spiribacter salinus OX=1335746 GN=FKY71_0861 0 PE=3 SV=1
MTKVILNSGGMDSFFVARMVPDAHHVFVDVGQRYAHKEREAARRIADHVGQPLEIVLSADIAKFEHKPSGIIPLRNAELILQAAQYGNDIYLGILSNEINSDKSPEFLRAMEEVLNISCRAQYWSAGTHFTLHTPLGTQSKAQLVAGLLAAVRRDITYHAAWQTMLSTVSCYDGGGLHCGKCPSCFKRWVALTVATGVDADSLHPFVEDPATWATLEEWEAKGYPEERIQEIRDAYAIAGL

SEQ ID NO: 42439 - protein, 254 aa, Spiribacter sp.
  misc_feature (1)..(254): tr|A0A2U2MY32|A0A2U2MY32_9GAMM Uncharacterized protein OS=Spiribacter sp. E85 OX=2182432 GN=DEM34_15135 PE=4 S V=1
MRHVLWSAGWDSTFLVAKAVLVDCATIQPYYLFTTSRRSAGRELFTLQRLKMRIRAMAAGRAGRILPTRVVEHDALPVSETRAAQYASFRKLAYLGEQYLLLACMADYLSLDQLEIGVYWDGRIGSFLRDARVGRYPAWAAGRTPELEDALRLLEPFEFPLLDLTKHDMAEQAARYGFLPILRETWFCHRPRGERPCGECNPCRYAMEEGFGWRIPLGNRVRGRIRRTFYRAHRLISDPDYVVSLWSRMHRSGQ

SEQ ID NO: 42440 - protein, 221 aa, Spirochaetaceae bacterium; identical to SEQ ID NO: 39282
  misc_feature (1)..(221): tr|A0A2E8PWY4|A0A2E8PWY4_9SPIO 7-cyano-7-deazaguanine s ynthase OS=Spirochaetaceae bacterium OX=1898206 GN=queC PE=3 SV=1

SEQ ID NO: 42441 - protein, 226 aa, Spirochaetaceae bacterium
  misc_feature (1)..(226): tr|A0A1W9VVZ9|A0A1W9VVZ9_9SPIO 7-cyano-7-deazaguanine s ynthase OS=Spirochaetaceae bacterium 4572_7 OX=1972456 GN=queC PE=3 SV=1
MKKQLQIKKALCVMSGGMDSTLSAYMMKNDGYEIIAVHFNYDQRTQTKELECFNSICNDLNVKEKYILDLDFFKQLGASALTDKSIDVPIGGVEKGVPITYVPFRNGIFLSMAAAIAEKEGAEVISIGVVEEDSSGYPDCRESYIRSMQDSINLGTKDETNIEIKMPLVHLQKSQIVQESLKLDVPLHLTWSCYKNEDRACGVCDSCRLRLNGFSLAGEKDPIEYE

SEQ ID NO: 42442 - protein, 231 aa, Spirochaetae bacterium
  misc_feature (1)..(231): tr|A0A2N1TG24|A0A2N1TG24_9SPIR 7-cyano-7-deazaguanine s ynthase OS=Spirochaetae bacterium HGW-Spirochaetae-1 OX =2013832 GN=queC PE=3 SV=1
MTSHEKAVVLLSGGLDSATVAAIAVQRGFSLHALTFNYGQRHDVELRSAGKLAGFFRTESHVIIDIPSKVFSTALVKNSGIDVPKNRLHDADVIPSTYVPARNIIFLSFALAYAESSGARHIFIGANAVDYSGYPDCRPEFFRAFQVMADAGTRAGVEGRGFIIETPLLEWTKAEIIRKGVELGVDYSMTHSCYDPGDDGTSCGECDSCIIRSRGFAEAGVPDPTIYRKKS

SEQ ID NO: 42443 - protein, 228 aa, Spirochaetae bacterium
  misc_feature (1)..(228): tr|A0A2N1RWK4|A0A2N1RWK4_9SPIR 7-cyano-7-deazaguanine s ynthase OS=Spirochaetae bacterium HGW-Spirochaetae-5 OX =2013837 GN=queC PE=3 SV=1
MNKKGVILLSGGLDSATVAAIAVKEGYSLSALTFFYSQRHEVEITFAERLAKHFRMDNHIKISIPAEIFRTALTAESGIDVPKNREISESSIPETYVPARNIIFLSYALAFAESTGASDIFIGANAVDYSGYPDCRPEFFEAFKKMAQMGTKAGVEGKGFNIHTPLMNMNKNEIIRLGTELGVDYSLTHSCYDPSPDGSSCGECDSCFLRMKGFAEAGVPDPTRYRAE

SEQ ID NO: 42444 - protein, 243 aa, Spirochaetales bacterium
  misc_feature (1)..(243): tr|A0A2E9KWP1|A0A2E9KWP1_9SPIR 7-cyano-7-deazaguanine s ynthase OS=Spirochaetales bacterium OX=2026792 GN=queC PE=3 SV=1
MKKALVILSGGQDSTTCLFWAINKGYSCSTITFNYNQLHKIEINSAIKISQLASIKDHEIIDIGPIFDGDSPLTNPNKALEQHSKIEDFPTGIQQTFVPARNLLFLSIAANRAYSKNISTIIIGVCQEDFGGYPDCRQDFITSMTETISLSLEKKIEILTPVINLKKSEIIKLANQLGDPCWSSLAYTHTSYDGRYPPSSEDHANILRSKGFEEAGLPDPLVLRAASEKLIELPKTKNYETKS

SEQ ID NO: 42445 - protein, 231 aa, Spirochaetes bacterium
  misc_feature (1)..(231): tr|A0A1G3NYG4|A0A1G3NYG4_9SPIR 7-cyano-7-deazaguanine s ynthase OS=Spirochaetes bacterium GWF1_31_7 OX=1802187 GN=queC PE=3 SV=1
MEQCYLNEDAVVLTSGGQDSTTCLVWALQNFRKVHAISFFYNQKHSNENDIARRICEKLSVPFKLVDISFMKDLVISNLFKGGGDLNEKHQSSNSVPSSFVPYRNLLFLTLASAWAGTVGARHIVTGVCETDFSGYADCRDVFIKSTQVTLNLATDFKDKNVVLHTPLMWLTKAEEFKMAADIGCLDLILKETLTCYNGVETMNEYGKGCGECPSCLLRKKGYDEFRKKYN

SEQ ID NO: 42446 - protein, 227 aa, Spirochaetes bacterium
  misc_feature (1)..(227): tr|A0A1V5VZ81|A0A1V5VZ81_9SPIR 7-cyano-7-deazaguanine s ynthase OS=Spirochaetes bacterium ADurb.Bin218 OX=18529 06 GN=queC_1 PE=3 SV=1
MAKVGIVLLSGGLDSATVAAIARNEGYDLHAMTFLYSQRHKIEVLFAERLVQHFGIKKHIKIEIPSEIFQTALVEGSNISVPKNRDIDETSIPETYVPGRNILFLSYALAYGESVGADAIFIGANAVDYSGYPDCRPDFFEAFKKMADKGTKAGVEGRGINIFAPLMYLKKHEIIKLGISLGVDYSLTHSCYDPFEDGSSCGNCDSCILRKRGFAEAGVADPTKYRE

SEQ ID NO: 42447 - protein, 231 aa, Spirochaetia bacterium; identical to SEQ ID NO: 42445
  misc_feature (1)..(231): tr|A0A354G7M7|A0A354G7M7_9SPIR 7-cyano-7-deazaguanine s ynthase OS=Spirochaetia bacterium OX=2053615 GN=queC PE =3 SV=1

SEQ ID NO: 42448 - protein, 230 aa, Spirochaetia bacterium
  misc_feature (1)..(230): tr|A0A3D3AMZ6|A0A3D3AMZ6_9SPIR 7-cyano-7-deazaguanine s ynthase OS=Spirochaetia bacterium OX=2053615 GN=queC PE =3 SV=1
MSSTAIVLLSGGLDSATVSAIAKSEGKRILALTFDYGQKHKIEIERALAIGKMMGVAEHQVIKIDLKVFGGSSLTEDSIEVQKNRSEKEMGSGIPLTYVPARNTIFISYALAFAEVRNADSIYIGVNALDYSGYPDCRPEYIDAFNHLASLALKKTVENKPVVIKTPIIHMTKAQIIKKGLELGIDYSKTHSCYDPIEDKACGACDSCLLRKKGFQEAGMEDPTLYYHPS

SEQ ID NO: 42449 - protein, 223 aa, Spongiibacter sp.
  misc_feature (1)..(223): tr|A0A2E9SQP1|A0A2E9SQP1_9GAMM 7-cyano-7-deazaguanine s ynthase OS=Spongiibacter sp. OX=2024860 GN=queC PE=3 SV =1
MSKKAIVLVSGGLDSATVLAKARAEGYECYALAFDYGQRHRAELLAAQRVADAMAAAAFKVIKLDLSSIGGSALTDINIDVPDAGGEGIPVTYVPARNTVFLSIALGWAEVIGANSIHIGVNAVDYSGYPDCRPAFIDAFEKLANVATKAGIEGQGLHIETPLIDLSKSEIIQLGMQLNVDYGLTVSCYRADDNGLACGRCDSCYLRREGFAQAGVADPTRYK

SEQ ID NO: 42450 - protein, 223 aa, Spongiibacter sp.
  misc_feature (1)..(223): tr|A0A2D7WEG9|A0A2D7WEG9_9GAMM 7-cyano-7-deazaguanine s ynthase OS=Spongiibacter sp. OX=2024860 GN=queC PE=3 SV =1
MTKKAIVLVSGGLDSATVLAQARADGYECYALAFDYGQRHRAELIAARRVADAHGAKEFKIIKLDLSSIGGSALTDASIDVPDAGGEGIPITYVPARNTVFLSIALGWAEVIGANSIHIGVNAVDYSGYPDCRPAFIDAFEHLANVATKVGVEGQAMHIATPLIDLSKAQIIGLGTDLGVDYSLTVSCYQADDEGYACGRCDSCHLRRQGFIEAGVSDPTRYR

SEQ ID NO: 42451 - protein, 231 aa, Spongiibacteraceae bacterium
  misc_feature (1)..(231): tr|A0A2E2K5M7|A0A2E2K5M7_9GAMM 7-cyano-7-deazaguanine s ynthase OS=Spongiibacteraceae bacterium OX=2026793 GN=q ueC PE=3 SV=1
MTTPKRAVILVSGGLDSATVLAMARAEDYDCYTLAFDYGQRHRAELLAAERVSKALGAVEHKVIPLDLTAIGGSALTDNTIAVPDHSDEAGIPVTYVPARNTVFLSIGLGWAEVLGADDIFIGVNAVDYSGYPDCRPDFIEAFERMANLATKAGVEGHPLRIRTPLIDLSKGEIIRRGMVLGVDYALTVSCYQADADGRACGKCDSCYLRREGFTAAGLDDPTRYWGSVID

SEQ ID NO: 42452 - protein, 226 aa, Spongiibacteraceae bacterium
  misc_feature (1)..(226): tr|A0A2E7IPR1|A0A2E7IPR1_9GAMM 7-cyano-7-deazaguanine s ynthase OS=Spongiibacteraceae bacterium OX=2026793 GN=q ueC PE=3 SV=1
MTDKKRAVVLVSGGLDSATVLAMARADGYDCYALAFDYGQRHRAELHAARNVAEISGAIEYKVIPLDLTAIGGSALTDANIAVPDHSDAPGIPVTYVPARNTVFLSIALGWAEVLGAESIFIGVNAVDYSGYPDCRPDFIQAFETLANLATKAGVEGGGLRVVTPLIDLSKADIIRKGIALGVDYAQTVSCYQADDGGQACGRCDSCFLRRQGFDAAGVEDPTRYQ

SEQ ID NO: 42453 - protein, 231 aa, Sporolactobacillus inulinus
  misc_feature (1)..(231): tr|A0A0U1QPM3|A0A0U1QPM3_9BACL 7-cyano-7-deazaguanine s ynthase OS=Sporolactobacillus inulinus CASD OX=1069536 GN=queC PE=3 SV=1
MKKRAVVVLSGGLDSTTCMGVAKEQGYELWPMTFSYGQRHDREVEQARKIADYFQVNTHRIVNLDFFKQLGGSALTDQQLDVPQNEENPGIPITYVPARNMIFLALASAYAEVIGASAVFTGVSSVDYSGYPDCRPEFIESMAKTVNLATRAGVTDHKISIETPLMHLTKAETIRLGTRLHVPYERTTSCYNGGDKACGTCDSCRLRIKGFQEAGLVDPIDYAIPIDWSRE

SEQ ID NO: 42454 - protein, 231 aa, Sporolactobacillus inulinus; identical to SEQ ID NO: 42453
  misc_feature (1)..(231): tr|A0A4Y3T8P5|A0A4Y3T8P5_9BACL 7-cyano-7-deazaguanine s ynthase OS=Sporolactobacillus inulinus OX=2078 GN=queC PE=3 SV=1

SEQ ID NO: 42455 - protein, 230 aa, Sporolactobacillus laevolacticus
  misc_feature (1)..(230): tr|V6IYD3|V6IYD3_9BACL 7-cyano-7-deazaguanine synthase OS=Sporolactobacillus laevolacticus DSM 442 OX=1395513 GN=queC PE=3 SV=1
MAKKAVVVLSGGLDSTTCMGIANREGYELYPLTFSYGQRHQREVEQAKKIAAYYGVSEHRIVDLDFFKQLGGSALTDKSIEVPDDGEEKGIPVTYVPARNMIFLSLASAYAEVIGAETIFTGVSSVDYSGYPDCRPEFIASMSETINLATKSGVTDHHLTIKTPLMHLTKGETIRLGTELGVPYQLTTSCYNGEEEACGTCDSCRLRIKGFKEAGQIDPISYRIPIDWLN

SEQ ID NO: 42456 - protein, 229 aa, Sporolactobacillus nakayamae
  misc_feature (1)..(229): tr|A0A1I2Q5A5|A0A1I2Q5A5_9BACL 7-cyano-7-deazaguanine s ynthase OS=Sporolactobacillus nakayamae OX=269670 GN=qu eC PE=3 SV=1
MKKAVIVLSGGLDSTTCMSIANNVGYELCPITFCYGQRHQREVEQAKKIAAFYEVKEHRIVDLDFFRQLGGSALTDASIRVPEDGTEKGIPVTYVPARNMIFLSLATAYAEVIGADTIFTGVSSVDYSGYPDCRPEFIRSMNQTINLATKTGVSAHHLTIKTPLMHLTKADTVRLGMKLSAPYQLTTSCYNGGEKACGTCDSCRLRIKGFKEAGLVDPIPYQITVDWTN

SEQ ID NO: 42457 - protein, 230 aa, Sporolactobacillus shoreae
  misc_feature (1)..(230): tr|A0A4Z0GNZ4|A0A4Z0GNZ4_9BACL 7-cyano-7-deazaguanine s ynthase OS=Sporolactobacillus shoreae OX=1465501 GN=que C PE=3 SV=1
MTKKAVVVLSGGLDSTTCMGIAKSEGFELYPLTFSYGQRHQREIEQAKKIASFFNVTEHRIIDLDFFRQIGGSALTDQSIDVPDDGEDNGIPVTYVPARNMIFLSLASAYAEVIGAEAIFTGVSSVDYSGYPDCRPEFIESMNQTINLATKTGVTNHHLSIKTPLMYLTKGETIRLGTELGVPYDLTTSCYKGGEEACGTCDSCRLRIKGFKEAGQVDPIAYQLPIDWTN

SEQ ID NO: 42458 - protein, 230 aa, Sporolactobacillus sp.
  misc_feature (1)..(230): tr|A0A4Q4IPW2|A0A4Q4IPW2_9BACL 7-cyano-7-deazaguanine s ynthase OS=Sporolactobacillus sp. THM7-4 OX=2511170 GN= queC PE=3 SV=1
MTRKAVVVLSGGLDSTTCMGIARDRGYELYPVTFSYGQRHDREVEQAKKVANYFHARHHRIVDIDFFKQIGGSALTDLSIDVPQAGVGEGIPATYVPARNMIFLSLASAYAEVLGAEAIFIGVSSVDYSGYPDCRPEFIESMNQTVNLATKTGTTDHGLTIEAPLMHLTKSETIKLGTRLGVPYHLTTSCYNGGETACGTCDSCRLRIKGFKEAGLIDPVPYQIAIDWNA

SEQ ID NO: 42459 - protein, 230 aa, Sporolactobacillus sp.
  misc_feature (1)..(230): tr|A0A4Q4J6Q9|A0A4Q4J6Q9_9BACL 7-cyano-7-deazaguanine s ynthase OS=Sporolactobacillus sp. THM7-7 OX=2511172 GN= queC PE=3 SV=1
MAKKAVVVLSGGLDSTTCMGIAKDQGYELYPITFSYGQRHDREIEQAKKVAAYFQVKQHRIVDIGFFKQIGGSALTDASVSVPQDGLGQDIPVTYVPARNMIFLSLASAYAEVLGAEAIFTGVSSVDYSGYPDCRPEFIDSMNQTINLATKAGVTDHRLSIQTPLIHLSKSETIKLGTKLGVPYHLTTSCYNGGDKACGVCDSCRLRIKGFKEAGLVDPIPYQVDIDWNA

SEQ ID NO: 42460 - protein, 231 aa, Sporolactobacillus terrae
  misc_feature (1)..(231): tr|A0A410D5Q2|A0A410D5Q2_9BACL 7-cyano-7-deazaguanine s ynthase OS=Sporolactobacillus terrae OX=269673 GN=queC PE=3 SV=1
MKKRAVVVLSGGLDSTTCMGVAKDQGYELWPMTFSYGQRHDREVEQARKIADYFQVNTHRIVNLDFFKQLGGSALTDQQLDVPQNEENPGIPITYVPARNMIFLALASAYAEVIGASAVFTGVSSVDYSGYPDCRPEFIESMAKTVNLATRAGVTEHKISIETPLMHLTKAETIRLGTRLHVPYERTTSCYNGGDKACGTCDSCRLRIKGFQEAGLVDPIDYAIPIDWSRA

SEQ ID NO: 42461 - protein, 223 aa, Sporolituus thermophilus
  misc_feature (1)..(223): tr|A0A1G7NX16|A0A1G7NX16_9FIRM 7-cyano-7-deazaguanine s ynthase OS=Sporolituus thermophilus DSM 23256 OX=112328 5 GN=queC PE=3 SV=1
MFGLNKEIALVVFSGGQDSTTCLFWAMKHFKGVEAVTFDYGQRHRAEIECAQKIAAEQGISHTILDLSLLNQLAPSALTRKDIEVRVGENGSLPTTFVPGRNLLFLSFAAVLARQKNIRHIVTGVCETDFSGYPDCRDAFIKSLNVTIQLAMDYQFVIHTPLMWLNKAETWQLADELGVLDYIRTNTLTCYHGVIGDGCGQCPACRLRAAGLAAYLEQKGRTK

SEQ ID NO: 42462 - protein, 228 aa, Sporomusa acidovorans
  misc_feature (1)..(228): tr|A0A259UAN6|A0A259UAN6_9FIRM 7-cyano-7-deazaguanine s ynthase OS=Sporomusa acidovorans DSM 3132 OX=1123286 GN =queC PE=3 SV=1
MNKKAVVLLSGGLDSTVCMAVAYNQGYELLPISFNYHQRHKRELAAAAQVAKHYKVDRHLIIETNMDAIGGSALTDTSIAVPAGEIGAATVPITYVPARNLIFLSYALGYAEVTGAERVYIGVNALDYSGYPDCRPEFIAMFQQLANYSTKATAEDGRKIMIETPLIRLTKKDIVLLGDKLGAPLHLTTSCYEGQDKACGQCDSCLLRLKGFAEAGLIDPILYQTRGE

SEQ ID NO: 42463 - protein, 228 aa, Sporomusa malonica
  misc_feature (1)..(228): tr|A0A1W2E9T5|A0A1W2E9T5_9FIRM 7-cyano-7-deazaguanine s ynthase OS=Sporomusa malonica OX=112901 GN=queC PE=3 SV =1
MNRKAVVLLSGGLDSTVCMAVANSEGYELLPISFNYHQRHSRELVAAASVAQHYKIDRHLVIETNMEAIGGSALTDASLAVPTGQIGAVGVPVTYVPARNLIFLSYALGYAEVTGADRVYIGVNALDYSGYPDCRPEFIALFQQLADYSTKAAVEDGRKIIIETPLINLTKKDIVLLGDRLGAPLHLTTSCYQGTDEACGQCDSCLLRLKGFAEAGLPDPILYRTRSD

SEQ ID NO: 42464 - protein, 219 aa, Sporomusa silvacetica
  misc_feature (1)..(219): tr|A0A259UCQ8|A0A259UCQ8_9FIRM 7-cyano-7-deazaguanine s ynthase OS=Sporomusa silvacetica DSM 10669 OX=1123289 G N=queC PE=3 SV=1
MSKAALVVFSGGQDSTTCLFWAMQHFDKVAAITFNYNQRHKQEIECAATIASEFNIPHMVLDMSLLNQLAPNALTRSDIEIKAGENGQLPTTFVDGRNLLFLSFAAVAAKQKQIRHIVTGVCETDFSGYPDCRDVFVKSMNVTLNLAMDYPFVIHTPLMWIDKADTWALADKLDKLDYIRQHTLTCYNGIMGDGCGECPACKLRNAGLKKYLETKAGKQ

SEQ ID NO: 42465 - protein, 219 aa, Sporomusa sp.
  misc_feature (1)..(219): tr|A0A0U1L4Y7|A0A0U1L4Y7_9FIRM 7-cyano-7-deazaguanine s ynthase OS=Sporomusa sp. An4 OX=411922 GN=queC PE=3 SV= 1
MSKAALVVFSGGQDSTTCLFWAMQHFDTVAAITFNYNQRHKQEIECAAAIASEFNIPHMVLDMSLLNQLAPNALTRSDIEIKAGENGQLPTTFVDGRNLLFLSFAAVAAKQQQIRHIVTGVCETDFSGYPDCRDVFVKSMNVTLNLAMDYPFVIHTPLMWIDKADTWALADRLGKLEYIRQHTLTCYNGIIGDGCGECPACKLRNAGLKKYLETKAGKQ

SEQ ID NO: 42466 - protein, 219 aa, Sporomusa sp.
  misc_feature (1)..(219): tr|A0A562GRP4|A0A562GRP4_9FIRM 7-cyano-7-deazaguanine s ynthase OS=Sporomusa sp. KB1 OX=943346 GN=queC PE=3 SV= 1
MSKAALVVFSGGQDSTTCLFWAMQHFDKVEAITFNYNQRHKQEIECATTIANEFKIPHMVLDMSLLNQLAPNALTRSDIEIKAGENGQLPTTFVDGRNLLFLSFAAVAAKQKQIRHIVTGVCETDFSGYPDCRDVFVKSMNVTLNLAMDYPFVIHTPLMWIDKADTWALADSLGKLEYIRQNTLTCYNGIMGDGCGECPACKLRNAGLKKYLETKAGKQ

SEQ ID NO: 42467 - protein, 228 aa, Sporomusa sphaeroides
  misc_feature (1)..(228): tr|A0A1U7MKC5|A0A1U7MKC5_9FIRM 7-cyano-7-deazaguanine s ynthase OS=Sporomusa sphaeroides DSM 2875 OX=1337886 GN =queC PE=3 SV=1
MKKKAVVLLSGGLDSTVCMAVANSEGYELLPISFNYHQRHKRELAAAASVAQHYNVDRHLIIETNMDAIGGSALTDPKLAVPEGDTGAAEVPITYVPARNLIFLSYALGYAEVTEAERVYIGVNALDYSGYPDCRPEFIAMFQQLANYSTKATAEDGRKIIIETPLIALSKKDIVLLGDKLAAPLHLTTSCYQGQDAACGQCDSCLLRLKGFAEAGLKDPILYHTRSE

SEQ ID NO: 42468 - protein, 228 aa, Sporomusa termitida
  misc_feature (1)..(228): tr|A0A517DSQ2|A0A517DSQ2_9FIRM 7-cyano-7-deazaguanine s ynthase OS=Sporomusa termitida OX=2377 GN=queC PE=3 SV= 1
MNKKAVVLLSGGLDSTVCMAVANSEGYELLPISFNYHQRHSRELAAAASVARHYQVDRHLVIETNMEAIGGSALTDTSLAVPAGNINATGVPVTYVPARNLIFLSYALGYAEVTGADRVYIGVNALDYSGYPDCRPEFIALFQQLADYSTKAATEDGRKTSIETPLIKLTKRDIVLLGNRLSAPLHLTTSCYQGGDEACGQCDSCLLRLKGFAGAGLADPILYRTRSE

SEQ ID NO: 42469 - protein, 223 aa, Sporomusaceae bacterium
  misc_feature (1)..(223): tr|A0A402BPY4|A0A402BPY4_9FIRM 7-cyano-7-deazaguanine s ynthase OS=Sporomusaceae bacterium OX=1917525 GN=queC P E=3 SV=1
MKAVVLLSGGLDSTVCMAVAKSNDYEVFPLSFNYQQRHSVELESARKVAQYYQANRHLVIENNMGEFGGSALTDKSIEVPDGDLHRKDIPPTYVPARNLIFLSYALGYAEALGAERIFIGVNALDYSGYPDCRPEFINLFQQLADYSTKAAVQDKQRILIETPLIHLSKKDIVMLGKQLDAPLHLTHSCYRGGETACGTCDSCVLRLKGFAEAGIPDPITYLE

SEQ ID NO: 42470 - protein, 218 aa, Sporomusaceae bacterium
  misc_feature (1)..(218): tr|A0A3C0UE05|A0A3C0UE05_9FIRM 7-cyano-7-deazaguanine s ynthase OS=Sporomusaceae bacterium OX=1917525 GN=queC P E=3 SV=1
MAVHNSSALVVFSGGQDSTTCLFWALERFNKVEAVTFNYNQRHKQEIDCAKAIASELGIVHTVLDMSLLHQLTANALTRPEMEISSGGKGDLPSTFVDGRNLLFMSFAAVLAKQKGMQHIVTGVCETDFSGYPDCRDVFIKSLNVTVNLAMEYQFVIHTPLMWLNKAQTWKLADDMGKLDYIRMKTLTCYEGVMGEGCGQCPACKLRNNGLIQYKQGK

SEQ ID NO: 42471 - protein, 219 aa, Sporosarcina globispora
  misc_feature (1)..(219): tr|A0A0M0GEV3|A0A0M0GEV3_SPOGL 7-cyano-7-deazaguanine s ynthase OS=Sporosarcina globispora OX=1459 GN=queC PE=3 SV=1
MKNDKALVVFSGGQDSTTCLFWAKERFAEVEAVTFNYNQRHKLEIECARQISKELGIRHHILDMSLLNQLAPNALTRDEIEVKDGEEGELPSTFVPGRNLLFLSFAGVLASQINAKHIITGVCETDFSGYPDCRDVFIKSLNVTLNLSMDAQFVIHTPLMWLNKAETWKLADELDALDYVREKTLTCYNGIPAGGCGECPACHLRKNGLEEYLKEKGEL

SEQ ID NO: 42472 - protein, 216 aa, Sporosarcina luteola
  misc_feature (1)..(216): tr|A0A511Z6Y7|A0A511Z6Y7_9BACL 7-cyano-7-deazaguanine s ynthase OS=Sporosarcina luteola OX=582850 GN=queC PE=3 SV=1
MEKAVVVFSGGQDSTTCLLWAQKTFDSVEAVTFLYGQRNSSELDSAKKIAKDLGVAHTIMDLSLLNQLTENAMTRSDMEIDETGEVPNTFVEGRNHVFLSFAAIYAKRIGARHIITGVSETDFSGYPDCRNDFIKSLNVTLNLAMDARFEIHTPLMWKTKADTWEMADRMGRLDYIREHTTTCYNGVIGDGCGDCPSCKLRKQGLDAYMEKGYERV

SEQ ID NO: 42473 - protein, 217 aa, Sporosarcina newyorkensis
  misc_feature (1)..(217): tr|F9DRZ1|F9DRZ1_9BACL 7-cyano-7-deazaguanine synthase OS=Sporosarcina newyorkensis 2681 OX=1027292 GN=exsB PE =3 SV=1
MKQEKAVVVFSGGQDSTTCLFWALKQFKEVTTVTFDYGQRHHAEIECARNIAEELGVSFKVLDMTLINQLSANALTRDTIKITEEVGELPSTFVPGRNHLFFSFAAVYAQAIGARHLVTGVSETDFSGYPDCRDTFVKSLNVTLNLAMDAKFVMHTPLMWLDKASVWELSDQLGAFDFIQQRTLTCYNGIPAAGCGTCPACKLRSQGLEEYLERREA

SEQ ID NO: 42474 - protein, 217 aa, Sporosarcina newyorkensis; identical to SEQ ID NO: 42473
  misc_feature (1)..(217): tr|A0A1T4Y9V7|A0A1T4Y9V7_9BACL 7-cyano-7-deazaguanine s ynthase OS=Sporosarcina newyorkensis OX=759851 GN=queC PE=3 SV=1

SEQ ID NO: 42475 - protein, 214 aa, Sporosarcina pasteurii
  misc_feature (1)..(214): tr|A0A380C1Y7|A0A380C1Y7_SPOPA 7-cyano-7-deazaguanine s ynthase OS=Sporosarcina pasteurii OX=1474 GN=queC PE=3 SV=1
MEKAVVVFSGGQDSTTCLLWALEEFDEVETVTFLYGQRHELEVDCAKKIANDLGVKHKMIQMDLLNQLTENALTRKDMEIEEGKVPNTYVEGRNHIFLSFAAIYAKTIGAKNIITGVSETEFSGYPDCRDAFIQSLNTTVNLAMDAELKFITPLMWKDKAEVWEMADQMGRLEYIRENTLTCYNGVIGDGCGKCPSCKLRNEGLQTYLQKRAVL

SEQ ID NO: 42476 - protein, 221 aa, Sporosarcina psychrophila
  misc_feature (1)..(221): tr|A0A127VXX9|A0A127VXX9_SPOPS 7-cyano-7-deazaguanine s ynthase OS=Sporosarcina psychrophila OX=1476 GN=queC PE =3 SV=1
MKNEKAVVVFSGGQDSTTCLFWALKNFREVATVTFDYGQRHSEEIECARKIADELGVSFKVLDMNLINQLSANALTRDDIEVNEVVGELPSTFVPGRNHLFLSFAAVYADAIGARHLITGVSETDFSGYPDCRDNFIKSLNVTLNLAMDGRFVIHTPLMWLDKSEVWALSDELGAFDFVQNKTLTCYNGVPSTGCGKCPACVLRNDGLATYLSKKSVGVSE

SEQ ID NO: 42477 - protein, 221 aa, Sporosarcina sp.
  misc_feature (1)..(221): tr|A0A2G5XHJ4|A0A2G5XHJ4_9BACL 7-cyano-7-deazaguanine s ynthase OS=Sporosarcina sp. P19 OX=2048258 GN=queC PE=3 SV=1
MEECRVSKAVIVFSGGQDSTTCLLWAMKEFDEVETVTFLYGQRHKLEVDCATKIAKDLGVKQKIIQMDVLNQLTSNALTRNDMQIEAEEGRVPNTFVEGRNHIFLSFAAIYAKTVGANAIITGVSETDFSGYPDCRDTFIRSLNTTLNLAMDYQFDLITPLMWKDKAQVWELADQMNRLEYVRENTLTCYNGVIADGCQECPACKLRNDGLAKYLQGEHVS

SEQ ID NO: 42478 - protein, 221 aa, Sporosarcina sp.
  misc_feature (1)..(221): tr|A0A5B0DI80|A0A5B0DI80_9BACL 7-cyano-7-deazaguanine s ynthase OS=Sporosarcina sp. ANT_H38 OX=2597358 GN=queC PE=3 SV=1
MKNEKAVVVFSGGQDSTTCLFWALKNFGEVATVTFDYGQRHSEEIECARKIADELGVSFKVLDMNLINQLSANALTRDDIEVKEVEGELPSTFVPGRNHLFLSFAAVYADAIGARHLITGVSETDFSGYPDCRDTFIKSLNVTLNLAMDGRFVIHTPLMWLDKSEVWALSDELGAFNFVQDNTLTCYNGIPSTGCGECPACVLRNDGLATYLAKKSVGAPE

SEQ ID NO: 42479 - protein, 420 aa, Stackebrandtia nassauensis
  misc_feature (1)..(420): tr|D3QAB4|D3QAB4_STANL Uncharacterized protein OS=Stack ebrandtia nassauensis (strain DSM 44728 / NRRL B-16338 / NBRC 102104 / LLR-40K-21) OX=446470 GN=Snas_3026 PE=4 SV=1
MRTPKRTWRFHFGGHPSRVPEGWVRLDAPLDNELLHDGPPQVGLTLAGLREAIGRQPPARVEDLFTIAVAVYTADRRAPRRRDGKPRRFELNIPVSEPDTWNRPQSRALLCALLGGLSGDEWTVQFRQDVNPPPWQSQLLPAEVEAVALFSGGLDSFCHAGLLRPASKVVLVSHGLGPNLRERKRELRAALGGETVMSAEFQVRINAVPGTEREPHPRTRALLLLAAGVLVCAANGVDTLHCPENGLLALHPAKAPLWSQSATPIPPMTVHLANALLDSLDVDTRVVNPYAELTKGEVCERAVDAGWRRSLLGRTITCVNPDKKSSGRFGNCGYCRHCLVRHAALVRVGGDLTEYRDVYPPEIPLMAPGPHDKDLRALRAWLGGELTAEQLAPLPPEADAARALAVVERARLELADIYRV

SEQ ID NO: 42480 - protein, 229 aa, Stakelama pacifica
  misc_feature (1)..(229): tr|A0A4R6FS29|A0A4R6FS29_9SPHN 7-cyano-7-deazaguanine s ynthase OS=Stakelama pacifica OX=517720 GN=queC PE=3 SV =1
MTDQMRYAVTLLSGGLDSMTVAARAKAEGYRLLALSVDYNQRHQVELDAARRIADYLGAERHIILPLDLRAFGGSALTADIDVPKDGVGDTIPVTYVPARNTIFLSLALGWAEAMGGRDLFIGVNALDYSGYPDCRPEFIVGFEQLAELATKAGAEGERFRIHAPLQHMSKADIVREGSRLGIDMGLSWSCYDPTPEGLHCGLCDSCRLRSKGFEEAGIEDPTRYATAP

SEQ ID NO: 42481 - protein, 223 aa, Stanieria cyanosphaera
  misc_feature (1)..(223): tr|K9XU30|K9XU30_STAC7 7-cyano-7-deazaguanine synthase OS=Stanieria cyanosphaera (strain ATCC 29371 / PCC 7437 ) OX=111780 GN=queC PE=3 SV=1
MTKAVVLLSGGLDSATTAAIAINEGFEAIALSFRYGQRHAKELSAAKQIAQLLQIKEHFIVDINLSQWGGSSLTDQSIDLPQTGVDPNIIPSTYVPGRNTVFIAIALALAEAKGATAIYLGINAVDYSGYPDCRPEYLAAYQNLANLSSKVGVEGKAPQLIAPLVQDSKVDIVRRALKLGVPIEVTWSCYQGGEQPCGLCDSCRIRDRALIEVGRPDLASRQL

SEQ ID NO: 42482 - protein, 225 aa, Stanieria sp.
  misc_feature (1)..(225): tr|A0A140K2C5|A0A140K2C5_9CYAN 7-cyano-7-deazaguanine s ynthase OS=Stanieria sp. NIES-3757 OX=1807358 GN=queC P E=3 SV=1
MTKAVVLLSGGLDSATTAAIAINEGYEAIALSFRYGQRHAKELSAAKQIAQVLQIKEHFIVDINLSQWGGSSLTDSSIDLPQTGVEPNIIPSTYVPGRNTVFIAIALSLAEAKGATAIYLGINAVDYSGYPDCRPEYLAAYQNLANLSSKVGVEGKAPQLIAPLVQDSKVDIVRRALKLGVPIEVTWSCYQGGEQPCGLCDSCRIRDRALIEAGRPDLASNHNLI

SEQ ID NO: 42483 - protein, 222 aa, Staphylococcus agnetis
  misc_feature (1)..(222): tr|A0A2T4MLF5|A0A2T4MLF5_9STAP 7-cyano-7-deazaguanine s ynthase OS=Staphylococcus agnetis OX=985762 GN=queC PE= 3 SV=1
MSDVLQNEKALVVFSGGQDSTTCLFYATAHFKEVELVTFEYGQRHAQEIEVAKKIAAEQGLKHHVLDMSLLSQLSPNALTSHDMTIDTTDGVPNTFVPARNLLFLSFAGALAYQINAKHIITGVCETDFSGYPDCRDAFIKSMNVTMNLAMDKDFVIHTPLMWLNKKETWALSDELGALDYIRTQTLTCYNGVIADGCGECPACLLRQKGLEAYLNEKGVQS

SEQ ID NO: 42484 - protein, 223 aa, Staphylococcus argensis
  misc_feature (1)..(223): tr|A0A2K4FHD3|A0A2K4FHD3_9STAP 7-cyano-7-deazaguanine s ynthase OS=Staphylococcus argensis OX=1607738 GN=queC P E=3 SV=1
MTEQTLDKEKAIVVFSGGQDSTTCLFWAQKHFEHVELVTFQYGQRHDKEIEVAEAIAKEQGLKHHVLDMSLLSQLTPNALTRHDMDIEQEGDEMPNTFVPARNLLFLSFAGALAYQLNAKNIITGVCETDFSGYPDCRDSFIKSMNVTLSLSMDKDFVIHTPLMWLDKKETWALSDELGVLDYIRHNTLTCYNGIIGEGCGTCPACQLRARGLNAYLEEKGEK

SEQ ID NO: 42485 - protein, 222 aa, Staphylococcus argenteus
  misc_feature (1)..(222): tr|A0A380BSP5|A0A380BSP5_9STAP 7-cyano-7-deazaguanine s ynthase OS=Staphylococcus argenteus OX=985002 GN=queC P E=3 SV=1
MESVLNNEKAIVVFSGGQDSTTCLFYAKKHFKEVELVTFNYGQRHDTEIEVAKQIANEQGMKHHVLDMSLLSQLTPNALTQHDMEITNNEDGIPNTFVPARNLLFLSFAGALAYQIGAKHIITGVCETDFSGYPDCRDSFIKSMNVTLSLAMDKDFVIHTPLMWLNKAETWQLSDELGVLDYIRTNTLTCYNGIVGNGCGECPACQLRQRGLNQYLESKGVL

SEQ ID NO: 42486 - protein, 222 aa, Staphylococcus argenteus
  misc_feature (1)..(222): tr|A0A5B8L8K2|A0A5B8L8K2_9STAP 7-cyano-7-deazaguanine s ynthase OS=Staphylococcus argenteus OX=985002 GN=queC P E=3 SV=1
MESVLNNEKAIVVFSGGQDSTTCLFYAKKHFKEVELVTFNYGQRHDTEIEVAKQIANEQGMKHHVLDMSLLSQLTPNALTQHDMEITNNEDGIPNTFVPARNLLFLSFAGALAYQIGAKHIITGVCETDFSGYPDCRDSFIKSMNVTLSLAMDKDFVIHTPLMWLNKAETWQLSDELGVLDYIRTNTLTCYNGIIGNGCGECPACQLRQRGLNQYLESKGVL

SEQ ID NO: 42487 - protein, 224 aa, Staphylococcus arlettae
  misc_feature (1)..(224): tr|A0A380CNT8|A0A380CNT8_9STAP 7-cyano-7-deazaguanine s ynthase OS=Staphylococcus arlettae OX=29378 GN=queC PE= 3 SV=1
MTQDILDHSKALVVFSGGQDSTTCLFWAKARFDEVTLVTFDYGQRHQTEIDVAKRIAHEQNLQHHVLDMSLLSQLTPNALTNHELAIDTAEDGVPNTFVPARNLLFLSFAGALAYQLNIKNIITGVCETDFSGYPDCRDSFVKSMNVTMNLAMDKNFVLHTPLMWLDKKQTWELSDQLGVLDYIKDQTLTCYNGIIGQGCGECPACHLRTRGLTQYLATKGENL

SEQ ID NO: 42488 - protein, 222 aa, Staphylococcus aureus
  misc_feature (1)..(222): sp|Q2G1X6|QUEC_STAA8 7-cyano-7-deazaguanine synthase OS =Staphylococcus aureus (strain NCTC 8325) OX=93061 GN=q ueC PE=3 SV=1
MESVLNNEKAIVVFSGGQDSTTCLFYAKKHFKEVELVTFNYGQRHDTEIEVAKQIAQDQGMKHHVLDMSLLSQLTPNALTQHDMEITNNEDGIPNTFVPARNLLFLSFAGALAYQIGAKHIITGVCETDFSGYPDCRDSFIKSMNVTLSLAMDKDFVIHTPLMWLNKAETWKLSDELEVLDYIRTKTLTCYNGIIGDGCGECPACHLRQRGLNQYLESKGAL

SEQ ID NO: 42489 - protein, 222 aa, Staphylococcus aureus
  misc_feature (1)..(222): tr|A0A033UWZ9|A0A033UWZ9_STAAU 7-cyano-7-deazaguanine s ynthase OS=Staphylococcus aureus C0673 OX=1413510 GN=qu eC PE=3 SV=1
MSERLKNEKAVVVFSGGQDSTTCLFYAKEHFKEVELVTFQYGQRHDLEIKVAEDIAKEQGLKHHILDMSLLSQLSPNALTDHSMQIENDENGIPNTFVPARNLLFLSFAGALAYQIGAKHIITGVCETDFSGYPDCRDSFIKSMNLSLNLSMDKDFVIHTPLMWLNKKETWALSDQLGALDYVREKTLTCYNGVMSDGCGECPACKLRKQGLDQYLETKGSL

SEQ ID NO: 42490 - protein, 223 aa, Staphylococcus auricularis
  misc_feature (1)..(223): tr|A0A2K4C4F7|A0A2K4C4F7_9STAP 7-cyano-7-deazaguanine s ynthase OS=Staphylococcus auricularis OX=29379 GN=queC PE=3 SV=1
MSQQSLDPNKAVVVFSGGQDSTTCLFWAKKHFEHVELVTFQYGQRHDTEIEVAQQIAQEQGLKHHILDMSLLSQLTPNALTQHDMDIEQTDDDMPNTFVPARNLLFLSFAGALAYQINAKNIITGVCETDFSGYPDCRDSFIKSMNVTLSLAMDKDFVIHTPLMWLDKKQTWALSDDLGVLDYVRYNTLTCYNGIIGTGCGECPACKLRARGLNAYLAEKGAN

SEQ ID NO: 42491 - protein, 223 aa, Staphylococcus capitis
  misc_feature (1)..(223): tr|A0A0U1EJL6|A0A0U1EJL6_STACP 7-cyano-7-deazaguanine s ynthase OS=Staphylococcus capitis OX=29388 GN=queC PE=3 SV=1
MTKSTLDKDKAIVVFSGGQDSTTCLFYAKKHFKEVELVTFNYGQRHDTEIEVAKKIANEQNLKHHILDMSLLSQLTPNALTQHDLEIEENDDGIPNTFVPARNLLFLSFAGALAYQLNAKHIITGVCETDFSGYPDCRDSFIKSMNVTLSLSMDKDFVIHTPLMWLDKAQTWELSDELGVLNYVRHNTLTCYNGVIGDGCGECPACKLRARGLHHYLESKGVE

SEQ ID NO: 42492 - protein, 223 aa, Staphylococcus capitis
  misc_feature (1)..(223): tr|A0A4U9THC4|A0A4U9THC4_STACP 7-cyano-7-deazaguanine s ynthase OS=Staphylococcus capitis OX=29388 GN=queC PE=3 SV=1
MTKSTLDKDKAIVVFSGGQDSTTCLFYAKKHFKEVELVTFNYGQRHDTEIEVARKIANEQNLKHHILDMSLLSQLTPNALTQHDLEIEENEDGIPNTFVPARNLLFLSFAGALAYQVNAKHIITGVCETDFSGYPDCRDSFIKSMNVTLSLSMDKDFVIHTPLMWLDKAQTWELSDELGVLDYIRHHTLTCYNGIIGDGCGECPACKLRARGLHHYLESKGVE

SEQ ID NO: 42493 - protein, 223 aa, Staphylococcus caprae
  misc_feature (1)..(223): tr|C5QQ81|C5QQ81_9STAP 7-cyano-7-deazaguanine synthase OS=Staphylococcus caprae M23864:W1 OX=525378 GN=queC PE =3 SV=1
MTESDLNKDKAIVVFSGGQDSTTCLFYAKKHFKEVELVTFNYGQRHDTEIEVAKKIANEQGLKHHILDMSLLSQLTPNALTQHDLDIEENEDGIPNTFVPARNLLFLSFAGALAYQINAKHIITGVCETDFSGYPDCRDSFIKSMNVTLSLSMGKDFVIHTPLMWLDKAQTWELSDELGVLDYIRYNTLTCYNGIIGDGCGECPACKLRARGLHHYLKSKGAE

SEQ ID NO: 42494 - protein, 223 aa, Staphylococcus carnosus
  misc_feature (1)..(223): tr|A0A431ZR15|A0A431ZR15_STACA 7-cyano-7-deazaguanine s ynthase OS=Staphylococcus carnosus subsp. carnosus OX=1 47448 GN=queC PE=3 SV=1
MTQQTLNKDKAIVVFSGGQDSTTCLFYAKKHFKDVELVTFNYGQRHDTEIEVAKQIAQEQGLKHHILDMSLLSQLTPNALTQHDMDIETGEDGIPNTFVPARNLLFLSFAGALAYQLNAKHIITGVCETDFSGYPDCRDSFIKSMNVTLSLSMDKDFVIHTPLMWLDKAQTWELSDELGVLDYIRYNTITCYNGIVGDGCGECPACKLRQRGLEQYLETKGVN

SEQ ID NO: 42495 - protein, 223 aa, Staphylococcus carnosus
  misc_feature (1)..(223): tr|B9DK41|B9DK41_STACT 7-cyano-7-deazaguanine synthase OS=Staphylococcus carnosus (strain TM300) OX=396513 GN= queC PE=3 SV=1
MASHTLDDNKALVVFSGGQDSTTCLFYAKEKFEEVELVTFQYGQRHDTEIEVAKKIADEQGLKHHILDMSLLSQLTPNALTQHNLEIEQTDDGVPNTFVPARNLLFLSFAGALAYQIKARHIITGVCETDFSGYPDCRDDFVKSMNVTLNLSMDKNFVIHTPLMWLDKKETWALSDQLGVLDYVRNQTLTCYNGIIADGCGECPACKLRARGLNAYLEEKGVK

SEQ ID NO: 42496 - protein, 223 aa, Staphylococcus chromogenes
  misc_feature (1)..(223): tr|A0A4U0DFN2|A0A4U0DFN2_STACR 7-cyano-7-deazaguanine s ynthase OS=Staphylococcus chromogenes OX=46126 GN=queC PE=3 SV=1
MSEVLQNEKALVVFSGGQDSTTCLFYAKSHFKEVELVTFEYGQRHSQEIDVAKNIAQEQGLKHHILDMSLLSQLTPNALTSHDMAIDTSNDVPNTFVPARNLLFLSFAGALAYQINAKHIITGVCETDFSGYPDCRDAFIKSMNVTMSLAMDRDFVIHTPLMWLNKKETWALSDELGALDYIRHNTLTCYNGIIAEGCGTCPACQLRQNGLDAYLAEKGESHS

SEQ ID NO: 42497 - protein, 223 aa, Staphylococcus chromogenes
  misc_feature (1)..(223): tr|A0A2T4M0L4|A0A2T4M0L4_STACR 7-cyano-7-deazaguanine s ynthase OS=Staphylococcus chromogenes OX=46126 GN=queC PE=3 SV=1
MSEVLQNEKALVVFSGGQDSTTCLFYAKTHFKEVELVTFEYGQRHSQEIDVAKNIAQEQGLKHHVLDMSLLSQLTPNALTSHDMAIDTSNDVPNTFVPARNLLFLSFAGALAYQINAKHIITGVCETDFSGYPDCRDAFIKSMNVTMSLAMDRDFVIHTPLMWLNKKETWALSDELGALDYIRHNTLTCYNGIIAEGCGTCPACQLRQNGLDAYLAEKGESHS

SEQ ID NO: 42498 - protein, 223 aa, Staphylococcus cohnii
  misc_feature (1)..(223): tr|A0A2T4LU17|A0A2T4LU17_9STAP 7-cyano-7-deazaguanine s ynthase OS=Staphylococcus cohnii OX=29382 GN=queC PE=3 SV=1
MTQQPLNNNKAIVVFSGGQDSTTCLFWAKKHFDEVVLVTFEYGQRHDTEIQVAKQIAKEQAVEHHVLDMSLLSQLTPNALTQHDIDIDEDEDGMPNTFVPARNLLFLSFAGALAYQTNTKHIITGVCETDFSGYPDCRDNFIKSMNVTLSLSMDKDFVIHTPLMWLDKKQTWALSDELGVLDYVRNRTLTCYNGIIGEGCGECPACKLRARGLNAYLKEKGAN

SEQ ID NO: 42499 - protein, 223 aa, Staphylococcus cohnii; identical to SEQ ID NO: 36487
  misc_feature (1)..(223): tr|A0A0M2NYA3|A0A0M2NYA3_STACC 7-cyano-7-deazaguanine s ynthase OS=Staphylococcus cohnii subsp. cohnii OX=74704 GN=queC PE=3 SV=1

SEQ ID NO: 42500 - protein, 223 aa, Staphylococcus condimenti
  misc_feature (1)..(223): tr|A0A143PAE7|A0A143PAE7_9STAP 7-cyano-7-deazaguanine s ynthase OS=Staphylococcus condimenti OX=70255 GN=queC P E=3 SV=1
MASHTLDDNKALVVFSGGQDSTTCLFYAKEKFEEVELVTFQYGQRHDTEIEVAKKIADEQGLKHHILDMSLLSQLTPNALTQHNLEIGQTDDGVPNTFVPARNLLFLSFAGALAYQIKARHIITGVCETDFSGYPDCRDDFVKSMNVTLNLSMDKNFVIHTPLMWLDKKETWALSDQLGVLDYVRNQTLTCYNGIIADGCGECPACKLRARGLNAYLEEKGVK

SEQ ID NO: 42501 - protein, 222 aa, Staphylococcus delphini
  misc_feature (1)..(222): tr|A0A3S4M0R3|A0A3S4M0R3_9STAP 7-cyano-7-deazaguanine s ynthase OS=Staphylococcus delphini OX=53344 GN=queC PE= 3 SV=1
MSEVLNNEKALVVFSGGQDSTTCLFYAKKHFKEVELVTFEYGQRHAKEIEVAKEIAEDQGLKHHVLDMALLSQLTPNALTSHDMTIDSHNDVPNTFVPARNLLFLSFAGALAYQIGAKHLITGVCETDFSGYPDCRDSFIKSMNVTLNLAMDRDFVIHTPLMWLNKKETWALSDDSGVLDYVRDRTLTCYNGMIAEGCGECPACQLRQRGLEQYLAEKGREV

SEQ ID NO: 42502 - protein, 222 aa, Staphylococcus delphini
  misc_feature (1)..(222): tr|A0A2A4HDH1|A0A2A4HDH1_9STAP 7-cyano-7-deazaguanine s ynthase OS=Staphylococcus delphini OX=53344 GN=queC PE= 3 SV=1
MSEVLNNEKALVVFSGGQDSTTCLFYAKKHFKEVELVTFEYGQRHAKEIEVAKEIAEDQGLKHHVLDMALLSQLTPNALTSHDMTIDSHNDVPNTFVPARNLLFLSFAGALAYQIGAKHLITGVCETDFSGYPDCRDSFIKSMNVTLNLAMDRDFVIHTPLMWLNKKETWALSDDLGVLDYVRDRTLTCYNGMIAEGCGECPACQLRQRGLEQYLAEKGREV

SEQ ID NO: 42503 - protein, 223 aa, Staphylococcus devriesei
  misc_feature (1)..(223): tr|A0A2K4DUX2|A0A2K4DUX2_9STAP 7-cyano-7-deazaguanine s ynthase OS=Staphylococcus devriesei OX=586733 GN=queC P E=3 SV=1
MTNSALNKDKALVVFSGGQDSTTCLFYAKKHFKEVELVTFNYGQRHDTEIEVATKIAKEQDLKHHVLDMSLLSQLTPNALTQHDMDIETGDDGIPNTFVPARNLLFLSFAGALAYQLNAKHIITGVCETDFSGYPDCRDSFIKSMNVTLSLSMDKDFVIHTPLMWLDKAQTWELSDELGVLDYIRHHTLTCYNGIIGDGCGECPACKLRQRGLENYLETKGAN

SEQ ID NO: 42504 - protein, 223 aa, Staphylococcus devriesei
  misc_feature (1)..(223): tr|A0A2T4KAZ0|A0A2T4KAZ0_9STAP 7-cyano-7-deazaguanine s ynthase OS=Staphylococcus devriesei OX=586733 GN=queC P E=3 SV=1
MTNSALNKDKALVVFSGGQDSTTCLFYAKKHFKEVELVTFNYGQRHDTEIEVATKIAKEQNLKHHVLDMSLLSQLTPNALTQHDMDIETGDDGIPNTFVPARNLLFLSFAGALAYQLNAKHIITGVCETDFSGYPDCRDSFIKSMNVTLSLSMDKDFVIHTPLMWLDKAQTWELSDELGVLDYIRHNTLTCYNGVIGDGCGECPACKLRQRGLENYLESKGAN

SEQ ID NO: 42505 - protein, 223 aa, Staphylococcus edaphicus
  misc_feature (1)..(223): tr|A0A2C6WQM3|A0A2C6WQM3_9STAP 7-cyano-7-deazaguanine s ynthase OS=Staphylococcus edaphicus OX=1955013 GN=queC PE=3 SV=1
MSEQTLDNNKAIVVFSGGQDSTTCLFWAKKHFEHVELVTFAYGQRHDTEIEVAKQIAKEQDIKHHILDMSLLSQLTPNALTQHDLDIKVGEDGIPNTFVPARNLLFLSFAGALAYQTNAKHIITGVCETDFSGYPDCRDSFIKSMNVTLSLSMDKDFVIHTPLMWLDKQATWALSDELGALEYIRYNTLTCYNGVIGEGCGECPACKLRANGLNAYLEEKGVD

SEQ ID NO: 42506 - protein, 223 aa, Staphylococcus epidermidis
  misc_feature (1)..(223): sp|Q5HR20|QUEC_STAEQ 7-cyano-7-deazaguanine synthase OS =Staphylococcus epidermidis (strain ATCC 35984 / RP62A) OX=176279 GN=queC PE=3 SV=1
MSQNDLNKEKALVVFSGGQDSTTCLFYAKKHFKEVELVTFNYGQRHDKEIEVAKKIAKEQNLKHHILDMSLLSQLTPNALTQHELSIEDNDDGIPNTFVPARNLLFLSFAGALAYQIHAKHIITGVCETDFSGYPDCRDSFIKSMNVTLSLSMDKDFVIHTPLMWLDKAQTWALSDKLGVLDYIRHNTLTCYNGIIGDGCGECPACHLRARGLKHYLEHKGEE

SEQ ID NO: 42507 - protein, 223 aa, Staphylococcus epidermidis
  misc_feature (1)..(223): tr|A0A4Y4YN01|A0A4Y4YN01_STAEP 7-cyano-7-deazaguanine s ynthase OS=Staphylococcus epidermidis OX=1282 GN=queC P E=3 SV=1
MSQNDLNKEKALVVFSGGQDSTTCLFYAKKHFKEVELVTFNYGQRHDKEIEVAKKIAKEQNLKHHILDMSLLSQLTPNALTQHELSIEDNDDGIPNTFVPARNLLFLSFAGALAYQIHAKHIITGVCETDFSGYPDCRDSFIKSMNVTLSLSMDKDFVIHTPLMWLDKAQTWALSDRLGVLDYIRHNTLTCYNGIIGDGCGECPACHLRARGLKHYLEHKGEE

SEQ ID NO: 42508 - protein, 223 aa, Staphylococcus equorum
  misc_feature (1)..(223): tr|A0A1E5TIM2|A0A1E5TIM2_9STAP 7-cyano-7-deazaguanine s ynthase OS=Staphylococcus equorum OX=246432 GN=queC PE= 3 SV=1
MTQQSLNSNKAIVVFSGGQDSTTCLFWAKQHYDDVELVTFEYGQRHDTEIKVAKQIAETQNVKHHILDMSLLSQLTPNALTQHDMDIEVGEDGVPNTFVPARNLLFLSFAGALAYQTNAKHIITGVCETDFSGYPDCRDSFIKSMNVTLSLSMDKDFVIHTPLMWLDKKETWALSDELGVLDYIRYNTLTCYNGVIGEGCGECPACELRARGLDAYLKEKGAE

SEQ ID NO: 42509 - protein, 223 aa, Staphylococcus equorum
  misc_feature (1)..(223): tr|A0A1E5TVE5|A0A1E5TVE5_9STAP 7-cyano-7-deazaguanine s ynthase OS=Staphylococcus equorum OX=246432 GN=queC PE= 3 SV=1
MTQQSLSSNKAIVVFSGGQDSTTCLFWAKQHYADVELVTFEYGQRHDTEIKVAKQIAEAQNVKHHILDMSLLSQLTPNALTQHDMDIEVGEDGVPNTFVPARNLLFLSFAGALAYQTNAKHIITGVCETDFSGYPDCRDSFIKSMNVTLSLSMDKDFVIHTPLMWLDKKETWALSDELGVLDYIRYNTLTCYNGIVGEGCGECPACELRARGLDAYLKEKGAE

SEQ ID NO: 42510 - protein, 223 aa, Staphylococcus felis
  misc_feature (1)..(223): tr|A0A2K3Z3N2|A0A2K3Z3N2_9STAP 7-cyano-7-deazaguanine s ynthase OS=Staphylococcus felis OX=46127 GN=queC PE=3 S V=1
MSEVLHNEKALVVFSGGQDSTTCLFYALKHFESVELVTFEYGQRHAKEIEVARHIAKDQDLKHHVLDMSLLSQLSPNALTSSDIAISDNDGVPNTFVPARNLLFLSFAGALAYQINAKHIVTGVCETDFSGYPDCRDSFIKSMNLSLNLSMDRDFVIHTPLMWLNKKETWALSDELGVLDYVRYNTLTCYNGIIAEGCGTCPACRLRQRGLESYLEEKGAQNQ

SEQ ID NO: 42511 - protein, 222 aa, Staphylococcus fleurettii
  misc_feature (1)..(222): tr|A0A3A0I0N4|A0A3A0I0N4_9STAP 7-cyano-7-deazaguanine s ynthase OS=Staphylococcus fleurettii OX=150056 GN=queC PE=3 SV=1
MSETLKNAKALVVFSGGQDSTTCLFYAKEHFKEVELVTFQYGQRHDLEIKVAEDIAKEQGLKHHVLDMSLLSQLSPNALTDHNMKIENDENGIPNTFVPARNLLFLSFAGALAYQIGAKHIITGVCETDFSGYPDCRDSFIKSMNLSLNLSMDKDFVIHTPLMWLNKKETWALSDQLGALDYVREKTLTCYNGVMSDGCGECPACKLRNQGLGQYLQTKGSL

SEQ ID NO: 42512 - protein, 52 aa, Staphylococcus fleurettii
  misc_feature (1)..(52): tr|A0A3A0HR76|A0A3A0HR76_9STAP 7-cyano-7-deazaguanine s ynthase QueC (Fragment) OS=Staphylococcus fleurettii OX =150056 GN=BUY93_15790 PE=4 SV=1
WALSDKLGVLDYIRYNTLTCYNGIIGEGCGECPACELRARGLDAYLKEKGAE

SEQ ID NO: 42513 - protein, 223 aa, Staphylococcus gallinarum
  misc_feature (1)..(223): tr|A0A3A0VQ49|A0A3A0VQ49_STAGA 7-cyano-7-deazaguanine s ynthase OS=Staphylococcus gallinarum OX=1293 GN=queC PE =3 SV=1
MTQQTLNNDKAIVVFSGGQDSTTCLFWAKKHFSEVELVTFQYGQRHDTEITVAQQIAQEQNVKHHLLDMSLLSQLTPNALTQHDMDIETTEDGVPNTFVPARNLLFLSFAGALAYQTNAKHIITGVCETDFSGYPDCRDSFIKSMNVTLSLSMDKNFVIHTPLMWLDKKATWALSDDLGVLDYIRTKTLTCYNGIIGEGCGECPACHLRARGLNAYLEEKGAR

SEQ ID NO: 42514 - protein, 126 aa, Staphylococcus gallinarum
  misc_feature (1)..(126): tr|A0A3A0VIN2|A0A3A0VIN2_STAGA 7-cyano-7-deazaguanine s ynthase (Fragment) OS=Staphylococcus gallinarum OX=1293 GN=BUZ14_13580 PE=3 SV=1
FVPARYLLFLSFAGALAYQTNAKHIITGVCETDFSGYPDCRDSFVKSMNGTLSLSMDKDFVIHTPLMWLEKKATWALSDDLGVLDYIRYNTLTCYNGVIGDGCGECPACQLRANGLNAYLAEKGVD

SEQ ID NO: 42515 - protein, 223 aa, Staphylococcus haemolyticus
  misc_feature (1)..(223): sp|Q4L4D0|QUEC_STAHJ 7-cyano-7-deazaguanine synthase OS =Staphylococcus haemolyticus (strain JCSC1435) OX=27980 8 GN=queC PE=3 SV=1
MTNQNLNKDKAIVVFSGGQDSTTCLFYAKKHFKDVELVTFNYGQRHDAEIEVATRIAKEQNLKHHILDMSLLSQLTPNALTQHDMDIETGEDGIPNTFVPARNLLFLSFAGALAYQRNAKHIITGVCETDFSGYPDCRDSFIKSMNVTLSLSMDKDFVIHTPLMWLDKAQTWELSDELGVLDYIRHNTLTCYNGVIGDGCGECPACQLRQRGLQHYLEAKGAN

SEQ ID NO: 42516 - protein, 223 aa, Staphylococcus haemolyticus
  misc_feature (1)..(223): tr|A0A2K0A9K9|A0A2K0A9K9_STAHA 7-cyano-7-deazaguanine s ynthase OS=Staphylococcus haemolyticus OX=1283 GN=queC PE=3 SV=1
MTNQNLNKDKAIVVFSGGQDSTTCLFYAKKHFKDVELVTFNYGQRHDAEIEVATRIAKEQNLKHHILDMSLLSQLTPNALTQHDMDIETGEDGIPNTFVPARNLLFLSFAGALAYQRNAKHIITGVCETDFSGYPDCRDSFIKSMNVTLSLSMDKNFVIHTPLMWLDKAQTWELSDELGVLDYIRHNTLTCYNGVIGDGCGECPACQLRQRGLQHYLEIKGAN

SEQ ID NO: 42517 - protein, 29 aa, Staphylococcus hominis
  misc_feature (1)..(29): tr|A0A4Q9WL92|A0A4Q9WL92_STAHO 7-cyano-7-deazaguanine s ynthase QueC (Fragment) OS=Staphylococcus hominis OX=12 90 GN=EQ804_13160 PE=4 SV=1
IIGDGCGECPACHLSARGLKPYLEHKEEE

SEQ ID NO: 42518 - protein, 225 aa, Staphylococcus hominis
  misc_feature (1)..(225): tr|A0A533IYI4|A0A533IYI4_STAHO 7-cyano-7-deazaguanine s ynthase QueC OS=Staphylococcus hominis OX=1290 GN=queC PE=4 SV=1
MPNSVLNSEKAIVVFSGGQDSTTCLFYAKRHFKEVELVTFNYGQRHNTEIEVASKIAKDQGLKHHILDMSLLSQLTPNALTKHDMTIETGEDGIPNTFVPARNLLFLSFAGALAYQVNAKHIITGVCETDFSGYPDCRDSFIKSMNVTLSLSMDRDFVIHTPLMWLDKAQTWELSDELGVLNYVRHNTLTCYNGIIGDGCGKCPACKLRQRGLHQYLEQKGDASL

SEQ ID NO: 42519 - protein, 222 aa, Staphylococcus hyicus
  misc_feature (1)..(222): tr|A0A418JJ37|A0A418JJ37_STAHY 7-cyano-7-deazaguanine s ynthase OS=Staphylococcus hyicus OX=1284 GN=queC PE=3 S V=1
MSEVLQNEKALVVFSGGQDSTTCLFYAKAHFKEVELVTFEYGQRHAQEIEVAKKIAHEQGLKHHVLDMSLLSQLSPNALTSHDMAIDATHDVPNTFVPARNLLFLSFAGALAYQIKAKHIITGVCETDFSGYPDCRDTFIKSINITMNLAMDKDFVIHTPLMWLNKKETWALSDQLGALDYIRTQTLTCYNGIIAEGCGECPACQLRQNGLEVYLKEKGAHS

SEQ ID NO: 42520 - protein, 223 aa, Staphylococcus hyicus
  misc_feature (1)..(223): tr|A0A447YT17|A0A447YT17_STAHY 7-cyano-7-deazaguanine s ynthase OS=Staphylococcus hyicus OX=1284 GN=queC PE=3 S V=1
MAPHKLDDDKALVVFSGGQDSTTCLFYAKAKFKEVELVTFQYGQRHDTEIEVAKQIAQEQGLKHHILDMSLLSQLTPNALTQHDLQIVDTDDGVPNTFVPARNLLFLSFAGALAYQIKARHIITGVCETDFSGYPDCRDDFVKSMNVTLNLSMDKNFVIHTPLMWLDKKETWALSDELGVLDYVRYNTLTCYNGIIADGCGECPACQLRARGLNAYLAEKGVN

SEQ ID NO: 42521 - protein, 223 aa, Staphylococcus intermedius
  misc_feature (1)..(223): tr|A0A380GAN7|A0A380GAN7_STAIN 7-cyano-7-deazaguanine s ynthase OS=Staphylococcus intermedius NCTC 11048 OX=114 1106 GN=queC_2 PE=3 SV=1
MSEVLNNEKALVVFSGGQDSTTCLFYAKKHFKDVELVTFEYGQRHAKEIEVAQEIAQDQGLKHHVLDMALLSQLTPNALTSHDMTIDSHNDVPNTFVPARNLLFLSFAGALAYQIGAKHLITGVCETDFSGYPDCRDSFIKSMNVTLNLAMDRDFVIHTPLMWLNKKETWALSDDLGVLDYVRDRTLTCYNGIIAEGCGECPACQLRQRGLDQYLAEKESEVQ

SEQ ID NO: 42522 - protein, 230 aa, Staphylococcus intermedius
  misc_feature (1)..(230): tr|A0A380G9U0|A0A380G9U0_STAIN 7-cyano-7-deazaguanine s ynthase OS=Staphylococcus intermedius NCTC 11048 OX=114 1106 GN=queC_1 PE=3 SV=1
MSKAIVVFSGGQDSTTCLLWALKRYDEVETITFSYNQRHKQEIEVAKKISKDFGVKNQVIDASVINELTVNALTRDMDIDVDNDTGLPNTFVPGRNILFLTLASVVAYQRKADTIVTGVCETDFSGYPDCRNEFVRALEPALQLGLDKNITIETPLMWLNKAETWELAANLGHLKYVVNNTLTCYNGVIGQGCGECPACKLRRKGLEEFIQKHPKEVGLTTLVNTPFQQN

SEQ ID NO: 42523 - protein, 224 aa, Staphylococcus kloosii
  misc_feature (1)..(224): tr|A0A512QFK7|A0A512QFK7_9STAP 7-cyano-7-deazaguanine s ynthase OS=Staphylococcus kloosii OX=29384 GN=queC PE=3 SV=1
MNEQLLDNNKAIVVFSGGQDSTTCLFWAKKHFDEVELVTFKYGQRHAQEIEVAQAIAEEQQLKHHVLDMSLLSQLTPNALTDPNMAIEANDDEIPNTFVPARNLLFLSFAGALAYHLNAKNIITGVCETDFSGYPDCRDSFVKSMNVTLNLSMDKNFVIHTPLMWLDKKETWALSDDLGVLDYVRERTLTCYNGIIGDGCGTCPACKLRARGLNNYLVEKGANN

SEQ ID NO: 42524 - protein, 224 aa, Staphylococcus kloosii
  misc_feature (1)..(224): tr|A0A151A6R3|A0A151A6R3_9STAP 7-cyano-7-deazaguanine s ynthase OS=Staphylococcus kloosii OX=29384 GN=queC PE=3 SV=1
MNEQLLDNNKAIVVFSGGQDSTTCLFWAKKHFDEVELVTFKYGQRHAQEIEVAEAIAEEQQLKHHVLDMSLLSQLTPNALTDPNMAIEANDDEIPNTFVPARNLLFLSFAGALAYQLNAKNIITGVCETDFSGYPDCRDSFVKSMNVTLNLSMDKNFVIHTPLMWLDKKETWALSDDLGVLDYVREHTLTCYNGIIGDGCGTCPACKLRARGLNNYLVEKGANN

SEQ ID NO: 42525 - protein, 274 aa, Staphylococcus lentus
  misc_feature (1)..(274): tr|A0A4Y9KEY4|A0A4Y9KEY4_STALE Uncharacterized protein OS=Staphylococcus lentus OX=42858 GN=E4T78_01520 PE=4 S V=1
MKVSDLLLKKLGDIQDQKVAVLLSGGSGSASVLFALIELGKKIHAYTFNLEGHESTDLKKAIELTNKYDIEFTSIPLPTDINTIKKDCVYLINDVGCQLKTDVEICFAFKNSLPLIQEKVLVTGLGDDNYFGLSKKAQIYYKNSIDLMDKNRIKMFEKLNVQHKLFEKMAESYGIKIVSPYQTEEMLNIFIGTSYEEINKPKQKQWILDTFPKYFSQEKCYHADLQKGDSKIADNFLQLLNSDWNYKGYKRTDGIYNSIGRGELPLESESGLYD

SEQ ID NO: 42526 - protein, 222 aa, Staphylococcus lentus
  misc_feature (1)..(222): tr|A0A5F0TWD1|A0A5F0TWD1_STALE 7-cyano-7-deazaguanine s ynthase OS=Staphylococcus lentus OX=42858 GN=queC PE=3 SV=1
MSETLKNDKALVVFSGGQDSTTCMFYAKENFKEVELVTFQYGQRHDLEIEVAENITKEQGLKHHILDMSLLSQLSPNALTDHNMEIENNEDGIPNTFVPARNLLFLSFAGALAYQIGAKHIITGVCETDFSGYPDCRDSFIKSMNLSLNLSMDKDFVIHTPLMWLNKQETWALSDELGALDYVRERTLTCYNGVIADGCGECPACILRNQGLSQYLELKGSL

SEQ ID NO: 42527 - protein, 223 aa, Staphylococcus lugdunensis
  misc_feature (1)..(223): tr|A0A4Q9WA23|A0A4Q9WA23_STALU 7-cyano-7-deazaguanine s ynthase OS=Staphylococcus lugdunensis OX=28035 GN=queC PE=3 SV=1
MTETTLNNNKAIVVFSGGQDSTTCLFYAKKHFDEVELVTFNYGQRHNTEIEVAKSIAHEQGLAHHILDMSLLSQLTPNALTQHDMKIETNEDGMPNTFVPARNLLFLSFAGALAYQLNAKHIITGVCETDFSGYPDCRDNFIKSMNVTLSLAMDKDFVIHTPLMWLNKAQTWALSDELGVLDYIRHQTLTCYNGIIGDGCGECPACHLRARGLQQYLNSKGAK

SEQ ID NO: 42528 - protein, 223 aa, Staphylococcus lugdunensis
  misc_feature (1)..(223): tr|A0A133Q1D7|A0A133Q1D7_STALU 7-cyano-7-deazaguanine s ynthase OS=Staphylococcus lugdunensis OX=28035 GN=queC PE=3 SV=1
MTETTLNNNKAIVVFSGGQDSTTCLFYAKKHFDEVELVTFNYGQRHNTEIEVAKSIAHEQGLAHHILDMSLLSQLTPNALTQHDMKIETNDDGMPNTFVPARNLLFLSFAGALAYQLNAKHIITGVCETDFSGYPDCRDNFIKSMNVTLSLAMDKDFVIHTPLMWLNKAQTWALSDELGVLDYIRHQTLTCYNGIIGDGCGECPACHLRARGLQQYLNSKGAK

SEQ ID NO: 42529 - protein, 221 aa, Staphylococcus lutrae
  misc_feature (1)..(221): tr|A0A1W6BN23|A0A1W6BN23_9STAP 7-cyano-7-deazaguanine s ynthase OS=Staphylococcus lutrae OX=155085 GN=queC PE=3 SV=1
MSEVLKNEKALVVFSGGQDSTTCLFYAKKHFKTVELVTFEYGQRHAKEIEVAKAIAQDQGLKHHILDMALLAQLSPNALTSHDMTIDQQNDIPNTFVPARNLLFLSFAGALAYQIGAKHLITGVCETDFSGYPDCRDTFIKSMNVTLNLAMDRDFVIHTPLMWLDKKETWALSDQLGVLDYVRNHTLTCYNGIIAEGCGTCPACQLRQRGLKQYLTEKGRE

SEQ ID NO: 42530 - protein, 222 aa, Staphylococcus massiliensis
  misc_feature (1)..(222): tr|K9AR88|K9AR88_9STAP 7-cyano-7-deazaguanine synthase OS=Staphylococcus massiliensis S46 OX=1229783 GN=queC P E=3 SV=1
MTKTLNKDRAIVVFSGGQDSTTCLFYAKQKYEEVILVTFEYGQRHDKEIEVAKAIAKEQGLEHHVLDMSLLSQLTPNALTNHDMDIETNDDGMPNTFVPARNLLFLSFAGALSYQLDAKTIITGVCETDFSGYPDCRDAFIKSMNVTLNLSMDQNFVIETPLMWLDKKETWALSDELGALDYVRNKTLTCYNGVIGDGCGECPACKLRQRGLEQYINSRGEA

SEQ ID NO: 42531 - protein, 223 aa, Staphylococcus microti
  misc_feature (1)..(223): tr|A0A0D6XV19|A0A0D6XV19_9STAP 7-cyano-7-deazaguanine s ynthase OS=Staphylococcus microti OX=569857 GN=queC PE= 3 SV=1
MSNALKQEKALVVFSGGQDSTTCLFYAKQHFKEVELVTFEYGQRHAKEIEVAKAIAEDQGLKHHILDMSLLSQLSPNALTSSDMEIDTKDGVPNTFVPARNLLFLSFAGALAYQINAKHIITGVCETDFSGYPDCRDQFIKSMNVTMSLAMDRDFVIHTPLMWLDKKETWALSDELGVLDYIRYQTLTCYNGVIADGCGTCPACQLRQRGLEQYLNEKGANTL

SEQ ID NO: 42532 - protein, 222 aa, Staphylococcus muscae
  misc_feature (1)..(222): tr|A0A240BWD0|A0A240BWD0_9STAP 7-cyano-7-deazaguanine s ynthase OS=Staphylococcus muscae OX=1294 GN=queC PE=3 S V=1
MSNALNQEKALVVFSGGQDSTTCLFYAKKHFKEVELVTFEYGQRHAKEIEVAKTIAKDQGLKNHILDMSLLAQLSPNALTSSNIDIDTSDDIPNTFVPARNLLFLSFAGALAYQINAKHIITGVCETDFSGYPDCRDQFIKSMNVTMSLAMDRDFVIHTPLMWLDKKETWALSDELGVLDYVRNQTLTCYNGIIADGCGTCPACLLRQRGLEQYLNEKGVRQ

SEQ ID NO: 42533 - protein, 223 aa, Staphylococcus nepalensis
  misc_feature (1)..(223): tr|A0A2T4SCC0|A0A2T4SCC0_9STAP 7-cyano-7-deazaguanine s ynthase OS=Staphylococcus nepalensis OX=214473 GN=queC PE=3 SV=1
MTQRTLNNNKAIVVFSGGQDSTTCLFWAKAHFEEVALVTFEYGQRHDTEIQVAKQIAKEQQVEHHVLDMSLLSQLTPNALTQHDMDIEEGEDGVPNTFVPARNLLFLSFAGSLAYQTNAKHIITGVCETDFSGYPDCRDSFIKSMNVTLSLSMDKDFVIHTPLMWLDKKQTWALSDELGVLDYIRYQTLTCYNGIVGEGCGECPACKLRARGLNAYLEEKGAK

SEQ ID NO: 42534 - protein, 223 aa, Staphylococcus nepalensis; identical to SEQ ID NO: 37513
  misc_feature (1)..(223): tr|A0A291JN56|A0A291JN56_9STAP 7-cyano-7-deazaguanine s ynthase OS=Staphylococcus nepalensis OX=214473 GN=queC PE=3 SV=1

SEQ ID NO: 42535 - protein, 222 aa, Staphylococcus pasteuri
  misc_feature (1)..(222): tr|A0A3S0K5S0|A0A3S0K5S0_9STAP 7-cyano-7-deazaguanine s ynthase OS=Staphylococcus pasteuri OX=45972 GN=queC PE= 3 SV=1
MSETLKNAKALVVFSGGQDSTTCLFYAKEHFKEVELVTFQYGQRHDLEIKVAEDIAKEQGLKHHVLDMSLLSQLSPNALTDHNMKIENDENGIPNTFVPARNLLFLSFAGALAYQIGAKHIITGVCETDFSGYPDCRDSFIKSMNLSLNLSMDKDFVIHTPLMWLNKKETWALSDQLGALDYVREKTLTCYNGVMSDGCGKCPACKLRNQGLGQYLQTKGSL

SEQ ID NO: 42536 - protein, 223 aa, Staphylococcus pasteuri
  misc_feature (1)..(223): tr|A0A0M2NMV2|A0A0M2NMV2_9STAP 7-cyano-7-deazaguanine s ynthase OS=Staphylococcus pasteuri OX=45972 GN=queC PE= 3 SV=1
MVQDKLDNNKAIVVFSGGQDSTTCLFYAKKHFKEVVLVTFNYGQRHDTEIEVAKKIAQEQNVEHHILDMSLLSQLTPNALTQHDLKIEETEDGIPNTFVPARNLLFLSFAGALAYQIKAKHIITGVCETDFSGYPDCRDSFIKSMNVTLSLSMDRDFVIHTPLMWLDKAQTWELADNLGVLDYIRENTLTCYNGIIGDGCGECPACQLRSRGLEQYLEQKGVK

SEQ ID NO: 42537 - protein, 223 aa, Staphylococcus petrasii
  misc_feature (1)..(223): tr|A0A5F1B2B0|A0A5F1B2B0_9STAP 7-cyano-7-deazaguanine s ynthase OS=Staphylococcus petrasii subsp. petrasii OX=1 276937 GN=queC PE=3 SV=1
MTQQTLNKDKAIVVFSGGQDSTTCLFYAKKHFKDVELVTFNYGQRHDTEIEVAKQIAKEQGLKHHVLDMSLLSQLTPNALTQHDMDIETGEDGIPNTFVPARNLLFLSFAGALAYQLNAKHIITGVCETDFSGYPDCRDSFIKSMNVTLSLSMDKDFVIHTPLMWLDKAQTWELSDELGVLDYVRYNTLTCYNGIVGDGCGECPACKLRQRGLEQYLETKGAK

SEQ ID NO: 42538 - protein, 223 aa, Staphylococcus petrasii; identical to SEQ ID NO: 42537
  misc_feature (1)..(223): tr|A0A380G4M0|A0A380G4M0_9STAP 7-cyano-7-deazaguanine s ynthase OS=Staphylococcus petrasii subsp. jettensis OX= 1077965 GN=queC PE=3 SV=1

SEQ ID NO: 42539 - protein, 223 aa, Staphylococcus pettenkoferi
  misc_feature (1)..(223): tr|A0A2N6QMC9|A0A2N6QMC9_9STAP 7-cyano-7-deazaguanine s ynthase OS=Staphylococcus pettenkoferi OX=170573 GN=que C PE=3 SV=1
MTEQTLDKEKAIVVFSGGQDSTTCLFWAQKHFEHVELVTFQYGQRHDKEIEVAEAIAKEQVLKHHVLDMSLLSQLTPNALTQHDMDIEQEGDEMPNTFVPARNLLFLSFAGALAYQLNAKNIITGVCETDFSGYPDCRDSFIKSMNVTLSLSMDKDFVIHTPLMWLDKKETWALSDELGVLDYIRHNTLTCYNGIIGEGCGTCPACQLRARGLNAYLEEKGEK

SEQ ID NO: 42540 - protein, 223 aa, Staphylococcus piscifermentans
  misc_feature (1)..(223): tr|A0A239UF07|A0A239UF07_9STAP 7-cyano-7-deazaguanine s ynthase OS=Staphylococcus piscifermentans OX=70258 GN=q ueC PE=3 SV=1
MSAHTLDDNKALVVFSGGQDSTTCLFYAKEKFEEVELVTFQYGQRHDTEIEVAKKIADEQGLKHHILDMSLLSQLTPNALTQHNLEIEQTDDGVPNTFVPARNLLFLSFAGALAYQIKARHIITGVCETDFSGYPDCRDDFVKSMNVTLNLSMDKNFVIHTPLMWLDKKETWALSDQLGVLDYVRNQTLTCYNGIIADGCGECPACKLRARGLNAYLEEKGVK

SEQ ID NO: 42541 - protein, 223 aa, Staphylococcus piscifermentans; identical to SEQ ID NO: 42508
  misc_feature (1)..(223): tr|A0A431Z4C6|A0A431Z4C6_9STAP 7-cyano-7-deazaguanine s ynthase OS=Staphylococcus piscifermentans OX=70258 GN=q ueC PE=3 SV=1

SEQ ID NO: 42542 - protein, 222 aa, Staphylococcus pseudintermedius
  misc_feature (1)..(222): tr|A0A4V3SLY8|A0A4V3SLY8_STAPS 7-cyano-7-deazaguanine s ynthase OS=Staphylococcus pseudintermedius OX=283734 GN =queC PE=3 SV=1
MSEVLNNEKALVVFSGGQDSTTCLFYAKKHFKEVELVTFEYGQRHAKEIEVAKEIAEDQGLKHHVLDMALLSQLTPNALTSHDMTIDSHNDVPNTFVPARNLLFLSFAGALAYQIGAKHLITGVCETDFSGYPDCRDSFIKSMNVTLNLAMDRDFVIHTPLMWLNKKETWALSDDLGVLDYVRDRTLTCYNGIIAEGCGECPACQLRQRGLNQYLSERGREV

SEQ ID NO: 42543 - protein, 222 aa, Staphylococcus pseudintermedius
  misc_feature (1)..(222): tr|A0A2A4EKF3|A0A2A4EKF3_STAPS 7-cyano-7-deazaguanine s ynthase OS=Staphylococcus pseudintermedius OX=283734 GN =queC PE=3 SV=1
MSEVLNNEKALVVFSGGQDSTTCLFYAKKHFKEVELVTFEYGQRHAKEIEVAKEIAEDQGLKHHVLDMALLSQLTPNALTSHDMTIDSHNDVPNTFVPARNLLFLSFAGALAYQIGAKHLITGVCETDFSGYPDCRDSFIKSMNVTLNLAMDRDFVIHTPLMWLNKKETWALSDDLGVLDYVRDRTLTCYNGIIAEGCGECPACQLRQRGLNQYLAERGREV

SEQ ID NO: 42544 - protein, 223 aa, Staphylococcus rostri
  misc_feature (1)..(223): tr|A0A2K3YS33|A0A2K3YS33_9STAP 7-cyano-7-deazaguanine s ynthase OS=Staphylococcus rostri OX=522262 GN=queC PE=3 SV=1
MSKALKQEKALVVFSGGQDSTTCLFYAKQHFKDVELVTFEYGQRHAKEIEVAKAIAQEQGLKHHILDMSLLSQLSPNALTSPDMEIDSTDDIPNTFVPARNLLFLSFAGALAYQINAKHIITGVCETDFSGYPDCRDQFIKSMNVTMSLAMDRDFVIHTPLMWLDKKETWALSDELGVLDYIRNKTLTCYNGVVADGCGTCPACQLRQRGLEQYLEEKGARTL

SEQ ID NO: 42545 - protein, 223 aa, Staphylococcus saccharolyticus
  misc_feature (1)..(223): tr|A0A4Q8MXE6|A0A4Q8MXE6_9STAP 7-cyano-7-deazaguanine s ynthase OS=Staphylococcus saccharolyticus OX=33028 GN=q ueC PE=3 SV=1
MSQNDLNKDKAIVVFSGGQDSTTCLFYAKKHFKEVELVTFNYGQRHDAEIEVAKCISKEQNLKHHILDMSLLSQLTPNALTQHDLKIQENEDGIPNTFVPARNLLFLSFAGALAYQIKAKHIITGICETDFSGYPDCRDSFIKSMNVTLNLSIDKDFVIHTPLMWLDKAQTWELSDKLGVLNYIRHNTLTCYNGIIGDGCGTCPACGLRTRGLKHYLENKGEK

SEQ ID NO: 42546 - protein, 223 aa, Staphylococcus saccharolyticus
  misc_feature (1)..(223): tr|A0A380H944|A0A380H944_9STAP 7-cyano-7-deazaguanine s ynthase OS=Staphylococcus saccharolyticus OX=33028 GN=q ueC PE=3 SV=1
MSQNDLNKDKAIVVFSGGQDSTTCLFYAKKHFKEVELVTFNYGQRHEAEIEVAKRISKKQNLKHHILDLSLLSQLTPNALTQHDLKIQENEDGIPNTFVPARNLLFLSFAGALAYQIKAKHIITGVCETDFSGYPDCRDSFIKSMNVTLNLSIDKDFVIHTPLMWLDKAQTWELSDKLGVLNYIRHNTLTCYNGIIGDGCGTCPACDLRARGLKHYLENKGEK

SEQ ID NO: 42547 - protein, 223 aa, Staphylococcus saprophyticus
  misc_feature (1)..(223): sp|Q49VQ7|QUEC_STAS1 7-cyano-7-deazaguanine synthase OS =Staphylococcus saprophyticus subsp. saprophyticus (str ain ATCC 15305 / DSM 20229 / NCIMB 8711 / NCTC 7292 / S -41) OX=342451 GN=queC PE=3 SV=1
MSEQTLDNNKAIVVFSGGQDSTTCLFWAKKHFESVELVTFAYGQRHDTEIEVAKQIADEQGVKHHLLDMSLLSQLTPNALTQHDLDIEVGDDGIPNTFVPARNLLFLSFAGALAYQTNAKHIITGVCETDFSGYPDCRDSFVKSMNVTLSLSMDKDFVIHTPLMWLDKKATWALSDDLGVLDYIRYNTLTCYNGVIGDGCGECPACQLRANGLNAYLAEKGVD

SEQ ID NO: 42548 - protein, 223 aa, Staphylococcus saprophyticus
  misc_feature (1)..(223): tr|A0A4Y9KKF7|A0A4Y9KKF7_STASA 7-cyano-7-deazaguanine s ynthase OS=Staphylococcus saprophyticus OX=29385 GN=que C PE=3 SV=1
MTQQSLDNDKAIVVFSGGQDSTTCLFWAKKYFESVELVTFAYGQRHDTEIEVAKRIAEEQHVKHHILDMSLLSQLTPNALTQHDMDIEVGEDGIPNTFVPARNLLFLSFAGALAYQTNTKNIITGVCETDFSGYPDCRDSFIKSMNVTLSLSMDKDFVIHTPLMWLDKKATWALSDELGALDYIRYNTLTCYNGIVGEGCGECPACELRAHGLNTYLAEKGEN

SEQ ID NO: 42549 - protein, 222 aa, Staphylococcus schleiferi
  misc_feature (1)..(222): tr|A0A3S0JQR7|A0A3S0JQR7_9STAP 7-cyano-7-deazaguanine s ynthase OS=Staphylococcus schleiferi subsp. schleiferi OX=74707 GN=queC PE=3 SV=1
MSETLKNEKAVVVFSGGQDSTTCLFYAKEHFKEVELVTFQYGQRHDLEIKVAEDIAKEQGLKHHILDMSLLSQLSPNALTDHSMQIENDENGIPNTFVPARNLLFLSFAGALAYQIGAKHIITGVCETDFSGYPDCRDSFIKSMNLSLNLSMDKDFVIHTPLMWLNKKETWALSDQLGALDYVREKTLTCYNGVMSDGCGECPACKLRKQGLDQYLETKGSL

SEQ ID NO: 42550 - protein, 223 aa, Staphylococcus schleiferi
  misc_feature (1)..(223): tr|A0A0K0ZW99|A0A0K0ZW99_9STAP 7-cyano-7-deazaguanine s ynthase OS=Staphylococcus schleiferi OX=1295 GN=queC PE =3 SV=1
MSKVLNDEKAVVVFSGGQDSTTCLFYAKKHFKEVELVTFEYGQRHAKEIEVAKAIAEDQGLKHHILDMSLLSQLTPNALTSHDMQIKTDEQIPNTFVPARNLLFLSFAGALAYQIGAKHIITGVCETDFSGYPDCRDVFIKSMNVTLNLSMERDFVIHTPLMWLDKKETWALSDELGVLDYVRYRTLTCYNGIIAEGCGECPACRLRQRGLEQYLAEKGSEKS

SEQ ID NO: 42551 - protein, 222 aa, Staphylococcus schweitzeri
  misc_feature (1)..(222): tr|A0A2K4AJW1|A0A2K4AJW1_9STAP 7-cyano-7-deazaguanine s ynthase OS=Staphylococcus schweitzeri OX=1654388 GN=que C PE=3 SV=1
MQSVLNNEKAIVVFSGGQDSTTCLFYAKKHFKDVELVTFNYGQRHDTEIEVAKQIANEQGMKHHVLDMSLLSQLTPNALTQHDMEITNNEDGIPNTFVPARNLLFLSFAGALAYQIGAKHIITGVCETDFSGYPDCRDSFIKSMNVTLSLAMDKDFVIHTPLMWLNKAETWQLSDELGVLDYIRTNTLTCYNGIVGNGCGECPACQLRQRGLNQYLESKGGL

SEQ ID NO: 42552 - protein, 222 aa, Staphylococcus sciuri
  misc_feature (1)..(222): tr|A0A431Y7J6|A0A431Y7J6_STASR 7-cyano-7-deazaguanine s ynthase OS=Staphylococcus sciuri subsp. rodentium OX=14 7469 GN=queC PE=3 SV=1
MSEVLQNEKALVVFSGGQDSTTCLFYAKAHFKEVELVTFEYGQRHAQEIEVAKKIAREQGLKHHVLDMSLLSQLSPNALTSHDMAIDATHDVPNTFVPARNLLFLSFAGALAYQIKAKHIITGVCETDFSGYPDCRDTFIKSMNITMNLAMDKDFVIHTPLMWLNKKETWALSDQLGALDYIRTQTLTCYNGIIAEGCGECPACQLRQNGLEAYLKEKGAHS

SEQ ID NO: 42553 - protein, 222 aa, Staphylococcus sciuri
  misc_feature (1)..(222): tr|A0A5F0UW66|A0A5F0UW66_STASC 7-cyano-7-deazaguanine s ynthase OS=Staphylococcus sciuri OX=1296 GN=queC PE=3 S V=1
MSETLKNEKAVVVFSGGQDSTTCLFYAKEHFKEVELVTFQYGQRHDLEIKVAEDIAKEQGLKHHILDMSLLSQLPPNALTDHTMQIENDENDIPNTFVPARNLLFLSFAGALAYQIGAKHIITGVCETDFSGYPDCRDSFIKSMNLSLNLSMDKDFVIHTPLMWLNKKETWALSDQLGALDYVREKTLTCYNGVMSDGCGECPACKLRKQGLDQYLETKGSL

SEQ ID NO: 42554 - protein, 223 aa, Staphylococcus simiae
  misc_feature (1)..(223): tr|G5JG84|G5JG84_9STAP 7-cyano-7-deazaguanine synthase OS=Staphylococcus simiae CCM 7213 = CCUG 51256 OX=91123 8 GN=queC PE=3 SV=1
MTESVLQNEKALVVFSGGQDSTTCLFYAKKYFKDVELVTFNYGQRHDSEIEVAKQIAQEQGLKHHVLDMSLLSQLTPNALTNHEMEISNNEDGIPNTFVPARNLLFLSFAGALAYQIDAKHIITGVCETDFSGYPDCRDNFIKSMNVTLSLAMDRDFVIHTPLMWLDKAATWELSDELGVLDYIRNNTITCYNGVIGDGCGECPSCQLRQRGLTQYLERKGAK

SEQ ID NO: 42555 - protein, 223 aa, Staphylococcus simulans
  misc_feature (1)..(223): tr|A0A133QNF3|A0A133QNF3_STASI 7-cyano-7-deazaguanine s ynthase OS=Staphylococcus simulans OX=1286 GN=queC PE=3 SV=1
MAPHKLDDDKALVVFSGGQDSTTCLFYAKAKFKEVELVTFQYGQRHDTEIEVAKQIAQEQGLKHHILDMSLLSQLTPNALTQHDLQIEDTDDGVPNTFVPARNLLFLSFAGALAYQIKARHIITGVCETDFSGYPDCRDDFVKSMNVTLNLSMDKNFVIHTPLMWLDKKETWALSDELGVLDYVRYNTLTCYNGIIADGCGECPACQLRARGLNAYLAEKGVN

SEQ ID NO: 42556 - protein, 223 aa, Staphylococcus simulans
  misc_feature (1)..(223): tr|A0A2T4R145|A0A2T4R145_STASI 7-cyano-7-deazaguanine s ynthase OS=Staphylococcus simulans OX=1286 GN=queC PE=3 SV=1
MAPHKLDDDKALVVFSGGQDSTTCLFYAKEKFKEVELVTFQYGQRHDTEIEVAKQIAQEQGLKHHILDMSLLSQLTPNALTQHDLQIEDTDDGVPNTFVPARNLLFLSFAGALAYQIKARHIITGVCETDFSGYPDCRDDFVKSMNVTLNLSMDKNFVIHTPLMWLDKKETWALSDELGVLDYVRYNTLTCYNGIIADGCGECPACQLRARGLNAYLAEKGVN

SEQ ID NO: 42557 - protein, 223 aa, Staphylococcus sp.
  misc_feature (1)..(223): tr|A0A1J4HE99|A0A1J4HE99_9STAP 7-cyano-7-deazaguanine s ynthase OS=Staphylococcus sp. HMSC34G04 OX=1608860 GN=q ueC PE=3 SV=1
MSQNDLNKEKALVVFSGGQDSTTCLFYAKKHFKEVELVTFNYGQRHDTEIEVAKKIAKEQNLKHHILDMSLLSQLTPNALTQHELKIEDNDDGIPNTFVPARNLLFLSFAGALAYQIHAKHIITGVCETDFSGYPDCRDSFIKSMNVTLSLSMDKDFVIHTPLMWLDKAQTWALSDKLGVLDYIRHNTLTCYNGIIGDGCGECPACHLRARGLKHYLEHKGEE

SEQ ID NO: 42558 - protein, 223 aa, Staphylococcus sp.
  misc_feature (1)..(223): tr|A0A2J6P323|A0A2J6P323_9STAP 7-cyano-7-deazaguanine s ynthase OS=Staphylococcus sp. UMB0328 OX=2029110 GN=que C PE=3 SV=1
MVQHTLDPNKAIVVFSGGQDSTTCLFYAKKHFKDVILVTFNYGQRHDTEIEVAKKIAQEQNVEHHILDMSLLSQLTPNALTQHDLKIEDTEDGIPNTFVPARNLLFLSFAGALAYQIKAKHIITGVCETDFSGYPDCRDSFIKSMNVTLNLSMDRDFVIHTPLMWLDKAQTWELADDLGVLNYIRENTLTCYNGIIGDGCGECPACQLRSRGLDRYLAKKGVQ

SEQ ID NO: 42559 - protein, 222 aa, Staphylococcus stepanovicii
  misc_feature (1)..(222): tr|A0A240A1H1|A0A240A1H1_9STAP 7-cyano-7-deazaguanine s ynthase OS=Staphylococcus stepanovicii OX=643214 GN=que C PE=3 SV=1
MSETLKNEKALVVFSGGQDSTTCMFYAKAHFKEVELVTFQYGQRHDLEIEVAKNIASEQGLKHHVLDMSLLSQLSPNALTDHSMQIEDNEDGVPNTFVPARNLLFLSFAGALAYQIGAKHIITGVCETDFSGYPDCRDSFIKSMNLSLNLSMDKDFVIHTPLMWLNKKETWALSDELDALSYIRNKTLTCYNGVMSDGCGECPACHLRNQGLQQYLESKGSL

SEQ ID NO: 42560 - protein, 223 aa, Staphylococcus succinus
  misc_feature (1)..(223): tr|A0A2T4Q9K1|A0A2T4Q9K1_9STAP 7-cyano-7-deazaguanine s ynthase OS=Staphylococcus succinus OX=61015 GN=queC PE= 3 SV=1
MTQHTLNNNKAIVVFSGGQDSTTCLFWAKKHFDEVELVTFEYGQRHNTEIEVAKQIAQEQNLKHHVLDMSLLSQLTPNALTQHDLEIETNEDGVPNTFVPARNLLFLSFAGALAYQTNAKHIITGVCETDFSGYPDCRDSFIKSMNVTLSLSMDKDFVIHTPLMWLDKKATWSLSDDLGVLDYIRYNTLTCYNGIVGEGCGECPACHLRARGLNTYLEEKGAE

SEQ ID NO: 42561 - protein, 222 aa, Staphylococcus vitulinus
  misc_feature (1)..(222): tr|A0A2T4PW30|A0A2T4PW30_9STAP 7-cyano-7-deazaguanine s ynthase OS=Staphylococcus vitulinus OX=71237 GN=queC PE =3 SV=1
MSETLKNEKALVVFSGGQDSTTCLFYAKKQFKEVELVTFQYGQRHDLEIKVAEDIANEQGLKHHVLDMSLLSQLSPNALTDHNMKIENDENGIPNTFVPARNLLFLSFAGALAYQIGAKHIITGVCETDFSGYPDCRDSFVKSMNLSLNLSMDKDFVIHTPLMWLNKKETWALSDQLGALDYVREKTLTCYNGVMSDGCGECPACKLRKQGLDQYLETKGSL

SEQ ID NO: 42562 - protein, 223 aa, Staphylococcus warneri; identical to SEQ ID NO: 42558
  misc_feature (1)..(223): tr|A0A2V3ZE12|A0A2V3ZE12_STAWA 7-cyano-7-deazaguanine s ynthase OS=Staphylococcus warneri OX=1292 GN=queC PE=3 SV=1

SEQ ID NO: 42563 - protein, 223 aa, Staphylococcus warneri
  misc_feature (1)..(223): tr|A0A2T4Q261|A0A2T4Q261_STAWA 7-cyano-7-deazaguanine s ynthase OS=Staphylococcus warneri OX=1292 GN=queC PE=3 SV=1
MVQHTLDQNKAIVVFSGGQDSTTCLFYAKKHFKDVTLVTFNYGQRHDTEIEVAKKIAQEQNVEHHILDMSLLSQLTPNALTQHDLKIEDTEDGIPNTFVPARNLLFLSFAGALAYQIKAKHIITGVCETDFSGYPDCRDSFIKSMNVTLNLSMDRDFVIHTPLMWLDKAQTWELADDLGVLNYIRENTLTCYNGIIGDGCGECPACQLRSRGLKKYLAKKGVQ

SEQ ID NO: 42564 - protein, 223 aa, Staphylococcus xylosus
  misc_feature (1)..(223): tr|A0A418IGG2|A0A418IGG2_STAXY 7-cyano-7-deazaguanine s ynthase OS=Staphylococcus xylosus OX=1288 GN=queC PE=3 SV=1
MTQQSLDNNKAIVVFSGGQDSTTCLFWAKKHFENVELVTFAYGQRHDTEIEVAKRIAQEQHVKHHILDMSLLSQLTPNALTQHDMDIEVGDDGIPNTFVPARNLLFLSFAGALAYQTNTKNIITGVCETDFSGYPDCRDSFIKSMNVTLSLSMDKDFVIHTPLMWLDKKATWALSDELGALDYIRYNTLTCYNGIVGEGCGECPACELRANGLNTYLAEKGVN

SEQ ID NO: 42565 - protein, 223 aa, Staphylococcus xylosus; identical to SEQ ID NO: 42548
  misc_feature (1)..(223): tr|A0A418IN63|A0A418IN63_STAXY 7-cyano-7-deazaguanine s ynthase OS=Staphylococcus xylosus OX=1288 GN=queC PE=3 SV=1

SEQ ID NO: 42566 - protein, 229 aa, Stappia sp.
  misc_feature (1)..(229): tr|A0A5D0WBS6|A0A5D0WBS6_9RHOB 7-cyano-7-deazaguanine s ynthase OS=Stappia sp. BW2 OX=2592622 GN=queC PE=3 SV=1
MKTLVICSGGMDSVTLAHKVAREHELIGLVSFDYGQRHKKELDYAKACADELKTEHILIDISNIGRQLTGSALTDDLDVPDGHYAEETMKITVVPNRNAIMLSIAFGIASARGAEAVATAVHGGDHFIYPDCRPAFTESFETMQRHALEGMGEISLYTPYVHTSKADIAAEGLELGVDYRKTWSCYKGGEVHCGRCGTCVERREAFHLAGGIDPTVYADEAFWKEACNV

SEQ ID NO: 42567 - protein, 240 aa, Starkeya novella
  misc_feature (1)..(240): tr|A0A2W5MD63|A0A2W5MD63_STANO 7-cyano-7-deazaguanine s ynthase OS=Starkeya novella OX=921 GN=queC PE=3 SV=1
MSDDRPPESRALVLFSGGQDSTTCLAWALERFDHVETVGFDYGQRHRVELERRDALRNGLGRLRPEWGARLGDDHTIDLSVLGQISDTALTRDAEIAMTEAGLPNTFVPGRNIAFLTFAAALGYRRGIFRLVGGMCDTDYSGYPDCRAETMRATATALSLGLDRPLEIDTPLMRLDKAATWALAEELGGEALVALIVEDSHTCYLGDRGERHAWGFGCGTCPACELRARGYEGYVASRTG

SEQ ID NO: 42568 - protein, 452 aa, Starkeya novella
  misc_feature (1)..(452): tr|A0A2W5QU93|A0A2W5QU93_STANO Uncharacterized protein OS=Starkeya novella OX=921 GN=DI549_16160 PE=4 SV=1
MLDKRLFVIEKGQKPGRTLPKDAATAEIGRHIRFNAAVLDTFDVKGCEPLHYDMLVVCAAVEFADRRWKRPLGWRRVLDVTVPVMDLKSWQRPEVLKSLHGVLNHLTGDTWQFTFVQAKNLSPIGSRQMPLDFGKTKTFAIAYSDGLDSRAVSALSGDEAEALCIRVAGNRQRRKNGDSFFTQIPFKVKGYRGNESSFRSRGFQFAAVTAIAAQLSSVSRVVVPESGQGALGPVLLPLHNIYADYRNHPTFFRKMEVFIKALLGHRLRFEQPRLWSTKGQTLRAFLGIAGKSEQHLTSTHSCWQTRRVVNVGGRRQCGLCAACLLRRLSLHAAGVNETPGTYVVSDLAASGSGDALSAIPQKADRDIMVEYGSVGARHLQHLAELSGLPDDALRVHASQIAAATGEIYEETLNKLRTMLVTHAEEWRAFLSAQGGKSFLKSWMDGGRYGRSE

SEQ ID NO: 42569 - protein, 255 aa, Stella humosa
  misc_feature (1)..(255): tr|A0A3N1KVT0|A0A3N1KVT0_9PROT 7-cyano-7-deazaguanine s ynthase OS=Stella humosa OX=94 GN=queC PE=3 SV=1
MRKHSSAMSLPGVQMSLAAEPALVLLSGGQDSATCLAWALDRFGRVETVGFDYGQRHRVELDCRPRLRDGFAGLNPAWAARLGDDHLLDLTTLGRISETALTREAEITVNAAGLPSTFVPGRNLLFFTYAAALAYRRGIRHLVGGMCETDYSGYPDCRDDTLKALQVALTLGMDRRVTLHTPLMWRDKAATWRLAEGLGGPALVEAIVEETVSCYLGDRTQRHDWGYGCGGCPACDLRRSGWIAYRAGGATAPAL

SEQ ID NO: 42570 - protein, 368 aa, Stenotrophomonas acidaminiphila
  misc_feature (1)..(368): tr|A0A2W5LZY7|A0A2W5LZY7_9GAMM 7-cyano-7-deazaguanine s ynthase OS=Stenotrophomonas acidaminiphila OX=128780 GN =DI562_01985 PE=3 SV=1
MAVTAADTFANRDLAPDGWARRIKLKVALADAAPWQAVIPTLERALGFLSGDEWSLRIIGGGEEPPEARTRVQHKVSLAGSDCVCLYSGGLDSAIGALDLRSQGRRPVLVSHAYPRDAARQEELLSHLGGGVVRFATSAHPVARLGRGHDVQMRTRSFNFLAMGALMATALGGGRKTLFVPENGLIAINPPLTNRRIGALSTRTTHPHYLRLVQSVLDTVGIDVALVNPYAQMTKGEMMTNCAEQLRLGRMAKRTVSCGKWKRSGMQCGRCVPCLIRRASFHAAGRQDRTDYAPQAVDLLRYFESGKESDDLMAMMLACEALDDMDMEAWVAKTGPLHLAEGDRQARVAAVHRGMIEVRDFLGSHHLV

SEQ ID NO: 42571 - protein, 221 aa, Stenotrophomonas acidaminiphila
  misc_feature (1)..(221): tr|A0A0R0DS19|A0A0R0DS19_9GAMM 7-cyano-7-deazaguanine s ynthase OS=Stenotrophomonas acidaminiphila OX=128780 GN =queC PE=3 SV=1
MKKAVVLLSGGMDSAAVVAMAQEQGFTVHALSVRYGQRHTSELDAAARVAQALGVAAHKVVDVDLRSIGGSALTDDIDVPDAGGDGIPVTYVPARNTIMLSLALGWAEVLGANDIFCGVNAVDYSGYPDCRPAFVAAFQALANLATKAGVEGAGIRVHAPLQYLSKAQIASEGARLGVDFGLTVSCYRADAQGRACGHCDACRLRADGFAAAGLPDPTHYA

SEQ ID NO: 42572 - protein, 221 aa, Stenotrophomonas chelatiphaga
  misc_feature (1)..(221): tr|A0A0R0CJQ6|A0A0R0CJQ6_9GAMM 7-cyano-7-deazaguanine s ynthase OS=Stenotrophomonas chelatiphaga OX=517011 GN=q ueC PE=3 SV=1
MKKAVVLLSGGMDSAAVIALAQEQGFAVHALSVRYGQRHTSELEAAARVAAAQGVVLHKTVDVDLRSIGGSALTDDIDVPEAGGEGIPVTYVPARNTIMLSLALGWAEVLGANDIFCGVNAVDYSGYPDCRPEFIAAFQALANLATKAGVEGAGITVHAPLQFLSKAQIVSEGVRLGVDFGLTVSCYNADAEGAACGHCDACRLRAQGFDEAGVADPTHYA

SEQ ID NO: 42573 - protein, 226 aa, Stenotrophomonas daejeonensis
  misc_feature (1)..(226): tr|A0A0R0E0R9|A0A0R0E0R9_9GAMM 7-cyano-7-deazaguanine s ynthase OS=Stenotrophomonas daejeonensis OX=659018 GN=q ueC PE=3 SV=1
MKKAVVLLSGGMDSAAVVAMAREQGFDVHALSVRYGQRHTSELDAAARVARAMGVTRHKVVDVDLRSIGGSALTDDIDVPVRTDEERGGDDIPVTYVPARNTIMLSLALGWAEVLGANDIFCGVNAVDYSGYPDCRPEFIAAFQTLANLATRAGVEGAGIRIHAPLQHLSKAQIASEGHRLGVDFALTVSCYRADAQGRACGHCDACRLRADGFAAAGLPDPTHYA

SEQ ID NO: 42574 - protein, 221 aa, Stenotrophomonas ginsengisoli
  misc_feature (1)..(221): tr|A0A0R0DAN0|A0A0R0DAN0_9GAMM 7-cyano-7-deazaguanine s ynthase OS=Stenotrophomonas ginsengisoli OX=336566 GN=q ueC PE=3 SV=1
MKKAVVLLSGGMDSAAVVAIAREQGFAVHALSVRYGQRHTSELDAAVRVAAALGVAEHKVVDVDLRSIGGSALTADIDVPEAGGQGIPVTYVPARNTIMLSLALGWAEVLGAADIFCGVNAVDYSGYPDCRPEFVAAFQALANLATKAGVEGAGIRVHAPLQFLSKAQIAAEGARLGVDFALTVSCYRADADGRACGHCDACKLRADGFADAGVADPTAYV

SEQ ID NO: 42575 - protein, 221 aa, Stenotrophomonas humi
  misc_feature (1)..(221): tr|A0A0R0C702|A0A0R0C702_9GAMM 7-cyano-7-deazaguanine s ynthase OS=Stenotrophomonas humi OX=405444 GN=queC PE=3 SV=1
MKKAVVLLSGGMDSAAVVAIAQEQGFEVYALSVRYGQRHTSELEAAARVASALGVAGHKVVDVDLRSIGGSALTADIDVPEAGGEGIPVTYVPARNTIMLSLALGWAEVLGANDIFCGVNAVDYSGYPDCRPEFVAAFQALANLATKSGVEGAGIVVHAPLQYLSKAQIAAEGQRLGVDFGLTVSCYQADAEGRACGHCDACRLRAEGFGAAGMADPTRYV

SEQ ID NO: 42576 - protein, 227 aa, Stenotrophomonas koreensis
  misc_feature (1)..(227): tr|A0A0R0BUH5|A0A0R0BUH5_9GAMM 7-cyano-7-deazaguanine s ynthase OS=Stenotrophomonas koreensis OX=266128 GN=queC PE=3 SV=1
MNKAVVLLSGGMDSAAVVAMAHEQGFAVHALSVRYGQRHTSELDAAMRVAAALGVAEHKVVDVDLRAIGGSALTADIEVPAAGGEGIPVTYVPARNTIMLSLALGWAEVLGAADIFCGVNAVDYSGYPDCRPEFIAAFQHLANLATKAGVEGAGITIHAPLQHLSKAQIAAEGTRLGVDFGLTVSCYRADARGRACGQCDACELRAEGFRAAGLSDPTHYVDGLRMV

SEQ ID NO: 42577 - protein, 221 aa, Stenotrophomonas lactitubi
  misc_feature (1)..(221): tr|A0A2M9QYZ0|A0A2M9QYZ0_9GAMM 7-cyano-7-deazaguanine s ynthase OS=Stenotrophomonas lactitubi OX=2045214 GN=que C PE=3 SV=1
MKKAVVLLSGGMDSAAVIAMAQEQGFAVHALSVRYGQRHTSELDAAARVAKAQGVIVHKTVDVDLRSIGGSALTDDIDVPEAGGEGIPVTYVPARNTIMLSLALGWAEVLGANDIFCGVNAVDYSGYPDCRPEFIAAFQALANLATKSGVEGAGITVHAPLQFLSKGQIVSEGVRLGVDFGLTVSCYNADANGAACGHCDACRLRAQGFTDAGVADPTLYA

SEQ ID NO: 42578 - protein, 221 aa, Stenotrophomonas maltophilia
  misc_feature (1)..(221): sp|B2FRM5|QUEC_STRMK 7-cyano-7-deazaguanine synthase OS =Stenotrophomonas maltophilia (strain K279a) OX=522373 GN=queC PE=3 SV=1
MKKAVVLLSGGMDSAAVIAMAQEQGFAVHALSVRYGQRHTSELDAAARVAKAQGVVAHKIVDVDLRSIGGSALTDDIDVPEAGGAGIPVTYVPARNTIMLSLALGWAEVLGANDIFCGVNAVDYSGYPDCRPEFVAAFQALANLATKSGVEGAGIKVHAPLQFLSKGQIVSEGVRLGVDFGLTVSCYNADANGAACGHCDACRLRAQGFAEAGVPDPTLYA

SEQ ID NO: 42579 - protein, 221 aa, Stenotrophomonas maltophilia
  misc_feature (1)..(221): tr|T5KNX2|T5KNX2_STEMA 7-cyano-7-deazaguanine synthase OS=Stenotrophomonas maltophilia MF89 OX=1333853 GN=queC PE=3 SV=1
MKKAVVLLSGGMDSAAVIAMAQEQGFAVHALSVRYGQRHTSELDAAARVAKAQGVVAHKTVDVDLRSIGGSALTDDIDVPEAGGAGIPVTYVPARNTIMLSLALGWAEVLGANDIFCGVNAVDYSGYPDCRPEFVAAFQALANLATKSGVEGGGIKVHAPLQFLSKGQIVSEGVRLGVDFGLTVSCYNADANGAACGHCDACRLRAQGFAEAGVPDPTLYV

SEQ ID NO: 42580 - protein, 222 aa, Stenotrophomonas panacihumi
  misc_feature (1)..(222): tr|A0A0R0AQX0|A0A0R0AQX0_9GAMM 7-cyano-7-deazaguanine s ynthase OS=Stenotrophomonas panacihumi OX=676599 GN=que C PE=3 SV=1
MKKAVVLLSGGMDSAAVIAIAQEQGFAVHALSVRYGQRHTSELAAAARVAEALGVVAHKVVDVDLRSIGGSALTDDAIDVPEAGGEGIPSTYVPARNTIMLSLALGWAEVLGANDIFCGVNAVDYSGYPDCRPEFIAAFQALANLATKAGVEGAGLRVHAPLQFLSKADIVREGVRLGVDFGLTVSCYQADADGRACGHCDACRLRAAGFADAGVSDPTRYA

SEQ ID NO: 42581 - protein, 221 aa, Stenotrophomonas pavanii; identical to SEQ ID NO: 36467
  misc_feature (1)..(221): tr|A0A246KT48|A0A246KT48_9GAMM 7-cyano-7-deazaguanine s ynthase OS=Stenotrophomonas pavanii OX=487698 GN=queC P E=3 SV=1

SEQ ID NO: 42582 - protein, 221 aa, Stenotrophomonas pictorum
  misc_feature (1)..(221): tr|A0A0R0AR07|A0A0R0AR07_9GAMM 7-cyano-7-deazaguanine s ynthase OS=Stenotrophomonas pictorum JCM 9942 OX=123696 0 GN=queC PE=3 SV=1
MKKAVVLLSGGMDSAAVIAIAQEQGYQVYALSVRYGQRHTSELDAAARVAAALGVAGHKVVDVDLRSIGGSALTDDIAVPEAGGAGIPVTYVPARNTIMLSLALGWAEVLGANDIFCGVNAVDYSGYPDCRPEFIAAFQALANLATKAGVEGAGIRVHAPLQHLSKAQIASEGQRLGVDFGLTVSCYQADTEGRACGHCDACRLRADGFAAAGLADPTHYV

SEQ ID NO: 42583 - protein, 221 aa, Stenotrophomonas rhizophila
  misc_feature (1)..(221): tr|A0A4U3GHY2|A0A4U3GHY2_9GAMM 7-cyano-7-deazaguanine s ynthase OS=Stenotrophomonas rhizophila OX=216778 GN=que C PE=3 SV=1
MKKAVVLLSGGMDSAAVIAIAQEQGFAVHALSVRYGQRHTSELDAAAAVAQALGVVAHKTVNVDLRSIGGSALTDDIDVPEAGGEGIPVTYVPARNTIMLSVALGWAEVLGASDIFCGVNAVDYSGYPDCRPEFIAAFQALANLATKAGVEGAGIQVHAPLQFLSKADIVREGVRLGVDFGLTVSCYNADDSGAACGHCDACRLRAQGFTDAGVADPTRYA

SEQ ID NO: 42584 - protein, 221 aa, Stenotrophomonas rhizophila
  misc_feature (1)..(221): tr|A0A1B2N734|A0A1B2N734_9GAMM 7-cyano-7-deazaguanine s ynthase OS=Stenotrophomonas rhizophila OX=216778 GN=que C PE=3 SV=1
MKNAVVLLSGGMDSAAVVAMAREQGFAVHALSVRYGQRHTSELDAAAAVAKALGVVAHKTVNVDLRSIGGSALTDDIDVPEAGGEGIPVTYVPARNTIMLSVALGWAEVLGANDIFCGVNAVDYSGYPDCRPEFISAFQTLANLATKAGVEGAGIQVHAPLQFLSKADIVREGVRLGVDFGLTVSCYNADDSGAACGHCDACRLRAQGFADAGVADPTRYA

SEQ ID NO: 42585 - protein, 222 aa, Stenotrophomonas sp.
  misc_feature (1)..(222): tr|A0A4R4IG59|A0A4R4IG59_9GAMM 7-cyano-7-deazaguanine s ynthase OS=Stenotrophomonas sp. ATCM1_4 OX=2259330 GN=q ueC PE=3 SV=1
MKKKAVVLLSGGMDSAAVVAIAQEQGFEVYALSVRYGQRHTSELEAARRVSAALGVAGHKVVDVDLRSIGGSALTDDIDVPEAGGAGIPVTYVPARNTIMLSLALGWAEVLGANDIFCGVNAVDYSGYPDCRPEFVAAFQALANLATKAGVEGAGIVVHAPLQYLSKAQIAAEGQRLGVDFGLTVSCYQADMNGRACGHCDACRLRADGFAAAGLADPTHYA

SEQ ID NO: 42586 - protein, 221 aa, Stenotrophomonas sp.
  misc_feature (1)..(221): tr|A0A3D5JUE4|A0A3D5JUE4_9GAMM 7-cyano-7-deazaguanine s ynthase OS=Stenotrophomonas sp. OX=69392 GN=queC PE=3 S V=1
MKKAVVLLSGGMDSAAVIAIAQEQGFAVHALSVRYGQRHTSELDAAAAVAQAQGVVAHKTVNVDLRSIGGSALTDDIDVPEAGGEGIPVTYVPARNTIMLSVALGWAEVLGANDIFCGVNAVDYSGYPDCRPEFIAAFQALANLATKAGVEGAGIQVHAPLQFLSKADIVREGVRLGVDFGLTVSCYNADATGAACGHCDACRLRAQGFTDAGVADPTRYA

SEQ ID NO: 42587 - protein, 223 aa, Stenotrophomonas terrae
  misc_feature (1)..(223): tr|A0A0R0CBU3|A0A0R0CBU3_9GAMM 7-cyano-7-deazaguanine s ynthase OS=Stenotrophomonas terrae OX=405446 GN=queC PE =3 SV=1
MKKKAVVLLSGGMDSAAVVAIAQEQGFEVHAMSVRYGQRHTSELEAAARVASALGVAGHKVVAVDLRSIGGSALTDDINVPDAGTGDAIPVTYVPARNTIMLSLALGWAEVLGANDIFCGVNAVDYSGYPDCRPEFIAAFQALANLATKAGVEGAGIRVHAPLQYLSKAQIALEGQRLGVDFGLTVSCYQADMDGKACGHCDACQLRADGFAAAGMADPTQYA

SEQ ID NO: 42588 - protein, 228 aa, Steroidobacter denitrificans
  misc_feature (1)..(228): tr|A0A127FC36|A0A127FC36_STEDE 7-cyano-7-deazaguanine s ynthase OS=Steroidobacter denitrificans OX=465721 GN=qu eC PE=3 SV=1
MSRSDARAVVLLSGGLDSATVLAIARHEGRQCYALSVDYGQRHRAELEAAARVAQSLGTVEHRCLRIDLSGIGGSALTDASIAIPETPQAGIPVTYVPARNTVMLSFALGWAEVLGAPRIYIGVNAIDYSGYPDCRPAFIAAFERLANLATKAAVEGIMTFRIETPLMDLTKAQIIRRGLELGVDYGLTVSCYQADEQGRACGACDACRLRREGFRTAGATDPTSYFR

SEQ ID NO: 42589 - protein, 229 aa, Stigmatella aurantiaca
  misc_feature (1)..(229): tr|A0A1H7WZ02|A0A1H7WZ02_STIAU 7-cyano-7-deazaguanine s ynthase OS=Stigmatella aurantiaca OX=41 GN=queC PE=3 SV =1
MKKAVVLLSGGLDSTTCLAMAKAAGFDPVCLAIDYGQRHAVELERARKVALAMGARDFRVVPIDLRSVGGSALTADIAVPKDRPETEMSHGIPVTYVPARNLLFLSLALGLAEVVGAYDIYIGVNAVDYSGYPDCRPQFIEAFAALAGLATKAGVEGQRFQVHAPLSGMTKAQIIQEGTRLGVNYGMTHSCYDPDAKGRACGRCDSCLLRKKGFQEARVPDPTPYTEGA

SEQ ID NO: 42590 - protein, 198 aa, Stigmatella aurantiaca
  misc_feature (1)..(198): tr|Q090S6|Q090S6_STIAD 7-cyano-7-deazaguanine synthase OS=Stigmatella aurantiaca (strain DW4/3-1) OX=378806 GN =STAUR_6846 PE=3 SV=1
MKTALLLSGGMDSIAIAWWRRPELALTVDYGQRSALAELRAAASAAEAMGIEHLTVEADLSALGSGDMAGAEPLSLAPVTEWWPFRNQMLVTLAAMKAVAHGVQRLLIGTLKTDGLHADGRPDFVMALDALLRLQEGGLRLEAPAIALTSAELIRTSNIPMEVLAWAHSCHVGIHACGQCRGCQKHYQTLAELGVDPY

SEQ ID NO: 42591 - protein, 229 aa, Stigmatella erecta
  misc_feature (1)..(229): tr|A0A1I0H2Q3|A0A1I0H2Q3_9DELT 7-cyano-7-deazaguanine s ynthase OS=Stigmatella erecta OX=83460 GN=queC PE=3 SV= 1
MKKAVVLLSGGLDSTTCLAMAKAAGFEPVCLAIDYGQRHAVELERARKVALAMGARDFRVVQMDLRSVGGSALTADIAVPKDRPEAEMSHGIPVTYVPARNLLFLSLALGLAEVVGAYDIYIGVNAVDYSGYPDCRPQFIEAFAALAGLATKAGVEGQRFQVHAPLSGMTKAQIIQEGTRLGVNYGMTHSCYDPDAKGRACGRCDSCLLRKKGFQDAGVPDPTPYTEGA

SEQ ID NO: 42592 - protein, 237 aa, Streptoalloteichus hindustanus
  misc_feature (1)..(237): tr|A0A1M5D0Z0|A0A1M5D0Z0_STRHI 7-cyano-7-deazaguanine s ynthase OS=Streptoalloteichus hindustanus OX=2017 GN=qu eC PE=3 SV=1
MATTVIVHFGHRGPHHTVVVASGGLDSTVLAYWLAARHSRLTLVSFDYGQRHRVELDYATEIARLLDSSHRVIDLTSLGALLTGSALTNTSVPVPDGHYTDESLASTVVPNRNAIMLDVAVSVAIAVHADAVAFGAHAGDHTVYPDCRPEFVERFARSVEAANEGLLTPGFQVLAPFLTLTKTDIVRVGEALSVPFALTWSCYRGQHVHCGRCSTCVERRRAFRDNNIPDPTAYETG

SEQ ID NO: 42593 - protein, 217 aa, Streptococcus australis
  misc_feature (1)..(217): tr|A0A4V0BUX7|A0A4V0BUX7_9STRE 7-cyano-7-deazaguanine s ynthase OS=Streptococcus australis OX=113107 GN=queC PE =3 SV=1
MKRQSALVVFSGGQDSTTCLFWAKEHYETVEAVTFAYGQRHHLEIQVAREIAKEQGIRHHILDMSLLGQITENALTSDLEIEQKEGEVPNTFVDGRNHLFLSFAAVLAKQRGIKDIVTGVCETDFSGYPDCRDVFVKSLNVTLNLAMDYNFVIQTPLMWLDKAETWKLADQLGAFDYVREKTLTCYNGIIGSGCGDCPACHLRQHGLDVYLSQKGEG

SEQ ID NO: 42594 - protein, 428 aa, Streptococcus constellatus
  misc_feature (1)..(428): tr|A0A380JJF0|A0A380JJF0_STRCV Uncharacterized protein OS=Streptococcus constellatus OX=76860 GN=NCTC11325_011 35 PE=4 SV=1
MKVFCSNDRKKYLPEGYDEHIDIKCRSDVGFQFWDKHMKFDSEFSSLAIDLLYISIFVFAMDRKVLRAEQPDNWSRSIELNIPVSDVVFWDERKTLLHTMISFLSGDDWKFSFRKKEILDERDFYERNKYKKARAKSYDTVCMLSGGLDSYIGAIDLLEKRNNKVLFVSHYGGGKGTKEYQDLVFQSLKTEYELEDSDYIQFYASCKNGVEDTTRTRSFMFFSHAIALASAFNIDTQMYIPENGFISLNIPLTGARFGSSSTRTTHPYYMKLLKKLVKEMGLNLTIINPYQLKTKGDMVLECKNIELLKNNYTKTMSCSHPDVGRYDKESKTMHCGSCIPCIIRRAALLRGFTKDKTEVRDFKLTKTEAARLNKNAFLKKIETFKSDGAIMEIQKSGIIDENLNEIASMYCRGIDEIKMFFSEVIGDD

SEQ ID NO: 42595 - protein, 217 aa, Streptococcus criceti
  misc_feature (1)..(217): tr|G5JPD8|G5JPD8_STRCG 7-cyano-7-deazaguanine synthase OS=Streptococcus criceti HS-6 OX=873449 GN=queC PE=3 SV =1
MKRQSALVVFSGGQDSTTCLFWALRHYDHVEAVTFAYGQRHSQEVEVAKGIAKDLEIEHHILDMSLLGQITNNALTSDIEIEAQEGEVPNTFVDGRNHLFLSFAAVLAKQKGITDIVTGVCETDFSGYPDCRDAFVKSLNVTLNLAMDYDFVIQTPLMWLDKAETWALADQLGAFDYVKDKTLTCYNGVMGTGCGECPACKLRQHGLDTYLARRGEA

SEQ ID NO: 42596 - protein, 217 aa, Streptococcus downei
  misc_feature (1)..(217): tr|A0A380JGA6|A0A380JGA6_STRDO 7-cyano-7-deazaguanine s ynthase OS=Streptococcus downei MFe28 OX=764290 GN=queC PE=3 SV=1
MKRQSALVVFSGGQDSTTCLFWALKHYDHVEAVTFAYGQRHSHEVEVAKGIAKDLEIEHQVLDMSLLGQITNNALTSDMEIEAQEGQVPNTFVDGRNHLFLSFAAILAKQKGISDIVTGVCETDFSGYPDCRDAFVKSLNVTLNLAMGYNFVIQTPLMWLDKSETWELADQLGAFDYVKDKTLTCYNGIMGAGCGECPACKLRQHGLDTYLARRGEA

SEQ ID NO: 42597 - protein, 222 aa, Streptococcus dysgalactiae; identical to SEQ ID NO: 42488
  misc_feature (1)..(222): tr|A0A4V0BST9|A0A4V0BST9_STREQ 7-cyano-7-deazaguanine s ynthase OS=Streptococcus dysgalactiae subsp. equisimili s OX=119602 GN=queC PE=3 SV=1

SEQ ID NO: 42598 - protein, 224 aa, Streptococcus dysgalactiae
  misc_feature (1)..(224): tr|A0A4U9XXC4|A0A4U9XXC4_STREQ 7-cyano-7-deazaguanine s ynthase OS=Streptococcus dysgalactiae subsp. equisimili s OX=119602 GN=queC PE=3 SV=1
MNQKKAVILLSGGLDSATVVAMAKADGYACYTMSFDYGQRHRAELQAAERVARQLGAIEHKVIGLDLNGMGGSALTDDSIAVPEAPSQGIPVTYVPARNTVFLSLALGWAEVLEARDIFIGVNAVDYSGYPDCRPEFVEAFERMANLATKAGVEGNGFRIQAPLQYLSKAQIIQAGVARGVDYGLTVSCYQADDQGRACGKCDSCRLRADGFAAAGIPDPTPYF

SEQ ID NO: 42599 - protein, 244 aa, Streptococcus equinus
  misc_feature (1)..(244): tr|E0PEC6|E0PEC6_STREI 7-cyano-7-deazaguanine synthase OS=Streptococcus equinus ATCC 700338 OX=864569 GN=exsB PE=3 SV=1
MTELAPLWIPMRAFLLPKYLKRYRGDKMKRQSALVVFSGGQDSTTCLFWALKHYDHVETVTFNYGQRHSLEIEVAKHIAAEQGVKNHLLDMSLLGQLTENALTRDIVIENPDDDLPNTFVDGRNHLFLSFAAVLAKRLGITDIITGVCETDFSGYPDCRDAFVKSLNVTLNLAMDYNFVIQTPLMWLDKSETWELADQLGKFDYVRENTLTCYNGIKGSGCGECPACKLRQAGLEKYLAKKGQA

SEQ ID NO: 42600 - protein, 217 aa, Streptococcus equinus
  misc_feature (1)..(217): tr|A0A1G9MXT4|A0A1G9MXT4_STREI 7-cyano-7-deazaguanine s ynthase OS=Streptococcus equinus OX=1335 GN=queC PE=3 S V=1
MKRQSALVVFSGGQDSTTCLFWALKHYEHVETVTFNYGQRHSLEIEVAKQIAAEQGVKNHLLDMSLLGQLTENALTRDIEIENPDDDVPNTFVDGRNHLFLSFAAVLAKRLGITDIITGVCETDFSGYPDCRDAFVKSLNVTLNLAMDYNFVIQTPLMWLDKSETWELADKLGKFDYVRENTLTCYNGIKGSGCGECPSCKLRQAGLEKYLARRGQD

SEQ ID NO: 42601 - protein, 242 aa, Streptococcus gallolyticus
  misc_feature (1)..(242): tr|A0A0E1XFC8|A0A0E1XFC8_STRGY 7-cyano-7-deazaguanine s ynthase OS=Streptococcus gallolyticus subsp. gallolytic us TX20005 OX=545774 GN=exsB PE=3 SV=1
MTELAPLWIPMRAFLLPKYLKRYRGDKMKRQSALVVFSGGQDSTTCLFWALKHYDHVETVTFNYGQRHSLEIEVAKHIAAEQGVKNHLLDMSLLGQLTENALTRDIAIENPDDDLPNTFVDGRNHLFLSFAAVLAKRLGITDIITGVCETDFSGYPDCRDAFVKSLNVTLNLAMDYNFVIQTPLMWLDKSETWELADQLGKFDYVRENTLTCYNGIKGSGCGECPACKLRQAGLEKYLAKKG

SEQ ID NO: 42602 - protein, 217 aa, Streptococcus gallolyticus
  misc_feature (1)..(217): tr|A0A1H9LUM6|A0A1H9LUM6_9STRE 7-cyano-7-deazaguanine s ynthase OS=Streptococcus gallolyticus OX=315405 GN=queC PE=3 SV=1
MKRQSALVVFSGGQDSTTCLFWALKHYDHVETVTFNYGQRHSLEIEVAKHIAAEQGVKNHLLDMSLLGQLTENALTRDFAIENPDDDLPNTFVDGRNHLFLSFAAVLAKRLGITDIITGVCETDFSGYPDCRDAFVKSLNVTLNLAMDYNFVIQTPLMWLDKSETWELADQLGKFDYVRENTLTCYNGIKGSGCGDCPACKLRQAGLEKYLAKKGQA

SEQ ID NO: 42603 - protein, 217 aa, Streptococcus halitosis
  misc_feature (1)..(217): tr|A0A426FXR3|A0A426FXR3_9STRE 7-cyano-7-deazaguanine s ynthase OS=Streptococcus halitosis OX=2172545 GN=queC P E=3 SV=1
MKRQSALVVFSGGQDSTTCLFWAKEHYETVEAVTFAYGQRHHLEIQVAREIAKEQGIRHHILDMSLLGQITENALTSDLEIEQKEGELPNTFVDGRNHLFLSFAAVLAKQRGIKDIVTGVCETDFSGYPDCRDVFVKSLNVTLNLAMDYDFVIQTPLMWLDKAETWELADQLGAFDYVREKTLTCYNGIIGSGCGDCPACHLRQHGLDVYLSQKGEG

SEQ ID NO: 42604 - protein, 217 aa, Streptococcus henryi
  misc_feature (1)..(217): tr|A0A1G6A9E0|A0A1G6A9E0_9STRE 7-cyano-7-deazaguanine s ynthase OS=Streptococcus henryi OX=439219 GN=queC PE=3 SV=1
MKRQSALVVFSGGQDSTTCLFWALKHYDHVETVTFAYGQRHSLEIEVAQSIAKEQGVKNHLLDMSLLGQITANALTRDMEIENPDDDVPNTFVDGRNHLFLSFAAVLAKQLGITDIVTGVCETDFSGYPDCRDVFVKSLNVTLNLAMDYNFVIQTPLMWLDKAETWELADELGQFDYVRQETLTCYNGIKGSGCGECPACELRQAGLEKYLAKKGKD

SEQ ID NO: 42605 - protein, 216 aa, Streptococcus infantarius
  misc_feature (1)..(216): tr|A0A380KMH6|A0A380KMH6_9STRE 7-cyano-7-deazaguanine s ynthase OS=Streptococcus infantarius OX=102684 GN=queC PE=3 SV=1
MKRQSALVVFSGGQDSTTCLFWALEHYEHVETVTFNYGQRHSLEIEVAKHIAAEQGVKNHLLDMSLLGQLTENALTRDIEIENPDDDLPNTFVDGRNHLFLSFAAVLAKRLGITDIITGVCETDFSGYPDCRDAFVKSLNVTLNLAMNYNFVIHTPLMWLDKSETWELADQLGKFDYVRENTFTCYNGIKGSGCGECPACKLRQAGLEKYLARRGK

SEQ ID NO: 42606 - protein, 217 aa, Streptococcus infantis
  misc_feature (1)..(217): tr|E8K2R4|E8K2R4_9STRE 7-cyano-7-deazaguanine synthase OS=Streptococcus infantis ATCC 700779 OX=889204 GN=exsB PE=3 SV=1
MKRQSALVVFSGGQDSTTCLFWAKQHYERVEAVTFAYGQRHHLEIQVAKEISEEQGIRHHILDMSLLGQITENALTSDLEIEQKEGEVPNTFVDGRNHLFLSFAAVLAKQRGITDIVTGVCETDFSGYPDCRDVFVKSLNVTLNLAMDYDFVIQTPLMWLDKAETWELADQLGAFDYVREKTLTCYNGIIGTGCGDCPACHLRQHGLEVYLSQKGEA

SEQ ID NO: 42607 - protein, 217 aa, Streptococcus infantis
  misc_feature (1)..(217): tr|J1H2R6|J1H2R6_9STRE 7-cyano-7-deazaguanine synthase OS=Streptococcus infantis SPAR10 OX=1159208 GN=queC PE= 3 SV=1
MKRQSALVVFSGGQDSTTCLFWAKQHYERVEAVTFAYGQRHHLEIQVAKEIAEEQGIRHHILDMSLLGQITENALTSDLEIEQKEGEVPNTFVDGRNHLFLSFAAVLAKQRGITDIVTGVCETDFSGYPDCRDVFVKSLNVTLNLAMDYDFVIQTPLMWLDKAETWELADQLGAFDYVREKTLTCYNGIIGTGCGDCPACHLRQHGLEVYLSQKGEA

SEQ ID NO: 42608 - protein, 217 aa, Streptococcus lutetiensis
  misc_feature (1)..(217): tr|A0A2X3W5V9|A0A2X3W5V9_9STRE 7-cyano-7-deazaguanine s ynthase OS=Streptococcus lutetiensis OX=150055 GN=queC PE=3 SV=1
MKRQPALVGFSGGQESTTCLFWALEHYEHVETVTFNYGQCHSLEIEVAKHIAAEQGVKNHLLDMSLLGQLTENALTRYIEIENPDDDVPNTFVDGRNHLFLSFAAVLAKRLGITDIITGVCETDFSGYPDCRDTFVKSLNVTLNLAMDYNFVIQTPLMWLDKSETWELANKLGKFDYVREKTLTCYNGIKGSGCGECPSCKLRQAGLEKYLARRGKT

SEQ ID NO: 42609 - protein, 154 aa, Streptococcus lutetiensis
  misc_feature (1)..(154): tr|A0A4V0E6B6|A0A4V0E6B6_9STRE 7-cyano-7-deazaguanine s ynthase OS=Streptococcus lutetiensis OX=150055 GN=queC PE=3 SV=1
MSLLGQLTENALTRYIEIENPDDDVPNTFVDGRNHLFLSFAAVLAKRLGITDIITGVCETDFSGYPDCRDTFVKSLNMTLNLAMDYNFVIQTPLMWLDKSETWELANKLGKFDYVREKTLTCYNGIKGSGCGECPSCKLRQAGLEKYLVRRGKT

SEQ ID NO: 42610 - protein, 217 aa, Streptococcus macedonicus
  misc_feature (1)..(217): tr|A0A2I1YHG7|A0A2I1YHG7_STRMC 7-cyano-7-deazaguanine s ynthase OS=Streptococcus macedonicus OX=59310 GN=queC P E=3 SV=1
MKRQSALVVFSGGQDSTTCLFWALKHYDHVETVTFNYGQRHSLEIEVAKHIAAEQGVKNHLLDMSLLGQLTENALTRDIVIENPDDDLPNTFVDGRNHLFLSFAAVLAKRLGITDIITGVCETDFSGYPDCRDAFVKSLNVTLNLAMDYNFVIQTPLMWLDKSETWELADQLGKFDYVRENTLTCYNGIKGSGCGECPACKLRQAGLEKYLAKKGQA

SEQ ID NO: 42611 - protein, 219 aa, Streptococcus macedonicus
  misc_feature (1)..(219): tr|A0A081JH73|A0A081JH73_STRMC 7-cyano-7-deazaguanine s ynthase OS=Streptococcus macedonicus OX=59310 GN=queC P E=3 SV=1
MKRQSALVVFSGGQDSTTCLFWALKHYDHVETVTFNYGQRHSLEIEVAKHIAAEQGVKNRLLDMSLLGQLTENALTRNIAIENPDDDLPNTFVDGRNHLFLSFAAVLAKHLGITDIITGVCETDFSGYPDCRDAFVKSLNVTLNLAMDYNFVIQTPLMWLDKSETWELADQLGKFDYVRENTLTCYNGIKGSGCGECPACKLRQAGLEKYLAKKGQPNV

SEQ ID NO: 42612 - protein, 217 aa, Streptococcus mitis
  misc_feature (1)..(217): tr|D3H7H9|D3H7H9_STRM6 7-cyano-7-deazaguanine synthase OS=Streptococcus mitis (strain B6) OX=365659 GN=queC PE =3 SV=1
MKRQSALVVFSGGQDSTTCLFWAKEHYETVEAVTFAYGQRHHLEIQVAQEIAKEQGIRHHILDMSLLGQITENALTSDLEIEQKEGEVPNTFVDGRNHLFLSFAAVLAKQQGITDIVTGVCETDFSGYPDCRDVFVKSLNVTLNLAMEYDFVIQTPLMWLDKAETWELADQLGAFDYVREKTLTCYNGIIGSGCGDCPACHLRQHGLDVYLSQKGEA

SEQ ID NO: 42613 - protein, 217 aa, Streptococcus mitis
  misc_feature (1)..(217): tr|F9HMH4|F9HMH4_STRMT 7-cyano-7-deazaguanine synthase OS=Streptococcus mitis SK1080 OX=1008453 GN=queC PE=3 S V=1
MKRQSALVVFSGGQDSTTCLFWAKEHYETVEAVTFAYGQRHHLEIQVAREIAKEQGIHHHILDMSLLGQITENALTSDLEIEQKEGEVPNTFVDGRNHLFLSFAAVLAKQRGIKDIVTGVCETDFSGYPDCRDVFVKSLNVTLNLAMDYDFVIQTPLMWLDKAETWELADQLGAFDYVREKTLTCYNGIIGSGCGDCPACHLRQHGLDVYLSQKGEA

SEQ ID NO: 42614 - protein, 217 aa, Streptococcus mutans
  misc_feature (1)..(217): sp|Q8DUK7|QUEC_STRMU 7-cyano-7-deazaguanine synthase OS =Streptococcus mutans serotype c (strain ATCC 700610 / UA159) OX=210007 GN=queC PE=3 SV=1
MKRQSALVVFSGGQDSTTCLFWAMKHYEYVETVTFSYGQRHSQELEVAKEIAAEQGVKHHILDMSLLGQITENALTSDIAIETKDGEVPNTFVDGRNHLFLSFAAVLAKQRKIRDIVTGVCQTDFSGYPDCRDVFVKSLNVTLNLAMDYEFVIQTPLMWLDKAETWELADQLGKFDYVRQKTLTCYNGIRGTGCRQCPACHLRQAGLEKYLSQKGKN

SEQ ID NO: 42615 - protein, 217 aa, Streptococcus mutans
  misc_feature (1)..(217): tr|A0A448RXB3|A0A448RXB3_STRMG 7-cyano-7-deazaguanine s ynthase OS=Streptococcus mutans OX=1309 GN=queC PE=3 SV =1
MKRQSALVVFSGGQDSTTCLFWALQHYEHVETVTFAYGQRHSQELAVAKEIAAEQGVKHHILDMSLLGQITENALTSDIDIEAKNGEVPNTFVDGRNHLFLSFAAVLAKQRHITDIITGVCQTDFSGYPDCRDVFVKSLNVTLNLAMDYEFVIQTPLMWLDKSETWALADSLGKFDYVREKTLTCYNGIRGAGCGQCPACHLRQTGLDKYLAQKEKN

SEQ ID NO: 42616 - protein, 217 aa, Streptococcus oralis
  misc_feature (1)..(217): tr|D4FUD7|D4FUD7_STROR 7-cyano-7-deazaguanine synthase OS=Streptococcus oralis ATCC 35037 OX=655813 GN=exsB PE =3 SV=1
MKRQSALVVFSGGQDSTTCLFWAKEHYETVEAVTFSYGQRHHLEIQVAREIAKEQGIRHHILDMSLLGQITENALTSDMEIEQKEGEVPNTFVDGRNHLFLSFAAVLAKQRGIQDIVTGVCETDFSGYPDCRDVFVKSLNVTLNLAMDYDFVIQTPLMWLDKSETWELADQLDAFDYVRERTLTCYNGIIGSGCGDCPACHLRQHGLDVYLSQKGEG

SEQ ID NO: 42617 - protein, 217 aa, Streptococcus oralis
  misc_feature (1)..(217): tr|A0A1X1HMK5|A0A1X1HMK5_STROR 7-cyano-7-deazaguanine s ynthase OS=Streptococcus oralis subsp. oralis OX=189191 4 GN=queC PE=3 SV=1
MKRQSALVVFSGGQDSTTCLFWAKEHYETVEAVTFAYGQRHHLEIQVAREIAKEQGIRHHILDMSLLGQITENALTSDLEIEQKEGEVPNTFVDGRNHLFLSFAAVLAKQRGIKDIVTGVCETDFSGYPDCRDVFVKSLNVTLNLAMDYDFVIQTPLMWLDKAETWELADQLGAFDYVREKTLTCYNGIIGSGCGDCPACHLRQHGLDVYLSQKGEG

SEQ ID NO: 42618 - protein, 217 aa, Streptococcus pasteurianus; identical to SEQ ID NO: 42610
  misc_feature (1)..(217): tr|F5X768|F5X768_STRPX 7-cyano-7-deazaguanine synthase OS=Streptococcus pasteurianus (strain ATCC 43144 / JCM 5346 / CDC 1723-81) OX=981540 GN=queC PE=3 SV=1

SEQ ID NO: 42619 - protein, 217 aa, Streptococcus pasteurianus; identical to SEQ ID NO: 42610
  misc_feature (1)..(217): tr|A0A2X4S2L0|A0A2X4S2L0_9STRE 7-cyano-7-deazaguanine s ynthase OS=Streptococcus pasteurianus OX=197614 GN=queC PE=3 SV=1

SEQ ID NO: 42620 - protein, 217 aa, Streptococcus peroris
  misc_feature (1)..(217): tr|E8KDG9|E8KDG9_9STRE 7-cyano-7-deazaguanine synthase OS=Streptococcus peroris ATCC 700780 OX=888746 GN=exsB PE=3 SV=1
MKRQSALVVFSGGQDSTTCLFWAKQHYERVEAVTFAYGQRHHLEIQVAKEIAEEQGIHHHILDMSLLGQITENALTSDLEIEQKEGEVPNTFVDGRNHLFLSFAAVLAKQRGITDIVTGVCETDFSGYPDCRDVFVKSLNVTLNLAMDYDFVIQTPLMWLDKAETWALADQLGAFDYVREKTLTCYNGIRGAGCGDCPACHLRQHGLEVYLSQKGEA

SEQ ID NO: 42621 - protein, 177 aa, Streptococcus pneumoniae
  misc_feature (1)..(177): tr|A0A0E8GJV8|A0A0E8GJV8_STREE NADPH-dependent 7-cyano- 7-deazaguanine reductase OS=Streptococcus pneumoniae OX =1313 GN=queF PE=3 SV=1
MKHQSALVVFSGGQDSTTCLFWAMQHYETVEAVTFAYGQRHHLEIQITREIAKEQGIRHHILDMSLLGQITAQPDFATIHISYIPDKLCVESKSLKLYLFSYRNHGDFHENCINTIGKDLVNLLDPRYLEVWGKFTPRGGISIDPYYNYGKQGTKYEGLAEQRLFQHDLYPEKIDNR

SEQ ID NO: 42622 - protein, 154 aa, Streptococcus pneumoniae
  misc_feature (1)..(154): sp|Q97P67|QUEF_STRPN Putative NADPH-dependent 7-cyano-7 -deazaguanine reductase OS=Streptococcus pneumoniae ser otype 4 (strain ATCC BAA-334 / TIGR4) OX=170187 GN=queF PE=3 SV=1
MQHYETVEAVTFAYGQRHHLEIQITREIAKEQGIRHHILDMSLLGQITAQPDFATIHISYIPDKLCVESKSLKLYLFSYRNHGDFHENCINTIGKDLVNLLDPRYLEVWGKFTPRGGISIDPYYNYGKQGTKYEGLAEQRLFQHDLYPEKIDNR

SEQ ID NO: 42623 - protein, 217 aa, Streptococcus pseudopneumoniae
  misc_feature (1)..(217): tr|G0I717|G0I717_STRES 7-cyano-7-deazaguanine synthase OS=Streptococcus pseudopneumoniae (strain IS7493) OX=10 54460 GN=queC PE=3 SV=1
MKRQSALVVFSGGQDSTTCLFWAKEHYETVEAVTFAYGQRHHLEIQVAQEIAEEQGIRHHILDMSLLGQITENALTSDLEIEQKEGEVPNTFVDGRNHLFLSFAAVLAKQRGITDIVTGVCETDFSGYPDCRDVFVKSLNVTLNLAMDYDFVIQTPLMWLDKAETWELADQLGAFDYVREKTLTCYNGIIGSGCGDCPACHLRQHGLDVYLSQKGED

SEQ ID NO: 42624 - protein, 217 aa, Streptococcus pseudopneumoniae
  misc_feature (1)..(217): tr|A0A1S9ZI22|A0A1S9ZI22_9STRE 7-cyano-7-deazaguanine s ynthase OS=Streptococcus pseudopneumoniae OX=257758 GN= queC PE=3 SV=1
MKRQSALVVFSGGQDSTTCLFWAKEHYETVEAVTFAYGQRHHLEIQVAREIATEQGIRHHILDMSLLGQITENALTSDMEIEQKEGEVPNTFVDGRNHLFLSFAAVLAKQRGIKDIVTGVCETDFSGYPDCRDVFVKSLNVTLNLAMDYDFVIQTPLMWLDKAETWELADQLGAFDYVREKTLTCYNGIIGSGCEDCPACHLRQHGLDVYLSQKGEA

SEQ ID NO: 42625 - protein, 218 aa, Streptococcus ratti
  misc_feature (1)..(218): tr|M7DZH1|M7DZH1_STRRT 7-cyano-7-deazaguanine synthase (Fragment) OS=Streptococcus ratti FA-1 = DSM 20564 OX=6 99248 GN=D822_03379 PE=3 SV=1
IMKRQSALVVFSGGQDSTTCLFWALQHYEHVETVTFAYGQRHSQELAVAKEIAAEQGVKHHILDMSLLGQITENALTSDIDIEAKNGEVPNTFVDGRNHLFLSFAAVLAKQRHITDIITGVCQTDFSGYPDCRDVFVKSLNVTLNLAMDYEFVIQTPLMWLDKSETWALADSLGKFDYVREKTLTCYNGIRGAGCGQCPACHLRQTGLDKYLAQKEKN

SEQ ID NO: 42626 - protein, 217 aa, Streptococcus ratti; identical to SEQ ID NO: 42615
  misc_feature (1)..(217): tr|A0A5J6NMV9|A0A5J6NMV9_STRRT 7-cyano-7-deazaguanine s ynthase QueC OS=Streptococcus ratti OX=1341 GN=queC PE= 4 SV=1

SEQ ID NO: 42627 - protein, 217 aa, Streptococcus salivarius
  misc_feature (1)..(217): tr|A0A074J2I2|A0A074J2I2_STRSL 7-cyano-7-deazaguanine s ynthase OS=Streptococcus salivarius OX=1304 GN=queC PE= 3 SV=1
MKRQSALVVFSGGQDSTTCLFWALKHYETVELVTFAYGQRHSLEIEVAKEIAQEQELKHHVLDMSLLGQITENALTSDIEIEAEEGEVPNTFVDGRNHLFLSFAAVLAKQRGITDIVTGVCETDFSGYPDCRDVFVKSLNVTLNLAMAYDFVIQTPLMWLDKAETWALADQLGAFDYVREKTLTCYNGIIGTGCGECPACHLRQKGLEKYLAERGEA

SEQ ID NO: 42628 - protein, 217 aa, Streptococcus salivarius
  misc_feature (1)..(217): tr|A0A3S4LTL2|A0A3S4LTL2_STRSL 7-cyano-7-deazaguanine s ynthase OS=Streptococcus salivarius OX=1304 GN=queC PE= 3 SV=1
MKRQSALVVFSGGQDSTTCLFWALKHYETVELVTFAYGQRHSLEIEVAKEIAQEQGLKHHVLDMSLLGQITENALTSDIEIEAEEGEVPNTFVDGRNHLFLSFAAILAKQRGITDIVTGVCETDFSGYPDCRDVFVKSLNVTLNLAMAYDFVIQTPLMWLDKAETWALADQLGAFDYVREKTLTCYNGIIGTGCGECPACHLRQKGLEKYLAERGEA

SEQ ID NO: 42629 - protein, 217 aa, Streptococcus sobrinus
  misc_feature (1)..(217): tr|U2IK98|U2IK98_9STRE 7-cyano-7-deazaguanine synthase OS=Streptococcus sobrinus W1703 OX=1227275 GN=queC PE=3 SV=1
MKRQSALVVFSGGQDSTTCLFWALKHYDHVEAVTFAYGQRHSQEVEVAKEIAKDLKIKHQVLDMSLLGQITNNALTSDIEIDAKEGEVPNTFVDGRNHLFLSFAAVLAKQKGITDIVTGVCETDFSGYPDCRDAFVKSLNVTLNLAMDYDFVIQTPLMWLDKAETWELADQLDAFDYVKDRTLTCYNGIMGAGCGECPACKLRQHGLETYLARRGEA

SEQ ID NO: 42630 - protein, 217 aa, Streptococcus sp.
  misc_feature (1)..(217): tr|E0PZQ9|E0PZQ9_9STRE 7-cyano-7-deazaguanine synthase OS=Streptococcus sp. oral taxon 071 str. 73H25AP OX=864 570 GN=exsB PE=3 SV=1
MKRQSALVVFSGGQDSTTCLFWAKEHYETVEAVTFAYGQRHHLEIQVAREIAKEQGIRHHILDMSLLGQITENALTSDLEIEQKEREVPNTFVDGRNHLFLSFAAVLAKQRGIKDIVTGVCETDFSGYPDCRDVFVKSLNVTLNLAMDYDFVIQTPLMWLDKAETWKLADQLGAFDYVREKTLTCYNGIIGSGCGDCPACHLRQHGLDVYLSQKGEG

SEQ ID NO: 42631 - protein, 67 aa, Streptococcus sp.
  misc_feature (1)..(67): tr|K0YYW2|K0YYW2_9STRE 7-cyano-7-deazaguanine synthase (Fragment) OS=Streptococcus sp. GMD6S OX=1169675 GN=GMD 6S_11880 PE=3 SV=1
FVIQTPLMWLDKAETWELADQLGAFDYVREKTLTCYNGIIGSGCGDCPACHLRQHGLDVYLSQKGES

SEQ ID NO: 42632 - protein, 217 aa, Streptococcus thermophilus
  misc_feature (1)..(217): sp|Q5M4S5|QUEC_STRT2 7-cyano-7-deazaguanine synthase OS =Streptococcus thermophilus (strain ATCC BAA-250 / LMG 18311) OX=264199 GN=queC PE=3 SV=1
MKRQSALVVFSGGQDSTTCLFWALKHYETVELVTFAYGQRHSLEIEVAKEIAQEQGLKHHVLDMSLLGQITENALTSDIEIEAEKGEVPNTFVDGRNHLFLSFAAVLAKQRGIIDIVTGVCETDFSGYPDCRDVFVKSLNVTLNLAMAYDFVIQTPLMWLDKAETWALADQLGAFDYVREKTLTCYNGIIGTGCGDCPACHLRQKGLEKYLAEKGDA

SEQ ID NO: 42633 - protein, 217 aa, Streptococcus thermophilus
  misc_feature (1)..(217): tr|V8LVP3|V8LVP3_STRTR 7-cyano-7-deazaguanine synthase OS=Streptococcus thermophilus TH1435 OX=1415776 GN=queC PE=3 SV=1
MKRQSALVVFSGGQDSTTCLFWALKHYETVELVTFAYGQRHSLEIEVAKEIAQEQGLKHHVLDMSLLGQITENALTSDIEIEAEEGEVPNTFVDGRNHLFLSFAAVLAKQRGITDIVTGVCETDFSGYPDCRDVFVKSLNVTLNLAMAYDFVIQTPLMWLDKAETWALADQLGVFDYVREKTLTCYNGIIGTGCGDCPACHLRQKGLEKYLAEKGDA

SEQ ID NO: 42634 - protein, 225 aa, Streptococcus troglodytae
  misc_feature (1)..(225): tr|A0A1L7LK84|A0A1L7LK84_9STRE 7-cyano-7-deazaguanine s ynthase OS=Streptococcus troglodytae OX=1111760 GN=queC PE=3 SV=1
MKRQSALVVFSGGQDSTTCLFWAMKHYEYVETVTFSYGQRHSQELEVAKEIAAEQGVKHHILDMSLLGQITENALTSDIAIETKDGEVPNTFVDGRNHLFLSFAAVLAKQRNIKDIVTGVCQTDFSGYPDCRDVFVKSLNVTLNLAMDYEFVIQTPLMWLDKAETWELADRLGKFDYVRQKTLTCYNGIRGTGCGQCPACHLRQAGLEKYLSQKGKINVLSSKRN

SEQ ID NO: 42635 - protein, 217 aa, Streptococcus vestibularis
  misc_feature (1)..(217): tr|E8KVK8|E8KVK8_STRVE 7-cyano-7-deazaguanine synthase OS=Streptococcus vestibularis ATCC 49124 OX=889206 GN=e xsB PE=3 SV=1
MKRQSALVVFSGGQDSTTCLFWALKHYETVELVTFAYGQRHSLEIEVAKEIAQEQGLKHHVLDMSLLGQITENALTSDLEIEAEEGEVPNTFVDGRNHLFLSFAAVLAKQRGITDIITGVCETDFSGYPDCRDVFVKSLNVTLNLAMAYDFVIQTPLMWLDKAETWALADQLGAFDYVREKTLTCYNGIIGTGCGECPACHLRQKGLEKYLAERGEA

SEQ ID NO: 42636 - protein, 217 aa, Streptococcus vestibularis
  misc_feature (1)..(217): tr|E3CQ02|E3CQ02_STRVE 7-cyano-7-deazaguanine synthase OS=Streptococcus vestibularis F0396 OX=904306 GN=queC P E=3 SV=1
MKRQSALVVFSGGQDSTTCLFWALKHYETVELVTFAYGQRHSLEIEVAKEIAQEQGLKHHVLDMSLLGQITENALTSDIEIEAEEGEVPNTFVDGRNHLFLSFAAVLAKQRGITDIITGVCETDFSGYPDCRDVFVKSLNVTLNLAMAYDFVIQTPLMWLDKAETWALADQLGAFDYVREKTLTCYNGIIGTGCGDCPACHLRQKGLEKYLAERGEA

SEQ ID NO: 42637 - protein, 429 aa, Streptohalobacillus salinus
  misc_feature (1)..(429): tr|A0A2V3WBN9|A0A2V3WBN9_9BACI 7-cyano-7-deazaguanine s ynthase in queuosine biosynthesis OS=Streptohalobacillu s salinus OX=621096 GN=DES38_1034 PE=4 SV=1
MINIVYKFSNSEEYSVEGNSITCSFEDYRYTFWKSKLELLPEFPSNEAIDLLVISLAVYGADRIIKRKDSFNAWKRSIHLHLPVLNSDLLEENVELLKRTINFLTGDSWEFTFRDRELTLEERKIRDQMRQTRIDKLDINKLCMFSGGLDSFIGAIDLLEDESKDTIFVSHYGGGKGTIEYQEALREELIKEYSLSKDNFYSFFAAPNGGKEETMRSRSFMFFSHAIALAACFKKRLELIIPENGYISLNIPLTYSRTGTSSTRTTHPHYMELFQDLLNNLGLEITLYNPYQFKTKGEMVTECKNKDFLAGNIINTMSCSHPDVGRMRGKSETQHCGRCLPCIIRRAAINSAGIDDRTSYYDEDFSSGKTARKNLNSYLLGLEKFDSERAYLDIQMSGPLNSNLEQYESIFKRGIAELKEVLKDYHENT

SEQ ID NO: 42638 - protein, 244 aa, Streptomyces acidiscabies
  misc_feature (1)..(244): tr|A0A117EAK8|A0A117EAK8_9ACTN 7-cyano-7-deazaguanine s ynthase OS=Streptomyces acidiscabies OX=42234 GN=queC P E=3 SV=1
MDTQDTAAHHDAGRDPFTAVVVLSGGMDSTTLLAHYAALRFTLVAVTVDYGQRHRKEIDSARRIARHYGATHHVVDFAGFGRLLGGSALTDADVAVPDGHFAEDAMRATVVPNRNAVLANIALSVAVARGADTVALGMHAGDHFVYPDCRPAFIDALRHLAAVANEGFVVPRIEAPFMTWSKRDIALHGTRLGAPLELSWSCYKGGDIHCGTCGTCYERREAFREADVADPTAYLDSVTRFAAP

SEQ ID NO: 42639 - protein, 244 aa, Streptomyces acidiscabies
  misc_feature (1)..(244): tr|A0A0L0JHP4|A0A0L0JHP4_9ACTN 7-cyano-7-deazaguanine s ynthase OS=Streptomyces acidiscabies OX=42234 GN=queC P E=3 SV=1
MDTQDTAAHHDAGRDPFTAVVVLSGGMDSTTLLAHYAALRFTLVAVTVDYGQRHRKEIDSARRIARHYGAAHHVVDFAGFGRLLGGSALTDADVAVPDGHFAEDAMRATVVPNRNAVLANIALSVAVARGADTVALGMHAGDHFVYPDCRPAFIDALRHLAAVANEGFVVPRIEAPFMTWSKRDIALHGTRLGAPLELSWSCYKGGDIHCGTCGTCYERREAFREADVADPTAYLDSVTRFAAP

SEQ ID NO: 42640 - protein, 238 aa, Streptomyces ahygroscopicus
  misc_feature (1)..(238): tr|K7RWX1|K7RWX1_9ACTN 7-cyano-7-deazaguanine synthase OS=Streptomyces ahygroscopicus subsp. wuzhouensis OX=38 7850 GN=tymM PE=3 SV=1
MDQDDSRTDPFTAVVVLSGGLDSTTLMAHYAALQYRLIAVTVDYGQRHHREIDAARAVAAHFGAEHHVVDLRGYGALLRGSALTDDRVSVPDGHYAEQSMRATVVPNRNAVLANVAVSIGVAHRASVVALGMHAGDHFIYPDCRPEFVAALRELVATANEGFAVPQVEAPFLSWAKTDIATHGVRLGAPLELSWSCYKGGDRHCGTCGTCYERREAFRNAGLADPTGYLDDVTAYPAP

SEQ ID NO: 42641 - protein, 443 aa, Streptomyces albidoflavus
  misc_feature (1)..(443): tr|A0A5B8DPJ0|A0A5B8DPJ0_9ACTN Uncharacterized protein OS=Streptomyces albidoflavus OX=1886 GN=FE156_05400 PE= 4 SV=1
MTRPGHFFWWRGHHADRSGDGRWTEVGEEAFQEDERRITGRHRLPGPVPDWAEDLFRVARAAFIVDKYVRRDGGRDRWARHVRLSVPVTEYGRWRSGTVRDDLAGLFQLLTGDAWEIEFRPLTGHGVEEALDFPEEPRASEVALFSGGLDSTSWAAARSRVEDSRPLLLVMFREIGLLRQQRQVYSAVERLSGARPVMLLPMSQTPRGDGSPLRLETSSRTRGLLYASGAVRAATAHGVATVHVPENGQLALNPPLTPARSAACSTRSVHPRTLALLNSVLGVVGEGAGAVTVVNPWGWLTKGEVCAAGKAAGLTPSELESTLSCGKPPARRKGGPSLANCGVCFPCLVRRSGLLHANGADRTPYEAAPWEDHLSLRRGEDWRALRRWLLGSYGLTDVITDTPLPPDVAPTAALELIERGRGELARLFELAAARRFSGETVGP

SEQ ID NO: 42642 - protein, 837 aa, Streptomyces albidoflavus
  misc_feature (1)..(837): tr|A0A3S4BV04|A0A3S4BV04_9ACTN Condensation domain-cont aining protein OS=Streptomyces albidoflavus OX=1886 GN= EQK42_00855 PE=4 SV=1
MTTTTPDATAAPEPADSLDRDGIRVLERQIEDALLADDRIADCAVVFQGVAVDSVPAERCVRCGMDVAYPGTRLDRDGVCDLCLMYAEHGPEILSYFGEVDEFTRILRERAEAAGSDYDALLLFSGGKDSTYVLHQLVRMGLRVMTFTFDNGFISRTALENVETITKSLGIEHLTMTRADQNRVFLRSLEQHKSVCNGCFRSLLDLSHRLAHERGIPSIVTGLSRGQIIDERLLWFYRNGEFDPARIEQQLEVGRKVYHQVGSDLSDGVLDRVEVVDYYRYSDVTKDDIRAFLAEAETLWAAPKDTGFCSSNCMINDVGVYVHRLERGYHNYESPTRWEVRLGHLARAEADAELRTPVNTGRVRSMLATIGYTDPGDRSRLGRRMAAYFVPRTGLTPDRARAAVAARLPEILLPEHWVELAEVPRTADGAVDRRALPDPAPETGKRLAPDTGEVQAAAGVPDAGRPTPAQRLLLEQDGAGPDGRARALLLDLLEGTTAETVRKAVLALVQRHEALRTRFRRADGGWRREVAGLTGGVPVAALDLTRYEPARVPGALRVAAERLRARLDVARGPLFAAALAERREGAPQLLLIAHELAADTEGWRRILDDLGTALGRIAVGGPAGLAAAPAPRTAAEPAPVPVEDELWSPPAAEQDGTPDPVRRTVLEADRTAALAATGTPVAALVAAAVTHALSETCGAAGVLLAVTDHTAALPHPAGLFAVTGTAGTGAARTLERVRSALGTPVTAPAGAVPVGITHLGDLDGLPAAGGPLRHAGSTDHHLAAPFGPRARTPYVVSHLGDGRLHLTWTGTPAPAAAADAAAAALVQLAATAQEGTA

SEQ ID NO: 42643 - protein, 238 aa, Streptomyces albulus
  misc_feature (1)..(238): tr|A0A059WCJ2|A0A059WCJ2_STRA9 7-cyano-7-deazaguanine s ynthase OS=Streptomyces albulus OX=68570 GN=queC PE=3 S V=1
MDEDDSRTDPFTAVVVLSGGLDSTTLMAHYAALQYRLIAVTVDYGQRHHREIDAARAVAAHFGAEHHVVDLRGYGALLRGSALTDDRVSVPDGHYAEQSMRATVVPNRNAVLANVAVSIGVAHRASVVALGMHAGDHFIYPDCRPEFVAALRELVATANEGFAVPQVEAPFLSWAKTDIATHGVRLGAPLELSWSCYKGGDRHCGTCGTCYERREAFRNAGLADPTGYLDDVTAYPAP

SEQ ID NO: 42644 - protein, 238 aa, Streptomyces albulus; identical to SEQ ID NO: 42643
  misc_feature (1)..(238): tr|X0N1G2|X0N1G2_STRA9 7-cyano-7-deazaguanine synthase OS=Streptomyces albulus PD-1 OX=1395572 GN=queC PE=3 SV =1

SEQ ID NO: 42645 - protein, 224 aa, Streptomyces albus
  misc_feature (1)..(224): tr|A0A0X7JBM6|A0A0X7JBM6_9ACTN 7-cyano-7-deazaguanine s ynthase OS=Streptomyces albus subsp. albus OX=67257 GN= ADL21_33450 PE=3 SV=1
MTSAKTLVVLSGGIDSVVLAHACKAEGREVSAIAIDYGQRHRKELEYAGRAAGKLNIDLTVADLGGYSRLMRGFSLTDADVTVPDEHYTRTGSVNVVPNRNPVFMTVAYAHAVLAGAQEMCLGFLAEDAATAPDTSPAFLTAFNAMEARALEGLADPPPRVTAPLLTLRKADVLLLGTELGVDWRETWTCFKGERFHCGSCASCHDRRNAFAEADLTDPTRYQR

SEQ ID NO: 42646 - protein, 445 aa, Streptomyces antioxidans
  misc_feature (1)..(445): tr|A0A1V4D6Q8|A0A1V4D6Q8_9ACTN Uncharacterized protein OS=Streptomyces antioxidans OX=1507734 GN=VT50_0212555 PE=4 SV=1
MTGSDHFLWWRGHRGDRPRDDRWTEIGKEAFQEKERRITGRHHLPGPVSDWAEDLFRVARAAFIADKYVRRTGEGDRWTRRISLAVPVTEHERWESAAVRTHLTALLQVLTGDLWNVDFRPLTGHYVEDALVSPDEPRASEVALFSGGLDSLSWAATRSGADDSGPLLLVMFREIGLLRLQQRVYKAVERLVRARPVLLLPMSQTPAGDGSGARLETSSRTRGLLYAAGAIRAATAHGVGTVHIPENGQLALNPPLTPARSAACSTRSVHPRTLGSLNALLTAVSDTERTVQVVNPLAQLTKGEVCKAGRDAGLTLSDLESTLSCGKPPTRRSGGPPIANCGVCFPCLVRRSGLLHANGSDGTRYEALPWAGGLPLDRGVDWRALQRWLLGPYTLTDVFTDTPLPPDTDPAVAFDLIRRGREELARLLQIADATEAAGAAQVRSG

SEQ ID NO: 42647 - protein, 235 aa, Streptomyces caeruleatus
  misc_feature (1)..(235): tr|A0A101U6C8|A0A101U6C8_9ACTN 7-cyano-7-deazaguanine s ynthase OS=Streptomyces caeruleatus OX=661399 GN=queC P E=3 SV=1
MTGHVPRHAVVIASGGLDSSAVAYLLAAQGASLSLLSFDYGQRHRKELQSAALIAEELGASHDVVDLRSLGHILGGSALTDTTIPVPDGHYSDDSMRITVVPNRNAIMLSVAAGVAVASKADTVAFGAHAGDHAIYPDCRPQFLEHIARTIHVGNEGFLAEDFQVLAPFLNATKADIVTAAEELGVPFKQTWSCYKGGDLHCGTCGTCWERREAFQVAGVSDPTPYADKAAGERR

SEQ ID NO: 42648 - protein, 223 aa, Streptomyces cattleya
  misc_feature (1)..(223): tr|F8JT15|F8JT15_STREN 7-cyano-7-deazaguanine synthase OS=Streptomyces cattleya (strain ATCC 35852 / DSM 46488 / JCM 4925 / NBRC 14057 / NRRL 8057) OX=1003195 GN=que C PE=3 SV=1
MSRPLAVLSFSGGMDSTTLAAHYHDSGYEMMLLSFDYGQRHSRELLAARRVAQHFDAEHQVVDLTAVGALMPGSALTDPAIEVPDGHYEAESMRVTVVPNRNAIMANIAVGIAAARRAQLVGLGIHAGDHAIYPDCRPAFLDALRACVTRALEGHHTPRIEAPFITWTKAQIAEHAHLLGAPLGLSWSCYKGQKQHCGTCGTCTERREAFADAGVPDPTDYAV

SEQ ID NO: 42649 - protein, 231 aa, Streptomyces chartreusis
  misc_feature (1)..(231): tr|A0A2N9B6Y3|A0A2N9B6Y3_STRCX 7-cyano-7-deazaguanine s ynthase OS=Streptomyces chartreusis NRRL 3882 OX=107998 5 GN=queC PE=3 SV=1
MDRPAIVLLSGGLDSTTVLAIAKDQGFTPYALSFRYGQRHSIELEAAQRVAQAQGVARHVIADIDLRVFGGSALTADIEVPKHESLADVEEAGVPITYVPARNTIFLSFALAFAETVGASDIFTGVTAVDYSGYPDCRPEYMEAFATMANLATKAGVEGTSKITLHSPLIALSKADIVREGLRLGVDYSLTSSCYDPDEQGRACGKCDTCLLRLKGFAEAGVTDPVRYQSA

SEQ ID NO: 42650 - protein, 136 aa, Streptomyces coelicoflavus
  misc_feature (1)..(136): tr|H1QDG4|H1QDG4_9ACTN 7-cyano-7-deazaguanine synthase (Fragment) OS=Streptomyces coelicoflavus ZG0656 OX=1120 227 GN=SMCF_2942 PE=3 SV=1
FVPGRNLIFLVAAAALADRRGLEVLVGGMCETDYSGYPDCRHETMEAMARALSLGLDKPVVIETPLMWLTKAQTWDLADRIGGETLVELIIEDSHTCYQGDRTHRHAWGYGCGECPACELRAAGHADWVAGRGAQT

SEQ ID NO: 42651 - protein, 238 aa, Streptomyces diastatochromogenes; identical to SEQ ID NO: 42640
  misc_feature (1)..(238): tr|A0A1L7B5M4|A0A1L7B5M4_9ACTN 7-cyano-7-deazaguanine s ynthase OS=Streptomyces diastatochromogenes OX=42236 GN =toyM PE=3 SV=1

SEQ ID NO: 42652 - protein, 229 aa, Streptomyces filamentosus
  misc_feature (1)..(229): tr|D6AIR5|D6AIR5_STRFL 7-cyano-7-deazaguanine synthase OS=Streptomyces filamentosus NRRL 15998 OX=457431 GN=qu eC PE=3 SV=1
MQEGVTVARVIAIVSGGLDSVVLAHHLHAEGHEVHLLSIDYGQRHRKEHDYARIAADRIGAEHEIVDLSNVASMLPGYSLTDSQVDVPDQHYTAPGSVNVVPNRNVILLSVAYGKAAAVKADQVAIGALAGDASTAPDCSAEFISSFNAMEKIACAGYAPAHLEVVAPFIDLHKHDVIRLGEKLGVDWTETWSCFKGTEVHCGTCAACVDRIQAFERAETTDTTVYFKE

SEQ ID NO: 42653 - protein, 240 aa, Streptomyces filamentosus
  misc_feature (1)..(240): tr|W9FP17|W9FP17_STRFL 7-cyano-7-deazaguanine synthase OS=Streptomyces filamentosus NRRL 11379 OX=457430 GN=qu eC PE=3 SV=1
MPASGPHHPFRLQEGVTVARVIAIVSGGLDSVVLAHHLHAEGHEVHLLSIDYGQRHRKEHDYARIAADRIGAEHEIVDLSNVASMLPGYSLTDSQVDVPDQHYTAPGSVNVVPNRNVILLSVAYGKAAAVKADQVAIGALAGDASTAPDCSAEFISSFNAMEKIACAGYAPAHLEVVAPFIDLHKHDVIRLGEKLGVDWTETWSCFKGTEVHCGTCAACVDRIQAFERAETTDTTVYFKE

SEQ ID NO: 42654 - protein, 226 aa, Streptomyces griseocarneus
  misc_feature (1)..(226): tr|A0A3L8IG64|A0A3L8IG64_9ACTN 7-cyano-7-deazaguanine s ynthase OS=Streptomyces griseocarneus OX=51201 GN=queC PE=3 SV=1
MTRPLAVLAFSGGMDSTTLAAQYDAEGYALLLLSFDYGQRHARELESARAVAVHFGAEHHVVDLAAVGRLMPGSALTDPSVDVPDGHYAEESMRVTVVPNRNAIMANVAVGIASARQAAVVALGIHAGDHAVYPDCRPEFVDALRSCVACALDGLHTPRVEAPFVHRSKSEIATLADTLGAPLHLSWSCYRGGARHCGTCGTCTERREAFAEAGLDDPTEYEEVER

SEQ ID NO: 42655 - protein, 222 aa, Streptomyces griseochromogenes
  misc_feature (1)..(222): tr|A0A1B1B2M6|A0A1B1B2M6_9ACTN 7-cyano-7-deazaguanine s ynthase OS=Streptomyces griseochromogenes OX=68214 GN=q ueC PE=3 SV=1
MPKTVVLFSGGVESTVVAHQLSREGHELRLLAIDYGQRHRREHEFARIIAEGLGASFRVIDIRQVGGLLPGNSLTDDKVAVPDYDPAIRGREFVVPNRNAILLSIAFAVAVAEQADQVAIGSIAGDAQTGDCTREFLLAFNTMERVATAELAPAGLSVVAPLIDMQKADVIRLGESLGVRWQETWSCFRGGDKQCGTCATCYDRRTAFAKAEVMDPTEYARD

SEQ ID NO: 42656 - protein, 236 aa, Streptomyces griseochromogenes
  misc_feature (1)..(236): tr|A0A1B1B435|A0A1B1B435_9ACTN 7-cyano-7-deazaguanine s ynthase OS=Streptomyces griseochromogenes OX=68214 GN=q ueC PE=3 SV=1
MAERPAIVLLSGGLDSTTVLAIAKDQGYTPYALSFRYGQRHSVELEAAKRVASAQGVARHVIADIDLRVFGGSALTSDIEVPKHESLDTADDKGIDSSVPITYVPARNTIFLSFALAFAETVGASDIFTGVTAVDFSGYPDCRPEYMEAYEQMANLATRAGVEGTQKLKLHSPLIAMSKADIVREGLRLGVDYSLTSSCYDPDEQGRACGHCETCLLRLKGFAEAGVTDPVQYQGA

SEQ ID NO: 42657 - protein, 231 aa, Streptomyces griseoflavus
  misc_feature (1)..(231): tr|D9XKX4|D9XKX4_9ACTN 7-cyano-7-deazaguanine synthase OS=Streptomyces griseoflavus Tu4000 OX=467200 GN=queC P E=3 SV=1
MDRPAIVLLSGGLDSTTVLAIAKDQGFTPYALSFRYGQRHSIELEAAKRVAEVQGVARHVIADIDLRVFGGSALTADIEVPKHESLDDVEDGGVPITYVPARNTIFLSFALAFAETVGASDIFTGVTAVDYSGYPDCRPEYMDAFATMANLATRAGVEGISRMTLHSPLIAMSKADIVREGLRLGVDYSLTSSCYNPDDQGQACGKCDTCLLRLKGFAEAGVTDPVRYQSA

SEQ ID NO: 42658 - protein, 224 aa, Streptomyces griseoflavus
  misc_feature (1)..(224): tr|A0A0L8NMW0|A0A0L8NMW0_9ACTN 7-cyano-7-deazaguanine s ynthase OS=Streptomyces griseoflavus OX=35619 GN=ADK76_ 10885 PE=3 SV=1
MTSAKTLVVLSGGIDSVVLAHACKAEGREVSAIAIDYGQRHRKELEYAGRAAGKLNIDLTVADLGGYSRLMRGFSLTDADVTVPDEHYTRTGSVNVVPNRNPLFMTVAYAHAVLAGAQEMCLGFLAEDAATAPDTSPAFLTAFNAMEARALEGLADPPPRVTAPLLTLRKAEVLLLGRELGVDWRETWTCFKGERFHCGSCASCHDRRNAFAEADLTDPTRYQR

SEQ ID NO: 42659 - protein, 423 aa, Streptomyces griseoluteus
  misc_feature (1)..(423): tr|A0A4Z1DKQ3|A0A4Z1DKQ3_STRGP Queuosine biosynthesis p rotein queC OS=Streptomyces griseoluteus OX=29306 GN=E5 082_10485 PE=4 SV=1
MTTAYEVLPHDGQQHEPSATALHWPRTRAHSPTPTVTCTVGWDLDLLGPAPAAAADLVRIAASAYLADRSARRPTTFARTIDLTVHTVDPDPWNASSGRLTEDLLSWLTGDAWHLHAVPAAPGGRRPAPVPDADDVMLLSGGLDSLCGAADHLGDTAERIHLSHYDGSTVIRHAQQQTTAWLNGRGRQPLRHLSVKLCQTHSAAESSSRSRSLLFAALASAVAAGASSPQVTVPENGFTSINPPLTAARGGALSTRSTHPGTFARINELLANLDIPVTVANPYAYLTKGQLLARALDRAGQSLLLAGAKTLSCSKLDGNWYSGGDPTLNCGLCLACLVRRGSFTAGPHRDATTYLVDHLTGAAHQLLLDRRRKDVHDVRQAIARGIDDTDILAVGELPPDTDLDAVVDMCQRGLQELNHVPLP

SEQ ID NO: 42660 - protein, 231 aa, Streptomyces griseoruber
  misc_feature (1)..(231): tr|A0A117R9I5|A0A117R9I5_9ACTN 7-cyano-7-deazaguanine s ynthase OS=Streptomyces griseoruber OX=1943 GN=queC PE= 3 SV=1
MDRPAIVLLSGGLDSTTVLAIAKDLGFTPYALSFRYGQRHSIELEAAQRVAEVQGVARHVIADIDLRVFGGSALTADIEVPKHESLTDVEDAGVPITYVPARNTIFLSFALAFAETVGASDIFTGVTAVDYSGYPDCRPEYMEAFATMANLATRAGVEGTSKITLHSPLIALSKADIVREGLRLGVDYSLTSSCYDPDGQGRACGRCDTCLLRLKGFAEAGVKDPVRYQNA

SEQ ID NO: 42661 - protein, 429 aa, Streptomyces griseorubiginosus
  misc_feature (1)..(429): tr|A0A385ZE39|A0A385ZE39_9ACTN 7-cyano-7-deazaguanine s ynthase OS=Streptomyces griseorubiginosus OX=67304 GN=q ueC PE=4 SV=1
MPAYTLRLDADISPSEPDGITPFWWPAGPGGSFVSTLGPRLGALGPVPEPNIELVRLAALVYAADRTTPRRAARANWTQRAFELDVPVYAPARWDVLRERLEALLGFLSGDRWSIRFHRADPPQETVRDTPYPGVRRVVLLSGGADSAIGALLSRHDLGPDRHLLLSHVGATTLAPIQRDIAACIARLIDGPPQYHQALRFSRRSHQPTGAKLRNEYSTRTRSLLFLALGLAAAAVEKVPLWIPENGFASLNVPLTADQRGALSTRTTHPFFLQTLAAVARDAGAHAVIHNPFATRTKGEMFTQAAELVGPAPAARLLSSTHSCAHTGHRSHRIPVRTHCGVCFGCLLRRASFRAAALDDSTDYLHARHDENLNTYLHGKSVEPSLRTFLARGLRPADITTLNLPPDYPTRQAYELCRRGIAELELLYP

SEQ ID NO: 42662 - protein, 236 aa, Streptomyces griseus
  misc_feature (1)..(236): tr|A0A2X2PAP9|A0A2X2PAP9_STRGR 7-cyano-7-deazaguanine s ynthase OS=Streptomyces griseus OX=1911 GN=queC PE=3 SV =1
MPRTAVPRHAVLIFSGGLDSAVTAYKLRDEGVTVSLLSFNYGQRHVKELAHAADLADQLGASHDIVDLTSLGRILGGSALTDPAITVPHGHYRAETMRSTVVPNRNAIMLEIAAGAAVAAGADAVAFGAHSGDHAIYPDCRPEFFTLIEASMKAANEGHIANDFRLVAPFLNLTKADIVREGVRLGVPFALTWSCYEGGAAHCGACGTCVERQEAFAEAGVGDPTIYVPAQEGAVR

SEQ ID NO: 42663 - protein, 236 aa, Streptomyces hainanensis
  misc_feature (1)..(236): tr|A0A4R4TMB2|A0A4R4TMB2_9ACTN 7-cyano-7-deazaguanine s ynthase OS=Streptomyces hainanensis OX=402648 GN=queC P E=3 SV=1
MTRRPAIVLLSGGLDSTTVLAIAKDQGFATYALSFRYGQRHSVELEAAKRVAAAHGIERHVVADIDLRVFGGSALTADIDVPKHESLHGPGLQASASSVPVTYVPARNTIFLSFALAYAETVGSSDVFTGVNAVDYSGYPDCRPEYMEAYERMANLATRAGVEGTQKLKIHSPLIAMSKADIVREGLRLGVDYSLTSSCYDPDEQGRACGHCETCLLRLKGFAEVGVSDPVLYQGA

SEQ ID NO: 42664 - protein, 150 aa, Streptomyces ipomoeae
  misc_feature (1)..(150): tr|A0A540PMS5|A0A540PMS5_9ACTN Uncharacterized protein OS=Streptomyces ipomoeae OX=103232 GN=SipoB123_18345 PE =4 SV=1
MSDMESAVQVVNPLAQLTKGEVCKAGRDAGLTPSDLESTLSCGKAPTRRSGGPPIANCGVCFPCLVRRSGLLHATTSTAPGTRHCHGRTTYRLTGVPTGAHYSGGCWPVHPYGRLHRYPTAAGNGPGGGVRFDQARAGRVGPAASDRGCN

SEQ ID NO: 42665 - protein, 229 aa, Streptomyces iranensis
  misc_feature (1)..(229): tr|A0A061A7Z2|A0A061A7Z2_9ACTN 7-cyano-7-deazaguanine s ynthase OS=Streptomyces iranensis OX=576784 GN=SIRAN800 1 PE=3 SV=1
MPKTVAIVSGGLDSVTMAYHLQAQGHTLRLLSVNYGQRHLIEHEFAEKAARTLGVPHDVVDLSPVGKLMHGSSLTDPDVDVPDQKRESPGESPNVVPNRNALLLSVAFAVAVAEKAEAVAIGVIDDAQAAPDANTAFLDSFLAMEKIATRGYAHPELTLSAPLAELRKSGVVSLGEELGVPWTETWTCMRGGALHCGRCASCWDRQEAFRDAGVTDPTAYQTSHAKELP

SEQ ID NO: 42666 - protein, 223 aa, Streptomyces iranensis
  misc_feature (1)..(223): tr|A0A060ZZV5|A0A060ZZV5_9ACTN 7-cyano-7-deazaguanine s ynthase OS=Streptomyces iranensis OX=576784 GN=queC PE= 3 SV=1
MLSGGVDSTTLLAHYAALRFQLVAVTVDYGQRHRKEIDSARRIAQRYEAEHHVVDLSGFGSLLGGVTLTDHRADVPDGHFADESMRATVVPNRNAVLANIAVSVAVARRADTVALGIHSGDHFVYPDCRPAFIDTLRDLVTVANEGFAPPRVEAPFMTWSKADIVRHGSRLGAPLELSWSCYKGADIHCGTCGTCYERREAFREAVLVDPTEYLDSVTRFAAP

SEQ ID NO: 42667 - protein, 235 aa, Streptomyces lydicus
  misc_feature (1)..(235): tr|A0A0D4DFC8|A0A0D4DFC8_9ACTN 7-cyano-7-deazaguanine s ynthase OS=Streptomyces lydicus OX=47763 GN=queC PE=3 S V=1
MNQPVPRHAVLIASGGLDSSVAAYHFAALGSKVSMLSFNYGQRHLRELVSAAEIAGLLDVAHDVVDLSSLGRLLGGSALTDRTMAVPHGHYRDDTMKVTVVPNRNAIMLEIAVGVAVAAGADAVAFGAHAGDHTIYPDCRPTFFDAISDSIRAGNEGFLADGFQLQAPFLHQSKADIVGRGAELGVPLELTWSCYEGGERQCGACGTCVERREAFNRAGVTDPTEYAVHGVESGR

SEQ ID NO: 42668 - protein, 229 aa, Streptomyces lydicus
  misc_feature (1)..(229): tr|A0A1D7VQ77|A0A1D7VQ77_9ACTN 7-cyano-7-deazaguanine s ynthase OS=Streptomyces lydicus OX=47763 GN=SL103_22620 PE=3 SV=1
MSKTVAIVSGGLDSVTMAYHLQAQGHTLHLLSVNYGQRHLVEHEFAAKAARSLGVPHDVVDLSPVGTLLSGSSLTDPRVDVPDHRSGSSGGSPNVVPNRNALLLSVAFAVAVAQKAEAVAVGVVDDLQAAPDSNAAFIDSFLAMERIATRGYAHPDLTLTAPLVRLRKSDVVSLGEELGVPWTDTWSCFRGDALQCGRCAACRERQEAFRDAGVTDPTDYRTSDSKELP

SEQ ID NO: 42669 - protein, 231 aa, Streptomyces mangrovisoli
  misc_feature (1)..(231): tr|A0A1J4NKU5|A0A1J4NKU5_9ACTN 7-cyano-7-deazaguanine s ynthase OS=Streptomyces mangrovisoli OX=1428628 GN=queC PE=3 SV=1
MDRPAIVLLSGGLDSTTVLAIAKDQGFTPYALSFRYGQRHSIELEAAERVARAQGVARHVIADIDLRVFGGSALTSDIEVPKHDSLADVEEAGVPVTYVPARNTIFLSFALAFAETVGASDIFTGVTAVDYSGYPDCRPEYMDAFAAMANLATRAGVEGTSTMTLHSPLIALSKADIVREGLRLGVDYSLTSSCYDPDEQGRACGRCDTCLLRLKGFAEAGVKDPVRYQSV

SEQ ID NO: 42670 - protein, 439 aa, Streptomyces melanosporofaciens
  misc_feature (1)..(439): tr|A0A1H4TUU5|A0A1H4TUU5_STRMJ Queuosine biosynthesis p rotein QueC OS=Streptomyces melanosporofaciens OX=67327 GN=SAMN04490356_4775 PE=4 SV=1
MTEAHTRLFWLSRPDAEAPPMHWQPLHDAMYWERPSRGPDRRPLFAPAPDWADDLQRVARAVFAADRYARRAKSFDHWTRRITLSVPVARPERWDRALASLTAVLETVTGDLWEVVFRPLHGKSVREGPLTFTDEDYAHDVALFSGGLDSLGWAAQQAALPFARALLLVTFEERNFEALQDQVYEAVRGLRRRPVRRLTQSQTVRKPRGSGIELELTTRSRGLLYAATAVHAAAAEHVPVVHLPENGQLALNPPLSAARAGACSTRSVHPWTLHHLNRVISEVAEPGSAIRVENPFATLTKGDVCAAAHDAGMSQRVLEATLSCGAPPDRRPAGPALAHCGLCYPCLVRRSGLLHAFGEDRTPYAADPWDPALPASRTGNWQALRRWLDTEWSMLDLVADAPLPPDTQPASLMEVVERGREELRALIAWAGKRTPRKAS

SEQ ID NO: 42671 - protein, 439 aa, Streptomyces oceani
  misc_feature (1)..(439): tr|A0A1E7KL41|A0A1E7KL41_9ACTN Uncharacterized protein OS=Streptomyces oceani OX=1075402 GN=AN216_06805 PE=4 S V=1
MTDSYEYFRWLSHPAAERPPEPWKPLSDANYRERPARRPDHIRTLALAPAWAEDLQRVARAVFAADRCAPRTERFDRWTRHLRLDVPVTAPDRWTQALPHLLSLLSTVTGDVWDVSFRTHEKKRHHADPLGTESRYIASEYTADEVALFSGGLDSLGWAARRTSNTTSRLLLVSFEEANFETEQRRLFGFVSGLRKPLPRLLSENQAVIGPGGRRHAERSTRSRGLLYAAGAVKAAAAERVPLVHVPENGQLAVNFPLSAARSAACSTRSVHPWTLHHLNRVIAEIAAPGAEVRVTNPFADRTKGEVCVAARDAGLPREVLEATISCGQPPRRQPGRSDLAHCGVCFPCLIRRSGLLYAFGEDNTPYAADPWDAGLPTEKQRLWSALRRWLARDYSVLDLIADHPLPAQAEPGELLKVIERGRDELRGWVAWSVDSRRR

SEQ ID NO: 42672 - protein, 231 aa, Streptomyces oceani
  misc_feature (1)..(231): tr|A0A1E7JW58|A0A1E7JW58_9ACTN 7-cyano-7-deazaguanine s ynthase OS=Streptomyces oceani OX=1075402 GN=queC PE=3 SV=1
MARPAIVLLSGGLDSTTVLAIAKDQGYTPYALSFRYGQRHSVELEAAKRVVEAQGAARHVIADIDLRVFGGSALTSDIEVPKHDSLDHTEGGGVPITYVPARNTIFLSFALAYAETVNASDIFTGVTAVDYSGYPDCRPEYIDAYAKMANLATRAGVEGTQQLKIHSPLVEMSKADIVREGLRLGVDYSITSSCYDPDEQGRACGCCETCLLRLKGFAEAGSTDPVRYQDA

SEQ ID NO: 42673 - protein, 229 aa, Streptomyces olivochromogenes
  misc_feature (1)..(229): tr|A0A250VKV3|A0A250VKV3_STROL 7-cyano-7-deazaguanine s ynthase OS=Streptomyces olivochromogenes OX=1963 GN=que C PE=3 SV=1
MPKTVAIVSGGLDSVTMAYHLQAQGHTLHLLSVNYGQRHLVEHEFAVKAARSLGVPHDVVDLSPVGKLLSGSSLTDPTVDVPDHKSGSSGESPNVVPNRNALLLSVAFAVAVAEKAEAVAVGVVDDLQAAPDSNAAFIDSFLAMERIATRGYAHPDLTLTAPLVRLRKSDVVSLGEELGVPWTETWSCFRGDALQCGRCAACRERQEAFRDAGVTDPTTYQTSDSKELR

SEQ ID NO: 42674 - protein, 226 aa, Streptomyces palmae
  misc_feature (1)..(226): tr|A0A4Z0H1R7|A0A4Z0H1R7_9ACTN 7-cyano-7-deazaguanine s ynthase OS=Streptomyces palmae OX=1701085 GN=queC PE=3 SV=1
MSKVIAIVSGGMDSVTMAHQLDQQGHEVHLLSVDYGQRHRKEHDFAAAAAERLGAVHQIADLSAVGAMFRGSSLTDPSVDVPEQTWEGYGESPNIVPNRNALLLSVAFAIAVVEKAEAVAIGIMADDATSVPDSTPAFLRSFIAMERLATKGYAHPDLDLLAPLAGLRKSGVVLLGEELRVPWAQTWTCLRGGEAHCGRCAACWERQEAFTEAGVDDPTVYQEIRG

SEQ ID NO: 42675 - protein, 440 aa, Streptomyces pini
  misc_feature (1)..(440): tr|A0A1I4I6Q3|A0A1I4I6Q3_9ACTN 7-cyano-7-deazaguanine s ynthase (Queuosine biosynthesis) OS=Streptomyces pini O X=1520580 GN=SAMN05192584_12016 PE=4 SV=1
MTGSDHFLWWRGHRGDRPHDARWKEIGEEAFQEKERRITGRHHLPGPVPDWAEDLFRVARASFIADKYVRRTGVRDRWTRRISLTVPVAEHERWQSAAVRTHFTALLRTLTGDLWSVDFRPLTGHRVEEAMIFPDDPRASEVALFSGGLDSLSWAATRSRADDSRPLLLVMFREIGLLRLQQRVYKAVERLGGARPVMLLPMSQTPAGDGTGLRLETSSRTRGLLYAAGAIRAATAHGVATVHIPENGQLALNPPLTAARSAACSTRSVHPRTLDRLNTLLAAVGDAGSAVRVVNPLAQLTKGEVCRAGRDAGLTSSDLESTLSCGKPPTRRSGGPPIANCGVCFPCLVRRSGLLHANGTDGTRYEVSPWANDLPLDRSTDWRALQRWLLGRYTLTDVLTDTPLPPGTDPASALDVIRRGREELTRLLQPAAAAEAAGAG

SEQ ID NO: 42676 - protein, 231 aa, Streptomyces pini
  misc_feature (1)..(231): tr|A0A1I4J2V8|A0A1I4J2V8_9ACTN 7-cyano-7-deazaguanine s ynthase OS=Streptomyces pini OX=1520580 GN=queC PE=3 SV =1
MDRPAIVLLSGGLDSTTVLAIAKDQGFTPCALSFRYGQRHSVELEAARRVAQAQGVARHVIADIDLRVFGGSALTADIEVPKHESLQDTPQSGVPITYVPARNTIFLSFALAFAETVGASDIFTGVTAVDYSGYPDCRPEYMEAFAAMANLATRAGVEGTSKITLHSPLITLSKAGIVREGLRLGVDYSLTSSCYDPDDQGRACGKCETCLLRLKGFAEAGVTDPVQYQSA

SEQ ID NO: 42677 - protein, 226 aa, Streptomyces pluripotens
  misc_feature (1)..(226): tr|A0A221P8D5|A0A221P8D5_9ACTN 7-cyano-7-deazaguanine s ynthase OS=Streptomyces pluripotens OX=1355015 GN=queC PE=3 SV=1
MSRIVAVVSGGIDSVTMAHHLATAGHELHVLAVDYGQRHRKELEFAAAVAERLGAPYEQVDLRSLRSVMRGSSLTDPSVSVPRPDRPVGGNPNIVPNRNAVLLSVAFALAVTVRADAVAFGVMAEDVGPSDTSPEFLRLFLEMERVATKGSLAPEVELLAPLIELPKTGVIALGQRLGVPWDKTWTCFRGEDIHCGACAACVERRGAFADLGITDPTDYREALTPR

SEQ ID NO: 42678 - protein, 229 aa, Streptomyces puniciscabiei
  misc_feature (1)..(229): tr|A0A1D7YJE5|A0A1D7YJE5_9ACTN 7-cyano-7-deazaguanine s ynthase OS=Streptomyces puniciscabiei OX=164348 GN=BFF7 8_35775 PE=3 SV=1
MPKTVAIVSGGLDSVTMAHHLQARGHTLHLLSVNYGQRHLVEHEFAAKAARSLGVPHDVVDLSPVGKLLSGSSLTDPTVDVPDHEIGSSGESPNVVPNRNALLLSVAFAVAVAERAEAVAIGVVDDLQAAPDSNSAFIDSFLAMERIATRGYAHPDLTLTAPLARLRKSDVVSLGEELRVPWTETWSCFRGDVLQCGRCAACRERQEAFRDAGVTDPTHYQTSESKELP

SEQ ID NO: 42679 - protein, 231 aa, Streptomyces qinglanensis
  misc_feature (1)..(231): tr|A0A0U1XAH1|A0A0U1XAH1_9ACTN 7-cyano-7-deazaguanine s ynthase OS=Streptomyces qinglanensis OX=943816 GN=queC PE=3 SV=1
MARPAIVLLSGGLDSTTVLAIAKDQGYTPYALSFRYGQRHSVELEAAKRVVEAQGAARHVIADIDLRVFGGSALTSDIEVPKHDSLDRTEGGGVPITYVPARNTIFLSFALAYAETVNASDIFTGVTAVDYSGYPDCRPEYIDAYAKMANLATRAGVEGTQQLKIHSPLMEMSKADIVREGLRLGVDYSITSSCYDPDEQGRACGRCETCLLRLKGFAEAGSTDPVRYQDA

SEQ ID NO: 42680 - protein, 439 aa, Streptomyces rapamycinicus
  misc_feature (1)..(439): tr|A0A3L8RQC1|A0A3L8RQC1_STRRN Uncharacterized protein OS=Streptomyces rapamycinicus (strain ATCC 29253 / DSM 41530 / NRRL 5491 / AYB-994) OX=1343740 GN=D3C57_126390 PE=4 SV=1
MTEAHARIYWLSRPGAEAPPPRWQPLDDAVYWERPSRGPDRRPLLAPAPDWAVDLQRVARAVFAADRYVRRAQVFDRWTRRITVSVPVTEPERWSRALPALTAVLGTMTGDLWEVVFRALDGKTVREGPFTFGSDEYAHDVALFSGGLDSLGWAAQRAGLPSSHPLLLVTFGERNFEAVQDHVYEAVRGLRRRPLRRIAQSQTVRKPHGSGIKLELTTRARGLLYAATAVHAAAAEHVPVVHLPENGQLALNPPLSAARAGACSTRSVHPWTLHHLNRVIAEVAEPGSAVRVENPFATLTKGEVCSVARDAGLPRKVLEATLSCGTPPARRPAGPELAHCGLCFPCLVRRSGLLHTFGHDRTPYAADPWDRALPASRTTHWRALRRWLDTDWSTLDLVADAPLPPDTQIAPLLEVVERGREELRALIAWADTTASRKAS

SEQ ID NO: 42681 - protein, 229 aa, Streptomyces rapamycinicus
  misc_feature (1)..(229): tr|A0A3L8RC76|A0A3L8RC76_STRRN 7-cyano-7-deazaguanine s ynthase OS=Streptomyces rapamycinicus (strain ATCC 2925 3 / DSM 41530 / NRRL 5491 / AYB-994) OX=1343740 GN=D3C5 7_103080 PE=3 SV=1
MPKTVAIVSGGLDSVTMAYHLQAQGHTLRLLSVNYGQRHLIEHEFAAKAARTLGVPHDVVDLSPVGKLMHGSSLTDPDVDVPDQKRDSPGESPNVVPNRNALLLSVAFAVAVAEKAEAVAIGVIDDPQAAPDANSAFLDSFLAMEKIATHGYAHPELTLTAPLAELRKSGVVSLGEELGVPWTDTWTCMRSGPLHCGRCASCWDRQEAFQDAGVTDPTTYQTSNAKVLP

SEQ ID NO: 42682 - protein, 224 aa, Streptomyces rimosus
  misc_feature (1)..(224): tr|A0A0M8QQY6|A0A0M8QQY6_STRRM 7-cyano-7-deazaguanine s ynthase OS=Streptomyces rimosus subsp. rimosus OX=13247 4 GN=ADK43_35835 PE=3 SV=1
MTSAKTLVVLSGGIDSVVLAHACKAEGREVSAIAIDYGQRHRKELEYAGRAAGKLNIDLTVADLGGYSRLMRGFSLTDADVTVPDERYTRTGSVNVVPNRNPVFMTVAYAHAVLAGAQEMCLGFLAEDAATAPDTSPEFLTAFNAMEARALEGLADPPPRVTAPLLTLRKADVLLLGTELGVDWRETWTCFKGERFHCGSCASCHDRRNAFAEAGLTDPTRYQR

SEQ ID NO: 42683 - protein, 238 aa, Streptomyces rimosus
  misc_feature (1)..(238): tr|B6CWJ6|B6CWJ6_STRRM 7-cyano-7-deazaguanine synthase OS=Streptomyces rimosus OX=1927 GN=toyM PE=3 SV=1
MPESPVEADPFSAVVVLSGGMDSTTLLAHYAMLRYRLTAVTVDYGQRHRREIDAARTIAGHYGAEHHVVDLSGIGVLLGGSALTDSEVDVPSGHYAEESMRATVVPNRNAILANVAVGAAVARQAGIVALGMHAGDHFVYPDCRPAFVEALDGLVRVANEGFATPRVEAPFIHWSKTDIARYGSRLEAPLDKSWSCYRGGELHCGTCGTCYERREAFRDADVPDPTEYLDAATEFAAP

SEQ ID NO: 42684 - protein, 819 aa, Streptomyces scabrisporus
  misc_feature (1)..(819): tr|A0A1T3NLT9|A0A1T3NLT9_9ACTN Condensation domain-cont aining protein OS=Streptomyces scabrisporus OX=159449 G N=B4N89_36560 PE=4 SV=1
MTDQPLDAERIESVERRVRTAVLDQDGVLDCAVVFNEADPAAAGARACVRCGISAAYPGLRFDSDGVCSLCARYAAHRSAMHAYFRDPRELAPRLREAARGRGSHYDCLLLFSGGKDSTYVLYQLVELGLRVMTFTFDNGFISRTALRNVESVTAELGIEHVTATHADQKRIFLNSLQEHKSVCNGCFRSLLDLSTELAHRRDIPTVVTGLSRGQIMDERLSWFHEQGIFDVAEIEEKLRLGREVYHRAAGTVDAAAVNAVQVVDYFRYSAVTKEDVRAFLRERSSFWAQPTDTGFCSSNCMINDVGTYVHAAERGFHNYEAPTRWEVRLGHLDVAEADAELRAPVETAQVKRMLARIGYPDPADADRTGARLAVYYVADPSASGDRLAAAVADALPPALVPAQWVRVAEIPRVAGAVDRWALRGMHRPKAPGSRGGGVTADADSDRSVAVRPVQRRILDGDPVRAAHRARALFLTSESGFPVADLKRVWLQLLLHHEALRLRFGHGDQGWRQSRGGLGGAVHVSRVDLTGQDPDAQGRVLRRLTDRMRARLHVDRGPLLRAAVVDRGARPAGLLIVVHELAADVESWRVLLADLALGLGQLRAGSDVRLPPAASFLDHPAEPAGVEDEAGPEVAGAGCVLPGSPAPEPIAEESLEARCPVRAATARDVAAAIAHVLVEEFGGGRLVADVLDHTTRRPATRVIGPLAEADRWVVTPLARGASVVRVASAAEPARVRYEHFGDPAAALLPSGVAWTLRDTVWRDFAGPVHPGDTDVTITGVVDAGELVLTWWCPASVGTRLAAAHIPERVARRLIGEQAG

SEQ ID NO: 42685 - protein, 430 aa, Streptomyces sp.
  misc_feature (1)..(430): tr|A0A1S2KPM0|A0A1S2KPM0_9ACTN Uncharacterized protein OS=Streptomyces sp. CC77 OX=1906739 GN=BJP39_15255 PE=4 SV=1
MPAYTLHLDAADPSQPEPAGLTPFWWPPGTGGSFVSTLGPRLGALGPVPEPNIELVRLAALVYAADRPTPRRAARSNWTRRTFELDVPVYAPARWDVLCERLEALLGFLSGDRWSIRFRRADTPQETVRDTPHPGVRRVVLLSGGADSAIGALLSRHDLGPGRHLLLSHVGATTLAPIQRNIAADIAHLIGGPPQPHQALRFSRKNRQPTGTKLPNEYSTRTRSLLFLALGLAAAAVEKVPLWIPENGFASLNVPLTADQRGALSTRTTHPFFLQTLAAIAHDAGAHAVIHNPFATHTKGEMFTQAAELVGTAPAARLLSRTHSCAHTGHRSHRIPVRTHCGVCFGCLLRRASFRAAQLEDSTDYLHTRHDEKLKPYLRSKSVEPSLRTFLARGLRPADITTLNLPPDYPTRQAYELCRRGLAELELLYP

SEQ ID NO: 42686 - protein, 236 aa, Streptomyces sp.
  misc_feature (1)..(236): tr|A0A365YQE1|A0A365YQE1_9ACTN 7-cyano-7-deazaguanine s ynthase OS=Streptomyces sp. PT12 OX=1510197 GN=queC PE= 3 SV=1
MTEHAPRHAVVIASGGLDSTTVAFRLASQGVQVSLLSVDYGQRHRKELDCARRIAGHLGAWHEVVDLTGLGRLLAGSALTDAAVRVPDGHYTAASMRATVVPNRNAILLSIAAGTAIAAGADAVAFGAHAGDHTIYPDCRPEFFEQFAAAIRTGNAGFLPDGFQLLAPFLTVSKADIVEAAAKLGVPFELTWSCYKGDAVHCGTCGTCVERREAFTVAGVADPTVYAAALSVGSGR

SEQ ID NO: 42687 - protein, 236 aa, Streptomyces stelliscabiei
  misc_feature (1)..(236): tr|A0A0L0JSQ7|A0A0L0JSQ7_9ACTN 7-cyano-7-deazaguanine s ynthase OS=Streptomyces stelliscabiei OX=146820 GN=queC PE=3 SV=1
MAERPAIVLLSGGLDSTTVLAIAKDQGYTPYALSFRYGQRHSVELEAAKRVAGAQGVARHVIADIDLRVFGGSALTSEIEVPKHESLDDASSKDTGSSVPITYVPARNTIFLSFALAYAETVGASDIFTGVTAVDYSGYPDCRPEYMDAYAKMANLATRAGVEGTQELKLHSPLIAMSKADIVREGLRLGVDYSLTSSCYDPDEQGRACGHCETCLLRLKGFAEAGVTDPVQYQGA

SEQ ID NO: 42688 - protein, 236 aa, Streptomyces thermoautotrophicus
  misc_feature (1)..(236): tr|A0A132MIR6|A0A132MIR6_9ACTN 7-cyano-7-deazaguanine s ynthase OS=Streptomyces thermoautotrophicus OX=1469144 GN=queC PE=3 SV=1
MTGQAPRHAVVIASGGLDSTAVAYWLADQGSELLLVSFDYGQRHRIELDHARRIAETLNARHEIVDLTSVGRLLTGSALTDANVPVPDGHYTDVSMRSTVVPNRNALMLDVAVGAAVAAGADAVALGIHAGDHPIYPDCRPAFLDAYARLAKVANEGFLVAGFRVLAPFLCSSKADIVRTAAALGVPFELTWSCYKGGPTHCGVCGTCTERREAFTLAGVPDPTTYASAEDAEVSR

SEQ ID NO: 42689 - protein, 215 aa, Streptomyces thermoautotrophicus
  misc_feature (1)..(215): tr|A0A132MLE7|A0A132MLE7_9ACTN 7-cyano-7-deazaguanine s ynthase OS=Streptomyces thermoautotrophicus OX=1469144 GN=queC PE=3 SV=1
MAYWLADQGSELLLVSFDYGQRHRIELDHARRIAETLNARHEIVDLTSVGRLLTGSALTDANVPVPDGHYTDVSMRSTVVPNRNALMLDVAVGAAVAAGADAVALGIHAGDHPIYPDCRPAFLDAYARLAKVANEGFLVAGFRVLAPFLRSSKADIVRTAAALGVPFELTWSCYKGGPTHCGVCGTCTERREAFDLAGVPDPTIYVGAEDAEVSQ

SEQ ID NO: 42690 - protein, 231 aa, Streptomyces varsoviensis
  misc_feature (1)..(231): tr|A0A0L8QX47|A0A0L8QX47_9ACTN 7-cyano-7-deazaguanine s ynthase OS=Streptomyces varsoviensis OX=67373 GN=queC P E=3 SV=1
MERPAVVLLSGGLDSTTTTAIAKSEGFTPYALSFRYGQRHSVELEAAKAVARSLGVARHIIADIDLRVFGGSALTSDIDVPKRGSLDEAEDGGIPVTYVPARNTIFLSFALAYAEVVAAHDIFIGVTAVDYSGYPDCRPEYIEAYARMANLATREGVRGARPLVIHTPLMRLTKAEIIRRGTSLGVDYSRTCSCYDPDERGRACGRCDTCLLRLKGFSEAGMVDPVPYQGS

SEQ ID NO: 42691 - protein, 213 aa, Streptomyces varsoviensis
  misc_feature (1)..(213): tr|A0A0L8QLV8|A0A0L8QLV8_9ACTN 7-cyano-7-deazaguanine s ynthase OS=Streptomyces varsoviensis OX=67373 GN=ADK38_ 21265 PE=3 SV=1
MSQRRAVCLLSGGPDSVVAAAIARDAGYLVSGLYVDYGQRTASREAEFAARNAAWLGVESLRTAAVPFLGEIKGSALTDTDSRVTDETRHLEYVPFRNTVLNSLAIAWAETLGAERVVTGSIGGPWITPDNSPDYFRALNDLIAVGTRSDITAWAPLGECSKAESLRRGIDLGVPLGETWSCQNDSDVPCGECNNCLDRSRAFKELGVQDPLG

SEQ ID NO: 42692 - protein, 236 aa, Streptomyces venezuelae
  misc_feature (1)..(236): tr|F2R9F0|F2R9F0_STRVP 7-cyano-7-deazaguanine synthase OS=Streptomyces venezuelae (strain ATCC 10712 / CBS 650 .69 / DSM 40230 / JCM 4526 / NBRC 13096 / PD 04745) OX= 953739 GN=queC PE=3 SV=1
MPRTAAPRHAVLIFSGGLDSAVTAYKLLDAGVTVSLLSFNYGQRHVKELAQAATLADQLGVSHDIVDLTSLNRILGGSALTDPAIEVPHGHYRAETMRSTVVPNRNAIMLEIAAGAAVAAGADAVAFGAHSGDHAIYPDCRPEFFTLIEAAMKAGNEGHIVADFQLVAPFLQLTKADIVREGARLDVPFKLTWSCYEGGELHCGACGTCVERREAFDEAGVADPTLYAAAPKGAAR

SEQ ID NO: 42693 - protein, 440 aa, Streptomyces violaceusniger
  misc_feature (1)..(440): tr|A0A4D4L6D1|A0A4D4L6D1_STRVO Uncharacterized protein OS=Streptomyces violaceusniger OX=68280 GN=SVIO_072580 PE=4 SV=1
MTGSDHFLWWRGHRGDRPRDDRWMEIGKESFQERERRITGRHHLPGPVPDWAEDLFRVARAAFIADKYVRRTGVRDRWTRRISLAVPVTEHERWGSAAVRTHLTALLQGLTGDLWNVDFRPLTGHYVEEALVSPDEPRASEVALFSGGLDSLSWAATRSRADDSRPLLLVMFREVGLLRLQQRVYRAVEQLDVVRPVLLLPMSQTPAGDGSGARLETSSRTRGLLYAAGAIRAATAHGVGTVHIPENGQLALNPPLTPARSAACSTRSVHPWTLGSLNALVTAVSDTESTVQVVNPLAQLTKGEVCKVGRDAGLTPSDLESTLSCGKPPTRRRGGPPIANCGVCFPCLVRRSGLLHANGSDGTRYEALPWADGLPLDRGADWRALQRWLLGPHTLTDVFTDTPLPADTDPAVAFDLIRRGREELSRLLQMAEATEAADAA

SEQ ID NO: 42694 - protein, 440 aa, Streptomyces violaceusniger
  misc_feature (1)..(440): tr|A0A0X3VPV8|A0A0X3VPV8_STRVO Uncharacterized protein OS=Streptomyces violaceusniger OX=68280 GN=ADL28_34430 PE=4 SV=1
MTDSDHFLWWRGHRGDQRRDDRWTEIGNEAFQERERRISGRHHLPGPVPDWAEDLFRVARAAFIADKYVRRTGVRDRWTRHISLAVPVMEHERWGSAAVRNHLTALLQVLTGDLWNVDFRPLTGHYVEDVLVSPDEPRASEVALFSGGLDSLSWAATRSRADDSRPLLLVMFREIGLLRLQKRVYKAVERLGGARPVLLLPMSQTPAGDGSGARLETSSRTRGLLYAAGAIRAATAHGVRTVHIPENGQLALNPPLTPARSAACSTRSVHPRTLGSLNALLTAVSDTESTVQVVNPLAQMTKGEVCKAGRGAGLTPSDLESTLSCGKPPTRRSGGPPIANCGACFPCLVRRSGLLHANGSDGTRYEALPWAGGLPLDRGVDWRALQRWLLGPYTLTDVFTDTPLPPDTDPAVAFDLIRRGREELARLLQIADATETADAA

SEQ ID NO: 42695 - protein, 223 aa, Streptomyces viridochromogenes
  misc_feature (1)..(223): tr|A0A0J7Z793|A0A0J7Z793_STRVR 7-cyano-7-deazaguanine s ynthase OS=Streptomyces viridochromogenes OX=1938 GN=qu eC PE=3 SV=1
MARIVAIVSGGLDSVVLAHELVDQGNDLLMLSIDYGQRHRKEHEFAQRTADRLSADYEVVDLRNIATMLPGYSLTDSRVDVPDQHYTAPGSVNVVPNRNVILLSVAFGRAAAEKADKVAIGTVAGDDATAPDCSRAFIDAFNTMERVATAGYAPEGLEVVAPFIDMPKHEVINLGERLGVPWQETWSCFNNYDLQCGLCAACQDRQLAFQKSDVSDPTQYRSS

SEQ ID NO: 42696 - protein, 434 aa, Streptomyces vitaminophilus
  misc_feature (1)..(434): tr|A0A0T6LRA9|A0A0T6LRA9_9ACTN Uncharacterized protein OS=Streptomyces vitaminophilus OX=76728 GN=AQ490_24330 PE=4 SV=1
MTERTAAVWWKSGEKDLPPAPDSWTVVGTDSFQEKEDRITGRYTFPDSVPDWAEDLFRVARAIFVADKRVRRQPGLDRWTRHIHLSVPVAEPGLWHTPEVAGHLTTLLNTLTSDRWDLSFRRHPARDSPPSAMFPVKGREVILLSGGLDSLAWAATRARADTAGTLLLVRFREVSMLRLQDRVCRSVQDLSSRREVLRLRWSQTPTGDGSGQRLEPSSRSRGLLYVAGAIRAAAALDAPEVHIPENGQLSVNPPLTAARRGACSTRSVHPWTLHHLNALLRTLCPDVTPIQVVNPLAGMTKGEVCGTALDAGLSPSDLEATVSCGKPPRRRKGGPRLDNCGVCFPCLVRRSALLRATGSDNTRYELAPWSVDPSDPRAADWRALQRWLLRPFTVADLLADAPLPPDADPRALWEVINRGREELAALLPDRRAAA

SEQ ID NO: 42697 - protein, 231 aa, Streptomyces wuyuanensis
  misc_feature (1)..(231): tr|A0A1H0DJU6|A0A1H0DJU6_9ACTN 7-cyano-7-deazaguanine s ynthase OS=Streptomyces wuyuanensis OX=1196353 GN=queC PE=3 SV=1
MDRPAIVLLSGGLDSTTALAVAKHRGFVPYALSFDYGQRHGVELEAAKRVAEAQGVARHLVLSIDLRLLGGSALTADIAVPKHDHVDELVRSSVPVTYVPARNTIFLSFALAYAEVVGSTDIFTGVTAVQYSGYPDCRPEYMEAFTTLANLATRAGVEGTRELKVHSPLMAMSKADIIREGLRLGVDYSLTHSCYDPDESGRACGHCDTCLMRLRGFAGVRMEDPVRYQDL

SEQ ID NO: 42698 - protein, 236 aa, Streptomyces zhaozhouensis
  misc_feature (1)..(236): tr|A0A286DY29|A0A286DY29_9ACTN 7-cyano-7-deazaguanine s ynthase OS=Streptomyces zhaozhouensis OX=1300267 GN=que C PE=3 SV=1
MAERPAIVLLSGGLDSTTVLAIAKDQGYTPYALSFRYGQRHSVELEASKRVAEAQGVARHVIADIDLRVFGGSALTSDIDVPKHESLDDTRDKDTGNSVPITYVPARNTIFLSFALAYAETVGASDIFTGVTAVDYSGYPDCRPEYMEAYERMANLATRAGVEGTQRLKLHSPLIAMSKADIVREGLRLGVDYSLTSSCYDPDEQGRACGHCETCLLRLKGFAEAGVTDPVQYQGA

SEQ ID NO: 42699 - protein, 232 aa, Streptosporangiaceae bacterium
  misc_feature (1)..(232): tr|A0A3A4AZJ6|A0A3A4AZJ6_9ACTN 7-cyano-7-deazaguanine s ynthase OS=Streptosporangiaceae bacterium YIM 75507 OX= 2339229 GN=queC PE=3 SV=1
MERPAIILLSGGLDSATVLAMARAEGFVPHTLSFRYGQRHAVELAAAERVARHQKVARHVVADIDLRVFGGSALTDDIDVPKDSTPEQMAAGIPVTYVPARNTVFLSFALAYAEVTGATDIFTGVNAVDYSGYPDCRPEYLKAYEAMANLATRAAVEGDRPIRIHAPLVRMTKGEIIRTGLGLGVDYSLTSSCYDPDERGRACGRCDTCALRLKGFAEAGVTDPVPYRGGGS

SEQ ID NO: 42700 - protein, 230 aa, Succinatimonas hippei
  misc_feature (1)..(230): tr|E8LI39|E8LI39_SUCHY 7-cyano-7-deazaguanine synthase OS=Succinatimonas hippei (strain DSM 22608 / JCM 16073 / KCTC 15190 / YIT 12066) OX=762983 GN=queC PE=3 SV=1
MLKALVLSSGGVDSTTCLAFAVDKLGAENVSSVSIFYGQKHKKELQCAAQLADYYKVKHYELDLSMMFKNSNCALLENSSQDIEEGSYSTQIAVHGKVNTYVPFRNGLFLASVASLAGSIYPDDEVEIYLGAHADDAALNAYADCSMEFIEAMNKAISLGTYSKERIVAPFAGQNKAEVVKTGLKLKVPYEMTWSCYEGKDKPCGKCATCIDRRKAFEANGAVDPVEYKE

SEQ ID NO: 42701 - protein, 235 aa, Succinatimonas sp.
  misc_feature (1)..(235): tr|R5EU92|R5EU92_9GAMM 7-cyano-7-deazaguanine synthase OS=Succinatimonas sp. CAG:777 OX=1262974 GN=queC PE=3 S V=1
MSKALVVFSGGQDSSTCLYYALKKYDKVATIGFNYGQRHDVEMKCRLEFLEALKAFDKELYKKYEGDRVVDMLSFKDLTDSALTKAHEDYVMNEENHLPTSFVPGRNLIFMCYAASYAYTIKADTVITGVGQADYSGYPDCRDNTMKALERAVNLGMESNLKFETPLMFKSKAQTFYLGYELGGMDFVKLIVEKTHTCYEGQHDKLHAWGYGCGECPSCKLRKKGYEEFLDSLKK

SEQ ID NO: 42702 - protein, 230 aa, Succiniclasticum ruminis
  misc_feature (1)..(230): tr|A0A1G6MDX0|A0A1G6MDX0_9FIRM 7-cyano-7-deazaguanine s ynthase OS=Succiniclasticum ruminis OX=40841 GN=queC PE =3 SV=1
MKAIVLSSGGIDSTTCISLAMKKYDAENVVTLSIFYGQKHNKELVCAQKIAAYYKLKHYEFNLKQILQYSNCSLLSDSTETISHKSYAEQISERKDGIVSTYVPFRNGLMLSVCASLAMSLFPNEESVIYIGAHADDTAGNAYADCSPEFNRSMSDAIRIGTYDKVTVEAPFVHMHKADIIAEGLRLQTPYHLTWSCYEGADTPCGACGTCIDRAKAFAANGVKDPALHA

SEQ ID NO: 42703 - protein, 231 aa, Succiniclasticum ruminis
  misc_feature (1)..(231): tr|A0A1I2D201|A0A1I2D201_9FIRM 7-cyano-7-deazaguanine s ynthase OS=Succiniclasticum ruminis DSM 9236 OX=1123323 GN=queC PE=3 SV=1
MKALVLFSGGLDSSVCLGLAVKKYGADEVLALSIYYGQKHKKELEASEKIASFYGVKRITLDLGEIFRGADCSLLEGSAADIPHEEYSDQLAKTNGAPVSTYVPFRNGLFLSSAASVAIGNGCEVIYYGAHADDATGSAYPDTSVEFNKAIADAIYVGSGKALRVVAPFIGRSKADVVAAGLEIGVPFAMTWSCYEGHEKACGVCGTCRDRKRAFQENGLADPIAYENGKD

SEQ ID NO: 42704 - protein, 236 aa, Succinivibrio dextrinosolvens
  misc_feature (1)..(236): tr|A0A1T4VBF4|A0A1T4VBF4_9GAMM 7-cyano-7-deazaguanine s ynthase OS=Succinivibrio dextrinosolvens DSM 3072 OX=11 23324 GN=queC PE=3 SV=1
MKKALVVFSGGQDSSTCLYYAVKNYDAVYTIGFKYGQRHEIELKCRQEFLEALKSFDKEAKDKLIEDKVVDMMALKTLTNSALTKESGEYVMDEKNSLPTSFVPGRNLIFLCYAASYAYSVGADTIISGVGQADYSGYPDCRESTLKAMETAINLGMESNIKLLSPLMHLTKGETFKLAYDLGGDDFVRMIVEKTHTCYEGSHDVLHAWGYGCGECPSCLLRKRGYEDYLKLRGKL

SEQ ID NO: 42705 - protein, 236 aa, Succinivibrionaceae bacterium
  misc_feature (1)..(236): tr|A0A348YMX2|A0A348YMX2_9GAMM 7-cyano-7-deazaguanine s ynthase OS=Succinivibrionaceae bacterium OX=2053620 GN= queC PE=3 SV=1
MNRALVVFSGGQDSCTCLGYALCKYDEVYTVGFSYGQRHRVELDCRKVFLSKLREEFPKWDAKLKNDNLIDISYLKDLTDSALTDETQKSIEQTENNLPSSFVPGRNLIFLANASAYAYTIGADTLITGVGEADYSGYPDCREKTMQAMQQALSLGLERDITIETPLMHLSKARTWELAEQAGGSRLVDLIVKESHTCYLGDRSIFHPWGFGCGQCPACILRQKGYEEYMLSRSRR

SEQ ID NO: 42706 - protein, 254 aa, Sulfitobacter brevis
  misc_feature (1)..(254): tr|A0A1I1UM85|A0A1I1UM85_9RHOB 7-cyano-7-deazaguanine s ynthase OS=Sulfitobacter brevis OX=74348 GN=queC PE=3 S V=1
MSLNTALSGRSLPGQQNKGYEMKTIVICSGGLDSVSLAHMVAQENQLTGLVSFDYGQRHRKELDYAALCAVRLNVPHDIIDLRSIGAVLSGSALTDDIDVPDGHYAEESMRVTVVPNRNAIMLSIAFGVAAARGDQAVATAVHGGDHFIYPDCRPAFTQSFEVMQKYALEGYAEVALYTPFVHRTKADIVTAGQEHDTPFDLTWSCYKGGTDHCGRCGTCVERREAFHLAGVADPTPYEDPDFWADAITAKVAS

SEQ ID NO: 42707 - protein, 223 aa, Sulfitobacter donghicola; identical to SEQ ID NO: 42558
  misc_feature (1)..(223): tr|A0A410XX71|A0A410XX71_9RHOB 7-cyano-7-deazaguanine s ynthase OS=Sulfitobacter donghicola OX=421000 GN=queC P E=3 SV=1

SEQ ID NO: 42708 - protein, 233 aa, Sulfitobacter guttiformis
  misc_feature (1)..(233): tr|A0A420DJJ4|A0A420DJJ4_9RHOB 7-cyano-7-deazaguanine s ynthase OS=Sulfitobacter guttiformis OX=74349 GN=queC P E=3 SV=1
MKTIVICSGGLDSVSLAHMVAQEQHLTRLVSFDYGQRHRKELDFAAMCAKRLDVPHDIIDLRGIGAALTGSALTDDIDVPDGHYEEESMRVTVVPNRNAIMLAVAFGVAAANDDQAVATAVHGGDHFIYPDCRPAFTEAFERMQKAALDGYADVSLYTPFVYRTKADIVTEGARHNTPFAETWSCYKGGKTHCGRCGTCVERREAFDLANINDPTIYADPDFWVAAIAKKGLG

SEQ ID NO: 42709 - protein, 233 aa, Sulfitobacter indolifex
  misc_feature (1)..(233): tr|A9E8J5|A9E8J5_9RHOB 7-cyano-7-deazaguanine synthase OS=Sulfitobacter indolifex HEL-45 OX=391624 GN=queC PE= 3 SV=1
MKTLVICSGGLDSVSLAHITAVEHQLTRLVSFDYGQRHRKEVDFAEAAAKRLGVPFHLIDMRGIGAALSGSALTDDIDVPDGHYAEDTMKITVVPNRNAIMLSIGFGIAAAQGDEAVATAVHGGDHFIYPDCRPEFTRAFDAMQQAALDGYAQVRLHTPFVEQSKAEIVRQGAQHGTPFAETWSCYKGGEVHCGRCGTCVERREAFHLAEVSDPTVYADPDYWTEALATRGES

SEQ ID NO: 42710 - protein, 233 aa, Sulfitobacter litoralis
  misc_feature (1)..(233): tr|A0A1H0LHG5|A0A1H0LHG5_9RHOB 7-cyano-7-deazaguanine s ynthase OS=Sulfitobacter litoralis OX=335975 GN=queC PE =3 SV=1
MKTIVVCSGGLDSVSLAHMVSAQRKLTGLVSFDYGQRHRKELDYAALCATRLGVPHDIIDMRGIGAALTGSALTDDIAVPDGHYAEDTMRVTVVPNRNAIMLSVAYGIAAARGDQAVATAVHGGDHFIYPDCRPDFTQAFEFMQYMALDGYADVSLYTPFVHRTKADIVTEGQRHNTPFAETWSCYKGGAHHCGRCGTCVERREAFDLAGVTDPTQYEDPDFWAEAIKRSILA

SEQ ID NO: 42711 - protein, 233 aa, Sulfitobacter pontiacus
  misc_feature (1)..(233): tr|A0A1H2T769|A0A1H2T769_9RHOB 7-cyano-7-deazaguanine s ynthase OS=Sulfitobacter pontiacus OX=60137 GN=queC PE= 3 SV=1
MKTIVICSGGLDSVSLAHMVAAKRKLTGLVSFDYGQRHRKELDYAALCAKRLDVPHDIIDMRGIGAALTGSALTDDVDVPDGHYAEETMRVTVVPNRNAIMLTVAYGIAAARGDQAVATAVHGGDHFIYPDCRPDFTQAFEFMQYMALDGYADVSLYTPFVHRSKADIVTEGQRHNTPFAETWSCYKGGVHHCGRCGTCVERREAFDLAGVADPTQYDDPDFWAEAVKRKILT

SEQ ID NO: 42712 - protein, 233 aa, Sulfitobacter pseudonitzschiae
  misc_feature (1)..(233): tr|A0A073J0Q9|A0A073J0Q9_9RHOB 7-cyano-7-deazaguanine s ynthase OS=Sulfitobacter pseudonitzschiae OX=1402135 GN =queC PE=3 SV=1
MKTIVICSGGLDSVSLAHMVAQQHELTRLVSFDYGQRHRKELDYAALCAQRLAVPHDIIDLRAIGAALTGSALTDDIDVPDGHYAEESMRITVVPNRNAIMLTIAFGVAAARGDDSVATAVHGGDHFIYPDCRPAFAEAFDAMQKQALDGYADVSLYTPFVHRTKADIVTEGYRFGTPFVDTWSCYKGGAHHCGRCGTCVERREAFDLAGVSDPTTYDDPDFWVQAVAQRGQG

SEQ ID NO: 42713 - protein, 233 aa, Sulfitobacter sp.
  misc_feature (1)..(233): tr|A0A085BV93|A0A085BV93_9RHOB 7-cyano-7-deazaguanine s ynthase OS=Sulfitobacter sp. CB2047 OX=1525218 GN=queC PE=3 SV=1
MKTIVICSGGLDSVSLAHMVAANRKLTGLVSFDYGQRHRKELDYAALCAKRLDVPHDIIDMRGIGAALTGSALTDDVDVPDGHYAEDTMRVTVVPNRNAIMLTVAYGIAAARGDQAVATAVHGGDHFIYPDCRPDFTQAFEFMQYMALDGYADVSLYTPFVHRSKAVIVTEGQRHNTPFAETWSCYKGGAHHCGRCGTCVERREAFDLAGVADPTHYDDPHFWAEAVKRKILT

SEQ ID NO: 42714 - protein, 235 aa, Sulfitobacter sp.; identical to SEQ ID NO: 41885
  misc_feature (1)..(235): tr|A0A2G2BYH5|A0A2G2BYH5_9RHOB 7-cyano-7-deazaguanine s ynthase OS=Sulfitobacter sp. OX=1903071 GN=queC PE=3 SV =1

SEQ ID NO: 42715 - protein, 229 aa, Sulfuricaulis limicola
  misc_feature (1)..(229): tr|A0A1B4XIA2|A0A1B4XIA2_9GAMM 7-cyano-7-deazaguanine s ynthase OS=Sulfuricaulis limicola OX=1620215 GN=queC PE =3 SV=1
MPADTDAGKKAVVLVSGGLDSATVLALARDAGARCHALTFDYGQRHRVELDAARRVARQLGAADHRVVRLDIGWMGGSALTDTRIAVPQESTPGIPVTYVPARNTIFLSIALGWAEVLDARDIYIGANAVDYSGYPDCRPEFIRAFESLANLATKAGVEGKGFHVHAPLMKMHKHEIIRSGARLGVDYALTLSCYDPDAAGLACGHCDACRLRAQGFAEAGIADPTRYR

SEQ ID NO: 42716 - protein, 222 aa, Sulfuricella denitrificans
  misc_feature (1)..(222): tr|S6ABE4|S6ABE4_SULDS 7-cyano-7-deazaguanine synthase OS=Sulfuricella denitrificans (strain DSM 22764 / NBRC 105220 / skB26) OX=1163617 GN=queC PE=3 SV=1
MLLSGGLDSATTLAIARSEGFACHCLSLDYGQRHGSELEAAQRVAAALGASEQRTIKLDLTAFGGSALTDENIAVPTAPSAGIPVTYVPARNTIMLSLSLAWAEVLGCRDIFIGANAVDYSGYPDCRPEYLEAFEKMANLATKSAVEGNAIRIRAPLVALSKAEIIRRGIELGVDYRLTVSCYQAGEDGSACGTCDSCRLRRQGFISAKIADPTRYQPETNS

SEQ ID NO: 42717 - protein, 227 aa, Sulfuricella sp.
  misc_feature (1)..(227): tr|A0A0E9MBV3|A0A0E9MBV3_9PROT 7-cyano-7-deazaguanine s ynthase OS=Sulfuricella sp. T08 OX=1632857 GN=queC PE=3 SV=1
MNKAVVLLSGGLDSATTLAIARSEGFACYCLSLDYGQRHGSELEAAQRVAAALGASEQRTIKLDLAAFGGSALTDEKIAVPNAPSAGIPVTYVPARNTIMLSLALAWAEVLGSRDIFIGANAVDYSGYPDCRPEYLEAFEKMANLATKSAVEGNTMHIRAPLGSLSKAEIIRRGIELGVDYRLTVSCYQAGEDGSACGTCDSCRLRRQGFVSAEIADPTRYQPETNS

SEQ ID NO: 42718 - protein, 220 aa, Sulfuricurvum kujiense
  misc_feature (1)..(220): tr|A0A2D3WEF4|A0A2D3WEF4_9HELI 7-cyano-7-deazaguanine s ynthase OS=Sulfuricurvum kujiense OX=148813 GN=queC PE= 3 SV=1
MKKALCIMSGGMDSTLVAYIMRSRGYEIVALHFNYGQRTVAKELSCFRAICDDLGVSEKYEIDLDFFKTIGASALTDHTIAVPTGGIEAGVPITYVPFRNGIFLSIATAIAEKEGCSVIAIGVVEEDSSGYPDCREAFIETFQNAANLGTKETTNITIEMPLVHLQKSQIVEESLRMGAPLHLTWSCYQSEEMACGVCDSCRLRLRGFERAGAVDPIAYV

SEQ ID NO: 42719 - protein, 221 aa, Sulfuricurvum kujiense
  misc_feature (1)..(221): tr|E4TYT9|E4TYT9_SULKY 7-cyano-7-deazaguanine synthase OS=Sulfuricurvum kujiense (strain ATCC BAA-921 / DSM 16 994 / JCM 11577 / YK-1) OX=709032 GN=queC PE=3 SV=1
MMKKALCIMSGGMDSTLVAYIMRSRGYEIVALHFNYGQRTVAKELSCFREICKDLGVNEKYEIDLDFFKTIGASALTDHSIDVPTGGIEPGVPITYVPFRNGIFLSIATAIAEKEGCSAIAIGVVEEDSSGYPDCRESFIDAFTKAANLGTKESTNLSIEMPLVRLQKSQIVQEAIQLDVPLHLTWSCYSSEDKACGVCDSCRLRLRGFERAGAVDPIDYV

SEQ ID NO: 42720 - protein, 222 aa, Sulfuricurvum sp.
  misc_feature (1)..(222): tr|A0A4R4G8H9|A0A4R4G8H9_9HELI 7-cyano-7-deazaguanine s ynthase OS=Sulfuricurvum sp. IAE1 OX=2546102 GN=queC PE =3 SV=1
MRKKALCIMSGGMDSTLAAYMMRDEGYGIVALHFNYGQRTVRKELEAFRSICADLGVEHTYEIDLDFFTAIGASALTDHTIEVPTGGLEAGVPVTYVPFRNGIFLSIATAIAEKEGCEAIAIGVVEEDSSGYPDCTGNFIDAFEKAANLGTKESTRISIKMPLVRLKKSQIVVEAAALNVPLHLTWSCYKDEDAACGVCDSCRLRLRGFEAAGMRDPIPYCQ

SEQ ID NO: 42721 - protein, 442 aa, Sulfuricurvum sp.
  misc_feature (1)..(442): tr|A0A0C2ZU39|A0A0C2ZU39_9HELI Uncharacterized protein OS=Sulfuricurvum sp. PC08-66 OX=1539066 GN=KU37_09255 P E=4 SV=1
MFKVEIEEVNRRDCLSVLRLNVNGEYESDLIINPYDCFDSFISRPTALSLDVLYFTSIVYTIDKIIQRTQTYDHWSRDIDVNIPVSNTDLWDSAKETLKEAVDFLTSDNWIFNFRELENISYFEREETLPVNANFENICLFSGGLDSLAGAINLIDEKNNVLLISHIDGHGSSSTLHSQLLSEIKDSYKLKNIRQSSFHVYTEDKLNHEATTRGRSILFHGIALFHAINLGINEIITPENGVISINLPLTPSRTCSNSTKTMHPYFIKKFEDALNTLGLQIKINNPYLLKTKGEMLVENRNTGLIQNLATKTLSCSHGGGHTPGWYRQSLNCGYCIPCAIRRASIHKFNNNLDRCSDYGHKLNSQEINLFIHEKRLDLLALAHFLNQELTKDEIKKEIKLMAKIDNVDDIADMLLRGYAEIKQYIHDKADSNIKGLFTCRLI

SEQ ID NO: 42722 - protein, 230 aa, Sulfuriferula multivorans
  misc_feature (1)..(230): tr|A0A401JFD5|A0A401JFD5_9PROT 7-cyano-7-deazaguanine s ynthase OS=Sulfuriferula multivorans OX=1559896 GN=queC PE=3 SV=1
MMDKTRRAVILLSGGLDSATVLAIARSSGFACHALSFDYGQRHSAELDAAARVAARQGAVEHRVFKLDLAMFGGSALTDSRIAVPEQASTGIPVTYVPARNTIMLSIALAWAEVLESRDIFIGVNAVDYSGYPDCRPEYIASFETMANLATKAGVEGKQLHVHTPLMQLGKAQIIRLGTELGVDYNATVSCYQADAAGRACGVCDSCRLRRQGFIEAGVADATRYVASPE

SEQ ID NO: 42723 - protein, 198 aa, Sulfuriferula multivorans
  misc_feature (1)..(198): tr|A0A401JDT1|A0A401JDT1_9PROT 7-cyano-7-deazaguanine s ynthase OS=Sulfuriferula multivorans OX=1559896 GN=SFMT TN_1538 PE=3 SV=1
MTELVLLSGGIDSVTLLHLKHSEGASLHALFIDYGQRAGREELRAASIHSNKLGVPLQRLDMGAVGDAFRAGQTQRLHVPLPHRNLVALALGMSYATQIGATCLHLALNRDDSDAYPSASPLFVQSFNNLARSLGDIAVHTPLAELNKVQVIELAIKLGINLRDTYSCLLGYAKPCGHCPQCLQRRAALLAANVEGVD

SEQ ID NO: 42724 - protein, 198 aa, Sulfuriferula plumbiphila
  misc_feature (1)..(198): tr|A0A512L3Q1|A0A512L3Q1_9PROT 7-cyano-7-deazaguanine s ynthase OS=Sulfuriferula plumbiphila OX=171865 GN=TPL01 _02410 PE=3 SV=1
MTELVLLSGGIDSVTLLHLKHSEGAPLHALFIDYGQRAGREELRAASIHSNALGVPLQRLDMAAVGDAFRAGQTQRLHVPLPHRNLVALALGMSYATQIGATCLHLALNRDDAGAYPGASPLFVQRFSNMARSLGNIAVYTPLAELNKVQVIELAFKLGINLSDTYSCLLGYAKPCGHCPQCLQRQAALQAAGMDRMD

SEQ ID NO: 42725 - protein, 229 aa, Sulfuriferula plumbiphila
  misc_feature (1)..(229): tr|A0A512LAP9|A0A512LAP9_9PROT 7-cyano-7-deazaguanine s ynthase OS=Sulfuriferula plumbiphila OX=171865 GN=queC PE=3 SV=1
MSGTRRAVILLSGGLDSATVLAIARSSGFACHALSFDYGQRHRAELDAAARVAAQQGAAEHRVFNLDLAVFGGSALTDANIAVPEQASTGIPVTYVPARNTIMLSIALAWAEVLESRDIFIGVNAVDYSGYPDCRPEYIAAFEAMANLATRAGVEGKQLRIHTPLMQLSKAQIVGLGTGLGVDYTATVSCYQADATGRACGVCDACRLRRQGFVEAGVADATRYVASPG

SEQ ID NO: 42726 - protein, 198 aa, Sulfuriferula sp.
  misc_feature (1)..(198): tr|A0A1Y0GBA2|A0A1Y0GBA2_9PROT 7-cyano-7-deazaguanine s ynthase OS=Sulfuriferula sp. AH1 OX=1985873 GN=CAP31_11 080 PE=3 SV=1
MLLSGGIESSTLLHMRHGQDELHPVFIDYGQRAGQEEFRAAQQQCARLGLQLKKLDMAQTGHDFREGQNTKLHVPLPHRNLIALSLGLSYATQISAGWLMLALNLEDTLAYPSASTAFIAKFQDMANVLGSVEIATPLAALSKAQIIRQGMALGMDYTQTYSCLLGYPLHCGQCPQCLHRREAFRQAGEQEPADFYRA

SEQ ID NO: 42727 - protein, 227 aa, Sulfuriferula sp.
  misc_feature (1)..(227): tr|A0A1Y0G8C8|A0A1Y0G8C8_9PROT 7-cyano-7-deazaguanine s ynthase OS=Sulfuriferula sp. AH1 OX=1985873 GN=queC PE= 3 SV=1
MNEPKHAIVLLSGGLDSATVLAIAQRDGYICHALSFDYGQRHHAELAAAACMAASQGAAEHRTFRMDLAMFGGSALTDSNIAVPETPTTGIPSTYVPARNTIMLSIALAWAEVLNSRAIFIGVNAVDYSGYPDCRPEYIAAFERMANLATRAGVEGQDLHIHAPLMQLSKAEIIRLGTTLGVDYAATVSCYQADAEGRACGVCDSCRLRQQGFEQAGIPDPTRYRLV

SEQ ID NO: 42728 - protein, 226 aa, Sulfurifustis variabilis
  misc_feature (1)..(226): tr|A0A1C7AF43|A0A1C7AF43_9GAMM 7-cyano-7-deazaguanine s ynthase OS=Sulfurifustis variabilis OX=1675686 GN=queC PE=3 SV=1
MERAVVLLSGGLDSATTLALARREAASCHALTIDYGQRHRAELEAARRVAQSLGATEHRVARFDLSWIGGSALTDPAITVPTRPGEGIPVTYVPARNTVFLALALSWAEVLDARAIYIGVNAVDYSGYPDCRPAFIEAFNRVAEVATRAGVEGRGTAVRAPLIDLSKAEIIRVGSELGVDFGLTLSCYDPDEAGRACGVCEACRLRGQGFAAAGLADPTRYRGVTR

SEQ ID NO: 42729 - protein, 219 aa, Sulfurihydrogenibium azorense
  misc_feature (1)..(219): tr|C1DXP6|C1DXP6_SULAA 7-cyano-7-deazaguanine synthase OS=Sulfurihydrogenibium azorense (strain Az-Fu1 / DSM 1 5241 / OCM 825) OX=204536 GN=queC PE=3 SV=1
MIKEKNIIVLLSGGMDSATLLWLAKQNFEEVYAISFIYGQKHSIEIEYAKELAKIADVKQHFIVELPHLKQLGKSALTDPSLEVPSQDYTDQPPITTVPMRNLTFLSIAAAFADVYEIENIGIGIHSLDSPYPDCRAEFASAAEAAINASSVMVANKKNRIKIYTPFLGMSKVDIAKLGYKLGVPFEKTYSCYKGTNPPCGECATCRQREEALKSIKED

SEQ ID NO: 42730 - protein, 226 aa, Sulfurihydrogenibium sp.
  misc_feature (1)..(226): tr|A0A2J6WZN1|A0A2J6WZN1_9AQUI 7-cyano-7-deazaguanine s ynthase OS=Sulfurihydrogenibium sp. OX=2053621 GN=queC PE=3 SV=1
MESKRRPTVKEKNIIVLLSGGMDSATLLWLAKEKFEDIYAISFFYGQKHSIELEYAKELARMVNVKQHFIVEIPHLKQLGKNALTDDSLEIPSESYPDEPPITTVPMRNLTFLSIAAAFADVYEIENIGIGIHSLDSPYPDCRAEFASATEAAINSSSVMVAKKKNRIKIYTPFLGMSKVDIAKLGKQLGVPFEKTYSCYKGTNPPCGECATCIQREEALKSIGLR

SEQ ID NO: 42731 - protein, 222 aa, Sulfurihydrogenibium sp.
  misc_feature (1)..(222): sp|B2V5L9|QUEC_SULSY 7-cyano-7-deazaguanine synthase OS =Sulfurihydrogenibium sp. (strain YO3AOP1) OX=436114 GN =queC PE=3 SV=1
MLKKENIIVLLSGGMDSAVLLWLSKTIFKDVYTISYSYGQKHSIELEYAKELSKIAGVKEHFIVEVPHLKQLKGSALTDENLEIPSENYPDEPPITTVPMRNLIFLSIAASFADVYEIENIGIGIHSLDSPYPDCRAEFASSAEAVINASSVMVAKKKNRIKIFTPFLGMSKTDIAKLGRELGVPFEKTYSCYKGTVPPCGECATCRQREEALRETFSDTTT

SEQ ID NO: 42732 - protein, 222 aa, Sulfurihydrogenibium yellowstonense
  misc_feature (1)..(222): tr|C4FIT2|C4FIT2_9AQUI 7-cyano-7-deazaguanine synthase OS=Sulfurihydrogenibium yellowstonense SS-5 OX=432331 G N=queC PE=3 SV=1
MLKKENIIVLLSGGMDSAVLLWLSKTMFKDVYAISYSYGQKHSIELEYAKELSKIAGVKEHFIVEVPHLKQLKGNALTDENLEIPSENYPDEPPITTVPMRNLIFLSIAASFADVYEIENIGIGIHSLDSPYPDCRAEFASSAEAVINASSVMVAKKKNRIKIFTPFLGMGKTDIAKLGRELGVPFEKTYSCYKGTVPPCGECATCRQREDALREAFSDTTA

SEQ ID NO: 42733 - protein, 227 aa, Sulfurimonas autotrophica
  misc_feature (1)..(227): tr|E0USM3|E0USM3_SULAO 7-cyano-7-deazaguanine synthase OS=Sulfurimonas autotrophica (strain ATCC BAA-671 / DSM 16294 / JCM 11897 / OK10) OX=563040 GN=queC PE=3 SV=1
MKKENKTNKKAVCIMSGGMDSTLSAYMMQNEGYEIIAVHFNYDQRTQTKELECFENICASLHVKQKYILDLDFFKQLGASALTDKTIEVPTQGIEEGVPVTYVPFRNGIFLSMAAAIAEKESAQIISIGVVEEDSSGYPDCREEYIKAMQNAINLGTKEETNIEIKMPLVHLKKSQIVQEALKLNVPLELTWSCYKNEKKACGICDSCRLRLNGFETAGVTDPIPYE

SEQ ID NO: 42734 - protein, 224 aa, Sulfurimonas denitrificans
  misc_feature (1)..(224): sp|Q30RN3|QUEC_SULDN 7-cyano-7-deazaguanine synthase OS =Sulfurimonas denitrificans (strain ATCC 33889 / DSM 12 51) OX=326298 GN=queC PE=3 SV=1
MNLKNKKAICIMSGGMDSTLGAYMVKEMGYEIVALHFNYAQRTEAKELFCFKKICEALNVSNSYVLDLDFFSKIGASALTDKSIDIPINGLEEGVPITYVPFRNGIFLSIAAALAEKEEAVLIAIGVVQEDSSGYPDCKDSFITSMEQSINLGTKDETKIKIYMPLVHLSKSQIVEHALRLNVPLELTWSCYKDEEAACGVCDSCRLRLNGFRLANAKDPIEYM

SEQ ID NO: 42735 - protein, 224 aa, Sulfurimonas gotlandica
  misc_feature (1)..(224): tr|B6BJG5|B6BJG5_SULGG 7-cyano-7-deazaguanine synthase OS=Sulfurimonas gotlandica (strain DSM 19862 / JCM 1653 3 / GD1) OX=929558 GN=queC PE=3 SV=1
MNEQNKKALCVMSGGMDSTLSAYMMKNSGYEIIALHFNYNQRTQKKELECFHKICEDLDVKEKYILDLDFFAQIGASALTDKSIEVPIGGIEEGVPVTYVPFRNGIFLSMAAAVAEKEGANVISIGVVEEDSSGYPDCRESYINSMEQSINLGTKDETNIEIKMPLVHLKKSQIVQKSLELNVPLSLTWSCYKNEDKACGVCDSCRLRLNGFKLAGVSDPIDYE

SEQ ID NO: 42736 - protein, 224 aa, Sulfurimonas hongkongensis
  misc_feature (1)..(224): tr|T0L376|T0L376_9HELI 7-cyano-7-deazaguanine synthase OS=Sulfurimonas hongkongensis OX=1172190 GN=queC PE=3 S V=1
MKTKEKKALCIMSGGMDSTLSAYMMRDEGYEIIALHFNYSQLTQNKELECFDAICKDLGVKERYNLDLDFFSKIGASALIDKGIEVQTSGIEDGIPSTYVPFRNGIFLSIATAIAEKEGASTISIGVVEEDGSGYPDCTDTFIKSMQNSINLGTKDETALEIKMPLVHLSKSQIVQASLELKVPLELTWSCYKNETKACGVCDSCRLRLRGFKLAGISDPIAYE

SEQ ID NO: 42737 - protein, 225 aa, Sulfurimonas sp.
  misc_feature (1)..(225): tr|A0A2D3VX20|A0A2D3VX20_9HELI 7-cyano-7-deazaguanine s ynthase OS=Sulfurimonas sp. UBA12504 OX=2015903 GN=queC PE=3 SV=1
MNLQEKKKALCIMSGGMDSTLAAFMMQEAGYEILAVHFNYNQRTQAKELACFEAICKELEIETKYVLDLSFFKQLGASALTDTNIDVPLCGVEKGVPVTYVPFRNGIFLSMVAAIAEKEGASVISIGVVEEDSSGYPDCREAYIKSMQQSINLGTKDDTQIEIKMPLVHLKKSQIVQKAIELHVPLELTWSCYKNESKACGFCDSCRLRLNGFALANIQDPIEYE

SEQ ID NO: 42738 - protein, 226 aa, Sulfurimonas sp.
  misc_feature (1)..(226): tr|A0A2G1XWV2|A0A2G1XWV2_9HELI 7-cyano-7-deazaguanine s ynthase OS=Sulfurimonas sp. OX=2022749 GN=queC PE=3 SV= 1
MNNIKSTKRAVCIMSGGMDSTLSAYMMKHDGYEIIAVHFNYGQRTQKKEQECFDLICKHLNVSEQYSLDLDFFKHLGASALTDTNIDVPVSGVEEGVPITYVPFRNGIFLSMAAAIAEKERAELISIGVVQEDSSGYPDCRETYIKAMQNAINLGTKDDTNIRIHMPLVHLLKSEIVKKSLEISAPLSLTWSCYKNDDKACGVCDSCRLRLNGFLKAGVTDPIVYE

SEQ ID NO: 42739 - protein, 202 aa, Sulfurirhabdus autotrophica
  misc_feature (1)..(202): tr|A0A4R3Y8I3|A0A4R3Y8I3_9PROT 7-cyano-7-deazaguanine s ynthase OS=Sulfurirhabdus autotrophica OX=1706046 GN=ED C63_104117 PE=3 SV=1
MPEIILLSGGIESSTLLYMNPTPSELYPVFIDYGQRAALQEGQAALAQCANLGIKLKKLNMSQVGHDFREDQSNKMHVPIPHRNLIALSLGLSYAAQLGANRVYIALNQEDTQAYPSASLAFLTQFQAMARTLGEIEIAAPLLNLSKASIILHGKSVGMDYTKTYSCLLGYTTHCGHCPQCKKRQVAFNEAGYPESTGFYHK

SEQ ID NO: 42740 - protein, 222 aa, Sulfurirhabdus autotrophica
  misc_feature (1)..(222): tr|A0A4R3XXK5|A0A4R3XXK5_9PROT 7-cyano-7-deazaguanine s ynthase OS=Sulfurirhabdus autotrophica OX=1706046 GN=qu eC PE=3 SV=1
MKKAVILLSGGLDSATALAIARHAGFDCYALSLDYGQRHRAELQAADSVAKALGATTHRTIKLDLTVFGGSALTDASISVPTIPGKGIPITYVPARNTIMLSLALAWAEVLGSRDIFIGVNAVDYSGYPDCRPEYISAYEKMANLATKAAIEGQSLKIHTPLIALSKADIIRQGIELKVDYRQTVSCYQADDAGAACGICDSCRLRRQGFVDAGINDPTHYR

SEQ ID NO: 42741 - protein, 226 aa, Sulfurisoma sediminicola
  misc_feature (1)..(226): tr|A0A497XKP8|A0A497XKP8_9PROT 7-cyano-7-deazaguanine s ynthase OS=Sulfurisoma sediminicola OX=1381557 GN=queC PE=3 SV=1
MPARPAVVLLSGGLDSATTLAIARRDGYACHCLSVDYGQRHRAELAAADRVAAALGAAAHRTIHLDMAQFGGSALTDDAIAVPTGGVQPGIPVTYVPARNTVMLALALAWAEVLGAQDIFVGVNAVDYSGYPDCRPEYIAAFERMANLATKAGVEGRALHVHAPLIDLSKAEIIRRGLALGIDYGLTVSCYQADATGQACGSCDSCRLRREGFAAAGVADPTRYAA

SEQ ID NO: 42742 - protein, 149 aa, Sulfuritalea hydrogenivorans
  misc_feature (1)..(149): tr|W0SM90|W0SM90_9PROT 7-cyano-7-deazaguanine synthase OS=Sulfuritalea hydrogenivorans sk43H OX=1223802 GN=SUT H_03125 PE=3 SV=1
MRSRLQGWQPGIPVTYVPARNTIMLALALAWAEVLGAQDIFVGVNAVDYSGYPDCRPEFIRAFETLANLATKAAVEGRSLQVHAPLIDMSKAQIIMQGGRLGIDYGLTVSCYQADAEGRACGVCDSCRLRSQGFSDAGLKDPTRYAGGN

SEQ ID NO: 42743 - protein, 235 aa, Sulfuritortus calidifontis
  misc_feature (1)..(235): tr|A0A4R3K0Y2|A0A4R3K0Y2_9PROT 7-cyano-7-deazaguanine s ynthase OS=Sulfuritortus calidifontis OX=1914471 GN=que C PE=3 SV=1
MSEAHVKRSGRSQQRAVVLLSGGLDSATTLAVARSEGCECFALSFDYGQRHGAELDAARAVAKQLGACEHRVLSLDLAQFGGSALTDRSLAVPEQASEGIPITYVPARNTVMLALALAWAEVLAAEAIYLGVNAVDYSGYPDCRPEYIEAFERMANLATKRAVEGQPLRIAAPLIHLSKAEIIRLGQRLGVDYGLTVSCYQADDRGRACGRCDSCRLRRQGFLDAGVTDPTRYQV

SEQ ID NO: 42744 - protein, 225 aa, Sulfurivirga caldicuralii
  misc_feature (1)..(225): tr|A0A1N6ER20|A0A1N6ER20_9GAMM 7-cyano-7-deazaguanine s ynthase OS=Sulfurivirga caldicuralii OX=364032 GN=queC PE=3 SV=1
MNRPAIVLLSGGLDSATVLAIARDQGYACHTLSFDYGQRHRAELDAAARISEALGAISHRVVRIDLGTIGGSALTDDSLSVPTDGVGESIPITYVPARNMTFLSFAVGLGEVLEAQDIFIGVNAVDYSGYPDCRPEFIAALEQAANLGTKAGVGGHPFKIHTPLIHLAKAEIIRTGLALGVDYGLTVSCYQADEQGRACGVCDSCRLRRKGFEEAGVADPTRYQN

SEQ ID NO: 42745 - protein, 222 aa, Sulfurospirillum barnesii
  misc_feature (1)..(222): tr|I3XZ85|I3XZ85_SULBS 7-cyano-7-deazaguanine synthase OS=Sulfurospirillum barnesii (strain ATCC 700032 / DSM 10660 / SES-3) OX=760154 GN=queC PE=3 SV=1
MRKALVVFSGGQDSTTCLGWAKNRFDEVETITFDYGQKHRVEIAQAQKIAHVLHVKNTLLSLDAFSQLNDSALIDGTQDIGAHHVTHTNLPASFVPNRNAIFFTLAHAFAQKQGIEHIIIGVNQTDYSGYPDCREPFVKALELALNLGSEANITFHYPLMHLTKAQTFELSRVEGVLDLVIDESHTCYNGVHTHKHAWGYGCGECPACVLRKIGWEAYTQGV

SEQ ID NO: 42746 - protein, 222 aa, Sulfurospirillum cavolei
  misc_feature (1)..(222): tr|A0A2D3WBN0|A0A2D3WBN0_9PROT 7-cyano-7-deazaguanine s ynthase OS=Sulfurospirillum cavolei OX=366522 GN=queC P E=3 SV=1
MKKALVVFSGGQDSTTCLGWAKNRFDYVETITFDYGQKHRVEIAQAQKIAEILHVKNTVLSLDAFSQLNDSALIDATQDISAHHKTHTNLPASFVPNRNAIFFTLAHAFAQKQDIEHLVIGVNQTDYSGYPDCREPFVKALELALNLGSEASITFHYPLMHLTKAETFALSHEEGVLDLVIDESHTCYNGVHTHKHAWGYGCGECPACVLRKQGFEAFCKGR

SEQ ID NO: 42747 - protein, 222 aa, Sulfurospirillum deleyianum
  misc_feature (1)..(222): tr|D1B472|D1B472_SULD5 7-cyano-7-deazaguanine synthase OS=Sulfurospirillum deleyianum (strain ATCC 51133 / DSM 6946 / 5175) OX=525898 GN=queC PE=3 SV=1
MSKALVVFSGGQDSTTCLGWAKNRFEYVESITFDYGQKHKVEIAQAQKIASLLHVKNTLLSLDAFSQLNDSALIDSTQDIGAHHRVHTNLPASFVPNRNAIFFTLAHAFAQKQGIEHIIIGVNQTDYSGYPDCREPFVKALELALNLGSEANITFHYPLMHLTKAETFLLSKEEGVLDLVLNESHTCYNGEHSEKHTWGYGCGECPACVLRKQGWEAYEKGI

SEQ ID NO: 42748 - protein, 226 aa, Sulfurospirillum halorespirans
  misc_feature (1)..(226): tr|A0A1D7TM97|A0A1D7TM97_9PROT 7-cyano-7-deazaguanine s ynthase OS=Sulfurospirillum halorespirans DSM 13726 OX= 1193502 GN=queC PE=3 SV=1
MAKIASKALVVFSGGQDSTTCLGWAKNRFDFVESITFDYGQKHRVEIAQAEKIAKALHVKNTLLSLDAFSQLNDSALIDGTQDIGAHHKTHTNLPASFVPNRNAIFFTLAHAFAQKQGIEHIIIGVNQTDYSGYPDCREPFVKALELALNLGSEATITFHSPLMHLTKAETFALSDKEGVLGLVIDESHTCYNGDHSEKHDWGYGCGKCPACVLRKAGWEAYTQSI

SEQ ID NO: 42749 - protein, 226 aa, Sulfurospirillum multivorans
  misc_feature (1)..(226): tr|A0A5B9TUQ7|A0A5B9TUQ7_SULMU 7-cyano-7-deazaguanine s ynthase OS=Sulfurospirillum multivorans OX=66821 GN=que C PE=3 SV=1
MAKIASKALVVFSGGQDSTTCLGWAKNRFDSVESITFDYGQKHRVEIAQAEKIAKALHVKNTLLSLDAFSQLNDSALIDGTQDIGAHHKTHTNLPASFVPNRNAIFFTLAHAFAQKQGIKHIIIGVNQTDYSGYPDCREPFVKALELALNVGSEANITFHSPLMHLTKAETFALSDKEGVLGLVIDESHTCYNGDHSEKHDWGYGCGKCPACVLRKAGWEAYSESI

SEQ ID NO: 42750 - protein, 221 aa, Sulfurospirillum sp.
  misc_feature (1)..(221): tr|A0A432SRA2|A0A432SRA2_9PROT 7-cyano-7-deazaguanine s ynthase OS=Sulfurospirillum sp. OX=2053622 GN=queC PE=3 SV=1
MQKAVCIMSGGMDSTLAAYIAKKRDNYEIVALHFNYGQRTQKREEKAFSDISELLKCVKSYSLDLDFFSQIGGSALTDESIKIPTNGLQSGIPITYVPFRNGIFLSIAAAIAEKEGASAIYIGVVEEDSSGYPDCREDFIKKLQDAIDSGTKPETKIEIKTPLVHLKKEQIVQESIELDVPLEYTWSCYKNSDIACGVCDSCRLRLKGFEYAGQKDKIPYQ

SEQ ID NO: 42751 - protein, 222 aa, Sulfurospirillum sp.
  misc_feature (1)..(222): tr|A0A2D3WCA2|A0A2D3WCA2_9PROT 7-cyano-7-deazaguanine s ynthase OS=Sulfurospirillum sp. UBA12182 OX=2015905 GN= queC PE=3 SV=1
MSSALVVFSGGQDSTTCLGWAKNRFDRVETLTFDYGQKHRVEIYQAKKIATLLDVENFVLKFDAFSQLADSALIDGSLDISSAHSHKPNLPASFVPNRNAVFFTLAHAYAQKKGIDNIITGINQTDYSGYPDCRLEFIEALELALNLGSESNIKFHYPLIHLSKAQTFEMSEQEGVLELIIDESHTCYNGNHNTKNEWGYGCGECPACILRAKGWQEYNKKH

SEQ ID NO: 42752 - protein, 225 aa, Sulfurovum riftiae
  misc_feature (1)..(225): tr|A0A151CEF5|A0A151CEF5_9PROT 7-cyano-7-deazaguanine s ynthase OS=Sulfurovum riftiae OX=1630136 GN=queC PE=3 S V=1
MGKKAVCIISGGMDSALSAKIAQKEGYEIIALHFNYGQRTQYKELACFRKIAEELKAAETYEIDLDFFEQIGASALTDRSIDVPTGGVEEGVPVTYVPFRNGIFLSIAAALAEKHGAEALFIGVVEEDSSGYPDCRESYIEQMEKAINLGTKEETNITIRMPLVALQKSQIVQKALELGVPLADTWSCYQSEDLACGVCDSCRLRLRGFEIAGVQDPIPYRKDSN

SEQ ID NO: 42753 - protein, 222 aa, Sulfurovum sp.
  misc_feature (1)..(222): sp|A6Q9Q9|QUEC_SULNB 7-cyano-7-deazaguanine synthase OS =Sulfurovum sp. (strain NBC37-1) OX=387093 GN=queC PE=3 SV=1
MGKKAVCIISGGMDSALSAKIAQEEGYEIIALHFNYGQRTRNKELECFRKITQELNASESYEIDLDFFEQIGASALTDKSIDVPIGGLEEGVPVTYVPFRNGIFLSIAAAIAEKHGAEALFIGVVEEDSSGYPDCRESYIEQMQKAINLGTKDETNIEIKMPLVSLRKSQIVQKAIELGVPLEDTWSCYQAEDAACGVCDSCRLRLRGFEVAGVKDPIAYRK

SEQ ID NO: 42754 - protein, 220 aa, Sulfurovum sp.
  misc_feature (1)..(220): tr|I2K8A6|I2K8A6_9PROT 7-cyano-7-deazaguanine synthase OS=Sulfurovum sp. AR OX=1165841 GN=queC PE=3 SV=1
MKKAVCIISGGMDSALSAKIAQNEGYEIIALHFNYGQRTQDKELECFRKIASAVDASETYEIDLPFFEQIGASALTDQSIDVPTGGLEKGVPVTYVPFRNGIFLSIAAAVAEKHGAQALFIGVVEEDSSGYPDCRESYIKQMQKAINLGTKDETDLEIRMPLVDLKKSEIVQKSLELHVPLKDTWSCYKSEEKACGVCDSCRLRLKGFEEAGSVDPILYA

SEQ ID NO: 42755 - protein, 427 aa, Sunxiuqinia dokdonensis
  misc_feature (1)..(427): tr|A0A0L8VEY5|A0A0L8VEY5_9BACT Uncharacterized protein OS=Sunxiuqinia dokdonensis OX=1409788 GN=NC99_04280 PE= 4 SV=1
MKIYCTPQKGSENNYNQDLKVVLFGKADNRAEGYIGEQIWQKVIAEKINPSSKAWDLLSIALSVISADYAGHRKKSHDGWTREFEMVVAVIDKDFWNGQAFLLSKLLGFLTSDRWHFTFVDGGFQPKAPKSSEFKVIENDCVVLLSGGLDSLIGIIDLVAQEHNPVAVSQLVPGDAEKQRDFAKIFNPNVPHIQFNHNKKFPDSETPSSQRARSIIFLAYGILIATCLKNYKERKTVTLYMCENGYISLNPPLTGMRIGSLSTRTTHPIYLLMFQELISNAGLNVTIENPYKDKTKGQMLINCKNQALIKQYAHKSTSCGRFKRHGHKHCGRCVPCLVRRAAFKAWREIDQTNYIYDDLSIDTPNYAQYDDVKSIAIAIKEVENNGLDKWLGAQLNSAILGDTSTYKKTIQIGVAELKKFLQGYNIV

SEQ ID NO: 42756 - protein, 223 aa, Sunxiuqinia elliptica
  misc_feature (1)..(223): tr|A0A1I2KG96|A0A1I2KG96_9BACT 7-cyano-7-deazaguanine s ynthase OS=Sunxiuqinia elliptica OX=655355 GN=queC PE=3 SV=1
MSKALVVFSGGQDSTTCLFWAKSKFDEVEAVAFDYGQKHRNELDVAAKIAKQAAVPLAIYSLNVLGQLSRNALTDSSLEVEAEKPADRPPNTLVEGRNMLFLTYAAILAKEKGIANLITGVGQADYSGYPDCRDEFIRSLNQTLNLSMDYHYQIHTPLMWKSKAEVWQLADELGVFDLVRFETLTCYNGVPGDGCGVCPACKLRKNGLDTYLKIRVTGDAKLP

SEQ ID NO: 42757 - protein, 223 aa, Sunxiuqinia elliptica
  misc_feature (1)..(223): tr|A0A4R6H7A4|A0A4R6H7A4_9BACT 7-cyano-7-deazaguanine s ynthase OS=Sunxiuqinia elliptica OX=655355 GN=queC PE=3 SV=1
MSKALVVFSGGQDSTTCLFWAKSKFDEVEAVAFDYGQKHRNELDVAAKIAKQAAVPLAIYPLNVLGQLSRNALTDSSLEVEAEKPADRPPNTLVEGRNMLFLTYAAILAKGKGISNLITGVGQADYSGYPDCRDEFIRSLNQTLNLSMDYQYQIHTPLMWKSKAEVWQLADELGVFDLVRVETLTCYNGVPGDGCGACPACKLRNNGLDTYLKIRATGDAKLP

SEQ ID NO: 42758 - protein, 231 aa, Superficieibacter electus
  misc_feature (1)..(231): tr|A0A2P5GSK3|A0A2P5GSK3_9ENTR 7-cyano-7-deazaguanine s ynthase OS=Superficieibacter electus OX=2022662 GN=queC PE=3 SV=1
MKRAVVVFSGGQDSTTCLIQALHQYDDVHCVTFDYGQRHRAEIDVARELALKLGARAHKVLDVTLLNELAISSLTRDSIPVPDYKPDADGIPNTFVPGRNILFLTLAAIYAYQVKAEAVITGVCETDFSGYPDCRDEFVKALNHAVSLGMAKDIRFETPLMWLDKAETWALADYWGKLDLVRNETLTCYNGIKGDGCGQCAACHLRANGLNHFLANVTSVRTAMQRKTGLA

SEQ ID NO: 42759 - protein, 252 aa, Sutterella megalosphaeroides
  misc_feature (1)..(252): tr|A0A2Z6I814|A0A2Z6I814_9BURK 7-cyano-7-deazaguanine s ynthase OS=Sutterella megalosphaeroides OX=2494234 GN=q ueC PE=3 SV=1
MTNLSQGTQRRPLGLGHHRSALILFSGGQDSTTCLGWALERFERVETLGVEYGQRHDVEMTCRRRVLEVVRTLKPEWNERLGEDHVLDLSVLGQVSDCALTREKAIEFEEDKVPNTFVPGRNLLFFTLAAALGYRRGIDVLVGGMCETDYSGYADCRDSTMKSLQVTLGLGLDRPVVIETPLMWKTKGETWAMAHEAGGDAFVDLILEESHTCYAGDHTHRHAWGYGCGECPACRLREHGWNEWLALKAEAE

SEQ ID NO: 42760 - protein, 245 aa, Sutterella parvirubra
  misc_feature (1)..(245): tr|H3KDN4|H3KDN4_9BURK 7-cyano-7-deazaguanine synthase OS=Sutterella parvirubra YIT 11816 OX=762967 GN=queC PE =3 SV=1
MESFMQELDHPAGRRGALVLFSGGQDSTTCLAWALEHFERVETLGVDYGQRHDVEMRCREDVLRAVRALNPKWDARLGEDHRLDMSVLGQISDCALTKERAIELEASGVPNTFVPARNLLFFTFASAIAYRRGLSVLVGGMCETDYSGYADCRDNTLKSLQVTLSLGLDAPMTVETPLMWLSKAETWALAQRLGGDAFVEIVRERTHTCYMGDREHHHDWGWGCGECPACRLRREGWEAWAASRK

SEQ ID NO: 42761 - protein, 245 aa, Sutterella sp.
  misc_feature (1)..(245): tr|A0A5B7ZK12|A0A5B7ZK12_9BURK 7-cyano-7-deazaguanine s ynthase OS=Sutterella sp. KGMB03119 OX=2584944 GN=queC PE=3 SV=1
MTEFSDFASAGRDMAALVLFSGGQDSTTCLGWALERFGRVETVGVDYGQRHQAELVCRGKVLEKMRAMKPLWAERLGEDHMLSLPVLGEVADCALTDERRIAFESSGLPNTFVPGRNLLFFTLAAAIAYRRGARVLVGGMCETDYSGYPDCRDNTLKSLQVTLALGLDAPIILETPLMRLTKAETWELAQRTGGDEFVKLVRDETHTCYMGDHEHHHAWGWGCGECPACRLRAKGWEEWSGSKRF

SEQ ID NO: 42762 - protein, 242 aa, Sutterella sp.
  misc_feature (1)..(242): tr|R7BVY4|R7BVY4_9BURK 7-cyano-7-deazaguanine synthase OS=Sutterella sp. CAG:397 OX=1262976 GN=queC PE=3 SV=1
MAETAAGDGLRRALVLFSGGQDSTTCLAWALTVFDRVDTVGFDYGQRHKSELTCRKRIREKIQALNPRWQGKLGEDHILNLTELNRIADCALTRSEAIGEGADGLPNTFVPGRNLLFFNYAAILAWRLGIRTLVGGMCDTDYSGYPDCRDNTLKSLQVTLSLGLGRDFVIETPLMHLTKAQSWMLAENLGGKALVDLIRFETETCYEGDRTHRHDWGYGCGVCPACRLRAKGWEEFVRSCGK

SEQ ID NO: 42763 - protein, 252 aa, Sutterella wadsworthensis
  misc_feature (1)..(252): tr|E7H4X6|E7H4X6_9BURK 7-cyano-7-deazaguanine synthase OS=Sutterella wadsworthensis 3_1_45B OX=742821 GN=queC PE=3 SV=1
MTQFTEYASVGREMAALVLFSGGQDSTTCLGWALERFGRVETIGVDYGQRHQAELECRVRVREKMAQLKPQWGERLGDDHLLKLPVLGEIADCALTDERRIAFEASGLPNTFVPGRNLLFFTLAASLAYRRGLRVLVGGMCETDYSGYPDCRDNTLKSLQVTLDLGLDMPFIIETPLMRLSKAETWALAEHVGGDPFVELVRNDTHTCYMGDHQHRHVWGYGCGECPACKLRAQGWASWSEHARFADASTVV

SEQ ID NO: 42764 - protein, 252 aa, Sutterella wadsworthensis
  misc_feature (1)..(252): tr|R5PR56|R5PR56_9BURK 7-cyano-7-deazaguanine synthase OS=Sutterella wadsworthensis CAG:135 OX=1263111 GN=queC PE=3 SV=1
MTQFTEYASVGREMAALVLFSGGQDSTTCLGWALERFGRVETIGVDYGQRHQAELECRVRVREKMAQLKPQWGERLGDDHLLKLPVLGEIADCALTDERRIAFEASGLPNTFVPGRNLLFFTLAASLAYRRGLRVLVGGMCETDYSGYPDCRDNTLKSLQVTLDLGLDMPFIIETPLMRLSKAETWALAEHVGGDPFVELVRNETHTCYMGDHQHRHVWGYGCGECPACKLRAQGWASWSEHARFADASTAV

SEQ ID NO: 42765 - protein, 198 aa, Sutterellaceae bacterium
  misc_feature (1)..(198): tr|A0A3D4GBF1|A0A3D4GBF1_9BURK 7-cyano-7-deazaguanine s ynthase (Fragment) OS=Sutterellaceae bacterium OX=20267 94 GN=DIU26_04705 PE=3 SV=1
FEYGQRHCKELESAQKVADYYGVRHVVFNLTQIFSFSNCSLLSNSTEKPVHESYADQIAKNGEGKVSTYVPFRNGLMLSAGAALAQSLFPEEKCEIWIGAHADDAAGNAYADCSVGFNNAMDQAINIGTYGLVSLRAPLNRWNKAQVVAKGLELKVPYKLTWSCYDGGEKACGECGTCIDRKAAFEANGVKDPIEYFK

SEQ ID NO: 42766 - protein, 234 aa, Sutterellaceae bacterium
  misc_feature (1)..(234): tr|A0A2E2R5T4|A0A2E2R5T4_9BURK 7-cyano-7-deazaguanine s ynthase OS=Sutterellaceae bacterium OX=2026794 GN=queC PE=3 SV=1
MNKKALVLFSGGQDSTVCLAWALSKFEHVETIGFDYGQRHRIELECRLTVLDRVREQFPEWAYKLGEDRVIDLSWLGQISDCALTEEREIELNENGLPNTFVPGRNLVFFLISSAVAYRRGLSTLVGGMCQTDFSGYPDCREDTLKALQVATNLGMASTFRFETPLMWIDKTETFQLGEQLGGKKLLEIIVRDTHTCYTGDRSHEHDWGFGCGECPACDLRKRGWKNYISQQNQ

SEQ ID NO: 42767 - protein, 233 aa, Swaminathania salitolerans
  misc_feature (1)..(233): tr|A0A511BR03|A0A511BR03_9PROT 7-cyano-7-deazaguanine s ynthase OS=Swaminathania salitolerans OX=182838 GN=queC PE=3 SV=1
MLSDETALVLFSGGQDSATCLAWALSRFSRVETLGFAYGQRHAVELACRDRLRETMIEAMPEWAPRLGADHTLDLGILGEISETSLTREAEIRMSDSGLPTTFVPGRNLLFLTFAATLAVRRHARHIVTGVCETDYSGYPDCRDDTIKALQVALNLGMEERFVLHTPLMWLDKAQTWNLAATLGGAPLVRAINEESHSCYLGDRTHRHDWGYGCGTCPACELRARGWSEYIDA

SEQ ID NO: 42768 - protein, 233 aa, Swingsia samuiensis
  misc_feature (1)..(233): tr|A0A4Y6UG77|A0A4Y6UG77_9PROT 7-cyano-7-deazaguanine s ynthase OS=Swingsia samuiensis OX=1293412 GN=queC PE=3 SV=1
MSNTALVLFSGGQDSATCLAWALSRFEHVETVGFSYGQRHAIELECRSTLRSHMAEHSSTWEKRLGIDHTIDLASLGAVSETALTREAEIGFNENGLPNTFVPGRNLIFLTFAAALAYRRGAKHIITGVCETDYSGYPDCRDDTIKALQVALNLGMDKRFVLHTPLMWIDKAQTWELAQSIGGKPLVELINRESHSCYMGDRTHLHAWGYGCGTCPACQLRADGWQRFKERQA

SEQ ID NO: 42769 - protein, 260 aa, Swingsia sp.
  misc_feature (1)..(260): tr|A0A4Y6U8Q6|A0A4Y6U8Q6_9PROT 7-cyano-7-deazaguanine s ynthase OS=Swingsia sp. F3b2 OX=2558361 GN=queC PE=3 SV =1
MTNHQDFPVPHTSRQLAPLSGSFSLPGGAALVLFSGGQDSATCLAWALSAFQHVETVGFSYGQRHAVEMDCRATLRRQIADLVPRGAERLGDDHVIDLPALGKLSETALTRDAEIKLGKNGLPNTFVPGRNLIFLTFAAALAFRRNARTIITGVCETDYSGYPDCRDDAIKAMQVALNIGMDQRFVLQAPLMWLDKARTWKLAELIGGPALVETIRRDSHSCYHGDRGEGSEHDWGYGCGHCPACELRAEGWHRYQASKS

SEQ ID NO: 42770 - protein, 231 aa, Synechococcales bacterium
  misc_feature (1)..(231): tr|A0A354B253|A0A354B253_9CYAN 7-cyano-7-deazaguanine s ynthase OS=Synechococcales bacterium UBA10510 OX=205579 5 GN=queC PE=3 SV=1
MPADAPPLAIALLSGGLDSATAAALAIEAGYRVIGLSFNYGQRHLRELEAAAALAPGLGLVEHHVIEVNLAAWGGSALTDSAIAIPTSGVEASGIPNTYVPGRNTVFIALGLSLAEARGAEALVLGVNAVDYSGYPDCRPDYLAAFQTLADLASRAGREGRGARLWAPLVNWSKLEIVQQALRLGVPIAGTWSCYSGGQQPCGLCDSCRIRDGALIEAGRADLASQAQRGA

SEQ ID NO: 42771 - protein, 225 aa, Synechococcales bacterium
  misc_feature (1)..(225): tr|A0A358BX85|A0A358BX85_9CYAN 7-cyano-7-deazaguanine s ynthase OS=Synechococcales bacterium UBA8138 OX=2055796 GN=queC PE=3 SV=1
MHPAPPTAVALLSGGLDSATAAAIAIEAGYRLIGLSFNYGQRHQRELEAAALLARHFNFSEHHTINVNLAAWGGSSLTDLQQTIPSAGVLPGVIPNTYVPGRNTVFIAMALSLAEARGAERLVLGVNAVDYSGYPDCRPEYLTAFQKLADLASKSGLEGHGAQLWAPLVQWSKTEIVAEALRLQVPIADTWSCYAGGVKPCGVCDSCRIRDGALRDAGRPDLASR

SEQ ID NO: 42772 - protein, 231 aa, Synechococcus elongatus
  misc_feature (1)..(231): sp|Q31NK6|QUEC_SYNE7 7-cyano-7-deazaguanine synthase OS =Synechococcus elongatus (strain PCC 7942) OX=1140 GN=q ueC PE=3 SV=1
MAKAVVLLSGGLDSATAAAQAIADGYEAIALSFRYGQRHVRELEAARSVAAALGINQHFFVDVNIAQWGGSSLTDAAEPLPGSGVVAGEIPSTYVPGRNTVFIALALSLAEAQQASAIYLGINAVDYSGYPDCRPDYLAAFQQLASLSSKVGVEGQAPQLVAPLIHDHKVDIVRRAVVLGVPIPATWSCYAGGAEACGRCDSCRIRDRALIEAGYPEWATAIGRSLVSLQP

SEQ ID NO: 42773 - protein, 225 aa, Synechococcus lacustris
  misc_feature (1)..(225): tr|A0A2P7EF62|A0A2P7EF62_9SYNE 7-cyano-7-deazaguanine s ynthase OS=Synechococcus lacustris OX=2116544 GN=queC P E=3 SV=1
MHPAPPTAVALLSGGLDSATAAAIAIEAGYRLIGLSFNYGQRHQRELAAAALLARHFNFSEHHTINVNLAAWGGSSLTDLQQTIPSAGVLPGVIPNTYVPGRNTVFIAMALSLAEARGAERLVLGVNAVDYSGYPDCRPEYLTAFQKLADLASKSGLEGHGAQLWAPLVQWSKTEIVAEALRLQVPIADTWSCYAGGVKPCGVCDSCRIRDAALRDAGRPDLASR

SEQ ID NO: 42774 - protein, 237 aa, Synechococcus lividus
  misc_feature (1)..(237): tr|A0A2D2PZ90|A0A2D2PZ90_SYNLI 7-cyano-7-deazaguanine s ynthase OS=Synechococcus lividus PCC 6715 OX=1917166 GN =queC PE=3 SV=1
MTTKKAVVLLSGGLDSSTVLFRAKALGYACYALSFNYGQRHQQELTSAIAIAAAAGVVQHHVIQFDLRLWGGSALTDQTIDLPCDRDLSTMSQEIPVTYVPARNTIFLSFALAYAEAIHAQSVHIGVNALDYSGYPDCRPDYIAAMAEVYRLGTKQGREGNPIEIICPLIDLHKTDIIRLGNEYGVPWEKTWSCYSDGGTHEPARACGRCDACRLRLAAFAALGLTDPLPYTPTHPA

SEQ ID NO: 42775 - protein, 226 aa, Synechococcus sp.
  misc_feature (1)..(226): sp|Q0I671|QUEC_SYNS3 7-cyano-7-deazaguanine synthase OS =Synechococcus sp. (strain CC9311) OX=64471 GN=queC PE= 3 SV=2
MTDSTAIALLSGGLDSATAAALAIKSGFRVIGLSFDYGQRHRRELDAAVEIAKALNLAEHHTINVDLAMWGGSSLTDHAQTLPTSGVETSIIPNTYVPGRNTVFIAIGLSLAEARGADRLVLGVNAVDYSGYPDCRPDYLEAFQDLADLSSRAGREGHGPKLWAPLVEWSKQQIAEEALHLGIPIERTWSCYSGGDVPCGVCDSCRIRDEALLAAGRPDLCSPGRP

SEQ ID NO: 42776 - protein, 226 aa, Synechococcus sp.
  misc_feature (1)..(226): sp|Q3AGF3|QUEC_SYNSC 7-cyano-7-deazaguanine synthase OS =Synechococcus sp. (strain CC9605) OX=110662 GN=queC PE =3 SV=1
MSQRTAIALLSGGLDSATAAALALEQGDRVIGLSFDYGQRHLRELDAAAAVAQQLGLAEHHCISVNLASWGGSALTDASISIPTDGVEEGRIPPTYVPGRNTVFISVGLSLAEARGAERLVLGVNAVDYSGYPDCRPDYLNAFQTLADLASKAGREGHGAQLWAPLVQWSKVRIVEEALRLGVPIETTWSCYSGGTHPCGVCDSCRIRDAALREAGRPDLCSSTAA

SEQ ID NO: 42777 - protein, 232 aa, Synechocystis sp.
  misc_feature (1)..(232): sp|Q55468|QUEC_SYNY3 7-cyano-7-deazaguanine synthase OS =Synechocystis sp. (strain PCC 6803 / Kazusa) OX=111170 8 GN=queC PE=3 SV=2
MTKTAVVLLSGGLDSATVAAIAKREGYRVIALSFNYGQRHDRELRAAADIVQALGIPEHFSINLDLAQWGGSSLTDRQQTLPQTGVEPDIIPSTYVPGRNTVFIALGLSLAEAKGAEAVFLGINAIDYSGYPDCRPEYLATYQQLAALSSKVGVEGRPIQLLAPLIELSKVDIVHKALELGVPIAQTWSCYAGGEEPCGRCDSCRLRDQALIEAGHPELASAKGRLWREKVD

SEQ ID NO: 42778 - protein, 235 aa, Synechocystis sp.
  misc_feature (1)..(235): tr|A0A068MSX2|A0A068MSX2_SYNY4 7-cyano-7-deazaguanine s ynthase OS=Synechocystis sp. (strain PCC 6714) OX=1147 GN=queC PE=3 SV=1
MMTKTAVVLLSGGLDSATVAAIAKEEGYQVIALSFNYGQRHDRELQAAQAIVQALAIEHHFTVDLDLAQWGGSSLTDRQQILPQGGVEPDIIPSTYVPGRNTVFIALGLSLAEAQGAEAVFLGINAIDYSGYPDCRPEYLAVYQQLAALSSKVGVEGRPIQLIAPLITLSKVDIVHKALELGVPIAETWSCYAGGEQPCGRCDSCRLRDQALIEAGHPELASVQGRHRREDVGQS

SEQ ID NO: 42779 - protein, 231 aa, Syntrophaceae bacterium
  misc_feature (1)..(231): tr|A0A1V4XAZ9|A0A1V4XAZ9_9DELT 7-cyano-7-deazaguanine s ynthase OS=Syntrophaceae bacterium PtaB.Bin038 OX=18117 16 GN=queC PE=3 SV=1
MAAGSKAVILASGGIDSTTAMAVARSEGFELYSLSFDYGQRHAVELDAARKVSHALGARRHLVIRIDLGAIGGSALTADIAVPRGRSEGDMMSAIPVTYVPARNTIFLSYALAWAEVLEAADIFIGVNAVDYSGYPDCRPEYIRAFETMANLAIKAAVEGKLRIAVRTPLIRMTKAGIIRTGTGLGVDYGLTHSCYDPDSKGRACGDCDSCILRKKGFREAGIPDPTRYAR

SEQ ID NO: 42780 - protein, 237 aa, Syntrophaceae bacterium
  misc_feature (1)..(237): tr|A0A354SFR6|A0A354SFR6_9DELT 7-cyano-7-deazaguanine s ynthase OS=Syntrophaceae bacterium OX=2052184 GN=queC P E=3 SV=1
MKNEIDKLKKKAVVLLSGGIDSATTLAIARSMGFAVWALSFRYGQRHRVELEAATRVACVNSVAEHLTVDIDLRRIGGSALTSDLAVPKSRSAEDMGKDIPVTYVPARNTIFLSYALAWAEVIGVSDIFIGVNALDYSGYPDCRPEYIEAYERMANLATRAGVEGRQKLRIHTPLIHLSKAQIIRKGMELGVDYSLTHSCYDPGADGVACGQCDSCLLRLKGFREAGLADPGKYKRL

SEQ ID NO: 42781 - protein, 234 aa, Syntrophobacter fumaroxidans
  misc_feature (1)..(234): sp|A0LJR5|QUEC_SYNFM 7-cyano-7-deazaguanine synthase OS =Syntrophobacter fumaroxidans (strain DSM 10017 / MPOB) OX=335543 GN=queC PE=3 SV=1
MGQEHRRKAVVLFSGGIDSTTCLAVAKAEGFEAYALSFFYHQRHGVEVEAARRSAPALGAREHLVLELPLDRIGGSALTGHEEVPKDVPVEKMSDRIPATYVPARNTIFLSFALAWAEVLGAADIFIGVNALDYSGYPDCRPEYIAAFERMANLAIRETVEGRMRIKVHTPLIRLTKGEIIKRGLELGLDYSLTHSCYDPDARGLACGHCDSCILRKKGFMEAGIPDPTRYVRD

SEQ ID NO: 42782 - protein, 228 aa, Syntrophobacter sp.
  misc_feature (1)..(228): tr|A0A0S7XRY2|A0A0S7XRY2_9DELT 7-cyano-7-deazaguanine s ynthase OS=Syntrophobacter sp. DG_60 OX=1703361 GN=queC PE=3 SV=1
MKELAIVLVSGGLDSCVTAAVANKDYEPAFLHVNYGQRTEARELRAFKEIADFYNVSKRLIVSVDYLKEIGGSSLINKNLPVPDYKDERMGIPSTYVPFRNTHLIAIAVSWAEVISAKKIFIGAMEEDSSGYPDCREAYFEAYNRLIELGTRPETKIEIETPIIHFKKWEVVKLGAELGAPFHLTWSCYRSEDIACGRCESCILRIKAFKEAGIRDPIVITQYPVDFE

SEQ ID NO: 42783 - protein, 228 aa, Syntrophobacter sp.
  misc_feature (1)..(228): tr|A0A2U3KZK3|A0A2U3KZK3_9DELT 7-cyano-7-deazaguanine s ynthase OS=Syntrophobacter sp. SbD1 OX=2043167 GN=queC PE=3 SV=1
MKKAIVLVSGGVDSTTCLAIAKHEGYGAFALSFDYGQRHRAELEAARRVVKAFDVREHLILKVPLDAIGGSALTSEIEVPKDVALEEMQSRIPVTYVPARNTVFLSLALAWAETLGASDIFIGVNALDYSGYPDCRPEYIESFERMANLALKECVEGRIHMQIHTPLIKMTKAQIIKRGVELGVDFSMTHSCYDPDPFDRACGRCDSCILRRHGFDEAAIADPTKYAP

SEQ ID NO: 42784 - protein, 229 aa, Syntrophobacteraceae bacterium
  misc_feature (1)..(229): tr|A0A3D0H6A8|A0A3D0H6A8_9DELT 7-cyano-7-deazaguanine s ynthase OS=Syntrophobacteraceae bacterium OX=2052185 GN =queC PE=3 SV=1
MPKPRAVVLVSGGMDSCVAAAIAAREFEVAFLHLNYGQRTERRELRAFHEIAAHYGVTRCLAVSMEHLAAIGGSSLTDRSMDVTPADLHATGIPTSYVPFRNANLLAVAVSWAEALKAEAVFIGAVEEDSSGYPDCRRSFYEAYNTVIREGTKPDTHIRIVTPLIEMTKAEIVQQGVELMAPLHLTWSCYQREDVACGTCDSCALRLRGFQHVGVPDPIPYAVRPDYRF

SEQ ID NO: 42785 - protein, 232 aa, Syntrophobacteraceae bacterium
  misc_feature (1)..(232): tr|A0A3D0H8N7|A0A3D0H8N7_9DELT 7-cyano-7-deazaguanine s ynthase OS=Syntrophobacteraceae bacterium OX=2052185 GN =queC PE=3 SV=1
MSAIRKAVVLSSGGIDSTTAMAIARSDGYEIYSLTFSYGQRHAIELVASNKVADALGAREHFVIGIDLGRIGGSALTDDIAVPKDRTEAEIGEGIPVTYVPARNTIFLSYALAWAEVLRASDIFIGVNAIDYSGYPDCRPEYIEAFERMANLATKATVEGEMSIRIQTPLIHMTKAEIIRKGVQLGVDYSITHSCYDPEPSGKSCGECDSCLLRKKGFHEAGLHDPTEYLHQ

SEQ ID NO: 42786 - protein, 231 aa, Syntrophobacterales bacterium
  misc_feature (1)..(231): tr|A0A2M7BK70|A0A2M7BK70_9DELT 7-cyano-7-deazaguanine s ynthase OS=Syntrophobacterales bacterium CG03_land_8_20 _14_0_80_58_14 OX=1974100 GN=queC PE=3 SV=1
MSGRKAVILSSGGIDSTTAMAIARAEGYALYSLTFNYGQRHACELEAARKVADFFRVKKHLVIDIDLRPIGGSALTDQIDVPKGRGVDDMAHEIPVTYVPARNTIFLSYALAWAEVLQAADIFIGVNAVDYSGYPDCRPEFIAAYGQLANLATKTAVEGKLRMHIRAPLISMKKAEIIRKGIELGVDYGLTHSCYDPSPAGKACGRCDSCILRRKGFEDAGVPNPTVYAAP

SEQ ID NO: 42787 - protein, 233 aa, Syntrophobacterales bacterium
  misc_feature (1)..(233): tr|A0A1G3UNB4|A0A1G3UNB4_9DELT 7-cyano-7-deazaguanine s ynthase OS=Syntrophobacterales bacterium GWC2_56_13 OX= 1802287 GN=queC PE=3 SV=1
MSGKKAVVLTSGGIDSTTAMAIARAEGYEIYSLTFNYGQRHTRELEAARKVADFFRVKKHLVIDIDLRTIGGSALTDRIDVPKGRSIDDMAHEIPVTYVPARNTIFLSYALAWAEVLQAADILIGVNAVDYSGYPDCRPEFIAAFERLANLATKAAVEGKLRMHIRAPLISMKKAEIIRKGIELGVDYGLTHSCYDPSPEGKACGRCDSCILRRRGFEDAGVPDPTVYHDGSL

SEQ ID NO: 42788 - protein, 231 aa, Syntrophobotulus glycolicus
  misc_feature (1)..(231): tr|F0T106|F0T106_SYNGF 7-cyano-7-deazaguanine synthase OS=Syntrophobotulus glycolicus (strain DSM 8271 / FlGly R) OX=645991 GN=queC PE=3 SV=1
MEKKRKAVVLLSGGLDSTICAVLACREFGAENVIALTLFYGQKHAREIKSAEAVCEHLGIPEHYTESLPDIFRGAGSTLVDPDKPNPEMTYEELSQAYGISPTYVPFRNANFLSVATTVALVKEADTIFYGAHAEDARNWAYPDCTPEFNGSMASAIYIGSYLKVRLVTPLQWLTKKDIVALGITVNAPFELTWSCYNGQEKACGVCSTCVGRLQAFQENNIRDPIEYEQR

SEQ ID NO: 42789 - protein, 44 aa, Syntrophomonas sp.
  misc_feature (1)..(44): tr|A0A3B8HVZ8|A0A3B8HVZ8_9FIRM Uncharacterized protein OS=Syntrophomonas sp. OX=2053627 GN=DCD98_01465 PE=4 SV =1
MRQALLLDVNLDSLWSCYQDGDEPCGGCSSCITNQDAFRKVGIR

SEQ ID NO: 42790 - protein, 124 aa, Syntrophomonas sp.
  misc_feature (1)..(124): tr|A0A3B8HWS0|A0A3B8HWS0_9FIRM 7-cyano-7-deazaguanine s ynthase (Fragment) OS=Syntrophomonas sp. OX=2053627 GN= DCD98_01460 PE=3 SV=1
MKAVALLSGGLDSVVSMLLASKEVEIVLAITVDYGQRAAKQEIAASQRIAHDMGIPHKVICLPFMMELNSDLLKPDNSCIVNPWVPNRNGLLISLAACLAENLGAQMVICGFNREEAAIFPDNS

SEQ ID NO: 42791 - protein, 233 aa, Syntrophomonas zehnderi
  misc_feature (1)..(233): tr|A0A0E4GC57|A0A0E4GC57_9FIRM 7-cyano-7-deazaguanine s ynthase OS=Syntrophomonas zehnderi OL-4 OX=690567 GN=qu eC PE=3 SV=1
MSDKALVLLSGGLDSTTLLSLAINSLGSKNVSTLSILYGQKHDREVTAARAIADYYNCKHQVYTLPNLFQGYGSTLIDADKENPELSYQEISESYGVSPTYVPFRNGTLLSIATAQALIDGVNYIYYGTHSEDARGFAYPDCTPEFNGAMANAIYVGTYHKVRLLTPLQWLTKREVVELSQSLNTPIHLTYSCYSGREMHCGKCPTCVSRIQAFKQAGLIDPVPYEMPIDWEE

SEQ ID NO: 42792 - protein, 229 aa, Syntrophorhabdaceae bacterium
  misc_feature (1)..(229): tr|A0A1V5CCQ2|A0A1V5CCQ2_9DELT 7-cyano-7-deazaguanine s ynthase OS=Syntrophorhabdaceae bacterium PtaU1.Bin034 O X=1811715 GN=queC PE=3 SV=1
MVKRAVVLSSGGIDSTTAMAIAIRQGYEVYSLTFRYGQRHEIELRAAQKVSAVLGAKEHMVVDIDLGKIGGSALTSRALGVPKARSKAEMESGIPVTYVPARNTIFLSYALAWAEVLEASHVFIGVNVIDYSGYPDCRPEYIQAFEAMANLAIKATVEGRMRIAIETPLISMTKAEIIRRGVELGIDYAITHSCYDPSGDGRACGVCDSCILRKKGFLEAGIKDPTRYL

SEQ ID NO: 42793 - protein, 242 aa, Syntrophorhabdus aromaticivorans
  misc_feature (1)..(242): tr|A0A351U6U1|A0A351U6U1_9DELT 7-cyano-7-deazaguanine s ynthase OS=Syntrophorhabdus aromaticivorans OX=328301 G N=queC PE=3 SV=1
MEKCVVLTSGGLDSTTTLAIAKSLGFELYALTFDYGQRHRREINSAKKAAQCFAVREHRIIVIDLRSFGGSALTDDITMPVREKPGHIDGNPIPITYVPARNTIFLAYALAWAEVIKAHDIFIGVSALDYSGYPDCRPEYIGAFQKMADLATKEAVEGNPVRIRAPLISLSKADTIRRGIELGVDYSITHSCYNPTPSGLACGACDSCLLRRKGFLEAGIEDPATYARPIPTKLHPQGNRVS

SEQ ID NO: 42794 - protein, 227 aa, Syntrophorhabdus sp.
  misc_feature (1)..(227): tr|A0A1V5CGL5|A0A1V5CGL5_9DELT 7-cyano-7-deazaguanine s ynthase OS=Syntrophorhabdus sp. PtaU1.Bin002 OX=1811702 GN=queC PE=3 SV=1
MKKCVVLTSGGLDSTTTLAIAKDLGFELYALTFDYGQRHKHEINSAKKAAQYFAVKEHRIIVIDLRAFGGSALTDDIKVPVRGKPDHTSGDTIPVTYVPARNTIFLAYALAWAEVIRAHDIFIGVSALDYSGYPDCRPEYIEAFQKMANLATKEAVEGNPVNIRAPLLSLSKADTIRRGIELGVDYSITHSCYNPAPSGLACGACDSCLLRRKGFLEAGIEDPTTYA

SEQ ID NO: 42795 - protein, 469 aa, Syntrophorhabdus sp.
  misc_feature (1)..(469): tr|A0A1V5DMN2|A0A1V5DMN2_9DELT 7-cyano-7-deazaguanine s ynthase OS=Syntrophorhabdus sp. PtaU1.Bin153 OX=1811705 GN=queC_2 PE=4 SV=1
MNMVRYVGKTQCDDGAYRRAVDNLEGVLIDWVSTSPNATVSFELDGKAVAPELEGTLLDFTDLGIFIYLADEMVSRAKATDYWTRAIRCLVPVTEPAKWRENQLLLSNTLGLLSGDIWQFDWVPLLFPRSVSRHRQQLPHGFDTVCLFSGGTDSLLGAVQLLREGRKVILVGHQSEGQAASAQKELAEKLCSMFPGKICLVQCRVARSIRKIPEFNLAKKVERSHRPRSFLFLTLGIGIAVRCGIRDVFMPENGLMALNIPLQKSRTGALSTRTAHPSYMINFADLARRITGFDGHIRNPFLTQSKTDMLSGLDPVLSPLVLRSISCARPSRFNDKGVRHCGYCVPCIHRRFALTEAGIDSACHYAFDIFNDFRSTDVSKQQDLRAVVRFATNIANASVTQLQALILSHGYFPPTVGSLIGCSETKDYTPWTDMVQNWARDLLNKLAAVTSSSTRLSLGVPDSGQRIVR

SEQ ID NO: 42796 - protein, 217 aa, Syntrophothermus lipocalidus
  misc_feature (1)..(217): tr|D7CMQ2|D7CMQ2_SYNLT 7-cyano-7-deazaguanine synthase OS=Syntrophothermus lipocalidus (strain DSM 12680 / TGB -C1) OX=643648 GN=queC PE=3 SV=1
MMKAITLLSGGLDSTLCTVLALRDMEVILALTVDYGQKARTREVESAGRIAAFYNIPHRVVEAGFLRTFASGLTRAERSTRSSREVWVPNRNGLFINIAACYAEEMGAEAVLVGFNREEAVDFPDNSPDFVSAVNRSLSYSTRNQVRVISYTMEMDKTEMLREAIRLGIPLHYTWSCYEDGPSPCGVCASCRLLAKARENLDLRATDEHRPGTQLKP

SEQ ID NO: 42797 - protein, 231 aa, Syntrophus aciditrophicus
  misc_feature (1)..(231): sp|Q2LVL3|QUEC_SYNAS 7-cyano-7-deazaguanine synthase OS =Syntrophus aciditrophicus (strain SB) OX=56780 GN=queC PE=3 SV=1
MSPKKKAVVLLSGGLDSATTMAIAKAENYELYALTFQYGQRHAVELEAARRIAAALGAKEHLFISIDLRIIGGSALTGPFEVPKKQEGEETSAEIPVTYVPARNTIFLSYALAWAEVLQISEIFIGVNAVDYSGYPDCRPEYITAFEAMANLAIKAAVEGTMRVKIRTPLIDLSKADIIRKGMALSVDYGLTHSCYDPLPDGKPCGQCDSCHLRRKGFREAGFDDPAFSET

SEQ ID NO: 42798 - protein, 296 aa, Syntrophus aciditrophicus
  misc_feature (1)..(296): tr|Q2LUY4|Q2LUY4_SYNAS GMP synthase (Glutamine-hydrolyz ing) OS=Syntrophus aciditrophicus (strain SB) OX=56780 GN=SYN_00475 PE=4 SV=1
MQETGRGKGRQYSGNSGFSVQREMQMSRSQKYDILVNFLKSYGSCAVAFSGGVDSTFLLWAAREALGDSVTALTASAPYMPKEEICEAGRIAETIGVRHAVLEIPLNEEIRFNPDDRCFRCKRQLFSAMKAEADQRGIPSVLDGSNLDDLQDYRPGMKALKELKVPSPLLEQRWRKKEIRKIGREIGLPNWQKAPDACLLSRMPYGHEITLRELDRIEKAENYLRESGFRCVRVRSHGNLARIEVGREERRDFFRETILDDVSRALKALGYVFVALELEGYESGNMNRSLLKSASS

SEQ ID NO: 42799 - protein, 232 aa, Syntrophus gentianae
  misc_feature (1)..(232): tr|A0A1H7WB72|A0A1H7WB72_9DELT 7-cyano-7-deazaguanine s ynthase OS=Syntrophus gentianae OX=43775 GN=queC PE=3 S V=1
MNEQKKAVVLLSGGLDSATTMAIARAEGYELYALTFQYGQRHAIELEAARRLAAALGAKEHLIVSLDLSIIGGSALTGSLEVPKRDSLEEGEAEGIPVTYVPARNTIFLSYALAWAEVLEIAEIFIGVNAVDYSGYPDCRPEYIAAFETMANLATKACVEGKVRLKIRTPLILLSKADIIRKGMALGVDYGMTHTCYDPLPDGRACGQCDSCHLRLKGFREAGFEDPAFSGR

SEQ ID NO: 42800 - protein, 232 aa, Syntrophus sp.
  misc_feature (1)..(232): tr|A0A1V5DYB3|A0A1V5DYB3_9DELT 7-cyano-7-deazaguanine s ynthase OS=Syntrophus sp. PtaU1.Bin208 OX=1811713 GN=qu eC PE=3 SV=1
MNEEKKAVVLLSGGLDSATTMAIAKAEGYELYALTFQYGQRHAIELEAARRIAAAFDAREHLIVSLDLRIIGGSALTGSLEVPKRDVHEEGEDAGIPVTYVPARNTIFLSYALAWAEVLQIAEIFIGVNAVDYSGYPDCRPEYIAAFENMANLATKACVEGKMRLKIRTPLILLSKADIIRKGMALGVDYGMTHTCYDPLPDGRACGRCDSCHLRLKGFREAGFEDPAFSGR

SEQ ID NO: 42801 - protein, 232 aa, Syntrophus sp.
  misc_feature (1)..(232): tr|A0A1V4Y0X6|A0A1V4Y0X6_9DELT 7-cyano-7-deazaguanine s ynthase OS=Syntrophus sp. PtaB.Bin138 OX=1811711 GN=que C PE=3 SV=1
MNSDRRAVILLSGGLDSTTTMAIAKAEGYELYALTFQYGQRHAIELEAARRIANALGAKEHLIVPLDLSIIGGSALTGHLEVPKRDSPEEGEGVEIPVTYVPARNTIFLSYALAWAEVLQTGEIFIGVNAVDYSGYPDCRPEYIAAFETMANLATKACTEGGMRLKIRAPLILLSKADIIRKGMALGVDYGMTHTCYDPLPDGRACGRCDSCHLRRKGFREAGYEDPAFSEK

SEQ ID NO: 42802 - protein, 222 aa, Tahibacter aquaticus
  misc_feature (1)..(222): tr|A0A4R6Z9R2|A0A4R6Z9R2_9GAMM 7-cyano-7-deazaguanine s ynthase OS=Tahibacter aquaticus OX=520092 GN=queC PE=3 SV=1
MSKPAVVLVSGGMDSAVVLAIAREQGFSCHALSVAYGQRHVSELDASDRVCALLGAAAHKTVTVDLRSIGGSALTADIAVPEQGGAGIPITYVPARNTIMLSIALGWAEVLGSSDIFCGVNAVDYSGYPDCRPAFIDSFQQLANLATKAGVEGAGIRVHAPLMRMSKADIARQGQRLGVDFAVTVSCYQADEKGRACAHCDACRLRAEGFRDAGMIDPTRYR

SEQ ID NO: 42803 - protein, 465 aa, Tamaricihabitans halophyticus
  misc_feature (1)..(465): tr|A0A4R2RAD1|A0A4R2RAD1_9PSEU 7-cyano-7-deazaguanine s ynthase in queuosine biosynthesis OS=Tamaricihabitans h alophyticus OX=1262583 GN=EV191_101606 PE=4 SV=1
MPGGVFRFDFAERQTENPRTGLTPLSENDFKSTTDRLESTVQLASGITPRWAEDLLRIARVVYLVDKRAPRSSSPDRWTRDITLSIQVIDPDLWTDAILALINRTLQVMSGDVWRIEVRGGATSIDSKYRLLEVGQISELTLFSGGLDSGSYAAERVANGARGLLLIAHDHADSASTQQTLANAIDQDRRVTRLAQVRDEPKRAAGVRLESSTRTRGFLFVATAIYVASGYGLPEVAIPENGLVAVNPPLSPDRIGSNSTRSTHPWVLERLNEVLRTIGGDIVIRNPYLLLTKGEVCTRARDAGVSPQVIASTVSCGQAPQTRKDFANCGYCYPCLVRRAGLQAAYDQDPTIYQRDLTQLKSKRQRQHLDDVARWLSRSFNVRDLIADMPTPTQPSPRALLPVIKRSQAELRDLVLEHSDRNVPGQRCAHMPGRAPTEPLATEATGPGPARTWDPPASQIDRTAQ

SEQ ID NO: 42804 - protein, 225 aa, Tamilnaduibacter salinus
  misc_feature (1)..(225): tr|A0A2A2I0B5|A0A2A2I0B5_9ALTE 7-cyano-7-deazaguanine s ynthase OS=Tamilnaduibacter salinus OX=1484056 GN=queC PE=3 SV=1
MSQSVVVIYSGGMDSFTLLHRARRDGYRVHAISFDYGQRHVRELTAARAVCEREGIPHRTVDLAGLGGLLSGSALTDDTPVPEGHYEEDTMKATVVPNRNMILLSLATGYAVTVGADRVWFGAHGGDHAIYPDCRPEFVEKMDAACRVANYEPVQVEAPYLALDKTEILSEGLAMGLDYSQTWTCYNGREAACGRCGSCVERLEAFAHHGVSDPLPYETRHVPEA

SEQ ID NO: 42805 - protein, 228 aa, Tannerella forsythia
  misc_feature (1)..(228): tr|A0A0E4FPD7|A0A0E4FPD7_TANFO 7-cyano-7-deazaguanine s ynthase OS=Tannerella forsythia KS16 OX=1307833 GN=queC PE=3 SV=1
MKDEIALVVFSGGQDSTTCLYWAKKHFKEVRALTFLYGQKHRAEVDVAREITRQASVECEVMDVSFVGGLGRNALTDPTLTMDKEKPADSVPNTFVPGRNLFFLSIAAVYASEHAIRHLVTGVSQTDFSGYPDCRDAFVKSLNVTLNLAMDKSFVIHTPLMWLDKAGVWELADELGVFDLIRRETLTCYNGIVGDGCGECPACQLRREGLEKYHREKNKESFSFQQPC

SEQ ID NO: 42806 - protein, 229 aa, Tannerella forsythia
  misc_feature (1)..(229): tr|A0A1D3UXE9|A0A1D3UXE9_TANFO 7-cyano-7-deazaguanine s ynthase OS=Tannerella forsythia OX=28112 GN=queC PE=3 S V=1
MMKDEIALVVFSGGQDSTTCLYWAKKHFKEVRALTFLYGQKHRAEVDVAREITRQASVECEVMDVSFVGGLGRNALTDPTLTMDKEKPADSVPNTFVPGRNLFFLSIAAVYASEHAIRHLVTGVSQTDFSGYPDCRDAFVKSLNVTLNLAMDKSFVIHTPLMWLDKAGVWELADELGVFDLIRRETLTCYNGIVGDGCGECPACQLRREGLEKYHREKNKESFSFQQPC

SEQ ID NO: 42807 - protein, 221 aa, Tannerella sp.
  misc_feature (1)..(221): tr|W2C9G9|W2C9G9_9BACT 7-cyano-7-deazaguanine synthase OS=Tannerella sp. oral taxon BU063 isolate Cell 5 OX=14 10950 GN=queC PE=3 SV=1
MKTGTRHDAALVVFSGGQDSTTCLFWAKEHFAEVRALTFLYGQKHREEVNVAQRIARTADVAWDVLDASFIASLGTSALTDTCILMDSEKPAEGPPNTFVPGRNLFFLSMAAVYAAERGIRHLVTGVSETDFSGYPDCRDTFVRSLNVTLNLAMDAQFVIHTPLMWLDKADVWALSDRLGVFDLVRRETLTCYNGVLGDGCGHCPACRLRHEGLERYLARR

SEQ ID NO: 42808 - protein, 220 aa, Tannerella sp.
  misc_feature (1)..(220): tr|A0A396MYI3|A0A396MYI3_9BACT 7-cyano-7-deazaguanine s ynthase OS=Tannerella sp. AF04-6 OX=2293248 GN=queC PE= 3 SV=1
MKQKETALVCFSGGQDSTTCLFWALSHFESVEAVCFIYGQKHVKEVDVARKIAAEAGVPFEVLDVSLIGQLTHNSLTDSSMVMDKEKPEDSYPNTFVPGRNMVFLTFAAIKAFQKGIRHLVTGVSQADFSGYPDCRDTFVRSLNVSLNLAMDTHFEIHTPLMWRDKEAVWRLSDELGVFDLVRNETLTCYNGILADGCGECPACKLRKHGLDLYLKHRNG

SEQ ID NO: 42809 - protein, 197 aa, Tanticharoenia sakaeratensis
  misc_feature (1)..(197): tr|A0A0D6MLU4|A0A0D6MLU4_9PROT 7-cyano-7-deazaguanine s ynthase OS=Tanticharoenia sakaeratensis NBRC 103193 OX= 1231623 GN=Tasa_020_004 PE=3 SV=1
MRAILLSGGMDSIALGYWKRPEVAITVDYGQRAAEAEMRAAARVSDELGIRHELVRIDCSALGSGDMAGVPALDAAPVPEWWPYRNQMLITFAAMRGIAIGVNELMLGSIASDASHADGRPEFYAMMDKILVGQEGGMRVVAPAIGMTTAELVRASGVPRSLLSWAHSCHFGNLACGACRGCVKHYQVAHEIYGDAY

SEQ ID NO: 42810 - protein, 239 aa, Tanticharoenia sakaeratensis
  misc_feature (1)..(239): tr|A0A0D6MJ33|A0A0D6MJ33_9PROT 7-cyano-7-deazaguanine s ynthase OS=Tanticharoenia sakaeratensis NBRC 103193 OX= 1231623 GN=queC PE=3 SV=1
MLSSDTALVLFSGGQDSATCLAWALARHAHVETIGFDYGQRNRIELDVRDTVRTRMGALDADWSERLGADHVLDLGILGQISDTAMTRDVTIAMQANGLPNTFVPGRNLLFLTFAAALAYRRGARHIVTGVCETDYSGYPDCRDDTIKAMQVALNLGMDTRFVLQTPLMWRDKAQTWTLAQETGGAALVELIRRETHTCYEGERTHLHDWGYGCGTCPACALRAEGWKRFRAQSGIAAS

SEQ ID NO: 42811 - protein, 238 aa, Tardiphaga robiniae
  misc_feature (1)..(238): tr|A0A161QRG2|A0A161QRG2_9BRAD 7-cyano-7-deazaguanine s ynthase OS=Tardiphaga robiniae OX=943830 GN=queC PE=3 S V=1
MSDTFPDQTALVLFSGGQDSATCLAWALARFNRVEMLGFSYGQRHAIELDSRDKLLAGVKALNPGWAAKLGDSHTLDIPTLSAISDTALTRDVAIEMGADGLPNTFVPGRNLVFLTFAAALAYRRGITHIIGGMCETDYSGYPDCRDDTIKALQQALNLGMAKNFTLHTPLMWRDKAATWALAHELGGQGLVDLIREHSHTCYLGERGALHDWGYGCGKCPACELRAKGWRAFAATAV

SEQ ID NO: 42812 - protein, 238 aa, Tardiphaga sp.
  misc_feature (1)..(238): tr|A0A2U0U1U4|A0A2U0U1U4_9BRAD 7-cyano-7-deazaguanine s ynthase OS=Tardiphaga sp. OV697 OX=2135487 GN=queC PE=3 SV=1
MTETFPNETALVLFSGGQDSATCLAWALARFRRVEMLGFAYGQRHAIELDSRDKLLAGVKALNADWAAKLGDSHTLDIPTLSDISETALTRDVAIEMGDDGLPNTFVPGRNLVFLTFAAALAYRRGITHIIGGMCETDYSGYPDCRDDTIKALQQALNLGMARNFTLHTPLMWRDKAATWALADELGGQGLVDLIREHSHTCYLGERGALHEWGYGCGKCPACELRAKGWRAFAATAV

SEQ ID NO: 42813 - protein, 238 aa, Tardiphaga sp.
  misc_feature (1)..(238): tr|A0A5A7W1E6|A0A5A7W1E6_9BRAD 7-cyano-7-deazaguanine s ynthase OS=Tardiphaga sp. P9-11 OX=2024614 GN=queC PE=3 SV=1
MSDTVQDQTALVLFSGGQDSATCLAWALARFKRVEMLGFAYGQRHAIELDSRDKLLAGVKALNANWAAKLGDSHTLDIPTLSAISDTALTRDVAIEMGADGLPNTFVPGRNLVFLTFAAALAYRRGITHIIGGMCETDYSGYPDCRDDTIKALQQALNLGMAKNFTLHTPLMWRDKAATWALAHELGGQGLIDLIREHSHTCYLGERGALHDWGYGCGKCPACELRAKGWRAFAATAV

SEQ ID NO: 42814 - protein, 223 aa, Tatlockia micdadei
  misc_feature (1)..(223): tr|A0A098GAM4|A0A098GAM4_TATMI 7-cyano-7-deazaguanine s ynthase OS=Tatlockia micdadei OX=451 GN=queC PE=3 SV=1
MKKAVVLLSGGLDSTTCLAIAQEKGFACYALSFAYGQRHSAELAAAYRVAKHFSVAEHRIIDLDIGQLGGSALTDKSIQVPDYSGSPEIPVTYVPARNTVFLSYALGFAEVIGARDIFIGVSSVDYSHYPDCRPEYIAAFQTLANLATKAGVEGDSFSLHAPLQHLSKAETILVGSKLGVDYALTVSCYQATESGKACGRCDSCRFRKQGFEAAQLPDPTFYV

SEQ ID NO: 42815 - protein, 231 aa, Tatumella citrea
  misc_feature (1)..(231): tr|A0A1Y0LI37|A0A1Y0LI37_TATCI 7-cyano-7-deazaguanine s ynthase OS=Tatumella citrea OX=53336 GN=queC PE=3 SV=1
MKIAVVVFSGGQDSTTCLIQALNQYDEVHCVTFDYGQRHRQEIEVARDLCQQLGARAHKVLDVTLLNELAISSLTRDNIPVPAYDPDGNGLPSTFVPGRNILFLTLASIYAYQVNAEAVITGVCETDFSGYPDCRDDFVKALNTAVQLGMARDVRFETPLMWLNKAETWALADYWQQLPLIRHSTLTCYNGIQGDGCGECAACHLRAKGLAEYQQAPQAVMDAMKSKTGLR

SEQ ID NO: 42816 - protein, 231 aa, Tatumella morbirosei
  misc_feature (1)..(231): tr|A0A095TEU7|A0A095TEU7_9GAMM 7-cyano-7-deazaguanine s ynthase OS=Tatumella morbirosei OX=642227 GN=queC PE=3 SV=1
MKSAVVVFSGGQDSTTCLIQALNQYDEVHCVTFDYGQRHRQEIEVARKLSQQLGARAHKVLDVTLLNELAISSLTRDNIPVPAYDPDGNGLPSTFVPGRNILFLTLASIYAYQVNAEAVITGVCETDFSGYPDCRDDFVKALNTAVQLGMARDVRFETPLMWLNKAETWALADYWQQLPLIRNSTLTCYNGVQGDGCGECAACHLRAKGLAEYQQSPKAIMNAMKSKTGLS

SEQ ID NO: 42817 - protein, 231 aa, Tatumella ptyseos
  misc_feature (1)..(231): tr|A0A085JAR6|A0A085JAR6_9GAMM 7-cyano-7-deazaguanine s ynthase OS=Tatumella ptyseos ATCC 33301 OX=1005995 GN=q ueC PE=3 SV=1
MKSAVVVFSGGQDSTTCLIQALNQYDEVHCVTFDYGQRHRQEIDVARQLSQQLGACAHKVLDVTLLNELAISSLTRDNIPVPAYSPDSNGLPSTFVPGRNILFLTLASIYAYQVDAEAVITGVCETDFSGYPDCRNDFVKALNHAVELGMARNVRFETPLMWLNKAETWALADYWKQLPLVRTATLTCYNGIQGDGCGECAACHLRARGLEDYQQNAHAVMDAMKQKTGLA

SEQ ID NO: 42818 - protein, 231 aa, Tatumella ptyseos; identical to SEQ ID NO: 42817
  misc_feature (1)..(231): tr|A0A2X5PAP9|A0A2X5PAP9_9GAMM 7-cyano-7-deazaguanine s ynthase OS=Tatumella ptyseos OX=82987 GN=queC PE=3 SV=1

SEQ ID NO: 42819 - protein, 231 aa, Tatumella sp.
  misc_feature (1)..(231): tr|A0A2G8BSI7|A0A2G8BSI7_9GAMM 7-cyano-7-deazaguanine s ynthase OS=Tatumella sp. OPLPL6 OX=1928657 GN=queC PE=3 SV=1
MKKAVVVFSGGQDSTTCLVQAIQHYDEVHCITFDYGQRHQQEIDIAKQLTQRLGVAAHKVMDVTLLNELAISSLTRDNIPVPGYQPNATELPSTFVPGRNILFLTLASIYAYQVEAEAVITGVCETDFSGYPDCRDEFVKALNQAVVLGMAKDVRFETPLMWLNKAETWALADYLGQLPLIKDHTLTCYNGIAGSGCGECAACHLRAKGLEQYLNAPDETMRALKSKNHLS

SEQ ID NO: 42820 - protein, 222 aa, Taylorella asinigenitalis
  misc_feature (1)..(222): tr|G4QDN0|G4QDN0_TAYAM 7-cyano-7-deazaguanine synthase OS=Taylorella asinigenitalis (strain MCE3) OX=1008459 G N=queC PE=3 SV=1
MENKALVIFSGGQDSTTCLLQAIEKYGVSNVETITFLYGQRHDIELQKAREIVTELGVKQTILDLSVIKGITSNALMEEGAEIGQNEDGLPNTFVDGRNALFILYACIYAKSQGIRNIVIGVCETDFSGYPDCRDIFVKSMNVSMNLAMNFDFVIHTPLMWLTKAQTWELADKLGYLEFVRNRTHTCYEGVEGGCGKCPSCILRNRGLEEYLASKDESSKNV

SEQ ID NO: 42821 - protein, 222 aa, Taylorella asinigenitalis
  misc_feature (1)..(222): tr|I7ILK8|I7ILK8_9BURK 7-cyano-7-deazaguanine synthase OS=Taylorella asinigenitalis 14/45 OX=1091495 GN=queC P E=3 SV=1
MENKALVIFSGGQDSTTCLLQAIEKYGVSNVETITFLYGQRHDIELQKAREIVVELGVKQTILDLSVIKGITSNALMEEGAEIGQNEDGLPNTFVDGRNALFILYACIYAKSQGICNIVIGVCETDFSGYPDCRDIFVKSMNVSMNLAMNFDFVIHTPLMWLTKAQTWELADKLGYLEFVRNRTHTCYEGVEGGCGKCPSCILRNRGLEEYLASKDESSKNV

SEQ ID NO: 42822 - protein, 222 aa, Taylorella equigenitalis
  misc_feature (1)..(222): tr|I7JKP3|I7JKP3_9BURK 7-cyano-7-deazaguanine synthase OS=Taylorella equigenitalis 14/56 OX=1091497 GN=queC PE =3 SV=1
MSEKALVVFSGGQDSTTCLLQAIENFGVGNVKAITFIYGQRHEIELKKAREIAIDLGIEQTILDLSVMKSITTNALMQKGAEIKTDESGLPNTFVDGRNALFLLYSCIYAKSQGIKNIVIGVCETDFSGYPDCRDIFVKSMNVSMNLAMDYDFVIHTPLMWLTKAQTWELADKLGRLDYVRTRTHTCYEGVEGGCGNCPSCVLRNRGLEEYLNSKNESSKNV

SEQ ID NO: 42823 - protein, 230 aa, Telmatospirillum siberiense
  misc_feature (1)..(230): tr|A0A2N3PQT2|A0A2N3PQT2_9PROT 7-cyano-7-deazaguanine s ynthase OS=Telmatospirillum siberiense OX=382514 GN=que C PE=3 SV=1
MSQKPKAVVLLSGGLDSATCLAIARDRGFAPLAISFRYGQRHLHELAAAARLAKALGAQRHMVADIDLRAFGGSALTADIAVPKDRAEGEMSSGIPITYVPARNTIFLSFALALAEVEQAQDIYIGVNAVDYSGYPDCRPDFIAAFEKMANLATKAAVGDGRRLTVHTPLITLSKAEIIKTGLKLGVDYGMTTSCYDPTPEGLACGHCDACKLRLKGFAEAGLTDPAPYA

SEQ ID NO: 42824 - protein, 199 aa, Tenacibaculum sp.
  misc_feature (1)..(199): tr|A0A2G1BVH8|A0A2G1BVH8_9FLAO 7-cyano-7-deazaguanine s ynthase OS=Tenacibaculum sp. 4G03 OX=2045443 GN=CSC81_0 6270 PE=3 SV=1
MANVKKAVLLSGGIDSICLTYGIMPDIAYTIDYGQTVSKRELYVSKYICEKLDIEHKIIKIDCRSLGSGTLANSENLKLSPSDEWWPFRNQLLITFAAMQAIKDEVKELYLSSVKSDGFHRDGTKEFYKLINNLVSYQEGQIKVICPTLDYYSHELALKYKVPINLLSIAHSCHISNFACGKCSGCIKQLKVRYELKIA

SEQ ID NO: 42825 - protein, 257 aa, Tengunoibacter tsumagoiensis
  misc_feature (1)..(257): tr|A0A402AAC1|A0A402AAC1_9CHLR 7-cyano-7-deazaguanine s ynthase OS=Tengunoibacter tsumagoiensis OX=2014871 GN=q ueC PE=3 SV=1
MSKSQSRNHAVLIVSGGMDSCVLSYYYAAAGFDLHLLSFNYGQKHLKELTYAKRYVTHLRERFGQGPRAIQVSYDIIDLPIARLLTNSDSALINADLEMPKGHYTDDSMKATVVPYRNPNMLLQAATVAWNEHASVVAFAAHQGDYSQYPDCREVFVDSFNAMLAAAMNSEEIKVESPFMRFTKAQIAALGSSLSVPFELTWSCYEGGNNGLGDQHCGSCGTCVERYEAFKLAGIPDPTVYANNPERFLAIPGQSNL

SEQ ID NO: 42826 - protein, 455 aa, Tengunoibacter tsumagoiensis
  misc_feature (1)..(455): tr|A0A402A7I3|A0A402A7I3_9CHLR Uncharacterized protein OS=Tengunoibacter tsumagoiensis OX=2014871 GN=KTT_49730 PE=4 SV=1
MKSDFDYTYEYQSIHDELKKGHVLRVDHWTGEARNLNIALWDRDLLLRTTADEVSSLIADLSDLAVAVYVADHLSERRKKRTTRLLINLPIRSVELRERSTFKQELRDLLYWFTEDLWSFQFSTYRTNGRQSELHKRLISDYPKSSRRVALWSGGLDALAGLYLQLVQEPETDYTLVSTGSSLMMGGKQKKVFQQMNEIFPGRLKLIQLPIRLGKKEVKTEQGNRTRGFVFLLLGALCALQEMQHTLYIHENGIGAINLPFRDCEVGLDHSRSVHPLTLARMGTFLEKLLGHPFSFENPFLGTTKAEMCQRLLREHPEIVFSTMSCDHWHREIPLQCGYCSSCLLRRQAIAVSGIEDTLSYRITAAKDRKRQKTDGVHLRAMLAQVDTLRDIRDTKEGDIWGALIAKYPVLDDIVRQDERAEKQQQVKNQLLHLYQTYVKEWDQVSPLIQEDMHL

SEQ ID NO: 42827 - protein, 219 aa, Tepidibacter formicigenes
  misc_feature (1)..(219): tr|A0A1M6NVM0|A0A1M6NVM0_9FIRM 7-cyano-7-deazaguanine s ynthase OS=Tepidibacter formicigenes DSM 15518 OX=11233 49 GN=queC PE=3 SV=1
MNKEKAVVVFSGGQDSTTCLFWAKKKFKEVIAVSFDYNQKHKFELECAKDICKKYNVEHHILDLGLLNQLAPNSLTRVDIEVDKETPKDSLPNSFVDGRNMLFLTFVGVFAKQRGINNIITGVSQSDFSGYPDCRDVFIKSLNVTLNLAMDYQFEIHTPLMWINKAQTWELADELEVLDIIKNETLTCYNGIIGDGCGECPACKLRMNGYIEYMKSKEK

SEQ ID NO: 42828 - protein, 219 aa, Tepidibacter thalassicus
  misc_feature (1)..(219): tr|A0A1M5QNH1|A0A1M5QNH1_9FIRM 7-cyano-7-deazaguanine s ynthase OS=Tepidibacter thalassicus DSM 15285 OX=112335 0 GN=queC PE=3 SV=1
MNKEKAVVVFSGGQDSTTCLFWAKKRFKEVIAVSFDYNQKHKLELECAKDICKKYNVEHHILDLGLLNQLAPNSLTRVDIKVDKEAPKEGLPNSFVDGRNMLFLTFVAVFAKQRGINNIITGVSQSDFSGYPDCRDVFIKSLNVTLNLAMDYQFEIHTPLMWIDKAETWKLADDLGVLDIIKKETLTCYNGIKGDGCGECPACKLRMNGYIEYMKSKNE

SEQ ID NO: 42829 - protein, 249 aa, Tepidicaulis marinus
  misc_feature (1)..(249): tr|A0A081B8Y4|A0A081B8Y4_9RHIZ 7-cyano-7-deazaguanine s ynthase OS=Tepidicaulis marinus OX=1333998 GN=queC PE=3 SV=1
MTSKASPTESPAKDGAKRALVLFSGGQDSTVCLAWALQRFEAVETVGFSYGQAHSVEMTCREKVRAEIARHFPGWASRLGPDHVLDLAELGRISETALTSDMEIEMGENGLPNTFVPGRNLLFLTYAAALGYRRGAQALVGGMCETDYSGYPDCRAATMKAMESALSLGMDKAYTIETPLMWLDKAATWALAEKLGGETLIEIIREQTHTCYRGERTHRHEWGYGCNDCPACALRRQGYEAWMKRQAHV

SEQ ID NO: 42830 - protein, 704 aa, Tepidicella xavieri
  misc_feature (1)..(704): tr|A0A4R6U7W9|A0A4R6U7W9_9BURK 7-cyano-7-deazaguanine s ynthase in queuosine biosynthesis OS=Tepidicella xavier i OX=360241 GN=DFR43_11051 PE=4 SV=1
MQDKRYILCGNVSAKGISEDPARDLRLRLSGRAGFGNITLRIEDVHTKMFRGVPPLFHDLLEIATYVYSADQAVRRGADDVDTFGNGWRRDLHFVVPVRNPDFWNRRDVREALCSTLGFLSDDQYQFDFVRLDQDHQFQEYLEFNDTQQMYGMPEQVVMFSGGLDSLAGAIDEVVNQRRRVVLVTHKSTSKLNKRHRVLEEMLAAKSGDNVPHRITVRVHKTKGLNHEYTQRSRSFLYVSIGATIARMLGLKSVRFYENGVISLNLPVCAQVVGGRATRTTHPRVMKGFQDIITLVAGEPFIVENPYIWKTKADVVKVITNAGCHDLIKHSMTCTHTWEMSNQHTHCGGCSQCIDRRFAVLAAKADQHDPVEHYKVDVFTQSRKKDEDKIMAAAYLERANQVKNLTGVADFISSYPDVGRVLKYLNTSAGQAAQRVFDLYKRHAEEVTGAVDELGRRYFTQIRERSLPGDCLLRTVYESASVNSIPAVVSVEKQPENFFRKRGAVWEVRFQGRNTICLLNVDKGAEYINLLLAFPERELSVYEIACGSAANAVDLPTNSGVAPEEIEDGFQVVTGAPLTDAGDVADRRALREWQQRARELLGEIGEARDSGDHARVEEIEEEMAFLTKALEGGKGLGGRQRKAGDKRKNVRDAFRNAVDRAIKQIEKYDKPLAEHLKASIKHGNEVVYRPGMPITWEVRPIVNT

SEQ ID NO: 42831 - protein, 227 aa, Tepidiphilus thermophilus
  misc_feature (1)..(227): tr|A0A0K6IMZ1|A0A0K6IMZ1_9PROT 7-cyano-7-deazaguanine s ynthase OS=Tepidiphilus thermophilus OX=876478 GN=queC PE=3 SV=1
MKDVSSRNAVVLLSGGLDSSTVLAIARAEGYRPYALSVAYGQRHDAELAAAARVARALGAVEHRVARVDLGVFGGSALTDEAIAVPETPTEGIPVTYVPARNTVLLSVALAWAEVLGARDLFIGVNAVDYSGYPDCRPEFIAAFEALANVATKAGVEGARFRVHAPLMHLSKAEIIRRGLELGVDYALTVSCYQADEEGRACGRCDACRLRAQGFAAAGVPDPTRYR

SEQ ID NO: 42832 - protein, 224 aa, Terasakiispira papahanaumokuakeensis
  misc_feature (1)..(224): tr|A0A1E2V6J4|A0A1E2V6J4_9GAMM 7-cyano-7-deazaguanine s ynthase OS=Terasakiispira papahanaumokuakeensis OX=1974 79 GN=queC PE=3 SV=1
MSTQPAPARAVVIYSGGMDSFTVLHQALAEGYDVYPVSFHYGQRHAKELECARAVCESLKLKHQVIDLRSITPLIDNSALTGDIEVPQGDYAPDNLATTVVPNRNMIMLSLAVGYAVNIEAGICFYGAHGGDHVIYPDCRPEFVEAMNSVSQIANLQPVKIHAPFLLDDKASILRRGLDLGLDYSQTWTCYQGEAKACGQCSACRERLGAFAACHITDPIAYQA

SEQ ID NO: 42833 - protein, 237 aa, Teredinibacter sp.
  misc_feature (1)..(237): tr|A0A509DWW6|A0A509DWW6_9GAMM 7-cyano-7-deazaguanine s ynthase OS=Teredinibacter sp. ISS155 OX=2584524 GN=queC PE=3 SV=1
MANTSDDNTMTKPKAVVLTSGGLDSTTVIAIAQSQGYECYSLSFDYGQRHRAELNAAQKVAESMQVTEHKVVNLDLRTIGGSALTDDQISVPDAASEASTDIPVTYVPARNTVFLSIALGWAEVLGANAIFIGVNAVDYSGYPDCRPQFIEAFQQMANLATKAGVEGAGLEIHTPLIHMTKAEIIQMGISLGVDYAKTVSCYSANSAGEACGKCDSCSLRAKGFADAGVKDPTHYSV

SEQ ID NO: 42834 - protein, 224 aa, Teredinibacter turnerae
  misc_feature (1)..(224): tr|C5BQS5|C5BQS5_TERTT 7-cyano-7-deazaguanine synthase OS=Teredinibacter turnerae (strain ATCC 39867 / T7901) OX=377629 GN=queC PE=3 SV=1
MSKKAVVLVSGGLDSATVLAMAKDQGYECFTLSFDYGQRHRAELQAAERVAQAMGAAQHKVVSLDLRTIGGSALTDDSISVPEGETSGIPVTYVPARNTVFLSIALGWAEVVGAQAIFIGVNAVDYSGYPDCRPEYIKAYQAMADLATKAGVEGRGVAIKTPLIELSKADIICHGHALHVDYALTVSCYQADDDGRACGKCDSCRLRRRGFLDAGVEDSTRYAG

SEQ ID NO: 42835 - protein, 232 aa, Terrabacter aerolatus
  misc_feature (1)..(232): tr|A0A512D5E4|A0A512D5E4_9MICO 7-cyano-7-deazaguanine s ynthase OS=Terrabacter aerolatus OX=422442 GN=queC PE=3 SV=1
MGRKAVVLLSGGLDSTTVLAVAKDQGFEPYAISFRYGQRHVVELEAARRVAQAAGVERHVVCDIDLRIFGGSALTADVDVPKHQSAEELSEDDIPITYVPARNTVFLSLALAYAEVVGATDIFIGVNALDYSGYPDCRPEYIVSYERMANLATRAGVEGNELKIHTPLISLTKAETVELGTRLRVDYSLTLSCYDPDDQGRACGHCDSCLLRLRGFADAGLVDPVIYQEATA

SEQ ID NO: 42836 - protein, 219 aa, Terribacillus aidingensis
  misc_feature (1)..(219): tr|A0A285PAK2|A0A285PAK2_9BACI 7-cyano-7-deazaguanine s ynthase OS=Terribacillus aidingensis OX=586416 GN=queC PE=3 SV=1
MKKEKAIVVFSGGQDSTTCLFWAMQQYEEVEAVTFNYNQRHSLEIEVAEQIAKEQGIKHHVLDMSLLNQLAPNALTRDDIEIEEQEGELPSTFVPGRNLVFLSFAAILAHQVGAKHLVTGVCETDFSGYPDCRDVFVKSLNVSLNLSMDKDFVIHTPLMWLDKAETWELADQLGQLDYVKENTLTCYNGVIAEGCGECPACKLRQNGLDQYEAKKAAQV

SEQ ID NO: 42837 - protein, 219 aa, Terribacillus goriensis
  misc_feature (1)..(219): tr|A0A075LGP9|A0A075LGP9_9BACI 7-cyano-7-deazaguanine s ynthase OS=Terribacillus goriensis OX=386490 GN=queC PE =3 SV=1
MKKDKAIVVFSGGQDSTTCLFWAMEQFEEVEAVTFNYNQRHSLEIEVAEQIAKEQGIRHHVLDMSLLNQLAPNALTRDDIEIEQQEGELPSTFVPGRNLVFLSFAAILAHQVGAKHLVTGVCETDFSGYPDCRDIFVKSLNVSLNLSMDKDFVIHTPLMWLDKAETWEMADQLGQLDYVKEKTLTCYNGIVAEGCGECPACKLRQNGLDQYEAKKAAGV

SEQ ID NO: 42838 - protein, 219 aa, Terribacillus halophilus
  misc_feature (1)..(219): tr|A0A1G6RTU9|A0A1G6RTU9_9BACI 7-cyano-7-deazaguanine s ynthase OS=Terribacillus halophilus OX=361279 GN=queC P E=3 SV=1
MKKGKAIVVFSGGQDSTTCLFWAMEQFEEVEAVTFNYNQRHSLEIEVAEQIAKEQGIRHHVLDMSLLNQLAPNALTRDDIEIEQEEGELPSTFVPGRNLVFLSFAAILAHQVGAKHLVTGVCETDFSGYPDCRDIFVKSLNVSLNLSMDKDFVIHTPLMWLDKAETWEMADQLGQLEYVKEKTLTCYNGIVAQGCGDCPACKLRQNGLDQYEAKKAAKV

SEQ ID NO: 42839 - protein, 219 aa, Terribacillus saccharophilus
  misc_feature (1)..(219): tr|A0A268HDQ9|A0A268HDQ9_9BACI 7-cyano-7-deazaguanine s ynthase OS=Terribacillus saccharophilus OX=361277 GN=qu eC PE=3 SV=1
MKKGKAIVVFSGGQDSTTCLFWAMEQFEEVEAVTFNYNQRHSLEIEVAEQIAKEQGIRHHVLDMSLLNQLAPNALTRDDIEIEQQEGELPSTFVPGRNLVFLSFAAILAHQVGAKHLVTGVCETDFSGYPDCRDIFVKSLNVSLNLSMDKDFVIHTPLMWLDKAETWELADQLGQLNYVKEKTLTCYNGIVAEGCGECPACKLRQNGLDQYEAKKAAQV

SEQ ID NO: 42840 - protein, 219 aa, Terribacillus saccharophilus
  misc_feature (1)..(219): tr|A0A268A814|A0A268A814_9BACI 7-cyano-7-deazaguanine s ynthase OS=Terribacillus saccharophilus OX=361277 GN=qu eC PE=3 SV=1
MKKGKAIVVFSGGQDSTTCLFWAMEQFEEVEAVTFNYNQRHSLEIEVAEQIAKEQGIRHHVLDMSLLNQLAPNALTRDDIEIEQQEGELPSTFVPGRNLVFLSFAAILAHQVGAKHLVTGVCETDFSGYPDCRDIFVKSLNVSLNLSMDKDFVIHTPLMWLDKAETWEMADQLGKLDYVKEKTLTCYNGIVAEGCGECPACKLRQNGLDQYEAKKAEHV

SEQ ID NO: 42841 - protein, 219 aa, Terribacillus sp.
  misc_feature (1)..(219): tr|A0A268BMP3|A0A268BMP3_9BACI 7-cyano-7-deazaguanine s ynthase OS=Terribacillus sp. 7520-G OX=2025389 GN=queC PE=3 SV=1
MKKGKAIVVFSGGQDSTTCLFWAMEQFEEVEAVTFNYNQRHSLEIDVAEQIAKEQGIRHHVLDMSLLNQLAPNALTRDDIEIEQQEGELPSTFVPGRNLVFLSFAAILAHQVGAKHLVTGVCETDFSGYPDCRDIFVKSLNVSLNLSMDKEFVIHTPLMWLDKAETWELADQLGQLDYVKEKTLTCYNGIIADGCGECPACKLRKNGLDQYEAKKAERA

SEQ ID NO: 42842 - protein, 231 aa, Terriglobus albidus
  misc_feature (1)..(231): tr|A0A5B9E915|A0A5B9E915_9BACT 7-cyano-7-deazaguanine s ynthase OS=Terriglobus albidus OX=1592106 GN=queC PE=3 SV=1
MATTSNRPRAVVSLSGGMDSVVCAALATRDFDAYAVHFSYGQRTEARELLSARQAAELLGFKDFLHLKIDLFRKIGGSALTDDSIAVPDAPEEEASIGQQVPVTYVPFRNAHFLSAAVSWAEVLGAKTVFIGAVEQDSSGYPDCRPVYYEAFNQLIQTGTKEGDIRIVTPLIHLKKSEIVRLGVELGAPFHVSWSCYSGQDAACGTCESCVLRLRAFREAGAADPIPYAAR

SEQ ID NO: 42843 - protein, 232 aa, Terriglobus roseus
  misc_feature (1)..(232): tr|A0A1H4PV54|A0A1H4PV54_9BACT 7-cyano-7-deazaguanine s ynthase OS=Terriglobus roseus OX=392734 GN=queC PE=3 SV =1
MSSQIKPREKAVVCLSGGMDSTVCAALAARDYDAYALHFSYGQRTEARELLSARGVAEALGFKQFLPLRMDLFRQIGGSALTDASIAVPDAPAEESAIGDAIPVTYVPFRNAHFLSAAVSWAEVIGAKVILIGAVEQDSSGYPDCRPAYYDAFNALIRQGTAVGDIRVETPLIHMRKREIVALGVELGAPLHVSWSCYSGEDFACGVCESCVLRLRAFREAGTTDPIPYAQS

SEQ ID NO: 42844 - protein, 232 aa, Terriglobus roseus
  misc_feature (1)..(232): tr|I3ZLQ1|I3ZLQ1_TERRK 7-cyano-7-deazaguanine synthase OS=Terriglobus roseus (strain DSM 18391 / NRRL B-41598 / KBS 63) OX=926566 GN=queC PE=3 SV=1
MSSQANPRDKAVVCLSGGMDSTVCATLAARDYDAYALHFSYGQRTEARELRSARGVAEALRFKQFLPLRMDLFRQIGGSALTDTSIAVPDAPAEDSTIGDAIPVTYVPFRNAHFLSAAVSWAEVIGAKVILIGAVEQDSSGYPDCRPAYYDAFNALIRQGTAVGDIRVETPLIQMRKRDIVALGVELGAPLHVSWSCYSGEEFACGVCESCVLRLRAFREAGTTDPIPYAQT

SEQ ID NO: 42845 - protein, 236 aa, Terriglobus saanensis
  misc_feature (1)..(236): tr|E8UYV5|E8UYV5_TERSS 7-cyano-7-deazaguanine synthase OS=Terriglobus saanensis (strain ATCC BAA-1853 / DSM 23 119 / SP1PR4) OX=401053 GN=queC PE=3 SV=1
MTATTSSPTEDSVRERAVICLSGGMDSTVCATLASRDFDVYALHFSYGQRTEARELASARAVAEYIGAKEFLPLRMDLFRQIGGSALTDTSIAVPNAPEDEATIGHEVPVTYVPFRNAHFLSAAVSWAEVLGAPTVSIGAVEQDSSGYPDCRPAYYDAFNALIQQGTKEGNIRVITPLIHLKKAEIVRLGVELHAPLHVSWSCYSGEEKACGVCESCSLRLRAFKEAGEKDPIPYV

SEQ ID NO: 42846 - protein, 223 aa, Testudinibacter aquarius
  misc_feature (1)..(223): tr|A0A4R3YEB3|A0A4R3YEB3_9PAST 7-cyano-7-deazaguanine s ynthase OS=Testudinibacter aquarius OX=1524974 GN=queC PE=3 SV=1
MQNNTKKALVIFSGGQDSTTCLLQAIHHYGKENVEAVTFQYGQRHAIELEKAQWIANDLGVKQTLIDTSVIKAITTNALMDQSAVISQNADEMPNTFVDGRNALFLLYAAIYAKGQGIHDIITGVCETDFSGYPDCRDVFVKSMNVTLNLAMDYNFNIQTPLMYLDKKQTWALADQLGGLDYVRQHTHTCYLGVEGGCHECPSCKLREKGLNEYLAEKEVRNV

SEQ ID NO: 42847 - protein, 222 aa, Thalassobacillus cyri
  misc_feature (1)..(222): tr|A0A1H4GWD0|A0A1H4GWD0_9BACI 7-cyano-7-deazaguanine s ynthase OS=Thalassobacillus cyri OX=571932 GN=queC PE=3 SV=1
MENNKAVVVFSGGQDSTTCLFWALERFDEVEAVTFHYNQRHEEEVEVAKAITDRLNVNHRVLDMSLLSQLSPNALTHKEMDVEEGKDGSLPSTFVPGRNLLFLSFAGIVAQQTGSKHIITGVCETDFSGYPDCRDVFIKSLNVTLNLSMDESFVIHTPLMWLDKAETWQLADELKAFEFVRDHTLTCYHGVIGSGCGECPACKLRNQGLRKYLQQCEGADIR

SEQ ID NO: 42848 - protein, 220 aa, Thalassobium sp.
  misc_feature (1)..(220): tr|A0A2G2PUL7|A0A2G2PUL7_9RHOB 7-cyano-7-deazaguanine s ynthase OS=Thalassobium sp. OX=2030825 GN=queC PE=3 SV= 1
MAEKAVVIYSGGMDSFTILNKAKAEGYELYALTFDYGQKHRKEIAFATRVCEELGINHRIIDITAINQLLQSSSLTSDIEIPEGHYEAANMKSTVVPNRNMILLSLAIGYAVDIGASKVFYGAHSGDHAIYPDCRPDFVHAMNKVAKLANYEPVDIVTPYLNSDKTEILADGLKMGLDYGKSWTCYNGREKACGKCGSCVERLEAFAHNHATDPLAYENS

SEQ ID NO: 42849 - protein, 220 aa, Thalassobium sp.
  misc_feature (1)..(220): tr|A0A2G2AGX1|A0A2G2AGX1_9RHOB 7-cyano-7-deazaguanine s ynthase OS=Thalassobium sp. OX=2030825 GN=queC PE=3 SV= 1
MSEKAVVIYSGGMDSFTILNKAKQEGYELYALTFDYGQKHKKEIQYAISVCQELKVPHRIIDITAINQLLQSSSLTSDIEIPEGHYEAANMKSTVVPNRNMILLSLAIGYAVDIGAPKVFYGAHSGDHAIYPDCRPDFVHAMNRVAKLANYEPVDIVTPYLNGDKTEILKDGLAMGLDYGKTWTCYNGREKACGKCGSCVERLEAFTLNNATDPLPYESV

SEQ ID NO: 42850 - protein, 230 aa, Thalassobius activus
  misc_feature (1)..(230): tr|A0A0P1J9J9|A0A0P1J9J9_9RHOB 7-cyano-7-deazaguanine s ynthase OS=Thalassobius activus OX=1715691 GN=queC PE=3 SV=1
MKTLVICSGGLDSVTLAYKVAQERELVGLISFDYGQRHKKETDFAAKAGKALGVPHDLIDMRAIGGFLSGSALTDDLDVPDGHYAEDNMKVTVVPNRNAIMLAVAFGVAAAKGAQSVGTAVHGGDHFIYPDCRPGFINAFQSMQDAALEGYADVQLYTPFVNISKADIVTEGARAEVPFEDTWSCYKGGALHCGRCGTCVERLEAFHLAGVEDPTEYEDRDYWKTVVGSV

SEQ ID NO: 42851 - protein, 225 aa, Thalassobius mediterraneus
  misc_feature (1)..(225): tr|A0A0P1GM26|A0A0P1GM26_9RHOB Uncharacterized protein OS=Thalassobius mediterraneus OX=340021 GN=TM5383_00597 PE=4 SV=1
MTRCHFYLDPSEVPDVTSAQELHVHLYGGFAPKPGSAAIGKQVADLFHRFGVQPSTRVVDLISIALAETAADRFVLRSNSETNWSREIIVRLPLAWPEPWRKVEAELAATLNFLSGDVWSFEFERGGKEPPIKSELNSYKRSFGLQKGDCVALFSGGLDSTIHAIQALAEGRKPTLVSHGYRGDQEVQNDIASRLPKQLEHLSVNIWTTSSRTSEDSMRARSFCS

SEQ ID NO: 42852 - protein, 446 aa, Thalassobius sp.
  misc_feature (1)..(446): tr|A0A2E9G6G1|A0A2E9G6G1_9RHOB Uncharacterized protein OS=Thalassobius sp. OX=1979401 GN=CMO01_19195 PE=4 SV=1
MIAFNIIFRDGAEDKFTVSESTHEKNIFIPAEDAHQSDKTLSENIYRIFEQKKLTPSDEALELLNAAVSVYTADQLVSRDTYGFDNWSRYFKLYLPVVDHEKWQTALEDLQNALNFLTGDYWEIFLRKRSAKEKNDNAHVVKTVSKVSLLSGGLDSFIGVTDLLAEGNDIAVVGHHKSQGYENSAQESLIQTLRKEYSDKHIEEFLFNAQPVQKHNKYGKESSSRARSILFIGLGIAVASAYGNEIPLYIPENGLISLNIPLTSSRIGSSSTRTTHPHFLNTLGKVLKTIGVGNEIINPYQFLTKGEMIKNSKNRALIEKYYNETVSCAHPNAVHINIARKNDEKHCGYCTPCIIRRAALKHANLDRDDHYVFKINQTQPPYTDDIGRDYRAFQMALSRLKNNKPNLSFHVLRSGPLPNKKIDLSKYIGIYDRGMKEVDNFLNAQS

SEQ ID NO: 42853 - protein, 233 aa, Thalassococcus halodurans
  misc_feature (1)..(233): tr|A0A1H5TKW2|A0A1H5TKW2_9RHOB 7-cyano-7-deazaguanine s ynthase OS=Thalassococcus halodurans OX=373675 GN=queC PE=3 SV=1
MKTLVICSGGLDSVSLAHITAETRELTRLVSFNYGQRHLKELEFAAEAAERLGVPHTVIDLRPVGAALTGSALTDEIDVPDGHYAEETMKITVVPNRNAIMLTVAYGIAAANGDQAVATAVHGGDHFIYPDCRPDFVEAFDKMQRFALDGYADVSLWTPFVHRTKADIVSDGAKHNTPFDRTWSCYKGGEHHCGRCGTCVERREAFDLAGVTDPTVYEDPDFWRQAVANAEAK

SEQ ID NO: 42854 - protein, 220 aa, Thalassolituus oleivorans; identical to SEQ ID NO: 42849
  misc_feature (1)..(220): tr|M5E5V4|M5E5V4_9GAMM 7-cyano-7-deazaguanine synthase OS=Thalassolituus oleivorans MIL-1 OX=1298593 GN=queC P E=3 SV=1

SEQ ID NO: 42855 - protein, 220 aa, Thalassolituus oleivorans
  misc_feature (1)..(220): tr|W8FW94|W8FW94_9GAMM 7-cyano-7-deazaguanine synthase OS=Thalassolituus oleivorans R6-15 OX=1208320 GN=queC P E=3 SV=1
MSEKAVVIYSGGMDSFTILNKAKQEGYELYALTFDYGQKHKKEIQYAISVCQELKVPHRIIDITAINQLLQSSSLTSDIEIPEGHYEAANMKSTVVPNRNMILLSLAIGYAVDIGASKVFYGAHSGDHAIYPDCRPDFVHAMNRVAKLANYEPVDIVTPYLNGDKTEILKDGLAMGLDYGKTWTCYNGREKACGKCGSCVERLEAFTLNNATDPLPYESV

SEQ ID NO: 42856 - protein, 220 aa, Thalassolituus sp.
  misc_feature (1)..(220): tr|A0A558NRR0|A0A558NRR0_9GAMM 7-cyano-7-deazaguanine s ynthase OS=Thalassolituus sp. C2-1 OX=2597518 GN=queC P E=3 SV=1
MAEKAVVIYSGGMDSFTILNKAKAEGYELYALTFDYGQKHRKEIAFATRVCEELGINHRIIDITAINQLLQSSSLTSDIEIPEGHYEAANMKSTVVPNRNMILLSLAIGYAVDIGASKVFYGAHSGDHAIYPDCRPDFVHAMNKVAKLANYEPVDIVTPYLNSDKTEILADGLKMGLNYGKSWTCYNGREKACGKCGSCVERLEAFAHNHATDPLAYENS

SEQ ID NO: 42857 - protein, 219 aa, Thalassomonas actiniarum
  misc_feature (1)..(219): tr|A0A0D8CW81|A0A0D8CW81_9GAMM 7-cyano-7-deazaguanine s ynthase OS=Thalassomonas actiniarum OX=485447 GN=queC P E=3 SV=1
MTEKVVVIYSGGMDSFTVLNRALKDGKEVYALSFDYGQRHVKELECASEVCKKLNVPHKIIDISAINELLAGSSLTDNIEIPEGHYEEDSMKSTVVPNRNMILLSLAVGYAVSVKASQVYYGAHSGDHAIYPDCRPEFVMKMNDVCQIANYEPVEIFSPYLKVSKTDILTDGIAMGLDYSQTWTCYNGREKACGKCGACQERLEAFADNKVSDPIAYEA

SEQ ID NO: 42858 - protein, 218 aa, Thalassomonas sp.
  misc_feature (1)..(218): tr|A0A553FJV2|A0A553FJV2_9GAMM 7-cyano-7-deazaguanine s ynthase OS=Thalassomonas sp. M1454 OX=2594477 GN=queC P E=3 SV=1
MAEKVVVIYSGGMDSFTVLNRAVKDGKQVYALSFDYGQKHVKELEFAANVCKELNIPHKIVDISAINQLIGGSSLTDDIDIPEGHYEEESMKSTVVPNRNMILLSMAVGYAVSVNANQVYYGAHSGDHAIYPDCRPEFVKKMNDVCQIANYEPVDIYSPYLKDSKIDILTDGIKMGLDYSKSWTCYNGREKACGKCGACQERLEAFEKNGITDPLPYE

SEQ ID NO: 42859 - protein, 219 aa, Thalassomonas viridans
  misc_feature (1)..(219): tr|A0A0D8CRB8|A0A0D8CRB8_9GAMM 7-cyano-7-deazaguanine s ynthase OS=Thalassomonas viridans OX=137584 GN=queC PE= 3 SV=1
MTEKVVVIYSGGMDSFTVLNRALKDGKEVYALSFDYGQRHVKELECASEVCKQLNVPHKIIDISAINELLAGSSLTDDIEIPEGHYEEESMKSTVVPNRNMILLSLAVGYAVSVGAAQVYYGAHSGDHAIYPDCRPEFVMKMNDVCQIANYEPVEIFSPYLEVSKTAILTDGIAMGLDYSKTWTCYNGREKACGKCGACQERLEAFADNNATDPLAYED

SEQ ID NO: 42860 - protein, 243 aa, Thalassospira lohafexi
  misc_feature (1)..(243): tr|A0A2N3L681|A0A2N3L681_9PROT 7-cyano-7-deazaguanine s ynthase OS=Thalassospira lohafexi OX=744227 GN=queC PE= 3 SV=1
MKTIVVCSGGLDSVTLAYKVAAEHKLHSLISFDYGQRHKKELDYAARTARDLGVKHHIVDLTSVGALLGGSSLTSDDIDVPDGHYAQETMRITVVPNRNAIMLAVAFGAAASAGADAVATAVHGGDHFIYPDCRPDFISAFGTMQNHALDGVKDVSLYTPFVHVSKADIALEAGRLGVPIDLTWSCYKGHDTHCGRCGTCVERREALELACVKDPTVYEDRDYWKQAHAEHVARKFARQNAPG

SEQ ID NO: 42861 - protein, 243 aa, Thalassospira lucentensis
  misc_feature (1)..(243): tr|A0A358HMP6|A0A358HMP6_9PROT 7-cyano-7-deazaguanine s ynthase OS=Thalassospira lucentensis OX=168935 GN=queC PE=3 SV=1
MKTIVVCSGGLDSVTLAYKVAAEHKLHSLISFDYGQRHKKELDYAARTARDLGVKHHIVDLTSVGALLGGSSLTSDDIDVPDGHYAQETMRITVVPNRNAIMLAVAFGAAASAGADAVATAVHGGDHFIYPDCRPDFINAFGAMQNHALEGVKDVSLYTPFVHVSKADIALEAGRLGVPIDLTWSCYKGHDTHCGRCGTCVERREALELACVKDPTVYEDRDYWKQAHAEHVARKFASQNAPG

SEQ ID NO: 42862 - protein, 247 aa, Thalassospira lucentensis
  misc_feature (1)..(247): tr|A0A154L2N4|A0A154L2N4_9PROT 7-cyano-7-deazaguanine s ynthase OS=Thalassospira lucentensis OX=168935 GN=queC PE=3 SV=1
MKTIVVCSGGLDSVTLAHKVAAEHKLHSLISFDYGQRHKKELDYAARAARDLGVKHHIVDLTPVGALLTGSSLTSDDIDVPDGHYAEETMRITVVPNRNAIMLAVAFGAAASAGADAVAAAVHGGDHFIYPDCRPDFIKSFQTMQNHALEGVRDVSLYTPFLRGSKADIAAEAARLGVPIDRTWSCYKGGETHCGRCGTCVERREALELARVPDPTVYVDRDYWKQARAEHMARSLGTEAEVQPSGD

SEQ ID NO: 42863 - protein, 243 aa, Thalassospira marina
  misc_feature (1)..(243): tr|A0A2N3KRT1|A0A2N3KRT1_9PROT 7-cyano-7-deazaguanine s ynthase OS=Thalassospira marina OX=2048283 GN=queC PE=3 SV=1
MKTIVVCSGGLDSVTLAHKVAREYSLHGLISFDYGQRHKKELDFAADAARDLGVRHHIVDLTPVGKLLTGSSLTSDDVDVPDGHYAEETMRITVVPNRNAIMMSVAFGAAASAGADAVAAAMHGGDHFIYPDCRPDFVNAFQKMQNHALEGVANIRLYTPFINSTKADIAAEAGRLGVPIERTWSCYKGEDVHCGRCGTCVERREALELARVPDPTVYIDREYWKQARAEHAMRKMAEKTAQD

SEQ ID NO: 42864 - protein, 239 aa, Thalassospira mesophila
  misc_feature (1)..(239): tr|A0A1Y2L3F3|A0A1Y2L3F3_9PROT 7-cyano-7-deazaguanine s ynthase OS=Thalassospira mesophila OX=1293891 GN=queC P E=3 SV=1
MKTIVVCSGGLDSVTLAHKVAREHSLYALISFDYGQRHKKEIDFAADAAKDLGVRHHIVDLKPVGALLTGSSLTSDDVAVPDGHYAEETMRITVVPNRNAIMLSVAFGAAASAGADTVAAAMHGGDHFIYPDCRPDFINAFQKMQNHALEGVAQIRLYTPFINATKADIAAEAGRLGVPIERTWSCYKGEEVHCGRCGTCVERREALELARVPDPTVYIDREYWKQARAEHAMRKMAEG

SEQ ID NO: 42865 - protein, 241 aa, Thalassospira permensis
  misc_feature (1)..(241): tr|A0A074J752|A0A074J752_9PROT 7-cyano-7-deazaguanine s ynthase OS=Thalassospira permensis NBRC 106175 OX=13535 32 GN=queC PE=3 SV=1
MKTIVVCSGGLDSVTLAHKVAAEHNLHSLISFDYGQRHKKELDYAARAARDLGVKHHIVDLTPVGALLTGSSLTSDDIDVPDGHYAEETMRITVVPNRNAIMLAVAFGAAASAGADAVAAAVHGGDHFIYPDCRPDFIKSFQTMQNHALEGVRDVSLYTPFLHGSKADIAAEAGRLGVPIDRTWSCYKGGETHCGRCGTCVERREALELARVPDPTVYVDRDYWKQARAEHMARSLGASGN

SEQ ID NO: 42866 - protein, 250 aa, Thalassospira povalilytica
  misc_feature (1)..(250): tr|A0A2N3KDU8|A0A2N3KDU8_9PROT 7-cyano-7-deazaguanine s ynthase OS=Thalassospira povalilytica OX=732237 GN=queC PE=3 SV=1
MKTIVVCSGGLDSVTLAYKVAAEHNLHSLISFDYGQRHKKELDFAARTARDLGVKHHIVDLTPVGALLTGSSLTSDDIDVPDGHYAEETMRVTVVPNRNAIMLAVAFGAAASAGADAVAAAVHGGDHFIYPDCRPDFIKSFQAMQDHALEGVRDVTLYTPFVNVSKADIALEAGRLGVPVDLTWSCYKGGETHCGRCGTCVERREALELAGVKDPTVYVDREYWKQARADHRARQLAAHETASASNNAAE

SEQ ID NO: 42867 - protein, 243 aa, Thalassospira profundimaris
  misc_feature (1)..(243): tr|A0A367XDQ2|A0A367XDQ2_9PROT 7-cyano-7-deazaguanine s ynthase OS=Thalassospira profundimaris OX=502049 GN=que C PE=3 SV=1
MKTIVVCSGGLDSVTLAHKVAREHSLQGLISFDYGQRHKKELDYAAETARDLGVPHNIVDLKPVGRLLTGSSLTSDDVAVPDGHYAEETMRITVVPNRNAIMMTVAFGAAASAGADAVAAAMHGGDHFIYPDCRPDFVHAFQAMQDHALEGVAHIRLYTPFIHASKADIAAEAGRLGVPVDRTWSCYKGGDVHCGRCGTCVERREALELARVLDPTVYTDREYWKQARAEHAKRKFAERSTHG

SEQ ID NO: 42868 - protein, 592 aa, Thalassospira profundimaris
  misc_feature (1)..(592): tr|K2KUE3|K2KUE3_9PROT Uncharacterized protein OS=Thala ssospira profundimaris WP0211 OX=1177928 GN=TH2_05443 P E=4 SV=1
MDVQGSNQDVTLKIEDISRAMVSNIPDVLLDLLEVAAYIYCADRRCSRGGDTLDDYGHDWRRDLRFTIPLREPDRWESPAVKEALRDALGFLSDDAYSFSFVRAENPVAPKELYFTGLTEGTFEPDEVALFSGGVDSFAGAVHDLVANDMNLALIGHFSATKVVNVQKELISGLQQNGLDGRFFYTSVEVKNKGVRSVDESQRTRSFLFACLGLVVARLFGKDRLTFYENGVVSLNLPIAKDIMGARATRTTHPQVLDGFTTFFSELLDHEIGIRTPLQWMTKREVVETLSGSGFEGMLGDTVSCTRTFVRTVDHPHCGVCSQCIDRRFAVLAAGMEESDPEQGYTVDLLTGDRSAKEQDVRMAVDYVKCFQKLTACPKNRFLVEYPEITSALRYFSGLSTAEACDRIYDLLQRHARDVLDVLDAATTRHKGELVRGELPAGSLLSMCFSRSKIEVSPPSGYDSQVKDFMDRLQRPVCEFAVDETAKRVLFKGDFSLEGTNYDLVAALLDNHRTGKRNGSDIAYIPAPNLAQVLGIADASLRQQVGRLRKLVTERLGVDLGVPLGTDDFIENKERAGYRLSPALREVSPGDL

SEQ ID NO: 42869 - protein, 247 aa, Thalassospira sp.
  misc_feature (1)..(247): tr|A0A419W2G4|A0A419W2G4_9PROT 7-cyano-7-deazaguanine s ynthase OS=Thalassospira sp. DSM 26710 OX=2035225 GN=qu eC PE=3 SV=1
MKTIVVCSGGLDSVTLAYKVATEHKLHSLISFDYGQRHKKELDFAARAARNLGVKHHIVDLTLVGALLTGSSLTSDDIDVPDGHYAEETMRITVVPNRNAIMLAVAFGAAASAGADAVAAAVHGGDHFIYPDCRPDFIKSFQTMQDHALEGVKDVKLYTPFVNVSKADIALEAGRLGVPVDLTWSCYKGGETHCGRCGTCVERREALELARVKDPTVYVDRDYWKQARADHMARKFGPLPTTDCAAK

SEQ ID NO: 42870 - protein, 243 aa, Thalassospira sp.
  misc_feature (1)..(243): tr|A0A1Q4US70|A0A1Q4US70_9PROT 7-cyano-7-deazaguanine s ynthase OS=Thalassospira sp. TSL5-1 OX=1544451 GN=queC PE=3 SV=1
MKTIVVCSGGLDSVTLAHKVAREHSLQGLISFDYGQRHKKELDYAADTARDLGVPHNIVDLKPVGRLLTGSSLTSDDVAVPDGHYAEETMRITVVPNRNAIMMTVAFGAAASAGADAVAAAMHGGDHFIYPDCRPDFVNAFQSMQDHALEGVAQIRLYTPFIHTSKADIAAEAGRLGVPIDRTWSCYKGGDVHCGRCGTCVERREALELARVPDPTVYTDREYWKQARAEHAKRKYAEHSSQN

SEQ ID NO: 42871 - protein, 241 aa, Thalassospira xiamenensis
  misc_feature (1)..(241): tr|A0A0B4XW00|A0A0B4XW00_9PROT 7-cyano-7-deazaguanine s ynthase OS=Thalassospira xiamenensis M-5 = DSM 17429 OX =1123366 GN=queC PE=3 SV=1
MKTIVVCSGGLDSVTLAHKVAAEHKLHSLISFDYGQRHKKELDYAARAARDLGVKHHIVDLTPVGALLTGSSLTSDDIDVPDGHYAEETMRITVVPNRNAIMLAVAFGAAASAGADAVAAAVHGGDHFIYPDCRPDFIKSFQTMQNHALEGVRDVSLYTPFLHGSKADIAAEAGRLGVPIDRTWSCYKGGETHCGRCGTCVERREALELARVPDPTVYVDRDYWKQARAEHMARSLGDSGN

SEQ ID NO: 42872 - protein, 461 aa, Thalassospira xiamenensis
  misc_feature (1)..(461): tr|A0A0B4Y0H8|A0A0B4Y0H8_9PROT Uncharacterized protein OS=Thalassospira xiamenensis M-5 = DSM 17429 OX=1123366 GN=TH3_14170 PE=4 SV=1
MKNTFLNKPRSDLSLCVVEQSQSVKRAYPKGAEIAEVGKHIKFDPDILSTFDYKGWQSLHHDLLVVSAAVEFADRRWKRPRGWSRKFNITVPVLDLAAWQRKEVIESLLSALRHLTADIWSFNFVQWRGPAPIGARQGVLAFTKTKTFTIAYSDGLDSRAVSALSGDKLGLRVRIAKSRNRLKKGDQPFDQIPFKVQGFRGLESSFRSRGFQFSAITAIAAHMSELSRVVVPESGQGALGPVLLPLHNIHPDYRNHPTFFRKMERFVRALLGYQVKYDQPRIWYTKGQTLGAFLELPAKKQEDLTDTRSCWQTRRIVNTNGGRKQCGLCAACLLRRLSMHTAGITEAADAYVISDLKCSDVNESLAVIPQQRDRDIMIEYGSVGARHLQHLAEMADLPDDELRIHASELAAALGEPREDTMKNLRMLLVNHAEEWRAFLTAQEEKSFLKSWMDGGRYGRSK

SEQ ID NO: 42873 - protein, 254 aa, Thalassospira xianhensis
  misc_feature (1)..(254): tr|A0A367UCH0|A0A367UCH0_9PROT 7-cyano-7-deazaguanine s ynthase OS=Thalassospira xianhensis MCCC 1A02616 OX=117 7929 GN=queC PE=3 SV=1
MKTIVVCSGGLDSVTLAYKVAAEHKLHSLISFDYGQRHKKELDYAARAARDLGVKHHIVDLTPVGALLTGSSLTSDDIDVPDGHYAEETMRITVVPNRNAIMLAVAFGAAASARADAVAAAVHGGDHFIYPDCRPDFIKSFQTMQNHALEGVRDVSLYTPFLHGSKADIAAEAGRLGVPIDRTWSCYKGGETHCGRCGTCVERREALELARVPDPTVYVDRDYWKQARAEHMARSLGASPIPPAQAGAHTTSGD

SEQ ID NO: 42874 - protein, 219 aa, Thalassotalea agarivorans
  misc_feature (1)..(219): tr|A0A1I0EN73|A0A1I0EN73_THASX 7-cyano-7-deazaguanine s ynthase OS=Thalassotalea agarivorans OX=349064 GN=queC PE=3 SV=1
MTEKVVVIYSGGMDSFTVLNRALKDGKHVYALSFDYGQKHVKELECAAKVCESLNVPHKIIDITAINQLLAGSSLTDDIDIPEGHYEDDNMKSTVVPNRNMILLSLAVGYAVSVEASQVYYGAHSGDHAIYPDCRPEFVEKMNDVCQIANYEPVEIYSPYLHVSKIDILTDGLNMGLDYSDTWTCYNGREKACGKCGACQERLEAFEKNNAVDPIAYEG

SEQ ID NO: 42875 - protein, 221 aa, Thalassotalea euphylliae
  misc_feature (1)..(221): tr|A0A3E0UF23|A0A3E0UF23_9GAMM 7-cyano-7-deazaguanine s ynthase OS=Thalassotalea euphylliae OX=1655234 GN=queC PE=3 SV=1
MTEKVVVIYSGGMDSYTVLNRAIKDGMEVYPLTFDYGQRHVKEIDCAAAVCKSLNVPHKVIDISAINQLLAGSSLTDDIEIPEGHYEEESMKSTVVPNRNMILLSLAVGYAVSVGASKVYYGAHSGDHAIYPDCRPEFVEKMNDVCQIANYEAVEIYSPYLSVSKTAILTDGIAMGLDYSQTWTCYNGREHACGKCGACQERLEAFRDNNATDPLTYEVTA

SEQ ID NO: 42876 - protein, 221 aa, Thalassotalea euphylliae
  misc_feature (1)..(221): tr|A0A3E0TXS6|A0A3E0TXS6_9GAMM 7-cyano-7-deazaguanine s ynthase OS=Thalassotalea euphylliae OX=1655234 GN=queC PE=3 SV=1
MTEKVVVIYSGGMDSYTVLNRAIKDGMQVYPLTFDYGQRHVKEIDCAAAVCKSLNVPHKVIDISAINQLLAGSSLTDDIEIPEGHYEEESMKSTVVPNRNMILLSLAVGYAVSVGASKVYYGAHSGDHAIYPDCRPEFVEKMNDVCQIANYEAVEIYSPYLSVSKTAILTDGIAMGLDYSQTWTCYNGREHACGKCGACQERLEAFRDNNATDPLTYEVTA

SEQ ID NO: 42877 - protein, 230 aa, Thalassotalea sp.
  misc_feature (1)..(230): tr|A0A099L664|A0A099L664_9GAMM 7-cyano-7-deazaguanine s ynthase OS=Thalassotalea sp. ND16A OX=1535422 GN=queC P E=3 SV=1
MAENMAENATNTDNNKVVVIYSGGMDSFTVLNRAIKDGKQVYALTFDYGQKHVKEIEYAANVCKELNIPHKVIDISAINQLLGGSSLTDDIDIPEGHYEEESMKSTVVPNRNMILLSLAVGYAVSREASQVYYGAHSGDHAIYPDCRPEFVLKMNDVCQIANYQPVEIYSPYLTDSKIDILTDGISMELDYSKSWTCYNGREKACGQCGACQERLEAFRENDLVDPLEYE

SEQ ID NO: 42878 - protein, 221 aa, Thalassotalea sp.
  misc_feature (1)..(221): tr|A0A1Q6CJH8|A0A1Q6CJH8_9GAMM 7-cyano-7-deazaguanine s ynthase OS=Thalassotalea sp. PP2-459 OX=1742724 GN=queC PE=3 SV=1
MSNKVVVIYSGGMDSFTVLNKAVHDGKQVFALSFDYGQRHVKELDCAASVCATLGIKHKIIDISAINQLLAGSSLTDDIEIPEGHYEEESMKSTVVPNRNMILLSMAVGYAVSVGASQVYYGAHSGDHAIYPDCRPEFVQKMNDVCQIANYEAVEIYSPYLTVTKTDILTDGLSMGLDYSQTWTCYNGREKACGKCGACQERLEAFSENKTTDPLPYEISA

SEQ ID NO: 42879 - protein, 233 aa, Thauera aminoaromatica
  misc_feature (1)..(233): tr|N6Y1L9|N6Y1L9_9RHOO 7-cyano-7-deazaguanine synthase OS=Thauera aminoaromatica S2 OX=1234381 GN=queC PE=3 SV =1
MTSLHTPPRAVVLLSGGLDSATCLAIARDMGFETYALSVAYGQRHAAELAASKRVAQALGAREHRTASVELGQFGGSALTDPGIAVPLDQDNTGIPVTYVPARNTVMLSIAVAWAEVLGANDIFVGVNAVDYSGYPDCRPVFIEAFEHMARLATKVGVEGAQLRIHAPLIELSKADIIRRGTALGVDYGLTVTCYQADDDGRACGRCEACRLRAAGFKAAGVPDPTPYQPRSA

SEQ ID NO: 42880 - protein, 233 aa, Thauera aminoaromatica
  misc_feature (1)..(233): tr|A0A5C7S9F6|A0A5C7S9F6_9RHOO 7-cyano-7-deazaguanine s ynthase OS=Thauera aminoaromatica OX=164330 GN=queC PE= 3 SV=1
MTSLHTPPRAVVLLSGGLDSATCLAIARDMGFETYALSVAYGQRHAAELAASKRVAQALGAREHRTASVELGQFGGSALTDPGIAVPLDQDNTGIPVTYVPARNTVMLSIALAWAEVLGANDIFVGVNAVDYSGYPDCRPVFIEAFEHMARLATKVGVEGAQLHIHAPLIELSKADIIRRGTALGVDYGLTVTCYQADDDGLACGRCEACRLRAAGFKAAGVPDPTPYQPRSA

SEQ ID NO: 42881 - protein, 233 aa, Thauera aromatica
  misc_feature (1)..(233): tr|A0A2R4BRD3|A0A2R4BRD3_THAAR 7-cyano-7-deazaguanine s ynthase OS=Thauera aromatica K172 OX=44139 GN=queC PE=3 SV=1
MNTPPRAVVLLSGGLDSATCLAIARDQGFETYALSVAYGQRHAAELTASKRVADALGAKEHRLARVNLGQFGGSALTDPAIAVPEDEGAVGESAIPVTYVPARNTVMLSIALAWAEVLGASDIFVGVNAVDYSGYPDCRPEFIAAFEAMANLATRAAVEGARLRIHAPLIALSKADIIRRGSALGVDYGLTVTCYQADDAGRACGRCEACRLRAAGFTAAAIDDPTPYQPPLA

SEQ ID NO: 42882 - protein, 234 aa, Thauera chlorobenzoica
  misc_feature (1)..(234): tr|A0A1H5WP98|A0A1H5WP98_9RHOO 7-cyano-7-deazaguanine s ynthase OS=Thauera chlorobenzoica OX=96773 GN=queC PE=3 SV=1
MNTPPRAVVLLSGGLDSATCLAIARDQGFETYALSVAYGQRHAAELTASKRVADALGAREHRLARVNLGQFGGSALTDPAIAVPEDEGGHEGESAIPVTYVPARNTVMLSIALAWAEVLGASDIFVGVNAVDYSGYPDCRPEFIAAFETMANLATRAGVEGARLRIHAPLIALSKADIIRRGTALGVDYGLTVTCYQADDAGRACGRCEACRLRAAGFAAAAIDDPTPYQPHLG

SEQ ID NO: 42883 - protein, 230 aa, Thauera humireducens
  misc_feature (1)..(230): tr|A0A127K989|A0A127K989_9RHOO 7-cyano-7-deazaguanine s ynthase OS=Thauera humireducens OX=1134435 GN=queC PE=3 SV=1
MNHAKRAVVLLSGGLDSATCLAIARDMGFETYALSVAYGQRHAAELTASARVAQALGAKEHRLARVNLGQFGGSALTDPGIAVPENEDNGGIPVTYVPARNTVMLSIAMAWAEVLGAQDIFVGVNAVDYSGYPDCRPEFIQAFETMANLATKAGVEGARLHIHAPLIELSKADIIRRGVALGVDYGITVTCYQADDDGRACGRCEACRLRAAGFEAAGIPDPTPYQLRTD

SEQ ID NO: 42884 - protein, 234 aa, Thauera linaloolentis
  misc_feature (1)..(234): tr|N6Z5G2|N6Z5G2_9RHOO 7-cyano-7-deazaguanine synthase OS=Thauera linaloolentis 47Lol = DSM 12138 OX=1123367 G N=queC PE=3 SV=1
MTPAKRAVVLLSGGLDSATCLAIARDMGFETYALSVAYGQRHAAELTASLRVAQALGAKEHRLARINLGQFGGSALTDPAIDIPEALPGDDERPCIPVTYVPARNTVMLSIAMAWAEVLGANDIFIGVNAVDYSGYPDCRPAFIQAFEAMANLATKAGIEGAQLRIHAPLIESSKADIIRRGIGLGVDYGITVTCYQADDAGRACGRCEACRLRAMGFAAADVPDPTPYQLRND

SEQ ID NO: 42885 - protein, 233 aa, Thauera phenylacetica
  misc_feature (1)..(233): tr|N6YLD7|N6YLD7_9RHOO 7-cyano-7-deazaguanine synthase OS=Thauera phenylacetica B4P OX=1234382 GN=queC PE=3 SV =1
MTRLNTPPRAVVLLSGGLDSATCLAIARDMGFETYALSVAYGQRHAAELAASKRVAQVLGAREHRTASVELGQFGGSALTDPGIAVPLDQDNAGIPVTYVPARNTVMLSIALAWAEVLGANDIFVGVNAVDYSGYPDCRPAFIEAFERMARLATKVGVEGAQLRIHAPLIELSKADIIRRGVALGVDYGLTVTCYQADDDGRACGRCEACRLRAAGFAAAGVADPTPYQAPST

SEQ ID NO: 42886 - protein, 185 aa, Thauera phenylacetica
  misc_feature (1)..(185): tr|N6YTH5|N6YTH5_9RHOO 7-cyano-7-deazaguanine synthase OS=Thauera phenylacetica B4P OX=1234382 GN=C667_08283 P E=3 SV=1
MERSRHATVLMSGGIDSAACAAFLIDQGLEVSAVFVDHGQAAADFERSAVRSLAIALEIQVQELALTGAAPFGCGELVGRNAFLVFSAILATRARSSRIALGLHAGTPYYDCSPAFVDTINRSVAEYTDNAVRVVAPFIEWTKREVYDYFIHAGLPIEMTYSCEYGGAPTCGRCASCQDRKALQC

SEQ ID NO: 42887 - protein, 230 aa, Thauera propionica
  misc_feature (1)..(230): tr|A0A235F1H4|A0A235F1H4_9RHOO 7-cyano-7-deazaguanine s ynthase OS=Thauera propionica OX=2019431 GN=queC PE=3 S V=1
MNQAKRAVVLLSGGLDSATCLAIARDMGFETYALSVAYGQRHAAELTASARVAQALGAKEHRLARVNLGQFGGSALTDPGIAVPEDEDNSGIPVTYVPARNTVMLSIAMAWAEVLGAQDIFVGVNAVDYSGYPDCRPEFIRAFETMANLATKAGVEGARLHIHAPLIQLSKAEIIRRGVALGVDYGITVTCYQADDDGRACGRCEACRLRAAGFEAAGVPDPTPYQLRTD

SEQ ID NO: 42888 - protein, 226 aa, Thauera sp.
  misc_feature (1)..(226): tr|A0A290ZUM4|A0A290ZUM4_9RHOO 7-cyano-7-deazaguanine s ynthase OS=Thauera sp. K11 OX=2005884 GN=queC PE=3 SV=1
MSQAKRAVVLLSGGLDSATCLAIARDMGFEAYALSVAYGQRHAAELAASRRVAAALGATAHRTASVDLGQFGGSALTDASIAVPEDGAGDGIPVTYVPARNTVMLSIALAWAEVLGAHDIFVGVNAVDYSGYPDCRPAFIEAFENMANLGTKIGVEGARIRIHAPLITLSKADIIRRGLALGVDYGLTVTCYQADERGRACGRCEACRLRAAGFAAAGVPDPTPYK

SEQ ID NO: 42889 - protein, 230 aa, Thauera sp.
  misc_feature (1)..(230): tr|A0A351A524|A0A351A524_9RHOO 7-cyano-7-deazaguanine s ynthase OS=Thauera sp. OX=1905334 GN=queC PE=3 SV=1
MTSTARAVVLLSGGLDSATCLAIARDMGFETYALSVAYGQRHAAELTASKRVAEALGAREHRLARVNLGQFGGSALTDPGIAVPVDEENTGIPVTYVPARNTVMLSIALAWAEVLGANDIFVGVNAVDYSGYPDCRPEFIQAFETMANLATKVGVEGARLRIHAPLIELTKADIIRRGIALGVDYGLTVTCYQADDGGRACGRCEACRLRAAGFEAAGVPDPTPYQAHAH

SEQ ID NO: 42890 - protein, 230 aa, Thauera terpenica
  misc_feature (1)..(230): tr|S9ZRF0|S9ZRF0_9RHOO 7-cyano-7-deazaguanine synthase OS=Thauera terpenica 58Eu OX=1348657 GN=queC PE=3 SV=1
MTPAKRAVVLLSGGLDSATCLAIAREMGFETYALSIAYGQRHAAELTASLRVAQALGAREHRLARVNLGEFGGSALTDAAIAVPENEGNTGIPVTYVPARNTVMLSIALAWAEVLGANDIFVGVNAVDYSGYPDCRPEFIQAFETMANLATKVGVEGARLRIHAPLIKLSKGEIIRRGIELGVDYGLTVTCYQADDAGRACGCCEACRLRVAGFTAAAVPDPTPYVQRSV

SEQ ID NO: 42891 - protein, 233 aa, Thermanaeromonas toyohensis
  misc_feature (1)..(233): tr|A0A1W1VF95|A0A1W1VF95_9THEO 7-cyano-7-deazaguanine s ynthase OS=Thermanaeromonas toyohensis ToBE OX=698762 G N=queC PE=3 SV=1
MKDKVIVVLSGGLDSTTCMAIAHAEGQDIFPLTFVYGQKHTVELEAARKVAEYYGVAERHKIINLEGLLFGSSLTDKDKDIPTGRTLEEIGEGIPSTYVPARNIVFLALALAQAEPLGARAIYLGVNALDFSGYPDCRPEFIAAFQEVINRGTAAGVEGRGIRLETPLINLTKAEIIKKGLELGAPYHLTYSCYQGTVPSCGVCDACILRLKGFREAGAIDPIPYRQFSALCR

SEQ ID NO: 42892 - protein, 297 aa, Thermanaeromonas toyohensis
  misc_feature (1)..(297): tr|A0A1W1W3H9|A0A1W1W3H9_9THEO Uncharacterized protein OS=Thermanaeromonas toyohensis ToBE OX=698762 GN=SAMN00 808754_3321 PE=4 SV=1
MVAVLAGGKNSQVFKPGEAMLDPQLNQKLERLKSILSELGSVVVAYSGGVDSTLLLRVAKETAQRVLAVTATSPTYPQSELEQAQKIAQSLEVEHLIIESQEMENPQFCANPADRCYYCKSELFSKLRSVAAEQGFKAVVDGSNAEDLGDFRPGMRAAREYGIRSPLLEAGLTKGEIRELSRYYGLPTWDKPAMACLSSRIPYGEPITPEKVKQIEAGEAFLHSLGLKEVRLRHHGPIARLEVHPAAFPLLITEGVRERIITFLKNLGFIYVTLDLEGYRSGSMNELLPPQGEGVGQ

SEQ ID NO: 42893 - protein, 225 aa, Thermincola ferriacetica
  misc_feature (1)..(225): tr|A0A0L6W485|A0A0L6W485_9FIRM 7-cyano-7-deazaguanine s ynthase OS=Thermincola ferriacetica OX=281456 GN=queC P E=3 SV=1
MEKAVVLLSGGLDSTVCMSVAQKQGYGLYPISFLYGQRHSREIECAKKVAEYYQVKKHLIITTNMDSIGGSALTANIDVPEGDENRSEIPVTYVPARNLIFLSYALGYAEVIGAEKIFIGVNAVDYSGYPDCRSEFIERFQQLADYSTKAATQDKREIKIEAPLLNLTKAEIVKLGVANKAPLELTTSCYRGGEKACGRCDSCLLRLKGFKEAGLKDPISYEELL

SEQ ID NO: 42894 - protein, 225 aa, Thermincola potens
  misc_feature (1)..(225): tr|D5XDG5|D5XDG5_THEPJ 7-cyano-7-deazaguanine synthase OS=Thermincola potens (strain JR) OX=635013 GN=queC PE= 3 SV=1
MEKAVVLLSGGLDSTVCMSVAQKQGYELYPISFLYGQRHSREIECAKKVAEYYQVKKHLIITTNMDSIGGSALTANIDVPEGDENRSEIPVTYVPARNLIFLSYALGYAEVIGAEKIFIGVNAVDYSGYPDCRPEFIERFQQLADYSTKAATQDKREIKIEAPLLNLTKAEIVKLGVANKAPLELTTSCYRGGEKACGRCDSCLLRLKGFKEAGLKDPIPYEGLL

SEQ ID NO: 42895 - protein, 233 aa, Thermoactinomyces sp.
  misc_feature (1)..(233): tr|A0A1K1W9T7|A0A1K1W9T7_9BACL 7-cyano-7-deazaguanine s ynthase OS=Thermoactinomyces sp. DSM 45891 OX=1761907 G N=queC PE=3 SV=1
MKKKAVIVLSGGLDSSTCMGIAEHQGYELYPITFFYNQLHQREVEQAKCVAAHYGVSQSHKIVDLSYLGQLGGSALTDSSIQVPTTGIDEDEIPATYVPARNLIFLSLATAYAEVIGAKKIFVGVSAVDYSGYPDCRPEFIQSMSETINLATKLGVSSDAEDRLSIEAPLIHLNKGETVKWGLELGVPYHLTTSCYQGSEEACGVCDSCLLRLRGFTENDAKDPIPYAPQVLR

SEQ ID NO: 42896 - protein, 233 aa, Thermoactinomyces sp.
  misc_feature (1)..(233): tr|A0A1H3KD75|A0A1H3KD75_9BACL 7-cyano-7-deazaguanine s ynthase OS=Thermoactinomyces sp. DSM 45892 OX=1882753 G N=queC PE=3 SV=1
MKKKAVVVLSGGLDSTTCMGIAEHQGYELYPITFFYNQLHQREVEQAKCVAAHYGVGQNHKIVDLSYLGQLGGSALTDPSIQVPTTGVDEDEIPATYVPARNLIFLSMATAYAEVIGAKKIFVGVSAVDYSGYPDCRPEFIQSMSETINLATKLGVTSDADDRLSIEAPLMHLNKGETVKWGLELGVPYHLTTSCYQGSEEACGVCDSCLLRLKGFTENDAKDPIPYAQQVLR

SEQ ID NO: 42897 - protein, 229 aa, Thermoactinomyces vulgaris; identical to SEQ ID NO: 39052
  misc_feature (1)..(229): tr|A0A0N1K2S2|A0A0N1K2S2_THEVU 7-cyano-7-deazaguanine s ynthase OS=Thermoactinomyces vulgaris OX=2026 GN=queC P E=3 SV=1

SEQ ID NO: 42898 - protein, 227 aa, Thermoanaerobaculum aquaticum
  misc_feature (1)..(227): tr|A0A062XYJ6|A0A062XYJ6_9BACT 7-cyano-7-deazaguanine s ynthase OS=Thermoanaerobaculum aquaticum OX=1312852 GN= queC PE=3 SV=1
MSGDKAVVLLSGGMDSATAAAWARARWPWVGALSVDYGQRHAFELQAARRVAESLKLSEHRVIKVDLRAFGGSALTDELAVPKNRENIGEGIPVTYVPARNTVLLALLLAYAETRGARHLVMGANVLDYSGYPDCRPDFLRAFQRVANLGTKAGREGAGFEVHAPLLHLTKAGIVCLGYQLGLAFELTFSCYDPPEEGIHCGACDACRLRRQGFAEANLPDPTRYAT

SEQ ID NO: 42899 - protein, 231 aa, Thermobifida halotolerans
  misc_feature (1)..(231): tr|A0A399FX44|A0A399FX44_9ACTN 7-cyano-7-deazaguanine s ynthase OS=Thermobifida halotolerans OX=483545 GN=queC PE=3 SV=1
MERPAIVLLSGGLDSTTVLAIAREQGFTPYTLSFRYGQRHSLELEAAKRVAQAMGAARHVITDIDLRVFGGSALTDEISVPKHGSVEELDAAAVPVTYVPARNTIFLSFALAYAEVVGAQDIFMGVNAVDYSGYPDCRPEYIAAYEKMANLATRAAIEGEGRITVHTPLITLSKADIIREGVRLGVDYSLTFSCYDPDEQGRSCRRCDTCLLRLKGFTEAGFIDPIPYQAG

SEQ ID NO: 42900 - protein, 225 aa, Thermobrachium celere
  misc_feature (1)..(225): tr|R7RV44|R7RV44_9CLOT 7-cyano-7-deazaguanine synthase OS=Thermobrachium celere DSM 8682 OX=941824 GN=queC PE= 3 SV=1
MKKAVVLLSGGLDSTTALYLAKSQGFEVYAISFDYGQRHDKELQCAKNVAEAAGVKEHIIVKTNMDAWGGSALTDKNIDVPEGDVNRTDIPITYVPARNMIFLAFAASYAEKIGAQDIFIGVSEVDYSGYVDCRQEFLDAMEQAINKGTVCGVEGRKIKINAPFINMTKAEEIKLGMELGVDYSLTWSCYKGEDKACGVCDSCLLRLKAFKEAGFEDPIEYKEEK

SEQ ID NO: 42901 - protein, 214 aa, Thermocrinis albus
  misc_feature (1)..(214): tr|D3SL05|D3SL05_THEAH 7-cyano-7-deazaguanine synthase OS=Thermocrinis albus (strain DSM 14484 / JCM 11386 / H I 11/12) OX=638303 GN=queC PE=3 SV=1
MRRILVLLSGGMDSAVLLWLAKREFEEVYAISFDYGQRHSVELKYAKILAQLAGVKEHILVEVPSYRYIKGSALIDTRVEVPTGEYPTHAPPITTVPMRNLVFLAIASSFADALEIDHVGIGVHALDTPYPDCRPEFITAAEAAINAASVQTATKKTRVHVFAPFLGMTKRQIALLGKELGVPFEKTYSCYRGTEPPCGECPTCIQREEALRDL

SEQ ID NO: 42902 - protein, 196 aa, Thermocrinis albus
  misc_feature (1)..(196): tr|D3SL76|D3SL76_THEAH 7-cyano-7-deazaguanine synthase OS=Thermocrinis albus (strain DSM 14484 / JCM 11386 / H I 11/12) OX=638303 GN=Thal_0873 PE=3 SV=1
MKKVVVLFSGGVESSTLLYLKLKEGVCVYPVYVREGMSWEHAELFWAKKVWHHFKESYTNLMPLCVCRGNGVPPRKGELFIPLRNLRLAASVATYALRRKAYEINIGSLGAYPFPDNNLPYLKEVEKLLSVGSGQDIKLEAPLFGMDKRRIVELYGPHVPLHLTFSCIKPIRKGNKFFHCGKCVKCLEREEALSRL

SEQ ID NO: 42903 - protein, 201 aa, Thermocrinis minervae
  misc_feature (1)..(201): tr|A0A1M6Q6A9|A0A1M6Q6A9_9AQUI 7-cyano-7-deazaguanine s ynthase OS=Thermocrinis minervae OX=381751 GN=SAMN05444 391_0095 PE=3 SV=1
MNVDKVGVLFSGGVESTTLLYMYLRKGFLVYPFYVKSGMLWENLELENAANLWVYTKRLYRNLMAIKIVPYKQSNFLKVPTSEEELFIPARNLSIIVAVAPFLRMKGIKTLAIGSLGAYPFPDNSLDYLKKVQELLSIGMAFSVNIEAPLFGMDKRYIVKSYKDIVPYYLTLSCANPRRIKGKITPCGRCIKCLERFQAFD

SEQ ID NO: 42904 - protein, 216 aa, Thermocrinis minervae
  misc_feature (1)..(216): tr|A0A1M6SMG3|A0A1M6SMG3_9AQUI 7-cyano-7-deazaguanine s ynthase OS=Thermocrinis minervae OX=381751 GN=queC PE=3 SV=1
MKRILVLLSGGMDSAVLLWLCKKDFQEVYAVSFDYGQRHRVELKYALELGRIAGVKEHFVVEVPVYRSLKGVSALTDASLDVPKGDYPKDEPPITTVPMRNLVFLALASAIADAYEIDYIGIGVHSLDSPYPDCRPEFITSAEACITSASTYSSKTKRRMHVYAPFLGMTKREVALLGKELGVPFEKTYSCYLGTEPPCGECPTCLQREEALKGVL

SEQ ID NO: 42905 - protein, 213 aa, Thermocrinis ruber
  misc_feature (1)..(213): tr|W0DCY1|W0DCY1_9AQUI 7-cyano-7-deazaguanine synthase OS=Thermocrinis ruber OX=75906 GN=queC PE=3 SV=1
MKSIIVLFSGGLDSTTLLWLAKKEFDRVIAISFDYGQRHKVELKHAKELAKLAGVEHLIVDVPSLKGITTSALLEGGPEVPSEDYSNAPPITTVPMRNLIFLAIAGAYADALGIDTVGIAVHSLDTPYPDCRPEFITSAQSALTAGSILTATKKVPMKIYAPFLGMTKREIALLGKELGVPFEKTYSCYRGTEPPCGECATCKQREEALKGLL

SEQ ID NO: 42906 - protein, 206 aa, Thermocrinis ruber
  misc_feature (1)..(206): tr|W0DF90|W0DF90_9AQUI 7-cyano-7-deazaguanine synthase OS=Thermocrinis ruber OX=75906 GN=THERU_03630 PE=3 SV=1
MKKSVVLFSGGVESTCVLYLKLLEGQVVYPVYVKCGMPWERLEYVKATELWQETKRKFSKLMPIKVLPLKTYHKKYKAIETEEELFIPLRNLTLLTAVAGYALSKRAESVSIGSLGLYPFPDNNLAYLKEVERLITEGSKQRLKVEVPLFGMEKGEVVKRFSKWVPLHRTFSCVNPVLRNGKILHCGICIKCKEREEAFKEAQIPL

SEQ ID NO: 42907 - protein, 226 aa, Thermodesulfatator autotrophicus
  misc_feature (1)..(226): tr|A0A177E592|A0A177E592_9BACT 7-cyano-7-deazaguanine s ynthase OS=Thermodesulfatator autotrophicus OX=1795632 GN=queC PE=3 SV=1
MPRPIAVCLVSGGLDSCVAAACAAKNYELAFLHVKYGQRTEARELRAFNKIADFYKVKYRLITSVPALKDIGGSALTDEKLKVPEGSVSTDGIPITYVPFRNAHFLAIAVSWGEVLGAKRIFIGASQVDFSGYPDCRASFFEAFNQVIKEGTRPETDIRIETPLINLSKAEIVKLGIKLGAPLHLTWSCYQREDMACGRCESCLLRLKGFKEAGLEDPIPYVRENI

SEQ ID NO: 42908 - protein, 226 aa, Thermodesulfatator indicus
  misc_feature (1)..(226): tr|F8ADT8|F8ADT8_THEID 7-cyano-7-deazaguanine synthase OS=Thermodesulfatator indicus (strain DSM 15286 / JCM 1 1887 / CIR29812) OX=667014 GN=queC PE=3 SV=1
MTKPIAICLLSGGLDSCVAAACAAREHELAFLHVNYGQRTEARELRAFNEIADFYQVKYRLVTSVPALKDIGGSALTDENLAVPEGSVSSQGIPITYVPFRNAHFLAIAVSWGEVIGARRIFIGASQVDFSGYPDCRASFFEAFNQVIKEGTRPETDIRIETPLINLSKAEIVKLGKELGAPLHLTWSCYQREDKACGRCESCLLRLKGFKEAGLKDPIPYVEETL

SEQ ID NO: 42909 - protein, 217 aa, Thermodesulfitimonas autotrophica
  misc_feature (1)..(217): tr|A0A3N5AXL3|A0A3N5AXL3_9THEO 7-cyano-7-deazaguanine s ynthase OS=Thermodesulfitimonas autotrophica OX=1894989 GN=queC PE=3 SV=1
MKSVVLLSGGLDSAVCLGYAVRDGQVVLALTFDYGQLAARREIEAAAALAAHYGVTHQVVALPFLSAITTTGLVTGEDIPEPEVARLDDQEEATARAARVWVPNRNGIFLNIAAAFAEHLGAAAVVAGFNREEAAAFPDNSAAFVAAATEALRYSTRGRVRVVSYTQQLTKVEIVELGRRLGVPLELVWSCYRGGETMCGRCESCQRFLRAVAAAKV

SEQ ID NO: 42910 - protein, 235 aa, Thermodesulfobacteria bacterium
  misc_feature (1)..(235): tr|A0A496QJ44|A0A496QJ44_9BACT 7-cyano-7-deazaguanine s ynthase OS=Thermodesulfobacteria bacterium OX=2202153 G N=queC PE=3 SV=1
MTFSSDDKQHKLPLAVCLVSGGLDSCVAAAIAIRNCRPAFLHVNYGQLTEERELLAFDAIADHYGVKDRLKVDMSYLKSIGGSALTDPAIPVPEESLGESGIPVTYVPFRNTHLLAVAVSWAEVLGAGYIYIGATEVDSSGYPDCRKSYFDACQLLIKEGTLPETKIEIITPLIDYNKGMVVKEGLALKAPLRLTWSCYQNQDVACGKCDSCLLRIKGFAAAGVSDPIRYANVTV

SEQ ID NO: 42911 - protein, 224 aa, Thermodesulfobacteriales bacterium
  misc_feature (1)..(224): tr|A0A524JT44|A0A524JT44_9BACT 7-cyano-7-deazaguanine s ynthase OS=Thermodesulfobacteriales bacterium OX=252804 0 GN=queC PE=3 SV=1
MKTKAVIIASGGIDSSTLLYKMVKDGFQVYVLTFIYGQKHLKEIEYAKVIAQRLEVDHRVVDLSAMKGLLSGSALTDANVEVPNVPETADHYETLKSTIVPNRNAIFLSIAIGYAVSLEANHVYFGAHFSDRGVYPDCRKEFVEAFQYSERLANDNPDLVLDAPFVNIDKSEIVKLGAELGVPFKDTWTCYKGGEKHCGVCSSCRERKRAFAQSGVPDPTEYEQ

SEQ ID NO: 42912 - protein, 229 aa, Thermodesulfobacterium commune
  misc_feature (1)..(229): tr|A0A101FIQ1|A0A101FIQ1_9BACT 7-cyano-7-deazaguanine s ynthase OS=Thermodesulfobacterium commune OX=1741 GN=qu eC PE=3 SV=1
MSLEITEQKKKKLAVILLSAGMDSAVCASVAAQDHALAFLHFQYGQKAAKKELECFYRLVDHFKPQKYLVVELSFFKIIGGSSLTSEEMKIPQPSNTQEIPSTYVPFRNGVFLSLAVAWAEVIGAEKIFIGVNEIDFSGYPDCRKEFIQAFNQAANLGTKPETKIMIETPLIHLSKKEIVELGRKLNTPFHLTWSCYRETEKACGGCDSCQIRLKAFKEAGIEDPIEYA

SEQ ID NO: 42913 - protein, 229 aa, Thermodesulfobacterium commune
  misc_feature (1)..(229): tr|A0A075WSR1|A0A075WSR1_9BACT 7-cyano-7-deazaguanine s ynthase OS=Thermodesulfobacterium commune DSM 2178 OX=2 89377 GN=queC PE=3 SV=1
MSLNNHKNRKADLALVLLSAGMDSAVCASVAAQEHALAFLHFQYGQKAAKKELECFYRLVDHFKPQKYLVVELTFFKIIGGSSLTSEEIEISESLNTQEIPSTYVPFRNGVFLSLAVAWAEVIGAEKIFIGVNEIDFSGYPDCRKEFIQAFNQAANLGTKPETKIMIETPLIHLSKKEIVELGIKLNTPFHLTWSCYRETEKACGRCDSCQIRLKAFKEAGIEDPIEYA

SEQ ID NO: 42914 - protein, 222 aa, Thermodesulfobacterium geofontis
  misc_feature (1)..(222): tr|F8C3V8|F8C3V8_THEGP 7-cyano-7-deazaguanine synthase OS=Thermodesulfobacterium geofontis (strain OPF15) OX=7 95359 GN=queC PE=3 SV=1
MKNELAIVLLSGGMDSTVCASIASQNYRLAFLHFQYGQKAQKKELECFYKLIEFFKPEKFQIVYLPFFKDFGGSSLISEELEIPEKQEKGIPSTYVPFRNGIFLSIATAWAEVIGAKKIFIGVNEVDFSGYPDCRKIFIEKFNQAINVGTKPETQIEIETPIINLTKKEIVELGIKLNTPFHLTWSCYRGGEKACGKCDSCNLRLKAFKEAGIKDPILYENV

SEQ ID NO: 42915 - protein, 210 aa, Thermodesulfobacterium geofontis
  misc_feature (1)..(210): tr|A0A2N7PMX1|A0A2N7PMX1_9BACT 7-cyano-7-deazaguanine s ynthase OS=Thermodesulfobacterium geofontis OX=1295609 GN=queC PE=3 SV=1
MDSAVCASIASQTNRLAFLHFQYGQKAYKKELECFKNLVEFFKPEKAEIVNLPFFKNWGGSSLISNSLEIPETEVGEIPSTYVPFRNGIFLSIATAWAEIIGATKIFIGVNQIDFSGYPDCRSEFIEAFNKAISIGTKPETKIKIETPIINLTKKEIVKLGIKLGTPFHLTWSCYKETEIACGKCASCKLRLKAFKEAGIPDPLPYAHQF

SEQ ID NO: 42916 - protein, 216 aa, Thermodesulfobium acidiphilum
  misc_feature (1)..(216): tr|A0A2R4W289|A0A2R4W289_9FIRM 7-cyano-7-deazaguanine s ynthase OS=Thermodesulfobium acidiphilum OX=1794699 GN= queC PE=3 SV=1
MNIVHIFSGGLDSTTLLYYLLNEGHKVKTISFFYGQKHNKELECSKNIAKKLNIENKLIDLSALKNVFGKSSLTSEIDVPEGHYNDINMKSTVVPNRNMIFLSIAISYAISSNFDAVSIGVHAGDHAIYPDCRPVFINRMKEVAKVSDYNEIDILTPFLDFKKCEIVKIGLELKVPYEMTWTCYRGEEKPCLKCGACTERLEAFKLNNVKDPLLLI

SEQ ID NO: 42917 - protein, 216 aa, Thermodesulfobium narugense
  misc_feature (1)..(216): tr|A0A2J6XC23|A0A2J6XC23_9FIRM 7-cyano-7-deazaguanine s ynthase OS=Thermodesulfobium narugense OX=184064 GN=que C PE=3 SV=1
MNIVHIFSGGLDSTTLLYYLLNEGHKVKTISFFYGQKHNKELECSKNIAKKLNIENKLIDLSALKNVFGKSSLTSEIDVPEGHYNDINMKSTVVPNRNMIFLSIAISYAISSNFDAVSIGVHAGDHAIYPDCRPVFINRMKEVAKVSDYNEIDILTPFLNFKKCEIVKIGLELKVPYEMTWTCYRGEEKPCLKCGACTERLEAFKLNNVKDPLLLI

SEQ ID NO: 42918 - protein, 216 aa, Thermodesulfobium narugense
  misc_feature (1)..(216): tr|M1E8W1|M1E8W1_9FIRM 7-cyano-7-deazaguanine synthase OS=Thermodesulfobium narugense DSM 14796 OX=747365 GN=q ueC PE=3 SV=1
MNIVHIFSGGLDSTTLLYYLLNQGHKVKTISFFYGQKHKKELECSKNIARKLNIENKLIDLSALKDIFGKSSLTSDMDIPEGHYNDTNMKSTVVPNRNMIFLSIAISYAISSNFDAVSIGVHAGDHAIYPDCRPVFINKMKDVAKVSDYSEIGILAPFLDLKKYEIVKIGLELKVPYEMTWTCYKGEEKPCLKCGSCTERLEAFELNNVKDPLVFI

SEQ ID NO: 42919 - protein, 234 aa, Thermodesulforhabdus norvegica
  misc_feature (1)..(234): tr|A0A1I4SMJ8|A0A1I4SMJ8_9DELT 7-cyano-7-deazaguanine s ynthase OS=Thermodesulforhabdus norvegica OX=39841 GN=q ueC PE=3 SV=1
MNRSRAVVLLSGGIDSTTTLAVAKHQGYELYALTFRYGQRHEKEIQSARRLARVFGVKKHLILEIPLHLIGASALTDDIPVPKDVPQDKIGRNVPITYVPGRNTIFLACAVAWGETVGAYDIFIGANALDYSGYPDCRPEFIEAFEKVANLGTRAGSEEGQRFRIHAPLISLSKKEIILKGISLGVDYALTHSCYDPDPQGRACGRCESCILRRKGFKEAGIPDPTIYAEEQQK

SEQ ID NO: 42920 - protein, 221 aa, Thermodesulfovibrio aggregans
  misc_feature (1)..(221): tr|A0A2J6WGI8|A0A2J6WGI8_9BACT 7-cyano-7-deazaguanine s ynthase OS=Thermodesulfovibrio aggregans OX=86166 GN=qu eC PE=3 SV=1
MKAVVLLSGGIDSSTTLAIAKNEGFECYAISFDYAQRHRIELDFAKKVAKHIGVKEHLIISFDLRKIGGSALTSEIDVPAGTQEGIPVTYVPARNTIFLSFALAWAEVLNAPFIFIGANVVDYSGYPDCRPEYLQAFERMANLATKISVEGKLQFKIHAPLLYLTKAEIIKKGIELGLDYSLTWSCYDPQGDPPKPCLKCPSCLFRLKAFEEAGIKDPLLK

SEQ ID NO: 42921 - protein, 221 aa, Thermodesulfovibrio aggregans
  misc_feature (1)..(221): tr|A0A0U9HQP5|A0A0U9HQP5_9BACT 7-cyano-7-deazaguanine s ynthase OS=Thermodesulfovibrio aggregans OX=86166 GN=qu eC PE=3 SV=1
MKAIVLLSGGIDSSTTLAIAKHEGFDCFALSFAYGQRHKIELEAARKVANHIGVKEHLIISFDLRKIGGSALTSEIDVPSGTPEGIPVTYVPARNTIFLSFALAWAEVIEAPYIFIGANIVDYSGYPDCRPEYLQAFERMANLATKVAVEGKLQFKIQAPLLYLTKGEIIKKGFELGVDYSLTWSCYNPQGEPPKPCLKCPSCLYRLKGFEEAGIKDPLLR

SEQ ID NO: 42922 - protein, 222 aa, Thermodesulfovibrio sp.
  misc_feature (1)..(222): tr|A0A1C3FI55|A0A1C3FI55_9BACT 7-cyano-7-deazaguanine s ynthase OS=Thermodesulfovibrio sp. N1 OX=1871110 GN=que C PE=3 SV=1
MKKAVVLLSGGIDSSTTLALAKNEGFECYAISFDYKQRHSIELEFAKKVAKHVGVKEHLIVSFDLRKIGGSALTSKIEIPKDTQEGIPVTYVPARNTIFLSFALAWAEVLQTPYIFIGANVVDYSGYPDCRPEYLSAFEYMANLATKASVEGTIKFKIQAPLLYLTKTEIIKKGIELGLDYSLTWSCYYPQGEPPKPCLKCPSCIYRLKGFEEAGIKDPLLK

SEQ ID NO: 42923 - protein, 262 aa, Thermodesulfovibrio sp.
  misc_feature (1)..(262): tr|A0A1G3Y1P8|A0A1G3Y1P8_9BACT 7-cyano-7-deazaguanine s ynthase OS=Thermodesulfovibrio sp. RBG_19FT_COMBO_42_12 OX=1802373 GN=queC PE=3 SV=1
MNKKAVILLSGGIDSSTTFAIAKSEGYELYALSFDYNQQHKRELESARLVASTLKTLKHLIIKFDLREVGGSALTSEMKVPKTGENLPPHPPSAIPVTYVPARNTIFLSFAIAWAEVLEAENIFIGANVIDYSGYPDCRPEYLKAFEDMANLATKASVEGRLRFRIKAPLVSMKKSEIIKKGVELGLDYSLTWSCYDPQPAISGVESSKFKVQSYKEENSKLHLELDSPPGSKLVPCGRCDSCVFRAKGFQEAGIEDPLLKL

SEQ ID NO: 42924 - protein, 224 aa, Thermodesulfovibrio yellowstonii
  misc_feature (1)..(224): tr|B5YI03|B5YI03_THEYD 7-cyano-7-deazaguanine synthase OS=Thermodesulfovibrio yellowstonii (strain ATCC 51303 / DSM 11347 / YP87) OX=289376 GN=queC PE=3 SV=1
MKKAVILLSGGIDSSTTLIIAKSEGFECYALSFDYGQRHKIEIEAAKKVAKHIGVKEHLIVSFDLRKIGGSALTSKMEIPKEEIEGIPITYVPARNTIFLSFGLAWAEVLQCPNIFIGANIVDYSGYPDCRPEYLQAFERMANLATKISVEGTLKFKINAPLLYLTKSEIIKKGIELGLDYSLTWSCYDPQGDPENPSPCLKCPSCIYRLKGFKEAGIIDPLVK

SEQ ID NO: 42925 - protein, 229 aa, Thermoflavimicrobium dichotomicum
  misc_feature (1)..(229): tr|A0A1I3RQX7|A0A1I3RQX7_9BACL 7-cyano-7-deazaguanine s ynthase OS=Thermoflavimicrobium dichotomicum OX=46223 G N=queC PE=3 SV=1
MKEKAVIVLSGGLDSTTCMGIAKQRGYDLYPITFFYNQRHNREVEQAKKIAEYYEVGHQHKVVNVSFLGEIGGSALTDQAIHVPTDGVKDEIPSTYVPARNLIFLSLATAYAEVIGAKVIYTGVTAVDYSGYPDCRPEFIQSMTETINLATKLGVTSEEKLRIETPLIHLSKAEIIRIGLDLQVPYELTTSCYLGEEEACGECDSCRLRLKGFEENNAKDPIRYRTAAS

SEQ ID NO: 42926 - protein, 227 aa, Thermoflavimicrobium sp.
  misc_feature (1)..(227): tr|A0A364K151|A0A364K151_9BACL 7-cyano-7-deazaguanine s ynthase OS=Thermoflavimicrobium sp. FBKL4.011 OX=213747 6 GN=queC PE=3 SV=1
MKEKAVIVLSGGLDSTTCMGIAKQKGYDLYPITFFYNQRHNREVEQAKKVAEYYGVEHHHKIVNVSFLGDIGGSALTDQAMDVPTTSIAEEIPSTYVPARNLIFLSLATAYAEVIGAQAIYTGVTAVDYSGYPDCRPEFIQSMTDTINLATKMGVTGEDRLRIKTPLIHLSKAEIIRIGLDLQVPYELTTSCYLGEEEACGVCDSCRLRLKGFAENGAQDPIRYQSC

SEQ ID NO: 42927 - protein, 247 aa, Thermoflexus hugenholtzii
  misc_feature (1)..(247): tr|A0A2A9HE94|A0A2A9HE94_9CHLR 7-cyano-7-deazaguanine s ynthase OS=Thermoflexus hugenholtzii OX=1495650 GN=queC PE=3 SV=1
MANERARLGVVLLSGGLDSTTVAAHAVREGGEVRALSIAYGQRHARELAAARAVAEALGIPLVEADAAFYARLAAHSALTSSAFAVPADRPGEAMAAEVPITYVPLRNTFFVTLAAAALESWLLDRIEGGGADPKGLEGVIYVGANAIDYSGYPDCRPEFYRAMEEVIRLGSKVGSAYGVPVRIAAPIIRMSKAEIVRYGLELGAPLGLTWSCYLGGERPCGSCDACRLRAAGFAAAGARDPALEAG

SEQ ID NO: 42928 - protein, 226 aa, Thermogemmatispora argillosa
  misc_feature (1)..(226): tr|A0A455T693|A0A455T693_9CHLR 7-cyano-7-deazaguanine s ynthase OS=Thermogemmatispora argillosa OX=2045280 GN=q ueC PE=3 SV=1
MSSRPKAIAIVSGGLDSVTLAHLLHAQGYQLHILSFDYGQRHRKELLFAERCARRLEAAFSLLDLRQLGQHFKGSALTDESVAVPDGHYAAANMAITVVPNRNAIMLAIAYGIAVAEEAEVVAFAAHAGDHFIYPDCRPAFIEAFGAMERLAVEGHGHPRLHLEAPFAHLKKEQIVSLGAALGVPFAETWSCYKGGEKHCGTCGTCHERKEAFQLAGVPDPTEYLQ

SEQ ID NO: 42929 - protein, 225 aa, Thermogemmatispora aurantia
  misc_feature (1)..(225): tr|A0A5J4JX08|A0A5J4JX08_9CHLR 7-cyano-7-deazaguanine s ynthase OS=Thermogemmatispora aurantia OX=2045279 GN=qu eC PE=4 SV=1
MARPKAIAVVSGGLDSVTLAHLLHAQGYQLHLLSFDYGQRHRKELFFAERCAQRLEAAFSLLDLRQLGQHFKGSALTDESVAVPDGHYAAANMAITVVPNRNAIMLAIAYGIAVAEEAEVVAFAAHAGDHFIYPDCRPAFIEAFGAMERLAVEGHGHPRLHLEAPFAHLKKEQIVSLGAALGVPFVETWSCYKGGEKHCGTCGTCNERKEAFQLAGIPDPTDYLQ

SEQ ID NO: 42930 - protein, 225 aa, Thermogemmatispora tikiterensis
  misc_feature (1)..(225): tr|A0A328VFA0|A0A328VFA0_9CHLR 7-cyano-7-deazaguanine s ynthase OS=Thermogemmatispora tikiterensis OX=1825093 G N=queC PE=3 SV=1
MSRPKAIAVVSGGLDSVTLAHLLHAQGYQLHLLSFDYGQRHRKELFFAERCAQRLEAAFSLLDLRQLGQHFKGSALTDESVAVPDGHYAAANMAITVVPNRNAIMLAIAYGIAVAEEAEVVAFAAHAGDHFIYPDCRPAFIEAFGAMERLAVEGHGHPRLHLEAPFAHLKKEQIVCLGAALGVPFVETWSCYKGGEKHCGTCGTCNERKEAFQLAGVPDPTDYLQ

SEQ ID NO: 42931 - protein, 234 aa, Thermogutta terrifontis
  misc_feature (1)..(234): tr|A0A286RLJ9|A0A286RLJ9_9PLAN 7-cyano-7-deazaguanine s ynthase OS=Thermogutta terrifontis OX=1331910 GN=THTE_4 239 PE=3 SV=1
MHGTKLNQNDSSVAVLLSGGLDSSLMLAKLVEDGRCVAPLYVRSGLFWEQAELAAVRRILAWFADRVRPLAILELPVRDIYGDHWSLTGEQIPDADSPDEAVFLPGRNLLLLVKAGLWCRQQGVPFLALGILDTNPFADASEEFLRTVETALNLYGDPPLQIIRPLQGVSKTEWMKWGQRWPLHETFSCIAPMDGLHCGGCNKCAERRRAFREAGIPDLTRYASDLDGKSVSPA

SEQ ID NO: 42932 - protein, 233 aa, Thermogutta terrifontis
  misc_feature (1)..(233): tr|A0A286RM67|A0A286RM67_9PLAN 7-cyano-7-deazaguanine s ynthase OS=Thermogutta terrifontis OX=1331910 GN=queC P E=3 SV=1
MASQASRGAVVLLSGGMDSSTTAAIARHEGFRLFALTIDYGQRHRLELESARKVAQFLNAAEHIVLRVDLTCFGRSALTDTIAVPKDRPVTAGHGEIPVTYVPARNTVFLALALAYAESRGLADIFIGANAVDYSGYPDCRPEFIEAFEHLANLGTKAGVEGRTRFRIHAPLLQMTKAQIIRRGIELGLDYGLTHTCYDPTPDGLACGRCDACQLRKKGFAEAGLQDPIAYVC

SEQ ID NO: 42933 - protein, 212 aa, Thermohydrogenium kirishiense
  misc_feature (1)..(212): tr|A0A4R4A571|A0A4R4A571_9FIRM 7-cyano-7-deazaguanine s ynthase OS=Thermohydrogenium kirishiense OX=937254 GN=E DC21_12325 PE=3 SV=1
MEDNKVVLLYSGGIDSTVLLYRLVESKYDVYPFFINYGQNSVKGEITAIYKILDEYLKKKLFILNVPEIRNIGKGSLVGEYPKNLGSIEEWYQSEFFPNRNMILISIGAAYCYKIGASKLAIGVVGISYKDTTKIFLSGIERLLNNSLKNIKIIAPFAELPREEVVKESVRLNVPIELTFSCNSSGERHCLLCTSCYEREKALQLRQKLIIR

SEQ ID NO: 42934 - protein, 221 aa, Thermolongibacillus altinsuensis
  misc_feature (1)..(221): tr|A0A4R1QLR9|A0A4R1QLR9_9BACI 7-cyano-7-deazaguanine s ynthase OS=Thermolongibacillus altinsuensis OX=575256 G N=queC PE=3 SV=1
MKNEKAVVVFSGGQDSTTCLFWALKHFAEVEAVTFNYNQRHKLEIEVASSIARELNINHTILDLSLLNQLAPNALTRKDIAIEHKEGELPSTFVDGRNLLFLSFAAVFAKQRGARHLVTGVCETDFSGYPDCRDIFIKSLNVTLNLAMDYQFVIHTPLMWLNKAETWKLADELGAFSFIREKTLTCYNGIIADGCGECPACHLRRRGLEQYLAEKEGVEKK

SEQ ID NO: 42935 - protein, 226 aa, Thermomicrobium roseum
  misc_feature (1)..(226): tr|B9L187|B9L187_THERP 7-cyano-7-deazaguanine synthase OS=Thermomicrobium roseum (strain ATCC 27502 / DSM 5159 / P-2) OX=309801 GN=queC PE=3 SV=1
MEPRKRSQRAVVLLSGGLDSTTLAYLLDAYGFVLYGLSFRYGQRHERELEAARAIAEKLRFAEHRVVTIDLAQWGGSSLVGSGEIPRQPTSGIPSTYVPVRNLVFLAIAHAYAEAIDADAVAIAVSQVDYSGYPDCRGEFLAAYQQAADLASRRFVETGRRIPVLAPFLDVPKSAIVRLGLRLGVDYAETWSCYRGGERPCQECDSCRLRAQAFAEAGVPDPLLQR

SEQ ID NO: 42936 - protein, 236 aa, Thermomonas haemolytica
  misc_feature (1)..(236): tr|A0A4R3N6P8|A0A4R3N6P8_9GAMM 7-cyano-7-deazaguanine s ynthase OS=Thermomonas haemolytica OX=141949 GN=queC PE =3 SV=1
MIESSKPAVVLVSGGMDSAVVLAIAREAGFAPYALSVRYGQRHTSELDAAARVASALGAVAHKTVHVDLRSIGGSALTDDIAVPTDADGHVIGQGIPSTYVPARNTIMLSVALGWAEVLGSTDLFCGVNAVDYSGYPDCRPEFIAGFEALANLATKAGVEGSRFRVHAPLMRMSKADIAREGLRLGVDFAQTVSCYQADAEGRACGQCDACRLRAQGFADAGLPDPTRYVPGAGIG

SEQ ID NO: 42937 - protein, 247 aa, Thermomonas hydrothermalis
  misc_feature (1)..(247): tr|A0A1M4WBD3|A0A1M4WBD3_9GAMM 7-cyano-7-deazaguanine s ynthase OS=Thermomonas hydrothermalis OX=213588 GN=queC PE=3 SV=1
MPPATDTIFLPMLTPTKPAVVLVSGGMDSAVVLAIAREAGFAPHALSVRYGQRHTSELDAAARVARALGAVAHKTVHVDLRSIGGSALTDDIAVPTDADGHVIGQGIPSTYVPARNTIMLSVALGWAEVLGATDLFCGVNAVDYSGYPDCRPAFITAFEALANLATKAGVEGQKFRVHAPLLHLSKAEIVREGLRLGVDFAQTVSCYQADPEGRACGHCDACRLRAQGFADAGVADPTRYVNGARIG

SEQ ID NO: 42938 - protein, 235 aa, Thermomonas sp.
  misc_feature (1)..(235): tr|A0A5B7ZPB2|A0A5B7ZPB2_9GAMM 7-cyano-7-deazaguanine s ynthase OS=Thermomonas sp. SY21 OX=2202149 GN=queC PE=3 SV=1
MSASRKPAVVLVSGGMDSAVVLAIAREAGFDVHALSVRYGQRHTSELDAADRVSNALGAVAHKTVHVDLRSIGGSALTDDIAVPTDDDGHEIGVGIPSTYVPARNTIMLSLALGWAEVLGSTDLFCGVNAVDYSGYPDCRPEFIAGFEALANLATKAGVEGSRFRVHAPLMRMSKADIVREGLRLGVDFSQTVSCYQADADGRACGHCDACRLRAQGFAEAGVADPTRYVAGVIG

SEQ ID NO: 42939 - protein, 223 aa, Thermophagus xiamenensis
  misc_feature (1)..(223): tr|A0A1I2EZR0|A0A1I2EZR0_9BACT 7-cyano-7-deazaguanine s ynthase OS=Thermophagus xiamenensis OX=385682 GN=queC P E=3 SV=1
MKKAVVLLSGGLDSSVALYLAKSQGFKLYALSFDYGQQHERELQAARAVAQSARVEEHQVVNMKLDLWGGSSLTDKSIEIKDGDVNRKDIPDTYVPARNMVFLSVAASYAEAIGAQDIFIGVSQVDYSGYVDCREEFIEAMEKAINKGTVMGAEKNQPIRIHAPFVYKTKADEIRLGRQLNVPFELTWSCYRGGEKPCGKCDSCLLRAKAFAEAGVEDKALNQ

SEQ ID NO: 42940 - protein, 223 aa, Thermosinus carboxydivorans
  misc_feature (1)..(223): tr|A1HNF2|A1HNF2_9FIRM 7-cyano-7-deazaguanine synthase OS=Thermosinus carboxydivorans Nor1 OX=401526 GN=queC P E=3 SV=1
MFGLNKENALVVFSGGQDSTTCLFWAMKHFQEVEAVTFDYGQRHRAEIECAQKIAAEQGIAHTILDLSLLNQLAPSALTRADIEVKAGENGGLPTTFVPGRNLLFLSFAAVLARQKNIRHIVTGVCETDFSGYPDCRDAFIKSLNVTIQLAMDYQFVIHTPLMWLNKAETWELADQLGVLDYIRSNTLTCYHGVIGDGCGQCPACRLRVAGLNAYLAKRGRMK

SEQ ID NO: 42941 - protein, 248 aa, Thermosporothrix hazakensis
  misc_feature (1)..(248): tr|A0A326U693|A0A326U693_9CHLR 7-cyano-7-deazaguanine s ynthase OS=Thermosporothrix hazakensis OX=644383 GN=que C PE=3 SV=1
MSDAMKNTRRAVLIVSGGMDSCVLSYYYAAAGFNLHLLSFDYGQRHLKELDYAKRYIEHLRQRYSSGPQALEILHETIELPIARLSPNSTSALLNADVEMPHGHYSDDNMKITVVPYRNPNMLLQAATVAWNEGASVIAYAAHAGDHSQYPDCRPAFVEAFNTMLARSMDDNTVTVEVPFMRFTKAQIARLGASLGVPFEQTWSCYEGGEQHCGLCGTCVERREAFLLAGVPDPTVYEREPDPSVYER

SEQ ID NO: 42942 - protein, 248 aa, Thermosporothrix sp.; identical to SEQ ID NO: 42941
  misc_feature (1)..(248): tr|A0A455SG52|A0A455SG52_9CHLR 7-cyano-7-deazaguanine s ynthase OS=Thermosporothrix sp. COM3 OX=2490863 GN=queC PE=3 SV=1

SEQ ID NO: 42943 - protein, 242 aa, Thermosulfidibacter takaii
  misc_feature (1)..(242): tr|A0A0S3QUH6|A0A0S3QUH6_THET7 7-cyano-7-deazaguanine s ynthase OS=Thermosulfidibacter takaii (strain DSM 17441 / JCM 13301 / NBRC 103674 / ABI70S6) OX=1298851 GN=que C PE=3 SV=1
MKKALVIFSGGLDSTTCLYWAKAHFDEVYTVTFNYGQTHRIEVAFAQKIAEKVGVKEHKTFHLDLTQIGGSALTDPSIEIPDRDEDEILANNIPVTYVPFRNGIFLSIAAAFAETKGIQHIVGGWNAVDFSGYPDCRPEFVKAMEQAINTGTKMAAEGKPFSIHSPLINLTKSQIIALGLSYGADYSYSLSCYRGQEVPCFRCDSCKLRMKGWKGVGIIDHLVERLIREGKLKDLPEAYKNR

SEQ ID NO: 42944 - protein, 225 aa, Thermosulfurimonas dismutans
  misc_feature (1)..(225): tr|A0A179D4V0|A0A179D4V0_9BACT 7-cyano-7-deazaguanine s ynthase OS=Thermosulfurimonas dismutans OX=999894 GN=qu eC PE=3 SV=1
MKRPLAVVLVSGGLDSCVTAAVAAQEHDVAFLHVKYGQRTESREEKAFFDLCEHFRPKFRLVTEVPALKAIGGSALTDTKLSVPEEEPDPERIPITYVPFRNAHFLCVAVSWAEVIGAEKIFIGANQVDFSGYPDCRRSFFDAFERTIEEGTRPETHIRIETPLINLTKPEIVRLGVQLGAPFHLTWSCYQNEKVACGRCESCRLRLKAFSEAGLEDPIPYEESL

SEQ ID NO: 42945 - protein, 233 aa, Thermosynechococcus elongatus
  misc_feature (1)..(233): sp|Q8DI59|QUEC_THEEB 7-cyano-7-deazaguanine synthase OS =Thermosynechococcus elongatus (strain BP-1) OX=197221 GN=queC PE=3 SV=1
MVTTQKAVVLLSGGLDSSTVLFRAKALGYACYALSFDYGQRHRRELEAAIAIATSAGVVEHQILPLNLRLWGGSALTDLSIDLPRDRDLATMSQEIPVTYVPARNTIFLSVALAYAEALEARSVHIGVNALDYSGYPDCRPDYIAAMQEVYRLGTKQGREGQPIEIVTPLIDLHKTDIIRLGHGYGVPWEKTWSCYSDGQQACGRCDACRLRLAAFAELGLVDPLPYAVHPPL

SEQ ID NO: 42946 - protein, 233 aa, Thermosynechococcus elongatus
  misc_feature (1)..(233): tr|A0A3B7MCG1|A0A3B7MCG1_9CYAN 7-cyano-7-deazaguanine s ynthase OS=Thermosynechococcus elongatus PKUAC-SCTE542 OX=2016101 GN=queC PE=3 SV=1
MMTTQKAVVLLSGGLDSSTVLFRAKALGYACYALSFDYGQRHRRELEAAIAIASVAGVIQHQIVPLNLRLWGGSALTDSTLDLPRDRDLATMGQEIPITYVPARNTIFLSVALAYAEALGAQTVHIGVNALDYSGYPDCRPDYIAAMQEVYRLGTKQGREGQPIEIVTPLIELHKKDIIRLGNEYGVPWEKTWSCYSDGEQACGRCDACRLRLAAFAELGLEDPLPYAVHPPL

SEQ ID NO: 42947 - protein, 233 aa, Thermosynechococcus sp.
  misc_feature (1)..(233): tr|A0A5C2M6Q3|A0A5C2M6Q3_9CYAN 7-cyano-7-deazaguanine s ynthase OS=Thermosynechococcus sp. CL-1 OX=2583530 GN=q ueC PE=3 SV=1
MMTTPKAVVLLSGGLDSSTVLFRAKALGYACYALSFDYGQRHRRELEAAIAIASAAGVIQHQILSLNLQLWGGSALTDLTIDLPRDRDLATMSQEIPITYVPARNTIFLSVALAYAEALGAQTVHIGVNALDYSGYPDCRPDYIAAMQEVYRLGTKQGREGQPIEIVTPLIELHKKDIIRLGNEYGVPWEKTWSCYSDDQQACGRCDACRLRLAAFAELGLGDPLPYAVHPPL

SEQ ID NO: 42948 - protein, 233 aa, Thermosynechococcus sp.
  misc_feature (1)..(233): tr|V5V6A4|V5V6A4_9CYAN 7-cyano-7-deazaguanine synthase OS=Thermosynechococcus sp. NK55a OX=1394889 GN=queC PE= 3 SV=1
MTTTQKAVVLLSGGLDSSTVLFRAKALGYACYALSFDYGQRHRRELEAAIAIATAAGVVEHQILPLNLRLWGGSALTDLSIDLPRDRDLATMSQEIPVTYVPARNTIFLSVALAYAEALGAQTVHIGVNALDYSGYPDCRPDYIAAMQEVYRLGTKQGREGQPIEIVTPLIELHKKDIIRLGHGYGVPWEKTWSCYSNGEQACGCCDACRLRLAAFAELGLVDPLPYAVHPPL

SEQ ID NO: 42949 - protein, 208 aa, Thermosyntropha lipolytica
  misc_feature (1)..(208): tr|A0A1M5PD96|A0A1M5PD96_9FIRM 7-cyano-7-deazaguanine s ynthase OS=Thermosyntropha lipolytica DSM 11003 OX=1123 382 GN=SAMN02745221_01438 PE=3 SV=1
MKAIALLSGGLDSVVSMLLASKEVKVELAITIDYGQRARENEIKAARNICRIYNVKHEVVELPFMHKIQSDLIKKESLPITNPWVPNRNGLFINLAACYAESMKAGLVICGFNREEAFNFPDNSEEYVRALNNALYYSTTNHVKVKSFVQDMDKIDIIRTAAELGLDFRYIWSCYGGGEKPCLRCSSCLRNMEAFAKAGIKYNEDFIC

SEQ ID NO: 42950 - protein, 233 aa, Thermotalea metallivorans
  misc_feature (1)..(233): tr|A0A140LAA5|A0A140LAA5_9CLOT 7-cyano-7-deazaguanine s ynthase OS=Thermotalea metallivorans OX=520762 GN=queC PE=3 SV=1
MYKALVLVSGGLDSTVLTAKIVKKYGAETVAALNIYYGQKHAKEQEYASFQANSYGIKMIHADLSKVFQWSKDCPLLEGSENEIPEKSYAEQLQEHGGKGIVKTYVPFRNGLFLSYAAAVAIQIGASKIFYGAHSDDAAGNAYPDCSSAFIGSMAKSIFEGTGGLVKLEAPFWNLTKKEIVKIGLELGVDFAHTWSCYRGESLPCRVCATCIDREKAFEANGMVDPLVKGESL

SEQ ID NO: 42951 - protein, 235 aa, Thermovibrio ammonificans
  misc_feature (1)..(235): tr|E8T5D4|E8T5D4_THEA1 7-cyano-7-deazaguanine synthase OS=Thermovibrio ammonificans (strain DSM 15698 / JCM 12 110 / HB-1) OX=648996 GN=queC PE=3 SV=1
MNGAVVIFSGGLDSTTALYWAKRHFEKVYAITFYYGQRHSLEVEFAKITAEKANVDEHLIFPVDLSRIGASALTDRSIEVPETSSVEEIKERGIPVTYVPFRNGIFISIAAAYAEAKGCTNLVGGWNAVDYSGYPDCRPQFLKAMEEALNLGTKAGAEGKRWHIHAPLINLTKGQIIKLGLELGADYSYSLSCYRGDEVPCMKCDSCILRAKGWEEVGEEDHLIKRLKEEGKILE

SEQ ID NO: 42952 - protein, 235 aa, Thermovibrio guaymasensis
  misc_feature (1)..(235): tr|A0A420W784|A0A420W784_9BACT 7-cyano-7-deazaguanine s ynthase OS=Thermovibrio guaymasensis OX=240167 GN=queC PE=3 SV=1
MERAVVIFSGGLDSTTALYWAKREFKEVYAITFVYGQRHSIEVEMAKVTAKNAGVKEHLIYEVDLSKIGSSALTDFSIEVPQPRSVEEIKERGVPVTYVPFRNGIFISIAAAYAESKGTTHLVGGWNVVDYSGYPDCRPEFLEAMERALDLGTKLGAEGNKWHIHAPLINLTKAEIIKLGLELGADYSYSVSCYRGGEVPCGKCDSCLLRAKGWAEVGQEDHLIKRLKEEGKIVE

SEQ ID NO: 42953 - protein, 235 aa, Thermovibrio sp.
  misc_feature (1)..(235): tr|A0A432UDR4|A0A432UDR4_9BACT 7-cyano-7-deazaguanine s ynthase OS=Thermovibrio sp. OX=2231115 GN=queC PE=3 SV= 1
MSSAVVIFSGGLDSTTALYWAKRKFKKVYAITFYYGQRHSIEVEMARKTAERAGVEEHVLFEVDLSKFGASALTDKCIEVPETTSVDEIRERGIPVTYVPFRNGVFISIAASYAESRGTANLVGGWNAVDYSGYPDCRPEFLSAMEEALNRGTKLGSEGKEWRIHAPLINLTKGQIIELGLSLGADYSYSISCYRGGEVPCMRCDSCILRAKGWAEVGEEDHLIKRLKEEGKILE

SEQ ID NO: 42954 - protein, 235 aa, Thermovibrio sp.
  misc_feature (1)..(235): tr|A0A432UMB5|A0A432UMB5_9BACT 7-cyano-7-deazaguanine s ynthase OS=Thermovibrio sp. OX=2231115 GN=queC PE=3 SV= 1
MDSAVVIFSGGLDSTTALYWAKRKFKRVYAITFYYGQRHSIEVEMAKRTAERAKVDEHLLFEVDLSKFGGSALTDKNLEVPETKSVEEIEERGIPITYVPFRNGVFISIAASYAESRGTTNIVGGWNIVDYSGYPDCRPEFLSAMEEALNRGTKLGSEGKDWKIHAPLIKLTKGEIIKLGLSLGADYSYSISCYRGEEIPCMRCDSCILRAKGWAEVGEEDHLIKRLKEEGKILE

SEQ ID NO: 42955 - protein, 206 aa, Thermus arciformis
  misc_feature (1)..(206): tr|A0A1G7L9P8|A0A1G7L9P8_9DEIN 7-cyano-7-deazaguanine s ynthase OS=Thermus arciformis OX=482827 GN=SAMN04488243 _1612 PE=3 SV=1
MKRLVMLSGGVDSSVLLYKLKKQDRLEGLLAVYLDLGTPPAEREWRAAEKVASRLGVPVYRNRVPHFELGDRLFSPPELAFPGREQIRAGWTDPCTMTPITGSLAAKMGVEEVYLGVIKDDFASHPKLEAYLALVGEFLEFNQVQLKMPLAGLTKQQVVALGLELGVPLEETWSCVASGEAPCGVCAPCIAREEAFALADAKALVR

SEQ ID NO: 42956 - protein, 206 aa, Thermus scotoductus
  misc_feature (1)..(206): tr|E8PLB5|E8PLB5_THESS 7-cyano-7-deazaguanine synthase OS=Thermus scotoductus (strain ATCC 700910 / SA-01) OX= 743525 GN=queC PE=3 SV=1
MKRLVMLSGGLDSSVLLYKLKKQDGLEGLAAVYLDLGTPPTQKEWRAAEKVASRLGVAIYRNRVPHFELGDRLFSPPELAFPGRESIQAGWTDPCTMTPITGSLAAKMGVEEVYLGVIKDDFASHPRLEAYLALVKKFLEFNQVRLKMPLSGLTKQEVVALGHELGVPLEETWSCVASGEAPCGACNPCIAREEAFALADAKALAR

SEQ ID NO: 42957 - protein, 206 aa, Thermus scotoductus; identical to SEQ ID NO: 42956
  misc_feature (1)..(206): tr|A0A348XNC0|A0A348XNC0_THESC 7-cyano-7-deazaguanine s ynthase OS=Thermus scotoductus OX=37636 GN=CSW40_02640 PE=3 SV=1

SEQ ID NO: 42958 - protein, 173 aa, Thermus sp.
  misc_feature (1)..(173): tr|W2U162|W2U162_9DEIN 7-cyano-7-deazaguanine synthase OS=Thermus sp. NMX2.A1 OX=570924 GN=TNMX_10905 PE=3 SV= 1
MDLGTPPTQKEWRAAEKVASRLGVAIYRNRVPHFELGDRLFSPPELAFPGRESIQAGWTDPCTMTPITGSLAAKMGVEEVYLGVIKDDFASHPRLEAYLALVKKFLEFNQVQLKMPLSGLTKQEVVALGHELGVPLEETWSCVASGEAPCGACNPCIAREEAFALADAKALAR

SEQ ID NO: 42959 - protein, 232 aa, Thioalbus denitrificans
  misc_feature (1)..(232): tr|A0A369C364|A0A369C364_9GAMM 7-cyano-7-deazaguanine s ynthase OS=Thioalbus denitrificans OX=547122 GN=queC PE =3 SV=1
MNTTVKQAVVLTSGGLDSTTCLAIARDQGYRCHTLAFDYGQKHKAELDAGIRISRALGAGDHKIIRIDLASIGGSALTDPKIAVPDHPTRGIPVTYVPARNTVFLSLALGWAEVLGACDIFIGVNAVDYSGYPDCRPAFIEAFQDLANLATKAGVEGERFRIHAPLLHLSKADIIRTGVRLGLDYGMTVSCYSADEEGRACGVCDACRLRREGFREAEIPDPTRYRPGSPFA

SEQ ID NO: 42960 - protein, 220 aa, Thioalbus denitrificans
  misc_feature (1)..(220): tr|A0A369CB68|A0A369CB68_9GAMM 7-cyano-7-deazaguanine s ynthase OS=Thioalbus denitrificans OX=547122 GN=DFQ59_1 05189 PE=3 SV=1
MAGPVAVLVSGGIDSAALAVELAGTHPVVHPLYLRHGLQWEETELAHLRRFLAAAERPALRPVSVLELPVADLYGRHWSLSDGAVPDHSTPDEAVYLPGRNLLFLAKAGVWCERHGVSAIALAPLKGNPFSDNSPEFYAAMERVLELALGFRLEILRPYAALTKAEVIRRSSRLPLELTFSCMDPRQGRHCGRCNKCAERHRAFREAGVEDRTEYAAPPR

SEQ ID NO: 42961 - protein, 224 aa, Thioalkalivibrio denitrificans
  misc_feature (1)..(224): tr|A0A1V3NKV5|A0A1V3NKV5_9GAMM 7-cyano-7-deazaguanine s ynthase OS=Thioalkalivibrio denitrificans OX=108003 GN= queC PE=3 SV=1
MNNAIVLLSGGMDSATVLAMAREQGYVCHALSFRYGQRHGVELEAAARLAEALGAVEHRIVDLDLSLFGGSALTDERIEVPREPTKGIPATYVPARNTVFLSIALAWAEVLPAQHIFIGVNAVDYSGYPDCRPAFIEAFQRLANLATRAGVEGRAFTIHAPLLDMSKAEIIRRGLDLGVDFSATVSCYAADEQGRACGVCDACRLRAAGFAQAGVADATRYRGG

SEQ ID NO: 42962 - protein, 221 aa, Thioalkalivibrio denitrificans
  misc_feature (1)..(221): tr|A0A1V3NUW3|A0A1V3NUW3_9GAMM 7-cyano-7-deazaguanine s ynthase OS=Thioalkalivibrio denitrificans OX=108003 GN= B1C78_01795 PE=3 SV=1
MGPSLSISSPRQTAGSVLLLSGGIDSATLLAMEVSRGPVTPLVVDYGQRGAQREAAASQRLCAAHDLKPVHLDLAAVGERFREGLNRRAHVPLPHRNLVILSLAISYAGRDGSSRVALALNREDLTAYASASSSFLERFRTLANTLQPGLEIATPLIDRDKAGVIRLGHELGVDFAVTWSCLLGYETHCGSCPQCRQRREAFRAAELPDPTRYRHNPGTGT

SEQ ID NO: 42963 - protein, 213 aa, Thioalkalivibrio halophilus
  misc_feature (1)..(213): tr|A0A1V2ZY86|A0A1V2ZY86_9GAMM 7-cyano-7-deazaguanine s ynthase OS=Thioalkalivibrio halophilus OX=252474 GN=B1A 74_08040 PE=3 SV=1
MNPEPDLLLLSGGVESAALLRRWCAENRPVIATWADYGQRNAARERAAVLALAEAEGVRLETVETGALREAFTRRADWVGHVPLPQRNLLILALAVNLAQHHGAGRILLALNREDAGHGPGSGAAFLQGFGSLAARLVPGLSVAAPLQELGKADIIRRGAQDGVPWRLTWSCLLGQERHCGRCPQCHARQAAFAAADVPDPTDYRQPPGPQTP

SEQ ID NO: 42964 - protein, 228 aa, Thioalkalivibrio halophilus
  misc_feature (1)..(228): tr|A0A1V3A0V8|A0A1V3A0V8_9GAMM 7-cyano-7-deazaguanine s ynthase OS=Thioalkalivibrio halophilus OX=252474 GN=que C PE=3 SV=1
MATGVNERSVVLLSGGLDSATCLALAQEQGLECHALSVDYGQRHATELQAARRVAAAAGVADHRVVHVDLAAIGGSALTDSAIEVPEAGGEGIPVTYVPARNTVFLSLALGFAETLGAHRLVVGANAVDYSGYPDCRPAFIEAFQSLARVATATGVEGAPWSVEAPLMHLSKAQIIREGARLGVDYSLTVSCYRADADGRACGTCDSCRLRADGFAAAGIPDPTRYAG

SEQ ID NO: 42965 - protein, 242 aa, Thioalkalivibrio nitratireducens
  misc_feature (1)..(242): tr|L0E2Z3|L0E2Z3_THIND 7-cyano-7-deazaguanine synthase OS=Thioalkalivibrio nitratireducens (strain DSM 14787 / UNIQEM 213 / ALEN2) OX=1255043 GN=queC [H] PE=3 SV=1
MSPAADRFPGDAAEPGRAAVVLLSGGLDSATCLALARAAGYACHALSVDYGQRHRAELKAARRVAASLGAVSHRVIRIDLGAIGGSALTDPSIPVPEAPTQGIPATYVPARNTTLLSLSLGLAEALELREIFIGVNAVDYSGYPDCRPEFIAAFEDLANLATRAGVEGRRFRIRAPLLTMTKAEIIGVGTACRLDYSLTVSCYQADADGRACGVCDSCRIRRAGFDAAGLPDPTRYRTDAPA

SEQ ID NO: 42966 - protein, 243 aa, Thioalkalivibrio paradoxus
  misc_feature (1)..(243): tr|W0DGB8|W0DGB8_9GAMM 7-cyano-7-deazaguanine synthase OS=Thioalkalivibrio paradoxus ARh 1 OX=713585 GN=queC P E=3 SV=1
MSRATDRTGQGGGTEGGRAAVVLLSGGLDSATCLALARAAGYRCHALSVDYGQRHRAELEAAGRVAAALGAASHRVIRIDLGAIGGSALTDSSIPVPETPTEGIPVTYVPARNTTLLALSLALTEALDLDEIFIGVNAVDYSGYPDCRPEFIAAFENLANLATRAGAEGRRFRIRAPLLTMTKAEIIGVGTACRLDYSLTVSCYQADAEGRACGVCDSCRIRRAGFEAAGVPDPTRYRPDAPA

SEQ ID NO: 42967 - protein, 217 aa, Thioalkalivibrio sp.
  misc_feature (1)..(217): tr|D3SE85|D3SE85_THISK 7-cyano-7-deazaguanine synthase OS=Thioalkalivibrio sp. (strain K90mix) OX=396595 GN=TK 90_2422 PE=3 SV=1
MHATDKYTGESPPDLLLLSGGIESSALLAQRHAQGRPLRALWVDYGQRNAERERAAIRALGADYGVDPVEMDLRALRQAFAKRSEWVAHVPLPQRNLLVLALAINLAEHQGAGRILLALNREDQGHGPGSRPSFIGRLAALADELVPGLAIEAPLIAQSKADIIYTTDPLGIDWSRTWSCLLAQSLHCGRCPQCQARRAAFASAGVPDPTDYREPPR

SEQ ID NO: 42968 - protein, 213 aa, Thioalkalivibrio sp.
  misc_feature (1)..(213): tr|A0A318VTQ4|A0A318VTQ4_9GAMM 7-cyano-7-deazaguanine s ynthase OS=Thioalkalivibrio sp. ALE21 OX=1158175 GN=D89 3_00643 PE=3 SV=1
MNPEPDLLLLSGGVESAALLRRWCAENRPVIATWADYGQRNAARERAAVLALAEAEGVRLKTVETGALREAFTRRADWVGHVPLPQRNLLILALAVNLAQHHGAGRILLALNREDAGHGPGSRAAFLQDFGSLAARLVPGLSVAAPLQELGKADIIRRGGQDGVPWRLTWSCLLGQERHCGRCPQCHARQAAFAAADVPDPTDYRQPPGPQTP

SEQ ID NO: 42969 - protein, 229 aa, Thioalkalivibrio sulfidiphilus
  misc_feature (1)..(229): tr|B8GUI5|B8GUI5_THISH 7-cyano-7-deazaguanine synthase OS=Thioalkalivibrio sulfidiphilus (strain HL-EbGR7) OX= 396588 GN=queC PE=3 SV=1
MSSAQRNAVVLLSGGMDSATVLAIAREQGYVCHALSFRYGQRHRAELDAAARVAKSQGAVRHQVVDLDLSLFGGSALTDSRIDLPETPSEGIPVTYVPARNTVFLSVALAWAEVLPARDIFIGVNAVDYSGYPDCRPAFIEAFERLANLATRAGVEGRQLSIHAPLQYLSKADIIRRGTELGVDFAETVTCYGADAKGLACGVCDACRLRAQGFADAGLPDVTRYRRKV

SEQ ID NO: 42970 - protein, 213 aa, Thioalkalivibrio sulfidiphilus
  misc_feature (1)..(213): tr|B8GP80|B8GP80_THISH 7-cyano-7-deazaguanine synthase OS=Thioalkalivibrio sulfidiphilus (strain HL-EbGR7) OX= 396588 GN=Tgr7_2927 PE=3 SV=1
MPISSPSGVNGSLLLLSGGIESATLLALESRQRPVTPLVVDYGQRGALRERDAARAQCESHGLTPVELDLSATGGTFRDGLLKRPHVPLPHRNLVILSLAVSYAARGGIDRVVLALNRDDLAAYPSASPGFLEHFRALIHDLQPGLEITTPLIDRDKAGVIRLGVSLGVDFARTWSCLLGYETHCGACPQCLHRRAAFRAAGIADPTRYRHDS

SEQ ID NO: 42971 - protein, 228 aa, Thioalkalivibrio versutus
  misc_feature (1)..(228): tr|A0A0G3G3G4|A0A0G3G3G4_9GAMM 7-cyano-7-deazaguanine s ynthase OS=Thioalkalivibrio versutus OX=106634 GN=queC PE=3 SV=1
MSERAEKAVVLLSGGLDSATCLAMARAEGLDCYALSIDYGQRHHTELDAARRVAAAQGVADHRVVAVDLSAIGGSALTDAAIAVPTAPTEGIPVTYVPARNTVFLALALGFAETLDARLLYVGANAVDYSGYPDCRPAFIEAFRDLARVATRSGVEGTPWEVRAPLMHWSKAEIIQAGVRLGVDYSQTVSCYQADAAGRACGRCDSCRIRREGFAAAGVPDPTRYVPD

SEQ ID NO: 42972 - protein, 204 aa, Thioalkalivibrio versutus
  misc_feature (1)..(204): tr|A0A1V3BPP7|A0A1V3BPP7_9GAMM 7-cyano-7-deazaguanine s ynthase OS=Thioalkalivibrio versutus OX=106634 GN=B0684 _10315 PE=3 SV=1
  misc_feature (18)..(19): Xaa can be any naturally occurring amino acid
MESARPESPDLLLLSGGXXAAGRLLRAVWVDYGQRNAAREWTAVEHLSAVYGCAPIALDLQSLRTAFTRRNDWVGHVPLPQRNLLVLALAVNLAEHHGAARILLALNREDQGHGPGSQPGFVQQVSELAAGLVPGLQVEAPLIDRSKAEIIAATDPLGIDWRHTWSCLLAQSRQCGRCPQCQARRAAFAAAGIPDPTDYREAPR

SEQ ID NO: 42973 - protein, 240 aa, Thiobaca trueperi
  misc_feature (1)..(240): tr|A0A4R3MZG0|A0A4R3MZG0_9GAMM 7-cyano-7-deazaguanine s ynthase OS=Thiobaca trueperi OX=127458 GN=queC PE=3 SV= 1
MRKKTAGTMTKAVVLLSGGLDSTTTLAIAKAEGFTPYALSFRYGQRHAVELESAVRVAQAMGVAEHVIADIDLRRFGGSALTADLPVPKARSLDEMGAGIPVTYVPARNTVFLSFALAWAEVLGASDLFIGVNALDYSGYPDCRPEYLAAYERMANLATAAGVEGRQQLRIHAPLMQLTKAGIIRWGLALGVDYALTSSCYDPGAAGRPCGQCDSCLLRARGFAEAGVADPLLARFAEAV

SEQ ID NO: 42974 - protein, 226 aa, Thiobacillus denitrificans
  misc_feature (1)..(226): tr|A0A119CV83|A0A119CV83_THIDE 7-cyano-7-deazaguanine s ynthase OS=Thiobacillus denitrificans OX=36861 GN=queC PE=3 SV=1
MKSAVILLSGGLDSATVLAIAREAGYACHALSLDYGQRHNAELAAAARVAASLGAVEHRVLKLGLSDIGGSALTDASIAVPESPTEGIPVTYVPARNTVMLALALAWAEVLGSRDIFIGVNAIDYSGYPDCRPEFIAAFEQMANLATRAGVEGARLRVHAPLQHLSKAQIIQRGLALGVDYAQTVSCYQADADGLACGRCDACRLRREGFRAAGIPDPTRYGQQAE

SEQ ID NO: 42975 - protein, 224 aa, Thiobacillus denitrificans
  misc_feature (1)..(224): sp|Q3SGT8|QUEC_THIDA 7-cyano-7-deazaguanine synthase OS =Thiobacillus denitrificans (strain ATCC 25259) OX=2924 15 GN=queC PE=3 SV=1
MKPCAIVLLSGGLDSATALAMAREAGFACHALSLDYGQRHTAELAAAARLAAQLGAVEHRVIRLGLGDFGGSALTDASIAVPESPVAGIPVTYVPARNTVMLALALAWAEVLGARDIFIGVNAVDYSGYPDCRPEFIEAFERMANLATKAGVEGAQLRIHAPLQHLSKAEIIHRGTALGVDYAQTVSCYQADAEGRACGRCDACRLRREGFLAAGLADPTRYAR

SEQ ID NO: 42976 - protein, 222 aa, Thiobacillus sp.
  misc_feature (1)..(222): tr|A0A1Q4EMX0|A0A1Q4EMX0_9PROT 7-cyano-7-deazaguanine s ynthase OS=Thiobacillus sp. 0-1251 OX=1895858 GN=queC P E=3 SV=1
MKPAVILLSGGLDSATVLAIAREAGYACHALSLDYGQRHTAELAAAARVARSLGAVEHRVMRLGLGDIGGSALTDASIAVPESPTDGIPVTYVPARNTVMLALALAWAEVLGARDIFIGVNAVDYSGYPDCRPEFIEAFERMANLATKSGVEGARLRIHAPLQALSKADIIRRGAALGVDYAQTVSCYQADAEGLACGRCDACRLRREGFLAAGIPDPTRYA

SEQ ID NO: 42977 - protein, 226 aa, Thiobacillus sp.
  misc_feature (1)..(226): tr|A0A1E4NVM4|A0A1E4NVM4_9PROT 7-cyano-7-deazaguanine s ynthase OS=Thiobacillus sp. SCN 63-57 OX=1660145 GN=que C PE=3 SV=1
MKPAVILLSGGLDSATVLAIAREAGYACHALSLDYGQRHTAELVAAARVARSLGAVEHRVMRLGLGDIGGSALTDASIAVPESPTDGIPVTYVPARNTVMLALALAWAEVLGARDLFIGVNAVDYSGYPDCRPEFIEAFERMANLATKSGVEGARLRIHAPLQTLSKADIIRQGTALGVDYAQTVSCYQADAEGLACGRCDACRLRRDGFLAAGIPDPTRYVQEAG

SEQ ID NO: 42978 - protein, 233 aa, Thiocapsa marina
  misc_feature (1)..(233): tr|F9UIC8|F9UIC8_9GAMM 7-cyano-7-deazaguanine synthase OS=Thiocapsa marina 5811 OX=768671 GN=queC PE=3 SV=1
MKPAVVLLSGGLDSATAAAIATSEGFAVHALSFRYGQRHGIELESAARVAEALGVVEHAIVEIDLRRFGGSALTADIAVPKGRRAGTIGEGIPVTYVPARNTVFLSFALAWAETLGSEDIFIGVNVQDYSGYPDCRPAFIEAFERMANLATAAGVEGRQRLEIHAPLMQMTKAEIIARGLSLGVDYGLTSSCYDPGTDGRPCGLCDSCVLRAKGFADAGFPDPLSLRFGHLAP

SEQ ID NO: 42979 - protein, 233 aa, Thiocapsa rosea
  misc_feature (1)..(233): tr|A0A495VE99|A0A495VE99_9GAMM 7-cyano-7-deazaguanine s ynthase OS=Thiocapsa rosea OX=69360 GN=queC PE=3 SV=1
MKPAVVLLSGGLDSATASAIATSEGFAVHALSFRYGQRHGVELESAARVADALGVVEHAVVEIDLRRFGGSALTADIPVPKGRSAGAIGEGIPVTYVPARNTVFLSFALAWAETLGSEDIFIGVNVQDYSGYPDCRPAFIEAFEQMANLATAAGVEGRQSLKIHAPLMQMTKAEIIARGLSLGVDYGLTSSCYDPGTDGRPCGLCDSCLLRAKGFADAGYPDPLSLRFGLPVP

SEQ ID NO: 42980 - protein, 233 aa, Thiocapsa roseopersicina
  misc_feature (1)..(233): tr|A0A1H2SV43|A0A1H2SV43_THIRO 7-cyano-7-deazaguanine s ynthase OS=Thiocapsa roseopersicina OX=1058 GN=queC PE= 3 SV=1
MKPAVVLLSGGLDSATASAIAKSEGFAVHSLSFRYGQRHGIELESAARVAEALGVVEHAIVEIDLRRFGGSALTADIPVPKGRSAGAIGEGIPVTYVPARNTVFLSFALAWAETLGSEDIFIGVNVQDYSGYPDCRPAFIEAFEHMANLATAAGVEGRQRLKIHAPLMQMTKAEIIARGLSLGVDYGLTSSCYDPGTDGRACGLCDSCLLRAKGFADVGCPDPLLVRFGLAVP

SEQ ID NO: 42981 - protein, 233 aa, Thiocapsa sp.
  misc_feature (1)..(233): tr|A0A0U5IEA7|A0A0U5IEA7_9GAMM 7-cyano-7-deazaguanine s ynthase OS=Thiocapsa sp. KS1 OX=610332 GN=queC PE=3 SV= 1
MKPAVVLLSGGLDSATASAIAKSQGFAVHALSFRYGQRHGIELESAARVAAALGVAEHAIVEIDLRRFGGSALTADIPVPKGRSTDAIGDGIPVTYVPARNTVFLSFALAWAETLGSEDIFIGVNVQDYSGYPDCRPAFIDAFERMANLATAAGVEGRQRLKIHAPLMQMTKAEIIARGLSLGVDYGLTSSCYDPGTDGRPCGLCDSCLLRAKGFADAGCPDPLLVRFGLAVP

SEQ ID NO: 42982 - protein, 233 aa, Thioclava atlantica
  misc_feature (1)..(233): tr|A0A085TSC9|A0A085TSC9_9RHOB 7-cyano-7-deazaguanine s ynthase OS=Thioclava atlantica OX=1317124 GN=queC PE=3 SV=1
MKTIVICSGGLDSVSLAHKVAAEDTLTRLVSFDYGQRHRKELDFAARAAERLGVPHDIIDMRPIGAALTGSALTDDIDVPDGHYAEETMRITVVPNRNAIMLAIAFGVAAANGDDAVATAVHGGDHFIYPDCRPAFTEAFDAMQKAALDGYADVRLSTPFVHRSKADIVTEGAKYGTPFAETWSCYKGGAHHCGRCGTCVERREAFDLAGVPDPTVYDDPDYWRAAIAAREGR

SEQ ID NO: 42983 - protein, 233 aa, Thioclava dalianensis
  misc_feature (1)..(233): tr|A0A074TGB8|A0A074TGB8_9RHOB 7-cyano-7-deazaguanine s ynthase OS=Thioclava dalianensis OX=1185766 GN=queC PE= 3 SV=1
MKTIVICSGGLDSVSLAHMVAQERELTRLISFDYGQRHRKELDYAALCAQRLGVPHDVIDLRAIGAALSGSALTDDIDVPDGHYAEESMRITVVPNRNAIMLTIAFGVAAARGDAAVATAVHGGDHFIYPDCRPAFTEQFEAMQKAALDGYADVSLYTPFVHRTKADIVTEGARHNTPFARTWSCYKGGTHHCGRCGTCVERREAFHLAGIPDPTTYEDLTFWAEAIARKERA

SEQ ID NO: 42984 - protein, 233 aa, Thioclava electrotropha
  misc_feature (1)..(233): tr|A0A1W9XV42|A0A1W9XV42_9RHOB 7-cyano-7-deazaguanine s ynthase OS=Thioclava electrotropha OX=1549850 GN=queC P E=3 SV=1
MKTLVICSGGLDSVSLAHIVAAEGNLTRLVSFDYGQRHRKELDYAAAAARRLGVPHHLIDMRPIGAALTGSALTDDIDVPDGHYAEETMRITVVPNRNAIMLAIGFGVAAANGDEAVATAVHGGDHFIYPDCRPAFTEAFDAMQRMALDGYADVRLETPFVHRSKADIVAEGAKHGTPFAETWSCYKGGEVHCGRCGTCVERREAFHLAGVADPTAYADPDFWAKAVAEKEAR

SEQ ID NO: 42985 - protein, 233 aa, Thioclava sp.
  misc_feature (1)..(233): tr|A0A4V3ETC0|A0A4V3ETC0_9RHOB 7-cyano-7-deazaguanine s ynthase OS=Thioclava sp. ES.032 OX=1798206 GN=queC PE=3 SV=1
MKTLVICSGGLDSVSLAHIVAAENHLTRLVSFDYGQRHRKELDYAAAAARRLGVPHHLIDMRPIGAALTGSALTDDIDVPDGHYAEETMRITVVPNRNAIMLAIGFGVAAANGDEAVATAVHGGDHFIYPDCRPAFTEAFDAMQRMALDGYADVRLETPFVHRSKADIVAEGAKHGTPFAETWSCYKGGEVHCGRCGTCVERREAFHLAGVADPTAYADPDFWAKAVAEKEAR

SEQ ID NO: 42986 - protein, 233 aa, Thioclava sp.; identical to SEQ ID NO: 42984
  misc_feature (1)..(233): tr|A0A1T2A6P0|A0A1T2A6P0_9RHOB 7-cyano-7-deazaguanine s ynthase OS=Thioclava sp. F28-4 OX=1915315 GN=queC PE=3 SV=1

SEQ ID NO: 42987 - protein, 233 aa, Thiocystis violascens
  misc_feature (1)..(233): tr|I3Y5B1|I3Y5B1_THIV6 7-cyano-7-deazaguanine synthase OS=Thiocystis violascens (strain ATCC 17096 / DSM 198 / 6111) OX=765911 GN=queC PE=3 SV=1
MTNAVVLLSGGLDSTTTLAIARAEGFVPYALSFRYGQRHAIELDAATRVAKSMGVAEHVIADIDLRRFGGSALTADLAVPKGRDLAGMGEGIPITYVPARNTVFLSFALAWAEVLGASDLFIGVNALDYSGYPDCRPEYIEAFERMANLATAAAVEGRQRLKIHAPLIELTKAGIIRKGIELGVDYALTSSCYDPGEAGRPCGECDSCLLRAKGFAEAGFADPLLRRVPIDER

SEQ ID NO: 42988 - protein, 236 aa, Thioflavicoccus mobilis
  misc_feature (1)..(236): tr|L0GY25|L0GY25_9GAMM 7-cyano-7-deazaguanine synthase OS=Thioflavicoccus mobilis 8321 OX=765912 GN=queC PE=3 SV=1
MSDAPVTRAVVLLSGGLDSTTTLAVAQADGVEPCALSFRYGQRHVVELRAAARVAEALGVAEHLVMDIDLRRIGGSALTADIAVPKGREPAEIADGIPVTYVPARNTIFLSLALAWAETLGTGLIYLGVNALDYSGYPDCRPEFIAAFAEMANLATAAGVSGRHRVEIRTPLIELSKAEIIRLGTRLGVDYALTSSCYDPGVDDRPCGQCDSCLLRAKGFAEAGLADPLAARFGAG

SEQ ID NO: 42989 - protein, 229 aa, Thioflexothrix psekupsii
  misc_feature (1)..(229): tr|A0A251X5K0|A0A251X5K0_9GAMM 7-cyano-7-deazaguanine s ynthase OS=Thioflexothrix psekupsii OX=1570016 GN=queC PE=3 SV=1
MNSSILRKKAVILLSGGLDSATILAMAQQQDYDCYTLSFNYGQRHCAEIAAAQRIAEHFAVCDHKVIHLNLDCIGGSALTDAGIAVPITGLTSEIPVTYVPARNTVFLALALGWAEVLGARDIFIGVNAMDYSGYPDCRPAFIRQFEQLANVATKAGVMGESFHIHAPLLHWHKHEIIRHGVQLGVNYALTVSCYQANEQGEACGQCDACRLRRDGFAQAQVVDPTRYV

SEQ ID NO: 42990 - protein, 228 aa, Thiogranum longum
  misc_feature (1)..(228): tr|A0A4V6NDA6|A0A4V6NDA6_9GAMM 7-cyano-7-deazaguanine s ynthase OS=Thiogranum longum OX=1537524 GN=queC PE=3 SV =1
MSQAAERKAVVLLSGGLDSATTLALAREQGFACYALSLDYGQRHRAELKAAQRVANAIGVVEHKIIPLDLGAFGGSALTDAKIEVPEQSAEGIPVTYVPARNTVFLSLALGWAEVLGAWDLFIGVNAVDYSGYPDCRPEYIEAFQRLCRLATRAGVEGGNFTVRAPLIKMSKAEIIRTGVGLGLDYGLTISCYAADNAGRACGKCDSCRLRAAGFAVAGIDDPTDYRS

SEQ ID NO: 42991 - protein, 229 aa, Thiohalobacter thiocyanaticus
  misc_feature (1)..(229): tr|A0A426QHD8|A0A426QHD8_9GAMM 7-cyano-7-deazaguanine s ynthase OS=Thiohalobacter thiocyanaticus OX=585455 GN=q ueC PE=3 SV=1
MVQSETAGKAVVLLSGGLDSATVLAIARAQGYDCHALSLDYGQRHSAELAAAVRIVHAQGITDHQVVRLDLSRFGGSALTDPDIPVPEAPAAGIPSTYVPARNTVFLSLALGWAEVLGARDLFIGVNAVDYSGYPDCRPEYIQAFERLANLATRAGVEGGHFRIRAPLLEWSKARIIQEGMRLGVDYSLTVSCYAADEQGRACGRCDSCRLRAAGFAAAGVPDPTRYRN

SEQ ID NO: 42992 - protein, 229 aa, Thiohalobacter thiocyanaticus
  misc_feature (1)..(229): tr|A0A1Z4VPH6|A0A1Z4VPH6_9GAMM 7-cyano-7-deazaguanine s ynthase OS=Thiohalobacter thiocyanaticus OX=585455 GN=q ueC PE=3 SV=1
MVQSGTDSKAVVLLSGGLDSATVLAIARAQGYACHALSLDYGQRHAAELAAAVRIVQAQGVAEHRVVRLDLSQFGGSALTDPDIPVPETAAAGIPSTYVPARNTVFLSLALGWAEVLGARDLFIGVNAVDYSGYPDCRPEYIAAFERLANLATRAGVEGDRFHVRAPLLEWSKARIIQEGLHLGVDYSLTVSCYAADAQGRACGRCDSCRLRAAGFAAAGVPDPTRYRT

SEQ ID NO: 42993 - protein, 227 aa, Thiohalomonas denitrificans
  misc_feature (1)..(227): tr|A0A1G5PKQ6|A0A1G5PKQ6_9GAMM 7-cyano-7-deazaguanine s ynthase OS=Thiohalomonas denitrificans OX=415747 GN=que C PE=3 SV=1
MNSLPKKAVALLSGGLDSATSLAMARDQGFECYALSFDYGQRHRIELEASRRVGQSLGVREHRIFTLDLRQFGGSALTDDRIEVPQGPSEGIPVTYVPARNTIFLSLALGWAEVLGALDLFIGVNAVDYSGYPDCRPEFIDAFQKTANLATRAGAEGQCFSIHAPLVSMTKAEIIATGHRLGVDYGLTLSCYNPDFGGNACGICDSCRLRAAGFHEAGVPDPTPYKT

SEQ ID NO: 42994 - protein, 224 aa, Thiohalophilus thiocyanatoxydans
  misc_feature (1)..(224): tr|A0A4R8ILK9|A0A4R8ILK9_9GAMM 7-cyano-7-deazaguanine s ynthase OS=Thiohalophilus thiocyanatoxydans OX=381308 G N=queC PE=3 SV=1
MKKAVVLVSGGLDSATTLALAREQGYACYAISFDYGQRHKCELDAAQQVARSLGVVEHKLMQLNMNDLGGSALTDESLDVPEEGVGEGIPVTYVPARNTVFLSLALGWAEVLEAEAIFIGVNAVDYSGYPDCRPEYIAAYQRLADLATRRGVEGRPIRVEAPLIHLSKAAIIREGARLGVDYGLTTSCYAPDAQCRACGRCDACRLRRAGFKTAGIPDPTPYQL

SEQ ID NO: 42995 - protein, 216 aa, Thiohalorhabdus denitrificans
  misc_feature (1)..(216): tr|A0A0P9CMK3|A0A0P9CMK3_9GAMM 7-cyano-7-deazaguanine s ynthase OS=Thiohalorhabdus denitrificans OX=381306 GN=S AMN05661077_0513 PE=3 SV=1
MAVELGARGTGGCVVLASGGIESTTLLHRLARQGEGISPVFFHYGQRPSDREYRAARAQCLELGLNLEVLDIAGVTPVFQKGQERQYHIPLPHRNLVALSLGLSLAEKRGADRLLIGTTGDDADLAASASRPFLDAFRGMAGLLGPVSVEAPFQEMGKDEVVLEGLRLGVDFGRTYSCLLGRREPCGSCPQCRKRRSAFDRAGVPEPPPTLDAGEA

SEQ ID NO: 42996 - protein, 231 aa, Thiohalorhabdus denitrificans
  misc_feature (1)..(231): tr|A0A0P9GMC2|A0A0P9GMC2_9GAMM 7-cyano-7-deazaguanine s ynthase OS=Thiohalorhabdus denitrificans OX=381306 GN=q ueC PE=3 SV=1
MPTLVVCSGGLDSVTLAEQVAAEGDLAGLVTFDYGQRHRKELEFARRAAERLGVGHDVVDLAALGRHLSGSALTDAVDVPEGHYAADNMAVTVVPNRNPILFTIAFGIANARGWDRVAAAVHGGDHFVYPDCRPEFVDAFAEMERRALAGMGEVAFHTPYVERSKADIVAAGAGLGVPFAETWSCYQGGEVHCGRCGTCVERREAFHLAGVADPTAYADPDYWRHAVREKA

SEQ ID NO: 42997 - protein, 230 aa, Thiohalospira halophila
  misc_feature (1)..(230): tr|A0A1I1QYA0|A0A1I1QYA0_9GAMM 7-cyano-7-deazaguanine s ynthase OS=Thiohalospira halophila DSM 15071 OX=1123397 GN=queC PE=3 SV=1
MSQSGTDQRAVVLLSGGLDSATTLAMARAEGFDCHTLAFDYGQRHRGELAASAAVAEQLRAAEHRVMNLDLGAIGGSALTDRAIEIPSETGAGIPVTYVPARNTIFLSMALGWAEVLGAWDIFIGANAVDYSGYPDCRPEYIAAFEQMANRALRATVEGEGYLRIRAPLMDMSKAQIIAAGHDRGVDYALTTSCYNPDEAGRACGVCDSCRLRAAGFAEAGVPDPTPYQD

SEQ ID NO: 42998 - protein, 227 aa, Thiolapillus brandeum
  misc_feature (1)..(227): tr|W0TQP9|W0TQP9_9GAMM 7-cyano-7-deazaguanine synthase OS=Thiolapillus brandeum OX=1076588 GN=queC PE=3 SV=1
MIDKQKKAVVLLSGGLDSATVLAIARDRGYACHALSFDYGQRHNAELLASRRIAHTLGAVEHKVLSLDLGSIGGSALTDMAIDVPEESAEGIPVTYVPARNTVFLSLALGWAEVLGAGDIFIGVNAVDYSGYPDCRPEFIAAFENLANLATKAGVEEGGFHIQAPLIQMSKAEIIRTGMSLGLDYALTVSCYQADNQGRACGQCDSCRLRAQGFAQAGVSDPTCYHS

SEQ ID NO: 42999 - protein, 228 aa, Thiomicrospira aerophila
  misc_feature (1)..(228): tr|W0DVY4|W0DVY4_9GAMM 7-cyano-7-deazaguanine synthase OS=Thiomicrospira aerophila AL3 OX=717772 GN=queC PE=3 SV=1
MSMADQTAVILLSGGLDSVTLLALARSEGYQCHTLSFAYGQRHTAELAAAANLSTQYGAKSHRVVPIDLGSIGGSALTDHSLSVPVDGVTDQIPITYVPARNTIFLAYALAVCEVLEAQALFVGVNAVDYSGYPDCRPEFIAAFQTLANLATKAGVEGHGVEVKTPLIALSKAEIIKLGVGLGVDYSQTVSCYSADEQGRACGLCDSCRLRKQGFAQAGLVDPTRYQA

SEQ ID NO: 43000 - protein, 224 aa, Thiomicrospira cyclica
  misc_feature (1)..(224): tr|F6D8D0|F6D8D0_THICA 7-cyano-7-deazaguanine synthase OS=Thiomicrospira cyclica (strain DSM 14477 / JCM 11371 / ALM1) OX=717773 GN=queC PE=3 SV=1
MKQAVILLSGGLDSVTLLALAKQEGYDCHTLSFAYGQRHTAELLAAAQLSAHYGAKSHRVVQIDLASIGGSALTDHSLVVPVDGVEDHIPITYVPARNTIFLAYALGVCEVLEAQALFVGVNAVDYSGYPDCRPEFIAAFQTLANLATKAGVEGRGVEVKTPLIAMSKAEIIQLGVRLGVDYSQTVSCYSADEQGRACGLCDSCRLRKQGFEQAGLVDPTRYQV

SEQ ID NO: 43001 - protein, 227 aa, Thiomicrospira sp.; identical to SEQ ID NO: 38789
  misc_feature (1)..(227): tr|A0A3Q9I3Z6|A0A3Q9I3Z6_9GAMM 7-cyano-7-deazaguanine s ynthase OS=Thiomicrospira sp. S5 OX=1803865 GN=queC PE= 3 SV=1

SEQ ID NO: 43002 - protein, 227 aa, Thiomicrospira sp.
  misc_feature (1)..(227): tr|A0A0X3TGU6|A0A0X3TGU6_9GAMM 7-cyano-7-deazaguanine s ynthase OS=Thiomicrospira sp. XS5 OX=1775636 GN=queC PE =3 SV=1
MKKAIVLLSGGLDSATVLAIAQAEGYECHTMSFDYGQRHRAELLAAERVSKTFGAKTHRLMSMNMRAIGGSALTDDAIDVPTTGVEENQIPVTYVPARNTIFLSYALGLAEVVDADDIFIGVNAVDYSGYPDCRPEFIQAFEVMANLATKAGVEGHKMHIRTPLIDLTKSQIIQEGIRLGVDYSQTVSCYQADESGAACGVCDSCRLRKQGFEAAGVEDPTIYVGRG

SEQ ID NO: 43003 - protein, 232 aa, Thiomonas bhubaneswarensis
  misc_feature (1)..(232): tr|A0A0K6HPT8|A0A0K6HPT8_9BURK 7-cyano-7-deazaguanine s ynthase OS=Thiomonas bhubaneswarensis OX=339866 GN=queC PE=3 SV=1
MNPAHTTAAPAAVVLLSGGLDSATVLALAREQGLRCYALSLDYGQRHRAELDAARRVAAALGAAGHEIVRLDLSRFGGSALTDHALDVPTDGGHDGIPITYVPARNTVMLSLALSWAEVLGAQHLFYGANAVDYSGYPDCRPEYVAAFERMANLATKAAIEGRPIRVQAPIIALRKAEIIRTGLRLGVDYAMTVSCYQADSQGRACGRCDACRIRAQGFTEAGVPDPTPYQP

SEQ ID NO: 43004 - protein, 235 aa, Thiomonas delicata
  misc_feature (1)..(235): tr|A0A238D474|A0A238D474_THIDL 7-cyano-7-deazaguanine s ynthase OS=Thiomonas delicata OX=364030 GN=queC PE=3 SV =1
MGVPTAQGMAPKAVVLLSGGLDSATVLAQAREQGYACHALSLHYGQRHSAELDAARRVAAALGAVRHEVIQLDLARFGGSALTDTTLDVPVTGPQNGIPVTYVPARNTVMLALALSWAEALGARDLFYGANAVDYSGYPDCRPEFVAAFERLANLATKAGVEGQPMRVHAPIIHLSKAQIIREGLRLGVDYALTVSCYQADARGRACGRCDSCRIRAAGFAEAGVVDPTQYKTAD

SEQ ID NO: 43005 - protein, 227 aa, Thiomonas sp.
  misc_feature (1)..(227): tr|A0A259Q5H1|A0A259Q5H1_9BURK 7-cyano-7-deazaguanine s ynthase OS=Thiomonas sp. 14-66-4 OX=1970450 GN=queC PE= 3 SV=1
MAPKAVVLLSGGLDSATVLAQAREQGYACHALSLHYGQRHSAELDAARRVAAALEAVRHEVIQLDLARFGGSALTDTTLDVPVTGPQNGIPVTYVPARNTVMLALALSWAEALGARDLFYGANAVDYSGYPDCRPEFVAAFERLANLATKAGVEGQPMRVHAPIIHLSKAQIIREGLRLGVDYALTVSCYQADARGRACGRCDSCRIRAAGFAEAGVADPTQYKTAD

SEQ ID NO: 43006 - protein, 217 aa, Thiomonas sp.
  misc_feature (1)..(217): tr|A0A257PXM9|A0A257PXM9_9BURK 7-cyano-7-deazaguanine s ynthase OS=Thiomonas sp. 20-64-5 OX=1970453 GN=queC PE= 3 SV=1
MDSATVLALAREQGFRCYALSLDYGQRHRSELHAARQVASALGAARHEIIRLDLSQFGGSALTDHTLAVPMAGAQIGIPLTYVPARNTVMLALAMSWAETLDAQNIFYGANAVDYSGYPDCRPEYVAAFERMANLATRAAVEGRPTQIHAPIIALSKGDIIRTGLRLGVDFAMTVSCYQADDAGRACGRCDACRIRAQGFIDAGVPDSTRYQQPYGI

SEQ ID NO: 43007 - protein, 233 aa, Thioploca ingrica
  misc_feature (1)..(233): tr|A0A090BUG4|A0A090BUG4_9GAMM 7-cyano-7-deazaguanine s ynthase OS=Thioploca ingrica OX=40754 GN=queC PE=3 SV=1
MIAPANPNKAVILVSGGLDSATTLAIAKSQGYACYALSFDYGQRHRVELQAARQITNQLGVIEHKFIQLNLDNIGGSALTDMRIEVPITGITHQIPITYVPARNTIFLALALGWAEVLSAYDLFMGVNAVDYSGYPDCRPEFIMAFEKMANLATKAGVEGHPFKIHTPLINLKKTQIIQAGLRLGIDYSLTISCYQANSTGYACGVCDACRLRAEGFRVLGIADPTRYLTQSL

SEQ ID NO: 43008 - protein, 222 aa, Thiopseudomonas denitrificans
  misc_feature (1)..(222): tr|A0A4V3D5H7|A0A4V3D5H7_9GAMM 7-cyano-7-deazaguanine s ynthase OS=Thiopseudomonas denitrificans OX=1501432 GN= queC PE=3 SV=1
MNTLLICSGGLDSVTLAHRLHAHGQLAALLCFDYGQRHKKEIDAARLCAQRLDVPFILLDISSIGRQLSGSALTGDVDVPHGFYSQDNMQLTVVPNRNAIMLTIAFGVAAARKLEAVAIAVHGGDHFVYADCRPEFIDAMAGMQRLALADQHQVSLLAPYVEADKTAIARDAARYDVPIADTWSCYEGGELHCGRCATCLERIEALALAGVNDPTRYAHGEG

SEQ ID NO: 43009 - protein, 232 aa, Thiorhodococcus drewsii
  misc_feature (1)..(232): tr|G2DXJ3|G2DXJ3_9GAMM 7-cyano-7-deazaguanine synthase OS=Thiorhodococcus drewsii AZ1 OX=765913 GN=queC PE=3 S V=1
MKRAVILLSGGLDSTTALAIAKSEGYVPYALSFRYGQRHAVELDSAGRVAESMGVAEHVIADIDLRRFGGSALTDDVDVPKGRETNAMSDGIPVTYVPARNTVFLSFALAWAEVLGASDIFVGVNALDYSGYPDCRPEYIDAFERLANLATASGVEGRQRFHVHAPLIELSKAEIIRRGVRLGVDYGLTSSCYDPGEDGRPCGFCDSCLLRAKGFAEAGLRDPLLVRFEKEA

SEQ ID NO: 43010 - protein, 230 aa, Thiorhodospira sibirica
  misc_feature (1)..(230): tr|G4E221|G4E221_9GAMM 7-cyano-7-deazaguanine synthase OS=Thiorhodospira sibirica ATCC 700588 OX=765914 GN=que C PE=3 SV=1
MSASPKAIVLLSGGLDSATVLALAKRQGFAVYALSFRYGQRHQIELAAAAKLAKAHQVVEHVSLEIDLRIFGGSALTADIAVPKDRAEVSGGSAIPVTYVPARNTIFLSFALAWAEVLEAADIFIGVNALDYSGYPDCRPAFIHAYQAMANLATRAGVENADPLRIHTPLIHMSKAEIIRLGHSLGVDYGLTCSCYDPSPEGQPCGHCDACLLRAKGFAEAGMADPLCGG

SEQ ID NO: 43011 - protein, 231 aa, Thiorhodovibrio sp.
  misc_feature (1)..(231): tr|H8Z4H2|H8Z4H2_9GAMM 7-cyano-7-deazaguanine synthase OS=Thiorhodovibrio sp. 970 OX=631362 GN=queC PE=3 SV=1
MTDTSRPAVVLLSGGLDSATVLAIAKDQGFAPHALSFRYGQRHLIELQAAARVAEALGAAEHRVVAVDLAGFGGSALTAKMDVPKHRDVGEIGLGIPTTYVPARNTVFLSLALAWAEVLGATDIFIGVNALDYSGYPDCRPEYIVAFERMANLATRAGVEGRERLRLHTPLIEMTKAQIIRCGLALGVDYGLTLSCYDPSPEGKSCGGCDACLLRAKGFAEAGVDDPVDGN

SEQ ID NO: 43012 - protein, 232 aa, Thiothrix caldifontis
  misc_feature (1)..(232): tr|A0A1H4ETE0|A0A1H4ETE0_9GAMM 7-cyano-7-deazaguanine s ynthase OS=Thiothrix caldifontis OX=525918 GN=queC PE=3 SV=1
MNKAVILLSGGLDSTTVLAIAKAQGYEPYALSFRYGQRHSIELTSAQRVAAAMQVKEHVIADINLRAFGGSALTADIDVPKGRDTAAMEAAIPITYVPARNTIFLSFALGWAEVLQANHIFVGVNALDYSGYPDCRPEFISAFETMANLATKSGVEGNKLTIHAPLIEMSKADIIIKGMELGVDYSLTSSCYDPSDGGKPCGQCDSCLLRAKGFVEAGVADPLLLRYAQRSA

SEQ ID NO: 43013 - protein, 107 aa, Thiothrix lacustris
  misc_feature (1)..(107): tr|A0A1Y1Q931|A0A1Y1Q931_9GAMM 7-cyano-7-deazaguanine s ynthase (Fragment) OS=Thiothrix lacustris OX=525917 GN= BWK73_48960 PE=3 SV=1
MKKAVVLLSGGMDSATVLAMATAQGYACYSLSFRYGQRHTAELQAALEQAQRQGAVRHEIIDLDLSRFGGSALTDDRIEVPTSPTQGIPVTYVPARNTVFLSIALGW

SEQ ID NO: 43014 - protein, 230 aa, Thiothrix lacustris
  misc_feature (1)..(230): tr|A0A1Y1Q750|A0A1Y1Q750_9GAMM 7-cyano-7-deazaguanine s ynthase OS=Thiothrix lacustris OX=525917 GN=queC PE=3 S V=1
MKKAVILLSGGLDSTTVLAIARAQGFEPYALSFRYGQRHSVELASAQRVAAAMQVKEHVIADINLRAFGGSALTADIDVPKGRDTAAMETDIPITYVPARNTIFLSFALGWAEVLHANHIFVGVNALDYSGYPDCRPEFISAFETLANLATKSGVEGNKLTIHAPLIEMSKADIIRKGLELGVDYGLTSSCYDPGDDGKPCGQCDSCLLRAKGFAEAGVADPLLLHYDQA

SEQ ID NO: 43015 - protein, 225 aa, Thiothrix sp.
  misc_feature (1)..(225): tr|A0A432UUW5|A0A432UUW5_9GAMM 7-cyano-7-deazaguanine s ynthase OS=Thiothrix sp. OX=1032 GN=queC PE=3 SV=1
MVKKAIVLLSGGMDSATTLAIATQKGHECYALSFRYGQRHDAELQAAEHLASHFNAKLQRVIDIDLSGIMDSALTNTDITIPEQPGTGIPATYVPARNTVFLSIALAWAEVIEAQDIFIGVNAVDYSGYPDCRPEYINAFQKMANLATKAAVEGNEVRINTPLIHLSKAEIIKIGMDLGLDFAWTVSCYQADQQGLACGKCDACRLRRSGFESAGITDNTRYINS

SEQ ID NO: 43016 - protein, 226 aa, Thiotrichaceae bacterium
  misc_feature (1)..(226): tr|A0A2A5G750|A0A2A5G750_9GAMM 7-cyano-7-deazaguanine s ynthase OS=Thiotrichaceae bacterium OX=2030882 GN=queC PE=3 SV=1
MSNPASKAIVLLSGGLDSATVLAIANQSFDCHAISFNYAQRSLSEINAAKQIAKHYSVSHQIFQIDKGVMVGSALTDKSMDVPEFDDEEQGIPVTYVPARNTLFLSYALAIAEVKGSQDIFIGVNAVDFSGYPDCRPEYIRSYEIMANLATKAGVEGNTLKIHVPLIDKSKAEIIQIGSDLDVDYAATVSCYQANEQGEACGVCDSCQLRRKGFEALGIADPTRYI

SEQ ID NO: 43017 - protein, 457 aa, Thiotrichaceae bacterium
  misc_feature (1)..(457): tr|A0A1Y1Q379|A0A1Y1Q379_9GAMM 7-cyano-7-deazaguanine s ynthase OS=Thiotrichaceae bacterium IS1 OX=1934244 GN=B WK78_06165 PE=3 SV=1
MKTHIWVITESQLDGSVPEKGDVVCVIGKDLKIGYENLQQKCGEELSSIEIDFLSVAGAVAFADRKIRRKTHQWARQLTIHISVYCPEQWGRSQNKLVECLNFLTGDYWKFEFIKREDNLQQGFQQTLLKDIKGQTVVIPYSGGMDSYADLNLVKHDEPDVKPFLVTIEFKKTLETRKSAFHTSHSLDGSDNRAYVPITFSELDHPEISFRSRTFVFFSVAAIVAKLIGSKRILIPESGQGALGTALITLGDEPTFQATVPTFTEKLRNFLTTLWNDALAFEHPYLWNTKAEVLHRLIEINKADDLLETCSCSRQIARNKGLSGAPQHCGVCSNCLLRRVALVMSGFTDYHEKEEYVWKNLDAEDLELATSFSDLETTRNDYEIAIRAVLNHQQLADLSTQSENFKDLVFQLSRSLGESEDLVTTRLENLLNRHCQEWENFLSLLAPNSWIIKIARR

SEQ ID NO: 43018 - protein, 235 aa, Thiotrichales bacterium
  misc_feature (1)..(235): tr|A0A259KAZ9|A0A259KAZ9_9GAMM 7-cyano-7-deazaguanine s ynthase OS=Thiotrichales bacterium 34-46-19 OX=1970605 GN=queC PE=3 SV=1
MQLNNEPRLAVVLLSGGLDSATTLAWAIAQGYECHTISFNYGQRHAAELLAAERLSRRLGALTHRVVTIDLAQMGGSALTDASIPVPETESSGIPLTYVPARNTVFLSYSLALAEVLTARHIFIGVNAVDYSGYPDCRPEFIEAFEKMANLATKAGVEGQSVKIHAPLQFLSKAEIIQTGMRLGVDFSQTVSCYQADDEGKACGVCDACRLRHEGFVQAGVADPTHYTAAKNVTK

SEQ ID NO: 43019 - protein, 242 aa, Thiotrichales bacterium
  misc_feature (1)..(242): tr|A0A2E2BCP6|A0A2E2BCP6_9GAMM 7-cyano-7-deazaguanine s ynthase OS=Thiotrichales bacterium OX=2026796 GN=queC P E=3 SV=1
MGGHLKPTGHRSALVLFSGGQDSTICLAWALANFDLVSTISFSYGQRHQVELDCCEKIIEKIKKIVPQWSKKLSERHLINLDFIPAISNSALTSEMEIEMTNSGLPNTFVPGRNIFFLSAAASLAYRSGILNLVGGMCETDYSGYPDCREEFIDSLETSIGLGMDMKFKIHTPLMFLNKAQSWLVAENLGGSELIDAIVEETHSCYRGVRESRYEWGYGCNKCPACELRKVGYGQYKTGVAI

SEQ ID NO: 43020 - protein, 224 aa, Bathymodiolus puteoserpentis
  misc_feature (1)..(224): tr|A0A483ALD9|A0A483ALD9_9BACT 7-cyano-7-deazaguanine s ynthase OS=thiotrophic endosymbiont of Bathymodiolus pu teoserpentis (Logatchev) OX=343240 GN=queC PE=3 SV=1
MSKAVILLSGGLDSTTTLAIAKSQGLDCYALSFDYGQKQKSELNSAKQVAELFSAIEHRTMSISLNDIGGSALTDSAIEVPKFKPSDEIPVTYVPARNTIFLSYAMAWAEVLDCQDIFIGVNALDYSGYPDCRKEYIKSFEIMANLATKQGVEGKKLTIHTPLIDLHKAQIIQKGLSLGVDYSLTTTCYQADNNGDACGFCDACEYRKLGFKKVGIPDPTRYQR

SEQ ID NO: 43021 - protein, 229 aa, Thiovulum sp.
  misc_feature (1)..(229): tr|J0L4G6|J0L4G6_9HELI 7-cyano-7-deazaguanine synthase OS=Thiovulum sp. ES OX=1177931 GN=queC PE=3 SV=1
MRATGIDKQKVVVIMSGGMDSSLTAYKMREFGYDVVAVHFSYGQRTEERERQSFHKISDSLPAINKYSFELPFFKDIGIGTTSLIDSGMELNITGVEEKIIPNSYVPYRNGIMLSIATAVAEKEGAIGIAIGVVEEDSSGYPDCREDFINSFEKTINLGTKKGGFRVFRPLVNLKKMEIVKEAIKLKVPLENTWSCYQDEDEPCGVCDSCRLRKRGFDFADEVDPLVES

SEQ ID NO: 43022 - protein, 257 aa, Tibeticola sediminis
  misc_feature (1)..(257): tr|A0A3N4VJC1|A0A3N4VJC1_9BURK 7-cyano-7-deazaguanine s ynthase OS=Tibeticola sediminis OX=1917811 GN=queC PE=3 SV=1
MTSKHGFQSALVLFSGGQDSTTCLAQALEQFERVETVGFDYGQRHRVELEARQTVLAALRERFPAWAAKLGEDHLIDLAVLGEISDCALTRDTAFAFEASGLPNSFVPGRNLIFLTLAAALAYRRGAQALVTGVCETDFSGYPDCRDDTMKAMQVALSLGLDRRLRIDTPLMWLDKAETWALAHRLGAAHEARLGRDAAAGGAALVELIVEHTHTCYRGERSARHDWGYGCGECPACVLRARGWQAWRAGCGRSAGV

SEQ ID NO: 43023 - protein, 231 aa, Tistlia consotensis
  misc_feature (1)..(231): tr|A0A1Y6CNQ3|A0A1Y6CNQ3_9PROT 7-cyano-7-deazaguanine s ynthase OS=Tistlia consotensis USBA 355 OX=560819 GN=qu eC PE=3 SV=1
MSDGALVLFSGGQDSTTCLAWALERFERVETLGFDYGQRHRVELDCRAALRAGLAALDPRWAGRLGEDHTVDLAALGALSETGLTRTVAIEMGEGGLPNTFVPGRNLIFLCFAAALAYRRGLKRIVGGMCETDYSGYPDCRDDTIKALQVALNLGMERRFVLETPLMWLDKAATWRLADSLGGAALVELIVRNSHTCYRGERGQLHDWGHGCGSCPACELRARGFAAWRAG

SEQ ID NO: 43024 - protein, 247 aa, Tistrella mobilis
  misc_feature (1)..(247): tr|A0A3B9IMG0|A0A3B9IMG0_9PROT 7-cyano-7-deazaguanine s ynthase OS=Tistrella mobilis OX=171437 GN=queC PE=3 SV= 1
MTGSPRNAGALVLFSGGQDSATCLAWALDRFERVETLGFDYGQRHRVELDCRSTLRERMAALDPRWAARLGPDHTLDLGVLGAMSETSLTREVAIGLRDDGLPDTFVPGRNLVFLTFAAALGFRRGLDHVVGGMCETDYSGYPDCRDDTIKALQVALNLGMAKQFVLHTPLMWLDKAETWALAQRLGGTALVDLIVAESHTCYLGMRGELHDWGHGCGSCPACRLRADGHARYREALTLDGRMPAAG

SEQ ID NO: 43025 - protein, 247 aa, Tistrella mobilis
  misc_feature (1)..(247): tr|I3TXT5|I3TXT5_TISMK 7-cyano-7-deazaguanine synthase OS=Tistrella mobilis (strain KA081020-065) OX=1110502 G N=queC PE=3 SV=1
MTGSPRNAGALVLFSGGQDSATCLAWALDRFDRVETLGFDYGQRHRVELDCRGTLRERMAALDPRWAARLGPDHTLDLGVLGAMSETSLTREVEIGLREDGLPDTFVPGRNLLFLTFAAALGFRRGLDHVVGGMCETDYSGYPDCRDDTIKALQVALNLGMAKQFVLHTPLMWLDKAETWALAQRLGGAALVDLIVAESHTCYLGTRGELHDWGHGCGSCPACRLRAHGHARYREALTLDGRMPAAG

SEQ ID NO: 43026 - protein, 247 aa, Tistrella sp.
  misc_feature (1)..(247): tr|A0A2D8QA37|A0A2D8QA37_9PROT 7-cyano-7-deazaguanine s ynthase OS=Tistrella sp. OX=2024861 GN=queC PE=3 SV=1
MTGSLRNAGALVLFSGGQDSATCLAWALDRFERVETLGFDYGQRHRVELDCRGTLRERMAALDPRWAARLGPDHTLDLGVLGAMSETSLTREVEIGLREDGLPDTFVPGRNLLFLTFAAALGFRRGLDHVVGGMCETDYSGYPDCRDDTIKALQVALNLGMAKQFVLHTPLMWLDKAETWALAQRLGGAALVDLIVAESHTCYLGTRGELHDWGHGCGNCPACRLRAHGHARYREVLTLDGRMPAAG

SEQ ID NO: 43027 - protein, 247 aa, Tistrella sp.; identical to SEQ ID NO: 43024
  misc_feature (1)..(247): tr|A0A2E3EIG2|A0A2E3EIG2_9PROT 7-cyano-7-deazaguanine s ynthase OS=Tistrella sp. OX=2024861 GN=queC PE=3 SV=1

SEQ ID NO: 43028 - protein, 232 aa, Tolumonas auensis
  misc_feature (1)..(232): tr|C4LCL2|C4LCL2_TOLAT 7-cyano-7-deazaguanine synthase OS=Tolumonas auensis (strain DSM 9187 / TA4) OX=595494 GN=queC PE=3 SV=1
MSQTKRKAVVVFSGGQDSTTCLLYAVQQYDEVHAITFDYGQRHVQEIEVARQIAADLGLAAHKVLDVGLLNELAVSALTRDAIPVSNDLQENGLPNTFVPGRNILFLTLAAIYAYQVGADTVITGVCETDFSGYPDCRDEFVKALNHAVKLGMERDVKFETPLMWLNKAETWALADKIGRLDYVRQQTLTCYNGVIGDGCGECPACKLRAKGLHDYQQAPDAVMAALNSKLS

SEQ ID NO: 43029 - protein, 227 aa, Tolypothrix bouteillei
  misc_feature (1)..(227): tr|A0A0C1R3E4|A0A0C1R3E4_9CYAN 7-cyano-7-deazaguanine s ynthase OS=Tolypothrix bouteillei VB521301 OX=1479485 G N=queC PE=3 SV=1
MKAVILLSGGLDSSTVLYQAMADGCECYALSFDYRQRHQRELQSASAIATRVGAVQHQVVKFDLSQWGGSALTDNSINLPQERSLGEMSQNIPITYVPARNTIFLSFALAWAETLAAERVYIGVNALDYSGYPDCRPDYIQAMEEVFCLGTKQGRLGNPIKIIAPLSELKKTEIIQLGNQLGVPWELTWSCYAGREAACGVCDSCLLRLAAFKELGLVDPLKYEQRR

SEQ ID NO: 43030 - protein, 225 aa, Tolypothrix campylonemoides
  misc_feature (1)..(225): tr|A0A0C2L374|A0A0C2L374_9CYAN 7-cyano-7-deazaguanine s ynthase OS=Tolypothrix campylonemoides VB511288 OX=1245 935 GN=queC PE=3 SV=1
MKAVILLSGGLDSSTVLYQAQADGCECYTICFDYQQRHRRELTSALAIAHKADVVDHQVVRFDLRQWGGSALTDDAIDLPQKRDLEEMSQTIPVTYVPARNTIFLSFALGYAETIAAQRIYIGVNALDYSGYPDCRPDYIQAMQEVFRLGTKQGRSGELISIVTPLIDLKKTEIIQLGNKLGVPWELTWSCYAGGDVACGVCDACRLRLAAFAELGLKDPLAYAV

SEQ ID NO: 43031 - protein, 249 aa, Tolypothrix sp.; identical to SEQ ID NO: 38338
  misc_feature (1)..(249): tr|A0A0D6KVA9|A0A0D6KVA9_9CYAN 7-cyano-7-deazaguanine s ynthase OS=Tolypothrix sp. PCC 7601 OX=1188 GN=queC PE= 3 SV=1

SEQ ID NO: 43032 - protein, 233 aa, Tolypothrix sp.
  misc_feature (1)..(233): tr|A0A218QMB0|A0A218QMB0_9CYAN 7-cyano-7-deazaguanine s ynthase OS=Tolypothrix sp. NIES-4075 OX=2005459 GN=queC PE=3 SV=1
MTKKALVVLSGGQDSTTCAAVACQEFDEVHAITFNYQQRHLIELESAIAIAKALGLASHEIIDLGPVLKGTSPLVSDNSLGEYNSPEELPTGVEPTFIPGRNILFLTIASNRAACLNTKDIFIGVCQADFAGYWDCRQSFIDAMSVALSEGIYGNRDAFTTHTPLMDLTKAESVKLALDVLKERFESVMELTHTCYAGVKGGCGKCHACILRDRGFKEAGAEDPIWKFRKVVV

SEQ ID NO: 43033 - protein, 224 aa, Tolypothrix tenuis; identical to SEQ ID NO: 36132
  misc_feature (1)..(224): tr|A0A1Z4MUX8|A0A1Z4MUX8_9CYAN 7-cyano-7-deazaguanine s ynthase OS=Tolypothrix tenuis PCC 7101 OX=231146 GN=que C PE=3 SV=1

SEQ ID NO: 43034 - protein, 231 aa, Trabulsiella guamensis
  misc_feature (1)..(231): tr|A0A085AEJ0|A0A085AEJ0_9ENTR 7-cyano-7-deazaguanine s ynthase OS=Trabulsiella guamensis ATCC 49490 OX=1005994 GN=queC PE=3 SV=1
MKRAVVVFSGGQDSTTCLVQALHQYDEVHCVTFDYGQRHRAEIDVARDLALKLGARAHKVLDTTLLNELAVSSLTRDSIPVPDYEPDADGIPNTFVPGRNILFLTLAAIYAYQVKAEAVITGVCETDFSGYPDCRDEFVKALNHAVNLGMAKEIRFETPLMWIDKAETWALADYWGKLDLVRSETLTCYNGIKGDGCGHCAACNLRANGLNHYLSDKPGVMAAMKAKTGLK

SEQ ID NO: 43035 - protein, 231 aa, Trabulsiella odontotermitis
  misc_feature (1)..(231): tr|A0A0L0H1F5|A0A0L0H1F5_9ENTR 7-cyano-7-deazaguanine s ynthase OS=Trabulsiella odontotermitis OX=379893 GN=que C PE=3 SV=1
MKRAVVVFSGGQDSTTCLVQALHQYDEVHCVTFDYGQRHRAEIDVARDLALKLGARAHKVLDTTLLNELAVSSLTRDSIPVPDYEPDADGIPNTFVPGRNILFLTLAAIYAYQVKAEAVITGVCETDFSGYPDCRDEFVRALNHAVNLGMAKDIRFETPLMWIDKAETWALADYWGKLDLVRSETLTCYNGIKGDGCGHCAACNLRANGLQHYLSDKPAVMAAMKAKTGLK

SEQ ID NO: 43036 - protein, 231 aa, Tranquillimonas sp.
  misc_feature (1)..(231): tr|A0A438ALJ4|A0A438ALJ4_9RHOB 7-cyano-7-deazaguanine s ynthase OS=Tranquillimonas sp. M0103 OX=2486419 GN=queC PE=3 SV=1
MKTLVICSGGLDSVSLAHILAARSHLTRLVCFDYGQRHRKELEFAAAAADRLNVPLHRIDMRGIGAALTGSALTDAVDVPDGHYAEETMRVTVVPNRNAIMLSIGFGIAAANGDAAVATAVHGGDHFIYPDCRPGFTQAFDAMQQAALEGYANVRLHTPFVHRTKADIVTEGAAHGTPFALTWSCYKGGAVHCGRCGTCVERREAFDLAGVPDPTDYADPGFWRTAVAEAR

SEQ ID NO: 43037 - protein, 251 aa, Treponema maltophilum
  misc_feature (1)..(251): tr|S3K0C4|S3K0C4_TREMA TIGR00268 family protein OS=Trep onema maltophilum ATCC 51939 OX=1125699 GN=HMPREF9194_0 1282 PE=4 SV=1
MQKAEALKDFFKTHPKAAIAFSGGTDSAYLLAAAMRSGADVRPYYIKTAFQPQFELEDALRLTKELGVKPEIIAADILNEADVTLNRADRCYRCKRFLFSLLKERAVKDGYHLILDGTNASDDADDRPGMKALRELNIQSPLRLCGITKDEVRLLSKREGLFTWNKSAYACLATRVPCGTIIKAETLALVERAETELAKLGFSDFRIRIRGDAALLQVSEAQMEKVLQKKEDIRALLANGFPSVMLDLKAR

SEQ ID NO: 43038 - protein, 222 aa, Trichococcus collinsii
  misc_feature (1)..(222): tr|A0A143Z427|A0A143Z427_9LACT 7-cyano-7-deazaguanine s ynthase OS=Trichococcus collinsii OX=157076 GN=queC PE= 3 SV=1
MENVNGTTQKQVLVVFSGGQDSTTCLIQAIQKYGAANAVALSFSYGQRHDIELERAAWIAKDLGVEHHTLDASVMGKVTTNALMDESQTIKEADAEDYPNTFVDGRNALFLLLAGIFAKSKGIRTIILGVCETDFSGYPDCRDVFVKSMNVTLNLAMDYNFNVETPLMYLTKAQTWELADKLGCLAYIEEHTHTCYMGVPGGCGECPSCKLRNAGLAEYLNK

SEQ ID NO: 43039 - protein, 222 aa, Trichococcus flocculiformis
  misc_feature (1)..(222): tr|A0A143YNB6|A0A143YNB6_9LACT 7-cyano-7-deazaguanine s ynthase OS=Trichococcus flocculiformis OX=82803 GN=queC PE=3 SV=1
MENVNGTTQKQALVIFSGGQDSTTCLIQAIQKYGAANTVALSFSYGQRHGIELERAAWIANDLGVEHHILDASVMGKVTTNALMDESQTIKEADAEDYPNTFVDGRNALFLLLAGIFAKSKGIRNIILGVCETDFSGYPDCRDVFVKSMNVTLNLAMDYNFNVETPLMYLTKAQTWELADQLGCLAYIEEHTHTCYMGVPGGCGECPSCKLRNAGLAEYLNK

SEQ ID NO: 43040 - protein, 222 aa, Trichococcus ilyis
  misc_feature (1)..(222): tr|A0A143Z5Z8|A0A143Z5Z8_9LACT 7-cyano-7-deazaguanine s ynthase OS=Trichococcus ilyis OX=640938 GN=queC PE=3 SV =1
MENKNETTQKQALVIFSGGQDSTTCLIQAIQKYGAANTVALSFSYGQRHNIELERAAWIANDLGVEHHILDATVMGKVTTNALMDETQTIEEADAEDYPNTFVDGRNALFLLLAGIFAKSKGIRTIILGVCETDFSGYPDCRDVFVKSMNVALNLAMDYNFNVETPLMYLTKAQTWELADQLGCLAYIEEHTHTCYMGVPGGCGECPSCKLRNAGLAEYLSK

SEQ ID NO: 43041 - protein, 219 aa, Trichococcus palustris
  misc_feature (1)..(219): tr|A0A143YL76|A0A143YL76_9LACT 7-cyano-7-deazaguanine s ynthase OS=Trichococcus palustris OX=140314 GN=queC PE= 3 SV=1
MTKQALIIFSGGQDSTTCLIQAIQKYGAANVVALSFTYGQRHEIELEKAAWIANDLGVEHHILDATVMSKVTTNALMDDSQTIEEADAEDYPNTFVDGRNALFLLLAGIFAKSKDIKTIILGVCETDFSGYPDCRDVFVKSMNVTMNLAMDYNFNVETPLMYLTKAETWRLADQMGYLDYIQEHTHTCYLGVPGGCGECPSCKLRNSGLEEYLNSKAGI

SEQ ID NO: 43042 - protein, 222 aa, Trichococcus pasteurii
  misc_feature (1)..(222): tr|A0A1W1IE57|A0A1W1IE57_9LACT 7-cyano-7-deazaguanine s ynthase OS=Trichococcus pasteurii OX=43064 GN=queC PE=3 SV=1
MENVNGTTQKQALVIFSGGQDSTTCLIQAIQKYGAANTVALSFSYGQRHGIELERAAWIAKDLGVEHHILDAQVMGKVTTNALMDESQTIKEADAEDYPNTFVDGRNALFLLLAGIFAKSKGIRTIILGVCETDFSGYPDCRDVFVKSMNVTLNLAMDYNFNVETPLMYLTKAQTWELADQLGCLAYIEEHTHTCYMGVPGGCGECPSCKLRNAGLTEYLNK

SEQ ID NO: 43043 - protein, 222 aa, Trichococcus patagoniensis
  misc_feature (1)..(222): tr|A0A2T5IB97|A0A2T5IB97_9LACT 7-cyano-7-deazaguanine s ynthase OS=Trichococcus patagoniensis OX=382641 GN=queC PE=3 SV=1
MENKNETTPKQALVIFSGGQDSTTCLIQAIQKYGAANVVALSFSYGQRHGIELERAAWIAKDLGGEHHILDATVMGKVTTNALMDESQTIEEADAEDYPNTFVDGRNALFLLLAGIFAKSKGIRTIILGVCETDFSGYPDCRDVFVKSMNVTLNLAMDYNFNVETPLMYLTKAQTWELADQLGCLAYIEEHTHTCYMGVPGGCGECPSCKLRNAGLAEYLKK

SEQ ID NO: 43044 - protein, 222 aa, Trichococcus sp.
  misc_feature (1)..(222): tr|A0A5C5ECJ5|A0A5C5ECJ5_9LACT 7-cyano-7-deazaguanine s ynthase OS=Trichococcus sp. SKBG OX=2585775 GN=queC PE= 3 SV=1
MENVNGTTQKQALVIFSGGQDSTTCLIQAIQKYGAANTVALSFSYGQRHGIELERAAWIANDLGVEHHILDASVMGKVTTNALMDESQTIKEADAEDYPNTFVDGRNALFLLLAGIFAKSKGIRIIILGVCETDFSGYPDCRDVFVKSMNVTLNLAMDYNFNVETPLMYLTKAQTWELADQLGCLAYIEEHTHTCYMGVPGGCGECPSCKLRNAGLAEYLNK

SEQ ID NO: 43045 - protein, 222 aa, Trichococcus sp.
  misc_feature (1)..(222): tr|A0A143Z3X3|A0A143Z3X3_9LACT 7-cyano-7-deazaguanine s ynthase OS=Trichococcus sp. ES5 OX=872292 GN=queC PE=3 SV=1
MENVNGTTQKQALVIFSGGQDSTTCLIQSLQKYGAANTVALSFSYGQRHGIELERAAWIAKDLGVEHHILDAQVMGKVTTNALMDESQTIKEADAEDYPNTFVDGRNALFLLLAGIFAKSKDIRNIILGVCETDFSGYPDCRDVFVKSMNVTLNLAMDYNFNVETPLMYLTKAQTWELADQLGCLAYIEEHTRTCYMGVPGGCGECPSCKLRNAGLAEYLNK

SEQ ID NO: 43046 - protein, 222 aa, Trichodesmium erythraeum
  misc_feature (1)..(222): sp|Q114E1|QUEC_TRIEI 7-cyano-7-deazaguanine synthase OS =Trichodesmium erythraeum (strain IMS101) OX=203124 GN= queC PE=3 SV=1
MKAVILLSGGLDSSTVLYQAKADGCECYAISFDYQQRHLRELDSAKKIADTVGVIEHHIVSFDLRSWGGSALTDSQIDLPSDRDLEEMSQNIPITYVPARNTIFLSFALAYAEVVNASRVYIGVNALDYSGYPDCRPDYILAMQEVFRLGTRQGREGEAIAIVAPLIEMKKTEIIQLGNSLGVPWEKTWSCYAGGEKPCGICDSCKLRLTAFQELGLTDPLM

SEQ ID NO: 43047 - protein, 229 aa, Trichormus variabilis; identical to SEQ ID NO: 40185
  misc_feature (1)..(229): tr|A0A1Z4KP32|A0A1Z4KP32_ANAVA 7-cyano-7-deazaguanine s ynthase OS=Trichormus variabilis NIES-23 OX=1973479 GN= queC PE=3 SV=1

SEQ ID NO: 43048 - protein, 227 aa, Trichormus variabilis
  misc_feature (1)..(227): sp|Q3MAK6|QUEC_TRIV2 7-cyano-7-deazaguanine synthase OS =Trichormus variabilis (strain ATCC 29413 / PCC 7937) O X=240292 GN=queC PE=3 SV=1
MKAVILLSGGLDSSTILYQAKADGCECYSISFDYQQRHRRELHSAFLVAQTAGIVQHQVVNFDLRLWGGSALTDDKIDLPQERSVDAMSQNIPVTYVPARNTIFLSFALAYAEAIAAERVYIGVNALDYSGYPDCRPDYIEAMQEVFRLGTKQGREGQPINIVAPLINLKKTAIIQLGNQLGVPWNLTWSCYNGGDVACGVCDSCRLRLAAFAELGLEDPLPYLKGV

SEQ ID NO: 43049 - protein, 241 aa, Trinickia caryophylli
  misc_feature (1)..(241): tr|A0A1X7FAP4|A0A1X7FAP4_TRICW 7-cyano-7-deazaguanine s ynthase OS=Trinickia caryophylli OX=28094 GN=queC PE=3 SV=1
MSQRDAKNGALVLFSGGQDSATCLAWALERYDTVETLGFDYGQRHRVELECREGVRTQLASAFPRWAGRLGDDHVVDLSVLGAISETAMTREIEIETAAGGLPNTFVPGRNLMFMTIAAAIAYRRGLRALVGGMCETDFSGYPDCRDDTMKALQVTLNLGMASRFVVATPLMWLDKADTWRLAEQLGGEALVELIRVETHTCYVGERSELHEWGFGCGECPACRLRKRGYEAYRAGGNVAV

SEQ ID NO: 43050 - protein, 243 aa, Trinickia soli
  misc_feature (1)..(243): tr|A0A2N7VLH9|A0A2N7VLH9_9BURK 7-cyano-7-deazaguanine s ynthase OS=Trinickia soli OX=380675 GN=queC PE=3 SV=1
MIRTDAKRGALVLFSGGQDSTTCLAWALDRYETVETLGFDYGQRHRVELECREGVRQAMLRTFPAWAGRLGDDHMIDLSVLGSISDTAMTREIQIEASANGLPNTFVPGRNLMFMTIAAAIAYRRGLSALVGGMCETDFSGYPDCRDDTMKALQVALNLGMDSRFVVETPLMWLDKADTWRLARELGGDALVELIRVETHTCYVGERAELHDWGFGCGDCPACRLRKRGYAAFLAGEKVTQPA

SEQ ID NO: 43051 - protein, 243 aa, Trinickia sp.
  misc_feature (1)..(243): tr|A0A4U1HT45|A0A4U1HT45_9BURK 7-cyano-7-deazaguanine s ynthase OS=Trinickia sp. 7GSK02 OX=2571161 GN=queC PE=3 SV=1
MTRTDAKNSALVLFSGGQDSATCLAWALDRYETVETLGFDYGQRHRVELECREGFRSAIARTFPAWGARLGDDHMIDLSVLGSISDTAMTREIQIEATANGLPNTFVPGRNLMFMTIAAAIAYRRGLRVLVGGMCETDFSGYPDCRDDTMKALQVALNLGMDSRFVLETPLMWLDKADTWRLAQELGGDALVELVRVETHTCYVGERAELHDWGFGCGECPACRLRKRGYEAFLAGEKVTEPV

SEQ ID NO: 43052 - protein, 243 aa, Trinickia symbiotica
  misc_feature (1)..(243): tr|A0A2N7X859|A0A2N7X859_9BURK 7-cyano-7-deazaguanine s ynthase OS=Trinickia symbiotica OX=863227 GN=queC PE=3 SV=1
MIERDATTGALVLFSGGQDSATCLAWALDRYETVETIGFDYGQRHRVELECREGIRERLARDFPAWAGRLGDDHLIDLSVLGSISDTAMTREIEIETAASGLPNTFVPGRNLMFMTIAAAVAYRRGLRVLVGGMCETDFSGYPDCRDDTMKALQVTLNLGMASRQIIETPLMWLDKADTWRLADSIGGQALVELIRVETHTCYVGERAELHDWGFGCGECPACRLRKRGYEAYLTGEKVTQPA

SEQ ID NO: 43053 - protein, 243 aa, Trinickia symbiotica
  misc_feature (1)..(243): tr|A0A2T3XYX8|A0A2T3XYX8_9BURK 7-cyano-7-deazaguanine s ynthase OS=Trinickia symbiotica OX=863227 GN=queC PE=3 SV=1
MIERDAKTGALVLFSGGQDSATCLAWALDRYETVETIGFDYGQRHRVELECREGIRERLARDFPAWAGRLGDDHLIDLSVLGSISDTAMTREIEIETAASGLPNTFVPGRNLMFMTIAAAVGYRRGLRVLIGGMCETDFSGYPDCRDDTMKALQVTLNLGMASRLIIETPLMWLDKADTWRLADTIGGQALVELIRVETHTCYVGERAELHDWGFGCGECPACRLRKRGYEAYLIGEKVTQPA

SEQ ID NO: 43054 - protein, 240 aa, Tropicibacter phthalicicus
  misc_feature (1)..(240): tr|A0A238JEY8|A0A238JEY8_9RHOB 7-cyano-7-deazaguanine s ynthase OS=Tropicibacter phthalicicus OX=1037362 GN=que C PE=3 SV=1
MKTLVICSGGLDSVSLAHIIAAQGELSRLVSFDYDQRHKKEVEFAAAAARRLHVPHHIVDIRSIGASLTGSALTDDIDVPDGHYAEDTMKVTVVPNRNAIMLSIAYGIAAAKGDTGVATAVHGGDHFIYPDCRPAFTEAFDTMQCAALDGYADVSLVTPFVHKTKADIVTEGVAANTPFADTWSCYKGGTHHCGRCGTCVERREAFHLAGITDPTQYEDPDFWRAATGTATGTDSHQETA

SEQ ID NO: 43055 - protein, 234 aa, Tumebacillus algifaecis
  misc_feature (1)..(234): tr|A0A223D4E1|A0A223D4E1_9BACL 7-cyano-7-deazaguanine s ynthase OS=Tumebacillus algifaecis OX=1214604 GN=queC P E=3 SV=1
MSKKAVIILSGGLDSTTCMAAAKAEGYELYPLSFHYGQKAAIELESAKQVAAYYGVQDRHFIADLKGLIRGSALTDADKEIPTHRTGEESDIPVTYVPARNIIFLSIALSYSEAIGAEAMYIGVNALDYSGYPDCRADFIAAFQEVINKGTAAGVSGHPIAIKTPLQMLSKAGIVQLGTELGAPLHLSHSCYFGTDPSCGVCESCTLRIRGFQEAGVPDPIPYAVEIDWKTPVK

SEQ ID NO: 43056 - protein, 232 aa, Tumebacillus avium
  misc_feature (1)..(232): tr|A0A1Y0ING2|A0A1Y0ING2_9BACL 7-cyano-7-deazaguanine s ynthase OS=Tumebacillus avium OX=1903704 GN=queC PE=3 S V=1
MSKKAVIILSGGLDSTTCMAAAKAAGYELYPLSFHYGQKAAIELESAKKVAEFYGVSDRHFIADLKGLIRGSALTDADKEIPKHRTGEETDIPVTYVPARNIIFLSIALSYSEAIGAEAMYIGVNALDYSGYPDCRADFIAAFQEVINKGTAAGVTGHPIKIETPLQMLSKAGIVKLGTELGAPLHLSHSCYFGTDPSCGECESCTLRIRGFKEAGVKDPIPYAVDVDWDAK

SEQ ID NO: 43057 - protein, 237 aa, Tumebacillus flagellatus
  misc_feature (1)..(237): tr|A0A074LJ05|A0A074LJ05_9BACL 7-cyano-7-deazaguanine s ynthase OS=Tumebacillus flagellatus OX=1157490 GN=queC PE=3 SV=1
MTQAAKKAVIILSGGLDSTTCMAVAKNEGYELYPLSFFYGQKAAIELESAKKVSEFYGVADRHFIADLNGIIRGSALTDADKEIPVHRDENEMEKEIPATYVPARNIIFLSIALSYAEAIGAEAMYIGVNALDYSGYPDCRHEFIEAFQEVINKGTAAGAHGAGILIKTPLQFLSKAGIVKLGAELGAPLQFSHSCYFGTDPSCGVCDSCLLRIKGFQEAGVPDPIPYAVEIDWNTK

SEQ ID NO: 43058 - protein, 236 aa, Tumebacillus permanentifrigoris
  misc_feature (1)..(236): tr|A0A316DT91|A0A316DT91_9BACL 7-cyano-7-deazaguanine s ynthase OS=Tumebacillus permanentifrigoris OX=378543 GN =queC PE=3 SV=1
MTTAKKAVIILSGGLDSTTCMAVAKQEGYDLYPLSFFYGQKAAIELDSAKKVSDFYGVADRHFIADLNGMIRGSALTDADKAIPTNRDEATMEQEIPATYVPARNIIFLSIALSYAESIGAEAMYIGVNALDYSGYPDCRHEFIEAFQQVINVGTAAGAHGAGIQIKTPLQFLSKAGIVQLGSELGAPLQFSHSCYFGTDPSCGVCDSCLLRIKGFQEAGVPDPIPYAVPIDWNVK

SEQ ID NO: 43059 - protein, 232 aa, Tumebacillus sp.
  misc_feature (1)..(232): tr|A0A4R2R1Y8|A0A4R2R1Y8_9BACL 7-cyano-7-deazaguanine s ynthase OS=Tumebacillus sp. BK434 OX=2512169 GN=queC PE =3 SV=1
MSKKAVIILSGGLDSTTCMAAAKDAGYELYPLSFHYGQKAAIELESAKKVAEYYGVSDRHFIADLKGLIRGSALTDADKEIPKHRTGEETDIPVTYVPARNIIFLSIALSYSEAIGAEAMYIGVNALDYSGYPDCRADFIAAFQDVINKGTAAGVSGHPIQIETPLQMLSKAGIVQLGTELGAPLHLSHSCYFGTDPSCGECESCTLRIRGFKEAGVKDPIPYAVEIDWEAK

SEQ ID NO: 43060 - protein, 219 aa, Turicibacter sanguinis
  misc_feature (1)..(219): tr|A0A173SNU3|A0A173SNU3_9FIRM 7-cyano-7-deazaguanine s ynthase OS=Turicibacter sanguinis OX=154288 GN=queC PE= 3 SV=1
MKQDKAVLVFSGGQDSTTCLYWALETFKEVIAVTFDYGQRHHLELECAKAICQELGVEHHVLDMSLLNQLAPNALTRDEIKIELGEEGQLPSTFVPGRNLLFLSFAGVLAKVKGAKHIITGVCETDFSGYPDCRDVFIKSLNVTLNLSMDDDFVIHTPLMWLNKAQTWELADKLGKFEYIREKTLTCYNGIIGDGCGECPACVLRRRGLESYLTTKGEI

SEQ ID NO: 43061 - protein, 219 aa, Turicibacter sanguinis; identical to SEQ ID NO: 43060
  misc_feature (1)..(219): tr|D4W840|D4W840_9FIRM 7-cyano-7-deazaguanine synthase OS=Turicibacter sanguinis PC909 OX=702450 GN=queC PE=3 SV=1

SEQ ID NO: 43062 - protein, 219 aa, Turicibacter sp.
  misc_feature (1)..(219): tr|A0A109RMG4|A0A109RMG4_9FIRM 7-cyano-7-deazaguanine s ynthase OS=Turicibacter sp. H121 OX=1712675 GN=queC PE= 3 SV=1
MNQKAVVVFSGGQDSTTCLFWAMKQFEEVIAVTFDYNQRHLAELDCAKRICEEFEIEHHLLDMSLLNQLAPNALTRQDIDIKTGENGGLPSTFVEGRNLLFLSFAGVLAKVKGAKHIITGVCETDFSGYPDCRDMFIKSLNVTLNLSMDYDFVIHTPLMWLDKAQTWELADQLGKFEYVREHTLTCYRGIKGNGCGTCPACELRQRGLETYLARKGEGK

SEQ ID NO: 43063 - protein, 231 aa, Turicimonas muris
  misc_feature (1)..(231): tr|A0A227KA95|A0A227KA95_9BURK 7-cyano-7-deazaguanine s ynthase OS=Turicimonas muris OX=1796652 GN=queC PE=3 SV =1
MKALVLSSGGADSTVCVALAVEKLGRENVATVSFEYGQKHDRELICAQKIADFYSLKHFVLSLENILKFSDCSLLKNSTQAIEHKSYADQIAEKGEGKVSTYVPFRNGLMLSSAAALAQSIYPEEDCEIWIGAHADDAAGQAYADCSSEFTQAMNQAISIGTYGLVKLAAPLVKFNKARVIKEGLRLKVPFELTWSCYEGHEKACGKCGTCIDRLNAFEENGVKDPIPYEE

SEQ ID NO: 43064 - protein, 237 aa, Turneriella parva
  misc_feature (1)..(237): tr|I4BC22|I4BC22_TURPD 7-cyano-7-deazaguanine synthase OS=Turneriella parva (strain ATCC BAA-1111 / DSM 21527 / NCTC 11395 / H) OX=869212 GN=queC PE=3 SV=1
MAPRAVVLLSGGLDSATCMYLAREHGFEVEAISFNYQQRHSVELTAAQRLAATCGANHTIIDVNLRAIGASALTSDIAVPKGGTHLQGEAVIPSTYVPVRNLVFLSLAYALAEAKDCSAIFTGVNAIDYSGYPDCRPDFIASFAQTAALASKSGREGRAPEILTPLIAMTKSDIATEALRLAVPIHLTWSCYDPQTAGDMLKPCEQCDACLLRAQGFAALALQLSKEVIFGSPVKVA

SEQ ID NO: 43065 - protein, 224 aa, Tychonema bourrellyi
  misc_feature (1)..(224): tr|A0A2G4F4G9|A0A2G4F4G9_9CYAN 7-cyano-7-deazaguanine s ynthase OS=Tychonema bourrellyi FEM_GT703 OX=2040638 GN =queC PE=3 SV=1
MKAVILLSGGLDSSTVLYQAKADGCECYSISFDYQQRHRRELESARAIALSAHVKAHQIVNFDLTLWGGSALTDNEIDLPIDRTLTEMSQNIPITYVPARNTIFLSFALAYAETLGAQRIYIGVNALDYSGYPDCRLDYIQAMQEVFRLGTKQGREGDAINIVTPLIELKKTEIIQLGNKLGVPWEQTWSCYAGGENACGVCDSCRLRLAAFEELGLQDPVSYA

SEQ ID NO: 43066 - protein, 226 aa, Tyzzerella sp.
  misc_feature (1)..(226): tr|A0A1Y4UDQ5|A0A1Y4UDQ5_9FIRM 7-cyano-7-deazaguanine s ynthase OS=Tyzzerella sp. An114 OX=1965545 GN=queC PE=3 SV=1
MKVLVLSSGGIDSTTALGMAVNKYGKENVISLSVSYGQKHNKELIAANEVAKYYGVEQLFLDLAKIFEYSNCSLLQQSTEEIPEESYSEQIKKTEGKTPVSTYVPFRNGLFLSAAASIALSKECSVIYYGVHSDDAAGSAYPDCSPVFNKAMNDAIWEGSGKQLHIEAPFVNKNKADIVKIGLELGVPYHLTWSCYEGNDKPCGKCGTCIDRAAAFAKNNAVDPAL

SEQ ID NO: 43067 - protein, 226 aa, Uliginosibacterium sp.
  misc_feature (1)..(226): tr|A0A2N4XUK2|A0A2N4XUK2_9RHOO 7-cyano-7-deazaguanine s ynthase OS=Uliginosibacterium sp. TH139 OX=2067453 GN=q ueC PE=3 SV=1
MSAPRAVVLLSGGLDSATCLAIARAEGFETYALSVAYGQRHAAELAAAERVAAALGAKEHRVGHVDLGQFGGSALTDASIEVPTSGVEAGGIPVTYVPARNTVMLSLALGWAEVLKANAIFVGVNAVDYSGYPDCRPEFIAAFEKMANLATKTGVEGLKLSIHAPLISLSKAQIVQRGSALGVDYGMTVSCYKADDEGRACGQCDACRLRRAGFEAAGLLDPTRYA

SEQ ID NO: 43068 - protein, 219 aa, Umboniibacter marinipuniceus
  misc_feature (1)..(219): tr|A0A3M0AEQ7|A0A3M0AEQ7_9GAMM 7-cyano-7-deazaguanine s ynthase OS=Umboniibacter marinipuniceus OX=569599 GN=qu eC PE=3 SV=1
MKVVVIYSGGMDSFTVLHRAIKTGHEVLAVSFNYGQRHNKELDYARRVCAEAGVVHDVVDITAMQSLMSNSSLMANSAEDIPEGHYAAENMKSTVVPNRNMILISLAIGYAVNEGASEVWYGAHSGDHTIYPDCRPEFVEAMQAVSLLANFEPVKVVAPYLYDDKIVILRDGLDMGLDYGQTWTCYNGREKACGKCGSCVERLEAFTLNNAQDPLEYEA

SEQ ID NO: 43069 - protein, 221 aa, Unknown; identical to SEQ ID NO: 36445
  misc_feature (1)..(221): tr|H5SFX4|H5SFX4_9BACT 7-cyano-7-deazaguanine synthase OS=uncultured Acidobacteria bacterium OX=171953 GN=HGMM _F22D11C37 PE=3 SV=1

SEQ ID NO: 43070 - protein, 232 aa, Alphaproteobacteria bacterium
  misc_feature (1)..(232): tr|A0A212KJS9|A0A212KJS9_9PROT 7-cyano-7-deazaguanine s ynthase OS=uncultured Alphaproteobacteria bacterium OX= 91750 GN=queC PE=3 SV=1
MNEGALVLFSGGQDSATCLAWALERFARVETVGFDYRQRHSVELDVRRRFLPELRALFPQWGDRLGEDTLLDAGALAAIGHTAMIETIAIEMGENGLPNTFVPGRNILFLTLAAAVAYRRGLKHIVTGVCETDYSGYPDCRDDTIKAVQVALNLGMESRFVVHTPLMWIDKAGTWALAMELGGRALVDLINRGTHSCYVGDHDTRNDWGYGCGECPACRLRADGWRRWLDGV

SEQ ID NO: 43071 - protein, 203 aa, Aquificae bacterium
  misc_feature (1)..(203): tr|H5SBW3|H5SBW3_9BACT 7-cyano-7-deazaguanine synthase OS=uncultured Aquificae bacterium OX=453415 GN=queC PE= 3 SV=1
MDSATLLWLSKREFDKVYAISFDYGQRHKVEIKYAKDLAKMAQVEEHFIVDVPHYSVLKGSALLDKEISVPKGEYPQEEPPITTVPMRNLTFISIAASFADTLEIDHIGIGVHALDSPYPDCRPEFITSAEAAVNASSIFVAKTKKRIHIYAPFLGMSKRDIALIGRDLGVPFEKTYSCYVGTEPPCGECAACIQRKQALSFL

SEQ ID NO: 43072 - protein, 227 aa, Avibacterium sp.
  misc_feature (1)..(227): tr|A0A486XGI5|A0A486XGI5_9PAST 7-cyano-7-deazaguanine s ynthase OS=uncultured Avibacterium sp. OX=1936169 GN=qu eC PE=3 SV=1
MTTFKNHNRKAVVIFSGGQDSTTCLIQAIADYGVENVETVTFHYGQRHAIELEKAKWIAQDLGVKQTFIDTSVIKAITSNALMNENAEIKQEKDGLPNTFVDGRNALFLLYTAIYAKGQGISDIITGVCETDFSGYPDCRDVFIKSMNVTLNLAMDYNFNLRTPLMYLTKAQTWALADSLGALDYVRNHTHTCYQGVEGGCGECPSCVLRNKGLDEYLQQKSAVQNV

SEQ ID NO: 43073 - protein, 671 aa, Unknown
  misc_feature (1)..(671): tr|A0A090KF75|A0A090KF75_9BACT Uncultured bacterium gen ome assembly Metasoil_fosmids_resub OS=uncultured bacte rium OX=77133 PE=4 SV=1
MAPERVILCGSPDETAGPVADPDPVRLRAWGPDPNVHLTIEDLRQGIWREIPDAFEDLIDLAAYVYAADQAVGRGGAAADDLGAGWRRDLTFRVAVRRPDLWRSKPVHDALVSTLSFLSEDEYRFEFVPMTEHPDLGNRIAFDGTAFDGVVEEVVMFSGGLDSLAGAVREAVLDRRKVLLVNHRSTEKRTPRHYDLVRLLRHRAGDAAPLHVAVRVNKVEKLSREYTQRARSFLFAALGATFAHMIGLDRFRFYENGVVSLNLPISPQVVGARASRTTHPRVLRGFESLLTALAGRPFVVENPFLWHTKTDVVRLIGDAGCGELIGHSTSCGHTWVTTREQPHCGDCSQCIDRRFAVLAAGLEAHDPAGGYGVDLLAGERPEGQSRVLLAAYLETANHVGEMSELEFFGRFGEAGRVLRHLGGNPDETARRVYGLYRRHADQVNGVVTAAIAANADAIRRRSLPATCLVRLVSDGGSAADEQTGPTEPAADYLFRRRGQAWVVRFAGGPEKILLPSKGAAYLHQLLSRPDTAITPADLACQVARRRREFALGDAGEQADPESLAAYRARAQDLREELDRAREDNDPGAVARIESELEALRAEIRRAAGRGGRIRKAADDRERVRKAVGAAIHRAIGEIREFDSALAEHLKQRVKCGLSPRYTGDQGIRWET

SEQ ID NO: 43074 - protein, 153 aa, Unknown
  misc_feature (1)..(153): tr|A0A059WXF6|A0A059WXF6_9BACT 7-cyano-7-deazaguanine s ynthase (Fragment) OS=uncultured bacterium OX=77133 PE= 3 SV=1
PDHVIDIGSFGAIGNTALTSDAEIVMLDSGLPSTFVPGRNLVFFTYAAALGYRRGLTTLIGGMCETDFSGYPDCRDATLRALEQAIRLGTEIPFAIETPLMWRTKCPRGCLGDGGSCRAAGSRRPQGRPAASAPRARDRPPPTDREGCRRWQR

SEQ ID NO: 43075 - protein, 219 aa, Bacteroides sp.
  misc_feature (1)..(219): tr|A0A1C5U083|A0A1C5U083_9BACE 7-cyano-7-deazaguanine s ynthase OS=uncultured Bacteroides sp. OX=162156 GN=queC PE=3 SV=1
MNREAALVVFSGGQDSTTCLFWAKRNFKKVYALSFLYGQKHQKEVEFAREIARKAEVEFDVMDVSFVGQLGHNSLTDTTMVMDQEKPADSVPNTFVPGRNLFFLSIAAVYARERGINHLVTGVSQTDFSGYPDCRDSFIKSLNVTLNLAMDEQFVIHTPLMWIDKAETWALADELGVLELIRNETLTCYNGVQGDGCGHCPACKLRREGLEKYLKSKNQ

SEQ ID NO: 43076 - protein, 220 aa, Bacteroides sp.
  misc_feature (1)..(220): tr|A0A1C5R5K0|A0A1C5R5K0_9BACE 7-cyano-7-deazaguanine s ynthase OS=uncultured Bacteroides sp. OX=162156 GN=queC PE=3 SV=1
MNQNEALVVFSGGQDSTTCLFWAKKHFKKVHALSFLYGQKHEKEVELARKIAEKAGVDFDVMDVSFIGHLGKNSLTDTSIHMDEVKPKDSFPNTFVPGRNLFFLSIAAVYARERGIFHLVTGVSQTDFSGYPDCRDSFIKSLNVTLNLAMDEQFVIHTPLMWIDKAQTWALADELGVLDLVRNETLTCYNGIPGDGCGHCPACKLRREGLEKYLASKENK

SEQ ID NO: 43077 - protein, 217 aa, Bacteroidetes bacterium
  misc_feature (1)..(217): tr|H5SMQ4|H5SMQ4_9BACT 7-cyano-7-deazaguanine synthase OS=uncultured Bacteroidetes bacterium OX=152509 GN=queC PE=3 SV=1
MAIVLLSGGQDSTTALLWAQHTLKEPIHALSFAYGQRHGVELQAAARIARKLGVPHEVLEIGSLWASLGVSTALTHETPIVEKPESLPTTFVPGRNLLFLTVAAIWGYPRGEHKLLLGVSQVDYSGYPDCREPFLRAAQEALSRALDGPVEVMAPFLFWDKAQLWRYADDLGYREFIVEETHTCYLGERSVRHAWGYGCGECPACRLRKAGFDQAFG

SEQ ID NO: 43078 - protein, 227 aa, Blautia sp.
  misc_feature (1)..(227): tr|A0A3S5BJ12|A0A3S5BJ12_9FIRM 7-cyano-7-deazaguanine s ynthase OS=uncultured Blautia sp. OX=765821 GN=queC PE= 3 SV=1
MKALVLASGGVDSTTCLGLAVNKYGKENVIALTVAYGQKHTKEIEAARKTAEYYEVEHLYLDLEPIFRYSDCSLLKHSDREIPHESYAEQLKETDGSPVSTYVPFRNGLFLSSAASIALSKNCSVIYYGAHADDAAGNAYPDCSSAFHNAINEAIYQGSGGQLKVEAPFVSCTKSEVVKTGLELNVPYELTWSCYEGGEKPCGVCGTCIDRAEAFRLNGVKDPALDR

SEQ ID NO: 43079 - protein, 227 aa, Blautia sp.; identical to SEQ ID NO: 36676
  misc_feature (1)..(227): tr|A0A1C5TU66|A0A1C5TU66_9FIRM 7-cyano-7-deazaguanine s ynthase OS=uncultured Blautia sp. OX=765821 GN=queC PE= 3 SV=1

SEQ ID NO: 43080 - protein, 228 aa, Butyricicoccus sp.
  misc_feature (1)..(228): tr|A0A1C6GCL1|A0A1C6GCL1_9CLOT 7-cyano-7-deazaguanine s ynthase OS=uncultured Butyricicoccus sp. OX=1193532 GN= queC PE=3 SV=1
MSEKAMVLCSGGVDSTTCLALAIEKHGKENVCALSIYYGQKHVKEIQAAKAVLEYYGIEGTSLDLTPVFAYSDCSLLSHSTEDIPEESYAEQLAQRGGKPVTTYVPFRNGLFLSAAASVALSKHCSVIYYGAHHDDAAGNAYPDCSEEFVNAMNHSIVLGSGGDVRIEAPFVRWNKAQIVAEGLRLQVPYQLTWSCYEGGDKPCGKCGTCLDRIRAFEANGVTDPAMR

SEQ ID NO: 43081 - protein, 254 aa, Citrobacter sp.
  misc_feature (1)..(254): tr|A0A212IER0|A0A212IER0_9ENTR 7-cyano-7-deazaguanine s ynthase OS=uncultured Citrobacter sp. OX=200446 GN=queC PE=3 SV=1
MKKLVGDTPRRYHKGFVILSGKAMKRAVVVFSGGQDSTTCLAQALHQYDEVHCVTFDYGQRHRAEIDVARDLALKLGARAHKVLDVTLLSELAVSSLTRDNIPVPDYEPDANGIPNTFVPGRNILFLTLAAIYAYQVQAEAVITGVCETDFSGYPDCRDEFVKALNHAVSLGMAKDIRFETPLMWIDKAETWALADYWGKLDLVREETLTCYNGIKGDGCGHCAACNLRANGLNHYLADKPGVMAAMKQKTGLK

SEQ ID NO: 43082 - protein, 224 aa, Clostridium sp.
  misc_feature (1)..(224): tr|A0A1C6FL06|A0A1C6FL06_9CLOT 7-cyano-7-deazaguanine s ynthase OS=uncultured Clostridium sp. OX=59620 GN=queC PE=3 SV=1
MNNNSNNNAVVVFSGGQDSTTCLFWALERFDKVIAVTFNYNQKHKLEIECAQNIAKELGVEHHILDMDLLNQLAPNALTRDDIKIEEGKDGELPSTFVEGRNMVFLTFAAILAKTKNARHIVTGVCETDFSGYPDCRDVFVKSLNVTANLAMDYDFVMHTPLMWLDKAQTWELADKYGKLEYVREKTLTCYNGIIGDGCGECPSCKLRQHGLETYLKQKEELNK

SEQ ID NO: 43083 - protein, 223 aa, Clostridium sp.
  misc_feature (1)..(223): tr|A0A1C5UBW0|A0A1C5UBW0_9CLOT 7-cyano-7-deazaguanine s ynthase OS=uncultured Clostridium sp. OX=59620 GN=queC PE=3 SV=1
MKNRKALVVLSGGQDSTTCLFWAIDKFGKENVSAIGFDYGQRHKLELECADKICKKVGIPYEIVPTPIINQLSANSLTREDIPVEETKPEGTPPNTFVEGRNLLFLSYAAIYAKTHGITDLVTGVCETDFSGYPDCRDIFVKSLNVTVNLAMDYNFVIHTPLMWLNKAETWKMADDLGVLDTIYNETLTCYNGVLGEGCGHCPSCTLRRRGYEQYMEMKKCTK

SEQ ID NO: 43084 - protein, 226 aa, Coprococcus sp.
  misc_feature (1)..(226): tr|A0A1C5RZ23|A0A1C5RZ23_9FIRM 7-cyano-7-deazaguanine s ynthase OS=uncultured Coprococcus sp. OX=458253 GN=queC PE=3 SV=1
MQNLKNRDEAVVVFSGGQDSTTCLLWALKKYKKVYAVSFDYGQKHIKELECAKKIAEKFGVEHHILDMSLLNQLAPNSLTRSEMKVDENAPEVGTPNTFVDGRNMVFLTFVAIYAKQKGVSDIITGVSQSDFSGYPDCRDIFIKSLNTTLNLAMDYEFDIITPLMWIDKMETWKLADELGGLDVIRDMTLTCYNGIPGEGCGHCPSCKLRKKGYDLYMEYKKNHNA

SEQ ID NO: 43085 - protein, 232 aa, Unknown
  misc_feature (1)..(232): tr|A0A212KEJ8|A0A212KEJ8_9DELT 7-cyano-7-deazaguanine s ynthase OS=uncultured delta proteobacterium OX=34034 GN =queC PE=3 SV=1
MTRAFISFSGGIDSTTLLAHMLAEGYQVTPVFFAYGSKHGAAEEAAARNVCRHYGVTCPVVDLTGIFDLACSDSALMARMPDREIPSGDQGYREPGSLDATVVPGRNTLFASVLLAFAEAEALRTGQQAVIAMGIHAGDHTLYPDCREPFFTALGNAFDLGTEKRVKTVAPFVRMDKSAIVKRGLELGAPYHLSWSCYKGGTKACGVCGTCRERLKAFADAGIADPIEYEAR

SEQ ID NO: 43086 - protein, 231 aa, Desulfobacteraceae bacterium
  misc_feature (1)..(231): tr|A0A484HM93|A0A484HM93_9DELT 7-cyano-7-deazaguanine s ynthase OS=uncultured Desulfobacteraceae bacterium OX=2 18296 GN=queC PE=3 SV=1
MSKTKKAAVVLLSGGLDSTTVMAMAREMGFERYALSFDYGQRHALELDAAREAASDFGARDHLVLRVDLDKIGGSALTGPMAVPKGAAPDGEPEAIPVTYVPARNTVFLSLALAWAETLGAFDIFIGVNAIDYSGYPDCRPEYIEAFERMANLATKACVEGRGRVRVQTPLIQMTKAQIVQKGLALGVDFSKTHSCYDPSPGGLACGECDSCVLRKQGFEKAGLTDPALLR

SEQ ID NO: 43087 - protein, 230 aa, Desulfobacterium sp.
  misc_feature (1)..(230): tr|E1YHE3|E1YHE3_9DELT 7-cyano-7-deazaguanine synthase OS=uncultured Desulfobacterium sp. OX=201089 GN=queC PE =3 SV=1
MQKKAIVLLSGGLDSTTVMAIAKHEGFDLYSMSFFYGQRHSHELNAAKKVSEVFNVKKHLVINIDLNKIGGSALTADIKVPKARSLNSINKGIPVTYVPARNTIFLAHALAWAEVIKSFDIFIGVNAIDFSGYPDCRPEFISAFEYMANLATKAGVEGKMRLKIRTPLINMTKAQIIKKGIELGVDYSLTHSCYDPGPDGSACSLCDSCFLRKKGFEEAGLKDPAKYCTQ

SEQ ID NO: 43088 - protein, 240 aa, Desulfobacterium sp.
  misc_feature (1)..(240): tr|A0A445MUD4|A0A445MUD4_9DELT 7-cyano-7-deazaguanine s ynthase OS=uncultured Desulfobacterium sp. OX=201089 GN =queC PE=3 SV=1
MPKIKKAVILLSGGLDSTTALAIAKSEGYELYCLSFRYGQRHTCELASARRVAEAFGAKGHLVIEVDLRPVGGSALTDNIEVPKGRSESDMQKNIPATYVPARNTIFLSYAVAWAEVLGASDIFIGVNVIDYSGYPDCRPQFIEAFERMANLATKAGTEGGVQLKIRTPLISMTKAEIIKKGLELGVDYGMTHSCYDPSPQGTPCGRCDSCLIRKKGFAEAGVPDPLEINASSLNSTTLF

SEQ ID NO: 43089 - protein, 260 aa, Desulfovibrio sp.
  misc_feature (1)..(260): tr|A0A212KZ02|A0A212KZ02_9DELT 7-cyano-7-deazaguanine s ynthase OS=uncultured Desulfovibrio sp. OX=167968 GN=qu eC PE=3 SV=1
MSERLGQDAAAHGPLADQTALVIFSGGQDSATCLAWALERFGHVRTLGFDYGQRHSVELACRQNLRQGMAALNPQWGQRLGPDCLLDIDLFRQLANTALTSSAPIEEHGPDGLPTTFVPGRNLIFILHAAAWAYGLDIRHMVLGVCQSDYSGYPDCRDDSIKAMQVALNTGMGANYVLHTPLMWRSKKDAWTLARSLGGSALVDLIVEESHTCYAGQRGKRHPWGYGCGQCPACRLRAAGYAEYVAACQTESEKPCPKNS

SEQ ID NO: 43090 - protein, 252 aa, Desulfovibrio sp.
  misc_feature (1)..(252): tr|A0A212KJM4|A0A212KJM4_9DELT 7-cyano-7-deazaguanine s ynthase OS=uncultured Desulfovibrio sp. OX=167968 GN=qu eC PE=3 SV=1
MNTTSPLLEQQALVIFSGGQDSATCLAWALSRFKRVLTLGFDYGQRHSVELDCRKRVREGIAALNPQWAQRMGPDALLNLDIFRQLADTALTSDAPIEEHCANGLPNTFVPGRNLIFILHAAAWAYAKEIRHMVLGVCQSDYSGYPDCRDDSIKAMQVAINSGMDANFTLHTPLMWRSKKDAWMLARSLGGDALVNLIVEESHTCYMGQRGQRYPWGYGCGDCPACRLRAAGYAAYAEAQAACAQNPLEEQA

SEQ ID NO: 43091 - protein, 218 aa, Dysgonomonas sp.
  misc_feature (1)..(218): tr|A0A212JKC5|A0A212JKC5_9BACT 7-cyano-7-deazaguanine s ynthase OS=uncultured Dysgonomonas sp. OX=206096 GN=que C PE=3 SV=1
MNKKESALVLFSGGQDSTTCLYWALENFSSVRTLCFTYGQRHSKEVEVARSIAEKANVPFQLLDASIISQLSVNSLTSDIVMDQEKPADSYPNTFVPGRNLLFLTFAAVIARSHGIRHIVTGVSEADYSGYPDCRDTFILSANASINLAMDEHFQIHTPLMWRDKTAVWQLADELGVFDIIRTQTLTCYNGIIADGCGHCPSCKLRKQGLDNYLKTKL

SEQ ID NO: 43092 - protein, 218 aa, Dysgonomonas sp.
  misc_feature (1)..(218): tr|A0A212JVB3|A0A212JVB3_9BACT 7-cyano-7-deazaguanine s ynthase OS=uncultured Dysgonomonas sp. OX=206096 GN=que C PE=3 SV=1
MNKKEPALVLFSGGQDSTTCLYWAIKNFSSVRTLCFTYGQRHSKEVEVAQSIAGHAGVPFQLLDASIISQLSVNSLTSDIVMDQEKPTDSYPNTFVPGRNLLFLTFAAVIARSHGIRHIVTGVSEADYSGYPDCRDTFILSANASINLAMDEHFQIHTPLMWRDKTAVWQLADQLGVFDVVRTQTLTCYNGIIADGCGHCPACKLRKQGLENYLKIKE

SEQ ID NO: 43093 - protein, 227 aa, Eubacterium sp.
  misc_feature (1)..(227): tr|A0A1C6FMD8|A0A1C6FMD8_9FIRM 7-cyano-7-deazaguanine s ynthase OS=uncultured Eubacterium sp. OX=165185 GN=queC PE=3 SV=1
MKVLVLFSGGVDSTTCLGLAIDKYGKNNVIALSMAYGQKHDKEIEAANKIANYYGVEHIYLDLAKIFEYSDCSLLKHSDEEIPKEEYSKQLEKTNGSPVSTYVPFRNGLFLSSAASIAISKECKVIYYGAHSDDAAGNAYPDCSDAFNNAMNEAIYLGSGKQVRIEAPFVNMNKAEVVKTGLDLKVPYELTWSCYEGGDRPCGLCGTCIDRARAFEANDVKDPAITV

SEQ ID NO: 43094 - protein, 221 aa, Eubacterium sp.; identical to SEQ ID NO: 35955
  misc_feature (1)..(221): tr|A0A1C5WPC6|A0A1C5WPC6_9FIRM 7-cyano-7-deazaguanine s ynthase OS=uncultured Eubacterium sp. OX=165185 GN=queC PE=3 SV=1

SEQ ID NO: 43095 - protein, 224 aa, Gammaproteobacteria bacterium; identical to SEQ ID NO: 36610
  misc_feature (1)..(224): tr|A0A5E5Q1X4|A0A5E5Q1X4_9GAMM 7-cyano-7-deazaguanine s ynthase OS=uncultured Gammaproteobacteria bacterium OX= 86473 GN=queC PE=3 SV=1

SEQ ID NO: 43096 - protein, 224 aa, Gammaproteobacteria bacterium; identical to SEQ ID NO: 36438
  misc_feature (1)..(224): tr|A0A5E5QIM9|A0A5E5QIM9_9GAMM 7-cyano-7-deazaguanine s ynthase OS=uncultured Gammaproteobacteria bacterium OX= 86473 GN=queC PE=3 SV=1

SEQ ID NO: 43097 - protein, 247 aa, Lachnospira sp.
  misc_feature (1)..(247): tr|A0A1C6J135|A0A1C6J135_9FIRM ATP-utilizing enzymes of the PP-loop superfamily OS=uncultured Lachnospira sp. OX=446043 GN=SAMEA3545430_02531 PE=4 SV=1
MDLNEFFKEHNKVALAFSGGVDSSYLLYAAIKSGAQVRAYYVNAAFQPQFELDDAMRLAKQLNADMKVLTADVLSNETVVKNPSDRCYHCKNVIFNMILAEAKKDGFTVLMDGTNASDAEDDRPGMRALRELCVYSPLRISGLTKTEIRRRSKEAGLFTWNKPAYACLATRIPTNERITAEKLEKTEEAENYLFSLGFTDFRVRYLNDSAKIQMPAAQMTKLLEMREEILIELKKYYKEVLLDLQAR

SEQ ID NO: 43098 - protein, 229 aa, Megasphaera sp.
  misc_feature (1)..(229): tr|A0A1C5NTY7|A0A1C5NTY7_9FIRM 7-cyano-7-deazaguanine s ynthase OS=uncultured Megasphaera sp. OX=165188 GN=queC PE=3 SV=1
MKCIVLLSGGVDSTTCLAMAVERYGAGEVMALTAYYGQKHAKEIQAARQVAAHYGVAHKETNLSQAFALSDSSLLQGRGKEICHESYAEQLKEMGGEGTVDTYVPFRNGLFLSYAAAIAVSVGAETIYYGAHADDAAGRAYPDCTPEFEQAMATAIYEGSGRTCCLEAPLLSWNKAGVVKEGLRLGAPYELTWSCYEGGDKPCGVCATCIDRAKAFAANGVADPALTAK

SEQ ID NO: 43099 - protein, 224 aa, Prochlorococcus marinus
  misc_feature (1)..(224): tr|Q1PJG0|Q1PJG0_PROMR 7-cyano-7-deazaguanine synthase OS=uncultured Prochlorococcus marinus clone HOT0M-3E5 O X=379388 GN=queC PE=3 SV=1
MALKNKSIVVLLSGGLDSSTVTGIAKKSEAKIFGLSFDYGQRHKKELNSASIIAKHFDIEEFKIIKLDLSLWGGSSLTDTQKNIPIEGVQTNQIPNTYVPGRNTIFISVALSYAEAIDADFIGLGVNALDYSGYPDCRPDYIKKFQELADLANKRGRENNPIKLWTPLLDLNKEEIIKLAFDNHVPLDKTWSCYSGNSKPCGKCDSCRIRNAAYEKWLNNNNKK

SEQ ID NO: 43100 - protein, 226 aa, Roseburia sp.
  misc_feature (1)..(226): tr|A0A1C5VYU2|A0A1C5VYU2_9FIRM 7-cyano-7-deazaguanine s ynthase OS=uncultured Roseburia sp. OX=512314 GN=queC P E=3 SV=1
MRALVLFSGGVDSTTCLALAVEKYGKENVTALSVSYGQKHVKEIEASKKIAEYYEVEHLYLDLGEIFEYSDCSLLSHSEREIPEESYAEQIEKSGGKPVSTYVPFRNGLFLSSAASIALSRNCSVIYYGAHSDDAAGSAYPDCSEAFNRAMGEAIYLGSGKQVAIEAPFVNVSKAQIVKTGLALKVPYELTWSCYEGAEHPCGVCGTCLDRARAFEENGISDPAGI

SEQ ID NO: 43101 - protein, 226 aa, Ruminococcus sp.
  misc_feature (1)..(226): tr|A0A1C6ACN0|A0A1C6ACN0_9FIRM 7-cyano-7-deazaguanine s ynthase OS=uncultured Ruminococcus sp. OX=165186 GN=que C PE=3 SV=1
MSSEKALVLSSGGVDSTTLLAMACHRYGKENVVALSIYYGQKHKKEMEASDDVAKYYGVEHIKLDLSTIFRYSDCSLLANSDVEIPHESYADQLKKTDGSPVSTYVPFRNGLFLSTAASVALSKGCTLLMYGAHADDAAGNAYPDCSMAFVEAMNTAIYEGSGKQLRIEAPFAGMNKAAVVAEGKKLGVPYEMTWSCYEGGDEPCKVCGTCRDRRAAFLANGIDLY

SEQ ID NO: 43102 - protein, 229 aa, Ruminococcus sp.; identical to SEQ ID NO: 43098
  misc_feature (1)..(229): tr|A0A1C5ZYT9|A0A1C5ZYT9_9FIRM 7-cyano-7-deazaguanine s ynthase OS=uncultured Ruminococcus sp. OX=165186 GN=que C PE=3 SV=1

SEQ ID NO: 43103 - protein, 240 aa, Sphingopyxis sp.
  misc_feature (1)..(240): tr|A0A1Y5PT98|A0A1Y5PT98_9SPHN 7-cyano-7-deazaguanine s ynthase OS=uncultured Sphingopyxis sp. OX=310581 GN=que C PE=3 SV=1
MSEAYLAPMQQVSGKSVIVLLSGGLDSMVCAGLAREAGARIVALTIDYNQRHRVELESAARIAGHVGAAEHIVLPLDLRRFGGSALTADIDVPKDGVPAVEGGDDVPITYVPARNLIFLSLTLGLAEARQAQDIVIGVNALDYSGYPDCRPEFIQGFEKLAALATRDGDKGVEFRIHAPLQHMTKADIAAEAARLGMDAGMSWSCYDPTPEGLHCGLCDSCRLRSKGFADAGLADPTRYA

SEQ ID NO: 43104 - protein, 228 aa, Sporomusa sp.; identical to SEQ ID NO: 42467
  misc_feature (1)..(228): tr|A0A212LSW0|A0A212LSW0_9FIRM 7-cyano-7-deazaguanine s ynthase OS=uncultured Sporomusa sp. OX=307249 GN=queC P E=3 SV=1

SEQ ID NO: 43105 - protein, 226 aa, Stenotrophomonas sp.
  misc_feature (1)..(226): tr|A0A1Y5PZW6|A0A1Y5PZW6_9GAMM 7-cyano-7-deazaguanine s ynthase OS=uncultured Stenotrophomonas sp. OX=165438 GN =queC PE=3 SV=1
MKKAVVLLSGGMDSAAVVAMAREQGFDVHALSVRYGQRHTSELDAAARVAQAMGVTRHKVVDVDLRSIGGSALTDDIDVPVRTDEERGGDGIPVTYVPARNTIMLSLALGWAEVLGANDIFCGVNAVDYSGYPDCRPEFIAAFQTLANLATKAGVEGAGIRIHAPLQHLSKAQIASEGQRLGVDFALTISCYRADAQGRACGHCDACRLRADGFATAGLPDPTHYA

SEQ ID NO: 43106 - protein, 226 aa, Unknown
  misc_feature (1)..(226): tr|A0A482ZW06|A0A482ZW06_9GAMM 7-cyano-7-deazaguanine s ynthase OS=uncultured SUP05 cluster bacterium OX=655186 GN=queC PE=3 SV=1
MSNKKAVILLSGGLDSTTTLAIAKSQDFECYALSFDYGQKQKSELNSAQKIAKLFPVIEHRTMCISLNDIGGSALTDNAIAVPKFKQSDEIPITYVPARNTIFLSYAMAWAEVLECQNIFIGVNALDYSGYPDCRGEYINAFETMANLATKQGVEGKKLTIHTPLINLHKAEIIQKGIELGVDYSLTTTCYQADEEGAACGICDACEYRKMGFEKANIADPTKYQK

SEQ ID NO: 43107 - protein, 226 aa, Unknown
  misc_feature (1)..(226): tr|A0A482ZL94|A0A482ZL94_9GAMM 7-cyano-7-deazaguanine s ynthase OS=uncultured SUP05 cluster bacterium OX=655186 GN=queC PE=3 SV=1
MSNKKAVILLSGGLDSTTTLAIAKSQGFDCYALSFDYGQKQKSELDSAKQIADLFSVIEHRTMTIFLNDIGGSALTDNAIAVPKFKPSDEIPITYVPARNTIFLSYAMAWAEVLACQNIFIGVNALDYSGYPDCRGEYISAFETMANLATKQAVEGRKLTIHTPLINLHKAEIIQKGLGLGVDYSLTTTCYQADKEGAACGICDACEYRKLGFKEAGIADPTKYQK

SEQ ID NO: 43108 - protein, 225 aa, Thiohalocapsa sp.; identical to SEQ ID NO: 37402
  misc_feature (1)..(225): tr|V4J3H3|V4J3H3_9GAMM 7-cyano-7-deazaguanine synthase OS=uncultured Thiohalocapsa sp. PB-PSB1 OX=1385625 GN=q ueC PE=3 SV=1

SEQ ID NO: 43109 - protein, 235 aa, Undibacterium parvum
  misc_feature (1)..(235): tr|A0A3Q9BR86|A0A3Q9BR86_9BURK 7-cyano-7-deazaguanine s ynthase OS=Undibacterium parvum OX=401471 GN=queC PE=3 SV=1
MNTCNDRALVLFSGGQDSTTCLAWALAHYQHVETIGFDYGQRHAIELTMRPSLLAKMRGFSDDWHAKLGEDHMLDLGLISQLSHTAMTEEIEITMQENGLPNTFVPGRNLMFMLVAATLAYRRGLNVLVGGMCETDFSGYPDCRDDSMKALQVALNLGMATRLKLETPLMWINKAQTWKLAEQLGGSNLVDLIRSDTHTCYLGERGTLHPWGHGCGTCPACALRARGYQEYAGTL

SEQ ID NO: 43110 - protein, 240 aa, Undibacterium pigrum
  misc_feature (1)..(240): tr|A0A318JDZ0|A0A318JDZ0_9BURK 7-cyano-7-deazaguanine s ynthase OS=Undibacterium pigrum OX=401470 GN=queC PE=3 SV=1
MNNLTTKDRALVLFSGGQDSATCLAWALSRYAHVETIGFDYGQRHAIELSVRPTLIEKMRQFSPEWQSRLGEDHMIDLSLISQLSHTAMTEDIAIEMQENGLPNTFVPGRNLMFMMTAATLAYRRGLNVLVGGMCETDFSGYPDCRDDTMKALQVALNLGMNTRLKLETPLMWINKAQTWQLAEQLGGIALVDLIREDTHTCYLGQRGAMHPWGHGCGTCPACALRARGYEYYRNGNFDL

SEQ ID NO: 43111 - protein, 235 aa, Undibacterium sp.
  misc_feature (1)..(235): tr|A0A431T924|A0A431T924_9BURK 7-cyano-7-deazaguanine s ynthase OS=Undibacterium sp. S11R28 OX=2495591 GN=queC PE=3 SV=1
MTRSNDSALVLFSGGQDSTTCLAWALARYQRVETIGYDYGQRHSIELSMRPSLLEKMRGFSSDWKDRLGEDHMIDLGLISQLSHTAMTEDIEITMQENGLPNTFVPGRNLMFMMVAATLAYRRGINVLVGGMCETDFSGYPDCRDDSMKALQVALNLGMATRLKLETPLMWINKAETWQLAERLGGTKLVDLIRADTHTCYLGERGTLHDWGHGCGTCPACALRARGYQEYAAGL

SEQ ID NO: 43112 - protein, 222 aa, Ureibacillus terrenus
  misc_feature (1)..(222): tr|A0A540UX15|A0A540UX15_9BACL 7-cyano-7-deazaguanine s ynthase OS=Ureibacillus terrenus OX=118246 GN=queC PE=3 SV=1
MKNEKAIVIFSGGQDSTTCLFWAKERFGEVEAVTFDYGQRHRLEIECAKEIAGETGVRHHILDMSLLNQLAPNALTREDIQVEEGKDGGLPNTFVPGRNLLFLSFAGVLARQVGAKHIVTGVCQTDFSGYPDCRDIFIKSLNVTLNLAMDDTFVIHTPLMWLTKAQTWELADRLGVLEFVRNKTLTCYNGIIADGCGECPACKLRRKGLEEYLRSRKGTSHV

SEQ ID NO: 43113 - protein, 226 aa, Ureibacillus thermophilus
  misc_feature (1)..(226): tr|A0A4P6UXK7|A0A4P6UXK7_9BACL 7-cyano-7-deazaguanine s ynthase OS=Ureibacillus thermophilus OX=367743 GN=queC PE=3 SV=1
MILKEEKAIVVFSGGQDSTTCLFWAKEQFKEVEAVTFDYGQRHRLEIECAKEIAKEVGVKHHILDMSLLNQLAPNALTRDDIEVEEGKDGELPSTFVPGRNLLFLSFAGVLASQVGAKHIVTGVCETDFSGYPDCRDVFIKSLNVTMNLAMDDTFVIHTPLMWLTKAQTWELADQLGVLDFVRNNTLTCYNGIIADGCGECPACKLRKRGLDEYLRSRKGASHVRF

SEQ ID NO: 43114 - protein, 218 aa, Uruburuella suis
  misc_feature (1)..(218): tr|A0A4R2MGW3|A0A4R2MGW3_9NEIS 7-cyano-7-deazaguanine s ynthase OS=Uruburuella suis OX=252130 GN=queC PE=3 SV=1
MPQQKALVIFSGGQDSTTCLIQAIQTYGRENVEAVTFQYGQRHAVELEKARWIAADLGVPQTVLDLSLMQQITHNALMDDKAEIRTADSGPPNTFVDGRNALFLLYAAIYAKSRDIVHIITGVCETDFSGYPDCRDVFVKSMNVTLNLAMDYAFQIHTPLMYLTKAQTWALADNLGALDYVRTHTHTCYMGVAGGCGQCPSCVLRERGLAEYLAQKGA

SEQ ID NO: 43115 - protein, 219 aa, Vampirococcus sp.
  misc_feature (1)..(219): tr|A0A410P2U2|A0A410P2U2_9BACT 7-cyano-7-deazaguanine s ynthase OS=Vampirococcus sp. LiM OX=1930593 GN=queC PE= 3 SV=1
MKKAVVLLSGGLDSATALYLAKARGYDVHALVFRYGQRHGKEVRRALAIARRLDCPAQVLGIRLPWRGSALLDRSKPLPQGGKTTHGIPLTYVPARNTIFLSFALSFAESIGARRIFIGANALDYSGYPDCRPRYYRAWQGLARLATKSGVEGAPIRIETPLLHMKKSQIIRLGTKLGVPYQLTWSCYRGAARPCGRCDSCLLRAKGFKEAGMKDPALS

SEQ ID NO: 43116 - protein, 237 aa, Variibacter gotjawalensis
  misc_feature (1)..(237): tr|A0A0S3PY38|A0A0S3PY38_9BRAD 7-cyano-7-deazaguanine s ynthase OS=Variibacter gotjawalensis OX=1333996 GN=queC _2 PE=3 SV=1
MEDSALVLFSGGQDSTVCLAWALERYTHVETIGFSYGQRHAIELDVRPGLRERMAAHSPVWNKRLGDDHVIPLDVLGKISDTALTRDVAIEMSDNGLPNTFVPGRNLVFLNFAAALAYRRGLKHLVGGMCETDYSGYPDCRNDTMKAVQTALSLGMDRPFVIETPLMWLDKTETWQLAETLGGQPLIDLIVADTHTCYLGERGRLHDWGHGCGECPACQLRAQGFARWREKKAEASK

SEQ ID NO: 43117 - protein, 453 aa, Variibacter gotjawalensis
  misc_feature (1)..(453): tr|A0A0S3PU35|A0A0S3PU35_9BRAD 7-cyano-7-deazaguanine s ynthase OS=Variibacter gotjawalensis OX=1333996 GN=queC _1 PE=4 SV=1
MNVRAFQPRVPETAIDVVEPGGQPRNGRAGFDLGRDFRFSTAGLQSYAFARWDPVIHDALILAAAVEYADRTTRRPALGWTRKIELRVPVHEPDRWSALSVTDALHEALQFLTGDIWMIEFAQRNGKALAPSQEDLQLPVKTEAVIAYSDGMDSRMVAGIMTAALGERLVRVRVGSKAGGRPAKGKREPFTRVPYSVSATGEPTARNRGFKFALISGIAAYLAEADRIIIPESGQGVFGPALVTAAHAYPDFRNHPLFTSRMEKFLNALLRRPVKFAFPRLWNTKGETLREFTTLPDSDTWRDTKTCWRGAQWSALNGKLLQCGICAACMLRRMSIHAASLRESGEGYICRDLGAPTLEASLQHDFKRMSPAFREYAIAGTLHLDHLADMADEVNRAVVARHAVLTSATLEIAPVNAEERLLRMLQRHAAEWGSFIKDTGARSFLRQWTRIEQ

SEQ ID NO: 43118 - protein, 234 aa, Variovorax boronicumulans
  misc_feature (1)..(234): tr|A0A250DEB7|A0A250DEB7_9BURK 7-cyano-7-deazaguanine s ynthase OS=Variovorax boronicumulans OX=436515 GN=queC PE=3 SV=1
MPLHTTALVLFSGGQDSATCLAEALSKYQRVETLGFDYGQRHRVELDVRGTVLAKMRERFPEWAPRLGEDHVLTLAALAQLGGSSLTEEVAFAMQADGLPNTFVPGRNLLFLTLAGALAYRRGLQVIVTGVCETDFSGYPDCRDDTMKAMQLALSLGLERRLVIETPLMWIDKAETWALAHRLGGQPLVDLIVEETHTCYLGDREHRQAWGYGCGECPACDLRKKGWERYVAAA

SEQ ID NO: 43119 - protein, 234 aa, Variovorax boronicumulans
  misc_feature (1)..(234): tr|A0A1E7U732|A0A1E7U732_9BURK 7-cyano-7-deazaguanine s ynthase OS=Variovorax boronicumulans OX=436515 GN=queC PE=3 SV=1
MPLHTTALVLFSGGQDSATCLAEALSKYQRVETLGFDYGQRHRVELDVRGTVLAKIRERFPEWAPRLGEDHVLTLAALAQLGGSSLTEEVAFAMQADGLPNTFVPGRNLLFLTLAGALAYRRGLQVIVTGVCETDFSGYPDCRDDTMKAMQLALSLGLERRLVIETPLMWIDKAETWALAHRLGGQPLVDLIVEETHTCYLGDREHRQAWGYGCGECPACDLRKKGWERYVAAA

SEQ ID NO: 43120 - protein, 244 aa, Variovorax gossypii
  misc_feature (1)..(244): tr|A0A431TPN3|A0A431TPN3_9BURK 7-cyano-7-deazaguanine s ynthase OS=Variovorax gossypii OX=1679495 GN=queC PE=3 SV=1
MPLHTTALVLFSGGQDSTTCLADALSKYQRVETLGFDYGQRHRVELDVRGNILAKMRERFPDWAPRLGEDHVLTLAALAQLGGSSLTEEVAFAMQADGLPNTFVPGRNLLFLTLAGALAYRRGLQVIVTGVCETDFSGYPDCRDDTMKAMQLALSLGLERRLVIETPLMWIDKAETWSLAHRLGGEPLVDLIVEETHTCYLGDRVHRQAWGYGCGECPACDLRKKGWERYAAALPAGAATTSTR

SEQ ID NO: 43121 - protein, 245 aa, Variovorax guangxiensis
  misc_feature (1)..(245): tr|A0A3S0ZJI0|A0A3S0ZJI0_9BURK 7-cyano-7-deazaguanine s ynthase OS=Variovorax guangxiensis OX=1775474 GN=queC P E=3 SV=1
MPLHTTALVLFSGGQDSTTCLADALSKYERVETLGFDYGQRHRVELDVRGTILAKMRERFPDWAPRLGEDHVLTLAALAQLGGSSLTEEVAFAMQADGLPNTFVPGRNLLFLTLAGALAYRRGLQVIVTGVCETDFSGYPDCRDDTMKAMQLALSLGLERRLVIETPLMWIDKAETWQLAHRLGGRPLVDLIVDETHTCYLGDRVHRQDWGYGCGECPACELRRKGWERYVAAAVPADEGTTSTR

SEQ ID NO: 43122 - protein, 235 aa, Variovorax guangxiensis
  misc_feature (1)..(235): tr|A0A502DW23|A0A502DW23_9BURK 7-cyano-7-deazaguanine s ynthase OS=Variovorax guangxiensis OX=1775474 GN=queC P E=3 SV=1
MPMHATALVLFSGGQDSTTCLADALSRYERVETLGFEYGQRHRIEMDVRHTVRARLRERFPAWAPRLGDDHVLNVDSLSQIGGSSLTDEVAFAMQADGLPNTFVPGRNLLFLTLAGALAYRRGLQVIVTGVCETDYSGYPDCRDDTMKAMQLALSLGLDRRLVIETPLMWIDKAQTWAMAHRLGGDALVDLIVEETHTCYQGDRTQRHAWGYGCGACPACELRAAGWSRYVDATV

SEQ ID NO: 43123 - protein, 197 aa, Variovorax paradoxus
  misc_feature (1)..(197): tr|A0A2W5K5W9|A0A2W5K5W9_VARPD 7-cyano-7-deazaguanine s ynthase OS=Variovorax paradoxus OX=34073 GN=DI587_11025 PE=3 SV=1
MRELLLLSGGVDSAALAAWRRPALALTIDYGQRSAAAEIHASQQICAALDLPNETLTASVKHLGSGVMAGQQSSPHSENEEFWPFRNQYLITLAAMVAIQRGLDAVVIGTVATDGRHRDGSAEFLQALGATLHLQEGGIALLAPAKNMTSAQLVRLSKIDHAVLGWSHSCHAASLACGDCPGCNKHSQVMGELGIPR

SEQ ID NO: 43124 - protein, 242 aa, Variovorax paradoxus
  misc_feature (1)..(242): tr|A0A0P9FZE2|A0A0P9FZE2_VARPD 7-cyano-7-deazaguanine s ynthase OS=Variovorax paradoxus OX=34073 GN=queC PE=3 S V=1
MPLHTTALVLFSGGQDSTTCLADALSKYQRVETLGFDYGQRHRVELDVRAGILASLRERFPDWAPRLGQDHVLTLAALAQLGGSSLTEEVAFEMQADGLPNTFVPGRNLLFLTLAGALAYRRGLQVIVTGVCETDFSGYPDCRDDTMKAMQLALSLGLERRLVIDTPLMWIDKAETWQLAHRLGGQPLVDLIVEETHTCYLGDRTHRQAWGYGCGECPACELRAKGWDRYVADAGAAEASSR

SEQ ID NO: 43125 - protein, 198 aa, Variovorax sp.
  misc_feature (1)..(198): tr|A0A1H7VMN7|A0A1H7VMN7_9BURK 7-cyano-7-deazaguanine s ynthase OS=Variovorax sp. YR750 OX=1884384 GN=SAMN05518 845_11691 PE=3 SV=1
MKTALLLSGGMDSLSIAWWKRPDIAITIDYGQLAAEAELRASKAVCAVLDIEHHILRVDCRMLGSGDMAGGEADPHAPASDWWPYRNQLLATLAAMKAISLGVTQLWLGTVKSDGSHRDGTQEFVGALDRLLSLQEGCMRVEAPAIELSTAELVKLSGAPLDQLAWAHSCHKANVACAQCRGCNKYFEVLKELQRDVA

SEQ ID NO: 43126 - protein, 237 aa, Variovorax sp.
  misc_feature (1)..(237): tr|A0A3P3ECT2|A0A3P3ECT2_9BURK 7-cyano-7-deazaguanine s ynthase OS=Variovorax sp. T529 OX=2491343 GN=queC PE=3 SV=1
MPLHTTALVLFSGGQDSTTCLADALSRYQRVETLGFDYGQRHRVELDVRGTILAKMRERFPDWAPRLGEDHVLTLAALAQLGGSSLTEEVAFEMQADGLPNTFVPGRNLLFLTLAGALAYRRGLQVIVTGVCETDFSGYPDCRDDTMKAMQLALSLGLERRLVIETPLMWIDKAETWQMAHRLGGEPLVDLIVEETHTCYLGDREHRQAWGYGCGECPACDLRKKGWERYASRPQEA

SEQ ID NO: 43127 - protein, 235 aa, Varunaivibrio sulfuroxidans
  misc_feature (1)..(235): tr|A0A4R3JGL4|A0A4R3JGL4_9PROT 7-cyano-7-deazaguanine s ynthase OS=Varunaivibrio sulfuroxidans OX=1773489 GN=qu eC PE=3 SV=1
MFEKDARALVLFSGGQDSTTCLAWALDAFAHVETVGFDYGQRHDIELSCRTTVIQHLRARFPAWAEKLGADRVLDLPVLGDVADSTLTREGEIALDASGLPNTFVPGRNLLFFTLAGALGFRRGARHLVGGMCETDYSGYPDCRDDTLKALQVALGLGMDTRCVIHTPLMWIDKGETWRMAHRLGGDALVELIVEDTHTCYRGDRTARHPWGYGCAACPACDLRRAGWDAYVKGN

SEQ ID NO: 43128 - protein, 229 aa, Veillonella atypica
  misc_feature (1)..(229): tr|A0A133S7C0|A0A133S7C0_9FIRM 7-cyano-7-deazaguanine s ynthase OS=Veillonella atypica OX=39777 GN=queC PE=3 SV =1
MAQKQKAVVLFSGGVDSTTCLALAIERFGKENVVPLSIQYGQKHSKELEAAANVLAYYGIEGKTMDVTKLFAFSNSSLLKQSTEDVPTGSYKEQQDEHGEGPVSTYVPFRNGLFLSAAASLALSLDCGYIYYGAHADDAAGNAYPDCTETFYTSMGNAIFEGSGQECSLEAPFINCNKADVVREGLRLGVPYQLTWSCYEGGDHPCGHCGTCIDRQEAFRANGIEDPSY

SEQ ID NO: 43129 - protein, 229 aa, Veillonella atypica
  misc_feature (1)..(229): tr|A0A380N6V2|A0A380N6V2_9FIRM 7-cyano-7-deazaguanine s ynthase OS=Veillonella atypica OX=39777 GN=queC PE=3 SV =1
MAQKQKAVVLFSGGVDSTTCLALAIERFGKENVVPLSIQYGQKHSKELEAAANVLAYYGIEGKTMDVTKLFAFSNSSLLTQSTEAVPTGSYKEQQDEHGEGPVSTYVPFRNGLFLSAAASLALSLDCGYIYYGAHADDAAGNAYPDCTETFYKSMGDAIFEGSGKECSLEAPFINSNKADVVREGLRLGVPYQLTWSCYEGGDRPCGHCGTCIDRQEAFRANGIEDPSY

SEQ ID NO: 43130 - protein, 230 aa, Veillonella criceti
  misc_feature (1)..(230): tr|A0A380NLW6|A0A380NLW6_9FIRM 7-cyano-7-deazaguanine s ynthase OS=Veillonella criceti OX=103891 GN=queC PE=3 S V=1
MKAIVLSSGGVDSTTCLALAVDQLGRENVAAVSIFYGQKHDKELQCARKIADYYEVPHYELDLSQILKYSNCSLLQGSTEDIIHKSYAEQIEEQGEGMVNTYVPFRNGLMLSAVASLGMSVFPDDTVQIYLGAHADDAAGNAYADCSEAFVNTMAKAISLGTYDKVQVVAPFATNNKAQLVKVGLDLNVPYELTWSCYEGGDVPCGTCGTCIDRIKAFELNGAVDPLLEG

SEQ ID NO: 43131 - protein, 238 aa, Veillonella denticariosi
  misc_feature (1)..(238): tr|A0A2S7ZA70|A0A2S7ZA70_9FIRM 7-cyano-7-deazaguanine s ynthase OS=Veillonella denticariosi JCM 15641 OX=129859 4 GN=queC PE=3 SV=1
MKGEIMAQKQRAVVLFSGGVDSTTCLALAIERFGKDNVVPLSIRYGQKHGKELEAAAAVLAHYGIEGKTMDVTKLFAFSNSSLLMQSDEAVPQGSYKEQQDREGDGPVSTYVPFRNGLFLSAAASLALSLDCGYIYYGAHSDDAAGNAYPDCTEQFYKSMGDAIFEGSGQACSLEAPFINVNKADVVKEGLRLHVPYELTWSCYEGGAVPCGHCGTCIDRAEAFRANGVEDPAIHFAK

SEQ ID NO: 43132 - protein, 29 aa, Veillonella dispar
  misc_feature (1)..(29): tr|A0A3D2WTR6|A0A3D2WTR6_9FIRM 7-cyano-7-deazaguanine s ynthase QueC (Fragment) OS=Veillonella dispar OX=39778 GN=DHW37_06640 PE=4 SV=1
MAQKQKAVVLFSGGVDSTTCLALAIERFG

SEQ ID NO: 43133 - protein, 234 aa, Veillonella dispar
  misc_feature (1)..(234): tr|C4FN65|C4FN65_9FIRM 7-cyano-7-deazaguanine synthase OS=Veillonella dispar ATCC 17748 OX=546273 GN=queC PE=3 SV=1
MKGDLMAQKQKAVVLFSGGVDSTTCLALAIERFGKDNVVPLSIQYGQKHSKELEAAASILAYYGIEGKTMDVTKLFAFSNCSLLTQSTEAIPQGSYKEQQETEGEGTVSTYVPFRNGLFLSAAASLALSLDCGYIYYGAHSDDAAGNAYPDCTEHFYKSMGDAIFEGSGKECSLEAPFINHNKADVVKEGLRLGVPYHLTWSCYEGGDKPCGHCGTCIDRAEAFRANGVEDPAQ

SEQ ID NO: 43134 - protein, 231 aa, Veillonella montpellierensis
  misc_feature (1)..(231): tr|A0A096AJ15|A0A096AJ15_9FIRM 7-cyano-7-deazaguanine s ynthase OS=Veillonella montpellierensis DNF00314 OX=140 1067 GN=queC PE=3 SV=1
MNERNERAVVLLSGGVDSTTCLALAIERFGKDCVIPLSILYGQKHSKELEAVHAILNYYHMQGQSLDVTKIFAFSNCSLLQQSTESIPEGSYATQQANSGSDVVSTYVPFRNGLFLSAAASLALSLEASHVYYGAHSDDAAGNAYPDCSNAFYNAMGAAIYEGSGKLLTLEAPFITASKADVIKEGIRLGVPYELTWSCYEGGATPCGHCGTCIDRAQAFAANGLKDPAIK

SEQ ID NO: 43135 - protein, 229 aa, Veillonella parvula
  misc_feature (1)..(229): tr|D1BPC1|D1BPC1_VEIPT 7-cyano-7-deazaguanine synthase OS=Veillonella parvula (strain ATCC 10790 / DSM 2008 / JCM 12972 / Te3) OX=479436 GN=queC PE=3 SV=1
MAQKQKAVVLFSGGVDSTTCLALAIERFGKDNVVPLSIQYGQKHSKELEAAIAILEYYGMEGKTMDVTKLFAFSNCSLLTQSSEDIPQGSYKEQQDAEGEGTVSTYVPFRNGLFLSAAASLALSLDCGYIYYGAHSDDAAGNAYPDCTEHFYKSMGDAIFEGSGKECSLEAPFINANKADIVKEGLRLGVPYHLTWSCYEGGDKPCGHCGTCIDRAKAFHANGVEDPAL

SEQ ID NO: 43136 - protein, 229 aa, Veillonella parvula
  misc_feature (1)..(229): tr|D1YQ19|D1YQ19_9FIRM 7-cyano-7-deazaguanine synthase OS=Veillonella parvula ATCC 17745 OX=686660 GN=queC PE= 3 SV=1
MAQKQKAVVLFSGGVDSTTCLALAIERFGKDNVVPLSIQYGQKHSKELEAAIAILEYYNMKGKTMDVTKLFAFSNCSLLVQSSEDIPQGSYKEQQDAEGKGTVSTYVPFRNGLFLSAAASLALSLDCGYIYYGAHSDDAAGNAYPDCTEHFYKSMGDAIFEGSGKECSLEAPFINSNKADIVKEGLRLGVPYHLTWSCYEGGDKPCGHCGTCIDRAKAFHANGVEDPAL

SEQ ID NO: 43137 - protein, 233 aa, Veillonella rodentium
  misc_feature (1)..(233): tr|A0A239ZRQ0|A0A239ZRQ0_9FIRM 7-cyano-7-deazaguanine s ynthase OS=Veillonella rodentium OX=248315 GN=queC PE=3 SV=1
MAQKQRAVVLFSGGVDSTTCLALAVERFGKENVVPLSIRYGQKHCKELEAAAAVLAYYGIEGKTMDVTKLFAFSNSSLLMQSDEAVPQGSYKEQQDREGDGPVSTYVPFRNGLFLSAAASLALSLDCGYIYYGAHSDDAAGNAYPDCTEQFYKSMGDAIFEGSGEACSLEAPFINANKADVVKEGLRLHVPYELTWSCYEGGAVPCGHCGTCIDRAEAFRANGVEDPAIHFGK

SEQ ID NO: 43138 - protein, 229 aa, Veillonella rogosae
  misc_feature (1)..(229): tr|A0A2S7YWF1|A0A2S7YWF1_9FIRM 7-cyano-7-deazaguanine s ynthase OS=Veillonella rogosae JCM 15642 OX=1298595 GN= queC PE=3 SV=1
MAQKQKAVVLFSGGVDSTTCLALAIERFGKDNVVPLSIQYGQKHSKELEAATSILAYYGIEGKTMNVTKLFAFSNCSLLTQSTEEIPQGSYKEQQETEGEGTVSTYVPFRNGLFLSAAASLALSLDCGYIYYGAHSDDAAGNAYPDCTEHFYKSMGDAIFEGSGKECSLEAPFINSNKADIVKEGLRLGVPYHLTWSCYEGGDKPCGHCGTCIDRQAAFEANGVEDPAQ

SEQ ID NO: 43139 - protein, 229 aa, Veillonella seminalis
  misc_feature (1)..(229): tr|K9D5V9|K9D5V9_9FIRM 7-cyano-7-deazaguanine synthase OS=Veillonella seminalis ACS-216-V-Col6b OX=883156 GN=q ueC PE=3 SV=1
MKAIVLSSGGVDSTTCLALSIDRLGKENVAAVSIFYGQKHDKELQCARKIAAYYEVPHYELDLSQILKYSNSSLLQNSTDEIIHKSYAEQIEEQGEGMVSTYVPFRNGLMLSAVASLGMSLFLDDTVQLYLGAHADDAAGNAYADCSEAFVDAMTKAISLGTYDKVQVVAPFAAKNKAQLVKVGLDLKVPYELTWSCYEGGDKPCGTCGTCIDRIKAFELNGTTDPLIK

SEQ ID NO: 43140 - protein, 229 aa, Veillonella sp.
  misc_feature (1)..(229): tr|A0A134C8Y6|A0A134C8Y6_9FIRM 7-cyano-7-deazaguanine s ynthase OS=Veillonella sp. DNF00869 OX=1384081 GN=queC PE=3 SV=1
MKALVLSSGGVDSTTCLAMAIDVLGTDNVSALSIWYGQKHKKELDSAKAIANYYGIPHYELDLTQVMSYSNSSLLSSSTESIDHRTYGEQIAETGSVSTYVPFRNGLILSMAASLALSLYPEEEVTIYIGAHADDAAGNAYPDCRPDFNHHMNEAIYIGSYNKVRLYAPLNDMNKSQVIQEGLRLQVPYHLTWSCYEGGSTPCHTCGTCRDREQAFMDNDMVDPLLQQK

SEQ ID NO: 43141 - protein, 233 aa, Veillonella sp.
  misc_feature (1)..(233): tr|W3Y3I3|W3Y3I3_9FIRM 7-cyano-7-deazaguanine synthase OS=Veillonella sp. AS16 OX=936589 GN=queC PE=3 SV=1
MAQKQRAVVLFSGGVDSTTCLALAIERFGKDNVVPLSIRYGQKHGKELEAAAAVLAHYGIEGKTMDVTKLFAFSNSSLLMQSDEAVPQGSYKEQQDREGDGPVSTYVPFRNGLFLSAAASLALSLDCGYIYYGAHSDDAAGNAYPDCTEQFYKSMGDAIFEGSGQACSLEAPFINVNKADVVKEGLRLHVPYELTWSCYEGGAVPCGHCGTCIDRAEAFRANGVEDPAIHFGK

SEQ ID NO: 43142 - protein, 229 aa, Veillonella tobetsuensis
  misc_feature (1)..(229): tr|A0A2S7ZQ50|A0A2S7ZQ50_9FIRM 7-cyano-7-deazaguanine s ynthase OS=Veillonella tobetsuensis OX=1110546 GN=queC PE=3 SV=1
MAQKQKAVVLFSGGVDSTTCLALAIERFGKENVVPLSIQYGQKHSKELEAAANVLAYYGIEGKTMDVTKLFAFSNSSLLTQSTEDVPTGSYKEQQDELGEGPVSTYVPFRNGLFLSAAVSLALSLDCGYIYYGAHADDAAVNAYPDCTEVFYTSMGNAIFEGSGKECSLEAPFINRNKADVVREGLRLGVPYQLTWSCYEGGDHPCGHCGTCIDRQEAFRANGIKDPAN

SEQ ID NO: 43143 - protein, 229 aa, Veillonella tobetsuensis
  misc_feature (1)..(229): tr|A0A480B2Z0|A0A480B2Z0_9FIRM 7-cyano-7-deazaguanine s ynthase OS=Veillonella tobetsuensis OX=1110546 GN=queC PE=3 SV=1
MAQKQKAVVLFSGGVDSTTCLALAIERFGKENVVPLSIQYGQKHSKELEAAANVLAYYGIEGKTMDVTKLFAFSNSSLLKQSTEDVPSGSYKEQQDELGEGPVSTYVPFRNGLFLSAAASLALSLDCGYIYYGAHADDAAGNAYPDCTEVFYTSMGNAIFEGSGKECSLEAPFINRNKADVVREGLRLGVPYQLTWSCYEGGDYPCGHCGTCIDRLEAFRANGIEDPAN

SEQ ID NO: 43144 - protein, 230 aa, Veillonellaceae bacterium
  misc_feature (1)..(230): tr|A0A316LFA7|A0A316LFA7_9FIRM 7-cyano-7-deazaguanine s ynthase OS=Veillonellaceae bacterium OX=2049049 GN=queC PE=3 SV=1
MKKAIVLSSGGVDSTTCISVAVKELGADNVCTASIFYGQKHVKELDAARKVAEWFHVKHYEFDLSSILQYSNCALLAGSSEEIKHESYEDQVKESETGRVSTYVPFRNGLMLSVAASLAASLYEDEEVDIYIGAHADDAAGNAYADCSEPFLKAMEDAISIGTYGKVHLVFPFADKNKAGVVKTGLALGTPYELTWSCYEGGEKPCGTCGTCRDRAAAFEANGVKDPALD

SEQ ID NO: 43145 - protein, 229 aa, Veillonellaceae bacterium
  misc_feature (1)..(229): tr|A0A134CAW8|A0A134CAW8_9FIRM 7-cyano-7-deazaguanine s ynthase OS=Veillonellaceae bacterium DNF00626 OX=158875 4 GN=HMPREF3191_01291 PE=3 SV=1
MKKAMILSSGGVDSTTCLSLAVKNLGAENVWTASVFYGQKHDRELLAARQVAAYYHVKHDEFDLSFLMKYSHCPLLSSSSEAIPHESYADQIRRNGEGKVATYVPFRNGLMLSVAATLASGMFEGVDCDIYIGAHADDAAGNAYADCSPEFLSAMGSAISIGTYQQVHLVYPFAGKSKAEVVKMGISLGTPYELTWSCYEGGSRPCGRCATCIDRAKAFAANGMADPAL

SEQ ID NO: 43146 - protein, 237 aa, Verminephrobacter eiseniae
  misc_feature (1)..(237): sp|A1WSR5|QUEC_VEREI 7-cyano-7-deazaguanine synthase OS =Verminephrobacter eiseniae (strain EF01-2) OX=391735 G N=queC PE=3 SV=1
MRAGHALVLFSGGQDSTTCLAWALTQFAHVETIGFDYGQRHHVELQARQTVLAAIRSRFAQWRERLGADHMIDLSVLGRISDTALTRDSAIQLSAAGLPNTFVPGRNLLFFNLAAAVGYRRGLHTLVGGMCETDFSGYPDCRDDSLKALQVAVSLGLGQRFTFETPLMWLDKAATWELARSLGGQALVELIVRDSHTCYHGVRGVLHAWGHGCGTCPACVLRQTGYDRWQARPVAAP

SEQ ID NO: 43147 - protein, 237 aa, Verminephrobacter sp.; identical to SEQ ID NO: 43146
  misc_feature (1)..(237): tr|A0A4Q2L7B1|A0A4Q2L7B1_9BURK 7-cyano-7-deazaguanine s ynthase OS=Verminephrobacter sp. Larva24 OX=2509434 GN= queC PE=3 SV=1

SEQ ID NO: 43148 - protein, 228 aa, Verrucomicrobia bacterium
  misc_feature (1)..(228): tr|A0A1Q6VB68|A0A1Q6VB68_9BACT 7-cyano-7-deazaguanine s ynthase OS=Verrucomicrobia bacterium 13_2_20CM_55_10 OX =1805420 GN=queC PE=3 SV=1
MKRAVVLLSGGIDSTTTLAIAIAEDYETYALSFDYGQRHQIETDAARRVASSLGAKEHRIAKIDMRIFGGSALTDDVDVPKQRSETEIAHGIPITYIPARNTIFLAYALALAEVIPAADIFIGVNAIDYSGYPDCRPEFIQAFENLANVGTKAGVEGRRFQIHTPLIKLSKAEIIRKAGELGVDLSLTHSCYDPTPDGLACGECDSCLLRLKGFREARVKDPIRYAQK

SEQ ID NO: 43149 - protein, 245 aa, Verrucomicrobia bacterium
  misc_feature (1)..(245): tr|A0A424HLR2|A0A424HLR2_9BACT 7-cyano-7-deazaguanine s ynthase OS=Verrucomicrobia bacterium TMED71 OX=1986878 GN=queC PE=3 SV=1
  misc_feature (150)..(150): Xaa can be any naturally occurring amino acid
  misc_feature (156)..(156): Xaa can be any naturally occurring amino acid
  misc_feature (161)..(161): Xaa can be any naturally occurring amino acid
  misc_feature (176)..(176): Xaa can be any naturally occurring amino acid
  misc_feature (186)..(186): Xaa can be any naturally occurring amino acid
  misc_feature (209)..(209): Xaa can be any naturally occurring amino acid
MPKSTDQIPETAIAVYSGGMDSTVMLYSMLEQGVDLQGALSFDYGQKHRKEILVAKEICERLGMEHRIVDLRSIATLFGSSGLTDSDTDVPEGHYEEVSMKQTVVPNRNMILISLATAWAITKGAEAVAYAAHSGDHAIYPDCRESFANXLDQAMXLCDWXEIRLYRPFVNSSKSXIVAEGHRLGXPLGSTWSCYKGGDLHCGKCGTCXERREAFHLAGVQDPTSYSASAPSVETLVAQNWHLST

SEQ ID NO: 43150 - protein, 164 aa, Verrucomicrobia subdivision
  misc_feature (1)..(164): tr|A0A0R2RQJ8|A0A0R2RQJ8_9BACT 7-cyano-7-deazaguanine s ynthase (Fragment) OS=Verrucomicrobia subdivision 6 bac terium BACL9 MAG-120507-bin52 OX=1655590 GN=ABR82_05600 PE=3 SV=1
MKVVVLLSGGLDSVTALHHMAATEKVVAALSFDYGAKHNSRELPCAADQCRSLRIPNRIVSLNFMADAFKSDLLKSGGKIPDGHYEEQSMKKTVVPFRNGVFLSLGTGYAESLGAEAIAIAAHAGDHTIYPDCREDFLKPMAQAMGTGTYAHIQLLRPFVSMDK

SEQ ID NO: 43151 - protein, 257 aa, Verrucomicrobia subdivision
  misc_feature (1)..(257): tr|A0A520Q557|A0A520Q557_9BACT 7-cyano-7-deazaguanine s ynthase OS=Verrucomicrobia subdivision 3 bacterium OX=2 052186 GN=EVA72_11085 PE=3 SV=1
MFADKPAGKTVISLSGGMDSTGLLMHLLAQNCEVFGISFNYGQKHILELERLKANIVYLKTHNIDINYDVIDLSILGKLYSSALTDPDWEIPEGHYEQDNMKQTVVPNRNAIFASIAYGYALSIATETNEQVSIALGVHSGDHAIYPDCRPEFYEAIHKAFAIGNWDSDKVDLYLPYINGDKHTILKDAEASIDKVGLDFDTIFKNTNTSYEPDELGRASGKTGADIERIEAFIKLGRKDPVEYQASWEELIKNNEA

SEQ ID NO: 43152 - protein, 226 aa, Verrucomicrobiaceae bacterium
  misc_feature (1)..(226): tr|A0A4Q2Y7I2|A0A4Q2Y7I2_9BACT 7-cyano-7-deazaguanine s ynthase OS=Verrucomicrobiaceae bacterium OX=2026800 GN= queC PE=3 SV=1
MKTCVLLSGGMDSVAAFYEVLGTHEVVACLSFDYGSKHNAKEIPFAKLHADRNGVQHHVIPLDFMNTLFKSDLLKSGGEIPEGHYAEETMKQTVVPFRNGIMLAIAAGYAESVEADGLVIAAHSGDHAIYPDCREPFMRAMGTAMEEGTYAKIKLLRPFIDNDKAGIARRGVELGIDFSETWSCYKGGDIHCGVCGTCVERREAFILAGLPDPTTYAQTPELPILG

SEQ ID NO: 43153 - protein, 226 aa, Verrucomicrobiaceae bacterium
  misc_feature (1)..(226): tr|A0A4Q2Y5S7|A0A4Q2Y5S7_9BACT 7-cyano-7-deazaguanine s ynthase OS=Verrucomicrobiaceae bacterium OX=2026800 GN= queC PE=3 SV=1
MKTCVLLSGGMDSVAAFYEVLGKHEVVACLSFDYGSKHNSKEIPFAKLHADRNGVPHHVIPLDFMNTLFKSDLLKSGGDIPDGHYAEETMKQTVVPFRNGIMLAIAAGYAESVEADALVIAAHSGDHAIYPDCREPFMRAIGTAMEEGTYAKIQLLRPFIDNDKAGIARRGVELGIDFSETWSCYKGGEVHCGVCGTCVERREAFILAGLPDPTRYEQTPDLPTLA

SEQ ID NO: 43154 - protein, 1398 aa, Verrucomicrobiae bacterium
  misc_feature (1)..(1398): tr|B5JCX8|B5JCX8_9BACT ExsB family OS=Verrucomicrobiae bacterium DG1235 OX=382464 GN=VDG1235_3256 PE=4 SV=1
MPPNQSIKASSFLERITEDSGLTHSQIQIWVGQKVHPQSPFCNMAFGIEIEGEIDVETFEQAWAKVVSENSVLRTRILELKSVPQRSLTPPADFSLEKLDFSNHEQPANYFRSWARKRCSTLLPLEGKLVESAIVKLAPNAYAWYLNQHHLITDATSTVRLYQAISDAYEQLTEEQAAAVSNFEDYYEVSSKISDETAEIREHAKQHWSTKGTQTERLTPIYGRKGDAAQTESSRLEYQLDERQSERIRKLASEPELQSLFPDISTFAVFSTLLSAFLYRSSGQNAVSFDSPAANRSTRSAKNALGCFIEMFPLDLQVEEGATFRSLAAHCMEEIHSFLQNVSNGASSPSGSNTSNVVLNLFTLPFGSFAGCPTRAEWIHSGHIDGVYDFKLQVHDYNADGRYTLHFDLSESTFTAEDQQRIQFHFISMLDAMIENLDTPIAAVDILSESERNHLLIDYNRPSLAPIPTDTVIERIARQAAATPDRIALRQQSKTLTYKELWDQVEASARCLNSRGIGPESCVALIMPRSQETILSILAVLRAGAAYIPIDPTYPEERIAKILADSGANCHIKSFSELLDGNKRSELPPFPKSGDLAYVIYTSGSTGQPKGVEIEHRGLVDYIDWAEREYVRGEQLTYPLFTSLSFDLTVTSLFLPLVTGGELVVYPQTSAEVDSAVIDVINENTVDFIKLTPSHLSLLKQLDLKRSRISRLVLGGEDLKLSLASTIAAQFGHPVELYNEYGPTECVVGCMIHRFDPTSDFANESSVPIGRPADHVSLYLLNDRLQPVPEGAPGELCIARNGIARGYRNDPEKTALSFVANPYRPGERLYRTGDLARFSAKGVMTYLGRIDKQVKISGHRIELGEIEATLLRHPSVRNAFVSTRAPDIQTRPTGAAAHCTRCGLSSHYPNIVFNAEGVCSVCDSYHSIKGEASHYFSDPESLKELFKASRNKRRGNYDCMVFFSGGKDSAYALCQLVDMGLNVYAFTLDNGYLSDQAMANISRVTKSLGVEHEFATTPAMNEIFRDSLTRFSNVCNGCFKTIYTLGMNRANELGIPIIVTGLSRGQFFETRLTGNLFENGRFSPQDVDEAVLEARKRYHRDDDAVSRCLDVSKFQDDSIFEEIQFVDFYRYWDAPLEEIYSYLDRRVPWIRPSDTGRSTNCRVNDVGIYIHQKERGFHNYSLPYSWDVRLEQKKREEAIEELDDKFDLAEVRQMLAEIGYDEDRIAADENRVELVAYYEADSEIEANSLLKTLERHLPPQMRPRHIVHIDSMPLTKNGKVDEAALPQPLDKRPDQDAPIIEPNGPVQEHVFSIWSQTLNLKTISVTDSFFQLGGTSLTAMEITLQICQDFEIDLPLQTIFQHPTIAQLSSKIENTILEEIESLSEEDANNLLSEESPS

SEQ ID NO: 43155 - protein, 234 aa, Verrucomicrobiae bacterium
  misc_feature (1)..(234): tr|A0A2A2YCY0|A0A2A2YCY0_9BACT 7-cyano-7-deazaguanine s ynthase OS=Verrucomicrobiae bacterium AMD-G2 OX=1982328 GN=queC PE=3 SV=1
MNHPQDNEAIVLLSGGMDSVTALHHAHAAGPVLTAVSFDYGSKHNVREISFAKWHCDELGIKHQVVALDFFTQLFTSSLLDGGAPIPDGHYAEANMKQTVVPFRNGIMLAIAAGIAENHGAGRLVIAAHSGDHAIYPDCRESFMQGMATAVEEGTYARVRIDRPFIHLGKAAIAARGTELGIDFRQTWSCYKGGDIHCGTCGTCVERREAFLLANIIDPTEYLATPPLPATPSC

SEQ ID NO: 43156 - protein, 233 aa, Verrucomicrobiales bacterium
  misc_feature (1)..(233): tr|A0A3D3NZL7|A0A3D3NZL7_9BACT 7-cyano-7-deazaguanine s ynthase OS=Verrucomicrobiales bacterium OX=2026801 GN=q ueC PE=3 SV=1
MTRTLVLLSGGMDSTAALHWARREHEVAGAVSFDYGSKHNAREIELARWQCEKLGVPHDVLALPFINEHFSSDLLLSGGNIPEGHYADENMRRTVVPFRNGIMLAIACGLAESRGARALVIAAHAGDHAIYPDCREEFMQAIAAAMRAGTYAGIELLRPFIHLDKAAIARLGHDLGVDFGMTWSCYKGGGIHCGVCGTCVERREAFLKAGLPDPTRYLDEGALPAPAVLPPSS

SEQ ID NO: 43157 - protein, 267 aa, Verrucomicrobiales bacterium
  misc_feature (1)..(267): tr|A0A358EMP7|A0A358EMP7_9BACT 7-cyano-7-deazaguanine s ynthase OS=Verrucomicrobiales bacterium OX=2026801 GN=D EB48_06735 PE=3 SV=1
MSTGDLKGRAVISLSGGMDSTGLLMHLLANGSKVYGISFDYGQKHKLELSRLKANLDYLAAHDYEVTHRTVDISVLGSLYKSALTTDGWVVPQGHYEQDNMKETVVPNRNAIFSSIAYGYALSIANEVEEEVSLCLGVHSGDHAIYPDCRPEFYEAIHNAFALGNWDSERVSMYLPYLDGDKHTILKDAQKAINQLGLDFNEIFGNTNTSYDPDPQGRASGKTGADIERILAFHRLGVPDPVLYTDSWEVVLQNALKEQEEFGTKNH

SEQ ID NO: 43158 - protein, 232 aa, Verrucosispora sp.
  misc_feature (1)..(232): tr|A0A2N7T3R2|A0A2N7T3R2_9ACTN 7-cyano-7-deazaguanine s ynthase OS=Verrucosispora sp. ts21 OX=2069341 GN=queC P E=3 SV=1
MSAVKPQAVVLLSGGLDSATALAVAMNEGFEANALSFRYGQRHTVELGAAARVAKALGATRHVVADIDLRVFGGSALTDDDFAVPHHDSADEIGSEIPVTYVPARNTIFLSFALAWAETLGSSDIYIGVSALDYSGYPDCRPEYIEAYEHMANLATKAGVEGRQRMKIHTPLIHLTKADTIRLGLSLGVDYALTHSCYDPVNGQPCGSCDSCLLRTRGFAELGMSDPVGGAS

SEQ ID NO: 43159 - protein, 231 aa, Verrucosispora sp.
  misc_feature (1)..(231): tr|A0A2N7T4Q1|A0A2N7T4Q1_9ACTN 7-cyano-7-deazaguanine s ynthase OS=Verrucosispora sp. ts21 OX=2069341 GN=C1A38_ 09290 PE=3 SV=1
MSEILLFSAGLDSFPAWHYLGKPRTLYFDSGHFGRQQEIDTVRALAAAHGMDLEISSELDLSGRATPQGDLIPFRNVLFAMLAAFRADVIWCVGVKGDHTADKSSEAFARMSEMLTTFAGRPIRVDSPFWDMTKSDIVAWYLKAGLPVDDLLQTFSCATPGTAFTHCGRCPSCLRRWIALTNNDITGHFASPPWTWDRIRTYYLPAMASGGYPPHRVEEFRCAMATVGALP

SEQ ID NO: 43160 - protein, 302 aa, Verticiella sediminum
  misc_feature (1)..(302): tr|A0A556AWM5|A0A556AWM5_9BURK 7-cyano-7-deazaguanine s ynthase OS=Verticiella sediminum OX=1247510 GN=queC PE= 3 SV=1
MNLNHRRALVLFSGGQDSTACLAWALDRYAHVETVGFDYGQRHRIELDCRTHVRDRIAAAFPAWAPRLGDDHLLRVDVLGEISDTALTRDAEVQMQANGLPNTFVPGRNLLFLTLAGALAYRRNLDVIVGGMCETDYSGYPDCRDVTIKAMQVALNLGTDRAFVFETPLMWLDKAETWQLTQDLGGDALVEIVRADTHTCYLGERGELHDWGHGCGTCPACALRARGYAQWRGALSGEMAAQRPEGRPHSTTARPPEGGAASLGEVAAQRPEGRPHSAAARPPEGGAASLGEVAAQRPEGRP

SEQ ID NO: 43161 - protein, 230 aa, Vesicomyosocius okutanii
  misc_feature (1)..(230): sp|A5CWP9|QUEC_VESOH 7-cyano-7-deazaguanine synthase OS =Vesicomyosocius okutanii subsp. Calyptogena okutanii ( strain HA) OX=412965 GN=queC PE=3 SV=1
MLNAKHKIKAVILLSGGLDSTTTLAIAKSKKFECYSLSFDYGQKQESELQSAKNIAKIFITSEHRVVKISLSGISKSALTNDNIDVPKFSQSNKIPITYVPARNTIFLSYALAWSEVLNCQHIFIGVNELDYSGYPDCRKSYIKAFEIMANLATKQGIEGQKLTIHTPLIHLNKAQIIKKGLSLGIDYTLTTTCYQADKNGKACGICDACEYRKLGFKEAKVPDQTRYQT

SEQ ID NO: 43162 - protein, 219 aa, Vespertiliibacter pulmonis
  misc_feature (1)..(219): tr|A0A3N4W2K3|A0A3N4W2K3_9PAST 7-cyano-7-deazaguanine s ynthase OS=Vespertiliibacter pulmonis OX=1443036 GN=que C PE=3 SV=1
MTNQPKAAVIFSGGQDSTTCLFLAIQEFGVENVEVVTFQYGQRHAIELEKAAWIAKDLGVKQTIIDTSVIKAITANALMDNNAEIKQNGETPNTFVDGRNALFLLYTAIYAKSQGIKTIFTGVCETDFSGYPDCRDIFIKSMNVTLNLAMDYNFNIRTPLMYLTKKETWQLADQLGAFDYIREYTHTCYLGIEGGCHTCPSCILREKGLNEYLAERNHV

SEQ ID NO: 43163 - protein, 238 aa, Vibrio aerogenes
  misc_feature (1)..(238): tr|A0A1M5XPK0|A0A1M5XPK0_9VIBR 7-cyano-7-deazaguanine s ynthase OS=Vibrio aerogenes CECT 7868 OX=1216006 GN=que C PE=3 SV=1
MTKAVVVFSGGQDSTTCLVEALQNYDEVHAITFDYGQRHRKEIEVAQALGKKLNVAAHKIINAGVLNELAISSLTREDIPVSAALQDNGLPNSFVPGRNILFLTLAGIYAYQIGASAVITGVCETDFSGYPDCRNDFVKAMNHALVQGMERDLTVITPLMWLDKAETWAMADHYGALSLVKDNTLTCYNGIVGDGCGECPSCKLRKAGLDTYIENKPAIMKAYLDKQRTASSRNGDKR

SEQ ID NO: 43164 - protein, 228 aa, Vibrio agarivorans
  misc_feature (1)..(228): tr|A0A2K1CHJ8|A0A2K1CHJ8_9VIBR 7-cyano-7-deazaguanine s ynthase OS=Vibrio agarivorans OX=153622 GN=queC PE=3 SV =1
MKKAVVVFSGGQDSTTCLVQALKEFDEVHAITFDYGQRHRLEIEVAKKLATELGITAHKVMNVELLNELAISSLTREDIPVSHDLQENGLPNSFVPGRNILFLTLTGIYAYQIGAEAVITGVCETDFSGYPDCRDDFVKTMNSALIKGMDRQFEIKTPLMWLTKAETWALADQYNSLQVIRDHTLTCYNGVIGDGCGECPACDLRKAGLDEYLNNKHSVMQSLIEKQS

SEQ ID NO: 43165 - protein, 232 aa, Vibrio alfacsensis
  misc_feature (1)..(232): tr|A0A347UQ81|A0A347UQ81_9VIBR 7-cyano-7-deazaguanine s ynthase OS=Vibrio alfacsensis OX=1074311 GN=queC PE=3 S V=1
MKKAVVVFSGGQDSTTCLVQALQEYDEVHAITFDYGQRHKLEIEVAEKLAKDLGVTAHKVMDVGLLNELAISSLTRDDIPVSHELQENGLPNSFVPGRNILFLTLAGIYAYQIGAKAVITGVCETDFSGYPDCRDDFVKSMNSALVKGMDRQFKINTPLMWLNKAETWALADQYDALNLVRENTLTCYNGIIGDGCGDCPSCDLRKAGLEEYLNNQEMVMKSLIQKQQAEDQ

SEQ ID NO: 43166 - protein, 218 aa, Vibrio alginolyticus
  misc_feature (1)..(218): tr|A0A0H0YGV0|A0A0H0YGV0_VIBAL 7-cyano-7-deazaguanine s ynthase OS=Vibrio alginolyticus OX=663 GN=queC PE=3 SV= 1
MATTKALVVFSGGQDSTTCLIDALNTYDEVHAITFDYGQRHSDEIDIAIELGKQLNIKSHKVLDVKSINELAISSLTRDNIPVSNDLSDANVPNTFVPGRNILFLTYACIHAYQLGIQDIITGVCETDFSGYPDCRDNFIRSLNLSCNLGMDKAFNIKTPLMWLTKAETWALADKHNMLEFVQNNTLTCYNGIVGKGCGECPACLLRQSGLEEYLASK

SEQ ID NO: 43167 - protein, 231 aa, Vibrio alginolyticus
  misc_feature (1)..(231): tr|A0A1W6VEA1|A0A1W6VEA1_VIBAL 7-cyano-7-deazaguanine s ynthase OS=Vibrio alginolyticus OX=663 GN=queC PE=3 SV= 1
MKKAVVVFSGGQDSTTCLVQALKEYDEVHAITFDYGQRHRLEIEVAESLSKELGVKAHKVMDVTLLNELAISSLTRDDIPVSHELQENGLPNSFVPGRNILFLTLAGIYAYQIGANTVITGVCETDFSGYPDCRNDFVKAMNSALVQGMDKPLDIKTPLMWLNKAETWALADQYSALELVRNKTLTCYNGIIGSGCGDCPACELRKIGLSDYLGDREGIMAELVRKQGENK

SEQ ID NO: 43168 - protein, 229 aa, Vibrio algivorus
  misc_feature (1)..(229): tr|A0A557NYR4|A0A557NYR4_9VIBR 7-cyano-7-deazaguanine s ynthase OS=Vibrio algivorus OX=1667024 GN=queC PE=3 SV= 1
MTSKAVVVFSGGQDSTTCLVKALKEFDEVHAITFDYGQRHKLEIEVAQSLAKKLGVTAHKVMDVGLLNELAISSLTRDDIPVSNELQENGLPNSFVPGRNILFLTLAGIYAYQIGAQSVITGVCETDFSGYPDCRDEFVKSINQSLVLGMDRQFTIDTPLMWLNKAETWALADQFDALELVRNETLTCYNGIIGDGCGDCPACDLRKVGLVDYLDNREAVIAALIAKQS

SEQ ID NO: 43169 - protein, 237 aa, Vibrio anguillarum
  misc_feature (1)..(237): tr|A0A191W3M9|A0A191W3M9_VIBAN 7-cyano-7-deazaguanine s ynthase OS=Vibrio anguillarum OX=55601 GN=queC PE=3 SV= 1
MPEERKMKKAVVVFSGGQDSTTCLVQALKEFDEVHAITFDYGQRHKLEIEVASTLAKKLGVAAHKVMDVSLLNELAISSLTRDDIPVSHELQENGLPNSFVPGRNILFLTLAGIYAYQIGADEVITGVCETDFSGYPDCRNDFVKAMNSALVQGMDRPFNIRTPLMWLNKAETWALADQHDALELIRHETLTCYNGIIGDGCGDCPSCELRKAGLNDYLVNKALVMNALHQKQSVTL

SEQ ID NO: 43170 - protein, 237 aa, Vibrio anguillarum
  misc_feature (1)..(237): tr|A0A289GBP0|A0A289GBP0_VIBAN 7-cyano-7-deazaguanine s ynthase OS=Vibrio anguillarum OX=55601 GN=queC PE=3 SV= 1
MPEERKMKKAVVVFSGGQDSTTCLVQALKEFDEVHAITFDYGQRHKLEIEVASTLAKKLGVAAHKVMNVSLLNELAISSLTRDDIPVSHELQENGLPNSFVPGRNILFLTLAGIYAYQIGADEVITGVCETDFSGYPDCRNDFVKAMNSALVQGMDRPFNIRTPLMWLNKAETWALADQHDALELIRHETLTCYNGIIGDGCGDCPSCELRKAGLNDYLVNKALVMNALHQKQSVTL

SEQ ID NO: 43171 - protein, 231 aa, Vibrio antiquarius
  misc_feature (1)..(231): tr|A7K042|A7K042_VIBAE 7-cyano-7-deazaguanine synthase OS=Vibrio antiquarius (strain Ex25) OX=150340 GN=queC P E=3 SV=1
MKKAVVVFSGGQDSTTCLVQALKEFDEVHAITFDYGQRHKLEIEVAQNIAKDLGVKAHKVMDVGLLNELAISSLTRDDIPVSHELQENGLPNSFVPGRNILFLTLAGIYAYQIGAETVITGVCETDFSGYPDCRDDFVKAMNTALVKGMDRNLTIKTPLMWLNKAETWALADQYDALQLVRENTLTCYNGVIGDGCGDCPSCDLRKAGLDDYLNNKETVMQSLVNKQAADV

SEQ ID NO: 43172 - protein, 231 aa, Vibrio atlanticus
  misc_feature (1)..(231): tr|A0A558H1S7|A0A558H1S7_9VIBR 7-cyano-7-deazaguanine s ynthase OS=Vibrio atlanticus OX=693153 GN=queC PE=3 SV= 1
MKKAVVVFSGGQDSTTCLVQALKEYDEVHAITFDYGQRHKLEIEVAQSLSKDLGVKAHKVMDVTVLNELAISSLTRDDIPVSHELQENGLPNSFVPGRNILFLTLAGIYAYQIGAETVITGVCETDFSGYPDCRNDFVKAMNSALVQGMDKQLDIKTPLMWLNKAETWAMADQYSTLELVRNRTLTCYNGIIGDGCGDCPACELRKVGLNDYLADRESIMAELVRKQTEYK

SEQ ID NO: 43173 - protein, 231 aa, Vibrio atlanticus
  misc_feature (1)..(231): tr|A0A1C3IZI2|A0A1C3IZI2_9VIBR 7-cyano-7-deazaguanine s ynthase OS=Vibrio atlanticus OX=693153 GN=queC PE=3 SV= 1
MKKAVVVFSGGQDSTTCLVQALKEYDEVHAITFDYGQRHRLEIEVAESLSKDLGVKAHKVMDVTLLNELAISSLTRDDIPVSHELQENGLPNSFVPGRNILFLTLAGIYAYQIGANTVITGVCETDFSGYPDCRNDFVKAMNSALVQGMDKPLDIKTPLMWLNKAETWALADQYSALELVRNKTLTCYNGIVGDGCGDCPACELRKIGLSDYLGDRQGIMAELVRKQGQNK

SEQ ID NO: 43174 - protein, 228 aa, Vibrio azureus
  misc_feature (1)..(228): tr|U3AW83|U3AW83_9VIBR 7-cyano-7-deazaguanine synthase OS=Vibrio azureus NBRC 104587 OX=1219077 GN=queC PE=3 S V=1
MKKAVVVFSGGQDSTTCLVQALKEFDEVHAITFDYGQRHRLEIDVAQKLAKELNVAAHKIMNVELLNELAISSLTREDIPVSHDLQDNGLPNSFVPGRNILFLTLAGIYAYQIGAQAVITGVCETDFSGYPDCRDDFVKTMNSALVKGMDREFEVKTPLMWLNKAETWALADQYHSLQMIREQTLTCYNGVIGDGCGDCPACDLRKSGLEEYLNNKESVMQSLVHKQK

SEQ ID NO: 43175 - protein, 228 aa, Vibrio barjaei
  misc_feature (1)..(228): tr|A0A1J4QV01|A0A1J4QV01_9VIBR 7-cyano-7-deazaguanine s ynthase OS=Vibrio barjaei OX=1676683 GN=queC PE=3 SV=1
MKKAVVVFSGGQDSTTCLVQALKQYDEVHAITFDYGQRHKLEIEVAETLAKKLNVKAHKVMDVSLLNELAISSLTRDDIPVSHELQENGLPNSFVPGRNILFLTLAGIYAYQIGAQAVITGVCETDFSGYPDCRNDFIKAMNSALVQGMDREFDIVTPLMWLDKAETWALADKFNALQLIREETLTCYNGVIGDGCGDCPSCDLRSNGLNHYLENKTEVMASLNEKSE

SEQ ID NO: 43176 - protein, 232 aa, Vibrio bivalvicida
  misc_feature (1)..(232): tr|A0A177XUL8|A0A177XUL8_9VIBR 7-cyano-7-deazaguanine s ynthase OS=Vibrio bivalvicida OX=1276888 GN=queC PE=3 S V=1
MKKAVVVFSGGQDSTTCLVQAIKHFDEVHAITFDYGQRHKLEIEVAQSLANELGVKAHKTMDVGLLNELAISSLTRDDIPVSHELQENGLPNSFVPGRNILFLTLAGIYAYQIGAQTVITGVCETDFSGYPDCRNDFVKAMNNALVQGMDRPLEISTPLMWLNKAETWALADQYDALQLVREKTLTCYNGIIGDGCGDCPSCELRKVGLNDYLADRKNIMAELVRKQSSVDK

SEQ ID NO: 43177 - protein, 228 aa, Vibrio brasiliensis
  misc_feature (1)..(228): tr|E8LPE8|E8LPE8_9VIBR 7-cyano-7-deazaguanine synthase OS=Vibrio brasiliensis LMG 20546 OX=945543 GN=queC PE=3 SV=1
MNKAVVVFSGGQDSTTCLVQALKQYDEVHAITFDYGQRHKLEIEVAQSLAKELGVKAHKVMDVSLLNELAISSLTRDDIPVSHDLQENGLPNSFVPGRNILFLTLAGIYAYQIGAKTVITGVCETDFSGYPDCRNDFVKAMNSALEQGMDYQLEIATPLMWLNKAETWALADQYDALQLVREKTLTCYNGVIGDGCGDCPSCELRKVGLNDYLDNREAVMAELVAKQS

SEQ ID NO: 43178 - protein, 235 aa, Vibrio breoganii
  misc_feature (1)..(235): tr|A0A4V5RKB4|A0A4V5RKB4_9VIBR 7-cyano-7-deazaguanine s ynthase OS=Vibrio breoganii OX=553239 GN=queC PE=3 SV=1
MSVKGISMNKAVVIFSGGQDSTTCLVQALTQFDEVHAITYDYGQRHRQEIEIAQKLAKKLGAKAHKVMDVTLLNELAVSSLTRDDIPVSHDLGENGLPNSFVPGRNILFLTLAGIYAYQVGAKTLITGVCETDFSGYPDCRDEFVKAMNAALSLGMDYALDVKTPLMWLNKAETWAMADHYDALEMVRYETLTCYNGIVGSGCGDCPACDLRAKGLAEYQDNADEVMTSYKQKSQ

SEQ ID NO: 43179 - protein, 235 aa, Vibrio breoganii
  misc_feature (1)..(235): tr|A0A4U2GL99|A0A4U2GL99_9VIBR 7-cyano-7-deazaguanine s ynthase OS=Vibrio breoganii OX=553239 GN=queC PE=3 SV=1
MSVKGISMNKAVVIFSGGQDSTTCLVQALTQFDEVHAITYDYGQRHRQEIEIAQKLAKKLGAKAHKVMDVTLLNELAVSSLTRDDIPVSHDLGENGLPNSFVPGRNILFLTLAGIYAYQVGAKTLITGVCETDFSGYPDCRDEFVKAMNAALSLGMDYALDVKTPLMWLNKAETWAMADHYEALEMVRDETLTCYNGIVGSGCGDCPACDLRAKGLAEYQDNADEVMTSYKQKSQ

SEQ ID NO: 43180 - protein, 232 aa, Vibrio campbellii
  misc_feature (1)..(232): sp|A7MW43|QUEC_VIBCB 7-cyano-7-deazaguanine synthase OS =Vibrio campbellii (strain ATCC BAA-1116 / BB120) OX=33 8187 GN=queC PE=3 SV=1
MKKAVVVFSGGQDSTTCLVQALKEFDEVHAITFDYGQRHKLEIEVAEKVAKDLGVAAHKVMDVGLLNELAISSLTRDDIPVSHELQENGLPNSFVPGRNILFLTLAGIYAYQIGAETVITGVCETDFSGYPDCRDDFVKAMNSALVKGMDRQFEIKTPLMWLNKAETWALADQYDALQLVRESTLTCYNGIIGDGCGDCPSCDLRKAGLDDYLNNKDAVMQSLIQKQKSEDQ

SEQ ID NO: 43181 - protein, 232 aa, Vibrio campbellii; identical to SEQ ID NO: 43180
  misc_feature (1)..(232): tr|A0A1Q1P9J8|A0A1Q1P9J8_9VIBR 7-cyano-7-deazaguanine s ynthase OS=Vibrio campbellii OX=680 GN=queC PE=3 SV=1

SEQ ID NO: 43182 - protein, 231 aa, Vibrio caribbeanicus
  misc_feature (1)..(231): tr|E3BNP4|E3BNP4_9VIBR 7-cyano-7-deazaguanine synthase OS=Vibrio caribbeanicus ATCC BAA-2122 OX=796620 GN=queC PE=3 SV=1
MKKAVVVFSGGQDSTTCLMQAIKQYDEVHTITFDYGQRHRLEIEVARSIADELGVKAHKVMDVTLLNDLAASSLTRDNIAVSNDVQENGLPNSFVPGRNILFLTLAGIYAYQVGAHDLITGVCETDFSGYPDCRNDFVQAMGKALEQGMDRQLNIITPLMWLNKAETWALADSLGALDLIKDKTLTCYNGIIGEGCGDCPSCHLRTKGLDDYLSNKDNITKDLIAKQSSNE

SEQ ID NO: 43183 - protein, 235 aa, Vibrio caribbeanicus
  misc_feature (1)..(235): tr|A0A0A6QMU9|A0A0A6QMU9_9VIBR 7-cyano-7-deazaguanine s ynthase OS=Vibrio caribbeanicus OX=701175 GN=queC PE=3 SV=1
MKKAVVVFSGGQDSTTCLVKALKEFDEVHAITFDYGQRHKLEIEVAEQLATKLGVKAHKVMDVGLLNELAISSLTRDDIPVSHELQDNGLPNSFVPGRNILFLTLAGIYAYQIGADVVITGVCETDFSGYPDCRDEFVRSMNNSLVLGMDRAFTIETPLMWLNKAETWALADQYDALQLVRESTLTCYNGIVGDGCGDCPSCDLRKAGLNDYLSNKEAIMSELVRKQSSQDKSAH

SEQ ID NO: 43184 - protein, 231 aa, Vibrio casei
  misc_feature (1)..(231): tr|A0A368LN00|A0A368LN00_9VIBR 7-cyano-7-deazaguanine s ynthase OS=Vibrio casei OX=673372 GN=queC PE=3 SV=1
MTSKAVVVFSGGQDSTTCLVQALKKYDEVHAITFDYGQRHKLEIEVAEKLCKQLGVKAHKVMDVGLLNELAISSLTRDDIPVSHELQENGLPNSFVPGRNILFLTLAGIYAYQIGAESVITGVCETDFSGYPDCRDQFVKSINNALILGMDREFSIETPLMWLNKAETWALADQNDALELIRNETLTCYNGIIGDGCGDCPSCDLRRVGLMDYLNNRNEVMNELKQKQQNN

SEQ ID NO: 43185 - protein, 231 aa, Vibrio celticus
  misc_feature (1)..(231): tr|A0A1C3JGW3|A0A1C3JGW3_9VIBR 7-cyano-7-deazaguanine s ynthase OS=Vibrio celticus OX=446372 GN=queC PE=3 SV=1
MKKAVVVFSGGQDSTTCLVQALKEYDEVHAITFDYGQRHRLEIEVAESLSKELGVKAHKVMDVTLLNELAISSLTRDDIPVSHELQENGLPNSFVPGRNILFLTLAGIYAYQIAAETVITGVCETDFSGYPDCRNDFVKAMNSALVQGMDKQLDIKTPLMWLNKAETWALADQYSALELVRNKTLTCYNGIVGDGCGDCPACELRKVGLNDYLGDRESIMAELVRKQAENK

SEQ ID NO: 43186 - protein, 231 aa, Vibrio chagasii
  misc_feature (1)..(231): tr|A0A2S7VDW1|A0A2S7VDW1_9VIBR 7-cyano-7-deazaguanine s ynthase OS=Vibrio chagasii OX=170679 GN=queC PE=3 SV=1
MKKTVVVFSGGQDSTTCLVQALKEYDEVHAITFDYGQRHKLEIEVAESLAKELGVKAHKVMDVTLLNELAISSLTRDDIPVSHELQENGLPNSFVPGRNILFLTLAGIYAYQIGAETVITGVCETDFSGYPDCRNDFVKAMNSALVQGMDKQLDIKTPLMWLNKAETWALADQYSALELVRNKTLTCYNGIIGDGCGDCPACELRKVGLNDYLGDRESIMAELVRKQAENK

SEQ ID NO: 43187 - protein, 231 aa, Vibrio cholerae
  misc_feature (1)..(231): sp|A5F8G4|QUEC_VIBC3 7-cyano-7-deazaguanine synthase OS =Vibrio cholerae serotype O1 (strain ATCC 39541 / Class ical Ogawa 395 / O395) OX=345073 GN=queC PE=3 SV=1
MKKAVVVFSGGQDSTTCLVQALKEFDEVHAITFDYGQRHKLEIEVAQQLAKQLGVTAHKVMDVSLLNELAISSLTRDDIPVSHELQANGLPNSFVPGRNILFLTLAGIYAYQIGATTVITGVCETDFSGYPDCRDEFVQAMNQALAKGMDLPLMIRTPLMWLNKAETWALADQLGALDLVRHQTLTCYNGLIGDGCGECPACGLRQAGLKAYLDNRDLIMSALKSKQSAAH

SEQ ID NO: 43188 - protein, 231 aa, Vibrio cholerae; identical to SEQ ID NO: 43187
  misc_feature (1)..(231): sp|C3LM61|QUEC_VIBCM 7-cyano-7-deazaguanine synthase OS =Vibrio cholerae serotype O1 (strain M66-2) OX=579112 G N=queC PE=3 SV=1

SEQ ID NO: 43189 - protein, 228 aa, Vibrio cidicii
  misc_feature (1)..(228): tr|A0A151JLP7|A0A151JLP7_9VIBR 7-cyano-7-deazaguanine s ynthase OS=Vibrio cidicii OX=1763883 GN=queC PE=3 SV=1
MNKAVVVFSGGQDSTTCLVQALNEYDEVHAITFDYGQRHRLEIEVAQQLAADLGVKAHKVMDVTLLNELAISSLTRDDIPVSHELQANGLPNSFVPGRNILFLTLAGIYAYQIGADTVITGVCETDFSGYPDCRDDFVKAMNSALVKGMDKALTIKTPLMWLNKAETWALADQNKALQLVREKTLTCYNGVIGDGCGDCPSCHLRKAGLDDYLNNQPLVMASLLEKQA

SEQ ID NO: 43190 - protein, 232 aa, Vibrio cincinnatiensis
  misc_feature (1)..(232): tr|A0A1T4RI44|A0A1T4RI44_VIBCI 7-cyano-7-deazaguanine s ynthase OS=Vibrio cincinnatiensis DSM 19608 OX=1123491 GN=queC PE=3 SV=1
MNKAVVVFSGGQDSTTCLVQALKEYDEVHAITFDYGQRHRLEIEVAKKLSAKLGVKAHKVMDVTLLNELAVSSLTRDEIPVSHEQQDNGLPNSFVPGRNILFLTLAGIYAYQIGADTIITGVCETDFSGYPDCRDEFVKAMNQALIQGMARALDIRTPLMWLNKAETWALADQYQALELIRHETLTCYNGIMGDGCGACPSCDLRKAGLEQYLADKTVWTKSLLTKQSSRNK

SEQ ID NO: 43191 - protein, 228 aa, Vibrio comitans
  misc_feature (1)..(228): tr|A0A4Y3IPX5|A0A4Y3IPX5_9VIBR 7-cyano-7-deazaguanine s ynthase OS=Vibrio comitans NBRC 102076 OX=1219078 GN=qu eC PE=3 SV=1
MNKAVVIFSGGQDSTTCLVQALTQFDEVHAITYDYGQRHRQEIEIAQQLAKKLGAKAHKVMDVTLLNELAVSSLTRDDIPVSHDLGENGLPNSFVPGRNILFLTLAGIYAYQVGAKTLITGVCETDFSGYPDCRDEFVKAMNSALSLGMDYQLDIKTPLMWLNKAETWAMADHYRALEMVRDETLTCYNGIVGSGCGDCPACDLRAKGLADYQDNADEVMASYKQKSL

SEQ ID NO: 43192 - protein, 231 aa, Vibrio coralliilyticus
  misc_feature (1)..(231): tr|A0A2A2CQU4|A0A2A2CQU4_9VIBR 7-cyano-7-deazaguanine s ynthase OS=Vibrio coralliilyticus OX=190893 GN=queC PE= 3 SV=1
MKKAVVVFSGGQDSTTCLVQALKNFDEVHAITFDYGQRHKLEIEVAQDLAKELGVKAHKVMDVGLLNELAISSLTRDDIPVSHELQENGLPNSFVPGRNILFLTLAGIYAYQIGAQAVITGVCETDFSGYPDCRNDFVKAMNSALVQGMDRNLDIVTPLMWLNKAETWALADQYDALQLVREKTLTCYNGIIGDGCGDCPACDLRKAGLNDYIDNREAVMASLVSKQSSEA

SEQ ID NO: 43193 - protein, 231 aa, Vibrio coralliilyticus
  misc_feature (1)..(231): tr|A0A1V0I775|A0A1V0I775_9VIBR 7-cyano-7-deazaguanine s ynthase OS=Vibrio coralliilyticus OX=190893 GN=queC PE= 3 SV=1
MKKAVVVFSGGQDSTTCLVQALKNFDEVHAITFDYGQRHKLEIEVAQDLAKELGVKAHKVMDVGLLNELAISSLTRDDIPVSHELQENGLPNSFVPGRNILFLTLAGIYAYQIGAQAVITGVCETDFSGYPDCRNDFVKAMNSALVQGMDRNLDIVTPLMWLNKAETWALADQYDALQLVREKTLTCYNGVIGDGCGDCPACDLRKAGLNDYIDNREAVMASLVSKQSSEA

SEQ ID NO: 43194 - protein, 231 aa, Vibrio crassostreae
  misc_feature (1)..(231): tr|A0A1B1BV44|A0A1B1BV44_9VIBR 7-cyano-7-deazaguanine s ynthase OS=Vibrio crassostreae 9CS106 OX=1191300 GN=que C PE=3 SV=1
MKKAVVVFSGGQDSTTCLVQALKEYDEVHAITFDYGQRHRLEIEVAESLSKELGVKAHKVMDVTLLNELAISSLTRDDIPVSHELQENGLPNSFVPGRNILFLTLAGIYAYQIGAETVIAGVCETDFSGYPDCRNDFVKAMNSALVQGMDKQLDIKTPLMWLNKAETWALADQYSALELVRNKTLTCYNGIVGDGCGDCPACELRKVGLNDYLGDRESIMAELVRKQAENK

SEQ ID NO: 43195 - protein, 231 aa, Vibrio crassostreae
  misc_feature (1)..(231): tr|A0A0T7D690|A0A0T7D690_9VIBR 7-cyano-7-deazaguanine s ynthase OS=Vibrio crassostreae OX=246167 GN=queC PE=3 S V=1
MKKAVVVFSGGQDSTTCLVQALKEYDEVHAITFDYGQRHRLEIEVAESLSKELGVKAHKVMDVTLLNELAISSLTRDDIPVSHELQENGLPNSFVPGRNILFLTLAGIYAYQIGAETVITGVCETDFSGYPDCRNDFVKAMNSALVQGMDKQLDIKTPLMWLNKAETWALADQYSALELVRNKTLTCYNGIVGDGCGDCPACELRKVGLNDYLGDRESIMAELVRKQAENK

SEQ ID NO: 43196 - protein, 231 aa, Vibrio diabolicus
  misc_feature (1)..(231): tr|A0A2L2K1Q4|A0A2L2K1Q4_9VIBR 7-cyano-7-deazaguanine s ynthase OS=Vibrio diabolicus OX=50719 GN=queC PE=3 SV=1
MKKAVVVFSGGQDSTTCLVQALKEFDEVHAITFDYGQRHKLEIEVAQKIAKDLGVKAHKVMDVGLLNELAISSLTRDDIPVSHELQENGLPNSFVPGRNILFLTLAGIYAYQIGAETVITGVCETDFSGYPDCRDDFVKAMNTALVQGMDRNLTIKTPLMWLNKAETWALADQYDALQLVRENTLTCYNGVIGDGCGDCPSCDLRKAGLDDYLNNKETVMQSLVNKQAADV

SEQ ID NO: 43197 - protein, 229 aa, Vibrio diazotrophicus
  misc_feature (1)..(229): tr|A0A2J8GMA7|A0A2J8GMA7_VIBDI 7-cyano-7-deazaguanine s ynthase OS=Vibrio diazotrophicus OX=685 GN=queC PE=3 SV =1
MKKAVVVFSGGQDSTTCLVQALQEFDEVHAITFDYGQRHKLEIEVAQALTKKLGVTAHKVLDVGLLNELAISSLTRDDIPVSHELQENGLPNSFVPGRNILFLTLAGIYAYQIGAHTVITGVCETDFSGYPDCRNDFIQAMNSALVKGMDRELEIRTPLMWLNKAETWALADQYQSLDLVRNETLTCYNGIIGDGCGDCPACHLRKAGLNDYLDNRAAVIESLKQKNNQ

SEQ ID NO: 43198 - protein, 229 aa, Vibrio diazotrophicus
  misc_feature (1)..(229): tr|A0A329E094|A0A329E094_VIBDI 7-cyano-7-deazaguanine s ynthase OS=Vibrio diazotrophicus OX=685 GN=queC PE=3 SV =1
MKKAVVVFSGGQDSTTCLVQALQEFDEVHAITFDYGQRHKLEIEVAQALTKKLGVTAHKVLDVGLLNELAISSLTRDDIPVSHELQENGLPNSFVPGRNILFLTLAGIYAYQIGAQTVITGVCETDFSGYPDCRNDFIKAMNSALVKGMDRELEIRTPLMWLNKAETWALADQYQSLDLVRNETLTCYNGIIGDGCGDCPACHLRKAGLNDYLDNRAAVIESLKQKNNQ

SEQ ID NO: 43199 - protein, 232 aa, Vibrio europaeus
  misc_feature (1)..(232): tr|A0A178JEJ8|A0A178JEJ8_9VIBR 7-cyano-7-deazaguanine s ynthase OS=Vibrio europaeus OX=300876 GN=queC PE=3 SV=1
MKKAVVVFSGGQDSTTCLVQAIKDFDEVHAITFDYGQRHKLEIEVAQSLAKELDVKAHKVMDVGLLNELAISSLTRDDIPVSHELQENGLPNSFVPGRNILFLTLAGIYAYQIGAQTVITGVCETDFSGYPDCRNDFVKAMNNALVQGMDRQLEISTPLMWLNKAETWALADQYDALQLIREKTLTCYNGVIGDGCGDCPACELRKVGLNDYLSDRKAIMAELVRKQNSADK

SEQ ID NO: 43200 - protein, 230 aa, Vibrio ezurae
  misc_feature (1)..(230): tr|U3CEC5|U3CEC5_9VIBR 7-cyano-7-deazaguanine synthase OS=Vibrio ezurae NBRC 102218 OX=1219080 GN=queC PE=3 SV =1
MNKAVVIFSGGQDSTTCLVQALTQYDEVHAITYDYGQRHRQEIEVAKCLAKQLGVKAHKVMDVTLLNELAVSSLTRDDIPVSHELAENGLPNSFVPGRNILFLTLAGIYAYQVGAKTLITGVCETDFSGYPDCRDEFVKTMNSALAQGMDYPLQVNTPLMWLNKAETWAMADSYNALELVRDHTLTCYNGIVGSGCGDCPACDLRAKGLTDYQQNATQVMAAYQEKKTKI

SEQ ID NO: 43201 - protein, 229 aa, Vibrio fluvialis
  misc_feature (1)..(229): tr|S7I9P3|S7I9P3_VIBFL 7-cyano-7-deazaguanine synthase OS=Vibrio fluvialis PG41 OX=1336752 GN=queC PE=3 SV=1
MKKAVVVFSGGQDSTTCLVQALKEFDEVHAITFDYGQRHKLEIEVAQTLAKKLGVKAHKVMDVGLLNELAISSLTRDDIPVSHELQENGLPNSFVPGRNILFLTLAGIYAYQIGAQTVITGVCETDFSGYPDCRNDFVKAMNSALVQGMDRELEIRTPLMWLNKAETWAMADQNDALELVRNETLTCYNGIIGDGCGDCPSCHLRKAGLNDYLENREAVMAALVAKQAQ

SEQ ID NO: 43202 - protein, 231 aa, Vibrio fluvialis
  misc_feature (1)..(231): tr|A0A1L9L8B8|A0A1L9L8B8_VIBFL 7-cyano-7-deazaguanine s ynthase OS=Vibrio fluvialis OX=676 GN=queC PE=3 SV=1
MNKAVVVFSGGQDSTTCLVKALNEFDEVHAITFDYGQRHRLEIEVAQNLAKELGVAAHKVMDVTLLNELAISSLTRDDIPVSHELQENGLPNSFVPGRNILFLTLAGIYAYQIGAETIITGVCETDFSGYPDCRDDFVKAMNSALVKGMDKPLVIQTPLMWLNKAETWALADQNNALQLVREKTLTCYNGIIGDGCGDCPSCHLRKVGLNDYLDNREAIMASLVEKQHAES

SEQ ID NO: 43203 - protein, 231 aa, Vibrio fortis
  misc_feature (1)..(231): tr|A0A066UW34|A0A066UW34_9VIBR 7-cyano-7-deazaguanine s ynthase OS=Vibrio fortis OX=212667 GN=queC PE=3 SV=1
MKKAVVVFSGGQDSTTCLVQALQEYDEVHAITFDYGQRHRLEIEVAQNLAKELGVKAHKVMDVTLLNELAISSLTRDDIPVSHELQENGLPNSFVPGRNILFLTLAGIYAYQIGAQAVITGVCETDFSGYPDCRNDFVKAMNSALVQGMDRELDIKTPLMWLNKAETWALADQYSALELVRSKTLTCYNGVIGDGCGDCPACELRKVGLNDYLDNREQIMAELVRKQSVNR

SEQ ID NO: 43204 - protein, 229 aa, Vibrio furnissii
  misc_feature (1)..(229): tr|F0LUE3|F0LUE3_VIBFN 7-cyano-7-deazaguanine synthase OS=Vibrio furnissii (strain DSM 14383 / NCTC 11218 / VL 6966) OX=903510 GN=queC PE=3 SV=1
MKKAVVVFSGGQDSTTCLVQALKEFDEVHAITFDYGQRHKLEIEVAQTLAKKLGVKAHKVMDVGLLNELAISSLTRDDIPVSNELQENGLPNSFVPGRNILFLTLAGIYAYQIGAQTVITGVCETDFSGYPDCRNDFVKAMNSALVLGMDRELEIRTPLMWLNKAETWAMADQNGALELVRHETLTCYNGIMGDGCGDCPSCHLRKVGLNDYLEHREAVMAALVAKQSQ

SEQ ID NO: 43205 - protein, 229 aa, Vibrio furnissii
  misc_feature (1)..(229): tr|A0A0Q2M905|A0A0Q2M905_VIBFU 7-cyano-7-deazaguanine s ynthase OS=Vibrio furnissii OX=29494 GN=queC PE=3 SV=1
MKKAVVVFSGGQDSTTCLVQALKEFDEVHAITFDYGQRHKLEIEVAQMLAKKLGVKAHKVMDVGLLNELAISSLTRDDIPVSNELQENGLPNSFVPGRNILFLTLAGIYAYQIGAQTVITGVCETDFSGYPDCRNDFVKAMNSALVLGMDRELEIRTPLMWLNKAETWAMADQNGALELVRHETLTCYNGIMGDGCGDCPSCHLRKVGLNDYLEHREAVMAALVAKQSQ

SEQ ID NO: 43206 - protein, 231 aa, Vibrio galatheae
  misc_feature (1)..(231): tr|A0A0F4NKS1|A0A0F4NKS1_9VIBR 7-cyano-7-deazaguanine s ynthase OS=Vibrio galatheae OX=579748 GN=queC PE=3 SV=1
MKKAVVVFSGGQDSTTCLVQALKEFDEVHAITFDYGQRHKLEIEVAQSLAKELGVKAHKVMDVGLLNELAISSLTRDDIPVSHELQDNGLPNSFVPGRNILFLTLAGIYAYQIGAQTVITGVCETDFSGYPDCRNDFVKAMNSALVQGMDRPLEIATPLMWLNKAETWALADQYDALQLVREKTLTCYNGIIGDGCGDCPSCELRKVGLNDYLANREAVMAELVRKQTTES

SEQ ID NO: 43207 - protein, 233 aa, Vibrio gazogenes
  misc_feature (1)..(233): tr|A0A1Z2SBH0|A0A1Z2SBH0_VIBGA 7-cyano-7-deazaguanine s ynthase OS=Vibrio gazogenes OX=687 GN=queC PE=3 SV=1
MKKAVVVFSGGQDSTTCLVEALQTYDEVHAITFDYGQRHRLEIETARQLAAQLGVKAHKVMDVGLLNELAISSLTRDDIPVSHELQDNGLPNSFVPGRNILFLTLAGIYAYQIGAESVITGVCETDFSGYPDCRNTFIQTMNRALVQGMDREMRIVTPLMWLNKAETWAMADHYDALALVRNQTLTCYNGVIGDGCGECPSCHLRQAGLDEYLHNQEAVQQAYLDKRTTQTHA

SEQ ID NO: 43208 - protein, 233 aa, Vibrio gazogenes
  misc_feature (1)..(233): tr|A0A1M4ZB77|A0A1M4ZB77_VIBGA 7-cyano-7-deazaguanine s ynthase OS=Vibrio gazogenes DSM 21264 = NBRC 103151 OX= 1123492 GN=queC PE=3 SV=1
MKKAVVVFSGGQDSTTCLVEALQTYDEVHAITFDYGQRHRLEIETARQLATQLGVKAHKVMDVGLLNELAISSLTRDDIPVSHELQDNGLPNSFVPGRNILFLTLAGIYAYQIGAESVITGVCETDFSGYPDCRNEFIQTMNRALVQGMDRKMHIVTPLMWLNKAETWAMADHYDALALVRNQTLTCYNGVIGDGCGECPSCHLRKAGLDEYLHNREAVQQAYLDKRATQAHS

SEQ ID NO: 43209 - protein, 229 aa, Vibrio genomosp.
  misc_feature (1)..(229): tr|A0A1B9QV12|A0A1B9QV12_9VIBR 7-cyano-7-deazaguanine s ynthase OS=Vibrio genomosp. F10 OX=723171 GN=queC PE=3 SV=1
MKKAVVVFSGGQDSTTCLVKALQEFDEVHAITFDYGQRHRLEIDIAQDLAKELGATAHKVMDVTLLNELAISSLTRDDIPVSHELQDNGLPNSFVPGRNILFLTLAGIYAYQIGADTVITGVCETDFSGYPDCRDEFVKSMNTALVLGMDRTFEISTPLMWLNKAETWAMADRYDALELVRNKTLTCYNGVIGDGCGDCPSCDLRKSGLDEYLQNKEEVMKHYLSKASR

SEQ ID NO: 43210 - protein, 232 aa, Vibrio genomosp.
  misc_feature (1)..(232): tr|A0A4U1YV17|A0A4U1YV17_9VIBR 7-cyano-7-deazaguanine s ynthase OS=Vibrio genomosp. F6 OX=723172 GN=queC PE=3 S V=1
MKKAVVVFSGGQDSTTCLVQALKEFDEVHAITFDYGQRHKLEIEVAQNLANELGVTAHKVMDVGLLNELAISSLTRDDIEVSHELQENGLPNSFVPGRNILFLTLAGIYAYQIGAQSVITGVCETDFSGYPDCRDEFVKSMNTALVQGMDRQFEILTPLMWLNKAETWALADQYDALELVRSKTLTCYNGIIGDGCGDCPSCELRKIGLNDYQANSQTVMSELKNKQRLANQ

SEQ ID NO: 43211 - protein, 230 aa, Vibrio halioticoli
  misc_feature (1)..(230): tr|V5F4A9|V5F4A9_9VIBR 7-cyano-7-deazaguanine synthase OS=Vibrio halioticoli NBRC 102217 OX=1219072 GN=queC PE =3 SV=1
MNKAVVIFSGGQDSTTCLVQALTQYDEVHAITYDYGQRHRQEIEVATSLAKQLGVTAHKVMDVTLLNELAVSSLTRDDIPVSHDLAENGLPNSFVPGRNILFLTLAGIYAYQVGAKTLITGVCETDFSGYPDCRDEFVKTMNSALAQGMDYPLQVNTPLMWLNKAETWAMADSYNALEMVRDHTLTCYNGIVGSGCGDCPACDLRAKGLTDYQDNAEQVMAAYQQKTAKA

SEQ ID NO: 43212 - protein, 228 aa, Vibrio hangzhouensis
  misc_feature (1)..(228): tr|A0A1H5YGE3|A0A1H5YGE3_9VIBR 7-cyano-7-deazaguanine s ynthase OS=Vibrio hangzhouensis OX=462991 GN=queC PE=3 SV=1
MKKAVVVFSGGQDSTTCLVQALKQYDEVHAITFDYGQRHKLEIEVAQALAQKLGVAAHKVMDVSLLNELAISSLTRDDIPVSHELQENGLPNSFVPGRNILFLTLAGIYAYQIGANAVITGVCETDFSGYPDCRNDFIKAMNSALVQGMDRDLEIVTPLMWLDKAETWALADKYQALDLVRQETLTCYNGVIGDGCGDCPSCELRANGLNQYLDNKDNVMQALNAKSE

SEQ ID NO: 43213 - protein, 232 aa, Vibrio harveyi
  misc_feature (1)..(232): tr|A0A0D0IGR1|A0A0D0IGR1_VIBHA 7-cyano-7-deazaguanine s ynthase OS=Vibrio harveyi OX=669 GN=queC PE=3 SV=1
MKKAVVVFSGGQDSTTCLVQALKEFDEVHAITFDYGQRHKLEIEVAEKVAKDLGVAAHKVMDVGLLNELAISSLTRDDIPVSHELQENGLPNSFVPGRNILFLTLAGIYAYQIGAETVITGVCETDFSGYPDCRDDFVKAMNSALVKGMDRQFEIKTPLMWLNKAETWALADQYDALQLVRENTLTCYNGIIGDGCGDCPSCDLRKAGLDDYLNNKDAVTQSLIQKQKTEGQ

SEQ ID NO: 43214 - protein, 232 aa, Vibrio harveyi
  misc_feature (1)..(232): tr|A0A3A1PYI4|A0A3A1PYI4_VIBHA 7-cyano-7-deazaguanine s ynthase OS=Vibrio harveyi OX=669 GN=queC PE=3 SV=1
MKKAVVVFSGGQDSTTCLVQALKEFDEVHAITFDYGQRHKLEIEVAEKVAKDLGVAAHKVMDVGLLNELAISSLTRDDIPVSHELQENGLPNSFVPGRNILFLTLAGIYAYQIGAETVITGVCETDFSGYPDCRDDFVKAMNSALVKGMDRQFDIKTPLMWLNKAETWALADQYDALQLVRESTLTCYNGIIGDGCGDCPSCDLRKAGLDDYLNNKDTVMQSLIQKQKAEDQ

SEQ ID NO: 43215 - protein, 231 aa, Vibrio hepatarius
  misc_feature (1)..(231): tr|A0A0M0HWK0|A0A0M0HWK0_9VIBR 7-cyano-7-deazaguanine s ynthase OS=Vibrio hepatarius OX=171383 GN=queC PE=3 SV= 1
MRKAVVVFSGGQDSTTCLVKALKEFDEVHAITFDYGQRHKLEIEVAQSLAKELGVTAHKVMDVGLLNELAISSLTRDDIPVSHELQENGLPNSFVPGRNILFLTLAGIYAYQIGAQTVITGVCETDFSGYPDCRDAFVKAMNNALVQGMDRELVIDTPLMWLNKAETWALADQNDALQLVREKTLTCYNGIIGDGCGDCPSCELRKVGLNDYLADREAVMAELTRKQSLAK

SEQ ID NO: 43216 - protein, 231 aa, Vibrio ichthyoenteri
  misc_feature (1)..(231): tr|F9S2J8|F9S2J8_9VIBR 7-cyano-7-deazaguanine synthase OS=Vibrio ichthyoenteri ATCC 700023 OX=870968 GN=queC P E=3 SV=1
MKKAVVVFSGGQDSTTCLVQALKEYDEVHAITFDYGQRHKLEIEVAQQLALDLGVTAHKVMDVGLLNELAISSLTRDDIPVSHELQENGLPNSFVPGRNILFLTLAGIYAYQIGAQSVITGVCETDFSGYPDCRDEFVKSMNTALVQGMDRPFTIQTPLMWLNKAETWALADQYDALSLVREKTLTCYNGIIGDGCGDCPACELRKVGLEQYLADKPLVMQSLEHKQASAM

SEQ ID NO: 43217 - protein, 228 aa, Vibrio inusitatus
  misc_feature (1)..(228): tr|A0A4Y3HY12|A0A4Y3HY12_9VIBR 7-cyano-7-deazaguanine s ynthase OS=Vibrio inusitatus NBRC 102082 OX=1219070 GN= queC PE=3 SV=1
MNKAVVIFSGGQDSTTCLVQALTQFDEVHAITYDYGQRHRQEIEIAQKLAKKLGAKAHKVMDVTLLNELAVSSLTREDIPVSHDLGENGLPNSFVPGRNILFLTLAGIYAYQVGAKTLITGVCETDFSGYPDCRDEFVKAMNSALSLGMDYQLDIKTPLMWLNKAETWAMADHYDALEMIRDETLTCYNGIIGSGCGDCPACDLRAKGLAEYQDNADEIMASYQQKSL

SEQ ID NO: 43218 - protein, 227 aa, Vibrio ishigakensis
  misc_feature (1)..(227): tr|A0A0B8NPC4|A0A0B8NPC4_9VIBR 7-cyano-7-deazaguanine s ynthase OS=Vibrio ishigakensis OX=1481914 GN=queC PE=3 SV=1
MNKAVVIFSGGQDSTTCLVQALEQYDEVHAITFDYGQRHREEIEVAQKLTSKLGVKAHKVMDVTLLNELAVSSLTRDDIPVSHELQENGLPNSFVPGRNILFLTLAGIYAYQVGAKTLITGVCETDFSGYPDCRDEFVKAMNSALAQGMDYDLEVKTPLMWLNKAETWAMADHYKALELVRDESLTCYNGIVGTGCGDCPACLLRANGLQDYLDNKSEVMKSYLAKA

SEQ ID NO: 43219 - protein, 227 aa, Vibrio ishigakensis
  misc_feature (1)..(227): tr|A0A0B8PNZ3|A0A0B8PNZ3_9VIBR 7-cyano-7-deazaguanine s ynthase OS=Vibrio ishigakensis OX=1481914 GN=queC PE=3 SV=1
MNKAVVIFSGGQDSTTCLVQALEQYDEVHAITFDYGQRHREEIEVAQKLTSKLGVKAHKVMDVTLLNELAVSSLTRDDIPVSHEIQENGLPNSFVPGRNILFLTLAGIYAYQVGAKTLITGVCETDFSGYPDCRDEFVKAMNSALAQGMDYDLEVKTPLMWLNKAETWAMADHYKSLELVRDESLTCYNGIVGTGCGDCPACLLRANGLQDYLDNKSEVMESYLAKA

SEQ ID NO: 43220 - protein, 232 aa, Vibrio jasicida; identical to SEQ ID NO: 43213
  misc_feature (1)..(232): tr|A0A2S7VUH0|A0A2S7VUH0_9VIBR 7-cyano-7-deazaguanine s ynthase OS=Vibrio jasicida OX=766224 GN=queC PE=3 SV=1

SEQ ID NO: 43221 - protein, 231 aa, Vibrio kanaloae
  misc_feature (1)..(231): tr|A0A1E5DR25|A0A1E5DR25_9VIBR 7-cyano-7-deazaguanine s ynthase OS=Vibrio kanaloae 5S-149 OX=1191299 GN=queC PE =3 SV=1
MKKAVVVFSGGQDSTTCLVQALKEYDEVHAITFDYGQRHRLEIEVAESLSKELGVKAHKVMDVTLLNELAISSLTRDDIPVSHELQENGLPNSFVPGRNILFLTLAGIYAYQIGAETVITGVCETDFSGYPDCRNDFVKAMNSALVQGMDKKLDIKTPLMWLNKAETWAMADQYSALDLVRNKTLTCYNGIIGDGCGDCPACELRKVGLNDYLADRESIMVELVRKQTEYK

SEQ ID NO: 43222 - protein, 231 aa, Vibrio kanaloae; identical to SEQ ID NO: 43221
  misc_feature (1)..(231): tr|A0A4U1ZNQ4|A0A4U1ZNQ4_9VIBR 7-cyano-7-deazaguanine s ynthase OS=Vibrio kanaloae OX=170673 GN=queC PE=3 SV=1

SEQ ID NO: 43223 - protein, 231 aa, Vibrio lentus
  misc_feature (1)..(231): tr|A0A0L1LBQ9|A0A0L1LBQ9_9VIBR 7-cyano-7-deazaguanine s ynthase OS=Vibrio lentus OX=136468 GN=queC PE=3 SV=1
MKKAVVVFSGGQDSTTCLVQALTEYDEVHAITFDYGQRHKLEIEVAQSLSKELGVKAHKVMDVTLLNELAISSLTRDDIPVSHELQENGLPNSFVPGRNILFLTLAGIYAYQIGSETVITGVCETDFSGYPDCRNDFVKAMNSALVQGMDKKLDIKTPLMWLNKAETWALADQYSALELVRNKTLTCYNGIIGDGCGDCPACELRKAGLNDYLVDRQSIMTELVRKQTEYK

SEQ ID NO: 43224 - protein, 231 aa, Vibrio lentus
  misc_feature (1)..(231): tr|A0A4U2DXA2|A0A4U2DXA2_9VIBR 7-cyano-7-deazaguanine s ynthase OS=Vibrio lentus OX=136468 GN=queC PE=3 SV=1
MKKAVVVFSGGQDSTTCLVQALKEYDEVHAITFDYGQRHKLEIEVAESLSKELGVKAHKVMDVTLLNELAISSLTRDDIPVSHELQENGLPNSFVPGRNILFLTLAGIYAYQIGAETVITGVCETDFSGYPDCRNDFVKAMNSALVQGMDKKLDIKTPLMWLNKAETWAMADQYSALELVRNKTLTCYNGIIGDGCGDCPACELRKVGLNDYLGDREGIMAELVRKQAENK

SEQ ID NO: 43225 - protein, 227 aa, Vibrio mangrovi
  misc_feature (1)..(227): tr|A0A1Y6IQN3|A0A1Y6IQN3_9VIBR 7-cyano-7-deazaguanine s ynthase OS=Vibrio mangrovi OX=474394 GN=queC PE=3 SV=1
MKKAVVVFSGGQDSTTCLVEALQTYDEVHAITFDYGQRHRLEIETAQRLSSLLGVKAHKVMDVGLLNELAISSLTRDDIPVSHELQENGLPNSFVPGRNILFLTLAGIYAYQIGAESVITGVCETDFSGYPDCRHEFIQTMNRALVQGMDRVMTIVTPLMWLNKAETWAMADHYGALKLIREQTLTCYNGVIGDGCGECPSCHLRKAGLDEYLQNRESVLQSYLNKN

SEQ ID NO: 43226 - protein, 228 aa, Vibrio maritimus
  misc_feature (1)..(228): tr|A0A090TTM4|A0A090TTM4_9VIBR 7-cyano-7-deazaguanine s ynthase OS=Vibrio maritimus OX=990268 GN=queC PE=3 SV=1
MKKAVVVFSGGQDSTTCLVQALKEYDEVHAITFDYGQRHKLEIEVAQALTEKLGVKAHKVMDVGLLNELAISSLTRDDIPVSHELQENGLPNSFVPGRNILFLTLAGIYAYQIGASAVITGVCETDFSGYPDCRNDFIKAMNSALVQGMDRELDIVTPLMWLDKAETWALADKYDALELVRNETLTCYNGIIGDGCGDCPSCELRANGLNHYLDNQQAVMQSLSEKSN

SEQ ID NO: 43227 - protein, 228 aa, Vibrio maritimus
  misc_feature (1)..(228): tr|A0A090S314|A0A090S314_9VIBR 7-cyano-7-deazaguanine s ynthase OS=Vibrio maritimus OX=990268 GN=queC PE=3 SV=1
MKKAVVVFSGGQDSTTCLVQALEQYDEVHAITFDYGQRHKLEIEVAEAVAKKLGVKAHKVMDVGLLNELAISSLTRDDIPVSHELQENGLPNSFVPGRNILFLTLAGIYAYQIGAQAVITGVCETDFSGYPDCRNDFIKAMNSALVQGMDRELDIVTPLMWLDKAETWALADKYDALELVRNETLTCYNGVIGDGCGDCPSCELRANGLNQYLDNKETVMKSLEDKSN

SEQ ID NO: 43228 - protein, 228 aa, Vibrio mediterranei
  misc_feature (1)..(228): tr|A0A2S9ZKE1|A0A2S9ZKE1_9VIBR 7-cyano-7-deazaguanine s ynthase OS=Vibrio mediterranei OX=689 GN=queC PE=3 SV=1
MKKAVVVFSGGQDSTTCLVQALEQYDEVHAITFDYGQRHKLEIEVAEALANKLNVKAHKVMDVSLLNELAISSLTRDDIPVSHELQENGLPNSFVPGRNILFLTLAGIYAYQIGAQAVITGVCETDFSGYPDCRNDFIKAMNSALVQGMDREFDIVTPLMWLDKAETWALADKFNALPLIREETLTCYNGVIGDGCGDCPSCDLRANGLNHYLENKSQVMASLNEKSE

SEQ ID NO: 43229 - protein, 228 aa, Vibrio mediterranei
  misc_feature (1)..(228): tr|A0A2C9PEZ1|A0A2C9PEZ1_9VIBR 7-cyano-7-deazaguanine s ynthase OS=Vibrio mediterranei OX=689 GN=queC PE=3 SV=1
MKKAVVVFSGGQDSTTCLVQALEQYDEVHAITFDYGQRHKLEIEVAEALANKLNVKAHKVMDVSLLNELAISSLTRDDIPVSHELQENGLPNSFVPGRNILFLTLAGIYAYQIGAQAVITGVCETDFSGYPDCRNDFIKAMNSALVQGMDREFDIVTPLMWLDKAETWALADKFNALSLIREETLTCYNGVIGDGCGDCPSCDLRANGLNQYLENKSEVMASLNEKSE

SEQ ID NO: 43230 - protein, 231 aa, Vibrio metoecus
  misc_feature (1)..(231): tr|A0A0Q0JSW1|A0A0Q0JSW1_9VIBR 7-cyano-7-deazaguanine s ynthase OS=Vibrio metoecus OX=1481663 GN=queC PE=3 SV=1
MNKAVVVFSGGQDSTTCLVQALQEFDEVHAITFDYGQRHKLEIEVAQQLAKQLGVTAHKVMDVSLLNELAISSLTRDDIPVSHELQANGLPNSFVPGRNILFLTLAGIYAYQIGAKTVITGVCETDFSGYPDCRNEFVQSMNQSLAKGMDMPLTIRTPLMWLNKAETWALADQLGALELVRQQTLTCYNGLIGDGCGECPACHLRKAGLNDYLDNRSDVLNALMSKQSAAQ

SEQ ID NO: 43231 - protein, 231 aa, Vibrio metoecus
  misc_feature (1)..(231): tr|A0A067BA12|A0A067BA12_9VIBR 7-cyano-7-deazaguanine s ynthase OS=Vibrio metoecus OX=1481663 GN=queC PE=3 SV=1
MNKAVVVFSGGQDSTTCLVQALQEFDEVHAITFDYGQRHKLEIEVAQKLAKQLGVTAHKVMDVSLLNELAISSLTRDDIPVSHELQANGLPNSFVPGRNILFLTLAGIYAYQIGAKTVITGVCETDFSGYPDCRNEFVQSMNQSLAKGMDMPLTIRTPLMWLNKAETWALADQLGALELVRQQTLTCYNGLIGDGCGECPACHLRKAGLNDYLDNRSDVLNALMSKQSVAQ

SEQ ID NO: 43232 - protein, 232 aa, Vibrio metschnikovii
  misc_feature (1)..(232): tr|C9P4J4|C9P4J4_VIBME 7-cyano-7-deazaguanine synthase OS=Vibrio metschnikovii CIP 69.14 OX=675813 GN=queC PE= 3 SV=1
MNKAVVVFSGGQDSTTCLVQALQEFDEVHAITFDYGQRHKLEIEVAQQLALKLGVKAHKVMDVSLLNELAISSLTRDDIPVSHELQANGLPNSFVPGRNILFLTLAGIYAYQIGADTIITGVCETDFSGYPDCRNDFVKAMNHALVQGMDRQLTIRTPLMWLNKAETWALADQYQALDLVRNETLTCYNGMIGDGCGTCPACELRKAGLNQYLQHPQSVSQFLFSKHTIDKG

SEQ ID NO: 43233 - protein, 232 aa, Vibrio metschnikovii; identical to SEQ ID NO: 43232
  misc_feature (1)..(232): tr|A0A380NVS9|A0A380NVS9_VIBME 7-cyano-7-deazaguanine s ynthase OS=Vibrio metschnikovii OX=28172 GN=queC PE=3 S V=1

SEQ ID NO: 43234 - protein, 231 aa, Vibrio mimicus
  misc_feature (1)..(231): tr|D2YJD3|D2YJD3_VIBMI 7-cyano-7-deazaguanine synthase OS=Vibrio mimicus VM603 OX=671074 GN=exsB PE=3 SV=1
MKKAVVVFSGGQDSTTCLVQALKEFDEVHAITFDYGQRHKLEIEVAQKLAKQLGVAAHKVMDVGLLNELAISSLTRDDIPVSHELQANGLPNSFVPGRNILFLTLAGIYAYQIGAATVITGVCETDFSGYPDCRNDFVQAMNQALTKGMDMSLTIRTPLMWLNKAETWALADQLGALDLVRHQTLTCYNGLIGDGCGECPACHLRKSGLNDYLNNRDSVLNALMNKQSVEH

SEQ ID NO: 43235 - protein, 231 aa, Vibrio mimicus
  misc_feature (1)..(231): tr|A0A5B6XEK5|A0A5B6XEK5_VIBMI 7-cyano-7-deazaguanine s ynthase OS=Vibrio mimicus OX=674 GN=queC PE=3 SV=1
MKKAVVVFSGGQDSTTCLVQALKEFDEVHAITFDYGQRHKLEIEVAQKLAKQLGVAAHKVMDVGLLNELAISSLTRDDIPVSHDLQANGLPNSFVPGRNILFLTLAGIYAYQIGAATVISGVCETDFSGYPDCRNDFVQAMNQALTKGMDMSLTIRTPLMWLNKAETWALADQLGALDLVRHQTLTCYNGLIGDGCGECPACHLRKAGLNDYLNNRDSVLNALMNKQSVEH

SEQ ID NO: 43236 - protein, 231 aa, Vibrio mytili
  misc_feature (1)..(231): tr|A0A0C3DJ82|A0A0C3DJ82_9VIBR 7-cyano-7-deazaguanine s ynthase OS=Vibrio mytili OX=50718 GN=queC PE=3 SV=1
MKKAVVVFSGGQDSTTCLVQALKEFDEVHAITFDYGQRHKLEIEVAQKLTQELGVKAHKVMDVGLLNELAISSLTRDDIPVSHELQENGLPNSFVPGRNILFLTLAGIYAYQIGADTVITGVCETDFSGYPDCRDDFVKAMTSALVKGMDRTLKIKTPLMWLNKAETWALADQYDALQLVREKTLTCYNGIIGDGCGNCPSCDLRKAGLDDYLNNKTAVMASLIQKQKSQG

SEQ ID NO: 43237 - protein, 231 aa, Vibrio natriegens
  misc_feature (1)..(231): tr|A0A1B1ECG6|A0A1B1ECG6_VIBNA 7-cyano-7-deazaguanine s ynthase OS=Vibrio natriegens OX=691 GN=queC PE=3 SV=1
MKKAVVVFSGGQDSTTCLVQALKEFDEVHAITFDYGQRHKLEIEVAQQVAKDLGVAAHKVMDVGLLNELAISSLTRDDIPVSHELQENGLPNSFVPGRNILFLTLAGIYAYQIGAETVITGVCETDFSGYPDCRDDFVKAMNAALVKGMDRELTIKTPLMWLNKAETWALADQYDALQLVRENTLTCYNGIIGDGCGDCPSCDLRKAGLEDYLNNKDAVMQSLVEKQNSEA

SEQ ID NO: 43238 - protein, 230 aa, Vibrio navarrensis
  misc_feature (1)..(230): tr|A0A099LSG6|A0A099LSG6_9VIBR 7-cyano-7-deazaguanine s ynthase OS=Vibrio navarrensis OX=29495 GN=queC PE=3 SV= 1
MNKAVVVFSGGQDSTTCLVQALNEYDEVHAITFDYGQRHRLEIEVAQQLAADLGVKAHKVMDVTLLNELAISSLTRDDIPVSHELQANGLPNSFVPGRNILFLTLAGIYAYQIGADTVITGVCETDFSGYPDCRDDFVKAMNSALVKGMDKALTIKTPLMWLNKAETWALADQNKALQLVREKTLTCYNGVIGDGCGDCPSCHLRKAGLDDYLNNQPLVMASLLEKQAQA

SEQ ID NO: 43239 - protein, 218 aa, Vibrio neocaledonicus; identical to SEQ ID NO: 43166
  misc_feature (1)..(218): tr|A0A4P8FZU7|A0A4P8FZU7_9VIBR 7-cyano-7-deazaguanine s ynthase OS=Vibrio neocaledonicus OX=1208308 GN=queC PE= 3 SV=1

SEQ ID NO: 43240 - protein, 231 aa, Vibrio neptunius
  misc_feature (1)..(231): tr|A0A0F4P131|A0A0F4P131_9VIBR 7-cyano-7-deazaguanine s ynthase OS=Vibrio neptunius OX=170651 GN=queC PE=3 SV=1
MKKAVVVFSGGQDSTTCLVQALKNFDEVHAITFDYGQRHKLEIEVAQALAKELGVKAHKVMDVGLLNELAISSLTRDDIPVSHELQENGLPNSFVPGRNILFLTLAGIYAYQIGAQTVITGVCETDFSGYPDCRNDFVKAMNSALVQGMDRNLDIVTPLMWLNKAETWALADQYDALQLVREKTLTCYNGIIGDGCGDCPACDLRKTGLNDYIDNRDAVMASLVSKQSSEV

SEQ ID NO: 43241 - protein, 231 aa, Vibrio nereis
  misc_feature (1)..(231): tr|A0A0M0HU24|A0A0M0HU24_VIBNE 7-cyano-7-deazaguanine s ynthase OS=Vibrio nereis OX=693 GN=queC PE=3 SV=1
MRKAVVVFSGGQDSTTCLVQALKEFDEVHAITFDYGQRHKLEIEVAQNLAKELGVKAHKVMDVGLLNELAISSLTRDDIPVSHELQENGLPNSFVPGRNILFLTLAGIYAYQIGAQTVITGVCETDFSGYPDCRDSFVKAMNNALVQGMDRELEIATPLMWLNKAETWALADQNEALQLVREKTLTCYNGIIGDGCGDCPSCELRKVGLNDYLSNREAVMSELVRKQSLAK

SEQ ID NO: 43242 - protein, 233 aa, Vibrio nigripulchritudo
  misc_feature (1)..(233): tr|U4JY90|U4JY90_9VIBR 7-cyano-7-deazaguanine synthase OS=Vibrio nigripulchritudo OX=28173 GN=queC PE=3 SV=1
MKKAVVVFSGGQDSTTCLVQAIKDFDEVHAITFDYGQRHKLEIEVAEQLAKDLKIAAHKIMDVGLLNELAISSLTRDDIPVSHELQENGLPNSFVPGRNILFLTLAGIYAYQIGAETVITGVCETDFSGYPDCRDEFVKAMNKALVSGMDKALEIKTPLMWLNKAETWALADQYEALDLVRQHTLTCYNGVVGDGCGDCPSCDLRAAGLNEYLDNKDSVMQSLVSKQNGVSHQ

SEQ ID NO: 43243 - protein, 233 aa, Vibrio nigripulchritudo
  misc_feature (1)..(233): tr|U4E5Q7|U4E5Q7_9VIBR 7-cyano-7-deazaguanine synthase OS=Vibrio nigripulchritudo FTn2 OX=1238441 GN=queC PE=3 SV=1
MKKAVVVFSGGQDSTTCLVQAIKDFDEVHAITFDYGQRHKLEIEVAEQLAKDLKIAAHKVMDVGLLNELAISSLTRDDIPVSHELQENGLPNSFVPGRNILFLTLAGIYAYQIGAETVITGVCETDFSGYPDCRDEFVKAMNTALVSGMDKALEIKTPLMWLNKAETWALADQYEALDLVRQHTLTCYNGVIGDGCGDCPSCDLRAAGLNEYLDNKDSVMQSLVSKQNGVSHQ

SEQ ID NO: 43244 - protein, 232 aa, Vibrio orientalis
  misc_feature (1)..(232): tr|C9QHW9|C9QHW9_VIBOR 7-cyano-7-deazaguanine synthase OS=Vibrio orientalis CIP 102891 = ATCC 33934 OX=675816 GN=queC PE=3 SV=1
MKKAVVVFSGGQDSTTCLVQALKEFDEVHAITFDYGQRHKLEIEVAQSLAKELGVAAHKVMDVGLLNELAISSLTRDDIPVSHELQENGLPNSFVPGRNILFLTLAGIYAYQIGAQSVITGVCETDFSGYPDCRNDFVKAMNRALVQGMDRDLEIATPLMWLDKAETWALADQYDALQLVREKTLTCYNGIIGDGCGDCPSCDLRKVGLNSYLDNREQIMAELVRKQKQADK

SEQ ID NO: 43245 - protein, 232 aa, Vibrio owensii
  misc_feature (1)..(232): tr|A0A0C1ZG02|A0A0C1ZG02_9VIBR 7-cyano-7-deazaguanine s ynthase OS=Vibrio owensii CAIM 1854 = LMG 25443 OX=1229 493 GN=queC PE=3 SV=1
MKKAVVVFSGGQDSTTCLVQALKEFDEVHAITFDYGQRHKLEIEVAEKVAKDLGVAAHKVMDVGLLNELAISSLTRDDIPVSHELQENGLPNSFVPGRNILFLTLAGIYAYQIGAETVITGVCETDFSGYPDCRDDFVKAMNSALVKGMDRQFEIKTPLMWLNKAETWALADQYDALQLVRENTLTCYNGIIGDGCGDCPSCDLRKAGLDDYLNNKDAVMQSLIQKQKTEDQ

SEQ ID NO: 43246 - protein, 223 aa, Vibrio owensii
  misc_feature (1)..(223): tr|A0A3G2PUQ1|A0A3G2PUQ1_9VIBR 7-cyano-7-deazaguanine s ynthase OS=Vibrio owensii OX=696485 GN=queC PE=3 SV=1
MKKAVVVFSGGQDSTTCLVQALTQYDEVHAITFDYGQRHKLEIEVAQSLCQELGVTAHKVMDVSLLNELAISSLTRDDIPVSHELQANGLPNSFVPGRNILFLTLAGIYAYQIGALSVITGVCETDFSGYPDCRNSFVQAMENALQQGMEYDLSLVTPLMWLDKAQTWALADKYEHLDLVKNKTLTCYNGVIGSGCGDCPSCKLRGEGLRAYEKSKEHYLGSL

SEQ ID NO: 43247 - protein, 227 aa, Vibrio palustris
  misc_feature (1)..(227): tr|A0A1R4B2B3|A0A1R4B2B3_9VIBR 7-cyano-7-deazaguanine s ynthase OS=Vibrio palustris OX=1918946 GN=queC PE=3 SV= 1
MKKAVVVFSGGQDSTTCLVQALQEFDEVHAITFDYGQRHKLEIEVAQSLGTKLGITAHKVMDVGLLNELAVSSLTRDDIAVSNELQENGLPNSFVPGRNILFLTLAGIYAYQIGANTVITGVCETDFSGYPDCRNDFVKAMNTALVQGMDKELDIRTPLMWLNKAQTWALADQQGALELVRHQTLTCYNGIIGDGCGECPACQLRQAGLNEYLDNQDEIMKELVAKQ

SEQ ID NO: 43248 - protein, 232 aa, Vibrio panuliri
  misc_feature (1)..(232): tr|A0A1Q9HFD8|A0A1Q9HFD8_9VIBR 7-cyano-7-deazaguanine s ynthase OS=Vibrio panuliri OX=1381081 GN=queC PE=3 SV=1
MNKAVVVFSGGQDSTTCLVKALSEYDEVHAITFDYGQRHKLEIEVAQQLAQELGVKAHKVMDVSLLNELAISSLTRDDIAVSHELQENGLPNSFVPGRNILFLTLAGIYAYQVGAETIITGVCETDFSGYPDCRDEFVKAMNQSLVVGMDKPLFIQTPLMWLNKAETWALADQYDALDLVREKTLTCYNGIIGDGCGDCPSCDLRKTGLTDYLNNQQSVMAELIRKQATPDR

SEQ ID NO: 43249 - protein, 197 aa, Vibrio panuliri
  misc_feature (1)..(197): tr|A0A1Q9HP67|A0A1Q9HP67_9VIBR 7-cyano-7-deazaguanine s ynthase OS=Vibrio panuliri OX=1381081 GN=BIY22_15090 PE =3 SV=1
MSSVLLLSGGLDSIALAAWKNPEYGLTINYGQIAAEAEIKAATQVCSLLGIKHAVIDMDLSILGSGLMHGDGARSHSENAEFWPYRNQLLITIASMFALKHGCKDVLIGTVVTDQRHLDGSEKFLDYINKLVAYQEGAVSVSAPAKSLTTADLINKSKVPFEVLSWGHSCHTSNLACGQCPGCIKHSEVMLELGVER

SEQ ID NO: 43250 - protein, 232 aa, Vibrio parahaemolyticus
  misc_feature (1)..(232): sp|Q87P80|QUEC_VIBPA 7-cyano-7-deazaguanine synthase OS =Vibrio parahaemolyticus serotype O3:K6 (strain RIMD 22 10633) OX=223926 GN=queC PE=3 SV=1
MKKAVVVFSGGQDSTTCLVQALKEFDEVHAITFDYGQRHKLEIEVAQKIAKDLGVKAHKVMDVGLLNELAISSLTRDDIPVSHELQENGLPNSFVPGRNILFLTLAGIYAYQIGADTVITGVCETDFSGYPDCRDDFVKSMNTALVKGMDRALTIKTPLMWLNKAETWALADQYNALQLVRENTLTCYNGIIGDGCGDCPSCDLRKAGLDEYLNNKDAVMKSLVQKQESEGL

SEQ ID NO: 43251 - protein, 232 aa, Vibrio parahaemolyticus; identical to SEQ ID NO: 43250
  misc_feature (1)..(232): tr|A0A072FSU0|A0A072FSU0_VIBPH 7-cyano-7-deazaguanine s ynthase OS=Vibrio parahaemolyticus OX=670 GN=queC PE=3 SV=1

SEQ ID NO: 43252 - protein, 227 aa, Vibrio pectenicida
  misc_feature (1)..(227): tr|A0A427TZS6|A0A427TZS6_9VIBR 7-cyano-7-deazaguanine s ynthase OS=Vibrio pectenicida OX=62763 GN=queC PE=3 SV= 1
MKKAVVVFSGGQDSTTCLVQALNDFDEVHAITFDYGQRHRLEIEVAQNLAKDLGVAAHKVMDVGLLNELAISSLTRDDIPVSHELQDNGLPNSFVPGRNILFLTLAGIYAYQIGATTIITGVCETDFSGYPDCRDSFVKSMNTALVQGMEYQLEISTPLMWLNKAETWALADQYQALSLVKYKTLTCYNGVIGDGCGDCPACGLRKAGLEDYLNNREAVITSLVSKQ

SEQ ID NO: 43253 - protein, 233 aa, Vibrio penaeicida
  misc_feature (1)..(233): tr|A0A3S0MRP7|A0A3S0MRP7_9VIBR 7-cyano-7-deazaguanine s ynthase OS=Vibrio penaeicida OX=104609 GN=queC PE=3 SV= 1
MKKAVVVFSGGQDSTTCLVQAIEEFDEVHAITFDYGQRHKLEIEVAEKLASDLNIAAHKVMDVGLLNELAISSLTRDDIPVSHELQDNGLPNSFVPGRNILFLTLAGIYAYQIGAETVITGVCETDFSGYPDCRDEFVKAMNKALVSGMDKTLDIKTPLMWLNKAETWALADQYKALELVRSQTLTCYNGIIGDGCGDCPSCDLRSAGLNEYLDNQESVMQSLVSKQGEERCQ

SEQ ID NO: 43254 - protein, 232 aa, Vibrio ponticus
  misc_feature (1)..(232): tr|A0A3N3DWG1|A0A3N3DWG1_9VIBR 7-cyano-7-deazaguanine s ynthase OS=Vibrio ponticus OX=265668 GN=queC PE=3 SV=1
MNKAVVVFSGGQDSTTCLVQALKQYDEVHAITFDYGQRHKLEIEVASQLVKDLGVAAHKVMDVTLLNELAISSLTRDDIAVSHELQDNGLPNSFVPGRNILFLTLAGIYAYQVGAQTIITGVCETDFSGYPDCRDEFVKAMNDALVKGMDKNITIKTPLMWLNKAETWALAEQYQALELVRNHTLTCYNGIIGDGCGDCPSCDLRKTGLNDYLSNKESVDAELTRKQANPSK

SEQ ID NO: 43255 - protein, 231 aa, Vibrio ponticus
  misc_feature (1)..(231): tr|A0A090P365|A0A090P365_9VIBR 7-cyano-7-deazaguanine s ynthase OS=Vibrio ponticus OX=265668 GN=queC PE=3 SV=1
MNKAVVVFSGGQDSTTCLVKALTEYDEVHAITFDYGQRHKLEIEVAQQLAIELGVKAHKVMDVSLLNELAISSLTRDDIAVSHELQENGLPNSFVPGRNILFLTLAGIYAYQIGATAIITGVCETDFSGYPDCRDQFVKAMNGALNQGMDKQFSIETPLMWLNKAQTWALADHYNALSLVREKTLTCYNGIIGDGCGDCPSCDLRKKGLDEYLSNQSEVKAELLTKMSADK

SEQ ID NO: 43256 - protein, 230 aa, Vibrio proteolyticus
  misc_feature (1)..(230): tr|U3A2P7|U3A2P7_VIBPR 7-cyano-7-deazaguanine synthase OS=Vibrio proteolyticus NBRC 13287 OX=1219065 GN=queC P E=3 SV=1
MKKVVVVFSGGQDSTTCLVQALKEFDEVHAITFDYGQRHKLEIEVAQKLASELGVKAHKVMDVGLLNELAISSLTRDDIPVSHELQENGLPNSFVPGRNILFLTLAGIYAYQIGADCVITGVCETDFSGYPDCRDEFVKSMNDALVKGMDRQLMIRTPLMWLNKAETWALADQYDALSLIREKTLTCYNGIIGDGCGDCPSCDLRRVGLNDYLDNRETVMTELVRKQQAN

SEQ ID NO: 43257 - protein, 226 aa, Vibrio qinghaiensis
  misc_feature (1)..(226): tr|A0A223MXG6|A0A223MXG6_9VIBR 7-cyano-7-deazaguanine s ynthase OS=Vibrio qinghaiensis OX=2025808 GN=queC PE=3 SV=1
MKKAVVVFSGGQDSTTCLVQALKEFDEVHAITFDYGQRHKLEIEVAIALAKKLGVAAHKVMDVSLLNELAISSLTRDDIPVSHELQENGLPNSFVPGRNILFLTLAGIYAYQIGADEVITGVCETDFSGYPDCRNDFVKAMNSALVQGMDRPFHISTPLMWLNKAETWALADEYGALDLIRHETLTCYNGIIGDGCGGCPSCELRKAGLNDYLSSKESIMNALYNK

SEQ ID NO: 43258 - protein, 231 aa, Vibrio quintilis
  misc_feature (1)..(231): tr|A0A1M7Z248|A0A1M7Z248_9VIBR 7-cyano-7-deazaguanine s ynthase OS=Vibrio quintilis OX=1117707 GN=queC PE=3 SV= 1
MTKAVVVFSGGQDSTTCLVEALQNYDEVHAITFDYGQRHRQEIEVAQALAKKLKVTAHKIIDASVLNELAISSLTRDDIPVSNELQENGLPNSFVPGRNILFLTLAGIYAYQIGASAIITGVCETDFSGYPDCRNDFVKAMNHALVQGMERDLLVVTPLMWLDKAETWAMADHYGALSLVRENTLTCYNGIVGDGCGECPSCQLRKAGLDTYNGNKAEILKSYLDKQRSVV

SEQ ID NO: 43259 - protein, 218 aa, Vibrio renipiscarius
  misc_feature (1)..(218): tr|A0A0C2K1L2|A0A0C2K1L2_9VIBR 7-cyano-7-deazaguanine s ynthase OS=Vibrio renipiscarius OX=1461322 GN=queC PE=3 SV=1
MTTTKALVVFSGGQDSTTCLIDALNTYDEVHAITFDYGQRHSNEIEVALEIGKELNVKSHKVLDVTAINELAISSLTRDNIPVSNELNDNDLPNTFVPGRNIVFLTYACIHAYQLGIKDIITGVCETDFSGYPDCRDNFIRALNLACNLGMDNNVNIKTPLMWLNKAETWGLADKHNMLEYVQNKTLTCYNGILGKGCGECPACLLRQNGLDEYFASK

SEQ ID NO: 43260 - protein, 232 aa, Vibrio rotiferianus
  misc_feature (1)..(232): tr|A0A510I4Y0|A0A510I4Y0_9VIBR 7-cyano-7-deazaguanine s ynthase OS=Vibrio rotiferianus OX=190895 GN=queC PE=3 S V=1
MKKAVVVFSGGQDSTTCLVQALKEFDEVHAITFDYGQRHKLEIEVAEKVAKDLGVAAHKVMDVGLLNELAISSLTRDDIPVSHDLQENGLPNSFVPGRNILFLTLAGIYAYQIGAETVITGVCETDFSGYPDCRDDFVKAMNSALVKGMDRQFEIKTPLMWLNKAETWALADQYDALQLVRENTLTCYNGIIGDGCGDCPSCDLRKAGLDDYLNNKEAVMHSLVEKQKVEGQ

SEQ ID NO: 43261 - protein, 232 aa, Vibrio rotiferianus
  misc_feature (1)..(232): tr|A0A2K7SYS0|A0A2K7SYS0_9VIBR 7-cyano-7-deazaguanine s ynthase OS=Vibrio rotiferianus OX=190895 GN=queC PE=3 S V=1
MKKAVVVFSGGQDSTTCLVQALKEFDEVHAITFDYGQRHKLEIEVAEKVAKDLGVAAHKVMDVGLLNELAISSLTRDDIPVSHDLQENGLPNSFVPGRNILFLTLAGIYAYQIGAETVITGVCETDFSGYPDCRDDFVKAMNSALVKGMERQFQIKTPLMWLNKAETWALADQYDALQLVRENTLTCYNGIIGDGCGDCPSCDLRKAGLDDYLNNKEAVMHSLVEKQKVEGQ

SEQ ID NO: 43262 - protein, 233 aa, Vibrio ruber
  misc_feature (1)..(233): tr|A0A1R4LPI9|A0A1R4LPI9_9VIBR 7-cyano-7-deazaguanine s ynthase OS=Vibrio ruber DSM 16370 OX=1123498 GN=queC PE =3 SV=1
MKKAVVVFSGGQDSTTCLVEALQTYDEVHAITFDYGQRHRLEIETARQLAEQLGVKSHKVMDVGLLNELAISSLTRDDIPVSHALQDNGLPNSFVPGRNILFLTLAGIYAYQIGAESVITGVCETDFSGYPDCRNEFIQTMNRALVQGMDREMKIVTPLMWLNKAETWAMADHYDALTLVRSQTLTCYNGVIGDGCGECPSCHLRQAGLDEYLNHRDTVQQSYLDKRVAQTHQ

SEQ ID NO: 43263 - protein, 237 aa, Vibrio rumoiensis
  misc_feature (1)..(237): tr|A0A1E5E1K0|A0A1E5E1K0_9VIBR 7-cyano-7-deazaguanine s ynthase OS=Vibrio rumoiensis 1S-45 OX=1188252 GN=queC P E=3 SV=1
MEKGKSMTSKAVVVFSGGQDSTTCLVQALKQYDEVHTITFDYGQRHKLEIEIAEKLCRQLGVSAHKVMDVGLLNELAISSLTRDDIPVSHELQENGLPNSFVPGRNILFLTLAGIYAYQIGADSVITGVCETDFSGYPDCRDQFVKAINNALVLGMDRQFKIETPLMWLNKAETWALADQHDALELIRNDTLTCYNGIIGDGCGDCPSCDLRRDGLMDYLNNREVIMNELKQKQQVS

SEQ ID NO: 43264 - protein, 228 aa, Vibrio sagamiensis; identical to SEQ ID NO: 43164
  misc_feature (1)..(228): tr|A0A511QDU2|A0A511QDU2_9VIBR 7-cyano-7-deazaguanine s ynthase OS=Vibrio sagamiensis NBRC 104589 OX=1219064 GN =queC PE=3 SV=1

SEQ ID NO: 43265 - protein, 231 aa, Vibrio scophthalmi
  misc_feature (1)..(231): tr|F9RRP7|F9RRP7_9VIBR 7-cyano-7-deazaguanine synthase OS=Vibrio scophthalmi LMG 19158 OX=870967 GN=queC PE=3 SV=1
MKKAVVVFSGGQDSTTCLVQALKEYDEVHAITFDYGQRHKLEIEVAQQLAIELGVAAHKVMDVGLLNELAISSLTRDDIPVSHELQENGLPNSFVPGRNILFLTLAGIYAYQIGAQSVITGVCETDFSGYPDCRDEFVKAMNSALVKGMDRQFTIKTPLMWLNKAETWALADQYDALCLIQEKTLTCYNGIIGSGCGDCPACELRKVGLNQYLEDKQTIMQQLVQKQATDS

SEQ ID NO: 43266 - protein, 231 aa, Vibrio scophthalmi
  misc_feature (1)..(231): tr|A0A1B1NP94|A0A1B1NP94_9VIBR 7-cyano-7-deazaguanine s ynthase OS=Vibrio scophthalmi OX=45658 GN=queC PE=3 SV= 1
MKKAVVVYSGGQDSTTCLVQALKEYDEVHAITFDYGQRHKLEIEVAQQLAIELGVAAHKVMDVGLLNELAISSLTRDDIPVSHELQENGLPNSFVPGRNILFLTLAGIYAYQIGAQSVITGVCETDFSGYPDCRDEFVKAMNSALVKGMDRQFTIKTPLMWLNKAETWALADQYDALCLIQEKTLTCYNGIIGSGCGDCPACELRKVGLNQYLEDKQTIMQQLVQKQATDS

SEQ ID NO: 43267 - protein, 228 aa, Vibrio shilonii
  misc_feature (1)..(228): tr|A6D5M7|A6D5M7_9VIBR 7-cyano-7-deazaguanine synthase OS=Vibrio shilonii AK1 OX=391591 GN=queC PE=3 SV=1
MKKAVVVFSGGQDSTTCLVQALEQYDEVHAITFDYGQRHKLEIEVAEALANKLNVKAHKVMDVSLLNELAISSLTRDDIPVSHELQENGLPNSFVPGRNILFLTLAGIYAYQIGAQAVITGVCETDFSGYPDCRNDFIKALNSALVQGMDREFDIVTPLMWLDKAETWALADKFNALSLIREETLTCYNGVIGDGCGDCPSCDLRANGLNHYLENKSEVMASLNEKSE

SEQ ID NO: 43268 - protein, 235 aa, Vibrio sinaloensis
  misc_feature (1)..(235): tr|E8M5V5|E8M5V5_9VIBR 7-cyano-7-deazaguanine synthase OS=Vibrio sinaloensis DSM 21326 OX=945550 GN=queC PE=3 SV=1
MRKAVVVFSGGQDSTTCLVQALKEYDEVHAITFDYGQRHKLEIEVAQSLAKELGVKAHKVMDVGLLNELAISSLTRDDIPVSHELQDNGLPNSFVPGRNILFLTLAGIYAYQIGAQAVITGVCETDFSGYPDCRDEFVKSINRSLVLGMDRQFEIETPLMWLNKAETWALADQYDALQLVREKTLTCYNGIIGDGCGDCPSCELRKVGLSDYLSNRETVMSELVRKQSLANKSVR

SEQ ID NO: 43269 - protein, 235 aa, Vibrio sinaloensis
  misc_feature (1)..(235): tr|A0A0A5JI84|A0A0A5JI84_9VIBR 7-cyano-7-deazaguanine s ynthase OS=Vibrio sinaloensis OX=379097 GN=queC PE=3 SV =1
MKKAVVVFSGGQDSTTCLVKALKEFDEVHAITFDYGQRHKLEIEVAEQLATKLGVKAHKVMDVGLLNELAISSLTRDDIPVSHELQDNGLPNSFVPGRNILFLTLAGIYAYQIGADAVITGVCETDFSGYPDCRDEFVRSMNNSLVLGMDRTFTIETPLMWLNKAETWALADQYDSLQLVRESTLTCYNGIVGDGCGDCPSCDLRKTGLNDYLSNKEAIMSELVRKQNSQDKSAH

SEQ ID NO: 43270 - protein, 237 aa, Vibrio sp.
  misc_feature (1)..(237): tr|A0A2T1JDM3|A0A2T1JDM3_9VIBR 7-cyano-7-deazaguanine s ynthase OS=Vibrio sp. V02_P2A34T13 OX=1982231 GN=queC P E=3 SV=1
MPEERKMKKAVVVFSGGQDSTTCLVQALKEFDEVHAITFDYGQRHKLEIEVASTLAKKLGVAAHKVMDVSLLNELAISSLTRDDIPVSHELQENGLPNSFVPGRNILFLTLAGIYAYQIGADEVITGVCETDFSGYPDCRNDFVKAMNSALVQGMDRPFNIRTPLMWLNKAETWALADQHDALELIRHETLTCYNGIIGDGCGDCPSCELRKAGLNDYLVNKALVMNALHQKQTVTL

SEQ ID NO: 43271 - protein, 215 aa, Vibrio sp.
  misc_feature (1)..(215): tr|A0A084TA26|A0A084TA26_9VIBR ATP_bind_3 domain-contai ning protein OS=Vibrio sp. ER1A OX=1517681 GN=HW45_0913 5 PE=4 SV=1
MASIAFYSGGLDSTAMLYLLSQTDEEIIAHHVYFETDTERDKLEMQAVEKIQKYFGDRFKWESSSISLMGAPLLKQSRDVIWFSIIGAVYTAYENVDNIYFGFEHQAADVYYKQWLQTAEDLCNGVLEKALPLSCKGDLVNEDPDKIKPYKIISPVAGLSKADEYNLLPEELKKVVWSCRNPQRLKSGVITHCGTCEPCSEYTRHNLPFNSTRLS

SEQ ID NO: 43272 - protein, 233 aa, Vibrio spartinae
  misc_feature (1)..(233): tr|A0A1N6M3Q9|A0A1N6M3Q9_9VIBR 7-cyano-7-deazaguanine s ynthase OS=Vibrio spartinae OX=1918945 GN=queC PE=3 SV= 1
MKKAVVVFSGGQDSTTCLVEALQTYDEVHAITFDYGQRHRLEIETARQLATQLGVKAHKVMDVGLLNELAISSLTRDDIPVSHELQDNGLPNSFVPGRNILFLTLAGIYAYQIGAESVITGVCETDFSGYPDCRNEFIQTMNQALVQGMDRKMNIVTPLMWLNKAETWAMADDYDALALVRNQTLTCYNGVIGDGCGECPSCHLRQAGLDEYLNNRDAIQQAYLDKRATQTHS

SEQ ID NO: 43273 - protein, 231 aa, Vibrio splendidus
  misc_feature (1)..(231): tr|A0A0P6Z5A6|A0A0P6Z5A6_VIBSP 7-cyano-7-deazaguanine s ynthase OS=Vibrio splendidus OX=29497 GN=queC PE=3 SV=1
MKKAVVVFSGGQDSTTCLVQALKEYDEVHAITFDYGQRHRLEIEVAESLSKELGVKAHKVMDVTLLNELAISSLTRDDIPVSHELQENGLPNSFVPGRNILFLTLAGIYAYQIGANTVITGVCETDFSGYPDCRNDFVKAMNSALVQGMDKPLDIKTPLMWLNKAETWALADQYSALELVRNKTLTCYNGIIGDGCGDCPACELRKVGLNDYLGDREGIMAELVRKQTENK

SEQ ID NO: 43274 - protein, 231 aa, Vibrio splendidus
  misc_feature (1)..(231): tr|A0A2N7DYU1|A0A2N7DYU1_VIBSP 7-cyano-7-deazaguanine s ynthase OS=Vibrio splendidus OX=29497 GN=queC PE=3 SV=1
MKKAVVVFSGGQDSTTCLVQALKEYDEVHAITFDYGQRHRLEIEVAESLSKELGVKAHKVMDVTLLNELAISSLTRDDIPVSHELQENGLPNSFVPGRNILFLTLAGIYAYQIGANTVITGVCETDFSGYPDCRNDFVKAMNSALVQGMDKPLDIKTPLMWLNKAETWALADQYSALELVRNKTLTCYNGIVGDGCGDCPACELRKVGLNDYLGDREGIMAELVRKQTENK

SEQ ID NO: 43275 - protein, 227 aa, Vibrio superstes
  misc_feature (1)..(227): tr|A0A511QLC3|A0A511QLC3_9VIBR 7-cyano-7-deazaguanine s ynthase OS=Vibrio superstes NBRC 103154 OX=1219062 GN=q ueC PE=3 SV=1
MNKAVVIFSGGQDSTTCLVQALTQFDEVHAITYDYGQRHRQEIEIAQTLAKKLGVKAHKVMDVTLLNELAVSSLTRDDIPVSHELGENGLPNSFVPGRNILFLTLAGIYAYQVGAKTLITGVCETDFSGYPDCRDEFVKSMNSSLALGMDYKLEIKTPLMWLNKAETWAMADHYQALELVRDESLTCYNGIVGSGCGDCPACVLRANGLQDYLDDKTKVMEDYLSKV

SEQ ID NO: 43276 - protein, 230 aa, Vibrio tapetis
  misc_feature (1)..(230): tr|A0A2N8ZA20|A0A2N8ZA20_9VIBR 7-cyano-7-deazaguanine s ynthase OS=Vibrio tapetis subsp. tapetis OX=1671868 GN= queC PE=3 SV=1
MKKAVVVFSGGQDSTTCLVQALKEYDEVHAITFDYGQRHKLEIEVAQSLAIELGVKAHKVMDVSLLNELAVSSLTRDDIPVSHELQENGLPNSFVPGRNILFLTLAGIYAYQIGAQSVITGVCETDFSGYPDCRDEFVKAMNTALVQGMDRPFDILTPLMWLNKAETWAMADQYQSLSLVRDKTLTCYNGIIGDGCGDCPSCDLRKAGLEDYLNDRESIMQALVEKQRRA

SEQ ID NO: 43277 - protein, 197 aa, Vibrio tasmaniensis
  misc_feature (1)..(197): tr|B7VNE1|B7VNE1_VIBTL 7-cyano-7-deazaguanine synthase OS=Vibrio tasmaniensis (strain LGP32) OX=575788 GN=queC PE=3 SV=1
MKKAVVVFSGGQDSTTCLVQALKEYDEVHAITFDYGQRHRLEIEVAESLSKELGVKAHKVMDVTLLNELAISSLTRDDIPVSHELQENGLPNSFVPGRNILFLTLAGIYAYQIGANTVITGVCETDFSGYPDCRNDFVKAMNSALVQGMDKPLDIKTPLMWLNKAETWALADQYSALELVRNKTLTCYNGIIGSATC

SEQ ID NO: 43278 - protein, 218 aa, Vibrio tasmaniensis
  misc_feature (1)..(218): tr|B7VNE2|B7VNE2_VIBTL 7-cyano-7-deazaguanine synthase OS=Vibrio tasmaniensis (strain LGP32) OX=575788 GN=queC PE=3 SV=1
MQQSKALVVFSGGQDSTTCLIDALNTYDEVHAITFDYGQRHSNEIDVAVSIGKELNVKSHKVLDVTAINELAISSLTRDNIPVSNELSNNDLPNTFVPGRNIVFLTYACIHAYQLGIKDIVTGVCETDFSGYPDCRDTFIRALNLSCNLGMDNAFNIKTPLMWLNKAETWELADKHNKLEYVEKNTLTCYNGILGKGCGECPACLLRQNGLKEYLASK

SEQ ID NO: 43279 - protein, 228 aa, Vibrio thalassae
  misc_feature (1)..(228): tr|A0A240EN10|A0A240EN10_9VIBR 7-cyano-7-deazaguanine s ynthase OS=Vibrio thalassae OX=1243014 GN=queC PE=3 SV= 1
MKKAVVVFSGGQDSTTCLVQALKQYDEVHAITFDYGQRHKLEIEVAEALAKKLNVKAHKVMDVSLLNELAISSLTRDDIPVSHELQENGLPNSFVPGRNILFLTLAGIYAYQIGATAVITGVCETDFSGYPDCRNDFIKAMNSALTQGMDREFEIVTPLMWLDKAETWALADKFDALQLIREETLTCYNGIIGDGCGDCPSCDLRANGLNHYLENKSDVMRSLNEKSE

SEQ ID NO: 43280 - protein, 231 aa, Vibrio toranzoniae
  misc_feature (1)..(231): tr|A0A120DH24|A0A120DH24_9VIBR 7-cyano-7-deazaguanine s ynthase OS=Vibrio toranzoniae OX=1194427 GN=queC PE=3 S V=1
MKKAVVVFSGGQDSTTCLVQALKEYDEVHAITFDYGQRHRLEIEVAESLSKELGVKAHKVMDVTLLNELAISSLTRDDIPVSHELQENGLPNSFVPGRNILFLTLAGIYAYQIDAETVITGVCETDFSGYPDCRNDFVKAMNSALVQGMDKQLDIKTPLMWLNKAETWAMADQYSALDLVRNKTLTCYNGIIGDGCGDCPACELRKVGLNDYLGDRESIMAELVRKQTEYK

SEQ ID NO: 43281 - protein, 232 aa, Vibrio tubiashii
  misc_feature (1)..(232): tr|F9T269|F9T269_9VIBR 7-cyano-7-deazaguanine synthase OS=Vibrio tubiashii ATCC 19109 OX=1051646 GN=queC PE=3 SV=1
MKKAVVVFSGGQDSTTCLVQAIKDFDEVHAITFDYGQRHKLEIEVAQSLAKELSVKAHKVMDVGLLNELAISSLTRDDIPVSHELQENGLPNSFVPGRNILFLTLAGIYAYQIGAQTVITGVCETDFSGYPDCRNDFVKAMNNALVQGMDRQLEISTPLMWLNKAETWALADQYDALQLVREKTLTCYNGVIGDGCGDCPSCELRKVGLNDYLSERKAIMAELVRKQNSADK

SEQ ID NO: 43282 - protein, 232 aa, Vibrio tubiashii
  misc_feature (1)..(232): tr|A0A0A5IA61|A0A0A5IA61_9VIBR 7-cyano-7-deazaguanine s ynthase OS=Vibrio tubiashii OX=29498 GN=queC PE=3 SV=1
MRKAVVVFSGGQDSTTCLVQAIKEFDEVHAITFDYGQRHKLEIEVAQNLAQELGVKAHKVMNVGLLNELAISSLTRDDIPVSHELQENGLPNSFVPGRNILFLTLAGIYAYQIGAQNVITGVCETDFSGYPDCRDEFVKSMNDALVKGMDRQLEISTPLMWLNKAETWALADQYGALQLVREKTLTCYNGIIGDGCGDCPSCELRKVGLNDYLSEREAVMAELVRKQSSVGK

SEQ ID NO: 43283 - protein, 203 aa, Vibrio variabilis
  misc_feature (1)..(203): tr|A0A090T332|A0A090T332_9VIBR 7-cyano-7-deazaguanine s ynthase OS=Vibrio variabilis OX=990271 GN=queC PE=3 SV= 1
MKKAVVVFSGGQDSTTCLVQALEQYDEVHAITFDYGQRHKLEIEVAEAVAKKLGVKAHKVMDVGLLNELAISSLTRDDIPVSHELQENGLPNSFVPGRNILFLTLAGIYAYQIGAQAVITGVCETDFSGYPDCRNDFIKAMNSALVQGMDRELDIVTPLMWLDKAETWALADKYDALELVRNETLTCYNGVIGDGCGDCHHVS

SEQ ID NO: 43284 - protein, 231 aa, Vibrio vulnificus
  misc_feature (1)..(231): tr|A0A2S3R899|A0A2S3R899_VIBVL 7-cyano-7-deazaguanine s ynthase OS=Vibrio vulnificus OX=672 GN=queC PE=3 SV=1
MNKAVVVFSGGQDSTTCLVKALNEFDEVHAITFDYGQRHRLEIEVAQNLAKKLGVAAHKVMDVTLLNELAISSLTRDDIPVSHELQENGLPNSFVPGRNILFLTLAGIYAYQIGAQTIITGVCETDFSGYPDCRDDFVKAMNSALVKGMDKPLVIQTPLMWLNKAETWALADQNNALQLVREKTLTCYNGIIGDGCGDCPSCHLRKVGLNDYLDNREAIMASLVEKQHAES

SEQ ID NO: 43285 - protein, 231 aa, Vibrio vulnificus
  misc_feature (1)..(231): sp|Q8D985|QUEC_VIBVU 7-cyano-7-deazaguanine synthase OS =Vibrio vulnificus (strain CMCP6) OX=216895 GN=queC PE= 3 SV=1
MNKAVVVFSGGQDSTTCLVKALNEFDEVHAITFDYGQRHRLEIEVAQNLAKELGVAAHKVMDVTLLNELAISSLTRDDIPVSHELQENGLPNSFVPGRNILFLTLAGIYAYQIGAQTIITGVCETDFSGYPDCRDDFVKAMNSALVKGMDKPLVIQTPLMWLNKTETWALADQNNALQLVREKTLTCYNGIIGDGCGDCPSCHLRKVGLNDYLDNREAIMASLVEKQHAES

SEQ ID NO: 43286 - protein, 230 aa, Vibrio xiamenensis
  misc_feature (1)..(230): tr|A0A1G7YFX1|A0A1G7YFX1_9VIBR 7-cyano-7-deazaguanine s ynthase OS=Vibrio xiamenensis OX=861298 GN=queC PE=3 SV =1
MKKAVVVFSGGQDSTTCLVQAMQEYDEVHAITFDYGQRHKLEIEVAEQLAKQLGVKAHKVMDVGLLNELAISSLTRDDIPVSHELQENGLPNSFVPGRNILFLTLAGIYAYQIGAQTVITGVCETDFSGYPDCRDEFVKAMNRALVQGMDRELEIKTPLMWLNKAQTWALADQYQALDLVRNHTLTCYNGVIGDGCGDCPSCDLRRAGLNDYLDNREAVMAQLTAKQKSA

SEQ ID NO: 43287 - protein, 240 aa, Vibrio xiamenensis
  misc_feature (1)..(240): tr|A0A1G8FRI6|A0A1G8FRI6_9VIBR 7-cyano-7-deazaguanine s ynthase (Queuosine biosynthesis) OS=Vibrio xiamenensis OX=861298 GN=SAMN04488136_1329 PE=4 SV=1
MNNESSNECVNVLWTGGWDSSFRVIQAVKQGNIVQPYYVIDTSRQSSLKEIKQMQKIRAALSAKYSNGTVNEIKYINIDSLVAEPKYKQAHSRLLKQNFMGTQYIWLSALSKQISNLELCIHRDDKAEFFVNKLEAQRANNPDGARDSDEELIFGSLKYPILNYTKVDMAEECKKDGDLDILNMSWFCFSPINDTPCGLCNPCKYSLEEGMQNRFTTRGKLYSKAPVVFGTVRKIARRFF

SEQ ID NO: 43288 - protein, 232 aa, Vibrionales bacterium
  misc_feature (1)..(232): tr|A0A366XHA9|A0A366XHA9_9GAMM 7-cyano-7-deazaguanine s ynthase OS=Vibrionales bacterium C3R12 OX=2267228 GN=qu eC PE=3 SV=1
MKKAVVVFSGGQDSTTCLVQALKEFDEVHAITFDYGQRHKLEIEVAQNLASELGVTAHKVMDVGLLNELAISSLTRDDIEVSHELQDNGLPNSFVPGRNILFLTLAGIYAYQIGAQSVITGVCETDFSGYPDCRDEFVKSMNTALVQGMDRQFEILTPLMWLNKAETWALADQYDALELVRSKTLTCYNGIIGDGCGDCPSCELRKIGLNDYQANSQTVMSELKNKQRLANQ

SEQ ID NO: 43289 - protein, 86 aa, Vibrionales bacterium
  misc_feature (1)..(86): tr|A5L8U1|A5L8U1_VIBBS 7-cyano-7-deazaguanine synthase (Fragment) OS=Vibrionales bacterium (strain SWAT-3) OX= 391574 GN=VSWAT3_24264 PE=3 SV=1
MKKAVVVFSGGQDSTTCLVQALKEYDEVHAITFDYGQRHKLEIEVAESLAKELGVKAHKVMDVTLLNELAISSLTRDDIPVSHELQ

SEQ ID NO: 43290 - protein, 228 aa, Victivallales bacterium
  misc_feature (1)..(228): tr|A0A2S0L1Y9|A0A2S0L1Y9_9BACT 7-cyano-7-deazaguanine s ynthase OS=Victivallales bacterium CCUG 44730 OX=209424 2 GN=queC PE=3 SV=1
MKMKKAVVLLSGGLDSATVLAIAKSENFECYALSFDYGQRHFCELEAAEKVAKQLGAAKHNTVKIDLRLWGGSALTDDALEVPEASASPGVPITYVPARNLIFLSFATAWAEVLGARDIFIGVNSVDYSGYPDCRPAFIESFRETARLGTCAVDEGWSYRINAPLQNLSKAQIIETGTRLGVDYALTTSCYNPDSEGRSCGKCDSCALRIAGFREAGVPDPTRYSGAE

SEQ ID NO: 43291 - protein, 225 aa, Victivallis vadensis
  misc_feature (1)..(225): tr|A0A2U1B4I9|A0A2U1B4I9_9BACT 7-cyano-7-deazaguanine s ynthase OS=Victivallis vadensis OX=172901 GN=queC PE=3 SV=1
MNKRAVILLSGGLDSATVLAIAGSEGFDCYTMSFDYGQRHRCELEAAGRIAAALGAVKHNTVKIDLRQWGGSALTDDALAVPDAEDSHGIPITYVPARNLIFLSFATAWAEVLGARDIFIGVNSVDYSGYPDCRPKFIESFQETARLGTCAVDEGWHYSINAPLQNLSKAEIIRRGVALGVDYGLTTSCYNPDSEGRSCGKCASCSLRIAGFREAGVPDPTRYHR

SEQ ID NO: 43292 - protein, 163 aa, Virgibacillus dokdonensis
  misc_feature (1)..(163): tr|A0A2K9IWK6|A0A2K9IWK6_9BACI 7-cyano-7-deazaguanine s ynthase OS=Virgibacillus dokdonensis OX=302167 GN=A21D_ 00723 PE=3 SV=1
MDFVDSFKDLYMNDDDPIHIFRKGESVITFIKSFGAGIGLSLAASYAAEIDAKHLFYGVHKDDKVFNENNREFFTLMSKAISIEIGTEFNVHTPFLEKSKAEVLKLGYDLGMPAEETWSCASNSSIHCGWCDPCQDRINAFRKTNLNDTTLYENSLVKSSSNA

SEQ ID NO: 43293 - protein, 220 aa, Virgibacillus massiliensis
  misc_feature (1)..(220): tr|A0A024QD99|A0A024QD99_9BACI 7-cyano-7-deazaguanine s ynthase OS=Virgibacillus massiliensis OX=1462526 GN=que C PE=3 SV=1
MNNQKAVVVFSGGQDSTTCLFWALREFEHVEAVTFQYGQRHLEELHVAKNICDQLKVTHHELDMNLLNQLAPNALTRKDIAITEGDDGLPSTFVPGRNLLFLSFAAILAKQINAKHVVTGVCETDFSGYPDCRDIFTKSLNVTLNLAMDDQFVIHTPLMWLDKAGVWELSDQLGAFSFVKNNTLTCYNGLKGSGCGECPACQLRQTGLEKYEANRKKVRT

SEQ ID NO: 43294 - protein, 247 aa, Virgibacillus necropolis
  misc_feature (1)..(247): tr|A0A221M9C9|A0A221M9C9_9BACI Uncharacterized protein OS=Virgibacillus necropolis OX=163877 GN=CFK40_04020 PE =4 SV=1
MINKILWTGGWDSTYRLLDLVLNKKKVVQPYYVFDTERKSTGMEIKTMENIKALIYKMDPTSKNRVLDTVTIDLANIPKNEKITSNFKKILTHSFIGSQHDWLARYVDSLGINDLELGVHLDDNLQRIIEKEVVKVEEIDDSFYKVKSNPSDDNLKIFSYYNFPLLDMTKLDMERKSKESGFGHIMEVTWFCHWPFNDKPCGMCNPCKYTRQEGLGRRVSNVTLLMLLNRKINSKYSGLKKRLNFLR

SEQ ID NO: 43295 - protein, 221 aa, Virgibacillus necropolis
  misc_feature (1)..(221): tr|A0A221MA59|A0A221MA59_9BACI 7-cyano-7-deazaguanine s ynthase OS=Virgibacillus necropolis OX=163877 GN=queC P E=3 SV=1
MKMSKKAVVVFSGGQDSTTCLFWALEQFEEVEAVTFQYGQRHIAELDCAKEICQKLGVLHHELDMSLLNQLAPNALTRDDIAITEDEGELPSTFVPGRNLLFLSFAGVLAKQIGAKHLITGVSEADYSGYPDCRDGFMKSLNVTLNLSMDDTFVIHTPLMWLDKSQVWELSDKLNAFEFVKTHTLTCYNGVKGSGCGDCPACILRQRGLENYKKKKEGEVV

SEQ ID NO: 43296 - protein, 220 aa, Virgibacillus phasianinus
  misc_feature (1)..(220): tr|A0A220U3N9|A0A220U3N9_9BACI 7-cyano-7-deazaguanine s ynthase OS=Virgibacillus phasianinus OX=2017483 GN=queC PE=3 SV=1
MNKKAVVVFSGGQDSTTCMFWALKKFDQVEAVTFQYGQRHIAELDCAREICQTLGVPHHELDMSLLNQLAPNALTRNDIEITESEGELPNTFVPGRNLLFLSFAGVLAKQIGAQHLITGVSEADFSGYPDCRDGFMKSLNVTLNLSMDDTFVIHTPLMWLDKSEVWELSDQLDAFEFVKQHTLTCYNGVKGSGCGECPSCVLRQRGLEQYEQKKEAGEVI

SEQ ID NO: 43297 - protein, 219 aa, Virgibacillus profundi
  misc_feature (1)..(219): tr|A0A2A2I7U9|A0A2A2I7U9_9BACI 7-cyano-7-deazaguanine s ynthase OS=Virgibacillus profundi OX=2024555 GN=queC PE =3 SV=1
MENEKAIVVFSGGQDSTTCLFWAKEQFKAVETVTFDYGQKHKLEIECAKEIAEDLGVKHHILDMSLLHQLAPNALTREAIEVVDGDGTELPNTFVPGRNLLFLSFAGVLAKQVGAKHLVTGVSETDFSGYPDCRDSFIKSLNVTLNLAMDEEFIINTPLMRLDKREVWALSDELGVMNLIREKTLTCYNGIKADGCGECPACKLRNNGLEQYLRNKGEE

SEQ ID NO: 43298 - protein, 221 aa, Virgibacillus soli
  misc_feature (1)..(221): tr|A0A0Q9XYQ9|A0A0Q9XYQ9_9BACI 7-cyano-7-deazaguanine s ynthase OS=Virgibacillus soli OX=480284 GN=queC PE=3 SV =1
MDDRKAVVVFSGGQDSTTCLFWALEKFEHVEAVTFQYGQRHIAELECAREICMKLNVHHHELDMTLLNQLAPNALTRADMEIKEGDNELPSTFVPGRNLLFLSFAAVLAKQINAKHLITGVSETDFSGYPDCRDGFIKSLNVTLNLSMDETFVIHTPLMWRDKSDVWALSDQLGAFDFVKEHTLTCYNGIKASGCGECPACQLRNRGLEQYEELRQGGTIK

SEQ ID NO: 43299 - protein, 219 aa, Virgibacillus sp.
  misc_feature (1)..(219): tr|A0A268I0E1|A0A268I0E1_9BACI 7-cyano-7-deazaguanine s ynthase OS=Virgibacillus sp. 7505 OX=2022548 GN=queC PE =3 SV=1
MKKGKAIVVFSGGQDSTTCLFWAMEQFEEVEAVTFNYNQRHSLEIEVAEQIAKEQGIRHHVLDMSLLNQLAPNALTRDDIEIEQQEGELPSTFVPGRNLVFLSFAAILAHQVGAKHLVTGVCETDFSGYPDCRDIFVKSLNVSLNLSMDKDFVIHTPLMWLDKAETWELADQLGQLDYVKEKTLTCYNGIIAEGCGECPACKLRQNGLDQYEAKKAEQV

SEQ ID NO: 43300 - protein, 232 aa, Vitiosangium sp.
  misc_feature (1)..(232): tr|A0A2T4VR61|A0A2T4VR61_9DELT 7-cyano-7-deazaguanine s ynthase OS=Vitiosangium sp. GDMCC 1.1324 OX=2138576 GN= queC PE=3 SV=1
MSATKRAVVLLSGGLDSTTCLAMAKADGFEPVCLAVSYGQRHAVELERARRVTQAMGVKDFRVVTVDLRQVGGSALTADIDVPKDRPENEMSHGIPITYVPARNALFLSLALGLAEVVGASDIYIGVNAVDYSGYPDCRPEFIRAFEQMATLATKAGVEGTRFKVHAPLSGMSKADIIREGVRLGVDYSMTHSCYDPDAEGRACGRCDSCVLRRRGFEQAGVADPTTYVKGA

SEQ ID NO: 43301 - protein, 237 aa, Vitreoscilla filiformis
  misc_feature (1)..(237): tr|A0A221KBX6|A0A221KBX6_VITFI 7-cyano-7-deazaguanine s ynthase OS=Vitreoscilla filiformis OX=63 GN=queC PE=3 S V=1
MSVSPRGALVLFSGGQDSTACLAWALERFSRVETLGFDYGQRHRIELDCRLTVRTELARQFPAWAARLGEDHLLDLSVLGQISDCALTAERAIEMQANGLPNTFVPGRNLLFLTFAATLAYRRGLSVLVGGMCETDYSGYPDCRDNTLKALQVALSLGLDGPMTVETPLMFLDKADTWALTQQLGGEALNRLIVEHTHTCYLGERGTLHPWGHGCGHCPACELRAKGWDAWQQRCRP

SEQ ID NO: 43302 - protein, 230 aa, Vogesella indigofera
  misc_feature (1)..(230): tr|A0A495B5B4|A0A495B5B4_VOGIN 7-cyano-7-deazaguanine s ynthase OS=Vogesella indigofera OX=45465 GN=queC PE=3 S V=1
MNKTSKALVVLSGGQDSTTCLFWALREFGAANVEAVTFDYGQRHRIELDAARKVAELAGVRQTLLPIDTFAAIGGNALTDDSIAPEQGARDDGDSTIPNTFVPGRNLIFLSFAAAFAYGRGIEHVVTGVAQTDYSGYPDCRENTLKALELALRLGMDSRVTLHTPLMFMSKAETVQLAQEVGAMDAMAWSHTCYNGAVPPCGHCAACELRAKGFAEAGVADPLVVRCGGH

SEQ ID NO: 43303 - protein, 231 aa, Vogesella sp.
  misc_feature (1)..(231): tr|A0A1C6MHP2|A0A1C6MHP2_9NEIS 7-cyano-7-deazaguanine s ynthase OS=Vogesella sp. LIG4 OX=1192162 GN=queC PE=3 S V=1
MPNNTRKALVVLSGGQDSTTCLYWALREFGAANVEAVTFDYGQRHRVELDAARKVAAMAGVRQTVLPIDTFAAIGGNALTDDAITPEAGARDDGDAALPNTFVPGRNLVFLSFAAAFAYTRGIEHVVTGVAQTDYSGYPDCRENTLKALELTLRLGMDSRVTLHTPLMFMSKAETVHLAQQVGAMEALAWSHTCYNGEVPPCGHCASCELRAKGFDEAGVIDPLLLRSQGA

SEQ ID NO: 43304 - protein, 230 aa, Vogesella sp.
  misc_feature (1)..(230): tr|A0A0J5GIE0|A0A0J5GIE0_9NEIS 7-cyano-7-deazaguanine s ynthase OS=Vogesella sp. EB OX=1526735 GN=queC PE=3 SV= 1
MNKTSKALVVLSGGQDSTTCLFWALREFGAANVEAVTFDYGQRHRIELDAARKVAELAGVRQTLLPIDTFAAIGGNALTDAGITPEQGARDDGDSTIPNTFVPGRNLIFLSFAAAFAYGRGIEHVVTGVAQTDYSGYPDCRENTLKALELALRLGMDSRVTLHTPLMFMSKAETVQLAQEVGAMDAMAWSHTCYNGAVPPCGHCAACELRAKGFLEAGVADPLVVRCGGH

SEQ ID NO: 43305 - protein, 228 aa, Volucribacter psittacicida
  misc_feature (1)..(228): tr|A0A4R1FUI6|A0A4R1FUI6_9PAST 7-cyano-7-deazaguanine s ynthase OS=Volucribacter psittacicida OX=203482 GN=queC PE=3 SV=1
MNNLATNNPKGIVIFSGGQDSTTCLLQAIQHYGVENVETISFQYGQRHHIELEKAKWIAQDLKVKQTILDLSVMQSITHNALMDSQQTIAQAKGELPNTFVDGRNALFLLYTAIYAKGQGIKDIITGVCETDFSGYPDCRDVFIKSMNITLNLAMDYQFNIITPLMYLTKAQTWQLADELGYLDYVRQHTHTCYQGVQGGCGQCPSCQLREKGLQQYLQQKQGGNNGI

SEQ ID NO: 43306 - protein, 219 aa, Vulcanibacillus modesticaldus
  misc_feature (1)..(219): tr|A0A1D2YW51|A0A1D2YW51_9BACI 7-cyano-7-deazaguanine s ynthase OS=Vulcanibacillus modesticaldus OX=337097 GN=q ueC PE=3 SV=1
MNRDKAVVVFSGGQDSTTCLFWAKQRYKEVIAISFDYNQKHKLELECAKDICKKHGIEHHILDLNLLNQLAPNSLTRVDIEVDKEAPKDRLPNSFVDGRNMLFLTFAAVFAKQRGINQIITGVSQSDYSGYPDCRDVFIKSLNVTLNLAMDYQFEIHTPLMWINKEETWKMAYDLGVLDIIKNETLTCYNGIKGDGCGECPACKLRNKGYQDFEKKYLK

SEQ ID NO: 43307 - protein, 227 aa, Vulcaniibacterium tengchongense
  misc_feature (1)..(227): tr|A0A3N4V912|A0A3N4V912_9GAMM 7-cyano-7-deazaguanine s ynthase OS=Vulcaniibacterium tengchongense OX=1273429 G N=queC PE=3 SV=1
MKKAVVLVSGGMDSAVVLAIARAQGFATHALSVRYGQRHTSELEAAARVARALGAAAHKVVDVDLRSIGGSALTDDAIAVPTGDAGATAAGAIPSTYVPARNTIMLSLALGWAEVLGAADIFCGVNAVDYSGYPDCRPEFVAAFERLANLATKAGVEGAGIRVHAPLQYLSKADIVREGLRLGVDFAETVSCYQADAQGRACGRCDACRLRAQGFAAAGAADPTRYA

SEQ ID NO: 43308 - protein, 231 aa, Vulgatibacter incomptus
  misc_feature (1)..(231): tr|A0A0K1PF64|A0A0K1PF64_9DELT 7-cyano-7-deazaguanine s ynthase OS=Vulgatibacter incomptus OX=1391653 GN=queC P E=3 SV=1
MKRGVVLLSGGLDSTTCLAIATRRDGLEAHCLSFDYGQRHRQEIEHAATVAAALGAASHRVARMDLSEVSRSALLDRTIEVPKDREPGRIGDDLPSTYVPARNTIFLAVALGMAETLGAEAIYLGVNALDYSGYPDCRPAFVKAFADLARAACEDRAPRIESPLLYLTKAEIIRLGSSLGVDYSITHSCYDPSAEGWACGRCDACLLRSRGFAEAGVPDPTRYTLGEAGRA

SEQ ID NO: 43309 - protein, 212 aa, Waddlia chondrophila
  misc_feature (1)..(212): tr|D6YWT9|D6YWT9_WADCW 7-cyano-7-deazaguanine synthase OS=Waddlia chondrophila (strain ATCC VR-1470 / WSU 86-1 044) OX=716544 GN=queC1 PE=3 SV=1
MKAIVLLSGGIDSTVVLAMAQSLGRECTALSFDYGQRHKVELEHAAHIAHYYKVPQIIINISPACFENTALVNALNVPKNRTLDEISKGGIPSTYVPARNTLFLAYAAGQAEIMNAEEIHCGPNLLDRNCYPDCRPEFYSAFQQVLASATKQGAEGNPPRIVTPLINWDKNRIVQEGRKLGAPLDTTFSCYSPSAGKACGMCDACILRQEAL

SEQ ID NO: 43310 - protein, 228 aa, Waddlia chondrophila
  misc_feature (1)..(228): tr|F8LBP9|F8LBP9_9BACT 7-cyano-7-deazaguanine synthase OS=Waddlia chondrophila 2032/99 OX=765953 GN=queC PE=3 SV=1
MRCKQALVVHSGGMDSSLCLKLAIDRHGVDQVLSISFRYGQRHSNELVQAAKICRDWGVDHCVIQLDCLQEITDNALMNTEIAIEHSQGRPPNTLVLGRNGLMARLAAIHANHLGAEKIYMGVIEVEGANSGYRDCSRNYMNLMEKILRIDLDNPRFEIVTPIVQMTKCQTMALADQLGVLDYLLKETITCYEGIGGRGCQQCPACKLRNEGVDRYKRLSIGYVLTKN

SEQ ID NO: 43311 - protein, 211 aa, Waddliaceae bacterium
  misc_feature (1)..(211): tr|A0A2E3LW96|A0A2E3LW96_9BACT 7-cyano-7-deazaguanine s ynthase OS=Waddliaceae bacterium OX=2026802 GN=queC PE= 3 SV=1
MDSSICLALAIKKYSADEVLSLSFRYGQRHSPELIQAKKISEEWNVDHIELSIDCLQEITDNALMNTDMVIDYTEQVPNTLVLGRNGLMARIAAIHAHSLGAKKIALGVMGLEEANSGYRDCSRRYMNLMEEILRIDLDDESFEVLTPLVDMTKAETMKLADELGVLDYLLENTITCYEGLPKEGCKVCPACKLRNEGILEYRQTQYATSL

SEQ ID NO: 43312 - protein, 224 aa, Waddliaceae bacterium
  misc_feature (1)..(224): tr|A0A2E3LZG9|A0A2E3LZG9_9BACT 7-cyano-7-deazaguanine s ynthase OS=Waddliaceae bacterium OX=2026802 GN=queC PE= 3 SV=1
MKAIVLLSGGLDSCVVLALAKEQSRDCHALTFDYGQRHHIELERAKALCEHYQVPQTIIHIDHTAFSKSSLVHDGKVPRNRTVLEDAKKSIPNTYVPARNTIFLAHAVGLAEQLDAGEIHVGINCMDAQPYPDCRPAYLQAMQNTMNLCTKQACEDKGPRLVTPLLHKTKVEIIQAGLHLNAPLDITSSCYDPMPGGEACGECLACRLRDQAFMEMQQLASTHP

SEQ ID NO: 43313 - protein, 226 aa, Wenzhouxiangella marina
  misc_feature (1)..(226): tr|A0A0K0XT00|A0A0K0XT00_9GAMM 7-cyano-7-deazaguanine s ynthase OS=Wenzhouxiangella marina OX=1579979 GN=queC P E=3 SV=1
MAKESIERAVVLLSGGLDSATVLAMARDQGFECHTLSVDYGQRHRSELEASRRLSESLGARSHRVVSVDLRAIGGSALTDDIDVPTEMGEGIPVTYVPARNTLMLALALGHAEVQAARHLFIGVNAVDYSGYPDCRPQFIAAFEDLCSLATKAGDEGQRFEIHTPLIHLSKAEIIRQGTALGVNYADTISCYQADEQGRACGVCDSCRLRKAGFEDAGIKDPTRYV

SEQ ID NO: 43314 - protein, 228 aa, Wenzhouxiangella sediminis
  misc_feature (1)..(228): tr|A0A3E1K9C9|A0A3E1K9C9_9GAMM 7-cyano-7-deazaguanine s ynthase OS=Wenzhouxiangella sediminis OX=1792836 GN=que C PE=3 SV=1
MSESVRKAVVLVSGGLDSATVLAEAVAAGYECHTLAVDYGQRHRAELAAARRVSEGLGAASHRVVGVDLRAIGGSALTDDIDVPEEETPGIPATYVPARNTLMLSLALGHAEVLGSLDLFVGVNAVDYSGYPDCRPQFVVAFEALCQVATKVGVEGGRFRVHAPLISLSKADIVRRGTALGVDYSRTVSCYQADEDGRACGRCDSCRLRRAGFEAAGLADPTRYAPDA

SEQ ID NO: 43315 - protein, 228 aa, Wenzhouxiangella sp.
  misc_feature (1)..(228): tr|A0A372BYC9|A0A372BYC9_9GAMM 7-cyano-7-deazaguanine s ynthase OS=Wenzhouxiangella sp. 15181 OX=2301224 GN=que C PE=3 SV=1
MSSGNRKGVVLLSGGLDSATVLAEAVAAGYECHSLAVDYGQRHRAELDAAQQISRVQGAASHRVVSVDLRAIGGSALTDDIDVPETESSGIPVTYVPARNTLMLSLALGLAEVIEARDLFVGVNAVDYSGYPDCRAQFIVAFEALCQVATRAGVDGERFRVHAPLISLSKADIIRRGVSLGVDYSMTVSCYQADSDGLACGRCDSCRLRRAGFESAGVSDPTRYVMHD

SEQ ID NO: 43316 - protein, 227 aa, Westiellopsis prolifica; identical to SEQ ID NO: 39588
  misc_feature (1)..(227): tr|A0A4Q9J9P1|A0A4Q9J9P1_9CYAN 7-cyano-7-deazaguanine s ynthase OS=Westiellopsis prolifica IICB1 OX=1970206 GN= queC PE=3 SV=1

SEQ ID NO: 43317 - protein, 380 aa, Winogradskyella sp.
  misc_feature (1)..(380): tr|A0A1Y0MH77|A0A1Y0MH77_9FLAO ExsB family protein OS=W inogradskyella sp. PC-19 OX=754417 GN=BTO05_08535 PE=4 SV=1
MNLEENKQNICSRCVMDGSDPEITYNSQGVCNHCERYDSLVQTRTFSGDVAKTELSKVIASIKASGKNKEYDCIIGVSGGVDSTYVAYRIKEMGLNPLAIHFDNGWNSELAVSNIEKTLDKLDIDLHTYVIDWDVFSDLQKAFLNASTPDGEIPTDHAINALLFKEASKRGIKYIISGMNFATESMAVRMWSYGHSDWTYIKDVYKKFGNGQSLKPYPHFSFFDLFNWTFLKRIKVVSILNYMDYNKDEAMEVLKNELDWVYYGGKHYESVYTRFYQGYILPKKFNIDKRRGHVSDLIRAGQLTRKEALKELEKETYPSAEMLNHDMDFVHKKFDYTEKEFNQIMKQPTKSFLEFKNKASKVDKIKLVLNFLRKKGILSK

SEQ ID NO: 43318 - protein, 225 aa, Woeseia oceani
  misc_feature (1)..(225): tr|A0A193LL21|A0A193LL21_9GAMM 7-cyano-7-deazaguanine s ynthase OS=Woeseia oceani OX=1548547 GN=queC PE=3 SV=1
MENEFKREHALVVLSGGQDSTTCLYWALARFGEVQCISFDYGQRHRIELQCAERIAARAGVPQVLIPMNTLAALGGNSLTDSSIAVGAEAEPETGLPNSFVPGRNLLFLTAAAAFAWQRGIHHLVTGVAQTDYSGYPDCREETIAALQSALRLGMETEVTIHTPLMHLSKKETVLLARDEGALEAMADTHTCYNGVRPPCGECPACILRARGFAEAGIADPLVAS

SEQ ID NO: 43319 - protein, 230 aa, Woeseiaceae bacterium
  misc_feature (1)..(230): tr|A0A2D9M1W7|A0A2D9M1W7_9GAMM 7-cyano-7-deazaguanine s ynthase OS=Woeseiaceae bacterium OX=2026806 GN=CMP01_03 010 PE=3 SV=1
  misc_feature (23)..(23): Xaa can be any naturally occurring amino acid
  misc_feature (100)..(100): Xaa can be any naturally occurring amino acid
  misc_feature (122)..(122): Xaa can be any naturally occurring amino acid
  misc_feature (145)..(145): Xaa can be any naturally occurring amino acid
  misc_feature (159)..(159): Xaa can be any naturally occurring amino acid
MLIEQTKDGQATAILCSAGLDSXVLLAAEARSRFVQPVYVAAGLAWESDELLALNQLLETQAFLTNVGRPVRLEATVHDVYPPSHWAIKGQAPAYDTPDXDVYLVGRNAILLSKVAVFCCQXGIGRIAIGSLANNPFPDGTPEFXEAMANALSLGLAHXLSIVAPLTKHHKADVIALGIELKVPLELTLSCMQPENGLHCGLCSKCRERRDAFNEAGVPDLTDYKMPSPR

SEQ ID NO: 43320 - protein, 267 aa, Woeseiaceae bacterium
  misc_feature (1)..(267): tr|A0A2D9M288|A0A2D9M288_9GAMM 7-cyano-7-deazaguanine s ynthase OS=Woeseiaceae bacterium OX=2026806 GN=CMP01_03 700 PE=3 SV=1
  misc_feature (204)..(205): Xaa can be any naturally occurring amino acid
  misc_feature (208)..(208): Xaa can be any naturally occurring amino acid
  misc_feature (225)..(225): Xaa can be any naturally occurring amino acid
  misc_feature (228)..(228): Xaa can be any naturally occurring amino acid
  misc_feature (232)..(232): Xaa can be any naturally occurring amino acid
  misc_feature (252)..(252): Xaa can be any naturally occurring amino acid
MIIQNKASSCQVEEFDLLPSMLMVQLSTRGKPAMRRAILCSGGLDSAVLVASELEETRGLYGEKAYIQPIYVSSGFSWETGERAQVIKLIQSKQLAGLIEPLACLECPVSDTYPSKHWALNGNPPAYDTPDEDVYLVGRNILLLAKVSTYCAINQIERIAIGPLAGNPFPDATPQFFASMQQALSQGLDHELEIVAPFSELSKXXVIXRGHSLGVPFELTVSCMXPLXTKHXGRCSKCRERLLAFGASGITXPASYDFKPSDIIRGL

SEQ ID NO: 43321 - protein, 220 aa, Wohlfahrtiimonas chitiniclastica
  misc_feature (1)..(220): tr|A0A162VSP1|A0A162VSP1_9GAMM 7-cyano-7-deazaguanine s ynthase OS=Wohlfahrtiimonas chitiniclastica OX=400946 G N=queC PE=3 SV=1
MNKDRAIVVFSGGQDSTTCLFWAQKQFKEVIALTFDYGQRHSNEVQHAKAIAEMLGVQWLSIELDLFQKLTKNALTSPDVAIEMAEGELPSTFVPGRNHLFFSIAAMVAYQKDAKHIVVGVSETDFSGYPDCRDQFVKSLNVTLDLAMEAPFEIHTPLMWRDKAAVWALSDELGAFEFVRDHTLTCYEGIPAAGCGKCPACILRQNGLETYLAEKAKGEA

SEQ ID NO: 43322 - protein, 220 aa, Wohlfahrtiimonas chitiniclastica
  misc_feature (1)..(220): tr|L8XVE1|L8XVE1_9GAMM 7-cyano-7-deazaguanine synthase OS=Wohlfahrtiimonas chitiniclastica SH04 OX=1261130 GN= queC PE=3 SV=1
MNKDRAIVVFSGGQDSTTCLFWAQKQFKEVIALTFDYGQRHSNEVQHAKAIAEMLGVQWLSIELDLFQKLTKNALTSPDVAIEMAEGELPSTFVPGRNHLFFSIAAMVAYQKDAKHIVVGVSETDFSGYPDCRDQFVKSLNVTLDLAMEAPFEIHTPLMWRDKAAVWALSDELGVFEFVRDHTLTCYEGIPAAGCGKCPACILRQNGLETYLAEKAKGAA

SEQ ID NO: 43323 - protein, 222 aa, Wohlfahrtiimonas sp.
  misc_feature (1)..(222): tr|A0A256C5P1|A0A256C5P1_9GAMM 7-cyano-7-deazaguanine s ynthase OS=Wohlfahrtiimonas sp. G9077 OX=1980118 GN=que C PE=3 SV=1
MIVNKDRAIVVFSGGQDSTTCLFWAQKQFKEVIALTFDYGQRHSNEVQHAKAIADKLGVEWLSIELDLFQKLTKNALTSPDVAIEMAEGELPSTFVPGRNHLFFSIAAMVAYQRDAKHIVVGVSETDFSGYPDCRDQFVKSLNVTLDLAMEAPFEIHTPLMWRDKAAVWALSDELGAFEFVRDHTLTCYEGIPAAGCGKCPACILRQNGLETYLADKANKEA

SEQ ID NO: 43324 - protein, 233 aa, Wolinella succinogenes; identical to SEQ ID NO: 38710
  misc_feature (1)..(233): sp|Q7M8H4|QUEC_WOLSU 7-cyano-7-deazaguanine synthase OS =Wolinella succinogenes (strain ATCC 29543 / DSM 1740 / LMG 7466 / NCTC 11488 / FDC 602W) OX=273121 GN=queC PE =3 SV=1

SEQ ID NO: 43325 - protein, 249 aa, Xanthobacter autotrophicus
  misc_feature (1)..(249): tr|A7IGH6|A7IGH6_XANP2 7-cyano-7-deazaguanine synthase OS=Xanthobacter autotrophicus (strain ATCC BAA-1158 / P y2) OX=78245 GN=queC PE=3 SV=1
MTEAQAHAEEGALVLFSGGQDSATCLAYALERFGRVETLGFHYGQRHAVELERRPVLRDAFATLKPAWASRLGADHMLDMPVLGQISETALTRDVAVEMAEGGLPNTFVPGRNLVFLTFAAALAYRRGLRHIIGGMCETDFSGYPDCRDDTVKAMQVALNLGMEKRFVLHTPLMWIDKAETWGLAERLGGTALVDLIVEDAHTCYLGERGKRHAWGYGCGECPACKLRADGFARYRAGQGVERRAAATK

SEQ ID NO: 43326 - protein, 243 aa, Xanthobacter tagetidis
  misc_feature (1)..(243): tr|A0A3L7A7S4|A0A3L7A7S4_9RHIZ 7-cyano-7-deazaguanine s ynthase OS=Xanthobacter tagetidis OX=60216 GN=queC PE=3 SV=1
MRASGIAGEGALVLFSGGQDSTTCLAYALERFGRVETLGFDYGQRHRVELERRPVLRDALAGLKPGWAERLGADHTLDLSVLGALSETALTRNVAIEMEDGGLPNTFVPGRNIVFLTFAAALAYRRGLRHIVGGMCETDFSGYPDCRDDTIKALQVALNLGMDRRLVLHTPLMFIDKAETWALAERLGGPPLVDTIVEETHTCYLGERGTRRDWGYGCGACPACALRADGFARYRNTLRSAPR

SEQ ID NO: 43327 - protein, 248 aa, Xanthobacteraceae bacterium
  misc_feature (1)..(248): tr|A0A521W1E7|A0A521W1E7_9RHIZ 7-cyano-7-deazaguanine s ynthase OS=Xanthobacteraceae bacterium OX=2021379 GN=qu eC PE=3 SV=1
MAQGGIDEAEDNGALVLFSGGQDSATCLAWALARFSRVETVGFAYGQRHAVELDCRADLVRGLTALRPDWALGLGEAHTLDVGVIGALSDTALTREREIELGEGGLPNTFVPGRNLIFVVLAAALAYRRGLKHIVAGMCETDYSGYPDCRDDTLKALQVAINLGMDRRFVLHTPLMWRDKAATWRLAQELGGVDLVKLIREHSHTCYLGERGQWHEWGYGCGTCPACRLRADGWTRYAAASSTGEPAA

SEQ ID NO: 43328 - protein, 232 aa, Xanthomonadaceae bacterium
  misc_feature (1)..(232): tr|A0A2M9ECW2|A0A2M9ECW2_9GAMM 7-cyano-7-deazaguanine s ynthase OS=Xanthomonadaceae bacterium NML95-0200 OX=203 2577 GN=queC PE=3 SV=1
MSQTAKKRAVVLVSGGMDSAVVAAIARAQGFEVYALSVAYGQRHESELAAAARVAAMTAAVAHKTVNIDLRSIGGSALTDDISVPTDQDGHQIGQDIPSTYVPARNTIMLSVALGWAEVLDARDIFCGVNAVDYSGYPDCRPAFIEAFEHLANLATKAGVEGSGFRIHAPLMAMGKGEIVQRGVALGVDFSQTVSCYQADSDGRACGHCDACVLRAQGFKDAKILDNTRYVV

SEQ ID NO: 43329 - protein, 232 aa, Xanthomonadaceae bacterium; identical to SEQ ID NO: 43328
  misc_feature (1)..(232): tr|A0A2M9ENF5|A0A2M9ENF5_9GAMM 7-cyano-7-deazaguanine s ynthase OS=Xanthomonadaceae bacterium NML07-0707 OX=203 2574 GN=queC PE=3 SV=1

SEQ ID NO: 43330 - protein, 224 aa, Xanthomonadales bacterium
  misc_feature (1)..(224): tr|A0A1G3ZXD5|A0A1G3ZXD5_9GAMM 7-cyano-7-deazaguanine s ynthase OS=Xanthomonadales bacterium GWF1_69_6 OX=18026 54 GN=queC PE=3 SV=1
MKKAVVLVSGGMDSAVVLALAREQGFACHALSVSYGQRHTSELAAAAELAVVQGAVEHKVVTVDLRSIGGSALTADIDVPEAAGQGIPVTYVPARNTIMLSIALGWAEVLGADDLFCGVNAVDYSGYPDCRPEFIAAFERLANLATKAGVEGHSLRVHAPLMRLGKADIAREGARLGVDFSRTVSCYQADAEGRACGRCDACRLRAEGFAAAGLADPTRYAPRG

SEQ ID NO: 43331 - protein, 226 aa, Xanthomonadales bacterium
  misc_feature (1)..(226): tr|A0A1Q4FNY5|A0A1Q4FNY5_9GAMM 7-cyano-7-deazaguanine s ynthase OS=Xanthomonadales bacterium 63-13 OX=1895867 G N=queC PE=3 SV=1
MNRESGKLAVVLVSGGMDSAVTLAIARERGFAIHALSVAYGQRHGSELVAAARIATTLGALVHKTVSVDLRSIGGSALTADIEVPEQGGEGIPLTYVPARNTIMLSIALGWAEVLGANDIFCGVNAVDYSGYPDCRPAFIESFERLANLATRSGVEGAGIRVHAPLMNLSKADIAREGVRLGIDFSATVSCYSADAEGRACGHCDACRLRAEGFAAAGIPDPTRYR

SEQ ID NO: 43332 - protein, 941 aa, Xanthomonas albilineans
  misc_feature (1)..(941): tr|D2UDP3|D2UDP3_XANAP Amino acid adenylationalbicidin synthetase protein OS=Xanthomonas albilineans (strain G PE PC73 / CFBP 7063) OX=380358 GN=albIV PE=4 SV=1
MNETATVTKATLSSAKASTTPAFVHQWFEAQVSSTPDAPAAFLGERRMSYGQLNTRANRLARLLQSQGVGPGARVAVWMNRSPECLAALLAVMKAGAAYVPIDLSLPIRRVQYILQDSQARLVLVDEEGQGRLGELELSAMTAVDVCGTLDGEEANLDLPCDPAQPVYCIYTSGSTGSPKGVLVRHSGLANYVAWAKRQYVTADTTSFAFYSSLSFDLTVTSIYVPLVAGLCVHVYPEQGDDVPVINRVLDDNQVDVIKLTPSHMLMLRNAALATSRLKTLIVGGEDLKAALAYDIHQRFRRDVAIYNEYGPTETVVGCAIHRYDPATEREGSVPIGVPIDHTSLHLLDERLQPVAPGEVGQIHIGGAGVAIGYVNKPEITDAQFIDNPFEGGGRLYASGDLGRMRADGKLEFLGRKDSQIKLRGYRIELGEIENVLLGHAALRECIVNTTVAPRRDYDSKSLRYCARCGIASNFPNTSFDEHGVCNHCHAYDKYRNVVEDYFRTEDELRTIFEQVKAHNRPRYDCLVAFSGGKDSTYALCRVVDMGLRVLAYTLDNGYISDEAKANVDRVVRELGVDHRYLGTPHMNAIFVDSLNRHSNVCNGCFKTIYTLGINLAHEVGVSDIVMGLSKGQLFETRLSELFRASTFDNQVFEKNLMEARKIYHRIDDAAARLLDTSCVRNDRLLESTRFIDFYRYCSVSRKDMYRYIAERVGWSRPADTGRSTNCLLNDVGIYMHKKQRGYHNYSLPYSWDVRVGHIPREDAMRELEDTDDIDEAKVLGLLKQIGYDSSLIDTQAGDAQLIAYYVAAEELDPVALRNFAAAILPEYMLPSYFVRLDRMPLTPNGKVNRRALPRPELKKNASEAHTEPSSALEQELVQIWKEVLMVDKVGVRDNFFELGGHSLSALMLLYSIAERYQKMVSIQAFSVNPTIEGLSEHLVA

SEQ ID NO: 43333 - protein, 941 aa, Xanthomonas albilineans
  misc_feature (1)..(941): tr|Q70C44|Q70C44_XANAL Non-ribosomal peptide synthase O S=Xanthomonas albilineans OX=29447 GN=albIV PE=4 SV=1
MNETATVTKATLSSAKASITPACVHQWFEAQVSSTPDAPAAFLGERRMSYGQLNTRANRLARLLQSQGVGPGARVAVWMNRSPECLAALLAVMKAGAAYVPIDLSLPIRRVQYILQDSQARLVLVDDEGQGRLDELELGAMTAVDVCGTLDGDEANLDLPCDPAQPVYCIYTSGSTGSPKGVLVRHSGLANYVAWAKRQYVTADTTSFAFYSSLSFDLTVTSIYVPLVAGLCVHVYPEQGDDVPVINRVLDDNQVDVIKLTPSHMLMLRNAALATSRLKTLIVGGEDLKAAVAYDIHQRFRRDVAIYNEYGPTETVVGCAIHRYDPATEREGSVPIGVPIDHTSLHLLDERLQPVAPGEVGQIHIGGAGVAIGYVNKPEITDAQFIDNPFEGSGRLYASGDLGRMRADGKLEFLGRKDSQIKLRGYRIELGEIENVLLGHAALRECIVDTTVAPRRDYDSKSLRYCARCGIASNFPNTSFDEHGVCNHCHAYDKYRNVVEDYFRTEDELRTIFEQVKAHNRLRYDCLVAFSGGKDSTYALCRVVDMGLRVLAYTLDNGYISDEAKANVDRVVRELGVDHRYLGTPHMNAIFVDSLHRHSNVCNGCFKTIYTLGINLAHEVGVSDIVMGLSKGQLFETRLSELFRASTFDNQVFEKNLMEARKIYHRIDDAAARLLDTSCVRNDRLLESTRFIDFYRYCSVSRKDMYRYIAERVGWSRPADTGRSTNCLLNDVGIYMHKKQRGYHNYSLPYSWDVRVGHIPREDAMRELEDTDDIDEAKVLGLLKQIGYDSSLIDTQAGDAQLIAYYVAAEELDPVALRNFAAAILPEYMLPSYFVRLDRMPLTPNGKVNRRALPRPELKKNASEAHTEPSSALEQELVQIWKEVLMVDKVGVRDNFFELGGHSLSALMLLYSIAERYQKMVSIQAFSVNPTIEGLSEHLVA

SEQ ID NO: 43334 - protein, 224 aa, Xanthomonas alfalfae
  misc_feature (1)..(224): tr|A0A1S1XH67|A0A1S1XH67_9XANT 7-cyano-7-deazaguanine s ynthase OS=Xanthomonas alfalfae OX=366650 GN=queC PE=3 SV=1
MKKAVVLLSGGMDSAAVIALAQEQGFAVYALSVRYGQRHTSELDAAARVAAAQGVVAHKVVDVDLRSIGGSALTDDIDVPDAGGDGIPVTYVPARNTIMLSLALGWAEVVGANDLFCGVNAVDYSGYPDCRPEFVRAFEVLANLATKAGVEGAGLRVHAPLQFLSKADIVREGVRLGVDFGLTVSCYRADADGRACGHCDACRLRAAGFADAGVPDPTHYAILS

SEQ ID NO: 43335 - protein, 224 aa, Xanthomonas arboricola
  misc_feature (1)..(224): tr|A0A2S7A6M3|A0A2S7A6M3_9XANT 7-cyano-7-deazaguanine s ynthase OS=Xanthomonas arboricola pv. guizotiae OX=4878 67 GN=queC PE=3 SV=1
MKKAVVLLSGGMDSAAVIALAQEQGFAVHALSVRYGQRHTSELDAAARVAAAQGVIAHKVVDVDLRSIGGSALTDDIDVPDSGGDGIPITYVPARNTIMLSLALGWAEVIGANDLFCGVNAVDYSGYPDCRPEFVRAFEVLANLATKAGVEGAGLRVHAPLQFLSKADIVREGVRLGVDFGLTVSCYRADAGGRACGHCDACRLRAAGFADAGVADPTHYAISP

SEQ ID NO: 43336 - protein, 224 aa, Xanthomonas arboricola
  misc_feature (1)..(224): tr|A0A2S6YTL1|A0A2S6YTL1_9XANT 7-cyano-7-deazaguanine s ynthase OS=Xanthomonas arboricola OX=56448 GN=queC PE=3 SV=1
MKKAVVLLSGGMDSAAVIALAQEQGFAVHALSVRYGQRHTSELDAAARVAAAQGVIAHKVVDVDLRSIGGSALTDDIDVPDAGGDGIPVTYVPARNTIMLSLALGWAEVIGANDLFCGVNAVDYSGYPDCRPEFVRAFEVLANLATKAGVEGAGLRVHAPLQFLSKADIVREGVRLGVDFGLTVSCYRADADGRACGHCDACRLRAAGFADAGVPDPTHYAISP

SEQ ID NO: 43337 - protein, 224 aa, Xanthomonas axonopodis
  misc_feature (1)..(224): tr|A0A2S6YG80|A0A2S6YG80_9XANT 7-cyano-7-deazaguanine s ynthase OS=Xanthomonas axonopodis pv. begoniae OX=47340 3 GN=queC PE=3 SV=1
MKKAVVLLSGGMDSAAVIALAQEQGFAVYALSVRYGQRHTSELDAAARVAAAQGVIAHKVVDVDLRSIGGSALTDDIDVPDAGGDGIPVTYVPARNTIMLSLALGWAEVIGANDLFCGVNAVDYSGYPDCRPEFVRAFEVLANLATKAGVEGAGLRVHAPLQFLSKADIVREGVRLGVDFGLTVSCYRADADGRACGHCDACRLRAAGFVDAGVPDPTHYAILS

SEQ ID NO: 43338 - protein, 224 aa, Xanthomonas axonopodis
  misc_feature (1)..(224): sp|Q8PHW1|QUEC_XANAC 7-cyano-7-deazaguanine synthase OS =Xanthomonas axonopodis pv. citri (strain 306) OX=19048 6 GN=queC PE=3 SV=1
MKKAVVLLSGGMDSAAVIALAQEQGFAVYALSVRYGQRHTSELDAAARVAAAQGVIAHKVVDVDLRSIGGSALTDDIEVPDAGGDGIPVTYVPARNTIMLSLALGWAEVIGANDLFCGVNAVDYSGYPDCRPEFVRAFEVLANLATKAGVEGAGLRVHAPLQFLSKADIVREGVRLGVDFGVTVSCYRADADGRACGHCDACRLRAAGFADAGIPDPTHYAILS

SEQ ID NO: 43339 - protein, 224 aa, Xanthomonas bromi
  misc_feature (1)..(224): tr|A0A1C3NJI3|A0A1C3NJI3_9XANT 7-cyano-7-deazaguanine s ynthase OS=Xanthomonas bromi OX=56449 GN=queC PE=3 SV=1
MKKAVVLLSGGMDSAAVIALAQEQGFAVYALSVRYGQRHTSELDAAARVAAAQGVIAHKVVDVDLRSIGGSALTDDIDVPDAGGDGIPVTYVPARNTIMLSLALGWAEVIGANDLFCGVNAVDYSGYPDCRPEFVRAFEVLANLATKAGVESAGLRVHAPLQFLSKADIVREGMRLGVDFGLTVSCYRANADGRACGHCDACRLRAAGFADAGIPDPTHYAILS

SEQ ID NO: 43340 - protein, 224 aa, Xanthomonas campestris
  misc_feature (1)..(224): tr|A0A3E1LAS0|A0A3E1LAS0_XANCA 7-cyano-7-deazaguanine s ynthase OS=Xanthomonas campestris OX=339 GN=queC PE=3 S V=1
MKKAVVLLSGGMDSAAVIALAQEQGFAVHALSVRYGQRHTSELDAAARVAAAQGVVAHKVVDVDLRSIGGSALTADIDVPEAGGAGIPVTYVPARNTIMLSLALGWAEVVGANDLFCGVNAVDYSGYPDCRPEFVRAFEVLANLATKAGVEGAGLRVHAPLQFLSKADIVREGVRLGVDFGLTVSCYSADADGRACGHCDACRLRAAGFADAGVPDPTHYAISS

SEQ ID NO: 43341 - protein, 224 aa, Xanthomonas campestris
  misc_feature (1)..(224): sp|Q4UXK8|QUEC_XANC8 7-cyano-7-deazaguanine synthase OS =Xanthomonas campestris pv. campestris (strain 8004) OX =314565 GN=queC PE=3 SV=1
MKKAVVLLSGGMDSAAVIALAQEQGFAVHALSVRYGQRHTSELDAAARVAAAQGVVAHKVVDVDLRSIGGSALTADIDVPEAGGAGIPVTYVPARNTIMLSLALGWAEVVGANDLFCGVNAVDYSGYPDCRPEFVRAFEVLANLATKAGVEGAGLRVHAPLQFLSKADIVRAGVRLGVDFGLTVSCYNADADGRACGHCDACRLRAAGFADAGVPDPTHYAISS

SEQ ID NO: 43342 - protein, 224 aa, Xanthomonas cannabis
  misc_feature (1)..(224): tr|A0A0B2CPS8|A0A0B2CPS8_9XANT 7-cyano-7-deazaguanine s ynthase OS=Xanthomonas cannabis pv. cannabis OX=1885894 GN=queC PE=3 SV=1
MKKAVVLLSGGMDSAAVIALAQEQGFVVYALSVRYGQRHTSELDAAARVAAAQGVAAHKVVDVDLRSIGGSALTDDIEVPDAGGEGIPVTYVPARNTIMLSLALGWAEVVGANDLFCGVNAVDYSGYPDCRPEFVRAFEVLANLATKAGVEGVGLRVHAPLQFLSKADIVREGVRLGVDFGLTVSCYRADADGRACGHCDACRLRAAGFADAGVQDPTHYAISS

SEQ ID NO: 43343 - protein, 224 aa, Xanthomonas citri
  misc_feature (1)..(224): tr|A0A220WEZ4|A0A220WEZ4_XANCI 7-cyano-7-deazaguanine s ynthase OS=Xanthomonas citri pv. vignicola OX=473426 GN =queC PE=3 SV=1
MKKAVVLLSGGMDSAAVIALAQEQGFAVYALSVRYGQRHTSELDAAARVADAQGVIAHKVVDVDLRSIGGSALTDDIDVPDAGGDGIPVTYVPARNTIMLSLALGWAEVIGANDLFCGVNAVDYSGYPDCRPEFVRAFEVLANLATKAGVEGAGLRVHAPLQFLSKADIVREGVRLGVDFGLTVSCYRADADGRACGHCDACRLRAAGFADAGIPDPTHYAILS

SEQ ID NO: 43344 - protein, 224 aa, Xanthomonas citri
  misc_feature (1)..(224): tr|A0A2H1SGE4|A0A2H1SGE4_XANCI 7-cyano-7-deazaguanine s ynthase OS=Xanthomonas citri pv. fuscans OX=366649 GN=q ueC PE=3 SV=1
MKKAVVLLSGGMDSAAVIALAQEQGFAVYALSVRYGQRHTSELDAAARIADAQGVIAHKVVDVDLRSIGGSALTDDIDVPDAGGDGIPVTYVPARNTIMLSLALGWAEVIGANDLFCGVNAVDYSGYPDCRPEFVRAFEVLANLATKAGVEGAGLRVHAPLQFLSKADIVREGVRLGVDFGLTVSCYRADADGRACGHCDACRLRAAGFADAGIPDPTHYAILS

SEQ ID NO: 43345 - protein, 224 aa, Xanthomonas codiaei
  misc_feature (1)..(224): tr|A0A2S7CYQ1|A0A2S7CYQ1_9XANT 7-cyano-7-deazaguanine s ynthase OS=Xanthomonas codiaei OX=56463 GN=queC PE=3 SV =1
MKKAVVLLSGGMDSAAVIALAQEQGFAVYALSVRYGQRHTSELDAAARVAAAQGVVAHKLVDVDLRSIGGSALTDDIEVPEAGGDGIPVTYVPARNTIMLSLALGWAEVVGANDLFCGVNAVDYSGYPDCRPEFVRAFEVLANLATKAGVEGAGLRVHAPLQFLSKADIVREGVRLGVDFGLTVSCYRADAEGRACGHCDACRLRAAGFADAGVPDPTHYAISS

SEQ ID NO: 43346 - protein, 224 aa, Xanthomonas cucurbitae
  misc_feature (1)..(224): tr|A0A2S7DT00|A0A2S7DT00_9XANT 7-cyano-7-deazaguanine s ynthase OS=Xanthomonas cucurbitae OX=56453 GN=queC PE=3 SV=1
MKKAVVLLSGGMDSAAVVALAQEQGFAVHALSVRYGQRHTSELDAAARVAAAQGVVAHKVVEVDLRSIGGSALTDDIDVPDAGGEGIPVTYVPARNTIMLSLALGWAEVVGANDLFCGVNAVDYSGYPDCRPEFVRAFEVLANLATKAGVEGAGMRVHAPLQFLSKADIVREGLRLGVDFALTVSCYRADAAGRACGHCDACRLRAAGFADAGVADPTHYAISP

SEQ ID NO: 43347 - protein, 224 aa, Xanthomonas cynarae
  misc_feature (1)..(224): tr|A0A2S7AZS1|A0A2S7AZS1_9XANT 7-cyano-7-deazaguanine s ynthase OS=Xanthomonas cynarae OX=109214 GN=queC PE=3 S V=1
MKKAVVLLSGGMDSAAVVALAQEQGFAVHALSVRYGQRHTSELDAAARVATAQGVIAHKVVDVDLRSIGGSALTADIDVPDAGGDGIPVTYVPARNTIMLSLALGWAEVIGANDLFCGVNAVDYSGYPDCRPEFVRAFEVLANLATKTGVEGAGLRVHAPLQFLSKADIVREGVRLGVDFGLTVSCYRADADGRACGHCDACRLRAAGFTDAGIPDPTHYAISS

SEQ ID NO: 43348 - protein, 224 aa, Xanthomonas dyei
  misc_feature (1)..(224): tr|A0A2S7BYY2|A0A2S7BYY2_9XANT 7-cyano-7-deazaguanine s ynthase OS=Xanthomonas dyei OX=743699 GN=queC PE=3 SV=1
MKKAVVLLSGGMDSAAVIALAQEQGFAVYALSVRYGQRHTSELDAAARVAAAQGVVAHKVVDVDLRSIGGSALTDDIEVPEAGGDGIPVTYVPARNTIMLSLALGWAEVVGANDLFCGVNAVDYSGYPDCRPEFVRAFEILANLATKAGVEGAGLRVHAPLQFLSKADIVREGVRLGVDFGLTVSCYRADADGRACGHCDACRLRAAGFADAGVQDPTHYTISS

SEQ ID NO: 43349 - protein, 224 aa, Xanthomonas euvesicatoria; identical to SEQ ID NO: 43334
  misc_feature (1)..(224): tr|A0A2S7EGV7|A0A2S7EGV7_XANEU 7-cyano-7-deazaguanine s ynthase OS=Xanthomonas euvesicatoria pv. citrumelonis O X=189396 GN=queC PE=3 SV=1

SEQ ID NO: 43350 - protein, 224 aa, Xanthomonas floridensis
  misc_feature (1)..(224): tr|A0A1A9M8T8|A0A1A9M8T8_9XANT 7-cyano-7-deazaguanine s ynthase OS=Xanthomonas floridensis OX=1843580 GN=queC P E=3 SV=1
MKKAVVLLSGGMDSAAVIALAQEQGFAVYALSVRYGQRHTSELDAAARIAAAQGVVAHKVVDVDLRSIGGSALTDDIEVPDAGGDGIPVTYVPARNTIMLSLALGWAEVVGANDLFCGVNAVDYSGYPDCRPEFVRAFEVLANLATKAGVEGAGLRVHAPLQFLSKADIVREGVRLGVDFGLTVSCYRADADGRACGHCDACRLRAAGFADAGVQDPTHYAISS

SEQ ID NO: 43351 - protein, 224 aa, Xanthomonas fragariae
  misc_feature (1)..(224): tr|A0A1Y6HA48|A0A1Y6HA48_9XANT 7-cyano-7-deazaguanine s ynthase OS=Xanthomonas fragariae OX=48664 GN=queC PE=3 SV=1
MKKAVVLLSGGMDSAAVIALAQEQGFAVYALSLRYGQRHTSELDAAARVAAAQGVITHKVLDVDLRSIGGSALTDDIEVPEAGGDGIPVTYVPARNTIMLSLALGWAEVIGANDLFCGVNAVDYSGYPDCRPEFVRAFEVLANLATKAGVEGAGLRVHAPLQFLSKADIVREGVRLGVDFGLTVSCYRADANGRACGHCDACRLRAAGFADAGVPDPTHYAISS

SEQ ID NO: 43352 - protein, 196 aa, Xanthomonas gardneri
  misc_feature (1)..(196): tr|F0C1U8|F0C1U8_9XANT 7-cyano-7-deazaguanine synthase OS=Xanthomonas gardneri ATCC 19865 OX=925777 GN=XGA_081 0 PE=3 SV=1
MTIKGKATSLDSAYLAGVSQRRPPPPPPPPPPPPPPPPPTAPPPPPADIDVPDAGGDGIPVTYVPARNTIMLSLALGWAEVIGANDLFCGVNAVDYSGYPDCRPEFVRAFEVLANLATKAGVEGAGLRVHAPLQFLSKADIVREGVRLGVDFGLTVSCYRADADGRACGHCDACRLRAAGFTDAGIPDPTHYAISS

SEQ ID NO: 43353 - protein, 224 aa, Xanthomonas gardneri
  misc_feature (1)..(224): tr|A0A0G8MMX9|A0A0G8MMX9_9XANT 7-cyano-7-deazaguanine s ynthase OS=Xanthomonas gardneri OX=90270 GN=queC PE=3 S V=1
MKKAVVLLSGGMDSAAVVALAQEQGFAVHALSVRYGQRHTSELDAAARVATAQGVIAHKVVDVDLRSIGGSALTADIDVPDAGGDGIPVTYVPARNTIMLSLALGWAEVIGANDLFCGVNAVDYSGYPDCRPEFVRAFEVLANLATKAGVEGAGLRVHAPLQFLSKADIVREGVRLGVDFGLTVSCYRADADGRACGHCDACRLRAAGFTDAGIPDPTHYAISS

SEQ ID NO: 43354 - protein, 224 aa, Xanthomonas hortorum
  misc_feature (1)..(224): tr|V7Z9J5|V7Z9J5_9XANT 7-cyano-7-deazaguanine synthase OS=Xanthomonas hortorum pv. carotae str. M081 OX=863365 GN=queC PE=3 SV=1
MKKAVVLLSGGMDSAAVVALAHEQGFAVHALSVRYGQRHTSELDAAARVATAQGVIAHKVVDVDLRSIGGSALTADIDVPDAGGDGIPVTYVPARNTIMLSLALGWAEVIGANDLFCGVNAVDYSGYPDCRPEFVRAFEVLANLATKAGVEGAGLRVHAPLQFLSKADIVREGVRLGVDFGLTVSCYRADADGRACGHCDACRLRAAGFTDAGIPDPTHYAISS

SEQ ID NO: 43355 - protein, 224 aa, Xanthomonas hortorum; identical to SEQ ID NO: 43353
  misc_feature (1)..(224): tr|A0A248YFL2|A0A248YFL2_9XANT 7-cyano-7-deazaguanine s ynthase OS=Xanthomonas hortorum OX=56454 GN=queC PE=3 S V=1

SEQ ID NO: 43356 - protein, 221 aa, Xanthomonas hyacinthi
  misc_feature (1)..(221): tr|A0A2S7ET31|A0A2S7ET31_9XANT 7-cyano-7-deazaguanine s ynthase OS=Xanthomonas hyacinthi OX=56455 GN=queC PE=3 SV=1
MKNAVVLLSGGMDSAVVVAIACEQGYAVHALSVSYGQRHTSELDAATRVAAALGAVAHKTVNVDLRSIGGSALTDDIEVPDAGGEGIPVTYVPARNTIMLSLALGWAEVLGAADIFCGVNAVDYSGYPDCRPEFIDAFQTLANLATKAGVEGAGLRVHAPLQRMSKADIVREGLRLGVDFGLTVSCYRADADGRACGHCDACRLRAAGFADAGVADPTRYA

SEQ ID NO: 43357 - protein, 224 aa, Xanthomonas manihotis
  misc_feature (1)..(224): tr|A0A0W7YL95|A0A0W7YL95_XANMN 7-cyano-7-deazaguanine s ynthase OS=Xanthomonas manihotis OX=43353 GN=queC PE=3 SV=1
MKKAVVLLSGGMDSAAVIALAQEQGFAVYALSVRYGQRHTSELDAAARVAAAQGVIAHKVVDVDLRSIGGSALTDDIDVPDAGGDGIPVTYVPARNTIMLSLALGWAEVVGANDLFCGVNAVDYSGYPDCRPEFVRAFEVLANLATKAGVEGAGLRVHAPLQFLSKADIVREGVRLGVDLGLTVSCYRADADGRACGHCDACRLRAAGFADAGVPDPTHYAILS

SEQ ID NO: 43358 - protein, 224 aa, Xanthomonas melonis
  misc_feature (1)..(224): tr|A0A2S7DHN3|A0A2S7DHN3_9XANT 7-cyano-7-deazaguanine s ynthase OS=Xanthomonas melonis OX=56456 GN=queC PE=3 SV =1
MKKAVVLLSGGMDSAAVIALAQEQGFAVYALSVRYGQRHTSELDAAARVAAAQKVMAHKVVDVDLRSIGGSALTDDIEVPEAGGAGIPVTYVPARNTIMLSLALGWAEVVGANDLFCGVNAVDYSGYPDCRPEFVRAFEVLANLATKAGVEGAGMRVHAPLQFLSKADIVREGLRLGVDFGLTVSCYRADADGRACGHCDACRLRAAGFADAGVADPTHYAISS

SEQ ID NO: 43359 - protein, 224 aa, Xanthomonas nasturtii
  misc_feature (1)..(224): tr|A0A3E1KNL0|A0A3E1KNL0_9XANT 7-cyano-7-deazaguanine s ynthase OS=Xanthomonas nasturtii OX=1843581 GN=queC PE= 3 SV=1
MKKAVVLLSGGMDSAAVVALAQEQGFAVHALSVRYGQRHTSELDAAARVAAAQGVIAHKVVDVDLRSIGGSALTDDIDVPDAGGDGIPVTYVPARNTIMLSLALGWAEVVGANDLFCGVNAVDYSGYPDCRPEFVRAFEVLANLATKAGVEGTGLRVHAPLQFLSKADIVREGVRLGVDFGLTVSCYRADADGRACGHCDACRLRAAGFADAGIPDPTHYAILS

SEQ ID NO: 43360 - protein, 428 aa, Xanthomonas nasturtii
  misc_feature (1)..(428): tr|A0A3E1KEJ6|A0A3E1KEJ6_9XANT Uncharacterized protein OS=Xanthomonas nasturtii OX=1843581 GN=DZD52_21420 PE=4 SV=1
MKIFSAPRGVAVPAVSDLQLILYGQPDRHADGTRSVGSAGAAIETRIQRLRYAPAPRAWDFLSLALSVVGADLSVHRAGSPDGWTRQIDLITAVGEPDFWNSEAHTIEAALRFLSTDVWTLEFVGKGRRPDPPDELFRPTEDSVCLLSGGMDSLIGAIDLAESGRRSIAVSNTVPGDGHNQHSFAEAVGFKHLALNHNASPPSDGGREPSQRARSIIFLAFGVLAATSLQAYQDGAQVPLFICENGFIALNPPLTGTRLGSLSTRTAHPEFLHGVQSVLDAADLRVKLVNPYQHKTKGEMSRECADQDLLRNLAASSVSCGRYRRYGYNQCGRCIPCQIRRAAYLAWGQPDPTDYTFKDIGRREADYAHFDDVRSVAMAISRVNREGLEAWLRSALSYPHAGPRAPLRDVIQRGLGELMALHQSVGLH

SEQ ID NO: 43361 - protein, 224 aa, Xanthomonas oryzae
  misc_feature (1)..(224): tr|A0A2K9IQB7|A0A2K9IQB7_XANOO 7-cyano-7-deazaguanine s ynthase OS=Xanthomonas oryzae pv. oryzae OX=64187 GN=qu eC PE=3 SV=1
MKKAVVLLSGGMDSAAVIALAQEQGFAVYALSVRYGQRHTSELDAAARVAAAQGVIAHKVVDVDLRSIGGSALTDDIDVPDAGGDGIPVTYVPARNTIMLSLALGWAEVVGANDLFCGVNAVDYSGYPDCRPEFVRAFEVLANLATKAGVEGAGLRVHAPLQFLSKADIVREGVRLGVDFGLTVSCYRADAHGRACGHCDACRLRAAGFADAGVPDPTHYAILS

SEQ ID NO: 43362 - protein, 224 aa, Xanthomonas oryzae; identical to SEQ ID NO: 43334
  misc_feature (1)..(224): sp|B2STI7|QUEC_XANOP 7-cyano-7-deazaguanine synthase OS =Xanthomonas oryzae pv. oryzae (strain PXO99A) OX=36009 4 GN=queC PE=3 SV=1

SEQ ID NO: 43363 - protein, 224 aa, Xanthomonas perforans; identical to SEQ ID NO: 43334
  misc_feature (1)..(224): tr|A0A0G8WAD9|A0A0G8WAD9_9XANT 7-cyano-7-deazaguanine s ynthase OS=Xanthomonas perforans OX=442694 GN=queC PE=3 SV=1

SEQ ID NO: 43364 - protein, 224 aa, Xanthomonas phaseoli
  misc_feature (1)..(224): tr|A0A1V9H4P5|A0A1V9H4P5_9XANT 7-cyano-7-deazaguanine s ynthase OS=Xanthomonas phaseoli pv. syngonii LMG 9055 O X=1437878 GN=queC PE=3 SV=1
MKKAVVLLSGGMDSAAVIALAQEQGFAVYALSVRYGQRHTSELDAAARVAAAQGVIAHKVVDVDLRSIGGSALTDDIDVPDAGGDGIPVTYVPARNTIMLSLALGWAEVIGANDLFCGVNAVDYSGYPDCRPEFVRAFEVLANLATKAGVEGAGLRVHAPLQFLSKADIVREGVRLGVDFGLTVSCYRADADGRACGHCDACRLRAAGFANAGVPDPTHYAILS

SEQ ID NO: 43365 - protein, 224 aa, Xanthomonas phaseoli
  misc_feature (1)..(224): tr|A0A0N8TRP8|A0A0N8TRP8_9XANT 7-cyano-7-deazaguanine s ynthase OS=Xanthomonas phaseoli pv. dieffenbachiae OX=9 2828 GN=queC PE=3 SV=1
MKKAVVLLSGGMDSAAVIALAQEQGFAVYALSVRYGQRHTSELDAAARVAAAQGVIAHKVVDVDLRSIGGSALTDDIDVPDAGGEGIPVTYVPARNTIMLSLALGWAEVIGANDLFCGVNAVDYSGYPDCRPEFVRAFEVLANLATKAGVEGAGLRVHAPLQFLSKADIVREGVRLGVDFGLTVSCYRADADGRACGHCDACRLRAAGFADAGVPDPTHYAILS

SEQ ID NO: 43366 - protein, 224 aa, Xanthomonas pisi
  misc_feature (1)..(224): tr|A0A2S7CRI3|A0A2S7CRI3_9XANT 7-cyano-7-deazaguanine s ynthase OS=Xanthomonas pisi OX=56457 GN=queC PE=3 SV=1
MKKAVVLLSGGMDSAAVIALAQEQGFAVYALSVRYGQRHTSELDAAARVAAAQGVVAHKVVDVDLRSIGGSALTDDIEVPDAGGDGIPVTYVPARNTIMLSLALGWAEVVGANDLFCGVNAVDYSGYPDCRPEFVRAFEVLANLATKAGVEGAGLRVHAPLQFLSKADIVREGVRLGVDFGLTVSCYRADADGRACGHCDACRLRAAGFADAGIPDPTHYAILS

SEQ ID NO: 43367 - protein, 224 aa, Xanthomonas populi
  misc_feature (1)..(224): tr|A0A2S7E2C2|A0A2S7E2C2_9XANT 7-cyano-7-deazaguanine s ynthase OS=Xanthomonas populi OX=53414 GN=queC PE=3 SV= 1
MKKAVVLLSGGMDSAAVVALAQEQGYSVYALSVRYGQRHTSELDAAARVATAQGVIAHKVVDVDLRSIGGSALTDDIDVPDAGGDGIPVTYVPARNTIMLALALGWAEVIGANDLFCGVNAVDYSGYPDCRAEFVRAFEVLANLATKAGVEGAGLRVHAPLQFLSKADIVRQGVRLGVDFGLTVSCYRADANGRACGYCDACRLRAAGFADAGIPDHTHYAISS

SEQ ID NO: 43368 - protein, 224 aa, Xanthomonas prunicola
  misc_feature (1)..(224): tr|A0A2N3RNI0|A0A2N3RNI0_9XANT 7-cyano-7-deazaguanine s ynthase OS=Xanthomonas prunicola OX=2053930 GN=queC PE= 3 SV=1
MKKAVVLLSGGMDSAAVIALAQEQGFAVHALSVRYGQRHTSELDAAARVAAAQGISEHKVVDVDLRSIGGSALTDDIDVPDAGGDGIPVTYVPARNTIMLSLALGWAEVVGANDLFCGVNAVDYSGYPDCRPEFVRAFEVLANLATKAGVEGAGLRVHAPLQFLSKADIVREGVRLGVDFGLTVSCYRADPEGRACGHCDACRLRAAGFADAGIPDPTHYAILS

SEQ ID NO: 43369 - protein, 221 aa, Xanthomonas sacchari
  misc_feature (1)..(221): tr|A0A0A8DR54|A0A0A8DR54_9XANT 7-cyano-7-deazaguanine s ynthase OS=Xanthomonas sacchari OX=56458 GN=queC PE=3 S V=1
MKNAVVLLSGGMDSAVVVAIARAQGFAVHALSVRYGQRHTSELDAAARVASALGAVAHKTVNVDLRSIGGSALTDDIEVPDAGGDGIPVTYVPARNTIMLSVALGWAEVLGAADIFCGVNAVDYSGYPDCRPEFIDAFQTLANLATKAGVEGAGLRVHAPLQHMSKADIVREGVRLGVDFGLTVSCYRADDAGRACGHCDACRLRAAGFADAGVADPTRYA

SEQ ID NO: 43370 - protein, 221 aa, Xanthomonas sacchari
  misc_feature (1)..(221): tr|A0A2P5Z314|A0A2P5Z314_9XANT 7-cyano-7-deazaguanine s ynthase OS=Xanthomonas sacchari OX=56458 GN=queC PE=3 S V=1
MKNAVVLLSGGMDSAVVVAIARAQGFAVHALSVRYGQRHTSELDAAARVAAALGAVAHKTVNVDLRSIGGSALTDDIEVPDAGGDGIPVTYVPARNTIMLSVALGWAEVLGAADIFCGVNAVDYSGYPDCRPEFIDAFQTLANLATKAGVEGAGLRVHAPLQRMSKADIVREGVRLGVDFGLTVSCYRADDAGRACGHCDACRLRAAGFADAGVADPTRYA

SEQ ID NO: 43371 - protein, 224 aa, Xanthomonas sp.
  misc_feature (1)..(224): tr|A0A0Q5IXB0|A0A0Q5IXB0_9XANT 7-cyano-7-deazaguanine s ynthase OS=Xanthomonas sp. Leaf148 OX=1736275 GN=queC P E=3 SV=1
MKKAVVLLSGGMDSAAVIALAQEQGFAVYALSVRYGQRHTSELDAAVRVAAAQGVVAHKVVDVDLRSIGGSALTDDIEVPDAGGDGIPVTYVPARNTIMLSLALGWAEVVGANDLFCGVNAVDYSGYPDCRPEFVRAFEVLANLATKAGVEGAGLRVHAPLQFLSKADIVREGVRLGVDFGLTVSCYRADPDGRACGHCDACRLRAAGFADAGVQDPTHYAISS

SEQ ID NO: 43372 - protein, 221 aa, Xanthomonas sp.
  misc_feature (1)..(221): tr|A0A0J6FKG2|A0A0J6FKG2_9XANT 7-cyano-7-deazaguanine s ynthase OS=Xanthomonas sp. NCPPB 1128 OX=1775876 GN=que C PE=3 SV=1
MKNAVVLLSGGMDSAVVVAIARAQGFAVHALSVRYGQRHTSELDAAARVASALGAVAHKTVNVDLRSIGGSALTDDIEVPDAGGDGIPVTYVPARNTIMLSVALGWAEVLGASDIFCGVNAVDYSGYPDCRPEFIDAFQTLANLATKAGVEGAGLRVHAPLQHMSKADIVREGVRLGVDFGLTVSCYRADDAGRACGHCDACRLRAAGFADAGVADPTRYA

SEQ ID NO: 43373 - protein, 221 aa, Xanthomonas theicola
  misc_feature (1)..(221): tr|A0A2S6ZLU0|A0A2S6ZLU0_9XANT 7-cyano-7-deazaguanine s ynthase OS=Xanthomonas theicola OX=56464 GN=queC PE=3 S V=1
MKNAVVLLSGGMDSAVVVAIAREQGYAVHALSVRYGQRHTSELDAATRVAGALGAVAHKTVNVDLRSIGGSALTDDIEVPDAGGGGIPVTYVPARNTIMLSVALGWAEVLGAADIFCGVNAVDYSGYPDCRPEFIDAFQTLANLATKAGVEGAGLRVHAPLQRMSKADIVREGMRLDVDFGLTVSCYRADADGRACGHCDACRLRAAGFVDARVADPTRYA

SEQ ID NO: 43374 - protein, 221 aa, Xanthomonas translucens
  misc_feature (1)..(221): tr|A0A1M4IEA1|A0A1M4IEA1_XANCT 7-cyano-7-deazaguanine s ynthase OS=Xanthomonas translucens pv. graminis OX=1348 74 GN=queC PE=3 SV=1
MKNAVVLLSGGMDSAVVVAIAREQGYAVHALSVSYGQRHTSELDAATRVAAALGAVAHKTVNVDLRSIGGSALTDDIEVPDAGGEGIPVTYVPARNTIMLSVALGWAEVLGAADIFCGVNAVDYSGYPDCRPEFIDAFQTLANLATKAGVEGAGLRVHAPLQRMSKADIVREGQRLGVDFGLTVSCYRADGDGRACGHCDACRLRAVGFADAGVADPTRYA

SEQ ID NO: 43375 - protein, 221 aa, Xanthomonas translucens
  misc_feature (1)..(221): tr|A0A514E9D6|A0A514E9D6_XANCT 7-cyano-7-deazaguanine s ynthase OS=Xanthomonas translucens pv. cerealis OX=1522 63 GN=queC PE=3 SV=1
MKNAVVLLSGGMDSAVVVAIAREQGYAVHALSVSYGQRHTSELDAATRVAAALGAVAHKTVNVDLRSIGGSALTDDIEVPDAGGEGIPVTYVPARNTIMLSVALGWAEVLGAADIFCGVNAVDYSGYPDCRPEFIDAFQTLANLATKAGVEGAGLRVHAPLQRMSKADIVREGQRLGVDFGLTVSCYRADGDGRACGHCDACRLRAAGFADAGVADPTRYA

SEQ ID NO: 43376 - protein, 224 aa, Xanthomonas vasicola
  misc_feature (1)..(224): tr|A0A0A3GSI6|A0A0A3GSI6_XANVA 7-cyano-7-deazaguanine s ynthase OS=Xanthomonas vasicola OX=56459 GN=queC PE=3 S V=1
MKKAVVLLSGGMDSAAVIALAQEQGFAVYALSVRYGQRHTSELDAATRVAAAQGVIAHKVVDVDLRSIGGSALTDDIDVPDAGGDGIPVTYVPARNTIMLSLALGWAEVVGANDLFCGVNAVDYSGYPDCRPEFVRAFEVLANLATKAGVEGAGLRVHAPLQFLSKADIVREGVRLGVDFGLTVSCYRADADGRACGHCDACRLRAAGFADAGVPDPTHYAILS

SEQ ID NO: 43377 - protein, 213 aa, Xanthomonas vesicatoria
  misc_feature (1)..(213): tr|F0B8L1|F0B8L1_9XANT 7-cyano-7-deazaguanine synthase OS=Xanthomonas vesicatoria ATCC 35937 OX=925775 GN=queC PE=3 SV=1
MDSAAVIALAQEQGFAVYALSVRYGQRHTSELDAAARVAAAQGVAAHKVVDVDLRSIGGSALTDDIEVPDAGGDGIPVTYVPARNTIMLSLALGWAEVVGANDLFCGVNAVDYSGYPDCRPEFVRAFEVLANLATKAGVEGAGLRVHAPLQFLSKADIVREGVRLGVDFGLTVSCYRADVDGRACGHCDACRLRAAGFADAGVQDPTHYAISS

SEQ ID NO: 43378 - protein, 224 aa, Xanthomonas vesicatoria
  misc_feature (1)..(224): tr|A0A1L5QQR2|A0A1L5QQR2_9XANT 7-cyano-7-deazaguanine s ynthase OS=Xanthomonas vesicatoria OX=56460 GN=queC PE= 3 SV=1
MKKAVVLLSGGMDSAAVIALAQEQGFAVYALSVRYGQRHTSELDAAARVAAAQGVAAHKVVDVDLRSIGGSALTDDIEVPDAGGDGIPVTYVPARNTIMLSLALGWAEVVGANDLFCGVNAVDYSGYPDCRPEFVRAFEVLANLATKAGVEGAGLRVHAPLQFLSKADIVREGVRLGVDFGLTVSCYRADVDGRACGHCDACRLRAAGFADAGVQDPTHYAISS

SEQ ID NO: 43379 - protein, 225 aa, Xenococcus sp.
  misc_feature (1)..(225): tr|L8LX24|L8LX24_9CYAN 7-cyano-7-deazaguanine synthase OS=Xenococcus sp. PCC 7305 OX=102125 GN=queC PE=3 SV=1
MNQKKAVVLLSGGLDSATVAAIAIAEGYEVIALSFRYGQRHQKELAAAQKIAHLLEIKEHVILDVNLSQWGGSSLTDATMEIPQDGIVSDIIPSTYVPGRNTVFIAIALALAEAKNARTIFLGINAVDYSGYPDCRPEYLAAYQKLANLSSKAAIEGHNIQLQAPLVKDSKVDIVKRALALGVPIEHTWSCYQGQEVPCGVCDSCRIRDRALIEAGRSDLATHPA

SEQ ID NO: 43380 - protein, 234 aa, Xenophilus sp.
  misc_feature (1)..(234): tr|A0A254VF58|A0A254VF58_9BURK 7-cyano-7-deazaguanine s ynthase OS=Xenophilus sp. AP218F OX=2014876 GN=queC PE= 3 SV=1
MTDPTPEKALVVLSGGQDSTTCLYWALQRFGQDHVEAVTFDYGQRHRVELDCARKIAALAGVRQTVLPIDTFAAIGGNALTDDAIAPESGARADGDQALPNTFVPGRNLIFLSFAAALAYTRGARHLVTGVAQTDYSGYPDCRENTLKALELALRLGMDSRVELHAPLMHLSKAQTVTLAQQVGAMEALSFSHTCYNGEVPPCGHCAACELRAKGFAEAGVADPLVERCRQQGN

SEQ ID NO: 43381 - protein, 232 aa, Xenorhabdus beddingii
  misc_feature (1)..(232): tr|A0A1Y2SQF2|A0A1Y2SQF2_9GAMM 7-cyano-7-deazaguanine s ynthase OS=Xenorhabdus beddingii OX=40578 GN=queC PE=3 SV=1
MKRAVVVFSGGQDSTTCLIQALRQYDEVHCVTFDYGQRHRAEIDVACRISKELGAAAHKVLDVTLLNELAISSLTRDDIPVPDFSASEKSGLPNTFVPGRNILFLTLAAIYAYQVEAEAVITGVCETDFSGYPDCRDEFVKALNKAVSLGIARDIRFETPLMWLNKAETWALADYYQKLDFVRHQTLTCYNGIQGDGCGECAACHLRARGLDNYLNNAQSTMAEMKSKTHVG

SEQ ID NO: 43382 - protein, 232 aa, Xenorhabdus bovienii
  misc_feature (1)..(232): tr|A0A077QKJ9|A0A077QKJ9_XENBV 7-cyano-7-deazaguanine s ynthase OS=Xenorhabdus bovienii str. Intermedium OX=137 9677 GN=ybaX PE=3 SV=1
MKRAVVVFSGGQDSTTCLIQALRQYDEVHCVTFDYGQRHRAEIDVACRISKELGAAAHKVLDVTLLSELAISSLTRDNIPVPDFSESEKSGLPNTFVPGRNILFLTLAAIYAYQVEAEAVITGVCETDFSGYPDCRDEFVKALNKAVCLGIARDIRFETPLMWLNKAETWALADYYQKLNFVRTQTLTCYNGIQGDGCSECAACHLRANGLNLYLNNTQSIMEDMKSKTHLS

SEQ ID NO: 43383 - protein, 232 aa, Xenorhabdus bovienii
  misc_feature (1)..(232): tr|A0A077P8K1|A0A077P8K1_XENBV 7-cyano-7-deazaguanine s ynthase OS=Xenorhabdus bovienii str. oregonense OX=1398 202 GN=ybaX PE=3 SV=1
MKRAVVVFSGGQDSTTCLIQALRQYDEVHCVTFDYGQRHRAEIDVACRISKELDAAAHKVLDVTLLSELAISSLTRDNIPVPDFSESEKSGLPNTFVPGRNILFLTLAAIYAYQVEAEAVITGVCETDFSGYPDCRDEFVKALNKAVCLGISRDIRFETPLMWLNKAETWALADYYQKLNFVRTQTLTCYNGIQGDGCSECAACHLRANGLNLYLNNTQSIMEEMKSKTHLS

SEQ ID NO: 43384 - protein, 232 aa, Xenorhabdus budapestensis
  misc_feature (1)..(232): tr|A0A2D0J0P9|A0A2D0J0P9_XENBU 7-cyano-7-deazaguanine s ynthase OS=Xenorhabdus budapestensis OX=290110 GN=queC PE=3 SV=1
MKRAVVVFSGGQDSTTCLIQSLHQYDEVHCVTFDYGQRHRAEIDVASCISKELGAAAHKVLDVTLLNELAISSLTRDNIPVPDFNESEKSGLPNTFVPGRNILFLTLAAIYAYQVEAEAVITGVCETDFSGYPDCRDEFVKSLNNAVCLGIARDIRFETPLMWLNKAETWALADYYQKLDFVRTQTLTCYNGIQGDGCGECAACHLRANGLNLYLNNTKPTMAEMKSKTQLN

SEQ ID NO: 43385 - protein, 232 aa, Xenorhabdus cabanillasii
  misc_feature (1)..(232): tr|A0A3D9UGP6|A0A3D9UGP6_9GAMM 7-cyano-7-deazaguanine s ynthase OS=Xenorhabdus cabanillasii OX=351673 GN=queC P E=3 SV=1
MKRAVVVFSGGQDSTTCLIQALHQYDEVHCVTFDYGQRHRAEIDVASRISKELGAAAHKVLDVTLLNELAISSLTRDNIPVPDFSESEKSGLPNTFVPGRNILFLTLAAIYAYQVEAEAVITGVCETDFSGYPDCRDEFVKSLNNAVCLGIARDIRFETPLMWLNKAETWALADYYQKLDFVRTQTLTCYNGIQGDGCSECAACHLRANGLNLYLNNTKLTMAEMKSKTQLD

SEQ ID NO: 43386 - protein, 232 aa, Xenorhabdus cabanillasii
  misc_feature (1)..(232): tr|W1ISS6|W1ISS6_9GAMM 7-cyano-7-deazaguanine synthase OS=Xenorhabdus cabanillasii JM26 OX=1427517 GN=queC PE= 3 SV=1
MKRAVVVFSGGQDSTTCLIQALHQYDEVHCVTFDYGQRHRAEIDVASRISKELGAAAHKVLDVTLLNELAISSLTRDNIPVPDFSESEKSGLPNTFVPGRNILFLTLAAIYAYQVEAEAVITGVCETDFSGYPDCRDEFVKSLNNAVCLGIARDIRFETPLMWLNKAETWALADYYQKLDFVRTQTLTCYNGIQGDGCGECAACHLRANGLNLYLNNTKFTMAEMKSKTQLD

SEQ ID NO: 43387 - protein, 232 aa, Xenorhabdus doucetiae
  misc_feature (1)..(232): tr|A0A068QNL4|A0A068QNL4_9GAMM 7-cyano-7-deazaguanine s ynthase OS=Xenorhabdus doucetiae OX=351671 GN=queC PE=3 SV=1
MKRAVVVFSGGQDSTTCLIQALRQYDEVHCVTFDYGQRHRAEIDVACHISKELGAAAHKVLDVTLLNELAISSLTRDNIPVPDFSESEKSGLPSTFVPGRNILFLTLAAIYAYQVEAEAVITGVCETDFSGYPDCRDEFVKALNKAVSLGIARNIRFETPLMWLNKAETWALADYYQKLDFVRNQTLTCYNGIQGDGCGECAACHLRAKGLTHYLSNAQTIMLDMKSKTHLS

SEQ ID NO: 43388 - protein, 232 aa, Xenorhabdus eapokensis
  misc_feature (1)..(232): tr|A0A1Q5TVW7|A0A1Q5TVW7_9GAMM 7-cyano-7-deazaguanine s ynthase OS=Xenorhabdus eapokensis OX=1873482 GN=queC PE =3 SV=1
MKRAVVVFSGGQDSSTCLIQALHQYDEVHCVTFDYGQRHRAEIDVACRISKELGAAAHKVLDVTLLNELAISSLTRDNIPVPDFSESEKSGLPSTFVPGRNILFLTLAAIYAYQVEAEVVITGVCETDFSGYPDCRDEFVKALNKAVSLGIARDIRFETPLMWLNKAETWALADYYQKLDFVRNETLTCYNGIQGDGCGECAACHLRAKGLNHYLSNAQATMLDMKSKTHLS

SEQ ID NO: 43389 - protein, 232 aa, Xenorhabdus ehlersii
  misc_feature (1)..(232): tr|A0A2D0IQ53|A0A2D0IQ53_9GAMM 7-cyano-7-deazaguanine s ynthase OS=Xenorhabdus ehlersii OX=290111 GN=queC PE=3 SV=1
MKRAVVVFSGGQDSSTCLIQALHQYDEVHCVTFDYGQRHHAEIDVACRISKELGTAAHKVLDVTLLNELAISSLTRDSIPVPDFSESEKSGLPSTFVPGRNILFLTLAAIYAYQVEAEVVITGVCETDFSGYPDCRDEFVKALNKAVSLGIARDIRFETPLMWLNKAETWALADYYQKLDFVRNKTLTCYNGIQGDGCGECAACHLRAQGLKHYLNNVQATMLDMKSKTHLS

SEQ ID NO: 43390 - protein, 232 aa, Xenorhabdus hominickii
  misc_feature (1)..(232): tr|A0A2G0Q8Y5|A0A2G0Q8Y5_9GAMM 7-cyano-7-deazaguanine s ynthase OS=Xenorhabdus hominickii OX=351679 GN=queC PE= 3 SV=1
MKRAVVVFSGGQDSTTCLIQALRQYDEVHCVTFDYGQRHRAEIDVACHISTELGAAAHKVLDVTLLNELAISSLTRDNIPVPDFSASEESALPNTFVPGRNILFLTLAAIYAYQVEAESVITGVCETDFSGYPDCRDEFVKALNKAVSLGMARDIRFETPLMWLNKAETWALADYYQKLDFVRSQTLTCYNGVQGDGCGDCAACHLRAKGLSNYLNNTQSIMAEMKSKTHLN

SEQ ID NO: 43391 - protein, 232 aa, Xenorhabdus innexi
  misc_feature (1)..(232): tr|A0A1N6MTP7|A0A1N6MTP7_9GAMM 7-cyano-7-deazaguanine s ynthase OS=Xenorhabdus innexi OX=290109 GN=queC PE=3 SV =1
MKRAVVVFSGGQDSTTCLIQALRQYDEVHCVTFDYGQRHRAEIDVASRISKELGAAAHKVLDVTLLNELAVSSLTRDNIPVPDFSESEKNGLPNTFVPGRNILFLTLAAIYAYQVEAEAVITGVCETDFSGYPDCRDEFVKSLNNAVCLGIARDIRFETPLMWLNKAETWALADYYQKLDFVRTQTLTCYNGIQGDGCGECAACHLRANGLDLYLNNAESTMAEMKSKTKLN

SEQ ID NO: 43392 - protein, 232 aa, Xenorhabdus ishibashii
  misc_feature (1)..(232): tr|A0A2D0KI18|A0A2D0KI18_9GAMM 7-cyano-7-deazaguanine s ynthase OS=Xenorhabdus ishibashii OX=1034471 GN=queC PE =3 SV=1
MKRAVVVFSGGQDSTTCLIQALRQYDEVHCVTFDYGQRHRAEIDVACHISKELGAAAHKVLDVTLLNELAISSLTRDNIPVPDFSESEKNGLPSTFVPGRNILFLTLAAIYAYQVEAESVITGVCETDFSGYPDCRDEFVKALNKAVSLGIARDIRFETPLMWLNKAETWALADYYQKLDFVRNKTLTCYNGVQGDGCGECAACHLRAKGLNHYLSNAQTTMLDMKSKTHLS

SEQ ID NO: 43393 - protein, 232 aa, Xenorhabdus japonica
  misc_feature (1)..(232): tr|A0A1I5CYB4|A0A1I5CYB4_9GAMM 7-cyano-7-deazaguanine s ynthase OS=Xenorhabdus japonica OX=53341 GN=queC PE=3 S V=1
MKRSVVVFSGGQDSTTCLIQALRQYDEVHCVTFDYGQRHRAEIDVACHISKELGATAHKVLDVTLLNELAISSLTRDNIPVPDFSESEKSGLPSTFVPGRNILFLTLATIYAYQVEAEAVITGVCETDFSGYPDCRDEFVTALNKAVNLGIARDIRFETPLMWLNKAETWALADYYQKLDFVRNQTLTCYNGIQGDGCSECAACHLRAKGLNHYLSNALAVMLEMKSKTHLS

SEQ ID NO: 43394 - protein, 232 aa, Xenorhabdus khoisanae
  misc_feature (1)..(232): tr|A0A0J5FVT8|A0A0J5FVT8_9GAMM 7-cyano-7-deazaguanine s ynthase OS=Xenorhabdus khoisanae OX=880157 GN=queC PE=3 SV=1
MKRAVVVFSGGQDSTTCLIQALRQYDEVHCVTFDYGQRHRAEIDVACRISEELGAAAHKVLDVTLLNELAISSLTRDNIPVPDFSESEKNGLPNTFVPGRNILFLTLAAIYAYQVEAEAVITGVCETDFSGYPDCRDEFVKALNKAVSLGIARDIRFETPLMWLNKAETWALADYYEKLDFVRNQTLTCYNGIQGDGCGECAACHLRAKGLGYYLNNAQSTMADMKSKTHLS

SEQ ID NO: 43395 - protein, 232 aa, Xenorhabdus koppenhoeferi
  misc_feature (1)..(232): tr|A0A1I7I8X1|A0A1I7I8X1_9GAMM 7-cyano-7-deazaguanine s ynthase OS=Xenorhabdus koppenhoeferi OX=351659 GN=queC PE=3 SV=1
MKRAVVVFSGGQDSTTCLIQALRQYDEVHCVTFDYGQRHRTEIDVACRISKELGAAAHKVLDVTVLNELAISSLTRDNIPVPDFNASEKSGLPNTFVPGRNILFLTLAAIYAYQIEAEAVITGVCETDFSGYPDCRDEFVKALNNAVSLGIARDIRFETPLMWLNKAETWALADYYQKLDFVRNQTLTCYNGIQGDGCGECAACHLRTKGLTNYLTNIQSIMADMKSKTHLS

SEQ ID NO: 43396 - protein, 232 aa, Xenorhabdus kozodoii
  misc_feature (1)..(232): tr|A0A2D0L7I8|A0A2D0L7I8_9GAMM 7-cyano-7-deazaguanine s ynthase OS=Xenorhabdus kozodoii OX=351676 GN=queC PE=3 SV=1
MKRAVVVFSGGQDSTTCLIQALHQYDEVHCVTFDYGQRHRAEIDVACRISKELGAAAHKVLDVTLLNELAISSLTRDNIPVPDFSESEKSGLPSTFVPGRNILFLTLAAIYAYQVEAEAVITGVCETDFSGYPDCRDEFVKALNKAVSLGIARDIRFETPLMWLNKAETWALADYYQKLDFIRNKTLTCYNGIQGDGCGECAACHLRAKGLNHYLNNAQSTMLAMKSKTHLS

SEQ ID NO: 43397 - protein, 232 aa, Xenorhabdus mauleonii
  misc_feature (1)..(232): tr|A0A1I3Q9H6|A0A1I3Q9H6_9GAMM 7-cyano-7-deazaguanine s ynthase OS=Xenorhabdus mauleonii OX=351675 GN=queC PE=3 SV=1
MKRAVVVFSGGQDSTTCLIQALRQYDEVHCVTFDYGQRHRAEIDVACRISKELGAAAHKVLDVTLLNELAISSLTRDNIPVPDFNTSEKSGLPSTFVPGRNILFLTLAAIYAYQVEAEAVITGVCETDFSGYPDCRDEFVKALNKAVSLGIARDIRFETPLMWLNKAETWALADYYQQLDFIRSQTLTCYNGIQGDGCGECAACHLRAKGLNDYLNNAQSIMLDMKSKTHLS

SEQ ID NO: 43398 - protein, 232 aa, Xenorhabdus miraniensis
  misc_feature (1)..(232): tr|A0A2D0JNB1|A0A2D0JNB1_9GAMM 7-cyano-7-deazaguanine s ynthase OS=Xenorhabdus miraniensis OX=351674 GN=queC PE =3 SV=1
MKRAVVVFSGGQDSTTCLIQALRQYDEVHCVTFDYGQRHRAEIDVACRISEKLGAAAHKVLDVTLLNELAISSLTRDNIPVPDFSESEKNGLPNTFVPGRNILFLTLAAIYAYQVEAEAVITGVCETDFSGYPDCRDEFVKALNKAVSLGIARDIRFETPLMWLNKAETWALADYYEKLDFVRNQTLTCYNGIQGDGCGECAACHLRAKGLDNYLNNTQSTMANMKSKTRLS

SEQ ID NO: 43399 - protein, 442 aa, Xenorhabdus nematophila
  misc_feature (1)..(442): tr|D3VM37|D3VM37_XENNA Uncharacterized protein OS=Xenor habdus nematophila (strain ATCC 19061 / DSM 3370 / LMG 1036 / NCIB 9965 / AN6) OX=406817 GN=XNC1_p0121 PE=4 SV =1
MARMGGLPMTQLVFHHDHRLLPSAGDSLLPVQLYGLSGQGRGDISIIGNPAIDRIKRLGVKIPAQVMDFLSIALAVTAADTFVQRESSEDGWTRQFSLRLPLHEPSRWIALKKELESALHFLSGDIWDFEFCNGGYVPPEPYSQHSKFHLIKLKDLDCVSLFSGGLDSAIGAIDLLAAGRAPLLVSHAYKGDKSRQDQIAEKLNGRYSRFEINADPHIYQGDTEITMRTRSLNFLAFAAVGACAVQEVSQQEKVDLFVPENGFISLNAPLTPRRIGTLSTRTTHPHFITSVQKLFDAAGIPCQIINPYQFKTKGQMASQCLNKQLLSEVVESTVSCSHWKRRNQQCGVCVPCIIRRASLHAGGIDKDADYTFQSLAKVINEIDRRDDLMALRIAIAQKSTLKIGTWIAKSGPLPTATFNNFKQVFIDGLDEVESYLLSESIV

SEQ ID NO: 43400 - protein, 232 aa, Xenorhabdus nematophila
  misc_feature (1)..(232): tr|A0A0A8NV66|A0A0A8NV66_XENNE 7-cyano-7-deazaguanine s ynthase OS=Xenorhabdus nematophila str. Websteri OX=143 7826 GN=ybaX PE=3 SV=1
MKRAVVVFSGGQDSTTCLIQALRQYDEVHCVTFDYGQRHRAEIDVASRISKELGAAAHKVLDVTLLNELAISSLTRDNIPVPDFNASEKSDLPNTFVPGRNILFLTLAAIYAYQVEAEAVITGVCETDFSGYPDCRDEFVRALNKAVSLGIARDIRFETPLMWLNKAETWALADYYKKLDFIRNQTLTCYNGIQGDGCSECAACHLRAKGLTNYLDNSQSIMAEMKSKTHLS

SEQ ID NO: 43401 - protein, 232 aa, Xenorhabdus poinarii
  misc_feature (1)..(232): tr|A0A068R1X8|A0A068R1X8_9GAMM 7-cyano-7-deazaguanine s ynthase OS=Xenorhabdus poinarii G6 OX=1354304 GN=queC P E=3 SV=1
MKRAVVVFSGGQDSTTCLIQALRQYDEVHCVTFDYGQHHRAEIDVACRISKELGATAHKVLDVTLLNELAISSLTRDNIPIPDFSESEKSGLPSTFVPGRNILFLTLAAIYAYQVEAEAVITGVCETDFSGYPDCRDEFVKALNKAVSLGIARDLRFETPLMWLNKAETWALADYYQKLDFVRNQTLTCYNGIQGDGCGECAACHLRAKGLKHYLDNTQSIMLAMKFKTHLS

SEQ ID NO: 43402 - protein, 232 aa, Xenorhabdus sp.
  misc_feature (1)..(232): tr|A0A2D0K0Y3|A0A2D0K0Y3_9GAMM 7-cyano-7-deazaguanine s ynthase OS=Xenorhabdus sp. KK7.4 OX=1851572 GN=queC PE= 3 SV=1
MKRAVVVFSGGQDSTTCLIQALRQYDEVHCVTFDYGQRHRAEIDVASRISKELGAAAHKVLDVTLLNELAVSSLTRDNIPVPDFSESEKNGLPNTFVPGRNILFLTLAAIYAYQVEAEAVITGVCETDFSGYPDCRDEFVKSLNNAVCLGIARNIRFETPLMWLNKAETWALADYYQKLDFVRSQTLTCYNGMQGDGCGECAACHLRANGLNVYLNNAESTMAEMKSKTQLN

SEQ ID NO: 43403 - protein, 232 aa, Xenorhabdus sp.
  misc_feature (1)..(232): tr|A0A0M0TAU2|A0A0M0TAU2_9GAMM 7-cyano-7-deazaguanine s ynthase OS=Xenorhabdus sp. GDc328 OX=742178 GN=queC PE= 3 SV=1
MKRAVVVFSGGQDSSTCLIQALHQYDEVHCVTFDYGQRHHAEIDVACRISKELGAAAHKVLDVTLLNELAISSLTRDNIPVPDFSESEKSGLPSTFVPGRNILFLTLAAIYAYQVEAEVVITGVCETDFSGYPDCRDEFVKALNKAVSLGIARDIRFETPLMWLTKAETWALADYYQKLDFVRNKTLTCYNGIQGDGCGECAACHLRAEGLKHYLSNAQATMLDMKAKTHLS

SEQ ID NO: 43404 - protein, 232 aa, Xenorhabdus stockiae
  misc_feature (1)..(232): tr|A0A2D0KVJ4|A0A2D0KVJ4_9GAMM 7-cyano-7-deazaguanine s ynthase OS=Xenorhabdus stockiae OX=351614 GN=queC PE=3 SV=1
MKRAVVVFSGGQDSTTCLIQALRQYDEVHCVTFDYGQRHRAEIDVASRISKELGAAAHKVLDVTLLNELAVSSLTRDNIPVPDFSESEKNGLPNTFVPGRNILFLTLAAIYAYQVEAEAVITGVCETDFSGYPDCRDEFVKSLNNAVCLGIARNIRFETPLMWLNKAETWALADYYQKLDFVRSQTLTCYNGIQGDGCGECAACHLRANGLNVYLNNAESTMAEMKSKTQLN

SEQ ID NO: 43405 - protein, 432 aa, Xenorhabdus szentirmaii
  misc_feature (1)..(432): tr|W1IYU0|W1IYU0_9GAMM Uncharacterized protein OS=Xenor habdus szentirmaii DSM 16338 OX=1427518 GN=XSR1_340019 PE=4 SV=1
MTQLVFHHEHRLLPRASENLLPVQLYGLSGRGDISIIGNPAIDRIKRLGVKIPAQVMDFLSIALAVTAADTFVQRESSEDGWTRQLSLRLPLHEPSRWIALKKELESALHFLSGDIWDFEFCDGGYAPPEPYSQHSRFHLIKLKELDCVSLFSGGLDSAIGAIDLLTVGRAPLLVSHAYKGDKSRQDQIAERLNGRYSRFEINADPHLYQGVTDITMRTRSLNFLAFAAVGACAVQEVSQQKKVDLFVPENGFISLNAPLTPRRIGTLSTRTTHPYFISSIQQLFDAVGIPCQIINPYQFKTKGQMVSQCLNKQLLSDVVESTVSCSHWKRTDQQCGVCVPCIIRRASLHAGRISRDADYTFQSLAKVINEIDRRDDLMALRIAIAQKSTLKIGTWIAKSGPLPTATFNNFKQVFIDGLDEVESYLLSESIV

SEQ ID NO: 43406 - protein, 232 aa, Xenorhabdus szentirmaii
  misc_feature (1)..(232): tr|W1J046|W1J046_9GAMM 7-cyano-7-deazaguanine synthase OS=Xenorhabdus szentirmaii DSM 16338 OX=1427518 GN=queC PE=3 SV=1
MKRAVVVFSGGQDSTTCLIQALRQYDEVHCVTFDYGQRHHAEIDIACRISKELGAAAHKVLDVTLLNELAISSLTRDNIPIPDFTASEKSGLPNTFVPGRNILFLTLAAIYAYQVEAEAVITGVCETDFSGYPDCRDEFVKALNKAVNLGVARDIRFETPLMWLDKAETWALADYYQKLDYIRNQTLTCYNGIQGDGCGECAACHLRAKGLSHYLNNKQTTMADMKAKTQLN

SEQ ID NO: 43407 - protein, 232 aa, Xenorhabdus thuongxuanensis
  misc_feature (1)..(232): tr|A0A1Q5U5K0|A0A1Q5U5K0_9GAMM 7-cyano-7-deazaguanine s ynthase OS=Xenorhabdus thuongxuanensis OX=1873484 GN=qu eC PE=3 SV=1
MKRAVVVFSGGQDSSTCLIQALHQYDEVHCVTFDYGQRHRAEIDVACRISKELGATAHKVLDVTLLNELAISSLTRDNIPVPDFSESEKSGLPSTFVPGRNILFLTLAAIYAYQVEAEVVITGVCETDFSGYPDCRDEFVKALNKAVSLGIARDIRFETPLMWLNKAETWALADYYQKLDFVRNRTLTCYNGIQGDGCGECAACHLRAKGLNHYLSNTQATMLDMKSKTHLS

SEQ ID NO: 43408 - protein, 446 aa, Xenorhabdus thuongxuanensis
  misc_feature (1)..(446): tr|A0A1Q5U3Y1|A0A1Q5U3Y1_9GAMM DNA-binding protein OS=X enorhabdus thuongxuanensis OX=1873484 GN=Xentx_01453 PE =4 SV=1
MNIYIDHDYSRLPPSNENTVSVQIYSRDGIISKNGIKPRDDIATIGKPVYDAMKRLGVKISDEVMDFLTISLAVTAADTFIVRDDCFDGWTRNINLSVSVINPVIWEKNKELIEKSLQFLSGDVWNFDFKSGGQKPPMPFEPVNGRRLVNLKGLDCISLFSGGLDSAIGVIDLLESGKKPLLISHSYKGDKKKQDQIARGIQEKGKFSRFCSSANPIGRGMPRDITMRTRSLNFLAFAAVGADAVMKANHHVDIPIYIPENGFISLNAPLTNRRIGSLSTRTTHPYFIKMIQEIFNNVGFNMKLLNPYQFQTKGQMVSDCKDSTTLSQIVDSTVSCSHWKRKHKQCGYCVPCMIRRASLLKGNMNEAILYHHGSYLTLRDFVKNKQDGRDDVISVLMAIENAKKKNLKTWVLKSGKLKSNDIAKYEKVFSDGLKEVEAFLKKEGII

SEQ ID NO: 43409 - protein, 232 aa, Xenorhabdus vietnamensis
  misc_feature (1)..(232): tr|A0A1Y2SIE2|A0A1Y2SIE2_9GAMM 7-cyano-7-deazaguanine s ynthase OS=Xenorhabdus vietnamensis OX=351656 GN=queC P E=3 SV=1
MKRAVVVFSGGQDSTTCLIQALRQYDEVHCVTFDYGQRHHAEIDVACHISKELGAAAHKVLDVTLLNELAISSLTRDNIPVPDFSESEKSGLPSTFVPGRNILFLTLAAIYAYQVEAEAVITGVCETDFSGYPDCRDEFVKALNKAVSLGIARDIRFETPLMWLNKAETWALADYYQKLDFVRNQTLTCYNGIQGDGCGECAACHLRAKGLNHYLSNTQTIMLEMKSKTHLT

SEQ ID NO: 43410 - protein, 230 aa, Xylella fastidiosa
  misc_feature (1)..(230): sp|Q9PCC3|QUEC_XYLFA 7-cyano-7-deazaguanine synthase OS =Xylella fastidiosa (strain 9a5c) OX=160492 GN=queC PE= 3 SV=2
MKKAVVLLSGGMDSAVVTAIAQSQGFMVHALSIRYGQRHTSELDAAVRIARVLNVAAHKVVDVDLRSIGGSALTDDIEIPDAGGKGIPVTYVPARNTIMLSLALGWAEVIGAADIFCGVNAVDYSGYPDCRPQFITAFETLANLATKVGVEGTQLHVHAPLQFLSKAEIVHEGVLHGVDFGLTVSCYRADVDGRACGRCDACKLRAAGFADAGVADPTRYMELPCSLLLL

SEQ ID NO: 43411 - protein, 230 aa, Xylella fastidiosa
  misc_feature (1)..(230): sp|B0U2I4|QUEC_XYLFM 7-cyano-7-deazaguanine synthase OS =Xylella fastidiosa (strain M12) OX=405440 GN=queC PE=3 SV=1
MKKAVILLSGGMDSAVVTAIAQSQGFMVHALSIRYGQRHTSELDAAVRIARALNVVAHKVVDVDLRSIGGSALTDDIEIPDAGGEGIPVTYVPARNTIMLSLALGWAEVIGAADIFCGVNAVDYSGYPDCRPQFITAFETLANLATKVGVEGTQLHVHAPLQFLSKAEIVHEGLLHGVDFGLTVSCYRADVDGRACGRCDACKLRAAGFADAGVVDPTRYMELPCSLLLL

SEQ ID NO: 43412 - protein, 222 aa, Xylella taiwanensis
  misc_feature (1)..(222): tr|Z9JID6|Z9JID6_9GAMM 7-cyano-7-deazaguanine synthase OS=Xylella taiwanensis OX=1444770 GN=queC PE=3 SV=1
MKKAVVLLSGGMDSAVVTAIAQSQGFTVHALSVRYGQRHTSELDAASRVAKARDVAAHKVVDVDLRSIGGSALTDDIEIPDAGSEGIPVTYVPARNTIMLSLALSWAEVIGAADLFCGVNAVDYSGYPDCRPQFITAFETLANLATKAGVEGTKLQVHAPLQFLSKANIVHEGLRQGVDFALTVSCYRADVGGRACGRCDACKLRAAGFADAGVSDPTRYVQ

SEQ ID NO: 43413 - protein, 241 aa, Xylophilus ampelinus
  misc_feature (1)..(241): tr|A0A318SEI5|A0A318SEI5_9BURK 7-cyano-7-deazaguanine s ynthase OS=Xylophilus ampelinus OX=54067 GN=queC PE=3 S V=1
MQRSALVLFSGGQDSATCLAWALQRYERVETVGFDYGQRHRVELDARLEVLHALRHRFPQWAARLDDDHLLEVGVLGQVSETSLTRDTAFQMEASGLPNTFVPGRNLLFLTLAAALAYRRGHDVLVTGVCETDYSGYPDCRDDTMKAMQVALSLGMDRRLVVETPLMWIDKAATWAMAEQLGGPPLVDLVVEHSHTCYLGDRSHRHPWGYGCGICAACELRAGGWNRYRETAGCQKTTDPK

SEQ ID NO: 43414 - protein, 241 aa, Xylophilus sp.
  misc_feature (1)..(241): tr|A0A0Q4GAE1|A0A0Q4GAE1_9BURK 7-cyano-7-deazaguanine s ynthase OS=Xylophilus sp. Leaf220 OX=1735686 GN=queC PE =3 SV=1
MQRSALVLFSGGQDSATCLAWALQRYERVETVGFDYGQRHRVELDARLEVLHALRHQFPQWAARLDDDHLLDVGVLGQVSETSLTRDTAFRMEASGLPNTFVPGRNLLFLTLAAALAYRRGHDVLVTGVCETDYSGYPDCRDDTMKAMQVALSLGMDRRLVVETPLMWIDKAATWAMAEQLGGLPFVDLVVEHSHTCYLGDRSHRHAWGYGCGTCAACELRANGWNRYREAADHQQTPGQK

SEQ ID NO: 43415 - protein, 233 aa, Yangia pacifica
  misc_feature (1)..(233): tr|A0A2U8HHK5|A0A2U8HHK5_9RHOB 7-cyano-7-deazaguanine s ynthase OS=Yangia pacifica OX=311180 GN=queC PE=3 SV=1
MKTIVICSGGLDSVSLAHMVAANGDLTRLVSFDYGQRHAKELDFAKAAAARLGVPFQRIDMRGIGAALTGSALTSDIDVPDGHYAEETMRITVVPNRNAIMLAIAFGVAAANGDEAVATAVHGGDHFIYPDCRPGFTRAFEAMQRAALDGYADVQLYTPFVERSKADIVTEGARCGTPFAETWSCYKGGEVHCGCCGTCVERREAFHLAGIEDPTIYADPDFWVRAVASREEA

SEQ ID NO: 43416 - protein, 233 aa, Yangia pacifica
  misc_feature (1)..(233): tr|A0A1I6TQH9|A0A1I6TQH9_9RHOB 7-cyano-7-deazaguanine s ynthase OS=Yangia pacifica OX=311180 GN=queC PE=3 SV=1
MKIIVICSGGLDSVSLAHMVAARHELTRLVSFDYGQRHAKELDFAKAAAERLGVPFHRIDMRTIGAALTGSALTSDIDVPDGHYAEETMRITVVPNRNAIMLAIAFGVAAANGDEAVATAVHGGDHFIYPDCRPGFTRAFETMQRAALDGYADVSLYTPFVTRTKADIVTEGAKHGTPFAETWSCYKGGETHCGRCGTCVERREAFHLAGVADPTVYADPDFWVQAVASREEA

SEQ ID NO: 43417 - protein, 233 aa, Yangia sp.
  misc_feature (1)..(233): tr|A0A1B1PMB0|A0A1B1PMB0_9RHOB 7-cyano-7-deazaguanine s ynthase OS=Yangia sp. CCB-MM3 OX=1792508 GN=queC PE=3 S V=1
MKTIVICSGGLDSVSLAHMVAARHDLTRLVSFDYGQRHAKELDFAKAAAERLGVPFHRIDMRTIGAALTGSALTSDIDVPDGHYAEETMRITVVPNRNAIMLAIAFGVAAANGDEAVATAVHGGDHFIYPDCRPGFTRAFETMQRHALDGYADVSLYTPFVERTKADIVTEGAKHGTPFAQTWSCYKGGETHCGRCGTCVERREAFHLAGVADPTIYADPDFWQQAIAAREEA

SEQ ID NO: 43418 - protein, 233 aa, Yangia sp.
  misc_feature (1)..(233): tr|A0A2A3JT61|A0A2A3JT61_9RHOB 7-cyano-7-deazaguanine s ynthase OS=Yangia sp. SAOS 153D OX=1779329 GN=queC PE=3 SV=1
MKTIVICSGGLDSVSLAHMVAAEQELTRLVSFDYGQRHAKELDFAQAAAARLGVPFQRIDMRGIGAALTGSALTSDIDVPDGHYAEETMRITVVPNRNAIMLAIAFGVAAANGDEAVATAVHGGDHFIYPDCRPGFTRAFETMQRHALEGYADVQFYTPFVERTKADIVTEGAKHGTPFEKTWSCYKGGEVHCGCCGTCVERREAFHLAGIEDPTVYADPDFWVRAVASREEV

SEQ ID NO: 43419 - protein, 232 aa, Yersinia aldovae
  misc_feature (1)..(232): tr|A0A0T9UHK6|A0A0T9UHK6_YERAL 7-cyano-7-deazaguanine s ynthase OS=Yersinia aldovae OX=29483 GN=queC PE=3 SV=1
MKRAVVVFSGGQDSTTCLIQALQQYDEVHCITFDYGQRHRAEIDVARKLAIQLGAKAHKVLDVGMLNELAVSSLTRDSIPVPTFDEEDEDSVPSTFVPGRNILFLTLTAIYAYQVQAEAVITGVCETDFSGYPDCRDKFVKALNHAIDLGIGRDIAFITPLMWLDKAETWALADYYQQLDLVRHHTLTCYNGIQGEGCGQCAACHLRAKGLSHYLANKAQVLLSLKKKTGLV

SEQ ID NO: 43420 - protein, 232 aa, Yersinia bercovieri
  misc_feature (1)..(232): tr|A0A2G4U4D7|A0A2G4U4D7_YERBE 7-cyano-7-deazaguanine s ynthase OS=Yersinia bercovieri OX=634 GN=queC PE=3 SV=1
MRRAVVVFSGGQDSTTCLIQALQQYDEVHCITFDYGQRHRAEIDVARELATQLGAKAHKVLDVGMLNELAVSSLTRDSIPVPTYNEEDTDAVPSTFVPGRNILFLTLAAIYAYQVQAQAVITGVCETDFSGYPDCRDEFVKALNHAIDLGIGRDIAFITPLMWLDKAETWALADYYQQLDRVRNDTLTCYNGIQGDGCGECAACHLRAKGLAFYLANKPNVLLSLKQKTGLV

SEQ ID NO: 43421 - protein, 232 aa, Yersinia enterocolitica
  misc_feature (1)..(232): tr|A0A2R9T9G8|A0A2R9T9G8_YEREN 7-cyano-7-deazaguanine s ynthase OS=Yersinia enterocolitica subsp. palearctica Y E-P4 OX=1329364 GN=queC PE=3 SV=1
MKRAVVVFSGGQDSTTCLIQALQQYDEVHCITFDYGQRHRAEIDVARELAIQLGAKAHKVLEVGMLNELAVSSLTRDNIPVPSYSEEGEDSIPSTFVPGRNILFLTLAAIYAYQVQAQAVITGVCETDFSGYPDCRDEFVKALNHAIDLGIGRDIAFITPLMWLDKAETWALADYYQQLDRIRHDTLTCYNGIQGDGCGKCAACHLRAKGLEFYLANKPKVILSLKQKTGLV

SEQ ID NO: 43422 - protein, 232 aa, Yersinia enterocolitica
  misc_feature (1)..(232): sp|A1JNM3|QUEC_YERE8 7-cyano-7-deazaguanine synthase OS =Yersinia enterocolitica serotype O:8 / biotype 1B (str ain NCTC 13174 / 8081) OX=393305 GN=queC PE=3 SV=1
MKRAVVVFSGGQDSTTCLIQALQQYDEVHCITFDYGQRHRAEIDVARELAIQLGAKAHKVLDVGMLNELAVSSLTRDNIPVPSYSEEGEDSIPSTFVPGRNILFLTLAAIYAYQVQAQAVITGVCETDFSGYPDCRDEFVKALNHAIDLGIGRDIAFITPLMWLDKAETWALADYYQQLDRIRHDTLTCYNGIQGDGCGQCAACHLRAKGLEFYLANKPKVILSLKQKTGLV

SEQ ID NO: 43423 - protein, 232 aa, Yersinia entomophaga
  misc_feature (1)..(232): tr|A0A3S6EVF5|A0A3S6EVF5_YERET 7-cyano-7-deazaguanine s ynthase OS=Yersinia entomophaga OX=935293 GN=queC PE=3 SV=1
MKRAVVVFSGGQDSTTCLIQALQQYDEVHCVTFDYGQRHREEIDVARELVIQLGAKAHKVLDVCMLNELAVSSLTRDSIPVPTYEESSENAIPSTFVPGRNILFLTLAAIYAYQVQAEAVITGVCETDFSGYPDCRDEFVKALNHAINLGIARDIAFITPLMWLDKAETWALADYYQQLDLIRHHTLTCYNGIKGDGCGECAACHLRANGLNNYLTNKSAVTTSLKKKIGLL

SEQ ID NO: 43424 - protein, 232 aa, Yersinia frederiksenii
  misc_feature (1)..(232): tr|A0A0B6FLN8|A0A0B6FLN8_YERFR 7-cyano-7-deazaguanine s ynthase OS=Yersinia frederiksenii Y225 OX=1454377 GN=qu eC PE=3 SV=1
MKRAVVVFSGGQDSTTCLIQALQQYDEVHCITFDYGQRHRTEIDVARDLAIQLGAKAHKVLDVTMLNELAVSSLTRDSIPVPIHNEEAGDSLPSTFVPGRNILFLTLAAIYAYQVQAQAVITGVCETDFSGYPDCRDEFVKALNHAIDLGIGRDIAFITPLMWLDKAETWALADYYQQLDRVRHDTLTCYNGIQGDGCGQCAACHLRAKGLEFYLANKSKVLLSLKQKTGLV

SEQ ID NO: 43425 - protein, 232 aa, Yersinia frederiksenii
  misc_feature (1)..(232): tr|A0A0T9UJ51|A0A0T9UJ51_YERFR 7-cyano-7-deazaguanine s ynthase OS=Yersinia frederiksenii OX=29484 GN=queC PE=3 SV=1
MRRAVVVFSGGQDSTTCLIQALQQYDEVHCITFDYGQRHRAEIEVARKLAAQLGVKAHKVLDVGMLNELAVSSLTRDSIPVPTYNEDEKDRVPSTFVPGRNILFLTLAAIYAYQVQAEAVITGVCETDFSGYPDCRDEFVKALNHAIDLGIGRDIAFITPLMWLDKAETWALADYYQQLELVRHSTLTCYNGVQGDGCGQCAACHLRARGLESYQANKAKTLLSLKQKTGLV

SEQ ID NO: 43426 - protein, 232 aa, Yersinia hibernica
  misc_feature (1)..(232): tr|A0A481QFT1|A0A481QFT1_9GAMM 7-cyano-7-deazaguanine s ynthase OS=Yersinia hibernica OX=2339259 GN=queC PE=3 S V=1
MKRAVVVFSGGQDSTTCLIQALQQYDEVHCITFDYGQRHRAEIDVARKLATQLGAKAHKVLDVGMLNELAVSSLTRDSIPVPTYSEEEGNSLPSTFVPGRNILFLTLAAIYAYQVQAQAVITGVCETDFSGYPDCRDEFVKALNQAIDLGIGRNIAFITPLMWLDKAETWALADYYQQLDRVRHDTLTCYNGIQGDGCGQCAACHIRAKGLEFYLANKAKILLNLKQKTGLI

SEQ ID NO: 43427 - protein, 232 aa, Yersinia intermedia
  misc_feature (1)..(232): tr|A0A209A1C6|A0A209A1C6_YERIN 7-cyano-7-deazaguanine s ynthase OS=Yersinia intermedia OX=631 GN=queC PE=3 SV=1
MKRAVVVFSGGQDSTTCLIQALQQYDEVHCITFDYGQRHRAEIDVARALATQLGAKAHKVLDVGMLNELAVSSLTRDSIPIPSFDEEDANTVPSTFVPGRNILFLTLAAIYAYQVQAQTVITGVCETDFSGYPDCRDEFVKALNRAIDLGIGRDIAFVTPLMWLDKAETWALADYYQQLERVRHDTLTCYNGIQGDGCGQCAACHLRAKGLALYLANKPKVLLSLKQKTGLI

SEQ ID NO: 43428 - protein, 232 aa, Yersinia intermedia
  misc_feature (1)..(232): tr|A0A0U1EP47|A0A0U1EP47_YERIN 7-cyano-7-deazaguanine s ynthase OS=Yersinia intermedia OX=631 GN=queC PE=3 SV=1
MKRAVVVFSGGQDSTTCLIQALQQYDEVHCITFDYGQRHRTEIDVARELALQLGATAHKVLDVGMLNELAVSSLTRDSIPVPSYDANADGALPSTFVPGRNILFLTLASIYAYQVQAQAVITGVCETDFSGYPDCRDEFIKALNHAIDLGIGRDIAFITPLMWLDKAETWALADYYQQLDLIRHHTLTCYNGIKGDGCGQCAACHLRAKGLASYMANKQQVILNLKQKVGLA

SEQ ID NO: 43429 - protein, 232 aa, Yersinia kristensenii
  misc_feature (1)..(232): tr|A0A0T9L9T1|A0A0T9L9T1_YERKR 7-cyano-7-deazaguanine s ynthase OS=Yersinia kristensenii OX=28152 GN=queC PE=3 SV=1
MKRAVVVFSGGQDSTTCLIQALQQYDEVHCMTFDYGQRHRAEIDVARDLAIQLGAKAHKVLDVTMLNELAVSSLTRDSIPVPTYNEGDGDSLPSTFVPGRNILFLTLAAIYAYQVQAQAVITGVCETDFSGYPDCRDEFVKALNHAIDLGIGRDIAFITPLMWLDKAETWALADYYQQLDRVRHDTLTCYNGIQGDGCGQCAACHLRAKGLEFYLANKSKVLLSLKQKTGLV

SEQ ID NO: 43430 - protein, 232 aa, Yersinia kristensenii; identical to SEQ ID NO: 43424
  misc_feature (1)..(232): tr|A0A0T9N8Y0|A0A0T9N8Y0_YERKR 7-cyano-7-deazaguanine s ynthase OS=Yersinia kristensenii OX=28152 GN=queC PE=3 SV=1

SEQ ID NO: 43431 - protein, 232 aa, Yersinia massiliensis
  misc_feature (1)..(232): tr|A0A0T9PKL1|A0A0T9PKL1_9GAMM 7-cyano-7-deazaguanine s ynthase OS=Yersinia massiliensis OX=419257 GN=queC PE=3 SV=1
MKRAVVVFSGGQDSTTCLIQALQQYDEVHCITFDYGQRHRAEIDVARELAIQLGAKAHKVLDVGMLNGLAVSSLTRESIPVPHHDEEDADAIPSTFVPGRNILFLTLAAIYAYQVQAQAVITGVCETDFSGYPDCRDEFVKALNQAINLGIGRNIDFITPLMWLDKAETWALADYYQRLDLVRSATLTCYNGIQGDGCGECAACHLRAKGLEFYLANKPNVLLSLKQKTGLV

SEQ ID NO: 43432 - protein, 232 aa, Yersinia massiliensis
  misc_feature (1)..(232): tr|A0A2R4NT00|A0A2R4NT00_9GAMM 7-cyano-7-deazaguanine s ynthase OS=Yersinia massiliensis OX=419257 GN=queC PE=3 SV=1
MKRAVVVFSGGQDSTTCLIQALQQYDEVHCITFDYGQRHRAEIDVARELATQLGAKAHKVLDVGMLNELAVSSLTRENIPVPHHDEEDADAIPSTFVPGRNILFLTLAAIYAYQVQAQAVITGVCETDFSGYPDCRDEFVKALNQAINLGIGRNIDFITPLMWLDKAETWALADYYQQLDRVRSSTLTCYNGIQGDGCGECAACHLRAKGLEFYLANKPNVLLSLKQKTGLV

SEQ ID NO: 43433 - protein, 232 aa, Yersinia mollaretii
  misc_feature (1)..(232): tr|A0A0U1I302|A0A0U1I302_YERMO 7-cyano-7-deazaguanine s ynthase OS=Yersinia mollaretii OX=33060 GN=queC PE=3 SV =1
MKRAVVVFSGGQDSTTCLIQALQQYDEVHCITFDYGQRHHAEIDVARELAIKLGAKAHKVLDVSMLNELAVSSLTRDSIPVPTYNEDDTDTVPSTFVPGRNILFLTLAAIYAYQVQAQAVITGVCETDFSGYPDCRDEFVKALNHAIDLGIGRDIAFITPLMWLDKAETWALADYYQQLDLVRNHTLTCYNGIQGDGCGECAACHLRAKGLERYQANKPNVLLSLKQKTGLV

SEQ ID NO: 43434 - protein, 232 aa, Yersinia mollaretii
  misc_feature (1)..(232): tr|A0A0U1K7V8|A0A0U1K7V8_YERMO 7-cyano-7-deazaguanine s ynthase OS=Yersinia mollaretii OX=33060 GN=queC PE=3 SV =1
MKRAVVVFSGGQDSTTCLIQALQQYDEVHCITFDYGQRHRAEIDVARELATQLGAKAHKVLDVGMLNELAVSSLTRDSIPVPTYNEDDTDTVPSTFVPGRNILFLTLAAIYAYQVQAQAVITGVCETDFSGYPDCRDEFVKALNHAIDLGIGRDIAFITPLMWLDKAETWALADYYQQLNLVRNHTLTCYNGIQGDGCGGCAACHLRAKGLEFYLANKPNVLLSLKQKTGLV

SEQ ID NO: 43435 - protein, 232 aa, Yersinia nurmii
  misc_feature (1)..(232): tr|A0A0T9L7N5|A0A0T9L7N5_9GAMM 7-cyano-7-deazaguanine s ynthase OS=Yersinia nurmii OX=685706 GN=queC PE=3 SV=1
MKRAVVVFSGGQDSTTCLIQALQQYDEVHCVTFDYGQRHREEIDVARELAIQLGAKAHKVLDVGMLNELAVSSLTRDSIPVPTYEESSENAIPSTFVPGRNILFLTLAAIYAYQVQAEAVITGVCETDFSGYPDCRDEFVKALNHAINLGIARDIAFITPLMWLDKAETWALADYYQQLDLIRHQTLTCYNGIKGDGCGECAACHLRANGLNNYLANKSAVTTSLKKKVGLL

SEQ ID NO: 43436 - protein, 232 aa, Yersinia pekkanenii
  misc_feature (1)..(232): tr|A0A0T9NJP8|A0A0T9NJP8_9GAMM 7-cyano-7-deazaguanine s ynthase OS=Yersinia pekkanenii OX=1288385 GN=queC PE=3 SV=1
MKRAVVVFSGGQDSTTCLIQALQQYDEVHCITFDYGQRHRAEIDVARELATRLGAKAHKVLDVGMLNELAVSSLTRDSIPVPTDSEEDADTVPSTFVPGRNILFLTLAAIYAYQVQAQAVITGVCETDFSGYPDCRDEFVKALNHAIDLGIGRDIAFITPLMWLDKAETWALADYYQQLDLVRQGTLTCYNGIQGDGCGQCAACHLRAKGLGLYLANKPDVLLSLKQKTGLV

SEQ ID NO: 43437 - protein, 232 aa, Yersinia pestis; identical to SEQ ID NO: 43428
  misc_feature (1)..(232): sp|Q8ZC72|QUEC_YERPE 7-cyano-7-deazaguanine synthase OS =Yersinia pestis OX=632 GN=queC PE=3 SV=1

SEQ ID NO: 43438 - protein, 232 aa, Yersinia pestis; identical to SEQ ID NO: 43428
  misc_feature (1)..(232): sp|Q1CL58|QUEC_YERPN 7-cyano-7-deazaguanine synthase OS =Yersinia pestis bv. Antiqua (strain Nepal516) OX=37762 8 GN=queC PE=3 SV=1

SEQ ID NO: 43439 - protein, 232 aa, Yersinia pseudotuberculosis
  misc_feature (1)..(232): tr|A0A0T9MY55|A0A0T9MY55_YERPU 7-cyano-7-deazaguanine s ynthase OS=Yersinia pseudotuberculosis OX=633 GN=queC P E=3 SV=1
MKRAVVVFSGGQDSTTCLIQALQQYDEVHCITFDYGQRHRTEIDVARKLALQLGATAHKVLDVGMLNELAVSSLTRDSIPIPPYDANAEGALPSTFVPGRNILFLTLASIYAYQVQAQAVITGVCETDFSGYPDCRDEFVKALNHAIDLGIGRDIAFITPLMWLDKAETWALADYYQQLELIRHHTLTCYNGIKGDGCGQCAACHLRAKGLASYLANKQQVILSLKQKVGLA

SEQ ID NO: 43440 - protein, 232 aa, Yersinia pseudotuberculosis; identical to SEQ ID NO: 43428
  misc_feature (1)..(232): sp|A7FLB7|QUEC_YERP3 7-cyano-7-deazaguanine synthase OS =Yersinia pseudotuberculosis serotype O:1b (strain IP 3 1758) OX=349747 GN=queC PE=3 SV=1

SEQ ID NO: 43441 - protein, 232 aa, Yersinia rohdei
  misc_feature (1)..(232): tr|A0A0U1HR72|A0A0U1HR72_YERRO 7-cyano-7-deazaguanine s ynthase OS=Yersinia rohdei OX=29485 GN=queC PE=3 SV=1
MKRAVVVFSGGQDSTTCLIQALQQYDEVHCITFDYGQRHSAEIEVARQLATQLGVKAHKVLDVGMLNELAVSSLTRDSIPVPSYHEDDENAVPNTFVPGRNILFLTLSAIYAYQVQAQAVITGVCETDFSGYPDCRDEFVKALNHAIDLGIGRDIAFITPLMWLDKAETWALADYYQQLDRVRHDTLTCYNGIQGDGCGQCAACHLRAKGLTFYLANKPKVLLSMKQKTGLN

SEQ ID NO: 43442 - protein, 232 aa, Yersinia ruckeri
  misc_feature (1)..(232): tr|A0A085U5B3|A0A085U5B3_YERRU 7-cyano-7-deazaguanine s ynthase OS=Yersinia ruckeri OX=29486 GN=queC PE=3 SV=1
MKRAVVVFSGGQDSTTCLIQALQQYDEVHCITFDYGQRHREEIEVARKLTSQLGAKAHKVLDVGMLNELAVSSLTRDNIPVPVYEENSVNTLPNTFVPGRNILFLTLAAIYAYQVQAEAVITGVCETDFSGYPDCRDEFVKALNHAINLGIARDIAFITPLMWLDKAETWALADYYQQLELIRHHTLTCYNGVQGDGCGECAACHLRAKGLNNYLANKTAVTTSLKNKTGLR

SEQ ID NO: 43443 - protein, 232 aa, Yersinia similis; identical to SEQ ID NO: 43439
  misc_feature (1)..(232): tr|A0A0T9PRB5|A0A0T9PRB5_9GAMM 7-cyano-7-deazaguanine s ynthase OS=Yersinia similis OX=367190 GN=queC PE=3 SV=1

SEQ ID NO: 43444 - protein, 232 aa, Yersinia wautersii
  misc_feature (1)..(232): tr|A0A0E8XEZ1|A0A0E8XEZ1_9GAMM 7-cyano-7-deazaguanine s ynthase OS=Yersinia wautersii OX=1341643 GN=queC PE=3 S V=1
MKRAVVVFSGGQDSTTCLIQALQQYDEVHCITFDYGQRHRTEIDVARELALQLGATAHKVLDVGMLNELAVSSLTRDSIPVPSYDANANSALPSTFVPGRNILFLTLASIYAYQVQAQAVITGVCETDFSGYPDCRDEFIKALNHAIDLGIGRDIAFITPLMWLDKAETWALADYYQQLDLIRHHTLTCYNGIKGDGCGQCAACHLRAKGLAFYIANKQQVILSLKQKVGLA

SEQ ID NO: 43445 - protein, 232 aa, Yersiniaceae bacterium
  misc_feature (1)..(232): tr|A0A2N5EQM6|A0A2N5EQM6_9GAMM 7-cyano-7-deazaguanine s ynthase OS=Yersiniaceae bacterium 2016Iso3 OX=2060066 G N=queC PE=3 SV=1
MKRAVVVFSGGQDSTTCLIQALAQYDEVHCITFDYGQRHRAEIEVAQKLSAGLGARAHKVLDVGLLNELAISSLTRDNIPVPSYGSEAAGQLPSTFVPGRNILFLTLASIYAYQIEAEAVITGVCETDFSGYPDCRDEFVKVLNQAVSLGLARDVRFETPLMWLNKAETWALADYYGQLDLVRRDTLTCYNGIQGDGCGECAACHLRANGLAVYQQDRAGVMASLKQKSGLQ

SEQ ID NO: 43446 - protein, 232 aa, Yersiniaceae bacterium
  misc_feature (1)..(232): tr|A0A2N5EAX8|A0A2N5EAX8_9GAMM 7-cyano-7-deazaguanine s ynthase OS=Yersiniaceae bacterium 2016Iso4 OX=2060068 G N=queC PE=3 SV=1
MKRAVVVFSGGQDSTTCLIQALAQYDEVHCITFDYGQRHRAEIEVAQTLSAALGARAHKVLDVGLLNELAISSLTRDNIPVPSYGSEAAGALPSTFVPGRNILFLTLASIYAYQIEAEAVITGVCETDFSGYPDCRDEFVKALNQAVSLGLARDVRFETPLMWLNKAETWALADYYGQLERIRRDTLTCYNGIQGDGCGECAACHLRANGLAVYQQDRAGVMASLKHKSGLQ

SEQ ID NO: 43447 - protein, 231 aa, Yokenella regensburgei
  misc_feature (1)..(231): tr|G9Z4A1|G9Z4A1_9ENTR 7-cyano-7-deazaguanine synthase OS=Yokenella regensburgei ATCC 43003 OX=1002368 GN=queC PE=3 SV=1
MKRAVVVFSGGQDSTTCLVQALQQYDEVHCVTFDYGQRHRAEIDVARELALKLGARAHKVLDVTLLNELAVSSLTRDSIPVPDYEPDADGIPNTFVPGRNILFLTLTAIYAYQVKAEAVITGVCETDFSGYPDCRDEFVKALNHAVDLGMAKEIRFETPLMWLDKAETWALADFWGKLDLVRSETLTCYNGIKGDGCGHCAACSLRANGLNHYLADKAGVMAAMKAKTGLN

SEQ ID NO: 43448 - protein, 231 aa, Yokenella regensburgei; identical to SEQ ID NO: 43447
  misc_feature (1)..(231): tr|A0A2X2QUN8|A0A2X2QUN8_9ENTR 7-cyano-7-deazaguanine s ynthase OS=Yokenella regensburgei OX=158877 GN=queC PE= 3 SV=1

SEQ ID NO: 43449 - protein, 233 aa, Yoonia maritima
  misc_feature (1)..(233): tr|A0A2T0VT87|A0A2T0VT87_9RHOB 7-cyano-7-deazaguanine s ynthase OS=Yoonia maritima OX=1435347 GN=queC PE=3 SV=1
MKTIVICSGGLDSVSLTHVVANDGNLSRLVSFDYGQRHRKELDYAAACAVRLGVPHHIIDMRQIGAALSGSALTDDIDVPDGHYAEETMKITVVPNRNAIMLTIAYGIAAANGDDAVATAVHGGDHFIYPDCRPAFTESFDRMQRAALDGYADVTLSTPFVHRSKAEIVTEGARVGTPFAETWSCYKGGEKQCGRCGTCVERREAFHLAGVEDPTDYEDPDFWQAAIAAHEGN

SEQ ID NO: 43450 - protein, 233 aa, Yoonia sediminilitoris
  misc_feature (1)..(233): tr|A0A2T6KC79|A0A2T6KC79_9RHOB 7-cyano-7-deazaguanine s ynthase OS=Yoonia sediminilitoris OX=1286148 GN=queC PE =3 SV=1
MKTIVICSGGLDSVSLAHMVAQEQQLTRLVSFDYGQRHRKELNYASLCAQRLDVPLDIIDLRGIGAALTGSALTDDIDVPDGHYAEESMRVTVVPNRNAIMLAVAFGVAAAQGDQAVATAVHGGDHFIYPDCRPSFTQAFETMQKAALDGYADVSLYTPFVHRTKADIVTEGARHSTPFAQTWSCYKGGEKHCGRCGTCVERREAFHLANIADPTTYADPDYWIAAIARKDRG

SEQ ID NO: 43451 - protein, 232 aa, Yoonia vestfoldensis
  misc_feature (1)..(232): tr|A0A1Y0E731|A0A1Y0E731_9RHOB 7-cyano-7-deazaguanine s ynthase OS=Yoonia vestfoldensis OX=245188 GN=queC PE=3 SV=1
MKTIVICSGGLDSVSLAHKVADENDLIGLVSFDYGQRHKKEVEFAARCADRLGVPHDLIDMRHIGQHLSGSALTDDVDVPDGHYAEDSMKITVVPNRNAIMLAIAFGIGAAKGADAVAAAVHGGDHFIYPDCRPEFIDAFEAMQKHALDGYAAIRLYTPFVHIPKSAIVIEGAAHGTPFGDTWSCYKGGEKHCGRCGTCVERQEAFALAEVIDPTEYDDPDFWKTTVEKGQL

SEQ ID NO: 43452 - protein, 232 aa, Zavarzinia sp.
  misc_feature (1)..(232): tr|A0A317ECN1|A0A317ECN1_9PROT 7-cyano-7-deazaguanine s ynthase OS=Zavarzinia sp. HR-AS OX=2211142 GN=queC PE=3 SV=1
MTEKALVLFSGGQDSTVCLAWALDRFETVETIGFDYGQRHSVELECRQTLRRRLAEEFPQWRGRLGEDHLLDLGILGAISETALTRADEIRLQADGLPNTFVPGRNLLFFTFAATIAWRRGLRHLVGGMCETDYSGYPDCRDDTLKALQVALNLGMDRRFVVETPLMWIDKAQTWALTERLGGTALVELIRTESHSCYKGERQIEHPWGRGCGQCPACELRAAGWAKWRAGR

SEQ ID NO: 43453 - protein, 232 aa, Zetaproteobacteria bacterium
  misc_feature (1)..(232): tr|A0A2A5F7J8|A0A2A5F7J8_9PROT 7-cyano-7-deazaguanine s ynthase OS=Zetaproteobacteria bacterium OX=2026807 GN=q ueC PE=3 SV=1
MSKEIQHLTKAVVLLSGGLDSATALAWALDQGWACTTLSFNYGQRHDVELQAAVKIADIYGITDHRVIDVSLGVIGGSALTSSLDVPKDLPESSEIPVTYVPARNLVFLSLAAGLAETVGAMKIVIGANVVDYSGYPDCRPDFLSAFETVANLGTKAGAEGQRFEVVAPLICLDKSEIIRLGLSLGVDYGLTRSCYDPDTYGNPCGHCDSCLFRKSGFDKLGEKDPLNYRDS

SEQ ID NO: 43454 - protein, 234 aa, Zetaproteobacteria bacterium
  misc_feature (1)..(234): tr|A0A2A5H1A3|A0A2A5H1A3_9PROT 7-cyano-7-deazaguanine s ynthase OS=Zetaproteobacteria bacterium OX=2026807 GN=q ueC PE=3 SV=1
MKILVICSGGLDSVTLAYKIAKEHDLMGLISFDYGQKHKKELAYAEKCAKALNVSYDMIDISTVGGLLSGSALTEDGIDVPDGHYAEDSMKLTIVPNRNAIMLSIAYGIASARGADAVATAVHGGDHFIYPDCRPDFINTFQTMQDHALGEHIRLYTPFIDIPKSEIAAQTAPLNVPVIDTWSCYKGGDIHCGRCGTCVERIEAFHIAKVADPTQYADPDFWIKTTQNTKTETA

SEQ ID NO: 43455 - protein, 234 aa, Zhizhongheella caldifontis
  misc_feature (1)..(234): tr|A0A2S5SUD2|A0A2S5SUD2_9BURK 7-cyano-7-deazaguanine s ynthase OS=Zhizhongheella caldifontis OX=1452508 GN=que C PE=3 SV=1
MADPRTALVLFSGGQDSTVCLAWALSRFQRVETIGFDYGQRHRIELDCRLTVRDALCRAFPAWAARLGDDHVLDLALLGQLSDTALTEARAIEMQANGLPNTFVPGRNLLFLTFAATLAYRRGASVLVGGMCETDYSGYPDCRDNTLKALQVALSLGMDTPMTVETPLMWLNKAQTWALAQALGGAALVDLIVEHTHTCYLGDRSSRHAWGWGCGHCPACELRARGHADFLAGA

SEQ ID NO: 43456 - protein, 225 aa, Zhongshania aliphaticivorans
  misc_feature (1)..(225): tr|A0A127M3N2|A0A127M3N2_9GAMM 7-cyano-7-deazaguanine s ynthase OS=Zhongshania aliphaticivorans OX=1470434 GN=q ueC PE=3 SV=1
MQKKAVVLVSGGLDSATVLAQAIKAGYECYALAFDYGQRHRAELVAASRVAESGGAKEFKIIKLDLSSIGGSALTDMKIDVPDAGAVGIPVTYVPARNTVFLSIALGWAEVLDADDIFIGVNAVDYSGYPDCRPAFIEAFETLANVATKAGVEGHGMRIHTPLMALSKADIVKLGTGLGVDYGQTVSCYRANTEGEACGRCDSCHLRREGFLQAGVADPTRYHKL

SEQ ID NO: 43457 - protein, 225 aa, Zhongshania sp.
  misc_feature (1)..(225): tr|A0A3N0CRD8|A0A3N0CRD8_9GAMM 7-cyano-7-deazaguanine s ynthase OS=Zhongshania sp. DSW25-10 OX=2304603 GN=queC PE=3 SV=1
MAKKAVVLVSGGLDSATVLAQAVAAGYECYALAFDYGQRHRAELVAAKRVAETGGATEFKVIRLDLSSIGGSALTDMNIAVPDAGATGIPVTYVPARNTVFLSIALGWAEVLDADDIFIGVNAVDYSGYPDCRPAFIDAFETLANVATKAGVEGHGMQIHTPLMTLSKAEIVKAGTALGVDYAQTVSCYSANDDGEACGRCDSCFLRREGFEQAGINDPTRYSKQ

SEQ ID NO: 43458 - protein, 225 aa, Zhongshania sp.; identical to SEQ ID NO: 43457
  misc_feature (1)..(225): tr|A0A2S4HC82|A0A2S4HC82_9GAMM 7-cyano-7-deazaguanine s ynthase OS=Zhongshania sp. ZX-21 OX=2067667 GN=queC PE= 3 SV=1

SEQ ID NO: 43459 - protein, 235 aa, Zobellella denitrificans
  misc_feature (1)..(235): tr|A0A291HPW4|A0A291HPW4_9GAMM 7-cyano-7-deazaguanine s ynthase OS=Zobellella denitrificans OX=347534 GN=queC P E=3 SV=1
MNALLICSGGFDSVTLAHRLAAEQSLGALLTFDYGQRHKKEIDAARRCAERLAVPHLVMDIGHIGRQLSGSALTDDIEVPHGHYSEENMKVTVVPNRNAIMLTIAFGVAAARGLDTVALAVHGGDHFIYPDCRPDFIRLFGEMQARALEGVAEVALLAPYVNTDKAEIARDAARFDVPVADTWSCYEGGDLHCGRCGTCVERIEAMALAGVVDPTAYKDEQYWREAVARVNACTP

SEQ ID NO: 43460 - protein, 235 aa, Zobellella denitrificans
  misc_feature (1)..(235): tr|A0A231MVT5|A0A231MVT5_9GAMM 7-cyano-7-deazaguanine s ynthase OS=Zobellella denitrificans OX=347534 GN=queC P E=3 SV=1
MNALLICSGGFDSVTLAHRLAAEQSLGALLTFDYGQRHKKEIDAARRCAERLAVPHLVMDIGHIGRQLSGSALTDDIEVPHGHYSEENMKVTVVPNRNAIMLTIAFGVAAARGLDTVALAVHGGDHFIYPDCRPDFIRLFGEMQARALEGVAEVALLAPYVNTDKTEIARDTARFNVPVADTWSCYEGGDLHCGRCGTCVERIEAMALAGVADPTPYKDEQYWREAVARVNACTP

SEQ ID NO: 43461 - protein, 235 aa, Zobellella endophytica
  misc_feature (1)..(235): tr|A0A2P7RBD3|A0A2P7RBD3_9GAMM 7-cyano-7-deazaguanine s ynthase OS=Zobellella endophytica OX=2116700 GN=queC PE =3 SV=1
MKALLICSGGFDSVTLAHRLAAEQSLGALLTFDYGQRHKKEIDAARRCAERLAVPHLVMDIGHIGRQLSGSALTDDIEVPHGHYSEENMKVTVVPNRNAIMLTIAFGVAAARGLDTVALAVHGGDHFIYPDCRPDFIRLFGEMQARALEGVAEVALLAPYVNSDKTGIARDAARFAVPVADTWSCYEGGDLHCGRCGTCVERIEALALAGVADPTPYRDEQYWREAVARVKACTP

SEQ ID NO: 43462 - protein, 231 aa, Zobellella taiwanensis
  misc_feature (1)..(231): tr|A0A2P7RE19|A0A2P7RE19_9GAMM 7-cyano-7-deazaguanine s ynthase OS=Zobellella taiwanensis OX=347535 GN=queC PE= 3 SV=1
MKALLICSGGFDSVTLAYRLAADNALGALLTFDYGQRHKKEIDAARLCAERLGVPHLVMDIGHIGRQLSGSALTDDIDVPHGHYSEENMKVTVVPNRNAIMLTIAFGVAAARGLDTVALAVHGGDHFIYPDCRPDFIRLFGDMQAKALDGVAEVALLAPYVNADKTEIARDAARFNVPVAETWSCYEGGDIHCGRCGTCVERIEAMALAGLADPTPYQDDQFWRDAVARAK

SEQ ID NO: 43463 - protein, 225 aa, Zoogloea ramigera
  misc_feature (1)..(225): tr|A0A4Y4CTW2|A0A4Y4CTW2_ZOORA 7-cyano-7-deazaguanine s ynthase OS=Zoogloea ramigera OX=350 GN=queC PE=3 SV=1
MTKPRALVLLSGGLDSATCLAIARDAGFETYALSVEYGQRHAAELAAARRVAAALGAVAHRVAHVDLGQFGGSALTDPALAVPTDGLDGGIPITYVPARNTIMLSIAMAWAEVLGARHIYVGVNAVDYSGYPDCRPAFIEAFETMANLATKAGVEGHRLTIHAPLIDLSKAQIIQRGTELGVDYGLTVSCYQADDDGRACGLCDACRLRRAGFEAAGLPDPTPYR

SEQ ID NO: 43464 - protein, 227 aa, Zoogloea sp.
  misc_feature (1)..(227): tr|A0A5C7KFR4|A0A5C7KFR4_9RHOO 7-cyano-7-deazaguanine s ynthase OS=Zoogloea sp. OX=49181 GN=queC PE=3 SV=1
MTTPRPRALVLLSGGLDSATCLAIARAEGFDAYALSVEYGQRHAAELAAAQRVAKALGATAHRVAHVDLGQFGGSALTDPALAVPIEGLEGGIPITYVPARNTIMLSIALAWAEVLGADHIYVGVNAVDYSGYPDCRPAFISAFETMANLATKAGVEGHKLHIHAPLIDLSKADIIRRGTALGVDYGLTVSCYQADDEGRACGLCDACRLRRAGFEAAGVADPTPYR

SEQ ID NO: 43465 - protein, 230 aa, Zoogloeaceae bacteirum
  misc_feature (1)..(230): tr|A0A2S0QTS2|A0A2S0QTS2_9RHOO 7-cyano-7-deazaguanine s ynthase OS=Zoogloeaceae bacteirum Par-f-2 OX=2080469 GN =queC PE=3 SV=1
MEQTPRAVVLLSGGLDSATCLAIARDMGFECYALSVAYGQRHAAELTASKRVADALGAREHRLARVNLGQFGGSALTDPAIQVPEGDSGNGIPVTYVPARNTVMLSIALAWAEVLDARDIFVGVNAVDYSGYPDCRPEFIRAFETMANLATKTGVEGARLRIHAPLIELSKAEIIQLGTRLGVDYGITVTCYQADEQGRACGRCEACRLRRAGFQAAGIEDPTPYQGRDG

SEQ ID NO: 43466 - protein, 243 aa, Zooshikella ganghwensis
  misc_feature (1)..(243): tr|A0A4P9VMP2|A0A4P9VMP2_9GAMM Uncharacterized protein OS=Zooshikella ganghwensis OX=202772 GN=B9G39_12245 PE= 4 SV=1
MAIYHVLWTGGWDSTFRLLDLLINKAAPVVPYYILNTDRTSTGIELSTMTRIKRAIQQQWPDATQRLSPTVFRAANDVESVGRLIESYDTILQSQYIGPQYEWLAKFAHQLNLHDLELSIHKDDKAHDVLLPYVIKQADEHGPYWVVNPELKSTPEYQLFHYFRFPLFELTKLEMAQQAQDSGFSDILEMTWFCHEPLANQQPCGTCNPCRYTIEEGLSRRIPWRGKLRYWGKRALTPLLSRS

SEQ ID NO: 43467 - protein, 224 aa, Zooshikella ganghwensis
  misc_feature (1)..(224): tr|A0A4P9VJF5|A0A4P9VJF5_9GAMM 7-cyano-7-deazaguanine s ynthase OS=Zooshikella ganghwensis OX=202772 GN=queC PE =3 SV=1
MKKAVVLLSGGLDSTTCLAYAKSQGYECYALSFDYGQKHNSELEAAKRIAHAMNAARHEVLPLQLNQLTRSALTDQSIDIPDYVDDGEIPVTYVPARNTILIAVALGWAEVLEADAIFIGVSSVDYSGYPDCRPEYIEAYRKLAELATKVGVEGKPISIETPLIHLNKAETIQLGHKLGVDYGLTVSCYRANDEGEACGECDSCYLRKKGFSDAGVEDPTHYIQ

SEQ ID NO: 43468 - protein, 242 aa, Zymobacter palmae
  misc_feature (1)..(242): tr|A0A348HE37|A0A348HE37_9GAMM 7-cyano-7-deazaguanine s ynthase OS=Zymobacter palmae OX=33074 GN=queC PE=3 SV=1
MSEHTPVSASNAVLSSSIPASRRAVVIYSGGMDSFTVLHKAIAQGFEVHALSFNYGQRHSRELESARKVCAQLGLSHKVVDIRAIHGLIDNSSLTNNDQALPTGDYDEGNMTSTVVPNRNMILLSLAIGYAVNIDAEHCFYGAHGGDHAIYPDCRPEFVEKMQDVARIANYTPVEVHAPYLTASKADILADGIAMGLDYADTWTCYLGEEAACGECGSCRERLAAFAAHGLTDPVPYRQSKG

SEQ ID NO: 43469 - protein, 254 aa, Zymomonas mobilis
  misc_feature (1)..(254): tr|A0A2R9NTM5|A0A2R9NTM5_ZYMMB 7-cyano-7-deazaguanine s ynthase OS=Zymomonas mobilis subsp. mobilis NRRL B-1252 6 OX=1194424 GN=queC PE=3 SV=1
MTANQTKKSVPSFTSDIRQGVSNEGCLVLYSGGQDSATCLAWALEHFDRVETIGFDYGQRHKIELECRENLKQKLIENFPDWAAHLGEDHMLDLAVLHQVSDCALTRETEIAFGEDGIPNSFVPGRNLLFFTFAATIAYRRGLRHIVGGMCETDYSGYPDCRDDTIKALQVAINLGLERRLVLHTPLMWLDKASTWQMAEEVGGKELVEIIRQESHSCYLGEREILHDWGYGCGHCPACELRAAGWESYQKSRS

SEQ ID NO: 43470 - protein, 254 aa, Zymomonas mobilis
  misc_feature (1)..(254): sp|Q5NNR3|QUEC_ZYMMO 7-cyano-7-deazaguanine synthase OS =Zymomonas mobilis subsp. mobilis (strain ATCC 31821 / ZM4 / CP4) OX=264203 GN=queC PE=3 SV=1
MTANQTKKSVPSFTSDIRQGVSNEGCLVLYSGGQDSATCLAWALEHFDRVETIGFDYGQRHKVELECRENLKQKLIQNFPDWAAHLGEDHMLDLAVLHQVSDCALTRETEIAFGEDGIPNSFVPGRNLLFFTFAATIAYRRGLRHIVGGMCETDYSGYPDCRDDTIKALQVAINLGLERRLVLHTPLMWLDKASTWQMAEEVGGKELVEIIRQESHSCYLGEREILHDWGYGCGHCPACELRAAGWESYQKSRS

SEQ ID NO: 43471 - protein, 231 aa, Escherichia coli; identical to SEQ ID NO: 35457
  misc_feature (1)..(231): sp|P77756|QUEC_ECOLI 7-cyano-7-deazaguanine synthase OS =Escherichia coli (strain K12) OX=83333 GN=queC PE=1 SV =1

SEQ ID NO: 43472 - protein, 231 aa, Escherichia coli
  misc_feature (1)..(231): sp|B7L681|QUEC_ECO55 7-cyano-7-deazaguanine synthase OS =Escherichia coli (strain 55989 / EAEC) OX=585055 GN=qu eC PE=3 SV=1
MKRAVVVFSGGQDSTTCLVQALQQYDEVHCVTFDYGQRHRAEIDVARELALKLGARARKVLDVTLLNELAVSSLTRDSIPVPDYEPEADGIPNTFVPGRNILFLTLAAIYAYQVKAEAVITGVCETDFSGYPDCRDEFVKALNHAVSLGMAKDIRFETPLMWIDKAETWALADYYGKLDLVRNETLTCYNGIKGDGCGHCAACNLRANGLNHYLADKPTVMAAMKQKTGLR

SEQ ID NO: 43473 - protein, 231 aa, Escherichia coli
  misc_feature (1)..(231): sp|B1J004|QUEC_ECOLC 7-cyano-7-deazaguanine synthase OS =Escherichia coli (strain ATCC 8739 / DSM 1576 / Crooks ) OX=481805 GN=queC PE=3 SV=1
MKRAVVVFSGGQDSTTCLVQALQQYDEVHCVTFDYGQRHRAEIDVARELALKLGARAHKVLDVTLLNELAVSSLTRDSIPVPDYEPEADGIPNTFVPGRNILFLTLAAIYAYQVKAEAVITGVCETDFSGYPDCRDEFVKALNHAVSLGMAKDIRFETPLMWIDKAETWALADYYGKLDLVRNETLTCYNGIKGDGCSHCAACNLRANGLNHYLADKPTVMAAMKQKTGLR

SEQ ID NO: 43474 - protein, 119 aa, Abditibacterium utsteinense
  misc_feature (1)..(119): tr|A0A2S8SQB4|A0A2S8SQB4_9BACT NADPH-dependent 7-cyano- 7-deazaguanine reductase OS=Abditibacterium utsteinense OX=1960156 GN=queF PE=3 SV=1
MAALTPSKTIESFPNPHPDNTYTIQFSTQEFTTLCPLTGQPDFASIHVEYCPGEKCLESKSIKQFLWSFRDEGNFHEDVTNLILNEMVRACQPKWMVVTGHFNARGGIDFIIKARHDAK

SEQ ID NO: 43475 - protein, 163 aa, Abiotrophia defectiva
  misc_feature (1)..(163): tr|W1Q377|W1Q377_ABIDE NADPH-dependent 7-cyano-7-deazag uanine reductase OS=Abiotrophia defectiva ATCC 49176 OX =592010 GN=queF PE=3 SV=1
MRQAQEMGSVSHLGSQGTQYRDDYAPEVLETFPNKHQGNDYFVKFNCPEFTSLCPITGQPDFATLYISYVPGAQMVESKSLKLYLFSFRNHGDFHEDCMNIIMKDLIALMDPKYIEVWGKFTPRGGISIDPYCNYGKPGTPWEQVAWNRLANHDLYPETVDNR

SEQ ID NO: 43476 - protein, 137 aa, Abyssibacter profundi
  misc_feature (1)..(137): tr|A0A363UMY8|A0A363UMY8_9GAMM NADPH-dependent 7-cyano- 7-deazaguanine reductase OS=Abyssibacter profundi OX=21 82787 GN=queF PE=3 SV=1
MSTQPSKDLETFPNPNPERDFLIQMRIPEFTCLCPKTGQPDFATIHLDYIADQTCVELKSLKLYMWSFRDEGAFHEAVTNRILDDLVAATSPRYMRVTAEFYVRGGIYTNVVAEHRAEDWTPAPPAPVPPAVTGVGQ

SEQ ID NO: 43477 - protein, 164 aa, Abyssicoccus albus
  misc_feature (1)..(164): tr|A0A3N5CIH9|A0A3N5CIH9_9STAP NADPH-dependent 7-cyano- 7-deazaguanine reductase OS=Abyssicoccus albus OX=18174 05 GN=queF PE=3 SV=1
MRDQNKLNESISHLGNQNTQYPTTYTPDVLESFDNKHPYRDYFVKFNCPEFTSLCPITNQPDFATIYISYIPDQKMVESKSLKLYLFSFRNHGDFHEDCMNIIMNDLIELMDPRYIEVWGKFTPRGGISIDPYCNYGKAGTKYEQLAENRLFNHDLYPEKIDNR

SEQ ID NO: 43478 - protein, 144 aa, Acaryochloris marina
  misc_feature (1)..(144): sp|B0CDX9|QUEF_ACAM1 NADPH-dependent 7-cyano-7-deazagua nine reductase OS=Acaryochloris marina (strain MBIC 110 17) OX=329726 GN=queF PE=3 SV=1
MSQSPIQNPTSDPNAQSVQETSESKYGERQIAEGTLITFPNPRVGRRYDIHITLPEFTCKCPFSGYPDFATIHLTYVPDQRVVELKALKLYINSYRDRYISHEESVNQILDDIVAACDPLEITVKGDFLPRGNVHTVIEVHHQK

SEQ ID NO: 43479 - protein, 142 aa, Acaryochloris sp.
  misc_feature (1)..(142): tr|A0A2W1JBC8|A0A2W1JBC8_9CYAN NADPH-dependent 7-cyano- 7-deazaguanine reductase OS=Acaryochloris sp. RCC1774 O X=1764569 GN=queF_2 PE=3 SV=1
MSQSSASVTELTNPIPSADPKYGERSIEEGELTTFPNPRPGRRYSIQISLPEFTCKCPFSGYPDFATIHLTYSPDQRVVELKALKLYINGYRDRYISHEESINQIMDDIVAAIDPLEIGVKGDFSPRGNVHTVIEVSHQKAS

SEQ ID NO: 43480 - protein, 139 aa, Accumulibacter phosphatis
  misc_feature (1)..(139): tr|C7RKG9|C7RKG9_ACCPU NADPH-dependent 7-cyano-7-deazag uanine reductase OS=Accumulibacter phosphatis (strain U W-1) OX=522306 GN=queF PE=3 SV=1
MSTEPAKTLDTFPNPAPQRDFHIHMEIPEFTCLCPKTGQPDFATLLLDYVPDEACVELKSLKLYIWSFRNTGCFHEEVSNRILDDLVSATRPRYMKLTAKFYVRGGIFTTVVAEYRQEGWAPTATVQLADLPSQYSTRG

SEQ ID NO: 43481 - protein, 162 aa, Acetitomaculum ruminis
  misc_feature (1)..(162): tr|A0A1I0YWV8|A0A1I0YWV8_9FIRM NADPH-dependent 7-cyano- 7-deazaguanine reductase OS=Acetitomaculum ruminis DSM 5522 OX=1120918 GN=queF PE=3 SV=1
MRDKEKENLTLLGSKNNKYEFDYAPDLLETFINKHPDNDYFVKFNCPEFTSLCPITGQPDFATIYISYVPSEKMVESKSLKLYLFSFRNRGDFHEDCVNIIMKDLIKLMDPKYIEVWGKFLPRGGISIDPYCNYGKAGTKWEEVAWNRMANHDLYPEEVNNR

SEQ ID NO: 43482 - protein, 156 aa, Acetobacter aceti
  misc_feature (1)..(156): tr|A0A0D6MW89|A0A0D6MW89_ACEAC NADPH-dependent 7-cyano- 7-deazaguanine reductase OS=Acetobacter aceti NBRC 1481 8 OX=887700 GN=queF PE=3 SV=1
MTAQNDGRETLTQLGRSTPMPQSPEEAELERVPAPHKGRQYVVRFTAPEFTSLCPVTGQPDFAHLVIDYIPRDWIVESKSLKLYLTSFRNHGAFHEDCSVTIAETLVKLLDPVWLRIGAYWYPRGGMPIDVFWQTGLPPEGVWIPAQDVPGYRGRG

SEQ ID NO: 43483 - protein, 156 aa, Acetobacter aceti
  misc_feature (1)..(156): tr|A0A1U9KIF7|A0A1U9KIF7_ACEAC NADPH-dependent 7-cyano- 7-deazaguanine reductase OS=Acetobacter aceti OX=435 GN =queF PE=3 SV=1
MTAQNDGRETLTQLGRSTPMPQSPEEAELERVPAPHKGRQYVVRFTAPEFTSLCPVTGQPDFAHLVIDYIPRDWIVESKSLKLYLTSFRNHGAFHEDCSVTIAETLVKRLDPVWLRIGAYWYPRGGMPIDVFWQTGLPPEGVWIPAQDVPGYRGRG

SEQ ID NO: 43484 - protein, 156 aa, Acetobacter ascendens
  misc_feature (1)..(156): tr|A0A1D8QYZ1|A0A1D8QYZ1_9PROT NADPH-dependent 7-cyano- 7-deazaguanine reductase OS=Acetobacter ascendens OX=48 1146 GN=queF PE=3 SV=1
MTSTDDGRDQLTQLGKQVAAPQSPEEAILERVPAPYPDKHYLVRFTAPEFTSLCPITGQPDFAHIVIDYVPDKWIVESKSLKLYLTSFRNHGAFHEACSIQIANTLVERLAPRWLRIGAYWYPRGGIPIDVFWQTGEPPAGVWVPEQDVPTYRGRG

SEQ ID NO: 43485 - protein, 156 aa, Acetobacter cerevisiae
  misc_feature (1)..(156): tr|A0A149Q5Z8|A0A149Q5Z8_9PROT NADPH-dependent 7-cyano- 7-deazaguanine reductase OS=Acetobacter cerevisiae OX=1 78900 GN=queF PE=3 SV=1
MTRPDDGSDALTQLGRATPAPTCPEDAVLERVPAPYPGKNYLVRFTAPEFTSLCPVTGQPDFAHIVIDYVPDQWIVESKSLKLFLTSFRNHGAFHEACSVQIATTLVERLNPVWLRIGAYWYPRGGIPIDVFWQTGAPPADVWIPSQDVPTYRGRG

SEQ ID NO: 43486 - protein, 156 aa, Acetobacter cerevisiae
  misc_feature (1)..(156): tr|A0A149VEG8|A0A149VEG8_9PROT NADPH-dependent 7-cyano- 7-deazaguanine reductase OS=Acetobacter cerevisiae OX=1 78900 GN=queF PE=3 SV=1
MTRPDDGSDALTQLGRATPAPTCPEEAVLERVPAPYPGKNYLVRFTAPEFTSLCPVTGQPDFAHIVIDYVPDQWIVESKSLKLFLTSFRNHGAFHEACSVQIATTLVERLNPVWLRIGAYWYPRGGIPIDVFWQTGAPPTDVWIPSQDVPTYRGRG

SEQ ID NO: 43487 - protein, 156 aa, Acetobacter cibinongensis
  misc_feature (1)..(156): tr|A0A0D6N524|A0A0D6N524_9PROT NADPH-dependent 7-cyano- 7-deazaguanine reductase OS=Acetobacter cibinongensis 4 H-1 OX=1231339 GN=queF PE=3 SV=1
MSRPDDGSAALSQLGRNIAAPSCPEEAVLERVPAPYPDRNYLVRFTAPEFTSLCPVTSQPDFAHLVIDYVPDKWIVESKSLKLFLTSFRNHGAFHEACSIQIATTLVDLLSPVWLRIGAYWYPRGGIPIDVFWQTGAPPVDVWIPSQDVPTYRGRG

SEQ ID NO: 43488 - protein, 156 aa, Acetobacter cibinongensis; identical to SEQ ID NO: 43487
  misc_feature (1)..(156): tr|A0A1Z5YVA2|A0A1Z5YVA2_9PROT NADPH-dependent 7-cyano- 7-deazaguanine reductase OS=Acetobacter cibinongensis O X=146475 GN=queF PE=3 SV=1

SEQ ID NO: 43489 - protein, 160 aa, Acetobacter fabarum
  misc_feature (1)..(160): tr|A0A269XVU6|A0A269XVU6_9PROT NADPH-dependent 7-cyano- 7-deazaguanine reductase OS=Acetobacter fabarum OX=4831 99 GN=queF PE=3 SV=1
MEKTMNTADDGRHALTQLGRQIAPPNSPEEAVLERVPAPNPDKRYMVRFTAPEFTSLCPITGQPDFAHIVLDYVPDQWIVESKSLKLFLTSFRNHGAFHEACSVQIASTLVDLLNPVWLRIGAYWYPRGGIPIDVFWQTGDAPAGVWIPAQDVPSYRGRG

SEQ ID NO: 43490 - protein, 156 aa, Acetobacter ghanensis
  misc_feature (1)..(156): tr|A0A0U5F5E0|A0A0U5F5E0_9PROT NADPH-dependent 7-cyano- 7-deazaguanine reductase OS=Acetobacter ghanensis OX=43 1306 GN=queF PE=3 SV=1
MNRPDDGSHALTQLGRQIAPPSSPEEAVLERVPAPYPDKRYMVRFTAPEFTSLCPITGQPDFAHIVLDYVPDQWIVESKSLKLFLTSFRNHGAFHEACSVQIANTLVELLNPVWLRIGAYWYPRGGIPIDVFWQTGEPPAGVWIPAQDVPSYKGRG

SEQ ID NO: 43491 - protein, 156 aa, Acetobacter indonesiensis
  misc_feature (1)..(156): tr|A0A252AWS0|A0A252AWS0_9PROT NADPH-dependent 7-cyano- 7-deazaguanine reductase OS=Acetobacter indonesiensis O X=104101 GN=queF PE=3 SV=1
MTRPDDGSSALTQLGRHTPAPNNPEDAVLERVPAPYPGKNYLVRFTAPEFTSLCPVTGQPDFAHIVIDYVPDQWIVESKSLKLFLTSFRNHGAFHEACSVQIATTLVDLLSPVWLRIGAYWYPRGGIPIDVFWQTGAPPADIWIPSQDVPTYRGRG

SEQ ID NO: 43492 - protein, 156 aa, Acetobacter indonesiensis
  misc_feature (1)..(156): tr|A0A0D6NCU8|A0A0D6NCU8_9PROT NADPH-dependent 7-cyano- 7-deazaguanine reductase OS=Acetobacter indonesiensis 5 H-1 OX=1231340 GN=queF PE=3 SV=1
MTRPDDGSSALTQLGRHTPAPNNPEDAVLERVPAPYPGKNYLVRFTAPEFTSLCPVTGQPDFAHIVIDYVPDQWIVESKSLKLFLTSFRNHGAFHEACSVQIATTLVDLLSPVWLRIGAYWYPRGGIPIDVFWQTGAPPADVWIPSQDVPTYRGRG

SEQ ID NO: 43493 - protein, 156 aa, Acetobacter malorum; identical to SEQ ID NO: 43485
  misc_feature (1)..(156): tr|A0A149RMD7|A0A149RMD7_9PROT NADPH-dependent 7-cyano- 7-deazaguanine reductase OS=Acetobacter malorum OX=1789 01 GN=queF PE=3 SV=1

SEQ ID NO: 43494 - protein, 156 aa, Acetobacter malorum
  misc_feature (1)..(156): tr|A0A149UN56|A0A149UN56_9PROT NADPH-dependent 7-cyano- 7-deazaguanine reductase OS=Acetobacter malorum OX=1789 01 GN=queF PE=3 SV=1
MTRPDDGSDALTQLGRATPAPTCPEEAVLERVPAPYPGKNYLVRFTAPEFTSLCPVTGQPDFAHIVIDYVPDQWIVESKSLKLFLTSFRNHGAFHEACSVQIATTLVERLNPVWLRIGAYWYPRGGIPIDVFWQTGAPPADVWIPSQDVPTYRGRG

SEQ ID NO: 43495 - protein, 156 aa, Acetobacter nitrogenifigens
  misc_feature (1)..(156): tr|A0A511XCE5|A0A511XCE5_9PROT NADPH-dependent 7-cyano- 7-deazaguanine reductase OS=Acetobacter nitrogenifigens DSM 23921 = LMG 23498 OX=1120919 GN=queF PE=3 SV=1
MTEHDNGAAALTQLGQATAIPASPEAAHLERVPAPHQDRQYVVRFTAPEFTSLCPVTGQPDFAHIVIDYIPREWIVESKSLKLYLTSFRNHGAFHEDCSVTIAQKLVETLDPIWLRIGAYWYPRGGMPIDVFWQTGEAPAGVWVPAQDVPGYRGRG

SEQ ID NO: 43496 - protein, 156 aa, Acetobacter oeni
  misc_feature (1)..(156): tr|A0A511XI21|A0A511XI21_9PROT NADPH-dependent 7-cyano- 7-deazaguanine reductase OS=Acetobacter oeni OX=304077 GN=queF PE=3 SV=1
MTQHDDGTKALTQLGRATAMPASPEEARLERVPAPHQRRHYVVRFTAPEFTSLCPVTGQPDFAHIVIDYIPRDWIVESKSLKLYLTSFRNHGAFHEDCSVTIAETLVTLLDPEWLRIGAYWYPRGGMPIDVFWQTGEPPATVWIPAQDVHGYRGRG

SEQ ID NO: 43497 - protein, 156 aa, Acetobacter okinawensis
  misc_feature (1)..(156): tr|A0A252BV98|A0A252BV98_9PROT NADPH-dependent 7-cyano- 7-deazaguanine reductase OS=Acetobacter okinawensis OX= 1076594 GN=queF PE=3 SV=1
MSTADDGRHALTQLGRQIAPPNSPEDAVLERVPAPYPDKRYMVRFTAPEFTSLCPITGQPDFAHIVLDYVPDKWIVESKSLKLFLTSFRNHGAFHEACSVQIASTLVDLLNPVWLRIGAYWYPRGGIPIDVFWQTGDAPAGVWIPAQDVPNYKGRG

SEQ ID NO: 43498 - protein, 156 aa, Acetobacter orientalis
  misc_feature (1)..(156): tr|A0A252C402|A0A252C402_9PROT NADPH-dependent 7-cyano- 7-deazaguanine reductase OS=Acetobacter orientalis OX=1 46474 GN=queF PE=3 SV=1
MTASDDGSAALTQLGRHTPAPNSPEEAVLERVPAPYPGKRYLVRFTAPEFTSLCPVTGQPDFAHIVIDYVPDQWIVESKSLKLFLTSFRNHGAFHEACSVQIATTLVDLLSPVWLRIGAYWYPRGGIPIDVFWQTGAPPADAWIPSQDVPTYRGRG

SEQ ID NO: 43499 - protein, 156 aa, Acetobacter orientalis
  misc_feature (1)..(156): tr|A0A252BF13|A0A252BF13_9PROT NADPH-dependent 7-cyano- 7-deazaguanine reductase OS=Acetobacter orientalis OX=1 46474 GN=queF PE=3 SV=1
MTASDDGSAALTQLGRHTPAPNSPEEAVLERVPAPYPGKRYLVRFTAPEFTSLCPVTGQPDFAHIVIDYVPDQWIVESKSLKLFLTSFRNHGAFHEACSVQIATTLVDLLSPVWLRIGAYWYPRGGIPIDVFWQTGAPPADVWIPSQDVPTYRGRG

SEQ ID NO: 43500 - protein, 156 aa, Acetobacter orleanensis
  misc_feature (1)..(156): tr|A0A4Y3TQP8|A0A4Y3TQP8_9PROT NADPH-dependent 7-cyano- 7-deazaguanine reductase OS=Acetobacter orleanensis OX= 104099 GN=queF PE=3 SV=1
MTRPDDGSDALTQLGRATPAPTCPEEAVLERVPAPYPGKNYLVRFTAPEFTSLCPVTGQPDFAHLVIDYVPDQWIVESKSLKLFLTSFRNHGSFHEACSVQIATTLVERLNPVWLRIGAYWYPRGGMPIDVFWQTGAPPADVWIPSQDVPTYRGRG

SEQ ID NO: 43501 - protein, 156 aa, Acetobacter pasteurianus
  misc_feature (1)..(156): tr|A0A0K0TEE0|A0A0K0TEE0_ACEPA NADPH-dependent 7-cyano- 7-deazaguanine reductase OS=Acetobacter pasteurianus OX =438 GN=queF PE=3 SV=1
MTPADDGRDQLTQLGKQVAAPQSPEEAILERVPAPYPDKHYLVRFTAPEFTSLCPITGQPDFAHIVIDYVPDKWIVESKSLKLYLTSFRNHGAFHEACSIQIANTLVERLAPRWLRIGAYWYPRGGIPIDVFWQTGEPPAGVWVPAQDVPTYRGRG

SEQ ID NO: 43502 - protein, 156 aa, Acetobacter pasteurianus; identical to SEQ ID NO: 43501
  misc_feature (1)..(156): tr|S6D6Z4|S6D6Z4_ACEPA NADPH-dependent 7-cyano-7-deazag uanine reductase OS=Acetobacter pasteurianus 386B OX=12 66844 GN=queF PE=3 SV=1

SEQ ID NO: 43503 - protein, 156 aa, Acetobacter peroxydans
  misc_feature (1)..(156): tr|A0A4Y3TWA4|A0A4Y3TWA4_9PROT NADPH-dependent 7-cyano- 7-deazaguanine reductase OS=Acetobacter peroxydans OX=1 04098 GN=queF PE=3 SV=1
MSRPDDGSTALTQLGRAVSAPASPENAVLERVPAPYRDRRYMVRFTAPEFTSLCPITAQPDFAHIVIDYVPDQWIVESKSLKLFLTSFRNHGAFHEACSIQIASTLVDLLDPVWLRIGAYWYPRGGIPIDIFWQTGEAPKDVWIPPQDVPNYRGRG

SEQ ID NO: 43504 - protein, 156 aa, Acetobacter persici; identical to SEQ ID NO: 43494
  misc_feature (1)..(156): tr|A0A252AU80|A0A252AU80_9PROT NADPH-dependent 7-cyano- 7-deazaguanine reductase OS=Acetobacter persici OX=1076 596 GN=queF PE=3 SV=1

SEQ ID NO: 43505 - protein, 204 aa, Acetobacter pomorum
  misc_feature (1)..(204): tr|A0A346DWW6|A0A346DWW6_9PROT NADPH-dependent 7-cyano- 7-deazaguanine reductase OS=Acetobacter pomorum OX=6595 9 GN=queF PE=3 SV=1
MQVLLIWPCFSSYIQTVRKRSDQTLHVKLDERADSRNICKKPHVQEHKMNPPDDGRNQLTQLGKQVAAPQSPEEAILERVPAPYPDKHYLVRFTAPEFTSLCPITGQPDFAHIVIDYVPDQWIVESKSLKLYLTSFRNHGAFHEACSIQIANTLVERLAPRWLRIGAYWYPRGGIPIDVFWQTGEPPAGVWVPAQDVPTYRGRG

SEQ ID NO: 43506 - protein, 156 aa, Acetobacter pomorum
  misc_feature (1)..(156): tr|A0A2G4RB05|A0A2G4RB05_9PROT NADPH-dependent 7-cyano- 7-deazaguanine reductase OS=Acetobacter pomorum OX=6595 9 GN=queF PE=3 SV=1
MTPSDDGRDQLTQLGKPVAAPQSPEEAILERVPAPYPDKHYLIRFTAPEFTSLCPITSQPDFAHIVIDYVPDKWIVESKSLKLYLTSFRNHGAFHEACSIQIATTLVERLAPRWLRIGAYWYPRGGIPIDVFWQTGEPPVGVWVPAQDVPTYRGRG

SEQ ID NO: 43507 - protein, 156 aa, Acetobacter senegalensis
  misc_feature (1)..(156): tr|A0A0U5ESM9|A0A0U5ESM9_9PROT NADPH-dependent 7-cyano- 7-deazaguanine reductase OS=Acetobacter senegalensis OX =446692 GN=queF PE=3 SV=1
MTRPDDGSAALTQLGRHTPAPTSPEEAVLERVPAPYPDKRYLVRFTAPEFTSLCPVTGQPDFAHLVIDYVPDQWIVESKSLKLFLTSFRNHGAFHEACSVQIATTLVDLLSPVWLRIGAYWYPRGGIPIDVFWQTGAPPADVWIPSQDVPTYRGRG

SEQ ID NO: 43508 - protein, 156 aa, Acetobacter sp.; identical to SEQ ID NO: 43501
  misc_feature (1)..(156): tr|A0A5B9GEQ3|A0A5B9GEQ3_9PROT NADPH-dependent 7-cyano- 7-deazaguanine reductase OS=Acetobacter sp. B6 OX=25005 48 GN=queF PE=3 SV=1

SEQ ID NO: 43509 - protein, 156 aa, Acetobacter sp.
  misc_feature (1)..(156): tr|A0A5C1YN98|A0A5C1YN98_9PROT NADPH-dependent 7-cyano- 7-deazaguanine reductase OS=Acetobacter sp. KACC 21233 OX=2592655 GN=queF PE=3 SV=1
MTRPDDGSTSLTQLGRQVAQPANPEDATLERVPSPYQGRLYMVRFTAPEFTSLCPITGQPDFAHIVIDYVPGEWIVESKSLKLYLTSFRNHGSFHEACSLQIATTLVDLLSPVWLRIGAYWYPRGGMPIDVFWQTDEPPKGVWIADQNVPNYRGRG

SEQ ID NO: 43510 - protein, 156 aa, Acetobacter syzygii
  misc_feature (1)..(156): tr|A0A270BWR7|A0A270BWR7_9PROT NADPH-dependent 7-cyano- 7-deazaguanine reductase OS=Acetobacter syzygii OX=1464 76 GN=queF PE=3 SV=1
MNKPDDGSQALTQLGRQIAPPNSPEEAVLERVPAPYPDKRYMVRFTAPEFTSLCPITGQPDFAHIVIDYVPDQWIVESKSLKLFLTSFRNHGAFHESCSVQIANTLVELLNPVWLRIGAYWYPRGGIPIDVFWQTGEPPAGVWIPSQDVPSYKGRG

SEQ ID NO: 43511 - protein, 156 aa, Acetobacter tropicalis
  misc_feature (1)..(156): tr|A0A252A307|A0A252A307_9PROT NADPH-dependent 7-cyano- 7-deazaguanine reductase OS=Acetobacter tropicalis OX=1 04102 GN=queF PE=3 SV=1
MTRPDDGSAALTQLGRHTPAPTSPEEAVLERVPAPYPDKHYLVRFTAPEFTSLCPVTGQPDFAHLVIDYVPDQWIVESKSLKLFLTSFRNHGAFHEACSVQIATTLVDLLSPVWLRIGAYWYPRGGIPIDVFWQTGAPPADVWIPSQDVPTYRGRG

SEQ ID NO: 43512 - protein, 156 aa, Acetobacter tropicalis; identical to SEQ ID NO: 43507
  misc_feature (1)..(156): tr|A0A094ZJF3|A0A094ZJF3_9PROT NADPH-dependent 7-cyano- 7-deazaguanine reductase OS=Acetobacter tropicalis OX=1 04102 GN=queF PE=3 SV=1

SEQ ID NO: 43513 - protein, 154 aa, Acetobacteraceae bacterium
  misc_feature (1)..(154): tr|A0A4Q4BST6|A0A4Q4BST6_9PROT NADPH-dependent 7-cyano- 7-deazaguanine reductase OS=Acetobacteraceae bacterium OX=1909293 GN=queF PE=3 SV=1
MTETDVSSLSQLGAKTELPASPEAAVLEKVPTGHSGTRFVVRFTAPEFTSLCPMTGQPDFAHIVIDYIPGDWLVESKSLKLYLHSFRNHGAFHEDCTIDIAKRLVELLQPEWLRIGAYWYPRGGIPIDIFWQTGEVPAGVWLPDQAVAPYRGRG

SEQ ID NO: 43514 - protein, 156 aa, Acetobacteraceae bacterium
  misc_feature (1)..(156): tr|A0A327MFX0|A0A327MFX0_9PROT NADPH-dependent 7-cyano- 7-deazaguanine reductase OS=Acetobacteraceae bacterium DB1506 OX=2230885 GN=queF PE=3 SV=1
MTEASTDTSGLTLLGRPAGVPASPEAARLERVPNPHPGTPYLVRFAAPEFTSLCPLTGQPDFAHLVIDYLPGDWLVESKSLKLYLSAFRNHGAFHEACTVAIARRLVAELAPVWLRIGGYWYPRGGMPIDVFYQTGPAPEGVWIPDQGVAPYRGRG

SEQ ID NO: 43515 - protein, 165 aa, Acetobacterium bakii
  misc_feature (1)..(165): tr|A0A0L6U4V1|A0A0L6U4V1_9FIRM NADPH-dependent 7-cyano- 7-deazaguanine reductase OS=Acetobacterium bakii OX=526 89 GN=queF PE=3 SV=1
MMKNRDREIEGLSLLGNQEVKYNYDYNPKVLETFENKNQENEYFVKFNCPEFTSLCPITGQPDFATIYISYVPSVYMVESKSLKLYLFSYRNHGGFHEDCVNTIMKDLIKLMDPKYIEVWGKFTPRGGISIDPYCNYGKEGTDWQDTAKQRLHMHDLNPEKVDNR

SEQ ID NO: 43516 - protein, 161 aa, Acetobacteroides hydrogenigenes
  misc_feature (1)..(161): tr|A0A4R2F1A0|A0A4R2F1A0_9BACT NADPH-dependent 7-cyano- 7-deazaguanine reductase OS=Acetobacteroides hydrogenig enes OX=979970 GN=queF PE=3 SV=1
MERESEGLKSLGNQGTQYDFGYTPEVLETFVNKHQENDYWVKFNIPEFTSLCPITGQPDFATIYISYVPDVQMVESKSLKLYMFSFRNHGDFHEDCVNIIMKDLIKLMEPRYIEVWGKFTPRGGISIDPYCNYGKPGTKYEQLAEQRFMNHDMYPEKIGSR

SEQ ID NO: 43517 - protein, 130 aa, Acetomicrobium mobile
  misc_feature (1)..(130): tr|I4BWN1|I4BWN1_ACEMN NADPH-dependent 7-cyano-7-deazag uanine reductase OS=Acetomicrobium mobile (strain ATCC BAA-54 / DSM 13181 / JCM 12221 / NGA) OX=891968 GN=queF PE=3 SV=1
MEKEFKALGKPIRTPLRELDTFPKPPDVDMVVMESDEVTSLCPITGQPDFETVIIEYKPDKLCIESKSLKLYFWSFREEGHFCEALASKILHDVQKACSPLWCKVTVIQKPRGGIKIKAEAVAGEMPRQC

SEQ ID NO: 43518 - protein, 165 aa, Acetonema longum
  misc_feature (1)..(165): tr|F7NPH1|F7NPH1_9FIRM NADPH-dependent 7-cyano-7-deazag uanine reductase OS=Acetonema longum DSM 6540 OX=100937 0 GN=queF PE=3 SV=1
MSSNDKDLTGITLLGNHDITYNYSYHPEILETFNNRHQENDYWVKFNCPEFTSLCPITGQPDFATIYISYIPDVKMVESKSLKLYLLSFRNHGCFHEDVVNIIMKDLIHLMKPRYIEVWGKFLPRGGISIDPYCNYGQADTKFEKVAWHRMQEHDLHSLDKIDNR

SEQ ID NO: 43519 - protein, 274 aa, Achromobacter agilis
  misc_feature (1)..(274): tr|A0A446CLM3|A0A446CLM3_9BURK NADPH-dependent 7-cyano- 7-deazaguanine reductase OS=Achromobacter agilis OX=135 3888 GN=queF PE=3 SV=1
MTLSHGPLGQSVSYVSQYDPTLLFPIARSHNRAALNLAAGQLPFTGVDLWNAYELSWLDAKGKPRIAMATFSVPADSPNIIESKSFKLYLNSFNQTRLVNSAALRGRLERDLSAAAGAPVGLDFFLPQRFSELQMGELDGIYIDKLDIEIDTYEPAPDLLRTRAGGTVEETLASRLLKSNCPVTGQPDWASVQIRYRGAPIDRESLLRYIVSFRQHAEFHEHCVERIFTDIMQACRPELLTVYARYTRRGGLDINPWRSNFEAAPPADVRTVRQ

SEQ ID NO: 43520 - protein, 276 aa, Achromobacter aloeverae
  misc_feature (1)..(276): tr|A0A4V1MSS3|A0A4V1MSS3_9BURK NADPH-dependent 7-cyano- 7-deazaguanine reductase OS=Achromobacter aloeverae OX= 1750518 GN=queF PE=3 SV=1
MTLQDAPLGHEVAYPDRYDPSLLFPIDRAPNRAALGIAAGRLPFDQGVDIWNAYEVSWLDARGKPRVALATFTVPAHAPRIIESKSFKLYLNSYNQERLPDAATVAARMRKDLGAAAGGDVGVRLVMPAEFASQRIAELDGDCLDDLDVEIETYTPAPERLRVAEAADVVEETLMSRLLKSNCPVTGQPDWGSVQVRYRGPRIDRAGLLAYIVSFRQHADFHEHCVERMFTDILRTCRPEMLSVYARYTRRGGLDINPWRATAGVAAPADARTARQ

SEQ ID NO: 43521 - protein, 274 aa, Achromobacter arsenitoxydans
  misc_feature (1)..(274): tr|H0FEV5|H0FEV5_9BURK NADPH-dependent 7-cyano-7-deazag uanine reductase OS=Achromobacter arsenitoxydans SY8 OX =477184 GN=queF PE=3 SV=1
MTLSHGPLGQSVAYASQYDPSLLFPIARSHNRAALNLHADNLPFTGVDLWNAYELSWLDAKGKPRVAMATFSVPADSPNIIESKSFKLYLNSFNQTRLVNSAALRGRLERDLSAAAGAPVGLDFYLPQRFSELQMGELDGIYIDKLDIEINTYEPAPELLRTRPGDVVEETLASRLLKSNCPVTGQPDWATVQIRYRGAPIDRESLLRYVVSFRQHAEFHEHCVERIFSDIMQACGPEKLTVYARYTRRGGLDINPWRSNFESAPPADMRTVRQ

SEQ ID NO: 43522 - protein, 274 aa, Achromobacter denitrificans
  misc_feature (1)..(274): tr|A0A427WW57|A0A427WW57_ACHDE NADPH-dependent 7-cyano- 7-deazaguanine reductase OS=Achromobacter denitrificans OX=32002 GN=queF PE=3 SV=1
MTLSHGPLGQSVSYVSQYDPTLLFPIARSHNRAALNLADDKLPFTGVDLWNAYELSWLDAKGKPRIAMATFSVPADSPNIIESKSFKLYLNSFNQTRLVNSAALRGRLERDLSAAAGAPVGLDFFLPQRFSELQMGELDGIYIDKLDIEIDTYEPAPEVLRTRPGDTVEETLASRLLKSNCPVTGQPDWASVQIRYRGAPIDRESLLRYIVSFRQHAEFHEHCVERIYTDIMHACRPELLTVYARYTRRGGLDINPWRSNFESAPPADLRTVRQ

SEQ ID NO: 43523 - protein, 274 aa, Achromobacter insolitus
  misc_feature (1)..(274): tr|A0A448JRR3|A0A448JRR3_9BURK NADPH-dependent 7-cyano- 7-deazaguanine reductase OS=Achromobacter insolitus OX= 217204 GN=queF PE=3 SV=1
MTLSHGPLGQNVAYASQYDPSLLFPIARSHNRAALNLEAGKLPFTGVDLWNAYELSWLDAKGKPRVAMATFSVPADSPNIIESKSFKLYLNSFNQTRLVNSAALRGRLERDLSAAAGAPVGLDFFLPQRFSELQMGEMDGIYIDKLDIEIDTYEPAPEVLRTRPGDVVEETLASRLLKSNCPVTGQPDWASVQIRYRGAPIDRESLLRYVVSFRQHAEFHEHCVERIFSDIMQACRPEQLTVYARYTRRGGLDINPWRSNFEAGPPADVRTVRQ

SEQ ID NO: 43524 - protein, 274 aa, Achromobacter insuavis
  misc_feature (1)..(274): tr|F7SV03|F7SV03_9BURK NADPH-dependent 7-cyano-7-deazag uanine reductase OS=Achromobacter insuavis AXX-A OX=100 3200 GN=queF PE=3 SV=1
MTLSHGPLGQSVTYVSQYDPSLLFPIARAHNREALNLARGPLPFTGVDLWNAYELSWLDAKGKPRVAMATFSVPADSPNIIESKSFKLYLNSFNQTRLVNSAALRGRLERDLSAAAGAPVGLDFILPQRFGELRMGELDGIYIDKLDIEIDTYEPAPELLRTRVGDVVEETLCSRLLKSNCPVTGQPDWASVQIRYRGQPIDREALLRYVISFRQHAEFHEHCVERIFTDIMQACAPEQLTVYARYTRRGGLDINPWRSNVEPAPPADVRTVRQ

SEQ ID NO: 43525 - protein, 274 aa, Achromobacter marplatensis
  misc_feature (1)..(274): tr|J4YKL6|J4YKL6_9BURK NADPH-dependent 7-cyano-7-deazag uanine reductase OS=Achromobacter marplatensis OX=47086 8 GN=queF PE=3 SV=1
MTLSHGPLGQSVAYASQYDPSLLFPIARSHNRAALNLNAGNLPFTGVDLWNAYELSWLDAKGKPRVAMATFSVPADSPNIIESKSFKLYLNSFNQTRLVNSAALRGRLERDLSAAAGAPVGLDFFLPQRFSELRMGEMDGIYIDKLDIEIDTYEPAPQVLRTRPGDVVEETLASRLLKSNCPVTGQPDWASVQIRYRGAPIDRESLLRYVVSFRQHAEFHEHCVERIFSDIMQACAPEQLTVYARYTRRGGLDINPWRSNFETAPPADVRTVRQ

SEQ ID NO: 43526 - protein, 274 aa, Achromobacter piechaudii
  misc_feature (1)..(274): tr|D4XFV0|D4XFV0_9BURK NADPH-dependent 7-cyano-7-deazag uanine reductase OS=Achromobacter piechaudii ATCC 43553 OX=742159 GN=queF PE=3 SV=1
MTLSHGPLGQSVAYASQYDPSLLFPIARSHNRAALNLHAGNLPFKGVDLWNAYELSWLDAKGKPRVAMATFSVPADSPNIIESKSFKLYLNSFNQTRLVNSAALRGRLERDLSAAAGAPVGLDFFLPQRFSELQMGEMDGIYIDKLDIEIDTYEPAPEVLRTRPGDVVEETLASRLLKSNCPVTGQPDWASVQIRYRGAPIDRESLLRYVVSFRQHAEFHEHCVERIFSDIMQACAPEQLTVYARYTRRGGLDINPWRSNVDTAPPADVRTVRQ

SEQ ID NO: 43527 - protein, 274 aa, Achromobacter piechaudii
  misc_feature (1)..(274): tr|A0A0L6I689|A0A0L6I689_9BURK NADPH-dependent 7-cyano- 7-deazaguanine reductase OS=Achromobacter piechaudii OX =72556 GN=queF PE=3 SV=1
MTLSHGPLGQSVAYASQYDPSLLFPIARSHNRAALNLHDGNLPFKGVDLWNAYELSWLDAKGKPRVAMATFSVPADSPNIIESKSFKLYLNSFNQTRLVNSAALRGRLERDLSAAAGAPVGLDFFLPQRFSELQMGEMDGIYIDKLDIEIDTYEPAPEVLRTRPGDVVEETLASRLLKSNCPVTGQPDWASVQIRYRGAPIDRESLLRYVVSFRQHAEFHEHCVERIFSDIMQACAPEQLTVYARYTRRGGLDINPWRSNVDTAPPVDVRTVRQ

SEQ ID NO: 43528 - protein, 274 aa, Achromobacter pulmonis
  misc_feature (1)..(274): tr|A0A2N8KLG8|A0A2N8KLG8_9BURK NADPH-dependent 7-cyano- 7-deazaguanine reductase OS=Achromobacter pulmonis OX=1 389932 GN=queF PE=3 SV=1
MTLSHGPLGQSVSYVSQYDPTLLFPIARSHNRAALNLADGKLPFKGVDLWNAYELSWLDAKGKPRIAMATFSVPADSPNIIESKSFKLYLNSFNQTRLVNSAALRGRLERDLSAAAGAPVGLDFFLPQRFSELQMGELDGIYIDKLDIEIDTYEPAPELLRTRAGDPVEETLASRLLKSNCPVTGQPDWASVQIRYRGAPIDRESLLRYIVSFRQHAEFHEHCVERIFTDIMQACRPEQLTVYARYTRRGGLDINPWRSNFEAAPPPDLRTVRQ

SEQ ID NO: 43529 - protein, 304 aa, Achromobacter ruhlandii
  misc_feature (1)..(304): tr|A0A1D8I759|A0A1D8I759_9BURK NADPH-dependent 7-cyano- 7-deazaguanine reductase OS=Achromobacter ruhlandii OX= 72557 GN=queF PE=3 SV=1
MPGAAFHDAKNRPVATAYNAVISTFSDDLSMTLSHGPLGQSVTYVSQYDPSLLFPIARAHNREALNLASGPLPFTGVDLWNAYELSWLDAKGKPRVAMATFSVPADSPNIIESKSFKLYLNSFNQTRLVNSAALRGRLERDLSAAAGAPVGLDFILPQRFGELRMGELDGIYIDKLDIEIDTYEPAPELLRTRAGEVVEETLCSRLLKSNCPVTGQPDWASVQVRYRGKPIDRESLLRYVISFRQHAEFHEHCVERIFTDIMQACAPEQLTVYARYTRRGGLDINPWRSNVETAPPADVRTVRQ

SEQ ID NO: 43530 - protein, 304 aa, Achromobacter ruhlandii
  misc_feature (1)..(304): tr|A0A2M9GX37|A0A2M9GX37_9BURK NADPH-dependent 7-cyano- 7-deazaguanine reductase OS=Achromobacter ruhlandii OX= 72557 GN=queF PE=3 SV=1
MPGAAFHDAKNEAFATAYNAVISTFSDDLSMTLSHGPLGQSVTYVSQYDPSLLFPIARAHNREALNLASGPLPFTGVDLWNAYELSWLDAKGKPRVAMATFSVPADSPNIIESKSFKLYLNSFNQTRLVNSAALRGRLERDLSAAAGAPVGLDFILPQRFGELRMGELDGIYIDKLDIEIDTYEPAPELLRTRAGEVVEETLCSRLLKSNCPVTGQPDWASVQVRYRGKPIDRESLLRYVISFRQHAEFHEHCVERIFTDIMQACAPEQLTVYARYTRRGGLDINPWRSNVETAPPADVRTVRQ

SEQ ID NO: 43531 - protein, 282 aa, Achromobacter sp.
  misc_feature (1)..(282): tr|A0A0M7NDA6|A0A0M7NDA6_9BURK NADPH-dependent 7-cyano- 7-deazaguanine reductase OS=Achromobacter sp. ATCC35328 OX=1806490 GN=queF PE=3 SV=1
MSSYANHQALAGLTLGKSTDYRDTYDASLLQGVPRSLNRDPLGLKADNLPFHGTDIWTLYELSWLNAKGLPQVAVGHVELDYTSVNLIESKSFKLYLNSFNQTRFNNWDEVRQTLERDLSTCAQGKISVALYRLDELEGQPIGHFNGTCIDDQDITIDNYEFTTDYLENATCGEKVVEETLVSHLLKSNCLITHQPDWGSLQIQYRGRQIDREKLLRYLVSFRHHNEFHEQCVERIFNDLLRFCQPEKLSVYARYTRRGGLDINPWRSNSDFVPSTTRLVRQ

SEQ ID NO: 43532 - protein, 274 aa, Achromobacter sp.
  misc_feature (1)..(274): tr|A0A0Q8C3W9|A0A0Q8C3W9_9BURK NADPH-dependent 7-cyano- 7-deazaguanine reductase OS=Achromobacter sp. Root565 O X=1736564 GN=queF PE=3 SV=1
MTLSHGPLGQSVAYASQYDPSLLFPIARSHNRAALNLTAGSLPFTGVDLWNAYELSWLDAKGKPRVAMATFSVPADSPNIIESKSFKLYLNSFNQTRLVNSAALRGRLERDLSAAAGAPVGLDFFLPQRFSELQMGELDGIYIDKLDIEIDTYEPAPELLRTRAGDVVEETLASRLLKSNCPVTGQPDWATVQIRYRGKPIDRESLLRYVVSFRQHAEFHEHCVERIFSDIMQACGPEQLTVYARYTRRGGLDINPWRSNFEVAPPADVRTVRQ

SEQ ID NO: 43533 - protein, 274 aa, Achromobacter spanius
  misc_feature (1)..(274): tr|A0A3Q9KLY0|A0A3Q9KLY0_9BURK NADPH-dependent 7-cyano- 7-deazaguanine reductase OS=Achromobacter spanius OX=21 7203 GN=queF PE=3 SV=1
MTLSHGPLGQSVAYASQYDPSLLFPIARSHNRAALNLEAGKLPFRGVDIWNAYELSWLDAKGKPRVAMATFSVPADSPNIIESKSFKLYLNSFNQTRLVNSAALRGRLERDLSAAAGATVGLDFFLPQRFSELRMGELDGIYIDKLDVEIDTYEPAPEVLRTRPGDVVEETLASRLLKSNCPVTGQPDWASVQIRYRGAPIDRESLLRYVVSFRQHAEFHEHCVERIFSDIMQACAPEHLTVYARYTRRGGLDINPWRSNVETAPPADVRTVRQ

SEQ ID NO: 43534 - protein, 274 aa, Achromobacter spanius
  misc_feature (1)..(274): tr|A0A2S0IA31|A0A2S0IA31_9BURK NADPH-dependent 7-cyano- 7-deazaguanine reductase OS=Achromobacter spanius OX=21 7203 GN=queF PE=3 SV=1
MTLSHGPLGQSVAYASQYDPSLLFPIARSHNRAALNLTAGSLPFTGVDLWNAYELSWLDAKGKPRVAMATFSVPADSPNIIESKSFKLYLNSFNQTRLVNSAALRGRLERDLSAAAGAPVGLDFFLPQRFSELQMGELDGIYIDKLDIEIDTYEPAPELLRTRAGEVVEETLASRLLKSNCPVTGQPDWATVQIRYRGKPIDRESLLRYVVSFRQHAEFHEHCVERIFSDIMQACGPEQLTVYARYTRRGGLDINPWRSNFETAPPADVRTVRQ

SEQ ID NO: 43535 - protein, 274 aa, Achromobacter xylosoxidans
  misc_feature (1)..(274): tr|E3HEW5|E3HEW5_ACHXA NADPH-dependent 7-cyano-7-deazag uanine reductase OS=Achromobacter xylosoxidans (strain A8) OX=762376 GN=queF PE=3 SV=1
MTLSHGPLGQSVAYASQYDPSLLFPIARSHNRAALNLEAGKLPFTGVDLWNAYELSWLDAKGKPRVAMATFSVPADSPNIIESKSFKLYLNSFNQTRLVNSAALRGRLERDLSAAAGAPVGLDFFLPQRFSELQMGELAGIYIDKLDIEIDTYEPAPEVLRTRPGEVVEETLASRLLKSNCPVTGQPDWASVQIRYRGAPIDRESLLRYVVSFRQHAEFHEHCVERIFSDIMQACRPEQLTVYARYTRRGGLDINPWRSNFEAGPPADVRTVRQ

SEQ ID NO: 43536 - protein, 165 aa, Acidaminobacter hydrogenoformans
  misc_feature (1)..(165): tr|A0A1G5RZL5|A0A1G5RZL5_9FIRM NADPH-dependent 7-cyano- 7-deazaguanine reductase OS=Acidaminobacter hydrogenofo rmans DSM 2784 OX=1120920 GN=queF PE=3 SV=1
MTNRSTEELNGITHLGSQGTKYDMDYNPSVLETFINKHPENDYFVKFNCPEFTSLCPITGQPDFATITISYVPDLNMVESKSLKLYLFSFRNHGDFHEDCINKIMKDLIALMDPKYIEVWGKFTPRGGISIDPYCNYGKPNTKWQDVAFNRMANHDLYPEKVDNR

SEQ ID NO: 43537 - protein, 165 aa, Acidaminococcaceae bacterium
  misc_feature (1)..(165): tr|A0A3D2QGN5|A0A3D2QGN5_9FIRM NADPH-dependent 7-cyano- 7-deazaguanine reductase OS=Acidaminococcaceae bacteriu m OX=2049052 GN=queF PE=3 SV=1
MTSGRTKEELQGVTLLGGKTKYAFDYTPEVLEAFPNKHPGRDYFVKFNCPEFTSLCPKTGQPDFATIYISYVPDQKLVESKSLKLYLFSFRNHGDFHEDCVNIILNDLVKLLEPKYMEVWGKFLPRGGLSIDPYANYGKRGTDWEKTAHDRLHYHDMHPERIDNR

SEQ ID NO: 43538 - protein, 121 aa, Acidaminococcaceae bacterium
  misc_feature (1)..(121): tr|A0A359EUL7|A0A359EUL7_9FIRM NADPH-dependent 7-cyano- 7-deazaguanine reductase (Fragment) OS=Acidaminococcace ae bacterium OX=2049052 GN=DEG55_02370 PE=3 SV=1
VKFNCPEFTSLCPKTGQPDFATIYISYVPDQKLVESKSLKLYLFSFRNHGDFHEDCVNIIMKDLIRLLDPKYIEVWGKFLPRGGLSIDPYANYGKKGTDWEKTAHQRLHYHDMSPETVQNR

SEQ ID NO: 43539 - protein, 154 aa, Acidaminococcus fermentans
  misc_feature (1)..(154): tr|A0A1I5GR38|A0A1I5GR38_ACIFE NADPH-dependent 7-cyano- 7-deazaguanine reductase OS=Acidaminococcus fermentans OX=905 GN=queF PE=3 SV=1
MRTEEELRGVTELGSGHTVYQNTYAPEVLESFPNKHEEAPYMVKLNCPEFTSLCPKTGQPDFGRIVISYIPDHKLVESKSLKLYLFSFRNNGDFHEDCVNIIKNDLVKLLQPKYLEVAGYFNPRGGISILPFAVYYQPDYKDMAQRRMEAFVHE

SEQ ID NO: 43540 - protein, 154 aa, Acidaminococcus fermentans
  misc_feature (1)..(154): tr|D2RLP9|D2RLP9_ACIFV NADPH-dependent 7-cyano-7-deazag uanine reductase OS=Acidaminococcus fermentans (strain ATCC 25085 / DSM 20731 / VR4) OX=591001 GN=queF PE=3 SV =1
MRTEEELRGVTKLGSGHTVYQNTYAPEVLESFPNKHEEAPYMVKLNCPEFTSLCPKTGQPDFGRIVISYIPDHKLVESKSLKLYLFSFRNNGDFHEDCVNIIKNDLVKLLQPKYLEVAGYFNPRGGISILPFAVYYQPDYKDMAQRRMEAFVHE

SEQ ID NO: 43541 - protein, 154 aa, Acidaminococcus intestini
  misc_feature (1)..(154): tr|C0WAE8|C0WAE8_9FIRM NADPH-dependent 7-cyano-7-deazag uanine reductase OS=Acidaminococcus intestini OX=187327 GN=queF PE=3 SV=1
MRTKEELAGVTALGSGHTEYKSTYDPSVLEAFPNKHEEAPYLVKLNCPEFTSLCPKTGQPDFGRVVISYIPDHKLVESKSLKLYLFSFRNNGDFHEDCVNIIKNDLVALLSPKYLEVAGYFNPRGGISILPFAVYYQDEYKEMAQRRMEAFVHE

SEQ ID NO: 43542 - protein, 154 aa, Acidaminococcus intestini; identical to SEQ ID NO: 43541
  misc_feature (1)..(154): tr|G4Q904|G4Q904_ACIIR NADPH-dependent 7-cyano-7-deazag uanine reductase OS=Acidaminococcus intestini (strain R yC-MR95) OX=568816 GN=queF PE=3 SV=1

SEQ ID NO: 43543 - protein, 154 aa, Acidaminococcus sp.
  misc_feature (1)..(154): tr|R7LV15|R7LV15_9FIRM NADPH-dependent 7-cyano-7-deazag uanine reductase OS=Acidaminococcus sp. CAG:542 OX=1262 687 GN=queF PE=3 SV=1
MRTKEELQGVTELGSGHTVYQNTYAPEVLECFPNKHEEAPYMVKLDCPEFTSLCPKTGQPDFGRIVISYIPDHKLVESKSLKLYLFSFRNNGDFHEDCVNIIKNDLVDLLQPKYLEVAGYFNPRGGISILPFAVYYQPEYKDMAQRRMEAFVHE

SEQ ID NO: 43544 - protein, 154 aa, Acidaminococcus sp.
  misc_feature (1)..(154): tr|A0A415EHD7|A0A415EHD7_9FIRM NADPH-dependent 7-cyano- 7-deazaguanine reductase OS=Acidaminococcus sp. AM05-11 OX=2291997 GN=queF PE=3 SV=1
MRTKEELAGITELGSGKTVYANTYNPGVLECFPNKHEEAPYMVKLNCPEFTSLCPKTGQPDFGRIVISYIPDHALVESKSLKLYLFSFRNNGDFHEDCVNIIKNDLVNLLHPKYLEVAGYFNPRGGISILPFAVYAQPDYQDMAKRRMEAFIHE

SEQ ID NO: 43545 - protein, 122 aa, Acidibacillus ferrooxidans
  misc_feature (1)..(122): tr|A0A101XRA9|A0A101XRA9_9BACL NADPH-dependent 7-cyano- 7-deazaguanine reductase OS=Acidibacillus ferrooxidans OX=1765683 GN=queF PE=3 SV=1
MSTKPSKELDPIPNPYPHRDYEITIEAPEFTTLCPKTGQPDFGTITIRYRPGPYIIELKSLKLYLWSFRDEGHFHEEVSNLIADDFIKYAKPKYMELIGRYNVRGGISTNVRVEYVDGEIVR

SEQ ID NO: 43546 - protein, 126 aa, Acidibacillus ferrooxidans
  misc_feature (1)..(126): tr|A0A1V4ER39|A0A1V4ER39_9BACL NADPH-dependent 7-cyano- 7-deazaguanine reductase OS=Acidibacillus ferrooxidans OX=1765683 GN=queF PE=3 SV=1
METRSELTMSTKPSKELDPIPNPYPHRDYEITIEAPEFTTLCPKTGQPDFGTITIRYRPGPFIIELKSLKLYLWSFRDEGHFHEEVSNVIADDFIKFAKPKYMELIGRYNVRGGISTNVRVEYTEA

SEQ ID NO: 43547 - protein, 121 aa, Acidibacillus sulfuroxidans
  misc_feature (1)..(121): tr|A0A2U3D905|A0A2U3D905_9BACL NADPH-dependent 7-cyano- 7-deazaguanine reductase OS=Acidibacillus sulfuroxidans OX=1765684 GN=queF PE=3 SV=1
MSTKPSATLDPIPNPYPERDYEIYIEAPEFTTLCPKTGQPDFGTITFRYRPGPYIIELKSLKLYLWSYREEGHFHEEVTNRIADDFVRFAQPRYLEVIGKFNVRGGISTTVKVEYQADVKQ

SEQ ID NO: 43548 - protein, 127 aa, Acidiferrobacter sp.
  misc_feature (1)..(127): tr|A0A2Z3QZK8|A0A2Z3QZK8_9GAMM NADPH-dependent 7-cyano- 7-deazaguanine reductase OS=Acidiferrobacter sp. SPIII_ 3 OX=1281578 GN=queF PE=3 SV=1
MPTEPTKRLETFPNPHPERDYQIHIRIPEFTCLCPKTGQPDFAELDLVYVPDHACLELKSLKLYVWSYRNEGAFHEAVTNRILNDLVAATAPRYMVLTARFNVRGGLYTHVIAHHGQRPSGLPEHGL

SEQ ID NO: 43549 - protein, 127 aa, Acidiferrobacter thiooxydans
  misc_feature (1)..(127): tr|A0A1C2G322|A0A1C2G322_9GAMM NADPH-dependent 7-cyano- 7-deazaguanine reductase OS=Acidiferrobacter thiooxydan s OX=163359 GN=queF PE=3 SV=1
MPTEPTKQLETFPNPHPERDYQIHIRIPEFTCLCPKTGQPDFAELDLVYVPDRACVELKSLKLYVWSYRNEGAFHEAVTNRILSDLVAATAPRYMVLTARFNVRGGLYTHVIAHHGQRPPGLPEHGL

SEQ ID NO: 43550 - protein, 136 aa, Acidiferrobacteraceae bacterium
  misc_feature (1)..(136): tr|A0A2E9IDD6|A0A2E9IDD6_9GAMM NADPH-dependent 7-cyano- 7-deazaguanine reductase OS=Acidiferrobacteraceae bacte rium OX=2024893 GN=queF PE=3 SV=1
MPSAPSKELATFSNPNPERDYTIRIEVPEFTCLCPITGQPDFGSIHIEYVPEALCVELKSLKNYFWSFRNEGAFHEAVTNQILADLVGAIDPRFMRITAYFNVRGGIYTQVVAEHTHDGWRYPEATVLPVGPPPIS

SEQ ID NO: 43551 - protein, 136 aa, Acidiferrobacteraceae bacterium
  misc_feature (1)..(136): tr|A0A2D6K762|A0A2D6K762_9GAMM NADPH-dependent 7-cyano- 7-deazaguanine reductase OS=Acidiferrobacteraceae bacte rium OX=2024893 GN=queF PE=3 SV=1
MPSAPSKELATFSNPNPERDYTIRIEVPEFTCLCPIAGQPDFGSIHIEYVPEALCVELKSLKNYFWSFRNEGAFHEAVTNQILADLVGAIDPRFMRITAYFNVRGGIYTQVVAEHAHDGWRCPEATVLPEGSPPIS

SEQ ID NO: 43552 - protein, 129 aa, Acidihalobacter ferrooxidans
  misc_feature (1)..(129): tr|A0A1P8UHG0|A0A1P8UHG0_9GAMM NADPH-dependent 7-cyano- 7-deazaguanine reductase OS=Acidihalobacter ferrooxidan s OX=1765967 GN=queF PE=3 SV=1
MATKPSKELETFPNPQPARDYTIRIRIPEFTCLCPVTGQPDFATLHLEYVPEARCVELKALKLYIWTYRDQGAFHEAVTNEILQHLVDAISPRFMRLTSEFNVRGGIYTTVVAEHRAADWVPPTPVQLP

SEQ ID NO: 43553 - protein, 129 aa, Acidihalobacter prosperus
  misc_feature (1)..(129): tr|A0A1A6C8Y4|A0A1A6C8Y4_9GAMM NADPH-dependent 7-cyano- 7-deazaguanine reductase OS=Acidihalobacter prosperus O X=160660 GN=queF PE=3 SV=1
MPSQPSKALETFANPEPNRDYTIRIRIPEFTCLCPVTGQPDFATLHLEYVPESRCVELKSLKQYVWSYRDEGAFHEAVTNRMVDDIVAAIAPRFVRLTSEFNVRGGIYTTVVAEHRAADWAPPTPITLP

SEQ ID NO: 43554 - protein, 129 aa, Acidihalobacter prosperus
  misc_feature (1)..(129): tr|A0A1D8ITD0|A0A1D8ITD0_9GAMM NADPH-dependent 7-cyano- 7-deazaguanine reductase OS=Acidihalobacter prosperus O X=160660 GN=queF PE=3 SV=1
MPSQPSKALETFANPEPNRDYTIRIRIPEFTCLCPVTGQPDFATLHLEYVPNQRCVELKSLKLYVWSYRDEGAFHEAVTNRIVDDIVAAIAPRFVRLTSEFNVRGGVYTNVVAEHRAAGWTPPTPVTLP

SEQ ID NO: 43555 - protein, 125 aa, Acidimicrobiaceae bacterium
  misc_feature (1)..(125): tr|A0A2E6E509|A0A2E6E509_9ACTN Uncharacterized protein OS=Acidimicrobiaceae bacterium OX=2024894 GN=CL461_0786 5 PE=4 SV=1
MDETMLGREIDENEYGRLDTFEIEGPMRINFYTEELQALCPSVEGIQPDIYEATLSYRAVTHAIESKSLKLWLVQYRNQRIFGEHLAVELHQKLSSLNGIDDVKVRLVQNIRGGIITDITYPSED

SEQ ID NO: 43556 - protein, 171 aa, Acidimicrobiaceae bacterium
  misc_feature (1)..(171): tr|A0A2E7X9V8|A0A2E7X9V8_9ACTN Uncharacterized protein OS=Acidimicrobiaceae bacterium OX=2024894 GN=CL437_0234 5 PE=4 SV=1
  misc_feature (47)..(47): Xaa can be any naturally occurring amino acid
  misc_feature (110)..(110): Xaa can be any naturally occurring amino acid
  misc_feature (133)..(133): Xaa can be any naturally occurring amino acid
MPPLASWPCRSAPAARRPTPAARRRTTGASPTSAATADPTRLPPASXSPPVNQPVLGRADAEPGPQIDTFPVDASVQLVRFHSTELTALCPVTEQPDFYTIDIEYTPLDXCIESKSLKLYLRTFSGTGIFAEXLAPRIADHLAAAVGTPVTVTLEQGIRGGITTTVSATSN

SEQ ID NO: 43557 - protein, 140 aa, Acidimicrobiales bacterium
  misc_feature (1)..(140): tr|A0A524B371|A0A524B371_9ACTN NADPH-dependent 7-cyano- 7-deazaguanine reductase OS=Acidimicrobiales bacterium mtb01 OX=1967499 GN=queF PE=3 SV=1
MNATPARLDPDDAATLDRLTVLGREVREAIPHVEVFPAPADVEIVRFTTDELASMCPVTNQPDLSRVVIEYRPGEWCVESKSLKLYLWGFRDRAVFAEALTAEIAREIMDTARPLSVTVTLTQKPRGGIEVEAVARLGNP

SEQ ID NO: 43558 - protein, 166 aa, Acidimicrobiales bacterium
  misc_feature (1)..(166): tr|A0A524MTR9|A0A524MTR9_9ACTN NADPH-dependent 7-cyano- 7-deazaguanine reductase OS=Acidimicrobiales bacterium OX=2201156 GN=queF PE=3 SV=1
MSLTVLGNTVREPIEHVEVFPAPAHVTSVTFTNDELTSMCPVTEQPDLSTVTIEYAPGEWCVESKSLKLYLWGFRDRAVFAEALAAEIAGEIMTTAKPARVTVTLVQRPRGGIEVKAVAQLPWGLVGRSISGDRSGPNFVERVHGVVHVERPEAREACRCGHVPRP

SEQ ID NO: 43559 - protein, 129 aa, Acidimicrobiia bacterium
  misc_feature (1)..(129): tr|A0A0R2QJD5|A0A0R2QJD5_9ACTN NADPH-dependent 7-cyano- 7-deazaguanine reductase OS=Acidimicrobiia bacterium BA CL6 MAG-120924-bin43 OX=1655583 GN=queF PE=3 SV=1
MATDSHDNLTVLGSTIRHAIDHVEIFPAPAHVTLVRFTTDEVTSICPVTSQPDLSHVTIEFKPDQYCIESKSLKLYLWRFRDMAVFAEALAAEIANEVMVTVKPMWVKVELTQRPRGGIEVHAVAERNR

SEQ ID NO: 43560 - protein, 129 aa, Acidimicrobiia bacterium; identical to SEQ ID NO: 43559
  misc_feature (1)..(129): tr|A0A0R2QS33|A0A0R2QS33_9ACTN NADPH-dependent 7-cyano- 7-deazaguanine reductase OS=Acidimicrobiia bacterium BA CL6 MAG-120910-bin40 OX=1655586 GN=queF PE=3 SV=1

SEQ ID NO: 43561 - protein, 155 aa, Acidimicrobium ferrooxidans
  misc_feature (1)..(155): tr|C7M0Q2|C7M0Q2_ACIFD NADPH-dependent 7-cyano-7-deazag uanine reductase OS=Acidimicrobium ferrooxidans (strain DSM 10331 / JCM 15462 / NBRC 103882 / ICP) OX=525909 G N=queF PE=3 SV=1
MDDSITLQALGSSRQTYAYDDPDPSVLETFPTPQPSGGLVIRLFALEFTSLCPVTGQPDYGQLDIVYVPGPRCVESKSLKLYLMRFRNHGAFHEACVAQVAQDLASVLAPRYLRVIGRFNARGGIAIWPLREVVADHEDPAALRALVDLDNGARP

SEQ ID NO: 43562 - protein, 129 aa, Acidimicrobium sp.; identical to SEQ ID NO: 43559
  misc_feature (1)..(129): tr|A0A3B9WNX9|A0A3B9WNX9_9ACTN NADPH-dependent 7-cyano- 7-deazaguanine reductase OS=Acidimicrobium sp. OX=18721 12 GN=queF PE=3 SV=1

SEQ ID NO: 43563 - protein, 154 aa, Acidiphilium cryptum
  misc_feature (1)..(154): sp|A5FY70|QUEF_ACICJ NADPH-dependent 7-cyano-7-deazagua nine reductase OS=Acidiphilium cryptum (strain JF-5) OX =349163 GN=queF PE=3 SV=1
MTDTRYDALQQLGRESRMPDSPEAAVLERVAAPSRGKNYVVRFTCPEFTSLCPITGQPDFAHVVIDYIPDSWIVESKSLKLYLGSFRNHGAFHEACTLMIAERLVDLLAPRWLRIGAYWYPRGGIPIDVFWQTGAPPEGAYLPDQGVPPYRGRG

SEQ ID NO: 43564 - protein, 154 aa, Acidiphilium multivorum; identical to SEQ ID NO: 43563
  misc_feature (1)..(154): tr|F0IY75|F0IY75_ACIMA NADPH-dependent 7-cyano-7-deazag uanine reductase OS=Acidiphilium multivorum (strain DSM 11245 / JCM 8867 / NBRC 100883 / AIU301) OX=926570 GN= queF PE=3 SV=1

SEQ ID NO: 43565 - protein, 154 aa, Acidiphilium rubrum
  misc_feature (1)..(154): tr|A0A1N6RP42|A0A1N6RP42_ACIRU NADPH-dependent 7-cyano- 7-deazaguanine reductase OS=Acidiphilium rubrum OX=526 GN=queF PE=3 SV=1
MTDERYAGLHQLGHYTKAPETPEQAELERVAAPAQGSAYVIRFTCPEFTSLCPMTGQPDFAHIVLDYIPDAWIVESKSLKLFLASFRNHGAFHEACTMMIAERLTDLLAPRWLRIGAYWYPRGGIPIDVFWQTGAPPEGVFLPDQGVAPYRGRG

SEQ ID NO: 43566 - protein, 154 aa, Acidiphilium sp.
  misc_feature (1)..(154): tr|A0A257R8N5|A0A257R8N5_9PROT NADPH-dependent 7-cyano- 7-deazaguanine reductase OS=Acidiphilium sp. 20-67-58 O X=1970291 GN=queF PE=3 SV=1
MTDTRYDALQQLGRESRMPASPEAAVLERVAAPSQGKNYVVRFTCPEFTSLCPITGQPDFAHIVIDYIPEAWIVESKSLKLYLGSFRNHGAFHEACTLMIAERLVDLLAPRWLRIGAYWYPRGGIPIDVFWQTGAPPEGAFLPDQGVPPYRGRG

SEQ ID NO: 43567 - protein, 113 aa, Acidiphilium sp.
  misc_feature (1)..(113): tr|A0A257RVN9|A0A257RVN9_9PROT NADPH-dependent 7-cyano- 7-deazaguanine reductase (Fragment) OS=Acidiphilium sp. 21-66-27 OX=1970294 GN=B7X09_06135 PE=3 SV=1
RFTCPEFTSLCPITGQPDFAHIVIDYIPEAWIVESKSLKLYLSSFRNHGAFHEACTLMIAERLVDLLAPRWLRIGAYWYPRGGIPIDVFWQTGAPPEGAFLPDQGVPPYRGRG

SEQ ID NO: 43568 - protein, 138 aa, Acidipila dinghuensis
  misc_feature (1)..(138): tr|A0A4Q1SDJ1|A0A4Q1SDJ1_9BACT NADPH-dependent 7-cyano- 7-deazaguanine reductase OS=Acidipila dinghuensis OX=15 60006 GN=queF PE=3 SV=1
MSTANTQRTGYTDDHANAGLDFAFPSIDTWPNQFPAYEILIDDPEFTSVCPKTSLPDFGVIKLRYMPRERCLELKSWKEYLFCYRNLGIFQENVVNQILEDVVKACDPVWAVVTGDFRPRGGISTIVEARWPRPKVEG

SEQ ID NO: 43569 - protein, 136 aa, Acidipila rosea
  misc_feature (1)..(136): tr|A0A4R1L6Z3|A0A4R1L6Z3_9BACT NADPH-dependent 7-cyano- 7-deazaguanine reductase OS=Acidipila rosea OX=768535 G N=queF PE=3 SV=1
MAIAPRYTDEHAEAGLNHAFPAIETWQSQFPAYEILIDDPEFTSVCPKTGLPDFGAVTLRYMPRERCLELKSYKEYLFTFRNLGIFQENVVNQVLEDVVKACDPVWAVVRGEFRPRGGISTTIEARWPRPAVETKK

SEQ ID NO: 43570 - protein, 141 aa, Acidipila sp.
  misc_feature (1)..(141): tr|A0A372ITS1|A0A372ITS1_9BACT NADPH-dependent 7-cyano- 7-deazaguanine reductase OS=Acidipila sp. 4G-K13 OX=230 3751 GN=queF PE=3 SV=1
MVTAPRYTDEHAKAGLDTSFPEIETWENQFPAYEILIDDPEFTSVCPKTGLPDFGVITLRYMPRQRCLELKSWKEYLFSYRNLGIFQENIVNQVLEDVVKACDPVWAIVKGDFRPRGGISTVVEARWPRPDTASALPPARL

SEQ ID NO: 43571 - protein, 143 aa, Acidipila sp.
  misc_feature (1)..(143): tr|A0A3P0XAA7|A0A3P0XAA7_9BACT NADPH-dependent 7-cyano- 7-deazaguanine reductase OS=Acidipila sp. EB88 OX=23052 26 GN=queF PE=3 SV=1
MATTTSASSASSAASPRYTDEHARAGLDTVFPEIETWENQFAGYEILIDDPEFTSVCPKTGLPDFGVIQLRYMPRHRCLELKSYKEYLFCYRNLGIFQENIVNQVLNDVVKACDPIWAHVHGNFRPRGGISTLVDARWPRPKK

SEQ ID NO: 43572 - protein, 124 aa, Acidisarcina polymorpha
  misc_feature (1)..(124): tr|A0A2Z5FU77|A0A2Z5FU77_9BACT NADPH-dependent 7-cyano- 7-deazaguanine reductase OS=Acidisarcina polymorpha OX= 2211140 GN=queF PE=3 SV=1
MDFTFPEIETWPNQFPGYEILVDDPEFTSVCPKTGLPDFGIVTLRYTPRERCLELKSYKEYLFCYRNLGIFQENVVNQVLEDVVKACDPVWAVVKGDFRPRGGISTTIEARWPRPKLEAAEPSK

SEQ ID NO: 43573 - protein, 153 aa, Acidisphaera rubrifaciens
  misc_feature (1)..(153): tr|A0A0D6P609|A0A0D6P609_9PROT NADPH-dependent 7-cyano- 7-deazaguanine reductase OS=Acidisphaera rubrifaciens H S-AP3 OX=1231350 GN=queF PE=3 SV=1
MSDDLSHLTQLGRTTPLPASPEAAVLERVANPSPGRAYLVRFTCPEFTSLCPLTGQPDFAHIVLDYVPRDWIVESKSLKLYLASFRNEGAFHEACTMRIAERLVALLDPVWLRIGAYWYPRGGMPIDVFWQTGAPPDGVWVPPQDVPGYRGRG

SEQ ID NO: 43574 - protein, 130 aa, Acidithiobacillales bacterium
  misc_feature (1)..(130): tr|A0A0S8BH07|A0A0S8BH07_9PROT NADPH-dependent 7-cyano- 7-deazaguanine reductase OS=Acidithiobacillales bacteri um SG8_45 OX=1703383 GN=queF PE=3 SV=1
MPTKPSKDLETFENPHPERDYTIEIESPEFTCLCPKTGQPDFATLYLDYIPDRKCVELKSLKLYYWSYRDEGGFHEAVTNKILSDLVAATDPRFMRLRAEFNVRGGIYTNVVVEHRQPGWQGETPPTRVS

SEQ ID NO: 43575 - protein, 141 aa, Acidithiobacillus caldus
  misc_feature (1)..(141): tr|F9ZQD1|F9ZQD1_ACICS NADPH-dependent 7-cyano-7-deazag uanine reductase OS=Acidithiobacillus caldus (strain SM -1) OX=990288 GN=queF PE=3 SV=1
MPSQPSRELQHFANPHPGRDFLIHMDLPEFTCLCPLTGQPDFAHFLLDYIPDERCVELKALKVYLWSFRDEGGFHEAMTNRIADDLIRLLSPRYLRLLGRWYVRGGISTDVLVEHRAPGWDNAALLQQLGPASFTRHQPGY

SEQ ID NO: 43576 - protein, 141 aa, Acidithiobacillus caldus; identical to SEQ ID NO: 43575
  misc_feature (1)..(141): tr|A0A059ZZJ1|A0A059ZZJ1_ACICK NADPH-dependent 7-cyano- 7-deazaguanine reductase OS=Acidithiobacillus caldus (s train ATCC 51756 / DSM 8584 / KU) OX=637389 GN=queF PE= 3 SV=1

SEQ ID NO: 43577 - protein, 141 aa, Acidithiobacillus ferridurans
  misc_feature (1)..(141): tr|A0A2Z6IJA0|A0A2Z6IJA0_9PROT NADPH-dependent 7-cyano- 7-deazaguanine reductase OS=Acidithiobacillus ferridura ns OX=1232575 GN=queF PE=3 SV=1
MPSQPSRELERFPNPHPERDYVVHMDLPEFTCLCPLTGQPDFAHFMLDFIPDQHNVELKSLKLYLWSFRDEGAFHEAMTNRIADDLICLINPRYLRLLGRWYVRGGITTDVLIEHRQPGWQNPDILSQLPTVRWAQHQPGH

SEQ ID NO: 43578 - protein, 141 aa, Acidithiobacillus ferrivorans
  misc_feature (1)..(141): tr|G0JSU0|G0JSU0_9PROT NADPH-dependent 7-cyano-7-deazag uanine reductase OS=Acidithiobacillus ferrivorans SS3 O X=743299 GN=queF PE=3 SV=1
MPSQPSKTLERFSNPHPERDYVVHMDLPEFTCLCPLTGQPDFAHFMLDFIPDQHNVELKSLKLYLWSFRDEGAFHEAMTNRIADHLIHLINPRYLRLLGRWYVRGGITTDILIEHRQPGWQNPHLLSQLPPVHWAQHQPGY

SEQ ID NO: 43579 - protein, 141 aa, Acidithiobacillus ferrivorans; identical to SEQ ID NO: 43578
  misc_feature (1)..(141): tr|A0A1E7XU61|A0A1E7XU61_9PROT NADPH-dependent 7-cyano- 7-deazaguanine reductase OS=Acidithiobacillus ferrivora ns OX=160808 GN=queF PE=3 SV=1

SEQ ID NO: 43580 - protein, 141 aa, Acidithiobacillus ferrooxidans
  misc_feature (1)..(141): tr|A0A179BP68|A0A179BP68_ACIFR NADPH-dependent 7-cyano- 7-deazaguanine reductase OS=Acidithiobacillus ferrooxid ans OX=920 GN=queF PE=3 SV=1
MPSQPSKTLERFSNPHPERDYVVHMDLPEFTCLCPLTGQPDFAHFMLDFIPDQHNVELKSLKLYLWSFRDEGAFHEAMTNRIADNLIHLINPRYLRLLGRWYVRGGITTDILIEHRQAGWENPHLLSQLPPVHWAQHQPGY

SEQ ID NO: 43581 - protein, 141 aa, Acidithiobacillus ferrooxidans
  misc_feature (1)..(141): sp|B7J648|QUEF_ACIF2 NADPH-dependent 7-cyano-7-deazagua nine reductase OS=Acidithiobacillus ferrooxidans (strai n ATCC 23270 / DSM 14882 / CIP 104768 / NCIMB 8455) OX= 243159 GN=queF PE=3 SV=1
MPSQPSRELERFSNPHPERDYVVHMDLPEFTCLCPLTGQPDFAHFMLDFIPDQHNVELKSLKLYLWSFRDEGAFHEAMTNRIADDLIGLINPRYLRLLGRWYVRGGITTDVLIEHRQPGWQNPDILGQLPTVRWAQHQPGH

SEQ ID NO: 43582 - protein, 141 aa, Acidithiobacillus sp.
  misc_feature (1)..(141): tr|A0A2I1DJ06|A0A2I1DJ06_9PROT NADPH-dependent 7-cyano- 7-deazaguanine reductase OS=Acidithiobacillus sp. SH OX =187490 GN=queF PE=3 SV=1
MPSQPSKALERFPNPHPERDYVVHMDMPEFTCLCPLTGQPDFAHFLLDFIPGEYNVELKSLKLYLWSFRDEGAFHEAMSNRIADDIIQLIQPRYLRLLGRWYVRGGISTDLLIEHRQPGWENPEILSQLPVVHWTRQQPGY

SEQ ID NO: 43583 - protein, 140 aa, Acidithiobacillus sp.
  misc_feature (1)..(140): tr|A0A3M8QTN6|A0A3M8QTN6_9PROT NADPH-dependent 7-cyano- 7-deazaguanine reductase OS=Acidithiobacillus sp. CJ-2 OX=1867749 GN=queF PE=3 SV=1
MSSQPSKDLQSFPNPHPERDYCIHMDLPEFTCLCPVTGQPDFAHFLLDFIPDQRCVELKSLKLYLWSYRNEGGFHEAMTNRIADDLIALLAPRYLRLLGRWYVRGGITTDVLVEERQAGWSNPSILAQLPPVTWSAQRPG

SEQ ID NO: 43584 - protein, 141 aa, Acidithiobacillus thiooxidans
  misc_feature (1)..(141): tr|A0A1C2J364|A0A1C2J364_ACITH NADPH-dependent 7-cyano- 7-deazaguanine reductase OS=Acidithiobacillus thiooxida ns OX=930 GN=queF PE=3 SV=1
MPSQPSKSLERFPNPHPERDYVVHMDMPEFTCLCPLTGQPDFAHFMLDFIPDQHNVELKSLKLYLWSFRDEGAFHEAMSNRIADDIIQLIQPRYLRLLGRWYVRGGISTDLLIEHRQPGWENPDILGQLPGVQWTRQQPGY

SEQ ID NO: 43585 - protein, 141 aa, Acidithiobacillus thiooxidans
  misc_feature (1)..(141): tr|A0A543Q856|A0A543Q856_ACITH NADPH-dependent 7-cyano- 7-deazaguanine reductase OS=Acidithiobacillus thiooxida ns ATCC 19377 OX=637390 GN=queF PE=3 SV=1
MPSQPSKSLERFPNPHPERDYVVHMDMPEFTCLCPLTGQPDFAHFMLDFIPDQHNVELKSLKLYLWSFRDEGAFHEAMSNRIADDIIQLIQPRYLRLLGRWYVRGGISTDLLIEHRQPGWDNPDILGQLPGVQWTRQQPGY

SEQ ID NO: 43586 - protein, 193 aa, Acidithrix ferrooxidans
  misc_feature (1)..(193): tr|A0A0D8HIH7|A0A0D8HIH7_9ACTN NADPH-dependent 7-cyano- 7-deazaguanine reductase OS=Acidithrix ferrooxidans OX= 1280514 GN=queF PE=3 SV=1
MCDCGITKPLAVSIVKFKKTYLRNLSEIYMVSDTSKLSLLGAGSTNYEYSSPTADLLEVFDNPRPEVPFVIGLDCLEFTSLCPMTGQPDYGSIYIDYVGDKLCVESKSLKLYLVSYRNHGAFHEDCVNSIADDIVAKINPLYLRVFGDFNVRGGIAIKPLTIRRNSPMASELRDEIAELFASFDRLSARGPRG

SEQ ID NO: 43587 - protein, 131 aa, Acidobacteria bacterium
  misc_feature (1)..(131): tr|A0A1F2QRY7|A0A1F2QRY7_9BACT NADPH-dependent 7-cyano- 7-deazaguanine reductase OS=Acidobacteria bacterium RIF CSPHIGHO2_01_FULL_67_28 OX=1797175 GN=queF PE=3 SV=1
MPEYTEKHARAGVKARLPRLETWENQFPGYAITITIPEYTAVCPRTGQPDFGTLTLRYQPRRRCLELKSLKMYILAYRDLGIFYENAVNRILRDVVAACRPAWAEVRGEFTPRGGMRATVEARYPRGRRNK

SEQ ID NO: 43588 - protein, 145 aa, Acidobacteria bacterium
  misc_feature (1)..(145): tr|A0A1Q7KNX0|A0A1Q7KNX0_9BACT NADPH-dependent 7-cyano- 7-deazaguanine reductase OS=Acidobacteria bacterium 13_ 1_40CM_4_58_4 OX=1803453 GN=queF PE=3 SV=1
MPEYSEEQARAGITAKLPPLETWPNQFPDYVIITRFPEYSSVCPKTGLPDYGTITIQYMPKKECLELKALKMYLLSYRDLGIFYENAVNKILHDIVAAVRPEWCVVRGEFTPRGGLTTSVIARWPALQDEGKPSKMHLRRKGKST

SEQ ID NO: 43589 - protein, 137 aa, Acidobacteriales bacterium
  misc_feature (1)..(137): tr|A0A1Q7N1G9|A0A1Q7N1G9_9BACT NADPH-dependent 7-cyano- 7-deazaguanine reductase OS=Acidobacteriales bacterium 13_1_40CM_3_55_5 OX=1803468 GN=queF PE=3 SV=1
MPNRQRYTTEHAEAGLDAKFPEIETWPNQFPGYEIVVDDPEFTSVCPKTGLPDFGVLTIRYMPDQHCLELRSLKEYLQSYRNLGIFQENIVNQVLEDVVRWARPVWAEVKGEFRPRGGISTVVTARWPRPKASKNGK

SEQ ID NO: 43590 - protein, 137 aa, Acidobacteriales bacterium; identical to SEQ ID NO: 43589
  misc_feature (1)..(137): tr|A0A1Q7CM85|A0A1Q7CM85_9BACT NADPH-dependent 7-cyano- 7-deazaguanine reductase OS=Acidobacteriales bacterium 13_2_20CM_2_55_5 OX=1803469 GN=queF PE=3 SV=1

SEQ ID NO: 43591 - protein, 132 aa, Acidobacteriia bacterium
  misc_feature (1)..(132): tr|A0A321LLJ2|A0A321LLJ2_9BACT NADPH-dependent 7-cyano- 7-deazaguanine reductase OS=Acidobacteriia bacterium AA 117 OX=2169412 GN=queF PE=3 SV=1
MANRTGYTEQHAKAGLDHNFPEIDTWPNQFPAYEILVDVPEFTSVCPKTGLPDFGVLEIRYMPDKLCLELKSLKEYLLHYRNLGIFQENIVNQVLEDVVRAAKPKWVVLKGVFRPRGGIGTTVEVRWPRPKK

SEQ ID NO: 43592 - protein, 136 aa, Acidobacteriia bacterium
  misc_feature (1)..(136): tr|A0A317IMR2|A0A317IMR2_9BACT NADPH-dependent 7-cyano- 7-deazaguanine reductase OS=Acidobacteriia bacterium OX =2081523 GN=queF PE=3 SV=1
MKREYTDEHAAAGVHAELPEIETWPNQYADYEIEIDMPEFTSVCPKTGLPDFGRVVLRYVPDRKCLELKSYKMYLLAYRNLGIFQENVVNRVLRDVVRVANPITATVVGEFTPRGGLGTVVTATWRRPERARRGKR

SEQ ID NO: 43593 - protein, 134 aa, Acidobacterium capsulatum
  misc_feature (1)..(134): tr|C1F4J2|C1F4J2_ACIC5 NADPH-dependent 7-cyano-7-deazag uanine reductase OS=Acidobacterium capsulatum (strain A TCC 51196 / DSM 11244 / JCM 7670 / NBRC 15755 / NCIMB 1 3165 / 161) OX=240015 GN=queF PE=3 SV=1
MSTGYTDDHAKAGLDFSFPAIDTWRNQFPAYEILIDDPEFTSVCPKTGLPDFGAITLRYMPRERCLELKSWKEYLFTYRNLGIFQENIVNQVLEDVVKACDPVWAVVRGEFRPRGGISTTVEARWPRPSTGQSR

SEQ ID NO: 43594 - protein, 116 aa, Acidobacterium sp.
  misc_feature (1)..(116): tr|A0A2G4JL37|A0A2G4JL37_9BACT NADPH-dependent 7-cyano- 7-deazaguanine reductase OS=Acidobacterium sp. OX=18721 19 GN=queF PE=3 SV=1
MSTTSTIETFPNPRPERAFEIAIDCPEFTSMCPKTGLPDFGVIRIRYVPAARCLELKSLKYYLLEFRNKGIFYEAATNQILDDLVAACAPVRMTVIGDFTARGGITTKVTAEYTTA

SEQ ID NO: 43595 - protein, 134 aa, Acidobacterium sp.; identical to SEQ ID NO: 43593
  misc_feature (1)..(134): tr|A0A3D4VM67|A0A3D4VM67_9BACT NADPH-dependent 7-cyano- 7-deazaguanine reductase OS=Acidobacterium sp. OX=18721 19 GN=queF PE=3 SV=1

SEQ ID NO: 43596 - protein, 154 aa, Acidocella aminolytica
  misc_feature (1)..(154): tr|A0A0D6PMI1|A0A0D6PMI1_9PROT NADPH-dependent 7-cyano- 7-deazaguanine reductase OS=Acidocella aminolytica 101 = DSM 11237 OX=1120923 GN=queF PE=3 SV=1
MTDDRYAELKQLGTKTEMPASPEEAVLERVPAKTGGKNAMVRFVCPEFTSLCPMTGQPDFGHIVIDYIPDEWLVESKSLKLFLQSFRNHGGFHEACSLMIAERLVDLLSPKWLRLGAYWYPRGGIPIDVFWQTGKPPEDAWIPDQGVPPYRGRG

SEQ ID NO: 43597 - protein, 154 aa, Acidocella sp.
  misc_feature (1)..(154): tr|A0A257QJ86|A0A257QJ86_9PROT NADPH-dependent 7-cyano- 7-deazaguanine reductase OS=Acidocella sp. 20-58-15 OX= 1970302 GN=queF PE=3 SV=1
MTDDRYQGLHQLGADARMPGSPEAAVLEKVPARTEGKHYMVRFTCPEFTSLCPITGQPDFAHIVIDYIPGEWLVESKSLKLFLQSFRNHGAFHEACTIMIADRIVALLNPVWLRIGGYWYPRGGIPIDVFWQTGAPPDGVWLPEQGVPSYRGRG

SEQ ID NO: 43598 - protein, 154 aa, Acidocella sp.
  misc_feature (1)..(154): tr|A0A257Q8U3|A0A257Q8U3_9PROT NADPH-dependent 7-cyano- 7-deazaguanine reductase OS=Acidocella sp. 20-57-95 OX= 1970301 GN=queF PE=3 SV=1
MTDDRYQNLNQLGAATGMPASPEAAVLERVAAKTNGKHYMVRFTCPEFTSLCPITGQPDFAHIVIDYIPGDWLVESKSLKLFLQSFRNHGAFHEACTIMIADRIIALLNPVWLRIGGYWYPRGGIPIDVFWQTGAAPEGVWLPEQAVPAYRGRG

SEQ ID NO: 43599 - protein, 156 aa, Acidomonas methanolica
  misc_feature (1)..(156): tr|A0A023DAK3|A0A023DAK3_ACIMT NADPH-dependent 7-cyano- 7-deazaguanine reductase OS=Acidomonas methanolica NBRC 104435 OX=1231351 GN=queF PE=3 SV=1
MTTSQNDLAALTQLGKSSAVAADPSQAVLERVPSPHPERRYLVRFTAPEFTSLCPVTGQPDFAHLVIDYVPDQWIVESKSLKLYLTSFRNHGAFHEACSVAIAARLVEELSPVWLRIGAYWYPRGGIPIDVFWQTGVPPEGVWIPAQDVPGYRGRG

SEQ ID NO: 43600 - protein, 281 aa, Acidovorax anthurii
  misc_feature (1)..(281): tr|A0A328Z6U9|A0A328Z6U9_9BURK NADPH-dependent 7-cyano- 7-deazaguanine reductase OS=Acidovorax anthurii OX=7822 9 GN=queF PE=3 SV=1
MSTPDQSQLGRAAAYADQYDASLLFPLPRKPKRDEIGITGAPPFFGADLWTAFELSWLNPRGKPQVAIAHVTVPCETPNIVESKSFKLYLNSFNGTRFADAAEVQARLRADVSEAVWRGAQHPATVGVKLVLPEMFDREPVQELDGLLLDRLDVECTQYTPAPELLHAQHGEAPVTETLVSHLLKSNCLVTGQPDWGSVRIQYSGAQIDQAGLLQYLVSFRNHNEFHEQCVERIFMDLWTRCRPIKLSVYARYTRRGGLDINPLRTSHPQALPPNVRTARQ

SEQ ID NO: 43601 - protein, 281 aa, Acidovorax avenae
  misc_feature (1)..(281): tr|A0A2R4DWZ2|A0A2R4DWZ2_9BURK NADPH-dependent 7-cyano- 7-deazaguanine reductase OS=Acidovorax avenae subsp. av enae OX=80870 GN=queF PE=3 SV=1
MNTPDQSQLGRVSGYVDQYDSSLLFPLRRQPKRDEIGVTGAPPFFGADLWTAFELSWLNLRGKPQVALAHITVPCETPNIIESKSFKLYLNSFNNTRFTDAAEVQARIRTDISEAAWRGSDRQATVGVKLVLPEMFDREPVQELDGLLLDRLDVECTHYTPAPELLHANHGEAPVTETLTSHLLKSNCLVTGQPDWGSVRIQYSGAQIDQAGLLQYLVSFRNHNEFHEQCVERIFMDLWTRCRPIKLSVYARYTRRGGLDINPLRTSHPQALPANIRTARQ

SEQ ID NO: 43602 - protein, 281 aa, Acidovorax avenae
  misc_feature (1)..(281): tr|A0A2R4EJS8|A0A2R4EJS8_9BURK NADPH-dependent 7-cyano- 7-deazaguanine reductase OS=Acidovorax avenae subsp. av enae OX=80870 GN=queF PE=3 SV=1
MNTPDQSQLGRVSGYVDQYDASQLFPLPRQPKRDEIGVTGAPPFFGADLWTAFELSWLNLRGKPQVALAHITVPCETPNIIESKSFKLYLNSFNNTRFADAAEVHARIRTDISEAAWRGSDRQATVGVKLVLPEMFDREPVQELDGLLLDRLDVECTHYTPAPELLHANHGEAPVTETLTSHLLKSNCLVTGQPDWGSVRIQYSGAQIDQAGLLQYLVSFRNHNEFHEQCVERIFMDLWTRCRPIKLSVYARYTRRGGLDINPLRTSHPQALPANIRTARQ

SEQ ID NO: 43603 - protein, 281 aa, Acidovorax caeni
  misc_feature (1)..(281): tr|A0A1I7J5P1|A0A1I7J5P1_9BURK NADPH-dependent 7-cyano- 7-deazaguanine reductase OS=Acidovorax caeni OX=343013 GN=queF PE=3 SV=1
MNHPAQSPLGKASAYADQYDPALLFPIARAPKRAEIGITGTQPFFGADLWTAFELSWLNARGKPQVALAHVTVPCETPNIIESKSFKLYLNSFNGTRFDSSEAVRERLRADLSEAAWRGAASPGTVGVRLVAPEQFDQEPVHELSGLDLDRLDVECTHYQPEPALLTAAFDEAPVTETLTSRLLKSNCLVTGQPDWGSVQISYSGPQIDQAGLLQYIVSFRNHNEFHEQCVERIFMDITARCRPLKLTVYARYTRRGGLDINPLRTSHPQQLPRNVRTARQ

SEQ ID NO: 43604 - protein, 281 aa, Acidovorax carolinensis
  misc_feature (1)..(281): tr|A0A240TU37|A0A240TU37_9BURK NADPH-dependent 7-cyano- 7-deazaguanine reductase OS=Acidovorax carolinensis OX= 553814 GN=queF PE=3 SV=1
MTTPEQSQLGKASAYADQYDASLLFPIPRAGKRAEIGIAGAPPFFGADLWTAFELSWLNARGKPQVALAHITVPCETPNIVESKSFKLYLNSFNNTRFADAAEVQARIRADISEAVWRGADRPATVGVKLLLPELFDREPVHELDGLSLDRLDVECTRYQPAPDLLTAEFGEAPVSEVLTSNLLKSNCLVTGQPDWGSVQIAYSGPQINQEGLLQYIVSFRNHNEFHEQCVERIFMDLWTRCKPIKLTVYARYTRRGGLDINPLRTSHPQQLPANTRTARQ

SEQ ID NO: 43605 - protein, 281 aa, Acidovorax carolinensis
  misc_feature (1)..(281): tr|A0A240UFT2|A0A240UFT2_9BURK NADPH-dependent 7-cyano- 7-deazaguanine reductase OS=Acidovorax carolinensis OX= 553814 GN=queF PE=3 SV=1
MNTPEQSQLGKASAYADQYDASLLFPIPRAGKRAEIGIAGAPPFFGADLWTAFELSWLNARGKPQVALAHITVPCETPNIVESKSFKLYLNSFNNTRFADATEVQARIRADISEAVWRGADHPATVGVKLLLPELFDREPVHELDGLSLDRLDVECTRYQPAPDLLTAEFGEAPVSEVLTSNLLKSNCLVTGQPDWGSVQIAYSGPQINQEGLLQYIVSFRNHNEFHEQCVERIFMDLWTRCKPIKLTVYARYTRRGGLDINPLRTSHPQQLPANTRTARQ

SEQ ID NO: 43606 - protein, 281 aa, Acidovorax cattleyae
  misc_feature (1)..(281): tr|A0A1H0KHH5|A0A1H0KHH5_9BURK NADPH-dependent 7-cyano- 7-deazaguanine reductase OS=Acidovorax cattleyae OX=808 68 GN=queF PE=3 SV=1
MNTPDQSQLGRVSGYADQYDASLLFPLPRQPKRDEIGMTGAPPFFGADLWTAFELSWLNLRGKPQVALAHITVPCETPNIIESKSFKLYLNSFNSTRFTDAAEVQARIRADISEAAWRGSDRQATVGVKLVLPEMFDREPVQELDGLLLDRLDLECTHYTPAPELLHANHGEAPVTETLTSHLLKSNCLVTGQPDWGSVRIQYSGAQIDQAGLLQYLVSFRNHNEFHEQCVERIFMDLWTRCRPIKLSVYARYTRRGGLDINPLRTSHPQALPANIRTARQ

SEQ ID NO: 43607 - protein, 292 aa, Acidovorax cavernicola
  misc_feature (1)..(292): tr|A0A3A1W325|A0A3A1W325_9BURK NADPH-dependent 7-cyano- 7-deazaguanine reductase OS=Acidovorax cavernicola OX=1 675792 GN=queF PE=3 SV=1
MSHDPTKPITANTPEQSQLGRASAYADKYDPSQLFPIARATQREAMGIQAGALPFFGADLWTAFELSWLNPRGKPQVAIAHFTIPCETPNIIESKSFKLYLNSFNNTVFASADEVRERLRTDLSEAAWRGSAQPATIGVKLLAPEMFDREPVHELDGLDLDRLDIECTRYQPAPELLSSDATQAPVTETLTSRLLKSNCLVTGQPDWGSVQIRYSGPPIDQAGLLAYIVSFRNHNEFHEPCAERMFTDIWRQCQPTKLAVYARYTRRGGLDINPFRTSWPQALPVNARMARQ

SEQ ID NO: 43608 - protein, 59 aa, Acidovorax cavernicola
  misc_feature (1)..(59): tr|A0A3A1W2P8|A0A3A1W2P8_9BURK NADPH-dependent 7-cyano- 7-deazaguanine reductase QueF (Fragment) OS=Acidovorax cavernicola OX=1675792 GN=D3H34_30730 PE=4 SV=1
MNTPEHSQLGKTSAYIDQYDASLLFPLPRATKRAELGLGDQPPFFGADLWTAFELSWLN

SEQ ID NO: 43609 - protein, 281 aa, Acidovorax citrulli
  misc_feature (1)..(281): sp|A1TLC4|QUEF_ACIAC NADPH-dependent 7-cyano-7-deazagua nine reductase OS=Acidovorax citrulli (strain AAC00-1) OX=397945 GN=queF PE=3 SV=1
MNTPDQSQLGRVSGYADQYDASLLFPLPRQPKRHEIGVTGTPPFFGADLWTAFELSWLNLRGKPQVALAHITVPCETPNIIESKSFKLYLNSFNNTRFADAAQVQTRIRTDISEAAWRGSDRQATVGVKLVLPEMFDREPVQELDGLLLDRLDVECTHYTPAPELLHANHGEAPVTETLTSHLLKSNCLVTGQPDWGSVRIEYSGAQIDQSGLLRYLVSFRNHNEFHEQCVERIFMDLWTRCRPIKLSVYARYTRRGGLDINPLRTSHPQALPANVRTARQ

SEQ ID NO: 43610 - protein, 281 aa, Acidovorax delafieldii
  misc_feature (1)..(281): tr|A0A561XNC0|A0A561XNC0_ACIDE NADPH-dependent 7-cyano- 7-deazaguanine reductase OS=Acidovorax delafieldii OX=4 7920 GN=queF PE=3 SV=1
MNTPEQSQLGKASAYVDQYDASLLFPIPRAGKRAEIGITGSAPFFGADLWTAFELSWLNARGKPQVALAHITVPCETPNIVESKSFKLYLNSFNNTRFADAAEVQARIRADISEAVWRGADHPATVGVKLIAPELFDQEPVHELDGLSLDRLDVECTRYQPAPDLLTATFNEAPVTETLTSNLLKSNCLVTGQPDWGSVQISYSGPQINQEGLLQYLVSFRNHNEFHEQCVERIFMDVWTRCKPIKLTVYARYTRRGGLDINPLRTSHPQALPRNVRTARQ

SEQ ID NO: 43611 - protein, 287 aa, Acidovorax delafieldii
  misc_feature (1)..(287): tr|C5TC75|C5TC75_ACIDE NADPH-dependent 7-cyano-7-deazag uanine reductase OS=Acidovorax delafieldii 2AN OX=57306 0 GN=queF PE=3 SV=1
MTCTPAMNTPEQSQLGRASAYADHYDASLLFPIARAGKRAEIGIAGAAPFFGADLWTAFELSWLNARGKPQVALAHITVPCETPNIVESKSFKLYLNSFNNTRFADAAEVQARIRADISEAVWRGAEHPATVGVKLIGPDLFDREPVHELDGLSLDRLDVECTRYQPAPDLLTAAFGEAPVSEVLTSNLLKSNCLVTGQPDWGSVQISYSGPQINQEGLLQYLVSFRSHNEFHEQCVERIFMDVWTRCKPIKLTVYARYTRRGGLDINPLRTSHPQQLPANTRTARQ

SEQ ID NO: 43612 - protein, 281 aa, Acidovorax ebreus
  misc_feature (1)..(281): sp|B9MDS3|QUEF_ACIET NADPH-dependent 7-cyano-7-deazagua nine reductase OS=Acidovorax ebreus (strain TPSY) OX=53 5289 GN=queF PE=3 SV=1
MNTPEHSQLGKASAYADQYDASLLFPIPRADKRAEIGIDGNAPFFGADLWTAFELSWLNLRGKPQVAIAHITVPCETPHIVESKSFKLYLNSFNNTRFGDASEVQARLRADISEAVWRGAPHPATVGVKLIAPELFDQEPVHELDGLSLDRLDVECTRYQPAPDLLTATFNEAPVTETLTSNLLKSNCLVTGQPDWGSVQISYSGPQINQEGLLQYLVSFRNHNEFHEQCVERIFMDLWTRCKPIKLKVYARYTRRGGLDINPWRTSHPQTMPKNVRTARQ

SEQ ID NO: 43613 - protein, 281 aa, Acidovorax kalamii
  misc_feature (1)..(281): tr|A0A235ESS0|A0A235ESS0_9BURK NADPH-dependent 7-cyano- 7-deazaguanine reductase OS=Acidovorax kalamii OX=20044 85 GN=queF PE=3 SV=1
MNTPEQSQLGKASAYVDQYDATLLFPIPRAGKRAEIGITGAAPFFGADLWTAFELSWLNARGKPQVALAHITVPCETPNIVESKSFKLYLNSFNNTRFADMAEVQARIRTDISEAVWRGAEHPATVGVKLVAPELFDQEPVHELDGLSLDRLDVECTRYQPAPELLTAEFNEAPVTETLTSNLLKSNCLVTGQPDWGSVQISYSGPQINQEGLLQYLVSFRDHNEFHEQCVERIFMDLWARCKPIKLTVYARYTRRGGLDINPLRTSHPQGLPRNVRTARQ

SEQ ID NO: 43614 - protein, 281 aa, Acidovorax konjaci
  misc_feature (1)..(281): tr|A0A1I1RTH8|A0A1I1RTH8_9BURK NADPH-dependent 7-cyano- 7-deazaguanine reductase OS=Acidovorax konjaci OX=32040 GN=queF PE=3 SV=1
MNSPDQSQLGRASAYADQYDASLLYPLPRQPKRDEIGVTGAPPFFGADLWTAFELSWLNLRGKPQVAIAHVTVPCETPNIVESKSFKLYLNSFNNTRFADAAEVQARIRADVSEAAWRGADRPSTVGVKLVLPEMFDREPVHELDGLLLDRLDVECDRYTPAPELLQASQGEAPVTETLTSHLLKSNCLVTGQPDWGSVRIQYSGAQIDQAGLLQYLVSFRNHNEFHEQCVERIFMDVWTRCRPIKLSVYARYTRRGGLDINPLRTSHPQALPPNTRTARQ

SEQ ID NO: 43615 - protein, 283 aa, Acidovorax radicis
  misc_feature (1)..(283): tr|A0A561CE48|A0A561CE48_9BURK NADPH-dependent 7-cyano- 7-deazaguanine reductase OS=Acidovorax radicis OX=75882 6 GN=queF PE=3 SV=1
MNDNTPEQSQLGKASAYVDQYDASLLFPIPRAGKRAEIGITAAPPFFGADLWTAFELSWLNQRGKPQVALVHITIPCETPNIVESKSFKLYLNSFNNTRFADPSEVQARIRTDVSEAAWRGAEHPATVGVRLLLPEMFDQEPVHELDGLSLDRLDVECTHYQPAPHLLHAVHDEPAVTEVLTSNLLKSNCLVTGQPDWGSVQIRYTGAPIDQERLLQYLVSFRNHNEFHEQCVERIFMDLWTRCKPLKLTVYARYTRRGGLDINPLRTSHPQALPGNVRTARQ

SEQ ID NO: 43616 - protein, 281 aa, Acidovorax soli
  misc_feature (1)..(281): tr|A0A1H3X498|A0A1H3X498_9BURK NADPH-dependent 7-cyano- 7-deazaguanine reductase OS=Acidovorax soli OX=592050 G N=queF PE=3 SV=1
MTTPEQSQLGKASAYADQYDASLLFPIPRAGKRAEIGIAGAAPFFGADLWTAFELSWLNARGKPQVALAHITVPCETPNIVESKSFKLYLNSFNNTRFADAAEVQARIRADISEAVWRGAEHPATVGVKLLLPELFDREPVHELDGLSLDRLDVECTRYQPAPELLTAEFNEAPVTETLTSNLLKSNCLVTGQPDWGSVQIAYSGPQIDQEGLLQYIVSFRNHNEFHEQCVERIFMDIWTRCQPIKLTVYARYTRRGGLDINPLRTSHPQGLPRNVRTARQ

SEQ ID NO: 43617 - protein, 281 aa, Acidovorax sp.
  misc_feature (1)..(281): sp|A1WAZ1|QUEF_ACISJ NADPH-dependent 7-cyano-7-deazagua nine reductase OS=Acidovorax sp. (strain JS42) OX=23272 1 GN=queF PE=3 SV=1
MNTPEHSQLGKASAYADQYDASLLFPIPRADKRAEIGIDGNAPFFGADLWTAFELSWLNLRGKPQVAIAHITVPCETPHIVESKSFKLYLNSFNNTRFASEAEVRARIRADVSEAVWRGAEHPGTVGVTLLLPEAFDREPIHELDGLLLDRLDVECTRYQPAPELLAAHHDEAPVTETLVSHLLKSNCLVTGQPDWGSVQITYSGAQIDQAGLLQYLVSFRNHNEFHEQCVERIFMDIWTRCRPIKLAVYARYTRRGGLDINPLRTSHPQQLQRNVRTARQ

SEQ ID NO: 43618 - protein, 281 aa, Acidovorax sp.
  misc_feature (1)..(281): tr|A0A0A1VGW2|A0A0A1VGW2_9BURK NADPH-dependent 7-cyano- 7-deazaguanine reductase OS=Acidovorax sp. MR-S7 OX=126 8622 GN=queF PE=3 SV=1
MTTPEQSQLGKASAYADQYDASLLFPLPRLPKRAEIGIAGAPPFFGADLWTAYELSWLGPRGKPQVAIAHVTVPCETPNIVESKSFKLYLNSFNNTRFASLEDVRARIRQDVSEAVWRGSPVAGTVGVKLVAPELFDQEPIHELDGLLLDRLDVECTQYTPAPELLAANHAEAPVTETLVSHLLKSNCLVTGQPDWGSVQIAYSGAQIDQAGLLQYLVSFRNHNEFHEQCVERIFMDVWTRCRPIKLAVYARYTRRGGLDINPWRTSHPQQLPRNVRTARQ

SEQ ID NO: 43619 - protein, 282 aa, Acidovorax temperans
  misc_feature (1)..(282): tr|A0A543L9B7|A0A543L9B7_9BURK NADPH-dependent 7-cyano- 7-deazaguanine reductase OS=Acidovorax temperans OX=808 78 GN=queF PE=3 SV=1
MTNTPEQSQLGKASAYTDQYDPTLLFPIPRAGKRAEIGIADVPPFFGADLWTAFEVSWLNLRGKPQVALVHFTIPCESPNIIESKSFKLYLNSFNNTRFGDASEVQSRLRADISEAVWRGAPHPATVGVKLIAPELFDQEPVHELDGLSLDRLDVECTRYQPAPDLLKAQFDEAPVTEVLTSNLLKSNCLVTGQPDWGSVQIRYTGPQIDQEGLLQYIVSFRNHNEFHEQCVERIFMDLWTHCKPIKLMVYARYTRRGGLDINPLRTSHPHALPANVRTARQ

SEQ ID NO: 43620 - protein, 282 aa, Acidovorax temperans
  misc_feature (1)..(282): tr|A0A0D7K8F5|A0A0D7K8F5_9BURK NADPH-dependent 7-cyano- 7-deazaguanine reductase OS=Acidovorax temperans OX=808 78 GN=queF PE=3 SV=1
MTNTPEQSQLGKASAYTDQYDPTLLFPIPRAGKRAEIGIADIPPFFGADLWTAFEVSWLNLRGKPQVALVHFTIPCESPNIVESKSFKLYLNSFNNTRFGDASEVQARLRADISEAVWRGAPHPATVGVKLIAPELFDQEPVHELDGLSLDRLDVECTRYQPAPDLLKAQFDEAPVTEVLTSNLLKSNCLVTGQPDWGSVQIRYTGPQIDQEGLLQYIVSFRNHNEFHEQCVERIFMDLWTRCKPIKLMVYARYTRRGGLDINPLRTSHPHALPANVRTARQ

SEQ ID NO: 43621 - protein, 281 aa, Acidovorax valerianellae
  misc_feature (1)..(281): tr|A0A1G6VQB7|A0A1G6VQB7_9BURK NADPH-dependent 7-cyano- 7-deazaguanine reductase OS=Acidovorax valerianellae OX =187868 GN=queF PE=3 SV=1
MNTPEQSQLGRISAYADQYDASLLFPIPRAGKRAEIGIATTAPFFGADLWTAFELSWLNLRGKPQVAIAHVTVPCETLNIVESKSFKLYLNSFNNTRFADAAEVQARIRADVSEAVWRGAPQAGTVGVKLLLPELFDREPVHELDGLLLDRLDVECTQYTPAPELLSANHAETPVTEALTSHLLKSNCLVTGQPDWGSVRIHYSGPQIDQAGLLQYLVSFRNHNEFHEQCVERIFMDVWTRCKPIKLSVYARYTRRGGLDINPFRTSHPQALPANVRTARQ

SEQ ID NO: 43622 - protein, 288 aa, Acidovorax wautersii
  misc_feature (1)..(288): tr|A0A1I2CLP6|A0A1I2CLP6_9BURK NADPH-dependent 7-cyano- 7-deazaguanine reductase OS=Acidovorax wautersii OX=117 7982 GN=queF PE=3 SV=1
MSQHNDNTPERSQLGKTSAYVDQYDPSLLFPIPRAPKRAEIGLDGAAAMPFFGADLWTAFELSWLNARGKPQVALAHVTIPCETPNIIESKSFKLYLNSFNNSRFADAAEVQARLRADLSEAAWRGAASPATVGVKLLLPELFDREPVHELDGLLLDRLDIECTRYTPAPELLTAAHGEAPVTETLVSHLLKSNCLVTGQPDWGSVQIRYSGPQIEQAGLLQYLVSFRNHNEFHEQCVERIFMDVWTRCRPIKLAVYARYTRRGGLDINPLRTSHPQALPANVRTARQ

SEQ ID NO: 43623 - protein, 271 aa, Acinetobacter albensis
  misc_feature (1)..(271): tr|A0A1C4GSD2|A0A1C4GSD2_9GAMM NADPH-dependent 7-cyano- 7-deazaguanine reductase OS=Acinetobacter albensis OX=1 673609 GN=queF PE=3 SV=1
MTVELSLLGKDTHYPTQYQPDILFAIARAQSREKYAHIEGIQQGQDWWHVFEISWLNPQGIPQVAIGRISVPATSPNLLESKSLKLYFNSMNFTEFDSKETFISVVEKDLSAAAGAAVSLSLFQADDLEVSKPEGINIDDLLPERLENHPDSTLLKLDTENSEHVEVQLYSHLLRSNCPVTGQPDWGTVFIRYQGKKPCYRSILAYIISYRQHNGFHEQCVEQIFADLWQIFAPQKLMVYATYTRRGGLDINPCRVSDFTWMPRPIRLARQ

SEQ ID NO: 43624 - protein, 271 aa, Acinetobacter apis
  misc_feature (1)..(271): tr|A0A217EF95|A0A217EF95_9GAMM NADPH-dependent 7-cyano- 7-deazaguanine reductase OS=Acinetobacter apis OX=12291 65 GN=queF PE=3 SV=1
MSVEQSLLGKDTNYPTEYQPSILFPIARAPSRELYQEIEGIQLGTDWWHVFELSWLNEHAVPQVAIGRLSIPATSPYLIESKSLKLYFNSLNFTQFESKTKLIATVEHDLSHAAQATVQLELIDANGLQVDQPLGLCIDDLKPTAQSHIPDAKLLANAASNEQIEEYLHCNLLRSNCPVTGQPDWGTLFIRYEGKKICHNSLLAYILSYRQHNGFHEQCVEHIFADLWTKLQPKKLMVYAAYTRRGGLDINPCRVSQQDWLPKQPLRLARQ

SEQ ID NO: 43625 - protein, 270 aa, Acinetobacter baumannii
  misc_feature (1)..(270): sp|B7GZQ9|QUEF_ACIB3 NADPH-dependent 7-cyano-7-deazagua nine reductase OS=Acinetobacter baumannii (strain AB307 -0294) OX=557600 GN=queF PE=3 SV=1
MSVEQSLLGKETQYPTSYQPDVLFPIARAQSREKYAHIQGITQGKDWWHVFEISWLNAHGIPQVAIGRITLPASSPNLIESKSLKLYFNSLNFTQFDSTQSFIETVEKDLSAAAGAKVELTLFQVDDLEISKPQGICIDDLMPERLEQHPDATLLKLDESGEEIEVELYSHLLRSNCPVTGQPDWGTVFIRFKGKKPCYRSLLAYIISYRQHNGFHEQCVEQIFADIWQNLQPEKLMVYATYTRRGGLDINPCRVSDLTWMPKPIRLARQ

SEQ ID NO: 43626 - protein, 270 aa, Acinetobacter baumannii
  misc_feature (1)..(270): sp|A3M741|QUEF_ACIBT NADPH-dependent 7-cyano-7-deazagua nine reductase OS=Acinetobacter baumannii (strain ATCC 17978 / CIP 53.77 / LMG 1025 / NCDC KC755 / 5377) OX=40 0667 GN=queF PE=3 SV=2
MSVEQSLLGKETQYPTSYQPDVLFPIARAQSREKYAHIEGITQGKDWWHVFEISWLNAHGIPQVAIGRITLPASSPNLIESKSLKLYFNSLNFTQFDSTQSFIETVEKDLSAAAGAKVELTLFQVDDLEISKPQGICIDDLMPERLEQHPDATLLKLDESDEEIEVELYSHLLRSNCPVTGQPDWGTVFIRFKGKKPCYRSILAYIISYRQHNGFHEQCVEQIFADIWQNLQPEKLMVYATYTRRGGLDINPCRVSDLTWMPKPIRLARQ

SEQ ID NO: 43627 - protein, 271 aa, Acinetobacter baylyi
  misc_feature (1)..(271): sp|Q6FA61|QUEF_ACIAD NADPH-dependent 7-cyano-7-deazagua nine reductase OS=Acinetobacter baylyi (strain ATCC 333 05 / BD413 / ADP1) OX=62977 GN=queF PE=3 SV=1
MSVEQSLLGKETEYPTTYSPSVLFPISRDAAREKYAQIEGISQGKDWWHVFELSWLNSDNIPQVAIGRITLPATSPYLIESKSLKLYFNSLNFHVFASKQELIDLVEKDLSQAANAKVSLELFDVDSLEISKPSGMCIDDLKPERLESHPDASLLKLDANEQHDADVTLYSHLLRSNCPVTGQPDWGTVFIRYTGRKHCYRSILAYIISYRQHNGFHEQCVEQIYADIWKNLQPEKLMVYATYTRRGGLDINPCRVSDLSWMPNPIRLARQ

SEQ ID NO: 43628 - protein, 271 aa, Acinetobacter beijerinckii
  misc_feature (1)..(271): tr|N9FRM6|N9FRM6_9GAMM NADPH-dependent 7-cyano-7-deazag uanine reductase OS=Acinetobacter beijerinckii CIP 1103 07 OX=1217648 GN=queF PE=3 SV=1
MSVEHSLLGKDTQYPTQYQPEVLFPIARAESRQQYAHVEGISQGKDWWHVFEISWLNKLGLPQVAIGRLMLPASSPNLIESKSLKLYFNSMNFTQFESQNTFIETVERDLSNAAGGKVELQLFQVDDLEISKPKGICIDDLTPERLSEHPDSSLLQLDNTAEDDVEIELYSHLLRSNCPVTGQPDWGTVFIRFKGKKPCYRSVLAYIISYRQHNGFHEQCVEQIFADIWQLLQPEKLMVYATYTRRGGLDINPCRVSDLTWMPEPTRLARQ

SEQ ID NO: 43629 - protein, 271 aa, Acinetobacter beijerinckii
  misc_feature (1)..(271): tr|N9E2Q8|N9E2Q8_9GAMM NADPH-dependent 7-cyano-7-deazag uanine reductase OS=Acinetobacter beijerinckii ANC 3835 OX=1217649 GN=queF PE=3 SV=1
MSVEHSLLGKDTQYPTQYQPEVLFPIARAESRQQYAHVEGITQGKDWWHVFEISWLNKLGLPQVAIGRLMLPASSPNLIESKSLKLYFNSMNFTQFESQNTFIETVERDLSNAAGGKVELQLFQVDDLEISKPKGVCIDDLTPERLSEHPDSSLLQLDNTAENDIEIELYSHLLRSNCPVTGQPDWGTVFIRFKGKKPCYRSVLAYIISYRQHNGFHEQCVEQIFADIWQLLQPEKLMVYATYTRRGGLDINPCRVSDLTWMPEPIRLARQ

SEQ ID NO: 43630 - protein, 274 aa, Acinetobacter bereziniae
  misc_feature (1)..(274): tr|N8X9T4|N8X9T4_ACIBZ NADPH-dependent 7-cyano-7-deazag uanine reductase OS=Acinetobacter bereziniae NIPH 3 OX= 1217651 GN=queF PE=3 SV=1
MSVEQSLLGKETNYPTTYQPEILFPISRAQAREQYAEVEGIYQGQDWWHVFEISWLNAKGIPQVAIGRIALPAISPNLIESKSLKLYFNSMNFTQFDSRQAFIDTVEKDLSQAAQAPVTLTLFQVDDLDITKPTGICIDDQEPDRLVNHPDASLLEFDQNTSNTDKNVEIQLFSHLLRSNCPVTGQPDWGTVFIRYQGKKPCYRSILAYIISYRQHNGFHEQCVEQIFADIWQNLKPEKLMVYATYTRRGGLDINPCRVSDESWMPSPIRLARQ

SEQ ID NO: 43631 - protein, 274 aa, Acinetobacter bereziniae
  misc_feature (1)..(274): tr|A0A430GIP1|A0A430GIP1_ACIBZ NADPH-dependent 7-cyano- 7-deazaguanine reductase OS=Acinetobacter bereziniae OX =106648 GN=queF PE=3 SV=1
MSVEQSLLGKETNYPTTYQPEILFPISRAQAREQYAEVEGIYQGQDWWHVFEISWLNAKGIPQVAIGRIALPATSPNLIESKSLKLYFNSMNFTQFDSRQAFIDTVEKDLSQAAQAPVTLTLFQVDDLDITKPTGICIDDQEPDRLVNHPDASLLEFDQNTSNTDKNVEIQLFSHLLRSNCPVTGQPDWGTVFIRYQGKKPCYRSILAYIISYRQHNGFHEQCVEQIFADIWQNLKPEKLMVYATYTRRGGLDINPCRVSDESWMPSPIRLARQ

SEQ ID NO: 43632 - protein, 271 aa, Acinetobacter bohemicus
  misc_feature (1)..(271): tr|A0A1I6NTG8|A0A1I6NTG8_9GAMM NADPH-dependent 7-cyano- 7-deazaguanine reductase OS=Acinetobacter bohemicus OX= 1435036 GN=queF PE=3 SV=1
MTVELSLLGKDTNYPTEYQPDILFPIARAPAREDYAHVEGIQQGQDWWHVFEISWLNAVGIPQVAIGRIALPASSPNLIESKSLKLYFNSMNFTSFESKDAFIATVEKDLSAAAGAPVTLSLFQADDLDISKPEGICIDDLSPERLETHPDATLLKLDTENTEIVDIQLYSHLLRSNCPVTGQPDWGTVFIRYQGKKPCYRSILAYIISYRQHNGFHEQCVEQMFADIWQNFAPEKLMVYATYTRRGGLDINPCRVSDLTWMPRPIRLARQ

SEQ ID NO: 43633 - protein, 271 aa, Acinetobacter bohemicus
  misc_feature (1)..(271): tr|N8QFR7|N8QFR7_9GAMM NADPH-dependent 7-cyano-7-deazag uanine reductase OS=Acinetobacter bohemicus ANC 3994 OX =1217715 GN=queF PE=3 SV=1
MTVELSLLGKDTNYPTEYQPDILFPIARAPAREHYAHVEGIQQGQDWWHVFEISWLNAVGIPQVAIGRLALPASSPNLIESKSLKLYFNSMNFTSFESKDAFIATVEKDLSAAAGAPVTLSLFQADDLDISKPEGICIDDLSPERLETHPDATLLKLDTENTETVDIQLYSHLLRSNCPVTGQPDWGTVFIRYQGKKPCYRSILAYIISYRQHNGFHEQCVEQMFADIWQNFAPEKLMVYATYTRRGGLDINPCRVSDLTWMPRPIRLARQ

SEQ ID NO: 43634 - protein, 272 aa, Acinetobacter boissieri
  misc_feature (1)..(272): tr|A0A1G6GRI6|A0A1G6GRI6_9GAMM NADPH-dependent 7-cyano- 7-deazaguanine reductase OS=Acinetobacter boissieri OX= 1219383 GN=SAMN05421733_10266 PE=3 SV=1
MSVEKSLLGKETDYPTQYQPNILFPIARAPTRQSYQNIPYIEQGMDWWHVFELSWLNTHNVPQVAIGRLSIPATSACLIESKSLKLYFNSLNFVQFDSPTQLINTVQQDLSQAAQTHVGLELIDVNGLHVSSPVGKCLDHLTPSRHAKHPDASLLALDSNEPHIIEEELHCNLLRSNCPVTGQPDWGTLFIRYEGKKIDHASLLAYIISFREHNGFHEQCVEQIFAEIWQTLQPEQLMVYAAYTRRGGLDINPCRSSNLKWLPDVPLRLARQ

SEQ ID NO: 43635 - protein, 271 aa, Acinetobacter bouvetii
  misc_feature (1)..(271): tr|A0A4Q7AZM7|A0A4Q7AZM7_9GAMM NADPH-dependent 7-cyano- 7-deazaguanine reductase OS=Acinetobacter bouvetii OX=2 02951 GN=queF PE=3 SV=1
MSVEHSLLGKDTNYPTEYQPDILFPIARAQSRENYAHVEGIQQGKDWWHVFEISWLNHAGIPQVAIGRLILPAASPNLIESKSLKLYFNSMNFTKFDSKDAFKATVEKDLSAAAGAPVTIDLFHADGVEVSEPEGFCIDELIPAQLENHPNAALLALDAAQDENIEVQFYSHLLRSNCPVTGQPDWGTVFIRYQGKKPSYESILAYIISYRQHNGFHEQCVEQMYADIWQNLKPEKLMVYAAYTRRGGLDINPCRVSDLTWMPRPIRLARQ

SEQ ID NO: 43636 - protein, 271 aa, Acinetobacter bouvetii
  misc_feature (1)..(271): tr|N9DPM5|N9DPM5_9GAMM NADPH-dependent 7-cyano-7-deazag uanine reductase OS=Acinetobacter bouvetii DSM 14964 = CIP 107468 OX=1120925 GN=queF PE=3 SV=1
MSVEHSLLGKDTNYPTEYQPDILFPIARAQSRENYAHVEGIQQGKDWWHVFEISWLNHAGIPQVAIGRLTLPAASPNLIESKSLKLYFNSMNFTKFDSKDAFKATVEKDLSAAAGAPVTIDLFHADGVEVSEPEGFCIDELIPAQLENHPNAALLALDAAQDENIEVQFYSHLLRSNCPVTGQPDWGTVFIRYQGKKPSYESILAYIISYRQHNGFHEQCVEQIYADIWQNLKPEKLMVYAAYTRRGGLDINPCRVSDLTWMPRPIRLARQ

SEQ ID NO: 43637 - protein, 271 aa, Acinetobacter brisouii
  misc_feature (1)..(271): tr|V2UVG6|V2UVG6_9GAMM NADPH-dependent 7-cyano-7-deazag uanine reductase OS=Acinetobacter brisouii CIP 110357 O X=1341683 GN=queF PE=3 SV=1
MSVEKSLLGKDTNYPTTYQPEILFPISRSLSRESYADVAGIQQGCDWWHVFELSWLNAQGIPQVAIGRLRLPATSPNLIESKSLKLYFNSLNFMRFDSTQQLIATVEQDLSKAAEAPVQLTLIDANNLAVSQPEGQCLDQLSPQRLSEQPDASLLQHAGSGRMVEEQYYSNLLRSNCPVTGQPDWGTIFIRYRGEKVCPASLLAYIISYRQHNGFHEQCVEQIYADIWKTLKPGQLMVYAAYTRRGGLDINPCRVSTEAWLPQTPVRLARQ

SEQ ID NO: 43638 - protein, 270 aa, Acinetobacter calcoaceticus
  misc_feature (1)..(270): tr|A0A1A0GHE0|A0A1A0GHE0_ACICA NADPH-dependent 7-cyano- 7-deazaguanine reductase OS=Acinetobacter calcoaceticus OX=471 GN=queF PE=3 SV=1
MSVEQSLLGKETQYPTNYQPDVLFPIARAQSREAYSHIEGITQGKDWWHVFEISWLNAHAIPQVAIGRITLPASSPNLIESKSLKLYFNSLNFTQFDSKQSFIETVEKDLSAAAGAKVELTLFQVDDLEISKPQGICIDDLDPERLEQHPDATLLKRDASDEEVEIELYSHLLRSNCPVTGQPDWGTVFIRFKGKKPCYRSVLAYIISYRQHNGFHEQCVEQIFADIWQNLQPEKLMVYATYTRRGGLDINPCRVSDLSWMPKPIRLARQ

SEQ ID NO: 43639 - protein, 270 aa, Acinetobacter calcoaceticus
  misc_feature (1)..(270): tr|N9D2F9|N9D2F9_ACICA NADPH-dependent 7-cyano-7-deazag uanine reductase OS=Acinetobacter calcoaceticus ANC 368 0 OX=1217653 GN=queF PE=3 SV=1
MSVEQSLLGKETQYPTNYQPDVLFPIARAQSREAYSHIEGITQGKDWWHVFEISWLNAHAIPQVAIGRITLPASSPNLIESKSLKLYFNSLNFTQFESKQSFIETVEKDLSAAAGAKVELTLFQVDDLEISKPQGICVDDLTPERLEQHPDATLLKLDDSGEEVEVELYSHLLRSNCPVTGQPDWGTVFIRFKGKKPCYRSVLAYIISYRQHNGFHEQCVEQIFADIWQNLQPEKLMVYATYTRRGGLDINPCRVSDLSWMPKPIRLARQ

SEQ ID NO: 43640 - protein, 270 aa, Acinetobacter calcoaceticus
  misc_feature (1)..(270): tr|A0A2S4T7E2|A0A2S4T7E2_9GAMM NADPH-dependent 7-cyano- 7-deazaguanine reductase OS=Acinetobacter calcoaceticus /baumannii complex sp. ABNIH27 OX=2080673 GN=queF PE=3 SV=1
MSVEQSLLGKETQYPTSYQPDVLFPIARAQSREKYAHIEGITQGKDWWHVFEISWLNAHGIPQVAIGRITLPASSPNLIESKSLKLYFNSLNFTQFDSTQSFIETVEKDLSTAAGAKVELTLFQVDDLEISKPQGICIDDLMPERLEQHPDATLLKLDESGEEIEVELYSHLLRSNCPVTGQPDWGTVFIRFKGKKPCYRSLLAYIISYRQHNGFHEQCVEQIFADIWQNLQPEKLMVYATYTRRGGLDINPCRVSDLTWMPKPIRLARQ

SEQ ID NO: 43641 - protein, 271 aa, Acinetobacter celticus
  misc_feature (1)..(271): tr|A0A1C3CWX7|A0A1C3CWX7_9GAMM NADPH-dependent 7-cyano- 7-deazaguanine reductase OS=Acinetobacter celticus OX=1 891224 GN=queF PE=3 SV=1
MSVEHSLLGKDTNYPTAYQPDVLFPISRAPARENYAHVDAIQQGKDWWHIFEISWLNHAGIPQVAIGRLTLPASSPNLIESKSLKLYFNSMNFTQFDSKETFIATVEKDLSLVVQAPVTIDLFQADDLAITQPEGICIDELSPERLENHPDASLLKLDTENPEDIEVQLYSHLLRSNCPVTGQPDWGTVFIRYQGKKPCYRSILAYIISYRQHNGFHEQCVEQMYADIWQLLKPEKLMVYATYTRRGGLDINPCRVSDLTWMPRPIRLARQ

SEQ ID NO: 43642 - protein, 271 aa, Acinetobacter colistiniresistens
  misc_feature (1)..(271): tr|N9QUT4|N9QUT4_9GAMM NADPH-dependent 7-cyano-7-deazag uanine reductase OS=Acinetobacter colistiniresistens OX =280145 GN=queF PE=3 SV=1
MSVEHSLLGKDTQYPTQYQPDVLFPIARAESRQQYAHIEGITQGKDWWHVFEISWLNSLGLPQVAIGRLTLPASSPNLIESKSLKLYFNSMNFTQFESKEAFIETVERDLSHAAGAKVELQLFQVDDLEISKPQGICIDDLTPERLSEHPDSSLLQLDTTAEDDVEIELYSHLLRSNCPVTGQPDWGTVFIRLQGKKPCYRSILAYIISYRQHNGFHEQCVEQIFADIWQLLKPEKLMVYATYTRRGGLDINPCRVSDLSWMPEPIRLARQ

SEQ ID NO: 43643 - protein, 271 aa, Acinetobacter colistiniresistens
  misc_feature (1)..(271): tr|S3T9D2|S3T9D2_9GAMM NADPH-dependent 7-cyano-7-deazag uanine reductase OS=Acinetobacter colistiniresistens OX =280145 GN=queF PE=3 SV=1
MSVEHSLLGKDTQYPTQYQPDVLFPIARAESRQQYAHIEGITQGKDWWHVFEISWLNSLGLPQVAIGRLTLPASSPNLIESKSLKLYFNSMNFTQFESKEAFIETVERDLSHAAGAKVELQLFQVDDLEISKPQGICIDDLTPERLSEHPDSSLLQLDTTAEDDVEIELYSHLLRSNCPVTGQPDWGTVFIRLQGKKPCYRSILAYIISYRQHNGFHEQCVEQIFADIWQLLQPEKLMVYATYTRRGGLDINPCRVSDLSWMPEPIRLARQ

SEQ ID NO: 43644 - protein, 270 aa, Acinetobacter cumulans
  misc_feature (1)..(270): tr|A0A498D9E6|A0A498D9E6_9GAMM NADPH-dependent 7-cyano- 7-deazaguanine reductase OS=Acinetobacter cumulans OX=2 136182 GN=queF PE=3 SV=1
MTVEQSLLGKDTNYPTEYQPDILFPIARAPARETYAHVEGIQQGKDWWHVFEISWLNAMGIPQVAIGRLTLPASSTNLIESKSLKLYFNSMNFTKFDSKDAFIATVEKDLSQAAEAPVTIDLFAANDLAIAQPEGICIDTLQPERLEEHPDASLLQFDASDEHVEVQLYSHLLRSNCPVTGQPDWGTVFIRYKGKKPCYKSILAYIISYRQHNGFHEQCVEQMYADIWQNLKPEQLMVYATYTRRGGLDINPCRVSDPTWMPRPIRLARQ

SEQ ID NO: 43645 - protein, 270 aa, Acinetobacter cumulans
  misc_feature (1)..(270): tr|A0A3A8G380|A0A3A8G380_9GAMM NADPH-dependent 7-cyano- 7-deazaguanine reductase OS=Acinetobacter cumulans OX=2 136182 GN=queF PE=3 SV=1
MTVEQSLLGKDTNYPTEYQPDILFPIARAPARETYAHVEGIQQGKDWWHVFEISWLNAMGIPQVAIGRLTLPASSTNLIESKSLKLYFNSMNFTKFDSKDAFIATVEKDLSQAAQAPVTIDLFAANDLAIAQPEGICIDTLQPERLEEHPDASLLQFDASDEHVEVQLYSHLLRSNCPVTGQPDWGTVFIRYKGKKPCYKSILAYIISYRQHNGFHEQCVEQMYADIWQNLKPEQLMVYATYTRRGGLDINPCRVSDPTWMPRPIRLARQ

SEQ ID NO: 43646 - protein, 274 aa, Acinetobacter defluvii
  misc_feature (1)..(274): tr|A0A2S2FEV0|A0A2S2FEV0_9GAMM NADPH-dependent 7-cyano- 7-deazaguanine reductase OS=Acinetobacter defluvii OX=1 871111 GN=queF PE=3 SV=1
MTVEQSLLGKDTNYPNTYQPDILFPISRVQARENYKHVEGIYQGKDWWHIFEISWLNDHGIPQVAIGRMTLPASSEFLIESKSLKLYFNSLNFTQFASKQAFIDTVEKDLSAAAQASVTLTLFQVDELEVAKPQGICIDNQQPDCLVNHPDASLLAFDSEHENFDKSVEIQLYSHLLRSNCPVTGQPDWGTVFIRYQGKKPCYRSILAYIISYRQHNGFHEQCVEQIFADLWQNLQPEKLMVYATYTRRGGLDINPCRVSDESWMPSPVRLARQ

SEQ ID NO: 43647 - protein, 274 aa, Acinetobacter equi
  misc_feature (1)..(274): tr|A0A0N9VZM2|A0A0N9VZM2_9GAMM NADPH-dependent 7-cyano- 7-deazaguanine reductase OS=Acinetobacter equi OX=13243 50 GN=queF PE=3 SV=1
MSVEHSLLGKDTNYPTEYQPDILFPISREQAREKYSHVEGIRQGKDWWHVFEISWLNAQGIPQVAIGRITLPATSENLIESKSLKLYFNSMNFTQFDSKDAFIATVEKDLSAAAKAPVSLDLYQVDDLAISQPKGLCIDNLQPERLENHPDSSLLKLDDSTLNDENQVEVELYSHLLRSNCPVTGQPDWGTVFIRYQGKKPCYQSILAYIISYRQHNGFHEQCVEQIYADIWQILQPEKLMVYATYTRRGGLDINPCRVSDLAWMPQPIRLARQ

SEQ ID NO: 43648 - protein, 271 aa, Acinetobacter gandensis
  misc_feature (1)..(271): tr|A0A1A7R762|A0A1A7R762_9GAMM NADPH-dependent 7-cyano- 7-deazaguanine reductase OS=Acinetobacter gandensis OX= 1443941 GN=queF PE=3 SV=1
MSVEQSLLGKDTNYPTAYQPDILFPIARATAREQYAHVEGICQGKDWWHVFEISWLNASGVPQVAIGRLTLPASSDNLIESKSLKLYFNSMNFTQFESRDAFKATVEKDLSVAANAPVTIDLFHVDDVEISKPEGICIDDLEPTKLENHPNANLLALDENNNEEVEVQFYSHLLRSNCPVTGQPDWGTVFIRYKGSKPCYRSILAYIISYRQHNGFHEQCVEQMFADIWQNLKPSKLMVYATYTRRGGLDINPCRVSDLTWMPRPIRLARQ

SEQ ID NO: 43649 - protein, 270 aa, Acinetobacter genomosp.
  misc_feature (1)..(270): tr|A0A1V2V495|A0A1V2V495_9GAMM NADPH-dependent 7-cyano- 7-deazaguanine reductase OS=Acinetobacter genomosp. 33Y U OX=1675530 GN=queF PE=3 SV=1
MSVEQSLLGKETQYPTSYQPDVLFPIARAQSRENYSHIEGITQGKDWWHVFEISWLNSHGIPQVAIGRITLPASSPNLIESKSLKLYFNSLNFTQFDSKALFIETVEKDLSAAAGAKVELTLFQVDDLDISKPQGICIDDLTPERLEQHPDASLLKLDESDEEVEIELYSHLLRSNCPVTGQPDWGTVFIRFKGKKPCYRSVLAYIISYRQHNGFHEQCVEQIFADVWQNLQPEKLMVYATYTRRGGLDINPCRVSDLSWMPKPIRLARQ

SEQ ID NO: 43650 - protein, 270 aa, Acinetobacter gerneri
  misc_feature (1)..(270): tr|N8ZL59|N8ZL59_9GAMM NADPH-dependent 7-cyano-7-deazag uanine reductase OS=Acinetobacter gerneri DSM 14967 = C IP 107464 OX=1120926 GN=queF PE=3 SV=1
MAVEHSLLGKDTNYPTQYQPDILFPISRGEAREKYKNVKGIYKGKDWWHVFEISWLNQHGVPQVAIGRICLPASSTHLIESKSLKLYFNSLNFTQFENQQDFIKTVEQDLSKAAQADVSLTLYKVDDLAISQPQGLCIDDLEPTRLENHPDATLLSLDEHAENVEVQLYSHLLRSNCPVTGQPDWGTVFIRYQGKKPCYRSILAYIISYRQHNGFHEQCVEQIFADIWQNLQPEKLMVYATYTRRGGLDINPCRVSDESWMPEPIRLARQ

SEQ ID NO: 43651 - protein, 274 aa, Acinetobacter guillouiae
  misc_feature (1)..(274): tr|N8S5B0|N8S5B0_ACIGI NADPH-dependent 7-cyano-7-deazag uanine reductase OS=Acinetobacter guillouiae CIP 63.46 OX=1217655 GN=queF PE=3 SV=1
MSVEKSLLGKETDYPTTYQPEVLFPIARAQAREQYADVTGIYKGQDWWHVFEISWLNSKGIPQVAIGRIALPATSPNLIESKSLKLYFNSMNFTQFDSHQAFIGTVEKDLSAAAQAAVTLTLFQVDDLDITKPTGICIDDQEPDQLVNHPDASLLAFDQQNTQHGESVEIQLYSHLLRSNCPVTGQPDWGTVFIRYQGKKPCYRSILAYIISYRQHNGFHEQCVEQIFADIWQNLKPEKLMVYATYTRRGGLDINPCRVSDESWMPSPIRLARQ

SEQ ID NO: 43652 - protein, 274 aa, Acinetobacter guillouiae
  misc_feature (1)..(274): tr|N8Y894|N8Y894_ACIGI NADPH-dependent 7-cyano-7-deazag uanine reductase OS=Acinetobacter guillouiae NIPH 991 O X=1217656 GN=queF PE=3 SV=1
MSVEKSLLGKETDYPTTYQPEILFPIARAQAREQYADVAGIYKGQDWWHVFEISWLNSKGIPQVAIGRIALPATSPNLIESKSLKLYFNSMNFTQFDSHQAFINTVEKDLSAAAQAPVTLTLFQVDDLEISKPTGICIDDQEPDQLVNHPDASLLAFDQENTQHGESVEIQLYSHLLRSNCPVTGQPDWGTVFIRYQGEKPCYRSILAYIISYRQHNGFHEQCVEQIFADIWQNLKPEKLMVYATYTRRGGLDINPCRVSDESWMPSPIRLARQ

SEQ ID NO: 43653 - protein, 269 aa, Acinetobacter gyllenbergii
  misc_feature (1)..(269): tr|V2VAH1|V2VAH1_9GAMM NADPH-dependent 7-cyano-7-deazag uanine reductase (Fragment) OS=Acinetobacter gyllenberg ii NIPH 230 OX=1217658 GN=F987_00014 PE=3 SV=1
VEHSLLGKDTQYPTQYQPDVLFPIARAESRQQYAHIEGITQGKDWWHVFEISWLNHLGLPQVAIGRLTLPASSPNLIESKSLKLYFNSMNFTQFESQQAFVETVERDLSHAAGAKVELQLFQVDDLEISKPQGICIDDLIPERLSEHPDSTLLQLDTTTEDDVEIELYSHLLRSNCPVTGQPDWGTVFIRLQGKKPCYRSILAYIISYRQHNGFHEQCVEQIFADIWQLLKPEKLMVYATYTRRGGLDINPCRVSDLSWMPEPIRLARQ

SEQ ID NO: 43654 - protein, 271 aa, Acinetobacter gyllenbergii
  misc_feature (1)..(271): tr|A0A1B8UGQ0|A0A1B8UGQ0_9GAMM NADPH-dependent 7-cyano- 7-deazaguanine reductase OS=Acinetobacter gyllenbergii OX=134534 GN=queF PE=3 SV=1
MSVEHSLLGKDTQYPTQYQPDVLFPIARAESRQQYAHIEGITQGKDWWHVFEISWLNHLGLPQVAIGRLTLPASSPNLIESKSLKLYFNSMNFTQFESQQAFVETVERDLSHAAGAKVELQLFQVDDLEISKPQGICIDDLIPERLSEHPDSTLLQLDTTTEDDVEIELYSHLLRSNCPVTGQPDWGTVFIRLQGKKPCYRSILAYIISYRQHNGFHEQCVEQIFADIWQLLKPEKLMVYATYTRRGGLDINPCRVSDLSWMPEPIRLARQ

SEQ ID NO: 43655 - protein, 271 aa, Acinetobacter haemolyticus
  misc_feature (1)..(271): tr|D4XPK9|D4XPK9_ACIHA NADPH-dependent 7-cyano-7-deazag uanine reductase OS=Acinetobacter haemolyticus ATCC 191 94 OX=707232 GN=queF PE=3 SV=1
MSVEHSQLGKETQYPTQYQPEVLFPISRAESRQQYADVKGITQGKDWWHVFEISWLNQLGLPQVAIGRLTLPASSPNLIESKSLKLYFNSLNFTKFDSKEAFIETVERDLSSAAGAKIELQLFQVDELEISKPQGICIDDLVPERLSEHPDSTLLQLDTTAEDDVEITLHSHLLRSNCPVTGQPDWGTIFIRFQGKKPCYRSLLAYIISYRQHNGFHEQCVEQIFADIWKLLGPQKLMVYATYTRRGGLDINPCRVSDLSWMPEPIRLARQ

SEQ ID NO: 43656 - protein, 271 aa, Acinetobacter haemolyticus
  misc_feature (1)..(271): tr|N9GNL7|N9GNL7_ACIHA NADPH-dependent 7-cyano-7-deazag uanine reductase OS=Acinetobacter haemolyticus NIPH 261 OX=1217986 GN=queF PE=3 SV=1
MSVEHSQLGKETQYPTQYQPEVLFPISRAESRQQYADVEGITQGKDWWHVFEISWLNQLGLPQVAIGRLTLPASSPNLIESKSLKLYFNSLNFTKFDSKEAFIETVERDLSSAAGAKIELQLFQVDELEISKPQGICIDDLVPERLSEHPDSTLLQLDTTAEDDVEITLHSHLLRSNCPVTGQPDWGTIFIRFQGKKPCYRSLLAYIISYRQHNGFHEQCVEQIFADIWKLLGPQKLMVYATYTRRGGMDINPCRVSDLSWMPEPIRLARQ

SEQ ID NO: 43657 - protein, 271 aa, Acinetobacter halotolerans
  misc_feature (1)..(271): tr|A0A4Q6X727|A0A4Q6X727_9GAMM NADPH-dependent 7-cyano- 7-deazaguanine reductase OS=Acinetobacter halotolerans OX=1752076 GN=queF PE=3 SV=1
MSVEHSLLGQETQYPTQYQPEVLFPISRAESRHQYADVEGITQGKDWWHVFEISWLNPQGLPQVAIGRITLPASSPNLIESKSLKLYFNSLNFTQFASRQVFIETVQGDLSKAAGASVELQLFHVDDLEITKPTGICIDDLIPERLSEHPDATLLQLDTATPDDVEVELYSHLLRSNCPVTGQPDWGTVFIRFQGKRPCYRSILAYIISYRQHNGFHEQCVEQIFADIWQLLKPEKLMVYATYTRRGGLDINPCRVSDLSWMPEPIRLARQ

SEQ ID NO: 43658 - protein, 271 aa, Acinetobacter idrijaensis
  misc_feature (1)..(271): tr|A0A098YF20|A0A098YF20_9GAMM NADPH-dependent 7-cyano- 7-deazaguanine reductase OS=Acinetobacter idrijaensis O X=1507807 GN=queF PE=3 SV=1
MSVEQSLLGKDTNYPTEYQPDVLFPISRAPAREQYAHVEAIQQGADWWHVFEISWLNSTGVPQVAIGRISLPASSPNLIESKSLKLYFNSLNFAKFESQDAFITTVQKDLSAAAEAEVKLQLFQVDELEISKPEGICIDELTPERLENHPDASLLALDSDDAAEGEIQLYSHLLRSNCPVTGQPDWGTVFIRYQGKKPCYKSILAYIISYRQHNGFHEQCVEQMFADIWQQLKPEKLMVYATYTRRGGLDINPCRVSDLTWMPRPIRLARQ

SEQ ID NO: 43659 - protein, 271 aa, Acinetobacter indicus
  misc_feature (1)..(271): tr|A0A437IZV6|A0A437IZV6_9GAMM NADPH-dependent 7-cyano- 7-deazaguanine reductase OS=Acinetobacter indicus OX=75 6892 GN=queF PE=3 SV=1
MSVENSLLGKDTQYPTTYQPDVLFPIARAEAREKYAHVAGIQQGKDWWHVFEMSWLNAAGVPQVAIGRIHLPATSPNLIESKSLKLYFNSLNFSTFASTDALINTVEQDLSAAAQAQVNLELLSVDDLAISQPEGICIDDLSPTRLENHPDASLLQHDAEQEEQVEVQLYSHLLRSNCPVTGQPDWGTVFIRYQGKKPCYRSILAYIISYRQHNGFHEQCVEQMFADIWQNLNPEKLMVYATYTRRGGLDINPCRVSDLTWMPRPIRLARQ

SEQ ID NO: 43660 - protein, 271 aa, Acinetobacter indicus
  misc_feature (1)..(271): tr|A0A2L2J1I9|A0A2L2J1I9_9GAMM NADPH-dependent 7-cyano- 7-deazaguanine reductase OS=Acinetobacter indicus OX=75 6892 GN=queF PE=3 SV=1
MSVENSLLGKDTQYPTTYQPDVLFPIARAEAREKYAHVAGVQQGKDWWHVFEMSWLNAAGVPQVAIGRIHLPATSPNLIESKSLKLYFNSLNFSTFASTDALINTVEQDLSAAAQAQVNLELLSVDDLEISQPEGICIDGLSPTRLENHPDASLLQHDAEQEEPVEVQLYSHLLRSNCPVTGQPDWGTVFIRYQGKKPCYRSILAYIISYRQHNGFHEQCVEQMFADIWQNLNPEKLMVYATYTRRGGLDINPCRVSDLTWMPRPIRLARQ

SEQ ID NO: 43661 - protein, 270 aa, Acinetobacter johnsonii
  misc_feature (1)..(270): tr|A0A380U3D0|A0A380U3D0_ACIJO NADPH-dependent 7-cyano- 7-deazaguanine reductase OS=Acinetobacter johnsonii OX= 40214 GN=queF PE=3 SV=1
MSVEHSLLGKDTNYPTTYQPDILFPIARATAREHYAHVEGIQQGKDWWHVFEISWLNNHGVPQVAIGRISLPATSPNLIESKSLKLYFNSMNFTQFESKAAFKATVEQDLSVAAGADVNIDLFHVDDVEISQPEGICIDELIPTQLENHPNANLLALDDAAEDVEVQIYSHLLRSNCPVTGQPDWGTVFIRYKGKKPCYNSILAYIISYRQHNGFHEQCVEQIFADIWQNLKPEKLMVYAAYTRRGGLDINPCRVSDVSWMPRPIRLARQ

SEQ ID NO: 43662 - protein, 270 aa, Acinetobacter johnsonii
  misc_feature (1)..(270): tr|N9CX77|N9CX77_ACIJO NADPH-dependent 7-cyano-7-deazag uanine reductase OS=Acinetobacter johnsonii ANC 3681 OX =1217662 GN=queF PE=3 SV=1
MSVEHSLLGKDTNYPTTYQPDILFPIARATAREHYAHVEGIQQGKDWWHVFEISWLNHHGVPQVAIGRISLPATSPNLIESKSLKLYFNSMNFTQFESKAAFKATVEQDLSAAAGADVQIDLFHVDDVEISQPEGICIDELTPTQLENHPNANLLTLDDAAEDVEVQIYSHLLRSNCPVTGQPDWGTVFIRYKGKKPCYNSILAYIISYRQHNGFHEQCVEQIFADIWQNLKPEKLMVYAAYTRRGGLDINPCRVSDVSWMPRPIRLARQ

SEQ ID NO: 43663 - protein, 271 aa, Acinetobacter junii
  misc_feature (1)..(271): tr|D0SI05|D0SI05_ACIJU NADPH-dependent 7-cyano-7-deazag uanine reductase OS=Acinetobacter junii SH205 OX=575587 GN=queF PE=3 SV=1
MSVEHSLLGKDTQYPTQYQPEVLFPIARAESRKLYAYIEGIAQGKDWWHVFEISWLNQLGLPQVAIGRLTLPANSPNLIESKSLKLYFNSMNFTQFASQQSFVETVERDLSDAAGAKVELQLFQVDDLQISKPQGICIDDLIPERLSEHPDSSLLQYDAVSEENIEVELYSHLLRSNCPVTGQPDWGTVFIRFQGKKPCYRSILTYIISYRQHNGFHEQCVEQIFADIWQHLKPEKLMVYATYTRRGGLDINPCRVSDLSWMPEPIRLARQ

SEQ ID NO: 43664 - protein, 271 aa, Acinetobacter junii
  misc_feature (1)..(271): tr|A0A380UMN0|A0A380UMN0_ACIJU NADPH-dependent 7-cyano- 7-deazaguanine reductase OS=Acinetobacter junii OX=4021 5 GN=queF PE=3 SV=1
MSVEHSLLGKDTQYPTQYQPEVLFPIARAESRKLYADIEGIAQGKDWWHVFEISWLNQLGLPQVAIGRLTLPANSPNLIESKSLKLYFNSMNFTQFASQQSFVETVERDLSDAAGAKVELQLFQVDDLQISKPQGICIDDLIPERLSEHPDSSLLQYDAVSEENIEVELYSNLLRSNCPVTGQPDWGTVFIRFQGKKPCYRSILAYIISYRQHNGFHEQCVEQIFADIWQHLKPEKLMVYATYTRRGGLDINPCRVSDLSWMPKPIRLARQ

SEQ ID NO: 43665 - protein, 271 aa, Acinetobacter kookii
  misc_feature (1)..(271): tr|A0A1G6L4F0|A0A1G6L4F0_9GAMM NADPH-dependent 7-cyano- 7-deazaguanine reductase OS=Acinetobacter kookii OX=122 6327 GN=queF PE=3 SV=1
MSVEHSLLGKDTNYPTEYQPDILFPISRATAREKYAHVEGIQQGKDWWHVFEISWLNAAGIPQVAIGRMALPASSPNLIESKSLKLYFNSMNFTQFDSKEAFIATAEKDLSAAAGAPVTLTLFQADDLDISKPEGICIDDLSPERLENHPDASLLKLDAENSEAVEVQLYSHLLRSNCPVTGQPDWGTVFIRYQGKKPCYRSILAYIISYRQHNGFHEQCVEQMFADIWQNLEPEKLMVYATYTRRGGLDINPCRVSDATWMPRPIRLARQ

SEQ ID NO: 43666 - protein, 271 aa, Acinetobacter kyonggiensis
  misc_feature (1)..(271): tr|A0A1H3G7V8|A0A1H3G7V8_9GAMM NADPH-dependent 7-cyano- 7-deazaguanine reductase OS=Acinetobacter kyonggiensis OX=595670 GN=queF PE=3 SV=1
MTVELSLLGKDTNYPTEYQPDILFPIARAPAREHYAHVEGIQQGQDWWHVFEISWLNAVGIPQVAIGRIALPASSPNLIESKSLKLYFNSMNFTSFESKEAFIATVEKDLSAAAGAPVTLSLFQADDLDIAKPEGICVDDFSPERLETHPDATLLKLDTENTGTVDIQLYSHLLRSNCPVTGQPDWGTVFIRYQGKKPCYRSILAYIISYRQHNGFHEQCVEQMFADIWQNFAPEKLMVYATYTRRGGLDINPCRVSDLTWMPRPIRLARQ

SEQ ID NO: 43667 - protein, 270 aa, Acinetobacter lactucae
  misc_feature (1)..(270): tr|A0A429KA76|A0A429KA76_9GAMM NADPH-dependent 7-cyano- 7-deazaguanine reductase OS=Acinetobacter lactucae OX=1 785128 GN=queF PE=3 SV=1
MSVEQSLLGKETQYPTNYQPDVLFPIARAQSREAYSHIEGITQGKDWWHVFEISWLNAHAIPQVAIGRITLPASSPNLIESKSLKLYFNSLNFTQFDSKQSFIETVEKDLSAAAGAKVELTLFQVDDLEISRPQGICIDDLDPERLEQHPDATLLKRDASEEEVEIELYSHLLRSNCPVTGQPDWGTVFIHFKGKKPCYRSVLAYIISYRQHNGFHEQCVEQIFADIWQNLQPEKLMVYATYTRRGGLDINPCRVSDLSWMPKPIRLARQ

SEQ ID NO: 43668 - protein, 270 aa, Acinetobacter lactucae
  misc_feature (1)..(270): tr|A0A151YMP1|A0A151YMP1_9GAMM NADPH-dependent 7-cyano- 7-deazaguanine reductase OS=Acinetobacter lactucae OX=1 785128 GN=queF PE=3 SV=1
MSVEQSLLGKETQYPTNYQPDVLFPIARAQSREAYSHIEGITQGKDWWHVFEISWLNAHAIPQVAIGRITLPASSPNLIESKSLKLYFNSLNFTQFDSKQSFIETVEKDLSAAAGAKVELTLFQVDDLEISRPQGICIDDLDPERLEQHPDATLLKRDASEEEVEIELYSHLLRSNCPVTGQPDWGTVFIRFKGKKPCYRSVLAYIISYRQHNGFHEQCVEQIFADIWQNLQPEKLMVYATYTRRGGLDINPCRVSDLSWMPKPIRLARQ

SEQ ID NO: 43669 - protein, 272 aa, Acinetobacter larvae
  misc_feature (1)..(272): tr|A0A1B2LX73|A0A1B2LX73_9GAMM NADPH-dependent 7-cyano- 7-deazaguanine reductase OS=Acinetobacter larvae OX=178 9224 GN=BFG52_03720 PE=3 SV=1
MSVEHSLLGKDTQYPTEYQPDILFPIARAQSRAAYAEIPGIYQGKDWWHIFEISWLNAQGIPQVAIGRMCLDASSEFLIESKSLKLYFNSLNFTRFDAQQDFVARVEKDLSAAAQSTVQLELYAVDALQCHEAQGICLDQLTPLQLSTHPDASLLRLDTEHNGQISEHLLYSHLLRSNCPVTGQPDWGTVFIRYKGEKPCYDSILAYIISFRQHSGFHEQCVEQIYADLWRMLQPEQLMVYAAYTRRGGLDINPCRVSDFAWMPKPIRLARQ

SEQ ID NO: 43670 - protein, 271 aa, Acinetobacter lwoffii
  misc_feature (1)..(271): tr|N9HIN6|N9HIN6_ACILW NADPH-dependent 7-cyano-7-deazag uanine reductase OS=Acinetobacter lwoffii ATCC 9957 = C IP 70.31 OX=1311804 GN=queF PE=3 SV=1
MSVEQSLLGKDTNYPTEYQPDVLFPISRAPAREQYAHVEAIQQGADWWHVFEISWLNSTGVPQVAIGRISLPASSPNLIESKSLKLYFNSLNFAKFESQDAFITTVEKDLSAAAEAEVKLQLFQVDELEISKPEGICIDELTPERLENHPDASLLALDSDDAAEGEIQLYSHLLRSNCPVTGQPDWGTVFIRYQGKKPCYKSILAYIISYRQHNGFHEQCVEQMFADIWQQLKPEKLMVYATYTRRGGLDINPCRVSDLTWMPRPIRLARQ

SEQ ID NO: 43671 - protein, 271 aa, Acinetobacter lwoffii
  misc_feature (1)..(271): tr|N9G9K3|N9G9K3_ACILW NADPH-dependent 7-cyano-7-deazag uanine reductase OS=Acinetobacter lwoffii NIPH 478 OX=1 217668 GN=queF PE=3 SV=1
MSVEQSLLGKDTNYPTEYQPGVLFPISRAPAREQYAHVEAIQQGADWWHVFEISWLNSTGVPQVAIGRISLPASSPNLIESKSLKLYFNSLNFAKFESQDAFITTVEKDLSAAAEAEVKLQLFQVDELEISKPEGICIDELTPERLENHPDASLLALDSDDAAEGEIQLYSHLLRSNCPVTGQPDWGTVFIRYQGKKPCYKSILAYIISYRQHNGFHEQCVEQMFADIWQQLKPEKLMVYATYTRRGGLDINPCRVSDLTWMPRPIRLARQ

SEQ ID NO: 43672 - protein, 276 aa, Acinetobacter marinus
  misc_feature (1)..(276): tr|A0A1G6M6B5|A0A1G6M6B5_9GAMM NADPH-dependent 7-cyano- 7-deazaguanine reductase OS=Acinetobacter marinus OX=28 1375 GN=SAMN05421749_10665 PE=3 SV=1
MSVDASLLGQETQYPTHYAPEILFPIARADARQAYADVQGITQGVDWWHVFEISWLDLDGMPQVAIGRLHIPATSSHLIESKSLKLYFNSFNFERYDRADFVATVEADLSKAANADVKIELFDVDALTVDQPQGICLDQVKPNVIAFHPDRSLLALESGGEYSDAEQPTIEQHYYSHLLRSNCPVTNQPDWGTLFIRYQGKKPCEASLIAYIISYRQHNGFHEQCVEQIYADLWTALQPEKLMVYAAYTRRGGLDINPCRVSDLSWMLTPVRLARQ

SEQ ID NO: 43673 - protein, 272 aa, Acinetobacter nectaris
  misc_feature (1)..(272): tr|V2TGE9|V2TGE9_9GAMM NADPH-dependent 7-cyano-7-deazag uanine reductase OS=Acinetobacter nectaris CIP 110549 O X=1392540 GN=queF PE=3 SV=1
MSVEQSLLGKETQYPTQYQPDILFPIPREPSREAYASISEVQQGNDWWHVFELSWLNSQHIPQVAIGRLNIPANSKYLIESKSLKLYFNSLNFTCFANHSELVQTVEKDLSQAAQAPITLELTHPNDLLVNQPEGSCLDHLSPQKLSQHPDASLLELDSTSSQETEEYLYSNLLRSNCPVTGQPDWGTVFIRYEGKKISHESLLAYIISFRQHNGFHEQCVEQMFAEIWQNLQPNKLMVYAAYTRRGGLDINPCRVSHLSWLPQTPLRLSRQ

SEQ ID NO: 43674 - protein, 270 aa, Acinetobacter nosocomialis
  misc_feature (1)..(270): tr|A0A0E2GQY5|A0A0E2GQY5_ACINO NADPH-dependent 7-cyano- 7-deazaguanine reductase OS=Acinetobacter nosocomialis NIPH 386 OX=1217985 GN=queF PE=3 SV=1
MSVEQSLLGKETQYPTSYQPDVLFPIARAQSREKYSHIEGINQGKDWWHVFEISWLNSHGIPQVAIGRITLPASSPNLIESKSLKLYFNSLNFTQFGSKELFIETVEKDLSSAAGAKVELTLFQVDELDISKPQGICIDDLTPERLEQHPDASLLKLDESGEEVEIELYSHLLRSNCPVTGQPDWGTVFIRFKGKKPCYRSVLAYIISYRQHNGFHEQCVEQIFADIWQNLRPEKLMVYATYTRRGGLDINPCRVSDLSWMPKPIRLARQ

SEQ ID NO: 43675 - protein, 270 aa, Acinetobacter nosocomialis; identical to SEQ ID NO: 43674
  misc_feature (1)..(270): tr|A0A2T7FLX5|A0A2T7FLX5_ACINO NADPH-dependent 7-cyano- 7-deazaguanine reductase OS=Acinetobacter nosocomialis OX=106654 GN=queF PE=3 SV=1

SEQ ID NO: 43676 - protein, 270 aa, Acinetobacter oleivorans
  misc_feature (1)..(270): tr|A0A2T5Q7K9|A0A2T5Q7K9_9GAMM NADPH-dependent 7-cyano- 7-deazaguanine reductase OS=Acinetobacter oleivorans OX =1148157 GN=queF PE=3 SV=1
MSVEQSLLGKETQYPTNYQPDVLFPIARAQSRESYSHIEGITQGKDWWHVFEISWLNAHGIPQVAIGRITLPASSPNLIESKSLKLYFNSLNFTQFDSKESFIGTVEKDLSAAADAKVELTLFQVDDLEISKPQGICIDDLAPERLEQHPDATLLKRDESGEEVEIELYSHLLRSNCPVTGQPDWGTVFIRFKGKKPCYRSVLAYIISYRQHNGFHEQCVEQIFADIWQNLEPEKLMVYATYTRRGGLDINPCRVSDLSWMPKPIRLARQ

SEQ ID NO: 43677 - protein, 270 aa, Acinetobacter oleivorans; identical to SEQ ID NO: 43676
  misc_feature (1)..(270): tr|D8JFQ8|D8JFQ8_ACISD NADPH-dependent 7-cyano-7-deazag uanine reductase OS=Acinetobacter oleivorans (strain JC M 16667 / KCTC 23045 / DR1) OX=436717 GN=queF PE=3 SV=1

SEQ ID NO: 43678 - protein, 271 aa, Acinetobacter parvus
  misc_feature (1)..(271): tr|N8RG71|N8RG71_9GAMM NADPH-dependent 7-cyano-7-deazag uanine reductase OS=Acinetobacter parvus NIPH 1103 OX=1 217671 GN=queF PE=3 SV=1
MSVELSLLGKDTQYPTQYQPEVLFPIARADSRQQYAHIDGISQGKDWWHVFEISWLNQLGLPQVAIGRITLPASSPNLIESKSLKLYFNSLNFTQFQSRETFIETVERDLSQVAGAKVELQLFQVDDLAISKPTGICIDELIPERLSEHPDSSLLQLDSSSQDHVEIELYSHLLRSNCPVTGQPDWGTVFIRLQGKRPCYRSMLAYIISYRQHNGFHEQCVEQIFADIWQLLQPEKLMVYATYTRRGGLDINPCRVSDLSWMPEPIRLARQ

SEQ ID NO: 43679 - protein, 271 aa, Acinetobacter parvus
  misc_feature (1)..(271): tr|N8QC44|N8QC44_9GAMM NADPH-dependent 7-cyano-7-deazag uanine reductase OS=Acinetobacter parvus DSM 16617 = CI P 108168 OX=981333 GN=queF PE=3 SV=1
MSVELSLLGKDTQYPTQYQPEVLFPIARADSRQQYAHIDGISQGKDWWHVFEISWLNQLGLPQVAIGRITLPASSLNLIESKSLKLYFNSLNFTQFQSRETFIETVERDLSQAAGAKIELQLFQVDDLAISKPTGICIDELIPERLSEHPDSSLLQLDSSSQDHVEIELYSHLLRSNCPVTGQPDWGTVFIRLQGKRPCYRSMLAYIISYRQHNGFHEQCVEQIFADIWQLLQPEKLMVYATYTRRGGLDINPCRVSDLSWMPEPIRLARQ

SEQ ID NO: 43680 - protein, 270 aa, Acinetobacter piscicola
  misc_feature (1)..(270): tr|A0A4Q4GUL8|A0A4Q4GUL8_9GAMM NADPH-dependent 7-cyano- 7-deazaguanine reductase OS=Acinetobacter piscicola OX= 2006115 GN=queF PE=3 SV=1
MTVEHSLLGKETNYPTSYQPDILFPISRAQARENYKHVEGIYKGKDWWHIFEISWLNDHGIPQVAIGRMTLPACSEFLIESKSLKLYFNSMNFTQFASQQAFIDTVEKDLSHAAQAPVTLTLFQVDQLDIAQPQGICLDEQQPDCLVNHPDASLLQLDDSEKVVEEQLFSHLLRSNCPVTGQPDWGTIFIRYRGKKPCYRSILAYIISYRQHNGFHEQCVEQIFADIWQNLQPEKLMVYATYTRRGGLDINPCRVSDESWMPSPIRLARQ

SEQ ID NO: 43681 - protein, 270 aa, Acinetobacter pittii
  misc_feature (1)..(270): tr|R8YPC3|R8YPC3_ACIPI NADPH-dependent 7-cyano-7-deazag uanine reductase OS=Acinetobacter pittii ANC 4050 OX=12 17691 GN=queF PE=3 SV=1
MSVEQSLLGKETQYPTNYQPDVLFPIARAQSREAYSHIEGITQGKDWWHVFEISWLNAHAIPQVAIGRITLPASSPNLIESKSLKLYFNSLNFTQFDSKQSFIETVEKDLSAAAGAKVELTLFQVDDLEISKPQGICIDELNPERLEQHPDATLLKQDESNEEVEIELYSHLLRSNCPVTGQPDWGTVFIRFKGKKPCYRSILAYIISYRQHNGFHEQCVEQIFADIWQNLQPEKLMVYATYTRRGGLDINPCRVSDLSWMPKPIRLARQ

SEQ ID NO: 43682 - protein, 270 aa, Acinetobacter pittii; identical to SEQ ID NO: 43638
  misc_feature (1)..(270): tr|A0A143J327|A0A143J327_ACIPI NADPH-dependent 7-cyano- 7-deazaguanine reductase OS=Acinetobacter pittii OX=482 96 GN=queF PE=3 SV=1

SEQ ID NO: 43683 - protein, 270 aa, Acinetobacter populi
  misc_feature (1)..(270): tr|A0A1Z9Z175|A0A1Z9Z175_9GAMM NADPH-dependent 7-cyano- 7-deazaguanine reductase OS=Acinetobacter populi OX=158 2270 GN=queF PE=3 SV=1
MSVETSQLGKETEYPTQYAPEVLFPIARQQARQAYAAIAGIQQGTDWWHVFEISWLDLQGKPQVAIGRLHIPASSPNLIESKSLKLYFNSFNFEKLSRQQFIETVERDLTQAAGASVQLELRSVDDLAITVPEGICLDEFEPSTIEYHPNAQLLKYDSGHDDVIEQSYYSHLLRSNCPVTNQPDWGTVFIRYRGKKPCEKALLAYIISYRQHNGFHEQCVEHIFADIWTLLKPQQLMVYAAYTRRGGLDINPCRVSDLSWMPTPIRLARQ

SEQ ID NO: 43684 - protein, 271 aa, Acinetobacter pragensis
  misc_feature (1)..(271): tr|A0A151Y3Q9|A0A151Y3Q9_9GAMM NADPH-dependent 7-cyano- 7-deazaguanine reductase OS=Acinetobacter pragensis OX= 1806892 GN=queF PE=3 SV=1
MSVEHSLLGKDTNYPTEYQPDILFPIARAAARENYAHVEGIQQGKDWWHVFEISWLNNAGIPQVAIGRLTLPAVSPNLIESKSLKLYFNSMNFTKFNYKDEFKALVEKDLSAAAGAPVTIDLFHADDVAISQPEGICIDDLSPAHLENHPNAALLALDHAHAEDVEIQLYSHLLRSNCPVTGQPDWGTVFIRYQGKKPSYESILAYIISYRQHNGFHEQCVEQMYADIWQNLKPEKLMVYAAYTRRGGLDINPCRVSDLTWMPRPIRLARQ

SEQ ID NO: 43685 - protein, 271 aa, Acinetobacter proteolyticus
  misc_feature (1)..(271): tr|A0A2N0WE58|A0A2N0WE58_9GAMM NADPH-dependent 7-cyano- 7-deazaguanine reductase OS=Acinetobacter proteolyticus OX=1776741 GN=queF PE=3 SV=1
MSVEHSLLGKDTQYPTQYQPDVLFPIARAESRQQYLHVDGITQGKDWWHVFEISWLNSFGLPQVAIGRLTLPAHSPNLIESKSLKLYFNSMNFTQFESQQAFIETVEGDLSNAAGAKVELELFQVDDLAISKPQGICIDDLIPERLSEHPDSTLLQLDTSAEDEVEIELYSHLLRSNCPVTGQPDWGTVFIRLQGKKPCYRSILAYIISYRQHNGFHEQCVEQIFADIWQLLKPEKLMVYATYTRRGGLDINPCRVSDLSWMPEPIRLARQ

SEQ ID NO: 43686 - protein, 271 aa, Acinetobacter proteolyticus
  misc_feature (1)..(271): tr|A0A1E7R8N3|A0A1E7R8N3_9GAMM NADPH-dependent 7-cyano- 7-deazaguanine reductase OS=Acinetobacter proteolyticus OX=1776741 GN=queF PE=3 SV=1
MSVEHSLLGKDTQYPTQYQPDVLFPIARAESRQQYLHVDGITQGKDWWHVFEISWLNHLGLPQVAIGRLTLPAHSPNLIESKSLKLYFNSMNFTQFDSQQAFIETVEGDLSNAAGAKVELELFQVDDLAISKPQGICIDDLIPERLSEHPDSTLLQLDTSAEDEVEIELYSHLLRSNCPVTGQPDWGTVFIRLQGKKPCYRSILAYIISYRQHNGFHEQCVEQIFADIWQLLKPEKLMVYATYTRRGGLDINPCRVSDLSWMPEPIRLARQ

SEQ ID NO: 43687 - protein, 270 aa, Acinetobacter puyangensis
  misc_feature (1)..(270): tr|A0A240E4N4|A0A240E4N4_9GAMM NADPH-dependent 7-cyano- 7-deazaguanine reductase OS=Acinetobacter puyangensis O X=1096779 GN=queF PE=3 SV=1
MSVETSQLGKETEYPTQYAPEVLFPIVRQQARQAYANIAGIQQGIDWWHVFEISWLDLQGKPQVAIGRLHIPASSPNLIESKSLKLYFNSFNFEKLSRQQFIDTVERDLTQAAGASVQLELRSVDDLAITIPEGICLDEFEPSTIEYHPNAQLLKHDSGHDDVIEQSYYSHLLRSNCPVTNQPDWGTVFIRYRGKKPCEKALLAYIISYRQHNGFHEQCVEHIFADIWTLLQPQQLMVYAAYTRRGGLDINPCRVSDLSWMPTPIRLARQ

SEQ ID NO: 43688 - protein, 269 aa, Acinetobacter qingfengensis
  misc_feature (1)..(269): tr|A0A1E7REK3|A0A1E7REK3_9GAMM NADPH-dependent 7-cyano- 7-deazaguanine reductase OS=Acinetobacter qingfengensis OX=1262585 GN=BJI46_08200 PE=3 SV=1
MSVESSLLGQDTEYPTQYAPQVLFPIARAPSRESYTNINGITQGMDWWHIFEISWLNEHGIPQVALGRLHIPATSEYLIESKSLKLYFNSFNFEKLSRADFIRTVEKDLSSVAQANIKLQLLNVDELHISQPQGICLDLLQPTKIEFEPNASLLALDDNNHIVEQSFYSHLLRSNCPVTNQPDWGTVFIRYQGKKISEHSLLAYIISYRKHNGFHEQCVEHIFADIWQHLQPEKLMVYAAYTRRGGLDINPCRVSDPTWLPQPIRLARQ

SEQ ID NO: 43689 - protein, 270 aa, Acinetobacter radioresistens
  misc_feature (1)..(270): tr|A0A3F3GHP7|A0A3F3GHP7_ACIRA NADPH-dependent 7-cyano- 7-deazaguanine reductase OS=Acinetobacter radioresisten s NIPH 2130 OX=1217674 GN=queF PE=3 SV=1
MSVEQSLLGKDTSYPNQYQPDILFPIARAQSRADYAHIEGIQQGKDWWHIFEISWLNSHGIPQVAIGRMSLPASSPHLIESKSLKLYFNSLNFHRFGNRAIFIETVEKDLSQAAGAAVKLELFQVDALEISQPQGICIDDLIPQQLKNHPDAGLLQYADDPEEGDIQLYSHLLRSNCPVTGQPDWGTVFIRYQGKKPCYRSVLAYIISYRQHNGFHEQCVEQMFADIWQHLQPEKLMVYATYTRRGGLDINPCRVSDLTWMPNPIRLARQ

SEQ ID NO: 43690 - protein, 270 aa, Acinetobacter radioresistens
  misc_feature (1)..(270): tr|A0A2T1J1L9|A0A2T1J1L9_ACIRA NADPH-dependent 7-cyano- 7-deazaguanine reductase OS=Acinetobacter radioresisten s OX=40216 GN=queF PE=3 SV=1
MSVEQSLLGKDTSYPNQYQPDILFPIARAQSRADYAHIEGIQQGKDWWHIFEISWLNSHGIPQVAIGRMSLPASSPHLIESKSLKLYFNSLNFHRFETRAIFIEIVEKDLSQAAGAAVKLELFQVDALEISQPQGICIDDLTPQQLKNHPDAGLLQYADDHEEGEIQLYSHLLRSNCPVTGQPDWGTVFIRYQGKKPCYRSVLAYIISYRQHNGFHEQCVEQMFADIWQHLQPEKLMVYATYTRRGGLDINPCRVSDLTWMPNPIRLARQ

SEQ ID NO: 43691 - protein, 271 aa, Acinetobacter rudis
  misc_feature (1)..(271): tr|S3MWT2|S3MWT2_9GAMM NADPH-dependent 7-cyano-7-deazag uanine reductase OS=Acinetobacter rudis CIP 110305 OX=4 21052 GN=F945_02681 PE=3 SV=1
MTVELSLLGKDTVYPTEYQPDILFPIARDTAREQYKDVAGIYQGQDWWHIFEVSWLNQHAVPQVAIARMSLPASSPYLIESKSLKLYFNGLNFTRFNSQADFIATVEQDLSRAAEAQVTITLFQVDDLAISQPQGLCLDQLQPSGFSIHPDASLLKFDEEDASNKEIQLYSHLLRSNCPVTGQPDWGTIFIRYKGKKPCYQSILAYIISYRQHNGFHEQCVEQVFADIWKNLAPSQLMVYATYTRRGGLDINPCRVSDLSWMPTPIRLARQ

SEQ ID NO: 43692 - protein, 195 aa, Acinetobacter rudis
  misc_feature (1)..(195): tr|S3PL79|S3PL79_9GAMM Queuine synthase (Fragment) OS=A cinetobacter rudis CIP 110305 OX=421052 GN=F945_00939 P E=4 SV=1
MTVELSLLGKDTVYPTEYQPDILFPIARDTAREQYKDVAGIYQGQDWWHIFEVSWLNQHAVPQVAIARMSLPASSPYLIESKSLKLYFNGLNFTRFNSQADFIATVEQDLSRAAEAQVTITLFQVDDLAISQPQGLCLDQLQPSGFSIHPDASLLKFDEEDASNKEIQLYSHLLRSNCPVTGQPDWGTIFIRYKG

SEQ ID NO: 43693 - protein, 271 aa, Acinetobacter schindleri
  misc_feature (1)..(271): tr|N9AKK2|N9AKK2_9GAMM NADPH-dependent 7-cyano-7-deazag uanine reductase OS=Acinetobacter schindleri CIP 107287 OX=1217988 GN=queF PE=3 SV=1
MSVEHSLLGKETNYPTEYQPEILYPISRAPAREKYAHIEAIQQGTDWWHIFEISWLNAAGVPQVAIGRMTLPASSPNLIESKSLKLYFNSLNFAKFESKAAFIATVEQDLSKAAEADVKLDLFHIDELDIAKPEGICLDELIPERLENHPDATLLALDNKSDENVEVQLYSHLLRSNCPVTGQPDWGTVFIRYQGKKPCYKSILAYIISYRQHNGFHEQCVEQIFADIWQNLKPEKLMVYATYTRRGGLDINPCRVSDSTWMPRPIRLARQ

SEQ ID NO: 43694 - protein, 271 aa, Acinetobacter schindleri
  misc_feature (1)..(271): tr|A0A1P8PL63|A0A1P8PL63_9GAMM NADPH-dependent 7-cyano- 7-deazaguanine reductase OS=Acinetobacter schindleri OX =108981 GN=queF PE=3 SV=1
MSVEHSLLGKDTNYPTEYQPEILYPISRAPAREKYAHIEAIQQGTDWWHIFEISWLNAAGVPQVAIGRMTLPASSPNLIESKSLKLYFNSLNFAKFESKAAFIATVEQDLSKAAEADVKLDLFHIDELDIAKPEGICLDELIPERLENHPDATLLALDNESDENVEVQLYSHLLRSNCPVTGQPDWGTVFIRYQGKKPCYKSILAYIISYRQHNGFHEQCVEQIFADIWQNLKPEKLMVYATYTRRGGLDINPCRVSDFTWMPRPIRLARQ

SEQ ID NO: 43695 - protein, 270 aa, Acinetobacter seifertii; identical to SEQ ID NO: 43649
  misc_feature (1)..(270): tr|N8QX34|N8QX34_9GAMM NADPH-dependent 7-cyano-7-deazag uanine reductase OS=Acinetobacter seifertii OX=1530123 GN=queF PE=3 SV=1

SEQ ID NO: 43696 - protein, 270 aa, Acinetobacter seifertii
  misc_feature (1)..(270): tr|A0A2M8MMX4|A0A2M8MMX4_9GAMM NADPH-dependent 7-cyano- 7-deazaguanine reductase OS=Acinetobacter seifertii OX= 1530123 GN=queF PE=3 SV=1
MSVEQSLLGKETQYPTSYQPDVLFPIARAQSRENYSHIEGITQGKDWWHIFEISWLNSHGIPQVAIGRITLPASSPNLIESKSLKLYFNSLNFTQFDSKALFIETVEKDLSAAAGAKVELTLFQVDDLDISKPQGICIDDLTPERLEQHPDASLLKLDESGEEVEIELYSHLLRSNCPVTGQPDWGTVFIRFKGKKPCYRSLLAYIISYRQHNGFHEQCVEQIFADVWQNLQPEKLMVYATYTRRGGLDINPCRVSDLSWMPKPIRLARQ

SEQ ID NO: 43697 - protein, 271 aa, Acinetobacter soli
  misc_feature (1)..(271): tr|A0A3R8ZX20|A0A3R8ZX20_9GAMM NADPH-dependent 7-cyano- 7-deazaguanine reductase OS=Acinetobacter soli OX=48731 6 GN=queF PE=3 SV=1
MSVEKSLLGKETEYPTTYEPGILFPISRSSSREQYANITGVSQGKDWWHVFELSWLNQDGIPQVAIGRITLPATSENLIESKSLKLYFNSLNFHRLVSKAALIDLVEKDLSQAANAKVGFELFDVDTLEISQPSGICIDQFKPARLESHPDASLLALNADDQSQIEVNLYSHLLRSNCPVTGQPDWGTVFIRYQGIKPCYNSILAYIISYRQHNGFHEQCVEQMYADIWQNLKPEKLMVYATYTRRGGLDINPCRVSDLSWMPSPIRLARQ

SEQ ID NO: 43698 - protein, 271 aa, Acinetobacter soli
  misc_feature (1)..(271): tr|N9AFQ7|N9AFQ7_9GAMM NADPH-dependent 7-cyano-7-deazag uanine reductase OS=Acinetobacter soli NIPH 2899 OX=121 7677 GN=F950_02749 PE=3 SV=1
MSVEKSLLGKETEYPTTYEPGILFPISRSSSREQYANITGVSQGKDWWHVFELSWLNQDRIPQVAIGRITLPATSENLIESKSLKLYFNSLNFHRFVSKAALIDLVEKDLSQAANAKVGFELFDVDALEISQPSGICIDQFKPARLESHPDASLLALDADDQSQIEVNLYSHLLRSNCPVTGQPDWGTVFIRYQGIKPCYNSILAYIISYRQHNGFHEQCVEQMYADIWQNLKPEKLMVYATYTRRGGLDINPCRVSDLSWMPSPIRLARQ

SEQ ID NO: 43699 - protein, 271 aa, Acinetobacter sp.
  misc_feature (1)..(271): tr|A0A4R0DX94|A0A4R0DX94_9GAMM NADPH-dependent 7-cyano- 7-deazaguanine reductase OS=Acinetobacter sp. ANC 4472 OX=2529844 GN=queF PE=3 SV=1
MSVEHSLLGKDTNYPTEYQPDILFPIARAQAREKYAHVEGIQQGKDWWHVFEISWLNAAGIPQVAIGRITLPASSPNLIESKSLKLYFNSMNFSKFDSKDTFIATVEKDLSFAAGAPVSLTLFQADDLEFSKPEGICIDDLSPERLENHPDATLLKLDPENSDEVEIQLYSHLLRSNCPVTGQPDWGTVFIRYQGKKPCYRSILAYIISYRQHNGFHEQCVEQMFVDIWQNLAPEKLMVYATYTRRGGLDINPCRVSDATWMPRPIRLARQ

SEQ ID NO: 43700 - protein, 271 aa, Acinetobacter sp.; identical to SEQ ID NO: 43658
  misc_feature (1)..(271): tr|A0A1E3GNR7|A0A1E3GNR7_9GAMM NADPH-dependent 7-cyano- 7-deazaguanine reductase OS=Acinetobacter sp. 51m OX=18 56846 GN=queF PE=3 SV=1

SEQ ID NO: 43701 - protein, 271 aa, Acinetobacter tandoii
  misc_feature (1)..(271): tr|A0A515BGY2|A0A515BGY2_9GAMM NADPH-dependent 7-cyano- 7-deazaguanine reductase OS=Acinetobacter tandoii OX=20 2954 GN=queF PE=3 SV=1
MSVEHSLLGKDTQYPSTYQPDILFPIERAQARSSYAHIEGIQRGQDWWHVFEISWLNAQGIPQVAIGRLTLPATSPNLIESKSLKLYFNSLNFTQFESEAAFITTVEKDLSAAAGATVTIQLFQVDALEIHQPEGICIDDFVPERLENHPDASLLGFDSENSEQVEVQLYSHLLRSNCPVTGQPDWGTVFIRYQGKKPCYRSLLAYIISYRQHNGFHEQCVEQMYADIWQNLQPEKLMVYAAYTRRGGLDINPCRVSDLTWMPRPIRLARQ

SEQ ID NO: 43702 - protein, 271 aa, Acinetobacter tandoii
  misc_feature (1)..(271): tr|R9AW68|R9AW68_9GAMM NADPH-dependent 7-cyano-7-deazag uanine reductase OS=Acinetobacter tandoii DSM 14970 = C IP 107469 OX=1120927 GN=queF PE=3 SV=1
MSVEHSLLGKDTQYPSTYQPDILFPIARAQARSSYAHIEGIQQGKDWWHVFEISWLNAQGIPQVAIGRLTLPASSPNLIESKSLKLYFNSLNFTQFDSESAFVATVEKDLSAAAGATVTIQLFQVDALTIDQPEGICIDDLVPDRLENQPDASLLSLDRENTDNLEIQLYSHLLRSNCPVTGQPDWGTVFIRYQGKKPCYRSLLAYIISYRQHNGFHEQCVEQIYADIWQNLQPEKLMVYAAYTRRGGLDINPCRVSDLTWMPRPIRLARQ

SEQ ID NO: 43703 - protein, 271 aa, Acinetobacter tjernbergiae
  misc_feature (1)..(271): tr|V2UVV4|V2UVV4_9GAMM NADPH-dependent 7-cyano-7-deazag uanine reductase OS=Acinetobacter tjernbergiae DSM 1497 1 = CIP 107465 OX=1120928 GN=queF PE=3 SV=1
MSVEFSLLGKDTEYPTHYQPEVLFPIARAESRQQYAHIEGVTQGKDWWHIFEISWLNQIGLPQVAIGRLTLPANSPNLIESKSLKLYFNSLNFTQFESKQNFIETVEQDLSKAAGAKIELQLFQVDDLNISKPQGICIDDLIPERLSEHPDATLLQFDTTNPEHVEIELYSHLLRSNCPVTGQPDWGTVFIRFQGKKPCYRSLLAYIISYRQHNGFHEQCVEQIFADLWQLLQPEKLMVYATYTRRGGLDINPCRVSDLSWMPEPIRLARQ

SEQ ID NO: 43704 - protein, 271 aa, Acinetobacter towneri
  misc_feature (1)..(271): tr|N9CPP1|N9CPP1_9GAMM NADPH-dependent 7-cyano-7-deazag uanine reductase OS=Acinetobacter towneri DSM 14962 = C IP 107472 OX=1120929 GN=queF PE=3 SV=1
MSVEQSLLGKDTNYPTEYQPDILFPISRAAAREKYADVEGIQLGQDWWHVFEISWLNAAGVPQVAIGRITLPASSPNLIESKSLKLYFNSMNFTRFQSEANFIETVEHDLTAAAQAPVTLTLFKVDDLAISQPEGICIDQLTPERLEQHPDPSLLQFDLEQAEDIEVQLFSHLLRSNCPVTGQPDWGTVFIRYQGKKPCYRSILAYIISYRQHNGFHEQCVEQMFADIWQKFAPEKLMVYATYTRRGGLDINPCRVSDLTWMPRPIRLARQ

SEQ ID NO: 43705 - protein, 271 aa, Acinetobacter towneri
  misc_feature (1)..(271): tr|A0A1E8E541|A0A1E8E541_9GAMM NADPH-dependent 7-cyano- 7-deazaguanine reductase OS=Acinetobacter towneri OX=20 2956 GN=queF PE=3 SV=1
MSVEQSLLGKDTNYPTEYQPDILFPISRAAAREKYADVEGIQLGQDWWHVFEISWLNAAGVPQVAIGRIALPASSPNLIESKSLKLYFNSMNFTRFQSEANFIETVEHDLTAAAQAPVTLTLFKVDDLAISQPEGICIDQLTPERLEQHPDPSLLQFDLEQAEDIEVQLFSHLLRSNCPVTGQPDWGTVFIRYQGKKPCYRSILAYIISYRQHNGFHEQCVEQMFADIWQKFAPEKLMVYATYTRRGGLDINPCRVSDLTWMPRPIRLARQ

SEQ ID NO: 43706 - protein, 271 aa, Acinetobacter ursingii
  misc_feature (1)..(271): tr|N9BZW4|N9BZW4_9GAMM NADPH-dependent 7-cyano-7-deazag uanine reductase OS=Acinetobacter ursingii ANC 3649 OX= 1257043 GN=queF PE=3 SV=1
MSVEQSLLGKETEYPTEYQPSVLFPIARALSRENYADLKGITQGLDWWHVFELSWLNGLGIPQVAIGRITLPATSTNLIESKSLKLYFNSLNFHRLDSKQDLIDLVEQDLSQAANAKVTLELFDVDALEITKPQGICIDELIPEHLENHPNAGLLKLDAEQQDHVDVTLFSHLLRSNCPVTGQPDWGTVFIRFQGLKPCYRSVLAYIISYRQHNGFHEQCVEQMFADIWTHLQPEKLMVYATYTRRGGLDINPCRVSDLSWMPNPIRLARQ

SEQ ID NO: 43707 - protein, 271 aa, Acinetobacter ursingii
  misc_feature (1)..(271): tr|N9QRG2|N9QRG2_9GAMM NADPH-dependent 7-cyano-7-deazag uanine reductase OS=Acinetobacter ursingii NIPH 706 OX= 1217716 GN=queF PE=3 SV=1
MSVEQSLLGKETEYPTEYQPSVLFPIARALSRENYADLKGITQGLDWWHVFELSWLNALGIPQVAIGRITLPATSTNLIESKSLKLYFNSLNFHRLDSKQDLIDLVEQDLSQAANAKVTLELFDVDALEITKPQGICIDDLIPEHLENHPNAGLLKLDVEQQDHVDVTLFSHLLRSNCPVTGQPDWGTVFIRFQGLKPCYRSILAYIISYRQHNGFHEQCVEQMFADIWTHLQPEKLMVYATYTRRGGLDINPCRVSDLSWMPNPIRLARQ

SEQ ID NO: 43708 - protein, 271 aa, Acinetobacter variabilis
  misc_feature (1)..(271): tr|A0A3R9AYC2|A0A3R9AYC2_9GAMM NADPH-dependent 7-cyano- 7-deazaguanine reductase OS=Acinetobacter variabilis OX =70346 GN=queF PE=3 SV=1
MSVEHSLLGKDTNYPTEYQPDILFPISRAPAREKYAHVEAIQQGKDWWHVFEISWLNAAGVPQVAIGRITLPAFSPNLIESKSLKLYFNSLNFAKFDSQEAFITTVEKDLSKAAGAEITLDLFHVDELEISKPEGICIDDLTPERLENHPDASLLSLNQHSDENIEVQLYSHLLRSNCPVTGQPDWGTVFIRYQGKKPCYKSILAYIISYRQHNGFHEQCVEQMFADIWQNLKPEKLMVYATYTRRGGLDINPCRVSDSTWMPRPIRLARQ

SEQ ID NO: 43709 - protein, 271 aa, Acinetobacter variabilis
  misc_feature (1)..(271): tr|N9NQ36|N9NQ36_9GAMM NADPH-dependent 7-cyano-7-deazag uanine reductase OS=Acinetobacter variabilis OX=70346 G N=queF PE=3 SV=1
MSVEHSLLGKDTNYPTEYQPDILFPISRAPAREKYAHVEAIQQGKDWWHVFEISWLNAAGVPQVAIGRITLPAFSPNLIESKSLKLYFNSLNFAKFDSKEAFITTVEKDLSKAAGAEITLDLFHVDELEISKPEGICIDDLTPERLENHPDASLLSLDRHSDENIEVQLYSHLLRSNCPVTGQPDWGTVFIRYQGKKPCYKSILAYIISYRQHNGFHEQCVEQMFADIWQNLKPEKLMVYATYTRRGGLDINPCRVSDSTWMPRPIRLARQ

SEQ ID NO: 43710 - protein, 271 aa, Acinetobacter venetianus
  misc_feature (1)..(271): tr|N8YIN8|N8YIN8_ACIVR NADPH-dependent 7-cyano-7-deazag uanine reductase OS=Acinetobacter venetianus (strain AT CC 31012 / CIP 110063 / RAG-1) OX=1191460 GN=queF PE=3 SV=1
MSVEHSLLGKDTQYPTQYQPEVLFPIARAESRKQYAHIEGITQGKDWWHVFEISWLNQLGLPQVAIGRITLPASSPNLIESKSLKLYFNSLNFTQFESKQIFIETVERDLSNAAGAQIKLDLFQVDDLEISKPKGICIDDLIPERLSEHPDSTLLQLDQTTDDHVEIELYSHLLRSNCPVTGQPDWGTVFIRFQGKKPCYRSILAYIISYRQHNGFHEQCVEQIFSDIWQLLKPEKLMVYATYTRRGGLDINPCRVSDLSWMPEPIRLARQ

SEQ ID NO: 43711 - protein, 271 aa, Acinetobacter venetianus
  misc_feature (1)..(271): tr|A0A150HVV3|A0A150HVV3_9GAMM NADPH-dependent 7-cyano- 7-deazaguanine reductase OS=Acinetobacter venetianus OX =52133 GN=queF PE=3 SV=1
MSVEHSLLGKDTQYPTQYQPEVLFPIARAESRKQYAHIEGITQGKDWWHVFEISWLNQLGLPQVATGRITLPASSPNLIESKSLKLYFNSLNFTPFESKQIFIETVERDLSNAAGAQIKLDLFQVDDLEISKPKGICIDDLIPERLSEHPDSTLLQLDQTTDDHVEIELYSHLLRSNCPVTGQPDWGTVFIRFQGKKPCYRSILAYIISYRQHNGFHEQCVEQIFSDIWQLLKPEKLMVYATYTRRGGLDINPCRVSDLSWMPEPIRLARQ

SEQ ID NO: 43712 - protein, 274 aa, Acinetobacter wuhouensis
  misc_feature (1)..(274): tr|A0A385C3Y3|A0A385C3Y3_9GAMM NADPH-dependent 7-cyano- 7-deazaguanine reductase OS=Acinetobacter wuhouensis OX =1879050 GN=queF PE=3 SV=1
MSVELSLLGKDTNYPTTYQPDILFPISRAEAREQYAHVDGIYKGKDWWHVFEISWLNAKGIPQVAIGRIALPATSPNLIESKSLKLYFNSMNFTQFDSQQAFIHTVEKDLSNAAQAPVTLTLFQVDELDIAKPQGICIDDQEPDRLVNHPDASLLALDNQANKSAENVDIQLYSHLLRSNCPVTGQPDWGTVFIRYQGNKPCYRSILAYIISYRQHNGFHEQCVEQIFADIWQNLKPEKLMVYATYTRRGGLDINPYRVSDESWMPSPIRLARQ

SEQ ID NO: 43713 - protein, 274 aa, Acinetobacter wuhouensis
  misc_feature (1)..(274): tr|A0A4Q7AK03|A0A4Q7AK03_9GAMM NADPH-dependent 7-cyano- 7-deazaguanine reductase OS=Acinetobacter wuhouensis OX =1879050 GN=queF PE=3 SV=1
MSVELSLLGKDTNYPTTYQPDILFPISRAEAREQYAHVDGIYKGKDWWHVFEISWLNAKGIPQVAIGRIALPATSPNLIESKSLKLYFNSMNFTQFDSQQAFIHTIEKDLSNAAQAPVTLTLFQVDELDIAKPQGICIDDQEPDRLVNHPDASLLALDNQADESAESVDIQLYSHLLRSNCPVTGQPDWGTVFIHYQGNKPCYRSILAYIISYRQHNGFHEQCVEQIFADIWQNLKPEKLMVYATYTRRGGLDINPCRVSDESWMPSPIRLARQ

SEQ ID NO: 43714 - protein, 279 aa, Actinobacillus delphinicola
  misc_feature (1)..(279): tr|A0A448TSB6|A0A448TSB6_9PAST NADPH-dependent 7-cyano- 7-deazaguanine reductase OS=Actinobacillus delphinicola OX=51161 GN=queF PE=3 SV=1
MYQDKSLSALKLGQKTQYAKFYDPTLLQPVPRRLNREKLGIEGNVPFTIGADMWTAFELSWLNEKGLPQVAIAEVSIDFRSQNLIESKSFKLYLNSFNQTKFADFASVQSTLQKDLAECAQGEVQVVVKPLTAYAQQPIEVLHGENIDNQDICIDNYEFNAELLENCCEKDEIIEEYLVSDLLKSNCLITSQPDWGTVQIHYVGRKINREKLLRYIVSFRDHNEFHEQCVERIFCDLLHFAKPEKLTVYARYTRRGGLDINPYRSNFEAVPESIRLARQ

SEQ ID NO: 43715 - protein, 51 aa, Actinobacillus equuli
  misc_feature (1)..(51): tr|A0A448QSJ0|A0A448QSJ0_ACTEU 7-cyano-7-deazaguanine r eductase OS=Actinobacillus equuli OX=718 GN=queF_1 PE=4 SV=1
MRRAYFTDLMQFAQPEKLTVYARYTRRGGLDINPFRSNFESVPQNLRMARQ

SEQ ID NO: 43716 - protein, 78 aa, Actinobacillus equuli
  misc_feature (1)..(78): tr|A0A448QSP0|A0A448QSP0_ACTEU 7-cyano-7-deazaguanine r eductase OS=Actinobacillus equuli OX=718 GN=queF_2 PE=4 SV=1
MAEGEVVEETLVSHLLKSNCLITSQPDWGSVQIHYVGKKLNREKLLRYLVSFREHNEFHEQCVERILPILCNLHSRKN

SEQ ID NO: 43717 - protein, 279 aa, Actinobacillus indolicus
  misc_feature (1)..(279): tr|A0A4P7CI56|A0A4P7CI56_9PAST NADPH-dependent 7-cyano- 7-deazaguanine reductase OS=Actinobacillus indolicus OX =51049 GN=queF PE=3 SV=1
MNYNDESLSGLTLGQKTEYKSEYDPNLLQAVPRRLNRDSLGITVEQPFTIGADIWTLYELSWLNPQGVPQVAIADVSIDFRSENLIESKSFKLYLNSFNQTRFASLEEVQQRIQADLTKCASGQISVKIYKLSDFTQQPIVDFAGECIDEQDIHIDSYQFSTEALQNIASGEVVEERLVSHLLKSNCLITSQPDWGSVQIHYVGKRLDREKLLRYIVSFREHNEFHEQCVERIFCDLMQFAKPEKLTVYARYTRRGGLDINPFRSNFESLPENQRMARQ

SEQ ID NO: 43718 - protein, 279 aa, Actinobacillus lignieresii
  misc_feature (1)..(279): tr|A0A380TU48|A0A380TU48_ACTLI NADPH-dependent 7-cyano- 7-deazaguanine reductase OS=Actinobacillus lignieresii OX=720 GN=queF PE=3 SV=1
MNYNDKSLSALKLGQKTEYKSEYDPTLLQPVPRKLNRDGLGITEQQPFDRGADVWTCYELSWLNENGLPQVAIADVAIDFRSENLIESKSFKLYLNSFNQTKFASLEQVEQTLAKDLSQCASGQVSVKVYKLSAYTQQPIVDFAGECIDEQDIQIDSYEFSNEHLVSVAEGEVVEETLVSHLLKSNCLITSQPDWGSVQIHYVGKKLNREKLLRYLVSFREHNEFHEQCVERIFTDLIQFAQPEKLTVYARYTRRGGLDINPFRSNFESVPQNLRMARQ

SEQ ID NO: 43719 - protein, 279 aa, Actinobacillus minor
  misc_feature (1)..(279): tr|C5S2E3|C5S2E3_9PAST NADPH-dependent 7-cyano-7-deazag uanine reductase OS=Actinobacillus minor NM305 OX=63791 1 GN=queF PE=3 SV=1
MNYNDKSLSALKLGQKTEYKSEYDPSLLQPVPRKLNRDGLGITDVQLFNQGADIWTCYELSWLNLNGLPQVAIADVAVDFQSENLIESKSFKLYLNSFNQSKFASVEQVEQVLARDLSLCASGQVSVKVRKLSEYTQQPIVDFEGECIDEQDLKIESYQFSNQHLTGIAEGEVVDETLVSHLLKSNCLITSQPDWGSVQIHYVGKKLNREKLLRYLISFREHNEFHEQCVERIFTDLVQFAQPEKLTVYARYTRRGGLDINPFRSNFEPLPKNLRMARQ

SEQ ID NO: 43720 - protein, 279 aa, Actinobacillus pleuropneumoniae
  misc_feature (1)..(279): sp|A3N0K4|QUEF_ACTP2 NADPH-dependent 7-cyano-7-deazagua nine reductase OS=Actinobacillus pleuropneumoniae serot ype 5b (strain L20) OX=416269 GN=queF PE=3 SV=1
MNYNDKSLSALKLGQKTEYKSEYDPTLLQPVPRKLNRDGLGITEQQPFDRGADVWTCYELSWLNENGLPQVAIADVAIDFRSENLIESKSFKLYLNSFNQTKFASLEQVEQTLAKDLSQCASGQVSVKVYKLSAYTQQPIVDFAGECIDEQDIQIDSYEFSNEHLASVAEGEVVEETLVSHLLKSNCLITSQPDWGSVQIHYVGKKLNREKLLRYLVSFREHNEFHEQCVERIFIDLIQFTQPEKLTVYARYTRRGGLDINPFRSNFESVPQNLRMARQ

SEQ ID NO: 43721 - protein, 279 aa, Actinobacillus pleuropneumoniae
  misc_feature (1)..(279): tr|A0A3S5F5U5|A0A3S5F5U5_ACTPL NADPH-dependent 7-cyano- 7-deazaguanine reductase OS=Actinobacillus pleuropneumo niae OX=715 GN=queF PE=3 SV=1
MNYNDKSLSALKLGQKTEYKSEYDPTLLQPVPRKLNRDGLGITDQPPFDRGADVWTCYELSWLNENGLPQVAIADVAIDFRSENLIESKSFKLYLNSFNQTKFASLEQVEQTLAKDLSQCASGQVSVKVYKLSAYTQQPIVDFAGECIDEQDIQIDSYEFSNEHLASVAEGEVVEETLVSHLLKSNCLITSQPDWGSVQIHYVGKKLNREKLLRYLVSFREHNEFHEQCVERIFTDLIQFTQPEKLTVYARYTRRGGLDINPFRSNFESVPQNLRMARQ

SEQ ID NO: 43722 - protein, 278 aa, Actinobacillus porcinus
  misc_feature (1)..(278): tr|A0A4V0IFB5|A0A4V0IFB5_9PAST NADPH-dependent 7-cyano- 7-deazaguanine reductase OS=Actinobacillus porcinus OX= 51048 GN=queF PE=3 SV=1
MNYESQLNNLKLGQKTEYKAEYDRTLLQPVPRALNRDGLGITAQQPFTQGSDIWTAYEISWLNPKGLPQVAIADVEIDFRSENLIESKSFKLYLNSFNQTKFSTFDEVQRIMQQDLSECAKGDVKVRLNPLAFYNAQPIAQLQGECIDEQDIEIDDYGFDATLLENSVNENTVEETLVSHLLKSNCLITSQPDWGSVQIHYVGKQIDREKLLRYLVSFRQHNEFHEQCVERIFCDLMTFAKPEKLSVYARYTRRGGLDINPFRSNFETVPQNNRLARQ

SEQ ID NO: 43723 - protein, 279 aa, Actinobacillus porcitonsillarum
  misc_feature (1)..(279): tr|A0A2U8FJY0|A0A2U8FJY0_9PAST NADPH-dependent 7-cyano- 7-deazaguanine reductase OS=Actinobacillus porcitonsill arum OX=189834 GN=queF PE=3 SV=1
MNYNDKSLSALKLGQKTEYKSEYDPNLLQPVPRKLNRDGLGITDVQPFNQGADIWTCYELSWLNLNGLPQVAIADVAVDFQSENLIESKSFKLYLNSFNQSKFDSFEQVEQVLVQDLSRCASGQVSVKVRKLSEYTQQPIVDFDGECIDEQNLQIDSYQFSNEHLAGIAEGEVVDETLVSHLLKSNCLITSQPDWGSVQIHYVGKKLNREKLLRYLISFREHNEFHEQCVERIFTDLMQFAQPEKLTVYARYTRRGGLDINPFRSNFEPLPKNLRMARQ

SEQ ID NO: 43724 - protein, 278 aa, [Actinobacillus] rossii
  misc_feature (1)..(278): tr|A0A380TWQ0|A0A380TWQ0_9PAST NADPH-dependent 7-cyano- 7-deazaguanine reductase OS=[Actinobacillus] rossii OX= 123820 GN=queF PE=3 SV=1
MNYEKQLKDLKLGQKTEYKAEYDCSLLQPVPRALNRDSLGITEKQPFTQGCDIWTAYEISWLNPKGLPQVAIADVEIDFRSLNLIESKSFKLYLNSFNQTQFVSFDEVQRIIQQDLSDCAKGDVKVRLNSLAFYDEQPIARLQGECIDEQAIEIQNYGFNSALLENCTRENLVEETLVSHLLKSNCLITNQPDWGSVQIHYVGKQIDREKLLRYIVSFRQHNEFHEQCVERIFCDLMQFAQPKKLTVYARYTRRGGLDINPFRSNFESAPTNLRLARQ

SEQ ID NO: 43725 - protein, 279 aa, Actinobacillus seminis
  misc_feature (1)..(279): tr|A0A263HB45|A0A263HB45_9PAST NADPH-dependent 7-cyano- 7-deazaguanine reductase OS=Actinobacillus seminis OX=7 22 GN=queF PE=3 SV=1
MHYYDQSLQSLPLGKQTKYAENYDRTLLQPVPRSLNRDSLGITAQQPFTIGADIWTAYEISWLNTKGVPQVAIADVEIDCASLNLIESKSFKLYLNSFNQSKFISFDEVCHILQQDLQQCAQGEVKVRLNSLANYHCTPIASFVGDCIDEQNIEIVDYQFNPQLLQHCTGENPVDEVLVSHLLKSNCLITQQPDWGSVQIHYVGKQIDREKLLRYLISYRQHNEFHEQCVERIFCDLMQFAKPEKLTVYARYTRRGGLDINPFRSNFEPIPLNQRLARQ

SEQ ID NO: 43726 - protein, 279 aa, Actinobacillus succinogenes
  misc_feature (1)..(279): sp|A6VNL8|QUEF_ACTSZ NADPH-dependent 7-cyano-7-deazagua nine reductase OS=Actinobacillus succinogenes (strain A TCC 55618 / DSM 22257 / 130Z) OX=339671 GN=queF PE=3 SV =1
MNRYDNSLSGLKLGQKTEYNAKYDRTLLQPVPRRLNRDDLGISAQQPFNQGADIWTAYEISWLNPKGLPQIAIADAEIDFRSENLVESKSFKLYLNSFNQTKFASPAEVQDTIRRDLQDCVQGEVKVRLNSVAFYTHQPIHELSGEIIDNQDIEISDYGFNAELLTNCTCDVQVEETLVSHLLKSNCLITGQPDWGTLQIRYAGNRIDREKLLRYIVSFRQHNEFHEQCVERIFCDILHYAEPEKLTVYARYTRRGGLDINPFRSNFEPVPGNFRLARQ

SEQ ID NO: 43727 - protein, 279 aa, Actinobacillus suis
  misc_feature (1)..(279): tr|K0G4E0|K0G4E0_ACTSU NADPH-dependent 7-cyano-7-deazag uanine reductase OS=Actinobacillus suis H91-0380 OX=696 748 GN=queF PE=3 SV=1
MNYNDKSLSVLKLGQKTEYKSEYDPTLLQPVPRKLNRDGLGITEQQPFDRGADVWTCYELSWLNENGLPQVAIADVAIDFRSENLIESKSFKLYLNSFNQTKFASLEQVEQTLAKDLSQCASGQVSVKVYKLSAYTRQPIVDFAGECIDEQDIQIDSYEFSNEHLASVAEGEIVEETLVSHLLKSNCLITSQPDWGSVQIRYVGKKLNREKLLRYLVSFREHNEFHEQCVERIFTDLMQFAQPEKLTVYARYTRRGGLDINPFRSNFEAVPQNLRMARQ

SEQ ID NO: 43728 - protein, 279 aa, Actinobacillus ureae
  misc_feature (1)..(279): tr|E8KHM3|E8KHM3_9PAST NADPH-dependent 7-cyano-7-deazag uanine reductase OS=Actinobacillus ureae ATCC 25976 OX= 887324 GN=queF PE=3 SV=1
MNYNDKSLSALKLGQKTEYKSEYDPTLLQPVPRKLNRDGLGITEQQPFDRGADVWTCYELSWLNENGLPQVAIADVAIDFRSENLIESKSFKLYLNSFNQTKFASLEQVEQTLVKDLSQCASDQVSVKVYKLSTYTQQPIVDFAGECIDEQDIQINSYEFSNEYLAGVAEGEVVEETLVSHLLKSNCLITSQPDWGSVQIHYVGKKLNREKLLRYLVSFREHNEFHEQCVERIFTDLMQFAQPKKLTVYARYTRRGGLDINPFRSNFESIPQNLRMARQ

SEQ ID NO: 43729 - protein, 136 aa, Actinobacteria bacterium
  misc_feature (1)..(136): tr|A0A1F2WST2|A0A1F2WST2_9ACTN NADPH-dependent 7-cyano- 7-deazaguanine reductase OS=Actinobacteria bacterium RB G_16_64_13 OX=1797200 GN=queF PE=3 SV=1
MDASPNTDEPSELYGATAIRENTLEQWPNPHPERPYLISFDIPEFTCLCPRSGFPDFALIKIRYQPRDWIVELRSLKLYINGYRDHPISHEAAANQILDDLVSLLQPRWMRVTADFSVRGNIKTVVRVDHGVREQT

SEQ ID NO: 43730 - protein, 118 aa, Actinobacteria bacterium
  misc_feature (1)..(118): tr|A0A538IK25|A0A538IK25_9ACTN NADPH-dependent 7-cyano- 7-deazaguanine reductase OS=Actinobacteria bacterium OX =1883427 GN=queF PE=3 SV=1
MLETLENRFQGRDYLVELGAPEFTSICPLTDAPDFGELTIRYVPGEKLFELKSLRDYLTSFRERKILQEEVVNEVLERLVADGAPRFVEVEGEFAARGGMTTRVVASAGELPDSWISD

SEQ ID NO: 43731 - protein, 191 aa, Adlercreutzia equolifaciens
  misc_feature (1)..(191): tr|A0A3E2EHV4|A0A3E2EHV4_9ACTN NADPH-dependent 7-cyano- 7-deazaguanine reductase OS=Adlercreutzia equolifaciens OX=446660 GN=queF PE=3 SV=1
MAAIAAHLAREDAGPAPATAPAAASAGRDEVETRAGGVTLLGNQHTQYPTDYDPSVLETFENKHPGNDYFVKFNCPEFTSLCPITGQPDFATIYISYVPDVRMVESKSLKLYLFSFRNHGDFHEDCMNIIMKDLIALMDPKYIEVWGKFTPRGGISIDPYCNYGRPGTRWEEVAWTRLSQHDLYPEKVDNR

SEQ ID NO: 43732 - protein, 276 aa, Advenella incenata
  misc_feature (1)..(276): tr|A0A4Q7VE58|A0A4Q7VE58_9BURK NADPH-dependent 7-cyano- 7-deazaguanine reductase OS=Advenella incenata OX=26780 0 GN=queF PE=3 SV=1
MSDSTLLHAPLGKETQYPEHYDPSLLFPIARDAGRAHLSLQPHPAWHGADIWNAYELSWLDPKGKPQVALARFFFPASSTHIIESKSFKLYLNSFNQTAMPDGDAVLARMQQDLSAAAGAPVGVTLFTPADFAIQTLGELEGTLLDTLDIDVSAYMPDAGLLQADATQSRHETLRTNLLKSNCPVTGQPDWGSLQIEYTGAAIDHASLLKYIVSYRGHNGFHEQCAEQIFCDIMHTCAPEALTVYARYTRRGGLDINPWRSTQPDFIPADARNARQ

SEQ ID NO: 43733 - protein, 276 aa, Advenella kashmirensis
  misc_feature (1)..(276): tr|V8QX79|V8QX79_9BURK NADPH-dependent 7-cyano-7-deazag uanine reductase OS=Advenella kashmirensis W13003 OX=14 24334 GN=queF PE=3 SV=1
MTDSILHHAPLGKETHYPQHYDPSLLFPIARDAGRAQLSLQPHPQWYGADIWNAYEVSWLTPKGKPQVALARFSFPATSTHLIESKSFKLYLNSFNQTPMPDRDAVIAYMQQDLSAAAGAPVSVTLIEPADFAGQTMGELEGTLLDTLDIDVSVYHPDATLLSADASRSRHETLRSDLLKSNCPVTSQPDWGSLQIEYTGAAIDHAGLLKYIVSYREHSGFHEQCVEQIFCDIMHTCAPQALSVYARYTRRGGLDINPWRSTEPDFIPSALRNARQ

SEQ ID NO: 43734 - protein, 276 aa, Advenella kashmirensis
  misc_feature (1)..(276): tr|A0A356LC52|A0A356LC52_9BURK NADPH-dependent 7-cyano- 7-deazaguanine reductase OS=Advenella kashmirensis OX=3 10575 GN=queF PE=3 SV=1
MSDSTLLHAPLGKETQYPEHYDPSLLFPIARDAGRAHLSLQPHPAWHGADIWNAYELSWLDPKGKPQVALARFFFPASSTHIIESKSFKLYLNSFNQTAMPDGDAVLARMQQDLSAAAGAPVSVTLFTPAYFAIQTLGELEGTLLDTLDIDISAYMPDAGLLQADATQSRHETLRSNLLKSNCPVTGQPDWGSLQIEYTGAAIDHASLLRYIVSYRGHNGFHEQCAEQIFCDIMHTCAPEALTVYARYTRRGGLDINPWRSTQPDFIPADARNARQ

SEQ ID NO: 43735 - protein, 276 aa, Advenella mimigardefordensis
  misc_feature (1)..(276): tr|W0PFI7|W0PFI7_9BURK NADPH-dependent 7-cyano-7-deazag uanine reductase OS=Advenella mimigardefordensis DPN7 O X=1247726 GN=queF PE=3 SV=1
MSDSTLLHAPLGKETRYADHYDPALLFPIAREAGRAHLSLQPPPAWYGADIWNAYELSWLNPKGKPQVALARFGFPASSTHIIESKSFKLYLNSFNQTPMHDSDAVRACMQQDLSAAAGGPVEVTLFAPTNFADQTLGELEGTLLDTLDIDITIYAPDAGLLQADPTQSRHETLRTNLLKSNCPVTAQPDWGSLQIEYTGAAIDHASLLKYIISYRGHNGFHEQCVEQIFCDIMQRCAPETLTVYARYTRRGGLDINPWRSTQADFIAPDARNARQ

SEQ ID NO: 43736 - protein, 276 aa, Advenella sp.
  misc_feature (1)..(276): tr|A0A2M9TJI9|A0A2M9TJI9_9BURK NADPH-dependent 7-cyano- 7-deazaguanine reductase OS=Advenella sp. S44 OX=198275 5 GN=queF PE=3 SV=1
MSDPTLLHAPLGKETEYAEHYDPSLLFAIARDAGRAHLNLRPHPAWHGADIWNAYELSWLNTKGKPQVALARFGFPADTTHIIESKSFKLYLNSFNQTTLPDSDALLAAMQQDLSKAAGGPVDVTLFNAADFADQALGELHGTLLDTLDIDVCAYHPDPTLLQANASQSRHETLRSNLLKSNCPVTGQPDWGSLQIEYTGAAIDHASLLKYIVSYRGHNGFHEQCVEQIFCDIMQVCAPQALTVYARYTRRGGLDINPWRSTEADFTPSAGRNARQ

SEQ ID NO: 43737 - protein, 165 aa, Aerococcaceae bacterium
  misc_feature (1)..(165): tr|A0A3D0CK93|A0A3D0CK93_9LACT NADPH-dependent 7-cyano- 7-deazaguanine reductase OS=Aerococcaceae bacterium OX= 2053495 GN=queF PE=3 SV=1
MQGRSNEDMGNVSLLGNQGTKYLDNYAPEILESFPNKHLDNDYFVKFNCPEFTSLCPMTGQPDFATIYISYVPGEKMVESKSLKLYLFSFRNHGDFHEDCMNIIMKDLIKLMEPKYIEVWGKFTPRGGISIDPYCNYGQPGTKWEDMAWERLKNHDLYPEKVDNR

SEQ ID NO: 43738 - protein, 282 aa, Aeromonas allosaccharophila
  misc_feature (1)..(282): tr|A0A0T6UVM5|A0A0T6UVM5_9GAMM NADPH-dependent 7-cyano- 7-deazaguanine reductase OS=Aeromonas allosaccharophila OX=656 GN=queF PE=3 SV=1
MSKQDRYAGASALTGLSLGQQSDYISQYTPSLLQPVPRSLNRDDLQLGDDLPFTGCDVWTLYELSWLNAKGKPMVAVGEVTIPATSANLIESKSFKLYLNSFNQTRCDSIEAVAAMLTKDLSACAGETVKVTLFPLDQAPHQIALLPGECIDEQDIEVDHYEFDATLLQGAAGSEQVEETLHSHLLKSNCLVTSQPDWGSVVIRYKGPKLDREKLLRYLISFRQHNEFHEQCIERIFIDLKHYCQPEQLTVYARYTRRGGLDINPFRSDFEAVPANLRLIRQ

SEQ ID NO: 43739 - protein, 282 aa, Aeromonas allosaccharophila
  misc_feature (1)..(282): tr|A0A1Q5VVF9|A0A1Q5VVF9_9GAMM NADPH-dependent 7-cyano- 7-deazaguanine reductase OS=Aeromonas allosaccharophila OX=656 GN=queF PE=3 SV=1
MSKQDRYAGASALTGLSLGQQSDYISQYTPSLLQPVPRSLNRDDLQLGDDLPFTGCDVWTLYELSWLNAKGKPMVAVGEVTIPATSANLIESKSFKLYLNSFNQTRCDSIEAVAAMLTKDLSACAGETVKVTLFPLDQAPHQIALLPGECIDEQDIEVDTYEFDATLLQGAAGSEQVEETLHSHLLKSNCLVTSQPDWGSVVIRYKGPKLDREKLLRYLISFRQHNEFHEQCIERIFIDLKHYCQPEQLTVYARYTRRGGLDINPFRTDFEAVPANLRLIRQ

SEQ ID NO: 43740 - protein, 282 aa, Aeromonas cavernicola
  misc_feature (1)..(282): tr|A0A2H9U974|A0A2H9U974_9GAMM NADPH-dependent 7-cyano- 7-deazaguanine reductase OS=Aeromonas cavernicola OX=10 06623 GN=queF PE=3 SV=1
MSTQDRYAGASALKGLRLGQQSDYLSQYSPSLLQPVPRALNRDDLQLGATLPFAGCDMWTLYELSWLNSKGKPMVALGEVSVPATSPHLIESKSFKLYLNSFNQTRCAAIDTVAAMLQSDLSACAGAQVEVRLFSLTHAPHHIATLPGECIDDQDIEVDQYEFDASLLQGAAGQEMVEETLHSHLLKSNCLVTSQPDWGSVVIRYRGPRLDRQKLLRYLISFRQHNEFHEQCVERIFIDLKHYCQPAQLTVYARYTRRGGLDINPFRSDFEPVPTNLRLIRQ

SEQ ID NO: 43741 - protein, 282 aa, Aeromonas caviae
  misc_feature (1)..(282): tr|A0A3G9I6Q9|A0A3G9I6Q9_AERCA NADPH-dependent 7-cyano- 7-deazaguanine reductase OS=Aeromonas caviae OX=648 GN= queF PE=3 SV=1
MSKQERYAGASALQGLSLGQQSAYISQYTPSLLQPVPRSLNRDDLGLRGELPFQGCDVWTLYELSWLNAKGKPVVAIGEVFVPATSPNLIESKSFKLYLNSFNQTRCDSLEAVQALLVQDLSGCAGAPVSVTLFTLDQAPHQIAQLPGECIDSLDIEVDGYEFDETLLQGAAGREIVEETLHSHLLKSNCLVTSQPDWGSVVIHYRGPRLDREKLLRYLISFRQHNEFHEQCIERIFTDLKHFCAPEQLTVHARYTRRGGLDINPFRSDWEPVPANLRLIRQ

SEQ ID NO: 43742 - protein, 282 aa, Aeromonas caviae
  misc_feature (1)..(282): tr|A0A443W011|A0A443W011_AERCA NADPH-dependent 7-cyano- 7-deazaguanine reductase OS=Aeromonas caviae OX=648 GN= queF PE=3 SV=1
MSKQERYAGASALQGLSLGQQSAYISQYTPSLLQPVPRSLNRDDLGLRGELPFQGCDVWTLYELSWLNAKGKPVVAIGEVFVPATSPNLIESKSFKLYLNSFNQTRCDSLEAVQALLVQDLSGCAGAPVSVTLFTLDQAPHQIAQLPGECIDSLDIEVDGYEFDETLLQGAAGHEIVEETLHSHLLKSNCLVTSQPDWGSVVIHYRGPRLDREKLLRYLISFRQHNEFHEQCIERIFTDLKHFCAPEQLTVHARYTRRGGLDINPFRSDWEPVPANLRLIRQ

SEQ ID NO: 43743 - protein, 282 aa, Aeromonas dhakensis
  misc_feature (1)..(282): tr|K1JCX2|K1JCX2_9GAMM NADPH-dependent 7-cyano-7-deazag uanine reductase OS=Aeromonas dhakensis OX=196024 GN=qu eF PE=3 SV=1
MSKQDRYAGASALQGLSLGQQSAYISQYTPALLQPVPRSLNRDDLGLGGELPFQGCDVWTLYELSWLNAKGKPMVAVGEVSVPATSANLIESKSFKLYLNSFNQTRCDSLEAVQAMLVKDLSACAGSDVSVTLFPLAQAPHHIAALPGECIDEQDIEVDCYEFDADLLQGAAGSLEVEETLHSHLLKSNCLVTSQPDWGSVVIHYRGPQLDREKLLRYLISFRQHNEFHEQCIERIFTDLKHFCAPSQLTVYARYTRRGGLDINPFRSDWEVVPANLRLIRQ

SEQ ID NO: 43744 - protein, 282 aa, Aeromonas diversa
  misc_feature (1)..(282): tr|N9VP08|N9VP08_9GAMM NADPH-dependent 7-cyano-7-deazag uanine reductase OS=Aeromonas diversa CDC 2478-85 OX=12 68237 GN=queF PE=3 SV=1
MTNQDRYAGAKALAGLSLGQKSDYISSYTPSLLQPVPRSLNRDDLALSDPLPFQGEDIWTLYELSWLDGKGKPVVALGEARIPATSANLIESKSFKLYLNSFNQTRCESLAAVQALLEQDLGACAGAPVSVTLWRLDEAPATIATLPGECIDDLDIEVNDYHFDTRWLEGAADGDEVEETLHSHLLKSNCLVTSQPDWGSVVIHYRGPRIDREKLLRYLISFRQHNEFHEQCVERIFTDLKSLCGCQRLTVYARYTRRGGLDINPYRSDFEHSPANIRLIRQ

SEQ ID NO: 43745 - protein, 282 aa, Aeromonas encheleia
  misc_feature (1)..(282): tr|A0A448KZA2|A0A448KZA2_9GAMM NADPH-dependent 7-cyano- 7-deazaguanine reductase OS=Aeromonas encheleia OX=7301 0 GN=queF PE=3 SV=1
MSKQERYAGASALQGLSLGQQSAYISQYAPELLQPVPRSLNRDDLGLGETLPFQGCDVWTLYELSWLNAKGKPMVALGEVAVPATSPNLIESKSFKLYLNSFNQTRCDSLAAVQALLVKDLSACAGSEVSVTLFPLDQAPHQIAALPGECIDEQDIEIDDYEFDQTLLQGAAGTDIVEETLHSHLLKSNCLVTRQPDWGSLVIHYRGPRLDREKLLRYLISFRQHNEFHEQCIERIFIDLKHFCGPSQLTVYARYTRRGGLDINPFRSDWERVPANLRLIRQ

SEQ ID NO: 43746 - protein, 286 aa, Aeromonas enteropelogenes
  misc_feature (1)..(286): tr|A0A175VKY5|A0A175VKY5_AEREN NADPH-dependent 7-cyano- 7-deazaguanine reductase OS=Aeromonas enteropelogenes O X=29489 GN=queF PE=3 SV=1
MSKHVSKQERYAGASALKGLTLGQQSDYISQYTPSLLQPVPRSLNRDDLQLGAELPFAGCDVWTLYELSWLNAKGKPMVAVGEVTIPATSANLIESKSFKLYLNSFNQTRCDSIEAVQAMLIKDLSACAGEAVQVTLFPLDRAPHQIATLPGECIDDQDIEIEGYEFDATLLQGAAGSEVVEETLHSHLLKSNCLVTSQPDWGSVVIRYKGPRVDREKLLRYLISFRQHNEFHEQCIERIFIDLQHYCQPQQLTVYARYTRRGGLDINPFRSDFEAVPANLRLIRQ

SEQ ID NO: 43747 - protein, 302 aa, Aeromonas hydrophila
  misc_feature (1)..(302): tr|A0KHE7|A0KHE7_AERHH NADPH-dependent 7-cyano-7-deazag uanine reductase OS=Aeromonas hydrophila subsp. hydroph ila (strain ATCC 7966 / DSM 30187 / JCM 1027 / KCTC 235 8 / NCIMB 9240) OX=380703 GN=queF PE=3 SV=1
MPPPSGACSAIAHSTFESAHMSKQERYAGASALQGLSLGQQSAYISQYTPALLQPVPRSLNRDDLGLGGELPFQGCDVWTLYELSWLNARGKPMVAVGEVSVPATSANLIESKSFKLYLNSFNQTRCDSLEAVQAMLVKDLSACAGSDVSVTLFPLAQAPHHIAALPGECIDEQDIAVDCYEFDADLLQGAAGSQEVEETLHSHLLKSNCLVTSQPDWGSVVIHYRGPQLDREKLLRYLISFRQHNEFHEQCIERIFTDLKHFCRPSQLTVYARYTRRGGLDINPFRSDWEVVPANLRLIRQ

SEQ ID NO: 43748 - protein, 282 aa, Aeromonas hydrophila
  misc_feature (1)..(282): tr|A0A347A933|A0A347A933_AERHY NADPH-dependent 7-cyano- 7-deazaguanine reductase OS=Aeromonas hydrophila OX=644 GN=queF PE=3 SV=1
MSKQERYAGASALQGLSLGQQSAYISQYTPALLQPVPRSLNRDDLGLGGELPFQGCDVWTLYELSWLNAKGKPMVAVGEVSVPATSANLIESKSFKLYLNSFNQTRCDSLEAVQAMLVKDLSACAGSDVSVTLFPLAQAPHHIAALPGECIDEQDIAVDCYEFDADLLQGAAGSQEVEETLHSHLLKSNCLVTSQPDWGSVVIHYRGPQLDREKLLRYLISFRQHNEFHEQCIERIFTDLKHFCRPSQLTVYARYTRRGGLDINPFRSDWEVVPANLRLIRQ

SEQ ID NO: 43749 - protein, 282 aa, Aeromonas jandaei
  misc_feature (1)..(282): tr|A0A2S5FEM3|A0A2S5FEM3_AERJA NADPH-dependent 7-cyano- 7-deazaguanine reductase OS=Aeromonas jandaei OX=650 GN =queF PE=3 SV=1
MSKQDRYAGASALKGLSLGQQSDYISLYTPSLLQPVPRSLNRDDLKLGDDLPFTGCDVWTLYELSWLNSKGKPMVAVGEVTIPATSPNLIESKSFKLYLNSFNQTRCDSIEAVAAMLEQDLGACAGEPVKVTLFPLDRAPHQIATLPGECIDELDIEVDHYEFDADLLQGAASRELVEETLHSHLLKSNCLVTSQPDWGSVVIRYKGPQLDREKLLRYLISFRQHNEFHEQCIERIFIDLKHYCQPEQLTVYARYTRRGGLDINPFRSDFEAVPANLRLIRQ

SEQ ID NO: 43750 - protein, 282 aa, Aeromonas jandaei
  misc_feature (1)..(282): tr|A0A3N6WXC5|A0A3N6WXC5_AERJA NADPH-dependent 7-cyano- 7-deazaguanine reductase OS=Aeromonas jandaei OX=650 GN =queF PE=3 SV=1
MSKQDRYAGASALKGLSLGQQSDYISQYTPSLLQPVPRSLNRDDLKLGDDLPFTGCDVWTLYELSWLNSKGKPMVAVGEVTIPATSPNLIESKSFKLYLNSFNQTRCDSIEAVAALLEQDLGACAGEPVKVTLFPLDRAPHQIATLPGECIDELDIEVDNYEFDAELLQGAASSELVEETLHSHLLKSNCLVTSQPDWGSVVIRYKGPKLDREKLLRYLISFRQHNEFHEQCIERIFIDLKHYCQPEQLTVYARYTRRGGLDINPFRSDFEAVPANLRLIRQ

SEQ ID NO: 43751 - protein, 282 aa, Aeromonas lusitana
  misc_feature (1)..(282): tr|A0A2M8HF01|A0A2M8HF01_9GAMM NADPH-dependent 7-cyano- 7-deazaguanine reductase OS=Aeromonas lusitana OX=93152 9 GN=queF PE=3 SV=1
MSKQERYAGASALQGLSLGQQSAYISQYTPELLQPVPRSLNRDDLGLGEALPFQGCDVWTLYELSWLNAKGKPVVAVGEVSVPATSPNLIESKSFKLYLNSFNQTRGESLAAVQALLVKDLSACAGGEVSVTLFPLDRAPHHIATLPGECIDEQDIEIDGYEFDQTLLQGAAGTEIVEETLHSHLLKSNCLVTSQPDWGSLVIHYRGPRLDREKLLRYLISFRQHNEFHEQCIERIFIDLKHFCHPSELTVYARYTRRGGLDINPFRSDWEPVPANLRLIRQ

SEQ ID NO: 43752 - protein, 282 aa, Aeromonas media
  misc_feature (1)..(282): tr|A0A023RLW7|A0A023RLW7_AERME NADPH-dependent 7-cyano- 7-deazaguanine reductase OS=Aeromonas media WS OX=12081 04 GN=queF PE=3 SV=1
MSKQERYAGASALQGLSLGQQSAYISQYTPSLLQPVPRSLNRDDLGLGETLPFQGCDVWTLYELSWLNAKGKPVVALGEVAVPATSPNLIESKSFKLYLNSFNQTRCDSLEAVQALLAKDLSACAGAEVSVTLFPLDQAPHQIALLPGECIDEQDIEIDSYEFDQTLLQGAAEADIVEETLHSHLLKSNCLVTSQPDWGSLVIHYRGPRLNREKLLRYLISFRQHNEFHEQCIERIFIDLKHFCTPQQLTVYARYTRRGGLDINPFRSDWEPVPANLRLIRQ

SEQ ID NO: 43753 - protein, 280 aa, Aeromonas molluscorum
  misc_feature (1)..(280): tr|R1FA06|R1FA06_9GAMM NADPH-dependent 7-cyano-7-deazag uanine reductase OS=Aeromonas molluscorum 848 OX=126823 6 GN=queF PE=3 SV=1
MSKQDRYANALQGLSLGQQSAYISQYSPSLLQPVPRSLNRDDLALPDPLPFQGADIWTLYELSWLNDKGKPVVALGEISVPATSLNLIESKSFKLYLNSFNQTRCTSLAAVRELLAKDLSACAGAEVAVTLYPLGQAPHQIVDLPGECIDELDIEVDNYEFDADLLAGAAGQDEVEETLHSHLLKSNCLVTSQPDWGSVLIHYRGPRLDREKLLRYLISFRQHNEFHEQCIERIFTDLKHHCAPEKLTVYARYTRRGGLDINPFRSDWEEPSENLRLIRQ

SEQ ID NO: 43754 - protein, 282 aa, Aeromonas rivipollensis
  misc_feature (1)..(282): tr|A0A2P1PEU6|A0A2P1PEU6_9GAMM NADPH-dependent 7-cyano- 7-deazaguanine reductase OS=Aeromonas rivipollensis OX= 948519 GN=queF PE=3 SV=1
MSKQDRYAGASALQGLSLGQQSAYISQYTPSLLQPVPRSLNRDDLGLGETLPFQGCDVWTLYELSWLNAKGKPVVALGEVAVPATSPNLIESKSFKLYLNSFNQTRCDSLAAVQALLVKDLSACAGAEVSVTLFPLDQAPHQIALLPGECIDEQDIEIDSYEFDQTLLQGAAEADIVEETLHSHLLKSNCLVTSQPDWGSLVIHYRGPRLNREKLLRYLISFRQHNEFHEQCIERIFIDLKHFCAPQQLTVYARYTRRGGLDINPFRSDWEPVPANLRLIRQ

SEQ ID NO: 43755 - protein, 282 aa, Aeromonas salmonicida
  misc_feature (1)..(282): sp|A4SQJ9|QUEF_AERS4 NADPH-dependent 7-cyano-7-deazagua nine reductase OS=Aeromonas salmonicida (strain A449) O X=382245 GN=queF PE=3 SV=1
MSKQEKYAGASALQGLSLGQQSAYISQYSPALLQPVPRSLNRDDLGLTGELPFQGCDVWTLYELSWLNARGKPMVAVGEVSVPAVSANLIESKSFKLYLNSFNQTRCDSLEAVQAMLVKDLSACAGSEVSVTLFPLAQAPHHIAALPGECIDEQDIEVDCYEFDANLLQGAAGNDEVEETLHSHLLKSNCLVTSQPDWGSVVIHYRGPRLDREKLLRYLISFRQHNEFHEQCIERIFTDLKLLCHPSQLTVYARYTRRGGLDINPFRSDWELPPTNLRLIRQ

SEQ ID NO: 43756 - protein, 282 aa, Aeromonas salmonicida
  misc_feature (1)..(282): tr|T0QSM7|T0QSM7_AERSA NADPH-dependent 7-cyano-7-deazag uanine reductase OS=Aeromonas salmonicida subsp. pectin olytica 34mel OX=1324960 GN=queF PE=3 SV=1
MSKQEKYAGASALQGLSLGQQSAYISQYSPALLQPVPRSLNRDDLGLTGELPFQGCDIWTLYELSWLNARGKPMVAVGEVSVPAVSANLIESKSFKLYLNSFNQTRCDSLEAVQAMLVKDLSACAGSEVSVTLFPLAQAPHQIAALPGECIDEQDIEVDCYEFDANLLQGAAGNEEVEETLHSHLLKSNCLVTSQPDWGSVVIHYRGPRLDREKLLRYLISFRQHNEFHEQCIERIFTDLKLLCRPSQLTVYARYTRRGGLDINPFRSDWELPPANLRLIRQ

SEQ ID NO: 43757 - protein, 282 aa, Aeromonas schubertii
  misc_feature (1)..(282): tr|A0A0S2SI86|A0A0S2SI86_9GAMM NADPH-dependent 7-cyano- 7-deazaguanine reductase OS=Aeromonas schubertii OX=652 GN=queF PE=3 SV=1
MTNQDRYAGAKALAGLSLGQKSDYISSYTPSLLQPVPRSLNRDDLSLGDALPFQGEDIWTLYELSWLDSKGKPVVALGEVRIPATSTNLIESKSFKLYLNSFNQTRCESLAAVQALLEQDLGACAGAPVAVTLWHLDEAPATIATLPGECIDHLDIEVNDYHFDSAWLDGATGDEEVEETLHSHLLKSNCLVTSQPDWGSVVIHYQGPRIDREKLLRYLISFRQHNEFHEQCVERIFTDLKALCGCHRLTVYARYTRRGGLDINPFRSDFERSPANIRLIRQ

SEQ ID NO: 43758 - protein, 282 aa, Aeromonas simiae
  misc_feature (1)..(282): tr|A0A5J6X064|A0A5J6X064_9GAMM NADPH-dependent 7-cyano- 7-deazaguanine reductase QueF OS=Aeromonas simiae OX=21 8936 GN=queF PE=4 SV=1
MTNHDRYAGAKALSQLALGQKSDYISHYTPGLLQPVPRSLNRDDLQLGDTLPFQGEDIWTLYELSWLDGKGKPVVALGEVRVPATSANLIESKSFKLYLNSFNQTRCASIDAVRALLEQDLSACAGAPVAVTLWHLHQAPATIATLPGECIDDLDIEIDDYHFSADWLSGAAQAEEVEETLHSHLLKSNCLVTAQPDWGSVVIHYRGPRIEREKLLRYLVSFRQHNEFHEQCVERIFTDLKTHCGCRQLTVYARYTRRGGLDINPFRSDFERSPANIRLIRQ

SEQ ID NO: 43759 - protein, 282 aa, Aeromonas sobria
  misc_feature (1)..(282): tr|A0A1S2D0J5|A0A1S2D0J5_AERSO NADPH-dependent 7-cyano- 7-deazaguanine reductase OS=Aeromonas sobria OX=646 GN= queF PE=3 SV=1
MNKQDRYAGASALTGLSLGQQADYISQYTPSLLQPVPRSLNRDDLQLGDALPFSGCDVWTLYELSWLNAKGKPMVALGEVTIPATSANLIESKSFKLYLNSFNQTRCDSIDAVAAMLTKDLSACAGETVKVTLFPLDQAPHQIALLPGECIDEQDIEVDHYQFDAALLQGAAGSEQVEETLHSHLLKSNCLVTSQPDWGSVVIRYKGPKLDREKLLRYLISFRQHNEFHEQCIERIFIDLKHYCQPAQLTVYARYTRRGGLDINPFRSDFEVVPANLRLIRQ

SEQ ID NO: 43760 - protein, 282 aa, Aeromonas sobria
  misc_feature (1)..(282): tr|A0A2N3J4P4|A0A2N3J4P4_AERSO NADPH-dependent 7-cyano- 7-deazaguanine reductase OS=Aeromonas sobria OX=646 GN= queF PE=3 SV=1
MNKQDRYAGASALTGLSLGQQADYISQYTPSLLQPVPRSLNRDDLQLGDALPFSGCDVWTLYELSWLNAKGKPMVALGEVTIPATSANLIESKSFKLYLNSFNQTRCDSIDAVAAMLTKDLSVCAGETVKVTLFPLDQAPHQIALLPGECIDEQDIEVDNYQFDAALLQGAAGSEQVEETLHSHLLKSNCLVTSQPDWGSVVIRYKGPKLDREKLLRYLISFRQHNEFHEQCIERIFIDLKHYCQPAQLTVYARYTRRGGLDINPFRSDFEAVPANLRLIRQ

SEQ ID NO: 43761 - protein, 282 aa, Aeromonas sp.
  misc_feature (1)..(282): tr|A0A291TES1|A0A291TES1_9GAMM NADPH-dependent 7-cyano- 7-deazaguanine reductase OS=Aeromonas sp. CU5 OX=203303 3 GN=queF PE=3 SV=1
MNKQDRYAGASALTGLSLGQQADYISQYTPSLLQPVPRSLNRDDLQLGDALPFSGCDVWTLYELSWLNARGKPMVAVGEVTIPATSANLIESKSFKLYLNSFNQTRCDSIDAVAAMLTKDLSACAGETVKVTLFPLDQAPHQIALLPGECIDEQDIEVDHYQFDAALLQGAAGSEQVEETLHSHLLKSNCLVTSQPDWGSVVIRYKGPKLDREKLLRYLISFRQHNEFHEQCIERIFIDLKHYCQPAQLTVYARYTRRGGLDINPFRSDFEVVPANLRLIRQ

SEQ ID NO: 43762 - protein, 282 aa, Aeromonas sp.
  misc_feature (1)..(282): tr|A0A2R7NBP4|A0A2R7NBP4_9GAMM NADPH-dependent 7-cyano- 7-deazaguanine reductase OS=Aeromonas sp. HMWF017 OX=20 56853 GN=queF PE=3 SV=1
MSKQDRYAGASALTGLSLGQQSDYISQYTPSLLQPVPRSLNRDDLQLGDDLPFSGCDVWTLYELSWLNAKGKPMVAVGEVAIPATSANLIESKSFKLYLNSFNQTRCDSIEAVAAMLTKDLSACAGETVKVTLFPLDKAPHQIALMPGECIDEQDIEVDNYEFDASLLQGAAGSELVEETLHSHLLKSNCLVTSQPDWGSVVIRYKGPKLDREKLLRYLISFRQHNEFHEQCIERIFIDLKHYCQPEQLTVYARYTRRGGLDINPFRSDFETVPDNLRLIRQ

SEQ ID NO: 43763 - protein, 282 aa, Aeromonas taiwanensis
  misc_feature (1)..(282): tr|A0A5F0K7T6|A0A5F0K7T6_9GAMM NADPH-dependent 7-cyano- 7-deazaguanine reductase OS=Aeromonas taiwanensis OX=63 3417 GN=queF PE=3 SV=1
MSKQERYAGASALKGLSLGQQSAYISQYTPSLLQPVPRSLNRDDLGLGETLPFEGCDVWTLYELSWLNAKGKPVVALGEVAVPAASPNLVESKSFKLYLNSFNQTRCDSIEAVQALLTQDLSACAGAPVSVTLFPLDEAPHRIAQLPGECIDDQDIEVDHYEFDETLLQGAAGAEVVEETLHSHLLKSNCLVTSQPDWGSVVIRYRGPRLDQEKLLRYLISFRQHNEFHEQCIERIFTDLKHFCAPTQLTVYARYTRRGGLDINPFRSDWEAVPENLRLIRQ

SEQ ID NO: 43764 - protein, 282 aa, Aeromonas veronii
  misc_feature (1)..(282): tr|A0A2T4N781|A0A2T4N781_9GAMM NADPH-dependent 7-cyano- 7-deazaguanine reductase OS=Aeromonas veronii OX=654 GN =queF PE=3 SV=1
MSKQDRYAGASALTGLSLGQQSDYISQYTPSLLQPVPRSLNRDDLQLGDDLPFSGCDVWTLYELSWLNAKGKPMVAVGEVAIPATSANLIESKSFKLYLNSFNQTRCDSIEAVAAMLTRDLSACAGETVKVTLFPLDKAPHQIALLPGECIDEQDIEVDNYEFDASLLQGAAGSDQVEETLHSHLLKSNCLVTSQPDWGSVVICYKGPKLDREKLLRYLISFRQHNEFHEQCIERIFIDLKHYCQPEQLTVYARYTRRGGLDINPFRSDFETVPANLRLIRQ

SEQ ID NO: 43765 - protein, 282 aa, Aeromonas veronii
  misc_feature (1)..(282): tr|A0A3A9IMT6|A0A3A9IMT6_9GAMM NADPH-dependent 7-cyano- 7-deazaguanine reductase OS=Aeromonas veronii OX=654 GN =queF PE=3 SV=1
MSKQDRYAGASALTGLSLGQQSDYISQYTPSLLQPVPRSLNRNDLKLGDDLPFSGCDVWTLYELSWLNAKGKPMVAVGEVAIPATSANLIESKSFKLYLNSFNQTRCDSIEVVAAMLTKDLSACAGETVKVTLFPLDKAPHQIAQLPGECIDEQDIEVDNYEFDASLLQGAAGSELVEETLHSHLLKSNCLVTSQPDWGSVVIRYKGPKLDREKLLRYLISFRQHNEFHEQCIERIFIDLKHYCQPEQLTVYARYTRRGGLDINPFRSDFEAVPANLRLIRQ

SEQ ID NO: 43766 - protein, 282 aa, Aestuariibacter sp.
  misc_feature (1)..(282): tr|A0A506RT79|A0A506RT79_9ALTE NADPH-dependent 7-cyano- 7-deazaguanine reductase OS=Aestuariibacter sp. GS-14 O X=2590670 GN=queF PE=3 SV=1
MTEHTKKTELSLPTHLTLGQSVDYIENYTPGLLQSVPRSLSRDQIGVSHPLPFEGVDIWNGYELSWLNSKGKPQVAILQCRVPVTSDNLIESKSFKLYLNSFNQTRFDSRDEVLACLQNDLSECANAPVTVTLLGPDQFDAMPVNNLTGTCIDDLDIDVAHYSPMPSLLTCDETQQAEETLVSHLLKSNCLITSQPDWASIQIKYQGPKIDHEGLLAYLISFRQHNEFHEQCIERIYCDLMAFCKPLKLAVYARYTRRGGLDINPLRSNYTSEIENSRQARQ

SEQ ID NO: 43767 - protein, 141 aa, Aestuariispira insulae
  misc_feature (1)..(141): tr|A0A3D9HSC2|A0A3D9HSC2_9PROT 7-cyano-7-deazaguanine r eductase OS=Aestuariispira insulae OX=1461337 GN=DFP90_ 102434 PE=4 SV=1
MTAKDESQLLERGDMPDRIKRQSTLETAPNPNPAVDYLCELSVKAVDDYATVHLFYVPDKLLLTTQAFELYLHEFDRHAFASLEELALTILDDLNNELVARWIQIRVEADAKGLDRGHRVMVEDRQPKWDNGFLLARLAGF

SEQ ID NO: 43768 - protein, 155 aa, Aestuariispira insulae
  misc_feature (1)..(155): tr|A0A3D9HGM3|A0A3D9HGM3_9PROT NADPH-dependent 7-cyano- 7-deazaguanine reductase OS=Aestuariispira insulae OX=1 461337 GN=queF PE=3 SV=1
MSNETIYDGLTQLGGDSKLPDRPEDAVLEKVPNPQEGTGYLVRFTAPEFTSLCPITGQPDFAHLMIDYVPEKWLVESKSLKLFLGSFRNHGAFHEDCTVSIGKRLVELLEPRWLRIGGYWYPRGGIPIDVFYQTGEQPRDVWIPDQGVPPYRGRG

SEQ ID NO: 43769 - protein, 154 aa, Aestuariivirga litoralis
  misc_feature (1)..(154): tr|A0A2W2BUF3|A0A2W2BUF3_9RHIZ NADPH-dependent 7-cyano- 7-deazaguanine reductase OS=Aestuariivirga litoralis OX =2650924 GN=queF PE=3 SV=1
MQKTDVSGLTQLGAATPAPASPDEAVIERVPNSQQDVDYLVRFVAPEFTSMCPMTNQPDFAHLVIDYVPDQWLVESKSLKLFLGSFRDHGSFHEDCTIGIARRLVTELSPRWLRIGGYWYPRGGIPIDVFWQTGDAPAGVWIPDQGVAPYRGRG

SEQ ID NO: 43770 - protein, 159 aa, Afipia broomeae
  misc_feature (1)..(159): tr|K8P9E2|K8P9E2_9BRAD NADPH-dependent 7-cyano-7-deazag uanine reductase OS=Afipia broomeae ATCC 49717 OX=88307 8 GN=queF PE=3 SV=1
MSRKPRAAKAAGTSLQLGQQVEAPASPDTAKLDRVPNPHTDTKYVARFTMPEFTSICPVTGQPDFAILVIDYVPNKWLVESKSLKLYLNSFRNVGSFHEDCTVSIGKRLTKLLAPRWLRIGGYFYPRGGMPIDVFWQAGKLPATVWVPDQGVPPYRGRG

SEQ ID NO: 43771 - protein, 197 aa, Afipia broomeae
  misc_feature (1)..(197): tr|A0A2M8ZI68|A0A2M8ZI68_9BRAD NADPH-dependent 7-cyano- 7-deazaguanine reductase OS=Afipia broomeae OX=56946 GN =queF PE=3 SV=1
MEGMGAWRRFYSKAWGQKRPPHRVTLMSQLANTAPTETIMSKTPRKSSKSEGLQLGRAVKWPDTPEQAKLDRVPNPQADTNYVVRFTAPEFTSLCPITGQPDFAHLVIDYVPGQWLLESKSLKLYVASFRNHGAFHEDCTVAIGKRISSEIKPKWLRIGGYWYPRGGIPIDVFWQTGRLPKGMWVPEQGVAPYRGRG

SEQ ID NO: 43772 - protein, 165 aa, Afipia clevelandensis
  misc_feature (1)..(165): tr|K8PLF6|K8PLF6_9BRAD NADPH-dependent 7-cyano-7-deazag uanine reductase OS=Afipia clevelandensis ATCC 49720 OX =883079 GN=queF PE=3 SV=1
MSKKPRITKAKTASLQEPASLQLGHQVEMPASPEAAKLDRVPNPHPKDNYLVRFVAPEFTSLCPITGQPDFAHLVIDYVPDQWLVESKALKLYLSSFRNHGAFHEDCTVGIGKRLVKEIKPRWLRIGGYWYPRGGIPIDVFWQTGKLPSGVWVPDQGVAPYRGRG

SEQ ID NO: 43773 - protein, 158 aa, Afipia felis
  misc_feature (1)..(158): tr|A0A090MQP5|A0A090MQP5_AFIFE NADPH-dependent 7-cyano- 7-deazaguanine reductase OS=Afipia felis OX=1035 GN=que F PE=3 SV=1
MSRKPRKSAVKAPLQLGRPVTLPASPDKAKLDRVPNPHPGTGYLVRFAAPEFTSLCPITGQPDFAHLVIDYVPGDWLVESKALKLYLASFRNHGAFHEYCTVAIGKRLVREIKPTWLRIGGYWYPRGGIPIDVFWQTGKLPKNIWVPDQGVPPYRGRG

SEQ ID NO: 43774 - protein, 158 aa, Afipia felis
  misc_feature (1)..(158): tr|A0A380W7L9|A0A380W7L9_AFIFE NADPH-dependent 7-cyano- 7-deazaguanine reductase OS=Afipia felis OX=1035 GN=que F PE=3 SV=1
MSRKPRKTATKAPLQLGRPVTLPASPEEAQLDRVPNPHPGTGYLVRFAAPEFTSLCPITGQPDFAHLVIDYVPGQWLVESKALKLYLASFRNHGSFHEDCTVEIGKRLVREIKPTWLRIGGYWYPRGGIPIDVFWQTGKLPKNVWVPDQGVPPYRGRG

SEQ ID NO: 43775 - protein, 159 aa, Afipia massiliensis
  misc_feature (1)..(159): tr|A0A4U6BTN4|A0A4U6BTN4_9BRAD NADPH-dependent 7-cyano- 7-deazaguanine reductase OS=Afipia massiliensis OX=2114 60 GN=queF PE=3 SV=1
MSRKPRITKAAASSLQLGQQVETPASPEQALLDRVPNPHSDTNYVARFTMPEFTSICPVTGQPDFAILVIDYVPNKWLVESKSLKLYLNSFRNVGSFHEDCTVSIGKRLTKLLAPRWLRIGGYFYPRGGMPIDVFWQAGKLPANVWVPDQGVAPYRGRG

SEQ ID NO: 43776 - protein, 159 aa, Afipia sp.
  misc_feature (1)..(159): tr|A0A1G9XAN9|A0A1G9XAN9_9BRAD NADPH-dependent 7-cyano- 7-deazaguanine reductase OS=Afipia sp. GAS231 OX=188274 7 GN=queF PE=3 SV=1
MSKSPAKAKKSSAGLQLGRAVQWPDSPEKAKLDRVPNPQADTNYVVRFTAPEFTSLCPVTGQPDFAHLMIDYVPGSWLLESKSLKLYVASFRNHGAFHEDCTVMIGKRIAAEIKPKYLRIGGYWYPRGGIPIDVFWQTGKLPKGMWMPDQGVAPYRGRG

SEQ ID NO: 43777 - protein, 159 aa, Afipia sp.
  misc_feature (1)..(159): tr|A0A5C8D421|A0A5C8D421_9BRAD NADPH-dependent 7-cyano- 7-deazaguanine reductase OS=Afipia sp. OX=1871052 GN=qu eF PE=3 SV=1
MARKSSKKNSPDARLQLGKQVGMPASPDAAQLDRVPNPHPKDNYLVRFVAPEFTSLCPITAQPDFAHLVIDYVPDQWLVESKALKLYLSSFRNHGAFHEDCTVGIDKRLVKEIRPRWLRIGGYWYPRGGIPIDVFWQTGKLPSGVWVPDQGVAPYRGRG

SEQ ID NO: 43778 - protein, 287 aa, Agarivorans albus
  misc_feature (1)..(287): tr|R9PJB3|R9PJB3_AGAAL NADPH-dependent 7-cyano-7-deazag uanine reductase OS=Agarivorans albus MKT 106 OX=133100 7 GN=queF PE=3 SV=1
MKKQPLNTSQQLKDSLSLGKPTDYISHYSPELLQGVPRTLNRQQINLDESQALPFTGYDLWNLYELSWLTPSGLPVVAVAEVKVAASSRCLIESKSFKLYLNSFNQSHFKNVDEVAATLEKDLQHCAEGDVEVKLLPISSEMDSRPIPGVNIDQQEISISNYELDPNLLENAADPQHVVNETLNSHLLKSNCLITNQPDWASVYIDYQGSKINQEALLRYLVSFRQHNEFHEQCVERIFCDIMQFCKPSTLTVYARYTRRGGLDINPMRSNDPKVDEKLGNWRLLRQ

SEQ ID NO: 43779 - protein, 287 aa, Agarivorans sp.
  misc_feature (1)..(287): tr|A0A4D4IRN6|A0A4D4IRN6_9ALTE NADPH-dependent 7-cyano- 7-deazaguanine reductase OS=Agarivorans sp. Toyoura001 OX=2283141 GN=queF PE=3 SV=1
MKKQPLNTSEQLKDSLSLGKPTDYISHYSPSLLQGVPRTLNRQQIRLDESQDLPFNGYDLWNLYELSWLNDNGLPVVAVAEVKIAASSRCLIESKSFKLYLNSFNQSHFSDFSAVEKILEKDLSHCAEGEVNVTILPISSAMDNSAMPGDNIDNQDIAIDNYELDPSLLENACDRHQRVTETLNSHLLKSNCLVTNQPDWASVYIHYNGPKIEQEALLRYLISFRQHNEFHEQCVERIFTDLMHYCQPSKLTVYARYTRRGGLDINPMRSNDPEATARLGNWRLLRQ

SEQ ID NO: 43780 - protein, 163 aa, Agathobacter ruminis
  misc_feature (1)..(163): tr|A0A2G3E2A6|A0A2G3E2A6_9FIRM NADPH-dependent 7-cyano- 7-deazaguanine reductase OS=Agathobacter ruminis OX=171 2665 GN=queF PE=3 SV=1
MADRKDEGTLTLLGNKNNTYPDNYAPEMLQTFINKHPDNDYFVKFNCPEFTSLCPITGQPDFANIIISYVPGEKMVESKSLKLYLFSFRNHGDFHEDCVNIIMKDLIRLMDPKYIEVWGKFTPRGGISIDPYCNYGKPGTKWEDIAFNRLANHDLYPEKVDNR

SEQ ID NO: 43781 - protein, 165 aa, Agathobaculum butyriciproducens
  misc_feature (1)..(165): tr|A0A2U1BEQ1|A0A2U1BEQ1_9FIRM NADPH-dependent 7-cyano- 7-deazaguanine reductase OS=Agathobaculum butyriciprodu cens OX=1628085 GN=queF PE=3 SV=1
MTGRNKEELNGVTLLGSQKNQYPSDYAPEMLETFPNKHPDNDYFVKFNCPEFTSLCPMTGQPDFATIYISYVPGERMVESKSLKLYLFSFRNHGDFHEDCVNIIMKDLIRLMDPKYIEVWGKFTPRGGISIDPYCNYGKPGTRWEEVAFERLTHHDLYPEKVDNR

SEQ ID NO: 43782 - protein, 165 aa, Agathobaculum butyriciproducens
  misc_feature (1)..(165): tr|A0A3E2XYP9|A0A3E2XYP9_9FIRM NADPH-dependent 7-cyano- 7-deazaguanine reductase OS=Agathobaculum butyriciprodu cens OX=1628085 GN=queF PE=3 SV=1
MTGRKKEELNGVTLLGSQKNKYPSDYAPEMLETFPNKHPDNDYFVKFNCPEFTSLCPMTGQPDFATIYISYVPGERMVESKSLKLYLFSFRNHGDFHEDCVNIIMKDLIRLMDPKYIEVWGKFTPRGGISIDPYCNYGKPGTRWEEVAFERLTHHDLYPEKVDNR

SEQ ID NO: 43783 - protein, 279 aa, Aggregatibacter actinomycetemcomitans
  misc_feature (1)..(279): tr|G4A819|G4A819_AGGAC NADPH-dependent 7-cyano-7-deazag uanine reductase OS=Aggregatibacter actinomycetemcomita ns serotype e str. SC1083 OX=907488 GN=queF PE=3 SV=1
MHYQDPSLNALKLGQQTKYAEKYDRTLLQPVPRRLNRDTLGITQTQPFSIGTDIWTAYEISWLNPKGVPQVAIADVQIDFRSENLIESKSFKLYLNSFNQTKFADFAEVQHILQQDLQNCAKGEVKVRLNSLANYTNQPIVALHGDGIDGLDIDIEDYAFNADLLENCTNGDIVEETLVSHLLKSNCLITQQPDWGSLQIHYVGKQINREQLLRYIISFRQHNEFHEQCVERIFCDLMHYAKPEKLTVYARYTRRGGLDINPYRSNFEPLPPNLRLARQ

SEQ ID NO: 43784 - protein, 279 aa, Aggregatibacter actinomycetemcomitans
  misc_feature (1)..(279): tr|A0A142FXH7|A0A142FXH7_AGGAC NADPH-dependent 7-cyano- 7-deazaguanine reductase OS=Aggregatibacter actinomycet emcomitans OX=714 GN=queF PE=3 SV=1
MHYQDPSLNALKLGQQTKYAEKYDRTLLQPVPRHLNRDALGITQIQPFSIGADIWTAYEISWLNPKGVPQVAIADVQIDFCSGNLIESKSFKLYLNSFNQTKFADLADVQHILQQDLQDCAKGEVKVRLNSLVNYTAQPIAAFHGDCIDGLDIDIEDYAFNAEWLKGCTNSDIVEETLVSHLLKSNCLITHQPDWGSLQIHYVGKQINREQLLRYIISFRQHNEFHEQCVERIFCDLMHYAKPEKLTVYARYTRRGGLDINPYRSNFEPLPPNLRLARQ

SEQ ID NO: 43785 - protein, 279 aa, Aggregatibacter aphrophilus
  misc_feature (1)..(279): tr|A0A3S4U0I3|A0A3S4U0I3_AGGAP NADPH-dependent 7-cyano- 7-deazaguanine reductase OS=Aggregatibacter aphrophilus ATCC 33389 OX=985008 GN=queF PE=3 SV=1
MHYQDKSLNALKLGQQTKYAEKYDRTLLQPVPRHLNRDMLNITTTQPFTIGADIWTAYEISWLNQKGVPQVAIADVSIDFRSENLIESKSFKLYLNSFNQTQFANFNEVQQILQQDLQDCAKGEVKVRLNSLTDYTQQPIVALAGSCIDGLDIEIEDYAFNAELLKDCTNDNIVEETLVSHLLKSNCLITQQPDWGSLQIHYVGKQINREQLLRYIISFRKHNEFHEQCVERIFCDLMHFAAPEKLTVYARYTRRGGLDINPYRSNFEPLPPNLRLARQ

SEQ ID NO: 43786 - protein, 279 aa, Aggregatibacter aphrophilus
  misc_feature (1)..(279): tr|A0A3M6PFA3|A0A3M6PFA3_AGGAP NADPH-dependent 7-cyano- 7-deazaguanine reductase OS=Aggregatibacter aphrophilus OX=732 GN=queF PE=3 SV=1
MHYQDKSLNALKLGQQTKYAEKYDRTLLQPVPRHLNRDMLNITTTQPFTIGADIWTAYEISWLNPKGVPQVAIADVSIDFRSENLIESKSFKLYLNSFNQTQFANFDEVQQILQQDLQDCAKGEVKVRLNSLTDYTQQPIAALDGDCIDGLDIEIEDYAFNAELLKNCTSDNIIEETLVSHLLKSNCLITQQPDWGSLQIHYVGKQINREQLLRYIISFRQHNEFHEQCVERIFCDLMHFAAPEKLTVYARYTRRGGLDINPYRSNFEPLPPNLRLARQ

SEQ ID NO: 43787 - protein, 279 aa, Aggregatibacter segnis
  misc_feature (1)..(279): tr|A0A369Y471|A0A369Y471_9PAST NADPH-dependent 7-cyano- 7-deazaguanine reductase OS=Aggregatibacter segnis OX=7 39 GN=queF PE=3 SV=1
MHYQDPSLNALKLGQQTQYAEKYDRTLLQPVPRHLNRDTLGITQTQPFSIGADIWTAYEISWLNPKGVPQVAIADVQIDFCSENLIESKSFKLYLNSFNQTKFADAAEVQHILQQDLQDCAKGEVKVQLNSLADYTAQPIVALLGECIDELDIEIQDYAFNAELLKNCTGDNVVEETLVSHLLKSNCLITQQPDWGSLQIHYVGKQINREQLLRYIISFRQHNEFHEQCVERIFCDLMQYAKPEKLTVYARYTRRGGLDINPYRSNFEALPQNLRLARQ

SEQ ID NO: 43788 - protein, 287 aa, Aggregatibacter segnis
  misc_feature (1)..(287): tr|E6KXX5|E6KXX5_9PAST NADPH-dependent 7-cyano-7-deazag uanine reductase OS=Aggregatibacter segnis ATCC 33393 O X=888057 GN=queF PE=3 SV=1
MALAIRKTMHYQDPSLNALKLGQQTQYAEKYDRTLLQPVPRHLNRDTLGITQTQPFSIGADIWTAYEISWLNLKGVPQVAIADVQIDFCSENLIESKSFKLYLNSFNQTKFADAAEVQHILQQDLQDCAKGEVKVQLNSLANYTAQPIVALSGECIDELDIEIQDYAFNAELLKNCTGDNVVEETLVSHLLKSNCLITQQPDWGSLQIHYVGKQINREQLLRYIISFRQHNEFHEQCVERIFCDLMQYAKPEKLTVYARYTRRGGLDINPYRSNFEALPQNLRLARQ

SEQ ID NO: 43789 - protein, 295 aa, Aggregatibacter sp.
  misc_feature (1)..(295): tr|U1QY77|U1QY77_9PAST NADPH-dependent 7-cyano-7-deazag uanine reductase OS=Aggregatibacter sp. oral taxon 458 str. W10330 OX=1321772 GN=queF PE=3 SV=1
MASCQPYFNDKISKLPMHYQDKSLNALKLGQQTKYAEKYDRTLLQPVPRRLNRDQLNITATQPFTIGADIWTAYEISWLNPKGVPQVAIADVSIDFRSKNLIESKSFKLYLNSFNQTTFADFADVQQTLQRDLQDCAQGEANVRLNSLADYTAQPIVALSGDCIDAQDIEVRDYAFNAALLNHCTGDHLVEETLVSHLLKSNCLITQQPDWGSLQIHYVGKQINREQLLRYIISFRQHNEFHEQCVERIFCDLMQYAKPEKLTVYARYTRRGGLDINPYRSNFEPLPQNLRLARQ

SEQ ID NO: 43790 - protein, 271 aa, Agitococcus lubricus
  misc_feature (1)..(271): tr|A0A2T5IZ11|A0A2T5IZ11_9LACT 7-cyano-7-deazaguanine r eductase OS=Agitococcus lubricus OX=1077255 GN=C8N29_10 8137 PE=3 SV=1
MFGYQKTALGKDTEYYRDYRPQVLCPLPRQDGRAALGLIGDLPFQGVDIWHNYEASWLNAKGKPQVAIVQLTIPAQSPYLIESKSLKLYFNSLNFHRFDSAHAYSALVVKDLSQAAGAPVSLEFLAVDQRYQSQGLTGTCLDDLDISCDDYVLTDTHLALATPTTHVEETVYSHLLRSNCPVTNQPDWGSVRIHYRGQQLDHTALLRYLISFREHNDFHEQCVERIFVDIMRHCQPQCLTVQAYYTRRGGLDINPFRSTHEQAHFQRLIRQ

SEQ ID NO: 43791 - protein, 154 aa, Agrobacterium albertimagni
  misc_feature (1)..(154): tr|K2Q8I4|K2Q8I4_9RHIZ NADPH-dependent 7-cyano-7-deazag uanine reductase OS=Agrobacterium albertimagni AOL15 OX =1156935 GN=queF PE=3 SV=1
MSKTDTSGLTQLGQSVDAPTSPEAATLERVPNGNAGTDYVVRFTAPEFTSLCPMTGQPDFAHIVIDYIPGDWLVESKSLKLFLFSFRNHGAFHEDCSVYIAKRIVELLDPKWLRIGAYWYPRGGIPIDVFWQTGEPPKGVWLPEQGVATYRGRG

SEQ ID NO: 43792 - protein, 154 aa, Agrobacterium arsenijevicii
  misc_feature (1)..(154): tr|A0A0D8KQ30|A0A0D8KQ30_9RHIZ NADPH-dependent 7-cyano- 7-deazaguanine reductase OS=Agrobacterium arsenijevicii OX=1585697 GN=queF PE=3 SV=1
MSVTDVSSLSQLGTKVDTPESPEKAILEKVPNGNAGTDYVVRFTAPEFTSLCPMTGQPDFAHIVIDYIAGDFLVESKSLKLFLQSFRNHGAFHEDCSVYIARRLVELLQPKWLRIGAYWYPRGGIPIDVFWQTGPVPEGVWLPDQGVPTYRGRG

SEQ ID NO: 43793 - protein, 154 aa, Agrobacterium bohemicum
  misc_feature (1)..(154): tr|A0A135P380|A0A135P380_9RHIZ NADPH-dependent 7-cyano- 7-deazaguanine reductase OS=Agrobacterium bohemicum OX= 2052828 GN=queF PE=3 SV=1
MSVTDVSGLSQLGAQVASPESPEKAVLEKVPNGNAGTDYVVRFTAPEFTSLCPMTGQPDFAHIVIDYIPGDFLVESKSLKLFLHAFRNHGAFHEDCSIYIAKRLVDLLQPKWLRIGAYWYPRGGIPIDVFWQTGAPLQGVWLPEQGVATYRGRG

SEQ ID NO: 43794 - protein, 154 aa, Agrobacterium deltaense
  misc_feature (1)..(154): tr|A0A1S7TIR3|A0A1S7TIR3_9RHIZ NADPH-dependent 7-cyano- 7-deazaguanine reductase OS=Agrobacterium deltaense NCP PB 1641 OX=1183425 GN=queF PE=3 SV=1
MSVTDVSGLSQLGTKVDTPESPEKAVLEKVPNGNAGTDYVVRFTAPEFTSLCPMTGQPDFAHIVIDYIPGDFLVESKSLKLFLQSFRNHGAFHEDCSVYIARRLVELLQPKWLRIGAYWYPRGGIPIDVFWQTGPVPEGVWLPDQGVPTYRGRG

SEQ ID NO: 43795 - protein, 154 aa, Agrobacterium deltaense
  misc_feature (1)..(154): tr|A0A1S7NV85|A0A1S7NV85_9RHIZ NADPH-dependent 7-cyano- 7-deazaguanine reductase OS=Agrobacterium deltaense Zut ra 3/1 OX=1183427 GN=queF PE=3 SV=1
MSVTDVSGLSQLGTKVDTPESPEKAVLEKVPNGNAGTDYVVRFTAPEFTSLCPMTGQPDFAHIVIDYIPGDFLVESKSLKLFLQSFRNHGAFHEDCSVYIARRLVELLQPKWLRIGAYWYPRGGIPIDVFWQTGPAPEGVWLPDQGVPTYRGRG

SEQ ID NO: 43796 - protein, 154 aa, Agrobacterium fabrum
  misc_feature (1)..(154): tr|A0A1S7NP39|A0A1S7NP39_9RHIZ NADPH-dependent 7-cyano- 7-deazaguanine reductase OS=Agrobacterium fabrum str. J -07 OX=1183433 GN=queF PE=3 SV=1
MSVTDVSGLSQLGTKVDTPESPEKAVLEKVPNGNAGTDYVVRFTAPEFTSLCPMTGQPDFAHIVIDYIPGEFLVESKSLKLFLQSFRNHGAFHEDCSVYIAKRLVELLQPKWLRIGAYWYPRGGIPIDVFWQTGAAPEGVWLPDQGVAPYRGRG

SEQ ID NO: 43797 - protein, 154 aa, Agrobacterium fabrum
  misc_feature (1)..(154): sp|Q8UD54|QUEF_AGRFC NADPH-dependent 7-cyano-7-deazagua nine reductase OS=Agrobacterium fabrum (strain C58 / AT CC 33970) OX=176299 GN=queF PE=3 SV=2
MSVTDVSGLSQLGTKVDTPESPEKAVLEKVPNGNAGTDYVVRFTAPEFTSLCPMTGQPDFAHIVIDYIPGDFLVESKSLKLFLQSFRNHGAFHEDCSVYIAKRLVELLQPKWLRIGAYWYPRGGIPIDVFWQTGAAPEGVWLPDQGVAPYRGRG

SEQ ID NO: 43798 - protein, 154 aa, Agrobacterium genomosp.
  misc_feature (1)..(154): tr|A0A1S7NPZ0|A0A1S7NPZ0_9RHIZ NADPH-dependent 7-cyano- 7-deazaguanine reductase OS=Agrobacterium genomosp. 3 s tr. CFBP 6623 OX=1183432 GN=queF PE=3 SV=1
MSVTDVSSLSQLGTKVDTPESPEKAILEKVPNGNAGTDYVVRFTAPEFTSLCPMTGQPDFAHIVIDYIPGDFLVESKSLKLFLQSFRNHGAFHEDCSVYIAKRLVELLQPKWLRIGAYWYPRGGIPIDVFWQTGAAPEGVWLPDQGVAPYRGRG

SEQ ID NO: 43799 - protein, 154 aa, Agrobacterium genomosp.
  misc_feature (1)..(154): tr|A0A1S7PYQ8|A0A1S7PYQ8_9RHIZ NADPH-dependent 7-cyano- 7-deazaguanine reductase OS=Agrobacterium genomosp. 13 str. CFBP 6927 OX=1183428 GN=queF PE=3 SV=1
MSVTDVSGLSQLGTKVDTPESPEKAILEKVPNGNAGTDYVVRFTAPEFTSLCPMTGQPDFAHIVIDYIPGDFLVESKSLKLFLQSFRNHGAFHEDCSVYIAKRLVDLLQPKWLRIGAYWYPRGGIPIDVFWQTGAVPEGVWLPDQGVAPYRGRG

SEQ ID NO: 43800 - protein, 154 aa, Agrobacterium larrymoorei
  misc_feature (1)..(154): tr|A0A4D7DS80|A0A4D7DS80_9RHIZ NADPH-dependent 7-cyano- 7-deazaguanine reductase OS=Agrobacterium larrymoorei O X=160699 GN=queF PE=3 SV=1
MSVTDVSGLSQLGAQVASPENPESAVLEKVPNGNAGTDYVVRFTAPEFTSLCPMTGQPDFAHIVIDYIPGDFLVESKSLKLFLHSFRNHGAFHEDCSVYIAKRLVELLAPKWLRIGAYWYPRGGIPIDVFWQTGPAPEGVWLPDQGVATYRGRG

SEQ ID NO: 43801 - protein, 154 aa, Agrobacterium radiobacter
  misc_feature (1)..(154): tr|W1LDR3|W1LDR3_RHIRD NADPH-dependent 7-cyano-7-deazag uanine reductase OS=Agrobacterium radiobacter DSM 30147 OX=1336745 GN=queF PE=3 SV=1
MSVTDVSGLSQLGTKVDTPESPEKAVLEKVPNGNAGTDYVVRFTAPEFTSLCPMTGQPDFAHIVIDYIAGDFLVESKSLKLFLQSFRNHGAFHEDCSVYIAKRLVELLQPKWLRIGAYWYPRGGIPIDVFWQTGPVPEGVWLPDQGVPTYRGRG

SEQ ID NO: 43802 - protein, 154 aa, Agrobacterium radiobacter
  misc_feature (1)..(154): sp|B9J7E0|QUEF_AGRRK NADPH-dependent 7-cyano-7-deazagua nine reductase OS=Agrobacterium radiobacter (strain K84 / ATCC BAA-868) OX=311403 GN=queF PE=3 SV=1
MPKTDVSGLSMLGNQTETAANPEVAVLEKVPAGYAGTDYVVRFTAPEFTSLCPMTGQPDFAHIVIDYVPNEWLVESKSLKLFLHSFRNHGAFHEDCSIYIAKRLVELLEPKWLRIGAYWYPRGGIPIDVFWQTGKPPEGVWLPDQGVQPYRGRG

SEQ ID NO: 43803 - protein, 154 aa, Agrobacterium rhizogenes
  misc_feature (1)..(154): tr|A0A2T7VJU0|A0A2T7VJU0_AGRRH NADPH-dependent 7-cyano- 7-deazaguanine reductase OS=Agrobacterium rhizogenes OX =359 GN=queF PE=3 SV=1
MSVTDVSGLSQLGAQVAAPENPESAVLERVPNGNAGTDYVVRFTAPEFTSLCPMTGQPDFAHIVIDYIPGDFLVESKSLKLFLHSFRNHGAFHEDCSIYIAKRLVDLLAPKWLRIGAYWYPRGGIPIDVFWQTGPAPEGVWLPDQGVATYRGRG

SEQ ID NO: 43804 - protein, 154 aa, Agrobacterium rhizogenes
  misc_feature (1)..(154): tr|A0A546XLB0|A0A546XLB0_AGRRH NADPH-dependent 7-cyano- 7-deazaguanine reductase OS=Agrobacterium rhizogenes OX =359 GN=queF PE=3 SV=1
MSVTDVSGLSQLGTKVDTPESPEKAILEKVPNGNAGTDYVVRFTAPEFTSLCPMTGQPDFAHIVIDYIPGDFLVESKSLKLFLQSFRNHGAFHEDCSVYIAKRLVELLQPKWLRIGAYWYPRGGIPIDVFWQTGAAPEGVWLPDQGVPTYRGRG

SEQ ID NO: 43805 - protein, 154 aa, Agrobacterium rosae
  misc_feature (1)..(154): tr|A0A2S4EHQ1|A0A2S4EHQ1_9RHIZ NADPH-dependent 7-cyano- 7-deazaguanine reductase OS=Agrobacterium rosae OX=1972 867 GN=queF PE=3 SV=1
MSVTDVSGLSQLGAQVAAPESPEKAVLEKVPNGNAGTDYVVRFTAPEFTSLCPMTGQPDFAHIVIDYIPGDFLVESKSLKLFLHAFRNHGAFHEDCSVYIAKRLVDLLAPKWLRIGAYWYPRGGIPIDVFWQTGAPPEGVWLPDQGVATYRGRG

SEQ ID NO: 43806 - protein, 154 aa, Agrobacterium rubi
  misc_feature (1)..(154): tr|A0A1B9U233|A0A1B9U233_9RHIZ NADPH-dependent 7-cyano- 7-deazaguanine reductase OS=Agrobacterium rubi OX=28099 GN=queF PE=3 SV=1
MSVTDVSGLSQLGAQVASPESPEKAVLEKVPNGNAGTDYVVRFTAPEFTSLCPMTGQPDFAHIVIDYIPGDSLVESKSLKLFLHAFRNHGAFHEDCSVYIAKRLVELLAPKWLRIGAYWYPRGGIPIDVFWQTGAPPEGVWLPEQGVATYRGRG

SEQ ID NO: 43807 - protein, 154 aa, Agrobacterium rubi
  misc_feature (1)..(154): tr|A0A081CQW3|A0A081CQW3_9RHIZ NADPH-dependent 7-cyano- 7-deazaguanine reductase OS=Agrobacterium rubi TR3 = NB RC 13261 OX=1368415 GN=queF PE=3 SV=1
MSVTDVSGLSQLGAQVASPESPEKAVLEKVPNGNAGTDYVVRFTAPEFTSLCPMTGQPDFAHIVIDYIPGDFLVESKSLKLFLHAFRNHGAFHEDCSVYIAKRLVELLAPKWLRIGAYWYPRGGIPIDVFWQTGAPPEGVWLPEQGVATYRGRG

SEQ ID NO: 43808 - protein, 154 aa, Agrobacterium salinitolerans
  misc_feature (1)..(154): tr|A0A546X8R8|A0A546X8R8_9RHIZ NADPH-dependent 7-cyano- 7-deazaguanine reductase OS=Agrobacterium salinitoleran s OX=1183413 GN=queF PE=3 SV=1
MSVTDVSGLSQLGTKVDTPESPEKAVLEKVPNGNAGTDYVVRFTAPEFTSLCPMTGQPDFAHIVIDYIPGDFLVESKSLKLFLQSFRNHGAFHEDCSVYIAKRLVELLQPKWLRIGAYWYPRGGIPIDVFWQTGPAPEGLWLPDQGVPTYRGRG

SEQ ID NO: 43809 - protein, 154 aa, Agrobacterium salinitolerans
  misc_feature (1)..(154): tr|A0A1S7U3D0|A0A1S7U3D0_9RHIZ NADPH-dependent 7-cyano- 7-deazaguanine reductase OS=Agrobacterium salinitoleran s str. Hayward 0363 OX=1183434 GN=queF PE=3 SV=1
MSVTDVSGLSQLGTKVDTPESPEKAVLEKVPNGNAGTDYVVRFTAPEFTSLCPMTGQPDFAHIVIDYIPGDFLVESKSLKLFLQSFRNHGAFHEDCSVFIAKRLVELLQPKWLRIGAYWYPRGGIPIDVFWQTGPAPEGVWLPDQGVSTYRGRG

SEQ ID NO: 43810 - protein, 154 aa, Agrobacterium sp.
  misc_feature (1)..(154): tr|A0A3R9CGW3|A0A3R9CGW3_9RHIZ NADPH-dependent 7-cyano- 7-deazaguanine reductase OS=Agrobacterium sp. FDAARGOS_ 525 OX=2420311 GN=queF PE=3 SV=1
MSVTDVSGLSQLGTKVDTPESPEKAVLEKVPNGNAGTDYVVRFTAPEFTSLCPMTGQPDFAHIVIDYIPGDFLVESKSLKLFLQSFRNHGAFHEDCSVYIAKRLVELLQPKWLRIGAYWYPRGGIPIDVFWQTGPAPEGVWLPDQGVATYRGRG

SEQ ID NO: 43811 - protein, 154 aa, Agrobacterium sp.; identical to SEQ ID NO: 43810
  misc_feature (1)..(154): tr|A0A349XVZ2|A0A349XVZ2_AGRSP NADPH-dependent 7-cyano- 7-deazaguanine reductase OS=Agrobacterium sp. OX=361 GN =queF PE=3 SV=1

SEQ ID NO: 43812 - protein, 154 aa, Agrobacterium tumefaciens; identical to SEQ ID NO: 43810
  misc_feature (1)..(154): tr|A0A1S7NY14|A0A1S7NY14_RHIRD NADPH-dependent 7-cyano- 7-deazaguanine reductase OS=Agrobacterium tumefaciens s tr. Kerr 14 OX=1183424 GN=queF PE=3 SV=1

SEQ ID NO: 43813 - protein, 154 aa, Agrobacterium tumefaciens
  misc_feature (1)..(154): tr|H0H7S6|H0H7S6_RHIRD NADPH-dependent 7-cyano-7-deazag uanine reductase OS=Agrobacterium tumefaciens 5A OX=110 7544 GN=queF PE=3 SV=1
MSVTDVSSLSQLGAKVDMPESPEKAILEKVPNGNAGTDYVVRFTAPEFTSLCPMTGQPDFAHIVIDYIAGDFLVESKSLKLFLQSFRNHGAFHEDCSVYIARRLVELLQPKWLRIGAYWYPRGGIPIDVFWQTGPVPEGVWLPDQGVPTYRGRG

SEQ ID NO: 43814 - protein, 154 aa, Agrobacterium vitis
  misc_feature (1)..(154): tr|A0A1S2DSG2|A0A1S2DSG2_AGRVI NADPH-dependent 7-cyano- 7-deazaguanine reductase OS=Agrobacterium vitis OX=373 GN=queF PE=3 SV=1
MSKTDVSGLSQLGRQVDAPTSPETAVLERVPNTNAGTDYVVRFTAPEFTSLCPMTGQPDFAHIVIDYIPGDFLVESKSLKLFMTSFRNHGSFHEDCSIYIAKRLVELLDPKWLRIGAYWYPRGGIPIDVFWQTGEAPKGVWLPDQGVPTYRGRG

SEQ ID NO: 43815 - protein, 154 aa, Agrobacterium vitis
  misc_feature (1)..(154): tr|A0A368NK40|A0A368NK40_AGRVI NADPH-dependent 7-cyano- 7-deazaguanine reductase OS=Agrobacterium vitis OX=373 GN=queF PE=3 SV=1
MSKTDVSGLSQLGRQVDAPTSPESAVLERVPNTNAGTDYVVRFTAPEFTSLCPMTGQPDFAHIVIDYIPGDFLVESKSLKLFMTSFRNHGSFHEDCSIYIAKRLVELLDPKWLRIGAYWYPRGGIPIDVFWQTGEAPTGVWLPDQGVPTYRGRG

SEQ ID NO: 43816 - protein, 275 aa, Agromyces sp.
  misc_feature (1)..(275): tr|A0A542JSI7|A0A542JSI7_9PSED NADPH-dependent 7-cyano- 7-deazaguanine reductase OS=Agromyces sp. SLBN-50 OX=74 4977 GN=queF PE=3 SV=1
MQHPAEHSPLGKSSEYVSQYAPELLFPISRTTKWAELGLETGKLPYQGMDYWNCYELSWLTPSGKPVVAIGEFAIPADSPNIIESKSFKLYLNSLNQSAYADAAEVERLLARDLSACAGAPVAVRVRGLDEVAAEGVAALPGRCIDALEIAVSDYAHPRPELLRCADEVVEETLYSHLLKSNCPVTGQPDWGTLVVDYRGPRLDAASLLAYVVSFRQHQDFHEQCVERVFLDLQRLLQPERLTVYARYVRRGGLDINPYRSTEAIAPDNRRLVRQ

SEQ ID NO: 43817 - protein, 129 aa, Ahniella affigens
  misc_feature (1)..(129): tr|A0A2P1PQJ5|A0A2P1PQJ5_9GAMM NADPH-dependent 7-cyano- 7-deazaguanine reductase OS=Ahniella affigens OX=202123 4 GN=queF PE=3 SV=1
MSTKPSKTLETFPNPEPKRDYTIRMRIPEFTCLCPKTGQPDFATMHLEYIPDKTCVELKSLKLYMWSFREEGAFHEAVTNKILEDLAKATKPRFMRLTAEWYVRGGIYTTVVAEHAAKGFKPKPKIELP

SEQ ID NO: 43818 - protein, 152 aa, Ahrensia sp.
  misc_feature (1)..(152): tr|A0A2E2RMK5|A0A2E2RMK5_9RHOB NADPH-dependent 7-cyano- 7-deazaguanine reductase OS=Ahrensia sp. OX=1872419 GN= queF PE=3 SV=1
MDPDIHTTQLGKAVEIPQSPEEAVLERVPNPHADTNYVARFVAPEFTSICPVTGQPDFAHLVIDYVPDQWLFESKSLKLFLTSFRNHGAFHEDCTVGIGKRLVDLLEPRWFRIGGYWYPRGGIPIDVFWQHGTLPEGVWAPDQGVAPYRGRG

SEQ ID NO: 43819 - protein, 279 aa, Aidingimonas halophila
  misc_feature (1)..(279): tr|A0A1H3EP94|A0A1H3EP94_9GAMM NADPH-dependent 7-cyano- 7-deazaguanine reductase OS=Aidingimonas halophila OX=5 74349 GN=queF PE=3 SV=1
MSSQDRPDSLHNAPLGQASDYPAHYDAGLLYPIARETSRAALDLDGKPLPFIGADEWTAFELSWLDRRGKPRVAIARFTLPATSRYLIESKSWKLYLNSFNQTAFDDAKAVHDTLVRDLTAAAGASVAVELFDVDDESLGTRRLPGECLDGLDIDIRDYTPNPTLLSAGKDTVEESLHSHLLKSNCPVTGQPDWGSVLIRYRGPRLDREGLLRYLVSYRQHQDFHEHCVERIFCDLMTQARPARLFVLARYVRRGGLDINPWRATPGEAPPASLRLARQ

SEQ ID NO: 43820 - protein, 135 aa, Akkermansia glycaniphila
  misc_feature (1)..(135): tr|A0A1C7PC19|A0A1C7PC19_9BACT NADPH-dependent 7-cyano- 7-deazaguanine reductase OS=Akkermansia glycaniphila OX =1679444 GN=queF PE=3 SV=1
MSDLTLLGQHSSFFTSPDDAKLEAFPNRSPQRAYTIVLDTHEFSSLCPVTGQPDSCHLTITYSPAEHCVETKSLKYYLAAYRNYPAFNEQIVNRILDDLIAAIHPAWMKIEGRFGARGGIQLTTIAEHQPENRPL

SEQ ID NO: 43821 - protein, 135 aa, Akkermansia muciniphila
  misc_feature (1)..(135): tr|A0A2N8HGZ1|A0A2N8HGZ1_9BACT NADPH-dependent 7-cyano- 7-deazaguanine reductase OS=Akkermansia muciniphila OX= 239935 GN=queF PE=3 SV=1
MSEPLTLLGSQSSFFTSPDDAKLESFPNRGTRPYTITLDTHEFSSLCPVTGQPDSCHLVITYVPDEKCVETKSLKYYLASYRNYPAFNEQIVNRITDDLVAAISPRWLKVEGRFSPRGGIQLTAMAEHNPENRPL

SEQ ID NO: 43822 - protein, 131 aa, Akkermansia muciniphila
  misc_feature (1)..(131): tr|A0A2N8IT67|A0A2N8IT67_9BACT NADPH-dependent 7-cyano- 7-deazaguanine reductase OS=Akkermansia muciniphila OX= 239935 GN=queF PE=3 SV=1
MTLLGSQSSFFTNPDDARLESFPNRGTRPYTITLDTHEFSSLCPVTGQPDSCHLTITYVPAEKCVETKSLKYYLASYRNYPAFNEQIVNRITDDLVAAISPRWLKVEGRFSPRGGIQLTATAEHNPENRPL

SEQ ID NO: 43823 - protein, 135 aa, Akkermansia sp.
  misc_feature (1)..(135): tr|A0A5B6C6K7|A0A5B6C6K7_9BACT NADPH-dependent 7-cyano- 7-deazaguanine reductase OS=Akkermansia sp. BIOML-A33 O X=2584589 GN=queF PE=3 SV=1
MSDNLTLLGSQSSFFTSPDDAKLESFPNRGTRPYTIMLDTHEFSSLCPVTGQPDSCHLTITYVPDGHCVETKSLKYYLASYRNYPAFNEQIVNRITDDLVAAISPRWLKVEGRFSPRGGIQLTAMAEHNPENRPL

SEQ ID NO: 43824 - protein, 135 aa, Akkermansia sp.; identical to SEQ ID NO: 43823
  misc_feature (1)..(135): tr|A0A5B6HLF2|A0A5B6HLF2_9BACT NADPH-dependent 7-cyano- 7-deazaguanine reductase OS=Akkermansia sp. BIOML-A3 OX =2584559 GN=queF PE=3 SV=1

SEQ ID NO: 43825 - protein, 285 aa, Albidiferax sp.
  misc_feature (1)..(285): tr|A0A1H0W3M8|A0A1H0W3M8_9BURK NADPH-dependent 7-cyano- 7-deazaguanine reductase OS=Albidiferax sp. OV413 OX=18 55285 GN=queF PE=3 SV=1
MASPNTPEQSQLGKSSAYIDQYDASLLFPIPRAVKRAEIGLADKAAPFFGADLWTAFELSWLNLRGKPQVALAHITVPCETPNIVESKSFKLYLNSFNNTRFADAAMVQARIRADISEAAWRGSDTPSSVGVRILLPEMFDREPVHELDGLSLDRLDMDFDTYSPDPSLLSAALDEAPVSEVLTSNLLKSNCLVTGQPDWGSVQISYSGPQIDQAGLLKYLVSFRNHNEFHEQCVERIFMELWTRCKPIKLSVYARYTRRGGLDINPYRTSHPGALPGNIRTARQ

SEQ ID NO: 43826 - protein, 154 aa, Albidovulum inexpectatum
  misc_feature (1)..(154): tr|A0A2S5JLT1|A0A2S5JLT1_9RHOB NADPH-dependent 7-cyano- 7-deazaguanine reductase OS=Albidovulum inexpectatum OX =196587 GN=queF PE=3 SV=1
MAKTDVSGLTQLGAKAEMPKSPEEAILEKVPASNSGLNYVVRFTAPEFTSLCPLTGQPDFAHIVIDYIPGEWLVESKSLKLFLHSFRNHGAFHEDCTIEIAKRLVDLLNPVWLRIGAYWYPRGGIPIDVFWQTGSAPEGAWIPDQGVAPYRGRG

SEQ ID NO: 43827 - protein, 153 aa, Albimonas donghaensis
  misc_feature (1)..(153): tr|A0A1H2WLW6|A0A1H2WLW6_9RHOB NADPH-dependent 7-cyano- 7-deazaguanine reductase OS=Albimonas donghaensis OX=35 6660 GN=queF PE=3 SV=1
MTDDLAAITTLGQAAEQPASPEEARLDPVPNPQRGELFLARFVAPEFTSLCPVTGQPDFAHLVIDYAPDEFLIESKSLKLFLTSFRNHGAFHEDCTVSIGKRIAAVAKPTWIRIAGYWYPRGGIPIDVFWQSGPAPEGLWVPDTGVAPYRGRG

SEQ ID NO: 43828 - protein, 152 aa, Albimonas pacifica
  misc_feature (1)..(152): tr|A0A1I3F6C7|A0A1I3F6C7_9RHOB NADPH-dependent 7-cyano- 7-deazaguanine reductase OS=Albimonas pacifica OX=11149 24 GN=queF PE=3 SV=1
MPELSEITTLGRTVETPASPEAAVIDVVPNPQQGTLFAARFVAPEFTSLCPVTGQPDFGHLVIDYAPDASLIESKSLKLFLTSFRNHGAFHEDCTVGIGRRLAEAAKPLWLRIGGYWYPRGGIPIDVFWQTGAPPEGLWLPDQGVPPYRGRG

SEQ ID NO: 43829 - protein, 282 aa, Alcaligenaceae bacterium
  misc_feature (1)..(282): tr|A0A354K3H3|A0A354K3H3_9BURK NADPH-dependent 7-cyano- 7-deazaguanine reductase OS=Alcaligenaceae bacterium OX =2021368 GN=queF PE=3 SV=1
MTDFLQHAPLGQTVLYPSQYDAGLLFPIPRAEARSQIGIAGSALPFTGWDLWNAYEMSWLNAKGLPQVGILRARVPLDSANIIESKSFKLYLNSFNQTRFDHPQAVIDLLTKDLSDAAAGTVEIDLIGPERFGLEIFGEFDGINLDLQDVEIDQYQTDPTLLELDRHPKSNEAGHVTEQLFSRLLKSNCPVTGQPDWACVQIIYSGKPIDHAGLLKYIVSFRMHSGFHENCVERIFSDIMNRCAPATLSVFARYTRRGGLDINPWRATPGMPAPQWRRSARQ

SEQ ID NO: 43830 - protein, 274 aa, Alcaligenaceae bacterium
  misc_feature (1)..(274): tr|A0A2D8B6Y7|A0A2D8B6Y7_9BURK NADPH-dependent 7-cyano- 7-deazaguanine reductase OS=Alcaligenaceae bacterium OX =2021368 GN=queF PE=3 SV=1
MSSSSLDQAPLGRDVAYPAHYDPSILFPVNRETNRAQLPFIPNWAGADIWHAYEVSWLNARGKPIVAMARFIVPHNSPNIIESKSFKLYLNSFNESRFNSMNHVQQRLEKDLSAVAGAHIEVALTDLHDIQTIQCAPLEGLNIDDADVDIEHYQPNAGLLKCTTNPQPVNETLTSDLLKSNCPVTGQPDWGSLQIQYQGPQIDRESLLKYIVSLRQHAEFHEHCVEKIYCDIWQACQPEFLFVYACYTRRGGLDINPWRSSGPLVFEPARTPRQ

SEQ ID NO: 43831 - protein, 275 aa, Alcaligenes aquatilis
  misc_feature (1)..(275): tr|A0A427M0Z1|A0A427M0Z1_9BURK NADPH-dependent 7-cyano- 7-deazaguanine reductase OS=Alcaligenes aquatilis OX=32 3284 GN=queF PE=3 SV=1
MSNTSPLKDSPLGHDVVYPTRYDPSVLFGIERSLNRQTLRVPEQWHGADIWNGYEISWLNPKGKPVVALARFVIPWNSPRIVESKSFKLYLNSFNDELVEDIASLVQRMEQDLSAVAGAAVNVTLIPLSALNGQPIAQLEGHCIDELDISIQDYTPQSGLLKCLPDAPIVTESLVSDLLKSNCPVTGQPDWGSVQVRYTGPQIDPASLLRYIVSLRRHTEFHEHCVERLYSDIQQSCQPERLLVYARYTRRGGLDINPWRSSHADSVQEPRLARQ

SEQ ID NO: 43832 - protein, 275 aa, Alcaligenes aquatilis
  misc_feature (1)..(275): tr|A0A3G2HX22|A0A3G2HX22_9BURK NADPH-dependent 7-cyano- 7-deazaguanine reductase OS=Alcaligenes aquatilis OX=32 3284 GN=queF PE=3 SV=1
MSNTSPLKDSPLGHDVVYPTRYDPSVLFGIERSLNRQTLRVPEQWHGADIWNGYEISWLNPKGKPVVALARFVIPWNSPRIVESKSFKLYLNSFNDELVEDIASLVQRMEQDLSAVAGAAVNVTLIPLSALTGQPIAQLEGHCIDELDISIQDYTPQSGLLQCLPDAPIVTESLVSDLLKSNCPVTGQPDWGSVQVRYTGPQIDPASLLRYIVSLRRHTEFHEHCVERLYSDIQQSCQPERLLVYARYTRRGGLDINPWRSSHADSVQEPRLARQ

SEQ ID NO: 43833 - protein, 275 aa, Alcaligenes faecalis
  misc_feature (1)..(275): tr|A0A2U2BNZ2|A0A2U2BNZ2_ALCFA NADPH-dependent 7-cyano- 7-deazaguanine reductase OS=Alcaligenes faecalis OX=511 GN=queF PE=3 SV=1
MSNTSPLKDSPLGHDVVYPTQYDPSVLFGIERSLNRQTLQVPEQWHGADIWNGYEISWLNPKGKPVVALARFVIPWNSPRIIESKSFKLYLNSFNDEVVEDMASLVQRMEHDLSAVAGAAVNVTLIPLGALNGQPISQLEGHCIDELDISIQDYTPQSGLLKCLPNAPIVTESLVSDLLKSNCPVTGQPDWGSVQVRYTGPQIDPASLLRYIVSLRRHTEFHEHCVERLYSDILQSCQPERLLVYARYTRRGGLDINPWRSSHTDSVDEPRLARQ

SEQ ID NO: 43834 - protein, 275 aa, Alcaligenes faecalis
  misc_feature (1)..(275): tr|A0A4P8JGH1|A0A4P8JGH1_ALCFA NADPH-dependent 7-cyano- 7-deazaguanine reductase OS=Alcaligenes faecalis OX=511 GN=queF PE=3 SV=1
MSNNSPLKDSPLGHDVVYPTQYDPSVLFGIERSLNRQALQLPEQWHGADIWNGYEMSWLNPKGKPVVALARFVIPWNSPRIIESKSFKLYLNSFNDEVVEDMASFVQRMEQDLSVVAGAAVNVTLIPLKALNGQPIRQLEGHCIDELDISIQDYTPQSGLLQCLPDAPIVTESLVSDLLKSNCPVTGQPDWGSVQVRYTGPQIDPASLLRYIVSLRRHTEFHEHCVERLYSDIQQSCKPERLLVYARYTRRGGLDINPWRSSHADSVEEPRLARQ

SEQ ID NO: 43835 - protein, 275 aa, Alcaligenes sp.
  misc_feature (1)..(275): tr|U1XXJ7|U1XXJ7_9BURK NADPH-dependent 7-cyano-7-deazag uanine reductase OS=Alcaligenes sp. EGD-AK7 OX=1386079 GN=queF PE=3 SV=1
MSNNSPLKDSPLGHDVVYPTQYDPSVLFGIERSLNRQALQLPEQWHGADIWNGYEISWLNPKGKPVVALARFVIPWNSPRIIESKSFKLYLNSFNDEVVEDVASLVQRMEQDLSAVAGAAVNVTLIPLKALNGQPIRQLEGHCIDELDISIQDYTPQSGLLQCLPDAPIVTESLVSDLLKSNCPVTGQPDWGSVQVRYTGLQIDPASLLRYIVSLRRHTEFHEHCVERLYSDIQQSCQPERLLVYARYTRRGGLDINPWRSSHADSVDEPRLARQ

SEQ ID NO: 43836 - protein, 274 aa, Alcaligenes xylosoxydans
  misc_feature (1)..(274): tr|A0A0M7LZ69|A0A0M7LZ69_ALCXX NADPH-dependent 7-cyano- 7-deazaguanine reductase OS=Alcaligenes xylosoxydans xy losoxydans OX=85698 GN=queF PE=3 SV=1
MTLSHGPLGQSVTYVSQYDPSLLFPIARAHNREALNLATGPLPFIGVDLWNAYELSWLDAKGKPRVAMATFSVPADSPNIIESKSFKLYLNSFNQTRLVNSAALRGRLERDLSAAAGAPVGLDFILPQRFGELRMGELDGIYIDKLDIEIDTYEPAPELLRNRPGDVVEETLCSRLLKSNCPVTGQPDWASVQIRYRGQPIDRESLLRYVISFRQHAEFHEHCVERIFTDIMQACAPEQLTVYARYTRRGGLDINPWRSNVETTPPADVRTVRQ

SEQ ID NO: 43837 - protein, 274 aa, Alcaligenes xylosoxydans
  misc_feature (1)..(274): tr|A0A5C2NFV5|A0A5C2NFV5_ALCXX NADPH-dependent 7-cyano- 7-deazaguanine reductase OS=Alcaligenes xylosoxydans xy losoxydans OX=85698 GN=queF PE=3 SV=1
MTLSHGPLGQSVTYVSQYDPSLLFPIARAHNREALNLATGPLPFTGVDLWNAYELSWLDAKGKPRVAMATFSVPADSPNIIESKSFKLYLNSFNQTRLVNSAALRGRLERDLSAAAGAPVGLDFILPQRFGELRMGELDGIYIDKLDIEIDTYEPAPELLRNRPGDVVEETLCSRLLKSNCPVTGQPDWASVQIRYRGQPIDRESLLRYVVSFRQHAEFHEHCVERIFTDIMQACAPEQLTVYARYTRRGGLDINPWRSNVETAPPADVRTVRQ

SEQ ID NO: 43838 - protein, 274 aa, Alcanivoracaceae bacterium
  misc_feature (1)..(274): tr|A0A2E2DI19|A0A2E2DI19_9GAMM NADPH-dependent 7-cyano- 7-deazaguanine reductase OS=Alcanivoracaceae bacterium OX=2024895 GN=queF PE=3 SV=1
MSYLKETPLGRSSEYVDEYTPSLLCPVPRWDARESLELEDTSLPFHGTDIWNAYELSWLNEKGKPIVAMCELRIPCTTPNIVESKSLKLYLNSFANSRFDDRDKVRAAIEKDVAQTVGGNIEVLLYSLEESAGFPTWEDRGECVDNIDLNFEHYEYNPELLLCDQGAEQTGQLYSHLLRSHCPVTNQPDWATVVIRYTGRAISPASFLRYVVSLRNHQGFHEQIIEQMFVDLMSQCSPRHLTVYGRFTRRGGIDINPFRSNSEQPLPNRRTIRQ

SEQ ID NO: 43839 - protein, 273 aa, Alcanivoracaceae bacterium
  misc_feature (1)..(273): tr|A0A3L8B2C1|A0A3L8B2C1_9GAMM NADPH-dependent 7-cyano- 7-deazaguanine reductase OS=Alcanivoracaceae bacterium GenoA1_TS13_700 OX=2072747 GN=queF PE=3 SV=1
MTEQQHGPLGVASTYPDQYDPAQLHAIARAAGREAIGVDDGPLPFYGEDIWNAYELSWLNEKGKPMVAMMELRVPFDSPNIVESKSFKLYLGSFNQWPVQSPQALAHIIERDVSDVVGAPVSVELTPLFQSGGFALATLPGKCIDDLDVDVAVYEVDADLLLTLEGDTSEAYHSHLLRSCCPVTGQPDWASVVIEYQGTKICEEGLLKYLISFRNNQEFHEQCVERIFMDISRQCAPERLTVYARYTRRGGIDINPVRSSEPVQQANLRLIRQ

SEQ ID NO: 43840 - protein, 274 aa, Alcanivorax borkumensis
  misc_feature (1)..(274): sp|Q0VR70|QUEF_ALCBS NADPH-dependent 7-cyano-7-deazagua nine reductase OS=Alcanivorax borkumensis (strain ATCC 700651 / DSM 11573 / NCIMB 13689 / SK2) OX=393595 GN=qu eF PE=3 SV=1
MSYLKETPLGRSSEYVDQYMPSLLCPVPRWDAREGLELESATLPFHGSDIWNAYELSWLNEKGKPIVAMCELRVPCTTPNIVESKSLKLYLNSFANTRFQSRDAVRAAIEKDVAQTAGGNIEVLLFSLQESAGFPVWEDRGDCVDNIDLNFEHYEYRPDLLLCDQGPEQTGQLYSHLLRSHCPVTDQPDWATVVVRYTGRAISPASFLRYVVSLRNHQGFHEQIIEQMFVDLMTQCSPRHLTVYGRFTRRGGIDINPFRSNSEQPLPNRRTIRQ

SEQ ID NO: 43841 - protein, 273 aa, Alcanivorax dieselolei
  misc_feature (1)..(273): tr|K0CDY1|K0CDY1_ALCDB NADPH-dependent 7-cyano-7-deazag uanine reductase OS=Alcanivorax dieselolei (strain DSM 16502 / CGMCC 1.3690 / B-5) OX=930169 GN=queF PE=3 SV=1
MSYLQDAPLGQTSEYVDQYAPELLYPVPRALARESLALTGTLPFRGEDLWTGYELSWLEQGGKPRVALVEVRVPCTSDNIIESKSLKLYLNSFANSRYADADSVREIITADLGEVAGEAVTVRIWSLEEAAAQSVWHSDGVCVDELDLTIDTFEYNPALLTTTTGEVHQGELYSHLLRSHCPVTNQPDWGTVVVRYEGAPIDPGGFLRYVVSLRNHQGFHEQIVEQMFVDLQRQCAPAKLSVLGRFTRRGGLDINPFRSNFEPAPANRRTIRQ

SEQ ID NO: 43842 - protein, 274 aa, Alcanivorax hongdengensis
  misc_feature (1)..(274): tr|L0WAM5|L0WAM5_9GAMM NADPH-dependent 7-cyano-7-deazag uanine reductase OS=Alcanivorax hongdengensis A-11-3 OX =1177179 GN=queF PE=3 SV=1
MSYLKDTPLGRTSEYSDEYMPALLCPVPRWDARESLELDDTNLPFHGSDLWTAYELSWLNEKGKPLVALAELRIPCFSPNIVESKSLKLYLNSFANSRFDSQDAVRTAIEKDVSQIVGVPIEVLIFSLADAANIPPWEDRGQCVDTLDVGFEHYDYRPELLLADQGAEQNGQLYSHLLRSHCPVTNQPDWATVVVRYTGRAISPASFLRYVVSLRNHQGFHEQIIEQMYMDLMRQCQPRHLTVYGRFTRRGGIDINPFRSNFEQALPNRRTVRQ

SEQ ID NO: 43843 - protein, 279 aa, Alcanivorax jadensis
  misc_feature (1)..(279): tr|A0A095TGV4|A0A095TGV4_9GAMM NADPH-dependent 7-cyano- 7-deazaguanine reductase OS=Alcanivorax jadensis T9 OX= 1177181 GN=queF PE=3 SV=1
MSYLKETPLGRSTDYVDEYTPSLLCPVPRWDARESLELEALGDEDTSLPFHGTDIWNAYELSWLNEKGKPVVALCELRIPCTTPNIVESKSLKLYLNSFANTRFENRDQVRAAIEKDVAQTVGGNMEVLLHSLEESAGFPVWEDRGQCVDNIDIGFEHYEYRPDLLLCDQGAEQTGQLYSHLLRSHCPVTNQPDWATVVVRYTGRAISPASFLRYVVSLRNHQGFHEQIIEQMFVDLMRQCSPRHLTVYGRFTRRGGIDINPFRSNSEQPLPNRRTIRQ

SEQ ID NO: 43844 - protein, 274 aa, Alcanivorax nanhaiticus
  misc_feature (1)..(274): tr|A0A095UVV2|A0A095UVV2_9GAMM NADPH-dependent 7-cyano- 7-deazaguanine reductase OS=Alcanivorax nanhaiticus OX= 1177154 GN=queF PE=3 SV=1
MSYLKDTPLGRSSDYVDEYTPALLCPVPRWDARESLELEDTALPFHGTDIWNAYELSWLTEKGKPVVAMCELRIPCTTPNIVESKSLKLYLNSFANTRFEKREEVRAAIEKDVAHVVGGDIEVLLFSLEDAATLPLWEDKGQCVDTIDLNFEHYNYNPELLLCDQGPEQTGQLYSHLLRSHCPVTNQPDWATVVVRYTGRAISPASFLRYVVSLRNHQGFHEQIIEQMFVDLMAQCSPRHLTVYGRFTRRGGIDINPFRSNSEQALPNRRTVRQ

SEQ ID NO: 43845 - protein, 275 aa, Alcanivorax pacificus
  misc_feature (1)..(275): tr|A0A0B4XMT4|A0A0B4XMT4_9GAMM NADPH-dependent 7-cyano- 7-deazaguanine reductase OS=Alcanivorax pacificus W11-5 OX=391936 GN=queF PE=3 SV=1
MGNPFSDTPLGRKTDYLDQYTPSLLCPIPRWDAREALEMADAHLPFHGMDVWNAYELSWLDNRGKPVVAMAEIRVSCTSRNLVESKSLKLYLNSFANTRFADRRAVQQAMEKDLSSAADGAVEVRVLTLEEAARQPMWEAQGTALDHIDLDIDQFEHDASLLMTEQGPERTELLYSHLLRSRCPVTAQPDWATVIIRYTGTPISHASLLRYLISFRNHNGFHEQVVEQIFLDIQRECAPRHLSVNGRFTRRGGLDINPFRSNFEELPPNLRVVRQ

SEQ ID NO: 43846 - protein, 274 aa, Alcanivorax profundi; identical to SEQ ID NO: 43838
  misc_feature (1)..(274): tr|A0A418Y241|A0A418Y241_9GAMM NADPH-dependent 7-cyano- 7-deazaguanine reductase OS=Alcanivorax profundi OX=233 8368 GN=queF PE=3 SV=1

SEQ ID NO: 43847 - protein, 279 aa, Alcanivorax sp.
  misc_feature (1)..(279): tr|A0A2E4YJJ7|A0A2E4YJJ7_9GAMM NADPH-dependent 7-cyano- 7-deazaguanine reductase OS=Alcanivorax sp. OX=1872427 GN=queF PE=3 SV=1
  misc_feature (66)..(66): Xaa can be any naturally occurring amino acid
  misc_feature (113)..(113): Xaa can be any naturally occurring amino acid
MSFLNDTPLGRTSAFIDQYTPSLLCPVPRWDARESLDLDTAAEGEPRLPFHGQDIWNAYELSWLNXRGKPVVAMAELVVPCISPNIIESKSLKLYLNSFANTRFASREAVIKXIAGDLAQVAGAPVDVRVMSMEEAARAAVWDDHGDSVDHLDVAFEHFEYRPDLLFTEQGPERNGALVSHLLRSHCPVTNQPDWGTVQVRYTGAEISPASFLRYVVSLRNHQGFHEQIIEQMFVDLKRQCAPRHLSVYGRFTRRGGLDINPFRSDYEDLPRNLRTIRQ

SEQ ID NO: 43848 - protein, 279 aa, Alcanivorax sp.
  misc_feature (1)..(279): tr|A0A2E9TMS6|A0A2E9TMS6_9GAMM NADPH-dependent 7-cyano- 7-deazaguanine reductase OS=Alcanivorax sp. OX=1872427 GN=queF PE=3 SV=1
MSYLKETPLGRSTDYVDEYMPSLLCPVPRWDARESLELEELGDEDTSLPFHGTDIWNAYELSWLNEKGKPVVALCELRIPCTTPNIVESKSLKLYLNSFANTRFESRDKVRAAIEKDVAQTVGGNMEVLLYSLEESAGFPVWEDRGQCVDNIDIGFEHYEYRPDLLLCDQGAEQTGQLYSHLLRSHCPVTNQPDWATVVVRYTGRAISPASFLRYVVSLRNHQGFHEQIIEQMFVDLMRQCSPRHLTVYGRFTRRGGIDINPFRSNSEQPLPNRRTIRQ

SEQ ID NO: 43849 - protein, 281 aa, Alicycliphilus denitrificans
  misc_feature (1)..(281): tr|A0A3R7ED91|A0A3R7ED91_9BURK NADPH-dependent 7-cyano- 7-deazaguanine reductase OS=Alicycliphilus denitrifican s OX=179636 GN=queF PE=3 SV=1
MTTPEQSQLGRASAYADQYDASLLFPLPRAPKRAEIGIAGEPPFFGADLWTAYELSWLNPRGKPQVAIAHITVPCETPNIVESKSLKLYLNSFNGTRFASLDEVRARIRQDVSEAAWRGASTAGTVGVRIVTPDLFAQERVHEQDGLLLDRLDIECTRYQPAPELLKANHDEAPVTETLVSHLLKSNCLVTGQPDWGSVQIAYSGAQIDQEGLLQYIVSFRGHNEFHEQCVERIFMDVWQRCRPIKLAVYARYTRRGGLDINPLRTSHPQPMPANVRTARQ

SEQ ID NO: 43850 - protein, 281 aa, Alicycliphilus denitrificans
  misc_feature (1)..(281): tr|E8TZA0|E8TZA0_ALIDB NADPH-dependent 7-cyano-7-deazag uanine reductase OS=Alicycliphilus denitrificans (strai n DSM 18852 / JCM 14587 / BC) OX=596153 GN=queF PE=3 SV =1
MTTPEQSQLGRASAYADQYDASLLFPLPRAPKRAEIGIAGDPPFFGADLWTAYELSWLNSRGKPQVAIAHITVPCETPNIVESKSLKLYLNSFNSTRFASLDEVRARIRQDLSEAAWRGASITGTVGVRLVTPDLFAQERVHEQDGLLLDRLDIECTRYQPAPELLKANHDEAPVTETLVSHLLKSNCLVTGQPDWGSVQIAYSGAQIDQEGLLQYIVSFRGHNEFHEQCVERIFMDVWQRCRPIKLAVYARYTRRGGLDINPLRTSHPQPMPANVRTARQ

SEQ ID NO: 43851 - protein, 281 aa, Alicycliphilus sp.
  misc_feature (1)..(281): tr|A0A5C8BVY4|A0A5C8BVY4_9BURK NADPH-dependent 7-cyano- 7-deazaguanine reductase OS=Alicycliphilus sp. OX=18724 37 GN=queF PE=3 SV=1
MSTPEQSQLGKASAYADQYDAALLFPIPRQPKRAEIGIAGAPSFFGADLWTAYELSWLNLRGKPQVAIAHITVPCETPNIVESKSFKLYLNSFNNTRFASLDEVRARIRQDVSEAAWRGAAHAGTVGVRLVTPDQFDAEQVHELDGLLLDRLDIECTQYQPAPELLKANHDEAPVTETLVSHLLKSNCLVTGQPDWGSVQIAYSGAQIDQEGLLQYIVSFRNHNEFHEQCVERIFMDIWQRCRPIKLAVYARYTRRGGLDINPLRTSAPMPLPANRRTARQ

SEQ ID NO: 43852 - protein, 281 aa, Alicycliphilus sp.; identical to SEQ ID NO: 43850
  misc_feature (1)..(281): tr|A0A0E9LGU0|A0A0E9LGU0_9BURK NADPH-dependent 7-cyano- 7-deazaguanine reductase OS=Alicycliphilus sp. B1 OX=16 03291 GN=queF PE=3 SV=1

SEQ ID NO: 43853 - protein, 117 aa, Alicyclobacillus acidocaldarius
  misc_feature (1)..(117): tr|B7DV68|B7DV68_9BACL NADPH-dependent 7-cyano-7-deazag uanine reductase OS=Alicyclobacillus acidocaldarius LAA 1 OX=543302 GN=queF PE=3 SV=1
MLNQPSKTLVTVPNPHPDRRYTVEMETQEFTTLCPMTGQPDFATIYIQYEPDQKLVELKSLKLYLWSYRNEASYHEDCVNRILNDFVAAAEPHYAKVVGDFTIRGGIHTKVTVEYRK

SEQ ID NO: 43854 - protein, 117 aa, Alicyclobacillus acidocaldarius; identical to SEQ ID NO: 43853
  misc_feature (1)..(117): tr|F8IFC5|F8IFC5_ALIAT NADPH-dependent 7-cyano-7-deazag uanine reductase OS=Alicyclobacillus acidocaldarius (st rain Tc-4-1) OX=1048834 GN=queF PE=3 SV=1

SEQ ID NO: 43855 - protein, 119 aa, Alicyclobacillus acidoterrestris
  misc_feature (1)..(119): tr|A0A512CRN9|A0A512CRN9_9BACL NADPH-dependent 7-cyano- 7-deazaguanine reductase OS=Alicyclobacillus acidoterre stris OX=1450 GN=queF PE=3 SV=1
MDMLTQPTKELVTVPNPHPNRVYTVEMECAEFTTLCPMTGQPDFATIYIQYQPAEKIVELKSLKLYLWSFRNEANYHEACINRILDDFVAVSQPRYAKVVGDFTIRGGIHTKVTVEYTA

SEQ ID NO: 43856 - protein, 119 aa, Alicyclobacillus acidoterrestris; identical to SEQ ID NO: 43855
  misc_feature (1)..(119): tr|T0BND1|T0BND1_ALIAG NADPH-dependent 7-cyano-7-deazag uanine reductase OS=Alicyclobacillus acidoterrestris (s train ATCC 49025 / DSM 3922 / CIP 106132 / NCIMB 13137 / GD3B) OX=1356854 GN=queF PE=3 SV=1

SEQ ID NO: 43857 - protein, 124 aa, Alicyclobacillus ferrooxydans
  misc_feature (1)..(124): tr|A0A0P9CWV5|A0A0P9CWV5_9BACL NADPH-dependent 7-cyano- 7-deazaguanine reductase OS=Alicyclobacillus ferrooxyda ns OX=471514 GN=queF PE=3 SV=1
MEGLLVSTQPTKELVVVPNPHPDKVYDVEMSTNEFTTLCPMTGQPDFATVTVVYQPADHLVELKSLKLYLWSFRNEGHFHEDVTNIILNDFVAAAQPRMARVTTDFTVRGGIHTKVTTEYRRPE

SEQ ID NO: 43858 - protein, 117 aa, Alicyclobacillus hesperidum
  misc_feature (1)..(117): tr|J9HFC8|J9HFC8_9BACL NADPH-dependent 7-cyano-7-deazag uanine reductase OS=Alicyclobacillus hesperidum URH17-3 -68 OX=1200346 GN=queF PE=3 SV=1
MLNQPSKTLVTVPNPHPDRVYTVEMETAEFTTLCPMTGQPDFATIHIEYQPHEKLVELKSLKLYLWSYRNEASYHEDCVNRILNDFVAAAEPRSAKVVGDFTIRGGIHTKVTVEYTK

SEQ ID NO: 43859 - protein, 117 aa, Alicyclobacillus hesperidum; identical to SEQ ID NO: 43858
  misc_feature (1)..(117): tr|A0A1H2Q163|A0A1H2Q163_9BACL NADPH-dependent 7-cyano- 7-deazaguanine reductase OS=Alicyclobacillus hesperidum OX=89784 GN=queF PE=3 SV=1

SEQ ID NO: 43860 - protein, 121 aa, Alicyclobacillus macrosporangiidus
  misc_feature (1)..(121): tr|A0A1I7L4H5|A0A1I7L4H5_9BACL NADPH-dependent 7-cyano- 7-deazaguanine reductase OS=Alicyclobacillus macrospora ngiidus OX=392015 GN=queF PE=3 SV=1
MPTQPSKELVVVPNPHPDRVYDVEMSTPEFTTVCPMTGQPDFATITIHYQPGPFLVELKSLKLYLWSFRNEGHFHEDVTNIILNDFVAAAKPRYCRVTGDFTVRGGIHTKVTVEYRQPDPA

SEQ ID NO: 43861 - protein, 119 aa, Alicyclobacillus montanus
  misc_feature (1)..(119): tr|A0A1M6K3C8|A0A1M6K3C8_9BACL NADPH-dependent 7-cyano- 7-deazaguanine reductase OS=Alicyclobacillus montanus O X=1830138 GN=queF PE=3 SV=1
MLTQPTRELVVVPNPHPTRVYTVEMDCPEFTTLCPMTGQPDFATIYIQYQPGEHLVELKSLKLYLWSFRNEAHYHEDVTNLILNDFVAAAKPRYAKVVADFTVRGGIHTKVTVEYSETN

SEQ ID NO: 43862 - protein, 117 aa, Alicyclobacillus sacchari
  misc_feature (1)..(117): tr|A0A4R8LTI2|A0A4R8LTI2_9BACL NADPH-dependent 7-cyano- 7-deazaguanine reductase OS=Alicyclobacillus sacchari O X=392010 GN=queF PE=3 SV=1
MLNQPNKTLVTVPNPHPDRVYTVEMETAEFTTLCPMTGQPDFATIYIEYQPHEKLVELKSLKLYLWSYRNEASYHEDCVNRILNDFVAAAEPRSAKVVGDFTIRGGIHTKVTVEYTK

SEQ ID NO: 43863 - protein, 117 aa, Alicyclobacillus sp.
  misc_feature (1)..(117): tr|A0A1F2YDY9|A0A1F2YDY9_9BACL NADPH-dependent 7-cyano- 7-deazaguanine reductase (Fragment) OS=Alicyclobacillus sp. RIFOXYA1_FULL_53_8 OX=1797236 GN=A2201_11415 PE=3 SV=1
MPTQPTKELIVVPNPHPTRVYDVEMSTPEFTTLCPMTGQPDFATITIQYQPGEFLVELKSLKLYLWSFRNEGHFHEDVTNMILNDFVRASQPRFARVIGDFTVRGGISTKVTVEYRN

SEQ ID NO: 43864 - protein, 117 aa, Alicyclobacillus tengchongensis
  misc_feature (1)..(117): tr|A0A0V0PSL6|A0A0V0PSL6_9BACL NADPH-dependent 7-cyano- 7-deazaguanine reductase OS=Alicyclobacillus tengchonge nsis OX=368812 GN=queF PE=3 SV=1
MLNQPSKMLVTVPNPHPDRVYTVEMETAEFTTLCPMTGQPDFATIYIEYQPHEKLVELKSLKLYLWSYRNEASYHEDCVNRILNDFVAAAEPRSAKVVGDFTIRGGIHTKVTVEYTK

SEQ ID NO: 43865 - protein, 117 aa, Alicyclobacillus vulcanalis
  misc_feature (1)..(117): tr|A0A1N7L1X7|A0A1N7L1X7_9BACL NADPH-dependent 7-cyano- 7-deazaguanine reductase OS=Alicyclobacillus vulcanalis OX=252246 GN=queF PE=3 SV=1
MFNQPSKSLVTVPNPHPDRRYTVEMETQEFTTLCPMTGQPDFATIYIQYEPDQKLVELKSLKLYLWSYRNETSYHEDCVNRILNDFVAAAEPHYAKVVGDFTIRGGIHTKVTVEYRK

SEQ ID NO: 43866 - protein, 295 aa, Aliidiomarina haloalkalitolerans
  misc_feature (1)..(295): tr|A0A432VXT0|A0A432VXT0_9GAMM NADPH-dependent 7-cyano- 7-deazaguanine reductase OS=Aliidiomarina haloalkalitol erans OX=859059 GN=queF PE=3 SV=1
MPTSSPKPKSAALAHLKLGQNTDYPQHFDAGLLQPVPRQLNRDDLGIDASTLPFVGVDVWTCYELSWLQPNGVPAVVIAEVAVPATSPNLIESKSFKLYLNGFNQSTFANHAAVQQQLEHDLSGCAGAPVSVVFFTLDEYSQRGIQALPGHCIDGEDITIQDYDYQPDILLEIQAPTTAAEQTASETGELHSHVLKSNCLITNQPDWGSVYIYYTGKPIRRDVLLAYLVSFRNHNEFHEQCVERIYCDLQRYGEFSDLLVVARYTRRGGLDINPLRCSDSALLDHPVLRSRLARQ

SEQ ID NO: 43867 - protein, 284 aa, Aliidiomarina iranensis
  misc_feature (1)..(284): tr|A0A432W0N6|A0A432W0N6_9GAMM NADPH-dependent 7-cyano- 7-deazaguanine reductase OS=Aliidiomarina iranensis OX= 1434071 GN=queF PE=3 SV=1
MPVSSKNPMADLKLGTATEYPTQYDASLLQPVPRQLNRSSIGVADESLPFAGRDLWTCYEVSWLQPTGVPKVVIAEVEVPATSRNLIESKSFKLYLNSYNQSVFASTDEVLENLTRDLSACAEAPVEVRIYSLDSYTQHGIMNFAAECIDDEPVQINDYDYAPNLLATAAGTERVSEQLCSHLLKSNCLITNQPDWGSVYIAYTGPKIDRQALLRYLISFRNHNEFHEQCVERIYTDLMQHAGCESLQVLARYTRRGGLDINPIRHSGNSSIDSKLLRGRLARQ

SEQ ID NO: 43868 - protein, 286 aa, Aliidiomarina maris
  misc_feature (1)..(286): tr|A0A327WWA6|A0A327WWA6_9GAMM NADPH-dependent 7-cyano- 7-deazaguanine reductase OS=Aliidiomarina maris OX=5313 12 GN=queF PE=3 SV=1
MPDQNPNPLAHLTLGQATDYQDQYNPKLLQAVPRALNREPIDIGVNGAELPFIGVDLWTGYEVSWLNSKGLPQIAIAVFSVPAYSPNLIESKSFKLYLNSFNQTRIDDWSTVTERMVADLSVCAGASVDVQLLTLGQFAAQYPIQAVAGESLDTQDIQIDGYDYTPAMLRSDPDVIVEEILTSDLLKSNCLITNQPDWGSVRIAYKGPQIARDTLLQYLVSFRSHNEFHEQCVERIFQDLMRYCACHSLTVEARYTRRGGLDINPVRASHDRHDYKNSISSRTVRQ

SEQ ID NO: 43869 - protein, 280 aa, Aliidiomarina minuta
  misc_feature (1)..(280): tr|A0A432W5R1|A0A432W5R1_9GAMM NADPH-dependent 7-cyano- 7-deazaguanine reductase OS=Aliidiomarina minuta OX=880 057 GN=queF PE=3 SV=1
MPTTGNHNSMSNLSLGQATEYSQQYNSELLQPVPRALNRTPIGINEQNLPFYGYDEWTGYELSWLNSKGLPQVAIARFTVPVTSTNLIESKSFKLYLNSFNQSRFNDWQQVQTLMQQDLSACAAGPVTVQLYPLAEFAQESISNLPGIHLDSLDISINSYDYNPGLLRQKSGSEIEETLTSDLLKSNCLITNQPDWGSVSIAYKGPQIEHESLLAYLVSFRNHNEFHEQCVERIFQDLMQHCGCLELTVCARYTRRGGLDINPLRSTQKQWPQFRRTVRQ

SEQ ID NO: 43870 - protein, 289 aa, Aliidiomarina sanyensis
  misc_feature (1)..(289): tr|A0A432WR66|A0A432WR66_9GAMM NADPH-dependent 7-cyano- 7-deazaguanine reductase OS=Aliidiomarina sanyensis OX= 1249555 GN=queF PE=3 SV=1
MPENHNTAMGHLTLGQVTDYPEHFDANLLHPVPRALNREEIELRDDALPFEGVDLWTGYELSWLQPSGVPAVAILEVEVPVTSPNLIESKSFKLYLNGFNQTTFPSTEAVQHQLQTDLSACAGVPVAVRIYSLDAYTARSIHHWESQCIDQAPLTVSTYDYAPELLQNICDPSGQVTTEQLHSHLLKSNCLITNQPDWGSVYIHYQGPKLNPSVLLAYLISFRSHNEFHEQCVERIYTDLMKYAKCESLLVLARYTRRGGLDINPLRYSHGQNLVLDPELLLRRRLVRQ

SEQ ID NO: 43871 - protein, 294 aa, Aliidiomarina shirensis
  misc_feature (1)..(294): tr|A0A432WWQ8|A0A432WWQ8_9GAMM NADPH-dependent 7-cyano- 7-deazaguanine reductase OS=Aliidiomarina shirensis OX= 1048642 GN=queF PE=3 SV=1
MPVSPKDPMADLKLGEATEYPAHYDADLLQPVPRQLNRSSIGVVDDALPFAGRDLWTCYELSWLQPNGVPKVAIAEVEVPATSANLIESKSFKLYLNGYNQSTFASEEVVLQQLTRDLSSCAGAPVEVRIYSLDAYTQHGLTNFAADCIDNENVNITTYDYEPELLNGLITSATSGAGSAAYEIVSEKLCSHLLKSNCLITNQPDWGSVYIEYTGPKINRAALLGYLISFRNHNEFHEQCVERIHTDLMQHARCESLTVFARYTRRGGLDINPVRHTRNNTIDSRLFRGRLARQ

SEQ ID NO: 43872 - protein, 287 aa, Aliidiomarina soli
  misc_feature (1)..(287): tr|A0A432WLI6|A0A432WLI6_9GAMM NADPH-dependent 7-cyano- 7-deazaguanine reductase OS=Aliidiomarina soli OX=19285 74 GN=queF PE=3 SV=1
MPAKQPNDAMANLTLGQTTEYPEQYDASLLQPVPRSLNRLPIGIDDNDLPFHGVDEWTGYELSWLTSKGLPQVAIARFLVPVSSPNLIESKSFKLYLNSFNQSRFADWQQVQQTMAVDLGHCAGAPVEVLLYSLEEFAARPIAALAGQSIDQQDIEIEHYQYQPELLQLVNGHAEQGETADVSEVLYSDLLKSNCLITNQPDWGSVSIAYSGPQIDRASLLRYLVSFRGHNEFHEQCVERIFQDLRQHCRCQHLTITARYTRRGGLDINPLRSTSKTWPESRRGVRQ

SEQ ID NO: 43873 - protein, 289 aa, Aliidiomarina sp.
  misc_feature (1)..(289): tr|A0A552X3E5|A0A552X3E5_9GAMM NADPH-dependent 7-cyano- 7-deazaguanine reductase OS=Aliidiomarina sp. IM1326 OX =2593535 GN=queF PE=3 SV=1
MPENPEALMQHLSLGQATEYPSGYDPQLLQPVPRQLNRSQIGLTDTSLPFVGRDLWTGYELSWLKPSGVPEVAILEVEVPATSPNLIESKSFKLYLNGFNQSVFASDEAVAEQLQKDLSVCAGSAVQVRIYRLDEYSQRGISQWQGACIDQQEVNANCYDYNPSLLNSLCDPHGEIVTEHLHSHLLKSNCLITNQPDWGSVYIAYQGPKMCQKTLLQYIISFRNHNEFHEQCVERIFTDLMHYGHCHSLVVSARYTRRGGLDINPLRSTHQQQIVANEGELLQGRLVRQ

SEQ ID NO: 43874 - protein, 277 aa, Aliidiomarina taiwanensis
  misc_feature (1)..(277): tr|A0A432XAM3|A0A432XAM3_9GAMM NADPH-dependent 7-cyano- 7-deazaguanine reductase OS=Aliidiomarina taiwanensis O X=946228 GN=queF PE=3 SV=1
MPTNKPMDQLSLGKATEYPQHYNPQLLQAVPRSLNREQLGLTNQALPFQGVDIWTAYEVSWLNTKGLPQVAIAEVEVPADSPYLIESKSFKLYLNSLNQHAIADKNMLQTLLEKDLSHCAGEPVQVRLYALAEYAAKGVHTPQGHCIDQQDIQIEHFHYNPTVLAIESQQVVTESLYSDLLKSNCLITEQPDWGTLHIEYSGPQINRESLLRYIVGFRNHNEFHEQCVERIYMDMMTHLHPLLLTVQARYTRRGGLDINPLRTNFKKSNTLSRTVRQ

SEQ ID NO: 43875 - protein, 283 aa, Aliiglaciecola lipolytica
  misc_feature (1)..(283): tr|K6WY14|K6WY14_9ALTE NADPH-dependent 7-cyano-7-deazag uanine reductase OS=Aliiglaciecola lipolytica E3 OX=112 7673 GN=queF PE=3 SV=1
MTNKTDEIVKSSQQLKNLTLGKSVEYIQTYSPGLLQAVPRSISRDAIGLTGKLPFHGDDIWNGYELSWLNSRGKPQIALMKCVVPFDSPNLIESKSFKLYLNSFNQTKVKSVETLSAMLQKDLTACAGRKVQVKVILPSEFADQKIENLPGLNIDDLDIEFTEYNLEPSVLRTSNNHVDETLNSNLLKSNCLITNQPDWGSVMIRYAGPQINHESLLRYLVSFRMHNEFHEQCVERIFEDISQYCHSTKLTVYARYTRRGGLDINPFRSNFEATYDLARQARQ

SEQ ID NO: 43876 - protein, 283 aa, Aliiglaciecola sp.
  misc_feature (1)..(283): tr|A0A553L1A8|A0A553L1A8_9ALTE NADPH-dependent 7-cyano- 7-deazaguanine reductase OS=Aliiglaciecola sp. M165 OX= 2593649 GN=queF PE=3 SV=1
MTKDLSKTFSKNDPLSALSLGKPVEYSDQYNPELLQPVPRALSRDEIGLSADLPFHGEDLWTAYELSWLNSKNKPQVAILECTVPYDSPNLIESKSFKLYLNSFNQTKVASHQVLQSMLQRDLSACAGRNVQVGLILPNQFNKLDIEDLQGVCIDELDIEINNFELTPEILSTGSNDVSETLMSNLLKSNCLITNQPDWASVLIKYEGPQIDRENLLRYLISFRMHNEFHEQCVERIFCDIKQYCAPNKLSVYARYTRRGGLDINPFRSDFEHQYTRVRQARQ

SEQ ID NO: 43877 - protein, 144 aa, Aliikangiella marina
  misc_feature (1)..(144): tr|A0A545TI92|A0A545TI92_9GAMM 7-cyano-7-deazaguanine r eductase OS=Aliikangiella marina OX=1712262 GN=FLL45_03 065 PE=4 SV=1
MGSNIKTYEAIDSSLLIALPNPSNQAYEINIKIPEFTFLGVQEQPDFATFYLTFYPKDKIIELKALKHYVYQLRDIVVSYERLINIFYDHLIEVYKPERLRVVMNCNPRGGISSKLTIDSDWKSRGGEEKYRDWQDVNEWHRLD

SEQ ID NO: 43878 - protein, 291 aa, Aliikangiella marina
  misc_feature (1)..(291): tr|A0A545T2X2|A0A545T2X2_9GAMM NADPH-dependent 7-cyano- 7-deazaguanine reductase OS=Aliikangiella marina OX=171 2262 GN=queF PE=3 SV=1
MPKVKSSPLSRYPNPIRAALKMSEIPLGKSTQYISVYTPELLFPILRSEKRDELDNRFLDFKGKDIWNAFEISWLNPKGLPKIAIGVFEFDAGTPKIIESKSFKLYLNSFNQSRFSSLAEVQSIMAKDLSAACGGEVSVELIEPANFNRNAISQLEGEVIDDIDIEIAEYAYNPSLLANSTSDEHTSEVLVSHLLKSNCLITSQPDWASIQIRYTGSKIDRAKLLAYLISFRSHNEFHEQCVERIFADIKSLCAPEKLTVYARYTRRGGLDINPWRSDFELDIENVRLARQ

SEQ ID NO: 43879 - protein, 274 aa, Aliikangiella sp.
  misc_feature (1)..(274): tr|A0A545TSU6|A0A545TSU6_9GAMM NADPH-dependent 7-cyano- 7-deazaguanine reductase OS=Aliikangiella sp. M105 OX=2 592383 GN=queF PE=3 SV=1
MTVVTENPLGKPTLYISQYSPELLFPIPRSEKRDELDSRFLQFNGEDVWNAYEISWLNPKGLPQVAIAEFRVSAGSEFIVESKSFKLYLNSFNQTSFESSEKVAAILTTDLSRATGKPVSVKLCSPQEFDLFAVSEFNGELIDHQDIEIDNYDYQPELLINACRPDSLVEETLVSHLLKSNCLITSQPDWASIQIRYFGPQIDRAKLLAYLVSFRSHNEFHEQCVERIFCDLKKFCEPQKLSVYARYTRRGGLDINPWRSDFEVKMTNTRLARQ

SEQ ID NO: 43880 - protein, 145 aa, Aliikangiella sp.
  misc_feature (1)..(145): tr|A0A545UA88|A0A545UA88_9GAMM 7-cyano-7-deazaguanine r eductase OS=Aliikangiella sp. M105 OX=2592383 GN=FLL46_ 15820 PE=4 SV=1
MSSKLKTYQEIHKDMLVALPNPSSQAYEINIKIPEFTFLGVQEQPDFATIFLTMYPGPKIIELKALKLYVYQLRDIVVSYERLINIFYDHLIEVYQPERLRMVMNCNPRGGISSRLTIDSDWKSRGGNEKYKDWMPDVDEWQRLD

SEQ ID NO: 43881 - protein, 154 aa, Aliiroseovarius crassostreae
  misc_feature (1)..(154): tr|A0A0P7I5K0|A0A0P7I5K0_9RHOB NADPH-dependent 7-cyano- 7-deazaguanine reductase OS=Aliiroseovarius crassostrea e OX=154981 GN=queF PE=3 SV=1
MTDSIYANLKQLGGDTVMPNSPEEAVLERVQNPQADTAYNVRFTAPEFTSLCPMTGQPDFAHLVIDYVPGDWLVESKSLKLFLGAFRNHGAFHEDCTVSIGRRLHEFLDPQWLRIGGYWYPRGGIPIDVFWQSGPKPDSVWIPDQGVPPYRGRG

SEQ ID NO: 43882 - protein, 281 aa, Aliivibrio finisterrensis
  misc_feature (1)..(281): tr|A0A4Q5KEP5|A0A4Q5KEP5_9GAMM NADPH-dependent 7-cyano- 7-deazaguanine reductase OS=Aliivibrio finisterrensis O X=511998 GN=queF PE=3 SV=1
MTKYTNADELKSLTLGQKTEYKHNYEPELLQAVPRSLNRDDLDLGNELPFQGCDVWTLYELSWLNQNGLPQVAVGDVTLPATSPNLVESKSFKLYLNSFNQTKFASWDDVTSTLIKDLSACAGGEVTVEIHPVQAYSQQPIVDMTGECIDNQDIVIDNYEFDAEYLESSTSDDVVEETLHSHLLKSNCLITNQPDWGSVEISYTGNKIDREKLLRYLISFRQHNEFHEQCVERIYTDIMKFCKPNSLTVFARYTRRGGLDINPFRSSHLEKPEHNLRLARQ

SEQ ID NO: 43883 - protein, 281 aa, Aliivibrio finisterrensis
  misc_feature (1)..(281): tr|A0A4Q5KY34|A0A4Q5KY34_9GAMM NADPH-dependent 7-cyano- 7-deazaguanine reductase OS=Aliivibrio finisterrensis O X=511998 GN=queF PE=3 SV=1
MTKYTNADELKSLTLGQKTEYKHNYEPELLQAVPRSLNRDDLDLGNELPFQGCDVWTLYELSWLNQNGLPQVAVGDVTLPATSPNLVESKSFKLYLNSFNQTKFASWDDVTSTLIKDLSACAGGEVKVEIHPVQAYSQQPIVDMTGECIDNQDIVIDNYEFDAEYLESSTSDDVVEETLHSHLLKSNCLITNQPDWGSVEISYTGNKIDREKLLRYLISFRQHNEFHEQCVERIYTDIMKFCKPNSLTVFARYTRRGGLDINPFRSSHLEKPEHNLRLARQ

SEQ ID NO: 43884 - protein, 281 aa, Aliivibrio fischeri
  misc_feature (1)..(281): sp|Q5E7A3|QUEF_ALIF1 NADPH-dependent 7-cyano-7-deazagua nine reductase OS=Aliivibrio fischeri (strain ATCC 7006 01 / ES114) OX=312309 GN=queF PE=3 SV=1
MTKYTNADELKSLTLGQKTEYKHTYEPELLQAVPRSLNRDDLALGDELPFVGCDVWTLYELSWLNQNGLPQVAVGEVALPATSPNLVESKSFKLYLNSFNQTKFTSWDEVKETLVKDLSACAGETVKVDIFPVQRYSQQPIVDMQGECIDDQDIIIDDYEFNAAYLESSTSDVNIEETLHSHLLKSNCLITNQPDWGSVEIQYKGKKIDREKLLRYLISFRQHNEFHEQCVERIYTDIMKYCAPESLTVFARYTRRGGLDINPFRSSHLLAPKDNLRLARQ

SEQ ID NO: 43885 - protein, 281 aa, Aliivibrio fischeri
  misc_feature (1)..(281): tr|A0A510UPL6|A0A510UPL6_ALIFS NADPH-dependent 7-cyano- 7-deazaguanine reductase OS=Aliivibrio fischeri OX=668 GN=queF PE=3 SV=1
MTKYTNADELKSLTLGQKTEYKHTYEPELLQAVPRSLNRDDLALGDELPFVGCDVWTLYELSWLNQNGLPQVAVGEVALPATSPNLVESKSFKLYLNSFNQTKFTSWDEVKETLVKDLSACAGETVKVDVFPVQRYSQQPIVDMQGECIDDQDIIIDDYEFNAAYLESSTSDVCIEETLHSHLLKSNCLITNQPDWGSVEIQYKGKKIDREKLLRYLISFRQHNEFHEQCVERIYTDIMKYCAPESLTVFARYTRRGGLDINPFRSSHLLAPKDNLRLARQ

SEQ ID NO: 43886 - protein, 281 aa, Aliivibrio logei
  misc_feature (1)..(281): tr|A0A1B9NYR5|A0A1B9NYR5_ALILO NADPH-dependent 7-cyano- 7-deazaguanine reductase OS=Aliivibrio logei OX=688 GN= queF PE=3 SV=1
MTKYTNADELKSLTLGQKTEYKHSYEPELLQAVPRSLNRDDLALGDELPFVGCDVWTLYELSWLNQNGLPQVAIGDVVLPATSPNLVESKSFKLYLNSFNQTKFSSWEDVTSTLIKDLSVCAGEDVMVNIHPVQAYSQQPIVDMQGECIDNQDIVINSYEFDANYLESSTSEKMVNEVLHSHLLKSNCLITNQPDWGSVEINYEGNKIDREKLLRYLISFRQHNEFHEQCVERIYTDIMKFCSPKSLTVFARYTRRGGLDINPFRSSHLVKPEHNRRLARQ

SEQ ID NO: 43887 - protein, 281 aa, Aliivibrio salmonicida
  misc_feature (1)..(281): sp|B6EGG7|QUEF_ALISL NADPH-dependent 7-cyano-7-deazagua nine reductase OS=Aliivibrio salmonicida (strain LFI123 8) OX=316275 GN=queF PE=3 SV=1
MTKYTNADELKSLTLGQKTEYKHSYEPELLQAVPRSLNRDDLALGDELPFVGCDVWTLYELSWLNQNGLPQVAIGDVVLPATSPNLVESKSFKLYLNSFNQTKFSSWEDVTSTLIKDLSVCAGEEVMVNIHPVQAYSQQPIVDMQGECIDNQDIVIDSYEFDANYLESSTSEKMVNEVLHSHLLKSNCLITNQPDWGSVEINYEGNKIDHEKLLRYLISFRQHNEFHEQCVERIYTDIMKFCSPKSLTVFARYTRRGGLDINPFRSSHLIKPEHNLRLARQ

SEQ ID NO: 43888 - protein, 281 aa, Aliivibrio sifiae
  misc_feature (1)..(281): tr|A0A2S7XKE5|A0A2S7XKE5_9GAMM NADPH-dependent 7-cyano- 7-deazaguanine reductase OS=Aliivibrio sifiae OX=566293 GN=queF PE=3 SV=1
MTKYTNADELKSLTLGQKTEYKHSYEPELLQAVPRSLNRDDLELGDELPFVGCDVWTLYELSWLNQNGLPQVAIGDVTLPATSPNLVESKSFKLYLNSFNQTKFSSWDEVTRTLIKDLSACAGGDVKVEIHPVQAYSQQPIIDMKGECIDNQDIIIDDYEFDADYLQSSTLEENVSETLHSHLLKSNCLITNQPDWGSVEINYDGKKIDREKLLRYLISFRQHNEFHEQCVERIYTDIMKYCKPGSLTVYARYTRRGGLDINPFRSSHLAKPEHNLRLARQ

SEQ ID NO: 43889 - protein, 281 aa, Aliivibrio sifiae
  misc_feature (1)..(281): tr|A0A2S7XBF9|A0A2S7XBF9_9GAMM NADPH-dependent 7-cyano- 7-deazaguanine reductase OS=Aliivibrio sifiae OX=566293 GN=queF PE=3 SV=1
MTKYTNADELKSLTLGQKTEYKHSYEPELLQAVPRSLNRDDLELGDELPFVGCDVWTLYELSWLNQNGLPQVAVGDVTLPATSPNLVESKSFKLYLNSFNQTKFSSWNEVTRTLIQDLSACAGGEVTVEMHPVQAYSQQPIVDMQGECIDNQDIVIDDYEFDAEYLQSSTLEEMVSETLHSHLLKSNCLITNQPDWGSVEINYEGKKIDREKLLRYLISFRQHNEFHEQCVERIYTDIMKYCKPNSLTVFARYTRRGGLDINPFRSSYLAKPEHNLRLARQ

SEQ ID NO: 43890 - protein, 281 aa, Aliivibrio sp.
  misc_feature (1)..(281): tr|A0A1B9PLM7|A0A1B9PLM7_9GAMM NADPH-dependent 7-cyano- 7-deazaguanine reductase OS=Aliivibrio sp. 1S175 OX=184 0087 GN=queF PE=3 SV=1
MTKYTNADELKSLTLGQKTEYKHSYEPELLQAVPRSLNRDDLKLGDELPFVGCDVWTLYELSWLNQSGLPQVAVGDVVLPATSPNLVESKSFKLYLNSFNQTKFSSWDEVTRTLIKDLSACAGEEVKVEIHPVQAYSQQPIVDMQGECIDNQDIIIDSYEFDANYLESSTSEEMVNEVLHSHLLKSNCLITNQPDWGSVEINYDGKKIDREKLLRYLISFRQHNEFHEQCVERIYTDIMKFCKPTSLTVFARYTRRGGLDINPFRSSHLAKPEHNLRLARQ

SEQ ID NO: 43891 - protein, 281 aa, Aliivibrio wodanis
  misc_feature (1)..(281): tr|A0A090KGC4|A0A090KGC4_9GAMM NADPH-dependent 7-cyano- 7-deazaguanine reductase OS=Aliivibrio wodanis OX=80852 GN=queF PE=3 SV=1
MTKYTNADELKSLTLGQKTEYKHSYEPELLQAVPRSLNRDDLDLSNELPFVGCDVWTLYELSWLNQNGLPQVAVGDVTLPATSPNLVESKSFKLYLNSFNQTKFSSWDDVTRTLIKDLSACAGGNVKVEIHPVQTYSQQPIVDMTGECIDNQDIVIDNYEFDAEYLQSSISEEFVEETLHSHLLKSNCLITNQPDWGSVEISYVGNKIDREKLLRYLISFRQHNEFHEQCVERIYTDIMKFCKPSSLTVFARYTRRGGLDINPFRSSHLAEPEHNLRLARQ

SEQ ID NO: 43892 - protein, 279 aa, Alishewanella aestuarii
  misc_feature (1)..(279): tr|J1Q4X5|J1Q4X5_9ALTE NADPH-dependent 7-cyano-7-deazag uanine reductase OS=Alishewanella aestuarii B11 OX=1197 174 GN=queF PE=3 SV=1
MTKSHTDVLAELSLGKITEYVDQYDAALLQAVPRSLGREAIGLSQQLPFVGQDIWHGYELSWLNSKGKPQVALATFVVPFDSPNLIESKSFKLYLNSFNQSRFTDVGQVYQTMQGDLSACAGKTVKVSLHNVSEIMTFQPTWIPGVCLDELDISVEQYQYQPALLALDPARGQVEEKLHSHLLKSNCLITSQPDWASVFIHYRGTALSHEALLKYLISFRSHNEFHEQCVERIYNDIWQLAKPDFLAVYARYTRRGGLDINPLRSSEPYSPPNIRLSRQ

SEQ ID NO: 43893 - protein, 279 aa, Alishewanella agri
  misc_feature (1)..(279): tr|I9P2S5|I9P2S5_9ALTE NADPH-dependent 7-cyano-7-deazag uanine reductase OS=Alishewanella agri BL06 OX=1195246 GN=queF PE=3 SV=1
MTKSHSDVLAELSLGKITDYVDQYDATLLQAVPRSLGREAIGLGQQLPFVGQDIWHGYELSWLNSKGKPQVALATFVVPYDSPNLIESKSFKLYLNSFNQSRFADVGQVYQTMQRDLSACAGGNVKVSLHNVSEIMTFQPTWIPGICLDELDIEVDQYQYQASLLQLDPARGQVDEKLHSHLLKSNCLITSQPDWASVFIHYRGTALSHEALLKYLISFRSHNEFHEQCVERIYNDIWQLAKPDFLAVYARYTRRGGLDINPLRSSEPYSPPNIRLSRQ

SEQ ID NO: 43894 - protein, 279 aa, Alishewanella jeotgali
  misc_feature (1)..(279): tr|H3ZHC5|H3ZHC5_9ALTE NADPH-dependent 7-cyano-7-deazag uanine reductase OS=Alishewanella jeotgali KCTC 22429 O X=1129374 GN=queF PE=3 SV=1
MTRSHTDVLAELSLGKITEYVDQYDAALLQAVPRSLGRDAIGLGQQLPFVGQDIWHGYELSWLNSKGKPQVALATFVVPFDSPNLIESKSFKLYLNSFNQSRFADVGQVYQTMQRDLSACAGKTVKVSLHNVSEIMTFQPTWIPGVCLDELDISVDQYQYQPALLALDPARGQVEEKLHSHLLKSNCLITSQPDWASVFIHYRGAALSHEALLKYLISFRSHNEFHEQCVERIYNDIWQLAKPDFLAVYARYTRRGGLDINPLRSSEPYSPPNIRLSRQ

SEQ ID NO: 43895 - protein, 279 aa, Alishewanella sp.
  misc_feature (1)..(279): tr|A0A1C2C3T3|A0A1C2C3T3_9ALTE NADPH-dependent 7-cyano- 7-deazaguanine reductase OS=Alishewanella sp. HH-ZS OX= 1856684 GN=queF PE=3 SV=1
MTKSHTDVLAELSLGKITEYVDQYDAALLQAVPRSLGREAIGLGQQLPFVGQDIWHGYELSWLNSKGKPQVALATFVVPFDSPNLIESKSFKLYLNSFNQSRFADVGQVYQTMQRDLSACAGKTVKVSLHNVSEIMTFQPTWIPGVCLDELDISVDQYQYQPALLALDPARGQVEEKLHSHLLKSNCLITSQPDWASVFIHYRGTALSHEALLKYLISFRSHNEFHEQCVERIYNDIWQLAKPDFLAVYARYTRRGGLDINPLRSSEPYSPPNIRLSRQ

SEQ ID NO: 43896 - protein, 279 aa, Alishewanella sp.
  misc_feature (1)..(279): tr|A0A259NYU7|A0A259NYU7_9ALTE NADPH-dependent 7-cyano- 7-deazaguanine reductase OS=Alishewanella sp. 34-51-39 OX=1970316 GN=queF PE=3 SV=1
MTKSHSDVLAELSLGKITDYVDQYDATLLQAVPRSLGREAIGLGQELPFVGQDIWHGYELSWLNSKGKPQVALATFVVPYDSPNLIESKSFKLYLNSFNQSRFADVGQVYQTMQRDLSACAGGNVKVSLHNVSEIMTFQPTWIPGICLDELDIEVDQYQYQASLLQLDPARGQVDEKLHSHLLKSNCLITSQPDWASVFIHYRGTALSHEALLKYLISFRSHNEFHEQCVERIYNDIWQLAKPDFLAVYARYTRRGGLDINPLRSSEPYSPPNIRLSRQ

SEQ ID NO: 43897 - protein, 153 aa, Alistipes sp.
  misc_feature (1)..(153): tr|R6XRA2|R6XRA2_9BACT NADPH-dependent 7-cyano-7-deazag uanine reductase OS=Alistipes sp. CAG:435 OX=1262695 GN =queF PE=3 SV=1
MAEGRELEGLQSLGKKTEYKSDYAPEVLETFVNKHQDNDYWVRFNCPEFTSLCPITGQPDFAEIRISYIPDIRMVESKSLKLYLFSFRNHGDFHEDCVNKIMKDLIKLMDPKYIEVTGLFTPRGGISIYPYANYGRPGTKYEALAQQRFATHE

SEQ ID NO: 43898 - protein, 153 aa, Alistipes sp.
  misc_feature (1)..(153): tr|R5BAZ3|R5BAZ3_9BACT NADPH-dependent 7-cyano-7-deazag uanine reductase OS=Alistipes sp. CAG:514 OX=1262696 GN =queF PE=3 SV=1
MAEGRESEGLKSLGRKTEYRSDYAPEVLETFVNKHQDNDYWVRFNCPEFTSLCPITGQPDFAEIRISYIPDVRMVESKSLKLYLFSFRNHGDFHEDCVNKIMKDLIKLMDPKYIEVTGLFTPRGGISIHPYANYGRPGTKYETLAERRFATHE

SEQ ID NO: 43899 - protein, 141 aa, Aliterella atlantica
  misc_feature (1)..(141): tr|A0A0D8ZV23|A0A0D8ZV23_9CYAN NADPH-dependent 7-cyano- 7-deazaguanine reductase OS=Aliterella atlantica CENA59 5 OX=1618023 GN=queF PE=3 SV=1
MQELSEQSSAETQSPTVELKYGEREIETGKLITFPNPRVGRRYDIHVTLPEFTCKCPFSGYPDFATIYITYVPDKSVVELKAIKLYINSYRDRYISHEESINQILDDFVAACDPLEAYVKGDFSPRGNVHTVIEVRHQKPV

SEQ ID NO: 43900 - protein, 135 aa, Alkalibacillus haloalkaliphilus
  misc_feature (1)..(135): tr|A0A511W017|A0A511W017_9BACI NADPH-dependent 7-cyano- 7-deazaguanine reductase OS=Alkalibacillus haloalkaliph ilus OX=94136 GN=queF PE=3 SV=1
MSENYYLPRSGPMPRPDSVKEGREILKDEAFEAPNVQTITFKALEFTAVCPKTGQPDFGQVEITYTPNEKCIESKSLKFYLWSYRDEGAYCESLAAQIADDFVYAIDPLNVEVTVYQSARGGIELTTKAVRNRDE

SEQ ID NO: 43901 - protein, 165 aa, Alkalibacterium olivapovliticus
  misc_feature (1)..(165): tr|A0A2T0W8B6|A0A2T0W8B6_9LACT NADPH-dependent 7-cyano- 7-deazaguanine reductase OS=Alkalibacterium olivapovlit icus OX=99907 GN=queF PE=3 SV=1
MTGRNEEELNGVTHLGNQQVEYKMDYAPEVLESFDNKHPENDYFVKFNCPEFTSLCPITGQPDFATIYISYVPGEKMVESKSLKLYLFSFRNHGDFHEDCMNIIMKDLIKLMDPKYIEVWGKFTPRGGISIDPYCNYGKPGTRFEEVAWNRLANHDMYPETIDNR

SEQ ID NO: 43902 - protein, 165 aa, Alkalibacterium pelagium
  misc_feature (1)..(165): tr|A0A1H7M2X2|A0A1H7M2X2_9LACT NADPH-dependent 7-cyano- 7-deazaguanine reductase OS=Alkalibacterium pelagium OX =426702 GN=queF PE=3 SV=1
MTGRNENELTGLSHLGNQQVSYSMDYAPEVLESFDNKHPDNDYFVKFNCPEFTSLCPITGQPDFATIYISYVPGEKMVESKSLKLYLFSFRNHGDFHEDCMNIIMKDLIKLMDPKYIEVWGKFTPRGGISIDPYCNYGKPGTRWEDVAWNRLANHDLYPETIDNR

SEQ ID NO: 43903 - protein, 165 aa, Alkalibacterium sp.
  misc_feature (1)..(165): tr|A0A011RQA4|A0A011RQA4_9LACT NADPH-dependent 7-cyano- 7-deazaguanine reductase OS=Alkalibacterium sp. AK22 OX =1229520 GN=queF PE=3 SV=1
MSGRNEKELTGLSHLGSQQVSYSMTYAPEVLESFDNKHPDNDYFVKFNCPEFTSLCPITSQPDFATIYISYVPGEKMVESKSLKLYLFSFRNHGDFHEDCMNIIMKDLIKLMDPKYIEVWGKFTPRGGISIDPYCNYGKPRTRFEEVAWNRLANHDLYPETIDNR

SEQ ID NO: 43904 - protein, 165 aa, Alkalibacterium thalassium
  misc_feature (1)..(165): tr|A0A1G9EG57|A0A1G9EG57_9LACT NADPH-dependent 7-cyano- 7-deazaguanine reductase OS=Alkalibacterium thalassium OX=426701 GN=queF PE=3 SV=1
MTGRNENELTGLSHLGSQQVSYSMDYAPEVLESFDNKHPDNDYFVKFNCPEFTSLCPITGQPDFATIYISYVPGEKMVESKSLKLYLFSFRNHGDFHEDCMNIIMKDLIKLMDPKYIEVWGKFTPRGGISIDPYCNYGKPGTRWEDVAWNRLANHDLYPETIDNR

SEQ ID NO: 43905 - protein, 162 aa, Alkalicoccus halolimnae
  misc_feature (1)..(162): tr|A0A5C7F9T8|A0A5C7F9T8_9BACI NADPH-dependent 7-cyano- 7-deazaguanine reductase OS=Alkalicoccus halolimnae OX= 1667239 GN=queF PE=3 SV=1
MAHNREEEVNLLGNMNVEYKMDYDPSILESFENRHPNRDYFVKFNCPEFTSLCPKTGQPDFATIYISYIPDEKMVESKSLKLYLFSFRNHGDFHEDCMNNILNDLVDLMDPRYIEVWGKFTPRGGISIDPYVNYGKKGTKYEKMAEHRLMNHDLYPEKIDHR

SEQ ID NO: 43906 - protein, 162 aa, Alkalicoccus saliphilus
  misc_feature (1)..(162): tr|A0A2T4U2Y1|A0A2T4U2Y1_9BACI NADPH-dependent 7-cyano- 7-deazaguanine reductase OS=Alkalicoccus saliphilus OX= 200989 GN=queF PE=3 SV=1
MAHNRDEEVDLLGNTNVDYKMDYDPSILESFENRHQNRDYFVKFNCPEFTSLCPKTGQPDFATIYISYIPEKDMVESKSLKLYLFSFRNHGDFHEDCMNTIMNDLIELMDPRYIEVLGKFTPRGGISIDPYTNYGRPGTKYEKMAEHRMMNHDLYPENIDHR

SEQ ID NO: 43907 - protein, 130 aa, Alkalilimnicola ehrlichii
  misc_feature (1)..(130): tr|A0A3E0WX20|A0A3E0WX20_9GAMM NADPH-dependent 7-cyano- 7-deazaguanine reductase OS=Alkalilimnicola ehrlichii O X=351052 GN=queF PE=3 SV=1
MSTQPSTELETFANPTPERDYTIRIRIPEFTCLCPKTGQPDFATLYLDYIPEARCVELKALKLYIWSFRDRGAFHEAITNEILSDLVRALEPRYMRLRAEFNVRGGIYTDVVAEHRAEGWTPPIPVQLPF

SEQ ID NO: 43908 - protein, 129 aa, Alkalilimnicola ehrlichii
  misc_feature (1)..(129): sp|Q0AAV5|QUEF_ALKEH NADPH-dependent 7-cyano-7-deazagua nine reductase OS=Alkalilimnicola ehrlichii (strain ATC C BAA-1101 / DSM 17681 / MLHE-1) OX=187272 GN=queF PE=3 SV=1
MSTQPSKDLETFPNPRPERDFVLHMRIPEFTCLCPKTGQPDFATIHLDYVPDERCVELKSLKLYMWSFRDQGAFHEAITNEILDDLVRATEPRYMKVTAEFYVRGGIYTTVVAEHRKPGWAPAPKVELA

SEQ ID NO: 43909 - protein, 279 aa, Alkalimonas amylolytica
  misc_feature (1)..(279): tr|A0A1H4FAC3|A0A1H4FAC3_ALKAM NADPH-dependent 7-cyano- 7-deazaguanine reductase OS=Alkalimonas amylolytica OX= 152573 GN=queF PE=3 SV=1
MTKLEPELQQQLSLGKVTGYASDYAPELLQAVPRSVGRNELQLTAELPFLGQDIWHAYELSWLNHKGKPVVALATFVVPFDSPNLIESKSFKLYLNSLNQTRFADLGQVFRLLQQDLSACAGAKVDITLHNVNELQPFQPTWIQGSCLDDLDIEVSEYLYQPKQLKLKADATLRDEKVFSHLLKSNCLITNQPDWASVFIHYRGKAICHESLLRYLIGFRQHNEFHEQCVERIFTDIWRQCQPEFLAVYARYTRRGGLDINPLRSSEPYPVPVIRLTRQ

SEQ ID NO: 43910 - protein, 159 aa, Alkalinema sp.
  misc_feature (1)..(159): tr|A0A251WN44|A0A251WN44_9CYAN NADPH-dependent 7-cyano- 7-deazaguanine reductase OS=Alkalinema sp. CACIAM 70d O X=1934309 GN=queF PE=3 SV=1
MVEPTTEANQATTMKYGEREIEEGKLITFPNPRPGREYNISITLPEFTCKCPFSGYPDFATIHVNYVPDEKVVELKAIKLYVNGYRDKYISHEESVNQILDDLVAACDPLEMTVKGDFQPRGNVHTVVEVQHRKAHRNSNATIEPAEKGKKGKKDKGKK

SEQ ID NO: 43911 - protein, 166 aa, Alkaliphilus metalliredigens
  misc_feature (1)..(166): sp|A6TWD9|QUEF_ALKMQ NADPH-dependent 7-cyano-7-deazagua nine reductase OS=Alkaliphilus metalliredigens (strain QYMF) OX=293826 GN=queF PE=3 SV=1
MMSGRTDEELKGVTLLGNQSVKYQYQYNPDILESFGNKHPENDYFVKLNFPEFTSLCPKTGQPDFAAIYISYVPDKLLVESKSLKLYLFSFRNQGDFHEDCINIIMKDLIRLMDPKYIEVWGKFTPRGGISIDPYCNHGKKGTKWETMAEKRIQWHDMNPENINNR

SEQ ID NO: 43912 - protein, 129 aa, Alkalispirillum mobile
  misc_feature (1)..(129): tr|A0A498C6Q3|A0A498C6Q3_9GAMM NADPH-dependent 7-cyano- 7-deazaguanine reductase OS=Alkalispirillum mobile OX=8 5925 GN=queF PE=3 SV=1
MSTQPSKELETFPNPRPERDFVLHMRVPEFTCLCPKTGQPDFATIYLDYVPDERCVELKSLKLYMWSFRDQGAFHEAITNEMLDDLVRATAPRYMKVTAEFYVRGGIYTTVVAEHRKPGWQPEPKVELA

SEQ ID NO: 43913 - protein, 293 aa, Alkalitalea saponilacus
  misc_feature (1)..(293): tr|A0A1T5H8T7|A0A1T5H8T7_9BACT 7-cyano-7-deazaguanine r eductase OS=Alkalitalea saponilacus OX=889453 GN=SAMN03 080601_02138 PE=4 SV=1
MQPIEAKILGQQIAYPQKYSPEILVAVPRSLNREIYKIDDNDLPFKGFDIWHAYELSFLTTKGLPVTGVLKLKYPSNSTFLVESKSLKLYLNGFNMERFGNDSETGVEEVVKIIKTDLSGLLKTDVETAFFNESLGLTSHFDFHDFKLLETLDEIQNIEFNAFNETPELLKPSDKLSGKIKVATHLLRSNCKITNQPDWGSAFILMKAEQLPELTGLLQYLVSIRNENHFHEEICEMIYNRLWDKFSPEELMVACIYTRRGGIDICPVRANNEELFPKFLCNAKELSAKMLRQ

SEQ ID NO: 43914 - protein, 146 aa, Alkalitalea saponilacus
  misc_feature (1)..(146): tr|A0A1T5F851|A0A1T5F851_9BACT NADPH-dependent 7-cyano- 7-deazaguanine reductase OS=Alkalitalea saponilacus OX= 889453 GN=SAMN03080601_01515 PE=3 SV=1
MERKTLTYKDIDASILKSLPNPTGEAYEIKIKIPEFTFLGVKEQPDFADVFLTFYPKKKIIELKALKQYVYHLRNITVSYERLINVFYDHIMEAYEPERVRVVMVFNPRGGISSKLTIDSDWKVRGGEEKFGDWKNNMEDQWTVTL

SEQ ID NO: 43915 - protein, 272 aa, Alkanindiges illinoisensis
  misc_feature (1)..(272): tr|A0A4Y7XE54|A0A4Y7XE54_9GAMM NADPH-dependent 7-cyano- 7-deazaguanine reductase OS=Alkanindiges illinoisensis OX=197183 GN=queF PE=3 SV=1
MSVEQSLLGQTTSYPTEYAPDILFPIARAPSRQAYAQINGIAQGMDWWHAFELSWLDLENKPQVAIGRLHIPASSEFLIESKSLKLYFNSLNFKNFASTQAFVDCVEQDLSRAANASVRLELYDADALQVSQPSGFCLDQLTPNGVSPHPHCSLLKLEQAADQQVIETSLYSHLLRSNCPVTGQPDWGTLFIRYEGTKPCYSSLLAYIISYRQHSGFHEQCVEQIFADIWQQLQPERLMVYAAYTRRGGLDINPCRVSDPAWLPSPIRLARQ

SEQ ID NO: 43916 - protein, 272 aa, Alkanindiges sp.
  misc_feature (1)..(272): tr|A0A1S8CVN3|A0A1S8CVN3_9GAMM NADPH-dependent 7-cyano- 7-deazaguanine reductase OS=Alkanindiges sp. H1 OX=1907 941 GN=BKE30_08745 PE=3 SV=1
MSVEQSLLGQTTSYPTEYAPEILFPIARAPSRQAYATIHGIAQGMDWWHAFELSWMDLHNKPQVAIGRLHIPASSEFLIESKSLKLYFNSLNFKNFASTQAFIDCVEQDLSRIANASVRLELYDADALLVSQPVGFCLDPLVPDGFSVHPDRTLLKLDSSADRQVIETSLYSHLLRSNCPVTGQPDWGTLFIKYQGIKPCYSSLLAYIISYRQHSGFHEQCVEQIFADIWQQLQPERLMVYAAYTRRGGLDINPCRVSDLDWLPSPIRLARQ

SEQ ID NO: 43917 - protein, 163 aa, Allisonella histaminiformans
  misc_feature (1)..(163): tr|A0A1G5WDC1|A0A1G5WDC1_9FIRM NADPH-dependent 7-cyano- 7-deazaguanine reductase OS=Allisonella histaminiforman s OX=209880 GN=queF PE=3 SV=1
MEKREGLDELTLLGNQHTRYEYDYNPDYLERIPNKHKDRDYFIKFNCPEFTSLCPKTGQPDFATIYISYIPGDFMVESKSLKLYLFSFRNHGDFHEDCVNIIMDDLINLLQPRYIEVWGKFLPRGGLSIDPYCNHGMKGTKWEEFAAYRLREHDIYPETIHNR

SEQ ID NO: 43918 - protein, 170 aa, Allochromatium vinosum
  misc_feature (1)..(170): tr|Q1W3D3|Q1W3D3_ALLVI NADPH-dependent 7-cyano-7-deazag uanine reductase OS=Allochromatium vinosum OX=1049 GN=q ueF PE=3 SV=1
MFLEKRPRPARRRTKDYIIGAQPADRVDGRPIPVSSVESLFMPSAPSKSLETFPNPQPERDYTIRIRVPEFTCLCPKTGQPDFAELMLEYVPEQKCVELKALKTYVWSYRDEGAFHEAVTNRILGDLVEATAPRFMRLTAEFNVRGGIYTTVVAEHRAADWQPPVPVTLP

SEQ ID NO: 43919 - protein, 129 aa, Allochromatium vinosum
  misc_feature (1)..(129): tr|D3RVA4|D3RVA4_ALLVD NADPH-dependent 7-cyano-7-deazag uanine reductase OS=Allochromatium vinosum (strain ATCC 17899 / DSM 180 / NBRC 103801 / NCIMB 10441 / D) OX=57 2477 GN=queF PE=3 SV=1
MPSAPSKSLETFPNPQPERDYTIRIRVPEFTCLCPKTGQPDFAELMLEYVPEQKCVELKALKTYVWSYRDEGAFHEAVTNRILGDLVEATAPRFMRLTAEFNVRGGIYTTVVAEHRAADWQPPVPVTLP

SEQ ID NO: 43920 - protein, 129 aa, Allochromatium warmingii
  misc_feature (1)..(129): tr|A0A1H3DMG8|A0A1H3DMG8_ALLWA NADPH-dependent 7-cyano- 7-deazaguanine reductase OS=Allochromatium warmingii OX =61595 GN=queF PE=3 SV=1
MPSAPSKSLETFPNPQPERDYTIRIRVPEFTCLCPKTGQPDFAELTLEYVPEQHCVELKSLKTYVWSYRDEGGFHEAVTNRILGDLVEATAPRFMRLTAEFNVRGGIYTTVVVEHRAADWQPPQPVMLP

SEQ ID NO: 43921 - protein, 154 aa, Alloprevotella rava
  misc_feature (1)..(154): tr|G5GA88|G5GA88_9BACT NADPH-dependent 7-cyano-7-deazag uanine reductase OS=Alloprevotella rava F0323 OX=679199 GN=queF PE=3 SV=1
MASNRENEGLNTLGRKTEYKSDYAPEVLESFVNKHPDNDYWVRFNCPEFTSLCPITGQPDFAEIRISYIPDVRMVESKSLKLYLFSFRNHGDFHEDCVNVIMKDLIKLMDPKYIEVTGLFTPRGGISIFPYANYGRKGTKYEKLAEYRLQQHDL

SEQ ID NO: 43922 - protein, 154 aa, Alloprevotella sp.
  misc_feature (1)..(154): tr|A0A3P1ZBS0|A0A3P1ZBS0_9BACT NADPH-dependent 7-cyano- 7-deazaguanine reductase OS=Alloprevotella sp. OH1205_C OT-284 OX=2491043 GN=queF PE=3 SV=1
MSSRETEGLQHLGSQGTQYPTDYAPELLESFVNKHQDNDYWVRFNCPEFTSLCPITGQPDFAEIRIAYIPDVRMVESKSLKLYLFSFRNHGDFHEDCVNVIMKDLIRLMDPKYIEVTGLFTPRGGISIYPYANYGRPGTKFEALAEHRLRQHDL

SEQ ID NO: 43923 - protein, 154 aa, Alloprevotella sp.
  misc_feature (1)..(154): tr|A0A496KK53|A0A496KK53_9BACT NADPH-dependent 7-cyano- 7-deazaguanine reductase OS=Alloprevotella sp. OX=18724 71 GN=queF PE=3 SV=1
MSQRETEGLQHLGSQGTQYPTDYAPEMLESFVNKHQENDYWVRFNCPEFTSLCPITGQPDFAEIRISYIPDVKMVESKSLKLYLFSFRNHGDFHEDCVNVIMKDLIRLMDPKYIEVTGLFTPRGGISIYPYANYGKPGTRYEELAAYRLQQHDL

SEQ ID NO: 43924 - protein, 160 aa, Alloprevotella tannerae
  misc_feature (1)..(160): tr|C9LKB0|C9LKB0_9BACT NADPH-dependent 7-cyano-7-deazag uanine reductase OS=Alloprevotella tannerae ATCC 51259 OX=626522 GN=queF PE=3 SV=1
MPHKNHKQMNRELDNLHALGQKTDYKMDYAPEVLEVFENKHPDNDYWVRFNCPEFTSLCPITGQPDFAELRISYMPDKRMVESKSLKLYLFSFRNHGDFHEDCVNVIMKDLIRLMDPKYIEVCGLFTPRGGISIFPYANYGRPGTKYEEMARHRLEQHDL

SEQ ID NO: 43925 - protein, 153 aa, Unknown
  misc_feature (1)..(153): tr|A0A1V1PTT7|A0A1V1PTT7_9PROT NADPH-dependent 7-cyano- 7-deazaguanine reductase OS=alpha proteobacterium U9-1i OX=1605283 GN=queF PE=3 SV=1
MTSDPKGLSQLGGKAAIPASPDKAVLERAPNPHPGTLYLARFSAPEFTSICPVTGQPDFGILVIDYAPNDWIVESKSLKLFLQSFRNHGAFHEDCTVGVAKRIIDAIDPIWLRIGGYWNPRGGIPIDVFWQTGAAPEGLWLPEQGVGTYRGRD

SEQ ID NO: 43926 - protein, 146 aa, Unknown
  misc_feature (1)..(146): tr|A0A2A5XRU2|A0A2A5XRU2_9PROT NADPH-dependent 7-cyano- 7-deazaguanine reductase OS=alpha proteobacterium MED-G 09 OX=2007301 GN=queF PE=3 SV=1
MKHLGKQSKQPTSPNIKILDKVKNNNVGSNYVIRLIQPEFTCLCPITGQPDFAHIVIDYIPNKWIVESKSLKLFFNSYRDSKSFHENTTIEIVQSINKLLNPVWIRIGGYWYPRGGIPIDIFWQNKNPPKSAWVPEQEVTPYRGRG

SEQ ID NO: 43927 - protein, 155 aa, Alphaproteobacteria bacterium
  misc_feature (1)..(155): tr|A0A257HNU7|A0A257HNU7_9PROT NADPH-dependent 7-cyano- 7-deazaguanine reductase OS=Alphaproteobacteria bacteri um PA1 OX=2015569 GN=queF PE=3 SV=1
MSNSSIYEGLGTLGQDVRGYASPEEAVLERVANPHPGTAYLARFVAPEFTSLCPVTGQPDFAHLVIDYVPSDWLVESKSLKLFLTSFRNHGAFHEDCTVAIGKRLVELLAPTWLRIGGYWYPRGGIPIDVFYATGPAPEGVWIPDQGVPPYRGRG

SEQ ID NO: 43928 - protein, 156 aa, Alphaproteobacteria bacterium
  misc_feature (1)..(156): tr|A0A2N3DKG0|A0A2N3DKG0_9PROT NADPH-dependent 7-cyano- 7-deazaguanine reductase OS=Alphaproteobacteria bacteri um HGW-Alphaproteobacteria-13 OX=2013659 GN=queF PE=3 S V=1
MSDSTPAPLAPKHLGQSSELPASPQAAVLDYVPNPRAGELYLVRFAAPEFTSLCPVTGQPDFAHLVIDYAPDETIVESKSLKLFLGAFRNHAGFHEDCTVGIGRRLTDEMRPRWLRIGGYWYPRGGIPIDVFWQSGPPPEGLWLPDQGVAPYRGRG

SEQ ID NO: 43929 - protein, 149 aa, Alsobacter sp.
  misc_feature (1)..(149): tr|A0A2T1HXM3|A0A2T1HXM3_9RHIZ NADPH-dependent 7-cyano- 7-deazaguanine reductase OS=Alsobacter sp. SH9 OX=21099 33 GN=queF PE=3 SV=1
MAIETTQLGKPSALPASPEEAVLDRVPNPHPDTLYLARFTAPEFTSICPVTGQPDFGILVIDYAPKGWLVESKSLKLYLNSFRNHGAFHEDCTVGIGKRLVELLEPQWLRIGGYWFPRGGIPIDVFWQTGEPPKSLWLPDQGVPPYRAR

SEQ ID NO: 43930 - protein, 153 aa, Altererythrobacter aquimixticola
  misc_feature (1)..(153): tr|A0A4T3F2P2|A0A4T3F2P2_9SPHN NADPH-dependent 7-cyano- 7-deazaguanine reductase OS=Altererythrobacter aquimixt icola OX=2489173 GN=queF PE=3 SV=1
MTDDTPQPLHLGQQSALPASPDEAVLDYVPNPRPGSLYLVRFAAPEFTSLCPVTGAPDFAHLVIDYAPGETIVESKSLKLFLGSFRNHNGFHEDVTVGIGERLFREMEPRWLRIGGYWYPRGGIPIDVFWQSGPPPEGLWLPDQGVAPYRGRG

SEQ ID NO: 43931 - protein, 155 aa, Altererythrobacter atlanticus
  misc_feature (1)..(155): tr|A0A0F7KT71|A0A0F7KT71_9SPHN NADPH-dependent 7-cyano- 7-deazaguanine reductase OS=Altererythrobacter atlantic us OX=1267766 GN=queF PE=3 SV=1
MSNHSETGSPRHLGQQSALPESPESAELDYVPNPRAGSLYCIRFAAPEFTSLCPVTGQPDFAHLVIDYAPERTIVESKSLKLFLGSFRNHCGFHEDVTVGIGQRLFNEMEPRWLRIGGYWYPRGGIPIDVFWQSGTPPEGLWLPDQGVAPYRGRG

SEQ ID NO: 43932 - protein, 162 aa, Altererythrobacter dongtanensis
  misc_feature (1)..(162): tr|A0A1B2ADB6|A0A1B2ADB6_9SPHN NADPH-dependent 7-cyano- 7-deazaguanine reductase OS=Altererythrobacter dongtane nsis OX=692370 GN=queF PE=3 SV=1
MKRDSRQMRGMSDTPATMHLGQTSALPASPQEAVLDYVPNPRAGMLYLVRFAAPEFTSLCPVTGQPDFAHLVIDYAPGETIVESKSLKLFLGSFRNHCGFHEDVTVGIGQRLAEEMKPRWLRIGGYWYPRGGIPIDVFWQTGTPPEGLWVPEQGVQGYRGRG

SEQ ID NO: 43933 - protein, 152 aa, Altererythrobacter epoxidivorans
  misc_feature (1)..(152): tr|A0A0M4M8T2|A0A0M4M8T2_9SPHN NADPH-dependent 7-cyano- 7-deazaguanine reductase OS=Altererythrobacter epoxidiv orans OX=361183 GN=queF PE=3 SV=1
MSDTPETLHLGQTSALPASPEEAQLDYPANPRKGSLYLVRFAAPEFTSLCPVTGQPDFAHIVIDYAPGDTIVESKSLKLFLGSFRNHSGFHEDVTVGIGQRLVEEMKPKWLRIGGYWYPRGGIPIDVFWQTGAPPEGLWVPDQGVASYRGRG

SEQ ID NO: 43934 - protein, 152 aa, Altererythrobacter ishigakiensis
  misc_feature (1)..(152): tr|A0A562UV68|A0A562UV68_9SPHN NADPH-dependent 7-cyano- 7-deazaguanine reductase OS=Altererythrobacter ishigaki ensis OX=476157 GN=queF PE=3 SV=1
MSDQPSPQFLGKQTELPASPEQAQLDYVPNPREGTLYLVRFAAPEFTSLCPVTGQPDFAHLVIDYAPGNTIVESKSLKLFLGSFRNHNGFHEDVTVGIGQRLAAEMKPKWLRIGGYWYPRGGIPIDVFWQSGPIPEGLWVPEQGVQGYRGRG

SEQ ID NO: 43935 - protein, 152 aa, Altererythrobacter marensis
  misc_feature (1)..(152): tr|A0A0G3XAB0|A0A0G3XAB0_9SPHN NADPH-dependent 7-cyano- 7-deazaguanine reductase OS=Altererythrobacter marensis OX=543877 GN=queF PE=3 SV=1
MSDTPGTLHLGQASTLPPSPEEARLDYVPNPRDEALYLVRFAAPEFTSLCPVTGQPDFAHLVIDYAPGKTIVESKSLKLYLGSFRNHCGFHEDVTVGIGQRLAAEMKPKWLRIGGYWYPRGGIPIDVFWQSGPPPEALWVPDQGVASYRGRG

SEQ ID NO: 43936 - protein, 156 aa, Altererythrobacter marensis
  misc_feature (1)..(156): tr|A0A2W5AG89|A0A2W5AG89_9SPHN NADPH-dependent 7-cyano- 7-deazaguanine reductase OS=Altererythrobacter marensis OX=543877 GN=queF PE=3 SV=1
MDDTPDRPAAPLHLGQASTLPASPDAAVLDYVPNPRTGTLYLVRFAAPEFTSLCPVTGQPDFAHLVIDYAPGETIVESKSLKLFLGSFRNHAGFHEDVTVGIGQRLAEEMRPQWLRIGGYWYPRGGIPIDVFWQTGTPPAGLWVPDQGVQPYRGRG

SEQ ID NO: 43937 - protein, 154 aa, Altererythrobacter namhicola
  misc_feature (1)..(154): tr|A0A1C7DAJ2|A0A1C7DAJ2_9SPHN NADPH-dependent 7-cyano- 7-deazaguanine reductase OS=Altererythrobacter namhicol a OX=645517 GN=queF PE=3 SV=1
MSGKSDNAPRQLGQQTPLPGSPAEAELDYVPNPRPGTQYLIRFAAPEFTSLCPVTSQPDFAHIVIDYVPGETIVESKSLKLFLGSFRNHNGFHEDVTVGIGQRLFTEMQPEWLRIGGYWYPRGGIPIDIFWQSAAPPEGLWLPDQGVASYRGRG

SEQ ID NO: 43938 - protein, 151 aa, Altererythrobacter sp.
  misc_feature (1)..(151): tr|A0A1Q3MCN6|A0A1Q3MCN6_9SPHN NADPH-dependent 7-cyano- 7-deazaguanine reductase OS=Altererythrobacter sp. 66-1 2 OX=1895714 GN=queF PE=3 SV=1
MSEQTPRVLGRAAELPASPEAAELDYVPNPRAGTLYLVRFAAPEFTSLCPITGQPDFAHLVIDYAPGETIVESKSLKLFLGAFRNHGGFHEDVTVGIGQRLFSEMQPRWLRIGGYWYPRGGIPIDVFWQSGAPPEGLWLPDQGVASYRGRG

SEQ ID NO: 43939 - protein, 152 aa, Altererythrobacter sp.
  misc_feature (1)..(152): tr|A0A2E1Y8S7|A0A2E1Y8S7_9SPHN NADPH-dependent 7-cyano- 7-deazaguanine reductase OS=Altererythrobacter sp. OX=1 872480 GN=queF PE=3 SV=1
MSDTVTPKFLGENSPLPASPEEAELDYVSNPRTGQLYMVRFAAPEFTSLCPVTGQPDFAHLVLDYAPDATIVESKSLKLFLGSFRNHCGFHEDVTVGIGQRLFEEMKPKWLRIGGYWYPRGGIPIDVFWQSGAAPDGLWVPDQGVSSYRGRG

SEQ ID NO: 43940 - protein, 156 aa, Altererythrobacter xiamenensis
  misc_feature (1)..(156): tr|A0A1Y6ELU3|A0A1Y6ELU3_9SPHN NADPH-dependent 7-cyano- 7-deazaguanine reductase OS=Altererythrobacter xiamenen sis OX=1316679 GN=queF PE=3 SV=1
MSDTPPKTPDTLHLGQTSSLPASPEEAKLDYVPNPRSGALYLVRFAAPEFTSLCPVTGAPDFAHLVIDYAPGETIVESKSLKLFLGAFRNHNGFHEDVTVGIGQRLAEEMQPRWLRIGGYWYPRGGIPIDVFWQTGTPPEGLWVPEQGVPGYRGRG

SEQ ID NO: 43941 - protein, 163 aa, Alteribacillus bidgolensis
  misc_feature (1)..(163): tr|A0A1G8MJW9|A0A1G8MJW9_9BACI NADPH-dependent 7-cyano- 7-deazaguanine reductase OS=Alteribacillus bidgolensis OX=930129 GN=queF PE=3 SV=1
MPEGKGVEHLSHLGSEDTSYTFEYDPSLLETFENNHPNRDYFVKFNCPEFTTLCPKTGQPDFAALYISYIPEKKMVESKSLKLYLFSYRNHGGFHEDAINMIVNDLVELMDPRYLEVWGKFTPRGGISIDPYVNYGRSGTKYEEMASQRLLYHDMHPENIDNR

SEQ ID NO: 43942 - protein, 164 aa, Alteribacillus iranensis
  misc_feature (1)..(164): tr|A0A1I2CUM7|A0A1I2CUM7_9BACI NADPH-dependent 7-cyano- 7-deazaguanine reductase OS=Alteribacillus iranensis OX =930128 GN=queF PE=3 SV=1
MMTERKGVENLSHLGSEDTKYTFEYDPTLLETFENNHPNRDYFVKFNCPEFTTLCPKTGQPDFGTIYISYIPDEKMVESKSLKLYLFSFRNHGGFHEDAMNVILNDLLELMDPRYIEVWGKFTPRGGISIDPYVNYGKPGTKYEDMAAQRLMYHDMYPEKIDNR

SEQ ID NO: 43943 - protein, 163 aa, Alteribacillus persepolensis
  misc_feature (1)..(163): tr|A0A1G8GIQ8|A0A1G8GIQ8_9BACI NADPH-dependent 7-cyano- 7-deazaguanine reductase OS=Alteribacillus persepolensi s OX=568899 GN=queF PE=3 SV=1
MNERNGVEDLSHLGSEKTSYTFQYDPSLLETFENNHPNRDYFVKFNCPEFTTLCPKTGQPDFATLYISYIPDKKMVESKSLKLYLFSFRDHGGFHEDAINVIVNDLVELMDPRYLEVWGKFTPRGGISIDPYANYGRPGTKYEEMASTRLLYHDMYPETITNR

SEQ ID NO: 43944 - protein, 250 aa, Alteromonadaceae bacterium
  misc_feature (1)..(250): tr|A0A3R7VD24|A0A3R7VD24_9ALTE NADPH-dependent 7-cyano- 7-deazaguanine reductase QueF OS=Alteromonadaceae bacte rium TMED101 OX=1986649 GN=CBC61_003490 PE=4 SV=1
  misc_feature (30)..(30): Xaa can be any naturally occurring amino acid
MTGVLGTKVAAPQQYAPDILERIDRHSGRXGIDNASRYVSTGHDIWHCYELSWLLPGENVSYLVGALIIPASSAYTVESKSLKLYLNSLNAHEFVSDEAAVSCVEADLSTLTGAKVTLTTTDPSALNVSTVPLSDVQITPRDTKGTEIYRCSGFRSLCPVTAQPDWASLCIEMSSAAYDQREVERAIASLRNHQGFHEQCVEDLYSRLENALLPAELHVVGFFQRRGGVDITPWRSSAALPPCLTRLYEQ

SEQ ID NO: 43945 - protein, 275 aa, Alteromonadaceae bacterium
  misc_feature (1)..(275): tr|A0A495D6T1|A0A495D6T1_9ALTE NADPH-dependent 7-cyano- 7-deazaguanine reductase OS=Alteromonadaceae bacterium 2052S.S.stab0a.01 OX=1304900 GN=queF PE=3 SV=1
MAGIKLGQTSAYSDHYNPELLEPIPRSLSRAGLVDGQVLPFVGVDIWNGYELSWLRPGGLPAVAMARFEVPADSEAIIESKSFKYYLNSFNQTVFESPVAVQAAMTRDLSAAAGGNVRVVLLPVAGGDAFADFGGQCVDDLDISLDRYQPDAGLLAFDSDERVDDGQLHSHLLKSNCPVTGQPDWASVWVGYSGKRLSAEGLLRYLVSFRQHQDFHEHCVEKIFTDLMATGELTSLAVYARYTRRGGLDINPYRATADRGASLPDALQGLRLARQ

SEQ ID NO: 43946 - protein, 281 aa, Alteromonadales bacterium
  misc_feature (1)..(281): tr|A0Y508|A0Y508_9GAMM NADPH-dependent 7-cyano-7-deazag uanine reductase OS=Alteromonadales bacterium TW-7 OX=1 56578 GN=queF PE=3 SV=1
MTDYSNSPDLKGSVLGQSTEYVDDYTPSLLFPIARKLNRDALNIDEAELPFKGQDIWTGYELSWLNAKGKPQVAVALFTFACQSSHIIESKSFKLYLNSFNQTRFESINTVKQHLIDDLSGAVNSPVQVTLYKADDFNCLPCTALPGECIDDLDIEIDNYDIDAYSLKAHSDEIVTETLNSHLLKSNCLITSQPDWASIIIRYTGEKICRESLLRYLISFRTHNEFHEQCVERIYSDLTTQLNIKELEVYARYTRRGGLDINPYRSTHYNETPFAVKINRQ

SEQ ID NO: 43947 - protein, 285 aa, Alteromonadales bacterium
  misc_feature (1)..(285): tr|A0A2N0WRM1|A0A2N0WRM1_9GAMM NADPH-dependent 7-cyano- 7-deazaguanine reductase OS=Alteromonadales bacterium a lter-6D02 OX=2058087 GN=queF PE=3 SV=1
MTTKSPYDNAPELASLTLGKQTDYDNSFDEKLLQAVPRALNRNELNLGQTLPFHGDDIWTGYELSWLNAKGKPVVAMANFKVPCQSNNLIESKSFKLYLNSYNQQRFNDADEVTAQLTKDLSVCAESNVTVEIILAHQFATQRIISAAGHCIDDLDITIDDYQFSTDFLAHSDNSNQPLVSETLHSNLLKSNCLITNQPDWGTVEISYHGRQIDHEALLRYLISFRQHNEFHEQCVERIFTDLMRFCHCDKLTVYARYTRRGGLDINPFRSNFEETPSNQRQARQ

SEQ ID NO: 43948 - protein, 282 aa, Alteromonas aestuariivivens
  misc_feature (1)..(282): tr|A0A3D8M4C7|A0A3D8M4C7_9ALTE NADPH-dependent 7-cyano- 7-deazaguanine reductase OS=Alteromonas aestuariivivens OX=1938339 GN=queF PE=3 SV=1
MTDSSTSNLFPLPEHLTLGKTVQYEEHYNPKLLQNVPRALGRSTLNFDESNLPFMGVDIWNGYELSWLNMKGKPNVAILECRVPITSPNLVESKSFKLYLNSFNQTRFNSVDEVRQCLEKDLSDCAGESVAVTIYQAHQFSKLSMGEMNGTLIDDLDIEVTRYQPDKTLVSTCDHEVEETLVSHLLKSNCLITSQPDWASIQIHYKGKGIEHESLLKYLIAFRQHNEFHEQCVERIFCDLMEQCQPEKLAVYARYTRRGGLDINPFRANFDACIGNERHARQ

SEQ ID NO: 43949 - protein, 283 aa, Alteromonas australica
  misc_feature (1)..(283): tr|A0A075P425|A0A075P425_9ALTE NADPH-dependent 7-cyano- 7-deazaguanine reductase OS=Alteromonas australica OX=5 89873 GN=queF PE=3 SV=1
MTDNVKDNLTVSAPDGLSLGKQVEYEFHYNPDLLQGVPRSLSRDTLSLNPLNLPFSGNDTWTGYELSWLTPKGKPQVAILECRVPITSPNLIESKSFKLYLNSFNQSKFENANAVKDVIQSDLSACAGSEVDVALVLPSQFASLSFKEFEGELLDDLDVEINEYSPNTAFLSQSDKNVEESLVSHLLKSNCLITSQPDWASVIIRYQGKAINREGLLKYLISFRQHNEFHEQCVERIFCDILAHCEVDKLTVCARYTRRGGLDINPFRSNFEAPYPNFRQARQ

SEQ ID NO: 43950 - protein, 279 aa, Alteromonas confluentis
  misc_feature (1)..(279): tr|A0A1E7Z659|A0A1E7Z659_9ALTE NADPH-dependent 7-cyano- 7-deazaguanine reductase OS=Alteromonas confluentis OX= 1656094 GN=queF PE=3 SV=1
MTNPISFQVPSDLTLGKTVEYESQYNPALLQGVPRSLSRDTISLNADALPFHGCDIWTGYELSWLNAKGKPQVAIMECRVPITSCNLIESKSFKLYLNSFNQTAFDSTTQVKERLEADLSNCAGEAVTVTLYLSNAFSSLSMAEFDGDVIDDLDVTIDSYSPDATLLQTSANNVSEKLVSHLLKSNCLITSQPDWASIQIAYQGEQINRESLLKYLIGFRQHNEFHEQCVERIFSDIMTHCKPEKLTVYARYTRRGGLDINPYRSNFEQPGKNVRSARQ

SEQ ID NO: 43951 - protein, 281 aa, Alteromonas lipolytica
  misc_feature (1)..(281): tr|A0A1E8FEV0|A0A1E8FEV0_9ALTE NADPH-dependent 7-cyano- 7-deazaguanine reductase OS=Alteromonas lipolytica OX=1 856405 GN=queF PE=3 SV=1
MTTKQTATPSLPANLTLGQKVDYIEQYSPSLLQGVPRTLSRDQIGVSHPLPFDGIDIWNGYELSWLNPKGKPQVAILQCRVPINSANLIESKSFKLYLNSFNQSVFSGKDEITEVITRDLSACAEAPVEVQLFPASAFSQLNLGELSGTVIDDLDIEIHDYQPNPQLLKTTGGAATSETLVSHLLKSNCLITSQPDWASVQIHYEGEPIDHAGLLAYLISFRRHNEFHEQCIERIFCDVMAQCHPVKLAVYARYTRRGGLDINPMRSNCDFSVTNDRLARQ

SEQ ID NO: 43952 - protein, 286 aa, Alteromonas macleodii
  misc_feature (1)..(286): tr|A0A2K9IEN1|A0A2K9IEN1_ALTMA NADPH-dependent 7-cyano- 7-deazaguanine reductase OS=Alteromonas macleodii OX=28 108 GN=queF PE=3 SV=1
MSTDNSPQKITISAPDDLSLGKQVDYEFEYNPDLLQGVPRSLSRDTLNLAGSGLPFDGIDTWTGYELSWLNLKGKPNVAILECHVPITSKNLIESKSFKLYLNSFNQTKFASAEDVRQVLQADLSACAGEPVEVKLILPEQFSSLQFQEFNGTLLDSLDVEIDQYSPNTQYLTVAKSEAGVQETLVSHLLKSNCLITSQPDWASIQVRYEGKAIEHEGLLKYLISFRQHNEFHEQCVERIYNDIMKHCQPDKLTVCARYTRRGGLDINPFRSNYEAPYANHRQARQ

SEQ ID NO: 43953 - protein, 286 aa, Alteromonas macleodii
  misc_feature (1)..(286): tr|A0A126PX25|A0A126PX25_ALTMA NADPH-dependent 7-cyano- 7-deazaguanine reductase OS=Alteromonas macleodii OX=28 108 GN=queF PE=3 SV=1
MSTDNSPQKITISAPDDLSLGKQVDYEFEYNPDLLQGVPRSLSRDTLNLASSGLPFDGIDTWTGYELSWLNLKGKPNVAILECHVPITSKNLIESKSFKLYLNSFNQTKFASVEDVRQVLQADLSACAGEPVEVKLILPEQFSSLQFQEFNGTLLDSLDVEIDQYSPNTQYLTVAKNETGVQETLVSHLLKSNCLITSQPDWASIQIRYEGRAIEHEGLLKYLISFRQHNEFHEQCVERIYNDIMKHCQPDKLTVCARYTRRGGLDINPFRSNYEAPYANHRQARQ

SEQ ID NO: 43954 - protein, 277 aa, Alteromonas marina
  misc_feature (1)..(277): tr|A0A0B3Y0L7|A0A0B3Y0L7_9ALTE NADPH-dependent 7-cyano- 7-deazaguanine reductase OS=Alteromonas marina OX=20379 5 GN=queF PE=3 SV=1
MTISAPDDLSLGKQVDYEFEYNPDLLQGVPRSLSRDTLNLAGSGLPFDGIDTWTGYELSWLNLKGKPNVAILECHVPITSKNLIESKSFKLYLNSFNQTKFASAEDVRQVLQADLSACAGEPVEVKLILPEQFSSLQFQEFNGTLLDSLDVEIDQYSPNTQYLTVAKNETGVEETLVSHLLKSNCLITSQPDWASIQIRYKGNAIEHEGLLKYLISFRQHNEFHEQCVERIYNDIMQHCQPDKLTVCARYTRRGGLDINPFRSNYEAPYANHRQARQ

SEQ ID NO: 43955 - protein, 286 aa, Alteromonas mediterranea
  misc_feature (1)..(286): tr|S5AD87|S5AD87_9ALTE NADPH-dependent 7-cyano-7-deazag uanine reductase OS=Alteromonas mediterranea 615 OX=130 0253 GN=queF PE=3 SV=1
MSTDNSPNKIIITAPDDLSLGKQVDYEFEYNPSLLQGVPRSLSRDTLNLTGAKLPFSGIDTWTGYELSWLNLKGKPNVAILECHVPITSENLIESKSFKLYLNSFNQTKFRSAEDVQKVLQRDLSACAGEPVNVNLILPKQFTELQFKEFEGTLLDELDVDIETYSPTTQYLFTSKDDKKAKETLVSHLLKSNCLITSQPDWASIQIKYEGKAIEHEGLLKYLISFRQHNEFHEQCVERIYNDIMFHCKPDKLTVCARYTRRGGLDINPFRSNYEAPYANHRQARQ

SEQ ID NO: 43956 - protein, 286 aa, Alteromonas mediterranea
  misc_feature (1)..(286): tr|F2GBX5|F2GBX5_ALTMD NADPH-dependent 7-cyano-7-deazag uanine reductase OS=Alteromonas mediterranea (strain DS M 17117 / CIP 110805 / LMG 28347 / Deep ecotype) OX=177 4373 GN=queF PE=3 SV=1
MSTDNSPNKIIITAPDDLSLGKQVDYEFEYNPSLLQGVPRSLSRDTLNLTGAELPFSGIDTWTGYELSWLNLKGKPNVAILECHVPITSENLIESKSFKLYLNSFNQTKFRSAEDVQKVLQKDLSACAGEPVNVNLILPKQFTELQFKEFEGTLLDELDVDIETYSPTTQYLFTSKDDKKVKETLVSHLLKSNCLITSQPDWASIQIKYEGKAIEHEGLLKYLISFRQHNEFHEQCVERIYNDIMFHCKPDKLTVCARYTRRGGLDINPFRSNYEAPYANHRQARQ

SEQ ID NO: 43957 - protein, 283 aa, Alteromonas naphthalenivorans
  misc_feature (1)..(283): tr|F5Z4L8|F5Z4L8_ALTNA NADPH-dependent 7-cyano-7-deazag uanine reductase OS=Alteromonas naphthalenivorans OX=71 5451 GN=queF PE=3 SV=1
MTSKVNDKISISAPKDLSLGKQVEYEFHYNPNLLQGVPRSLSRDTLSLNAEALPFTGIDTWTGYELSWLNKKGKPHVALLECNVPITSANLIESKSFKLYLNSFNQTAFESPEDVRATLASDLSKCAGEPVMVSLTLPNQFNTLTFKEFEGVLLDELDISVETYEPDTSLLKVTDEKKAESLVSHLLKSNCLITSQPDWASVQIRYEGRSIDHEGLLKYLISFRQHNEFHEQCVERIYCDIMQHCQPEKLTVCARYTRRGGLDINPFRSNFETPYANKRQARQ

SEQ ID NO: 43958 - protein, 279 aa, Alteromonas pelagimontana
  misc_feature (1)..(279): tr|A0A2A6AVS0|A0A2A6AVS0_9ALTE NADPH-dependent 7-cyano- 7-deazaguanine reductase OS=Alteromonas pelagimontana O X=1858656 GN=queF PE=3 SV=1
MNSSTTFTLPTHLTLGKTVEYETVYNPALLQSVPRSLGRDAIGLDEDAIPFSGSDVWTGYELSWLNAKGKPQVAMLECSVPVTSPNLIESKSFKLYLNSFNQTRFSSVESVQQTLTKDLSGCAGEQVYAAVVLPEKFTGLKIQEFSGKVIDDLDIEVTNYTPENQSLWCEDDSAAETLISHLLKSNCLITSQPDWASILIKYEGQKINEESLLRYLIGFRQHNEFHEQCVERIFCDILARCQPKKLTVYARYTRRGGLDINPFRSNFELPYPNHRLARQ

SEQ ID NO: 43959 - protein, 286 aa, Alteromonas sp.
  misc_feature (1)..(286): tr|A0A2V3VD16|A0A2V3VD16_9ALTE NADPH-dependent 7-cyano- 7-deazaguanine reductase OS=Alteromonas sp. I10 OX=1938 740 GN=queF PE=3 SV=1
MSTDNSPQKITISAPDDLSLGKQVDYEFEYNPGLLQGVPRSLSRDTLNLAGSGLPFDGIDTWTGYELSWLNLKGKPNVAILECHVPITSKNLIESKSFKLYLNSFNQTKFASAEDVQQVLQADLSACAGEPVEVKLILPEQFSSLQFQEFNGTLLDSLDVEIDQYSPNTQYLTVMKSEAGVQETLVSHLLKSNCLITSQPDWASIQIRYEGKAIEHEGLLKYLISFRQHNEFHEQCVERIYNDIMQHCQPDKLTVCARYTRRGGLDINPFRSNYEAPYANHRQARQ

SEQ ID NO: 43960 - protein, 283 aa, Alteromonas sp.
  misc_feature (1)..(283): tr|A0A5H3A3T0|A0A5H3A3T0_9ALTE NADPH-dependent 7-cyano- 7-deazaguanine reductase OS=Alteromonas sp. I4 OX=26523 80 GN=queF PE=4 SV=1
MTELSKQKKELSLPTHLTLGQSVDYIEQYTPDLLQSVPRSLSRDQIGVTAPLPFEGVDIWNGYELSWLNAKGKPQVAILQCRVPVTSANLIESKSFKLYLNSFNQTKFNSREDVSACLEKDLSACADAPVAVTLFGPEQFDDLPVKNLTGTCIDELDIDVTRYSPAPSLLNSDTSQHAEETLVSHLLKSNCLITSQPDWASIQIRYQGPKIDHEGLLAYLISFRQHNEFHEQCIERIYCDLMARCKPLKLAVYARYTRRGGLDINPLRSNYTVDIENDRQARQ

SEQ ID NO: 43961 - protein, 283 aa, Alteromonas stellipolaris
  misc_feature (1)..(283): tr|A0A0S1YMC6|A0A0S1YMC6_9ALTE NADPH-dependent 7-cyano- 7-deazaguanine reductase OS=Alteromonas stellipolaris L MG 21856 OX=1160720 GN=queF PE=3 SV=1
MTSKVNDRISISAPKDLSLGKQVEYEFHYNPDLLQGVPRSLSRDTLSLNADALPFTGIDTWTGYELSWLNKKGKPNVALLECYVPITSANLIESKSFKLYLNSFNQTAFESPEDVRATLASDLSKCAGEPVVVNLTLPNQFNTLTFKEFEGVLLDELDIAVETYEPDTSLLKVTGDKKAETLVSHLLKSNCLITSQPDWASVQIRYEGNGLDHEGLLKYLISFRQHNEFHEQCVERIYCDIMQHCQPKKLTVCARYTRRGGLDINPFRSNFETPYANKRQARQ

SEQ ID NO: 43962 - protein, 156 aa, Alysiella crassa
  misc_feature (1)..(156): tr|A0A376BKI9|A0A376BKI9_9NEIS NADPH-dependent 7-cyano- 7-deazaguanine reductase OS=Alysiella crassa OX=153491 GN=queF PE=3 SV=1
MRNEQELHGLTLLGNQKTEYRSDYAPEVLEAFDNKHPDNDYFVKFVCPEFTSLCPMTGQPDFATIVIRYIPDVKMVESKSLKLYLFSFRNHGDFHEDCVNIIMKDLIQLMNPKYIEVFGEFTPRGGIAIHPFANYGRAGTPFEQMARERLFAHDMQ

SEQ ID NO: 43963 - protein, 156 aa, Alysiella filiformis
  misc_feature (1)..(156): tr|A0A286E6P8|A0A286E6P8_9NEIS NADPH-dependent 7-cyano- 7-deazaguanine reductase OS=Alysiella filiformis DSM 16 848 OX=1120981 GN=queF PE=3 SV=1
MRNEQELHGLTLLGNQKTEYRSDYAPEVLEAFDNKHPDNDYFVKFVCPEFTSLCPMTGQPDFATIVIRYIPDVKMVESKSLKLYLFSFRNHGDFHEDCVNIIMKDLIKLMNPKYIEVFGEFTPRGGIAIHPFANYGRAGTPFEQMARERLFAHDMQ

SEQ ID NO: 43964 - protein, 275 aa, Amantichitinum ursilacus
  misc_feature (1)..(275): tr|A0A0N0GQP8|A0A0N0GQP8_9NEIS NADPH-dependent 7-cyano- 7-deazaguanine reductase OS=Amantichitinum ursilacus OX =857265 GN=queF PE=3 SV=1
MSDAQFSPLGKAVSYKTEYDPTLLFPIPRQGKRDEIGVTGALPFMGVDIWNAFELSWLNARGKPQVALAVFHIPADSPNIVESKSFKLYLNSFNQTRLESVDALQALLAQDISAATGGSVQVQITLPDAFGKEKMADLAGYCIDNLDIDIDTYEPSPQLLHCDELDSPVDESLTSNLLKSNCLVTGQPDWASVQIRYVGAPINRESLLRYLISFRNHNEFHEQCVERIFMDIMRTCKPIKLAVYARYTRRGGLDINPYRCNFSGPPPGNIRTARQ

SEQ ID NO: 43965 - protein, 153 aa, Aminobacter aminovorans
  misc_feature (1)..(153): tr|A0A142M9T0|A0A142M9T0_AMIAI NADPH-dependent 7-cyano- 7-deazaguanine reductase OS=Aminobacter aminovorans OX= 83263 GN=queF PE=3 SV=1
MTITDSLTQLGTQVQTPASPETAVLETVPYDRLGGPPAIVRFTCPEFTSLCPVTGQPDFAHIVIDYAPDRLLVESKSLKLFMVSFRNHGAFHEDCTVMIGRRVVAATKPLWLRIAGYWYPRGGIPIDVFWQTGRPPEGVWLPDTGVAPYRGRG

SEQ ID NO: 43966 - protein, 153 aa, Aminobacter aminovorans
  misc_feature (1)..(153): tr|A0A380WNU4|A0A380WNU4_AMIAI NADPH-dependent 7-cyano- 7-deazaguanine reductase OS=Aminobacter aminovorans OX= 83263 GN=queF PE=3 SV=1
MTNTDTLTQLGTHVQTPTSPETAVLETVPYDRLGGPPAIVRFTCPEFTSLCPVTGQPDFAHIVIDYAPDRMLVESKSLKLFMVSFRNHGAFHEDCTVMIGRRVVAATKPLWLRIAGYWYPRGGIPIDVFWQTGRPPEGVWLPETGVAPYRGRG

SEQ ID NO: 43967 - protein, 161 aa, Aminobacter sp.
  misc_feature (1)..(161): tr|A0A316H4Y1|A0A316H4Y1_9RHIZ NADPH-dependent 7-cyano- 7-deazaguanine reductase OS=Aminobacter sp. AP02 OX=213 5737 GN=queF PE=3 SV=1
MAILKSHPMTVTDTLTQLGTRVETPTSPETAVLETVPYERVGGPPAIVRFACPEFTSLCPVTGQPDFAHIVIDYAPDRLLVESKSLKLFMVSFRNHGAFHEDCTVMIGRRIVEATKPLWLRIAGYWYPRGGIPIDVFWQTGAPPEGSWLPDTGVAPYRGRG

SEQ ID NO: 43968 - protein, 153 aa, Aminobacter sp.
  misc_feature (1)..(153): tr|A0A2S0XNH0|A0A2S0XNH0_9RHIZ NADPH-dependent 7-cyano- 7-deazaguanine reductase OS=Aminobacter sp. MSH1 OX=374 606 GN=queF PE=3 SV=1
MTITDTLTQLGTKVETPTSPETAVLETVPYTRVEGPPAIVRFTCPEFTSLCPVTGQPDFAHIVIDYAPDKMLVESKSLKLFMVSFRNHGAFHEDCTVMIGRRVVEATKPLWLRIAGYWYPRGGIPIDVFWQTGTPPEGSWLPETGVAPYRGRG

SEQ ID NO: 43969 - protein, 139 aa, Ammoniphilus oxalaticus
  misc_feature (1)..(139): tr|A0A419SEJ0|A0A419SEJ0_9BACL NADPH-dependent 7-cyano- 7-deazaguanine reductase OS=Ammoniphilus oxalaticus OX= 66863 GN=queF PE=3 SV=1
MARVEHDYDKYQGIRFDTQDESVILVNILETIPYEYVGKRTEVNIPTNEFTSVCPWSGLPDFADIKIMFVPNKELIEMKSLKYYLTSYRNVGIYQEHATNRILNDLVACCDPLYMKIEADWNKRGGLGTTVVVEYTRED

SEQ ID NO: 43970 - protein, 139 aa, Ammoniphilus sp.
  misc_feature (1)..(139): tr|A0A4Q1SUL0|A0A4Q1SUL0_9BACL NADPH-dependent 7-cyano- 7-deazaguanine reductase OS=Ammoniphilus sp. CFH 90114 OX=2493665 GN=queF PE=3 SV=1
MAKVEHNHDKYKGIRFDIQDESVILVDILETIPYEYIGKRTEVMIPTNEFTSVCPWSGLPDFADIRITYVPNEELIEMKSLKYYLTSYRNVGIYQEHATNRILEDLVKCCDPLYMKIDADWNARGGLGTKVVVEYTKEG

SEQ ID NO: 43971 - protein, 235 aa, Amoebophilaceae bacterium
  misc_feature (1)..(235): tr|A0A3R7WAI8|A0A3R7WAI8_9BACT QueF_N domain-containing protein OS=Amoebophilaceae bacterium TMED152 OX=198668 0 GN=CBD12_000485 PE=4 SV=1
MANLLGKKTPYPQNFSPNLLFPIERKEQRKSLKTKMFNGEDIWNIHELLWIDNNNIHHHDEISISVPCTSPNIVESKSLKLFINSLIHERFESISGVKKIIKHHLESLIKTDIELRDVYKKPDAKVLNVKKSQGIKHDPTNLSPAELFCFRGFRSLCPVTQQPDIADIFIDGAFNKADQDNIAAYLGSFFEKEAFHELCIEQIVEDLKSYDYQFSRIEGCFERRGGIAIIPRRYS

SEQ ID NO: 43972 - protein, 165 aa, Amphibacillus marinus
  misc_feature (1)..(165): tr|A0A1H8MI82|A0A1H8MI82_9BACI NADPH-dependent 7-cyano- 7-deazaguanine reductase OS=Amphibacillus marinus OX=87 2970 GN=queF PE=3 SV=1
MQGRKDHELKDLSLLGNQETRYSFDYTPEVLETFDNKHVNRDYFVKFNCPEFTTLCPKTNQPDFGAVYISYIPSEKMVESKSLKLYLFSFRNHGDFHEDSMNIIMNDLIKLMKPRYIEVWGKFTPRGGISIDPYCNYGVPGTKYEQIADHRMMNHDLYPEKIDNR

SEQ ID NO: 43973 - protein, 164 aa, Amphiplicatus metriothermophilus
  misc_feature (1)..(164): tr|A0A239PP19|A0A239PP19_9PROT NADPH-dependent 7-cyano- 7-deazaguanine reductase OS=Amphiplicatus metriothermop hilus OX=1519374 GN=queF PE=3 SV=1
MPKANATRRAARKPAAGDLSLLGKQAALPASPDEARLETVPNPHPDALYLARFVAPEFTSLCPVTGQPDFAHLVIDYAPAKLIVESKSLKLFLASFRNHGAFHEDCVVTIAKRLVAATRPRWLRIGGYWYPRGGIPIDVFYQTGEPPAGLWLPDQGVPAYRGRG

SEQ ID NO: 43974 - protein, 275 aa, Amphritea atlantica
  misc_feature (1)..(275): tr|A0A1H9H6I3|A0A1H9H6I3_9GAMM NADPH-dependent 7-cyano- 7-deazaguanine reductase OS=Amphritea atlantica OX=3552 43 GN=queF PE=3 SV=1
MKDHQKGLEHAPLGADTQYINQYDASLLYPIARHLNWQSQGVERSELPFQGCDIWNAYEVSWLNNRGKPVARLAEFRIPADSDNIIESKSFKLYLNSFNLTRFDSEAQVLARMTEDLSTAAGGRVEVLLKPLDNSEPISAFEGDCLDELDIEVSDYSPTPERLKATGELVSESLYSHLLKSNCPVTGQPDWASIVIGYRGPAIDREGLLQYLISYREHGDFHEQCVESIFMDIWNRCKPEALTVYARYLRRGGLDINPWRSSQAGQPDNLRLSRQ

SEQ ID NO: 43975 - protein, 275 aa, Amphritea balenae
  misc_feature (1)..(275): tr|A0A3P1SX02|A0A3P1SX02_9GAMM NADPH-dependent 7-cyano- 7-deazaguanine reductase OS=Amphritea balenae OX=452629 GN=queF PE=3 SV=1
MKNTESGLEHAPLGADTEYVNQYDASLLYPIARHLNWQAQGVDRTSLPFNGTDIWNAYEVSWLNNKGKPVVRLAEFRIPASSTNIIESKSFKLYLNSFNLTRFASEDEVVQQMVTDLSAAAEGQVEVILTNLDSKADIRQFSGECLDELDIEIADYTPTPERLSASGDKVDEALYSHLLKSNCPVTGQPDWASISIEYSGAAIDRAGLLQYLISYREHGDFHEQCVESIFMDIWSRCKPTELTVYARYLRRGGLDINPYRSSLQGRPDNLRLSRQ

SEQ ID NO: 43976 - protein, 275 aa, Amphritea sp.
  misc_feature (1)..(275): tr|A0A430KNB2|A0A430KNB2_9GAMM NADPH-dependent 7-cyano- 7-deazaguanine reductase OS=Amphritea sp. MCCC 1K03512 OX=2490544 GN=queF PE=3 SV=1
MKDQQSALDHAPLGADTEYVNQYDASLLYPIARDLNWQAQGVERRALPFQGCDIWNAYEVSWLDSRGKPVVRLAEFRIPAASTHIIESKSFKLYLNSFNLTRFANEAEVQTRMVADLSATAGGEVGVLLRSVDNRDAMSQFAGECLDELDIEVSDYSPAPQRLSAAGDVVEETLYSHLLKSNCPVTGQPDWASISIEYRGPSIDRAGLLQYLISYREHGDFHEQCVESIFMDIWRVCQPEKLTVYARYLRRGGLDINPWRSSEAGEPVNLRLSRQ

SEQ ID NO: 43977 - protein, 115 aa, Amycolatopsis decaplanina
  misc_feature (1)..(115): tr|M2Z299|M2Z299_9PSEU NADPH-dependent 7-cyano-7-deazag uanine reductase OS=Amycolatopsis decaplanina DSM 44594 OX=1284240 GN=queF PE=3 SV=1
MDAGGLETFPAPAGIGVVRFRTAELTAFCPVTAQPDLYAMDFGYLPDDRCLESKSFKLYLHSFRDRGIFCETLAVTLLQDLVAVLRPRAATVRLEQQVRGGLVLHAQADHEGGVR

SEQ ID NO: 43978 - protein, 142 aa, Anabaena cylindrica
  misc_feature (1)..(142): tr|K9ZCP0|K9ZCP0_ANACC NADPH-dependent 7-cyano-7-deazag uanine reductase OS=Anabaena cylindrica (strain ATCC 27 899 / PCC 7122) OX=272123 GN=queF PE=3 SV=1
MSNTLPETVTPANPEMKYGEREIAEGKLITFPNPRVGRRYDISITLPEFTCKCPFSGYPDFATIYITYIPDERVVELKALKLYINSYRDRYISHEETANQILDDFVAACEPLEVTVKTDFTPRGNVHTVVEVKHIKEKEEIF

SEQ ID NO: 43979 - protein, 138 aa, Anabaena sp.
  misc_feature (1)..(138): tr|A0A1B7WLG1|A0A1B7WLG1_9NOST NADPH-dependent 7-cyano- 7-deazaguanine reductase OS=Anabaena sp. CRKS33 OX=1710 888 GN=queF PE=3 SV=1
MSNFAPETLPPVIPEMKYGEREIAEGKLITFPNPRIGRRYDINITLPEFTCKCPFSGYPDFATIYISYIPDQRVVELKALKLYINSYRDRYISHEETANQILDDFVAACDPLEVTVKTDFTPRGNVHTVVEVKHQKGV

SEQ ID NO: 43980 - protein, 151 aa, Anabaena sp.
  misc_feature (1)..(151): tr|A0A1B7VDK1|A0A1B7VDK1_9NOST NADPH-dependent 7-cyano- 7-deazaguanine reductase OS=Anabaena sp. AL09 OX=171089 1 GN=queF PE=3 SV=1
MSNFAPETVSPASQEMKYGEREIAEGKLITFPNPRIGRRYDVNITLPEFTCKCPFSGYPDFATIYITYIPDERVVELKALKLYINSYRDRYISHEETANQILDDFVAACDPLEVTVKTDFTPRGNVHTVVEVKHQKGVYSRSQESGVRSQE

SEQ ID NO: 43981 - protein, 132 aa, Anabaenopsis circularis
  misc_feature (1)..(132): tr|A0A1Z4GLH0|A0A1Z4GLH0_9CYAN NADPH-dependent 7-cyano- 7-deazaguanine reductase OS=Anabaenopsis circularis NIE S-21 OX=1085406 GN=queF PE=3 SV=1
MTNDTSEVKYGERNIAEGNLITFPNPRVGRRYDINITLPEFTCKCPFSGYPDFATIYITYIPDERVVELKALKLYINSYRDRYISHEESANQILDDIVAACDPLEITVKADFSPRGNVHTVIEVRHQKASAN

SEQ ID NO: 43982 - protein, 163 aa, Anaerobacillus alkalidiazotrophicus
  misc_feature (1)..(163): tr|A0A1S2MBA4|A0A1S2MBA4_9BACI NADPH-dependent 7-cyano- 7-deazaguanine reductase OS=Anaerobacillus alkalidiazot rophicus OX=472963 GN=queF PE=3 SV=1
MRKDHELEGVSLLGNQNVEYKFEYDKSILETFENKHLDNDYWVKFNCPEFTSLCPKTGQPDFATIYISYIPSEKMVESKSLKLYLFSFRNQGDFHEDCINIIMKDLIELMDPKYIEVWGKFTPRGGISIDPYANYGKKGTMFEEMAKQRMFNHDMYPEKVDNR

SEQ ID NO: 43983 - protein, 163 aa, Anaerobacillus alkalilacustris
  misc_feature (1)..(163): tr|A0A1S2LXI1|A0A1S2LXI1_9BACI NADPH-dependent 7-cyano- 7-deazaguanine reductase OS=Anaerobacillus alkalilacust ris OX=393763 GN=queF PE=3 SV=1
MRKDHELEGVSLLGNQNVEYKFEYDKSILETFENKHLDNDYWVKFNCPEFTSLCPKTGQPDFATIYISYIPSEKMVESKSLKLYLFSFRNQGDFHEDCINIIMKDLIELMDPKYIEVWGKFTPRGGISIDPYANYGKKGTMFEEMAKQRMFNHDMYPEKIDNR

SEQ ID NO: 43984 - protein, 163 aa, Anaerobacillus isosaccharinicus
  misc_feature (1)..(163): tr|A0A1S2MFM5|A0A1S2MFM5_9BACI NADPH-dependent 7-cyano- 7-deazaguanine reductase OS=Anaerobacillus isosaccharin icus OX=1532552 GN=queF PE=3 SV=1
MRKDHELEGVSLLGNQNVPYKFEYDKSILETFENKHNDNDYWVKFNCPEFTSLCPKTGQPDFAAIYISYIPSEKMVESKSLKLYLFSFRNQGDFHEDCINIIMKDLIELMDPKYIEVWGKFTPRGGISIDPYANYGKKDTMFEDMAKQRLFNHDMYPEKIDNR

SEQ ID NO: 43985 - protein, 135 aa, Anaerobacillus macyae
  misc_feature (1)..(135): tr|A0A0J6CSS8|A0A0J6CSS8_9BACI NADPH-dependent 7-cyano- 7-deazaguanine reductase OS=Anaerobacillus macyae OX=15 7733 GN=queF PE=3 SV=1
MDKAWLPSSGPMPRPESVEQAREVIKNEAFDAPNVQEITFNALEFTAVCPKTGQPDFGRVEISYVPDEKCIESKSLKFYLWSYRDEGSFCETLAARIADDVVYAIDPLKVTITVYQSARGGIELKTTAVREKPNS

SEQ ID NO: 43986 - protein, 277 aa, Anaerobiospirillum thomasii
  misc_feature (1)..(277): tr|A0A2X0V5Y5|A0A2X0V5Y5_9GAMM NADPH-dependent 7-cyano- 7-deazaguanine reductase OS=Anaerobiospirillum thomasii OX=179995 GN=queF PE=4 SV=1
MELTHLGHNSRYYSQYNPSLLEPIMRHLPRAAFSTDTSIGYDLWRLYEITYLNARGIPCIVMGSIKINAASQFTVESKSLKLYIGSFTNTKFLSLSHVKETIERDLHKVTASKVEVELYPPEDMSFMPEKLPGICIDDSASDIKLDFDTINPTLLKYSQSDNDEDKAVSSRTYHSNIVRTLCPVTSQPDFASVVISYTGRAIDTTALFAYLCSYRHHQGFHEACTENIYNDLKNVLNPDGLCVAASFTRRGGIDINPCRADSLDLTCKCSHIRTLRQ

SEQ ID NO: 43987 - protein, 165 aa, Anaerobium acetethylicum
  misc_feature (1)..(165): tr|A0A1D3TN88|A0A1D3TN88_9FIRM NADPH-dependent 7-cyano- 7-deazaguanine reductase OS=Anaerobium acetethylicum OX =1619234 GN=queF PE=3 SV=1
MSGRNTEELNGVTQLGNQGTRYPDDYAPEMLETFINKHPENDYFVKFNCPEFTSLCPMTGQPDFATLYISYVPSERMVESKSLKLYLFSFRNHGDFHEDCVNIIMKDLIRLMDPKYIEVWGKFTPRGGISIDPYCNYGKKGTRWEEIAFNRLAGHDMYPEKVDNR

SEQ ID NO: 43988 - protein, 164 aa, Anaerobutyricum hallii
  misc_feature (1)..(164): tr|C0EV21|C0EV21_9FIRM NADPH-dependent 7-cyano-7-deazag uanine reductase OS=Anaerobutyricum hallii DSM 3353 OX= 411469 GN=queF PE=3 SV=1
MSREKEELQGVTLLGNQKTKYPQDYAPEMLETFINKHQDHDYFVKFNCPEFTSLCPMTGQPDFATIYISYVPDVKMVESKSLKLYLFSFRNHGDFHEDCVNIIMKDLIKLMDPKYIEVWGKFTPRGGISIDPYTNYGKPGTMWEQVATERLVHHDLYPEKVDNR

SEQ ID NO: 43989 - protein, 164 aa, Anaerobutyricum hallii
  misc_feature (1)..(164): tr|A0A374NN30|A0A374NN30_9FIRM NADPH-dependent 7-cyano- 7-deazaguanine reductase OS=Anaerobutyricum hallii OX=3 9488 GN=queF PE=3 SV=1
MSREKEELQGVTLLGNQKTKYPQDYAPEMLETFINKHQDHDYFVKFNCPEFTSLCPMTGQPDFATIYISYVPDVKMVESKSLKLYLFSFRNHGDFHEDCVNIIMKDLIKLMDPKYIEVWGKFTPRGGISIDPYTNYGKPGTMWEQVATDRLVHHDLYPEKVDNR

SEQ ID NO: 43990 - protein, 163 aa, Anaerococcus nagyae
  misc_feature (1)..(163): tr|A0A3E2TJB4|A0A3E2TJB4_9FIRM NADPH-dependent 7-cyano- 7-deazaguanine reductase OS=Anaerococcus nagyae OX=1755 241 GN=queF PE=3 SV=1
MRKEDDMKDITLLGNQDNKYPDDYAPEVLEVFDNKHPDNDYFVKFNCPEFTSLCPITGQPDFATIYISYVPSEKMVESKSLKLYLFSFRNHGDFHEDCMNIIMKDLIKLMAPKYIEVWGKFTPRGGISIDPYCNYGKKGTKWEEIAFNRLANHDLYPEKVDNR

SEQ ID NO: 43991 - protein, 157 aa, Anaeroglobus geminatus
  misc_feature (1)..(157): tr|G9YHD3|G9YHD3_9FIRM NADPH-dependent 7-cyano-7-deazag uanine reductase OS=Anaeroglobus geminatus F0357 OX=861 450 GN=queF PE=3 SV=1
MEKLTLLGNNGVTYAGGYNPGILEVFENKHRGHDYFVKFNCPEFTGLCPVTGQPDFGTIIVAYVPDMKMVESKSLKLYLFSFRNHGAFHEDCVNLIMKDLITLMEPKYIEVQGKFLPRGGISIDPYCNCGKAGTRWEEVAWKRLAEHDMYPEKVDNR

SEQ ID NO: 43992 - protein, 94 aa, Anaerolineaceae bacterium
  misc_feature (1)..(94): tr|A0A1W9WET5|A0A1W9WET5_9CHLR NADPH-dependent 7-cyano- 7-deazaguanine reductase OS=Anaerolineaceae bacterium 4 572_78 OX=1972460 GN=B6242_05435 PE=3 SV=1
MSFCPVTGQPDFNKVIIEYAPDKLCVESKSLKLYLWTFRESYIFGEGLANEIAKNIFEAVMPRWCKITIIHTTRRLDLLCFVYRNNLFSKLHDW

SEQ ID NO: 43993 - protein, 137 aa, Anaerolineaceae bacterium
  misc_feature (1)..(137): tr|A0A2E9PU58|A0A2E9PU58_9CHLR NADPH-dependent 7-cyano- 7-deazaguanine reductase OS=Anaerolineaceae bacterium O X=2024896 GN=queF PE=3 SV=1
  misc_feature (71)..(71): Xaa can be any naturally occurring amino acid
  misc_feature (87)..(87): Xaa can be any naturally occurring amino acid
  misc_feature (105)..(106): Xaa can be any naturally occurring amino acid
  misc_feature (120)..(120): Xaa can be any naturally occurring amino acid
  misc_feature (136)..(136): Xaa can be any naturally occurring amino acid
MANITENPDLDGLTLLGRDAQPSRRLETFPNRHPDRDYTIKLRTKEFTCVCPATGQPDFAALTIEYVPVEXILESKSLKLYLWSFRXEGIFHEHVANTILDDLVXXLEPRWCKVTAAFSXRGGIGITVDAEHQRPXA

SEQ ID NO: 43994 - protein, 130 aa, Anaerolineae bacterium
  misc_feature (1)..(130): tr|A0A0S8BLR4|A0A0S8BLR4_9CHLR NADPH-dependent 7-cyano- 7-deazaguanine reductase OS=Anaerolineae bacterium SG8_ 19 OX=1703386 GN=queF PE=3 SV=1
MTLLGRETTQPSKQLETFPNRHPGRDYTVTLTTDEFTCVCPATGQPDFARITVRYIPDQRIVESKSLKLYFWSYRNEGIFHEHVTNVILDDLVAALEPRWCEVIADFGIRGGIAISVRAEYKKPEKQVNT

SEQ ID NO: 43995 - protein, 136 aa, Anaerolineae bacterium
  misc_feature (1)..(136): tr|A0A0S8ICI4|A0A0S8ICI4_9CHLR NADPH-dependent 7-cyano- 7-deazaguanine reductase OS=Anaerolineae bacterium SM23 _ 63 OX=1703387 GN=queF PE=3 SV=1
MTKEADLEGLTLLGKDAKPSKELETFPNHHPDRRYTVRLESDEFTCLCPATGQPDFANITVEYIPNKKILESKSFKLYLWSYRNEGVFHEHVTNTILDDLIAALDPHWCRVIGGFNIRGGIYITVEAEHGRREEKG

SEQ ID NO: 43996 - protein, 140 aa, Anaerolineales bacterium
  misc_feature (1)..(140): tr|A0A523XM28|A0A523XM28_9CHLR NADPH-dependent 7-cyano- 7-deazaguanine reductase OS=Anaerolineales bacterium OX =2073117 GN=queF PE=3 SV=1
MKKTMTEASDLEDLTLLGREAKPSKRLETFPNRHPDRRYVVRLETEEFTCLCPATGQPDFASILVEYIPNQKILESKSFKLYLWSYRNEGVFHEHVTNKILDDLVAALEPHWCRVVSIFNIRGGINITVEAEHGAREGIN

SEQ ID NO: 43997 - protein, 134 aa, Anaerolineales bacterium
  misc_feature (1)..(134): tr|A0A523U3A1|A0A523U3A1_9CHLR NADPH-dependent 7-cyano- 7-deazaguanine reductase OS=Anaerolineales bacterium OX =2073117 GN=queF PE=3 SV=1
MTEASDLDGLTILGGKVEPDRKLETFPNHHPDRLYIVRFETDEFTCICPATGQPDFARITVEYIPAEKILESKSFKLYLWSYRNEGVFHEHVSNLILDDLVKALEPRWCRVSGRFNVRGGIVITVEAEHGEREE

SEQ ID NO: 43998 - protein, 122 aa, Anaeromyxobacter dehalogenans
  misc_feature (1)..(122): sp|B8JAR2|QUEF_ANAD2 NADPH-dependent 7-cyano-7-deazagua nine reductase OS=Anaeromyxobacter dehalogenans (strain 2CP-1 / ATCC BAA-258) OX=455488 GN=queF PE=3 SV=1
MPTQPSRDLQTFPNPKPGRPFEIAMECPEFTCVCPMTGQPDFATIRLRYVPAERCVELKSLKLYLWSFRNEGTFHEAVTNRICDDLVAALAPRWIEVVGDFAVRGGIHTVVTARHGERPAGV

SEQ ID NO: 43999 - protein, 122 aa, Anaeromyxobacter dehalogenans
  misc_feature (1)..(122): sp|Q2IH01|QUEF_ANADE NADPH-dependent 7-cyano-7-deazagua nine reductase OS=Anaeromyxobacter dehalogenans (strain 2CP-C) OX=290397 GN=queF PE=3 SV=2
MPTQPSRDLQTFPNPKPGRPFEIAMECPEFTCVCPMTGQPDFATIRLRYVPAERCVELKSLKLYLWSFRDEGTFHEAVTNRICDDLVAALAPRWIEVVGDFAVRGGIHTVVTARHGERPAGV

SEQ ID NO: 44000 - protein, 122 aa, Anaeromyxobacter sp.
  misc_feature (1)..(122): tr|A0A0D6QPN8|A0A0D6QPN8_9DELT NADPH-dependent 7-cyano- 7-deazaguanine reductase OS=Anaeromyxobacter sp. PSR-1 OX=1300915 GN=queF PE=3 SV=1
MPTQPSRDLQTFPNPKPGRPFEIAMECPEFTCVCPMTGQPDFATIRLRYVPAERCVELKSLKLYLWSFRDEGTFHEAVTNRICDDLVAALAPRWIEVVGDFAVRGGIHTVVTARHGEKPAGV

SEQ ID NO: 44001 - protein, 122 aa, Anaeromyxobacter sp.
  misc_feature (1)..(122): sp|A7H750|QUEF_ANADF NADPH-dependent 7-cyano-7-deazagua nine reductase OS=Anaeromyxobacter sp. (strain Fw109-5) OX=404589 GN=queF PE=3 SV=1
MPTKPARDLQTFPNPKPDRPYEIAMECPEFTCVCPVTGQPDFATIRLRYVPAERCVELKSLKLYLWSFRDEGTFHEAVTNRICDDIVQAIAPRWIEVVGDFAVRGGIHTVVTARHGERPAGV

SEQ ID NO: 44002 - protein, 165 aa, Anaerospora hongkongensis
  misc_feature (1)..(165): tr|A0A4V2Q8T5|A0A4V2Q8T5_9FIRM NADPH-dependent 7-cyano- 7-deazaguanine reductase OS=Anaerospora hongkongensis O X=244830 GN=queF PE=3 SV=1
MSGRKAEELQGVTLLGNQGTGYSYQYDPGVLESFVNKHPGNDYFVKFNCPEFTSLCPMTGQPDFATIYISLVPDQRLVESKSLKLYLFSFRNHGDFHEDCVNIIMKDLIALLDPKYIEVWGKFTPRGGISIDPFCNYGKPGTRWEEAAQKRLFYHDMNPEKVDNR

SEQ ID NO: 44003 - protein, 165 aa, Anaerosporomusa subterranea
  misc_feature (1)..(165): tr|A0A154BPU4|A0A154BPU4_ANASB NADPH-dependent 7-cyano- 7-deazaguanine reductase OS=Anaerosporomusa subterranea OX=1794912 GN=queF PE=3 SV=1
MQGRTKAELAGISLLGNQAIDYKFGYDPAVLESFANKHPGNDYFVKFNCPEFTSLCPMTGQPDFATIYISYVPDKLLVESKSLKLYLFSFRNHGDFHEDCVNKIMKDLVELLDPKYIEVWGKFTPRGGISIDPYCNYGKEGTKWQAAAEKRLMYHDMYPEIINNR

SEQ ID NO: 44004 - protein, 165 aa, Anaerostipes caccae
  misc_feature (1)..(165): tr|B0MAR7|B0MAR7_ANACD NADPH-dependent 7-cyano-7-deazag uanine reductase OS=Anaerostipes caccae (strain DSM 146 62 / NCIMB 13811 / L1-92) OX=411490 GN=queF PE=3 SV=1
MSGRTNVELGGITLLGNQQTKYPDDYAPEVLETFPNKHPENDYFVKFNAPEFTSLCPMTGQPDFATIYISYVPGERMVESKSLKLYLYSFRNHGDFHEDCMNIIMKDLIKLMDPKYIEVWGKFTPRGGISIDPYCNYGRKGTPWEQIAFDRLAHHDMYPEKVDNR

SEQ ID NO: 44005 - protein, 165 aa, Anaerostipes hadrus
  misc_feature (1)..(165): tr|A0A173WSF0|A0A173WSF0_ANAHA NADPH-dependent 7-cyano- 7-deazaguanine reductase OS=Anaerostipes hadrus OX=6497 56 GN=queF PE=3 SV=1
MSGREGQELEGITLLGNQKTKYPDDYAPEVLETFENKHPDNDYFVKFNAPEFTSLCPITGQPDFATIYISYVPGERMVESKSLKLYLYSFRNHGDFHEDCMNIIMKDLIKLMDPKYIEVWGKFTPRGGISIDPYCNYGKPGTKWEEVAWNRLSNHDLYPEKIDNR

SEQ ID NO: 44006 - protein, 165 aa, Anaerostipes hadrus
  misc_feature (1)..(165): tr|D4MUF6|D4MUF6_ANAHA NADPH-dependent 7-cyano-7-deazag uanine reductase OS=Anaerostipes hadrus OX=649756 GN=qu eF PE=3 SV=1
MSGRKSQELEGITLLGNQKTKYPDDYAPEVLETFENKHPENDYFVKFNAPEFTSLCPITGQPDFATIYISYVPGERMVESKSLKLYLYSFRNHGDFHEDCMNIIMKDLIKLMDPKYIEVWGKFTPRGGISIDPYCNYGRPGTKWEDVAWNRLSNHDLYPEKVDNR

SEQ ID NO: 44007 - protein, 165 aa, Anaerostipes rhamnosivorans
  misc_feature (1)..(165): tr|A0A4P8IF45|A0A4P8IF45_9FIRM NADPH-dependent 7-cyano- 7-deazaguanine reductase OS=Anaerostipes rhamnosivorans OX=1229621 GN=queF PE=3 SV=1
MSGRTNVELGGITLLGNQQTKYPDDYAPEVLETFPNKHPDNDYFVKFNAPEFTSLCPMTGQPDFATVYISYVPGERMVESKSLKLYLYSFRNHGDFHEDCMNIIMKDLIKLMDPKYIEVWGKFTPRGGISIDPYCNYGKKGTPWEQIAFDRLAHHDMYPEKVDNR

SEQ ID NO: 44008 - protein, 165 aa, Anaerostipes sp.
  misc_feature (1)..(165): tr|R6RK33|R6RK33_9FIRM NADPH-dependent 7-cyano-7-deazag uanine reductase OS=Anaerostipes sp. CAG:276 OX=1262699 GN=queF PE=3 SV=1
MSGRTNVELGGITLLGNQQTKYPDDYAPEVLETFPNKHPENDYFVKFNAPEFTSLCPMTGQPDFATVYISYVPGERMVESKSLKLYLYSFRNHGDFHEDCMNIIMKDLIKLMDPKYIEVWGKFTPRGGISIDPYCNYGRKGTPWEQIAFDRLAHHDMYPEKVDNR

SEQ ID NO: 44009 - protein, 165 aa, Anaerostipes sp.
  misc_feature (1)..(165): tr|A0A1Q9K2S7|A0A1Q9K2S7_9FIRM NADPH-dependent 7-cyano- 7-deazaguanine reductase OS=Anaerostipes sp. 992a OX=12 61637 GN=queF PE=3 SV=1
MSGRNKEELEGVTLLGNQKTKYADDYAPEVLETFPNKHPENDYFVKFNCPEFTSLCPMTGQPDFATIYISYVPGERMVESKSLKLYLFSFRNHGDFHEDCVNIIMKDLIRLMDPKYIEVWGKFTPRGGISIDPYCNYGKEGTVWKEVAFNRLANHDLYPEKVDNR

SEQ ID NO: 44010 - protein, 156 aa, Anaerotruncus sp.
  misc_feature (1)..(156): tr|A0A3A9HU92|A0A3A9HU92_9FIRM NADPH-dependent 7-cyano- 7-deazaguanine reductase OS=Anaerotruncus sp. 1XD22-93 OX=2320082 GN=queF PE=3 SV=1
MSQLHALGKQTEYQTDYAPEVLESFENKHMDNDYFVKFNCPEFTSLCPITGQPDFATIYISYVPDRKMVESKSLKLYLFSYRNHGDFHEDCCNKIMKDLINLMEPKYIEVWGKFLPRGGISIDPYCNYGKKGTKWEEMAYDRLAHHDMYPEKVDNR

SEQ ID NO: 44011 - protein, 165 aa, Anaerovibrio lipolyticus
  misc_feature (1)..(165): tr|A0A1M6BHW7|A0A1M6BHW7_9FIRM NADPH-dependent 7-cyano- 7-deazaguanine reductase OS=Anaerovibrio lipolyticus DS M 3074 OX=1120997 GN=queF PE=3 SV=1
MPRDKEEMPEITLLGNQNTKYGFEYDPGVLETFDNKHPDNDYWVKFNCPEFTSLCPITGQPDFATIYISYVPDIKMVESKSLKLYLFSFRNHGDFHEDVVNIIKKDLIKLMNPKYIEVWGKFLPRGGISIDPYTNYGRPGTKFEELAWHRFQQHDLAFMDKVDNR

SEQ ID NO: 44012 - protein, 165 aa, Anaerovibrio lipolyticus; identical to SEQ ID NO: 44011
  misc_feature (1)..(165): tr|A0A0B2JXW0|A0A0B2JXW0_9FIRM NADPH-dependent 7-cyano- 7-deazaguanine reductase OS=Anaerovibrio lipolyticus OX =82374 GN=queF PE=3 SV=1

SEQ ID NO: 44013 - protein, 165 aa, Anaerovibrio sp.
  misc_feature (1)..(165): tr|A0A3D4ALS3|A0A3D4ALS3_9FIRM NADPH-dependent 7-cyano- 7-deazaguanine reductase OS=Anaerovibrio sp. OX=1872532 GN=queF PE=3 SV=1
MPRNKEDMPEITLLGNQNTKYGFEYDPGVLETFDNKHPDNDYWVKFNCPEFTSLCPITGQPDFATIYISYVPDIKMVESKSLKLYLFSFRNHGDFHEDVVNIIKKDLIKLMNPKYIEVWGKFLPRGGISIDPYTNYGRPGTKFEELAWHRFQQHDLAFMDKVDNR

SEQ ID NO: 44014 - protein, 165 aa, Anaerovibrio sp.
  misc_feature (1)..(165): tr|A0A1X1Q4C8|A0A1X1Q4C8_9FIRM NADPH-dependent 7-cyano- 7-deazaguanine reductase OS=Anaerovibrio sp. JC8 OX=124 0085 GN=queF PE=3 SV=1
MPRDKENMPEITLLGNQNTKYGFEYDPGVLETFDNKHPDNDYWVKFNCPEFTSLCPITGQPDFATIYISYVPDIKMVESKSLKLYLFSFRNHGDFHEDVVNIIKKDLIKLMNPKYIEVWGKFLPRGGISIDPYTNYGRPGTKFEELAWHRFQQHDLAFMDKVDNR

SEQ ID NO: 44015 - protein, 165 aa, Anaerovirgula multivorans
  misc_feature (1)..(165): tr|A0A239EB94|A0A239EB94_9FIRM NADPH-dependent 7-cyano- 7-deazaguanine reductase OS=Anaerovirgula multivorans O X=312168 GN=queF PE=3 SV=1
MEGRNEKELQEVTLLGNQGVKYNYDYDPAVLESFVNKHPENDYFVKFNCPEFTSLCPKTGQPDFATIYISYVPDNLLVESKSLKLYLLSFRNHGDFHEDCVNIIMKDLIKLMDPKYIEVWGKFTPRGGISIDPYCNYGKEGTKWEGMAEKRLLWHDMYPEKIDNR

SEQ ID NO: 44016 - protein, 153 aa, Ancylobacter aquaticus
  misc_feature (1)..(153): tr|A0A4R1ICV4|A0A4R1ICV4_ANCAQ NADPH-dependent 7-cyano- 7-deazaguanine reductase OS=Ancylobacter aquaticus OX=1 00 GN=queF PE=3 SV=1
MNHVSDGTTQLGRATALPASPEQAVLERVSNPHPGTNYVARFTAPEFTSLCPVTGQPDFAQLVIDYVPGDWLVESKSLKLYLGSFRNHGAFHEDCTVAIGLRLHDLLAPRWLRIGGYWYPRGGIPIDVFWQSSAPLEGVWLPDQGVAPYRGRG

SEQ ID NO: 44017 - protein, 153 aa, Ancylobacter aquaticus
  misc_feature (1)..(153): tr|A0A431QE72|A0A431QE72_ANCAQ NADPH-dependent 7-cyano- 7-deazaguanine reductase OS=Ancylobacter aquaticus OX=1 00 GN=queF PE=3 SV=1
MNDIADGTTQLGRATALPASPEEAVLERVPNPHPGTNYVARFTAPEFTSLCPVTGQPDFAQLVIDYVPDGWLVESKSLKLYLGSFRNHGAFHEDCTVAIGLRLHELLAPRWLRIGGYWYPRGGIPIDVFWQSGAPLDGVWLPDQGVAPYRGRG

SEQ ID NO: 44018 - protein, 153 aa, Ancylobacter rudongensis
  misc_feature (1)..(153): tr|A0A1G4QBM0|A0A1G4QBM0_9RHIZ NADPH-dependent 7-cyano- 7-deazaguanine reductase OS=Ancylobacter rudongensis OX =177413 GN=queF PE=3 SV=1
MNDIADGTTQLGRATALPASPEEAVLERVPNPHPGTNYVARFTAPEFTSLCPVTGQPDFAQLVIDYVPDGWLVESKSLKLYLGSFRNHGAFHEDCTVAIGLRLHELLSPRWLRIGGYWYPRGGIPIDVFWQSGAPLDGVWLPDQGVAPYRGRG

SEQ ID NO: 44019 - protein, 275 aa, Andreprevotia lacus
  misc_feature (1)..(275): tr|A0A1W1XPQ8|A0A1W1XPQ8_9NEIS NADPH-dependent 7-cyano- 7-deazaguanine reductase OS=Andreprevotia lacus DSM 232 36 OX=1121001 GN=queF PE=3 SV=1
MSDPQQSPLGKAVSYITEYDPALLFPIPRQGKRDEIGLTGTLPFMGVDIWNGYELSWLNARGKPQVATAVFQVPAQSANIIESKSFKLYLNSFNQTRLDNVEALATLLRDDLSQAVQAPVQVELFEPERWAGLKFAELDGYNIDNLDIEVETYSPQPGLLKCDEADAPVDEVLVSNLLKSNCLVTGQPDWASVQIRYIGQPINRESLLRYLISFRNHNEFHEQCVERIFTDIQRDCKPIKLAVYARYTRRGGLDINPYRCNFNAPAPTNLRTARQ

SEQ ID NO: 44020 - protein, 143 aa, Aneurinibacillus aneurinilyticus
  misc_feature (1)..(143): tr|U1WZS7|U1WZS7_ANEAE NADPH-dependent 7-cyano-7-deazag uanine reductase OS=Aneurinibacillus aneurinilyticus AT CC 12856 OX=649747 GN=queF PE=3 SV=1
MMSQIQHDYDKYNKIRFDTQDRSAIMEEILETIPYEYVGKKTEVTIPTNEFTSVCPWSGLPDFADIKIIFIPNEKLIEMKSLKFYLTSYRNVGIYQEHVTNKILEDLVKVAEPLYMRVEALWNARGGLGTEVVVEYRKEGYEG

SEQ ID NO: 44021 - protein, 143 aa, Aneurinibacillus danicus
  misc_feature (1)..(143): tr|A0A511VAL8|A0A511VAL8_9BACL NADPH-dependent 7-cyano- 7-deazaguanine reductase OS=Aneurinibacillus danicus OX =267746 GN=queF PE=3 SV=1
MMSQTEHNYDKYNKIRFDIQDRSAIMEDILETIPYEYVGKKTEVTIPTSEFTSVCPWSGLPDFADIRIIFVPNEKLIEMKSLKFYLTSYRNVGIYQEHATNKILEDLVRVADPLYMRVEATWNARGGLGTEVVVEYRKEGYEG

SEQ ID NO: 44022 - protein, 142 aa, Aneurinibacillus migulanus
  misc_feature (1)..(142): tr|A0A0D1WKG3|A0A0D1WKG3_ANEMI NADPH-dependent 7-cyano- 7-deazaguanine reductase OS=Aneurinibacillus migulanus OX=47500 GN=queF PE=3 SV=1
MSQVQHDYDKYNKIRFDTQERSAIMEEILETIPYEYIGKKTEVTIPTNEFTSVCPWSGLPDFADIKIIFIPNEKLIEMKSLKFYLTSYRNVGIYQEHVTNKILEDLVKVADPLYMRVEALWNARGGLGTEVVVEYRKEGYEG

SEQ ID NO: 44023 - protein, 142 aa, Aneurinibacillus soli
  misc_feature (1)..(142): tr|A0A0U5C9N0|A0A0U5C9N0_9BACL NADPH-dependent 7-cyano- 7-deazaguanine reductase OS=Aneurinibacillus soli OX=15 00254 GN=queF PE=3 SV=1
MSTVEHNHEKYNKIRFDTQDETAILVDILETIPYEYAGKKTEIVIPTNEFTSVCPWSGLPDFADIQIAFVPNEKLVEMKSLKFYLTSYRNVGIYQEHATNRILNDLVALCDPLYMKITALWNARGGLGTEVVVEYRKEGYEG

SEQ ID NO: 44024 - protein, 163 aa, Aneurinibacillus sp.
  misc_feature (1)..(163): tr|A0A0X8D540|A0A0X8D540_9BACL NADPH-dependent 7-cyano- 7-deazaguanine reductase OS=Aneurinibacillus sp. XH2 OX =1450761 GN=queF PE=3 SV=1
MRDIHTETEITLLGNQNVEYPSNYCPDLLESFENLHPDVDYFVKFNCPEFTSLCPITKQPDFATIHISYVPDKRLVESKSLKLYLFSFRNHGDFHEDCVNKIMKDLINLLEPKYIEVWGKFLPRGGISIDPYVNWGKEGTRWKQVAEHRLFNHDLNPEKITNR

SEQ ID NO: 44025 - protein, 142 aa, Aneurinibacillus sp.
  misc_feature (1)..(142): tr|A0A109QHH7|A0A109QHH7_9BACL NADPH-dependent 7-cyano- 7-deazaguanine reductase OS=Aneurinibacillus sp. XH2 OX =1450761 GN=queF PE=3 SV=1
MAQVEHNHAKYNNIRFDIQDESAIMVDILETIPYEYVGKKTEVTIPTSEFTSVCPWSGLPDFADIKITFIPNEKLIEMKSLKYYLTSYRNVGIYQEHATNKILEDLVKLADPLYMRVEAIWNARGGLGTEVIVEYRKEGYEG

SEQ ID NO: 44026 - protein, 142 aa, Aneurinibacillus thermoaerophilus; identical to SEQ ID NO: 44025
  misc_feature (1)..(142): tr|A0A1G7WYG1|A0A1G7WYG1_ANETH NADPH-dependent 7-cyano- 7-deazaguanine reductase OS=Aneurinibacillus thermoaero philus OX=143495 GN=queF PE=3 SV=1

SEQ ID NO: 44027 - protein, 163 aa, Aneurinibacillus thermoaerophilus; identical to SEQ ID NO: 44024
  misc_feature (1)..(163): tr|A0A1G8BKU8|A0A1G8BKU8_ANETH NADPH-dependent 7-cyano- 7-deazaguanine reductase OS=Aneurinibacillus thermoaero philus OX=143495 GN=queF PE=3 SV=1

SEQ ID NO: 44028 - protein, 165 aa, Anoxybacillus amylolyticus
  misc_feature (1)..(165): tr|A0A4R1G5K3|A0A4R1G5K3_9BACI NADPH-dependent 7-cyano- 7-deazaguanine reductase OS=Anoxybacillus amylolyticus OX=294699 GN=queF PE=3 SV=1
MAGRKEEELKDLTLLGNQGTTYSFTYNPNLLEVFDNKHPDRDYFVKFNCPEFTTLCPKTGQPDFATIYISYIPDKKCVESKSLKLYLFSFRNHGDFHEDCVNIIMNDLIKVMEPRYIEVWGKFTPRGGISIDPYCNWGRPGTKYEKMAEYRLLNHDLYPEKVDNR

SEQ ID NO: 44029 - protein, 171 aa, Anoxybacillus amylolyticus
  misc_feature (1)..(171): tr|A0A161HYD5|A0A161HYD5_9BACI NADPH-dependent 7-cyano- 7-deazaguanine reductase OS=Anoxybacillus amylolyticus OX=294699 GN=queF PE=3 SV=1
MKGEKTMAGRKDEELQGVTLLGNQGTKYLFEYSPEVLEVFDNKHPDRDYFVKFNCPEFTSLCPKTNQPDFATIYISYIPDKKCVESKSLKLYLFSFRNHGDFHEDCVNIIMNDLINVMDPRYIEVWGKFTPRGGISIDPYCNWGRPGTKYEKMAEYRLMNHDLYPEKVDNR

SEQ ID NO: 44030 - protein, 163 aa, Anoxybacillus ayderensis
  misc_feature (1)..(163): tr|A0A1X6MBW2|A0A1X6MBW2_9BACI NADPH-dependent 7-cyano- 7-deazaguanine reductase OS=Anoxybacillus ayderensis OX =265546 GN=queF PE=3 SV=1
MRKDEELQGVTLLGNQGTKYVFEYSPDILEVFDNKHPDRDYFVKFNCPEFTSLCPKTNQPDFATIYISYIPDKKCVESKSLKLYLFSFRNHGDFHEDCVNIIMNDLIRVMEPRYIEVWGKFTPRGGISIDPYCNWGRPGTKYEKMAEYRLLNHDLYPEKVDNR

SEQ ID NO: 44031 - protein, 110 aa, Anoxybacillus ayderensis
  misc_feature (1)..(110): tr|A0A0D0HQY8|A0A0D0HQY8_9BACI NADPH-dependent 7-cyano- 7-deazaguanine reductase OS=Anoxybacillus ayderensis OX =265546 GN=queF PE=3 SV=1
MPKTGQPDFATIYISYIPDKKCVESKSLKLYLFSFRNHGDFHEDCVNIIMNDLIRVMEPRYIEVWGKFTPRGGISIDPYCNWGRPGTKYEKMAEYRLLNHDLYPEKVDNR

SEQ ID NO: 44032 - protein, 163 aa, Anoxybacillus flavithermus
  misc_feature (1)..(163): tr|A0A178T4S6|A0A178T4S6_9BACI NADPH-dependent 7-cyano- 7-deazaguanine reductase OS=Anoxybacillus flavithermus OX=33934 GN=queF PE=3 SV=1
MRKDEELQGVTLLGNQGTKYVFEYSPDILEVFDNKHPDRDYFVKFNCPEFTSLCPKTNQPDFATIYISYIPDKKCVESKSLKLYLFSFRNHGDFHEDCVNIIMNDLIRVMEPRYIEVWGKFTPRGGISIDPYCNWGRPGTKYEQMAEYRLLNHDLYPEKVDNR

SEQ ID NO: 44033 - protein, 163 aa, Anoxybacillus flavithermus
  misc_feature (1)..(163): tr|R4G1B8|R4G1B8_9BACI NADPH-dependent 7-cyano-7-deazag uanine reductase OS=Anoxybacillus flavithermus NBRC 109 594 OX=1315967 GN=queF PE=3 SV=1
MRKEEELQGVTLLGNQGTKYVFEYSPDILEVFDNKHPDRDYFVKFNCPEFTSLCPKTNQPDFATIYISYIPDKKCVESKSLKLYLFSFRNHGDFHEDCVNIIMNDLIRVMEPRYIEVWGKFTPRGGISIDPYCNWGRPGTKYEQMAEYRLLNHDLYPEKVDNR

SEQ ID NO: 44034 - protein, 163 aa, Anoxybacillus gonensis; identical to SEQ ID NO: 44032
  misc_feature (1)..(163): tr|M5QNW8|M5QNW8_9BACI NADPH-dependent 7-cyano-7-deazag uanine reductase OS=Anoxybacillus gonensis OX=198467 GN =queF PE=3 SV=1

SEQ ID NO: 44035 - protein, 163 aa, Anoxybacillus pushchinoensis; identical to SEQ ID NO: 44032
  misc_feature (1)..(163): tr|A0A1I0U0B3|A0A1I0U0B3_9BACI NADPH-dependent 7-cyano- 7-deazaguanine reductase OS=Anoxybacillus pushchinoensi s OX=150248 GN=queF PE=3 SV=1

SEQ ID NO: 44036 - protein, 58 aa, Anoxybacillus sp.
  misc_feature (1)..(58): tr|A0A167UN35|A0A167UN35_9BACI NADPH-dependent 7-cyano- 7-deazaguanine reductase domain protein OS=Anoxybacillu s sp. B7M1 OX=1490057 GN=queF PE=4 SV=1
MMSGRKEEELQGVTLLGNQGTKYLFEYSPEILEVFDNKHPDRDYFVKFNCPEFTSLCQ

SEQ ID NO: 44037 - protein, 97 aa, Anoxybacillus sp.
  misc_feature (1)..(97): tr|A0A0B0HF17|A0A0B0HF17_9BACI NADPH-dependent 7-cyano- 7-deazaguanine reductase OS=Anoxybacillus sp. BCO1 OX=1 548750 GN=queF_2 PE=3 SV=1
MPKTGQPDFATIYISYIPDKKCVESKSLKLYLFSFRNHGDFHEDCVNIIMNDLIRVMEPRYIEVWGNLHRAAAFRLTRIATGVARERNTNKWRNIAY

SEQ ID NO: 44038 - protein, 110 aa, Anoxybacillus suryakundensis
  misc_feature (1)..(110): tr|A0A0K6GK49|A0A0K6GK49_9BACI NADPH-dependent 7-cyano- 7-deazaguanine reductase OS=Anoxybacillus suryakundensi s OX=1325335 GN=queF PE=3 SV=1
MPKTGQPDFATIYISYIPDKKCVESKSLKLYLFSFRNHGDFHEDCVNIIMNDLIRVMEPRYIEVWGKFTPRGGISIDPYCNWGRPGTKYEQMAEYRLLNHDLYPEKVDNR

SEQ ID NO: 44039 - protein, 110 aa, Anoxybacillus thermarum; identical to SEQ ID NO: 44038
  misc_feature (1)..(110): tr|A0A0D0QAG0|A0A0D0QAG0_9BACI NADPH-dependent 7-cyano- 7-deazaguanine reductase OS=Anoxybacillus thermarum OX= 404937 GN=queF PE=3 SV=1

SEQ ID NO: 44040 - protein, 110 aa, Anoxybacillus vitaminiphilus
  misc_feature (1)..(110): tr|A0A327YYX9|A0A327YYX9_9BACI NADPH-dependent 7-cyano- 7-deazaguanine reductase OS=Anoxybacillus vitaminiphilu s OX=581036 GN=queF PE=3 SV=1
MPKTGQPDFATIYISYIPDKKCVESKSLKLYLFSFRNHGDFHEDCVNIIMNDLIKVMEPRYIEVWGKFTPRGGISIDPYCNWGRPGTKYEKMAEYRLLNHDLYPEKVDNR

SEQ ID NO: 44041 - protein, 138 aa, Aphanizomenon flosaquae
  misc_feature (1)..(138): tr|A0A1B7VY35|A0A1B7VY35_APHFL NADPH-dependent 7-cyano- 7-deazaguanine reductase OS=Aphanizomenon flos-aquae LD 13 OX=1710894 GN=queF PE=3 SV=1
MSSFAPETDSPASQEMKYGEREIMEGNLITFPNPRIGRRYDINITLPEFTCKCPFSGYPDFATIYISYIPDQRVVELKALKLYINSYRDRYISHEETANQILDDFVAACNPLELIVKTDFTPRGNVHTVVEVKYLQGS

SEQ ID NO: 44042 - protein, 138 aa, Aphanizomenon flosaquae; identical to SEQ ID NO: 44041
  misc_feature (1)..(138): tr|A0A1B7X289|A0A1B7X289_APHFL NADPH-dependent 7-cyano- 7-deazaguanine reductase OS=Aphanizomenon flos-aquae WA 102 OX=1710896 GN=queF PE=3 SV=1

SEQ ID NO: 44043 - protein, 130 aa, Aphanocapsa feldmannii
  misc_feature (1)..(130): tr|A0A524RIB8|A0A524RIB8_9CYAN NADPH-dependent 7-cyano- 7-deazaguanine reductase OS=Aphanocapsa feldmannii 288c V OX=2507555 GN=queF PE=3 SV=1
MTESTQTPLYGERSIAAGELICFDNPRPGRPYDIEIELPEFTCKCPFSGYPDFAVLRLRYQPGPRVLELKALKLYVNRWRDVAISHEEVVNRMLDDVVAACDPGWMELVADFNPRGNVHTVISVHHGEPR

SEQ ID NO: 44044 - protein, 130 aa, Aphanocapsa feldmannii; identical to SEQ ID NO: 44043
  misc_feature (1)..(130): tr|A0A524RLT5|A0A524RLT5_9CYAN NADPH-dependent 7-cyano- 7-deazaguanine reductase OS=Aphanocapsa feldmannii 277c V OX=2507553 GN=queF PE=3 SV=1

SEQ ID NO: 44045 - protein, 138 aa, Aphanothece cf.
  misc_feature (1)..(138): tr|A0A2T1EZU0|A0A2T1EZU0_9CHRO NADPH-dependent 7-cyano- 7-deazaguanine reductase OS=Aphanothece cf. minutissima CCALA 015 OX=2107695 GN=queF PE=3 SV=1
MASGVADQPQTVTPLYGERAIAEAQLVCFANPREGRAYEVSIELPEFTCTCPFSGYPDFAVLRLLYQPGPRVLELKALKLYVNSYRHRSISHEEAANRILDDLVAACDPLWMQLEADFNPRGNVHTVVRVSHGERRPC

SEQ ID NO: 44046 - protein, 130 aa, Aphanothece hegewaldii
  misc_feature (1)..(130): tr|A0A2T1LU86|A0A2T1LU86_9CHRO NADPH-dependent 7-cyano- 7-deazaguanine reductase OS=Aphanothece hegewaldii CCAL A 016 OX=2107694 GN=queF PE=3 SV=1
MSQTSSETELKYGERNILEGELITFPNPRIGRRYEIHITLPEFTCKCPFSGHPDFATIYITYIPNEKIMELKALKLYINSYRDRYISHEEVINVILDDFVAACDPLDVKIKGDFNPRGNVHMAVYIHYKK

SEQ ID NO: 44047 - protein, 136 aa, Aphanothece sacrum
  misc_feature (1)..(136): tr|A0A401IHJ5|A0A401IHJ5_APHSA NADPH-dependent 7-cyano- 7-deazaguanine reductase OS=Aphanothece sacrum FPU1 OX= 1920663 GN=queF PE=3 SV=1
MTLVPDSESTTLKYGERAIIEGQLITFPNPRIGRKYDIQVTLPEFTCKCPFSGYPDFATIYLTYVPNEKVVELKSLKLYINSYRDRYISHEECVNQILDDFVAACDPLEVTLKGDFSPRGNVHTIIEVCYQKSNSY

SEQ ID NO: 44048 - protein, 150 aa, Aquabacter spiritensis
  misc_feature (1)..(150): tr|A0A4R3LPP6|A0A4R3LPP6_9RHIZ NADPH-dependent 7-cyano- 7-deazaguanine reductase OS=Aquabacter spiritensis OX=9 33073 GN=queF PE=3 SV=1
MTEETLQLGRQVALPASPEAAVLESVPNPHSDTFYVARFTCPEFTSLCPVTGQPDFAHLVIDYVPHRRLVESKSLKLFLAAYRNHGAFHEDCTIDIAKRLVGLVAPHYLRIAGYWAPRGGIPIDVFWQTGTLPAGVWLPEPGVSPYRMRG

SEQ ID NO: 44049 - protein, 154 aa, Aquabacterium commune
  misc_feature (1)..(154): tr|A0A4R6R135|A0A4R6R135_9BURK NADPH-dependent 7-cyano- 7-deazaguanine reductase OS=Aquabacterium commune OX=70 586 GN=queF PE=3 SV=1
MAKPISVSTRAKPATPPSAPSRSLDVFPNPAPERDYVIQFQVPEFTCFCPLTGQPDFAHFTIDCIADKLCIELKSLKMYMWSYRNDGAFHEKVTNDILTDMVKAINPRYIRITAKWYVRGGIYTNVVVDHRKKGWKPAPKVDLPQLGPETGMLG

SEQ ID NO: 44050 - protein, 175 aa, Aquabacterium olei
  misc_feature (1)..(175): tr|A0A2U8FRG8|A0A2U8FRG8_9BURK NADPH-dependent 7-cyano- 7-deazaguanine reductase OS=Aquabacterium olei OX=12966 69 GN=queF PE=3 SV=1
MAKKASSTAAKAPARARKTAPTEADLVVGERTAPAVPPSVPSRQLDVFPNPAPQRDYVIQFQVPEFTCFCPLTKQPDFAHFTIDCIADELCVELKSLKMYMWSYRNEGAFHEKVTNDILEDIVKAIDPRYLRITAKWYVRGGIYTNVVVEHRKKGWKPAPRVELPQHNAETGLLG

SEQ ID NO: 44051 - protein, 160 aa, Aquabacterium sp.
  misc_feature (1)..(160): tr|A0A4Q9GVP0|A0A4Q9GVP0_9BURK NADPH-dependent 7-cyano- 7-deazaguanine reductase OS=Aquabacterium sp. KMB7 OX=2 528630 GN=queF PE=3 SV=1
MAKKAPAAPAVKVGTRAKPATAPSAPSKHLDVFPNPAPERDYVIQFQIPEFTCFCPLTGQPDFAHFVVDCIADKLCIELKSLKMYMWSYRNEGAFHEKVTNDILSDMVKAINPRYLRITAKWYVRGGIYTNVVVEHRKKGWKPAPKVDLPNLGHETGMMG

SEQ ID NO: 44052 - protein, 148 aa, Aquabacterium sp.
  misc_feature (1)..(148): tr|A0A0A0DUA9|A0A0A0DUA9_9BURK NADPH-dependent 7-cyano- 7-deazaguanine reductase OS=Aquabacterium sp. NJ1 OX=15 38295 GN=queF PE=3 SV=1
MGERAKPATPPSTPSRSLDVFPNPAPERDYVIQFQVPEFTCFCPLTGQPDFAHFTIDCIADKLCIELKSLKMYMWSYRNDGAFHEKVTNDILTDMVKAINPRYLRITAKWYVRGGIYTNVVVEHRKKGWKPAPRVDLPQHNAETGLLG

SEQ ID NO: 44053 - protein, 156 aa, Aquamicrobium sp.
  misc_feature (1)..(156): tr|A0A4U6BZ93|A0A4U6BZ93_9RHIZ NADPH-dependent 7-cyano- 7-deazaguanine reductase OS=Aquamicrobium sp. LC103 OX= 1120658 GN=queF PE=3 SV=1
MTDKTDIYANLTQLGGATALPEGPEEAVLEKVPNPQQGTPYCVRFTAPEFTSLCPITGQPDFAHLVIDYVPGQWLVESKSLKLYLGSFRNHGAFHEDCTVSIGKRLVDLLAPEWLRIGGYWYPRGGIPIDVFYQTGPAPQAVWIPDQGVAPYRGRG

SEQ ID NO: 44054 - protein, 143 aa, Aquaspirillum sp.
  misc_feature (1)..(143): tr|A0A1U9JRD0|A0A1U9JRD0_9NEIS NADPH-dependent 7-cyano- 7-deazaguanine reductase OS=Aquaspirillum sp. LM1 OX=19 38604 GN=queF PE=3 SV=1
MNLHEQLHHLGSGTVYRYDQPDASLLERFPNPFAQGALNPAGVTGTLNITCPEFTSLCPVTGQPDFATLVIDMEPDQWCVESKSLKLYLGSFRMHGEFHESCICRIANDLVALLQPHWLRVEGRFTPRGGIPLWPKAEYRRPV

SEQ ID NO: 44055 - protein, 165 aa, Aquibacillus sp.
  misc_feature (1)..(165): tr|A0A516KDT2|A0A516KDT2_9BACI NADPH-dependent 7-cyano- 7-deazaguanine reductase OS=Aquibacillus sp. TKL69 OX=2 594883 GN=queF PE=3 SV=1
MAGRRDDDLKDLTLLGNQATSYAFDYAPEVLETFDNKHVNRDYFVKFNCPEFTTLCPKTGQPDFGTVYISYIPDEKMVESKSLKLYLFSFRNHGDFHEDSMNIIMNDLIDLMNPRYIEVWGKFTPRGGISIDPYCNYGRPGTKFEKMADHRMMNHDMYPEKIDNR

SEQ ID NO: 44056 - protein, 274 aa, Aquicella lusitana
  misc_feature (1)..(274): tr|A0A370GX73|A0A370GX73_9COXI NADPH-dependent 7-cyano- 7-deazaguanine reductase OS=Aquicella lusitana OX=25424 6 GN=queF PE=3 SV=1
MRNIDLSQAPLGKSATYHSHYKRDLLFTLPRKTKREEIGIAGTLPFQGNDIWNGFELSWLNTKGKPVVAMAEFIIPCESPRLIESKSFKLYLNSFNNTQFDSYATVENLLVRDLSEAAGASITVTLLPLSHAPALLQRQFEGVSLDEQDIICDRYTPEPRYLKTDNETVTETLYSDLLKSNCLVTGQPDWASLQITYTGKKINHAGLLQYIVSFRDHNEFHEQCVERIFVDISTYCRPERLLVYARYTRRGGLDINPYRANYPIHLKNIRLCRQ

SEQ ID NO: 44057 - protein, 277 aa, Aquicella siphonis
  misc_feature (1)..(277): tr|A0A5E4PKD6|A0A5E4PKD6_9COXI NADPH-dependent 7-cyano- 7-deazaguanine reductase OS=Aquicella siphonis OX=25424 7 GN=queF PE=3 SV=1
MKQIHAELTNAPLGKSSGYISTYQPDLLFPIPRQSKREEIGITGALPFQGQDIWNAFEVSWLNQKGKPAVAAAEFIFPCDSPRLVESKSFKLYLNSLNNTSFESIAMVEKTLGKDLSSAAGASVGVRLIPLALASDQIARQFSGTCLDEMDIECDTYHTRPEYLDTENDIVTETLYSDLLKSNCLVTGQPDWGSVQITYTGKKINHAGLLRYIVSFRNHDEFHEQCVERIFMDILRRCQPDRLLVYARYTRRGGLDINPYRANYFIPAMENLRLVRQ

SEQ ID NO: 44058 - protein, 129 aa, Aquifex aeolicus
  misc_feature (1)..(129): sp|O67073|QUEF_AQUAE NADPH-dependent 7-cyano-7-deazagua nine reductase OS=Aquifex aeolicus (strain VF5) OX=2243 24 GN=queF PE=3 SV=1
MEAKEKKYGEIEIEKAQLEAWPNPNPERDYMIEITFPEFTCLCPRSGYPDFATIKIRYIPDKYIVELKSLKLWLNKFRNRYISHEAATNEIYQALYDLLKPRFLEVVGDFHPRGNVHTVVRVRSDENYG

SEQ ID NO: 44059 - protein, 129 aa, Aquifex sp.
  misc_feature (1)..(129): tr|A0A432PV35|A0A432PV35_9AQUI NADPH-dependent 7-cyano- 7-deazaguanine reductase OS=Aquifex sp. OX=313370 GN=qu eF PE=3 SV=1
MDVKEKKYGEIEIEKAELEPWPNPNPERDYVIEITFPEFTCLCPRSGYPDFATIKIRYIPDKYIVELKSLKLWLNKFRNRYISHEAATNEIYKALYDLLKPRFLEVIGDFHPRGNVHTVVKVRSDGKYE

SEQ ID NO: 44060 - protein, 129 aa, Aquifex sp.
  misc_feature (1)..(129): tr|A0A432PU24|A0A432PU24_9AQUI NADPH-dependent 7-cyano- 7-deazaguanine reductase OS=Aquifex sp. OX=313370 GN=qu eF PE=3 SV=1
MEVREKKYGELEIERAELEAWPNPSPERDYMIEITFPEFTCLCPRSGYPDFATIKIRYIPDKYIVELKSLKLWLNKFRNRYISHEAATNEIYKALYDLLKPRFLEVIGDFHPRGNVHTVVRVRSDEKYG

SEQ ID NO: 44061 - protein, 155 aa, Aquificaceae bacterium
  misc_feature (1)..(155): tr|A0A432F6C1|A0A432F6C1_9AQUI NADPH-dependent 7-cyano- 7-deazaguanine reductase OS=Aquificaceae bacterium OX=2 053503 GN=queF PE=3 SV=1
MSDENIYKNLQQLGGETKLPDSPETALLESVTNPQADIDYVVRFTAPEFTSLCPMTGQPDFAHLMIDYIPAAKLVESKSLKLYLGSFRNHGAFHEDCTVSIARRLIDEIAPKWLRIGGYWYPRGGMPIDVFFAHGEVPKGVWIPEQGVPPYRGRG

SEQ ID NO: 44062 - protein, 129 aa, Aquificaceae bacterium
  misc_feature (1)..(129): tr|A0A350D0A5|A0A350D0A5_9AQUI NADPH-dependent 7-cyano- 7-deazaguanine reductase OS=Aquificaceae bacterium OX=2 053503 GN=queF PE=3 SV=1
MNSMEKKYGEIAIEQAELEPWDNPTPERNYMIEITFPEFSCLCPRSGYPDYATIKIRYIPDKKIVELRSLKLWLNKFRNRYISHEQATNEIYSALYELLKPRFLEVIGDFNPRGNVHTVIKIRSDENYG

SEQ ID NO: 44063 - protein, 126 aa, Aquificae bacterium
  misc_feature (1)..(126): tr|A0A3M2B366|A0A3M2B366_9BACT NADPH-dependent 7-cyano- 7-deazaguanine reductase OS=Aquificae bacterium OX=2202 151 GN=queF PE=3 SV=1
MEKKYGELAIERAELEPWENPNPERDYMIEITFPEFSCLCPRSGYPDYATIRIRYIPDRYIVELRSLKLWLNKFRNRYISHEQATNEIYTALYELLKPRFLEVVGDFNPRGNVHTVVRVRSDGSYL

SEQ ID NO: 44064 - protein, 128 aa, Aquificae bacterium
  misc_feature (1)..(128): tr|A0A3M0WIF5|A0A3M0WIF5_9BACT NADPH-dependent 7-cyano- 7-deazaguanine reductase OS=Aquificae bacterium OX=2202 151 GN=queF PE=3 SV=1
MKYGEKEILEAKLEPWPNPNPEKNYRINITFPEFSCLCPRSGYPDYATIKITYIPDKYIVELKSLKLYLNKYRNQYISHEEATNKIYDDLYNLLKPRFLEVVGDWNPRGNVKTIITVSSEEQVEKSSD

SEQ ID NO: 44065 - protein, 154 aa, Aquimixticola soesokkakensis
  misc_feature (1)..(154): tr|A0A1Y5TFL9|A0A1Y5TFL9_9RHOB NADPH-dependent 7-cyano- 7-deazaguanine reductase OS=Aquimixticola soesokkakensi s OX=1519096 GN=queF PE=3 SV=1
MVKTDTSGLTQLGANAGLPASPQEAVLERVPHSNAGERYVVRFTAPEFTSLCPMTGQPDFAHIMIDYVPRDWLVESKSLKLFLGSFRNHGAFHEDCSVHIGKRIVELLDPEWLRIGAYWYPRGGIPIDVFWATGPEPQGIWIPEQGVPPYRGRG

SEQ ID NO: 44066 - protein, 305 aa, Aquimonas voraii
  misc_feature (1)..(305): tr|A0A1G6XZQ0|A0A1G6XZQ0_9GAMM NADPH-dependent 7-cyano- 7-deazaguanine reductase OS=Aquimonas voraii OX=265719 GN=queF PE=3 SV=1
MLFTPCAGMGRKSPRKAAARIRAMTTHSSGDFHSAAHASTLGKTVEYADHYDASRLFPIPRAAKRSELGIEAPPPFAGVDIWNAWELSWLDPRGKPKVAIAEIRVPADSPCIIESKSFKLYLNGFNQERIDGRDEVQARIEADLSQAAGAPVRVKLKTLDEAAAEPMAEPAGFCIDEIETDIDVYGPPRPELLSAGDDVVDELLVSRLLKSNCPVTGQPDWASVQIGYRGPRIDREGLLRYLVSFRRHDDFHEQCVERIFVDLMRRCAPERLTVQARYTRRGGLDINPWRSTLPGEPGNVRGARQ

SEQ ID NO: 44067 - protein, 129 aa, Aquisalimonas asiatica
  misc_feature (1)..(129): tr|A0A1H8UKI2|A0A1H8UKI2_9GAMM NADPH-dependent 7-cyano- 7-deazaguanine reductase OS=Aquisalimonas asiatica OX=4 06100 GN=queF PE=3 SV=1
MSTQPSRELETFPNPQPERDYTIRMRIPEFTCLCPKTGQPDFATIHLEYVPDRDCVELKSLKLYIWSFRDQGAFHEQVTHDMLSDLVAATKPRFMRVTGEFYVRGGIDTTVIAEHRAPGWTPPQPVVLP

SEQ ID NO: 44068 - protein, 116 aa, Aquisphaera giovannonii
  misc_feature (1)..(116): tr|A0A5B9WC49|A0A5B9WC49_9BACT NADPH-dependent 7-cyano- 7-deazaguanine reductase OS=Aquisphaera giovannonii OX= 406548 GN=queF PE=3 SV=1
MPAAVETFPNQFPQREYEIEITCPEFTAVCPKTGQPDFGTIVITYVPAEACLELKSLKLYLFAFRDRGIFYEHSINTILDDLAASCRPRRMKVVGLFNPRGGITSKITASMEAAAR

SEQ ID NO: 44069 - protein, 279 aa, Aquitalea magnusonii
  misc_feature (1)..(279): tr|A0A3G9GFZ4|A0A3G9GFZ4_9NEIS NADPH-dependent 7-cyano- 7-deazaguanine reductase OS=Aquitalea magnusonii OX=332 411 GN=queF PE=3 SV=1
MTTPHLTPDLSPLGKTVSYQDQYDASLLFPIARKMKRDEIGVDQQALPFAGVDIWTGFELSWLNARGKPQVGIATFRIPADSPNLIESKSFKLYLNSYNQTRIASLEELQAQLALDLSNAAGAAVTVSVLLPQDFAAERIAELDGDYIDEQDIAVDNYAPCPDILRADTGNIVSETLCSNLLKSNCLVTGQPDWGSVQIRYTGPQLDREALLRYLIGFRQHNEFHEQCVERIFTDILRACAPQQLTVYARYTRRGGLDINPWRSNAEQAPLDNTRTARQ

SEQ ID NO: 44070 - protein, 279 aa, Aquitalea magnusonii
  misc_feature (1)..(279): tr|A0A318IZG6|A0A318IZG6_9NEIS NADPH-dependent 7-cyano- 7-deazaguanine reductase OS=Aquitalea magnusonii OX=332 411 GN=queF PE=3 SV=1
MQPQAMSPEQSPLGKTVSYQDQYDASLLFPIPRQMKRDEIGVDEQALPFAGVDIWTGFELSWLNARGKPQVGIATFRIPADSPNLIESKSFKLYLNSYNQTRIASLAELQAQLALDLSNAAGGTVTVSVQLPQDFAAERIAELDGDYIDEQDIAVDHYAPCPEILRADTGNIVSETLCSNLLKSNCLVTGQPDWGSVQIRYTGPQLDREALLRYLIGFRQHNEFHEQCVERIFTDILRACAPQQLTVYARYTRRGGLDINPWRSNWESAPTANTRTARQ

SEQ ID NO: 44071 - protein, 279 aa, Aquitalea sp.
  misc_feature (1)..(279): tr|A0A454JKB6|A0A454JKB6_9NEIS NADPH-dependent 7-cyano- 7-deazaguanine reductase OS=Aquitalea sp. MWU14-2217 OX =2480983 GN=queF PE=3 SV=1
MKPQAMSPEQSPLGKTVSYQDQYDASLLFPIPRKMKRDEIGVNEQALPFAGVDIWTGFELSWLNARGKPQVGIATFRIPADSPNLIESKSFKLYLNSYNQTRIASLEELQAQLALDLSNAAGGAVSVSVQLPQDFAAERIAELAGDYIDALDIAVDNYAPCPEILRADSSHIVSETLCSNLLKSNCLVTGQPDWGSVQISYTGPQLDREALLRYLIGFRQHNEFHEQCVERIFTDILRACAPQQLTVYARYTRRGGLDINPWRSNAAEPPQHNTRTARQ

SEQ ID NO: 44072 - protein, 279 aa, Aquitalea sp.
  misc_feature (1)..(279): tr|A0A3N7F6T3|A0A3N7F6T3_9NEIS NADPH-dependent 7-cyano- 7-deazaguanine reductase OS=Aquitalea sp. FJL05 OX=2153 366 GN=queF PE=3 SV=1
MKPQAMSPEQSPLGKTVSYQDEYDASLLFPIPRKMKRDEIGVNEQALPFAGVDIWTGFELSWLNARGKPQVGIATFRIPADSPNLIESKSFKLYLNSYNQTRIASLAELQAQLALDLSNAAGRQVSVSVQLPQDFAAECIAELDGDYIDEQDIAVDNYAPCPDILRADSGNIVSETLCSNLLKSNCLVTGQPDWGSVQISYTGPKLEREGLLRYLIGFRQHNEFHEQCVERIFTDILRACAPQQLTVYARYTRRGGLDINPWRSNCAEPPRHNTRTARQ

SEQ ID NO: 44073 - protein, 152 aa, Arboricoccus pini
  misc_feature (1)..(152): tr|A0A212PWS1|A0A212PWS1_9PROT NADPH-dependent 7-cyano- 7-deazaguanine reductase OS=Arboricoccus pini OX=196383 5 GN=queF PE=3 SV=1
MSDPSNLSQLGRPAAPAASPEQAVLERVPNPHPGTVYLVRFTAPEFTSLCPVTGQPDFAHLVLDYVPGDWLVESKSLKLYLTSFRNHGAFHEDCTVGIAKRLIAEIMPTWLRIGGYWYPRGGIPIDVFYQSGRPPTGLWLPEQGVPAYRGRG

SEQ ID NO: 44074 - protein, 125 aa, Archangium gephyra
  misc_feature (1)..(125): tr|A0A2W5VGY8|A0A2W5VGY8_9DELT NADPH-dependent 7-cyano- 7-deazaguanine reductase OS=Archangium gephyra OX=48 GN =queF PE=3 SV=1
MPSQPSKKLEVFDNPAPVRDYEIVFDCPEFTCLCPLTGQPDFAHLKISYTPDEKCIESKSLKLFLWSFRNEGCFHERATNEILDALVKACSPRKMTVFGHWFVRGGISTDVTCTFEKKAKSKKKK

SEQ ID NO: 44075 - protein, 134 aa, Archangium gephyra
  misc_feature (1)..(134): tr|A0A0G3A664|A0A0G3A664_9DELT NADPH-dependent 7-cyano- 7-deazaguanine reductase OS=Archangium gephyra OX=48 GN =queF PE=3 SV=1
MSSKPTKELKTFPNPAADRDYEIAFDVPEFTCLCPLTGQPDFAKFKIRYVPDELCVELKSLKLYMWSYRDEGAFHEKVTNTIADDIVRAIQPRKLTVEGDFFVRGGIGTLVTVTHEKKGQGAKPAKKSAPARRK

SEQ ID NO: 44076 - protein, 135 aa, Archangium sp.
  misc_feature (1)..(135): tr|A0A1Q3HW86|A0A1Q3HW86_9DELT NADPH-dependent 7-cyano- 7-deazaguanine reductase OS=Archangium sp. Cb G35 OX=19 20190 GN=queF PE=3 SV=1
MPSQPTKELKTFPNPAQDRDYEIAFDVPEFTCLCPLTGQPDFAKFKIRYVPDELCVELKSLKLYMWSYRDEGAFHEKVTNTIADDIVRAIKPRKLTVEGDFFVRGGIGTLVTVTHEKKGRGAKPAAKKSAPARRK

SEQ ID NO: 44077 - protein, 134 aa, Archangium violaceum
  misc_feature (1)..(134): tr|A0A084SKB0|A0A084SKB0_9DELT NADPH-dependent 7-cyano- 7-deazaguanine reductase OS=Archangium violaceum Cb vi7 6 OX=1406225 GN=queF PE=3 SV=1
MPSQPTKELKTFPNPARDRDYEIAFDVPEFTCLCPLTGQPDFAKFKIRYVPDELCVELKSLKLYMWSYRDEGAFHEKVTNTIADDIVRAIKPRKLTVEGDFFVRGGIGTLVTVTHEKKGRGAKAAKKSAPARRK

SEQ ID NO: 44078 - protein, 125 aa, Arcobacter anaerophilus
  misc_feature (1)..(125): tr|A0A4Q0Y1F4|A0A4Q0Y1F4_9PROT NADPH-dependent 7-cyano- 7-deazaguanine reductase OS=Arcobacter anaerophilus OX= 877500 GN=queF PE=3 SV=1
MKYGEKEIVEFDINNEDNFWPNINEKNYTINIELPEFMAKCPRSGYPDFATIKLEYIPDKLVIELKALKLYINSFMYREVSHENSANEIFDTLYGKLKPKYMKVIADFKPRGNVHTVIEIDSDKM

SEQ ID NO: 44079 - protein, 127 aa, Arcobacter aquimarinus
  misc_feature (1)..(127): tr|A0A4V1LCA6|A0A4V1LCA6_9PROT NADPH-dependent 7-cyano- 7-deazaguanine reductase OS=Arcobacter aquimarinus OX=1 315211 GN=queF PE=3 SV=1
MEIKYGEQEILDFNIDNEENFWPNQHEKNYVIDIELPEFMAKCPRSGYPDFATIKIQYTPNKKVIELKALKIYINSFMNRYISHENSANEIFDILYTKLEPKWLKVIADFKPRGNVHTVIEIDSSKM

SEQ ID NO: 44080 - protein, 125 aa, Arcobacter bivalviorum
  misc_feature (1)..(125): tr|A0A345IU23|A0A345IU23_9PROT NADPH-dependent 7-cyano- 7-deazaguanine reductase OS=Arcobacter bivalviorum OX=6 63364 GN=queF PE=3 SV=1
MKYGEKEIVEFDINKEEHFWPNNHSKNYVIDIELPEFMAKCPRSGYPDFATIKLKYIPNERVIELKALKLYINSFMFREVSHENSANEIFDTLYEKLQPKWMKVVADFKPRGNVHTVIEIDSDKM

SEQ ID NO: 44081 - protein, 127 aa, Arcobacter butzleri
  misc_feature (1)..(127): tr|A0A2W5C908|A0A2W5C908_9PROT NADPH-dependent 7-cyano- 7-deazaguanine reductase OS=Arcobacter butzleri OX=2819 7 GN=queF PE=3 SV=1
MEIKYGEKEILEFDINNEENFWPNENSKNYIIDIELPEFMAKCPRSGYPDFATIKIQYTPNKKVIELKALKIYINSFMNRYISHENSANEIFDTLYTKLEPKWLKVIADFKPRGNVHTVIEIDSAKL

SEQ ID NO: 44082 - protein, 127 aa, Arcobacter butzleri; identical to SEQ ID NO: 44081
  misc_feature (1)..(127): tr|A0A0G9L2B8|A0A0G9L2B8_9PROT NADPH-dependent 7-cyano- 7-deazaguanine reductase OS=Arcobacter butzleri L355 OX =1447263 GN=queF PE=3 SV=1

SEQ ID NO: 44083 - protein, 127 aa, Arcobacter canalis
  misc_feature (1)..(127): tr|A0A2G1CSF6|A0A2G1CSF6_9PROT NADPH-dependent 7-cyano- 7-deazaguanine reductase OS=Arcobacter canalis OX=19128 71 GN=queF PE=3 SV=1
MEMKYGEKEIVEFDINNEEHYWPNKNEKNYIINIELPEFMAKCPRSGYPDFATIKLQYTPNKKVIELKALKIYINTFMYREVSHENSANEIFDTLYEKLEPKWMKVVADFKPRGNVHTVIEIDSAKM

SEQ ID NO: 44084 - protein, 127 aa, Arcobacter cibarius
  misc_feature (1)..(127): tr|A0A5J6RIY1|A0A5J6RIY1_9PROT 7-cyano-7-deazaguanine r eductase OS=Arcobacter cibarius OX=255507 GN=queF PE=4 SV=1
MEIKYGEKEILEFDINNSENFWPNEHEKNYTIDIELPEFMAKCPRSGYPDFATIKIQYIPNKRVIELKALKIYINSFMNRYISHENSANEIFDTLFNKLEPKWLKVIADFKPRGNVHTIIEIDSSKI

SEQ ID NO: 44085 - protein, 127 aa, Arcobacter cloacae
  misc_feature (1)..(127): tr|A0A4Q0V664|A0A4Q0V664_9PROT NADPH-dependent 7-cyano- 7-deazaguanine reductase OS=Arcobacter cloacae OX=10540 34 GN=queF PE=3 SV=1
MEIKYGEQEILDFNIDNEENFWPNKHEKNYVIDIELPEFMAKCPRSGYPDFATIKIQYTPNKRVIELKALKIYINSFMNRYISHENSANEIFDTLYTKLEPKWLKVIADFKPRGNVHTVIEIDSSKM

SEQ ID NO: 44086 - protein, 127 aa, Arcobacter cloacae
  misc_feature (1)..(127): tr|A0A4Q0ZG07|A0A4Q0ZG07_9PROT NADPH-dependent 7-cyano- 7-deazaguanine reductase OS=Arcobacter cloacae OX=10540 34 GN=queF PE=3 SV=1
MEIKYGEQEILDFNIDNEENFWPNQHEKNYVIDIELPEFMAKCPRSGYPDFATIKIQYTPNKRVIELKALKIYINSFMNRYISHENSANEIFDTLYTKLEPKWLKVIADFKPRGNVHTVIEIDSSKM

SEQ ID NO: 44087 - protein, 127 aa, Arcobacter cryaerophilus
  misc_feature (1)..(127): tr|A0A494T9H0|A0A494T9H0_9PROT NADPH-dependent 7-cyano- 7-deazaguanine reductase OS=Arcobacter cryaerophilus D2 610 OX=1032071 GN=queF PE=3 SV=1
MEIKYGEKEILEFDINNEENFWPNEHDKNYIIDIELPEFMAKCPRSGYPDFATIKIQYTPNKRVIELKALKIYINSFMNRYISHENSANEIFDTLFSKLEPKWLKVVADFKPRGNVHTVIEIDSSKI

SEQ ID NO: 44088 - protein, 142 aa, Arcobacter cryaerophilus
  misc_feature (1)..(142): tr|A0A2S9SJP0|A0A2S9SJP0_9PROT NADPH-dependent 7-cyano- 7-deazaguanine reductase QueF (Fragment) OS=Arcobacter cryaerophilus OX=28198 GN=queF PE=4 SV=1
GCDVWTLYELSWLNARGKPMVAVGEVSVPAVSANLIESKSFKLYLNSFNQTRCDSLEAVQAMLVKDLSACAGSEVSVTLFPLAQAPHHIAALPGECIDEQDIEVDCYEFDANLLQGAAGNDQVEETLHSHLLKATCLVTLQP

SEQ ID NO: 44089 - protein, 127 aa, Arcobacter defluvii
  misc_feature (1)..(127): tr|A0A4Q0UKH7|A0A4Q0UKH7_9PROT NADPH-dependent 7-cyano- 7-deazaguanine reductase OS=Arcobacter defluvii OX=8731 91 GN=queF PE=3 SV=1
MEIKYGEKEILEFDINKDENFWPNEHDKNYIIDIELPEFMAKCPRSGYPDFATIKIQYTPNKKVIELKALKIYINSFMNRYISHENSANEIFDTLNSKLEPKWLKVIADFKPRGNVHTVIEIDSSKL

SEQ ID NO: 44090 - protein, 125 aa, Arcobacter ebronensis
  misc_feature (1)..(125): tr|A0A4Q1ARB7|A0A4Q1ARB7_9PROT NADPH-dependent 7-cyano- 7-deazaguanine reductase OS=Arcobacter ebronensis OX=14 62615 GN=queF PE=3 SV=1
MKYGEKEIVDFDINKEENFWPNKNEKNYTINIELPEFMAKCPRSGYPDFATIKIEYIPEKLVIELKALKIYINTFMYREVSHEDVANEIFDTLYDKLKPRFLKVIADFKPRGNVHTVIEIDSSKM

SEQ ID NO: 44091 - protein, 127 aa, Arcobacter ellisii
  misc_feature (1)..(127): tr|A0A347U4D5|A0A347U4D5_9PROT NADPH-dependent 7-cyano- 7-deazaguanine reductase OS=Arcobacter ellisii OX=91310 9 GN=queF PE=3 SV=1
MEIKYGEKEILEFDINNEVNFWPNEHDKNYIIDIELPEFMAKCPRSGYPDFATIKIQYTPNKRVIELKALKIYINSFMNRYISHENSANEIFDTLNSKLEPKWLKVIADFKPRGNVHTVIEIDSSKL

SEQ ID NO: 44092 - protein, 127 aa, Arcobacter halophilus
  misc_feature (1)..(127): tr|A0A2N1J0T4|A0A2N1J0T4_9PROT NADPH-dependent 7-cyano- 7-deazaguanine reductase OS=Arcobacter halophilus OX=19 7482 GN=queF PE=3 SV=1
MEMKYGEKEIVEFDINNEEHYWPNKNDKNYIIDIELPEFMAKCPRSGYPDFATIKLQYTPNKKVIELKALKIYINTFMYREVSHENSANEIFDTLYEKLQPKWMKVVADFKPRGNVHTVIEIDSAKM

SEQ ID NO: 44093 - protein, 127 aa, Arcobacter marinus; identical to SEQ ID NO: 44083
  misc_feature (1)..(127): tr|A0A1T5BI25|A0A1T5BI25_9PROT NADPH-dependent 7-cyano- 7-deazaguanine reductase OS=Arcobacter marinus OX=50524 9 GN=queF PE=3 SV=1

SEQ ID NO: 44094 - protein, 127 aa, Arcobacter marinus
  misc_feature (1)..(127): tr|A0A347TGT3|A0A347TGT3_9PROT NADPH-dependent 7-cyano- 7-deazaguanine reductase OS=Arcobacter marinus OX=50524 9 GN=queF PE=3 SV=1
MEMKYGEKEIVEFDINNEEHYWPNKNEKNYIINIELPEFMAKCPRSGYPDFATIKLQYTPNKKVIELKALKIYINTFIYREVSHENSANEIFDTLYEKLEPKWMKVVADFKPRGNVHTVIEIDSAKM

SEQ ID NO: 44095 - protein, 127 aa, Arcobacter molluscorum
  misc_feature (1)..(127): tr|A0A2G1DHQ7|A0A2G1DHQ7_9PROT NADPH-dependent 7-cyano- 7-deazaguanine reductase OS=Arcobacter molluscorum LMG 25693 OX=870501 GN=queF PE=3 SV=1
MEMKYGEKEIVEFDINNSEHYWPNNNEKNYKIDIELPEFMAKCPRSGYPDFATIKLEYIPNKKLIELKAIKIYINTFMYREISHENSANEIFDTLYKNLEPRWMKVTADFKPRGNVHTVIEIDSSKM

SEQ ID NO: 44096 - protein, 127 aa, Arcobacter mytili
  misc_feature (1)..(127): tr|A0A345J1F7|A0A345J1F7_9PROT NADPH-dependent 7-cyano- 7-deazaguanine reductase OS=Arcobacter mytili LMG 24559 OX=1032238 GN=queF PE=3 SV=1
MEMKYGEKEIVEFDINSKEHYWPNNNEKNYIIDIELPEFMAKCPRSGYPDFATIKLQYTPNKKLIELKALKLYINTFMFREVSHENSANEIFDTLYKNLEPRWMKVVADFKPRGNVHTVIEIDSAKM

SEQ ID NO: 44097 - protein, 125 aa, Arcobacter nitrofigilis
  misc_feature (1)..(125): tr|D5V3H9|D5V3H9_ARCNC NADPH-dependent 7-cyano-7-deazag uanine reductase OS=Arcobacter nitrofigilis (strain ATC C 33309 / DSM 7299 / LMG 7604 / NCTC 12251 / CI) OX=572 480 GN=queF PE=3 SV=1
MKYGEKEIVEFDINKEENFWPNKNDKNYVINIELPEFMAKCPRSGYPDFATIFIHYTPNKKVIELKALKLYINSFMLREVSHENGANEIFDTLMEKLEPKWLKVIADFKPRGNVHTVIEIDSAKL

SEQ ID NO: 44098 - protein, 127 aa, Arcobacter pacificus
  misc_feature (1)..(127): tr|A0A5C2H2J8|A0A5C2H2J8_9PROT NADPH-dependent 7-cyano- 7-deazaguanine reductase OS=Arcobacter pacificus OX=108 0223 GN=queF PE=3 SV=1
MEIKYGEQEILDFDINSEENFWPNNHEKNYVIKIELPEFMAKCPRSGYPDFATIYLEYTPDKLVIELKALKIYINSFMFRHVSHENSINEIFDTLYNKLQPKWMKVIGDFKPRGNVHTVIEIDSSKM

SEQ ID NO: 44099 - protein, 127 aa, Arcobacter skirrowii
  misc_feature (1)..(127): tr|A0A2U2C3N5|A0A2U2C3N5_9PROT NADPH-dependent 7-cyano- 7-deazaguanine reductase OS=Arcobacter skirrowii OX=282 00 GN=queF PE=3 SV=1
MEIKYGEKEILEFDINNPENFWPNQHDKNYIIDIELPEFMAKCPRSGYPDFATIKIQYRPNKRVIELKALKIYINSFMNRYISHENSANEIFDTLFSKLEPKWLKVVADFKPRGNVHTVIEIDSSKL

SEQ ID NO: 44100 - protein, 127 aa, Arcobacter skirrowii
  misc_feature (1)..(127): tr|A0A4V1LB81|A0A4V1LB81_9PROT NADPH-dependent 7-cyano- 7-deazaguanine reductase OS=Arcobacter skirrowii CCUG 1 0374 OX=1032239 GN=queF PE=3 SV=1
MEIKYGEKEILEFDINNPENFWPNQHDKNYIIDIELPEFMAKCPRSGYPDFATIKIQYTPNKRVIELKALKIYINSFMNRYISHENSANEIFDTLFSKLEPKWLKVVADFKPRGNVHTVIEIDSSKL

SEQ ID NO: 44101 - protein, 127 aa, Arcobacter sp.
  misc_feature (1)..(127): tr|A0A2D5JC75|A0A2D5JC75_9PROT NADPH-dependent 7-cyano- 7-deazaguanine reductase OS=Arcobacter sp. OX=1872629 G N=queF PE=3 SV=1
MEMKYGEKEIREFDINNDENFWPNKNKKNYIIDIELPEFMAKCPRSGYPDFAEIKIQYTPDEKVIELKALKIYINTFMFREVSHENSANEIFDTLYENLKPKWLKVIADFKPRGNVHTVIEIDSAKM

SEQ ID NO: 44102 - protein, 125 aa, Arcobacter sp.
  misc_feature (1)..(125): tr|A0A2N6G569|A0A2N6G569_9PROT NADPH-dependent 7-cyano- 7-deazaguanine reductase OS=Arcobacter sp. OX=1872629 G N=queF PE=3 SV=1
MKYGEKEIVEFDINKEENFWPNENDKNYVINIELPEFMAKCPRSGYPDFATIFLHYTPNKTVIELKALKLYINSFMIREISHENVANEIFDTLMEKLEPRWLKVVADFKPRGNVHTVIEIDSNKL

SEQ ID NO: 44103 - protein, 127 aa, Arcobacter suis
  misc_feature (1)..(127): tr|A0A443TPZ7|A0A443TPZ7_9PROT NADPH-dependent 7-cyano- 7-deazaguanine reductase OS=Arcobacter suis OX=1278212 GN=queF PE=3 SV=1
MEMKYGEREILEFDINKEENFWPNIHEKNYIIDIELPEFMAKCPRSGYPDFATIKIQYSPNKRVIELKALKIYINSFMFREVSHENSINEIFDTLYAKLEPKWMKVIGDFKPRGNVHTVIEIDSSKF

SEQ ID NO: 44104 - protein, 127 aa, Arcobacter trophiarum
  misc_feature (1)..(127): tr|A0A4Q0ZZ23|A0A4Q0ZZ23_9PROT NADPH-dependent 7-cyano- 7-deazaguanine reductase OS=Arcobacter trophiarum LMG 2 5534 OX=1032241 GN=queF PE=3 SV=1
MEIKYGEKEILEFDINNPENFWPNEHNKNYIIDIELPEFVAKCPRSGYPDFATIKIQYTPNKSVIELKALKIYINSFMNRYISHENSANEIFDTLFSKLEPKWLKVIADFKPRGNVHTIIEIDSSKI

SEQ ID NO: 44105 - protein, 127 aa, Arcobacter venerupis
  misc_feature (1)..(127): tr|A0A443TSY5|A0A443TSY5_9PROT NADPH-dependent 7-cyano- 7-deazaguanine reductase OS=Arcobacter venerupis OX=105 4033 GN=queF PE=3 SV=1
MEMKYGEKEIREFDINKEENFWPNAHEKNYIIDIELPEFMAKCPRSGYPDFATIKLQYTPNKKVIELKALKIYINTFMFREVSHENSINEIFDTLYAKLEPKWMKVIGDFKPRGNVHTVIEIDSSKF

SEQ ID NO: 44106 - protein, 283 aa, Arenicella xantha
  misc_feature (1)..(283): tr|A0A395JPI3|A0A395JPI3_9GAMM NADPH-dependent 7-cyano- 7-deazaguanine reductase OS=Arenicella xantha OX=644221 GN=queF PE=3 SV=1
MTQYSDKPELNALTLGQATAYVSAYTPSLLQAVPRQLNRQELGVVEEQPFAGEDVWHAYELSWLNPRGKPIVALARFSFAASTVNLVESKSFKLYLNSFNQSRFESHAAVREALLRDLANVAVGPVTVELIAPDDVQTLVTMPLPGKCIDELDIDIDAYQLAPNVLRLRESDAVVSETLHSHLLKSNCLITNQPDWASVIIEYQGAPIDHESLLRYLVSFRLHNEFHEQCVERIYMDILNVCQPSRLAVQALYTRRGGLDICPFRASKANQGVVSPRRRINRQ

SEQ ID NO: 44107 - protein, 275 aa, Arenimonas caeni
  misc_feature (1)..(275): tr|A0A2P6M7F3|A0A2P6M7F3_9GAMM NADPH-dependent 7-cyano- 7-deazaguanine reductase OS=Arenimonas caeni OX=2058085 GN=queF PE=3 SV=1
MSSPEASQLGKPTAYGSDYDPGLLFPIPRAQARAALGLGEDLPFVGADLWNAYELSWLDGRGKPRVALAELRVPAASPNLVESKSLKLYLGSYAMARFTDTDALRAQLVADLSAAAGAPVSVVLTPAGSNNVALIENLEGDVIDDLPIEVSHYGPPRPDFLSADPELKADEVLVSHLLRSNCPVTGQPDWASVQIRYAGPRIARDGLLRYLVSYRQHSDFHESCVERIFMDILGRCAPTRLAVYARYTRRGGLDINPFRATPGLPLPGNPRTNRQ

SEQ ID NO: 44108 - protein, 275 aa, Arenimonas composti
  misc_feature (1)..(275): tr|A0A091C1P4|A0A091C1P4_9GAMM NADPH-dependent 7-cyano- 7-deazaguanine reductase OS=Arenimonas composti TR7-09 = DSM 18010 OX=1121013 GN=queF PE=3 SV=1
MTSPELSPLGKPVGYGADYDPSLLFPIPRAQQRAALGLDAELPFTGVDFWNAYELSWLDSRGKPRVAMAELRVPAASPNLIESKSLKLYLGSYAQQQFGDTDSLRAQLVRDLGEACGAPVTVVLTPVASNNAAIIENLEGEVIDDLPVEITHYGPPRPDFLQVDDEKKVDEVLVSHLFRSNCPVTGQPDWASLQIRYAGPRILRDGLLRYLVSYRMHADFHEQCVERIFMDLMQHCTPSRLAVYARYTRRGGLDINPFRATPGLPLPGNPRTARQ

SEQ ID NO: 44109 - protein, 275 aa, Arenimonas donghaensis
  misc_feature (1)..(275): tr|A0A087MGK0|A0A087MGK0_9GAMM NADPH-dependent 7-cyano- 7-deazaguanine reductase OS=Arenimonas donghaensis DSM 18148 = HO3-R19 OX=1121014 GN=queF PE=3 SV=1
MTSPELSPLGKAVAYGGDYDPSLLFPIARAQSRATLGLGNDLPFGGVDFWNAYELSWLDGRGKPRVALAELRVPAASPNIIESKSLKLYLGSYAMARFSDTDSLRAQLVADLSAASGATVSVVLTPAGSNNVALIENLEGDLIDDLPIDISHYGPPRPDFLACDEETRADEILVSHLLKSNCPVTGQPDWASVQIRYAGPRIARDGLLRYLVSYRQHSDFHESCVERIFMDLMQHCAPTRLAVYARYTRRGGLDINPFRATPGLPLPGNPRTNRQ

SEQ ID NO: 44110 - protein, 275 aa, Arenimonas malthae
  misc_feature (1)..(275): tr|A0A091B5G3|A0A091B5G3_9GAMM NADPH-dependent 7-cyano- 7-deazaguanine reductase OS=Arenimonas malthae CC-JY-1 OX=1384054 GN=queF PE=3 SV=1
MTSPESSLLGKPVSYNADYDPNLLFPIPRAGQREALGIGDELPFVGVDFWNAYELSWLDNRGKPRVALAELRVPAASPNLIESKSLKLYLGSCAMARFADADTLRAQLVADLSAAAGAPVSVVLTPAGSSNAALIENLEGDSIDDLPVEISHYGPPKPEFLSSDPELKADEVLVSHLLKSNCPVTGQPDWASVQIRYAGPRIARDGLLRYLVSYRQHSDFHESCVERIFMDILRQCSPTRLAVYARYTRRGGLDINPFRATPGLPLPGNPRTNRQ

SEQ ID NO: 44111 - protein, 275 aa, Arenimonas metalli
  misc_feature (1)..(275): tr|A0A091BP77|A0A091BP77_9GAMM NADPH-dependent 7-cyano- 7-deazaguanine reductase OS=Arenimonas metalli CF5-1 OX =1384056 GN=queF PE=3 SV=1
MTSPELSPLGKAVEYGNDYDPSLLFPIARATQRAALGLGEELPFVGVDFWNAYELSWLDGRGKPRVALAEFRVQAASPNIIESKSFKLYLGSYAQARFSDTDALRAQLVRDLSEASGAPVSVVLTPASTNNTALIETLEGDLIDDLPIEISHYGPPRPDFLSSDPELKADEILVSHLLKSNCPVTGQPDWASVQIRYAGPRIARDGLLRYLVSFRNHSDFHEQCVERIFMDLMQHCAPTRLAVYARYTRRGGLDINPFRATPGLPLPGNPRTARQ

SEQ ID NO: 44112 - protein, 275 aa, Arenimonas oryziterrae
  misc_feature (1)..(275): tr|A0A091BHX1|A0A091BHX1_9GAMM NADPH-dependent 7-cyano- 7-deazaguanine reductase OS=Arenimonas oryziterrae DSM 21050 = YC6267 OX=1121015 GN=queF PE=3 SV=1
MDPLDQSSLGKPVVYAGSYDPGLLFPIARADKRAELGIGADLPFIGIDIWNAFELSWLDARGKPRVAIAEFRVPAESPNIVESKSFKLYLNSYMQTRVPDTDTLRAQLARDLGAAAGAPVSVVLTTPTAKQAAPVGPLEGEVIDDLPIEVTHYGPPRPDLLYVNPEAMVEETLVSHLLKSNCPVTGQPDWASLQIHYTGARLGRDGLLRYLVSFREHNDFHEQCVERVFMDILRECAPSRLSVYARYTRRGGLDINPFRCTPGWLMPENIRTSRQ

SEQ ID NO: 44113 - protein, 275 aa, Arenimonas sp.
  misc_feature (1)..(275): tr|A0A2D8B9G3|A0A2D8B9G3_9GAMM NADPH-dependent 7-cyano- 7-deazaguanine reductase OS=Arenimonas sp. OX=1872635 G N=queF PE=3 SV=1
MTSPELSPLGKAVEYGGDYDPSLLFPIARAQSRATLGLGDELPFGGVDFWNAYELSWLDGRGKPRVALAELRVPAASPNIIESKSLKLYLGSYAMARFADTDALRTQLVGDLTQAAGAPVSVVLTPAGSNNVALIENLEGDLIDDLPIEISHYGPPRPDFLSCDAETKADEILVSHLLKSNCPVTGQPDWASVQIRYAGPRIARDGLLRYLVSFRQHSDFHESCVERIFMDLMQHCAPTRLAVYARYTRRGGLDINPFRATPGLPLPGNPRTNRQ

SEQ ID NO: 44114 - protein, 275 aa, Arenimonas sp.
  misc_feature (1)..(275): tr|A0A5B2Z880|A0A5B2Z880_9GAMM NADPH-dependent 7-cyano- 7-deazaguanine reductase OS=Arenimonas sp. 3729k OX=260 8255 GN=queF PE=3 SV=1
MSSPDLGPLGRAVAYPAEYDPGLLFPIARATGRAALGLEGELPFTGVDLWNAYELSWLDARGKPRVALAELRVPAASSHLIESKSLKLYLGSYAQARFADTDSLRAQLVRDLSAVAGAPVSVVLTPAASANAAAIEALEGEPIDDLPLEIGHYGPPQPDFLSADPDLRADEVLVSHLLKSNCPVTGQPDWASVQIRYAGPRIARDGLLRYLVSYRLHRDFHEQCVERIFMDILQRCRPQRLAVYARYTRRGGLDINPFRATPGMPLPGNPRTARQ

SEQ ID NO: 44115 - protein, 121 aa, Armatimonadetes bacterium
  misc_feature (1)..(121): tr|A0A399X1H8|A0A399X1H8_9BACT NADPH-dependent 7-cyano- 7-deazaguanine reductase OS=Armatimonadetes bacterium O X=2033014 GN=queF PE=3 SV=1
MSRELLETFPNPRPGREYTIEHVAPEFTSLCPKTGQPDFATITLTYAPAELCVELKSLKMYYHSFRNKGIFYEAVVNEMLDDFVAAFDPLWIEVRGEFHVRGGISSVVVAQSSRAEEPPNR

SEQ ID NO: 44116 - protein, 123 aa, Armatimonadetes bacterium
  misc_feature (1)..(123): tr|A0A1Q7RD58|A0A1Q7RD58_9BACT NADPH-dependent 7-cyano- 7-deazaguanine reductase OS=Armatimonadetes bacterium 1 3_1_40CM_3_65_7 OX=1805024 GN=queF PE=3 SV=1
MRDPEEVRSDLLDTFPYEYPGSPATVEISTEEFTAVCPWSGLPDFGGVTVRYLPRERVLELRSFKYYLLSYRNVGIYQEHAANRILADLVRACAPGWMELELDYRVRGGVHTVVRVRWPGAGP

SEQ ID NO: 44117 - protein, 283 aa, Aromatoleum aromaticum
  misc_feature (1)..(283): sp|Q5P6G9|QUEF_AROAE NADPH-dependent 7-cyano-7-deazagua nine reductase OS=Aromatoleum aromaticum (strain EbN1) OX=76114 GN=queF PE=3 SV=1
MNPSDTHDHGAEASPLGQSVVYRDSYAPELLFPIARQIKRDELGLAPDTLPFVGEDLWNAYELSWLNSRGKPVAAIGTFRVPVTSPRLIESKSLKLYLNSFNQHRFVDPTLVHDTLTRDLSTAAGAPVAVSIEVLSRRPTRVFGYPHGVLLDEIDIEIDTYRTDPAFLQSDFNADEVSETLYSHLLKSNCLVTGQPDWGTIVLRYIGPPIDRAGLLRYIVSFRSHNEFHEQCVERIFCDVLRRCAPRHLAVWARYTRRGGLDINPFRSTGHFTQFDNIAEVRQ

SEQ ID NO: 44118 - protein, 281 aa, Arsenophonus endosymbiont
  misc_feature (1)..(281): tr|A0A4V1M2G0|A0A4V1M2G0_9GAMM NADPH-dependent 7-cyano- 7-deazaguanine reductase OS=Arsenophonus endosymbiont o f Bemisia tabaci Asia II 3 OX=1868623 GN=queF PE=3 SV=1
MPLDQDNGELQHLTLGKKTEYQDNYAPHLLQAVPRRLNRQPLGLSSDRLPFHGADIWTLYELSWLNSRGVPQVAIGHVTISANSINLIESKSFKLYLNSFNQNQFISWQKVEKQLTQDLTACAAGDVTIKLQPLTMFANQTIHNLSGECIDEQEIEITDYEFNRDYLNNATTNIKAEETLVSHLLKSNCLITNQPDWGSIQIHYCGAKIDREKLLRYLISFRHHNEFHEQCVERIFNDILQLCQPDKLSVYARYTRRGGLDINPWRSNESFKPTMMRLARQ

SEQ ID NO: 44119 - protein, 281 aa, Arsenophonus endosymbiont
  misc_feature (1)..(281): tr|A0A3B0MAY0|A0A3B0MAY0_9GAMM NADPH-dependent 7-cyano- 7-deazaguanine reductase OS=Arsenophonus endosymbiont o f Trialeurodes vaporariorum OX=235567 GN=queF PE=3 SV=1
MPLDQDNGKLQRLTLGKKTEYQDNYAPHLLQAVPRRLNRKPLGLSSDRLPFHGADIWTLYELSWLNSRGVPQVVIGHVTINANSINMIESKSFKLYLNSVNQTQFISWQEVEKQLTQDVTACAAGVVTVKLQPLTMFANQTIHNLSGECIDEPEIEITDYEFNRDYLNNATTNIKAEETLVSHLLKSNCLITNQPDWGSIQIHYCGAKIDREKLLRYLVSFRHHNEFHEQCVERIFNDILQLCQPDKLSVYARYTRRGGLDINPWRSNESFQPTMMRLARQ

SEQ ID NO: 44120 - protein, 281 aa, Arsenophonus nasoniae
  misc_feature (1)..(281): tr|D2U273|D2U273_9GAMM NADPH-dependent 7-cyano-7-deazag uanine reductase OS=Arsenophonus nasoniae OX=638 GN=que F_1 PE=3 SV=1
MPIYQDNGELQHLTLGKKTEYQDNYAPHLLQAVPRRLNRQPLGLSSDKLPFHGADIWTLYELSWLNSRGVPQVAIGHVTINANSVNLIESKSFKLYLNSFNQTKFISWQEVEKQLTQDLTACAAGEVIVKLQPLTIFTDQTINNLPGECIDEQEIEITDYEFNRNYLKNATESILVEETLVSHLLKSNCLITNQPDWGSIQIHYFGPKIDREKLLRYLVSFRHHNEFHEQCVERIFNDILQLCQPNKLSVYARYTRRGGLDINPWRSNENSQPTIMRLARQ

SEQ ID NO: 44121 - protein, 235 aa, Arsenophonus nasoniae
  misc_feature (1)..(235): tr|D2U164|D2U164_9GAMM NADPH-dependent 7-cyano-7-deazag uanine reductase OS=Arsenophonus nasoniae OX=638 GN=que F PE=3 SV=1
MSFFGEDIWNLYELSWLNKNGVPQVAIGEVKIDSNSINLIESKSFKLYLNSFNQTFFDSIDIVRDSIKEDLSACAEGNVLVKLANLSECKAISLINFDGISIDNNNIIINKYDYSPEILEDATKNNSPVITECLVSNLLKSNCLVTNQPDWGSVLITYKGAKINRDILLKYIISFRNHNEFHEQCIERIFSDILFYCKPLELSVYGRYTRRGGLDINPWRSTNHLEIENLRLPRQ

SEQ ID NO: 44122 - protein, 281 aa, Arsenophonus sp.
  misc_feature (1)..(281): tr|A0A2A2GX94|A0A2A2GX94_9GAMM NADPH-dependent 7-cyano- 7-deazaguanine reductase OS=Arsenophonus sp. ENCA OX=19 87579 GN=queF PE=3 SV=1
MPLDQDNGELQHLTLGKKTEYQDNYAPHLLQAVPRRLNRQPLGLSSNRLPFHGADIWTLYELSWLNSRGVPQVAIGHVTINANSINLIESKSFKLYLNSFNQTQFISWQEVEKQLTQDLTVCAAGEVTVKLQPLTMFANQTIHNLSGECIDEQEIEITDYEFNRDYLNNATTNTKAEETLVSHLLKSNCLITNQPDWGSIQIHYCGAKIDREKLLRYLVSFRHHNEFHEQCVERIFNDILQLCQPDKLSVYARYTRRGGLDINPWRSNESFQPTMMRLARQ

SEQ ID NO: 44123 - protein, 281 aa, Arsukibacterium ikkense
  misc_feature (1)..(281): tr|A0A0M2V925|A0A0M2V925_9GAMM NADPH-dependent 7-cyano- 7-deazaguanine reductase OS=Arsukibacterium ikkense OX= 336831 GN=queF PE=3 SV=1
MTKSHSEIMAGLSLGKTTAYAEQYDPSLLQPVPRSLGRDNLGLDHTTPLPFIGEDIWHGYELSWLNAKGKPMVALATFVVPLSSPHLIESKSFKLYLNSFNQSRFDDLRQVYQALQRDLSACAGAPVRVTLHNVNEIMVFQPTWIPGHCIDDLDISIDSYQYDPTLLQLAGSADIVDEKVHSHLLKSNCLITSQPDWASVYIHYRGQAIDHAALLRYLISFRSHNEFHEQCVERIFLDIWLRCKPDYLLVYARYTRRGGLDINPVRASASYKLPNLRLSRQ

SEQ ID NO: 44124 - protein, 280 aa, Arsukibacterium sp.
  misc_feature (1)..(280): tr|A0A0M2VHZ9|A0A0M2VHZ9_9GAMM NADPH-dependent 7-cyano- 7-deazaguanine reductase OS=Arsukibacterium sp. MJ3 OX= 1632859 GN=queF PE=3 SV=1
MTKSHSEIMAGLSLGKITAYAEQYDASLLQPVPRSLGRDSLGIDPTHLPFIGEDIWHGYELSWLNAKGKPMVALATFVVPINSANLVESKSFKLYLNSFNQSRFSDLRQVYQALQRDLSACAGSTVQVTLHNVNEIMVFQPTWIPGHCIDDLDISIDSYQYDPSLLQLAEPAAAVDEKVHSHLLKSNCLITSQPDWASVYIHYRGQAIDHAALLRYLISFRSHNEFHEQCIERIFLDIWQRCQPEYLLVYARYTRRGGLDINPVRASASYKLPNLRLSRQ

SEQ ID NO: 44125 - protein, 157 aa, Arthrospira maxima
  misc_feature (1)..(157): tr|B5W9E9|B5W9E9_LIMMA NADPH-dependent 7-cyano-7-deazag uanine reductase OS=Arthrospira maxima CS-328 OX=513049 GN=queF PE=3 SV=1
MGDRNWLFIVEPNMSNSQVKSSETESVTNTELKYGERQITEGQLITFPNPRPGRSYQINIVLPEFTCKCPFSGYPDFATIDLTYVPDQSVVELKSIKLYINSYRDRYISHEESVNQILDDFVAACDPLSVHIKGDFNPRGNVHTVVEVHHHKQHPES

SEQ ID NO: 44126 - protein, 157 aa, Arthrospira platensis
  misc_feature (1)..(157): tr|K1W5E8|K1W5E8_ARTPT NADPH-dependent 7-cyano-7-deazag uanine reductase OS=Arthrospira platensis C1 OX=459495 GN=queF PE=3 SV=1
MGDRNWLFIVDANMSNSQVKSSETESVTNTELKYGERQITEGQLITFPNPRPGRSYQINIVLPEFTCKCPFSGYPDFATIDLTYVPDQSVVELKSIKLYINSYRDRYISHEESVNQILDDFVAACDPLSVHIKGDFNPRGNVHTVVEVHHHKQHPES

SEQ ID NO: 44127 - protein, 144 aa, Arthrospira platensis
  misc_feature (1)..(144): tr|D5A695|D5A695_ARTPN NADPH-dependent 7-cyano-7-deazag uanine reductase OS=Arthrospira platensis (strain NIES- 39 / IAM M-135) OX=696747 GN=queF PE=3 SV=1
MSNSQVKPSETESVTNTEPRYGEREISEGQLITFPNPRPGRSYQINIVLPEFTCKCPFSGYPDFATIDLTYVPDQSVVELKSIKLYINSYRDRYISHEESVNQILDDFVAACDPLSVHIKGDFNPRGNVHTVVEVHHHKHQQTN

SEQ ID NO: 44128 - protein, 119 aa, Arthrospira sp.
  misc_feature (1)..(119): tr|A0A328V572|A0A328V572_9CYAN NADPH-dependent 7-cyano- 7-deazaguanine reductase (Fragment) OS=Arthrospira sp. O9.13F OX=1982223 GN=B9S53_23675 PE=3 SV=1
ITEGQLITFPNPRPGRSYQINIVLPEFTCKCPFSGYPDFATIDLTYVPDQSVVELKSIKLYINSYRDRYISHEESVNQILDDFVAACDPLSVHIKGDFNPRGNVHTVVEVHHHKQHPES

SEQ ID NO: 44129 - protein, 191 aa, Asaccharobacter celatus
  misc_feature (1)..(191): tr|A0A369P3U7|A0A369P3U7_9ACTN NADPH-dependent 7-cyano- 7-deazaguanine reductase OS=Asaccharobacter celatus OX= 394340 GN=queF PE=3 SV=1
MAAIAAHLAREDAGPAPATAPAAASAGRDENETRAGGVTLLGNQHTQYPTDYDPSVLETFENKHPGNDYFVKFNCPEFTSLCPITGQPDFATIYISYVPDVRMVESKSLKLYLFSFRNHGDFHEDCMNIIMKDLIALMDPKYIEVWGKFTPRGGISIDPYCNYGRPGTRWEEVAWTRLSQHDLYPEKVDNR

SEQ ID NO: 44130 - protein, 194 aa, Asaccharobacter celatus
  misc_feature (1)..(194): tr|A0A369NZB6|A0A369NZB6_9ACTN NADPH-dependent 7-cyano- 7-deazaguanine reductase OS=Asaccharobacter celatus OX= 394340 GN=queF PE=3 SV=1
MAAIAAHLAREDAGSAPVAPAPAPAAAPAGRDEGETRAGGVTLLGNQHTQYPTDYDPSVLETFENKHPGNDYFVKFNCPEFTSLCPITGQPDFATIYISYVPDVRMVESKSLKLYLFSFRNHGDFHEDCMNIIMKDLIALMNPKYIEVWGKFTPRGGISIDPYCNYGRPGTRWEEVAWTRLSQHDLYPEKVDNR

SEQ ID NO: 44131 - protein, 167 aa, Asaccharospora irregularis
  misc_feature (1)..(167): tr|A0A1M5QM02|A0A1M5QM02_9FIRM NADPH-dependent 7-cyano- 7-deazaguanine reductase OS=Asaccharospora irregularis DSM 2635 OX=1121321 GN=queF PE=3 SV=1
MHQSGRKKEELQDITLLGNQGTKYEFGYTPEVLEVFDNKHPNNDYFVKFNCPEFTSLCPITGQPDFATIYISYIPGEKMVESKSLKLYLFSFRNHGDFHEDCMNIIMKDLIKLMDPKYIEVWGKFTPRGGISIDPYCNYGMPGTKFEDMANHRLMNHDMYPEKVDNR

SEQ ID NO: 44132 - protein, 156 aa, Asaia bogorensis
  misc_feature (1)..(156): tr|A0A0P0YD52|A0A0P0YD52_9PROT NADPH-dependent 7-cyano- 7-deazaguanine reductase OS=Asaia bogorensis NBRC 16594 OX=1231624 GN=queF PE=3 SV=1
MTTSENDLAALSQLGRQTVQPDSPETATLERVPSPHKGRDYVVRFTAPEFTSLCPVTGQPDFAHIVIDYIPDEWIVESKSLKLYLTSFRNHGAFHEDCSVSIATKLVEVLNPKWLRIGAYWYPRGGIPIDVFWQTGLPPEGVWVPAQDVPGYRGRG

SEQ ID NO: 44133 - protein, 156 aa, Asaia platycodi; identical to SEQ ID NO: 44132
  misc_feature (1)..(156): tr|A0A060QKW2|A0A060QKW2_9PROT NADPH-dependent 7-cyano- 7-deazaguanine reductase OS=Asaia platycodi SF2.1 OX=13 82230 GN=queF PE=3 SV=1

SEQ ID NO: 44134 - protein, 156 aa, Asaia sp.
  misc_feature (1)..(156): tr|A0A433WR52|A0A433WR52_9PROT NADPH-dependent 7-cyano- 7-deazaguanine reductase OS=Asaia sp. W19 OX=2067395 GN =queF PE=3 SV=1
MTTLENDLAALSQLGRQTVQPDSPETATLERVPSPHKGRDYVVRFTAPEFTSLCPVTGQPDFAHIVIDYIPGDWIVESKSLKLYLTSFRNHGAFHEDCSVSIATKLVEVLNPKWLRIGAYWYPRGGIPIDVFWQTGLPPEGVWVPAQDVPGYRGRG

SEQ ID NO: 44135 - protein, 203 aa, Asticcacaulis benevestitus
  misc_feature (1)..(203): tr|V4Q7F1|V4Q7F1_9CAUL NADPH-dependent 7-cyano-7-deazag uanine reductase OS=Asticcacaulis benevestitus DSM 1610 0 = ATCC BAA-896 OX=1121022 GN=queF PE=3 SV=1
MAYAQTCAARGRACQNAVGILEITFAEIDVRVKFKIHISCLFGGRVYIQLMSHYTDNLTQLGGGNAVASDPALAVLERVPNPHSDVDYVARFTAPEFTSLCPVTGQPDFAHLVIDYVPGEWLVESKSLKLFLTSFRNHGAFHEDCTIYIAKRLKELLDPRWLRIGGFWYPRGGIPIDVFWQTGEAPKGVYVPDFGVPSYRGRG

SEQ ID NO: 44136 - protein, 153 aa, Asticcacaulis biprosthecum
  misc_feature (1)..(153): tr|F4QU55|F4QU55_9CAUL NADPH-dependent 7-cyano-7-deazag uanine reductase OS=Asticcacaulis biprosthecum C19 OX=7 15226 GN=queF PE=3 SV=1
MSHYTDNLTQLGGDARPVDDPARAVLERVPNPHADVDYVARFTVPEFTSLCPVTGQPDFAHLVIDYVPGDWLVESKSLKLFLTSFRNHGAFHEDCTIHIAKRLRDLLAPRWLRIGGFWYPRGGIPIDVFWQTSEPPKGVLVPDFGVATYRGRG

SEQ ID NO: 44137 - protein, 153 aa, Asticcacaulis excentricus
  misc_feature (1)..(153): tr|A0A3G9G3L7|A0A3G9G3L7_9CAUL NADPH-dependent 7-cyano- 7-deazaguanine reductase OS=Asticcacaulis excentricus O X=78587 GN=queF PE=3 SV=1
MAHYTDNLTQLGQQLGAPTDPDSAVLERVPNPHADIDYVARFTAPEFTSLCPVTGQPDFAHLVIDYVPGEWLVESKSLKLFLTAFRNHGAFHEDCTISIAKRLRDLLAPRWLRIGGFWYPRGGIPIDVFWQTTEPPKGVLIPDFGVATYRGRG

SEQ ID NO: 44138 - protein, 153 aa, Asticcacaulis excentricus
  misc_feature (1)..(153): tr|E8RRX7|E8RRX7_ASTEC NADPH-dependent 7-cyano-7-deazag uanine reductase OS=Asticcacaulis excentricus (strain A TCC 15261 / DSM 4724 / VKM B-1370 / CB 48) OX=573065 GN =queF PE=3 SV=1
MAHYTDNLTQLGQQLGAPTDPDSAVLERVPNPHADIDYVARFTAPEFTSLCPVTGQPDFAHLVIDYVPGEWLVESKSLKLFLTAFRNHGAFHEDCTIYIAKRLRDLLAPRWLRIGGFWYPRGGIPIDVFWQTTEPPKGVLIPDFGVATYRGRG

SEQ ID NO: 44139 - protein, 66 aa, Asticcacaulis sp.
  misc_feature (1)..(66): tr|A0A258B9D7|A0A258B9D7_9CAUL NADPH-dependent 7-cyano- 7-deazaguanine reductase QueF (Fragment) OS=Asticcacaul is sp. 32-58-5 OX=1970317 GN=B7Z26_07245 PE=3 SV=1
HGAFHEDCTIYIAKRLKDLLDPRWLRIAGYWYPRGGIPIDVFWQTGEAPKGVWVPETGVAPYRGRG

SEQ ID NO: 44140 - protein, 153 aa, Asticcacaulis sp.
  misc_feature (1)..(153): tr|V4NU82|V4NU82_9CAUL NADPH-dependent 7-cyano-7-deazag uanine reductase OS=Asticcacaulis sp. YBE204 OX=1282363 GN=queF PE=3 SV=1
MAHYTDNLTQLGQQLGAPTDPESAVLERVPNPHTDIDYVARFTAPEFTSLCPVTGQPDFAHIAIDYVPGEWLVESKSLKLFLTAFRNHGAFHEDCTIYIAKRLRDLLEPRWLRIGGFWYPRGGIPIDVFWQTTEPPKGVLVPDFGVATYRGRG

SEQ ID NO: 44141 - protein, 153 aa, Asticcacaulis taihuensis
  misc_feature (1)..(153): tr|A0A1G4SDJ7|A0A1G4SDJ7_9CAUL NADPH-dependent 7-cyano- 7-deazaguanine reductase OS=Asticcacaulis taihuensis OX =260084 GN=queF PE=3 SV=1
MSHYTDNLTQLGGDARPVDDPAKAVLERVPNPHADVNYVARFTAPEFTSLCPVTGQPDFAHLVIDYVPGEWLVESKSLKLFLTSFRNHGAFHEDCTVYIAKRLNDLLAPRWLRIGGFWYPRGGIPIDVFWQTAEAPKGVYVPDFGVPTYRGRG

SEQ ID NO: 44142 - protein, 132 aa, Atelocyanobacterium thalassa
  misc_feature (1)..(132): tr|D3EP90|D3EP90_ATETH NADPH-dependent 7-cyano-7-deazag uanine reductase OS=Atelocyanobacterium thalassa (isola te ALOHA) OX=1453429 GN=queF PE=3 SV=1
MNEIPDTNSSTLKYGERNIIEGELITFPNPRIGRSYSILITLPEFTCKCPFSGHPDFATLEFKYVPNQKILELKALKLYINGFRDKYISHEESINQILDDFVEACEPSEATLKGNFNPRGNIHTVIEVCYKK

SEQ ID NO: 44143 - protein, 281 aa, Atlantibacter hermannii
  misc_feature (1)..(281): tr|A0A447LSW8|A0A447LSW8_ATLHE NADPH-dependent 7-cyano- 7-deazaguanine reductase OS=Atlantibacter hermannii OX= 565 GN=queF PE=3 SV=1
MTSYENHAALSGLTLGKSTAYRDIYDASLLQPVPRSLNRDPLGLRADALPFHGADIWTLYELSWLNNNGLPQVGVGHVSIDSASVNLVESKSFKLYLNSFNQTRFASWDEVQQTLAQDLGRCAQGNVDVKLFRLHELEGQTVAAFDGTCIDNQPITIDNYEFDADYLAGAAGDRVVEETLVSHLLKSNCLITHQPDWGSVQIRYNGPQIDREKLLRYLVSFRHHNEFHEQCVERIFNDIMRFCQPTSLSVYARYTRRGGLDINPWRSNTDFTPATGRLVRQ

SEQ ID NO: 44144 - protein, 281 aa, Atlantibacter hermannii; identical to SEQ ID NO: 44143
  misc_feature (1)..(281): tr|H5V0E3|H5V0E3_ATLHE NADPH-dependent 7-cyano-7-deazag uanine reductase OS=Atlantibacter hermannii NBRC 105704 OX=1115512 GN=queF PE=3 SV=1

SEQ ID NO: 44145 - protein, 281 aa, Atlantibacter subterranea
  misc_feature (1)..(281): tr|A0A427UNZ1|A0A427UNZ1_9ENTR NADPH-dependent 7-cyano- 7-deazaguanine reductase OS=Atlantibacter subterranea O X=255519 GN=queF PE=3 SV=1
MTSYENHAALSGLTLGKSTDYRDIYDASLLQPVPRSLNRDPLGISAGDLPFHGADIWTLYELSWLNSNGLPQVAVGHVSIDSTSVNLVESKSFKLYLNSFNQSRFASWDEVQNTLARDLCHCAQGKVEVQLYRIQDIEGQAIAAFDGVCIDNQPITIDNYEFDAAYLDGAAGEQQVEETLVSHILKSNCLITHQPDWGSVQIRYRGPQIDREKLLRYLVSFRHHNEFHEQCVERIFSDIMRFCQPQTLSVYARYTRRGGLDINPWRSNCDFTPATERLVRQ

SEQ ID NO: 44146 - protein, 163 aa, Atopobacter sp.
  misc_feature (1)..(163): tr|A0A421BE74|A0A421BE74_9LACT NADPH-dependent 7-cyano- 7-deazaguanine reductase OS=Atopobacter sp. AH10 OX=231 5861 GN=queF PE=3 SV=1
MRSKEEMGDISQLGQQKTVYRDDYAPEVLETFPNKHPENDYFVKFNCPEFTSLCPMTGQPDFATVYISYIPGERMVESKSLKLYLFSFRNHGDFHEDCINIIMKDLIQLMDPKYIEVWGKFTPRGGISIDPYCNYGKAASKYEQMAWDRLQQHDMYPEKVDNR

SEQ ID NO: 44147 - protein, 131 aa, Aulosira laxa
  misc_feature (1)..(131): tr|A0A1Z4TYD3|A0A1Z4TYD3_9CYAN NADPH-dependent 7-cyano- 7-deazaguanine reductase OS=Aulosira laxa NIES-50 OX=15 41988 GN=queF PE=3 SV=1
MTNNTTEIKYGEREIAEGQLITFPNPRVGRRYDISITLPEFTCKCPFSGYPDFATIYISYVPDERVVELKALKLYINSYRDRYISHEESANQILDDFVAACDPLEATVKADFTPRGNVHTVVEVRHQKLAK

SEQ ID NO: 44148 - protein, 153 aa, Aurantimonas manganoxydans
  misc_feature (1)..(153): tr|Q1YFP9|Q1YFP9_AURMS NADPH-dependent 7-cyano-7-deazag uanine reductase OS=Aurantimonas manganoxydans (strain ATCC BAA-1229 / DSM 21871 / SI85-9A1) OX=287752 GN=queF PE=3 SV=1
MVSPDDLSQLGRDARPAASPEEAVLETVPYTRGDGAPAIVRFTCPEFTSLCPVTGQPDFAHLVIDYAPDERLVESKSLKLFLTSFRNHGAFHEDCTVSVGRRIVAATQPLWLRIGGYWYPRGGIPIDVFWQTGPAPEGAWVPETGVPPYRGRG

SEQ ID NO: 44149 - protein, 152 aa, Aurantimonas sp.
  misc_feature (1)..(152): tr|A0A0Q6EUJ6|A0A0Q6EUJ6_9RHIZ NADPH-dependent 7-cyano- 7-deazaguanine reductase OS=Aurantimonas sp. Leaf443 OX =1736378 GN=queF PE=3 SV=1
MTDPTLTQLGRDSRPAASPEEAPLETVPFAPGEGPAAIVRFTCPEFTSLCPVTGQPDFAHIVLDYAPAGRLVESKSLKLFLTSFRNHGAFHEDCTLTIARRVMAATQPRWLRIGAFWYPRGGIPIDVFWQSGEPPAGAFLPEMGVPPYRGRG

SEQ ID NO: 44150 - protein, 153 aa, Aurantimonas sp.; identical to SEQ ID NO: 44148
  misc_feature (1)..(153): tr|A0A2E2JFQ3|A0A2E2JFQ3_9RHIZ NADPH-dependent 7-cyano- 7-deazaguanine reductase OS=Aurantimonas sp. OX=1872654 GN=queF PE=3 SV=1

SEQ ID NO: 44151 - protein, 131 aa, Aureibacillus halotolerans
  misc_feature (1)..(131): tr|A0A4R6TVD8|A0A4R6TVD8_9BACI NADPH-dependent 7-cyano- 7-deazaguanine reductase OS=Aureibacillus halotolerans OX=1508390 GN=queF PE=3 SV=1
MNEASWLPTSGPMPRPDSVEQAKTILANEAFEAPNVQTITFRALEFTAVCPRTGQPDFGRVTIQYTPNKKCIESKALKFYLWSFRDEGCFCESLAARIADDIVEAITPQSVSVTVHQSPRGGIELEATAER

SEQ ID NO: 44152 - protein, 153 aa, Aureimonas altamirensis
  misc_feature (1)..(153): tr|A0A1M6DN31|A0A1M6DN31_9RHIZ NADPH-dependent 7-cyano- 7-deazaguanine reductase OS=Aureimonas altamirensis DSM 21988 OX=1121026 GN=queF PE=3 SV=1
MSDIYNDLKQLGQPTALPASPEEAVLERVANPQAGISYCVRFTAPEFTSLCPMTGQPDFAHLVIDYVPSGWLVESKSLKLYLGAFRNHGAFHEDCTISIARRLVDLLEPQWLRIGGYWYPRGGIPIDVFWQTGAVPAKVWIPDQGVPPYRGRG

SEQ ID NO: 44153 - protein, 153 aa, Aureimonas altamirensis
  misc_feature (1)..(153): tr|A0A0B1Q679|A0A0B1Q679_9RHIZ NADPH-dependent 7-cyano- 7-deazaguanine reductase OS=Aureimonas altamirensis OX= 370622 GN=queF PE=3 SV=1
MSDIYNDLTQLGQPTALPASPEEAVLERVANPQAGIRYCVRFTAPEFTSLCPMTGQPDFAHLVIDYVPSGWLVESKSLKLYLGAFRNHGAFHEDCTISIARRLVDLLEPEWLRIGGYWYPRGGIPIDVFWQTGAVPGDVWIPDQGVPPYRGRG

SEQ ID NO: 44154 - protein, 152 aa, Aureimonas flava
  misc_feature (1)..(152): tr|A0A3A1WJS1|A0A3A1WJS1_9RHIZ NADPH-dependent 7-cyano- 7-deazaguanine reductase OS=Aureimonas flava OX=2320271 GN=queF PE=3 SV=1
MSTTTLTQLGAEARPAASPEEAVLETVPYTRGEGPPAIVRFVAPEFTSLCPVTGQPDFAHLVIDYAPDARLVESKSLKLFLVSFRNHGAFHEDCTVTVGRRIVEATRPLWLRIGGYWYPRGGIPIDVFWQTGAPPEGVFLPDQGVPPYRGRG

SEQ ID NO: 44155 - protein, 154 aa, Aureimonas frigidaquae
  misc_feature (1)..(154): tr|A0A0P0Z346|A0A0P0Z346_9RHIZ NADPH-dependent 7-cyano- 7-deazaguanine reductase OS=Aureimonas frigidaquae OX=4 24757 GN=queF PE=3 SV=1
MNPDITAGLTQLGHDTPLPTDPDSARLERVPNPQAGIAYCVRFTAPEFTSLCPMTGQPDFAHIVIDYVPQDWLVESKSLKLFLGSFRNHGAFHEDCTITIARRLVTLLEPQWLRIGGYWYPRGGIPIDVFWQTGPVPAGIFLPDQGVPPYRGRG

SEQ ID NO: 44156 - protein, 153 aa, Aureimonas jatrophae
  misc_feature (1)..(153): tr|A0A1H0GQ62|A0A1H0GQ62_9RHIZ NADPH-dependent 7-cyano- 7-deazaguanine reductase OS=Aureimonas jatrophae OX=116 6073 GN=queF PE=3 SV=1
MTSESELTQLGADARPAARPEDALLETVAFSHGDGAPTLVRLTAPEFTLLCPVTGQPDFAHLVIDYVPDRRLVESKSFKLFLVSYRNHGAFHEDCSVSIAKRLVAAMEPRWLRIGAYWYPRGGIPIDVFWQTGPAPDGLFIPDQGVPPYRGRG

SEQ ID NO: 44157 - protein, 152 aa, Aureimonas phyllosphaerae
  misc_feature (1)..(152): tr|A0A1I2I318|A0A1I2I318_9RHIZ NADPH-dependent 7-cyano- 7-deazaguanine reductase OS=Aureimonas phyllosphaerae O X=1166078 GN=queF PE=3 SV=1
MTTTTLTQLGAEARPAASPEDAVLETVPYTRREGPPAIVRFACPEFTSLCPVTGQPDFAHLVIDYAPDQRLVESKSLKLFLVSFRNHGAFHEDCTVMVARRIVEATQPLWLRIGGYWYPRGGIPIDVFWQTGAPPEGVFLPDQGVPPYRGRG

SEQ ID NO: 44158 - protein, 153 aa, Aureimonas sp.
  misc_feature (1)..(153): tr|A0A0Q6EUE1|A0A0Q6EUE1_9RHIZ NADPH-dependent 7-cyano- 7-deazaguanine reductase OS=Aureimonas sp. Leaf460 OX=1 736384 GN=queF PE=3 SV=1
MTTDTSTLTQLGQSAGIAASPEEAVLERVPNPHADTNYLARFTAPEFTSLCPVTGQPDFAHLVIDYVPGDWLVESKSLKLYLTAFRNHGAFHEDCTVGIGRRLAALLDPRWLRIGGYWYPRGGIPIDVFWQTGAPIEGVWLPDQGVPTYRGRG

SEQ ID NO: 44159 - protein, 155 aa, Aureimonas sp.
  misc_feature (1)..(155): tr|A0A0S2ERP6|A0A0S2ERP6_9RHIZ NADPH-dependent 7-cyano- 7-deazaguanine reductase OS=Aureimonas sp. AU20 OX=1349 819 GN=queF PE=3 SV=1
MTSESTENLTQLGRDTRPTASPEEAVLETVPFARRTDPGAVVRFTCPEFTSLCPVTGQPDFAHIVIDYVPNERLVESKSLKLFLTSFRNHGAFHEDCTVMIAQRIVEATRPLWLRIGGYWYPRGGIPIDVFWQTGAPPAGVFLPDQGAPTYRGRG

SEQ ID NO: 44160 - protein, 151 aa, Aureimonas ureilytica
  misc_feature (1)..(151): tr|A0A175RD23|A0A175RD23_9RHIZ NADPH-dependent 7-cyano- 7-deazaguanine reductase OS=Aureimonas ureilytica OX=40 1562 GN=queF PE=3 SV=1
MTTELTQLGRDTRPAASPEEAVLETVPFARRTDPAAVVRFTCPEFTSLCPVTGQPDFAHIVIDYVPDARLVESKSLKLFLTSFRNHGAFHEDCTVMIGQRIVEATQPLWLRIGGYWYPRGGIPIDVFWQTGAPPAGIFLPDQGAPSYRGRG

SEQ ID NO: 44161 - protein, 164 aa, Auricoccus indicus; identical to SEQ ID NO: 43477
  misc_feature (1)..(164): tr|A0A1Q1G2Y7|A0A1Q1G2Y7_9STAP NADPH-dependent 7-cyano- 7-deazaguanine reductase OS=Auricoccus indicus OX=18494 91 GN=queF PE=3 SV=1

SEQ ID NO: 44162 - protein, 279 aa, Avibacterium avium
  misc_feature (1)..(279): tr|A0A379AS45|A0A379AS45_AVIAV NADPH-dependent 7-cyano- 7-deazaguanine reductase OS=Avibacterium avium OX=751 G N=queF PE=3 SV=1
MDYNHESLHALKLGQETKYAQHYDRTLLQAVPRQLNRAQLGIVENQPFTFGADIWTAYEISWLNPKGVPQVAIADVEIDFRSENLIESKSFKLYLNSFNQSHFDSFEQVQQILLQDLADCAKGQVKVRLNSLQNYHRTLIDSLQGDCIDDQDIEIRDYQFNPNYLEHCTHAEQVEEHLVSHLLKSNCLITQQPDWGSLQIHYVGKRIDREKLLRYLVSFRQHNEFHEQCVERIYCDLMRFAQPEKLTVYARYTRRGGLDINPFRSNFETVPHNVRLARQ

SEQ ID NO: 44163 - protein, 279 aa, Avibacterium endocarditidis
  misc_feature (1)..(279): tr|A0A2S5AGX1|A0A2S5AGX1_9PAST NADPH-dependent 7-cyano- 7-deazaguanine reductase OS=Avibacterium endocarditidis OX=380674 GN=queF PE=3 SV=1
MDYNHESLHALKLGQETKYAQHYDRTLLQAVPRQLNRAQLGIVENQPFTFGADIWTAYEISWLNPKGVPQVAIADVEIDFRSENLIESKSFKLYLNSFNQSHFDSFEQVQQILQQDLADCAKGQVKVRLNSLQNYHRTFINSLQGDCIDDQDIEIRDYQFNPNYLEHCTHAEQVEEHLVSHLLKSNCLITQQPDWGSLQIHYVGKRIDREKLLRYLVSFRQHNEFHEQCVERIYCDLMRFAQPEKLTVYARYTRRGGLDINPFRSNFETVPHNARLARQ

SEQ ID NO: 44164 - protein, 279 aa, Avibacterium gallinarum
  misc_feature (1)..(279): tr|A0A379AWA5|A0A379AWA5_AVIGA NADPH-dependent 7-cyano- 7-deazaguanine reductase OS=Avibacterium gallinarum OX= 755 GN=queF PE=3 SV=1
MDYNHESLHALKLGQETKYAQHYDRTLLQAVPRQLNRTQLGVVENQPFTFGADIWTAYEISWLNPKGVPQVAIADVEIDFRSENLIESKSFKLYLNSFNQSHFDSFEQVQQILQQDLADCAKGQVKVRLNSLQNYHRTFIDSLQGDCIDDQDIEIQNYQFNPNYLEHCTHAEQVEEHLVSHLLKSNCLITQQPDWGSLQIHYVGKRIDREKLLRYLVSFRQHNEFHEQCVERIYCDLMRFAQPEKLTVYARYTRRGGLDINPFRSNFETVPHNARLARQ

SEQ ID NO: 44165 - protein, 280 aa, Avibacterium paragallinarum
  misc_feature (1)..(280): tr|A0A0F5EYC8|A0A0F5EYC8_AVIPA NADPH-dependent 7-cyano- 7-deazaguanine reductase OS=Avibacterium paragallinarum OX=728 GN=queF PE=3 SV=1
MNYNHQSLHALKLGQETKYAQHYDRTLLQAVPRQLNREQLGIVATQPFTFGADIWTAYEISWLNPKGVPQVAIADVEIDFRSENLIESKSFKLYLNSFNQSHFDSSAQVQQILQQDLADCAKGQVKVRLNSLANYDRTFIASLQGECIDEQDIEITDYQFNPHYLENSTQGEQVVEEYLVSHLLKSNCLITQQPDWGSLQIHYVGKRIDRENLLRYLVSFRQHNEFHEQCVERIYCDLMRFAQPEKLTVYARYTRRGGLDINPFRSNFETVPHNARLARQ

SEQ ID NO: 44166 - protein, 280 aa, Avibacterium paragallinarum
  misc_feature (1)..(280): tr|A0A3G8W098|A0A3G8W098_AVIPA NADPH-dependent 7-cyano- 7-deazaguanine reductase OS=Avibacterium paragallinarum OX=728 GN=queF PE=3 SV=1
MSYNHQSLHALKLGQETKYAQHYDRTLLQAVPRQLNRAQLGIVENQPFTFGADIWTAYEISWLNPKGVPQVAIADVEIDFRSENLIESKSFKLYLNSFNQSHFNSSAQVQQILQQDLADCAKGEVKVRLNSLANYDRTFIASLQGECIDEQDIKITDYQFNPHYLENSTQGEQVVEEYLVSHLLKSNCLITQQPDWGSLQIHYVGKRIDRENLLRYLVSFRQHNEFHEQCVERIYCDLMRFAQPEKLTVYARYTRRGGLDINPFRSNFETVPHNARLARQ

SEQ ID NO: 44167 - protein, 280 aa, Avibacterium volantium
  misc_feature (1)..(280): tr|A0A447SRK8|A0A447SRK8_AVIVO NADPH-dependent 7-cyano- 7-deazaguanine reductase OS=Avibacterium volantium OX=7 62 GN=queF PE=3 SV=1
MNYNHQSLHALKLGQETKYAQHYDRTLLQAVPRQLNREQLGIVATQPFTFGADIWTAYEISWLNPKGVPQVAIADVEIDFRSENLIESKSFKLYLNSFNQSHFDSFAQVQQILQQDLADCAKGEVKVRLNSLANYDRTFIDSLQGDCIDEQDIEITDYQFNPHYLENSTQGEQVVEEYLVSHLLKSNCLITQQPDWGSLQIHYVGKRIDREKLLRYLVSFRQHNEFHEQCVERIYCDLMRFAQPEKLTVYARYTRRGGLDINPFRSNFETVPHNARLARQ

SEQ ID NO: 44168 - protein, 284 aa, Azoarcus communis
  misc_feature (1)..(284): tr|A0A2U8GR21|A0A2U8GR21_9RHOO NADPH-dependent 7-cyano- 7-deazaguanine reductase OS=Azoarcus communis OX=41977 GN=queF PE=3 SV=1
MNDTSPLRHGAEASPLGKPVAYRDTYAPELLFPIERQLKRDEIGVRGDALPFVGEDLWNAYELSWLNMRGKPVVALARFRVPADTPRLIESKSLKLYLNAFNQSRFADAGTVRETIARDLSAAAGGAVAVELMPLGERPLRQFGYPQGVCLDNLDIDIDTYQPAPVLLAARGEIVSETLYSHLLKSNCLVTGQPDWGMVVVRYTGPAIEREGLLRYIVSFREHNEFHEQCVERVFCDIVARCHPQALAVWARYTRRGGLDINPFRATPGVGKADEFDACDEVRQ

SEQ ID NO: 44169 - protein, 282 aa, Azoarcus communis
  misc_feature (1)..(282): tr|A0A323UR76|A0A323UR76_9RHOO NADPH-dependent 7-cyano- 7-deazaguanine reductase OS=Azoarcus communis SWub3 = D SM 12120 OX=1121029 GN=queF PE=3 SV=1
MNDTEFSPLHGAEASPLGKPVAYRDTYAPELLFPIERQLKRDEIGVRADALPFVGEDLWNAYELSWLNPRGKPVVALARFRVPADSPRLIESKSLKLYLNAFNQSRFADAAQVQDIIARDLSAAAGRPVGVEVLPLADRPQRRIAYPQGICLDELDIAIDRYQPAPELLSAGGPVVSETLYSHLLKSNCLVTGQPDWGMVVVRYTGAAIDREGLLRYIVSFREHNEFHEQCVERVFCDLLARCQPAELAVWARYTRRGGLDINPCRATPGAALADEADEVRQ

SEQ ID NO: 44170 - protein, 277 aa, Azoarcus indigens
  misc_feature (1)..(277): tr|A0A4R6E899|A0A4R6E899_9RHOO NADPH-dependent 7-cyano- 7-deazaguanine reductase OS=Azoarcus indigens OX=29545 GN=queF PE=3 SV=1
MTERHGAEASPLGRTVSYRDTYAPELLFPIPRQLKRDELGLREEALPFVGADLWNAYELSWLNPRGKPVVALACFRVPAETPRLVESKSLKLYLNSFNQHVFADHDAVAATIAADLSAAAGGPVGVEVTPLSQRPQRAFGYPEGLCLDELDVAIDSYQPAPELLSAGGAEVEETLYSHLLKSNCLVTGQPDWGMVALRYRGPAIDRAGLLRYIVSFRGHNEFHEQCVERIFCDVLARCQPRELSVWARYTRRGGLDINPWRATSLALVADERMEVRQ

SEQ ID NO: 44171 - protein, 281 aa, Azoarcus sp.
  misc_feature (1)..(281): sp|A1KBB9|QUEF_AZOSB NADPH-dependent 7-cyano-7-deazagua nine reductase OS=Azoarcus sp. (strain BH72) OX=62928 G N=queF PE=3 SV=1
MNDTQNPLHGAEASPLGKPVAYRDTYAPELLFPIARQLKRDEIGVRADALPFCGEDLWNAYELSWLNPRGKPVVALAEFRVPADTPRLVESKSLKLYLNSFNQSRFDDAAAVRMAIARDLSAAAGGAVGVAVWPLGGQAERRFAAPEGVCIDDLDVAIDTYQPDPTLLSAGDEVVSETLYSHLLKTNCLVTGQPDWGMVAVRYTGPRIDRAGLLRYIVSFREHNEFHEQCVERVFCDITARCRPQRLAVWARYTRRGGLDINPFRASDRDQRADEAMEIRQ

SEQ ID NO: 44172 - protein, 281 aa, Azoarcus sp.
  misc_feature (1)..(281): tr|A0A558CX38|A0A558CX38_9RHOO NADPH-dependent 7-cyano- 7-deazaguanine reductase OS=Azoarcus sp. PHD OX=1628740 GN=queF PE=3 SV=1
MNDTSPLRHGAEASPLGKPVAYRDTYAPELLFPIERQLKRDEIGVRGDALPFVGEDLWNAYELSWLNMRGKPVVALARFRVPAETPRLVESKSLKLYLNAFNQSRFADAATVRETIARDLSAAAGGAVAVELMPLGERPLRQIGYPQGVCLDDLDIDIDTYQPAPALLAARGEIVSETLYSHLLKSNCLVTGQPDWGMVVVRYTGPAIEREGLLRYIVSFREHNEFHEQCVERVFCDIMAHCHPQALAVWARYTRRGGLDINPFRATPGAGKADEFNEVRQ

SEQ ID NO: 44173 - protein, 283 aa, Azoarcus tolulyticus
  misc_feature (1)..(283): tr|A0A1N6Z784|A0A1N6Z784_9RHOO NADPH-dependent 7-cyano- 7-deazaguanine reductase OS=Azoarcus tolulyticus OX=340 27 GN=queF PE=3 SV=1
MNPSAPSAHGAESSPLGKPADYCDTYSPALLFPIARQIKRDEIGIVAGKLPFVGEDLWNAYELSWLNPRGKPVVALATFRVPADSPRLIESKSLKLYLNSCNQTRFDGEEAVRATFVRDLSEAAGAPVAVDIRPLGSAPERVIAPPPGESLDELDIDIDTYQPCPDFLSSARDGSEVSETLHSHLLKSNCLVTGQPDWGCIVVRYTGPAIDRAGLLRYIVSFRKHNEFHEQCVERVFSDLLQRCTPRELAVWARYTRRGGLDINPFRSTGQFPAPDNRAEIRQ

SEQ ID NO: 44174 - protein, 280 aa, Azomonas agilis
  misc_feature (1)..(280): tr|A0A562I0W5|A0A562I0W5_9GAMM NADPH-dependent 7-cyano- 7-deazaguanine reductase OS=Azomonas agilis OX=116849 G N=queF PE=3 SV=1
MSVQHSAEQSPLGKTTEYVDRYDPSLLFPISRALKWAELGMSAQSLPYIGADVWNCYELSWLLPTGKPVVAVAEFQIPADSPYMIESKSFKLYLNSLNQSVFSDVAQLTGVLIQDLSAVAGKAVTVRIKSLDEARLEGIATLPGQCIDDIDINIEHYDAPKPELLRVSQAALVADFCWYTHLLRSNCPVTGQPDWGSLVIDYRGLALEPASLLAYIVSFRRHADFHEQCVERIFLDIQRLVQPERLTVYARYVRRGGLDINPYRTTDAGCSILNLRTVRQ

SEQ ID NO: 44175 - protein, 282 aa, Azonexus fungiphilus
  misc_feature (1)..(282): tr|A0A495WBC8|A0A495WBC8_9RHOO NADPH-dependent 7-cyano- 7-deazaguanine reductase OS=Azonexus fungiphilus OX=146 940 GN=queF PE=3 SV=1
MNPTLDPSTLSPLGKPTEYRSDYAPELLYPIPRQLKRAELGIAAGTQPFVGADIWNAYELSWLNPRGKPVVAVGSFRIPADSPNLIESKSFKLYLNSFNQTVFADLAAVVTTLQRDLSAAAGAPVTAKIEDLRGRPQNVIEYPQGIALDELDIDCTDYQPMPELLSTVDAPETAKTEETLYSHLLKSNCLVTGQPDWAMVIIRYRGRPIDHAGLLRYLVSFRNHNEFHEQCVERIFCDLSRRCAPEALSVYARYTRRGGLDINPFRSSGEFALPGNTREIRQ

SEQ ID NO: 44176 - protein, 279 aa, Azonexus hydrophilus
  misc_feature (1)..(279): tr|A0A1R1HZQ5|A0A1R1HZQ5_9RHOO NADPH-dependent 7-cyano- 7-deazaguanine reductase OS=Azonexus hydrophilus OX=418 702 GN=queF PE=3 SV=1
MTHTIDPSILSPLGKPTEYRSDYAPELLYPIPRQLKRDELGIAPGALPFVGEDIWNAYEVSWLNPKGKPVVAVATFRVPADSPNLVESKSFKLYLNSFNQTVFSDLSVVESVLLRDLSAAAGAPVGVKIEDLRGRPQVLVNYPQGVALDDLDIECTTYQPTPELLFAVDGEKTEETLYSHLLKSNCLVTGQPDWAMVVIRYRGRPIDHAGLLRYLVSFRNHNEFHEQCVERIFCDITARCAPEALSVYARYTRRGGLDINPCRSSGDFPPADNSREIRQ

SEQ ID NO: 44177 - protein, 150 aa, Azorhizobium caulinodans
  misc_feature (1)..(150): tr|A8IBF5|A8IBF5_AZOC5 NADPH-dependent 7-cyano-7-deazag uanine reductase OS=Azorhizobium caulinodans (strain AT CC 43989 / DSM 5975 / JCM 20966 / NBRC 14845 / NCIMB 13 405 / ORS 571) OX=438753 GN=queF PE=3 SV=1
MTEAKLQLGRETALPSSPEEAVLDRVPNPHPDTNYVARFTAPEFTSLCPVTGQPDFAHLVLDYVPDAWLVESKSLKLYLASFRNHGAFHEDCTVAIGKRLVELLKPRFFRIAGYWYPRGGIPIDVFWQTGELPRGVWLPETGVAPYRGRG

SEQ ID NO: 44178 - protein, 150 aa, Azorhizobium sp.
  misc_feature (1)..(150): tr|A0A258K4W7|A0A258K4W7_9RHIZ NADPH-dependent 7-cyano- 7-deazaguanine reductase OS=Azorhizobium sp. 32-67-21 O X=1970319 GN=queF PE=3 SV=1
MTEETLQLGRNVPVPAGPEEAVLEAVPNPHPDTNYVARFTCPEFTSLCPVTGQPDFAHLVIDYVPHRLLVESKSLKLYLTSFRNHGAFHEDCTIGIAKRLVGLLAPRYLRMAGYWYPRGGIPIDVFWQTGTLPNGTWLPDPGVAPYRGRG

SEQ ID NO: 44179 - protein, 277 aa, Azospira oryzae
  misc_feature (1)..(277): tr|G8QFA9|G8QFA9_AZOOP NADPH-dependent 7-cyano-7-deazag uanine reductase OS=Azospira oryzae (strain ATCC BAA-33 / DSM 13638 / PS) OX=640081 GN=queF PE=3 SV=1
MTIDPSALSPLGKASEYRCHYAPELLFPIPRQLKRDEIGIDPARLPFVGEDLWNAYEISWLNPRGKPVVTLGTFRIPAQTPHLIESKSFKLYLNSFNQSPFADAETVAATLARDLSAAAGGQVTVQLEPLAGQPRPRVDYPSGILLDELDIECDRYQPAPELLQADAGRCVEETLYSHLLKSNCLVTGQPDWGMVVVRYRGPAIDRAALLRYIVSFRGHNEFHEQCVERIFCDISARCAPQSLAVYARYTRRGGLDINPFRSSGEFLPPDNIREVRQ

SEQ ID NO: 44180 - protein, 139 aa, Azospira oryzae
  misc_feature (1)..(139): tr|A0A2W5J3W4|A0A2W5J3W4_9RHOO NADPH-dependent 7-cyano- 7-deazaguanine reductase OS=Azospira oryzae OX=146939 G N=queF PE=3 SV=1
MSTRPSKQLETFPNPAPERDYLIHMEIPEFTCLCPRTGQPDFATLLLDYVPDRLCVELKSLKLYIWSYRDEGAFHEAVTNRILDDLVAATKPRYMRLRARFYVRGGIFTTVEAEHRKKGWKPVAPVPLPEFEKGLSTRG

SEQ ID NO: 44181 - protein, 277 aa, Azospira sp.
  misc_feature (1)..(277): tr|A0A5H2YSP9|A0A5H2YSP9_9RHOO NADPH-dependent 7-cyano- 7-deazaguanine reductase OS=Azospira sp. I09 OX=1765049 GN=queF PE=4 SV=1
MTIDPSALSPLGKASEYRCHYAPELLFPIPRQLKRDEIGIDPARLPFVGEDLWNAYEISWLNPRGKPVVALGTFRIPAQTPHLIESKSFKLYLNSFNQSAFADAQTVAATLVRDLSAAAGGQVTVQLEPLAAQPRPRVDYPSGILLDELDIECDRYQPAPELLQADAGRSVEETLYSHLLKSNCLVTGQPDWGMVVVRYRGPAIDRAALLRYIVSFRGHNEFHEQCVERIFCDISARCAPQSLAVYARYTRRGGLDINPFRSSGEFLPPDNIREVRQ

SEQ ID NO: 44182 - protein, 139 aa, Azospira sp.
  misc_feature (1)..(139): tr|A0A2R5EHD6|A0A2R5EHD6_9RHOO NADPH-dependent 7-cyano- 7-deazaguanine reductase OS=Azospira sp. I13 OX=1765050 GN=queF PE=3 SV=1
MTTQPSKSLETFPNPAPERDFHIHMQIPEFTCLCPKTGQPDFATLYLDYIPDQTCVELKSLKLYMWSFRDEGCFHEAVTNRILDDLVQATAPRYMRLTAKFYVRGGIFTNVVADYRKEGWNPAPRVDLSVFDTNSNTRG

SEQ ID NO: 44183 - protein, 144 aa, Azospirillum brasilense
  misc_feature (1)..(144): tr|A0A2W5EFX8|A0A2W5EFX8_AZOBR NADPH-dependent 7-cyano- 7-deazaguanine reductase OS=Azospirillum brasilense OX= 192 GN=queF PE=3 SV=1
MLGQHTAQPASPEEARLERVPNPHPDKRYCVRFTAPEFTSLCPITGQPDFAHLVIDYVPDGWLVESKSLKLYLTSFRNHGAFHEACTVEIGDRLVRELRPHWLRIGGYWYPRGGIPIDVFWQTGATPEGVWIPPQDVPGYRGRG

SEQ ID NO: 44184 - protein, 154 aa, Azospirillum brasilense
  misc_feature (1)..(154): tr|A0A0P0EWU0|A0A0P0EWU0_AZOBR NADPH-dependent 7-cyano- 7-deazaguanine reductase OS=Azospirillum brasilense OX= 192 GN=queF PE=3 SV=1
MSENIYAGLTQLGGATVQPKTPEEAVLERVPNPNPGENYVVRFTAPEFTSLCPITGQPDFAHLVIDYVPGEWLVESKSLKLFLTSFRNHGAFHEACTVGIGKRLVDELKPVWLRIGGYWYPRGGIPIDVFYATGEPPKGVWIPSQDVQTYRGRG

SEQ ID NO: 44185 - protein, 154 aa, Azospirillum doebereinerae
  misc_feature (1)..(154): tr|A0A433J529|A0A433J529_9PROT NADPH-dependent 7-cyano- 7-deazaguanine reductase OS=Azospirillum doebereinerae OX=92933 GN=queF PE=3 SV=1
MSSDIYAGLTQLGGATVQPKTPEEAVLERVPNPNPGDGYVVRFTAPEFTSLCPITGQPDFAHLVIDYVPGDWLVESKSLKLYLTSFRNHGAFHEACTVGIGKRLVAELSPGWLRIGGYWYPRGGIPIDVLYQTGEPPKGVWIPSQDVQTYRGRG

SEQ ID NO: 44186 - protein, 154 aa, Azospirillum humicireducens
  misc_feature (1)..(154): tr|A0A160JG57|A0A160JG57_9PROT NADPH-dependent 7-cyano- 7-deazaguanine reductase OS=Azospirillum humicireducens OX=1226968 GN=queF PE=3 SV=1
MTENIYAGLTQLGGSTVQPKTPEEAVLERVPNPNPGDPYCVRFTAPEFTSLCPITGQPDFAHLVIDYVPGDWLVESKSLKLFLTSFRNHGAFHEACTVGIGKRLVDELSPVWLRIGGYWYPRGGIPIDVFFQTGEPPKGVWIPSQDVPTYRGRG

SEQ ID NO: 44187 - protein, 154 aa, Azospirillum lipoferum
  misc_feature (1)..(154): tr|A0A5A9GVE1|A0A5A9GVE1_AZOLI NADPH-dependent 7-cyano- 7-deazaguanine reductase OS=Azospirillum lipoferum OX=1 93 GN=queF PE=3 SV=1
MTENIYAGLTQLGGSTVQPKTPEEAVLERVPNPNPGTPYCVRFTAPEFTSLCPITGQPDFAHLVIDYVPGDWLVESKSLKLFLTSFRNHGAFHEACTVGIGKRLVDELSPEWLRIGGYWYPRGGIPIDVFFQTGEPPKGVWIPSQDVPTYRGRG

SEQ ID NO: 44188 - protein, 154 aa, Azospirillum lipoferum
  misc_feature (1)..(154): tr|G7Z202|G7Z202_AZOL4 NADPH-dependent 7-cyano-7-deazag uanine reductase OS=Azospirillum lipoferum (strain 4B) OX=862719 GN=queF PE=3 SV=1
MTENIYAGLTQLGGSTVQPRTPEEAVLERVPNPNPGDPYCVRFTAPEFTSLCPITGQPDFAHLVIDYVPGDWLVESKSLKLFLTSFRNHGAFHEACTVGIGKRLVDELSPVWLRIGGYWYPRGGIPIDVFFQTGEPPKGVWIPSQDVPTYRGRG

SEQ ID NO: 44189 - protein, 154 aa, Azospirillum oryzae
  misc_feature (1)..(154): tr|A0A1X7H6P5|A0A1X7H6P5_9PROT NADPH-dependent 7-cyano- 7-deazaguanine reductase OS=Azospirillum oryzae OX=2867 27 GN=queF PE=3 SV=1
MTENIYAGLTQLGGSTVQPKSPEEAVLERVPNPNPGDPYCVRFTAPEFTSLCPITGQPDFAHLVIDYVPGDWLVESKSLKLFLTSFRNHGAFHEACTVGIGKRLVDELSPVWLRIGGYWYPRGGIPIDVFFQTGEPPKGVWIPSQDVPTYRGRG

SEQ ID NO: 44190 - protein, 154 aa, Azospirillum oryzae
  misc_feature (1)..(154): tr|A0A5A9G641|A0A5A9G641_9PROT NADPH-dependent 7-cyano- 7-deazaguanine reductase OS=Azospirillum oryzae OX=2867 27 GN=queF PE=3 SV=1
MTENIYAGLTQLGGSTVQPKTPEEAVLERVPNPNPGDPYCVRFTAPEFTSLCPITGQPDFAHLVIDYVPGDWLVESKSLKLYLTSFRNHGAFHEACTVGIGKRLVDELSPVWLRIGGYWYPRGGIPIDVFFQTGEPPKGVWIPSQDVPTYRGRG

SEQ ID NO: 44191 - protein, 154 aa, Azospirillum palustre
  misc_feature (1)..(154): tr|A0A2B8B5U6|A0A2B8B5U6_9PROT NADPH-dependent 7-cyano- 7-deazaguanine reductase OS=Azospirillum palustre OX=20 44885 GN=queF PE=3 SV=1
MSENIYAGLTQLGGSTIQPRTPEEAVLERVPNPNPGTPYCVRFTAPEFTSLCPITGQPDFAHLVIDYVPGDWLVESKSLKLFLTSFRNHGAFHEACTVGIGKRLVDELSPVWLRIGGYWYPRGGIPIDVFFQTGEPPKGVWIPSQDVPTYRGRG

SEQ ID NO: 44192 - protein, 154 aa, Azospirillum sp.
  misc_feature (1)..(154): tr|A0A2U1WH92|A0A2U1WH92_9PROT NADPH-dependent 7-cyano- 7-deazaguanine reductase OS=Azospirillum sp. TSA6c OX=7 09813 GN=queF PE=3 SV=1
MSENIYAGLTQLGGSTIQPSTPEEAVLERVPNPNPGTPYCVRFTAPEFTSLCPITGQPDFAHLVIDYVPGDWLVESKSLKLFLTSFRNHGAFHEACTVGIGKRLVDELSPVWLRIGGYWYPRGGIPIDVFFQTGEPPKGVWIPSQDVPTYRGRG

SEQ ID NO: 44193 - protein, 154 aa, Azospirillum sp.
  misc_feature (1)..(154): tr|A0A2U1YS36|A0A2U1YS36_9PROT NADPH-dependent 7-cyano- 7-deazaguanine reductase OS=Azospirillum sp. TSO5 OX=71 6760 GN=queF PE=3 SV=1
MTENIYAGLTQLGGSTVQPKTPEEAVLERVPNPNPGTPYCVRFTAPEFTSLCPITGQPDFAHLVIDYVPGDWLVESKSLKLFLTSFRNHGAFHEACTVGIGKRLVDELSPVWLRIGGYWYPRGGIPIDVFFQTGEPPKGVWIPSQDVQTYRGRG

SEQ ID NO: 44194 - protein, 154 aa, Azospirillum thiophilum
  misc_feature (1)..(154): tr|A0A0F2L0G2|A0A0F2L0G2_9PROT NADPH-dependent 7-cyano- 7-deazaguanine reductase OS=Azospirillum thiophilum OX= 528244 GN=queF PE=3 SV=1
MSENIYANLTQLGGATVQPRTPEEAVLERVPNPNPGDPYCVRFTAPEFTSLCPITGQPDFAHLVIDYVPGDWLVESKSLKLYLTSFRNHGAFHEACTVGIGKRLVDELAPVWLRIGGYWYPRGGIPIDVFFQTGEPPKGVWIPSQDVPTYRGRG

SEQ ID NO: 44195 - protein, 276 aa, Azotobacter beijerinckii
  misc_feature (1)..(276): tr|A0A1H9GLP1|A0A1H9GLP1_9GAMM NADPH-dependent 7-cyano- 7-deazaguanine reductase OS=Azotobacter beijerinckii OX =170623 GN=queF PE=3 SV=1
MPPAAEHSPLGKSSEYLDTYTPSLLFPIPRAPKWAELGLTAASLPYRGVDVWNCYELSWLLPSGKPVVAIGEFVIPADSPNIVESKSFKLYLNSLNQTVFADCETLRQTLAADLSAAAGAPVAVRLRSLAEVQEEGIAALPGQCIDELEVAIVRYGQPSPALLRCDPNRRLEQVLHSHLLKSNCPVTGQPDWGSVVVDYRGPALDPASLLAYLVSFRQHADFHEQCVERIFLDLLHLLEPERLTVYARYVRRGGLDINPWRSTDAVVADNRRLARQ

SEQ ID NO: 44196 - protein, 276 aa, Azotobacter beijerinckii
  misc_feature (1)..(276): tr|A0A1I3ZXC8|A0A1I3ZXC8_9GAMM NADPH-dependent 7-cyano- 7-deazaguanine reductase OS=Azotobacter beijerinckii OX =170623 GN=queF PE=3 SV=1
MPPVAEHSPLGKSSEYLDTYTPSLLFPIPRAPKWAELGLTAASLPYRGVDVWNCYELSWLLPSGKPVVAIGEFAIPADSPNIVESKSFKLYLNSLNQTVFADRETPRQTLAADLSAAAGAPVAVRLRSLAEVQEEGIAALPGQCIDELEVAIARYGQPSPALLRCDPNRRVEAVLHSHLLKSNCPVTGQPDWGSVVVDYRGPALDPASLLAYLVSFRQHADFHEQCVERIFLDLLHLLEPERLTVYARYVRRGGLDINPWRSTEALVPDNRRLARQ

SEQ ID NO: 44197 - protein, 276 aa, Azotobacter chroococcum
  misc_feature (1)..(276): tr|A0A0C4WIM3|A0A0C4WIM3_9GAMM NADPH-dependent 7-cyano- 7-deazaguanine reductase OS=Azotobacter chroococcum NCI MB 8003 OX=1328314 GN=queF PE=3 SV=1
MHPAAEHSPLGKSSEYLDTYTPSLLFPIPRAPKWAELGLTAASLPYRGVDVWNCYELSWLLPSGKPVVAIGEFVIPADSPNIVESKSFKLYLNSLNQTVFADRETLRQTLAADLSGVAGAPVAVRLRSLAEVQEEGVAALPGQCIDELDVGISCYGLPSGELLRCDRGRRVEEVLHSHLLKSNCPVTGQPDWGSVVVDYRGPALDPASLLAYLVSFRQHADFHEQCVERIFLDLQRLLEPERLSVYARYVRRGGLDINPFRSTEALVPDNRRLVRQ

SEQ ID NO: 44198 - protein, 276 aa, Azotobacter chroococcum
  misc_feature (1)..(276): tr|A0A4Q9VUI6|A0A4Q9VUI6_9GAMM NADPH-dependent 7-cyano- 7-deazaguanine reductase OS=Azotobacter chroococcum OX= 353 GN=queF PE=3 SV=1
MHPAAEHSPLGKSSEYLDTYTPSLLFPIPRAPKWAELGLTAASLPYRGVDVWNCYELSWLLPSGKPVVAIGEFVIPADSPNIVESKSFKLYLNSLNQTVFADRETLRQTLAADLSGVAGAPVAVRLRSLAEVQEEGVAALPGQCIDELDVGISRYGLPSGELLRCDRGRRVEEVLHSHLLKSNCPVTGQPDWGSVVVDYRGPALDPASLLAYLVSFRQHADFHEQCVERIFLDLQRLLEPERLSVYARYVRRGGLDINPFRSTEALVPDNRRLVRQ

SEQ ID NO: 44199 - protein, 276 aa, Azotobacter vinelandii
  misc_feature (1)..(276): sp|C1DRN1|QUEF_AZOVD NADPH-dependent 7-cyano-7-deazagua nine reductase OS=Azotobacter vinelandii (strain DJ / A TCC BAA-1303) OX=322710 GN=queF PE=3 SV=1
MHPAAEDSPLGKSSEYLDTYTPSLLFPIPRAPKWAELGLAAENLPYRGVDVWNCYELSWLLPSGKPVVAVGEFVIPADSPNIVESKSFKLYLNSLNQTVFADREALRQTLARDLSAATGAPVAVRLRSLGEVQEQGVAALPGQCIDELDVTIGRYGQPSAELLRCDPARRVEQVLHSHLLKSNCPVTGQPDWGSLVVDYHGPALDPASLLAYVVSFRQHADFHEQCVERIFLDLLRLLEPGRLTVYARYVRRGGLDINPWRSTGAVVADNRRLARQ

SEQ ID NO: 44200 - protein, 276 aa, Azotobacter vinelandii; identical to SEQ ID NO: 44199
  misc_feature (1)..(276): tr|M9YCV6|M9YCV6_AZOVI NADPH-dependent 7-cyano-7-deazag uanine reductase OS=Azotobacter vinelandii CA6 OX=12833 31 GN=queF PE=3 SV=1

SEQ ID NO: 44201 - protein, 165 aa, Bacillaceae bacterium
  misc_feature (1)..(165): tr|A0A261QL24|A0A261QL24_9BACI NADPH-dependent 7-cyano- 7-deazaguanine reductase OS=Bacillaceae bacterium SAS-1 27 OX=2015203 GN=queF PE=3 SV=1
MAGRKEDELQDITLLGNQGTTYKFAYDPSILETFDNKHQNRDYFVKFNCPEFTSLCPMTGQPDFATIYISYIPDVKMVESKALKLYLFSFRNHGDFHEDCMNIIMNDLIELMNPRYIEVWGKFTPRGGISIDPYTNWGRPGTKYEQMAEYRMMNHDLYPEKIDNR

SEQ ID NO: 44202 - protein, 165 aa, Bacillaceae bacterium; identical to SEQ ID NO: 44201
  misc_feature (1)..(165): tr|A0A271M561|A0A271M561_9BACI NADPH-dependent 7-cyano- 7-deazaguanine reductase OS=Bacillaceae bacterium SAOS 7 OX=2015052 GN=queF PE=3 SV=1

SEQ ID NO: 44203 - protein, 166 aa, Bacilli bacterium
  misc_feature (1)..(166): tr|A0A0K0GBN1|A0A0K0GBN1_9FIRM NADPH-dependent 7-cyano- 7-deazaguanine reductase OS=Bacilli bacterium VT-13-104 OX=1637974 GN=queF PE=3 SV=1
MSGRSEKQGLKDLTLLGNKETNYATDYTPEVLESVNNIHSNRDYFVKFNCPEFTSLCPITGQPDFATMYISYIPDQKIVESKSLKLYLFSFRNHGDFHEDCVNIIMNDLIELLDPRYIEVWGKFTPRGGISIDPWCNYGKPGTKYEEMAMHRLMNHDLNPENIDNR

SEQ ID NO: 44204 - protein, 165 aa, Bacillus aerius
  misc_feature (1)..(165): tr|A0A3A9DPY2|A0A3A9DPY2_9BACI NADPH-dependent 7-cyano- 7-deazaguanine reductase OS=Bacillus aerius OX=293388 G N=queF PE=3 SV=1
MTTRKDSELEGVTLLGNQGTNYLFDYSPEVLESFPNKHENRDYFVKFNCPEFTSLCPKTGQPDFATIYISYIPDKKMVESKSLKLYLFSFRNHGDFHEDCMNIIMNDLIELMDPRYIEVWGKFTPRGGISIDPYTNYGKPGTKYEKMAEYRMMNHDLYPETIDNR

SEQ ID NO: 44205 - protein, 165 aa, Bacillus aerophilus
  misc_feature (1)..(165): tr|A0A410KUG9|A0A410KUG9_9BACI NADPH-dependent 7-cyano- 7-deazaguanine reductase OS=Bacillus aerophilus OX=2933 89 GN=queF PE=3 SV=1
MTTRKPEELEGVTLLGNQGTNYLFDYAPQVLETFPNKHTNRDYFVKFNCPEFTSLCPQTGQPDFATVYISYIPNEIMVESKSLKLYLFSFRNHGDFHEDCMNIIMNDLIELMDPRYIEVWGKFTPRGGISIDPYTNYGKPGTKYEEMASYRMMNHDMYPETIDNR

SEQ ID NO: 44206 - protein, 165 aa, Bacillus akibai
  misc_feature (1)..(165): tr|W4QXY3|W4QXY3_BACA3 NADPH-dependent 7-cyano-7-deazag uanine reductase OS=Bacillus akibai (strain ATCC 43226 / DSM 21942 / JCM 9157 / 1139) OX=1236973 GN=queF PE=3 SV=1
MGGRTEQELEGVTLLGNQGTEYDFQYNPSVLEIFENKHQNRDYFVKFNCPEFTSLCPMTKQPDFATIYISYIPDVKMVESKSLKLYLFSFRNHGDFHEDCMNIIMNDLIELMDPRYIEVWGKFTPRGGISIDPYTNYGKPGTKYEKMAEHRMMNHDMYPETVDNR

SEQ ID NO: 44207 - protein, 165 aa, Bacillus albus
  misc_feature (1)..(165): tr|A0A1J9U3W7|A0A1J9U3W7_9BACI NADPH-dependent 7-cyano- 7-deazaguanine reductase OS=Bacillus albus OX=2026189 G N=queF PE=3 SV=1
MVGRLDEDLKDVTLLGNQNTKYLFEYSPEILEVFDNNHPNRDYFVKFNCPEFTSLCPKTGQPDFATIYISYIPEQRMVESKSLKLYLFSFRNHGDFHEDCMNVIMNDLIKLMDPRYIEVWGKFTPRGGISIDPYCNYGRPGTKYEQMADYRMMNHDLYPETIDNR

SEQ ID NO: 44208 - protein, 165 aa, Bacillus alcalophilus
  misc_feature (1)..(165): tr|A0A094YYZ4|A0A094YYZ4_BACAO NADPH-dependent 7-cyano- 7-deazaguanine reductase OS=Bacillus alcalophilus ATCC 27647 = CGMCC 1.3604 OX=1218173 GN=queF PE=3 SV=1
MSGRKDSELDGVTLLGNQGTSYEFSYNPGILESFDNKHPNRDYFVKFNCPEFTSLCPKTGQPDFATIYISYIPGEKMVESKSLKLYLFSFRNHGDFHEDCMNIIMNDLIELMDPRYIEVWGKFTPRGGISIDPYTNYGKPGTKYEEIANYRLMNHDLYPENIDNR

SEQ ID NO: 44209 - protein, 165 aa, Bacillus altitudinis; identical to SEQ ID NO: 44205
  misc_feature (1)..(165): tr|A0A5K1N809|A0A5K1N809_9BACI 7-cyano-7-deazaguanine r eductase OS=Bacillus altitudinis OX=293387 GN=queF PE=4 SV=1

SEQ ID NO: 44210 - protein, 164 aa, Bacillus amyloliquefaciens
  misc_feature (1)..(164): tr|A0A0D7XUS2|A0A0D7XUS2_BACAM NADPH-dependent 7-cyano- 7-deazaguanine reductase OS=Bacillus amyloliquefaciens OX=1390 GN=queF PE=3 SV=1
MTRKESELEGVTLLGNQGTNYLFEYAPEVLESFPNKHVNRDYFVKFNCPEFTSLCPKTGQPDFATIYISYIPDEKMVESKSLKLYLFSFRNHGDFHEDCMNIIMNDLIELMDPRYIEVWGKFTPRGGISIDPYTNYGRPGTKYEKMAEHRMMNHDMYPETIDNR

SEQ ID NO: 44211 - protein, 65 aa, Bacillus amyloliquefaciens
  misc_feature (1)..(65): tr|A0A369CQA5|A0A369CQA5_BACAM NADPH-dependent 7-cyano- 7-deazaguanine reductase OS=Bacillus amyloliquefaciens OX=1390 GN=queF PE=3 SV=1
MNIIMNDLIELMDPRYIEVWGKFTPRGGISIDPYTNYGKPGTKYEKMAEYRMMNHDLYPETIDNR

SEQ ID NO: 44212 - protein, 168 aa, Bacillus anthracis
  misc_feature (1)..(168): tr|A0A0F7RHG5|A0A0F7RHG5_BACAN NADPH-dependent 7-cyano- 7-deazaguanine reductase OS=Bacillus anthracis OX=1392 GN=queF PE=3 SV=1
MFKMAGRLDEDLKDVTLLGNQNTKYLFEYSPEILEVFDNNHPNRDYFVKFNCPEFTSLCPKTGQPDFATIYISYIPEQRMVESKSLKLYLFSFRNHGDFHEDCMNVIMNDLIKLMDPRYIEVWGKFTPRGGISIDPYCNYGRPGTKYEQMADYRMMNHDLYPETIDNR

SEQ ID NO: 44213 - protein, 165 aa, Bacillus anthracis
  misc_feature (1)..(165): sp|C3LAK7|QUEF_BACAC NADPH-dependent 7-cyano-7-deazagua nine reductase OS=Bacillus anthracis (strain CDC 684 / NRRL 3495) OX=568206 GN=queF PE=3 SV=1
MAGRLDEDLKDVTLLGNQNTKYLFEYSPEILEVFDNNHPNRDYFVKFNCPEFTSLCPKTGQPDFATIYISYIPEQRMVESKSLKLYLFSFRNHGDFHEDCMNVIMNDLIKLMDPRYIEVWGKFTPRGGISIDPYCNYGRPGTKYEQMADYRMMNHDLYPETIDNR

SEQ ID NO: 44214 - protein, 165 aa, Bacillus aquimaris
  misc_feature (1)..(165): tr|A0A1J6WQ81|A0A1J6WQ81_9BACI NADPH-dependent 7-cyano- 7-deazaguanine reductase OS=Bacillus aquimaris OX=18938 2 GN=queF PE=3 SV=1
MSGRKDEELTDITLLGNQGTNYLFEYSPDILESFDNKHPNRDYFVKFNCPEFTSLCPKTGQPDFATIYISYIPDQKMVESKSLKLYLFSFRNHGDFHEDCMNIIMNDLIELMDPRYIEVWGKFTPRGGISIDPYCNYGKPGTKYETMADHRLMNHDLYPEKIDNR

SEQ ID NO: 44215 - protein, 165 aa, Bacillus aquimaris
  misc_feature (1)..(165): tr|A0A5D4URL0|A0A5D4URL0_9BACI NADPH-dependent 7-cyano- 7-deazaguanine reductase OS=Bacillus aquimaris OX=18938 2 GN=queF PE=3 SV=1
MSGRKDEDLTDLSLLGNQGTNYLFEYAPHILEAFDNKHPNRDYFVKFNCPEFTSLCPKTGQPDFAAIYISYIPGEKMVESKSLKLYLFSFRNHGDFHEDCMNIIMNDLIELMDPRYIEVWGKFTPRGGISIDPYCNYGKPGTKYETMADHRLMNHDLYPEKVDNR

SEQ ID NO: 44216 - protein, 165 aa, Bacillus aryabhattai
  misc_feature (1)..(165): tr|A0A1G6Q7M5|A0A1G6Q7M5_9BACI NADPH-dependent 7-cyano- 7-deazaguanine reductase OS=Bacillus aryabhattai B8W22 OX=1358420 GN=queF PE=3 SV=1
MSGRKDEELEGVSLLGNQGTNYLFEYSPEILEAFDNKHPNRDYFVKFNCPEFTSLCPKTGQPDFATIYISYIPDEKMVESKSLKLYLFSFRNHGDFHEDCMNIIMNDLIKLMNPRYIEVWGKFTPRGGISIDPYTNYGRPGTKYEEMANYRLMNHDLYPETIDNR

SEQ ID NO: 44217 - protein, 165 aa, Bacillus aryabhattai; identical to SEQ ID NO: 44216
  misc_feature (1)..(165): tr|A0A0J5UTY4|A0A0J5UTY4_9BACI NADPH-dependent 7-cyano- 7-deazaguanine reductase OS=Bacillus aryabhattai OX=412 384 GN=queF PE=3 SV=1

SEQ ID NO: 44218 - protein, 165 aa, Bacillus asahii
  misc_feature (1)..(165): tr|A0A3Q9RKJ3|A0A3Q9RKJ3_9BACI NADPH-dependent 7-cyano- 7-deazaguanine reductase OS=Bacillus asahii OX=228899 G N=queF1 PE=3 SV=1
MAGRSESELQDITLLGNQGTKYLFEYTPDVLETFDNKHISRDYFVKFNCPEFTSLCPMTGQPDFATIYISYIPDVKMVESKSLKLYLFSFRNHGDFHEDCMNIIMNDLIELMDPRYIEVWGKFTPRGGISIDPYTNYGKPGTKYEKMAEHRLMNHDLYPEKVDNR

SEQ ID NO: 44219 - protein, 165 aa, Bacillus asahii
  misc_feature (1)..(165): tr|A0A398BI70|A0A398BI70_9BACI NADPH-dependent 7-cyano- 7-deazaguanine reductase OS=Bacillus asahii OX=228899 G N=queF PE=3 SV=1
MAGRSESELKDITLLGNQGTKYLFEYTPDVLETFDNKHANRDYFVKFNCPEFTSLCPMTGQPDFATIYISYIPDVKMVESKSLKLYLFSFRNHGDFHEDCMNIIMNDLIELMDPRYIEVWGKFTPRGGISIDPYTNYGKPGTKYEKMAEHRLMNHDLYPEKVDNR

SEQ ID NO: 44220 - protein, 165 aa, Bacillus atrophaeus
  misc_feature (1)..(165): tr|A0A0H3DYH3|A0A0H3DYH3_BACA1 NADPH-dependent 7-cyano- 7-deazaguanine reductase OS=Bacillus atrophaeus (strain 1942) OX=720555 GN=queF PE=3 SV=1
MTTRKESELEGVTLLGNQGTNYLFEYAPDVLESFPNKHVNRDYFVKFNCPEFTSLCPKTGQPDFATIYISYIPDEKMVESKSLKLYLFSFRNHGDFHEDCMNIIMNDLIELMDPRYIEVWGKFTPRGGISIDPYTNYGKPGTKYEKMAEYRMMNHDLYPETIDNR

SEQ ID NO: 44221 - protein, 165 aa, Bacillus atrophaeus; identical to SEQ ID NO: 44220
  misc_feature (1)..(165): tr|A0A080UJS2|A0A080UJS2_BACAT NADPH-dependent 7-cyano- 7-deazaguanine reductase OS=Bacillus atrophaeus OX=1452 GN=queF PE=3 SV=1

SEQ ID NO: 44222 - protein, 165 aa, Bacillus australimaris; identical to SEQ ID NO: 44205
  misc_feature (1)..(165): tr|A0A0P7GHP3|A0A0P7GHP3_9BACI NADPH-dependent 7-cyano- 7-deazaguanine reductase OS=Bacillus australimaris OX=1 326968 GN=queF PE=3 SV=1

SEQ ID NO: 44223 - protein, 133 aa, Bacillus azotoformans
  misc_feature (1)..(133): tr|A0A072NQW2|A0A072NQW2_BACAZ NADPH-dependent 7-cyano- 7-deazaguanine reductase OS=Bacillus azotoformans MEV20 11 OX=1348973 GN=queF PE=3 SV=1
MKENYYLPRSGPMPRPASVEEGREVLKGEAFPAPNVQQITFRAMEFTAVCPKTGQPDFGHVEISYVPNELCIESKSLKFYLWSYRDHGAYCESLAANIADDIVYAINPKKVVVTVYQTARGGIELETQAIREN

SEQ ID NO: 44224 - protein, 133 aa, Bacillus azotoformans
  misc_feature (1)..(133): tr|K6D545|K6D545_BACAZ NADPH-dependent 7-cyano-7-deazag uanine reductase OS=Bacillus azotoformans LMG 9581 OX=1 131731 GN=queF PE=3 SV=1
MKENYYLPRSGPMPRPGSVEESREVLKGEAFPAPNVQQITFRAMEFTAVCPKTGQPDFGRVEISYVPNELCIESKSLKFYLWSYRDHGAYCESLAANIADDIVYAINPKKVVVTVYQTARGGIELETQAIREN

SEQ ID NO: 44225 - protein, 165 aa, Bacillus bacterium
  misc_feature (1)..(165): tr|A0A3D0E7T3|A0A3D0E7T3_9BACI NADPH-dependent 7-cyano- 7-deazaguanine reductase OS=Bacillus bacterium OX=20535 12 GN=queF PE=3 SV=1
MAGRNEDTLKELSLLGNQNTKYLFEYSPQVLEPIDNLHADRDYFIKFNCPEFTSLCPQTNQPDFATMYISYIPDKKIVESKSLKLYLFSFRNHGDFHEDCVNIIMNDLIDLLDPRYIEVWGKFTPRGGLSIDPYSNYGKPGTKYEQMAEYRLMNHDLYPEKVDNR

SEQ ID NO: 44226 - protein, 165 aa, Bacillus bacterium; identical to SEQ ID NO: 44213
  misc_feature (1)..(165): tr|A0A506QK90|A0A506QK90_9BACI NADPH-dependent 7-cyano- 7-deazaguanine reductase OS=Bacillus bacterium OX=20535 12 GN=queF PE=3 SV=1

SEQ ID NO: 44227 - protein, 166 aa, Bacillus badius
  misc_feature (1)..(166): tr|A0A0C2Y4U0|A0A0C2Y4U0_BACBA NADPH-dependent 7-cyano- 7-deazaguanine reductase OS=Bacillus badius OX=1455 GN= queF PE=3 SV=1
MAGRNEEELKQDISLLGNQGTKYTFAYDPSILESFDNKHPNRDYFVKFNCPEFTSLCPVTGQPDFATIYISYIPDIKMVESKSLKLYLFSFRNHGDFHEDCVNIIMNDLIELMNPRYIEVWGKFTPRGGISIDPYCNWGRPGTKFEEMANYRLMNHDMYPETVDNR

SEQ ID NO: 44228 - protein, 166 aa, Bacillus bataviensis
  misc_feature (1)..(166): tr|K6DEL1|K6DEL1_9BACI NADPH-dependent 7-cyano-7-deazag uanine reductase OS=Bacillus bataviensis LMG 21833 OX=1 117379 GN=queF PE=3 SV=1
MSGCSHDEGLKDLTLLGNQGTTYSFEYAPEVLEAVDNLHSERDYFVKFNCPEFTSLCPLTRQPDFATMYISYVPDKKIVESKSLKLYLFSFRNHGDFHEDCVNIIMNDLIKLLDPRYIEVWGKFTPRGGISIDPWCNYGKPGTKYEEMASYRLMNHDLYPEKVDNR

SEQ ID NO: 44229 - protein, 166 aa, Bacillus bataviensis
  misc_feature (1)..(166): tr|A0A561CXA8|A0A561CXA8_9BACI NADPH-dependent 7-cyano- 7-deazaguanine reductase OS=Bacillus bataviensis OX=220 685 GN=queF PE=3 SV=1
MSGRSHEEGLKDLTLLGNQGTTYSFEYAPEVLEAVDNLHPERDYFVKFNCPEFTSLCPLTRQPDFATMYISYVPDKKIVESKSLKLYLFSFRNHGDFHEDCVNIIMNDLIKLLDPRYIEVWGKFTPRGGISIDPWCNYGKPGTKYEEMANYRLMNHDLYPEKVDNR

SEQ ID NO: 44230 - protein, 135 aa, Bacillus beveridgei
  misc_feature (1)..(135): tr|A0A1D7R055|A0A1D7R055_9BACI NADPH-dependent 7-cyano- 7-deazaguanine reductase OS=Bacillus beveridgei OX=6327 73 GN=queF PE=3 SV=1
MSENYYLPRSGPMPRPESVEEGRKVLQNEAFPAPNVSIVRFKALEFTAVCPKTGQPDFGQVEIEYVPREKCIESKSLKFYLWSYRDEGAYCESLAAQIADDVMAAIEPARVKVLVYQTPRGGIQLETEAERTHEA

SEQ ID NO: 44231 - protein, 165 aa, Bacillus bombysepticus
  misc_feature (1)..(165): tr|A0A023P287|A0A023P287_9BACI NADPH-dependent 7-cyano- 7-deazaguanine reductase OS=Bacillus bombysepticus str. Wang OX=1330043 GN=queF PE=3 SV=1
MTGRLDEDLKDVTLLGNQNTKYLFEYSPEILEVFDNNHPNRDYFVKFNCPEFTSLCPKTGQPDFATIYISYIPEQKMVESKSLKLYLFSFRNHGDFHEDCMNVIMNDLIKLMDPRYIEVWGKFTPRGGISIDPYCNYGRPGTKYEQMADYRMMNHDLYPETIDNR

SEQ ID NO: 44232 - protein, 165 aa, Bacillus boroniphilus
  misc_feature (1)..(165): tr|W4RT13|W4RT13_9BACI NADPH-dependent 7-cyano-7-deazag uanine reductase OS=Bacillus boroniphilus JCM 21738 OX= 1294265 GN=queF PE=3 SV=1
MAGRNEEELKDITLLGNQGTKYLFEYSPEILETFENKHPYRDYFVKFNTPEFTSLCPITGQPDFASIYISYIPDKLMVESKSLKLYLFSFRNHGDFHEDCMNIIMNDLIKLMDPRYIEVWGKFTPRGGISIDPYTNYGKPGTKYEEMADYRMMNHDMYPEKVDNR

SEQ ID NO: 44233 - protein, 166 aa, Bacillus butanolivorans
  misc_feature (1)..(166): tr|A0A0M0ERE2|A0A0M0ERE2_9BACI NADPH-dependent 7-cyano- 7-deazaguanine reductase OS=Bacillus butanolivorans OX= 421767 GN=queF PE=3 SV=1
MSGRKEEELKKDITLLGNQGTKYTFDYAPEILESFDNKHPNRDYFVKFNCPEFTSLCPITGQPDFATIYISYIPSVKMVESKSLKLYLFSFRNHGDFHEDCMNIIMNDLIELMDPKYIEVWGKFTPRGGISIDPYTNYGKPGTKFEEMANFRLMNHDLYPETVDNR

SEQ ID NO: 44234 - protein, 165 aa, Bacillus caldolyticus; identical to SEQ ID NO: 44028
  misc_feature (1)..(165): tr|A0A2H5KFX0|A0A2H5KFX0_BACCL NADPH-dependent 7-cyano- 7-deazaguanine reductase OS=Bacillus caldolyticus OX=13 94 GN=queF PE=3 SV=1

SEQ ID NO: 44235 - protein, 166 aa, Bacillus camelliae
  misc_feature (1)..(166): tr|A0A2N3LK40|A0A2N3LK40_9BACI NADPH-dependent 7-cyano- 7-deazaguanine reductase OS=Bacillus camelliae OX=17070 93 GN=queF PE=3 SV=1
MSGRTQEEGLKDLTLLGNQGTKYKFEYAPEILESVDNLHSNRDYFVKFNCPEFTSLCPITSQPDYATMYISYIPDKKIVESKSLKLYLFSFRNHGDFHEDCVNIIMNDLIQLLDPRYIEVWGKFTPRGGISIDPYCNYGKPGTKYEEMANFRLMNHDLYPEKVDNR

SEQ ID NO: 44236 - protein, 166 aa, Bacillus campisalis
  misc_feature (1)..(166): tr|A0A0M2T0I0|A0A0M2T0I0_9BACI NADPH-dependent 7-cyano- 7-deazaguanine reductase OS=Bacillus campisalis OX=1408 103 GN=queF PE=3 SV=1
MSGRSHEQGLKDLTLLGNQNTQYAFQYAPEVLESVDNMHPERDYFVKFNCPEFTSLCPLTNQPDFATMYISYIPDKKIVESKSLKLYLFSFRNHGDFHEDCVNIIMNDLIKLLDPRYIEVWGKFTPRGGISIDPWCNYGKPGTKFEEMALHRLMNHDLYPEKVDNR

SEQ ID NO: 44237 - protein, 165 aa, Bacillus canaveralius
  misc_feature (1)..(165): tr|A0A2N5GFH8|A0A2N5GFH8_9BACI NADPH-dependent 7-cyano- 7-deazaguanine reductase OS=Bacillus canaveralius OX=14 03243 GN=queF PE=3 SV=1
MPGRKNEELSDITLLGNQGTKYLFDYAPEILESFDNKHPNRDYFVKFNCPEFTSLCPITGQPDFATIYISYIPDQKMVESKSLKLYLFSFRNHGDFHEDCMNIIMNDLIKLMDPRYIEVWGKFTPRGGISIDPYTNYGKPGTKYEQMAEYRLMNHDLYPEKVDNR

SEQ ID NO: 44238 - protein, 164 aa, Bacillus caseinilyticus
  misc_feature (1)..(164): tr|A0A1H3RB36|A0A1H3RB36_9BACI NADPH-dependent 7-cyano- 7-deazaguanine reductase OS=Bacillus caseinilyticus OX= 1503961 GN=queF PE=3 SV=1
MSRQHNRSDEVTLLGEAGTEYHFEYDPDILEAFENRHQYRDYFVKFNCPEFTSLCPKTGQPDFATIYISYIPDKKMVESKSLKLYLFSFRNHGDFHEDCMNIILNDLVKLMDPRYIEVWGKFTPRGGISIDPYVNYGKPGTKYEQMAEHRMMNHDMYPETVDNR

SEQ ID NO: 44239 - protein, 169 aa, Bacillus cavernae
  misc_feature (1)..(169): tr|A0A433HKD6|A0A433HKD6_9BACI NADPH-dependent 7-cyano- 7-deazaguanine reductase OS=Bacillus cavernae OX=167431 0 GN=queF PE=3 SV=1
MSGRKDERKDEDLQDITLLGNQGTKYVFEYSPGILETFDNKHPNRDYFVKFNCPEFTSLCPKTGQPDFATIYISYIPGHRMVESKSLKLYLFSFRNHGDFHEDCMNIIMNDLIELMDPRYIEVWGKFTPRGGISIDPYTNYGKPGTKYEKMAEYRLMNHDLYPEKIDNR

SEQ ID NO: 44240 - protein, 164 aa, Bacillus cellulosilyticus
  misc_feature (1)..(164): tr|E6TY87|E6TY87_BACCJ NADPH-dependent 7-cyano-7-deazag uanine reductase OS=Bacillus cellulosilyticus (strain A TCC 21833 / DSM 2522 / FERM P-1141 / JCM 9156 / N-4) OX =649639 GN=queF PE=3 SV=1
MSHKHHREDEVSLLGNQGTEYHFEYNPGILESFENRHDYRDYFVKFNCPEFTSLCPKTGQPDFATIYISYIPDKKMVESKSLKLYLFSFRNHGDFHEDCMNIILNDLVKLMDPRYIEVWGKFTPRGGISIDPYVNYGKPGTKYEKMAEHRLMNHDMYPETIDNR

SEQ ID NO: 44241 - protein, 165 aa, Bacillus cereus; identical to SEQ ID NO: 44231
  misc_feature (1)..(165): tr|J8RKB0|J8RKB0_BACCE NADPH-dependent 7-cyano-7-deazag uanine reductase OS=Bacillus cereus BAG1X1-2 OX=1053171 GN=queF PE=3 SV=1

SEQ ID NO: 44242 - protein, 165 aa, Bacillus cereus; identical to SEQ ID NO: 44213
  misc_feature (1)..(165): tr|J8FV95|J8FV95_BACCE NADPH-dependent 7-cyano-7-deazag uanine reductase OS=Bacillus cereus VD102 OX=1053228 GN =queF PE=3 SV=1

SEQ ID NO: 44243 - protein, 166 aa, Bacillus circulans
  misc_feature (1)..(166): tr|A0A0J1LF53|A0A0J1LF53_BACCI NADPH-dependent 7-cyano- 7-deazaguanine reductase OS=Bacillus circulans OX=1397 GN=queF PE=3 SV=1
MSGRKNEEGLTDLTLLGNQNTQYKSDYAPEVLESVDNLHSDRDYFVKFNCPEFTSLCPITGQPDFATMYISYIPNKKIVESKSLKLYLFSFRNHGDFHEDCVNIIMNDLIKLLDPRYIEVWGKFTPRGGISIDPWCNYGKPGTKFEEMAAHRLMNHDMYPEKVDNR

SEQ ID NO: 44244 - protein, 165 aa, Bacillus clausii
  misc_feature (1)..(165): tr|A0A268RX32|A0A268RX32_BACCS NADPH-dependent 7-cyano- 7-deazaguanine reductase OS=Bacillus clausii OX=79880 G N=queF PE=3 SV=1
MAGRQEKELQNVTLLGSEQTEYKYSYDPGVLETFDNQHPYRDYMVKFNCPEFTTLCPKTGQPDFATLYISYIPEQKMVESKSLKLYLFSFRNHGDFHEDSVNTIMNDLIEIMDPRYIEVWGKFTPRGGISIDPYCNYGKKGTKYEEIANYRLMNHDLYPETITNR

SEQ ID NO: 44245 - protein, 165 aa, Bacillus clausii
  misc_feature (1)..(165): sp|Q5WG44|QUEF_BACSK NADPH-dependent 7-cyano-7-deazagua nine reductase OS=Bacillus clausii (strain KSM-K16) OX= 66692 GN=queF PE=3 SV=1
MAGRQEKELQNVTLLGSEQTEYKYSYDPRVLETFDNQHPYRDYMVKFNCPEFTTLCPKTGQPDFATLYISYIPEQKMVESKSLKLYLFSFRNHGDFHEDSVNTIMNDLIELMDPRYIEVWGKFTPRGGISIDPYCNYGKKGTKYEEIANYRLMNHDLYPETITNR

SEQ ID NO: 44246 - protein, 204 aa, Bacillus coagulans
  misc_feature (1)..(204): tr|A0A150KE11|A0A150KE11_BACCO NADPH-dependent 7-cyano- 7-deazaguanine reductase OS=Bacillus coagulans OX=1398 GN=queF PE=3 SV=1
MDQKAMSIRDVAFFILFWHGSAPLLEKMTGTFLTGGFFMAGRKQEEGLQDLTLLGNQKTKYPVDYDPGVLEAVDNLHADRDYFVKFNCPEFTSLCPLTGQPDFATMYISYIPDKKIVESKSLKLYLFSFRNHGDFHEDCVNIIMDDLIKLLDPRYIEVWGKFTPRGGISIDPWCNYGKPGTKYEDMAHFRLMHHDLYPEKVDNR

SEQ ID NO: 44247 - protein, 204 aa, Bacillus coagulans
  misc_feature (1)..(204): tr|A0A0C5BYC5|A0A0C5BYC5_BACCO NADPH-dependent 7-cyano- 7-deazaguanine reductase OS=Bacillus coagulans OX=1398 GN=queF PE=3 SV=1
MDQKAMSIRDVAFFILFWHGSAPLLEKMRGTFLTGGFFMAGRKQEEGLQDLTLLGNQKTRYPADYDPGVLEAVDNLHADRDYFVKFNCPEFTSLCPLTGQPDFATMYISYIPDKKIVESKSLKLYLFSFRNHGDFHEDCVNIIMDDLIKLLDLRYIEVWGKFTPRGGISIDPWCNYGKPGTKYEDMAHFRLMHHDLYPEKVDNR

SEQ ID NO: 44248 - protein, 166 aa, Bacillus cohnii
  misc_feature (1)..(166): tr|A0A223KQ47|A0A223KQ47_9BACI NADPH-dependent 7-cyano- 7-deazaguanine reductase OS=Bacillus cohnii OX=33932 GN =queF PE=3 SV=1
MTAGRKDEELQGVTLLGNQGTNYLFQYSPDVLETFENKHPNRDYFVKFNCPEFTSLCPKTNQPDFATIYISYIPDKLMVESKSLKLYLFSFRNHGDFHEDCMNIIMNDLIKLMDPRYIEVWGKFTPRGGISIDPYTNYGKPGTKYEEMAHYRLMNHDMYPETVNNR

SEQ ID NO: 44249 - protein, 166 aa, Bacillus cucumis
  misc_feature (1)..(166): tr|A0A2N5HJ49|A0A2N5HJ49_9BACI NADPH-dependent 7-cyano- 7-deazaguanine reductase OS=Bacillus cucumis OX=1740721 GN=queF PE=3 SV=1
MSGRSHEEGLKDLTLLGNQGTTYSFEYAPEVLEAVDNLHPERDYFVKFNCPEFTSLCPLTRQPDFATMYISYVPDKKIVESKSLKLYLFSFRNHGDFHEDCVNIIMNDLIKLLDPRYIEVWGKFTPRGGISIDPWCNYGKPGTKYEEMAAYRLMNHDLYPEKIDNR

SEQ ID NO: 44250 - protein, 165 aa, Bacillus cytotoxicus
  misc_feature (1)..(165): tr|A0A2S1A8F7|A0A2S1A8F7_9BACI NADPH-dependent 7-cyano- 7-deazaguanine reductase OS=Bacillus cytotoxicus OX=580 165 GN=queF PE=3 SV=1
MAGRLDEDLKDVTLLGNQNTKYLFEYSPEILETFDNNHPNRDYFVKFNCPEFTSLCPKTGQPDFATIYISYIPEKKMVESKSLKLYLFSFRNHGDFHEDCMNVIMNDLIELMDPRYIEVWGKFTPRGGISIDPYCNYGRPGTKYEKMAEYRMMNHDLYPETVDNR

SEQ ID NO: 44251 - protein, 165 aa, Bacillus cytotoxicus; identical to SEQ ID NO: 44250
  misc_feature (1)..(165): sp|A7GMN5|QUEF_BACCN NADPH-dependent 7-cyano-7-deazagua nine reductase OS=Bacillus cytotoxicus (strain DSM 2290 5 / CIP 110041 / 391-98 / NVH 391-98) OX=315749 GN=queF PE=3 SV=1

SEQ ID NO: 44252 - protein, 162 aa, Bacillus daliensis
  misc_feature (1)..(162): tr|A0A1H0K6G2|A0A1H0K6G2_9BACI NADPH-dependent 7-cyano- 7-deazaguanine reductase OS=Bacillus daliensis OX=74582 0 GN=queF PE=3 SV=1
MAHNREEEVNLLGNTNVEYKMDYDPSILEAFENRHQYRDYFVKFNCPEFTSLCPKTGQPDFATIYISYIPGEKMVESKSLKLYLFSFRNHGDFHEDCMNTILNDLVELMGPRYIEVLGKFTPRGGISIDPYVNYGQPGTKYEKMAEHRLMQHDIYPENIDHR

SEQ ID NO: 44253 - protein, 165 aa, Bacillus deserti
  misc_feature (1)..(165): tr|A0A2N5M6J9|A0A2N5M6J9_9BACI NADPH-dependent 7-cyano- 7-deazaguanine reductase OS=Bacillus deserti OX=673318 GN=queF PE=3 SV=1
MAGRQKDELQDVTLLGNQGTKYLFEYSPEILESFDNKHPYRDYFVKFNCPEFTSLCPITGQPDFATIYISYIPDVKMVESKSLKLYLFSFRNHGDFHEDCMNIIMNDLIKLMDPKYIEVWGKFTPRGGISIDPYTNYGKPGTKYEEMANYRLMNHDLYPEKVDNR

SEQ ID NO: 44254 - protein, 165 aa, Bacillus enclensis
  misc_feature (1)..(165): tr|A0A0V8HGE5|A0A0V8HGE5_9BACI NADPH-dependent 7-cyano- 7-deazaguanine reductase OS=Bacillus enclensis OX=14028 60 GN=queF PE=3 SV=1
MSGRKDEELTDITLLGNQGTNYLFEYSPEILESFDNKHPNRDYFVKFNCPEFTSLCPKTGQPDFATIYISYIPDQKMVESKSLKLYLFSFRNHGDFHEDCMNIIMNDLIELMDPRYIEVWGKFTPRGGISIDPYCNYGKPGTKYETMADHRLMNHDLYPEKIDNR

SEQ ID NO: 44255 - protein, 165 aa, Bacillus endophyticus
  misc_feature (1)..(165): tr|A0A329EQV0|A0A329EQV0_9BACI NADPH-dependent 7-cyano- 7-deazaguanine reductase OS=Bacillus endophyticus OX=13 5735 GN=queF PE=3 SV=1
MTGRKNEELEGVTLLGNQGTEYTFHYSPEVLESFDNKHPNRDYFVKFNCPEFTSLCPKTNQPDFATIYISYIPDQKMVESKSLKLYLFSFRNHGDFHEDCMNIIMNDLIELMDPRYIEVWGKFTPRGGISIDPYVNYGKPGTKYERIAEHRLMNHDLYPEKIDNR

SEQ ID NO: 44256 - protein, 165 aa, Bacillus endozanthoxylicus
  misc_feature (1)..(165): tr|A0A5J5HXE4|A0A5J5HXE4_9BACI NADPH-dependent 7-cyano- 7-deazaguanine reductase QueF OS=Bacillus endozanthoxyl icus OX=2036016 GN=queF PE=4 SV=1
MPNRQESELDGLTLLGNQGTKYTFQYAPEILEVFDNKHPNRDYFVKFNCPEFTSLCPITGQPDFATIYISYIPNQKMVESKSLKLYLFSFRNHGDFHEDCMNIIMNDLIQLMDPRYIEVWGKFTPRGGISIDPYCNYGKPGTKFEKMADYRLMNHDLYPETIDNR

SEQ ID NO: 44257 - protein, 181 aa, Bacillus filamentosus
  misc_feature (1)..(181): tr|A0A1X7EZN3|A0A1X7EZN3_9BACI NADPH-dependent 7-cyano- 7-deazaguanine reductase OS=Bacillus filamentosus OX=14 02861 GN=queF PE=3 SV=1
MKNAVRMTSVESGERQLTGRKNEELEGVTLLGNQGTEYTFHYSPEVLESFDNKHPNRDYFVKFNCPEFTSLCPKTNQPDFATIYISYIPDQKMVESKSLKLYLFSFRNHGDFHEDCMNIIMNDLIELMDPRYIEVWGKFTPRGGISIDPYVNYGKPGTKYERIAEHRLMNHDLYPEKIDNR

SEQ ID NO: 44258 - protein, 165 aa, Bacillus filamentosus; identical to SEQ ID NO: 44255
  misc_feature (1)..(165): tr|A0A0H4KGP8|A0A0H4KGP8_9BACI NADPH-dependent 7-cyano- 7-deazaguanine reductase OS=Bacillus filamentosus OX=14 02861 GN=queF PE=3 SV=1

SEQ ID NO: 44259 - protein, 165 aa, Bacillus firmus
  misc_feature (1)..(165): tr|W7L159|W7L159_BACFI NADPH-dependent 7-cyano-7-deazag uanine reductase OS=Bacillus firmus DS1 OX=1307436 GN=q ueF PE=3 SV=1
MSGRKDEELTDITLLGNQGTKYLFEYAPEILEAFDNKHPNRDYFVKFNCPEFTSLCPKTGQPDFATIYISYIPDQKMVESKSLKLYLFSFRNHGDFHEDCMNIIMNDLIELMDPRYIEVWGKFTPRGGISIDPYCNYGKPGTKYEKMADYRLMNHDLYPETIDNR

SEQ ID NO: 44260 - protein, 165 aa, Bacillus firmus; identical to SEQ ID NO: 44259
  misc_feature (1)..(165): tr|A0A0J5YRD3|A0A0J5YRD3_BACFI NADPH-dependent 7-cyano- 7-deazaguanine reductase OS=Bacillus firmus OX=1399 GN= queF PE=3 SV=1

SEQ ID NO: 44261 - protein, 165 aa, Bacillus flexus
  misc_feature (1)..(165): tr|A0A4P8XCZ2|A0A4P8XCZ2_9BACI NADPH-dependent 7-cyano- 7-deazaguanine reductase OS=Bacillus flexus OX=86664 GN =queF PE=3 SV=1
MSGRKEEELEGVTLLGNQGTKYLFEYSPEILEVFDNKHPNRDYFVKFNCPEFTSLCPQTGQPDFATIYISYIPDEKMVESKSLKLYLFSFRNHGDFHEDCMNIIMNDLIELMNPRYIEVWGKFTPRGGISIDPYTNYGRPGTKYEEMASYRLMNHDLYPETIDNR

SEQ ID NO: 44262 - protein, 166 aa, Bacillus foraminis
  misc_feature (1)..(166): tr|A0A4R2BAJ5|A0A4R2BAJ5_9BACI NADPH-dependent 7-cyano- 7-deazaguanine reductase OS=Bacillus foraminis OX=27982 6 GN=queF PE=3 SV=1
MSGRSHEEGLKDLTLLGNQNTKYSFQYAPEVLEAVDNMHSSRDYFVKFNCPEFTSLCPMTHQPDFATMYISYIPDKKIVESKSLKLYLFSFRNHGDFHEDCVNIIMNDLIKLLDPRYIEVWGKFTPRGGISIDPWCNYGKPGTKYEEMADYRLMNHDLNPEKIDNR

SEQ ID NO: 44263 - protein, 165 aa, Bacillus fortis
  misc_feature (1)..(165): tr|A0A443IU25|A0A443IU25_9BACI NADPH-dependent 7-cyano- 7-deazaguanine reductase OS=Bacillus fortis OX=254758 G N=queF PE=3 SV=1
MAGRNEDTLNDLSLLGNQNTKYLFEYSPEVLESIDNLHPDRDYFVKFNCPEFTSLCPQTNQPDFATMYISYIPDKKIVESKSLKLYLFSFRNHGDFHEDCVNIIMNDLIKLLDPRYIEVWGKFTPRGGLSIDPYSNYGKPGTKYEQMAEYRMLNHDLYPEKVDNR

SEQ ID NO: 44264 - protein, 165 aa, Bacillus freudenreichii
  misc_feature (1)..(165): tr|A0A448FK41|A0A448FK41_9BACI NADPH-dependent 7-cyano- 7-deazaguanine reductase OS=Bacillus freudenreichii OX= 1783501 GN=queF PE=3 SV=1
MAGRNENTLKDLSLLGNQNTKYLFEYSPQVLESIDNLHSNRDYFIKFNCPEFTSLCPQTNQPDFATMYISYIPDKKIVESKSLKLYLFSFRNHGDFHEDCVNIIMNDLIELLDPRYIEVWGKFTPRGGLSIDPYCNYGKPGTKFEQMAENRLMNHDMYPEKVDNR

SEQ ID NO: 44265 - protein, 165 aa, Bacillus gaemokensis
  misc_feature (1)..(165): tr|A0A073K8J9|A0A073K8J9_9BACI NADPH-dependent 7-cyano- 7-deazaguanine reductase OS=Bacillus gaemokensis OX=574 375 GN=queF PE=3 SV=1
MTGRLDEDLKDVTLLGNQNTKYLFEYSPEILETFDNNHPNRDYFVKFNCPEFTSLCPKTGQPDFATIYISYIPEQKMVESKSLKLYLFSFRNHGDFHEDCMNVIMNDLIKLMDPRYIEVWGKFTPRGGISIDPYCNYGRPGTKYEQMAEYRMMNHDLYPETIDNR

SEQ ID NO: 44266 - protein, 169 aa, Bacillus galactosidilyticus
  misc_feature (1)..(169): tr|A0A0Q9Y8Q3|A0A0Q9Y8Q3_9BACI NADPH-dependent 7-cyano- 7-deazaguanine reductase OS=Bacillus galactosidilyticus OX=217031 GN=queF PE=3 SV=1
MAGRNEETLGDLTLLGNQHTKYLDHYSPDVLEPIDNLHSGRDYFVKFNCPEFTSLCPKTGQPDFATIYISYIPDKKIVESKSLKLYLFSFRNHGDFHEDCVKDCVNTIMDDLIKLLDPRYIEVWGKFTPRGGLSIDPYCNYGKPGTKYEQMAEHRLMNHDMYPEKVDNR

SEQ ID NO: 44267 - protein, 165 aa, Bacillus galactosidilyticus
  misc_feature (1)..(165): tr|A0A177ZQ70|A0A177ZQ70_9BACI NADPH-dependent 7-cyano- 7-deazaguanine reductase OS=Bacillus galactosidilyticus OX=217031 GN=queF PE=3 SV=1
MAGRNEETLGDLTLLGNQHTKYLDHYSPDVLEPIDNLHSGRDYFVKFNCPEFTSLCPKTGQPDFATIYISYIPDKKIVESKSLKLYLFSFRNHGDFHEDCVNTIMDDLIKLLDPRYIEVWGKFTPRGGLSIDPYCNYGKPGTKYEQMAEHRLMNHDMYPEKVDNR

SEQ ID NO: 44268 - protein, 166 aa, Bacillus ginsengihumi
  misc_feature (1)..(166): tr|A0A0A6V9Y3|A0A0A6V9Y3_9BACI NADPH-dependent 7-cyano- 7-deazaguanine reductase OS=Bacillus ginsengihumi OX=36 3870 GN=queF PE=3 SV=1
MSGRKQEEGLKDLTLLGNQNTQYSFDYAPEVLEAVDNLHSDRDYFVKFNCPEFTSLCPLTHQPDFATMYISYIPDKKIVESKSLKLYLFSFRNHGDFHEDCVNIIMNDLIQLLDPRYIEVWGKFTPRGGISIDPWCNYGKPGTKYEEMAQFRLMNHDLYPEKVDNR

SEQ ID NO: 44269 - protein, 163 aa, Bacillus glycinifermentans
  misc_feature (1)..(163): tr|A0A0J6EFF5|A0A0J6EFF5_9BACI NADPH-dependent 7-cyano- 7-deazaguanine reductase OS=Bacillus glycinifermentans OX=1664069 GN=queF PE=3 SV=1
MRKDSELEGVTLLGNQGTEYLFDYSPDVLEAFPNKHENRDYFVKFNCPEFTSLCPKTGQPDFATIYISYIPDKKMVESKSLKLYLFSFRNHGDFHEDCMNIIMNDLIELMDPRYIEVWGKFTPRGGISIDPYTNYGRPGTKYEKMAEYRLMNHDLYPETVDNR

SEQ ID NO: 44270 - protein, 164 aa, Bacillus gobiensis
  misc_feature (1)..(164): tr|A0A0M4FPB0|A0A0M4FPB0_9BACI NADPH-dependent 7-cyano- 7-deazaguanine reductase OS=Bacillus gobiensis OX=14410 95 GN=queF PE=3 SV=1
MSRKKSELEGVSLLGNRGTSYEFSYKPEILESFINKHPNRDYFVKFNCPEFTSLCPMTGQPDFATIYISYIPDQKMVESKSLKLYLFSFRNHGDFHEDCMNIIMNDLIELMDPRYIEVWGKFTPRGGISIDPYTNYGKPGTKYEEMAAHRLMNHDLYPEKVDNR

SEQ ID NO: 44271 - protein, 165 aa, Bacillus halodurans
  misc_feature (1)..(165): tr|A0A4Y7X1U1|A0A4Y7X1U1_BACHO NADPH-dependent 7-cyano- 7-deazaguanine reductase OS=Bacillus halodurans OX=8666 5 GN=queF PE=3 SV=1
MTGRKEEELEGVTLLGNQGTIYTFDYNPDILEVFENKHQERDYFVKFNCPEFTTLCPMTGQPDFATVYISYIPDVKMVESKSLKLYLFSFRNHGDFHEDAMNIIMNDLIKLMDPRYIEVWGKFTPRGGISIDPYTNYGRPGTKYEKMAEYRMMNHDLYPETVDNR

SEQ ID NO: 44272 - protein, 165 aa, Bacillus halodurans
  misc_feature (1)..(165): sp|Q9KAP6|QUEF_BACHD NADPH-dependent 7-cyano-7-deazagua nine reductase OS=Bacillus halodurans (strain ATCC BAA- 125 / DSM 18197 / FERM 7344 / JCM 9153 / C-125) OX=2725 58 GN=queF PE=3 SV=1
MTGRKEEELEGVTLLGNQGTTYTFDYNPDILEVFENKHQGRDYFVKFNCPEFTTLCPMTGQPDFATVYISYIPDVKMVESKSLKLYLFSFRNHGDFHEDAMNIIMNDLIKLMDPRYIEVWGKFTPRGGISIDPYTNYGRPGTKYEKMAEYRMMNHDLYPETVDNR

SEQ ID NO: 44273 - protein, 165 aa, Bacillus halotolerans
  misc_feature (1)..(165): tr|A0A2S9WEQ5|A0A2S9WEQ5_9BACI NADPH-dependent 7-cyano- 7-deazaguanine reductase OS=Bacillus halotolerans OX=26 0554 GN=queF PE=3 SV=1
MTTRNESELEGVTLLGNQGTNYLFEYAPDVLESFPNKHVNRDYFVKFNCPEFTSLCPKTGQPDFATIYISYIPDEKMVESKSLKLYLFSFRNHGDFHEDCMNIIMNDLIELMDPRYIEVWGKFTPRGGISIDPYTNYGKPGTKYEKMAEYRMMNHDLYPETIDNR

SEQ ID NO: 44274 - protein, 165 aa, Bacillus halotolerans; identical to SEQ ID NO: 44220
  misc_feature (1)..(165): tr|A0A3Q9RP16|A0A3Q9RP16_9BACI NADPH-dependent 7-cyano- 7-deazaguanine reductase OS=Bacillus halotolerans OX=26 0554 GN=queF PE=3 SV=1

SEQ ID NO: 44275 - protein, 165 aa, Bacillus haynesii
  misc_feature (1)..(165): tr|W7R793|W7R793_9BACI NADPH-dependent 7-cyano-7-deazag uanine reductase OS=Bacillus haynesii OX=1925021 GN=que F PE=3 SV=1
MTTRKDSELEGVTLLGNQGTKYLFDYSPEVLESFPNKHENRDYFVKFNCPEFTSLCPKTGQPDFATIYISYIPDKKMVESKSLKLYLFSFRNHGDFHEDCMNIIMNDLIELMDPRYIEVWGKFTPRGGISIDPYTNYGKPGTKYEKMAEYRMMNHDLYPETIDNR

SEQ ID NO: 44276 - protein, 165 aa, Bacillus hemicellulosilyticus
  misc_feature (1)..(165): tr|W4QFT0|W4QFT0_9BACI NADPH-dependent 7-cyano-7-deazag uanine reductase OS=Bacillus hemicellulosilyticus JCM 9 152 OX=1236971 GN=queF PE=3 SV=1
MSGRSDNELDGVNLLGNQGTEYTFSYNPAVLEVFENKHQNRDYFVKFNCPEFTSLCPKTNQPDFATIYISYIPNIKMVESKSLKLYLFSFRNHGDFHEDCMNIIMNDLIELMDPRYIEVWGKFTPRGGISIDPYTNYGQPGTKYEKMAEYRMMNHDLYPETIDNR

SEQ ID NO: 44277 - protein, 162 aa, Bacillus hisashii
  misc_feature (1)..(162): tr|A0A267TXD9|A0A267TXD9_9BACI NADPH-dependent 7-cyano- 7-deazaguanine reductase OS=Bacillus hisashii OX=996558 GN=queF PE=3 SV=1
MMGRKKDEVKSLGKKEAKYIFDYAPEVLEAVQNKHAGRDYFVKFNCPEFTSLCPITNQPDFATIYISYIPDEKLVESKSLKLYLFSFRNHGDFHEDCVNIIMDDLIQLLDPKYIEVWGKFTPRGGISIDPYCNYGRPGTKYEEMANYRLMNHDLYPEKVDNR

SEQ ID NO: 44278 - protein, 165 aa, Bacillus horikoshii
  misc_feature (1)..(165): tr|A0A1Y0CLX6|A0A1Y0CLX6_9BACI NADPH-dependent 7-cyano- 7-deazaguanine reductase OS=Bacillus horikoshii OX=7988 3 GN=queF PE=3 SV=1
MSGRKDSELEGVTLLGNQGTSYLFNYSPDVLETFENKHPNRDYFVKFNCPEFTSLCPKTNQPDFATIYISYIPGELMVESKSLKLYLFSFRNHGDFHEDCMNIIMNDLIELMDPRYIEVWGKFTPRGGISIDPYTNYGKPGTKYEEMAEYRLMNHDLYPEKIDNR

SEQ ID NO: 44279 - protein, 165 aa, Bacillus horikoshii
  misc_feature (1)..(165): tr|A0A5D4T7S0|A0A5D4T7S0_9BACI NADPH-dependent 7-cyano- 7-deazaguanine reductase OS=Bacillus horikoshii OX=7988 3 GN=queF PE=3 SV=1
MSGRKDSELEGVTLLGNQGTNYLFNYSPDVLETFENKHPNRDYFVKFNCPEFTSLCPKTNQPDFATIYISYIPGELMVESKSLKLYLFSFRNHGDFHEDCMNIIMNDLIELMDPRYIEVWGKFTPRGGISIDPYTNYGKPGTKYEEMAQYRLMNHDLYPEKIDNR

SEQ ID NO: 44280 - protein, 166 aa, Bacillus horneckiae
  misc_feature (1)..(166): tr|A0A2N0ZCC1|A0A2N0ZCC1_9BACI NADPH-dependent 7-cyano- 7-deazaguanine reductase OS=Bacillus horneckiae OX=5496 87 GN=queF PE=3 SV=1
MSGRKNEEGLKDLTLLGNQHTQYPSDYAPEVLEAVDSLHSNRDYFVKFNCPEFTSLCPITGQPDFATMYISYVPDKKIVESKSLKLYLFSFRNHGDFHEDCVNIIMNDLIKLLDPRYIEVWGKFTPRGGISIDPWCNYGRPGTKYEEMADYRMMNHDLYPEKVDNR

SEQ ID NO: 44281 - protein, 138 aa, Bacillus hwajinpoensis
  misc_feature (1)..(138): tr|A0A4U1MEP0|A0A4U1MEP0_9BACI NADPH-dependent 7-cyano- 7-deazaguanine reductase OS=Bacillus hwajinpoensis OX=2 08199 GN=queF PE=3 SV=1
MNSMDKAWLPSSGPMPRPESVEQAREVIKNEAFDAPNVQEITFNALEFTAVCPKTGQPDFGRVEISYVPDEKCIESKSLKFYLWSYRDEGSFCETLAARIADDVVYAIDPLKVTITVYQSARGGIELKTTAVREKATS

SEQ ID NO: 44282 - protein, 165 aa, Bacillus indicus
  misc_feature (1)..(165): tr|A0A084H2U3|A0A084H2U3_BACID NADPH-dependent 7-cyano- 7-deazaguanine reductase OS=Bacillus indicus OX=246786 GN=queF PE=3 SV=1
MAGRIDSELTDVTLLGNQGTNYLFEYSPEILESFDNKHVNRDYFVKFNCPEFTSLCPKTGQPDFATIYISYIPDRKMVESKSLKLYLFSFRNHGDFHEDCMNIIMNDLIELMDPRYIEVWGKFTPRGGISIDPYTNYGKPGTKYEKMAEHRMMNHDMYPEKIDNR

SEQ ID NO: 44283 - protein, 165 aa, Bacillus infantis
  misc_feature (1)..(165): tr|U5L5N8|U5L5N8_9BACI NADPH-dependent 7-cyano-7-deazag uanine reductase OS=Bacillus infantis NRRL B-14911 OX=1 367477 GN=queF PE=3 SV=1
MSGRKDEELKDVTLLGNQGTQYLFEYSPSILEAFDNKHPNRDYFVKFNCPEFTSLCPKTGQPDFATIYISYIPDQRMVESKSLKLYLFSFRNHGDFHEDCMNIIMNDLIELMDPRYIEVWGKFTPRGGISIDPYTNYGKPGTKYEKMAEYRMMNHDLYPETIDNR

SEQ ID NO: 44284 - protein, 165 aa, Bacillus infantis; identical to SEQ ID NO: 44283
  misc_feature (1)..(165): tr|A0A4Q4C2B8|A0A4Q4C2B8_9BACI NADPH-dependent 7-cyano- 7-deazaguanine reductase OS=Bacillus infantis OX=324767 GN=queF PE=3 SV=1

SEQ ID NO: 44285 - protein, 165 aa, Bacillus intestinalis; identical to SEQ ID NO: 44220
  misc_feature (1)..(165): tr|A0A136G6A6|A0A136G6A6_9BACI NADPH-dependent 7-cyano- 7-deazaguanine reductase OS=Bacillus intestinalis OX=19 63032 GN=queF PE=3 SV=1

SEQ ID NO: 44286 - protein, 166 aa, Bacillus kochii
  misc_feature (1)..(166): tr|A0A248TG57|A0A248TG57_9BACI NADPH-dependent 7-cyano- 7-deazaguanine reductase OS=Bacillus kochii OX=859143 G N=queF PE=3 SV=1
MSGRKEEQGLTDLTLLGNQQTQYPSDYAPEVLEAVDSLHSGRDYFVKFNCPEFTSLCPITGQPDFATMYISYIPDEKIVESKSLKLYLFSFRNHGDFHEDCVNIIMNDLIDLLNPRYIEVWGKFTPRGGISIDPWCNYGRPETKYEKMAEHRLMNHDLYPEKVDNR

SEQ ID NO: 44287 - protein, 165 aa, Bacillus koreensis
  misc_feature (1)..(165): tr|A0A0M0LHZ4|A0A0M0LHZ4_9BACI NADPH-dependent 7-cyano- 7-deazaguanine reductase OS=Bacillus koreensis OX=28458 1 GN=queF PE=3 SV=1
MTGRKDEELEGVTLLGNQGTKYLFEYAPDVLEAFDNKHPNRDYFVKFNCPEFTSLCPKTGQPDFATIYISYIPDIKMVESKSLKLYLFSFRNHGDFHEDCMNIIMNDLIELMDPRYIEVWGKFTPRGGISIDPYVNYGRPGTKYETMAEHRLMNHDMYPETIDNR

SEQ ID NO: 44288 - protein, 80 aa, Bacillus krulwichiae
  misc_feature (1)..(80): tr|A0A1X9MBG5|A0A1X9MBG5_9BACI NADPH-dependent 7-cyano- 7-deazaguanine reductase OS=Bacillus krulwichiae OX=199 441 GN=queF_1 PE=3 SV=1
MIQLGLQFFDFHEDCMNIIMNDLIELMDPRYIEVWGKFTPRGGISIDPYTNYGKPGTKYEKMAEYRMMNHDLYPETVDNR

SEQ ID NO: 44289 - protein, 165 aa, Bacillus krulwichiae
  misc_feature (1)..(165): tr|A0A1X9MJM4|A0A1X9MJM4_9BACI NADPH-dependent 7-cyano- 7-deazaguanine reductase OS=Bacillus krulwichiae OX=199 441 GN=queF_2 PE=3 SV=1
MSGRKDEDLQGVTLLGNQGTNYDFSYNPSVLEVFENNHPNRDYFVKFNCPEFTSLCPKTNQPDFATIYISYIPDIKMVESKSLKLYLFSFRNHGDFHEDCMNIIMNDLIELMDPRYIEVWGKFTPRGGISIDPYTNYGKPGTKYEKMAEYRMMNHDLYPETVDNR

SEQ ID NO: 44290 - protein, 166 aa, Bacillus kyonggiensis
  misc_feature (1)..(166): tr|A0A4U1D8V0|A0A4U1D8V0_9BACI NADPH-dependent 7-cyano- 7-deazaguanine reductase OS=Bacillus kyonggiensis OX=10 37680 GN=queF PE=3 SV=1
MSGRKTEEGLNDLTLLGNQNTKYSFEYAPEVLESVDNLHSDRDYFVKFNCPEFTSLCPITSQPDFATMYISYIPNKKIVESKSLKLYLFSFRNHGDFHEDCVNIIMNDLIKLLDPRYIEVWGKFTPRGGISIDPWCNYGKPGTKFEEMAMHRLMNHDLNPEKIDNR

SEQ ID NO: 44291 - protein, 165 aa, Bacillus lehensis
  misc_feature (1)..(165): tr|A0A4Y7WQC1|A0A4Y7WQC1_9BACI NADPH-dependent 7-cyano- 7-deazaguanine reductase OS=Bacillus lehensis OX=300825 GN=queF PE=3 SV=1
MTGRKEETLTNVTLLGNQGTEYAFSYNPSVLETFDNQHPNRDYFVKFNCPEFTTLCPKTHQPDFATIYISYIPDVKMVESKSLKLYLFSFRNHGDFHEDSVNTIMNDLIQLMDPRYIEVWGKFTPRGGISIDPYCNYGKKETRFEEMANYRLMNHDMYPETITNR

SEQ ID NO: 44292 - protein, 165 aa, Bacillus lehensis; identical to SEQ ID NO: 44291
  misc_feature (1)..(165): tr|A0A060M2A9|A0A060M2A9_9BACI NADPH-dependent 7-cyano- 7-deazaguanine reductase OS=Bacillus lehensis G1 OX=124 6626 GN=queF PE=3 SV=1

SEQ ID NO: 44293 - protein, 165 aa, Bacillus lentus
  misc_feature (1)..(165): tr|A0A2X4YRB2|A0A2X4YRB2_BACLE NADPH-dependent 7-cyano- 7-deazaguanine reductase OS=Bacillus lentus OX=1467 GN= queF PE=3 SV=1
MAGRNEDTLQDLSLLGNQNTKYLFKYSPDVLESIDNLHPNRDYFVKFNCPEFTSLCPQTHQPDFATMYISYIPDQKIVESKSLKLYLFSFRNHGDFHEDCVNIIMNDLIKLLEPRYIEVWGKFTPRGGLSIDPYCNYGKPGTKYVQMADHRMMNHDMYPEKVDNR

SEQ ID NO: 44294 - protein, 165 aa, Bacillus licheniformis; identical to SEQ ID NO: 44204
  misc_feature (1)..(165): tr|A0A1Y0YNK9|A0A1Y0YNK9_BACLI NADPH-dependent 7-cyano- 7-deazaguanine reductase OS=Bacillus licheniformis OX=1 402 GN=ykvM PE=3 SV=1

SEQ ID NO: 44295 - protein, 165 aa, Bacillus licheniformis; identical to SEQ ID NO: 44204
  misc_feature (1)..(165): sp|Q65KI3|QUEF_BACLD NADPH-dependent 7-cyano-7-deazagua nine reductase OS=Bacillus licheniformis (strain ATCC 1 4580 / DSM 13 / JCM 2505 / NBRC 12200 / NCIMB 9375 / NR RL NRS-1264 / Gibson 46) OX=279010 GN=queF PE=3

SEQ ID NO: 44296 - protein, 165 aa, Bacillus litoralis
  misc_feature (1)..(165): tr|A0A179SXZ0|A0A179SXZ0_9BACI NADPH-dependent 7-cyano- 7-deazaguanine reductase OS=Bacillus litoralis OX=15226 8 GN=queF PE=3 SV=1
MAGRKNEELKDVTLLGNQGVNYLFEYSPQILESFDNKHPNRDYFVKFNCPEFTSLCPITNQPDFATIYISYIPDQKMVESKSLKLYLFSFRNHGDFHEDCMNIIMNDLIELMDPRYIEVWGKFTPRGGISIDPYTNYGKPGTKYEEMASYRLMNHDLYPETVDNR

SEQ ID NO: 44297 - protein, 165 aa, Bacillus litoralis
  misc_feature (1)..(165): tr|A0A5C6W6M6|A0A5C6W6M6_9BACI NADPH-dependent 7-cyano- 7-deazaguanine reductase OS=Bacillus litoralis OX=15226 8 GN=queF PE=3 SV=1
MSGRKDEELQDVTLLGNQGTNYLFEYSPQILEAFDNKHPNRDYFVKFNCPEFTSLCPKTGQPDFATIYISYIPDVKMVESKSLKLYLFSFRNHGDFHEDCMNIIMNDLIELMDPRYIEVWGKFTPRGGISIDPYTNYGKPGTKYEEMANYRLMNHDLYPETIDNR

SEQ ID NO: 44298 - protein, 166 aa, Bacillus loiseleuriae
  misc_feature (1)..(166): tr|A0A0K9GZM2|A0A0K9GZM2_9BACI NADPH-dependent 7-cyano- 7-deazaguanine reductase OS=Bacillus loiseleuriae OX=16 79170 GN=queF PE=3 SV=1
MSGRSNEEGLKDLTLLGNQHTQYSFDYAPEVLEAVDNLHSNRDYFVKFNCPEFTSLCPLTHQPDFATMYISYVPDQKIVESKSLKLYLFSFRNHGDFHEDCVNIIMNDLIKLLDPRYIEVWGKFTPRGGISIDPWCNYGKPDTKYEEMAHFRLMNHDLYPEKIDNR

SEQ ID NO: 44299 - protein, 165 aa, Bacillus lonarensis
  misc_feature (1)..(165): tr|A0A1G6H6Z7|A0A1G6H6Z7_9BACI NADPH-dependent 7-cyano- 7-deazaguanine reductase OS=Bacillus lonarensis OX=1464 122 GN=queF PE=3 SV=1
MTNRDEQTLNHITLLGNQNTHYDFSYNPDVLETFTNNHPNRDYMVKFNCPEFTTLCPKTNQPDFATLYISYIPDIQMVESKSLKLYLFSFRNHGGFHEDAVNVIMNDLIKLMDPRYIEVWGKFTPRGGISIDPYCNYGKKGTLFEEMAHHRLMNHDLYPETITNR

SEQ ID NO: 44300 - protein, 165 aa, Bacillus luciferensis
  misc_feature (1)..(165): tr|A0A1E2W111|A0A1E2W111_9BACI NADPH-dependent 7-cyano- 7-deazaguanine reductase OS=Bacillus luciferensis OX=17 8774 GN=queF PE=3 SV=1
MVGRSKGSLEEVSLLGSNNTKYLFEYDPGILETFDNTHPDRDYFVKFNFPEFTSLCPKTGQPDFATIYISYIPEQKMVESKSLKLYFFSFRNHGDFHEDCMNIIMDDLIKLMDPRYIEVWGKFTPRGGISIDPYCNYGRPGTKYEKMAEHRMMNHDLYPEKIDNR

SEQ ID NO: 44301 - protein, 165 aa, Bacillus luti; identical to SEQ ID NO: 44213
  misc_feature (1)..(165): tr|A0A1K0BUC9|A0A1K0BUC9_9BACI NADPH-dependent 7-cyano- 7-deazaguanine reductase OS=Bacillus luti OX=2026191 GN =queF PE=3 SV=1

SEQ ID NO: 44302 - protein, 165 aa, Bacillus manliponensis
  misc_feature (1)..(165): tr|A0A073K1M4|A0A073K1M4_9BACI NADPH-dependent 7-cyano- 7-deazaguanine reductase OS=Bacillus manliponensis OX=5 74376 GN=queF PE=3 SV=1
MTGRKDEDLKEVTLLGNQNTKYLFEYSPEILEVFDNNHPNRDYFVKFNCPEFTSLCPKTGQPDFATIYISYIPSEKMVESKSLKLYLFSFRNHGDFHEDCMNVIMNDLIKLMDPRYIEVWGKFTPRGGISIDPYCNYGKPGTKYEEMASYRLMNHDLYPETIDNR

SEQ ID NO: 44303 - protein, 165 aa, Bacillus marisflavi
  misc_feature (1)..(165): tr|A0A0J5S552|A0A0J5S552_9BACI NADPH-dependent 7-cyano- 7-deazaguanine reductase OS=Bacillus marisflavi OX=1893 81 GN=queF PE=3 SV=1
MSGRKDEDLTDLSLLGNQGTNYLFEYAPEILEAFDNKHPNRDYFVKFNCPEFTSLCPKTGQPDFATIYISYIPGEKMVESKSLKLYLFSFRNHGDFHEDCMNIIMNDLIELMDPRYIEVWGKFTPRGGISIDPYTNYGKPGTKYEEMAFHRLMNHDMYPETIDNR

SEQ ID NO: 44304 - protein, 165 aa, Bacillus marmarensis
  misc_feature (1)..(165): tr|U6SRB6|U6SRB6_9BACI NADPH-dependent 7-cyano-7-deazag uanine reductase OS=Bacillus marmarensis DSM 21297 OX=1 188261 GN=queF PE=3 SV=1
MGGRKDEDLQGVTLLGNQGTTYDFEYNPKILEVFDNQHPNRDYFVKFNCPEFTSLCPKTGQPDFATIYISYIPGEKMVESKSLKLYLFSFRNHGDFHEDCMNIIMNDLIELMDPRYIEVWGKFTPRGGISIDPYTNYGKPGTKYEKIAEYRLMNHDLYPETIDNR

SEQ ID NO: 44305 - protein, 165 aa, Bacillus megaterium; identical to SEQ ID NO: 44216
  misc_feature (1)..(165): tr|D5DZE6|D5DZE6_BACMQ NADPH-dependent 7-cyano-7-deazag uanine reductase OS=Bacillus megaterium (strain ATCC 12 872 / QMB1551) OX=545693 GN=queF PE=3 SV=1

SEQ ID NO: 44306 - protein, 165 aa, Bacillus megaterium
  misc_feature (1)..(165): tr|A0A109G0M1|A0A109G0M1_BACME NADPH-dependent 7-cyano- 7-deazaguanine reductase OS=Bacillus megaterium OX=1404 GN=queF PE=3 SV=1
MSGRKDEELEGVSLLGNQGTNYLFEYAPEILEAFDNKHPNRDYFVKFNCPEFTSLCPKTGQPDFATIYISYIPDEKMVESKSLKLYLFSFRNHGDFHEDCMNIIMNDLIKLMNPRYIEVWGKFTPRGGISIDPYTNYGRPGTKYEEMANYRLMNHDLYPETIDNR

SEQ ID NO: 44307 - protein, 166 aa, Bacillus mesonae
  misc_feature (1)..(166): tr|A0A3Q9QT71|A0A3Q9QT71_9BACI NADPH-dependent 7-cyano- 7-deazaguanine reductase OS=Bacillus mesonae OX=1193713 GN=queF PE=3 SV=1
MSGRSDEQGLKDLTLLGNQNNQYLFEYSPDVLEAVDNLHSDRDYFVKFNCPEFTSLCPLTKQPDFATMYISYIPDRKIVESKSLKLYLFSFRNHGDFHEDCVNIIMNDLIKLLDPRYTEVWGKFTPRGGISIDPWCNYGKPGTKYEEMANFRLMNHDLYPEKVDNR

SEQ ID NO: 44308 - protein, 165 aa, Bacillus methanolicus
  misc_feature (1)..(165): tr|I3E2V2|I3E2V2_BACMM NADPH-dependent 7-cyano-7-deazag uanine reductase OS=Bacillus methanolicus (strain MGA3 / ATCC 53907) OX=796606 GN=queF PE=3 SV=1
MSGRKEEELKDLTLLGNQGTKYLFEYTPEVLEAFDNKHPNRDYFVKFNCPEFTSLCPKTGQPDFATIYISYIPDKKMVESKSLKLYLFSFRNHGDFHEDCVNIIMNDLIDLMDPKYIEVWGKFTPRGGISIDPYTNYGRPGTKYEKMAEYRLMNHDLYPEKIDNR

SEQ ID NO: 44309 - protein, 165 aa, Bacillus methanolicus
  misc_feature (1)..(165): tr|I3E6M1|I3E6M1_BACMT NADPH-dependent 7-cyano-7-deazag uanine reductase OS=Bacillus methanolicus PB1 OX=997296 GN=queF PE=3 SV=1
MSGRKKEELKDLTLLGNQGTKYVFDYAPEVLEAFDNKHPNRDYFVKFNCPEFTSLCPITGQPDFATIYISYIPDKKMVESKSLKLYLFSFRNHGDFHEDCINIIMNDLIDLMDPKYIEVWGKFTPRGGISIDPYVNYGRPGTKYEQMAEYRLMNHDLYPEKIDNR

SEQ ID NO: 44310 - protein, 165 aa, Bacillus mobilis; identical to SEQ ID NO: 44213
  misc_feature (1)..(165): tr|A0A1J9ZMX5|A0A1J9ZMX5_9BACI NADPH-dependent 7-cyano- 7-deazaguanine reductase OS=Bacillus mobilis OX=2026190 GN=queF PE=3 SV=1

SEQ ID NO: 44311 - protein, 165 aa, Bacillus muralis
  misc_feature (1)..(165): tr|A0A1B3XIY3|A0A1B3XIY3_9BACI NADPH-dependent 7-cyano- 7-deazaguanine reductase OS=Bacillus muralis OX=264697 GN=queF PE=3 SV=1
MSGRKEEELKEITLLGNQGTKYPFDYAPEILESFDNKHPNRDYFVKFNCPEFTSLCPITGQPDFATIYISYIPSVKMVESKSLKLYLFSFRNHGDFHEDCMNIIMNDLIELMDPKYIEVWGKFTPRGGISIDPYTNYGRPGTKYEEMADYRLMNHDLYPETVDNR

SEQ ID NO: 44312 - protein, 168 aa, Bacillus mycoides
  misc_feature (1)..(168): tr|C2PT28|C2PT28_BACMY NADPH-dependent 7-cyano-7-deazag uanine reductase OS=Bacillus mycoides OX=1405 GN=queF P E=3 SV=1
MFKMAGRLDEDLKDVTLLGNQNTKYLFEYSPGILEVFDNNHPNRDYFVKFNCPEFTSLCPKTGQPDFATIYISYIPEQRMVESKSLKLYLFSFRNHGDFHEDCMNVIMNDLIKLMDPRYIEVWGKFTPRGGISIDPYCNYGRPGTKYEKMADYRMMNHDLYPEKIDNR

SEQ ID NO: 44313 - protein, 165 aa, Bacillus mycoides
  misc_feature (1)..(165): sp|A9VKS1|QUEF_BACMK NADPH-dependent 7-cyano-7-deazagua nine reductase OS=Bacillus mycoides (strain KBAB4) OX=3 15730 GN=queF PE=3 SV=1
MAGRLDEDLKDVTLLGNQNTKYLFEYSPEILEVFDNNHPNRDYFVKFNCPEFTSLCPKTGQPDFATIYISYIPEQRMVESKSLKLYLFSFRNHGDFHEDCMNVIMNDLIKLMDPRYIEVWGKFTPRGGISIDPYCNYGRPGTKYEKMADYRMMNHDLYPEKIDNR

SEQ ID NO: 44314 - protein, 164 aa, Bacillus nakamurai
  misc_feature (1)..(164): tr|A0A150F1Y3|A0A150F1Y3_9BACI NADPH-dependent 7-cyano- 7-deazaguanine reductase OS=Bacillus nakamurai OX=17939 63 GN=queF PE=3 SV=1
MTRKDSELEGVTLLGNQGTNYLFEYAPEVLESFPNKHVNRDYFVKFNCPEFTSLCPKTGQPDFATIYISYIPDEKMVESKSLKLYLFSFRNHGDFHEDCMNIIMNDLIELMDPRYIEVWGKFTPRGGISIDPYTNYGRPGTKYEQMAEHRMMNHDMYPETIDNR

SEQ ID NO: 44315 - protein, 166 aa, Bacillus nanhaiisediminis
  misc_feature (1)..(166): tr|A0A562QRB2|A0A562QRB2_9BACI NADPH-dependent 7-cyano- 7-deazaguanine reductase OS=Bacillus nanhaiisediminis O X=688079 GN=queF PE=3 SV=1
MSSGRNEKELEGVSLLGNQGTTYDFSYNPSVLEVFENKHQNRDYFVKFNCPEFTSLCPKTNQPDFATIYISYIPNVKMVESKSLKLYLFSFRNHGDFHEDCMNIIMNDLIELMDPRYIEVWGKFTPRGGISIDPYCNYGKPGTKYEKIAEHRLMNHDMYPETIDNR

SEQ ID NO: 44316 - protein, 166 aa, Bacillus nealsonii
  misc_feature (1)..(166): tr|R9C8S4|R9C8S4_9BACI NADPH-dependent 7-cyano-7-deazag uanine reductase OS=Bacillus nealsonii AAU1 OX=1202533 GN=queF PE=3 SV=1
MSGRKNEEGLQDLTLLGNQNTQYKSDYAPEVLESVDNLHSDRDYFVKFNCPEFTSLCPITGQPDFATMYISYIPNKKIVESKSLKLYLFSFRNHGDFHEDCVNIIMNDLIKLLDPRYIEVWGKFTPRGGISIDPWCNYGKPGTKFEEMATHRLMNHDMYPEKVDNR

SEQ ID NO: 44317 - protein, 166 aa, Bacillus notoginsengisoli
  misc_feature (1)..(166): tr|A0A417YTI8|A0A417YTI8_9BACI NADPH-dependent 7-cyano- 7-deazaguanine reductase OS=Bacillus notoginsengisoli O X=1578198 GN=queF PE=3 SV=1
MSGRSQEEGLKDLTLLGNQKVQYAFKYAPEVLESVDNLHSDRDYFVKFNCPEFTSLCPITNQPDFATMYISYIPNKKIVESKSLKLYLFSFRNHGDFHEDCVNIIMNDLIKLLDPRYIEVWGKFTPRGGISIDPWCNYGKLGTKYEEMANFRLMNHDMYPEKVDNR

SEQ ID NO: 44318 - protein, 165 aa, Bacillus oceanisediminis
  misc_feature (1)..(165): tr|A0A1S1YQC5|A0A1S1YQC5_9BACI NADPH-dependent 7-cyano- 7-deazaguanine reductase OS=Bacillus oceanisediminis OX =665099 GN=queF PE=3 SV=1
MSGRKDEELTDITLLGNQGTKYLFEYSPDILEAFDNKHPNRDYFVKFNCPEFTSLCPKTGQPDFATIYISYIPDQKMVESKSLKLYLFSFRNHGDFHEDCMNIIMNDLIELMDPRYIEVWGKFTPRGGISIDPYCNYGKPGTKYEKMAEYRLMNHDLYPETIDNR

SEQ ID NO: 44319 - protein, 165 aa, Bacillus oceanisediminis
  misc_feature (1)..(165): tr|A0A4V6QB10|A0A4V6QB10_9BACI NADPH-dependent 7-cyano- 7-deazaguanine reductase OS=Bacillus oceanisediminis OX =665099 GN=queF PE=3 SV=1
MSGRKDEELTDITLLGNQGTKYLFEYSPEILEAFDNKHPNRDYFVKFNCPEFTSLCPKTGQPDFATIYISYIPDQKMVESKSLKLYLFSFRNHGDFHEDCMNIIMNDLIELMDPRYIEVWGKFTPRGGISIDPYCNYGKPGTKYEKMADYRLMNHDLYPETIDNR

SEQ ID NO: 44320 - protein, 165 aa, Bacillus okhensis
  misc_feature (1)..(165): tr|A0A0B0IHW8|A0A0B0IHW8_9BACI NADPH-dependent 7-cyano- 7-deazaguanine reductase OS=Bacillus okhensis OX=333138 GN=queF PE=3 SV=1
MSGRKKEELEGVTLLGNQGTAYDFSYNPSVLEVFENKHQNRDYFVKFNCPEFTSLCPMTNQPDFATIYISYIPDVKMVESKALKLYLFSFRNHGDFHEDCMNIIMNDLIELMDPRYIEVWGKFTPRGGISIDPYTNYGKPGTKYEKMAEYRMMNHDLYPENIDNR

SEQ ID NO: 44321 - protein, 165 aa, Bacillus okuhidensis; identical to SEQ ID NO: 44272
  misc_feature (1)..(165): tr|A0A0M0KKK6|A0A0M0KKK6_9BACI NADPH-dependent 7-cyano- 7-deazaguanine reductase OS=Bacillus okuhidensis OX=136 160 GN=queF PE=3 SV=1

SEQ ID NO: 44322 - protein, 135 aa, Bacillus oleivorans
  misc_feature (1)..(135): tr|A0A285CS84|A0A285CS84_9BACI NADPH-dependent 7-cyano- 7-deazaguanine reductase OS=Bacillus oleivorans OX=1448 271 GN=queF PE=3 SV=1
MKNSWIPQSGPMPRPKSVEEGREALKEEAFDSPNVSNITFRALEFTAVCPKTGQPDFGQVEISYTPDQKCIESKSLKFYLWSYRDEGAFCETLAARIADDIVYAIDPKRVEVTIFQSPRGGIELKATAIREKNND

SEQ ID NO: 44323 - protein, 165 aa, Bacillus pacificus; identical to SEQ ID NO: 44213
  misc_feature (1)..(165): tr|A0A1J9Y7Q5|A0A1J9Y7Q5_9BACI NADPH-dependent 7-cyano- 7-deazaguanine reductase OS=Bacillus pacificus OX=20261 87 GN=queF PE=3 SV=1

SEQ ID NO: 44324 - protein, 166 aa, Bacillus paralicheniformis
  misc_feature (1)..(166): tr|A0A1Q8GGI2|A0A1Q8GGI2_9BACI NADPH-dependent 7-cyano- 7-deazaguanine reductase OS=Bacillus paralicheniformis OX=1648923 GN=queF PE=3 SV=1
MMTTRKDSELEGVTLLGNQGTNYLFDYSPEVLESFPNKHENRDYFVKFNCPEFTSLCPKTGQPDFATIYISYIPDKKMVESKSLKLYLFSFRNHGDFHEDCMNIIMNDLIELMDPRYIEVWGKFTPRGGISIDPYTNYGKPGTKYEKMAEYRMMNHDLYPETIDNR

SEQ ID NO: 44325 - protein, 165 aa, Bacillus paralicheniformis; identical to SEQ ID NO: 44204
  misc_feature (1)..(165): tr|A0A5A9T963|A0A5A9T963_9BACI NADPH-dependent 7-cyano- 7-deazaguanine reductase OS=Bacillus paralicheniformis OX=1648923 GN=queF PE=3 SV=1

SEQ ID NO: 44326 - protein, 165 aa, Bacillus paramycoides
  misc_feature (1)..(165): tr|A0A1J9U8A0|A0A1J9U8A0_9BACI NADPH-dependent 7-cyano- 7-deazaguanine reductase OS=Bacillus paramycoides OX=20 26194 GN=queF PE=3 SV=1
MAGRLDEDLKDVTLLGNQNTKYLFEYSPEILEVFDNNHPNRDYFVKFNCPEFTSLCPKTGQPDFATIYISYIPEQKMVESKSLKLYLFSFRNHGDFHEDCMNVIMNDLIKLMDPRYIEVWGKFTPRGGISIDPYCNYGRPGTKYEEMADYRMMNHDLYPETIDNR

SEQ ID NO: 44327 - protein, 165 aa, Bacillus paranthracis; identical to SEQ ID NO: 44213
  misc_feature (1)..(165): tr|A0A4U1DPU1|A0A4U1DPU1_9BACI NADPH-dependent 7-cyano- 7-deazaguanine reductase OS=Bacillus paranthracis OX=20 26186 GN=queF PE=3 SV=1

SEQ ID NO: 44328 - protein, 165 aa, Bacillus paranthracis
  misc_feature (1)..(165): tr|A0A1J9YND1|A0A1J9YND1_9BACI NADPH-dependent 7-cyano- 7-deazaguanine reductase OS=Bacillus paranthracis OX=20 26186 GN=queF PE=3 SV=1
MAGRLDEDLKDVTLLGNQNTKYLFEYSPEILEVFDNNHPNRDYFVKFNCPEFTSLCPKTGQPDFATIYISYIPEQRMVESKSLKLYLFSFRNHGDFHEDCMNVIMNDLIKLMDPRYIEVWGKFTPRGGISIDPYCNYGRPGTKYEKMADYRMMNHDLYPETIDNR

SEQ ID NO: 44329 - protein, 166 aa, Bacillus persicus
  misc_feature (1)..(166): tr|A0A1H8G6M0|A0A1H8G6M0_9BACI NADPH-dependent 7-cyano- 7-deazaguanine reductase OS=Bacillus persicus OX=930146 GN=queF PE=3 SV=1
MSGRNEEQGLKDLTLLGNQHTQYPSDYAPEVLEAVDSLHSNRDYFVKFNCPEFTSLCPITGQPDFATMYISYIPDKKIVESKSLKLYLFSFRNHGDFHEDCVNIIMNDLIKLLDPRYIEVWGKFTPRGGISIDPWCNYGKPDTKYEEMANFRLMNHDLYPEKVDNR

SEQ ID NO: 44330 - protein, 166 aa, Bacillus praedii
  misc_feature (1)..(166): tr|A0A4V2NUN3|A0A4V2NUN3_9BACI NADPH-dependent 7-cyano- 7-deazaguanine reductase OS=Bacillus praedii OX=1742358 GN=queF PE=3 SV=1
MSGRKMEEGLKDLTLLGNQQTQYRSDYAPEVLEAVDSLHSNRDYFVKFNCPEFTSLCPITGQPDFATMYISYIPDKKIVESKSLKLYLFSFRNHGDFHEDCVNIIMNDLIKLLDPRYIEVWGKFTPRGGISIDPWCNYGRPGTKYEEMADHRLMNHDLYPEKVDNR

SEQ ID NO: 44331 - protein, 165 aa, Bacillus pseudofirmus
  misc_feature (1)..(165): tr|A0A1Q8V216|A0A1Q8V216_BACPF NADPH-dependent 7-cyano- 7-deazaguanine reductase OS=Bacillus pseudofirmus OX=79 885 GN=queF PE=3 SV=1
MVGRKDEDLQDVTLLGNQNTKYDYQYNPEVLETFDNQHPGRDYFVKFNCPEFTTLCPKTGQPDFATIYISYIPDTKMVESKSLKLYLFSFRNHGDFHEDSVNTIMNDLIKLMEPRYIEVWGKFTPRGGISIDPYCNYGRPGTKFEEMANFRLMNHDLYPETITNR

SEQ ID NO: 44332 - protein, 165 aa, Bacillus pseudofirmus
  misc_feature (1)..(165): tr|D3FSX4|D3FSX4_BACPE NADPH-dependent 7-cyano-7-deazag uanine reductase OS=Bacillus pseudofirmus (strain OF4) OX=398511 GN=queF PE=3 SV=1
MGGRKDEDLQGVTLLGNQGTTYDFEYNPKILEVFDNQHPNRDYFVKFNCPEFTSLCPKTGQPDFATIYISYIPGEKMVESKSLKLYLFSFRNHGDFHEDCMNIIMNDLIELMDPRYIEVWGKFTPRGGISIDPYTNYGKPGTKYEKMAEYRLMNHDLYPETIDNR

SEQ ID NO: 44333 - protein, 165 aa, Bacillus pseudomycoides
  misc_feature (1)..(165): tr|C3BHQ9|C3BHQ9_9BACI NADPH-dependent 7-cyano-7-deazag uanine reductase OS=Bacillus pseudomycoides DSM 12442 O X=527000 GN=queF PE=3 SV=1
MAGRLDEDLKDVTLLGNQNTKYLFEYSPKILETFDNNHPNRDYFVKFNCPEFTSLCPKTGQPDFATIYISYIPEQKMVESKSLKLYLFSFRNHGDFHEDCMNVIMNDLIKLMDPRYIEVWGKFTPRGGISIDPYCNYGRPGTKYEKMAEYRMMNHDLYPETIDNR

SEQ ID NO: 44334 - protein, 165 aa, Bacillus pseudomycoides; identical to SEQ ID NO: 44333
  misc_feature (1)..(165): tr|A0A2A8H382|A0A2A8H382_9BACI NADPH-dependent 7-cyano- 7-deazaguanine reductase OS=Bacillus pseudomycoides OX= 64104 GN=queF PE=3 SV=1

SEQ ID NO: 44335 - protein, 165 aa, Bacillus pumilus; identical to SEQ ID NO: 44205
  misc_feature (1)..(165): tr|W8RH14|W8RH14_BACPU NADPH-dependent 7-cyano-7-deazag uanine reductase OS=Bacillus pumilus OX=1408 GN=queF PE =3 SV=1

SEQ ID NO: 44336 - protein, 165 aa, Bacillus pumilus; identical to SEQ ID NO: 44205
  misc_feature (1)..(165): sp|A8FCI2|QUEF_BACP2 NADPH-dependent 7-cyano-7-deazagua nine reductase OS=Bacillus pumilus (strain SAFR-032) OX =315750 GN=queF PE=3 SV=1

SEQ ID NO: 44337 - protein, 165 aa, Bacillus safensis
  misc_feature (1)..(165): tr|A0A0M2EDU5|A0A0M2EDU5_9BACI NADPH-dependent 7-cyano- 7-deazaguanine reductase OS=Bacillus safensis OX=561879 GN=queF PE=3 SV=1
MTTRKPEELEGVTLLGNQGTNYLFDYAPQVLETFPNKHTNRDYFVKFNCPEFTSLCPQTGQPDFATVYISYIPNEIMVESKSLKLYLFSFRNHGDFHEDCMNIIMNDLIELMDPRYIEVWGKFTPRGGISIDPYTNYGKPGTKYEEMAEYRMMNHDMYPETIDNR

SEQ ID NO: 44338 - protein, 165 aa, Bacillus safensis; identical to SEQ ID NO: 44205
  misc_feature (1)..(165): tr|A0A561S1I2|A0A561S1I2_9BACI NADPH-dependent 7-cyano- 7-deazaguanine reductase OS=Bacillus safensis OX=561879 GN=queF PE=3 SV=1

SEQ ID NO: 44339 - protein, 165 aa, Bacillus salacetis
  misc_feature (1)..(165): tr|A0A3A1QVL9|A0A3A1QVL9_9BACI NADPH-dependent 7-cyano- 7-deazaguanine reductase OS=Bacillus salacetis OX=23154 64 GN=queF PE=3 SV=1
MSGRKDEELQDVTLLGNQGTDYLFEYAPQVLETFENQHPNRDYFVKFNCPEFTSLCPKTRQPDFATIYISYVPDIKMVESKSLKLYLFSFRNHGDFHEDCMNIIMNDLIELMDPRYIEVWGKFTPRGGISIDPYCNYGKPGTKFEKMAEYRMMNHDLYPETIDNR

SEQ ID NO: 44340 - protein, 163 aa, Bacillus salarius
  misc_feature (1)..(163): tr|A0A3R9P4U9|A0A3R9P4U9_9BACI NADPH-dependent 7-cyano- 7-deazaguanine reductase OS=Bacillus salarius OX=284579 GN=queF PE=3 SV=1
MSKRKDVDELSHLGQEETSYTFEYDPSLLETFNNNHPDRDYFVKFNCPEFTTLCPKTGQPDFATLYISYIPDERMVESKSLKLYLFSFRNHGGFHEDAINTIVDDLVELMAPRYLEVIGKFTPRGGISIDPYANYGRPGTTFEEMAKTRLLYHDMYPETIDNR

SEQ ID NO: 44341 - protein, 163 aa, Bacillus salarius
  misc_feature (1)..(163): tr|A0A428MTB9|A0A428MTB9_9BACI NADPH-dependent 7-cyano- 7-deazaguanine reductase OS=Bacillus salarius OX=284579 GN=queF PE=3 SV=1
MSERKDVDELSHLGQEETSYTFEYDPSLLETFNNNHPNRDYFVKFNCPEFTTLCPKTGQPDFATLYISYIPDEKMVESKALKLYLFSFRNHGGFHEDAINTIVNDLVDLMDPRYLEVLGKFTPRGGISIDPYANYGRPGTTYEEMAKTRLLYHDMYPEKIDNR

SEQ ID NO: 44342 - protein, 190 aa, Bacillus salsus
  misc_feature (1)..(190): tr|A0A1H0RYT6|A0A1H0RYT6_9BACI NADPH-dependent 7-cyano- 7-deazaguanine reductase OS=Bacillus salsus OX=930152 G N=queF PE=3 SV=1
MGVVFLVLVKSLSRFMLFKERNVYRMTGRKDEELTDVTLLGNQGTNYLFEYSPDILESFDNKHPDRDYFVKFNCPEFTSLCPKTGQPDFATIYISYIPEIKMVESKSLKLYLFSFRNHGDFHEDCVNIIMKDLIKLMDPRYIEVWGKFTPRGGISIDPYTNYGRPGTKFEEMAEYRMMNHDLYPEKIDNR

SEQ ID NO: 44343 - protein, 165 aa, Bacillus selenatarsenatis
  misc_feature (1)..(165): tr|A0A0A8XEB9|A0A0A8XEB9_9BACI NADPH-dependent 7-cyano- 7-deazaguanine reductase OS=Bacillus selenatarsenatis S F-1 OX=1321606 GN=queF PE=3 SV=1
MAGRKDEELKDITLLGNQGTKYLFEYSPEILETFENKHPYRDYFVKFNTPEFTSLCPITGQPDFASIYISYIPDKLMVESKSLKLYLFSFRNHGDFHEDCMNIIMNDLIKLMEPRYIEVWGKFTPRGGISIDPYTNYGKPGTKYEEMADYRMMNHDMYPEKVDNR

SEQ ID NO: 44344 - protein, 135 aa, Bacillus selenitireducens
  misc_feature (1)..(135): tr|D6XV20|D6XV20_BACIE NADPH-dependent 7-cyano-7-deazag uanine reductase OS=Bacillus selenitireducens (strain A TCC 700615 / DSM 15326 / MLS10) OX=439292 GN=queF PE=3 SV=1
MSENYYLPRSGPMPRPASVEEGRNVLRDEAFPAPDVSVVRFKALEFTAVCPKTGQPDFGQVEIEYVPRNKCIESKSLKFYLWSYRDEGAYCESLAAQIADDVMAAIEPARVKVMVHQTPRGGIQLETEAERIHEA

SEQ ID NO: 44345 - protein, 166 aa, Bacillus shackletonii
  misc_feature (1)..(166): tr|A0A0Q3TAR9|A0A0Q3TAR9_9BACI NADPH-dependent 7-cyano- 7-deazaguanine reductase OS=Bacillus shackletonii OX=15 7838 GN=queF PE=3 SV=1
MSGRKQEEGLKDLTLLGNQGTKYKFEYSPEILESVDNLHSNRDYFVKFNCPEFTSLCPITSQPDYATMYISYIPDKKIVESKSLKLYLFSFRNHGDFHEDCVNIIMNDLIKLLDPRYIEVWGKFTPRGGISIDPYCNYGRPGTKYEEMANFRLMNHDLYPEKVDNR

SEQ ID NO: 44346 - protein, 164 aa, Bacillus siamensis
  misc_feature (1)..(164): tr|A0A2K9KD29|A0A2K9KD29_9BACI NADPH-dependent 7-cyano- 7-deazaguanine reductase OS=Bacillus siamensis OX=65924 3 GN=queF PE=3 SV=1
MTRKESELEGVTLLGNQGTNYLFEYAPEVLESFPNKHVNRDYFVKFNCPEFTSLCPKTGQPDFATIYISYIPDEKMVESKSLKLYLFSFRNHGDFHEDCMNIIMNDLIELMDPRYIEVWGKFTPRGGISIDPYTNYGKPGTKYEKMAEYRMMNHDLYPETIDNR

SEQ ID NO: 44347 - protein, 164 aa, Bacillus siamensis; identical to SEQ ID NO: 44210
  misc_feature (1)..(164): tr|A0A268DYC6|A0A268DYC6_9BACI NADPH-dependent 7-cyano- 7-deazaguanine reductase OS=Bacillus siamensis OX=65924 3 GN=queF PE=3 SV=1

SEQ ID NO: 44348 - protein, 166 aa, Bacillus simplex
  misc_feature (1)..(166): tr|A0A098FA62|A0A098FA62_9BACI NADPH-dependent 7-cyano- 7-deazaguanine reductase OS=Bacillus simplex OX=1478 GN =queF PE=3 SV=1
MSGRKEEELKKDITLLGNQGTKYTFDYAPEILESFDNKHPNRDYFVKFNCPEFTSLCPITGQPDFATIYISYIPSVKMVESKSLKLYLFSFRNHGDFHEDCMNIIMNDLIELMDPKYIEVWGKFTPRGGISIDPYTNYGKLGTKYEEMANYRLMNHDLYPETVDNR

SEQ ID NO: 44349 - protein, 166 aa, Bacillus simplex
  misc_feature (1)..(166): tr|A0A127D394|A0A127D394_9BACI NADPH-dependent 7-cyano- 7-deazaguanine reductase OS=Bacillus simplex OX=1478 GN =queF PE=3 SV=1
MSGRKEEELKKDITLLGNQGTKYTFDYAPEILESFDNKHPNRDYFVKFNCPEFTSLCPITGQPDFATIYISYIPSVKMVESKSLKLYLFSFRNHGDFHEDCMNIIMNDLIELMDPKYIEVWGKFTPRGGISIDPYTNYGKPGTKYEEMADYRLMNHDLYPETVDNR

SEQ ID NO: 44350 - protein, 165 aa, Bacillus smithii
  misc_feature (1)..(165): tr|A0A0H4P2B6|A0A0H4P2B6_9BACI NADPH-dependent 7-cyano- 7-deazaguanine reductase OS=Bacillus smithii OX=1479 GN =queF PE=3 SV=1
MAGRNEEELQGVTLLGNQGTKYVFDYAPEVLEVFDNKHPNRDYFVKFNCPEFTSLCPKTGQPDFATIYISYIPDKKMVESKSLKLYLFSFRNHGDFHEDCVNIIMNDLIDVMDPRYIEVWGKFTPRGGISIDPYVNYGRPGTKYEKMAEYRLMNHDLYPEKIDNR

SEQ ID NO: 44351 - protein, 165 aa, Bacillus smithii
  misc_feature (1)..(165): tr|G9QLM2|G9QLM2_9BACI NADPH-dependent 7-cyano-7-deazag uanine reductase OS=Bacillus smithii 7_3_47FAA OX=66595 2 GN=queF PE=3 SV=1
MAGRNEEELQGVTLLGNQGTKYIFDYAPEVLEVFDNKHPNRDYFVKFNCPEFTSLCPKTGQPDFATIYISYIPDKKMVESKSLKLYLFSFRNHGDFHEDCVNIIMNDLIDVMDPRYIEVWGKFTPRGGISIDPYVNYGRPGTKYEKMAEYRLMNHDLYPEKIDNR

SEQ ID NO: 44352 - protein, 166 aa, Bacillus solani
  misc_feature (1)..(166): tr|A0A0Q3SQ50|A0A0Q3SQ50_9BACI NADPH-dependent 7-cyano- 7-deazaguanine reductase OS=Bacillus solani OX=1637975 GN=queF PE=3 SV=1
MSGRKLEEGLKDLTLLGNQQTQYRSDYAPEVLEAVDSLHSNRDYFVKFNCPEFTSLCPITGQPDFATMYISYIPDKKIVESKSLKLYLFSFRNHGDFHEDCVNIIMNDLIKLLDPRYIEVWGKFTPRGGISIDPWCNYGRPGTKYEEMANHRLMNHDLYPEKVDNR

SEQ ID NO: 44353 - protein, 132 aa, Bacillus solimangrovi
  misc_feature (1)..(132): tr|A0A1E5LF70|A0A1E5LF70_9BACI NADPH-dependent 7-cyano- 7-deazaguanine reductase OS=Bacillus solimangrovi OX=13 05675 GN=queF PE=3 SV=1
MSEYYLPRSGPMPRPESSQQAKEVLKQESFPAPNVQEVTFDALEFTSVCPKTSQPDFGSVTISYVPDESCIESKSLKFYLWSFRDEGAYCESLAAQIADDIVYAIDPKRVDVTVYQTPRGGIKLKTNAVREK

SEQ ID NO: 44354 - protein, 165 aa, Bacillus sonorensis
  misc_feature (1)..(165): tr|M5P557|M5P557_9BACI NADPH-dependent 7-cyano-7-deazag uanine reductase OS=Bacillus sonorensis L12 OX=1274524 GN=queF PE=3 SV=1
MTTRKDSELEGVTLLGNQGTNYLFDYSPDVLEAFPNKHENRDYFVKFNCPEFTSLCPKTGQPDFATIYISYIPDKKMVESKSLKLYLFSFRNHGDFHEDCMNIIMNDLIELMDPRYIEVWGKFTPRGGISIDPYTNYGRPGTKYEKMAEYRMMNHDLYPETVDNR

SEQ ID NO: 44355 - protein, 65 aa, Bacillus sonorensis
  misc_feature (1)..(65): tr|M5P3E3|M5P3E3_9BACI NADPH-dependent 7-cyano-7-deazag uanine reductase OS=Bacillus sonorensis L12 OX=1274524 GN=queF PE=3 SV=1
MNIIMNDLIELMDPRYIEVWGKFTPRGGISIDPYTNYGRPGTKYEKMAEYRLMNHDLYPETVDNR

SEQ ID NO: 44356 - protein, 165 aa, Bacillus sp.
  misc_feature (1)..(165): tr|A0A1S1FX61|A0A1S1FX61_9BACI NADPH-dependent 7-cyano- 7-deazaguanine reductase OS=Bacillus sp. HMSC76G11 OX=1 608910 GN=queF PE=3 SV=1
MAGRQDSELTDVTLLGNQGTNYLFEYSPDILESFDNKHENRDYFVKFNCPEFTSLCPKTGQPDFATIYISYIPDKKMVESKSLKLYLFSFRNHGDFHEDCMNIIMNDLIELMDPRYIEVWGKFTPRGGISIDPYTNYGKPGTKYEQMAEHRMMNHDMYPEKIDNR

SEQ ID NO: 44357 - protein, 165 aa, Bacillus sp.
  misc_feature (1)..(165): tr|A0A2B8U2Q7|A0A2B8U2Q7_9BACI NADPH-dependent 7-cyano- 7-deazaguanine reductase OS=Bacillus sp. AFS055030 OX=2 033507 GN=queF PE=3 SV=1
MVGRSKGSLEDVSLLGSNNTKYLFEYDPGILETFDNTHPDRDYFVKFNFPEFTSLCPKTGQPDFATIYISYIPEKKMVESKSLKLYFFSFRNHGDFHEDCMNIIMDDLIKLMDPRYIEVWGKFTPRGGISIDPYCNYGRPGTKYEKMAEHRMMNHDLYPEKIDNR

SEQ ID NO: 44358 - protein, 166 aa, Bacillus sporothermodurans
  misc_feature (1)..(166): tr|A0A150LFD6|A0A150LFD6_9BACI NADPH-dependent 7-cyano- 7-deazaguanine reductase OS=Bacillus sporothermodurans OX=46224 GN=queF PE=3 SV=1
MSGRKKEEGLSDLTLLGNQGTQYSFEYAPQVLESVDNLHVDRDYFVKFNCPEFSSLCPITHQPDYATMYISYIPDKKIVESKSLKLYLFSFRNHGDFHEDCVNIIMNDLIKLLDPRYIEVWGKFTPRGGISIDPYCNYGKKGTKFEDMAAYRLMNHDMYPEKVDNR

SEQ ID NO: 44359 - protein, 166 aa, Bacillus sporothermodurans
  misc_feature (1)..(166): tr|A0A2T6EWZ9|A0A2T6EWZ9_9BACI NADPH-dependent 7-cyano- 7-deazaguanine reductase OS=Bacillus sporothermodurans OX=46224 GN=queF PE=3 SV=1
MSGRKKEEGLSDLTLLGNQGTQYSFEYAPQVLESVDNLHVDRDYFVKFNCPEFSSLCPITHQPDYATMYISYIPDKKIVESKSLKLYLFSFRNHGDFHEDCVNIIMNDLIKLLDPRYIEVWGKFTPRGGISIDPYCNYGKKGTKFEDMAAYRLMNHDMYPETVDNR

SEQ ID NO: 44360 - protein, 165 aa, Bacillus stratosphericus; identical to SEQ ID NO: 44205
  misc_feature (1)..(165): tr|M5R3L6|M5R3L6_9BACI NADPH-dependent 7-cyano-7-deazag uanine reductase OS=Bacillus stratosphericus LAMA 585 O X=1236481 GN=queF PE=3 SV=1

SEQ ID NO: 44361 - protein, 165 aa, Bacillus stratosphericus; identical to SEQ ID NO: 44337
  misc_feature (1)..(165): tr|A0A4Y9K3U1|A0A4Y9K3U1_9BACI NADPH-dependent 7-cyano- 7-deazaguanine reductase OS=Bacillus stratosphericus OX =293386 GN=queF PE=3 SV=1

SEQ ID NO: 44362 - protein, 165 aa, Bacillus subterraneus
  misc_feature (1)..(165): tr|A0A427TTH4|A0A427TTH4_9BACI NADPH-dependent 7-cyano- 7-deazaguanine reductase OS=Bacillus subterraneus OX=28 5983 GN=queF PE=3 SV=1
MAGRKEEEMKDLTLLGNQGTKYLFEYSPEILETFENKHPYRDYFVKFNTPEFTSLCPITGQPDFASIYISYIPDQLMVESKSLKLYLFSFRNHGDFHEDCMNIIMNDLIKLMDPRYIEVWGKFTPRGGISIDPYTNYGKPGTKYEEMANYRMMNHDMYPEKVDNR

SEQ ID NO: 44363 - protein, 165 aa, Bacillus subtilis; identical to SEQ ID NO: 44220
  misc_feature (1)..(165): sp|O31678|QUEF_BACSU NADPH-dependent 7-cyano-7-deazagua nine reductase OS=Bacillus subtilis (strain 168) OX=224 308 GN=queF PE=1 SV=1

SEQ ID NO: 44364 - protein, 62 aa, Bacillus subtilis
  misc_feature (1)..(62): tr|A0A0D1KU70|A0A0D1KU70_BACIU 7-cyano-7-deazaguanine r eductase OS=Bacillus subtilis OX=1423 GN=SC09_Contig19o rf00817 PE=4 SV=1
MNIIMNDLIELMDPRYIEVWGKFTPRGGISIDPYTNYGKPGTKYEKMAEYRHDLYPETIDNR

SEQ ID NO: 44365 - protein, 165 aa, Bacillus swezeyi; identical to SEQ ID NO: 44204
  misc_feature (1)..(165): tr|A0A1R1RGL7|A0A1R1RGL7_9BACI NADPH-dependent 7-cyano- 7-deazaguanine reductase OS=Bacillus swezeyi OX=1925020 GN=queF PE=3 SV=1

SEQ ID NO: 44366 - protein, 139 aa, Bacillus taeanensis
  misc_feature (1)..(139): tr|A0A366Y0R2|A0A366Y0R2_9BACI NADPH-dependent 7-cyano- 7-deazaguanine reductase OS=Bacillus taeanensis OX=2730 32 GN=queF PE=3 SV=1
MGKVNVDHSKYEGIRFDIENEDVILVDILETIPYEYIGKETLVTIPTNEFTSVCPWSGLPDFAEIQISYIPNETLVEMKSLKYYLTSYRNVGIYQEHATNRMLNDLVSLLSPKYMKITALWNARGGLGTEVVVEYKEDK

SEQ ID NO: 44367 - protein, 165 aa, Bacillus tequilensis
  misc_feature (1)..(165): tr|A0A2X0X753|A0A2X0X753_9BACI NADPH-dependent 7-cyano- 7-deazaguanine reductase OS=Bacillus tequilensis OX=227 866 GN=ykvM PE=3 SV=1
MTTRKESELEGVTLLGNQGTNYLFEYAPDVLESFPNKHVNRDYFVKFNCPEFTSLCPKTGQPDFATIYISYIPDEKMVESKSLKLYLFSFRNHGDFHEDCMNIIMNDLIELMDPRYIEVWGKFTPRGGISIDPYTNYGKPGTKYEKMAEYRMMNHDLYPETVDNR

SEQ ID NO: 44368 - protein, 165 aa, Bacillus terrae
  misc_feature (1)..(165): tr|A0A429X3R1|A0A429X3R1_9BACI NADPH-dependent 7-cyano- 7-deazaguanine reductase OS=Bacillus terrae OX=1914933 GN=queF PE=3 SV=1
MTGRNEDTLKDLSLLGNQNTEYLFEYSPGVLESIDNLHSDRDYFIKFNCPEFTSLCPQTKQPDFATIYISYIPDKKIVESKSLKLYLFSFRNHGDFHEDCVNKIMNDLIKLLYPRYIEVWGKFTPRGGLSIDPYSNYGKPGTKYEQMAEYRMMNHDLYPEKVDNR

SEQ ID NO: 44369 - protein, 162 aa, Bacillus thermoamylovorans
  misc_feature (1)..(162): tr|A0A2U8EH60|A0A2U8EH60_9BACI NADPH-dependent 7-cyano- 7-deazaguanine reductase OS=Bacillus thermoamylovorans OX=35841 GN=queF PE=3 SV=1
MMGRKKDEVKSLGKKEAKYIFDYAPEVLEAVQNKHAGRDYFVKFNCPEFTSLCPITNQPDFATIYISYIPDEKLVESKSLKLYLFSFRNHGDFHEDCVNIIMDDLIKLLDPKYIEVWGKFTPRGGISIDPYCNYGRPGTKYEEMANYRLMNHDLYPEKVDNR

SEQ ID NO: 44370 - protein, 161 aa, Bacillus thermoamylovorans
  misc_feature (1)..(161): tr|A0A090KSQ1|A0A090KSQ1_9BACI NADPH-dependent 7-cyano- 7-deazaguanine reductase OS=Bacillus thermoamylovorans OX=35841 GN=queF PE=3 SV=1
MGRKKDEVKSLGKKEAKYIFDYAPEVLEAVQNKHAGRDYFVKFNCPEFTSLCPITNQPDFATIYISYIPDEKLVESKSLKLYLFSFRNHGDFHEDCVNIIMDDLIQLLDPKYIEVWGKFTPRGGISIDPYCNYGRPGTKYEEMAYYRLMNHDLYPEKVDNR

SEQ ID NO: 44371 - protein, 163 aa, Bacillus thermocopriae; identical to SEQ ID NO: 44033
  misc_feature (1)..(163): tr|A0A410XIN3|A0A410XIN3_9BACI NADPH-dependent 7-cyano- 7-deazaguanine reductase OS=Bacillus thermocopriae OX=1 215031 GN=queF PE=3 SV=1

SEQ ID NO: 44372 - protein, 168 aa, Bacillus thuringiensis; identical to SEQ ID NO: 44212
  misc_feature (1)..(168): tr|C3G071|C3G071_BACTU NADPH-dependent 7-cyano-7-deazag uanine reductase OS=Bacillus thuringiensis serovar anda lousiensis BGSC 4AW1 OX=527032 GN=queF PE=3 SV=1

SEQ ID NO: 44373 - protein, 165 aa, Bacillus thuringiensis; identical to SEQ ID NO: 44231
  misc_feature (1)..(165): tr|W8Y8H2|W8Y8H2_BACTU NADPH-dependent 7-cyano-7-deazag uanine reductase OS=Bacillus thuringiensis DB27 OX=1431 339 GN=queF PE=3 SV=1

SEQ ID NO: 44374 - protein, 166 aa, Bacillus timonensis
  misc_feature (1)..(166): tr|A0A4S3PMD6|A0A4S3PMD6_9BACI NADPH-dependent 7-cyano- 7-deazaguanine reductase OS=Bacillus timonensis OX=1033 734 GN=queF PE=3 SV=1
MSGRSHEEGLKDLTLLGNQNTQYSFEYAPEVLEAVDNLHSNRDYFVKFNCPEFTSLCPLTHQPDFATIYISYIPDKKLVESKSLKLYLFSFRNHGDFHEDCVNIIMNDLIKLLDPRYIEVWGKFTPRGGISIDPWCNYGKPGTKYEEMANYRLMNHDLNPEKIDNR

SEQ ID NO: 44375 - protein, 165 aa, Bacillus toyonensis
  misc_feature (1)..(165): tr|A0A2C5IMS6|A0A2C5IMS6_9BACI NADPH-dependent 7-cyano- 7-deazaguanine reductase OS=Bacillus toyonensis OX=1553 22 GN=queF PE=3 SV=1
MAGRLDEDLKDITLLGNQNTKYLFEYSPEILEVFDNNHPNRDYFVKFNCPEFTSLCPKTGQPDFATIYISYIPEQRMVESKSLKLYLFSFRNHGDFHEDCMNVIMNDLIKLMDPRYIEVWGKFTPRGGISIDPYCNYGRPGTKYEQMADYRMMNHDLYPETIDNR

SEQ ID NO: 44376 - protein, 165 aa, Bacillus toyonensis
  misc_feature (1)..(165): tr|A0A2B5Y7W4|A0A2B5Y7W4_9BACI NADPH-dependent 7-cyano- 7-deazaguanine reductase OS=Bacillus toyonensis OX=1553 22 GN=queF PE=3 SV=1
MAGRLDEDLKDVTLLGNQNTKYLFEYSPEILEVFDNNHPNRDYFVKFNCPEFTSLCPKTGQPDFAIIYISYIPEQRMVESKSLKLYLFSFRNHGDFHEDCMNVIMNDLIKLMDPRYIEVWGKFTPRGGISIDPYCNYGRPGTKYEQMADYRMMNHDLYLETIDNR

SEQ ID NO: 44377 - protein, 165 aa, Bacillus tropicus; identical to SEQ ID NO: 44213
  misc_feature (1)..(165): tr|A0A4Y6F844|A0A4Y6F844_9BACI NADPH-dependent 7-cyano- 7-deazaguanine reductase OS=Bacillus tropicus OX=202618 8 GN=queF PE=3 SV=1

SEQ ID NO: 44378 - protein, 162 aa, Bacillus urumqiensis
  misc_feature (1)..(162): tr|A0A2P6MK33|A0A2P6MK33_9BACI NADPH-dependent 7-cyano- 7-deazaguanine reductase OS=Bacillus urumqiensis OX=154 8213 GN=queF PE=3 SV=1
MTKPREDEVSLLGNTNVEYKTDYDPSVLESVENRHDYRDFFVKFNCPEFTSLCPKTGQPDFATVYISYVPDKKMVESKSLKLYLFSFRNHGDFHEDCMNIILNDLVELMDPRYIEVWGKFTPRGGISIDPYTNYGKPGTKYENMAEHRMMNHDMYPETVDHR

SEQ ID NO: 44379 - protein, 165 aa, Bacillus vallismortis
  misc_feature (1)..(165): tr|A0A410WHM3|A0A410WHM3_BACVA NADPH-dependent 7-cyano- 7-deazaguanine reductase OS=Bacillus vallismortis OX=72 361 GN=queF PE=3 SV=1
MTTRKDSELEGVTLLGNQGTNYLFEYAPDVLESFPNKHVNRDYFVKFNCPEFTSLCPKTGQPDFATIYISYIPDEKMVESKSLKLYLFSFRNHGDFHEDCMNIIMNDLIELMDPRYIEVWGKFTPRGGISIDPYTNYGKPGTKYEKMAEYRMMNHDLYPETIDNR

SEQ ID NO: 44380 - protein, 164 aa, Bacillus vallismortis; identical to SEQ ID NO: 44210
  misc_feature (1)..(164): tr|A0A1W6HH79|A0A1W6HH79_BACVA NADPH-dependent 7-cyano- 7-deazaguanine reductase OS=Bacillus vallismortis OX=72 361 GN=queF PE=3 SV=1

SEQ ID NO: 44381 - protein, 165 aa, Bacillus velezensis
  misc_feature (1)..(165): tr|A0A411A5C1|A0A411A5C1_9BACI NADPH-dependent 7-cyano- 7-deazaguanine reductase OS=Bacillus velezensis OX=4926 70 GN=queF PE=3 SV=1
MTTRKESELEGVTLLGNQGTNYLFEYAPDVLESFPNKHVNRDYFVKFNCPEFTSLCPKTGQPDFATIYISYIPDEKMVESKSLKLYLFSFRNHGDFHEDCMNIIMNDLIELMDPRYIEVWGKFTPRGGISIDPYTNYGRPGTKYEKMAEHRMMNHDMYPETIDNR

SEQ ID NO: 44382 - protein, 164 aa, Bacillus velezensis; identical to SEQ ID NO: 44210
  misc_feature (1)..(164): sp|A7Z3Y9|QUEF_BACVZ NADPH-dependent 7-cyano-7-deazagua nine reductase OS=Bacillus velezensis (strain DSM 23117 / BGSC 10A6 / FZB42) OX=326423 GN=queF PE=3 SV=1

SEQ ID NO: 44383 - protein, 165 aa, Bacillus vietnamensis
  misc_feature (1)..(165): tr|A0A0P6WVS3|A0A0P6WVS3_9BACI NADPH-dependent 7-cyano- 7-deazaguanine reductase OS=Bacillus vietnamensis OX=21 8284 GN=queF PE=3 SV=1
MSGRKDEDLTDLSLLGNQGTNYLFEYAPHILEAFDNKHPNRDYFVKFNCPEFTSLCPKTGQPDFATIYISYIPGEKMVESKSLKLYLFSFRNHGDFHEDCMNIIMNDLIELMDPRYIEVWGKFTPRGGISIDPYCNYGKPGTKFETMADHRLMNHDLYPEKIDNR

SEQ ID NO: 44384 - protein, 165 aa, Bacillus vietnamensis
  misc_feature (1)..(165): tr|A0A5D4KER5|A0A5D4KER5_9BACI NADPH-dependent 7-cyano- 7-deazaguanine reductase OS=Bacillus vietnamensis OX=21 8284 GN=queF PE=3 SV=1
MSGRKDEQLQDVTLLGNQGTDYLFEYAPQVLETFDNQHPNRDYFVKFNCPEFTSLCPKTRQPDFATIYISYIPDIKMVESKSLKLYLFSFRNHGDFHEDCMNIIMNDLIELMDPRYIEVWGKFTPRGGISIDPYCNYGKKDTKFEKMADYRMMNHDLYPETIDNR

SEQ ID NO: 44385 - protein, 166 aa, Bacillus vireti
  misc_feature (1)..(166): tr|W1SCV8|W1SCV8_9BACI NADPH-dependent 7-cyano-7-deazag uanine reductase OS=Bacillus vireti LMG 21834 OX=113173 0 GN=queF PE=3 SV=1
MSGRSHEEGLKDLTLLGNQGTTYSFDYAPEVLEAVDNLHPERDYFVKFNCPEFTSLCPLTRQPDFATMYISYVPNQKIVESKSLKLYLFSFRNHGDFHEDCVNIIMNDLIQLLDPRYIEVWGKFTPRGGISIDPWCNYGKPGTKYEEMANFRLMNHDLYPEKVDNR

SEQ ID NO: 44386 - protein, 165 aa, Bacillus wakoensis
  misc_feature (1)..(165): tr|W4PXA5|W4PXA5_9BACI NADPH-dependent 7-cyano-7-deazag uanine reductase OS=Bacillus wakoensis JCM 9140 OX=1236 970 GN=queF PE=3 SV=1
MSGRKKEELEGVTLLGNQGTAYDFSYNPSVLEVFENKHQNRDYFVKFNCPEFTSLCPMTNQPDFATIYISYIPDVKMVESKSLKLYLFSFRNHGDFHEDCMNIIMNDLIELMDPRYIEVWGKFTPRGGISIDPYTNYGKPGTKYEKMAEHRMMNHDMYPETIDNR

SEQ ID NO: 44387 - protein, 165 aa, Bacillus weihaiensis
  misc_feature (1)..(165): tr|A0A1L3MT66|A0A1L3MT66_9BACI NADPH-dependent 7-cyano- 7-deazaguanine reductase OS=Bacillus weihaiensis OX=154 7283 GN=queF PE=3 SV=1
MSGRKDEELQDVTLLGNQGTNYLFEYSPSILESFDNKHQNRDYFVKFNCPEFTSLCPKTGQPDFATIYISYIPDVKMVESKSLKLYLFSFRNHGDFHEDCMNIIMNDLIELMDPRYIEVWGKFTPRGGISIDPYTNYGKPGTKYEKMAEYRMMNHDLYPETIDNR

SEQ ID NO: 44388 - protein, 78 aa, Bacillus wiedmannii
  misc_feature (1)..(78): tr|A0A4U3AWV8|A0A4U3AWV8_9BACI NADPH-dependent 7-cyano- 7-deazaguanine reductase (Fragment) OS=Bacillus wiedman nii OX=1890302 GN=FC699_18605 PE=3 SV=1
FSFRNHGDFHEDCMNVIMNDLIKLMDPRYIEVWGKFTPRGGISIDPYCNYGRPGTKYEQMADYRMMNHDLYPETIDNR

SEQ ID NO: 44389 - protein, 165 aa, Bacillus wiedmannii
  misc_feature (1)..(165): tr|A0A2C4HAB7|A0A2C4HAB7_9BACI NADPH-dependent 7-cyano- 7-deazaguanine reductase OS=Bacillus wiedmannii OX=1890 302 GN=queF PE=3 SV=1
MAGRLDQDLKDVTLLGNQNTKYLFEYSPEILEVFDNNHPNRDYFVKFNCPEFTSLCPKTGQPDFATIYISYIPEQRMVESKSLKLYLFSFRNHGDFHEDCMNVIMNDLIKLMDPRYIEVWGKFTPRGGISIDPYCNYGRPGTKYEQMADYRMMNHDLYPETIDNR

SEQ ID NO: 44390 - protein, 166 aa, Bacillus wudalianchiensis
  misc_feature (1)..(166): tr|A0A1B9AG29|A0A1B9AG29_9BACI NADPH-dependent 7-cyano- 7-deazaguanine reductase OS=Bacillus wudalianchiensis O X=1743143 GN=queF PE=3 SV=1
MAGRNEEELKKDISLLGNQGTKYTFEYDPSILESFDNKHPNRDYFVKFNCPEFTSLCPVTGQPDFATIYISYIPDIKMVESKSLKLYLFSFRNHGDFHEDCVNIIMNDLIKLMNPRYIEVWGKFTPRGGISIDPYCNWGRPGTKFEEMANYRLMNHDLYPEKVDNR

SEQ ID NO: 44391 - protein, 165 aa, Bacillus xiamenensis; identical to SEQ ID NO: 44205
  misc_feature (1)..(165): tr|K2NG36|K2NG36_9BACI NADPH-dependent 7-cyano-7-deazag uanine reductase OS=Bacillus xiamenensis OX=1178537 GN= queF PE=3 SV=1

SEQ ID NO: 44392 - protein, 165 aa, Bacillus zeae
  misc_feature (1)..(165): tr|A0A398AZR1|A0A398AZR1_9BACI NADPH-dependent 7-cyano- 7-deazaguanine reductase OS=Bacillus zeae OX=1917180 GN =queF PE=3 SV=1
MGGRKDEELKDLTLLGNQGTKYSFEYAPNLLETFENKHKDRDYIVKFNCPEFTSLCPQTGQPDFATIYISYIPDVKMVESKSLKLYLFSFRNHGDFHEDCMNIIMNDLIELMAPRYIEVWGKFTPRGGISIDPYTNYGKPGTKYEQMADYRLMNHDMYPETIDNR

SEQ ID NO: 44393 - protein, 165 aa, Bacillus zhangzhouensis
  misc_feature (1)..(165): tr|A0A081L6Z5|A0A081L6Z5_9BACI NADPH-dependent 7-cyano- 7-deazaguanine reductase OS=Bacillus zhangzhouensis OX= 1178540 GN=queF PE=3 SV=1
MTTRKPEELEGVTLLGNQGTNYLFEYAPQVLETFPNKHPNRDYFVKFNCPEFTSLCPQTGQPDFATIYISYIPNEIMVESKSLKLYLFSFRNHGDFHEDCMNIIMNDLIELMDPRYIEVWGKFTPRGGISIDPYTNYGKPGTKYEEMASYRMMNHDMYPETIDNR

SEQ ID NO: 44394 - protein, 281 aa, Unknown
  misc_feature (1)..(281): tr|A0A0J8YR49|A0A0J8YR49_9GAMM NADPH-dependent 7-cyano- 7-deazaguanine reductase OS=bacteria symbiont BFo2 of F rankliniella occidentalis OX=1628856 GN=queF PE=3 SV=1
MADYENHPTLSELTLGKSTAYISDYQPSLLQAVPRSLNRDSLQLEGAQLPFHGEDFWTLYELSWLNENGIPQVAIGDVALPASSQNLIESKSFKLYLNSFNQTRFSDWHSVEQTLVRDLSECAQGEVRVTLHRLSDFAAQPIDDFAGAVIDEQAITVDDYQFNRDYLRDAAHGEWVEETLVSHLLKSNCLITQQPDWGSVMIHYKGKKIDREALLRYLLSFRQHNEFHEQCVERIYMDIMALCEPEALTVYARYTRRGGLDINPWRTNQHFSPHNRRLARQ

SEQ ID NO: 44395 - protein, 281 aa, Unknown
  misc_feature (1)..(281): tr|A0A0J8YH18|A0A0J8YH18_9GAMM NADPH-dependent 7-cyano- 7-deazaguanine reductase OS=bacteria symbiont BFo1 of F rankliniella occidentalis OX=1628855 GN=queF PE=3 SV=1
MSSYDHHQALEGLTLGKPTEYHDSYQPALLQAVPRSLNREPLGLYPDTLPFTGADIWTLYELSWLNSKGLPQVAVGEVALDADSVNLIESKSFKLYLNSFNQTKFADWGEVRQTLERDLSACAAGKVSVALFRLQEIEGQPIGHFDGSCIDEQDIVIDDYQFNADYLRDAAAGEIVEEQLVSHLLKSNCLITNQPDWGSVQISYRGPRIQREALLRYLVSFRHHNEFHEQCVERIFSDILRYCQPESLSVYARYTRRGGLDINPWRTNGQFKPGRSRLVRQ

SEQ ID NO: 44396 - protein, 114 aa, Bacteriodetes bacterium
  misc_feature (1)..(114): tr|A0A522FQR1|A0A522FQR1_9BACT NADPH-dependent 7-cyano- 7-deazaguanine reductase OS=Bacteriodetes bacterium OX= 2507565 GN=queF PE=3 SV=1
MISIETFPNPKPDRKYVITHVNPEFTSVCPKTGLPDFGIITVKYIPDKVCLELKALKYYYLSYRDKGIFYEAVTNQILDDLVAACEPLEMEITSEWTTRGGMNSVIVAEYHKGE

SEQ ID NO: 44397 - protein, 128 aa, Bacteriodetes bacterium
  misc_feature (1)..(128): tr|A0A522GNH3|A0A522GNH3_9BACT NADPH-dependent 7-cyano- 7-deazaguanine reductase OS=Bacteriodetes bacterium OX= 2507565 GN=queF PE=3 SV=1
MKYGEKIIKKAVLEIWNNPHPERDYEINISFPEFTCLCPRSGYPDFATIKINYKPGKKIVELKSLKLYLNFFRTTYISHEDVTNVIYTELKKKLRPKFLEVIGDFNPRGNVKTIVRVCSDSKVKAEKV

SEQ ID NO: 44398 - protein, 273 aa, Bacterioplanes sanyensis
  misc_feature (1)..(273): tr|A0A222FKL5|A0A222FKL5_9GAMM NADPH-dependent 7-cyano- 7-deazaguanine reductase OS=Bacterioplanes sanyensis OX =1249553 GN=queF PE=3 SV=1
MGSVHSESNPLGQASEYKDQYDAGLLFPIDRQESWRAQGLDRSSASFFGEDIWNAYELSWLNERGKPMVAMAEFRIPAASPFLIESKSFKLYLNSFNQTRFASAAEVVQHLERDLSGAAGAAVQATLLDVEHAFSAPPQAVCIDELDVDIDSYQPDPSLLRCADGEFDGWLCSHLLKSNCPVTGQPDWGSLYIHYRGQRIDEAALLKYVISLRQHQDFHEQCVERTFMDLMTACQPEALTVYARYVRRGGLDINPMRSTDSAAVAVNFRLARQ

SEQ ID NO: 44399 - protein, 187 aa, Bacteriovorax sp.
  misc_feature (1)..(187): tr|T0C355|T0C355_9PROT NADPH-dependent 7-cyano-7-deazag uanine reductase OS=Bacteriovorax sp. BAL6_X OX=1201290 GN=queF PE=3 SV=1
MSASKKSIKQTKTKSKAKQSPKGRNVKELDAFALGSANTEYPDTYAPDVLEAFDNKNPGSDAWTTFVCTEFTSLCPKTGQPDFARIYINYIADKKMVESKSLKLYLFSFRNHGDFHEDCVQKICDDLTKLMKPKYVEVIGEFTPRGGICIYPYASNSNNKKIYKDIRAKRFSEYAPGKYTMDLSKIY

SEQ ID NO: 44400 - protein, 185 aa, Bacteriovorax sp.
  misc_feature (1)..(185): tr|T0SKT1|T0SKT1_9PROT NADPH-dependent 7-cyano-7-deazag uanine reductase OS=Bacteriovorax sp. Seq25_V OX=120128 8 GN=queF PE=3 SV=1
MAKSLGKKTQTKVGQKKINKGRDAKELSAHILGSAHTEYPSTYSPESLESFPNKNPGKDAWTTFVCTEFTSLCPKTNQPDFARIYINYIADKDMVESKSLKLYLFSFRNHGDFHEDCVQKICDDLTALMNPKYLEVIGEFTPRGGIAIYPYAQSSNKQKKYKDLKDKRFFDYAPGKYSMELSKIY

SEQ ID NO: 44401 - protein, 181 aa, Bacteriovorax stolpii
  misc_feature (1)..(181): tr|A0A2K9NT06|A0A2K9NT06_9PROT NADPH-dependent 7-cyano- 7-deazaguanine reductase OS=Bacteriovorax stolpii OX=96 0 GN=queF PE=3 SV=1
MKKSKNTASKSPRQGQKSETRKAELKSFSLGESHTDYPTTYSPEVLEAFDNKNPGKTAWTTFVCTEFTSLCPKTSQPDFAKIFINYIADKKMVESKSLKLYLFSFRNHGDFHEDCVQKICDDLVKLMNPHYIEVIGEFTPRGGIAIFPFASYGSKKFEKLKDERFMNYAPGKYSMELSKLY

SEQ ID NO: 44402 - protein, 261 aa, Unknown
  misc_feature (1)..(261): tr|A0A2E5IQ96|A0A2E5IQ96_9BACT QueF_N domain-containing protein OS=bacterium OX=1869227 GN=CL658_01950 PE=4 SV =1
MKQKDLDSSPLGKIVNTPEKYNKDILVAIQRNLDYSFKAYGMDRWTAYELSWLNKAGIPQIRICEISYNASSSAIIESKSLKLYFNAFNNSHYDSEKTVLKTIQNDLQDKVKSTVNVSFRTVQDESINPYKQMFQIEESVTQIDSFNAFKFHDNNVEETLYTHIYRSLCPVTNQPDFATLFITYSGKQLDKQTLFNYLISSRNKNNFHEECISTIFNDLLNTKKIKELTVQGSFLRRGGIDITPIRSTLKSYKIIPRISLQ

SEQ ID NO: 44403 - protein, 118 aa, Unknown
  misc_feature (1)..(118): tr|A0A521Q2Q7|A0A521Q2Q7_9BACT NADPH-dependent 7-cyano- 7-deazaguanine reductase OS=bacterium OX=1869227 GN=que F PE=3 SV=1
MPTTPSKKIETFSSPRPGRDYEISMECPEFTCVCPRTGQPDFATIRIRYVPDQLCVELKSLKLYLWSFREEGAFHEDVINRILDDLVEACHPRSMTVAGDFNVRGGIHTVVTAEHKAK

SEQ ID NO: 44404 - protein, 139 aa, Unknown
  misc_feature (1)..(139): tr|A0A2M7GBL3|A0A2M7GBL3_9BACT NADPH-dependent 7-cyano- 7-deazaguanine reductase OS=bacterium (Candidatus Black allbacteria) CG17_big_fil_post_rev_8_21_14_2_50_48_46 O X=2014261 GN=queF PE=3 SV=1
MSKKLKKQDLKILGKTTEYPQRPEDAVLETFPNPAPDRDYLISLDCPEFTTLCPITGQPDFATIEIHYVPNQKCVESKALKLYLFSFRNIGSFHEAVTNRILDDLVKAMEPRWIQVKGNFKARGGIAINVRVEKGQNPL

SEQ ID NO: 44405 - protein, 133 aa, Unknown
  misc_feature (1)..(133): tr|A0A523VX46|A0A523VX46_9BACT NADPH-dependent 7-cyano- 7-deazaguanine reductase OS=bacterium (Candidatus Stahl bacteria) OX=2528828 GN=queF PE=3 SV=1
MMKYTKKHAISGLREKMPKLEVLPNQFKNYKITIVIPEYTSLCPRTGLPDDGTITIEYEPDNYFVELKSLKYYILAYRNLGIFYENAVNRILKDFVKAVKPQWAIVRGEFNPRGGIKSIVEAKFSTVHPVRKS

SEQ ID NO: 44406 - protein, 165 aa, Unknown
  misc_feature (1)..(165): tr|A0A3A9FFN1|A0A3A9FFN1_9BACT NADPH-dependent 7-cyano- 7-deazaguanine reductase OS=bacterium 1XD42-54 OX=23201 10 GN=queF PE=3 SV=1
MQGRTHEELKDITLLGNQKTRYQTDYAPEVLETFPNKHPDNDYFVKFNCPEFTSLCPMTGQPDFATIYISYVPGARMVESKSLKLYLFSFRNHGDFHEDCVNIIMKDLIRLMDPKYIEVWGKFTPRGGISIDPYCNYGKPGTCWEQVALDRLTHHDMYPEKIDNR

SEQ ID NO: 44407 - protein, 163 aa, Unknown
  misc_feature (1)..(163): tr|A0A3A8YWN3|A0A3A8YWN3_9BACT NADPH-dependent 7-cyano- 7-deazaguanine reductase OS=bacterium 1xD8-6 OX=2320116 GN=queF PE=3 SV=1
MAKREEENTITLLGNQNTKYADNYAPEVLETFLNKHPDNDYFVKFNCPEFTSLCPITGQPDFANIIISYVPAQKMVESKSLKLYLFSFRNHGDFHEDCVNIIMKDLIRLMEPKYIEVWGKFTPRGGISIDPYCNYGMPGTKWEEVARDRLFHHDMYPERVDNR

SEQ ID NO: 44408 - protein, 272 aa, Unknown
  misc_feature (1)..(272): tr|A0A0S4M411|A0A0S4M411_9BACT 7-cyano-7-deazaguanine r eductase OS=bacterium 2013Arg42i OX=1561003 GN=queF PE= 4 SV=1
MDFSKTRLGKFYPVPDEYSSDLLDVVGRGSEDRSFFTGYDIWWVHELTWLNSDGFPCRACAKLIIPSTSDFLVESKSAKYYFNSFRFTSFATLGLLRDTIVSDFSLALGCRIGCYIEGFSYNVGIPVNVGSCLDDHEIEIGGYGKEISRHCLKLERGDSRHVRCYTNLFLSHCPVTSQPDLATAVVDCDSAPFNSEGLIKYLLSYRRFSNFNEACCDWIFSDLIELYSPKHLVVAMFYMRRGGITIIPIRHGGTSVDMSVLKDILGYEVPSW

SEQ ID NO: 44409 - protein, 148 aa, Unknown
  misc_feature (1)..(148): tr|A0A1H9N969|A0A1H9N969_9BACT NADPH-dependent 7-cyano- 7-deazaguanine reductase OS=bacterium A52C2 OX=1855383 GN=queF PE=3 SV=1
METLQLGKAVEQPSSPEDAQLDRVPNPHVDTDYVTRFTAPEFTSLCPVTGQPDFAHLVIDYVPDRWLVESKSLKLFLTSFRNHGAFHEDCTVSIGRRLVSLLEPRYLRIAGYWYPRGGIPIDVFWQTGEVPKAIWLPDTGVAPYRGRG

SEQ ID NO: 44410 - protein, 119 aa, Unknown
  misc_feature (1)..(119): tr|A0A1V5T6F0|A0A1V5T6F0_9BACT NADPH-dependent 7-cyano- 7-deazaguanine reductase OS=bacterium ADurb.Bin270 OX=1 866926 GN=queF PE=3 SV=1
MTTKPSSELATFPNPNPERNYEIFMDCPEFTCLCPVTSQPDFARIKIRYIPDDLCVELKSLKLYLWSYRNEGAFHEAVTNKIANDIVKTISPRWLEITGEFNVRGGITTSVVVTHGKKV

SEQ ID NO: 44411 - protein, 180 aa, Unknown
  misc_feature (1)..(180): tr|A0A1V5PEH3|A0A1V5PEH3_9BACT NADPH-dependent 7-cyano- 7-deazaguanine reductase OS=bacterium ADurb.Bin363 OX=1 866927 GN=queF PE=3 SV=1
MNKRMVIRRRSEKNYSSSLPISYHILTGQIKYNTIRAMKKSSVYKDLTLLGSFIKQYPGKPSREILETFPNKYPENKFLVEFSQIGEFTSICPVTGQPDFADIIIKYIPAEKLIEAKSLKIYLMAYRKEEDFGEFIANRIMEDIWYVCKPLWIEVTASFKPRGGIGWKTVTSKGKETIMP

SEQ ID NO: 44412 - protein, 186 aa, Unknown
  misc_feature (1)..(186): tr|A0A1V5MDC9|A0A1V5MDC9_9BACT NADPH-dependent 7-cyano- 7-deazaguanine reductase OS=bacterium ADurb.Bin425 OX=1 866929 GN=queF PE=3 SV=1
MAKKANSKKVQATVAASAQPAHDPEVHEAKEKNNKEKNGHKQKKQFKELGKETAAVKQNYDNPDPEILEVFDNPFNDKKANRNNVCGTIHIEAPEFTTVCPITGQPDFANIVIDYCPDKLCVESKSLKLYLGAFRQLPEFHEACVNRIANDLIDKLKPLSLTVEGRFTPRGGIPFWPKAFYEKSRK

SEQ ID NO: 44413 - protein, 118 aa, Unknown
  misc_feature (1)..(118): tr|A0A1V5LXM4|A0A1V5LXM4_9BACT NADPH-dependent 7-cyano- 7-deazaguanine reductase OS=bacterium ADurb.Bin429 OX=1 866930 GN=queF PE=3 SV=1
MPTAPSKALETFPNPNPDRDFTIQITCPEFTCLCPKTGQPDFATITITYVPDELCLELKSLKLYFWSFRDEGAFHEAVTNQILDELAAACRPRRMTVVGDFYVRGGLHTVVTAEYVKT

SEQ ID NO: 44414 - protein, 136 aa, Unknown
  misc_feature (1)..(136): tr|A0A1V5LKW3|A0A1V5LKW3_9BACT NADPH-dependent 7-cyano- 7-deazaguanine reductase OS=bacterium ADurb.Bin431 OX=1 866931 GN=queF PE=3 SV=1
MDELKRGQREILEAKLEVFENRYPGRDYVITISDPEFSCLCPRTGYPDFATVEIRYVPDQYCLELKALKLYINKFRDRGIFHEEAVNEILEALVEVCRPRWMAVHGDFNPRGNIHTRVDAEYKAPGFDKKRLASGY

SEQ ID NO: 44415 - protein, 126 aa, Unknown
  misc_feature (1)..(126): tr|A0A2H6EGB8|A0A2H6EGB8_9BACT NADPH-dependent 7-cyano- 7-deazaguanine reductase OS=bacterium BMS3Abin03 OX=200 5711 GN=queF PE=3 SV=1
MEDKIKLLETFENQYPDRDYSIIHEAPEFTSLCPKTGQPDFATIVVEYVPDKLCIELKSLKLYLNTYRNDGIFYESVTNKILDDLVTVCKPRYMIVTAEFNVRGGISSIIETEYKNPEFFGSENFN

SEQ ID NO: 44416 - protein, 124 aa, Unknown
  misc_feature (1)..(124): tr|A0A2H6EMX7|A0A2H6EMX7_9BACT NADPH-dependent 7-cyano- 7-deazaguanine reductase OS=bacterium BMS3Abin04 OX=200 5712 GN=queF PE=3 SV=1
MEDKKKLLETFENQYPERDYLITHTAPEFTSLCPKTGQPDFATMILEYIPDKLCIELKSYKIYLNSYRNDGIFFESVTNTILDDLVAVCKPRFMRLTAEFNVRGGITSVIEAEYEAEDEFNNLN

SEQ ID NO: 44417 - protein, 126 aa, Unknown
  misc_feature (1)..(126): tr|A0A2H6F817|A0A2H6F817_9BACT NADPH-dependent 7-cyano- 7-deazaguanine reductase OS=bacterium BMS3Abin06 OX=200 5714 GN=queF PE=3 SV=1
MQKKKYGEKAVSKAGLEKWPNPYPDRDYTIDISFPEFTCLCPRSGYPDFATIKINYIPGKYIVELKSLKLYLNKFRDRDISHESVTNQIFDDLKKLLKPGHLEVIGDFNPRGNVKTVIQVSTQRNR

SEQ ID NO: 44418 - protein, 126 aa, Unknown
  misc_feature (1)..(126): tr|A0A2H6FAS1|A0A2H6FAS1_9BACT NADPH-dependent 7-cyano- 7-deazaguanine reductase OS=bacterium BMS3Abin07 OX=200 5715 GN=queF PE=3 SV=1
MPADKYGERAIKKSGLKLWANPHQDRDYQIDISFPEFTCLCPRSGYPDFATIKINYVPDKKIVELKSLKLFLNSFRDAYISHEDVTNVIFNELEKKLKPRYLEVTGDFNPRGNVKTVVRVSTESLK

SEQ ID NO: 44419 - protein, 141 aa, Unknown
  misc_feature (1)..(141): tr|A0A2H6FGH4|A0A2H6FGH4_9BACT NADPH-dependent 7-cyano- 7-deazaguanine reductase OS=bacterium BMS3Abin08 OX=200 5716 GN=queF PE=3 SV=1
MRPGEKAIQEARLEVWDNPTPERDYEIDITFSEFTCLCPRSGYPDFAAIRIRYVPDEKIIELKSLKLYLNSFRDRHISHEEVTNRIYGDLMTLLGPRSIEVIGDFNPRGNVKTVIRVASDSGRPERFRGMTTKRHLQTDSE

SEQ ID NO: 44420 - protein, 122 aa, Unknown
  misc_feature (1)..(122): tr|A0A2H6FT84|A0A2H6FT84_9BACT NADPH-dependent 7-cyano- 7-deazaguanine reductase OS=bacterium BMS3Abin10 OX=200 5718 GN=queF PE=3 SV=1
MKKTGYGQSEISKAKFEKWPNPSPDRDYTIDIEVPEFTCLCPRSGYPDFATIKISYVPDKYIVELKSLKLYINKFRDRSLSHESATNEIFDALKKLLKPRHLEVIGDFNPRGNVKTVVRVST

SEQ ID NO: 44421 - protein, 132 aa, Unknown
  misc_feature (1)..(132): tr|A0A2H6G2X2|A0A2H6G2X2_9BACT NADPH-dependent 7-cyano- 7-deazaguanine reductase OS=bacterium BMS3Abin11 OX=200 5719 GN=queF PE=3 SV=1
MSTKPGKELDVFDNPNSDRDYTISIRMPEFTCLCPKTGQPDFATLYLDYIPDKFCVELKALKLYIWSYRDEGTFHEAVTNTILDDLVTAASPRYLRLCARFYVRGGIYTTVTAQYSKPDWQGTIPSDPQFSD

SEQ ID NO: 44422 - protein, 153 aa, Unknown
  misc_feature (1)..(153): tr|A0A2H6IXH9|A0A2H6IXH9_9BACT NADPH-dependent 7-cyano- 7-deazaguanine reductase OS=bacterium BMS3Bbin10 OX=200 5733 GN=queF PE=3 SV=1
MTDQEEQLTQLGAEVPVPDSPEKAKLERVANPHSDTHYLARFTCPEFTSLCPVTGQPDFAHLVIDYVPGEWISESKSLKLYLASFRNHGAFHEDCTVAIGKRIVSDIEPLWLRIGGYWYPRGGMPIDVFWQTGVLPEGLWVPDQGVAAYRGRG

SEQ ID NO: 44423 - protein, 136 aa, Unknown
  misc_feature (1)..(136): tr|A0A2H6JE23|A0A2H6JE23_9BACT NADPH-dependent 7-cyano- 7-deazaguanine reductase OS=bacterium BMS3Bbin12 OX=200 5735 GN=queF PE=3 SV=1
MPSRPSKDLETFDNPHPERDYFIHIRVPEFTCLCPKTGQPDFAVLYIDYVPDRRCIELKSLKLYVWSYRDEGAFHEAVTNRILDDLVAACAPRYLRLRAKFNVRGGIYTTVTVEHRRPGWKAPAPVPVPGGPTSCQ

SEQ ID NO: 44424 - protein, 116 aa, Unknown
  misc_feature (1)..(116): tr|A0A101VUW8|A0A101VUW8_9BACT NADPH-dependent 7-cyano- 7-deazaguanine reductase OS=bacterium BRH_c32 OX=173440 0 GN=queF PE=3 SV=1
MKDKQKILEVFPNPQPDRDYTIIHTSPEFTSVCPKTGQPDFAIIDLEYIPDEVCVELKSYKFYLGSYRNDGIYFEAVTNNILNDLVAVLQPRYIKITANWNPRGGISSVVIVEHTK

SEQ ID NO: 44425 - protein, 124 aa, Unknown
  misc_feature (1)..(124): tr|A0A2M7YTJ4|A0A2M7YTJ4_9BACT NADPH-dependent 7-cyano- 7-deazaguanine reductase OS=bacterium CG_4_9_14_3_um_fi lter_65_15 OX=1975567 GN=queF PE=3 SV=1
MASQPSKDFEVFDNPNPGRDYEIEFDCPEFTCLCPLTGQPDFAHFHITYIPGQKCVELKSLKLYLWSYRNEGAFHEKVTNQILDDLVAAVRPRLMDVRGEWFVRGGITTYVTASYQDENWAEKD

SEQ ID NO: 44426 - protein, 167 aa, Unknown
  misc_feature (1)..(167): tr|A0A3A9B6L0|A0A3A9B6L0_9BACT NADPH-dependent 7-cyano- 7-deazaguanine reductase OS=bacterium D16-34 OX=2320120 GN=queF PE=3 SV=1
MSENGCSVREDEGLTLLGNQHVAYAFDYDPTLLETFENKHQDNDYFVKFNCPEFTSLCPITGQPDFATIYISYVPDVRMVESKSLKLYLFSFRNHGDFHEDCVNVIMKDLIDLMDPKYIEVWGKFLPRGGISIDPYCNYGRAGTRWEEVAWQRLSQHDLHPEMVDNR

SEQ ID NO: 44427 - protein, 164 aa, Unknown
  misc_feature (1)..(164): tr|A0A3A8WBL2|A0A3A8WBL2_9BACT NADPH-dependent 7-cyano- 7-deazaguanine reductase OS=bacterium D16-59 OX=2320098 GN=queF PE=3 SV=1
MENQRGQEQSITLLGSQNTRYPDNYAPEVLETFINKHPDNDYFVKFNCPEFTSLCPITGQPDFANIVISYVPQEKMVESKSLKLYLFSFRNHGDFHEDCVNIIMKDLIHLMEPKYIEVWGKFTPRGGISIDPYCNYGKPGTPWEDVAKTRLFQHDMYPERVDNR

SEQ ID NO: 44428 - protein, 157 aa, Unknown
  misc_feature (1)..(157): tr|A0A3A9AZH3|A0A3A9AZH3_9BACT NADPH-dependent 7-cyano- 7-deazaguanine reductase OS=bacterium D16-63 OX=2320119 GN=queF PE=3 SV=1
MTDALKQLGSATAYPTDYDPAVLEAFQNKHPGRDYFVKFNCPEFTSLCPITGQPDFATLYISYVPDQRMVESKSLKLYLFSFRNHGAFHEDCVNVIMDDLIALMEPRYIEVWGKFLPRGGLSIDPYCNYGKPGTRWEAVAADRLANHDLHPETVNNR

SEQ ID NO: 44429 - protein, 124 aa, Unknown
  misc_feature (1)..(124): tr|A0A2G6G493|A0A2G6G493_9BACT NADPH-dependent 7-cyano- 7-deazaguanine reductase OS=bacterium DOLZORAL124_64_63 OX=2044883 GN=queF PE=3 SV=1
MATQPSKELDVFDNPNPERDYEIEFDCPEFTCLCPLTGQPDFAHFRISYVPNEKCVELKSLKLYLWSYRNEGAFHEKVTNKILDDLVDAVQPRMMEVKGEWFVRGGITTWVTASHVDENWGSPA

SEQ ID NO: 44430 - protein, 137 aa, Unknown
  misc_feature (1)..(137): tr|A0A202DLF8|A0A202DLF8_9BACT NADPH-dependent 7-cyano- 7-deazaguanine reductase OS=bacterium E08(2017) OX=1932 693 GN=queF PE=3 SV=1
MPTKKTKYDGITLLKQNDTNFPNSPSKAKLESFKNSHPKRPYTIEFDCPEFTCICPITGQPDFGHITLEYIPDKLCVESKSLKLYLHSYRNHGAFHEEVINKILDDVVKAINPREAIVTGEFNPRGGIAINVQAVYP

SEQ ID NO: 44431 - protein, 129 aa, Escarpia laminata
  misc_feature (1)..(129): tr|A0A497TXH1|A0A497TXH1_9BACT NADPH-dependent 7-cyano- 7-deazaguanine reductase OS=bacterium endosymbiont of E scarpia laminata OX=1221601 GN=queF PE=3 SV=1
MPSQPSKELETFDNPRPERDYTIRISIPEFTCLCPKTGQPDFAEMTLEYVPDKQCVELKALKMYIWSFREEGAFHEAITNEILSDLVAATQPRYMRLTAEFNVRGGIYTTVVADHKADDWTAPDPVTLP

SEQ ID NO: 44432 - protein, 131 aa, Bathymodiolus sp.
  misc_feature (1)..(131): tr|A0A483AIB9|A0A483AIB9_9BACT NADPH-dependent 7-cyano- 7-deazaguanine reductase OS=bacterium endosymbiont of B athymodiolus sp. 5 South OX=1181670 GN=queF PE=3 SV=1
MSSQASKTLEVFDNPNRARDYVIQIELPEFTCLCPKTGQPDFATLHLEYIADRDCVELKSLKMYIWSFRDEGAFHEAVTNQILEDLVAATNPRFMRLKAIFNVRGGVYTTVIAEHQQSEWQPKPSVDLKHI

SEQ ID NO: 44433 - protein, 157 aa, Unknown
  misc_feature (1)..(157): tr|A0A132HTH2|A0A132HTH2_9BACT NADPH-dependent 7-cyano- 7-deazaguanine reductase OS=bacterium F083 OX=1768114 G N=queF PE=3 SV=1
MRTLSELEDLRSLGNGHTDYLTDYAPSVLETFENQHVDHDYLVTLNCPEFTTLCPKTGQPDFARIVINYIPDRMMVESKSLKLYLFSFRNHGDFHEDCVNIILNDLVQLMQPRYIEVVGLFTPRGGISIQPFANYADAQHQTLRQHRIEAQMDRSAQ

SEQ ID NO: 44434 - protein, 140 aa, Unknown
  misc_feature (1)..(140): tr|A0A202DIF4|A0A202DIF4_9BACT NADPH-dependent 7-cyano- 7-deazaguanine reductase OS=bacterium F11 OX=1932698 GN =queF PE=3 SV=1
MKTKLGYSSRHAKAGINAKMPRIECFDNQYSNDYQISISIPEYTSICPKTQLPDFGTLIITYCPDKKIMELKSLKMYVLKYRSLGIFYENAVNKILNDVVTACLPRWAIVRGEFSSRGGIKSSVEVNYNGLLGKRIKNRR

SEQ ID NO: 44435 - protein, 143 aa, Unknown
  misc_feature (1)..(143): tr|A0A2H5VKT7|A0A2H5VKT7_9BACT NADPH-dependent 7-cyano- 7-deazaguanine reductase OS=bacterium HR08 OX=2035403 G N=queF PE=3 SV=1
MSEYTEEHARAGLEAELPKIECWPNQFKGYEITIVIPEYTSVCPRTGLPDFGTITIRYEPDQWCVELKSLKYYILGYRQLGIFYENAVNRILRDFVAACRPVWAEVTGEFNIRGGMRSIVQARYRARAESSVEGERATSEPRP

SEQ ID NO: 44436 - protein, 135 aa, Unknown
  misc_feature (1)..(135): tr|A0A2H5VQB0|A0A2H5VQB0_9BACT NADPH-dependent 7-cyano- 7-deazaguanine reductase OS=bacterium HR09 OX=2035404 G N=queF PE=3 SV=1
MVQAEGKTFPFVGEEAIRPDFLETFAYEYPQREAEITIETDEWNCVCPFSGLPDFGTLVIRYVPDRLCLELKSLKYYLTSFRQVGIYQEHAANRLLEDLVRAVQPKRMEVTLDYRLRGGIHTVVTVRYPDAGGKA

SEQ ID NO: 44437 - protein, 135 aa, Unknown
  misc_feature (1)..(135): tr|A0A2H5VW30|A0A2H5VW30_9BACT NADPH-dependent 7-cyano- 7-deazaguanine reductase OS=bacterium HR10 OX=2035405 G N=queF PE=3 SV=1
MGEYTEEHARAGLEVELPKIECWPNQFKGYEITIVIPEYTSVCPRTGLPDFGTITIRYEPDEWCVELKSLKYYILGYRQLGIFYENAVNRILRDFVAACRPVWAEVTGEFNVRGGMRSIVCARYRARTERSASGS

SEQ ID NO: 44438 - protein, 125 aa, Unknown
  misc_feature (1)..(125): tr|A0A2H5WJB1|A0A2H5WJB1_9BACT NADPH-dependent 7-cyano- 7-deazaguanine reductase OS=bacterium HR13 OX=2035408 G N=queF PE=3 SV=1
MEKKYGELAIESAKLEPWENPSPERDYMIEITFPEFSCLCPRSGYPDYATIKIRYIPDKYIVELRSLKLWLNKFRNRYISHEQATNEIYTALYETLRPRFLEVIGDFNPRGNVHTVIKVRSDGNY

SEQ ID NO: 44439 - protein, 136 aa, Unknown
  misc_feature (1)..(136): tr|A0A2H5WK36|A0A2H5WK36_9BACT NADPH-dependent 7-cyano- 7-deazaguanine reductase OS=bacterium HR14 OX=2035409 G N=queF PE=3 SV=1
MPENYWLPRSGPMPRPRSIAEAVEVLKHEAFPAPGVSKVRFHAREFTAICPRSGQPDFGEVIIEYIPNRLCLESKALKFYLWAYRDEGAYAESLAARIADDIVAAIQPRYVRVVVRQYPRGGIEIEAEAERSTENS

SEQ ID NO: 44440 - protein, 141 aa, Unknown
  misc_feature (1)..(141): tr|A0A2H5WW17|A0A2H5WW17_9BACT NADPH-dependent 7-cyano- 7-deazaguanine reductase OS=bacterium HR15 OX=2035410 G N=queF PE=3 SV=1
MSVLQEDFWLPRSGPMPRPKSVAEAVEVLRREAFPSPGVSQVRFHAREFTSICPRSGQPDFGEVIIEYAPNKLCLESKSLKFYLWAFREEAGYAEGLAARIADDLYEVLQPRWVRVVVRQYPRGGIEIEAEALRPSQSETL

SEQ ID NO: 44441 - protein, 118 aa, Unknown
  misc_feature (1)..(118): tr|A0A2H5X2R9|A0A2H5X2R9_9BACT NADPH-dependent 7-cyano- 7-deazaguanine reductase OS=bacterium HR16 OX=2035411 G N=queF PE=3 SV=1
MDRNILEVFDNPYPDRDYLVKHVCPEFTSVCPKTGNPDFGTITIEYVPDKKCVELKSLKYYFFAYRNQGIFYEAVVNKILDDLVAVCRPRRMTVTGEFNVRGGIYSVVTASYVAGGEK

SEQ ID NO: 44442 - protein, 168 aa, Unknown
  misc_feature (1)..(168): tr|A0A2H5XGK3|A0A2H5XGK3_9BACT NADPH-dependent 7-cyano- 7-deazaguanine reductase OS=bacterium HR18 OX=2035413 G N=queF PE=3 SV=1
MTEPERQAWAEKLAALREEALLHTEQALAYMARYGIRPEGHIQPFLPPAARQQHIDRLPYEHAVRQVVVYETEPGEFSAVCPFSGLPDYGVLRIEYVPGSWILELKSLKYYLISWRHIGVTQEDVTAMVYQDVMRHLEDPEYLKVTTVYNVRGGIRTTCTIDSREQRR

SEQ ID NO: 44443 - protein, 118 aa, Unknown
  misc_feature (1)..(118): tr|A0A2H5XW34|A0A2H5XW34_9BACT NADPH-dependent 7-cyano- 7-deazaguanine reductase OS=bacterium HR20 OX=2035415 G N=queF PE=3 SV=1
MSTPPIETFPNPAPNRRYVITHVNPEFTSVCPKTGLPDFGTVTIRYIPRERCIELKSLKYYYLSYRNEGIFYEAVTNKILDDLVAACDPEEMTVTTEWRTRGGIHSIIEASYHRSQQQ

SEQ ID NO: 44444 - protein, 122 aa, Unknown
  misc_feature (1)..(122): tr|A0A2H5Y1G9|A0A2H5Y1G9_9BACT NADPH-dependent 7-cyano- 7-deazaguanine reductase OS=bacterium HR21 OX=2035416 G N=queF PE=3 SV=1
MAVQLETFPNPKPGRRYLITHINPEFTSVCPRTGLPDFGTVTIRYVPDKLCLELKSLKYYFLQYRNMGIFYEDVTNRILDDLVAACDPLEMEVITEWNTRGGMRSVIHARYERPPASAEPHE

SEQ ID NO: 44445 - protein, 144 aa, Unknown
  misc_feature (1)..(144): tr|A0A2H5YAK3|A0A2H5YAK3_9BACT NADPH-dependent 7-cyano- 7-deazaguanine reductase OS=bacterium HR23 OX=2035418 G N=queF PE=3 SV=1
MARIPDLQERYERLDRKLAVKGEEAIDTSCLLAFDYEYPHQPAEVVIETDEFTAVCPWTGLPDYGRLTITYVPREKCVELKSLKYYLLSFRDVGIVQEHAANRILQDLVALCRPRWIKVCLDYKVRGGIHTTVTVEYREPEAER

SEQ ID NO: 44446 - protein, 127 aa, Unknown
  misc_feature (1)..(127): tr|A0A2H5Z064|A0A2H5Z064_9BACT NADPH-dependent 7-cyano- 7-deazaguanine reductase OS=bacterium HR27 OX=2035422 G N=queF PE=3 SV=1
MPTQPSKELERIPNPKPERDYEIEITTNEFTCVCPRTGQPDFATITIRYVPDQWIVELKSLKLYLWSFRNEGHYHEEVTNTILDDLVRTLQPRRMTVIADFNIRGGLHTVVTARYERTTEEIRAAAD

SEQ ID NO: 44447 - protein, 127 aa, Unknown
  misc_feature (1)..(127): tr|A0A2H5Z2E0|A0A2H5Z2E0_9BACT NADPH-dependent 7-cyano- 7-deazaguanine reductase OS=bacterium HR28 OX=2035423 G N=queF PE=3 SV=1
MPTQPSKELERIPNPKPERDYEIEITTNEFTCVCPRTGQPDFATITIRYVPDQWIVELKSLKLYLWSFRNEGHYHEEVTNTILDDLVRTLQPRRMTVIADFNIRGGLHTVVTARYERSAGELQAAAD

SEQ ID NO: 44448 - protein, 125 aa, Unknown
  misc_feature (1)..(125): tr|A0A2H5ZAK6|A0A2H5ZAK6_9BACT NADPH-dependent 7-cyano- 7-deazaguanine reductase OS=bacterium HR29 OX=2035424 G N=queF PE=3 SV=1
MGENTFRTDGTIDFFENRHPERDYVIEFTAPEFTSVCPMTGLPDFGTLTIRYVPDRRCIELRSFKYYLHTYRNRGIFYEDVVNQVLDDIVAAVQPRSCTVIGDFNTRGGISARVTATYTRSEGAK

SEQ ID NO: 44449 - protein, 112 aa, Unknown
  misc_feature (1)..(112): tr|A0A2H6A461|A0A2H6A461_9BACT NADPH-dependent 7-cyano- 7-deazaguanine reductase OS=bacterium HR33 OX=2035428 G N=queF PE=3 SV=1
MLKAEAFPAPEVTEVTLHATEFTSICPRTGQPDFGSVVIRYRPRRRCLESKALKYYLWSFRNEGAFCESLAARIADDIVFAVNPEWVRVEVHQNIRGGIAIVAAAERGKPQR

SEQ ID NO: 44450 - protein, 155 aa, Unknown
  misc_feature (1)..(155): tr|A0A2H6AHX1|A0A2H6AHX1_9BACT NADPH-dependent 7-cyano- 7-deazaguanine reductase OS=bacterium HR36 OX=2035431 G N=queF PE=3 SV=1
MSASPAAKSSSDLQPSAAQLETFPNAYPGRDYIVEIECPEFTSVCPRTGQPDFGTITFRYIPDKLCVELKSLKLYLQRYRNVGIFYETLVNRLLDDFVAACKPRHCEVIAEFNPRGGMTTTVSAVYVASTEEEDEQETCPECEERPSRRRRVRKR

SEQ ID NO: 44451 - protein, 117 aa, Unknown
  misc_feature (1)..(117): tr|A0A2H6AK79|A0A2H6AK79_9BACT NADPH-dependent 7-cyano- 7-deazaguanine reductase OS=bacterium HR37 OX=2035432 G N=queF PE=3 SV=1
MAKLETFKNRYQGREYEIEITCPEFTCLCPITGQPDFAVIRIKYVPDELCIELKSLKLYIFSYRNVGEFHEHVTNKILDDIVEACKPIRAEVIGDFNVRGGIKTVVKATYSRDKDSK

SEQ ID NO: 44452 - protein, 154 aa, Unknown
  misc_feature (1)..(154): tr|A0A2H6AYK8|A0A2H6AYK8_9BACT NADPH-dependent 7-cyano- 7-deazaguanine reductase OS=bacterium HR40 OX=2035435 G N=queF PE=3 SV=1
MAGEAYGGLTQLGRPTVLPASPGEAVLETVPNPHPGTLYLVRFTCPEFTCLCPITGQPDFAHFVIDYVPRERIVESKSLKLYLASFRNHGSFHEACTVGIGKRLVEVLAPLWLRIGGYWYPRGGIPIDVFWQTGEPPPGLWLPDQGVPPYRGRG

SEQ ID NO: 44453 - protein, 157 aa, Unknown
  misc_feature (1)..(157): tr|A0A3L8A4G7|A0A3L8A4G7_9BACT NADPH-dependent 7-cyano- 7-deazaguanine reductase OS=bacterium J10(2018) OX=2320 122 GN=queF PE=3 SV=1
MSRSDDEMPGVTLLGNQGVQYPDRYAPEVLETFVNKHPDNEYLVTFTCPEFTSLCPKTGQPDFARIIISYIPREKMVESKSLKLYLFSFRNHGDFHEDCVNIIMKDLVKLMDPKYIEVTGLFTPRGGIAIYPFANYGDAEHQNMVKARMLASFRNDF

SEQ ID NO: 44454 - protein, 120 aa, Unknown
  misc_feature (1)..(120): tr|A0A202DUL3|A0A202DUL3_9BACT NADPH-dependent 7-cyano- 7-deazaguanine reductase OS=bacterium J17 OX=1932695 GN =queF PE=3 SV=1
MSTKPSKELDSFPNPRPGRIYDIDFSCPEFTCVCPATGQPDFATINISYVPDQLCVELKSLKLYLWSYRDEGAFHEAVTNQILDDLVAAISPLKAEVEGDFYVRGGIHTVVTARYDKSQD

SEQ ID NO: 44455 - protein, 272 aa, Unknown
  misc_feature (1)..(272): tr|A0A4S1HX50|A0A4S1HX50_9BACT NADPH-dependent 7-cyano- 7-deazaguanine reductase QueF OS=bacterium M00.F.Ca.ET. 141.01.1.1 OX=2563898 GN=queF PE=3 SV=1
MNTPQDSSLGREVSYPSQYDPGLLFPIPRSGARAEIGLDDAALPFVGHDRWHAFELSWLDPRGKPQVAVATVQVPCTSPRLIESKSFKLYLNSLNSTRIDSAEALRSRIVADLSACAGAPVQVEFGLPGLRETPLGESIDGLDVEIDCYGPPQADFLAADAGEVVEETLVSALLKSNCPVTGQPDWATVSLRYRGPKIDRAGLLRYLVSYREHAEFHEQCVERIFSEVSARCQPHWLEVEARYTRRGGLDINPWRASPGITAPAATYRELRQ

SEQ ID NO: 44456 - protein, 153 aa, Unknown
  misc_feature (1)..(153): tr|A0A4S1HRS9|A0A4S1HRS9_9BACT NADPH-dependent 7-cyano- 7-deazaguanine reductase OS=bacterium M00.F.Ca.ET.141.0 1.1.1 OX=2563898 GN=queF PE=3 SV=1
MIDTKNLTQLGTHVETPQSPEAAVLETVPFQRGDGPPAIVRFTVPEFTSLCPVTGQPDFAHIVIDYAPDAALVESKSLKLFMTSFRNHGAFHEDCTVMIGRRIVAATKPLWLRIGGYWYPRGGIPIDVFWQTGTPPEGAWLPDTGVAPYRGRG

SEQ ID NO: 44457 - protein, 153 aa, Unknown
  misc_feature (1)..(153): tr|A0A4S1AXI5|A0A4S1AXI5_9BACT NADPH-dependent 7-cyano- 7-deazaguanine reductase OS=bacterium M00.F.Ca.ET.146.0 1.1.1 OX=2563899 GN=queF PE=3 SV=1
MTDAKNLTQLGKHVETPQSPEQAVLEAVPFQRGDGPPAIVRFTCPEFTSLCPVTGQPDFAHIVIDYAPDQTLVESKSLKLFMTSFRNHGAFHEECTVMIGRRIVEVTKPLWLRVGGYWFPRGGIPIDVFWQTGAPPKDVWLPDTGVAPYRGRG

SEQ ID NO: 44458 - protein, 153 aa, Unknown
  misc_feature (1)..(153): tr|A0A4S1BKG6|A0A4S1BKG6_9BACT NADPH-dependent 7-cyano- 7-deazaguanine reductase OS=bacterium M00.F.Ca.ET.152.0 1.1.1 OX=2563900 GN=queF PE=3 SV=1
MTDAKNLTQLGKYVETPQSPEQAVLETVPFQRGDGPPAIVRFACPEFTSLCPVTGQPDFAHIVIDYAPDAALVESKSLKLFMTSFRNHGAFHEDCTVMIGRRIVAATTPLWLRIGGYWYPRGGIPIDVFWQTGAPPEGAWLPDTGVAPYRGRG

SEQ ID NO: 44459 - protein, 274 aa, Unknown
  misc_feature (1)..(274): tr|A0A4V3NKW2|A0A4V3NKW2_9BACT NADPH-dependent 7-cyano- 7-deazaguanine reductase QueF OS=bacterium M00.F.Ca.ET. 155.01.1.1 OX=2563901 GN=queF PE=3 SV=1
MTPEQSPLGKASTYTEQYDASLLFPIARSHAREAIGISAQLPFFGTDIWNAYELSWLNARGKPQIAVATFFVPADSPNIVESKSFKLYLGSFAQTAFESIEAVRDTIRRDVSASCGSTVSVYLTAPQDFGKLQMEEFEGTPLDRLDLDADVYTPDASLLKAALDEAPVEETVFSNLLKSNCPVTGQPDWGSVQIHYVGPQIDHAGLLRYIISYRNHTGFHEQCVEKIFIDVLKACRPVKLAVYARYTRRGGLDINPFRTNYNLPMPDNMRLARQ

SEQ ID NO: 44460 - protein, 153 aa, Unknown; identical to SEQ ID NO: 44457
  misc_feature (1)..(153): tr|A0A4S0ZNM8|A0A4S0ZNM8_9BACT NADPH-dependent 7-cyano- 7-deazaguanine reductase OS=bacterium M00.F.Ca.ET.156.0 1.1.1 OX=2563902 GN=queF PE=3 SV=1

SEQ ID NO: 44461 - protein, 153 aa, Unknown; identical to SEQ ID NO: 44456
  misc_feature (1)..(153): tr|A0A4S1AKY1|A0A4S1AKY1_9BACT NADPH-dependent 7-cyano- 7-deazaguanine reductase OS=bacterium M00.F.Ca.ET.156.0 1.1.1 OX=2563902 GN=queF PE=3 SV=1

SEQ ID NO: 44462 - protein, 153 aa, Unknown; identical to SEQ ID NO: 44457
  misc_feature (1)..(153): tr|A0A4S0WWB4|A0A4S0WWB4_9BACT NADPH-dependent 7-cyano- 7-deazaguanine reductase OS=bacterium M00.F.Ca.ET.157.0 1.1.1 OX=2563903 GN=queF PE=3 SV=1

SEQ ID NO: 44463 - protein, 153 aa, Unknown; identical to SEQ ID NO: 44457
  misc_feature (1)..(153): tr|A0A4S0VZF7|A0A4S0VZF7_9BACT NADPH-dependent 7-cyano- 7-deazaguanine reductase OS=bacterium M00.F.Ca.ET.159.0 1.1.1 OX=2563904 GN=queF PE=3 SV=1

SEQ ID NO: 44464 - protein, 153 aa, Unknown; identical to SEQ ID NO: 44458
  misc_feature (1)..(153): tr|A0A4V3S8J4|A0A4V3S8J4_9BACT NADPH-dependent 7-cyano- 7-deazaguanine reductase OS=bacterium M00.F.Ca.ET.162.0 1.1.1 OX=2563905 GN=queF PE=3 SV=1

SEQ ID NO: 44465 - protein, 153 aa, Unknown; identical to SEQ ID NO: 44457
  misc_feature (1)..(153): tr|A0A4S0YAG7|A0A4S0YAG7_9BACT NADPH-dependent 7-cyano- 7-deazaguanine reductase OS=bacterium M00.F.Ca.ET.163.0 1.1.1 OX=2563906 GN=queF PE=3 SV=1

SEQ ID NO: 44466 - protein, 272 aa, Unknown; identical to SEQ ID NO: 44455
  misc_feature (1)..(272): tr|A0A4S0YWS8|A0A4S0YWS8_9BACT NADPH-dependent 7-cyano- 7-deazaguanine reductase QueF OS=bacterium M00.F.Ca.ET. 163.01.1.1 OX=2563906 GN=queF PE=3 SV=1

SEQ ID NO: 44467 - protein, 154 aa, Unknown; identical to SEQ ID NO: 43810
  misc_feature (1)..(154): tr|A0A4S1H975|A0A4S1H975_9BACT NADPH-dependent 7-cyano- 7-deazaguanine reductase OS=bacterium M00.F.Ca.ET.168.0 1.1.1 OX=2563907 GN=queF PE=3 SV=1

SEQ ID NO: 44468 - protein, 272 aa, Unknown; identical to SEQ ID NO: 44455
  misc_feature (1)..(272): tr|A0A4S0QIP3|A0A4S0QIP3_9BACT NADPH-dependent 7-cyano- 7-deazaguanine reductase QueF OS=bacterium M00.F.Ca.ET. 177.01.1.1 OX=2563908 GN=queF PE=3 SV=1

SEQ ID NO: 44469 - protein, 153 aa, Unknown
  misc_feature (1)..(153): tr|A0A4S0QP07|A0A4S0QP07_9BACT NADPH-dependent 7-cyano- 7-deazaguanine reductase OS=bacterium M00.F.Ca.ET.177.0 1.1.1 OX=2563908 GN=queF PE=3 SV=1
MTDAKNLTQLGKHVETPQSPEQAVLETVPFQRGDGPPAIVRFTCPEFTSLCPVTGQPDFAHIVIDYAPDKTLVESKSLKLFMTSFRNHGAFHEECTVMIGRRIVEATKPLWLRVGGYWFPRGGIPIDVFWQTGAPPEGAWLPDTGVAPYRGRG

SEQ ID NO: 44470 - protein, 154 aa, Unknown; identical to SEQ ID NO: 43810
  misc_feature (1)..(154): tr|A0A4S0MXZ3|A0A4S0MXZ3_9BACT NADPH-dependent 7-cyano- 7-deazaguanine reductase OS=bacterium M00.F.Ca.ET.179.0 1.1.1 OX=2563909 GN=queF PE=3 SV=1

SEQ ID NO: 44471 - protein, 166 aa, Unknown
  misc_feature (1)..(166): tr|A0A4S0LPU3|A0A4S0LPU3_9BACT NADPH-dependent 7-cyano- 7-deazaguanine reductase OS=bacterium M00.F.Ca.ET.180.0 1.1.1 OX=2563910 GN=queF PE=3 SV=1
MSEGRKQEDLNDITLLGNQNNKYDFDYRPDVLESFDNKHPGRDYFVKFNCPEFTSLCPITGQPDFATIYISYIPNIKMVESKSLKLYLFSFRNHGDFHEDCMNIIMNDLIDLMDPHYIEVWGKFTPRGGISIDPYTNYGRPDSKYEKMAEHRLMNHDLYPEKIDNR

SEQ ID NO: 44472 - protein, 274 aa, Unknown; identical to SEQ ID NO: 44459
  misc_feature (1)..(274): tr|A0A4S0J196|A0A4S0J196_9BACT NADPH-dependent 7-cyano- 7-deazaguanine reductase QueF OS=bacterium M00.F.Ca.ET. 191.01.1.1 OX=2563911 GN=queF PE=3 SV=1

SEQ ID NO: 44473 - protein, 154 aa, Unknown; identical to SEQ ID NO: 43810
  misc_feature (1)..(154): tr|A0A4S0GST0|A0A4S0GST0_9BACT NADPH-dependent 7-cyano- 7-deazaguanine reductase OS=bacterium M00.F.Ca.ET.194.0 1.1.1 OX=2563912 GN=queF PE=3 SV=1

SEQ ID NO: 44474 - protein, 272 aa, Unknown; identical to SEQ ID NO: 44455
  misc_feature (1)..(272): tr|A0A4S0EXC5|A0A4S0EXC5_9BACT NADPH-dependent 7-cyano- 7-deazaguanine reductase QueF OS=bacterium M00.F.Ca.ET. 199.01.1.1 OX=2563913 GN=queF PE=3 SV=1

SEQ ID NO: 44475 - protein, 153 aa, Unknown; identical to SEQ ID NO: 44456
  misc_feature (1)..(153): tr|A0A4S0FU24|A0A4S0FU24_9BACT NADPH-dependent 7-cyano- 7-deazaguanine reductase OS=bacterium M00.F.Ca.ET.199.0 1.1.1 OX=2563913 GN=queF PE=3 SV=1

SEQ ID NO: 44476 - protein, 153 aa, Unknown; identical to SEQ ID NO: 44458
  misc_feature (1)..(153): tr|A0A4R9ZL98|A0A4R9ZL98_9BACT NADPH-dependent 7-cyano- 7-deazaguanine reductase OS=bacterium M00.F.Ca.ET.205.0 1.1.1 OX=2563914 GN=queF PE=3 SV=1

SEQ ID NO: 44477 - protein, 153 aa, Unknown; identical to SEQ ID NO: 44457
  misc_feature (1)..(153): tr|A0A4R9UD62|A0A4R9UD62_9BACT NADPH-dependent 7-cyano- 7-deazaguanine reductase OS=bacterium M00.F.Ca.ET.221.0 1.1.1 OX=2563915 GN=queF PE=3 SV=1

SEQ ID NO: 44478 - protein, 153 aa, Unknown; identical to SEQ ID NO: 44457
  misc_feature (1)..(153): tr|A0A4R9UQB7|A0A4R9UQB7_9BACT NADPH-dependent 7-cyano- 7-deazaguanine reductase OS=bacterium M00.F.Ca.ET.222.0 1.1.1 OX=2563916 GN=queF PE=3 SV=1

SEQ ID NO: 44479 - protein, 153 aa, Unknown; identical to SEQ ID NO: 44457
  misc_feature (1)..(153): tr|A0A4R9TQW0|A0A4R9TQW0_9BACT NADPH-dependent 7-cyano- 7-deazaguanine reductase OS=bacterium M00.F.Ca.ET.227.0 1.1.1 OX=2563917 GN=queF PE=3 SV=1

SEQ ID NO: 44480 - protein, 274 aa, Unknown; identical to SEQ ID NO: 44459
  misc_feature (1)..(274): tr|A0A4R9RHA1|A0A4R9RHA1_9BACT NADPH-dependent 7-cyano- 7-deazaguanine reductase QueF OS=bacterium M00.F.Ca.ET. 228.01.1.1 OX=2563918 GN=queF PE=3 SV=1

SEQ ID NO: 44481 - protein, 98 aa, Unknown
  misc_feature (1)..(98): tr|A0A4R9RC98|A0A4R9RC98_9BACT NADPH-dependent 7-cyano- 7-deazaguanine reductase (Fragment) OS=bacterium M00.F. Ca.ET.229.01.1.1 OX=2563919 GN=queF PE=3 SV=1
RGDGPPAIVRFTCPEFTSLCPVTGQPDFAHIVIDYAPDQTLVESKSLKLFMTSFRNHGAFHEDCSVYIAKRLVELLQPKWLRIGAYWYPRGGIPIDVF

SEQ ID NO: 44482 - protein, 166 aa, Unknown; identical to SEQ ID NO: 44471
  misc_feature (1)..(166): tr|A0A4R9SCV1|A0A4R9SCV1_9BACT NADPH-dependent 7-cyano- 7-deazaguanine reductase OS=bacterium M00.F.Ca.ET.229.0 1.1.1 OX=2563919 GN=queF PE=3 SV=1

SEQ ID NO: 44483 - protein, 153 aa, Unknown; identical to SEQ ID NO: 44457
  misc_feature (1)..(153): tr|A0A4R9RXT5|A0A4R9RXT5_9BACT NADPH-dependent 7-cyano- 7-deazaguanine reductase OS=bacterium M00.F.Ca.ET.230.0 1.1.1 OX=2563920 GN=queF PE=3 SV=1

SEQ ID NO: 44484 - protein, 283 aa, Unknown
  misc_feature (1)..(283): tr|A0A4R9RT84|A0A4R9RT84_9BACT NADPH-dependent 7-cyano- 7-deazaguanine reductase QueF OS=bacterium M00.F.Ca.ET. 230.01.1.1 OX=2563920 GN=queF PE=4 SV=1
MKPLETHGILGQSTHYPKTYAPDMLYPIPRALGRANLALPADALSIGMDWWQVFEMSWLNSHGISQVAMARLAIPATSDYIIESKSLKLYFNSLNFTEFDNQQAVKATVEKDLSACLKTDVTLEIFEVNIANSLPISAPQGDCIDNALDNSDKKIAIVSDVDPSSLTVAHHGASDSQLQILHSHLLRSNCPVTNQPDWGTLEIQIDSQPIDRAGLLEYILSFRQHNGFHEQCVEQIFSDLTQVFVPKTLMVRAWYTRRGGIDINPCRVSDISLLPPPSRLNRQ

SEQ ID NO: 44485 - protein, 153 aa, Unknown
  misc_feature (1)..(153): tr|A0A5J4E281|A0A5J4E281_9BACT NADPH-dependent 7-cyano- 7-deazaguanine reductase OS=bacterium MnTg02 OX=2080452 GN=queF PE=4 SV=1
MADEPGEPTQLGRETPLPASPSEARLERVANPHADTHYVARFTCPEFTALCPITGQPDFAHLIIDYAPADWLLESKSLKLFLASYRNHGAFHEDCTVAIGKRIADLLVPHWLRIGGYWYPRGGIPIDVFWQTGTLPEGVWLPDQDVPPYRGRG

SEQ ID NO: 44486 - protein, 130 aa, Unknown
  misc_feature (1)..(130): tr|A0A5J4E6G2|A0A5J4E6G2_9BACT NADPH-dependent 7-cyano- 7-deazaguanine reductase OS=bacterium MnTg03 OX=2080453 GN=queF PE=4 SV=1
MSSTPSTSLETFENPQMDRDYTIRIDTPEFTCLCPITGQPDFATIQLEYIADQRCLELKSLKLYFWSYRDQGAFHEAVTNQILSDLVAAISPRFMRVSAEFNVRGGIYTQVIAEHRAENWVAPEAVVLPR

SEQ ID NO: 44487 - protein, 137 aa, Unknown
  misc_feature (1)..(137): tr|A0A5J4EDB2|A0A5J4EDB2_9BACT NADPH-dependent 7-cyano- 7-deazaguanine reductase OS=bacterium MnTg04 OX=2080454 GN=queF PE=4 SV=1
MPVNPQKPKPARPVRGLETFANPNPARDYTIRIRVPEFSCLCPKTGQPDFATLHFEYIPENLCIELKSLKNYIWSYRNEGAFHETVTNQILDDCVAAIDPRYMCLTADFNVRGGIYTTVVAEHKKPGWQAPMRIATS

SEQ ID NO: 44488 - protein, 156 aa, Unknown
  misc_feature (1)..(156): tr|A0A132GV32|A0A132GV32_9BACT NADPH-dependent 7-cyano- 7-deazaguanine reductase OS=bacterium P201 OX=1768112 G N=queF PE=3 SV=1
MSRNEQELKGVTLLGNQNTQYNYDYTPEVLETFENKHPENEYLVTLDCPEFTSLCPKTGQPDFGHLIINYIPRTLMVESKSLKLYLFSFRNHGDFHEDCVNIIMKDLVKLMDPKYLEVIGLFNPRGGISIKPFANYGDAEHQGMVKQRLMSAFHNS

SEQ ID NO: 44489 - protein, 152 aa, Unknown
  misc_feature (1)..(152): tr|A0A4Q2REM0|A0A4Q2REM0_9BACT NADPH-dependent 7-cyano- 7-deazaguanine reductase OS=bacterium RmlP001 OX=231652 7 GN=queF PE=3 SV=1
MSTFLPPTLLGQTVAQPQSPEEARLERVPNPHPGTLYLTRFTAPEFTSLCPVTGQPDFAHLVIDYVADGWLVESKALKLYLTSFRNHGAFHEDCTVRIGKDIVALLEPRWLRIGGYWYPRGGIPIDVFWQTGTPPEGLWLPDQGVPPYRGRG

SEQ ID NO: 44490 - protein, 152 aa, Unknown
  misc_feature (1)..(152): tr|A0A4Q2U5Q4|A0A4Q2U5Q4_9BACT NADPH-dependent 7-cyano- 7-deazaguanine reductase OS=bacterium RmlP026 OX=231652 8 GN=queF PE=3 SV=1
MSDPLTPTLLGQTVAQPGSPEEARLDRVPNPHPGTLYLARFTAPEFTSLCPVTAQPDFAHIVIDYVPDGWLVESKSLKMYLTSFRNHGAFHEDCTVRIGKELQSLLLPRWLRIGGYWYPRGGIPIDVFWQTGAPPEGLWLPDQGVPPYRGRG

SEQ ID NO: 44491 - protein, 125 aa, Unknown
  misc_feature (1)..(125): tr|A0A177Q1Q6|A0A177Q1Q6_9BACT NADPH-dependent 7-cyano- 7-deazaguanine reductase OS=bacterium SCGC AG-212-C10 O X=1799370 GN=queF PE=3 SV=1
MAENDYRIDGTLDTFENAFPARDYTIEFDAPEFTSVCPMTGLPDFGTIHIAYVPGERCVELRSFKYYLNAFRNRGIFYEAVVNTILDDFVAACAPRRITVTGDFKTRGGISARVTASHDSATSPR

SEQ ID NO: 44492 - protein, 129 aa, Unknown
  misc_feature (1)..(129): tr|A0A424SIP8|A0A424SIP8_9BACT NADPH-dependent 7-cyano- 7-deazaguanine reductase OS=bacterium TMED144 OX=198677 8 GN=queF PE=3 SV=1
MPKPDGKYFIFDDEGSINANFLETFSFDSSDQYIKTETNEFSAVCPFSGLPDIANVKIEYYPEGGKCIELKSLKYYFVSFRNVGIYQEGVTKRIYDDLKHALKTSKLKVTTIYNTRGGFDTTCSEGELK

SEQ ID NO: 44493 - protein, 135 aa, Unknown
  misc_feature (1)..(135): tr|A0A1Z8LXM2|A0A1Z8LXM2_9BACT NADPH-dependent 7-cyano- 7-deazaguanine reductase OS=bacterium TMED15 OX=1986651 GN=queF PE=3 SV=1
MQTNSYSDLQDHIRQIEMPNIETWQNQYADKEYTIDITISEFTAICPKTGLPDFAEIQISYVPNERCVELKSLKEYMFAYREIGIFHEHVVNKIMEDFIRDCQPRKVNIVGDFNIRGGIKTVVRANYEQSTVESE

SEQ ID NO: 44494 - protein, 118 aa, Unknown
  misc_feature (1)..(118): tr|A0A1Z9M3B0|A0A1Z9M3B0_9BACT NADPH-dependent 7-cyano- 7-deazaguanine reductase OS=bacterium TMED198 OX=198677 9 GN=queF PE=3 SV=1
MDKPLFSDLEIVDNQYGQRDYEVKINIPEFNCICPRTSLPDFATIKIKYIPNNWIVELKSLKLYIVKYRTIGIFHENVTNKILDDFVKAAQPKVIEVEGIFKARGGIDTTVLCRWPEK

SEQ ID NO: 44495 - protein, 129 aa, Unknown
  misc_feature (1)..(129): tr|A0A1Z9RWB5|A0A1Z9RWB5_9BACT NADPH-dependent 7-cyano- 7-deazaguanine reductase OS=bacterium TMED250 OX=198665 7 GN=queF PE=3 SV=1
MAKAEGKYFQFTDEDQINTEFLETFSFESPRQYIMTETDEFSAVCPFSGLPDLAYVKIEYYPEGGKCIELKSLKYYFISFRNVGIYQEGATKRIYDDLKNILKTKKIKVTTIYNTRGGFDTTCVEGKIG

SEQ ID NO: 44496 - protein, 28 aa, Unknown
  misc_feature (1)..(28): tr|A0A3R7UYL4|A0A3R7UYL4_9BACT NADPH-dependent 7-cyano- 7-deazaguanine reductase QueF (Fragment) OS=bacterium T MED46 OX=1986782 GN=CBC06_009005 PE=4 SV=1
MAKAEGKSFEFLDESHIDPSLLEVFDFD

SEQ ID NO: 44497 - protein, 118 aa, Unknown
  misc_feature (1)..(118): tr|A0A1Z8KV48|A0A1Z8KV48_9BACT NADPH-dependent 7-cyano- 7-deazaguanine reductase OS=bacterium TMED6 OX=1986783 GN=queF PE=3 SV=1
MDKTNEPHYKNLEIVPNHYEGRDYTIEVSIPEFNCVCPKTGLPDFGTIYINYIPNESIVELKSLKLYMVKFRNIGIFHEYVTNRILDDFKKACNPKKIEVIGDFNPRGGIKTVVKSQL

SEQ ID NO: 44498 - protein, 130 aa, Unknown
  misc_feature (1)..(130): tr|A0A1Z8Z010|A0A1Z8Z010_9BACT NADPH-dependent 7-cyano- 7-deazaguanine reductase OS=bacterium TMED80 OX=1986784 GN=queF PE=3 SV=1
MAKAEGKIFNYDDESKINADFLETFPFESLDQYIKTETNEFSAVCPFSGLPDLAKVRIEYFPAGGKCIELKSLKYYFTSFRSVGIYQEGATKRIYDDLSSILETKKIQITTIYNIRGGFKTTCIEGSINN

SEQ ID NO: 44499 - protein, 148 aa, Unknown
  misc_feature (1)..(148): tr|A0A0A1PBE1|A0A0A1PBE1_9BACT NADPH-dependent 7-cyano- 7-deazaguanine reductase OS=bacterium YEK0313 OX=152231 6 GN=queF PE=3 SV=1
MADLMLGKPVAMPASPEEAVLDRVPNPHQDTDYVTRFTAPEFTSLCPVTGQPDFAHLVIDFVADAWLVESKSLKLYLASFRNHGAFHEDCTVAIGKRLVALLEPRWLRIGGYWYPRGGIPIDVFWQTGEAPKGVWIPDQGVAPYRGRG

SEQ ID NO: 44500 - protein, 151 aa, Bacteroidaceae bacterium
  misc_feature (1)..(151): tr|A0A5C6HLB8|A0A5C6HLB8_9BACT NADPH-dependent 7-cyano- 7-deazaguanine reductase OS=Bacteroidaceae bacterium HV 4-6-C5C OX=2600309 GN=queF PE=3 SV=1
MSELKDQLSLLGRKTEYKQDYAPEVLEAFDNKHPENDYWVRFNCPEFTSLCPITGQPDFAEIRISYIPDIKMVESKSLKLYLFSFRNHGAFHEDCVNIIMKDLIQLMNPKYIEVTGLFTPRGGISIYPYANYGRSGTKFERMAEQRLMTRE

SEQ ID NO: 44501 - protein, 147 aa, Bacteroidales bacterium
  misc_feature (1)..(147): tr|A0A180FSI6|A0A180FSI6_9BACT NADPH-dependent 7-cyano- 7-deazaguanine reductase OS=Bacteroidales bacterium Bar b7 OX=1633203 GN=queF PE=3 SV=1
MKKELQSLGGETVYRQDYAPEALEAFTNKHQENDYWVRLNCPEFTALCPITGQPDFATIHIDYIPDVKMVESKSLKLYLFSFRTHGSFHEDCVNVIMKDLIRLMDPKYIEVRGIFTPRGGISICPYANYGRKGTKYEELAEKRLFEQ

SEQ ID NO: 44502 - protein, 156 aa, Bacteroidales bacterium
  misc_feature (1)..(156): tr|A0A4U1GGS0|A0A4U1GGS0_9BACT NADPH-dependent 7-cyano- 7-deazaguanine reductase OS=Bacteroidales bacterium OX= 2030927 GN=queF PE=3 SV=1
MRKESELEGVTLLGCQGVAYPTDYAPQLLETFENKHPENEYVVTFDCPEFTTLCPKTGQPDFGHIIISYIPRERMVESKSLKLYLFSFRNHGDFHEDCVNIIMKDLWKLMDPKYIEVKGLFMPRGGISIYPFANMGDADHQDLCKARRVAALDMKK

SEQ ID NO: 44503 - protein, 151 aa, Bacteroides acidifaciens
  misc_feature (1)..(151): tr|A0A3L8ABU6|A0A3L8ABU6_9BACE NADPH-dependent 7-cyano- 7-deazaguanine reductase OS=Bacteroides acidifaciens OX =85831 GN=queF PE=3 SV=1
MTELKDQLSLLGRKTEYKQDYAPEVLEAFDNKHPENDYWVRFNCPEFTSLCPITGQPDFAEIRISYIPDIKMVESKSLKLYLFSFRNHGAFHEDCVNIIMKDLIKLMNPKYIEVTGIFTPRGGISIYPYANYGRPGTKFEQMAEHRLMNRE

SEQ ID NO: 44504 - protein, 151 aa, Bacteroides caccae
  misc_feature (1)..(151): tr|R5UT43|R5UT43_9BACE NADPH-dependent 7-cyano-7-deazag uanine reductase OS=Bacteroides caccae CAG:21 OX=126303 7 GN=queF PE=3 SV=1
MTELKDQLSLLGRKTEYKQDYAPEVLEAFDNKHPENDYWVRFNCPEFTSLCPITGQPDFAEIRISYIPEVKMVESKSLKLYLFSFRNHGAFHEDCVNIIMKDLIKLMNPKYIEVTGIFTPRGGISIYPYANYGRPGTKFEQMAEHRLMNRE

SEQ ID NO: 44505 - protein, 151 aa, Bacteroides caccae; identical to SEQ ID NO: 44504
  misc_feature (1)..(151): tr|A0A174RSC9|A0A174RSC9_9BACE NADPH-dependent 7-cyano- 7-deazaguanine reductase OS=Bacteroides caccae OX=47678 GN=queF PE=3 SV=1

SEQ ID NO: 44506 - protein, 151 aa, Bacteroides caecimuri
  misc_feature (1)..(151): tr|A0A4S2DDR2|A0A4S2DDR2_9BACE NADPH-dependent 7-cyano- 7-deazaguanine reductase OS=Bacteroides caecimuri OX=25 16958 GN=queF PE=3 SV=1
MTELKDQLSLLGRKTEYKQDYAPEVLEAFDNKHPENDYWVRFNCPEFTSLCPITGQPDFAEIRISYIPDIKMVESKSLKLYLFSFRSHGAFHEDCVNIIMKDLITLMNPKYIEVTGIFTPRGGISIYPYANYGRPGTKFEQMAEHRLMNRE

SEQ ID NO: 44507 - protein, 167 aa, Bacteroides caecimuris; identical to SEQ ID NO: 44426
  misc_feature (1)..(167): tr|A0A3A9B832|A0A3A9B832_9BACE NADPH-dependent 7-cyano- 7-deazaguanine reductase OS=Bacteroides caecimuris OX=1 796613 GN=queF PE=3 SV=1

SEQ ID NO: 44508 - protein, 151 aa, Bacteroides caecimuris; identical to SEQ ID NO: 44506
  misc_feature (1)..(151): tr|A0A1C7H0K5|A0A1C7H0K5_9BACE NADPH-dependent 7-cyano- 7-deazaguanine reductase OS=Bacteroides caecimuris OX=1 796613 GN=queF PE=3 SV=1

SEQ ID NO: 44509 - protein, 87 aa, Bacteroides cellulosilyticus
  misc_feature (1)..(87): tr|E2NI92|E2NI92_9BACE NADPH-dependent 7-cyano-7-deazag uanine reductase (Fragment) OS=Bacteroides cellulosilyt icus DSM 14838 OX=537012 GN=queF PE=3 SV=1
MTELKDQLSLLGRKTEYKQDYAPEVLEAFDNKHPENDYWVRFNCPEFTSLCPITGQPDFAEIRISYIPDIKMVESKSLKLYLFSFRN

SEQ ID NO: 44510 - protein, 151 aa, Bacteroides cellulosilyticus
  misc_feature (1)..(151): tr|A0A412IKD7|A0A412IKD7_9BACE NADPH-dependent 7-cyano- 7-deazaguanine reductase OS=Bacteroides cellulosilyticu s OX=246787 GN=queF PE=3 SV=1
MTELKDQLSLLGRKTEYKQDYAPEVLEAFDNKHSENDYWVRFNCPEFTSLCPITGQPDFAEIRISYIPDIKMVESKSLKLYLFSFRNHGAFHEDCVNIIMKDLIHLMNPKYIEVTGLFTPRGGISIYPYANYGRPGTKYEGIAEQRLMNRE

SEQ ID NO: 44511 - protein, 151 aa, Bacteroides clarus
  misc_feature (1)..(151): tr|F3PH83|F3PH83_9BACE NADPH-dependent 7-cyano-7-deazag uanine reductase OS=Bacteroides clarus YIT 12056 OX=762 984 GN=queF PE=3 SV=1
MTELKDQLSLLGRKTEYKQDYAPEVLEAFDNKHPGNDYWVRFNCPEFTSLCPITGQPDFAEIRISYIPDVKMVESKSLKLYLFSFRNHGAFHEDCVNIIMKDLIRLMNPKYIEVTGIFTPRGGISIYPYANYGRPGTKYERMAEHRLMNRE

SEQ ID NO: 44512 - protein, 151 aa, Bacteroides clarus; identical to SEQ ID NO: 44511
  misc_feature (1)..(151): tr|A0A1Y4JUB5|A0A1Y4JUB5_9BACE NADPH-dependent 7-cyano- 7-deazaguanine reductase OS=Bacteroides clarus OX=62692 9 GN=queF PE=3 SV=1

SEQ ID NO: 44513 - protein, 151 aa, Bacteroides coprocola
  misc_feature (1)..(151): tr|A0A412GV61|A0A412GV61_9BACE NADPH-dependent 7-cyano- 7-deazaguanine reductase OS=Bacteroides coprocola OX=31 0298 GN=queF PE=3 SV=1
MERKDELTILGKNTVYKQDYAPEVLEAFVNKHPENDYWVRFNCPEFTSLCPITGQPDFAEIRISYLPDVKMVESKSLKLYLFSFRNHGDFHEDCVNIIMKDLIKLMDPKYIEVTGIFTPRGGISIYPYCNYGCPGTKYEKLAEYRMQNHDL

SEQ ID NO: 44514 - protein, 151 aa, Bacteroides coprocola
  misc_feature (1)..(151): tr|B3JMY0|B3JMY0_9BACE NADPH-dependent 7-cyano-7-deazag uanine reductase OS=Bacteroides coprocola DSM 17136 OX= 470145 GN=queF PE=3 SV=1
MERKDELTILGKNTVYKQDYAPEVLEAFVNKHPENDYWVRFNCPEFTSLCPITGQPDFAEIRISYLPDVKMVESKSLKLYLFSFRNHGDFHEDCVNIIMKDLIKLMDPKYIEVTGIFTPRGGISIYPYCNYGRPGTKYEKLAEYRMQNHDL

SEQ ID NO: 44515 - protein, 155 aa, Bacteroides coprophilus
  misc_feature (1)..(155): tr|R6S2C0|R6S2C0_9BACE NADPH-dependent 7-cyano-7-deazag uanine reductase OS=Bacteroides coprophilus CAG:333 OX= 1263041 GN=queF PE=3 SV=1
MNKFMERKDELTLLGNKHTEYKQDYAPEVLEAFMNKHPENDYWVRFNCPEFTSLCPITGQPDFAEIRISYLPDKKMVESKSLKLYLFSFRNHGDFHEDCVNIIMKDLIRLMDPKYIEVTGIFTPRGGISIYPYCNYGRPGTKYEELAEYRLRNHN

SEQ ID NO: 44516 - protein, 155 aa, Bacteroides coprophilus; identical to SEQ ID NO: 44515
  misc_feature (1)..(155): tr|S0FA05|S0FA05_9BACE NADPH-dependent 7-cyano-7-deazag uanine reductase OS=Bacteroides coprophilus DSM 18228 = JCM 13818 OX=547042 GN=queF PE=3 SV=1

SEQ ID NO: 44517 - protein, 154 aa, Bacteroides coprosuis
  misc_feature (1)..(154): tr|F3ZRP0|F3ZRP0_9BACE NADPH-dependent 7-cyano-7-deazag uanine reductase OS=Bacteroides coprosuis DSM 18011 OX= 679937 GN=queF PE=3 SV=1
MRKDTELRQQLSALGTKTEYKQDYAPKVLESFDNKHPMNDYWVRFNCPEFTSLCPITGQPDFAEIIISYLPDEKMVESKSLKLYLFSFRNHGAFHEDCVNIIMKDLIKLMNPKYIEVTGIFTPRGGISIYPYTNYGKPGTKYEKLAEHRLMNHQ

SEQ ID NO: 44518 - protein, 151 aa, Bacteroides dorei
  misc_feature (1)..(151): tr|A0A1Y4PI87|A0A1Y4PI87_9BACE NADPH-dependent 7-cyano- 7-deazaguanine reductase OS=Bacteroides dorei OX=357276 GN=queF PE=3 SV=1
MERKDELTLLGTKTEYRQDYAPEVLESFVNKHPGNDYWVRFNCPEFTSLCPITGQPDFAEIRISYLPDVKMVESKSLKLYLFSFRNHGDFHEDCVNIIMKDLIKLMDPKYIEVTGIFTPRGGISIYPYCNYGRPGTKYEELAEYRMRNHDL

SEQ ID NO: 44519 - protein, 151 aa, Bacteroides dorei
  misc_feature (1)..(151): tr|A0A076IKS2|A0A076IKS2_9BACE NADPH-dependent 7-cyano- 7-deazaguanine reductase OS=Bacteroides dorei OX=357276 GN=queF PE=3 SV=1
MERKDELTLLGAKTEYRQDYAPEVLESFVNKHPGNDYWVRFNCPEFTSLCPITGQPDFAEIRISYLPDVKMVESKSLKLYLFSFRNHGDFHEDCVNIIMKDLIKLMDPKYIEVTGIFTPRGGISIYPYCNYGRPGTKYEELAEYRMRNHDL

SEQ ID NO: 44520 - protein, 151 aa, Bacteroides eggerthii
  misc_feature (1)..(151): tr|R5K585|R5K585_9BACE NADPH-dependent 7-cyano-7-deazag uanine reductase OS=Bacteroides eggerthii CAG:109 OX=12 63043 GN=queF PE=3 SV=1
MAELKDQLSLLGRKTEYKQDYAPEVLEAFDNKHPGNDYWVRFNCPEFTSLCPITGQPDFAEIRISYIPDVKMVESKSLKLYLFSFRNHGAFHEDCVNIIMKDLIRLMNPKYIEVTGIFTPRGGISIYPYANYGRPGTKYEQMAEHRLMSRE

SEQ ID NO: 44521 - protein, 151 aa, Bacteroides eggerthii; identical to SEQ ID NO: 44520
  misc_feature (1)..(151): tr|A0A380YJ20|A0A380YJ20_9BACE NADPH-dependent 7-cyano- 7-deazaguanine reductase OS=Bacteroides eggerthii OX=28 111 GN=queF PE=3 SV=1

SEQ ID NO: 44522 - protein, 151 aa, Bacteroides faecichinchillae
  misc_feature (1)..(151): tr|A0A1M5FJ01|A0A1M5FJ01_9BACE NADPH-dependent 7-cyano- 7-deazaguanine reductase OS=Bacteroides faecichinchilla e OX=871325 GN=queF PE=3 SV=1
MTELKDQLSLLGRKTEYKQDYAPEVLEAFDNKHPENDYWVRFNCPEFTSLCPITGQPDFAEIRISYIPDIKMVESKSLKLYLFSFRNHGAFHEDCVNIIMKDLIRLMGPKYIEVTGIFTPRGGISIYPYANYGRPGTKYEQMAEHRLANRE

SEQ ID NO: 44523 - protein, 151 aa, Bacteroides faecis
  misc_feature (1)..(151): tr|A0A1H3B7H0|A0A1H3B7H0_9BACE NADPH-dependent 7-cyano- 7-deazaguanine reductase OS=Bacteroides faecis MAJ27 OX =1077285 GN=queF PE=3 SV=1
MAELKDQLSLLGRKTEYKQDYAPEVLEAFDNKHPENDYWVRFNCPEFTSLCPITGQPDFAEIRISYIPDIKMVESKSLKLYLFSFRSHGAFHEDCVNIIMKDLIKLMNPKYIEVTGIFTPRGGISIYPYANYGRPGTKFEQMAEHRLMNRE

SEQ ID NO: 44524 - protein, 151 aa, Bacteroides faecis; identical to SEQ ID NO: 44523
  misc_feature (1)..(151): tr|R6W4T4|R6W4T4_9BACE NADPH-dependent 7-cyano-7-deazag uanine reductase OS=Bacteroides faecis CAG:32 OX=126304 4 GN=queF PE=3 SV=1

SEQ ID NO: 44525 - protein, 151 aa, Bacteroides finegoldii; identical to SEQ ID NO: 44503
  misc_feature (1)..(151): tr|C9L3B0|C9L3B0_9BACE NADPH-dependent 7-cyano-7-deazag uanine reductase OS=Bacteroides finegoldii DSM 17565 OX =483215 GN=queF PE=3 SV=1

SEQ ID NO: 44526 - protein, 151 aa, Bacteroides finegoldii; identical to SEQ ID NO: 44503
  misc_feature (1)..(151): tr|R6RVQ2|R6RVQ2_9BACE NADPH-dependent 7-cyano-7-deazag uanine reductase OS=Bacteroides finegoldii CAG:203 OX=1 263045 GN=queF PE=3 SV=1

SEQ ID NO: 44527 - protein, 153 aa, Bacteroides fluxus
  misc_feature (1)..(153): tr|F3PSQ5|F3PSQ5_9BACE NADPH-dependent 7-cyano-7-deazag uanine reductase OS=Bacteroides fluxus YIT 12057 OX=763 034 GN=queF PE=3 SV=1
MTMTELKDQLSLLGRKTEYRQDYAPEVLEAFDNKHPGNDYWVRFNCPEFTSLCPITGQPDFAEIRICYIPDVKMVESKSLKLYLFSFRNHGAFHEDCVNIIMKDLIRLMDPKYIEVTGIFTPRGGISIYPYANYGRPGTKFEQMAEQRLMNRE

SEQ ID NO: 44528 - protein, 151 aa, Bacteroides fragilis
  misc_feature (1)..(151): tr|A0A015SW65|A0A015SW65_BACFG NADPH-dependent 7-cyano- 7-deazaguanine reductase OS=Bacteroides fragilis str. 3 988T(B)14 OX=1339315 GN=queF PE=3 SV=1
MTELKEQLSLLGRKTEYKQDYAPEVLEAFDNKHPENDYWVRFNCPEFTSLCPITGQPDFAEIRISYLPDVKMVESKSLKLYLFSFRNHGAFHEDCVNIIMKDLIRLMDPKYIEVTGIFTPRGGISIYPYANYGRPGTKYEEMAIHRLMNHE

SEQ ID NO: 44529 - protein, 151 aa, Bacteroides fragilis; identical to SEQ ID NO: 44528
  misc_feature (1)..(151): sp|Q5LFI5|QUEF_BACFN NADPH-dependent 7-cyano-7-deazagua nine reductase OS=Bacteroides fragilis (strain ATCC 252 85 / DSM 2151 / JCM 11019 / NCTC 9343) OX=272559 GN=que F PE=3 SV=1

SEQ ID NO: 44530 - protein, 153 aa, Bacteroides graminisolvens
  misc_feature (1)..(153): tr|A0A069D1C4|A0A069D1C4_9BACE NADPH-dependent 7-cyano- 7-deazaguanine reductase OS=Bacteroides graminisolvens DSM 19988 = JCM 15093 OX=1121097 GN=queF PE=3 SV=1
MAELKDQLSLLGRHTEYKQDYAPDVLEAFDNKHPGNDYWVRFNCPEFTSLCPITGQPDFAEIRIAYLPDVKMVESKSLKLYLFSFRNHGAFHEDCVNIIMKDLIQLMNPKYIEVTGILPRGGISIYPFANYGRPGTSYEEMARFRMMHHDLNG

SEQ ID NO: 44531 - protein, 154 aa, Bacteroides graminisolvens
  misc_feature (1)..(154): tr|A0A351M4Q6|A0A351M4Q6_9BACE NADPH-dependent 7-cyano- 7-deazaguanine reductase OS=Bacteroides graminisolvens OX=477666 GN=queF PE=3 SV=1
MAELKDQLSLLGRNTEYKQDYSPDVLEAFDNKHPGNDYWVRFNCPEFTSLCPITGQPDFAEIRIAYLPDVKMVESKSLKLYLFSFRNHGAFHEDCVNIIMKDLIQLMNPKYIEVTGIFTPRGGISIYPFANYGRPGTSYEEMARFRMMHHDLNG

SEQ ID NO: 44532 - protein, 151 aa, Bacteroides helcogenes
  misc_feature (1)..(151): tr|E6SP47|E6SP47_BACT6 NADPH-dependent 7-cyano-7-deazag uanine reductase OS=Bacteroides helcogenes (strain ATCC 35417 / DSM 20613 / JCM 6297 / P 36-108) OX=693979 GN= queF PE=3 SV=1
MTELKDQLSLLGRRTEYKQDYAPEVLEAFDNKHPDNDYWVRFNCPEFTSLCPITGQPDFAEIRISYIPDIKMVESKSLKLYLFSFRNHGAFHEDCVNIIMKDLIHLMNPKYIEVTGIFTPRGGISIYPYANYGRPGTKYEKMAGHRLMTRG

SEQ ID NO: 44533 - protein, 151 aa, Bacteroides heparinolyticus
  misc_feature (1)..(151): tr|A0A2R3MTX2|A0A2R3MTX2_9BACE NADPH-dependent 7-cyano- 7-deazaguanine reductase OS=Bacteroides heparinolyticus OX=28113 GN=queF PE=3 SV=1
MTELKEQLSLLGRKTEYRQDYAPEVLEAFDNRHQDNDYWVRFNCPEFTSLCPITGQPDFAEIRISYIPDVRMVESKSLKLYLFSFRNHGAFHEDCVNIIMKDLIRLMNPKYIEVTGIFTPRGGISIYPYANYGRPGTKYEQMAGHRLMNRE

SEQ ID NO: 44534 - protein, 151 aa, Bacteroides intestinalis
  misc_feature (1)..(151): tr|R7E0I6|R7E0I6_9BACE NADPH-dependent 7-cyano-7-deazag uanine reductase OS=Bacteroides intestinalis CAG:315 OX =1263048 GN=queF PE=3 SV=1
MSELKDQLSLLGRKTEYKQDYAPEVLEAFDNKHPGNDYWVRFNCPEFTSLCPITGQPDFAEIRISYIPDIKMVESKSLKLYLFSFRNHGAFHEDCVNIIMKDLILLMNPKYIEVTGIFTPRGGISIYPYANYGRPDTKYEHMAEHRLMNRE

SEQ ID NO: 44535 - protein, 151 aa, Bacteroides intestinalis
  misc_feature (1)..(151): tr|A0A3E4KVX2|A0A3E4KVX2_9BACE NADPH-dependent 7-cyano- 7-deazaguanine reductase OS=Bacteroides intestinalis OX =329854 GN=queF PE=3 SV=1
MSELKDQLSLLGRKTEYKQDYAPEVLEAFDNKHPENDYWVRFNCPEFTSLCPITGQPDFAEIRISYIPDIKMVESKSLKLYLFSFRNHGAFHEDCVNIIMKDLIRLTNPKYIEVTGIFTPRGGISIYPYANYGRPDTKYENMAEHRLMNRE

SEQ ID NO: 44536 - protein, 151 aa, Bacteroides luti
  misc_feature (1)..(151): tr|A0A1M5CR17|A0A1M5CR17_9BACE NADPH-dependent 7-cyano- 7-deazaguanine reductase OS=Bacteroides luti OX=1297750 GN=queF PE=3 SV=1
MTDLKDQLSILGRATEYKNVYAPEVLEAFDNKHPENDYWVQFNCPEFTSLCPITGQPDFAEIRISYLPDVKMVESKSLKLYMFSFRNHGAFHEDCVNIIMKDLIRLMDPKYIEVTGIFTPRGGISIYPYCNYGRPGTKYEEMASYRLMNRK

SEQ ID NO: 44537 - protein, 151 aa, Bacteroides massiliensis
  misc_feature (1)..(151): tr|U6RQH8|U6RQH8_9BACE NADPH-dependent 7-cyano-7-deazag uanine reductase OS=Bacteroides massiliensis B84634 = T imone 84634 = DSM 17679 = JCM 13223 OX=1121098 GN=queF PE=3 SV=1
MERKDELTILGKKTEYKQDYAPEVLESFVNKHPGNDYWVRFNCPEFTSLCPITGQPDFAEIRISYLPDMKMVESKSLKLYLFSFRNHGDFHEDCVNIIMKDLIKLMEPKYIEVTGIFTPRGGISIYPYCNYGRPGTKYEELAQYRLRNHDL

SEQ ID NO: 44538 - protein, 151 aa, Bacteroides nordii
  misc_feature (1)..(151): tr|A0A413VY80|A0A413VY80_9BACE NADPH-dependent 7-cyano- 7-deazaguanine reductase OS=Bacteroides nordii OX=29164 5 GN=queF PE=3 SV=1
MTELKDQLSLLGRKTEYKQDYAPEVLEAFDNKHPENDYWVRFNCPEFTSLCPITGQPDFAEIRISYLPDVKMVESKSLKLYLFSFRSHGAFHEDCVNIIMKDLIRLMDPKYIEVTGIFTPRGGISIYPYANYGRPGTKYEQMAEHRLMNHE

SEQ ID NO: 44539 - protein, 151 aa, Bacteroides nordii; identical to SEQ ID NO: 44538
  misc_feature (1)..(151): tr|I8X8U8|I8X8U8_9BACE NADPH-dependent 7-cyano-7-deazag uanine reductase OS=Bacteroides nordii CL02T12C05 OX=99 7884 GN=queF PE=3 SV=1

SEQ ID NO: 44540 - protein, 151 aa, Bacteroides oleiciplenus
  misc_feature (1)..(151): tr|A0A3E5BL70|A0A3E5BL70_9BACE NADPH-dependent 7-cyano- 7-deazaguanine reductase OS=Bacteroides oleiciplenus OX =626931 GN=queF PE=3 SV=1
MTELKDQLSLLGRKTEYKQDYAPEVLEAFDNKHPGNDYWVRFNCPEFTSLCPITGQPDFAEIRISYIPDIKMVESKSLKLYLFSFRNHGAFHEDCVNIIMKDLINLMKPKYIEVTGLFTPRGGISIYPYANYGRPGTKYEAMAEQRLMNRE

SEQ ID NO: 44541 - protein, 151 aa, Bacteroides oleiciplenus
  misc_feature (1)..(151): tr|A0A1Q6GRT9|A0A1Q6GRT9_9BACE NADPH-dependent 7-cyano- 7-deazaguanine reductase OS=Bacteroides oleiciplenus OX =626931 GN=queF PE=3 SV=1
MTELKDQLSLLGRKTEYKQDYAPEVLEAFDNKHPGNDYWVRFNCPEFTSLCPITGQPDFAEIRISYIPDIKMVESKSLKLYLFSFRNHGAFHEDCVNIIMKDLISLMNPKYIEVTGIFTPRGGISIYPYANYGRSGTKYEAMAEQRLMNRE

SEQ ID NO: 44542 - protein, 154 aa, Bacteroides ovatus
  misc_feature (1)..(154): tr|A7M2H3|A7M2H3_BACO1 NADPH-dependent 7-cyano-7-deazag uanine reductase OS=Bacteroides ovatus (strain ATCC 848 3 / DSM 1896 / JCM 5824 / NCTC 11153) OX=411476 GN=queF PE=3 SV=1
MSAMTELKDQLSLLGRKTEYKQDYAPEVLEAFDNKHPENDYWVRFNCPEFTSLCPITGQPDFAEIRISYIPDIKMVESKSLKLYLFSFRSHGAFHEDCVNIIMKDLIRLMNPKYIEVTGIFTPRGGISIYPYANYGRPGTKFEQMAEHRLMNRE

SEQ ID NO: 44543 - protein, 151 aa, Bacteroides ovatus
  misc_feature (1)..(151): tr|A0A413ENN4|A0A413ENN4_BACOV NADPH-dependent 7-cyano- 7-deazaguanine reductase OS=Bacteroides ovatus OX=28116 GN=queF PE=3 SV=1
MTELKNQLSLLGRKTEYKQDYAPEVLEAFDNKHPENDYWVRFNCPEFTSLCPITGQPDFAEIRISYIPDIKMVESKSLKLYLFSFRSHGAFHEDCVNIIMKDLIRLMNPKYIEVTGIFTPRGGISIYPYANYGRPGTKFEQMAEHRLMNRE

SEQ ID NO: 44544 - protein, 152 aa, Bacteroides plebeius
  misc_feature (1)..(152): tr|R5VJI3|R5VJI3_9BACE NADPH-dependent 7-cyano-7-deazag uanine reductase OS=Bacteroides plebeius CAG:211 OX=126 3052 GN=queF PE=3 SV=1
MERKDELTLLGNKKTVYKQDYAPEVLESFVNKHPENDYWVRFNCPEFTSLCPITGQPDFAEIRISYLPDVKMVESKSLKLYLFSFRNHGDFHEDCVNIIMKDLIKLMDPKYIEVTGIFTPRGGISIYPYCNYGRPGTKYEELAEYRMKNHDL

SEQ ID NO: 44545 - protein, 152 aa, Bacteroides plebeius; identical to SEQ ID NO: 44544
  misc_feature (1)..(152): tr|A0A1Q6GHD3|A0A1Q6GHD3_9BACE NADPH-dependent 7-cyano- 7-deazaguanine reductase OS=Bacteroides plebeius OX=310 297 GN=queF PE=3 SV=1

SEQ ID NO: 44546 - protein, 151 aa, Bacteroides pyogenes
  misc_feature (1)..(151): tr|U2CQB3|U2CQB3_9BACE NADPH-dependent 7-cyano-7-deazag uanine reductase OS=Bacteroides pyogenes F0041 OX=13218 19 GN=queF PE=3 SV=1
MSELKEQLSLLGRSTEYKQDYAPEVLEAFDNKHPGNDYWVRFNCPEFTSLCPITGQPDFAEIRISYIPDVKMVESKSLKLYLFSFRNHGAFHEDCVNIIMKDLIKLMNPKYIEVTGLFTPRGGISIYPYANYGRPGTKYEQMAEQRLMNRE

SEQ ID NO: 44547 - protein, 151 aa, Bacteroides pyogenes; identical to SEQ ID NO: 44546
  misc_feature (1)..(151): tr|A0A5D3EFE3|A0A5D3EFE3_9BACE NADPH-dependent 7-cyano- 7-deazaguanine reductase OS=Bacteroides pyogenes OX=310 300 GN=queF PE=3 SV=1

SEQ ID NO: 44548 - protein, 151 aa, Bacteroides reticulotermitis
  misc_feature (1)..(151): tr|W4US77|W4US77_9BACE NADPH-dependent 7-cyano-7-deazag uanine reductase OS=Bacteroides reticulotermitis JCM 10 512 OX=1445607 GN=queF PE=3 SV=1
MTELKEQLSLLGRKTEYKQDYAPEVLEAFDNKHPDNDYWVRFNCPEFTSLCPITGQPDFAEIRISYIPDIKMVESKSLKLYLFSFRNHGAFHEDCVNVIMKDLIQLMNPKYIEVTGIFTPRGGISIYPYANYGRPGTKFEQMAENRLMNRE

SEQ ID NO: 44549 - protein, 151 aa, Bacteroides salanitronis
  misc_feature (1)..(151): tr|F0R8Q8|F0R8Q8_BACSH NADPH-dependent 7-cyano-7-deazag uanine reductase OS=Bacteroides salanitronis (strain DS M 18170 / JCM 13567 / BL78) OX=667015 GN=queF PE=3 SV=1
MERKDELTILGKTTAYKQDYAPEVLEAFTNKHPENDYWVRFNCPEFTSLCPITGQPDFAEIRISYLPDMKMVESKSLKLYLFSFRNHGDFHEDCVNIIMKDLIRLMDPKYIEVTGIFTPRGGISIYPYCNYGRPGTKYEELAEYRMRNHDI

SEQ ID NO: 44550 - protein, 151 aa, Bacteroides salyersiae
  misc_feature (1)..(151): tr|A0A4V1YNE8|A0A4V1YNE8_9BACE NADPH-dependent 7-cyano- 7-deazaguanine reductase OS=Bacteroides salyersiae OX=2 91644 GN=queF PE=3 SV=1
MAKLEDQLSLLGRKTEYKQDYAPEVLEAFDNKHPENDYWVRFNCPEFTSLCPITGQPDFAEIRISYLPDVKMVESKSLKLYLFSFRNHGAFHEDCVNIIMKDLIRLMDPKYIEVTGIFTPRGGISIYPYANYGRSRTKYEEMAMHRLMNHE

SEQ ID NO: 44551 - protein, 151 aa, Bacteroides salyersiae
  misc_feature (1)..(151): tr|I9SSR3|I9SSR3_9BACE NADPH-dependent 7-cyano-7-deazag uanine reductase OS=Bacteroides salyersiae CL02T12C01 O X=997887 GN=queF PE=3 SV=1
MAKLEDQLSLLGRKTEYKQDYAPEVLEAFDNKHPENDYWVRFNCPEFTSLCPITGQPDFAEIRISYLPDVKMVESKSLKLYLFSFRNHGAFHEDCVNIIMKDLIRLMDPKYIEVTGIFTPRGGISIYPYANYGRSGTKYEEMAMHRLMNHE

SEQ ID NO: 44552 - protein, 151 aa, Bacteroides sartorii
  misc_feature (1)..(151): tr|R9I6Y9|R9I6Y9_9BACE NADPH-dependent 7-cyano-7-deazag uanine reductase OS=Bacteroides sartorii OX=671267 GN=q ueF PE=3 SV=1
MERKDELTLLGAKTEYKQDYAPEVLESFVNKHPGNDYWVRFNCPEFTSLCPITGQPDFAEIRISYLPDVKMVESKSLKLYLFSFRNHGDFHEDCVNIIMKDLIKLMDPKYIEVTGIFTPRGGISIYPYCNYGRPGTKYEELAEYRMRNHDL

SEQ ID NO: 44553 - protein, 151 aa, Bacteroides sp.
  misc_feature (1)..(151): tr|A0A285TMZ8|A0A285TMZ8_9BACE NADPH-dependent 7-cyano- 7-deazaguanine reductase OS=Bacteroides sp. AR29 OX=939 75 GN=queF PE=3 SV=1
MTELKDQLSLLGRKTEYRQDYAPEVLEAFDNKHPGNDYWVRFNCPEFTSLCPITGQPDFAEIRICYIPDVKMVESKSLKLYLFSFRNHGAFHEDCVNIIMKDLIHLMNPKYIEVTGIFTPRGGISIYPYANYGRPGTKFEQMAEHRLMNRE

SEQ ID NO: 44554 - protein, 151 aa, Bacteroides sp.
  misc_feature (1)..(151): tr|D7JWR1|D7JWR1_9BACE NADPH-dependent 7-cyano-7-deazag uanine reductase OS=Bacteroides sp. 3_1_23 OX=457390 GN =queF PE=3 SV=1
MTELKDQLSLLGRKTEYKQDYAPEVLEAFDNKHPENDYWVRFNCPEFTSLCPITGQPDFAEIRISYIPDIKMVESKSLKLYLFSFRSHGAFHEDCVNIIMKDLIRLMSPKYIEVTGIFTPRGGISIYPYANYGRPGTKFEQMAEHRLMNRE

SEQ ID NO: 44555 - protein, 151 aa, Bacteroides stercorirosoris; identical to SEQ ID NO: 44541
  misc_feature (1)..(151): tr|A0A1M6K449|A0A1M6K449_9BACE NADPH-dependent 7-cyano- 7-deazaguanine reductase OS=Bacteroides stercorirosoris OX=871324 GN=queF PE=3 SV=1

SEQ ID NO: 44556 - protein, 151 aa, Bacteroides stercoris
  misc_feature (1)..(151): tr|A0A4Q5G5J8|A0A4Q5G5J8_BACSE NADPH-dependent 7-cyano- 7-deazaguanine reductase OS=Bacteroides stercoris OX=46 506 GN=queF PE=3 SV=1
MTELKDQLSLLGRKTEYKQDYAPEVLEAFDNKHPGNDYWVRFNCPEFTSLCPITGQPDFAEIHISYIPDVKMVESKSLKLYLFSFRNHGAFHEDCVNIIMKDLIRLMNPKYIEVTGIFTPRGGISIYPYANYGRPGTKYEQMAEHRLMNRE

SEQ ID NO: 44557 - protein, 151 aa, Bacteroides stercoris
  misc_feature (1)..(151): tr|A0A108T4G8|A0A108T4G8_BACSE NADPH-dependent 7-cyano- 7-deazaguanine reductase OS=Bacteroides stercoris OX=46 506 GN=queF PE=3 SV=1
MTELKDQLSLLGRKTEYKQDYAPEVLEAFDNKHPGNDYWVRFNCPEFTSLCPITGQPDFAEIRISYIPDVKMVESKSLKLYLFSFRNHGAFHEDCVNIIMKDLIRLMNPKYIEVTGIFTPRGGISIYPYANYGRPGTKYEKMAEHRLMNRE

SEQ ID NO: 44558 - protein, 151 aa, Bacteroides thetaiotaomicron
  misc_feature (1)..(151): tr|R9HHE4|R9HHE4_BACT4 NADPH-dependent 7-cyano-7-deazag uanine reductase OS=Bacteroides thetaiotaomicron dnLKV9 OX=1235785 GN=queF PE=3 SV=1
MAELKDQLSLLGRKTEYKQDYAPEVLEAFDNKHPENDYWVRFNCPEFTSLCPITGQPDFAEIRISYIPDIKMVESKSLKLYLFSFRNHGAFHEDCVNIIMKDLIKLMNPKYIEVTGIFTPRGGISIYPYANYGRPGTKFEQMAEHRLMNRE

SEQ ID NO: 44559 - protein, 151 aa, Bacteroides thetaiotaomicron; identical to SEQ ID NO: 44558
  misc_feature (1)..(151): sp|Q8A7G0|QUEF_BACTN NADPH-dependent 7-cyano-7-deazagua nine reductase OS=Bacteroides thetaiotaomicron (strain ATCC 29148 / DSM 2079 / NCTC 10582 / E50 / VPI-5482) OX =226186 GN=queF PE=3 SV=1

SEQ ID NO: 44560 - protein, 151 aa, Bacteroides uniformis
  misc_feature (1)..(151): tr|A7VA13|A7VA13_BACUC NADPH-dependent 7-cyano-7-deazag uanine reductase OS=Bacteroides uniformis (strain ATCC 8492 / DSM 6597 / CIP 103695 / JCM 5828 / NCTC 13054 / VPI 0061) OX=411479 GN=queF PE=3 SV=1
MTELKDQLSLLGRKTEYRQNYAPEVLEAFDNKHPGNDYWVRFNCPEFTSLCPITGQPDFAEIRICYIPDVKMVESKSLKLYLFSFRNHGAFHEDCVNIIMKDLIHLMNPKYIEVTGIFTPRGGISIYPYANYGRPGTKFEQMAEHRLMNRE

SEQ ID NO: 44561 - protein, 151 aa, Bacteroides uniformis; identical to SEQ ID NO: 44553
  misc_feature (1)..(151): tr|A0A139K270|A0A139K270_BACUN NADPH-dependent 7-cyano- 7-deazaguanine reductase OS=Bacteroides uniformis OX=82 0 GN=queF PE=3 SV=1

SEQ ID NO: 44562 - protein, 151 aa, Bacteroides vulgatus
  misc_feature (1)..(151): tr|A0A069SUY5|A0A069SUY5_BACVU NADPH-dependent 7-cyano- 7-deazaguanine reductase OS=Bacteroides vulgatus str. 3 975 RP4 OX=1339352 GN=queF PE=3 SV=1
MERKDELTLLGSKTEYRQDYAPEVLESFVNKHPGNDYWVRFNCPEFTSLCPITGQPDFAEIRISYLPDVKMVESKSLKLYLFSFRNHGDFHEDCVNIIMKDLIKLMDPKYIEVTGIFTPRGGISIYPYCNYGRPGTKYEELAEYRMRNHDL

SEQ ID NO: 44563 - protein, 151 aa, Bacteroides vulgatus; identical to SEQ ID NO: 44562
  misc_feature (1)..(151): tr|A0A0P0M278|A0A0P0M278_BACVU NADPH-dependent 7-cyano- 7-deazaguanine reductase OS=Bacteroides vulgatus OX=821 GN=queF PE=3 SV=1

SEQ ID NO: 44564 - protein, 151 aa, Bacteroides xylanisolvens
  misc_feature (1)..(151): tr|D4VQY3|D4VQY3_9BACE NADPH-dependent 7-cyano-7-deazag uanine reductase OS=Bacteroides xylanisolvens SD CC 1b OX=702447 GN=queF PE=3 SV=1
MTELKDQLSLLGRKTEYKQDYAPEVLEAFDNKHPENDYWVRFNCPEFTSLCPITGQPDFAEMRISYIPDIKMVESKSLKLYLFSFRSHGAFHEDCVNIIMKDLIKLMNPKYIEVTGIFTPRGGISIYPYANYGRPGTKFEQMAEHRLMNQE

SEQ ID NO: 44565 - protein, 151 aa, Bacteroides xylanisolvens
  misc_feature (1)..(151): tr|A0A174KYW4|A0A174KYW4_9BACE NADPH-dependent 7-cyano- 7-deazaguanine reductase OS=Bacteroides xylanisolvens O X=371601 GN=queF PE=3 SV=1
MTELKDQLSLLGRKTEYKQDYAPEVLEAFDNKHPENDYWVRFNCPEFTSLCPITGQPDFAEIRISYIPDIKMVESKSLKLYLFSFRSHGAFHEDCVNIIMKDLIKLMNPKYIEVTGIFTPRGGISIYPYANYGRPGTKFEQMAEHRLMNRE

SEQ ID NO: 44566 - protein, 165 aa, Bacteroides xylanolyticus
  misc_feature (1)..(165): tr|A0A2S6HN88|A0A2S6HN88_9BACE NADPH-dependent 7-cyano- 7-deazaguanine reductase OS=Bacteroides xylanolyticus O X=384636 GN=queF PE=3 SV=1
MSGRNSEETKGLTHLGSQGTVYETNYNPGVLETFLNKHPNNDYFVKFNCPEFTSLCPITGQPDFATITISYVPGEKMVESKSLKLYLFSFRNHGDFHEDCMNIIMKDLIALMHPKYIEVWGKFTPRGGISIDPYCNYGKPGTRWEEVAWERLKNHDLYPERVDNR

SEQ ID NO: 44567 - protein, 151 aa, Bacteroides zoogleoformans
  misc_feature (1)..(151): tr|A0A562UQY9|A0A562UQY9_9BACE NADPH-dependent 7-cyano- 7-deazaguanine reductase OS=Bacteroides zoogleoformans OX=28119 GN=queF PE=3 SV=1
MSELKEQLSLLGRKAEYKQDYTPEVLETFDNKHPENDYWVRFNCPEFTSLCPITGQPDFAEIRISYIPDVKMVESKSLKLYLFSFRNHGAFHEDCVNIIMKDLSRLMNPKYIEVTGIFTPRGGISIYPYANYGRLATKYEQMAAHRLMNQE

SEQ ID NO: 44568 - protein, 151 aa, Bacteroidetes bacterium
  misc_feature (1)..(151): tr|S8GS48|S8GS48_9BACT NADPH-dependent 7-cyano-7-deazag uanine reductase OS=Bacteroidetes bacterium oral taxon 272 str. F0290 OX=888054 GN=queF PE=3 SV=1
MERRDELTQLGRQTAYRTDYAPETLETFVNKHPENDYWVRFNCPEFTSLCPITGQPDFAEIRIEYLPDVKMVESKSLKLYLFSFRNHGDFHEDCVNIIMKDLIKLMDPKYIEVAGIFTPRGGISIYPYCNYGRPGTKYEELAAYRLKIHDR

SEQ ID NO: 44569 - protein, 121 aa, Bacteroidetes bacterium
  misc_feature (1)..(121): tr|A0A3D3LUP4|A0A3D3LUP4_9BACT NADPH-dependent 7-cyano- 7-deazaguanine reductase OS=Bacteroidetes bacterium OX= 1898104 GN=queF PE=3 SV=1
MNPKNRIKLLETFENSFPNRDYLIIHKANEFTSVCPKTGQPDFGVITIKYIANKKCVELKSLKFYLQSFRNDGIFYENVINTILDELVSVLKPRWMEITGEFSVRGGLQSVIVATFSGRKS

SEQ ID NO: 44570 - protein, 113 aa, Bacteroidetes sp.
  misc_feature (1)..(113): tr|A0A3N0ZRK7|A0A3N0ZRK7_9BACT NADPH-dependent 7-cyano- 7-deazaguanine reductase OS=Bacteroidetes/Chlorobi grou p bacterium ChocPot_Mid OX=2382230 GN=queF PE=3 SV=1
MKKKLETFPNPKPGRKYTITHINSEFTSVCPKTGLPDFGVITITYIPDKICLELKALKYYFLEYRNKGIFYEDITNKILDDLVAACKPLEMEITSEWSTRGGMNSIITAKYTK

SEQ ID NO: 44571 - protein, 118 aa, Bacteroidetes sp.
  misc_feature (1)..(118): tr|A0A3N0ZKI3|A0A3N0ZKI3_9BACT NADPH-dependent 7-cyano- 7-deazaguanine reductase OS=Bacteroidetes/Chlorobi grou p bacterium MS-B_bin-24 OX=2382228 GN=queF PE=3 SV=1
MEIETFPNPKPGREYVIIHRNPEFTSVCPKTGLPDFGTVTIKYIPDKLCLELKSLKYYFLQYRNMGIFYEAVTNKILDDLVAACDPLEMEVQTDWSTRGGMNSTIIAKYVRSGRKNES

SEQ ID NO: 44572 - protein, 152 aa, Bacteroidia bacterium
  misc_feature (1)..(152): tr|A0A1M3ETN8|A0A1M3ETN8_9BACT NADPH-dependent 7-cyano- 7-deazaguanine reductase OS=Bacteroidia bacterium 44-10 OX=1895721 GN=queF PE=3 SV=1
MAHEGLSHLGGKTEYKQDYAPEMLEAFNNKHPGNDYWVTFDCPEFTSLCPITGQPDFATIRIDYIPDIKMVESKSLKLYLFSFRNHGAFHEDCVNIIMKDLIGLMDPKYIEVTGIFTPRGGISIYPYANYGKEGTKYEKLAEERLFNHSFPL

SEQ ID NO: 44573 - protein, 153 aa, Bacteroidia bacterium
  misc_feature (1)..(153): tr|A0A1Q3QJF1|A0A1Q3QJF1_9BACT NADPH-dependent 7-cyano- 7-deazaguanine reductase OS=Bacteroidia bacterium 43-41 OX=1895720 GN=queF PE=3 SV=1
MSQTENLSLLGKKTAYKQDYAPDVLEAFENKHRSNDYWVTFNCPEFTSLCPITGQPDFATIRIDYIPDVKMVESKSLKIYLFSFRNHGAFHEDCVNIIMKDLIGLMDPKYIEVTGIFTPRGGISIYPYVNYGRSGTKYERLAEERLFNHSFPL

SEQ ID NO: 44574 - protein, 160 aa, Baia soyae
  misc_feature (1)..(160): tr|A0A4R2S1N9|A0A4R2S1N9_9BACL NADPH-dependent 7-cyano- 7-deazaguanine reductase OS=Baia soyae OX=1544746 GN=qu eF PE=3 SV=1
MAQHDLDLQLLGQKTNYHFEYNPDVLESFDNRHPDTDYFVKFNTPEFTSLCPITNQPDFATLYISYVPDQKLVESKSLKLYLFSFRNHGDFHENCIVVIMKDLIKLLDPKYIEVWGKFLPRGGVSIDPYANYGKSGTRWEAIAEQRLAQHDLYPETITNR

SEQ ID NO: 44575 - protein, 163 aa, Balnearium lithotrophicum
  misc_feature (1)..(163): tr|A0A521BQX0|A0A521BQX0_9BACT NADPH-dependent 7-cyano- 7-deazaguanine reductase OS=Balnearium lithotrophicum O X=223788 GN=queF PE=3 SV=1
MKREDFGNVSKLGKPTIYEFEYNPQLLERFPNKFPDRVYWVSFNCPEFTTLCPITGQPDFATIYIQYIPDKWLVESKSLKLYLFSFRNARGFHEDTVNKIADDLFELLEPYYIEVYGEFNPRGGISIDPYVQKFKDVDWVKEIAKERFKLHRITPPEIRRNRG

SEQ ID NO: 44576 - protein, 64 aa, Balneola sp.
  misc_feature (1)..(64): tr|A0A3D4UZ59|A0A3D4UZ59_9BACT NADPH-dependent 7-cyano- 7-deazaguanine reductase QueF (Fragment) OS=Balneola sp . OX=2024824 GN=DF712_13365 PE=4 SV=1
FHEEICETIFTRLNNTFEPRSLMVACLYVRRGGWDINPIRTTHEYLIDEFFWDHTVPWIKTLRQ

SEQ ID NO: 44577 - protein, 147 aa, Balneolaceae bacterium
  misc_feature (1)..(147): tr|A0A356X6Q0|A0A356X6Q0_9BACT NADPH-dependent 7-cyano- 7-deazaguanine reductase OS=Balneolaceae bacterium OX=2 053516 GN=queF PE=3 SV=1
MSSESTPKPKRKRNWAKNRDILKAIPNPSGEAYEIKMKIPELTFEGVRSQPDFANLYITFYPGKKVIELKSLKEYFFAFRSQIYSYERIINVIYDDMMAAYEPTRLRLVMTCNPRGGISSKLTVDSDWGVRGGNDQFMDWVGQKEEW

SEQ ID NO: 44578 - protein, 151 aa, Barnesiella intestinihominis
  misc_feature (1)..(151): tr|K0XEW8|K0XEW8_9BACT NADPH-dependent 7-cyano-7-deazag uanine reductase OS=Barnesiella intestinihominis YIT 11 860 OX=742726 GN=queF PE=3 SV=1
MKSETSQLTLLGHKTVYKQDYAPEVLETFINKHPENDYWVRFNCPEFTSLCPITGQPDFATIQIDYIPGEHMVESKSLKLYLFSFRNHGAFHEDCVNIIMKDLVKLMNPKYIEVTGFFTPRGGISIYPYCNYGQPGTEYEQMAKQRLQNHR

SEQ ID NO: 44579 - protein, 151 aa, Barnesiella sp.
  misc_feature (1)..(151): tr|A0A1Y3WUD5|A0A1Y3WUD5_9BACT NADPH-dependent 7-cyano- 7-deazaguanine reductase OS=Barnesiella sp. An55 OX=196 5646 GN=queF PE=3 SV=1
MESKEPQLTLLGYKTTYRQDYAPEVLETFTNKHPENDYWVRFNCPEFTSLCPITGQPDFATIQIDYIPGERMVESKSLKLYLFSFRNHGAFHEDCVNIIMKDLIRLMEPKYIEVTGFFTPRGGISIYPYCNYGRPGTEYEQMARQRLQNHQ

SEQ ID NO: 44580 - protein, 157 aa, Barnesiella sp.
  misc_feature (1)..(157): tr|A0A4Y9IYX5|A0A4Y9IYX5_9BACT NADPH-dependent 7-cyano- 7-deazaguanine reductase OS=Barnesiella sp. WM24 OX=255 8278 GN=queF PE=3 SV=1
MSRTDEEMPEVTLLGSQGTKYPTEYAPGILETFVNKHPDNEYLVTFTCPEFTSLCPKTGQPDFARIIINYIPREKMVESKSLKLYLFSFRNHGDFHEDCINIIMKDLVALIDPRYLEVIGLFTPRGGISIYPFANYGDSEHQDLVKARMLASFRNDF

SEQ ID NO: 44581 - protein, 151 aa, Barnesiella viscericola
  misc_feature (1)..(151): tr|W0ET61|W0ET61_9BACT NADPH-dependent 7-cyano-7-deazag uanine reductase OS=Barnesiella viscericola DSM 18177 O X=880074 GN=queF PE=3 SV=1
MESKEPQLTLLGHKTTYRQDYAPEVLETFTNKHPENDYWVRFNCPEFTSLCPITGQPDFATIQIDYIPGERMVESKSLKLYLFSFRNHGAFHEDCVNIIMKDLIKLMEPKYIEVTGFFTPRGGISIYPYCNYGRPGTEYEAMARQRLQSHR

SEQ ID NO: 44582 - protein, 156 aa, Bartonella apis
  misc_feature (1)..(156): tr|A0A1U9MAX7|A0A1U9MAX7_9RHIZ NADPH-dependent 7-cyano- 7-deazaguanine reductase OS=Bartonella apis OX=1686310 GN=queF PE=3 SV=1
MASDHSIYENLKQLGKKTPFPESPEKAVLERVPNPQADVKYCVRFTAPEFTSLCPITSQPDFAYLMIDYVPHEWLVESKSLKLYLGSFRNHGAFHEDCTVTIARRLVELLSPHWLRIGGYWYPRGGIPIDVFWQTGKTPEDVWIPEQNVSNYRGRG

SEQ ID NO: 44583 - protein, 156 aa, Bartonella apis
  misc_feature (1)..(156): tr|A0A1R0F785|A0A1R0F785_9RHIZ NADPH-dependent 7-cyano- 7-deazaguanine reductase OS=Bartonella apis OX=1686310 GN=queF PE=3 SV=1
MASDHSIYENLKQLGKKTPFPESPEKAVLERVPNPQADVKYCVRFTAPEFTSLCPITSQPDFAYLMIDYVPDKWLVESKSLKLYLGSFRNHGAFHEDCTVTIARRLVELLSPHWLRIGGYWYPRGGIPIDVFWQTGKMPDDVWIPDQNVSNYRGRG

SEQ ID NO: 44584 - protein, 152 aa, Basilea psittacipulmonis
  misc_feature (1)..(152): tr|A0A077DFN2|A0A077DFN2_9BURK NADPH-dependent 7-cyano- 7-deazaguanine reductase OS=Basilea psittacipulmonis DS M 24701 OX=1072685 GN=queF PE=3 SV=1
MSNETLSLLGSKRTEYPTDYAPDVLEAFENKHPDNDYFVTFVCPEFTSLCPITNQPDFATIYIRYIPNIRMVESKSLKLYLFSFRNHGDFHEDCVNIIMKDLIKLMDPKYIEVKGVFTPRGGIAIHPFANYGQAGTMFEEMARERLMKHEMA

SEQ ID NO: 44585 - protein, 131 aa, Bathymodiolus azoricus
  misc_feature (1)..(131): tr|A0A1H6KMZ5|A0A1H6KMZ5_9GAMM NADPH-dependent 7-cyano- 7-deazaguanine reductase OS=Bathymodiolus azoricus thio autotrophic gill symbiont OX=235205 GN=queF PE=3 SV=1
MSSQASKTLEVFDNPNRARDYVIQIELPEFTCLCPKTGQPDFATLHLEYIANKDCVELKSLKMYVWSFRDEGAFHEAVTNQILEDLVAATNPRFMRLKAIFNVRGGVYTTVIAEHQQSGWQPKPSVDLKHI

SEQ ID NO: 44586 - protein, 128 aa, Bathymodiolus brooksi
  misc_feature (1)..(128): tr|A0A482YNH3|A0A482YNH3_9BACT NADPH-dependent 7-cyano- 7-deazaguanine reductase OS=Bathymodiolus brooksi thiot rophic gill symbiont OX=1052209 GN=queF PE=3 SV=1
MSSQSSKTLEVFDNPNPERDYVIQIELPEFTCLCPKTGQPDFATLYLEYIADKACVELKSLKMYIWSFRDEGAFHEAVTNQILEDLITATDPRFMRLKAIFNVRGGVYTTVIAEHQQQGWEPKSVVNL

SEQ ID NO: 44587 - protein, 131 aa, Bathymodiolus heckerae
  misc_feature (1)..(131): tr|A0A482ZWL2|A0A482ZWL2_9BACT NADPH-dependent 7-cyano- 7-deazaguanine reductase OS=Bathymodiolus heckerae thio trophic gill symbiont OX=1052212 GN=queF PE=3 SV=1
MLSQASKTLEVFDNPNTQRDYVIQIELPEFTCLCPKTGQPDFAILHLEYIADKTCVELKSLKMYIWSFRNEGSFHEAVTNQILEDLVAATNPRFMRLKAIFNVRGGVYTTIIAEHQQAGWQPKPTVDLQHL

SEQ ID NO: 44588 - protein, 132 aa, Bathymodiolus heckerae
  misc_feature (1)..(132): tr|A0A482YS07|A0A482YS07_9BACT NADPH-dependent 7-cyano- 7-deazaguanine reductase OS=Bathymodiolus heckerae thio trophic gill symbiont OX=1052212 GN=queF PE=3 SV=1
MSSQPSKELEVFDNPNPERDFVIQIDMPEFTCLCPKTGQPDFATLHLEYIADQACVELKSLKMYIWSFRDEGAFHEAVTNEILDDLVNATNPRFMRLKAIFNVRGGVYTSVIAEHQQDGWSPKPIVDLQYIS

SEQ ID NO: 44589 - protein, 129 aa, Bathymodiolus platifrons
  misc_feature (1)..(129): tr|A0A1Z5HAV5|A0A1Z5HAV5_9GAMM NADPH-dependent 7-cyano- 7-deazaguanine reductase OS=Bathymodiolus platifrons me thanotrophic gill symbiont OX=113268 GN=queF PE=3 SV=1
MATKPSKDLQAFDNPQPGRDFTIRIDTPEFTCLCPLTGQPDFAEITLEYVPDKLCIELKALKLYLWTFRDRGAFHEAVTNEILDDIVKVTQPNFMRVRADFNVRGGVYTSVIVEHRNPDWHAPELVQLP

SEQ ID NO: 44590 - protein, 128 aa, Bathymodiolus thermophilus
  misc_feature (1)..(128): tr|A0A1J5TWC3|A0A1J5TWC3_9GAMM NADPH-dependent 7-cyano- 7-deazaguanine reductase OS=Bathymodiolus thermophilus thioautotrophic gill symbiont OX=2360 GN=queF PE=3 SV=1
MSSQPSKILEVFDNPNPERDYVIQIELPEFTCLCPKTGQPDFATLHLEYIADKACVELKSLKMYIWSFRDEGAFHEAVTNQILEDLIVATDPRFMRLKAVFNVRGGVYTTVIAEHQQQGWTPKTVVNL

SEQ ID NO: 44591 - protein, 150 aa, Bauldia litoralis
  misc_feature (1)..(150): tr|A0A1G6AYV5|A0A1G6AYV5_9RHIZ NADPH-dependent 7-cyano- 7-deazaguanine reductase OS=Bauldia litoralis OX=665467 GN=queF PE=3 SV=1
MASKKPQLGRSVPIPPDPEHATLDRVPNPHADKTYVARFTFPEFTSICPVTGQPDFGILMIDYVPDKWLVESKSLKLYLQSFRNHGAFHEDCTVAIGAAIVDLLKPQWLRIGGYFNPRGGMPIDVFWQTGAPPADAWITDQGIPPYRGRG

SEQ ID NO: 44592 - protein, 283 aa, Baumannia cicadellinicola
  misc_feature (1)..(283): sp|Q1LSV9|QUEF_BAUCH NADPH-dependent 7-cyano-7-deazagua nine reductase OS=Baumannia cicadellinicola subsp. Homa lodisca coagulata OX=374463 GN=queF PE=3 SV=2
MTDQQYQLLQKFKLDKSKISYRTHYNPMLLQPIPRTIHRELLGISSISLPFQGADFWTLYELSWLNKYGLPQVAIGEMIIDATSDNLIESQSLKLYLNSINQTCFSSEQELRNTLITDITKCINSQVKITIHSLSQWMTVPILEFTGECIDNQSIQIDNDNYIFNSNLLVNSVEREKVKETLVSHLLKSNCPITNQPDWGSVQISYYGMRINREALLRYLISFRKYKIFHEQCVEQIYCDIMQFCLPNTLSVYVRYNRRGGLDINPWRSNISYSPVNRPLARQ

SEQ ID NO: 44593 - protein, 179 aa, Bdellovibrio bacteriovorus
  misc_feature (1)..(179): tr|K7Z6G1|K7Z6G1_BDEBC NADPH-dependent 7-cyano-7-deazag uanine reductase OS=Bdellovibrio bacteriovorus str. Tib erius OX=1069642 GN=queF PE=3 SV=1
MGISLKKVPMKKKNGRDSKELADFALGEIQTHYPETYAPEVLEAFDNKNPGKIAWTTFVCTEFTSLCPKTRQPDFAKIFINYIADKKMVESKSLKLYLFSFRNHGDFHEDCVQTICDDLVKLMKPKYIEVIGEFTPRGGIAIYPYANYAAKDKFFQDLYKKRMSEYAPGKYSMELSKLY

SEQ ID NO: 44594 - protein, 170 aa, Bdellovibrio bacteriovorus
  misc_feature (1)..(170): sp|Q6MRJ2|QUEF_BDEBA NADPH-dependent 7-cyano-7-deazagua nine reductase OS=Bdellovibrio bacteriovorus (strain AT CC 15356 / DSM 50701 / NCIB 9529 / HD100) OX=264462 GN= queF PE=3 SV=1
MKKKNGRDSKELADFALGESQTNYPETYAPEVLEAFDNKNPGKIAWTTFVCTEFTSLCPKTRQPDFAKIFINYIADKKMVESKSLKLYLFSFRNHGDFHEDCVQTICDDLVKLMKPKYIEVIGEFTPRGGIAIYPYANYAAKDKFFQELYKKRMSEYAPGKYSMELSKLY

SEQ ID NO: 44595 - protein, 179 aa, Bdellovibrio exovorus
  misc_feature (1)..(179): tr|M4VSP6|M4VSP6_9PROT NADPH-dependent 7-cyano-7-deazag uanine reductase OS=Bdellovibrio exovorus JSS OX=118426 7 GN=queF PE=3 SV=1
MKNPRQTKSIARSQGRSKKELQNFSLGQSNTEYSESYNPKLLEAFDNKNPKNIAWTTFICTEFTSLCPKTNQPDFAKVFINYIAADKMVESKSLKLYLHSFRNHGDFHEDCIQTICNDLVKLMKPKYIEVIGEFTPRGGIAIFPFASYAAPAKEFQEIYKERLKSYAPGKYTTELKRVY

SEQ ID NO: 44596 - protein, 169 aa, Bdellovibrio sp.
  misc_feature (1)..(169): tr|A0A514XDZ6|A0A514XDZ6_9PROT NADPH-dependent 7-cyano- 7-deazaguanine reductase OS=Bdellovibrio sp. ZAP7 OX=22 31053 GN=queF PE=3 SV=1
MKKTGRDSKELKNFALGEAKTDYAQTYSPESLEAFDNKNPGKIAWTTFVCTEFTSLCPKTGQPDFAKVFINYIADKKMVESKSLKLYLFSFRNHGDFHEDCIQTICDDLVKLMKPKYIEVIGEFTPRGGIAIFPYASYACKDKFYQDLWKKRLSEFAPGKYSMELSKLY

SEQ ID NO: 44597 - protein, 127 aa, Bdellovibrio sp.
  misc_feature (1)..(127): tr|A0A3M1C256|A0A3M1C256_9PROT NADPH-dependent 7-cyano- 7-deazaguanine reductase OS=Bdellovibrio sp. OX=28201 G N=queF PE=3 SV=1
MEKLYGEKMIEEAQLERFENRTQVRRYTIEFTCPEFTCICPRSGFPDFATIYIKYVPDKWCVELKSLKLWINSFRDKRIFHEDVTNLILDELVNLLDPHEMEVRGDFNVRGNIKTVVTATHKKDQSS

SEQ ID NO: 44598 - protein, 139 aa, Bdellovibrionaceae bacterium
  misc_feature (1)..(139): tr|A0A2E3USW3|A0A2E3USW3_9PROT NADPH-dependent 7-cyano- 7-deazaguanine reductase OS=Bdellovibrionaceae bacteriu m OX=2026715 GN=queF PE=3 SV=1
MIDVNPEHENLSQLGKGGTHPKRELETFPNRNPERDYVVELQTSEFTCLCPKTGQPDFADILIRYVPDEKIVESKSLKLYFWTFRDEGVFHEHFTNLLLDDLVSALNPRWCRVEVIFNARGGIGITVSAEHGTPPPSAY

SEQ ID NO: 44599 - protein, 124 aa, Bdellovibrionaceae bacterium
  misc_feature (1)..(124): tr|A0A2D6A1D7|A0A2D6A1D7_9PROT NADPH-dependent 7-cyano- 7-deazaguanine reductase OS=Bdellovibrionaceae bacteriu m OX=2026715 GN=queF PE=3 SV=1
MSDKLYGQVAIEEAQLERFENKHKGRKYEVFFSCPEFTCVCPRSGFPDFATINIKYVPDQYCVELKSLKLYINKFRDEKVFHESVTNVILDDLVELLDPFEIEVVGDFNVRGNIKTVITARHAK

SEQ ID NO: 44600 - protein, 170 aa, Bdellovibrionales bacterium
  misc_feature (1)..(170): tr|A0A1F3SPV2|A0A1F3SPV2_9PROT NADPH-dependent 7-cyano- 7-deazaguanine reductase OS=Bdellovibrionales bacterium GWA2_49_15 OX=1797384 GN=queF PE=3 SV=1
MSRSVSKTITRRKIGRSPKELKNLKLGQVTTDYPSTYSPALLESFPNRHPKSEAWTSLLCPEFTSLCPKTGQPDFAHITINYVADKKMVESKSLKLYLFSFRNHGDFHEDCIQTICNDLVKLMSPKYLEVIGEFTPRGGISIFPFASYACDDPEFQNLKAHRFYNYAPQQ

SEQ ID NO: 44601 - protein, 163 aa, Bdellovibrionales bacterium
  misc_feature (1)..(163): tr|A0A1F3VZT4|A0A1F3VZT4_9PROT NADPH-dependent 7-cyano- 7-deazaguanine reductase OS=Bdellovibrionales bacterium RIFOXYB2_FULL_36_6 OX=1797394 GN=queF PE=3 SV=1
MIKKRNHKELDKLGLGSKNTIYPTKYAPSVLESVNFSGGVEDAWVSLLCNEFTSLCPKTNQPDFAKIFINYIPSQKLIESKSLKLYLFSFRNHGAFHEDCIHLICRDLFKLLKPKFIEVIGEFNPRGGIAIWPYCSQSSSSSRYKKIKAERLEDYFPGKYSKP

SEQ ID NO: 44602 - protein, 129 aa, Beggiatoa alba
  misc_feature (1)..(129): tr|I3CDN7|I3CDN7_9GAMM NADPH-dependent 7-cyano-7-deazag uanine reductase OS=Beggiatoa alba B18LD OX=395493 GN=q ueF PE=3 SV=1
MSIRASKILETFPNPTPSRDYTIHMRMPEFTCLCPKTGQPDFATLFLEYVPDQTCIELKSLKGYIWSYRDEGAFHEAVTNQILSDLVNACQPRFMRLRAEFNVRGGIYTQVVVEHRAPDWTPPTPVHLP

SEQ ID NO: 44603 - protein, 129 aa, Beggiatoa leptomitoformis
  misc_feature (1)..(129): tr|A0A2N9YGM6|A0A2N9YGM6_9GAMM NADPH-dependent 7-cyano- 7-deazaguanine reductase OS=Beggiatoa leptomitoformis O X=288004 GN=queF PE=3 SV=1
MSIKASKILETFPNPTTDRDYVIHMRMPEFTCLCPKTGQPDFATLFLEYIPDQLCVELKSLKGYIWSYRDTGAFHEAVTNQILTDLVTACQPRFMRLRAEFNVRGGIYTDVVVEHRAPHWTPPTPVHLP

SEQ ID NO: 44604 - protein, 129 aa, Beggiatoa sp.
  misc_feature (1)..(129): tr|A0A1W9WWM4|A0A1W9WWM4_9GAMM NADPH-dependent 7-cyano- 7-deazaguanine reductase OS=Beggiatoa sp. 4572_84 OX=19 72449 GN=queF PE=3 SV=1
MPIRPSKKLETFENPYSDRDYTIHIRIPEFTCLCPKTKQPDFATLFLDYVPDKLCIELKSLKSYIWSYRNKGAFHEAVTNKILNDFVHTSAPRFMRLRAEFNVRGGIYTTIVAQHLASDWTPPPLVHLP

SEQ ID NO: 44605 - protein, 129 aa, Beggiatoa sp.
  misc_feature (1)..(129): tr|A7C007|A7C007_9GAMM NADPH-dependent 7-cyano-7-deazag uanine reductase OS=Beggiatoa sp. PS OX=422289 GN=queF PE=3 SV=1
MPIQPNKTFETFDNPTNERDYTIHIRIPEFTCLCPKTGQPDFATLFLDYVPFELCIELKSLKSYIWSYRNEGAFHEAVTNQILNDLVKACAPRFMRLRTEFNVRGGIYTTVVAEHIAPDWTPPPLIHLP

SEQ ID NO: 44606 - protein, 152 aa, Beijerinckia indica
  misc_feature (1)..(152): tr|B2IKR1|B2IKR1_BEII9 NADPH-dependent 7-cyano-7-deazag uanine reductase OS=Beijerinckia indica subsp. indica ( strain ATCC 9039 / DSM 1715 / NCIB 8712) OX=395963 GN=q ueF PE=3 SV=1
MSSFSDAPLLGRAVALPASPEEAKLERVANPHPGTSYVARFTAPEFTSLCPVTGQPDFAHIVIDYVPGDWLVESKSLKLYLGAFRNHGAFHEDCTIRIGKDLVTLLSPLWFRIGGYWYPRGGIPIDVFWQIGELPAGTWVPDQGVAPYRGRG

SEQ ID NO: 44607 - protein, 99 aa, Beijerinckia indica
  misc_feature (1)..(99): tr|B2IKQ9|B2IKQ9_BEII9 NADPH-dependent 7-cyano-7-deazag uanine reductase OS=Beijerinckia indica subsp. indica ( strain ATCC 9039 / DSM 1715 / NCIB 8712) OX=395963 GN=q ueF PE=3 SV=1
MDAGFVLFVIDYVPGDWLVESKSLKLYLGAFRNHGAFHEDCTIRIGKDLVTLLSPPWFRIGGYWYPRGGIPIDVFWQIGELPAGTWVPDQGVAPYRGRG

SEQ ID NO: 44608 - protein, 163 aa, Beijerinckia sp.
  misc_feature (1)..(163): tr|A0A1H4LY98|A0A1H4LY98_9RHIZ NADPH-dependent 7-cyano- 7-deazaguanine reductase OS=Beijerinckia sp. 28-YEA-48 OX=1882748 GN=queF PE=3 SV=1
MAKTSKSPARKSAPALSLGLLGRPATMPDHPDAAILERVPNPQAGEIYVTRFTAPEFTSLCPVTSQPDFAHLVIDFVPGKWLVESKSLKFYLGSFRNHGAFHEDCTVRIGKDIATLLKPRWLRIGGYWYPRGGMPIDVFWQTGKLPAGTWAPDQGVPTYRGRG

SEQ ID NO: 44609 - protein, 153 aa, Beijerinckiaceae bacterium
  misc_feature (1)..(153): tr|A0A539CWQ3|A0A539CWQ3_9RHIZ NADPH-dependent 7-cyano- 7-deazaguanine reductase OS=Beijerinckiaceae bacterium OX=1978229 GN=queF PE=3 SV=1
MVKVRTGTSLLGRAVEAPRTRDEATLERVPNPHPDTNYIARFTAPEFTALCPVTGQPDFAILVIDYLPGAWLIESKSLKLYLTSFRNHGAFHEDCTLRIGKDLAACLEPRWLRIGGYWYPRGGIPIDVFWATGELPEGIWVPDQAVPPYRGRG

SEQ ID NO: 44610 - protein, 150 aa, Beijerinckiaceae bacterium
  misc_feature (1)..(150): tr|A0A522GXK8|A0A522GXK8_9RHIZ NADPH-dependent 7-cyano- 7-deazaguanine reductase OS=Beijerinckiaceae bacterium OX=1978229 GN=queF PE=3 SV=1
MTPPEQPLLGRPTAIPASPDEAQLDRVANPHPDANYIARFTAPEFTSLCPVTGQPDFAHIVIDYLPEAWLVESKSLKLYLASFRNHGAFHEDCTLRIGKDLVALLAPRWFRIGAYFYPRGGMPIDVFWQAGALPEGVWAPDQGVPPYRGR

SEQ ID NO: 44611 - protein, 156 aa, Belnapia rosea
  misc_feature (1)..(156): tr|A0A1G6KJG0|A0A1G6KJG0_9PROT NADPH-dependent 7-cyano- 7-deazaguanine reductase OS=Belnapia rosea OX=938405 GN =queF PE=3 SV=1
MAEATTDTTGLTLLGRPAGLPASPEEARLERVPNPHPGTRYCVRFAAPEFTSLCPLTGQPDFAHLVIDYIPGEWLVESKSLKLYLGSFRNHGAFHEACTVAIARRLVDELSPEWLRIGGYWYPRGGIPIDIFYATGPVPEGVWVPDQGVPGYRGRG

SEQ ID NO: 44612 - protein, 157 aa, Bergeriella denitrificans
  misc_feature (1)..(157): tr|A0A378UI46|A0A378UI46_BERDE NADPH-dependent 7-cyano- 7-deazaguanine reductase OS=Bergeriella denitrificans O X=494 GN=queF PE=3 SV=1
MSRNQQELEGITLLGNQNTHYPDNYAPGVLEAFDNKHPGNDYFVTFICPEFTSLCPMTGQPDFATIYIRYIPDVKMVESKSLKLYLFSFRNHGDFHEDCVNIIMKDLIALMNPKYIEVYGDFTPRGGIAIHPFANYGRKDTEFEALARKRLFEHDMQ

SEQ ID NO: 44613 - protein, 276 aa, Bermanella marisrubri
  misc_feature (1)..(276): tr|Q1N6F8|Q1N6F8_9GAMM NADPH-dependent 7-cyano-7-deazag uanine reductase OS=Bermanella marisrubri OX=207949 GN= queF PE=3 SV=1
MKDDILLGKETEYKSEYDQSLIYPIERAGNRAKLEGIDDSLNNGLGFYGYDLWTGYEISWLNQKGKPQVAIAEFIIPCDSSNIVESKSFKLYLNSFNNTRFDDADEVQALMQKDLSQGFGADVDVRFYSVEQYPLAQSLTGECIDDEDITVKDYAPTPSLLSFSDESTQEILISHLLKSNCPVTNQPDWATVVIDYKGSKIDRAALLAYIISYRNHDDFHEHCVEQMFTDLWRLGAFDSLTVTARYTRRGGLDINPMRSSRSAISVKDMVGRLPRQ

SEQ ID NO: 44614 - protein, 277 aa, Bermanella sp.
  misc_feature (1)..(277): tr|A0A1Y5DI07|A0A1Y5DI07_9GAMM NADPH-dependent 7-cyano- 7-deazaguanine reductase OS=Bermanella sp. 47_1433_sub8 0_T6 OX=1856278 GN=queF PE=3 SV=1
MNKDDLLLGKETQYAFTYDNSLIFPIERTGNRGRLNMPVKKVHGELPFFGQDVWTGYELSWLNLKGKPQVAIAEFVIPADSTSIVESKSFKLYLNSFNNTRLESIEQVKTRLQQDLSAGFGAQIEVTLFTVDAFPLVNAKLGENIDDLDIEVKDFEPNASLLQVNPAHLTSQTLNSHLLKSNCPVTGQPDWATLVVQYKGTEIDRASLLKYIISYRNHDDFHEHCVEQIFCDLCQAGDFEELVVTARYTRRGGLDINPTRSLKPLMEDDVVGRLARQ

SEQ ID NO: 44615 - protein, 278 aa, Bermanella sp.
  misc_feature (1)..(278): tr|A0A2D4S3S1|A0A2D4S3S1_9GAMM NADPH-dependent 7-cyano- 7-deazaguanine reductase OS=Bermanella sp. OX=2024825 G N=queF PE=3 SV=1
MSHDDKELLLGKHTEYVFEYDKSLIFPISREQNRAKLPMPSEKVNGVLPFYGFDIWTGYEVSWLNLKGKPQVAIVEFVIPADSSHIVESKSFKLYLNSFNQTRLANQDELHQRLQSDLSEGFGAPIEVRIFSVMNFPIANEDLGQGIDDLDIEVSDYSPNAGLLSVSDIQVEETLHSHLLKSNCPVTGQPDWATVIIRYDGMKINREALLQYIISYRNHDDFHEHCVEQIFCDLLSLGGFNSLTVTARYTRRGGLDINPTRSLAPISTNQGVGRLARQ

SEQ ID NO: 44616 - protein, 275 aa, Unknown
  misc_feature (1)..(275): tr|M1SR42|M1SR42_9PROT NADPH-dependent 7-cyano-7-deazag uanine reductase OS=beta proteobacterium CB OX=543913 G N=queF PE=3 SV=1
MSTLPLGKATEYPAQYDPSLLFPIPRSENRLKLDIKPNQALPFVGVDIWNAFELGWLNKKGKPQIALAEFQIPADSPNMIESKSFKLYLNSLNSARFEDEAEVRERLITDLSAVAGSKISTRINPTEAVAKKGMQEMSGVLMDRLDIEIDPSLSADPTLLEVNESFGPIEQCLVSHLLKSNCPVTGQPDWASVQIRYQGRPILEEGLLRYLIGFRQKGEFHEHCVETIFTDIKRQCKPEKLSVYARYTRRGGLDINPFRTDHNAPWPDNVRHARQ

SEQ ID NO: 44617 - protein, 296 aa, Unknown
  misc_feature (1)..(296): tr|A0A2T0XJX8|A0A2T0XJX8_9PROT NADPH-dependent 7-cyano- 7-deazaguanine reductase OS=beta proteobacterium MWH-P2 sevCIIIb OX=323426 GN=queF PE=3 SV=1
MTHFSETSSPNIPLDVPLGKSVSYPSGYSASLLFPIARAEARRSLGLDLSSPLPFTGWDLWNAYELSWLNAKGLPKVALLRIKVAITSPNIIESKSFKLYLNSFNQTRFETVHQVFDRLRLDLQAILGGDVDIELIGPDQFAGEQIKEFDGINLDKLDVEIDTYEPNASLLKLASAAVNAASGLNDRTVQNEKVFSRLLKSNCPVTDQPDWACIEIEYSGKAIDHASLLKYIVSYRLHNGFHEHCVEKIFMDLMSSCRPKSLSVYARYTRRGGLDINPWRATPDMSEPNICRSARQ

SEQ ID NO: 44618 - protein, 139 aa, Betaproteobacteria bacterium
  misc_feature (1)..(139): tr|A0A1F4BRH3|A0A1F4BRH3_9PROT NADPH-dependent 7-cyano- 7-deazaguanine reductase OS=Betaproteobacteria bacteriu m RIFCSPLOWO2_12_61_14 OX=1797494 GN=queF PE=3 SV=1
MTTQPSKILETFPNPNPRRDYHIHMEIPEFTCLCPKTGQPDFATLILDYIADKQCVELKSLKLYIWSFRNEGHFHEDVTNRILDDLVAATQPRFMRLTAKFYVRGGIFTNVVAEHRRQGWQPAPVVDLSRFDAQSNTRG

SEQ ID NO: 44619 - protein, 153 aa, Betaproteobacteria bacterium
  misc_feature (1)..(153): tr|A0A2U1RX23|A0A2U1RX23_9PROT NADPH-dependent 7-cyano- 7-deazaguanine reductase OS=Betaproteobacteria bacteriu m OX=1891241 GN=queF PE=3 SV=1
MPKKSPARSPAAGLKALGAGPRLAPSRLLETFPNPNPGRDYAIRMEIPEFTCLCPKTGQPDFATLRLEYVPDAKCVELKSLKLYVWSFRNEGKFHEAVTNEILDDLVAATRPRFMRLTAEFYVRGGIYTTVEADYRMKGWSPAERVDLGPWEE

SEQ ID NO: 44620 - protein, 166 aa, Bhargavaea beijingensis
  misc_feature (1)..(166): tr|A0A1G6Y912|A0A1G6Y912_9BACL NADPH-dependent 7-cyano- 7-deazaguanine reductase OS=Bhargavaea beijingensis OX= 426756 GN=queF PE=3 SV=1
MSGRSHEQGLNDLTLLGNQNTQYSTEYAPEVLEAVDNLHTNRDYFVKFNCPEFTSLCPITGQPDFATMYISFIPDKKLVESKSLKLYLFSFRNHGDFHEDCVNIIMNDLIKLLDPRYIEVWGKFTPRGGISIDPWCNYGRPGTKYEEIANYRLMNHDMNPETIDNR

SEQ ID NO: 44621 - protein, 166 aa, Bhargavaea cecembensis
  misc_feature (1)..(166): tr|A0A161SPS0|A0A161SPS0_9BACL NADPH-dependent 7-cyano- 7-deazaguanine reductase OS=Bhargavaea cecembensis OX=3 94098 GN=queF PE=3 SV=1
MSGRSQEQGLKDLTLLGNQNTQYSTEYAPEVLEAVDNLHTNRDYFVKFNCPEFTSLCPITGQPDFATMYISFIPDKKLVESKSLKLYLFSFRNHGDFHEDCVNIIMNDLIKLLDPRYIEVWGKFTPRGGISIDPWCNYGRPGTKYEEIADYRLMNHDMNPETIDNR

SEQ ID NO: 44622 - protein, 166 aa, Bhargavaea cecembensis
  misc_feature (1)..(166): tr|M7NIW8|M7NIW8_9BACL NADPH-dependent 7-cyano-7-deazag uanine reductase OS=Bhargavaea cecembensis DSE10 OX=123 5279 GN=queF PE=3 SV=1
MSGRSQEQGLNDLTLLGNQNTQYSTEYAPEVLESVDNLHTNRDYFVKFNCPEFTSLCPITGQPDFATMYISFIPDKKLVESKSLKLYLFSFRNHGDFHEDCVNIIMNDLIKLLDPRYIEVWGKFTPRGGISIDPWCNYGRPGTKYEEIASYRLMNHDMNPETITNR

SEQ ID NO: 44623 - protein, 166 aa, Bhargavaea ginsengi
  misc_feature (1)..(166): tr|A0A1H6Z2B1|A0A1H6Z2B1_9BACL NADPH-dependent 7-cyano- 7-deazaguanine reductase OS=Bhargavaea ginsengi OX=4267 57 GN=queF PE=3 SV=1
MSGRSQEQGLKDLTLLGNQNTQYSTEYAPEVLEAVDNLHSNRDYFVKFNCPEFTSLCPITGQPDFATMYISFIPDKKLVESKSLKLYLFSFRNHGDFHEDCVNIIMNDLIKLLDPRYIEVWGKFTPRGGISIDPWCNYGRPGTKYEEIASYRLMNHDMNPETITNR

SEQ ID NO: 44624 - protein, 280 aa, Bibersteinia trehalosi
  misc_feature (1)..(280): tr|A0A426FJ01|A0A426FJ01_BIBTR NADPH-dependent 7-cyano- 7-deazaguanine reductase OS=Bibersteinia trehalosi OX=4 7735 GN=queF PE=3 SV=1
MNYNDKSLSALKLGQKTEYKNQYDATLLQPVPRRLNRDGLGITEQQPFTQGADIWTAYELSWLNHKGVPQVAIADIWLDCQSENLIESKSFKLYLNSFNQTQFADWESVQRTIQSDLSACASGQVLVKIRKLSEFSAQPISDFQGELLDELDIEIDSYAFSNCYLENVSEGERVEETLVSHLLKSNCLITSQPDWGSVQIHYVGKKLNREKVLRYLISFREHNEFHEQCVERIFCDLMQFGEIEKLTVYARYTRRGGLDINPFRSNFENVPQFNYRMARQ

SEQ ID NO: 44625 - protein, 280 aa, Bibersteinia trehalosi
  misc_feature (1)..(280): tr|A0A4V7I9C6|A0A4V7I9C6_BIBTR NADPH-dependent 7-cyano- 7-deazaguanine reductase OS=Bibersteinia trehalosi USDA -ARS-USMARC-188 OX=1263829 GN=queF PE=3 SV=1
MNYNDKSLSALKLGQKTEYKNQYDATLLQPVPRRLNRDGLGITEQQPFTQGADIWTAYELSWLNHKGVPQVAIADIWLDCQSENLIESKSFKLYLNSFNQTKFSDWDSVQRTIQSDLSACASGQVLVKIRKLSEFSAQPISDFQGELLDELDIEIDSYAFSNCYLENVSEGERVEETLVSHLLKSNCLITSQPDWGSVQIHYVGKKLNREKVLRYLISFREHNEFHEQCVERIFCDLMQFGEIEKLTVYARYTRRGGLDINPFRSNFENVPQFNYRMARQ

SEQ ID NO: 44626 - protein, 170 aa, Bilophila sp.
  misc_feature (1)..(170): tr|G1V4B5|G1V4B5_9DELT NADPH-dependent 7-cyano-7-deazag uanine reductase OS=Bilophila sp. 4_1_30 OX=693988 GN=q ueF PE=3 SV=1
MTMTNGGDQTAQLTVLGTGRLPQPEGGPSVSLLEVFPNRFPHRPYVVSMAFPEYTSLCPVTGQPDFGTIVVEFIPDQKCVESKSFKLYMFAYRNHQSFMESITNTILEDFVEALDPMWCRVKGLFSPRGATYLHVFAEHYKKLDDPAKAEEVRQAVADWKREAAPHTWDK

SEQ ID NO: 44627 - protein, 170 aa, Bilophila wadsworthia
  misc_feature (1)..(170): tr|E5Y3W8|E5Y3W8_BILWA NADPH-dependent 7-cyano-7-deazag uanine reductase OS=Bilophila wadsworthia 3_1_6 OX=5631 92 GN=queF PE=3 SV=1
MAMTNGGDQTAQLTVLGTGRLPQPEGGPSASLLEVFPNRFPHRPYVVSMAFPEYTSLCPVTGQPDFGTIVVEFIPDQKCVESKSFKLYMFAYRNHQSFMESITNTILEDFVEALDPMWCRVKGLFSPRGATYLHVFAEHYKKLDDPAKAEEVRQAVADWKREAAPHTWDK

SEQ ID NO: 44628 - protein, 282 aa, Biostraticola sp.
  misc_feature (1)..(282): tr|A0A4U2UNC0|A0A4U2UNC0_9ENTR NADPH-dependent 7-cyano- 7-deazaguanine reductase OS=Biostraticola sp. BGMRC 203 1 OX=2575567 GN=queF PE=3 SV=1
MSVNEKHPVLRELPLGRPADYRDRYDPSLLRGVPRALNREPLGLDAATPGFFGADIWTLYELSWLNEKGMPQVAVGEMILDAGSRNLPESKSFKLYLNSFNQTRFADWAQVRDTVINDLSRCAEGDVDLTLFRLNEFTGAVIADLAGECVDEQDIQFDDYTFGNHWLSQAADPAIEVDETLVSHVLKSNCLITHQPDWGSIQITYRGPRIDREALLRYLVSFRQHNEFHEQCVERIFTDIMRCCHPRQLTVYARYTRRGGLDINPWRSNTPFTPSKSRLARQ

SEQ ID NO: 44629 - protein, 282 aa, Biostraticola tofi
  misc_feature (1)..(282): tr|A0A4R3YJI0|A0A4R3YJI0_9ENTR NADPH-dependent 7-cyano- 7-deazaguanine reductase OS=Biostraticola tofi OX=46610 9 GN=queF PE=3 SV=1
MSNYQDSQSLQSLTLGKPTAYQDQYDASLLQAVPRSLNREPLGLTPTSLPFHGADIWTLYELSWLNANGLPQVAVGEISLNADSKSLIESKSFKLYLNSFNQTRFDNWDRVQGTLVRDLSRCAQGDVSVSLCALNALDNQPIAAFAGECIDEQDIRIDDYTFNPAYLEYAAEEGRPVNEVLVSHLLKSNCLITHQPDWGSVQISYCGPRINREALLRYLVSFRHHNEFHEQCVERIFNDIMRFCHPEQLSVYARYTRRGGLDINPWRSNASFIPSTGRLARQ

SEQ ID NO: 44630 - protein, 280 aa, Bisgaardia hudsonensis
  misc_feature (1)..(280): tr|A0A4R2N1A1|A0A4R2N1A1_9PAST NADPH-dependent 7-cyano- 7-deazaguanine reductase OS=Bisgaardia hudsonensis OX=1 09472 GN=queF PE=3 SV=1
MNYDDNSLKSLKLGQKTEYATNYDRTLLQAVPRKLNRDTLGVTTSQPFTIGSDIWTAYEVSWLNNKGLPQVAIADITIDFRSENLIESKSFKLYLNSFNQTRFTNLQEIESIIKEDLTNCAKGKVKVALNTLDKYKNQTIATLQGFCIDNQDIEINDYTFNTDILKNCIDSEDVIEETLISHLLKSNCLITNQPDWGSIQIHYIGKKINQEKLLRYIVSFRQHNEFHEQCVERIFCDLMRFAKPEKLTVYARYTRRGGLDINPFRSNFEEIPNNLRLARQ

SEQ ID NO: 44631 - protein, 113 aa, Blastocatellia bacterium
  misc_feature (1)..(113): tr|A0A317HQW4|A0A317HQW4_9BACT NADPH-dependent 7-cyano- 7-deazaguanine reductase OS=Blastocatellia bacterium OX =2052146 GN=queF PE=3 SV=1
MSSSAIETFPNPRPERDFEIAIRCPEFTSLCPKTGLPDFGEIRITYVPDALCVELKSLKYYMIGFRNRGIFYEHVTNEILDDLVAAIRPRRITVVGDFSVRGGIKTVVTANYP

SEQ ID NO: 44632 - protein, 140 aa, Blastocatellia bacterium
  misc_feature (1)..(140): tr|A0A3B9LP44|A0A3B9LP44_9BACT NADPH-dependent 7-cyano- 7-deazaguanine reductase OS=Blastocatellia bacterium OX =2052146 GN=queF PE=3 SV=1
MAIGEDKLAPVNQQGLDVRSTPREEMGLFPLDTFAYEFPGREVKIDFEITEFTAICPFSDFPDFATIRLQYVPNERCVELKSLKLYINSFRNVKIFHEHVINVILEDFVRAGDPLSVEIEGDFHVRGNIKTVVRASYKRQ

SEQ ID NO: 44633 - protein, 149 aa, Blastochloris sp.
  misc_feature (1)..(149): tr|A0A348G0W3|A0A348G0W3_9RHIZ NADPH-dependent 7-cyano- 7-deazaguanine reductase OS=Blastochloris sp. GI OX=223 3851 GN=queF PE=3 SV=1
MTDESLQLGRHVPLPASPDRALLERVPNPHSDTNYVARFTCPEFTSLCPVTGQPDFALLVIDYVPGDWLVESKSLKLYLASFRNHGAFHEDCTIAVGKRLVGLLEPRWLRIGGYWFPRGGMPIDIFWQTAAPPAGLFIPDQGMPPYRGR

SEQ ID NO: 44634 - protein, 150 aa, Blastochloris viridis
  misc_feature (1)..(150): tr|A0A0H5BQ60|A0A0H5BQ60_BLAVI NADPH-dependent 7-cyano- 7-deazaguanine reductase OS=Blastochloris viridis OX=10 79 GN=queF PE=3 SV=1
MTTETHLQLGRHVALPASPDQALLERVPNPHADTNYVARFTCPEFTSLCPVTGQPDFALLVIDYVPGDWLVESKSLKLYLASFRNHGAFHEDCTIAVGKKLASLLEPRWLRIGGYWFPRGGMPIDIFWQTAAPPQGLFIPDQGVPPYRGR

SEQ ID NO: 44635 - protein, 152 aa, Blastomonas fulva
  misc_feature (1)..(152): tr|A0A222X469|A0A222X469_9SPHN NADPH-dependent 7-cyano- 7-deazaguanine reductase OS=Blastomonas fulva OX=155072 8 GN=queF PE=3 SV=1
MSDQPQTRFLGKDSPMPTSPETAVLDYVPNPRPGKPYLVRFAVPEFTSLCPVTGQPDFAHLVIDYAPDKVMVESKSLKLFLGSFRNHQAFHEDCTVGIGERLFDEMQPHWLRIGGYWYPRGGIPIDVFWQSGEPPAGLWLPPQEVPGYRGRG

SEQ ID NO: 44636 - protein, 137 aa, Blastomonas natatoria
  misc_feature (1)..(137): tr|A0A2V3URT8|A0A2V3URT8_9SPHN NADPH-dependent 7-cyano- 7-deazaguanine reductase OS=Blastomonas natatoria OX=34 015 GN=queF PE=3 SV=1
MPTSPEEAVLDYVPNPRPGRPYLVRFTAPEFTSLCPVTGQPDFAHLVIDYAPDRVMVESKSLKLFLGSFRNHQAFHEDCTVGIAERLHEEMQPHWLRIGGYWYPRGGIPIDVFWQSGEPPAGLWLPPQDVPGYRGRG

SEQ ID NO: 44637 - protein, 137 aa, Blastomonas sp.
  misc_feature (1)..(137): tr|W9BWT6|W9BWT6_9SPHN NADPH-dependent 7-cyano-7-deazag uanine reductase OS=Blastomonas sp. CACIA14H2 OX=141987 6 GN=queF PE=3 SV=1
MPTSPEAAVLDYVPNPRPGRPYLVRFTAPEFTSLCPVTGQPDFAHLVIDYAPDKVMVESKSLKLFLGSFRNHQAFHEDCTVGIAERMFEEMQPHWLRIGGYWYPRGGIPIDVFWQSGEPPAGLWLPPQDVPGYRGRG

SEQ ID NO: 44638 - protein, 152 aa, Blastomonas sp.
  misc_feature (1)..(152): tr|A0A2D6H6Z0|A0A2D6H6Z0_9SPHN NADPH-dependent 7-cyano- 7-deazaguanine reductase OS=Blastomonas sp. OX=1909299 GN=queF PE=3 SV=1
MTDQPQTRFLGKDSPMPTSPEEAVLDYVPNPRPGRPYLVRFTVPEFTSLCPVTGQPDFAHLVIDYAPDRVMVESKSLKLFLGSFRNHQAFHEDCTVGIAERLFEEMQPHWLRIGGYWYPRGGIPIDVFWQSGEPPQGLWLPPQDVPGYRGRG

SEQ ID NO: 44639 - protein, 151 aa, Blastopirellula cremea
  misc_feature (1)..(151): tr|A0A368KUP5|A0A368KUP5_9PLAN NADPH-dependent 7-cyano- 7-deazaguanine reductase OS=Blastopirellula cremea OX=1 031537 GN=queF PE=3 SV=1
MSGLAISARTPQNNSLPSSKEFRTVPEDFRAILETFENQHPQRDYEIEISVPEFTSVCPKTGQPDFGTITISYIPESLCVELKSLKMYMQAFRNQGIFYENVTNEILNDLVAAMQPRWMQVRAEFTPRGGISSTITVEHYNETPPDELQVI

SEQ ID NO: 44640 - protein, 128 aa, Blastopirellula marina
  misc_feature (1)..(128): tr|A3ZZE3|A3ZZE3_9PLAN NADPH-dependent 7-cyano-7-deazag uanine reductase OS=Blastopirellula marina DSM 3645 OX= 314230 GN=queF PE=3 SV=1
MATQFRDILETFENQNPDRDYNIEIVCPEFTSVCPKTGQPDFGTLIFNYIPEEKCVELKSLKMYLQAFRNEGIFYENVTNRILDDLVAVLEPRWMHLEAKFTPRGGISTNVTVEHYAETPEEDEEEEA

SEQ ID NO: 44641 - protein, 146 aa, Blastopirellula marina
  misc_feature (1)..(146): tr|A0A2S8FW47|A0A2S8FW47_9PLAN NADPH-dependent 7-cyano- 7-deazaguanine reductase OS=Blastopirellula marina OX=1 24 GN=queF PE=3 SV=1
MRTGTAQNNSLPSSKELRTVPEDFRAILETFENQHPQRDYEIEISVPEFTSVCPKTGQPDFGTITITYIPESLCVELKSLKMYMQAFRNQGIFYENVTNEILNDLVSAMQPRWMQVRAEFTPRGGISSTITVEHYNETPPDELTVI

SEQ ID NO: 44642 - protein, 121 aa, Blastopirellula sp.
  misc_feature (1)..(121): tr|A0A2G2JP23|A0A2G2JP23_9PLAN NADPH-dependent 7-cyano- 7-deazaguanine reductase OS=Blastopirellula sp. OX=2024 826 GN=queF PE=3 SV=1
MAEEFRDLLETFENQHPGRDYTIEIDCPEFTSVCPKTGQPDFGSLTFTYIPDKLCVELKSLKMYLQAFRNEGIFYENVTNRIHDDLVSALNPRWFRVVADFTARGGISTSITVEHTAETDE

SEQ ID NO: 44643 - protein, 122 aa, Blastopirellula sp.
  misc_feature (1)..(122): tr|A0A2E0B0E8|A0A2E0B0E8_9PLAN NADPH-dependent 7-cyano- 7-deazaguanine reductase OS=Blastopirellula sp. OX=2024 826 GN=queF PE=3 SV=1
MSSNLLETFENPHPQRDYVIEHVAPEFTSVCPKTSHPDFATIVLSYVPDTLCVELKSYKLYLQSFRNQGIFYEDVTNCILNDLVACLRPRSMTMVAKFSARGGISSTITAEYSATAAGEVTG

SEQ ID NO: 44644 - protein, 188 aa, Blautia hydrogenotrophica
  misc_feature (1)..(188): tr|R5C7X0|R5C7X0_9FIRM NADPH-dependent 7-cyano-7-deazag uanine reductase OS=Blautia hydrogenotrophica CAG:147 O X=1263061 GN=queF PE=3 SV=1
MAACAGEYIQMTRQMKNEKGERSMSGREKAELDGVSLLGNKKVSYPTDYAPQMLETFPNKHPENDYFVKFNCPEFTSLCPMTGQPDFATIYISYVPGERMVESKSLKLYLFSFRNHGDFHEDCVNIIMKDLIRLMDPKYIEVWGKFTPRGGISIDPYCNYGKPGTCWEKVAFERLTHHDLYPEKVDNR

SEQ ID NO: 44645 - protein, 165 aa, Blautia hydrogenotrophica
  misc_feature (1)..(165): tr|A0A173T7H4|A0A173T7H4_9FIRM NADPH-dependent 7-cyano- 7-deazaguanine reductase OS=Blautia hydrogenotrophica O X=53443 GN=queF PE=3 SV=1
MSGREKAELDGVSLLGNKKVSYPTDYAPQMLETFPNKHPENDYFVKFNCPEFTSLCPMTGQPDFATIYISYVPGERMVESKSLKLYLFSFRNHGDFHEDCVNIIMKDLIRLMDPKYIEVWGKFTPRGGISIDPYCNYGKPGTCWEKVAFERLTHHDLYPEKVDNR

SEQ ID NO: 44646 - protein, 164 aa, Blautia luti
  misc_feature (1)..(164): tr|A0A564VVN3|A0A564VVN3_9FIRM NADPH-dependent 7-cyano- 7-deazaguanine reductase OS=Blautia luti OX=89014 GN=qu eF PE=3 SV=1
MSRENLEKEGITLLGNQKVKYPDNYAPEVLETFLNKHPDNDYFVKFNCPEFTSLCPITGQPDFATITISYVPGEKMVESKSLKLYLFSFRNHGDFHEDCVNIIMKDLIRLMDPKYIEVWGKFTPRGGISIDPYCNYGKAGTRWEEIAWKRLTEHDMYPEKIDNR

SEQ ID NO: 44647 - protein, 164 aa, Blautia obeum; identical to SEQ ID NO: 44646
  misc_feature (1)..(164): tr|A0A367FV83|A0A367FV83_9FIRM NADPH-dependent 7-cyano- 7-deazaguanine reductase OS=Blautia obeum OX=40520 GN=q ueF PE=3 SV=1

SEQ ID NO: 44648 - protein, 165 aa, Blautia obeum
  misc_feature (1)..(165): tr|A0A411ZLH0|A0A411ZLH0_9FIRM NADPH-dependent 7-cyano- 7-deazaguanine reductase OS=Blautia obeum OX=40520 GN=q ueF PE=3 SV=1
MTGRSKEETADITLLGNQKTQYPCDYAPEMLETFENKHQGNDYFVKFNCPEFTSLCPITGQPDFATVTISYVPNIKMVESKSLKLYLFSFRNHGDFHEDCMNIIMKDLIKLMDPKYIEVWGKFTPRGGISIDPYCNYGKPGTKWEEIAFNRMANHDMYPEKVDNR

SEQ ID NO: 44649 - protein, 160 aa, Blautia sp.
  misc_feature (1)..(160): tr|A0A416NSU6|A0A416NSU6_9FIRM NADPH-dependent 7-cyano- 7-deazaguanine reductase OS=Blautia sp. AF22-5LB OX=229 2964 GN=queF PE=3 SV=1
MREKENLTLLGNQQTEYSMDYNPSVLEAFQNKHPENDYFVKFNCPEFTSLCPITGQPDFATITISYVPDERLVESKSLKLYLFSFRNHGDFHEDVINIIMKDLVSLLEPKYIEVWGKFLPRGGLSIDPYCNYGKPGTDWEKVAWNRMSNHDMFPEKVDNR

SEQ ID NO: 44650 - protein, 164 aa, Blautia sp.; identical to SEQ ID NO: 44646
  misc_feature (1)..(164): tr|A0A1G5GIX4|A0A1G5GIX4_9FIRM NADPH-dependent 7-cyano- 7-deazaguanine reductase OS=Blautia sp. SF-50 OX=152080 5 GN=queF PE=3 SV=1

SEQ ID NO: 44651 - protein, 277 aa, Unknown
  misc_feature (1)..(277): tr|A0A1U9VJT1|A0A1U9VJT1_9RALS NADPH-dependent 7-cyano- 7-deazaguanine reductase OS=blood disease bacterium A2- HR MARDI OX=1944648 GN=queF PE=3 SV=1
MSHPEHSPLGKVSAYKTQYDPSLLFPIPRQAKRDEIGLAAGSALPFFGVDLWNLYELSWLNLKGKPQVAIGTVIVPADSPNIVESKSFKLYLNSFNQTKVASSEALQQLIHHDLSEACGAPVQVRIVPREEFGRQKMGELEGLSLDRLDIETDVYQPTPGLLHADLDESPVEEVLVSHLLKSNCLVTGQPDWGSVQIRYVGAPINQEGLLKYLISFREHNEFHEQCVERIFMDIQRQCQPVKLAVYARYTRRGGLDINPFRTNFNTPWPDNLRNARQ

SEQ ID NO: 44652 - protein, 277 aa, Unknown; identical to SEQ ID NO: 44651
  misc_feature (1)..(277): tr|G2ZQ15|G2ZQ15_9RALS NADPH-dependent 7-cyano-7-deazag uanine reductase OS=blood disease bacterium R229 OX=741 978 GN=queF PE=3 SV=1

SEQ ID NO: 44653 - protein, 162 aa, Bombella intestini
  misc_feature (1)..(162): tr|A0A1S8GQP3|A0A1S8GQP3_9PROT NADPH-dependent 7-cyano- 7-deazaguanine reductase OS=Bombella intestini OX=15390 51 GN=queF PE=3 SV=1
MTDHTPKGPTAPGTEKLNQLGRQTIQPESPDVAELERVPAPHKGRRYVVRFTAPEFTSLCPVTGQPDFAHIVIDYIPRDWIVESKSLKLYLTSFRNHGAFHEDCSVTIATRLVELLDPEWLRIGAYWYPRGGMPIDVFWQTGPAPADVWIPAQDVPGYRGRG

SEQ ID NO: 44654 - protein, 273 aa, Bordetella ansorpii
  misc_feature (1)..(273): tr|A0A157RJ59|A0A157RJ59_9BORD NADPH-dependent 7-cyano- 7-deazaguanine reductase OS=Bordetella ansorpii OX=2887 68 GN=queF PE=3 SV=1
MSLSDAPLGQTVSYPSRYDPSVLFPIARAQNRASLPLAEPPAWTGADIWTAYELSWLTPKGKPRVAMATFTVPADSPNLIESKSFKLYLNSFNQTRLDNAQALRDRLERDLSAAAGAPVTLEMMLPQHFARQQIAELDGIDLDKLDVEIDAYQPAPELLRCQDGPVVEETLCSRLLKSNCPVTGQPDWGSVQIRYRGRPIDREALLKYIVSFREHAGFHEHCVETIYADLMRACAPEELTVYARYTRRGGLDINPWRSNAAAPVIAESRTARQ

SEQ ID NO: 44655 - protein, 273 aa, Bordetella ansorpii
  misc_feature (1)..(273): tr|A0A157SPT5|A0A157SPT5_9BORD NADPH-dependent 7-cyano- 7-deazaguanine reductase OS=Bordetella ansorpii OX=2887 68 GN=queF PE=3 SV=1
MSLSDAPLGQTVSYPSRYDPSVLFPIARAQNRASLQLAEPPAWTGADIWTAYELSWLTPKGKPRVAMATFTVPADSPNLIESKSFKLYLNSFNQTRLDNAQALRDRLERDLSAAAGAPVTLEMMLPQHFARQQIAELEGIDLDKLDVEIDTYQPAPELLRCQDGPVVEETLCSRLLKSNCPVTGQPDWGSVQIRYRGRPIDRESLLKYIVSFREHAGFHEHCVETIYTDLMRACAPEALTVYARYTRRGGLDINPWRSNAATPVIAESRTARQ

SEQ ID NO: 44656 - protein, 273 aa, Bordetella avium
  misc_feature (1)..(273): sp|Q2KXN2|QUEF_BORA1 NADPH-dependent 7-cyano-7-deazagua nine reductase OS=Bordetella avium (strain 197N) OX=360 910 GN=queF PE=3 SV=1
MPLSDAPLGHNVAYPSEYNAALLFPIARAENRAGLGLDGALPFDGTDIWNAYELSWLDAKGKPRIAMASFRIPASSPNIIESKSFKLYLNSFNQTRLPNAQTLRDLLEKDLSAAAGAPVDMDFILPQRFDTLRIQELSGINLDKLDVEVDRYEPAPELLGCTGTGIIEETLMSRLLKSNCPVTGQPDWASVQIAYRGRPIDRAGLLKYIISFRQHAEFHEHCVERIFCDLMQACQPEQLTVYARYTRRGGLDINPWRSNAGASAPADLRGARQ

SEQ ID NO: 44657 - protein, 275 aa, Bordetella bronchialis
  misc_feature (1)..(275): tr|A0A193FUG1|A0A193FUG1_9BORD NADPH-dependent 7-cyano- 7-deazaguanine reductase OS=Bordetella bronchialis OX=4 63025 GN=queF PE=3 SV=1
MNLDQAPLGHDIAYPGQYDPGLLFPVPRADNRAAIGIGASLPFQGCDIWNAYELSWLNPRGKPQVAIGRFIVPADTPCIIESKSFKLYLNSLNQTPLPDAAAYIERVERDLGAVAGGPVRLQLIPPHAFHQERIANLAGATLDDLDIETDAYTPAPQLLRCEPGARVVEESLTSDLLKSNCPVTGQPDWGSVQIGYRGPKLDRAALLAYIVSFREHAEFHEHCVERIFTDVMAACRPQALSVYARYTRRGGLDINPWRATPGWPAPPMDLRTARQ

SEQ ID NO: 44658 - protein, 273 aa, Bordetella bronchiseptica
  misc_feature (1)..(273): sp|Q7WH69|QUEF_BORBR NADPH-dependent 7-cyano-7-deazagua nine reductase OS=Bordetella bronchiseptica (strain ATC C BAA-588 / NCTC 13252 / RB50) OX=257310 GN=queF PE=3 S V=2
MSLSNAPLGQHVAYPSQYDPGLLFPIPRATNRASLQLGATLPFTGVDLWNAYELSWLDARGKPRVAMATFSFPADSPNIVESKSFKLYLNSFNQTRLPNAQALRDRLERDLAAAAGAPVGLEFISPQRFGELNMAELDGIYIDKLDIEIDTYEPAPQLLQCAPGDEVEETLATRLLKSNCPVTGQPDWASLQVRYRGRPIDRAALLKYVVSFRQHAEFHEHCVERIFGDIMRACQPRQLTVYARYTRRGGLDINPWRSNFESAPPADVRTARQ

SEQ ID NO: 44659 - protein, 303 aa, Bordetella bronchiseptica
  misc_feature (1)..(303): tr|A0A3T0P6C4|A0A3T0P6C4_BORBO NADPH-dependent 7-cyano- 7-deazaguanine reductase OS=Bordetella bronchiseptica O X=518 GN=queF PE=3 SV=1
MTESAFHIAKKAGRGSAYNAGIIAYADPVSMSLSNAPLGQHVAYPSQYDPGLLFPIPRATNRASLQLGATLPFTGVDLWNAYELSWLDARGKPRVAMATFSFPADSPNIVESKSFKLYLNSFNQTRLPNAQALRDRLERDLAAAAGAPVGLEFISPQRFGELNMAELDGIYIDKLDIEIDTYEPAPQLLQCAPGDEVEETLATRLLKSNCPVTGQPDWASLQVRYRGRPIDRAALLKYVVSFRQHAEFHEHCVERIFGDIMRACQPRQLTVYARYTRRGGLDINPWRSNFESAPPADVRTARQ

SEQ ID NO: 44660 - protein, 274 aa, Bordetella flabilis
  misc_feature (1)..(274): tr|A0A193GF75|A0A193GF75_9BORD NADPH-dependent 7-cyano- 7-deazaguanine reductase OS=Bordetella flabilis OX=4630 14 GN=queF PE=3 SV=1
MSLANAPLGHDVAYPDHYDATLLFPIDRAANRGALGIATPLPFTGQDIWNAYELSWLNARGKPQVALGRFTVPADSPRIVESKSFKLYLNSLNQTRLPDARAYIERVVADVSAAVGTPVGLELLPSDRFADARVGVLPGETLDDLDIDIDRYTPDSALLRCAPDAGIVEETLTSELLKSNCPVTGQPDWGGVQISYRGRRIDRAALLSYIVSFRQHTEFHEHCVERMFMDIMAACAPSALCVYARYTRRGGLDINPWRATPGMAAPADIRTARQ

SEQ ID NO: 44661 - protein, 276 aa, Bordetella genomosp.
  misc_feature (1)..(276): tr|A0A261S0J2|A0A261S0J2_9BORD NADPH-dependent 7-cyano- 7-deazaguanine reductase OS=Bordetella genomosp. 10 OX= 1416804 GN=queF PE=3 SV=1
MTLQDAPLGHEVAYPDRYDPTLLFPIDRAPNRAALGITADSLPFEAGVDIWNAYEVSWLDPRGKPRVALASFGVPATTPRIIESKSFKLYLNSYNQERMTDADAVAARMRRDLSAAAGGDVGVRLIAPDQFDAQRIAELDGVCLDDLDVEIDTYTPAPQLLRTAGEAGVVEETLMSRLLKSNCPVTGQPDWGSVQVRYRGPRLDRAGLLAYIVSFRQHADFHEHCVERMFTDILRTCRPERLSVYARYTRRGGLDINPWRATRDMPTPVDVRTARQ

SEQ ID NO: 44662 - protein, 274 aa, Bordetella genomosp.
  misc_feature (1)..(274): tr|A0A261SII6|A0A261SII6_9BORD NADPH-dependent 7-cyano- 7-deazaguanine reductase OS=Bordetella genomosp. 1 OX=1 395607 GN=queF PE=3 SV=1
MSLSNAPLGHSVAYPTAYDPSLLFPIPRAGNRATLALGVALPFRGADIWNAYELSWLDAKGKPRVAMATFVIPADSPNIIESKSFKLYLNSFNQARLPNAQALRDHLERDLSQAAGAPVALDFILPQRFGELAIGELEGDYLDKLDVEIDTYEPAPQLLAVAGDTVVEETLASRLLKSNCPVTGQPDWASVQIRYRGRPLDRAALLKYIVSFRQHAEFHEHCVERIFTDIQRACAPEWLTVYARYTRRGGLDINPWRSNAPGASLPADLRIARQ

SEQ ID NO: 44663 - protein, 280 aa, Bordetella hinzii
  misc_feature (1)..(280): tr|A0A0H4W1V6|A0A0H4W1V6_9BORD NADPH-dependent 7-cyano- 7-deazaguanine reductase OS=Bordetella hinzii OX=103855 GN=queF PE=3 SV=1
MPLTDAPLGHSVAYPSEYDASLLFPIPRAENRASLGLDGLPPLPGGALPFRGVDIWNAYEVSWLDAKGKPRIAMASFRVPADSPNIIESKSFKLYLNSFNQTRLPNAQALRERLEADLSAAAGAPIGMDFILPQRFETLRIAELEGISLDKLDVEIDCYEPAPQLLACAEGEVVEETLVSRLLKSNCPVTGQPDWGSVQIAYRGRPIDRAGLLKYIVSFRQHAEFHEHCVERIFCDLMRACRPEQLSVYARYTRRGGLDINPWRSNTAASAPADIRTARQ

SEQ ID NO: 44664 - protein, 280 aa, Bordetella holmesii
  misc_feature (1)..(280): tr|A0A158M479|A0A158M479_9BORD NADPH-dependent 7-cyano- 7-deazaguanine reductase OS=Bordetella holmesii CDC-H58 5-BH OX=1331206 GN=queF PE=3 SV=1
MPLTDAPLGHNVAYPSEYDASLLFPIPRSDNRAALGLDRMQALPGSALPFHGTDIWNAYELSWLDAKGKPRIAMASFRLPANSPNIIESKSFKLYLNSFNQTRLSNAQALRERLETDLSAAAGSPIEMDFILPQRFDELRIAELGGTNLDKQDVEIEHYEPRPELLRCSVGDVVQETLVSRLLKSNCPVTGQPDWGSVQITYRGRPMDHAALLKYIVSFRQHAEFHEHCAERIFCDLMRACEPEELTVYARYTRRGGLDINPWRSNIPGGAPVDTRTARQ

SEQ ID NO: 44665 - protein, 303 aa, Bordetella parapertussis
  misc_feature (1)..(303): tr|K0M9K6|K0M9K6_BORPB NADPH-dependent 7-cyano-7-deazag uanine reductase OS=Bordetella parapertussis (strain Bp p5) OX=1208660 GN=queF PE=3 SV=1
MTESAFHIAKKAGRGSAYNAGIIAYADPVSMSLSNAPLGQHVAYPSQYDPGLLFPIPRATNRASLQLGATLPFTGVDLWNAYELSWLDARGKPRVAMATFSFPADSPNIVESKSFKLYLNSFNQTRLPNAQALRDRLERDLAAAAGAPVGLEFISPQRFGELNMAELDGIYIDKLDIEIDTYEPAPQLLQCAPGDEVEETLATRLLKSNCPVTDQPDWASLQVRYRGRPIDRAALLKYVVSFRQHAEFHEHCVERIFGDIMRACQPRQLTVYARYTRRGGLDINPWRSNFESAPPADVRTARQ

SEQ ID NO: 44666 - protein, 273 aa, Bordetella parapertussis
  misc_feature (1)..(273): sp|Q7W9J1|QUEF_BORPA NADPH-dependent 7-cyano-7-deazagua nine reductase OS=Bordetella parapertussis (strain 1282 2 / ATCC BAA-587 / NCTC 13253) OX=257311 GN=queF PE=3 S V=1
MSLSNAPLGQHVAYPSQYDPGLLFPIPRATNRASLQLGATLPFTGVDLWNAYELSWLDARGKPRVAMATFSFPADSPNIVESKSFKLYLNSFNQTRLPNAQALRDRLERDLAAAAGAPVGLKFISPQRFGELNMAELDGIYIDKLDIEIDTYEPAPQLLQCAPGDEVEETLATRLLKSNCPVTGQPDWASLQVRYRGRPIDRAALLKYVVSFRQHAEFHEHCVERIFGDIMRACQPRQLTVYARYTRRGGLDINPWRSNFESAPPADVRTARQ

SEQ ID NO: 44667 - protein, 273 aa, Bordetella pertussis
  misc_feature (1)..(273): sp|Q7VWV5|QUEF_BORPE NADPH-dependent 7-cyano-7-deazagua nine reductase OS=Bordetella pertussis (strain Tohama I / ATCC BAA-589 / NCTC 13251) OX=257313 GN=queF PE=3 SV =1
MSLSNAPLGQHVAYPSQYDPGLLFPIPRATNRASLQLGAALPFTGVDLWNAYELSWLDARGKPRVAMATFSFPADSPNIVESKSFKLYLNSFNQTRLPNAQALRDRLERDLAAAAGAPVGLEFISPQRFGELNMAELDGIYIDKLDIEIDTYEPAPQLLQCAPGDEVEETLATRLLKSNCPVTGQPDWASLQVRYRGRPIDRAALLKYVVSFRQHAEFHEHCVERIFGDIMRACQPRQLTVYARYTRRGGLDINPWRSNFESAPPADVRTARQ

SEQ ID NO: 44668 - protein, 273 aa, Bordetella pertussis; identical to SEQ ID NO: 44667
  misc_feature (1)..(273): tr|A0A171K3K8|A0A171K3K8_BORPT NADPH-dependent 7-cyano- 7-deazaguanine reductase OS=Bordetella pertussis 235684 7 OX=1331248 GN=queF PE=3 SV=1

SEQ ID NO: 44669 - protein, 315 aa, Bordetella petrii
  misc_feature (1)..(315): tr|A9IUW3|A9IUW3_BORPD NADPH-dependent 7-cyano-7-deazag uanine reductase OS=Bordetella petrii (strain ATCC BAA- 461 / DSM 12804 / CCUG 43448) OX=340100 GN=queF PE=3 SV =1
MGGHCCAAPAFIWRPLAFTMWNYGPGSSPTMQGLNPACHVCAMSLSNAPLGQNVAYPAHYDPSLLFPIARAQNRASLNLSGPLPFVGVDIWNAYELSWLDRKGKPQVAMARFTVRADSPNIIESKSFKLYLNSYNQTRLDNAEVLGERLANDLSAAAGAPVEVDLILPARFGTLAMAELDGIDLDSLDIAIDTYLPDAGLLRCAAGEPVAETLASRLLKSNCPVTGQPDWASVQISYRGRPLDRAALLRYLVSFRDHAEFHEHCVERIYTDIMAACRPEQLTVYARYTRRGGLDINPWRSNFEAAPPADVRTARQ

SEQ ID NO: 44670 - protein, 280 aa, Bordetella pseudohinzii
  misc_feature (1)..(280): tr|A0A0J6C4F1|A0A0J6C4F1_9BORD NADPH-dependent 7-cyano- 7-deazaguanine reductase OS=Bordetella pseudohinzii OX= 1331258 GN=queF PE=3 SV=1
MPLTDAPLGHSVAYPSEYDASLLFPIPRAENRASLGLDSLTPLPGSALPFRGVDIWNAYEVSWLDAKGKPRIAMASFRVPADSPNIIESKSFKLYLNSFNQTRLPNAQALRERLEADLSAAAGAPMEMDFILPQRFETLRIAELEGISLDKLDVEIDCYEPAPQLLACTEGEVVQETLVSRLLKSNCPVTGQPDWGSVQIAYRGRPIDRAALLKYIVSFRQHAEFHEHCVERIFCDLMRACQPEQLSVYARYTRRGGLDINPWRSNTAAGAPADIRTARQ

SEQ ID NO: 44671 - protein, 285 aa, Bordetella sp.
  misc_feature (1)..(285): tr|A0A2R4XIB9|A0A2R4XIB9_9BORD NADPH-dependent 7-cyano- 7-deazaguanine reductase OS=Bordetella sp. HZ20 OX=2163 011 GN=queF PE=3 SV=1
MSTHTLEIHHPTIALGKEVAYPTRYDPDLLLPISRSLGRALLAGLTQNPEAQIAFTGWDMWRGYELSWFDPRGLPKIGILKAWVPCTSTHIIESKSFKLYLNSLNNERMDDIESVKKRIKSDLSSRVGAEVKVQVVTPQEFASEVISEPLEGCLDDQAIEIGHYQPDPDLLACDPERIVSESVFSRLLKSNCPVTGQPDWASVHIEYEGAAIDHEALLRYIVSYRQHEGFHEQCVEQIFCDLMQRCQPQRLSVYARYTRRGGMDINPWRATQGLPEPVTSRSAQQ

SEQ ID NO: 44672 - protein, 279 aa, Bordetella sp.
  misc_feature (1)..(279): tr|A0A3T0NG39|A0A3T0NG39_9BORD NADPH-dependent 7-cyano- 7-deazaguanine reductase OS=Bordetella sp. J329 OX=1977 852 GN=queF PE=3 SV=1
MSHTPLPGATLLGQSVSYPDHYDPTVLQAIPREAARQALGYAAVLPFQGADIWRAYELSWLNARGKPLVATASFVIPADSPNLIESKSFKLYLNSHNQARHASAAALQELLARDLSRVAQAPVQVALQLDARDMATPPLAELSGQCIDGLDIDIERYDPAPELLACRPDAGTIEETLVSRLLRSNCPVTSQPDWGSVQIQYRGPAVDHAALLRYIISYRTHTGFHEQCVEQIFRDIMAQCRPEQLRVHACYTRRGGLDINPWRGTPGMPAPDAARTPRQ

SEQ ID NO: 44673 - protein, 280 aa, Bordetella trematum
  misc_feature (1)..(280): tr|A0A157LCN6|A0A157LCN6_9BORD NADPH-dependent 7-cyano- 7-deazaguanine reductase OS=Bordetella trematum OX=1238 99 GN=queF PE=3 SV=1
MPLSHAPLGHHVAYPSEYDASLLFPIPRAENRAGLGLSELPPLAGQPLPFRGVDIWTAYELSWLDAKGKPRVAMASFAIPADSPFIIESKSFKLYLNSFNQTRLPNAHALRERLQQDLSKAAGATIAMDFMLPQHFSGQAIGELAGFNLDKQDIEIDRYQPAPELLACLPGDEVEETLVSQLLKSNCPVTGQPDWGSVQIRYRGRPIDRAALLKYIVSFRQHTEFHEHCVERMFCDLMRACQPSELTVYARYTRRGGLDINPWRSNRQDAPPANLRTARQ

SEQ ID NO: 44674 - protein, 151 aa, Bosea lathyri
  misc_feature (1)..(151): tr|A0A1H5W4N8|A0A1H5W4N8_9BRAD NADPH-dependent 7-cyano- 7-deazaguanine reductase OS=Bosea lathyri OX=1036778 GN =queF PE=3 SV=1
MSIDATTLQLGQATHLPTSPEEARLDRVPNPHAGTSYLARFTCPEFTSICPVTGQPDFGILVIDYLPGDWLVESKSLKLYLAAFRNHGAFHEDCTVGIGKTLVELLDPTWFRIGGYWYPRGGIPIDVFWQTGEPPKGLWLPDQGVAPYRGR

SEQ ID NO: 44675 - protein, 151 aa, Bosea lupini
  misc_feature (1)..(151): tr|A0A1H7H4B0|A0A1H7H4B0_9BRAD NADPH-dependent 7-cyano- 7-deazaguanine reductase OS=Bosea lupini OX=1036779 GN= queF PE=3 SV=1
MTIDASTLQLGKASDLPRSPEEARLDRVPNPHAGTDYLARFTCPEFTSICPVTGQPDFGILVIDYLPGHWLVESKSLKLYLGAFRNHGAFHEDCTVGIGKTLVELLEPKWFRIGGYWYPRGGIPIDVFFQTGEAPKGLWLPDQGVAPYRGR

SEQ ID NO: 44676 - protein, 151 aa, Bosea sp.
  misc_feature (1)..(151): tr|A0A0N1LDV4|A0A0N1LDV4_9BRAD NADPH-dependent 7-cyano- 7-deazaguanine reductase OS=Bosea sp. AAP35 OX=1523417 GN=queF PE=3 SV=1
MTLDASSLQLGHATAMPASPEEARLDRVPNPHQGTSYLARFTCPEFTSICPVTGQPDFGILVIDYLPAAWLVESKSLKLYLAAFRNHGAFHEDCTVGIGKRLVDLLEPEWFRIGGYWYPRGGIPIDVFWQTGEPPKGLWLPDQGVAPYRGR

SEQ ID NO: 44677 - protein, 151 aa, Bosea sp.
  misc_feature (1)..(151): tr|A0A1Q3NWC0|A0A1Q3NWC0_9BRAD NADPH-dependent 7-cyano- 7-deazaguanine reductase OS=Bosea sp. 67-29 OX=1895723 GN=queF PE=3 SV=1
MSLDASTLQLGQPSALPASPEEARLDRVPNPHAGTSYLARFTCPEFTSICPVTGQPDFGILVIDYLPGQWLVESKSLKLYLASFRNHGAFHEDCTVGIGKRLVELLEPEWFRIGGYWYPRGGIPIDVFWQTGEPPRGLWLPDQGVAPYRGR

SEQ ID NO: 44678 - protein, 151 aa, Bosea thiooxidans
  misc_feature (1)..(151): tr|A0A0Q3I1D5|A0A0Q3I1D5_9BRAD NADPH-dependent 7-cyano- 7-deazaguanine reductase OS=Bosea thiooxidans OX=53254 GN=queF PE=3 SV=1
MAIDASTLQLGQSSALPASPEEARLDRVPNPHAGTRYLARFTCPEFTSICPVTGQPDFGILVIDYLPGQWLVESKSLKLYLGAFRNHGAFHEDCTVSIGMTLVDLLEPEWFRIGGYWYPRGGIPIDVFWQTGEPPKGLWLPDQGVAPYRGR

SEQ ID NO: 44679 - protein, 152 aa, Bosea vaviloviae
  misc_feature (1)..(152): tr|A0A1D7U5B4|A0A1D7U5B4_9BRAD NADPH-dependent 7-cyano- 7-deazaguanine reductase OS=Bosea vaviloviae OX=1526658 GN=queF PE=3 SV=1
MMTLDASTLQLGQHSALPASPDEARLDRVPNPHAGTNYLARFTCPEFTSICPVTGQPDFGILVIDYLPGDWLVESKSLKLYLGAFRNHGAFHEDCTVGIGKTLVELLQPVWFRIGGYWYPRGGIPIDVFWQTGEPPKGLWLPDQGVAPYRGR

SEQ ID NO: 44680 - protein, 151 aa, Bosea vaviloviae
  misc_feature (1)..(151): tr|A0A0N0MBN9|A0A0N0MBN9_9BRAD NADPH-dependent 7-cyano- 7-deazaguanine reductase OS=Bosea vaviloviae OX=1526658 GN=queF PE=3 SV=1
MSIDASTLQLGHHAELPASPDEARLDRVPNPHQGTSYLARFTCPEFTSICPVTGQPDFGILVIDYLPGQWLVESKSLKLYLGAFRNHGAFHEDCTVGIGKRLVDLLAPEWFRIGGYWYPRGGIPIDVFWQTGEPPKGLWLPDQGVAPYRGR

SEQ ID NO: 44681 - protein, 151 aa, Bosea vestrisii
  misc_feature (1)..(151): tr|A0A543NYA4|A0A543NYA4_9BRAD NADPH-dependent 7-cyano- 7-deazaguanine reductase OS=Bosea vestrisii OX=151416 G N=queF PE=3 SV=1
MSIDASTLQLGQASALPASPQEARLDRVPNPHAGTYYLARFTCPEFTSICPVTGQPDFGILVIDYLPGQWLVESKSLKLYLASFRNHGAFHEDCTVGIGKTLVDLLEPEWFRIGGYWYPRGGIPIDVFWQTGEPPKGLWLPDQGVAPYRGR

SEQ ID NO: 44682 - protein, 276 aa, Bowmanella sp.
  misc_feature (1)..(276): tr|A0A4Q9XQK0|A0A4Q9XQK0_9ALTE NADPH-dependent 7-cyano- 7-deazaguanine reductase OS=Bowmanella sp. JS7-9 OX=160 5368 GN=queF PE=3 SV=1
MSQPDHALSHLSLGKSVTYIEKYAPELLQAVPRSMNRHELDIVASQPFSGCDIWNGYELSWLNSKGKPQVAILRADVPAESENLIESKSFKLYLNSFNQTHFASWQEVQEALQLDLSRCANGNVDVTLYTMQQLSEFNTVSLPGQCIDDLDIEVSQYQPDVSLLTTTDEPVSETLHSHLLKSNCLITSQPDWASIVIRYEGAQIEHASLLKYLIAFRQHNEFHEQCVERIFCDIKSQCKPDKLTVYARYTRRGGLDINPFRSDFEPCWQNLRQARQ

SEQ ID NO: 44683 - protein, 282 aa, Brachymonas denitrificans
  misc_feature (1)..(282): tr|A0A1H8ERH3|A0A1H8ERH3_9BURK NADPH-dependent 7-cyano- 7-deazaguanine reductase OS=Brachymonas denitrificans D SM 15123 OX=1121117 GN=queF PE=3 SV=1
MPTPEQSPLGKAVSYADQYDPTLLFPLPRQPKRDEIGITGRLPFMGADLWTGYELSWLNLRGKPQVALLQVNIPCETPNIIESKSFKLYLNSFNNTRIGLIEEVRERIFADLNEAAWRGAATMDASIGVRLVPSELFDQQPIHELDGLSLDRLDCECTHYHPAPELLTTIPEEGIVSETLTSNLLKSNCLITGQPDWGSVQISYSGPQISHEGLLRYLVSFRNHNEFHEQCVERIFTDIWSRCAPVKLSVYARYTRRGGLDINPFRTSHPQALPPAVRNARQ

SEQ ID NO: 44684 - protein, 299 aa, Brachyspira sp.
  misc_feature (1)..(299): tr|R5H315|R5H315_9SPIR GTP cyclohydrolase I/Nitrile oxi doreductase OS=Brachyspira sp. CAG:484 OX=1262759 GN=BN 676_00018 PE=4 SV=1
MKNITDDIASRFLGKKADGSDVYNPDFLVAVPREENRLHYGIDSNSLPFEGWDVWHAYEFSAMTENGVPVTRVLKLRYNCDNDYIVESKSLKLYLNSFNMSKFGNSVKECLDICKKLITKDLSEKLKTEVCVNFLDNNTERVSIFQNFENIMNYVDEKVLKVEHFKEAPELLSTEDTGVLQEYRLMFDSLRSNCRVTHQPDFGDAFIYYKSKKHILESSLVKYLTSFRSEFHFHEECCEMIFKRLTDILNSGDELFVGALYTRRGGIDICPVRQSRNCTINPAEALADITKFARSGIKQ

SEQ ID NO: 44685 - protein, 165 aa, Bradyrhizobiaceae bacterium
  misc_feature (1)..(165): tr|F7QMK1|F7QMK1_9BRAD NADPH-dependent 7-cyano-7-deazag uanine reductase OS=Bradyrhizobiaceae bacterium SG-6C O X=709797 GN=queF PE=3 SV=1
MSKKPRITKAKTASLQEPASLQLGQQVEPPASPEAAKLDRVPNPHPKDNYLVRFVAPEFTSLCPITGQPDFAHLVIDYVPDQWLVESKALKLYLSSFRNHGAFHEDCTVGIGKRLVKEIKPRWLRIGGYWYPRGGIPIDVFWQTGKLPGGVWVPDQGVAPYRGRG

SEQ ID NO: 44686 - protein, 159 aa, Bradyrhizobiaceae bacterium
  misc_feature (1)..(159): tr|A0A3S0E5J8|A0A3S0E5J8_9BRAD NADPH-dependent 7-cyano- 7-deazaguanine reductase OS=Bradyrhizobiaceae bacterium OX=2072420 GN=queF PE=3 SV=1
MSRKPRAAKAAGTSLQLGQQVEAPASPDTAKLDRVPNPHTDTNYVARFTMPEFTSICPVTGQPDFAILVIDYVPNKWLVESKSLKLYLNSFRNVGSFHEDCTVSIGKRLTKLLAPRWLRIGGYFYPRGGMPIDVFWQAGKLPATVWVPDQGVPPYRGRG

SEQ ID NO: 44687 - protein, 150 aa, Bradyrhizobium arachidis
  misc_feature (1)..(150): tr|A0A1I7IPN4|A0A1I7IPN4_9BRAD NADPH-dependent 7-cyano- 7-deazaguanine reductase OS=Bradyrhizobium arachidis OX =858423 GN=queF PE=3 SV=1
MAKKSLQLGRAVEWPHTPEEAQLDRVPNPQKGTDYLVRFTVPEFTSLCPVTGQPDFAHLMIDYAPGQWLLESKSLKLYIASFRNHGAFHEDCTVMIGKRIASEIKPKWLRIGGYWYPRGGIPIDVFWQTGRVPKGLWVPEQGVAPYRGRG

SEQ ID NO: 44688 - protein, 158 aa, Bradyrhizobium betae
  misc_feature (1)..(158): tr|A0A4Q1V2Y3|A0A4Q1V2Y3_9BRAD NADPH-dependent 7-cyano- 7-deazaguanine reductase OS=Bradyrhizobium betae OX=244 734 GN=queF PE=3 SV=1
MSKKPSKSNNSPALQLGRAVEWPDTPEKAKLDRVPNPQADTDYLVRFTAPEFTSLCPVTGQPDFAHLMIDYAPGQWLLESKSLKLYIASFRNHGAFHEDCTVMIGKRIAAEIKPKWLRIGGYWYPRGGIPIDVFWQTGRVPKGMWVPEQGVAPYRGRG

SEQ ID NO: 44689 - protein, 158 aa, Bradyrhizobium canariense
  misc_feature (1)..(158): tr|A0A1H1PUV6|A0A1H1PUV6_9BRAD NADPH-dependent 7-cyano- 7-deazaguanine reductase OS=Bradyrhizobium canariense O X=255045 GN=queF PE=3 SV=1
MSKTPRKSSKSEGLQLGRAVEWPDTPERAKLDRVPNPQADTNYVVRFTAPEFTSLCPITGQPDFAHLVIDYVPGQWLLESKSLKLYVASFRNHGAFHEDCTVAIGKRISSEIKPKWLRIGGYWYPRGGIPIDVFWQTGRLPKGMWVPEQGVAPYRGRG

SEQ ID NO: 44690 - protein, 153 aa, Bradyrhizobium canariense
  misc_feature (1)..(153): tr|A0A1X3H400|A0A1X3H400_9BRAD NADPH-dependent 7-cyano- 7-deazaguanine reductase OS=Bradyrhizobium canariense O X=255045 GN=queF PE=3 SV=1
MTTMAKKSLQLGRAVEWPHTPEEAQLDRVPNPQKGTDYLVRFTVPEFTSLCPVTGQPDFAHLMIDYAPGQWLLESKSLKLYIASFRNHGAFHEDCTVMIGKRIASEIKPKFLRIGGYWYPRGGIPIDVFWQTGRAPKGLWVPEQGVAPYRGRG

SEQ ID NO: 44691 - protein, 153 aa, Bradyrhizobium centrolobii
  misc_feature (1)..(153): tr|A0A176YD92|A0A176YD92_9BRAD NADPH-dependent 7-cyano- 7-deazaguanine reductase OS=Bradyrhizobium centrolobii OX=1505087 GN=queF PE=3 SV=1
MQTMAQKPLQLGRAVEWPHTPEEAQLDRVPNPQKGTDYLVRFTVPEFTSLCPVTGQPDFAHLMIDYAPGAWLLESKSLKLYIASFRNHGAFHEDCTVMIGKRIAAEIKPKFLRIGGYWYPRGGIPIDVFWQTGRVPKGLWVPEQGVVPYRGRG

SEQ ID NO: 44692 - protein, 162 aa, Bradyrhizobium daqingense
  misc_feature (1)..(162): tr|A0A562KWU1|A0A562KWU1_9BRAD NADPH-dependent 7-cyano- 7-deazaguanine reductase OS=Bradyrhizobium daqingense O X=993502 GN=queF PE=3 SV=1
MSKKPSKSNESPAKPASLQLGRAVEWPDAPEKAKLDRVPNPQAGTDYLVRFTVPEFTSLCPVTGQPDFAHLMIDYAPGAWLLESKSLKLYIASFRNHGAFHEDCTVMIGKRIASEIKPKWLRIGGYWYPRGGIPIDVFWQTGRVPKGMWVPEQGVAPYRGRG

SEQ ID NO: 44693 - protein, 153 aa, Bradyrhizobium diazoefficiens
  misc_feature (1)..(153): tr|A0A0E4BXJ2|A0A0E4BXJ2_9BRAD NADPH-dependent 7-cyano- 7-deazaguanine reductase OS=Bradyrhizobium diazoefficie ns OX=1355477 GN=queF PE=3 SV=1
MTTMAKKSLQLGRAVEWPHTPEEAQLDRVPNPQKGTDYLVRFTVPEFTSLCPVTGQPDFAHLMIDYAPGPWLLESKSLKLYIASFRNHGAFHEDCTVMIGKRIASEIKPKWLRIGGYWYPRGGIPIDVFWQAGRVPKGLWVPEQGVAPYRGRG

SEQ ID NO: 44694 - protein, 153 aa, Bradyrhizobium diazoefficiens
  misc_feature (1)..(153): sp|Q89KV4|QUEF_BRADU NADPH-dependent 7-cyano-7-deazagua nine reductase OS=Bradyrhizobium diazoefficiens (strain JCM 10833 / IAM 13628 / NBRC 14792 / USDA 110) OX=2249 11 GN=queF PE=3 SV=1
MTTMAKKSLQLGRAVEWPHTPEEAQLDRVPNPQKGTDYLVRFTVPEFTSLCPVTGQPDFAHLMIDYAPGPWLLESKSLKLYIASFRNHGAFHEDCTVMIGKRIASEIKPKWLRIGGYWYPRGGIPIDVFWQTGRVPKGLWVPEQGVAPYRGRG

SEQ ID NO: 44695 - protein, 150 aa, Bradyrhizobium elkanii
  misc_feature (1)..(150): tr|A0A4Y3ZA09|A0A4Y3ZA09_BRAEL NADPH-dependent 7-cyano- 7-deazaguanine reductase OS=Bradyrhizobium elkanii OX=2 9448 GN=queF PE=3 SV=1
MAKKTLQLGRAVAWPDSPDKAVLDRVPNPQAGTDYLVRFAIPEFTSVCPITGQPDFAHLVLDYVPGRWLLESKSLKLYAASFRNHGAFHEDCTVMIGKRIVEEIKPKWLRIGGYWYPRGGIPIDVFFQTGRLPKGVWVPDQGVATYRGRG

SEQ ID NO: 44696 - protein, 150 aa, Bradyrhizobium elkanii
  misc_feature (1)..(150): tr|A0A1E3ESU9|A0A1E3ESU9_BRAEL NADPH-dependent 7-cyano- 7-deazaguanine reductase OS=Bradyrhizobium elkanii OX=2 9448 GN=queF PE=3 SV=1
MAKKTLQLGRAVAWPDSPDKAVLDRVPNPQAGTDYLVRFAIPEFTSVCPITGQPDFAHLVLDYVPGRWLLESKSLKLYAASFRNHGAFHEDCTVMIGKRISDEIKPKWLRIGGYWYPRGGIPIDVFFQTGRLPKGLWVPDQGVATYRGRG

SEQ ID NO: 44697 - protein, 158 aa, Bradyrhizobium erythrophlei
  misc_feature (1)..(158): tr|A0A1H4PP81|A0A1H4PP81_9BRAD NADPH-dependent 7-cyano- 7-deazaguanine reductase OS=Bradyrhizobium erythrophlei OX=1437360 GN=queF PE=3 SV=1
MAKKSSKSTTSSDLQLGRAVEWPDAPEKARLDRVPNPQAGTDYLVRFTVPEFTSICPVTGQPDFAHLVIDYVPGRWLLESKSLKLFAASFRNHGAFHEDCTVMIGRRISDEIKPKWLRIGGYWYPRGGIPIDVFFQTGRLPKGLWVPDQGVATYRGRG

SEQ ID NO: 44698 - protein, 158 aa, Bradyrhizobium erythrophlei
  misc_feature (1)..(158): tr|A0A1M5SGT2|A0A1M5SGT2_9BRAD NADPH-dependent 7-cyano- 7-deazaguanine reductase OS=Bradyrhizobium erythrophlei OX=1437360 GN=queF PE=3 SV=1
MSKTPAKASKPKVLQLGRAVEWPHTPEEAQIDRVPNPQRDTNYVVRFTAPEFTSLCPVTGQPDFAHLVIDYVPGQWLLESKSLKLFVASFRNHGAFHEDCTVAIGKRISAEIKPKWLRIGGYWYPRGGIPIDVFWQTGKLPKGMWIPDQGVAPYRGRG

SEQ ID NO: 44699 - protein, 153 aa, Bradyrhizobium genosp.
  misc_feature (1)..(153): tr|A0A4Q7FJS1|A0A4Q7FJS1_9BRAD NADPH-dependent 7-cyano- 7-deazaguanine reductase OS=Bradyrhizobium genosp. SA-3 OX=508868 GN=queF PE=3 SV=1
MTTMAKKSLQLGRAVEWPHTPEDAQLDRVPNPQKGTDYMVRFTVPEFTSLCPVTGQPDFAHLAIDYAPGAWLLESKSLKLYIASFRNHGAFHEDCTVMIGKRIASEIKPKWLRIGGYWYPRGGIPIDVFWQTGRVPKGLWVPEQGVAPYRGRG

SEQ ID NO: 44700 - protein, 162 aa, Bradyrhizobium guangdongense
  misc_feature (1)..(162): tr|A0A410V7X8|A0A410V7X8_9BRAD NADPH-dependent 7-cyano- 7-deazaguanine reductase OS=Bradyrhizobium guangdongens e OX=1325090 GN=queF PE=3 SV=1
MSKKSSKSNNSPANQASLQLGRAVEWPDAPEKAKLDRVPNPQAGTYYLVRFTVPEFTSLCPVTGQPDFAHLMIDYAPGEWLLESKSLKLYIASFRNHGAFHEDCTVMIGKRIAGEIKPKWLRIGGYWYPRGGIPIDVFWQTGRVPKGLWVPEQGVAPYRGRG

SEQ ID NO: 44701 - protein, 158 aa, Bradyrhizobium guangzhouense
  misc_feature (1)..(158): tr|A0A4Q0RIY0|A0A4Q0RIY0_9BRAD NADPH-dependent 7-cyano- 7-deazaguanine reductase OS=Bradyrhizobium guangzhouens e OX=1325095 GN=queF PE=3 SV=1
MSKKPSKSKTSPNLQLGRAVEWPDTPEKAQLDRVPNPQGGTDYLVRFTVPEFTSLCPVTGQPDFAHLMIDYAPGPWLLESKSLKLYIASFRNHGAFHEDCTVMIGKRIASEIKPKWLRIGGYWYPRGGIPIDVFWQTGRVPKGLWVPEQGVAPYRGRG

SEQ ID NO: 44702 - protein, 150 aa, Bradyrhizobium huanghuaihaiense
  misc_feature (1)..(150): tr|A0A562RPN1|A0A562RPN1_9BRAD NADPH-dependent 7-cyano- 7-deazaguanine reductase OS=Bradyrhizobium huanghuaihai ense OX=990078 GN=queF PE=3 SV=1
MAKKSLQLGRAVEWPHTPDEAQLDRVPNPQAGTDYLVRFTVPEFTSLCPVTGQPDFAHLMIDYAPGQWLLESKSLKLYIASFRNHGAFHEDCTVMIGKRIASEIKPKWLRIGGYWYPRGGIPIDVFWQTGRVPKGLWVPEQGVAPYRGRG

SEQ ID NO: 44703 - protein, 150 aa, Bradyrhizobium icense
  misc_feature (1)..(150): tr|A0A533J4R4|A0A533J4R4_9BRAD NADPH-dependent 7-cyano- 7-deazaguanine reductase OS=Bradyrhizobium icense OX=12 74631 GN=queF PE=3 SV=1
MAKKSLQLGRAVEWPDRPENAVLDRVPNPQAGTDYLVRFTAPEFTSICPVTGQPDFAHLVIDFVPGRFLLESKSLKLYIASFRNHGAFHEDCTVMIGKRIADEIKPKWLRIGGYWYPRGGIPIDVFWQTGRLPKGMWVPDQGVAPYRGRG

SEQ ID NO: 44704 - protein, 154 aa, Bradyrhizobium icense
  misc_feature (1)..(154): tr|A0A1B1UGV0|A0A1B1UGV0_9BRAD NADPH-dependent 7-cyano- 7-deazaguanine reductase OS=Bradyrhizobium icense OX=12 74631 GN=queF PE=3 SV=1
MAKKSLPQSLQLGRAVEWPDSPEKAQLDRVPNPQAGTNYLVRFTAPEFTSICPVTGQPDFAHLVIDYVPGQWLLESKSLKLYVASFRNHGAFHEDCTVMIGKRIAIEIKPKFLRIGGYWYPRGGIPIDVFWQTGKLPKDVWVPDQGVAPYRGRG

SEQ ID NO: 44705 - protein, 158 aa, Bradyrhizobium japonicum
  misc_feature (1)..(158): tr|A0A1L3FEF5|A0A1L3FEF5_BRAJP NADPH-dependent 7-cyano- 7-deazaguanine reductase OS=Bradyrhizobium japonicum OX =375 GN=queF PE=3 SV=1
MLEQDVTTMAKKSLQLGRAVEWPHTPEEAQLDRVPNPQKGTDYLVRFTVPEFTSLCPVTGQPDFAHLMIDYAPGPWLLESKSLKLYIASFRNHGAFHEDCTVMIGKRIASEIKPKFLRIGGYWYPRGGIPIDVFWQTGRVPKGLWVPEQGVAPYRGRG

SEQ ID NO: 44706 - protein, 158 aa, Bradyrhizobium japonicum
  misc_feature (1)..(158): tr|A0A1Y2JAZ5|A0A1Y2JAZ5_BRAJP NADPH-dependent 7-cyano- 7-deazaguanine reductase OS=Bradyrhizobium japonicum OX =375 GN=queF PE=3 SV=1
MLEQDVTTMAKKSLQLGRAVEWPHTPEEAQLDRVPNPQKGTDYLVRFTVPEFTSLCPVTGQPDFAHLMIDYAPGPWLLESKSLKLYIASFRNHGAFHEDCTVMIGKRIASEIKPKFLRIGGYWYPRGGIPIDVFWQTGRVPKGLWVPEQGVVPYRGRG

SEQ ID NO: 44707 - protein, 154 aa, Bradyrhizobium jicamae
  misc_feature (1)..(154): tr|A0A0R3M0H8|A0A0R3M0H8_9BRAD NADPH-dependent 7-cyano- 7-deazaguanine reductase OS=Bradyrhizobium jicamae OX=2 80332 GN=queF PE=3 SV=1
MAKKSLPKSLQLGRAVEWPDSPEKAKLDRVPNPQAGTNYLVRFTAPEFTSICPVTGQPDFAHLVIDYAPGQWLLESKSLKLYVASFRNHGAFHEDCTVMIGKRIAAEIKPKWLRIGGYWYPRGGIPIDVFWQTGKLPKDMWVPDQGVAPYRGRG

SEQ ID NO: 44708 - protein, 150 aa, Bradyrhizobium lablabi
  misc_feature (1)..(150): tr|A0A2H9VC61|A0A2H9VC61_9BRAD NADPH-dependent 7-cyano- 7-deazaguanine reductase OS=Bradyrhizobium lablabi OX=7 22472 GN=queF PE=3 SV=1
MAKKPLQLGRAVEWPDSPQKAVLDGVPNPQANTNYLVRFTVPEFTSICPVTGQPDFAHLAVDYVPGRWLLESKSLKLFVASFRSHGAFHEDCTVMIGKRITEAIKPKWLRIGGYWYPRGGIPIDVFWQTGRLPKGMWIPDQGVAPYRGRG

SEQ ID NO: 44709 - protein, 158 aa, Bradyrhizobium lablabi
  misc_feature (1)..(158): tr|A0A0R3MD57|A0A0R3MD57_9BRAD NADPH-dependent 7-cyano- 7-deazaguanine reductase OS=Bradyrhizobium lablabi OX=7 22472 GN=queF PE=3 SV=1
MAKKSSQKSLPASLQLGRAVEWPDSPEKAKLDRVPNPQAGTNYLVRFTAPEFTSICPVTGQPDFAHLVIDYVPGQWLLESKSLKLYVASFRNHGAFHEDCTVMIGKRIAAEIKPKWLRIGGYWYPRGGIPIDVFWQTGKLPKDMWVPDQGVAPYRGRG

SEQ ID NO: 44710 - protein, 150 aa, Bradyrhizobium liaoningense
  misc_feature (1)..(150): tr|A0A151FJV4|A0A151FJV4_9BRAD NADPH-dependent 7-cyano- 7-deazaguanine reductase OS=Bradyrhizobium liaoningense OX=43992 GN=queF PE=3 SV=1
MAKKSLQLGRAVEWPHTPEEAQLDRVPNPQKGTDYLVRFTVPEFTSLCPVTGQPDFAHLMIDYAPGAWLLESKSLKLYIASFRNHGAFHEDCTVMIGKRIASEIKPKFLRIGGYWYPRGGIPIDVFWQTGRVPKGLWVPEQGVAPYRGRG

SEQ ID NO: 44711 - protein, 154 aa, Bradyrhizobium lupini; identical to SEQ ID NO: 43810
  misc_feature (1)..(154): tr|K5CXY5|K5CXY5_RHILU NADPH-dependent 7-cyano-7-deazag uanine reductase OS=Bradyrhizobium lupini HPC(L) OX=122 9491 GN=queF PE=3 SV=1

SEQ ID NO: 44712 - protein, 158 aa, Bradyrhizobium macuxiense
  misc_feature (1)..(158): tr|A0A560MD02|A0A560MD02_9BRAD NADPH-dependent 7-cyano- 7-deazaguanine reductase OS=Bradyrhizobium macuxiense O X=1755647 GN=queF PE=3 SV=1
MAKKSSKSTISPGLQLGRAVEWPDAPEKAQLDRVPNPQAGTDYLVRFTVPEFTSICPVTGQPDFAHLVIDYVPSRWLLESKSLKLFAASFRNHGAFHEDCTVMIGKRISDEIKPKWLRIGGYWYPRGGIPIDVFFQTGRLPKGIWVPDQGVATYRGRG

SEQ ID NO: 44713 - protein, 158 aa, Bradyrhizobium macuxiense
  misc_feature (1)..(158): tr|A0A109JYA9|A0A109JYA9_9BRAD NADPH-dependent 7-cyano- 7-deazaguanine reductase OS=Bradyrhizobium macuxiense O X=1755647 GN=queF PE=3 SV=1
MAKKSSKSKTSPALQLGRAVEWPDSPEKAVLDRVPNPQAGTDYLVRFTIPEFTSICPVTGQPDFAHLVIDFVPSRWLVESKSLKLYAASFRNHGAFHEDCTVMIGKRIAEEIKPKWLRIGGYWYPRGGIPIDVFFQTGRLPKGLWVPDQGVAPYRGRG

SEQ ID NO: 44714 - protein, 158 aa, Bradyrhizobium manausense
  misc_feature (1)..(158): tr|A0A0R3D298|A0A0R3D298_9BRAD NADPH-dependent 7-cyano- 7-deazaguanine reductase OS=Bradyrhizobium manausense O X=989370 GN=queF PE=3 SV=1
MSKKPSKSNTSPSLQLGRAVEWPDAPEKAQLDRVPNPQGGTDYLVRFTVPEFTSLCPVTGQPDFAHLMIDYAPGQWLLESKSLKLYVASFRNHGAFHEDCTVMIGKRIAREIKPKWLRIGGYWYPRGGIPIDVFWQTGRVPKGLWVPEQGVAPYRGRG

SEQ ID NO: 44715 - protein, 150 aa, Bradyrhizobium nanningense
  misc_feature (1)..(150): tr|A0A4Q0S3J7|A0A4Q0S3J7_9BRAD NADPH-dependent 7-cyano- 7-deazaguanine reductase OS=Bradyrhizobium nanningense OX=1325118 GN=queF PE=3 SV=1
MAKKSLQLGRAVEWPHTPEDAQLDRVPNPQKGTDYLVRFTVPEFTSLCPVTGQPDFAHLMIDYAPGAWLLESKSLKLYIASFRNHGAFHEDCTVMIGKRIAREIKPKFLRIGGYWYPRGGIPIDVFWQTGRVPKGLWVPEQGVAPYRGRG

SEQ ID NO: 44716 - protein, 150 aa, Bradyrhizobium neotropicale
  misc_feature (1)..(150): tr|A0A176Z5M2|A0A176Z5M2_9BRAD NADPH-dependent 7-cyano- 7-deazaguanine reductase OS=Bradyrhizobium neotropicale OX=1497615 GN=queF PE=3 SV=1
MAKKSLQLGRAVEWPHTPEEAQLDRVPNPQKGTDYLVRFTVPEFTSLCPVTGQPDFAHLMIDYAPGQWLLESKSLKLYIASFRNHGAFHEDCTVMIGKRIAAEIKPKWLRIGGYWYPRGGIPIDVFWQTGRVPKGLWVPEQGVAPYRGRG

SEQ ID NO: 44717 - protein, 158 aa, Bradyrhizobium oligotrophicum
  misc_feature (1)..(158): tr|M4Z7K3|M4Z7K3_9BRAD NADPH-dependent 7-cyano-7-deazag uanine reductase OS=Bradyrhizobium oligotrophicum S58 O X=1245469 GN=queF PE=3 SV=1
MAKRPGKSETSAGLQLGREVAWPESPEAARLDRVPNPQKDTDYLARFTVPEFTSLCPVTGQPDFAHLVIDYAPGPWLVESKSLKLYLASFRNHGAFHEDCTVAIGKRLAAELKPKWLRIGGYWYPRGGIPIDVFWQTGKLPKGLWVPDQGVAPYRGRG

SEQ ID NO: 44718 - protein, 153 aa, Bradyrhizobium ottawaense
  misc_feature (1)..(153): tr|A0A2U8PDT0|A0A2U8PDT0_9BRAD NADPH-dependent 7-cyano- 7-deazaguanine reductase OS=Bradyrhizobium ottawaense O X=931866 GN=queF PE=3 SV=1
MTTMAKKSLQLGRAVEWPHTPEDAQLDRVPNPQKGTDYLVRFTVPEFTSLCPVTGQPDFAHLMIDYAPGAWLLESKSLKLYIASFRNHGAFHEDCTVMIGKRIASEIKPKWLRIGGYWYPRGGIPIDVFWQTGRVPKGLWVPEQGVAPYRGRG

SEQ ID NO: 44719 - protein, 154 aa, Bradyrhizobium retamae
  misc_feature (1)..(154): tr|A0A0R3N7C2|A0A0R3N7C2_9BRAD NADPH-dependent 7-cyano- 7-deazaguanine reductase OS=Bradyrhizobium retamae OX=1 300035 GN=queF PE=3 SV=1
MAKKSLPTSLQLGRAVEWPDRPEKAQLDRVPNPQAGTNYLVRFTAPEFTSICPVTGQPDFAHLMIDYVPGQWLLESKSLKLYVASFRNHGAFHEDCTVMIGKRIAAEIKPKWLRIGGYWYPRGGIPIDVFWQTGKLPKDVWVPDQGVAPYRGRG

SEQ ID NO: 44720 - protein, 150 aa, Bradyrhizobium rifense
  misc_feature (1)..(150): tr|A0A5D3KAJ2|A0A5D3KAJ2_9BRAD NADPH-dependent 7-cyano- 7-deazaguanine reductase OS=Bradyrhizobium rifense OX=5 15499 GN=queF PE=3 SV=1
MAKKTLQLGRAVEWPHTPEEAQLDRVPNPQGGTDYLVRFTVPEFTSLCPVTGQPDFAHLMIDYAPGQWLLESKSLKLYIASFRNHGAFHEDCTVMIGKRIAAEIKPKWLRIGGYWYPRGGIPIDVFWQTGRVPKGLWVPEQGVAPYRGRG

SEQ ID NO: 44721 - protein, 151 aa, Bradyrhizobium sacchari
  misc_feature (1)..(151): tr|A0A560K784|A0A560K784_9BRAD NADPH-dependent 7-cyano- 7-deazaguanine reductase OS=Bradyrhizobium sacchari OX= 1399419 GN=queF PE=3 SV=1
MMAKKSLQLGRAVEWPHTPEEAQLDRVPNPQKGTDYLVRFTVPEFTSLCPVTGQPDFAHLMIDYAPGPWLLESKSLKLYIASFRNHGAFHEDCTVMIGKRIASEIKPKWLRIGGYWYPRGGIPIDVFWQTGRVPKGLWVPEQGVAPYRGRG

SEQ ID NO: 44722 - protein, 150 aa, Bradyrhizobium shewense
  misc_feature (1)..(150): tr|A0A1C3XPZ5|A0A1C3XPZ5_9BRAD NADPH-dependent 7-cyano- 7-deazaguanine reductase OS=Bradyrhizobium shewense OX= 1761772 GN=queF PE=3 SV=1
MAKKSLQLGRAVEWPHTPEDAQLDRVPNPQKGTDYLVRFTVPEFTSLCPVTGQPDFAHLMIDYAPGPWLLESKSLKLYIASFRNHGAFHEDCTVMIGKRIASEIKPKWLRIGGYWYPRGGIPIDVFWQTGRVPKGLWVPEQGVAPYRGRG

SEQ ID NO: 44723 - protein, 158 aa, Bradyrhizobium sp.
  misc_feature (1)..(158): tr|A0A1Y6KEZ0|A0A1Y6KEZ0_9BRAD NADPH-dependent 7-cyano- 7-deazaguanine reductase OS=Bradyrhizobium sp. ORS 285 OX=115808 GN=queF PE=3 SV=1
MAKKSNPSLTSAGLQLGREVAPPDSPEAARLDRVPNPQKDTDYLARFTVPEFTSLCPVTGQPDFAHLVIDYAPGPWLVESKSLKLYFASFRNHGAFHEDCTVAIGKRLTAEIKPKWLRIGGYWYPRGGIPIDVFWQTGKLPKGLWVPDQGVAPYRGRG

SEQ ID NO: 44724 - protein, 158 aa, Bradyrhizobium sp.
  misc_feature (1)..(158): tr|A0A1B9YQ29|A0A1B9YQ29_9BRAD NADPH-dependent 7-cyano- 7-deazaguanine reductase OS=Bradyrhizobium sp. LMTR 3 O X=189873 GN=queF PE=3 SV=1
MAKKSLQKSLPKSLQLGRAVEWPDSPEKAQLDRVPNPQAGTNYLVRFTAPEFTSICPVTGQPDFAHLVIDYVPGQWLLESKSLKLYVASFRNHGAFHEDCTVMIGKRIAAEIKPKWLRIGGYWYPRGGIPIDVFWQTGKLPKDVWVPDQGVAPYRGRG

SEQ ID NO: 44725 - protein, 162 aa, Bradyrhizobium stylosanthis
  misc_feature (1)..(162): tr|A0A560DJ49|A0A560DJ49_9BRAD NADPH-dependent 7-cyano- 7-deazaguanine reductase OS=Bradyrhizobium stylosanthis OX=1803665 GN=queF PE=3 SV=1
MSKKPSKSNNSPAKSASLQLGRAVEWPDAPEKARLDRVPNPQAGTDYLVRFTVPEFTSLCPVTGQPDFAHLMIDYAPGQWLLESKSLKLYIASFRNHGAFHEDCTVMIGKRIASEIKPKWLRIGGYWYPRGGIPIDVFWQTGRVPKGLWVPEQGVAPYRGRG

SEQ ID NO: 44726 - protein, 154 aa, Bradyrhizobium valentinum
  misc_feature (1)..(154): tr|A0A0R3KDB7|A0A0R3KDB7_9BRAD NADPH-dependent 7-cyano- 7-deazaguanine reductase OS=Bradyrhizobium valentinum O X=1518501 GN=queF PE=3 SV=1
MAKKSLQKSLQLGRAVEWPDSPEKAQLDRVPNPQADTNYLVRFTAPEFTSICPVTGQPDFAHLMIDYVPGQWLLESKSLKLYVASFRNHGAFHEDCTVMIGKRIAAEIMPKWLRIGGYWYPRGGIPIDVFWQTGKLPNGMWVPDQGVAPYRGRG

SEQ ID NO: 44727 - protein, 153 aa, Bradyrhizobium vignae
  misc_feature (1)..(153): tr|A0A4Q0QKZ6|A0A4Q0QKZ6_9BRAD NADPH-dependent 7-cyano- 7-deazaguanine reductase OS=Bradyrhizobium vignae OX=15 49949 GN=queF PE=3 SV=1
MTMMAKKSLQLGRAVEWPHTPEEAQLDRVPNPQKGTDYLVRFTVPEFTSLCPVTGQPDFAHLMIDYAPGAWLLESKSLKLYIASFRNHGAFHEDCTVMIGKRIASEIKPKWLRIGGYWYPRGGIPIDVFWQTGRVPKGLWVPEQGVAPYRGRG

SEQ ID NO: 44728 - protein, 158 aa, Bradyrhizobium yuanmingense
  misc_feature (1)..(158): tr|A0A0R3BQQ1|A0A0R3BQQ1_9BRAD NADPH-dependent 7-cyano- 7-deazaguanine reductase OS=Bradyrhizobium yuanmingense OX=108015 GN=queF PE=3 SV=1
MLHRTLTTMAKKSLQLGRAVEWPHTPEEAQLDRVPNPQKGTDYLVRFTVPEFTSLCPVTGQPDFAHLMIDYAPGAWLLESKSLKLYIASFRNHGAFHEDCTVMIGKRIASEIKPKFLRIGGYWYPRGGIPIDVFWQTGRVPKGLWVPEQGVAPYRGRG

SEQ ID NO: 44729 - protein, 150 aa, Bradyrhizobium yuanmingense; identical to SEQ ID NO: 44710
  misc_feature (1)..(150): tr|A0A1C3W7K6|A0A1C3W7K6_9BRAD NADPH-dependent 7-cyano- 7-deazaguanine reductase OS=Bradyrhizobium yuanmingense OX=108015 GN=queF PE=3 SV=1

SEQ ID NO: 44730 - protein, 153 aa, Bradyrhizobium zhanjiangense
  misc_feature (1)..(153): tr|A0A4Q0QDU4|A0A4Q0QDU4_9BRAD NADPH-dependent 7-cyano- 7-deazaguanine reductase OS=Bradyrhizobium zhanjiangens e OX=1325107 GN=queF PE=3 SV=1
MTTMAKKSLQLGRAVEWPHTPEEAQLDRVPNPQKGTDYLVRFTVPEFTSLCPVTGQPDFAHLVIDYAPGAWLLESKSLKLYIASFRNHGAFHEDCTVMIGKRIASEIKPKWLRIGGYWYPRGGIPIDVFWQTGRVPKGLWAPEQGVAPYRGRG

SEQ ID NO: 44731 - protein, 150 aa, Bradyrhizobium zhanjiangense
  misc_feature (1)..(150): tr|A0A4Q0SJA6|A0A4Q0SJA6_9BRAD NADPH-dependent 7-cyano- 7-deazaguanine reductase OS=Bradyrhizobium zhanjiangens e OX=1325107 GN=queF PE=3 SV=1
MAKKSLQLGRAVEWPHTPEEAQLDRVPNPQKGTDYLVRFTVPEFTSLCPVTGQPDFAHLVIDYAPGAWLLESKSLKLYMASFRNHGAFHEDCTVMIGKRIASEIKPKWLRIGGYWYPRGGIPIDVFWQTGRAPKGLWAPEQGVAPYRGRG

SEQ ID NO: 44732 - protein, 282 aa, Brenneria alni
  misc_feature (1)..(282): tr|A0A421DQQ4|A0A421DQQ4_9GAMM NADPH-dependent 7-cyano- 7-deazaguanine reductase OS=Brenneria alni OX=71656 GN= queF PE=3 SV=1
MSAYDKHQALSGLTLGKPTPYHDRYDAALLQPVPRSLNREPLGIFPQALPFHGADIWTLYELSWLNKNGVPQVAVGEMHLDAASLNLIESKSFKLYLNSFNQTVFDGWDSVRATLINDLAHCAQGRVSMTLFKLSELEGQPIAGLSGECIDDEDIHIDNYQFNADYLASTGGDATQVEETLVSHLLKSNCLITHQPDWGSVQIRYRGKRINRESLLRYIVSFRHHNEFHEQCVERIFNDLMHYCQPEQLSVYARYTRRGGLDINPWRSNIPFIAPVGRLPRQ

SEQ ID NO: 44733 - protein, 282 aa, Brenneria goodwinii
  misc_feature (1)..(282): tr|A0A0G4JQ18|A0A0G4JQ18_9GAMM NADPH-dependent 7-cyano- 7-deazaguanine reductase OS=Brenneria goodwinii OX=1109 412 GN=queF PE=3 SV=1
MSAYDKHQSLSELTLGKPTAYHDRYDAGLLQPVPRSLNREPLGIFPQALPFHGEDIWTLYELSWLNKNGVPQVAVGEMHLDAASQNLVESKSFKLYLNSFNQTVFDSWDSVRATLINDLSRCAQGRVDMTLFKLGELEGQPIAAFHGECIDDQDIHIDNYAFNADYLASSADNDIHVEETLVSHLLKSNCLITHQPDWGSVQIHYRGKRINRESLLRYIVSFRHHNEFHEQCVERIFNDLMRYCQPEQLSVYARYTRRGGLDINPWRSNVPFTAPVGRLPRQ

SEQ ID NO: 44734 - protein, 282 aa, Brenneria nigrifluens
  misc_feature (1)..(282): tr|A0A2U1UW53|A0A2U1UW53_9GAMM NADPH-dependent 7-cyano- 7-deazaguanine reductase OS=Brenneria nigrifluens DSM 3 0175 = ATCC 13028 OX=1121120 GN=queF PE=3 SV=1
MSAYDKHQALSGLTLGKPTPYHDRYDAGLLQPVPRSLNREPLGILPQKLPFHGADIWTLYELSWLNQNGVPQVAVGEMHLDAASLNLIESKSFKLYLNSFNQTVFDSWERVRATLIDDLAQCAQGQVKVTLFRLGELEGRPIAAFHGECIDDQNIRIDNYAFNADYLAANAQDETWVEETLVSHLLKSNCLITHQPDWGSVQIRYRGKRINRESLLRYIVSFRHHNEFHEQCVERIFNDLMHYCRPQQLSVYARYTRRGGLDINPWRSNAPFTPATGRLPRQ

SEQ ID NO: 44735 - protein, 289 aa, Brenneria roseae
  misc_feature (1)..(289): tr|A0A2U1TZW1|A0A2U1TZW1_9GAMM NADPH-dependent 7-cyano- 7-deazaguanine reductase OS=Brenneria roseae subsp. ame ricana OX=1508507 GN=queF PE=3 SV=1
MSVYDKHQALSGLTLGKPTPYHDRYDAGLLQPVPRSLNREPLGIFPDSLPFHGADIWTLYELSWLNPNGIPQVAVGEMRLEADSLNLIESKSFKLYLNSFNQTQFDSWEAVRTTLIADLGRCAQGQVSVTLFKLSELEGLPIARFAGECIDDQDIRIDSYEFSADYLIPGASDEASSMEDDRVVEETLVSHLLKSNCLITHQPDWGSVQIHYRGRRINREALLRYIVSFRHHNEFHEQCVERIFNDLMRYYQPETLSVYARYTRRGGLDINPWRSNTAFIAPDGRLPRQ

SEQ ID NO: 44736 - protein, 288 aa, Brenneria rubrifaciens
  misc_feature (1)..(288): tr|A0A4P8QN21|A0A4P8QN21_9GAMM NADPH-dependent 7-cyano- 7-deazaguanine reductase OS=Brenneria rubrifaciens OX=5 5213 GN=queF PE=3 SV=1
MSIDKHQALSGLTLGKPTPYHDRYDAKLLQPVPRSLNREPLGISPDSLPFHGADIWTLYELSWLKPNGVPQVAVGEMRLDANSLNLIESKSFKLYLNSFNQTRFESWEAVRTTLIKDLGQCAQGQVSVALFRLSELEGQQIARFEGECIDDQDIRIDSYAFNADHLASASPDATPSAEESPIVEETLVSHLLKSNCLITHQPDWGSIQIRYRGKRINREALLRYIVSFRHHNEFHEQCVERVFNDLMRYCQPQALSVYARYTRRGGLDINPWRSNATFNPSNVRLPRQ

SEQ ID NO: 44737 - protein, 289 aa, Brenneria salicis
  misc_feature (1)..(289): tr|A0A366I8B9|A0A366I8B9_9GAMM NADPH-dependent 7-cyano- 7-deazaguanine reductase OS=Brenneria salicis ATCC 1571 2 = DSM 30166 OX=714314 GN=queF PE=3 SV=1
MSIYDKHQALSALTLGKPTPYHDHYDAGLLQPVPRSLNREPLGIFPDSQPFHGADIWTLYELSWLNPNGVPQVAVGEMHLDANSLNLIESKSFKLYLNSFNQTQFANWEEVRTTLIKDLGQCAQGQVSVALFKLSELEGQPIAGFAGECIDDQDIRIDSYAFNADYLAAGSQGGRSSAETNQIVEETLVSHLLKSNCLITHQPDWGSVQIRYRGQRINREALLRYIVSFRHHNEFHEQCVERIFNDLMRYYQPETLSVYARYTRRGGLDINPWRSNGAFIAPNGRLPRQ

SEQ ID NO: 44738 - protein, 282 aa, Brenneria sp.; identical to SEQ ID NO: 44734
  misc_feature (1)..(282): tr|G7LRM5|G7LRM5_9GAMM NADPH-dependent 7-cyano-7-deazag uanine reductase OS=Brenneria sp. EniD312 OX=598467 GN= queF PE=3 SV=1

SEQ ID NO: 44739 - protein, 282 aa, Brenneria sp.
  misc_feature (1)..(282): tr|A0A5J5FRU4|A0A5J5FRU4_9GAMM NADPH-dependent 7-cyano- 7-deazaguanine reductase QueF OS=Brenneria sp. L3-3HA O X=2590031 GN=queF PE=4 SV=1
MSLYDNHPALNELTLGKTTVWRDRYDASLLQAVPRSLNREPLGLRPDNLPFHGADIWTLYELSWLNGNGLPQVALGEMSLDAGSLNLIESKSFKLYLNSFNQTRFASWQDVRTTMERDLSQCAQGKVHIRIFKLSEIEGQAIATLAGDCIDEQDIQIDDYQFNAGYLSDAPRRQGVVEETLVSHLLKSNCLITHQPDWGSVQIHYRGARIDREALLRYLVSFRHHNEFHEQCVERIFNDIMRFYQPERLSVYARYTRRGGLDINPWRSNYPFEPPRGRLARQ

SEQ ID NO: 44740 - protein, 154 aa, Breoghania sp.
  misc_feature (1)..(154): tr|A0A346QY02|A0A346QY02_9RHIZ NADPH-dependent 7-cyano- 7-deazaguanine reductase OS=Breoghania sp. L-A4 OX=2304 600 GN=queF PE=3 SV=1
MSNDIYAHTTALGRPVEIPTDPETAPLDRVPNPQADVDFVTRFVCPEFTSLCPVTGQPDFAHLVIDYVPDQWLVESKSLKLYLTSYRNHGAFHEDCTVKIGRRIVELLEPRWLRIGGYWYPRGGIPIDVFWQSGEAPKSVWIPDQGVPPYRGRG

SEQ ID NO: 44741 - protein, 164 aa, Brevibacillus agri
  misc_feature (1)..(164): tr|A0A3M8AHF7|A0A3M8AHF7_9BACL NADPH-dependent 7-cyano- 7-deazaguanine reductase OS=Brevibacillus agri OX=51101 GN=queF PE=3 SV=1
MSEQQRDLSSLTLLGNQGTTYSYSYDPSVLESFDNKHPYRDYFVKFNCPEFTSLCPITGQPDFATIYISYIPDIKMVESKSLKLYLFSFRNHGDFHEDCVNIIMNDLIKLMDPKYIEVWGKFTPRGGISIDPYCNYGRPGTKYEEMASYRLMNHDMYPEKVDNR

SEQ ID NO: 44742 - protein, 143 aa, Brevibacillus borstelensis
  misc_feature (1)..(143): tr|M8D710|M8D710_9BACL NADPH-dependent 7-cyano-7-deazag uanine reductase OS=Brevibacillus borstelensis AK1 OX=1 300222 GN=queF PE=3 SV=1
MKEMATVEHNHSKYNSIRFDTQDESAILVDILETIPYEYVGKRTEIMMPTNEFTSVCPWSGLPDFADLKIYLVPNEKLIEMKSLKYYLTSYRNVGIYQEHATNRILNDLVACCDPLYMRIVAVWNARGGLGTEVVVEYVKEEA

SEQ ID NO: 44743 - protein, 165 aa, Brevibacillus brevis
  misc_feature (1)..(165): tr|C0ZJI8|C0ZJI8_BREBN NADPH-dependent 7-cyano-7-deazag uanine reductase OS=Brevibacillus brevis (strain 47 / J CM 6285 / NBRC 100599) OX=358681 GN=queF PE=3 SV=1
MAHQQERDLSSLTLLGNQGTTYNYSYDPSVLESFDNKHPYRDYFVKFNCPEFTSLCPITGQPDFATIYISYIPDIKMVESKSLKLYLFSFRNHGDFHEDCVNVIMNDLIKLMDPRYIEVWGKFTPRGGISIDPYCNYGKPGTKYEEMASHRMMNHDMYPEKVDNR

SEQ ID NO: 44744 - protein, 165 aa, Brevibacillus brevis; identical to SEQ ID NO: 44743
  misc_feature (1)..(165): tr|A0A0J6BTP5|A0A0J6BTP5_BREBE NADPH-dependent 7-cyano- 7-deazaguanine reductase OS=Brevibacillus brevis OX=139 3 GN=queF PE=3 SV=1

SEQ ID NO: 44745 - protein, 165 aa, Brevibacillus choshinensis
  misc_feature (1)..(165): tr|A0A0Q3WI74|A0A0Q3WI74_BRECH NADPH-dependent 7-cyano- 7-deazaguanine reductase OS=Brevibacillus choshinensis OX=54911 GN=queF PE=3 SV=1
MANQQERDLSSLTLLGNQGTTYPNTYDPSVLESFDNKHPYRDYFVKFNCPEFTSLCPITGQPDFATIYISYIPDIKMVESKALKLYLFSFRNHGDFHEDCVNIIMNDLIKLMDPRYIEVWGKFTPRGGISIDPYCNYGKPGTKYEEMAMHRLMNHDMYPEKVDNR

SEQ ID NO: 44746 - protein, 167 aa, Brevibacillus fluminis
  misc_feature (1)..(167): tr|A0A3M8DJB6|A0A3M8DJB6_9BACL NADPH-dependent 7-cyano- 7-deazaguanine reductase OS=Brevibacillus fluminis OX=5 11487 GN=queF PE=3 SV=1
MNESTNESRDLSHLTLLGNQNTAYNYQYDPSVLETFDNKHPYRDYFVKFNCPEFTSLCPMTGQPDFATIYISYVPDIKMVESKSLKLYLFSFRNHGDFHEDCVNIIMNDLIKLMDPRYIEVWGKFTPRGGISIDPYCNYGKPGTKYEQMAEYRMMNHDMYPEKVDNR

SEQ ID NO: 44747 - protein, 165 aa, Brevibacillus formosus
  misc_feature (1)..(165): tr|A0A4Y4I3A6|A0A4Y4I3A6_9BACL NADPH-dependent 7-cyano- 7-deazaguanine reductase OS=Brevibacillus formosus OX=5 4913 GN=queF PE=3 SV=1
MAHQQERDLSSLTLLGNQGTTYNYSYDPSVLESFDNKHPYRDYFVKFNCPEFTSLCPITGQPDFATIYISYIPDIKMVESKSLKLYLFSFRNHGDFHEDCVNVIMNDLIKLMNPRYIEVWGKFTPRGGISIDPYCNYGKPGTKYEEMASHRMMNHDMYPEKVDNR

SEQ ID NO: 44748 - protein, 165 aa, Brevibacillus formosus
  misc_feature (1)..(165): tr|A0A220MKE7|A0A220MKE7_9BACL NADPH-dependent 7-cyano- 7-deazaguanine reductase OS=Brevibacillus formosus OX=5 4913 GN=queF PE=3 SV=1
MAHQHERDLSSLTLLGNQGTTYNYSYDPSVLESFDNKHPYRDYFVKFNCPEFTSLCPITGQPDFATIYISYIPDIKMVESKSLKLYLFSFRNHGDFHEDCVNVIMNDLIKLMDPRYIEVWGKFTPRGGISIDPYCNYGKPGTKYEEMASHRMMNHDMYPEKVDNR

SEQ ID NO: 44749 - protein, 164 aa, Brevibacillus gelatini
  misc_feature (1)..(164): tr|A0A3M8BCD3|A0A3M8BCD3_9BACL NADPH-dependent 7-cyano- 7-deazaguanine reductase OS=Brevibacillus gelatini OX=1 655277 GN=queF PE=3 SV=1
MNEQQRDLSSLTLLGNQKTTYNYSYDPSVLETFDNKHPYRDYFVKFNCPEFTSLCPITGQPDFATIYISYIPDVKMVESKSLKLYLFSFRNHGDFHEDCVNVIMNDLIKLMDPKYIEVWGKFTPRGGISIDPYCNYGRPGTKYEEMASYRLMNHDMYPEKVDNR

SEQ ID NO: 44750 - protein, 165 aa, Brevibacillus invocatus
  misc_feature (1)..(165): tr|A0A3M8C2S6|A0A3M8C2S6_9BACL NADPH-dependent 7-cyano- 7-deazaguanine reductase OS=Brevibacillus invocatus OX= 173959 GN=queF PE=3 SV=1
MANHEERDLSSLTLLGNQGTTYNYTYDPGVLETFDNKHPYRDYFVKFNCPEFTSLCPITGQPDFATIYISYVPDIKMVESKSLKLYLFSFRNHGDFHEDCVNIIMNDLIKLMEPRYIEVWGKFTPRGGISIDPYCNYGKPGTKYEEMAQFRMMNHDLYPEKVDNR

SEQ ID NO: 44751 - protein, 168 aa, Brevibacillus laterosporus
  misc_feature (1)..(168): tr|A0A075QZH8|A0A075QZH8_BRELA NADPH-dependent 7-cyano- 7-deazaguanine reductase OS=Brevibacillus laterosporus LMG 15441 OX=1042163 GN=queF PE=3 SV=1
MTHNNQSTNPQLKDLTLLGNQQTAYHYEYNPNVLEAFDNKHPYRDYWVKFNCPEFTSLCPMTGQPDFATIYISYIPDKKMVESKSLKLYLFSFRNHGDFHEDCMNIIMNDLIKLMDPKYIEVWGKFTPRGGISIDPYCNYGKPDTKFEEMAEHRMMNHDMYPEKVDNR

SEQ ID NO: 44752 - protein, 168 aa, Brevibacillus laterosporus
  misc_feature (1)..(168): tr|H0UFU2|H0UFU2_BRELA NADPH-dependent 7-cyano-7-deazag uanine reductase OS=Brevibacillus laterosporus GI-9 OX= 1118154 GN=queF PE=3 SV=1
MTHNNQSTNPQLKDLTLLGNQQTAYHYEYNPNVLEAFDNKHPYRDYWVKFNCPEFTSLCPMTGQPDFATIYISYIPDKKMVESKSLKLYLFSFRNHGDFHEDCMNIIMNDLIKLMDPKYIEVWGKFTPRGGISIDPYCNYGKPGTKFEEMAEHRMMNHDMYPEKVDNR

SEQ ID NO: 44753 - protein, 165 aa, Brevibacillus nitrificans
  misc_feature (1)..(165): tr|A0A3M8CTY5|A0A3M8CTY5_9BACL NADPH-dependent 7-cyano- 7-deazaguanine reductase OS=Brevibacillus nitrificans O X=651560 GN=queF PE=3 SV=1
MANQQERDLASLTLLGNQGTTYPQTYDPTVLESFDNKHPYRDYFVKFNCPEFTSLCPITGQPDFATIYISYIPDIKMVESKALKLYLFSFRNHGDFHEDCVNIIMNDLIKLMDPRYIEVWGKFTPRGGISIDPYCNYGKPGTKYEEMAMHRLMNHDMYPEKVDNR

SEQ ID NO: 44754 - protein, 165 aa, Brevibacillus panacihumi
  misc_feature (1)..(165): tr|A0A3M8CRZ2|A0A3M8CRZ2_9BACL NADPH-dependent 7-cyano- 7-deazaguanine reductase OS=Brevibacillus panacihumi OX =497735 GN=queF PE=3 SV=1
MANHEERDLSSLTLLGNQGTTYNYTYDPDVLETFYNKHPYRDYFVKFNCPEFTSLCPITGQPDFATIYISYVPDIKMVESKSLKLYLFSFRNHGDFHEDCVNIIMNDLIKLMEPRYIEVWGKFTPRGGISIDPYCNYGKPGTKYEEMANYRMMNHDLYPEKVDNR

SEQ ID NO: 44755 - protein, 165 aa, Brevibacillus panacihumi
  misc_feature (1)..(165): tr|V6M4T7|V6M4T7_9BACL NADPH-dependent 7-cyano-7-deazag uanine reductase OS=Brevibacillus panacihumi W25 OX=140 8254 GN=queF PE=3 SV=1
MANQEERDLSSLTLLGNQGTTYNYTYDPSVLETFDNKHPYRDYFVKFNCPEFTSLCPITGQPDFATIYISYVPDIKMVESKSLKLYLFSFRNHGDFHEDCVNIIMNDLIKLMEPRYIEVWGKFTPRGGISIDPYCNYGKPGTKYEEMANYRMMNHDLYPEKVDNR

SEQ ID NO: 44756 - protein, 164 aa, Brevibacillus parabrevis
  misc_feature (1)..(164): tr|A0A4Y3PVJ4|A0A4Y3PVJ4_BREPA NADPH-dependent 7-cyano- 7-deazaguanine reductase OS=Brevibacillus parabrevis OX =54914 GN=queF PE=3 SV=1
MNEQQRDLSSLTLLGNQGTTYNYSYDPSVLESFDNKHPYRDYFVKFNCPEFTSLCPITGQPDFATIYISYIPDIKMVESKSLKLYLFSFRNHGDFHEDCVNVIMNDLIKLMDPKYIEVWGKFTPRGGISIDPYCNYGKPGTKYEEMASYRLMNHDMYPERVDNR

SEQ ID NO: 44757 - protein, 165 aa, Brevibacillus reuszeri
  misc_feature (1)..(165): tr|A0A0K9YK65|A0A0K9YK65_9BACL NADPH-dependent 7-cyano- 7-deazaguanine reductase OS=Brevibacillus reuszeri OX=5 4915 GN=queF PE=3 SV=1
MSNHQERDLSSLTLLGNQGTTYNYSYDPGVLESFDNKHPYRDYFVKFNCPEFTSLCPITGQPDFATIYISYIPDIKMVESKSLKLYLFSFRNHGDFHEDCVNVIMNDLIKLMDPKYIEVWGKFTPRGGISIDPYCNYGKPGTKYEEMASYRLMNHDMYPEKVDNR

SEQ ID NO: 44758 - protein, 165 aa, Brevibacillus sp.
  misc_feature (1)..(165): tr|A0A553KQE2|A0A553KQE2_9BACL NADPH-dependent 7-cyano- 7-deazaguanine reductase OS=Brevibacillus sp. LEMMJ03 O X=2595056 GN=queF PE=3 SV=1
MDNRQERDLSSLTLLGNQQTKYSYTYDPDVLETFDNKHPYRDYFVKFNCPEFTSLCPITGQPDFATIYISYIPDKKMVESKSLKLYLFSFRNHGDFHEDCVNIIMNDLIKLMDPKYIEVWGKFTPRGGISIDPYCNYGRPGTKYEKMAEYRLMNHDMYPEKVDNR

SEQ ID NO: 44759 - protein, 165 aa, Brevibacillus sp.; identical to SEQ ID NO: 44743
  misc_feature (1)..(165): tr|A0A2P7ULJ9|A0A2P7ULJ9_9BACL NADPH-dependent 7-cyano- 7-deazaguanine reductase OS=Brevibacillus sp. NRRL NRS- 1210 OX=2126352 GN=queF PE=3 SV=1

SEQ ID NO: 44760 - protein, 165 aa, [Brevibacterium] frigoritolerans; identical to SEQ ID NO: 44356
  misc_feature (1)..(165): tr|A0A4R6AG40|A0A4R6AG40_9BACI NADPH-dependent 7-cyano- 7-deazaguanine reductase OS=[Brevibacterium] frigoritol erans OX=450367 GN=queF PE=3 SV=1

SEQ ID NO: 44761 - protein, 166 aa, [Brevibacterium] frigoritolerans
  misc_feature (1)..(166): tr|A0A3Q9SF13|A0A3Q9SF13_9BACI NADPH-dependent 7-cyano- 7-deazaguanine reductase OS=[Brevibacterium] frigoritol erans OX=450367 GN=queF PE=3 SV=1
MSGRKEEELKKDITLLGNQGTKYTFDYAPEILESFDNKHPNRDYFVKFNCPEFTSLCPITGQPDFATIYISYIPSVKMVESKSLKLYLFSFRNHGDFHEDCMNIIMNDLIELMDPKYIEVWGKFTPRGGISIDPYTNYGKPGTKYEEMANYRLMNHDLYPETVDNR

SEQ ID NO: 44762 - protein, 146 aa, Brevifollis gellanilyticus
  misc_feature (1)..(146): tr|A0A512MD46|A0A512MD46_9BACT NADPH-dependent 7-cyano- 7-deazaguanine reductase OS=Brevifollis gellanilyticus OX=748831 GN=queF PE=3 SV=1
MSDTKSSDLSLLGRSEHRLPASPDEAALETFPNRTPGRNYTIHLSQPDFASLCPVTGQPDAAHIEIIYIPDTSCVETKSLKFYLASFRNHASFNEAIVNRILDDLVKACAPKQAIVRGRFVPRGGIQLTCEARFPNFEGTLEMPKP

SEQ ID NO: 44763 - protein, 154 aa, Brevirhabdus pacifica
  misc_feature (1)..(154): tr|A0A1U7DHJ3|A0A1U7DHJ3_9RHOB NADPH-dependent 7-cyano- 7-deazaguanine reductase OS=Brevirhabdus pacifica OX=12 67768 GN=queF PE=3 SV=1
MSDNIYQNLTMLGGDTKQPASPEEAVLERVPNPQADVNYAVRFTAPEFTSLCPMTGQPDFAHLVIDYVPGDWLVESKSLKLFLTSFRNHGAFHEDCSVTVARRLIDTLEPRWLRLGGYWYPRGGIPIDIFYQTGEVPAGVWVPDQGVSTYRGRG

SEQ ID NO: 44764 - protein, 153 aa, Brevundimonas abyssalis
  misc_feature (1)..(153): tr|U2ZDC9|U2ZDC9_9CAUL NADPH-dependent 7-cyano-7-deazag uanine reductase OS=Brevundimonas abyssalis TAR-001 OX= 1391729 GN=queF PE=3 SV=1
MTTNTSGLTQLGGDVRGFDSPEQAVLERVPNPHADTLYLARFTAPEFTSLCPVTAQPDFAHLVIDYAPGDWLVESKSLKMYLTSFRNHGAFHEDCTVAIGKRLADLLAPKWLRIGGYWYPRGGIPIDVFWQTGTAPEGLWLPDQGVPTYRGRG

SEQ ID NO: 44765 - protein, 156 aa, Brevundimonas diminuta
  misc_feature (1)..(156): tr|A0A1R4FQ19|A0A1R4FQ19_BREDI NADPH-dependent 7-cyano- 7-deazaguanine reductase OS=Brevundimonas diminuta 3F5N OX=1255603 GN=queF PE=3 SV=1
MAGMTHYTDSLSQLGAQTAAPTNPEEAVLERVPNPHADTLYVARFTAPEFTSLCPVTGQPDFAHIVIDYVPGDWLVESKSLKLYLTSFRNHGAFHEDCTVAIGKRLAELLQPKWLRIGGYWYPRGGIPIDVFWQTGAPLEGVWLPDQGVATYRGRG

SEQ ID NO: 44766 - protein, 156 aa, Brevundimonas diminuta
  misc_feature (1)..(156): tr|L1QLF3|L1QLF3_BREDI NADPH-dependent 7-cyano-7-deazag uanine reductase OS=Brevundimonas diminuta 470-4 OX=103 5191 GN=queF PE=3 SV=1
MAGMTHYTDSLSQLGAQTAAPTNPEEAVLERVPNPHADTLYVARFTAPEFTSLCPVTNQPDFAHIVIDYVPGDWLVESKSLKLYLTSFRNHGAFHEDCTVAIGKRLAELLQPKWLRIGGYWYPRGGIPIDVFWQTGAPLEGVWLPDQGVAGYRGRG

SEQ ID NO: 44767 - protein, 153 aa, Brevundimonas intermedia
  misc_feature (1)..(153): tr|A0A4Y9RZI0|A0A4Y9RZI0_9CAUL NADPH-dependent 7-cyano- 7-deazaguanine reductase OS=Brevundimonas intermedia OX =74315 GN=queF PE=3 SV=1
MTHYTDNLSQLGAQTAAPTSPETAVLERVPNPHADTLYLARFTAPEFTSLCPVTGQPDFAHIVIDYAPGEWLVESKSLKLYLTSFRNHGAFHEDCTVAIGRRLAELLEPKWLRIGGYWYPRGGIPIDVFWQTGVAPEGLWLPDQGVPTYRGRG

SEQ ID NO: 44768 - protein, 153 aa, Brevundimonas naejangsanensis
  misc_feature (1)..(153): tr|A0A172Y9B3|A0A172Y9B3_9CAUL NADPH-dependent 7-cyano- 7-deazaguanine reductase OS=Brevundimonas naejangsanens is OX=588932 GN=queF PE=3 SV=1
MTHYTDSLSQLGVQTAAPTNPQEAVLERVPNPHADTLYVARFTAPEFTSLCPVTNQPDFAHLVIDYVPGDWLVESKSLKLYLTSFRNHGAFHEDCTVAIGKRLAELLQPKWLRIGGYWYPRGGIPIDVFWQTGAPLEGVWLPDQGVAGYRGRG

SEQ ID NO: 44769 - protein, 153 aa, Brevundimonas naejangsanensis
  misc_feature (1)..(153): tr|A0A494RIV2|A0A494RIV2_9CAUL NADPH-dependent 7-cyano- 7-deazaguanine reductase OS=Brevundimonas naejangsanens is OX=588932 GN=queF PE=3 SV=1
MTHYTDSLSQLGAQTAAPTNPQEAVLERVPNPHADTLYVARFTAPEFTSLCPVTNQPDFAHLVIDYVPGDWLVESKSLKLYLTSFRNHGAFHEDCTVAIGKRLAELLQPKWLRIGGYWYPRGGIPIDVFWQTGAPLEGVWLPDQGVAGYRGRG

SEQ ID NO: 44770 - protein, 153 aa, Brevundimonas nasdae
  misc_feature (1)..(153): tr|A0A0B4CHW0|A0A0B4CHW0_9CAUL NADPH-dependent 7-cyano- 7-deazaguanine reductase OS=Brevundimonas nasdae OX=172 043 GN=queF PE=3 SV=1
MTHYTDNLSQLGAQTAAPTSPETAVLERVPNPHADTLYLARFTAPEFTSLCPVTGQPDFAHIVIDYAPGGWLVESKSLKLYLTSFRNHGAFHEDCTVAIGRKLADLLEPKWLRIGGYWYPRGGIPIDVFWQTGAPPEGLWMPDQGVPTYRGRG

SEQ ID NO: 44771 - protein, 153 aa, Brevundimonas sp.
  misc_feature (1)..(153): tr|A0A0Q7SKI8|A0A0Q7SKI8_9CAUL NADPH-dependent 7-cyano- 7-deazaguanine reductase OS=Brevundimonas sp. Root1423 OX=1736462 GN=queF PE=3 SV=1
MTTDTSGLHQLGQHTVQPTSPETAELERVPNPHADTLYLTRFTAPEFTSLCPVTGQPDFAHIVIDYAPGDWLVESKSLKLYLTSFRNHGAFHEDCTVAIGKKIADLLQPKWLRIGGYWYPRGGIPIDVFWQTGAAPAGLWLPDQGVPTYRGRG

SEQ ID NO: 44772 - protein, 153 aa, Brevundimonas sp.
  misc_feature (1)..(153): tr|A0A2D8FRK3|A0A2D8FRK3_9CAUL NADPH-dependent 7-cyano- 7-deazaguanine reductase OS=Brevundimonas sp. OX=187108 6 GN=queF PE=3 SV=1
MTHYTDNLSQLGAQTAAPTSPETAVLERVPNPHADTLYLARFTAPEFTSLCPVTGQPDFAHIVIDYAPGDWLVESKSLKLYLTSFRNHGAFHEDCTVAIGRRLADLLEPKWLRIGGYWYPRGGIPIDVFWQTGPAPEGLWLPDQGVPTYRGRG

SEQ ID NO: 44773 - protein, 153 aa, Brevundimonas subvibrioides
  misc_feature (1)..(153): tr|A0A258FSW0|A0A258FSW0_9CAUL NADPH-dependent 7-cyano- 7-deazaguanine reductase OS=Brevundimonas subvibrioides OX=74313 GN=queF PE=3 SV=1
MTTDTSGLSQLGRQTHQPDSPETAVLERVPNPHPDALYLARFTAPEFTSLCPVTGQPDFAHLVIDYAPAEWLVESKSLKLYLTAFRNHGAFHEDCTVAVGRRIADLLQPRWLRIGGYWYPRGGIPIDVFWQTGSPPDGLWLPDQGVPTYRGRG

SEQ ID NO: 44774 - protein, 153 aa, Brevundimonas subvibrioides
  misc_feature (1)..(153): tr|D9QGV6|D9QGV6_BRESC NADPH-dependent 7-cyano-7-deazag uanine reductase OS=Brevundimonas subvibrioides (strain ATCC 15264 / DSM 4735 / LMG 14903 / NBRC 16000 / CB 81 ) OX=633149 GN=queF PE=3 SV=1
MTTDTSGLSQLGQHTVQPTTPETAVLERVPNPHPDTLYLARFTAPEFTSLCPVTSQPDFAHIVIDYAPGDWLVESKSLKMYLTAFRNHGAFHEDCTVAIGKRIADLLSPRWLRIGGYWYPRGGIPIDVFWQTGAPPEGLWLPDQGVPTYRGRG

SEQ ID NO: 44775 - protein, 156 aa, Brevundimonas vancanneytii
  misc_feature (1)..(156): tr|A0A4P1KA21|A0A4P1KA21_9CAUL NADPH-dependent 7-cyano- 7-deazaguanine reductase OS=Brevundimonas vancanneytii OX=1325724 GN=queF PE=3 SV=1
MAGMTHYTDSLSQLGVQTAAPTNPEEAVLERVSNPHADTLYVARFTAPEFTSLCPVTGQPDFAHIVIDYVPGDWLVESKSLKLYLTSFRNHGAFHEDCTVAIGKRLAELLQPKWLRIGGYWYPRGGIPIDVFWQTGAPLEGVWLPDQGVATYRGRG

SEQ ID NO: 44776 - protein, 156 aa, Brevundimonas vesicularis
  misc_feature (1)..(156): tr|A0A2X1B8B6|A0A2X1B8B6_BREVE NADPH-dependent 7-cyano- 7-deazaguanine reductase OS=Brevundimonas vesicularis O X=41276 GN=queF PE=3 SV=1
MPGMTHYTDNLSQLGAQTAAPTSPETAVLERVPNPHADTLYLARFTAPEFTSLCPVTGQPDFAHIVIDYAPGDWLVESKSLKLYLTSFRNHGAFHEDCTVAIGRKLADLLEPKWLRIGGYWYPRGGIPIDVFWQTGAPPEGLWLPDQGVPTYRGRG

SEQ ID NO: 44777 - protein, 153 aa, Brevundimonas vesicularis
  misc_feature (1)..(153): tr|A0A1Z3UDA6|A0A1Z3UDA6_BREVE NADPH-dependent 7-cyano- 7-deazaguanine reductase OS=Brevundimonas vesicularis O X=41276 GN=queF PE=3 SV=1
MTHYTDNLSQLGAQTAAPTSPETAVLERVPNPHADTLYLARFTAPEFTSLCPVTGQPDFAHIVIDYAPGDWLVESKSLKLYLTSFRNHGAFHEDCTVAIGRKLADLLEPKWLRIGGYWYPRGGIPIDVFWQTGAPPEGLWLPDQGVPTYRGRG

SEQ ID NO: 44778 - protein, 153 aa, Brevundimonas viscosa
  misc_feature (1)..(153): tr|A0A1I6SWF1|A0A1I6SWF1_9CAUL NADPH-dependent 7-cyano- 7-deazaguanine reductase OS=Brevundimonas viscosa OX=87 1741 GN=queF PE=3 SV=1
MTTDTSGLHQLGQMTPAPTSPETAVLERVPNPHADTLYLARFTAPEFTSLCPVTGQPDFAHIVIDYAPGDWLVESKSLKLYLTSFRNHGAFHEDCTVAIGKRLVDLLHPKWLRIGGYWYPRGGIPIDVFWQTGPAPEGLWLPDQGVPTYRGRG

SEQ ID NO: 44779 - protein, 155 aa, Brucella abortus
  misc_feature (1)..(155): tr|D7GYT4|D7GYT4_BRUAO NADPH-dependent 7-cyano-7-deazag uanine reductase OS=Brucella abortus bv. 5 str. B3196 O X=520453 GN=queF PE=3 SV=1
MSENTIYSGLKQLGSHTDIPLTPEEAVLERVANPQEGTPYCVRFTAPEFSSLCPMTGQPDFAHLVIDYVPGKWLVESKSLKLFLFSFRNHGAFHEDCTVTIGKRLVDLLEPEWLRIGGYWYPRGGIPIDVFYQTGAAPLNVWIPEQGVANYRGRG

SEQ ID NO: 44780 - protein, 155 aa, Brucella abortus; identical to SEQ ID NO: 44779
  misc_feature (1)..(155): sp|Q2YRW5|QUEF_BRUA2 NADPH-dependent 7-cyano-7-deazagua nine reductase OS=Brucella abortus (strain 2308) OX=359 391 GN=queF PE=3 SV=1

SEQ ID NO: 44781 - protein, 155 aa, Brucella canis
  misc_feature (1)..(155): sp|A9M5J8|QUEF_BRUC2 NADPH-dependent 7-cyano-7-deazagua nine reductase OS=Brucella canis (strain ATCC 23365 / N CTC 10854) OX=483179 GN=queF PE=3 SV=1
MSENTIYSGLKQLGSHTDIPLTPEEAVLERVANPQEGTPYCVRFTAPEFTSLCPMTGQPDFAHLVIDYVPGKWLVESKSLKLFLFSFRNHGAFHEDCTVTIGKRLVDLLEPEWLRIGGYWYPRGGIPIDVFYQTGAAPLNVWIPEQGVANYRGRG

SEQ ID NO: 44782 - protein, 155 aa, Brucella ceti; identical to SEQ ID NO: 44781
  misc_feature (1)..(155): tr|C0G6R9|C0G6R9_9RHIZ NADPH-dependent 7-cyano-7-deazag uanine reductase OS=Brucella ceti str. Cudo OX=595497 G N=queF PE=3 SV=1

SEQ ID NO: 44783 - protein, 155 aa, Brucella melitensis; identical to SEQ ID NO: 44779
  misc_feature (1)..(155): tr|A0A4P6KJJ8|A0A4P6KJJ8_BRUML NADPH-dependent 7-cyano- 7-deazaguanine reductase OS=Brucella melitensis OX=2945 9 GN=queF PE=3 SV=1

SEQ ID NO: 44784 - protein, 155 aa, Brucella melitensis; identical to SEQ ID NO: 44779
  misc_feature (1)..(155): sp|Q8YHJ4|QUEF_BRUME NADPH-dependent 7-cyano-7-deazagua nine reductase OS=Brucella melitensis biotype 1 (strain 16M / ATCC 23456 / NCTC 10094) OX=224914 GN=queF PE=3 SV=1

SEQ ID NO: 44785 - protein, 155 aa, Brucella microti; identical to SEQ ID NO: 44781
  misc_feature (1)..(155): tr|C7LCD4|C7LCD4_BRUMC NADPH-dependent 7-cyano-7-deazag uanine reductase OS=Brucella microti (strain CCM 4915) OX=568815 GN=queF PE=3 SV=1

SEQ ID NO: 44786 - protein, 155 aa, Brucella neotomae; identical to SEQ ID NO: 44781
  misc_feature (1)..(155): tr|A0A381B7X0|A0A381B7X0_BRUNE NADPH-dependent 7-cyano- 7-deazaguanine reductase OS=Brucella neotomae OX=29460 GN=queF PE=3 SV=1

SEQ ID NO: 44787 - protein, 155 aa, Brucella ovis; identical to SEQ ID NO: 44781
  misc_feature (1)..(155): tr|N8NEJ6|N8NEJ6_BRUOV NADPH-dependent 7-cyano-7-deazag uanine reductase OS=Brucella ovis IntaBari-2002-82-58 O X=1293916 GN=queF PE=3 SV=1

SEQ ID NO: 44788 - protein, 155 aa, Brucella ovis; identical to SEQ ID NO: 44781
  misc_feature (1)..(155): sp|A5VQV8|QUEF_BRUO2 NADPH-dependent 7-cyano-7-deazagua nine reductase OS=Brucella ovis (strain ATCC 25840 / 63 /290 / NCTC 10512) OX=444178 GN=queF PE=3 SV=1

SEQ ID NO: 44789 - protein, 155 aa, Brucella pinnipedialis; identical to SEQ ID NO: 44781
  misc_feature (1)..(155): tr|A0A0E1X2I9|A0A0E1X2I9_9RHIZ NADPH-dependent 7-cyano- 7-deazaguanine reductase OS=Brucella pinnipedialis M292 /94/1 OX=520462 GN=queF PE=3 SV=1

SEQ ID NO: 44790 - protein, 155 aa, Brucella sp.; identical to SEQ ID NO: 44781
  misc_feature (1)..(155): tr|D0RJ88|D0RJ88_9RHIZ NADPH-dependent 7-cyano-7-deazag uanine reductase OS=Brucella sp. F5/99 OX=437701 GN=que F PE=3 SV=1

SEQ ID NO: 44791 - protein, 155 aa, Brucella sp.; identical to SEQ ID NO: 44781
  misc_feature (1)..(155): tr|A0A1P8S5T1|A0A1P8S5T1_9RHIZ NADPH-dependent 7-cyano- 7-deazaguanine reductase OS=Brucella sp. 09RB8910 OX=18 44051 GN=queF PE=3 SV=1

SEQ ID NO: 44792 - protein, 155 aa, Brucella suis; identical to SEQ ID NO: 44781
  misc_feature (1)..(155): tr|A0A4Z0EY23|A0A4Z0EY23_BRUSS NADPH-dependent 7-cyano- 7-deazaguanine reductase OS=Brucella suis OX=29461 GN=q ueF PE=3 SV=1

SEQ ID NO: 44793 - protein, 155 aa, Brucella suis; identical to SEQ ID NO: 44781
  misc_feature (1)..(155): sp|B0CGY1|QUEF_BRUSI NADPH-dependent 7-cyano-7-deazagua nine reductase OS=Brucella suis (strain ATCC 23445 / NC TC 10510) OX=470137 GN=queF PE=3 SV=1

SEQ ID NO: 44794 - protein, 155 aa, Brucellaceae bacterium
  misc_feature (1)..(155): tr|A0A3P1UNK0|A0A3P1UNK0_9RHIZ NADPH-dependent 7-cyano- 7-deazaguanine reductase OS=Brucellaceae bacterium VT-1 6-1752 OX=2487907 GN=queF PE=3 SV=1
MSENTIYSGLTQLGSTTGVPTSPEEAVLEKVANPQHGTRYCVRFTAPEFTSLCPMTGQPDFAHLVIDYVPDRWLVESKSLKLFLFSFRNHGAFHEDCTVTIGKRLVDLLQPEWLRIGGYWYPRGGIPIDVFYQTGAAPQDVWIPEQGVQNYRGRG

SEQ ID NO: 44795 - protein, 133 aa, Bryobacterales bacterium
  misc_feature (1)..(133): tr|A0A359LTU9|A0A359LTU9_9BACT NADPH-dependent 7-cyano- 7-deazaguanine reductase OS=Bryobacterales bacterium OX =2026791 GN=queF PE=3 SV=1
MPKKEYTDEHAGAGVDAPLPDIETWPNQYREPYEIEIEIPEFTSVCPRTGLPDHGTITIRYTPDRSCLELKSLKMYMLAYRNLGIFQENIVNRFLRDLVKAARPVSITVIGEFTPRGGVYSKITASWSRKRGK

SEQ ID NO: 44796 - protein, 132 aa, Bryobacterales bacterium
  misc_feature (1)..(132): tr|A0A3D1B0C7|A0A3D1B0C7_9BACT NADPH-dependent 7-cyano- 7-deazaguanine reductase OS=Bryobacterales bacterium OX =2026791 GN=queF PE=3 SV=1
MQRSYSDEHAAAGIQAPLPGIETWPNQFAGYEIEIVIPEFTSVCPKTGLPDFGTLTLRYVPDQLCLELKSLKMYTLAYRDLGIFYENVVNRFLRDIVAAIKPVSATLVGEFTPRGGLHSKITARYSREQAGA

SEQ ID NO: 44797 - protein, 141 aa, Bryocella elongata
  misc_feature (1)..(141): tr|A0A1H5SJK7|A0A1H5SJK7_9BACT NADPH-dependent 7-cyano- 7-deazaguanine reductase OS=Bryocella elongata OX=86352 2 GN=queF PE=3 SV=1
MGMSNTDQKHTTGYTDDHAKAGLETNFPAIETWRNQFQKYEILIDDPEFTSVCPKTGLPDFGVLKIRYMPREKCLELKSLKEYLFTYRNLGIFQENIVNQVLDDVVKATEPVWAEIVGDFRPRGGISTIVTARYPRTEEMR

SEQ ID NO: 44798 - protein, 262 aa, Buchnera aphidicola
  misc_feature (1)..(262): tr|W0P0R5|W0P0R5_BUCMP NADPH-dependent 7-cyano-7-deazag uanine reductase OS=Buchnera aphidicola str. USDA (Myzu s persicae) OX=1009856 GN=quef PE=3 SV=1
MSFKINHFSLLKSIPRKKHRKVIELNLVHLPFIGQDIWTLYELSWLNKNGLPQVSVAKIEINATSVNIIESKSFKIYINSFNQVKFDNYINFIKILQADLTKCAGGEVSIKLFNLDEIQNQKISNFSGYCIDNQNIKIKHYEYNRLLLVNSSKKEIVQESIYSNLFKSNCPITHQPDWASIQIIYTGQAINHNALLSYLISFRNCNEFHEECIERIFNDLETVCKPEKLSVYARYTRRGGIDINPWRSNAVYSPCLIRMARQ

SEQ ID NO: 44799 - protein, 263 aa, Buchnera aphidicola
  misc_feature (1)..(263): tr|A0A5J6ZC40|A0A5J6ZC40_9GAMM NADPH-dependent 7-cyano- 7-deazaguanine reductase QueF OS=Buchnera aphidicola (A phis gossypii) OX=98785 GN=queF PE=4 SV=1
MIVKTNQFYLLKSIPRKKHRIKIKINHINLPFIGKDIWTLYEISWLNLHGVPQVAIAKIEFNSTTENIVESKSLKIYINSFNQIKFKNSTNLIKTFISDLNKCVLGEVSVKFFDLHEIEKIGISKFSGTCIDNKNISITSYNYNKLLLKNSSKKKELVIESLYSNLFKSNCPITNQPDWASINIIYNGQKISHTALLKYLVSFRNHNEFHEECIERIFNDIQEICKPRKLSVYARYTRRGGIDINPWRSNIFFEPNFIRLSRQ

SEQ ID NO: 44800 - protein, 284 aa, Budvicia aquatica
  misc_feature (1)..(284): tr|A0A2C6DUT1|A0A2C6DUT1_9GAMM NADPH-dependent 7-cyano- 7-deazaguanine reductase OS=Budvicia aquatica OX=82979 GN=queF PE=3 SV=1
MTSHYQDHQALSNLTLGKKTAYIDNYDATLLQAVPRSLNREPLGLTPDNLPFHGADIWTLYELSWLNSRGLPQVAVGEVRISSDSANLIESKSFKLYLNSFNQTRFDNWEQVNHVLSRDLSQCAQGKVNVTLFRLDQLEGQSIGAFAGECIDDQPIEIDNYQFDDKLLCHGVTDTKLLVKEQLVSHLLKSNCLITNQPDWGSVQISYQGPKINREALLRYLVSFRHHNEFHEQCVERIFNDIQSYCHPTHLTVYARYTRRGGLDINPYRTNEAFRPTVERLVRQ

SEQ ID NO: 44801 - protein, 274 aa, Burkholderia ambifaria
  misc_feature (1)..(274): sp|Q0BBX9|QUEF_BURCM NADPH-dependent 7-cyano-7-deazagua nine reductase OS=Burkholderia ambifaria (strain ATCC B AA-244 / AMMD) OX=339670 GN=queF PE=3 SV=1
MNPEHSPLGKATVYAAQYDASLLFPIPRAGAREQLGITSALPFFGTDIWNAYELSWLNARGKPQVAVATFYVPAESPNIVESKSFKLYLGSFAQSKFDSLDAVRDTLKRDVSAACGASVSVQLVSPHDFGKLQMEELDGLSLDRLDLDTDVYEPDPSLLSAAQDEAPVEETLVSDLLRSNCPVTGQPDWGSVQIHYVGPQIDHAGLLRYIISFRNHTGFHEQCVERIFLDILHACKPLKLAVYARYTRRGGLDINPFRTNYNQPMPDNARTARQ

SEQ ID NO: 44802 - protein, 274 aa, Burkholderia ambifaria
  misc_feature (1)..(274): tr|B1T7R6|B1T7R6_9BURK NADPH-dependent 7-cyano-7-deazag uanine reductase OS=Burkholderia ambifaria MEX-5 OX=396 597 GN=queF PE=3 SV=1
MNPEHSPLGKATVYAAQYDASLLFPIPRAGARAQLGITSAPPFFGTDIWNAYELSWLNARGKPQVAVATFYVPAESPNIVESKSFKLYLGSFAQSKFDSVDTVRDTLKRDVSAACGASVSVQLVSPHDFGKLEMEELDGLSLDRLDLDTDVYEPDPSLLSAAQDEAPVEETLVSDLLRSNCPVTGQPDWGSVQIHYVGPQIDHAGLLRYIISFRNHTGFHEQCVERIFLDILHACKPLKLAVYARYTRRGGLDINPFRTNYNQPMPDNARTARQ

SEQ ID NO: 44803 - protein, 276 aa, Burkholderia anthina
  misc_feature (1)..(276): tr|A0A3P0BXJ3|A0A3P0BXJ3_9BURK NADPH-dependent 7-cyano- 7-deazaguanine reductase OS=Burkholderia anthina OX=179 879 GN=queF PE=3 SV=1
MNPEHSPLGKATVYAAQYDASLLFPIPRAGAREQLGITSALPFFGTDIWNAYELSWLNARGKPQLAIATFYVPAESPNIVESKSFKLYLGSFAQSKFDSVDAVRDVLKRDVSAACGASVSVQLVSPHEFGKLEMDELDGLSLDRLDLDTDVYEPDPSLLSAADGENEAPVEETLVSDLLRSNCPVTGQPDWGSVQIHYVGPQIDHAGLLRYIISFRNHTGFHEQCVERIFLDIMHACKPVKLAVYARYTRRGGLDINPFRTNYNQPMPDNARTARQ

SEQ ID NO: 44804 - protein, 276 aa, Burkholderia anthina
  misc_feature (1)..(276): tr|A0A103T6V2|A0A103T6V2_9BURK NADPH-dependent 7-cyano- 7-deazaguanine reductase OS=Burkholderia anthina OX=179 879 GN=queF PE=3 SV=1
MNPEHSPLGKATVYAAQYDASLLFPIPRAGAREQLGITSALPFFGTDIWNAYELSWLNARGKPQLAIATFYVPAESPNIVESKSFKLYLGSFAQSKFDSVDAVRDVLKRDVSAACGASVSVQLVSPHDFGKLEMDELDGLSLDRLDLDTDVYEPDPSLLSAADGENEAPVEETLVSDLLRSNCPVTGQPDWGSVQIHYVGPQIDHAGLLRYIISFRNHTGFHEQCVERIFLDILHACKPVKLAVYARYTRRGGLDINPFRTNYNQPMPDNARTARQ

SEQ ID NO: 44805 - protein, 274 aa, Burkholderia catarinensis
  misc_feature (1)..(274): tr|A0A1J9PLN6|A0A1J9PLN6_9BURK NADPH-dependent 7-cyano- 7-deazaguanine reductase OS=Burkholderia catarinensis O X=1108140 GN=queF PE=3 SV=1
MNPEHSPLGKATVYAAQYDASLLFPIPRAGARAQLGITSTLPFFGTDIWNAYELSWLNARGKPQVAVATFYVPAESPNIVESKSFKLYLGSFAQSKFDSIDAVRDTLKRDVSASCGASVAVQLVSAHDFRKLEMDELDGLSLDRLDLDTDVYEPDPSLLSAAENEAPVEETLVSDLLRSNCPVTGQPDWGSVQIHYVGPQIDQAGLLRYIISFRNHTGFHEQCVERIFLDILHACKPVKLAVYARYTRRGGLDINPFRTNYNQPMPDNARTARQ

SEQ ID NO: 44806 - protein, 276 aa, Burkholderia cenocepacia
  misc_feature (1)..(276): sp|B4EBB9|QUEF_BURCJ NADPH-dependent 7-cyano-7-deazagua nine reductase OS=Burkholderia cenocepacia (strain ATCC BAA-245 / DSM 16553 / LMG 16656 / NCTC 13227 / J2315 / CF5610) OX=216591 GN=queF PE=3 SV=1
MNPEQSPLGKATVYAAQYDASLLFPIPRAGAREQLGITSALPFFGTDIWNAYELSWLNARGKPQVAIATFYVPAESPNIVESKSFKLYLGSFAQSKFDSVDAVRDVLKRDVSAACGASVSVQLVSAHDFRKLEMDELDGLSLDRLDLDADVYEPDPSLLSAADGEDEAPVEETLVSDLLRSNCPVTGQPDWGSVQIHYVGPQIDHAGLLRYIISFRNHTGFHEQCVERIFLDIMRACKPVKLAVYARYTRRGGLDINPFRTNYNQPMPDNARTARQ

SEQ ID NO: 44807 - protein, 276 aa, Burkholderia cenocepacia
  misc_feature (1)..(276): tr|A0A1V6L140|A0A1V6L140_9BURK NADPH-dependent 7-cyano- 7-deazaguanine reductase OS=Burkholderia cenocepacia OX =95486 GN=queF PE=3 SV=1
MNPEQSPLGKATVYAAQYDASLLFPIPRAGAREQLGITSALPFFGTDIWNAYELSWLNARGKPQVAIATFYVPAESPNIVESKSFKLYLGSFAQSKFDSVDAVRDVLKRDVSAACGASVSVQLVSAHDFRKLEMDELDGLSLDRLDLDADVYEPDPSLLSAADGEDEAPVEETLVSDLLRSNCPVTGQPDWGSVQIHYVGPQIDHAGLLRYIISFRNHTGFHEQCVERIFLDILHACKPVKLAVYARYTRRGGLDINPFRTNYNQPMPDNARTARQ

SEQ ID NO: 44808 - protein, 274 aa, Burkholderia cepacia
  misc_feature (1)..(274): tr|A0A0U3TL30|A0A0U3TL30_BURCE NADPH-dependent 7-cyano- 7-deazaguanine reductase OS=Burkholderia cepacia JBK9 O X=1395570 GN=queF PE=3 SV=1
MNPEHSPLGKATVYAAQYDASLLFPIPRAGAREQLGITSALPFFGTDIWNAYELSWLNARGKPQVAVATFYVPAESPAIVESKSFKLYLGSFAQSKFDSIDAVRDVLKRDVSAACGATVSVQLVSAHDFGKLEMEELDGLSLDRLDLDTDIYEPDPSLLSAAVDEAPVEETLVSDLLRSNCPVTGQPDWGSVQIHYVGPQIDHAGLLRYIISFRNHTGFHEQCVERIFLDIMHACKPVKLAVYARYTRRGGLDINPFRTNYNQPMPDNARTARQ

SEQ ID NO: 44809 - protein, 276 aa, Burkholderia cepacia
  misc_feature (1)..(276): tr|J7J782|J7J782_BURCE NADPH-dependent 7-cyano-7-deazag uanine reductase OS=Burkholderia cepacia GG4 OX=1009846 GN=queF PE=3 SV=1
MNPEHSPLGKATVYAAQYDASLLFPIPRAGAREQLGITSALPFFGTDIWNAYELSWLNARGKPQLAVATFFVPAESPNIVESKSFKLYLGSFAQSKFDSVDALRDVLKRDVSAACGASVSVQLVSPHDFGKLQMEELDGLSLDRLDLDTDVYEPDPSLLSAADAEDEAPVEETLVSDLLRSNCPVTGQPDWGSVQIHYVGPQIDHAGLLRYIISFRNHTGFHEQCVERIFLDILHACKPVKLAVYARYTRRGGLDINPFRTNYNQPMPDNARTARQ

SEQ ID NO: 44810 - protein, 274 aa, Burkholderia contaminans
  misc_feature (1)..(274): tr|A0A3N8R1X5|A0A3N8R1X5_9BURK NADPH-dependent 7-cyano- 7-deazaguanine reductase OS=Burkholderia contaminans OX =488447 GN=queF PE=3 SV=1
MNPEHSPLGKATVYAAQYNASLLFPIPRAGAREQLGITSALPFFGTDIWNAYELSWLNARGKPQIAVATFYVPAESPNIVESKSFKLYLGSFAQTKFDSIDAVRDALKRDVSAACGATVSVQLVSPHDFGKLEMDELDGLSLDRLDLDTDVYEPDPSLLSAAEDEAPVEETLVSDLLRSNCPVTGQPDWGSVQIHYVGPQIDHAGLLRYIISFRNHTGFHEQCVERIFLDILHACKPVKLAVYARYTRRGGLDINPFRTNYNQPMPDNARNARQ

SEQ ID NO: 44811 - protein, 274 aa, Burkholderia contaminans
  misc_feature (1)..(274): tr|A0A2S5DVQ3|A0A2S5DVQ3_9BURK NADPH-dependent 7-cyano- 7-deazaguanine reductase OS=Burkholderia contaminans OX =488447 GN=queF PE=3 SV=1
MNPEHSPLGKATVYAAQYDASLLFPIPRAGAREQLGITSALPFFGTDIWNAYELSWLNARGKPQIAVATFYVPAESPNIVESKSFKLYLGSFAQTKFDSIDAVRDVLKRDVSAACGATVSVQLVSPHDFGKLEMDELDGLSLDRLDLDTDVYEPDPSLLSAAEDEAPVEETLVSDLLRSNCPVTGQPDWGSVQIHYVGPQIDHAGLLRYIISFRNHTGFHEQCVERIFLDILHACKPVKLAVYARYTRRGGLDINPFRTNYNQPMPDNARNARQ

SEQ ID NO: 44812 - protein, 276 aa, Burkholderia dabaoshanensis
  misc_feature (1)..(276): tr|A0A2N7VHK4|A0A2N7VHK4_9BURK NADPH-dependent 7-cyano- 7-deazaguanine reductase OS=Burkholderia dabaoshanensis OX=564714 GN=queF PE=3 SV=1
MNSISNQAPMELGKQSKYESTYNPDKLFAIPRSIKRAEIGITGALPFFGVDVWNHYEVSWLTPRGVPRVAMATIVVPCASPNVIESKSMKLYFNTFNNTRFEEQAEVERIAALDLSRCAGAAVAVTLEPLERASALRIGMPEGTSIDEQDVVIDHFTVDPQVLTTHDEHVSETLYSNLLKSNCLVTGQPDWGTVSIAYEGPRIDRAGLLKYVVSFRDHEEFHEQCVERIFKDIQAHCAPARLTVSARYTRRGGIDINPIRGSEPVQHVSNIRLIRQ

SEQ ID NO: 44813 - protein, 274 aa, Burkholderia dabaoshanensis
  misc_feature (1)..(274): tr|A0A2N7VVP0|A0A2N7VVP0_9BURK NADPH-dependent 7-cyano- 7-deazaguanine reductase OS=Burkholderia dabaoshanensis OX=564714 GN=queF PE=3 SV=1
MTPDHSPLGKSTTYREQYDPALLFPIARSQAREAIGITQTLPFFGTDIWNAYELSWLNARGKPQIAIATFFVPAESPNIVESKSFKLYLGSFAQTRIESVEALRETLKRDVSAACGASVSVRLATPAEFAKLEFEEFDGLSLDRLDLDADVYEPDPTLLTAAHGEAPVEETLYSNLLKSNCPVTGQPDWGSVQIHYVGPQIDHAGLLRYIISYRSHTGFHEQCVERIFIDILRQCRPVKLAVYARYTRRGGLDINPFRTNYNLPMPDNARTARQ

SEQ ID NO: 44814 - protein, 274 aa, Burkholderia diffusa
  misc_feature (1)..(274): tr|A0A1B4BV25|A0A1B4BV25_9BURK NADPH-dependent 7-cyano- 7-deazaguanine reductase OS=Burkholderia diffusa OX=488 732 GN=queF PE=3 SV=1
MNPEHSPLGKATVYAAQYDASLLFPIPRAGSREQLGITSALPFFGTDIWNAYELSWLNARGKPQLAVATFFVPAESPNIVESKSFKLYLGSFAQSKFDSVDAVRDVLKRDVSAACGASVSVQLVSPHDFGKLEMEELDGLSLDRLDLDTDVYEPDPSLLSAAEDEAPVEETLVSDLLRSNCPVTGQPDWGSVQIHYVGPQIDHAGLLRYIISFRNHTGFHEQCVERIFLDILHACKPVKLAVYARYTRRGGLDINPFRTNYNQPMPDNARTARQ

SEQ ID NO: 44815 - protein, 274 aa, Burkholderia dolosa
  misc_feature (1)..(274): tr|A2W7H0|A2W7H0_9BURK NADPH-dependent 7-cyano-7-deazag uanine reductase OS=Burkholderia dolosa AU0158 OX=35070 1 GN=queF PE=3 SV=1
MNPEHSPLGKATVYASQYDASLLFPIPRAGAREQIGITSALPFFGTDIWNAYELSWLNARGKPQVAVATFYVPAESPNIVESKSFKLYLGSFAQSKFDSVDAVRDVLKRDVSAACGASVAVQLVSPHDFGKLEMDELDGLSLDRLDLDADVYEPDPSLLSAAENEAPIEETLVSDLLRSNCPVTGQPDWGSVQIHYVGPQIDHAGLLRYIISFRNHTGFHEQCVERIFLDILQRCKPVKLAVYARYTRRGGLDINPFRTNYNQPMPDNARTARQ

SEQ ID NO: 44816 - protein, 274 aa, Burkholderia gladioli
  misc_feature (1)..(274): tr|F2LBW7|F2LBW7_BURGS NADPH-dependent 7-cyano-7-deazag uanine reductase OS=Burkholderia gladioli (strain BSR3) OX=999541 GN=queF PE=3 SV=1
MTPEHSPLGKATAYTTDYDAALLFPIPRAGAREQIGIGAALPFFGTDIWNAYELSWLNRRGKPQIAVATVLVPADSPNIVESKSFKLYLGSFAQTAFDSLEAVRDALKRDVSAACGASVAVQLASPAEFRKLRLDELDGIPLDRLDLDTDIYHPDPSLLSAAHEESPVEETLVSDLLKSNCPVTGQPDWGSVQIHYVGPQIDQAGLLRYLISFRNHTGFHEQCVERIFVDILRECRPVKLAVYARYTRRGGLDINPFRTNFNQPMPDNARTARQ

SEQ ID NO: 44817 - protein, 274 aa, Burkholderia gladioli
  misc_feature (1)..(274): tr|A0A095Y847|A0A095Y847_BURGA NADPH-dependent 7-cyano- 7-deazaguanine reductase OS=Burkholderia gladioli OX=28 095 GN=queF PE=3 SV=1
MTPEHSPLGKATAYTTDYDAALLFPIPRAGAREQIGIGAALPFFGTDIWNAYELSWLNRRGKPQIAVATFLVPADSPNIVESKSFKLYLGSFAQTAFDSLEAVRDALKRDVSAACGASVAVQLASPAEFRKLRLDELDGIPLDRLDLDTDIYHPDPSLLSAAHEESPVEETLVSDLLKSNCPVTGQPDWGSVQIHYVGPQIDQAGLLRYLISFRNHTGFHEQCVERIFVDILRECRPVKLAVYARYTRRGGLDINPFRTNFNQPMPDNARTARQ

SEQ ID NO: 44818 - protein, 274 aa, Burkholderia glumae
  misc_feature (1)..(274): tr|A0A2J9H7E2|A0A2J9H7E2_BURGL NADPH-dependent 7-cyano- 7-deazaguanine reductase OS=Burkholderia glumae OX=337 GN=queF PE=3 SV=1
MTPEHSPLGKAAVYTTDYDAALLFPIPRAAAREQIGIGATLPFFGTDIWNAYELSWLTPRGKPQIAVATFLVPADSPNIVESKSFKLYLGSFAQTAFDSADAVRDTLKRDVSAACGASVAVQLASPSGFAKLKLEELAGLSLDRLDLDTDVYHPDPTLLSASHDESPVEETLVSDLLKSNCPVTGQPDWGSVQIHYVGAPIDHAGLLRYLISFRNHTGFHEQCVERIFVDVLRECRPLKLAVYARYTRRGGLDINPFRTNFNQPLPDNARTARQ

SEQ ID NO: 44819 - protein, 274 aa, Burkholderia glumae; identical to SEQ ID NO: 44818
  misc_feature (1)..(274): tr|C5AD36|C5AD36_BURGB NADPH-dependent 7-cyano-7-deazag uanine reductase OS=Burkholderia glumae (strain BGR1) O X=626418 GN=queF PE=3 SV=1

SEQ ID NO: 44820 - protein, 274 aa, Burkholderia insecticola
  misc_feature (1)..(274): tr|R4WT13|R4WT13_9BURK NADPH-dependent 7-cyano-7-deazag uanine reductase OS=Burkholderia insecticola OX=758793 GN=queF PE=3 SV=1
MTPEQSPLGKPVHYTEQYDASLLFPIDRKRARDAIGVPARLPFFGTDVWNAYELSWLNQRGKPQIAVATFFVPADSPNIVESKSFKLYLGSFAQTRFDSIDDVRAAIKRDVSAICGATVSVQLTPPMDFGKLVMEEFEGLSLDRLDLDCDVYAPDASLLSAAKDEVPVEETLFSNLLKSNCPVTGQPDWGSVQIRYYGGQIDHAGLLRYIVSFREHTGFHEQCVERIFMDIMRECKPERLAVYARYTRRGGLDINPFRTNFNLPMPDNARLARQ

SEQ ID NO: 44821 - protein, 274 aa, Burkholderia lata
  misc_feature (1)..(274): sp|Q39D07|QUEF_BURL3 NADPH-dependent 7-cyano-7-deazagua nine reductase OS=Burkholderia lata (strain ATCC 17760 / DSM 23089 / LMG 22485 / NCIMB 9086 / R18194 / 383) OX =482957 GN=queF PE=3 SV=1
MNPEHSPLGKATVYAAQYDASLLFPIPRAGAREQLGITSALPFFGTDIWNAYELSWLNARGKPQIAVATFYVPAESPNIVESKSFKLYLGSFAQTTFDSIDAVRDTLKRDVSAACGATVSVQLVSPHDFGKLEMEELDGLSLDRLDLDTDVYEPDPSLLKAAEDEAPVEETLVSDLLRSNCPVTGQPDWGSVQIHYVGPQIDHAGLLRYIISFRNHTGFHEQCVERIFLDILHACKPVKLAVYARYTRRGGLDINPFRTNYNQPMPDNARNARQ

SEQ ID NO: 44822 - protein, 274 aa, Burkholderia lata
  misc_feature (1)..(274): tr|A0A3G3H890|A0A3G3H890_BURL3 NADPH-dependent 7-cyano- 7-deazaguanine reductase OS=Burkholderia lata (strain A TCC 17760 / DSM 23089 / LMG 22485 / NCIMB 9086 / R18194 / 383) OX=482957 GN=queF PE=3 SV=1
MHPEHSPLGKATVYAAQYDASLLFPIPRAGAREQLGITSALPFFGTDIWNAYELSWLNARGKPQIAVATFYVPAESANIVESKSFKLYLGSFAQTKFDSIDAVRDTLKRDVSAACGATVSVQLVSPHDFGKLEMDELDGLSLDRLDLDTDVYEPDPSLLSAAEDEAPVEETLVSDLLRSNCPVTGQPDWGSVQIHYVGPQIDHAGLLRYIISFRNHTGFHEQCVERIFLDILHACKPVKLAVYARYTRRGGLDINPFRTNYNQPMPDNARNARQ

SEQ ID NO: 44823 - protein, 276 aa, Burkholderia latens
  misc_feature (1)..(276): tr|A0A1B4NUJ8|A0A1B4NUJ8_9BURK NADPH-dependent 7-cyano- 7-deazaguanine reductase OS=Burkholderia latens OX=4884 46 GN=queF PE=3 SV=1
MNPEQSPLGKATVYAAQYDASLLFPIPRAGAREQLGITSALPFFGTDIWNAYELSWLNARGKPQLAIATFYVPAESPNIVESKSFKLYLGSFAQSKFDSVDAVRDVLKRDVSAACGASVSVQLVSPHDFGKLEMEELDGLSLDRLDLDTDVYEPDPSLLSAADAEDEAPVEETLVSDLLRSNCPVTGQPDWGSVQIHYVGPQIDHAGLLRYIISFRNHTGFHEQCVERIFLDILHACKPVKLAVYARYTRRGGLDINPFRTNYNQPMPDNARTARQ

SEQ ID NO: 44824 - protein, 274 aa, Burkholderia mallei
  misc_feature (1)..(274): sp|Q62MP8|QUEF_BURMA NADPH-dependent 7-cyano-7-deazagua nine reductase OS=Burkholderia mallei (strain ATCC 2334 4) OX=243160 GN=queF PE=3 SV=1
MNPEHSPLGKATVYANQYDASLLFPIPRAGAREQIGIGAPLPFFGTDIWNAYELSWLNARGKPQIAIATFYVPAESPNIVESKSFKLYLGSFAQTAFESADAVRDALKRDVSAACGASVTVRLATPAEFRKLQMDELDGLSLDRLDLDAHVYETDPSFLTASHDEAPVEETLVTDLLKSNCPVTGQPDWGSVQIHYVGAPIDHAGLLRYIISFRNHTGFHEQCVERIFVDILRACQPVKLAVYARYTRRGGLDINPFRTNYNQPMPDNARTARQ

SEQ ID NO: 44825 - protein, 274 aa, Burkholderia mallei; identical to SEQ ID NO: 44824
  misc_feature (1)..(274): sp|A1V760|QUEF_BURMS NADPH-dependent 7-cyano-7-deazagua nine reductase OS=Burkholderia mallei (strain SAVP1) OX =320388 GN=queF PE=3 SV=1

SEQ ID NO: 44826 - protein, 274 aa, Burkholderia metallica
  misc_feature (1)..(274): tr|A0A1B4HWJ3|A0A1B4HWJ3_9BURK NADPH-dependent 7-cyano- 7-deazaguanine reductase OS=Burkholderia metallica OX=4 88729 GN=queF PE=3 SV=1
MNPEHSPLGKATVYAAQYDASLLFPIPRAGAREQLGITSALPFFGTDIWNAYELSWLNTRGKPQLAVATFYVPAESPNIVESKSFKLYLGSFAQSKFDSIDAVRDTLKRDVSAACGATVSVQLVSPHDFGKLEMDELDGLSLDRLDLDTDVYEPDPSLLSAAEDEAPVEETLVSDLLRSNCPVTGQPDWGSVQIHYVGPQIDHAGLLRYIISFRNHTGFHEQCVERIFLDILHACKPVKLAVYARYTRRGGLDINPFRTNYNQPMPDNARTARQ

SEQ ID NO: 44827 - protein, 274 aa, Burkholderia multivorans
  misc_feature (1)..(274): sp|A9AFB4|QUEF_BURM1 NADPH-dependent 7-cyano-7-deazagua nine reductase OS=Burkholderia multivorans (strain ATCC 17616 / 249) OX=395019 GN=queF PE=3 SV=1
MNPEHSPLGKATVYASQYDASLLFPIPRAGAREQIGITSALPFFGTDIWNAYELSWLNARGKPQVAVATFYVPAESPNIVESKSFKLYLGSFAQSKFDSVDAVRDVLKRDVSAACGASVSVQLVSPHDFGKLEMDELDGLSLDRLDLDADVYEPDPSLLSAAEDEAPVEETLVSDLLKSNCPVTGQPDWGSVQIHYVGPQIDHAGLLRYIISFRNHTGFHEQCVERIFLDILHRCKPVKLAVYARYTRRGGLDINPFRTNYNQPMPDNARTARQ

SEQ ID NO: 44828 - protein, 274 aa, Burkholderia multivorans; identical to SEQ ID NO: 44827
  misc_feature (1)..(274): tr|A0A1W0YAT6|A0A1W0YAT6_9BURK NADPH-dependent 7-cyano- 7-deazaguanine reductase OS=Burkholderia multivorans OX =87883 GN=queF PE=3 SV=1

SEQ ID NO: 44829 - protein, 274 aa, Burkholderia novacaledonica
  misc_feature (1)..(274): tr|A0A2U3I505|A0A2U3I505_9BURK NADPH-dependent 7-cyano- 7-deazaguanine reductase OS=Burkholderia novacaledonica OX=1544861 GN=queF PE=3 SV=1
MTPDQSPLGKPVHYTEQYDASLLFPIDRKRARDSIGVPARLPFFGTDIWNAYELSWLNRRGKPQIAVATFFVPADSPNIVESKSFKLYLGSFAQTPFDSIDDVRAAIKRDVSAICGATVSVQLAAPGDFGKLTMEEFDGLSLDRLDLDCDVFSPDPSLLKAAHDEAPTDETLFSNLLKSNCPVTGQPDWGSVQIRYYGGQIDHAGLLRYIVSYREHTGFHEQCVERIFMDIMRECKPERLAVYARYTRRGGLDINPFRTNFNLPMPDNARLARQ

SEQ ID NO: 44830 - protein, 274 aa, Burkholderia oklahomensis
  misc_feature (1)..(274): tr|A0A381BVD9|A0A381BVD9_9BURK NADPH-dependent 7-cyano- 7-deazaguanine reductase OS=Burkholderia oklahomensis O X=342113 GN=queF PE=3 SV=1
MNPEHSPLGKTTVYSGAYDASLLFPIPRAGAREQIGIGAQLPFFGTDIWNAYELSWLNARGKPQVAIATFYVPAESPNIVESKSFKLYLGSFAQTAFESVDAVRDTLKRDVSAACGANVTARLSTPAEFRKLRMEELDGLSLDRLDLEADVYEPDPSFLTASHEEAPIEETLVTDLLKSNCPVTGQPDWGSVQIHYVGAPIDHAGLLRYIISFRNHTGFHEQCVERIFIDILRECKPVKLAVYARYTRRGGLDINPFRTNYNQPMPDNARTARQ

SEQ ID NO: 44831 - protein, 274 aa, Burkholderia plantarii
  misc_feature (1)..(274): tr|A0A0B6RWE6|A0A0B6RWE6_9BURK NADPH-dependent 7-cyano- 7-deazaguanine reductase OS=Burkholderia plantarii OX=4 1899 GN=queF PE=3 SV=1
MTPEHSPLGKAAAYTTDYDASLLFPIPRAGAREQIGIGAALPFFGTDIWNAYELSWLTPRGKPQIAVATFLVPADSPHIVESKSFKLYLGSFAQTAFDSVDAVRDTLKRDVSAACGASVAVQLASPSGFAKLKLEELDGLSLDRLDLDTDVYHPDPTLLSASHDESPVEETLVSDLLKSNCPVTGQPDWGSVQVHYVGAPIDHAGLLRYLISFRNHTGFHEQCVERIFVDILRECRPLKLAVYARYTRRGGLDINPFRTNFNQPLPDNARTARQ

SEQ ID NO: 44832 - protein, 274 aa, Burkholderia pseudomallei
  misc_feature (1)..(274): sp|Q63XA4|QUEF_BURPS NADPH-dependent 7-cyano-7-deazagua nine reductase OS=Burkholderia pseudomallei (strain K96 243) OX=272560 GN=queF PE=3 SV=1
MNPEHSPLGKATVYANQYDASLLFPIPRAGAREQIGIGAPLPFFGTDIWNAYELSWLNARGKPQIAIATFYVPAESPNIVESKSFKLYLGSFAQTAFESADAVRDALKRDVSAACDASVTVRLATPAEFRKLQMDELDGLSLDRLDLDAHVYETDPSFLTASHGEAPVEETLVTDLLKSNCPVTGQPDWGSVQIHYVGAPIDHAGLLRYIISFRNHTGFHEQCVERIFVDILRACQPVKLAVYARYTRRGGLDINPFRTNYNQPMPDNARTARQ

SEQ ID NO: 44833 - protein, 274 aa, Burkholderia pseudomallei; identical to SEQ ID NO: 44832
  misc_feature (1)..(274): tr|A8E9I9|A8E9I9_BURPE NADPH-dependent 7-cyano-7-deazag uanine reductase OS=Burkholderia pseudomallei 406e OX=3 60118 GN=queF PE=3 SV=1

SEQ ID NO: 44834 - protein, 274 aa, Burkholderia pseudomultivorans
  misc_feature (1)..(274): tr|A0A132F590|A0A132F590_9BURK NADPH-dependent 7-cyano- 7-deazaguanine reductase OS=Burkholderia pseudomultivor ans OX=1207504 GN=queF PE=3 SV=1
MNPEHSPLGKATVYASQYDASLLFPIPRAGAREQIGITAALPFFGTDIWNAYELSWLNARGKPQVAVATFYVPAESPNIVESKSFKLYLGSFAQSRFDSVDAVRDVLKRDVSAACGASVSVQLVSPHDFRKLEMDELDGLSLDRLDLDADVYEPDPTLLSAAEDEAPVEETLVSDLLKSNCPVTGQPDWGSVQIHYVGPQIDHAGLLRYIISFRNHTGFHEQCVERIFLDILHRCKPVKLAVYARYTRRGGLDINPFRTNYNQPMPDNARTARQ

SEQ ID NO: 44835 - protein, 274 aa, Burkholderia pseudomultivorans
  misc_feature (1)..(274): tr|A0A132EJ88|A0A132EJ88_9BURK NADPH-dependent 7-cyano- 7-deazaguanine reductase OS=Burkholderia pseudomultivor ans OX=1207504 GN=queF PE=3 SV=1
MNPEHSPLGKATVYASQYDASLLFPIPRAGAREQIGITAALPFFGTDIWNAYELSWLNARGKPQVAVATFYVPAESPNIVESKSFKLYLGSFAQSRFDSVDAVRDVLKRDVSAACGASVSVQLVSPHDFRKLEMDELDGLSLDRLDLDADVYEPDPSLLSAAEDEAPVEETLVSDLLKSNCPVTGQPDWGSVQIHYVGPQIDHAGLLRYIISFRNHTGFHEQCVERIFLDILHRCKPVKLAVYARYTRRGGLDINPFRTNYNQPMPDNARTARQ

SEQ ID NO: 44836 - protein, 276 aa, Burkholderia puraquae
  misc_feature (1)..(276): tr|A0A1X1P900|A0A1X1P900_9BURK NADPH-dependent 7-cyano- 7-deazaguanine reductase OS=Burkholderia puraquae OX=19 04757 GN=queF PE=3 SV=1
MNPEHSPLGKATVYAAQYDASLLFPIPRAGARAQLGITSALPFFGTDIWNAYELSWLNTRGKPQVAVATFYVPAESPNIVESKSFKLYLGSFAQSKFDSVDAVRDTLKRDVSAACGASVSVQLVSPHDFGKLEMEELDGLSLDRLDLDTDVYEPDPSLLTAADGENEAPVEETLVSDLLRSNCPVTGQPDWGSVQIHYVGPQIDHAGLLRYIISFRNHTGFHEQCVERIFLDIMHACKPVKLAVYARYTRRGGLDINPFRTNYNQPMPDNARTARQ

SEQ ID NO: 44837 - protein, 276 aa, Burkholderia pyrrocinia
  misc_feature (1)..(276): tr|A0A0G3WPD7|A0A0G3WPD7_BURPY NADPH-dependent 7-cyano- 7-deazaguanine reductase OS=Burkholderia pyrrocinia OX= 60550 GN=queF PE=3 SV=1
MNPEHSPLGKATVYAAQYDASLLFPIPRAGAREQLGIASALPFFGTDIWNAYELSWLNARGKPQVAVATFYVPAESPNIVESKSFKLYLGSFAQSKFDSIDAVRDTLKRDVSAACGASVAVQLVSAHDFGKLEMEELDGLSLDRLDLDADVYEPDPSLLSAADAEGEAPVEETLVSDLLRSNCPVTGQPDWGSVQIHYVGPQIDHAGLLRYIISFRNHTGFHEQCVERIFLDILQACKPVKLAVYARYTRRGGLDINPFRTNYNQPMPDNARTARQ

SEQ ID NO: 44838 - protein, 274 aa, Burkholderia pyrrocinia
  misc_feature (1)..(274): tr|A0A087P1S7|A0A087P1S7_BURPY NADPH-dependent 7-cyano- 7-deazaguanine reductase OS=Burkholderia pyrrocinia OX= 60550 GN=queF PE=3 SV=1
MNPEHSPLGKATVYAAQYDASLLFPIPRAGAREQLGIASALPFFGTDIWNAYELSWLNPRGKPQVAVATFYVPAESPNIVESKSFKLYLGSFAQSKFDSIDAVRDTLKRDVSAACGASVAVQLVSAHDFGKLEMDELDGLSLDRLDLDTDVYEPDPSLLSAAENEAPVEETLVSDLLRSNCPVTGQPDWGSVQIHYVGPQIDHAGLLRYIISFRNHTGFHEQCVERIFLDILHACKPVKLAVYARYTRRGGLDINPFRTNYNQPMPDNARTARQ

SEQ ID NO: 44839 - protein, 274 aa, Burkholderia reimsis
  misc_feature (1)..(274): tr|A0A365QK83|A0A365QK83_9BURK NADPH-dependent 7-cyano- 7-deazaguanine reductase OS=Burkholderia reimsis OX=223 4132 GN=queF PE=3 SV=1
MNPEHSPLGKATVYAAQYDASLLFPIPRAGAREQLGIASALPFFGTDIWNAYELSWLNARGKPQIAVATFYVPAESPNIVESKSFKLYLGSFAQTKFDSIDAVRDTLKRDVSAACGASVAVQLVSPHDFGKLEMDELDGLSLDRLDLDTDVYEPDPSLLSAAVDEAPVEETLVSDLLRSNCPVTGQPDWGSVQIHYVGPQIDHAGLLRYIISFRNHTGFHEQCVERIFLDILHACKPVKLAVYARYTRRGGLDINPFRTNYNQPMPDNARNARQ

SEQ ID NO: 44840 - protein, 274 aa, Burkholderia seminalis
  misc_feature (1)..(274): tr|A0A103KE39|A0A103KE39_9BURK NADPH-dependent 7-cyano- 7-deazaguanine reductase OS=Burkholderia seminalis OX=4 88731 GN=queF PE=3 SV=1
MNPEHSPLGKATVYAAQYDASLLFPIPRAGAREQLGITSALPFFGTDIWNAYELSWLNARGKPQVAVATFYVPAESPNIVESKSFKLYLGSFAQSKFDSIEAVRDVLKRDVSAACGATVSVQLVSAHDFGKLEMDELDGLSLDRLDLDTDIYEPDPSLLSAAEDEAPVEETLVSDLLRSNCPVTGQPDWGSVQIHYVGPQIDHAGLLRYIISFRNHTGFHEQCVERIFLDIMHACKPVKLAVYARYTRRGGLDINPFRTNYNQPMPDNARTARQ

SEQ ID NO: 44841 - protein, 274 aa, Burkholderia singularis
  misc_feature (1)..(274): tr|A0A118DNU8|A0A118DNU8_9BURK NADPH-dependent 7-cyano- 7-deazaguanine reductase OS=Burkholderia singularis OX= 1503053 GN=queF PE=3 SV=1
MNPEHSPLGKTTVYSNQYDASLLFPIPRAGSREQIGIGASLPFFGTDIWNAYELSWLNARGKPQVAIATFYVPAESPNIVESKSFKLYLGSFAQTAFESIEAVRDTIKRDVSAVCGANVGVQLAAPADFRKLSLDELDGLSLDRLDLEADVYHPDASLLAASHDEAPVEETLVSDLLKSNCPVTGQPDWGSVQIRYVGAPIDHAGLLRYIISYRDHTGFHEQCVERIFIDILNACKPVKLAVYARYTRRGGLDINPFRTNYNQPMPDNARTARQ

SEQ ID NO: 44842 - protein, 267 aa, Burkholderia singularis
  misc_feature (1)..(267): tr|A0A238H8H8|A0A238H8H8_9BURK NADPH-dependent 7-cyano- 7-deazaguanine reductase OS=Burkholderia singularis OX= 1503053 GN=queF PE=3 SV=1
MELGQPSKYESTYNAERLFAIARAVKREEISITGPLPFFGFDVWNHYEVSWLTPRGLPRVAIATVIVPCTSPNVIESKTMKLYFNTFNNTPFTDRAEVEQIASRDLSRCAGAPVSVTLEPLEYATALRIDAPPGTSIDEQDIAIDQYHVDPQLLFVHDEPVSETLYSNLLKSNCLVTGQPDWGTVSIAYEGRRIDRAALLKYIVSFRNHEEFHEQCVERIFKDIQDRCAPTRLTVNARYTRRGGIDINPIRSSAPLNEAPNTRLVRQ

SEQ ID NO: 44843 - protein, 580 aa, Burkholderia sp.
  misc_feature (1)..(580): tr|A0A1G6YZM0|A0A1G6YZM0_9BURK NADPH-dependent 7-cyano- 7-deazaguanine reductase OS=Burkholderia sp. TNe-862 OX =416944 GN=queF PE=3 SV=1
MSVSLSDKLVVAISSRALFDFEEENRVFETGDLQAYEALQRERLNVPARPGVAFALIQKLLALNNGAHHVEVVILSRSDPISGLRAFSSCREHGLDIQRGVFTRGSEPWHYLKPLNASLFLSANPPDVRSALDAGFPAARVFPESATMAQRNAHEIRIAFDGDAVLFSDEAEQIFQSHGLGAFVSHERDNRELPLAHGPLQPLLAALNRLQKLAGANAQMRIRTALVTARSAPAHERAIRTLMAWNIEIDEAMFLGGLDKGPFLREFEPDFFFDDQIRHCESARSVTATGHVASRRDQSRNRSQRIMTPDQSPLGKPAAYTEQYDASLLFPIPRAGAREQIGIGAQLPFFGSDIWNAYELSWLNARGKPQIAIATFFIPADSPNIIESKSFKLYLGSFAQTPFESAEVVRDTIKRDVTAACGASVSLRLEQPGAFGKIPFEEFDGLSLDRLDLDTEIYQPEPTLLKAAFDEAPVEETLVSNLLKSNCPVTGQPDWGSVQIHYVGPQIDQAGLLRYIISYRNHTGFHEQCAERIFMDILRECKPDRLAVYARYTRRGGLDINPFRTNFNMPMPDNARLARQ

SEQ ID NO: 44844 - protein, 274 aa, Burkholderia sp.
  misc_feature (1)..(274): tr|U2FYX1|U2FYX1_9BURK NADPH-dependent 7-cyano-7-deazag uanine reductase OS=Burkholderia sp. AU4i OX=1335308 GN =queF PE=3 SV=1
MNPEHSPLGKATAYAAQYDASLLFPIPRAGAREQLGIASALPFFGTDIWNAYELSWLNARGKPQIAVATFYVPAESPNIVESKSFKLYLGSFAQTKFDSIDAVRDTLKRDVSAACGASVAVQLVSPHDFGKLEMDELDGLSLDRLDLDTDVYEPDPSLLSAAVDEAPVEETLVSDLLRSNCPVTGQPDWGSVQIHYVGPQIDHAGLLRYIISFRNHTGFHEQCVERIFLDILHACKPVKLAVYARYTRRGGLDINPFRTNYNQPMPDNARNARQ

SEQ ID NO: 44845 - protein, 276 aa, Burkholderia stabilis
  misc_feature (1)..(276): tr|A0A1Y1BKB2|A0A1Y1BKB2_9BURK NADPH-dependent 7-cyano- 7-deazaguanine reductase OS=Burkholderia stabilis OX=95 485 GN=queF PE=3 SV=1
MNPEHSPLGKATVYAARYDASLLFPIPRAGAREQLGITSALPFFGTDIWNAYELSWLNARGKPQVAVATFYVPAESPNIVESKSFKLYLGSFAQSKFDSIDAVRDTLKRDVSAACGASVSVQLVSAHDFGKLEMEELDGLSLDRLDLDTDVYEPDPSLLSAADAEDEAPVEETLVSDLLRSNCPVTGQPDWGSVQIHYVGPQIDHAGLLRYIISFRNHTGFHEQCVERIFLDILHACKPVKLAVYARYTRRGGLDINPFRTNYNQPMPDNARTARQ

SEQ ID NO: 44846 - protein, 276 aa, Burkholderia stabilis
  misc_feature (1)..(276): tr|A0A4Q2AR37|A0A4Q2AR37_9BURK NADPH-dependent 7-cyano- 7-deazaguanine reductase OS=Burkholderia stabilis OX=95 485 GN=queF PE=3 SV=1
MNPEHSPLGKATVYAAQYDASLLFPIPRAGAREQIGITSALPFFGTDIWNAYELSWLNARGKPQVAVATFYVPAESPNIVESKSFKLYLGSFAQSTFDSVDAVRDTLKRDVSAACGASVSVQLVSPHDFGKLQMDELDGLSLDRLDLDTDVYEPDPSLLSAADAEDEAPVEETLVSDLLRSNCPVTGQPDWGSVQIHYVGPQIDHAGLLRYIISFRNHTGFHEQCVERIFLDILHACKPVKLAVYARYTRRGGLDINPFRTNYNQPMPDNARTARQ

SEQ ID NO: 44847 - protein, 276 aa, Burkholderia stagnalis
  misc_feature (1)..(276): tr|A0A107ADM3|A0A107ADM3_9BURK NADPH-dependent 7-cyano- 7-deazaguanine reductase OS=Burkholderia stagnalis OX=1 503054 GN=queF PE=3 SV=1
MNTISNQGAMELGKQSKYESIYNPEKLYAIPRTIKREEIGITGALPFFGVDVWNHYEVSWLTPRGVPRVAIATIVVPCASANVIESKSMKLYFNTFNNTTFADHAEVERIAARDLSHCAGAPVSVTLEPLERAAALRIGAPAGTSIDDEDIDIGTFSVDRQLLATHDEQVSETLYSNLLKSNCLVTGQPDWGTVEIAYEGRRIDRAALLRYVVSFRNHEEFHEQCVERIFKDIQDQCAPTRLTVAARYTRRGGLDINPVRSSAPVHDAPNTRLVRQ

SEQ ID NO: 44848 - protein, 267 aa, Burkholderia stagnalis
  misc_feature (1)..(267): tr|A0A3P0F2L6|A0A3P0F2L6_9BURK NADPH-dependent 7-cyano- 7-deazaguanine reductase OS=Burkholderia stagnalis OX=1 503054 GN=queF PE=3 SV=1
MELGKQSKYESIYNPEKLYAIPRTIKREEIGITGALPFFGVDVWNHYEVSWLTPRGVPRVAIATIVVPCASANVIESKSMKLYFNTFNNTTFADHAEVERIAARDLSHCAGAPVSVTLEPLERAAALRIGAPAGTSIDDEDIDIGTFSVDRQLLATHDEQVSETLYSNLLKSNCLVTGQPDWGTVEIAYEGRRIDRAALLRYVVSFRNHEEFHEQCVERIFKDIQDQCAPTRLTVAARYTRRGGLDINPVRSSVPVHDAPNTRLVRQ

SEQ ID NO: 44849 - protein, 274 aa, Burkholderia territorii
  misc_feature (1)..(274): tr|A0A107JR92|A0A107JR92_9BURK NADPH-dependent 7-cyano- 7-deazaguanine reductase OS=Burkholderia territorii OX= 1503055 GN=queF PE=3 SV=1
MNPEHSPLGKATVYAAQYDASLLFPIPRAGSREQLGITSALPFFGTDIWNAYELSWLNARGKPQLAVATFFVPAESPNIVESKSFKLYLGSFAQSKFDSVDAVRDVLKRDVSAACGASVSVQLVSPHDFGKLQMEELDGLSLDRLDLDTDVYEPDPSLLSAAEDEAPVEETLVSDLLRSNCPVTGQPDWGSVQIHYVGPQIDHAGLLRYIISFRNHTGFHEQCVERIFLDILHACKPVKLAVYARYTRRGGLDINPFRTNYNQPMPDNARTARQ

SEQ ID NO: 44850 - protein, 274 aa, Burkholderia thailandensis
  misc_feature (1)..(274): sp|Q2T144|QUEF_BURTA NADPH-dependent 7-cyano-7-deazagua nine reductase OS=Burkholderia thailandensis (strain AT CC 700388 / DSM 13276 / CIP 106301 / E264) OX=271848 GN =queF PE=3 SV=1
MNPEHSPLGKTTVYANQYDASLLFPIPRAGAREQIGIGAPLPFFGTDIWNAYELSWLNARGKPQVAIATFYVPAESPNIVESKSFKLYLGSFAQTAFESIDAVRDALKRDVSAACGASVTVRLATPAEFRKLQMDELDGLSLDRLDLDADVYETDPSFLTASHDEAPVEETLVTDLLKSNCPVTGQPDWGSVQIHYVGAPIDHAGLLRYIISFRNHTGFHEQCVERIFIDILRACKPVKLAVYARYTRRGGLDINPFRTNYNQPMPDNARTARQ

SEQ ID NO: 44851 - protein, 274 aa, Burkholderia thailandensis; identical to SEQ ID NO: 44850
  misc_feature (1)..(274): tr|A0A2Z4SGT6|A0A2Z4SGT6_BURTH NADPH-dependent 7-cyano- 7-deazaguanine reductase OS=Burkholderia thailandensis OX=57975 GN=queF PE=3 SV=1

SEQ ID NO: 44852 - protein, 276 aa, Burkholderia ubonensis
  misc_feature (1)..(276): tr|A0A119NVW5|A0A119NVW5_9BURK NADPH-dependent 7-cyano- 7-deazaguanine reductase OS=Burkholderia ubonensis OX=1 01571 GN=queF PE=3 SV=1
MNSLSNQGALELGKQSKYESIYNPEKLYAIPRTIKREEIGITDTLPFFGVDVWNHYEVSWLTPRGVPRVAIATIVVPCTSPNVIESKSMKLYFNTFNNTSFESREEVERIAANDLSRCAGTPVSVTLESLEYAAALQIGAPVGASIDEQDIDIAQFSVDRQLLATHDEHVSETLYSNLLKSNCLVTGQPDWGTVSIEYEGRRIDRDALLRYVVSFRNHEEFHEQCVERIFKDIQDQCAPARLTVSARYTRRGGLDINPVRSSAPVQDVPNTRLIRQ

SEQ ID NO: 44853 - protein, 274 aa, Burkholderia ubonensis
  misc_feature (1)..(274): tr|A0A107BE30|A0A107BE30_9BURK NADPH-dependent 7-cyano- 7-deazaguanine reductase OS=Burkholderia ubonensis OX=1 01571 GN=queF PE=3 SV=1
MNPEHSPLGKATVYANQYDASLLFPIPRAGARAQIGITSALPFFGTDIWNAYELSWLNARGKPQVAVATFYVPAESPNIVESKSFKLYLGSFAQTKFDSIDAVRDALKRDVSAACGASVSVQLVSPHDFGKLEMDELDGLSLDRLDLDTDIYEPDPSLLAAAHDEAPVEETLVSDLLRSNCPVTGQPDWGSVQIHYVGPQIDHAGLLRYIISFRNHTGFHEQCVERIFLDILHACKPVKLAVYARYTRRGGLDINPFRTNYNQPMPDNARTARQ

SEQ ID NO: 44854 - protein, 274 aa, Burkholderia vietnamiensis
  misc_feature (1)..(274): sp|A4JHT1|QUEF_BURVG NADPH-dependent 7-cyano-7-deazagua nine reductase OS=Burkholderia vietnamiensis (strain G4 / LMG 22486) OX=269482 GN=queF PE=3 SV=1
MNPEHSPLGKATVYAAQYDASLLFPIPRAGAREQLGIAAALPFFGTDIWNAYELSWLNARGKPQLAVATFYVPAESPNIVESKSFKLYLGSFAQSKFDSVDAVRDVLKRDVSAACGASVSVQLVSPHDFGKLQMEELDGLSLDRLDLDTDVYEPDPSLLSAAADEAPVEETLVSDLLRSNCPVTGQPDWGSVQIHYVGPQIDHAGLLRYIISFRNHTGFHEQCVERIFLDILQACKPLKLAVYARYTRRGGLDINPFRTNYNQSMPDNARTARQ

SEQ ID NO: 44855 - protein, 274 aa, Burkholderia vietnamiensis
  misc_feature (1)..(274): tr|A0A103GIM4|A0A103GIM4_BURVI NADPH-dependent 7-cyano- 7-deazaguanine reductase OS=Burkholderia vietnamiensis OX=60552 GN=queF PE=3 SV=1
MNPEHSPLGKATVYAAQYDASLLFPIPRAGAREQLGIAAALPFFGTDIWNAYELSWLNARGKPQLAVATFYVPAESPNIVESKSFKLYLGSFAQSKFDSVDAVRDVLKRDVSAACGASVSVQLVSPHDFGKLQMEELDGLSLDRLDLDTDVYEPDPSLLSAAADEAPVEETLVSDLLRSNCPVTGQPDWGSVQIHYVGPQIDHAGLLRYIISFRNHTGFHEQCVERIFLDILQACKPLKLAVYARYTRRGGLDINPFRTNYNQPMPDNARTARQ

SEQ ID NO: 44856 - protein, 278 aa, Burkholderiaceae bacterium
  misc_feature (1)..(278): tr|A0A0F0DUX8|A0A0F0DUX8_9BURK NADPH-dependent 7-cyano- 7-deazaguanine reductase OS=Burkholderiaceae bacterium 26 OX=1619951 GN=queF PE=3 SV=1
MSNQPEHSPLGKTSAYKTEYDPSLLFPIPRQGKRDEIGLAAGTPLPFFGVDLWNLYELSWLNLRGKPQVALGTVIVPADSPNIVESKSFKLYLNSFNQTKVASHEALQQLIHHDLSEACGAPVQVRIVPPEEFSRQKMGELDGLLLDRLDIETDVYQPTPELLHADEEESPVEETLVSHLLKSNCLVTGQPDWGSVQIRYVGAPINQEGLLKYLISFREHNEFHEQCVERIFTDILRQCRPVKLAVYARYTRRGGLDINPFRTNYNTPWPDNLRNARQ

SEQ ID NO: 44857 - protein, 216 aa, Burkholderiaceae bacterium
  misc_feature (1)..(216): tr|A0A522ZXQ3|A0A522ZXQ3_9BURK NADPH-dependent 7-cyano- 7-deazaguanine reductase QueF (Fragment) OS=Burkholderi aceae bacterium OX=2030806 GN=queF PE=4 SV=1
VALAHIVVPCESPYLVESKSFKLYLGSFSNTRFADEQAVRECIRSDLNDAVWRGGPLQSSVGVRILAPALFDQEPVHELDGLSLDRLDIECSRYTPAPELLTAAFDEQPVTEVLTSNLLKSNCPVTGQPDWAGVQIRYSGPQIGQGGLLQYLVSFRNHSGFHEHCVERIFMDIWTRCQPVQLAVYARYTRRGGLDINPFRTSYPQALPPNVRTARQ

SEQ ID NO: 44858 - protein, 279 aa, Burkholderiales bacterium
  misc_feature (1)..(279): tr|A0A433SEK6|A0A433SEK6_9BURK NADPH-dependent 7-cyano- 7-deazaguanine reductase OS=Burkholderiales bacterium C NM695-12 OX=1965230 GN=queF_1 PE=3 SV=1
MSNSAASSPLGKSSEYRDTYSPELLFPIPRSTNRLQLGITDNAALPFDGVDIWNSYEFSWLTPSGKPAVALVEFRVPANSPNLIESKSFKLYLNSFNQTVFDSLEKIRQILEHDLSAAAGSRVAVRLSDIHDTSAYSVTSPHAQCIDALEVQIASYSHPSVSMLKASACHDTTEQLCSHLLKSNCPVTGQPDWGSVFINYQADNKLDQASLLQYIISFRQHADFHEHCVERIFMDIYTLLAPRQLEVYARYTRRGGLDINPYRTLDAHGVFHNRRLVRQ

SEQ ID NO: 44859 - protein, 139 aa, Burkholderiales bacterium
  misc_feature (1)..(139): tr|A0A1Q3Y1U4|A0A1Q3Y1U4_9BURK NADPH-dependent 7-cyano- 7-deazaguanine reductase OS=Burkholderiales bacterium 6 7-32 OX=1895729 GN=queF PE=3 SV=1
MPSQPSKSLDTFANPSPGRDFQIHIEVPEFTCLCPMTGQPDFALLVIDYIPDQLCVELKSLKLYAWSFRNEGKFHEAVTNEILDDLVRALSPRFMRITAKWYVRGGIFTNVVAEHRQPGWTPQPAVQLQEFAPGSNIRG

SEQ ID NO: 44860 - protein, 280 aa, Buttiauxella agrestis
  misc_feature (1)..(280): tr|A0A381C3L8|A0A381C3L8_9ENTR NADPH-dependent 7-cyano- 7-deazaguanine reductase OS=Buttiauxella agrestis OX=82 977 GN=queF PE=3 SV=1
MSYENHQALSGLTLGKPTAYQDQYQPSLLQAVPRSLNRDPLGLHADNLPFSGGDIWTLYELSWLNSNGLPQVAVGHVQLNANSVNLVESKSFKLYLNSFNQTQFADWETVQETLKRDLSACAQGDVSVVLFRLHELEGQEIAAFTGVCIDEQNITIDNYEFNANYLSGAAGDEIVDETLVSHLLKSNCLITHQPDWGSVQIRYRGPRIDREKLLRYLVSFRQHNEFHEQCVERIFNDIQQFCRPESLSVYARYTRRGGLDINPWRTNTDFHPAFGRLVRQ

SEQ ID NO: 44861 - protein, 280 aa, Buttiauxella agrestis
  misc_feature (1)..(280): tr|A0A085G453|A0A085G453_9ENTR NADPH-dependent 7-cyano- 7-deazaguanine reductase OS=Buttiauxella agrestis ATCC 33320 OX=1006004 GN=queF PE=3 SV=1
MSYENHQALSGLTLGKPTAYQDQYQPSLLQAVPRSLNRDPLGLHADNLPFSGGDIWTLYELSWLNSNGLPQVAVGHMQLDANSVNLVESKSFKLYLNSFNQTQFADWETVQEALKRDLSACAQGDVSVVLFRLHELEGQEIAAFTGECIDEQNITIDNYEFNADYLSGAAGDEIVDETLVSHLLKSNCLITHQPDWGSVQIRYRGPRIDREKLLRYLVSFRQHNEFHEQCVERIFNDIQQFCCPESLSVYARYTRRGGLDINPWRTNTDFHPAFGRLVRQ

SEQ ID NO: 44862 - protein, 280 aa, Buttiauxella brennerae
  misc_feature (1)..(280): tr|A0A1B7ILN2|A0A1B7ILN2_9ENTR NADPH-dependent 7-cyano- 7-deazaguanine reductase OS=Buttiauxella brennerae ATCC 51605 OX=1354251 GN=queF PE=3 SV=1
MSYEKHQALSGLTLGKPTAYQDKYQPSLLQAVPRSLNRDPLGLQADNLPFSGGDIWTLYELSWLNSNGLPQVAVGHVQLDANSVNLVESKSFKLYLNSFNQTQFADWESVEETLKRDLSACAQGDVSVVLFRLRELEGQEIAAFTGECIDEQNITIDNYEFNADYLNGAAGEEIVEETLVSHLLKSNCLITHQPDWGSVQIRYRGPRIDREKLLRYLVSFRHHNEFHEQCVERIFNDIQHFCSPESLSVYARYTRRGGLDINPWRTNTDFHPAFGRLVRQ

SEQ ID NO: 44863 - protein, 280 aa, Buttiauxella gaviniae
  misc_feature (1)..(280): tr|A0A1B7I396|A0A1B7I396_9ENTR NADPH-dependent 7-cyano- 7-deazaguanine reductase OS=Buttiauxella gaviniae ATCC 51604 OX=1354253 GN=queF PE=3 SV=1
MSYEKHQALSGLTLGKPTAYQDKYQASLLQPVPRSLNRDPLGLQADNLPFSGGDIWTLYELSWLNSNGLPQVAVGHVQLDANSVNLVESKSFKLYLNSFNQTQFADWESVEETLKRDLSACAQGDVSVVLFRLRELEGQEIAAFTGECIDEQNITIDNYEFNADYLTGAAGDEIVEETLVSHLLKSNCLITHQPDWGSVQIRYRGPRIDREKLLRYLVSFRHHNEFHEQCVERIFNDIQHFCNPESLSVYARYTRRGGLDINPWRTNTDFHPAFGRLVRQ

SEQ ID NO: 44864 - protein, 280 aa, Buttiauxella izardii
  misc_feature (1)..(280): tr|A0A3A5K493|A0A3A5K493_9ENTR NADPH-dependent 7-cyano- 7-deazaguanine reductase OS=Buttiauxella izardii OX=829 91 GN=queF PE=3 SV=1
MSYEKHQALSGLTLGKPTAYQDKYQPSLLQAVPRSLNRDPLGLQADNLPFSGGDIWTLYELSWLNSNGLPQVAVGHVQLDANSVNLVESKSFKLYLNSFNQTQFADWETVQEALKRDLSACAQGDVSVVLFRLHELEGQEIAAFNGECIDEQNIAIDNYDFNADYLSGAAGDDIVEESLVSHLLKSNCLITHQPDWGSVQIRYRGPRIDREKLLRYLVSFRQHNEFHEQCVERIFNDIQKFCAPETLSVYARYTRRGGLDINPWRTNTDFHPSFGRLVRQ

SEQ ID NO: 44865 - protein, 280 aa, Buttiauxella noackiae
  misc_feature (1)..(280): tr|A0A1B7HLZ4|A0A1B7HLZ4_9ENTR NADPH-dependent 7-cyano- 7-deazaguanine reductase OS=Buttiauxella noackiae ATCC 51607 OX=1354255 GN=queF PE=3 SV=1
MSYEKHQALSGLTLGKPTAYQDKYQASLLQPVPRSLNRDPLGLQADNLPFSGGDIWTLYELSWLNSNGLPQVAVGHVQLDANSVNLIESKSFKLYLNSFNQTQFADWETVQETLKRDLSACAQGDVSVVLFRLHELEGQEIAAFTGECIDDQNITIDNYEFNTDYLSGAAGDEIVEETLVSHLLKSNCLITHQPDWGSVQIRYRGPRIDREKLLRYLVSFRHHNEFHEQCVERIFNDIQHFCHPESLSVYARYTRRGGLDINPWRTNTDFHPAFGRLVRQ

SEQ ID NO: 44866 - protein, 280 aa, Buttiauxella sp.; identical to SEQ ID NO: 44863
  misc_feature (1)..(280): tr|A0A4V3GR61|A0A4V3GR61_9ENTR NADPH-dependent 7-cyano- 7-deazaguanine reductase OS=Buttiauxella sp. BIGb0552 O X=2485120 GN=queF PE=3 SV=1

SEQ ID NO: 44867 - protein, 280 aa, Buttiauxella sp.
  misc_feature (1)..(280): tr|A0A4P5QD24|A0A4P5QD24_9ENTR NADPH-dependent 7-cyano- 7-deazaguanine reductase OS=Buttiauxella sp. A111 OX=25 63088 GN=queF PE=3 SV=1
MSYEKHQALSGLTLGKPTAYQDKYQPSLLQAVPRSLNRDPLGLQADNLPFSGGDIWTLYELSWLNSNGLPQVAVGHVQLDANSVNLVESKSFKLYLNSFNQTKFADRETVQETLKRDLSACAQGDVSVVLFRLHELEGQEIAAFTGECIDEQNITIDNYEFNANYLSESAGVEIVEETLVSHLLKSNCLITHQPDWGSVQIRYRGPRIDREKLLRYLVSFRQHNEFHEQCVERIFNDIQHFCQPETLSVYARYTRRGGLDINPWRTNTDFHPAFGRLVRQ

SEQ ID NO: 44868 - protein, 280 aa, Buttiauxella warmboldiae
  misc_feature (1)..(280): tr|A0A3N5D296|A0A3N5D296_9ENTR NADPH-dependent 7-cyano- 7-deazaguanine reductase OS=Buttiauxella warmboldiae OX =82993 GN=queF PE=3 SV=1
MSYEKHQALSGLTLGKPTAYQDKYQAALLQPVPRSLNRDPLGLQADSLPFSGGDIWTLYELSWLNSKGLPQVAIGHVQLDANSVNLIESKSFKLYLNSFNQTQFADWEAVQETLKRDLSLCAQGDVSVVLFRLHELEGQEIAAFSGECIDEQNITIDNYQFNADYLSGAAGDEIVEETLVSHLLKSNCLITHQPDWGSVQIRYRGPRIDREKLLRYLVSFRHHNEFHEQCVERIFNDIHHFCQPQNLSVYARYTRRGGLDINPWRTNTDFHPSFGRLVRQ

SEQ ID NO: 44869 - protein, 165 aa, Butyricicoccus porcorum
  misc_feature (1)..(165): tr|A0A252F744|A0A252F744_9CLOT NADPH-dependent 7-cyano- 7-deazaguanine reductase OS=Butyricicoccus porcorum OX= 1945634 GN=queF PE=3 SV=1
MAGRNTEETQGITLLGNQGTKYRDDYAPEVLETFVNKHPENDYFVKFNCPEFTSLCPITGQPDFATITISYVPSERMVESKSLKLYLFSFRNHGDFHEDCVNIIMKDLIRLMDPKYIEVWGKFTPRGGISIDPYCNYGKPGTRWEEVAWNRMANHDLYPEKIDNR

SEQ ID NO: 44870 - protein, 165 aa, Butyricicoccus sp.
  misc_feature (1)..(165): tr|A0A417HNV3|A0A417HNV3_9CLOT NADPH-dependent 7-cyano- 7-deazaguanine reductase OS=Butyricicoccus sp. AM28-25 OX=2292294 GN=queF PE=3 SV=1
MTGRNKEELNGVTLLGSQKNKYPSDYAPEMLETFPNKHPDNDYFVKFNCPEFTSLCPMTGQPDFATIYISYVPGERMVESKSLKLYLFSFRNHGDFHEDCVNIIMKDLIRLMDPKYIEVWGKFTPRGGISIDPYCNYGKPGTRWEEVAFERLTHHDLYPEKVDNR

SEQ ID NO: 44871 - protein, 165 aa, Butyricicoccus sp.; identical to SEQ ID NO: 44870
  misc_feature (1)..(165): tr|A0A416P9Y6|A0A416P9Y6_9CLOT NADPH-dependent 7-cyano- 7-deazaguanine reductase OS=Butyricicoccus sp. AF22-28A C OX=2292198 GN=queF PE=3 SV=1

SEQ ID NO: 44872 - protein, 292 aa, Butyricimonas faecalis
  misc_feature (1)..(292): tr|A0A3S9VQX2|A0A3S9VQX2_9BACT NADPH-dependent 7-cyano- 7-deazaguanine reductase QueF OS=Butyricimonas faecalis OX=2093856 GN=D8S85_04750 PE=4 SV=1
MSIEAKVLGQQVAYPTNYCPSILVPVPRYLNREIYDIHAPEELFQGYDTWHAYEAGFLTRNGLPVCGVLKLVYPASSPCIVESKSLKLYLNSLNMTRLGEDIPSGIETYLQTIKSDLEQILQTRVETTFFQRAPEKLYFDFQNYTLLEATPGIERETFTEYTETPTLLLENQTIGSGEIKVCSHLLRSNCKITKQPDWGSIYIHMQADHLPDQFSLLKYIVSLRNENHFHEEICEMTYKRLNDLFHPEILAVSCIYTRRGGIDICPSRANKAEYLPKYLHTSETLTQKLVRQ

SEQ ID NO: 44873 - protein, 291 aa, Butyricimonas sp.
  misc_feature (1)..(291): tr|A0A3D2E1M7|A0A3D2E1M7_9BACT NADPH-dependent 7-cyano- 7-deazaguanine reductase QueF OS=Butyricimonas sp. OX=1 969738 GN=DFK15_15710 PE=4 SV=1
MSIESKVLGQQVAYPTDYCPSILVPVPRNLNREIYDIHTPEELFRGFDTWHAYEAGFLTRNGLPVCGVLKLIYPANSPCIVESKSLKLYLNSLNMTRLGEDIPSGIETYLQTVKSDLEQILQTRVEATFFRQVPEKTYFDFQDYTLLETTPGIERETFTEYSENPALLESRTTGRGEIKVGSHLLRSNCKITKQPDWGSIYIHMQADRLPDHASLLKYIVSLRNENHFHEEICEMTYKRLWDLFHPEILAVSCIYTRRGGIDICPSRANQAEYLPEHLQAPEILTQKLLRQ

SEQ ID NO: 44874 - protein, 291 aa, Butyricimonas sp.
  misc_feature (1)..(291): tr|A0A1Y3VY36|A0A1Y3VY36_9BACT NADPH-dependent 7-cyano- 7-deazaguanine reductase QueF OS=Butyricimonas sp. An62 OX=1965649 GN=B5G13_05400 PE=4 SV=1
MSIESKVLGQQVAYPTDYCPSILVPVPRSLNREIYDIHTPEELFLGFDTWHAYEAGFLARNGLPVCGVLKLVYPANSPCIVESKSLKLYLNSLNMTRLGEDTPSGIETYLQTVKSDLKQILQTRVEATFFRQTPEKPYFDFQDYTLLEATPGIERETFTEYNENPALLESRTTGRGEIKVCSHLLRSNCKITKQPDWGSIYIHIQADCLPDHTSLLKYIVSLRNENHFHEEICEMTYKRLWDLFHPEILAVSCIYTRRGGIDICPSRANQAEYLPEHLQAPETLTRKLLRQ

SEQ ID NO: 44875 - protein, 291 aa, Butyricimonas virosa
  misc_feature (1)..(291): tr|A0A415QRR7|A0A415QRR7_9BACT NADPH-dependent 7-cyano- 7-deazaguanine reductase QueF OS=Butyricimonas virosa O X=544645 GN=DWZ68_00920 PE=4 SV=1
MSIESKVLGQQVAYPTDYCPSILVPVPRNLNREIYDIHSPEELFRGFDTWHAYEAGFLTRNGLPVCGVLKLIYPANSPCIVESKSLKLYLNSLNMTRLGEDIPSGIETYLQTVKSDLEQILQTCVEATFFRQVPEKTYFDFQDYTLLETTPGIERETFTKYSENPALLESRTTGRGEIKVGSHLLRSNCKITKQPDWGSIYIHMQADRLPDHASLLKYIVSLRNENHFHEEICEMTYKRLWDLFHPEILAVSCIYTRRGGIDICPSRANQAEYLPEHLQAPEILTQKLLRQ

SEQ ID NO: 44876 - protein, 291 aa, Butyricimonas virosa; identical to SEQ ID NO: 44873
  misc_feature (1)..(291): tr|A0A412X5W1|A0A412X5W1_9BACT NADPH-dependent 7-cyano- 7-deazaguanine reductase QueF OS=Butyricimonas virosa O X=544645 GN=DWW18_02015 PE=4 SV=1

SEQ ID NO: 44877 - protein, 165 aa, Butyrivibrio crossotus
  misc_feature (1)..(165): tr|R5LHJ3|R5LHJ3_9FIRM NADPH-dependent 7-cyano-7-deazag uanine reductase OS=Butyrivibrio crossotus CAG:259 OX=1 263062 GN=queF PE=3 SV=1
MSGRSKEETEGVTLLGNQKVKYADNYAPEVLETFINKHQDNDYFVKFNCPEFTSLCPITGQPDFATITISYVPDVRMVESKSLKLYLFSFRNHGDFHEDCVNIIMKDLIKLMDPKYIEVWGKFTPRGGISIDPYCNYGKPGTKWERIAGDRMANHDMYPEKIDNR

SEQ ID NO: 44878 - protein, 167 aa, Butyrivibrio crossotus
  misc_feature (1)..(167): tr|D4RWH2|D4RWH2_9FIRM NADPH-dependent 7-cyano-7-deazag uanine reductase OS=Butyrivibrio crossotus DSM 2876 OX= 511680 GN=queF PE=3 SV=1
MNMSGRSKEETEGVTLLGNQKVKYADNYAPEVLETFINKHQDNDYFVKFNCPEFTSLCPITGQPDFATITISYVPDVRMVESKSLKLYLFSFRNHGDFHEDCVNIIMKDLIKLMEPKYIEVWGKFTPRGGISIDPYCNYGKPGTKWERIAGDRMANHDMYPEKIDNR

SEQ ID NO: 44879 - protein, 163 aa, Butyrivibrio fibrisolvens
  misc_feature (1)..(163): tr|D4IW43|D4IW43_BUTFI NADPH-dependent 7-cyano-7-deazag uanine reductase OS=Butyrivibrio fibrisolvens 16/4 OX=6 57324 GN=queF PE=3 SV=1
MADRAAEGTLTLLGNKNNQYPDNYAPEMLQTFLNKHPENDYFVKFNCPEFTSLCPITGQPDFANIIISYVPGEKMVESKSLKLYLFSFRNHGDFHEDCVNIIMKDLIKLMDPKYIEVWGKFTPRGGISIDPYCNYGKPGTKWEEVAFNRMANHDMYPEKVDNR

SEQ ID NO: 44880 - protein, 165 aa, Butyrivibrio sp.
  misc_feature (1)..(165): tr|A0A350RPY5|A0A350RPY5_9FIRM NADPH-dependent 7-cyano- 7-deazaguanine reductase OS=Butyrivibrio sp. OX=28121 G N=queF PE=3 SV=1
MSGRSKEETEGVTLLGNQKVKYADNYAPEVLETFINKHQDNDYFVKFNCPEFTSLCPITGQPDFATITISYVPDVRMVESKSLKLYLFSFRNHGDFHEDCVNIIMKDLIKLMEPKYIEVWGKFTPRGGISIDPYCNYGKPGTKWERIAGDRMANHDMYPEKIDNR

SEQ ID NO: 44881 - protein, 160 aa, Butyrivibrio sp.
  misc_feature (1)..(160): tr|R6RBN5|R6RBN5_9FIRM NADPH-dependent 7-cyano-7-deazag uanine reductase OS=Butyrivibrio sp. CAG:318 OX=1262761 GN=queF PE=3 SV=1
MREKENLTKLGSQGTEYKTEYDRELLETFGNKHPDNDYFVKFNCPEFTSLCPITGQPDFATITISYVPDERLVESKSLKLYLFSFRNHGDFHEDVVNVIMKDLIYKMDPKYIEVHGKFLPRGGISIDPYCNYGKAGTRWEKVAWERLSMHDLNPEKVDNR

SEQ ID NO: 44882 - protein, 118 aa, Bythopirellula goksoyri
  misc_feature (1)..(118): tr|A0A5B9QC36|A0A5B9QC36_9PLAN NADPH-dependent 7-cyano- 7-deazaguanine reductase OS=Bythopirellula goksoyri OX= 1400387 GN=queF PE=3 SV=1
MSDFRTKLETFENQFPERDYRIEIVCPEFTSVCPKTGQPDFATITFTYIPHKLCVELKSLKLYLQSYRNEGIFYENITNVILDDMTAVLSPRWLKIVAAFTARGGITETVTAEFASAM

SEQ ID NO: 44883 - protein, 274 aa, Caballeronia arationis
  misc_feature (1)..(274): tr|A0A158DVX7|A0A158DVX7_9BURK NADPH-dependent 7-cyano- 7-deazaguanine reductase OS=Caballeronia arationis OX=1 777142 GN=queF PE=3 SV=1
MTPEQSPLGKAVVYTEQYDPTLLFPIERKSARDAIGIGARLPFFGTDIWNAYELSWLNRRGKPQIAVATFFVPADSPKIVESKSFKLYLGSFAQTAFDSIDDVKAAIKRDVSTVCGATVSVQLAAPGDFGKLAMEEFDGLSLDRLDLDTDVYSPDPSLLKAVHGEAPVDETLFSNLLKSNCPVTGQPDWGSVQVRYYGGQIDHAGLLRYIVSFREHTGFHEQCVERIFMDIMRECRPERLAVYARYTRRGGLDINPFRTNFNLPMPDNARLARQ

SEQ ID NO: 44884 - protein, 274 aa, Caballeronia arvi
  misc_feature (1)..(274): tr|A0A158IP39|A0A158IP39_9BURK NADPH-dependent 7-cyano- 7-deazaguanine reductase OS=Caballeronia arvi OX=177713 5 GN=queF PE=3 SV=1
MTPDQSPLGKPVHYTEQYDASLLFPIDRKRARDSIGVPARLPFFGTDIWNAYELSWLNRRGKPQIAVATFFVPADSPNIVESKSFKLYLGSFAQTQFDSIDDVRAAIKRDVSAICGATVSVQLAAPADFGKLAMEEFDGLSLDRLDLDCEVFSPDPSLLKAVHDEGSVDETLFSNLLKSNCPVTGQPDWGSVQIRYYGGQIDHASLLRYIVSFREHTGFHEQCVERIFMDIMRECKPERLAVYARYTRRGGLDINPFRTNFNLPMPDNARLARQ

SEQ ID NO: 44885 - protein, 274 aa, Caballeronia calidae
  misc_feature (1)..(274): tr|A0A158C7M0|A0A158C7M0_9BURK NADPH-dependent 7-cyano- 7-deazaguanine reductase OS=Caballeronia calidae OX=177 7139 GN=queF PE=3 SV=1
MTPDQSPLGKPVHYTEQYDASLLFPIDRKRARDAIAVPARLPFFGTDIWNAYELSWLNRRGKPQIAVATFFVPADSPNIVESKSFKLYLGSFAQTQFDSIDDVRAAIKRDVSAVCGATVSVQLAAPADFQKLQMEEFDGLSLDRLDLDCEVFSPDPSLLKATHDEAPVDETLFSNLLKSNCPVTGQPDWGSVQIRYYGGQIDHAGLLRYIVSFREHTGFHEQCVERIFMDIMRECKPERLAVYARYTRRGGLDINPFRTNFNLPMPDNARLARQ

SEQ ID NO: 44886 - protein, 274 aa, Caballeronia catudaia
  misc_feature (1)..(274): tr|A0A158CNU6|A0A158CNU6_9BURK NADPH-dependent 7-cyano- 7-deazaguanine reductase OS=Caballeronia catudaia OX=17 77136 GN=queF PE=3 SV=1
MTPDQSPLGKPVHYTEQYDASLLFPIDRKRARDSIGVPARLPFFGTDIWNAYELSWLNRRGKPQIAVATFFVPADSPNIVESKSFKLYLGSFAQTQFDSIDDVRAAIKRDVSAICGATVSVQLAAPADFGKLAMEEFDGLSLDRLDLDCEVFSPDPSLLKAVHDEGSVDETLFSNLLKSNCPVTGQPDWGSVQIRYYGGQIDHASLLRYIVSFRGHTGFHEQCVERIFMDIMRECKPERLAVYARYTRRGGLDINPFRTNFNLPMPDNARLARQ

SEQ ID NO: 44887 - protein, 274 aa, Caballeronia choica
  misc_feature (1)..(274): tr|A0A158FYS6|A0A158FYS6_9BURK NADPH-dependent 7-cyano- 7-deazaguanine reductase OS=Caballeronia choica OX=3264 76 GN=queF PE=3 SV=1
MTPDQSPLGKAVVYTEQYDPMLLFPIERKSARDAIGIGARLPFFGTDIWNAYELSWLNRRGKPQIAVATFFVPAESPNIVESKSFKLYLGSFAQTAFDSIDDVRAAIKRDVSAICGVNVSVQLAGPADFGKLAMEEFDGLSLDRLDLDTDVYSPDPSLLKAVHDEAPVDETLFSNLLKSNCPVTGQPDWGSVQIRYYGGQIDHAGLLRYIVSYREHTGFHEQCVERIFMDIMRECRPERLAVYARYTRRGGLDINPFRTNFNLPMPDNARLARQ

SEQ ID NO: 44888 - protein, 274 aa, Caballeronia cordobensis
  misc_feature (1)..(274): tr|A0A158EUT1|A0A158EUT1_9BURK NADPH-dependent 7-cyano- 7-deazaguanine reductase OS=Caballeronia cordobensis OX =1353886 GN=queF PE=3 SV=1
MTPDQSPLGKPVHYTEQYDASLLFPIDRKRARDAIGVPARLPFFGTDIWNAYELSWLNARGKPQIAVATFFVPADSPNIVESKSFKLYLGSFAQTQFNSIDDVRAAIKRDVSAICGATVSVQLSAPGDFGKLVMEEFDGLSLDRLDLDCEVFSPDPSLLKAAHDEVPVDETLFSNLLKSNCPVTGQPDWGSVQIRYYGGQIDHASLLRYIVSYRGHTGFHEQCVERIFMDVMRECRPERLAVYARYTRRGGLDINPFRTNFNLPMPDNARLARQ

SEQ ID NO: 44889 - protein, 274 aa, Caballeronia fortuita
  misc_feature (1)..(274): tr|A0A157ZDT1|A0A157ZDT1_9BURK NADPH-dependent 7-cyano- 7-deazaguanine reductase OS=Caballeronia fortuita OX=17 77138 GN=queF PE=3 SV=1
MTPDQSPLGKPVHYTEQYDASLLFPIDRKRARDAIAVPARLPFFGTDIWNAYELSWLNKRGKPQIAVATFFVPADSPNIVESKSFKLYLGSFAQTQFDSIDDVRAAIKRDVSAVCGATVSVQLAAPADFGKLTMEEFDGLSLDRLDLDCEVFSPDPSLLKAAHDEAPVDETLFSNLLKSNCPVTGQPDWGSVQIRYYGGQIDHAGLLRYIVSYREHTGFHEQCVERIFMDIMRECKPERLAVYARYTRRGGLDINPFRTNFNLPMPDNARLARQ

SEQ ID NO: 44890 - protein, 274 aa, Caballeronia glathei
  misc_feature (1)..(274): tr|A0A069PVH9|A0A069PVH9_9BURK NADPH-dependent 7-cyano- 7-deazaguanine reductase OS=Caballeronia glathei OX=605 47 GN=queF PE=3 SV=1
MTPEHSPLGKPVHYTEQYDPALLFPIERKTARDAIGIGARLPFFGTDIWNAYELSWLNRRGKPQIAVATFFVPADSPNIVESKSFKLYLGSFAQTAFDSFDDVRAAIKRDVSAACGMNVSVQLAAPGDFGKLVMEEFEGLSLDRLDLDTDVYSPDPSLLKAVHDEAPVDETLVSNLLKSNCPVTGQPDWGSVQIRYFGGQIDHAGLLRYIVSYREHTGFHEQCVERIFMDILRECRPERLAVYARYTRRGGLDINPFRTNFNLPMPDNARLARQ

SEQ ID NO: 44891 - protein, 274 aa, Caballeronia glebae
  misc_feature (1)..(274): tr|A0A157Z9K8|A0A157Z9K8_9BURK NADPH-dependent 7-cyano- 7-deazaguanine reductase OS=Caballeronia glebae OX=1777 143 GN=queF PE=3 SV=1
MTPDQSPLGKPVHYTEQYDASLLFPIDRKRARDAIAVPERLPFFGTDIWNAYELSWLNKRGKPQIAVATFFVPADSPNIVESKSFKLYLGSFAQTQFDSIDDVRAAIKRDVSAVCGATVSVQLAAPADFGKLAMEEFDGLSLDRLDLDCDVFSPDPSLLKATHDEAPVDETLFSNLLKSNCPVTGQPDWGSVQIRYYGGQIDHAGLLRYIVSFREHTGFHEQCVERMFMDIMRECKPERLAVYARYTRRGGLDINPFRTNFNLPMPDNARLARQ

SEQ ID NO: 44892 - protein, 274 aa, Caballeronia grimmiae
  misc_feature (1)..(274): tr|A0A069P6B3|A0A069P6B3_9BURK NADPH-dependent 7-cyano- 7-deazaguanine reductase OS=Caballeronia grimmiae OX=10 71679 GN=queF PE=3 SV=1
MTPDQSPLGKAVNYTEQYDSSLLFPIDRKRARDAIGVPARLPFFGTDIWNAYELSWLNRNGKPQIAVATFFVPAESPNIVESKSFKLYLGSFAQTRFDSIDEVRAAIKRDVSAICGATVSVLLTPPPDFGKLSMEEFDGLSLDRLDLDCEVYSPDASLLKASHDEAPVDETLFSNLLKSNCPVTGQPDWGSVQIRYYGGQIDHAGLLRYIVSYREHTGFHEQCVERIFMDIMRECKPERLAVYARYTRRGGLDINPFRTNFNLPMPDNARLARQ

SEQ ID NO: 44893 - protein, 274 aa, Caballeronia humi
  misc_feature (1)..(274): tr|A0A158F159|A0A158F159_9BURK NADPH-dependent 7-cyano- 7-deazaguanine reductase OS=Caballeronia humi OX=326474 GN=queF PE=3 SV=1
MTPDQSPLGKEVVYTEQYDPLLLFPIDRKTARDAIGIGARLPFFGTDIWNAYELSWLNRRGKPQIAVATFFVPAESPNIVESKSFKLYLGSFAQTAFDSIDDVRAAIKRDVSAICGVNVSVQLAAPGDFGKLQMEEFDGLSLDRLDLDTDVYSPDPSLLKATHDEAPVDETLFSNLLKSNCPVTGQPDWGSVQIRYYGGQIDHAGLLRYVISYRGHTGFHEQCVERIFMDIMRECQPERLAVYARYTRRGGLDINPFRTNFNLPMPDNARLARQ

SEQ ID NO: 44894 - protein, 274 aa, Caballeronia hypogeia
  misc_feature (1)..(274): tr|A0A157Z464|A0A157Z464_9BURK NADPH-dependent 7-cyano- 7-deazaguanine reductase OS=Caballeronia hypogeia OX=17 77140 GN=queF PE=3 SV=1
MTPDQSPLGKPVHYTEQYDASLLFPIDRKRARDAIAVPARLPFFGTDIWNAYELSWLNRRGKPQIAVATFFVPADSPNIVESKSFKLYLGSFAQTQFDSIDNVRAAIKRDVSAVCGATVSVQLAAPADFAKLQMEEFEGLSLDRLDLDCDVFSPDPSLLKAAHDEAPTEETLFSNLLKSNCPVTGQPDWGSVQIRYYGGQIDHAGLLRYIVSFREHTGFHEQCVERIFMDIMRECKPERLAVYARYTRRGGLDINPFRTNFNLPMPDNARLARQ

SEQ ID NO: 44895 - protein, 274 aa, Caballeronia jiangsuensis
  misc_feature (1)..(274): tr|A0A038H6D9|A0A038H6D9_9BURK NADPH-dependent 7-cyano- 7-deazaguanine reductase OS=Caballeronia jiangsuensis O X=1458357 GN=queF PE=3 SV=1
MTPDQSPLGKPVHYTEQYDASLLFPIDRKRARDSIGVPERLPFFGTDIWNAYELSWLNRRGKPQIAVATFFVPADSPNIVESKSFKLYLGSFAQTPFDSIDDVRAAIKRDVSAICGATVSVQLAAPGDFGKLAMEEFEGLSLDRLDLDCDVFSPDPSLLKATHDEAPTDETLFSNLLKSNCPVTGQPDWGSVQIRYYGGQIDHAGLLRYIVSYRGHTGFHEQCVERIFMDIMRECKPERLAVYARYTRRGGLDINPFRTNFNLPMPDNARLARQ

SEQ ID NO: 44896 - protein, 274 aa, Caballeronia megalochromosomata
  misc_feature (1)..(274): tr|A0A149Q0D9|A0A149Q0D9_9BURK NADPH-dependent 7-cyano- 7-deazaguanine reductase OS=Caballeronia megalochromoso mata OX=1399969 GN=queF PE=3 SV=1
MTPDQSPLGKPVHHTEQYDASLLFPIDRKRARDAIAVPARLPFFGTDIWNAYELSWLNRRGKPQIAVATFFVPADSPNIVESKSFKLYLGSFAQTPFDSIDDVRAAIKRDVSAVCGATVSVQLAAPADFGKLTMEEFEGLSLDRLDLDCEVFSPDPSLLKAAHDEVPVDETLFSNLLKSNCPVTGQPDWGSVQIRYYGGQIDHAGLLRYIVSYRGHTGFHEQCVERIFMDIMRECKPERLAVYARYTRRGGLDINPFRTNFNLPMPDNARLARQ

SEQ ID NO: 44897 - protein, 276 aa, Caballeronia mineralivorans
  misc_feature (1)..(276): tr|A0A0J1FSK8|A0A0J1FSK8_9BURK NADPH-dependent 7-cyano- 7-deazaguanine reductase OS=Caballeronia mineralivorans PML1(12) OX=908627 GN=queF PE=3 SV=1
MNTPEQSSLGKPVQYTERYDPALLFSIDRAAGREAIGVTAQLPFFGTDIWNAYELSWLNRKGKPQIAVATFIVPAESPNIVESKSFKLYLGSFSQTAFDSIDEVRAALRKDVSAVCGANVSVQLVAPYEFALKLKMEEFEGLSLDRLDLDAEVYSPDPSLLRASFGESPVDETVFSNLLKSNCPVTGQPDWGSVQIRYVGAPIDHAGLLRYIISYREHTGFHEQCVERIFMDVMRECKPERLAVYARYTRRGGLDINPFRTNFNLPLPDNARLARQ

SEQ ID NO: 44898 - protein, 274 aa, Caballeronia pedi
  misc_feature (1)..(274): tr|A0A157Z3H5|A0A157Z3H5_9BURK NADPH-dependent 7-cyano- 7-deazaguanine reductase OS=Caballeronia pedi OX=177714 1 GN=queF PE=3 SV=1
MTPDQSPLGKPVHYTEQYDASLLFPIDRKRARDAIAVPARLPFFGTDIWNAYELSWLNRRGKPQIAVATFFVPADSPNIVESKSFKLYLGSFAQTPFDSIDDVRAAIKRDVSAVCGATVSVQLAAPADFSKLAMEEFDGLSLDRLDLDCDVFSPDPSLLKAAHDEVPVEETLFSNLLKSNCPVTGQPDWGSVQIRYYGGQIDHAGLLRYVVSYRGHTGFHEQCVERIFMDIMRECKPERLAVYARYTRRGGLDINPFRTNFNLPMPDNARLARQ

SEQ ID NO: 44899 - protein, 274 aa, Caballeronia peredens
  misc_feature (1)..(274): tr|A0A158G6H0|A0A158G6H0_9BURK NADPH-dependent 7-cyano- 7-deazaguanine reductase OS=Caballeronia peredens OX=17 77132 GN=queF PE=3 SV=1
MTPDQSPLGKPVQYTEQYDASLLFPIDRKRARDSIGVPARLPFFGTDIWNAYELSWLNARGKPQIAVATFFVPADSPNIVESKSFKLYLGSLAQTPFDSIDDVRAAIKRDVSAICGATVSVQLTPPVEFGKLVMEEFDGLSLDRLDLDCEVFSPDASLLKAAHDEVPVEETLFSNLLKSNCPVTGQPDWGSVQIRYYGGQIDHAGLLRYIVSFREHTGFHEQCVERIFMDIMRECKPERLAVYARYTRRGGLDINPFRTNFNLPMPDNARLARQ

SEQ ID NO: 44900 - protein, 274 aa, Caballeronia ptereochthonis
  misc_feature (1)..(274): tr|A0A158DS60|A0A158DS60_9BURK NADPH-dependent 7-cyano- 7-deazaguanine reductase OS=Caballeronia ptereochthonis OX=1777144 GN=queF PE=3 SV=1
MTPDQSPLGKPVHYTEQYDASLLFPIDRKRARDAIGVPGRLPFFGTDIWNAYELSWLNRRGKPQIAVATFFVPADSPNIVESKSFKLYLGSFAQTQFDSIDDVRAAIKRDVSATCGANVSVQLAAPADFGKLTMEEFDGLSLDRLDLDCEVFSPEPSLLSATHDEAPVDETLFSNLLKSNCPVTGQPDWGSVQIRYYGGQIDHAGLLRYIVSYRGHTGFHEQCVERIFMDIMRECKPERLAVYARYTRRGGLDINPFRTNFNLPMPDNARLARQ

SEQ ID NO: 44901 - protein, 276 aa, Caballeronia sordidicola
  misc_feature (1)..(276): tr|A0A4R1PQY0|A0A4R1PQY0_9BURK NADPH-dependent 7-cyano- 7-deazaguanine reductase OS=Caballeronia sordidicola OX =196367 GN=queF PE=3 SV=1
MNTPEHSPLGKPVQYSERYDPALLFPIARAAGREAIGVPAQLPFFGTDIWNAYELSWLNKKGKPQIAVATFIVPAESPNIVESKSFKLYLGSFSQTAFESIDEVRAAIRKDVSAVCGANVSVQLVAPYEFALKLKMEEFEGLSLDRLDLDTDVYSPDPSLLRASFDESPVDETLFSNLLKSNCPVTGQPDWGSVQIRYVGAPIDHAGLLRYIISYREHTGFHEQCVERIFMDVMRECKPQRLAVYARYTRRGGLDINPFRTNFNLPLPDNARLARQ

SEQ ID NO: 44902 - protein, 275 aa, Caballeronia sordidicola
  misc_feature (1)..(275): tr|A0A242M5J1|A0A242M5J1_9BURK NADPH-dependent 7-cyano- 7-deazaguanine reductase OS=Caballeronia sordidicola OX =196367 GN=queF PE=3 SV=1
MTPEQSPLGKPVQYREQYDPSLLFPIDRASGRAAIGLTARLPFFGTDIWNGYELSWLNRKGKPQIAVATFIVPADSPNIVESKSFKLYLGSFSQTAFDSIDEVRAAIRKDVSAICGANVSVQLVAPYEFGVKLKMEEFEGLSLDRLDLDADIYTPDPSLLSASHGESPVDETLFSNLLKSNCPVTGQPDWGSVQIRYVGAPIDHAGLLRYIISYREHTGFHEQCVEKIFVDVMRECKPERLAVYARYTRRGGLDINPFRTNFNLPMPDNARLARQ

SEQ ID NO: 44903 - protein, 274 aa, Caballeronia telluris
  misc_feature (1)..(274): tr|A0A158FSN4|A0A158FSN4_9BURK NADPH-dependent 7-cyano- 7-deazaguanine reductase OS=Caballeronia telluris OX=32 6475 GN=queF PE=3 SV=1
MTPDQSPLGKAVVYTEQYDPMLLFPIERKSARDAIGIGARLPFFGTDIWNAYELSWLNRRGKPQIAVATFFVPADSPNIVESKSFKLYLGSFAQTAFDSIDDVKAAIKRDVSAICGATVSVQLAAPGDFGKLAMEEFDGLSLDRLDLDTDVYSPDPSLLTAVHDEAPVDETLFSNLLKSNCPVTGQPDWGSVQIRYYGGQIDHAGLLRYIVSFREHTGFHEQCVERIFVDIMRECRPERLAVYARYTRRGGLDINPFRTNFNLPMPDNARLARQ

SEQ ID NO: 44904 - protein, 274 aa, Caballeronia temeraria
  misc_feature (1)..(274): tr|A0A157ZNE4|A0A157ZNE4_9BURK NADPH-dependent 7-cyano- 7-deazaguanine reductase OS=Caballeronia temeraria OX=1 777137 GN=queF PE=3 SV=1
MTPDQSPLGKPVHYTEQYDASLLFPIDRKRARDAIAVPERLPFFGTDIWNAYELSWLNKRGKPQIAVATFFVPADSPNIVESKSFKLYLGSFAQTQFDSVDDVRAAIKRDVSAVCGATVSVQLAAPADFGKLAMEEFDGLSLDRLDLDCDVFSPDPSLLTATHDEAPVDETLFSNLLKSNCPVTGQPDWGSVQIRYYGGQIDHAGLLRYIVSFREHTGFHEQCVERIFMDIMRECKPERLAVYARYTRRGGLDINPFRTNFNLPMPDNARLARQ

SEQ ID NO: 44905 - protein, 274 aa, Caballeronia terrestris
  misc_feature (1)..(274): tr|A0A158HIK2|A0A158HIK2_9BURK NADPH-dependent 7-cyano- 7-deazaguanine reductase OS=Caballeronia terrestris OX= 1226301 GN=queF PE=3 SV=1
MTPDQSPLGKEVVYTEQYDPLLLFPIDRKTARDAIGIGARLPFFGTDIWNAYELSWLNRRGKPQIAVATFLVPAESPNIVESKSFKLYLGSFAQTAFDSTDDVRAAIKRDVSAICGVNVSVQLAAPADFGKLQMEEFEGLSLDRLDLDTDVYSPDPSLLKATHDEAPVDETLFSNLLKSNCPVTGQPDWGSVQIRYYGGQIDHAGLLRYVISYRGHTGFHEQCVERIFMDIMRECQPERLAVYARYTRRGGLDINPFRTNFNLPMPDNARLGRQ

SEQ ID NO: 44906 - protein, 274 aa, Caballeronia turbans
  misc_feature (1)..(274): tr|A0A158GBP1|A0A158GBP1_9BURK NADPH-dependent 7-cyano- 7-deazaguanine reductase OS=Caballeronia turbans OX=177 7134 GN=queF PE=3 SV=1
MTPDQSPLGKPVHYTEQYDASLLFPIDRKRARDSIGVPARLPFFGTDIWNAYELSWLNRRGKPQVAVATFFVPADSPNIVESKSFKLYLGSFAQTQFDSIDDVRAAIKRDVSAICGATVSVQLAAPGDFGKLTMEEFDGLSLDRLDLDCEVFTPDPSLLKAAHDETPTDETLFSNLLKSNCPVTGQPDWGSVQIRYYGGQIDHAGLLRYIVSYRGHTGFHEQCVERIFMDIMRECRPERLAVYARYTRRGGLDINPFRTNFNLPMPDNARLARQ

SEQ ID NO: 44907 - protein, 276 aa, Caballeronia udeis
  misc_feature (1)..(276): tr|A0A158IH77|A0A158IH77_9BURK NADPH-dependent 7-cyano- 7-deazaguanine reductase OS=Caballeronia udeis OX=12328 66 GN=queF PE=3 SV=1
MNTPEHSPLGKPVQYSERYDPALLFPIARAAGREAIGVPAQLPFFGTDIWNAYELSWLNKKGKPQIAVATFIVPAESPNIVESKSFKLYLGSFSQTAFDSVDDVRAAIRKDVSAVCGANVSVQLVAPYEFAVKLKMEEFEGLSLDRLDLDADVYSPDPSLLRASFDESPVDETLFSNLLKSNCPVTGQPDWGSVQIRYVGTPIDHAGLLRYIISYREHTGFHEQCVERIFMDVMRECKPQRLAVYARYTRRGGLDINPFRTNFNLPLPDNARLARQ

SEQ ID NO: 44908 - protein, 276 aa, Caballeronia udeis
  misc_feature (1)..(276): tr|A0A3M0VDJ0|A0A3M0VDJ0_9BURK NADPH-dependent 7-cyano- 7-deazaguanine reductase OS=Caballeronia udeis OX=12328 66 GN=queF PE=3 SV=1
MNTPEQSSLGKPVQYTERYDPALLFPIDRAAGREAIGVTAQLPFFGTDIWNAYELSWLNRKGKPQIAVATFIVPAESPNIVESKSFKLYLGSFSQTAFDSIDEVRAALRKDVSAVCGANVSVQLVAPYEFALKLKMEEFEGLSLDRLDLDADVYSPDPSLLRASFGESPVDETLFSNLLKSNCPVTGQPDWGSVQIRYVGAPVDHAGLLRYIISYREHTGFHEQCVERIFMDVMRECKPQRLAVYARYTRRGGLDINPFRTNFNLPLPDNARLARQ

SEQ ID NO: 44909 - protein, 281 aa, Caenimonas sp.
  misc_feature (1)..(281): tr|A0A562ZKN1|A0A562ZKN1_9BURK NADPH-dependent 7-cyano- 7-deazaguanine reductase OS=Caenimonas sp. HX-9-20 OX=2 596921 GN=queF PE=3 SV=1
MNTPDQSLLGKQAHYADQYDPALLFPLARAPARHEIGLTGALPFFGADLWTAFELSWLNPRGKPQVAIAHVTVPCETPNIVESKSFKLYLGSFSNTVFATADAVRDRLRADLSEAVWRGAESPATVGVRLVLPEVFDREPVHELDGLSLDRLDIECTDYTPAPHLLTTVAGEPPVEEVLTSNLLKSNCLVTGQPDWGSIRIRYTGPQIEQGGLLRYLVSFRNHNEFHEQCVERIFMDLWRQCKPTRLAVYARYTRRGGLDINPLRTSHPMPLPPNVRTARQ

SEQ ID NO: 44910 - protein, 142 aa, Caenispirillum bisanense
  misc_feature (1)..(142): tr|A0A286GUC4|A0A286GUC4_9PROT NADPH-dependent 7-cyano- 7-deazaguanine reductase OS=Caenispirillum bisanense OX =414052 GN=queF PE=3 SV=1
MTEKLSDTSTLTQLGRDTRYEYDTANPALLERFPNPMKAAKGRSVVKVVAPEFTSLCPLTGQPDYATIVLEYTPRDWCLESKSWKVYLMSFRNIGEFHESCVTRMHADLVALLDPAWMVIEGQFTPRGGISFWPRIEYTREG

SEQ ID NO: 44911 - protein, 142 aa, Caenispirillum salinarum
  misc_feature (1)..(142): tr|K9H344|K9H344_9PROT NADPH-dependent 7-cyano-7-deazag uanine reductase OS=Caenispirillum salinarum AK4 OX=123 8182 GN=queF PE=3 SV=1
MTDRLSDASGLKSLGRETRFEYDTANADLLERFPNPMKSAKGRKVIKVVAPEFTSLCPMTGQPDYATIVLEYSPRDWCVESKSWKLYLMSFRNVGEFHEACVTRMHNDLVALLDPEWMVIEGQFTPRGGISFWPRIEYTREG

SEQ ID NO: 44912 - protein, 146 aa, Caldalkalibacillus thermarum
  misc_feature (1)..(146): tr|F5L3Y3|F5L3Y3_CALTT NADPH-dependent 7-cyano-7-deazag uanine reductase OS=Caldalkalibacillus thermarum (strai n TA2.A1) OX=986075 GN=queF PE=3 SV=1
MAKKEVNHKKYENIRFDIQDESVILDDILETIPYEYVGKRTEVTIPTSEFTSVCPWSGLPDFAELEITYIPRETLIELKSLKYYLTSFRNVGIYQEHATQRILHDLVKICDPLMMRVEAYWNARGGLGTRTVAEYIAPDAEGTEQI

SEQ ID NO: 44913 - protein, 115 aa, Caldanaerobacter subterraneus
  misc_feature (1)..(115): tr|A0A124FC76|A0A124FC76_9THEO NADPH-dependent 7-cyano- 7-deazaguanine reductase (Fragment) OS=Caldanaerobacter subterraneus OX=911092 GN=XD49_2174 PE=3 SV=1
MTDKYKERRFDIYGYEKIDKEVLEYIEYEYPEKNTIVEYITDEFSSVCPWTGLPDNAKLTIRYIPHKKLVELKSLKYYLTSYRNVGILQEHAINRILDDLVELLQPKFMEIIGEF

SEQ ID NO: 44914 - protein, 133 aa, Caldanaerobacter subterraneus
  misc_feature (1)..(133): tr|A0A0F5PLM9|A0A0F5PLM9_9THEO NADPH-dependent 7-cyano- 7-deazaguanine reductase OS=Caldanaerobacter subterrane us subsp. pacificus DSM 12653 OX=391606 GN=queF PE=3 SV =1
MTDKYKERRFDIYGYEKIDKEVLESIEYEYPEKNTIVEYITDEFSSVCPWTGLPDNAKLTIRYIPHKKLVELKSLKYYLTSYRNVGILQEHAINRILDDLVELLQPKFMEIIGEFQERGGIATRIIARYEEEE

SEQ ID NO: 44915 - protein, 131 aa, Caldanaerobius fijiensis
  misc_feature (1)..(131): tr|A0A1M5ATM2|A0A1M5ATM2_9THEO NADPH-dependent 7-cyano- 7-deazaguanine reductase OS=Caldanaerobius fijiensis DS M 17918 OX=1121256 GN=queF PE=3 SV=1
MSKYDKRWDIDGYDAIDTDILEAIPFEYPDSHTEVKYIEPEFTSVCPWTGLPDFGTITIKYIPSDKLVELKSLKYYLNSFRNVGILQEHVVNRILNDLKNLLDPIEMTVTAEFNARGGISTVATVNYKKEI

SEQ ID NO: 44916 - protein, 133 aa, Caldanaerovirga acetigignens
  misc_feature (1)..(133): tr|A0A1M7M7L1|A0A1M7M7L1_9FIRM NADPH-dependent 7-cyano- 7-deazaguanine reductase OS=Caldanaerovirga acetigignen s OX=447595 GN=queF PE=3 SV=1
MDKYGKRRFDIYGYEKIDTEVLEAIKYEYPGRDTVIEYITEEFSSVCPWTGLPDNARLTIRYIPNEKLVELKSLKYYLTSYRNIGILQEHAVNRILDDLVKLLEPKYMEVIGEFLARGGISTRVVAKYGTIPK

SEQ ID NO: 44917 - protein, 131 aa, Caldicellulosiruptor bescii
  misc_feature (1)..(131): sp|B9MPS5|QUEF_CALBD NADPH-dependent 7-cyano-7-deazagua nine reductase OS=Caldicellulosiruptor bescii (strain A TCC BAA-1888 / DSM 6725 / Z-1320) OX=521460 GN=queF PE= 3 SV=1
MSDKYQQRRFDIYGYEKIDTEVLEAIPYEYPEKNTVVEYITEEFSSVCPWTGLPDTAKLTIRYIPHQKLVELKSLKYYLTSYRNVGILQEHAVNRILDDLVKLLEPKFMEVIGEFHERGGISTKVVARYEK

SEQ ID NO: 44918 - protein, 136 aa, Caldicellulosiruptor changbaiensis
  misc_feature (1)..(136): tr|A0A3T0D8X0|A0A3T0D8X0_9FIRM NADPH-dependent 7-cyano- 7-deazaguanine reductase OS=Caldicellulosiruptor changb aiensis OX=1222016 GN=queF PE=3 SV=1
MQSPNLNDKYQQRRFDIYGYEKIDTEVLEAIDYEYPEKNTVVEYITDEFSSVCPWTGLPDTARLTIRYIPNKKLVELKSLKYYLTSFRNVGILQEHTVNRILDDLVKLLEPKFMEVIGEFHERGGISTRVVARYEK

SEQ ID NO: 44919 - protein, 131 aa, Caldicellulosiruptor hydrothermalis
  misc_feature (1)..(131): tr|E4Q9W3|E4Q9W3_CALH1 NADPH-dependent 7-cyano-7-deazag uanine reductase OS=Caldicellulosiruptor hydrothermalis (strain DSM 18901 / VKM B-2411 / 108) OX=632292 GN=que F PE=3 SV=1
MADKYQQRRFDIYGYEKIDTEVLEAIPYEYPEKSTVVEYVTEEFSSVCPWTGLPDTAKLTIRYIPHQKLVELKSLKYYLTSYRNVGILQEHAVNRILDDLVKLLEPKFMEVIGEFHERGGISTKVVARYEK

SEQ ID NO: 44920 - protein, 131 aa, Caldicellulosiruptor kristjanssonii
  misc_feature (1)..(131): tr|E4S8G3|E4S8G3_CALKI NADPH-dependent 7-cyano-7-deazag uanine reductase OS=Caldicellulosiruptor kristjanssonii (strain ATCC 700853 / DSM 12137 / I77R1B) OX=632335 GN =queF PE=3 SV=1
MADKYQQRRFDIYGYEKIDTEVLEAIPYEYPEKSTVVEYVTEEFSSVCPWTGLPDTAKLTIRYIPYQKLVELKSLKYYLTSYRNVGILQEHAVNRILDDLVKLLDPKFMEVIGEFHERGGISTKVVARYEK

SEQ ID NO: 44921 - protein, 131 aa, Caldicellulosiruptor kronotskyensis; identical to SEQ ID NO: 44917
  misc_feature (1)..(131): tr|E4SHQ9|E4SHQ9_CALK2 NADPH-dependent 7-cyano-7-deazag uanine reductase OS=Caldicellulosiruptor kronotskyensis (strain DSM 18902 / VKM B-2412 / 2002) OX=632348 GN=qu eF PE=3 SV=1

SEQ ID NO: 44922 - protein, 131 aa, Caldicellulosiruptor lactoaceticus
  misc_feature (1)..(131): tr|G2PY38|G2PY38_9FIRM NADPH-dependent 7-cyano-7-deazag uanine reductase OS=Caldicellulosiruptor lactoaceticus 6A OX=632516 GN=queF PE=3 SV=1
MADKYQQRRFDIYGYEKIDTEVLEAIPYEYPEKSTVVEYVTEEFSSVCPWTGLPDTAKLTIRYIPYQKLVELKSLKYYLTSYRNVGILQEHAVNRILNDLVKLLEPKFMEVIGEFHERGGISTRIVARYEK

SEQ ID NO: 44923 - protein, 131 aa, Caldicellulosiruptor obsidiansis; identical to SEQ ID NO: 44917
  misc_feature (1)..(131): tr|D9TH86|D9TH86_CALOO NADPH-dependent 7-cyano-7-deazag uanine reductase OS=Caldicellulosiruptor obsidiansis (s train ATCC BAA-2073 / strain OB47) OX=608506 GN=queF PE =3 SV=1

SEQ ID NO: 44924 - protein, 131 aa, Caldicellulosiruptor owensensis; identical to SEQ ID NO: 44917
  misc_feature (1)..(131): tr|E4Q724|E4Q724_CALOW NADPH-dependent 7-cyano-7-deazag uanine reductase OS=Caldicellulosiruptor owensensis (st rain ATCC 700167 / DSM 13100 / OL) OX=632518 GN=queF PE =3 SV=1

SEQ ID NO: 44925 - protein, 136 aa, Caldicellulosiruptor saccharolyticus
  misc_feature (1)..(136): tr|A4XGU8|A4XGU8_CALS8 NADPH-dependent 7-cyano-7-deazag uanine reductase OS=Caldicellulosiruptor saccharolyticu s (strain ATCC 43494 / DSM 8903 / Tp8T 6331) OX=351627 GN=queF PE=3 SV=1
MQSPNLNDKYQQRRFDIYGYEKIDTDVLEAIDYEYPEKNTVVEYITDEFSSVCPWTGLPDTARLTIRYIPNKKLVELKSLKYYLTSFRNVGILQEHAVNRILDDLVKLLEPKFMEVIGEFHERGGISTRVVARYEK

SEQ ID NO: 44926 - protein, 134 aa, Caldicoprobacter faecalis
  misc_feature (1)..(134): tr|A0A1I5XJU4|A0A1I5XJU4_9FIRM NADPH-dependent 7-cyano- 7-deazaguanine reductase OS=Caldicoprobacter faecalis O X=937334 GN=queF PE=3 SV=1
MDKYSNKRFDVYGYDRIDTEVLEAMDYEYPGRDTLVEYYTEEFSSVCPWTGLPDNAKLTIKYIPSNKLVELKSLKYYLTSYRNVGILQEHAVNRILDDLVNLIKPRYMEVIGEFVARGGISTRVTAKYDGKERP

SEQ ID NO: 44927 - protein, 136 aa, Caldilineae bacterium
  misc_feature (1)..(136): tr|A0A3M1EVU0|A0A3M1EVU0_9CHLR NADPH-dependent 7-cyano- 7-deazaguanine reductase OS=Caldilineae bacterium OX=24 20332 GN=queF PE=3 SV=1
MTEKSDLKDLTLLGREVTQPQRKLETFPNRHPGRPYTVRLETDEFTCVCPMTGQPDFARLVIEYIPDQRIVESKSVKLYLWSFRNEGHFHEHVTNTILDDFVAALDPLYCKVTGYFNIRGGIKITVEAEHRKETPA

SEQ ID NO: 44928 - protein, 124 aa, Caldimicrobium thiodismutans
  misc_feature (1)..(124): tr|A0A0U5ARK9|A0A0U5ARK9_9BACT NADPH-dependent 7-cyano- 7-deazaguanine reductase OS=Caldimicrobium thiodismutan s OX=1653476 GN=queF PE=3 SV=1
MVKKYGEIAIAEAQLEAWENPYPDRDYLIEITFPEFTCLCPRSGYPDFAIIKISYLPDQKIVELRSLKLWLNKFRDRYLSHEAVTNEIFDALWNLLQPRRLKVVADFHPRGNVHTVITVEKERA

SEQ ID NO: 44929 - protein, 129 aa, Caldimicrobium thiodismutans
  misc_feature (1)..(129): tr|A0A2N7PIC6|A0A2N7PIC6_9BACT NADPH-dependent 7-cyano- 7-deazaguanine reductase OS=Caldimicrobium thiodismutan s OX=1653476 GN=queF PE=3 SV=1
MSKDVVQKKYGEKAIEEAELEAWENPYPDRDYLIEITFPEFTCLCPRSGYPDFAVIKISYIPDKYIVELRSLKLWLNKFRNRYISHEAATNEIFDALWNLLKPRRLKVVGDFHPRGNVHTVITVERENQ

SEQ ID NO: 44930 - protein, 120 aa, Caldithrix abyssi
  misc_feature (1)..(120): tr|H1XNE9|H1XNE9_9BACT NADPH-dependent 7-cyano-7-deazag uanine reductase OS=Caldithrix abyssi DSM 13497 OX=8800 73 GN=queF PE=3 SV=1
MAQIEVFENKYPDRDYYITHVNEEFTSVCPKTGLPDFGTITINYIPDKLCLELKSLKYYFLDFRNKGIFYESVINQILDELVEACKPRFMEVRGDFTTRGGMHTTVVAVYDPQKRGGFQK

SEQ ID NO: 44931 - protein, 115 aa, Caldithrix sp.
  misc_feature (1)..(115): tr|A0A523HNT3|A0A523HNT3_9BACT NADPH-dependent 7-cyano- 7-deazaguanine reductase OS=Caldithrix sp. OX=1962856 G N=queF PE=3 SV=1
MERLETFDNKYPNRDYTVTIVNDEYTSVCPMTGLPDFGTITINYVPDKKCLELKALKYYFLEYRNEGIFYEAVINKILDDLVEVCDPKSMEVIGEFTVRGGLRSVVKASHKKDTK

SEQ ID NO: 44932 - protein, 115 aa, Caldithrix sp.
  misc_feature (1)..(115): tr|A0A523IBI4|A0A523IBI4_9BACT NADPH-dependent 7-cyano- 7-deazaguanine reductase OS=Caldithrix sp. OX=1962856 G N=queF PE=3 SV=1
MERLETFDNKYPNRDYTVTIVNDEYTSVCPMTGLPDFGTITINYVPDKKCLELKALKYYFMEYRNEGIFYEAVINKILDDLVEVCDPKSMEVIGEFTVRGGLRSVVKASHKKDTK

SEQ ID NO: 44933 - protein, 118 aa, Calditrichaeota bacterium
  misc_feature (1)..(118): tr|A0A3M2FQY4|A0A3M2FQY4_9BACT NADPH-dependent 7-cyano- 7-deazaguanine reductase OS=Calditrichaeota bacterium O X=2212469 GN=queF PE=3 SV=1
MAQIDVFENAYPERIYNIVHVNEEFTSVCPKTGLPDFGTITIDYIPGKLCLELKSLKYYFLEYRNKGVFYEKLVNDILDDLVKACQPRSMTVIGEFTTRGGMHSTVTAVYKPEDKRED

SEQ ID NO: 44934 - protein, 144 aa, Calditrichaeota bacterium
  misc_feature (1)..(144): tr|A0A3M1X866|A0A3M1X866_9BACT NADPH-dependent 7-cyano- 7-deazaguanine reductase OS=Calditrichaeota bacterium O X=2212469 GN=queF PE=3 SV=1
MRNKGEELKDLTLLGSGPRARPSRKLEAFPNRHPGRYYRVVLETDEFTCLCPKTGQPDFAHITIEYVPDQKIVESKSLKLYFWSYRDEGVFHEHVVNRILDDLVAVLDPHWCRVTGKFNVRGGIAITVVAEHTRTPEARQAVLG

SEQ ID NO: 44935 - protein, 118 aa, Calditrichales bacterium
  misc_feature (1)..(118): tr|A0A524L5P3|A0A524L5P3_9BACT NADPH-dependent 7-cyano- 7-deazaguanine reductase OS=Calditrichales bacterium OX =2528038 GN=queF PE=3 SV=1
MANVDVFENKYPDRDYQITHVNNEYTSMCPKTGLPDFGKITINYIPDKLCLELKSLKYYYLEFRNKGIFYEAVINQILDELVAVCEPRYMEVVGEFTARGGLNSTIRAVYDPKGRGQF

SEQ ID NO: 44936 - protein, 128 aa, Calothrix brevissima
  misc_feature (1)..(128): tr|A0A1Z4K813|A0A1Z4K813_9CYAN NADPH-dependent 7-cyano- 7-deazaguanine reductase OS=Calothrix brevissima NIES-2 2 OX=1973478 GN=queF PE=3 SV=1
MTTDTKEIKYGEREIAEGKLITFPNPRVGRRYEVSITLPEFTCKCPFSGYPDFATIYITYVPDERVVELKALKLYINSYRDRYISHEESANQILDDFVAACDPLEATVKADFTPRGNVHTVVEVRHQK

SEQ ID NO: 44937 - protein, 141 aa, Calothrix desertica
  misc_feature (1)..(141): tr|A0A3S1J536|A0A3S1J536_9CYAN NADPH-dependent 7-cyano- 7-deazaguanine reductase OS=Calothrix desertica PCC 710 2 OX=232991 GN=queF PE=3 SV=1
MSNLSPEITTQSIEEAPTQSVKYGEREIAEGQLITFPNPRVGRRYNINITLPEFTCKCPFSGYPDFATIYISYIPDAKVVELKALKLYINSYRDRYISHEESANLILDDFVAACDPLEVTVKADFTPRGNVHTVVEVKHTK

SEQ ID NO: 44938 - protein, 136 aa, Calothrix elsteri
  misc_feature (1)..(136): tr|A0A2A2THP1|A0A2A2THP1_9CYAN NADPH-dependent 7-cyano- 7-deazaguanine reductase OS=Calothrix elsteri CCALA 953 OX=987040 GN=queF PE=3 SV=1
MSNFSPQINTEAVPEMKYGEREIQEGQLITFPNPRIGRRYSVDITLPEFTCKCPFSGYPDFATVYISYIPNEKVVELKALKLYINNYRDRYISHEESANQILDDFVAACDPLEVTVKTDFTPRGNVHTVVEVKHVK

SEQ ID NO: 44939 - protein, 128 aa, Calothrix parasitica
  misc_feature (1)..(128): tr|A0A1Z4LPL3|A0A1Z4LPL3_9CYAN NADPH-dependent 7-cyano- 7-deazaguanine reductase OS=Calothrix parasitica NIES-2 67 OX=1973488 GN=queF PE=3 SV=1
MTDTSIEVKYGEREIDEGKLITFPNPRVGRRYNISITLPEFTCKCPFSGYPDFATIYVNYVPDEKVVELKAIKLYINSYREKYISHEESANQILDDIVEACDPLEITVKADFTPRGNVHTVVEVSHQK

SEQ ID NO: 44940 - protein, 141 aa, Calothrix sp.
  misc_feature (1)..(141): tr|A0A1Q4RFQ9|A0A1Q4RFQ9_9CYAN NADPH-dependent 7-cyano- 7-deazaguanine reductase OS=Calothrix sp. HK-06 OX=1137 096 GN=queF PE=3 SV=1
MSNSLSEMTTQPSLEAPTQEVKYGEREIAEGQLITFPNPRVGRRYNINITLPEFTCKCPFSGYPDFATIYISYIPDAKVVELKALKLYINSYRDRYISHEESANLILDDFVAACDPLEVTVKADFTPRGNVHTVVEVKHVK

SEQ ID NO: 44941 - protein, 141 aa, Calothrix sp.
  misc_feature (1)..(141): tr|A0A1Z4R4G8|A0A1Z4R4G8_9CYAN NADPH-dependent 7-cyano- 7-deazaguanine reductase OS=Calothrix sp. NIES-4101 OX= 2005461 GN=queF PE=3 SV=1
MSSSSSEITTPAIQEIPVPEMKYGEREIQEGKLITFPNPRIGRRYNIDITLPEFTCKCPFSGYPDFATIYISYIPNEKVVELKALKLYINSYRDRYISHEESANQILDDFVAACDPLEATVKTDFTPRGNVHTVVEVKHIK

SEQ ID NO: 44942 - protein, 155 aa, Camelimonas lactis
  misc_feature (1)..(155): tr|A0A4R2GWG7|A0A4R2GWG7_9RHIZ NADPH-dependent 7-cyano- 7-deazaguanine reductase OS=Camelimonas lactis OX=65900 6 GN=queF PE=3 SV=1
MSNADLTQHLSHLGQQSAAPADPATAVLDRVPNPHPDTDYVARFTAPEFTSICPVTGQPDFAILVIDYVPDQWLVESKSLKLYLHAFRNHGAFHEDCTVAIGKRLAGLLAPRFLRIGGYWFPRGGIPIDVFWQTGELPKNVWLPDTGVQPYRARF

SEQ ID NO: 44943 - protein, 132 aa, Caminibacter mediatlanticus
  misc_feature (1)..(132): tr|A0A4P9DQF8|A0A4P9DQF8_9PROT NADPH-dependent 7-cyano- 7-deazaguanine reductase OS=Caminibacter mediatlanticus TB-2 OX=391592 GN=queF PE=3 SV=1
MNELKYGEKEIVEFNPEKDLEIWPNKNKKNYVIKITLPEFMCKCPRSGYPDFATIYLEYIPNEWVVELKALKLYINSFMNRYISHEDSANEIFDTLYNKLKPKKMKLTMDFNPRGNVHTVIEIDSEKIENES

SEQ ID NO: 44944 - protein, 128 aa, Campylobacter avium
  misc_feature (1)..(128): tr|A0A222N0D5|A0A222N0D5_9PROT NADPH-dependent 7-cyano- 7-deazaguanine reductase OS=Campylobacter avium LMG 245 91 OX=522484 GN=queF PE=3 SV=1
MRYGEKEIKEFDVDKDLELWENKAENDYLVKITLPEFACLCPRSGYPDFATLKLEYIPDKFIVELKAIKIYINSFMYKHISHEASVNEIYSTLKNKLKPKYIKLVAEFNPRGNVYTSIECRSDLVVPK

SEQ ID NO: 44945 - protein, 127 aa, Campylobacter coli
  misc_feature (1)..(127): tr|W8KDB8|W8KDB8_CAMCO NADPH-dependent 7-cyano-7-deazag uanine reductase OS=Campylobacter coli RM4661 OX=118337 9 GN=queF PE=3 SV=1
MRYGEKEIKEFDVENMEIWPNDAKNDYIIKITLPEFMCCCPRSGYPDFATIYLEYIPDQFVVELKAIKLYINTFMHRNVSHEASINEIYNTLKDKLKPKWIKVVGDFNPRGNVHTVIECRSDMVVPK

SEQ ID NO: 44946 - protein, 127 aa, Campylobacter coli
  misc_feature (1)..(127): tr|A0A400IRD7|A0A400IRD7_CAMCO NADPH-dependent 7-cyano- 7-deazaguanine reductase OS=Campylobacter coli OX=195 G N=queF PE=3 SV=1
MRYGEKEIKEFDVENMEIWPNDAKNDYIIKITLPEFMCCCPRSGYPDFATIYLEYIPDQFVVELKAIKLYINTFMHRNISHEASINEIYNTLKDKLKPKWIKVVGDFNPRGNVHTVIECRSDMVVPK

SEQ ID NO: 44947 - protein, 205 aa, Campylobacter concisus
  misc_feature (1)..(205): tr|U2GC89|U2GC89_9PROT NADPH-dependent 7-cyano-7-deazag uanine reductase OS=Campylobacter concisus UNSW3 OX=124 2966 GN=queF PE=3 SV=1
MSEEMKYGEKILKEFDVESDLEVWENKQTRDYVIKITLPEFCCLCPRSGYPDFATIYLEYIPNKLVVELKAIKLYINSFMNRNISHEDSINEIYSVLEKKLEPKFMKIVGDFNPRGNVHTVIEISSDLVVKKPAEEKEYAPRSRERSFSDKPRERRSTSDRASSRGSRDDKFKKDDKPRRSSNKEGFRKISYADDKKPKVVKKDK

SEQ ID NO: 44948 - protein, 205 aa, Campylobacter concisus
  misc_feature (1)..(205): tr|U2GNU5|U2GNU5_9PROT NADPH-dependent 7-cyano-7-deazag uanine reductase OS=Campylobacter concisus ATCC 51561 O X=1243032 GN=queF PE=3 SV=1
MSEEMKYGEKILKEFDVESDLEVWENKQTRDYVIKITLPEFCCLCPRSGYPDFATIYLEYIPNKLVVELKAIKLYINSFMNRNISHEDSINEIYSVLEKKLEPKFMKIVGDFNPRGNVHTVIEIISDLVVKKPAEEKEYAPRSRERSFGDKPRERRSTSDRGSSRGSRDDKFKKDDKPRRSSNKEGFRKISYADDKKPKVVKKDK

SEQ ID NO: 44949 - protein, 128 aa, Campylobacter cuniculorum
  misc_feature (1)..(128): tr|A0A1W6BUC1|A0A1W6BUC1_9PROT NADPH-dependent 7-cyano- 7-deazaguanine reductase OS=Campylobacter cuniculorum D SM 23162 = LMG 24588 OX=1121267 GN=queF PE=3 SV=1
MHYGEKEIKKFDANKDLELWKNEAENDYIIKITLPEFCCLCPRSGYPDFATIYLEYIPDEFVVELKAVKLYINSFMHKYISHEASVNEIYQTLKNKLKPKWIKVVGDFNPRGNVHTLIECRSDMVIPH

SEQ ID NO: 44950 - protein, 213 aa, Campylobacter curvus
  misc_feature (1)..(213): tr|A0A0M3V1R2|A0A0M3V1R2_CAMC5 NADPH-dependent 7-cyano- 7-deazaguanine reductase OS=Campylobacter curvus (strai n 525.92) OX=360105 GN=queF PE=3 SV=1
MSEEQNQMRYGEKILKEFDPQTDLEVWENKHEREYTIKITLPEFCCLCPRSGYPDFATIYLEYIPNKLVVELKAIKLYINSFMNRNISHEDSINEIYDVLFTKLEPKFMKIIGDFNPRGNVHTIIEVCSESILKKSENLEPVREFKYFNDSKRATARRINERDSGKRSSGRDNAKSSTRKFSDEKPKRAVNKDGFRKISYEGDKKPRVVKKEK

SEQ ID NO: 44951 - protein, 146 aa, Campylobacter fetus
  misc_feature (1)..(146): tr|A0A0E1GFR4|A0A0E1GFR4_CAMFE NADPH-dependent 7-cyano- 7-deazaguanine reductase OS=Campylobacter fetus subsp. fetus 04/554 OX=1240980 GN=queF PE=3 SV=1
MENKKYGEKIINEFDIEKNLEIWPNSSKNDYAIRITLPEFACFCPRSGYPDFATIYLTYVPRDFVVELKAIKLYINSFLNRHISHEASINEIYDTLDKKLNPKYLRVVGDFNPRGNVHTVIELDSNLVRKEKFDVSSITLETTRKF

SEQ ID NO: 44952 - protein, 146 aa, Campylobacter fetus
  misc_feature (1)..(146): tr|A0A433YHN9|A0A433YHN9_CAMFE NADPH-dependent 7-cyano- 7-deazaguanine reductase OS=Campylobacter fetus OX=196 GN=queF PE=3 SV=1
MENKKYGEKIINEFDIEKDLEIWPNSSKNDYAIRITLPEFACFCPRSGYPDFATIYLTYVPRDFVVELKAIKLYINSFLNRHISHEASINEIYDTLDKKLNPKYLRVVGDFNPRGNVHTVIELDSNLVRKEKFDVSSITLETTRKF

SEQ ID NO: 44953 - protein, 257 aa, Campylobacter geochelonis
  misc_feature (1)..(257): tr|A0A128EBZ0|A0A128EBZ0_9PROT NADPH-dependent 7-cyano- 7-deazaguanine reductase OS=Campylobacter geochelonis O X=1780362 GN=queF PE=3 SV=1
MRYGEEIIKEFDVESDLEIWPNKQERDYLIKITLPEFMCLCPRSGYPDFATIYLEYMPGEFVVELKAIKLYINSFINRNISHEDSINEIYSVLQTKLKPKWMKIIGDFNPRGNVHTVIEIDSNLASKDSQEKPQSANNDEIIDAIKEEFKKEKEQEKLEREERKKSFNDRKPRDGVRSFSDRKPREGGFGDRKPRREFDKKDGKSFDKKPRVGGYSDRKPRDRDDKFDDKPRVKKEPFYKSNFSDRKPQVVKKDDKS

SEQ ID NO: 44954 - protein, 126 aa, Campylobacter gracilis
  misc_feature (1)..(126): tr|C8PKQ8|C8PKQ8_9PROT NADPH-dependent 7-cyano-7-deazag uanine reductase OS=Campylobacter gracilis RM3268 OX=55 3220 GN=queF PE=3 SV=1
MRYGEEEIEKFDIENLEVWPNKQERDYLIKITLPEFCCRCPRSGYPDFATIYLEYIPDKLVVELKAIKLYINSFMNRYISHEDSINEIYGALQSKLKPKFMKITGDFNPRGNVHTVIEINSDQIYR

SEQ ID NO: 44955 - protein, 130 aa, Campylobacter helveticus
  misc_feature (1)..(130): tr|A0A1V0RD49|A0A1V0RD49_9PROT NADPH-dependent 7-cyano- 7-deazaguanine reductase OS=Campylobacter helveticus OX =28898 GN=queF PE=3 SV=1
MRYGEKEIKEFDVDKDLELWENTAENDYVIKITLPEFCCLCPRSGYPDFATIYVEYMPDKLVVELKAIKIYINSFMNRNVSHEASINEIYNTLKDKLKPKWIKVVGDFNPRGNVHTLIECRSDIVVPKCL

SEQ ID NO: 44956 - protein, 129 aa, Campylobacter hepaticus
  misc_feature (1)..(129): tr|A0A424Z0T4|A0A424Z0T4_9PROT NADPH-dependent 7-cyano- 7-deazaguanine reductase OS=Campylobacter hepaticus OX= 1813019 GN=queF PE=3 SV=1
MLYGEKEIKEFDVENMEIWPNEAKNDYIIKITLPEFMCFCPRSGYPDFAKIYLEYIPDQFVIELKAIKLYINTFMHKNVSHEASINEIYTTLKEKLKPKWIKVVGDFNPRGNVHTLIECRSDIVIPKSE

SEQ ID NO: 44957 - protein, 184 aa, Campylobacter hominis
  misc_feature (1)..(184): tr|A7HZD7|A7HZD7_CAMHC NADPH-dependent 7-cyano-7-deazag uanine reductase OS=Campylobacter hominis (strain ATCC BAA-381 / LMG 19568 / NCTC 13146 / CH001A) OX=360107 GN =queF PE=3 SV=1
MEDLKYGESQILNFDVEKDFEIWPNKNERNFVIKITLPEFCCLCPRSGYPDFATIYLEYIPNEFVAELKALKLYINSFMNRHISHEDSINEIYSVLEKKLKPKYMKIAADFNPRGNVHTTIEISSDIISKNFSEKKDKKPVEKRNFSEKKFEKTDKNFKSKPRKNASREPFAKIDKSSPKVVKK

SEQ ID NO: 44958 - protein, 143 aa, Campylobacter hyointestinalis
  misc_feature (1)..(143): tr|A0A172SUB1|A0A172SUB1_CAMHY NADPH-dependent 7-cyano- 7-deazaguanine reductase OS=Campylobacter hyointestinal is subsp. lawsonii CCUG 27631 OX=1031752 GN=queF PE=3 S V=1
MKYGEKIINKFDIEKDLEIWPNSSKNDYAIRITLPEFACFCPRSGYPDFATIYLTYVPRDFVVELKAIKLYINSFLNRHISHEASINEIYDTLDKKLNPKYLRVVGDFNPRGNVHTVIELDSNLVRKEKFDVSSITLETTRKF

SEQ ID NO: 44959 - protein, 143 aa, Campylobacter hyointestinalis
  misc_feature (1)..(143): tr|A0A562XLH0|A0A562XLH0_CAMHY NADPH-dependent 7-cyano- 7-deazaguanine reductase OS=Campylobacter hyointestinal is OX=198 GN=queF PE=3 SV=1
MKYGEKIINEFDIEKDLEIWPNSSKNDYAIRITLPEFACFCPRSGYPDFATIYLTYVPRDFVVELKAIKLYINSFLNRHISHEASINEIYDTLDKKLNPKYLRVVGDFNPRGNVHTVIELDSNLVRKEKFDVSSITLETTRKF

SEQ ID NO: 44960 - protein, 146 aa, Campylobacter iguaniorum
  misc_feature (1)..(146): tr|A0A076F6F6|A0A076F6F6_9PROT NADPH-dependent 7-cyano- 7-deazaguanine reductase OS=Campylobacter iguaniorum OX =1244531 GN=queF PE=3 SV=1
MENKKYGEKIINEFNIEKDFEIWPNSSKNDYAIRITLPEFACFCPRSGYPDFATIYLTYVPRELVVELKAIKLYINSFLNRHISHEASINEIYDLLDKKLNPKYLRVVGDFNPRGNVHTVIEVDSNLVRGEKYDTSSITLETTRKF

SEQ ID NO: 44961 - protein, 128 aa, Campylobacter insulaenigrae
  misc_feature (1)..(128): tr|A0A0A8GZF4|A0A0A8GZF4_9PROT NADPH-dependent 7-cyano- 7-deazaguanine reductase OS=Campylobacter insulaenigrae NCTC 12927 OX=1031564 GN=queF PE=3 SV=1
MRYGEKEIKEFDVENMEVWPNDAKNDYVIKITLPEFMCCCPRSGYPDFATIFLEYIPNKLVVELKAIKLYINTFMHRNVSHEASINEIYNTLKDKLDPKWIKVVGDFNPRGNVHTVIECRSDLVVPKL

SEQ ID NO: 44962 - protein, 281 aa, Campylobacter jejuni
  misc_feature (1)..(281): tr|A0A4U9P3I0|A0A4U9P3I0_CAMJU NADPH-dependent 7-cyano- 7-deazaguanine reductase OS=Campylobacter jejuni OX=197 GN=queF_2 PE=3 SV=1
MSSYQDNPALAQLTLGKSTAYVDHYDASLLQAVPRSMNREPLGLYPDNLPFHGADIWTLYELSWLNAKGLPQVAVGEISLNANSQNLIESKSFKLYLNSFNQTVFPDWQSVQETLTRDLSACAQGDVTVTVSRLSEIEGSPVGHFDGVCIDDQDIEIDSYEFSTDYLATAKGEDIVEESLVSHLLKSNCLITHQPDWGSVQIQYRGPKIDREALLRYLVSFRHHNEFHEQCVERIFNDLLHFCQPEKLAVYARYTRRGGLDINPWRSNFPFEPATARLVRQ

SEQ ID NO: 44963 - protein, 127 aa, Campylobacter jejuni
  misc_feature (1)..(127): sp|A8FP38|QUEF_CAMJ8 NADPH-dependent 7-cyano-7-deazagua nine reductase OS=Campylobacter jejuni subsp. jejuni se rotype O:6 (strain 81116 / NCTC 11828) OX=407148 GN=que F PE=3 SV=1
MRYGEKEIKEFDVENMEIWPNDAKNDYIIKITLPEFMCCCPRSGYPDFATIYLEYMPDKFVVELKAIKLYINTFMYRNVSHEASINEIYNTLKDKLKPKWIKVVGDFNPRGNVHTVIECCSDMVVPK

SEQ ID NO: 44964 - protein, 147 aa, Campylobacter lanienae
  misc_feature (1)..(147): tr|A0A381D6C4|A0A381D6C4_9PROT NADPH-dependent 7-cyano- 7-deazaguanine reductase OS=Campylobacter lanienae OX=7 5658 GN=queF PE=3 SV=1
MENLKYGEKIIAEFDIDKDFEIWPNSANKDYAIKITLPEFVCFCPRSGYPDFATIYLTYVPDKFVVELKALKLYINSFLNRHISHESSINEIYDTLDNKLKPKYLRVVGDFNPRGNVHTIIEVDSNMIKEQKYDTSSIVFENTRKFN

SEQ ID NO: 44965 - protein, 147 aa, Campylobacter lanienae
  misc_feature (1)..(147): tr|A0A562YAB2|A0A562YAB2_9PROT NADPH-dependent 7-cyano- 7-deazaguanine reductase OS=Campylobacter lanienae OX=7 5658 GN=queF PE=3 SV=1
MENLKYGEKIIAEFDIDKDFEIWPNSANKDYAIKITLPEFACFCPRSGYPDFATIYLTYVPDKFVVELKALKLYINSFLNRHISHESSINEIYDTLDNKLKPKYLRVVGDFNPRGNVHTIIEVDSNMIKEQKYDTSSIVFENTRKFN

SEQ ID NO: 44966 - protein, 128 aa, Campylobacter lari
  misc_feature (1)..(128): tr|A0A0A8H304|A0A0A8H304_CAMLA NADPH-dependent 7-cyano- 7-deazaguanine reductase OS=Campylobacter lari subsp. c oncheus LMG 11760 OX=1031536 GN=queF PE=3 SV=1
MRYGEKEIKEFSVENMEVWPNDAKNDYMIKITLPEFMCCCPRSGYPDFATIYLEYIPNKLVVELKAIKLYINTFMYRNISHEASINEIYNTLKEKLDPKWIKVVGDFNPRGNVHTVIECRSDLVVPQN

SEQ ID NO: 44967 - protein, 127 aa, Campylobacter lari
  misc_feature (1)..(127): sp|B9KE89|QUEF_CAMLR NADPH-dependent 7-cyano-7-deazagua nine reductase OS=Campylobacter lari (strain RM2100 / D 67 / ATCC BAA-1060) OX=306263 GN=queF PE=3 SV=1
MRYGEKEIKEFDVENMEVWPNDAKNDYVIKITLPEFMCCCPRSGYPDFATIYLEYIPNKLVVELKAIKLYINTFMYRNVSHEASINEIYNTLKEKLDPKWIKVVGDFNPRGNVHTVIECRSDLVVPQ

SEQ ID NO: 44968 - protein, 128 aa, Campylobacter ornithocola
  misc_feature (1)..(128): tr|A0A1C2FUS1|A0A1C2FUS1_9PROT NADPH-dependent 7-cyano- 7-deazaguanine reductase OS=Campylobacter ornithocola O X=1848766 GN=queF PE=3 SV=1
MRYGEKEIKEFSVENMEVWPNDAKNDYVIKITLPEFMCCCPRSGYPDFATIYLEYIPNKLVVELKAIKLYINTFMYKNISHEASINEIYNTLKEKLDPKWIKVVGDFNPRGNVHTVIECRSDLVVPQN

SEQ ID NO: 44969 - protein, 127 aa, Campylobacter peloridis
  misc_feature (1)..(127): tr|A0A5C7DWI6|A0A5C7DWI6_9PROT NADPH-dependent 7-cyano- 7-deazaguanine reductase OS=Campylobacter peloridis OX= 488546 GN=queF PE=3 SV=1
MKYGEKEIKEFSVENMEVWPNDAKNDYVIKITLPEFMCCCPRSGYPDFATIYLEYIPNKLVVELKAIKLYINTFMYKNVSHEASINEIYNTLKEKLDPKWIKVVGDFNPRGNVHTIIECRSDLVVPK

SEQ ID NO: 44970 - protein, 127 aa, Campylobacter peloridis
  misc_feature (1)..(127): tr|A0A0A8GQS0|A0A0A8GQS0_9PROT NADPH-dependent 7-cyano- 7-deazaguanine reductase OS=Campylobacter peloridis LMG 23910 OX=1388753 GN=queF PE=3 SV=1
MRYGEKEIKEFDVENIEVWPNDAKNDYVIKITLPEFMCCCPRSGYPDFATIYLEYIPNKLVVELKAIKLYINTFMYKNVSHEASINEIYNTLKEKLDPKWIKVVGDFNPRGNVHTIIECRSDLVIPK

SEQ ID NO: 44971 - protein, 236 aa, Campylobacter pinnipediorum
  misc_feature (1)..(236): tr|A0A1S6TLR8|A0A1S6TLR8_9PROT NADPH-dependent 7-cyano- 7-deazaguanine reductase OS=Campylobacter pinnipediorum subsp. pinnipediorum OX=1660067 GN=queF PE=3 SV=1
MQYGEEIIKEFDVERDLEVWENKNEREFVIRITLPEFCCLCPRSGYPDFATIYVDYIPDKLVVELKAIKLYINSFMSRKISHEDSINEIYSAIEKKIQPKWMKIVGDFNPRGNVHTVVEICSESFIKEKKVEAETRQDNRSAGARRINERENDRKRDFAPRRSNDRRDSFRGNDRDRGDRGNFRGGDRDRGNFRGNDRDRGDRGNNSRGDNRGGSRDGYRKIQYENDKQPNIVKKD

SEQ ID NO: 44972 - protein, 252 aa, Campylobacter pinnipediorum
  misc_feature (1)..(252): tr|A0A1S6U563|A0A1S6U563_9PROT NADPH-dependent 7-cyano- 7-deazaguanine reductase OS=Campylobacter pinnipediorum subsp. caledonicus OX=1874362 GN=queF PE=3 SV=1
MQYGEEIIKEFDVERDLEVWENKNEREFVIRITLPEFCCLCPRSGYPDFATIYVDYVPDKLVVELKAIKLYINSFMSRKISHEDSINEIYSAIEKKIQPKWMKIVGDFNPRGNVHTVVEICSESFIKEKKVEAETRQDNRSAGARRINERENDRKRDFAPRRNDRRDSFRGNDRDRGDRGSFRGGDRDRGNSRDRGNFRGNDRGDRGDRGDRGDRGNNSRGDSRDRSGGGSRDGYRKIQYENDKQPNIIKKD

SEQ ID NO: 44973 - protein, 235 aa, Campylobacter rectus
  misc_feature (1)..(235): tr|A0A3P1X288|A0A3P1X288_CAMRE NADPH-dependent 7-cyano- 7-deazaguanine reductase OS=Campylobacter rectus OX=203 GN=queF PE=3 SV=1
MQENEVSEPKYGEKIISEFDVEKDLEIWENKHERDYKIKITLPEFCCLCPRSGYPDFATIYLEYVPAKFVVELKAIKLYINSFMTRNISHEDSINEIYDVLERKLAPKWMKITGDFNPRGNVHTVIEICSDEIIKKTQEQSFETPKFEKFARDSERSFDRGGYGARESKFSKDGSRGKSFGADKRDAKTSDRKPRASKDKFDDKPRRMGSKDGFKKPEFAGEKRARIVKKSSEDK

SEQ ID NO: 44974 - protein, 235 aa, Campylobacter rectus
  misc_feature (1)..(235): tr|B9CY82|B9CY82_CAMRE NADPH-dependent 7-cyano-7-deazag uanine reductase OS=Campylobacter rectus RM3267 OX=5532 18 GN=queF PE=3 SV=1
MQENEVSEPKYGEKIISEFDIEKDLEIWENKHERDYKIKITLPEFCCLCPRSGYPDFATIYLEYVPAKFVVELKAIKLYINSFMTRNISHEDSINEIYDVLERKLAPKWMKITGDFNPRGNVHTVIEICSDEIIKKTQEQSFETPKFEKFARDSERSFDRGGYGARESKFSKDGSRGKSFGADKRDAKTGDRKPRASKDKFDDKPRRTGSKEGFKKPEFAGEKRARIVKKSSEDK

SEQ ID NO: 44975 - protein, 234 aa, Campylobacter showae
  misc_feature (1)..(234): tr|M3IJW3|M3IJW3_9PROT NADPH-dependent 7-cyano-7-deazag uanine reductase OS=Campylobacter showae CC57C OX=10733 53 GN=queF PE=3 SV=1
MQENEVIEPKYGEKIISEFDVEKDLEIWENKHERDYKIKITLPEFCCLCPRSGYPDFATIYLEYVPAKFVVELKAIKLYINSFMTRNISHEDSINEIYDVLERKLAPKWMKITGDFNPRGNVHTVIEICSDEIIKKTQEQSFEAPKFEKFTRDNERNFDRSGYGARESKFSKDGSRGKSFGADRRDTKTGDRKPRASKDKFDDKPRRTGNKDGFKKPEFAGEKRARVVKKSDDK

SEQ ID NO: 44976 - protein, 235 aa, Campylobacter showae
  misc_feature (1)..(235): tr|C6RJ29|C6RJ29_9PROT NADPH-dependent 7-cyano-7-deazag uanine reductase OS=Campylobacter showae RM3277 OX=5532 19 GN=queF PE=3 SV=1
MQENEVVEPKYGEKIISEFDVEKDLEIWENKHERDYKIKITLPEFCCLCPRSGYPDFATIYLEYVPAKFVVELKAIKLYINSFMTRNISHEDSINEIYGVLERKLAPKWMKITGDFNPRGNVHTIIEICSDEIIKKTQEQSFEAPKFEKFTRDSDRSFDRGGYGARESKFSKDGSRGKSFGADKKGAKTGDRKPRASKDKFDDKPRRAGSKEGFKKPEFAGEKRARVVKKSSEDK

SEQ ID NO: 44977 - protein, 147 aa, Campylobacter sp.
  misc_feature (1)..(147): tr|A0A1X9SUB0|A0A1X9SUB0_9PROT NADPH-dependent 7-cyano- 7-deazaguanine reductase OS=Campylobacter sp. RM6137 OX =1660073 GN=queF PE=3 SV=1
MQNLKYGEKIIAQFDLDKDFEIWPNSANKDYAIKITLPEFACFCPRSGYPDFATIYLTYVPDKFVVELKALKLYINSFLNRHISHEASINEIYDTLDSKLKPKYLRVVGDFNPRGNVHTIIEVDSNMIREQKYDTSSIEFQSTRKFN

SEQ ID NO: 44978 - protein, 130 aa, Campylobacter sp.
  misc_feature (1)..(130): tr|A0A4U7BDV4|A0A4U7BDV4_9PROT NADPH-dependent 7-cyano- 7-deazaguanine reductase OS=Campylobacter sp. MIT 12-55 80 OX=2040651 GN=queF PE=3 SV=1
MRYGEKEIKEFDVEKDLELWENKAENDYIIKISLPEFMCLCPRSGYPDFATLNLEYIPDQFVVELKAIKIYINSFMYKNISHEAVVNEIYSTLKAKLKPKWIKLEADFNPRGNVHTIIECRSDLVVPKQN

SEQ ID NO: 44979 - protein, 143 aa, Campylobacter sputorum
  misc_feature (1)..(143): tr|A0A381DJQ6|A0A381DJQ6_9PROT NADPH-dependent 7-cyano- 7-deazaguanine reductase OS=Campylobacter sputorum biov ar sputorum OX=32024 GN=queF PE=3 SV=1
MRYGEKIIKEFDIDKDMEIWPNKWENDYVIRITLPEFVCLCPRSGYPDFAKIFLIYVPDKKVIELKAIKLYINSFMNKNMSHEDSINEIYHTLDKLLEPKYIRVVGDFNPRGNVHTVIELDSNLVRKEKFDISAISKEELREF

SEQ ID NO: 44980 - protein, 128 aa, Campylobacter subantarcticus
  misc_feature (1)..(128): tr|A0A0A8H716|A0A0A8H716_9PROT NADPH-dependent 7-cyano- 7-deazaguanine reductase OS=Campylobacter subantarcticu s LMG 24374 OX=1388751 GN=queF PE=3 SV=1
MKYGEKEIKEFSVENMEVWPNNTKNDYVIKITLPEFMCCCPRSGYPDFATIYLEYIPNKLVVELKAIKLYINTFMYRNVSHEASINEIYNTLKEKLDPKWIKVIGDFNPRGNVHTVIECRSDLVVPQN

SEQ ID NO: 44981 - protein, 130 aa, Campylobacter upsaliensis
  misc_feature (1)..(130): tr|A0A3S4TEE8|A0A3S4TEE8_CAMUP NADPH-dependent 7-cyano- 7-deazaguanine reductase OS=Campylobacter upsaliensis O X=28080 GN=queF PE=3 SV=1
MRYGEKEIKEFDVDKDLELWENTAQNDYVIKITLPEFCCLCPRSGYPDFATIYVEYMPDKLVVELKAIKIYINSFMNRNISHEASINEIYSTLKDKLKPKWIKVVGDFNPRGNVHTLIECRSDMVVPQCL

SEQ ID NO: 44982 - protein, 130 aa, Campylobacter upsaliensis
  misc_feature (1)..(130): tr|E6LBW3|E6LBW3_CAMUP NADPH-dependent 7-cyano-7-deazag uanine reductase OS=Campylobacter upsaliensis JV21 OX=8 88826 GN=queF PE=3 SV=1
MRYGEKEIKEFNVDKDLELWENTAQNDYVIKITLPEFCCLCPRSGYPDFATIYVEYMPDKLVIELKAIKIYINSFMNRNVSHEASINEIYSTLKDKLKPKWIKVVGDFNPRGNVHTIIECRSDMVVPKCL

SEQ ID NO: 44983 - protein, 128 aa, Campylobacter ureolyticus
  misc_feature (1)..(128): tr|A0A2I1N9P5|A0A2I1N9P5_9PROT NADPH-dependent 7-cyano- 7-deazaguanine reductase OS=Campylobacter ureolyticus O X=827 GN=queF PE=3 SV=1
MRYGEKILNEFNPEKDLEIWENKHKKDYVIKITLPEFTCLCPRSGYPDFATIYLEYIPNEWVVELKAIKLYINSFMNKNISHEDSINEIYDLLEKKLKPKWMKIVGDFNPRGNVHTVIEIDSNLVKKQ

SEQ ID NO: 44984 - protein, 128 aa, Campylobacter ureolyticus
  misc_feature (1)..(128): tr|S3XJ34|S3XJ34_9PROT NADPH-dependent 7-cyano-7-deazag uanine reductase OS=Campylobacter ureolyticus ACS-301-V -Sch3b OX=883165 GN=queF PE=3 SV=1
MRYGEKILNEFDPEKDLEIWPNKHKKDYIIKITLPEFTCLCPRSGYPDFATIYLEYIPNEWVVELKAIKLYINSFMNKNISHEDSINEIYDLLDRKLKPKWMKIVGDFNPRGNVHTVIEIDSNLVKKQ

SEQ ID NO: 44985 - protein, 127 aa, Campylobacter volucris
  misc_feature (1)..(127): tr|A0A5C8KYT7|A0A5C8KYT7_9PROT NADPH-dependent 7-cyano- 7-deazaguanine reductase OS=Campylobacter volucris OX=1 031542 GN=queF PE=3 SV=1
MRYGEKEIKEFSVENMEVWPNDAKNDYVIKITLPEFMCCCPRSGYPDFATIYLEYIPNKLVVELKAIKLYINTFMHRNVSHEASINEIYNTLKEKLDPKWIKVVGDFNPRGNVHTVIECRSDLVVPK

SEQ ID NO: 44986 - protein, 125 aa, Campylobacteraceae bacterium
  misc_feature (1)..(125): tr|A0A1V4R6G6|A0A1V4R6G6_9PROT NADPH-dependent 7-cyano- 7-deazaguanine reductase OS=Campylobacteraceae bacteriu m 4484_166 OX=1956165 GN=queF PE=3 SV=1
MRYGEKEIDQFDINLTENFWENKHRKNYNIKITLPEFMCRCPRSGYPDFATIYLSYKPDKLVIELKALKLYINSFAQNYISHEDATNLIFDTLYSKLAPKHLNIKAVFNPRGNVSTTIIIDSDEN

SEQ ID NO: 44987 - protein, 129 aa, Campylobacterales bacterium
  misc_feature (1)..(129): tr|A0A258X346|A0A258X346_9PROT NADPH-dependent 7-cyano- 7-deazaguanine reductase OS=Campylobacterales bacterium 16-40-21 OX=1970501 GN=queF PE=3 SV=1
MKYGEQIVADFDIEKDFEIWPNAHERDYVVKVTLPEFTCLCPRSGYPDFATITIEYTPNKFVAELKAIKLYINSFRNRHISHENSANEIYSLFEDKIAPKRLKVVADFYPRGNVHTVIEIDSEKNGISA

SEQ ID NO: 44988 - protein, 129 aa, Zixibacteria bacterium
  misc_feature (1)..(129): tr|A0A1F4YSW6|A0A1F4YSW6_9BACT NADPH-dependent 7-cyano- 7-deazaguanine reductase OS=candidate division Zixibact eria bacterium RBG_16_53_22 OX=1802787 GN=queF PE=3 SV= 1
MGRKARPGKKLEAFPNRATGRYYLVTLEAGEFTCVCPITGQPDFADIRVEYVPDRKIVESKSFKLYLWSYRNEGTFHEHVVNKILDDFVKAVNPHWCRVTGRFNVRGGIGITVEAEHVKTPKARAAVKM

SEQ ID NO: 44989 - protein, 135 aa, Unknown
  misc_feature (1)..(135): tr|A0A1V5M9L8|A0A1V5M9L8_9BACT NADPH-dependent 7-cyano- 7-deazaguanine reductase OS=candidate division TA06 bac terium ADurb.Bin417 OX=1852828 GN=queF PE=3 SV=1
MAEYTAKEAKRGIRERLPEIEVWPNQFPGYEITVTYPEFTSVCPKTGLPDFGTITIRYQPDRSCLELKSLKFYFLAYRNLGIFYENAVNRILRDIVKAAAPLRAKVTGEFHTRGGMHCLVEATYEAESNLPPRKR

SEQ ID NO: 44990 - protein, 141 aa, Accumulibacter sp.
  misc_feature (1)..(141): tr|A0A080MCB4|A0A080MCB4_9PROT NADPH-dependent 7-cyano- 7-deazaguanine reductase OS=Candidatus Accumulibacter s p. SK-02 OX=1453999 GN=queF PE=3 SV=1
MTTTTISASTLETFPNPAPQRDFHIHMEIPEFTCLCPKTGQPDFATLLLDYIPDQTCVELKSLKLYIWSFRNTGCFHEAVTNRILDDLASATQPRYMRLTARFYVRGGIFTTVIADHRQAGWTPAPMVQLADFASQSNTRA

SEQ ID NO: 44991 - protein, 142 aa, Accumulibacter aalborgensis
  misc_feature (1)..(142): tr|A0A1A8XK21|A0A1A8XK21_9PROT NADPH-dependent 7-cyano- 7-deazaguanine reductase OS=Candidatus Accumulibacter a alborgensis OX=1860102 GN=queF PE=3 SV=1
MSTTPAKNLETFPNPAPQRDFQIHMEIPEFTCLCPKTGQPDFATLWLDYIAEKTCIELKSLKLYIWSFRNVGCFHEAVTNRILDDLVSATRPRYMKLTARFYVRGGIFTTVVAEHRKKGWTPAPAVAMADLADRAGQSPTRG

SEQ ID NO: 44992 - protein, 149 aa, Acididesulfobacter guangdongensis
  misc_feature (1)..(149): tr|A0A519BEG6|A0A519BEG6_9DELT NADPH-dependent 7-cyano- 7-deazaguanine reductase OS=Candidatus Acididesulfobact er guangdongensis OX=2597225 GN=queF PE=3 SV=1
MSDLYEQYNHYDDNKYKEKRFDIKTEAGIDVKVLETIPFDYPQSGTEVNIGTKEFTSVCPWSGLPDTAELNIKYIPNDSLVEMKSLKYYLLSFRNIGILQEHAVNRILNDLTDLLKPQYMEIEAKFESRGGLDTIVKVKYNSVNRGTQV

SEQ ID NO: 44993 - protein, 147 aa, Acididesulfobacter diazotrophicus
  misc_feature (1)..(147): tr|A0A519BNM6|A0A519BNM6_9DELT NADPH-dependent 7-cyano- 7-deazaguanine reductase OS=Candidatus Acididesulfobact er diazotrophicus OX=2597226 GN=queF PE=3 SV=1
MANLYEQYNHYDDNKYKEKRFDIKTEDSVDVKVLETIPFCYPLSQTKVSITTKEFTSVCPWSGLPDTAELNITYTPNNHLVEMKSLKYYLLSFRNIGILQEHAVNRILNDLAKLLEPKNMEVEAKFESRGGLDTVVKVEYNAANVEK

SEQ ID NO: 44994 - protein, 135 aa, Acidulodesulfobacterium ferriphilum
  misc_feature (1)..(135): tr|A0A519B9N9|A0A519B9N9_9DELT NADPH-dependent 7-cyano- 7-deazaguanine reductase OS=Candidatus Acidulodesulfoba cterium ferriphilum OX=2597223 GN=queF PE=3 SV=1
MKDKYLKKRFDVLTEDNIDLDILETMDFEYPASDTSVTVRTKEFTSVCPWTGLPDTAELLITYIPFKKLVEMKSLKYYLLSFRNVGILQEHAVNRIINDLSKLLKPKSMEVEARFESRGGLDTVVKTAYKSKRKQ

SEQ ID NO: 44995 - protein, 136 aa, Aegiribacteria bacterium
  misc_feature (1)..(136): tr|A0A1V4MY41|A0A1V4MY41_9BACT NADPH-dependent 7-cyano- 7-deazaguanine reductase OS=Candidatus Aegiribacteria b acterium MLS_C OX=1775674 GN=queF PE=3 SV=1
MTDESDLEGLSVLGGASVPTRKLETFPNHHPGREYMVTLTTDEFTCLCPKTGQPDFAALTIEYVPGERILESKSLKLYLWTFRNEGVFHEHVANRILDDLVDALEPLWCRVLADFGIRGGISISVDAEYRRPGGED

SEQ ID NO: 44996 - protein, 127 aa, Aerophobetes bacterium
  misc_feature (1)..(127): tr|A0A523Y569|A0A523Y569_9BACT NADPH-dependent 7-cyano- 7-deazaguanine reductase OS=Candidatus Aerophobetes bac terium OX=2030807 GN=queF PE=3 SV=1
MGKTFDPSVIDRSILETFPYQYHYRPIHMEHATDEFTCVCPFSGLPDQATLTVKYIPGELCIELKSLKYYFYSFRQVKIFHEHVVNKILEDLVAVLDPVEMTIEAKFTLRGGIASTAIATYKKEEKS

SEQ ID NO: 44997 - protein, 146 aa, Aerophobetes bacterium
  misc_feature (1)..(146): tr|A0A565EAY6|A0A565EAY6_9BACT NADPH-dependent 7-cyano- 7-deazaguanine reductase OS=Candidatus Aerophobetes bac terium Ae_b3a OX=2012485 GN=queF PE=3 SV=1
MKYENRISSELEAKARKAVGKTFDPSVIDRSILETFPYQYHYRPIHMEHATDEFTCVCPFSGLPDQATLTVKYIPGELCIELKSLKYYFYSFRQVKIFHEHVVNKILEDLVAVLDPVEMTIEAKFALRGGIASTAIATYKKEEKKG

SEQ ID NO: 44998 - protein, 132 aa, Aminicenantes bacterium
  misc_feature (1)..(132): tr|A0A1F5B4Z4|A0A1F5B4Z4_9BACT NADPH-dependent 7-cyano- 7-deazaguanine reductase OS=Candidatus Aminicenantes ba cterium RBG_19FT_COMBO_65_30 OX=1797277 GN=queF PE=3 SV =1
MPRYTDREAKAGLEAKLPPLETFPNQFPDYEIAIEFPEFTSVCPKTGRPDFGTITLRYVPAGRVLELKSLKEYFLAYRNLGIFYENVVNRVLEDVVRACRPAGAVVRGEFNPRGGLSSVVEARYPRPRKRRS

SEQ ID NO: 44999 - protein, 132 aa, Aminicenantes bacterium
  misc_feature (1)..(132): tr|A0A1F5AZU5|A0A1F5AZU5_9BACT NADPH-dependent 7-cyano- 7-deazaguanine reductase OS=Candidatus Aminicenantes ba cterium RBG_13_64_14 OX=1797271 GN=queF PE=3 SV=1
MPGYTDREAKAGLDAKLPPLETFPNQFPDYEIAIDFPEFTSVCPKTGLPDFGTITLRYVPAGRVLELKSLKEYFLAYRNLGIFYENVVNRILEDVVRACRPKSAIVRGEFNPRGGLRSIVEARTPRPRTRRS

SEQ ID NO: 45000 - protein, 155 aa, Amulumruptor caecigallinarius
  misc_feature (1)..(155): tr|A0A4Q0U9Y4|A0A4Q0U9Y4_9BACT NADPH-dependent 7-cyano- 7-deazaguanine reductase OS=Candidatus Amulumruptor cae cigallinarius OX=2109911 GN=queF PE=3 SV=1
MRTPDQLQGVTHLGSKATEYPTDYDPSLLQTFNNLHPERDYLVSLDCPEFTSLCPKTGQPDFAKIIINYIPDQSMVESKSLKLYLFSFRNHGDFHEDCVNIILNDLRNLMQPRYIEVIGLFTPRGGIAIHPYANWADEAHRHIAEQRLLACMPVN

SEQ ID NO: 45001 - protein, 269 aa, Aquarickettsia rohweri
  misc_feature (1)..(269): tr|A0A429XUU5|A0A429XUU5_9RICK NADPH-dependent 7-cyano- 7-deazaguanine reductase OS=Candidatus Aquarickettsia r ohweri OX=2602574 GN=queF PE=3 SV=1
MHVNSSALGKKSIYTDQYNPSLLFAIPRVDKRNEIGIDNNNMTFYGYDIWNAYEISWLRPDRRPDIATSEIIYSCRSEYIIESKSLKLYLNSFNGTIFKSKDHVKTTIEQDLSHKLSTDVIVKLEDINTEVTLKNPEGKNIDNYYDKKLDNCKIEITDKTIVQDEKIYTHLLKSNCPVTMQPDWGTLIINYSGAKINYSSLINYIISLRNLNEFHEQCIEKIYMDIYRNCKTSNLEVYGRYTRRGGIDINPYRSTKDTPIPENIRTYRQ

SEQ ID NO: 45002 - protein, 132 aa, Atelocyanobacterium thalassa
  misc_feature (1)..(132): tr|A0A086CG79|A0A086CG79_9CHRO NADPH-dependent 7-cyano- 7-deazaguanine reductase OS=Candidatus Atelocyanobacter ium thalassa isolate SIO64986 OX=1527444 GN=queF PE=3 S V=1
MNEISNADSSKIKYGERNILEGELITFPNPRIGRIYNILITLPEFTCKCPFSGHPDFATLELNYVPNQKILELKALKLYINGFRDKYISHEESINQILDDFVEACEPLEANLKGNFNPRGNVHTIIEVCYKK

SEQ ID NO: 45003 - protein, 136 aa, Atribacteria bacterium
  misc_feature (1)..(136): tr|A0A4Y8HYN5|A0A4Y8HYN5_9BACT NADPH-dependent 7-cyano- 7-deazaguanine reductase OS=Candidatus Atribacteria bac terium MT.SAG.1 OX=2552984 GN=queF PE=3 SV=1
MMDKYEEKRFDIYDYKKIDTEVLEVIKYEYSGKDTIVEYCTEEFSSVCPWTGLPDNAVLTIKYIPYEKLVELKSLKYYLTSYRNIGILQEHVINRMLDDLTELLSPKSMEIIGDFQARGGLSTRVVAKYDKIEKGK

SEQ ID NO: 45004 - protein, 281 aa, Azambacteria bacterium
  misc_feature (1)..(281): tr|A0A350QGI0|A0A350QGI0_9BACT NADPH-dependent 7-cyano- 7-deazaguanine reductase QueF OS=Candidatus Azambacteri a bacterium OX=2053511 GN=queF PE=3 SV=1
MTKSHSEIMAGLTLGKTTAYAEQYDPSLLQPVPRTSGRDTLGLDQSDPLPFIGEDIWHGYELSWLNAKGKPMVALATFVVPVTSANLIESKSFKLYLNSFNQSRFDDLRQVYQALQRDLAACAGSTVKVTLHNVNEIMVFQPTWIPGHCIDDLDITIDSYQYDPSLLQLTAAAETIEEKVHSHLLKSNCLITSQPDWASVYIHYRGNAIDHAALLRYLISFRSHNEFHEQCIERIFLDIWQRCAPEYLLVYARYTRRGGLDINPVRASASYQLPNLRLSRQ

SEQ ID NO: 45005 - protein, 287 aa, [Bacteroides] periocalifornicus
  misc_feature (1)..(287): tr|A0A0Q4B6P8|A0A0Q4B6P8_9BACT QueF_N domain-containing protein OS=Candidatus [Bacteroides] periocalifornicus OX=1702214 GN=AL399_06515 PE=4 SV=1
MVRECRPSVPTLLGQKTESPTSYAPEVLTPIPRQHPEVEREDALTRAVGYDAWHAWEASCLTNGGLPVVTMLKVVYSSDSPYLVESKSFKLYLHSLNSTRFGSTPAEARSELAQLVAQDLSSVLQTKVRCYPHVALGGQFDFEGFEILEEGLNGLDLNQQESYLLPPVGEPHEVRVCTHLLRSNCPVTGQPDWGNLYVQALVNGSINPAQLLRMVVGMRDERMFHEQACEQIYGQLWGGLHPARLLVACLYTRRGGIDICPVRASDAGYLPRFLGQPEVLTRPSWRQ

SEQ ID NO: 45006 - protein, 287 aa, Baumannia cicadellinicola
  misc_feature (1)..(287): tr|A0A088MYK4|A0A088MYK4_9GAMM NADPH-dependent 7-cyano- 7-deazaguanine reductase OS=Candidatus Baumannia cicade llinicola OX=186490 GN=queF PE=3 SV=1
MSKDILNNQQYKSLQALTLGKPTSYSIYYDPTLLQVIPRTLHRKLLGLSAAVSLPFHGADLWTLYELSWLNNHGLPQVAIGQIAFDATSDNLIESKSLKLYLNSLNQTCFLSHYELQKTLVIDLSKCVNSHVLVKICSLREWTQVPVLNFEGECIDNQQIHIEYHGTFNNNWLTNAAVGQKVNETLVSNLLKSNCLITNQPDWGSVQISYYGTRINREALIRYLISFRQHNMFHEQCVEQIFSDIMQFCQPDTLSVYARYTRRGGLDINPWRSNTHFLPINGRLARQ

SEQ ID NO: 45007 - protein, 274 aa, Burkholderia pumila
  misc_feature (1)..(274): tr|A0A0J7JIN8|A0A0J7JIN8_9BURK NADPH-dependent 7-cyano- 7-deazaguanine reductase OS=Candidatus Burkholderia pum ila OX=1090375 GN=queF PE=3 SV=1
MTPKQSTLGKPTHYSEQYDASLLFPIHRKSGRDSIGVPVRLPFFGTDIWNAYEPSWLNARGKPQLAVATFFVPADSPNIVESKSFKLYLGSFAQTRFDSIDDVRAAIKRDVSAICGATVSVQLTAPADFDRLSMEEFDGLSLDRLDLDCDIYAPDPSLLKANHEEGPTDETLFSNLLKSNCPVTGQPDWGSVQIRYYGAQIDHAGLLRYIVSYREHAEFHEQCVERMFMDIMRECKPERLAIYARYTRRGGLDINPFRTSFNLPMPDNVRLARQ

SEQ ID NO: 45008 - protein, 274 aa, Burkholderia verschuerenii
  misc_feature (1)..(274): tr|A0A0L0ME14|A0A0L0ME14_9BURK NADPH-dependent 7-cyano- 7-deazaguanine reductase OS=Candidatus Burkholderia ver schuerenii OX=242163 GN=queF PE=3 SV=1
MTPEQSPLGKPTHYTEQYDATLLFPIERQTARDAIGVPARLPFFGTDIWNAYELSWLNMRGKPQIAVATFFVPADSPNIVESKSFKLYLGSFAQTRFDSIDDVRAAIKRDVSACCGATVSVQLAAPADFAKLSMEEFDGMPLDRLDLECEVYVPDASLLKAAHDEAPIDETVFSNLLKSNCPVTGQPDWGSVQIRYYGTQIDHASLLQYIVSFREHTGFHEQCVERIFMDIMRECKPERLAVYARYTRRGGLDINPFRTNFNLPMPDNARLARQ

SEQ ID NO: 45009 - protein, 158 aa, Carbobacillus altaicus
  misc_feature (1)..(158): tr|A0A2R6Y5I3|A0A2R6Y5I3_9BACL NADPH-dependent 7-cyano- 7-deazaguanine reductase OS=Candidatus Carbobacillus al taicus OX=2163959 GN=queF PE=3 SV=1
MQSKPKHLGRSDTTYPMDYDPSVLDVVPYDFPDRDMFVKFNAPEFTTLCPITGQPDFANIVLSYVPDRLLVESKSLKLYLFSFRNHGSFHEAVVNMILNDLKAVLDPKYIEVWGRFLPRGGLSIDPYVNYGKPGTVWEDVARRRLFEHDMHPEWVDNR

SEQ ID NO: 45010 - protein, 132 aa, Cloacimonas sp.
  misc_feature (1)..(132): tr|A0A1W9P3K6|A0A1W9P3K6_9BACT NADPH-dependent 7-cyano- 7-deazaguanine reductase OS=Candidatus Cloacimonas sp. 4484_209 OX=1968525 GN=queF PE=3 SV=1
MRKKLKNRVKSPTIIKKDIIEIVDYEYKGKKDVEIVIENGEFTSVCPRTGLPDFGKITIRYVPDKKIIELKSLKFYFLQFRNVGIFYEHVVNKILGDLVSLVKPKWMEVIGEFNIRGGIRTTTKVEWGSRKI

SEQ ID NO: 45011 - protein, 134 aa, Cloacimonas sp.
  misc_feature (1)..(134): tr|A0A3D5V9F1|A0A3D5V9F1_9BACT NADPH-dependent 7-cyano- 7-deazaguanine reductase OS=Candidatus Cloacimonas sp. OX=2053534 GN=queF PE=3 SV=1
MQKLGNHKNYDVEELNNIENQADIFDIFENPHPDMDYVIRSETAEFTAICPITGQPDFGKIIIETTPDKYCIELKSLKMYLLSFRNRGIFHEAVTGKIAKDIIDTIKPKWLKVTGEFSVRGGISTTVVFEYPQK

SEQ ID NO: 45012 - protein, 138 aa, Cloacimonetes bacterium
  misc_feature (1)..(138): tr|A0A523R2I6|A0A523R2I6_9BACT NADPH-dependent 7-cyano- 7-deazaguanine reductase OS=Candidatus Cloacimonetes ba cterium OX=2030808 GN=queF PE=3 SV=1
MDGKEIKKELKKDIKSVDTIKKDVIEVVDYDYRKKRDVKIIIENEEFTSVCPRTGLPDFGRITIRYIPLNKIIELKSLKLYFLQYRNVGIFYEHIVNKILEDLVSLVKPKWMEVTGEFRIRGGIKTTTKTEYRKNSRE

SEQ ID NO: 45013 - protein, 143 aa, Cloacimonetes bacterium
  misc_feature (1)..(143): tr|A0A523XKE6|A0A523XKE6_9BACT NADPH-dependent 7-cyano- 7-deazaguanine reductase OS=Candidatus Cloacimonetes ba cterium OX=2030808 GN=queF PE=3 SV=1
MNEKEIIKKLKKAIPSPDTIKKDMIEVVDYEYSGKRDIEIVIENEEFTSICPRTGLPDFGRITIRYIPRKKIIELKSLKYYFLQYREVGIFYEHVINKILEDLVSLVKPSWMEIVGSFRIRGGIKTTTKTEYRKNTKEHRHQT

SEQ ID NO: 45014 - protein, 137 aa, Competibacteraceae bacterium
  misc_feature (1)..(137): tr|A0A433HXV1|A0A433HXV1_9GAMM NADPH-dependent 7-cyano- 7-deazaguanine reductase OS=Candidatus Competibacterace ae bacterium OX=2053538 GN=queF PE=3 SV=1
MAEIEGLTLLGQANTEYPQHYTPQLLERFPNRYPQHEYAVELDCPEFTCLCPITGQPDFARLTIRYSPLAYLVESKSLKLYLFSFRNQGTFNEEVVNRIASDLFALLQPRWIEVRGDFLPRGGIAIKPSVRLTGAPA

SEQ ID NO: 45015 - protein, 140 aa, Competibacteraceae bacterium
  misc_feature (1)..(140): tr|A0A433IKV0|A0A433IKV0_9GAMM NADPH-dependent 7-cyano- 7-deazaguanine reductase OS=Candidatus Competibacterace ae bacterium OX=2053538 GN=queF PE=3 SV=1
MSDIEGLTLLGHSQTEYPREYAPQVLERFANLYPQYPYEVELDCPEFTCLCPVTGQPDLARILIRYCPRGWLVESKSLKLYLFSFRNQGSFSENSINRIARDLFDLLQPEWLEVRGDFAPRGGIAIKPSVRLASGQAALP

SEQ ID NO: 45016 - protein, 155 aa, Contendobacter odensis
  misc_feature (1)..(155): tr|A0A2G6PFL1|A0A2G6PFL1_9GAMM NADPH-dependent 7-cyano- 7-deazaguanine reductase OS=Candidatus Contendobacter o densis OX=1400860 GN=queF PE=3 SV=1
MSHQDMYSELTQLGGPAALPENPDVAVLERVPNPQKGISYLVRFTAPEFTSLCPITGAPDFAHLVIDYIPQDWLIESKSLKLFLGSFRNHGAFHEDCTVSIALRLVKELEPKWLRMGGYWYPRGGIPIDVFYQTAPPPGNVWIPKQGVPAYRGRG

SEQ ID NO: 45017 - protein, 281 aa, Dactylopiibacterium carminicum
  misc_feature (1)..(281): tr|A0A272EXV2|A0A272EXV2_9RHOO NADPH-dependent 7-cyano- 7-deazaguanine reductase OS=Candidatus Dactylopiibacter ium carminicum OX=857335 GN=queF PE=3 SV=1
MSDFQSSLNTPSDSPLGKSSAYRSDYAPELLFPIPRRGKREEIGVDEAALPFVGEDLWNAYELSWLDPRGKPVVALGEFRVPASSPCLIESKSLKLYLNSFNQTRLAGLGEAQALIARDLSQAAGSEVQVCLQSLDAERVFVKPVGVCLDAQEIEIDRYQPEPELLRADPARVVQNELLYSHLLKSNCLVTGQPDWGAVFVRYSGLAIDREALLRYIVSFREHNEFHEQCVERIFCDLMRQCRPATLMVWARYTRRGGLDINPCRVTPGMSLAENLGEVRQ

SEQ ID NO: 45018 - protein, 137 aa, Dadabacteria bacterium
  misc_feature (1)..(137): tr|A0A3M1K628|A0A3M1K628_9BACT NADPH-dependent 7-cyano- 7-deazaguanine reductase OS=Candidatus Dadabacteria bac terium OX=2080303 GN=queF PE=3 SV=1
METEREQALRQRLAAQRVDPDDVDATVLDPVPFAHAGRELDITIETDEFTHICPMTGLPDFGTLRIRYAPSDKIVELKSLKYYLVQYRQVGIFYEHVIFRILDDLVAAVAPRWMEIIYEVQARGGIRSVVTARYPQP

SEQ ID NO: 45019 - protein, 119 aa, Dadabacteria bacterium
  misc_feature (1)..(119): tr|A0A520V6U8|A0A520V6U8_9BACT NADPH-dependent 7-cyano- 7-deazaguanine reductase OS=Candidatus Dadabacteria bac terium OX=2080303 GN=queF PE=3 SV=1
MSILETFPNKVKKRDYKIDIVCPEFTSLCPATGQPDFGEIRISYVPDKLCVELKSLKLYIYSFRDVGEFHEHVTNKILDDFVKACKPKSAIVTGDFNVRGGIKTVVKAEYDKKFKNKKL

SEQ ID NO: 45020 - protein, 151 aa, Deianiraea vastatrix
  misc_feature (1)..(151): tr|A0A5B8XE36|A0A5B8XE36_9RICK NADPH-dependent 7-cyano- 7-deazaguanine reductase OS=Candidatus Deianiraea vasta trix OX=2163644 GN=queF PE=3 SV=1
MSIGNYDNLTQLGSKVLAESDPKLSQLEVVQNPHKNINYVARFSTREFTSLCPITGQPDYAVIVIDYVPDEYIVESKSLKLFLQSFRNHGDFHEACTIYIAQRLIDIAKPKWLRICAYWAPRGGIPIDVFYQTGEAPNGVFIESTDEFRRR

SEQ ID NO: 45021 - protein, 211 aa, Delongbacteria bacterium
  misc_feature (1)..(211): tr|A0A2G6P1B0|A0A2G6P1B0_9BACT NADPH-dependent 7-cyano- 7-deazaguanine reductase QueF OS=Candidatus Delongbacte ria bacterium OX=2044594 GN=CSA15_08285 PE=4 SV=1
MRLAIPATSKFIIESKSLKLYLNSFNFSEFQSVEEVKNTIEQDLSNALQTQVIAEIFSINDNENLAISQVDGICIDDSLNQSDKKIAIVDDVNADMLTNASDTISKQSYHSHLLRSNCPVTNQPDWATVQIDITSAEIDKASLLEYILTYRQHNGFHEQCVEQIFADLTQKFAPTQLMVRAWYTRRGGIDINPCRVSHSELMPTPSRLIRQ

SEQ ID NO: 45022 - protein, 130 aa, Delongbacteria bacterium
  misc_feature (1)..(130): tr|A0A2G6P3P7|A0A2G6P3P7_9BACT NADPH-dependent 7-cyano- 7-deazaguanine reductase OS=Candidatus Delongbacteria b acterium OX=2044594 GN=queF PE=3 SV=1
MAVAEGRVFKFDDESEIKTEFLENFEYGGKKQEIVYETDEFNAVCPFSGLPDFGVLTIKYIPKKHIVELKSLKYYIISFRNVGIYQEKATDRIFNDLLNCLNPEYLEVKTVYNIRGGIKSTCTMNSKDYK

SEQ ID NO: 45023 - protein, 127 aa, Dependentiae bacterium; identical to SEQ ID NO: 44087
  misc_feature (1)..(127): tr|A0A1V5U6X6|A0A1V5U6X6_9BACT NADPH-dependent 7-cyano- 7-deazaguanine reductase OS=Candidatus Dependentiae bac terium ADurb.Bin246 OX=1852839 GN=queF PE=3 SV=1

SEQ ID NO: 45024 - protein, 132 aa, Desantisbacteria bacterium
  misc_feature (1)..(132): tr|A0A2H0A3D5|A0A2H0A3D5_9BACT NADPH-dependent 7-cyano- 7-deazaguanine reductase OS=Candidatus Desantisbacteria bacterium CG23_combo_of_CG06-09_8_20_14_all_40_23 OX=1 974550 GN=queF PE=3 SV=1
MQQSLNLSEYKGKQDNIRGLKITPDLEVVENQYNDNDYLVELKTNEFTTVCPKTGLPDFAIVTIQYKPDQYLVEQKSLKLYLVGYRNIGIFQEHATNKILEDFIACVQPKWAKIETIWNARGGIDVRVKRES

SEQ ID NO: 45025 - protein, 132 aa, Desantisbacteria bacterium; identical to SEQ ID NO: 45024
  misc_feature (1)..(132): tr|A0A2M7P528|A0A2M7P528_9BACT NADPH-dependent 7-cyano- 7-deazaguanine reductase OS=Candidatus Desantisbacteria bacterium CG_4_10_14_3_um_filter_40_18 OX=1974544 GN=q ueF PE=3 SV=1

SEQ ID NO: 45026 - protein, 125 aa, Desulfofervidus auxilii
  misc_feature (1)..(125): tr|A0A127AMG4|A0A127AMG4_9DELT NADPH-dependent 7-cyano- 7-deazaguanine reductase OS=Candidatus Desulfofervidus auxilii OX=1621989 GN=queF PE=3 SV=1
MSTLKYGEKAIAEAQLETWPNPCPERNYTIEITFPEFTCLCPRSGYPDFAVIRIKYIPDKYIIELKSLKLYLNKYRSVYLSHEEATNKIYAELYALLKPRFLEVIGDFNPRGNVKTIIKVSSEGN

SEQ ID NO: 45027 - protein, 172 aa, Desulfovibrio trichonymphae
  misc_feature (1)..(172): tr|A0A1J1DP96|A0A1J1DP96_9DELT NADPH-dependent 7-cyano- 7-deazaguanine reductase OS=Candidatus Desulfovibrio tr ichonymphae OX=1725232 GN=queF PE=3 SV=1
MASRSQDQTQNLRVLGTGRLSPAKNGPGAYLLESFGNCYPARMYVISIVFPEFTSLCPVTGQPDTGVICVEYIPDALCVESKSFKLYMFAFRNHQSFMETITNTVLDDLRVAIAPRWCRVKGFFAPRGGTRIHVFAEDFKQMSMEQDACVREAARAWKTEPCPHTVQPYAVV

SEQ ID NO: 45028 - protein, 140 aa, Dormibacter sp.
  misc_feature (1)..(140): tr|A0A2W5Z9F2|A0A2W5Z9F2_9BACT NADPH-dependent 7-cyano- 7-deazaguanine reductase OS=Candidatus Dormibacter sp. RRmetagenome_bin12 OX=2599630 GN=queF PE=3 SV=1
MSEDAEPRSLLESFDNRSPERDYTIQFTLPEFTCLCPRSGFPDFAVVHVRYVPGPRCVELKSLKMYVNAFRNVGVFHEDVVNGILSDLVSLLAPRYCEVIGDFNVRGNIKTVVRATHRDPGFGREPDGWWTPRDEHSATF

SEQ ID NO: 45029 - protein, 133 aa, Edwardsbacteria bacterium
  misc_feature (1)..(133): tr|A0A1F5RDM0|A0A1F5RDM0_9BACT NADPH-dependent 7-cyano- 7-deazaguanine reductase OS=Candidatus Edwardsbacteria bacterium GWF2_54_11 OX=1817851 GN=queF PE=3 SV=1
MPKKNYGLTLLGKKVTRPGGKLEAFPNKYPKRDYQVVLESAEFTAVCPITGQPDFGTITINYVPDRLIIESKSLKLYLWSFRNQGIFHEEAVNKILDDIVKIAKPRRCKVTGFFNARGGIAINVSASYNCEEK

SEQ ID NO: 45030 - protein, 133 aa, Edwardsbacteria bacterium; identical to SEQ ID NO: 45029
  misc_feature (1)..(133): tr|A0A3B9EB38|A0A3B9EB38_9BACT NADPH-dependent 7-cyano- 7-deazaguanine reductase OS=Candidatus Edwardsbacteria bacterium OX=2053551 GN=queF PE=3 SV=1

SEQ ID NO: 45031 - protein, 126 aa, Eisenbacteria bacterium
  misc_feature (1)..(126): tr|A0A538TSI3|A0A538TSI3_9BACT NADPH-dependent 7-cyano- 7-deazaguanine reductase OS=Candidatus Eisenbacteria ba cterium OX=2212470 GN=queF PE=3 SV=1
MPTRPSQSLATFPNPSPGRDYVIRHECPEYTAVCPMTGQPDFGTIIVIYVPDRRCVELKSLKLYLWSFRDQGHFFEQATNQILEDLVRALRPRRMTVIGRFNVRGGIGTTVVARHEGPRRSARRRA

SEQ ID NO: 45032 - protein, 149 aa, Eisenbacteria bacterium
  misc_feature (1)..(149): tr|A0A538U7N9|A0A538U7N9_9BACT NADPH-dependent 7-cyano- 7-deazaguanine reductase OS=Candidatus Eisenbacteria ba cterium OX=2212470 GN=queF PE=3 SV=1
MPGRPSRQLATFSNPHPQRDYVIRHECPEYTALCPVTGQPDFGTIVVVYTPDRHCIELKSLKLYLWSFRDEGHFFEQVTNQILDDLVRACRPRRMTVIGRFNVRGGIASTVVARHPASTGRTARRAGTRRGAERPGRRGGLSARRGARG

SEQ ID NO: 45033 - protein, 279 aa, Endobugula sertula
  misc_feature (1)..(279): tr|A0A1D2QPL7|A0A1D2QPL7_9GAMM NADPH-dependent 7-cyano- 7-deazaguanine reductase OS=Candidatus Endobugula sertu la OX=62101 GN=queF PE=3 SV=1
MNFMPAQNPLGEKISYSGQYDAGLLFPIARTESRQHLVLAGELPFRGEDRWTAYEVSWLDQQGKPQVRLAEFLLNSDSPNIIESKSFKLYLNSFNHTRFDDEQQVKSQFITDLSAVAGSVVTVEMMPLNSAHMLLMDGPIGICLDGIDVTIDEYHPNPKLLKVLTSQSVNEVLYSHLLKTNCPVTGQPDWATVFIEYTGPTICQHSLLKYIISFREHHDFHENSVERLFCDINAYCCPEHLAVYARYTRRGGLDINPLRSNYPEGIGVLGCNTMRIIRQ

SEQ ID NO: 45034 - protein, 155 aa, Endolissoclinum sp.
  misc_feature (1)..(155): tr|A0A1Z8SPB2|A0A1Z8SPB2_9PROT NADPH-dependent 7-cyano- 7-deazaguanine reductase OS=Candidatus Endolissoclinum sp. TMED37 OX=1986638 GN=queF PE=3 SV=1
MSDPNIYKDLTLLGGETNLPNNPDEAILESVPNPQKDVNYCVRFTAPEFTSLCPLTGQPDFAHLVIDYVPKDWLVESKSLKLYLGAFRNHGAFHEDCTISIARKITDLLEPEWLRIGGYWFPRGGIPIDIFYQTGNGPKGVWIPDQNVPTYRGRG

SEQ ID NO: 45035 - protein, 157 aa, Endolissoclinum sp.
  misc_feature (1)..(157): tr|A0A1Z9XY96|A0A1Z9XY96_9PROT NADPH-dependent 7-cyano- 7-deazaguanine reductase OS=Candidatus Endolissoclinum sp. TMED26 OX=1986636 GN=queF PE=3 SV=1
MPADNGDRLATLTQLGGNSDLPESPEAAILEKVANGQAGTDYLVRFTCPEFTSLCPMTGQPDFAHLVIDYVPEQWLVESKSLKLFLGAFRNHGAFHEDCTVMIGKRLIDTLTPKWLRIGGYWYPRGGIPIDVFFQSGPAPQSIWLPDQGVPSYRGRG

SEQ ID NO: 45036 - protein, 126 aa, Endomicrobium trichonymphae
  misc_feature (1)..(126): tr|A0A1E5IM38|A0A1E5IM38_9BACT NADPH-dependent 7-cyano- 7-deazaguanine reductase OS=Candidatus Endomicrobium tr ichonymphae OX=1408204 GN=queF PE=3 SV=1
MKNNFPVFNKVTPSVLETMPYEYAGKDINVRIETGEFTCLCPWTGLPDFAYVVINYTPAKSVVEFKSLKLYLQSYRMVGMVHESVVNNILSDLVKTVKPKEMCVNMEFGIRGGLTATVSAEYYGKK

SEQ ID NO: 45037 - protein, 93 aa, Endomicrobium trichonymphae
  misc_feature (1)..(93): tr|A0A1E5IJZ8|A0A1E5IJZ8_9BACT Uncharacterized protein OS=Candidatus Endomicrobium trichonymphae OX=1408204 GN =ATZ36_17430 PE=4 SV=1
MANAALVCRKIIFGGAFMKNNSLVFDKVATLKLYLRSYRMVGMVHESVVNSILSDLVKTIKPKEMCMNMEFGIRGGLTATVFGEYLSRETKEK

SEQ ID NO: 45038 - protein, 281 aa, Enterovibrio luxaltus
  misc_feature (1)..(281): tr|A0A291B714|A0A291B714_9GAMM NADPH-dependent 7-cyano- 7-deazaguanine reductase OS=Candidatus Enterovibrio lux altus OX=1927128 GN=queF PE=3 SV=1
MHKYKAAHKLAGMTLRQKTDYQNHYAPELLQPISRSLNRDNLNLKQILPFTGYDVWTLYELSWLNIKGLPQVGIGEVRIPATSPNLIESKSFKLYLNSLNQTKFAIWQEVVNVLATDLSACVGKSVDVTILPLEKFTNTTIVAFSGEHIDTQDIFIDDYEFNADLLKGAADGTIVTETLHSHLLKSNCLITNQPDWGSVQITYKGKRINRTKLLRYIVSFRHHKEFHEQCVERIFTDLMKYCQPKLLTVYARYTRRGGLDINPYRTNMGNIPSENNRLARQ

SEQ ID NO: 45039 - protein, 281 aa, Enterovibrio escacola
  misc_feature (1)..(281): tr|A0A2A5SZJ0|A0A2A5SZJ0_9GAMM NADPH-dependent 7-cyano- 7-deazaguanine reductase OS=Candidatus Enterovibrio esc acola OX=1927127 GN=queF PE=3 SV=1
MREYKDAKELFGLTLRPQIDYLEYYTPDLLQSVPRSLNRDYLNFGKILPFTGFDIWTLYELSWLNTKGLPQVAIGEVRLPATCENLIESKSFKLYLNSFNQTRFENWQKVVDTLTKDLSACAGEKVDVTIIPLEDFSNTPVVTLSGENIDKQDIEINNYTLNPNLLEGAANKPVVTETLNSNLLKSNCLVTKQPDWASVLIAYKGKRINREKLLRYIVSFRRHNEFHEQCVERIFTDLMTYCQPESLTVYARYTRRGGLDINPYRTNKGKTPNGNSRLARQ

SEQ ID NO: 45040 - protein, 127 aa, Entotheonella gemina
  misc_feature (1)..(127): tr|W4LPN0|W4LPN0_9BACT NADPH-dependent 7-cyano-7-deazag uanine reductase OS=Candidatus Entotheonella gemina OX= 1429439 GN=queF PE=3 SV=1
MQRVAAAADLDVIDLPEIVIVDNLVRERSYSVTFTIPEFTCVCPMTGQPDFATFRITYVPDAYLIELKGLKLYINAYRNVGIYHEFVTNKILDDLVSACQPLRMDIEGDFNVRGGIHTVVNAGYERA

SEQ ID NO: 45041 - protein, 127 aa, Entotheonella factor
  misc_feature (1)..(127): tr|W4LCQ1|W4LCQ1_9BACT NADPH-dependent 7-cyano-7-deazag uanine reductase OS=Candidatus Entotheonella factor OX= 1429438 GN=queF PE=3 SV=1
MQRVAAAADLDVMDLPEIVIVDNLVRERSYSVTFTIPEFTCVCPMTGQPDFATFRITYVPDAHLIELKGLKLYINAYRNVGIYHEFVTNKILDDLVSACQPLRMEIEGDFNVRGGIHTVVHASYERP

SEQ ID NO: 45042 - protein, 283 aa, Erwinia haradaeae
  misc_feature (1)..(283): tr|A0A451DME3|A0A451DME3_9GAMM NADPH-dependent 7-cyano- 7-deazaguanine reductase OS=Candidatus Erwinia haradaea e OX=1922217 GN=queF PE=3 SV=1
MSTSNYFNSHILPEQFLGKPTTYHDIYQPMLLRAIPRSLNRELINFDLNHIGLTGEDIWTLYEISWLNQKGLPQVSIGELVLDMRSTNLIESKSLKLYLNSFSQTRFLSLETVRQTIEHDLSNCAIGLVTVTLFQLKDVRKTTIGHLPGVCIDEQDIRINNYELNSHYLHNSTAQDIVQEQLVSHLFKSNCLITRQPDWATIQISYYGLRIHHESLLRYLISYRKHYEFHEQCAERIFHDILTYCNPNKLSVYIRYTRRGGIDINPWRSNTEYIPYRTRLVRQ

SEQ ID NO: 45043 - protein, 281 aa, Erwinia dacicola
  misc_feature (1)..(281): tr|A0A1E7YXR6|A0A1E7YXR6_9GAMM NADPH-dependent 7-cyano- 7-deazaguanine reductase OS=Candidatus Erwinia dacicola OX=252393 GN=queF PE=3 SV=1
MSSYDHHQALEDLTLGKPTQYHDSYQPALLQAVPRSLNREPLGLYQDTLPFTGADIWTLYELSWLNSKGLPQVAVGEVVLDADSVNLIESKSFKLYLNSFNQTKFADWGEVRQTLERDLSACAEGKVSVALFRLQEIEGQPLGHFDGTCIDEQDIVINDYQFNADYLRNAADGKIVEEQLVSHLLKSNCLITNQPDWGSVQISYRGSRIQRAVLLRYLVSFRHHNEFHEQCVERIFSDILRYCQPESLSIYARYTRRGGLDINPWRTNVQFKPGRSRLVRQ

SEQ ID NO: 45044 - protein, 133 aa, Fermentibacteria bacterium
  misc_feature (1)..(133): tr|A0A496UE75|A0A496UE75_9BACT NADPH-dependent 7-cyano- 7-deazaguanine reductase OS=Candidatus Fermentibacteria bacterium OX=2044591 GN=queF PE=3 SV=1
MTDKADLNGLSSLGSGSDPSRRLETFPNHHTDRDYIVTLQTDEFTCICPKTGQPDFAGINIEYIPDERIVESKSLKLYFWSFRNEGVFHEHVANIMLDDLVEALKPRWCRVIANFGIRGGISISVDAEYSRDK

SEQ ID NO: 45045 - protein, 133 aa, Fermentibacteria bacterium
  misc_feature (1)..(133): tr|A0A2G6LWZ8|A0A2G6LWZ8_9BACT NADPH-dependent 7-cyano- 7-deazaguanine reductase OS=Candidatus Fermentibacteria bacterium OX=2044591 GN=queF PE=3 SV=1
MGEQTLDGLTLLGGSNQFQGLETFPNMNPERDYTVTLSTDEFTCVCPKTGQPDFASITVTYIPESKIVESKSLKLYFLSFRNRGIFHEHVTNVILDDLVEALEPRWCQVTADFGVRGGISIRVNAQFRKGGTT

SEQ ID NO: 45046 - protein, 152 aa, Filomicrobium marinum
  misc_feature (1)..(152): tr|A0A0D6JJ30|A0A0D6JJ30_9RHIZ NADPH-dependent 7-cyano- 7-deazaguanine reductase OS=Candidatus Filomicrobium ma rinum OX=1608628 GN=queF PE=3 SV=1
MGSKPDVTLLGHAAAIPQAPEEAVLERVENPHVDTHYLARFTAPEFTSVCPVTGQPDFAHLVIDYVPDAWLVESKSLKLYLTSFRNHGAFHEDCTVTIGKRIADLIAPHYLRIGGYWYPRGGIPIDVFWQVGKCPEDVWLPDQGVAPYRGRG

SEQ ID NO: 45047 - protein, 130 aa, Firestonebacteria bacterium
  misc_feature (1)..(130): tr|A0A1F5UNH2|A0A1F5UNH2_9BACT NADPH-dependent 7-cyano- 7-deazaguanine reductase OS=Candidatus Firestonebacteri a bacterium GWA2_43_8 OX=1817858 GN=queF PE=3 SV=1
MKRHYTDKHAIAGIKTTMPELETFPNQYKNYVITIDIPEYSSICPKSGLPDCGKMTLKYIPNKKCMELKSLKYYILAYRNLGIFYENATNKIFADFLKAVKPKGAYIKGEFTPRGGISTSIEVAYGRTIK

SEQ ID NO: 45048 - protein, 130 aa, Firestonebacteria bacterium
  misc_feature (1)..(130): tr|A0A1F5V1X6|A0A1F5V1X6_9BACT NADPH-dependent 7-cyano- 7-deazaguanine reductase OS=Candidatus Firestonebacteri a bacterium RIFOXYC2_FULL_39_67 OX=1817861 GN=queF PE=3 SV=1
MKRQYTDKHAIAGINTVMPELETFPNQYKNYIITIDIPEYSSICPKSGLPDCGKLVIRYIPDKKCMELKSLKYYILAFRNLGIFYENATNKIFSDFIKAVKPKGAYIKGDFTPRGGISTSVEVFYGKPVK

SEQ ID NO: 45049 - protein, 117 aa, Fischerbacteria bacterium
  misc_feature (1)..(117): tr|A0A1F5VB02|A0A1F5VB02_9BACT NADPH-dependent 7-cyano- 7-deazaguanine reductase OS=Candidatus Fischerbacteria bacterium RBG_13_37_8 OX=1817863 GN=queF PE=3 SV=1
MKKEMVTLIETFDNPKPERDYEIVIECPEFTCLCPKTGQPDFASITIAYIPDTLCIELKSLKLYIWSYRNEGAFHEAVANKILDDLVWACKPRSMKITADFNLRGGIHTTVIAEYKK

SEQ ID NO: 45050 - protein, 281 aa, Fokinia solitaria
  misc_feature (1)..(281): tr|A0A2U8BRG7|A0A2U8BRG7_9RICK NADPH-dependent 7-cyano- 7-deazaguanine reductase OS=Candidatus Fokinia solitari a OX=1802984 GN=Fsol_00127 PE=4 SV=1
MDTFLGKNTKIPTQYAPYVLCKIPREFSRKTFIDSQSSVSKMHGFDLWRCYELIWLDSYHIPEACVLEFKYDAQSEYLLESKSAKIYLSSLRNRTFRDRDELSITISDDLSSALETTINVRIFDIDSYLQPVKRQGICLDTKTKELEELSMAALAKDTFHRRMDYVTHCNSTTNVDDVMYTNTFRCNCPITEQPDLATVTIHYTGIELNKSALSIYLNSFEKQSGFHEFSIERILLDITLKYEASNVMVYGNYMRRGGIEINPYRANYLIDSHHISRTLRQ

SEQ ID NO: 45051 - protein, 281 aa, Fukatsuia symbiotica
  misc_feature (1)..(281): tr|A0A2U8I7Y0|A0A2U8I7Y0_9GAMM NADPH-dependent 7-cyano- 7-deazaguanine reductase OS=Candidatus Fukatsuia symbio tica OX=1878942 GN=queF PE=3 SV=1
MSSYHTSQVFSKLTLGKVTKFKDQYDETLLQTLPRSTNREQIGLCPDNLPFHGADIWTLYELSWLNNKGVPQVAVGEISIKADSPYLIESKSFKLYLNSFNQTRFLNWETVADRLKNDLSTRAESDVSVTLRHLDEIVNQSITNLSGECIDQEDISIDDYAFSTKYLQTACGESIVEETLVSHLLKSNCLITNQPDWGSVQIYYRGKKINRAALLHYLVSFRHHNEFHEHCVERIFNDLINFCRPEQLSVYARYTRRGGLDINPWRSNTDFTPATGRLARQ

SEQ ID NO: 45052 - protein, 139 aa, Gallionella acididurans
  misc_feature (1)..(139): tr|A0A139BVQ2|A0A139BVQ2_9PROT NADPH-dependent 7-cyano- 7-deazaguanine reductase OS=Candidatus Gallionella acid idurans OX=1796491 GN=queF PE=3 SV=1
MTTQPTKTLETFPNPGPQRDYHIHMEIPEFTCLCPKTGQPDFATLILDYIADQKCVELKSLKLYIWSFRNEGHFHEDVTNRILDDLAAAIQPRFMRLTAKFYVRGGIFTNVVAEHRKPGWQPAPRVELNRFDSQPSTRG

SEQ ID NO: 45053 - protein, 316 aa, Gastranaerophilales bacterium
  misc_feature (1)..(316): tr|A0A292QT11|A0A292QT11_9BACT NADPH-dependent 7-cyano- 7-deazaguanine reductase QueF OS=Candidatus Gastranaero philales bacterium HUM_1 OX=1916322 GN=CPT83_03535 PE=4 SV=1
MWFWKLRLVLERISLMIEKDRTEEIASTHLGKRVEMCDQYNPNLLVAVPRIDNRRHYNIDNNNLPFEGWDIWHAYEFSALTENGLPVTRLLKIKYNCTSEFIIESKSLKLYLNSYNMTRLGENISECLNICKEKIEKDLSDKLKTNVTVKFLDNDIKKIEIFQQFRNILNFVDENSLKINHFKESPELLEAEDNNQKSEHRIMFDSLRSNCRVTHQPDFGDVFIYYKSKKHIKEHSLVKYLCSFRSEYHFHEECCEMIYKRLYDLLDKDDELFVSALYTRRGGIDICPTRWSKNFTPKEVADLIDTSKYARCGIKQ

SEQ ID NO: 45054 - protein, 300 aa, Gastranaerophilales bacterium
  misc_feature (1)..(300): tr|A0A292SUD7|A0A292SUD7_9BACT NADPH-dependent 7-cyano- 7-deazaguanine reductase QueF OS=Candidatus Gastranaero philales bacterium HUM_21 OX=1916319 GN=CPT85_01940 PE= 4 SV=1
MQNKTEKIASTHLGKKSTGSLSYDPSLLVPIPRNENRELYKIDNDNLPFLGVDVWHAYEFSCLTSNGLPVTRVIKLKYNSDSEYLIESKSLKLYLNSFNMSSFGQTIDDCLEICKSIIEKDLSNALKTEVSINFLTDDTKRVQIFDEFENILNFVDTNKLKIEKFKESPQLLELELLSDEKEYYLTFDSLRSNCRVTHQPDFGDIFIYYKSNHHIKEDSLVKYLCSFRSEFHFHEECCEMIYKRLYDVLNINKNGDLFVCALYTRRGGIDICPVRWSKDCKNMAVPLIDTAQYARKSIKQ

SEQ ID NO: 45055 - protein, 273 aa, Glomeribacter gigasporarum
  misc_feature (1)..(273): tr|G2JAM6|G2JAM6_9BURK NADPH-dependent 7-cyano-7-deazag uanine reductase OS=Candidatus Glomeribacter gigasporar um BEG34 OX=1070319 GN=queF PE=3 SV=1
MSNLSPLGKPVTYTGQYDAGLLCPLDRRRSRDAIGVPAQLPFFGADIWNAYELSWLNERGKPHIAIATFCVPANSPNIVESKSFKLYLGSFSSTQVASVDALCDTLKRDVSACAGATVSVQLTPPVGFGQLMLGELGGVSLDRLDLDIEIDEPDASLLSADAKQAPIDETVVSNLLKSNCPVTGQPDWGSVQIRYVGPPIDHAGLLRYIVSYRHYADFHEQCVERMFMDIQRMCKPVKLAIYARYTRRGGLDINPFRASFDAPLPDNVRTARQ

SEQ ID NO: 45056 - protein, 129 aa, Goldbacteria bacterium
  misc_feature (1)..(129): tr|A0A2N1W2C4|A0A2N1W2C4_9BACT NADPH-dependent 7-cyano- 7-deazaguanine reductase OS=Candidatus Goldbacteria bac terium HGW-Goldbacteria-1 OX=2013807 GN=queF PE=3 SV=1
MAKAEGRSYNFLPESKIDTKALETIKYDGGNQLIEYKTREFSAVCPFSGLPDVAEVVITYIPSAKILELKALKYYFVSFRNVGIYQEKATDRIFSDIKKILNPKYLLVETIYNTRGGIDAKCAMEFGKR

SEQ ID NO: 45057 - protein, 280 aa, Gullanella endobia
  misc_feature (1)..(280): tr|A0A143WPY4|A0A143WPY4_9ENTR NADPH-dependent 7-cyano- 7-deazaguanine reductase OS=Candidatus Gullanella endob ia OX=1070130 GN=queF PE=3 SV=1
MYNNQYQYLKSLTLGKPTKYQECYNPSLLQTVPRSFNRDSLGLKTTKLPFHGADIWTLYELSWLNNAGLPQLAIGEVSFNATNTYLIESKSFKLYLNSFNQTCFPSCEAVRIRLSEDLSRCANGEVQVILRTLSDFARSPILDFDGECIDNQPICINNYTLTNRYLEGASSGSVVNEILVSHLLKSNCLITHQPDWGSVQIRYQGKCIDREALLRYLVSFRQHNEFHEQCVERIFCDLMHFCHPKTLTVYARYNRRGGLDINPWRSNIHFSPETGRLVRQ

SEQ ID NO: 45058 - protein, 280 aa, Hamiltonella defensa
  misc_feature (1)..(280): tr|A0A249DZ95|A0A249DZ95_9ENTR NADPH-dependent 7-cyano- 7-deazaguanine reductase OS=Candidatus Hamiltonella def ensa (Bemisia tabaci) OX=672795 GN=queF PE=3 SV=1
MHDNEDVYSKYLGKKSDYIDTYTPSLLEPIPRVLGREKIGLMDDTIPFDGFDLWTAFELSWLNQKGKPMVGMAEFKVPAQSKNLIESKSLKLYLNSLNQSHFDSLKSLQSVLSKDFSNAAMGAVSVTVSEGMKNDDLHIHHPKAVNIDDIDIEVHDYRFNEGYLKDATHETAPFVSETLMSHLLKSNCLVTHQPDWGSVFIKYEGHPIDKEKLLRYIISFRQHHEFHEQCVERIFLDIKKYCRPEKLTVFARYTRRGGLDINPFRSDYESSSNVGRLIRQ

SEQ ID NO: 45059 - protein, 280 aa, Hamiltonella defensa
  misc_feature (1)..(280): tr|A0A2D3T770|A0A2D3T770_9ENTR NADPH-dependent 7-cyano- 7-deazaguanine reductase OS=Candidatus Hamiltonella def ensa OX=138072 GN=queF PE=3 SV=1
MQDNDGIYAKHLGEKSDYIETYTPSLLEPVPRAFGREKIGLIDDTLPFDGFDLWTAFELSWLNQKGKPMVGMAEFKVPAQSKNLIESKSLKLYLNSLNQSHFDSSKSLQSVLSKDLSNTAMGAVSVTVFEGMKNDDLHIHHPEGVNIDDIDIQVDDYRFNEGYLKDATQETAPFVSETLMSHLLKSNCLVTHQPDWGSVFIKYEGNKIDREKLLRYIISFRQHHEFHEQCVERIFLDIKKYCRPEKLTVFARYTRRGGLDINPFRSNYESIPNIKRLIRQ

SEQ ID NO: 45060 - protein, 132 aa, Hydrogenedentes bacterium
  misc_feature (1)..(132): tr|A0A3M1IJF6|A0A3M1IJF6_9BACT NADPH-dependent 7-cyano- 7-deazaguanine reductase OS=Candidatus Hydrogenedentes bacterium OX=2030809 GN=queF PE=3 SV=1
MANPVQGTYEGKQDHIRELQTPDVEVFKNIYEDKNYKIRLKFPEFTAICPKTGLPDFGTVFIEYVPDKVCLELKSLKEYFLFYRDVGIFHENVVNKILDDLVAVASPRKMKVKVTYRVRGGIKTTVCRKYKK

SEQ ID NO: 45061 - protein, 272 aa, Hydrogenedentes bacterium
  misc_feature (1)..(272): tr|A0A2A5E3Z3|A0A2A5E3Z3_9BACT NADPH-dependent 7-cyano- 7-deazaguanine reductase QueF OS=Candidatus Hydrogenede ntes bacterium OX=2030809 GN=COA73_06500 PE=3 SV=1
  misc_feature (16)..(16): Xaa can be any naturally occurring amino acid
  misc_feature (19)..(20): Xaa can be any naturally occurring amino acid
  misc_feature (204)..(204): Xaa can be any naturally occurring amino acid
MADHIPLGKPTSYTDXYDXXLLFPVPRKEGREDLGLSGELPFSGEDIWNAYEISWLTPSGKPEVATAEIRVPAVSPNLVESKSLKLYLNSLNGTMYQNMADVESVIQNDLSKVAGVTVTVNILGPSHPQKSADVPVQGECIDNLDVSVSSSDVSANLLSVNTVGVNIEETLYTHLFRSLCPITGQPDWATVSIQYAGNRIDQAXLLTYLISYRSHNEFHEHCVERIFMDILNRCEPEKLSVYARYTRRGGIDINPYRSNFPSTPDNVPAWRQ

SEQ ID NO: 45062 - protein, 112 aa, Kapabacteria sp.
  misc_feature (1)..(112): tr|A0A1M3KYK8|A0A1M3KYK8_9BACT NADPH-dependent 7-cyano- 7-deazaguanine reductase OS='Candidatus Kapabacteria' t hiocyanatum OX=1895771 GN=queF PE=3 SV=1
MTIETFPNPRPERPYTITHVNPEFTSVCPKTGLPDFGTMTVEYVPDATCIELKALKYYYLDFRNKGIFYEAVTNQILDDLVACCAPRSMKVTAEWKARGGINSIIVAEYVKS

SEQ ID NO: 45063 - protein, 123 aa, Kentron sp.
  misc_feature (1)..(123): tr|A0A451C2U0|A0A451C2U0_9GAMM NADPH-dependent 7-cyano- 7-deazaguanine reductase OS=Candidatus Kentron sp. G OX =2126341 GN=queF PE=3 SV=1
MPNPGSLETFENPYPRREYTIRIHVPEFTCLCPKTGQPDFATLHIEYIPGQRCVELKSLKQYVWSYRGEGAFHEAVTNRILDDLVAACAPRFLRVTAEFNVRGGIYTTVAVEHGEGNVSKGMS

SEQ ID NO: 45064 - protein, 131 aa, Kentron sp.
  misc_feature (1)..(131): tr|A0A450XNJ2|A0A450XNJ2_9GAMM NADPH-dependent 7-cyano- 7-deazaguanine reductase OS=Candidatus Kentron sp. MB O X=2138164 GN=queF PE=3 SV=1
MTMTTSAAATGLEIFENPYPEREYTIRIRIPEFTCVCPKTGQPDFATLHLEYIPQTACIELKSLKNYVWSYREVGAFHEAVTNRILEDLVSACQPRFLRISAEFNVRGGIYTTVTAEHRARGWSPLAAVPG

SEQ ID NO: 45065 - protein, 271 aa, Kinetoplastibacterium galatii
  misc_feature (1)..(271): tr|M1LTN0|M1LTN0_9PROT NADPH-dependent 7-cyano-7-deazag uanine reductase OS=Candidatus Kinetoplastibacterium ga latii TCC219 OX=1208921 GN=ST1E_0458 PE=3 SV=1
MGNINPLGHDIEYSFKYDPNYLFAIPRKTISKIPMYGLDIWNIYELSWLNNNGKPEIAIAKIEIPSNSLNIIESKSLKLYLNSFNNTNFENINEVKDILNKDISNAIQCPVFIKMITPENFHMLYIEKSSDVGLCIDDIEVKINIYKPSPELLELSNTSVDVVSETIISRMFRSRCPVTGQPDWASIKIKYKGIKIDHSSILKYIISYRDHLGFHENCIDKIFMDISYTCQPNYLSVYGNFTRRGGIDINPWRTSDRNEPPPLENCRTERQ

SEQ ID NO: 45066 - protein, 275 aa, Kinetoplastibacterium desouzaii
  misc_feature (1)..(275): tr|M1M3C9|M1M3C9_9PROT NADPH-dependent 7-cyano-7-deazag uanine reductase OS=Candidatus Kinetoplastibacterium de souzaii TCC079E OX=1208919 GN=CDSE_0416 PE=3 SV=1
MSKIENPLGKNIEYPSKYNPNILFPICRKNHIEIPHISYEGFDLWNAYELSWLNKNGKPEIAIGKFQFPCNSKNIIESKSLKIYLNSLNQTRFIDHNDLQKTIYKDLSIATESNVLVDIIMPSNFKDMHMEDLDGLCIDNINIETNTYLPSPELLKNDNQKNIAYVNETIMSRLLRSNCPITKQPDWACIQIKYRGFKINHESLLKYIISYRNHDAYHENCIEKIFVDIMQNCNPEFLSVYAKYTRRGGIDINPWRTTNLQEYNPIINNTKTTRQ

SEQ ID NO: 45067 - protein, 129 aa, Kryptonium thompsoni
  misc_feature (1)..(129): tr|A0A0P1M056|A0A0P1M056_9BACT NADPH-dependent 7-cyano- 7-deazaguanine reductase OS=Candidatus Kryptonium thomp soni OX=1633631 GN=queF PE=3 SV=1
MEERKLKYGEEAILNAQLETWENPYPDRDYKIEITFPEFTCLCPRSGYPDFATIKIVYIPDKYIVELRSLKLYLNKYRSEYISHEAATNKIYDDLEKILKPRFLEVVGDWNPRGNVKTIITVSSKDKQR

SEQ ID NO: 45068 - protein, 134 aa, Lambdaproteobacteria bacterium
  misc_feature (1)..(134): tr|A0A1F6GPZ3|A0A1F6GPZ3_9PROT NADPH-dependent 7-cyano- 7-deazaguanine reductase OS=Candidatus Lambdaproteobact eria bacterium RIFOXYD2_FULL_56_26 OX=1817773 GN=queF P E=3 SV=1
MAEASGKSFEFEGPEKIQTGFLETFEFLSPNQYILTETPEFSAVCPFSGLPDVGVLRIEYYPRGHKCIELKSLKYYMTSFRNVGLFQEGVTKRIYDDLAQVLGTTDLKVTTIYLPRGGFTTTCVEGRLSHTPTL

SEQ ID NO: 45069 - protein, 133 aa, Lambdaproteobacteria bacterium
  misc_feature (1)..(133): tr|A0A1F6GFT2|A0A1F6GFT2_9PROT NADPH-dependent 7-cyano- 7-deazaguanine reductase OS=Candidatus Lambdaproteobact eria bacterium RIFOXYD2_FULL_50_16 OX=1817772 GN=A2527_ 02590 PE=3 SV=1
MAQAEGLTFEFDGPEAIRTDLLETFAFDSKGQYIHTETSEFSAVCPFSGLPDLGVLTIEYYPEGGRCVELKSLKYYMTSFRNVGLYQEGVTKRIFEDLKVLLGTHNLKVSTLYQPRGGFTTRCVEGRLNPEPH

SEQ ID NO: 45070 - protein, 124 aa, Latescibacteria bacterium
  misc_feature (1)..(124): tr|A0A496SCI3|A0A496SCI3_9BACT NADPH-dependent 7-cyano- 7-deazaguanine reductase OS=Candidatus Latescibacteria bacterium OX=2053570 GN=queF PE=3 SV=1
MDEKLKELRSVLRTIPNEFEGRDYTVEIFTEELTSLCPFRGLPDFYGLRIVYVPDASLVELKSLKFYLQGFREVGITHESLLNVIFEDLLELLKPKYLKAELYVNIRGGIRTTVRREYGDQGTK

SEQ ID NO: 45071 - protein, 122 aa, Latescibacteria bacterium
  misc_feature (1)..(122): tr|A0A3D4H191|A0A3D4H191_9BACT NADPH-dependent 7-cyano- 7-deazaguanine reductase OS=Candidatus Latescibacteria bacterium OX=2053570 GN=queF PE=3 SV=1
MGSEENRSLVTVPNPEPDCRYTVTFRYSEFTALYPTTFEPVFATVSIRYVPGETCLETVSLKRYLGTFRNETMFYEGLVNRILDDLVSACKPREMDVTGAFTVRGGIESSVSARYLSGGSDD

SEQ ID NO: 45072 - protein, 154 aa, Liberibacter africanus
  misc_feature (1)..(154): tr|A0A0G3I240|A0A0G3I240_LIBAF NADPH-dependent 7-cyano- 7-deazaguanine reductase OS=Candidatus Liberibacter afr icanus PTSAPSY OX=1277257 GN=queF PE=3 SV=1
MSEKTIEGLSILGGKGKLFNTPQEALLEKIPSQNQQLNYVVRFTIPEFTSLCPVTSQPDFAHIIIDYIPKDWLVESKSLKLFMASFRNYHSFHEDCTLYIAQRLMSSLEPKWLRIGAYWYPRGGIPIDIFWQNCAPPTGIFLPNQDVPQYRGRG

SEQ ID NO: 45073 - protein, 154 aa, Liberibacter europaeus
  misc_feature (1)..(154): tr|A0A2T4VXU1|A0A2T4VXU1_9RHIZ NADPH-dependent 7-cyano- 7-deazaguanine reductase OS=Candidatus Liberibacter eur opaeus OX=744859 GN=queF PE=3 SV=1
MPKSKVEGLSILGKKTKICNNPDNAVLEKIPSKNNELNYVVRFTVPEFTSLCPITAQPDFAHIIIDYIPKDWLIESKSLKLFMASFRNYHSFHEDCSIYIAKRLVTALEPKWMRIGAYWYPRGGIPIDIFWQTSSPPDGIFLPIQDVHSYRGRG

SEQ ID NO: 45074 - protein, 109 aa, Lindowbacteria bacterium
  misc_feature (1)..(109): tr|A0A1F6LN34|A0A1F6LN34_9BACT Uncharacterized protein OS=Candidatus Lindowbacteria bacterium RIFCSPLOWO2_12_F ULL_62_27 OX=1817870 GN=A3G34_11370 PE=4 SV=1
MSAFDTLPNVHGISEVALRSAFSTICSVTDERFAGEVIVTYRPGALLIEYLSFGDFIRGFDEAETSSEALAREIFDTVKEIAQPTALRVEIDIQTASHIPAWCKIEEGY

SEQ ID NO: 45075 - protein, 141 aa, Lloydbacteria bacterium
  misc_feature (1)..(141): tr|A0A1G2DGW8|A0A1G2DGW8_9BACT NADPH-dependent 7-cyano- 7-deazaguanine reductase OS=Candidatus Lloydbacteria ba cterium RIFCSPHIGHO2_02_FULL_54_17 OX=1798664 GN=A3C93_ 04210 PE=3 SV=1
MKLSQAKKVWSDSSILKSIPNPSKKGYEIKIKNPEVTFLGVNDQPDFTTIFLTFYPSEKVIELRSLKKYFQQFRNSIVSYERLINVIYDDLVKVYEPERLRIVMTFAARGGLSSRLAIDSDWKVRGGKEQFRDWIGQREEW

SEQ ID NO: 45076 - protein, 133 aa, Lloydbacteria bacterium
  misc_feature (1)..(133): tr|A0A1G2DDF4|A0A1G2DDF4_9BACT NADPH-dependent 7-cyano- 7-deazaguanine reductase OS=Candidatus Lloydbacteria ba cterium RIFCSPLOWO2_01_FULL_50_20 OX=1798665 GN=A2942_0 4260 PE=3 SV=1
MWSDCSILKAILNPSRKGYEVKIKNPEVTFLGVSNQPDYATVFLTFYPAMRVIELRSLKLYFHQFRDMIVSYERLINIIYDDLMKVYEPERLRVVMTFAARGGISSKLTIDSDWKVRGGKERFKDWFGQPEEW

SEQ ID NO: 45077 - protein, 132 aa, Macondimonas diazotrophica
  misc_feature (1)..(132): tr|A0A4Z0F9S9|A0A4Z0F9S9_9GAMM NADPH-dependent 7-cyano- 7-deazaguanine reductase OS=Candidatus Macondimonas dia zotrophica OX=2305248 GN=queF PE=3 SV=1
MPAPGAPTPALLETFPNPHPERDYTIRIRMPEFTCLCPKTGQPDFAVLHLEYVADQRCVELKSLKQYIWAYRDQGAFHEAVTNRILGDLVTACAPRAMRLTAEFNVRGGIYTHVVVEHRAPGWTPPAPLHLP

SEQ ID NO: 45078 - protein, 136 aa, Magasanikbacteria bacterium
  misc_feature (1)..(136): tr|A0A0G1YCS8|A0A0G1YCS8_9BACT NADPH-dependent 7-cyano- 7-deazaguanine reductase OS=Candidatus Magasanikbacteri a bacterium GW2011_GWA2_56_11 OX=1619044 GN=queF PE=3 S V=1
MPTSASDLKNLTKLGSKAAPSRTLEVFPNHAPGKLTVKLECTEFTCRCPLTGQPDYAVIDIYYVPDKFVVESKSLKLYLETFRDSGIFHEHLAVDIAGDFARFVKPLSVDVVVKFNVRGGIAIAAEYHWERAARKK

SEQ ID NO: 45079 - protein, 165 aa, Magasanikbacteria bacterium
  misc_feature (1)..(165): tr|A0A1F6NW72|A0A1F6NW72_9BACT NADPH-dependent 7-cyano- 7-deazaguanine reductase OS=Candidatus Magasanikbacteri a bacterium RIFOXYC2_FULL_42_28 OX=1798704 GN=queF PE=3 SV=1
MPTTKEDLKKLTQLGKGSAKPARTLEVFPNHSGQNLEVELHCTEFTCRCPLTGQPDYAEILITYVPNKYVVESKSMKLYLETFREVGVFHEHLAVDIGNDFVKFVKPKKCEVEVIFNTRGGIAISARWKMGNKATNSEGFDDDETYFTKDDSGIIRAYVNGREEK

SEQ ID NO: 45080 - protein, 128 aa, Magnetobacterium bavaricum
  misc_feature (1)..(128): tr|A0A0F3GPA1|A0A0F3GPA1_9BACT NADPH-dependent 7-cyano- 7-deazaguanine reductase OS=Candidatus Magnetobacterium bavaricum OX=29290 GN=queF PE=3 SV=1
MQYGEENIANAQLELWGNPAPEKDYEISIEFPEFTCLCPRSGYPDFATIKITYIPDANIVELKSLKLYLNSFRNKAISHEQAANVIYDELYKKLTPRYLCVVGDFNPRGNVKTIIKVTSSNIEKIQVI

SEQ ID NO: 45081 - protein, 105 aa, Magnetoglobus multicellularis
  misc_feature (1)..(105): tr|A0A1V1P4W1|A0A1V1P4W1_9DELT NADPH-dependent 7-cyano- 7-deazaguanine reductase OS=Candidatus Magnetoglobus mu lticellularis str. Araruama OX=890399 GN=queF PE=3 SV=1
MTKPFDNVNQINDIQSDLLEVVSYDYKGHRKIDVKIEQPEFSSLCPMTGLPDFASIHIHYTPNQYIVELKSLKYYLLQYRNVGIFYEHLINVILDHLVCKVQPEK

SEQ ID NO: 45082 - protein, 132 aa, Magnetomorum sp.
  misc_feature (1)..(132): tr|A0A0N0V140|A0A0N0V140_9DELT NADPH-dependent 7-cyano- 7-deazaguanine reductase OS=Candidatus Magnetomorum sp. HK-1 OX=1509431 GN=queF PE=3 SV=1
MDQKNLTTQKADAIQSSVLEVVSYDYCNKRNIEVNIKQPEFTSLCPMTGLPDFASIYIQYIPDKHIVELKSLKYYLLQYRNVGIFYEHLVNVILDHLVEKVKPVQMTIIGDFTPRGGIQTTVKATYPESRNS

SEQ ID NO: 45083 - protein, 119 aa, Magnetoovum chiemensis
  misc_feature (1)..(119): tr|A0A0F2J228|A0A0F2J228_9BACT NADPH-dependent 7-cyano- 7-deazaguanine reductase OS=Candidatus Magnetoovum chie mensis OX=1609970 GN=queF PE=3 SV=1
MKYGEKNIAASKIETWPNPFPDKDYEIAISFSEFTCLCPRSGYPDFATIKIMYVPDKFIVELKSLKLYLNSFRNIAVSHEEVTNLIHNELVLNLNPRSIEVIGDFNPRGNVKTIIKVAK

SEQ ID NO: 45084 - protein, 129 aa, Margulisbacteria bacterium
  misc_feature (1)..(129): tr|A0A1F6QC48|A0A1F6QC48_9BACT NADPH-dependent 7-cyano- 7-deazaguanine reductase OS=Candidatus Margulisbacteria bacterium GWE2_39_32 OX=1817872 GN=queF PE=3 SV=1
MVKAEGISFDFFGVEYIKSSFLEVFPYQGEKQYITYTTKEFSAVCPFSGLPDIAQVTIEYIPDEFCLELKSLKYYFISYRNVGIYQEAVTNMLFSDIYAVLKPHYLKVTTVYNTRGGIDATCYIEKGNK

SEQ ID NO: 45085 - protein, 129 aa, Margulisbacteria bacterium; identical to SEQ ID NO: 45084
  misc_feature (1)..(129): tr|A0A2W4K4D5|A0A2W4K4D5_9BACT NADPH-dependent 7-cyano- 7-deazaguanine reductase OS=Candidatus Margulisbacteria bacterium OX=2053573 GN=queF PE=3 SV=1

SEQ ID NO: 45086 - protein, 126 aa, Marinamargulisbacteria bacterium
  misc_feature (1)..(126): tr|A0A328RQH7|A0A328RQH7_9BACT NADPH-dependent 7-cyano- 7-deazaguanine reductase OS=Candidatus Marinamargulisba cteria bacterium SCGC AG-439-L15 OX=2184346 GN=queF PE= 3 SV=1
MPKAEGLTLPFESEDKVRVDLLEVFEYEGNRQNIKYETKEFSAVCPFSGLPDFAQVIIEYIPNTLIVELKSLKYYLTSYRQVGIYQEHLTNRLANDLYTLLSPESLKITTIYNTRGGIDTTCVIEK

SEQ ID NO: 45087 - protein, 268 aa, Marinamargulisbacteria bacterium
  misc_feature (1)..(268): tr|A0A328RV62|A0A328RV62_9BACT NADPH-dependent 7-cyano- 7-deazaguanine reductase QueF OS=Candidatus Marinamargu lisbacteria bacterium SCGC AAA071-K20 OX=2184347 GN=DID 80_02950 PE=4 SV=1
MEEKVTLGKPIIYPNTYNKNYLEKISRESYRNSISIDHLSPYGFDAWNIYEFSCLTNKNTPMVAVGQLIIPSSSNYIVESKSLKYYLNSFNMASFESLNQVQSVILVDLEQLLDVKCSIKLNPPSDWKMALSEPNGICLDSSNSNSDSRPVPELITSKSSISIQEQFYSHHFRSLCPVTGQPDWASIVIDFEGPTPDLDSLYTYITSFREHKGFHEQCVEKMYNDIKLALNPKKCIIYAYFLRRGGIDIVPVRGSEKIIFEPKRTYRQ

SEQ ID NO: 45088 - protein, 120 aa, Marinimicrobia bacterium
  misc_feature (1)..(120): tr|A0A4Y8I731|A0A4Y8I731_9BACT NADPH-dependent 7-cyano- 7-deazaguanine reductase OS=Candidatus Marinimicrobia b acterium MT.SAG.3 OX=2552982 GN=queF PE=3 SV=1
MKSTDAIRADVLDTFEYEYPERDVELDISTEEFTSVCPKSGLPDFATIRINYIPDKKCVELRSWKFYLMSYRHVGIFHEHVVNRILEDFVAAVEPKRATVFGDFTIRGGVHTTSKVSWEK

SEQ ID NO: 45089 - protein, 129 aa, Marinimicrobia bacterium
  misc_feature (1)..(129): tr|A0A2E0HWS5|A0A2E0HWS5_9BACT NADPH-dependent 7-cyano- 7-deazaguanine reductase OS=Candidatus Marinimicrobia b acterium OX=2026760 GN=CMF88_07030 PE=3 SV=1
MPKAEGKYFEFEGEDQINTDFLETFSFDSPDQYIMTETDEFSAVCPFSGLPDLAYVKIEYYPVGGKCIELKSLKYYFVSFRNVGIYQEGATKRIYLDLKKVLNSNKVKVTTIYNTRGGFDTTCSEGKID

SEQ ID NO: 45090 - protein, 297 aa, Melainabacteria bacterium
  misc_feature (1)..(297): tr|A0A1D7YRT9|A0A1D7YRT9_9BACT QueF_N domain-containing protein OS=Candidatus Melainabacteria bacterium MEL.A1 OX=1899017 GN=BHV42_03160 PE=4 SV=1
MKTDEIASKFLGKRVSGSENYDPSLLVAIPREENRKQYNLQNDKLPFCGWDIWHAYEFSAMTENGIPVTRLIKLKYSCNSEFLVESKSLKLYLNSFNMSRFGQNIEECLKICKSKIEKDLSEKLQTEVRINFIDNKTQKVQIFQNFQNIMQFVNEKDITVEKFKEAPEVLQTKENEETKEYYLTFDSLRSNCRVTHQPDFGDMFLYYKSKKHITEKSLVKYLSSFRSEYHFHEECCEMIFKRLSDILNKGDKLLVCALYTRRGGIDICPSRWTKNCEIKDVEILNDITKFARGSIKQ

SEQ ID NO: 45091 - protein, 141 aa, Melainabacteria bacterium
  misc_feature (1)..(141): tr|A0A3S0EQN3|A0A3S0EQN3_9BACT NADPH-dependent 7-cyano- 7-deazaguanine reductase OS=Candidatus Melainabacteria bacterium OX=2052166 GN=queF PE=3 SV=1
MTVTQNLKHLGNKTEYVYTNPTVEILEHVPNPFSDREQNRHQVAGTVHIEANEFTSLCPITGQPDFATIVIDYIPRERLVESKSLKLYLGSFRQFGEFHESCVNRIANDLIELLDPSYIKVEGRFTPRGGISIWPVAEFHR

SEQ ID NO: 45092 - protein, 121 aa, Methylomirabilis oxyfera
  misc_feature (1)..(121): tr|D5MEZ4|D5MEZ4_9BACT NADPH-dependent 7-cyano-7-deazag uanine reductase OS=Candidatus Methylomirabilis oxyfera OX=671143 GN=queF PE=3 SV=1
MPTQPSKALDTFANPEPGRDYEIRMICPEFTCLCPKTGQPDFATLTLTYVPDRLCIELKSLKLYLWSFRNEGHFHEAVTNRILDDLVKACRPRSMKLIADFYIRGGIHTIITVTHQTDDRR

SEQ ID NO: 45093 - protein, 121 aa, Methylomirabilis lanthanidiphila
  misc_feature (1)..(121): tr|A0A564ZI64|A0A564ZI64_9BACT NADPH-dependent 7-cyano- 7-deazaguanine reductase OS=Candidatus Methylomirabilis lanthanidiphila OX=2211376 GN=queF PE=3 SV=1
MPTQPSKALETFPNPEPGRDYEIQMTCPEFTCLCPKTGQPDFATLTLSYVPDRLCIELKSLKLYLWSFRNEGHFHEAVTNRIMDDLVKACRPRFMKLVADFYVRGGIHTMITVTHQNETRR

SEQ ID NO: 45094 - protein, 148 aa, Methylopumilus planktonicus
  misc_feature (1)..(148): tr|A0A5B8D196|A0A5B8D196_9PROT NADPH-dependent 7-cyano- 7-deazaguanine reductase OS=Candidatus Methylopumilus p lanktonicus OX=1581557 GN=queF PE=3 SV=1
MNALSLGKKPSAKPTKKLETFANPCTSRDFHIQMQIPEFTCLCPKTGQPDFATLYLDYIPNKKCVELKSLKLYIWSFRDEGCFHEAVTNRILDDLVKATEPRFMRLRAEFFVRGGVFTNVVVEHKKKGWKPEPTIDLTQFSKQSNTRS

SEQ ID NO: 45095 - protein, 148 aa, Methylopumilus universalis
  misc_feature (1)..(148): tr|A0A5B8CXP0|A0A5B8CXP0_9PROT NADPH-dependent 7-cyano- 7-deazaguanine reductase OS=Candidatus Methylopumilus u niversalis OX=2588536 GN=queF PE=3 SV=1
MNALSLGKKPSAKPTKKLETFVNPCPSRDFHIHMQIPEFTCLCPKTGQPDFATLYLDYIPNKKCVELKSLKLYIWSFRDEGCFHEAVTNRILDDLVKATEPRFMRLRAEFFVRGGVFTNVVAEHKKKGWKPEPTIDLTQFSKQSNARS

SEQ ID NO: 45096 - protein, 129 aa, Methyloumidiphilus alinensis
  misc_feature (1)..(129): tr|A0A2W4R932|A0A2W4R932_9GAMM NADPH-dependent 7-cyano- 7-deazaguanine reductase OS=Candidatus Methyloumidiphil us alinensis OX=2202197 GN=queF PE=3 SV=1
MSTNPSKEIETFANPQPGRSYTIRIEAPEFTCLCPKTGQPDFATFLIEYVPDAVCVELKSLKLYFWSYRDEGAFHEAVTNQVLDDLVAATLPNFMRIIAKFNVRGGLYTTVVVEYRKESWIAPEAVVLP

SEQ ID NO: 45097 - protein, 768 aa, Micropelagos thuwalensis
  misc_feature (1)..(768): tr|U2XWR9|U2XWR9_9PROT Outer membrane protein assembly factor BamA OS=Candidatus Micropelagos thuwalensis OX=1 397666 GN=queF PE=3 SV=1
MTNSKFSAFIALFAFTYLATIIAEPLAAQENRAPAEEDFSIQFIEVEGSQRVEADTVRSYMILKPGMTADPLLLDQSLKSMFASGLFADVTIRRERGGLIVTVVENPIVNRVIFEGNDKLDDDDLYEESSLRPRQVYTRSKIQNDVEKFVELYRRSGRFSAKVEPKVIQLPQNRVDVVFEIEEGETTRVRSINFIGNKRFDDDRLREEISTQESRWWRFLSSNDKYDPDRIAYDSDLLRRFYLSKGYADFRVISSFAELTRDGKKFFVTFNVEEGEKYEFGDSVIDTNLKDVNIQELEQLIRHETGRVYNSKKVDDTVDDLTEALGTKGYAFADVRPRVRRNRKDLIVNITYRIQEGPRVYVERINVNNNVRTQDRVIRREMYLREGDAFNRALLNKSERNIKALNFFGEVEITETPGDDEDSVVLDIDVEEQSTGELAFGIGYSSVEDLSTQFSIVERNLLGRGQLLSLSTSISSQRTFLNLRFAEPYFLNRDLFGSVDVFRTTTDYDTEAALETSETGLGGSIGFPVAEDARLNIFVRLSENELINDAYTPQFGAYLRPFTELKAQLGYTYTIDKRDDVIDPTEGWDFIFSQNIATPLGDVTYIRSTIVADYYKPFFEEWVFHAKLSGGIIGDYEKEGISYNDNFFVGGSIIRGFKRSGVGPRDLQTDYVLGAKQYLVGTLEAKVPLGIPKDFGIKTYIFTDFGVIGKTDVEATNVQDDTAFRASYGLTFNWKSPFGPVRFDLARPLAEEEYDRAQFFRFTAGTRF

SEQ ID NO: 45098 - protein, 156 aa, Micropelagos thuwalensis
  misc_feature (1)..(156): tr|U2XWT5|U2XWT5_9PROT NADPH-dependent 7-cyano-7-deazag uanine reductase OS=Candidatus Micropelagos thuwalensis OX=1397666 GN=queF PE=3 SV=1
MSTKQGSDTTGSTMLGQQTPMPNSPDEAVLERVPNPHPDTLYVARFAVPEFTSICPKTGQPDFARLIIDYVPEKYLVESKSFKLFMGSFRNHGAFHEDCTIEIAKRLIACMEPRWLRIGGYWYPRGGIPIDVFYQTGEPPADLYIPDQDVASYSGR

SEQ ID NO: 45099 - protein, 137 aa, Moanabacter tarae
  misc_feature (1)..(137): tr|A0A2Z4AS26|A0A2Z4AS26_9BACT NADPH-dependent 7-cyano- 7-deazaguanine reductase OS=Candidatus Moanabacter tara e OX=2200854 GN=queF PE=3 SV=1
MTHKHTTKTDVKNLSILGGSTTKPARSLETFPNKHPGRDYMVTLESNEFTCLCPVTGQPDFARIEVRYVPNKRIVESKSLKLYLWSFRSEGIFHEHLANIILDDLVKALKPRWCEVLAKFNSRGGISIKVHAEHKGK

SEQ ID NO: 45100 - protein, 760 aa, Muproteobacteria bacterium
  misc_feature (1)..(760): tr|A0A1F6TDW6|A0A1F6TDW6_9PROT NADPH-dependent 7-cyano- 7-deazaguanine reductase OS=Candidatus Muproteobacteria bacterium RBG_16_64_11 OX=1817758 GN=queF PE=3 SV=1
MPTKPSKQLETFANPNPARDYTIEIRIPEFTCLCPKTGQPDFATLYLDYVPDQRCVELKSLKLYIWSYRDEGAFHEAVTNAILNDLVSATAPRFMRLRAEFNVRGGLYTAVTVDYRMPGWTPPVPVPKPLPESTAADTPPASEPTPASTPTTASISPPSAPAPEPSAPVVPTVKAELPRSAQPWDRGARQPAPAMDGGRFGLLPSRGITPSMEGRSAESANTPIITTGRTSEASRASDSARGPRLDPIGENAGAVFPQAKTAEPASRGLAQQRKLPESLQPPAPRVPEPKPIEAKAPAKEPAPPAPPKAEAPPPPAPKKKPEPVFLGIDLGSVGCRLCAIDEQRRVVATAQTPLPAAIKRGSEISQDPNLWWQAVSAGLHELFKTLAPERVRRIAIDGTSGTLLLCGRDGTPITDAILYNDGRALAQAERIAAYAVRHSGAHGVGSALAKLLWFHDKNLHKTAAFAAHPADWIMGKLTGRWGHSDYNNCLKLGYNAEAMRWPEWLAALDINMELLPTVHASGEPVAAISAENARAFGLPPDCAVVAGTTDGVASFLAAGGSRPGHAVTALGSTLVLKLLSDKPVFAPEHGVYSHRLGRYWLAGGASNSGGAVLLQYFDVEQMEEMTSLIDPEQFTGLDYYPLLDIGERFPHNDPKKTAVLEPLPNNSVTFFQGLLEGIARIEAQGYELLQQLGAPAISEVRTTGGGSRNPAWQRLRERILGVPLKKPVSDQAAYGSALLAAGLIDKSLLSESAPRAVQIS

SEQ ID NO: 45101 - protein, 129 aa, Nitrosoglobus terrae
  misc_feature (1)..(129): tr|A0A1Q2SMH2|A0A1Q2SMH2_9GAMM NADPH-dependent 7-cyano- 7-deazaguanine reductase OS=Candidatus Nitrosoglobus te rrae OX=1630141 GN=queF PE=3 SV=1
MPSQPSRELETFSNPFPNRDYTIRIKIPEFTCLCPKTGQPDFATLHLEYVPDHNCVELKALKLYIWSYRNQGAFHEAVTNQILDDLIAVCNPRFIRLTAEFSVRGGIYTTVIAEYRQPNWNTPKIVQLP

SEQ ID NO: 45102 - protein, 133 aa, Nitrospira nitrificans
  misc_feature (1)..(133): tr|A0A0S4LBI9|A0A0S4LBI9_9BACT NADPH-dependent 7-cyano- 7-deazaguanine reductase OS=Candidatus Nitrospira nitri ficans OX=1742973 GN=queF PE=3 SV=1
MRDKQKATKLGYNERHAKSGITDPLPNIETFPNQYKGYEITIEIPEYTAICPKTNLPDFGTITLHYMPDKDCLELKALKMYIHAYRNLGIFYENAVNRILQDIVKACRPVRATVTGAFTARGGLSSKIEARYP

SEQ ID NO: 45103 - protein, 143 aa, Nitrospira nitrosa
  misc_feature (1)..(143): tr|A0A0S4L9U9|A0A0S4L9U9_9BACT NADPH-dependent 7-cyano- 7-deazaguanine reductase OS=Candidatus Nitrospira nitro sa OX=1742972 GN=queF PE=3 SV=1
MKRETVARKPKATKLGYNERHAKSGITAPLPEIETFPNQYEGYEITIEIPEYTAICPKTNLPDFGTITLHYMPDKECLELKALKMYIHAYRNLGIFYENAVNRILQDIVKSCRPVWATVTGTFTARGGLSSKIEARYPQTRKA

SEQ ID NO: 45104 - protein, 139 aa, Nitrotoga sp.
  misc_feature (1)..(139): tr|A0A3E1DPK0|A0A3E1DPK0_9PROT NADPH-dependent 7-cyano- 7-deazaguanine reductase OS=Candidatus Nitrotoga sp. LA W OX=2184310 GN=queF PE=3 SV=1
MSALPSKFLETFANPSLERDYHIHMEIPEFTCLCPKTGQPDFATLILDYIADTTCVELKSLKLYIWSFRNEGHFHEDVTNRILDDLVAAIQPRFMRLTAKFYVRGGIFTNIVAEHRKPGWQAQPLVDLMQFGMQSNTRG

SEQ ID NO: 45105 - protein, 144 aa, Nitrotoga sp.
  misc_feature (1)..(144): tr|A0A3E1D4X5|A0A3E1D4X5_9PROT NADPH-dependent 7-cyano- 7-deazaguanine reductase OS=Candidatus Nitrotoga sp. SP KER OX=2184312 GN=queF PE=3 SV=1
MSALPSNTVASKLLETFANPNLQRDYHIHMEIPEFTCLCPKTGQPDFATLILDYIADTTCVELKSLKLYIWSFRNEGHFHEDVTNRILDDLVAAIQPRFMRLTAKFYVRGGIFTNIVAEHRKPGWQAQPLVDLMQFETQSNTRG

SEQ ID NO: 45106 - protein, 131 aa, Omnitrophica bacterium
  misc_feature (1)..(131): tr|A0A3C0MZ35|A0A3C0MZ35_9BACT NADPH-dependent 7-cyano- 7-deazaguanine reductase OS=Candidatus Omnitrophica bac terium OX=2035772 GN=queF PE=3 SV=1
MKKRSSYEGLQKNIRSLETPEIEAWENQYPDRRYVVHIEIPEFTCICPKTGLPDFAAISIEYIPAKLCVELKSLKEYLMFYRDIGIFHEHFANKLMDDFVHACRPRWAKMTTKFNPRGGIGTTVVREHRGR

SEQ ID NO: 45107 - protein, 135 aa, Omnitrophica bacterium
  misc_feature (1)..(135): tr|A0A2H0Y5Q3|A0A2H0Y5Q3_9BACT NADPH-dependent 7-cyano- 7-deazaguanine reductase OS=Candidatus Omnitrophica bac terium CG08_land_8_20_14_0_20_41_16 OX=1974743 GN=queF PE=3 SV=1
MKVRKSPYERLQENIRGLKTPEIEVWQNQYRDKLYTICLEIPEFTCICPKTGLPDFAVIKIEYSPDKYCVELKSFKMYTIFYRNIGIFHEHLTNKMLEDFVKACSPRWAKIISEFNPRGGIKTTVIREYRSKEGR

SEQ ID NO: 45108 - protein, 129 aa, Omnitrophus magneticus
  misc_feature (1)..(129): tr|A0A0F0CP69|A0A0F0CP69_9BACT NADPH-dependent 7-cyano- 7-deazaguanine reductase OS=Candidatus Omnitrophus magn eticus OX=1609969 GN=queF PE=3 SV=1
MEKTYDGLQNNIRGLQLPSIEVWENKYNDKTYMIKSDTNEFTCICPKTGLPDFAHIFIEYSPDKWCIELKSFKEYLFAYRTIGIFHEHVVNKLLEDLVKAASPRYMKIKGIFNIRGGITTIVEAEYKNS

SEQ ID NO: 45109 - protein, 274 aa, Pandoraea novymonadis
  misc_feature (1)..(274): tr|A0A2P6UYH6|A0A2P6UYH6_9BURK NADPH-dependent 7-cyano- 7-deazaguanine reductase OS=Candidatus Pandoraea novymo nadis OX=1808959 GN=queF PE=3 SV=1
MTPEKSPLGKKIAHTEQYEPSLLFSISRDNARKEIGVPVKLPFFGADLWTAYELSWLNKKGKPQITIATLIVPADSPNIIESKSLKLYLCSFAQTKIDSNDTLRELLEHDLSKACGKSVQVQLTKQSDFRDIEFDKPDSLLLDDLDIETTIYKPDSSLLNTCTHKAPIEETLMSNLLKSNCPVTGQPDWGSVKIHYFGKPIDQKGLLKYIISFRQHTGFHEQCVEHIFIDIMRQCQPSKLSVYARYTRRGGLDINPFRTNFNVPLPKNKRTARQ

SEQ ID NO: 45110 - protein, 282 aa, Pantoea carbekii
  misc_feature (1)..(282): tr|U3U7A0|U3U7A0_9GAMM NADPH-dependent 7-cyano-7-deazag uanine reductase OS=Candidatus Pantoea carbekii OX=1235 990 GN=queF PE=3 SV=1
MTFKNQHKIINNLVLGKPTSYPIGYQDTLLQSLPRNLSRNVLNIQKNKLSFHGADIWTLYELSWLNKKGLPQVAIGQVIISADSQNFIESKSFKLYLNSFNQAIFADWDEVHHILQKDISNCAMGNVCIKLFKLSDLNDQKIGYFEGELLDEQDIIITDYNLNINYLACMNSNDKIVTETLISHLLKSNCMITNQPDWASIMIRYEGPRINRESLLSYLVSFRQHNEFHEQCIERIFSDLLRFCKPTALTVYARYTRRGGIDINPWRSNVTFLPNYLRLARQ

SEQ ID NO: 45111 - protein, 274 aa, Paraburkholderia kirkii
  misc_feature (1)..(274): tr|G4MER7|G4MER7_9BURK NADPH-dependent 7-cyano-7-deazag uanine reductase OS=Candidatus Paraburkholderia kirkii UZHbot1 OX=1055526 GN=queF PE=3 SV=1
MTPDQSPLGKPVHYTEQYDASLLFPIDRQRARDAIGVPGRLPFFGTDVWNAYELSWLNRRGKPQIAVATFFVPADSPNIVESKSFKLYLGSFAQTQFDSIDDVRAAIRRDVSATCGANVSVQLAAPADFGKLTMEEFDGLSLDRLDLDCDVFSPEPSLLSTAHDEAPVDETLFSNLLKSNCPVTGQPDWGSVQIRYYGGQIDHAGLLRYVVSYRGHTGFHEQCVERIFMDIMRECKPERLAVYARYTRRGGLDINPFRTNFNLPMPDNAQLARQ

SEQ ID NO: 45112 - protein, 274 aa, Paraburkholderia sp.
  misc_feature (1)..(274): tr|A0A4V2ZY42|A0A4V2ZY42_9BURK NADPH-dependent 7-cyano- 7-deazaguanine reductase OS=Candidatus Paraburkholderia sp. 4M-K11 OX=2528715 GN=queF PE=3 SV=1
MTPEQSPLGKAARYTEQYDASLLFPIPRAAAREAIGIGAQLPFFGTDIWNAYELSWLNARGKPQIAIATFFIPADSPNIVESKSFKLYLGSFAQTPFESAEVVRDTIKRDVSAACGAPVSVRLDQPGAFGKIPFEEFEGLSLDRLDLDTEVYHPDPTLLKAALDESPVEETLVSNLLKSNCPVTGQPDWGSVQIHYVGPQIDQAGLLRYIISYRNHTGFHEQCAERIFMDILRECKPDRLAVYARYTRRGGLDINPFRTNFNMPMPDNARLARQ

SEQ ID NO: 45113 - protein, 133 aa, Peregrinibacteria bacterium
  misc_feature (1)..(133): tr|A0A2M7UNY8|A0A2M7UNY8_9BACT NADPH-dependent 7-cyano- 7-deazaguanine reductase OS=Candidatus Peregrinibacteri a bacterium CG_4_10_14_0_2_um_filter_38_24 OX=1974774 G N=queF PE=3 SV=1
MFNEKNSQEIRKDIKKIAPLLTFKFQRLENSEHWVTIASPEYTSICPFSDWPDFGTVEISYVPDKVCLELKSFKIYINAFRDVKIFHETVTEVILKDFLEAVKPKKAKIVVDMNVRGNVKTICRKFYKCKQND

SEQ ID NO: 45114 - protein, 113 aa, Peregrinibacteria bacterium
  misc_feature (1)..(113): tr|A0A1F7ABN0|A0A1F7ABN0_9BACT NADPH-dependent 7-cyano- 7-deazaguanine reductase OS=Candidatus Peregrinibacteri a bacterium RIFCSPLOWO2_01_FULL_39_12 OX=1801897 GN=que F PE=3 SV=1
MLTFNFQEQSRGEHWVTISTEEYTSICPFSNWPDFGRVEISYVPNKKCLELKSFKLYINAFRNIKIFHETALEVIFADFLEVVNPKKAVIKVDMNVRGNVKTVCKKYFKTSQS

SEQ ID NO: 45115 - protein, 152 aa, Phaeomarinobacter ectocarpi
  misc_feature (1)..(152): tr|X5MN66|X5MN66_9RHIZ NADPH-dependent 7-cyano-7-deazag uanine reductase OS=Candidatus Phaeomarinobacter ectoca rpi OX=1458461 GN=queF PE=3 SV=1
MSDVPGATQLGQQTALPASPEEADLERVANPHPGTDYVARFTAPEFTSLCPVTGQPDFAHIVIDYVPGEWLVESKSLKLYLGSFRNHGAFHEDCTIAIAKRLADLLKPKWLRIGGYWYPRGGIPIDVFWQTGDVPQGVWLPDQGVPAYRGRG

SEQ ID NO: 45116 - protein, 188 aa, Photodesmus blepharus
  misc_feature (1)..(188): tr|A0A084CNW2|A0A084CNW2_9GAMM NADPH-dependent 7-cyano- 7-deazaguanine reductase OS=Candidatus Photodesmus blep harus OX=1179155 GN=queF PE=4 SV=1
MKLYLNSFHQTKFNSKIQVLETIKKDISFASGSTVDINFFSIEKSQKLNINQSFFCLDKLDINILQYDYSEDFLQNSTSNKEVTEKLCSHLFKSNCLITNQPDFASVYIIYTGRKINHETLLKYIISFRNHNEFHEQCVERIYSDIKRCCRSKQLTVFSRYTRRGGLDINPFRSDSCNHTLVSRMPRQ

SEQ ID NO: 45117 - protein, 231 aa, Photodesmus katoptron
  misc_feature (1)..(231): tr|S3EG85|S3EG85_9GAMM NADPH-dependent 7-cyano-7-deazag uanine reductase OS=Candidatus Photodesmus katoptron Ak at1 OX=1236703 GN=O1U_0011 PE=3 SV=1
MFKGFDIWTAFELSWLNKKGKPEVAIAEFIIPQSSPNLIESKSFKLYLNSFNQIKFNSKEMLLNVLQNDLTKTSGSPVKIRFIPVDQPKKLNVVPDFFCIDILDIHISQYNYEEGYLKGSISNEIVTEFLCSHLLKSNCLVTNQPDWGSVYIIYSGFQINHEILLKYLISFRNHKAFHEQCVETIFSDIKYHCQTEKLTVFARYTRRGGLDINPFRSDSDNQVFIGRMPRQ

SEQ ID NO: 45118 - protein, 269 aa, Phycorickettsia trachydisci
  misc_feature (1)..(269): tr|A0A2P1P9H3|A0A2P1P9H3_9RICK NADPH-dependent 7-cyano- 7-deazaguanine reductase OS=Candidatus Phycorickettsia trachydisci OX=2115978 GN=phytr_9910 PE=3 SV=1
MSLDLSILGKKVDAPESYNPAILFPISRSGQRAEFANKIEFKGVDIWYAYEISWLNPKGKPQVALGRFIFDANSENIVESKSLKLYLNSLNNFNVENMQTLQNIIKGDLSKASSSDVDVTLFSVKDKFEFLEYDGIYLDDLDVEINYEKKVDTSYLKKSDTLVKEKVYTDLFKANCLVTHQADWATLFIEYEGHKIDHEGLLKYLISYRNHNSFHEHCVEHIYADLLTILKPTFLNVYAKFTRRGGLDITPYRTNQTLKLPSFGRTTRQ

SEQ ID NO: 45119 - protein, 266 aa, Phycorickettsia trachydisci
  misc_feature (1)..(266): tr|A0A2P1P881|A0A2P1P881_9RICK NADPH-dependent 7-cyano- 7-deazaguanine reductase OS=Candidatus Phycorickettsia trachydisci OX=2115978 GN=phytr_5200 PE=3 SV=1
MDSSLLGKKISAPSFYDPQILFPIARSQQRLNLPGVKFEGVDIWYAYEVSWLDLQGKACVKIGRFIFDANSEFLVESKSLKLYLNSFNNTRFESAEKVAQLISKDLSAVSNSKVEVELLNLDDRYEFFQYDGICLDSLEIEMDYEKDVDTAFLARHDTWVKEKLYTNLFKSNCLVTNQADWASLYIEYEGYQMDYKGLLKYLLSYRNHSSFHEHCVENVYHDLLNTFECSFLSVYGKYTRRGGLDIAPYRATKMENLPSFDRTSRQ

SEQ ID NO: 45120 - protein, 155 aa, Phycosocius bacilliformis
  misc_feature (1)..(155): tr|A0A2P2E8V8|A0A2P2E8V8_9PROT NADPH-dependent 7-cyano- 7-deazaguanine reductase OS=Candidatus Phycosocius baci lliformis OX=1445552 GN=queF PE=3 SV=1
MTHSSIYDGLNTLGQDVRGYASPEEAILEKVANPHPGTDYVARFVAPEFTSLCPVTGQPDFAHLVIDYVPGDWLVESKSLKLFLTSFRNHGAFHEDCTVAIGKRLVALLTPRWLRIGGYWYPRGGIPIDVFYATGPAPEGVWIPDQGVPPYRGRG

SEQ ID NO: 45121 - protein, 133 aa, Poribacteria bacterium
  misc_feature (1)..(133): tr|A0A496AHG4|A0A496AHG4_9BACT NADPH-dependent 7-cyano- 7-deazaguanine reductase OS=Candidatus Poribacteria bac terium OX=2026781 GN=queF PE=3 SV=1
MPQNSNYANLQTHIRQLKTPPLETWENQYPHRDYTIEITHLEFTAVCPKTGLPDFATLRVTYVPDKECVELKSLKEYLLFYRDVGIFHEHVVNKVLEDVVAACQPREVEVIGDFNVRGGIKTVVRASYQKNTD

SEQ ID NO: 45122 - protein, 135 aa, Poribacteria bacterium; identical to SEQ ID NO: 44493
  misc_feature (1)..(135): tr|A0A2E8DNQ2|A0A2E8DNQ2_9BACT NADPH-dependent 7-cyano- 7-deazaguanine reductase OS=Candidatus Poribacteria bac terium OX=2026781 GN=queF PE=3 SV=1

SEQ ID NO: 45123 - protein, 139 aa, Propionivibrio aalborgensis
  misc_feature (1)..(139): tr|A0A1A8XM76|A0A1A8XM76_9RHOO NADPH-dependent 7-cyano- 7-deazaguanine reductase OS=Candidatus Propionivibrio a alborgensis OX=1860101 GN=queF PE=3 SV=1
MSSPSAKALETFPNSAAQRDFHVHMEIPEFTCLCPKTGQPDFATLFLDYIPEKTCVELKSLKLYIWSFRDQGCFHEDVTNRILDDLVRATRPRFMRLTARFNVRGGIFTHVVVEHRKKGWKPAPLVDLVEFSPQAANRG

SEQ ID NO: 45124 - protein, 276 aa, Pseudomonas adelgestsugas
  misc_feature (1)..(276): tr|A0A481QMV4|A0A481QMV4_9PSED NADPH-dependent 7-cyano- 7-deazaguanine reductase OS=Candidatus Pseudomonas adel gestsugas OX=1302376 GN=queF PE=3 SV=1
MHIVARHSPLGKSSEYISTYAPSLLFPISRSIRWAELGLTIETLPYIGVDFWNCFELSWLLPSGKPVVAIGEFSIPANSPNIIESKSFKLYLNSLNQTVFINTQSLETTLRTDLSTVAGTPMRVRIRALAEITSEGIQALPGVCIDDLDISISKYKHPCPELLRCDDSRTTEESVHSHLLKSNCPVTGQPDWGSVVVTYSGNVLNHASLLEYIVSFRQHSDFHEQCIDRIFLDLQHLLQPKKLTVYARYVRRGGLDINPYRSTEAMQFQNSRLARQ

SEQ ID NO: 45125 - protein, 149 aa, Puniceispirillum sp.
  misc_feature (1)..(149): tr|A0A1Z8USF4|A0A1Z8USF4_9PROT NADPH-dependent 7-cyano- 7-deazaguanine reductase OS=Candidatus Puniceispirillum sp. TMED52 OX=1986639 GN=queF PE=3 SV=1
MENLTHLGKPSSLPQSPEEAVLDRVPNPHPDTMFVARFTQPEFTSLCPVTAQPDFAHLVIDYIPNKWMVESKSLKIYLNSFRNHQAFHEACTVGIGKRLVELMEPHWLRIGGYWYPRGGMPIDVFWQHGTAPDGVWIPDQGVAGYRGRG

SEQ ID NO: 45126 - protein, 149 aa, Puniceispirillum sp.
  misc_feature (1)..(149): tr|A0A2D4UNX8|A0A2D4UNX8_9PROT NADPH-dependent 7-cyano- 7-deazaguanine reductase OS=Candidatus Puniceispirillum sp. OX=2026719 GN=queF PE=3 SV=1
MENLKALGQAAKQPNSPEEAELERVPNPHPDCNFVARFTQPEFTSLCPVTAQPDFAHLMIDYIPDQWMVESKSLKLYLGSFRNHQAFHEACTVDIAKELIALLSPRWLRIGGYWYPRGGIPIDVFWQHGAIPEGTWVPDQGVAGYRGRG

SEQ ID NO: 45127 - protein, 135 aa, Raymondbacteria bacterium
  misc_feature (1)..(135): tr|A0A1F7EZG3|A0A1F7EZG3_9BACT NADPH-dependent 7-cyano- 7-deazaguanine reductase OS=Candidatus Raymondbacteria bacterium RIFOXYD12_FULL_49_13 OX=1817890 GN=queF PE=3 SV=1
MAHKKPHLTILGSAHTAYPTSPDKARLEAIPFNNQGNHTTVTLSTDEFTSLCPVTGQPDFGEIVIEYVPEKLLVESKSLKLYLFSFRNLGIFQEEIVNRILNDLKKALKPRSIKVTGRFKARGGIVIAPVAQWNR

SEQ ID NO: 45128 - protein, 279 aa, Regiella insecticola
  misc_feature (1)..(279): tr|G2GW87|G2GW87_9ENTR NADPH-dependent 7-cyano-7-deazag uanine reductase OS=Candidatus Regiella insecticola 5.1 5 OX=1005043 GN=queF PE=3 SV=1
MNNNQHVYSKHLGQKSQYIDTYNEKLLVAIPRSAGRKEIGLIDEQIPFHGFDLWTAYELSWLNKKGKPQVAMAEFTVPATSQNLIESKSLKLYLNSLNQSHLDSSEVHQHISKDLSHIAEAEVKVTLFEGMKNYSKKIDEPDYISIDESDIEVNDYKFNADHLKNAVTEKSPFVTEHLMSNLLKSNCLVTLQPDWASVFIKYEGKKIDREKLLRYIISFRKHNEFHEQCVERIFLDIKKYCHPQKLTVFARYTRRGGLDINPFRSDYESTSAIGRLVRQ

SEQ ID NO: 45129 - protein, 279 aa, Regiella insecticola
  misc_feature (1)..(279): tr|E0WTA3|E0WTA3_9ENTR NADPH-dependent 7-cyano-7-deazag uanine reductase OS=Candidatus Regiella insecticola LSR 1 OX=663321 GN=queF PE=3 SV=1
MNNSQYLYSKHLGQKSQYIDTYNEKLLVAIPRSVGRKEIGLIDEKIPFTGFDLWTAYELSWLNKKGKPQVAMAEFTVPATSPNLIESKSLKLYLNSLNQSYLDSSEVHQHISKDLSHIAEAEVKVTLFEGMKNYSKKIDEPDYISIDESDIEVNDYKFNADHLKNAVTEKSPFVTERLTSNLLKSNCLVTLQPDWASVFIKYEGKKIDREKLLRYIISFRKHNEFHEQCVERIFLDIKKYCHPQKLTVFARYTRRGGLDINPFRSDYESTSAIGRLVRQ

SEQ ID NO: 45130 - protein, 121 aa, Rokubacteria bacterium
  misc_feature (1)..(121): tr|A0A1Q6WGK7|A0A1Q6WGK7_9BACT NADPH-dependent 7-cyano- 7-deazaguanine reductase OS=Candidatus Rokubacteria bac terium 13_2_20CM_69_10 OX=1805371 GN=queF PE=3 SV=1
MPTRPSRSLEVVSNPHPDRDYEVAMTAPEFTCVCPMTGQPDFATIRIRYVPDQHLVELKSLKLYLWSYRDEGAFHEDVTNRILNDFVTAARPRFVEVVGDFSVRGGIKTEVRATYGKRPEI

SEQ ID NO: 45131 - protein, 121 aa, Rokubacteria bacterium
  misc_feature (1)..(121): tr|A0A1Q7I7N9|A0A1Q7I7N9_9BACT NADPH-dependent 7-cyano- 7-deazaguanine reductase OS=Candidatus Rokubacteria bac terium 13_1_40CM_4_67_11 OX=1805361 GN=queF PE=3 SV=1
MPTRPSRSLEVVSNPHPDRDYEVAMTAPEFTCVCPMTGQPDFATIRIRYVPDQHLVELKSLKLYLWSYRDEGAFHEDVTNRILNDFVTAARPRFVEVIGDFSVRGGIKTEVRATYGKRPEI

SEQ ID NO: 45132 - protein, 135 aa, Saccharicenans subterraneum
  misc_feature (1)..(135): tr|A0A3E2BNL2|A0A3E2BNL2_9BACT NADPH-dependent 7-cyano- 7-deazaguanine reductase OS=Candidatus Saccharicenans s ubterraneum OX=2508984 GN=queF PE=3 SV=1
MAGKKATQKLEYGEKEARAGLKTRLPELQTFPNQFPDYEITIEIPEYTSVCPKTGLPDYGKVTLWYVPDKKVIELKSLKMYILAYRNLGIFYENAVNRILEDVVRACKPKKALVRGEFTPRGGLKSTVEARYPRG

SEQ ID NO: 45133 - protein, 118 aa, Saganbacteria bacterium
  misc_feature (1)..(118): tr|A0A2H0Y1U2|A0A2H0Y1U2_9BACT NADPH-dependent 7-cyano- 7-deazaguanine reductase OS=Candidatus Saganbacteria ba cterium CG08_land_8_20_14_0_20_45_16 OX=2014293 GN=queF PE=3 SV=1
MPIEVVENKYPHKDYVVNIEFPEFTCVCPKTGLPDFATIKIEYTPDKLLVELKSLKLYFVSYRNEGSFHETVINKILDDFVAACQPRKAKIIGEFNVRGGIKTSVTAQYLSPTQYPKA

SEQ ID NO: 45134 - protein, 127 aa, Schekmanbacteria bacterium
  misc_feature (1)..(127): tr|A0A1F7RMW7|A0A1F7RMW7_9BACT NADPH-dependent 7-cyano- 7-deazaguanine reductase OS=Candidatus Schekmanbacteria bacterium RBG_16_38_10 OX=1817879 GN=queF PE=3 SV=1
MKYGQKAIKSAKLEIWDNPNPEKNYEIEISFPEFTCLCPRSGYPDFATIKVRYVPDKHVIELKSLKLYFNKFRNQYISHEAATNKIYDHIKKTIKPRYIEVTGDFTPRGNVKTVIFISSDKEKNSLP

SEQ ID NO: 45135 - protein, 141 aa, Schekmanbacteria bacterium
  misc_feature (1)..(141): tr|A0A1F7RF27|A0A1F7RF27_9BACT NADPH-dependent 7-cyano- 7-deazaguanine reductase OS=Candidatus Schekmanbacteria bacterium GWA2_38_11 OX=1817876 GN=queF PE=3 SV=1
MKYGQRAIKASKLEVWGNPTPDRDYEIEISFPEFTCLCPRSGYPDFATISIKYIPDKYIVELKSLKLYFNKYRDEHISHEAAVNKIYDLLKKNLRPKYIEVTGDFNPRGNVKTLIRVSSDMGKIIPPLKPACQQAGRGTSS

SEQ ID NO: 45136 - protein, 161 aa, Schmidhempelia bombi
  misc_feature (1)..(161): tr|A0A484GD53|A0A484GD53_9GAMM NADPH-dependent 7-cyano- 7-deazaguanine reductase OS=Candidatus Schmidhempelia b ombi str. Bimp OX=1387197 GN=queF PE=3 SV=1
MNINNSSITLLGDQAVAYPTDYSPSILETFDNKHPDNDYFVKFNCPEFTSLCPITGQPDFACIYISYVPDIKMVESKSLKLYLFSFRNHGDFHEDCINTIMKDLIKLLSPKYIEVWGKFTPRGGISIDPYVNYGKPDTPWQQIAFNRLANHDLYPEKIDNR

SEQ ID NO: 45137 - protein, 129 aa, Sulfobium mesophilum
  misc_feature (1)..(129): tr|A0A2U3QIT8|A0A2U3QIT8_9BACT NADPH-dependent 7-cyano- 7-deazaguanine reductase OS=Candidatus Sulfobium mesoph ilum OX=2016548 GN=queF PE=3 SV=1
MVDFKMKYGEKAIGKARLEVWENPNPERDYEINIALPEFTCLCPRSGYPDFATFTVRYVPDKKIVELKALKLYLNSFRDIHISHEAVTNKIYSELTRKLKPRFLEVVGDFNPRGNVKTVIRVSSDREEI

SEQ ID NO: 45138 - protein, 141 aa, Sulfopaludibacter sp.
  misc_feature (1)..(141): tr|A0A2U3LK46|A0A2U3LK46_9BACT NADPH-dependent 7-cyano- 7-deazaguanine reductase OS=Candidatus Sulfopaludibacte r sp. SbA4 OX=2043165 GN=queF PE=3 SV=1
MKRAYTDEHARAGVNAALPEIETWPNQYPDYEIEIVTPEFTSVCPKTGLPDFGKLVLRYAPDQRCLELKSYKMYLLAYRDLGIFQENAVNRVLGDVVKAARPKMATVIGDFSPRGGLGTIVTATWTGRPRRPEARAPRGKR

SEQ ID NO: 45139 - protein, 136 aa, Sulfopaludibacter sp.
  misc_feature (1)..(136): tr|A0A2N9N4H2|A0A2N9N4H2_9BACT NADPH-dependent 7-cyano- 7-deazaguanine reductase OS=Candidatus Sulfopaludibacte r sp. SbA3 OX=2043164 GN=queF PE=3 SV=1
MKRAYTDEHAAAGVHAPLPEIETWPNQYADYEIEIVMPEFTSVCPKTALPDFGKIVLRYVPDQLCLELKSYKMYLLAYRDLGIFQENVVNRVLRDIVKAANPISATVVGDFSARGGLTTLVTASFQRAKRTPRGKR

SEQ ID NO: 45140 - protein, 134 aa, Sulfotelmatobacter sp.
  misc_feature (1)..(134): tr|A0A2N9N9N7|A0A2N9N9N7_9BACT NADPH-dependent 7-cyano- 7-deazaguanine reductase OS=Candidatus Sulfotelmatobact er sp. SbA7 OX=2043160 GN=queF PE=3 SV=1
MPKPRRYTDEHASAGLDHNFPEIETWPNQFPAYEIVVDDPEFTSVCPKTGLPDFGNIVIRYMPDRRCLELKSLKEYLQAYRNLGIFQENIVNQVLEDVVRCAKPVWAEVKGEFRPRGGISTVVIARWPRKRGQR

SEQ ID NO: 45141 - protein, 154 aa, Sulfotelmatobacter kueseliae
  misc_feature (1)..(154): tr|A0A2U3L2C5|A0A2U3L2C5_9BACT NADPH-dependent 7-cyano- 7-deazaguanine reductase OS=Candidatus Sulfotelmatobact er kueseliae OX=2042962 GN=queF PE=3 SV=1
MVPVWMRTAGFGGMGATRYNSGMAKSPRYTPQHAAAGLDAKFPEIETWPNQFPGYEIVVDDPEFTSVCPKTGLPDFGVLTIRYMPDQHCLELKSLKEYLHAYRNLGIFQENVVNRVLEDVVKWAKPVWAEVKGEFRPRGGISTTIVAKWPRPKS

SEQ ID NO: 45142 - protein, 134 aa, Sulfotelmatomonas gaucii
  misc_feature (1)..(134): tr|A0A2N9LSV8|A0A2N9LSV8_9BACT NADPH-dependent 7-cyano- 7-deazaguanine reductase OS=Candidatus Sulfotelmatomona s gaucii OX=2043161 GN=queF PE=3 SV=1
MGMASTRRYTAKHAGAGRDFAFPAIETWENQFPGYEIEIDDPELTSVCPKTGLPDFGKLTIRYMPRKHCLELKSLKEYLFSYRNLGIFQENIVNQVLEDVVKACRPVWAVVRGEFRPRGGIGTTIEARWPRPKS

SEQ ID NO: 45143 - protein, 129 aa, Sulfuricurvum sp.
  misc_feature (1)..(129): tr|K7SXU8|K7SXU8_9HELI NADPH-dependent 7-cyano-7-deazag uanine reductase OS=Candidatus Sulfuricurvum sp. RIFRC- 1 OX=1249480 GN=queF PE=3 SV=1
MKYGEQIVENFDIEKDFEIWPNQHERDYVIKVTLPEFTCLCPRSGYPDFATIYVEYTPDKWVAELKAIKLYINSFRNRHISHENSANEIYSTFESKIAPKRLKVVADYFPRGNVHTVVEIDSEKMERSR

SEQ ID NO: 45144 - protein, 131 aa, Synechococcus spongiarum
  misc_feature (1)..(131): tr|A0A1T1CNS8|A0A1T1CNS8_9SYNE NADPH-dependent 7-cyano- 7-deazaguanine reductase OS=Candidatus Synechococcus sp ongiarum LMB bulk15M OX=1943582 GN=queF PE=3 SV=1
MTERQTTTPRYGERAIAAAELICFDNPNPGRPYHIAIELPDFTCKCPFSGYPDFAVLRLRYQPGPKVLELKALKLYVNSWRDLCISHEEVANRILDDCVAACSPRWMELVADFSPRGNVHTVITVHHGQPR

SEQ ID NO: 45145 - protein, 131 aa, Synechococcus spongiarum
  misc_feature (1)..(131): tr|A0A171DGF6|A0A171DGF6_9SYNE NADPH-dependent 7-cyano- 7-deazaguanine reductase OS=Candidatus Synechococcus sp ongiarum OX=431041 GN=queF PE=3 SV=1
MTERQTTTPRYGERAIAAAELICFDNPNPGRPYHVAIELPDFTCKCPFSGYPDFAVLRLCYQPGPKVLELKALKLYVNSWRDHCISHEEVANRILDDCVAACSPRWMELVADFSPRGNVHTMITVHHGQRQ

SEQ ID NO: 45146 - protein, 278 aa, Tachikawaea gelatinosa
  misc_feature (1)..(278): tr|A0A090AR70|A0A090AR70_9ENTR NADPH-dependent 7-cyano- 7-deazaguanine reductase OS=Candidatus Tachikawaea gela tinosa OX=1410383 GN=queF PE=3 SV=1
MNKNFIINLKRKMLKNNIYKNQYSPELLQKISRKKNRILLKSNNSFSYGEDIWNLYEISWLQKNGFPQIAIGEIIVPFDTEYFIESKSLKLYLNSLNQTFFDNESDVSKVIQSDLTHCILHDIKVTLFPISYFSSKKINFFEGECLDDYNINIKNFEYNTNDLLNATEPVKIKNKTLFTNLFKANCPITNQPDWGSVQIIYSGNRIKKKNIIKYLFSFRKHREYHEQCAEIIFDDIKHFCKPNELFIYLRFVRRGGIDINIWRGTRSFAPINSRLARQ

SEQ ID NO: 45147 - protein, 132 aa, Tectomicrobia bacterium
  misc_feature (1)..(132): tr|A0A1F7T779|A0A1F7T779_9BACT NADPH-dependent 7-cyano- 7-deazaguanine reductase OS=Candidatus Tectomicrobia ba cterium RIFCSPLOWO2_12_FULL_69_37 OX=1802343 GN=queF PE =3 SV=1
MAGEKKYGARMIAGAKLEAVPNPSRERDYVIDFTIPEFTCLCPISNFPDFAAIRIRYVPGETIVELKSLKLYINRFRDQELFHEQAVNRILNDLVAACSPKWAWIEGDFNVRGNIKTRVRAAHGARPPGVPD

SEQ ID NO: 45148 - protein, 132 aa, Tectomicrobia bacterium; identical to SEQ ID NO: 45147
  misc_feature (1)..(132): tr|A0A1F7T9J1|A0A1F7T9J1_9BACT NADPH-dependent 7-cyano- 7-deazaguanine reductase OS=Candidatus Tectomicrobia ba cterium RIFCSPLOWO2_02_FULL_70_19 OX=1802342 GN=queF PE =3 SV=1

SEQ ID NO: 45149 - protein, 129 aa, Tenderia electrophaga
  misc_feature (1)..(129): tr|A0A0S2TEE1|A0A0S2TEE1_9GAMM NADPH-dependent 7-cyano- 7-deazaguanine reductase OS=Candidatus Tenderia electro phaga OX=1748243 GN=queF PE=3 SV=1
MSTQPTKELETFANPMPQRDYTIRIDVPEFTCLCPKTGQPDFATFKIEYVPEQKCVELKALKLYMWSFRDAGAFHEKVTNDILADLVAATAPRFMRITGVFNVRGGIYTTVIAEHRAPNWTPPTPVSLP

SEQ ID NO: 45150 - protein, 155 aa, Terasakiella magnetica
  misc_feature (1)..(155): tr|A0A1C3RLY4|A0A1C3RLY4_9RHIZ NADPH-dependent 7-cyano- 7-deazaguanine reductase OS=Candidatus Terasakiella mag netica OX=1867952 GN=queF PE=3 SV=1
MSDQTIYANLEQLGSTTHSPTHPDEANLEAVKNPHPGTDYLVRFTCPEFTSLCPVTGQPDFAHIVIDYVPEDLLVESKSLKVFLTSFRNHGDFHEACTVGIAKRLVELLKPKWLRIGGYWYPRGGIPIDVFWQTGEAPKAVWIPDQDVPGYRGRG

SEQ ID NO: 45151 - protein, 133 aa, Termititenax aidoneus
  misc_feature (1)..(133): tr|A0A388T876|A0A388T876_9BACT NADPH-dependent 7-cyano- 7-deazaguanine reductase OS=Candidatus Termititenax aid oneus OX=2218524 GN=queF PE=3 SV=1
MVKAEGLKLPFETPDKIAPETLEVFPYTLPELKVGRIPKQLITYTTKEFSAVCPFSGLPDIATVTIEYVPDKKVLELKSLKYYFLSYRNVGIYQEHATQKIFADLQKALCPQKLKVTTLYNTRGGLDTTCVLE

SEQ ID NO: 45152 - protein, 134 aa, Termititenax persephonae
  misc_feature (1)..(134): tr|A0A388TFC8|A0A388TFC8_9BACT NADPH-dependent 7-cyano- 7-deazaguanine reductase OS=Candidatus Termititenax per sephonae OX=2218525 GN=queF PE=3 SV=1
MVRADGEKLPFAKPDSIRPELLETFPYALPELAIGQTPNQRITCTTPEFSAVCPFSGLPDIATVTIEYTPNQKIIELKSLKYYLLSYRQVGIYQEHATQKIFADLQKVLRAKQLKVTTSYNTRGGIDTTCVIEK

SEQ ID NO: 45153 - protein, 131 aa, Thermochlorobacter aerophilum
  misc_feature (1)..(131): tr|A0A395LZT5|A0A395LZT5_9BACT NADPH-dependent 7-cyano- 7-deazaguanine reductase OS=Candidatus Thermochlorobact er aerophilum OX=1868324 GN=queF PE=3 SV=1
MKPELLETFENKFPDRDYVIEIVNPEFTSVCPRTGLPDFGTVTIRYVPDKVCVELKSLKYYFLEYRNAGIFYENVTNTILDHLQQVLKPREITVITEWRARGGITEKVTAEYKAKPQRTRTGFVLEERAQS

SEQ ID NO: 45154 - protein, 128 aa, Thermochlorobacteriaceae bacterium
  misc_feature (1)..(128): tr|A0A081SIQ4|A0A081SIQ4_9BACT NADPH-dependent 7-cyano- 7-deazaguanine reductase OS=Candidatus Thermochlorobact eriaceae bacterium GBChlB OX=1519464 GN=queF PE=3 SV=1
MKPELLEVFENQFPNRDYTIEIVNPEFTSVCPKTGLPDFGTVTMRYIPDKVCVELKSLKYYFLEFRNAGIFYENVTNTILDHLIDKLKPREIVVKSEWKARGGITETVTAEYKGKSQKSRIGFASAEQ

SEQ ID NO: 45155 - protein, 133 aa, Thermofonsia Clade
  misc_feature (1)..(133): tr|A0A2M8QEB0|A0A2M8QEB0_9CHLR Uncharacterized protein OS=Candidatus Thermofonsia Clade 3 bacterium OX=2364212 GN=CUN48_05205 PE=4 SV=1
MLRCYDPSALSRCDAMIQADIKTIPNAKSLRTYTVTLTYPAFRCRYEMEPEKTNFAVMTITYAPNEVIFDFPSFMAYLRSFEDTPISLESAANRVLDDMFERLRPIWARVHVRTEREHGVVIEIAAEHGQPVR

SEQ ID NO: 45156 - protein, 131 aa, Thermokryptus mobilis
  misc_feature (1)..(131): tr|A0A0S4N7E2|A0A0S4N7E2_9BACT NADPH-dependent 7-cyano- 7-deazaguanine reductase OS=Candidatus Thermokryptus mo bilis OX=1643428 GN=queF PE=3 SV=1
MEDRKLKYGEEAILNAQLETWENPYPDRDYKIEITFPEFTCLCPRSGYPDFATIRITYIPDKYIVELRSLKLYLNKYRSEYISHEAATNKIYDDLEKLLKPRFLEVVGDWNPRGNVKTIITVSSKDKETVK

SEQ ID NO: 45157 - protein, 129 aa, Thiodiazotropha endoloripes
  misc_feature (1)..(129): tr|A0A1E2USV9|A0A1E2USV9_9GAMM NADPH-dependent 7-cyano- 7-deazaguanine reductase OS=Candidatus Thiodiazotropha endoloripes OX=1818881 GN=queF PE=3 SV=1
MPSEPSKDLETFQNPQPERDYTIRINIPEFTCLCPKTGQPDFAEMTLEYVPEKLCVELKALKMYIWSFRDQGAFHEAVTNEILADLVAATQPRYMRLTAEFNVRGGIYTTVVADHRAEDWQPPVPVTLP

SEQ ID NO: 45158 - protein, 129 aa, Thiodictyon syntrophicum
  misc_feature (1)..(129): tr|A0A2K8U1Z0|A0A2K8U1Z0_9GAMM NADPH-dependent 7-cyano- 7-deazaguanine reductase OS=Candidatus Thiodictyon synt rophicum OX=1166950 GN=queF PE=3 SV=1
MPSAPSRSLETFDNPQPGRDYTIRIRVPEFTCLCPKTGQPDFAELTLEYIPDQRCVELKSLKLYVWSYRDEGAFHEAVTNRILDDLVAATGPRFMRLTADFNLRGGIDTTVIAEHRAPGWSAPSLVQLP

SEQ ID NO: 45159 - protein, 78 aa, Thioglobus sp.
  misc_feature (1)..(78): tr|A0A432TVH6|A0A432TVH6_9GAMM NADPH-dependent 7-cyano- 7-deazaguanine reductase (Fragment) OS=Candidatus Thiog lobus sp. OX=2026721 GN=DSZ17_05430 PE=3 SV=1
MPSKPSKELEIFDNPNADRDYVIRIDMPEFTCLCPKTGQPDFATLHLEYIADKACVELKSLKMYIWSFRDEGTFHEAV

SEQ ID NO: 45160 - protein, 131 aa, Thioglobus sp.
  misc_feature (1)..(131): tr|A0A432TSA9|A0A432TSA9_9GAMM NADPH-dependent 7-cyano- 7-deazaguanine reductase OS=Candidatus Thioglobus sp. O X=2026721 GN=queF PE=3 SV=1
MPSKPSKELEIFDNPNADRDYVIRIDMPEFTCLCPKTGQPDFATLHLEYIADKACVELKSLKMYIWSFRDEGTFHEAVTNQILDDLVAATNPRFMRLKSIFNVRGGVYTEVITEYQHPGWTQQPVVNLQHL

SEQ ID NO: 45161 - protein, 129 aa, Thiomargarita nelsonii
  misc_feature (1)..(129): tr|A0A0A6P6Y3|A0A0A6P6Y3_9GAMM NADPH-dependent 7-cyano- 7-deazaguanine reductase OS=Candidatus Thiomargarita ne lsonii OX=1003181 GN=queF PE=3 SV=1
MPSQPSKKFEIFDNPNPERDYTIHIRMPEFTCLCPKTGQPDFATLFLDYVPDKLCIELKSLKNYIWSYRNEGAFHEAVTNQILNDLVEACMPRFMRLRAEFNVRGGIYTIVTCEHFAPGWTPPMAVHLP

SEQ ID NO: 45162 - protein, 129 aa, Thiomargarita nelsonii
  misc_feature (1)..(129): tr|A0A0A6P2D9|A0A0A6P2D9_9GAMM NADPH-dependent 7-cyano- 7-deazaguanine reductase OS=Candidatus Thiomargarita ne lsonii OX=1003181 GN=queF PE=3 SV=1
MPSQASKRFEIFDNPNSERDYTIHIRIPEFTCLCPKTGQPDFATLFLDYVPDKLCIELKSLKNYIWSYRNEGAFHEAVTNQILNDLVQACMPRFMRLRAEFNVRGGIYTIVTCEHFAPGWTPPRPVHLP

SEQ ID NO: 45163 - protein, 154 aa, Tokpelaia hoelldoblerii
  misc_feature (1)..(154): tr|A0A1U9JUV7|A0A1U9JUV7_9RHIZ NADPH-dependent 7-cyano- 7-deazaguanine reductase OS=Candidatus Tokpelaia hoelld oblerii OX=1902579 GN=queF PE=3 SV=1
MTDTIYSNLTQLGGKADLPASPEQAILEKVPNPQSGTLYAVRFAAPEFTSLCPITAQPDFAHLVIDYVPDSWLVESKSLKLYLGSFRNHGAFHEDCTVSIGRKLAELLSPHWLRIGGYWYPRGGIPIDVFWQTGTAPEGVWIPDQGVPPYRGRG

SEQ ID NO: 45164 - protein, 285 aa, Candidimonas bauzanensis
  misc_feature (1)..(285): tr|A0A1M5N7F0|A0A1M5N7F0_9BURK NADPH-dependent 7-cyano- 7-deazaguanine reductase OS=Candidimonas bauzanensis OX =658167 GN=queF PE=3 SV=1
MDGRCPSHSFAMPDPILARAPLGQDVSYPDSYDPALLFPIDRAANREKLRIPHPWHGDDIWNAYEMSWLTPKGKPVAGVARFTFPADSPRLVESKSFKLYLNSLNEERFEHSGLVRACLARDLAEAAGAPVEVEIDTHIGQSTQLCRPMEGIRIDDADIDVSAYRPSAGLLRCQPDAALVSETLMSDLLKSNCPVTGQPDWGSVQVRYTGPQIDRAALLEYIVSLRRHNEFHEHCVEQMYCDIWQACQPESLLVYARYTRRGGLDINPWRSSRPASVSQVRTVRQ

SEQ ID NO: 45165 - protein, 285 aa, Candidimonas nitroreducens
  misc_feature (1)..(285): tr|A0A225N3Z7|A0A225N3Z7_9BURK NADPH-dependent 7-cyano- 7-deazaguanine reductase OS=Candidimonas nitroreducens OX=683354 GN=queF PE=3 SV=1
MTDIDTKLTHAPLGHEVAYPRSYDPALLFPIERRASRASLPQPRPGWHGADIWNAYEISWLGPRGKPLAAAASFVFPQDSTHLIESKSFKLYLNSYNESRHESAAQVCTLMQRDLQQACGAPVEVKIYKLDGPDGADRSDGPCAPPRPLQGLNIDGLDVDIARYTPAPQLLRLAADAARVEETLVSDLLKTNCPVTGQPDWGSVQIRYAGPRIDRGALLAYIVSLRQHNEFHEHCVERMYCDIWQACRPEALFVYARYTRRGGLDINPWRASHPAQVANVRTVRQ

SEQ ID NO: 45166 - protein, 274 aa, Candidimonas sp.
  misc_feature (1)..(274): tr|A0A522Q202|A0A522Q202_9BURK NADPH-dependent 7-cyano- 7-deazaguanine reductase OS=Candidimonas sp. OX=1912597 GN=queF PE=3 SV=1
MSKSGLRGAPLGHDVAYPDHYDPDLLFPIARQTNRATLAPLPTWTGADIWTAYEVSWLNSRGKPIVAMAQLLFPESSPCLIESKSLKLYLNSLTETRFDEEEAVRALIARDLSLAAGAPVAIALSRLDRQAPITLSPMSGINIDGLDIDVKHYRPAPNLLRCEPGGTMVDETLTSDLLKSNCPVTGQPDWGSVQIRYRGPRIDRRSLLEYIVSLRTHREFHEHCVEKMYCDLWRACQPAWLLVYARYTRRGGLDINPWRASSATEVSQGRTPRQ

SEQ ID NO: 45167 - protein, 276 aa, Candidimonas sp.
  misc_feature (1)..(276): tr|A0A522PQ71|A0A522PQ71_9BURK NADPH-dependent 7-cyano- 7-deazaguanine reductase OS=Candidimonas sp. OX=1912597 GN=queF PE=3 SV=1
MTDSILAKAPLGHDAPYPTAYDPTVLFPIARQGNRQTLAIQPAPAWHGADIWNAYELSWLNLKGKPVVATGCFVFSQASPCIIESKSFKLYLNSFNEGRYENLASVQQRMQHDLSDAAGAPVEVRLNPMATDSKENYRPLAGINIDGIDVDIDRYTPAPELLRCMPQAAAASEVLVSDLLKSNCPVTGQPDWGSLQVSYSGPQMDRAALLKYIISLRRHNEFHEHCVERMYCDIWQACRPSALRVYARYTRRGGLDINPWRASVAAHVDNRRTVRQ

SEQ ID NO: 45168 - protein, 289 aa, Carboxylicivirga sp.
  misc_feature (1)..(289): tr|A0A553GN16|A0A553GN16_9BACT NADPH-dependent 7-cyano- 7-deazaguanine reductase QueF OS=Carboxylicivirga sp. M 1479 OX=2594476 GN=FNN09_08790 PE=4 SV=1
MLEDKFLGKQVDYPQSYAPEMLVAVPRYLNREKYHLSNDQLPFIGFDSWHAYELSFLTKKGLPVTGLLKIVYPATNPSIVESKSLKLYLNSFNMHRFGTSAKEGLDLVLSTIKKDLDKLLETDVNLGFFNAENDDAQFDFDNYTILEQSKNVDEIEFVHFNENPQLLTPSNKKGELKVASHLLRSNCKITNQPDWGSVYIHINGDALPDLDGLLQYIVSIRNENHFHEEICEMIYKRLWDTYSPNELAVSCIYTRRGGIDICPVRVSHQHLLPSKLISSDILSSKLLRQ

SEQ ID NO: 45169 - protein, 146 aa, Carboxylicivirga sp.
  misc_feature (1)..(146): tr|A0A553G884|A0A553G884_9BACT NADPH-dependent 7-cyano- 7-deazaguanine reductase OS=Carboxylicivirga sp. M1479 OX=2594476 GN=queF PE=3 SV=1
MEQKVLTYKNIDTTILKSLPNPSGEAYEIKIKIPEFTFLGVKNQPDFADVFITFYPKKKIIELKSLKEYVQHLRNITVSYERLINVFYDHMVEAYDPERIRVTMICNPRGGISSKLTVDSDWKVRGGNEKFSDWKNNLEDTWQVTM

SEQ ID NO: 45170 - protein, 153 aa, Cardiobacterium hominis
  misc_feature (1)..(153): tr|C8N6P7|C8N6P7_CARH6 NADPH-dependent 7-cyano-7-deazag uanine reductase OS=Cardiobacterium hominis (strain ATC C 15826 / DSM 8339 / NCTC 10426 / 6573) OX=638300 GN=qu eF PE=3 SV=1
MTKPEAPAGISLLGNHNAAVPHTYAPEILEAFPNKHPDNDYLVSLVCPEFTSICPITGQPDFATIRIAYIPDGKLVESKSLKLYLFSFRNHGDFHEDCVNIIMKDLIRLMQPKYIEVFGEFTPRGGIAIHPLAVYGRPGTVYETRAADRLHHR

SEQ ID NO: 45171 - protein, 153 aa, Cardiobacterium hominis; identical to SEQ ID NO: 45170
  misc_feature (1)..(153): tr|A0A1C3H241|A0A1C3H241_9GAMM NADPH-dependent 7-cyano- 7-deazaguanine reductase OS=Cardiobacterium hominis OX= 2718 GN=queF PE=3 SV=1

SEQ ID NO: 45172 - protein, 151 aa, Cardiobacterium valvarum
  misc_feature (1)..(151): tr|A0A381EE45|A0A381EE45_9GAMM NADPH-dependent 7-cyano- 7-deazaguanine reductase OS=Cardiobacterium valvarum OX =194702 GN=queF PE=3 SV=1
MTNLTLLGDKNAAIPSNYAPDILEAFPNKHPGNDYLVTLHCPEFTSLCPITGQPDFAAIHIAYIPDALLVESKSLKLYLFSFRNHGDFHEDCVNIIMKDLIRLMQPKYIEVYGAYTPRGGIAIHPYANYGQPGTRYAEHAAARLLNRPLTA

SEQ ID NO: 45173 - protein, 145 aa, Cardiobacterium valvarum
  misc_feature (1)..(145): tr|G9ZGE4|G9ZGE4_9GAMM NADPH-dependent 7-cyano-7-deazag uanine reductase OS=Cardiobacterium valvarum F0432 OX=7 97473 GN=queF PE=3 SV=1
MTTLTLLGDKNAAIPSGYAPDILEAFPNKHPGNDYLVTLHCPEFTSLCPITGQPDFAAIHIAYIPDALLVESKSLKLYLFSFRNHGDFHEDCVNIIMKDLIRLMQPKYIEVYGAYTPRGGIAIHPYANYGIGPAPATPNTPLPAF

SEQ ID NO: 45174 - protein, 166 aa, Caryophanon tenue
  misc_feature (1)..(166): tr|A0A1C0YCZ3|A0A1C0YCZ3_9BACL NADPH-dependent 7-cyano- 7-deazaguanine reductase OS=Caryophanon tenue OX=33978 GN=queF PE=3 SV=1
MSTRKQTEGLQDLTLLGNQNVQYAFSYAPEVLEAVPNKHTGRDYFVKFNCPEFTSLCPITNQPDFATMYISYVPDEQIVESKSLKLYLFSFRNHGDFHEDCVNIIMDDLIKLLNPRYIEVWGKFTPRGGISIDPWCNYGRPGTKYEEIAHYRLMNHDMNPETIDNR

SEQ ID NO: 45175 - protein, 276 aa, Castellaniella defragrans
  misc_feature (1)..(276): tr|W8X3R2|W8X3R2_CASDE NADPH-dependent 7-cyano-7-deazag uanine reductase OS=Castellaniella defragrans 65Phen OX =1437824 GN=queF PE=3 SV=1
MNPDSLSASPLGRSTPGSAHYDPALLFPIARADTRAGLDLPQATHGADIWNAYELSWLNAKGKPVVAIGRFTVPMDSPSLIESKSLKLYLNSYNEERFEYADIVRQRLHTDLSRACGKPVHVEILSVRPAFELSCAPLRGTCIDDQDLDFEAGRTPRPDSLVLSEPAPFVREVLVSELLKSNCPVTGQPDWASLQIRYAGPRIDHAGLLRYIVSLRQHQEFHELCVEKIYGEIMRRCAPEELLVYARYTRRGGLDINPWRASHQPTDIGQTRTLRQ

SEQ ID NO: 45176 - protein, 276 aa, Castellaniella sp.
  misc_feature (1)..(276): tr|A0A522TJU9|A0A522TJU9_9BURK NADPH-dependent 7-cyano- 7-deazaguanine reductase OS=Castellaniella sp. OX=19558 12 GN=queF PE=3 SV=1
MDRSSLADSPLGHSTHGSDHYDPTLLFPIERALTRASLGPLQATHGADIWNAYELSWLDKNGKPVVAMGRFTVPMDTPRLIESKSLKLYLNSFNEERFEYADIVRQRLYTDLSRACGKPVHIEILSVRPAFELSCAPLQGTCIDDQDVACEPATAPHPEFLKQTQPAPFMRETLVSELLKSNCPVTGQPDWASLQIRYAGPRIDRAGLLQYIVSLRRHQEFHELCVEKIYGEILQRCAPEQLMVYARYTRRGGLDINPWRANFDPGDVGQTRTLRQ

SEQ ID NO: 45177 - protein, 281 aa, Catenovulum agarivorans
  misc_feature (1)..(281): tr|W7QSC9|W7QSC9_9ALTE NADPH-dependent 7-cyano-7-deazag uanine reductase OS=Catenovulum agarivorans DS-2 OX=132 8313 GN=queF PE=3 SV=1
MSEQNTSVLPELKLGKATEYIDRYDPTQLQAVPRKLMRDKLPKNTQAFLGVDIWTGYEISWLLPSGKPVVYIGEFIFSANSSNIVESKSFKLYLNSFNQSKFDSIEDVVELMQNDLTQCCGAPVEVKLYPLGQFAKRRVTYFAGQCIDNIDVEITRYDYAPNQLQLADSRQIVEETLVSHLLKSNCLVTGQPDWASIEIYYQGQAFDHASVLKYLIGFRNHNEFHEHCVERIFRDLETQLRPDKLSVYARYTRRGGLDINPLRVSHMSLLKSKPEHRLVRQ

SEQ ID NO: 45178 - protein, 282 aa, Catenovulum maritimum
  misc_feature (1)..(282): tr|A0A0J8GSH5|A0A0J8GSH5_9ALTE NADPH-dependent 7-cyano- 7-deazaguanine reductase OS=Catenovulum maritimum OX=15 13271 GN=queF PE=3 SV=1
MSDINSSNLLKELKLGKETTYVSHYDPSQLEAVPRALTRESLPKLEQEFTGYDLWTGYEISWLDLNGKPIVKIGEFRFSANSDNLVESKSFKLYLNSFNQSQFSSVEEVVTKMTTDLAKTSGLAVEVKLFDLAEYTEFGLAKLVSTNLDKQAIKITEYDYNPDLLKLASESQEVTESICSHLLKSNCLVTGQPDWGSLVIEYTGQKICHEGLLKYIISFRGHNEFHEHCVERIYSDIQSKFNPKALLVYARYTRRGGLDINPLRASSPELINQVNNLRLVRQ

SEQ ID NO: 45179 - protein, 284 aa, Catenovulum sp.
  misc_feature (1)..(284): tr|A0A2S0VM01|A0A2S0VM01_9ALTE NADPH-dependent 7-cyano- 7-deazaguanine reductase OS=Catenovulum sp. CCB-QB4 OX= 2172099 GN=queF PE=3 SV=1
MPKNNTSHLLDQLTLGKNTEYKSSYDPSLLDTVPRSLTRQTLGIDEQHLPFVGVDIWTGYEVSWLNNKGKPQVAIAEFNFQFDSDVLVESKSFKLYLNSFNQSRFENWQQVQSVMTQDLTQASGKPVQVSLFSLDDYTNKGLCRPAQNHSVNLDQLDIDIDIYDYEPNLLKPLDKPLNVSETLVSHLLKSNCLVTGQPDWASVVIEYSGQALDHESVLKYLISFRGHNEFHEHCVERIYVDINNLIKPERLMVYARYTRRGGLDINPLRSSTKINAPFERLVRQ

SEQ ID NO: 45180 - protein, 151 aa, Caulobacter flavus
  misc_feature (1)..(151): tr|A0A2N5CZK7|A0A2N5CZK7_9CAUL NADPH-dependent 7-cyano- 7-deazaguanine reductase OS=Caulobacter flavus OX=16794 97 GN=queF PE=3 SV=1
MTELSVTQLGQTVAAPESPEEAVLEAVPNPQSDVLYLARFVAPEFTSLCPVTGQPDFAHLVIDYAPGDWLIESKSLKLYLTSFRNHGSFHEDCTVKVARKIVEVAKPRWLRIGGYWYPRGGIPIDVFWQTGPAPEGLWVPDQGVAPYRGRG

SEQ ID NO: 45181 - protein, 151 aa, Caulobacter henricii
  misc_feature (1)..(151): tr|A0A0P0NX70|A0A0P0NX70_9CAUL NADPH-dependent 7-cyano- 7-deazaguanine reductase OS=Caulobacter henricii OX=693 95 GN=queF PE=3 SV=1
MTDLNVTQLGQMVDAPVSPDAAILERVPNPQSDVLYLARFVAPEFTSLCPVTSQPDFAHLVIDYAPGDWLIESKSLKLYLTSFRNHGSFHEDCTVKVARKIVEIAEPRWLRIGGYWYPRGGIPIDVFWQTGPAPEGLWVPDQGVAPYRGRG

SEQ ID NO: 45182 - protein, 151 aa, Caulobacter mirabilis
  misc_feature (1)..(151): tr|A0A2D2B3Q5|A0A2D2B3Q5_9CAUL NADPH-dependent 7-cyano- 7-deazaguanine reductase OS=Caulobacter mirabilis OX=69 666 GN=queF PE=3 SV=1
MTTEHLTQLGRAVEAPDRPEDAVLERVPNPQNDTLYLARFVAPEFTSVCPVTGQPDFAHLVIDYAPGDWLIESKSLKLYLTSFRNHGAFHEDCTVAIGRKIFDTAQPKWLRIGGYWYPRGGIPIDVFWQSGPAPEGLWLPDQGVPPYRGRG

SEQ ID NO: 45183 - protein, 151 aa, Caulobacter radicis
  misc_feature (1)..(151): tr|A0A2T9K4H5|A0A2T9K4H5_9CAUL NADPH-dependent 7-cyano- 7-deazaguanine reductase OS=Caulobacter radicis OX=2172 650 GN=queF PE=3 SV=1
MTELSVTQLGQTVAAPASPEEAVLEAVPNPQNDVLYLARFVAPEFTSLCPVTGQPDFAHLVIDYAPGDWLIESKSLKLYLTSFRNHGSFHEDCTVKVARKIVEVAKPRWLRIGGYWYPRGGIPIDVFWQTGPAPEGLWVPDQGVAPYRGRG

SEQ ID NO: 45184 - protein, 151 aa, Caulobacter rhizosphaerae
  misc_feature (1)..(151): tr|A0A561NXY3|A0A561NXY3_9CAUL NADPH-dependent 7-cyano- 7-deazaguanine reductase OS=Caulobacter rhizosphaerae O X=2010972 GN=queF PE=3 SV=1
MTELHVTQLGQVVEPAASPDQAVLERVPNPQSDVTYLARFVAPEFTSLCPVTGQPDFAHLVIDYAPGDWLIESKSLKLYLTSFRNHGSFHEDCTVKIGRKIVEIAAPRWLRIGGYWYPRGGIPIDVFWQTGPAPEGLWVPDQGVAPYRGRG

SEQ ID NO: 45185 - protein, 151 aa, Caulobacter segnis
  misc_feature (1)..(151): tr|A0A2W5V4X4|A0A2W5V4X4_9CAUL NADPH-dependent 7-cyano- 7-deazaguanine reductase OS=Caulobacter segnis OX=88688 GN=queF PE=3 SV=1
MTDLNVTQLGRVVDAPDSPEAAVLERVPNPQSDVLYLARFVAPEFTSLCPVTGQPDFAHLVIDYAPGDWLIESKSLKLYLTSFRNHGSFHEDCTVKVARKIVEIAEPRWLRIGGYWYPRGGIPIDVFWQTGPAPEGLWVPDQGVAPYRGRG

SEQ ID NO: 45186 - protein, 151 aa, Caulobacter segnis
  misc_feature (1)..(151): tr|D5VIH6|D5VIH6_CAUST NADPH-dependent 7-cyano-7-deazag uanine reductase OS=Caulobacter segnis (strain ATCC 217 56 / DSM 7131 / JCM 7823 / NBRC 15250 / LMG 17158 / TK0 059) OX=509190 GN=queF PE=3 SV=1
MTDLNVTQLGRVVDAPDSPEAAVLERVPNPQSDVLYLARFVAPEFTSLCPVTGQPDFAHLVIDYAPGDWLIESKSLKLYLTSFRNHGSFHEDCTVKVARKIVEIAQPRWLRIGGYWYPRGGIPIDVFWQTGSAPEGLWVPDQGVAPYRGRG

SEQ ID NO: 45187 - protein, 151 aa, Caulobacter sp.
  misc_feature (1)..(151): tr|A0A0Q7W289|A0A0Q7W289_9CAUL NADPH-dependent 7-cyano- 7-deazaguanine reductase OS=Caulobacter sp. Root1472 OX =1736470 GN=queF PE=3 SV=1
MTELHVTQLGQVVEPAASPDQAVLERVPNPQSDVTYLARFVAPEFTSLCPVTGQPDFAHLVIDYAPGDWLIESKSLKLYLTSFRNHGSFHEDCTVKIGRKIVEIAAPRWLRIGGYWYPRGGIPIDVFWQTGPAPEGLWVPDQGVAAYRGRG

SEQ ID NO: 45188 - protein, 151 aa, Caulobacter sp.
  misc_feature (1)..(151): sp|B0T8W6|QUEF_CAUSK NADPH-dependent 7-cyano-7-deazagua nine reductase OS=Caulobacter sp. (strain K31) OX=36660 2 GN=queF PE=3 SV=1
MTELHVTQLGQVVEPAASPDQAVLERVPNPQSDVTYLARFVAPEFTSLCPVTGQPDFAHLVIDYAPGDWLIESKSLKLYLTSFRSHGSFHEDCTVKIGRKIVEIAQPRWLRIGGYWYPRGGIPIDVFWQTGPAPEGLWVPDQGVAPYRGRG

SEQ ID NO: 45189 - protein, 151 aa, Caulobacter vibrioides
  misc_feature (1)..(151): tr|A0A0V2FFV5|A0A0V2FFV5_CAUVI NADPH-dependent 7-cyano- 7-deazaguanine reductase OS=Caulobacter vibrioides OX=1 55892 GN=queF PE=3 SV=1
MTELSVTQLGQTVAAPENPEAAVLEAVPNPQSDVLYLARFVAPEFTSLCPVTGQPDFAHLVIDYAPGDWLIESKSLKLYLTSFRNHGSFHEDCTVKVARKIVEVAKPRWLRIGGYWYPRGGIPIDVFWQTGPAPEGLWVPDQGVAPYRGRG

SEQ ID NO: 45190 - protein, 151 aa, Caulobacter vibrioides
  misc_feature (1)..(151): sp|Q9A515|QUEF_CAUVC NADPH-dependent 7-cyano-7-deazagua nine reductase OS=Caulobacter vibrioides (strain ATCC 1 9089 / CB15) OX=190650 GN=queF PE=3 SV=1
MTDLNVTQLGRVVDAPESPEAAVLERVPNPQSDVLYLARFVAPEFTSLCPVTGQPDFAHLVIDYAPGDWLIESKSLKLYLTSFRNHGSFHEDCTVKVARKIVEIAQPRWLRIGGYWYPRGGIPIDVFWQTGPAPEGLWVPDQGVAPYRGRG

SEQ ID NO: 45191 - protein, 151 aa, Caulobacter zeae; identical to SEQ ID NO: 45183
  misc_feature (1)..(151): tr|A0A2N5DQ28|A0A2N5DQ28_9CAUL NADPH-dependent 7-cyano- 7-deazaguanine reductase OS=Caulobacter zeae OX=2055137 GN=queF PE=3 SV=1

SEQ ID NO: 45192 - protein, 150 aa, Caulobacteraceae bacterium
  misc_feature (1)..(150): tr|A0A1B1ALQ2|A0A1B1ALQ2_9CAUL NADPH-dependent 7-cyano- 7-deazaguanine reductase OS=Caulobacteraceae bacterium OTSz_A_272 OX=1759059 GN=queF PE=3 SV=1
MSEGLTQLGQAASIPTSPDQARLERAPNPHPGTLYLARFTAPEFTSICPVTGQPDFGVLVLDYAPQDWIAESKSLKLFLQSFRNHGAFHEDCTLHVAKRVIEAISPTWLRIGGYWNPRGGMPIDVFWQTGAPPEGLWLPDQGVATYRSRG

SEQ ID NO: 45193 - protein, 154 aa, Caulobacteraceae bacterium
  misc_feature (1)..(154): tr|A0A4Q3SG02|A0A4Q3SG02_9CAUL NADPH-dependent 7-cyano- 7-deazaguanine reductase OS=Caulobacteraceae bacterium OX=1978230 GN=queF PE=3 SV=1
MTTTDVSGLTQLGSSTASPQNPDEAVLEKVPTANGAMDYVVRFVCPEFTSLCPMTGQPDFAHIVIDYVPDAWLVESKSLKLFMHSFRNHGAFHEDCTMEIAKRLTSLLSPKWFRIGAYWYPRGGIPIDVFWQSGKAPEHVWVPDQGVAPYRGRG

SEQ ID NO: 45194 - protein, 153 aa, Caulobacterales bacterium
  misc_feature (1)..(153): tr|A0A1F8I1R3|A0A1F8I1R3_9PROT NADPH-dependent 7-cyano- 7-deazaguanine reductase OS=Caulobacterales bacterium R IFCSPHIGHO2_01_FULL_70_19 OX=1797585 GN=queF PE=3 SV=1
MTTDTSGLHQLGQMTPAPTSPETAVLERVPNPHADTLYLARFTAPEFTSLCPVTGQPDFAHLVIDYAPGEWLVESKSLKLFLTSFRNHGAFHEDCTVAIGKRLVDLLHPKWLRIGGYWYPRGGIPIDVFWQTGPAPEGLWLPDQGVPTYRGRG

SEQ ID NO: 45195 - protein, 151 aa, Caulobacterales bacterium
  misc_feature (1)..(151): tr|A0A1Q3JFK4|A0A1Q3JFK4_9PROT NADPH-dependent 7-cyano- 7-deazaguanine reductase OS=Caulobacterales bacterium 6 8-7 OX=1895737 GN=queF PE=3 SV=1
MSELPVTQLGRDVPWPTSPEEAVLERVPNPQADVLYLARFTAPEFTSLCPVTGQPDFAHLVIDYAPGDWLIESKSLKLYLGSFRNHGAFHEDCTVAIGRKVVEIAEPRWLRIGGYWYPRGGIPIDVFWQSGAVPDGLWVPDQGVASYRGRG

SEQ ID NO: 45196 - protein, 279 aa, Caviibacterium pharyngocola
  misc_feature (1)..(279): tr|A0A2M8RUW6|A0A2M8RUW6_9PAST NADPH-dependent 7-cyano- 7-deazaguanine reductase OS=Caviibacterium pharyngocola OX=28159 GN=queF PE=3 SV=1
MDYNDSSLQALKLGQQTKYLSNYDRTLLQPVPRRLNRDGLGISEKQPFTFGADIWTAYEISWLNAKGVPQVAIAEVEIDYRSENLIESKSFKLYLNSFNQTKFSSFQQVQTVLQQDLSDCAKGEVKVRLNSLSFYDQMPIATLTGECLDEQDIEIDNYDFNPQLLENCTQDQVADETLVSHLLKSNCLITQQPDWGSIQIHYAGKRIDREKLLRYLVSFRQHNEFHEQCVERIFCDLMRFARPEKLTVYARYTRRGGLDINPFRSNFEQVPSNHRLARQ

SEQ ID NO: 45197 - protein, 280 aa, Cedecea davisae
  misc_feature (1)..(280): tr|S3IMC6|S3IMC6_9ENTR NADPH-dependent 7-cyano-7-deazag uanine reductase OS=Cedecea davisae DSM 4568 OX=566551 GN=queF PE=3 SV=1
MSYENHQALSGLTLGKPTAYQDQYQPSLLQAVPRSLNRDPVGLHADSLPFTGGDIWTLYELSWLNNNGLPQVAVGHVQLDANSVNLVESKSFKLYLNSFNQTRFADWETVQETLKRDLSACAGGDVSVVLFRLHELEGQEISAFSGECIDQQNITIDSYEFDADYLEGAAKEEVVEETLVSHLLKSNCLITHQPDWGSVQIRYRGPKIDREKLLRYLVSFRHHNEFHEQCVERIFNDLQRYCQPQALSVYARYTRRGGLDINPWRTNTDFHPAFGRLVRQ

SEQ ID NO: 45198 - protein, 280 aa, Cedecea lapagei
  misc_feature (1)..(280): tr|A0A3S4KS19|A0A3S4KS19_9ENTR NADPH-dependent 7-cyano- 7-deazaguanine reductase OS=Cedecea lapagei OX=158823 G N=queF PE=3 SV=1
MSYENHQALSGLTLGKPTAYQDQYQPSLLQAVPRSLNRDPLGLHADSLPFSGGDIWTLYELSWLNSKGLPQVAVGHVQLDANSVNLVESKSFKLYLNSFNQTRFADWETVQETLKRDLSACAEGEVSVVLFRLHELEGQEIAAFRGECIDEQDITIDSYEFNADYLQQAAGAEIVEETLVSHLLKSNCLITHQPDWGSVQIHYRGPKIDREKLLRYLVSFRHHNEFHEQCVERIFNDLQRFCQPQTLSVYARYTRRGGLDINPWRTNTDFHPAFGRLTRQ

SEQ ID NO: 45199 - protein, 280 aa, Cedecea lapagei
  misc_feature (1)..(280): tr|A0A2N0CSC7|A0A2N0CSC7_9ENTR NADPH-dependent 7-cyano- 7-deazaguanine reductase OS=Cedecea lapagei OX=158823 G N=queF PE=3 SV=1
MSYENHQALSGLTLGKTTDYRDTYDATLLQGVPRSLNRDPLGLSADALPFVGGDIWTLYELSWLNARGLPQVAVGHVELDYASVNLVESKSFKLYLNSFNQTRFDSWEEVQRTLARDLSACAQGDVTVALYRLNELEGQPVAHFHGTCIDDQEIEIESYEFSTDYLQNAAGEKVVEETLVSHLLKSNCLITHQPDWGSVQIQYRGPKIDREKLLRYLVSFRHHNEFHEQCVERIFNDIQRFCQPEKLSVYARYTRRGGLDINPWRTNTDFVPATGRLVRQ

SEQ ID NO: 45200 - protein, 305 aa, Cedecea neteri
  misc_feature (1)..(305): tr|A0A2X2TJW2|A0A2X2TJW2_9ENTR NADPH-dependent 7-cyano- 7-deazaguanine reductase OS=Cedecea neteri OX=158822 GN =queF_1 PE=3 SV=1
MSYENHQALSGLTLGKPTAYQDQYQPSLLQAVPRSLNRDPLGLHADSLPFSGGDIWTLYELSWLNGNGLPQVAVGHVQLDANSVNLVESKSFKLYLNSFNQTRFADWETVQETLKRDLSACAEGDVSVVLFRLHELEGQEIAAFAGECIDEQDITIDSYDFSADYLQQAAGDDIVEETLVSHLLKSNCLITHQPDWGSVQIRYRGPKIDREKLLRYLVSFRHHNEFHEQCVERIFNDLQRFCQPQTLSVYARYTRRAAWTLTRGGRIPISIPLLAACPVNKCEIAPSAKSESGLRVVKVNKPGLL

SEQ ID NO: 45201 - protein, 280 aa, Cedecea neteri
  misc_feature (1)..(280): tr|A0A089RI49|A0A089RI49_9ENTR NADPH-dependent 7-cyano- 7-deazaguanine reductase OS=Cedecea neteri OX=158822 GN =queF PE=3 SV=1
MSYENHQALSGLTLGKPTAYQDQYQPSLLQAVPRSLNRDPLGLHADSLPFSGGDIWTLYELSWLNNNGLPQVAVGHVQLDANSVNLVESKSFKLYLNSFNQTRFADWETVQETLKRDLSACAEGDVSVVLFRLHELEGQEIAAFGGECIDEQDIAIDSYDFNADYLQQAAGDEIVEETLVSHLLKSNCLITHQPDWGSVQIRYRGPKIDREKLLRYLVSFRHHNEFHEQCVERIFNDLQRFCRPQTLSVYARYTRRGGLDINPWRTNTDFHPAFGRLTRQ

SEQ ID NO: 45202 - protein, 281 aa, Cedecea sp.
  misc_feature (1)..(281): tr|A0A1X7M732|A0A1X7M732_9ENTR NADPH-dependent 7-cyano- 7-deazaguanine reductase OS=Cedecea sp. NFIX57 OX=15662 86 GN=queF PE=3 SV=1
MPDYDEDALSVLGSKIAHPQTYSPSILESLPRSLGRKQAGITGEGNLPFSGFDLWTAYEISWLNEKGKPIVAIGEFEIPATTPGLIESKSLKLYLNSFNQTKIRSHDAVAAILTKDLSQVAGGEVKVRLYPHFIGFNHTIMALPGINIDHEDIDVKDYSFSPEILKNAVTDDAITVSEMLTSNLLKSNCLVTNQPDWGSLIIKYEGKKINPKRLLHYIISFRNHNEFHEQCVERIFMDIKQYCRPQKLSVFARYTRRGGLDINPFRSDFESILPTTRLIRQ

SEQ ID NO: 45203 - protein, 280 aa, Cedecea sp.
  misc_feature (1)..(280): tr|A0A1X7KGZ7|A0A1X7KGZ7_9ENTR NADPH-dependent 7-cyano- 7-deazaguanine reductase OS=Cedecea sp. NFIX57 OX=15662 86 GN=queF PE=3 SV=1
MSYENHQALSGLTLGKPTAYQDQYQPSLLQAVPRSLNRDPLGLHADSLPFSGGDIWTLYELSWLNSKGLPQVAVGHVQLDANSVNLVESKSFKLYLNSFNQTRFADWETVQATLKRDLSACAEGDVSVVLFRLHELEGQEIAAFSGECIDEQDITIDSYDFNADYLQEAAGEEIVEETLVSHLLKSNCLITHQPDWGSVQIRYRGPKIDREKLLRYLVSFRHHNEFHEQCVERIFNDLQRFCQPQSLSVYARYTRRGGLDINPWRTNTGFHPAFGRLTRQ

SEQ ID NO: 45204 - protein, 154 aa, Celeribacter baekdonensis
  misc_feature (1)..(154): tr|A0A1G7JP46|A0A1G7JP46_9RHOB NADPH-dependent 7-cyano- 7-deazaguanine reductase OS=Celeribacter baekdonensis O X=875171 GN=queF PE=3 SV=1
MVTTDTSHLTQLGGATALPASPEEAVLERVPHTHAGERYVVRFTAPEFTSLCPMTGQPDFGHLMIDYIPGNWLVESKSLKLFLGSFRNHGAFHEDCSVYIGKRLADLLDPEWLRIGAYWYPRGGIPIDVFWATGPEPKDVWIPEQGVPPYRGRG

SEQ ID NO: 45205 - protein, 154 aa, Celeribacter baekdonensis
  misc_feature (1)..(154): tr|K2K195|K2K195_9RHOB NADPH-dependent 7-cyano-7-deazag uanine reductase OS=Celeribacter baekdonensis B30 OX=12 08323 GN=queF PE=3 SV=1
MVTTDTSHLTQLGGATALPASPEEAVLERVPHTHAGERYVVRFTAPEFTSLCPMTGQPDFGHLMIDYIPGNWLVESKSLKLFLGSFRNHGAFHEDCSVYIGKRLAELLDPEWLRIGAYWYPRGGIPIDVFWATGPEPKDVWIPEQGVPPYRGRG

SEQ ID NO: 45206 - protein, 154 aa, Celeribacter ethanolicus
  misc_feature (1)..(154): tr|A0A291GGE2|A0A291GGE2_9RHOB NADPH-dependent 7-cyano- 7-deazaguanine reductase OS=Celeribacter ethanolicus OX =1758178 GN=queF PE=3 SV=1
MPKTDTSGLTQLGGATALPTSPEEAVLERVPHTHEGERYVARFTAPEFTSLCPMTGQPDFGYLMIDYIPRKWLVESKSLKLFLGSFRNHGAFHEDCSVYIGKRLAELLDPEWLRIGAYWYPRGGIPIDVFWATGPEPRDIWIPEQGVPPYRGRG

SEQ ID NO: 45207 - protein, 154 aa, Celeribacter indicus
  misc_feature (1)..(154): tr|A0A0B5DZ86|A0A0B5DZ86_9RHOB NADPH-dependent 7-cyano- 7-deazaguanine reductase OS=Celeribacter indicus OX=120 8324 GN=queF PE=3 SV=1
MPKTDTSGLTQLGGAAALPASPEEAVLERVPHSHEGERYVARFTAPEFTSLCPMTGQPDFGHLMIDYIPRKWLVESKSLKLFLGSFRNHGAFHEDCSVYIGKRLAELLEPEWLRIGAYWYPRGGIPIDVFWATGPEPTDLWIPDQGVPPYRGRG

SEQ ID NO: 45208 - protein, 154 aa, Celeribacter manganoxidans
  misc_feature (1)..(154): tr|A0A291LXW0|A0A291LXW0_9RHOB NADPH-dependent 7-cyano- 7-deazaguanine reductase OS=Celeribacter manganoxidans OX=1411902 GN=queF PE=3 SV=1
MSQDIYQGLTQLGGHTEQPASPEEAVLERVPNPQADVDYAVRFTAPEFTSLCPITGQPDFAHLVIDYVPGAWLVESKSLKLYLTSFRNHGAFHEDCSVSIARRLIDLLEPKWLRLGGYWYPRGGIPIDVFFQTGDIPAGVWVPDAGVPGYRGRG

SEQ ID NO: 45209 - protein, 154 aa, Celeribacter neptunius
  misc_feature (1)..(154): tr|A0A1I3VF50|A0A1I3VF50_9RHOB NADPH-dependent 7-cyano- 7-deazaguanine reductase OS=Celeribacter neptunius OX=5 88602 GN=queF PE=3 SV=1
MVKTDTSGLTQLGGAAALPASPEEAVLERVPHTHEGERYVARFTAPEFTSLCPMTGQPDFGHLMIDYIPNKWLVESKSLKLFLGSFRNHGAFHEDCSVYIGKRLTEFLDPVWLRIGAYWYPRGGIPIDVFWASGPEPKDVWIPDQGVPPYRGRG

SEQ ID NO: 45210 - protein, 154 aa, Celeribacter persicus
  misc_feature (1)..(154): tr|A0A2T5HS76|A0A2T5HS76_9RHOB NADPH-dependent 7-cyano- 7-deazaguanine reductase OS=Celeribacter persicus OX=16 51082 GN=queF PE=3 SV=1
MPKTDTSGLTQLGGTMALPNSPEEAVLERVPHTHEGERYVARFTAPEFTSLCPMTGQPDFGYLMIDYIPRKWLVESKSLKLFLGSFRNHGAFHEDCSVYIGKRLAELLDPEWLRIGAYWYPRGGIPIDVFWATGPEPKDLWIPEQGVPPYRGRG

SEQ ID NO: 45211 - protein, 282 aa, Celerinatantimonas diazotrophica
  misc_feature (1)..(282): tr|A0A4V2PNJ5|A0A4V2PNJ5_9GAMM NADPH-dependent 7-cyano- 7-deazaguanine reductase OS=Celerinatantimonas diazotro phica OX=412034 GN=queF PE=3 SV=1
MTESADYQNAPLLAQLALGHKSRYIEHYQPELLQAVPRSLNRNQLNLSAPLPFHGYDRWNMYELSWLNPKGKPQVAIGEAFINALSVNLVESKSFKLYLNSFNQTSFTDIEQVQQTIENDLKQCVQGPVSVSLYPIDTPVKIAGIAGENLDTLDIEVTDYQFDDSLLAGATEPTQQISETLYSNLLKSNCLVTSQPDWGSICIRYQGAKINREALLRYIISFRRHNEFHEQCVERIFMDIQRYCKPDKLTVEARYTRRGGLDINPFRSNFEAQADHHRLIRQ

SEQ ID NO: 45212 - protein, 165 aa, Cellulosilyticum lentocellum
  misc_feature (1)..(165): tr|F2JSB2|F2JSB2_CELLD NADPH-dependent 7-cyano-7-deazag uanine reductase OS=Cellulosilyticum lentocellum (strai n ATCC 49066 / DSM 5427 / NCIMB 11756 / RHM5) OX=642492 GN=queF PE=3 SV=1
MSSRTKEELNGVTHLGNQKVAYRDNYAPEVLETFINKHPDNDYFVKFNCPEFTSLCPITGQPDFATIYISYVPGPRMVESKSLKLYLFSFRNHGDFHEDCINTIMKDLIKLMDPKYIEVWGKFTPRGGISIDPYCNYGKPGTKWEAVAFDRLTHHDLYPEKVDNR

SEQ ID NO: 45213 - protein, 165 aa, Cellulosilyticum sp.
  misc_feature (1)..(165): tr|A0A5B9YHX6|A0A5B9YHX6_9FIRM NADPH-dependent 7-cyano- 7-deazaguanine reductase OS=Cellulosilyticum sp. WCF-2 OX=2497860 GN=queF PE=3 SV=1
MSSRTKEELNGVTHLGNQKVAYRDNYAPEVLETFINKHPDNDYFVKFNCPEFTSLCPITGQPDFATIYISYVPGPRMVESKSLKLYLFSFRNHGDFHEDCMNIIMKDLIKLMDPKYIEVWGKFTPRGGISIDPYCNYGKPGTKWEAVAFDRLTHHDLYPEKVDNR

SEQ ID NO: 45214 - protein, 274 aa, Cellvibrio japonicus
  misc_feature (1)..(274): tr|B3PE46|B3PE46_CELJU NADPH-dependent 7-cyano-7-deazag uanine reductase OS=Cellvibrio japonicus (strain Ueda10 7) OX=498211 GN=queF PE=3 SV=1
MSHNPLGRQTDYVSSYAPELLFPIARSDSRQLLSLGSSLPFRGVDLWTGYELSWLDSRGKPQVAVAEFVLPCDSEFMVESKSFKLYLNSFNQTHIADTTQLRAMLARDLSAVIGKPVEVHLYTVGDHLSALGKIHACDGVCLDGLPVAIDTYHPQPDYLGCQVSAGVVDESVYSHLLKTNCPVTGQPDWASVQIRYRGKAISHEGLLRYIVSFREHQDFHEHCVERIFMDIWQRCAPESLTVYARYTRRGGLDINPLRTSEHRWSLESKRLLRQ

SEQ ID NO: 45215 - protein, 280 aa, Cellvibrio mixtus
  misc_feature (1)..(280): tr|A0A266Q421|A0A266Q421_9GAMM NADPH-dependent 7-cyano- 7-deazaguanine reductase OS=Cellvibrio mixtus OX=39650 GN=queF PE=3 SV=1
MGFNPLGQQTEYVSVYSPQLLFPIARAESRKLLNTVSSLPFSGVDIWTGYELSWLDPKGKPVVAVAEFFIPCDSEFMIESKSFKLYLNSLNQSHYHSAAEVEELLARDLSAVARAMVRVQLYPLSSTQSSQWRAQPAHLLNTVTLDGVLLDDLPVNIDTYHPDPNLLTTADSIVSETLVSHLLKTNCPVTGQPDWASLVVRYTGKKIEHDSLLRYIVSFREHQDFHEHCVERIFSDIAAICKPTHLTVYARYTRRGGLDINPFRSSHAAEQPELLRLIRQ

SEQ ID NO: 45216 - protein, 280 aa, Cellvibrio sp.
  misc_feature (1)..(280): tr|A0A1U9N618|A0A1U9N618_9GAMM NADPH-dependent 7-cyano- 7-deazaguanine reductase OS=Cellvibrio sp. PSBB023 OX=1 945512 GN=queF PE=3 SV=1
MGFNPLGQQTEYVSVYSPQLLFPIARAESRKLLNTVASLPFSGVDIWTGYELSWLDPKGKPVVAVAEFFIPCDSEFMIESKSFKLYLNSLNQSHYHSAAEVEELLARDLSAVARAMVRVQLYPLSSTQSSQWRAQPAHLLNTVTLDGVLLDDLSVSIDNYHPDPNLLTTADAIVSETLVSHLLKTNCPVTGQPDWASLVVRYTGKKIEHDSLLRYIVSFREHQDFHEHCVERIFSDIAAICKPTHLTVYARYTRRGGLDINPFRSSHAAEQPELLRLIRQ

SEQ ID NO: 45217 - protein, 280 aa, Cellvibrio sp.
  misc_feature (1)..(280): tr|A0A5J6NX66|A0A5J6NX66_9GAMM NADPH-dependent 7-cyano- 7-deazaguanine reductase QueF OS=Cellvibrio sp. KY-YJ-3 OX=454662 GN=queF PE=4 SV=1
MNLNPLGQQTEYVSVYSPQLLFPISRAESRKLLGIGAALPFFGEDIWTGYELSWLDSQGKPVVAVAEFFIPCDSEFMIESKSFKLYLNSLNQTRYQSAAEVEELLVKDLSAVAGTMVRVHLFPLLPSQISHWRAQPAHLLNAATLEGVLLDELSVTVDAYHPKPELLVTTGELVSESLISNLLKTNCPVTGQPDWASIVVRYSGKKIEHENLLRYIISFREHQDFHEHCVERIFNDIATYCKPESLTVYARYTRRGGLDINPFRSSSAEEKPNLLRLVRQ

SEQ ID NO: 45218 - protein, 279 aa, Cellvibrionaceae bacterium
  misc_feature (1)..(279): tr|A0A2E2XE28|A0A2E2XE28_9GAMM NADPH-dependent 7-cyano- 7-deazaguanine reductase OS=Cellvibrionaceae bacterium OX=2026723 GN=queF PE=3 SV=1
MATTSEQRHGTVLGKQTEYISVYNPSLLCPIPRQQSRRELGVNPEALPFRGVDIWTAYEVSWLNSDGKPEVAIAEFEVPATSPSIIESKSFKLYLNSFNQTAFANMYDVARTMESDLGACAGAAVMVKLKPLAQFAQQGIGHFAGECIDQEPVKIDCYSPSPDLLTLNKPDKVVSEVLYSDLLKSNCPVTGQPDWASVCVQYRGAQIDRASLLKYIISFREHQDFHEHCVERMFLDIQTRCNPEALTVYARYTRRGGLDINPYRTNGSEGPTDVRLVRQ

SEQ ID NO: 45219 - protein, 276 aa, Cellvibrionaceae bacterium
  misc_feature (1)..(276): tr|A0A545SMW3|A0A545SMW3_9GAMM NADPH-dependent 7-cyano- 7-deazaguanine reductase OS=Cellvibrionaceae bacterium R142 OX=2591008 GN=queF PE=3 SV=1
MADDLLSSKLGKQTDYVTQYTPSLLFPITRQESRKLLGIEGDPLPFVGMDIWTAYEMSWLDKKGKPQVAIGEFRIPCQSPSIIESKSFKLYLNSLNQTRFDSVRDVISTLESDLSVAAGAPVIVQVTPLAQALQRGLGHYTGENLDQLDVEVQDYQPNPELLRCDRPDYFVHESLNSDLLKTNCPVTGQPDWASIYIEYQGAAIDREGLLKYIISFRSQQDFHEHCVERIFMDISARCQPQKLTVYARYTRRGGVDINPYRSNESGEPEDFRLVRQ

SEQ ID NO: 45220 - protein, 291 aa, Cellvibrionales bacterium
  misc_feature (1)..(291): tr|A0A350J167|A0A350J167_9GAMM NADPH-dependent 7-cyano- 7-deazaguanine reductase OS=Cellvibrionales bacterium O X=2026722 GN=DCW37_01055 PE=3 SV=1
MGNTKDTSVSEAAHSLSNNYASSSSLGEHSQYGNEYNPALLHPILRSEYRSTVEDFVAPIYGHDLWQCFELSWLNACGVPQVACADIIVPMASLAIVESKSLKLYLNSFHHRQFVDQDEVKALIKTDLTALLSAEVEVVLRSVSIVLSAVPQAVEPLLLDDLDISCSEYQRNPKLLLLNADNHQVSHEQFCSHLLRSHCPVTNQPDWGTLTIRYSGRAINPESLLRYIVSFRQHNGFHEQCVEQIYSDIMTECRPELLTVYAQYTRRGGIDINPWRSNDNEPLVLDRVWRQ

SEQ ID NO: 45221 - protein, 249 aa, Cellvibrionales bacterium
  misc_feature (1)..(249): tr|A0A1Z8N1S7|A0A1Z8N1S7_9GAMM QueF_N domain-containing protein OS=Cellvibrionales bacterium TMED21 OX=1986745 GN=CBB81_01720 PE=4 SV=1
  misc_feature (10)..(10): Xaa can be any naturally occurring amino acid
  misc_feature (15)..(15): Xaa can be any naturally occurring amino acid
  misc_feature (20)..(20): Xaa can be any naturally occurring amino acid
  misc_feature (22)..(22): Xaa can be any naturally occurring amino acid
  misc_feature (171)..(171): Xaa can be any naturally occurring amino acid
MDRILGNRVXAPEQXAPDIXEXIDRAVGRSAITGASHHISSGWDVWHCYELSWILQGQGLSYFTGTVSIPADSPFTIESKSLKLYFNSLNNMNFISNEAAIETIGRDLSAVARGDVSVSLWSSSDLATNTYSPDVLPRPNGAHANVRYSMGGFRSLCPVTSQPDWATVIIXIDEQASDSKAIEAAVESLRNHQGFHEQCIEDLFTRIERALRPDFLEITGYFQRRGGIDITPRRSSIATKPPIERLYEQ

SEQ ID NO: 45222 - protein, 163 aa, Centipeda periodontii
  misc_feature (1)..(163): tr|F5RLV9|F5RLV9_9FIRM NADPH-dependent 7-cyano-7-deazag uanine reductase OS=Centipeda periodontii DSM 2778 OX=8 88060 GN=queF PE=3 SV=1
MAREKKEEGLTLLGEQRTDYGYDYAPEALETFHNKHTDHDYWVRFNCPEFTTLCPITGQPDYGTIYISYMPAERMVESKSLKLYLVSFRNHGDFHEDVVNVIMRDLIRLMEPKYIEVQGKFLPRGGISIDPYANYGMPGTKYETLAWERLSMHDRVPERVDNR

SEQ ID NO: 45223 - protein, 166 aa, Cesiribacter andamanensis
  misc_feature (1)..(166): tr|M7NIY1|M7NIY1_9BACT NADPH-dependent 7-cyano-7-deazag uanine reductase OS=Cesiribacter andamanensis AMV16 OX= 1279009 GN=queF PE=3 SV=1
MTDKELAINERLDALQKQSVEHTRASLEYMEKMGIRPEGKFGLFLPPDYREKEIHRLPYAHAVRQQVVYETEKGEFSALCPFSGLPDYGVLRIEYVPGSYILELKSLKYYIMSWRHIGVAQEDVTAYIYQDVYRQLQDAHYLKITTDYNIRGGINTSCVVDSREQQ

SEQ ID NO: 45224 - protein, 132 aa, Cetia pacifica
  misc_feature (1)..(132): tr|A0A3N1YJD9|A0A3N1YJD9_9PROT NADPH-dependent 7-cyano- 7-deazaguanine reductase OS=Cetia pacifica OX=1424653 G N=queF PE=3 SV=1
MNELRYGEKEIVEFDPEKMEIWPNKNKKNYKIKITLPEFMCKCPRSGYPDFATVYLEYIPDEWVVELKALKLYINSFMNRYISHEDSANEIFDTLYNKLKPKWMKIVMDFNPRGNVHTVIEIDSDTISKTTE

SEQ ID NO: 45225 - protein, 135 aa, Chamaesiphon minutus
  misc_feature (1)..(135): tr|K9ULW3|K9ULW3_CHAP6 NADPH-dependent 7-cyano-7-deazag uanine reductase OS=Chamaesiphon minutus (strain ATCC 2 7169 / PCC 6605) OX=1173020 GN=queF PE=3 SV=1
MTQAHPEAATTPSEMKYGEREIINGELITFPNPRMGRRYNVDISLPEFTCKCPFSGYPDFATIGIIYVPDQKVVELKALKLYINSYRDRYISHEEAANQILDDFVSIADPHQITVRADFSPRGNVHMIVEVKHEK

SEQ ID NO: 45226 - protein, 135 aa, Chamaesiphon polymorphus
  misc_feature (1)..(135): tr|A0A2T1G3W9|A0A2T1G3W9_9CYAN NADPH-dependent 7-cyano- 7-deazaguanine reductase OS=Chamaesiphon polymorphus CC ALA 037 OX=2107692 GN=queF PE=3 SV=1
MTQAHPESATTPSEMKYGEREIINGQLITFPNPRIGRRYNVDISLPEFTCKCPFSGYPDFATIGIIYVPDQKVVELKALKLYINSYRDRYISHEEAANQILDDFVSIADPHQITVRADFSPRGNVHMIVEVKHEK

SEQ ID NO: 45227 - protein, 278 aa, Chania multitudinisentens
  misc_feature (1)..(278): tr|W0L742|W0L742_9GAMM NADPH-dependent 7-cyano-7-deazag uanine reductase OS=Chania multitudinisentens RB-25 OX= 1441930 GN=queF PE=3 SV=1
MRMKVNNEITLLGKTTEYAQHYSPDLLESLPRSRNRDSINIKSDNLPFSGFDLWTGFELSWLNHKGKPVVAIAEFIIPATSSHLIESKSFKLYLNSFNQTKFDTTEQVITLLEKDLSLAADGKVEVKLYPDLNGYPETITSLPGNCIDHLDIEINDYQFNPEILHDSVSNEHVSETLSSNLLKSNCLVTNQPDWGSVVIKYQGNKINQEKLLRYIISFRMHNEFHEQCVERIFNDINRYCQPEKLSVFARYTRRGGLDINPFRSNFEESPVVPRLVRQ

SEQ ID NO: 45228 - protein, 153 aa, Chelativorans sp.
  misc_feature (1)..(153): sp|Q11L79|QUEF_CHESB NADPH-dependent 7-cyano-7-deazagua nine reductase OS=Chelativorans sp. (strain BNC1) OX=26 6779 GN=queF PE=3 SV=1
MTDTRNLTQLGSKTQAPASPEAATLETAPFSRGDGPAAIVRFTCPEFTSLCPVTGQPDFAHIVIDYAPDKLLVESKSLKLFLTSFRNHGAFHEDCTVMIGRRIVEATKPLWLRIGGYWYPRGGIPIDVFWQTGTPPKDAWVPETGVPPYRGRG

SEQ ID NO: 45229 - protein, 154 aa, Chelatococcus asaccharovorans
  misc_feature (1)..(154): tr|A0A2V3UC85|A0A2V3UC85_9RHIZ NADPH-dependent 7-cyano- 7-deazaguanine reductase OS=Chelatococcus asaccharovora ns OX=28210 GN=queF PE=3 SV=1
MTRDLKSRNLQLGRPSALPASPDEADLDRVPNPQIGTRYVARFTCPEFTSLCPVTGQPDFGILVIDYAPGEWLVESKSLKLYLHAFRNHGAFHEDCTVSIGLRLASLLEPQWLRIGGYWYPRGGIPIDVFWQTGAPPEGLFLPDQGVPPYRARG

SEQ ID NO: 45230 - protein, 152 aa, Chelatococcus sambhunathii
  misc_feature (1)..(152): tr|A0A0K6H5G2|A0A0K6H5G2_9RHIZ NADPH-dependent 7-cyano- 7-deazaguanine reductase OS=Chelatococcus sambhunathii OX=363953 GN=queF PE=3 SV=1
MAQQHESLQLGKPASLPASPEEAVLDRVPNPHPDTDYVARFTCPEFTSICPVTGQPDFGIVVIDYVPGEWLVESKSLKLFMFSFRNHGAFHEDCTVYIGKRLSELLVPRWMRVGGYWFPRGGIPIDVFWQTGAPPAGLFLPDQGVPPYRPRG

SEQ ID NO: 45231 - protein, 152 aa, Chelatococcus sp.
  misc_feature (1)..(152): tr|A0A0K2DGJ2|A0A0K2DGJ2_9RHIZ NADPH-dependent 7-cyano- 7-deazaguanine reductase OS=Chelatococcus sp. CO-6 OX=1 702325 GN=queF PE=3 SV=1
MAQQHESLQLGKPAPLPASPEEAVLDRVPNPHPDTDYVARFTCPEFTSICPVTGQPDFGIVVIDYVPGEWLVESKSLKLFMFSFRNHGAFHEDCTVYIGKRLSELLAPRWMRVGGYWFPRGGIPIDVFWQTGAPPAGLFLPDQGVPPYRPRG

SEQ ID NO: 45232 - protein, 151 aa, Chelatococcus sp.
  misc_feature (1)..(151): tr|A0A2W6Y314|A0A2W6Y314_9RHIZ NADPH-dependent 7-cyano- 7-deazaguanine reductase OS=Chelatococcus sp. OX=195377 1 GN=queF PE=3 SV=1
MSIDATELQLGRPSALPASPDEARLDRVPNPHAGTNYLARFTCPEFTSICPVTGQPDFGILVIDYLPGQWLVESKSLKLYLGAFRNHGAFHEDCTVGIGKKLVDLLAPEWFRIGGYWYPRGGIPIDVFWQTGEPPKGLWLPDQGVAPYRGR

SEQ ID NO: 45233 - protein, 279 aa, Chelonobacter oris
  misc_feature (1)..(279): tr|A0A0A3APP9|A0A0A3APP9_9PAST NADPH-dependent 7-cyano- 7-deazaguanine reductase OS=Chelonobacter oris OX=50531 7 GN=queF PE=3 SV=1
MSYQDTSLEKLTLGKQTGYKNEYDPTLLQAVPRRLNRDGLGISEQQPFSHGTDIWTAYEISWLNDNGLPQVAIGDIYLDFRSTNLIESKSFKLYLNSFNQSRFTSQRQVENLIRQDLANCADGEVKVRLHSLDEYQNQPIAHFHGDCIDTQDIVIDCYDFQPHLLQDCTNSDVVTESLVSHLLKSNCLITSQPDWGSIQIAYSGRQINREALLRYLVSFRRHNEFHEQCVERIFCDLMHYAKPEKLRVYARYTRRGGLDINPWRSNYPFEPENQRLARQ

SEQ ID NO: 45234 - protein, 274 aa, Chitinimonas sp.
  misc_feature (1)..(274): tr|A0A2G3K4R4|A0A2G3K4R4_9BURK NADPH-dependent 7-cyano- 7-deazaguanine reductase OS=Chitinimonas sp. BJB300 OX= 1559339 GN=queF PE=3 SV=1
MQPELSPLGKTSAYIEHYDPSLLFPIPRQTKRDEIGVPAVLPFFGSDIWNAYELSWLNLKGKPLVALVSFSVPADSPNIIESKSFKLYLNSFNQTRLDGIDELKARLVRDLSAAAGRTVNVRIVLPDAFGREQVAELDGYCIDNLDVEVTHYQPAPALLRTVAAQGMVEETLCSNLLKSNCLVTGQPDWGSVQIRYRGEAIERGGLLQYLISFRQHNEFHEQCVERIFMDVMRQCKPQALTVYARYTRRGGLDINPFRTTFSQAAPANLRTARQ

SEQ ID NO: 45235 - protein, 274 aa, Chitinimonas sp.
  misc_feature (1)..(274): tr|A0A516SIX9|A0A516SIX9_9MICO NADPH-dependent 7-cyano- 7-deazaguanine reductase QueF OS=Chitinimonas sp. R3-44 OX=2594795 GN=queF PE=3 SV=1
MQPELSPLGKTSTYIEHYDPSLLFPIPRLAKREEIAVPARLPFFGSDYWNAYELSWLNPRGKPQVALAVFTIPADSPNIIESKSFKLYLNSFNQTRLDSIAELKTRLQADLSQAAGSLVAVRLVLPEAFGAERLGELEGYCIDQLDVEITDYSPQPQLLRSAMAEAPIEETLVSHLLKSNCLVTGQPDWASVQIHYRGPAIDHAGLLQYLISFRRHNEFHEQCVERIFMDISRQCRPEALSVYARYTRRGGLDINPFRTSFTQAAPANQRSARQ

SEQ ID NO: 45236 - protein, 274 aa, Chitinimonas taiwanensis
  misc_feature (1)..(274): tr|A0A1K2H9I5|A0A1K2H9I5_9BURK NADPH-dependent 7-cyano- 7-deazaguanine reductase OS=Chitinimonas taiwanensis DS M 18899 OX=1121279 GN=queF PE=3 SV=1
MHPELSPLGKTSAYIEHYDPSLLFPIPRLAKRVEIGVPASLPFFGSDIWNAYELSWLNPKGKPQVALASFGVPADSPNIIESKSFKLYLNSFNQTRLDSVDELKARLQRDLSAAAGATVSVRIVLPEDFGRERVAELDGYCIDNLDVEITHYQPSPSLLRTVPADGVVEETLCSNLLKSNCLVTGQPDWGSVQIRYRGEAIDRAGLLSYLISFRQHNEFHEQCVERIFMDVLRACRPQALSVYARYTRRGGLDINPFRTSFTQAAPANVRSARQ

SEQ ID NO: 45237 - protein, 275 aa, Chitiniphilus sp.
  misc_feature (1)..(275): tr|A0A4U0PYB2|A0A4U0PYB2_9NEIS NADPH-dependent 7-cyano- 7-deazaguanine reductase OS=Chitiniphilus sp. HX-2-15 O X=2571148 GN=queF PE=3 SV=1
MSDAQHSPLGKAVSYQMQYDPSLLFPIPRQGKRDEIGVKGALPFMGVDIWNGYELSWLNARGKPQVATAVFHIPADSPNIVESKSFKLYLNSFNQTRLDSADALLAMLRDDLSRAAGAPVQVELALPEQFAGLRFAELDGYCIDNLDIEIDTYSPQPGLLHCDEAPSPVDEALVSNLLKSNCLVTGQPDWASVQIRYVGAPINRESLLRYLISFREHNEFHEQCVERIFMDILRACKPMKLAVYARYTRRGGLDINPYRSNFSGPPPGNRRTARQ

SEQ ID NO: 45238 - protein, 150 aa, Chitinivibrio alkaliphilus
  misc_feature (1)..(150): tr|U7D9Y3|U7D9Y3_9BACT NADPH-dependent 7-cyano-7-deazag uanine reductase OS=Chitinivibrio alkaliphilus ACht1 OX =1313304 GN=queF PE=3 SV=1
MFYDNIRLLQEPGTKESLPKLEPIPSPMDNTGVVRIVFPEFTCVCPKTGYPDFGSIELYYQPDTSMVELKSWKLFLNAFRMIGTYHEEVTHFIFTHLCEQLSPTWAMVTGDFFPRGNVDTTVVFETPVQRPHGADTLLLRHTPHTRSYHG

SEQ ID NO: 45239 - protein, 143 aa, Chitinophaga flava
  misc_feature (1)..(143): tr|A0A365XX85|A0A365XX85_9BACT 7-cyano-7-deazaguanine r eductase OS=Chitinophaga flava OX=2259036 GN=DF182_2399 5 PE=4 SV=1
MTKKLYQQIDLTILKALPNPSSEKYEMKIKVPEFTFLGVHEQPDFAKLYITFYPKGKIIELKSLKQYVYHLRDIIVSYERLINIMYDHMMEVYQPDRLRVTLICNPRGGISSKLVIDSDWKDRGGEDKYKDYPERDDEWGILM

SEQ ID NO: 45240 - protein, 143 aa, Chitinophaga ginsengisegetis
  misc_feature (1)..(143): tr|A0A1T5P7Z0|A0A1T5P7Z0_9BACT 7-cyano-7-deazaguanine r eductase OS=Chitinophaga ginsengisegetis OX=393003 GN=S AMN05660461_4732 PE=4 SV=1
MSKKLYQHIDKTILKGLPNPSKEKYEMKIKVPEFTFLGVQEQPDFAKLYITFYPKNKIIELKSLKHYVYHLRDIIVSYERLINIIYDHMMEVYEADRLRITLICNPRGGISSKLVIDSDWKDRGGTERFRDYPERDDEWGILM

SEQ ID NO: 45241 - protein, 143 aa, Chitinophaga niastensis
  misc_feature (1)..(143): tr|A0A2P8HA86|A0A2P8HA86_9BACT 7-cyano-7-deazaguanine r eductase OS=Chitinophaga niastensis OX=536980 GN=CLV51_ 109132 PE=4 SV=1
MTKKLYHHIDKTILKGLPNPSKEKYEMKIKVPEFTFLGMQEQPDFAKLYITFYPKNKIIELKSLKHYVYHLRDIIVSYERLINIVYDHMMETYEADRLRITLICNPRGGISSKLVIDSDWKDRGGTERFKDYPERDDEWGILM

SEQ ID NO: 45242 - protein, 143 aa, Chitinophaga sp.
  misc_feature (1)..(143): tr|A0A4R7CG11|A0A4R7CG11_9BACT 7-cyano-7-deazaguanine r eductase OS=Chitinophaga sp. OK723 OX=2135605 GN=C7544_ 106260 PE=4 SV=1
MSKKLYQHIDKTILKGLPNPSKEKYEMKIKVPEFTFLGMQEQPDFAKLYITFYPKGKIIELKSLKLYVYHLRDIIVSYERLINIIYDHMMEVYEADRLRITLICNPRGGISSKLVIDSDWKDRGGNERFKDYPERDDEWGILM

SEQ ID NO: 45243 - protein, 143 aa, Chitinophaga sp.
  misc_feature (1)..(143): tr|A0A433WNV4|A0A433WNV4_9BACT 7-cyano-7-deazaguanine r eductase OS=Chitinophaga sp. Mgbs1 OX=2485489 GN=ECE50_ 03030 PE=4 SV=1
MTRKLYQQIDKSLLKGLPNPSNEKYEMKIKVPEFTFLGVHEQPDFARLYITFYPKNKIIELKALKQYVYHLRDIIVSYERLINIMYDHFMETYGPDRLRLTLICNPRGGISSKLVIDSDWKDRGGEEKYKDYPERDDEWGVLM

SEQ ID NO: 45244 - protein, 143 aa, Chitinophaga terrae
  misc_feature (1)..(143): tr|A0A1H4B8J8|A0A1H4B8J8_9BACT NADPH-dependent 7-cyano- 7-deazaguanine reductase OS=Chitinophaga terrae Kim and Jung 2007 OX=408074 GN=SAMN05660909_01963 PE=3 SV=1
MTKKLYQSIDKSILKALPNPSKEKYEMKIKVPEFTFLGVQEQPDFAKLYITFYPKNKIIELKSLKLYVYHLRDIIVSYERLINIIYDHMMEVYEPDRLRITLICNPRGGISSKLVIDSDWKDRGGSERFKDYPERDEEWGILM

SEQ ID NO: 45245 - protein, 55 aa, Chitinophagaceae bacterium
  misc_feature (1)..(55): tr|A0A4Q3SN34|A0A4Q3SN34_9BACT NADPH-dependent 7-cyano- 7-deazaguanine reductase QueF (Fragment) OS=Chitinophag aceae bacterium OX=1869212 GN=EOO07_35600 PE=4 SV=1
HEQCVEQIFADIWQQLNPSRLMVYAAYTRRGGLDINPCRVSDMSWLPRPIRLARQ

SEQ ID NO: 45246 - protein, 97 aa, Chitinophagaceae bacterium
  misc_feature (1)..(97): tr|A0A4Q3SUD9|A0A4Q3SUD9_9BACT NADPH-dependent 7-cyano- 7-deazaguanine reductase QueF (Fragment) OS=Chitinophag aceae bacterium OX=1869212 GN=EOO07_32630 PE=4 SV=1
MSHSVDFSPLGQKTLYVSTYDPKLLFPISRAESRTVLGITTKLPFFGCDVWTGYEISWLNEKGKPEVAVAEFFIPCDSPFIIESKSFKLYLNSFNQT

SEQ ID NO: 45247 - protein, 272 aa, Chlamydia sp.
  misc_feature (1)..(272): tr|A0A1M3BA88|A0A1M3BA88_9CHLA NADPH-dependent 7-cyano- 7-deazaguanine reductase QueF OS=Chlamydia sp. 32-24 OX =1895742 GN=BGO10_02850 PE=3 SV=1
MNTVELSPLGQKTVYIQTYSPEQLYPVPRSLARKKTNIPESLPFHGIDIWNGYELSWLNKKGKPQFALCTFIFSCTSPTIVESKSLKLYLNSFNQSIFVSANEVQTIIKKDLSLATNSDVEVHIFPHTDLINTSLKDFDGQCVDHLDIETSCYSVTPSFLTTQDECVQEKIYTHLLKSNCLATGQPDWGSIFLHYKGPKINQESFLKYIISYRNHSGFAEHCIEQIYCDILHYCKPELLTVYGCYTRRGGLDINPFRSNFEQRPNLFRHVRQ

SEQ ID NO: 45248 - protein, 131 aa, Chloracidobacterium sp.
  misc_feature (1)..(131): tr|A0A257B6C0|A0A257B6C0_9BACT NADPH-dependent 7-cyano- 7-deazaguanine reductase OS=Chloracidobacterium sp. CP2 _5A OX=2012633 GN=queF PE=3 SV=1
MGAYTDEHAKKGLDAPLPAIECWANQFPSYRITIRIPEFTSVCPLTEQPDFGTVTIAYVPRDRCLELKSLKLYIQAYRQLGIFYENAINRILRDVVAACDPVECAVVGDFTPRGGISSVVEATYRAAQTAA

SEQ ID NO: 45249 - protein, 131 aa, Chloracidobacterium thermophilum
  misc_feature (1)..(131): tr|G2LJQ0|G2LJQ0_CHLTF NADPH-dependent 7-cyano-7-deazag uanine reductase OS=Chloracidobacterium thermophilum (s train B) OX=981222 GN=queF PE=3 SV=1
MGAYTDEHARKGLDAPLPPIECWANQFPNYRITIRIPEFTSVCPLTEQPDFGTVTITYVPRDRCLELKSLKLYIHAYRQLGIFYENAINRILRDVVAACDPVECTVTGDFTPRGGISSLIEATYRATHRPA

SEQ ID NO: 45250 - protein, 117 aa, Chlorobaculum limnaeum
  misc_feature (1)..(117): tr|A0A1D8CW59|A0A1D8CW59_CHLLM NADPH-dependent 7-cyano- 7-deazaguanine reductase OS=Chlorobaculum limnaeum OX=2 74537 GN=queF PE=3 SV=1
MKKEIIEVFDNTFPGRDYTIEIVNPEFTSVCPKTGLPDFGTITVNYVPDKSCIELKSLKYYYLEFRNAGIFYENITNRILDDLVEACQPRRMSVKAEWNARGGITETVTVSYSASQQ

SEQ ID NO: 45251 - protein, 116 aa, Chlorobaculum parvum
  misc_feature (1)..(116): sp|B3QM19|QUEF_CHLP8 NADPH-dependent 7-cyano-7-deazagua nine reductase OS=Chlorobaculum parvum (strain NCIB 832 7) OX=517417 GN=queF PE=3 SV=1
MNKEIIEVFDNTFPNRDYTIEIVNPEFTSVCPKTGLPDFGTITITYVPDKSCIELKSLKYYFLEFRNAGIFYENITNTILDHLVEACQPKSMTVKTDWNARGGITETVTVSYTAEK

SEQ ID NO: 45252 - protein, 117 aa, Chlorobaculum sp.
  misc_feature (1)..(117): tr|A0A4Q1DHX0|A0A4Q1DHX0_9CHLB NADPH-dependent 7-cyano- 7-deazaguanine reductase OS=Chlorobaculum sp. 24CR OX=2 508878 GN=queF PE=3 SV=1
MNKEIIEVFDNTWPGRDYTIEIVNPEFTSVCPKTGLPDFGTITINYVPDKSCIELKSLKYYFLEFRNAGIFYENITNRILDDLVEACQPKRMTVKTDWNARGGITETVTVSYSKSEE

SEQ ID NO: 45253 - protein, 117 aa, Chlorobaculum tepidum
  misc_feature (1)..(117): sp|Q9F719|QUEF_CHLTE NADPH-dependent 7-cyano-7-deazagua nine reductase OS=Chlorobaculum tepidum (strain ATCC 49 652 / DSM 12025 / NBRC 103806 / TLS) OX=194439 GN=queF PE=3 SV=1
MNKEIIEVFDNTYPDRDYTIEIINPEFTSVCPKTGLPDFGTITVNYVPDKSCIELKSLKYYFLEFRNAGIFYENITNRILDDLVEACQPRRMTVKTEWNARGGITETVTVSYSKSKE

SEQ ID NO: 45254 - protein, 117 aa, Chlorobaculum thiosulfatiphilum
  misc_feature (1)..(117): tr|A0A5C4S8S5|A0A5C4S8S5_CHLTI NADPH-dependent 7-cyano- 7-deazaguanine reductase OS=Chlorobaculum thiosulfatiph ilum OX=115852 GN=queF PE=3 SV=1
MKKEIIEVFDNTYPGRDYTIEIVNPEFTSVCPKTGLPDFGTITVNYVPDKSCIELKSLKYYFLEFRNAGIFYENITNRILDDLVEACQPKKMTVRTDWNARGGITETVTVSYSKSEE

SEQ ID NO: 45255 - protein, 100 aa, Chlorobi bacterium
  misc_feature (1)..(100): tr|A0A136P4J0|A0A136P4J0_9BACT NADPH-dependent 7-cyano- 7-deazaguanine reductase OS=Chlorobi bacterium OLB5 OX= 1617412 GN=queF PE=3 SV=1
MMIFGKFPENLTAFTKTMKKFNPVKSDPKKTALLEVFDNSFPKRSYLIVHKANEFTSVCPKTGQPDFGVITISYVAAKKCVELKSLKFYLQSFRNEGIFL

SEQ ID NO: 45256 - protein, 113 aa, Chlorobi bacterium
  misc_feature (1)..(113): tr|A0A4V0XA74|A0A4V0XA74_9BACT NADPH-dependent 7-cyano- 7-deazaguanine reductase OS=Chlorobi bacterium OX=22681 92 GN=queF PE=3 SV=1
MDRLETFPNPAVGRQYRIKHILHEFTSVCPLTGLPDFATVTIEYVPDAICLELKALKYYFLEFRNMGIFYEAVTNKILDDLVERCNPIEMTITTDWGIRGGMSSVITAQYRKK

SEQ ID NO: 45257 - protein, 116 aa, Chlorobium chlorochromatii
  misc_feature (1)..(116): sp|Q3APR5|QUEF_CHLCH NADPH-dependent 7-cyano-7-deazagua nine reductase OS=Chlorobium chlorochromatii (strain Ca D3) OX=340177 GN=queF PE=3 SV=1
MKLEILESFENKYPNRDYTIEIVNPEFTSVCPITGLPDFGTITIRYVPNQRCVELKSLKYYFFEFRNAGIFYENITNKVLDDMVALLEPRSISVITEWKARGGITETVSVHYTSQS

SEQ ID NO: 45258 - protein, 116 aa, Chlorobium ferrooxidans
  misc_feature (1)..(116): tr|Q0YU32|Q0YU32_9CHLB NADPH-dependent 7-cyano-7-deazag uanine reductase OS=Chlorobium ferrooxidans DSM 13031 O X=377431 GN=queF PE=3 SV=1
MKKEILEIFSNTYPDRDYTIEIVNPEFTSVCPKTGLPDFGTITVRYVPDKSCVELKSLKYYYLEFRNAGIFYENVTNRILDDLVSVMQPRTLSVTTEWKARGGITETVSVSYSAAR

SEQ ID NO: 45259 - protein, 142 aa, Chlorobium limicola
  misc_feature (1)..(142): tr|B3EH15|B3EH15_CHLL2 NADPH-dependent 7-cyano-7-deazag uanine reductase OS=Chlorobium limicola (strain DSM 245 / NBRC 103803 / 6330) OX=290315 GN=queF PE=3 SV=1
MKIIPDFYFAGQRNASIPLNRRQNLMRRELLEVFDNTFPERDYIIEIVNPEFTSVCPKTGLPDFGTITVTYVPDKVCIELKSLKYYFLDFRNAGIFYENVTNTILDDLVAVSQPREMSVKSEWKARGGITETVTVTHSGRKA

SEQ ID NO: 45260 - protein, 117 aa, Chlorobium limicola
  misc_feature (1)..(117): tr|A0A124GAT4|A0A124GAT4_CHLLI NADPH-dependent 7-cyano- 7-deazaguanine reductase OS=Chlorobium limicola OX=1092 GN=queF PE=3 SV=1
MRKELLEVFDNTFPERDYIIEIVNPEFTSVCPKTGLPDFGTITVTYVPDKVCIELKSLKYYFLDFRNAGIFYENVTNTILDDLVAVSQPREMTVKSEWKARGGITETVTVTHSGRKA

SEQ ID NO: 45261 - protein, 118 aa, Chlorobium phaeobacteroides
  misc_feature (1)..(118): sp|B3EMR0|QUEF_CHLPB NADPH-dependent 7-cyano-7-deazagua nine reductase OS=Chlorobium phaeobacteroides (strain B S1) OX=331678 GN=queF PE=3 SV=1
MQKELLEVFDNRFPDRDYTIEIVNPEFTSVCPITGLPDFGTITIRYIPDKVCVELKSLKYYYLEFRNAGIFYENVTNTILDHLVDLLKPRTLTVTTAWKARGGITETVTVSYSAGQDE

SEQ ID NO: 45262 - protein, 116 aa, Chlorobium phaeobacteroides
  misc_feature (1)..(116): sp|A1BDZ0|QUEF_CHLPD NADPH-dependent 7-cyano-7-deazagua nine reductase OS=Chlorobium phaeobacteroides (strain D SM 266) OX=290317 GN=queF PE=3 SV=1
MKKEILEVFDNTFPGRDYTIEIVNPEFTSVCPITALPDFGTIIIRYIPDKSCVELKSLKYYFLEFRNAGIFYENITNTILDDLTSVLQPREMTVITQWKARGGITETVSVTWPQKQ

SEQ ID NO: 45263 - protein, 116 aa, Chlorobium phaeovibrioides
  misc_feature (1)..(116): tr|A0A3S0NBB2|A0A3S0NBB2_CHLPH NADPH-dependent 7-cyano- 7-deazaguanine reductase OS=Chlorobium phaeovibrioides OX=1094 GN=queF PE=3 SV=1
MKKEILEVFDNTYPDRNYTIEIVNPEFTSVCPKTGLPDFGTITVHYVPDRTCVELKSLKYYFLEFRNAGIFYENITNRILDDLVAAMQPRSITVTTKWKARGGITETVTASHTAQG

SEQ ID NO: 45264 - protein, 116 aa, Chlorobium phaeovibrioides; identical to SEQ ID NO: 45263
  misc_feature (1)..(116): sp|A4SG19|QUEF_CHLPM NADPH-dependent 7-cyano-7-deazagua nine reductase OS=Chlorobium phaeovibrioides (strain DS M 265 / 1930) OX=290318 GN=queF PE=3 SV=1

SEQ ID NO: 45265 - protein, 116 aa, Chlorobium sp.
  misc_feature (1)..(116): tr|A0A4R0QVV2|A0A4R0QVV2_9CHLB NADPH-dependent 7-cyano- 7-deazaguanine reductase OS=Chlorobium sp. N1 OX=249113 8 GN=queF PE=3 SV=1
MKREILEVFDNTYPERDYTIEIVNPEFTSVCPKTGLPDFGTITVSYIPDRTCIELKSLKYYFLEFRNAGIFYENVTNRILDDLVAACSPRSMTVRTEWKARGGITETVTVSHNASN

SEQ ID NO: 45266 - protein, 116 aa, Chlorobium sp.
  misc_feature (1)..(116): tr|A0A533U1V1|A0A533U1V1_CHLSQ NADPH-dependent 7-cyano- 7-deazaguanine reductase OS=Chlorobium sp. OX=1095 GN=q ueF PE=3 SV=1
MKKEILELFDNTYPDRDYTIEIVNPEFTSVCPITGLPDFGTIIIRYVPDKSCIELKSLKYYFLEFRNAGIFYENITNRILDDLVALLKPRSLSVITEWKARGGITETVTVNYRANS

SEQ ID NO: 45267 - protein, 133 aa, Chloroflexi bacterium
  misc_feature (1)..(133): tr|A0A1F8NXW1|A0A1F8NXW1_9CHLR NADPH-dependent 7-cyano- 7-deazaguanine reductase OS=Chloroflexi bacterium RBG_1 3_68_17 OX=1797638 GN=queF PE=3 SV=1
MTEPSDLAGLTILGGKAEPSRRLETFPNHDPERAYVVRLETDEFTCLCPATGQPDFATITVEYIPGPRIVESKSFKLYLWSFRNEGVFHEHVTNLILEDLVRALEPRWCRVQAAFKVRGGIAITVEAEHGRRP

SEQ ID NO: 45268 - protein, 144 aa, Chloroflexi bacterium
  misc_feature (1)..(144): tr|A0A432JI23|A0A432JI23_9CHLR NADPH-dependent 7-cyano- 7-deazaguanine reductase OS=Chloroflexi bacterium OX=20 26724 GN=queF PE=3 SV=1
MATIQELKEQYEGLDQELPSKGEEAINPSCLLTFQYEYPDQQSQVEIDTDEFTAVCPWTGLPDYGVLTISYVPSDSCIELKSLKYYLLSYRDVGIVQEHAVNRILNDLVAVCQPRSMKITLDYKVRGGLHTTVSVEHSRDEGGK

SEQ ID NO: 45269 - protein, 118 aa, Chloroflexus islandicus
  misc_feature (1)..(118): tr|A0A178M0D4|A0A178M0D4_9CHLR Uncharacterized protein OS=Chloroflexus islandicus OX=1707952 GN=A6A03_04465 PE =4 SV=1
MLETIPNRYPHLITEISLTYPFAHLCPISGEPQPDSTITIAYQAGSRLLETKALRQYLATFTQMNDVRDLEEAVQVIAQACANTLAVRVTVRAHYQLLSSAVDVAVTATPATGGGHYV

SEQ ID NO: 45270 - protein, 144 aa, Chlorogloea sp.
  misc_feature (1)..(144): tr|A0A2T1EFR5|A0A2T1EFR5_9CHRO NADPH-dependent 7-cyano- 7-deazaguanine reductase OS=Chlorogloea sp. CCALA 695 O X=2107693 GN=queF PE=3 SV=1
MTNDSLAGQQSAENKQPTTVEMKYGEREIAKGELITFPNPRIGRRYDIHVTLPEFTCKCPFSGYPDFATIYITYVPDRLVVELKAIKLYINSYRDRYISHEESINQILDDFVVACDPLEVYIKGDYSPRGNVHTVIEVRHQKAN

SEQ ID NO: 45271 - protein, 140 aa, Chlorogloeopsis fritschii
  misc_feature (1)..(140): tr|A0A433N9A2|A0A433N9A2_CHLFR NADPH-dependent 7-cyano- 7-deazaguanine reductase OS=Chlorogloeopsis fritschii P CC 6912 OX=211165 GN=queF PE=3 SV=1
MSNSSPETVSQLNQEVKYGERNIAEGKLITFPNPRIGRRYNIDITLPEFTCKCPFSGYPDFATIHITYIPDEKVVELKALKLYINSYRDRYISHEESANQILDDFVAACDPLEATVKADFAPRGNVHTVIEVQHLKSKPN

SEQ ID NO: 45272 - protein, 116 aa, Chloroherpeton thalassium
  misc_feature (1)..(116): sp|B3QYB6|QUEF_CHLT3 NADPH-dependent 7-cyano-7-deazagua nine reductase OS=Chloroherpeton thalassium (strain ATC C 35110 / GB-78) OX=517418 GN=queF PE=3 SV=1
MKPELLETFENQYPNRDYTIEIVNPEFTSVCPKTGLPDFGTITLQYIPNKLCVELKSLKYYYLEFRNAGIFYENVTNKILDDLVKAVKPKEMKIISEWKARGGITTTVTASYEAEK

SEQ ID NO: 45273 - protein, 136 aa, Chondrocystis sp.
  misc_feature (1)..(136): tr|A0A1Z4RUN3|A0A1Z4RUN3_9CHRO NADPH-dependent 7-cyano- 7-deazaguanine reductase OS=Chondrocystis sp. NIES-4102 OX=2005460 GN=queF PE=3 SV=1
MTTSPQSTSTDTMKYGERAIAEGELITFPNPRLGRKYNINITLPEFTCKCPFSGYPDFATIYITYSPDQTVVELKGLKLYINSYRDRYIPHEEVVNQILDDFVAACDPLEVTVKGDFTPRGNVHTVIEVNHQKTTS

SEQ ID NO: 45274 - protein, 212 aa, Chondromyces crocatus; identical to SEQ ID NO: 29130
  misc_feature (1)..(212): tr|A0A0K1EDX3|A0A0K1EDX3_CHOCO 7-carboxy-7-deazaguanine synthase OS=Chondromyces crocatus OX=52 GN=queF PE=3 S V=1

SEQ ID NO: 45275 - protein, 129 aa, Chromatiaceae bacterium
  misc_feature (1)..(129): tr|A0A3D4RY49|A0A3D4RY49_9GAMM NADPH-dependent 7-cyano- 7-deazaguanine reductase OS=Chromatiaceae bacterium OX= 2049432 GN=queF PE=3 SV=1
MSSVASNKLDTFPNPAPERDYTVRIRVPEFTCLCPKTGQPDFAELTLEYVPEALCVELKSLKLYVWSFRDKGAFHEDVTNRILTDLVAVMSPRFLRLSADFNVRGGIYTSVVAEHRALGWNPLQPVQLP

SEQ ID NO: 45276 - protein, 136 aa, Chromatiales bacterium
  misc_feature (1)..(136): tr|A0A257STA7|A0A257STA7_9GAMM NADPH-dependent 7-cyano- 7-deazaguanine reductase OS=Chromatiales bacterium 21-6 4-14 OX=1970504 GN=queF PE=3 SV=1
MPTRPSTDLETFDNPQAERDYFIRVRVPEFTCLCPKTGQPDFATLHIDYVPDRRCIELKSLKLYVWSYRDQGAFHEAVTNRILEDLVSACAPRFLRVTAEFNVRGGLYTTVVAEHRRPDWTPPVAVHLPPGAPAAG

SEQ ID NO: 45277 - protein, 134 aa, Chromatiales bacterium
  misc_feature (1)..(134): tr|A0A524KMU1|A0A524KMU1_9GAMM NADPH-dependent 7-cyano- 7-deazaguanine reductase OS=Chromatiales bacterium OX=2 026725 GN=queF PE=3 SV=1
MPSIPSKILETFKNPETVRAFTVRMRLPEFTCLCPKTGQPDFATMHLEYVPDSLCIELKSLKNYIWSFRDQGAFHEAVTNQILGDLVAVLAPRFMRLTAEFNVRGGIYTTVIAEHRQPGWQPAAPVSPPPGTPA

SEQ ID NO: 45278 - protein, 129 aa, Chromatium okenii
  misc_feature (1)..(129): tr|A0A2S7XR84|A0A2S7XR84_9GAMM NADPH-dependent 7-cyano- 7-deazaguanine reductase OS=Chromatium okenii OX=61644 GN=queF PE=3 SV=1
MPSAPSKTLETFPNPQQERDYTIRMRIPEFTCLCPKTGQPDFAELRLEYVPDQLCIELKALKNYIWSYRNDGAFHEAITNRILSDLVVTIAPRFMRLTAEFNVRGGIFTTVIAEHRAVGWEPPTPVQLP

SEQ ID NO: 45279 - protein, 278 aa, Chromatocurvus halotolerans
  misc_feature (1)..(278): tr|A0A4R2KY61|A0A4R2KY61_9GAMM NADPH-dependent 7-cyano- 7-deazaguanine reductase OS=Chromatocurvus halotolerans OX=1132028 GN=EV688_102296 PE=3 SV=1
MSGTPEARGELLLGRQVEYTDVYTPQLLQPIPRQQGRAALGLESGALSFYGEDVWHAYELSWLDPGGRPRVAAARLVIPAFSPNLVESKSLKLYLNSVNNTVFRDETALQRTLADDISAAVGAAVELELLSCDDPNLAGIQAPGECIDGAAFSAPEGEPSASLLLRSTPESIVTQVLHSHLLRSLCPVTAQPDWATLVVKYTGPLLDPASLLQYVVAFRRHQEFHEQCVERIFCDIRAALSPEALSVHALYTRRGGLDICPWRSTEGGAAPRFRLNRQ

SEQ ID NO: 45280 - protein, 271 aa, Chromatocurvus sp.
  misc_feature (1)..(271): tr|A0A2N5Y4H4|A0A2N5Y4H4_9GAMM NADPH-dependent 7-cyano- 7-deazaguanine reductase OS=Chromatocurvus sp. F02 OX=1 905677 GN=queF PE=3 SV=1
MKPSELLLGKQTPVVDHYAPELLFPIPRQEGREQLGLVAPLPFEGADIWHAYELSWLDANDKAQARVGRFSVPAGSPNLVESKSFKLYLNSLNNAVFADDAAACACITGDLSAAAGANVTLALFPVDDPALAGGQLPGICIDGAPGRWPRREPEAAMLQCSSADVVEEKLYSHLLRSLCPVTGQPDWATLWLHYRGPALEHAALLSYILAYREHQDFHEQCVERIFRDLQKCVAPEFLHLQAFYTRRGGLDINPYRSSGGGMPLNLRLGRQ

SEQ ID NO: 45281 - protein, 278 aa, Chromobacterium amazonense
  misc_feature (1)..(278): tr|A0A2S9X181|A0A2S9X181_9NEIS NADPH-dependent 7-cyano- 7-deazaguanine reductase OS=Chromobacterium amazonense OX=1382803 GN=queF PE=3 SV=1
MMQNLTPEHSPLGKTVSYQDQYDPSLLFPIARQTKREEIGVDEAALPFAGVDIWTGFELSWLNAKGKPQVGIATFRIPAASPRLIESKSFKLYLNSYNQTRMDSMDALAAQLARDLSEAAGAEVSVSILLPQAFAAEQVRELAGEYLDDLDIAVGNYAPCPEVLKADEAEIVSETLCSNLLKSNCLVTGQPDWGSVSIRYTGPKIDREALLRYLIGFRQHNEFHEQCVERIFVDVLRACAPAQLTVYARYTRRGGLDINPWRSNFETAPQDNVRTARQ

SEQ ID NO: 45282 - protein, 279 aa, Chromobacterium haemolyticum
  misc_feature (1)..(279): tr|A0A1W0CCL0|A0A1W0CCL0_9NEIS NADPH-dependent 7-cyano- 7-deazaguanine reductase OS=Chromobacterium haemolyticu m OX=394935 GN=queF PE=3 SV=1
MNTQAMSPEQSPLGKTVSYQDHYAPGLLFPIPRQVKRDEIGVDASALPFAGVDIWTGFELSWLNARGKPQVGIATFRIPADSPKLIESKSFKLYLNSYNQTRMAGLDALRRQLADDLSAAAGKAIGVDIMLPQQFAGETIAELAGDCIDDLDIEVDNYAPCPQILRADAGDVVSETLCSHLLKSNCLVTGQPDWGSVQIRYTGPRLDHEALLRYLIGFRQHNEFHEQCVERIFTDLLRACAPSRLTVYARYTRRGGLDINPFRSNCGEMPVGNTRTARQ

SEQ ID NO: 45283 - protein, 279 aa, Chromobacterium haemolyticum
  misc_feature (1)..(279): tr|A0A2T5P1J4|A0A2T5P1J4_9NEIS NADPH-dependent 7-cyano- 7-deazaguanine reductase OS=Chromobacterium haemolyticu m OX=394935 GN=queF PE=3 SV=1
MNTQSMSPEQSPLGKTVSYQDHYAPGLLFPIPRQVKRDEIGVDAAALPFAGVDIWTGFELSWLNARGKPQVGIATFRIPADSPKLIESKSFKLYLNSYNQTRMAGLDALRRQLADDLSAAAGKAIGVDIMLPQQFAGETIAELAGDCIDDLDIEVDNYAPCPQILRADAGNVASETLCSHLLKSNCLVTGQPDWGSVQIRYTGPRLDREALLRYLIGFRQHNEFHEQCVERIFTDLLRACAPSRLTVYARYTRRGGLDINPFRSNCGEMPVGNTRTARQ

SEQ ID NO: 45284 - protein, 277 aa, Chromobacterium sp.
  misc_feature (1)..(277): tr|A0A2K4MUC8|A0A2K4MUC8_9NEIS NADPH-dependent 7-cyano- 7-deazaguanine reductase OS=Chromobacterium sp. MWU13-2 610 OX=2077146 GN=queF PE=3 SV=1
MQNLTPEHSPLGKTVSYQDQYDPSLLFPIARQTKREEIGVEEAALPFAGIDIWTGFELSWLNPRGKPQVGIATFRIPAASPRLIESKSFKLYLNSYNQTRMDSVNALAAQLARDLSEAAGAEVDVSIALPPAFAAEQVCELAGECLDDLDIAVDNYAPCPEVLKADATEIVSETLCSNLLKSNCLVTGQPDWGSVSIRYTGPKIDREALLRYLIGFRQHNEFHEQCVERIFVDVLRACAPTQLTVYARYTRRGGLDINPWRSNFEAAPQDNVRTARQ

SEQ ID NO: 45285 - protein, 279 aa, Chromobacterium sp.
  misc_feature (1)..(279): tr|A0A344UGT1|A0A344UGT1_9NEIS NADPH-dependent 7-cyano- 7-deazaguanine reductase OS=Chromobacterium sp. IIBBL 2 74-1 OX=2202142 GN=queF PE=3 SV=1
MNTHATTPEHSPLGKTVSYQDQYDPSLLFPIARKTKRDEIGVDEAALPFAGVDIWTGFELSWLNARGKPQVGIATFRIPAASPRLIESKSFKLYLNSYNQTRMDGVDALSAQLARDLSAAAGAEVSVSIALPQAFAAEQVRELAGECIDELDIEVDRYAPCPEVLKADAADIVSETLCSNLLKSNCLVTGQPDWGSVSIRYTGPKIDREALLRYLIGFRQHNEFHEQCVERIFVDVLRACAPEKLTVYARYTRRGGLDINPWRSNADAAPTDNVRTARQ

SEQ ID NO: 45286 - protein, 279 aa, Chromobacterium sphagni
  misc_feature (1)..(279): tr|A0A1S1X0R8|A0A1S1X0R8_9NEIS NADPH-dependent 7-cyano- 7-deazaguanine reductase OS=Chromobacterium sphagni OX= 1903179 GN=queF PE=3 SV=1
MNTHAATPEHSPLGKTVCYQDHYDKSLLFPIARQTKRDEIGVEETALPFAGVDIWTGFELSWLNTRGKPQVAIATFRIPADSPRLIESKSFKLYLNSYNQTRLDSVAALATQLAGDLSEAAGAQVEVGITLPRDFAAEQVRELAGEYIDDLDIAVDNYAPCPHILQADAADIVSETLCSNLLKSNCLVTGQPDWGSVAIRYTGPRIDREALLRYLIGFRQHNEFHEQCVERIFVDVLRACAPEQLTVYARYTRRGGLDINPWRSNFESAPQDNVRAARQ

SEQ ID NO: 45287 - protein, 277 aa, Chromobacterium vaccinii
  misc_feature (1)..(277): tr|A0A2L2B4P2|A0A2L2B4P2_9NEIS NADPH-dependent 7-cyano- 7-deazaguanine reductase OS=Chromobacterium vaccinii OX =1108595 GN=queF PE=3 SV=1
MSHLTPEHSPLGKTVSYQDQYDPSLLFPIARQAKRDEIGVDEAALPFAGVDIWTGFELSWLNPRGKPQVGIATFRIPAASPRLIESKSFKLYLNSYNQTRMDGVDALSAQLARDLSAAAGAEVSVSIALPQAFAAEQVRELAGEYIDELDIEVDNYAPCPEVLKADAADIVSETLCSNLLKSNCLVTGQPDWGSVSIRYTGPKINREALLRYLIGFRQHNEFHEQCVERIFVDVLRACAPTQLTVYARYTRRGGLDINPWRSNADTAPASNIRTARQ

SEQ ID NO: 45288 - protein, 277 aa, Chromobacterium vaccinii
  misc_feature (1)..(277): tr|A0A1D9LG50|A0A1D9LG50_9NEIS NADPH-dependent 7-cyano- 7-deazaguanine reductase OS=Chromobacterium vaccinii OX =1108595 GN=queF PE=3 SV=1
MSHLTPEHSPLGKTVSYQDQYDPSLLFPIARKTKRDEIGVDEAALPFAGIDIWTGFELSWLNARGKPQVGIATFRIPAASPRLIESKSFKLYLNSYNQTRMDGVDALSAQLARDLSAAAGAEVSVSIALPQAFAAEQVRELAGEYIDELDIEVDHYSPCPEILKADAADIVSETLCSNLLKSNCLVTGQPDWGSVSIRYTGPKIDREALLRYLIGFRRHNEFHEQCVERIFVDVLRACAPEKLTVYARYTRRGGLDINPWRSNADAAPTDNVRAARQ

SEQ ID NO: 45289 - protein, 279 aa, Chromobacterium violaceum
  misc_feature (1)..(279): sp|Q7NRN0|QUEF_CHRVO NADPH-dependent 7-cyano-7-deazagua nine reductase OS=Chromobacterium violaceum (strain ATC C 12472 / DSM 30191 / JCM 1249 / NBRC 12614 / NCIMB 913 1 / NCTC 9757) OX=243365 GN=queF PE=3 SV=1
MNIHAATPEHSPLGKTVSYQDQYDPSLLFPIARQTKRDEIGVDEAALPFAGVDIWTGFELSWLNARGKPQIGIATFRIPAGSPRLIESKSFKLYLNSYNQTRMDGIDALAAQLARDLSAAAGAEVAVSIALPQAFAAERIAELAGECIDELDIAVDNYAPCPEILSADSTAIVSETLCSNLLKSNCLVTGQPDWGSVSIRYTGPKIDREALLRYLIGFRRHNEFHEQCVERIFVDVLRACAPTKLTVYARYTRRGGLDINPWRSNCDAAPTDNVRTARQ

SEQ ID NO: 45290 - protein, 277 aa, Chromobacterium violaceum; identical to SEQ ID NO: 45288
  misc_feature (1)..(277): tr|A0A381FV22|A0A381FV22_CHRVL NADPH-dependent 7-cyano- 7-deazaguanine reductase OS=Chromobacterium violaceum O X=536 GN=queF PE=3 SV=1

SEQ ID NO: 45291 - protein, 277 aa, Chromohalobacter canadensis
  misc_feature (1)..(277): tr|A0A285VJJ5|A0A285VJJ5_9GAMM NADPH-dependent 7-cyano- 7-deazaguanine reductase OS=Chromohalobacter canadensis OX=141389 GN=queF PE=3 SV=1
MSERDETLAHAPLGRESAYPEHYDAGLLFPIPRQANRAPLGLDDVALPFEGEDEWHAFELSWLDAKGKPIVAVARFRLPADSPSLIESKSWKLYLNSFNQTHFDSREAVIDTLERDLAQAAGAPVTVELFGVEDEALTPRALPGECLDDLDVSIEHYTPTPELIEVGEEVVDETLHSHLLKSNCPVTGQPDWGSVLIRYRGPRLEREALLKYLISYRQHQDFHEHCVEHLFVDLMARARPERLLVMARYVRRGGLDISPWRGTPGERPPTPLRLARQ

SEQ ID NO: 45292 - protein, 277 aa, Chromohalobacter japonicus
  misc_feature (1)..(277): tr|A0A1Q8T892|A0A1Q8T892_9GAMM NADPH-dependent 7-cyano- 7-deazaguanine reductase OS=Chromohalobacter japonicus OX=223900 GN=queF PE=3 SV=1
MSERDETLAHAPLGRESAYPEHYDAGLLFPIPRQANRAPLGLDDAALPFEGEDEWHAFELSWLDAKGKPIVAVARFRLPADSPSLIESKSWKLYLNSFNQTRFDSREAVAETLERDLAQAAGAPVAVALFGVEDDALTPRALPGECLDDLDVSIEHYTPTPELIEVGEEIVDETLHSHLLKSNCPVTGQPDWGSVLIRYRGPRLEREALLKYLISYRQHQDFHEHCVEHLFVDLMARAKPERLLVMARYVRRGGLDISPWRGTPGERPPTPLRLARQ

SEQ ID NO: 45293 - protein, 277 aa, Chromohalobacter marismortui
  misc_feature (1)..(277): tr|A0A4R7NV47|A0A4R7NV47_9GAMM NADPH-dependent 7-cyano- 7-deazaguanine reductase OS=Chromohalobacter marismortu i OX=42055 GN=queF PE=3 SV=1
MSERDETLEHAPLGRESAYPEHYDAGLLFPIPRQANRAPLGLDDAALPFEGEDEWHAFELSWLDAKGKPIVAVARFRLPADSPSLIESKSWKLYLNGFNQTRFDSREAVIGTLERDLAQAAGAPVTVELFGVEDEALTPRALPGECLDDLDVSIEHYTPTPELIEVGEEIVDETLHSHLLKSNCPVTGQPDWGSVLIRYRGPRLAREALLKYLISYRQHQDFHEHCVEHLFVDLMARARPERLLVMARYVRRGGLDISPWRGTPGERPPTPLRLARQ

SEQ ID NO: 45294 - protein, 277 aa, Chromohalobacter salexigens
  misc_feature (1)..(277): sp|Q1QXV0|QUEF_CHRSD NADPH-dependent 7-cyano-7-deazagua nine reductase OS=Chromohalobacter salexigens (strain D SM 3043 / ATCC BAA-138 / NCIMB 13768) OX=290398 GN=queF PE=3 SV=1
MSERDKTLEHAPLGRESAYPEHYDAGLLFPIPRQANRAPLGLDDAALPFEGEDEWHAFELSWLDAKGKPIVAVARFRLPADSPSLIESKSWKLYLNSFNQTRFDRREAVIDTLERDLAQAAGASVAVALFGVEDDALMPRALPGECLDDLDVSIEYYTPTPGLLEVGEEIVEETLHSHLLKSNCPVTGQPDWGSVLIRYRGPRLERDALLKYLISYRQHQDFHEHCVEHLFVDLMARARPERLLVMARYVRRGGLDISPWRGTPGERPPTPLRLARQ

SEQ ID NO: 45295 - protein, 277 aa, Chromohalobacter salexigens
  misc_feature (1)..(277): tr|A0A4Q0HHE3|A0A4Q0HHE3_CHRSL NADPH-dependent 7-cyano- 7-deazaguanine reductase OS=Chromohalobacter salexigens OX=158080 GN=queF PE=3 SV=1
MSERDETLEHAPLGRESAYPEHYDAGLLFPIPRQANRTPLGLDDAALPFEGEDEWHAFELSWLDAKGKPIVAVARFRLPADSPSLIESKSWKLYLNSFNQTRFDSREAVIDTLERDLAQAAGAPVAVALFGVEDDALMPRALPGECLDDLDVSIEHYTPTPELLEVGEEIVEETLHSHLLKSNCPVTGQPDWGSVLIRYRGPRLEREALLKYLISYRQHQDFHEHCVEHLFVDLMARARPERLLVMARYVRRGGLDISPWRGTPGERPPTPLRLARQ

SEQ ID NO: 45296 - protein, 131 aa, Chroococcales cyanobacterium
  misc_feature (1)..(131): tr|A0A3N5INK3|A0A3N5INK3_9CHRO NADPH-dependent 7-cyano- 7-deazaguanine reductase OS=Chroococcales cyanobacteriu m metabat2.561 OX=2485785 GN=queF PE=3 SV=1
MVQSSEKIEVKYGEREIAEGTLITFPNPRPGRNYDIQITLPEYTCKCPFSGYPDFATIYLSYVPDQKVMELKAIKLYINSYRDRYISHEEAINQILDDLVAACEPLQMKVKGDFHPRGNVHTVVEVMYKKE

SEQ ID NO: 45297 - protein, 155 aa, Chroococcales cyanobacterium
  misc_feature (1)..(155): tr|A0A2G7GIJ6|A0A2G7GIJ6_9CHRO NADPH-dependent 7-cyano- 7-deazaguanine reductase OS=Chroococcales cyanobacteriu m IPPAS B-1203 OX=2049454 GN=queF PE=3 SV=1
MSHDSSLVQSASDSSLADSNAATEQKYGERQIADGKLITFPNPRIGRWYNIHITLPEFTCKCPFSGYPDFATIYITYVPNERVVELKAIKLYINSYRDRYISHEESINQILDDFVAACDPLEVSIKGDFNPRGNVHTVIEVTHKRESSNTLTVKN

SEQ ID NO: 45298 - protein, 128 aa, Chroococcidiopsis cubana
  misc_feature (1)..(128): tr|A0A433W0X7|A0A433W0X7_9CYAN NADPH-dependent 7-cyano- 7-deazaguanine reductase OS=Chroococcidiopsis cubana SA G 39.79 OX=388085 GN=queF PE=3 SV=1
MSVEEIKYGERQIAEGKLITFPNPRIGRRYEIHITLPEFTCKCPFSGYPDFATINITYVPDERVVELKAIKLYINSYRDRYISHEESVNQILDDFVAACDPLEAHIKGDFAPRGNVHTVIEVHHQKSA

SEQ ID NO: 45299 - protein, 128 aa, Chroococcidiopsis sp.; identical to SEQ ID NO: 45298
  misc_feature (1)..(128): tr|A0A2P8QIZ2|A0A2P8QIZ2_9CYAN NADPH-dependent 7-cyano- 7-deazaguanine reductase OS=Chroococcidiopsis sp. CCALA 051 OX=869949 GN=queF PE=3 SV=1

SEQ ID NO: 45300 - protein, 163 aa, Chroococcidiopsis sp.
  misc_feature (1)..(163): tr|A0A2S6VGG1|A0A2S6VGG1_9CYAN NADPH-dependent 7-cyano- 7-deazaguanine reductase OS=Chroococcidiopsis sp. TS-82 1 OX=1378066 GN=queF PE=3 SV=1
MSNESSLVQSGTESLADDSETAQQQKYGERHIAEGKLITFPNPRIGRWYNIHITLPEFTCKCPFSGYPDFATIYITYVPNERVVELKSIKLYINSYRDRYISHEESINQILDDFVAACDPLEVQIKGDFNPRGNVHTAIEINYKREQTPIQNNVLARKESSFQ

SEQ ID NO: 45301 - protein, 142 aa, Chroococcidiopsis thermalis
  misc_feature (1)..(142): tr|K9U643|K9U643_CHRTP NADPH-dependent 7-cyano-7-deazag uanine reductase OS=Chroococcidiopsis thermalis (strain PCC 7203) OX=251229 GN=queF PE=3 SV=1
MKPSPDLTSQSAAEMSVEEIKYGERQIAEGKLITFPNPRIGRRYEIHITLPEFTCKCPFSGYPDFATINITYVPDERVVELKAIKLYINSYRDRYISHEESVNQILDDFVAACDPLEAHIKGDFAPRGNVHTVIEVHHQKSA

SEQ ID NO: 45302 - protein, 157 aa, Chroogloeocystis siderophila
  misc_feature (1)..(157): tr|A0A1U7HVA8|A0A1U7HVA8_9CHRO NADPH-dependent 7-cyano- 7-deazaguanine reductase OS=Chroogloeocystis siderophil a 5.2 s.c.1 OX=247279 GN=queF PE=3 SV=1
MQSGTEASLAADNETVEQQKYGERHINEGKLITFPNPRIGRWYNIYITLPEFTCKCPFSGYPDFATIYINYVPNERVVELKAIKLYINSYRDRYISHEESINQILDDFVAACDPLEVQIKGDFNPRGNVHTVIEVTHKREQTPTQSNTLTRKESDLK

SEQ ID NO: 45303 - protein, 282 aa, Chryseobacterium sp.
  misc_feature (1)..(282): tr|A0A2G7TAR7|A0A2G7TAR7_9FLAO NADPH-dependent 7-cyano- 7-deazaguanine reductase QueF OS=Chryseobacterium sp. B 5 OX=2050562 GN=CTI11_08935 PE=3 SV=1
MNTPEQSQLGKSSAYIDQYAPSLLFPLPRAPKREEIGIQGSQMPFFGADLWTAFELSWLNLRGKPQVALVHFTIPCETPNLIESKSFKLYLNSFNNTRLADAAEVQARLRTDLAEALWRGSEQKGSIGVKIIGLDRFDQEMVQELDGLLLDRLDVECTQYQPAPELLRANHEEGPVTETLVSHLLKSNCLVTGQPDWGSVQIRYSGAQIDQEGLLQYLVSFRNHNEFHEQCVERIFMDIWTRCRPLKLSVYARYTRRGGLDINPFRTSHPGALPANVRSARQ

SEQ ID NO: 45304 - protein, 166 aa, Chryseomicrobium excrementi
  misc_feature (1)..(166): tr|A0A2M9F0U4|A0A2M9F0U4_9BACL NADPH-dependent 7-cyano- 7-deazaguanine reductase OS=Chryseomicrobium excrementi OX=2041346 GN=queF PE=3 SV=1
MSGRTYEQGLDELTLLGNQGTKYPQDYAPEVLEAVDSLHSNRDYFVKFNAPEFTSLCPITGQPDFATMYISYIPDQKIVESKSLKLYLFSFRNHGDFHEDCVNIIMNDLINLLNPRYIEVWGKFTPRGGISIDPWCNYGKPGTKYEEMAFHRLMNHDLYPEKVDNR

SEQ ID NO: 45305 - protein, 189 aa, Chthoniobacter flavus
  misc_feature (1)..(189): tr|B4D1V6|B4D1V6_9BACT NADPH-dependent 7-cyano-7-deazag uanine reductase OS=Chthoniobacter flavus Ellin428 OX=4 97964 GN=queF PE=3 SV=1
MHLYGDADCPEPGELPDSAEIIARDSHSTLIPVTTPKKYSRLSLLGHTAKFPEHPKAATLETFKNENAKRDYWITFECGEFTSMCPVTGQPDFAKIRIEYIPGELCIETKSLKFYLASFRNTRSFNEAIVNRILDDIVEACRPRHAMVHGEFAPRGGIGVIVDAEYPDRPENAKAPKRTKPASPRRTRS

SEQ ID NO: 45306 - protein, 122 aa, Chthoniobacterales bacterium
  misc_feature (1)..(122): tr|A0A2W5YKJ3|A0A2W5YKJ3_9BACT NADPH-dependent 7-cyano- 7-deazaguanine reductase OS=Chthoniobacterales bacteriu m OX=2201154 GN=queF PE=3 SV=1
MPASPDQARLETFPNPVRRDYRIRFETADFTSLCPVTGQVDFAQITIEYAPDALCVESKSLKFYLASYRNERAFNEAVTNRILDDFVRACSPREAIVTAEFSARGGIALTVRAEFPDKTRKR

SEQ ID NO: 45307 - protein, 152 aa, Chthoniobacterales bacterium
  misc_feature (1)..(152): tr|A0A2W5YUW8|A0A2W5YUW8_9BACT NADPH-dependent 7-cyano- 7-deazaguanine reductase OS=Chthoniobacterales bacteriu m OX=2201154 GN=queF PE=3 SV=1
MSRKTGLTLLGRNVARLPASPAEATLETFPNPARRDYHIHFETADFTSLCPVTGQADFARIEIEYVPDKLCVESKSLKFYLASYRNERAFNEAVTNRILNDFVRACSPREATVTAAFSARGGIALTVRARFPDGAGAERNGESSNAARHRSA

SEQ ID NO: 45308 - protein, 134 aa, Chthonomonas calidirosea
  misc_feature (1)..(134): tr|S0EV12|S0EV12_CHTCT NADPH-dependent 7-cyano-7-deazag uanine reductase OS=Chthonomonas calidirosea (strain DS M 23976 / ICMP 18418 / T49) OX=1303518 GN=queF PE=3 SV= 1
MDLTRLLRGEMSREEQVSLLETFDNPRPERDYLIVHTCPEFTSVCPKTGQPDFATITIEYVPDRKCLELKALKLYFFSYRNQGIYYEAVVNRILDDLVSVCHPRRMTVRGEFNVRGGFSSVVTAEYRQEEAKRT

SEQ ID NO: 45309 - protein, 154 aa, Ciceribacter sp.
  misc_feature (1)..(154): tr|A0A4Q2SZT8|A0A4Q2SZT8_9RHIZ NADPH-dependent 7-cyano- 7-deazaguanine reductase OS=Ciceribacter sp. F8825 OX=2 509717 GN=queF PE=3 SV=1
MSKTDVSGLTQLGQSVEAPTAPESAVLERVPNGNAGTDYVVRFTAPEFTSLCPMTGQPDFAHIVIDYIPGDWLVESKSLKLFLFSFRNHGAFHEDCSIYIAGRIIDLLQPKWLRIGAYWYPRGGIPIDVFWQTGEAPAGVWLPDQGVPTYRGRG

SEQ ID NO: 45310 - protein, 154 aa, Citreicella sp.
  misc_feature (1)..(154): tr|D0DDU3|D0DDU3_9RHOB NADPH-dependent 7-cyano-7-deazag uanine reductase OS=Citreicella sp. SE45 OX=501479 GN=q ueF PE=3 SV=1
MTDSIYSNLRQLGGETRIPASPEEAELERVANPQADVTYNVRFTAPEFTSLCPMTGQPDFAHLVIDYAPGKWLVESKSLKLYLTSFRNHGAFHEDCTISIARRLVGFLEPQWLRIGGYWYPRGGIPIDVFWQTGPLPEGLWLPDQGVPPYRGRG

SEQ ID NO: 45311 - protein, 155 aa, Citreimonas salinaria
  misc_feature (1)..(155): tr|A0A1H3LD81|A0A1H3LD81_9RHOB NADPH-dependent 7-cyano- 7-deazaguanine reductase OS=Citreimonas salinaria OX=32 1339 GN=queF PE=3 SV=1
MSSNHIYSGLKQLGQKSEIPESPEAAELERVPNPQDDARYAVRFTAPEFTSLCPMTGQPDFAHIVIDYIPSKWLVESKSLKLYLTSFRNHGAFHEDCTVSIGRRLTEFLEPEWLRIGGYWYPRGGIPIDVFYQTGPAPTGVWIPDQGVPAYRGRG

SEQ ID NO: 45312 - protein, 282 aa, Citrobacter amalonaticus
  misc_feature (1)..(282): tr|A0A2S4RW32|A0A2S4RW32_CITAM NADPH-dependent 7-cyano- 7-deazaguanine reductase OS=Citrobacter amalonaticus OX =35703 GN=queF PE=3 SV=1
MSSYENHQALDGLTLGKSTDYRDNYDASLLQGVPRSLNRDPLGLHADNLPFRGADIWTLYELSWLNAKGLPQVAVGHVELDYTSVNLIESKSFKLYLNSFNQTRFDSWDAVRQTLEKDLRACAQGEVSVALYRIDELEGQPIAHFHGACIDEQDISIDHYQFSTDYLENAASGEKVVEETLVSHLLKSNCLITHQPDWGSIQIQYRGHKIDREKLLRYLVSFRHHNEFHEQCVERIFNDILRFCQPEKLSVYARYTRRGGLDINPWRTNTDFAPATGRLVRQ

SEQ ID NO: 45313 - protein, 282 aa, Citrobacter amalonaticus
  misc_feature (1)..(282): tr|A0A381GCK9|A0A381GCK9_CITAM NADPH-dependent 7-cyano- 7-deazaguanine reductase OS=Citrobacter amalonaticus OX =35703 GN=queF PE=3 SV=1
MSSYENHQALDGLTLGKSTDYRDIYDPSLLQGVPRSLNRDPLGLKADSLPFHGADIWTLYELSWLNARGLPQVAVGHVELDYTSLNLIESKSFKLYLNSFNQTRFDSWEAVQQTLENDLRACAEGKVTVALYRLDELEGQPVAHFHGTCIDDQDIDIDNYQFTTDYLQSATSGEKVVEETLVSHLLKSNCLITHQPDWGSIQIQYRGRKIDREKLLRYLISFRHHNEFHEQCVERIFNDLLRFCQPEKLSVYARYTRRGGLDINPWRSNTDFVPATGRLVRQ

SEQ ID NO: 45314 - protein, 282 aa, Citrobacter braakii
  misc_feature (1)..(282): tr|A0A4R0LUN1|A0A4R0LUN1_CITBR NADPH-dependent 7-cyano- 7-deazaguanine reductase OS=Citrobacter braakii OX=5770 6 GN=queF PE=3 SV=1
MSSYENHQALDDLTLGKSTDYRDNYDASLLQGVPRSLNRDPLDLQADNLPFHGADIWTLYELSWLNANGLPQVAVGHVELDYTSVNLIESKSFKLYLNSFNQTRFDSWDAVRQTLENDLRACAQGDVSVALYRLDELEGQPIAHFNGTCIDNQDIVINNYQFSTEYLENAVGGEKAVEETLVSHLLKSNCLITHQPDWGSIQIQYRGRKIDREKLLRYLVSFRHHNEFHEQCVERIFNDILRFCQPEKLSVYARYTRRGGLDINPWRTNTDFTPATGRLVRQ

SEQ ID NO: 45315 - protein, 282 aa, Citrobacter braakii
  misc_feature (1)..(282): tr|A0A1R0FYY5|A0A1R0FYY5_CITBR NADPH-dependent 7-cyano- 7-deazaguanine reductase OS=Citrobacter braakii OX=5770 6 GN=queF PE=3 SV=1
MSSYENHQALDGLTLGKSTDYRDNYDASLLQGVPRSLNRDPLDLQADNLPFHGADIWTLYELSWLNANGLPQVAVGHVELDYTSVNLIESKSFKLYLNSFNQTRFDSWDAVRQTLENDLRACAQGDVSVALYRLDELEGQPIAHFNGTCIDNQDIVIDNYQFSTEYLENAVGGEKAVEETLVSHLLKSNCLITHQPDWGSIQIQYRGRKIDREKLLRYLVSFRHHNEFHEQCVERIFNDILRFCQPEKLSVYARYTRRGGLDINPWRTNTDFTPATGRLVRQ

SEQ ID NO: 45316 - protein, 282 aa, Citrobacter farmeri
  misc_feature (1)..(282): tr|A0A223JVX8|A0A223JVX8_9ENTR NADPH-dependent 7-cyano- 7-deazaguanine reductase OS=Citrobacter farmeri OX=6782 4 GN=queF PE=3 SV=1
MSSYENHQALDGLTLGKSTDYRDLYDPSLLQGVPRSLNRDPLGLKAGSLPFHGADIWTLYELSWLNARGLPQVAVGHVELDYTSVNLIESKSFKLYLNSFNQTRFDSWEAVQRTLENDLRACAEGNVTVALYRLDELEGQPVAHFHGTCIDFQDIGIDNYQFTTDFLQSAASGEKIVEETLVSHLLKSNCLITHQPDWGSIQIQYRGRKIDREKLLRYLVSFRHHNEFHEQCVERIFNDLLRFCQPEKLSVYARYTRRGGLDINPWRSNTDFVPATGRLVRQ

SEQ ID NO: 45317 - protein, 282 aa, Citrobacter freundii
  misc_feature (1)..(282): tr|A0A443Y4X9|A0A443Y4X9_CITFR NADPH-dependent 7-cyano- 7-deazaguanine reductase OS=Citrobacter freundii OX=546 GN=queF PE=3 SV=1
MSSYENHQALNGLTLGKSTDYRDNYDASLLQGVPRSLNRDPLDLKADNLPFHGADIWTLYELSWLNANGLPQVAVGHVELDYTSVNLIESKSFKLYLNSFNQTRFDSWDAVRQTLENDLRACAQGDVSVALYRLDELEGQPIAHFNGTCIDNQDIVIDNYQFSTAYLENAVSSEKAVEETLVSHLLKSNCLITHQPDWGSIQIQYRGRKIDREMLLRYLVSFRHHNEFHEQCVERIFNDILRFCQPEKLSVYARYTRRGGLDINPWRTNTDFTPATGRLVRQ

SEQ ID NO: 45318 - protein, 282 aa, Citrobacter freundii
  misc_feature (1)..(282): tr|A0A4V1CCM5|A0A4V1CCM5_CITFR NADPH-dependent 7-cyano- 7-deazaguanine reductase OS=Citrobacter freundii OX=546 GN=queF PE=3 SV=1
MSSYENHQALDGLTLGKSTDYRDNYDASLLQGVPRSLNRDPLDLKADNLPFRGADIWTLYELSWLNANGLPQVAVGHVELDYTSVNLIESKSFKLYLNSFNQTRFDSWDAVRQTLEHDLRACAEGDVHVALYRIDELEGQPIAHFNGTCIDDQDIVIDNYQFTTDYLENATSGEKAVEETLVSHLLKSNCLITHQPDWGSIQIQYRGRKIDREQLLRYLVSFRHHNEFHEQCVERIFNDILRFCQPEKLSVYARYTRRGGLDINPWRTNTDFVPAIGRLVRQ

SEQ ID NO: 45319 - protein, 282 aa, Citrobacter gillenii
  misc_feature (1)..(282): tr|A0A3E2KNU0|A0A3E2KNU0_9ENTR NADPH-dependent 7-cyano- 7-deazaguanine reductase OS=Citrobacter gillenii OX=678 28 GN=queF PE=3 SV=1
MSSYENHQALDGLTLGKSTDYRDNYDASLLQGVPRSLNRDPLDLKADNLPFHGADIWTLYELSWLNANGLPQVAVGHVELDYTSVNLIESKSFKLYLNSFNQTRFDSWDAVRQTLEHDLRACAEGDVHVALYRIDELEGQPIAHFNGTCIDDQDIVIDNYQFTTDYLENATSGEKAVEETLVSHLLKSNCLITHQPDWGSIQIQYRGRKIDREQLLRYLVSFRHHNEFHEQCVERIFNDILRFCQPEKLSVYARYTRRGGLDINPWRTNTDFVPAIGRLVRQ

SEQ ID NO: 45320 - protein, 282 aa, Citrobacter koseri
  misc_feature (1)..(282): sp|A8AP02|QUEF_CITK8 NADPH-dependent 7-cyano-7-deazagua nine reductase OS=Citrobacter koseri (strain ATCC BAA-8 95 / CDC 4225-83 / SGSC4696) OX=290338 GN=queF PE=3 SV= 1
MSSYENHQALDGLTLGKSTDYRDNYDASLLQGVPRSLNRDPLDLKADNLPFHGADIWTLYELSWLNAKGVPQVAVGHVELDYTSVNLIESKSFKLYLNSFNQTRFDSWDAVRQTLENDLRACAQGEVSVALYRLDELEGQPAAHFHGTCIDDQDITIDNYQFSTDYLENAASGEKVVEETLVSHLLKSNCLITHQPDWGSIQICYRGRKIDREKLLRYLVSFRHHNEFHEQCVERIFNDLLRFCQPEKLSVYARYTRRGGLDINPWRSNTDFVPATGRLVRQ

SEQ ID NO: 45321 - protein, 302 aa, Citrobacter koseri
  misc_feature (1)..(302): tr|A0A484VZ05|A0A484VZ05_CITKO NADPH-dependent 7-cyano- 7-deazaguanine reductase OS=Citrobacter koseri OX=545 G N=queF PE=3 SV=1
MSSYENHQALDGLTLGKSTDYRDNYDASLLQGVPRSLNRDPLDLKADNLPFHGADIWTLYELSWLNAKGVPQVAVGHVELDYTSVNLIESKSFKLYLNSFNQTRFDSWDAVRQTLENDLRACAQGEVSVALYRLDELEGQPVAHFHGTCIDDQDITIDNYQFSTDYLENAASGEKVVEETLVSHLLKSNCLITHQPDWGSIQIRYRGRKIDREKLLRYLVSFRHHNEFHEQCVERIFNDLLRFCQPEKLSVLRTLYASWRSGYQPVAQQHRFCACDGQTGASVIFFSQFCAPDSARKGCERS

SEQ ID NO: 45322 - protein, 282 aa, Citrobacter murliniae
  misc_feature (1)..(282): tr|A0A4S3RYT0|A0A4S3RYT0_9ENTR NADPH-dependent 7-cyano- 7-deazaguanine reductase OS=Citrobacter murliniae OX=67 829 GN=queF PE=3 SV=1
MSSYENHQALDGLTLGKSTDYRDNYDVSLLQGVPRSLNRDPLDLKADNLPFHGADIWTLYELSWLNANGLPQVAVGHVELDYTSVNLIESKSFKLYLNSYNQTRFDSWDAVRQTLENDLRACAQGDVSVALYRIDELEGQPIAHFNGTCIDDQDIVIDSYEFSTEYLENAVSGEKAVEETLVSHLLKSNCLITHQPDWGSIQIQYRGRKIDREKLLRYLVSFRHHNEFHEQCVERIFNDILRFCQPEKLSVYARYTRRGGLDINPWRTNTNFVPAIGRLVRQ

SEQ ID NO: 45323 - protein, 282 aa, Citrobacter pasteurii
  misc_feature (1)..(282): tr|A0A0A1RBJ5|A0A0A1RBJ5_9ENTR NADPH-dependent 7-cyano- 7-deazaguanine reductase OS=Citrobacter pasteurii OX=15 63222 GN=queF PE=3 SV=1
MSSYENHRALDSLTLGKSTDYRDIYDASLLQGVPRSLNRDPLDLKADNLPFHGADIWTLYELSWLNANGLPQVAVGHVELDYTSVNLIESKSFKLYLNSFNQTRFDSWEHVRQTLEHDLRACAQGDVSVALYRLDEQEGQPIAHFNGTCIDNQDIVIDNYQFSTDYLENAVSGDKAVEETLVSHLLKSNCLITHQPDWGSIQIQYRGRKIDREKLLRYLVSFRHHNEFHEQCVERIFNDLLRFCQPEKLSVYARYTRRGGLDINPWRTNTDFTPATGRLVRQ

SEQ ID NO: 45324 - protein, 282 aa, Citrobacter portucalensis
  misc_feature (1)..(282): tr|A0A4P7UUA9|A0A4P7UUA9_9ENTR NADPH-dependent 7-cyano- 7-deazaguanine reductase OS=Citrobacter portucalensis O X=1639133 GN=queF PE=3 SV=1
MSSYENHQALNGLTLGKSTDYRDNYDASLLQGVPRSLNRDPLDLKADNLPFHGADIWTLYELSWLNANGLPQVAVGHVELDYTSVNLIESKSFKLYLNSFNQTRFDSWDAVRQTLENDLRACAQGDVSVALYRLDELEGQPIAHFNGTCIDNQDIVIDNYQFSTAYLENAVSGEKAVEETLVSHLLKSNCLITHQPDWGSIQIQYRGRKIDREKLLRYLVSFRHHNEFHEQCVERIFNDILRFCQPEKLSVYARYTRRGGLDINPWRTNTDFTPATGRLVRQ

SEQ ID NO: 45325 - protein, 282 aa, Citrobacter portucalensis
  misc_feature (1)..(282): tr|A0A5A9EIQ8|A0A5A9EIQ8_9ENTR NADPH-dependent 7-cyano- 7-deazaguanine reductase OS=Citrobacter portucalensis O X=1639133 GN=queF PE=3 SV=1
MSSYENHQALNGLTLGKSTDYRDNYDASLLQGVPRSLNRDPLDLKADNLPFHGADIWTLYELSWLNANGLPQVAVGHVELDCTSVNLIESKSFKLYLNSFNQTRFDSWDAVRQTLENDLRACAQGDVSVALYRLDELEGQPIAHFNGTCIDNQDIVIDNYQFSTAYLENAVSGEKAVEETLVSHLLKSNCLITHQPDWGSIQIQYRGRKIDREKLLRYLVSFRHHNEFHEQCVERIFNDILRFCQPEKLSVYARYTRRGGLDINPWRTNTDFTPATGRLVRQ

SEQ ID NO: 45326 - protein, 282 aa, Citrobacter rodentium
  misc_feature (1)..(282): tr|A0A482PH63|A0A482PH63_CITRO NADPH-dependent 7-cyano- 7-deazaguanine reductase OS=Citrobacter rodentium OX=67 825 GN=queF PE=3 SV=1
MSSYENHQALEGLTLGKSTDYRDNYDASLLQSVPRSLNRDPLGLHADTLPFHGADIWTLYELSWLNANGLPQVAVGHVELDYASVNLIESKSFKLYLNSFNQTRFADRETVRQTLERDLSACAQGQVKVSLFRLDELEGQPIAHFHGTCIDDQDISIDNYQFTTDYLHDAVSGEKAVEETLVSHLLKSNCLITHQPDWGSIQIQYRGRKIDREKLLRYLVSFRHHNEFHEQCVERIFNDLLRFCQPEKLSVYARYTRRGGLDINPWRSNTEFVPAIGRLVRQ

SEQ ID NO: 45327 - protein, 282 aa, Citrobacter sp.
  misc_feature (1)..(282): tr|A0A4Y5ZK93|A0A4Y5ZK93_9ENTR NADPH-dependent 7-cyano- 7-deazaguanine reductase OS=Citrobacter sp. CF971 OX=25 66012 GN=queF PE=3 SV=1
MSSYENHQALDGLTLGKSTYYRDNYDASLLQGVPRSLNRDPLDLKADTLPFHGADIWTLYELSWLNTNGLPQVAVGHVELDYTSVNLIESKSFKLYLNSFNQTRFDSWDAVRQTLENDLRACAQGDVSVALYRLDELEGQPIAHFNGTCIDNQDIVIDNYQFSTAYLENAVSGEKAVEETLVSHLLKSNCLITHQPDWGSIQIQYRGRKIDREKLLRYLVSFRHHNEFHEQCVERIFNDILRFCQPEKLSVYARYTRRGGLDINPWRTNTDFTPATGRLVRQ

SEQ ID NO: 45328 - protein, 282 aa, Citrobacter sp.
  misc_feature (1)..(282): tr|A0A0J1L0C6|A0A0J1L0C6_9ENTR NADPH-dependent 7-cyano- 7-deazaguanine reductase OS=Citrobacter sp. MGH103 OX=1 686378 GN=queF PE=3 SV=1
MSSYENHQALDGLTLGKSTDYRDNYDASLLQGVPRSLNRDPLDLKADTLPFHGADIWTLYELSWLNTNGLPQVAVGHVELDYTSVNLIESKSFKLYLNSFNQTRFDSWDAVRQTLENDLRACAQGDVSVALYRLDELEGQPIAHFNGTCIDNQDIVIDNYQFSTAYLENAVSGEKAVEETLVSHLLKSNCLITHQPDWGSIQIQYRGRKIDREKLLRYLVSFRHHNEFHEQCVERIFNDILRFCQPEKLSVYARYTRRGGLDINPWRTNTDFTPATGRLVRQ

SEQ ID NO: 45329 - protein, 282 aa, Citrobacter werkmanii
  misc_feature (1)..(282): tr|A0A090TZJ8|A0A090TZJ8_9ENTR NADPH-dependent 7-cyano- 7-deazaguanine reductase OS=Citrobacter werkmanii NBRC 105721 OX=1114921 GN=queF PE=3 SV=1
MSSYENHRALDGLTLGKSTDYRDNYDASLLQGVPRSLNRDPLDLKADNLPFHGADIWTLYELSWLNANGLPQVAVGHVELDYTSVNLIESKSFKLYLNSFNQTRFDSWEAVRQTLENDLRACAQGDVSVALYRLDELEGQPIAHFNGTCIDNQDIVIDNYQFSTDYLENAVSGEKAVEETLVSHLLKSNCLITHQPDWGSIQIQYRGRKIDREKLLRYLVSFRHHNEFHEQCVERIFNDILRFCQPEKLSVYARYTRRGGLDINPWRTNTDFTPATGRLVRQ

SEQ ID NO: 45330 - protein, 282 aa, Citrobacter werkmanii
  misc_feature (1)..(282): tr|A0A422V9J0|A0A422V9J0_9ENTR NADPH-dependent 7-cyano- 7-deazaguanine reductase OS=Citrobacter werkmanii OX=67 827 GN=queF PE=3 SV=1
MSSYENHRALDGLTLGKSTDYRDNYDASLLQGVPRSLNRDPLDLKADNLPFHGADIWTLYELSWLNANGLPQVAVGHVELDYTSVNLIESKSFKLYLNSFNQTRFDSWEAVRQTLENDLRACAQGDVSVALYRLDELEGQPIAHFNGTCIDNQDIVIDNYQFSTEYLENAVSGEKAVEETLVSHLLKSNCLITHQPDWGSIQIQYRGRKIDREKLLRYLVSFRHHNEFHEQCVERIFNDILRFCQPEKLSVYARYTRRGGLDINPWRTNTDFTPATGRLVRQ

SEQ ID NO: 45331 - protein, 282 aa, Citrobacter youngae
  misc_feature (1)..(282): tr|D4BGX2|D4BGX2_9ENTR NADPH-dependent 7-cyano-7-deazag uanine reductase OS=Citrobacter youngae ATCC 29220 OX=5 00640 GN=queF PE=3 SV=1
MSSYENHRALDGLTLGKSTDYRDNYDAGLLQGVPRSLNRDPLDLKADNLPFHGADIWTLYELSWLNANGLPQVAVGHVELDYTSVNLIESKSFKLYLNSFNQTRFDSWDAVRQTLENDLRACAQGDVSVALYRLDELEGQPIAHFNGTCIDNQDIVIDNYQFSTEYLENAVSGEKAVEETLVSHLLKSNCLITHQPDWGSIQIQYRGRKIDREKLLRYLVSFRHHNEFHEQCVERIFNDILRFCQPEKLSVYARYTRRGGLDINPWRTNTDFTPATGRLVRQ

SEQ ID NO: 45332 - protein, 282 aa, Citrobacter youngae
  misc_feature (1)..(282): tr|A0A549VC03|A0A549VC03_9ENTR NADPH-dependent 7-cyano- 7-deazaguanine reductase OS=Citrobacter youngae OX=1334 48 GN=queF PE=3 SV=1
MSSYENHQALDGLTLGKSTDYRDIYDASLLQGVPRSLNRDPLDLKADNLPFHGADIWTLYELSWLNANGLPQVAVGHVELDYTSVNLIESKSFKLYLNSFNQTRFDSWEHVRQTLEHDLRACAQGDVSVALYRLDEQEGQPIAHFNGTCIDNQDIVIDNYQFSTDYLENAVSGEKAVEETLVSHLLKSNCLITHQPDWGSIQIQYRGRKIDREKLLRYLVSFRHHNEFHEQCVERIFNDLLRFCQPEKLSVYARYTRRGGLDINPWRTNTDFTPATGRLVRQ

SEQ ID NO: 45333 - protein, 159 aa, Citromicrobium sp.
  misc_feature (1)..(159): tr|A0A2P0AZU3|A0A2P0AZU3_9SPHN NADPH-dependent 7-cyano- 7-deazaguanine reductase OS=Citromicrobium sp. RCC1897 OX=1812182 GN=queF PE=3 SV=1
MSDTSNDPQTGSTPRFLGQSTGLPASPEEAELDYVPNPREGSLYMVRFSAPEFTSLCPVTGQPDFAHLVIDYAPQATIVESKSLKLFLGSFRNHCGFHEDVTVGIGQRLFDEMAPRWLRIGGYWYPRGGIPIDVFWQSGPVPEGLWVPEQGVQNYRGRG

SEQ ID NO: 45334 - protein, 152 aa, Citromicrobium sp.
  misc_feature (1)..(152): tr|A0A326GFL5|A0A326GFL5_9SPHN NADPH-dependent 7-cyano- 7-deazaguanine reductase OS=Citromicrobium sp. OX=20248 27 GN=queF PE=3 SV=1
MSDTQGPRFLGSTTPLPSSPEEAELDYVPNPRGGHLYLVRFAAPEFTSLCPVTGQPDFAHLVLDYAPGETIVESKSLKLFLGSFRNHCGFHEDVTVGIGQRLFEEMEPRWLRIGGYWYPRGGMPIDVFWQSGAPPEDLWVPDQGVASYRGRG

SEQ ID NO: 45335 - protein, 165 aa, Cloacibacillus sp.
  misc_feature (1)..(165): tr|A0A1Y4GE29|A0A1Y4GE29_9BACT NADPH-dependent 7-cyano- 7-deazaguanine reductase OS=Cloacibacillus sp. An23 OX= 1965591 GN=queF PE=3 SV=1
MNGRTKEELSGVSLLGGKRVSYPDDYAPGLLETFPNKHTDNDYFVKFNCPEFTSLCPMTGQPDFATIYISYVPGERMVESKSLKLYLFSFRNHGDFHEDCVNIIMKDLIRLMDPKYIEVWGKFTPRGGISIDPYCNYGRKGTRWEQVAFERLARHDMYPEKVDNR

SEQ ID NO: 45336 - protein, 142 aa, Clostridia bacterium
  misc_feature (1)..(142): tr|A0A523BWQ7|A0A523BWQ7_9FIRM NADPH-dependent 7-cyano- 7-deazaguanine reductase OS=Clostridia bacterium OX=204 4939 GN=queF PE=3 SV=1
MPVGVEDRYAARRWDVQGYEAIDKQILETVAYEYPGSETTVECIYPEFTSVCPWTGLPDFATFKIRYVPREKLVELKSLKYYLHSFRNVGILQEHVVNRVRQDLVELLDPVYLQVEAEFNSRGGISTRLVSTHGVGAGPAAP

SEQ ID NO: 45337 - protein, 165 aa, Clostridia bacterium
  misc_feature (1)..(165): tr|A0A4R5JJ84|A0A4R5JJ84_9FIRM NADPH-dependent 7-cyano- 7-deazaguanine reductase OS=Clostridia bacterium k32 OX =2528593 GN=queF PE=3 SV=1
MAGRTDQELEGITLLGNQGTKYKYDYDPSVLETFVNKHQDNDYFVKFNCPEFTSLCPKTGQPDFATIYISYVPDKLMVESKSLKLYLLSFRNHGDFHEDCINIIMKDLIKLLDPKYIEVWGKFTPRGGISIDPFCNYGKEGTKWKEVAENRLFYHDMYPEKIDNR

SEQ ID NO: 45338 - protein, 164 aa, Clostridiaceae bacterium
  misc_feature (1)..(164): tr|A0A316N2L0|A0A316N2L0_9CLOT NADPH-dependent 7-cyano- 7-deazaguanine reductase OS=Clostridiaceae bacterium OX =1898204 GN=queF PE=3 SV=1
MVSHREEEKSITLLGNQNTKYADDYAPEVLETFINKHPDNDYFVKFNCPEFTSLCPITGQPDFATITISYVPGEKMVESKSLKLYLFSFRNHGDFHEDCVNVIMKDLIRLMDPKYIEVWGKFTPRGGISIDPYCNYGKKGTDWEEVARKRLFEHDMYPEKVDNR

SEQ ID NO: 45339 - protein, 165 aa, Clostridiales bacterium
  misc_feature (1)..(165): tr|A0A354IDB4|A0A354IDB4_9FIRM NADPH-dependent 7-cyano- 7-deazaguanine reductase OS=Clostridiales bacterium OX= 1898207 GN=queF PE=3 SV=1
MTGRSKEETLGVTLLGNQGTKYRDDYAPEVLETFVNKHPDNDYFVKFNCPEFTSLCPITGQPDFAAITISYVPAERMVESKSLKLYLFSFRNHGDFHEDCVNIIMKDLIRLMDPKYIEVWGKFTPRGGISIDPYCNYGKPGTRWEQVAWNRMANHDLYPEKVDNR

SEQ ID NO: 45340 - protein, 134 aa, Clostridiales bacterium
  misc_feature (1)..(134): tr|A0A0M2U779|A0A0M2U779_9FIRM NADPH-dependent 7-cyano- 7-deazaguanine reductase OS=Clostridiales bacterium PH2 8_bin88 OX=1605376 GN=queF PE=3 SV=1
MSQYEFEILGKDVREPRRKLEVFPKPAGVEKVVMDSDEVTSLCPVTGQPDWETVVIEYAPDKHCIESKSLKLYLWSYRNEGVFCEALASQIAQDVHSACEPFWCKVTVMQKPRGGIKLTATAVAGNPEIQRRIP

SEQ ID NO: 45341 - protein, 165 aa, Clostridiales Family
  misc_feature (1)..(165): tr|A0A2V2G6U2|A0A2V2G6U2_9FIRM NADPH-dependent 7-cyano- 7-deazaguanine reductase OS=Clostridiales Family XIII b acterium OX=2137877 GN=queF PE=3 SV=1
MSGRRKEELNGVTLLGSGKNSYKTDYAPEVLETFTNKHQENDYFVKFNCPEFTSLCPMTGQPDFACIYISYVPGAKMVESKSLKLYLFSFRNHGDFHEDCVNIIMKDLIRIMDPKYIEVWGKFTPRGGISIDPYCNYGKKGTVWEKVAFERLAQHDLYPEKIDNR

SEQ ID NO: 45342 - protein, 72 aa, Clostridioides difficile
  misc_feature (1)..(72): tr|A0A069AW54|A0A069AW54_CLODI NADPH-dependent 7-cyano- 7-deazaguanine reductase OS=Clostridioides difficile OX =1496 GN=queF PE=3 SV=1
MVESKSLKLYLFSFRNHGDFHEDCMNIIMNDLIELMDPHYIEVWGKFTPRGGISIDPYTNYGRPNSKYEKNG

SEQ ID NO: 45343 - protein, 165 aa, [Clostridium] algidixylanolyticum
  misc_feature (1)..(165): tr|A0A419T821|A0A419T821_9FIRM NADPH-dependent 7-cyano- 7-deazaguanine reductase OS=[Clostridium] algidixylanol yticum OX=94868 GN=queF PE=3 SV=1
MSGRNNQETIGITLLGNEGTKYEMNYNPAILESFVNKHLENDYFVKFNCPEFTSLCPITGQPDFATITIAYVPNVNMVESKSLKLYLFSFRNHGDFHEDCINVIMKDLIKLLNPKYIEVWGKFTPRGGISIDPYCNYGQANTKWEEIAFNRLVNHDLYPEKVDNR

SEQ ID NO: 45344 - protein, 167 aa, Clostridium bartlettii
  misc_feature (1)..(167): tr|R5X7A6|R5X7A6_9CLOT NADPH-dependent 7-cyano-7-deazag uanine reductase OS=Clostridium bartlettii CAG:1329 OX= 1263063 GN=queF PE=3 SV=1
MLETGRQNKELEGLSLLGNQGTKYKFGYDPDILEVFDNKHPNNDYFVKFNCPEFTSLCPITGQPDFATIYISYIPGEKMVESKSLKLYLFSFRNHGDFHEDCMNIIMKDLIKLMSPKYIEVWGKFTPRGGISIDPYCNYGIPGTKYEKMAEHRMMNHDLYPEKVDNR

SEQ ID NO: 45345 - protein, 167 aa, Clostridium beijerinckii
  misc_feature (1)..(167): tr|A6LWG8|A6LWG8_CLOB8 NADPH-dependent 7-cyano-7-deazag uanine reductase OS=Clostridium beijerinckii (strain AT CC 51743 / NCIMB 8052) OX=290402 GN=queF PE=3 SV=1
MSESGRKSKELEGITLLGNQGTKYDYGYTPEVLEVFENKHPDNDYFVKFNCPEFTSLCPITGQPDFATIYISYIPNIKMVESKSLKLYLFSFRNHGDFHEDCMNIIMKDLIKLMDPKYIEVWGKFTPRGGISIDPYCNYGMKGTKFEDMANYRMMNHDMYPEKVDNR

SEQ ID NO: 45346 - protein, 167 aa, Clostridium beijerinckii; identical to SEQ ID NO: 45345
  misc_feature (1)..(167): tr|A0A0K2MEA1|A0A0K2MEA1_CLOBE NADPH-dependent 7-cyano- 7-deazaguanine reductase OS=Clostridium beijerinckii NR RL B-598 OX=1428454 GN=queF PE=3 SV=1

SEQ ID NO: 45347 - protein, 167 aa, Clostridium bornimense
  misc_feature (1)..(167): tr|W6RS72|W6RS72_9CLOT NADPH-dependent 7-cyano-7-deazag uanine reductase OS=Clostridium bornimense OX=1216932 G N=queF PE=3 SV=1
MSHSGRQGSELDGITLLGNQGTKYDYGYNPDVLETFDNKHPDNDYFVKFNCPEFTSLCPITGQPDFATIYISYIPSIKMVESKSLKLYLFSFRNHGDFHEDCMNIIMKDLIKLMDPKYIEVWGKFTPRGGISIDPYCNYGKPGTKFEEMANYRMMNHDMYPEKVDNR

SEQ ID NO: 45348 - protein, 167 aa, Clostridium butyricum
  misc_feature (1)..(167): tr|A0A2S7F9M8|A0A2S7F9M8_CLOBU NADPH-dependent 7-cyano- 7-deazaguanine reductase OS=Clostridium butyricum OX=14 92 GN=queF PE=3 SV=1
MNQSGRKDKELEGLSLLGNQGTKYDYSYNPEVLEVFENKHPDNDYFVKFNCPEFTSLCPITGQPDFATIYISYIPSIKMVESKSLKLYLFSFRNHGDFHEDCMNIIMKDLIKIMDPKYIEVWGKFTPRGGISIDPYCNYGKGGTKFEEMANYRMMNHDLYPEKVDNR

SEQ ID NO: 45349 - protein, 167 aa, Clostridium butyricum
  misc_feature (1)..(167): tr|A0A3R9KCG0|A0A3R9KCG0_CLOBU NADPH-dependent 7-cyano- 7-deazaguanine reductase OS=Clostridium butyricum OX=14 92 GN=queF PE=3 SV=1
MNQSGRKDKELEGLSLLGNQGTKYDYSYNPEVLEVFENKHPDNDYFVKFNCPEFTSLCPITGQPDFATIYISYIPSIKMVESKSLKLYLFSFRNHGDFHEDCMNIIMKDLIKIMDPKYIEVWGKFTPRGGISIDPYCNYGKRGTKFEEMANYRMMNHDLYPEKVDNR

SEQ ID NO: 45350 - protein, 160 aa, Clostridium carnis
  misc_feature (1)..(160): tr|A0A3P6KDF8|A0A3P6KDF8_9CLOT NADPH-dependent 7-cyano- 7-deazaguanine reductase OS=Clostridium carnis OX=1530 GN=queF PE=3 SV=1
MREDLDLNLLGNQNVKYPFSYAPGVLETFDNKHPDNDYFVKFNCPEFTSLCPITSQPDFATIYISYIPDKKMVESKSLKLYLFSFRNHGDFHEDCMNIIMKDLIKLMDPKYIEVWGKFTPRGGISIDPYCNYGKPNTKYEQIAFNRLANHDLYPEKVDNR

SEQ ID NO: 45351 - protein, 160 aa, Clostridium cellulovorans
  misc_feature (1)..(160): tr|D9SUQ7|D9SUQ7_CLOC7 NADPH-dependent 7-cyano-7-deazag uanine reductase OS=Clostridium cellulovorans (strain A TCC 35296 / DSM 3052 / OCM 3 / 743B) OX=573061 GN=queF PE=3 SV=1
MREDLDLNLLGNQNVNYSFSYDPEVLETFDNKHPENDYFVKFNCPEFTSLCPITSQPDFATIYISYVPNIKMVESKSLKLYLFSFRNHGDFHEDCMNIIMKDLIKLMDPKYIEVWGKFTPRGGISIDPYCNYGKPGTKWEEVAFNRLTNHDLYPEKVDNR

SEQ ID NO: 45352 - protein, 167 aa, Clostridium chromiireducens
  misc_feature (1)..(167): tr|A0A1V4IC67|A0A1V4IC67_9CLOT NADPH-dependent 7-cyano- 7-deazaguanine reductase OS=Clostridium chromiireducens OX=225345 GN=queF PE=3 SV=1
MSEGGRKSSELEGITHLGNQGTKYDFGYNPEVLEVFENKHPDNDYFVKFNCPEFTSLCPITGQPDFATIYISYVPNIKMVESKSLKLYLFSFRNHGDFHEDCMNIIMKDLIKLMDPKYIEVWGKFTPRGGISIDPYCNYGMKGTKFEEMANYRMMNHDMYPEKVDNR

SEQ ID NO: 45353 - protein, 158 aa, [Clostridium] cocleatum
  misc_feature (1)..(158): tr|A0A1I0EYA0|A0A1I0EYA0_9FIRM NADPH-dependent 7-cyano- 7-deazaguanine reductase OS=[Clostridium] cocleatum OX= 69824 GN=queF PE=3 SV=1
MSENLTLLGNKNTIYKDDYAPEVLETFDNKHLENDYFVKFNCPEFTSLCPITGQPDFATIYISYVPNKKMIESKSLKLYLFSFRNHGDFHEDCMNIIMKDLIKLMDPKYIEVWGKFTPRGGISIDPYCNYGMPNTKWEEIAFNRLANHDLYPEKIDNR

SEQ ID NO: 45354 - protein, 158 aa, Clostridium colicanis
  misc_feature (1)..(158): tr|A0A151ARJ9|A0A151ARJ9_9CLOT NADPH-dependent 7-cyano- 7-deazaguanine reductase OS=Clostridium colicanis DSM 1 3634 OX=1121305 GN=queF PE=3 SV=1
MNKENQKIAGITLLGQKETKYELDYNPDVLEAFDNKHPEYDYFVKFNCPEFTCICPITGQPDFATITIAYVPNKKLVESKSLKLYLFSFRNHGDFHENCVNVIMKDLIKLLDPKYIEVQGKFTPRGGISIHPYCNHGKADTRWEEIALNRLANHELYK

SEQ ID NO: 45355 - protein, 167 aa, Clostridium cylindrosporum
  misc_feature (1)..(167): tr|A0A0J8DCP2|A0A0J8DCP2_CLOCY NADPH-dependent 7-cyano- 7-deazaguanine reductase OS=Clostridium cylindrosporum DSM 605 OX=1121307 GN=queF PE=3 SV=1
MSHSGRKESELDNITLLGNQGTKYDFGYNPDILEAFDNKHPNNDYFVKFNCPEFTSLCPITGQPDFATIYISYIPSIKMVESKSLKLYLFSFRNHGDFHEDCMNIIMKDLIKLMDPKYIEVWGKFTPRGGISIDPYCNYGKPGTKYEEMANYRLMNHDMYPEKVDNR

SEQ ID NO: 45356 - protein, 167 aa, Clostridium diolis; identical to SEQ ID NO: 45345
  misc_feature (1)..(167): tr|A0A2P8RM10|A0A2P8RM10_9CLOT NADPH-dependent 7-cyano- 7-deazaguanine reductase OS=Clostridium diolis OX=22391 9 GN=queF PE=3 SV=1

SEQ ID NO: 45357 - protein, 160 aa, Clostridium disporicum
  misc_feature (1)..(160): tr|A0A173ZRF3|A0A173ZRF3_9CLOT NADPH-dependent 7-cyano- 7-deazaguanine reductase OS=Clostridium disporicum OX=8 4024 GN=queF PE=3 SV=1
MRNDLELNLLGNQNIKYEFGYNPDILETFDNKHPNNDYFVKFNCPEFTSLCPITAQPDFATIYISYVPNIKMVESKSLKLYLFSFRNHGDFHEDCMNIIMKDLIKLMDPKYIEVWGKFTPRGGISIDPYCNYGKPGTKWEEIAFNRLANHDLYPEKIDNR

SEQ ID NO: 45358 - protein, 165 aa, [Clostridium] fimetarium
  misc_feature (1)..(165): tr|A0A1I0RIZ9|A0A1I0RIZ9_9FIRM NADPH-dependent 7-cyano- 7-deazaguanine reductase OS=[Clostridium] fimetarium OX =99656 GN=queF PE=3 SV=1
MSGRNNEETVGITLLGNQGTKYDFNYNPDILETFINKHQDNDYFVKFNCPEFTSLCPITGQPDFATITISYVPNVNMVESKSLKLYLFSFRNHGDFHEDCINIIMKDLIRLMDPKYIEVWGKFTPRGGISIDPYCNYGQAHTKWVDIAFNRMANHDLYPEKVDNR

SEQ ID NO: 45359 - protein, 166 aa, [Clostridium] indolis
  misc_feature (1)..(166): tr|A0A3P6JDP6|A0A3P6JDP6_9FIRM NADPH-dependent 7-cyano- 7-deazaguanine reductase OS=[Clostridium] indolis OX=69 825 GN=queF PE=3 SV=1
MSEGRNQEDLTDITLLGNQNNKYDFDYRPDVLESFDNKHQGRDYFVKFNCPEFTSLCPITGQPDFATIYISYIPNVKMVESKSLKLYLFSFRNHGDFHEDCMNIIMNDLIELMDPHYIEVWGKFTPRGGISIDPYTNYGRPDSKYEKMAEHRLMNHDLYPEKIDNR

SEQ ID NO: 45360 - protein, 164 aa, Clostridium luticellarii
  misc_feature (1)..(164): tr|A0A2T0BMN1|A0A2T0BMN1_9CLOT NADPH-dependent 7-cyano- 7-deazaguanine reductase OS=Clostridium luticellarii OX =1691940 GN=queF PE=3 SV=1
MNDRENELKGSTVLGKENVSYKFDYDPSILKTFVNKHRDNDYFVKFNCPEFTSLCPITGQPDFASVYISYVPDKLMVESKSLKLYLFSFRNHGDFHEDCINIIMKDLIKLMSPKYIEVQGKFFPRGGISIDPYTNYGKKSTPWERVAVKRLYYHDLYPEKIDNR

SEQ ID NO: 45361 - protein, 165 aa, Clostridium magnum
  misc_feature (1)..(165): tr|A0A161WVM2|A0A161WVM2_9CLOT NADPH-dependent 7-cyano- 7-deazaguanine reductase OS=Clostridium magnum DSM 2767 OX=1121326 GN=queF PE=3 SV=1
MSGRDEKELKGVTLLGNQDVKYNYDYDPSVLEAFVNKHQENDYFVKFNCPEFTSLCPKTGQPDFATIYISYVPEKMMVESKSLKLYLLSFRNHGDFHEDCVNIIMKDLIKLLDPKYIEVWGKFTPRGGISIDPYCNYGKEGTRWKEVADKRMFYHDMYPEKIDNR

SEQ ID NO: 45362 - protein, 160 aa, Clostridium neonatale; identical to SEQ ID NO: 45350
  misc_feature (1)..(160): tr|A0A2A7MHX7|A0A2A7MHX7_9CLOT NADPH-dependent 7-cyano- 7-deazaguanine reductase OS=Clostridium neonatale OX=13 7838 GN=queF PE=3 SV=1

SEQ ID NO: 45363 - protein, 165 aa, [Clostridium] polysaccharolyticum
  misc_feature (1)..(165): tr|A0A1I0BFK8|A0A1I0BFK8_9FIRM NADPH-dependent 7-cyano- 7-deazaguanine reductase OS=[Clostridium] polysaccharol yticum OX=29364 GN=queF PE=3 SV=1
MSGREKEEMKDLTLLGNQGTKYAMDYAPEVLETFVNKHPENDYFVKFNCPEFTSLCPITGQPDFATITISYVPGEKMVESKSLKLYLFSFRNHGDFHEDCVNIIMKDLIRLMDPKYIEVWGKFTPRGGISIDPYCNYGKAGTKWEEVAFNRMANHDLYPEKVDNR

SEQ ID NO: 45364 - protein, 165 aa, [Clostridium] populeti
  misc_feature (1)..(165): tr|A0A1I6JLU2|A0A1I6JLU2_9FIRM NADPH-dependent 7-cyano- 7-deazaguanine reductase OS=[Clostridium] populeti OX=3 7658 GN=queF PE=3 SV=1
MNNRDKEELKGITFLGNQNIKYSDQYAPEVLETFPNKHPGNDYFVKFNCPEFTSLCPITGQPDFATIYISYVPGERMVESKSLKLYLFSFRNHGDFHEDCVNIIMKDLIKLMQPKYIEVWGKFTPRGGISIDPYCNYGIPGSIWETVAFERLTKHDMYPEKIDNR

SEQ ID NO: 45365 - protein, 167 aa, Clostridium puniceum
  misc_feature (1)..(167): tr|A0A1S8THW7|A0A1S8THW7_9CLOT NADPH-dependent 7-cyano- 7-deazaguanine reductase OS=Clostridium puniceum OX=293 67 GN=queF PE=3 SV=1
MSESGRKSKELEGISLLGNQGTKYDYGYNPEILEVFENKHPDNDYFVKFNCPEFTSLCPITGQPDFATIYISYIPNIKMVESKSLKLYLFSFRNHGDFHEDCINIIMKDLIKLMGPKYIEVWGKFTPRGGISIDPYCNYGMKGTKFEEMANYRMMNHDMYPEKVDNR

SEQ ID NO: 45366 - protein, 167 aa, Clostridium saccharobutylicum
  misc_feature (1)..(167): tr|A0A1S8NBT1|A0A1S8NBT1_CLOSA NADPH-dependent 7-cyano- 7-deazaguanine reductase OS=Clostridium saccharobutylic um OX=169679 GN=queF PE=3 SV=1
MSESGRKSKELEGLSLLGNQGTKYDYGYNPEVLEVFDNKHPENDYFVKFNCPEFTSLCPITGQPDFATIYISYMPGKKMVESKALKLYLFSFRNHGDFHEDCMNIIMKDLIKLMNPKYIEVWGKFTPRGGISIDPYCNYGIPGTKYEEMANYRMMNHDMYPEKVDNR

SEQ ID NO: 45367 - protein, 167 aa, Clostridium saccharobutylicum
  misc_feature (1)..(167): tr|U5MSZ3|U5MSZ3_CLOSA NADPH-dependent 7-cyano-7-deazag uanine reductase OS=Clostridium saccharobutylicum DSM 1 3864 OX=1345695 GN=queF PE=3 SV=1
MSESGRKSKELEGLSLLGNQGTKYDYGYNPEVLEVFDNKHPGNDYFVKFNCPEFTSLCPITGQPDFATIYISYMPGKKMVESKSLKLYLFSFRNHGDFHEDCMNIIMKDLIKLMDPKYIEVWGKFTPRGGISIDPYCNYGIPGTKYEEMANYRMMNHDMYPEKVDNR

SEQ ID NO: 45368 - protein, 167 aa, Clostridium saccharoperbutylacetonicum
  misc_feature (1)..(167): tr|M1MQN2|M1MQN2_9CLOT NADPH-dependent 7-cyano-7-deazag uanine reductase OS=Clostridium saccharoperbutylacetoni cum N1-4(HMT) OX=931276 GN=queF PE=3 SV=1
MSESGRKSKELEGISLLGNQGVKYDYGYNPEVLEVFDNKHPDNDYFAKFNCPEFTSLCPITGQPDFATIYISYIPNIKMVESKSLKLYLFSFRNHGDFHEDCMNIIMKDLIKLMDPKYIEVWGKFTPRGGISIDPYCNYGMKGTKFEEMANYRMMNHDMYPEKIDNR

SEQ ID NO: 45369 - protein, 157 aa, Clostridium sp.
  misc_feature (1)..(157): tr|R6FXS0|R6FXS0_9CLOT NADPH-dependent 7-cyano-7-deazag uanine reductase OS=Clostridium sp. CAG:221 OX=1262780 GN=queF PE=3 SV=1
MKEITLLGNQNTKYEYDYNPKILERFENKHPDNDYFVKFNCPEFTSLCPITGQPDFATIYISYVPDKYMVESKSLKLYLFTFRNHGDFHEDCMNIIMKDLIKLMEPKYIEVWGKFTPRGGISIDPYCNYGKSGTRWEEVAFNRLANHDLYPEKIDNR

SEQ ID NO: 45370 - protein, 164 aa, Clostridium sp.
  misc_feature (1)..(164): tr|R5KD92|R5KD92_9CLOT NADPH-dependent 7-cyano-7-deazag uanine reductase OS=Clostridium sp. CAG:632 OX=1262830 GN=queF PE=3 SV=1
MSREKQEMGNVSLLGDQGVKYPDDYAPEMLQTFINKHPDHDYFVKFNCPEFTSLCPITGQPDFATITISYVPDIKMVESKSLKLYLFSFRNHGDFHEDCVNIIMEDLIRLMDPKYIEVWGKFTPRGGISIDPYCNYGKPGTRWEAVAANRLEQHDLYPEKVDNR

SEQ ID NO: 45371 - protein, 158 aa, [Clostridium] spiroforme
  misc_feature (1)..(158): tr|A0A1Y4ET77|A0A1Y4ET77_9FIRM NADPH-dependent 7-cyano- 7-deazaguanine reductase OS=[Clostridium] spiroforme OX =29348 GN=queF PE=3 SV=1
MSNNLTLLGNQDVKYRDDYAPDVLETFDNKHPENDYFVKFNCPEFTSLCPITGQPDFATIYISYVPDRKMVESKSLKLYLFSFRNHGDFHEDCINIIMKDLIKLMDPKYIEVWGKFTPRGGISIDPYCNYGKPETKWQEIAFNRLANHDLYPEKIDNR

SEQ ID NO: 45372 - protein, 166 aa, Clostridium thermobutyricum
  misc_feature (1)..(166): tr|N9WAD9|N9WAD9_9CLOT NADPH-dependent 7-cyano-7-deazag uanine reductase OS=Clostridium thermobutyricum OX=2937 2 GN=queF PE=3 SV=1
MSNGRSKEELKDITLLGNKGTKYEYSYDPDVLEAFDNKHPDNDYFVKFNFPEFTSLCPITGQPDFATIHISYVPNIKMVESKSLKLYLFSFRNHGDFHEDCMNIIMKDLIKLMDPKYIEVWGKFTPRGGISIDPYCNYGKKGTMWEKVAFDRLVNHDLYPEKIDNR

SEQ ID NO: 45373 - protein, 166 aa, Clostridium thermobutyricum; identical to SEQ ID NO: 45372
  misc_feature (1)..(166): tr|A0A1V4SYY1|A0A1V4SYY1_9CLOT NADPH-dependent 7-cyano- 7-deazaguanine reductase OS=Clostridium thermobutyricum DSM 4928 OX=1121339 GN=queF PE=3 SV=1

SEQ ID NO: 45374 - protein, 158 aa, Clostridium thermopalmarium; identical to SEQ ID NO: 45354
  misc_feature (1)..(158): tr|A0A2T0AQH0|A0A2T0AQH0_9CLOT NADPH-dependent 7-cyano- 7-deazaguanine reductase OS=Clostridium thermopalmarium DSM 5974 OX=1121340 GN=queF PE=3 SV=1

SEQ ID NO: 45375 - protein, 166 aa, Clostridium ventriculi
  misc_feature (1)..(166): tr|A0A173WUB8|A0A173WUB8_CLOVE NADPH-dependent 7-cyano- 7-deazaguanine reductase OS=Clostridium ventriculi OX=1 267 GN=queF PE=3 SV=1
MASGRQGKELEGLSLLGNQGTKYDYAYKPEILERFVNKHQGNDYFVKFNCPEFTSLCPITGQPDFATIYISYVPDTYMVESKSLKLYLFSFRNQGDFHEDCMNIIMKDLIKLMDPKYIEVWGKFTPRGGISIDPYCNYGKKGTKWEEVAFNRLVNHDLYPEKVDNR

SEQ ID NO: 45376 - protein, 169 aa, Clostridium vincentii
  misc_feature (1)..(169): tr|A0A2T0BE16|A0A2T0BE16_9CLOT NADPH-dependent 7-cyano- 7-deazaguanine reductase OS=Clostridium vincentii OX=52 704 GN=queF PE=3 SV=1
MENHFEGRSKDELKGVSLLGNQEVKYKTQYDPSILEVFDNKHIENDYFVKFNCPEFTSLCPMTGQPDFATIYISYIPSVKMVESKSLKLYLFSFRNHGDFHEDCVNKIMKDLIKLMDPKYIEVWGKFTPRGGISIDPYCNYGKTDTMFEGMAKDRLFQHDMYPETVDNR

SEQ ID NO: 45377 - protein, 292 aa, Cobetia crustatorum
  misc_feature (1)..(292): tr|A0A558HJK4|A0A558HJK4_9GAMM NADPH-dependent 7-cyano- 7-deazaguanine reductase OS=Cobetia crustatorum OX=5533 85 GN=queF PE=3 SV=1
MAHPTAVNVPDEVRPETLKDAPLGRESAYPEQYDASLLFPIARAANRGPIGISDTALPFVGEDEWHAFEVSWLDESGKPWVRVARFRLPAASPNLIESKSWKLYLNSLNQSRFADQAAVQATLERDLAAAAGAPVEVRLLELNDAELNVGRLPGECLDDLPVTVEHYTPSPELLAADEDDIVSEDLHSHLLKSNCPVTGQPDWGSVWIRYRGPRIDRERLLAYLISYRQHQDFHEHCVEHLFVDLMARVKPESLLVMARYVRRGGLDISPWRATADLEGEARASLPLRLSRQ

SEQ ID NO: 45378 - protein, 292 aa, Cobetia marina
  misc_feature (1)..(292): tr|A0A4Y4GR90|A0A4Y4GR90_COBMA NADPH-dependent 7-cyano- 7-deazaguanine reductase OS=Cobetia marina OX=28258 GN= queF PE=3 SV=1
MAHPTAVNVPDEARPETLKDAPLGRESAYPEHYDASLLFPIARAANRGPIGIDDAALPFVGEDEWHAFEVSWLDESGKPWVRVARFRLPAASPNLIESKSWKLYLNSLNQSRFADQAAVQTTLERDLAAAAGAPVEVRLLGLDDDELDVGRLPGECLDDLPITVEHYTPSPELLSADDADIVSEDLHSHLLKSNCPVTGQPDWGSVWIRYRGPRIDRERLLAYLISYRQHQDFHEHCVEHLFVDLMARVKPESLLVMARYVRRGGLDISPWRATPDLEAEARASLPLRLSRQ

SEQ ID NO: 45379 - protein, 292 aa, Cobetia marina
  misc_feature (1)..(292): tr|A0A4U1LYR2|A0A4U1LYR2_COBMA NADPH-dependent 7-cyano- 7-deazaguanine reductase OS=Cobetia marina OX=28258 GN= queF PE=3 SV=1
MAHPTAVNVPDEARPETLKDAPLGRESAYPEHYDANLLFPIARAANRGPIGIDDAALPFVGEDEWHAFEVSWLDESGKPWVRVARFRLPAASPNLIESKSWKLYLNSLNQSRFADQAAVQATLERDLAAAAGAPVEVRLLGLDDDELDVGRLPGECLDDLPIAVEHYTPSPELLNADDADIVSEDLHSHLLKSNCPVTGQPDWGSVWIRYRGPRIDRERLLAYLISYRQHQDFHEHCVEHLFVDLMARVKPESLLVMARYVRRGGLDISPWRATPDLEAEARASLPLRLSRQ

SEQ ID NO: 45380 - protein, 292 aa, Cobetia sp.
  misc_feature (1)..(292): tr|A0A2S4K706|A0A2S4K706_9GAMM NADPH-dependent 7-cyano- 7-deazaguanine reductase OS=Cobetia sp. MM1IDA2H-1 OX=1 268241 GN=queF PE=3 SV=1
MAHPTAVNVPDEARPETLKDAPLGRESAYPEHYDASLLFPIARAANRGPIGIDDAALPFVGEDEWHAFEVSWLDESGKPWVRVARFRLPAASPNLIESKSWKLYLNSLNQSRFADQAAVQATLERDLAAAAGAPVEVRLLGLDDDELDVGRLPGECLDDLPITVEHYTPSPELLNADDADIVSEDLHSHLLKSNCPVTGQPDWGSVWIRYRGPRIDRERLLAYLISYRQHQDFHEHCVEHLFVDLMARVKPESLLVMARYVRRGGLDISPWRATPDLEAEARASLPLRLSRQ

SEQ ID NO: 45381 - protein, 292 aa, Cobetia sp.
  misc_feature (1)..(292): tr|A0A0P7DK88|A0A0P7DK88_9GAMM NADPH-dependent 7-cyano- 7-deazaguanine reductase OS=Cobetia sp. UCD-24C OX=1716 176 GN=queF PE=3 SV=1
MAHPTAVNVPDEARPETLKDAPLGRESAYPEHYDASLLFPIARAANRGPIGIDDAALPFVGEDEWHAFEVSWLDEAGKPWVRVARFRLPAASPNLIESKSWKLYLNSLNQSRFSDQAAVKATLERDLAAAAGAPVEVRLLGLDDSELDVGRLPGECLDDLPISVEHYTPSPELLSADDADIVSEDLHSHLLKSNCPVTGQPDWGSVWIRYRGPRIDRERLLAYLISYRQHQDFHEHCVEHLFVDLMARVKPESLLVMARYVRRGGLDISPWRATADLEAEARASLPLRLSRQ

SEQ ID NO: 45382 - protein, 155 aa, Cocleimonas flava
  misc_feature (1)..(155): tr|A0A4R1F877|A0A4R1F877_9GAMM NADPH-dependent 7-cyano- 7-deazaguanine reductase OS=Cocleimonas flava OX=634765 GN=queF PE=3 SV=1
MSDKNIYENLQQLGGDTKLPDSPETAILESVENPQSDVDYVVRFTAPEFTSLCPMTAQPDFAHLMIDYIPDQKLVESKSLKLFLGAFRNHGAFHEDCTVSIARRIIDEIAPKWLRIGGYWYPRGGIPIDVFFAQGEIPKGVWVPEQGVPPYRGRG

SEQ ID NO: 45383 - protein, 155 aa, Cognatishimia maritima
  misc_feature (1)..(155): tr|A0A1M5L561|A0A1M5L561_9RHOB NADPH-dependent 7-cyano- 7-deazaguanine reductase OS=Cognatishimia maritima OX=8 70908 GN=queF PE=3 SV=1
MADESIYAGLTQLGGQTELPATPEEAVMERVPNPQKGNDYAVRFTAPEFTSLCPLTAQPDFAHIVIDYVPGDWLVESKSLKLFLGSFRNHGAFHEDCSVTIGKRLEELLDPKWLRVGAYWYPRGGIPIDVFYQTGPELAHVWIPDQGVPTYRGRG

SEQ ID NO: 45384 - protein, 155 aa, Cohaesibacter gelatinilyticus
  misc_feature (1)..(155): tr|A0A285NBU0|A0A285NBU0_9RHIZ NADPH-dependent 7-cyano- 7-deazaguanine reductase OS=Cohaesibacter gelatinilytic us OX=372072 GN=queF PE=3 SV=1
MSNQDIYKNLTQLGSETKLPDNPEDAILEKVPNPQSDIDYAVRFTAPEFTSLCPLTSQPDFAHLVIDYIPGDWLVESKSLKLFLGSFRNHGAFHEDCTVSIGRRLEELLDPKWLRIGGYWYPRGGIPIDVFYQTADAPDHVWIPPQDVPTYRGRG

SEQ ID NO: 45385 - protein, 163 aa, Cohnella luojiensis
  misc_feature (1)..(163): tr|A0A4Y8M4A2|A0A4Y8M4A2_9BACL NADPH-dependent 7-cyano- 7-deazaguanine reductase OS=Cohnella luojiensis OX=6528 76 GN=queF PE=3 SV=1
MRSKEEMQDITLLGNQGTRYVFEYDPGVLEAFDNKHPGRDYFVKFNCPEFTSLCPMTGQPDFATLYISYIPDARMVESKSLKLYLFSFRNHGDFHEDCMNIIMNDLIALMNPRYIEVWGKFTPRGGISIDPYCNWGQPGTKYEKMAEHRLMNHDLYPEKIDNR

SEQ ID NO: 45386 - protein, 163 aa, Cohnella lupini
  misc_feature (1)..(163): tr|A0A3D9IT68|A0A3D9IT68_9BACL NADPH-dependent 7-cyano- 7-deazaguanine reductase OS=Cohnella lupini OX=1294267 GN=queF PE=3 SV=1
MRSKENMEDVTLLGNQGTKYVFEYDPGVLETFDNLHPGRDYFVKFNCPEFTSLCPMTGQPDFATLYISYIPDARMVESKSLKLYLFSFRNHGDFHEDCMNIIMNDLIALMNPRYIEVWGKFTPRGGISIDPYCNWGQPGTKFEQMADHRLMNHDLYPEKVDNR

SEQ ID NO: 45387 - protein, 165 aa, Cohnella sp.
  misc_feature (1)..(165): tr|A0A1I0ZN17|A0A1I0ZN17_9BACL NADPH-dependent 7-cyano- 7-deazaguanine reductase OS=Cohnella sp. OV330 OX=18552 88 GN=queF PE=3 SV=1
MAGRSKEELAGVSLLGNQGTAYPSNYAPEVLESFDNKHPGRDYFVKFNCPEFTSLCPMTGQPDFATIYISYIPDAKMVESKSLKLYLFSFRNHGDFHEDCMNIIMNDLIELMAPRYIEVWGKFTPRGGISIDPYCNWGKPGTKYEAMAEHRLLNHDLYPEKVDNR

SEQ ID NO: 45388 - protein, 163 aa, Cohnella sp.
  misc_feature (1)..(163): tr|A0A231RRJ1|A0A231RRJ1_9BACL NADPH-dependent 7-cyano- 7-deazaguanine reductase OS=Cohnella sp. CIP 111063 OX= 1955714 GN=queF PE=3 SV=1
MRKPEEMQDLTLLGNQGTKYAFEYDPGILESFDNKHPGRDYFVKFNCPEFTSLCPITGQPDFATLYISYIPDRKMVESKSLKLYLFSFRNHGDFHEDCMNIIMNDLIALMNPRYIEVWGKFTPRGGISIDPYCNWGQPGAKYERMAEHRLLNHDLYPEKVDNR

SEQ ID NO: 45389 - protein, 153 aa, Coleofasciculus chthonoplastes
  misc_feature (1)..(153): tr|B4VPX3|B4VPX3_9CYAN NADPH-dependent 7-cyano-7-deazag uanine reductase OS=Coleofasciculus chthonoplastes PCC 7420 OX=118168 GN=queF PE=3 SV=1
MTHLPTQNSAVSDVPTMKYGERAIAEGQLITFPNPRIGRRYHIDITLPEFTCKCPFSGYPDFATIHIRYIPNERVVELKAIKLYINSFRDRYISHEESVNQILDDFVEACDPLEVTIKGDFAPRGNVHTVIEVQHQKEEKQEKQKKQKKKGKN

SEQ ID NO: 45390 - protein, 279 aa, Collimonas arenae
  misc_feature (1)..(279): tr|A0A127QFK7|A0A127QFK7_9BURK NADPH-dependent 7-cyano- 7-deazaguanine reductase OS=Collimonas arenae OX=279058 GN=queF PE=3 SV=1
MSTPTTPEASPLGKPSTYQTQYQPSLLFPIARLGKREEIGISGTLPFFGVDIWNAYEVSWLNLRGKPQVAIATFTVPADSPNIVESKSFKLYLNSFNQTKLADADALLQLLRQDLSAGFGAPVHVTLTTAEGFSGLKLQEPQGLLLDRLDIEVDQYQPNPALLKADPNQVVIEETLVSHLLKSNCLVTGQPDWGSVQIHYVGAAIDQESLLKYLISFRDHNEFHEQCVERIFMDIMRNCAPQKLSVYARYTRRGGLDINPWRSNFSTAQPPSNCRQARQ

SEQ ID NO: 45391 - protein, 279 aa, Collimonas arenae
  misc_feature (1)..(279): tr|A0A561FZW7|A0A561FZW7_9BURK NADPH-dependent 7-cyano- 7-deazaguanine reductase OS=Collimonas arenae OX=279058 GN=queF PE=3 SV=1
MTIPNTPDASPLGKPAAYQAQYQPSLLFPIARLGKREEIGVSGTLPFFGVDIWNAYEVSWLNLRGKPQVAIATFTVPADSPNIIESKSFKLYLNSFNQTRLADKDALLQLLRTDISAGFGAPVHVALTTAEAFSGLKLQEPQGLLLDRLDIEVGEYQPNPSLLKSDPNQVVVEETLVSHLLKSNCLVTGQPDWGSVQIHYVGAAIDQESLLKYLISFREHNEFHEQCVERIFMDLMRNCRPQKLSVYARYTRRGGLDINPWRSNFSTSQPPLNWRQARQ

SEQ ID NO: 45392 - protein, 279 aa, Collimonas fungivorans
  misc_feature (1)..(279): tr|A0A127P712|A0A127P712_9BURK NADPH-dependent 7-cyano- 7-deazaguanine reductase OS=Collimonas fungivorans OX=1 58899 GN=queF PE=3 SV=1
MTIPNTPDASPLGKPAAYQTQYQPSLLFPIARLGKREEIGISGTLPFFGVDIWNAYEVSWLNLRGKPQVAIATFTVPADSPNIIESKSFKLYLNSFNQTRLADKDALLQLLRTDISAGFGAPVHVALATAEAFAELKLQELQGLLLDRLDIEVDEYQPNPALLKSDPDQVVVEETLVSHLLKSNCLVTGQPDWGSVQIHYVGAAIDQESLLKYLISFRDHNEFHEQCVERIFMDLMRNCRPQKLSVYARYTRRGGLDINPWRSNFSTSQPPLNWRQARQ

SEQ ID NO: 45393 - protein, 279 aa, Collimonas fungivorans
  misc_feature (1)..(279): tr|A0A419U325|A0A419U325_9BURK NADPH-dependent 7-cyano- 7-deazaguanine reductase OS=Collimonas fungivorans OX=1 58899 GN=queF PE=3 SV=1
MTIPNTPDASPLGKPAAYQTQYQPSLLFPIARLGKREEIGISGTLPFFGVDIWNAYEVSWLNLRGKPQVAIATFTVPADSPNIIESKSFKLYLNSFNQTRLADKDALLQLLRTDISAGFGAPVHVALTTAEAFAGLKLQEPQGLLLDRLDIEVDEYQPNPGLLKSDPDQVVVEETLVSHLLKSNCLVTGQPDWGSVQIHYVGAAIDQESLLKYLISFRDHNEFHEQCVERIFMDLMRNCRPQKLSVYARYTRRGGLDINPWRSNFSTSQPPLNWRQARQ

SEQ ID NO: 45394 - protein, 279 aa, Collimonas pratensis
  misc_feature (1)..(279): tr|A0A127PZA6|A0A127PZA6_9BURK NADPH-dependent 7-cyano- 7-deazaguanine reductase OS=Collimonas pratensis OX=279 113 GN=queF PE=3 SV=1
MTIPNTPDASPLGKPAAYQTQYQPSLLFPIARQGKRDEIGVSGTLPFFGVDIWNAYEVSWLNARGKPQVAIATFTVPADSPNIVESKSFKLYLNSFNQTKLADTDALLQLLRKDLSAGFGATVHVTLATADAFAEQKIQEPQGLLLDRLDIEVDEYQPNPSLLKADPNQVIIEETLVSHLLKSNCLVTGQPDWGSVQIHYVGPAIDQESLLRYLISFRDHNEFHEQCVERIFMDIMRNCAPQKLSVYARYTRRGGLDINPWRSNFSTAQPPLNWRQARQ

SEQ ID NO: 45395 - protein, 279 aa, Collimonas pratensis
  misc_feature (1)..(279): tr|A0A127QS11|A0A127QS11_9BURK NADPH-dependent 7-cyano- 7-deazaguanine reductase OS=Collimonas pratensis OX=279 113 GN=queF PE=3 SV=1
MTIPNTPDASPLGKPAAYQTQYQPSLLFPIARQGKRDEIGVSGTLPFFGVDIWNAYEVSWLNARGKPQVAIATFTVPADSPNIVESKSFKLYLNSFNQTKLADTDALLQLLRKDLSAGFGATVHVTLATADAFAEQKIQEPQGLLLDRLDIEVDEYQPNPSLLKADPNQVVIEETLVSHLLKSNCLVTGQPDWGSVQIHYVGPAIDQESLLRYLISFRDHNEFHEQCVERIFMDIMRNCAPQKLSVYARYTRRGGLDINPWRSNFSTAQPPLNWRQARQ

SEQ ID NO: 45396 - protein, 279 aa, Collimonas sp.
  misc_feature (1)..(279): tr|A0A2A9K8P3|A0A2A9K8P3_9BURK NADPH-dependent 7-cyano- 7-deazaguanine reductase OS=Collimonas sp. PA-H2 OX=188 1062 GN=queF PE=3 SV=1
MTTPNTPDASPLGKPAAYQTQYQPSLLFPIARQGKRDEIGVSGTLPFFGVDIWNAYEVSWLNARGKPQVAIATFTVPADSPNIVESKSFKLYLNSFNQTKLADTDALLQLLRNDLSAGFGAPVHVTLTTADAFASQRIQEPQGLLLDRLDIEVDEYQPNPSLLKTDPNKVVIEETLVSHLLKSNCLVTGQPDWGSVQIHYVGAAIDQESLLRYLISFRDHNEFHEQCVERIFMDIMRNCAPQKLSVYARYTRRGGLDINPWRSNFSTGQPPSNWRQARQ

SEQ ID NO: 45397 - protein, 279 aa, Collimonas sp.
  misc_feature (1)..(279): tr|A0A1I1GC80|A0A1I1GC80_9BURK NADPH-dependent 7-cyano- 7-deazaguanine reductase OS=Collimonas sp. OK412 OX=180 1619 GN=queF PE=3 SV=1
MTIPNTPDASPLGKPAAYQTQYQPSLLFPIARLGKREEIGVSGTLPFFGVDIWNAYEVSWLNLRGKPQVAIATFTVPADSPNIIESKSFKLYLNSFNQTRLADKDALLQLLRTDISAGFGAPVHVALATAEAFSGLKLQEPQGLLLDRLDIEVDEYQPNPSLLKSDPDQVVVEETLVSHLLKSNCLVTGQPDWGSVQIHYVGAAIDQESLLKYLISFREHNEFHEQCVERIFMDLMRNCRPQKLSVYARYTRRGGLDINPWRSNFSTSQPPLNWRQARQ

SEQ ID NO: 45398 - protein, 283 aa, Colwellia beringensis
  misc_feature (1)..(283): tr|A0A222GB96|A0A222GB96_9GAMM NADPH-dependent 7-cyano- 7-deazaguanine reductase OS=Colwellia beringensis OX=19 67665 GN=queF PE=3 SV=1
MSTYTNANALSNLTLGKATNYCSQYNPELLQAVPRSLNRDSLGLTANNLPFTGEDVWYGYELSWLNDKGKPVVAVAEFSFPCTSPSIVESKSFKLYLNSFNQTQFPSWQSVESALRKDLSATAGASAEVKLFPVDNCPALSLSTDTALCIDDLDIEINQYQLAPDILKNAGEQEGNNVAEYLVCHLLKSNCLITNQPDWASVYIKYQGKQICHETLLKYLISFRQHNEFHEQCVERIFCDIKRFCHMESLTVFARYTRRGGLDINPFRSTTEIKAPKLRTLRQ

SEQ ID NO: 45399 - protein, 283 aa, Colwellia chukchiensis
  misc_feature (1)..(283): tr|A0A1H7K9R3|A0A1H7K9R3_9GAMM NADPH-dependent 7-cyano- 7-deazaguanine reductase OS=Colwellia chukchiensis OX=6 41665 GN=queF PE=3 SV=1
MSSYLNAKALANLTLGKATSYCSQYNPELLQAVPRSLNRDSLGLSANTLPFIGEDVWYGYELSWLNSKGKPVVAVAEFRFPCTSPNIVESKSFKLYLNSFNQTQFASWQQVEEALTTDLSATAGAAAIVSLFPVNQCPALEISDDQAVCIDELDIEIDCYQLNPALLANASHTPIKQVQESLVCHLLKSNCLITNQPDWASIYITYSGNKICHHALLKYLISFRQHNEFHEQCVERIFCDLLRYCEIEQLSVLARYTRRGGLDINPFRSTETAQAPSKRTLRQ

SEQ ID NO: 45400 - protein, 286 aa, Colwellia demingiae
  misc_feature (1)..(286): tr|A0A5C6QH87|A0A5C6QH87_9GAMM NADPH-dependent 7-cyano- 7-deazaguanine reductase OS=Colwellia demingiae OX=8940 1 GN=queF PE=3 SV=1
MANYQNATELSKLTLGKSTQYCSEYTADLLQGVPRSLNRDDLALNQSNLPFVGEDVWYGYELSWLNEKGKPVVAVAEFRFACTSANIVESKSFKLYLNSFNQTRFASVKDVEQVLTKDLSKIAGSEANVNLFGVDHCPALDIAKKADKCICIDGEDISIDNYQYDAQLLATAQDETTGTQIEEHLVSHLLKSNCLITNQPDWASIYIHYRGKAIDHSALLKYLISFRQHNEFHEQCVERIYCDLQQFCQLDELTIFARYTRRGGLDINPFRSSHTDQAPFARTLRQ

SEQ ID NO: 45401 - protein, 287 aa, Colwellia hornerae
  misc_feature (1)..(287): tr|A0A5C6QNQ9|A0A5C6QNQ9_9GAMM NADPH-dependent 7-cyano- 7-deazaguanine reductase OS=Colwellia hornerae OX=89402 GN=queF PE=3 SV=1
MKNYKNAKVLSQLTLGKTTSYCSEYNPELLQAVPRTLNRDSLAITAESLPFIGEDVWYAYELSWLNSTGKPVVAVAEFRFPCTSTNIVESKSFKLYLNSFNQSRFSSWQEVENCLVKDLSNTAKSTAGVKLFPVDNCPALEINHQIFSEKTTCIDDVELDIDNYQLDPTLLVNANISGETVKNESLVSHLLKSNCLITNQPDWASIYLQYSGPKISPSALLAYLISFRQHNEFHEQCVERIYCDLKKYCQVTELTVFARYTRRGGLDINPFRSTSTLHAPTGRTLRQ

SEQ ID NO: 45402 - protein, 286 aa, Colwellia marinimaniae
  misc_feature (1)..(286): tr|A0A1Z5I397|A0A1Z5I397_9GAMM NADPH-dependent 7-cyano- 7-deazaguanine reductase OS=Colwellia marinimaniae OX=1 513592 GN=queF PE=3 SV=1
MANYQNATELSKLTLGKSTEYCSEYTAELLQGVPRSLNRDDLALDPNNLPFIGEDVWYGYELSWLNEKGKPVVAVAEFRFACTSDNIVESKSFKLYLNSFNQTRFASIKDVEQILIKDLSNIAGSPAKVRLFAVDHCPALAIAKKPDNCICIDGADISIDNYQYDAQLLAQAQKKDKSAKVEEHLVSHLLKSNCLITNQPDWASIYIHYRGKAIDHATLLKYLISFRQHNEFHEQCIERIYCDLQKFCQLDELTVFARYTRRGGLDINPFRSSHTEQAPFARTLRQ

SEQ ID NO: 45403 - protein, 286 aa, Colwellia psychrerythraea
  misc_feature (1)..(286): sp|Q47YB3|QUEF_COLP3 NADPH-dependent 7-cyano-7-deazagua nine reductase OS=Colwellia psychrerythraea (strain 34H / ATCC BAA-681) OX=167879 GN=queF PE=3 SV=1
MANYQNATELSKLTLGKSTQYCSEYTADLLQGVPRSLNRDDLALNQSNLPFVGEDVWYGYELSWLNGKGKPVVAVAEFRFACTSDNIVESKSFKLYLNSFNQTRFSSIKDVEKVLTKDLSKIAGSEASVNLFGVDHCPALDIAKKSDKCICIDGEDISIDNYQYDPQLLATAQDERSGSQIEEYLVSHLLKSNCLITNQPDWASIYIHYRGKAIDHSSLLKYLISFRQHNEFHEQCVERIYCDLQQFCQLDELTIFARYTRRGGLDINPFRSSHIEQAPFARTLRQ

SEQ ID NO: 45404 - protein, 286 aa, Colwellia psychrerythraea
  misc_feature (1)..(286): tr|A0A099KTG4|A0A099KTG4_COLPS NADPH-dependent 7-cyano- 7-deazaguanine reductase OS=Colwellia psychrerythraea O X=28229 GN=queF PE=3 SV=1
MANYQNATELSKLTLGKSTQYCSEYTADLLQGVPRSLNRDDLSLNQSNLPFVGEDVWYGYELSWLNNKGKPIVAVAEFRFACTSENIVESKSFKLYLNSFNQTRFASVKEVEQRLTNDLSKIAGAKATVNLFGVDHCPALAIATNKDTYFCIDGEDITIDNYQYDATLLATAQNKTEDSQVEEHLVSHLLKSNCLITNQPDWASVYIHYRGKAINHSALLKYLISFRQHNEFHEQCVERIYCDLQQFCQLDELTIFARYTRRGGLDINPFRSSCTESAPAARTLRQ

SEQ ID NO: 45405 - protein, 287 aa, Colwellia sp.
  misc_feature (1)..(287): tr|A0A1D8RYS2|A0A1D8RYS2_9GAMM NADPH-dependent 7-cyano- 7-deazaguanine reductase OS=Colwellia sp. PAMC 20917 OX =1816218 GN=queF PE=3 SV=1
MTNYKNAKVLSQLTLGKATNYCSEYNPELLQAVPRTLNRDSLAIHAESLPFIGEDVWYAYELSWLNSTGKPVVAVAEFRFPCTSTNIVESKSFKLYLNSFNQSRFSSWQAVEDCLIKDLSNTAEGKAGVKLFPVDNCPALEINHQIFSENTLCIDDVELDIDNYQLDPTLLNNANIAGETVKNESLVSHLLKSNCLITNQPDWASIYIHYSGQKISPSALLAYLISFRQHNEFHEQCVERIYCDLKKYCQVTELTVFARYTRRGGLDINPFRSTSTLHAPTGRTLRQ

SEQ ID NO: 45406 - protein, 281 aa, Colwellia sp.; identical to SEQ ID NO: 43946
  misc_feature (1)..(281): tr|A0A2G2DWK1|A0A2G2DWK1_COLSX NADPH-dependent 7-cyano- 7-deazaguanine reductase OS=Colwellia sp. OX=56799 GN=q ueF PE=3 SV=1

SEQ ID NO: 45407 - protein, 287 aa, Colwelliaceae bacterium
  misc_feature (1)..(287): tr|A0A2D6RE87|A0A2D6RE87_9GAMM NADPH-dependent 7-cyano- 7-deazaguanine reductase OS=Colwelliaceae bacterium OX= 2026726 GN=queF PE=3 SV=1
MAKYQNSDVLHGLTLGKATDYANQYDASLLQGVPRSLNRDDLAIDQEDLPFFGEDVWYGYELSWLNPKGKPQVAVAEFTFPCTSKNLIESKSFKLYLNSFNQTIFPSKDDVEKVLSKDLSEVAGAPASVVLSPVDDCPALAIVSDDATCIDELDVEIDTYDYQPSLLASDDSESLNQKDEQVSEYLVSHLLKSNCLITNQPDWASVYIRYSGKKINQEKLLKYFISFREHNEFHEQCVERIYTDIQQYCQPTSLTVFARYTRRGGLDINPYRSSEPSSAPKLRTIRQ

SEQ ID NO: 45408 - protein, 281 aa, Comamonadaceae bacterium
  misc_feature (1)..(281): tr|A0A2H0JC58|A0A2H0JC58_9BURK NADPH-dependent 7-cyano- 7-deazaguanine reductase OS=Comamonadaceae bacterium CG 12_big_fil_rev_8_21_14_0_65_59_15 OX=1973952 GN=queF PE =3 SV=1
MNLPEHSGLGQPTTYPSQLDAAQLYPIARALSRADLGLGASLPFMGADLWTAFELSWLNARGKPQVALAHITVPCESTNLIESKSLKLYLGSFANTRFAGAAQVQQRLRTDLTEAAWRGGVVRSSVGVRLIGQDQFDREPIYELDGLNLDRLDLDCDRYTPAPDLLCSATDEEPVTEVLTSNLLRSNCPVTGQPDWASVQISYAGPQIDQAGLLRYIVSFRQHTGFHEQCVERMFADIWQRCKPHKLTVYARYTRRGGLDINPFRTSHPQTLPANVRNARQ

SEQ ID NO: 45409 - protein, 281 aa, Comamonadaceae bacterium
  misc_feature (1)..(281): tr|A0A2M8E201|A0A2M8E201_9BURK NADPH-dependent 7-cyano- 7-deazaguanine reductase OS=Comamonadaceae bacterium CG _4_9_14_0_8_um_filter_60_18 OX=1973950 GN=queF PE=3 SV= 1
MKQPDSSLLGKPTRYPDRYDASLLFPIARMKQREPLGLGEKLPFLGADLWTAFELSWLGARGKPQVSLAHITVPCESMNIIESKSLKLYLNSFNNTRFADAAEVSATLRADLSEAVWRGGPVQSSVGVKLVLPDVFDREPIYELDGLGLDRMELDCDRYTPAPEFLCSAAQEEPVSEVLTSNLLRSNCPVTGQPDWGSVQISYFGPQIDQAGLLRYIVSFRNHQGFHEDCVERMFMDIMQRCQPHKLSVYARYTRRGGLDINPFRTSFPQALPANVRHARQ

SEQ ID NO: 45410 - protein, 282 aa, Comamonas aquatica
  misc_feature (1)..(282): tr|A0A1B2D618|A0A1B2D618_9BURK NADPH-dependent 7-cyano- 7-deazaguanine reductase OS=Comamonas aquatica OX=22599 1 GN=queF PE=3 SV=1
MNTPEQSQLGKASAYADQYDPSLLFPIPRSGKREEIGITEALPFFGADLWTAFELSWLNARGKPQVALAHFTIPCETPHIIESKSFKLYLNSFNNSRFDSLEAVQERLREDVNEALWRGAAVRQSSASVRVIAQDAFELQKVQELQGLNLDRLDIECSDYTPRPDLLKADHDNPPVTETLVSHLLKSNCLVTGQPDWGSVQISYTGAAIDQESLLRYIVSFRNHNEFHEQCVERIFMDLTRQCRPLKLSVYARYTRRGGLDINPLRTSHPMALPQNVRTARQ

SEQ ID NO: 45411 - protein, 282 aa, Comamonas aquatica
  misc_feature (1)..(282): tr|A0A014MT62|A0A014MT62_9BURK NADPH-dependent 7-cyano- 7-deazaguanine reductase OS=Comamonas aquatica DA1877 O X=1457173 GN=queF PE=3 SV=1
MNTPEQSQLGKASAYADQYDPSLLFPIPRSGKREEIGISGALPFFGADLWTAFELSWLNARGKPQVALAHFTIPCETPHIIESKSFKLYLNSFNNSRFDSLEAVQERLREDVNEALWRSAAVRQSSASVRVIAQDAFELQKVQELQGLNLDRLDIECSDYTPRPDLLKADHDNPPVTETLVSHLLKSNCLVTGQPDWGCVQISYTGAAIDQESLLRYIVSFRNHNEFHEQCVERIFMDLTRQCRPLKLSVYARYTRRGGLDINPLRTSHPMALPPNVRTARQ

SEQ ID NO: 45412 - protein, 282 aa, Comamonas kerstersii
  misc_feature (1)..(282): tr|A0A0W7YXU8|A0A0W7YXU8_9BURK NADPH-dependent 7-cyano- 7-deazaguanine reductase OS=Comamonas kerstersii OX=225 992 GN=queF PE=3 SV=1
MHTPEQSQLGKTSAYADQYDPSLLFPLPRQPKRDEIGIQDKLPFFGADLWTAFELSWLNQRGKPQVALAHFTIPCETPNIIESKSFKLYLNSFNNTRFDSLEAVQERLREDINEALWRGAPARLSSASVRVMAPEHFETQRVQELEGLSLDRLDVECTDYSPRPDLLKADHDNPPVTETLVSHLLKSNCLVTGQPDWGSVQISYTGAAIDQEGLLRYIVSFRNHNEFHEQCVERIFMDIMRLCRPLKLSVYARYTRRGGLDINPLRTSAPMAIPQNVRTARQ

SEQ ID NO: 45413 - protein, 281 aa, Comamonas serinivorans
  misc_feature (1)..(281): tr|A0A1Y0ENW3|A0A1Y0ENW3_9BURK NADPH-dependent 7-cyano- 7-deazaguanine reductase OS=Comamonas serinivorans OX=1 082851 GN=queF PE=3 SV=1
MSDTSQSPLGKVSAYVDQYTPALLCPIARQANREAIGVGARPLFFGADLWTAYELSWLGPRGKPEVAMAQFLVPAESTHLIESKSLKLYLNSFNQTRFDSAATVRDCLVRDLSQAAWGGGAVRASVSVTLIDPDAFDAQHIHELDGVLLDRLDAECSDYHPAPERLSAALDEAPVEETLISRLLKSNCLVTGQPDWGSVQVRYTGPQIDQLGLLQYIVSFRQHTEFHEQCVERMFMDIWQRCKPQRLTVYARYTRRGGLDINPFRTSHPGPVPVNVRTARQ

SEQ ID NO: 45414 - protein, 285 aa, Comamonas sp.
  misc_feature (1)..(285): tr|A0A363RE29|A0A363RE29_9BURK NADPH-dependent 7-cyano- 7-deazaguanine reductase OS=Comamonas sp. JNW OX=217073 1 GN=queF PE=3 SV=1
MTVSPSPEQSPLGQRSAYIDQYDPTLLFPLPRQAKRDEIGLQADKLPFFGADLWTAYEVSWLNLRGKPQVALVSFTIPCETPNIVESKSFKLYLNSFNNSRFGSVDEVRAKLLADISEAVWRGAPYQASVGVQMIDPELFDTLPLQELDGLNLDRLDIDCEHYQPQPQLLRAAFDEAPVTETLSSRLLKSNCLVTGQPDWGSVRISYTGPAIDQERLLQYIVSFRNHNEFHEQCVERMFVDIWKHCKPIRLTVYARYTRRGGLDINPLRTSQPMALPANIRTARQ

SEQ ID NO: 45415 - protein, 281 aa, Comamonas sp.
  misc_feature (1)..(281): tr|A0A1D2U2I6|A0A1D2U2I6_9BURK NADPH-dependent 7-cyano- 7-deazaguanine reductase OS=Comamonas sp. SCN 67-35 OX= 1660096 GN=queF PE=3 SV=1
MNLPEHSPLGRVSPYPDQYDPALLFPIARAQGRGAIGIEGAIPFFGADLWTAYEVSWLDPHGKPHVAIARFTIPCETPNLIESKSLKLYLNSYNGTRLAGMDAVLERIRADLSEAAWRGAGHAGTVGVQLLAPEQFEQERIAEMDGLLLDRLQVECTHDQPAPELLTAAFDEAPVEETLTSHLLKSNCPVTGQPDWGSLQIRYSGPQIEQAGLLRYLVSFRNHQGFHEQCVERIFMDLSARCRPIKLTVLARYTRRGGIDINPLRTSHPMPLPHGGRTARQ

SEQ ID NO: 45416 - protein, 281 aa, Comamonas terrigena
  misc_feature (1)..(281): tr|A0A2A7UZI6|A0A2A7UZI6_COMTR NADPH-dependent 7-cyano- 7-deazaguanine reductase OS=Comamonas terrigena OX=3201 3 GN=queF PE=3 SV=1
MSTPEQSQLGKPSAYADQYDASLLFPLPRATKRTEIGIGSQLPFFGADLWTGYELSWLNLRGKPQVALVHFTIPCETPHIIESKSFKLYLNSFNNSRFASADEVLARLRADVSEAVWRGAAHSATVGVRLVLPEAFATQKVQELQGLELDRLDVECTDYQPRPELLRADTETPPISETLVSHLLKSNCLVTGQPDWGSVQIAYTGPAIDQERLLQYIVSFRNHNEFHEQCVERMFTDIWRQCQPVKLSVYARYTRRGGLDINPFRTSHPSAMPAALRTARQ

SEQ ID NO: 45417 - protein, 281 aa, Comamonas testosteroni
  misc_feature (1)..(281): tr|A0A076PNF2|A0A076PNF2_COMTE NADPH-dependent 7-cyano- 7-deazaguanine reductase OS=Comamonas testosteroni TK10 2 OX=1392005 GN=queF PE=3 SV=1
MHTPEQSQLGKSSAYVDQYDASLLFPLPRLTKREEIGAAINPPFFGADLWTSFEVSWLNLRGKPQVALAHFTIPCETPNLIESKSFKLYLNSFNNTRFADASEVLARLRTDLSEATWRGSEAQGSVGVRLLQAEQFDAQQVHELDGLLLDRLDVECTRYTPAPELLRANHDEAPVSETLVSNLLKSNCLVTGQPDWGSVQIQYSGAQIEQEGLLQYLVSFRNHNEFHEQCVERIFMDIWTRCQPIKLAVYARYTRRGGLDINPLRTSHPGALPANVRTARQ

SEQ ID NO: 45418 - protein, 281 aa, Comamonas testosteroni
  misc_feature (1)..(281): tr|A0A1Y1J7G2|A0A1Y1J7G2_COMTE NADPH-dependent 7-cyano- 7-deazaguanine reductase OS=Comamonas testosteroni OX=2 85 GN=queF PE=3 SV=1
MHTPEQSQLGKSSAYVDQYDASLLFPLPRLTKREEIGAAINPPFFGADLWTSFEVSWLNLRGKPQVALAHFTIPCETPNLIESKSFKLYLNSFNNTRFADASEVLARLRTDLSEATWRGSEAKGSVGVRLLQADQFDAQQVHELDGLLLDRLDVECTQYTPAPELLRANHDEAPVNETLVSNLLKSNCLVTGQPDWGSVQIQYSGAQIDQEGLLQYLVSFRNHNEFHEQCVERIFMDIWTRCKPIKLAVYARYTRRGGLDINPFRTSHPGALPANVRTARQ

SEQ ID NO: 45419 - protein, 281 aa, Comamonas thiooxydans
  misc_feature (1)..(281): tr|A0A096CXQ8|A0A096CXQ8_9BURK NADPH-dependent 7-cyano- 7-deazaguanine reductase OS=Comamonas thiooxydans OX=36 3952 GN=queF PE=3 SV=1
MHTPEQSQLGKSSAYVDQYDASLLFPLPRLTKREEIGAAINPPFFGADLWTSFEVSWLNLRGKPQVALAHFTIPCETPNLIESKSFKLYLNSFNNTRFADASEVLARLRTDLSEATWRGSDAQGSVGVRLLEAEQFDAQQVHELDGLLLDRLDVECTRYTPAPELLRANHDEAPVSETLVSNLLKSNCLVTGQPDWGSVQIQYSGAQIEQEGLLQYLVSFRNHNEFHEQCVERIFMDIWTRCKPIKLAVYARYTRRGGLDINPFRTSHPGALPANVRTARQ

SEQ ID NO: 45420 - protein, 281 aa, Comamonas thiooxydans
  misc_feature (1)..(281): tr|A0A0E3C3V7|A0A0E3C3V7_9BURK NADPH-dependent 7-cyano- 7-deazaguanine reductase OS=Comamonas thiooxydans OX=36 3952 GN=queF PE=3 SV=1
MHTPEQSQLGKSSAYVDQYDASLLFPLPRLTKREEIGAAINPPFFGADLWTSFEVSWLNLRGKPQVALAHFTIPCETPNLIESKSFKLYLNSFNNTRFADASEVLARLRTDLSEATWRGSETQGSVGVRLLQADQFDAQQVHELDGLLLDRLDVECTRYTPAPELLRANHDEAPVNETLVSNLLKSNCLVTGQPDWGSVQIQYSGAQIEQEGLLQYLVSFRNHNEFHEQCVERIFMDIWTRCKPIKLAVYARYTRRGGLDINPFRTSHPGALPANVRTARQ

SEQ ID NO: 45421 - protein, 155 aa, Commensalibacter intestini
  misc_feature (1)..(155): tr|G6EXC0|G6EXC0_9PROT NADPH-dependent 7-cyano-7-deazag uanine reductase OS=Commensalibacter intestini A911 OX= 1088868 GN=queF PE=3 SV=1
MSEPSDLKKHLTQLGQNSPLPQSPEEAKLERVPAPYQEYDYTIRFTAPEFTSLCPITGQPDFAHLVIDYIPGKWIVESKSLKLYLSSFRNHGSFHEACTIEIASTIVKLLKPKWLRIGGYWYPRGGMPIDVFWQTDTPPKKVWIPEQEVPSYRGR

SEQ ID NO: 45422 - protein, 155 aa, Commensalibacter intestini; identical to SEQ ID NO: 45421
  misc_feature (1)..(155): tr|A0A251ZTH5|A0A251ZTH5_9PROT NADPH-dependent 7-cyano- 7-deazaguanine reductase OS=Commensalibacter intestini OX=479936 GN=queF PE=3 SV=1

SEQ ID NO: 45423 - protein, 168 aa, Commensalibacter sp.
  misc_feature (1)..(168): tr|W7DYF1|W7DYF1_9PROT NADPH-dependent 7-cyano-7-deazag uanine reductase OS=Commensalibacter sp. MX01 OX=120858 3 GN=queF PE=3 SV=1
MNYEITFNIEYKIMPEPTDLKKHLTQLGQNSPLPQSPQEAKLERVPAPYQEYDYTIRFTAPEFTSLCPITGQPDFAHLVIDYIPGKWIVESKSLKLYLSSFRNHGSFHEACTIEIASTIVKLLKPKWLRIGGYWYPRGGMPIDVFWQTDTPPKKVWIPDQEVPSYRGR

SEQ ID NO: 45424 - protein, 155 aa, Commensalibacter sp.
  misc_feature (1)..(155): tr|A0A318MZ67|A0A318MZ67_9PROT NADPH-dependent 7-cyano- 7-deazaguanine reductase OS=Commensalibacter sp. ESL028 4 OX=2070537 GN=queF PE=3 SV=1
MNDTKELKNYLTQLGANTSLPQSPSEAKLEKVPAPYPEYDYTIRFTAPEFTSLCPITGQPDFAHLVIDYIPDKWIVESKSLKLYLASFRNHGAFHEACTVEIATTLTKLLDPIWLRIGGYWYPRGGMPIDVFWQTSTPPENVWIPSQDVPAYRGR

SEQ ID NO: 45425 - protein, 156 aa, Conchiformibius steedae
  misc_feature (1)..(156): tr|A0A3P2A2J3|A0A3P2A2J3_9NEIS NADPH-dependent 7-cyano- 7-deazaguanine reductase OS=Conchiformibius steedae OX= 153493 GN=queF PE=3 SV=1
MRNETELQGITLLGNQRTQYRADYAPEVLEAFDNKHQDNDYFVKFICPEFTSLCPMTGQPDFATIIIRYIPDVKMVESKSLKLYLFSFRNHGDFHEDCVNIIMKDLIALMNPKYIEVFGEFTPRGGIAIHPYANYGRPHTPFADMARERLLRHDMR

SEQ ID NO: 45426 - protein, 155 aa, Confluentimicrobium lipolyticum
  misc_feature (1)..(155): tr|A0A238KSW4|A0A238KSW4_9RHOB NADPH-dependent 7-cyano- 7-deazaguanine reductase OS=Confluentimicrobium lipolyt icum OX=1524263 GN=queF PE=3 SV=1
MANEDIYKNLTMLGGKTELPNAPEEAVLERVPNPQAGTDYAVRFTAPEFTSLCPMTGQPDFAHIVIDYVPGDWLVESKSLKLFLGSFRNHGAFHEDCTVTIGKRLVEKLEPKWLRVGGYWYPRGGIPIDIFYQTGPELPGVWIPDQGVPTYRGRG

SEQ ID NO: 45427 - protein, 154 aa, Confluentimicrobium sp.
  misc_feature (1)..(154): tr|A0A2E3UEX9|A0A2E3UEX9_9RHOB NADPH-dependent 7-cyano- 7-deazaguanine reductase OS=Confluentimicrobium sp. OX= 1931204 GN=queF PE=3 SV=1
MAKTDVSGLSQLGQAVAQPASPEEATLEKVPASHAGTKYVVRFTAPEFTSLCPMTGQPDFAHIVIDYIPRDWLVESKSLKLFLTSFRNHGAFHEDCTIDIAKRLVALLDPEWLRIGAYWYPRGGIPIDVFWQTGPAPDGVWIPDQGVAPYRGRG

SEQ ID NO: 45428 - protein, 154 aa, Confluentimicrobium sp.
  misc_feature (1)..(154): tr|A0A0N9NF55|A0A0N9NF55_9RHOB NADPH-dependent 7-cyano- 7-deazaguanine reductase OS=Confluentimicrobium sp. EMB 200-NS6 OX=1609966 GN=queF PE=3 SV=1
MAKTDVSGLSQLGQAVAQPASPEEAALEKVPASHAGTKYVVRFTAPEFTSLCPMTGQPDFAHIVIDYIPRDWLVESKSLKLFLTSFRNHGAFHEDCTIDIAKRLVALLDPEWLRIGAYWYPRGGIPIDVFWQTGPAPDGVWIPDQGVAPYRGRG

SEQ ID NO: 45429 - protein, 272 aa, Congregibacter litoralis
  misc_feature (1)..(272): tr|A4A3I6|A4A3I6_9GAMM NADPH-dependent 7-cyano-7-deazag uanine reductase OS=Congregibacter litoralis KT71 OX=31 4285 GN=KT71_16356 PE=3 SV=1
MSGDALTHDKGPLLGQQVVGSEQYDPSLLFPVPRSNARASLPEQRFQGFGEDIWHAYELSWLSAAGMPQAFVGTFAIPATSANLIESKSLKLYLNSLNNHRFTSAEAARQTIVRDLSEVAGAPVSLTLGSPEDPAFRGEDLPGSCLDDLEVTVPDAADPVLLTGVAGDGLLYTHLMRSLCPVTAQPDWATVVVETRGVAPESPGLLRYLLAYRNHQEFHEQCVERIYTDILDRLQPDYLSVHALYTRRGGLDISPWRCSEHQPAPRYRLNRQ

SEQ ID NO: 45430 - protein, 279 aa, Conservatibacter flavescens
  misc_feature (1)..(279): tr|A0A2M8S5A7|A0A2M8S5A7_9PAST NADPH-dependent 7-cyano- 7-deazaguanine reductase OS=Conservatibacter flavescens OX=28161 GN=queF PE=3 SV=1
MNYHSQSLSYLTLGQQTTYTEFYDATLLQAVPRALNREQLDIIQIQPFTIGADIWTAYEISWLNPKGLPQVAIADVEIDHQSENLIESKSFKLYLNSFNQTPFADMATVERTIAQDLAQCAKGKVKVRLHSLDFFDQHPIHRLQGECIDQQDIQIQDYNFNPELLTNCTFDDRTEEWLVSHLLKSNCLITSQPDWGSLQIHYVGQRIDREKLLRYIVAFRQHNEFHEQCVERIFCDLMRFAKPDKLTVYARYTRRGGLDINPYRSNFEPIPVNLRLARQ

SEQ ID NO: 45431 - protein, 154 aa, Consotaella salsifontis
  misc_feature (1)..(154): tr|A0A1T4MN47|A0A1T4MN47_9RHIZ NADPH-dependent 7-cyano- 7-deazaguanine reductase OS=Consotaella salsifontis OX= 1365950 GN=queF PE=3 SV=1
MSENLGALSQLGRPAHPAASPQEATLETVPYSRGEGPAAIVRFTCPEFTSLCPVTGQPDFAHIVIDYAPDSRLVESKSLKLFLTSFRNHGAFHENCTLMIARRIVDATAPLWLRIAGFWYPRGGIPIDVFWQTGAPPAGAYVPEPGVPPYRGRG

SEQ ID NO: 45432 - protein, 158 aa, Coprobacillus sp.
  misc_feature (1)..(158): tr|G9QXV4|G9QXV4_9FIRM NADPH-dependent 7-cyano-7-deazag uanine reductase OS=Coprobacillus sp. 3_3_56FAA OX=6659 41 GN=queF PE=3 SV=1
MTKNLTLLGNQNTVYKDDYAPEVLETFDNKHPENDYFVKFNCPEFTSLCPITGQPDFATIYISYVPNQKMVESKSLKLYLFSFRNHGDFHEDCMNIIMKDLIKLMNPKYIEVWGKFTPRGGISIDPYCNYGKPETKWETIAFNRLANHDLYPEKIDNR

SEQ ID NO: 45433 - protein, 158 aa, Coprobacillus sp.
  misc_feature (1)..(158): tr|H1AM50|H1AM50_9FIRM NADPH-dependent 7-cyano-7-deazag uanine reductase OS=Coprobacillus sp. 8_2_54BFAA OX=469 597 GN=queF PE=3 SV=1
MTKNLTLLGNQNTVYKDDYAPEVLETFDNKHPENDYFVKFNCPEFTSLCPITGQPDFATIYISYVPNQKMVESKSLKLYLFSFRNHGDFHEDCMNIIMKDLIKLMDPKYIEVWGKFTPRGGISIDPYCNYGKPETKWETIAFNRLANHDLYPEKIDNR

SEQ ID NO: 45434 - protein, 149 aa, Coprobacter fastidiosus
  misc_feature (1)..(149): tr|A0A495VQ33|A0A495VQ33_9BACT NADPH-dependent 7-cyano- 7-deazaguanine reductase OS=Coprobacter fastidiosus NSB 1 OX=1349822 GN=queF PE=3 SV=1
MEETTLSLLGKKTEYPQDYAPEVLEAFNNKHPEMDYWVRFNCPEFTSLCPITGQPDFATIQIDYIPDIKMVESKSLKLYLFSFRNHGGFHEDCVNLIMKDLIKLMNPKYIEVTGFFTPRGGISIYPYCNYGRPGTEYAEMAKDRMRTHR

SEQ ID NO: 45435 - protein, 44 aa, Coprobacter fastidiosus
  misc_feature (1)..(44): tr|A0A354M4K3|A0A354M4K3_9BACT NADPH-dependent 7-cyano- 7-deazaguanine reductase QueF (Fragment) OS=Coprobacter fastidiosus OX=1099853 GN=DDY73_10615 PE=4 SV=1
MEETTLSLLGKKTEYPQDYAPEVLEAFNNKHPEMDYWVRFNCPE

SEQ ID NO: 45436 - protein, 148 aa, Coprobacter secundus
  misc_feature (1)..(148): tr|A0A0B2JLG1|A0A0B2JLG1_9BACT NADPH-dependent 7-cyano- 7-deazaguanine reductase OS=Coprobacter secundus OX=150 1392 GN=queF PE=3 SV=1
MKQNELTLLGGKTEYKQEYSPEVLESFNNKHPENDYWVRFNCPEFTSLCPITGQPDFATIQIDYIPNIKMVESKSLKLYLFSFRNHGAFHEDCVNIIMKDLIKLMAPKYIEITGFFTPRGGISIHPYCNYGQPGTEYEDLAKQRLFNH

SEQ ID NO: 45437 - protein, 148 aa, Coprobacter sp.
  misc_feature (1)..(148): tr|A0A316T6T8|A0A316T6T8_9BACT NADPH-dependent 7-cyano- 7-deazaguanine reductase OS=Coprobacter sp. OX=1941478 GN=queF PE=3 SV=1
MEKELSLLGKKTEYKQDYAPEVLETFINKHPEMDYWVRFNCPEFTSLCPITGQPDFATIQIDYIPGIRMVESKSLKLYLFSFRNHGGFHEDCVNLIMKDLIKLMDPKYIEVTGFFTPRGGISIYPYCNYGRPDTPFAEMAKQRLINRH

SEQ ID NO: 45438 - protein, 165 aa, Coprococcus catus
  misc_feature (1)..(165): tr|A0A3E2XL93|A0A3E2XL93_9FIRM NADPH-dependent 7-cyano- 7-deazaguanine reductase OS=Coprococcus catus OX=116085 GN=queF PE=3 SV=1
MSGRTKEETAGITHLGSQGTKYDFNYCPEVLETFINKHPDHDYFVKFNCPEFTSLCPMTGQPDFGNVIISYVPSERMVESKSLKLYLFSFRNHGDFHEDCMNIIMEDLIKLMDPKYIEVWGKFLPRGGISIDPYCNYGKPGTKWEEIAAMRLANHDMYPERVDNR

SEQ ID NO: 45439 - protein, 165 aa, Coprococcus catus; identical to SEQ ID NO: 45438
  misc_feature (1)..(165): tr|D4J8R3|D4J8R3_9FIRM NADPH-dependent 7-cyano-7-deazag uanine reductase OS=Coprococcus catus GD/7 OX=717962 GN =queF PE=3 SV=1

SEQ ID NO: 45440 - protein, 160 aa, Coprococcus comes
  misc_feature (1)..(160): tr|A0A3R6DHU3|A0A3R6DHU3_9FIRM NADPH-dependent 7-cyano- 7-deazaguanine reductase OS=Coprococcus comes OX=410072 GN=queF PE=3 SV=1
MREKEDLTLLGNQNTAYRMDYDPSVLESFQNKHPENDYFVKFNCPEFTSLCPITGQPDFATVTISYVPDERLVESKSLKLYLFSFRNHGDFHEDVINIIMKDLIKLLSPKYIEVWGKFLPRGGLSIDPYCNYGKSGTSWEQVAWNRMSNHDMFPEKIDNR

SEQ ID NO: 45441 - protein, 165 aa, Coprococcus comes; identical to SEQ ID NO: 44648
  misc_feature (1)..(165): tr|A0A3R5X3F9|A0A3R5X3F9_9FIRM NADPH-dependent 7-cyano- 7-deazaguanine reductase OS=Coprococcus comes OX=410072 GN=queF PE=3 SV=1

SEQ ID NO: 45442 - protein, 164 aa, Coprococcus eutactus
  misc_feature (1)..(164): tr|R5WN68|R5WN68_9FIRM NADPH-dependent 7-cyano-7-deazag uanine reductase OS=Coprococcus eutactus CAG:665 OX=126 3071 GN=queF PE=3 SV=1
MGRSKEEMEGVTLLGNKDVKYSMDYAPEMLQTFDNKHPDNDYFVKFNCPEFTSLCPITGQPDFATVYISYVPGKKMVESKSLKLYLFSFRNHGDFHEDCMNIIMKDLVKLMDPKYIEVWGKFTPRGGISIDPYCNYGRPGTKWEEVAWNRLANHDLYPEKVDNR

SEQ ID NO: 45443 - protein, 164 aa, Coprococcus eutactus
  misc_feature (1)..(164): tr|A8SYS3|A8SYS3_9FIRM NADPH-dependent 7-cyano-7-deazag uanine reductase OS=Coprococcus eutactus ATCC 27759 OX= 411474 GN=queF PE=3 SV=1
MGRSKEEMEGVTLLGNKDVKYSMNYAPEMLQTFDNKHPDNDYFVKFNCPEFTSLCPITGQPDFATVYISYVPGKKMVESKSLKLYLFSFRNHGDFHEDCMNIIMKDLVKLMDPKYIEVWGKFTPRGGISIDPYCNYGRPGTKWEEVAWNRLANHDLYPEKVDNR

SEQ ID NO: 45444 - protein, 164 aa, Coprococcus sp.
  misc_feature (1)..(164): tr|A0A374K3M5|A0A374K3M5_9FIRM NADPH-dependent 7-cyano- 7-deazaguanine reductase OS=Coprococcus sp. OM06-34AC O X=2293095 GN=queF PE=3 SV=1
MGRSKEEMEGVTLLGNKDVKYSMDYAPEMLQTFDNKHPDNDYFVKFNCPEFTSLCPITGQPDFATVYISYVPGEKMVESKSLKLYLFSFRNHGDFHEDCMNIIMKDLIKLMDPKYIEVWGKFTPRGGISIDPYCNYGRPGTKWEEVAWNRLANHDLYPEKVDNR

SEQ ID NO: 45445 - protein, 164 aa, Coprococcus sp.; identical to SEQ ID NO: 45444
  misc_feature (1)..(164): tr|A0A1Q6MH18|A0A1Q6MH18_9FIRM NADPH-dependent 7-cyano- 7-deazaguanine reductase OS=Coprococcus sp. CAG:131_42_ 139 OX=1896997 GN=queF PE=3 SV=1

SEQ ID NO: 45446 - protein, 193 aa, Coraliomargarita akajimensis
  misc_feature (1)..(193): tr|D5EK19|D5EK19_CORAD NADPH-dependent 7-cyano-7-deazag uanine reductase OS=Coraliomargarita akajimensis (strai n DSM 45221 / IAM 15411 / JCM 23193 / KCTC 12865 / 04OK A010-24) OX=583355 GN=queF PE=3 SV=1
MDTFGVHASVRSKQSEYKSTAFGYRIIWTLSLVLRGNLSLLDLQSMGLIGLKKLGRMIEFSCELGQFVGMDIETFPNPNAERDYTIQHIQEEFTSTCPMTGHPDYATIVFSYAPDELCIELKAMKLYLHSYRNKGIFFEAATNKIFEDLYEVTKPRWARLETIWRGRGGIRSNVVVEGQQDGYEGPKTVPFQS

SEQ ID NO: 45447 - protein, 145 aa, Coraliomargarita sp.
  misc_feature (1)..(145): tr|R7L4B1|R7L4B1_9BACT NADPH-dependent 7-cyano-7-deazag uanine reductase OS=Coraliomargarita sp. CAG:312 OX=126 2865 GN=queF PE=3 SV=1
MKKTEKKDLAGLTQLGAAYKGKKAKPVRKLETFPNKSRGRNYVVRLETDEFTCLCPATGQPDFAKIRISYIPRDKIVESKSLKLYLWSFRNEGCFHEHLTNIILDDLVKALNPVWCKVEGDFNIRGGIGIKVEAQEGSPDPNIGE

SEQ ID NO: 45448 - protein, 124 aa, Coraliomargarita sp.
  misc_feature (1)..(124): tr|A0A3R7UBR5|A0A3R7UBR5_9BACT NADPH-dependent 7-cyano- 7-deazaguanine reductase OS=Coraliomargarita sp. TMED73 OX=1986604 GN=queF PE=3 SV=1
MEIETFPNPNTDRDYTIQHIQEEFTSTCPMTGHPDYATVVFSYAPDKICVELKAMKLYLHSFRNKGIFFEAATNKIFEDLHAAVRPKWARLETIWRGRGGIRSNVIVENVQEGYQGPKTKFFEA

SEQ ID NO: 45449 - protein, 281 aa, Corallincola sp.
  misc_feature (1)..(281): tr|A0A368NGU4|A0A368NGU4_9GAMM NADPH-dependent 7-cyano- 7-deazaguanine reductase OS=Corallincola sp. C4 OX=2282 215 GN=queF PE=3 SV=1
MTSAYDNHPDLSNLALGEKTEYRQHYAPELLQPVPRRLNREQIGVTSDLPFHGGDIWTGYELSWLNEKGLPQVAIATFAIPCTSTNLVESKSFKLYLNSFNQHTFSDWATVKMVLKQDLSKCAEAEVDVSLATLDSFEKQKITGFDAELIDNQDIDITDYDYQPALLKAGSDKKIVSEKLQSHLLKSNCLITNQPDWGSVMISYTGQQINHASLLRYIVSFRNHNEFHEQCVERIFTDLQSRFALDKLTVYARYTRRGGLDINPFRSNFEPMPTNIRMARQ

SEQ ID NO: 45450 - protein, 121 aa, Corallococcus coralloides
  misc_feature (1)..(121): tr|A0A410S1Z5|A0A410S1Z5_CORCK NADPH-dependent 7-cyano- 7-deazaguanine reductase OS=Corallococcus coralloides O X=184914 GN=queF PE=3 SV=1
MPSQPSKEIQTFPNPAADRDYEIAFDVPEFTCLCPLTGQPDFARFTIKYVPDQLCVELKSLKMYMWSYRNEGAFHEKVTNTIADDIIKAIQPRKLTVVGDFFVRGGIGTIVTVTHDKKQQA

SEQ ID NO: 45451 - protein, 169 aa, Corallococcus coralloides
  misc_feature (1)..(169): tr|H8N2D5|H8N2D5_CORCM NADPH-dependent 7-cyano-7-deazag uanine reductase OS=Corallococcus coralloides (strain A TCC 25202 / DSM 2259 / NBRC 100086 / M2) OX=1144275 GN= queF PE=3 SV=1
MIANHPRTFSCPRGSRHVGTRTEPGPGSQGGDIVEGGDTRRTCATRQRMPSQPSKEIQTFPNPAADRDYEIAFDVPEFTCLCPLTGQPDFARFTIKYVPDQLCVELKSLKMYMWSYRNEGAFHEKVTNTIADDIIKAIQPRKLTVVGDFFVRGGIGTIVTVTHDKKKQA

SEQ ID NO: 45452 - protein, 121 aa, Corallococcus exiguus
  misc_feature (1)..(121): tr|A0A5C5DWF8|A0A5C5DWF8_9DELT NADPH-dependent 7-cyano- 7-deazaguanine reductase OS=Corallococcus exiguus OX=83 462 GN=queF PE=3 SV=1
MSSKPSKEIQTFPNPAADRDYEIAFDVPEFTCLCPLTGQPDFARFTIKYVPDQLCVELKSLKLYMWSYRNEGAFHEKVTNTIADDIIKAIQPRKLTVVGDFFVRGGIGTIVTVTHDKKQQA

SEQ ID NO: 45453 - protein, 119 aa, Corallococcus sp.
  misc_feature (1)..(119): tr|A0A3A8K5M1|A0A3A8K5M1_9DELT NADPH-dependent 7-cyano- 7-deazaguanine reductase OS=Corallococcus sp. CA053C OX =2316732 GN=queF PE=3 SV=1
MSSKPSKEVQTFPNPAPERDYEIAFDVPEFTCLCPLTGQPDFARFTIKYVPDQLCVELKSLKLYMWSYRNEGAFHEKVTNTIADDIVKAIQPRKLTVVGDFFVRGGIGTIVTVTHEKKK

SEQ ID NO: 45454 - protein, 119 aa, Corallococcus sp.
  misc_feature (1)..(119): tr|A0A3A8NEL9|A0A3A8NEL9_9DELT NADPH-dependent 7-cyano- 7-deazaguanine reductase OS=Corallococcus sp. CA051B OX =2316731 GN=queF PE=3 SV=1
MSSMPSKEVQTFPNPAPERDYEIAFDVPEFTCLCPLTGQPDFARFTIKYVPDQLCVELKSLKLYMWSYRNEGAFHEKVTNTIADDIVKAIQPRKLTVVGDFFVRGGIGTIVTVTHDKKK

SEQ ID NO: 45455 - protein, 165 aa, Coriobacteriaceae bacterium
  misc_feature (1)..(165): tr|A0A0A8B534|A0A0A8B534_9ACTN NADPH-dependent 7-cyano- 7-deazaguanine reductase OS=Coriobacteriaceae bacterium 68-1-3 OX=1531429 GN=queF PE=3 SV=1
MASENRESEGLTLLGNQGTVYSSDYDPTVLETFENKHAERDYMVTFRCPEFTTLCPITGQPDFATLYINYIPHIKMVESKSLKLYLFSFRNHGDFHEDVTNVILNDLVKLMEPKYIEVRGMFYPRGGISIYPFANWANPDFGYEGMAKGRMFEQLSDLDTGDGAR

SEQ ID NO: 45456 - protein, 164 aa, Coriobacteriaceae bacterium
  misc_feature (1)..(164): tr|A0A425WLE4|A0A425WLE4_9ACTN NADPH-dependent 7-cyano- 7-deazaguanine reductase OS=Coriobacteriaceae bacterium OX=2011094 GN=queF PE=3 SV=1
MAEAGRSPEELKGVTLLGNKGVKYPHDYDPTLLETFVNKHQNRDYMVTFKCPEFTTLCPKTGQPDFGCIYINYIPDVRMVESKSLKLYLFSFREHGDFHEDVVNVILEDLAHLMEPKYIEVFGRFNPRGGISIYPFANWAKPDAGYEDMVTRRQFEQLSMHEQD

SEQ ID NO: 45457 - protein, 164 aa, Coriobacteriales bacterium
  misc_feature (1)..(164): tr|A0A133Z0Z3|A0A133Z0Z3_9ACTN NADPH-dependent 7-cyano- 7-deazaguanine reductase OS=Coriobacteriales bacterium DNF00809 OX=1588753 GN=queF PE=3 SV=1
MSQRERDSLTLLGNKQVEYPTTYDPSLLETFQNQHPTRDYMVTFRCPEFTTLCPITHQPDFGTLFINYIPDQRMVESKSLKLYLFSFRNHGDFHEDVTNIIMNDLIALMQPRYIEVRGLFYPRGGISIYPFANWANPQFSYESMAQQRLFSQLSDIETPASSHV

SEQ ID NO: 45458 - protein, 166 aa, Coriobacteriia bacterium
  misc_feature (1)..(166): tr|A0A316NX82|A0A316NX82_9ACTN NADPH-dependent 7-cyano- 7-deazaguanine reductase OS=Coriobacteriia bacterium OX =2052159 GN=queF PE=3 SV=1
MSQATREAEGLTLLGNQHTQYAQDYDPSLLETFENKHPGHDYMVTFRCPEFTTLCPITGQPDFATLYINYVPDERMVESKSLKLYLFSFRNHGDFHEDVVNVIMHDLVELMSPKYIEVRGMFYPRGGISIYPFANWARPGAGYEQIAAERMFSQLSDLDSGDGARG

SEQ ID NO: 45459 - protein, 172 aa, Coriobacteriia bacterium
  misc_feature (1)..(172): tr|A0A2V2E9K3|A0A2V2E9K3_9ACTN NADPH-dependent 7-cyano- 7-deazaguanine reductase OS=Coriobacteriia bacterium OX =2052159 GN=queF PE=3 SV=1
MDATNAANEKPQREGTDDLSLLGNQGVRYPQTYDPSVLETFENKHPGNDYFVKFNCPEFTSLCPITGQPDFATIYIAYVPGERMVESKSLKLYLFSFRNHGDFHEDCVNIIMKDLIKLMDPKYIEVWGKFLPRGGISIDPYCNYGKPGTRWEDVAWERLSHHDLYPEKVDNR

SEQ ID NO: 45460 - protein, 290 aa, Corticibacter populi
  misc_feature (1)..(290): tr|A0A3M6QX44|A0A3M6QX44_9BURK NADPH-dependent 7-cyano- 7-deazaguanine reductase OS=Corticibacter populi OX=155 0736 GN=queF PE=3 SV=1
MNSSQPDQPIPADLPLGREVAYPGAYDPGLLFPIARAAQRAELGLDAARLPFVGADVWTAFELSWLNPHGKPQVGVAHFTFPAETPNIIESKSFKLYLNSLNNAVFADTQALRERLRADLSEAAWRGSESGLRSIGVRIVEAAGFDAEPMAELDGLDLDRLDVECTHYLPAPELLGSRRSEALVTETLTSRLLKSNCPVTGQPDWASVQIHYSGHPIDQAGLLRYIVSFRNHTGFHENCVERMFIDIWQRCQPLQLAIWARYTRRGGLDINPFRSSHPQAIPANVRTARQ

SEQ ID NO: 45461 - protein, 166 aa, Corynebacterium striatum
  misc_feature (1)..(166): tr|A0A2H1ADK6|A0A2H1ADK6_CORST NADPH-dependent 7-cyano- 7-deazaguanine reductase OS=Corynebacterium striatum OX =43770 GN=queF PE=3 SV=1
MSEGRKHEDLKDITLLGNQNNKYDFDYRPDVLESFDNKHPGRDYFVKFNCPEFTSLCPITGQPDFATIYISYIPNIKMVESKSLKLYLFSFRNHGDFHEDCMNIIMNDLIDLMDPHYIEVWGKFTPRGGISIDPYTNYGRPDSKYEKMAEHRLMNHDLYPEKIDNR

SEQ ID NO: 45462 - protein, 281 aa, Cosenzaea myxofaciens
  misc_feature (1)..(281): tr|A0A198GC98|A0A198GC98_9GAMM NADPH-dependent 7-cyano- 7-deazaguanine reductase OS=Cosenzaea myxofaciens ATCC 19692 OX=1354337 GN=queF PE=3 SV=1
MSLYQGDKSLEALSLGKKTEYHSEYDATLLQGVPRLLNRQTLALTNENLPFHGGDIWTMYELSWLNSKGLPQVAIGYIELDATTENLIESKSFKLYLNSFNQTRFESWEQVEKTLLNDLTACAKGKVNLSLYPLSHFTSQPIVDFEGECIDEQDINIDNYQFDAQWLNESTTDTQVEETLVSHLLKSNCLITHQPDWGSVMIKYKGKKINREKLLRYLVSFRQHNEFHEQCIERIFHDIMQFCSPETLTVYARYTRRGGLDINPWRSNCEFAPETRRLARQ

SEQ ID NO: 45463 - protein, 278 aa, Coxiella burnetii
  misc_feature (1)..(278): sp|Q83F02|QUEF_COXBU NADPH-dependent 7-cyano-7-deazagua nine reductase OS=Coxiella burnetii (strain RSA 493 / N ine Mile phase I) OX=227377 GN=queF PE=3 SV=1
MSTLRVLHEKSELGKTTVYPKEYAPHLLLPIPRDLNRKTLNVNVSEPPPFYGYDLWNAYELSWLNEKGKPFAARGEFIIPATSSHLIESKSFKLYLNSFNNERFADAAAVSQTMKRDLSKRVNESVTVNFILHETEIPVAYSPKGSLLDVLDIAIDTYSPDPNLLSTSQETVTETLYSHLLKSNCPVTGQPDWGSIEIHYTGPKIDHVQLLKYIISYRNHEEFHEACVERFFMDILRHCRPQELTVQARYTRRGGLDINPYRSTNPTFSVQNHRSFRQ

SEQ ID NO: 45464 - protein, 278 aa, Coxiella burnetii; identical to SEQ ID NO: 45463
  misc_feature (1)..(278): sp|A9NAF9|QUEF_COXBR NADPH-dependent 7-cyano-7-deazagua nine reductase OS=Coxiella burnetii (strain RSA 331 / H enzerling II) OX=360115 GN=queF PE=3 SV=1

SEQ ID NO: 45465 - protein, 280 aa, Coxiella sp.
  misc_feature (1)..(280): tr|A0A2G2A0N1|A0A2G2A0N1_9COXI NADPH-dependent 7-cyano- 7-deazaguanine reductase OS=Coxiella sp. (in: Bacteria) OX=59288 GN=queF PE=3 SV=1
MKIHKEQNIILNSALGKTSAYVDHYSPELLLPIPRHLKRAEIGITGALPFYGFDTWNDYETSWLDSRGKPIVAITQFHIPCTSPNIVESKSIKLYLNSLSNTQFSSPDDVKNVIQKDLSKNAGSDVIVTIHTLDALAGLSVGKPPGHCIDGLNTTIEKYEAYPRYLQCTSDTITTETLHSNLLKSNCPVTAQPDWATLIVEYTGKQLSREGLLKYIVSLRNQQEFHEQCIERIFVNIMEYCQPQALTVIGRYTRRGGKDINPCRSTNPDIGILNQRLIRQ

SEQ ID NO: 45466 - protein, 282 aa, Coxiella sp.
  misc_feature (1)..(282): tr|A0A0S7XYR0|A0A0S7XYR0_9COXI NADPH-dependent 7-cyano- 7-deazaguanine reductase OS=Coxiella sp. DG_40 OX=17033 54 GN=queF PE=3 SV=1
MSLYHKNTSVALEDIPLGKKSTYVSQYSPDLLFSIPRELKRELIGVSSPLPFKGCDIWNAFELSWLNARGRPIVALGEFLFPCESPNIIESKSLKLYLNSFNNTKFDSLNKVQETIKRDLSVALNYPVKIKIISTTDFRVREKSVFSGICIDDFDVACNVYTVEPKFLHISNKKIVSEILYSELLKSNCPVTGQPDWGSVQISYTGQQIDHQGLLKYIISFRNHDEFHEQCVERMFVDIMQKCSPEKLTIYARYVRRGGLDINPYRSTEGGGVPKNVCLVRQ

SEQ ID NO: 45467 - protein, 279 aa, Coxiellaceae bacterium
  misc_feature (1)..(279): tr|A0A2E9Z762|A0A2E9Z762_9COXI NADPH-dependent 7-cyano- 7-deazaguanine reductase OS=Coxiellaceae bacterium OX=2 026727 GN=queF PE=3 SV=1
MTEELKQAVEASPLGQTVNYRDQYAPELLVSIPRTANRSALGLSGSLPFQGFDRWVGYELSWLNPQGKPQAALLMFDVSCDSAALVESKSLKLYLNSFNQTRFDDLDAVTASLQRDLSQAACGEVRVTLQSLKACEGRVWCSFTGQCLDDLEVSCDTYSVRPDYLSTRKGEYVQETLYTHLFKSNCLVTGQPDWASVAVHYKGQPIDLNGLFKYWVSYRLHNEFHEMCVERMFTDILRRCQPEALCVEACFTRRGGLDISPWRATPGFQPDLTRHTIRQ

SEQ ID NO: 45468 - protein, 279 aa, Coxiellaceae bacterium
  misc_feature (1)..(279): tr|A0A3B9W6Q0|A0A3B9W6Q0_9COXI NADPH-dependent 7-cyano- 7-deazaguanine reductase OS=Coxiellaceae bacterium OX=2 026727 GN=queF PE=3 SV=1
MTDDLQQAVEASPLGQTVHYRDQYAPELLVSIPRTANRSALGLSGPLPFQGFDRWVGYELSWLNLQGKPQAALLTFDVSCDSAALVESKSLKLYLNSFNQTQFDNQDAVIACLQRDLSEAARGEVCVTLQSLIACEGRAWRSFLGRCLDDLEVSCDTYSVCPDYLTTTEGESVQETLYTHLFKSNCLVTGQPDWASVAVHYKGQPIDYDGLFKYWVSYRQHNEFHEMCVERMFTDILRCCQPDALCVEACFTRRGGLDISPWRATPGFQPELTHHALRQ

SEQ ID NO: 45469 - protein, 278 aa, Crenobacter cavernae
  misc_feature (1)..(278): tr|A0A4Q2J7E6|A0A4Q2J7E6_9NEIS NADPH-dependent 7-cyano- 7-deazaguanine reductase OS=Crenobacter cavernae OX=229 0923 GN=queF PE=3 SV=1
MTRPTTPELSPLGKTVSYQDTYDASLLFPIARHGKREEIGVDEAALPFEGVDVWTGYELSWLNAKGKPQVAIVTFHIPATSANLVESKSFKLYLNSFNQTRLDSAEALEELLEKDLSAATGAPVTAHIALPDEFAAQRMQELEGESIDELDIEVDAYTPDPSRLKADPARIVSETLRSELLKSNCLVTGQPDWGGVQIAYTGPKIDRESLLRYLIGFRRHNEFHEQCVERIFMDISRECGATELTVFARYTRRGGLDINPFRTNSGAAVPENVRTARQ

SEQ ID NO: 45470 - protein, 278 aa, Crenobacter cavernae
  misc_feature (1)..(278): tr|A0A345Y2Z9|A0A345Y2Z9_9NEIS NADPH-dependent 7-cyano- 7-deazaguanine reductase OS=Crenobacter cavernae OX=229 0923 GN=queF PE=3 SV=1
MTRPTTPELSPLGKTVSYQDTYDASLLFPIARHGKREEIGVDEAALPFSGVDVWTGYELSWLNPKGKPQVAIVTFLIPATSANLVESKSFKLYLNSFNQTKLDSAEALEELLEKDLSAATGAPVTARIALPSEFSAQRMQELEGESIDELDIEVDAYTPDPSRLKADPANVVTETLRSELLKSNCLVTGQPDWGGVQIAYTGPKIDRESLLRYLIGFRRHNEFHEQCVERIFMDISRECGATELTVFARYTRRGGLDINPFRTNSGAAVPDNVRTARQ

SEQ ID NO: 45471 - protein, 278 aa, Crenobacter luteus
  misc_feature (1)..(278): tr|A0A165FC69|A0A165FC69_9NEIS NADPH-dependent 7-cyano- 7-deazaguanine reductase OS=Crenobacter luteus OX=14524 87 GN=queF PE=3 SV=1
MTRPTTPDLSPLGKTVTYRDRYAPELLFPIARHGKRAEIGVDEAALPFSGVDVWTGYELSWLNAKGKPQVAIVTFHIPATSANLVESKSFKLYLNSFNQTRVESVAALTAMLEKDLSAATGAPVSARVVLPDAFGAERIAALPGESIDELDIEVNDYTPDPARLKADPAHIVTETLRSELLKSNCLVTGQPDWGGVTIAYTGPKIDRESLLRYLIGFRQHNEFHEQCVERIFMDVARQCGATELTVYARYTRRGGLDINPFRTNCGAAVPDNVRTARQ

SEQ ID NO: 45472 - protein, 144 aa, Crenobacter sp.
  misc_feature (1)..(144): tr|A0A4T0V5N6|A0A4T0V5N6_9NEIS NADPH-dependent 7-cyano- 7-deazaguanine reductase OS=Crenobacter sp. GY 70310 OX =2563443 GN=queF PE=3 SV=1
MQLHQNLHALGNGQTRYRYDCPDASLLERFPNPFARGELNPAGVSGSLNISCPEFTSLCPMTGQPDFATIVIDMVPDAWCVESKSLKLYLGSFRQHGEFHEACICRICNDLVALLEPREIVVEGRFTPRGGIPLWPRASWRKGA

SEQ ID NO: 45473 - protein, 129 aa, Crenothrix polyspora
  misc_feature (1)..(129): tr|A0A1R4H6H5|A0A1R4H6H5_9GAMM NADPH-dependent 7-cyano- 7-deazaguanine reductase OS=Crenothrix polyspora OX=360 316 GN=queF PE=3 SV=1
MTTTPSKVLETFPNPQPGRDYTIRMTLPEFTCLCPKTGQPDFATFIIEYVPSALCVELKSLKLYMWAFREQGAFHEAVTNEILNDIIAAINPNFMRIRAEFNVRGGVYTTVIVEHKNPDWQVPQLVNLP

SEQ ID NO: 45474 - protein, 129 aa, Crenothrix polyspora
  misc_feature (1)..(129): tr|A0A1R4H7Z4|A0A1R4H7Z4_9GAMM NADPH-dependent 7-cyano- 7-deazaguanine reductase OS=Crenothrix polyspora OX=360 316 GN=queF PE=3 SV=1
MTTTPSKALETFPNPQPGRDYTIRMTLPEFTCLCPKTGQPDFATFIIEYVPGALCVELKSLKLYMWAFREQGAFHEAVTNEILNDIVAAISPNFMRIRAEFNVRGGVYTTVIVEHKNPDWQAPQLVNLP

SEQ ID NO: 45475 - protein, 129 aa, Crenothrix sp.
  misc_feature (1)..(129): tr|A0A1Y3A0G4|A0A1Y3A0G4_9GAMM NADPH-dependent 7-cyano- 7-deazaguanine reductase OS=Crenothrix sp. D3 OX=188089 9 GN=queF PE=3 SV=1
MTTQPSKDLETFVNPRPDRDYTIHISTPEFTCLCPKTGQPDFATIEIDYVPAELCVELKSLKLYMWSFRDRGAFHEAVTNEILDDIVNAIQPYFMRVRAVFNVRGGVYTTVVAEHKNPDWHAPELVNLP

SEQ ID NO: 45476 - protein, 269 aa, Criblamydia sequanensis
  misc_feature (1)..(269): tr|A0A090D2H0|A0A090D2H0_9BACT NADPH-dependent 7-cyano- 7-deazaguanine reductase OS=Criblamydia sequanensis CRI B-18 OX=1437425 GN=queF PE=3 SV=1
MLDLAPLGKKTVYIETYSPELLFPVSRNLARDKLKLDSIPFKGWDKWNGYEISFLNRKGKPLIALAEFTFPCTTENIVESKSLKLYLNSFNASAFDSLEEVQEIMEKDISSAIKGEVSVKLFPLTSLKEKELRELPGTCIDDLDIEVNEYSVNPKLLKTSSAEVEETLYSNLLKSNCLATGQPDWGSLWIHYAGPRIDHESLLKYIISFRNHSGFAEHCVESIFMDLFKECRPKNLSVYARYTRRGGLDINPFRSNFEDLFINERNIRQ

SEQ ID NO: 45477 - protein, 279 aa, Cricetibacter osteomyelitidis
  misc_feature (1)..(279): tr|A0A4V2T148|A0A4V2T148_9PAST NADPH-dependent 7-cyano- 7-deazaguanine reductase OS=Cricetibacter osteomyelitid is OX=1521931 GN=queF PE=3 SV=1
MNYNDNSLKTLKLGQVTNYTDQYDATLLQPVARRLNRDQLGITKQQPFTKGADIWTAYEISWLNPKGLPQVAIADVEIDYRSENLIESKSFKLYLNSFNQTKFSNFDEVQRTIQQDLSDCAKGDVKVRLNSLKNYRTSRISELPGECIDEQDIEIAHYNFSAALLENCTTNEMVDENLVSHLLKSNCLITSQPDWGSVQIHYVGNKIDREKLLRYLISFRQHNEFHEQCVERIFCDLMQHAKPQKLTVYARYTRRGGLDINPFRSNFENVPENCRLARQ

SEQ ID NO: 45478 - protein, 140 aa, Crinalium epipsammum
  misc_feature (1)..(140): tr|K9VXX1|K9VXX1_9CYAN NADPH-dependent 7-cyano-7-deazag uanine reductase OS=Crinalium epipsammum PCC 9333 OX=11 73022 GN=queF PE=3 SV=1
MTQSPTQEQSSPAENLEMKYGERNIAEGQLITFPNPRIGRRYNISITLPEFTCKCPFSGYPDFASIYINYVPNERVVELKAIKLYINSYRDRYISHEESVNQILDDFVAACDPLEVTIKGDFSPRGNVHTVVEVHHQKSN

SEQ ID NO: 45479 - protein, 153 aa, Croceicoccus marinus
  misc_feature (1)..(153): tr|A0A1Z1FC00|A0A1Z1FC00_9SPHN NADPH-dependent 7-cyano- 7-deazaguanine reductase OS=Croceicoccus marinus OX=450 378 GN=queF PE=3 SV=1
MADDHTQPLYLGQNSSLPASPEEAVLDYVPNPRAGSLYMVRFAAPEFTSLCPVTGQPDFAHLVIDYAPGETIVESKSLKLFLGAFRNHCGFHEDVTVGIGQRLFAEMAPRWLRIGGYWYPRGGIPIDVFWQSGAIPEGLWVPDQGVSSYRGRG

SEQ ID NO: 45480 - protein, 158 aa, Croceicoccus naphthovorans
  misc_feature (1)..(158): tr|A0A0G3XJZ1|A0A0G3XJZ1_9SPHN NADPH-dependent 7-cyano- 7-deazaguanine reductase OS=Croceicoccus naphthovorans OX=1348774 GN=queF PE=3 SV=1
MTDEPISPLHPQPIHLGQTSALPASPDEAVLDYVPNPRTGSLYTVRFAAPEFTSLCPVTGQPDFAHIVIDYAPGETIVESKSLKLFLGSFRNHCGFHEDVTVGIGQRLADEMKPQWLRIGGYWYPRGGIPIDVFWQTGAPPVGLWVPDQGVAPYRGRG

SEQ ID NO: 45481 - protein, 158 aa, Croceicoccus ponticola
  misc_feature (1)..(158): tr|A0A437GVS1|A0A437GVS1_9SPHN NADPH-dependent 7-cyano- 7-deazaguanine reductase OS=Croceicoccus ponticola OX=2 217664 GN=queF PE=3 SV=1
MTDNLLDAGNNAPLHLGQTSALPTSPEDAVLDYVPNPRVGSLYMVRFAAPEFTSLCPVTGQPDFAHLVIDYAPGETIVESKSLKLFLGSFRNHCGFHEDVTVGIGQRLVAEMKPLWLRIGGYWYPRGGIPIDVFWQTGAPPSGLWVPDQGVASYRGRG

SEQ ID NO: 45482 - protein, 158 aa, Croceicoccus sp.
  misc_feature (1)..(158): tr|A0A2D8D9H5|A0A2D8D9H5_9SPHN NADPH-dependent 7-cyano- 7-deazaguanine reductase OS=Croceicoccus sp. OX=1927144 GN=queF PE=3 SV=1
MADDNAQSTPTAPKYLGQNSALPASPEEAVLDYVPNPRAGSLYMVRFAAPEFTSLCPVTGQPDFAHLVIDYAPGEMIVESKSLKLFLGSFRNHCGFHEDVTVGIGQRLFEEMAPRWLRIGGYWYPRGGIPIDVFWQSGTVPEGLWVPEQGVSSYRGRG

SEQ ID NO: 45483 - protein, 144 aa, Crocinitomicaceae bacterium
  misc_feature (1)..(144): tr|A0A2E4ECP5|A0A2E4ECP5_9FLAO 7-cyano-7-deazaguanine r eductase OS=Crocinitomicaceae bacterium OX=2026728 GN=C L840_03025 PE=4 SV=1
MAKLYKDIDKSILEAIPNPTKEAYEIKVKIPEFTFLGVKEQPDFATVYLTMYPSDKIIELRSLKMYSFHLRDIVVSYERLINIMYDHLMEVYEPDRLRISMVCNPRGGISAKLAIDSDWEVRGGNEKFKDWVGGNNIDDWTVLM

SEQ ID NO: 45484 - protein, 144 aa, Crocinitomicaceae bacterium
  misc_feature (1)..(144): tr|A0A2E2TBZ9|A0A2E2TBZ9_9FLAO 7-cyano-7-deazaguanine r eductase OS=Crocinitomicaceae bacterium OX=2026728 GN=C L842_04060 PE=4 SV=1
MAKLYKEIDKGILKAIPNPSKEAYEIKVKIPEFTFLGVSEQPDFATVFITMYPSDKIIELKSLKMYSFHLRDIVVSYERLINIMYDHLMEVYSPERLRLSMICNPRGGISAKLAIDSDWEVRGGKEAFKDWTGSSNIDDWSVIM

SEQ ID NO: 45485 - protein, 144 aa, Crocinitomix sp.
  misc_feature (1)..(144): tr|A0A2W1NUT4|A0A2W1NUT4_9FLAO 7-cyano-7-deazaguanine r eductase OS=Crocinitomix sp. SM1701 OX=2219161 GN=DNU06 _01460 PE=4 SV=1
MPKLYQEIDKTILKAIPNPSKEAYEIKIKIPEFTFLGVKEQPDFATVFITMYPSNKIVELKSLKQYSFHLRDIVVSYERLINIFYDHLIEVYEPQRLRISMICNPRGGISAKLAIDSDWEARGGKEQFKDWMGRPDNDDWSVLM

SEQ ID NO: 45486 - protein, 138 aa, Crocosphaera chwakensis
  misc_feature (1)..(138): tr|A3IIN9|A3IIN9_9CHRO NADPH-dependent 7-cyano-7-deazag uanine reductase OS=Crocosphaera chwakensis CCY0110 OX= 391612 GN=queF PE=3 SV=1
MKDIAMTQVSKADTSKMKYGEREIEEGKLITFPNPRTGRYYTINITLPEFTCKCPFSGYPDFATLHLTYVPNETVVELKAIKLYINSYRDRYISHEESINQILDDFVAACDPLEATLKGDFYPRGNVHTVVEVNHKKR

SEQ ID NO: 45487 - protein, 134 aa, Crocosphaera subtropica
  misc_feature (1)..(134): tr|B1WY90|B1WY90_CROS5 NADPH-dependent 7-cyano-7-deazag uanine reductase OS=Crocosphaera subtropica (strain ATC C 51142 / BH68) OX=43989 GN=queF PE=3 SV=1
MTQVSNADTSTMKYGEREIEEGKLITFPNPRIGRYYTINITLPEFTCKCPFSGYPDFATLHLTYVPNEKVVELKAIKLYINSYRDRYISHEESVNQILDDFVAACDPLEATLKGDFNPRGNVHTVVEVHHKKDK

SEQ ID NO: 45488 - protein, 135 aa, Crocosphaera watsonii
  misc_feature (1)..(135): tr|T2IHD5|T2IHD5_CROWT NADPH-dependent 7-cyano-7-deazag uanine reductase OS=Crocosphaera watsonii WH 8502 OX=42 3474 GN=queF PE=3 SV=1
MTKAKNSENSSMKYGEREIEAGKLITFPNPRMGRYYTINVTLPEFTCKCPFSGYPDFATLHLTYVPDEKVVELKAIKLYINSYRDRYISHEESVNQILDDFVAACDPLEATLKGDFNPRGNVHTVIEVTHKKNRS

SEQ ID NO: 45489 - protein, 135 aa, Crocosphaera watsonii; identical to SEQ ID NO: 45488
  misc_feature (1)..(135): tr|T2ING7|T2ING7_CROWT NADPH-dependent 7-cyano-7-deazag uanine reductase OS=Crocosphaera watsonii WH 0005 OX=42 3472 GN=queF PE=3 SV=1

SEQ ID NO: 45490 - protein, 281 aa, Cronobacter condimenti
  misc_feature (1)..(281): tr|K7ZXX5|K7ZXX5_9ENTR NADPH-dependent 7-cyano-7-deazag uanine reductase OS=Cronobacter condimenti 1330 OX=1073 999 GN=queF PE=3 SV=1
MTSYENHQALHGLTLGKTTDYRDIYDASLLQPVPRSLNRDPLGLRADALPFHGADIWTMYELSWLNQNGLPQVAIGQVDINATSVNLVESKSFKLYLNSFNQTRFATLEDVRETLERDLSVCAQGEVSVTLRRLSDVEGEPIARLDGDCIDHQDIVITDYDFDANLLSGATGNEQVEETLVSHLLKSNCLITHQPDWGSVQIRYRGPQINRENLLRYLVSFRHHNEFHEQCVERIFNDIQCFCQPESLSVYARYTRRGGLDINPWRSSTDFQPANGRLARQ

SEQ ID NO: 45491 - protein, 281 aa, Cronobacter dublinensis
  misc_feature (1)..(281): tr|K8ASD8|K8ASD8_9ENTR NADPH-dependent 7-cyano-7-deazag uanine reductase OS=Cronobacter dublinensis 1210 OX=120 8656 GN=queF PE=3 SV=1
MNSYENHQALDGLTLGKSTDYRDIYDASLLQPVPRSLNRDPLGLRADALPFHGADIWTMYELSWLNQNGLPQVAIGQVEINAASVNLVESKSFKLYLNSFNQTRFASLEAVRETLERDLRACAQGEVSVTLRRLDEVEGEPVARFDGECIDNQDLVISSYDFDAALLSGAAGDEHVEETLVSHLLKSNCLITHQPDWGSVQIHYRGPKICREKLLRYLVSFRHHNEFHEQCVERIFNDIQRFCQPEALSVYARYTRRGGLDINPWRSNGSFQPATGRLARQ

SEQ ID NO: 45492 - protein, 281 aa, Cronobacter dublinensis
  misc_feature (1)..(281): tr|K8AZB7|K8AZB7_9ENTR NADPH-dependent 7-cyano-7-deazag uanine reductase OS=Cronobacter dublinensis 582 OX=1208 661 GN=queF PE=3 SV=1
MNSYENHQALDGLTLGKSTDYRDIYDASLLQPVPRSLNRDPLELRADALPFHGADIWTMYELSWLNQNGLPQVAIGQVEINAASVNLVESKSFKLYLNSFNQTRFASLEAVRETLERDLRACAQGEVSVTLRRLDEVEGEPVARFDGECIDNQDLVISSYDFDAALLSGAAGDEHVEETLVSHLLKSNCLITHQPDWGSVQIHYRGPKICREKLLRYLVSFRHHNEFHEQCVERIFNDIQRFCQPEALSVYARYTRRGGLDINPWRSNGSFQPATGRLARQ

SEQ ID NO: 45493 - protein, 281 aa, Cronobacter malonaticus
  misc_feature (1)..(281): tr|V5TW94|V5TW94_9ENTR NADPH-dependent 7-cyano-7-deazag uanine reductase OS=Cronobacter malonaticus OX=413503 G N=queF PE=3 SV=1
MTSYENHQALHGLTLGKSTDYRDVYDASLLQPVPRSLNRDPLGLRADALPFHGADIWTMYELSWLNRNGLPQVAIGQVEINATSVNLVESKSFKLYLNSFNQTRFDSLDAVRETLERDLRACAQGDVSVTLRRLEDVEGEPVARFSGDCIDNQDIEITDYEFDAALLSGAAGEETVEETLVSHLLKSNCLITHQPDWGSVQIRYRGPKICREKLLRYLVSFRHHNEFHEQCVERIFNDITRFCQPEQLSVYARYTRRGGLDINPWRSNCDFTPATGRLARQ

SEQ ID NO: 45494 - protein, 281 aa, Cronobacter malonaticus
  misc_feature (1)..(281): tr|A0A423XYX8|A0A423XYX8_9ENTR NADPH-dependent 7-cyano- 7-deazaguanine reductase OS=Cronobacter malonaticus OX= 413503 GN=queF PE=3 SV=1
MTSYENHQALHGLTLGKSTDYRDVYDASLLQPVPRSLNRDPLGLRADALPFHGADIWTMYELSWLNRNGLPQVAIGQVEINATSVNLVESKSFKLYLNSFNQTRFDSLDAVRETLERDLRACAQGDVSVTLRRLEDVEGEPVARFSGDCIDNQDIEITDYEFDAALLSGAAGEETVEETLVSHLLKSNCLITHQPDWGSVQIRYRGPKICREKLLRYLVSFRHHNEFHEQCVERIFNDIMRFCQPEQLSVYARYTRRGGLDINPWRSNGDFTPATGRLARQ

SEQ ID NO: 45495 - protein, 281 aa, Cronobacter muytjensii
  misc_feature (1)..(281): tr|A0A2T7ARY7|A0A2T7ARY7_9ENTR NADPH-dependent 7-cyano- 7-deazaguanine reductase OS=Cronobacter muytjensii OX=4 13501 GN=queF PE=3 SV=1
MTSYENHQALDGLTLGKSTDYRDIYDASLLQPVPRSLNRDPLGLRADALPFHGADIWTMYELSWLNQNGLPQVAIGQVEINAASVNLVESKSFKLYLNSFNQTRFASIDDVRETLERDLRACAQGDVSVTLRRLDEVEGELVARFEGECIDNQDLIITDYEFDAALLTDAAGEARVEETLVSHLLKSNCLITHQPDWGSVQIRYRGPKICREKLLRYLVSFRHHNEFHEQCVERIFNDIQRFCQPEALSVYARYTRRGGLDINPWRSNDSFTPATGRLARQ

SEQ ID NO: 45496 - protein, 281 aa, Cronobacter sakazakii
  misc_feature (1)..(281): sp|A7MR08|QUEF_CROS8 NADPH-dependent 7-cyano-7-deazagua nine reductase OS=Cronobacter sakazakii (strain ATCC BA A-894) OX=290339 GN=queF PE=3 SV=1
MTSYENHQALHGLTLGKSTDYRDVYDASLLQPVPRSLNRDPLGLRADALPFHGADIWTMYELSWLNRNGLPQVAIGQVEINATSVNLVESKSFKLYLNSFNQTQFESLEAVRETLERDLRACAQGDVSVTLRRLEDVEGEPVARFSGDCIDNQDINITDYEFDAALLSGAAGEETVEETLVSHLLKSNCLITHQPDWGSVQIHYRGPKICREKLLRYLVSFRHHNEFHEQCVERIFNDITRFCQPEQLSVYARYTRRGGLDINPWRSNGDFTPATGRLARQ

SEQ ID NO: 45497 - protein, 142 aa, Cronobacter sakazakii
  misc_feature (1)..(142): tr|K8CTX6|K8CTX6_CROSK NADPH dependent preQ0 reductase OS=Cronobacter sakazakii 696 OX=1208664 GN=BN128_2297 P E=4 SV=1
MKAWRRYAKQGDVTVTLRRLDEVEGEPVARLSGDCIDNQDINITDYEFDAALLSGAAGEETVEETLVSHLLKSNCLITHQPDWGSVQIHYRGPKICREKLLRYLVSFRHHNEFHEQCVERIFNDITRFCQPEQLSVYARYTR

SEQ ID NO: 45498 - protein, 281 aa, Cronobacter sp.
  misc_feature (1)..(281): tr|A0A5J6X6R8|A0A5J6X6R8_9ENTR NADPH-dependent 7-cyano- 7-deazaguanine reductase QueF OS=Cronobacter sp. JZ38 O X=1906275 GN=BJP61_05260 PE=4 SV=1
MTSYENHQALDGLTLGKSTDYRDIYDASLLQPVPRSLNRDPLGLRADALPFHGADIWTMYELSWLNQNGLPQVAIGQAEINAASVNLVESKSFKLYLNSFNQTRFASIDDVRETLERDLRACAQGDVSVTLRRLDEVEGEPVARFEGECIDNQDLIITDYEFDAALLTDAAGEARVEETLVSHLLKSNCLITHQPDWGSVQIRYRGPKICREKLLRYLVSFRHHNEFHEQCVERIFNDIQRFCQPEALSVYARYTRRGGLDINPWRSNDSFTPATGRLARQ

SEQ ID NO: 45499 - protein, 281 aa, Cronobacter turicensis
  misc_feature (1)..(281): tr|C9XZ51|C9XZ51_CROTZ NADPH-dependent 7-cyano-7-deazag uanine reductase OS=Cronobacter turicensis (strain DSM 18703 / LMG 23827 / z3032) OX=693216 GN=queF PE=3 SV=1
MTSYENHQALHGLTLGKSTDYRDVYDASLLQPVPRSLNRDPLGLRADALPFHGADIWTMYELSWLNRNGLPQVAIGQVEINATSVNLVESKSFKLYLNSFNQTRFDSLDAVRETLERDLRACAQGDVSVTLRRLEDVEGEPVARLNGDCIDNQDIVITDYEFDAALLSGAAGEARVEETLVSHLLKSNCLITHQPDWGSVQIRYCGPKICREKLLRYLVSFRHHNEFHEQCVERIFNDITRFCQPEQLSVYARYTRRGGLDINPWRSNGDFMPAIGRLARQ

SEQ ID NO: 45500 - protein, 281 aa, Cronobacter turicensis
  misc_feature (1)..(281): tr|A0A2T7B6R0|A0A2T7B6R0_9ENTR NADPH-dependent 7-cyano- 7-deazaguanine reductase OS=Cronobacter turicensis OX=4 13502 GN=queF PE=3 SV=1
MTSYENHQALHGLTLGKSTDYRDVYDASLLQPVPRSLNRDPLGLRADALPFHGADIWTMYELSWLNRNGLPQVAIGQVEINATSVNLVESKSFKLYLNSFNQTRFDSLDAVRETLERDLRACAQGDVSVTLRRLEDVEGEPVARLNGDCIDNQDIVITDYEFDAALLSGAAGEETVEETLVSHLLKSNCLITHQPDWGSVQIRYRGPKICREKLLRYLVSFRHHNEFHEQCVERIFNDITRFCQPEQLSVYARYTRRGGLDINPWRSNGDFMPATGRLARQ

SEQ ID NO: 45501 - protein, 281 aa, Cronobacter universalis
  misc_feature (1)..(281): tr|A0A376ETH3|A0A376ETH3_9ENTR NADPH-dependent 7-cyano- 7-deazaguanine reductase OS=Cronobacter universalis NCT C 9529 OX=1074000 GN=queF PE=3 SV=1
MTSYENHQALHGLTLGKSTDYRDVYDASLLQPVPRSLNRDPLGLRVDDLPFHGADIWTMYELSWLNRNGLPQVAIGQVEINATSVNLVESKSFKLYLNSFNQTRFDSLDAVRETLERDLLACAQGDVSVTLRRLEEVEGEPVARLDGDCIDNQDIVITDYEFDAALLSGAAGEERVEETLVSHLLKSNCLITHQPDWGSVQIRYRGPKICREKLLRYLVSFRHHNEFHEQCVERIFNDITRFCQPEQLSVYARYTRRGGLDINPWRSNGDFTPATGRLARQ

SEQ ID NO: 45502 - protein, 180 aa, Cryptobacterium curtum
  misc_feature (1)..(180): tr|C7ML01|C7ML01_CRYCD NADPH-dependent 7-cyano-7-deazag uanine reductase OS=Cryptobacterium curtum (strain ATCC 700683 / DSM 15641 / 12-3) OX=469378 GN=queF PE=3 SV=1
MPSQAAASSLVDSFQTEGRDAKAEGITLLGNAGTQYASDYDPSLLETFENKHADHDYMVTFRCPEFTTLCPITGQPDFATLYINYIPQVRMVESKSLKLYLCSFRNHGDFHEDVVNVIKDDLVELMEPKYLEVRGMFYPRGGISIYPFANWAHPRFGYQDIAQRRLFKQLSDLDRGDGAR

SEQ ID NO: 45503 - protein, 173 aa, Cryptobacterium sp.
  misc_feature (1)..(173): tr|R7CFS9|R7CFS9_9ACTN NADPH-dependent 7-cyano-7-deazag uanine reductase OS=Cryptobacterium sp. CAG:338 OX=1262 868 GN=queF PE=3 SV=1
MVNISHSSSTSRNDQEVSDLTLLGSRNNSYPDDYAPEVLETFVNKHQENDYFVKFNCPEFTSLCPITGQPDFATIYISYVPDVRMVESKSLKLYLFSFRNHGDFHEDCINIIMKDLIKIMDPRYIEVWGKFTPRGGISIDPYCNYGRPGTKWEQVAWERLSHHDLYPEVVDNR

SEQ ID NO: 45504 - protein, 292 aa, Culturomica sp.
  misc_feature (1)..(292): tr|A0A356DEZ8|A0A356DEZ8_9BACT NADPH-dependent 7-cyano- 7-deazaguanine reductase QueF OS=Culturomica sp. OX=192 6652 GN=DD657_03770 PE=4 SV=1
MQEESKLLGKEIAYPETYCPEILVAVPRRLNREIYGIDRPDSLFCGYDSWHCYEASFLTKQGLPVAGILKLVYASTSEFLVESKSLKLYLGSFNMICLGDSVAEGIAVFKATVARDLSALLHTSVETAFFQTLPDSRPFDFPEYTLLETLPRIAAASFSAYQENPAYLSENVTKYGGEMLVCSHLLKSNCKITHQPDWGSIYIRIKAAHLPDELSLLKYIVSLRDENHFHEEICEMTFKRLTDIFNPEILTVCCLYTRRGGIDICPVRANKAEFIPACLPRADILTASAFRQ

SEQ ID NO: 45505 - protein, 277 aa, Cupriavidus alkaliphilus
  misc_feature (1)..(277): tr|A0A329B0Q1|A0A329B0Q1_9BURK NADPH-dependent 7-cyano- 7-deazaguanine reductase OS=Cupriavidus alkaliphilus OX =942866 GN=queF PE=3 SV=1
MSLPEHSPLGKPSAYKTEYDATLLFPIPRQPKRTEIGLPQGRPVPFFGVDIWNAYELSWLNLKGKPQVALATFIIPSDTPNIIESKSFKLYLNSFNQTRIASPEALQQLLHHDLSEATGGTVQVRLVTEAELGTQKMGELDGLLLDRLDIEVDRYEPAPELLSADQEETPVEETLVSHLLKSNCLVTGQPDWGSVQIRYVGAPINQEGLLKYLISFRNHNEFHEQCVERIFMDVMRQCKPVKLAVYARYTRRGGLDINPFRTNFNTAWPDNKRNARQ

SEQ ID NO: 45506 - protein, 277 aa, Cupriavidus alkaliphilus
  misc_feature (1)..(277): tr|A0A2W7PP05|A0A2W7PP05_9BURK NADPH-dependent 7-cyano- 7-deazaguanine reductase OS=Cupriavidus alkaliphilus OX =942866 GN=queF PE=3 SV=1
MSLPEHSPLGKPSAYKTEYDATLLFPIPRQPKRTEIGLPEGRPVPFFGVDIWNAYELSWLNLKGKPQVALATFIIPSDTPNIIESKSFKLYLNSFNQTRIASPEALQQLLHHDLSEATGGTVQVRLVTEADLGTQKMGELDGLLLDRLDIEVDRYEPAPELLSADQEETPVEETLVSHLLKSNCLVTGQPDWGSVQIRYVGAPINQEGLLKYLISFRNHNEFHEQCVERIFMDVMRQCKPVKLAVYARYTRRGGLDINPFRTNFNTAWPDNKRNARQ

SEQ ID NO: 45507 - protein, 277 aa, Cupriavidus basilensis
  misc_feature (1)..(277): tr|A0A0C4Y4U8|A0A0C4Y4U8_9BURK NADPH-dependent 7-cyano- 7-deazaguanine reductase OS=Cupriavidus basilensis OX=6 8895 GN=queF PE=3 SV=1
MSLPEQSPLGKPSAYKTEYDPTLLFPIPRQPKRTEIGLAQGRALPFFGVDIWNAYELSWLNMKGKPQVALASFIIPADTPNIVESKSFKLYLNSFNQSKIASPEALQQLLHHDLSEATGGTVQVRLVTEADLGTQKMAELDGVQLDRLDIETDIYEPAPHLLHAAQDESPVEETLVSHLLKSNCLVTGQPDWGSVQIRYVGAPINQEGLLKYLISFRNHNEFHEQCVERIFTDVMRQCKPVKLAVYARYTRRGGLDINPFRTNFNTPWPDNRRNARQ

SEQ ID NO: 45508 - protein, 277 aa, Cupriavidus basilensis
  misc_feature (1)..(277): tr|H1S7I3|H1S7I3_9BURK NADPH-dependent 7-cyano-7-deazag uanine reductase OS=Cupriavidus basilensis OR16 OX=1127 483 GN=queF PE=3 SV=1
MSLPEHSPLGKPSAYKTEYDPTLLFPIPRQPKRTEIGLAEGRALPFFGVDIWNAYELSWLNMKGKPQVALASFIIPADTPNIVESKSFKLYLNAFNQSKIASPEALQQLLHHDLSEATGGTVQVRLVTEADLGTQKMAELDGVQLDRLDIETDIYEPAPHLLHAAQDESPVEETLVSHLLKSNCLVTGQPDWGSVQIRYVGAPINQEGLLKYLISFRNHNEFHEQCVERIFTDVMRQCKPVKLAVYARYTRRGGLDINPFRTNFNTPWPDNRRNARQ

SEQ ID NO: 45509 - protein, 277 aa, Cupriavidus campinensis
  misc_feature (1)..(277): tr|A0A556UH43|A0A556UH43_9BURK NADPH-dependent 7-cyano- 7-deazaguanine reductase OS=Cupriavidus campinensis OX= 151783 GN=queF PE=3 SV=1
MTLPEHSPLGKPSAYKTEYDPTLLFPIPRQPKRTEIGLAEGRALPFFGVDIWNAYEVSWLNLKGKPQVALATFIIPADTPNIVESKSFKLYLNSFNQSRIASAEALQQLLHHDLSEATGGTVQVRLVTEADLGTQKMGELDGLLLDRLDIETNIYEPDPTLLSADQDETPVEESLISHLLKSNCLVTGQPDWGSVQIRYVGAPIDQEGLLKYLISFRNHNEFHEQCVERIFTDVLRMCKPVKLAVYARYTRRGGLDINPFRTNFNTPWPDNRRNARQ

SEQ ID NO: 45510 - protein, 277 aa, Cupriavidus gilardii
  misc_feature (1)..(277): tr|A0A0M4LBX6|A0A0M4LBX6_9BURK NADPH-dependent 7-cyano- 7-deazaguanine reductase OS=Cupriavidus gilardii CR3 OX =1267562 GN=queF PE=3 SV=1
MTVPEHSPLGKVSAYKTEYDASLLFPIPRAPKRAEIGLPEGRAVPFFGVDIWNAYELSWLNPKGKPQVALASFIIPADTPNIIESKSFKLYLNSFNQTRLESPEALQQLLRQDLSEATGGAVQVRLTAEPDFARQQMGELDGLLLDRLDIETDIYEPAPQLLRADQEETPVEETLVSHLLKSNCLVTGQPDWGSVQIRYVGAPIDQEGLLKYLISFRNHNEFHEQCVERIFMDVLRQCKPVKLAVYARYTRRGGLDINPFRTNFNTPWPDNRRNARQ

SEQ ID NO: 45511 - protein, 277 aa, Cupriavidus gilardii
  misc_feature (1)..(277): tr|A0A5A8EMC2|A0A5A8EMC2_9BURK NADPH-dependent 7-cyano- 7-deazaguanine reductase OS=Cupriavidus gilardii OX=825 41 GN=queF PE=3 SV=1
MTVPEHSPLGKVSAYKTEYDASLLFPIPRAPKRAEIGLPDGRAVPFFGVDIWNAYELSWLNPKGKPQVALASFIIPADTPNIIESKSFKLYLNSFNQTRLESPEALQQLLRNDLSEATGGAVQVRLTAEPDFGRQQMGELDGLLLDRLDIETDIYEPAPQLLRADQEETPVEETLVSHLLKSNCLVTGQPDWGSVQIRYVGAPIDQEGLLKYLISFRNHNEFHEQCVERIFMDVLRQCKPVKLAVYARYTRRGGLDINPFRTNFNTPWPDNRRNARQ

SEQ ID NO: 45512 - protein, 277 aa, Cupriavidus metallidurans
  misc_feature (1)..(277): sp|Q1LRI7|QUEF_CUPMC NADPH-dependent 7-cyano-7-deazagua nine reductase OS=Cupriavidus metallidurans (strain ATC C 43123 / DSM 2839 / NBRC 102507 / CH34) OX=266264 GN=q ueF PE=3 SV=1
MTLPEHSPLGKPSAYKTEYDASLLFPIPRQPKRAEIGLPEGRALPFFGVDIWNAYEVSWLNLKGKPQVALATFIIPADTPNIVESKSFKLYLNSFNQTKIASPEALQQLLHHDLSEATGGTVQVRLVTEADLGTQKMGELDGLLLDRLDIETDIYEPDPTLLSAEQEESPVEETLVSHLLKSNCLVTGQPDWGSVQIRYVGAPIDQEGLLKYLISFRNHNEFHEQCVERIFTDVMRMCKPVKLAVYARYTRRGGLDINPFRTNYNTPWPDNRRNARQ

SEQ ID NO: 45513 - protein, 277 aa, Cupriavidus metallidurans; identical to SEQ ID NO: 45512
  misc_feature (1)..(277): tr|A0A132HGY7|A0A132HGY7_9BURK NADPH-dependent 7-cyano- 7-deazaguanine reductase OS=Cupriavidus metallidurans O X=119219 GN=queF PE=3 SV=1

SEQ ID NO: 45514 - protein, 277 aa, Cupriavidus nantongensis
  misc_feature (1)..(277): tr|A0A142JFH3|A0A142JFH3_9BURK NADPH-dependent 7-cyano- 7-deazaguanine reductase OS=Cupriavidus nantongensis OX =1796606 GN=queF PE=3 SV=1
MSLPEHSPLGKPSAYKAEYDATLLFPIPRQPKRTEIGLPEGRPVPFFGVDIWNAYELSWLNLKGKPQVALATFIIPSDTPNIIESKSFKLYLNSFNQTRIASPEALQQLLHHDLSEATGGTVQVRLVTEADLGTQKMGELDGLLLDRLDIEVDRYEPAPELLSADQQETPVEETLVSHLLKSNCLVTGQPDWGSVQIRYVGAPINQEGLLKYLISFRNHNEFHEQCVERIFMDVMRQCKPVKLAVYARYTRRGGLDINPFRTNFNTAWPDNKRNARQ

SEQ ID NO: 45515 - protein, 277 aa, Cupriavidus necator
  misc_feature (1)..(277): sp|Q0KEJ5|QUEF_CUPNH NADPH-dependent 7-cyano-7-deazagua nine reductase OS=Cupriavidus necator (strain ATCC 1769 9 / H16 / DSM 428 / Stanier 337) OX=381666 GN=queF PE=3 SV=1
MSLPEHSPLGKPSAYKTEYDASLLFPIPRQPKRTEIGLPEGKPVPFFGVDIWNAYELSWLNLKGKPQVALASFIIPSDTPNIIESKSFKLYLNSFNQTRIASPEALQQLLHHDLSEATGGTVQVRLVTEADLGKQKMGELDGLLLDRLDIEVDRYEPAPELLSADQQESPVEETLVSHLLKSNCLVTGQPDWGSVQIRYVGAPINQEGLLKYLISFRNHNEFHEQCVERIFMDVMRECKPVKLAVYARYTRRGGLDINPFRTNFNTAWPDNKRNARQ

SEQ ID NO: 45516 - protein, 277 aa, Cupriavidus necator
  misc_feature (1)..(277): tr|A0A1K0IQ25|A0A1K0IQ25_CUPNE NADPH-dependent 7-cyano- 7-deazaguanine reductase OS=Cupriavidus necator OX=1065 90 GN=queF PE=3 SV=1
MSLPEHSPLGKPSAYKTEYDASLLFPIPRQPKRTEIGLPEGKPVPFFGVDIWNAYELSWLNLKGKPQVALASFIIPSDTPNIIESKSFKLYLNSFNQTRIASPEALQQLLHHDLSEATGGTVQVRLVTEADLGTQKMGELDGLLLDRLDIEVDRYEPAPELLSADQEETPVEETLVSHLLKSNCLVTGQPDWGSVQIRYVGAPINQEGLLKYLISFRNHNEFHEQCVERIFMDVMRECKPVKLAVYARYTRRGGLDINPFRTNFNTAWPDNKRNARQ

SEQ ID NO: 45517 - protein, 277 aa, Cupriavidus oxalaticus
  misc_feature (1)..(277): tr|A0A375G3F9|A0A375G3F9_9BURK NADPH-dependent 7-cyano- 7-deazaguanine reductase OS=Cupriavidus oxalaticus OX=9 6344 GN=queF PE=3 SV=1
MSLPEHSPLGKPSAYKTEYDASLLFPIPRQPKRTEIGLPEGKPVPFFGVDIWNAYELSWLNLKGKPQVALATFIIPSDTPNIVESKSFKLYLNSFNQTKIASPEALQQLLHHDLSEATGGTVQVRLVTEADLGKQQMGELDGLLLDRLDIEVDRYEPAPELLFADQGETPVEETLVSHLLKSNCLVTGQPDWGSVQIRYVGAPINQEALLKYLISFRNHNEFHEQCVERIFMDVLRQCKPVKLAVYARYTRRGGLDINPFRTNFNTAWPDNKRNARQ

SEQ ID NO: 45518 - protein, 277 aa, Cupriavidus oxalaticus
  misc_feature (1)..(277): tr|A0A4P7L8T7|A0A4P7L8T7_9BURK NADPH-dependent 7-cyano- 7-deazaguanine reductase OS=Cupriavidus oxalaticus OX=9 6344 GN=queF PE=3 SV=1
MSLPEHSPLGKPSAYKTEYDASLLFPIPRQPKRTEIGLPEGKPVPFFGVDIWNAYELSWLNLKGKPQVALATFIIPSDTPNIVESKSFKLYLNSFNQTRIASPEALQQLLHHDLSEATGGTVQVRLVTEADLGKQQMGELDGLLLDRLDIEVDRYEPAPELLFANQEETPVEETLVSHLLKSNCLVTGQPDWGSVQIRYVGAPINQEALLKYLISFRNHNEFHEQCVERIFMDVLRQCKPVKLAVYARYTRRGGLDINPFRTNFNTAWPDNKRNARQ

SEQ ID NO: 45519 - protein, 277 aa, Cupriavidus pauculus
  misc_feature (1)..(277): tr|A0A2N5CJ92|A0A2N5CJ92_9BURK NADPH-dependent 7-cyano- 7-deazaguanine reductase OS=Cupriavidus pauculus OX=826 33 GN=queF PE=3 SV=1
MTLPEHSPLGKPSAYKTEYDPTLLFPIPRQPKRTEIGLPEGKALPFFGVDIWNAYEVSWLNLKGKPQVALATFIIPADTPNIVESKSFKLYLNSFNQSKIASAEALQQLLHHDLSEATGGTVQVRLVTESDLGTQKMGELDGLLLDRLDIETDVYEPDPTLLKADQDESPVEESLVSHLLKSNCLVTGQPDWGSVQIRYVGAPIDQEGLLKYLISFRNHNEFHEQCVERIFTDVMRMCKPVKLAVYARYTRRGGLDINPFRTNFNTPWPDNRRNARQ

SEQ ID NO: 45520 - protein, 277 aa, Cupriavidus pauculus
  misc_feature (1)..(277): tr|A0A3G8GWJ6|A0A3G8GWJ6_9BURK NADPH-dependent 7-cyano- 7-deazaguanine reductase OS=Cupriavidus pauculus OX=826 33 GN=queF PE=3 SV=1
MTLPEHSPLGKPSAYKTEYDPTLLFPIPRQPKRTEIGLAEGRALPFFGVDIWNAYEVSWLNLKGKPQVALATFIIPSDTPNIVESKSFKLYLNSFNQSRIASAEALQQLLHHDLSQATGGTVQVRLVTEADLGTQKMGELDGLLLDRLDIETDIYEPDASLLKADQEASPVEETLVSHLLKSNCLVTGQPDWGSVQIRYVGAPIDQEGLLKYLISFRNHNEFHEQCVERIFTDVLRMCKPVKLAVYARYTRRGGLDINPFRTNFNTPWPDNRRNARQ

SEQ ID NO: 45521 - protein, 277 aa, Cupriavidus pinatubonensis
  misc_feature (1)..(277): sp|Q475Y9|QUEF_CUPPJ NADPH-dependent 7-cyano-7-deazagua nine reductase OS=Cupriavidus pinatubonensis (strain JM P 134 / LMG 1197) OX=264198 GN=queF PE=3 SV=1
MSLPEHSPLGKPSAYKTEYDATLLFPIARQPKRTEIGLPAGKPVPFFGVDIWNAYEVSWLNMRGKPQVALATFIIPSDTPNIIESKSFKLYLNSFNQTKIASPEALQQLLHHDLSEATGGTVQVRLVTEADLGKQKMGELEGLLLDRLDIEVDRYEPAPDLLKADQQESPVEETLVSHLLKSNCLVTGQPDWGSVQIRYVGAPINQEGLLKYLISFRNHNEFHEQCVERIFMDVMRECKPVKLAVYARYTRRGGLDINPFRTNFNTPWPDNLRNARQ

SEQ ID NO: 45522 - protein, 281 aa, Cupriavidus plantarum
  misc_feature (1)..(281): tr|A0A316F2S0|A0A316F2S0_9BURK NADPH-dependent 7-cyano- 7-deazaguanine reductase OS=Cupriavidus plantarum OX=94 2865 GN=queF PE=3 SV=1
MSEPSNQPEHSPLGKPSAYKTEYDPSLLFPISRQPKRTEIGLPEGRPLPFFGVDLWNAYELSWLNLKGKPQVALASFIIPSDTPNIVESKSFKLYLNSFNQSKIASPEAVQQLLHHDLSEATGGTVQVRLVTESDLGKQKMGELDGLLLDRLDIETDVYEPDPSLLSAAQDESPVEETLVSHLLKSNCLVTGQPDWGSVQIRYVGAPIDQEGLLKYLISFRNHNEFHEQCVERIFTDIQRQCKPVKLAVYARYTRRGGLDINPFRTNFNTPWPDNRRNARQ

SEQ ID NO: 45523 - protein, 277 aa, Cupriavidus sp.; identical to SEQ ID NO: 45515
  misc_feature (1)..(277): tr|R7XC19|R7XC19_9BURK NADPH-dependent 7-cyano-7-deazag uanine reductase OS=Cupriavidus sp. GA3-3 OX=1229514 GN =queF PE=3 SV=1

SEQ ID NO: 45524 - protein, 277 aa, Cupriavidus sp.
  misc_feature (1)..(277): tr|A0A1D9GW60|A0A1D9GW60_9BURK NADPH-dependent 7-cyano- 7-deazaguanine reductase OS=Cupriavidus sp. USMAA2-4 OX =876364 GN=queF PE=3 SV=1
MSLPEHSPLGKPSAYKTEYDPTLLFPIPRQPKRTEIGLPEGKRPPFFGVDIWNAYELSWLNMKGKPQVALASFIIPAESPNIVESKSFKLYLNSFNQSKIASPEALQQLLHHDLSEAAGATVQVRLAAEGDFARQQMGELDGLLLDRLDIETDVYEPAPHLLRADQEAPPVEETLVSHLLKSNCLVTGQPDWGSVQIRYVGAPIDQEGLLKYLISFRNHNEFHEQCVERIFMDVLRQCKPVKLAVYARYTRRGGLDINPFRTNYNTPWPDNRRNARQ

SEQ ID NO: 45525 - protein, 277 aa, Cupriavidus taiwanensis
  misc_feature (1)..(277): sp|B2AGY8|QUEF_CUPTR NADPH-dependent 7-cyano-7-deazagua nine reductase OS=Cupriavidus taiwanensis (strain DSM 1 7343 / BCRC 17206 / CIP 107171 / LMG 19424 / R1) OX=977 880 GN=queF PE=3 SV=1
MSLPEHSPLGKPSAYKTEYDASLLFPIPRQPKRTEIGLPEGKPVPFFGVDIWNAYELSWLNLKGKPQVALATFIIPSDTPNIVESKSFKLYLNSFNQTRIASPEALQQLLHHDLSEATGGTVQVRLVTEADLGKQQMGELDGLLLDRLDIEVDRYEPAPELLFADQDETPVEETLVSHLLKSNCLVTGQPDWGSVQIRYVGAPINQEALLKYLISFRNHNEFHEQCVERIFMDVMRQCKPVKLAVYARYTRRGGLDINPFRTNFNTAWPDNKRNARQ

SEQ ID NO: 45526 - protein, 277 aa, Cupriavidus taiwanensis; identical to SEQ ID NO: 45506
  misc_feature (1)..(277): tr|A0A375EPR1|A0A375EPR1_9BURK NADPH-dependent 7-cyano- 7-deazaguanine reductase OS=Cupriavidus taiwanensis OX= 164546 GN=queF PE=3 SV=1

SEQ ID NO: 45527 - protein, 281 aa, [Curtobacterium] plantarum
  misc_feature (1)..(281): tr|A0A3M7UE95|A0A3M7UE95_9GAMM NADPH-dependent 7-cyano- 7-deazaguanine reductase OS=[Curtobacterium] plantarum OX=221276 GN=queF PE=3 SV=1
MTTHEQDQALSNLTLGKPTAYHDHYDNSLLQAVPRSLNREPLGLFPDSLPFTGSDIWTLYELSWLNSKGLPQVAVGEVVLDAQSRNLIESKSFKLYLNSFNQTRFADWGEVRQTLERDLSACAEGEARVALFRLNEVEGQPIGHFEGVCIDEQDIAIEDYRFNADYLADAAGSEIVEETLVSHLLKSNCLITNQPDWGSVMIRYKGPRIDREALLRYLVSFRQHNEFHEQCVERIFNDVMRFCHPEALTVYARYTRRGGLDINPWRTNVPFSPGFSRLVRQ

SEQ ID NO: 45528 - protein, 281 aa, Curvibacter putative
  misc_feature (1)..(281): tr|C9Y9D5|C9Y9D5_9BURK NADPH-dependent 7-cyano-7-deazag uanine reductase OS=Curvibacter putative symbiont of Hy dra magnipapillata OX=667019 GN=queF PE=3 SV=1
MNTPEQSQLGKSSAYVDRYDASLLFPIPRSGKRTEIGITGAAPFFGADMWTAFELSWLNTRGKPQVALVHFTIPAESPNIIESKSFKLYLNSFNNTQFADASDVLQRLRTDIAEAAWRGGPVQSVGVRLIAADQFDREPVYELDGLNLDRLDVECTRYQPAPELLSTAPAEEGVVSEVLVSNLLKSNCLVTGQPDWGSVQISYTGAQINQEGLLQYLISYRNHNEFHEQCVERIFMDIWSRCHPTKLTVYARYTRRGGLDINPFRTSHPQALPANTRTARQ

SEQ ID NO: 45529 - protein, 285 aa, Curvibacter sp.
  misc_feature (1)..(285): tr|A0A1F8VVU3|A0A1F8VVU3_9BURK NADPH-dependent 7-cyano- 7-deazaguanine reductase OS=Curvibacter sp. GWA2_64_110 OX=1797747 GN=queF PE=3 SV=1
MTTPENSLLGKAVPYVDQYDAALLYPIARIAKREEIGLNINEGATLPFLGADLWTAYELSWLNARGKPQVALAHITVPCETPNIVESKSFKLYLNSFNNTKFADAAEVQARIRADISEAVWRGSDKTGTVGVKLIGPELFDREPIHELDGLNLDRLEVECTQYTPAPELLTAAFDEQPVSEVLTSNLLKSNCLVTGQPDWASVQISYSGPQIEQEGLLQYIVSFRNHNEFHEQCVERIFMDVWTRCKPAKLTVYARYTRRGGLDINPWRTSHPQALPANVRTARQ

SEQ ID NO: 45530 - protein, 285 aa, Curvibacter sp.
  misc_feature (1)..(285): tr|A0A0R0MKJ8|A0A0R0MKJ8_9BURK NADPH-dependent 7-cyano- 7-deazaguanine reductase OS=Curvibacter sp. PAE-UM OX=1 714344 GN=queF PE=3 SV=1
MSQPEDSLLGKAAPYVDQYDAALLYPIPRLPKRQEIGLGIKEGATLPFMGADLWTAYELSWLNARGKPQVAIAQITVPCETPNIVESKSFKLYLNSYNNTKFADAAEVQTRIRADISEAVWRGSDKTGTVGVKIIAPELFDQQPIHELDGLSLDRLDVECTHYTPAPELLTAAFDEQPVSEVLTSSLLKSNCLVTGQPDWASVQIAYSGPQIEQAGLLQYLVSFRNHNEFHEQCVERIYMDLWTRCKPTKLTVYARYTRRGGLDINPWRTSHPQALPANVRTARQ

SEQ ID NO: 45531 - protein, 138 aa, Cuspidothrix issatschenkoi
  misc_feature (1)..(138): tr|A0A2S6CZ34|A0A2S6CZ34_9CYAN NADPH-dependent 7-cyano- 7-deazaguanine reductase OS=Cuspidothrix issatschenkoi CHARLIE-1 OX=2052836 GN=queF PE=3 SV=1
MNNFASETASPTSPEMKYGEREIAEGQLITFPNPRIGRRYDISITLPEFTCKCPFSGYPDFATIYITYIPDQRVVELKALKLYINSYRDRYISHEETANEILDDVVAACDPLEITVKADFTPRGNVHTVVEVKHQKAV

SEQ ID NO: 45532 - protein, 139 aa, Cyanobacteria bacterium
  misc_feature (1)..(139): tr|A0A350XAL3|A0A350XAL3_9CYAN NADPH-dependent 7-cyano- 7-deazaguanine reductase OS=Cyanobacteria bacterium UBA 11372 OX=2055768 GN=queF PE=3 SV=1
MSDDFSPESETEPVTAEMKYGERNIAEGKLITFPNPRLGRRYQINITLPEFTCKCPFSGYPDFATIHITYFPDQTVVELKALKLYINSYRDRYISHEESVNQILDDFVAACDPLEVEIKGDFSPRGNVHTTIEVNHKKS

SEQ ID NO: 45533 - protein, 136 aa, Cyanobacteria bacterium
  misc_feature (1)..(136): tr|A0A1Z9Q1A8|A0A1Z9Q1A8_9CYAN NADPH-dependent 7-cyano- 7-deazaguanine reductase OS=Cyanobacteria bacterium TME D229 OX=1986679 GN=queF PE=3 SV=1
MAIETEASTQTPHYGERAIADAELVCFDNPRPGRPYEVSIELPEFTCKCPFSGYPDFAVLRLTYQPGPRVVELKAIKLYVNSYRDRSISHEEVSNRILDDLVEACAPVWMQLEADFNPRGNVHTVVRVSHGTRLPC

SEQ ID NO: 45534 - protein, 129 aa, Cyanobacterium aponinum
  misc_feature (1)..(129): tr|K9Z363|K9Z363_CYAAP NADPH-dependent 7-cyano-7-deazag uanine reductase OS=Cyanobacterium aponinum (strain PCC 10605) OX=755178 GN=queF PE=3 SV=1
MTENQATEVKYGERAIEEGKLITFPNPRPGRVYNISVTLPEFTCKCPFSGYPDFATIYINYCPDEKVVELKAIKLYINSYRDRYISHEESINQILDDFVAAADPLSITIKGDFNPRGNVHTVVEVSHKK

SEQ ID NO: 45535 - protein, 129 aa, Cyanobacterium aponinum; identical to SEQ ID NO: 45534
  misc_feature (1)..(129): tr|A0A2G3P7P1|A0A2G3P7P1_9CHRO NADPH-dependent 7-cyano- 7-deazaguanine reductase OS=Cyanobacterium aponinum IPP AS B-1201 OX=2047986 GN=queF PE=3 SV=1

SEQ ID NO: 45536 - protein, 141 aa, Unknown
  misc_feature (1)..(141): tr|A0A0R2U657|A0A0R2U657_9CYAN NADPH-dependent 7-cyano- 7-deazaguanine reductase OS=cyanobacterium BACL30 MAG-1 20619-bin27 OX=1655601 GN=queF PE=3 SV=1
MSSSPASASASSLTQTPMYGERAIAEAELICFDNPRPGRAYEISIELPEFTCKCPFSGYPDFAVLRLIYQPGPRVVELKAIKLYVNSYRDRSISHEEVTNRILDDLVAATDPQWMQLEADFHPRGNVHTVVRASHGTRLAC

SEQ ID NO: 45537 - protein, 142 aa, Epithemia turgida
  misc_feature (1)..(142): tr|A0A077JF07|A0A077JF07_9CYAN NADPH-dependent 7-cyano- 7-deazaguanine reductase OS=cyanobacterium endosymbiont of Epithemia turgida isolate EtSB Lake Yunoko OX=12289 87 GN=queF PE=3 SV=1
MNQVTNSQASNFKFDSSAIRYGEQFIEEGKLITFPNPRTGRRYDINITLPEFTCKCPFSGYPDFANLYLTYIPDEKVVELKALKLYINGYRDLYISHEESINQILDDFVVACDPLEIVLKGDFNPRGNVHTVIQVCHHKQKG

SEQ ID NO: 45538 - protein, 142 aa, Rhopalodia gibberula
  misc_feature (1)..(142): tr|A0A2Z5T2D3|A0A2Z5T2D3_9CYAN NADPH-dependent 7-cyano- 7-deazaguanine reductase OS=cyanobacterium endosymbiont of Rhopalodia gibberula OX=1763363 GN=queF PE=3 SV=1
MNQVANSQSSKSKSDSSTIRYGERFIEEGKLITFPNPRIGRRYDINITLPEFTCKCPFSGYPDFANLYLTYVPDKKVVELKALKLYINRYRDLYVSHEESINQILDDFVMACDPLEVTLKGDFNPRGNIHTVIKVRHHKQKS

SEQ ID NO: 45539 - protein, 125 aa, Unknown
  misc_feature (1)..(125): tr|A0A2T4D2R1|A0A2T4D2R1_9CYAN NADPH-dependent 7-cyano- 7-deazaguanine reductase OS=cyanobacterium G8-9 OX=2137 193 GN=queF PE=3 SV=1
MKYGEKEIQEFDINAEENFWPNEHKKNYTINIELPEFMCLCPRSGYPDFATLKLAYEPDEKVIELKALKLYINSFMYRHISHENSANEIYDALYSKLKPKSMKLIADFNPRGNVHTVIEIDSCNN

SEQ ID NO: 45540 - protein, 131 aa, Cyanobacterium sp.
  misc_feature (1)..(131): tr|A0A1E5QVH3|A0A1E5QVH3_9CHRO NADPH-dependent 7-cyano- 7-deazaguanine reductase OS=Cyanobacterium sp. IPPAS B- 1200 OX=1562720 GN=queF PE=3 SV=1
MAEDKKEMMYGERAIAEGSLITFPNPRPGRVYNVSVTLPEFTCKCPFSGYPDFATIYINYSPDQKVVELKAIKLYINNYRDRYISHEECINQILDDFVEACEPLYMSVKGDFYPRGNVHTVIEVEHKKNPQ

SEQ ID NO: 45541 - protein, 131 aa, Cyanobacterium sp.
  misc_feature (1)..(131): tr|A0A2K8WP03|A0A2K8WP03_9CHRO NADPH-dependent 7-cyano- 7-deazaguanine reductase OS=Cyanobacterium sp. HL-69 OX =2054282 GN=queF2 PE=3 SV=1
MAEDKKEMMYGERAIAEGSLITFPNPRPGRVYNVSVTLPEFTCKCPFSGYPDFATIYINYSPDQKVVELKAIKLYINNYRDRYISHEECINQILDDFVEACDPLYMSVKGDFYPRGNVHTVIEVEHKKNPQ

SEQ ID NO: 45542 - protein, 131 aa, Cyanobacterium stanieri
  misc_feature (1)..(131): tr|K9YRR8|K9YRR8_CYASC NADPH-dependent 7-cyano-7-deazag uanine reductase OS=Cyanobacterium stanieri (strain ATC C 29140 / PCC 7202) OX=292563 GN=queF PE=3 SV=1
MAEDKKEMMYGERAIAEGSLITFPNPRPGRVYNISVTLPEFTCKCPFSGYPDFATIYINYSPDQKVVELKAIKLYINNYRDRYISHEESINQILDDFVEACDPLYISVKGDFYPRGNVHTVIEVEHRKNPQ

SEQ ID NO: 45543 - protein, 155 aa, Ornithocercus magnificus
  misc_feature (1)..(155): tr|A0A4Y3FQT8|A0A4Y3FQT8_9CYAN NADPH-dependent 7-cyano- 7-deazaguanine reductase OS=cyanobiont of Ornithocercus magnificus OX=2496102 GN=queF PE=3 SV=1
MPVAVTATVDYNVTKPLYHSLTTSIDHNRTQLYGEQSIAEAKIICFNNPYLGRSYEIAIELPEFTCLCPFSGYPDFAVLRLLYQPGPKVIELKSIKLYINSYRDRTISHEAVTNEIFDDLITACDPKWMQLEADFNPRGNVHTVLRVSHGSRQPC

SEQ ID NO: 45544 - protein, 138 aa, Cyanobium gracile; identical to SEQ ID NO: 44045
  misc_feature (1)..(138): tr|K9PAJ3|K9PAJ3_CYAGP NADPH-dependent 7-cyano-7-deazag uanine reductase OS=Cyanobium gracile (strain ATCC 2714 7 / PCC 6307) OX=292564 GN=queF PE=3 SV=1

SEQ ID NO: 45545 - protein, 136 aa, Cyanobium sp.
  misc_feature (1)..(136): tr|A0A081GPE7|A0A081GPE7_9CYAN NADPH-dependent 7-cyano- 7-deazaguanine reductase OS=Cyanobium sp. CACIAM 14 OX= 1496688 GN=queF PE=3 SV=1
MASGVADQTVTPLYGQRAIAEAQLICFTNPRQGRAYEVSIELPEFTCTCPFSGYPDFAVLRLLYQPGPRVLELKALKLYVNGYRDRAISHEEAANRILDDLVSACDPVWMQLEADFNPRGNVHTVVRVSHGSRQPC

SEQ ID NO: 45546 - protein, 138 aa, Cyanobium sp.
  misc_feature (1)..(138): tr|A0A182ATL1|A0A182ATL1_9CYAN NADPH-dependent 7-cyano- 7-deazaguanine reductase OS=Cyanobium sp. NIES-981 OX=1 851505 GN=queF PE=3 SV=1
MASPSGHDGQTRTPLYGERAIAEATLLCFDNPRPGRAYEVAITLPEFTCLCPFSGYPDFATLRLLYQPGPRVMELKAIKLYVNGYRDRAISHEEVANRLLDDFVAACEPVWMRLEADFNPRGNVHTVVRVSHGVRQSC

SEQ ID NO: 45547 - protein, 141 aa, Cyanobium usitatum
  misc_feature (1)..(141): tr|A0A2P7MYK1|A0A2P7MYK1_9CYAN NADPH-dependent 7-cyano- 7-deazaguanine reductase OS=Cyanobium usitatum str. Tou s OX=2116684 GN=queF PE=3 SV=1
MSSSPASASESSLTQTPMYGERAIAEAELICFDNPRLGRAYEISIELPEFTCKCPFSGYPDFAVLRLIYQPGPRVVELKAIKLYVNSYRDRSISHEEVTNRILDDLVAATDPQWMQLEADFHPRGNVHTVVRVSHGTRLAC

SEQ ID NO: 45548 - protein, 128 aa, Cyanosarcina cf.; identical to SEQ ID NO: 45298
  misc_feature (1)..(128): tr|A0A2T1FEP7|A0A2T1FEP7_9CHRO NADPH-dependent 7-cyano- 7-deazaguanine reductase OS=Cyanosarcina cf. burmensis CCALA 770 OX=2107697 GN=queF PE=3 SV=1

SEQ ID NO: 45549 - protein, 142 aa, Cyanothece sp.
  misc_feature (1)..(142): tr|B8HRW7|B8HRW7_CYAP4 NADPH-dependent 7-cyano-7-deazag uanine reductase OS=Cyanothece sp. (strain PCC 7425 / A TCC 29141) OX=395961 GN=queF PE=3 SV=1
MANLVESGQQHDGTIAISTELKYGERQIQEGQLITFPNPRPGRRYTIQITLPEFTCKCPFSGYPDFATIHVSYIPDQRVVELKAIKLYINSYRDRYISHEESVNQILDDLVTACDPLQISVKGDFAPRGNVHTVIEVEHQKA

SEQ ID NO: 45550 - protein, 142 aa, Cyanothece sp.
  misc_feature (1)..(142): tr|A0A3B8Y3T5|A0A3B8Y3T5_9CYAN NADPH-dependent 7-cyano- 7-deazaguanine reductase OS=Cyanothece sp. UBA12306 OX= 2055757 GN=queF PE=3 SV=1
MSQAANLYPSNIEPEQSGVKYGERLIETGQLITFPNPRIGRKYDISISLPEFTCKCPFSGYPDFATLYLTYVPDEKVVELKSLKLYINNYRDRYISHEESINQILDDFVAACSPLEANLKGDFNPRGNVHTVIEVSHRKEDN

SEQ ID NO: 45551 - protein, 129 aa, Cycloclasticus sp.
  misc_feature (1)..(129): tr|A0A1M6FNQ2|A0A1M6FNQ2_9GAMM NADPH-dependent 7-cyano- 7-deazaguanine reductase OS=Cycloclasticus sp. DSM 2716 8 OX=1884353 GN=queF PE=3 SV=1
MSTQPNTDLETFPNPNTERDYTIRIDTPEFTCLCPKTGQPDFATLTLEYVPNESCIELKSFKLYIWSYRDKGAFHEAVTNSILADLVKACEPRFMRLSAEFNVRGGVYTTVVAEHKDSNWEPSTPVQLP

SEQ ID NO: 45552 - protein, 129 aa, Cycloclasticus sp.
  misc_feature (1)..(129): tr|A0A1X1QLC1|A0A1X1QLC1_9GAMM NADPH-dependent 7-cyano- 7-deazaguanine reductase OS=Cycloclasticus sp. symbiont of Bathymodiolus heckerae OX=1284675 GN=queF PE=3 SV=1
MSTQPNTDLETFPNPNAERDYTIRIDTPEFTCLCPKTGQPDFATLTLEYVPNESCIELKSFKLYVWSYRDKGAFHEAVTNSILDDLVKACAPRFMRLSAEFNVRGGVYTTVVAEHKADDWEPSSPVQLP

SEQ ID NO: 45553 - protein, 129 aa, Cycloclasticus zancles; identical to SEQ ID NO: 45551
  misc_feature (1)..(129): tr|S5T9F7|S5T9F7_9GAMM NADPH-dependent 7-cyano-7-deazag uanine reductase OS=Cycloclasticus zancles 78-ME OX=119 8232 GN=queF PE=3 SV=1

SEQ ID NO: 45554 - protein, 142 aa, Cylindrospermopsis raciborskii
  misc_feature (1)..(142): tr|A0A1S2A0T7|A0A1S2A0T7_9CYAN NADPH-dependent 7-cyano- 7-deazaguanine reductase OS=Cylindrospermopsis racibors kii MVCC14 OX=940191 GN=queF PE=3 SV=1
MSHSVSNILPSENPVKEVKYGEREIEEGKLITFPNPRVGREYTIDITLPEFTCKCPFSGYPDFATIHITYIPDQRVVELKALKLYINSYRDKYISHEEVTNQILDDMVIACAPLEMTIKADFSPRGNVHMVVEVKYKKGAVS

SEQ ID NO: 45555 - protein, 142 aa, Cylindrospermopsis raciborskii
  misc_feature (1)..(142): tr|A0A1X4G3S3|A0A1X4G3S3_9CYAN NADPH-dependent 7-cyano- 7-deazaguanine reductase OS=Cylindrospermopsis racibors kii CENA303 OX=1170769 GN=queF PE=3 SV=1
MSHSVSNILPSENPVKEVKYGEREIEEGKLITFPNPRVGREYTIDITLPEFTCKCPFSGYPDFATIHIIYIPDQRVVELKALKLYINSYRDKYISHEEVANQVLDDMVVACAPLEMTVKADFSPRGNVHMVVEVKHKKGVAL

SEQ ID NO: 45556 - protein, 142 aa, Cylindrospermopsis sp.
  misc_feature (1)..(142): tr|A0A0R0M2R0|A0A0R0M2R0_9CYAN NADPH-dependent 7-cyano- 7-deazaguanine reductase OS=Cylindrospermopsis sp. CR12 OX=1747196 GN=queF PE=3 SV=1
MSHSVSNILPSEDPVKEVKYGEREIEEGKLITFPNPRVGREYTIDITLPEFTCKCPFSGYPDFATIHIAYIPDQRVVELKALKLYINSYRDKYISHEEVTNQILDDLVIACAPLEMTVKADFSPRGNVHMVVEVKHKKGAAS

SEQ ID NO: 45557 - protein, 136 aa, Cylindrospermum sp.
  misc_feature (1)..(136): tr|A0A1Z4QL00|A0A1Z4QL00_9NOST NADPH-dependent 7-cyano- 7-deazaguanine reductase OS=Cylindrospermum sp. NIES-40 74 OX=2005457 GN=queF PE=3 SV=1
MSNLSPETLSQPSPEIKYGEREIAEGKLITFPNPRVGRRYDINITLPEFTCKCPFSGYPDFATIYITYVPDERVVELKALKLYINSYRDRYISHEESANQILDDFVAACDPLEVTVKTDFTPRGNVHTVVEVKHQK

SEQ ID NO: 45558 - protein, 136 aa, Cylindrospermum stagnale
  misc_feature (1)..(136): tr|K9WVP1|K9WVP1_9NOST NADPH-dependent 7-cyano-7-deazag uanine reductase OS=Cylindrospermum stagnale PCC 7417 O X=56107 GN=queF PE=3 SV=1
MSNSSPETLSQPSQEMKYGEREIAEGQLITFPNPRVGRRYDVNITLPEFTCKCPFSGYPDFATIYISYVPDERVVELKALKLYINSYRDRYISHEETANQILDDFVAACDPLAVTVKTDFTPRGNVHTVVEVKHQK

SEQ ID NO: 45559 - protein, 139 aa, Cystobacter ferrugineus
  misc_feature (1)..(139): tr|A0A1L9BAI1|A0A1L9BAI1_9DELT NADPH-dependent 7-cyano- 7-deazaguanine reductase OS=Cystobacter ferrugineus OX= 83449 GN=queF PE=3 SV=1
MASQRAPSQPTQPTKELQTFPNPAPDRDYEIAFDVPEFTCLCPLTGQPDFARFRIRYVPDTLCVELKSLKLYMWSYRNEGAFHEKVTNTIADDIVRAIQPRKLTVEGDFFVRGGIGTVITVTHEKPARGAKKSAPARRK

SEQ ID NO: 45560 - protein, 138 aa, Cystobacter fuscus
  misc_feature (1)..(138): tr|A0A250JIN0|A0A250JIN0_9DELT NADPH-dependent 7-cyano- 7-deazaguanine reductase OS=Cystobacter fuscus OX=43 GN =queF PE=3 SV=1
MASQRAPSQPTQPTKELQTFPNPAPDRDYEIAFDVPEFTCLCPLTGQPDFARFRIRYVPDTLCVELKSLKLYMWSYRNEGAFHEKVTNTIADDIVRAIQPRKLTVEGDFFVRGGIGTVITVTHEKPARGAKKSPARRK

SEQ ID NO: 45561 - protein, 139 aa, Cystobacter fuscus
  misc_feature (1)..(139): tr|S9QIE5|S9QIE5_9DELT NADPH-dependent 7-cyano-7-deazag uanine reductase OS=Cystobacter fuscus DSM 2262 OX=1242 864 GN=queF PE=3 SV=1
MASQRAPSQPTQPTKELQTFPNPAPDRDYEIAFDVPEFTCLCPLTGQPDFARFRIRYVPDTLCVELKSLKLYMWSYRDEGAFHEKVTNTIADDIVRAIQPRKLTVEGDFFVRGGIGTVITVTHEKPARSAKKAAPARRK

SEQ ID NO: 45562 - protein, 296 aa, Cytophaga xylanolytica
  misc_feature (1)..(296): tr|A0A2W7NHZ7|A0A2W7NHZ7_9BACT 7-cyano-7-deazaguanine r eductase OS=Cytophaga xylanolytica OX=990 GN=LX69_00507 PE=4 SV=1
MTPTVPIEATLLGKHVEYPATYAPQVLVAVPRQLNRTQYAIDDKNLPFTGYDVWHAWEAGFLTRRGLPVAGVLKIIYPANNPVIVESKSLKLYLNSFNMERLGNTPEDGIREFKLTVQRDLATLLQTDDVRVELFTTQPGHLPFDFHGFKILETLHGADQVDFAHYTDTPALLRTDYDRPCELRLATHLLRSNCKITHQPDWGSAYIHIKANVTPNFMSILQYIVSLRNENHFHEEICEMLFTRLHEAFNPEQLMVVCIYTRRGGIDICPVRASHAFLIPPSLTSHHTLSHKLLRQ

SEQ ID NO: 45563 - protein, 113 aa, Cytophagaceae bacterium
  misc_feature (1)..(113): tr|A0A4Q3NYW2|A0A4Q3NYW2_9BACT NADPH-dependent 7-cyano- 7-deazaguanine reductase OS=Cytophagaceae bacterium OX= 2026729 GN=queF PE=3 SV=1
MPQLETFPNPAPGRDYTITHICPEFTSVCPKTGQPDFATIELEYIPEATCIELKALKLYYYSFRNEGIYYEAVTNRLLDELVEACAPRWMRITARFAVRGGISSVIVAETAPR

SEQ ID NO: 45564 - protein, 129 aa, Cytophagales bacterium
  misc_feature (1)..(129): tr|A0A2M6GIX2|A0A2M6GIX2_9BACT 7-cyano-7-deazaguanine r eductase (Fragment) OS=Cytophagales bacterium CG18_big_ fil_WC_8_21_14_2_50_42_9 OX=1973956 GN=COW65_09185 PE=4 SV=1
METLEKIDIKEQLELSYKQALEHTQSALDYMAEYGIKPDGKFGLFLPPATRQKEIHRLPYQHTAKQVVTYETETGEFSALCPFSGLPDFGILRVEYIPGSFIMELKSLKYYILSWRNIGAAQEDITAYI

SEQ ID NO: 45565 - protein, 42 aa, Cytophagales bacterium
  misc_feature (1)..(42): tr|A0A2M6GH60|A0A2M6GH60_9BACT Uncharacterized protein OS=Cytophagales bacterium CG18_big_fil_WC_8_21_14_2_50_ 42_9 OX=1973956 GN=COW65_12760 PE=4 SV=1
MTAYIYEDLKKALQDPHYLKITTVYNVRGGINTTCSVDSHNQ

SEQ ID NO: 45566 - protein, 99 aa, Cytophagia bacterium
  misc_feature (1)..(99): tr|A0A2E5GV34|A0A2E5GV34_9BACT NADPH-dependent 7-cyano- 7-deazaguanine reductase OS=Cytophagia bacterium OX=202 6730 GN=queF PE=3 SV=1
  misc_feature (37)..(37): Xaa can be any naturally occurring amino acid
  misc_feature (47)..(47): Xaa can be any naturally occurring amino acid
  misc_feature (77)..(77): Xaa can be any naturally occurring amino acid
MEQYIKIYTKEFIAVCPFSGLPDIAKIKIEYYPEGKXALELKSLKYXLISFKNVGIYQEEVTKRIFNDLKEVLKTKXIRITSKYNVRGGLYTTCIEGKL

SEQ ID NO: 45567 - protein, 136 aa, Cytophagia bacterium
  misc_feature (1)..(136): tr|A0A2E5GW14|A0A2E5GW14_9BACT NADPH-dependent 7-cyano- 7-deazaguanine reductase OS=Cytophagia bacterium OX=202 6730 GN=queF PE=3 SV=1
  misc_feature (8)..(8): Xaa can be any naturally occurring amino acid
  misc_feature (128)..(128): Xaa can be any naturally occurring amino acid
MKKTYKDXDKKLLKAIPNPDKKTYEIKIKQPELTFLGVYEQPDFASLYVLFYPDKTIIELKSLKMYLQQYRDLIISYERLINVLYDDLIKVYKPKRLRIVLDCNPRGGISSRLTQDSDWKSLGGKEEXKNYNEDVW

SEQ ID NO: 45568 - protein, 134 aa, Dactylococcopsis salina
  misc_feature (1)..(134): tr|K9YY47|K9YY47_DACSA NADPH-dependent 7-cyano-7-deazag uanine reductase OS=Dactylococcopsis salina PCC 8305 OX =13035 GN=queF PE=3 SV=1
MAENTTSTQNLKYGEREIVEGELTTFPNPRPGRRYNVDISLPEFTCKCPFSGYPDFATIKIRYMPDQRIVELKAIKLYINSYRDRYISHEEAVNQILDDFVSACNPLEVTVTGDFSPRGNVHTVVEVHHQQPRV

SEQ ID NO: 45569 - protein, 156 aa, Dankookia rubra
  misc_feature (1)..(156): tr|A0A4R5QA21|A0A4R5QA21_9PROT NADPH-dependent 7-cyano- 7-deazaguanine reductase OS=Dankookia rubra OX=1442381 GN=queF PE=3 SV=1
MTEATTDISGLTLLGHHAQAPASPEAAVLERVPNPHPGVQYLVRFAAPEFTSLCPMTGQPDFAHLVIDYIPQDWLVESKSLKLYLGAFRNHGAFHEACTVSIARRLVETLSPHWLRIGGYWYPRGGIPIDVFYQTGQAPAGVWVPDQGVQPYRGRG

SEQ ID NO: 45570 - protein, 283 aa, Dechloromonas aromatica
  misc_feature (1)..(283): sp|Q47DJ9|QUEF_DECAR NADPH-dependent 7-cyano-7-deazagua nine reductase OS=Dechloromonas aromatica (strain RCB) OX=159087 GN=queF PE=3 SV=1
MTLTTTHIADPSHASPLGKATEYQSHYAPELLYPIPRQLKRSELGITDANLPFVGEDLWNAYELSWLNSKGKPVVAVGTFRVPANSPNLIESKSFKLYLNSFNQSSFDNIAAVSATMSRDLSAAAGSPIIVTLEPLSASPLASIGTPDGILLDELDITCDRYQPEPALLATLPGENVEETLYSHLLKSNCLVTGQPDWAMVVIRYRGKPIDRAGLLRYIVSFRNHNEFHEQCVERIFSDIRVRCQPEVLAVHARYTRRGGLDINPFRSTGDYAAPDNTREIRQ

SEQ ID NO: 45571 - protein, 279 aa, Dechloromonas denitrificans
  misc_feature (1)..(279): tr|A0A133XK69|A0A133XK69_9RHOO NADPH-dependent 7-cyano- 7-deazaguanine reductase OS=Dechloromonas denitrificans OX=281362 GN=queF PE=3 SV=1
MSPANDPSILSPLGKPTEYRADYAPELLYPIPRQLKRDELGISGAALPFVGEDLWNAYEVSWLNPKGKPVVALATFRVPADSPNLVESKSFKLYLNSFNQSVFADEDAVETTLARDLSAAAGAEIGVKVAVLGSRPQVSVAYPAGELLDDLDIACDSYQPAPELLHATDGPLVEETLYSHLLKSNCLVTGQPDWAMVVIRYRGRPIDRAGLLRYIVSFRGHNEFHEQCVERIYCDLTEHCAPEALAVYARYTRRGGLDINPFRSSGEFAAPDNTREVRQ

SEQ ID NO: 45572 - protein, 277 aa, Dechloromonas sp.
  misc_feature (1)..(277): tr|A0A5C7ZJK6|A0A5C7ZJK6_9RHOO NADPH-dependent 7-cyano- 7-deazaguanine reductase OS=Dechloromonas sp. OX=191721 8 GN=queF PE=3 SV=1
MSHDPSLLSPLGKATEYRADYAPELLFPIPRQIKRDELGIAGDALPFVGEDLWNAYELSWLTPSGKPAVALASFRFPADSPMLVESKSFKLYLNSFNQTVFDDKAAVLATLVADLSAAAGAPVSAEIALLSEQPPVVVGYPQGILLDDLDLACDRYQPAPELLGVSDWAEVEETLYSHLLKSNCLVTGQPDWAMVVIRYRGRPIDRAGLLRYIVSFRNHNEFHEQCVERIYCDIRRHCQPSALAVHARYTRRGGLDINPFRSSGGFPAPDNTREARQ

SEQ ID NO: 45573 - protein, 282 aa, Dechloromonas sp.
  misc_feature (1)..(282): tr|A0A3B7A763|A0A3B7A763_9RHOO NADPH-dependent 7-cyano- 7-deazaguanine reductase OS=Dechloromonas sp. HYN0024 O X=2231055 GN=queF PE=3 SV=1
MNSPNDTTDPSHASPLGKTTEYQSHYAPTLLYPIPRQLKRSELGIADNALPFVGEDLWNAYELSWLNPRGKPVVAVGTFRVPADSPNLIESKSFKLYLNSLNQTCFADADTVTATLARDLSAAAGKPVDVQLEPLSQTPRAVIGIPQGVCLDDLDIVCDRYQPAPDLLTTQAGDIVDETLYSHLLKSNCLVTGQPDWAMVVIRYRGQPIDRAGLLRYIVSFRDHNEFHEQCVERIFTDIQKHCAPEKLAVHARYTRRGGLDINPFRSTGDYAAPDNTREIRQ

SEQ ID NO: 45574 - protein, 154 aa, Defluviimonas sp.
  misc_feature (1)..(154): tr|A0A059ING2|A0A059ING2_9RHOB NADPH-dependent 7-cyano- 7-deazaguanine reductase OS=Defluviimonas sp. 20V17 OX= 1417296 GN=queF PE=3 SV=1
MSGTDVSGLTQLGTSVEQPASPEEAVLERVPSGHSGQDYVVRFTAPEFTSLCPMTGQPDFAHIVIDYVPGDWLVESKSLKLFLTSFRNHGSFHEDCTMKVATRLVDLLEPRWLRIGAYWYPRGGIPIDVFWQTGAPPEGVWIPDQGVAPYRGRG

SEQ ID NO: 45575 - protein, 154 aa, Dehalobacter sp.
  misc_feature (1)..(154): tr|T0I3N7|T0I3N7_9FIRM NADPH-dependent 7-cyano-7-deazag uanine reductase OS=Dehalobacter sp. UNSWDHB OX=1339256 GN=queF PE=3 SV=1
MKNKETEGLSLLGSGQTRYVFDYDSDILESFANKYPDNNYFVRLNCPEFTSLCPITGQPDFGTMIINYIPDQKLVESKSLKLYLFSFRNHGGFHEDVVNIIMKDLIRLLEPRYIEVIGEFSPRGGISIHPYSNYGQPDSKWVEFAVKRLLKYGK

SEQ ID NO: 45576 - protein, 154 aa, Dehalobacter sp.
  misc_feature (1)..(154): tr|A0A4V6P5T9|A0A4V6P5T9_9FIRM NADPH-dependent 7-cyano- 7-deazaguanine reductase OS=Dehalobacter sp. 12DCB1 OX= 2070364 GN=queF PE=3 SV=1
MKNKETEGLSLLGSGQTYYVFDYDPAILESFANKHPDNDYFVRLNCPEFTSLCPITGQPDFGTMIINYIPDQKLVESKSLKLYLFSFRNHGDFHEDVVNIIMKDLIRLLEPRYIEVIGEFSPRGGIAIHPYSNYGQPDSKWIEFATKRLLKYGK

SEQ ID NO: 45577 - protein, 139 aa, Dehalococcoidales bacterium
  misc_feature (1)..(139): tr|A0A2D6WKM1|A0A2D6WKM1_9CHLR NADPH-dependent 7-cyano- 7-deazaguanine reductase OS=Dehalococcoidales bacterium OX=2026733 GN=queF PE=3 SV=1
MSADKYAGRRFDSQIKEAIDVDVLEAIPFDYPGSATEVLYETEEFTCVCPWSGLPDFARLIIRYTPAHSLVELKSLKYYLTSYRNVGILQEHAVNRILQDLVELVKPPSMVVEAEYKERGSLKSKVIAKYSRDTSHPSK

SEQ ID NO: 45578 - protein, 133 aa, Dehalococcoidales bacterium
  misc_feature (1)..(133): tr|A0A2D6J295|A0A2D6J295_9CHLR NADPH-dependent 7-cyano- 7-deazaguanine reductase OS=Dehalococcoidales bacterium OX=2026733 GN=queF PE=3 SV=1
MDKYASRSFDVQKEDAIDLAVLETVSFDYPGSATEVVYDTEEFTSVCPWTGLPDFARLVIRYIPGRFLVELKSLKYYLTSYRNVGILQEHAVNRILQDLVQLLDPVSMVVEAEYRERGGMKAKAVASYQKEHS

SEQ ID NO: 45579 - protein, 142 aa, Dehalococcoidia bacterium
  misc_feature (1)..(142): tr|A0A523V267|A0A523V267_9CHLR NADPH-dependent 7-cyano- 7-deazaguanine reductase OS=Dehalococcoidia bacterium O X=2026734 GN=queF PE=3 SV=1
MTVDKYATRRYDIQGEEAIDVEVLEAIPFQYPESGTEIVYETDEFTFVCPWTGLPDFARLAIRYVPDNLLVELKSLKYYLTSYRNVGILQEHAVNRVLENLVQLLKPVSMVIEAEYRERGGLKTRATARYDSTKGKEAADES

SEQ ID NO: 45580 - protein, 132 aa, Dehalococcoidia bacterium
  misc_feature (1)..(132): tr|A0A2E5IKL9|A0A2E5IKL9_9CHLR NADPH-dependent 7-cyano- 7-deazaguanine reductase OS=Dehalococcoidia bacterium O X=2026734 GN=queF PE=3 SV=1
MRKWSETSILKKIDNPTSEAYEIKIHAPEITFIGAEAQPDFAVANITFYPDQSVIELKSLKQYFYQFRDTRISYERIINTIYDDLMDIYSPKRIRMVMEFNVRGGISSKLTIDSDWKVRGGKEEFNDWAKAE

SEQ ID NO: 45581 - protein, 157 aa, Deinococcus actinosclerus
  misc_feature (1)..(157): tr|A0A0U4C3B5|A0A0U4C3B5_9DEIO NADPH-dependent 7-cyano- 7-deazaguanine reductase OS=Deinococcus actinosclerus O X=1768108 GN=queF PE=3 SV=1
MTNVTAGADCGPQNPGFDRRYDVQGLDAIDVAVLGTFPHVREDDPVRYPGEPMQIEIVTDEFSPVCPWSGLPDFGRLEIRYLPREACVELKSLKYYLTSYRFVGIYHEHATRRVLADLVNLLKPLSMEIRCDYGMRGGLNTICTVKYVAPDHQPQGA

SEQ ID NO: 45582 - protein, 136 aa, Deinococcus cellulosilyticus
  misc_feature (1)..(136): tr|A0A511N5U7|A0A511N5U7_9DEIO NADPH-dependent 7-cyano- 7-deazaguanine reductase OS=Deinococcus cellulosilyticu s NBRC 106333 = KACC 11606 OX=1223518 GN=queF PE=3 SV=1
MSEEHNNPQLVENLTMLGRKVTDGEGKLEVFPSPKSKNLKEVTLYTEEIYAHCPVTGQPDFYSCKLTYWPDEACVESKSVKLYFQGLRDAGIFCEHLSDKIARDFFEALNPHAVRVELIQRPRGGISITAVSELKR

SEQ ID NO: 45583 - protein, 155 aa, Deinococcus deserti
  misc_feature (1)..(155): tr|C1CXM3|C1CXM3_DEIDV NADPH-dependent 7-cyano-7-deazag uanine reductase OS=Deinococcus deserti (strain VCD115 / DSM 17065 / LMG 22923) OX=546414 GN=queF PE=3 SV=1
MTTTPPCQPGFDRRYDVQGLDAIDVAVLDTFAYVRQDDPAAYPGEPMDIEIITDEFSPVCPWSGLPDFGRLEIRYQPREKCVELKSLKYYLTSYRFVGIYHEHATRRLLADLTQLLDPLSMTIRCDYGMRGGLNTVCTVRYVAPERREDALDPQD

SEQ ID NO: 45584 - protein, 152 aa, Deinococcus deserti
  misc_feature (1)..(152): tr|C1CXH5|C1CXH5_DEIDV NADPH-dependent 7-cyano-7-deazag uanine reductase OS=Deinococcus deserti (strain VCD115 / DSM 17065 / LMG 22923) OX=546414 GN=queF PE=3 SV=1
MTTTPPCQPGFDRRYDVQGLDAIDVAVLDTFAYVRQDDPAAYPGEPMDIEIITDEFSPVCPWSGLPDFGRLEIRYQPREKCVELKSLKYYLTSYRFVGIYHEHATRRLLADLTRLLDPLSMTIRCDYGMRGGLNTVCTVRYVAPDQAGGTAK

SEQ ID NO: 45585 - protein, 151 aa, Deinococcus ficus
  misc_feature (1)..(151): tr|A0A221SYB7|A0A221SYB7_9DEIO NADPH-dependent 7-cyano- 7-deazaguanine reductase OS=Deinococcus ficus OX=317577 GN=queF PE=3 SV=1
MTASPPAPAGFDRRYDVQGLDAIDVAILDTFPLTREDDLQRYPGQPMEIEIVTDEFSPVCPWSGLPDFGRLEIRYLPRDRCVELKSLKYYLTSYRFVGVYHEHATRRLLADLTKLLDPLSLTIRCDYGMRGGLNTVCTVKYVAADHPQAGQ

SEQ ID NO: 45586 - protein, 134 aa, Deinococcus gobiensis
  misc_feature (1)..(134): tr|H8GTZ0|H8GTZ0_DEIGI NADPH-dependent 7-cyano-7-deazag uanine reductase OS=Deinococcus gobiensis (strain DSM 2 1396 / JCM 16679 / CGMCC 1.7299 / I-0) OX=745776 GN=que F PE=3 SV=1
MQGLDAIDVAVLGTFPNVRDDDPVRYPGEPMQVEIVTDEFSPVCPWSGLPDFGRLEIKYLPRASCVELKSLKYYLTSYRFVGIYHEHATRRVLADLVALLDPLSMEIRCDYGMRGGLNTICTVRYVAPDHTPAR

SEQ ID NO: 45587 - protein, 155 aa, Deinococcus grandis
  misc_feature (1)..(155): tr|A0A117DMK2|A0A117DMK2_9DEIO NADPH-dependent 7-cyano- 7-deazaguanine reductase OS=Deinococcus grandis OX=5749 8 GN=queF PE=3 SV=1
MTNVTAGADCGPQNPGFDRRYDVQGLDAIDVAVLGTFPHVREDDPVRYPGEPMQIEIVTDEFSPVCPWSGLPDFGRLEIRYLPREACVELKSLKYYLTSYRFVGIYHEHATRRVLADLVNLLKPLSMEIRCDYGMRGGLNTICTVKYVAPDHQGA

SEQ ID NO: 45588 - protein, 154 aa, Deinococcus hopiensis
  misc_feature (1)..(154): tr|A0A1W1V7L7|A0A1W1V7L7_9DEIO NADPH-dependent 7-cyano- 7-deazaguanine reductase OS=Deinococcus hopiensis KR-14 0 OX=695939 GN=queF PE=3 SV=1
MKTTAEKPAQQGFDRRYDVQGLDAIDVAVLDTFAYVREDDLAAYPGEPMEIEITTDEFSPVCPWSGLPDFGQLHIRYLPRDRCVELKSLKYYLTSYRFVGIYHEHATRRLLADLVKLLDPLKMEVRCDYGMRGGLNTVCTVRYAAPAPDAVQEG

SEQ ID NO: 45589 - protein, 135 aa, Deinococcus indicus
  misc_feature (1)..(135): tr|A0A246BEX3|A0A246BEX3_9DEIO NADPH-dependent 7-cyano- 7-deazaguanine reductase OS=Deinococcus indicus OX=2235 56 GN=queF PE=3 SV=1
MQGLDAIDVAVLGTFPHVREDDPVRYPGEPMQIEIVTDEFSPVCPWSGLPDFGRLEIRYLPREACVELKSLKYYLTSYRFVGIYHEHATRRVLADLVNLLNPLSMEIRCDYGMRGGLNTICTVKYVAPDHQPQGA

SEQ ID NO: 45590 - protein, 147 aa, Deinococcus maricopensis
  misc_feature (1)..(147): tr|E8U3S2|E8U3S2_DEIML NADPH-dependent 7-cyano-7-deazag uanine reductase OS=Deinococcus maricopensis (strain DS M 21211 / LMG 22137 / NRRL B-23946 / LB-34) OX=709986 G N=queF PE=3 SV=1
MTTTTDAPARGFDRRYDVQGLDAIDVAVLDTFPAIREDDTSHYPGEPIEIVISTDEFSPVCPWSGLPDFGKLEIRYVPRDTCVELKSLKYYLTSYRFVGIYHEHATRRVLADLVRLLDPHRMTITADYGVRGGINTICTAQYTAPAR

SEQ ID NO: 45591 - protein, 160 aa, Deinococcus peraridilitoris
  misc_feature (1)..(160): tr|L0A2Z1|L0A2Z1_DEIPD NADPH-dependent 7-cyano-7-deazag uanine reductase OS=Deinococcus peraridilitoris (strain DSM 19664 / LMG 22246 / CIP 109416 / KR-200) OX=937777 GN=queF PE=3 SV=1
MTIQEPQNQENRTAAPQQQGFERRYDVRGLDAIDTQVLGTFAHVREDDRSVYPGEPIEIVIATDEFSPVCPWSGLPDFGKLEIRYVPRAECVELKSLKYYLTSYRFVGIYHEHATRRVLADLVKLLDPLSMTITCDYGVRGGINTVVTARYTADDAARRK

SEQ ID NO: 45592 - protein, 155 aa, Deinococcus proteolyticus
  misc_feature (1)..(155): tr|F0RP00|F0RP00_DEIPM NADPH-dependent 7-cyano-7-deazag uanine reductase OS=Deinococcus proteolyticus (strain A TCC 35074 / DSM 20540 / JCM 6276 / NBRC 101906 / NCIMB 13154 / VKM Ac-1939 / CCM 2703 / MRP) OX=693977
MTGQMQKDCNGFDRRYDVQGLDAIDVAVLDTFPAVREDDPVDYPGEPSEIVITTDEFSPVCPWSGLPDFGRLEIRYVPREKCVELKSLKYYLTSYRFVGIYHEHATRRVLADLVKLLDPLRLSIDCDYGLRGGIRTVVKANYVAEDQKTAEQKAQ

SEQ ID NO: 45593 - protein, 155 aa, Deinococcus radiophilus
  misc_feature (1)..(155): tr|A0A431W5X8|A0A431W5X8_9DEIO NADPH-dependent 7-cyano- 7-deazaguanine reductase OS=Deinococcus radiophilus OX= 32062 GN=queF PE=3 SV=1
MTQTEPTPAATSAKDCGGFDRRYDVQGLDAIDVAVLDTFAAIREDDPVRYPGEPSEIVISTDEFSPVCPWSGLPDFGRLEIRYVPREKCVELKSLKYYLTSYRFVGIYHEHATRRVLADLVALLDPLRLSIDCDYGLRGGIRTAVKANYVAEDQK

SEQ ID NO: 45594 - protein, 157 aa, Deinococcus soli; identical to SEQ ID NO: 45581
  misc_feature (1)..(157): tr|A0A0F7JLH9|A0A0F7JLH9_9DEIO NADPH-dependent 7-cyano- 7-deazaguanine reductase OS=Deinococcus soli Cha et al. 2016 OX=1309411 GN=queF PE=3 SV=1

SEQ ID NO: 45595 - protein, 157 aa, Deinococcus sp.
  misc_feature (1)..(157): tr|A0A418RED6|A0A418RED6_9DEIO NADPH-dependent 7-cyano- 7-deazaguanine reductase OS=Deinococcus sp. RM OX=23163 59 GN=queF PE=3 SV=1
MTNVTAGAHCGPQNPGFDRRYDVQGLDAIDVAVLGTFPHVREDDPVRYPGEPMQIEIVTDEFSPVCPWSGLPDFGRLEIRYLPRESCVELKSLKYYLTSYRFVGIYHEHATRRVLADLVNLLNPLSMEIRCDYGMRGGLNTICTVKYVAPDHQPKGA

SEQ ID NO: 45596 - protein, 156 aa, Deinococcus sp.
  misc_feature (1)..(156): tr|A0A1T1BHM4|A0A1T1BHM4_9DEIO NADPH-dependent 7-cyano- 7-deazaguanine reductase OS=Deinococcus sp. LM3 OX=1938 608 GN=queF PE=3 SV=1
MNTPATAGTDCGPQNPGFDRRYDVQGLDAIDTAVLGTFEHVRVDDPVRYPGEPMQIEIVTDEFSPVCPWSGLPDFGRLEIRYLPRETCVELKSLKYYLTSYRFVGIYHEHATRRVLADLVNLLNPLSMEIRCDYGMRGGLNTICTVRYVAPDHQGA

SEQ ID NO: 45597 - protein, 151 aa, Deinococcus wulumuqiensis
  misc_feature (1)..(151): tr|A0A345IJ67|A0A345IJ67_9DEIO NADPH-dependent 7-cyano- 7-deazaguanine reductase OS=Deinococcus wulumuqiensis O X=980427 GN=queF PE=3 SV=1
MTTPPPNQAGFDRRYDVQGLDAIDVAVLDTFPYVREDDAAPYVGSPMDIEIVTDEFSPVCPWSGLPDFGRLEIRYQPREKCVELKSLKYYLTSYRFVGIYHEHATRRLLSDLVGLLDPLRLDIRCDYGMRGGLNTVCTVRYVAEDQQAGQP

SEQ ID NO: 45598 - protein, 146 aa, Deinococcus yavapaiensis
  misc_feature (1)..(146): tr|A0A318S8Q4|A0A318S8Q4_9DEIO NADPH-dependent 7-cyano- 7-deazaguanine reductase OS=Deinococcus yavapaiensis KR -236 OX=694435 GN=queF PE=3 SV=1
MTTQEAPAQGFARRYDVQGLDAIDTQVLDTFEHVREDDLSPYPGEPIEIVIATDEFSPVCPWSGLPDFGKLEIRYVPRDKCVELKSLKYYLTSYRFVGIYHEHATRRVLADLVKLLDPLSMTVTADYGVRGGINTVVTAKYTAPGK

SEQ ID NO: 45599 - protein, 282 aa, Delftia acidovorans
  misc_feature (1)..(282): sp|A9BNL9|QUEF_DELAS NADPH-dependent 7-cyano-7-deazagua nine reductase OS=Delftia acidovorans (strain DSM 14801 / SPH-1) OX=398578 GN=queF PE=3 SV=1
MNTPEQSQLGKSSAYIDQYAPSLLFPLPRAPKREEIGVQGSQMPFFGADLWTAFELSWLNLRGKPQVALVHFTIPCETPNLIESKSFKLYLNSFNNTRLADAAEVQARLRTDLAEALWRGSEQKGSIGVKIIGLDRFDQEMVQELDGLLLDRLDVECTQYQPAPELLHANHEEAPVTETLVSHLLKSNCLVTGQPDWGSVQIRYSGAQIDQEGLLQYLVSFRNHNEFHEQCVERIFMDIWTRCRPLKLSVYARYTRRGGLDINPFRTSHPGALPANVRSARQ

SEQ ID NO: 45600 - protein, 282 aa, Delftia acidovorans
  misc_feature (1)..(282): tr|A0A2W5HWX7|A0A2W5HWX7_DELAC NADPH-dependent 7-cyano- 7-deazaguanine reductase OS=Delftia acidovorans OX=8086 6 GN=queF PE=3 SV=1
MNTPEQSQLGKSSAYIDQYAPSLLFPLPRAPKREEIGIQGSQMPFFGADLWTAFELSWLNLRGKPQVALVHFTIPCETPNLIESKSFKLYLNSFNNTRLADAAEVQARLRTDLAEALWRGSEQKGSIGVKIIGLDRFDQEMVQELDGLLLDRLDVECTQYQPAPELLHANHEEAPVTETLVSHLLKSNCLVTGQPDWGSVQIRYSGAQIDQEGLLQYLVSFRNHNEFHEQCVERIFMDIWTRCRPIKLSVYARYTRRGGLDINPFRTSHPGALPANVRSARQ

SEQ ID NO: 45601 - protein, 282 aa, Delftia lacustris; identical to SEQ ID NO: 45600
  misc_feature (1)..(282): tr|A0A1H3GS16|A0A1H3GS16_9BURK NADPH-dependent 7-cyano- 7-deazaguanine reductase OS=Delftia lacustris OX=558537 GN=queF PE=3 SV=1

SEQ ID NO: 45602 - protein, 282 aa, Delftia sp.
  misc_feature (1)..(282): tr|A0A1C7LH90|A0A1C7LH90_9BURK NADPH-dependent 7-cyano- 7-deazaguanine reductase OS=Delftia sp. JD2 OX=469553 G N=queF PE=3 SV=1
MNTPEQSQLGKSSAYIDQYAPSLLFPLPRAPKREEIGIQGSQMPFFGADLWTAFELSWLNLRGKPQVALVHFTIPCETPNLIESKSFKLYLNSFNNTRLPDATEVQARLRTDLAEALWRGSEQKGSIGVKIIGLDRFDQEMVQELDGLLLDRLDVECTQYQPAPELLRANHEEGPVTETLVSHLLKSNCLVTGQPDWGSVQIRYSGAQIDQEGLLQYLVSFRNHNEFHEQCVERIFMDIWTRCRPLKLSVYARYTRRGGLDINPFRTSHPGALPANVRSARQ

SEQ ID NO: 45603 - protein, 282 aa, Delftia sp.
  misc_feature (1)..(282): tr|A0A210W473|A0A210W473_9BURK NADPH-dependent 7-cyano- 7-deazaguanine reductase OS=Delftia sp. K82 OX=1472718 GN=queF PE=3 SV=1
MNTPEQSQLGKSSAYIDQYAPSLLFPLPRAPKREEIGIQGSQMPFFGADLWTAFELSWLNLRGKPQVALVHFTIPCETPNLIESKSFKLYLNSFNNTRLADAAEVQARLRTDLAEALWRGSEQKGSIGVKIIGLDRFDQEMVQELDGLLLDRLDVECTQYQPAPELLRANHEEGPVTETLVSHLLKSNCLVTGQPDWGSVQIRYSGAQIDQEGLLQYLVSFRNHNEFHEQCVERIFMDIWTRCRPLKLSVYARYTRRGGLDINPFRTSHPGSLPANVRSARQ

SEQ ID NO: 45604 - protein, 282 aa, Delftia tsuruhatensis
  misc_feature (1)..(282): tr|A0A072T4A6|A0A072T4A6_9BURK NADPH-dependent 7-cyano- 7-deazaguanine reductase OS=Delftia tsuruhatensis OX=18 0282 GN=queF PE=3 SV=1
MNTPEQSQLGKSSAYIDQYAPSLLFPLPRAPKREEIGIQGSQMPFFGADLWTAFELSWLNLRGKPQVALVHFTIPCETPNLIESKSFKLYLNSFNNTRLSDAAEVQARLRTDLAEALWRGSEQKGSIGVKIIGLDRFDQEMVQELDGLLLDRLDVECTQYQPAPELLHANHEEAPVTETLVSHLLKSNCLVTGQPDWGSVQIRYSGAQIDQEGLLQYLVSFRNHNEFHEQCVERIFMDIWTRCRPIKLSVYARYTRRGGLDINPFRTSHPGALPANVRSARQ

SEQ ID NO: 45605 - protein, 282 aa, Delftia tsuruhatensis; identical to SEQ ID NO: 45600
  misc_feature (1)..(282): tr|A0A1D8J8K4|A0A1D8J8K4_9BURK NADPH-dependent 7-cyano- 7-deazaguanine reductase OS=Delftia tsuruhatensis OX=18 0282 GN=queF PE=3 SV=1

SEQ ID NO: 45606 - protein, 108 aa, Unknown
  misc_feature (1)..(108): tr|A0A1V4MEA8|A0A1V4MEA8_9DELT NADPH-dependent 7-cyano- 7-deazaguanine reductase OS=delta proteobacterium MLS_D OX=1775673 GN=queF PE=3 SV=1
METIENKFRERDYTVTMRFPEFTCLCPMTSQPDFAEIIIEYIPDELLVELKSLKLYLNGYRDRGIFHEEAVNSIMRDFVAAVQPKQAVVTGHFNVRGGIYTTVTVRHP

SEQ ID NO: 45607 - protein, 124 aa, Unknown
  misc_feature (1)..(124): tr|A0A1V4MRL4|A0A1V4MRL4_9DELT NADPH-dependent 7-cyano- 7-deazaguanine reductase OS=delta proteobacterium ML8_D OX=1775672 GN=queF PE=3 SV=1
MKYGEKKIQGAELESWPNPYPERDYTIEISFPEFTCLCPRSGYPDFATIKIIYVPDQFIVELKSLKLYLNDYRDRYISHEEATNRIFSDLMKILSPRTIKLEGDFHPRGNVHTVIRVEGGSNAG

SEQ ID NO: 45608 - protein, 133 aa, Deltaproteobacteria bacterium
  misc_feature (1)..(133): tr|A0A509LKU2|A0A509LKU2_9DELT NADPH-dependent 7-cyano- 7-deazaguanine reductase OS=Deltaproteobacteria bacteri um OX=2026735 GN=queF PE=3 SV=1
MENKSYVTNYKIEDPSIVKTDLLEPIEYAYKSKRSIDITIKQPEYTSVCPMTGLPDNGCITINYRPDETIVELKSLKYYLLQYRNVGMFYEHVVNKILDDLVHILNPLRMEVTGEFTPRGGVSSIATAVYEKK

SEQ ID NO: 45609 - protein, 118 aa, Deltaproteobacteria bacterium
  misc_feature (1)..(118): tr|A0A1F9LJF0|A0A1F9LJF0_9DELT NADPH-dependent 7-cyano- 7-deazaguanine reductase OS=Deltaproteobacteria bacteri um RIFOXYA2_FULL_55_11 OX=1797898 GN=queF PE=3 SV=1
MATAAGKKLETFPNPRPGRDYEISMECPEFTCVCPRTGQPDFATIRIRYVPDALCIELKSLKLYLWSFRGEGAFHEDVINRILDDLVQACRPRSMTVVGDFNVRGGIHTVVTADYKAK

SEQ ID NO: 45610 - protein, 166 aa, Dendrosporobacter quercicolus
  misc_feature (1)..(166): tr|A0A1G9QSH1|A0A1G9QSH1_9FIRM NADPH-dependent 7-cyano- 7-deazaguanine reductase OS=Dendrosporobacter quercicol us OX=146817 GN=queF PE=3 SV=1
MTQAKQEKLAGLTLLGNQGVGYSYEYSPGILEAFNNRHPENDYWVKFNCPEFTSLCPITGQPDFAAIYINYLPDVKMVESKSLKLYLVSFRNHGGFHEDVVNIIMKDLVALLQPRFLEVWGKFLPRGGISIDPYCNYGRPGTKYQELAWFRMQHHDLLAMEKVDNR

SEQ ID NO: 45611 - protein, 138 aa, Denitratisoma sp.
  misc_feature (1)..(138): tr|A0A518U7Y8|A0A518U7Y8_9PROT NADPH-dependent 7-cyano- 7-deazaguanine reductase OS=Denitratisoma sp. DHT3 OX=1 981880 GN=queF PE=3 SV=1
MSTQPGKTLETFPNPAPHRDYQIHMEIPEFTCLCPKTGQPDFAVLTLDYIADKLCVELKSLKLYTWSFRDEGHFHEDVTNRILDDLAKTLKPRFMRLTARFYVRGGIFTNVVAEHRKKGWKPAPRVELAEFDGQSNTR

SEQ ID NO: 45612 - protein, 163 aa, Denitrobacterium detoxificans
  misc_feature (1)..(163): tr|A0A172RZ90|A0A172RZ90_9ACTN NADPH-dependent 7-cyano- 7-deazaguanine reductase OS=Denitrobacterium detoxifica ns OX=79604 GN=queF PE=3 SV=1
MREKEIEGITLLGNQGTKYATDYDPSVLETFENKHPDRDYMVTFRCPEFTTLCPITGQPDFATLYINYVPNVRMVESKALKLYLFSFRNHGDFHEDVCNIIVNDLVKLMEPKYIEVRGMFYPRGGISIYPFANWAHPDFGYQEIARERMFAQLSDLDKGDGAR

SEQ ID NO: 45613 - protein, 280 aa, Denitromonas halophilus
  misc_feature (1)..(280): tr|A0A557SDU7|A0A557SDU7_9RHOO NADPH-dependent 7-cyano- 7-deazaguanine reductase OS=Denitromonas halophilus OX= 1629404 GN=queF PE=3 SV=1
MTDTPTPHGAEASPLGRSTAYRNTYAPELLFPVDRAPKRAEIGVGETLPFYGEDLWNAYELSWLNARGKPVVAMGEFRVPAVSPRLIESKSLKLYLNSFNASAFDDMAEVEAVIARDLSAAAGAPVSVQLQSLHVAARQVSSLPGTLIDDHEVDITDYHPAPTLLSVEAGAAPVSETLVSHLLKSNCLVTGQPDWATVYVNYTGAPIDRAGLLRYIVSFREHNEFHEQCVERMFCDLMARCAPSRLEVWARYTRRGGLDINPWRSSVAGAPPLNQGDPRQ

SEQ ID NO: 45614 - protein, 280 aa, Denitromonas halophilus
  misc_feature (1)..(280): tr|A0A557QPG9|A0A557QPG9_9RHOO NADPH-dependent 7-cyano- 7-deazaguanine reductase OS=Denitromonas halophilus OX= 1629404 GN=queF PE=3 SV=1
MTDTPTPHGAEASPLGRSTAYRNTYAPELLFPVDRAPKRAEIGVGETLPFHGEDLWNAYELSWLNARGKPVVAMGEFRVPAVSPCLIESKSLKLYLNSFNASRFDDMAEVEAVIARDLSAAAGAPVSVALQSLHVASRQVTSLPGTLIDDLEVDIVDYHPAPSLLGADAGAAPVSETLVSHLLKSNCLVTGQPDWATVYVNYTGAPIDRAGLLRYIVSFREHNEFHEQCVERMFCDLMARCGPSRLEVWARYTRRGGLDINPWRSSVAGAPPLNQGDPRQ

SEQ ID NO: 45615 - protein, 138 aa, Desertifilum sp.
  misc_feature (1)..(138): tr|A0A1E5QL99|A0A1E5QL99_9CYAN NADPH-dependent 7-cyano- 7-deazaguanine reductase OS=Desertifilum sp. IPPAS B-12 20 OX=1781255 GN=queF PE=3 SV=1
MVEKYGDRAINAAANSPLEIWPNPAPKHDYLIHIEHPEFTALCPRSGYPDFGTMVFDYYPGEWVVELKAFKLYINSFRQESISHEAVVNCIADKLEAELQPKAMRVIGDFMRRGNIKTTITVYRGEGMHFPEYRANLL

SEQ ID NO: 45616 - protein, 138 aa, Desmospora activa
  misc_feature (1)..(138): tr|A0A2T4ZBX6|A0A2T4ZBX6_9BACL NADPH-dependent 7-cyano- 7-deazaguanine reductase OS=Desmospora activa DSM 45169 OX=1121389 GN=queF PE=3 SV=1
MAEINVDHSKYQNIRFDIQDESAIMTDILETIPYEYPGKDIEVEIPTSEFTSVCPWSGLPDFAEITISFVPGRHLIEMKSLKYYLTSYRNVGIYQEHATRRILEELVAVSKPKWMKVEALWNARGGLGTRVVAEWTGE

SEQ ID NO: 45617 - protein, 139 aa, Desmospora sp.
  misc_feature (1)..(139): tr|F5SDT1|F5SDT1_9BACL NADPH-dependent 7-cyano-7-deazag uanine reductase OS=Desmospora sp. 8437 OX=997346 GN=fo lE2 PE=3 SV=1
MGNVKVDHSKYQNIRFDTQDESVILTEILETIPYEYPGKEVEVEIPTAEFTSVCPWSGLPDFAEIKITFVPDRHLIEMKSLKYYLTSYRNVGIYQEHATRRILEELAAVAKPKRMRVEALWNPRGGLGTRVVAEFPEKS

SEQ ID NO: 45618 - protein, 155 aa, Desulfacinum hydrothermale
  misc_feature (1)..(155): tr|A0A1W1XH83|A0A1W1XH83_9DELT NADPH-dependent 7-cyano- 7-deazaguanine reductase OS=Desulfacinum hydrothermale DSM 13146 OX=1121390 GN=queF PE=3 SV=1
MTHQIHEELSLLGKKVETPKRPEDAVLETFPNPHPDTDYVVRLTAPEFTTICPVTGQPDFAVLLVDYVPGPRLVESKAFKLFLGSFRNHGTFHEACTVTIHKRLQEVLDPKYLRVVGLWYARGGITIDVVVETGSLPPNCTPLPLGKTSYRGGRE

SEQ ID NO: 45619 - protein, 155 aa, Desulfacinum infernum
  misc_feature (1)..(155): tr|A0A1M4Z1D4|A0A1M4Z1D4_9DELT NADPH-dependent 7-cyano- 7-deazaguanine reductase OS=Desulfacinum infernum DSM 9 756 OX=1121391 GN=queF PE=3 SV=1
MTEKIYEQLSLLGKKVETPERPEDAVLETFPNPHPDTDYVVRLTAPEFTTICPITGQPDFAVIVVDYVPGPRLVESKAFKLFLGSFRNHGTFHEACTVYIHKRLQEAMDPKYLRVVGLWYARGGITIDVVVETGTLPPNCTPLPIGRTSYRGGRE

SEQ ID NO: 45620 - protein, 139 aa, Desulfallas gibsoniae
  misc_feature (1)..(139): tr|R4KLI7|R4KLI7_9FIRM NADPH-dependent 7-cyano-7-deazag uanine reductase OS=Desulfallas gibsoniae DSM 7213 OX=7 67817 GN=queF PE=3 SV=1
MSQFEFEILGKSVREPCRKLEVFPKPVGVQKVILESDEVTSLCPVTGQPDWETVMIEYLPNKFCIESKSLKLYLWSYRNEGVFCEALAAQIAEDVDAACKPFGCKVTVTQKPRGGITITAKAVVGKFHPIEHEENLILG

SEQ ID NO: 45621 - protein, 325 aa, Desulfamplus magnetovallimortis
  misc_feature (1)..(325): tr|A0A1W1H825|A0A1W1H825_9DELT NADPH-dependent 7-cyano- 7-deazaguanine reductase OS=Desulfamplus magnetovallimo rtis OX=1246637 GN=queF PE=3 SV=1
MKQEITKKNIPLGDKVTHSRTYNPDHLFPVRRSLAREEIGIHEDTKLPFGGWDIWNAYEISWLDMKGKPVVAIGEITFPCTTKNIVESKSLKLYLNSFNQSRFESPEQVLTIMEKDLSACVTGRSEGEEDYPGEGRSEGEEDYLGNGTMYINGVRRKEKGTMDLNNAVSVTLRLPSLFHDMKIEAPCGESIDDLDVEITHYKVEPSFLRVMEGGRVVEQTIHSNLLRTNCPVTEQPDWGSVIIDYKGKEIDRKGLLAYIVSFREHTGFHENCVERMFMDIMEMCCPEKLSVYARFTRRGGIDINPFRSNCGNDSLRYENGRLARQ

SEQ ID NO: 45622 - protein, 129 aa, Desulfatibacillum aliphaticivorans
  misc_feature (1)..(129): tr|B8FGI2|B8FGI2_DESAL NADPH-dependent 7-cyano-7-deazag uanine reductase OS=Desulfatibacillum aliphaticivorans OX=218208 GN=queF PE=3 SV=1
MSEKVKLRADGPETVDASVLETIDYQYQTSRDIDIRIDQPEFTSVCPMTGLPDFGTIIINYCPDKKIVELKSLKYYFLQYRNVGIFYEHVVNRILEDLVKALEPKRLEVVGDFTPRGGISTQVSAKYVK

SEQ ID NO: 45623 - protein, 129 aa, Desulfatibacillum alkenivorans
  misc_feature (1)..(129): tr|A0A1M6WR12|A0A1M6WR12_9DELT NADPH-dependent 7-cyano- 7-deazaguanine reductase OS=Desulfatibacillum alkenivor ans DSM 16219 OX=1121393 GN=queF PE=3 SV=1
MSEKVKLRADGPETIDASVLETIDYQYQTSRDIDIRIDQPEFTSVCPMTGLPDFGTITVNYCPDKKIVELKSLKYYFLQYRNVGIFYEHVVNRILEDLVKALEPKRLEVAGDFTPRGGISTQVSAKYVK

SEQ ID NO: 45624 - protein, 134 aa, Desulfatitalea sp.
  misc_feature (1)..(134): tr|A0A0F2R2X6|A0A0F2R2X6_9DELT NADPH-dependent 7-cyano- 7-deazaguanine reductase OS=Desulfatitalea sp. BRH_c12 OX=1629708 GN=queF PE=3 SV=1
MATQKNHDVPYTIGTIESVRPDMLEPIEYAYKGRRDIVITIHQPEFTSVCPMTGLPDFGTITVRYRPNASIIELKSLKFYLLQYRNVGIFYEHVVNRILDDLVTVLAPQWMEVQGGFTARGGLTTEVVAQFNME

SEQ ID NO: 45625 - protein, 162 aa, Desulfitobacterium metallireducens
  misc_feature (1)..(162): tr|W0E885|W0E885_9FIRM NADPH-dependent 7-cyano-7-deazag uanine reductase OS=Desulfitobacterium metallireducens DSM 15288 OX=871968 GN=queF PE=3 SV=1
MSRQKNELETVTLLGNHVDLSFNYNPDILQYFVNKHQENDYWVKFNCPEFTSLCPMTGQPDFATIYISYIPDIKMVESKSLKLYLLSFRNNGDFHEDVVNIIMKDLIKLLDPRYIEVCGKFLPRGGISIDPYCNYGKSEKWEKFAAQRLLYHDIQLEHVDNR

SEQ ID NO: 45626 - protein, 133 aa, Desulfobacter hydrogenophilus
  misc_feature (1)..(133): tr|A0A328FLV2|A0A328FLV2_9DELT NADPH-dependent 7-cyano- 7-deazaguanine reductase OS=Desulfobacter hydrogenophil us OX=2291 GN=queF PE=3 SV=1
MENKHYDRPFTVDTADVITSDLLEPIEYAYKSKRSIDIKITQPEYTSVCPMTGLPDNGTIIIEYRPDAHLVELKSLKYYLMQYRNVGMFYEHVVNKILDDMVSVINPLYMKVTGEFTPRGGISSVGSAEYIKP

SEQ ID NO: 45627 - protein, 133 aa, Desulfobacter postgatei
  misc_feature (1)..(133): tr|I5AZN0|I5AZN0_9DELT NADPH-dependent 7-cyano-7-deazag uanine reductase OS=Desulfobacter postgatei 2ac9 OX=879 212 GN=queF PE=3 SV=1
MKNKHYEPPFTVDTADVITPDLLEPIEYAYKSKRSIDIKITQPEYTSVCPMTGLPDNGTIIIEYRPDAHLVELKSLKYYLMQYRNVGMFYEHVVNKILDDLVLVIKPLYMKVTGEFTPRGGISSVGSAEYIKP

SEQ ID NO: 45628 - protein, 133 aa, Desulfobacter sp.
  misc_feature (1)..(133): tr|A0A357YXW5|A0A357YXW5_9DELT NADPH-dependent 7-cyano- 7-deazaguanine reductase OS=Desulfobacter sp. OX=2294 G N=queF PE=3 SV=1
MKNKHYEPPFTVDTPNVITPDLLEPIEYAYKSKRSIDIKITQPEYTSVCPMTGLPDNGTIIIEYRPDAHLVELKSLKYYLMQYRNVGMFYEHVVNKILDDLVLVIKPLYMKVTGEFTPRGGISSVGSAEYIKP

SEQ ID NO: 45629 - protein, 133 aa, Desulfobacter sp.
  misc_feature (1)..(133): tr|A0A348UXY4|A0A348UXY4_9DELT NADPH-dependent 7-cyano- 7-deazaguanine reductase OS=Desulfobacter sp. OX=2294 G N=queF PE=3 SV=1
MKNKHYEPPFTVDTPDVITPDLLEPIEYAYKSKRSIDIKITQPEYTSVCPMTGLPDNGTIIIEYRPDAHLVELKSLKYYLMQYRNVGMFYEHVVNKILDDLVLVIKPLYMKVTGEFTPRGGISSVGSAEYIKP

SEQ ID NO: 45630 - protein, 133 aa, Desulfobacteraceae bacterium
  misc_feature (1)..(133): tr|A0A1W9WTC4|A0A1W9WTC4_9DELT NADPH-dependent 7-cyano- 7-deazaguanine reductase OS=Desulfobacteraceae bacteriu m 4572_89 OX=1972445 GN=queF PE=3 SV=1
MENKQYKTPFTVETPDVIKIDLLDPIEYAYRSKRSIDIRIEHPEYTSVCPMTGLPDNGCIIIDYRPDNFIVELKSLKYYLMQYRNVGMFYEHVINKILDDLVEVLQPLTMKVTGKFTPRGGISSLATAEYVKN

SEQ ID NO: 45631 - protein, 132 aa, Desulfobacteraceae bacterium
  misc_feature (1)..(132): tr|A0A1W9LKI8|A0A1W9LKI8_9DELT NADPH-dependent 7-cyano- 7-deazaguanine reductase OS=Desulfobacteraceae bacteriu m A6 OX=1934249 GN=queF PE=3 SV=1
MKSKKMKPSYKSETPDTIKTSILSPMDYKYRQKRDIDIEIEQPEFTSVCPMTGLPDFGCIIIRYVPDKKIIELKSLKYYLLQYRNVGIFYEHVVNRILDDLAAVLKPKRMEITGEFTARGGITTTVTATLVS

SEQ ID NO: 45632 - protein, 137 aa, Desulfobacterales bacterium
  misc_feature (1)..(137): tr|A0A1F9P9Z6|A0A1F9P9Z6_9DELT NADPH-dependent 7-cyano- 7-deazaguanine reductase OS=Desulfobacterales bacterium RIFOXYA12_FULL_46_15 OX=1797914 GN=queF PE=3 SV=1
MVENKIYKTSYQIEDPGIVKAEILEPIPYVYKSKRSIDITIRQPEYTSVCPMTGLPDNGCITIKYRPDQTIVELKSLKYYLLQYRNVGMFYEHVVNKILDDLVQVLKPLRMEVTGEFTPRGGISSLATAVYEKEEKS

SEQ ID NO: 45633 - protein, 135 aa, Desulfobacterales bacterium
  misc_feature (1)..(135): tr|A0A2G9ZSP8|A0A2G9ZSP8_9DELT NADPH-dependent 7-cyano- 7-deazaguanine reductase OS=Desulfobacterales bacterium CG23_combo_of_CG06-09_8_20_14_all_52_9 OX=1973984 GN=q ueF PE=3 SV=1
MVRKHPKLNYRAKGPETVRSELLDVIDYQYAGKDIEITIEQPEYTSVCPMTGLPDFGKITINYIPDQKLVELKSLKFYLLQYRDVGIFYEHVVNLILNHLVERLHPKELAVSGEFTARGGITTRVKAAYEKQHNH

SEQ ID NO: 45634 - protein, 152 aa, Desulfobacterium sp.
  misc_feature (1)..(152): tr|A0A1W9U8N0|A0A1W9U8N0_9DELT Uncharacterized protein OS=Desulfobacterium sp. 4572_20 OX=1971621 GN=B6I32_001 75 PE=4 SV=1
MNFSKYSGTSPLIIISYDGEKFRVTDYSTSSNAKVESPEGVTLITFPARNHSPLIEWEYPEFQSLCPVSERHDQGVVTIKYRPKEKILESKSVRDYLMMWRNKRNWQEYITEEIANLLFSACEPDWLIVTINWSSRGGIIAKTTSKRGDAPS

SEQ ID NO: 45635 - protein, 281 aa, Desulfobacterium vacuolatum
  misc_feature (1)..(281): tr|A0A1W2A6X4|A0A1W2A6X4_9DELT NADPH-dependent 7-cyano- 7-deazaguanine reductase OS=Desulfobacterium vacuolatum DSM 3385 OX=1121400 GN=queF PE=3 SV=1
MINDPIQENSPSGIPLGRQIAHSETYDPSQLFCVARKDARKTLGINTELPFFGVDIWNAYELSWLDQKGKPCVAMGEIMFSSTGENIIESKSLKLYLNSFNFTRFESTDKVKETIIRDLSGATVGDVAVNIFVPRDFAMLDIKAPRGICIDLIEIKDDIDQYTLDPSYLKTDSAGVEETLFSNLLRTNCPVTGQPDWATVKIDYKGNAMDHEGLLRYIISLRQHQGFHENCVELIFMDILHQCAPDFLSVQARFTRRGGLDINPCRSSHEIPFSNIRLARQ

SEQ ID NO: 45636 - protein, 172 aa, Desulfobacula phenolica
  misc_feature (1)..(172): tr|A0A1H2DT31|A0A1H2DT31_9DELT NADPH-dependent 7-cyano- 7-deazaguanine reductase OS=Desulfobacula phenolica OX= 90732 GN=queF PE=3 SV=1
MNTRQILFATTKIKNLIITVCWAEFYIKIFMDSKDKINMTENKAYVTRYKIEDPSIVKADLLEPIPYAYKSKRSIDIIIKQPEYTSVCPMTGLPDNGCITIKYRPDQTIVELKSLKYYLLQFRNVGMFYEHVVNKILDDLVQVLTPLRMEVTGEFTPRGGISSIATAVYEKE

SEQ ID NO: 45637 - protein, 139 aa, Desulfobacula sp.
  misc_feature (1)..(139): tr|A0A1F9RX11|A0A1F9RX11_9DELT NADPH-dependent 7-cyano- 7-deazaguanine reductase OS=Desulfobacula sp. RIFOXYB2_ FULL_45_6 OX=1797912 GN=queF PE=3 SV=1
MVENKTYKPSYRIEDPGIVKADILEPIPYAYKSKRSIDITIEQPEYTSVCPMTGLPDNGCITIRYRPDQTIVELKSLKYYLLQYRNVGMFYEHVVNKILDDLVRVLSPLRMEVTGEFTPRGGISSLATAVYEKGQSANL

SEQ ID NO: 45638 - protein, 139 aa, Desulfobacula sp.; identical to SEQ ID NO: 45637
  misc_feature (1)..(139): tr|A0A1F9NUE7|A0A1F9NUE7_9DELT NADPH-dependent 7-cyano- 7-deazaguanine reductase OS=Desulfobacula sp. RIFOXYA12 _FULL_46_16 OX=1797911 GN=queF PE=3 SV=1

SEQ ID NO: 45639 - protein, 134 aa, Desulfobacula toluolica
  misc_feature (1)..(134): tr|K0NBN6|K0NBN6_DESTT NADPH-dependent 7-cyano-7-deazag uanine reductase OS=Desulfobacula toluolica (strain DSM 7467 / Tol2) OX=651182 GN=queF PE=3 SV=1
MTENKAYVTRYKIEDPSIVKADLLEPIPYAYKSKRSIDIIIKQPEYTSVCPMTGLPDNGCITIKYRPDQTIVELKSLKYYLLQFRNVGMFYEHVVNKILDDLVQVLTPLKMEVTGEFTPRGGISSIATAVYEKE

SEQ ID NO: 45640 - protein, 274 aa, Desulfobotulus alkaliphilus
  misc_feature (1)..(274): tr|A0A562RXK9|A0A562RXK9_9DELT NADPH-dependent 7-cyano- 7-deazaguanine reductase OS=Desulfobotulus alkaliphilus OX=622671 GN=LZ24_01477 PE=3 SV=1
MEDKYLSALPLGRTVAFSPLYDPSQLCPVPRSLARQALGISAEKGLPFYGEDIWNCWELSWLDENGKPLLAVAEIRIPADSPFLVESKSLKLYLNSFNMTRISGTEELKSTLIRDITAIVQAKIDLTLHMPEDFFHLRPGEPEGLCIDTLPFNAEKPAFPETGDSKGIISEKLFSRLLRSHCPVTGQPDWATVHIAYRGQPICHESLLRYIVSLREHTGFHESCAETIFCCILERCRPENLMVSARFTRRGGIDINPFRSTHSCTMPNERDFRQ

SEQ ID NO: 45641 - protein, 155 aa, Desulfobulbaceae bacterium
  misc_feature (1)..(155): tr|A0A353NK38|A0A353NK38_9DELT NADPH-dependent 7-cyano- 7-deazaguanine reductase OS=Desulfobulbaceae bacterium OX=2053307 GN=queF PE=3 SV=1
MTAESIYNNLTQLGGRTTLPESPEQAVLERVPNPQKGIAYAVRFAAPEFTSLCPITGQPDFAHLVIDYLPGDWLVESKSLKLFLGSFRNHGSFHEDCTISIARRLIACIEPQWLRIGGYWYPRGGMPIDVFYQTGEPPQGLWIPDQGVANYRGRG

SEQ ID NO: 45642 - protein, 155 aa, Desulfobulbaceae bacterium
  misc_feature (1)..(155): tr|A0A0F2N936|A0A0F2N936_9DELT NADPH-dependent 7-cyano- 7-deazaguanine reductase OS=Desulfobulbaceae bacterium BRH_c16a OX=1629713 GN=queF PE=3 SV=1
MTGESIYSNLTQLGGKVEQPDSPDQAVLERVPNPQQGISYIVRFTAPEFTSLCPITGQPDFAHLVIDYLPGNWLVESKSLKLFLGSFRNHGSFHEDCTISIARRIIACTEPQWLRIGGYWYPRGGIPIDVFYQTGEPPKGVWIPDQGVANYRGRG

SEQ ID NO: 45643 - protein, 278 aa, Desulfobulbus propionicus
  misc_feature (1)..(278): tr|A0A2G6MDN6|A0A2G6MDN6_9DELT NADPH-dependent 7-cyano- 7-deazaguanine reductase OS=Desulfobulbus propionicus O X=894 GN=queF PE=3 SV=1
MRQKKKEKSILHYSPLGKKQEYADRYDAALLYAVSRDMGREPLGLTGGLPFVGQDIWNIYELSWLNPSGRPVVALAELRVPVTSPFLIESKSMKLYFNSLNMTSFADAAQVQEVLTQDLSRCAGAAVDVCIREAADGAVLLTAPQGICIDQAPVEVFHYQVQPEALRCSPASCSETLFTHLFRSRCPVTGQPDWATVMVRYTGPAMDQGGLLEYLVSYRTHQSFHEACVERMFVDIQRQCRPEFLEVTARYTRRGGIDINPVRASHPGVWRNERTFFQ

SEQ ID NO: 45644 - protein, 131 aa, Desulfococcus multivorans
  misc_feature (1)..(131): tr|S7TGJ0|S7TGJ0_DESML NADPH-dependent 7-cyano-7-deazag uanine reductase OS=Desulfococcus multivorans DSM 2059 OX=1121405 GN=queF PE=3 SV=1
MTDVVLQNIEKPDTIRRDLLDPVDYQYTGHRDVHIEIRQPEFTSVCPMTGLPDFGTITIRYRPDKKIVELKSLKFYLLQYRNVGIFYEHVVNRILDDLVAVVSPKRMEIIGDFTPRGGISTSVSALYEGLA

SEQ ID NO: 45645 - protein, 134 aa, Desulfococcus oleovorans
  misc_feature (1)..(134): tr|A8ZUH0|A8ZUH0_DESOH NADPH-dependent 7-cyano-7-deazag uanine reductase OS=Desulfococcus oleovorans (strain DS M 6200 / Hxd3) OX=96561 GN=queF PE=3 SV=1
MSDNPQPPLPYTALSADTVGTKMLTVIEYAYRETRPIDVVIRQPEFTSLCPMTGLPDYGCITIRYRPRHHIVELKSLKYYLLQYRNVGIFYEHVINRILNDLSGAVAPVWMEVSGEFTARGGITTTVTAATGDQ

SEQ ID NO: 45646 - protein, 128 aa, Desulfococcus sp.
  misc_feature (1)..(128): tr|A0A1W9Q1Y8|A0A1W9Q1Y8_9DELT NADPH-dependent 7-cyano- 7-deazaguanine reductase OS=Desulfococcus sp. 4484_242 OX=1968523 GN=B5M55_05880 PE=3 SV=1
MAKAEGRIFGYESPEKIRTDFLETFNFDSPGQYIKTETSEFIAACPFSGLPDVGRLIIEYYPEGGKCIELKSLKYYVVSFRTVGLFQEGVTKRIYSDLKEALGTNRLKVTTIYNTRGGFATTCIEGAL

SEQ ID NO: 45647 - protein, 128 aa, Desulfofaba hansenii
  misc_feature (1)..(128): tr|A0A2M9DPR5|A0A2M9DPR5_9DELT NADPH-dependent 7-cyano- 7-deazaguanine reductase OS=Desulfofaba hansenii OX=157 842 GN=queF PE=3 SV=1
MAVAEGKSFSFDGPEKIRADFLETFDFDSREQYIKTETKEFVAVCPFSGLPDIAHLIIEYHPDGGRCIELKSLKYYITSFRNVGIFQEGATRRIYDDMKGALKTKRIKITTIYNIRGGFLTTCVEGNL

SEQ ID NO: 45648 - protein, 155 aa, Desulfoglaeba alkanexedens
  misc_feature (1)..(155): tr|A0A4P8L2J9|A0A4P8L2J9_9DELT NADPH-dependent 7-cyano- 7-deazaguanine reductase OS=Desulfoglaeba alkanexedens ALDC OX=980445 GN=queF PE=3 SV=1
MTERGPQNLTQLGRPSPLPENPQAAVLETIENPHPDRDYVVRLTAPEFTTLCPITGQPDFAVMIVDYVPGTKLVESKSFKLFLGSFRNYGSFHEACTVTVHKRLEAALEPKYLRVVGLWYARGGIPIDVVVETGACPPNCTPLPLGKTTYRGGRE

SEQ ID NO: 45649 - protein, 272 aa, Desulfoluna butyratoxydans
  misc_feature (1)..(272): tr|A0A4U8YSP5|A0A4U8YSP5_9DELT NADPH-dependent 7-cyano- 7-deazaguanine reductase OS=Desulfoluna butyratoxydans OX=231438 GN=MSL71_42040 PE=3 SV=1
MRTENPLGKKIGYTFTYDPSQLFPVERSLGRGALGLDGKALPFCGEDIWTAWELSWLDGKGKPVSSVAEIRVPATSRCIVESKSLKLYLNSFNMSRFESPEAVRKAMAGDLSRVAEGEVTVSLFGCDDTEALGTHRAGGRCIDHHEADSYVYEVDASLLAHGDGDVTDETLCSHILRTNCPVTGQPDWATVEITYSGKKIDETALFAYLVSFRTHTGYHENCVETLYTDIMARLAPTALTVVGRFTRRGGLDINPCRSSSPTAFPNRRLVRQ

SEQ ID NO: 45650 - protein, 272 aa, Desulfoluna spongiiphila
  misc_feature (1)..(272): tr|A0A1G5FYJ3|A0A1G5FYJ3_9DELT NADPH-dependent 7-cyano- 7-deazaguanine reductase OS=Desulfoluna spongiiphila OX =419481 GN=SAMN05216233_10946 PE=3 SV=1
MRTENPLGKKIGYTFAYDPSQLFPVERSLGRGALGLDGKALPFCGEDIWTAWELSWLDGKGKPASAVAEIRFPATSRCIVESKSLKLYLNSFNMSRFESPEKVKEAMVADLSRVAEAEVAVLLFGCDDTEAFKAHRATGRCIDHHEADSYVYEVDASLLAHGDGDVTDETLCSHILRTNCPVTGQPDWATVEITYSGKKIDEAALFAYLVSFRTHTGYHENCVETLYTDIMDRLAPAALTVVGRFTRRGGLDINPCRSSAPTAFSNRRLVRQ

SEQ ID NO: 45651 - protein, 272 aa, Desulfoluna spongiiphila
  misc_feature (1)..(272): tr|A0A5E7XF83|A0A5E7XF83_9DELT NADPH-dependent 7-cyano- 7-deazaguanine reductase OS=Desulfoluna spongiiphila OX =419481 PE=3 SV=1
MRTENPLGKKIGYTFAYDPSQLFPVERSLGRGALGLDGKALPFCGEDIWTAWELSWLDGKGKPASAVAEIRFPATSRCIVESKSLKLYLNSFNMSRFESPEKVKEAMVADLSRVAEAEVAVLLFGCDDTEALKAHRATGRCIDHHEADSYVYEVDASLLAHGDGDVTDETLCSHILRTNCPVTGQPDWATVEITYSGKKIDEAALFAYLVSFRTHTGYHENCVETLYTDIMDRLAPAALTVVGRFTRRGGLDINPCRSSAPTAFSNRRLVRQ

SEQ ID NO: 45652 - protein, 273 aa, Desulfomicrobium apsheronum
  misc_feature (1)..(273): tr|A0A1I3UQU3|A0A1I3UQU3_9DELT NADPH-dependent 7-cyano- 7-deazaguanine reductase OS=Desulfomicrobium apsheronum OX=52560 GN=SAMN04488082_10850 PE=3 SV=1
MPHSSRMVLGRQVDYNRRYDPDQLCPIPRSLGREAAGIEGAETFGHGVDIWNIFELSWLNASGKPLVAMAEVRVPWNSPCLIESKSLKLYCNSFNMTALESADELRLTMTRDLSRAAGADVTVRIIAAEEFSQCTLAEPEGTCIDGLDITDFTYEPDAALLGTASDSARETLFTRLFRSCCPVTGQPDWATLRITYAGPRILHDGLLRYLVSYREHQGFHEACVEKIHADIHRHCGAQELEVSARFTRRGGLDISPVRSTRPGPWPNPRDPRQ

SEQ ID NO: 45653 - protein, 273 aa, Desulfomicrobium norvegicum
  misc_feature (1)..(273): tr|A0A1I4KZ58|A0A1I4KZ58_DESNO NADPH-dependent 7-cyano- 7-deazaguanine reductase OS=Desulfomicrobium norvegicum (strain DSM 1741 / NCIMB 8310) OX=52561 GN=queF PE=3 S V=1
MPHSSRMVLGRQVDYSRHYDPDQLCPIPRSLGRGAAGIEGAETFGHGEDIWNIFELSWLNASGKPLVAMAEVRVPWNSPCLIESKSLKLYCNSFNMTALESADELRRTMTRDLSRAAGADVTVRIIAAEEFSQCTLAEPEGTCIDGLDITGFTYEPDAALLGTASDPARETLFTRLFRSCCPVTGQPDWATLRITYAGPRILHDGLLRYLVSYREHQGFHEACVEKIHTDIHRRCGAQELEVSARFTRRGGLDINPVRSTHPGPWPNPRDPRQ

SEQ ID NO: 45654 - protein, 146 aa, Desulfomonile tiedjei
  misc_feature (1)..(146): tr|I4C6G6|I4C6G6_DESTA NADPH-dependent 7-cyano-7-deazag uanine reductase OS=Desulfomonile tiedjei (strain ATCC 49306 / DSM 6799 / DCB-1) OX=706587 GN=queF PE=3 SV=1
MSDKTIEGLTLLQKSCTTVYRDSPEDAILETFPNKYPHRNYVIEFDCPEFTSLCPITGQPDFAKIKITYIPDLKCVESKSLKIYLFSFRNCGMFHEEITNRILDDLIAACDPRWISVRGMMNPRGGIGIDVTAEYCRPGFEGPTSK

SEQ ID NO: 45655 - protein, 140 aa, Desulfonatronospira thiodismutans
  misc_feature (1)..(140): tr|D6SKY3|D6SKY3_9DELT NADPH-dependent 7-cyano-7-deazag uanine reductase OS=Desulfonatronospira thiodismutans A SO3-1 OX=555779 GN=queF PE=3 SV=1
MRDDTSGLTLLGKTRPEYPSRVDPGVLETFANKFAERDYEVVMVTDEFTSLCPVTGQPDYGTIELRYVPGKECIESKSLKYYLFSYRQEPTFMETVVNRILDDLVQACSPRQMKVVGRFKARGGIAIDVSAQYRREDQPS

SEQ ID NO: 45656 - protein, 135 aa, Desulfonatronovibrio sp.
  misc_feature (1)..(135): tr|A0A424XZV2|A0A424XZV2_9DELT NADPH-dependent 7-cyano- 7-deazaguanine reductase OS=Desulfonatronovibrio sp. MS AO_Bac4 OX=2293858 GN=queF PE=3 SV=1
MRDDTSSLSLLGKNGSDYPSRVEPGIIETFPNKFPGRDYEVVMITDEFTSLCPVTGQPDYGTIELRYVPDQVCVESKSLKFYLFSYRQEPTFMETVVNRILDDLVVRCAPRKMTVVGRFRARGGIAIDVTAQYVK

SEQ ID NO: 45657 - protein, 135 aa, Desulfonauticus sp.
  misc_feature (1)..(135): tr|A0A101DGF8|A0A101DGF8_9DELT NADPH-dependent 7-cyano- 7-deazaguanine reductase OS=Desulfonauticus sp. 38_4375 OX=1635258 GN=queF PE=3 SV=1
MFDDVSGLKLLGKSKTEYPSKVSPDILETFPNRFPDRDYWVTMISDEFTSLCPMTGQPDYGTILIRYIPDKKCIESKSLKFYLFSYRQEPTFMETVVNRILDDLVKVCSPKEMQVIGKFKPRGGVIIEVEASYKK

SEQ ID NO: 45658 - protein, 135 aa, Desulfonauticus submarinus
  misc_feature (1)..(135): tr|A0A1H0CPD3|A0A1H0CPD3_9DELT NADPH-dependent 7-cyano- 7-deazaguanine reductase OS=Desulfonauticus submarinus OX=206665 GN=queF PE=3 SV=1
MFDDVSDLKLLGKSKTEYPSKVSPDLLESFPNRFPNRDYWVTLISDEFTSLCPMTGQPDYGTIVIKYRPDKRCIESKSLKFYLFSYRQEPTFMETVVNRILDDLVNACSPKEMIVVGKFKPRGGVVIEVEAHYKK

SEQ ID NO: 45659 - protein, 130 aa, Desulfonema ishimotonii
  misc_feature (1)..(130): tr|A0A401G0N8|A0A401G0N8_9DELT NADPH-dependent 7-cyano- 7-deazaguanine reductase OS=Desulfonema ishimotonii OX= 45657 GN=queF PE=3 SV=1
MTQLPYTVEKPEIIKTDLLDPIDYHYKGHRDVDIVISQPEFTSVCPMTGLPDVGTITIRYRPDEKIVELKSLKFYFLQYRNVGIFYEHVVNRILDDLAGVLAPKQMEVTGDFTPRGGITTRVTARYEGKK

SEQ ID NO: 45660 - protein, 271 aa, Desulfopila aestuarii
  misc_feature (1)..(271): tr|A0A1M7Y8R5|A0A1M7Y8R5_9DELT NADPH-dependent 7-cyano- 7-deazaguanine reductase OS=Desulfopila aestuarii DSM 1 8488 OX=1121416 GN=queF PE=3 SV=1
MANELPLGKHVAYSFTYDPSLLCPIPRQLGREAAGIAKQVASWLGEDIWNIYELSWLSESGRPEVAMAELRVPSSSPNLIESKSFKLYCNSFNMSRFVSGDTVRKTMEKDLSATAGARVEVVLIEPRDFAKVTINEPEGICLDEQTIDQVSFIPDPSILATGDDTTQQTFFSRLFRSCCPVTGQPDWATVTVSYEGKRIVPESLLRYLISYREHAGFHEACVENIFSDIMKQCRPAELTVTARFTRRGGIDINPIRSTGTGPWPNLRDPRQ

SEQ ID NO: 45661 - protein, 279 aa, Desulfopila sp.
  misc_feature (1)..(279): tr|A0A4V5NWC3|A0A4V5NWC3_9DELT NADPH-dependent 7-cyano- 7-deazaguanine reductase OS=Desulfopila sp. IMCC35004 O X=2569540 GN=queF PE=3 SV=1
MKIETLLGKDVQYSSHYDPKLLQPIPRNLGRGTAQLPGANGQYPYHGEDIWNVYEVSWLSANGKPEVAIAEIRVPATSEFLIESKSLKLYFNSFNMTRIENAASLTAILEGDLGQAAGGKVNVTLTLANQFDGVQVAEPTGICLDELECNDFSYKVDPLLLTADPESASASETLFSRLFRSCCPVTGQPDWATVQVSYEGRKIERAGLLRYLVSYREHTGFHEACVEQIFHHLMEQCRPDYLEVSARFTRRGGIDINPVRSISASNSARQWPNIRDPRQ

SEQ ID NO: 45662 - protein, 272 aa, Desulfopila sp.
  misc_feature (1)..(272): tr|A0A4U1AFX9|A0A4U1AFX9_9DELT NADPH-dependent 7-cyano- 7-deazaguanine reductase OS=Desulfopila sp. IMCC35006 O X=2569542 GN=queF PE=3 SV=1
MDKNIPLGKEVTYISTYNPELLFPVARRLNREKIGIKDRLPFTGVDIWNAYEISWLETGGKPRVAMAEIRFSLDSLNIIESKSLKLYCNSFNLTHFTSPDKVVEVMQQDLEKVSRGAVTVSLLLPDDFRRQRFVEPEGFCIDDLDLNTDSYTRNPDFLFHGSHRVEEQLYSNLLRTNCPVTGQPDWATLIINYTGRQIQRSGLLRYVISLREHTGFHENCVEEIFVDLMERCMPEKLSVYARFTRRGGIDINPFRSTPNDCAAGNNIRCARQ

SEQ ID NO: 45663 - protein, 277 aa, Desulforhopalus singaporensis
  misc_feature (1)..(277): tr|A0A1H0J030|A0A1H0J030_9DELT NADPH-dependent 7-cyano- 7-deazaguanine reductase OS=Desulforhopalus singaporens is OX=91360 GN=SAMN05660330_00085 PE=3 SV=1
MKPDSNRTNPLGQQVEYTFTYNPELLFPVPRTVGRETLGLGGNRPLPFFGEDIWNCWELSWLNDRGKPISAVMELRIPCTSQCIIESKSLKLYLNSFNMSRFKDQQEVAQIIGADLSSTAGTEVQVRIFDCNDRKTLMTTVPRGRCIDDLEAGDYVYRVDPALLRCSDKKAENETLCSNILRTNCPVTGQPDWATVEITYSGNKIDESSLLAYLVSFRTHTGYHENCVETIYVHLMEHLLLDSLTISGRFTRRGGVDINPCRSSAQTPFANHRLVRQ

SEQ ID NO: 45664 - protein, 155 aa, Desulfosoma caldarium
  misc_feature (1)..(155): tr|A0A3N1UL97|A0A3N1UL97_9DELT NADPH-dependent 7-cyano- 7-deazaguanine reductase OS=Desulfosoma caldarium OX=61 0254 GN=queF PE=3 SV=1
MPHQDSDQLTLLGRPSPLPSHPDEAVLETFANPHPDVDYVVRLTAPEFTTLCPITGQPDFAVIIVDYVPRARLVESKSYKLFLGSFRNHGTFHEACTVAILKRLQQAMDPKYLRVVGLWYARGGIPIDVVVETGQLPPGCHPLPLEKTSYRGGRE

SEQ ID NO: 45665 - protein, 276 aa, Desulfotalea psychrophila
  misc_feature (1)..(276): sp|Q6ARX8|QUEF_DESPS NADPH-dependent 7-cyano-7-deazagua nine reductase OS=Desulfotalea psychrophila (strain LSv 54 / DSM 12343) OX=177439 GN=queF PE=3 SV=1
MTENINAGIPLGKQVGHSETYDPSHLFPVARREARKSLGLADDLPFSGPDIWNAYELSWLDSKGKPCVALGEITFPCTSENIIESKSLKLYLNSFNLTRFTSTARVKEIIREDLSRVAGAEVEVKILTPEEFTEVTISAPEGSCIDDLELEEEINAYRPTANYLSTGPEETEEELYTNLLRTNCPVTGQPDWATVIINYRGKAIDQRGLLRYIISFRQHEGFHENCVERIFMDILNRCAPARLTVYARFTRRGGLDINPYRTTHAEHFVNLRLARQ

SEQ ID NO: 45666 - protein, 276 aa, Desulfotignum phosphitoxidans
  misc_feature (1)..(276): tr|S0FQT8|S0FQT8_9DELT NADPH-dependent 7-cyano-7-deazag uanine reductase OS=Desulfotignum phosphitoxidans DSM 1 3687 OX=1286635 GN=queF PE=3 SV=1
MNRPADQGIPLGRQARYKDTYDPFLLFAIPRAEARKALGIQGALPFSGVDIWNAYELSWLDAFGKPCVAAARITFPCDSGNMIESKSLKLYLNSFNFTRFKSVEKVRAVITTDLSQNALADVTVDLVMPGSFAMMTICDPPGTCIDDLDLENEVNTCEYRPDYLKTLPGTAEETLFSNLLRTRCPVTGQPDWATVMIRYKGPAMDHAGLLQYLISLRRHSGFHENCVEIMFMDILHRCRPDHLSVYAGFTRRGGLDINPGRATGEQNFPNIRLARQ

SEQ ID NO: 45667 - protein, 143 aa, Desulfovibrio carbinolicus
  misc_feature (1)..(143): tr|A0A4P6HJR3|A0A4P6HJR3_9DELT NADPH-dependent 7-cyano- 7-deazaguanine reductase OS=Desulfovibrio carbinolicus OX=296842 GN=queF PE=3 SV=1
MPHRVPRDDISTLKTLGQGATVYPRNVTPGLLETFPNAFPDRRYDITFASDEFTSLCPKTGQPDFGTITIRYVPDKLCIESKSLKLYLFSYRDEGAFMETLTNRILDDLVEVCQPHHMEVTGDFAARGGITISVTATFVKEKK

SEQ ID NO: 45668 - protein, 145 aa, Desulfovibrio carbinoliphilus
  misc_feature (1)..(145): tr|G7QC32|G7QC32_9DELT NADPH-dependent 7-cyano-7-deazag uanine reductase OS=Desulfovibrio carbinoliphilus subsp . oakridgensis OX=694327 GN=queF PE=3 SV=1
MSAPKAPSAPKDDVSTLTTLGQGATAYPRTVTPGLLETFPNAFPGRRYTVTFASEEFTSLCPKTGQPDFGMITIRYVPDERCIESKSLKLYLFSYRDEGTFMETLTNRILDDLVAACQPLEMEVTGDFAARGGITISVTAGYVKE

SEQ ID NO: 45669 - protein, 165 aa, Desulfovibrio desulfuricans
  misc_feature (1)..(165): tr|A0A4Y3TJP9|A0A4Y3TJP9_DESDE NADPH-dependent 7-cyano- 7-deazaguanine reductase OS=Desulfovibrio desulfuricans OX=876 GN=queF PE=3 SV=1
MTTRSTDQTEHLRALGQKTPYPAAGPSTDLLEAFPNRFPDRPYIVSIAFPEFTSLCPVTGQPDFATIVVEYIPDQFCVESKSFKVYMFAFRDHQSFMETITNTILDDMTTKLQPLWCRVKGLFTPRGGTQLHVFAERFKEVEPARAQALRDMVSEWKRENNRHGA

SEQ ID NO: 45670 - protein, 167 aa, Desulfovibrio desulfuricans
  misc_feature (1)..(167): sp|B8IYG6|QUEF_DESDA NADPH-dependent 7-cyano-7-deazagua nine reductase OS=Desulfovibrio desulfuricans (strain A TCC 27774 / DSM 6949) OX=525146 GN=queF PE=3 SV=1
MTTRSQDQTRDLKVLGTGRLTSPEGGPSVALLEAFPNCFPQRPYVISISFPEFTSLCPVTGQPDCGTITVEYIPDELCVESKSFKLYMFAFRNHQSFMETITNNVLEDLRALLNPCWCRVKGLFAPRGGTRIHVFAEAFKDGMPEEQSALVRETVRSWKSEPDPHRP

SEQ ID NO: 45671 - protein, 166 aa, Desulfovibrio fairfieldensis
  misc_feature (1)..(166): tr|A0A0X8JKH6|A0A0X8JKH6_9DELT NADPH-dependent 7-cyano- 7-deazaguanine reductase OS=Desulfovibrio fairfieldensi s OX=44742 GN=queF PE=3 SV=1
MPTRSQDQTQNLHILGTGRLPAFEDGPGVGLLESFPNCYPQRPYVISISFPEFTSLCPVTGQPDCGTISVEYVPDKLCVESKSFKLYMFAFRNHQSFMETITNTVLEDLRELLAPCWCRVKGLFVPRGGTRIHVFAEEFKEMPEEQDRRVREAVRAWRSEIDPHRS

SEQ ID NO: 45672 - protein, 167 aa, Desulfovibrio ferrireducens
  misc_feature (1)..(167): tr|A0A1G9KNV2|A0A1G9KNV2_9DELT NADPH-dependent 7-cyano- 7-deazaguanine reductase OS=Desulfovibrio ferrireducens OX=246191 GN=queF PE=3 SV=1
MKTTKSQDKTDALKTLGKGGATSYNYDSPSPEILEIFPNNFPGRPYIISIEFPEYTSLCPVTGQPDFANIIVEYIPDEVCVESKSFKLYMGAYRNHQSFMETITNNILDDFVSRLSPLWMRVKGIFSPRGGTCLHVFAEHYNEDSTQFAKVCDIVHEWKIESGRHRS

SEQ ID NO: 45673 - protein, 167 aa, Desulfovibrio ferrophilus
  misc_feature (1)..(167): tr|A0A2Z6AZP3|A0A2Z6AZP3_9DELT NADPH-dependent 7-cyano- 7-deazaguanine reductase OS=Desulfovibrio ferrophilus O X=241368 GN=queF PE=3 SV=1
MGTTKSQDKTNHLKTLGQGGQTEYQLEGPHSGILETFPNNFPGRPYIVNVEFPEYTSLCPMTGQPDFGTIIMEYVPDQRIVESKSFKLYMFAYRNHQSFMETIANTMLDDFVKALDPLWCRVKGLFSPRGATTLHVFAEHFKVDAPNIAEVRSVVSEWKRENNRHGA

SEQ ID NO: 45674 - protein, 139 aa, Desulfovibrio fructosivorans
  misc_feature (1)..(139): tr|E1JX65|E1JX65_DESFR NADPH-dependent 7-cyano-7-deazag uanine reductase OS=Desulfovibrio fructosivorans JJ OX= 596151 GN=queF PE=3 SV=1
MPTPKDDVSQLKTLGQGATRYPRTVTPSLLETFPNAYPDRRYEVTFSSEEFTSLCPKTGQPDFGRISIRYVPGARCIESKSLKLYLFSYRDEGTFMETLTNRILDDLVAACDPVEMEVTGEFAARGGITITVAAHHVRK

SEQ ID NO: 45675 - protein, 167 aa, Desulfovibrio gilichinskyi
  misc_feature (1)..(167): tr|A0A1X7DF51|A0A1X7DF51_9DELT NADPH-dependent 7-cyano- 7-deazaguanine reductase OS=Desulfovibrio gilichinskyi OX=1519643 GN=queF PE=3 SV=1
MKTTKSQDKTGALKTLGQGGTTKYNYDSPSPEILEVFPNNFPGRPYIVSIEFPEYTSLCPVTGQPDFANIIVEYIPDEVCVESKSFKLYMGSYRNHQSFMETITNNILDDFVSRLSPLWMRVKGIFSPRGGTGLHVFAEYFKEDSTQFVKICDVVHEWKIESGRHRS

SEQ ID NO: 45676 - protein, 167 aa, Desulfovibrio hydrothermalis
  misc_feature (1)..(167): tr|L0RB75|L0RB75_9DELT NADPH-dependent 7-cyano-7-deazag uanine reductase OS=Desulfovibrio hydrothermalis AM13 = DSM 14728 OX=1121451 GN=queF PE=3 SV=1
MKTTKSQDRTESLKSLGQAGATKYNYDTPSPEILETFPNNFPGRPYIISIEFPEYTSLCPVTGQPDFATIIVEYIPDELCVESKSFKLYMGSYRNHQSFMETITNNILDHFVESLSPLWMRVKGIFSPRGGTGLHVFAEHYKKDSAEYEQVRDVVKEWKSEANRHGA

SEQ ID NO: 45677 - protein, 166 aa, Desulfovibrio legallii
  misc_feature (1)..(166): tr|A0A1G7PZJ5|A0A1G7PZJ5_9DELT NADPH-dependent 7-cyano- 7-deazaguanine reductase OS=Desulfovibrio legallii OX=5 71438 GN=queF PE=3 SV=1
MTSRSQDRTGELKILGSGRLHAPEGGPSVALLESFPNCFPQRPYVVSFTFPEFTSLCPVTGQPDSGTITVEYIPDQRCVESKSFKLYMFAFRNHQSFMETITNTVLDDLRALMDPCWCRVKGLFAPRGGTRIHVFAEDFKALPEERDRLVRAAVAAWKMEPDPHRP

SEQ ID NO: 45678 - protein, 156 aa, Desulfovibrio litoralis
  misc_feature (1)..(156): tr|A0A1M7TIP3|A0A1M7TIP3_9DELT NADPH-dependent 7-cyano- 7-deazaguanine reductase OS=Desulfovibrio litoralis DSM 11393 OX=1121455 GN=queF PE=3 SV=1
MSKNISESVETAGLTKLGNSGHINFDSPSLSILEAFPNQYPQRDYVIEFDYPEFTSLCPKTGQPDFGTIIVRYVPNLCCVESKSFKLYMGSYRNQGAFMERLTNQIADDLIALLAPRRMTVEGLFNARGGTGIKVRVEHFDNTLATDELERLKSLW

SEQ ID NO: 45679 - protein, 143 aa, Desulfovibrio magneticus
  misc_feature (1)..(143): tr|K6HA45|K6HA45_9DELT NADPH-dependent 7-cyano-7-deazag uanine reductase OS=Desulfovibrio magneticus str. Maddi ngley MBC34 OX=1206767 GN=queF PE=3 SV=1
MPHRVPRDDVSTLKTLGQGATVYPRNVTPGLLETFPNAFPDRRYDITFASDEFTSLCPKTGQPDFGTITIRYVPDKLCIESKSLKLYLFSYRDEGAFMETLTNRILDDLVEICQPHHMEVTGDFAARGGITISVTATYVKEKK

SEQ ID NO: 45680 - protein, 143 aa, Desulfovibrio magneticus
  misc_feature (1)..(143): tr|C4XPJ6|C4XPJ6_DESMR NADPH-dependent 7-cyano-7-deazag uanine reductase OS=Desulfovibrio magneticus (strain AT CC 700980 / DSM 13731 / RS-1) OX=573370 GN=queF PE=3 SV =1
MPHRVPRDDVSTLKTLGQGATVYPRNVTPGLLETFPNAFPDRRYDITFASDEFTSLCPKTGQPDFGTITIRYVPDKLCIESKSLKLYLFSYRDEGAFMETLTNRILDDLVEVCQPHHMEVTGDFAARGGITISVTATFVKEKK

SEQ ID NO: 45681 - protein, 148 aa, Desulfovibrio mexicanus
  misc_feature (1)..(148): tr|A0A238Z3U0|A0A238Z3U0_9DELT NADPH-dependent 7-cyano- 7-deazaguanine reductase OS=Desulfovibrio mexicanus OX= 147047 GN=queF PE=3 SV=1
MSTIDDTSGLKHLGSGKTSYAFHEPTADILEAFPNKYPNRDYQIRFEHPEFTSLCPKTGQPDFATIEITYIPDALCIETKSLKLYFTAFRNHGSFMETITNKILDDLVSVCQPRMMQVVALFNPRGGTSLTVTAEYFKDNSAPIETQF

SEQ ID NO: 45682 - protein, 199 aa, Desulfovibrio piger
  misc_feature (1)..(199): tr|A0A1K1LI32|A0A1K1LI32_9DELT NADPH-dependent 7-cyano- 7-deazaguanine reductase OS=Desulfovibrio piger OX=901 GN=queF PE=3 SV=1
MTAAIVAASTISYKDGSRGPFPVPGKISKGVSMSTTRSQDQTQHLHVLGTGKMPELQGGPSTALLESFPNRYPRRPYVISITFPEFTSLCPVTGQPDMGTITVEYIPDQLCVESKSFKLYMFAFRNHQSFMETITNTVLEDLWTVLAPCWCRVKGLFVPRGGTRIHVFAEQFKDMPEEKDAAVRAAVQAWRTESDPHRP

SEQ ID NO: 45683 - protein, 167 aa, Desulfovibrio piger
  misc_feature (1)..(167): tr|B6WX13|B6WX13_9DELT NADPH-dependent 7-cyano-7-deazag uanine reductase OS=Desulfovibrio piger ATCC 29098 OX=4 11464 GN=queF PE=3 SV=1
MSTTRSQDQTQHLHVLGTGKMPELQGGPSTALLESFPNRYPQRPYVISIAFPEFTSLCPVTGQPDMGTITVEYIPDQLCVESKSFKLYMFAFRNHQSFMETITNTVLEDLWTVLEPCWCRVKGLFVPRGGTRIHVFAEQFKDMPEEKDAAVRAAVQAWRTESDPHRP

SEQ ID NO: 45684 - protein, 167 aa, Desulfovibrio salexigens
  misc_feature (1)..(167): tr|C6BRW4|C6BRW4_DESAD NADPH-dependent 7-cyano-7-deazag uanine reductase OS=Desulfovibrio salexigens (strain AT CC 14822 / DSM 2638 / NCIB 8403 / VKM B-1763) OX=526222 GN=queF PE=3 SV=1
MKTTKSQDKTESLVSLGQAGATEYNYNTPGPEILETFPNNFPGRPYIVSIEFPEYTSLCPVTGQPDFATIIVEYIPDELCVESKSFKLYMGAYRNHQSFMETITNNILDHFVGRLSPLWMRVKGIFSPRGGTALHVFAEHYKKDSAQYEDVREMVREWKMESSRHSA

SEQ ID NO: 45685 - protein, 145 aa, Desulfovibrio sp.
  misc_feature (1)..(145): tr|I2Q3K7|I2Q3K7_9DELT NADPH-dependent 7-cyano-7-deazag uanine reductase OS=Desulfovibrio sp. U5L OX=596152 GN= queF PE=3 SV=1
MSAPKAPSAPKDDVSTLTTLGQGATAYPRTVTPGLLETFPNAFPGRRYTVTFASEEFTSLCPKTGQPDFGLITIRYVPDALCIESKSLKLYLFSYRDEGTFMETLTNRILDDLVAACRPLEMEVTGDFAARGGITISVTAGYVKE

SEQ ID NO: 45686 - protein, 166 aa, Desulfovibrio sp.
  misc_feature (1)..(166): tr|A0A396CD23|A0A396CD23_9DELT NADPH-dependent 7-cyano- 7-deazaguanine reductase OS=Desulfovibrio sp. AM18-2 OX =2292040 GN=queF PE=3 SV=1
MTSRSQDQTGNLKVLGSGRLHAPEGGPSVALLESFPNCFPQRPYVISFTFPEFTSLCPVTGQPDSGIITVEYIPDQRCVESKSFKLYMFAFRNHQSFMETITNTVLEDLRALMDPCWCRVKGLFAPRGGTRIHVFAEDFKELPEERERLVRAAVAAWKSEPDPHRP

SEQ ID NO: 45687 - protein, 165 aa, Desulfovibrio vulgaris; identical to SEQ ID NO: 45669
  misc_feature (1)..(165): tr|A0A0E0T0L0|A0A0E0T0L0_DESVR NADPH-dependent 7-cyano- 7-deazaguanine reductase OS=Desulfovibrio vulgaris (str ain RCH1) OX=573059 GN=queF PE=3 SV=1

SEQ ID NO: 45688 - protein, 165 aa, Desulfovibrio vulgaris; identical to SEQ ID NO: 45669
  misc_feature (1)..(165): sp|Q72DG6|QUEF_DESVH NADPH-dependent 7-cyano-7-deazagua nine reductase OS=Desulfovibrio vulgaris (strain Hilden borough / ATCC 29579 / DSM 644 / NCIMB 8303) OX=882 GN= queF PE=3 SV=1

SEQ ID NO: 45689 - protein, 166 aa, Desulfovibrionaceae bacterium
  misc_feature (1)..(166): tr|A0A2V2GCB1|A0A2V2GCB1_9DELT NADPH-dependent 7-cyano- 7-deazaguanine reductase OS=Desulfovibrionaceae bacteri um OX=2049043 GN=queF PE=3 SV=1
MKTKEGGQGTARIDEGLSLLGGETCYRVDYAPEVLESFANKHPDNDYWVRFRCPEFTSLCPITGQPDFAEIRIAYLPDRRMVESKSLKLYLFSFRNHGDFHEDCVNIIMKDLIRLMDPKYIEVEGIFTPRGGIAIWPYANYGRAGTRYEELASFRLREHGLNRADA

SEQ ID NO: 45690 - protein, 170 aa, Desulfovibrionaceae bacterium
  misc_feature (1)..(170): tr|A0A316MCZ0|A0A316MCZ0_9DELT NADPH-dependent 7-cyano- 7-deazaguanine reductase OS=Desulfovibrionaceae bacteri um OX=2049043 GN=queF PE=3 SV=1
MSFSSGAVRSGHGEGAFSDSRSGEGLSLLGRTAEYCRDYAPEVLETFTNKHPDNDYWVRFNCPEFTSLCPITGQPDFAEIRISYLPDRKMVESKSLKLYLFSFRNHGDFHEDCVNVIMKDLIRLMEPKYIEVTGIFTPRGGISIWPYANYGRPGTEYEELARYRMRHHDL

SEQ ID NO: 45691 - protein, 147 aa, Desulfovibrionales bacterium
  misc_feature (1)..(147): tr|A0A1F9PYD5|A0A1F9PYD5_9DELT NADPH-dependent 7-cyano- 7-deazaguanine reductase OS=Desulfovibrionales bacteriu m GWA2_65_9 OX=1797915 GN=queF PE=3 SV=1
MTTDDTTGLKHLGSGKTSYAFEEPTAAILEAFPNKYPNRDYQICFEHPEFTSLCPKTGQPDFATIEITYVPDLLCIETKSLKLYFTAYRNHGSFMETITNKILDDLVSVCQPRQMQVVALFNPRGGTSLTVTAEYVKDDAAPMGTRF

SEQ ID NO: 45692 - protein, 131 aa, Desulfurella acetivorans
  misc_feature (1)..(131): tr|W0JHF1|W0JHF1_DESAE NADPH-dependent 7-cyano-7-deazag uanine reductase OS=Desulfurella acetivorans A63 OX=694 431 GN=queF PE=3 SV=1
MRYGEEAILNNKLEKWENKNEFKFEIHIEFGEFTCLCPRSGYPDFATIRIKYVPDKYVVELKSLKLFLNSFRNKYISHEDSINLIYSTLFNFLEPIYLEIIGDFNPRGNVKTIIKIDSNMQGEYFEKNNKR

SEQ ID NO: 45693 - protein, 134 aa, Desulfurella amilsii
  misc_feature (1)..(134): tr|A0A1X4XUB1|A0A1X4XUB1_9DELT NADPH-dependent 7-cyano- 7-deazaguanine reductase OS=Desulfurella amilsii OX=156 2698 GN=queF PE=3 SV=1
MTMRYGEEAILNNQLERWENKNPFTFEIDIEFSEFTCLCPRSGYPDFATIRIKYIPDKYVIELKSFKLFLNSFRNKYISHEDSINEIYAALSNCLQPKFLEVIGDFNPRGNVKTIIKIDSKIQEAGFEKNNKRQ

SEQ ID NO: 45694 - protein, 131 aa, Desulfurella multipotens; identical to SEQ ID NO: 45692
  misc_feature (1)..(131): tr|A0A1G6NY90|A0A1G6NY90_9DELT NADPH-dependent 7-cyano- 7-deazaguanine reductase OS=Desulfurella multipotens OX =79269 GN=queF PE=3 SV=1

SEQ ID NO: 45695 - protein, 131 aa, Desulfurella sp.; identical to SEQ ID NO: 45692
  misc_feature (1)..(131): tr|A0A2N7Q205|A0A2N7Q205_9DELT NADPH-dependent 7-cyano- 7-deazaguanine reductase OS=Desulfurella sp. OX=1962857 GN=queF PE=3 SV=1

SEQ ID NO: 45696 - protein, 140 aa, Desulfurispirillum indicum
  misc_feature (1)..(140): tr|E6W555|E6W555_DESIS NADPH-dependent 7-cyano-7-deazag uanine reductase OS=Desulfurispirillum indicum (strain ATCC BAA-1389 / S5) OX=653733 GN=queF PE=3 SV=1
MAQAEGRSYDFLDTSHIDTGCLETFGYEGYRQFIQYKSAEFSAVCPFSGLPDIGTVILEYIPEKSIVELKSYKYYLVSFRNVGVYQEQATSRIFGDLWTALQPAYLKVATIYNTRGGIDTTCVVEQGDRSPYTADPIPGY

SEQ ID NO: 45697 - protein, 163 aa, Desulfurobacterium atlanticum
  misc_feature (1)..(163): tr|A0A239A8P4|A0A239A8P4_9BACT NADPH-dependent 7-cyano- 7-deazaguanine reductase OS=Desulfurobacterium atlantic um OX=240169 GN=queF PE=3 SV=1
MERDDFGTVKSLGKETNYVFTYKPELLEKFPNRFPGNRYWVSFNCPEFTALCPITGQPDFATIYIQYIPDKWLVESKSLKLYLFSFRNARDFHEDTVNRIAEDLFKLLEPFYIEVYGEFNPRGGISIDPFVQKFKDYDWVKELAKERFKLHRITPPDIKRNRG

SEQ ID NO: 45698 - protein, 162 aa, Desulfurobacterium indicum
  misc_feature (1)..(162): tr|A0A1R1MMD9|A0A1R1MMD9_9BACT NADPH-dependent 7-cyano- 7-deazaguanine reductase OS=Desulfurobacterium indicum OX=1914305 GN=queF PE=3 SV=1
MREDFGNVKSLGKKTGYVFEYKPEVLEKFPNKFPQNIYWVSFNCPEFTTLCPITGQPDFATIYIQYIPDKWLVESKSLKLYLFSYRNARDFHEDTVNRIAEDLFNLLEPYYIEVYGEFNPRGGISIDPFVQKFKRLDWVKELAKERFKLHRINPPRILRNRG

SEQ ID NO: 45699 - protein, 163 aa, Desulfurobacterium sp.
  misc_feature (1)..(163): tr|A0A432R4C6|A0A432R4C6_9BACT NADPH-dependent 7-cyano- 7-deazaguanine reductase OS=Desulfurobacterium sp. OX=2 004706 GN=queF PE=3 SV=1
MERKDFGTVTKLGKKTDYTFEYSPDLLEKFPNKFPGKVYWVSFNCPEFTTLCPITGQPDFATIYIQYIPDKWLVESKSLKLYLFSFRNARGFHEDTVNTIADDLFKLLNPFYIEVYGEFNPRGGISIDPFVQRFQEVDWVVELARERFKLHRIVPPEIRRNRG

SEQ ID NO: 45700 - protein, 163 aa, Desulfurobacterium thermolithotrophum
  misc_feature (1)..(163): tr|F0S1N6|F0S1N6_DESTD NADPH-dependent 7-cyano-7-deazag uanine reductase OS=Desulfurobacterium thermolithotroph um (strain DSM 11699 / BSA) OX=868864 GN=queF PE=3 SV=1
MERKDFGTVSKLGKKTDYTFEYTPEVLEKFPNRFPGKIYWVSFNCPEFTTLCPITGQPDFATIYIQYIPDKWLVESKSLKLYLFSFRNARDFHEDTVNRIADDIFNLLNPLYIEVYGEFNPRGGISIDPYVQRYQELDWVIELARERFKLHRITPPDIRRNRG

SEQ ID NO: 45701 - protein, 144 aa, Desulfuromonadaceae bacterium
  misc_feature (1)..(144): tr|A0A1G2WAD5|A0A1G2WAD5_9DELT NADPH-dependent 7-cyano- 7-deazaguanine reductase OS=Desulfuromonadaceae bacteri um GWB2_53_15 OX=1801895 GN=queF PE=3 SV=1
MKLHEQLKTLGEGSKTTYTYDQPDAALLEAFPSPFAQPDMNPAGAVGTLHIECPEFTCLCPMTGQPDFAKIVIDYQPDKLCVESKSLKLYLGSFRMHGEFHESGVNRICNDLVALIDPAWLTVRGEFTPRGGIPFWPTAEYRKR

SEQ ID NO: 45702 - protein, 134 aa, Desulfuromonadales bacterium
  misc_feature (1)..(134): tr|A0A1F9PPN8|A0A1F9PPN8_9DELT NADPH-dependent 7-cyano- 7-deazaguanine reductase (Fragment) OS=Desulfuromonadal es bacterium GWC2_61_20 OX=1797916 GN=A2005_13185 PE=3 SV=1
MPKAAKTSTRKPGLKALGLTTAYPDQYDPRLLEIFANRHPKRDSWTLLECSEFTSLCPITGQPDWATILIRYVADAQMVESKSLKLYLHGFRNRGDFHEDVVNVILDDLRAAMVPRYIEVLGIFHPRGGIAIHP

SEQ ID NO: 45703 - protein, 176 aa, Desulfuromonadales bacterium
  misc_feature (1)..(176): tr|A0A1F9PZ96|A0A1F9PZ96_9DELT NADPH-dependent 7-cyano- 7-deazaguanine reductase OS=Desulfuromonadales bacteriu m GWD2_61_12 OX=1797918 GN=queF PE=3 SV=1
MPKAAKTSTRKPGLKALGLTTAYPDQYDPRLLEIFANRHPKRDSWTLLECSEFTSLCPITGQPDWATILIRYVADAQMVESKSLKLYLHGFRNRGDFHEDVVNVILDDLRAAMVPRYIEVLGIFHPRGGIAIHPFVNWGSPTERRDAPGQSWADYARVRRDTMPLTETLELGKHLR

SEQ ID NO: 45704 - protein, 274 aa, Desulfuromonas acetexigens
  misc_feature (1)..(274): tr|A0A550JDE0|A0A550JDE0_9DELT NADPH-dependent 7-cyano- 7-deazaguanine reductase OS=Desulfuromonas acetexigens OX=38815 GN=queF PE=3 SV=1
MTPLDQLPLGQPTQYTDRYDNRLLCPVPRSLKRQELGLGEPLPFVGEDQWNGYELSWLNPKGKPVVALLQLRIPCHSPNLIESKSLKLYLNSYNQTPFATEVAVAEQLRADLSAVAGAEVAVALSRPDDLELWQIVPLPGQSLDDLDITVDRYQVDSDLLYCLPDAPEVEERLYSHLLKSNCLITSQPDWASLWLHYRGPAIDHAALLRYLISFRRHNEFHEQCVERIFSDVLRRCRPVQLSVYARYTRRGGLDINPWRSTHTPQAPNWRLARQ

SEQ ID NO: 45705 - protein, 275 aa, Desulfuromonas acetoxidans
  misc_feature (1)..(275): tr|Q1K442|Q1K442_DESA6 NADPH-dependent 7-cyano-7-deazag uanine reductase OS=Desulfuromonas acetoxidans (strain DSM 684 / 11070) OX=281689 GN=queF PE=3 SV=1
MSDLTEIPLGKTTEYPSQYDAGLLYPVPRHLKRDELGISEPLPFYGEDVWNSYELSWLNRKGKPVVALAVFRFSCQSPNLVESKSFKLYLNSLNQTRFDDQQAVIDCLQRDLSQASGSSVTVELSSLDDQSLWQVQTLPGECLDSVDLDVEHYQLNADLLRDAADSADPVEETLYSHLLKSNCLITSQPDWASVWISYRGGRLERRALLAYLISFRQHNEFHEQCVERIFADLMRYCHPQSLTVYARYTRRGGLDINPWRSTEPGTAPQWRLSRQ

SEQ ID NO: 45706 - protein, 276 aa, Desulfuromonas soudanensis
  misc_feature (1)..(276): tr|A0A0M4DG65|A0A0M4DG65_9DELT NADPH-dependent 7-cyano- 7-deazaguanine reductase OS=Desulfuromonas soudanensis OX=1603606 GN=queF PE=3 SV=1
MTDLESSLPLGRRSVYKDQYDPTLLCPVPRTLKREEIGVASPLPFGGYDIWNAYELSWLTPKGKPVVAMGEFHVPCISKNLIESKSFKLYLNSFNQTRFATSAEVQKLLAEDLGRVAGAPVTVRLIGSGEFAGESLRTLPGRCIDDLDIAIDRYALDPSLLDGAADPGRIVEETLHSHLLKSNCLITSQPDWGSVLVRYRGPRIDPAAFLRYLISFRQHNEFHEQCVERIFVDLMRRCHPQHLTVYARYTRRGGLDINPFRSNFENEVANLRLARQ

SEQ ID NO: 45707 - protein, 276 aa, Desulfuromonas sp.
  misc_feature (1)..(276): tr|A0A2N6EGL1|A0A2N6EGL1_9DELT NADPH-dependent 7-cyano- 7-deazaguanine reductase OS=Desulfuromonas sp. OX=892 G N=queF PE=3 SV=1
MNDLERQLPLGKPTDYPADYDPSLLCPIPRRIKREELGLVEPLPFQGFDLWNAYELSWLTPRGKPVVAMGEFRIPCSSDYMIESKSLKLYLNSFNQTRFDDMESVCTLLRQDLTNATGAPVDVHLTGAAEVGAWQVRSLPGRCIDDLDLEITQYELQPELLALAVDPGQSVSETLYSHLLKSNCLVTRQPDWASVMVRYRGGRIDAEQLLRYLVSFRRHNEFHEQCVERIFFDLLRYCQPEQLTVYARYTRRGGLDINPFRSNFESQVDNLRLPRQ

SEQ ID NO: 45708 - protein, 176 aa, Desulfuromonas sp.; identical to SEQ ID NO: 45703
  misc_feature (1)..(176): tr|A0A357YGL0|A0A357YGL0_9DELT NADPH-dependent 7-cyano- 7-deazaguanine reductase OS=Desulfuromonas sp. OX=892 G N=queF PE=3 SV=1

SEQ ID NO: 45709 - protein, 274 aa, Desulfuromonas thiophila
  misc_feature (1)..(274): tr|A0A1G6ZV32|A0A1G6ZV32_9DELT NADPH-dependent 7-cyano- 7-deazaguanine reductase OS=Desulfuromonas thiophila OX =57664 GN=queF PE=3 SV=1
MNPLEHLPLGQPTRYTDRYDSGLLCPVPRQLKRAELGIDTPLPFVGEDLWNGYELSWLNPKGKPVVALLQLRVPCHSPNLIESKSLKLYLNSYNQTAFATMGAVADQLRRDLSAVAGTAVTLSLSHPDDVATWQVGQLTGQCLDDLDIAIDRYQVDSGLLSCAPAAPEVEEQLYSHLLKSNCLITSQPDWASLWLQYRGPAIDHAGLLRYLISFRQHNEFHEQCVERIFTDVLRCCRPTQLSVYARYTRRGGLDINPWRSTDTAVAPNWRLARQ

SEQ ID NO: 45710 - protein, 276 aa, Desulfuromusa kysingii
  misc_feature (1)..(276): tr|A0A1H3VVW1|A0A1H3VVW1_9DELT NADPH-dependent 7-cyano- 7-deazaguanine reductase OS=Desulfuromusa kysingii OX=3 7625 GN=queF PE=3 SV=1
MVDHKLNLPLGEKTAYKAEYDPALLCPFPRQIKRDEIGVAEDLPFSGYDIWNAFELSWLNLKGKPVVAMGEFHIPCESPNLVESKSFKLYLNSFNQTCFSGFEQVEALLVKDLCDVCGAPILVRLFDSRQFDTAKLQSFPGTCIDGLDIEVKGYSLNPALLKNATDSECRVEEELYSHLLKSNCLVTNQPDWGSVLIRYCGRKIDQESLLRYLISFRQHNEFHEQCVERIFMDLMRHCQPERLTVYARYTRRGGLDINPFRSNYEDKIENLRLARQ

SEQ ID NO: 45711 - protein, 130 aa, Dethiobacter alkaliphilus
  misc_feature (1)..(130): tr|C0GIY6|C0GIY6_9FIRM NADPH-dependent 7-cyano-7-deazag uanine reductase OS=Dethiobacter alkaliphilus AHT 1 OX= 555088 GN=queF PE=3 SV=1
MHNEFEVLGKNVPEPRRKLEVFEKPAGVDRVVLESDEVTSLCPVTGQPDWETVIIEYEPDRYCIESKSLKLYFWSFRQEGVFCEGLAAQIANDVHAACKPFFCKVTVIQKPRGGITITASATAGGEKNNE

SEQ ID NO: 45712 - protein, 153 aa, Devosia elaeis
  misc_feature (1)..(153): tr|A0A178HS10|A0A178HS10_9RHIZ NADPH-dependent 7-cyano- 7-deazaguanine reductase OS=Devosia elaeis OX=1770058 G N=queF PE=3 SV=1
MTDFSLQVTQLGRETKAADSPELAILERVPNPQADTDYVARFTVPEFTSLCPVTGQPDFAHLVIDYVPGDWLVESKSLKLYLTSFRNHGAFHEDCTVSIGRRLTSLLEPRWLRIGGYWYPRGGIPIDVFWQTGIVPQHVWLPETGVPTYRGRG

SEQ ID NO: 45713 - protein, 151 aa, Devosia geojensis
  misc_feature (1)..(151): tr|A0A0F5FVT1|A0A0F5FVT1_9RHIZ NADPH-dependent 7-cyano- 7-deazaguanine reductase OS=Devosia geojensis OX=443610 GN=queF PE=3 SV=1
MIEAQNLQLGRDVGAPERPEDAVLDPVPNPHPDTLYVARFVAPEFTSLCPVTGQPDFAHLVIDYVPDRHLVESKSLKLYLTSFRNHGAFHEGCTIDIGRKIVEAVKPRWLRIGGYWYPRGGIPIDVFWQTGAPPEGLWLPDQGVPPYRGRG

SEQ ID NO: 45714 - protein, 148 aa, Devosia insulae
  misc_feature (1)..(148): tr|A0A1E5XSW3|A0A1E5XSW3_9RHIZ NADPH-dependent 7-cyano- 7-deazaguanine reductase OS=Devosia insulae DS-56 OX=11 16389 GN=queF PE=3 SV=1
MDTSVLGRPAEMPLDPASAVLDRVPNPHPDIDYLIRFTVPEFTALCPSTGQPDFAHLVIDYVADQWMIESKSLKLFMFSYRNHGAFHEATTVEIAKRLVEALAPRWLRIGGYWYPRGGIPIDVFWQTGAAPATLWLPEQGVPGYRGRG

SEQ ID NO: 45715 - protein, 152 aa, Devosia psychrophila
  misc_feature (1)..(152): tr|A0A1I1RGW8|A0A1I1RGW8_9RHIZ NADPH-dependent 7-cyano- 7-deazaguanine reductase OS=Devosia psychrophila OX=728 005 GN=queF PE=3 SV=1
MINLPDNLQLGTSSTIPATPEVARLDRVPNPQADTQYLTRFTAPEFTSLCPVTGQPDFAHIVIDIVPNQWLVESKSLKLYLTSFRNHGAFHEDCTVAIGRRVAELIEPHWLRIGGYWYPRGGMPIDVFWQYGALPPNVWVPEQGVPTYRGRG

SEQ ID NO: 45716 - protein, 152 aa, Devosia riboflavina
  misc_feature (1)..(152): tr|A0A087LYL1|A0A087LYL1_9RHIZ NADPH-dependent 7-cyano- 7-deazaguanine reductase OS=Devosia riboflavina OX=4691 4 GN=queF PE=3 SV=1
MINLPDDLQLGTSSTIPATPEAARLDRVPNPQADTQYLTRFTAPEFTSLCPVTGQPDFAHIVIDFVPNQWLVESKSLKLYLTSFRNHGAFHEDCTVAIGRRVAELIEPHWLRIGGYWYPRGGMPIDVFWQYGTLPPNVWVPEQGVPTYRGRG

SEQ ID NO: 45717 - protein, 150 aa, Devosia sp.
  misc_feature (1)..(150): tr|A0A0Q4NLN1|A0A0Q4NLN1_9RHIZ NADPH-dependent 7-cyano- 7-deazaguanine reductase OS=Devosia sp. Leaf64 OX=17362 29 GN=queF PE=3 SV=1
MNSETLQLGKDVEVPQHPDEAVLDPVPNPHPDVNYVARYVAPEFTSLCPVTGQPDFAHLVIDYVPDQFLVESKSLKLFLTSFRNHGAFHEGCTIDVAMRIVAAIKPRWLRIGGYWYPRGGIPIDVFWQTGPVPDGVWLPDQGVPPYRGRG

SEQ ID NO: 45718 - protein, 153 aa, Devosia sp.; identical to SEQ ID NO: 45712
  misc_feature (1)..(153): tr|A0A2L1S776|A0A2L1S776_9RHIZ NADPH-dependent 7-cyano- 7-deazaguanine reductase OS=Devosia sp. I507 OX=2083786 GN=queF PE=3 SV=1

SEQ ID NO: 45719 - protein, 164 aa, Dialister invisus
  misc_feature (1)..(164): tr|R5SND2|R5SND2_9FIRM NADPH-dependent 7-cyano-7-deazag uanine reductase OS=Dialister invisus CAG:218 OX=126307 2 GN=queF PE=3 SV=1
MGNRREGVDELKALGNQYTKYVFDYNPDVLEKIPNKHDDRDYFVKFNCPEFTSLCPKTGQPDFATIYISYIPDKYIVESKSLKLYLFGFRNHGDFHEDCVNIIMTDLIKLLHPRFIEVWGKFLPRGGLSIDPYCNYGISNTEWRDFARFRLLRHDLDPEKIDNR

SEQ ID NO: 45720 - protein, 164 aa, Dialister invisus
  misc_feature (1)..(164): tr|C9LM42|C9LM42_9FIRM NADPH-dependent 7-cyano-7-deazag uanine reductase OS=Dialister invisus DSM 15470 OX=5920 28 GN=queF PE=3 SV=1
MGNIREGVDELKALGNQHTKYVFDYNPDVLEKIPNKHDDRDYFVKFNCPEFTSLCPKTGQPDFATIYISYIPDKYIVESKSLKLYLFGFRNHGDFHEDCVNIIMTDLIKLLHPRFIEVWGKFLPRGGLSIDPYCNYGIPNTEWRDFARFRLLRHDLDPEKIDNR

SEQ ID NO: 45721 - protein, 164 aa, Dialister micraerophilus
  misc_feature (1)..(164): tr|F2BVI6|F2BVI6_9FIRM NADPH-dependent 7-cyano-7-deazag uanine reductase OS=Dialister micraerophilus DSM 19965 OX=888062 GN=queF PE=3 SV=1
MDNRKTKIEDLSHLGNKNTKYVFETTPEVLEAVPNSHEDRDYFVKFNCPEFTSLCPKTGQPDFATIYISYVPDKFIVESKSLKLYLFSYRNHGAFHEDCVNMIMEDLIKLLKPRYIEVWGKFLPRGGLSIDPYCNYGKKGTKWEGVAENRLINHDMYPEIVNNR

SEQ ID NO: 45722 - protein, 164 aa, Dialister microaerophilus
  misc_feature (1)..(164): tr|E4L8F2|E4L8F2_9FIRM NADPH-dependent 7-cyano-7-deazag uanine reductase OS=Dialister microaerophilus UPII 345- E OX=910314 GN=queF PE=3 SV=1
MDNRKTKIEDLSHLGNKNTKYVFETTPEVLEAVPNSHEDRDYFVKFNCPEFTSLCPKTGQPDFATIYISYVPDKFIVESKSLKLYLFSYRNHGAFHEDCVNMIMEDLIKLLKPRYIEVWGKFLPRGGLSIDPYCNYGKKGTKWESVAENRLINHDMYPEIVNNR

SEQ ID NO: 45723 - protein, 164 aa, Dialister pneumosintes
  misc_feature (1)..(164): tr|A0A1B3WEV3|A0A1B3WEV3_9FIRM NADPH-dependent 7-cyano- 7-deazaguanine reductase OS=Dialister pneumosintes OX=3 9950 GN=queF PE=3 SV=1
MSNSKNGLESLTLLGNQNTRYTFFYQPEILEKIPNAHSYRDFFVKFNCPEFTSLCPKTGQPDFATLYISYIPDAYMVESKSLKLYLFSYRNHGDFHENCVNTIMNDLISLLDPRYIEVWGKFLPRGGLSIDPYCNYGKEDTKWEEFATHRLLQHDLYPEIVTNR

SEQ ID NO: 45724 - protein, 163 aa, Dialister sp.
  misc_feature (1)..(163): tr|A0A510GE01|A0A510GE01_9FIRM NADPH-dependent 7-cyano- 7-deazaguanine reductase OS=Dialister sp. 5BBH33 OX=258 2419 GN=queF PE=3 SV=1
MSQRDDLDKLNQLGNKNTKYSYDYDPSLLEKIENKHQDNDYFIKFNCPEFTSLCPKTGQPDFATIYISYIPDKYMVESKSLKLYLFSYRNHGDFHEDCVNQIMIDLIRLLRPRYIEVWGKFLPRGGLSIDPFCNYGILGTEWKDFARYRLLHHDLNPERIDNR

SEQ ID NO: 45725 - protein, 164 aa, Dialister sp.
  misc_feature (1)..(164): tr|R6AG17|R6AG17_9FIRM NADPH-dependent 7-cyano-7-deazag uanine reductase OS=Dialister sp. CAG:486 OX=1262870 GN =queF PE=3 SV=1
MPNTREGLDQLKQLGSQNTKYTYDYNPSLLERIPNKHADRHYFIKFNCPEFTSLCPKTGQPDFATIYISYIPDQYMVESKSLKLYLFSFRNHGDFHEDCVNIIMSDLIELLHPRYIEVWGKFLPRGGLSIDPYCNYGTPDTEWKDFARFRLLHHDMNPEMVNNR

SEQ ID NO: 45726 - protein, 164 aa, Dialister succinatiphilus
  misc_feature (1)..(164): tr|H1CXW7|H1CXW7_9FIRM NADPH-dependent 7-cyano-7-deazag uanine reductase OS=Dialister succinatiphilus YIT 11850 OX=742743 GN=queF PE=3 SV=1
MTEKREGLDELKQLGSRNTKYTYDYDPGLLERIPNKHSDRDFFIKFNCPEFTSLCPKTGQPDFATIYISYIPDKYMVESKSLKLYLFSYRNHGDFHEDCVNMIMTDLIRLLRPRYIEVWGKFLPRGGLSIDPYCNYGIPGTEWKDFARFRLLHHDMNPEKVDNR

SEQ ID NO: 45727 - protein, 281 aa, Diaphorobacter nitroreducens
  misc_feature (1)..(281): tr|A0A3N1Z8T7|A0A3N1Z8T7_9BURK NADPH-dependent 7-cyano- 7-deazaguanine reductase OS=Diaphorobacter nitroreducen s OX=164759 GN=queF PE=3 SV=1
MNTPEHSQLGKASAYADQYDASLLFPIPRADKRAEIGIDGNAPFFGADLWTAFELSWLNLRGKPQVAIAHITVPCETPHIVESKSFKLYLNSFNNTRFASEAEVRARIRADVSEAVWRGAEHPGTVGVTLLLPEAFDREPIHELDGLLLDRLDVECTRYQPAPELLAAHHDEAPVTETLVSHLLKSNCLVTGQPDWGSVQITYSGAQIDQAGLLQYLVSFRNHNEFHEQCVERIFMDIWTRCRPIKLAVYARYTRRGGLDINPLRTSHPQQLPRNVRTARQ

SEQ ID NO: 45728 - protein, 281 aa, Diaphorobacter polyhydroxybutyrativorans
  misc_feature (1)..(281): tr|A0A2Z2LBE0|A0A2Z2LBE0_9BURK NADPH-dependent 7-cyano- 7-deazaguanine reductase OS=Diaphorobacter polyhydroxyb utyrativorans OX=1546149 GN=queF PE=3 SV=1
MNTPEHSQLGKASAYADQYDASLLFPIPRADKRAEIGIDGNAPFFGADLWTAFELSWLNLRGKPQVAIAHITVPCETPHIVESKSFKLYLNSFNNTRFASEAEVRACIRADVSEAVWRGAEHPGTVGVTLLLPEAFDREPIHELDGLLLDRLDVECTRYQPAPELLAAHHDEAPVTETLVSHLLKSNCLVTGQPDWGSVQITYSGAQIDQAGLLQYLVSFRNHNEFHEQCVERIFMDIWTRCRPIKLAVYARYTRRGGLDINPLRTSHPQQLPRNVRTARQ

SEQ ID NO: 45729 - protein, 281 aa, Diaphorobacter sp.; identical to SEQ ID NO: 43617
  misc_feature (1)..(281): tr|A0A2S4KHW3|A0A2S4KHW3_9BURK NADPH-dependent 7-cyano- 7-deazaguanine reductase OS=Diaphorobacter sp. LR2014-1 OX=1933219 GN=queF PE=3 SV=1

SEQ ID NO: 45730 - protein, 281 aa, Diaphorobacter sp.; identical to SEQ ID NO: 43617
  misc_feature (1)..(281): tr|A0A0J0UH26|A0A0J0UH26_9BURK NADPH-dependent 7-cyano- 7-deazaguanine reductase OS=Diaphorobacter sp. J5-51 OX =680496 GN=queF PE=3 SV=1

SEQ ID NO: 45731 - protein, 157 aa, Dichelobacter nodosus
  misc_feature (1)..(157): tr|A5EUT9|A5EUT9_DICNV NADPH-dependent 7-cyano-7-deazag uanine reductase OS=Dichelobacter nodosus (strain VCS17 03A) OX=246195 GN=queF PE=3 SV=1
MRTPQECAQITLLGKQKSDYPTHYDPSILEAFANKHLENDYFVHFICPEFTSLCPITGQPDFATIHLAYLPDQLLVESKSLKFYLFSFRNHGDFHEDCVNIIMKDLITLMAPKYIEVLGCFTPRGGIAIHPYANYGRPNTIYAEMAQQRLQNHRIAS

SEQ ID NO: 45732 - protein, 157 aa, Dichelobacter nodosus; identical to SEQ ID NO: 45731
  misc_feature (1)..(157): tr|A0A5F1ACG0|A0A5F1ACG0_DICNO NADPH-dependent 7-cyano- 7-deazaguanine reductase OS=Dichelobacter nodosus OX=87 0 GN=queF PE=3 SV=1

SEQ ID NO: 45733 - protein, 150 aa, Dichotomicrobium thermohalophilum
  misc_feature (1)..(150): tr|A0A397Q6D2|A0A397Q6D2_9RHIZ NADPH-dependent 7-cyano- 7-deazaguanine reductase OS=Dichotomicrobium thermohalo philum OX=933063 GN=queF PE=3 SV=1
MSDDLTQLGKAAAIPASPEEARLERVANPHPDVDYVARFTAPEFTSICPVTGQPDFAHLVIDYVPDAWIVESKSLKLYLSAFRNHGAFHEDCTIAIAKRLVDLLSPKWLRIGGYWYPRGGIPIDVFWQTGEPPAGVWIPDQGVAPYRGRG

SEQ ID NO: 45734 - protein, 280 aa, Dickeya aquatica
  misc_feature (1)..(280): tr|A0A375A7R7|A0A375A7R7_9GAMM NADPH-dependent 7-cyano- 7-deazaguanine reductase OS=Dickeya aquatica OX=1401087 GN=queF PE=3 SV=1
MHITENDSITHLGVRSSYPDNYDPALLEALPRARGRDLIGVTGEALPFHGHDIWTAFELSWLNRKGKPLVGIAEFIIPASSENLIESKSFKLYLNSFNQTRFNDIGEVHATLINDLSAAAKGDVKVTLYPALSGYPAEIDKLPGTNIDELDIEVNDYSFNPDYLQHAVRDNAPVVSETLNSNLLKSNCLVTHQPDWGSVVIKYEGRQIDQEALLRYLISFRQHNEFHEQCVERIFNDLKRYCQPQKLSVFARYTRRGGLDINPFRSDFESEATTGRLVRQ

SEQ ID NO: 45735 - protein, 280 aa, Dickeya chrysanthemi
  misc_feature (1)..(280): tr|C6CHU9|C6CHU9_DICC1 NADPH-dependent 7-cyano-7-deazag uanine reductase OS=Dickeya chrysanthemi (strain Ech159 1) OX=561229 GN=queF PE=3 SV=1
MHITENDSITHLGVRSSYPDKYDPTLLEALPRARGRDLVGLTGSTLPFDGYDLWTAFELSWLNRKGKPLVGIAEFIIPASSENLIESKSFKLYLNSFNQTRFQDIGEVHATLIKDLSAAANGDVKVTLYPGLTGYPSQIDTLPGINIDELDIEVNDYGFNPDYLQHAVRDNAPLVSETLCSNLLKSNCLVTYQPDWGSVVIKYEGRQIDREALLRYLISFRQHNEFHEQCVERIFNDLKHYCQPEKLTVFARYTRRGGLDINPFRSDFETEAATGRLVRQ

SEQ ID NO: 45736 - protein, 280 aa, Dickeya dadantii
  misc_feature (1)..(280): tr|E0SBN5|E0SBN5_DICD3 NADPH-dependent 7-cyano-7-deazag uanine reductase OS=Dickeya dadantii (strain 3937) OX=1 98628 GN=queF PE=3 SV=1
MHITENDSITHLGVRSSYPDKYDPTLLEALPRARGRDLVGLTGSDLPFDGYDLWTAFELSWLNHKGKPLVGIAEFIIPASSENLIESKSFKLYLNSFNQTRFRDIGEVHATLIKDLSAAANGDVKVTLYPGLTGYPSQIDTLPGINIDELDIEVNDYGFNPDYLQHAVRDKAPVVAETLCSNLLKSNCLVTYQPDWGSVVIKYEGRQIDREALLRYLISFRQHNEFHEQCVERIFNDLKRYCQPEKLTVFARYTRRGGLDINPFRSNFETEAATGRLVRQ

SEQ ID NO: 45737 - protein, 280 aa, Dickeya dianthicola
  misc_feature (1)..(280): tr|A0A385XVV3|A0A385XVV3_9GAMM NADPH-dependent 7-cyano- 7-deazaguanine reductase OS=Dickeya dianthicola OX=2040 39 GN=queF PE=3 SV=1
MHITENDSITHLGVRSSYPDKYDPALLEALPRARGRDLVGLTGPDLPFDGYDLWTAFELSWLNHKGKPLVGIAEFIIPASSENLIESKSFKLYLNSFNQTRFRDIGEVHATLIKDLSAAANGDVKVTLYPGLTGYPAQIDTLPGINIDELDIEVNDYGFNPDYLQHAVRDNAPVVAETLCSNLLKSNCLVTYQPDWGSVVIKYEGRQIDREALLRYLISFRQHNEFHEQCVERIFNDLKRYCRPEKLTVFARYTRRGGLDINPFRSDFETQAATGRLVRQ

SEQ ID NO: 45738 - protein, 280 aa, Dickeya fangzhongdai
  misc_feature (1)..(280): tr|A0A2K8QIM6|A0A2K8QIM6_9GAMM NADPH-dependent 7-cyano- 7-deazaguanine reductase OS=Dickeya fangzhongdai OX=177 8540 GN=queF PE=3 SV=1
MHITENDSITHLGVRSSYPDKYDPALLEALPRARGRDLVGLTGPDLPFDGYDLWTAFELSWLNHKGKPLVGIAEFIIPASSENLIESKSFKLYLNSFNQTRFRDIGEVHATLIKDLSAAANGDVKVTLYPGLTGYPAQIDTLPGINIDELDIEVNDYGFNPDYLQHAVRDNAPLVAETLCSNLLKSNCLVTYQPDWGSVVIKYEGRQIDREALLRYLISFRQHNEFHEQCVERIFNDLKRYCRPEKLTVFARYTRRGGLDINPFRSDFETEAATGRLVRQ

SEQ ID NO: 45739 - protein, 280 aa, Dickeya paradisiaca
  misc_feature (1)..(280): tr|C6CD57|C6CD57_DICP7 NADPH-dependent 7-cyano-7-deazag uanine reductase OS=Dickeya paradisiaca (strain Ech703) OX=579405 GN=queF PE=3 SV=1
MHITENDHITHLGVRSSYPDHYAPELLEALPRSRGRDLIGVDGASLPFSGYDLWTGFELSWLNHKGKPLVGIAEFTIPASSENLIESKSFKLYLNSFNQTRFRDAGEVHATLIKDLSAAANGDVGVTLYPGLAGYPAGTDALPGINIDELDIDVNNYDFNPDYLQHAIAEKAPLVAETLCSNLLKSNCLVTHQPDWGSVLIRYEGRQIDREALLRYLISFRQHNEFHEQCVERIFSDIKCYCQPEKLSVFARYTRRGGLDINPFRSDFETTAAVGRLVRQ

SEQ ID NO: 45740 - protein, 280 aa, Dickeya solani
  misc_feature (1)..(280): tr|A0A2K8W2U1|A0A2K8W2U1_9GAMM NADPH-dependent 7-cyano- 7-deazaguanine reductase OS=Dickeya solani RNS 08.23.3. 1.A OX=1240086 GN=queF PE=3 SV=1
MHITENDSITHLGVRSSYPDKYDPTLLEALPRARGRDLVGLTGPDLPFDGYDLWTAFELSWLNHKGKPLVGIAEFIIPASSENLIESKSFKLYLNSFNQTRFRDIGEVHATLIKDLSAAANGDVKVTLFPGLTGYPAQIDTLPGINIDELDIEVNDYGFNPDYLQHAVRDKAPVVAETLCSNLLKSNCLVTYQPDWGSVVIKYEGRQIDREALLRYLISFRQHNEFHEQCVERIFNDLKRYCQPEKLTVFARYTRRGGLDINPFRSDFETEAATGRLVRQ

SEQ ID NO: 45741 - protein, 280 aa, Dickeya sp.
  misc_feature (1)..(280): tr|A0A454UPI7|A0A454UPI7_9GAMM NADPH-dependent 7-cyano- 7-deazaguanine reductase OS=Dickeya sp. FVG10-MFV-A16 O X=2487135 GN=queF PE=3 SV=1
MHITENDSITHLGVRSSYPDKYDPALLEALPRARGRDLVGLTGPDLPFSGYDLWTAFELSWLNHKGKPLVGIAEFIIPASSENLIESKSFKLYLNSFNQTRFRDIGEVHATLIKDLSAAANGDVKVTLYPGLTGYPAQIDTLPGINIDELDIEVNDYGFNPDYLQHAVRDNAPLVAETLCSNLLKSNCLVTYQPDWGSVVIKYEGRQIDREALLRYLISFRQHNEFHEQCVERIFNDLKRYCQPEKLTVFARYTRRGGLDINPFRSDFETEAATGRLVRQ

SEQ ID NO: 45742 - protein, 280 aa, Dickeya sp.; identical to SEQ ID NO: 45741
  misc_feature (1)..(280): tr|A0A3N0FYE8|A0A3N0FYE8_9GAMM NADPH-dependent 7-cyano- 7-deazaguanine reductase OS=Dickeya sp. FVG1-MFV-O17 OX =2487136 GN=queF PE=3 SV=1

SEQ ID NO: 45743 - protein, 280 aa, Dickeya zeae
  misc_feature (1)..(280): tr|A0A2K9QBM5|A0A2K9QBM5_9GAMM NADPH-dependent 7-cyano- 7-deazaguanine reductase OS=Dickeya zeae OX=204042 GN=q ueF PE=3 SV=1
MHITENDSITHLGVRSSYPDKYDPTLLEALPRARGRDLVGLTGSPLPFDGYDLWTAFELSWLNRKGKPLVGIAEFIIPASSENLIESKSFKLYLNSFNQTRFQDIGEVHATLIKDLSAAANGDVKVTLYPGLTGYSSQIDTLPGINIDELDIEVNDYGFNPDYLQHAVRDNAPHVTETLCSNLLKSNCLVTYQPDWGSVVIKYEGRQIDREALLRYLISFRQHNEFHEQCVERIFNDLKRYCQPEKLTVFARYTRRGGLDINPFRSDFETEATTGRLVRQ

SEQ ID NO: 45744 - protein, 280 aa, Dickeya zeae
  misc_feature (1)..(280): tr|A0A0A8FAA7|A0A0A8FAA7_9GAMM NADPH-dependent 7-cyano- 7-deazaguanine reductase OS=Dickeya zeae EC1 OX=1427366 GN=queF PE=3 SV=1
MHITENDGITHLGVRSSYPDKYDPTLLEALPRARGRDLVGLSGASLPFDGYDLWTAFELSWLNRKGKPLVGIAEFIIPASSENLIESKSFKLYLNSFNQTRFQDIGEVHATLIKDLSAAANGDVKVTLYPGLTGYSSQIDTLPGINIDELDIEVNDYGFNPDYLQHAVRDNAPHVTETLCSNLLKSNCLVTYQPDWGSVVIKYQGRQIDREALLRYLISFRQHNEFHEQCVERIFNDLKRYCQPEKLTVFARYTRRGGLDINPFRSDFETEATTGRLVRQ

SEQ ID NO: 45745 - protein, 149 aa, Dictyobacter alpinus
  misc_feature (1)..(149): tr|A0A402BI84|A0A402BI84_9CHLR NADPH-dependent 7-cyano- 7-deazaguanine reductase OS=Dictyobacter alpinus OX=201 4873 GN=queF PE=3 SV=1
MQETEQTRVPGRYGFEEIAANQLEAWPNSYTDRDYVTHFEIPEFTCLCPRSGFPDFATIIVDYVPDKSVVELKSLKLYINTYRNRQISHEASANAILDDLVALLAPRWMRVVGDFTVRGNIKTVITTEYAHPEYTGPRPELKRYLPANG

SEQ ID NO: 45746 - protein, 149 aa, Dictyobacter aurantiacus
  misc_feature (1)..(149): tr|A0A401ZQC1|A0A401ZQC1_9CHLR NADPH-dependent 7-cyano- 7-deazaguanine reductase OS=Dictyobacter aurantiacus OX =1936993 GN=queF PE=3 SV=1
MSESEQDRVIGRYGFDEIAANHLEAWPNSYPERDYVTHFEIPEFTCLCPRSGFPDFATIIVDYVPDKQVVELKSLKLYINAYRNRQISHEASTNAILDDLVALLSPRWMRVVGDFTVRGNIKTVITTEYANPEYHGPRPELKRFLPAIG

SEQ ID NO: 45747 - protein, 149 aa, Dictyobacter kobayashii
  misc_feature (1)..(149): tr|A0A402AWJ5|A0A402AWJ5_9CHLR NADPH-dependent 7-cyano- 7-deazaguanine reductase OS=Dictyobacter kobayashii OX= 2014872 GN=queF PE=3 SV=1
MPESEQDRIPGRYGFDEIAANQLEAWPNSYPERDYVTHFEIPEFTCLCPRSGFPDFATIIIDYVPDKHVVELKSLKLYINTYRNRQISHEASSNAILDDLVELLAPRWMRVVGDFTVRGNIKTVITTEYANPDYQGPRPELKRFLPAIG

SEQ ID NO: 45748 - protein, 149 aa, Dictyobacter sp.
  misc_feature (1)..(149): tr|A0A5A5T673|A0A5A5T673_9CHLR NADPH-dependent 7-cyano- 7-deazaguanine reductase OS=Dictyobacter sp. Uno17 OX=2 014874 GN=queF PE=3 SV=1
MAESEQDRIPGRYGFDEIASSHLEAWPNSYQDRDYVTHFEIPEFTCLCPRSGFPDFATIIVDYVPDASVVELKSLKLYINAYRNRQISHEASANAILDDLVTLLSPRWMRVVGDFTVRGNIKTVITTEYARPEYQGPRPALTRYLPAIG

SEQ ID NO: 45749 - protein, 149 aa, Dictyobacter sp.
  misc_feature (1)..(149): tr|A0A5J4KUD9|A0A5J4KUD9_9CHLR NADPH-dependent 7-cyano- 7-deazaguanine reductase OS=Dictyobacter sp. W12 OX=260 7529 GN=queF PE=4 SV=1
MQETEQGREPGRYGFEEIAANQLEAWPNAYPDRDYVTHFEIPEFTCLCPRSGFPDFATIIVDYVPDKNVVELKSLKLYINAYRNRQISHEASTNAILDDLVALLAPRWIRIVGDFTVRGNIKTVITTEYAIPEYHGPRPELRRFMPAIG

SEQ ID NO: 45750 - protein, 119 aa, Dissulfuribacter thermophilus
  misc_feature (1)..(119): tr|A0A1B9F8C9|A0A1B9F8C9_9DELT NADPH-dependent 7-cyano- 7-deazaguanine reductase OS=Dissulfuribacter thermophil us OX=1156395 GN=queF PE=3 SV=1
MKYGEKEIQEAKLEPWPNPSPQRDYEISISFPEFTCLCPRSGYPDFATIKITYTPNEWIVELKSLKLFLNQYRDRYISHEQATCEIFEALDQILKPKKLKVIGDFNPRGNVHTVITVEK

SEQ ID NO: 45751 - protein, 274 aa, Dokdonella fugitiva
  misc_feature (1)..(274): tr|A0A4R2IF04|A0A4R2IF04_9GAMM NADPH-dependent 7-cyano- 7-deazaguanine reductase OS=Dokdonella fugitiva OX=3285 17 GN=queF PE=3 SV=1
MTTADTHGPLGRSVAYASRYDAGLLFPIARSIGRAELGLDASLPFDGVDVWNAYELSWLDARGKPEVALAEFRVPAASPAIIESKSFKLYLNSYNQERLASIDALRERLVHDLSAAAGASVEVLLLPPSRFGSLALRELDGESIDGLAIDVDDYGPPNDAHLHAGGVPVTETLVSNLLKSNCPVTGQPDWASVQVRYRGPRIDREGLLRYLVSFREHAGFHEQCVERIFVDISRRCAPESLEVYARYTRRGGLDINPWRASSGAGVANPRGARQ

SEQ ID NO: 45752 - protein, 277 aa, Dokdonella immobilis
  misc_feature (1)..(277): tr|A0A1I4XVZ3|A0A1I4XVZ3_9GAMM NADPH-dependent 7-cyano- 7-deazaguanine reductase OS=Dokdonella immobilis OX=578 942 GN=queF PE=3 SV=1
MTHRITDSPLGRAVTGSRQLDPGLLFPIARAHGREQLGFGSVLPFEGVDIWNAYELSWLDPRGKPVVAIAEFRVPASTPNLIESKSFKLYLNSLNQTRFSDPAAVRDRIADDLSAAAGARIGVSMAEVDQPLASMQGAFAGECIDGLPVAIDCYGPPQVQELAVRSGESLVEETLVSHLLKSNCPVTGQPDWASVQIAYAGAPIDREGLLRYLVSYRDHDDFHEQCVERIFRDLLARCAPTRLTVSARYTRRGGLDINPWRSNDPQRRADNPRLLRQ

SEQ ID NO: 45753 - protein, 276 aa, Dokdonella koreensis
  misc_feature (1)..(276): tr|A0A160DXI3|A0A160DXI3_9GAMM NADPH-dependent 7-cyano- 7-deazaguanine reductase OS=Dokdonella koreensis DS-123 OX=1300342 GN=queF PE=3 SV=1
MNTPHDSPLGRTVAFAADYDPTLLFPIPREAKRAEIGIAAPLPFVGIDYWNAYELSWLEPGGKPRVAVATFEVPASSPRIVESKSLKLYLNSYNQTHLADVATLRARLVADLSAAAGAPVGVAVQLLPAPQAPWIGEPEGELIDDLDVTFDRYTPPQPDLLTVDTGEDEADEALVSHLLRSNCPVTGQPDWATVQVAYVGPRIDRRGLLRYLVSYRLHDDFHEQCVERIFIDIVRRCAPRRLSVYARYTRRGGLDINPWRATAGSPPPPNRRAFRQ

SEQ ID NO: 45754 - protein, 138 aa, Dolichospermum compactum
  misc_feature (1)..(138): tr|A0A1Z4UXV4|A0A1Z4UXV4_9CYAN NADPH-dependent 7-cyano- 7-deazaguanine reductase OS=Dolichospermum compactum NI ES-806 OX=1973481 GN=queF PE=3 SV=1
MSNFAPETVSPASQEMKYGEREIAEGKLITFPNPRIGRRYDVNITLPEFTCKCPFSGYPDFATIYITYIPDEKVVELKALKLYINSYRDRYISHEETANQILDDLVAACDPLAITVKTDFTPRGNVHTVVEVRHQKAV

SEQ ID NO: 45755 - protein, 138 aa, Dolichospermum planctonicum
  misc_feature (1)..(138): tr|A0A480AHU8|A0A480AHU8_9CYAN NADPH-dependent 7-cyano- 7-deazaguanine reductase OS=Dolichospermum planctonicum OX=136072 GN=queF PE=3 SV=1
MSNFAPETLPPDIQEMKYGEREIAEGKLITFPNPRIGRRYDINITLPEFTCKCPFSGYPDFATIYITYIPDQRVVELKALKLYINSYRDRYISHEETANQILDDFVAACDPVEVTVKTDFTPRGNVHTVVEVKHQKGV

SEQ ID NO: 45756 - protein, 151 aa, Dolichospermum sp.
  misc_feature (1)..(151): tr|A0A5C0E074|A0A5C0E074_9CYAN NADPH-dependent 7-cyano- 7-deazaguanine reductase OS=Dolichospermum sp. UHCC 031 5A OX=1914871 GN=queF PE=3 SV=1
MSNFAPETVSPASQEMKYGEREIAEGKLITFPNPRIGRRYDVNITLPEFTCKCPFSGYPDFATIYITYVPDERVVELKALKLYINSYRDRYISHEETANQILDDFVAACDPLEVTVKTDFTPRGNVHTVVEVRHQKGVYSRSQESGVRSQE

SEQ ID NO: 45757 - protein, 165 aa, Domibacillus aminovorans
  misc_feature (1)..(165): tr|A0A177KJJ9|A0A177KJJ9_9BACI NADPH-dependent 7-cyano- 7-deazaguanine reductase OS=Domibacillus aminovorans OX =29332 GN=queF PE=3 SV=1
MAGRREDELKDITLLGNQGTKYVFDYDPSVLETFDNKHQNRDYFVKFNCPEFTSLCPMTGQPDFATIYISYIPDVKMVESKALKLYLFSFRNHGDFHEDCMNIILNDLVELMNPRYIEVWGKFTPRGGISIDPYTNYGRPGTKYEKMADYRMMNHDLYPETVDNR

SEQ ID NO: 45758 - protein, 165 aa, Domibacillus aminovorans
  misc_feature (1)..(165): tr|A0A177L3H4|A0A177L3H4_9BACI NADPH-dependent 7-cyano- 7-deazaguanine reductase OS=Domibacillus aminovorans OX =29332 GN=queF PE=3 SV=1
MAGRREDELKDITLLGNQGTKYIFDYDPSVLETFDNKHQNRDYFVKFNCPEFTSLCPMTGQPDFATIYISYIPDVKMVESKALKLYLFSFRNHGDFHEDCMNIILNDLVELMNPRYIEVWGKFTPRGGISIDPYTNYGRPGTKYEKMADYRMMNHDLYPETVDNR

SEQ ID NO: 45759 - protein, 165 aa, Domibacillus antri
  misc_feature (1)..(165): tr|A0A1Q8Q8G8|A0A1Q8Q8G8_9BACI NADPH-dependent 7-cyano- 7-deazaguanine reductase OS=Domibacillus antri OX=17142 64 GN=queF PE=3 SV=1
MAGRKEDELKDITLLGNQGTKYIFDYDPSVLETFDNKHQNRDYFVKFNCPEFTSLCPMTGQPDFATIYISYIPDVKMVESKSLKLYLFSFRNHGDFHEDCMNIILNDLVELMDPRYIEVWGKFTPRGGISIDPYTNYGRPGTKYEKMAEYRMMNHDLYPEKIDNR

SEQ ID NO: 45760 - protein, 165 aa, Domibacillus enclensis
  misc_feature (1)..(165): tr|A0A1N6WYE7|A0A1N6WYE7_9BACI NADPH-dependent 7-cyano- 7-deazaguanine reductase OS=Domibacillus enclensis OX=1 017273 GN=queF PE=3 SV=1
MAGRKEEELQDITLLGNQGTKYVFDYDPSVLETFDNKHQNRDYFVKFNCPEFTSLCPMTGQPDFATIYISYIPDVKMVESKALKLYLFSFRNHGDFHEDCMNIILNDLVELMDPRYIEVWGKFTPRGGISIDPYTNYGKPGTKYEKMAEYRMMNHDLYPETVDNR

SEQ ID NO: 45761 - protein, 165 aa, Domibacillus epiphyticus
  misc_feature (1)..(165): tr|A0A1V2AAX4|A0A1V2AAX4_9BACI NADPH-dependent 7-cyano- 7-deazaguanine reductase OS=Domibacillus epiphyticus OX =1714355 GN=queF PE=3 SV=1
MAGRNKDELKDITLLGNQGTKYIFDYDPSVLETFDNKHQNRDYFVKFNCPEFTSLCPMTGQPDFATIYISYIPDVKMVESKSLKLYLFSFRNHGDFHEDCMNIILNDLVELMDPRYIEVWGKFTPRGGISIDPYTNYGKPGTKYEKMAEYRMMNHDLYPETVDNR

SEQ ID NO: 45762 - protein, 165 aa, Domibacillus iocasae
  misc_feature (1)..(165): tr|A0A1E7DPY0|A0A1E7DPY0_9BACI NADPH-dependent 7-cyano- 7-deazaguanine reductase OS=Domibacillus iocasae OX=171 4016 GN=queF PE=3 SV=1
MAGRNEEELKDITLLGNQGTKYVFDYDPSVLETFDNKHQNRDYFVKFNCPEFTSLCPMTGQPDFATIYISYIPDVKMVESKSLKLYLFSFRNHGDFHEDCMNIILNDLVELMDPRYIEVWGKFTPRGGISIDPYTNYGKPGTKYEKMAEYRMMNHDLYPETVDNR

SEQ ID NO: 45763 - protein, 165 aa, Domibacillus mangrovi
  misc_feature (1)..(165): tr|A0A1Q5P1E1|A0A1Q5P1E1_9BACI NADPH-dependent 7-cyano- 7-deazaguanine reductase OS=Domibacillus mangrovi OX=17 14354 GN=queF PE=3 SV=1
MAGRREDELKDITLLGNQGTKYVFDYDASVLETFDNKHQNRDYFVKFNCPEFTSLCPMTGQPDFATIYISYIPDVKMVESKALKLYLFSFRNHGDFHEDCMNIILNDLVELMNPRYIEVWGKFTPRGGISIDPYTNYGRPGTKYEKMADYRMMNHDLYPETVDNR

SEQ ID NO: 45764 - protein, 154 aa, Donghicola sp.
  misc_feature (1)..(154): tr|A0A1M4N6Q1|A0A1M4N6Q1_9RHOB NADPH-dependent 7-cyano- 7-deazaguanine reductase OS=Donghicola sp. KarMa OX=177 9855 GN=queF PE=3 SV=1
MTDSIYSNLKQLGGATVMPQSPEEAELERVQNPQADVLYNVRFTAPEFTSLCPMTGQPDFAHLMIDYVPGEWLVESKSLKLFLGSFRNHGAFHEDCTISIARRLADFLDPKWLRIGGYWYPRGGIPIDVHYQTGPIPEGVWIPDQGVPPYRGRG

SEQ ID NO: 45765 - protein, 154 aa, Donghicola tyrosinivorans
  misc_feature (1)..(154): tr|A0A2T0WFY2|A0A2T0WFY2_9RHOB NADPH-dependent 7-cyano- 7-deazaguanine reductase OS=Donghicola tyrosinivorans O X=1652492 GN=queF PE=3 SV=1
MTDSIYSNLKQLGGATVMPQSLDEAELERVQNPQADVLYNVRFTAPEFTSLCPMTGQPDFAHLMIDYVPGEWLVESKSLKLFLGSFRNHGAFHEDCTISIARRLADFLEPKWLRIGGYWYPRGGIPIDVHYQTGPIPEGVWIPDQGVPPYRGRG

SEQ ID NO: 45766 - protein, 160 aa, Dorea longicatena
  misc_feature (1)..(160): tr|A0A564UF11|A0A564UF11_9FIRM NADPH-dependent 7-cyano- 7-deazaguanine reductase OS=Dorea longicatena OX=88431 GN=queF PE=3 SV=1
MREKENLTLLGNQQTEYSMDYNPSVLEAFQNKHPENDYFVKFNCPEFTSLCPITGQPDFATITISYVPDERLVESKSLKLYLFSFRNHGDFHEDVINIIMKDLVKLLEPKYIEVWGKFLPRGGLSIDPYCNYGKPGTDWDQVAWNRMSNHDMFPERVDNR

SEQ ID NO: 45767 - protein, 160 aa, Dorea longicatena
  misc_feature (1)..(160): tr|A0A3E5GE63|A0A3E5GE63_9FIRM NADPH-dependent 7-cyano- 7-deazaguanine reductase OS=Dorea longicatena OX=88431 GN=queF PE=3 SV=1
MREKENLTLLGNQQTEYSMDYNPSVLEAFQNKHPENDYFVKFNCPEFTSLCPITGQPDFATITISYVPDERLVESKSLKLYLFSFRNHGDFHEDVINIIMKDLVKLLEPKYIEVWGKFLPRGGLSIDPYCNYGKPGTDWEQVAWNRMSNHDMFPERVDNR

SEQ ID NO: 45768 - protein, 156 aa, Dorea sp.
  misc_feature (1)..(156): tr|R9N8Q3|R9N8Q3_9FIRM NADPH-dependent 7-cyano-7-deazag uanine reductase OS=Dorea sp. 5-2 OX=1235798 GN=queF PE =3 SV=1
MSELHALGKQTKYQMDYAPEVLESFENKHMDNDYFVKFNCPEFTSLCPITGQPDFATIYISYVPDRKMVESKSLKLYLFSYRNHGDFHEDCCNKIMKDLINLMEPKYIEVWGKFLPRGGISIDPYCNYGKKGTKWEEMAYDRLAHHDMYPEKVDNR

SEQ ID NO: 45769 - protein, 156 aa, Draconibacterium sediminis
  misc_feature (1)..(156): tr|A0A0D8JBX0|A0A0D8JBX0_9BACT NADPH-dependent 7-cyano- 7-deazaguanine reductase OS=Draconibacterium sediminis OX=1544798 GN=queF PE=3 SV=1
MSELKHLGNETNYDFNYRPDVLESFDNKHPENDYWVKFNCPEFTSLCPITGQPDFATIYLSYIPDEKLVESKSLKLYLFSFRNHGAFHEDCINIIMKDLIALMNPKYIEVWGKFLPRGGLSIDPFSNYGKPGTKYEEMAWFRMQNHDLNPEKIDNR

SEQ ID NO: 45770 - protein, 277 aa, Duganella phyllosphaerae
  misc_feature (1)..(277): tr|A0A1E7WGG6|A0A1E7WGG6_9BURK NADPH-dependent 7-cyano- 7-deazaguanine reductase OS=Duganella phyllosphaerae OX =762836 GN=queF PE=3 SV=1
MTNTVDLSPLGKTSAYRTDYAPELLFPIPRQGKRDELGLSGTLPFFGVDIWNAYEISWLNSRGKPQVAIARITVPADSPNIIESKSFKLYLNSFNQTRLDSVDALQALLQQDLSKAVGASIHIVLTQPDGFSKIAMGELDGLLLDRLDIEIDHYSPAPELLKAALDEEPVEEKLVSHLLKSNCLVTGQPDWASVQIHYSGPQIDQESLLKYLIGFREHNEFHEQCVERIFVDILRECAPQQLAVYARYTRRGGLDINPWRSNFSTGRNPPNLRGARQ

SEQ ID NO: 45771 - protein, 277 aa, Duganella sacchari
  misc_feature (1)..(277): tr|A0A1M7QVN0|A0A1M7QVN0_9BURK NADPH-dependent 7-cyano- 7-deazaguanine reductase OS=Duganella sacchari OX=55198 7 GN=queF PE=3 SV=1
MTNTADQSPLGKTSAYRTDYAPELLFPIPRQGKRDELGLSGTLPFFGVDIWNAYEISWLNQRGKPQVAIARITFPADSPNIIESKSFKLYLNSFNQTRLDSVAALKALLQQDLSAAAGGNVHIILTQPEEFGMVEMGELDGLLLDRLDIDVDHYSPSPEILKAALDEEPVEEKLVSHLLKSNCLVTGQPDWASVQIHYAGPQIDQESLLRYLIGFREHNEFHEQCVERIFVDILRQCQPQQLAVYARYTRRGGLDINPWRSNFSTAQKPLNLRGARQ

SEQ ID NO: 45772 - protein, 277 aa, Duganella sp.
  misc_feature (1)..(277): tr|A0A0Q5DYB8|A0A0Q5DYB8_9BURK NADPH-dependent 7-cyano- 7-deazaguanine reductase OS=Duganella sp. Leaf126 OX=17 36266 GN=queF PE=3 SV=1
MTNTADLSPLGKTSAYRTDYAPELLFPIPRQGKRDELGLSGTLPFFGVDIWNAYEISWLNHRGKPQVAIARVTVPADSPNIIESKSFKLYLNSFNQTRLDSVEALRALLQQDLSAAVGASVHLVLTQPDGFGAIAMGELDGLLLDRLDIEIDDYRPAPELLKAALDEEPVEEQLVSHLLKSNCLVTGQPDWASVQIHYSGPQIDQESLLRYLVGFREHNEFHEQCVERIFVDILRQCAPQQLAVYARYTRRGGLDINPWRSNFSTGRQPPNLRGARQ

SEQ ID NO: 45773 - protein, 277 aa, Duganella sp.
  misc_feature (1)..(277): tr|A0A0Q7VRS3|A0A0Q7VRS3_9BURK NADPH-dependent 7-cyano- 7-deazaguanine reductase OS=Duganella sp. Root1480D1 OX =1736471 GN=queF PE=3 SV=1
MPNLPEQSPLGKTSAYRTDYAPELLFPIPRQAKRDELGLQGTLPFFGVDIWNGYELSWLNMRGKPQVAVARFTIPADSPNLIESKSFKLYLNSFNQTRLTGPDALKILLQQDLSAAAGASVHVTLTMQEDFEKLGMGELEGQLLDRLDIDVDNYSPQPETLKANFDELPVEETLVSHLLKSNCLVTGQPDWGSVQISYYGPQIDQESLLKYLIGFREHNEFHEQCIERIFTDILRQCKPQHLTVYARYTRRGGLDINPWRTNFSSARRPSNLRNARQ

SEQ ID NO: 45774 - protein, 156 aa, Duncaniella muris
  misc_feature (1)..(156): tr|A0A2V1IMC5|A0A2V1IMC5_9BACT NADPH-dependent 7-cyano- 7-deazaguanine reductase OS=Duncaniella muris OX=209415 0 GN=queF PE=3 SV=1
MRSEQELDGVSLLGNTGVKYPTQYAPEVLETFVNKHPDNEYLVTFTCPEFTSLCPKTGQPDFAKIIISYIPREKMVESKSLKLYLFSFRNHGDFHEDCVNIIMKDLIALMDPRYIEVKGIFTPRGGIAILPFANHGDSEHQEMARRRMLDSFPSDF

SEQ ID NO: 45775 - protein, 155 aa, Duncaniella sp.
  misc_feature (1)..(155): tr|A0A4Z0V341|A0A4Z0V341_9BACT NADPH-dependent 7-cyano- 7-deazaguanine reductase OS=Duncaniella sp. TLL-A3 OX=2 530391 GN=queF PE=3 SV=1
MRTSNELDGVTLLGDTHVKYPDQYTPEVLEAFVNKHPGNEYLVTFTCPEFTSLCPKTGQPDFAKILISYIPRERMVESKSLKLYLFSFRNHGDFHEDCVNIIMKDLIRLMDPKYIEVKGIFTPRGGIAIHPFANWGDDEHQGLVKSRLLASFPNE

SEQ ID NO: 45776 - protein, 156 aa, Duncaniella sp.
  misc_feature (1)..(156): tr|A0A4P7VY35|A0A4P7VY35_9BACT NADPH-dependent 7-cyano- 7-deazaguanine reductase OS=Duncaniella sp. C9 OX=25303 92 GN=queF PE=3 SV=1
MRSEQELDGVSLLGNTGVKYPTQYAPEVLETFVNKHPDNEYLVTFTCPEFTSLCPKTGQPDFAKIIISYIPREKMVESKSLKLYLFSFRNHGDFHEDCVNIIMKDLIALMDPRYIEVKGIFTPRGGIAILPFANHGDSEHQEMARRRMLDSFPSDL

SEQ ID NO: 45777 - protein, 274 aa, Dyella japonica
  misc_feature (1)..(274): tr|A0A075JWY0|A0A075JWY0_9GAMM NADPH-dependent 7-cyano- 7-deazaguanine reductase OS=Dyella japonica A8 OX=12177 21 GN=queF PE=3 SV=1
MSTPEHSPLGKTTAYADRYDPSLLFPIPRQAKRDEIGVAAPLPFHGEDVWNAYELSWLDARGKPVVALAEFRVPATSPNIIESKSFKLYLNGFSQERMADRGALVATLARDLSAAAGAPVDVLLSDPQAQGHAVIDLDGTLVDELPVDIDDYGPPRADYLAVDDAKPVVEQTLVSNLLRSNCPVTGQPDWGSVQIRYRGAPIDPAGLLRYLVSFRNHNEFHEQCVERIFVDVMQRCRPEQLSVYARYTRRGGLDINPYRSTGLERPGNPRGARQ

SEQ ID NO: 45778 - protein, 274 aa, Dyella japonica
  misc_feature (1)..(274): tr|A0A0G9H3H0|A0A0G9H3H0_9GAMM NADPH-dependent 7-cyano- 7-deazaguanine reductase OS=Dyella japonica DSM 16301 O X=1440762 GN=queF PE=3 SV=1
MSTPEHSPLGKTTVYADRYDPALLFPIPRQAKRDEIGVAEPLPFHGEDVWNAYELSWLDMRGKPVVALAEFRVPASSPNIIESKSFKLYLNGFSQERMAGGDALAAILVRDLSAAAGAPVEVTLSHAQARGHAVTDLPGTLVDELAIEIDDYGPPRADYLMTNEHAPVVEESLVSNLLRSNCPVTGQPDWGSVQIHYRGAPIDHAGLLRYLVSFRNHNEFHEQCVERIFVDVMERCRPQHLSVYARYTRRGGLDINPYRSTGSERPGNPRGARQ

SEQ ID NO: 45779 - protein, 274 aa, Dyella jiangningensis
  misc_feature (1)..(274): tr|A0A023NYT1|A0A023NYT1_9GAMM NADPH-dependent 7-cyano- 7-deazaguanine reductase OS=Dyella jiangningensis OX=13 79159 GN=queF PE=3 SV=1
MSTPEHSPLGKTTVYADRYDPALLFPIPRSAKREEIGVAEPLPFHGIDIWNAYELSWLDARGKPVAALAEFRVPAESPNIIESKSFKLYLNGFSQERVASTDALLATLLRDLSAAAGAPVQVLLTEPRAKGHATTDLAGESIDDLDVEISDYGPPRADYLTADAASSTVEETLVSDLLRSNCPVTGQPDWGSVQIRYRGAPIDREGLLRYLVSFRNHNEFHEQCVERIFVDVMARCRPEQLSVYARYTRRGGLDINPYRSTGTDTPDNPRGARQ

SEQ ID NO: 45780 - protein, 274 aa, Dyella jiangningensis
  misc_feature (1)..(274): tr|A0A328P5H1|A0A328P5H1_9GAMM NADPH-dependent 7-cyano- 7-deazaguanine reductase OS=Dyella jiangningensis OX=13 79159 GN=queF PE=3 SV=1
MSTPEHSPLGKTTVYADRYDPALLFPIPRSAKRDEIGVTQPLPFHGIDIWNAYELSWLDARGKPVAALAEFRIPAESPNIIESKSFKLYLNGFSQERMASTDALLAALLRDLSAAAGAPVQVLLTEPRAKGHATTDLAGESIDGQDLEISDYGPPRADYLKADAALAVLEETLVSDLLRSNCPVTGQPDWGSVQIRYRGAPIDREGLLRYLVSFRNHNEFHEQCVERIFVDVMARCRPEQLSVYARYTRRGGLDINPYRSTGTETPDNPRGARQ

SEQ ID NO: 45781 - protein, 273 aa, Dyella marensis
  misc_feature (1)..(273): tr|A0A1I2HE22|A0A1I2HE22_9GAMM NADPH-dependent 7-cyano- 7-deazaguanine reductase OS=Dyella marensis OX=500610 G N=queF PE=3 SV=1
MSTPEHSPLGKTTVYADRYDPSLLFPIPRQSKRDEIGVSAPLPFHGVDIWNAYELSWLDARGKPRVALAEFRVPAGSPNIIESKSFKLYLNGFAQERIDDVQALAATLRRDLSAAAGAEVGVQLSEPSARAHAVVDLDGISIDTLDVAIDDYGPPKAAYLCADVDEVIEETLVSDLLRSNCPVTGQPDWGSVQIRYRGPRIEREGLLRYLVSFRNHNEFHEQCVERIFVDVTRHCAPLQLSVYARYTRRGGLDINPFRASAEAVPGNPRGARQ

SEQ ID NO: 45782 - protein, 275 aa, Dyella soli
  misc_feature (1)..(275): tr|A0A4R0YGX1|A0A4R0YGX1_9GAMM NADPH-dependent 7-cyano- 7-deazaguanine reductase OS=Dyella soli OX=522319 GN=qu eF PE=3 SV=1
MSTPEHSPLGKTTVYADRYDPSLLFPIPRTAKREEIGVGDNLPFHGVDVWNAYELSWLDARGKPRVALAEFRVPATSPNIIESKSFKLYLNGFSQERIADERTLADTLTRDLSAAAGAPIEVVLSGPDADGRVFTDLAGESIDGLDVAIDDYGPPKASHLALAAEADVVDEALVSNLLRSNCPVTGQPDWGSVQIRYRGPRMDRAGLLRYLVSFRNHNEFHEQCAERIFVDVMAQCAPVYLSVYARYTRRGGLDINPFRSTDATDAPGNPRGTRQ

SEQ ID NO: 45783 - protein, 274 aa, Dyella soli
  misc_feature (1)..(274): tr|A0A4R0YJS9|A0A4R0YJS9_9GAMM NADPH-dependent 7-cyano- 7-deazaguanine reductase OS=Dyella soli OX=522319 GN=qu eF PE=3 SV=1
MSTPEHSPLGKTTAYADRYDPGLLFPIPRSGKREEIGVSEPLPFHGADIWNAYELSWLDARGKPVVALAEFRVPAGSPNIIESKSFKLYLNGFSQERMRDADVLAATLARDLSAAAGAPVEVILSEASARGHAFRDLEGELIDHQALDIDDYGPPRADYLAADAGAPAVEQTLVSNLLRSNCPVTGQPDWGSVQIRYRGAPIDPAGLLRYLVSFRNHNEFHEQCVERIFVDVMQRCRPVQLSVYARYTRRGGLDINPYRSTGMELPGNPRGARQ

SEQ ID NO: 45784 - protein, 274 aa, Dyella sp.
  misc_feature (1)..(274): tr|A0A370X034|A0A370X034_9GAMM NADPH-dependent 7-cyano- 7-deazaguanine reductase OS=Dyella sp. 4MSK11 OX=192796 0 GN=queF PE=3 SV=1
MSTPEHSPLGKHTAYADRYDPSLLFPIPRQAKRDEIGVSEPLPFQGVDIWNAYELSWLDMHGKPVAAVAEFHVPAHSPNIIESKSFKLYLNGFAQEPLANAAALSALLQHDLSRAAGAPVMVHIHAPRTAQHSFADLAGESIDGLPVKIDDYGPPKADYLRTDKNADVVEETLVSDLLRSNCPVTGQPDWGSVQIAYRGSPIDREGLLRYLVSFRTHNEFHEQCVERIFVDVMARCAPERLSVYARYTRRGGLDINPFRSTEKTQPENLRGARQ

SEQ ID NO: 45785 - protein, 285 aa, Dyella sp.
  misc_feature (1)..(285): tr|A0A1G7W9S0|A0A1G7W9S0_9GAMM NADPH-dependent 7-cyano- 7-deazaguanine reductase OS=Dyella sp. 333MFSha OX=1798 240 GN=queF PE=3 SV=1
MAAFTAAVAAMSSPEHSPLGKSTVYADRYDAGLLFPIPRQGKRDEIGVAEAALPFHGVDVWNGYELSWLDKRGKPHVAVAEFRFPATTPNIVESKSFKLYLNSFAQERVADAATLRQTLVRDLSAAAGGPVGIVLHAPGELDGTPISEPEGLLLDTQELDFDSYGPPRADFLVTNDGDAREVLVSHLLRSNCPVTGQPDWGSVQIAYTGKPIDRAGLLRYLVSFRNHTEFHEQCVERIFMDVTARCAPRELSVYARYTRRGGLDINPFRSTDPAAVPANPRGARQ

SEQ ID NO: 45786 - protein, 273 aa, Dyella thiooxydans
  misc_feature (1)..(273): tr|A0A160N434|A0A160N434_9GAMM NADPH-dependent 7-cyano- 7-deazaguanine reductase OS=Dyella thiooxydans OX=44571 0 GN=queF PE=3 SV=1
MNTPEDSQLGKTTVYADRYDPTLLYPIARAAKRAEIGVTGPLPFHGVDIWNAYEFSWLDARGKPMVAIVEIRVPATSPNIIESKSLKLYLNGFSQERMPDAPHLIGVLERDLSAAAGATVKVELSLPAAIVHTIRDLEGEYIDDQPLEIDDYGPPKADCLRVAGTDVVEEELVSDLLRSNCPVTGQPDWGTVQIRYRGRPIDREGLLRYLISFRTHNEFHEQCVERIYVDLMARCAPDTLSVYARYTRRGGLDINPFRSSSEQVPVNLRGARQ

SEQ ID NO: 45787 - protein, 162 aa, Dysgonamonadaceae bacterium
  misc_feature (1)..(162): tr|A0A2N4S773|A0A2N4S773_9BACT NADPH-dependent 7-cyano- 7-deazaguanine reductase OS=Dysgonamonadaceae bacterium OX=2065189 GN=queF PE=3 SV=1
MESKSDHLEGLSHLGHKTEYKTDYAPEMLETFVNKHLENDYWVTFNCPEFTSLCPITGQPDFATIRIDYIPDVKMVESKSLKLYLFSFRNHGAFHEDCVNIIMKDLIRLMEPKYIEVTGIFTPRGGISIYPYANYGKKGTKYEQLAETRLFNHSFPLSSSIR

SEQ ID NO: 45788 - protein, 160 aa, Dysgonomonas alginatilytica
  misc_feature (1)..(160): tr|A0A2V3PTR4|A0A2V3PTR4_9BACT NADPH-dependent 7-cyano- 7-deazaguanine reductase OS=Dysgonomonas alginatilytica OX=1605892 GN=queF PE=3 SV=1
MQQDKQLENLSLLGGKTEYKDNYAPEVLEAFTNKHPENDYWVAFNCPEFTSLCPITGQPDFATIHINYIPEINMVESKSLKLYLFSFRNHGAFHEDCMNIIMKDLIKLMDPRYIEVIGVFTPRGGISIYPYANYGRLGTQYEQMAKTRLWDRNPQQEYTR

SEQ ID NO: 45789 - protein, 159 aa, Dysgonomonas capnocytophagoides
  misc_feature (1)..(159): tr|A0A4Y8L1I7|A0A4Y8L1I7_9BACT NADPH-dependent 7-cyano- 7-deazaguanine reductase OS=Dysgonomonas capnocytophago ides OX=45254 GN=queF PE=3 SV=1
MSTNHIEGLSHLGGKTEYKDDYAPEVLEAFDNKHPGNDYWVAFNCPEFTSLCPITGQPDFATIHINYLPDIKMVESKALKLYLFSFRNHGAFHEDCVNIIMKDLIKLMDPRYIEVIGVFTPRGGISIYPYCNYGRPGTEYEQMAKTRLLNRNPQQGYKG

SEQ ID NO: 45790 - protein, 155 aa, Dysgonomonas gadei
  misc_feature (1)..(155): tr|F5IZ45|F5IZ45_9BACT NADPH-dependent 7-cyano-7-deazag uanine reductase OS=Dysgonomonas gadei ATCC BAA-286 OX= 742766 GN=queF PE=3 SV=1
MGIEGLSHLGAKTEYKDDYAPEVLEAFENKHQGNDYWVTFNCPEFTSLCPITGQPDFATIHINYIPDVKMVESKSLKLYMFSFRNHGAFHEDCVNIIMKDLVNLMNPKYIEVVGIFTPRGGISIYPFCNYGRPGTKYEMAAKERLLKHNPQQIYR

SEQ ID NO: 45791 - protein, 157 aa, Dysgonomonas macrotermitis
  misc_feature (1)..(157): tr|A0A1M4Y959|A0A1M4Y959_9BACT NADPH-dependent 7-cyano- 7-deazaguanine reductase OS=Dysgonomonas macrotermitis OX=1346286 GN=queF PE=3 SV=1
MSNEHIDGLSHLGGKTEYKDNYAPEVLEAFDNKHPENDYWVVFNCPEFTSLCPITGQPDFATIHINYLPDIKMVESKALKLYLFSFRNHGAFHEDCVNIIMKDLIKLMNPRYIEVIGVFTPRGGISIYPYCNYGRPGTEYEQMARTRLLHRNPQQGY

SEQ ID NO: 45792 - protein, 155 aa, Dysgonomonas mossii
  misc_feature (1)..(155): tr|F8X4P7|F8X4P7_9BACT NADPH-dependent 7-cyano-7-deazag uanine reductase OS=Dysgonomonas mossii DSM 22836 OX=74 2767 GN=queF PE=3 SV=1
MTIEGLSHLGAKTEYKDNYAPEVLEAFENKHQDNDYWVTFNCPEFTSLCPITGQPDFATIHINYIPDVKMVESKSLKLYLFSFRNHGAFHEDCVNIMMKDLIKLMNPKYIEVVGIFTPRGGISIYPFCNYGRPGTKFERLAEERLINHNAQQIYK

SEQ ID NO: 45793 - protein, 155 aa, Dysgonomonas mossii
  misc_feature (1)..(155): tr|A0A4Y9IQF8|A0A4Y9IQF8_9BACT NADPH-dependent 7-cyano- 7-deazaguanine reductase OS=Dysgonomonas mossii OX=1636 65 GN=queF PE=3 SV=1
MTIEGLSHLGGKTEYKDNYAPDVLEAFENKHQGNDYWVTFNCPEFTSLCPITGQPDFATIHINYIPDVKMVESKSLKLYLFSFRNHGAFHEDCVNIMMKDLIELMNPKYIEVVGIFTPRGGISIYPFCNYGRPGTKFERLAEERLINHNPQQIYK

SEQ ID NO: 45794 - protein, 155 aa, Dysgonomonas sp.; identical to SEQ ID NO: 45793
  misc_feature (1)..(155): tr|A0A1M3L744|A0A1M3L744_9BACT NADPH-dependent 7-cyano- 7-deazaguanine reductase OS=Dysgonomonas sp. 37-18 OX=1 895907 GN=queF PE=3 SV=1

SEQ ID NO: 45795 - protein, 157 aa, Dysgonomonas sp.
  misc_feature (1)..(157): tr|A0A3D3TFM4|A0A3D3TFM4_9BACT NADPH-dependent 7-cyano- 7-deazaguanine reductase OS=Dysgonomonas sp. OX=1891233 GN=queF PE=3 SV=1
MNNQTEDLSLLGGKTEYKDNYAPEVLEAFTNKHPENDYWVAFNCPEFTSLCPITGQPDFATIHINYLPDIKMVESKSLKLYLFSFRNHGAFHEDCVNIIMKDLIRLMDPRYIEIIGVFTPRGGISIYPYCNYGRPGTDYEQMAKTRLLNKNPQEGYK

SEQ ID NO: 45796 - protein, 134 aa, Ectothiorhodosinus mongolicus
  misc_feature (1)..(134): tr|A0A1R3W5Q7|A0A1R3W5Q7_9GAMM NADPH-dependent 7-cyano- 7-deazaguanine reductase OS=Ectothiorhodosinus mongolic us OX=233100 GN=queF PE=3 SV=1
MSTEPSRQLETFPNPNAERDYIIRMRLPEFTCLCPKTGQPDFAELHLEYVPDQLCVELKSLKLYIWSFREEGGFHEAMTNRILDDLVAATNPRFMRLTADWNVRGGIYTIVTVEHRQPDWQPADPAITESKVRV

SEQ ID NO: 45797 - protein, 129 aa, Ectothiorhodospira haloalkaliphila
  misc_feature (1)..(129): tr|W8KVI1|W8KVI1_9GAMM NADPH-dependent 7-cyano-7-deazag uanine reductase OS=Ectothiorhodospira haloalkaliphila OX=421628 GN=queF PE=3 SV=1
MTTQPSKQLETFENPNKARDYTIRIQVPEFTCLCPKTGQPDFAELRLEYVPDERCVELKSLKLYVWSFRDEGAFHEAVTNRILEDLVKATAPRFMRLTAEFNVRGGVYTTVVVEHRDPQWVAPEEVKLP

SEQ ID NO: 45798 - protein, 129 aa, Ectothiorhodospira magna
  misc_feature (1)..(129): tr|A0A1H9DG41|A0A1H9DG41_9GAMM NADPH-dependent 7-cyano- 7-deazaguanine reductase OS=Ectothiorhodospira magna OX =867345 GN=queF PE=3 SV=1
MSSQPSKHLETFENPQKDRDYTIRIRIPEFTCLCPKTGQPDFAQLQLEYVPDGQCVELKSLKMYVWSFRDEGAFHEAVTNRILGDLVAATAPRFMRLTAEFNVRGGVYTTVTAEHRAPDWQPPQEVKLP

SEQ ID NO: 45799 - protein, 149 aa, Ectothiorhodospira marina
  misc_feature (1)..(149): tr|A0A1H7FHK2|A0A1H7FHK2_9GAMM NADPH-dependent 7-cyano- 7-deazaguanine reductase OS=Ectothiorhodospira marina O X=1396821 GN=queF PE=3 SV=1
MNPRFSRWRPARRDQTGLILMTTQPSKQLETFENPNKARDYTIRIQVPEFTCLCPKTGQPDFAELRLEYVPDERCVELKSLKLYVWSFRDEGAFHEAVTNRILEDLVKATAPRFMRLTAEFNVRGGVYTTVVVEHRDPQWVAPEEVKLP

SEQ ID NO: 45800 - protein, 129 aa, Ectothiorhodospira mobilis
  misc_feature (1)..(129): tr|A0A1I4SS56|A0A1I4SS56_ECTMO NADPH-dependent 7-cyano- 7-deazaguanine reductase OS=Ectothiorhodospira mobilis OX=195064 GN=queF PE=3 SV=1
MSTQPSKNLDTFENPNRARDYTIRIRIPEFTCLCPKTGQPDFAELLLEYVPDARCVELKSLKTYIWSFREEGGFHEAMTNRILGDLVAATAPRFMRLTAEFNVRGGIYTTVVAEHRDPAWEAPRPVSLP

SEQ ID NO: 45801 - protein, 129 aa, Ectothiorhodospira sp.
  misc_feature (1)..(129): tr|H1G2V0|H1G2V0_9GAMM NADPH-dependent 7-cyano-7-deazag uanine reductase OS=Ectothiorhodospira sp. PHS-1 OX=519 989 GN=queF PE=3 SV=1
MSSQPSKTLETFENPKKDRDYTIRIRVPEFTCLCPKTGQPDFAELRLEYVPDERCVELKSLKMYVWSFRDEGAFHEAVTNRILGDLVAATAPRFMRLTAEFNVRGGVYTTVTAEHRAPDWQPPLEVKLP

SEQ ID NO: 45802 - protein, 129 aa, Ectothiorhodospira sp.
  misc_feature (1)..(129): tr|A0A167BIJ2|A0A167BIJ2_9GAMM NADPH-dependent 7-cyano- 7-deazaguanine reductase OS=Ectothiorhodospira sp. BSL- 9 OX=1442136 GN=queF PE=3 SV=1
MTTQPSKQLETFENPNKARDYTIRIQVPEFTCLCPKTGQPDFAELRLEYVPDERCVELKSLKLYVWSFRDEGAFHEAVTNRILEDLVKATQPRFMRLTAEFNVRGGVYTTVVVEHRDPQWVAPEEVKLP

SEQ ID NO: 45803 - protein, 129 aa, Ectothiorhodospiraceae bacterium
  misc_feature (1)..(129): tr|A0A2A4XAQ1|A0A2A4XAQ1_9GAMM NADPH-dependent 7-cyano- 7-deazaguanine reductase OS=Ectothiorhodospiraceae bact erium OX=2026737 GN=queF PE=3 SV=1
  misc_feature (43)..(43): Xaa can be any naturally occurring amino acid
MTTQPSKDLETFDNPHPERDYTIRMDIPEFTCLCPKTGQPDFXTFTLEYVADKACIELKSLKMYMWSFRNEGAFHEAVTNQILSDMVKACSPRFMRLTGEFNVRGGIYTSVIIEHRAEGWQPAERVELP

SEQ ID NO: 45804 - protein, 119 aa, Ectothiorhodospiraceae bacterium
  misc_feature (1)..(119): tr|A0A2E0UMT5|A0A2E0UMT5_9GAMM NADPH-dependent 7-cyano- 7-deazaguanine reductase OS=Ectothiorhodospiraceae bact erium OX=2026737 GN=queF PE=3 SV=1
MPNIETFNNPYPQRDYEITHVNPEFTSVCPKTGLPDFATITVYYIPDKTCIELKSLKYYYLEFRNKGIFFESSINEILDDLVAVCNPRFMRVTGEFNTRGGIHSTVKAEFRKEESASGS

SEQ ID NO: 45805 - protein, 166 aa, Edaphobacillus lindanitolerans
  misc_feature (1)..(166): tr|A0A1U7PLS9|A0A1U7PLS9_9BACI NADPH-dependent 7-cyano- 7-deazaguanine reductase OS=Edaphobacillus lindanitoler ans OX=550447 GN=queF PE=3 SV=1
MPGRNKEEGLKDLTLLGNQNVPYAFEYAPEVLEAVDNLHSSRDYFVKFNCPEFTSLCPITNQPDFATMYISYIPDKKLVESKSLKLYLFSFRNHGDFHEDCVNIIMNDLIDLLDPRYIEVWGKFTPRGGISIDPWCNWGRPGTRYEEIAEYRLMNHDLNPETIDNR

SEQ ID NO: 45806 - protein, 139 aa, Edaphobacter aggregans
  misc_feature (1)..(139): tr|A0A428MQQ8|A0A428MQQ8_9BACT NADPH-dependent 7-cyano- 7-deazaguanine reductase OS=Edaphobacter aggregans OX=5 70835 GN=queF PE=3 SV=1
MTIKTTGYTDDHAKAGLDTTFPAIETWQNQFKAYEILVDDPEFTSVCPKTGLPDFGRLTIRYMPRERCMELKSLKEYLFVYRNLGIFQENIVNQVLDDVVKATDPVWAKVVGDFRPRGGISTIVEAFYPRPKDSKGPRP

SEQ ID NO: 45807 - protein, 139 aa, Edaphobacter dinghuensis
  misc_feature (1)..(139): tr|A0A495BSL0|A0A495BSL0_9BACT NADPH-dependent 7-cyano- 7-deazaguanine reductase OS=Edaphobacter dinghuensis OX =1560005 GN=queF PE=3 SV=1
MTTKKTTGYTDHAASGLDIKFPAIETWQNQFKAYEILVDDPEFTSVCPKTGLPDFGRITIRYMPRKSCLELKSLKEYLFTYRNLGIFQENIVNQVLDDVVKACNPVWAKVVGDFRPRGGISTVVEAFHPRPEKSKGPWK

SEQ ID NO: 45808 - protein, 143 aa, Edaphobacter modestus
  misc_feature (1)..(143): tr|A0A4Q7YPV5|A0A4Q7YPV5_9BACT NADPH-dependent 7-cyano- 7-deazaguanine reductase OS=Edaphobacter modestus OX=38 8466 GN=queF PE=3 SV=1
MSKKQKTKTTGYTDDHAAAGLDTKFPEIETWPNQFKAYEILIDDPEFTSVCPKTGLPDFGRLTIRYMPREKCMELKSLKEYLFTYRNLGIFQENIVNQVLDDVIKATNPIWAKVVGDFRPRGGISTIVEVFYPRPKDSKGPRG

SEQ ID NO: 45809 - protein, 281 aa, Edwardsiella anguillarum
  misc_feature (1)..(281): tr|A0A076LQS8|A0A076LQS8_9GAMM NADPH-dependent 7-cyano- 7-deazaguanine reductase OS=Edwardsiella anguillarum ET 080813 OX=667120 GN=queF PE=3 SV=1
MSYQENPALTSLTLGKATEYRDQYDASLLQAVPRSMNREPLGLYPDALPFHGADIWTLYELSWLNANGLPQVALAEVALDAYGANLIESKSFKLYLNSFNQTRFADWDTVQRTLQHDLAHCAQGGVSVTLLRLSQVEGQPIAALPGECIDDQPISIDSYSFDATLLENAADPTRQVDETLVSHLLKSNCLITHQPDWGSVMIRYRGAAISREALLRYLVSFRHHNEFHEQCVERIFNDIQRFCQPEALSVYARYTRRGGLDINPWRSNVPFQPPCGRLARQ

SEQ ID NO: 45810 - protein, 281 aa, Edwardsiella hoshinae
  misc_feature (1)..(281): tr|A0A376DJY0|A0A376DJY0_9GAMM NADPH-dependent 7-cyano- 7-deazaguanine reductase OS=Edwardsiella hoshinae OX=93 378 GN=queF PE=3 SV=1
MSYQENPALSALTLGKATEYRDQYDASLLQAVPRSMNREPLGLYPASLPFHGADIWTLYELSWLNANGLPQVALAEVELDAYSANLIESKSFKLYLNSFNQTRFADWESVQRTLQRDLAHCAQGGVHVTLLRLTQVEGQAIASLPGVCIDDQPITIDNYSFTASLLENAADPARQVEETLVSHLLKSNCLITHQPDWGSVMIRYRGGAIDRAALLRYLVSFRHHNEFHEQCVERIFNDIQRFCQPQALTVYARYTRRGGLDINPWRSNVPFQPPRGRLARQ

SEQ ID NO: 45811 - protein, 281 aa, Edwardsiella ictaluri
  misc_feature (1)..(281): tr|C5BHA7|C5BHA7_EDWI9 NADPH-dependent 7-cyano-7-deazag uanine reductase OS=Edwardsiella ictaluri (strain 93-14 6) OX=634503 GN=queF PE=3 SV=1
MSYQENPALTSLTLGKATEYRDQYDASLLQAVPRSMNREPLGLYPNALPFHGADIWTLYELSWLNANGLPQVALAEVVLDAYGANLIESKSFKLYLNSFNQTRFADWDTVQHTLQRDLTHCAQGSVSVTLLRLSQAEGQPIAALPGECIDDQPISIDSYCFDATLLENAADPTRQVEETLVSHLLKSNCLITHQPDWGSVMIRYRGAAISHEALLRYLVSFRHHNEFHEQCVERIFNDIQRFCRPEALSVYARYTRRGGLDINPWRSNVPYQPPRGRLARQ

SEQ ID NO: 45812 - protein, 281 aa, Edwardsiella piscicida
  misc_feature (1)..(281): tr|A0A411H0G3|A0A411H0G3_9GAMM NADPH-dependent 7-cyano- 7-deazaguanine reductase OS=Edwardsiella piscicida OX=1 263550 GN=queF PE=3 SV=1
MSYQENPALTSLTLGKATEYRDQYDASLLQAVPRSMNREPLGLYPDALPFHGADIWTLYELSWLNANGLPQVALAEVALDAYGANLIESKSFKLYLNSFNQTRFADWETVQRTLQRDLAHCAQGGVSVTLLRLSQVEGQPIAALPGECIDDQPIRIDSYCFDATLLENAADPARQVEETLVSHLLKSNCLITHQPDWGSVMIRYRGAAISREALLRYLVSFRHHNEFHEQCVERIFNDIQRFCRPEALSVYARYTRRGGLDINPWRSNIPFQPPRGRLARQ

SEQ ID NO: 45813 - protein, 281 aa, Edwardsiella piscicida; identical to SEQ ID NO: 45809
  misc_feature (1)..(281): tr|A0A034T1X6|A0A034T1X6_9GAMM NADPH-dependent 7-cyano- 7-deazaguanine reductase OS=Edwardsiella piscicida OX=1 263550 GN=queF PE=3 SV=1

SEQ ID NO: 45814 - protein, 281 aa, Edwardsiella tarda
  misc_feature (1)..(281): tr|A0A2A7U5F2|A0A2A7U5F2_EDWTA NADPH-dependent 7-cyano- 7-deazaguanine reductase OS=Edwardsiella tarda OX=636 G N=queF PE=3 SV=1
MSYQENPALSALTLGKATEYRDQYDATLLQAVPRSMNREPLGLYPDALPFHGADIWTLYELSWLNANGLPQVALAEVELDAYSANLIESKSFKLYLNSFNQTRFADWQSVQRTLQHDLAHCAQGGVQVTLQRLDQVEGQPIAGLPGVCIDDQPITIDHYCFDASLLANAADPARQVDETLVSHLLKSNCLITHQPDWGSLMIRYRGGAIDREALLRYLVSFRHHNEFHEQCVERIFNDIQRFCQPQALTVYARYTRRGGLDINPWRSNVPFQPPRGRLARQ

SEQ ID NO: 45815 - protein, 281 aa, Edwardsiella tarda; identical to SEQ ID NO: 45812
  misc_feature (1)..(281): tr|A0A0H3DN13|A0A0H3DN13_EDWTF NADPH-dependent 7-cyano- 7-deazaguanine reductase OS=Edwardsiella tarda (strain FL6-60) OX=718251 GN=queF PE=3 SV=1

SEQ ID NO: 45816 - protein, 120 aa, Effusibacillus lacus
  misc_feature (1)..(120): tr|A0A292YKG8|A0A292YKG8_9BACL NADPH-dependent 7-cyano- 7-deazaguanine reductase OS=Effusibacillus lacus OX=134 8429 GN=queF PE=3 SV=1
MSTRPSKELEIVPNPHPDRDYLVEIESPEFTALCPKTGQPDFATITIKYIPGPSIVELKSLKLYLWSFRDEGHFHEDVTNVILNDLVKALEPRYMQVIGKFNVRGGIYTTVTAEHGKKTV

SEQ ID NO: 45817 - protein, 154 aa, Eggerthella sp.
  misc_feature (1)..(154): tr|R7B4N5|R7B4N5_9ACTN NADPH-dependent 7-cyano-7-deazag uanine reductase OS=Eggerthella sp. CAG:298 OX=1262876 GN=queF PE=3 SV=1
MTKTREDEGLELLGNQQVSYPTDYAPEMLETFQNKHPENDYWVRFNCPEFTSLCPITSQPDFATIYINYVPDERMVESKSLKLYLFSFRNHGDFHEDCVNTIMKDLIELMDPKYIEVWGEFTPRGGISIHPYANYGRPNTRWEEVAWIRLSMHE

SEQ ID NO: 45818 - protein, 165 aa, Eggerthella sp.
  misc_feature (1)..(165): tr|R7BRZ6|R7BRZ6_9ACTN NADPH-dependent 7-cyano-7-deazag uanine reductase OS=Eggerthella sp. CAG:368 OX=1262877 GN=queF PE=3 SV=1
MTNKEREAEKSISLLGNQHTEYPSDYDSSVLETFINKHPDTDYFVKFNCPEFTSLCPITDQPDFATIYISYVPNIKMVESKSLKLYLFSFRNHGDFHEDCINIIKKDLIALMDPKYIEVWGKFLPRGGISIDPYSNYGKPGTRWEEVAWDRLAHHDLYPEVVNNR

SEQ ID NO: 45819 - protein, 88 aa, Eggerthellaceae bacterium
  misc_feature (1)..(88): tr|A0A3C1DD08|A0A3C1DD08_9ACTN NADPH-dependent 7-cyano- 7-deazaguanine reductase (Fragment) OS=Eggerthellaceae bacterium OX=1972561 GN=queF PE=3 SV=1
MRTREDLTLLGAKAEIPTDYDPGVLEAFDNAHPDRDYVVTLRCPEFTTLCPITGQPDFATMVINYIPDKRMVESKSLKLYLFSFRNHG

SEQ ID NO: 45820 - protein, 78 aa, Eggerthellaceae bacterium
  misc_feature (1)..(78): tr|A0A3C1D8V0|A0A3C1D8V0_9ACTN NADPH-dependent 7-cyano- 7-deazaguanine reductase QueF (Fragment) OS=Eggerthella ceae bacterium OX=1972561 GN=DCP91_00410 PE=4 SV=1
LFSFRNHGDFHEDVTNVIMNDLIALMRPKYIEVTGLFVPRGGIAIHPFANWANPDFGYADKAAARLFERMEKALAEEQ

SEQ ID NO: 45821 - protein, 156 aa, Eikenella corrodens
  misc_feature (1)..(156): tr|A0A1A9RIH7|A0A1A9RIH7_EIKCO NADPH-dependent 7-cyano- 7-deazaguanine reductase OS=Eikenella corrodens OX=539 GN=queF PE=3 SV=1
MRNKEELSGLSLLGNTGTQYPSTYAPEILEAFDNKHPGNDYFVKFVCPEFTSLCPLTGQPDFATILIRYIPDIKMVESKSLKLYLFSFRNHGDFHEDCINIIMKDLIKLMNPKYIEVFGEFTPRGGIAIHPFANYGRPGTPFEQMARERLFTHDRQ

SEQ ID NO: 45822 - protein, 156 aa, Eikenella corrodens
  misc_feature (1)..(156): tr|A0A1A9RB73|A0A1A9RB73_EIKCO NADPH-dependent 7-cyano- 7-deazaguanine reductase OS=Eikenella corrodens OX=539 GN=queF PE=3 SV=1
MRNKEELSGLSLLGNTGTQYPSTYAPEILEAFDNKHPGNDYFVKFVCPEFTSLCPITGQPDFATILIRYIPDIKMVESKSLKLYLFSFRNHGDFHEDCINIIMKDLIKLMNPKYIEVFGEFTPRGGIAIHPFANYGRPGTPFEQMARERLFTHDMQ

SEQ ID NO: 45823 - protein, 156 aa, Eikenella exigua
  misc_feature (1)..(156): tr|A0A5B9BV19|A0A5B9BV19_9NEIS NADPH-dependent 7-cyano- 7-deazaguanine reductase OS=Eikenella exigua OX=2528037 GN=queF PE=3 SV=1
MRNKEELSGLSLLGNTGTQYPSTYAPEILEAFDNKHPGNDYFVKFVCPEFTSLCPLTGQPDFATILIRYIPDIKMVESKSLKLYLFSFRNHGDFHEDCINIIMKDLIKLMNPKYIEVFGEFTPRGGIAIHPFANYGRPGTPFEQMARERLFTHDMQ

SEQ ID NO: 45824 - protein, 161 aa, Eikenella sp.
  misc_feature (1)..(161): tr|A0A1A9S120|A0A1A9S120_9NEIS NADPH-dependent 7-cyano- 7-deazaguanine reductase OS=Eikenella sp. NML03-A-027 O X=1795828 GN=queF PE=3 SV=1
MRNKEELSGLSLLGNTGTQYPSTYAPEILEAFDNKHPGNDYFVKFVCPEFTSLCPLTGQPDFATILIRYIPDIKMVESKSLKLYLFSFRNHGDFHEDCINIIMKDLIKLMNPKYIEVFGEFTPRGGIAIHPFANYGRPGTPFEQMARERLFTHDMLSLRAS

SEQ ID NO: 45825 - protein, 156 aa, Eikenella sp.
  misc_feature (1)..(156): tr|A0A1F0F7Q6|A0A1F0F7Q6_9NEIS NADPH-dependent 7-cyano- 7-deazaguanine reductase OS=Eikenella sp. HMSC073A11 OX =1739535 GN=queF PE=3 SV=1
MRNKEELSGLSLLGNTGTQYPSTYAPEILEAFDNKHPGNDYFVKFVCPEFTSLCPLTGQPDFATILIRYIPDIKMVESKSLKLYLFSFRNHGDFHEDCINIIMKDLIKLMNPKYIEVFGEFTPRGGIAIHPFANYGRLGTSFEQMARERLFKHDMQ

SEQ ID NO: 45826 - protein, 154 aa, Eilatimonas milleporae
  misc_feature (1)..(154): tr|A0A3M0C5C3|A0A3M0C5C3_9PROT NADPH-dependent 7-cyano- 7-deazaguanine reductase OS=Eilatimonas milleporae OX=9 11205 GN=queF PE=3 SV=1
MTDSVYDDLEQLGGMAKAPDRPEDAILETVRNPRPDSLYLVRFTCPEFTSLCPVTGQPDFAHLVLDYVPDGLLVESKSLKLYLQSFRNHRAFHEDCTVGIAERLVGILKPVWLRLGGYWYPRGGIPIDVFYQTGQPPQSVWVPPQDVQPYRGRG

SEQ ID NO: 45827 - protein, 152 aa, Elioraea sp.
  misc_feature (1)..(152): tr|A0A541C5I4|A0A541C5I4_9PROT NADPH-dependent 7-cyano- 7-deazaguanine reductase OS=Elioraea sp. Yellowstone OX =2592070 GN=queF PE=3 SV=1
MTGYEGLTRLGRPSTIPASPAEAVLERVPNPEPGLAYVVRFVCPEFTSLCPLTGQPDFAHLVLDYIPDSWIVESKSLKLFLASFRNHGAFHEACTLMVARRVADLLAPRWLRIGGYWYPRGGMPIDVFWQTGAPPEGVWIPPQEVAPYRGRG

SEQ ID NO: 45828 - protein, 153 aa, Elstera cyanobacteriorum
  misc_feature (1)..(153): tr|A0A255XMN3|A0A255XMN3_9PROT NADPH-dependent 7-cyano- 7-deazaguanine reductase OS=Elstera cyanobacteriorum OX =2022747 GN=queF PE=3 SV=1
MMTSKYSGLTQLGHATQQPQTPEDAILEAVPNTQDVDYVVRFVAPEFTSLCPLTGQPDFAHLVIDYIPGPSLVESKSLKLFLTSFRNHGAFHEDCTVGIARRLVATIQPKWLRIGGYWYPRGGIPIDVFYQTGPAPAGVWVPDQAVPSYRGRG

SEQ ID NO: 45829 - protein, 152 aa, Elstera litoralis
  misc_feature (1)..(152): tr|A0A0F3IQ55|A0A0F3IQ55_9PROT NADPH-dependent 7-cyano- 7-deazaguanine reductase OS=Elstera litoralis OX=552518 GN=queF PE=3 SV=1
MTNKYSGLTQLGQATAQPASPDAAVLEAVPNTQDVDYVVRFVAPEFTSLCPLTGQPDFAHLVIDYIPGGLLVESKSLKLFLTSFRNHGAFHEDCTVGIARRLVATIQPKWLRIGGYWYPRGGIPIDVFYQTGPAPDGVWVPDQAVPSYRGRG

SEQ ID NO: 45830 - protein, 127 aa, Elusimicrobia bacterium
  misc_feature (1)..(127): tr|A0A2M7RZQ0|A0A2M7RZQ0_9BACT NADPH-dependent 7-cyano- 7-deazaguanine reductase OS=Elusimicrobia bacterium CG_ 4_10_14_0_8_um_filter_37_32 OX=2014301 GN=queF PE=3 SV= 1
MKYGEKAIKESKFELWDNPYKNRNYKVDITFPEFTCLCPRSGYPDFATVKITYIPRRYIVELKSVKLYLNKYRNQHISHESAINKIFSDIYKTLKPKFLEVTGDFNPRGNVKTTIRIDSETLKIHSL

SEQ ID NO: 45831 - protein, 140 aa, Elusimicrobia bacterium
  misc_feature (1)..(140): tr|A0A355E5L3|A0A355E5L3_9BACT NADPH-dependent 7-cyano- 7-deazaguanine reductase OS=Elusimicrobia bacterium OX= 2030800 GN=queF PE=3 SV=1
MKNTKSPRQVTRLGYTSEQAASGTRDRLPAIDTWPNQYRGYEIRIEIPEFTAVCPKTGLPDFGTVIIEYMPERSCLELKSLKDYINSFRNLGVFNENAVNRILRDVVRAARPRWAVVTGRFTARGGMNSTVTSRHRRRTA

SEQ ID NO: 45832 - protein, 132 aa, Elusimicrobium minutum
  misc_feature (1)..(132): sp|B2KDU6|QUEF_ELUMP NADPH-dependent 7-cyano-7-deazagua nine reductase OS=Elusimicrobium minutum (strain Pei191 ) OX=445932 GN=queF PE=3 SV=1
MSDIDFGYTKDHARKGANAKLPEIQCWENQYKRDYDIRIELPEFTSVCPKTGLPDFGVITIDYIPDRLCLELKSLKYYLLEYRDMGIFMENIANKILDDVVKACKPKKAVVTGDFTPRGGLRSVIVAKYEKK

SEQ ID NO: 45833 - protein, 132 aa, Elusimicrobium sp.
  misc_feature (1)..(132): tr|A0A1Y4DEV4|A0A1Y4DEV4_9BACT NADPH-dependent 7-cyano- 7-deazaguanine reductase OS=Elusimicrobium sp. An273 OX =1965617 GN=queF PE=3 SV=1
MHDIDFGYTSDHARKNADAVLPDIQCWPNQYKRDYDIKIELPEFTSVCPKTGLPDFGVITIEYVPDELCLELKSLKYYLLEYRDMGIFMENIANKILDDVVKACKPKRAVVTGVFTPRGGLRSVITAKYEKK

SEQ ID NO: 45834 - protein, 154 aa, Emcibacter congregatus
  misc_feature (1)..(154): tr|A0A2G4YM38|A0A2G4YM38_9PROT NADPH-dependent 7-cyano- 7-deazaguanine reductase OS=Emcibacter congregatus OX=2 043170 GN=queF PE=3 SV=1
MTKDIYQGLNQLGKDVKAPTNPDEAQLDRVANPRPNVDYFVRFTCPEFTSLCPVTGQPDFAHIVIDYVPDETLVESKSLKLYMQSFRNHAAFHEDCTVGIGERLVAELKPKWLRIGGYWYPRGGIPIDVFFQTGKAPEHVWVPDQDVPTYRGRG

SEQ ID NO: 45835 - protein, 154 aa, Emcibacter nanhaiensis
  misc_feature (1)..(154): tr|A0A501PR91|A0A501PR91_9PROT NADPH-dependent 7-cyano- 7-deazaguanine reductase OS=Emcibacter nanhaiensis OX=1 505037 GN=queF PE=3 SV=1
MSKEVYQGLSQLGGSSQLPENPDEAVLEKVKNPRPESAYFVRFTCPEFTSLCPVTGQPDFAHLVIDYVPGELLVESKSLKLYLHSFRNHAGFHEDCTVGIAERLVDELKPVWLRIGGYWYPRGGIPIDVFFQTGEPPEGVWIPDQGVPPYRGRG

SEQ ID NO: 45836 - protein, 277 aa, Empedobacter haloabium
  misc_feature (1)..(277): tr|A0A5C7BN60|A0A5C7BN60_9FLAO NADPH-dependent 7-cyano- 7-deazaguanine reductase QueF OS=Empedobacter haloabium OX=592317 GN=queF PE=3 SV=1
MTNTADQSPLGKNSAYRTDYAPELLFPIPRQGKRDELGLTGTLPFFGVDIWNAYELSWLNMRGKPQVAVARITVPADSPNIIESKSFKLYLNSFNQTRLGGPDALRDLLQQDLSAAAGANVHVVLTLQEDFGTLQMGELDGLLLDRLDIEVDNYSPQPEVLKANFDELPVEETLVSHLLKSNCLVTGQPDWGSVQITYAGPQIDQESLLKYLIGFRDHNEFHEQCVERIFTDILRQCRPQHLSVYARYTRRGGLDINPWRTNYSKGGRPSNLRNARQ

SEQ ID NO: 45837 - protein, 128 aa, Endomicrobium proavitum
  misc_feature (1)..(128): tr|A0A0G3WJ06|A0A0G3WJ06_9BACT NADPH-dependent 7-cyano- 7-deazaguanine reductase OS=Endomicrobium proavitum OX= 1408281 GN=queF PE=3 SV=1
MKNTPVFDKVTPKLLEAMPYQYAGKDINVCIETEEFTCLCPWTGLPDFAYVVINYTPSKTVVELKSLKMYFQSYRNVGMVHESVVNNILNDLVKAISPKELTIDIEFGIRGGITTTVSAQYCKRQSGK

SEQ ID NO: 45838 - protein, 129 aa, Galathealinum brachiosum
  misc_feature (1)..(129): tr|A0A370DHL3|A0A370DHL3_9GAMM NADPH-dependent 7-cyano- 7-deazaguanine reductase OS=endosymbiont of Galathealin um brachiosum OX=2200906 GN=queF PE=3 SV=1
MTTQPSKELETFDNPRPERDYTIRIHTPEFTCICPKTGQPDFATIHLDYIADKKCVELKSFKLYMWSFREQGAFHEDITNQILSDLVDATDPRFMRITAEFNVRGGVYTTVIAEHRQEGWVAPEPVVLP

SEQ ID NO: 45839 - protein, 129 aa, Ridgeia piscesae
  misc_feature (1)..(129): tr|A0A0T5Z5X9|A0A0T5Z5X9_9GAMM NADPH-dependent 7-cyano- 7-deazaguanine reductase OS=endosymbiont of Ridgeia pis cesae OX=54398 GN=queF PE=3 SV=1
MPSQPSKQLETFDNPQPERDYTIRIRVPEFTCLCPKTGQPDFAELTLEYVADQLCVELKSLKMYVWSFRDEGAFHEAVTNHILEDLVKATRPRFMRLTADFNVRGGVYTTVVAEHRADGWEPPIAVQLP

SEQ ID NO: 45840 - protein, 273 aa, Endozoicomonadaceae bacterium
  misc_feature (1)..(273): tr|A0A3S3QY17|A0A3S3QY17_9GAMM NADPH-dependent 7-cyano- 7-deazaguanine reductase OS=Endozoicomonadaceae bacteri um GTF-13 OX=2506149 GN=queF PE=3 SV=1
MSQDLHLSPLGKQSEYVCEYSPQLLHPIARSENRAALGIGELLPFRGVDIWNAYELSWLNLNGKPQVAVGRFSIPCDSTHIIESKSFKLYLNSFNQSRIGDQGTLQGVLERDLSAAAGAPVGVAIQTHQQVSEAGLELPLGDGIDDLDVSIDHYDTDAGLLQVADMVVNERLYSRLLKSNCPVTGQPDWGTLMIAYRGKRLCRESLLKYIVSFRQHSDFHEHCVERIFMDIKAITKAESLEVVARYVRRGGLDINPCRSLGECSFGNGRLANQ

SEQ ID NO: 45841 - protein, 279 aa, Endozoicomonas elysicola
  misc_feature (1)..(279): tr|A0A081KF35|A0A081KF35_9GAMM NADPH-dependent 7-cyano- 7-deazaguanine reductase OS=Endozoicomonas elysicola OX =305900 GN=queF PE=3 SV=1
MSDGLHASPLGKTSEYKSEYDPSLLFPIERKEKREELGIHQNNLPFYGRDLWYGYELSWLNLSGKPVVRVAQFELPCDSPCLIESKSFKLYLNSFNQSRFESAEQVASCIIDDLSKVARAQVSAQLYTIDEFEARAFDCAQGINIDDLDVAVDCYQYDASLLARRDPEFSSEVISETLNTHLLKSNCPVTGQPDWGTLVVRYRGEPIEHAALLRYVCSFRDHQEFHEQCVERAFVDLQKHYQFEELTVYAQYLRRGGLDINPWRSTLDIQPEALRFIRQ

SEQ ID NO: 45842 - protein, 274 aa, Endozoicomonas montiporae
  misc_feature (1)..(274): tr|A0A081N515|A0A081N515_9GAMM NADPH-dependent 7-cyano- 7-deazaguanine reductase OS=Endozoicomonas montiporae O X=1027273 GN=queF PE=3 SV=1
MANSVEMSQLGKTSLYETEYNPSILFPIPRKEKQEQLGLDPQNLPYVGCDVWYAYEISWLNGRGKPVAMVARFELPCDSPCLIESKSFKLYLNSFNQSRFESVSAARETMVKDLSDAAGAPVKVELMTVAEMEVFGFSKAPGTCVDELDVAIDTYMYQPDFLTKGDGKVEEAIHSNLLKSNCPVTGQPDWGTIVVEYKGEAINHESFLRYICSFREHQEFHEQCAERVFTDIQQRFQMDELTVYAQYVRRGGLDINPWRSTHHKETNRLRLVRQ

SEQ ID NO: 45843 - protein, 276 aa, Endozoicomonas montiporae
  misc_feature (1)..(276): tr|A0A142BFR2|A0A142BFR2_9GAMM NADPH-dependent 7-cyano- 7-deazaguanine reductase OS=Endozoicomonas montiporae C L-33 OX=570277 GN=queF PE=3 SV=1
MIMANSVEMSQLGKTSLYETEYNPSILFPIPRKEKQEQLGLDPQNLPYVGCDVWYAYEISWLNGRGKPVAMVARFELPCDSPCLIESKSFKLYLNSFNQSRFESVSAARETMVKDLSDAAGAPVKVELMTVAEMEVFGFSKAPGTCVDELDVAIDTYMYQPDFLTKGDGKVEEAIHSNLLKSNCPVTGQPDWGTIVVEYKGEAINHESFLRYICSFREHQEFHEQCAERVFTDIQQRFQMDELTVYAQYVRRGGLDINPWRSTHHKETNRLRLVRQ

SEQ ID NO: 45844 - protein, 274 aa, Endozoicomonas numazuensis
  misc_feature (1)..(274): tr|A0A081NG35|A0A081NG35_9GAMM NADPH-dependent 7-cyano- 7-deazaguanine reductase OS=Endozoicomonas numazuensis OX=1137799 GN=queF PE=3 SV=1
MSELVNASPLGKNSEYPSEYNPELLFPIPRKEKQLELGLDPENLPFVGSDVWYGYELSWLDSKGKPLAMIGRFELPCNSPSLVESKSFKLYLNSFNQSQFESVAHVQAVMEKDLSQAAGAPVRVKLMTVAEMEAFGFKPAPGTGVDELDVTIDCYDYSPDLLQRTEGDREETIHSHLLKSNCPVTGQPDWGTVVVQYKGEAISHESFLRFICSFRGHQEFHEQCVERVFTEIQARFKMESLTVYARYVRRGGLDINPWRSTHQAEQDDLRLIRQ

SEQ ID NO: 45845 - protein, 274 aa, Endozoicomonas sp.
  misc_feature (1)..(274): tr|A0A1D2X5S9|A0A1D2X5S9_9GAMM NADPH-dependent 7-cyano- 7-deazaguanine reductase OS=Endozoicomonas sp. (ex Bugu la neritina AB1) OX=1868284 GN=queF PE=3 SV=1
MTVVIETSPLGKSCQYKAEYAPELLFPLPRKEKRDELGITESQLPFHGRDLWYGYELSWLGPKGKPEVRIAQFEIPCESRCLIESKSFKLYLNSFNQTRFDDAVAVKHCLEKDLSEATEAKVLVTLFTLPEFEQLGIQSVPGICIDEQDVEVTTYQYNPDLLASREGQITETLCSHLLKSNCLVTGQPDWGTLVISYQGEAIDHGSLLQYICSFRQHQEFHEQCVERIYSDLQKRFKLSSLTVYAQYVRRGGLDINPWRSSESKSPEALRFVRQ

SEQ ID NO: 45846 - protein, 273 aa, Endozoicomonas sp.; identical to SEQ ID NO: 45840
  misc_feature (1)..(273): tr|A0A3P3VSW3|A0A3P3VSW3_9GAMM NADPH-dependent 7-cyano- 7-deazaguanine reductase OS=Endozoicomonas sp. GTF13 OX =2528527 GN=queF PE=3 SV=1

SEQ ID NO: 45847 - protein, 151 aa, Enhydrobacter aerosaccus
  misc_feature (1)..(151): tr|A0A1T4SU01|A0A1T4SU01_9PROT NADPH-dependent 7-cyano- 7-deazaguanine reductase OS=Enhydrobacter aerosaccus OX =225324 GN=queF PE=3 SV=1
MSKYPHLRQLGRPAALPASPDQAILEAVPNPDPKTLYLVRFTAPEFTSLCPMTGQPDFAHLVIDYAPRAKLVESKSLKLFLGSFRNHPDFHEACTLAIGQRLVKTIRPRWLRIGAYWYPRGGMPIDVFWQTGAPPKGLWLPDQGVPAYRGR

SEQ ID NO: 45848 - protein, 158 aa, Enhydrobacter sp.
  misc_feature (1)..(158): tr|A0A5C8PGB1|A0A5C8PGB1_9PROT NADPH-dependent 7-cyano- 7-deazaguanine reductase OS=Enhydrobacter sp. CC-CFT640 OX=2586908 GN=queF PE=3 SV=1
MTGTSRMPDYKHLKQLGRATSLPASPDAAVLESVPNPHPRTLYLVRFTQPEFTSLCPMTGQPDFAHLVIDYAPAAKLVESKSLKLFLASFRNHGAFHEDCTLMIAKRLVAALKPRWLRIGGYWYPRGGMPIDVFWQTGAPPKGLWLPDQGVAPYRGRG

SEQ ID NO: 45849 - protein, 283 aa, Enhydrobacter sp.
  misc_feature (1)..(283): tr|A0A1V2GSL0|A0A1V2GSL0_9PROT NADPH-dependent 7-cyano- 7-deazaguanine reductase OS=Enhydrobacter sp. H5 OX=190 7940 GN=BKE17_03640 PE=3 SV=1
MKPLETHGILGQSTSYPKTYAPDMLYPIPRALGRANLALPADALSIGMDWWQVFEMSWLNSQGISQVAMARLAIPATSDYIVESKSLKLYFNSLNFTEFDNQQAVKATVEKDLSACLKTDVTLEIFEVNIANSLPISAPQGDCIDNALDSSDKKIAIVSDVNPSSLTAAHQGASDSQLQILHSHLLHSNCPVTNQPDWGTLEIQIDSQPIDRAGLLEYILSFRQHNGFHEQCVEQIFSDLTQAFAPKTLMVRAWYTRRGGIDINPCRVSDISLLPPPSRLNRQ

SEQ ID NO: 45850 - protein, 118 aa, Enhygromyxa salina
  misc_feature (1)..(118): tr|A0A0C2DCA4|A0A0C2DCA4_9DELT NADPH-dependent 7-cyano- 7-deazaguanine reductase OS=Enhygromyxa salina OX=21580 3 GN=queF PE=3 SV=1
MPSQPSRELETFANPKPGRDYEIRFECPEFTCVCPKTGQPDFATIRIRYTPDQRCVELKSLKLYLWSFRDVGAFHEAVTNQILDDLVSALQPRAMVVEGDFLVRGGIHTVVEARHTMP

SEQ ID NO: 45851 - protein, 153 aa, Enhygromyxa salina
  misc_feature (1)..(153): tr|A0A2S9YRX6|A0A2S9YRX6_9DELT NADPH-dependent 7-cyano- 7-deazaguanine reductase OS=Enhygromyxa salina OX=21580 3 GN=queF PE=3 SV=1
MDAPSITLPRPTLAPQTSEQAHTLTAPPTRGTHRPVPSQPSRELETFANPKPGRDYEIRFECPEFTCVCPKTGQPDFATIRIRYTPDQRCVELKSLKLYLWSFRDVGAFHEAVTNQILDDLVAALQPRAMVVEGDFLVRGGIHTVVEARYSMP

SEQ ID NO: 45852 - protein, 154 aa, Ensifer adhaerens
  misc_feature (1)..(154): tr|A0A285XHM0|A0A285XHM0_ENSAD NADPH-dependent 7-cyano- 7-deazaguanine reductase OS=Ensifer adhaerens OX=106592 GN=queF PE=3 SV=1
MSKTDVSGLTQLGAAVEAPKTPEEAVLERVPNGNEGTNYVVRFTAPEFTSLCPMTGQPDFAHIVIDYVPGKWLVESKSLKLFLFAFRNHGAFHEDCSVYIAKRIIDLLEPEWLRIGAYWYPRGGIPIDVFWQTGEPPKGVWLPDQGVPTYRGRG

SEQ ID NO: 45853 - protein, 154 aa, Ensifer adhaerens
  misc_feature (1)..(154): tr|A0A2V4XR24|A0A2V4XR24_ENSAD NADPH-dependent 7-cyano- 7-deazaguanine reductase OS=Ensifer adhaerens OX=106592 GN=queF PE=3 SV=1
MSKTDVSGLSQLGAKVDLPQSPEDAVLERVPSGNKGKDYLVRFTAPEFTSLCPMTGQPDFAHIVIDYVPDEWLVESKSLKLFLHSFRNHGAFHEDCTIEIAQRLVSLLQPRWLRIGAYWYPRGGIPIDVFWQTGKPPEGLWLPDQGVPTYRGRG

SEQ ID NO: 45854 - protein, 154 aa, Ensifer alkalisoli
  misc_feature (1)..(154): tr|A0A1E3VE59|A0A1E3VE59_9RHIZ NADPH-dependent 7-cyano- 7-deazaguanine reductase OS=Ensifer alkalisoli OX=17523 98 GN=queF PE=3 SV=1
MTKTDVSGLSQLGAKVDLPQSPEEAELERVPSGHAGTDFVVRFTAPEFTSLCPMTGQPDFAHIVIDYVPDGWLVESKSLKLFLHSFRNHGAFHEDCTMEIAKRLVSLLSPKWLRIGAYWYPRGGIPIDVFWQTGNPPGGVWLPDQGVPTYRGRG

SEQ ID NO: 45855 - protein, 154 aa, Ensifer glycinis
  misc_feature (1)..(154): tr|A0A178XSB1|A0A178XSB1_9RHIZ NADPH-dependent 7-cyano- 7-deazaguanine reductase OS=Ensifer glycinis OX=1472378 GN=queF PE=3 SV=1
MTKTDVSGLSQLGTKVDLPQSPEEAVLERVPSGHEGTDFVVRFTAPEFTSLCPMTGQPDFAHIVIDYVPDGWLVESKSLKLFLHSFRNHGAFHEDCTIDIAKRLVSLLSPKWLRIGAYWYPRGGIPIDVFWQTGNPPEGVWLPDQGVPTYRGRG

SEQ ID NO: 45856 - protein, 171 aa, Ensifer sojae
  misc_feature (1)..(171): tr|A0A249PD74|A0A249PD74_9RHIZ NADPH-dependent 7-cyano- 7-deazaguanine reductase OS=Ensifer sojae CCBAU 05684 O X=716928 GN=queF PE=3 SV=1
MGGAPIRRLNADWSMTEMTKTDVSGLSQLGAKVDLPQSPEDAVLERVPSGHAGTDFVVRFTAPEFTSLCPMTGQPDFAHIVIDYVPDGWLVESKSLKLFLHSFRNHGAFHEDCTMEIAKRLVSLLSPKWLRIGAYWYPRGGIPIDVFWQTGNPPEGVWLPDQGVPTYRGRG

SEQ ID NO: 45857 - protein, 154 aa, Ensifer sp.
  misc_feature (1)..(154): tr|A0A395L9C4|A0A395L9C4_9RHIZ NADPH-dependent 7-cyano- 7-deazaguanine reductase OS=Ensifer sp. M14 OX=2203782 GN=queF PE=3 SV=1
MSQTDVSGLSQLGAKVDLPQSPDEAVLERVPSGNRGADFLVRFTAPEFTSLCPMTGQPDFAHIVIDYVPDEWLVESKSLKLFLHSFRNHGAFHEDCTIDIANRLVTLLSPRWLRIGAYWYPRGGIPIDVFWQTGKPPEGLWLPDQGVPTYRGRG

SEQ ID NO: 45858 - protein, 154 aa, Ensifer sp.
  misc_feature (1)..(154): tr|A0A1C0SM11|A0A1C0SM11_9RHIZ NADPH-dependent 7-cyano- 7-deazaguanine reductase OS=Ensifer sp. LC14 OX=1873714 GN=queF PE=3 SV=1
MSKTDVSGLSQLGAKVDLPQSPEEAVLERVPSGNKGKDYLVRFTAPEFTSLCPMTGQPDFAHIVIDYVPDEWLVESKSLKLFLHSFRNHGAFHEDCTIEIAGRLVSLLSPRWLRIGAYWYPRGGIPIDVFWQTGKPPEGLWLPDQGVPTYRGRG

SEQ ID NO: 45859 - protein, 281 aa, Enterobacillus tribolii
  misc_feature (1)..(281): tr|A0A370QQT0|A0A370QQT0_9ENTR NADPH-dependent 7-cyano- 7-deazaguanine reductase OS=Enterobacillus tribolii OX= 1487935 GN=queF PE=3 SV=1
MSYQNHQALAGLTLGKTTEYRDTYDATLLQAVPRSLNREPLGLFPGNLPFHGGDIWTLYELSWLNARGLPQVAVAEVTLDAFSSNLIESKSFKLYLNSFNQTRFDDWDAVTRTLQHDLAHCAQGTVSVRLMRLQELEGQPVGAFSGVCIDDQDITIDSYEFDAGLLHGAADGAEIVEETLVSHLLKSNCLITHQPDWGSVMIRYCGAQINREALLRYLVSFRHHNEFHEQCVERIFNDIQRFCRPESLAVYARYTRRGGLDINPWRANTPFTPPPARLARQ

SEQ ID NO: 45860 - protein, 281 aa, Enterobacter agglomerans
  misc_feature (1)..(281): tr|A0A4U3CQ87|A0A4U3CQ87_ENTAG NADPH-dependent 7-cyano- 7-deazaguanine reductase OS=Enterobacter agglomerans OX =549 GN=queF PE=3 SV=1
MTTHEQDQALSNLTLGKPTAYHDHYDNSLLQAVPRSLNREPLGLFPDSLPFTGSDIWTLYELSWLNSKGLPQVAVGEVVLNAQSRNLIESKSFKLYLNSFNQTRFADWGEVRQTLERDLSACAEGEARVALFRLNEVEGQPIGHFEGCCIDEQDIAIEDYRFNADYLADAAGSEIVEETLVSHLLKSNCLITNQPDWGSVMIRYKGPRIDREALLRYLVSFRQHNEFHEQCVERIFNDVMRFCHPEALTVYARYTRRGGLDINPWRTNVPFSPGFSRLVRQ

SEQ ID NO: 45861 - protein, 162 aa, Enterobacter agglomerans
  misc_feature (1)..(162): tr|A0A379ADE8|A0A379ADE8_ENTAG NADPH-dependent 7-cyano- 7-deazaguanine reductase OS=Enterobacter agglomerans OX =549 GN=queF_1 PE=4 SV=1
MPVLKVKRGSRCSVSMKWKVSPSAHFEGVCIDEQDIAIEDYRFNADYLADAAGSEIVEETLVSHLLKSNCLITNQPDWGSVMIRYKGPRIDREALLRYLVSFRQHNEFHEQCVERIFNDVMRFCHPEALTVYARYTRRGGLDINPWRTNVPFSPGFSRLVRQ

SEQ ID NO: 45862 - protein, 280 aa, Enterobacter asburiae
  misc_feature (1)..(280): tr|A0A263VUB1|A0A263VUB1_ENTAS NADPH-dependent 7-cyano- 7-deazaguanine reductase OS=Enterobacter asburiae OX=61 645 GN=queF PE=3 SV=1
MSYENHQALTGLTLGKSTDYRDTYDASLLQGVPRSLNRDPLGLHADALPFVGGDIWTLYELSWLNARGLPQVAVGHVELDYATVNLVESKSFKLYLNSFNQTKFNSRDDVQHTLERDLSACAQGKVSVSLYRLHELEGQPVAHFNGTCIDDQDIEVENYEFSADYLENAASGKVVEETLVSHLLKSNCLITHQPDWGSVQIQYRGPKIDREKLLRYLVSFRHHNEFHEQCVERIFSDIQRFCQPEKLSVYARYTRRGGLDINPWRTNTDFVPATGRLVRQ

SEQ ID NO: 45863 - protein, 280 aa, Enterobacter asburiae
  misc_feature (1)..(280): tr|A0A455VU37|A0A455VU37_ENTAS NADPH-dependent 7-cyano- 7-deazaguanine reductase OS=Enterobacter asburiae OX=61 645 GN=queF PE=3 SV=1
MSYENHQALTGLTLGKSTDYRDTYDASLLQGVPRSLNRDPLGLHADALPFVGGDIWTLYELSWLNARGLPQVAVGHVELDYASVNLVESKSFKLFLNSFNQTKFNSWDDVQHTLERDLSACSQGKVSVSLYRLHELEGQPVAHFSGTCIDDQDIEVENYEFSADYLENAATGKVVEETLVSHLLKSNCLITHQPDWGSVQIQYRGPKIDREKLLRYLVSFRHHNEFHEQCVERIFSDIQRFCQPEKLSVYARYTRRGGLDINPWRTNTDFVPATGRLVRQ

SEQ ID NO: 45864 - protein, 280 aa, Enterobacter bugandensis
  misc_feature (1)..(280): tr|A0A167J5J9|A0A167J5J9_9ENTR NADPH-dependent 7-cyano- 7-deazaguanine reductase OS=Enterobacter bugandensis OX =881260 GN=queF PE=3 SV=1
MSYENHQALTGLTLGKSTDYRDTYDASLLQGVPRSLNRDPLGLHADALPFVGGDIWTLYELSWLNARGLPQVAVGHVELDYASVNLVESKSFKLYLNSFNQTRFNSWDEVQQTLERDLAACAQGNVSVSLYRLHELEGQPIAHFHGTCIDEQDIEVENYEFSADYLENAAGGKVVEETLVSHLLKSNCLITHQPDWGSVQIQYRGPKIDREKLLRYLVSFRHHNEFHEQCVERIFNDIQRFCQPEKLSVYARYTRRGGLDINPWRTNTDFVPATGRLVRQ

SEQ ID NO: 45865 - protein, 280 aa, Enterobacter bugandensis
  misc_feature (1)..(280): tr|A0A431SXV9|A0A431SXV9_9ENTR NADPH-dependent 7-cyano- 7-deazaguanine reductase OS=Enterobacter bugandensis OX =881260 GN=queF PE=3 SV=1
MSYENHQALTGLTLGKSTDYRDTYDASLLQGVPRSLNRDPLGLRADALPFVGGDIWTLYELSWLNERGLPQVAVGHVELDYASVNLVESKSFKLYLNSFNQTRFNSWDEVQQTLERDLAACAQGNVSVSLYRLHELEGQPIAHFHGTCIDEQDIEVENYEFSADYLENAADGKVVEETLVSHLLKSNCLITHQPDWGSVQIQYRGPKIDREKLLRYLVSFRHHNEFHEQCVERIFNDIQRFCQPEKLSVYARYTRRGGLDINPWRTNTDFVPATGRLVRQ

SEQ ID NO: 45866 - protein, 280 aa, Enterobacter cancerogenus
  misc_feature (1)..(280): tr|D2ZJQ5|D2ZJQ5_9ENTR NADPH-dependent 7-cyano-7-deazag uanine reductase OS=Enterobacter cancerogenus ATCC 3531 6 OX=500639 GN=queF PE=3 SV=1
MSYENHQALTGLTLGKTTDYRDTYDASLLQGVPRSLNRDPLGLHADALPFVGGDIWTLYELSWLNARGLPQVAVGHVELDYASQNLIESKSFKLYLNSFNQTTFNSWEDVQHTLQRDLSACAQGDVTVSLYRLHELEGQPVAHFHGTCIDDQDIGIDSYEFSADYLENAARGKVVDETLVSHLLKSNCLITHQPDWGSVQIQYRGPKIDREKLLRYLVSFRHHNEFHEQCVERIFNDIMRFCQPEKLSVYARYTRRGGLDINPWRTNTDFVPATGRLVRQ

SEQ ID NO: 45867 - protein, 280 aa, Enterobacter cancerogenus
  misc_feature (1)..(280): tr|A0A2J7NZZ1|A0A2J7NZZ1_9ENTR NADPH-dependent 7-cyano- 7-deazaguanine reductase OS=Enterobacter cancerogenus O X=69218 GN=queF PE=3 SV=1
MSYENHQALTGLTLGKMTDYRDTYDASLLQGVPRSLNRDPLGLHADALPFVGGDIWTLYELSWLNARGLPQVAVGHVELDYASQNLIESKSFKLYLNSFNQTTFNSWEDVQHTLQRDLSACAQGGVTVSLYRLHELEGQPVAHFHGTCIDDQDIGIDSYEFSADYLENAASGKVVDETLVSHLLKSNCLITHQPDWGSVQIQYRGPKIDREKLLRYLVSFRHHNEFHEQCVERIFNDIMRFCQPEKLSVYARYTRRGGLDINPWRTNTDFVPATGRLVRQ

SEQ ID NO: 45868 - protein, 280 aa, Enterobacter chengduensis
  misc_feature (1)..(280): tr|A0A0F4BDJ4|A0A0F4BDJ4_9ENTR NADPH-dependent 7-cyano- 7-deazaguanine reductase OS=Enterobacter chengduensis O X=2494701 GN=queF PE=3 SV=1
MSYENHQALTGLTLGKSTDYRDTYDASLLQGVPRSLNRDPLGLHADALPFVGGDIWTLYELSWLNARGLPQVAVGHVELDYASVNLVESKSFKLYLNSFNQTKFNSWDDVQHTLERDLSACAQGKVGVSLYRLNEFEGQPVAHFNGTCIDDQDIEVENYEFSADYLENAASGKVVEETLVSHLLKSNCLITHQPDWGSVQIQYRGPTIDREKLLRYLVSFRHHNEFHEQCVERIFSDIQRFCQPEKLSVYARYTRRGGLDINPWRTNTDFVPATGRLVRQ

SEQ ID NO: 45869 - protein, 280 aa, Enterobacter chuandaensis
  misc_feature (1)..(280): tr|A0A3A3Z7V6|A0A3A3Z7V6_9ENTR NADPH-dependent 7-cyano- 7-deazaguanine reductase OS=Enterobacter chuandaensis O X=2497875 GN=queF PE=3 SV=1
MSYENHQALTGLTLGKSTDYRDTYDASLLQGVPRSLNRDPLGLHAGALPFVGGDIWTLYELSWLNARGLPQVAVGHVELDYASQNLVESKSFKLYLNSFNQTKFNSWDDVQQTLERDLTACAQGKVSVSLYRLHELEGQPIAHFHGTCIDDQDIEVENYEFSADYLENAASGKVVEETLVSHLLKSNCLITHQPDWGSVQIQYRGPKIDREKLLRYLVSFRHHNEFHEQCVERIFNDIQRFCQPETLSVYARYTRRGGLDINPWRTNTDFVPATGRLVRQ

SEQ ID NO: 45870 - protein, 280 aa, Enterobacter cloacae
  misc_feature (1)..(280): tr|A0A0F0TCP5|A0A0F0TCP5_ENTCL NADPH-dependent 7-cyano- 7-deazaguanine reductase OS=Enterobacter cloacae subsp. cloacae OX=336306 GN=queF PE=3 SV=1
MSYENHQALSGLTLGKSTDYRDTYDASLLQGVPRSLNRDPLGLRADALPFVGGDIWTLYELSWLNARGLPQVAVGQVELDHATLNLVESKSFKLYLNSFNQTKFTSLEEVQHTLERDLRACAQGNVTVALYRLNELEGQPVAHFNGTCIDDQDIEVDNYEFSAGYLENAASGKIVEETLVSHLLKSNCLITHQPDWGSVQIQYRGPKIDREKLLRYLVSFRHHNEFHEQCVERIFSDIQRFCQPETLSVYARYTRRGGLDINPWRTNTDFVPATGRLVRQ

SEQ ID NO: 45871 - protein, 280 aa, Enterobacter cloacae
  misc_feature (1)..(280): tr|A0A5D9RTB6|A0A5D9RTB6_ENTCL NADPH-dependent 7-cyano- 7-deazaguanine reductase OS=Enterobacter cloacae OX=550 GN=queF PE=3 SV=1
MSYENHQALTGLTLGKSTDYRDTYDASLLQGVPRSLNRDPLGLHADALPFVGGDIWTLYELSWLNARGLPQVAVGHVELDYASVNLVESKSFKLYLNSFNQTKFNSWDEVQQTLERDLSACAQGNVTVSLYRLHELEGQPIAHFHGTCIDDQDIEVESYEFSSDYLENAAGGKVVNETLVSHLLKSNCLITHQPDWGSVQIQYRGPQIDREKLLRYLVSFRHHNEFHEQCVERIFNDIQRFCQPEKLSVYARYTRRGGLDINPWRTNTDFVPATGRLVRQ

SEQ ID NO: 45872 - protein, 280 aa, Enterobacter genomosp.
  misc_feature (1)..(280): tr|A0A0X4EM42|A0A0X4EM42_9ENTR NADPH-dependent 7-cyano- 7-deazaguanine reductase OS=Enterobacter genomosp. O OX =2364150 GN=queF PE=3 SV=1
MSYENHQALTGLTLGKSTDYRDTYDASLLQGVPRSLNRDPLGLHADALPFVGGDIWTLYELSWLNARGLPQVAVGHVELDYASQNLVESKSFKLYLNSFNQTTFNSWDDVQHTLERDLSACAQGKVSVSLYRLHELEGQPIAHFNGTCIDDQDIEVKNYEFSADYLENAASGKVVEETLVSHLLKSNCLITHQPDWGSVQIQYRGPKIDREKLLRYLVSFRHHNEFHEQCVERIFSDIQRFCQPEKLSVYARYTRRGGLDINPWRTNTEFVPATGRLVRQ

SEQ ID NO: 45873 - protein, 280 aa, Enterobacter hormaechei
  misc_feature (1)..(280): tr|F5S1A7|F5S1A7_9ENTR NADPH-dependent 7-cyano-7-deazag uanine reductase OS=Enterobacter hormaechei ATCC 49162 OX=888063 GN=queF PE=3 SV=1
MSYENHQALTGLTLGKSTDYRDTYDASLLQGVPRSLNRDPLGLHADALPFVGGDIWTLYELSWLNARGLPQVAVGHVELDYASVNLVESKSFKLYLNSFNQTKFNSWDEVQQTLERDLSACAQGNVTVSLYRLHELEGQPIAHFHGTCIDDQDIEVESYEFSTDCLENAAGGKVVDETLVSHLLKSNCLITHQPDWGSVQIQYRGPKIDREKLLRYLVSFRHHNEFHEQCVERIFNDIQRFCQPEKLSVYARYTRRGGLDINPWRTNTDFVPATGRLVRQ

SEQ ID NO: 45874 - protein, 280 aa, Enterobacter hormaechei
  misc_feature (1)..(280): tr|A0A5D1UXA7|A0A5D1UXA7_9ENTR NADPH-dependent 7-cyano- 7-deazaguanine reductase OS=Enterobacter hormaechei OX= 158836 GN=queF PE=3 SV=1
MSYENHQALTGLTLGKSTDYRDTYDASLLQGVPRSLNRDPLGLHADALPFVGGDIWTLYELSWLNARGLPQVAVGHVELDYASVNLVESKSFKLYLNSFNQTKFNSWDEVQQTLERDLSACAQGNVTVSLYRLHELEGQPIAHFHGTCIDDQDIDVESYEFSTDYLENAAGGKVVDETLVSHLLKSNCLITHQPDWGSVQIQYRGSQIDREKLLRYLVSFRHHNEFHEQCVERIFNDIQRFCQPEKLSVYARYTRRGGLDINPWRTNTDFVPATGRLVRQ

SEQ ID NO: 45875 - protein, 280 aa, Enterobacter huaxiensis
  misc_feature (1)..(280): tr|A0A428LPK4|A0A428LPK4_9ENTR NADPH-dependent 7-cyano- 7-deazaguanine reductase OS=Enterobacter huaxiensis OX= 2494702 GN=queF PE=3 SV=1
MSYENHQALTGLTLGKSTDYRDTYDASLLQGVPRSLNRDPLGLHADALPFVGGDIWTLYELSWLNARGLPQVAVGHVELDYASVNLVESKSFKLYLNSFNQTKFDSWDDVQRTLERDLRACAQGDVAVSLYRLNELEGQPVAHFNGACIDDQDIEVDSYEFSTDYLENAACGKVIEETLVSHLLKSNCLITHQPDWGSVQIQYRGPKIDREKLLRYLVSFRHHNEFHEQCVERIFNDVMRFCQPEKLSVYARYTRRGGLDINPWRTNTDFVPATGRLVRQ

SEQ ID NO: 45876 - protein, 280 aa, Enterobacter kobei
  misc_feature (1)..(280): tr|A0A5A9BDP9|A0A5A9BDP9_9ENTR NADPH-dependent 7-cyano- 7-deazaguanine reductase OS=Enterobacter kobei OX=20822 4 GN=queF PE=3 SV=1
MSYENHQALTGLTLGKSTDYRDTYDASLLQGVPRSLNRDPLGLHADALPFVGGDIWTLYEISWLNARGLPQVAVGHVELDYASQNLVESKSFKLYLNSFNQTKFNHWDEVQQTLERDLTACAQGHVSVSLYRLHELEGQPIAHFNGTCIDDQDIEVENYEFSADYLENAASGKVVEETLVSHLLKSNCLITHQPDWGSVQIQYRGPKIDREKLLRYLVSFRHHNEFHEQCVERIFSDIQRFCQPEKLSVYARYTRRGGLDINPWRTNTDFVPATGRLVRQ

SEQ ID NO: 45877 - protein, 280 aa, Enterobacter kobei
  misc_feature (1)..(280): tr|A0A0P8J4H1|A0A0P8J4H1_9ENTR NADPH-dependent 7-cyano- 7-deazaguanine reductase OS=Enterobacter kobei OX=20822 4 GN=queF PE=3 SV=1
MSYENHQALTGLTLGKSTDYRDTYDASLLQGVPRSLNRDPLGLHADALPFVGGDIWTLYEISWLNARGLPQVAVGHVELDYASQNLVESKSFKLYLNSFNQTKFNHWDEVQQTLERDLTACAQGQVSVSLYRLHELEGQPIAHFNGTCIDDQDIEVENYEFSADYLENAASGKVVEETLVSHLLKSNCLITHQPDWGSVQIQYRGPKIDREKLLRYLVSFRHHNEFHEQCVERIFSDIQRFCQPEKLSVYARYTRRGGLDINPWRTNTDFVPATGRLVRQ

SEQ ID NO: 45878 - protein, 281 aa, Enterobacter lignolyticus
  misc_feature (1)..(281): tr|E3G5R2|E3G5R2_ENTLS NADPH-dependent 7-cyano-7-deazag uanine reductase OS=Enterobacter lignolyticus (strain S CF1) OX=701347 GN=queF PE=3 SV=1
MSSYENHQALSGLTLGKATDYRDTYDASLLQGVPRSLNRDPLGLHADNLPFRGGDIWTLYELSWLNANGLPQVAVGHVELSDTSVNLVESKSFKLYLNSFNQTRFADWETVRATLQRDLSACAQGEVSVALYRLDELEGQPVAHFHGACIDDQDIEIDNYRFSADYLQDAAGGNVVSETLVSHLLKSNCLITHQPDWGSVQIQYRGPKIDREKLLRYLVSFRHHNEFHEQCVERIFNDILRFCKPETLSVYARYTRRGGLDINPWRTNTDFVPATGRLVRQ

SEQ ID NO: 45879 - protein, 280 aa, Enterobacter ludwigii
  misc_feature (1)..(280): tr|W0BHU0|W0BHU0_9ENTR NADPH-dependent 7-cyano-7-deazag uanine reductase OS=Enterobacter ludwigii OX=299767 GN= queF PE=3 SV=1
MSYENHQALTGLTLGKSTDYRDTYDANLLQGVPRSLNRDPLGLRADALPFVGGDIWTLYELSWLNARGLPQVAVGHVELDYASQNLVESKSFKLYLNSFNQTKFDSQEEVQHTLERDLSACAQGKVSVSLYRLNELEGQPVAHFNGTCIDDQDIAVDNYEFSTDYLENAASGKTVEETLVSHLLKSNCLITHQPDWGSVQIQYRGPKIDREKLLRYLVSFRHHNEFHEQCVERIFNDIQRFCHPETLSVYARYTRRGGLDINPWRTNTDFVPATGRLVRQ

SEQ ID NO: 45880 - protein, 280 aa, Enterobacter ludwigii
  misc_feature (1)..(280): tr|A0A5A9AVJ1|A0A5A9AVJ1_9ENTR NADPH-dependent 7-cyano- 7-deazaguanine reductase OS=Enterobacter ludwigii OX=29 9767 GN=queF PE=3 SV=1
MSYENHQALTGLTLGKSTDYRDTYDASLLQGVPRSLNRDPLGLRADALPFVGGDIWTLYELSWLNARGLPQVAVGHVELDYASQNLVESKSFKLYLNSFNQTKFDSQEEVQHTLERDLSACAQGKVSVSLYRLNELEGQPVAHFNGTCIDDQDIAVDNYEFSTDYLENAASGKTVEETLVSHLLKSNCLITHQPDWGSVQIQYRGPKIDREKLLRYLVSFRHHNEFHEQCVERIFNDIQRFCHPETLSVYARYTRRGGLDINPWRTNTDFVPATGRLVRQ

SEQ ID NO: 45881 - protein, 280 aa, Enterobacter mori
  misc_feature (1)..(280): tr|A0A2J0NF81|A0A2J0NF81_9ENTR NADPH-dependent 7-cyano- 7-deazaguanine reductase OS=Enterobacter mori OX=539813 GN=queF PE=3 SV=1
MSYENHQALTGLTLGKSTDYRDTYDASLLQGVPRSLNRDPLGLHADALPFVGGDIWTLYELSWLNARGLPQVAVGHVELDYASVNLVESKSFKLYLNSFNQTTFNSWEDVQATLERDLRACAQGNVAVSLYRLNELEGQPIAHFNGACIDDQDIEVESYEFSTDYLENAASGKVVEETLVSHLLKSNCLITHQPDWGSVQIQYRGPKIDREKLLRYLVSFRHHNEFHEQCVERIFNDIMRFCQPEKLSVYARYTRRGGLDINPWRTNTDFVPATGRLVRQ

SEQ ID NO: 45882 - protein, 78 aa, Enterobacter mori
  misc_feature (1)..(78): tr|A0A2U2NGJ6|A0A2U2NGJ6_9ENTR NADPH-dependent 7-cyano- 7-deazaguanine reductase QueF (Fragment) OS=Enterobacte r mori OX=539813 GN=DEM28_24770 PE=3 SV=1
FSFRNHGDFHEDCMNIIMNDLIDLMDPHYIEVWGKFTPRGVISIDPYTNYGRPDSKYEKMAEHRLMNHDLYPEKIDNR

SEQ ID NO: 45883 - protein, 280 aa, Enterobacter roggenkampii
  misc_feature (1)..(280): tr|A0A1S2AF25|A0A1S2AF25_9ENTR NADPH-dependent 7-cyano- 7-deazaguanine reductase OS=Enterobacter roggenkampii O X=1812935 GN=queF PE=3 SV=1
MSYENHQALTGLTLGKSTDYRDTYDASLLQGVPRSLNRDPLGLHADALPFVGGDIWTLYELSWLNARGLPQVAVGHVELDYASVNLVESKSFKLYLNSFNQTKFNSWDDVQRTLERDLSACAQGKVSVSLYRLHELEGQPVAHFNGTCIDDQDIEVENYEFSADYLENAASGKVVEETLVSHLLKSNCLITHQPDWGSVQIQYRGPKIDREKLLRYLVSFRHHNEFHEQCVERIFSDIQRFCQPEKLSVYARYTRRGGLDINPWRTNTDFVPATGRLVRQ

SEQ ID NO: 45884 - protein, 280 aa, Enterobacter roggenkampii
  misc_feature (1)..(280): tr|A0A5D1UBD9|A0A5D1UBD9_9ENTR NADPH-dependent 7-cyano- 7-deazaguanine reductase OS=Enterobacter roggenkampii O X=1812935 GN=queF PE=3 SV=1
MSYENHQALTGLTLGKSTDYRDTYDASLLQGVPRSLNRDPLGLHADALPFVGGDIWTLYELSWLNARGLPQVAVGHVELDYASVNLVESKSFKLYLNSFNQTKFNSWDDVQHTLERDLSACAQGKVSVSLYRLHELEGQPVAHFNGTCIDDQDIEVENYEFSADYLENAASGKVVEETLVSHLLKSNCLITHQPDWGSVQIQYRGPKIDREKLLRYLVSFRHHNEFHEQCVERIFSDIQRFCQPEKLSVYARYTRRGGLDINPWRTNTDFVPATGRLVRQ

SEQ ID NO: 45885 - protein, 280 aa, Enterobacter sichuanensis
  misc_feature (1)..(280): tr|A0A0F1AG69|A0A0F1AG69_9ENTR NADPH-dependent 7-cyano- 7-deazaguanine reductase OS=Enterobacter sichuanensis O X=2071710 GN=queF PE=3 SV=1
MSYENHQALTGLTLGKSTDYRDTYDASLLQGVPRSLNRDPLGLHADALPFVGGDIWTLYELSWLNARGLPQVAVGHVELDYASQNLVESKSFKLYLNSLNQTKFNSWDDVQHTLERDLSACAQGKVSVSLYRLHELEGQPIAHFNGTCIDDQDIEVENYEFSADYLENAASGKVVDETLVSHLLKSNCLITHQPDWGSVQIQYRGPKIDREKLLRYLVSFRHHNEFHEQCVERIFSDIQRFCQPEKLSVYARYTRRGGLDINPWRTNTDFVPATGRLVRQ

SEQ ID NO: 45886 - protein, 280 aa, Enterobacter soli
  misc_feature (1)..(280): tr|A0A198H1U6|A0A198H1U6_9ENTR NADPH-dependent 7-cyano- 7-deazaguanine reductase OS=Enterobacter soli ATCC BAA- 2102 OX=1354262 GN=queF PE=3 SV=1
MSYENHQALTGLTLGKSTDYRDTYDATLLQGVPRSLNRDPLGLHADALPFVGGDIWTLYELSWLNARGLPQVAVGHVELDYASLNLVESKSFKLYLNSFNQTRFDSWDDVLHTLERDLRACAKGDVMVSLYRLHELEGQPIAHFNGTCIDEQDIDIDNYEFSTDYLENAAGGKVVEETLVSHLLKSNCLITHQPDWGSVQIQYSGPKIDREKLLRYLVSFRHHNEFHEQCVERIFNDIQRFCQPEKLSVYARYTRRGGLDINPWRTNTDFVPATGRLVRQ

SEQ ID NO: 45887 - protein, 280 aa, Enterobacter sp.
  misc_feature (1)..(280): tr|A4WDY1|A4WDY1_ENT38 NADPH-dependent 7-cyano-7-deazag uanine reductase OS=Enterobacter sp. (strain 638) OX=39 9742 GN=queF PE=3 SV=1
MSYENHQALTGLTLGKTTDYRDTYDASLLQGVPRSLNRDPLGLRADALPFVGGDIWTLYELSWLNARGLPQVAVGHVELDYASVNLVESKSFKLYLNSFNQTRFDSWDDVQRTLERDLSACAQGNVTVALYRLHELEGQPIAHFHGACLDDQEIEIDNYEFSTDYLENATDSKVVEETLVSHLLKSNCLITHQPDWGSVQIQYRGPKIDREKLLRYLVSFRHHNEFHEQCVERIFNDIQRFCQPEKLSVYARYTRRGGLDINPWRTNTDFVPAIGRLVRQ

SEQ ID NO: 45888 - protein, 281 aa, Enterobacter sp.
  misc_feature (1)..(281): tr|R9VQC1|R9VQC1_9ENTR NADPH-dependent 7-cyano-7-deazag uanine reductase OS=Enterobacter sp. R4-368 OX=1166130 GN=queF PE=3 SV=1
MSSYDNHQALAGLTLGKTTDYRDTYDASLLQGVPRSLNRDPLGLKADSLPFRGADIWTLYELSWLNAKGLPQVAVGHVELDHASVNLVESKSFKLYLNSFNQTRFASWQEVHDTLQRDLSACAQGTVNVVLYRIDELEGQPIAHFPGVCIDDQDIEIANYEFDAALLTDAASGKVVEETLVSHLLKSNCLITHQPDWGSVQIQYRGAQIDREKLLRYLVSFRHHNEFHEQCVERIFTDILRFCQPESLSVYARYTRRGGLDINPWRTNTDFVPATGRLVRQ

SEQ ID NO: 45889 - protein, 281 aa, Enterobacterales bacterium
  misc_feature (1)..(281): tr|A0A389M7A5|A0A389M7A5_9GAMM NADPH-dependent 7-cyano- 7-deazaguanine reductase OS=Enterobacterales bacterium OX=1993870 GN=queF PE=3 SV=1
MSSYQDNPALSQLTLGKPTPYRDQYDASLLQAVPRSMNREPLGLYPDALPFHGADIWTLYELSWLNTKGLPQVAVGEISLNANSVNLIESKSFKLYLNSFNQSKFDTWDNVLSTLTRDLSQCAEGDVIVRLSRLNDVEGSKIGHFDGECIDDQDIEIDNYEFSTGYLTDAAGDDIVEESLVSHLLKSNCLITHQPDWGSVQIQYRGPKIDREALLRYLVSFRNHNEFHEQCVERIFNDILAFCAPQALSVYARYTRRGGLDINPWRSNFPFTPATARLVRQ

SEQ ID NO: 45890 - protein, 281 aa, Enterobacterales bacterium
  misc_feature (1)..(281): tr|A0A2I0FQZ5|A0A2I0FQZ5_9GAMM NADPH-dependent 7-cyano- 7-deazaguanine reductase OS=Enterobacterales bacterium CwR94 OX=2025587 GN=queF PE=3 SV=1
MSSYDNHQALSGLTLGKPTEYHDSYDASLLQAVPRALNREPLGLFPDNLPFQGADIWTLYELSWLNAKGVPQVAVGEVTLDAFSINLVESKSFKLYLNSFNQTRFADWGEVRTTLERDLSACAQGNVSVALYRLQEIEGQPIGRMQGECIDEQDIAIDNYQFDAQLLANAAGSEVVEETLVSHILKSNCLITHQPDWGSVQISYRGPRLCREALLRYLVSFRHHNEFHEQCVERIFNDIQRFCQPESLSVYARYTRRGGLDINPWRSNTTFRPAHSRLVRQ

SEQ ID NO: 45891 - protein, 281 aa, Enterobacteriaceae bacterium
  misc_feature (1)..(281): tr|A0A3C0H3V7|A0A3C0H3V7_9ENTR NADPH-dependent 7-cyano- 7-deazaguanine reductase OS=Enterobacteriaceae bacteriu m OX=1849603 GN=queF PE=3 SV=1
MTSYENHAALSGLTLGKSTAYRDIYDASLLQPVPRSLNRDPLGLRADALPFHGADIWTLYELSWLNNNGLPQVGVGHVSIDSASVNLVESKSFKLYLNSFNQTRFASWDEVQQTLAQDLGRCAQGNVDVKLFRLHELEGQTVAAFDGTCIDDQPITIDNYEFDADYLAGAAGDRVVEETLVSHLLKSNCLITHQPDWGSVQIRYNGPQIDREKLLRYLVSFRHHNEFHEQCVERIFNDIMRFCQPTSLSVYARYTRRGGLDINPWRSNTDFTPATGRLVRQ

SEQ ID NO: 45892 - protein, 281 aa, Enterobacteriaceae bacterium
  misc_feature (1)..(281): tr|A0A427C6C5|A0A427C6C5_9ENTR NADPH-dependent 7-cyano- 7-deazaguanine reductase OS=Enterobacteriaceae bacteriu m CCUG 66741 OX=1851514 GN=queF PE=3 SV=1
MSSYENHQALSGLTLGKSTDYRDIYDASLLQPVPRSLNRDPLGLHADNLPFHGGDIWTLYELSWLNAKGLPQVAVGHVELSDTSVNLVESKSFKLYLNSFNQTRFADWEEVRATLERDLRHCAQGDVTVALYRIDEMEGQPIAHFHGACIDEQDIEIDSYEFSADYLQDAASGKVVEETLVSHLLKSNCLITHQPDWGSVQIQYRGPKIDREKLLRYLVSFRHHNEFHEQCVERIFNDIQRFCQPESLSVYARYTRRGGLDINPWRSNTDFVPAIGRLVRQ

SEQ ID NO: 45893 - protein, 214 aa, Enterorhabdus caecimuris
  misc_feature (1)..(214): tr|A0A4S4G5S4|A0A4S4G5S4_9ACTN NADPH-dependent 7-cyano- 7-deazaguanine reductase OS=Enterorhabdus caecimuris OX =671266 GN=queF PE=3 SV=1
MAPEGSVDSSALAAIAAHLKRSAEPAEEPAKSGAQAPSTPEAPCAVGASGRDEEETRAGGVTHLGSQGTQYPTDYDPSVLETFENKHPGNDYFVKFNCPEFTSLCPITGQPDFATIYISYVPGERMVESKSLKLYLFSFRNHGDFHEDCMNIIMKDLIALMDPKYIEVWGKFTPRGGISIDPYCNYGRAGTPWEKVAWERLTQHDMYPEKVDNR

SEQ ID NO: 45894 - protein, 236 aa, Enterorhabdus caecimuris
  misc_feature (1)..(236): tr|R9L4G1|R9L4G1_9ACTN NADPH-dependent 7-cyano-7-deazag uanine reductase OS=Enterorhabdus caecimuris B7 OX=1235 794 GN=queF PE=3 SV=1
MKPMEMAEALFGGEGNADGVEEMAPEGSVDSSALAAIAAHLKRSAEPAEEPAKSGAQAPSAPEAPCAAGTSGRDEGETRAGGVTHLGSQGTQYPTDYDPSVLETFENKHPGNDYFVKFNCPEFTSLCPITGQPDFATIYISYVPGERMVESKSLKLYLFSFRNHGDFHEDCMNIIMKDLISLMDPKYIEVWGKFTPRGGISIDPYCNYGRAGTPWEKVAWERLTQHDMYPEKVDNR

SEQ ID NO: 45895 - protein, 154 aa, Enterorhabdus sp.
  misc_feature (1)..(154): tr|A0A4S2FEL6|A0A4S2FEL6_9ACTN NADPH-dependent 7-cyano- 7-deazaguanine reductase OS=Enterorhabdus sp. NM05_H27 OX=2516956 GN=queF PE=3 SV=1
MTHLGSQGTQYPTDYDPSVLETFVNKHPGNDYFVKFNCPEFTSLCPITGQPDFATIYISYVPGELMVESKSLKLYLFSFRNHGDFHEDCMNIIMKDLIALMDPKYIEVWGKFTPRGGISIDPYCNYGRAGTPWEKVAWERLTQHDMYPEKVDNR

SEQ ID NO: 45896 - protein, 281 aa, Enterovibrio coralii
  misc_feature (1)..(281): tr|A0A135I6H9|A0A135I6H9_9GAMM NADPH-dependent 7-cyano- 7-deazaguanine reductase OS=Enterovibrio coralii OX=294 935 GN=queF PE=3 SV=1
MSKYQDAKELAGLTLGQKTDYQEHYAPELLQPVPRSLNRDDLDLGDSLPFTGYDIWTLYELSWLNAKGLPQVAIGEVRLPATSPNLIESKSFKLYLNSFNQTKFENWQEVVDTLAKDLSACAGADVDVTILPLEEFSNASVVAFGGENIDEQDIAIDNYEFDASLLEGAAEGPVVTETLNSNLLKSNCLITSQPDWGSVRIAYKGKRINREKLLRYIVSFRRHNEFHEQCVERIFTDLMKYCQPELLTVYARYTRRGGLDINPYRTNMGKTPSENNRLARQ

SEQ ID NO: 45897 - protein, 281 aa, Enterovibrio nigricans
  misc_feature (1)..(281): tr|A0A1T4UBX6|A0A1T4UBX6_9GAMM NADPH-dependent 7-cyano- 7-deazaguanine reductase OS=Enterovibrio nigricans DSM 22720 OX=1121868 GN=queF PE=3 SV=1
MSKYQDAKELAGLTLGQKTDYQEHYAPELLQPVPRSLNRDDLDLGDSLPFTGYDIWTLYELSWLNAKGLPQVAIGEVRLPATSPNLIESKSFKLYLNSFNQTKFKNWQEVVDTLAKDLSACAGSDVDVTILPLEEFSNASVVAFGGENIDEQDIEVDNYEFDASLLEGAAEGPIVTETLNSNLLKSNCLITSQPDWGSVRIAYKGKRINREKLLRYIVSFRRHNEFHEQCVERIFTDLMKYCQPELLTVYARYTRRGGLDINPYRTNMGKTPSENNRLARQ

SEQ ID NO: 45898 - protein, 281 aa, Enterovibrio norvegicus
  misc_feature (1)..(281): tr|A0A4U1ZVR7|A0A4U1ZVR7_9GAMM NADPH-dependent 7-cyano- 7-deazaguanine reductase OS=Enterovibrio norvegicus OX= 188144 GN=queF PE=3 SV=1
MSKYQDAKELAGLTLGQKTDYQEHYAPELLQPVPRSLNRDDLDMGETLPFTGYDVWTLYELSWLNAKGLPQVAIGEVRLPATSPNLIESKSFKLYLNSFNQTKFKNWQEVVDTLAKDLSACAGEDVDVTILPVEEFTNTPVVAFGGENIDEQDITIDDYVFDSRLLKGAADGPMVSETLNSNLLKSNCLITNQPDWGSVRIAYKGKRINREKLLRYIVSFRRHNEFHEQCVERIFTDIMKYCQPELLTVYARYTRRGGLDINPYRTNMGKTPSENNRLARQ

SEQ ID NO: 45899 - protein, 281 aa, Enterovibrio norvegicus
  misc_feature (1)..(281): tr|A0A1I5W0P8|A0A1I5W0P8_9GAMM NADPH-dependent 7-cyano- 7-deazaguanine reductase OS=Enterovibrio norvegicus DSM 15893 OX=1121869 GN=queF PE=3 SV=1
MSKYQDAKELAGLTLGQKTDYQEHYAPELLQPVPRSLNRDDLDMGETLPFTGYDVWTLYELSWLNAKGLPQVAIGEVRLPATSPNLIESKSFKLYLNSFNQTKFKNWQEVVDTLAKDLSACAGEDVDVTILPVEEFTNTPVVAFGGENIDEQDITIDDYVFDSRLLKGAADGPMVSETLNSNLLKSNCLITSQPDWGSVRIAYKGKRINREKLLRYIVSFRSHNEFHEQCVERIFTDIMKYCQPELLTVYARYTRRGGLDINPYRTNMGKTPSENNRLARQ

SEQ ID NO: 45900 - protein, 281 aa, Enterovibrio pacificus
  misc_feature (1)..(281): tr|A0A1C3EI62|A0A1C3EI62_9GAMM NADPH-dependent 7-cyano- 7-deazaguanine reductase OS=Enterovibrio pacificus OX=1 080227 GN=queF PE=3 SV=1
MSNYDNASELANLTLGQQTEYKEQYAPELLQPVPRSLNREELELKDVLPFTGYDIWSLYELSWLNDKGLPQVALGEVRLPASSPNLIESKSFKLYLNSFNQTRFSSWQDVVEALAKDLSACAGAEVDVTVLPLDEFDDQPIVSIGGENIDNQDISIDSYELDPSLLEGATGDDVVTETLSSNLLKSNCLITNQPDWGSVRIAYTGKQINREKLLRYIVSFRRHNEFHEQCVERMFCDLMKYCQPEFLTVYARYTRRGGLDINPYRTNMGKTPSENNRLARQ

SEQ ID NO: 45901 - protein, 281 aa, Enterovibrio sp.
  misc_feature (1)..(281): tr|A0A4Q0YNI8|A0A4Q0YNI8_9GAMM NADPH-dependent 7-cyano- 7-deazaguanine reductase OS=Enterovibrio sp. CAIM 600 O X=1278244 GN=queF PE=3 SV=1
MSNYDNASELAGLTLGQQTDYKEQYAPELLQAVPRTLNRQELGLDTELPFTGYDIWTLYELSWLNSKGLPQVAIGEVRLPVTSPNLIESKSFKLYLNSFNQTKFASWQEVVETLAKDLSACAGADVDVTIVPVDEFDNQPIVPFGGENIDDQDISISDYELDPALLENAASGETVTETLNSHLLKSNCLITNQPDWGSVRIAYTGKKIDREKLLRYIVSFRRHNEFHEQCVERIFCDVMKYCQPESLTVYARYTRRGGLDINPYRTNMGKTPSENNRLARQ

SEQ ID NO: 45902 - protein, 147 aa, Enterovirga rhinocerotis
  misc_feature (1)..(147): tr|A0A4R7C844|A0A4R7C844_9RHIZ NADPH-dependent 7-cyano- 7-deazaguanine reductase OS=Enterovirga rhinocerotis OX =1339210 GN=queF PE=3 SV=1
MTDLLLGRSAALPASPEDAQLDRVPNPHPDTDYLARFTAPEFTSLCPVTGQPDFAILVIDYVPGDWLVESKSLKLYLASFRNHGAFHEDCTVAIGKRLAGLLEPRWLRLGGYWYPRGGIPIDVFWQTGAPPKDLWLPDQGVAPYRGR

SEQ ID NO: 45903 - protein, 272 aa, Eoetvoesia caeni
  misc_feature (1)..(272): tr|A0A366HJX7|A0A366HJX7_9BURK NADPH-dependent 7-cyano- 7-deazaguanine reductase OS=Eoetvoesia caeni OX=645616 GN=queF PE=3 SV=1
MFDPKLADAPLGHEVAYPQKYDASLLFPIARATNRHALPHMPDWIGADIWHGYEISWLNQKGKPMIAMARFIFPQSTPNLIESKSFKLYLNSFNEERYPGAPAVLDIMRRDLSRAAGAEIEIEFEPVNTRVECTPLEGENIDDADIEITAYRPAPELLRCVDQAQVVSETLTSDLLKSNCPVTGQPDWGSVQIRYTGPRIDREALLAYIVSLRQHDEFHEHCVEKMYCDIWQACKPVALCVYARYTRRGGLDINPWRSSEPVSVEQARTPRQ

SEQ ID NO: 45904 - protein, 154 aa, Epibacterium mobile
  misc_feature (1)..(154): tr|A0A1B1A363|A0A1B1A363_9RHOB NADPH-dependent 7-cyano- 7-deazaguanine reductase OS=Epibacterium mobile F1926 O X=1265309 GN=queF PE=3 SV=1
MSEDIYSNLKQLGGETRIPASPEEAELERVPNPQADVAYNVRFTAPEFTSLCPMTGQPDFAHLVIDYVPGPWLVESKSLKLFLTSFRNHGAFHEDCTISIARRLAEFLDPQWLRIGGYWYPRGGIPIDVFWQTGPLPEGVWIPDQGVPPYRGRG

SEQ ID NO: 45905 - protein, 154 aa, Epibacterium mobile
  misc_feature (1)..(154): tr|A0A1H3DI06|A0A1H3DI06_9RHOB NADPH-dependent 7-cyano- 7-deazaguanine reductase OS=Epibacterium mobile OX=3793 47 GN=queF PE=3 SV=1
MSEDIYSNLKQLGGETRIPANPEEAELERVPNPQADVAYNVRFTAPEFTSLCPMTGQPDFAHLVIDYVPGPWLVESKSLKLFLTSFRNHGAFHEDCTISIARRLADFLDPQWLRIGGYWYPRGGIPIDVFWQTGPLPEGVWIPDQGVPPYRGRG

SEQ ID NO: 45906 - protein, 154 aa, Epibacterium multivorans
  misc_feature (1)..(154): tr|A0A0P1GDF3|A0A0P1GDF3_9RHOB NADPH-dependent 7-cyano- 7-deazaguanine reductase OS=Epibacterium multivorans OX =928856 GN=queF PE=3 SV=1
MTDSIYSNLKQLGGDTVLPTDPSEAELERVQNPQADTAYNVRFVAPEFTSLCPMTGQPDFAHLVIDYVPGEWLVESKSLKLFLGSFRNHGAFHEDCTVSIGRRLAEFLDPQWLRIGGYWYPRGGIPIDVFWQSGPMPESVWIPDQGVPPYRGRG

SEQ ID NO: 45907 - protein, 154 aa, Epibacterium ulvae
  misc_feature (1)..(154): tr|A0A1G5PJ31|A0A1G5PJ31_9RHOB NADPH-dependent 7-cyano- 7-deazaguanine reductase OS=Epibacterium ulvae OX=11569 85 GN=queF PE=3 SV=1
MTDSIYSDLKQLGGATVMPTSPEEAELERVPNPQADVNYNVRFTAPEFTSLCPMTSQPDFAHLVIDYVPGDWLIESKALKLYLGSFRNHGAFHEDCTISIARRLVGFLEPRWLRIGGYWYPRGGIPIDVFWQTGEMPKDVWIPDQGVPPYRGRG

SEQ ID NO: 45908 - protein, 129 aa, Epsilonproteobacteria bacterium
  misc_feature (1)..(129): tr|A0A496XWD2|A0A496XWD2_9PROT NADPH-dependent 7-cyano- 7-deazaguanine reductase OS=Epsilonproteobacteria bacte rium OX=2026809 GN=queF PE=3 SV=1
MKNKKKYGELEVNQFDINNPQNFWPNTHKKNYKINIKLPEFMCRCPMSGYFDFATIYIQYIPNSLVIELKALKLYINSFASKYISHENSSNEIYDTIYEKLQPKKLKLTAVFNPRGNVSTKIVIDSEDI

SEQ ID NO: 45909 - protein, 125 aa, Epsilonproteobacteria bacterium
  misc_feature (1)..(125): tr|A0A426W1R3|A0A426W1R3_9PROT NADPH-dependent 7-cyano- 7-deazaguanine reductase OS=Epsilonproteobacteria bacte rium (ex Lamellibrachia satsuma) OX=2496635 GN=queF PE= 3 SV=1
MKYGEKEIQDFDINKEENYWPNEHKKNYTINIELPEFMCLCPRSGYPDFATMKLSYQPDKKVIELKALKLYINSFMTRHISHENSANEIYDTLYNKLKPKSMKLIADFNPRGNVHTVIEIDSEKC

SEQ ID NO: 45910 - protein, 161 aa, Epulopiscium sp.
  misc_feature (1)..(161): tr|A0A1V2YK98|A0A1V2YK98_9FIRM NADPH-dependent 7-cyano- 7-deazaguanine reductase OS=Epulopiscium sp. Nuni2H_MBi n003 OX=1884657 GN=queF PE=3 SV=1
MKNTNNEVTLLGKHDIECTYKYTPDLLEVFDNKHPNNDYFVKFNCPEFTSLCPVTGQPDFATIYISYIPYLKLVESKSLKLYLFSFRNHGDFHENCINIIMKDLIKAMDPKYIEVWGKFTPRGGISIDPYCNHGKKGTKFEDMANYRMVNHDMNPEKVDNR

SEQ ID NO: 45911 - protein, 167 aa, Epulopiscium sp.
  misc_feature (1)..(167): tr|A0A1S9CT90|A0A1S9CT90_9FIRM NADPH-dependent 7-cyano- 7-deazaguanine reductase OS=Epulopiscium sp. Nele67-Bin 004 OX=1764962 GN=queF PE=3 SV=1
MPNIQRTKQEMNDITLLGNQNTQYDFGYNPDVLEVFDNKHPNNDYWVKFNCPEFTSLCPMTGQPDFATIYISYIPSKKMVESKSLKLYLFSFRNHGDFHEDCMNIIMKDLIKVMDPKYIEVWGKFTPRGGISIDPYCNYGKAGTKFEQMAEYRMINHDMNPEKIDNR

SEQ ID NO: 45912 - protein, 124 aa, Ereboglobus luteus
  misc_feature (1)..(124): tr|A0A2U8E228|A0A2U8E228_9BACT NADPH-dependent 7-cyano- 7-deazaguanine reductase OS=Ereboglobus luteus OX=17969 21 GN=queF PE=3 SV=1
MVDPKILETFPNPAPGRDYVIEHTHHEFTSLCPMTGHPDFADITVRYVPDKVCVELKSLKLYFHAFRNEGSFFEAVTNTICDDLGRVMKPRSLTIVSRWKARGGFTSTVTAEWNAKAIRAKRPR

SEQ ID NO: 45913 - protein, 281 aa, Erwinia amylovora
  misc_feature (1)..(281): tr|D4HWK1|D4HWK1_ERWAC NADPH-dependent 7-cyano-7-deazag uanine reductase OS=Erwinia amylovora (strain CFBP1430) OX=665029 GN=yqcD PE=3 SV=1
MSTYDNHHALEGLTLGQPTEYHHTYQPALLQAVPRSLNRDPLGIHGDSLPFCGADIWTLYELSWLNNKGVPQVALGEVVLDASSVNLIESKSFKLYLNSFNQTKFTDWGEVRQTLERDLSACAVGKVGVALFRLHEIEGQPIGHFDGSCIDEQDIVINDYEFDVSYLQNATGSEIVEEQLVSHLLKSNCLITHQPDWGTVQISYRGPRIQREALLRYLVSFRQHNEFHEQCVERIFSDILRYCKPESLSVYARYTRRGGLDINPWRSNTQFVPGRSRLVRQ

SEQ ID NO: 45914 - protein, 281 aa, Erwinia amylovora; identical to SEQ ID NO: 45913
  misc_feature (1)..(281): tr|E5B271|E5B271_ERWAM NADPH-dependent 7-cyano-7-deazag uanine reductase OS=Erwinia amylovora ATCC BAA-2158 OX= 889211 GN=yqcD PE=3 SV=1

SEQ ID NO: 45915 - protein, 281 aa, Erwinia aphidicola; identical to SEQ ID NO: 44395
  misc_feature (1)..(281): tr|A0A4R6PDU8|A0A4R6PDU8_ERWAP NADPH-dependent 7-cyano- 7-deazaguanine reductase OS=Erwinia aphidicola OX=68334 GN=queF PE=3 SV=1

SEQ ID NO: 45916 - protein, 281 aa, Erwinia billingiae
  misc_feature (1)..(281): tr|D8MW86|D8MW86_ERWBE NADPH-dependent 7-cyano-7-deazag uanine reductase OS=Erwinia billingiae (strain Eb661) O X=634500 GN=queF PE=3 SV=1
MSLTDPHQALSNLTLGKPTEYHDKYQPSLLQAVPRSMNREPLGLYPDSLPFHGADIWTLYELSWLNAKGLPQVAVGEITLQADSVNLIESKSFKLYLNSFNQTKFADWGDVRAALERDLSACAEGKVTVALFRLQEVEGQPIGHFAGSCIDEQDIEIDNYQFTTDYLEQATQPEIVEEQLVSHLLKSNCLITNQPDWGSVQISYRGPRIQREALLRYLVSFRHHNEFHEQCVERIFNDILRFCKPEKLSVYARYTRRGGLDINPWRSNGEFRPGHSRLVRQ

SEQ ID NO: 45917 - protein, 281 aa, Erwinia billingiae
  misc_feature (1)..(281): tr|A0A5J6LU64|A0A5J6LU64_9GAMM NADPH-dependent 7-cyano- 7-deazaguanine reductase QueF OS=Erwinia billingiae OX= 182337 GN=queF PE=4 SV=1
MSLTDPHQALSNLTLGKPTEYHDKYQPSLLQAVPRSMNREPLGLYPDSLPFHGADIWTLYELSWLNAKGLPQVAVGEITLQADSINLIESKSFKLYLNSFNQTKFADWGDVRAALERDLSACAEGEVTVALFRLREVEGQPIGHFAGSCIDEQDIEIDNYQFTTDYLEQATQPEIVEEQLVSHLLKSNCLITNQPDWGSVQISYRGPRIQREALLRYLVSFRHHNEFHEQCVERIFNDILRFCKPEKLSVYARYTRRGGLDINPWRSNGEFRPGHSRLVRQ

SEQ ID NO: 45918 - protein, 280 aa, Erwinia citreus
  misc_feature (1)..(280): tr|A0A358L720|A0A358L720_ERWCI NADPH-dependent 7-cyano- 7-deazaguanine reductase OS=Erwinia citreus OX=558 GN=q ueF PE=3 SV=1
MSSDTHQALSGLTLGKPTEYHDQYQPSLLQAVPRSMNREPLGLYPENLPFHGADIWTLYELSWLNAKGLPQVAIGEVSLDAHSINLIESKSFKLYLNSFNQTRFADWGEVRATLERDLSACAQGDVSVALFRLREIEGQPIGHFSGYCIDEQDIEIDNYTFSTDYLQQATQAEVVEEQLVSHLLKSNCLITNQPDWGSVQITYRGPRIQREALLRYLVSFRHHNEFHEQCVERIFNDILRFCQPESLSVYARYTRRGGLDINPWRSNGVFKPGLSRLVRQ

SEQ ID NO: 45919 - protein, 280 aa, Erwinia gerundensis
  misc_feature (1)..(280): tr|A0A0U5L2Q7|A0A0U5L2Q7_9GAMM NADPH-dependent 7-cyano- 7-deazaguanine reductase OS=Erwinia gerundensis OX=1619 313 GN=queF PE=3 SV=1
MSYDNHQALNSLTLGKPTAYHDIYDASLLQAVPRSMNREPLGLYPESLPFQGADIWTLYELSWLNSKGVPQVAVGEVVLDASSQNLIESKSFKLYLNSFNQTKFADWGSVRTTLERDLSACAQGDVSVALFRLQEVEGQPIGHMAGVCIDEQDITIDDYQFNADYLDNATRSEVVEESLVSHLLKSNCLITNQPDWGSVMIRYRGPRIDREALLRYLVSFRHHNEFHEQCVERIFNDVLRYCKPEQLTVYARYTRRGGLDINPWRTNTPFVPCRSRLVRQ

SEQ ID NO: 45920 - protein, 278 aa, Erwinia iniecta
  misc_feature (1)..(278): tr|A0A0L7T840|A0A0L7T840_9GAMM NADPH-dependent 7-cyano- 7-deazaguanine reductase OS=Erwinia iniecta OX=1560201 GN=queF PE=3 SV=1
MQMNNMDGMTLLGKNTDYIQHYSPDLLETLPRSYGRNEINIKSDNLPFLGFDLWTGFELSWLNHRGKPVVAIAEFIIPATSSNLIESKSFKLYLNSFNQTKFDSPDQVATTLENDLTLAAKGEVNVKIYPHLNHYPLLTTSLPGECIDHLDIQIDDYHFNPQHLTDAASGDYVHESLSSNLLKSNCLVTNQPDWGSVVIKYEGKKIDREKLLRYLISFRMHNEFHEQCVERIFSDILHACRPDKLSVFARYTRRGGLDINPFRSNFEETPAVPRLIRQ

SEQ ID NO: 45921 - protein, 281 aa, Erwinia iniecta
  misc_feature (1)..(281): tr|A0A0L7T1A2|A0A0L7T1A2_9GAMM NADPH-dependent 7-cyano- 7-deazaguanine reductase OS=Erwinia iniecta OX=1560201 GN=queF PE=3 SV=1
MSTHEQHQALHGLTLGKATEYHDRYDASLLQAVPRSMNREPLGLYPDSLPFSGADIWTLYELSWLNSKGVPQVAVGEVVLNASSLNLIESKSFKLYLNSFNQTPFSDWGEVRQTLERDLSACAQGEVSVALFRLQEVEGQPIGHFDGNCIDEQDITIDNYQFNADYLKNATATEVVEETLVSHLLKSNCLITNQPDWGSVQIRYRGPRIDREALLRYLVSFRHHNEFHEQCVERIFNDIQRFCQPETLSVYARYTRRGGLDINPWRTNSDFTPSHSRLVRQ

SEQ ID NO: 45922 - protein, 278 aa, Erwinia mallotivora
  misc_feature (1)..(278): tr|A0A014NJZ7|A0A014NJZ7_9GAMM NADPH-dependent 7-cyano- 7-deazaguanine reductase OS=Erwinia mallotivora OX=6922 2 GN=queF PE=3 SV=1
MNPENITLLGTKTEYIQHYTPSILEAIPRSLNREEIGIKDNAPLPFSGTDLWTAWEISWLNDKGKPVVAIGEFFIPASSPDLIESKSFKLYLNSFNQSRFPDAEHVSALMKKDLSDVAGAPVELKLYTDINSYNNHITNLPGESLDGLDIAIENYEFDASLLKGSTSPSGEIVSETLHSDLLKSNCLVTNQPDWGSVIIRYEGSKIDREKLLRYIISFRNHNEFHEQCVERIYSDIMLYCQPAKLTVFARYTRRGGLDINPFRSNCEQNLLSARLVRQ

SEQ ID NO: 45923 - protein, 281 aa, Erwinia persicina
  misc_feature (1)..(281): tr|A0A3S7RZE1|A0A3S7RZE1_9GAMM NADPH-dependent 7-cyano- 7-deazaguanine reductase OS=Erwinia persicina OX=55211 GN=queF PE=3 SV=1
MSSYEHHQALEGLSLGKPTEYHDHYQPELLQAVPRSLNREPLGLYPENLPFSGADIWTLYELSWLNSKGLPQVAIGEVTLDAGSVNLIESKSFKLYLNSFNQTSFANWGEVRQTLERDLSACAQGKVSVALFRLQEIEGQPVGRFSGECIDEQDITIDNYAFSADYLRDATSHERVEEQLVSHLLKSNCLITNQPDWGSVQITYRGPRIRREALLRYLVSFRNHNEFHEQCVERIFNDIQHYCQPESLTVYARYTRRGGLDINPWRTNDTFVASRSRLVRQ

SEQ ID NO: 45924 - protein, 281 aa, Erwinia persicina
  misc_feature (1)..(281): tr|A0A4U3FFZ4|A0A4U3FFZ4_9GAMM NADPH-dependent 7-cyano- 7-deazaguanine reductase OS=Erwinia persicina OX=55211 GN=queF PE=3 SV=1
MSSYEHHQALEGLSLGKPTEYHDHYQPELLQAVPRSLNREPLGLYPENLPFSGADIWTLYELSWLNSKGLPQVAIGEVTLDAGSVNLIESKSFKLYLNSFNQTSFANWGEVRQTLERDLSACAQGKVSVALFRLQEIEGQPVGRFSGECIDEQDITIDNYAFSADYLRDATSHERVEEQLVSHLLKSNCLITNQPDWGSVQISYRGPRIRREALLRYLVSFRNHNEFHEQCVERIFNDIQHYCQPESLTVYARYTRRGGLDINPWRTNDTFVASRSRLVRQ

SEQ ID NO: 45925 - protein, 275 aa, Erwinia piriflorinigrans
  misc_feature (1)..(275): tr|V5ZCB1|V5ZCB1_9GAMM NADPH-dependent 7-cyano-7-deazag uanine reductase OS=Erwinia piriflorinigrans CFBP 5888 OX=1161919 GN=queF PE=3 SV=1
MKTEEITLLGKNTGYTQHYAPELLESLPRSRGRDEISVKHGSLPFSGYDLWTGFEVSWLNDKGKPLVAVAEFFIPASSHNLIESKSFKLYLNSFNQTKFTTPDRVVATLEKDLSLAAGGNVKVKLYTNFDDYSFLIAPLPGECIDHLDIEIDNYVFNPDYLFDSVSGDVVSETLASNLLKSNCLVTNQPDWGSVIIRYEGKRINRENLLRYLISFRTHNEFHEQCVERIFSDIRHYCKPDKLTVFARYTRRGGLDINPFRSNFEEDLPVERLIRQ

SEQ ID NO: 45926 - protein, 281 aa, Erwinia piriflorinigrans
  misc_feature (1)..(281): tr|V5Z4B7|V5Z4B7_9GAMM NADPH-dependent 7-cyano-7-deazag uanine reductase OS=Erwinia piriflorinigrans CFBP 5888 OX=1161919 GN=queF PE=3 SV=1
MSTYDNHHALKGLTLGQPTEYHDTYQPALLQAVPRSLNREPLGLYPESLPFGGADIWTMYELSWLNGKGVPQVAVGEVILDASSINLIESKSFKLYLNSFNQTKFADWGEVRQILERDLSACAEGEVSVALYRLHEIEGQPVGHFDGYCIDEQDIVIDNYEFNAGYLHDAVGDEIVEEQLVSHLLKSNCLITNQPDWGTVQISYRGPRIQREALLRYLVSFRQHNEFHEQCVERIFSDILRYCRPESLSVYARYTRRGGLDINPWRSNTHFTPGHSRLVRQ

SEQ ID NO: 45927 - protein, 281 aa, Erwinia psidii
  misc_feature (1)..(281): tr|A0A3N6SQP6|A0A3N6SQP6_9GAMM NADPH-dependent 7-cyano- 7-deazaguanine reductase OS=Erwinia psidii OX=69224 GN= queF PE=3 SV=1
MSLKDTQQTLSGLTLGKPTEYHDIYQPSLLQAVPRSMNREPLGLFPQRLPFHGADIWTLYELSWLNAKGVPQVAVGEVTLDANSINLIESKSFKLYLNSFNQTRFADWDEVRHTLEQDLSHCAQGEVSVALFRLQEVEGQPIGHFSGECIDEQDIEIDSYEFSTTHLSQATQSEVVEEQLVSHLLKSNCLITNQPDWGSVQISYRGPRIRHEALLRYLISFRHHNEFHEQCVERIFNDILRFCQPEKLSVYARYTRRGGLDINPWRSNGTFIPARSRLVRQ

SEQ ID NO: 45928 - protein, 281 aa, Erwinia pyrifoliae
  misc_feature (1)..(281): tr|D2T5N3|D2T5N3_ERWP6 NADPH-dependent 7-cyano-7-deazag uanine reductase OS=Erwinia pyrifoliae (strain DSM 1216 3 / CIP 106111 / Ep16/96) OX=644651 GN=yqcD PE=3 SV=1
MSTYDNHHALEGLTLGQPTEYHDTYQPALLQAVPRSLNRDPLGLDGDSLPFCGADIWTLYELSWLNSKGVPQVALGEVVLDACSVNLIESKSFKLYLNSFNQTKFADWGEVRQTLERDLSACALGKVSVALFRLHEIEGQPIGHFDGSCIDEQDIEINNYQFDVSYLQNATGSEVVEEQLVSHLLKSNCLITDQPDWGSVQISYRGPRIQREALLRYLVSFRQHNEFHEQCVERIFSEILRYCKPESLSVYARYTRRGGLDINPWRSNTQFVPGRSRLVRQ

SEQ ID NO: 45929 - protein, 281 aa, Erwinia rhapontici
  misc_feature (1)..(281): tr|A0A4R7GIS1|A0A4R7GIS1_ERWRD NADPH-dependent 7-cyano- 7-deazaguanine reductase OS=Erwinia rhapontici OX=55212 GN=queF PE=3 SV=1
MSSYDHHQALEGLTLGKPTEYHDSYQPELLQAVPRSLNREPLGLYPDNLPFSGADIWTLYELSWLNSKGLPQVALGEVTLDAGSVNLIESKSFKLYLNSFNQTQFADWGDVRQTLERDLSDCAAGKVSVALFRLQEIEGQPIGRFNGECIDEQDIVIDHYQFNADYLRDATSNERVEEQLVSHLLKSNCLITNQPDWGSVQISYRGPRIQREALLRYLVSFRHHNEFHEQCVERIFNDILRFCQPESLTVYARYTRRGGLDINPWRTNDKFVASRSRLVRQ

SEQ ID NO: 45930 - protein, 281 aa, Erwinia sp.
  misc_feature (1)..(281): tr|A0A3N1WHY2|A0A3N1WHY2_9GAMM NADPH-dependent 7-cyano- 7-deazaguanine reductase OS=Erwinia sp. JUb26 OX=248512 6 GN=queF PE=3 SV=1
MSNYNNHQALQGLTLGQPTEYHDSYQPALLQAVPRSLNREPLGLYPDNLPFCGADIWTLYELSWLNSKGLPQVAVGEVSLSADSVNLIESKSFKLYLNSFNQTSFSDWDDVRHTLERDLSACAEGEVSANLFRLQDIEGQPIGHFDGHCIDEQDIVIDSYEFNADYLRDAADGDVVEEQLVSHLLKSNCLITNQPDWGSVQISYRGPRIQREALLRYLVSFRHHNEFHEQCVERIFSDILRFCQPETLSVYARYTRRGGLDINPWRTNADFAPGRARLVRQ

SEQ ID NO: 45931 - protein, 281 aa, Erwinia sp.
  misc_feature (1)..(281): tr|A0A0Q4N884|A0A0Q4N884_9GAMM NADPH-dependent 7-cyano- 7-deazaguanine reductase OS=Erwinia sp. Leaf53 OX=17362 25 GN=queF PE=3 SV=1
MSSYDNHQALDGLTLGKPTEYHDRYQPTLLQAVPRSLNREPLGLFPDNLPFSGADIWTLYELSWLNAKGLPQVAVAEVSLDAASSNLIESKSFKLYLNSFNQTPFADWGDVRNTLERDLSACAEGDVAVALFRLQEIEGQPIGHFSGHCIDEQDITIDNYQFSTDYLQDATGQEVVEEQLVSHLLKSNCLITNQPDWGSVQISYRGPRIQREALLRYLVSFRHHNEFHEQCVERIFNDILRFCQPETLSVYARYTRRGGLDINPWRTNGSFRPSRSRLVRQ

SEQ ID NO: 45932 - protein, 281 aa, Erwinia tasmaniensis
  misc_feature (1)..(281): sp|B2VFX1|QUEF_ERWT9 NADPH-dependent 7-cyano-7-deazagua nine reductase OS=Erwinia tasmaniensis (strain DSM 1795 0 / CIP 109463 / Et1/99) OX=465817 GN=queF PE=3 SV=1
MPTYDNHHALKGLTLGQPTEYHDTYQPALLQAVPRRLNREPLGLYPDSLPFGGADIWTLYELSWLNSKGVPQVAVGEVVLDASSINLIESKSFKLYLNSFNQTKFANWGEVRQILERDLSACAAGKVSVALFRLHEIEGQPVGHFDGYCIDEQDIVIDSYAFDAGYLHNAVGNEIVEEQLVSHLLKSNCLITNQPDWGTVQISYRGPRIQREALLRYLVSFRQHNEFHEQCVERIFSDILRYCQPESLSVYARYTRRGGLDINPWRSNTHFTPGRSRLVRQ

SEQ ID NO: 45933 - protein, 281 aa, Erwinia tracheiphila
  misc_feature (1)..(281): tr|A0A0M2K7L9|A0A0M2K7L9_9GAMM NADPH-dependent 7-cyano- 7-deazaguanine reductase OS=Erwinia tracheiphila OX=657 00 GN=queF PE=3 SV=1
MSLKDSHQVLSSLTLGKPTQYHDNYQPSLLQAVPRSMNREPLGLFPENLPFHGADIWTLYELSWLNAKGLPQVAVGEVTLEASSINLIESKSFKLYLNSFNQTRFASWEDVRQALERDLSHCAQGKVSVALFRLQELEGQPVSHFDGKCIDEQDIEIDSYAFSTDWLSKATQSYKVEEKLVSHLLKSNCLITHQPDWGSVQINYRGPRICHEALLRYLISFRQHNEFHEQCVERIFNDILHFCQPENLSIYARYTRRGGLDINPWRSNVPFIPARSRLVRQ

SEQ ID NO: 45934 - protein, 281 aa, Erwinia tracheiphila
  misc_feature (1)..(281): tr|A0A345CTI1|A0A345CTI1_9GAMM NADPH-dependent 7-cyano- 7-deazaguanine reductase OS=Erwinia tracheiphila OX=657 00 GN=queF PE=3 SV=1
MSLKDSHQVLSSLTLGKPTQYHDNYQPSLLQAIPRSMNREPLGLFPENLPFHGADIWTLYELSWLNAKGLPQVAVGEVTLEASSINLIESKSFKLYLNSFNQTRFASWEDVRQALERDLSHCAQGKVSVALFRLQELEGQPVSHFDGKCIDEQDIEIDSYAFSTDWLSKATQSYKVEEKLVSHLLKSNCLITHQPDWGSVQINYRGPRICHEALLRYLISFRQHNEFHEQCVERIFNDILHFCQPENLSIYARYTRRGGLDINPWRSNVPFIPARSRLVRQ

SEQ ID NO: 45935 - protein, 281 aa, Erwinia typographi
  misc_feature (1)..(281): tr|A0A0A3Z2E7|A0A0A3Z2E7_9GAMM NADPH-dependent 7-cyano- 7-deazaguanine reductase OS=Erwinia typographi OX=37104 2 GN=queF PE=3 SV=1
MSSKDPHQALSNLTLGKPTEYHDKYQPSLLQAVPRSMNREPLGLYPHSLPFHGADIWTLYELSWLNQKGLPQVALGEVILNADSVNLIESKSFKLYLNSFNQTKFADWGEVRAVLERDLSACAQGEVSVALFRLQEVEGQPIGHFAGYCIDEQDIDIDNYRFTTDYLEQATQPDIVEEQLVSHLLKSNCLITHQPDWGSVQISYRGPRIQREALLRYLVSFRHHNEFHEQCVERIFNDILRFCRPEQLSVYARYTRRGGLDINPWRSNGQFRPGHSRLVRQ

SEQ ID NO: 45936 - protein, 158 aa, Erysipelatoclostridium ramosum; identical to SEQ ID NO: 45433
  misc_feature (1)..(158): tr|A0A3E3AIG8|A0A3E3AIG8_9FIRM NADPH-dependent 7-cyano- 7-deazaguanine reductase OS=Erysipelatoclostridium ramo sum OX=1547 GN=queF PE=3 SV=1

SEQ ID NO: 45937 - protein, 158 aa, Erysipelatoclostridium ramosum; identical to SEQ ID NO: 45433
  misc_feature (1)..(158): tr|B0N7Y2|B0N7Y2_9FIRM NADPH-dependent 7-cyano-7-deazag uanine reductase OS=Erysipelatoclostridium ramosum DSM 1402 OX=445974 GN=queF PE=3 SV=1

SEQ ID NO: 45938 - protein, 157 aa, Erysipelatoclostridium sp.
  misc_feature (1)..(157): tr|A0A1Y4MXW6|A0A1Y4MXW6_9FIRM NADPH-dependent 7-cyano- 7-deazaguanine reductase OS=Erysipelatoclostridium sp. An173 OX=1965571 GN=queF PE=3 SV=1
MDNLTLLGSKNTEYKDDYAPEVLETFDNKHPDNDYFVKFNCPEFTSLCPITGQPDFATIYISYVPNIKMVESKSLKLYLFSFRNHGDFHEDCMNIIMKDLIKLLDPKYIEVWGKFTPRGGISIDPYCNYGKPGTKWEDIAWNRLANHDLYPEKIDNR

SEQ ID NO: 45939 - protein, 157 aa, Erysipelatoclostridium sp.; identical to SEQ ID NO: 45938
  misc_feature (1)..(157): tr|A0A1Y4QQH1|A0A1Y4QQH1_9FIRM NADPH-dependent 7-cyano- 7-deazaguanine reductase OS=Erysipelatoclostridium sp. An15 OX=1965566 GN=queF PE=3 SV=1

SEQ ID NO: 45940 - protein, 157 aa, Erysipelotrichaceae bacterium
  misc_feature (1)..(157): tr|A0A3G9JKT3|A0A3G9JKT3_9FIRM NADPH-dependent 7-cyano- 7-deazaguanine reductase OS=Erysipelotrichaceae bacteri um SG0102 OX=2487118 GN=queF PE=3 SV=1
MSTQLKALGAKTQYPTDYDPHVLETFDNKHPEHDYFVKFNCPEFTSLCPITGQPDFATIYISYVPSQKMVESKSLKLYLFSFRNHGAFHEDCTNIIMNDLIALMDPKYIEVWAKFTPRGGLSIDPYCNYGKPGTRWQEAAWERLKNHDLYPEKIDNR

SEQ ID NO: 45941 - protein, 160 aa, Erysipelotrichaceae bacterium
  misc_feature (1)..(160): tr|A0A3D2W9J9|A0A3D2W9J9_9FIRM NADPH-dependent 7-cyano- 7-deazaguanine reductase OS=Erysipelotrichaceae bacteri um OX=2049044 GN=queF PE=3 SV=1
MREKEGLTKLGSAGTKYSTDYDPSVLETFINKHQDNDYWVKFNCPEFTSLCPITGQPDFATVYISYVPDVKMVESKSLKLYLFSFRNHGDFHEDCVNVIMKDLIRLMDPKYIEVWGKFLPRGGISIDPYCNYGRPGTKWEVIAEDRLAKHDLYPETINNR

SEQ ID NO: 45942 - protein, 155 aa, Erythrobacter aquimixticola
  misc_feature (1)..(155): tr|A0A419RT69|A0A419RT69_9SPHN NADPH-dependent 7-cyano- 7-deazaguanine reductase OS=Erythrobacter aquimixticola OX=1958945 GN=queF PE=3 SV=1
MSDTDTSGQPKFLGQQTALPASPDDATLDYVPNPRTGELFLVRFAAPEFTSLCPVTGAPDFAHLVIDYAPGQTIVESKSLKLFLGSFRNHNGFHEDVTVGIGQRLFSEMQPKWLRIGGYWYPRGGIPIDVFWQSGAPPEGLWLPDQGVAPYRGRG

SEQ ID NO: 45943 - protein, 187 aa, Erythrobacter atlanticus
  misc_feature (1)..(187): tr|A0A0H4VI49|A0A0H4VI49_9SPHN NADPH-dependent 7-cyano- 7-deazaguanine reductase OS=Erythrobacter atlanticus OX =1648404 GN=queF PE=3 SV=2
MPELRNTNEPAWKAQPPYDGLCRRALRAIRLHMTNTQEPAQPMHLGKQTGLPASPEEAVLDYVPNPRAGAIYMVRFAAPEFTSLCPVTGQPDFAHLVIDYAPGETIVESKSLKLFLGAFRNHNGFHEDVTVGIGQRLFEEMAPRWLRIGGYWYPRGGIPIDVFWQSGAAPEGLWLPDQGVAPYRGRG

SEQ ID NO: 45944 - protein, 152 aa, Erythrobacter citreus
  misc_feature (1)..(152): tr|A0A0L1KEB1|A0A0L1KEB1_9SPHN NADPH-dependent 7-cyano- 7-deazaguanine reductase OS=Erythrobacter citreus LAMA 915 OX=1306953 GN=queF PE=3 SV=1
MSDTPAPKFLGANTALPASPEEAELDYVPNPRAGQLYMVRFAAPEFTSLCPVTGQPDFAHLVIDYAPGETIVESKSLKLFLGSFRNHCGFHEDVTVGIGQRLFYEMQPQWLRIGGYWYPRGGIPIDVFWQSGAPPAALWLPDQGVSAYRGRG

SEQ ID NO: 45945 - protein, 152 aa, Erythrobacter flavus
  misc_feature (1)..(152): tr|A0A222ET36|A0A222ET36_9SPHN NADPH-dependent 7-cyano- 7-deazaguanine reductase OS=Erythrobacter flavus OX=192 812 GN=queF PE=3 SV=1
MSDTPAPKFLGANTALPASPEEAELDYVPNPRAEQLYMVRFAAPEFTSLCPVTGQPDFAHVVIDYAPGETIVESKSLKLFLGSFRNHCGFHEDVTVGIGQRLFDEMKPRWLRIGGYWYPRGGIPIDVFWQSGPPPEGLWLPDQGVASYRGRG

SEQ ID NO: 45946 - protein, 155 aa, Erythrobacter gangjinensis
  misc_feature (1)..(155): tr|A0A0G9MVX1|A0A0G9MVX1_9SPHN NADPH-dependent 7-cyano- 7-deazaguanine reductase OS=Erythrobacter gangjinensis OX=502682 GN=queF PE=3 SV=1
MSDDQKTTNPLHLGQTSSLPASPEEAVLDYVPNPRAGTTYLVRFSAPEFTSLCPVTSAPDFAHLVIDYAPAETIVESKSLKLFLGSFRNHNGFHEDVTVGIGQRLFDEMKPQWLRIGGYWYPRGGIPIDVFWQSGAPPADLWLPDQGVQGYRGRG

SEQ ID NO: 45947 - protein, 160 aa, Erythrobacter litoralis
  misc_feature (1)..(160): tr|Q2NCW5|Q2NCW5_ERYLH NADPH-dependent 7-cyano-7-deazag uanine reductase OS=Erythrobacter litoralis (strain HTC C2594) OX=314225 GN=queF PE=3 SV=1
MRGMSDTPTPAEGAPQFLGKQTALPASPEDAVLDYVPNPRPGALYLVRFAAPEFTSLCPVTGAPDFAHLVIDYAPGDTVVESKSLKLFLGSFRNHNGFHEDVTVGIGQRLNEEMRPRWLRIGGYWYPRGGIPIDVFWQSGPSPEGLWVPDQGVAGYRGRG

SEQ ID NO: 45948 - protein, 153 aa, Erythrobacter litoralis
  misc_feature (1)..(153): tr|A0A074MIW7|A0A074MIW7_9SPHN NADPH-dependent 7-cyano- 7-deazaguanine reductase OS=Erythrobacter litoralis OX= 39960 GN=queF PE=3 SV=1
METTQSGPAFLGKDTPLPASPEEAQLDYVPNPRPGTLYLVRFAAPEFTSLCPVTSQPDFAHLVIDYAPGETIVESKSLKLFLGSFRNHNGFHEDVTVGIGQRLAEEMKPRWLRIGGYWYPRGGIPIDVFWQTGKPPEELWLPDQGVAPYRGRG

SEQ ID NO: 45949 - protein, 157 aa, Erythrobacter longus
  misc_feature (1)..(157): tr|A0A074MCD8|A0A074MCD8_ERYLO NADPH-dependent 7-cyano- 7-deazaguanine reductase OS=Erythrobacter longus OX=104 4 GN=queF PE=3 SV=1
METTPDSSANAPAFLGKQTDLPQSPEEAVLDYVSNPRAGSLYLVRFVSPEFTSLCPVTNQPDFAHIVIDYAPQETIVESKSLKLFLGSFRNHNGFHEDVTVGIGQRLAEEMKPKWLRIGGYWYPRGGIPIDVFWQTGAPPADLWLPDQGVAPYRGRG

SEQ ID NO: 45950 - protein, 155 aa, Erythrobacter luteus
  misc_feature (1)..(155): tr|A0A0G9MT35|A0A0G9MT35_9SPHN NADPH-dependent 7-cyano- 7-deazaguanine reductase OS=Erythrobacter luteus OX=158 1420 GN=queF PE=3 SV=1
MTDAPAPPAPLHLGQTSALPASPEEAVLDYVPNPRSGSLYLVRFAVPEFTSLCPVTGQPDFAHLVIDYAPGETIVESKSLKLFLGSFRNHCGFHEDVTVGIGQRLFAEMAPRWLRIGGYWYPRGGIPIDVFWQSGASPEGLWVPDQGVASYRGRG

SEQ ID NO: 45951 - protein, 159 aa, Erythrobacter lutimaris
  misc_feature (1)..(159): tr|A0A395LMH9|A0A395LMH9_9SPHN NADPH-dependent 7-cyano- 7-deazaguanine reductase OS=Erythrobacter lutimaris OX= 1538146 GN=queF PE=3 SV=1
MSDTPDQEAAAGAPRFLGQSSPLPASPQEAALDYVPNPRTGSLYTVRFSAPEFTSLCPVTGQPDFAHLVIDYAPGETIVESKSLKLFLGSFRNHCGFHEDVTVGIGQRLFDEMAPKWLRIGGYWYPRGGIPIDVFWQSGPVPEGLWVPEQGVQNYRGRG

SEQ ID NO: 45952 - protein, 159 aa, Erythrobacter marinus
  misc_feature (1)..(159): tr|A0A0H0XQA1|A0A0H0XQA1_9SPHN NADPH-dependent 7-cyano- 7-deazaguanine reductase OS=Erythrobacter marinus OX=87 4156 GN=queF PE=3 SV=1
MNDTQNTKLQQGQPQFLGQQTPLPASPEEAVLDYVPNPRAGALYLVRFAAPEFTSLCPVTGAPDFAHLVIDYAPGETIVESKSLKLFLGAFRNHNGFHEDVTVGIGQRLFAEMQPRWLRIGGYWYPRGGIPIDVFWQSGAPPAGLWLPDQGVAPYRGRG

SEQ ID NO: 45953 - protein, 155 aa, Erythrobacter nanhaisediminis
  misc_feature (1)..(155): tr|A0A1I5PEJ6|A0A1I5PEJ6_9SPHN NADPH-dependent 7-cyano- 7-deazaguanine reductase OS=Erythrobacter nanhaisedimin is OX=604088 GN=queF PE=3 SV=1
MRGMSDTPTPKFLGENSPLPTSPEEAELDYVPNPRAGQLYLVRFAAPEFTSLCPVTGQPDFAHLVIDYAPGETIVESKSLKLFLGSFRNHNGFHEDVTVGIGQRLFDEMKPRWLRIGGYWYPRGGIPIDVFWQSGAPPADLWLPDQGVSSYRGRG

SEQ ID NO: 45954 - protein, 157 aa, Erythrobacter sp.
  misc_feature (1)..(157): tr|A0A1E4AWU6|A0A1E4AWU6_9SPHN NADPH-dependent 7-cyano- 7-deazaguanine reductase OS=Erythrobacter sp. SCN 62-14 OX=1660099 GN=queF PE=3 SV=1
MTDTPDTPALNPAFLGKDSPLPRSPEEAVLDYVPNPRPGALFLVRFVAPEFTSLCPVTDQPDFAHLVIDYAPGETIVESKSLKLFLGSFRNHNGFHEDVTVGIGQRLAEEMQPRWLRIGGYWYPRGGIPIDVFWQTGAAPEGLWVPDQGVAPYRGRG

SEQ ID NO: 45955 - protein, 157 aa, Erythrobacter sp.
  misc_feature (1)..(157): tr|A0A2Z4JZD7|A0A2Z4JZD7_9SPHN NADPH-dependent 7-cyano- 7-deazaguanine reductase OS=Erythrobacter sp. KY5 OX=20 11159 GN=queF PE=3 SV=1
MESTPENPRGAPAFLGKDTPLPASPEEAQLDYVPNPRAGSLFLVRFAAPEFTSLCPVTSQPDFAHLVIDYAPGETIVESKSLKLFLGSFRNHNGFHEDVTVGIGQRLFEEMNPKWLRIGGYWYPRGGIPIDVFWQSGAPPEGLWLPDQGVAPYRGRG

SEQ ID NO: 45956 - protein, 152 aa, Erythrobacter xanthus
  misc_feature (1)..(152): tr|A0A3A1P4K5|A0A3A1P4K5_9SPHN NADPH-dependent 7-cyano- 7-deazaguanine reductase OS=Erythrobacter xanthus OX=17 84712 GN=queF PE=3 SV=1
MSDNATPLHLGQTSSLPASPEEAVLDYVPNPRPQALYMVRFAAPEFTSLCPVTGQPDFAHLVIDYAPGETIVESKSLKLFLGSFRNHCGFHEDVTVGIGERLFNEMAPKWLRIGGYWYPRGGIPIDVFWQSGTPPEGLFLPDQGVAPYRGRG

SEQ ID NO: 45957 - protein, 155 aa, Erythrobacter zhengii
  misc_feature (1)..(155): tr|A0A418NUX7|A0A418NUX7_9SPHN NADPH-dependent 7-cyano- 7-deazaguanine reductase OS=Erythrobacter zhengii OX=23 07003 GN=queF PE=3 SV=1
MSDTDKPVSPLHLGQTSALPASPEEAVLDYVSNPREGALYLVRFAAPEFTSLCPVTGQPDFAHLVIDYAPGKTIVESKSLKLFLGAFRNHDGFHEDVTVGIGQRLFAEMEPQWLRIGGYWYPRGGIPIDVFWQSGKPPEGLWLPEQGVPSYRGRG

SEQ ID NO: 45958 - protein, 152 aa, Erythrobacteraceae bacterium
  misc_feature (1)..(152): tr|A0A2D6NMG9|A0A2D6NMG9_9SPHN NADPH-dependent 7-cyano- 7-deazaguanine reductase OS=Erythrobacteraceae bacteriu m OX=2026738 GN=queF PE=3 SV=1
  misc_feature (33)..(33): Xaa can be any naturally occurring amino acid
  misc_feature (41)..(41): Xaa can be any naturally occurring amino acid
MSDTPSPKFLGVSTGLPTSPDEAELDYVANPRXGQLYLVRXAAPEFTSLCPVTGQPDFAHIVIDYAPGETIVESKSLKLFLGSFRNHCGFHEDVTVGIGQRLFDEMKPQWLRIGGYWYPRGGIPIDVFWQSGAPPEALWLPDQGVPSYRGRG

SEQ ID NO: 45959 - protein, 150 aa, Erythrobacteraceae bacterium
  misc_feature (1)..(150): tr|A0A0N8K710|A0A0N8K710_9SPHN NADPH-dependent 7-cyano- 7-deazaguanine reductase OS=Erythrobacteraceae bacteriu m HL-111 OX=1666908 GN=queF2 PE=3 SV=1
METTPAFLGKDTPLPASPGEARLDYVPNPRPGTLYLVRFAAPEFTSLCPVTSQPDFAHLVIDYAPGETIVESKSLKLFLGSFRNHNGFHEDVTVGIGQRLAGEMEPRWLRIGGYWYPRGGIPIDVFWQTGAPPEGLWLPDQGVASYRGRG

SEQ ID NO: 45960 - protein, 282 aa, Escherichia albertii
  misc_feature (1)..(282): tr|A0A1X3JQX9|A0A1X3JQX9_9ESCH NADPH-dependent 7-cyano- 7-deazaguanine reductase OS=Escherichia albertii B156 O X=550693 GN=queF PE=3 SV=1
MSSYTNHQALAGLTLGKSTDYRDTYDASLLQGVPRSLNRDPLGLKADNLPFHGADIWTLYELSWLNAKGLPQVAVGHVELDYTSVNLIESKSFKLYLNSFNQTRFNNWDEVRQTLERDLSACAQGAVSVALYRLDELEGQPIGHFNGICIDDQDIAIDNYEFTTDYLKDAASGENVVEETLVSHLLKSNCLITHQPDWGSIQIQYRGRKIDREKLLRYLVSFRHHNEFHEQCVERIFNDLLRFCQPEKLSVYARYTRRGGLDINPWRSNTDFVPSVTRLVRQ

SEQ ID NO: 45961 - protein, 282 aa, Escherichia albertii; identical to SEQ ID NO: 45960
  misc_feature (1)..(282): tr|A0A3W6DMF3|A0A3W6DMF3_9ESCH NADPH-dependent 7-cyano- 7-deazaguanine reductase OS=Escherichia albertii OX=208 962 GN=queF PE=3 SV=1

SEQ ID NO: 45962 - protein, 282 aa, Escherichia fergusonii
  misc_feature (1)..(282): tr|F0JRM8|F0JRM8_ESCFE NADPH-dependent 7-cyano-7-deazag uanine reductase OS=Escherichia fergusonii ECD227 OX=98 1367 GN=queF PE=3 SV=1
MSSYENHQALHSLTLGKSTDYRDTYDASLLQGVPRSLNRDPLGLTADNLPFHGADIWTLYELSWLNAKGLPQVAVGHVELDYTSVNLIESKSFKLYLNSFNQTRFDSWEDVRQTLERDLRACAQGEVSVALYQLDELEGQPIAHLHGTCIDNQDIEIDHYDFNADYLQNATSGEKVVEETLVSHLLKSNCLITHQPDWGSIQIQYRGRKIDREKLLRYLVSFRHHNEFHEQCVERIFSDILRLCQPEELSVYARYTRRGGLDINPWRSNCNFQPSTGRLVRQ

SEQ ID NO: 45963 - protein, 282 aa, Escherichia fergusonii
  misc_feature (1)..(282): tr|A0A564V335|A0A564V335_ESCFE NADPH-dependent 7-cyano- 7-deazaguanine reductase OS=Escherichia fergusonii OX=5 64 GN=queF PE=3 SV=1
MSSYANHQALAGLTLGKSTDYRDTYDASLLQGVPRSLNRDPLGLKADNLPFHGTDIWTLYELSWLNAKGLPQVAVGHVELDYTSVNLIESKSFKLYLNSFNQTRFNNWDEVRQTLERDLSTCAQGKISVALYRLDELEGQPIGHFNGTCIDDQDITIDNYEFTTDYLENATCGEKVVEETLVSHLLKSNCLITHQPDWGSIQIQYRGRQIDREKLLRYLVSFRHHNEFHEQCVERIFNDLLRFCQPEKLSVYARYTRRGGLDINPWRSNSDFVPSTTRLVRQ

SEQ ID NO: 45964 - protein, 282 aa, Escherichia marmotae
  misc_feature (1)..(282): tr|A0A2B7M8K8|A0A2B7M8K8_9ESCH NADPH-dependent 7-cyano- 7-deazaguanine reductase OS=Escherichia marmotae OX=149 9973 GN=queF PE=3 SV=1
MSSYANHQALAGLTLGKSTDYRDTYDASLLQGVPRSLNRDPLGLKADNLPFHGADIWTLYELSWLNAKGLPQVAVGHVELDYTSVNLIESKSFKLYLNSFNQTRFNNWEEVRQTLERDLSTCAQGKVSVALYRLDELEGQPMGHFNGTCIDEQDIAIDNYEFTTDYLENAASGEKVVEETLVSHLLKSNCLITHQPDWGSIQIQYRGHKIDREKLLRYLVSFRHHNEFHEQCVERIFNDLLRFCQPEKLSVYARYTRRGGLDINPWRSNSDFVPSTTRLVRQ

SEQ ID NO: 45965 - protein, 282 aa, Escherichia sp.
  misc_feature (1)..(282): tr|A0A2S4QW53|A0A2S4QW53_9ESCH NADPH-dependent 7-cyano- 7-deazaguanine reductase OS=Escherichia sp. ESNIH1 OX=1 985876 GN=queF PE=3 SV=1
MSSSYDNHQALAGLTLGKTTRYQDIYDATLLQGVPRSLNRDPLGLHADSLPFHGGDIWTLYELSWLNANGLPQVAVGHVELDYASVNLVESKSFKLYLNSFNQTRFSSWEEVRATLERDLSACAQGEVSVMLYALDEIEGQPIAHFSGKCIDNQDIVIDDYQFNADYLQHAAGGSVVEETLVSHLLKSNCLITHQPDWGSVQIQYRGPQIDREKLLRYLVSFRHHNEFHEQCVERIFNDLLRFCQPETLSVYARYTRRGGLDINPWRSNTDFQPATGRLVRQ

SEQ ID NO: 45966 - protein, 282 aa, Escherichia sp.
  misc_feature (1)..(282): tr|A0A4Q9JJR9|A0A4Q9JJR9_9ESCH NADPH-dependent 7-cyano- 7-deazaguanine reductase OS=Escherichia sp. E10V4 OX=24 78971 GN=queF PE=3 SV=1
MSSYANHQALAGLTLGKSTDYRDTYDASLLQGVPRSLNRDPLGLKADNLPFHGTDIWTLYELSWLNAKGLPQVAVGHVELDYTSVNLIESKSFKLYLNSFNQTRFNNWDEVRQTLERDLSTCAQGNVSVALYRLDELEGQPVGHFNGTCIDDQDIAIDNYEFTTDYLENAISGEKVVEETLVSHLLKSNCLITHQPDWGSIQIQYRGRKIDREKLLRYLVSFRHHNEFHEQCVERIFNDLLRFCQPEKLSVYARYTRRGGLDINPWRSNCDFVPSTTRLARQ

SEQ ID NO: 45967 - protein, 274 aa, Estrella lausannensis
  misc_feature (1)..(274): tr|A0A0H5DS27|A0A0H5DS27_9BACT NADPH-dependent 7-cyano- 7-deazaguanine reductase OS=Estrella lausannensis OX=48 3423 GN=queF PE=3 SV=1
MDHGLKTAPLGKKTDYVEEYCPELLFPVERKLARDLIGLQDANLPFDGFDIWNGMELSWLGPKGKPEIAIAVFTFPCASPHIVESKSFKLYLNSFNQSIFPSYEAVREVMVRDLSKAVGASVQVSLTPAHKARDQLAYELPGVCLDSLDISINDYEFNPNHLKAEGAHIDETVHSHLLKSNCLATGQPDWGSLLIRYKGPKIDHEGLLKYIISFRRHSGFAEHCVERVFFDIQERCRPDSLTVYARYTRRGGLDINPFRSNFETEADNARQIRQ

SEQ ID NO: 45968 - protein, 165 aa, Eubacteriaceae bacterium
  misc_feature (1)..(165): tr|A0A143Y086|A0A143Y086_9FIRM NADPH-dependent 7-cyano- 7-deazaguanine reductase OS=Eubacteriaceae bacterium CH KCI004 OX=1780380 GN=queF PE=3 SV=1
MSTRTKEELSGVSLLGNQGTKYPQDYAPEVLETFINKHQDHDYFVKFNCPEFTSLCPMTGQPDFATIYISYVPDVRMVESKSLKLYLFSFRNHGDFHEDCVNIIMKDLIRVMDPKYIEVWGKFTPRGGISIDPYTNYGKPGTRWEEVAAYRLERHDLYPEKVDNR

SEQ ID NO: 45969 - protein, 165 aa, Eubacteriaceae bacterium
  misc_feature (1)..(165): tr|A0A425W6E3|A0A425W6E3_9FIRM NADPH-dependent 7-cyano- 7-deazaguanine reductase OS=Eubacteriaceae bacterium OX =2049045 GN=queF PE=3 SV=1
MNDQRDKKKEHLTKLGSAGTVYPTDYAPEMLETFENKHPDHDYFVKFNCPEFTSLCPITGQPDFGNVVIAYVPDKKMVESKSLKLYLFSFREHGAFHEDCMNTIMGDLIALMDPKYIEVWGRFMPRGGISIDPYCNYGRPGTKWEDAAWQRLSHHDMNPEAVDNR

SEQ ID NO: 45970 - protein, 163 aa, [Eubacterium] cellulosolvens
  misc_feature (1)..(163): tr|I5AU68|I5AU68_EUBCE NADPH-dependent 7-cyano-7-deazag uanine reductase OS=[Eubacterium] cellulosolvens 6 OX=6 33697 GN=queF PE=3 SV=1
MSDAREKEDLTLLGNRNVKYATDYDPGVLETFVNKHPDHDYFVKFNCPEFTSLCPITGQPDFATITISYVPQEKMVESKSLKLYLFSFRNHGDFHEDCVNIIMEDLIRLMDPKYIEVWGKFLPRGGISIDPYCNYGKSGTKWEKIAEDRLAWHDMNPEKIDNR

SEQ ID NO: 45971 - protein, 165 aa, [Eubacterium] eligens; identical to SEQ ID NO: 44648
  misc_feature (1)..(165): tr|A0A174YJ14|A0A174YJ14_9FIRM NADPH-dependent 7-cyano- 7-deazaguanine reductase OS=[Eubacterium] eligens OX=39 485 GN=queF_2 PE=3 SV=1

SEQ ID NO: 45972 - protein, 160 aa, [Eubacterium] eligens
  misc_feature (1)..(160): tr|A0A174ZPJ2|A0A174ZPJ2_9FIRM NADPH-dependent 7-cyano- 7-deazaguanine reductase OS=[Eubacterium] eligens OX=39 485 GN=queF PE=3 SV=1
MREKENLTLLGNQQNNYETDYNPGLLETFVNKHPENDYFVKFNCPEFTSLCPITGQPDFANIIISYVPGERMVESKSLKLYLFSFRNHGDFHEDCVNVIMKDLIKLMEPKYIEVWGKFTPRGGISIDPYCNYGKPGTKWEDVAFNRMANHDMYPEKVDNR

SEQ ID NO: 45973 - protein, 160 aa, Eubacterium eligens
  misc_feature (1)..(160): tr|C4Z7K3|C4Z7K3_EUBE2 NADPH-dependent 7-cyano-7-deazag uanine reductase OS=Eubacterium eligens (strain ATCC 27 750 / VPI C15-48) OX=515620 GN=queF PE=3 SV=1
MREKENLTLLGNQQNNYETDYNPGLLETFVNKHPENDYFVKFNCPEFTSLCPITGQPDFANIIISYVPGERMVESKSLKLYLFSFRNHGDFHEDCVNVIMKDLITLMEPKYIEVWGKFTPRGGISIDPYCNYGKPGTKWEDVAFNRMANHDMYPEKVDNR

SEQ ID NO: 45974 - protein, 160 aa, Eubacterium eligens; identical to SEQ ID NO: 45972
  misc_feature (1)..(160): tr|R6AD47|R6AD47_9FIRM NADPH-dependent 7-cyano-7-deazag uanine reductase OS=Eubacterium eligens CAG:72 OX=12630 77 GN=queF PE=3 SV=1

SEQ ID NO: 45975 - protein, 164 aa, Eubacterium hallii
  misc_feature (1)..(164): tr|R6GX71|R6GX71_9FIRM NADPH-dependent 7-cyano-7-deazag uanine reductase OS=Eubacterium hallii CAG:12 OX=126307 8 GN=queF PE=3 SV=1
MSREKEELQGVTLLGNQKTKYPQDYAPEMLETFINKHQDHDYFVKFNCPEFTSLCPMTGQPDFATIYISYVPDVKMVESKSLKLYLFSFRNHGDFHEDCVNIIMKDLIKLMDPKYIEVWGKFTPRGGISIDPYTNYGKQGTMWEQVATDRLVHHDLYPEKVDNR

SEQ ID NO: 45976 - protein, 159 aa, Eubacterium oxidoreducens
  misc_feature (1)..(159): tr|A0A1G6A5E9|A0A1G6A5E9_EUBOX NADPH-dependent 7-cyano- 7-deazaguanine reductase OS=Eubacterium oxidoreducens O X=1732 GN=queF PE=3 SV=1
MRENEHLTKLGSKTKYSMDYDPDVLECFENKHPGNDYFVKFNCPEFTSLCPITGQPDFGTVYISYVPSEKMVESKSLKLYLFSFRNHGDFHEDCMNIIMKDLIKLMDPKYIEVWGKFLPRGGLSIDPYCNYGKPGTKWEQVAWERLTHHDMNPERVDNR

SEQ ID NO: 45977 - protein, 156 aa, Eubacterium plexicaudatum; identical to SEQ ID NO: 45768
  misc_feature (1)..(156): tr|N2ATY4|N2ATY4_9FIRM NADPH-dependent 7-cyano-7-deazag uanine reductase OS=Eubacterium plexicaudatum ASF492 OX =1235802 GN=queF PE=3 SV=1

SEQ ID NO: 45978 - protein, 160 aa, Eubacterium pyruvativorans
  misc_feature (1)..(160): tr|A0A1I7FDR9|A0A1I7FDR9_9FIRM NADPH-dependent 7-cyano- 7-deazaguanine reductase OS=Eubacterium pyruvativorans OX=155865 GN=queF PE=3 SV=1
MSRTKEELEGVTLLGNQHTRYSYDYEPDLLERFPNKHPYRDYMVTLNCPEFTTLCPKTGQPDFGKLVIRYIPDGYLVESKSLKLYLFSFRNHGDFHEDCCNIILNDLVKLMDPKFAEVRGIFRPRGGISIWPTAVYGRPGTKYEEMAEQRLFAETEDRSF

SEQ ID NO: 45979 - protein, 165 aa, Eubacterium ramulus
  misc_feature (1)..(165): tr|A0A2V1JXH4|A0A2V1JXH4_EUBRA NADPH-dependent 7-cyano- 7-deazaguanine reductase OS=Eubacterium ramulus OX=3949 0 GN=queF PE=3 SV=1
MSGRSKEETAGVSLLGNQNVRYPDNYAPEVLETFVNKHPGNDYFVKFNCPEFTSLCPITGQPDFATITISYVPGERMVESKSLKLYLFSFRNHGDFHEDCVNVIMKDLIKLMNPKYIEVWGKFTPRGGISIDPYCNYGKPGTKWEDVAWNRMANHDLYPEKVDNR

SEQ ID NO: 45980 - protein, 196 aa, Eubacterium ramulus
  misc_feature (1)..(196): tr|U2R981|U2R981_EUBRA NADPH-dependent 7-cyano-7-deazag uanine reductase OS=Eubacterium ramulus ATCC 29099 OX=1 256908 GN=queF PE=3 SV=1
MQICRDVQTDGKTERTVAICKRPIEKRREGTMTGRSKEETAGVSLLGNQNVRYPDDYAPEVLETFVNKHPGNDYFVKFNCPEFTSLCPITGQPDFATITISYVPGERMVESKSLKLYLFSFRNHGDFHEDCVNVIMKDLIKLMDPKYIEVWGKFTPRGGISIDPYCNYGKAGTKWEEVAWNRLTNHDLYPEKVDNR

SEQ ID NO: 45981 - protein, 164 aa, Eubacterium ruminantium
  misc_feature (1)..(164): tr|A0A1H5YL55|A0A1H5YL55_9FIRM NADPH-dependent 7-cyano- 7-deazaguanine reductase OS=Eubacterium ruminantium OX= 42322 GN=queF PE=3 SV=1
MSRNEEEREGISLLGQNGVKYPTDYAPEMLETFVNKHQDNDYFVKFNCPEFTSLCPITGQPDFATIYISYVPDVKMVESKSLKLYLFSFRNHGDFHEDCVNKIMKDLIKLMDPKYIEVWGKFTPRGGISIDPYCNYGRPGTKWENVAWERLTQHDMYPEKVDNR

SEQ ID NO: 45982 - protein, 164 aa, Eubacterium ruminantium
  misc_feature (1)..(164): tr|A0A1T4K7Z1|A0A1T4K7Z1_9FIRM NADPH-dependent 7-cyano- 7-deazaguanine reductase OS=Eubacterium ruminantium OX= 42322 GN=queF PE=3 SV=1
MSRNEKETEGISLLGNQGVKYPSGYAPQVLETFVNKHQENDYFVKFNCPEFTSLCPITGQPDFATIYISYVPDVKMVESKSLKLYLFSFRNHGDFHEDCINTIMKDLIKLMDPKYIEVWGKFTPRGGISIDPYCNYGRPGTKWENVAWDRLAQHDMYPEKVDNR

SEQ ID NO: 45983 - protein, 165 aa, Eubacterium sp.
  misc_feature (1)..(165): tr|A0A1Y4VHW5|A0A1Y4VHW5_9FIRM NADPH-dependent 7-cyano- 7-deazaguanine reductase OS=Eubacterium sp. An11 OX=196 5542 GN=queF PE=3 SV=1
MSTRTKEELSGVSLLGNQGTKYPTDYAPEMLETFINKHQDHDYFVKFNCPEFTSLCPMTGQPDFATIYISYVPDVRMVESKSLKLYLFSFRNHGDFHEDCVNIIMKDLIRVMDPKYIEVWGKFTPRGGISIDPYTNYGRPGTRWEEVAAYRLERHDLYPEKVDNR

SEQ ID NO: 45984 - protein, 160 aa, Eubacterium sp.; identical to SEQ ID NO: 45973
  misc_feature (1)..(160): tr|A0A349ARG9|A0A349ARG9_9FIRM NADPH-dependent 7-cyano- 7-deazaguanine reductase OS=Eubacterium sp. OX=142586 G N=queF PE=3 SV=1

SEQ ID NO: 45985 - protein, 165 aa, Eubacterium ventriosum
  misc_feature (1)..(165): tr|A0A413T2I4|A0A413T2I4_9FIRM NADPH-dependent 7-cyano- 7-deazaguanine reductase OS=Eubacterium ventriosum OX=3 9496 GN=queF PE=3 SV=1
MTGRSKEETVDITLLGNQKTQYPCDYAPEMLETFENKHQGNDYFVKFNCPEFTSLCPITGQPDFATVTISYVPNIKMVESKSLKLYLFSFRNHGDFHEDCMNIIMKDLIKLMDPKYIEVWGKFTPRGGISIDPYCNYGKPGTKWEEIAFNRMANHDMYPEKVDNR

SEQ ID NO: 45986 - protein, 165 aa, Eubacterium ventriosum; identical to SEQ ID NO: 44648
  misc_feature (1)..(165): tr|A0A413R5N7|A0A413R5N7_9FIRM NADPH-dependent 7-cyano- 7-deazaguanine reductase OS=Eubacterium ventriosum OX=3 9496 GN=queF PE=3 SV=1

SEQ ID NO: 45987 - protein, 134 aa, Euhalothece natronophila
  misc_feature (1)..(134): tr|A0A5B8NK57|A0A5B8NK57_9CHRO NADPH-dependent 7-cyano- 7-deazaguanine reductase OS=Euhalothece natronophila Z- M001 OX=522448 GN=queF PE=3 SV=1
MVEEATNQSEMKYGEREIAEGELITFPNPRPGRRYNVDINLPEFTCKCPFSGYPDFATIKIRYMPDQSVVELKAIKLYINSYRDRYISHEEAVNQILDDFVAACNPLEVTVTGDFSPRGNVHTVVEVHHKQPRV

SEQ ID NO: 45988 - protein, 134 aa, Euhalothece sp.; identical to SEQ ID NO: 45568
  misc_feature (1)..(134): tr|A0A2K3AKS7|A0A2K3AKS7_9CHRO NADPH-dependent 7-cyano- 7-deazaguanine reductase OS=Euhalothece sp. KZN 001 OX= 1884791 GN=queF PE=3 SV=1

SEQ ID NO: 45989 - protein, 281 aa, Ewingella americana
  misc_feature (1)..(281): tr|A0A085G5Y4|A0A085G5Y4_9GAMM NADPH-dependent 7-cyano- 7-deazaguanine reductase OS=Ewingella americana ATCC 33 852 OX=910964 GN=queF PE=3 SV=1
MSLYQDNPALSQLTLGKSTPYRDQYDASLLQAVPRSMNREPLGLFPDTLPFHGADIWTLYELSWLNDKGLPQVAVGEISLNANSINLIESKSFKLYLNSFNQTKFASWDKVLETLTHDLSACAEGDVSVTLTRLEEVEGSPVGRFTGECIDNQDITIDNYEFSTDYLANAAGDEIVEESLVSHLLKSNCLITHQPDWGSVQIQYRGPKINREALLRYLVSFRNHNEFHEQCVERIFNDIMHFCAPETLAVYARYTRRGGLDINPWRSNFPFTPATARLVRQ

SEQ ID NO: 45990 - protein, 281 aa, Ewingella americana
  misc_feature (1)..(281): tr|A0A502GG15|A0A502GG15_9GAMM NADPH-dependent 7-cyano- 7-deazaguanine reductase OS=Ewingella americana OX=4120 2 GN=queF PE=3 SV=1
MSSYQDNPALSQLTLGKATPYRDHYDASLLQAVPRSMNREPLGLYPDALPFHGADIWTLYELSWLNAKGLPQVAVGEISLNADSINLIESKSFKLYLNSFNQTKFDSWDSVLATLTRDLSKCAEGDVTVSLSHLGDVEGSTIGHFDGQCIDDQDIEINNYEFSTDYLAGAAGDDIVEESLVSHLLKSNCLITHQPDWGSVQIQYRGPKIDREALLRYLISFRNHNEFHEQCVERIFNDLLQFCAPEALAVYARYTRRGGLDINPWRSNFPFTPATTRLVRQ

SEQ ID NO: 45991 - protein, 162 aa, Exiguobacterium antarcticum
  misc_feature (1)..(162): tr|K0ADX3|K0ADX3_EXIAB NADPH-dependent 7-cyano-7-deazag uanine reductase OS=Exiguobacterium antarcticum (strain B7) OX=1087448 GN=queF PE=3 SV=1
MRPEDLNDLSLLGQKSVPYIFEYQPEVLEAFPNRHPENDYFVKFNAPEFTSLCPITNQPDFATIYISYIPDEKLVESKSLKLYLFSFRNHGDFHENCINVIGKDLVKLMEPRYLEVWGKFTPRGGISIDPYYNYGKPDTKYEQMAEHRLFNHDLYPETIDNR

SEQ ID NO: 45992 - protein, 162 aa, Exiguobacterium aurantiacum
  misc_feature (1)..(162): tr|A0A377FXC4|A0A377FXC4_9BACL NADPH-dependent 7-cyano- 7-deazaguanine reductase OS=Exiguobacterium aurantiacum OX=33987 GN=queF PE=3 SV=1
MRPEDLQDLSLLGQKSVPYIFEYAPDVLEAFPNRHPENDYFVKFNAPEFTSLCPITNQPDFATIYISYIPDEKLVESKSLKLYLFSFRNHGDFHENCINVIGKDLVKLMEPRYLEVWGKFTPRGGISIDPYYNYGKPGTKYEKMAEHRLFNHDLYPETVDNR

SEQ ID NO: 45993 - protein, 162 aa, Exiguobacterium chiriqhucha
  misc_feature (1)..(162): tr|U1LU15|U1LU15_9BACL NADPH-dependent 7-cyano-7-deazag uanine reductase OS=Exiguobacterium chiriqhucha RW-2 OX =1345023 GN=queF PE=3 SV=1
MRPEDLQDLSLLGQKSVPYIFEYAPDVLEAFPNRHPENDYFVKFNAPEFTSLCPITNQPDFATIYISYIPDEKLVESKSLKLYLFSFRNHGDFHENCINVIGKDLVKLMEPRYLEVWGKFTPRGGISIDPYYNYGKPGTKYERMAEHRLFNHDLYPETVDNR

SEQ ID NO: 45994 - protein, 162 aa, Exiguobacterium enclense
  misc_feature (1)..(162): tr|A0A0V8GE11|A0A0V8GE11_9BACL NADPH-dependent 7-cyano- 7-deazaguanine reductase OS=Exiguobacterium enclense OX =1017277 GN=queF PE=3 SV=1
MRPEDLNDLSLLGQKAVPYIFEYQPEVLEAFPNRHPENDYFVKFNAPEFTSLCPITNQPDFATIYISYIPDEKLVESKSLKLYLFSFRNHGDFHENCINVIGKDLVKLMEPRYLEVWGKFTPRGGISIDPYYNYGKPGTKYEQMAEHRLFNHDLYPETIDNR

SEQ ID NO: 45995 - protein, 162 aa, Exiguobacterium mexicanum; identical to SEQ ID NO: 45993
  misc_feature (1)..(162): tr|A0A099DFI3|A0A099DFI3_9BACL NADPH-dependent 7-cyano- 7-deazaguanine reductase OS=Exiguobacterium mexicanum O X=340146 GN=queF PE=3 SV=1

SEQ ID NO: 45996 - protein, 162 aa, Exiguobacterium sibiricum
  misc_feature (1)..(162): sp|B1YFM9|QUEF_EXIS2 NADPH-dependent 7-cyano-7-deazagua nine reductase OS=Exiguobacterium sibiricum (strain DSM 17290 / JCM 13490 / 255-15) OX=262543 GN=queF PE=3 SV= 1
MRPEDLNDLSLLGQKSVPYIFEYQPEVLEAFPNRHPENDYFVKFNAPEFTSLCPITNQPDFATIYISYIPDEKLVESKSLKLYLFSFRNHGDFHENCINVIGKDLVKLMEPRYLEVWGKFTPRGGISIDPYYNYGKPGTKYEQMAEHRLFNHDLYPETIDNR

SEQ ID NO: 45997 - protein, 162 aa, Exiguobacterium sp.
  misc_feature (1)..(162): tr|A0A031IBP6|A0A031IBP6_9BACL NADPH-dependent 7-cyano- 7-deazaguanine reductase OS=Exiguobacterium sp. RIT341 OX=1470592 GN=queF PE=3 SV=1
MRPEDLNDLSLLGQKAVPYIFEYQPEVLEAFPNRHPENDYFVKFNAPEFTSLCPITNQPDFATIYISYIPDEKLVESKSLKLYLFSFRNHGDFHENCINVIGKDLVKLMEPRYLEVWGKFTPRGGISIDPYYNYGKPGTKYERMAEHRLFNHDLYPETVDNR

SEQ ID NO: 45998 - protein, 162 aa, Exiguobacterium sp.
  misc_feature (1)..(162): sp|C4L0V1|QUEF_EXISA NADPH-dependent 7-cyano-7-deazagua nine reductase OS=Exiguobacterium sp. (strain ATCC BAA- 1283 / AT1b) OX=360911 GN=queF PE=3 SV=1
MRPEDLQDLSLLGQKSVPYIFEYTPDVLEAFPNRHPENDYFVKFNAPEFTSLCPITNQPDFATIYISYIPDEKLVESKSLKLYLFSFRNHGDFHENCINVIGKDLVKLMEPRYLEVWGKFTPRGGISIDPYYNYGKPGTKYEKMAEHRLFNHDLYPETVDNR

SEQ ID NO: 45999 - protein, 290 aa, Extensimonas vulgaris
  misc_feature (1)..(290): tr|A0A369AS36|A0A369AS36_9BURK NADPH-dependent 7-cyano- 7-deazaguanine reductase OS=Extensimonas vulgaris OX=10 31594 GN=queF PE=3 SV=1
MSINAPSPDPSPQHSPLGKAVAYADQYDPALLFPIARAAQRAELGITAAPPFFGADLWTAYELSWLNLRGKPQVALAHLTVPCETPHIVESKSLKLYLGSFSQTRFADAAEVQSRIRADLAAALWRGAAAPGSIGVKLLLPEQFDQQAIHELDGLNLDRLDVECTHYQPAPELLTVQQDAPPVHGEVLTSRLLKSNCPVTGQPDWGSVQVRYSGAPIHQEGLLRYLVSFRQHSGFHEHCVERIFMDLWTRCRPTQLTVYARYTRRGGLDINPWRTSHPQQPPANVRTARQ

SEQ ID NO: 46000 - protein, 165 aa, Falsibacillus pallidus
  misc_feature (1)..(165): tr|A0A370GG39|A0A370GG39_9BACI NADPH-dependent 7-cyano- 7-deazaguanine reductase OS=Falsibacillus pallidus OX=4 93781 GN=queF PE=3 SV=1
MSGRKDEELQDVTLLGNQGTNYLFEYSPDILETFDNKHQNRDYFVKFNCPEFTSLCPKTGQPDFATIYISYIPEVKMVESKSLKLYLFSFRNHGDFHEDCMNIIMNDLIELMDPRYIEVWGKFTPRGGISIDPYTNYGRPGTKYEKMAEYRMMNHDLYPETIDNR

SEQ ID NO: 46001 - protein, 165 aa, Falsibacillus sp.
  misc_feature (1)..(165): tr|A0A3L7JQK4|A0A3L7JQK4_9BACI NADPH-dependent 7-cyano- 7-deazaguanine reductase OS=Falsibacillus sp. GY 10110 OX=2478915 GN=queF PE=3 SV=1
MTGRKDEELQDISLLGNQGTNYLFEYSPDILEAFDNKHPNRDYFVKFNCPEFTSLCPKTGQPDFATIYISYIPDQKMVESKSLKLYLFSFRNHGDFHEDCMNIIMNDLIELMDPRYIEVWGKFTPRGGISIDPYTNYGRPGTKYEEMAQYRMMNHDLYPETIDNR

SEQ ID NO: 46002 - protein, 155 aa, Falsochrobactrum ovis
  misc_feature (1)..(155): tr|A0A364JXZ3|A0A364JXZ3_9RHIZ NADPH-dependent 7-cyano- 7-deazaguanine reductase OS=Falsochrobactrum ovis OX=12 93442 GN=queF PE=3 SV=1
MSDKSKYSDLIQLGSNTPIPLSPDQAKLERVANSQLDTLYCVRFTAPEFTTLCPMTGQPDFAHLVIDYVPAEWLIESKSLKLFLFSFRNHGSFHEDCTVSIGKTLVNFLQPHWLRIGGYWYPRGGIPIDIFYQTDVAPQGVWIPDQAVPNYRGRG

SEQ ID NO: 46003 - protein, 155 aa, Falsochrobactrum sp.
  misc_feature (1)..(155): tr|A0A316JF72|A0A316JF72_9RHIZ NADPH-dependent 7-cyano- 7-deazaguanine reductase OS=Falsochrobactrum sp. HN4 OX =2201899 GN=queF PE=3 SV=1
MTEKTIYSDLKQLGSNTTVPQSPEEAILERVSNPQSGTPYCIRFTAPEFTSLCPMTGQPDFAHLVIDYIPSDWLVESKSLKLFLFSFRNHGAFHEDCTVSIGKRLVELLDPQWLRIGGYWYPRGGIPIDVFYQTGAAPQDVWIPEQAVPNYRGRG

SEQ ID NO: 46004 - protein, 152 aa, Fermentimonas caenicola
  misc_feature (1)..(152): tr|A0A098C1V1|A0A098C1V1_9PORP NADPH-dependent 7-cyano- 7-deazaguanine reductase OS=Fermentimonas caenicola OX= 1562970 GN=queF PE=3 SV=1
MEIKGLSHLGGKTEYKQDYAPEMLEAFENKHQGNDYWVTFDCPEFTSLCPITGQPDFATIRIDYIPDVKMVESKSLKLYLFSFRNHGAFHEDCINIIMKDLINLMNPKYIEVTGIFTPRGGISIYPYANWGREGTKYEKMAEERLLNHSIPL

SEQ ID NO: 46005 - protein, 174 aa, Ferrimicrobium acidiphilum
  misc_feature (1)..(174): tr|A0A0D8FRC6|A0A0D8FRC6_9ACTN NADPH-dependent 7-cyano- 7-deazaguanine reductase OS=Ferrimicrobium acidiphilum DSM 19497 OX=1121877 GN=queF PE=3 SV=1
MPTTRVSPTLNIRTTANKGCRTTVTDGLTQLGSSTSYRYEDPNPAMLEAFPNPSPGTDFVIRLLANEFTSLCPITGQPDYGSLVIDYIPDELCVESKSLKLYLVSYRNHGSFHESCVNTIADDLFALLSPKFLRVFGDFNPRGGIAIKPMVERIGPTTKRSDALELIASYLQVA

SEQ ID NO: 46006 - protein, 285 aa, Ferrimonas balearica
  misc_feature (1)..(285): tr|E1STK8|E1STK8_FERBD NADPH-dependent 7-cyano-7-deazag uanine reductase OS=Ferrimonas balearica (strain DSM 97 99 / CCM 4581 / PAT) OX=550540 GN=queF PE=3 SV=1
MSHHDPYAGADALKGLTLGQKTEYQDQYDPSLLQPVPRSLNRDAIGLTDALPFSGADIWTGYELSWLNAKGKPMVAIAQFVLPATSANLVESKSFKLYLNSFNQTRIDSVEQLQQTLAADLSACAEGDVQVSLVLPSEFRHQPLAELEGELIDDLDIEIADYSFEPEHLAGAADADGEVVEETLRSDLLKSNCLITSQPDWGSVQIRYRGPKINHEALLRYLISFRRHNEFHEQCVERIFMDLKRFCFCQQLTVYARYTRRGGLDINPFRSDFEALPDNVRLARQ

SEQ ID NO: 46007 - protein, 283 aa, Ferrimonas marina
  misc_feature (1)..(283): tr|A0A1M5YG45|A0A1M5YG45_9GAMM NADPH-dependent 7-cyano- 7-deazaguanine reductase OS=Ferrimonas marina OX=299255 GN=queF PE=3 SV=1
MSHHDPYQGADALSGLTLGQATQYVDQYDPSLLQAVPRSLNRDAIELTEALPFDGADLWTGYELSWLNAKGKPQVAIAQFALPASSRNLVESKSFKLYLNSFNQTRVESVEALTQMLQRDLSACADGHVEVVLVLPKTFRQQPVVELEGECIDELDIEVDNFDFNPGLLEGAATGPVVEETLRSDLLKSNCLITSQPDWGSVQIRYRGAQIDREALLRYLISFRQHNEFHEQCVERIFMDLKRYCQCEALTVYARYTRRGGLDINPFRSDFEPVPDNDRLARQ

SEQ ID NO: 46008 - protein, 284 aa, Ferrimonas sediminum
  misc_feature (1)..(284): tr|A0A1G8LNZ9|A0A1G8LNZ9_9GAMM NADPH-dependent 7-cyano- 7-deazaguanine reductase OS=Ferrimonas sediminum OX=718 193 GN=queF PE=3 SV=1
MTDHHDPYQGADALSGLTLGQQTQYQDQYAPELLQGVPRQLNRDAIGLGDALPFTGADIWTGFELSWLNAKGKPMVAIAHFALPVSSANLVESKSFKLYLNSFNQTRFDSVDAVRDALARDLSQCAQGEVSVNIVLPDAFAAEPLVELEGELIDDLDISIDDYQFNPDYLSGAAGDDVVEETLRSNLLKSNCLITSQPDWGSVQIRYKGGRIDREKLLRYLISFRRHNEFHEQCVERIFMDLKRYCGCQQLTVYARYTRRGGLDINPFRSDFEALPANHRLARQ

SEQ ID NO: 46009 - protein, 284 aa, Ferrimonas sp.
  misc_feature (1)..(284): tr|A0A4U1BFL8|A0A4U1BFL8_9GAMM NADPH-dependent 7-cyano- 7-deazaguanine reductase OS=Ferrimonas sp. IMCC35001 OX =2569538 GN=queF PE=3 SV=1
MTDHHDPYQGAEALEGLTLGHQTQYQDHYAPELLQGVPRQLNRDAIGLGDELPFDGADVWTGFELSWLNARGKPMVAIAHFALPVTSGNLVESKSFKLYLNSFNQTKFNSVEAVQQALAKDLSQCAQGEVSVRILLPAEFEQERVAEFDGELIDDLDIAIDDYRFNPDYLEGAASGEVVEETLRSNLLKSNCLITSQPDWGSVQIRYRGKAIDREKLLRYLISFRRHNEFHEQCVERIFMDLKRYCGCERLTVYARYTRRGGLDINPFRSDFEPLPANVRLARQ

SEQ ID NO: 46010 - protein, 284 aa, Ferrimonas sp.
  misc_feature (1)..(284): tr|A0A4U1BFX6|A0A4U1BFX6_9GAMM NADPH-dependent 7-cyano- 7-deazaguanine reductase OS=Ferrimonas sp. IMCC35002 OX =2569539 GN=queF PE=3 SV=1
MTDHHDPYHGADALKGLTLGQQTQYQDQYAPELLQGVPRQLNRDAIKLPEPLPFSGADIWTGFELSWLNGKGKPMVAVAEFRLPATSANLVESKSFKLYLNSFNQTRFDTPEAIRETLAKDLSHCAQGEVEVSLILPNAFADERITEFDGELIDDLDISIDDYEFNPDYLDGAADGELVEETLRSNLLKSNCLITSQPDWGSVLIRYKGKRINREKLLRYLISFRRHNEFHEQCVERIFMDLKRYCGVEQLTVYARYTRRGGLDINPFRSDFESLPANVRLARQ

SEQ ID NO: 46011 - protein, 139 aa, Ferriphaselus amnicola
  misc_feature (1)..(139): tr|A0A2Z6GEM0|A0A2Z6GEM0_9PROT NADPH-dependent 7-cyano- 7-deazaguanine reductase OS=Ferriphaselus amnicola OX=1 188319 GN=queF PE=3 SV=1
MSTQPSKSLETFPNPHPNRDYHIHMEIPEFTCLCPKTGQPDFATLILDYIADQQCVELKSLKMYMWSFRNEGCFHEDVTNRILNDLVAATDPKFMRLTAKFYVRGGIFTNVVAEHRKQGWQPAPYVELSQFSTQSNTRG

SEQ ID NO: 46012 - protein, 160 aa, Ferrithrix thermotolerans
  misc_feature (1)..(160): tr|A0A1M4SEW6|A0A1M4SEW6_9ACTN NADPH-dependent 7-cyano- 7-deazaguanine reductase OS=Ferrithrix thermotolerans D SM 19514 OX=1121881 GN=queF PE=3 SV=1
MVRDSLTHLGSGESSYRYDSPSRDIMDVFSSPRPGRDFVIALECMEFTSLCPITGQPDYGEIDVVYVPDQLCIESKSLKLYLGAYRNHGAFHEDCVNSILDDIVAVCAPVFIRVIGDFNARGGIAIKPVAVNWGEDIDENRRGDVMEIVRSYDRFSRSKR

SEQ ID NO: 46013 - protein, 166 aa, Ferrovibrio sp.
  misc_feature (1)..(166): tr|A0A2M8TZP3|A0A2M8TZP3_9PROT NADPH-dependent 7-cyano- 7-deazaguanine reductase OS=Ferrovibrio sp. OX=1917215 GN=queF PE=3 SV=1
MKRTAKTPGKTASSASVTKGLTQLGHSAAQPQSPDEAKLETVPNPQPGTTYLIRFTQPEFTSLCPMTGQPDFAHLVIDYVPNRQIVESKSLKLFLNSFRNHGAFHEDCTIGIARRLVAAMKPRWLRIGGYWYPRGGMPIDVFWQTGKPPADLWLPDQGVASYRGRG

SEQ ID NO: 46014 - protein, 166 aa, Ferrovibrio sp.
  misc_feature (1)..(166): tr|A0A516H542|A0A516H542_9PROT NADPH-dependent 7-cyano- 7-deazaguanine reductase OS=Ferrovibrio sp. K5 OX=25940 03 GN=queF PE=3 SV=1
MKRTAKTTRKTASSASITQGLTQLGQNATQPQSPDEASLETVPNPQPGTTYLIRFTQPEFTSLCPMTGQPDFAHLVIDYVPNRQIVESKSLKLFLNSFRNHGAFHEDCTISIAKRLIAAMKPRWLRIGGYWYPRGGMPIDVFWQTGKPPADLWLPDQGVANYRGRG

SEQ ID NO: 46015 - protein, 142 aa, Ferrovum sp.
  misc_feature (1)..(142): tr|A0A0R0LLM8|A0A0R0LLM8_9PROT NADPH-dependent 7-cyano- 7-deazaguanine reductase OS=Ferrovum sp. JA12 OX=135629 9 GN=queF PE=3 SV=1
MANEPSKQLDTFVNPSPERDYLIHMEIPEFTCLCPKTGQPDFAWFTLDYVPDQKNVELKSLKLYMWSYRNEGAFHEAVTNKILSDLVNTCQPRFMRLLARWYVRGGIYTHVVVEHTKEGWIPKVTIPPLAFSQETPLTHTFG

SEQ ID NO: 46016 - protein, 142 aa, Ferrovum sp.
  misc_feature (1)..(142): tr|A0A149VZE2|A0A149VZE2_9PROT NADPH-dependent 7-cyano- 7-deazaguanine reductase OS=Ferrovum sp. Z-31 OX=178900 4 GN=queF PE=3 SV=1
MPAQPSRTLETFPNPSPERDYLIHMELPEFTCLCPKTGQPDFAWLSLDYVPDQTNVELKSLKLYLWSFRNEGAFHEAVTQRILDDLVAATQPRFLRLLSRWNVRGGIFTHVLSEHRQEGWQPRCSLPPVHFAGATPWAPPLA

SEQ ID NO: 46017 - protein, 132 aa, Fervidicola ferrireducens
  misc_feature (1)..(132): tr|A0A140L858|A0A140L858_9THEO NADPH-dependent 7-cyano- 7-deazaguanine reductase OS=Fervidicola ferrireducens O X=520764 GN=queF PE=3 SV=1
MDKYGKRRFDIYGYEKIDTEVLEAIEYEYPGRDTVIEYITEEFSSVCPWTGLPDNARLTIRYIPGEKLVELKSLKYYLTSYRNIGILQEHAVNRILDDLVKLLEPKYMEVIGEFLARGGISTRVVAKYGTMQ

SEQ ID NO: 46018 - protein, 158 aa, Fibrobacter sp.
  misc_feature (1)..(158): tr|A0A1X7K894|A0A1X7K894_9BACT NADPH-dependent 7-cyano- 7-deazaguanine reductase OS=Fibrobacter sp. UWB13 OX=18 96204 GN=queF PE=3 SV=1
MRSEAELEGVTLLGNNKTQYKTTYSPEVLEKFPNKHPGNDYMVTFNCPEFTSLCPKTGQPDFAEIKINYIPDQYLVESKSLKLYMFSFRNHGDFHEDCVNIIMKDLVKLLDPKYIEVEGIFMPRGGISLYPFANYGKPGTEFEAIAKTRLFAAIDRRK

SEQ ID NO: 46019 - protein, 158 aa, Fibrobacter sp.
  misc_feature (1)..(158): tr|A0A254STC6|A0A254STC6_9BACT NADPH-dependent 7-cyano- 7-deazaguanine reductase OS=Fibrobacter sp. UWB1 OX=196 4355 GN=queF PE=3 SV=1
MRSEAELEGVTLLGNNKTQYKTTYSPEVLEKFPNKHPGNDYMVTFNCPEFTSLCPKTGQPDFAEIKINYIPDQYLVESKSLKLYMFSFRNHGDFHEDCVNIIMKDLVKLLDPKYIEVEGLFMPRGGISLYPFANYGKPGTEFETLAKTRLFAAIDRRR

SEQ ID NO: 46020 - protein, 158 aa, Fibrobacter succinogenes; identical to SEQ ID NO: 46018
  misc_feature (1)..(158): tr|A0A380S882|A0A380S882_FIBSU NADPH-dependent 7-cyano- 7-deazaguanine reductase OS=Fibrobacter succinogenes OX =833 GN=queF PE=3 SV=1

SEQ ID NO: 46021 - protein, 136 aa, Fibrobacteres bacterium
  misc_feature (1)..(136): tr|A0A3C0PJG6|A0A3C0PJG6_9BACT NADPH-dependent 7-cyano- 7-deazaguanine reductase OS=Fibrobacteres bacterium OX= 2052160 GN=queF PE=3 SV=1
MLPAIETFPCPNQDKWQDTGVIRIIFPEFTCLCPKTGYPDFASIDLYYLPDKLCLELKSWKLYLNAFRMIGTFHETVTSFLFNEIKTRLSPKWALLAGDFFPRGNVNTTVVFETDSPRPKNADVLIKNYRPHCRTY

SEQ ID NO: 46022 - protein, 139 aa, Fictibacillus aquaticus
  misc_feature (1)..(139): tr|A0A235FA78|A0A235FA78_9BACI NADPH-dependent 7-cyano- 7-deazaguanine reductase OS=Fictibacillus aquaticus OX= 2021314 GN=queF PE=3 SV=1
MAKVEVNHSKYEGIRFDIQDENVILVDILETIPYEYIGKDTLVTIPTTEFTSVCPWSGLPDFADIIISYIPTEELVEMKSLKYYLTSYRNVGIYQEHATNKIMEDLARLLKPKYLKVTGNWNARGGLGTEVVCEYKAGE

SEQ ID NO: 46023 - protein, 141 aa, Fictibacillus arsenicus
  misc_feature (1)..(141): tr|A0A1B1Z7B8|A0A1B1Z7B8_9BACI NADPH-dependent 7-cyano- 7-deazaguanine reductase OS=Fictibacillus arsenicus OX= 255247 GN=queF PE=3 SV=1
MAKVEVNHSKYEGIRFDIQDENVILVDILETIPFEYAGKETMVTIPTTEFTSVCPWSGLPDFADIIISYIPNKDLVEMKSLKYYLTSYRNVGIYQEHATNRIKEDLVELLKPKYLKVTGNWNARGGLGTEVVVEYKEDSSN

SEQ ID NO: 46024 - protein, 141 aa, Fictibacillus arsenicus
  misc_feature (1)..(141): tr|A0A1V3GAP7|A0A1V3GAP7_9BACI NADPH-dependent 7-cyano- 7-deazaguanine reductase OS=Fictibacillus arsenicus OX= 255247 GN=queF PE=3 SV=1
MAKVEVNHSKYEGIRFDIQDENVILVDILETIPFEYEGKETMVTIPTTEFTSVCPWSGLPDFADIIISYIPNKDLVEMKSLKYYLTSYRNVGIYQEHATNRIKEDLVELLKPKYLKVTGNWNARGGLGTEVVVEYKEDSSN

SEQ ID NO: 46025 - protein, 138 aa, Fictibacillus enclensis
  misc_feature (1)..(138): tr|A0A0V8J8W0|A0A0V8J8W0_9BACI NADPH-dependent 7-cyano- 7-deazaguanine reductase OS=Fictibacillus enclensis OX= 1017270 GN=queF PE=3 SV=1
MAKVEVNHQKYEGIRFDIEDESVILVDILETIPYEYVGKDTMVTIPTTEFTSVCPWSGLPDFADIIISYIPNEDLVEMKSLKYYLTSYRNVGIYQEHATNKIKEDLVNLLKPKYLKIVATWNARGGLGTEVVVEYKQD

SEQ ID NO: 46026 - protein, 138 aa, Fictibacillus macauensis
  misc_feature (1)..(138): tr|I8AJ39|I8AJ39_9BACI NADPH-dependent 7-cyano-7-deazag uanine reductase OS=Fictibacillus macauensis ZFHKF-1 OX =1196324 GN=queF PE=3 SV=1
MAKVEVNHQKYEGIRFDIEDESVILVDILETIPYEYVGKDTLVTIPTTEFTSVCPWSGLPDFADIIISYIPSEELVEMKSLKYYLTSYRNVGIYQEHATNRMLDDLVQLLKPKHMKITATWNARGGLGTEVVAEYNRD

SEQ ID NO: 46027 - protein, 141 aa, Fictibacillus phosphorivorans
  misc_feature (1)..(141): tr|A0A163Q646|A0A163Q646_9BACI NADPH-dependent 7-cyano- 7-deazaguanine reductase OS=Fictibacillus phosphorivora ns OX=1221500 GN=queF PE=3 SV=1
MAKVEVNHSKYEGIRFDIQDENVILVDILETIPYEYVGKDTLVTIPTTEFTSVCPWSGLPDFADIIISYIPNEDLVEMKSLKYYLTSYRNVGIYQEHATNRIMEDLAKLLKPKYLKVTGNWNARGGLGTEVVVEYKEDSSK

SEQ ID NO: 46028 - protein, 141 aa, Fictibacillus phosphorivorans
  misc_feature (1)..(141): tr|A0A160IP64|A0A160IP64_9BACI NADPH-dependent 7-cyano- 7-deazaguanine reductase OS=Fictibacillus phosphorivora ns OX=1221500 GN=queF PE=3 SV=1
MAKVEVNHSKYEGIRFDIQDENVILVDILETIPYEYVGKDTMVTIPTTEFTSVCPWSGLPDFADIIISYIPNEDLVEMKSLKYYLTSYRNVGIYQEHATNRILEDLVKLLKPKYIKVVGNWNARGGLGTEVVVEYKEENSK

SEQ ID NO: 46029 - protein, 138 aa, Fictibacillus solisalsi
  misc_feature (1)..(138): tr|A0A1G9X240|A0A1G9X240_9BACI NADPH-dependent 7-cyano- 7-deazaguanine reductase OS=Fictibacillus solisalsi OX= 459525 GN=queF PE=3 SV=1
MAKVEVNHQKYEGIRFDIEDESVILVDILETIPYEYVGKDTLVTIPTTEFTSVCPWSGLPDFADIIISYIPNEDLVEMKSLKYYLTSYRNVGIYQEHATNKIKEDLVDLLKPKYLKIVATWNARGGLGTEVVVEYKQD

SEQ ID NO: 46030 - protein, 138 aa, Fictibacillus sp.; identical to SEQ ID NO: 46025
  misc_feature (1)..(138): tr|A0A4Q2HYR3|A0A4Q2HYR3_9BACI NADPH-dependent 7-cyano- 7-deazaguanine reductase OS=Fictibacillus sp. S7 OX=221 2476 GN=queF PE=3 SV=1

SEQ ID NO: 46031 - protein, 141 aa, Fictibacillus sp.
  misc_feature (1)..(141): tr|A0A4Q7QUA3|A0A4Q7QUA3_9BACI NADPH-dependent 7-cyano- 7-deazaguanine reductase OS=Fictibacillus sp. BK138 OX= 2512121 GN=queF PE=3 SV=1
MAKVEVNHSKYEGIRFDIQDENVILVDILETIPFEYEGKETMVTIPTTEFTSVCPWSGLPDFADIIISYIPNKDLVEMKSLKYYLTSYRNVGIYQEHATNRIKEDLVELLKPKYLKVTGNWNARGGLGTEVVVEYKEDSIN

SEQ ID NO: 46032 - protein, 142 aa, Unknown
  misc_feature (1)..(142): tr|A0A2T1CDR3|A0A2T1CDR3_9CYAN NADPH-dependent 7-cyano- 7-deazaguanine reductase OS=filamentous cyanobacterium CCP2 OX=2107700 GN=queF PE=3 SV=1
MQAERSTSPQTETTEMKYGERHISEGKLITFPNPRLGRRYTIDITLPEFTCKCPFSGYPDFATIHIQYVPNEKVVELKAIKLYINSYRDRYISHEESVNQILDDFVAACDPLEATIKGDFSPRGNVHTVVEVHHQKSASPEK

SEQ ID NO: 46033 - protein, 143 aa, Unknown
  misc_feature (1)..(143): tr|A0A2P8VWG7|A0A2P8VWG7_9CYAN NADPH-dependent 7-cyano- 7-deazaguanine reductase OS=filamentous cyanobacterium CCT1 OX=2107702 GN=queF PE=3 SV=1
MTTASAPSTQYGDRAILQAAVEPLEKWPNPSENVYTIHLEHPEFTALCPRSGYPDFGTIVVDYCPGPWVVELKAFKLYINSFRDQRVSHEMVANAIADRLWEELEPRGLRVIGDYTRRGGVKTVITVKKGDCSTFEPYTANVL

SEQ ID NO: 46034 - protein, 165 aa, Filibacter sp.
  misc_feature (1)..(165): tr|A0A3P5XDB8|A0A3P5XDB8_9BACL NADPH-dependent 7-cyano- 7-deazaguanine reductase OS=Filibacter sp. TB-66 OX=248 3811 GN=queF PE=3 SV=1
MTGRDEATLTDLTLLGNQNTKYLFEYSPDVLEAIDNLHMNRDYFVKFNCPEFTSLCPQTGQPDFATMYISFIPDKKLVESKALKLYLFSFRNHGDFHEDCVNIIMNDLIELLDPRYIEVWGKFTPRGGLSIDPYCNYGQPGTKFEQMADHRLMNHDLYPEKIDNR

SEQ ID NO: 46035 - protein, 135 aa, Filobacillus milosensis
  misc_feature (1)..(135): tr|A0A4Y8IRQ9|A0A4Y8IRQ9_9BACI NADPH-dependent 7-cyano- 7-deazaguanine reductase OS=Filobacillus milosensis OX= 94137 GN=queF PE=3 SV=1
MSENYYLPRSGPMPRPNSVEEGREILKNEAFDAPNVQSITFNALEFTAVCPKTGQPDFGRVEITYTPKNKCIESKSLKFYLWSFRDQGAFCESLAAQIADDIVFAIEPLNVEVTVYQSARGGIELTTKAVRDNDE

SEQ ID NO: 46036 - protein, 153 aa, Filomicrobium sp.
  misc_feature (1)..(153): tr|A0A2D7FEZ3|A0A2D7FEZ3_9RHIZ NADPH-dependent 7-cyano- 7-deazaguanine reductase OS=Filomicrobium sp. OX=202483 1 GN=queF PE=3 SV=1
  misc_feature (107)..(108): Xaa can be any naturally occurring amino acid
  misc_feature (147)..(147): Xaa can be any naturally occurring amino acid
MADNTSYLAHLGTPSEIPGSPEEASLDRVPNPHPDAHYVARFTVPEFTSICPVTSQPDFAHLVIDYVPNQWLVESKSLKLYLTSFRNHGAFHEDCTVAIGMLLKSLXXPHFIRIGGYWYPRGGIPIDVFWQAGKCPDDVWLPDQGVXPYRGRG

SEQ ID NO: 46037 - protein, 124 aa, Fimbriiglobus ruber
  misc_feature (1)..(124): tr|A0A225DNE1|A0A225DNE1_9BACT NADPH-dependent 7-cyano- 7-deazaguanine reductase OS=Fimbriiglobus ruber OX=1908 690 GN=queF PE=3 SV=1
MEFTETPAADQLETFPNPRPGRDFTIEIVCPEFTSVCPKTGQPDFGTITFSYTPGDTCVELKSLKLYLQRFRNQGIFYEQVTNQLLDDFVAACKPVRCKVVSAWTPRGGITTNVTCTYVAEKAA

SEQ ID NO: 46038 - protein, 114 aa, Fimbriimonas ginsengisoli
  misc_feature (1)..(114): tr|A0A068NQ08|A0A068NQ08_9BACT NADPH-dependent 7-cyano- 7-deazaguanine reductase OS=Fimbriimonas ginsengisoli G soil 348 OX=661478 GN=queF PE=3 SV=1
MPEIEVFPNPAAQRDYLIKHVCPEFTSVCPKTGQPDFATIELEYIPDESCIELKSLKLYYYSFRNEGIYYEAVTNRLLDELVEACKPRWMRVTGIFNVRGGISSVVAAETGPRS

SEQ ID NO: 46039 - protein, 156 aa, Firmicutes bacterium
  misc_feature (1)..(156): tr|A0A373PX59|A0A373PX59_9FIRM NADPH-dependent 7-cyano- 7-deazaguanine reductase OS=Firmicutes bacterium AM55-2 4TS OX=2292896 GN=queF PE=3 SV=1
MPRNKEETEGLSLLGNKKTVYKDTYAPEVLETFVNKHQGNDYMVTFDCPEFTSLCPITGQPDFAKITINYIPNVKMVESKSLKLYLFSFRNQGDFHEDCINIIMKDLVKLMEPKYLEVKGIFTPRGGISIYPFANYGQPGTKYEKIAENRLFDSLK

SEQ ID NO: 46040 - protein, 156 aa, Firmicutes bacterium; identical to SEQ ID NO: 46039
  misc_feature (1)..(156): tr|A0A416CVY1|A0A416CVY1_9FIRM NADPH-dependent 7-cyano- 7-deazaguanine reductase OS=Firmicutes bacterium AF36-3 BH OX=2292889 GN=queF PE=3 SV=1

SEQ ID NO: 46041 - protein, 137 aa, Fischerella major
  misc_feature (1)..(137): tr|A0A1U7GUS3|A0A1U7GUS3_9CYAN NADPH-dependent 7-cyano- 7-deazaguanine reductase OS=Fischerella major NIES-592 OX=210994 GN=queF PE=3 SV=1
MSNSLSESVSQPSQEMKYGEREIAEGKLITFPNPRVGRRYNIDITLPEFTCKCPFSGYPDFATIHITYIPDQQVVELKALKLYINSYRDRYISHEESANQILDDFVAACDPLEITLKADFAPRGNVHTVIEVHHKKQ

SEQ ID NO: 46042 - protein, 137 aa, Fischerella muscicola
  misc_feature (1)..(137): tr|A0A2N6K905|A0A2N6K905_FISMU NADPH-dependent 7-cyano- 7-deazaguanine reductase OS=Fischerella muscicola CCMEE 5323 OX=2019572 GN=queF PE=3 SV=1
MSNSLSESVSQPSPEIKYGEREIAEGKLITFPNPRVGRRYNIDITLPEFTCKCPFSGYPDFATIHITYIPDQQVVELKALKLYINSYRDRYISHEESANQILDDFVAACDPLEITVKADFAPRGNVHTVIEVHHKKQ

SEQ ID NO: 46043 - protein, 140 aa, Fischerella sp.
  misc_feature (1)..(140): tr|A0A1Z4TRZ5|A0A1Z4TRZ5_9CYAN NADPH-dependent 7-cyano- 7-deazaguanine reductase OS=Fischerella sp. NIES-4106 O X=2005456 GN=queF PE=3 SV=1
MSNSLSESVSQPSQEIKYGEREIAEGQLITFPNPRIGRRYNIDITLPEFTCKCPFSGYPDFATIHINYIPDQLVVELKAIKLYINSYRDRYISHEESANQILDDFVAACDPLEITLKADFAPRGNVHTVIEVRHVKSKDQ

SEQ ID NO: 46044 - protein, 137 aa, Fischerella sp.; identical to SEQ ID NO: 46041
  misc_feature (1)..(137): tr|A0A0S3TUI4|A0A0S3TUI4_9CYAN NADPH-dependent 7-cyano- 7-deazaguanine reductase OS=Fischerella sp. NIES-3754 O X=1752063 GN=queF PE=3 SV=1

SEQ ID NO: 46045 - protein, 137 aa, Fischerella thermalis; identical to SEQ ID NO: 46041
  misc_feature (1)..(137): tr|G6FZQ0|G6FZQ0_9CYAN NADPH-dependent 7-cyano-7-deazag uanine reductase OS=Fischerella thermalis OX=372787 GN= queF PE=3 SV=1

SEQ ID NO: 46046 - protein, 136 aa, Fischerella thermalis
  misc_feature (1)..(136): tr|A0A2N6M3T9|A0A2N6M3T9_9CYAN NADPH-dependent 7-cyano- 7-deazaguanine reductase OS=Fischerella thermalis CCMEE 5205 OX=2019671 GN=queF PE=3 SV=1
MSNSLSESVSQPSQEMKYGEREIAEGKLITFPNPRVGRRYNIDITLPEFTCKCPFSGYPDFATIHITYIPDQQVVELKALKLYINSYRDRYISHEESANQILDDFVAACDPLEITLKADFAPRGNVHTVIEVHHKK

SEQ ID NO: 46047 - protein, 140 aa, Flammeovirgaceae bacterium
  misc_feature (1)..(140): tr|A0A2E0FCD4|A0A2E0FCD4_9BACT NADPH-dependent 7-cyano- 7-deazaguanine reductase OS=Flammeovirgaceae bacterium OX=2026740 GN=queF PE=3 SV=1
MKLKSNIIDPYLGQEAEGKKFKFESVDKIEVKELKVFLFDNKEECIKITSKEFIAVCPFSGLPDIARLKIEYYPEGGLAIELKSLKYYLVSFKNVGIYQEEVTSRIFKDLKKILKTQKIRVTTKYNVRGGLYTTCKLGNI

SEQ ID NO: 46048 - protein, 136 aa, Flammeovirgaceae bacterium
  misc_feature (1)..(136): tr|A0A424PCX2|A0A424PCX2_9BACT NADPH-dependent 7-cyano- 7-deazaguanine reductase OS=Flammeovirgaceae bacterium TMED290 OX=1986700 GN=queF PE=3 SV=1
MKKTYKDIESNLLKAIPNPDKKTYEIKIKQPELTFLGVYDQPDFASLYILFYPNKTIIELKSLKMYLQQYRDLIISYERLINVLYDDILKVYKPKRLRVVLDCNPRGGISSRLTQDSDWKSLGGKEEYKNYNEDVW

SEQ ID NO: 46049 - protein, 166 aa, Flavisolibacter tropicus
  misc_feature (1)..(166): tr|A0A172TVN7|A0A172TVN7_9BACT NADPH-dependent 7-cyano- 7-deazaguanine reductase OS=Flavisolibacter tropicus OX =1492898 GN=queF PE=3 SV=1
METKTPNKLKEQLEATYKQALEHTTKALDYMAEFGIKPDGKFGLFMPPDTRQKEIHRLPYPHTAKQVVVYETETGEFSALCPFSGLPDFGVLRIEYVPGSNILELKSLKYYILSWRNIGIAQEDVTAYIYEDLKAALGDPQYLLVTTVYNVRGGINTTCAIDSRKQ

SEQ ID NO: 46050 - protein, 141 aa, Flavobacteriaceae bacterium
  misc_feature (1)..(141): tr|A0A2E6LJU4|A0A2E6LJU4_9FLAO NADPH-dependent 7-cyano- 7-deazaguanine reductase OS=Flavobacteriaceae bacterium OX=1871037 GN=queF PE=3 SV=1
MKNKKMKKTFKNVDISLLKSLPNPAQKAYEIKLKQPELTFLGVYEQPDFASLYLLFYPDKKIIELKSFKLYLQQYRNLIISYERLINILYDDIKTVYKPKRLRIILDCNPRGGISSRLTQDSDWKSLGGKEEYKSYNEDIW

SEQ ID NO: 46051 - protein, 136 aa, Flavobacteriaceae bacterium
  misc_feature (1)..(136): tr|A0A2E5YZ63|A0A2E5YZ63_9FLAO NADPH-dependent 7-cyano- 7-deazaguanine reductase OS=Flavobacteriaceae bacterium OX=1871037 GN=queF PE=3 SV=1
MKKTFKSVDISLLKFLPNPSQKAYEIKLKQPELTFLGVYEQPDFASLYLLFYPDKKIIELKSFKLYLQQYRDMIISYERLINILYDDIKKVYSPKRLRIILDCNPRGGISSRLTQDSDWKSLGGKEEYKNYNEDTW

SEQ ID NO: 46052 - protein, 147 aa, Flavobacteriales bacterium
  misc_feature (1)..(147): tr|A0A2A4PKR6|A0A2A4PKR6_9FLAO 7-cyano-7-deazaguanine r eductase OS=Flavobacteriales bacterium OX=2021391 GN=CO B88_10880 PE=4 SV=1
  misc_feature (70)..(70): Xaa can be any naturally occurring amino acid
  misc_feature (142)..(142): Xaa can be any naturally occurring amino acid
MSSKKPYEQIDKSILKAIPNPSKGAYEIKIKIPEFTFLGVSSQPDFATMYLTFYPTDKVIELKSVKEYVXQLRNIIVSYERLINIFYDHLMEVYKPDRMRIVMICNPRGGISSKLTIDSDWLARGGSEKYKDWASGGSAEDXWDVLM

SEQ ID NO: 46053 - protein, 145 aa, Flavobacteriales bacterium
  misc_feature (1)..(145): tr|A0A2A5GC46|A0A2A5GC46_9FLAO 7-cyano-7-deazaguanine r eductase OS=Flavobacteriales bacterium OX=2021391 GN=CO A57_00745 PE=4 SV=1
MPEKKLYQAIDKSILRAIPNPSKGAYEIKIKIPEFTFLGVQAQPDFAAVYLTFYPKKKIIELKSLKMYSYHLRNIIVSYERLTNIMYDHLMEVYEPERMRIVMICNPRGGISSKLTIDSDWKVRGGKEQFKDWVGNQEDEWEVLM

SEQ ID NO: 46054 - protein, 165 aa, [Flavobacterium] thermophilum
  misc_feature (1)..(165): tr|A0A377FY90|A0A377FY90_9BACL NADPH-dependent 7-cyano- 7-deazaguanine reductase OS=[Flavobacterium] thermophil um OX=1414643 GN=queF PE=3 SV=1
MAGRKEEELKDLTLLGNQGTTYSFTYNPHLLEVFDNKHPDRDYFVKFNCPEFTTLCPKTGQPDFATIYISYIPDKKCVESKSLKLYLFSFRNHGDFHEDCVNIIMNDLIKVMEPRYIEVWGKFTPRGGISIDPYCNWGRPGTKYEKMAEYRLLNHDLYPEKVDNR

SEQ ID NO: 46055 - protein, 416 aa, Fluoribacter bozemanae
  misc_feature (1)..(416): tr|A0A0W0RVM0|A0A0W0RVM0_FLUBO NADPH-dependent 7-cyano- 7-deazaguanine reductase OS=Fluoribacter bozemanae OX=4 47 GN=queF PE=3 SV=1
MKYYQIKEISQMTSLTIRSLQYYDEIGLLKPTKRSMSGYRLYSETDLIRLQQIITLKFLGFSLSTIKKIMENPHFDVMTSIGIQACELTEKAARINEAASLLTYISSQMEMNQPVNWKSTAKIIEILELNTMNDQVLQKYQSEAEQSELGKKSAYDEMYNPDRLYPIPRAGKRQEIGVDPVQLPFYGFDCWNHYEVSWLNAKGKPMVAIAELFYDCSSPNLIESKSLKLYFNSFNNTRIQSVRELENTIKKDLQERVGAEVWVHVHLLDATSQFAIQQPLIGELLDNLDIECSVYLVEPSFLTVSDEIVEETLFSNLLKSNCLVTNQPDWGSVHITYKGKKINREGLLKYLVSYRNHNEFHEQCIERIFVDIMNYCKPEKLTVYGRYTRRGGLDINPYRSTEKSSFSGKNLRLVRQ

SEQ ID NO: 46056 - protein, 372 aa, Fluoribacter dumoffii
  misc_feature (1)..(372): tr|A0A377GEE0|A0A377GEE0_9GAMM NADPH-dependent 7-cyano- 7-deazaguanine reductase OS=Fluoribacter dumoffii OX=46 3 GN=queF PE=3 SV=1
MDLVRLQQITSLKFLGFTLSAIKKIMERPGFDVMTSIGIQARELTEKAAQIKEAASLLTYISSQLEMNQPVNWKSTAKIIEILELNTMNDQILQKYQSEAEKSELGKKSAYDERYNPNRLYPIPRAGKRQEIGVDPNQLPFHGFDCWNHYEVSWLNAKGKPMVAIAELFYDCKSPYLIESKSLKLYFNSFNNTRIGSISELENTIKQDLQERVGAEVWVAIHPLDSANPFSIQTSWEGDCLDHLDVECSVYLVEPSFLSVGEEEVEELLHSNLLKSNCLVTNQPDWGSVQIAYKGKKINREGLLKYLVSYRNHNEFHEQCIERIFVDILNYCKPEKLTVYGRYTRRGGLDINPYRSTEKSPFEGKNLRLIRQ

SEQ ID NO: 46057 - protein, 416 aa, Fluoribacter gormanii
  misc_feature (1)..(416): tr|A0A377GNL4|A0A377GNL4_9GAMM NADPH-dependent 7-cyano- 7-deazaguanine reductase OS=Fluoribacter gormanii OX=46 4 GN=queF PE=3 SV=1
MKYYQIKEISQMTSLTVRSLQYYDDIGLLKPTKRSISGYRLYSEMDLIRLQQITTLKFLGFSLSTIKMIIENPNFDVMASIGIQARELTEKAARINEAASLLTYISSQMEVNQPVNWKSTAKIIEILELNTMNDQVLQKYHSEAAKSELGKKSAYDDTYNPDRLYPIPRAGKRQEIGVDPMQLPFYGFDCWNHYEVSWLNNKGKPMIAIAELFYDCSSPNLIESKSLKLYFNSFNNTRIQNVDELENTIKIDLQARVGAEVWVKLHLLDTAYQFVVQQSLTGESLDHLDIECSVYLVEPSFLSTSDEVVEEQLFSNLLKSNCLVTNQPDWGSVQISYKGKKINREGLLKYLVSFRNHNEFHEQCIERIFVDIMNYCKPEQLTVYGRYTRRGGLDINPYRSTEKTSFTDKNLRLVRQ

SEQ ID NO: 46058 - protein, 273 aa, Fluviicoccus keumensis
  misc_feature (1)..(273): tr|A0A4Q7Z661|A0A4Q7Z661_9GAMM NADPH-dependent 7-cyano- 7-deazaguanine reductase OS=Fluviicoccus keumensis OX=1 435465 GN=queF PE=3 SV=1
MAWYEKTQLGVKTDYIHAYDPGLLCPLERREGREALELTGAPLPFHGVDIWHNYEVSWLDPHGKPQVAIARITVPADSPCLIESKSMKLYFNSLNQHRFADRQAVIDCAAADLSHSAGASVRVELLPVNAACSLTTLEGTCLDDLPLEDCDFTPNPGHLKADQAEHVEETLHSNLLRSNCPVTGQPDWGSVQIRYSGPKINREGLLRYLISFREHNDFHEQCVERIYRDILRHCTPEQLTVFACYTRRGGLDINPWRSNAEALPDRLPRLSRQ

SEQ ID NO: 46059 - protein, 165 aa, Fontibacillus panacisegetis
  misc_feature (1)..(165): tr|A0A1G7Q079|A0A1G7Q079_9BACL NADPH-dependent 7-cyano- 7-deazaguanine reductase OS=Fontibacillus panacisegetis OX=670482 GN=queF PE=3 SV=1
MAGRQSDEMQNVTLLGNQGVKYPVTYAPQLLESFENKHPYRDYFVKFNCPEFTSLCPITGQPDFATIYISYIPDILMVESKSLKLYLFSFRNHGDFHEDCVNIIMNDLIKLMNPKYIEVWGKFTPRGGISIDPYCNYGRPGTKYETMAEHRLLNHDMYPEKIDNR

SEQ ID NO: 46060 - protein, 165 aa, Fontibacillus phaseoli
  misc_feature (1)..(165): tr|A0A369BFN8|A0A369BFN8_9BACL NADPH-dependent 7-cyano- 7-deazaguanine reductase OS=Fontibacillus phaseoli OX=1 416533 GN=queF PE=3 SV=1
MSGRQQQEMQNVTLLGHQGVKYPMTYTPEILESFDNKHPYRDYFVKFNCPEFTSLCPITGQPDFATIYVSYIPDIKMVESKSLKLYLFSFRNHGDFHEDCVNIIMNDLIQLMDPKYIEVWGKFTPRGGISIDPYCNYGRPGTKYEAMAEHRLLNHDMYPEKVDNR

SEQ ID NO: 46061 - protein, 165 aa, Fonticella tunisiensis
  misc_feature (1)..(165): tr|A0A4R7KPQ1|A0A4R7KPQ1_9CLOT NADPH-dependent 7-cyano- 7-deazaguanine reductase OS=Fonticella tunisiensis OX=1 096341 GN=queF PE=3 SV=1
MSGRTDKELEGVTLLGEKGTKYKYDYDPSVLETFVNKHQDNDYFVKFNCPEFTSLCPKTGQPDFATIYISYVPDKLMVESKSLKLYLFSFRNHGDFHEDCVNIIMKDLIKLLAPKYIEVWGKFTPRGGISIDPYCNYGKEGTKWKEVAEKRLFYHDMYPERIDNR

SEQ ID NO: 46062 - protein, 140 aa, Fontimonas thermophila
  misc_feature (1)..(140): tr|A0A1I2HZI6|A0A1I2HZI6_9GAMM NADPH-dependent 7-cyano- 7-deazaguanine reductase OS=Fontimonas thermophila OX=1 076937 GN=queF PE=3 SV=1
MSTQPSKTLETFPNPAPQRDYAIRMRIPEFTCLCPKTGQPDFGTLYLEYVADQACVELKSLKLYVWSFRNEGAFHEAVTNRILDDLVAATQPRFMRLTAVFNVRGGIYTHVSAEYRRPGWTGTLPPPAWHVDPTGQGQTP

SEQ ID NO: 46063 - protein, 275 aa, Formivibrio citricus
  misc_feature (1)..(275): tr|A0A1I4Y329|A0A1I4Y329_9NEIS NADPH-dependent 7-cyano- 7-deazaguanine reductase OS=Formivibrio citricus OX=837 65 GN=queF PE=3 SV=1
MSEAHLSPLGKAVAYQAEYDPGLLFPIPRIGKREEIGVPAALPFMGVDIWNAYELSWLNPRGKPQVALASFMFPADSPNIVESKSFKLYLNSFNQTRLENETELKNRLTRDLSTAAGSPVHVEITGVERFGSQRFAELGGYCIDNLDIEVDTYSLVPELLRCDADPAPIEETLASNLLKSNCLVTGQPDWASVQIRYFGRAINRESLLRYLISFREHNEFHEQCVERIFMDILRTCQPMKLAVYARYTRRGGLDINPWRSNFSTSLPANLRTARQ

SEQ ID NO: 46064 - protein, 302 aa, Francisella adeliensis
  misc_feature (1)..(302): tr|A0A2Z4XWP7|A0A2Z4XWP7_9GAMM QueF_N domain-containing protein OS=Francisella adeliensis OX=2007306 GN=CDH04_ 00775 PE=4 SV=1
MKNTNEIAAKFLGKDSLNNKMASYIAPENIDNSLLVAIPRSLNRESHGIDQNLFKGFDVWNCYELSTINAKGKPFVGIMKIFFPADSINIVESKSLKLYLNSFNLCKLKGVTKEDLIYELENIITKDLQLKIDEKNIKVKIYDVNIPNLIEIPISHCDFKNIDDLDIEIDQSSNHSLVIQHYEEVQTLRIHSALLRSNCRVTNQPDWGDVYIHIKGKKLPTEESLLRHITSMRKEQHFHEEISESIYHNIYTKFEPQELLVQCLYTRRGGIDINPIRYTKNIVNDKMLKYFSNENIYKTNRQ

SEQ ID NO: 46065 - protein, 155 aa, Francisella sp.
  misc_feature (1)..(155): tr|A0A2W6S042|A0A2W6S042_9GAMM NADPH-dependent 7-cyano- 7-deazaguanine reductase OS=Francisella sp. OX=2047875 GN=queF PE=3 SV=1
MTQRNQTNLTLLGSKHTHYPEHYDPDLLEVFNNPHLHHDYWVNFDCPEFTTLCPITGQPDFATILINYIPNLKMVESKSLKLYLFSYRNHRGFHEDEVNQIMLDLWQKMQPKYIEVLGLFTPRGGIAIRPFVNYAIQEDRWQQLTKKRFEDFSLI

SEQ ID NO: 46066 - protein, 280 aa, Franconibacter pulveris
  misc_feature (1)..(280): tr|A0A0J8YAG8|A0A0J8YAG8_9ENTR NADPH-dependent 7-cyano- 7-deazaguanine reductase OS=Franconibacter pulveris OX= 435910 GN=queF PE=3 SV=1
MSYENHQALSGLTLGKTTDYRDEYDAALLQPVPRSLNRDPLGLSAESLPFHGADIWTLYELSWLNQNGLPQVAVGEVSLDARSRNLVESKSFKLYLNSFNQTRFSSWEKVRETLQRDLTACAEGDVEVRLYRLSELEGEPVAHFHGECIDEQDISIDNYEFDANYLKGAAGEKIVEETLVSHLLKSNCLITNQPDWGSVQISYRGPQLDREKLLRYLVSFRHHNEFHEQCVERIFNDIQRFCGPEKLSVYARYTRRGGLDINPWRANTVFHPATGRLVRQ

SEQ ID NO: 46067 - protein, 123 aa, Frankia casuarinae
  misc_feature (1)..(123): tr|A0A1X1PTL9|A0A1X1PTL9_FRACC NADPH-dependent 7-cyano- 7-deazaguanine reductase OS=Frankia casuarinae (strain DSM 45818 / CECT 9043 / CcI3) OX=106370 GN=queF PE=3 SV =1
MTKLGNPEAKADRSLETFPIDDTSQEIRIDCREFTCRCPITGQPDWATIRIDYRPGGRGLETKSLKLYLETFREEGIFHEHLATLIRDDLVAALAPVQLTVTVNFNARGGIALAASSTYRREA

SEQ ID NO: 46068 - protein, 125 aa, Frankia casuarinae
  misc_feature (1)..(125): sp|Q2J7K4|QUEF_FRACC NADPH-dependent 7-cyano-7-deazagua nine reductase OS=Frankia casuarinae (strain DSM 45818 / CECT 9043 / CcI3) OX=106370 GN=queF PE=3 SV=1
MALTKLGNPEAKADRSLETFPIDDTSQEIRIDCREFTCRCPITGQPDWATIRIDYRPGGRGLETKSLKLYLETFREEGIFHEHLATLIRDDLVAALAPVQLTVTVNFNARGGIALAASSTYRREA

SEQ ID NO: 46069 - protein, 109 aa, Frankia sp.
  misc_feature (1)..(109): tr|A0A4Y8LSW6|A0A4Y8LSW6_9ACTN NADPH-dependent 7-cyano- 7-deazaguanine reductase OS=Frankia sp. B2 OX=2541730 G N=queF PE=3 SV=1
METFPIDDTSQEIRIDCREFTCRCPITGQPDWATIRIDYRPGGRGLETKSLKLYLETFREEGIFHEHLATLIRDDLVAALAPVQLTVTVNFNARGGIALAASSTYRREA

SEQ ID NO: 46070 - protein, 125 aa, Frankia sp.; identical to SEQ ID NO: 46068
  misc_feature (1)..(125): tr|A0A062WV18|A0A062WV18_9ACTN NADPH-dependent 7-cyano- 7-deazaguanine reductase OS=Frankia sp. BMG5.23 OX=6833 05 GN=queF PE=3 SV=1

SEQ ID NO: 46071 - protein, 277 aa, Frateuria aurantia
  misc_feature (1)..(277): tr|H8L240|H8L240_FRAAD NADPH-dependent 7-cyano-7-deazag uanine reductase OS=Frateuria aurantia (strain ATCC 334 24 / DSM 6220 / NBRC 3245 / NCIMB 13370) OX=767434 GN=q ueF PE=3 SV=1
MTTPDHSPLGKATVYASHYDAGLLFPIPRQANRGQFGLGEGPLPFNGVDIWNAYELSWLNARGLPQVGLAEFRVPADSPNIIESKSFKLYLNGFSQEVFDSPDALAAVLGRDLGAAAGAPVKVSLRPARSDQVRLQDLEGQLIDKLEVSIDSYGPPDASLLKLQDASAGAAIEETLVSDLLRSNCPVTGQPDWGTLQIRYHGAPIDHASVVRYLVSFREHSDFHEHCVERIWLDLQQQCRPRSLSVYARYTRRGGLDINPYRSSGTETAPDIRTARQ

SEQ ID NO: 46072 - protein, 273 aa, Frateuria sp.
  misc_feature (1)..(273): tr|A0A0Q9QH18|A0A0Q9QH18_9GAMM NADPH-dependent 7-cyano- 7-deazaguanine reductase OS=Frateuria sp. Soil773 OX=17 36407 GN=queF PE=3 SV=1
MSTPEHSPLGKSTIYADRYDPSLLFPIPRSGKRAEIGVGEPLPFHGVDIWNAYELSWLDPRGKPVVALAEFRVPAQSPNIIESKSFKLYLNGFAQERLAGADALAAILARDLSAAAGAAVGVRLSDASARAHAVTDLEGELLDTQSLDIDDYGPPEAGYLQAGGDIVDEALVSHLLRSNCPVTGQPDWGSVQIRYRGPAIDRAGLLRYLVSFRNHNEFHEQCVERIYVDVMARCAPQRLGVYARYTRRGGLDINPFRASEAPQDVPNPRGARQ

SEQ ID NO: 46073 - protein, 274 aa, Frateuria terrea
  misc_feature (1)..(274): tr|A0A1H6XA37|A0A1H6XA37_9GAMM NADPH-dependent 7-cyano- 7-deazaguanine reductase OS=Frateuria terrea OX=529704 GN=queF PE=3 SV=1
MSTPEHSPLGKTTVYAGRYDPALLFPIPREQKRVEIGVMEPLPFHGVDIWNAYELSWLDARGKPQVALAEFRVPAHSPNIIESKSFKLYLNGFSQERIASDALQEALARDLAAAAGAPVTVTLSAPSAQGHAITDLPGALLDELPLEVDDYGPPKAGYLSANHHAAPVEEILLSNLLRSNCPVTGQPDWGTVQIAYRGAPVDHAGLLRYLISFRTHNEFHEQCVERIFVDLMARCAPERLTVYARYTRRGGLDINPFRSTDPAAVPGNPRGPRQ

SEQ ID NO: 46074 - protein, 279 aa, Frederiksenia canicola
  misc_feature (1)..(279): tr|A0A3N4XIN5|A0A3N4XIN5_9PAST NADPH-dependent 7-cyano- 7-deazaguanine reductase OS=Frederiksenia canicola OX=1 23824 GN=queF PE=3 SV=1
MTYQHQSLNVLKLGQQTQYAEHYDASLLQGVPRQLNRDQLGITHHQPFSIGVDLWTAYEISWLNDKGVPQVAIADVKLDFQSENLIESKSFKLYLNSFNQTKFADLETVRQTIENDLQQCAKGKVSVQLNTLDHYYQHAIATFKGTCIDQQDIEIHDYAFNPNILTNCASGEVVEEYLVSHLLKSNCLITQQPDWGSVQIHYVGKRLDQEKLLRYLVSFRQHNEFHEQCVERIFCDLMQFASPEKLTVYARYTRRGGLDINPFRSNFEQIAENARLARQ

SEQ ID NO: 46075 - protein, 134 aa, Fremyella diplosiphon
  misc_feature (1)..(134): tr|A0A1Z4MMF6|A0A1Z4MMF6_MICDP NADPH-dependent 7-cyano- 7-deazaguanine reductase OS=Fremyella diplosiphon NIES- 3275 OX=1973485 GN=queF PE=3 SV=1
MTNNTTEIKYGEREIAEGQLITFPNPRVGRKYDISITLPEFTCKCPFSGYPDFATIYISYVPDERVVELKALKLYINSYRDRYISHEESANQILDDFVAACDPLEATVKADFTPRGNVHTVVEVRHQKQQNNIF

SEQ ID NO: 46076 - protein, 159 aa, Frischella perrara
  misc_feature (1)..(159): tr|A0A318N3N3|A0A318N3N3_FRIPE NADPH-dependent 7-cyano- 7-deazaguanine reductase OS=Frischella perrara OX=12670 21 GN=queF PE=3 SV=1
MTNSNLTLLGDQSIRYPQDYAPEILEVFDNKHLDNDYFVKFNCPEFTSLCPITGQPDFATIYISYVPHIKMVESKSLKLYLFSFRNRGDFHEDCINIIMKDLIKLMDPKYIEVWGKFTPRGGISIDPYANYGKPNTKWQEIAFNRLANHDLYPEKIDNR

SEQ ID NO: 46077 - protein, 159 aa, Frischella perrara
  misc_feature (1)..(159): tr|A0A0A7RZD4|A0A0A7RZD4_FRIPE NADPH-dependent 7-cyano- 7-deazaguanine reductase OS=Frischella perrara OX=12670 21 GN=queF PE=3 SV=1
MTNSNLTLLGDQSIRYPQDYAPGILEVFDNKHLDNDYFVKFNCPEFTSLCPITGQPDFATIYISYVPHIKMVESKSLKLYLFSFRNRGDFHEDCINIIMKDLIKLMDPKYIEVWGKFTPRGGISIDPYANYGKPNTKWQEIAFNRLANHDLYPEKIDNR

SEQ ID NO: 46078 - protein, 120 aa, Fuerstia marisgermanicae
  misc_feature (1)..(120): tr|A0A1P8WBM2|A0A1P8WBM2_9PLAN NADPH-dependent 7-cyano- 7-deazaguanine reductase OS=Fuerstia marisgermanicae OX =1891926 GN=queF PE=3 SV=1
MAEPSPETLETFENPFPERNYLIETVAPEFTSLCPKTGHPDFGTLTITYIADKLCYELKSLKLYLQEFRNHGAFYEKVTNTILDDLVAVTSPRWMKIEAAFTPRGGIRTTVIVEHGKKPE

SEQ ID NO: 46079 - protein, 153 aa, Fulvimarina manganoxydans
  misc_feature (1)..(153): tr|A0A1W2DSV7|A0A1W2DSV7_9RHIZ NADPH-dependent 7-cyano- 7-deazaguanine reductase OS=Fulvimarina manganoxydans O X=937218 GN=queF PE=3 SV=1
MTDTTDLSQLGRESRPAASPEEAVLETVPYTRREGPPAIVRFTCPEFTSLCPVTGQPDFAHIVIDYAPDARLVESKSLKLFLTSFRNHGAFHEDCTVMIARRVVQATKPLWLRIGGYWYPRGGIPIDVFWQTGPAPDGCFLPDQGVPPYRGRG

SEQ ID NO: 46080 - protein, 153 aa, Fulvimarina pelagi
  misc_feature (1)..(153): tr|Q0G302|Q0G302_9RHIZ NADPH-dependent 7-cyano-7-deazag uanine reductase OS=Fulvimarina pelagi HTCC2506 OX=3142 31 GN=queF PE=3 SV=1
MTDTRYLSQLGRHTDTPQSPEEATLETVPFETGDEMPPVVRFTCPEFTSLCPVTGQPDFAHLVIDYVPEKRLVESKSLKLFLTSFRNHGSFHESCTMMVAKRIVEATQPRWLRIGGYWYPRGGIPIDVFWQTGSAPEGIFLPDQGVPPYRGRG

SEQ ID NO: 46081 - protein, 153 aa, Fulvimarina pelagi; identical to SEQ ID NO: 46080
  misc_feature (1)..(153): tr|A0A0N7KYY3|A0A0N7KYY3_9RHIZ NADPH-dependent 7-cyano- 7-deazaguanine reductase OS=Fulvimarina pelagi OX=21751 1 GN=queF PE=3 SV=1

SEQ ID NO: 46082 - protein, 153 aa, Fulvimarina sp.
  misc_feature (1)..(153): tr|A0A371X499|A0A371X499_9RHIZ NADPH-dependent 7-cyano- 7-deazaguanine reductase OS=Fulvimarina sp. 85 OX=22938 36 GN=queF PE=3 SV=1
MTDTGDLSQLGRQAETPASPEEAVLETVPYAGSEGPPTLVRFTCPEFTSLCPVTGQPDFAHLVIDYVPDARLVESKSLKLFLTSFRNHGAFHESCTVMVAKRITEATRPKWLRIGGYWYPRGGIPIDVFWQTGPAPEDLFLPDQGVPTYRGRG

SEQ ID NO: 46083 - protein, 152 aa, Fulvimarina sp.
  misc_feature (1)..(152): tr|A0A2E1HK35|A0A2E1HK35_9RHIZ NADPH-dependent 7-cyano- 7-deazaguanine reductase OS=Fulvimarina sp. OX=1969479 GN=queF PE=3 SV=1
MSHQDLSQLGRDARPAASPEEATLETVPYARGDGPPAIVRFTCPEFTSLCPVTGQPDFAHIVIDYAPDARLVESKSLKLFLTSFRNHGAFHEDCTVMIARRVIDVTQPLWLRIGGYWYPRGGIPIDVFWQSGPVPDGVYLPDQGVPPYRGRG

SEQ ID NO: 46084 - protein, 275 aa, Fulvimonas soli
  misc_feature (1)..(275): tr|A0A316IGS9|A0A316IGS9_9GAMM NADPH-dependent 7-cyano- 7-deazaguanine reductase OS=Fulvimonas soli OX=155197 G N=queF PE=3 SV=1
MSTPEHSPLGKATVYADRYDPALLFPIPRAPKRAELGLHGALPFRGVDVWNAYELSWLDARGKPRVALAEFRVPADSPNIVESKSFKLYLNGFAQERVADEEALAATLARDLSAAAGAPVGVALHAPSARGLPFADLDGDSIDALELDLDDYGPPKAGHLRADASAAEVEETLVSDLLRSNCPVTGQPDWGSVQIRYRGAPIDRAGLLRYLVSFRTHSEFHEQCVERIFVDVMARCAPRELSVYARYTRRGGLDINPFRSTDPQAAPGNPRGARQ

SEQ ID NO: 46085 - protein, 160 aa, Fusobacterium equinum
  misc_feature (1)..(160): tr|A0A133N8C4|A0A133N8C4_9FUSO NADPH-dependent 7-cyano- 7-deazaguanine reductase OS=Fusobacterium equinum OX=13 4605 GN=queF PE=3 SV=1
MRETENLSLLGNQNTKYPQDYAPEMLETFENKHPDNDYFVKFNCPEFTSLCPITGQPDFANIVISYVPNIKMVESKSLKLYLFSFRNHGDFHEDCMNIIMKDLIKLMNPKYIEVWGKFTPRGGISIDPYCNYGQKGTKWEEIAFHRMANHDMYPEKVDNR

SEQ ID NO: 46086 - protein, 160 aa, Fusobacterium gonidiaformans; identical to SEQ ID NO: 46085
  misc_feature (1)..(160): tr|E5BED8|E5BED8_9FUSO NADPH-dependent 7-cyano-7-deazag uanine reductase OS=Fusobacterium gonidiaformans 3-1-5R OX=469605 GN=queF PE=3 SV=1

SEQ ID NO: 46087 - protein, 160 aa, Fusobacterium mortiferum
  misc_feature (1)..(160): tr|C3WEF9|C3WEF9_FUSMR NADPH-dependent 7-cyano-7-deazag uanine reductase OS=Fusobacterium mortiferum ATCC 9817 OX=469616 GN=queF PE=3 SV=1
MRDLKDLTLLGNQGVKYPDNYAPEILETFDNKHPENDYFVKFNCPEFTSLCPITGQPDFANIIISYVPNIKMVESKSLKLYLFSFRNHGDFHEDCVNIIMKDLIRLMDPKYIEVWGKFTPRGGISIDPYCNYGKKGSKWEEIALNRLANHDMYPEKVDNR

SEQ ID NO: 46088 - protein, 160 aa, Fusobacterium mortiferum; identical to SEQ ID NO: 46087
  misc_feature (1)..(160): tr|A0A414PUK5|A0A414PUK5_FUSMR NADPH-dependent 7-cyano- 7-deazaguanine reductase OS=Fusobacterium mortiferum OX =850 GN=queF PE=3 SV=1

SEQ ID NO: 46089 - protein, 160 aa, Fusobacterium necrogenes
  misc_feature (1)..(160): tr|A0A377GWQ1|A0A377GWQ1_9FUSO NADPH-dependent 7-cyano- 7-deazaguanine reductase OS=Fusobacterium necrogenes OX =858 GN=queF PE=3 SV=1
MRDLKDLTLLGNQGVKYPDNYAPEILETFDNKHPENDYFVKFNCPEFTSLCPITGQPDFANIIISYVPNIKMVESKSLKLYLFSFRNHGNFHEDCVNIIMKDLIKLMDPKYIEVWGKFTPRGGISIDPYCNYGKKGSKWEEIALNRLANHDMYPEKVDNR

SEQ ID NO: 46090 - protein, 160 aa, Fusobacterium necrophorum
  misc_feature (1)..(160): tr|J6GSG9|J6GSG9_9FUSO NADPH-dependent 7-cyano-7-deazag uanine reductase OS=Fusobacterium necrophorum subsp. fu nduliforme Fnf 1007 OX=1161424 GN=queF PE=3 SV=1
MKENKNLTLLGNQNTKYPQDYAPEILETFENKHPDHDYFVKFNCPEFTSLCPITGQPDFANIIISYVPNVKMVESKSLKLYLFSFRNHGDFHEDCMNIIMKDLIRVMDPKYIEVWGKFTPRGGISIDPYCNYGKKGTKWEEIALHRMANHDMYPEKVDNR

SEQ ID NO: 46091 - protein, 160 aa, Fusobacterium necrophorum
  misc_feature (1)..(160): tr|A0A162ILB5|A0A162ILB5_9FUSO NADPH-dependent 7-cyano- 7-deazaguanine reductase OS=Fusobacterium necrophorum s ubsp. funduliforme OX=143387 GN=queF PE=3 SV=1
MKENKNLTLLGNQNTKYPQDYAPEILETFENKHPDHDYFVKFNCPEFTSLCPITGQPDFANIVISYVPNVKMVESKSLKLYLFSFRNHGDFHEDCMNIIMKDLIRVMDPKYIEVWGKFTPRGGISIDPYCNYGKKGTKWEEIALHRMANHDMYPEKVDNR

SEQ ID NO: 46092 - protein, 296 aa, Fusobacterium sp.
  misc_feature (1)..(296): tr|R7J9P8|R7J9P8_9FUSO GTP cyclohydrolase I/Nitrile oxi doreductase OS=Fusobacterium sp. CAG:439 OX=1262899 GN= BN657_02162 PE=4 SV=1
MNRTDEIAATHLGKKSEGSETYNPSLLVAIPRFENRKQYNIQNNNLPFEGWDVWHAYEFSAMTENGIPVTRLMKLKYNCTSEFLVESKSLKLYLNSFNMTKFGNTITECLEICKKTIEKDLSEKLETEVTVNFIENKAERFEIFTNFENIMNSVDEKTLKVEKFKEAPELLQTEETEKEQTYHLMFDSLRSNCRVTHQPDFGDLYLYYRSKKHILEDSIVKYLSSFRSEYHFHEECCEMIYKRLLDLLDSGDELFVCALYTRRGGIDICPVRTNCILDDALKLIDLTKFARGSIKQ

SEQ ID NO: 46093 - protein, 301 aa, Fusobacterium sp.
  misc_feature (1)..(301): tr|R7LXS7|R7LXS7_9FUSO GTP cyclohydrolase I/Nitrile oxi doreductase OS=Fusobacterium sp. CAG:815 OX=1262901 GN= BN791_01029 PE=4 SV=1
MQTNQTEEIAAKFLGKRTDGSETYDPSLLVAVPRFENRQQYNIDNNNLPFVGWDIWHAYEFSAMTQNGIPVTRLLKIKYNCTSEFIVESKSLKLYLNSFNMTRLGITIDECLSKCKDFIEQDLSKKLNTEVQVNFLDNNSPKINIFNNFDNLIEFIDQKATIIEKFKEAPELIEADETTTPQKHYLMFDSLRSNCRVTHQPDFGDVFIYYKSNKHIKEESLIKYLISFRSEYHFHEECCEMIYKRLLDKLNKGDELFVCALYTRRGGIDICPARWSKNCTVEDAYNLLDLTQYARNNFKQG

SEQ ID NO: 46094 - protein, 283 aa, Gallaecimonas pentaromativorans
  misc_feature (1)..(283): tr|A0A3N1PAS3|A0A3N1PAS3_9GAMM NADPH-dependent 7-cyano- 7-deazaguanine reductase OS=Gallaecimonas pentaromativo rans OX=584787 GN=queF PE=3 SV=1
MPKNSLYDGAHELADLPLGKTSQYQDQYDPSQLRAVPRSLNRDSLALGDALPFVGEDIWNGYELSWLNAKGKPVVALAQFRFPATSPNLVESKSFKLYLNSFNQTRFESADALKAALEADLSATAGGKASVSLYGPADLAAMPLADLDGQCLDELDIEVDDYHFNPDILDGLGGAEQVEEKLVSHLLKSNCLITSQPDWGSVQIHYRGPKIDREKLLRYLISFRQHNEFHEQCVERIYMDLSRRLAPEFLLVSARYTRRGGLDINPWRASEPVLMSNPRLPRQ

SEQ ID NO: 46095 - protein, 283 aa, Gallaecimonas xiamenensis
  misc_feature (1)..(283): tr|K2JUJ5|K2JUJ5_9GAMM NADPH-dependent 7-cyano-7-deazag uanine reductase OS=Gallaecimonas xiamenensis 3-C-1 OX= 745411 GN=queF PE=3 SV=1
MPKNSLYHGAKELADLPLGKTTAYQDQYDPGQLHAVPRSLNRDSLDLGDSLPFVGEDIWNGYELSWLNAKGKPVVALAQFRFPASSPNLVESKSFKLYLNSFNQSRFDSLEAVKAALEKDLSATAGGQALVSLYGPGDVGAMPLAALEGHCIDDLDIEVSDYQFDPALLDGLGGQEQVEEKLVSHLLKSNCLITSQPDWGSLQIHYRGPKIDREKLLRYLISFRQHNEFHEQCVERIYWDLWQRLKPDFLMVYARYTRRGGLDINPWRASSDMAVANPRLPRQ

SEQ ID NO: 46096 - protein, 281 aa, Gallibacterium anatis
  misc_feature (1)..(281): tr|A0A0A2Z6E1|A0A0A2Z6E1_9PAST NADPH-dependent 7-cyano- 7-deazaguanine reductase OS=Gallibacterium anatis OX=75 0 GN=queF PE=3 SV=1
MDYQDESLTQLTLGKKIAYATHYQPALLQAVPRKLNREQLGILSQQPFTQGADIWTLYEISWLNKNGVPQVAIADVVLDCNSENLIESKSFKLYLNSFNQTHFAEKQQVETTIQQDLQQCANGKVKVTLHDLQYYQQQQIAHFTGICIDQQDIVIDNYQFNADLLQNCVDDHSEKVEQTLVSHLLKSNCLITQQPDWGSVQIHYIGRAINQEKLLRYLISFRQHNEFHEQCVERIFCDLMHYAKPEKLTVYARYTRRGGLDINPFRSNFEYIPANLRLARQ

SEQ ID NO: 46097 - protein, 282 aa, Gallibacterium anatis
  misc_feature (1)..(282): tr|F4HA72|F4HA72_GALAU NADPH-dependent 7-cyano-7-deazag uanine reductase OS=Gallibacterium anatis (strain UMN17 9) OX=1005058 GN=queF PE=3 SV=1
MIDYQDESLTQLTLGKKIAYATHYQPALLQAVPRKLNREQLGILSQQPFTQGADIWTLYEISWLNKNGVPQVAIADVVLDCNSENLIESKSFKLYLNSFNQTHFADKQQVETTIQQDLQQCANGKVKVTLHDLQYYQQQQIAHFAGICIDQQDIVIDNYQFNADLLQNCVDDHSEKVEQTLVSHLLKSNCLITQQPDWGSVQIHYIGRAINQEKLLRYLISFRQHNEFHEQCVERIFCDLMHYAKPEKLTVYARYTRRGGLDINPFRSNFEHIPANLRLARQ

SEQ ID NO: 46098 - protein, 281 aa, Gallibacterium genomosp.
  misc_feature (1)..(281): tr|A0A1A7PCE5|A0A1A7PCE5_9PAST NADPH-dependent 7-cyano- 7-deazaguanine reductase OS=Gallibacterium genomosp. 1 OX=155515 GN=queF PE=3 SV=1
MDYQDESLIKLTLGKKTTYATDYRPSLLQAVPRKLNREQLGILSQQPFTQGADIWTLYEISWLNKNGVPQVAIADVVLDCNSENLIESKSFKLYLNSFNQTHFADKQQVETTIQQDLQQCANGKVKVTLHDLQYYQQQKIAYLEGICIDQLDIVIDNYQFNADLLQNCVDNNSEKVEQTLVSHLLKSNCLITQQPDWGSIQIHYVGREINQEKLLRYLISFRQHNEFHEQCVERIFCDLMYYAKPEKLTVYARYTRRGGLDINPFRSNFEQIPANLRLARQ

SEQ ID NO: 46099 - protein, 281 aa, Gallibacterium genomosp.; identical to SEQ ID NO: 46098
  misc_feature (1)..(281): tr|A0A0A2XE72|A0A0A2XE72_9PAST NADPH-dependent 7-cyano- 7-deazaguanine reductase OS=Gallibacterium genomosp. 2 OX=155517 GN=queF PE=3 SV=1

SEQ ID NO: 46100 - protein, 282 aa, Gallibacterium salpingitidis
  misc_feature (1)..(282): tr|A0A1A7NTI2|A0A1A7NTI2_9PAST NADPH-dependent 7-cyano- 7-deazaguanine reductase OS=Gallibacterium salpingitidi s OX=505341 GN=queF PE=3 SV=1
MTTYADASLSALTLGKKTAYAEHYQPTLLQAVPRHLNRQQLGITEQQPFSQGADIWTLYELSWLNHKGVPQVAIADVYLDFRSENLIESKSFKLYLNSFNQTRFATVEEVQQTIQKDLTQCAKGEVQVVLHSLDEYQQQPIAHFAGICIDQQDIEIDNYQFNPELLTNCADQQSEVIEQTLVSHLLKSNCLITQQPDWGSVQIHYVGKPIDQEKLLRYLISFRQHNEFHEQCVERIYCDLMRFAQPEKLTVYARYTRRGGLDINPFRSNFETLPANLRLARQ

SEQ ID NO: 46101 - protein, 139 aa, Gallionella capsiferriformans
  misc_feature (1)..(139): tr|D9SGR4|D9SGR4_GALCS NADPH-dependent 7-cyano-7-deazag uanine reductase OS=Gallionella capsiferriformans (stra in ES-2) OX=395494 GN=queF PE=3 SV=1
MTTQPTKALETFPNPNPSRDYHIHMEIPEFTCLCPKTGQPDFATLVLDYIADQQCVELKSLKLYMWSFREEGHFHEDVTNRILDDLIKATQPRFMRLTAKFYVRGGIFTNVVAEHRKDNWMPAPFVELSQFGSQSNTRG

SEQ ID NO: 46102 - protein, 139 aa, Gallionella sp.
  misc_feature (1)..(139): tr|A0A3D2H5W1|A0A3D2H5W1_9PROT NADPH-dependent 7-cyano- 7-deazaguanine reductase OS=Gallionella sp. OX=2052161 GN=queF PE=3 SV=1
MTTQPTKALETFPNPNPSRDYHIHMEIPEFTCLCPKTGQPDFATLILDYIADQDCVELKSLKLYMWSFREEGHFHEDVTNRILNDLIAATNPRFMRLTAKFYVRGGIFTNVVAEHRKTGWQPAPFVELTQFGSQSNTRG

SEQ ID NO: 46103 - protein, 139 aa, Gallionella sp.
  misc_feature (1)..(139): tr|A0A522XA67|A0A522XA67_9PROT NADPH-dependent 7-cyano- 7-deazaguanine reductase OS=Gallionella sp. OX=2052161 GN=queF PE=3 SV=1
MSTQPAKTLETFPNPNPGRDYHIHMEIPEFTCLCPKTGQPDFATLILDYIADEKCVELKSLKLYMWSFRNEGHFHEDVTNRILDDLVAATGPRFMRLTAKFYVRGGIFTNVVAEHRKQGWQPAPFVDLSQFGMQSNVRG

SEQ ID NO: 46104 - protein, 139 aa, Gallionellaceae bacterium
  misc_feature (1)..(139): tr|A0A1J4TKI5|A0A1J4TKI5_9PROT NADPH-dependent 7-cyano- 7-deazaguanine reductase OS=Gallionellaceae bacterium C G1_02_60_325 OX=1805162 GN=queF PE=3 SV=1
MSTRPAKTLETFPNPKPGRDYHIHMEIPEFTCLCPKTGQPDFATLTLDYIADQYCVELKSLKLYIWSFREEGHFHEDVTNRILDDLVAATQPRFMRLTAKFYVRGGIFTNVVAEHRKDGWQPAPFVELSAFSGQSNTRG

SEQ ID NO: 46105 - protein, 122 aa, Gallionellaceae bacterium
  misc_feature (1)..(122): tr|A0A2H9MB30|A0A2H9MB30_9PROT NADPH-dependent 7-cyano- 7-deazaguanine reductase (Fragment) OS=Gallionellaceae bacterium CG02_land_8_20_14_3_00_60_115 OX=1974011 GN=C OS20_02345 PE=3 SV=1
MSTRPAKTLETFPNPKPGRDYHIHMEIPEFTCLCPKTGQPDFATLTLDYIADQYCVELKSLKLYIWSFREEGHFHEDVTNRILDDLVAATQPRFMRLTAKFYVRGGIFTNVVAEHRKDGWQP

SEQ ID NO: 46106 - protein, 140 aa, Gallionellales bacterium
  misc_feature (1)..(140): tr|A0A2M7C0M7|A0A2M7C0M7_9PROT NADPH-dependent 7-cyano- 7-deazaguanine reductase OS=Gallionellales bacterium CG 03_land_8_20_14_0_80_55_15 OX=1974017 GN=queF PE=3 SV=1
MTTQPGKTLETFPNPKPLRDYHIHMEIPEFTCLCPKTGQPDFATLELDYIADQHCVELKSLKLYMWSFREEGHFHEDMTNLILDDLVAATQPRFMRLTSKFYVRGGIFTNVIAEHRKEGWQPAPFVELSRFSSQSNTRGA

SEQ ID NO: 46107 - protein, 140 aa, Gallionellales bacterium
  misc_feature (1)..(140): tr|A0A2M8DVQ9|A0A2M8DVQ9_9PROT NADPH-dependent 7-cyano- 7-deazaguanine reductase OS=Gallionellales bacterium CG _4_9_14_0_8_um_filter_55_61 OX=1974015 GN=queF PE=3 SV= 1
MTTQPGKTLETFPNPKPLRDYHIHMEIPEFTCLCPKTGQPDFATLVLDYIADQHCVELKSLKLYMWSYREEGHFHEDMTNLILDDLVAATQPRFMRLTSKFYVRGGIFTNVIAEHRKEGWQPAPFVELSRFSSQSNTRGA

SEQ ID NO: 46108 - protein, 305 aa, Unknown
  misc_feature (1)..(305): tr|E1VNZ5|E1VNZ5_9GAMM NADPH-dependent 7-cyano-7-deazag uanine reductase OS=gamma proteobacterium HdN1 OX=83406 GN=queF PE=3 SV=1
MSTPKELSIDHGPLGEKSAYPERYSPSVLHPIPRALGREALGIGNVLPFAGEDLWNAWEVSWLDAYGKPMVALLELRVPCTSPNIVESKSLKLYLGSFNQERFASAAEVEQRISQDLTRLVGAPVLATLEFLHHARGSRFAVSAGSSCSLSDVEGRHQARGSRFAVSAPLGECIDDTPLYEPSFAVSSQLLQCEMGEVREETLHSHLLRSNCPVTGQPDWATLIVRYRGQPIQRQALLSYIVSYRNHNDFHEQCVERIFMDLMQRCQPERLFVYARYTRRGGIDINPVRSNDEALEVNNLRLLRQ

SEQ ID NO: 46109 - protein, 129 aa, Unknown
  misc_feature (1)..(129): tr|A0A2T6MVW5|A0A2T6MVW5_9GAMM NADPH-dependent 7-cyano- 7-deazaguanine reductase OS=gamma proteobacterium symbi ont of Ctena orbiculata OX=1968598 GN=queF PE=3 SV=1
MPSQPSKALETFDNPQPERDYTIRIRIPEFTCLCPKTGQPDFAEMTLEYVPDKRCVELKALKLYVWSFRDQGAFHEAVTNEILSDLVSATQPRFMRLTAEFNVRGGIYTTVVAEHRAENWSPPSAVSLP

SEQ ID NO: 46110 - protein, 281 aa, Gammaproteobacteria bacterium
  misc_feature (1)..(281): tr|A0A1G0G8L4|A0A1G0G8L4_9GAMM NADPH-dependent 7-cyano- 7-deazaguanine reductase OS=Gammaproteobacteria bacteri um RIFCSPHIGHO2_02_FULL_39_13 OX=1798270 GN=queF PE=3 S V=1
MHITHTSPKHSTLGKKTDYKTQYDASLLFPIARENRRGTIGITNTLPFFGFDIWNHYEVSWLNQKGKPIVAIAHIIYPAASKNIIESKSLKLYFNSFNNTCFESLASVKKTIERDLLESLETELIAVTITPTAVFSEEKLQSHLNGIGLDELDIDFDIYRNDPTLLMTENEWVEETLYSDLLRSNCLITNQPDWCSVQINYKGKKINHAGLLRYLVSFRNDNEFHEHCIEKIFMHIMQRCNPTELTVYGRSTRRGGLDINSYRSTKPVKIDEIRNIRLCRQ

SEQ ID NO: 46111 - protein, 273 aa, Gammaproteobacteria bacterium
  misc_feature (1)..(273): tr|A0A1G0IXY4|A0A1G0IXY4_9GAMM NADPH-dependent 7-cyano- 7-deazaguanine reductase OS=Gammaproteobacteria bacteri um RIFCSPLOWO2_02_FULL_38_11 OX=1798293 GN=queF PE=3 SV =1
MLKNSELGKKTKYESSYNPHLLFPIARQGKRNEIGISDDLPFVGFDLWNHYEVSWLNEKGKPIVAIAEIIYPCESPFIIESKSKKLYFNSLNNTKFKNTAALQVLFEKDLSEKAGANVKVKITELNKIKEGKTYPGIEGVCLDELDVSCSVYTVDASFLVTESIFTEEILFSNLLKSNCLVTHQPDWASVQIAYKGEKINHEGLLKYLISFRNHNEFHEQCIERIFMDMMKQCQPQELSVYGRYTRRGGLDINVYRGTKNRDLVVSNQRLVRQ

SEQ ID NO: 46112 - protein, 139 aa, Geitlerinema sp.
  misc_feature (1)..(139): tr|K9S9G5|K9S9G5_9CYAN NADPH-dependent 7-cyano-7-deazag uanine reductase OS=Geitlerinema sp. PCC 7407 OX=117302 5 GN=queF PE=3 SV=1
MQSEQLAENSTATSETSGVKYGERAIAEGELITFPNPRVGRRYNVNVTLPEFTCKCPFSGYPDFATIHITYVPDERVVELKALKLYINSYRDRYISHEESVNQILDDFVAACDPLEVHIKGDFSPRGNVHTVIEVTHKK

SEQ ID NO: 46113 - protein, 133 aa, Geminocystis sp.
  misc_feature (1)..(133): tr|A0A0D6ARA0|A0A0D6ARA0_9CHRO NADPH-dependent 7-cyano- 7-deazaguanine reductase OS=Geminocystis sp. NIES-3709 OX=1617448 GN=queF PE=3 SV=1
MSENKFSEVKYGERAIEDGNLITFPNPRPGRVYDVSITLPEFTCKCPFSGYPDFATIYINYSPDEKVVELKAIKLYINSYRDRYISHEESVNQILDDFVEACDPLSITVKGDFYPRGNVHTVIEVKHNKALSF

SEQ ID NO: 46114 - protein, 131 aa, Geminocystis sp.
  misc_feature (1)..(131): tr|A0A0D6AFF8|A0A0D6AFF8_9CHRO NADPH-dependent 7-cyano- 7-deazaguanine reductase OS=Geminocystis sp. NIES-3708 OX=1615909 GN=queF PE=3 SV=1
MSENQFSEVKYGERAIEEGSLITFANPRPGRVYNVSITLPEFTCKCPFSGYPDFATIYINYSPDEKVVELKAIKLYINSYRDRYISHEESINQILDDFVSACDPLSITVKGDFYPRGNVHTVIEVKHDKNK

SEQ ID NO: 46115 - protein, 121 aa, Gemmata obscuriglobus
  misc_feature (1)..(121): tr|A0A2Z3HLV5|A0A2Z3HLV5_9BACT NADPH-dependent 7-cyano- 7-deazaguanine reductase OS=Gemmata obscuriglobus OX=11 4 GN=queF PE=3 SV=1
MTETPSVEQLETFPNPRPGREFAVEIVCPEFTSVCPKTGQPDFGTITFTYTPAETCVELKSLKLYLQRFRNQGIFYEQVTNRLLDDFVAACNPVRCKVVSVWTPRGGISTTVTCNFEAQKS

SEQ ID NO: 46116 - protein, 125 aa, Gemmata sp.
  misc_feature (1)..(125): tr|A0A142X746|A0A142X746_9BACT NADPH-dependent 7-cyano- 7-deazaguanine reductase OS=Gemmata sp. SH-PL17 OX=1630 693 GN=queF PE=3 SV=1
MELTETPSVEQLETFPNPRPGREFSIEIVCPEFTSVCPKTGQPDFGTITFTYTPGDTCVELKSLKLYLQRFRNQGIFYEQVTNRLLDDFVAACKPVRCKVVSVWTPRGGITTTVTCVHEANERPA

SEQ ID NO: 46117 - protein, 126 aa, Gemmataceae bacterium
  misc_feature (1)..(126): tr|A0A5C1A8A0|A0A5C1A8A0_9BACT NADPH-dependent 7-cyano- 7-deazaguanine reductase OS=Gemmataceae bacterium PX52 OX=2598579 GN=queF PE=3 SV=1
MDFTETPSADQLETFPNPKPGRDYSIEIICPEFTSVCPKTGQPDYGTIVFTYTPGEKCVELKSLKLYLQRFRNQGIFYEQVTNRLLDDFVEASQPVRCVVVSKWTPRGGISTNVTASYTAEQTRPG

SEQ ID NO: 46118 - protein, 123 aa, Gemmataceae bacterium
  misc_feature (1)..(123): tr|A0A4V6M0V4|A0A4V6M0V4_9BACT NADPH-dependent 7-cyano- 7-deazaguanine reductase OS=Gemmataceae bacterium OX=20 52164 GN=queF PE=3 SV=1
MAPTETPSASQLETFPNPRPERDFTIEIVCPEFTSVCPKTGQPDFGTITFTYTPAASCVELKSLKLYLQQYRTRGIFYEQVTNQLLDDFVAACRPRRCQVVSVWTPRGGISTNVTCVYEAAAG

SEQ ID NO: 46119 - protein, 132 aa, Gemmatimonadaceae bacterium
  misc_feature (1)..(132): tr|A0A1V4RKU8|A0A1V4RKU8_9BACT NADPH-dependent 7-cyano- 7-deazaguanine reductase OS=Gemmatimonadaceae bacterium 4484_173 OX=1956166 GN=queF PE=3 SV=1
MTNDLNELSLLGRSTDEFRGLEAFPNRNLQRDYTVTLSTDEFTCVCPKTGQPDFATVTITYIPDKRIVESKSLKLYFQTYRNRGVFHEHVTNMILDDLVEAIHPRWCRVQADFGVRGGISITVEAEYTGDRD

SEQ ID NO: 46120 - protein, 118 aa, Gemmatimonadaceae bacterium
  misc_feature (1)..(118): tr|A0A2E8H4Z7|A0A2E8H4Z7_9BACT NADPH-dependent 7-cyano- 7-deazaguanine reductase OS=Gemmatimonadaceae bacterium OX=2026741 GN=queF PE=3 SV=1
MSDTPEELLEHFPNPNPGREFTIDIDCPEFTSVCPKTGHPDFGTIHITYVPDERCIELKSLKLYLQSYRQRGIFYEAATNVILDHLVTACAPRRMTVTGDFSARGGITTKVTAAYPAP

SEQ ID NO: 46121 - protein, 130 aa, Gemmatimonadales bacterium
  misc_feature (1)..(130): tr|A0A524H0G4|A0A524H0G4_9BACT NADPH-dependent 7-cyano- 7-deazaguanine reductase OS=Gemmatimonadales bacterium OX=2448054 GN=queF PE=3 SV=1
MATPDGRSLPFVGPEHVNVAVLETFPYDGPAQEIVTTTDEFSAVCPYSGLPDFATLTVMYVPGESCIELKSLKYYVTSYRSVGIYQEHATAKIAEDLFTVLTPRSLTVQTEYNVRGGFLTTCSVTLPTPG

SEQ ID NO: 46122 - protein, 135 aa, Gemmatimonadetes bacterium
  misc_feature (1)..(135): tr|A0A2V7QQ46|A0A2V7QQ46_9BACT NADPH-dependent 7-cyano- 7-deazaguanine reductase OS=Gemmatimonadetes bacterium OX=2026742 GN=queF PE=3 SV=1
MTSQPPRLPRTGPLPRPSSPTEAREYLKAEAFPAPDVRTVTLTATEFTSICPRTGQPDFGSVTIEYTPGERCLESKALKYYLWSYRDEGAFCESLAARIADDIVYAIRPRTLSVHVNQNVRGGIALVALAVREGT

SEQ ID NO: 46123 - protein, 122 aa, Gemmatimonadetes bacterium
  misc_feature (1)..(122): tr|A0A1Q7AC81|A0A1Q7AC81_9BACT NADPH-dependent 7-cyano- 7-deazaguanine reductase OS=Gemmatimonadetes bacterium 13_2_20CM_2_69_23 OX=1805204 GN=queF PE=3 SV=1
MRSRPSKRLQTFPNPAPGRDYRIHMEISEFTCVCPMTGQPDFGTLLLEYVPDRTCVELKSLKLYIWSYRDQGAFHEAVTNAILDDLVAATKPRYLRLEARFNVRGGIHTSVVAEHRKRGWKA

SEQ ID NO: 46124 - protein, 131 aa, Gemmatimonas aurantiaca
  misc_feature (1)..(131): tr|A0A3D4VEB1|A0A3D4VEB1_9BACT NADPH-dependent 7-cyano- 7-deazaguanine reductase OS=Gemmatimonas aurantiaca OX= 173480 GN=queF PE=3 SV=1
MPKPELLEKFPNPYADRDYEIYMETDEFTSLCPLGGVETDAIELKLLEGGAPDFATIRITYTPDVHCVELKSLKLYFWSFRNDGIFYERVVNRILDDLVEAVSPRALTVVGDFKVRGGLKSIITAKYVKGQ

SEQ ID NO: 46125 - protein, 131 aa, Gemmatimonas aurantiaca; identical to SEQ ID NO: 46124
  misc_feature (1)..(131): tr|C1AEK8|C1AEK8_GEMAT NADPH-dependent 7-cyano-7-deazag uanine reductase OS=Gemmatimonas aurantiaca (strain T-2 7 / DSM 14586 / JCM 11422 / NBRC 100505) OX=379066 GN=q ueF PE=3 SV=1

SEQ ID NO: 46126 - protein, 130 aa, Gemmatimonas phototrophica
  misc_feature (1)..(130): tr|A0A143BP54|A0A143BP54_9BACT NADPH-dependent 7-cyano- 7-deazaguanine reductase OS=Gemmatimonas phototrophica OX=1379270 GN=queF PE=3 SV=1
MPKPQLLETFPNPYADRKYEIYMETNEFTSLCPLGGVETDAAELKLLEGGAPDFATIKITYTPAEKCLELKSLKLYFWSFRNDGIFYERAVNHIMDDLVAACQPHALTVVGDFNVRGGLKSIITASYTRD

SEQ ID NO: 46127 - protein, 134 aa, Gemmatimonas sp.
  misc_feature (1)..(134): tr|A0A0S8AJ58|A0A0S8AJ58_9BACT NADPH-dependent 7-cyano- 7-deazaguanine reductase OS=Gemmatimonas sp. SG8_28 OX= 1703357 GN=queF PE=3 SV=1
MTSDANRVPERGPLPKPSGPDEAREYLKASAFPAPDVQTVTMTGTEFTSVCPKTGQPDFGTVTIEYVPDVRCIESRALKYYLWSFRDEPAFVETVAARIADDVVYAIAPRRVTVQVTQNVRGGIAIVATATRGT

SEQ ID NO: 46128 - protein, 134 aa, Gemmatimonas sp.
  misc_feature (1)..(134): tr|A0A0S7ZJC3|A0A0S7ZJC3_9BACT NADPH-dependent 7-cyano- 7-deazaguanine reductase OS=Gemmatimonas sp. SG8_17 OX= 1703355 GN=queF PE=3 SV=1
MTKKDIPLSGPLPTPSNPGEAREVLKASAFEAPDVQSITMEATEFTALCPRTGQPDFGTVTIEYIPADLCIESKSLKYYLWSYRNEGVFCESIAAQIAEDVMYAVRPKAVEVEVTQNIRGGIGIVARAVRGGFE

SEQ ID NO: 46129 - protein, 131 aa, Gemmatirosa kalamazoonesis
  misc_feature (1)..(131): tr|W0RDM8|W0RDM8_9BACT NADPH-dependent 7-cyano-7-deazag uanine reductase OS=Gemmatirosa kalamazoonesis OX=86129 9 GN=queF PE=3 SV=1
MPKPEILETFPNPYPDRDYDIYMESAEFTSLCPLGGIEGDATDLKALEGGAPDFATIRIRYVPAEVCVELKSLKLYLWSFRNDGIFYERAVNRILDDLAAAVQPKRMEVTGDFNVRGGIKSVITARWPLER

SEQ ID NO: 46130 - protein, 154 aa, Gemmobacter aquatilis
  misc_feature (1)..(154): tr|A0A1H8L4Z7|A0A1H8L4Z7_9RHOB NADPH-dependent 7-cyano- 7-deazaguanine reductase OS=Gemmobacter aquatilis OX=93 3059 GN=queF PE=3 SV=1
MSETIYSGLQQLGSPTSMPASPEAAVLEKVANPQAGQRYVVRFTAPEFTSLCPMTGQPDFAHLVIDYIPRDWLVESKSLKLFLFSFRNHGAFHEDCTVSIARRLVDLLQPEWLRIGGYWYPRGGIPIDVFWQSGAAPADVWIPDQGVPPYRGRG

SEQ ID NO: 46131 - protein, 114 aa, Geobacillus galactosidasius
  misc_feature (1)..(114): tr|A0A226QS01|A0A226QS01_9BACI NADPH-dependent 7-cyano- 7-deazaguanine reductase OS=Geobacillus galactosidasius OX=883812 GN=queF PE=3 SV=1
MLKQRPKTGQPDFATIYISYIPDKKCVESKSLKLYLFSFRNHGDFHEDCVNIIMNDLIKVMEPRYIEVWGKFTPRGGISIDPYCNWGRPGTKYEKMAEYRLMNHDLYPEKVDNR

SEQ ID NO: 46132 - protein, 165 aa, Geobacillus kaustophilus; identical to SEQ ID NO: 44028
  misc_feature (1)..(165): sp|Q5L1B7|QUEF_GEOKA NADPH-dependent 7-cyano-7-deazagua nine reductase OS=Geobacillus kaustophilus (strain HTA4 26) OX=235909 GN=queF PE=1 SV=1

SEQ ID NO: 46133 - protein, 165 aa, Geobacillus kaustophilus; identical to SEQ ID NO: 44028
  misc_feature (1)..(165): tr|U2Y288|U2Y288_GEOKU NADPH-dependent 7-cyano-7-deazag uanine reductase OS=Geobacillus kaustophilus GBlys OX=1 337888 GN=queF PE=3 SV=1

SEQ ID NO: 46134 - protein, 165 aa, Geobacillus lituanicus
  misc_feature (1)..(165): tr|A0A223DZ16|A0A223DZ16_9BACI NADPH-dependent 7-cyano- 7-deazaguanine reductase OS=Geobacillus lituanicus OX=1 69283 GN=queF PE=3 SV=1
MAGRKEEELKDLTLLGRQGTTYSFTYNPHLLEVFDNKHPDRDYFVKFNCPEFTSLCPKTGQPDFATIYISYIPDKKCVESKSLKLYLFSFRNHGDFHEDCVNIIMNDLIKVMEPRYIEVWGKFTPRGGISIDPYCNWGRPGTKYEKMAEYRLLNHDLYPEKVDNR

SEQ ID NO: 46135 - protein, 165 aa, Geobacillus proteiniphilus; identical to SEQ ID NO: 44028
  misc_feature (1)..(165): tr|A0A1Q5T7S5|A0A1Q5T7S5_9BACI NADPH-dependent 7-cyano- 7-deazaguanine reductase OS=Geobacillus proteiniphilus OX=860353 GN=queF PE=3 SV=1

SEQ ID NO: 46136 - protein, 165 aa, Geobacillus sp.
  misc_feature (1)..(165): tr|L7ZXI7|L7ZXI7_9BACI NADPH-dependent 7-cyano-7-deazag uanine reductase OS=Geobacillus sp. GHH01 OX=1233873 GN =queF PE=3 SV=1
MAGRKEEELKDLTLLGNQGTTYSFTYNPNLLEVFDNKHPDRDYFVKFNCPEFTSLCPKTGQPDFATIYISYIPDKKCVESKSLKLYLFSFRNHGDFHEDCVNIIMNDLIKVMEPRYIEVWGKFTPRGGISIDPYCNWGRPGTKYEKIAEYRLLNHDLYPEKVDNR

SEQ ID NO: 46137 - protein, 165 aa, Geobacillus sp.
  misc_feature (1)..(165): tr|A0A4V1NUI5|A0A4V1NUI5_9BACI NADPH-dependent 7-cyano- 7-deazaguanine reductase OS=Geobacillus sp. PK12 OX=250 8525 GN=queF PE=3 SV=1
MAGRKEEELKDLTLLGHQGTTYSFTYNPNLLEVFDNKHPDRDYFVKFNCPEFTSLCPKTGQPDFATIYISYIPDKKCVESKSLKLYLFSFRNHGDFHEDCVNIIMNDLIKVMEPRYIEVWGKFTPRGGISIDPYCNWGRPGTKYEKIAEYRLLNHDLYPEKVDNR

SEQ ID NO: 46138 - protein, 165 aa, Geobacillus stearothermophilus
  misc_feature (1)..(165): tr|A0A0K9HJ92|A0A0K9HJ92_GEOSE NADPH-dependent 7-cyano- 7-deazaguanine reductase OS=Geobacillus stearothermophi lus OX=1422 GN=queF PE=3 SV=1
MAGRKEEELKDLTLLGHQGTTYSFTYNPNLLEVFDNKHPDRDYFVKFNCPEFTSLCPKTGQPDFATIYISYIPDKKCVESKSLKLYLFSFRNHGDFHEDCVNIIMNDLIKVMEPRYIEVWGKFTPRGGISIDPYCNWGRPGTKYEKMAEYRLLNHDLYPEKVDNR

SEQ ID NO: 46139 - protein, 165 aa, Geobacillus stearothermophilus
  misc_feature (1)..(165): tr|A0A0K2HB46|A0A0K2HB46_GEOSE NADPH-dependent 7-cyano- 7-deazaguanine reductase OS=Geobacillus stearothermophi lus 10 OX=272567 GN=queF PE=3 SV=1
MAGRKEEELKDLTLLGNQGTTYSFTYNPNLLEVFDNKHPDRDYFVKFNCPEFTTLCPKTGQPDFATIYITYIPDKKCVESKSLKLYLFSFRNHGDFHEDCVNIIMNDLIKVMEPRYIEVWGKFTPRGGISIDPYCNWGRPGTKYEKMAEYRLLNHDLYPEKVDNR

SEQ ID NO: 46140 - protein, 165 aa, Geobacillus thermocatenulatus; identical to SEQ ID NO: 46138
  misc_feature (1)..(165): tr|A0A226Q2G6|A0A226Q2G6_9BACI NADPH-dependent 7-cyano- 7-deazaguanine reductase OS=Geobacillus thermocatenulat us OX=33938 GN=queF PE=3 SV=1

SEQ ID NO: 46141 - protein, 165 aa, Geobacillus thermodenitrificans
  misc_feature (1)..(165): tr|A0A1W6VPR7|A0A1W6VPR7_GEOTD NADPH-dependent 7-cyano- 7-deazaguanine reductase OS=Geobacillus thermodenitrifi cans OX=33940 GN=queF PE=3 SV=1
MNGRKDEELKDLTLLGNQGTTYSFTYDPNLLEVFDNKHPDRDYFVKFNCPEFTSLCPKTRQPDFATIYISYIPDKKCVESKSLKLYLFSFRNHGDFHEDCVNIIMNDLINVMEPRYIEVWGKFTPRGGISIDPYCNWGRPGTKYEKMAEYRLLNHDLYPEKIDNR

SEQ ID NO: 46142 - protein, 165 aa, Geobacillus thermodenitrificans; identical to SEQ ID NO: 46141
  misc_feature (1)..(165): sp|A4ILP0|QUEF_GEOTN NADPH-dependent 7-cyano-7-deazagua nine reductase OS=Geobacillus thermodenitrificans (stra in NG80-2) OX=420246 GN=queF PE=3 SV=1

SEQ ID NO: 46143 - protein, 165 aa, Geobacillus thermoleovorans; identical to SEQ ID NO: 44028
  misc_feature (1)..(165): tr|G8MYT1|G8MYT1_GEOTH NADPH-dependent 7-cyano-7-deazag uanine reductase OS=Geobacillus thermoleovorans CCB_US3 _UF5 OX=1111068 GN=queF PE=3 SV=1

SEQ ID NO: 46144 - protein, 165 aa, Geobacillus thermoleovorans; identical to SEQ ID NO: 44028
  misc_feature (1)..(165): tr|A0A098L5X3|A0A098L5X3_GEOTH NADPH-dependent 7-cyano- 7-deazaguanine reductase OS=Geobacillus thermoleovorans B23 OX=1406857 GN=queF PE=3 SV=1

SEQ ID NO: 46145 - protein, 165 aa, Geobacillus zalihae; identical to SEQ ID NO: 46136
  misc_feature (1)..(165): tr|A0A1V9CQG0|A0A1V9CQG0_9BACI NADPH-dependent 7-cyano- 7-deazaguanine reductase OS=Geobacillus zalihae OX=2134 19 GN=queF PE=3 SV=1

SEQ ID NO: 46146 - protein, 142 aa, Geobacter argillaceus
  misc_feature (1)..(142): tr|A0A562VNV4|A0A562VNV4_9DELT NADPH-dependent 7-cyano- 7-deazaguanine reductase OS=Geobacter argillaceus OX=34 5631 GN=queF PE=3 SV=1
MELHDNLKSLGQGATHYRYDQPDAGLLESFPNPFAMPERNPAGAVGTIHIECPEFTSLCPLTGQPDFARIVIDYQPDQHCVESKSLKLYLGSFRMHGEFHESCVNRICNDLVRLLDPVWLTVRGEFTPRGGIPFWPTAEYRR

SEQ ID NO: 46147 - protein, 144 aa, Geobacter lovleyi
  misc_feature (1)..(144): tr|B3E3W5|B3E3W5_GEOLS NADPH-dependent 7-cyano-7-deazag uanine reductase OS=Geobacter lovleyi (strain ATCC BAA- 1151 / DSM 17278 / SZ) OX=398767 GN=queF PE=3 SV=1
MKLHEGLKTLGEGKATTYSYDAPDAGLLEWFPSPYVDPELNPCGCTGTLHISCPEFTCLCPMTGQPDFGTIIIDYQPDQRCVESKSLKLYLGSFRMHGEFHEAGVNRICNDLVKLLDPVWLTVKGEFTPRGGIPFWPTAEYRKG

SEQ ID NO: 46148 - protein, 144 aa, Geobacter sp.
  misc_feature (1)..(144): tr|A0A399I5Q0|A0A399I5Q0_9DELT NADPH-dependent 7-cyano- 7-deazaguanine reductase OS=Geobacter sp. OX=46610 GN=q ueF PE=3 SV=1
MKLHEDLKALGTGGKTTYTYDHPDAGLLEAFPSPFAEPVLNPAGVIGTIHIECPEFTCLCPMTGQPDFAKIVIDYQPDRLCVESKSLKLYLGSFRMHGEFHEAGVNRICNDLVKLLDPLHVTVRGEFTPRGGIPFWPTAEYRKK

SEQ ID NO: 46149 - protein, 143 aa, Geobacter sp.
  misc_feature (1)..(143): tr|A0A5C1M9N7|A0A5C1M9N7_9DELT NADPH-dependent 7-cyano- 7-deazaguanine reductase OS=Geobacter sp. FeAm09 OX=259 7769 GN=queF PE=3 SV=1
MALHENLKSLGAGATAYRYDRPDAGLLESFPSPFAQPDMNPAGAVGTLHIECPEFTCLCPMTGQPDFAKIVIDYQPDRLCVESKSLKLYLGSFRMHGEFHEASVNRICNDLVKLLEPAWLTVRGEFTPRGGIPFWPTAEYRKE

SEQ ID NO: 46150 - protein, 144 aa, Geobacter thiogenes
  misc_feature (1)..(144): tr|A0A1T4Q844|A0A1T4Q844_9DELT NADPH-dependent 7-cyano- 7-deazaguanine reductase OS=Geobacter thiogenes OX=1157 83 GN=queF PE=3 SV=1
MELHEGLKTLGEGKATTYCYDAPDAGLLEWFPSPYANPELNPCGCTGTLHISCPEFTCLCPMTGQPDFGTIIIDYQPDQRCVESKSLKLYLGSFRMHGEFHEAGVNRICNDLVKLMDPVWLRVKGEFTPRGGIPFWPTAEYRKA

SEQ ID NO: 46151 - protein, 143 aa, Geobacteraceae bacterium
  misc_feature (1)..(143): tr|A0A1G0LBX2|A0A1G0LBX2_9DELT NADPH-dependent 7-cyano- 7-deazaguanine reductase OS=Geobacteraceae bacterium GW B2_52_12 OX=1798314 GN=queF PE=3 SV=1
MALHEQLKSLGSSETTYRYDKPDAGLLESFPNPFAREELNPAGAVGPIHIECPEFTSLCPLTGQPDFAKIVIDYQPDQLCVESKSLKLYLGSFRMHGEFHESCVNRICNDLVKLLEPVWMTVRGEFTPRGGIPFWPTAEYRKK

SEQ ID NO: 46152 - protein, 144 aa, Geobacteraceae bacterium
  misc_feature (1)..(144): tr|A0A1G0LYI2|A0A1G0LYI2_9DELT NADPH-dependent 7-cyano- 7-deazaguanine reductase OS=Geobacteraceae bacterium GW C2_55_20 OX=1798317 GN=queF PE=3 SV=1
MELHEQLKSLGAGVTSYCYDKPDSALLEAFPSPFAQPEMNRVGAVGTLHIECPEFTCLCPMTGQPDFGKIVIDYQPAALCVESKSLKLYLGSFRMHGEFHEAGVNRICNDLAELLDPVWLTVRGEFTPRGGIPFWPTAEYRKKL

SEQ ID NO: 46153 - protein, 146 aa, Geofilum rubicundum
  misc_feature (1)..(146): tr|A0A0E9LTL7|A0A0E9LTL7_9BACT NADPH-dependent 7-cyano- 7-deazaguanine reductase OS=Geofilum rubicundum JCM 155 48 OX=1236989 GN=JCM15548_11052 PE=3 SV=1
MEKKILTYKDIDASLLKSLPNPTGEAYEIKIKIPEFTFLGVKEQPDFADVFLTFYPRKRIIELKSLKQYVYALRNITVSYERLINVFYDHVMEVYEPERVRVVMVFNPRGGISSKLTIDSDWKVRGGDEKFSDWKGNIEDQWSVTL

SEQ ID NO: 46154 - protein, 141 aa, Geofilum rubicundum
  misc_feature (1)..(141): tr|A0A0E9M1I2|A0A0E9M1I2_9BACT QueF_N domain-containing protein OS=Geofilum rubicundum JCM 15548 OX=1236989 GN =JCM15548_13767 PE=4 SV=1
MPVAGLLKLSYAADSEFLVESKSLKLYLNGFNMERMGSNASEGIDQILGTIKKDLSALLQTKVNLAFFDGDLKGAEDDFDAFSVLEKHPEVQDLRFTHFSETPSLLIPEENTHGMQKVATHLLRSNCKITHQRLGLSLYPY

SEQ ID NO: 46155 - protein, 169 aa, Geomicrobium sp.
  misc_feature (1)..(169): tr|A0A061N7E3|A0A061N7E3_9BACL NADPH-dependent 7-cyano- 7-deazaguanine reductase OS=Geomicrobium sp. JCM 19055 OX=1460649 GN=queF PE=3 SV=1
MVGRGKEDLPEITQLGNQGTKYSFEYDPGVLETFENNHPTRDYFVKFNTPEFTTLCPITGQPDFATVYISYIPDVKMVESKSLKLYLFSFRNHGDFHEDAMNIIVNDLVELMDPRYIEVWGKFTPRGGISIDPYVNYGKPGTKYEKWQSNDCSTMTCIQKRLQIVKKNR

SEQ ID NO: 46156 - protein, 165 aa, Geomicrobium sp.
  misc_feature (1)..(165): tr|A0A061NLY8|A0A061NLY8_9BACL NADPH-dependent 7-cyano- 7-deazaguanine reductase OS=Geomicrobium sp. JCM 19037 OX=1460634 GN=queF PE=3 SV=1
MAGRGKEDLPEITQLGNQGTAYSFEYDPAVLETFENQHQNRDYFVKFNTPEFTTLCPITGQPDFATLHISYIPDVKMVESKSLKLYLFSFRNHGDFHEDAINIIVNDLVELMDLRYIEVWGKFTPRGGISIDPYVNYGKPGTKFENMAEQRLLYHDLYPETITNR

SEQ ID NO: 46157 - protein, 167 aa, Geosporobacter ferrireducens
  misc_feature (1)..(167): tr|A0A1D8GL87|A0A1D8GL87_9CLOT NADPH-dependent 7-cyano- 7-deazaguanine reductase OS=Geosporobacter ferrireducen s OX=1424294 GN=queF PE=3 SV=1
MSMDGRTVKELEGVTLLGNQGVKYNYDYDPAVLESFVNKHPDNDYFVKFNCPEFTSLCPKTGQPDFATIYISYVPDNLLVESKSLKLYLLSFRNHGDFHEDCVNIIMKDLIKLLEPKYIEIWGKFTPRGGISIDPFCNYGKKGTKWEKVAEKRLYYHDMYPEKIDNR

SEQ ID NO: 46158 - protein, 276 aa, Geothermobacter ehrlichii
  misc_feature (1)..(276): tr|A0A5D3WI64|A0A5D3WI64_9DELT NADPH-dependent 7-cyano- 7-deazaguanine reductase OS=Geothermobacter ehrlichii O X=213224 GN=queF PE=3 SV=1
MDELEKRLPLGKATSYSTDYDPSLLCPVPRRLKRDEIGLAGELPFTGFDLWNAWELSWLDERGKPVVALGLFRFDCRTPNLVESKSLKLYCNSYNQTRLASMEAARLRIERDLAAAAGGRVEVRLFPPDVSDAFQIQTLPGECIDHLDIDVDRYALDPELLAGAADVGRVVERELHSHLLKSNCLVTGQPDWASVLIRYQGPRIDEEALLRYLISFRQHNEFHEQCVERIFVDLKRFCRPQRLTVHARYTRRGGLDINPFRSDFEQDMPNLRLVRQ

SEQ ID NO: 46159 - protein, 276 aa, Geothermobacter sp.
  misc_feature (1)..(276): tr|A0A1X0YBD2|A0A1X0YBD2_9DELT NADPH-dependent 7-cyano- 7-deazaguanine reductase OS=Geothermobacter sp. EPR-M O X=1969733 GN=queF PE=3 SV=1
MSDLELNLPLGKVSCYADVYDPGLLCPVPRSLKREELGLAEPLPFAGEDLWNAYELSWLNARGKPVVALGEFRFPCDSANLVESKSLKLYLNSFNQTRFDDFGQVRKTITADLSAAAGGTVQVSLEPVAGPGLLSVSTLPGRCIDDLDIAIDDYGLAPELLRGAADDERIVTETLHSHLLKSNCLVTGQPDWGSVLIRYRGPRIDPAALLRYLVSFRRHNEFHEQCVERIFVDLQRFCRPRQLTVYARYTRRGGLDINPFRSNFEVSAENLRLVRQ

SEQ ID NO: 46160 - protein, 276 aa, Geothermobacter sp.
  misc_feature (1)..(276): tr|A0A2K2H9X9|A0A2K2H9X9_9DELT NADPH-dependent 7-cyano- 7-deazaguanine reductase OS=Geothermobacter sp. HR-1 OX =654845 GN=queF PE=3 SV=1
MSDLELNLPLGKVSCYADVYDPGLLCPVPRRLKRDELGLAEPLPFAGEDLWNAYELSWLNARGKPVVALGEFRFPCDSANLVESKSLKLYLNSFNQTRFDDFGQVRKTIAADLSAAAGGTVQVSLAPVTGPGLLPVSALPGRCIDDLDIAIDDYGLAPELLRGAADDGRMVTETLHSHLLKSNCLVTGQPDWGSLLIRYRGPCIDPAALLRYLVSFRQHNEFHEQCVERIFADLQRFCRPQQLTVYARYTRRGGLDINPFRSNFEDSAENLRLVRQ

SEQ ID NO: 46161 - protein, 281 aa, Gibbsiella quercinecans
  misc_feature (1)..(281): tr|A0A250B3U8|A0A250B3U8_9ENTR NADPH-dependent 7-cyano- 7-deazaguanine reductase OS=Gibbsiella quercinecans OX= 929813 GN=queF PE=3 SV=1
MSTYQNNQALAGLKLGKPTAYHDQYDATLLQPVPRSLNREPLGLYPQSLPFHGADIWTLYELSWLNDKGLPQVAVGEISLNANSANLIESKSFKLYLNSFNQTRFDNWDAVHSTLQRDLAACAQGEVSVTLFRLEQLAGQPIAMLAGECIDEQDIAIDNYDFNAGYLQGANTGPLVEETLVSNLLKSNCLITNQPDWGSVQIQYRGPQIDRKALLRYLVSFRHHNEFHEQCVERIFNDVLRFCQPEQLSVYARYTRRGGLDINPWRSNTAFTPNAGRLARQ

SEQ ID NO: 46162 - protein, 283 aa, Giesbergeria anulus
  misc_feature (1)..(283): tr|A0A1H9I922|A0A1H9I922_9BURK NADPH-dependent 7-cyano- 7-deazaguanine reductase OS=Giesbergeria anulus OX=1801 97 GN=queF PE=3 SV=1
MSLNIPEHSQLGKASAYTDQYDPSLLFPLPRASKRSEIGITAAPPFFGADLWTAFELSWLNLRGKPQVALAHITVPCETPNLIESKSFKLYLNSLNNTRFADADEVQARIRADVSEAAWRGADRTATVGVKLLLPEVFDREPVHELDGLLLDRLDVECTRYQPAPDLLTAQFDQAPVSEVLVSHLLKSNCLVTGQPDWGSVQIAYSGPQIDQEGLLQYLVSFRNHHEFHEQCVERIFMDIRERCKPIKLTVYARYTRRGGLDINPLRTSHPQALPRNVRTARQ

SEQ ID NO: 46163 - protein, 157 aa, Gilliamella apicola
  misc_feature (1)..(157): tr|A0A242NGI3|A0A242NGI3_9GAMM NADPH-dependent 7-cyano- 7-deazaguanine reductase OS=Gilliamella apicola OX=1196 095 GN=queF PE=3 SV=1
MSNVTLLGDQSVRYPTTYSPEILETFDNKHPGNDYFVKFNCPEFTSLCPITGQPDFATIYISYVPNIKMVESKSLKLYLFSFRNHGDYHEDCINIIMKDLIKLMDPKYIEVWGKFTPRGGISIDPYANYGKADTRWEQIALNRLANHDLYPEKVDNR

SEQ ID NO: 46164 - protein, 157 aa, Gilliamella apicola; identical to SEQ ID NO: 46163
  misc_feature (1)..(157): tr|A0A081Y0T2|A0A081Y0T2_9GAMM NADPH-dependent 7-cyano- 7-deazaguanine reductase OS=Gilliamella apicola SCGC AB -598-B02 OX=1445513 GN=queF PE=3 SV=1

SEQ ID NO: 46165 - protein, 157 aa, Gilliamella apis
  misc_feature (1)..(157): tr|A0A2V4DRV4|A0A2V4DRV4_9GAMM NADPH-dependent 7-cyano- 7-deazaguanine reductase OS=Gilliamella apis OX=1970738 GN=queF PE=3 SV=1
MSNITLLGDQSVRYPTDYCPEILETFDNKHPGNDYFVKFNCPEFTSLCPITGQPDFATIYISYVPNIKMVESKSLKLYLFSFRNHGDYHEDCINIIMKDLIKLMDPKYIEVWGKFTPRGGISIDPYANYGKAGTDWQQIAVNRLANHDLYPEKIDNR

SEQ ID NO: 46166 - protein, 157 aa, Gilliamella apis
  misc_feature (1)..(157): tr|A0A242NV40|A0A242NV40_9GAMM NADPH-dependent 7-cyano- 7-deazaguanine reductase OS=Gilliamella apis OX=1970738 GN=queF PE=3 SV=1
MSNITLLGDQSVRYPTDYCPEILETFDNKHPENDYFVKFNCPEFTSLCPITGQPDFATIYISYVPNIKMVESKSLKLYLFSFRNHGDYHEDCINIIMKDLIKLMDPKYIEVWGKFTPRGGISIDPYVNYGKAGTDWQQIALNRLANHDLYPEKIDNR

SEQ ID NO: 46167 - protein, 157 aa, Gilliamella bombicola
  misc_feature (1)..(157): tr|A0A1C3YNP3|A0A1C3YNP3_9GAMM NADPH-dependent 7-cyano- 7-deazaguanine reductase OS=Gilliamella bombicola OX=17 98182 GN=queF PE=3 SV=1
MNKITLLGDQSVRYPTTYCPEILETFDNKHPNNDYFVKFNCPEFTSLCPITGQPDFATIYISYVPNIKMVESKSLKLYLFSFRNHGDYHEDCINIIMKDLIKLMDPKYIEVWGKFTPRGGISIDPYANYGKSGTHWQQVAANRLANHDMYPEKVDNR

SEQ ID NO: 46168 - protein, 157 aa, Gilliamella intestini
  misc_feature (1)..(157): tr|A0A1C3YXJ4|A0A1C3YXJ4_9GAMM NADPH-dependent 7-cyano- 7-deazaguanine reductase OS=Gilliamella intestini OX=17 98183 GN=queF PE=3 SV=1
MSKITLLGDQSVRYPTTYCSEILETFDNKHPNNDYFVKFNCPEFTSLCPITGQPDFATIYISYVPNIKMVESKSLKLYLFSFRNHGDYHEDCINIIMKDLIKLMDPKYIEVWGKFTPRGGISIDPYANYGKSGTHWEQVAANRLANHDMYPEKVDNR

SEQ ID NO: 46169 - protein, 157 aa, Gilliamella sp.
  misc_feature (1)..(157): tr|A0A242PF03|A0A242PF03_9GAMM NADPH-dependent 7-cyano- 7-deazaguanine reductase OS=Gilliamella sp. N-G2 OX=197 0471 GN=queF PE=3 SV=1
MSNITLLGDQSVRYPTDYCPEILETFDNKHPGNDYFVKFNCPEFTSLCPITGQPDFATIYISYVPNIKMVESKSLKLYLFSFRNHGDYHEDCINIIMKDLIKLMDPKYIEVWGKFTPRGGISIDPYANYGKAGTNWQQIAMNRLANHDLYPEKVDNR

SEQ ID NO: 46170 - protein, 157 aa, Gilliamella sp.; identical to SEQ ID NO: 46165
  misc_feature (1)..(157): tr|A0A242P1R9|A0A242P1R9_9GAMM NADPH-dependent 7-cyano- 7-deazaguanine reductase OS=Gilliamella sp. A7 OX=19704 65 GN=queF PE=3 SV=1

SEQ ID NO: 46171 - protein, 121 aa, Gimesia maris
  misc_feature (1)..(121): tr|A0A3D3RB42|A0A3D3RB42_9PLAN NADPH-dependent 7-cyano- 7-deazaguanine reductase OS=Gimesia maris OX=122 GN=que F PE=3 SV=1
MSENEASRELLETFENPHPHRDYVMETVCPEFTSVCPKTGQPDYGTLIITYIPDKVCFELKSLKMYLQSYRNVGAFYEDVTNRILDDLVAITDPRWMELRAEFTPRGGISSTVTVSHHKED

SEQ ID NO: 46172 - protein, 121 aa, Gimesia maris; identical to SEQ ID NO: 46171
  misc_feature (1)..(121): tr|A6C8E2|A6C8E2_9PLAN NADPH-dependent 7-cyano-7-deazag uanine reductase OS=Gimesia maris DSM 8797 OX=344747 GN =queF PE=3 SV=1

SEQ ID NO: 46173 - protein, 124 aa, Gimesia sp.
  misc_feature (1)..(124): tr|A0A2E2C387|A0A2E2C387_9PLAN NADPH-dependent 7-cyano- 7-deazaguanine reductase OS=Gimesia sp. OX=2024833 GN=q ueF PE=3 SV=1
MSDNEASRELLETFENPHPNRDYVMETVCPEFTSVCPKTGQPDFGTLIITYIPDKVCFELKSLKMYLQSYRNVGAFYEDVTNRILDDLVAATDPRWMELRAEFTPRGGISSTVTVSHHKEPSDD

SEQ ID NO: 46174 - protein, 124 aa, Gimesia sp.
  misc_feature (1)..(124): tr|A0A2E7KGR1|A0A2E7KGR1_9PLAN NADPH-dependent 7-cyano- 7-deazaguanine reductase OS=Gimesia sp. OX=2024833 GN=q ueF PE=3 SV=1
MSEADSPRSLLETFENPYHNRDYVMETVCPEFTSVCPKTGQPDFGTLIITYIPDQVCFELKSLKLYLQSYRNVGAFYEDVTNRIMDDLVAVTDPRWLELRAEFTPRGGISSTITVSHHKAGSGE

SEQ ID NO: 46175 - protein, 274 aa, Glaciecola nitratireducens
  misc_feature (1)..(274): tr|G4QM00|G4QM00_GLANF NADPH-dependent 7-cyano-7-deazag uanine reductase OS=Glaciecola nitratireducens (strain JCM 12485 / KCTC 12276 / FR1064) OX=1085623 GN=queF PE= 3 SV=1
MDHLSLGKKVEYAQEYDNSLLQGVPRSLSRDSIKLPAQLPFHGTDIWNGYELSWLNAKGKPQVAILRCEVPITSPNLIESKSFKLYLNSLNQSRFASVNAVMQVLENDLSECAGDSVAVHVIPSSQFDSIQFGQFTGTCIDELDIEVNDFAITPELLKPSTTARTEIVCSETLVSHLLKSNCLITNQPDWGSILIKYTGTQISHEGLLRYLISFRQHNEFHEQCVERIFYDILQQCQPQQLTVYARYTRRGGLDINPFRSNFEAPYADARLARQ

SEQ ID NO: 46176 - protein, 274 aa, Glaciecola pallidula
  misc_feature (1)..(274): tr|K6ZHT3|K6ZHT3_9ALTE NADPH-dependent 7-cyano-7-deazag uanine reductase OS=Glaciecola pallidula DSM 14239 = AC AM 615 OX=1121922 GN=queF PE=3 SV=1
MDHLSLGKKVEYAKEYDNSLLQRVPRSLSRDSIKLPTQLPFHGTDIWNGYELSWLNAKGKPQVAILRCEVPITSPNLIESKSFKLYLNSLNQSQFAHIDDVTQILHKDLSECAGANVSVQVIPSAQFEGVTFGRLPGVCIDDLDIEITDFDITPRLLALKTNTQTEGTCSETLVSHLLKSNCLITNQPDWGSILIKYTGCQISHEGLLRYLISFRQHNEFHEQCVERIFYDILQQCKPQELTVYARYTRRGGLDINPFRSNFEAPYQDARLARQ

SEQ ID NO: 46177 - protein, 310 aa, Glaciecola punicea
  misc_feature (1)..(310): tr|H5TB53|H5TB53_9ALTE NADPH-dependent 7-cyano-7-deazag uanine reductase OS=Glaciecola punicea ACAM 611 OX=1121 923 GN=queF PE=3 SV=1
MHEYFVIIPNCDAFSNTRDMLVNDIRYLYTEKRLDHLVLGKTTAYAQHYDASLLQQVPRSLSRDTINLPLELPFTGVDTWNAYEVSWLNTKGKPVVAIMQCDVPIDSANLIESKSFKLYLNSFNQTRFASEEEVLGLMQKDLSACAGRPVELSLVPCAAFANIRIGDLPSHANADFPACVIDDLDIAIDDYNLSASSLTTHNEVVSETLISHLLKSNCLITNQPDWGSVQIRYSGKQIDKESVLRYLISFRQHNEFHEQCVERIFYDILTHCKPKKLSVYARYTRRGGLDINPFRSNFEAPYNNVRLARQ

SEQ ID NO: 46178 - protein, 274 aa, Glaciecola sp.
  misc_feature (1)..(274): tr|A0A2N1HX20|A0A2N1HX20_9ALTE NADPH-dependent 7-cyano- 7-deazaguanine reductase OS=Glaciecola sp. 33A OX=20578 07 GN=queF PE=3 SV=1
MDHLSLGKKVEYAKEYDNSLLQRVPRSLSRDSIKLPTQLPFHGTDIWNGYELSWLNAKGKPQVAILRCEVPITSPNLIESKSFKLYLNSLNQSQFANIDDVAQILHADLSECAGANVSVQVIPSAQFEHVTFGHLPGMCIDDLDIEITDFDITPELLALKTDTQTEGTCSETLVSHLLKSNCLITNQPDWGSILIKYTGCQISHEGLLRYLISFRQHNEFHEQCVERIFYDILQQCKPQQLTVYARYTRRGGLDINPFRSNFEAPYQDARLARQ

SEQ ID NO: 46179 - protein, 283 aa, Glaciecola sp.
  misc_feature (1)..(283): tr|A0A2Z6UD35|A0A2Z6UD35_GLASK NADPH-dependent 7-cyano- 7-deazaguanine reductase OS=Glaciecola sp. (strain KUL1 0) OX=2161813 GN=queF PE=3 SV=1
MPFDVNKNYIAEVTLQNLTLGKEVKYSDKYDPSLLQAVPRSLSRDAINLPKVLPFDGLDIWNGYELSWLNAKGKPVVAILRCEVPVSSTNLIESKSFKLYLNSFNQTKFHSLAQVQEHISNDLSECANAKVAVHIIPSEQFDSLQFGKFKGTLIDDLDIEINDFEINPELLTVCEEKTLETLVSHLLKSNCLITNQPDWGSIMIKYSGNKINHEGLLKYLISFRQHNEFHEQCVERIFHDIMTQCKPKQLTVYARYTRRGGLDINPFRSNFEAPYKDARLARQ

SEQ ID NO: 46180 - protein, 278 aa, Glaciimonas sp.
  misc_feature (1)..(278): tr|A0A2T6EZQ6|A0A2T6EZQ6_9BURK NADPH-dependent 7-cyano- 7-deazaguanine reductase OS=Glaciimonas sp. PCH181 OX=2 133943 GN=queF PE=3 SV=1
MTAPNTPEFSPLGKPAAYKAEYDPTLLFPIARQGKREEIGIHGTLPFFGVDIWNAYEVSWLNLRGKPQVAIATITAPADSPNIIESKSFKLYLNSFNQTKLADTEALLALLRTDLSLGFGATVQVILTTADMFSRQVIKEPQGLLLDRLDIEVTDYQPMPTLLKTDRHAVPVDETLVSHLLKSNCLVTGQPDWGSVQIHYIGTPIDQEGLLKYLISFRDHNEFHEQCVERIFMDIMQHCAPQKLSVYARYTRRGGLDINPWRCNFSGPPPSNLRQARQ

SEQ ID NO: 46181 - protein, 279 aa, Glaesserella parasuis
  misc_feature (1)..(279): tr|U4SMK6|U4SMK6_HAEPR NADPH-dependent 7-cyano-7-deazag uanine reductase OS=Glaesserella parasuis D74 OX=127597 1 GN=queF PE=3 SV=1
MNYNNECLSMLKLGKKTEYKSTYDPSLLQAVPRYLNRESLGIVKQQPFTVGADIWTLYELSWLNQNGVPQVAIADVIIDSSSSNIIESKSFKLYLNSFNQMRFPSREDVQRRIQSDLSKCAQGDVTVQIYKLSDFAMRSISEFNGECIDNQNICINRYDFTRESLQGIANGEIVEERLVSHLLKSNCLITSQPDWGSIQICYVGKQLDREKLLRYLVSFREHNEFHEQCVERIFCDLMEFAQPQKLTVYARYTRRGGLDINPFRSNFEGIPENLRMVRQ

SEQ ID NO: 46182 - protein, 279 aa, Glaesserella parasuis; identical to SEQ ID NO: 46181
  misc_feature (1)..(279): tr|A0A0E1RPM3|A0A0E1RPM3_HAEPR NADPH-dependent 7-cyano- 7-deazaguanine reductase OS=Glaesserella parasuis 29755 OX=456298 GN=queF PE=3 SV=1

SEQ ID NO: 46183 - protein, 279 aa, Glaesserella sp.
  misc_feature (1)..(279): tr|A0A328C1L8|A0A328C1L8_9PAST NADPH-dependent 7-cyano- 7-deazaguanine reductase OS=Glaesserella sp. HHC-2018 O X=2094024 GN=queF PE=3 SV=1
MNYNDESLAHLTLGQKTEYKSSYDPHLLQAVPRKLNRDSLGITEQQPFNAGADIWTLYELSWLNLNGVPQVAIADVSIDFRSQNLIESKSFKLYLNSFNQTRFASMNDVQQRLQHDLNQCASGQVSVNIYKLSDFTHQPIADFDGECIDDQDICIDSYQFSTSYLNDIASGDMVEETLVSHLLKSNCLITSQPDWGSVQIHYVGKRLDREKLLRYLVSFREHNEFHEQCVERIFCDLMQFATPEKLTVYARYTRRGGLDINPFRSNFETLPENRRMARQ

SEQ ID NO: 46184 - protein, 136 aa, Gloeobacter kilaueensis
  misc_feature (1)..(136): tr|U5QEU6|U5QEU6_9CYAN NADPH-dependent 7-cyano-7-deazag uanine reductase OS=Gloeobacter kilaueensis JS1 OX=1183 438 GN=queF PE=3 SV=1
MSDLPVASGTAEAVKYGERAIEEGRLITFPNPRPGRAYDIHITLPEFTCKCPFSGYPDFATIYLTYVPNEKVVELKSLKLYINNFRDRYISHEEAVHVILDDFVEASSPLRAAIKGDFNPRGNVHMVVEARYERPV

SEQ ID NO: 46185 - protein, 137 aa, Gloeobacter violaceus
  misc_feature (1)..(137): sp|Q7NFD3|QUEF_GLOVI NADPH-dependent 7-cyano-7-deazagua nine reductase OS=Gloeobacter violaceus (strain ATCC 29 082 / PCC 7421) OX=251221 GN=queF PE=3 SV=1
MSDLPVAPTPAEPVKYGERAIEAGQLITFPNPRPGRDYDIHITLPEFTCKCPFSGYPDFATIYLTYVPHEKVVELKALKLYVNSFRDRYISHEEVVHVVLDDFVAAADPLRVQIKGDFNPRGNVHMVVEARHTRPGT

SEQ ID NO: 46186 - protein, 186 aa, Gloeocapsa sp.
  misc_feature (1)..(186): tr|K9XC20|K9XC20_9CHRO NADPH-dependent 7-cyano-7-deazag uanine reductase OS=Gloeocapsa sp. PCC 7428 OX=1173026 GN=queF PE=3 SV=1
MVGMTTIVQIGSNTRNWQELWFMSNESSLVQSGTEASLAADNETVEQQKYGERHIAEGKLITFPNPRIGRWYNIYITLPEFTCKCPFSGYPDFATIYINYVPNERVVELKAIKLYINSYRDRYISHEESINQILDDFVAACDPLEVHIKGDFNPRGNVHTVIEVTHKREQTPAQSTILTRKESDLK

SEQ ID NO: 46187 - protein, 129 aa, Gloeocapsa sp.
  misc_feature (1)..(129): tr|L8LRL5|L8LRL5_9CHRO NADPH-dependent 7-cyano-7-deazag uanine reductase OS=Gloeocapsa sp. PCC 73106 OX=102232 GN=queF PE=3 SV=1
MTQSDIKYGERAIAEGSLITFPNPRVGRSYLVQITLPEFTCKCPFSGYPDFATIYLSYTPDQLIVELKALKLYINSYRDRYISHEEVVNQILDDFVEACDPLHATIKGDFSPRGNVHTVIEVQHHKNQP

SEQ ID NO: 46188 - protein, 147 aa, Gloeomargarita lithophora
  misc_feature (1)..(147): tr|A0A1J0AGS6|A0A1J0AGS6_9CYAN NADPH-dependent 7-cyano- 7-deazaguanine reductase OS=Gloeomargarita lithophora A lchichica-D10 OX=1188229 GN=queF PE=3 SV=1
MTPTPEPYGERLIREGTMITFPNPRPGRQYWIRMTLPEFTCKCPFSGYPDFATIYLDYIPDERVVELKSIKLYINGYRDKQIAHEAVANQILDDFVAVAAPLAVRLKADFNPRGNVHTVIDVAYPDSPMGQVLDQRLHLGTGQGAGE

SEQ ID NO: 46189 - protein, 138 aa, Gloeothece citriformis
  misc_feature (1)..(138): sp|B7KBA7|QUEF_GLOC7 NADPH-dependent 7-cyano-7-deazagua nine reductase OS=Gloeothece citriformis (strain PCC 74 24) OX=65393 GN=queF PE=3 SV=1
MSNSIEQQQTPEVPPLKYGEREIAKGELFTFPNPRIGRHYQIHITLPEFTCKCPFSGYPDFATIYLTYVPNEKVVELKAIKLYINNYRDLYISHEEAVNQILDDFVAACDPLEVQIKGDYNPRGNVHTVIEVNYQKAN

SEQ ID NO: 46190 - protein, 138 aa, Gloeothece verrucosa
  misc_feature (1)..(138): tr|E0U8J7|E0U8J7_GLOV7 NADPH-dependent 7-cyano-7-deazag uanine reductase OS=Gloeothece verrucosa (strain PCC 78 22) OX=497965 GN=queF PE=3 SV=1
MSNFTEQQPSAEAAQLKYGEREIAQGELFTFPNPRVGRHYHIQITLPEYTCKCPFSGYPDFATIYLTYVPNEKVVELKAIKLYINNYRDRYISHEEAINQILDDFVAACDPLEVQIKGDFNPRGNVHTVIEVNYKKPQ

SEQ ID NO: 46191 - protein, 159 aa, Gluconacetobacter diazotrophicus
  misc_feature (1)..(159): tr|A9H9B4|A9H9B4_GLUDA NADPH-dependent 7-cyano-7-deazag uanine reductase OS=Gluconacetobacter diazotrophicus (s train ATCC 49037 / DSM 5601 / PAl5) OX=272568 GN=queF P E=3 SV=1
MSAPTRPDDGSQTLTQLGQATIQPARPEDATLERVPAPHPGRRYVVRFTAPEFTSLCPVTGQPDFAHLVIDYIPDQWIVESKSLKLFLTSFRNHGAFHEACSIQIATTLVDLLSPVWLRIGAYWYPRGGMPIDVFWQTGPAPEGVWIPAQDVPGYRGRG

SEQ ID NO: 46192 - protein, 163 aa, Gluconacetobacter entanii
  misc_feature (1)..(163): tr|A0A318PV32|A0A318PV32_9PROT NADPH-dependent 7-cyano- 7-deazaguanine reductase OS=Gluconacetobacter entanii O X=108528 GN=queF PE=3 SV=1
MSSPTPSPARPDDGSQTLTQLGRNTTQPTSPEEAILERVPAPDADRRYVVRFTAPEFTSLCPVTGQPDFAHIVIDYIPRQWIVESKSLKLFLTSFRNHGAFHEKCSMQIATTLVDLLDPVWLRIGAYWYPRGGMPIDIFWQTGAPPEGAWIPPQDVSGYRGRG

SEQ ID NO: 46193 - protein, 159 aa, Gluconacetobacter liquefaciens
  misc_feature (1)..(159): tr|A0A370FX91|A0A370FX91_GLULI NADPH-dependent 7-cyano- 7-deazaguanine reductase OS=Gluconacetobacter liquefaci ens OX=89584 GN=queF PE=3 SV=1
MSASTPPDDGTQALTQLGRASAQPASPEDATLERVPAPYRDRRYLVRFTAPEFTSLCPVTGQPDFAHLVIDYVPDQWIVESKSLKLFLTSFRNHGAFHEACSVQIATTLVDLLSPVWLRIGAYWYPRGGMPIDVFWQTGAPPADVWIPAQDVPGYRGRG

SEQ ID NO: 46194 - protein, 165 aa, Gluconacetobacter sp.
  misc_feature (1)..(165): tr|F3S6B1|F3S6B1_9PROT NADPH-dependent 7-cyano-7-deazag uanine reductase OS=Gluconacetobacter sp. SXCC-1 OX=100 4836 GN=queF PE=3 SV=1
MPMDRFMNNPSPPDDGSRLLTQLGQNTAQPASPEEAELERVPAPERGRHYVVRFTAPEFTSLCPVTGQPDFAHIVIDYIPDEWIVESKSLKLFLTSFRNHGAFHEKCSMQIALTLVDLLRPVWLRIGAYWYPRGGMPIDVFWQTGTPPDGVWIPSQDVPGYRGRG

SEQ ID NO: 46195 - protein, 166 aa, Gluconobacter albidus
  misc_feature (1)..(166): tr|A0A149TGI9|A0A149TGI9_9PROT NADPH-dependent 7-cyano- 7-deazaguanine reductase OS=Gluconobacter albidus OX=31 8683 GN=queF PE=3 SV=1
MSDHQTDHHPTGPSAPGTDALSQLGRATTTPQSPEEAVLERVPSPHQGRQYVVRFTAPEFTSLCPVTGQPDFAHIVIDYIPGEWIVESKSLKLFLTSFRNHGAFHEDCSIAIAERLVALLNPQWLRIGAYWYPRGGIPIDVFWQTGEPPKGVWIPAQDVPGYRGRG

SEQ ID NO: 46196 - protein, 162 aa, Gluconobacter cerinus
  misc_feature (1)..(162): tr|A0A1B6VL82|A0A1B6VL82_9PROT NADPH-dependent 7-cyano- 7-deazaguanine reductase OS=Gluconobacter cerinus OX=38 307 GN=queF PE=3 SV=1
MSDHHPTGPSAPGTDALSQLGRNTPAANSPEEAVLERVPSPHQGRKYVVRFTAPEFTSLCPVTGQPDFAHIVIDYIPSKWIVESKSLKLYLTSFRNHGAFHEDCSVAIAERLVELLDPEWLRIGAYWYPRGGIPIDVFWQTGEPPAGVWIPSQDVPGYRGRG

SEQ ID NO: 46197 - protein, 162 aa, Gluconobacter frateurii
  misc_feature (1)..(162): tr|A0A0S6TL12|A0A0S6TL12_9PROT NADPH-dependent 7-cyano- 7-deazaguanine reductase OS=Gluconobacter frateurii NBR C 103465 OX=1307834 GN=queF PE=3 SV=1
MSNTTPTGPSAPGTDALSQLGRNTPAASCPEEAVLERVPSPHQGRKYVVRFTAPEFTSLCPVTGQPDFAHLVIDYIPSKWIVESKSLKLYLTSFRNHGAFHEDCSVAIAERLVELLDPEWLRIGAYWYPRGGIPIDVFWQTGEPPAGVWIPSQDVPGYRGRG

SEQ ID NO: 46198 - protein, 162 aa, Gluconobacter frateurii
  misc_feature (1)..(162): tr|A0A0K8N4Q1|A0A0K8N4Q1_9PROT NADPH-dependent 7-cyano- 7-deazaguanine reductase OS=Gluconobacter frateurii NBR C 101659 OX=1104996 GN=queF PE=3 SV=1
MSNTIPTGPSAPGTDALSQLGRNTPAASCPEEAVLERVPSPHQGRKYVVRFTAPEFTSLCPVTGQPDFAHIVIDYIPSKWIVESKSLKLYLTSFRNHGAFHEDCSVAIAERLVELLDPEWLRIGAYWYPRGGIPIDVFWQTGEPPAGVWIPSQDVPGYRGRG

SEQ ID NO: 46199 - protein, 162 aa, Gluconobacter japonicus
  misc_feature (1)..(162): tr|A0A149SFX1|A0A149SFX1_GLUJA NADPH-dependent 7-cyano- 7-deazaguanine reductase OS=Gluconobacter japonicus OX= 376620 GN=queF PE=3 SV=1
MSNTTPTGPSAPGTDALSQLGRNTPAASCPEEAVLERVPSPHQGRKYVVRFTAPEFTSLCPVTGQPDFAHIVIDYIPSKWIVESKSLKLYLTSFRNHGAFHEDCSVAIAERLVELLDPEWLRIGAYWYPRGGIPIDVFWQTGEPPAGVWIPSQDVPGYRGRG

SEQ ID NO: 46200 - protein, 162 aa, Gluconobacter japonicus
  misc_feature (1)..(162): tr|A0A149SK09|A0A149SK09_GLUJA NADPH-dependent 7-cyano- 7-deazaguanine reductase OS=Gluconobacter japonicus OX= 376620 GN=queF PE=3 SV=1
MSNTTPTGPSAPGTDALSQLGRNTPAANCPEEAVLERVPSPHQGRKYVVRFTAPEFTSLCPVTGQPDFAHIVIDYIPSKWIVESKSLKLYLTSFRNHGAFHEDCSVAIAERLVELLDPEWLRIGAYWYPRGGIPIDVFWQTGEPPAGVWIPSQDVPGYRGRG

SEQ ID NO: 46201 - protein, 162 aa, Gluconobacter kanchanaburiensis
  misc_feature (1)..(162): tr|A0A511B4F8|A0A511B4F8_9PROT NADPH-dependent 7-cyano- 7-deazaguanine reductase OS=Gluconobacter kanchanaburie nsis NBRC 103587 OX=1307948 GN=queF PE=3 SV=1
MSNHQPTGPSAPGTDALSQLGRATTTPQSPEEAVLERVPSPHQGRQYVVRFTAPEFTSLCPVTGQPDFAHIVIDYIPGEWIVESKSLKLFLTSFRNHGAFHEDCSIAIAERLVALLDPQWLRIGAYWYPRGGIPIDVFWQTGEPPKGVWIPAQDVPGYRGRG

SEQ ID NO: 46202 - protein, 182 aa, Gluconobacter morbifer
  misc_feature (1)..(182): tr|G6XF21|G6XF21_9PROT NADPH-dependent 7-cyano-7-deazag uanine reductase OS=Gluconobacter morbifer G707 OX=1088 869 GN=queF PE=3 SV=1
MTDKAAPHLTKTPSFFRNLSMSDHHPTGPSAPGTDALSQLGRQTAQPQSPDEAILERVPAPHQGRQYVVRFTAPEFTSLCPVTGQPDFAHIVIDYIPSEWIVESKSLKLFLTSFRNHGAFHEDCSVTIAERLVERLDPQWLRIGAYWYPRGGIPIDVFWQTGEPPKGVWIPAQDVPGYRGRG

SEQ ID NO: 46203 - protein, 162 aa, Gluconobacter oxydans
  misc_feature (1)..(162): tr|K7STR7|K7STR7_GLUOY NADPH-dependent 7-cyano-7-deazag uanine reductase OS=Gluconobacter oxydans H24 OX=122474 6 GN=queF PE=3 SV=1
MSDTTPTGPSAPGTDALSQLGRNTPAASCPEEAVLERVPSPHQGRKYVVRFTAPEFTSLCPVTGQPDFAHLVIDYIPSKWIVESKSLKLYLTSFRNHGAFHEDCSVAIAERLVELLDPEWLRIGAYWYPRGGIPIDVFWQTGEPPAGVWIPSQDVPGYRGRG

SEQ ID NO: 46204 - protein, 162 aa, Gluconobacter oxydans
  misc_feature (1)..(162): sp|Q5FT82|QUEF_GLUOX NADPH-dependent 7-cyano-7-deazagua nine reductase OS=Gluconobacter oxydans (strain 621H) O X=290633 GN=queF PE=3 SV=1
MSDHHPTGPSAPGTDALSQLGRATTTPQSPEEAVLERVPSPHQGRQYVVRFTAPEFTSLCPVTGQPDFAHIVIDYIPGEWIVESKSLKLFLTSFRNHGAFHEDCSIAIAERLVALLDPQWLRIGAYWYPRGGIPIDVFWQTGEPPKGVWIPAQDVPGYRGRG

SEQ ID NO: 46205 - protein, 162 aa, Gluconobacter roseus; identical to SEQ ID NO: 46204
  misc_feature (1)..(162): tr|A0A4Y3M578|A0A4Y3M578_9PROT NADPH-dependent 7-cyano- 7-deazaguanine reductase OS=Gluconobacter roseus NBRC 3 990 OX=1307950 GN=queF PE=3 SV=1

SEQ ID NO: 46206 - protein, 162 aa, Gluconobacter sp.; identical to SEQ ID NO: 46196
  misc_feature (1)..(162): tr|A0A252BLC7|A0A252BLC7_9PROT NADPH-dependent 7-cyano- 7-deazaguanine reductase OS=Gluconobacter sp. DsW_058 O X=1511210 GN=queF PE=3 SV=1

SEQ ID NO: 46207 - protein, 162 aa, Gluconobacter sphaericus; identical to SEQ ID NO: 46201
  misc_feature (1)..(162): tr|A0A4Y3QAC0|A0A4Y3QAC0_9PROT NADPH-dependent 7-cyano- 7-deazaguanine reductase OS=Gluconobacter sphaericus NB RC 12467 OX=1307951 GN=queF PE=3 SV=1

SEQ ID NO: 46208 - protein, 162 aa, Gluconobacter thailandicus
  misc_feature (1)..(162): tr|A0A149SLU2|A0A149SLU2_GLUTH NADPH-dependent 7-cyano- 7-deazaguanine reductase OS=Gluconobacter thailandicus OX=257438 GN=queF PE=3 SV=1
MSDTTPTGPSAPGTDALSQLGRNTPAASCPEEAVLERVPSPHQGRKYVVRFTAPEFTSLCPVTGQPDFAHIVIDYIPSKWIVESKSLKLYLTSFRNHGAFHEDCSVAIAERLVELLDPEWLRIGAYWYPRGGIPIDVFWQTGEPPAGVWIPSQDVPGYRGRG

SEQ ID NO: 46209 - protein, 162 aa, Gluconobacter thailandicus
  misc_feature (1)..(162): tr|A0A5C0A3J0|A0A5C0A3J0_GLUTH NADPH-dependent 7-cyano- 7-deazaguanine reductase QueF OS=Gluconobacter thailand icus OX=257438 GN=queF PE=4 SV=1
MSDTTPTGPSAPGTDALSQLGRNTPAASCPEEAVLERVPSPHQGRKYVVRFTAPEFTSLCPVTGQPDFAHLVIDYIPSQWIVESKSLKLYLTSFRNHGAFHEDCSVAIAKRLVELLDPEWLRIGAYWYPRGGIPIDVFWQTGEPPAGVWIPSQDVPGYRGRG

SEQ ID NO: 46210 - protein, 165 aa, Gluconobacter wancherniae
  misc_feature (1)..(165): tr|A0A511B0S5|A0A511B0S5_9PROT NADPH-dependent 7-cyano- 7-deazaguanine reductase OS=Gluconobacter wancherniae N BRC 103581 OX=656744 GN=queF PE=3 SV=1
MSEPVSPAPTGPSAPGTDALSQLGRQTVAPTCPEEAVLERVPAPHQDRKYVVRFTAPEFTSLCPVTGQPDFAHIVIDYIPGKWIVESKSLKLYLTSFRNHGAFHEDCSVTIASRLVELLDPQWLRIGAYWYPRGGMPIDVFWQTGAAPEGVWIPSQDVPGYRGRG

SEQ ID NO: 46211 - protein, 154 aa, Glycocaulis alkaliphilus
  misc_feature (1)..(154): tr|A0A3T0E8J1|A0A3T0E8J1_9RHOB NADPH-dependent 7-cyano- 7-deazaguanine reductase OS=Glycocaulis alkaliphilus OX =1434191 GN=queF PE=3 SV=1
MTEERYTSLEQLGAQTGAPESPEAARLERVSNPAPGNDYLIRFTCPEFTSICPVTGQPDFAHLVIDYVPGEWIVESKSLKLFLTSFRNHGAFHEACTMMIGQRLVDEIAPKWLRIGGYWYPRGGIPIDVFGQWGECPKGVWVPDQGVQPYRGRG

SEQ ID NO: 46212 - protein, 155 aa, Glycocaulis sp.
  misc_feature (1)..(155): tr|A0A550KN50|A0A550KN50_9RHOB NADPH-dependent 7-cyano- 7-deazaguanine reductase OS=Glycocaulis sp. ZYF765 OX=2 518983 GN=queF PE=3 SV=1
MTDQRYSDLDQLGSSTARAADRPEDASLESVANPHTQTDYLVRFAAPEFTSICPVTGQPDFAHLVIDYAPDQWIVESKSLKLFLQSFRNHGAFHEACTTMIGQRLVDALAPKWLRIGGYWYPRGGIPIDVFAQWGELPKGMWVPDQGVTPYRGRG

SEQ ID NO: 46213 - protein, 136 aa, Gracilibacillus boraciitolerans
  misc_feature (1)..(136): tr|W4VKS8|W4VKS8_9BACI NADPH-dependent 7-cyano-7-deazag uanine reductase OS=Gracilibacillus boraciitolerans JCM 21714 OX=1298598 GN=queF PE=3 SV=1
MSENYYLPRSGPMPRPENVEQGREVLKQEAFEAPNVQNITFRAQEFTAVCPKTGQPDFGTVEISYTPRHKCIESKSLKFYLWAYRDHGAFCESLAAQIADDIMWAIEAATVKVTVNQTARGGIELTTEALREYSNK

SEQ ID NO: 46214 - protein, 166 aa, Gracilibacillus dipsosauri
  misc_feature (1)..(166): tr|A0A317L4J5|A0A317L4J5_9BACI NADPH-dependent 7-cyano- 7-deazaguanine reductase OS=Gracilibacillus dipsosauri OX=178340 GN=queF PE=3 SV=1
MSGRSHEQGLQDLKQLGNQDTQYTDDYAPEVLEAVDNLHSDRDYFVKFNCPEFTSLCPITGQPDFATMYISYIPNQKIVESKSLKLYLFSFRNHGDFHEDCVNIIMNDLIQLLDPRYIEVWGKFTPRGGISIDPWCNYGKPGTKYEEMATHRLINHDLNPEKIDNR

SEQ ID NO: 46215 - protein, 135 aa, Gracilibacillus halophilus
  misc_feature (1)..(135): tr|N4WUZ0|N4WUZ0_9BACI NADPH-dependent 7-cyano-7-deazag uanine reductase OS=Gracilibacillus halophilus YIM-C55. 5 OX=1308866 GN=queF PE=3 SV=1
MSDEYYLPRSGPMPRPNSVEEGRGVLKQEAFDAPNVQRITFRALEFTAICPKTGQPDFGTVEIAYTPRDKCIESKSMKFYMWSFRDHGAFCESLAAQIADDIMWAIEPASVDVTVYQTARGGIELTTEASREYGE

SEQ ID NO: 46216 - protein, 135 aa, Gracilibacillus kekensis
  misc_feature (1)..(135): tr|A0A1M7L3C0|A0A1M7L3C0_9BACI NADPH-dependent 7-cyano- 7-deazaguanine reductase OS=Gracilibacillus kekensis OX =1027249 GN=queF PE=3 SV=1
MAENYYLPRSGPMPRPENVEQGREVLKQEAFDAPNVQNISFRAQEFTAVCPKTGQPDFGTVEISYTPRHKCIESKSLKFYLWSYRDHGAFCESLAAQIADDIMWAIEAATVKVVVHQTTRGGIELTTEAIREYSS

SEQ ID NO: 46217 - protein, 135 aa, Gracilibacillus orientalis
  misc_feature (1)..(135): tr|A0A1I4JVH0|A0A1I4JVH0_9BACI NADPH-dependent 7-cyano- 7-deazaguanine reductase OS=Gracilibacillus orientalis OX=334253 GN=queF PE=3 SV=1
MSENYYLPRSGPMPRPSSVEEGRAVLKQEAFEAPNVQNITFRALEFTAVCPKTGQPDFGKVEISYTPRHKCIESKSMKFYLWSFRDHGAFCESLAAQIADDMMWAIEPASVKVTVYQTARGGIELTTEAHREYTE

SEQ ID NO: 46218 - protein, 135 aa, Gracilibacillus ureilyticus
  misc_feature (1)..(135): tr|A0A1H9MTB3|A0A1H9MTB3_9BACI NADPH-dependent 7-cyano- 7-deazaguanine reductase OS=Gracilibacillus ureilyticus OX=531814 GN=queF PE=3 SV=1
MSENYYLPRSGPMPRPESVEEGRNVLKQEAFDAPNVQNITFRALEFTAVCPKTGQPDFGKVEISYTPRNKCIESKSLKFYLWSYRDHGAFCESLAAQIADDIMWAIEAATVKVTVYQTARGGIELTTEAIREYQA

SEQ ID NO: 46219 - protein, 170 aa, Granulibacter bethesdensis
  misc_feature (1)..(170): tr|W6I1P5|W6I1P5_9PROT NADPH-dependent 7-cyano-7-deazag uanine reductase OS=Granulibacter bethesdensis OX=36441 0 GN=queF PE=3 SV=1
MPSRCALPGRREIGRNRMAENYAGLTQLGQTVSQPASPDQAVLEKVPNPTPGKAYMIRFTAPEFTSLCPLTGQPDFAHIVLDYVPRDWIVESKSLKLFLTSFRNVGSFHEACSMKIAERVVSLLDPVWLRIGAYWYPRGGIPIDVFWQTGSPPDGVWIPAQDVPGYRGRG

SEQ ID NO: 46220 - protein, 153 aa, Granulibacter bethesdensis
  misc_feature (1)..(153): sp|Q0BVG3|QUEF_GRABC NADPH-dependent 7-cyano-7-deazagua nine reductase OS=Granulibacter bethesdensis (strain AT CC BAA-1260 / CGDNIH1) OX=391165 GN=queF PE=3 SV=1
MAENYAGLTQLGQTVSQPASPDQAVLEKVPNPTPGKAYMIRFTAPEFTSLCPLTGQPDFAHIVLDYVPRDWIVESKSLKLFLTSFRNVGSFHEACSMKIAERVVSLLDPVWLRIGAYWYPRGGIPIDVFWQTGSPPDGVWIPAQDVPGYRGRG

SEQ ID NO: 46221 - protein, 162 aa, Granulicatella elegans
  misc_feature (1)..(162): tr|D0BNU6|D0BNU6_9LACT NADPH-dependent 7-cyano-7-deazag uanine reductase OS=Granulicatella elegans ATCC 700633 OX=626369 GN=queF PE=3 SV=1
MRKNEEMGEITHLGSKTVYRDDYAPEVLESFPNKHPENDYFVKFNCPEFTSLCPITGQPDFATIYISYVPGERMVESKSLKLYLFSFRNRGDFHEDCMNIIMKDLVKLMDPKYIEVWGKFTPRGGISIDPYCNYGKPGTKWEQVADHRMMNHDLYPEKVDNR

SEQ ID NO: 46222 - protein, 162 aa, Granulicatella sp.; identical to SEQ ID NO: 46221
  misc_feature (1)..(162): tr|A0A420YUH6|A0A420YUH6_9LACT NADPH-dependent 7-cyano- 7-deazaguanine reductase OS=Granulicatella sp. OX=20490 28 GN=queF PE=3 SV=1

SEQ ID NO: 46223 - protein, 143 aa, Granulicella mallensis
  misc_feature (1)..(143): tr|G8NQH7|G8NQH7_GRAMM NADPH-dependent 7-cyano-7-deazag uanine reductase OS=Granulicella mallensis (strain ATCC BAA-1857 / DSM 23137 / MP5ACTX8) OX=682795 GN=queF PE= 3 SV=1
MGENREMDEKTHTTGYTDDHAKAGLDTKFPEIETWRNQFRAYEILIDDPEFTSVCPKTGLPDFGVLTIRYMPREKCLELKSLKEYLFTYRNLGIFQENIANQVLDDVVKATDPVWCEIKGDFRPRGGISTVVTARYPRTEERS

SEQ ID NO: 46224 - protein, 134 aa, Granulicella pectinivorans
  misc_feature (1)..(134): tr|A0A1I6MCG7|A0A1I6MCG7_9BACT NADPH-dependent 7-cyano- 7-deazaguanine reductase OS=Granulicella pectinivorans OX=474950 GN=queF PE=3 SV=1
MGTQNTGYTDDHAKAGLDHEFPSIDTWENQFPGYEILIDDPEFTSVCPKTSLPDFGVLTIRYSPRKSCLELKSLKEYLFHYRNLGIFQENIANQVLNDIVKATDPVWAEVKGDFRPRGGISTVVTARYPRPSEK

SEQ ID NO: 46225 - protein, 139 aa, Granulicella rosea
  misc_feature (1)..(139): tr|A0A239HEK3|A0A239HEK3_9BACT NADPH-dependent 7-cyano- 7-deazaguanine reductase OS=Granulicella rosea OX=47495 2 GN=queF PE=3 SV=1
MRTQNTGYTDDHAASGLDHVFPSIDTWQNQFQAYEILVDDPEFTSICPKTGLPDFGVLTIRYMPREQCLELKSLKEYLFHYRNLGIFQENIANQVLNDIVKATDPVWAVVKGDFRPRGGISTVVTATYPRPEDSKPPRS

SEQ ID NO: 46226 - protein, 137 aa, Granulicella sibirica
  misc_feature (1)..(137): tr|A0A4Q0T2A3|A0A4Q0T2A3_9BACT NADPH-dependent 7-cyano- 7-deazaguanine reductase OS=Granulicella sibirica OX=24 79048 GN=queF PE=3 SV=1
MRTQNTGYTDDHAKSGLDHVFPSIDTWQNQFQGYEILIDDPEFTSICPKTGLPDFGILTVRYMPREHCLELKSFKEYLFHYRNLGIFQENIANQVLNDLVKATDPVWAVVKGDFRPRGGISTVVTATYPRPTDSKPS

SEQ ID NO: 46227 - protein, 139 aa, Granulicella sp.
  misc_feature (1)..(139): tr|A0A3N1JIA4|A0A3N1JIA4_9BACT NADPH-dependent 7-cyano- 7-deazaguanine reductase OS=Granulicella sp. GAS466 OX= 2485170 GN=queF PE=3 SV=1
MTTKTTGYTDDHAAAGLDTAFPEIETWPNQFKAYEILIDDPEFTSVCPKTGLPDFGRLTIRYMPRERCMELKSLKEYLFIYRNLGIFQENIVNQVLDDVVKATDPVWAKVVGDFRPRGGISTIVEAFYPRPENSKGPRS

SEQ ID NO: 46228 - protein, 139 aa, Granulicella tundricola
  misc_feature (1)..(139): tr|E8WYR2|E8WYR2_GRATM NADPH-dependent 7-cyano-7-deazag uanine reductase OS=Granulicella tundricola (strain ATC C BAA-1859 / DSM 23138 / MP5ACTX9) OX=1198114 GN=queF P E=3 SV=1
MRTQNTGYTDDHAASGLDHVFPAIDVWANQFQGYEILVDDPEFTSICPKTGLPDFGILTIRYMPRKECLELKSLKEYLFHYRNLGIFQENIVNQILDDVVKATDPVWAVIKGDFRPRGGISTTVTATYPRPLDAKPPVG

SEQ ID NO: 46229 - protein, 155 aa, Granulosicoccus antarcticus
  misc_feature (1)..(155): tr|A0A2Z2NS97|A0A2Z2NS97_9GAMM NADPH-dependent 7-cyano- 7-deazaguanine reductase OS=Granulosicoccus antarcticus IMCC3135 OX=1192854 GN=queF PE=3 SV=1
MSDETIYSGLKQLGGATVLPNSPEDAELERVANPEAGTDYLVRFTQPEFTSLCPMTGQPDFAHLVIDYIPGEWLVESKSLKLYLGSFRNHGAFHEACTVSIAKRLEELLQPAWLRIGGYWFPRGGMPIDVFYQTGEAPSGVWIPEQNVPGYRGRG

SEQ ID NO: 46230 - protein, 281 aa, Grimontella sp.
  misc_feature (1)..(281): tr|A0A318G8P7|A0A318G8P7_9GAMM NADPH-dependent 7-cyano- 7-deazaguanine reductase OS=Grimontella sp. AG753 OX=21 83905 GN=queF PE=3 SV=1
MSSYDNHQALSGLTLGKTTDYRDRYDASLLQGVPRSLNRDPLGLKAENLPFQGADIWTLYELSWLNANGLPQVAVGHVELNYASINLVESKSFKLYLNSFNQTRFASWDEVRETLERDLSACAQGEVSVALYRLDEIEGQPIAHFHGTCIDDQDIVIDNYDFDAALLTDAASGKMVEETLVSHLLKSNCLITHQPDWGSVQIQYRGPKIDREKLLRYLVSFRHHNEFHEQCVERIFTDIQRFCQPESLSVYARYTRRGGLDINPWRTNTRFIPATGRLVRQ

SEQ ID NO: 46231 - protein, 281 aa, Grimontia celer
  misc_feature (1)..(281): tr|A0A128FE36|A0A128FE36_9GAMM NADPH-dependent 7-cyano- 7-deazaguanine reductase OS=Grimontia celer OX=1796497 GN=queF PE=3 SV=1
MSKYQDAKELAGLTLGQKTDYQEHYAPELLQPVPRSLNRDDLDLGDSLPFTGYDIWTLYELSWLNKKGLPQVAIGEVRLPATTPNLIESKSFKLYLNSFNQTKFESWQEVVDVLAKDLSACAGADVDVTLSPLEEFTNTPVIAFGGENIDEQDIEIDSYEFDSSLLEGAADGPEVTETLNSNLLKSNCLITSQPDWGSVRIAYKGKRINREKLLRYIVSFRRHNEFHEQCVERIFIDLMKYCQPELLTVYARYTRRGGLDINPYRTNMGKTPSENNRLARQ

SEQ ID NO: 46232 - protein, 281 aa, Grimontia hollisae
  misc_feature (1)..(281): tr|A0A377HK76|A0A377HK76_GRIHO NADPH-dependent 7-cyano- 7-deazaguanine reductase OS=Grimontia hollisae OX=673 G N=queF PE=3 SV=1
MSKYQDAKELAGLTLGQKTDYQEHYAPGLLQPVPRSLNRDDLNLGDSLPFTGYDIWTLYELSWLNSKGLPQVAIGEVRLPATTPNLIESKSFKLYLNSFNQTKFESWQEVVDTLAKDLSACAGADVDVTLSPLEEFTNTPVVAFGGENIDEQDIEIDNYDLNPALLEGAADGPVVTETLNSNLLKSNCLITSQPDWGSVRIAYKGKRINREKLLRYIVSFRRHNEFHEQCVERIFTDLMKYCQPELLTVYARYTRRGGLDINPYRTNMGKTPSENNRLARQ

SEQ ID NO: 46233 - protein, 281 aa, Grimontia hollisae; identical to SEQ ID NO: 46232
  misc_feature (1)..(281): tr|D0ICP5|D0ICP5_GRIHO NADPH-dependent 7-cyano-7-deazag uanine reductase OS=Grimontia hollisae CIP 101886 OX=67 5812 GN=queF PE=3 SV=1

SEQ ID NO: 46234 - protein, 281 aa, Grimontia indica
  misc_feature (1)..(281): tr|R1J0D2|R1J0D2_9GAMM NADPH-dependent 7-cyano-7-deazag uanine reductase OS=Grimontia indica OX=1056512 GN=queF PE=3 SV=1
MSKYQDAKELAGLTLGQKTDYQEHYAPELLQPVPRSLNRDDLDLGDSLPFTGYDIWTLYELSWLNKKGLPQVAIGEVRLPSTTPNLIESKSFKLYLNSFNQTKFESWQEVVDALAKDLSACAGADVDVTLSPLEEFTNTPVIAFGGENIDEQDIEIDNYEFDSSLLEGAAEGPVVTETLNSNLLKSNCLITSQPDWGSVRIAYKGKRINREKLLRYIVSFRRHNEFHEQCVERIFTDLMKYCQPELLTVYARYTRRGGLDINPYRTNMGKTPSENNRLARQ

SEQ ID NO: 46235 - protein, 281 aa, Grimontia marina
  misc_feature (1)..(281): tr|A0A128ETW9|A0A128ETW9_9GAMM NADPH-dependent 7-cyano- 7-deazaguanine reductase OS=Grimontia marina OX=646534 GN=queF PE=3 SV=1
MSKYQDAKELAGLTLGQKTDYQEHYAPELLQPVPRSLNRDDLDLGDSLPFTGYDIWTLYELSWLNKKGLPQVAIGEVRLPATTPNLIESKSFKLYLNSFNQTKFESWQEVVDALAKDLSACAGADVDVTLSPLEEFTNTPVIAFGGENIDEQDIEIDNYEFDSSLLEGAADGPEVTETLNSNLLKSNCLITSQPDWGSVRIAYKGKRINREKLLRYIVSFRRHNEFHEQCVERIFTDLMKYCQPELLTVYARYTRRGGLDINPYRTNMGKTPSENTRLARQ

SEQ ID NO: 46236 - protein, 281 aa, Grimontia sp.
  misc_feature (1)..(281): tr|A0A0F6A422|A0A0F6A422_9GAMM NADPH-dependent 7-cyano- 7-deazaguanine reductase OS=Grimontia sp. AD028 OX=1581 149 GN=queF PE=3 SV=1
MSKYQDAKELAGLTLGQKTDYQEHYAPELLQPVPRSLNRDDLDLGDSLPFTGYDIWTLYELSWLNKKGVPQVAIGEVRLPATTPNLIESKSFKLYLNSFNQTKFESWQEVVDALAKDLSACAGADVDVTLSPLEEFTNTPVIAFGGENIDEQDIEIDNYEFDSSLLEGAAEGPVVTETLNSNLLKSNCLITSQPDWGSVRIAYKGKRIDREKLLRYIVSFRRHNEFHEQCVERIFTDLMKYCQPELLTVYARYTRRGGLDINPYRTNMGKTPSENNRLARQ

SEQ ID NO: 46237 - protein, 279 aa, Gulbenkiania indica
  misc_feature (1)..(279): tr|A0A0K6GSF0|A0A0K6GSF0_9NEIS NADPH-dependent 7-cyano- 7-deazaguanine reductase OS=Gulbenkiania indica OX=3755 74 GN=queF PE=3 SV=1
MHSPTPEQSPLGKSVRYQDTYDPSLLFPIPRQSKRDEIGVSAEALPFDGVDLWTGFELSWLNPRGKPQVAIATFRIPAHSPRLIESKSFKLYLNSYNQTRIDSLQALQAQLALDLSSAAGAAVEVALLLPRDFPAQRLAELPGESIDDLDIEVDSYAPCPERLSADPGHIVTEVLSSNLLKSNCLVTGQPDWGSVQIAYTGPRIDRESLLRYLIGFRQHNEFHEQCVERIFVDLMRTCQPERLTVYARYTRRGGLDINPLRTNDPSANLHPDNTRTARQ

SEQ ID NO: 46238 - protein, 129 aa, Guyparkeria sp.
  misc_feature (1)..(129): tr|A0A426QP51|A0A426QP51_9GAMM NADPH-dependent 7-cyano- 7-deazaguanine reductase OS=Guyparkeria sp. SCN-R1 OX=2 341113 GN=queF PE=3 SV=1
MSTQPSKTLETFPNPHPERDYTIHMEVPEFTCLCPKTGQPDFATILIDFVPDQQCVELKSLKMYMWSFREEGGFHEAMTNRIADDIVAAINPRFLRLTGRWNVRGGIWTNVVVEHRQDGWTPAPKVELP

SEQ ID NO: 46239 - protein, 277 aa, Gynuella sunshinyii
  misc_feature (1)..(277): tr|A0A0C5VNJ8|A0A0C5VNJ8_9GAMM NADPH-dependent 7-cyano- 7-deazaguanine reductase OS=Gynuella sunshinyii YC6258 OX=1445510 GN=queF PE=3 SV=1
MADLRDAPLGKTSLYVDQYDPSLLFPIARANNRSTLSAEKLELAFHGFDVWNAWELSWLNNKGKPVVAVGEIIIPAQSPCLIESKSLKLYLNSFNQTRFDDIGAVTAAIEKDLSKAAGSEVKVNILTLENALQPFGTIHSVEGCCVDELDVDIDVYSTTDPQLLKISPDDVVSETLVSHLMKSNCPVTGQPDWGSVIVSYTGPRICPESFLRYVVSFRQHTEFHEHCVERMFMDILKLSQPTELKVSARYVRRGGLDINPTRSMHPVTSDNLRLLRQ

SEQ ID NO: 46240 - protein, 154 aa, Haematospirillum jordaniae
  misc_feature (1)..(154): tr|A0A143DDM9|A0A143DDM9_9PROT NADPH-dependent 7-cyano- 7-deazaguanine reductase OS=Haematospirillum jordaniae OX=1549855 GN=queF PE=3 SV=1
MTNSDPSGLTQLGHASALPSSPEAATLETVPNPHPGTLYVARFAAPEFTSLCPVTGQPDFAHLVIDYVPGATLVESKSLKLFLGSFRNHGAFHEDCTVYIGKRLAEALKPVWLRIGGYWYPRGGIPIDVFYQTGPVPEGVWLLDQGVPPYRGRG

SEQ ID NO: 46241 - protein, 279 aa, Haemophilus aegyptius
  misc_feature (1)..(279): tr|A0A448MHB0|A0A448MHB0_HAEAE NADPH-dependent 7-cyano- 7-deazaguanine reductase OS=Haemophilus aegyptius OX=19 7575 GN=queF PE=3 SV=1
MNYQDNSLKSLKLGQKTAYASQYDRTLLQPVPRALNRDGLGITQNQPFTIGADIWTAYEISWLNEKGLPQVAIADIYLDYQSQNLIESKSFKLYLNSFNQSKFANFNAVQQTMQRDLSECAQGDVKVRLNPVAVYDAQKIDHLQGDCIDEQDIEITSYEFNANWLKDCVSDEIVEEKLVSHLLKSNCLITNQPDWGSLHIHYIGKKINQEKLLRYVVSFRQHNEFHEQCVERIFCDLMHYAKPEKLTVYARYTRRGGLDINPFRSNFENLPENLRLARQ

SEQ ID NO: 46242 - protein, 279 aa, Haemophilus ducreyi
  misc_feature (1)..(279): sp|Q7VL22|QUEF_HAEDU NADPH-dependent 7-cyano-7-deazagua nine reductase OS=Haemophilus ducreyi (strain 35000HP / ATCC 700724) OX=233412 GN=queF PE=3 SV=1
MSYTDTVLSSLKLGQKTEYTGEYDPTLLQAVPRKLNRDHLGITEQQPFNQGADVWTCYEVSWLNLNGLPQVAIAEVVIDANSENLIESKSFKLYLNSVNQTTFESLEQVEYIIESDLSRCACGLVWVKIHKLSEYKNEIIADFSGECIDEQDIEIDNYQYSAQYLEHSAEGEEVEETLVSHLLKSNCLITSQPDWGSVQIHYVGKKINREKLLRYLVSFREHNEFHEQCVERIFTDLMTFAKPEKLMVYARYTRRGGLEINPFRANFDAMPQHIRMARQ

SEQ ID NO: 46243 - protein, 279 aa, Haemophilus ducreyi
  misc_feature (1)..(279): tr|A0A448KJB9|A0A448KJB9_HAEDC NADPH-dependent 7-cyano- 7-deazaguanine reductase OS=Haemophilus ducreyi OX=730 GN=queF PE=3 SV=1
MSYTDTVLSSLKLGQKTEYTGEYDPMLLQAVPRKLNRDNLGITEQQPFNQGADVWTCYEVSWLNLNGLPQVAIAEVVIDANSENLIESKSFKLYLNSFNQTIFESLEQVEYIIESDLSRCACGLVWVKIHKLSEYKNEIIADFSGECIDEQDIEIDNYQYSAQYLEHSAEGEEVEETLVSHLLKSNCLITSQPDWGSVQIHYVGKKINREKLLRYLVSFREHNEFHEQCVERIFTDLMTFAKPEKLMVYARYTRRGGLEINPFRANFDAMPQHIRMARQ

SEQ ID NO: 46244 - protein, 279 aa, [Haemophilus] felis
  misc_feature (1)..(279): tr|A0A1T0AST2|A0A1T0AST2_9PAST NADPH-dependent 7-cyano- 7-deazaguanine reductase OS=[Haemophilus] felis OX=1238 22 GN=queF PE=3 SV=1
MDYHHQSLDALTLGRQTQYASQYDPTLLQGVPRQLNRDQLNITEKQPFTFGTDIWTAYEISWLNSNGLPQVAIADIALDFQSKNLIESKSFKLYLNSFNQTVFNNIESVRQTIEKDLTQCAEGKVRVQLNKLDYYTQQPIVNFEGLCIDEQDIQISNYEFNPALLENCTQDQIVEEKLVSHLLKSNCLITQQPDWGSVQIHYVGKQINREQLLRYLISFRQHNEFHEQCVERIFCDLMNFAKPEKLTVYARYTRRGGLDINPFRSNFESEPTNYRLARQ

SEQ ID NO: 46245 - protein, 279 aa, Haemophilus haemoglobinophilus
  misc_feature (1)..(279): tr|A0A1V4AY82|A0A1V4AY82_9PAST NADPH-dependent 7-cyano- 7-deazaguanine reductase OS=Haemophilus haemoglobinophi lus OX=733 GN=queF PE=3 SV=1
MQYQDQSLQALKLGQKTEYTSTYDRTLLQAVPRKLNRNDLGITEKQPFTFGADIWTAYEISWLNLKGVPQVAIADVEIDYQSENLIESKSFKLYLNSFNQSQFKNLQEVEEILQQDLTQCAQGRVKVRLNSLQYYDRQAIATLQGECIDEQDIEIHSYEFNPSLLENCTSTQWVEETLVSHLLKSNCLITNQPDWGTIQIHYVGQQINREKILRYLISFRQHNEFHEQCVERIFCDLMRFAQPEKLSVYARYTRRGGLDINPFRSNFEPTPLNQRLARQ

SEQ ID NO: 46246 - protein, 279 aa, Haemophilus haemolyticus
  misc_feature (1)..(279): tr|A0A502JTE7|A0A502JTE7_HAEHA NADPH-dependent 7-cyano- 7-deazaguanine reductase OS=Haemophilus haemolyticus OX =726 GN=queF PE=3 SV=1
MNYQDNSLKSLKLGQKTEYASQYDRTLLQPVPRALNRDGLGITQNQPFTIGADIWTAYEISWLNEKGLPQVAIADIYLDYQSQNLIESKSFKLYLNSFNQSKFADFNAVQQTMQRDLSECAQGDVKVRLNPVAVYDSQKIDHLQGDCIDEQDIEITSYEFNADWLKDCVSDEIVEEKLVSHLLKSNCLITNQPDWGTLHIHYIGKKINHEKLLRYVVSFRQHNEFHEQCVERIFCDLMHYAKPEKLTVYARYTRRGGLDINPFRSNFENLPENLRLARQ

SEQ ID NO: 46247 - protein, 279 aa, Haemophilus haemolyticus
  misc_feature (1)..(279): tr|A0A2X4R605|A0A2X4R605_HAEHA NADPH-dependent 7-cyano- 7-deazaguanine reductase OS=Haemophilus haemolyticus OX =726 GN=queF PE=3 SV=1
MNYQDNSLKSLKLGQKTEYASQYDCTLLQPVPRALNRDGLGITQNQPFTIGADIWTAYEISWLNEKGLPQVAIADIYLDYQSQNLIESKSFKLYLNSFNQSKFADFNVVQQTMQRDLSECAQGDVKVRLNPVAVYDSQKIDHLQGDCIDEQDIEITSYEFNADWLKDCVSDEIVEEKLVSHLLKSNCLITNQPDWGTLHIHYIGKKIDHEKLLRYVVSFRQHNEFHEQCVERIFCDLMHYAKSEKLTVYARYTRRGGLDINPFRSNFENLPENLRLARQ

SEQ ID NO: 46248 - protein, 279 aa, Haemophilus influenzae
  misc_feature (1)..(279): sp|P44153|QUEF_HAEIN NADPH-dependent 7-cyano-7-deazagua nine reductase OS=Haemophilus influenzae (strain ATCC 5 1907 / DSM 11121 / KW20 / Rd) OX=71421 GN=queF PE=3 SV= 1
MNYQDNSLKSLKLGQKTEYASQYDRTLLQPVPRALNRDGLGITQNQPFTIGADIWTAYEISWLNEKGLPQVAIADIYLDYQSQNLIESKSFKLYLNSFNQSKFADFNAVQQTMQRDLSECAQGDVKVRLNPMAVYDSQKIDHLQGDCIDEQDIEITSYEFNANWLKDCVSDEIVEEKLVSHLLKSNCLITNQPDWGTLHIHYVGKKINQEKLLRYVVSFRQHNEFHEQCVERIFCDLMHYAKPEKLTVYARYTRRGGLDINPFRSNFENLPENLRLARQ

SEQ ID NO: 46249 - protein, 279 aa, Haemophilus influenzae
  misc_feature (1)..(279): sp|A5UF26|QUEF_HAEIG NADPH-dependent 7-cyano-7-deazagua nine reductase OS=Haemophilus influenzae (strain PittGG ) OX=374931 GN=queF PE=3 SV=1
MNYQDNSLKSLKLGQKTEYASQYDRTLLQPVPRALNRDGLGITQNQPFTIGADIWTAYEISWLNEKGLPQVAIADIYLDYQSQNLIESKSFKLYLNSFNQSKFTDFNAVQQTMQRDLIECAQGDVKVRLNPVAVYDAQKIEHLQGDCIDEQDIEITSYEFNANWLKDCVSDEIVEEKLVSHLLKSNCLITNQPDWGTLHIHYVGKKINHEKLLRYVVSFRQHNEFHEQCVERIFCDLMHYAKPEKLTVYARYTRRGGLDINPFRSNFENLPENLRLARQ

SEQ ID NO: 46250 - protein, 279 aa, Haemophilus paracuniculus
  misc_feature (1)..(279): tr|A0A1T0AR64|A0A1T0AR64_9PAST NADPH-dependent 7-cyano- 7-deazaguanine reductase OS=Haemophilus paracuniculus O X=734 GN=queF PE=3 SV=1
MNYDDKSLTGLKLGQKTEYKSEYDPSLLQAVPRRLNRDQLGITEQQPFNQGADIWTLYELSWLNPKGVPQVAIADVAIDFQSENLIESKSFKLYLNSFNQTKFDSIEQVEQTIQRDLATVASGQISVKIHKLSHFSQQPIADFAGECIDDLEIEIEDYHFSADHLANIGEGEVVEETLVSHLLKSNCLITSQPDWGSVQIHYVGKKLNREKLLRYLVSFREHNEFHEQCVERIFCDLMAFAQPEKLTVYARYTRRGGLDINPFRSNFEPLPKNIRMARQ

SEQ ID NO: 46251 - protein, 279 aa, Haemophilus parahaemolyticus
  misc_feature (1)..(279): tr|A0A369ZFY0|A0A369ZFY0_HAEPH NADPH-dependent 7-cyano- 7-deazaguanine reductase OS=Haemophilus parahaemolyticu s OX=735 GN=queF PE=3 SV=1
MNYQDKSLSALKLGQNTEYKSQYDASLLQPVPRRLNREGLGIVEQQPFNQGADVWTCYELSWLNSNGLPQVAIADVEIDFKSENLIESKSFKLYLNSFNQTKFASIEEVEQTITRDLRKCASGQVSVKIHKLADYTNQPIVNFSGECIDEQEIQIESYIFSNQHLENVAEDEIVEETLVSHLLKSNCLITSQPDWGSVQIHYVGKRLNREKLLRYLVSFREHNEFHEQCVERIFTDLIQFAKPEKLTVYARYTRRGGLDINPFRSNFESIPVNLRMARQ

SEQ ID NO: 46252 - protein, 279 aa, Haemophilus parahaemolyticus
  misc_feature (1)..(279): tr|A0A5C1QSW2|A0A5C1QSW2_HAEPH NADPH-dependent 7-cyano- 7-deazaguanine reductase OS=Haemophilus parahaemolyticu s OX=735 GN=queF PE=3 SV=1
MNYQDKSLSALKLGQNTEYKSQYDASLLQPVPRRLNREGLGIVEQQPFNQGADVWTCYELSWLNSNGLPQVAIADVEIDFKSENLIESKSFKLYLNSFNQTKFASIEEVEQTLTRDLSQCASGQVSVRTHKLADYTNQPIVNFSGECIDEQEIQIESYTFSNQYLENVAEDEIVEETLVSHLLKSNCLITSQPDWGSVQIHYVGKRLNREKLLRYLVSFREHNEFHEQCVERIFTDLMQFAKPEKLTVYARYTRRGGLDINPFRSNFESIPVNLRMARQ

SEQ ID NO: 46253 - protein, 279 aa, Haemophilus parainfluenzae
  misc_feature (1)..(279): tr|A0A1R0E6F7|A0A1R0E6F7_HAEPA NADPH-dependent 7-cyano- 7-deazaguanine reductase OS=Haemophilus parainfluenzae OX=729 GN=queF PE=3 SV=1
MNYQDKSLQSLKLGQETKYATNYDRTLLQPVPRKLNRDGLGITEQQPFTQGADIWTAYEISWLNPKGLPQVAIADVEIDYRSENLIESKSFKLYLNSFNQNKFADFASVERTMREDLSACAQGEVKVRLHPLSHYQGQSIDTLTGDCIDDQDIEIHSYEFNADILQNCTSDNVAEETLVSHLLKSNCLITSQPDWGTVQIHYVGKQIDREKLLRYIVSFRQHNEFHEQCVERIFCDLMHYAKPEKLTVYARYTRRGGLDINPFRSNFEAIPQNLRLTRQ

SEQ ID NO: 46254 - protein, 279 aa, Haemophilus parainfluenzae
  misc_feature (1)..(279): tr|F0ETP7|F0ETP7_HAEPA NADPH-dependent 7-cyano-7-deazag uanine reductase OS=Haemophilus parainfluenzae ATCC 333 92 OX=888828 GN=queF PE=3 SV=1
MNYQDKSLQSLKLGQATEYAANYDRTLLQPVPRKLNRDGLGITEQQPFSEGTDIWTAYEISWLNPKSLPQVAIADVEIDYRSENLIESKSFKLYLNSFNQSKFADFASVERTMREDLSACAQGEVKVRLHPLSHYQGQSIDTLPGDCIDDQDIEIHSYEFDADILQDCTSNNVVEETLVSHLLKSNCLITSQPDWGTVQIHYVGKQIDREKLLRYIVSFRQHNEFHEQCVERIFCDLMHYAKPEKLTVYARYTRRGGLDINPFRSNFEEIPQNLRLARQ

SEQ ID NO: 46255 - protein, 279 aa, Haemophilus paraphrohaemolyticus
  misc_feature (1)..(279): tr|I2NK03|I2NK03_9PAST NADPH-dependent 7-cyano-7-deazag uanine reductase OS=Haemophilus paraphrohaemolyticus HK 411 OX=1095743 GN=queF PE=3 SV=1
MNYQDKSLSALKLGQKTEYKSQYDASLLQPVPRRLNREGLGIVEDQPFNQGADVWTCYELSWLNLNGLPQVAIADVAIDFKSENLIESKSFKLYLNSFNQTKFASIEEVEETIAKDLNQCASGRVSVKIHKLADYTNQPIMNFAGDCIDEQEIQIDNYAFSNQYLENVAEGEIVEETLVSHLLKSNCLITSQPDWGSVQIHYVGKQLNREKLLRYLVSFREHNEFHEQCVERIFTDLMQFAKPEKLTVYARYTRRGGLDINPFRSNFESVPANLRMARQ

SEQ ID NO: 46256 - protein, 279 aa, Haemophilus paraphrohaemolyticus
  misc_feature (1)..(279): tr|A0A369ZQM6|A0A369ZQM6_9PAST NADPH-dependent 7-cyano- 7-deazaguanine reductase OS=Haemophilus paraphrohaemoly ticus OX=736 GN=queF PE=3 SV=1
MNYQDKSLSALKLGQKTEYKSQYDASLLQPVPRRLNREGLGIVEDQPFNQGADVWTCYELSWLNPNGLPQVAIADVAIDFKSENLIESKSFKLYLNSFNQTKFASIEEVEQTLTKDLSQCASGQVSVKIHKLADYTNQPIMNFAGKCIDEQEIQINSYAFSNQYLENVAEGEIVEETLVSHLLKSNCLITSQPDWGSVQIHYIGKQLNREKLLRYLVSFREHNEFHEQCVERIFTDLMQFAKPEKLTIYARYTRRGGLDINPFRSNFESVPANLRMARQ

SEQ ID NO: 46257 - protein, 279 aa, Haemophilus parasuis; identical to SEQ ID NO: 46181
  misc_feature (1)..(279): sp|B8F3V1|QUEF_HAEPS NADPH-dependent 7-cyano-7-deazagua nine reductase OS=Haemophilus parasuis serovar 5 (strai n SH0165) OX=557723 GN=queF PE=3 SV=1

SEQ ID NO: 46258 - protein, 279 aa, Haemophilus parasuis
  misc_feature (1)..(279): tr|A0A1T0A8R9|A0A1T0A8R9_HAEPR NADPH-dependent 7-cyano- 7-deazaguanine reductase OS=Haemophilus parasuis OX=738 GN=queF PE=3 SV=1
MNYNNECLSMLKLGKKTEYKSTYDPSLLQAVPRYLNRESLGIVKQQPFTVGADIWTLYELSWLNQNGVPQVAIADVIIDSSSSNIIESKSFKLYLNSFNQMRFPSREDVQRRIQSDLSKCAQGDVTVQIYKLSDFAMRSISEFNGECIDNQNICINRYDFTRESLQGIANGEIVEERLVSHLLKSNCLITSQPDWGSIQICYVGKQLDKEKLLRYLVSFREHNEFHEQCVERIFCDLMEFAQPQKLTVYARYTRRGGLDINPFRSNFEGIPENLRMVRQ

SEQ ID NO: 46259 - protein, 279 aa, Haemophilus pittmaniae
  misc_feature (1)..(279): tr|F9QBJ9|F9QBJ9_9PAST NADPH-dependent 7-cyano-7-deazag uanine reductase OS=Haemophilus pittmaniae HK 85 OX=103 5188 GN=queF PE=3 SV=1
MNYQDKSLQSLKLGQATEYAANYDRTLLQPVPRKLNRDGLGITEQQPFTQGADIWTAYEISWLNPKGLPQVAIADVEIDYRSENLIESKSFKLYLNSFNQSKFADFASVERTMREDLSACAKGEVKVRLNPLSNYQEQAIDTLTGDCIDEQDIEIHSYEFNADILQNCTSDNMVEESLVSHLLKSNCLITSQPDWGTVQIHYVGKQIDREKLLRYIVSFRQHNEFHEQCVERIFCDLMHYAKPEKLTVYARYTRRGGLDINPFRSNFEEIPQNLRLARQ

SEQ ID NO: 46260 - protein, 279 aa, Haemophilus pittmaniae
  misc_feature (1)..(279): tr|A0A377J1S9|A0A377J1S9_9PAST NADPH-dependent 7-cyano- 7-deazaguanine reductase OS=Haemophilus pittmaniae OX=2 49188 GN=queF PE=3 SV=1
MNYQDKSLQSLKLGQATEYAANYDRTLLQPVPRKLNRDGLGITEQQPFTQGADIWTAYEISWLNPKGLPQVAIADVEIDYRSENLIESKSFKLYLNSFNQSQFDDFASVERTMREDLSACAQGEVKVRLNPLSNYQEQAIDTLTGDCIDEQDIEIHSYEFNADILQNCTSDNMVEESLVSHLLKSNCLITSQPDWGTVQIHYVGKQIDREKLLRYIVSFRQHNEFHEQCVERIFCDLMHYAKPEKLTVYARYTRRGGLDINPFRSNFEKIPQNLRLARQ

SEQ ID NO: 46261 - protein, 279 aa, Haemophilus somnus
  misc_feature (1)..(279): sp|Q0I3L5|QUEF_HAES1 NADPH-dependent 7-cyano-7-deazagua nine reductase OS=Haemophilus somnus (strain 129Pt) OX= 205914 GN=queF PE=3 SV=1
MQYHDQSLQTLKLGKKTEYISTYDRTLLQAVPRKLNRDDLGISTKQPFSFGADIWTAYEISWLNLKGVPQVAIADVEIDYQSENLIESKSFKLYLNSFNQSQFENLQQVEQILQQDLIKCAKGQVKVRLNSLQNYAQQPIATLQGECIDEQDIEIRCYEFDPNLLENCTNKQWVEEKLVSHLLKSNCLITNQPDWGTVQIHYIGNQINREKLLRYLISFRQHNEFHEQCVERIFCDLMKFAQPEKLSVYARYTRRGGLDINPFRSNFEPIPLNQRLARQ

SEQ ID NO: 46262 - protein, 293 aa, Haemophilus sp.
  misc_feature (1)..(293): tr|H1LNY2|H1LNY2_9PAST NADPH-dependent 7-cyano-7-deazag uanine reductase OS=Haemophilus sp. oral taxon 851 str. F0397 OX=762965 GN=queF PE=3 SV=1
MSKFAKVGHLIGEKMNYQDNSLKSLKLGQKTEYASQYDRTLLQPVPRALNRDGLGITQNQPFTIGADIWTAYEISWLNEKGLPQVAIADIYLDYQSQNLIESKSFKLYLNSFNQSKFADFNAVQQTMQRDLSECAQGDVKVRLNPVAVYDFQKIDHLQGDCIDEQDIEITSYQFNADWLKDCVSDEIVEEKLVSHLLKSNCLITNQPDWGTLHIHYVGKKINHEKLLRYVVSFRQHNEFHEQCVERIFCDLMHYAKPEKLTVYARYTRRGGLDINPFRSNFENLPENLRLARQ

SEQ ID NO: 46263 - protein, 279 aa, Haemophilus sp.
  misc_feature (1)..(279): tr|A0A1F0UFM0|A0A1F0UFM0_9PAST NADPH-dependent 7-cyano- 7-deazaguanine reductase OS=Haemophilus sp. HMSC073C03 OX=1739452 GN=queF PE=3 SV=1
MNYQDKSLQSLKLGQATAYATNYDRTLLQPVPRKLNRDGLGITEQQPFTQGADIWTAYEISWLNPKGLPQVAIADVEIDYRSENLIESKSFKLYLNSFNQSNFADFASVERTMHEDLSACAQGEVKVRLHPLSHYQEQSIDTLTGDCIDEQDIEIHRYEFNANILQNCTSDNVAEETLVSHLLKSNCLITSQPDWGTVQIHYVGKQIDREKLLRYIVSFRQHNEFHEQCVERIFCDLMHYAKPEKLTVYARYTRRGGLDINPFRSNFEEIPQNLRLARQ

SEQ ID NO: 46264 - protein, 279 aa, Haemophilus sputorum
  misc_feature (1)..(279): tr|J5HXF7|J5HXF7_9PAST NADPH-dependent 7-cyano-7-deazag uanine reductase OS=Haemophilus sputorum HK 2154 OX=107 8483 GN=queF PE=3 SV=1
MNYEDKSLLGLKLGQKTDYKTTYDPSLLQGVPRKLNRDGLGITEHQPFDRGADIWTCYELSWLNSNGLPQVAIADVAVDFRSENLIESKSFKLYLNSFNQTKFESIGQVQQTIMQDLSQCASGQVSVKICKLSDYRGQQIVDFAGECIDEQDITISDYSFSNDYLSDVAEGEVVEETLVSHLLKSNCLITSQPDWGSVQIHYQGKRLNREKLLRYLVSFREHNEFHEQCVERIFTDLMQFAKPDKLTVYARYTRRGGLDINPFRSNFEDLPQNLRMARQ

SEQ ID NO: 46265 - protein, 279 aa, Haemophilus sputorum
  misc_feature (1)..(279): tr|A0A369YCA3|A0A369YCA3_9PAST NADPH-dependent 7-cyano- 7-deazaguanine reductase OS=Haemophilus sputorum OX=107 8480 GN=queF PE=3 SV=1
MNYEDKSLLGLKLGQKTDYKTTYEPSLLQGVPRKLNRDGLGITERQPFDRGADIWTCYELSWLNSNGLPQVAIADVAVDFRSENLIESKSFKLYLNSFNQTKFESIEQVQQTLMQDLSQCASGQVSVKICKLSDYRGQQIVDFAGECIDEQDITISDYSFSNDYLSDVAECEVVEETLVSHLLKSNCLITSQPDWGSVQIHYQGKRLNREKLLRYLVSFREHNEFHEQCVERIFTDLMQFAKPEKLTVYARYTRRGGLDINPFRSNFEDLPKNLRMARQ

SEQ ID NO: 46266 - protein, 281 aa, Hafnia alvei
  misc_feature (1)..(281): tr|G9Y9P2|G9Y9P2_HAFAL NADPH-dependent 7-cyano-7-deazag uanine reductase OS=Hafnia alvei ATCC 51873 OX=1002364 GN=queF PE=3 SV=1
MSYQDHKALSGLTLGKATEYRDQYDATLLQPVPRSMNREPLGLYPETLPFHGGDIWTLYELSWLNAKGLPQVAIANVELDAFSHNLIESKSFKLYLNSFNQTRFADWNEVQTTLQRDLAHCAQGNVSVQLMSLDSVEGQAIAAFDGECIDHQDIEITHYEFNAELLKNAANKQAIVEETLVSHLLKSNCLITHQPDWGSVMIQYRGPKIDREALLRYLVSFRHHNEFHEQCVERIFCDIQRFCQPETLSVYARYTRRGGLDINPWRTNTPFVAPKGRLVRQ

SEQ ID NO: 46267 - protein, 281 aa, Hafnia alvei
  misc_feature (1)..(281): tr|A0A097R5L4|A0A097R5L4_HAFAL NADPH-dependent 7-cyano- 7-deazaguanine reductase OS=Hafnia alvei FB1 OX=1453496 GN=queF PE=3 SV=1
MSYQDHQALAGLTLGKATEYRDSYDASLLQPVPRSMNREPLGLYPNSLPFTGGDIWTLYELSWLNAKGLPQVAIADVELDAFSQNLIESKSFKLYLNSFNQTRFANWDDVQTTLQRDLSHCAQGDVRVQLMKLDDVEGQPIAAFRGECIDNLDIEIDNYEFDAELLKNAADQQNVIEETLVSHLLKSNCLITHQPDWGSVMIQYRGPAINREALLRYLVSFRHHNEFHEQCVERIFCDIQRFCQPETLSVYARYTRRGGLDINPWRTNTTFVAPKGRLVRQ

SEQ ID NO: 46268 - protein, 281 aa, Hafnia paralvei
  misc_feature (1)..(281): tr|A0A2A2MD20|A0A2A2MD20_9GAMM NADPH-dependent 7-cyano- 7-deazaguanine reductase OS=Hafnia paralvei OX=546367 G N=queF PE=3 SV=1
MSYQDHKALSGLTLGKATEYRDQYDATLLQPVPRSMNREPLGLYPETLPFRGGDIWTLYELSWLNAKGLPQVAIADVELDAFSHNLIESKSFKLYLNSFNQTRFADWNEVQTTLQRDLAHCAQGNVSVQLMSLDSVEGQAIASFDGECIDHQDIEITHYEFNAELLKNAANKQAIVEETLVSHLLKSNCLITHQPDWGSVMIQYRGPKIDREALLRYLVSFRHHNEFHEQCVERIFCDIQRFCQPETLSVYARYTRRGGLDINPWRTNTPFVAPKGRLVRQ

SEQ ID NO: 46269 - protein, 281 aa, Hafnia paralvei
  misc_feature (1)..(281): tr|A0A4Q9EMB2|A0A4Q9EMB2_9GAMM NADPH-dependent 7-cyano- 7-deazaguanine reductase OS=Hafnia paralvei OX=546367 G N=queF PE=3 SV=1
MSYQDHKALSGLTLGKATEYRDQYDATLLQPVPRSMNREPLGLYPETLPFHGGDIWTLYELSWLNAKGLPQVAIANVELDAFSHNLIESKSFKLYLNSFNQTRFADWNEVQTTLQRDLAHCAQGNVSVQLMSLDSVEGQAIAAFDGECIDHQDIEITHYEFDAELLKNAASKQAIVEETLVSHLLKSNCLITHQPDWGSVMIQYRGPKIDREALLRYLVSFRHHNEFHEQCVERIFCDIQRFCQPETLSVYARYTRRGGLDINPWRTNTPFVAPKGRLVRQ

SEQ ID NO: 46270 - protein, 274 aa, Hahella chejuensis
  misc_feature (1)..(274): sp|Q2SDT2|QUEF_HAHCH NADPH-dependent 7-cyano-7-deazagua nine reductase OS=Hahella chejuensis (strain KCTC 2396) OX=349521 GN=queF PE=3 SV=1
MELEKHTHLGKATEYPEEYSPSWLTPIPRAKSRETLGLSGKPDFVGEDLWNGYELSWLNSKGKPEVALGVFRIRCDSLNIIESKSFKLYLNSFNQSRFTSREEVEALMRKDLSAAAQGEVSVTLLSVTDWRDEPSFWRDAENLDVLDIDVDVYTPDASLLPDPVGDDVVEETLSSDLLKSNCPVTGQPDWATLYIHYRGKPLEKAALLKYIVSMRSHQDFHEHCVESVYLTLMQRYQPEKLAVYARYTRRGGLDINPLRSNYPLAADNFKLPRQ

SEQ ID NO: 46271 - protein, 274 aa, Hahella sp.
  misc_feature (1)..(274): tr|A0A3T0VQ43|A0A3T0VQ43_9GAMM NADPH-dependent 7-cyano- 7-deazaguanine reductase OS=Hahella sp. KA22 OX=1628392 GN=queF PE=3 SV=1
MELEKHTHLGKATEYPEEYSPSWLTPIPRAKSRGTLGLSGAPDFVGEDLWNGYELSWLNSKGKPEVALGVFRIRCDSLNIIESKSFKLYLNSFNQSRFASREEVQALMQKDLSAAAEGEVSVTLLSASDWRDELSFWQAAENLDGLDIEVEVYTPDASLLPDPVGDDIVEETLSSDLLKSNCPVTGQPDWATLYIHYRGKPLDKAALLKYIVSMRSHQDFHEHCVESVYLTLMQRYQPEKLAVYARYTRRGGLDINPLRSNYPLAADNFKLPRQ

SEQ ID NO: 46272 - protein, 280 aa, Hahella sp.
  misc_feature (1)..(280): tr|A0A261GRD8|A0A261GRD8_9GAMM NADPH-dependent 7-cyano- 7-deazaguanine reductase OS=Hahella sp. CCB-MM4 OX=1926 491 GN=queF PE=3 SV=1
MKQTTKLGQATEYPEHYDAALLTPIPRSPNREKLAISGELPFVGEDLWNAYELSWLNTKGKPVVAIGVFRIPADSANIVESKSFKLYLNSFNQTVFADQEEVRSVMEVDLSRAVEGTVKVEILAPGRWEDEKSDWEQSTCLDDLDVTCTDYTPDINLLVLAGHDEGETDERSETVSETLCSHLLKSNCPVTGQPDWATVYIRYKGKAIDHQGLLQYIVSMRGHQDFHEHCVESIYMALMERCQPEKLAVYARYTRRGGLDINPLRSNYPETAANFKLARQ

SEQ ID NO: 46273 - protein, 309 aa, Hahellaceae bacterium
  misc_feature (1)..(309): tr|A0A2D8REM1|A0A2D8REM1_9GAMM NADPH-dependent 7-cyano- 7-deazaguanine reductase QueF OS=Hahellaceae bacterium OX=2048971 GN=CME36_12455 PE=4 SV=1
MSQDKLTHGSLLGRDTSYPDSYAPGLLEALPRRRPLAGAPFGEDIWNQYELSWLDDAGYPRVGVLECRLPCSSPNLIESKSMKLYFNSLNQTRFTSSEMLLARVRRDLSGCAGAEWQLALTHPLPLTQAAAVCAEAEPGDAGFAVSVGERQWSEAVLIDELTQAQALPGPQLPAPEAERRSLLRLADKRAVDASSEEVLVSHLLKTNCPVTGQPDWASVLIWTGSAEQGLDSGHRVDRQSLLDYLVSYRQHSGFHEQCVEEIFSDLAALLGDDRGLLVYARYTRRGGIDINPWRSNVPAQVANTRLVRQ

SEQ ID NO: 46274 - protein, 271 aa, Haliea salexigens
  misc_feature (1)..(271): tr|A0A3C1KKR4|A0A3C1KKR4_9GAMM NADPH-dependent 7-cyano- 7-deazaguanine reductase OS=Haliea salexigens OX=287487 GN=queF PE=3 SV=1
MDSEALLLGKQVPAATQYAPELLYPIPRREGRAGLGLAGQLPFEGIDVWHAYELSWLDSQDKALARVGRFTISASTPNLVESKSFKLYLNSLNNTVFDDEAAALACIVRDVSAAAGGEVALAVFAPDDPALTGAQPDGLCIDSAAGRWPRREPVASMLQCAPGSVVEERLYSHLLRSLCPVTGQPDWATLWLHYRGPALDHAALLSYILAYREHQDFHEQCVERIFCDLQQACQPEFLHLQAFYTRRGGLDINPFRSSGGGEPPWLRLARQ

SEQ ID NO: 46275 - protein, 270 aa, Haliea sp.
  misc_feature (1)..(270): tr|A0A2D5FAQ5|A0A2D5FAQ5_9GAMM NADPH-dependent 7-cyano- 7-deazaguanine reductase QueF OS=Haliea sp. OX=1932666 GN=queF PE=4 SV=1
MEQGDLLLGRHTPVVDHYAPELLYPIPRREGRDALGLGEPPPFEGVDVWHAWELSWLDAAERPQSRIGRFTIPASSPNLVESKSLKLYLNSLNNVVFDDDAAALACITRDVSAVVGAPVAVVAFAPDDPAMAASQPTGTCIDDSDGRWPRCEPDAGLLVAGDDVIEEALFSHGLRSLCPVTAQPDWATLWLHYRGRALDHGALLTYLLSYRQHRGFHEQCVEQIFRDIHAVIAPEFLHLQAFYTRRGGLDINPFRSSGGGAPPWWRLARQ

SEQ ID NO: 46276 - protein, 273 aa, Haliea sp.
  misc_feature (1)..(273): tr|A0A2E7C5A9|A0A2E7C5A9_9GAMM NADPH-dependent 7-cyano- 7-deazaguanine reductase OS=Haliea sp. OX=1932666 GN=qu eF PE=3 SV=1
MAIDSESLLLGKQVPAATRYAPELLFPIPRREARDALGYGGEVPFEGVDIWHAYELSWLDSSDKAQARIGRFTIPATTPHLVESKSFKLYLNSLNNTVFDDEAAALACIVRDISAAAGGDVALAVFAPDDPSLAGAQPSGQCIDTAAGRWPRREPEAEMLQCARARVVEEQLYSHLLRSLCPVTGQPDWATLWLHYRGPALDHAALLSYILAYREHQEFHEQCVERIYRDLQQACQPEFLHLQAFYTRRGGLDINPFRSSGGGEPPWLRLARQ

SEQ ID NO: 46277 - protein, 261 aa, Halieaceae bacterium
  misc_feature (1)..(261): tr|A0A2D5FN45|A0A2D5FN45_9GAMM QueF_N domain-containing protein OS=Halieaceae bacterium OX=2026743 GN=CME47_10 240 PE=4 SV=1
  misc_feature (26)..(26): Xaa can be any naturally occurring amino acid
  misc_feature (38)..(38): Xaa can be any naturally occurring amino acid
  misc_feature (121)..(121): Xaa can be any naturally occurring amino acid
  misc_feature (128)..(128): Xaa can be any naturally occurring amino acid
  misc_feature (136)..(136): Xaa can be any naturally occurring amino acid
  misc_feature (152)..(152): Xaa can be any naturally occurring amino acid
MAGVLGQAVPAPLSYAPQVLERIERXRPFSCIGHGWDXWHCYEMSWCVQQTVEHWVGVLAIPADSPATVESKSLKLYLNSLNHHHFETHEAAIQAIVRDVSACVNATVSLSCTPVDRLASXTRELVGXNLPACNTXEGLAIIDATVLTISPXKGNVVSEHLVSHSLRSLCPVTAQPDWGSLWVRYSGPPIDPASLATYLDAYRSHQGFHEQCVEQIYSDLMGLGLESLDVVAFYQRRGGIDITPWRSSGVIPIDPQRIGRQ

SEQ ID NO: 46278 - protein, 260 aa, Halieaceae bacterium
  misc_feature (1)..(260): tr|A0A520RIT3|A0A520RIT3_9GAMM NADPH-dependent 7-cyano- 7-deazaguanine reductase QueF OS=Halieaceae bacterium O X=2026743 GN=EVA62_04910 PE=4 SV=1
MAGVLGQAVAAPERYAPEVLEPISRQQSAAACFGWDIWHAYELSWCIGDQACHWVGWLSIPADSPATVESKSLKLYLNSLNFHSFADHRGAVNTICADISACAGAIVTLECLPVEGLSDITEELDGVNLPACAAYQAIETISSDLLTHSPGKGNVVSEHLVSHSLRSLCPVTAQPDWGSLSIRYSGKAIDHESVSAYLSGYRSHQGFHEQCVDQIFADLLALKPDSLQVVGFYQRRGGIDITPWRSTEPLATNPQRLGRQ

SEQ ID NO: 46279 - protein, 272 aa, Halioglobus japonicus
  misc_feature (1)..(272): tr|A0A2N5YES0|A0A2N5YES0_9GAMM NADPH-dependent 7-cyano- 7-deazaguanine reductase OS=Halioglobus japonicus OX=93 0805 GN=queF PE=3 SV=1
MADELEGLLLGKTTPVVDTYSPELLFPIPRSQGRAAIGVATPLPFHGADIWHAYEVSWLNDRGVPQVRVGKFRIPCESPNLVESKSFKLYLNSLNSTRYASEEAVCEVIVRDVSAAAGARVYLELLGPDNHALAGTSLEGSCIDDAPIDVVAGEPDPTRLKVGQCVIEERLYSHLLRSLCPVTGQPDWATVWIDYTGPTLDRTALLEYIVAYRNHQEFHEQCVERMFIDILAHCRPQRLQIQAFYTRRGGMDINPFRSTEAGAQPLPRLNRQ

SEQ ID NO: 46280 - protein, 272 aa, Halioglobus lutimaris
  misc_feature (1)..(272): tr|A0A2N5X2Y4|A0A2N5X2Y4_9GAMM NADPH-dependent 7-cyano- 7-deazaguanine reductase OS=Halioglobus lutimaris OX=17 37061 GN=queF PE=3 SV=1
MAEFSDELLLGKQTPVVDQYSPDLLYPIPRETGRDGLSLDPSRAMYGVDLWHAYEMSWLDDNGKPEVRVGRFSVPADSPNMIESKSFKLYLNSLNNTRFQSEEDLLAVIARDVSAATGAAVALELLPVTSPALGGAVPEGECIDGHSINASAGSPAADTLRTTGEGIEESLHSHLLRSLCPVTGQPDWASVWIHYRGQSLDHCSLLRYIIAFRQHQEFHEQCVERMFSDIGSVTQADVLHIQAFYTRRGGMDINPFRSTDPGARPRPRMNRQ

SEQ ID NO: 46281 - protein, 272 aa, Halioglobus sp.
  misc_feature (1)..(272): tr|A0A3L7DWP3|A0A3L7DWP3_9GAMM NADPH-dependent 7-cyano- 7-deazaguanine reductase OS=Halioglobus sp. U0301 OX=22 83635 GN=queF PE=3 SV=1
MSDDKPGLLLGKNVPVADKYSPELLYPIPRARARSSLGLGATLPFDGVDLWHAYELCWLNDRGKPVVRVGRFFIPADSPCMVESKSFKLYLNSLNGSTFACEQQLRETLRTDLAAVIGADIELELFAVDAPELDGGVPEGDCLDDLDISVDDSAPGAELLQVGEEVVAEALYSHLLRSLCPVTGQPDWATVYLSYRGRALERESLLRYLIAFRQHQEFHEQCVERMFVDLQGLIEPEFLEIQAFYTRRGGLDINPFRSTDPGAVPLSRMNRQ

SEQ ID NO: 46282 - protein, 265 aa, Halioglobus sp.
  misc_feature (1)..(265): tr|A0A5B0WM95|A0A5B0WM95_9GAMM NADPH-dependent 7-cyano- 7-deazaguanine reductase OS=Halioglobus sp. NY5 OX=2606 449 GN=queF PE=3 SV=1
MLLGKVTAAPDAYAPDVLYPIPRAPGRRAAGIDIDSACFGVDLWHAYELSWLDEQGKPEVRVGRISIPADSPNMVESKSLKLYLNSLNNLRHGSADAVATRIRQDVGGVVGAEIGLELLPVTAPALCGEPLTGECIDQLALHAGGLHPERDLLVTTGQRGEDTVHSHLLRSLCPVTGQPDWASVWIHYRGDLIERASLLQYIIAFRQHQEFHEQCVERMFADIGHRATPEFLQIQAFYTRRGGLDINPMRSTEPGARPLPRMNRQ

SEQ ID NO: 46283 - protein, 125 aa, Haloarcobacter mediterraneus
  misc_feature (1)..(125): tr|A0A4Q1AU61|A0A4Q1AU61_9PROT NADPH-dependent 7-cyano- 7-deazaguanine reductase OS=Haloarcobacter mediterraneu s OX=2023153 GN=queF PE=3 SV=1
MKYGEKEIVEFDINKEEHFWPNKNKKNYIIDIELPEFMAKCPRSGYPDFATIKLQYTPNEKVIELKALKLYINSFMFREVSHENSANEIFDTLYEKLQPRWMKVIADFKPRGNVHTVIEIDSDKM

SEQ ID NO: 46284 - protein, 164 aa, Halobacillus aidingensis
  misc_feature (1)..(164): tr|A0A1H0EXK9|A0A1H0EXK9_HALAD NADPH-dependent 7-cyano- 7-deazaguanine reductase OS=Halobacillus aidingensis OX =240303 GN=queF PE=3 SV=1
MPGRNDQDLDLSLLGNQGNSYSFEYDPDVLETFDNQHPNRDYFVKFNCPEFTTLCPKTRQPDFATIYISYIPDVKMVESKSLKLYLFSFRNHGDFHEDSVNTIMNDLIDLMDPRYIEVWGKFTPRGGISIDPYCNYGKPGTKFEQMADHRLMNHDLYPEKIDNR

SEQ ID NO: 46285 - protein, 164 aa, Halobacillus alkaliphilus
  misc_feature (1)..(164): tr|A0A1I2SB76|A0A1I2SB76_9BACI NADPH-dependent 7-cyano- 7-deazaguanine reductase OS=Halobacillus alkaliphilus O X=396056 GN=queF PE=3 SV=1
MAGRNEDDLNLSLLGNQGTAYSFEYDPEVLETFENQHTNRDYFVKFNCPEFTTLCPKTGQPDFATIYISYIPDRLMVESKSLKLYLFSFRNHGDFHEDSINTIMNDLIQLMDPRYIEVWGKFTPRGGISIDPYCNYGKPSTKFEQMADHRMMNHDLYPEKIDNR

SEQ ID NO: 46286 - protein, 164 aa, Halobacillus dabanensis
  misc_feature (1)..(164): tr|A0A1I3WYU2|A0A1I3WYU2_HALDA NADPH-dependent 7-cyano- 7-deazaguanine reductase OS=Halobacillus dabanensis OX= 240302 GN=queF PE=3 SV=1
MTGRNDQDLDLSLLGNQGTSYSFEYDPEVLETFDNQHPDRDYFVKFNCPEFTTLCPKTRQPDFATVYISYIPNVKMVESKSLKLYLFSFRNHGDFHEDSMNTIMNDLIELMDPRYIEVWGKFTPRGGISIDPYCNYGKPGTKFEQMADHRMMNHDLYPEKIDNR

SEQ ID NO: 46287 - protein, 164 aa, Halobacillus faecis
  misc_feature (1)..(164): tr|A0A511WPL8|A0A511WPL8_9BACI NADPH-dependent 7-cyano- 7-deazaguanine reductase OS=Halobacillus faecis OX=3601 84 GN=queF PE=3 SV=1
MPGRNDQDLDLSLLGNQGTSYSFEYDPDVLETFDNQHPNRDYFVKFNCPEFTTLCPKTRQPDFATIYISYIPNVKMVESKSLKLYLFSFRNHGDFHEDSVNTIMNDLIDLMDPRYIEVWGKFTPRGGISIDPFCNYGKPGTKFEQMADHRLMNHDLYPEKVDNR

SEQ ID NO: 46288 - protein, 164 aa, Halobacillus halophilus
  misc_feature (1)..(164): tr|I0JGZ5|I0JGZ5_HALH3 NADPH-dependent 7-cyano-7-deazag uanine reductase OS=Halobacillus halophilus (strain ATC C 35676 / DSM 2266 / JCM 20832 / NBRC 102448/ NCIMB 226 9) OX=866895 GN=queF PE=3 SV=1
MPGRNEDDLNLSLLGNQGTAYSFEYDPEVLETFENQHPNRDYFVKFNCPEFTTLCPKTGQPDFATVYISYIPDRLMVESKSLKLYLFSFRNHGDFHEDSMNTIMNDLIQLMDPRYIEVWGKFTPRGGISIDPYCNYGKPSTKFEQMADHRLMNHDLYPEKIDNR

SEQ ID NO: 46289 - protein, 164 aa, Halobacillus karajensis
  misc_feature (1)..(164): tr|A0A059NXP3|A0A059NXP3_9BACI NADPH-dependent 7-cyano- 7-deazaguanine reductase OS=Halobacillus karajensis OX= 195088 GN=queF PE=3 SV=1
MPGRNDQELDLSLLGNQGTSYSFEYDPDVLETFENQHPNRDYFVKFNCPEFTTLCPKTRQPDFATIYISYIPDVKMVESKSLKLYLFSFRNHGDFHEDSVNTIMNDLINLMDPRYIEVWGKFTPRGGISIDPYCNYGKPGTKFEQMAHHRLMNHDLYPEKIDNR

SEQ ID NO: 46290 - protein, 164 aa, Halobacillus litoralis
  misc_feature (1)..(164): tr|A0A410MDG4|A0A410MDG4_9BACI NADPH-dependent 7-cyano- 7-deazaguanine reductase OS=Halobacillus litoralis OX=4 5668 GN=queF PE=3 SV=1
MPGRNDNELDLSLLGNQGTGYSFEYDPDVLETFDNQHPNRDYFVKFNCPEFTTLCPKTNQPDFATIYISYIPDVKMVESKSLKLYLFSFRNHGDFHEDSVNTIMNDLIDLMDPRYIEVWGKFTPRGGISIDPYCNYGKPGTKFEQMADHRMMNHDLYPETIDNR

SEQ ID NO: 46291 - protein, 164 aa, Halobacillus mangrovi
  misc_feature (1)..(164): tr|A0A1W5ZQE2|A0A1W5ZQE2_9BACI NADPH-dependent 7-cyano- 7-deazaguanine reductase OS=Halobacillus mangrovi OX=40 2384 GN=queF PE=3 SV=1
MPGRKEDDLNLSLLGNQNNEYSFQYDPAVLETFDNQHPNRDYFVKFNCPEFTTLCPKTRQPDFATIYISYIPDKKMVESKSLKLYLFSFRNHGDFHEDSVNTIMNDLIELMDPRYIEVWGKFTPRGGISIDPYCNYGKPGTKFEQMADHRMMNHDMYPETIDNR

SEQ ID NO: 46292 - protein, 164 aa, Halobacillus salinus
  misc_feature (1)..(164): tr|A0A4Z0GXJ4|A0A4Z0GXJ4_9BACI NADPH-dependent 7-cyano- 7-deazaguanine reductase OS=Halobacillus salinus OX=192 814 GN=queF PE=3 SV=1
MPGRNEDSLDLSLLGNQGNAYSFEYDPEVLETFDNQHPNRDYFVKFNCPEFTTLCPKTRQPDFATIYISYIPDVKMVESKSLKLYLFSFRNHGDFHEDSVNTIMNDLIELMDPRYIEVWGKFTPRGGISIDPFCNYGKKGTKFEQMADHRLMNHDLYPEKIDNR

SEQ ID NO: 46293 - protein, 164 aa, Halobacillus sp.
  misc_feature (1)..(164): tr|A0A0B0DA00|A0A0B0DA00_9BACI NADPH-dependent 7-cyano- 7-deazaguanine reductase OS=Halobacillus sp. BBL2006 OX =1543706 GN=queF PE=3 SV=1
MPGRKEDDLDLSLLGNQNNEYSFTYDPEVLETFDNQHPNRDYFVKFNCPEFTTLCPKTRQPDFATIYISYIPDQKMVESKSLKLYLFSFRNHGDFHEDSVNTIMNDLIDLMDPRYIEVWGKFTPRGGISIDPYCNYGKPGTKFEQMADHRMMNHDLYPETIDNR

SEQ ID NO: 46294 - protein, 164 aa, Halobacillus sp.
  misc_feature (1)..(164): tr|L5N7H6|L5N7H6_9BACI NADPH-dependent 7-cyano-7-deazag uanine reductase OS=Halobacillus sp. BAB-2008 OX=124648 4 GN=queF PE=3 SV=1
MPGRNEDSLNLSLLGNQETAYATTYDPQVLETFDNQHPNRDYFVKFNCPEFTTLCPKTGQPDFATIYISYVPNIKMVESKSLKLYLFSFRNHGDFHEDSVNTIMNDLIDLMDPRYIEVWGKFTPRGGISIDPYCNYGKPGTKFEQMADHRMMNHDMYPETIDNR

SEQ ID NO: 46295 - protein, 164 aa, Halobacillus trueperi; identical to SEQ ID NO: 46284
  misc_feature (1)..(164): tr|A0A3E0JAG7|A0A3E0JAG7_9BACI NADPH-dependent 7-cyano- 7-deazaguanine reductase OS=Halobacillus trueperi OX=15 6205 GN=queF PE=3 SV=1

SEQ ID NO: 46296 - protein, 203 aa, Halobacteriovoraceae bacterium
  misc_feature (1)..(203): tr|A0A2E3XU93|A0A2E3XU93_9PROT NADPH-dependent 7-cyano- 7-deazaguanine reductase OS=Halobacteriovoraceae bacter ium OX=2026745 GN=queF PE=3 SV=1
MSKKKTAPKTAKKAAKKATKKSVKKSSNKANQKSPKSKARNPQELKDFSLGESHTDYPSEYAPQVLEAFDNKNPNDIAWTTFVCTEFTSLCPKTAQPDFARIFINYIADEKMVESKSLKLYLFSFRNHGDFHEDCVQKICNDLFKLMKPKYIEVVGEFTPRGGIAIYPYSSQSNSEKKFKELLEKRRLNYAPGAYTMPLSRVY

SEQ ID NO: 46297 - protein, 179 aa, Halobacteriovoraceae bacterium
  misc_feature (1)..(179): tr|A0A2E2U8N1|A0A2E2U8N1_9PROT NADPH-dependent 7-cyano- 7-deazaguanine reductase OS=Halobacteriovoraceae bacter ium OX=2026745 GN=queF PE=3 SV=1
MAQRKSSPKKKSTARTDSELKGVSLLGNQNTKYPDTYAPEILESFPNKNPKSEAWTSFVCTEFTSLCPKTGQPDFARIYINYIADKKMVESKSLKLYLFSFRNHGDFHEDCIQKIADDLYNLMKPKYIEVIGEFTPRGGITIYPYVSLDNGSTRFKKIKDLRFSNYSPGKYTLELSRIY

SEQ ID NO: 46298 - protein, 178 aa, Halobacteriovorax marinus
  misc_feature (1)..(178): tr|A0A1Y5FIG6|A0A1Y5FIG6_9PROT NADPH-dependent 7-cyano- 7-deazaguanine reductase OS=Halobacteriovorax marinus O X=97084 GN=queF PE=3 SV=1
MAKAKTKSVSTKKGRNAKELESFSLGENETRYPTTYSPELLEAFDNKNPASDAWTTFLCTEFTSLCPKTAQPDFARIYINYIAGEKMVESKSLKLYLFSFRNHGDFHEDCIQKICNDLAKLMKPKYIEVIGEFTPRGGISIYPYSSYSNAKKLYKDIKAKRFAEYSPGKYTMDMSKIY

SEQ ID NO: 46299 - protein, 181 aa, Halobacteriovorax marinus
  misc_feature (1)..(181): tr|E1X3M0|E1X3M0_HALMS NADPH-dependent 7-cyano-7-deazag uanine reductase OS=Halobacteriovorax marinus (strain A TCC BAA-682 / DSM 15412 / SJ) OX=862908 GN=queF PE=3 SV =1
MAKVKTKKKKTGTGAKGRNAKELASFTLGEAETKYSMTYSPEVLEAFDNKNPNSDAWTTFLCTEFTSLCPKTSQPDFARIYINYIADKKMVESKSLKLYLFSFRNHGDFHEDCIQKICDDLAKLMKPKYIEVIGEFTPRGGIAIYPYSSYSNSKALYKSIKAKRFAEYSPGKYTMDMSKIY

SEQ ID NO: 46300 - protein, 169 aa, Halobacteriovorax sp.
  misc_feature (1)..(169): tr|A0A2E6H764|A0A2E6H764_9PROT NADPH-dependent 7-cyano- 7-deazaguanine reductase OS=Halobacteriovorax sp. OX=20 20862 GN=queF PE=3 SV=1
MAKKVQKIRKGVKNLGLGETTEYPSTYSPKILEKFPNKNPSSEAWTTFICTEFTSLCPKTNQPDFAKIYINYIADKTMVESKSLKLYLFSFRNHGDFHEDCVQTMCDDLMKLMKPKYLEVIGEFTPRGGIAIFPYASADNGTKKFKDLKNKRFSEYAPGKYSMPLSKLY

SEQ ID NO: 46301 - protein, 176 aa, Halobacteriovorax sp.
  misc_feature (1)..(176): tr|A0A2D5YMK0|A0A2D5YMK0_9PROT NADPH-dependent 7-cyano- 7-deazaguanine reductase OS=Halobacteriovorax sp. OX=20 20862 GN=queF PE=3 SV=1
  misc_feature (17)..(17): Xaa can be any naturally occurring amino acid
  misc_feature (43)..(43): Xaa can be any naturally occurring amino acid
  misc_feature (69)..(69): Xaa can be any naturally occurring amino acid
  misc_feature (71)..(71): Xaa can be any naturally occurring amino acid
  misc_feature (75)..(75): Xaa can be any naturally occurring amino acid
  misc_feature (77)..(77): Xaa can be any naturally occurring amino acid
  misc_feature (104)..(105): Xaa can be any naturally occurring amino acid
  misc_feature (111)..(111): Xaa can be any naturally occurring amino acid
  misc_feature (113)..(113): Xaa can be any naturally occurring amino acid
MATKKKTKSKTKTRSGXLKTFKLGEAITDYPTTYAPEVLEAFXNKNPKSDAWTTFVCTEFTSLCPKTSXPXFARXYXNYIADKKMVESKSLKLYLFSFRNHGDXXEDCVQXIXDDLVSLMNPKFIEVIGEFTPRGGIAIYPYASYARKVKKYQMVKDHRFMNYAPGKYSMDLSKIY

SEQ ID NO: 46302 - protein, 146 aa, Halocella sp.
  misc_feature (1)..(146): tr|A0A3S9H301|A0A3S9H301_9FIRM 7-cyano-7-deazaguanine r eductase OS=Halocella sp. SP3-1 OX=2382161 GN=D7D81_139 40 PE=4 SV=1
MMGKEIKTYKDIDPSILKSIPNPSEQAYETKIKIPECTFLGVQNQPDFATVYFTFYPDKKIIELKSLKKYIYQFRNIVVSYERLINVLYEHLMEVYQPERLRIVIICNPRGGISSKLTVDSDWKVRGGEEKYRDWFNRDDTWKVEM

SEQ ID NO: 46303 - protein, 167 aa, Halodesulfovibrio marinisediminis
  misc_feature (1)..(167): tr|A0A1N6E7Q1|A0A1N6E7Q1_9DELT NADPH-dependent 7-cyano- 7-deazaguanine reductase OS=Halodesulfovibrio marinised iminis DSM 17456 OX=1121457 GN=queF PE=3 SV=1
MTITKSQDKTDHLEVLGKGGQTKYQLDGPHSGILETFPNNYPNRPYIVSVEFPEYTSLCPMTGQPDFGVIVMEYIPKDRIVESKSLKLYFFAYRNHQSFMETIANTMLEDFVEALDPLWCRVKGLFSPRGATTLHVFAEHFDTSAENLDEIKSIVSEWKQEANRHSS

SEQ ID NO: 46304 - protein, 167 aa, Halodesulfovibrio spirochaetisodalis
  misc_feature (1)..(167): tr|A0A1B7XBJ5|A0A1B7XBJ5_9DELT NADPH-dependent 7-cyano- 7-deazaguanine reductase OS=Halodesulfovibrio spirochae tisodalis OX=1560234 GN=queF PE=3 SV=1
MTITRSQDKTDHLKVLGKGGQTEYQLDGPHAGILETFPNNYPQRPYIVSVEFPEYTSLCPMTGQPDFGTIVVEYIPKDRIVESKSIKLYFFAYRNHQSFMETIANTMLEDFVEALAPLWCRVKGLFSPRGATTLHVFAEQFDTSSDNIDEIKAIVSEWKQEQNRHSS

SEQ ID NO: 46305 - protein, 138 aa, Halomicronema excentricum
  misc_feature (1)..(138): tr|A0A4Q7DZI8|A0A4Q7DZI8_9CYAN NADPH-dependent 7-cyano- 7-deazaguanine reductase OS=Halomicronema excentricum s tr. Lakshadweep OX=2294035 GN=queF PE=3 SV=1
MPDQQYGDRAIAQAAFEPLEKWANQTDNAYTIHLEHPEFTALCPRSGYPDFGTIVVDYQPGDWVVELKAFKLYINSFRDQRISHEMVTNAIADRLWQELAPVGLRVIGDFTRRGGVKTVITVAKGDGSLFTPYTPNLL

SEQ ID NO: 46306 - protein, 141 aa, Halomicronema hongdechloris
  misc_feature (1)..(141): tr|A0A1Z3HV96|A0A1Z3HV96_9CYAN NADPH-dependent 7-cyano- 7-deazaguanine reductase OS=Halomicronema hongdechloris C2206 OX=1641165 GN=queF PE=3 SV=1
MSHISESMYGDIAIAQAATEPLEKWPNPSTNAYAIHLEHPEFTALCPRSGYPDFGTIVVDYQPGEWVVELKAFKLYINSFRDQRISHEQVVNAVADRLWQELHPVGLRIIGDFTRRGGVKTMITVSKGNGQLFGEYRPNLL

SEQ ID NO: 46307 - protein, 276 aa, Halomonadaceae bacterium
  misc_feature (1)..(276): tr|A0A139C904|A0A139C904_9GAMM NADPH-dependent 7-cyano- 7-deazaguanine reductase OS=Halomonadaceae bacterium T8 2-2 OX=1783518 GN=queF PE=3 SV=1
MNRPDTLKDAPLGRESDYPERYDPVLLYPIPRAANRAPLGIGEGALPFVGEDEWHAFELSWLNARGKPCVAVARFRLPADSPNLIESKSWKLYLNSFNQTRFDSREQVVETLERDLGEAAGKPVGVDLLGVDAPELMPRTLPGECIDGLDIAVDDYTPNAGVLQVGADVVEETLHSHLLKSNCPVTGQPDWGSVLIRYRGPRIDREGLLRYLIGFRQHQDFHEHCVEHIFTDLMTRARPERLLVMARYVRRGGLDISPWRATPGERPPQPLRLARQ

SEQ ID NO: 46308 - protein, 278 aa, Halomonas aestuarii
  misc_feature (1)..(278): tr|A0A1J0VIF5|A0A1J0VIF5_9GAMM NADPH-dependent 7-cyano- 7-deazaguanine reductase OS=Halomonas aestuarii OX=1897 729 GN=queF PE=3 SV=1
MTPTRPDTLEHAPLGRDAAYPEQYDAGLLYAIPRAANRVPLGIEEGALPFVGEDEWHAFEVSWLNARGKPIVAVARFRLPADSPFLIESKSWKLYLNGFNQTRFESRQAVIDTLERDLAEAAGSAVSVELFDVDHEALLPRRLPGQGLDDLDIEVTDYTPSAEHLTVGEEVVEETLYSHLLKSNCPVTGQPDWGSVMIRYRGPRLDREGLLRYLIGYRQHQDFHEHCVEQIFMDLMARARPERLLVLARYVRRGGLDISPWRATPGERPPSPLRLSRQ

SEQ ID NO: 46309 - protein, 277 aa, Halomonas alkaliantarctica
  misc_feature (1)..(277): tr|A0A4R7Y652|A0A4R7Y652_9GAMM NADPH-dependent 7-cyano- 7-deazaguanine reductase OS=Halomonas alkaliantarctica OX=232346 GN=queF PE=3 SV=1
MAHRPDTLAHAPLGRDSAYPELYDAGLLYPIPRAANRVPLGIEEGALPFAGEDEWHAFEVSWLNSRGKPIVAVARFRLSAASPNLIESKSWKLYLNSFNQTRFYSRQEVMETLANDLSVAAGAEVSVELFDVDASELSPQQLPGECLDDLDIAVSDYTPSSNHLSVGEEIVEETLYSHLLKSNCPVTGQPDWGSVLIRYKGPKIDREGLLRYLIGFRQHQDFHEHCVEHIFTDLMAQAKPTQLLVLARYVRRGGLDISPWRATPGLTPPTPLRLARQ

SEQ ID NO: 46310 - protein, 277 aa, Halomonas alkaliphila
  misc_feature (1)..(277): tr|A0A386WY95|A0A386WY95_9GAMM NADPH-dependent 7-cyano- 7-deazaguanine reductase OS=Halomonas alkaliphila OX=27 2774 GN=queF PE=3 SV=1
MAHRPDTLEHAPLGRDSAYPEQYDAGLLYPIPRAANRAPLGIEDNKLPFVGEDEWHAFEVSWLNNRGKPIVAVARFRLPADSPNLIESKSWKLYLNSLNQTRFESREAMQHVLVRDLAAAAGAAVSVELLGVDDAELAPQRLPGKCLDDLDIDISDYTPSAAHLAVSEEIVEETLHSHLLKSNCPVTGQPDWGSVLIRYKGPKIDREGLLRYLIGYRQHQDFHEHCVEHIFTDLMQLAKPEELLVLARYVRRGGLDISPWRATPGLTPPSPLRLARQ

SEQ ID NO: 46311 - protein, 277 aa, Halomonas andesensis
  misc_feature (1)..(277): tr|A0A3S0WNU6|A0A3S0WNU6_9GAMM NADPH-dependent 7-cyano- 7-deazaguanine reductase OS=Halomonas andesensis OX=447 567 GN=queF PE=3 SV=1
MAHRPDTLEHAPLGRDSAYPEQYDAGLLYPIPRAANRAPLGIDDDKLPFVGEDEWHAFEVSWLNGRGKPIVAVARFRLPANSPNLIESKSWKLYLNSLNQTRFASREDVQRTLLRDLAAAAGGSVSVELLGVDDSELVPQRLPGECLDDLDIDVSDYTPSAAHLAVGEVIVEETLYSHLLKSNCPVTGQPDWGSVLIRYKGPKIDREGLLRYLIGYRQHQDFHEHCVEHIFTDLMQLAKPEELLVLARYVRRGGLDISPWRATPGLTPPSPLRLARQ

SEQ ID NO: 46312 - protein, 278 aa, Halomonas anticariensis
  misc_feature (1)..(278): tr|S2L458|S2L458_HALAF NADPH-dependent 7-cyano-7-deazag uanine reductase OS=Halomonas anticariensis (strain DSM 16096 / FP35) OX=1121939 GN=queF PE=3 SV=1
MSIERPDTLQDAPLGRVSAYPEHYDAGLLYPIARAANRAPLGIRDDSLPFEGEDEWHAFELSWLDTKGKPVVAVARFRLPASSPNLIESKSWKLYLNSFNQTRFASRDEVIESLERDLSAAAGAPVVTELFGVDDERLTPRRLPGECIDDLDIEIHDYTPSPELLAVGDEVVEETLHSHLLKSNCPVTGQPDWGSVMIRYRGPCLDREGVLRYLVSYRQHQDFHEHCVEHIFTDLMARARPERLLVLARYVRRGGLDISPWRGTPGERPPEPLRLARQ

SEQ ID NO: 46313 - protein, 277 aa, Halomonas aquamarina
  misc_feature (1)..(277): tr|A0A1H8KFA8|A0A1H8KFA8_9GAMM NADPH-dependent 7-cyano- 7-deazaguanine reductase OS=Halomonas aquamarina OX=770 97 GN=queF PE=3 SV=1
MVHRPDTLEHAPLGRDSAYPEQYDAGLLYPIPRAANRAPLGIEENALPFVGEDEWHAFEVSWLNGRGKPVVAVARFRLPASSPQLIESKSWKLYLNSLNQTRFVSQAEVEAILVRDLSGAAGAPVSVELLPVDDEALAPRRLPGECLDDLDIEVSHYTPSAEHLTTHDDIVEETLHSHLLKSNCPVTGQPDWGSVLIRYKGPKLDREGLLRYLIGYRQHQDFHEHCVEHIFTDVMQQAKPEELLVLARYVRRGGLDISPWRATPGLTPPSPLRLARQ

SEQ ID NO: 46314 - protein, 277 aa, Halomonas arcis
  misc_feature (1)..(277): tr|A0A1H0CRC6|A0A1H0CRC6_9GAMM NADPH-dependent 7-cyano- 7-deazaguanine reductase OS=Halomonas arcis OX=416873 G N=queF PE=3 SV=1
MSHRPDTLAHAPLGRESAYPAQYDAGLLYSIPRAANRAPLGIDEANLPFVGEDEWHAFEVSWLNGRGKPIVAVARFRLPANSPQLIESKSWKLYLNSFNQTRFAQRDEVIATLSHDLSAAAGAPVSVELFDVDADALAPQRLPGESLDALDIEVSDYTPSADHLVVGEPIVEETLHSHLLKSNCPVTGQPDWGSVMIRYKGPKLDREGLLRYLIGYRQHQDFHEHCVEHIFTDLMHRAKPSELLVLARYVRRGGLDISPWRATPGLTPPSPLRLARQ

SEQ ID NO: 46315 - protein, 86 aa, Halomonas axialensis
  misc_feature (1)..(86): tr|A0A455V933|A0A455V933_9GAMM Uncharacterized protein OS=Halomonas axialensis OX=115555 GN=HAALTHF_46970n PE= 4 SV=2
MIRYKGPKLDREGLLRYLIGYRQHQDFHEHCVEHIFTDVMQQAKPEELLVLARYVRRGGLDISPWRATPGLTPPACCALPGSNAHL

SEQ ID NO: 46316 - protein, 123 aa, Halomonas axialensis
  misc_feature (1)..(123): tr|A0A455VD15|A0A455VD15_9GAMM QueF_N domain-containing protein OS=Halomonas axialensis OX=115555 GN=HAALTHF_4 6980n PE=4 SV=2
MLYPIPRAANRAPLGIEENALPFVGEDEWHAFEVSWLNGRGKPVVAVARFRLPASSPHLIESKSWKLYLNSLNQTRFASQTKVEETLVRDLSSAAGASVSVELLGVDDSELAPSACRASAWMI

SEQ ID NO: 46317 - protein, 278 aa, Halomonas beimenensis
  misc_feature (1)..(278): tr|A0A291P973|A0A291P973_9GAMM NADPH-dependent 7-cyano- 7-deazaguanine reductase OS=Halomonas beimenensis OX=47 5662 GN=queF PE=3 SV=1
MSSHRPETLAHAPLGRESAYPEHYDAGLLYPIVRAANRAPLGIEEGALPFVGEDEWHAFEVSWLNARGKPVVAVARFRLPADSPRLIESKSWKLYLNGFNQTRFANREAVVATLERDLAEAAGSPVGVELFGVDDEVLAPRRLPGECLDELEIEVSDYTPSAEHLRVGEEIVEETLHSHLLKSNCPVTGQPDWGSMLIRYRGPRLDREGLLRYLIGYRQHQDFHEHCVEHIFMDLMTRARPERLLVLARYVRRGGLDISPWRATPGERPPSALRLARQ

SEQ ID NO: 46318 - protein, 277 aa, Halomonas boliviensis
  misc_feature (1)..(277): tr|A0A265DWX6|A0A265DWX6_9GAMM NADPH-dependent 7-cyano- 7-deazaguanine reductase OS=Halomonas boliviensis LC1 O X=1072583 GN=queF PE=3 SV=1
MAHRPDTLEHAPLGRESAYPEQYDAGLLYPIPRAANRVPLGIEEGALPFVGEDEWHAFEVSWLNSRGKPIVAVARFRLPAASPNLIESKSWKLYLNSFNQTRFYSREEVMQTLANDLSVAAGAEVSVELFDVDAPELAPQLLPGECLDDLDIAVSDYTPSEAHLTVGEVVVEETLYSHLLKSNCPVTGQPDWGSVLIRYKGPKIDREGLLRYLIGFRQHQDFHEHCVEHIFTDIMTQAKPTQLLVLARYVRRGGLDISPWRATPGLTPPTPLRLARQ

SEQ ID NO: 46319 - protein, 277 aa, Halomonas campaniensis
  misc_feature (1)..(277): tr|A0A246RYC2|A0A246RYC2_9GAMM NADPH-dependent 7-cyano- 7-deazaguanine reductase OS=Halomonas campaniensis OX=2 13554 GN=queF PE=3 SV=1
MAHRPDTLEHAPLGRDSAYPEQYDAGLLYPIPRAANRAPLGIEEGDLPFIGEDEWHAFEVSWLNSRGKPIVAVARFRLPAASPHLIESKSWKLYLNSFNQTRFYSREDVMKTLAHDLAAAAGAEVSVELFDVDAPELSARSLPGECLDDLDIAISDYTPSSTHLTVGEEIVEETLYSHLLKSNCPVTGQPDWGSVLVRYKGPKIDREGLLRYLIGFRQHQDFHEHCVEHIFTDLMAQAKPTQLLVLARYVRRGGLDISPWRATPGLTPPTPLRLARQ

SEQ ID NO: 46320 - protein, 277 aa, Halomonas campaniensis
  misc_feature (1)..(277): tr|A0A060BDT6|A0A060BDT6_9GAMM NADPH-dependent 7-cyano- 7-deazaguanine reductase OS=Halomonas campaniensis OX=2 13554 GN=queF PE=3 SV=1
MAHRPDTLEHAPLGRDSAYPEHYDAGLLYPIPRAANRAPLGIEDSKLPFVGEDEWHAFEVSWLNNRGKPIVAVARFRLPADSPNLIESKSWKLYLNSLNQTHFESRDAVQRVLVRDLAAAAGAAVSVELLAVDDVELTPQRLPGECLDDLDIDISDYTPSAAHLAVSEEIVEETLHSHLLKSNCPVTGQPDWGSVLIRYKGPKIDREGLLRYLIGYRQHQDFHEHCVEHIFTDLMQLAKPEELLVLARYVRRGGLDISPWRATPGLTPPSPLRLARQ

SEQ ID NO: 46321 - protein, 277 aa, Halomonas caseinilytica
  misc_feature (1)..(277): tr|A0A1M6XEI7|A0A1M6XEI7_9GAMM NADPH-dependent 7-cyano- 7-deazaguanine reductase OS=Halomonas caseinilytica OX= 438744 GN=queF PE=3 SV=1
MNDRPDSLADAPLGRESAYPEQYDAGLLYPIERAINRAPLGIEEDALPFVGEDEWHAFELSWLNARGKPIVAVARFRLPASSPRLIESKSWKLYLNGFNQSRFASTERVVRVLEHDLSEAAGAPVGVEVFGVDDPVLTPRALPGESIDEQDIEIADYTPSAEHLTVGEVIVEETLHSHLLKSNCPVTGQPDWGSVMIRYRGPKLDREGLLRYLVGYRQHQDFHEHCVEHIFTDLMARARPERLLVLARYVRRGGLDISPWRATPGEWPPSPLRLARQ

SEQ ID NO: 46322 - protein, 314 aa, Halomonas chromatireducens
  misc_feature (1)..(314): tr|A0A125R0C7|A0A125R0C7_9GAMM NADPH-dependent 7-cyano- 7-deazaguanine reductase OS=Halomonas chromatireducens OX=507626 GN=queF PE=3 SV=1
MDRPDTLEHAPLGRESAYPERYDAGLLYPIPRAANRAPLGIEEGSLPFVGEDEWHAFEVSWLNGRGKPIVTVARFRLPADSPKLIESKSWKLYLNGFNQTRFDSREQVIDTLVADLSAAAGAPVSVELFGVDDDALAVQRLPGECLDELDIEIADYTPSAEHLRVTEEVVEETLYSHLLKSNCPVTGQPDWGSVLIRYRGPKLDREGLLRYLIGYRQHQDFHEHCVEHIFTDLMARARPERLLVLARYVRRGGLDISPWRRSICSRPPWQIAIPAGCARYTTWSSRQASASRPPSLECDNTSIGERHGCDDAAA

SEQ ID NO: 46323 - protein, 283 aa, Halomonas cupida
  misc_feature (1)..(283): tr|A0A1M6ZCQ9|A0A1M6ZCQ9_9GAMM NADPH-dependent 7-cyano- 7-deazaguanine reductase OS=Halomonas cupida OX=44933 G N=queF PE=3 SV=1
MSELSTSGQRPETLKHAPLGRESDYPEHYDPGLLFPIPRAANRAPLGIEEGNLPFIGEDEWHAFELSWLNRKGKPIVAVARFRLPAESPNLIESKSWKLYLNSFNQTRFDDHAAVIEALTRDLSQAAEAELCVDLLAVDDAELAPRALPGECIDDLDIEVESYTPSVAHLKVGDEIVEETLTSHLLKSNCPVTGQPDWGSVMIRYRGPRLDRHGLLRYIIGYRQHQDFHEHCVEHIFTDLMHHARPERLLVMARYVRRGGLDISPWRGTPGEVPPLPLRLARQ

SEQ ID NO: 46324 - protein, 278 aa, Halomonas daqiaonensis
  misc_feature (1)..(278): tr|A0A1H7KYL2|A0A1H7KYL2_9GAMM NADPH-dependent 7-cyano- 7-deazaguanine reductase OS=Halomonas daqiaonensis OX=6 50850 GN=queF PE=3 SV=1
MTHHRPDTLEHAPLGRQSVYPEHYDAGLLYPIVRDANRAPLGIEEGALPFVGEDEWHAFEVSWLNARGKPRVAVARFRLPADSPNLIESKSWKLYLNGFNQTRFGGRERVIDTLVSDLSRAAGAAVSVELFDVDHEALAPRRLPGECLDDLDIEITDYTPSVEHLRVGEAIVEETLHSHLLKSNCPVTGQPDWGSVLIRYQGPKLDREGLLRYLIGFRQHQDFHEHCVEHIFMDLMARARPQRLLVLARYVRRGGLDISPWRATLGECPPEPLRLARQ

SEQ ID NO: 46325 - protein, 277 aa, Halomonas daqingensis
  misc_feature (1)..(277): tr|A0A1H5XU34|A0A1H5XU34_9GAMM NADPH-dependent 7-cyano- 7-deazaguanine reductase OS=Halomonas daqingensis OX=41 9596 GN=queF PE=3 SV=1
MSHRPDTLEHAPLGRESAYPEHYDAGLLYPIPRAANRAPLGIEEGRLPFVGEDEWHAFEVSWLNARGKPRVAVARFRLPAESPNLIESKSWKLYLNGFNQTRFDSREQVIDTLERDLAQAAGAPVSVELYDVDDAALAVCRLPGECLDELDIEIDAYSPSAEHLKVGEEIVEETLYSHLLKSNCPVTGQPDWGSVLIRYRGPKLDREGLLRYLIGYRQHQDFHEHCVEHIFTDLMAKAKPERLLVLARYVRRGGLDISPWRATPGERPPEPLRLARQ

SEQ ID NO: 46326 - protein, 277 aa, Halomonas desiderata
  misc_feature (1)..(277): tr|A0A243SZ79|A0A243SZ79_9GAMM NADPH-dependent 7-cyano- 7-deazaguanine reductase OS=Halomonas desiderata SP1 OX =1191209 GN=queF PE=3 SV=1
MSHRPDTLEHAPLGRESAYPEHYDAGLLYPIPRAANRAPLGIEAGRLPFVGEDEWHAFEVSWLNARGKPRVAVARFRLPAESPNLIESKSWKLYLNGFNQTRFDSREQVIDTLERDLAQAAGAPVSVELFDVDDAALAVCRLPGECLDELDIEIDAYSPSAEHLKVGEEIVEETLYSHLLKSNCPVTGQPDWGSVLIRYRGPKLDREGLLRYLIGYRQHQDFHEHCVEHIFTDLMAKAKPERLLVLARYVRRGGLDISPWRATPGERPPEPLRLARQ

SEQ ID NO: 46327 - protein, 278 aa, Halomonas elongata
  misc_feature (1)..(278): tr|A0A329Q7C0|A0A329Q7C0_HALEL NADPH-dependent 7-cyano- 7-deazaguanine reductase OS=Halomonas elongata OX=2746 GN=queF PE=3 SV=1
MAHHRPETLTGAPLGRESAYPEHYDAGLLYPIERAANRAPLGIEEGALPFDGEDEWHAFELSWLNARGKPIVAVARFRLPASSPRLIESKSWKLYLNSFNQSRFASTDEVIQLLERDLAEAAGAAVGVEVFGVDDPALTPRSLPGECIDDLDIEIADYTPSAAHLTVGEEVVEETLHSHLLKSNCPVTGQPDWGSVMIRYRGPKLDREGLLRYLVGYRQHQDFHEHCVEHIFTDLMARARPERLLVLARYVRRGGLDISPWRATPGERPPEPLRLARQ

SEQ ID NO: 46328 - protein, 278 aa, Halomonas elongata
  misc_feature (1)..(278): tr|A0A1B8P4J8|A0A1B8P4J8_HALEL NADPH-dependent 7-cyano- 7-deazaguanine reductase OS=Halomonas elongata OX=2746 GN=queF PE=3 SV=1
MAHHRPETLTGAPLGRESAYPEHYDAGLLYPIERAANRAPLGIEEGALPFDGEDEWHAFELSWLNARGKPIVAVARFRLPASSPRLIESKSWKLYLNSFNQSRFASTDEVTQILERDLAEAAGAAVGVEVFGVDDPVLTPRSLPGECIDDLDVEIADYTPSAAHLTVGEEIVEETLHSHLLKSNCPVTGQPDWGSVMIRYRGPKLDREGLLRYLVGYRQHQDFHEHCVEHIFTDLMARARPERLLVLARYVRRGGLDISPWRATPGERPPEPLRLARQ

SEQ ID NO: 46329 - protein, 278 aa, Halomonas endophytica
  misc_feature (1)..(278): tr|A0A2N7U0P5|A0A2N7U0P5_9GAMM NADPH-dependent 7-cyano- 7-deazaguanine reductase OS=Halomonas endophytica OX=20 33802 GN=queF PE=3 SV=1
MAHHRPDTLEHAPLGRESAYPEQYDAALLYPISRAANRAPLGIEAGALPFVGQDEWHAFEVSWLNARGKPIVAVARFRLPADSPNLIESKSWKLYLNGFNQTRFDSRERVVTILEQDLAAAAGAPVSVELFDVDAPALAVRELPGECLDDLDIEISDYTPSTEHLRVSEDVVEETLYSHLLKSNCPVTGQPDWGSVLIRYRGPRLDREGLLRYLVGYRQHQDFHEHCVEHIFTDLMARARPERLLVLARYVRRGGLDISPWRGTPGEKPPESLRLARQ

SEQ ID NO: 46330 - protein, 277 aa, Halomonas eurihalina
  misc_feature (1)..(277): tr|A0A5D9D8R0|A0A5D9D8R0_HALER NADPH-dependent 7-cyano- 7-deazaguanine reductase OS=Halomonas eurihalina OX=425 66 GN=queF PE=3 SV=1
MNDRPDSLVDAPLGRESAYPEHYDAGLLYPIERAVNRAPLGIEERALPFDGEDEWHAFELSWLNARGKPIVAVARFRLPASSPRLIESKSWKLYLNSFNQSRFDATGDVIQLLERDLAEAAGAPVGVEVFGVDDPALTPRALPGESIDEQDIEISDYTPSAEHLTVGEAIVEETLHSHLLKSNCPVTGQPDWGSVMIRYRGPKLDREGLLRYLVGYRQHQDFHEHCVEHIFTDLMARARPERLLVLARYVRRGGLDISPWRATPGERPPSPLRLARQ

SEQ ID NO: 46331 - protein, 278 aa, Halomonas gudaonensis
  misc_feature (1)..(278): tr|A0A1G8MXT9|A0A1G8MXT9_9GAMM NADPH-dependent 7-cyano- 7-deazaguanine reductase OS=Halomonas gudaonensis OX=37 6427 GN=queF PE=3 SV=1
MNRKRPNTLQQAPLGRETDYPERYDAGLLYPMPRAANRVPLGIQEGRLPFVGEDEWHAFEVSWLNDRGKPLVAVARFRLPAESPNLIESKSWKLYLNGFNQSRFASREHVLEALEHDLSMAAGAPVSVELFGVDDDALMPRRLPGECLDDLDIEVPSYTPSAEVIGVGDEVVEETLHSHLLKSNCPVTGQPDWGSVLIRYRGPKLDREGLLRYLIGYRQHQDFHEHCVEHVFMDLMARARPERLLVLARYVRRGGLDISPWRATPGERPPQPLRLARQ

SEQ ID NO: 46332 - protein, 277 aa, Halomonas halmophila
  misc_feature (1)..(277): tr|A0A4Y4F170|A0A4Y4F170_9GAMM NADPH-dependent 7-cyano- 7-deazaguanine reductase OS=Halomonas halmophila OX=252 GN=queF PE=3 SV=1
MNDRPDSLAYAPLGRESAYPEQYDAGLLYPIERAVNRAPLGIEAGALPFVGEDEWHAFELSWLNARGKPRVAVARFRLPAESPRLIESKSWKLYLNSYNQSRFASPAAVREQLEKDLAEAAGAPVSVELFGVDASELMPQRLPGECIDELDIAIDDYTPSAEPLVVGDEIVEETLHSHLLKSNCPVTGQPDWGSVLIRYRGPRIDREGLLRYLVGYRQHQDFHEHCVEHIFCDLMARARPERLLVLARYVRRGGLDISPWRGTLGEIPPTPLRLARQ

SEQ ID NO: 46333 - protein, 278 aa, Halomonas halophila
  misc_feature (1)..(278): tr|A0A510ZI94|A0A510ZI94_9GAMM NADPH-dependent 7-cyano- 7-deazaguanine reductase OS=Halomonas halophila OX=2957 3 GN=queF PE=3 SV=1
MAHQRPETLAEAPLGRESAYPEHYDAGLLYPIARAANRAPLGIEEGALPFVGEDEWHAFEVSWLNARGKPIVAVARFRLPAESPRLIESKSWKLYLNSFNQTRLASQDEARAIMERDLSAAAGAPVAVELFGVDDAALAPRRLPGECIDERDIEVEDYTPSAEHLATGDEIVEETLHSHLLKSNCPVTGQPDWGSVMIRYRGPRLDRDGLLRYLIGYRQHQDFHEHCVEHIFMDLMERAKPERLLVLARYVRRGGLDISPWRGTPGEQPPTPLRLARQ

SEQ ID NO: 46334 - protein, 276 aa, Halomonas heilongjiangensis
  misc_feature (1)..(276): tr|A0A2N7TPN6|A0A2N7TPN6_9GAMM NADPH-dependent 7-cyano- 7-deazaguanine reductase OS=Halomonas heilongjiangensis OX=1387883 GN=queF PE=3 SV=1
MDRPDTLEHAPLGRESAYPERYDAGLLYPIARAANRAPLGIEEGALPFVGEDEWHAFEVSWLNARGKPVVAVARFRLPVDSPNLIESKSWKLYLNGFNQTRFDSRERVIDTLVADLSAAAGAPVSVELLDVDDEALAPRRLPGESLDDLDIEVSDYTPSADHLKVGVEIVEETLYSHLLKSNCPVTGQPDWGSVLIRYRGPRLDREGLLRYLIGYRQHQDFHEHCVEHIFTDLMARARPERLLVLARYVRRGGLDISPWRGTPGERPPEPLRLARQ

SEQ ID NO: 46335 - protein, 283 aa, Halomonas huangheensis
  misc_feature (1)..(283): tr|W1N5J8|W1N5J8_9GAMM NADPH-dependent 7-cyano-7-deazag uanine reductase OS=Halomonas huangheensis OX=1178482 G N=queF PE=3 SV=1
MSELSTPGQRPETLEHAPLGRESNYPEHYDPSLLFPIARAANRAPLGIEESRLPFVGEDEWHAFELSWLNRKGKPIVAVARFRLPAESPNLIESKSWKLYLNSFNQTHFDDHAAVAQTLTADLSKAAGAEVKVELLAVDDAELMPRPLPGECIDDLDIDVRSYTPSSDHLAVGDEVVEETLTSHLLKSNCPVTGQPDWGSVMIRYRGPRLDREGLLRYIIGYRQHQDFHEHCVEHIFTDLMQRARPERLLVMARYVRRGGLDISPWRATPGEEPPLPLRLARQ

SEQ ID NO: 46336 - protein, 277 aa, Halomonas hydrothermalis
  misc_feature (1)..(277): tr|A0A291JVM8|A0A291JVM8_9GAMM NADPH-dependent 7-cyano- 7-deazaguanine reductase OS=Halomonas hydrothermalis OX =115561 GN=queF PE=3 SV=1
MAHRPDTLEHAPLGRDSAYPEQYDAALLYPIPRAANRAPLGIEESALPFVGEDEWHAFEVSWLNGRGKPVVAVARFRLPASSPQLIESKSWKLYLNSLNQTRFASQAEVEAILVRDLSGAAGAPVSVELLPVDDEALAPRRLPGECLDDLDIEVSHYTPSAEHLTTHDDIVEETLHSHLLKSNCPVTGQPDWGSVLIRYKGPRLDREGLLRYLIGYRQHQDFHEHCVEHIFTDLMQYAQPESLLVLARYVRRGGLDISPWRATPGMAPPSPLRLARQ

SEQ ID NO: 46337 - protein, 278 aa, Halomonas ilicicola
  misc_feature (1)..(278): tr|A0A1M4YD91|A0A1M4YD91_9GAMM NADPH-dependent 7-cyano- 7-deazaguanine reductase OS=Halomonas ilicicola DSM 199 80 OX=1121942 GN=queF PE=3 SV=1
MNTDRPDTLRDAPLGRESAYPERYDPTLLYPIARAANRAPLGIDDADLPFEGEDEWHAFELSWLDPKGKPIVAVARFRLPASSPNLIESKSWKLYLNSFNHSHFPGRDEVREALVRDLSHAAGADVEVTLLGVDDETLMPRRLPGECIDGLDVEIRDYTPRPELLVTGDAIVEESLHSHLLKSNCPVTGQPDWGSVLIRYRGPRIDREGLLRYLVSYRQHQDFHEHCVEHIFTDLMARVRPERLLVLARYVRRGGLDISPWRATPGERPPQPLRLARQ

SEQ ID NO: 46338 - protein, 276 aa, Halomonas korlensis
  misc_feature (1)..(276): tr|A0A1I7FU78|A0A1I7FU78_9GAMM NADPH-dependent 7-cyano- 7-deazaguanine reductase OS=Halomonas korlensis OX=4633 01 GN=queF PE=3 SV=1
MDRLDTLSDAPLGRDSVYPDAYDAGLLFPISRTVNRAALGIEASSLPFVGEDEWHAFEVSWLNARGKPVVAVARFRLPADSPHLIESKSWKLYLNGFNQARFESRERVIDLLTRDLAATAGAPVSVELFDVDDEALGPRKMPGQCLDELDIEINDYTPHAEHLTVGEAVVEETLHSHLLKSNCPVTGQPDWGSVLIRYQGAQLDREGLLRYLIGYRQHQDFHEHCVEHIFIDLMERARPERLLVLARYVRRGGLDISPWRGTPGERPPQPLRLARQ

SEQ ID NO: 46339 - protein, 277 aa, Halomonas meridiana
  misc_feature (1)..(277): tr|A0A1N6HVE2|A0A1N6HVE2_9GAMM NADPH-dependent 7-cyano- 7-deazaguanine reductase OS=Halomonas meridiana OX=2957 0 GN=queF PE=3 SV=1
MVHRPDTLEHAPLGRDSAYPEQYDAGLLYPIPRAANRAPLGIEEGALPFVGEDEWHAFEVSWLNGRGKPIVAVARFRLPASSPHLIESKSWKLYLNSLNQTRFASQTKVEETLVRDLSSAAGASVSVELLGVDDSELAPQRLPGECLDDLDIEVSDYTPSAAHLTTGDEVVEETLHSHLLKSNCPVTGQPDWGSVLIRYKGPKLDREGLLRYLIGYRQHQDFHEHCVEHIFTDVMQQAKPEELLVLARYVRRGGLDISPWRATPGLTPPSLLRLARQ

SEQ ID NO: 46340 - protein, 277 aa, Halomonas meridiana
  misc_feature (1)..(277): tr|A0A0D7UTI5|A0A0D7UTI5_9GAMM NADPH-dependent 7-cyano- 7-deazaguanine reductase OS=Halomonas meridiana OX=2957 0 GN=queF PE=3 SV=1
MVHRPDTLEHAPLGRDSAYPEQYDAGLLYPIPRAANRAPLGIEEGALPFVGEDEWHAFEVSWLNGRGKPIVAVARFRLPASSPHLIESKSWKLYLNSLNQTRFASQAKVEETLVRDLSSAAGASVSVKLLGVDDSELAPQRLPGECLDDLDIEVSDYTPSATHLTASDEIVEETLHSHLLKSNCPVTGQPDWGSVLIRYKGPKLDREGLLRYLIGYRQHQDFHEHCVEHIFTDLMQQAKPEELLVLARYVRRGGLDISPWRATPGLTPPSPLRLARQ

SEQ ID NO: 46341 - protein, 278 aa, Halomonas muralis
  misc_feature (1)..(278): tr|A0A1G9F3H8|A0A1G9F3H8_9GAMM NADPH-dependent 7-cyano- 7-deazaguanine reductase OS=Halomonas muralis OX=119000 GN=queF PE=3 SV=1
MKTQCPDVLKNAPLGRESAYPERYDPTLLFPIARAANRAPLGIADEALPFVGEDEWHAFELSWLDPKGKPIVAVARFRLLATSPNLIESKSWKLYLNSFNHSRFAGHAEVEQTLARDLSAAAGGDVSVTLLDVDDEALTPRRLPGDCIDGLDVEIHDYAPNPDLLSAGDETIEESLHSHLLKSNCPVTGQPDWGSVLIRYHGPRIDREGLLKYLVSYRQHQDFHEHCVEHIFTDLMARVRPERLLVMARYVRRGGLDISPWRATPGERPPEPLRLARQ

SEQ ID NO: 46342 - protein, 277 aa, Halomonas nigrificans
  misc_feature (1)..(277): tr|A0A2A4HMF4|A0A2A4HMF4_9GAMM NADPH-dependent 7-cyano- 7-deazaguanine reductase OS=Halomonas nigrificans OX=20 42704 GN=queF PE=3 SV=1
MAYRPDTLENAPLGRDAAYPEHYDAGLLYPIPRAANRAPLGIEEGKLPFVGEDEWHAFEVSWLNGRGKPIVAVARFRLPAESPNLIESKSWKLYLNSFNQTRFADQDAVQSTLTRDLANAAGATVSVELLAVDDAELTPQSLPGECLDDLDIDVSNYTPSATFLVAGEEVVEESLYSHLLKSNCPVTGQPDWGSVLIRYKGPKIDREGLLRYLIGYRQHQDFHEHCVEHIFTDLMQQVKPEELLVLARYVRRGGLDISPWRATPGLTPPSPLRLARQ

SEQ ID NO: 46343 - protein, 278 aa, Halomonas nitroreducens
  misc_feature (1)..(278): tr|A0A431V0C7|A0A431V0C7_9GAMM NADPH-dependent 7-cyano- 7-deazaguanine reductase OS=Halomonas nitroreducens OX= 447425 GN=queF PE=3 SV=1
MSHHRPDTLVHAPLGRESAYPEDYDAGLLYPIERAANRAPLGIEAGALPFVGEDEWHAFEVSWLNARGKPIVAVARFRLPADSPRLIESKSWKLYLNGFNQTRFASQEEVVATLERDLAEAARAAVGVELFGVDDAVLVPKRLPGECIDDRDIEIDDYTPSAEHLRVGEEVVEETLHSHLLKSNCPVTGQPDWGSVLVRYRGPRLDRDGLLRYLIGYRQHQDFHEHCVEHIFMDLMARARPERLLVLARYVRRGGLDISPWRATPGERPPSPLRLARQ

SEQ ID NO: 46344 - protein, 99 aa, Halomonas olivaria
  misc_feature (1)..(99): tr|A0A3T1DM06|A0A3T1DM06_9GAMM Uncharacterized protein OS=Halomonas olivaria OX=390919 GN=HORIV_20240 PE=4 SV= 1
MLKSNCPVTGQPDWGSVLVRYKGPKIDREGLLRYLIGFRQHQDFHEHCVEHIFTDLMAQAKPTQLLVLARYVRRGGLDISPWRATPGLTPPTPLRLARQ

SEQ ID NO: 46345 - protein, 149 aa, Halomonas olivaria
  misc_feature (1)..(149): tr|A0A3T1DLX1|A0A3T1DLX1_9GAMM QueF_N domain-containing protein OS=Halomonas olivaria OX=390919 GN=HORIV_20230 PE=4 SV=1
MAHRPDTLEHAPLGRDSAYPEQYDAGLLYPIPRAANRAPLGIEEDDLPFVGEDEWHAFEVSWLNSRGKPIVAVARFRLPAASPYLIESKSWKLYLNSFNQTRFYSREDVMKTLAHDLAAAAGAEVSVELFDVDAPELSARPLPGSAWTI

SEQ ID NO: 46346 - protein, 278 aa, Halomonas pacifica
  misc_feature (1)..(278): tr|A0A510XB94|A0A510XB94_9GAMM NADPH-dependent 7-cyano- 7-deazaguanine reductase OS=Halomonas pacifica OX=77098 GN=queF PE=3 SV=1
MTSHRPETLEHAPLGRDSAYPEHYDAGLLYPIPRAANRAPLGISEEALPFVGEDEWHAFELSWLNARGKPMVAVARFRLPADSPNLIESKSWKLYLNSFNQTRLESREALIATLEADLAAAAGAPVTVELFGVDDAALAPQRLPGDCLDDLDIEVNDYTPSAEHLVVGEAIVEETLHSHLLKSNCPVTGQPDWGSVLIRYRGPRLDREGLLRYLISYRQHQDFHEHCVEHIFTDLLARARPERLLVMARYVRRGGLDISPWRGTPGETPPLPLRLARQ

SEQ ID NO: 46347 - protein, 276 aa, Halomonas pantelleriensis
  misc_feature (1)..(276): tr|A0A1G9JXD4|A0A1G9JXD4_9GAMM NADPH-dependent 7-cyano- 7-deazaguanine reductase OS=Halomonas pantelleriensis O X=48727 GN=queF PE=3 SV=1
MQRPETLANAPLGRESAYPEQYDAALLYPIPRAANRAPLGIEEGALPFVGEDEWHAFEVSWLNARGKPLVAVARFRLPADSPNLIESKSWKLYLNSFNQTRFASREEVMATLECDLSAAAGTPVGVALLGVEDEALTPRPLPGECLDGLDIEIDDYTPSAAHLRVGEEIVEETLHSHLLKSNCPVTGQPDWGSVLIRYRGPRLDREGLLRYLIGYRQHQDFHEHCVEHIFMDLMAQACPERLLVLARYVRRGGLDISPWRATPGERPPEPLRLARQ

SEQ ID NO: 46348 - protein, 278 aa, Halomonas saccharevitans
  misc_feature (1)..(278): tr|A0A1I6YW12|A0A1I6YW12_9GAMM NADPH-dependent 7-cyano- 7-deazaguanine reductase OS=Halomonas saccharevitans OX =416872 GN=queF PE=3 SV=1
MTQHRPDTLTHAPLGRESAYPEHYDAGLLYPIPRAANRAPLGIEEGALPFVGEDEWHAFEVSWLNARGKPLVAVARFRLPAESPYLIESKSWKLYLNGFNQTRFESRQAVIDTLLRDLAQAAGAPVAVELLDLDDAALAVKRLPGECLDDLDIEVTDYTPSAAHLTAGEEIVEETLTSHLLKSNCPVTGQPDWGSVLIRYRGPRLDREGLLRYLIGYRQHQDFHEHCVEHIFTDLMARAHPERLLVLARYVRRGGLDISPWRATPGERPPEPLRLSRQ

SEQ ID NO: 46349 - protein, 277 aa, Halomonas shengliensis
  misc_feature (1)..(277): tr|A0A1H0N4X9|A0A1H0N4X9_9GAMM NADPH-dependent 7-cyano- 7-deazaguanine reductase OS=Halomonas shengliensis OX=4 19597 GN=queF PE=3 SV=1
MSRRPETLADAPLGRESAYPERYDVGLLYPIPRAANRAPLGIEEGALPFVGEDEWHAFEVSWLNARGKPVVAVARFRLPAASPYLIESKSWKLYLNGFNQSRFASRQAVIETLERDLSRAAGATVSVALFAVDDEALAPRRLPGECLDDLDIAIDDYTPSVEHLRVGDEVVEETLHSHLLKSNCPVTGQPDWGSVLIRYRGPRLDREVLLRYLVGYRQHQDFHEHCVEHIFMDLMARARPERLLVLARYVRRGGLDISPWRATLGERPPEPLRLARQ

SEQ ID NO: 46350 - protein, 277 aa, Halomonas songnenensis
  misc_feature (1)..(277): tr|A0A2T0V8C2|A0A2T0V8C2_9GAMM NADPH-dependent 7-cyano- 7-deazaguanine reductase OS=Halomonas songnenensis OX=1 176243 GN=queF PE=3 SV=1
MAHRPDTLEHAPLGRDSAYPEQYDAGLLFPIPRAANRAPLGIEEGSLPFVGEDEWHAFEVSWLNARGKPIVAVARFRLPADSPSLIESKSWKLYLNSFNQTRIESREALIETLTRDLSAAAGAPISVELLGVEDAELAPKPLPGDCLDDLDIEVSDYTPSAAHLAVSDEIVEETLHSHLLKSNCPVTGQPDWGSVLIRYKGPKLDREGLLRYLIGYRQHQDFHEHCVEHIFTDLMAHAKPIELLVLARYVRRGGLDISPWRATPGLTPPSPLRLARQ

SEQ ID NO: 46351 - protein, 277 aa, Halomonas sp.
  misc_feature (1)..(277): tr|A0A2N0G656|A0A2N0G656_9GAMM NADPH-dependent 7-cyano- 7-deazaguanine reductase OS=Halomonas sp. es.049 OX=176 1788 GN=queF PE=3 SV=1
MNYRPDTLINAPLGQESSYPEQYDASLLYPIARAANRAPLGIDEDALPFIGADEWHAFEMSWLNQRGKPMVAVARFTLPADSSHLIESKSWKLYLNSFNQTRFASREEVVEYLTQDLSKVAGATVTVELLDVDSDALMPRPLPGECLDELDIEVDAYTPSASHLSVGDEWVEETLYSHLLKSNCPVTGQPDWGSVLIRYKGRKVEREGLLRYVIGYRQHQDFHEHCVEHIFTDLMRIAAPEELLVLARYVRRGGLDISPWRATPGMSPPGPLRLARQ

SEQ ID NO: 46352 - protein, 278 aa, Halomonas sp.
  misc_feature (1)..(278): tr|A0A369L4M0|A0A369L4M0_9GAMM NADPH-dependent 7-cyano- 7-deazaguanine reductase OS=Halomonas sp. DQ26W OX=2282 311 GN=queF PE=3 SV=1
MTHHRPDTLEHAPLGRESAYPEHYDAGLLYPIPRAANRAPLGIEEGSLPFVGEDEWHAFEVSWLNGRGKPIVAVARFSLPADSPNLIESKSWKLYLNSFNQTRFNSREQVIDTLARDLAQAAGAPVSVELYSVDDDALAVQHLPGECLDGLDIEIENYTPSAEHLQVAEEVVEETLYSHLLKSNCPVTGQPDWGSVLVRYRGPKLDREGLLRYLIGYRQHQDFHEHCVEHIFTDLMTRARPERLLVLARYVRRGGLDISPWRATPGERPPEPLRLARQ

SEQ ID NO: 46353 - protein, 281 aa, Halomonas subglaciescola
  misc_feature (1)..(281): tr|A0A1M7IGB8|A0A1M7IGB8_9GAMM NADPH-dependent 7-cyano- 7-deazaguanine reductase OS=Halomonas subglaciescola OX =29571 GN=queF PE=3 SV=1
MEESHTGLEHSPLGRVATYPEHYDATLLFPLLRAENRVELGLEADDALPFVGEDEWHGFELSWLNARGKPVVAVGRFRLPADAPNLIESKSFKLYLNSFNQSRFASADDVAATLERDLTQTTGGRVGVDLLDVDDPALTPRTLPGECIDALDIDVNDYSPSADYLRAAVENAEIVEETLHSHLLKSNCPITGQPDWGSVMVRYKGPRLDREGLLRYLIGFRLQQGFHEHCVEQIFTDLMRQTAPSELLVLARYVRRGGLDISPWRATPGLLPPSPLRLARQ

SEQ ID NO: 46354 - protein, 277 aa, Halomonas subterranea
  misc_feature (1)..(277): tr|A0A1H9RGY3|A0A1H9RGY3_9GAMM NADPH-dependent 7-cyano- 7-deazaguanine reductase OS=Halomonas subterranea OX=41 6874 GN=queF PE=3 SV=1
MPHRPETLMEAPLGRESAYPEAYDPDLLYPIPRAANRAALDIDEGRLPFVGEDEWHAFEVSWLNGRGKPVVAVARFRLPADSPNLIESKSWKLYLNSFNQTRFAHRDDVIARLTQDLAGAATAPVSVELFDVDADALAPQQLPGECLDALDIEVSDYTPSADHLTTGEQVVEETLYSHLLKSNCPVTGQPDWGSVMIRYTGPKIEREGLLRYLIGYRQHQDFHEHCVEHIFTDLMRRAKPSELLVLARYVRRGGLDISPWRATPGLAPPSPLRLARQ

SEQ ID NO: 46355 - protein, 153 aa, Halomonas sulfidaeris
  misc_feature (1)..(153): tr|A0A455U3R0|A0A455U3R0_9GAMM Uncharacterized protein OS=Halomonas sulfidaeris OX=115553 GN=HSBAA_18110 PE=4 SV=1
MSVELFDVDASELSAQQLPGECLDDLDIAVSDYTPSSDHLMVGNEIVEETLYSHLLKSNCPVTGQPDWGSVLIRYKGPKLDREGLLRYLIGFRQHQDFHEHCVEHIFTDLMTQAKPTQLLVLARYVRRGGLDISPWRATPGLTPPTPLRLARQ

SEQ ID NO: 46356 - protein, 277 aa, Halomonas sulfidaeris
  misc_feature (1)..(277): tr|A0A365TIU1|A0A365TIU1_9GAMM NADPH-dependent 7-cyano- 7-deazaguanine reductase OS=Halomonas sulfidaeris OX=11 5553 GN=queF PE=3 SV=1
MTYRPDTLENAPLGRDSAYPEQYDAGLLYPIPRAANRAPLGIEEDALPFVGEDEWHAFEVSWLNSRGKPIVAVARFRLPASSPNLIESKSWKLYLNSFNQSRFYSRQEVMETLANDLAVAAGAEVSVELFDVDASELAAQQLPGECLDDLDIAVSDYTPSSDHLVVGDEIVEETLYSHLLKSNCPVTGQPDWGSVLIRYKGPKLDREGLLRYLIGFRQHQDFHEHCVEHIFTDLMTQAKPTQLLVLARYVRRGGLDISPWRATPGLTPPTPLRLARQ

SEQ ID NO: 46357 - protein, 278 aa, Halomonas taeanensis
  misc_feature (1)..(278): tr|A0A328XRI4|A0A328XRI4_9GAMM NADPH-dependent 7-cyano- 7-deazaguanine reductase OS=Halomonas taeanensis OX=284 577 GN=queF PE=3 SV=1
MTHDRPETLAEAPLGRESAYPEHYDPALLYPIPRAANRAPLGITNDALPFVGEDEWHAFEVSWLTPRGKPVVAVARFRLPAESPNLIESKSWKLYLNSYNQTRFASRAEVSATLEQDLAAAAGAPVSVELFGVDDQALATQRLPGECIDDLDVEIDAYTPDPALLSVGEEVVEETLHSHLLKSNCPVTGQPDWGSVLIRYRGPQIDREGLLKYLVSYRQHQDFHEHCVEHIFTDLMARARPERLLVLARYVRRGGLDISPWRATPGERPPEPLRLARQ

SEQ ID NO: 46358 - protein, 278 aa, Halomonas taeanensis
  misc_feature (1)..(278): tr|A0A1G7SXG7|A0A1G7SXG7_9GAMM NADPH-dependent 7-cyano- 7-deazaguanine reductase OS=Halomonas taeanensis OX=284 577 GN=queF PE=3 SV=1
MTHDRPETLTDAPLGRESAYPEHYDPALLYPIARAANRAPLGIANDALPFVGEDEWHAFEVSWLTPRGKPVVAVARFRLPADSPNLIESKSWKLYLNSYNQTRFASRAEVSATLEQDLASAAGAPVAVELFGVDDQALATQRLPGECIDDLDVEIDAYTPDPALLSVGDEVVEETLHSHLLKSNCPVTGQPDWGSVLIRYRGPQLDREGLLKYLVSYRQHQDFHEHCVEHIFTDLMARARPERLLVLARYVRRGGLDISPWRGTPGERPPEPLRLARQ

SEQ ID NO: 46359 - protein, 277 aa, Halomonas titanicae
  misc_feature (1)..(277): tr|A0A558J277|A0A558J277_9GAMM NADPH-dependent 7-cyano- 7-deazaguanine reductase OS=Halomonas titanicae OX=6646 83 GN=queF PE=3 SV=1
MAHRPDTLEHAPLGRDSAYPEQYNAGLLYPIPRAANRAPLGIEEGALPFVGEDEWHAFEVSWLNSRGKPIVAVARFRLPASSPHLIESKSWKLYLNSFNQTRFYSREEVVQTLANDLAVAAGAEVSVELFDVDAPELSAQRLPGECLDDLDIAVSDYTPSSAHLTVGDEVVEETLYSHLLKSNCPVTGQPDWGSVLICYKGPKIDREGLLRYLIGFRQHQDFHEHCVEHIFTDLMAQVQPTQLLVLARYVRRGGLDISPWRATPGLTPPTPLRLARQ

SEQ ID NO: 46360 - protein, 285 aa, Halomonas titanicae
  misc_feature (1)..(285): tr|L9U717|L9U717_9GAMM NADPH-dependent 7-cyano-7-deazag uanine reductase OS=Halomonas titanicae BH1 OX=1204738 GN=queF PE=3 SV=1
MRRESFYTMAHRPDTLEHAPLGRDSAYPEQYDAGLLYPIPRVANREPLGIEEGTLPFVGEDEWHAFEVSWLNSRGKPIVAVARFRLPAASPNLIESKSWKLYLNSFNQTRFYSRQEVMETLAHDLAVAAGAEVSVELFDVDASELSPQLLPGECLDDLDIAVSDYTPSSDHLTVGEEVVEETLYSHLLKSNCPVTGQPDWGSVLIRYKGPKIDREGLLRYLIGFRQHQDFHEHCVEHIFCDLMAQAKPTQLLVLARYVRRGGLDISPWRATPGLTPPTPLRLARQ

SEQ ID NO: 46361 - protein, 278 aa, Halomonas urumqiensis
  misc_feature (1)..(278): tr|A0A2N7UF63|A0A2N7UF63_9GAMM NADPH-dependent 7-cyano- 7-deazaguanine reductase OS=Halomonas urumqiensis OX=16 84789 GN=queF PE=3 SV=1
MTHPRPATLSNAPLGRESAYPEHYDAGLLYPIARAANRAPLGIEEDALPFVGEDEWFAFEVSWLNARGKPLVAVARFRVPADSPRLIESKSWKLYLNSFNQTRFQDRDAVIDTLRRDLEAAAGVAVDVALYGVEDPVLMPHGLPGDCIDELDIAVDDYTPSAGHLAAGEEIVEETLHSHLLKSNCPVTGQPDWGSVMIRYRGPKLDREGLLRYLIGYRQHQDFHEHCVEHIFTDLMAQARPERLLVLARYVRRGGLDISPWRATPGERPPQPMRLARQ

SEQ ID NO: 46362 - protein, 278 aa, Halomonas ventosae
  misc_feature (1)..(278): tr|A0A2T0VQ19|A0A2T0VQ19_9GAMM NADPH-dependent 7-cyano- 7-deazaguanine reductase OS=Halomonas ventosae OX=22900 7 GN=queF PE=3 SV=1
MAHHRPDTLMHAPLGREAAYPAHYDAGLLFAIPRAANRAPLGIEEGALPFIGEDEWHAFEVSWLNTRGKPLVAVARFRLPAESPNLVESKSWKLYLNGFNQTRFESRQAVIDTLEHDLSAAAAAPVSVELFHVDDEALAVTPLPGECLDDLDIEVTDYTPCAEHLAVGEEIVEETLHSHLLKSNCPVTGQPDWGSVLIRYRGPRLDREGLLRYLIGYRQHLDFHEHCVEHIFMDLMDRTRPERLLVLARYVRRGGLDISPWRATPGERPPEPLRLSRQ

SEQ ID NO: 46363 - protein, 279 aa, Halomonas ventosae
  misc_feature (1)..(279): tr|A0A4R6HE95|A0A4R6HE95_9GAMM NADPH-dependent 7-cyano- 7-deazaguanine reductase OS=Halomonas ventosae OX=22900 7 GN=queF PE=3 SV=1
MSHPRPDALAHAPLGHTAVYPQHYDAGLLYPIPRTANRMPLGIEEGALPFVGEDEWHAFEVSWLNARGKPRVAVARFSLPADSPNLIESKSWKLYLNGFNQTRFDSRERVMDTLVNDLSRAAGAAVGVELLDVDDEALSPRRLPGECLDDLDIEVTDYTPSAEHLRVSDEVIVEETLYSHLLKSNCPVTGQPDWGSVLIRYRGPRLDREGLLRYLIGYRQHQDFHEHCVEHIFMDLVERARPQRLLVLARYVRRGGLDISPWRATPGERPPAPLRLARQ

SEQ ID NO: 46364 - protein, 277 aa, Halomonas venusta
  misc_feature (1)..(277): tr|A0A3S8YQL7|A0A3S8YQL7_9GAMM NADPH-dependent 7-cyano- 7-deazaguanine reductase OS=Halomonas venusta OX=44935 GN=queF PE=3 SV=1
MAHRPDTLEHAPLGRDSAYPEQYDAGLLYPIPRAANRAPLGIEDSKLPFVGEDEWHAFEVSWLNNRGKPIVAVARFRLPADSPSLIESKSWKLYLNSLNQTRFESREAVQRVLVRDLAAAAGASVSVELLGVDDAELAPQRLPGECLDDLDIDISDYTPSAAHLVVSEEIVEETLHSHLLKSNCPVTGQPDWGSVLIRYKGPKIDREGLLRYLIGYRQHQDFHEHCVEHIFTDLMQLAKPEELLVLARYVRRGGLDISPWRATPGLTPPSPLRLARQ

SEQ ID NO: 46365 - protein, 277 aa, Halomonas xianhensis
  misc_feature (1)..(277): tr|A0A4R8FPR1|A0A4R8FPR1_9GAMM NADPH-dependent 7-cyano- 7-deazaguanine reductase OS=Halomonas xianhensis OX=442 341 GN=queF PE=3 SV=1
MTHRPDTLKHAPLGRESVYPEHYDPTLLFPIARSANRAPLGIDNADLPFVGEDEWHAFEMSWLDERGKPIVAVARFRLPATSPNLIESKSWKLYLNSFNQTRFADWNAVLGTLAEDLSAAAGGGVEVSLFDLDDDALMPRKLPGECIDGLDVEISDYSPNSGLLMASEEIVEESLYSHLLKSNCPVTGQPDWGSVLIRYRGPKIDREGLLRYVVSFRQHQDFHEHCVEHIFTDLMARVRPERLLVMARYMRRGGLDISPWRGTPGERPPEPLRLARQ

SEQ ID NO: 46366 - protein, 277 aa, Halomonas xianhensis
  misc_feature (1)..(277): tr|A0A1I2ZJA9|A0A1I2ZJA9_9GAMM NADPH-dependent 7-cyano- 7-deazaguanine reductase OS=Halomonas xianhensis OX=442 341 GN=queF PE=3 SV=1
MTHRPDTLKHAPLGRESVYPEHYDPTLLFPIARSANRAPLGIDNADLPFVGEDEWHAFEMSWLDERGKPIVAVARFRLPATSPNLIESKSWKLYLNSFNQTRFADWNAVLGTLAEDLSAAAGGGVEVSLLDLDDDALMPRKLPGECIDGLDVEISDYSPNSRLLTASEEIVEESLYSHLLKSNCPVTGQPDWGSVLIRYRGPKIDREGLLRYVVSFRQHQDFHEHCVEHIFTDLMARVRPKRLLVMARYVRRGGLDISPWRGTPGERPPEPLRLARQ

SEQ ID NO: 46367 - protein, 165 aa, Haloplasma contractile
  misc_feature (1)..(165): tr|F7Q132|F7Q132_9BACT NADPH-dependent 7-cyano-7-deazag uanine reductase OS=Haloplasma contractile SSD-17B OX=1 033810 GN=queF PE=3 SV=1
MAGRNEKDLDGVTLLGNQGVKYNYEYDPDILESFENKHPGNDYFVKFNAPEFTSLCPITGQPDFATIYISYVPGKLMVESKSLKLYLFSFRNHGDFHEDCMNIIMKDLIKLMDPKYIEVWGKFTPRGGISIDPYCNYGKPGTEWENVAKQRLFQHDMYPETIDNR

SEQ ID NO: 46368 - protein, 119 aa, Halorhodospira halochloris
  misc_feature (1)..(119): tr|A0A0X8X8Y2|A0A0X8X8Y2_HALHR NADPH-dependent 7-cyano- 7-deazaguanine reductase OS=Halorhodospira halochloris OX=1052 GN=queF PE=3 SV=1
MTTDSSSLLETFTNPNPDRDYTIQMEIPEFTCLCPKTGQPDFATLKLEYIPDRLCVELKSLKLYVWSYRDTGAFHEAVTNRILNDLVTVTAPRYMKLTAEFNVRGGIWTTVVVEHPQGD

SEQ ID NO: 46369 - protein, 118 aa, Halorhodospira halophila
  misc_feature (1)..(118): sp|A1WY83|QUEF_HALHL NADPH-dependent 7-cyano-7-deazagua nine reductase OS=Halorhodospira halophila (strain DSM 244 / SL1) OX=349124 GN=queF PE=3 SV=1
MSTEPSKTLETFENPNPERDYTIRMEIPEFTCLCPKTGQPDFATLNLEYIPERHCVELKSLKLYIWSYRDVGGFHEALTNQILGDLVAATQPRYMKLTAHFNVRGGIWTTVEAEHHGR

SEQ ID NO: 46370 - protein, 273 aa, Halospina denitrificans
  misc_feature (1)..(273): tr|A0A4R7JTJ6|A0A4R7JTJ6_9GAMM NADPH-dependent 7-cyano- 7-deazaguanine reductase OS=Halospina denitrificans OX= 332522 GN=DES49_1754 PE=3 SV=1
MTQDDMPLGRTTNYPESYDPELLFPVPRVDNRRELGLGQGGWPWYGEDRWQAWEISWLRPDGVPRVAVGEFRVPADSPCLIESKSFKLYLNSLNNRVFPTQVELIRTLETDLSEKAGALVSARLFPVEEMRQAQARPSEAALIDDAGGVVLPADEPLSHLVEARGERVQERLCSHLLRSLCPVTGQPDWGTLLVEYDGPRIDRGALLGYIIGFREQRDFHEHCVERIFTDLQHHLGPARLSVGAWYTRRGGLDINPWRSTDTGSAPGIRLCRQ

SEQ ID NO: 46371 - protein, 272 aa, Halospina sp.
  misc_feature (1)..(272): tr|A0A5J5FKY8|A0A5J5FKY8_9GAMM NADPH-dependent 7-cyano- 7-deazaguanine reductase QueF OS=Halospina sp. K52047b OX=2614160 GN=queF PE=4 SV=1
MELDDAPLGRTSAYPEHYDPALLYPVARAQARESLGLADGWPWQGEDRWQAWELSWLRPDGVPRVATAEFRVPADSPNLIESKSLKLYLNAFNSTVFEGVESVRTTIERDLSEAAGAAVSVVLGDVDADAGLVARPEGAHLIDDVEGVIMPADGPLASLRSLDGDVVTESLCSHLLRSLCPVTGQPDWATLVVHYTGARMRPEALLGYVISYREARDFHEACVERIFTDLRDALTPERLSVGAFYTRRGGLDINPWRSTHQGDAPAPRLLRQ

SEQ ID NO: 46372 - protein, 284 aa, Halotalea alkalilenta
  misc_feature (1)..(284): tr|A0A172YH98|A0A172YH98_9GAMM NADPH-dependent 7-cyano- 7-deazaguanine reductase OS=Halotalea alkalilenta OX=37 6489 GN=queF PE=3 SV=1
MNDHATHAGLDDAPLGHASSYPERYDAGLLFPIPRAANRVGLGLAPGAALPFVGLDQWQAFELSWLDPRGKPVVRLARFTVPANSPNLIESKSWKLYLNGFNQMRHAHEAEVAALLHRDLSQAAGAQVEVALFGVDDPALATVRLPGSCIDGFDVEIEDYSPNPALLRCVEDEVVEETLHSHLLKSNCPVTGQPDWGSVVVRYRGPRLVAETLLAYLVSYRNHQDFHEHCVERIFLDLLERARPERLAVMARYTRRGGLDINPCRATSRDALDPAWLDARMTRQ

SEQ ID NO: 46373 - protein, 134 aa, Halothece sp.
  misc_feature (1)..(134): tr|K9Y6A4|K9Y6A4_HALP7 NADPH-dependent 7-cyano-7-deazag uanine reductase OS=Halothece sp. (strain PCC 7418) OX= 65093 GN=queF PE=3 SV=1
MAENLTNSPEMKYGEREIAEGELITFPNPRPGRRYKVDVSLPEFTCKCPFSGYPDFATINISYMPDQAIVELKAIKLYINSYRDRYISHEEAVNQILDDFVAACDPLEVTITGDFSPRGNVHTVVEVHHQQPRV

SEQ ID NO: 46374 - protein, 129 aa, Halothiobacillaceae bacterium
  misc_feature (1)..(129): tr|A0A545SB75|A0A545SB75_9GAMM NADPH-dependent 7-cyano- 7-deazaguanine reductase OS=Halothiobacillaceae bacteri um OX=2268194 GN=queF PE=3 SV=1
MSTRPSRELETFANPNPERDFTIRIRVPEFTCICPKTGQPDFATIFIDYIADQKCVELKALKLYMWSFREEGGFHEAMTNRILTDLVEATDPRYMRVTGEWNVRGGVYTTVVAEHRQEGWLPPVKVELP

SEQ ID NO: 46375 - protein, 129 aa, Halothiobacillus neapolitanus
  misc_feature (1)..(129): tr|D0KWM7|D0KWM7_HALNC NADPH-dependent 7-cyano-7-deazag uanine reductase OS=Halothiobacillus neapolitanus (stra in ATCC 23641 / c2) OX=555778 GN=queF PE=3 SV=1
MSTQPSKTLETFPNPFPDRDYTIHMTIPEFTCLCPKTGQPDFATITLDFVPDQLCVELKSLKTYMWSFREEGGFHEAMTNGILNDLVAAISPRFMRVTGEWNVRGGIYTNVVVEHRQPGWTPAPKIDLP

SEQ ID NO: 46376 - protein, 129 aa, Halothiobacillus sp.; identical to SEQ ID NO: 46375
  misc_feature (1)..(129): tr|A0A259S643|A0A259S643_9GAMM NADPH-dependent 7-cyano- 7-deazaguanine reductase OS=Halothiobacillus sp. 13-55- 253 OX=1970379 GN=queF PE=3 SV=1

SEQ ID NO: 46377 - protein, 129 aa, Halothiobacillus sp.
  misc_feature (1)..(129): tr|A0A191ZHC4|A0A191ZHC4_9GAMM NADPH-dependent 7-cyano- 7-deazaguanine reductase OS=Halothiobacillus sp. LS2 OX =1860122 GN=queF PE=3 SV=1
MSTQPSKTLETFPNPYPNRDYTIHMRVPEFTCLCPKTGQPDFATILIDFVPDQLCVELKSLKLYMWSFREEGGFHEAVTNGILDDIVQAISPRFIRVTGEWNVRGGVYTNVVVEYRKPDWQPAPRVELP

SEQ ID NO: 46378 - protein, 272 aa, Halovibrio sp.
  misc_feature (1)..(272): tr|A0A2A2F4J1|A0A2A2F4J1_9GAMM NADPH-dependent 7-cyano- 7-deazaguanine reductase OS=Halovibrio sp. YL5-2 OX=203 2626 GN=queF PE=3 SV=1
MELDDAPLGRTSAYPEHYDPALLYPVARAQAREPLGLADGWPWQGEDRWQAWELSWLRPDGVPRVATAEFRVPADSPNLIESKSLKLYLNAFNSTVFEGVESVRTTIERDLSEAAGAAVSVVLGDVDADAGLVARPEGAHLIDNVEGVIMPDDGPLASLRSLDGDVVTETLCSHLLRSLCPVTGQPDWATLVVHYTGARIRPEALLGYVISYREARDFHEACVERIFTDLRNTLTPERLSVGAFYTRRGGLDINPWRSTHQGDAPAPRLLRQ

SEQ ID NO: 46379 - protein, 277 aa, Halovibrio variabilis
  misc_feature (1)..(277): tr|A0A511USR8|A0A511USR8_9GAMM NADPH-dependent 7-cyano- 7-deazaguanine reductase OS=Halovibrio variabilis OX=31 910 GN=queF PE=3 SV=1
MSHRPDTLEHAPLGRDAVYPEQYDAGLLYPIPRAANRAPLGIEEGALPFVGEDEWHAFEVSWLNERGKPIVAVARFRLPADSPHLIESKSWKLYLNSFNQTRFYSREEVMQTLANDLSGAAGAAVSAELFDVDAAELAPQRLPGDCLDDLDILVSDYTPTSGHIAIGEEIVEETLYSHLLKSNCPVTGQPDWGSVMIRYKGPKIDREGLLRYLVSYRQHQDFHEHCVEHIFTDLMAHAKPTQLLVLARYVRRGGLDISPWRATPGLTPPTPLRLARQ

SEQ ID NO: 46380 - protein, 280 aa, Hamiltonella defensa
  misc_feature (1)..(280): tr|C4K591|C4K591_HAMD5 NADPH-dependent 7-cyano-7-deazag uanine reductase OS=Hamiltonella defensa subsp. Acyrtho siphon pisum (strain 5AT) OX=572265 GN=queF_1 PE=3 SV=1
MQDNDGIYAKHLGEKSDYIETYTPSLLEPVPRAFGREKIGLIDDTLPFDGFDLWTAFELSWLNQKGKPMVGMAEFKVPAQSKNLIESKSLKLYLNSLNQSHFDSSEALQSVLSKDLSNAAMGAVSVTVFEGMKNDDLHIHHPEGVNIDDIDIQVDDYRFNEGYLKDATQETAPFVSETLMSHLLKSNCLVTHQPDWGSVFIKYEGNKIDREKLLRYIISFRQHHEFHEQCVERIFLDIKKYCRPEKLTVFARYTRRGGLDINPFRSNYESIPNIKRLIRQ

SEQ ID NO: 46381 - protein, 280 aa, Hamiltonella defensa
  misc_feature (1)..(280): tr|C4K6F2|C4K6F2_HAMD5 NADPH-dependent 7-cyano-7-deazag uanine reductase OS=Hamiltonella defensa subsp. Acyrtho siphon pisum (strain 5AT) OX=572265 GN=queF_2 PE=3 SV=1
MHDNEDVYSKYLGKKSDYIDTYTPSLLEPVPRVLGRKKIGLMDDTLPFDGFDLWTAFELSWLNQKGKPMVGMAEFKIPAQSKNLIESKSLKLYLNSLNQSHFDSSEALQSVLSKDLSNAAVGAVYITVSEGMKNDDLHIHHPEGVNIDDIDIEVPDYRFNEGYLKDATQETAPFVSETLMSHLLKSNCLVTHQPDWGSVFIKYEGHPIDKEKLLRYIISFRQHHEFHEQCVERIFMDIKKYCRPEKLTVFARYTRRGGLDINPFRSDYESSFNVGRLIRQ

SEQ ID NO: 46382 - protein, 273 aa, Handelsmanbacteria sp.
  misc_feature (1)..(273): tr|A0A1F6C5F0|A0A1F6C5F0_HANXR NADPH-dependent 7-cyano- 7-deazaguanine reductase QueF OS=Handelsmanbacteria sp. (strain RIFCSPLOWO2_12_FULL_64_10) OX=1817868 GN=A3F84 _01090 PE=3 SV=1
MNSAWSQAPPGRRTGFVSAYTPGLLFPVSRRPKREEVCVPEPLPFRGCDIWNAYELSWLNPGGRPEVAIAEFRVPCDSECLVESKSFKLYLNSFCQSKFPGRDEVEATLAKDLAGATGSEVSVSLFLPEQFSHQRLSGFGGICLDRLSVRIERYTVQPDFLRAGGEVVEEALYSHLLKSNCPVTGQPDWGSVLFHYVGRQIDREGLLKYVVSFREHQEFHEHCVERMFMDILRRCEPERLTVYARYTRRGGLDINPFRSNWEEAPENVRLARQ

SEQ ID NO: 46383 - protein, 148 aa, Hansschlegelia sp.
  misc_feature (1)..(148): tr|A0A4Q9GLE5|A0A4Q9GLE5_9RHIZ NADPH-dependent 7-cyano- 7-deazaguanine reductase OS=Hansschlegelia sp. Dub OX=2 528245 GN=queF PE=3 SV=1
MTDLQLGRDVGLPASPETASLDRVPNPHRDVDYVVRFAAPEFTSLCPVTGQPDFAHLVIDYVPDEWLVESKSLKLFLGSFRNHGAFHEDCTVAIGKRLMETLKPRWLRIGGYWYPRGGIPIDVFWQTGDAPAGVWIPDQGVPSYRGRG

SEQ ID NO: 46384 - protein, 148 aa, Hansschlegelia zhihuaiae
  misc_feature (1)..(148): tr|A0A4Q0MKF3|A0A4Q0MKF3_9RHIZ NADPH-dependent 7-cyano- 7-deazaguanine reductase OS=Hansschlegelia zhihuaiae OX =405005 GN=queF PE=3 SV=1
MSDLQLGKPVSLPASPDEAELDRVPNPHPDVDYVARFTAPEFTSLCPVTGQPDFAHLVIDYVPAEWLVESKSLKLYLGAFRNHGAFHEDCTVAIAKRLIAALAPKWLRIGGYWYPRGGIPIDVFFQQGELPKGVWAPDQGVAPYRGRG

SEQ ID NO: 46385 - protein, 140 aa, Hapalosiphon sp.
  misc_feature (1)..(140): tr|A0A0M0SI82|A0A0M0SI82_9CYAN NADPH-dependent 7-cyano- 7-deazaguanine reductase OS=Hapalosiphon sp. MRB220 OX= 1704290 GN=queF PE=3 SV=1
MSNSLSESVSQPSQEMKYGEREIAEGQLTTFPNPRIGRRYNIDITLPEFTCKCPFSGYPDFATIHITYIPDQLVVELKALKLYINSYRDRYISHEESANQILDDFVTACDPLEITVKADFAPRGNVHTVIEVRHVKSESQ

SEQ ID NO: 46386 - protein, 140 aa, Hapalosiphonaceae cyanobacterium
  misc_feature (1)..(140): tr|A0A328IFH0|A0A328IFH0_9CYAN NADPH-dependent 7-cyano- 7-deazaguanine reductase OS=Hapalosiphonaceae cyanobact erium JJU2 OX=2109628 GN=queF PE=3 SV=1
MSNSLSESVSQPSQEMKYGEREIAEGQLITFPNPRIGRRYNIDITLPEFTCKCPFSGYPDFATIHITYIPDQLVVELKALKLYINSYRDRYISHEESANQILDDFVAACDPLEITLKADFAPRGNVHTVIEVHHVKSESQ

SEQ ID NO: 46387 - protein, 153 aa, Hartmannibacter diazotrophicus
  misc_feature (1)..(153): tr|A0A2C9D4C6|A0A2C9D4C6_9RHIZ NADPH-dependent 7-cyano- 7-deazaguanine reductase OS=Hartmannibacter diazotrophi cus OX=1482074 GN=queF PE=3 SV=1
MTTLDPASVKLGKHTDIPTEPSADILDRVPNPHPDTTYVARFTAPEFTSLCPVTGQPDFAHLVIDYVPNAWLVESKSLKLYLFSFRNHGAFHEGCTVEIGKALNDLLKPHWLRIGGYWYPRGGIPIDVFWQSGPVPEGIWLPDQGVPTYRGRG

SEQ ID NO: 46388 - protein, 160 aa, Hathewaya proteolytica
  misc_feature (1)..(160): tr|A0A1M6N5L0|A0A1M6N5L0_9CLOT NADPH-dependent 7-cyano- 7-deazaguanine reductase OS=Hathewaya proteolytica DSM 3090 OX=1121331 GN=queF PE=3 SV=1
MRKDLNLNLLGNEDIKYSFGYTPEVLETFDNKHPHNDYFVKFNCPEFTSLCPITSQPDFATIYISYVPDLKMVESKSLKLYLFSFRNHGDFHEDCMNIIMKDLIKLMDPKYIEVWGKFTPRGGISIDPYCNYGKPGTPWESIAFNRLANHDIYPEKVDNR

SEQ ID NO: 46389 - protein, 148 aa, Helicobacter acinonychis
  misc_feature (1)..(148): sp|Q17ZN4|QUEF_HELAH NADPH-dependent 7-cyano-7-deazagua nine reductase OS=Helicobacter acinonychis (strain Shee ba) OX=382638 GN=queF PE=3 SV=1
MSSELNLKLLGTKTPYIFEYNKDLLEAFPNPNPNLDPLITLECKEFTSLCPITSQPDFGVVYIRYIPKDKMVESKSLKLYLFSYRNHGSFHESCINTILLDLVGLLEPKYLEVYGDFVSRGGIAIKPFVNYAIKEYQDFKEKRLLGAK

SEQ ID NO: 46390 - protein, 146 aa, Helicobacter ailurogastricus
  misc_feature (1)..(146): tr|A0A0K2X4D1|A0A0K2X4D1_9HELI NADPH-dependent 7-cyano- 7-deazaguanine reductase OS=Helicobacter ailurogastricu s OX=1578720 GN=queF PE=3 SV=1
MPNYNLHHLGQKTPYIDKYDPTLLEAFANPHPNLDIFTRLVSAEFTSLCPITAQPDFATIYINYIAGAKMVESKSLKLYLFSFRNEGMFGEDCVGKILNDLVALLEPKYLEVLAKFTKRGSLAIEPFTNYAIPDYGDLKRQRLMKY

SEQ ID NO: 46391 - protein, 157 aa, Helicobacter anseris
  misc_feature (1)..(157): tr|A0A3D8J404|A0A3D8J404_9HELI NADPH-dependent 7-cyano- 7-deazaguanine reductase OS=Helicobacter anseris OX=375 926 GN=queF PE=3 SV=1
MANLTLLGSKTTNYDFKYNPDILEVFDNRHFENDYFVKFNCPEFTSLCPMTGQPDFATIYINYIPNLKMVESKSLKLYLFSFRNHGDFHENCVNVIMKDLIKIMEPRYIEVCGKFLPRGGISIDPYVNYGIPDTKYAEMAHYRLLHHDLNFEKVDNR

SEQ ID NO: 46392 - protein, 151 aa, Helicobacter apodemus
  misc_feature (1)..(151): tr|A0A4U8UE08|A0A4U8UE08_9HELI NADPH-dependent 7-cyano- 7-deazaguanine reductase OS=Helicobacter apodemus OX=13 5569 GN=queF PE=3 SV=1
MKTKIPFKSLGKKTSYTFNYDFNLLETFENSHQDRDYWVHFSCPEFTTLCPITGQPDFATISIAYIPQTKMVESKSLKLYLFSFRNEGGFHEDCVNIILKDLIKLLEPKYLEVLGDFTPRGGISINPYVNYGIPSTKYEEMANFRLLHHNL

SEQ ID NO: 46393 - protein, 98 aa, Helicobacter apodemus
  misc_feature (1)..(98): tr|A0A2U8FDY3|A0A2U8FDY3_9HELI NADPH-dependent 7-cyano- 7-deazaguanine reductase OS=Helicobacter apodemus OX=13 5569 GN=queF PE=3 SV=1
MKTKIPFKSLGKKTSYTFNYDFNLLETFENAHQDRDYWVDFVCPEFTTLCPITGQPDFATIRINYIPQAKMVESKSLKLYLFSFRNEGGFHEDCVQYV

SEQ ID NO: 46394 - protein, 167 aa, Helicobacter aurati
  misc_feature (1)..(167): tr|A0A3D8J6K6|A0A3D8J6K6_9HELI NADPH-dependent 7-cyano- 7-deazaguanine reductase OS=Helicobacter aurati OX=1377 78 GN=queF PE=3 SV=1
MKKNSTTKHQKIGKLHSLGKKTHYHFTYNPQILESVPNPHPQVDYFVKFNCPEFTALCPITGQPDFATIYLSYIPDRKIVESKSLKLYLFSFRNHGGFHEDCINIIAQDLIKILDPRYLEVWGKFTPRGGLSIDPYVNYGKKGTKFVKMARKRLLLHDLYPETITNR

SEQ ID NO: 46395 - protein, 161 aa, Helicobacter bilis
  misc_feature (1)..(161): tr|N2BIV0|N2BIV0_9HELI NADPH-dependent 7-cyano-7-deazag uanine reductase OS=Helicobacter bilis WiWa OX=1235804 GN=queF PE=3 SV=1
MAKQKQYDLKQLGKETIYTFSYDPNVLESVPNPHPQRDYFIKFNCPEFTSLCPITGQPDFATLYISYIADKLIVESKSLKLYLFSFRNHGGFHEDCVNTIADDLINLLSPRYLEVWGKFTPRGGLSIDPYVNYGKEKSVYAKMAKKRLWLHDLYPETITNR

SEQ ID NO: 46396 - protein, 161 aa, Helicobacter bilis; identical to SEQ ID NO: 46395
  misc_feature (1)..(161): tr|A0A4U8TPN3|A0A4U8TPN3_9HELI NADPH-dependent 7-cyano- 7-deazaguanine reductase OS=Helicobacter bilis OX=37372 GN=queF PE=3 SV=1

SEQ ID NO: 46397 - protein, 146 aa, Helicobacter bizzozeronii
  misc_feature (1)..(146): tr|F8KS13|F8KS13_HELBC NADPH-dependent 7-cyano-7-deazag uanine reductase OS=Helicobacter bizzozeronii (strain C III-1) OX=1002804 GN=queF PE=3 SV=1
MPESLSHLGGKTSYPITYSPHLLEAFDNPHPGQDIFTCLESQEFTSLCPITAQPDFARVRIAYIAHLKMVESKSLKLYLFSFRNEGVFGEDCVGKILNDLVALLEPRYLEVQAHFSARGGITITPFANYATPDYMDFKQQRLLQCL

SEQ ID NO: 46398 - protein, 146 aa, Helicobacter bizzozeronii
  misc_feature (1)..(146): tr|H5VDD2|H5VDD2_HELBI NADPH-dependent 7-cyano-7-deazag uanine reductase OS=Helicobacter bizzozeronii CCUG 3554 5 OX=1002805 GN=queF PE=3 SV=1
MLESLSHLGGKTSYPTTYNPHLLEAFENPHPGQDIFTALESAEFTSLCPITAQPDFARVRIAYIAHLKMVESKSLKLYLFSFRNEGVFGEDCVGKILNDLVTLLEPKYLEVQAHFSARGGITITPFANYATPDYMGFKQQRLLQCL

SEQ ID NO: 46399 - protein, 155 aa, Helicobacter canadensis
  misc_feature (1)..(155): tr|C5ZV74|C5ZV74_9HELI NADPH-dependent 7-cyano-7-deazag uanine reductase OS=Helicobacter canadensis MIT 98-5491 OX=537970 GN=queF PE=3 SV=1
MELKQLGKQTNYIFQYNKEVLETFENKHSKRDYFVKFNCPEFTSLCPITGQPDFATIYISYIPNLKMVESKSLKLYLFSFRNHGGFHEDCVNVILDDLVELMEPKYIEVWGKFTPRGGISIDPYVNYGIPNTKYAEIAEFRLLNHDLYPEKIDNR

SEQ ID NO: 46400 - protein, 159 aa, Helicobacter canis
  misc_feature (1)..(159): tr|V8CHV2|V8CHV2_9HELI NADPH-dependent 7-cyano-7-deazag uanine reductase OS=Helicobacter canis NCTC 12740 OX=13 57399 GN=queF PE=3 SV=1
MSNHTNYDVKALGSHTTYEHNYAPSLLEAVPNPHPDTAYFVKFNCPEFTSLCPITGQPDFATIYISYIPDALIVESKSLKLYLFSFRNHGAFHEDCINLILKDLNKLLEPHYIEVWGKFLPRGGLSIDPYCNHGKGQYQQMAQMRLANHDLYPETITNR

SEQ ID NO: 46401 - protein, 157 aa, Helicobacter canis
  misc_feature (1)..(157): tr|A0A377J6C8|A0A377J6C8_9HELI NADPH-dependent 7-cyano- 7-deazaguanine reductase OS=Helicobacter canis OX=29419 GN=queF PE=3 SV=1
MANDLDLKALGSRTTYEHNYAPSLLEAVPNPHPDVAYFVKFNCPEFTSLCPITGQPDFATIYISYIPDTLIVESKSLKLYLFSFRNHGAFHEDCMNLILKDLNKLLEPHYIEVWGKFLPRGGLSIDPYCNYGKGQYQQMAQMRLANHDLYPETITNR

SEQ ID NO: 46402 - protein, 150 aa, Helicobacter cetorum
  misc_feature (1)..(150): tr|I0EL49|I0EL49_HELC0 NADPH-dependent 7-cyano-7-deazag uanine reductase OS=Helicobacter cetorum (strain ATCC B AA-429 / MIT 00-7128) OX=182217 GN=queF PE=3 SV=1
MQENNELNLKSLGTKTPYIFEYNKDLLEAFPNPNPNLEPLITLECKEFTSLCPITAQPDFGTIYIRYIPKDKMVESKSLKLYLFSYRNCGNFHESCINTILLDLVELLEPKYLEVYGDFVSRGGIAIKPFVNYALKEYQDFKEKRLLNTK

SEQ ID NO: 46403 - protein, 150 aa, Helicobacter cetorum
  misc_feature (1)..(150): tr|I0EQE2|I0EQE2_HELCM NADPH-dependent 7-cyano-7-deazag uanine reductase OS=Helicobacter cetorum (strain ATCC B AA-540 / MIT 99-5656) OX=1163745 GN=queF PE=3 SV=1
MNPHNELNLKSLGTKTPYIFEYNKDLLEAFPNPNPNLEPLITLECKEFTSLCPITAQPDFGTIYIRYIPKDKMVESKSLKLYLFSYRNHGSFHESCINTILLDLVELLEPKYLEVYGDFVSRGGIAIKPFVNYALKEYQDFKEKRLLSIK

SEQ ID NO: 46404 - protein, 145 aa, Helicobacter felis
  misc_feature (1)..(145): tr|E7A8Z8|E7A8Z8_HELFC NADPH-dependent 7-cyano-7-deazag uanine reductase OS=Helicobacter felis (strain ATCC 491 79 / NCTC 12436 / CS1) OX=936155 GN=queF PE=3 SV=1
MLENLSHLGSKTSYPTTYSPHLLEAFENPHPGQDIFTTLESEEFTSLCPITAQPDFARVRIAYIAHLKMVESKSLKLYLFSFRNEGVFGEDCVGKILNDLVALLEPKYLEVHAHFSARGGITITPFANYATPDYADFKRQRLLKI

SEQ ID NO: 46405 - protein, 163 aa, Helicobacter ganmani
  misc_feature (1)..(163): tr|A0A3D8IBP8|A0A3D8IBP8_9HELI NADPH-dependent 7-cyano- 7-deazaguanine reductase OS=Helicobacter ganmani OX=602 46 GN=queF PE=3 SV=1
MPKKQTPQESLTHLGNKTQYVFTYDKSLLETFENQFTERDYFIKFNCPEFTSLCPITGQPDFATIYISYIPDKKMLESKSLKLYLFSFRNHGGFHEDCVNRILEDLVELMQPRYLEVWGKFLPRGGISIDPYANYGIPKTKYQEMAEYRLTHHDLLLEKVDNR

SEQ ID NO: 46406 - protein, 146 aa, Helicobacter heilmannii
  misc_feature (1)..(146): tr|A0A0K2XM73|A0A0K2XM73_HELHE NADPH-dependent 7-cyano- 7-deazaguanine reductase OS=Helicobacter heilmannii OX= 35817 GN=queF PE=3 SV=1
MPSYDLHYLGAKTPYIDKYDPTLLEAFANPHPSLDIFTRLVSAEFTSLCPITAQPDFATIYINYIAGAKMVESKSLKLYLFSFRNEGMFGEDCVGKILNDLVALLQPKYLEVLAKFTKRGSIALEPFANHAAPGYEDLKRQRLARY

SEQ ID NO: 46407 - protein, 90 aa, Helicobacter heilmannii
  misc_feature (1)..(90): tr|A0A0K2XRL6|A0A0K2XRL6_HELHE NADPH dependent preQ0 re ductase OS=Helicobacter heilmannii OX=35817 GN=HHE03_08 820 PE=4 SV=1
MLQAVSIYTQGDGKHWKDDEMVAVMLDIARTSLQMLGKDFILNDLVALLEPKYLEVLAKFTKRGSLAIEPFTNYAIPDYGDLKRQRLMKY

SEQ ID NO: 46408 - protein, 160 aa, Helicobacter macacae
  misc_feature (1)..(160): tr|V8CDJ3|V8CDJ3_9HELI NADPH-dependent 7-cyano-7-deazag uanine reductase OS=Helicobacter macacae MIT 99-5501 OX =1357400 GN=queF PE=3 SV=1
MPPKNPSKTQNKPTNKSPIKNAKSTKQSNRYGEKQIQNFTVQKDLELWQNTAPNDYIIKITLPEFCCLCPRSGYPDFATLRLEYIPDKWLVELKAIKLYINSFMSRHISHEASINEIYSTLKSKLKPKWIKLTAEFNPRGNVHTTIEVRSDLVVPKKPKF

SEQ ID NO: 46409 - protein, 158 aa, Helicobacter marmotae
  misc_feature (1)..(158): tr|A0A3D8I210|A0A3D8I210_9HELI NADPH-dependent 7-cyano- 7-deazaguanine reductase OS=Helicobacter marmotae OX=15 2490 GN=queF PE=3 SV=1
MSKHQRENENLTLLGSNGVVYPTDYDPKILEAFENKHKDNDYFVTFNCPEFTSLCPITAQPDFAHITISYIPAKKMVESKSLKLYLFSFRNHGDFHEDCINIIMKDLRDLLLPKYIEVYGRFTPRGGISIDPFVNYAIPHSPYEEMARYRLSNHRLKP

SEQ ID NO: 46410 - protein, 168 aa, Helicobacter muridarum
  misc_feature (1)..(168): tr|A0A099TWS1|A0A099TWS1_9HELI NADPH-dependent 7-cyano- 7-deazaguanine reductase OS=Helicobacter muridarum OX=2 16 GN=queF PE=3 SV=1
MQESKQETRKTERKPKLRSLGQDTKYDFNYNPDILETVPNPHPDNDYFIKFNCPEFTSLCPITGQPDFATIYISYIPNNKIVESKSLKLYLFSFRNHGGFHEDCVNVIAKDLIAILEPRYLEVWGKFLPRGGLSIDPYVNYGNGKRFAKMAKKRLLLHDIYPEIITNR

SEQ ID NO: 46411 - protein, 157 aa, Helicobacter mustelae
  misc_feature (1)..(157): tr|D3UGN9|D3UGN9_HELM1 NADPH-dependent 7-cyano-7-deazag uanine reductase OS=Helicobacter mustelae (strain ATCC 43772 / LMG 18044 / NCTC 12198 / 12198) OX=679897 GN=qu eF PE=3 SV=1
MKDLSLLGKQDVEYAFHYNPKILETFENRHKENDYFVKFNCPEFTSLCPMTGQPDFATIYINYIPQHKMVESKSLKLYLFSFRNHGDFHENCVNVIMKDLIGVMEPKFIEVWGKFLPRGGISIDPYANYGLPNTKYEEMAHYRLLHHDLSFEKIDNR

SEQ ID NO: 46412 - protein, 156 aa, Helicobacter pametensis
  misc_feature (1)..(156): tr|A0A3P6LQX3|A0A3P6LQX3_9HELI NADPH-dependent 7-cyano- 7-deazaguanine reductase OS=Helicobacter pametensis OX= 95149 GN=queF PE=3 SV=1
MRNKEELGGLSLLGNTGTQYPSTYAPEILEAFDNKHPGNDYFVKFACPEFTSLCPLTGQPDFATILIRYIPDIKMVESKSLKLYLFSFRNHGDFHEDCINIIMKDLIKLMNPKYIEVFGEFTPRGGIAIHPFANYGRPGTPFEQMARERLFTHDMQ

SEQ ID NO: 46413 - protein, 155 aa, Helicobacter pullorum
  misc_feature (1)..(155): tr|A0A1C0W033|A0A1C0W033_9HELI NADPH-dependent 7-cyano- 7-deazaguanine reductase OS=Helicobacter pullorum OX=35 818 GN=queF PE=3 SV=1
MKLKQLGKQIEYTFDYNKKLLETFENKHSNRDYFVKFNCPEFTSLCPITGQPDFATIYISYIPDIKMVESKSLKLYLFSFRNHGGFHEDCVNTILNDLVELMEPKYIEVWGKFTPRGGISIDPYVNYGIPNTQYEEMARYRLLNHDLYPEKIDNR

SEQ ID NO: 46414 - protein, 155 aa, Helicobacter pullorum
  misc_feature (1)..(155): tr|A0A448TLW1|A0A448TLW1_9HELI NADPH-dependent 7-cyano- 7-deazaguanine reductase OS=Helicobacter pullorum OX=35 818 GN=queF PE=3 SV=1
MKLKQLGKQIEYTFDYNKKLLETFENKHSNRDYFVKFNCPEFTSLCPITGQPDFATIYISYIPNIKMVESKSLKLYLFSFRNHGGFHEDCVNTILNDLVELMEPRYIEVWGKFTPRGGISIDPYVNYGIPNTKYEEMARYRLLNHDLYPEKIDNR

SEQ ID NO: 46415 - protein, 148 aa, Helicobacter pylori
  misc_feature (1)..(148): tr|J0GLC4|J0GLC4_HELPX NADPH-dependent 7-cyano-7-deazag uanine reductase OS=Helicobacter pylori Hp P-11b OX=992 106 GN=queF PE=3 SV=1
MTPESNLKSLGTKTPYIFEYNSQLLEAFPNPNPNLDPLITLECKEFTSLCPITSQPDFGVIYIRYIPKDKMVESKSLKLYLFSYRNHGSFHESCINTILLDLVQLLEPKYLEVYGDFASRGGIAIKPFVNYAIKEYQDFKEKRLLNAK

SEQ ID NO: 46416 - protein, 148 aa, Helicobacter pylori
  misc_feature (1)..(148): tr|M3PUG5|M3PUG5_HELPX NADPH-dependent 7-cyano-7-deazag uanine reductase OS=Helicobacter pylori GAM93Bi OX=1159 057 GN=queF PE=3 SV=1
MTPESNLKSLGAKTPYIFEYNSDLLEAFPNPNPNLDPLITLECKEFTSLCPITSQPDFGVIFIRYIPKDKMVESKSLKLYLFSYRNHGSFHESCINTILLDLVQLLEPKYLEVCGDFASRGGIAIKPFVNYAIKEYQDFKEKRLLNAK

SEQ ID NO: 46417 - protein, 156 aa, Helicobacter saguini
  misc_feature (1)..(156): tr|A0A347VPM1|A0A347VPM1_9HELI NADPH-dependent 7-cyano- 7-deazaguanine reductase OS=Helicobacter saguini OX=154 8018 GN=queF PE=3 SV=1
MKDLKHLGKETTYNFDYNPDVLESVPNPHPQNDYFIKFNCPEFTVLCPITGQPDFAAMYLSYIPDTLIVESKSLKLYLFSYRNHGGFHEDCVNRIATDLIRLLQPRYLEVWGKFTPRGGLSIDPYVNYGKPNTPFVEMAKQRLWNHDLYPENINNR

SEQ ID NO: 46418 - protein, 159 aa, Helicobacter sp.
  misc_feature (1)..(159): tr|A0A268U5H1|A0A268U5H1_9HELI NADPH-dependent 7-cyano- 7-deazaguanine reductase OS=Helicobacter sp. 13S00477-4 OX=1905759 GN=queF PE=3 SV=1
MNNHKFNLLGKQDTKYDFSYNPDILEVFENKHLGNDYFVKFNCPEFSSLCPITSQPDFATLYISYIPARKMVESKSLKLYLFSFRNHGDFHEDCMNIILKDLINVMEPKYIEVWGKFTPRGGISIDPYVNYGIPDTKYEQMAEYRLLNHDLYPEKIDNR

SEQ ID NO: 46419 - protein, 160 aa, Helicobacter sp.
  misc_feature (1)..(160): tr|A0A268TCJ4|A0A268TCJ4_9HELI NADPH-dependent 7-cyano- 7-deazaguanine reductase OS=Helicobacter sp. 11S02596-1 OX=1476194 GN=queF PE=3 SV=1
MDKKNQLHLLGNQNICYRFDYNPEILETFQNKHVENDYFVKFNCPEFTSLCPITNQPDFASITISYIPDVKMVESKSLKLYLFSFRNHGDFHEDCINIIMKDLIKLMQPRYIEVWGKFTPRGGISIDPYANYGKPGTKYEAMANHRLINHDLNPEKIDNR

SEQ ID NO: 46420 - protein, 139 aa, Helicobacter suis
  misc_feature (1)..(139): tr|E7G535|E7G535_9HELI NADPH-dependent 7-cyano-7-deazag uanine reductase OS=Helicobacter suis HS5 OX=710394 GN= queF PE=3 SV=1
MGHKTPYIDKYDPSLLEAFDNPHPHLDIFTRLYTEEFTSLCPITSQPDFASLSINYIAHLKMVESKSLKLYLFSFRNEGMFGEDCAGKILNDLVALLKPKYLEVQAKFSKRGSIALEPFVSYAIKDYQTLKQQRLARIY

SEQ ID NO: 46421 - protein, 145 aa, Helicobacter suis
  misc_feature (1)..(145): tr|A0A510HAS4|A0A510HAS4_9HELI NADPH-dependent 7-cyano- 7-deazaguanine reductase OS=Helicobacter suis OX=104628 GN=queF PE=3 SV=1
MQGLSHLGHKTPYIDKYDPSLLEAFDNPHPHLDIFTRLYTEEFTSLCPITSQPDFASLSINYIAHLKMVESKSLKLYLFSFRNEGMFGEDCAGKILNDLVALLKPKYLEVQAKFSKRGSIALEPFVSYAIKDYQTLKQQRLARIY

SEQ ID NO: 46422 - protein, 163 aa, Helicobacter trogontum
  misc_feature (1)..(163): tr|A0A4U8SAH7|A0A4U8SAH7_9HELI NADPH-dependent 7-cyano- 7-deazaguanine reductase OS=Helicobacter trogontum OX=5 0960 GN=queF PE=3 SV=1
MAKQKEIQYNLKQLGKETAYTFSYDPSVLESVPNPHPQRDYFIKFNCPEFTSLCPITAQPDFATIYISYIADKLIVESKSLKLYLFSFRNHGGFHEDCVNTIADDLIRLLSPRYLEVWGKFTPRGGLSIDPYVNYGRENSIYAKLAKKRLWLHDLYPETITNR

SEQ ID NO: 46423 - protein, 163 aa, Helicobacter trogontum
  misc_feature (1)..(163): tr|A0A4U8TGX4|A0A4U8TGX4_9HELI NADPH-dependent 7-cyano- 7-deazaguanine reductase OS=Helicobacter trogontum OX=5 0960 GN=queF PE=3 SV=1
MAKQKEIQYNLKQLGKETTYTFSYDPSVLESVPNPHPQRDYFIKFNCPEFTSLCPITAQPDFATVYISYIADKLIVESKSLKLYLFSFRNHGGFHEDCVNTIADDLIRLLSPRYLEVWGKFTPRGGLSIDPYVNYGRENSIYAKLAKKRLWLHDLYPETITNR

SEQ ID NO: 46424 - protein, 155 aa, Helicobacter valdiviensis
  misc_feature (1)..(155): tr|A0A2W6MTE1|A0A2W6MTE1_9HELI NADPH-dependent 7-cyano- 7-deazaguanine reductase OS=Helicobacter valdiviensis O X=1458358 GN=queF PE=3 SV=1
MALKALGNQSEYHFNYDSNLLETFTNPHQNRDYFVKFNCPEFTSLCPITNQPDFATIYISYIPDIKMVESKSLKLYLFSFRNHGGFHEDCVNTIMQDLINLLDPRYIEVWGKFTPRGGISIDPYANYGKVGTKYEEMAHYRLLNHDLYPETIDNR

SEQ ID NO: 46425 - protein, 156 aa, Helicobacter winghamensis
  misc_feature (1)..(156): tr|A0A2N3PKY5|A0A2N3PKY5_9HELI NADPH-dependent 7-cyano- 7-deazaguanine reductase OS=Helicobacter winghamensis O X=157268 GN=queF PE=3 SV=1
MESLKHLGTSTQYVFSYDKNLLETFENKHKERDYFVKFNCPEFTSLCPITGQPDFATIYISYIPELKMVESKSLKLYLFSFRNHGEFHEDCVNTILNDLVELMQPRYLEVWGKFTPRGGISIDPYANYGIPNTKYAKMAEYRLLNHDLYPENIDNR

SEQ ID NO: 46426 - protein, 119 aa, Helicobacteraceae bacterium
  misc_feature (1)..(119): tr|A0A1J5FJY2|A0A1J5FJY2_9HELI Uncharacterized protein OS=Helicobacteraceae bacterium CG2_30_36_10 OX=1805215 GN=AUK54_04135 PE=4 SV=1
MTLRKIAIKENSNIEYSSPELLFLGSSGQPYRGSLYIRFISKGETFDLRDFKQYITSLRQMTFNAEDIAYEIFTKIQSNILTESLGVVVDLSARGGIQQRVSFGVEFLPIKKANIFQVS

SEQ ID NO: 46427 - protein, 128 aa, Helicobacteraceae bacterium
  misc_feature (1)..(128): tr|A0A1J4U225|A0A1J4U225_9HELI NADPH-dependent 7-cyano- 7-deazaguanine reductase OS=Helicobacteraceae bacterium CG1_02_36_14 OX=1805214 GN=queF PE=3 SV=1
MKYGEKIVSEFDVEKDLEIWPNVHKRDYLIKMTLPEFSCLCPRSGYPDFATIYLEYTPDEWVVELKAIKLYINSFREKHVSHENSANEIYEVLERKLKPKYMKVVADYNPRGNVHTVIEIDSSKMCKN

SEQ ID NO: 46428 - protein, 154 aa, Henriciella algicola
  misc_feature (1)..(154): tr|A0A399R7S4|A0A399R7S4_9RHOB NADPH-dependent 7-cyano- 7-deazaguanine reductase OS=Henriciella algicola OX=160 8422 GN=queF PE=3 SV=1
MSDNIYTGLEQLGGSSAIPASPQAAELERVKNPHAGTLYLARFTVPEFTSLCPVTGQPDFAHIVIDYAPGEWLVESKSLKLYMTSFRNHGAFHEDCTVAIGKRLQDLLDPTWMRICGYWYPRGGIPIDVFWQTGCPPEDLIVPDTGVPTYRGRG

SEQ ID NO: 46429 - protein, 154 aa, Henriciella barbarensis
  misc_feature (1)..(154): tr|A0A399R128|A0A399R128_9RHOB NADPH-dependent 7-cyano- 7-deazaguanine reductase OS=Henriciella barbarensis OX= 86342 GN=queF PE=3 SV=1
MSDSIYTGLEQLGGTSAIPASPEEADLERVPNPHAGTLYLARFTVPEFTSLCPVTGQPDFAHILIDYAPGEWLVESKSLKLYMTSFRNHGAFHEDCTVAIGKRLRDLLAPTWMRICGYWYPRGGIPIDVFWQTGRPPEDLIVPDTGVPTYRGRG

SEQ ID NO: 46430 - protein, 154 aa, Henriciella sp.
  misc_feature (1)..(154): tr|A0A399RMP0|A0A399RMP0_9RHOB NADPH-dependent 7-cyano- 7-deazaguanine reductase OS=Henriciella sp. JN25 OX=230 5466 GN=queF PE=3 SV=1
MSKDIYSGLDQLGASSTIPASPEEAKLERVPNPHAGTLYLTRFTAPEFTSLCPVTGQPDFAHIVIDYAPGEWLVESKSLKLYLTSFRNHGAFHEDCTVAIGKRLVDLLAPQWLRIYGYWYPRGGIPIDVFWQSGPVPDGLYVPDTGVPSYRGRG

SEQ ID NO: 46431 - protein, 154 aa, Henriciella sp.
  misc_feature (1)..(154): tr|A0A2E6L7A2|A0A2E6L7A2_9RHOB NADPH-dependent 7-cyano- 7-deazaguanine reductase OS=Henriciella sp. OX=1968823 GN=queF PE=3 SV=1
MSESIYSGLEQLGASSTIPASPEEAELERVKNPHAGTLYLARFTVPEFTSLCPVTGQPDFAHIVIDYAPGEWLVESKSLKLYMTSFRNHGAFHEDCTVAIGKRLQELLEPTWMRVCGYWYPRGGIPIDVFWQTGSPPEDLFVPDTGVPTYRGRG

SEQ ID NO: 46432 - protein, 151 aa, Hephaestia caeni
  misc_feature (1)..(151): tr|A0A397NJ60|A0A397NJ60_9SPHN NADPH-dependent 7-cyano- 7-deazaguanine reductase OS=Hephaestia caeni OX=645617 GN=queF PE=3 SV=1
MAIMETTHLGKPTPMPASPEAARLDYVPNPRPGKRYLVRFTVPEFTSLCPVTAQPDFAHLVIDYVPDETIVESKSLKLFLASFRNHAAFHEDCTVGIAERLVAEMKPHWLRIGGYWYPRGGIPIDVFWQTAAPPADVWIPAQDVPGYRGRG

SEQ ID NO: 46433 - protein, 291 aa, Herbaspirillum aquaticum
  misc_feature (1)..(291): tr|A0A225SRA6|A0A225SRA6_9BURK NADPH-dependent 7-cyano- 7-deazaguanine reductase OS=Herbaspirillum aquaticum OX =568783 GN=queF PE=3 SV=1
MDHTTPSASTIGHTPESSPLGKSSEYPTHYDPSLLFPIARAPKRAELQISGTLPFFGADFWTAYEISWLNLRGKPQIAIATFMVPADSPNIIESKSFKLYLNSFNQERLESADELITKMRADLSAAAGANVQVTLTESSQFGQLQFGELSGLLLDRLDVEIEPAATGAHPDGSLLRANTEEATVEETLVSHLLKSNCPVTSQPDWGSVQIQYVGAPIDQERLLKYIIGFREHNEFHEQCVERIFTDILRHCKPQKLAVYARYTRRGGLDINPWRSNFSSAKPPSQLRNARQ

SEQ ID NO: 46434 - protein, 282 aa, Herbaspirillum hiltneri
  misc_feature (1)..(282): tr|A0A561JQR6|A0A561JQR6_9BURK NADPH-dependent 7-cyano- 7-deazaguanine reductase OS=Herbaspirillum hiltneri OX= 341045 GN=queF PE=3 SV=1
MNHANASNSPDTSPLGKSSAYPDAYDPSLLFPIPRQPKRDELGVTGTLPFFGVDIWNAYEVSWLNQRGKPQIAIATFMIQADSPNIIESKSFKLYLNSFNQTRLDDQQALVALLQKDLSAAAGAGVQVTLTEPGAFSSLQMGELSGLLLDRLDIEVVDHHPNPSLLSANHDEATVEETLLSHLLKSNCPVTGQPDWGSVQIHYVGAPINQEALLKYLIGFREHNEFHEQCVERIFVDVLRQCRPQKLAVYARYTRRGGLDINPWRSNFSAARAPSNLRNARQ

SEQ ID NO: 46435 - protein, 291 aa, Herbaspirillum huttiense
  misc_feature (1)..(291): tr|A0A4R8JA87|A0A4R8JA87_9BURK NADPH-dependent 7-cyano- 7-deazaguanine reductase OS=Herbaspirillum huttiense OX =863372 GN=queF PE=3 SV=1
MDHTNPSASTVGHSPESSPLGKSSEYPTHYDPSLLFPIPRAPKRAELQISGTLPFFGVDLWTAYEISWLNLRGKPQIAIATFMVPADSPNIIESKSFKLYLNSFNQERLESADLLIDKMRTDLSAAAGASVQVTLTESSQFGQMQFGELSGLLLDRLDVEIEPATGAAHPDGSLLRAHTDEATVEETLVSHLLKSNCPVTSQPDWGSVQIQYVGAPIDQERLLKYIIGFREHNEFHEQCVERIFTDILRHCKPQKLAVYARYTRRGGLDINPWRSNFSSAKPPSQLRNARQ

SEQ ID NO: 46436 - protein, 291 aa, Herbaspirillum huttiense
  misc_feature (1)..(291): tr|A0A561KD35|A0A561KD35_9BURK NADPH-dependent 7-cyano- 7-deazaguanine reductase OS=Herbaspirillum huttiense OX =863372 GN=queF PE=3 SV=1
MDHTTPSASTIGHTPESSPLGKSSEYPTHYDPSLLFPIARAPKRAELQISGTLPFFGVDLWTAYEISWLNLRGKPQIAIATFMVPADSPNIIESKSFKLYLNSFNQERLESADALITKMRTDLSAAAGASVQVTLTESSQFGQMQFGELSGLLLDRLDVEIEPSTVGAHPDGSLLRANTEEATVEETLVSHLLKSNCPVTSQPDWGSVQIQYVGAPIDQERLLKYIIGFREHNEFHEQCVERIFTDILRHCKPQKLAVYARYTRRGGLDINPWRSNFSSAKPPSQLRNARQ

SEQ ID NO: 46437 - protein, 288 aa, Herbaspirillum robiniae
  misc_feature (1)..(288): tr|A0A246WN01|A0A246WN01_9BURK NADPH-dependent 7-cyano- 7-deazaguanine reductase OS=Herbaspirillum robiniae OX= 2014887 GN=queF PE=3 SV=1
MDKPTPSASAAGHSPETSPLGKSSEYPEAYDPSLLFPIPRAPKRAELQITGSLPFFGVDIWTAYEISWLNLRGKPQIAIATFMVPADSPNIIESKSFKLYLNSFNQERLESSGELLDKLRADLSAAAGAAVQVALTEPAQFGQLQFGELSGLPLDRLDVEIEAASHPDGSILRASHDEATVEETFVSHLLKSNCPVTGQPDWGSVQIQYVGAPIDQERLLKYIIGFREHNEFHEQCVERIFTDILRHCKPQKLAVYARYTRRGGLDINPWRSNFSSGKPPSQLRNARQ

SEQ ID NO: 46438 - protein, 291 aa, Herbaspirillum rubrisubalbicans
  misc_feature (1)..(291): tr|A0A0U2SKX1|A0A0U2SKX1_9BURK NADPH-dependent 7-cyano- 7-deazaguanine reductase OS=Herbaspirillum rubrisubalbi cans M1 OX=1078773 GN=queF PE=3 SV=1
MDHITPSASGTGHSPESSPLGKSSPYPTHYDPSLLFPIPRAPKRAELQISGTLPFFGADFWTAYEISWLNLRGKPQIAIASFMVPADSPNIIESKSFKLYLNSFNQERLESSAQLLDKLRTDLSAAAGANVQVSLTESAQFGQVQFGELSGLLLDRLDVDIEPVSGNPHPDGSQLRANTDEATVEETLVSHLLKSNCPVTSQPDWGSVQIHYVGAPIDQERLLKYIIGFREHNEFHEQCVERIFTDILRHCKPQKLAVYARYTRRGGLDINPWRSNFSSAKPPSQLRNARQ

SEQ ID NO: 46439 - protein, 291 aa, Herbaspirillum rubrisubalbicans
  misc_feature (1)..(291): tr|A0A328IWF0|A0A328IWF0_9BURK NADPH-dependent 7-cyano- 7-deazaguanine reductase OS=Herbaspirillum rubrisubalbi cans OX=80842 GN=queF PE=3 SV=1
MDHITPAASGPGHSPESSPLGKSSPYPTHYDPSLLFPIPRAPKRAELQISGTLPFFGADFWTAYEISWLNLRGKPQIAIASFMVPADSPNIIESKSFKLYLNSFNQERLENSEQLLDKLRTDLSAAAGANVQVSLTESAQFGQLQFGELSGLLLDRLDVDIEPISGNSHPDGSLLRANTEEATVEETLVSHLLKSNCPVTSQPDWGSVQIHYVGAPIDQERLLKYIIGFREHNEFHEQCVERIFTDILRHCKPQKLAVYARYTRRGGLDINPWRSNFSSAKPPSQLRNARQ

SEQ ID NO: 46440 - protein, 291 aa, Herbaspirillum seropedicae
  misc_feature (1)..(291): tr|D8IS39|D8IS39_HERSS NADPH-dependent 7-cyano-7-deazag uanine reductase OS=Herbaspirillum seropedicae (strain SmR1) OX=757424 GN=queF PE=3 SV=1
MDHTNPSASPASHSPESSPLGKSSQYPTHYDPSLLFPIPRAPKRAELQISGTLPFFGVDLWTAYEISWLNLRGKPQIAIATFMVPADSPNIIESKSFKLYLNSFNQERLESADQLIDKMRTDLSAAAGAQVQVALTEPAQFGQLQFGELSGLLLDRLDVEIEAAASGAHPDGSQLRANTEEATVEETLVSHLLKSNCPVTSQPDWGSVQIQYVGAPIDQERLLKYIIGFREHNEFHEQCVERIFTDILRYCKPQKLAVYARYTRRGGLDINPWRSNFSSAKPPSQLRNARQ

SEQ ID NO: 46441 - protein, 291 aa, Herbaspirillum seropedicae
  misc_feature (1)..(291): tr|A0A4R8P268|A0A4R8P268_HERSE NADPH-dependent 7-cyano- 7-deazaguanine reductase OS=Herbaspirillum seropedicae OX=964 GN=queF PE=3 SV=1
MDHTNPSASTVGHSPESSPLGKSSEYPTHYDPSLLFPIPRAPKRAELQISGTLPFFGVDLWTAYEISWLNLRGKPQIAIATFMVPADSPNIIESKSFKLYLNSFNQERLESADQLIDKMRTDLSAAAGASVQVTLTESSQFGQMQFGELSGLLLDRLDVEIEPATGAAHPDGSLLRANTDEATVEETLVSHLLKSNCPVTSQPDWGSVQIQYVGAPIDQERLLKYIIGFREHNEFHEQCVERIFTDILRHCKPQKLAVYARYTRRGGLDINPWRSNFSSGKPPSQLRNARQ

SEQ ID NO: 46442 - protein, 288 aa, Herbaspirillum sp.
  misc_feature (1)..(288): tr|A0A542LXQ9|A0A542LXQ9_9BURK NADPH-dependent 7-cyano- 7-deazaguanine reductase OS=Herbaspirillum sp. SJZ130 O X=2572918 GN=queF PE=3 SV=1
MDKPIPSPSAAGHSPETSPLGKSSAYPGAYDPGLLFPIARAPKRAELQIAGTLPFFGVDIWTAYEISWLNLRGKPQIAIATFTVPADSPNIIESKSFKLYLNSFNQERLESSAQLLEKLRTDLSAAAGAAVQAALTEPAQFGQLQFGELGGLPLDRLDVEIEASAHPDASILRAAQDEAVVEETFVSHLLKSNCPVTGQPDWGSVQIHYVGAPIDQEMLLKYIIGFREHNEFHEQCVERIFVDIMRRCKPQKLAVYARYTRRGGLDINPWRSNFSSGHAPSQLRNARQ

SEQ ID NO: 46443 - protein, 285 aa, Herbaspirillum sp.
  misc_feature (1)..(285): tr|J2VKV8|J2VKV8_9BURK NADPH-dependent 7-cyano-7-deazag uanine reductase OS=Herbaspirillum sp. YR522 OX=1144342 GN=queF PE=3 SV=1
MDHPATATGHSAETSPLGKHSAYPAEYDPALLFPIPRAPKRADLQITGTLPFFGVDIWTAYEISWLNLRGKPQIAIATFMVPADSPNIIESKSFKLYLNSFNQARLDSSTTLVERMRVDLSGAAGAPVQVTLTEAAQFGQLRFNELGGLSLDRLDVEIEATAHPDGSILRADHEQATVEETFVSHLLKSNCPVTSQPDWGSVQIHYVGAPIDQEQLLKYIIGFRDHNEFHEQCVERIFSDILHYCRPQKLAVYARYTRRGGLDINPWRSNFSSARLPSLDRNARQ

SEQ ID NO: 46444 - protein, 279 aa, Herminiimonas arsenicoxydans
  misc_feature (1)..(279): tr|A4G8Y9|A4G8Y9_HERAR NADPH-dependent 7-cyano-7-deazag uanine reductase OS=Herminiimonas arsenicoxydans OX=204 773 GN=queF PE=3 SV=1
MTTPFKPDGSPLGKPTAYEAHYDPSLLFSIPRQYKRDEIGLSGTLPFFGVDIWNAYEISWLNMRGKPQVAMARVTVPADSPNIVESKSFKLYLNSLNQTKLGGTEALLELLREDLSSGFGAPVQVTLTLPENFARVPMGELNGLLLDRLDIEVHEYSPDPTLLRAARDEPVVEETLVSHLLKSNCLVTGQPDWASVQIQYVGGAIDQAGLLQYLIGFREHNEFHEQCVERIFMDIMRQCKPQKLAVYARYTRRGGLDINPWRSNFSTGTAPSNARNARQ

SEQ ID NO: 46445 - protein, 279 aa, Herminiimonas fonticola
  misc_feature (1)..(279): tr|A0A4R6GIE8|A0A4R6GIE8_9BURK NADPH-dependent 7-cyano- 7-deazaguanine reductase OS=Herminiimonas fonticola OX= 303380 GN=queF PE=3 SV=1
MTAPFKPDESPLGRPTTYQAHYDPSLLFAIPRQYKRDELGLSNGTLPFFGVDIWNAYEMSWLNMRGKPQVAMAKIIVPADSPNIVESKSFKLYLNSLNQTKLGGTEALLELLREDLSNGFGAPVQISLTLPENFSKVPMGELDGMLLDRLDIEVSEYSPNVSLLSSAKDEPAIEETLVSHLLKSNCLVTGQPDWASVQIKYVGGAIDQAGLLQYLIGFREHNEFHEQCVERIFMDIMRQCKPQKLAVYARYTRRGGLDINPWRSNFSTGQPSNARNARQ

SEQ ID NO: 46446 - protein, 279 aa, Herminiimonas sp.
  misc_feature (1)..(279): tr|A0A3N7A7W4|A0A3N7A7W4_9BURK NADPH-dependent 7-cyano- 7-deazaguanine reductase OS=Herminiimonas sp. KBW02 OX= 2153363 GN=queF PE=3 SV=1
MTTSSTPDASPLGKPSVYQTQYDPSLLFPIPRQGKRDELGLTGDLPFFGVDIWNAYELSWLNMRGKPQVAIARIMAPADSPNIIESKSFKLYLNSFNQTKLGGTDALLELLRADLSAGFGAPVQISLTLPEDFAKISIGELDGMLLDRLDIEVNDYTPDPSLLQAAHDEAPVEETLLSNLLKSNCLVTGQPDWGSVQIHYVGPQINQASLLHYLIGFREHNEFHEQCVERIFMDILRQCKPQKLAVYARYTRRGGLDINPWRSNFSTGKPPSNARNARQ

SEQ ID NO: 46447 - protein, 119 aa, Hippea maritima
  misc_feature (1)..(119): tr|F2LW51|F2LW51_HIPMA NADPH-dependent 7-cyano-7-deazag uanine reductase OS=Hippea maritima (strain ATCC 700847 / DSM 10411 / MH2) OX=760142 GN=queF PE=3 SV=1
MRYGEEEIEKAQLEAWPNNHPENDYQVSIEFPEFTCKCPRSGYPDFATIRIKYVPDKYVIELKSLKLFLNKYRERYISHEDATNEIFNALKEALKPKHLEVIGDFTPRGNVKTVIRIAF

SEQ ID NO: 46448 - protein, 279 aa, Histophilus somni
  misc_feature (1)..(279): sp|B0UU49|QUEF_HISS2 NADPH-dependent 7-cyano-7-deazagua nine reductase OS=Histophilus somni (strain 2336) OX=22 8400 GN=queF PE=3 SV=1
MQYHDQSLQTLKLGKKTEYISTYDRTLLQAVPRKLNRDDLGISTKQPFSFGADIWTAYEISWLNLKGVPQVAIADVEIDYQSENLIESKSFKLYLNSFNQSQFENLQQVEQILQQDLIKCAKGQVKVRLNSLQNYAQQPIATLQGECIDEQDIEILCYEFDPNLLENCTNKQWVEEKLVSHLLKSNCLITNQPDWGTVQIHYIGNQINREKLLRYLISFRQHNEFHEQCVERIFCDLMKFAQPEKLSVYARYTRRGGLDINPFRSNFEPIPLNQRLARQ

SEQ ID NO: 46449 - protein, 279 aa, Histophilus somni; identical to SEQ ID NO: 46261
  misc_feature (1)..(279): tr|A0A4S2QWE2|A0A4S2QWE2_HISSO NADPH-dependent 7-cyano- 7-deazaguanine reductase OS=Histophilus somni OX=731 GN =queF PE=3 SV=1

SEQ ID NO: 46450 - protein, 119 aa, Holophagaceae bacterium
  misc_feature (1)..(119): tr|A0A3D6EM26|A0A3D6EM26_9BACT NADPH-dependent 7-cyano- 7-deazaguanine reductase OS=Holophagaceae bacterium OX= 2052165 GN=queF PE=3 SV=1
MVTRPTGELDTFESPRPGRPFTITFETEEFTCLCPLTGQPDFAKLRILYQPDQLCVESKSLKLYLWSFRDRGAFHEAVTNQILDDLVKATKPQWMRVEGDFLIRGGIRTLVVAEHGKKK

SEQ ID NO: 46451 - protein, 144 aa, Hormoscilla sp.
  misc_feature (1)..(144): tr|A0A533NMZ6|A0A533NMZ6_9CYAN NADPH-dependent 7-cyano- 7-deazaguanine reductase OS=Hormoscilla sp. GUM007 OX=2 480854 GN=queF PE=3 SV=1
MNSPTRPIDSDLQGDRTLEMKYGERQIAAVKLITFDNPRIGRRYDIHITLPEFTCKCPFSGYPDFATIYLTYVPDELVVELKALKLYINGFRDRHISHEEAVNLILDDFVAACDPLEATVKADFNPRGNVHTVIEVHHSKSTED

SEQ ID NO: 46452 - protein, 144 aa, Hormoscilla sp.
  misc_feature (1)..(144): tr|A0A533P369|A0A533P369_9CYAN NADPH-dependent 7-cyano- 7-deazaguanine reductase OS=Hormoscilla sp. GUM202 OX=2 480853 GN=queF PE=3 SV=1
MNSPTRPIDSDIQGDRTLEMKYGERQIAAVKLITFDNPRIGRRYDIHITLPEFTCKCPFSGYPDFATIYLTYVPDELVVELKALKLYINGFRDRHISHEEAVNLILDDFVAACDPLEATVKADFNPRGNVHTAISVHHSKSTEE

SEQ ID NO: 46453 - protein, 155 aa, Humitalea rosea
  misc_feature (1)..(155): tr|A0A2W7I9D4|A0A2W7I9D4_9PROT NADPH-dependent 7-cyano- 7-deazaguanine reductase OS=Humitalea rosea OX=990373 G N=queF PE=3 SV=1
MSTPTDIRGLTQLGHMSGLPANPDVPVLERVPNPHPGMHYVVRFVAPEFTSLCPLTGQPDFAHIVLDYIPRDWLVESKSLKLHLSSFRNHGSFHEACTLDIARRVGALLTPVWLRIGAYWYPRGGMPIDVFWQSGAPPEGAWIPDQGVAPYRGRG

SEQ ID NO: 46454 - protein, 154 aa, Hwanghaeicola aestuarii
  misc_feature (1)..(154): tr|A0A2W7NT16|A0A2W7NT16_9RHOB NADPH-dependent 7-cyano- 7-deazaguanine reductase OS=Hwanghaeicola aestuarii OX= 568105 GN=queF PE=3 SV=1
MAGTDTRGLTQLGTPTGQPASPEEAVLERVPAPHGEKAYVVRFTAPEFTSLCPMTGQPDFAHLVIDYVPGDWLVESKSLKLFLTSFRNHGSFHEDCTLTVASRLVDLLTPRWLRIGGYWYPRGGIPIDVFWQTGAAPEGVWIPDQGVPPYRGRG

SEQ ID NO: 46455 - protein, 120 aa, Hyalangium minutum
  misc_feature (1)..(120): tr|A0A085W510|A0A085W510_9DELT NADPH-dependent 7-cyano- 7-deazaguanine reductase OS=Hyalangium minutum OX=39409 6 GN=queF PE=3 SV=1
MSTQPSKELKTFPNPAAERDYEIAFDVPEFTCLCPLTGQPDFARFKIRYVPDELCVELKSLKLYMWAYRNEGAFHEKVTNTIADDIIKAIQPRKLVVEGDFFVRGGIGTVITVTHEKKKG

SEQ ID NO: 46456 - protein, 275 aa, Hydrocarboniclastica marina
  misc_feature (1)..(275): tr|A0A4V1D8N9|A0A4V1D8N9_9ALTE NADPH-dependent 7-cyano- 7-deazaguanine reductase OS=Hydrocarboniclastica marina OX=2259620 GN=queF PE=3 SV=1
MFERATMKDAPLGQVSVYPEKYSSELLYPVPRQANRSKLGLDNGWPWFGEDRWQAFELSWLGPNGVPRVAIGELIVPGDSPNIIESKSLKLYCNSFNQTVFDTVEDVQHLMARDLSRVAGRQVNVTLAKVDSPATLLGRPDGFALLDDLPVVLDEYEKGAGDLKPVGPEGEQRYCSHLLKSNCPVTGQPDWGSVFITLNGPKLDEGGLLAYIVGYRNTQDFHEHCVESIFVDIMNRLKPIQLTVSAQYTRRGGLDINPWRSTGQGSAPKWRLLRQ

SEQ ID NO: 46457 - protein, 141 aa, Hydrocarboniphaga daqingensis
  misc_feature (1)..(141): tr|A0A1M5PY80|A0A1M5PY80_9GAMM NADPH-dependent 7-cyano- 7-deazaguanine reductase OS=Hydrocarboniphaga daqingens is OX=490188 GN=queF PE=3 SV=1
MPLTPNSTRPSTELETFPNPNPGRDFVIRMRMPEFSCLCPKTGQPDFATLYLEYIPETLCVELKSLKLYIWSFRDQGTFHEAVTNKILDDLVKLLQPRYARLTSDFGVRGGIYTHVVAEHRATGWTPAPPVLLPEAEWRKQ

SEQ ID NO: 46458 - protein, 136 aa, Hydrocarboniphaga effusa
  misc_feature (1)..(136): tr|I7Z9B3|I7Z9B3_9GAMM NADPH-dependent 7-cyano-7-deazag uanine reductase OS=Hydrocarboniphaga effusa AP103 OX=1 172194 GN=queF PE=3 SV=1
MTTKPSTDLETFPNPNPDRDFVIRMRIPEFTCLCPKTGQPDFATLYLEYIPESLCVELKSLKLYIWAFRDQGAFHEAVTNKILDDLVTLMQPRFARLTADFGVRGGIFTNVVAEHRAASWKPAEPVILPPGEWIKQ

SEQ ID NO: 46459 - protein, 134 aa, Hydrococcus rivularis
  misc_feature (1)..(134): tr|A0A1U7HTH7|A0A1U7HTH7_9CYAN NADPH-dependent 7-cyano- 7-deazaguanine reductase OS=Hydrococcus rivularis NIES- 593 OX=1921803 GN=queF PE=3 SV=1
MQAPEREKPEMKYGERAIAQGELITFPNPRIGRRYDIHITLPEFTCKCPFSGYPDFATIYITYCPDEKVVELKALKLYINSYRDRYISHEEAVNQILDDFVAACDPLEAKIKGDFNPRGNVHTVIEVCHHKQSQ

SEQ ID NO: 46460 - protein, 158 aa, Hydrogenibacillus schlegelii
  misc_feature (1)..(158): tr|A0A2T5G9Q5|A0A2T5G9Q5_HYDSH NADPH-dependent 7-cyano- 7-deazaguanine reductase OS=Hydrogenibacillus schlegeli i OX=1484 GN=queF PE=3 SV=1
MDPSPFRALGKKSAVPATYDPSVLERFENAFPDRDMFVKFNAPEFTTLCPVTGQPDFATLYISYVPDRWLVESKSLKLYLFSFRNHGAFHESVVNLIRDDLVRLLEPKYLEIWGKFLPRGGLSIDPYVNYGKPGTPWEEVAKKRLYEHDMYPEKVDNR

SEQ ID NO: 46461 - protein, 160 aa, Hydrogenibacillus schlegelii
  misc_feature (1)..(160): tr|A0A132N911|A0A132N911_HYDSH NADPH-dependent 7-cyano- 7-deazaguanine reductase OS=Hydrogenibacillus schlegeli i OX=1484 GN=queF PE=3 SV=1
MTVDPSPFRALGKKSAVPATYDPSVLERFENAFPDRDMFVKFNAPEFTTLCPVTGQPDFATLYISYVPDRWLVESKSLKLYLFSFRNHGAFHESVVNLIRDDLVRLLEPKYLEIWGKFLPRGGLSIDPYVNYGKPGTPWEEVAKKRLYEHDMYPEKVDNR

SEQ ID NO: 46462 - protein, 129 aa, Hydrogenimonas sp.
  misc_feature (1)..(129): tr|A0A3G9GUU2|A0A3G9GUU2_9PROT NADPH-dependent 7-cyano- 7-deazaguanine reductase OS=Hydrogenimonas sp. OX=22311 12 GN=queF PE=3 SV=1
MRYGEEIVASFDVDKDLEIWPNKFQKNYKITVTLPEFSCLCPRSGYPDYATFTLEYIPDLWVVELKAVKLYINSFRNRHISHEESANEVFDVLYQKLEPRWMKLTADFNPRGNVHTLIEIDSELFEKEK

SEQ ID NO: 46463 - protein, 133 aa, Hydrogenimonas thermophila
  misc_feature (1)..(133): tr|A0A1I5LFF7|A0A1I5LFF7_9PROT NADPH-dependent 7-cyano- 7-deazaguanine reductase OS=Hydrogenimonas thermophila OX=223786 GN=queF PE=3 SV=1
MKYGEEIIENFNIDKDLEIWPNKFQKNYKITITLPEFSCLCPRSGYPDYATFKLEYIPDQWVIELKAIKLYINSFRNRHISHEESANEIYDVLYEKLKPRWMKLTADFNPRGNVHTLIEIDSDLIKKEVKCVK

SEQ ID NO: 46464 - protein, 133 aa, Hydrogenispora ethanolica
  misc_feature (1)..(133): tr|A0A4R1R487|A0A4R1R487_9FIRM NADPH-dependent 7-cyano- 7-deazaguanine reductase OS=Hydrogenispora ethanolica O X=1082276 GN=queF PE=3 SV=1
MNPNDLTFEALGKVVREPSRRLETFPKPPGVQTVILESDEVTSLCPITGQPDWETVTIEFEPDQFCIESKSLKLYLWSFRQDGAFCEALAGQIAQDVYEACKPHWCRVTVSQKPRGGITIKAVAAAGDVLEGK

SEQ ID NO: 46465 - protein, 130 aa, Hydrogenivirga caldilitoris
  misc_feature (1)..(130): tr|A0A497XSU3|A0A497XSU3_9AQUI NADPH-dependent 7-cyano- 7-deazaguanine reductase OS=Hydrogenivirga caldilitoris OX=246264 GN=queF PE=3 SV=1
MEEVREKKYGEIAIEQAELEPWENPTPERDYMIEITFPEFSCLCPRSGYPDYATIRIRYIPDRYIVELKSLKLWLNKFRNRYISHEQATNEIYTALYETLKPRFLEVIGDFNPRGNVHTVVKLRSDGKYD

SEQ ID NO: 46466 - protein, 76 aa, Hydrogenivirga sp.
  misc_feature (1)..(76): tr|A8V1P8|A8V1P8_9AQUI NADPH-dependent 7-cyano-7-deazag uanine reductase (Fragment) OS=Hydrogenivirga sp. 128-5 -R1-1 OX=392423 GN=HG1285_11587 PE=3 SV=1
TIKIKYVPDKYIVELKSLKLYLNKYRNQYISHEEATNKIYEDLYNLLKPRFLEVVGDWNPRGNVKTIIKVSSEDNQ

SEQ ID NO: 46467 - protein, 130 aa, Hydrogenivirga sp.
  misc_feature (1)..(130): tr|A8URV7|A8URV7_9AQUI NADPH-dependent 7-cyano-7-deazag uanine reductase OS=Hydrogenivirga sp. 128-5-R1-1 OX=39 2423 GN=queF PE=3 SV=1
MERAEEKRYGEKAIEEAELEPWENPTPERDYMIDITFPEFSCLCPRSGYPDYATIRIRYIPDRYIVELKSLKLWLNKFRNRYISHEEATNEIYRALEETLKPRFLEVVGDFNPRGNVHTVIRVRSDGRYD

SEQ ID NO: 46468 - protein, 126 aa, Hydrogenobacter hydrogenophilus
  misc_feature (1)..(126): tr|A0A285NRX9|A0A285NRX9_9AQUI NADPH-dependent 7-cyano- 7-deazaguanine reductase OS=Hydrogenobacter hydrogenoph ilus OX=35835 GN=queF PE=3 SV=1
MEKKYGELAIESAELEPWENPTPERDYLIEITFPEFSCLCPRSGYPDYATIKIRYIPDKYIIELRSLKLWLNKFRNRYISHEQATNEIYTALYETLKPRFLEVIGDFNPRGNVHTVITVRSDERYF

SEQ ID NO: 46469 - protein, 125 aa, Hydrogenobacter thermophilus
  misc_feature (1)..(125): tr|D3DHD7|D3DHD7_HYDTT NADPH-dependent 7-cyano-7-deazag uanine reductase OS=Hydrogenobacter thermophilus (strai n DSM 6534 / IAM 12695 / TK-6) OX=608538 GN=queF PE=3 S V=1
MEKKYGELAIESARLEPWENPSPERDYMIEITFPEFSCLCPRSGYPDYATIKIRYIPDKYIVELRSLKLWLNKFRNRYISHEQATNEIYTALYETLRPRFLEVIGDFNPRGNVHTVIKVRSDGNY

SEQ ID NO: 46470 - protein, 128 aa, Hydrogenobaculum sp.
  misc_feature (1)..(128): tr|M1RKV4|M1RKV4_9AQUI NADPH-dependent 7-cyano-7-deazag uanine reductase OS=Hydrogenobaculum sp. HO OX=547144 G N=queF PE=3 SV=1
MQQEKKYGEIEIEKAALEPWENPAKENDYIIEMSFPEFSCLCPRSGYPDYATIKIRYIPNEYIVELKSLKLWLNSFRNQYISHEAATNTIYNKLFELLKPKFLEVIGDFHPRGNLHTVVRVRSDKKYD

SEQ ID NO: 46471 - protein, 128 aa, Hydrogenobaculum sp.; identical to SEQ ID NO: 46470
  misc_feature (1)..(128): tr|B4U9Q5|B4U9Q5_HYDS0 NADPH-dependent 7-cyano-7-deazag uanine reductase OS=Hydrogenobaculum sp. (strain Y04AAS 1) OX=380749 GN=queF PE=3 SV=1

SEQ ID NO: 46472 - protein, 280 aa, Hydrogenophaga crassostreae
  misc_feature (1)..(280): tr|A0A167IPW6|A0A167IPW6_9BURK NADPH-dependent 7-cyano- 7-deazaguanine reductase OS=Hydrogenophaga crassostreae OX=1763535 GN=queF PE=3 SV=1
MTPDHSPLGKASAYADQYDASLLFPLPREPKRREIGITGHVPFLGADLWTAFELSWLNPRGKPQVAIAHITVPCESTHIVESKSFKLYLNSFNNSRFASADEVRDRIRADVSRAIWNGESVQSTAGVRVLLPEMFECEPVREMEGLSIDRLDVACTAYHPAPELLTAALSEKSVTEVLTSDLLKSNCLVTGQPDWGSVQVSYSGPQIDQAGLLQYIVSFRNHNEFHEQCVERIYMDIMARCKPAKLSVYARYTRRGGLDINPWRSSHPQLPPANVRTARQ

SEQ ID NO: 46473 - protein, 283 aa, Hydrogenophaga intermedia
  misc_feature (1)..(283): tr|A0A1L1PIC5|A0A1L1PIC5_HYDIT NADPH-dependent 7-cyano- 7-deazaguanine reductase OS=Hydrogenophaga intermedia O X=65786 GN=queF PE=3 SV=1
MNANTPEQSQLGKASAYVDRYDPSLIFPLPREAKRREIGIVGSVPFMGCDLWTAYELSWLNPRGKPQVAIAHITVPCESTHIVESKSFKLYLNSFNNSAFDSAEAVQARLRADLGTAVWHGGPVQAGVGVKLLSPERFDAEPIHELDGLSLDRLDVECTRYQPAPELLTAAFDEQPVNETLVSHLLKSNCLVTGQPDWGSVQITYSGPQIDQAGLLQYLVSFRNHNEFHEQCVERIYMDVWTRCKPAKLSVYARYTRRGGLDINPWRSSHPQQPPANVRTARQ

SEQ ID NO: 46474 - protein, 280 aa, Hydrogenophaga pseudoflava
  misc_feature (1)..(280): tr|A0A4P6WU68|A0A4P6WU68_HYDPS NADPH-dependent 7-cyano- 7-deazaguanine reductase OS=Hydrogenophaga pseudoflava OX=47421 GN=queF PE=3 SV=1
MTPDQSPLGKTTDYVDQYDPSLLFPLPRELKRVEIGITGSVPFLGADLWTAFELSWLNPKGKPQVAIAHITIPCESTHIVESKSFKLYLNSFNNTRMDSADAVRDRIRDDISRAIWGGEAVKSSAGVRLLLPELFECEPVKELEGVSIDRLDVECDTYQPTPAFLSAALDEKPVDEVLVSDLLRSNCPVTGQPDWGSVQIRYSGPQIDQAGLLQYIVSFRNHNEFHEQCVERIYMDIMARCKPAKLMVYARYTRRGGLDINPWRSSHPQLPPANTRTARQ

SEQ ID NO: 46475 - protein, 281 aa, Hydrogenophaga sp.
  misc_feature (1)..(281): tr|A0A4P7RIE6|A0A4P7RIE6_9BURK NADPH-dependent 7-cyano- 7-deazaguanine reductase OS=Hydrogenophaga sp. PAMC2094 7 OX=2565558 GN=queF PE=3 SV=1
MNTPELSQLGKASAYIDQYDASLLFALPREPKRTEIGIKGHVPFLGADLWTAFELSWLNPRGKPQVAIAHITVPCESTHIVESKSFKLYLNSFNNSRFESADQVREHIRTDVSAAIWHGGKVQSTAGVRLLLPELFDCEPIREMEGLSIDRLDVECSVYQPAPELLSAALDEKPVTEILTSDLLKSNCLVTGQPDWGSVQITYSGPQIDQGGLLQYIVSFRNHNEFHEQCVERIYMDIMARCKPAKLSVVARYTRRGGLDINPWRSSHPQLPPPNVRNARQ

SEQ ID NO: 46476 - protein, 283 aa, Hydrogenophaga sp.
  misc_feature (1)..(283): tr|A0A1Q3QDS2|A0A1Q3QDS2_9BURK NADPH-dependent 7-cyano- 7-deazaguanine reductase OS=Hydrogenophaga sp. 70-12 OX =1895769 GN=queF PE=3 SV=1
MSQNTPEQSQLGKASAYVDRYDPSLIFPLPREAKRREIGIAGDVPFVGCDLWTAYELSWLNPRGKPQVAIAHITVPAESTHIVESKSFKLYLNSFNNTPFDSADAVRDRLRADLSAAVWHGGPMQAGVGVKLLAPERFDAEPIHELDGLSLDRLDVECTRYEPAPELLTAAFDEQPVSETLVSHLLKSNCLVTGQPDWGSVQIAYSGPQIDQAGLLQYLVSFRNHNEFHEQCVERIYMDLWTRCKPAKLSVYARYTRRGGLDINPWRSSHPQQPPANVRTARQ

SEQ ID NO: 46477 - protein, 139 aa, Hydrogenophilaceae bacterium
  misc_feature (1)..(139): tr|A0A1J4Z1M5|A0A1J4Z1M5_9PROT NADPH-dependent 7-cyano- 7-deazaguanine reductase OS=Hydrogenophilaceae bacteriu m CG1_02_62_390 OX=1805218 GN=queF PE=3 SV=1
MPSQPQKTLETFANPNSGRDYQVHIEIPEFTCLCPKTGQPDFATLFLDYIPDLNCVELKSLKLYIWSFRDEGHFHEAVTNRILDDLVKAIDPRFMRLTAKFYVRGGIFTNVVAEHRKTGWQAQPKVELSQFSVQSNTRG

SEQ ID NO: 46478 - protein, 139 aa, Hydrogenophilales bacterium
  misc_feature (1)..(139): tr|A0A2H0G1Z7|A0A2H0G1Z7_9PROT NADPH-dependent 7-cyano- 7-deazaguanine reductase OS=Hydrogenophilales bacterium CG18_big_fil_WC_8_21_14_2_50_58_12 OX=1974036 GN=queF PE=3 SV=1
MSSQPSKTLETFDNPNPERDYHIHMEIPEFTCLCPKTGQPDFATLYLDYIADRQCVELKSLKMYVWSFRNEGAFHEAVTNRILNDLVAATQPRFMRLTAKFTVRGGIFTNVVAEHRKPGWEPQLRVDLKEFEANSNTRG

SEQ ID NO: 46479 - protein, 139 aa, Hydrogenophilales bacterium
  misc_feature (1)..(139): tr|A0A1G0NGY2|A0A1G0NGY2_9PROT NADPH-dependent 7-cyano- 7-deazaguanine reductase OS=Hydrogenophilales bacterium RIFOXYD1_FULL_62_11 OX=1798415 GN=queF PE=3 SV=1
MPSTPVKTLETFPNPKPERDFHIHMEVPEFTCLCPKTGQPDFATLILDYIPDKTCVELKSLKLYMWSFREEGHFHEDVTNRVLDDLVKATKPRFMRLTAKFYVRGGIFTNVVAEHRKKGWQPAPRVDLMQFDHNSNTRG

SEQ ID NO: 46480 - protein, 273 aa, Hydrogenophilus thermoluteolus
  misc_feature (1)..(273): tr|A0A2Z6E084|A0A2Z6E084_HYDTE NADPH-dependent 7-cyano- 7-deazaguanine reductase QueF OS=Hydrogenophilus thermo luteolus OX=297 GN=HPTL_1741 PE=4 SV=1
MSGLLLGQSVAVPDGYAPELLTPIARATARATLGDPLPHWVGEDRWYGYEGSWLDAHGKPQAAVIEIGVPAHSPYLIESKSLKLYLNGFNQIRFAEGDALVARIQADLAAVAQAPVRVALHPLTQFCRAVASDFGDPGACLLDTVAADDFRYQYDPTLLRIDSPTLCEQRFVMDAFRSLCPVTAQPDWASLYLRCVGPRVDPASLLRYLVSFRCHAEFHEQCIERIYTDLWRLGMTELMVWGRFLRRGGLEINPLRASSEAWLPQQWLADPRQ

SEQ ID NO: 46481 - protein, 126 aa, Hydrogenothermus marinus
  misc_feature (1)..(126): tr|A0A3M0BN06|A0A3M0BN06_9AQUI NADPH-dependent 7-cyano- 7-deazaguanine reductase OS=Hydrogenothermus marinus OX =133270 GN=queF PE=3 SV=1
MENLKYGEKEILEAKLEPWENPYPDRNYTIDITFPEFSCLCPRSGYPDYATIKIRYIPDKTIVELKSLKLYLNKYRNQYISHEEATNKIYDDLYNLLKPRFLEVIGDWNPRGNVKTIIKVSSEENK

SEQ ID NO: 46482 - protein, 128 aa, Hydrogenothermus sp.
  misc_feature (1)..(128): tr|A0A432RD37|A0A432RD37_9AQUI NADPH-dependent 7-cyano- 7-deazaguanine reductase OS=Hydrogenothermus sp. OX=223 1113 GN=queF PE=3 SV=1
MEKKELKYGEKEILEAKLEPWDNPYPDRNYTIDITFPEFSCLCPRSGYPDYATIKIRYIPDKTIVELKSLKLYLNKYRNKYISHEEATNKIYEDLYNLLKPRFLEVIGDWNPRGNVKTIIKVSSENNK

SEQ ID NO: 46483 - protein, 277 aa, Hydrogenovibrio crunogenus
  misc_feature (1)..(277): sp|Q31DJ4|QUEF_HYDCU NADPH-dependent 7-cyano-7-deazagua nine reductase OS=Hydrogenovibrio crunogenus (strain XC L-2) OX=317025 GN=queF PE=3 SV=1
MTKPTSTADKSLLGQTTPYCQAYDPTILFPIPRQEKRDELGFDLKTLPFTGEDVWTGYEISWLNLKGKPQVGWAEFVFSAEAPNLIESKSFKLYLNSFNGTRFESEDAVIACWQNDLSQACGKPVGVRFYRLDESIVLQGNLPGHCLDALDIEVEDYQVNPDLLHTDSDQIVSETLNSHLLKSNCLVTGQPDWGSIVVRYEGAQINHEALLKYLISFREHNEFHEQCVERVFTDIMRFCQPKKLTVYARYLRRGGLDINPYRSNYEQVFDRARLVRQ

SEQ ID NO: 46484 - protein, 277 aa, Hydrogenovibrio crunogenus
  misc_feature (1)..(277): tr|A0A4P7P2A9|A0A4P7P2A9_9GAMM NADPH-dependent 7-cyano- 7-deazaguanine reductase OS=Hydrogenovibrio crunogenus OX=39765 GN=queF PE=3 SV=1
MTNPNSTADKSLLGQTTPYCQAYDPTILFPIPRQEKRDELGFDLNSLPFSGEDIWTGYEISWLNLKGKPQVGWAEFVFSADAPNLIESKSFKLYLNSFNGTRFESEDEVIACWQKDLSQACGKAVGVRFYRLNESVVLQGNLPGHCLDALDIEVENYQVTPDLLHTDSDEMVSETLNSHLLKSNCLVTGQPDWGSIVVRYEGAHINHEGLLKYLISFREHNEFHEQCVERVFTDIMRFCQPQKLTVYARYLRRGGLDINPYRSNYEQTFDCARLVRQ

SEQ ID NO: 46485 - protein, 280 aa, Hydrogenovibrio marinus
  misc_feature (1)..(280): tr|A0A066ZQP9|A0A066ZQP9_HYDMR NADPH-dependent 7-cyano- 7-deazaguanine reductase OS=Hydrogenovibrio marinus OX= 28885 GN=queF PE=3 SV=1
MSDHNEKNISTAQQSLLGQSTPYCHSYDPTLLFPIPRQENRDELGFDLQSLPFVGLDIWTAYEVSWLNAKGKPQVAIVEFAFSADAPNLIESKSFKLYLNSFNGTRFDSAEEVIALWEKDLSAASGGEVSVDMRSVDAEEYLGKLPGECLDDLDIEVDAYQVSPDLLVCESEEIVSETLHSHLLKSNCLVTGQPDWGSVVIRYEGKKIEWEGLLKYLISFRNHNEFHEQCVERIFTDIQKRCQPEHLTVYARYLRRGGLDINPYRSNFEDEFDLTRLSRQ

SEQ ID NO: 46486 - protein, 276 aa, Hydrogenovibrio sp.
  misc_feature (1)..(276): tr|A0A2I2A5R2|A0A2I2A5R2_9GAMM NADPH-dependent 7-cyano- 7-deazaguanine reductase OS=Hydrogenovibrio sp. SC-1 OX =2065820 GN=queF PE=3 SV=1
MPQQNAANQSLLGKHTPYCHTYDPGLLFPIPRQEKRTELGISSDSLPFSGQDVWTAYEVSWLNAKGKPLVAWAEFIFSAYSPNLIESKSFKLYLNSFNGTRFESVQAVIDSWQRDLSAASGAPVEVRLHDLSEDQQLVGSMPGECLDGLDIEISHYQVLPSLLQVKSSTEVAACWHSHLLKSNCLVTGQPDWGSVLIRYEGPEIDPEGLLRYIISFREHNEFHEQCVERIFCDIMAQCAPTKLTVYARYLRRGGLDINPYRSNFEKTFNLSRLIRQ

SEQ ID NO: 46487 - protein, 282 aa, Hydrogenovibrio thermophilus
  misc_feature (1)..(282): tr|A0A410H635|A0A410H635_9GAMM NADPH-dependent 7-cyano- 7-deazaguanine reductase OS=Hydrogenovibrio thermophilu s OX=265883 GN=queF PE=3 SV=1
MTNPVSPQSESTANQSLLGRATPYCRQYDPSILFPVPRQEKRDELDISPDALPFSGQDVWTGFEISWLNDQGKPQVGWALFFFPAASPYLIESKSFKLYLNSFNGTRFASAEAVKQHWITDLSQACGGEVKVELYGLDEPQTLIGAPPGECLDNLDIEVSDYQVRPELLTTVSSTPVSETLYSHLLKSNCLVTGQPDWGSIVIRYEGPQIDRENLLKYLVSFREHNEFHEQCVERVFVDLMRHCQPEKLTVYARYVRRGGLDINPYRSNFETDFDLRRLVRQ

SEQ ID NO: 46488 - protein, 143 aa, Hydromonas duriensis
  misc_feature (1)..(143): tr|A0A4R6YAT5|A0A4R6YAT5_9BURK NADPH-dependent 7-cyano- 7-deazaguanine reductase OS=Hydromonas duriensis OX=152 7608 GN=queF PE=3 SV=1
MELHANLQSLGNKKTQYRYDEPDASLLERFPNPFAHANINPNGVTGTLNMVCPEFTSLCPVTGQPDFATIVIDMQPDQWCVESKSLKLYLGSFRMHGEFHESCICRICNDLVTLLQPKWIKVEGRFTARGGIPLWPSAEYRQP

SEQ ID NO: 46489 - protein, 143 aa, Hydromonas sp.
  misc_feature (1)..(143): tr|A0A345DD81|A0A345DD81_9BURK NADPH-dependent 7-cyano- 7-deazaguanine reductase OS=Hydromonas sp. F02 OX=22680 24 GN=queF PE=3 SV=1
MELHANLQSLGNKKTDYRYDEPDASLLERFPNPFVQSSINPNGVTGTLNMVCPEFTSLCPVTGQPDFATIVIDMQPGEWCVESKSLKLYLGSFRMHGEFHESCICRICNDLVTLLQPKWIKVEGRFTPRGGIPLWPSAEYRQP

SEQ ID NO: 46490 - protein, 135 aa, Hyella patelloides
  misc_feature (1)..(135): tr|A0A563VYP8|A0A563VYP8_9CYAN NADPH-dependent 7-cyano- 7-deazaguanine reductase OS=Hyella patelloides LEGE 071 79 OX=945734 GN=queF PE=3 SV=1
MANSTENTSSSAVKYGEREISEGELITFPNPRVGRRYKVEISLPEFTCKCPFSGYPDFATIHITYFPHEKVVELKGIKLYINSYRDRYISHEESINQILDDFVAAADPLEVTIRGDFNPRGNVHTVVEVNHVKSN

SEQ ID NO: 46491 - protein, 290 aa, Hylemonella gracilis
  misc_feature (1)..(290): tr|A0A4P6UK84|A0A4P6UK84_9BURK NADPH-dependent 7-cyano- 7-deazaguanine reductase OS=Hylemonella gracilis OX=808 80 GN=queF PE=3 SV=1
MNTSDSTPENSQLGKASAYKDQYDSSLLFPLPRAAKREEIGIPQVKKGGTLPFLGADLWTAYELSWLNPRGKPQVAIAHVTVPCETPNIVESKSFKLYLNSFNHTKFADADEVKVRLRMDLSEAVWRGSGKSGFVGLRLLTPEQFDQEPIHELDGLSIDRLDVECTQYQPAPELLSAAFDEQPVTETLTSGLLKSNCLVTGQPDWGSVQISYSGPQIDQAGLLQYLVSFRQHNEFHEQCVERIYMDVMRRCKPTKLTVYARYTRRGGLDINPWRSSHPQTLPPNVRTARQ

SEQ ID NO: 46492 - protein, 292 aa, Hylemonella gracilis
  misc_feature (1)..(292): tr|A0A016XHM2|A0A016XHM2_9BURK NADPH-dependent 7-cyano- 7-deazaguanine reductase OS=Hylemonella gracilis str. N iagara R OX=1458275 GN=queF PE=3 SV=1
MAMTPPAPTPEDSQLGKASAYTDQYDPRLLFPLPRAAKREEIGIPQLKKGSTLPFLGADLWTAYELSWLNARGKPQVAIAHVTVPCETPNIVESKSFKLYLNSFNNTKFTDADEVKVRLRMDLSEAVWRGSGKSGFVGLRLLTPEQFDQEPIHELDGLSIDRLDVECTQYQPAPELLSAAFDEQPVTETLTSGLLKSNCLVTGQPDWGSVQISYSGPQIDQAGLLQYLVSFRQHNEFHEQCVERIYMDVMRRCKPTKLTVYARYTRRGGLDINPWRSSHPQTLPPNVRTARQ

SEQ ID NO: 46493 - protein, 153 aa, Hyphomicrobiaceae bacterium; identical to SEQ ID NO: 46036
  misc_feature (1)..(153): tr|A0A3S5JEZ8|A0A3S5JEZ8_9RHIZ NADPH-dependent 7-cyano- 7-deazaguanine reductase OS=Hyphomicrobiaceae bacterium TMED74 OX=1986774 GN=queF PE=3 SV=1
  misc_feature (107)..(108): Xaa can be any naturally occurring amino acid
  misc_feature (147)..(147): Xaa can be any naturally occurring amino acid

SEQ ID NO: 46494 - protein, 152 aa, Hyphomicrobium denitrificans
  misc_feature (1)..(152): tr|N0B6D8|N0B6D8_9RHIZ NADPH-dependent 7-cyano-7-deazag uanine reductase OS=Hyphomicrobium denitrificans 1NES1 OX=670307 GN=queF PE=3 SV=1
MTRKPQVRQLGRNVALPHNPDEAELERVANPHPDTHYAARFTAPEFTSLCPVTGQPDFAHLVIDYVPAKWLVESKSLKLYLASFRNHGAFHEDCTVAIAKRISDLIEPHYLRIGGYWYPRGGIPIDVFWQTGTLPKDVWLPDQGVQTYRGRG

SEQ ID NO: 46495 - protein, 152 aa, Hyphomicrobium denitrificans
  misc_feature (1)..(152): tr|D8JYX7|D8JYX7_HYPDA NADPH-dependent 7-cyano-7-deazag uanine reductase OS=Hyphomicrobium denitrificans (strai n ATCC 51888 / DSM 1869 / NCIB 11706 / TK 0415) OX=5828 99 GN=queF PE=3 SV=1
MARKPQVKQLGRNVSLPRDPDEAELERVANPHADTHYAARFTAPEFTSLCPVTGQPDFAHLVIDYVPNAWLVESKSLKLYLASFRNHGAFHEDCTVAIGKRIAALIEPHYLRIGGYWYPRGGIPIDVFWQTGTLPKDVWLPDQGVQTYRGRG

SEQ ID NO: 46496 - protein, 153 aa, Hyphomicrobium facile
  misc_feature (1)..(153): tr|A0A1I7NV54|A0A1I7NV54_9RHIZ NADPH-dependent 7-cyano- 7-deazaguanine reductase OS=Hyphomicrobium facile OX=51 670 GN=queF PE=3 SV=1
MAAEKPGATQLGKQVGIPDSPETAQLDRVANPHADTDYVARFTAPEFTSLCPVTGQPDFAHLVIDYVPGAWLLESKSLKLYLASFRNHGAFHEDCTVAIGKRIASLIEPKFLRIGGYWYPRGGIPIDVFWQTGTLPKDVWLPDQGVQPYRGRG

SEQ ID NO: 46497 - protein, 153 aa, Hyphomicrobium nitrativorans
  misc_feature (1)..(153): tr|V5SE45|V5SE45_9RHIZ NADPH-dependent 7-cyano-7-deazag uanine reductase OS=Hyphomicrobium nitrativorans NL23 O X=1029756 GN=queF PE=3 SV=1
MGRETTGITLLGGASEIPESPDKALLERVPNPHADTAYVARFAAPEFTSLCPVTGQPDFAHLVIDYVPDAWLVESKSLKLYLASFRNHGAFHEDCTVAIGKRLVALLEPHYLRIGGYWYPRGGIPIDVFWQTGGVPEGVWLPDQGVPPYRGRG

SEQ ID NO: 46498 - protein, 152 aa, Hyphomicrobium sp.
  misc_feature (1)..(152): tr|A0A218PNN2|A0A218PNN2_9RHIZ NADPH-dependent 7-cyano- 7-deazaguanine reductase OS=Hyphomicrobium sp. GJ21 OX= 113574 GN=queF PE=3 SV=1
MARKPQVKQLGRNVGLPRDPDEAELERVANPHADTHYAARFTAPEFTSLCPVTGQPDFAHLVIDYVPNAWLVESKSLKLYLASFRNHGAFHEDCTVAIGKRIAALIEPHYLRIGGYWYPRGGIPIDVFWQTGTLPKDVWLPDQGVQTYRGRG

SEQ ID NO: 46499 - protein, 152 aa, Hyphomicrobium sp.
  misc_feature (1)..(152): tr|A0A1E4CW17|A0A1E4CW17_9RHIZ NADPH-dependent 7-cyano- 7-deazaguanine reductase OS=Hyphomicrobium sp. SCN 65-1 1 OX=1660102 GN=queF PE=3 SV=1
MASATDHTTLGKQTALPQSPEKAVLDRVPNPHPDTLYVARFTAPEFTSLCPVTGQPDFAHLVIDYVPGDWLVESKSLKLYLGAFRNHGAFHEDCTIAIAKRLVELLAPKYLRIGGYWYPRGGIPIDVFWQTGPCPDGVWLPDQGVAPYRGRG

SEQ ID NO: 46500 - protein, 153 aa, Hyphomicrobium sulfonivorans
  misc_feature (1)..(153): tr|A0A109BCF9|A0A109BCF9_HYPSL NADPH-dependent 7-cyano- 7-deazaguanine reductase OS=Hyphomicrobium sulfonivoran s OX=121290 GN=queF PE=3 SV=1
MADQKPAVTQLGQMTALPESPETAVLERVPNPHPDARYVARFTAPEFTSLCPVTGQPDFAHIVIDYVPSGWLVESKSLKLYLGAFRNHGAFHEDCTVAIAKRLVELLQPHYLRIGGYWFPRGGIPIDVFWQTGTVPEGVWLPDQGVPPYRGRG

SEQ ID NO: 46501 - protein, 155 aa, Hyphomonadaceae bacterium
  misc_feature (1)..(155): tr|A0A0F2QEA3|A0A0F2QEA3_9RHOB NADPH-dependent 7-cyano- 7-deazaguanine reductase OS=Hyphomonadaceae bacterium B RH_c29 OX=1629720 GN=queF PE=3 SV=1
MSDNPIYQNLGQLGQHTAQPQSPEEAELERVQNPHAGTLYLTRFVAPEFTSLCPVTGQPDFAHLVIDYAPGDWLVESKSLKLYLTSFRNHGAFHEDCTVSIGKKIFDFTEATWLRISGYWYPRGGIPIDVFWQSGEVPKGLYVPDTGVASYRGRG
